United States Patent Application Publication US 2002/0048763 A1 - sequence listing, part 4

SEQ ID NO: 9550 - DNA, 577 bp, Homo sapiens
  MAP TO AC008166.1; EXPRESSED IN BONE MARROW, SIGNAL = 5.6; EXPRESSED IN LUNG, SIGNAL =  19; EXPRESSED IN HEART, SIGNAL =  10; EXPRESSED IN BRAIN, SIGNAL = 3.1; EXPRESSED IN HELA, SIGNAL =  13; EXPRESSED IN ADULT LIVER, SIGNAL =  32; EXPRESSED IN FETAL LIVER, SIGNAL =  38; EXPRESSED IN PLACENTA, SIGNAL =  32
ttccaaagtcaagggagagtgagagctctgtacacagctggatccatgtgtgcaaacaatgctgtcaagtgcctgtcttctcatctaggtttgattttcttctatgttgacttttctcttcaaatatggttgcagaattaaccaccagaaacttttggcttacatatactacacagctcagcaatacctctgaaaaatattgttttccccaacagccaaaatcaaagtttgagtgagtgctgtcatagatcatcttattcatgtcatctgtgaatccagcattgtgctagggaaacagactgctcttaagggtacagccagcacaagtccactccaattacacacactgataataggtgtattagtctgttctcacactgctataaataactgcctgagaccgagtaatttataaaggcaagaggtttaatttactcagttccacagggctgaggaggtcttgggaaacttacaattatggcagaaggagaagcaaacatgtccttcttcacacatggcggcaggaagaagaagtgctgagtgaagggggaagagccttataaaaccatcagatctc

SEQ ID NO: 9551 - DNA, 578 bp, Homo sapiens
  MAP TO AP000352.2; EXPRESSED IN BRAIN, SIGNAL = 1.5; EXPRESSED IN PLACENTA, SIGNAL = 1.4; EXPRESSED IN HELA, SIGNAL = 1.7; EXPRESSED IN LUNG, SIGNAL = 1.5; EXPRESSED IN HEART, SIGNAL =   2; EXPRESSED IN BONE MARROW, SIGNAL = 1.9
tgctgatcacttcaccaaggcgcctccgttactggtggtagaccactgcatggacagggcctaaaaccagggtgactttctttcccttcttctcaactgtaggaaaaaacgaggagtcattggagagtacagaaggcttccgggctgcagagcaaggtgtccagaagcctgctgcagaaaccccagcctctgcttgcatccctggcaagccctcagcatccacacccaccctgtgggatgggaagaagagaggggacctcccaggggagccagtggccttcccccaggggctgccggctggtgctgaggagcagcggcagtttctcacagagcagtgcatcgcctccttccgcctgtgcctgagccgcttcccccagcactataagagtctctaccgtctggccttcctctacacctacagcaagacccaccgggtgagtggctgccgggccaagggggcttggatcttcccagggcagctgggcatctttgaaggttggtgggcagagctaagacagattggagcttcacggtagcagcacatgggagggatgggcgaggagagctgcaggaggcag

SEQ ID NO: 9552 - DNA, 587 bp, Homo sapiens
  MAP TO AC007900.1; EXPRESSED IN PLACENTA, SIGNAL =  13; EXPRESSED IN BRAIN, SIGNAL =  15; EXPRESSED IN HELA, SIGNAL = 7.9; EXPRESSED IN BONE MARROW, SIGNAL =  24; EXPRESSED IN LUNG, SIGNAL =  12; EXPRESSED IN HEART, SIGNAL = 6.4; EXPRESSED IN FETAL LIVER, SIGNAL =  16; EXPRESSED IN ADULT LIVER, SIGNAL =  12
  unsure 31
  unsure 39
  unsure 50
  unsure 69
  unsure 86
  unsure 108
  unsure 132
tgtgtgatattttagctacggtgaaaacaangcaccccnatgcagacccntgctgtgctattatttccntgaagggaacctcagantgtatcagatttactccctggnatttggctagtatttccagtgaangtctcttcaactgctgtaaaggaaagatattgtatagttttgcagaaaacttttttagaatgtgtgtctggggctaggaaaggtgcctgctgtaattgtggtatgtagtcagacagagttgttcaggatgccgaactccttcactttgggacctttcttattgccattagaactcaggctgaggaggaaatgagtcatgccttcttgggccttcttcaggcctcttgcaggtctgcacctccctgcagagaattgacataaaagacttgaatgatttgcttgtgcagtggcgcggtcatagctcacagtagccttgaactcttgggctcaagtgatcctcccacctcagcctcctgggtagctgggactacaggcatgcaccatcatgcctggctaatttttttttcaagttttttgtagagatggggtctcactgtgttgcccaggctagtctc

SEQ ID NO: 9553 - DNA, 561 bp, Homo sapiens
  MAP TO Z97055.1; EXPRESSED IN ADULT LIVER, SIGNAL = 1.5; EXPRESSED IN FETAL LIVER, SIGNAL = 1.6; EXPRESSED IN BRAIN, SIGNAL = 2.2; EXPRESSED IN HELA, SIGNAL =   2; EXPRESSED IN LUNG, SIGNAL = 2.3; EXPRESSED IN HEART, SIGNAL = 1.9; EXPRESSED IN BONE MARROW, SIGNAL =   2
gtgtttaacgggggttgttgcagtttggaaagataagaaagttgcagggatggatgctggtgatgtttgcacatgacgtgaatgtacttaatgcaactgaactatacgtttaaaatggttaaaatggcaaattttatgtcatgtatattttaccagaactttaaaaggaaaaaagagagcactgcaaccagagccaggacactgggccaaggatggaggcgcagaggtgaggcaaggctggcactgggcccatcagtgttccctacctgttgctgccagcgtgggttgggaaatgtcgggccaggtgtgtggacgtggaaggtccagatgcagcctggggcactgggaggaggacagcagcaggcaaagggctgctctcacgtatgttctgtcccccaccctgaatctggttcctatcccgtttttgcccatggctggaattagccagttctctcattgacagaaatgtctctgtgaacagatcaaggtgtctggcaggttggcagagaagctgagacctcccacagagtcagtcctcatggtgctgggtttggtaactgg

SEQ ID NO: 9554 - DNA, 565 bp, Homo sapiens
  MAP TO Z98884.11; EXPRESSED IN PLACENTA, SIGNAL = 3.7; EXPRESSED IN HELA, SIGNAL = 5.3; EXPRESSED IN LUNG, SIGNAL = 6.6; EXPRESSED IN BONE MARROW, SIGNAL = 4.5; EXPRESSED IN HEART, SIGNAL = 5.3; EXPRESSED IN ADULT LIVER, SIGNAL = 4.6; EXPRESSED IN FETAL LIVER, SIGNAL = 3.4; EXPRESSED IN BRAIN, SIGNAL = 4.6
agttctacccagcagttggcagattatcagctgtggactccagcatgtttctgataattatgcaagcaacaattctgtagcctcaagtaagaccacctgtgaacttgatcattatctggcccaaatatgaagataaactataactttggagtttgtttcctatttgtattcacattctgcttcctaaatcagttttctaaattatgcctgcaattaggcattggtcaggggtgaatggctcttttcacagagagtagccaaccagagacctttgctttgatatcatcaactgcagagaatgctgttgatgggaatgctggaagcagaaactttgtcatcggaaaaacttttcttgtatgcatgagactcaacatcaggatccacagcttaaagatgggaattcaggtatgaaagaaaacaggcaaggaggcactgagggagaaagacacagactttatcgctctgtggctcattgttactggaatattctaaaactcttgttcacatgctattatgacttataaagcagcaacagctgaggcgcaccaggacacagcttccattt

SEQ ID NO: 9555 - DNA, 561 bp, Homo sapiens
  MAP TO AP000111.1; EXPRESSED IN FETAL LIVER, SIGNAL = 1.8; EXPRESSED IN ADULT LIVER, SIGNAL = 2.3; EXPRESSED IN BRAIN, SIGNAL = 2.5; EXPRESSED IN PLACENTA, SIGNAL =   2; EXPRESSED IN HELA, SIGNAL = 1.7; EXPRESSED IN HEART, SIGNAL = 1.5; EXPRESSED IN BONE MARROW, SIGNAL = 3.2; EXPRESSED IN LUNG, SIGNAL = 1.5
aaacagtgcctgcccctaccctgatgatgacttagacctgtgtccagatgtcccaggagtaaaattcaggcatctcacaagtcctgtgcctgtgaggagctggaaaaaacaggtgggaagaaaaaccctaggcagttgcttccttctctaacaccaccccttccaaaccctcaggccaggggaactgagaaccaaaaagtgcccctttctaaaccactcctccctggggaccaaagatggagcactgacctgaaacattgttttgctgggtgtggagtaactgagggtggcgcagttgtctgggactgatctgtccccaccccatctctccatagatattgcctaacagagaagccaactgacctcgccactgccatggagaatgaggtcaagatagcaagatagttgagaagtaaaccatttaaaaaaaattgaattatagattccatcagaagaggaaatgttggaaaagtccaagaagttaaaattagcctaataagcttaataggaaataaagagaaatgaaacaatactaagacaacattaaaaaggaaccacgca

SEQ ID NO: 9556 - DNA, 552 bp, Homo sapiens
  MAP TO AL049758.11; EXPRESSED IN LUNG, SIGNAL = 1.7; EXPRESSED IN ADULT LIVER, SIGNAL = 2.3; EXPRESSED IN HELA, SIGNAL = 2.1; EXPRESSED IN PLACENTA, SIGNAL = 1.5; EXPRESSED IN BONE MARROW, SIGNAL = 2.8; EXPRESSED IN HEART, SIGNAL = 1.5; EXPRESSED IN FETAL LIVER, SIGNAL = 2.7; EXPRESSED IN BRAIN, SIGNAL =   2
gaagaaagctgggtcttttggatcgtttctactcctttttcacttcttcaccattctccccactgagcttgaacaagggaatctgctggccatccttgggctctaggaagacctcatcaaggtgccacctctgaaaggggcacttctggatgagctgacatggagatggccctctgacttggatccagagctaggaatcttcaacttggcatcagcaatgtccacaaagttgtgcttggtgagtttgagacagtgaatgttgagaagagggcccagagctccctgtgccttgggatggctatgcacctgctccaatgccaactggtaatacaaagccctggaaaaagtcttttgtatgcggtaatacacaagggccaagcccccagtaccgaacacattgccgaaaaggaccattttttccttgaggcactggcatcctgctgcctggatacttttgccacctcacagcacaactctcttgaaaatcatcaaaggcaagttgttctgtaagcgacagaagcaccatgctgcagagagcatgaggagcccttc

SEQ ID NO: 9557 - DNA, 565 bp, Homo sapiens
  MAP TO AC008166.1; EXPRESSED IN ADULT LIVER, SIGNAL =  24; EXPRESSED IN PLACENTA, SIGNAL =  38; EXPRESSED IN BRAIN, SIGNAL = 2.4; EXPRESSED IN HELA, SIGNAL =  15; EXPRESSED IN BONE MARROW, SIGNAL = 2.1; EXPRESSED IN HEART, SIGNAL =  12; EXPRESSED IN LUNG, SIGNAL =  21; EXPRESSED IN FETAL LIVER, SIGNAL =  37
aagcaaaatagcattgtttcatttcaactttaaattattcctttggggaaaatacatactcactttaaatcaagtaataaaacctaaaattgttattttaccaattacctgccagagagaaaaaatgttaatgtaaatatgagaaatgctataaacataagtattaaataaatgcctcattggtagcaaggctgaggagtgttttctcttcaaggataaaatatttttcttttaagtgatgcatttttattttgttaatttccttctaaattctcatcctagtgctaaaatctgttccccgaagtgttactgataatcaacactttactgtcaatatggtttacaaaatcataaaagtgactaaatatacaacaataaagtattgattaaattcaaagcaatatagtcattccttggtatcaatgggaaattggttctaggaatgcagtggataccaaaatctgcacatattcaagtctatcagttggccctgtgaaaaccacagatatgaaaagttggctctttcctatggcaggttttgcatcctgacaataccactcaccgg

SEQ ID NO: 9558 - DNA, 566 bp, Homo sapiens
  MAP TO AC008166.1; EXPRESSED IN HEART, SIGNAL = 3.3; EXPRESSED IN LUNG, SIGNAL = 4.1; EXPRESSED IN FETAL LIVER, SIGNAL =  12; EXPRESSED IN ADULT LIVER, SIGNAL =  15; EXPRESSED IN HELA, SIGNAL = 3.7; EXPRESSED IN PLACENTA, SIGNAL = 9.3
catttaatctaggtatgtatggccgattcaacatttgaaacatgaatgaaatccaccacataagcaggccaaaaaaattcacatattaacttattaactaatgcataaaatttcgaaatccaacagcaattcaccataaaatctttcagacaatagaaatcaagaattactattgtagaaattcctcgacttgaataaaaatgtttacaaaaacctaaaccaacaaaatgaacattaaaagactagaaggtttcctccacaagattggaatcaaggcaaggaattcctctcctaccacttctagtcaacattgtactggatctcagaccaataaggcaagaaagagaaagatcagtttaatggattggaaagaaagaaataaaattgtcattacttgcacatgacatattgtctatgaagaaaatcacaatgtatctacaatagaaaaaaaaaattcccgaaaccaataaatgactatagcaaatagtgctatagtattgtgtatttggtgctatagtattgtgactatagcaaagtcacaatacacaaaactcaaaatatggcaa

SEQ ID NO: 9559 - DNA, 565 bp, Homo sapiens
  MAP TO Z83844.5; EXPRESSED IN BONE MARROW, SIGNAL = 1.5; EXPRESSED IN BRAIN, SIGNAL = 1.4; EXPRESSED IN HELA, SIGNAL = 1.3; EXPRESSED IN HEART, SIGNAL = 1.3
cacccaaccgcctctactccccacttttctcgtcatgttcgcaagagcctcatgaggcagaatagagcagtgttaaccatccccatttttcagaaggggaaactaaggccctgagagtcatcctcacttagggcccttcaacgagcttgcagtgggtccctggctgtcccacatctcctcctgttggaggtgggagcagaggggctggggtgctgggagtgggacagtccctcagaggagtggctgcatttgctcataggaagtccgaggcagcgggggccttccaggcccaggacgagggacggtcacagcagcccagccaaggccagagccaacttctccgaagacagtccagccctgcccccagcaggcaggtgagcactgccagctgtctggggccccgcaccccaaggggcggccactgcctcttccctcccgctagaagccaggcagggggcttggacaggaaggtcctctatgaaagggtcggagtccaatcatggggatccagctctcccctctccccaacggccagcagctcttggcaaaatgcacaagaccccac

SEQ ID NO: 9560 - DNA, 541 bp, Homo sapiens
  MAP TO Z97055.1; EXPRESSED IN LUNG, SIGNAL = 3.4; EXPRESSED IN HEART, SIGNAL =   3; EXPRESSED IN ADULT LIVER, SIGNAL = 6.5; EXPRESSED IN FETAL LIVER, SIGNAL = 9.3; EXPRESSED IN BRAIN, SIGNAL = 1.4; EXPRESSED IN PLACENTA, SIGNAL = 7.5; EXPRESSED IN HELA, SIGNAL = 3.7
ccaagggagacgttgcttccgtgggcacctttggcaaaggtagttccctttcaataatttctaaggcaatatgtttacttgacagttatttagattatgatttaaagaccttaggggaagcagggcaaaagcaagacatccagatgtatcccagtgagtcacagcggtgtcctgcttaccatcagccaggctcacgcccccactgtcagagctaacttggctgtgctcctactgcagcagacctaatgctcagcggtcacgacactgttacatgccttcgtgatttttaattcgtagatactgccagtctgtggcaatgaggagtttggcttattagtgtttcagaaaataaggggaattttagtctgactcattcctttttggctactctcaacgtaagagtgaattaaggaggccaagctccagttctacaaggaagtttacagcataattgtctgaggctcctaagttggctaaccttcacacacacacacacacacacacacacacacacacaaaagtcttcctaccaggttccatg

SEQ ID NO: 9561 - DNA, 578 bp, Homo sapiens
  MAP TO AC004032.7; EXPRESSED IN PLACENTA, SIGNAL = 1.6; EXPRESSED IN BRAIN, SIGNAL = 1.9; EXPRESSED IN HEART, SIGNAL = 1.6; EXPRESSED IN LUNG, SIGNAL = 1.6; EXPRESSED IN BONE MARROW, SIGNAL = 1.6; EXPRESSED IN ADULT LIVER, SIGNAL =   2; EXPRESSED IN FETAL LIVER, SIGNAL = 1.8
ctctcctgcttgaaccttccatggctccccagtgcctcgcagctttgcatgccccaggctgactccctctcgggcctctgacctcatctctcagtgctctctcctgcactgaagccccaactatacattctctcagcagagccctgatccttccacctccacacctttgctgctgcggttttttctgcctagagcacctgcccctcctcaccccaggtgactcctgccatcctacctggctgtcagccccatggcgatgtttctctaacacccctactctgagatgtgcatacttctctccctgctggcagatggcacccctggctccggctaccatgatggtaatgataccgctagctgcaggcttgctggcttcagggatgtgctcacacatcttgctctggcagaggggtgttctgagggcagggcccctcaccaacaggccaccaaacacagaaaacatcacgggggactttggagtcagatgaccaaggtctgtatcctggtccctggcattgttcccagcagctcaagcttgggcaagtcactttccctctccgagcctcacctttcttctc

SEQ ID NO: 9562 - DNA, 567 bp, Homo sapiens
  MAP TO AC009290.1; EXPRESSED IN HEART, SIGNAL = 1.3
  unsure 156
  unsure 212
  unsure 231
  unsure 275
  unsure 296
  unsure 323
  unsure 504
tgatgtctgcacatttgttggacctcttgcagactttataagttagtttccatgtggaaagacctttgtctagggttgttgcaagggaacttactggataaagtgcagcttttctggtaccagtgagaatgccagaaatgtagtctctgtgctgcntgtggtaactgaggtcagtgttgatgaagatttcaggggatcctcagcaaccaacnactgtatatgtccacagtnggcagcaagtgttgttagagtctttgatggtgatactttttaantgtcctcatgacctccttttnctcataccagagaagttgttactaagngggaatctgtcctggaactgtatctgtcttgtgtactcatttgtagtggtggtggtactggtatctgatggagaggccagagaggtgaggttaggcctgaagcatgggcaaacatgaaggggctatggctctggaacccagggtgataatagaactggtacctggggcactgactcccccnactgccaagtctgtaacagtattcaaagaaagggtgtttgtaaagcagcagaggagtctgcag

SEQ ID NO: 9563 - DNA, 574 bp, Homo sapiens
  MAP TO AC008272.1; EXPRESSED IN PLACENTA, SIGNAL = 6.6; EXPRESSED IN BONE MARROW, SIGNAL = 5.6; EXPRESSED IN HEART, SIGNAL = 2.7; EXPRESSED IN FETAL LIVER, SIGNAL = 3.4; EXPRESSED IN BRAIN, SIGNAL = 3.4; EXPRESSED IN HELA, SIGNAL = 2.5; EXPRESSED IN LUNG, SIGNAL = 4.2; EXPRESSED IN ADULT LIVER, SIGNAL = 3.7
ggaggacaacataagcccaggagtttgagaccagcctaggcaacacagtgagactccatctctacaaaaaataaaaagaattagctgagcatggtggcacacatctatcgtctcagctacttgggaggctgatcacttgagcctaggaggtagaggctgcagtgacccgtgatcacactatggactccagcctgagtaacagagcaagatcctgtctgcaaaaaccaaaaccaaaaccaaaaccaaaaaaaaaaggtatatggacactaggatagagaaggtctttcttcctctgaagcctatgcaaagaaggcagcagggatctgataagtttcagcttcctagatttagctatgcctgaagctaggccaggctaaatatgcagattttctagctacataagcctatatgcttgagctataagaagttaagtttctgtcacactgagtctttgaaagttttcattcccttgtttggttgaatactactctttttttaaaaaacaaacacttttattttaggttctggagtacatgtgaaggtttgttatataggtaaacttgtgtcacagggg

SEQ ID NO: 9564 - DNA, 556 bp, Homo sapiens
  MAP TO AC004832.3; EXPRESSED IN PLACENTA, SIGNAL = 1.9; EXPRESSED IN BRAIN, SIGNAL = 2.5; EXPRESSED IN HELA, SIGNAL = 1.7; EXPRESSED IN HEART, SIGNAL = 1.4; EXPRESSED IN BONE MARROW, SIGNAL = 1.6; EXPRESSED IN LUNG, SIGNAL =   2; EXPRESSED IN FETAL LIVER, SIGNAL = 2.9; EXPRESSED IN ADULT LIVER, SIGNAL = 2.7
tcctgagatttggaggggacaaatatccaaactctattagtgaccattggccaaagctacaaagtgggtctctttccttccccaatgctgcctcctggagattcaggactggagctgagcatctagaccctgagtaagactggaggctagaagctggagcttgggaagcctgcctcttactggctgtgtgcacacagtgggagctggcttgccaggggtgggcatcagcggatgctgatgggcactttgcagatctcagctctggccctggccttaggttctttgcactgctccacctcctggtgcaagtcccctccactcagctgccacagaggagctctggcaacagcactgctcatcttagtcccaaaggcacaaagggtccacactctctacctcagaccctgcttcaacatcgaggcctttcctttggtggtcaagggtgagaccaccctgtcccccgaccctgcatcacccacactaagccatcctctcccaaggattccatgacatcattggcccaaattgtgggtgctgccaccgtcttccaagaagg

SEQ ID NO: 9565 - DNA, 585 bp, Homo sapiens
  MAP TO AC007900.1; EXPRESSED IN PLACENTA, SIGNAL =  12; EXPRESSED IN BRAIN, SIGNAL = 2.9e+02; EXPRESSED IN BONE MARROW, SIGNAL =  22; EXPRESSED IN HEART, SIGNAL = 6.3; EXPRESSED IN LUNG, SIGNAL =  13; EXPRESSED IN FETAL LIVER, SIGNAL =  12; EXPRESSED IN ADULT LIVER, SIGNAL = 9.3; EXPRESSED IN HELA, SIGNAL = 8.8
tcaatgaattttcccaagtgcttaatttaaagatttccatacagtaaagcaactctctgggtgcagtcatatatcagcctgacactgcatgtgacagtgttttttttaaaactgcattttggatatctatgcaatgatttgctcattacttttattacttcccagttaagtgcaaagtgatccaattttagcagaatttcaaatactatggggcttttctgtatatttatgcccagtgtctatcctgcacgggacaggtacttacttccacaaatactaattatgtacctcatactaataagacacatactatgattgtaaggaagaaagaacataaatacaataatcactttcaaaatatatggcagaatatcatcaatgccagacagaatacttacacaaagttctggagaggttgtaagaagggagaaattcatctccctacagtttcatgaaaaatgtggaaactgacatgggctaaagtatagctgataattataactgtgagaggaatcatattccaggtagtccaggcattccctcagcctaaaatattattctgttgcccacctctgtcctcctttc

SEQ ID NO: 9566 - DNA, 567 bp, Homo sapiens
  MAP TO AC008022.1; EXPRESSED IN HEART, SIGNAL = 1.7
  unsure 262
  unsure 382
  unsure 490
  unsure 510
  unsure 511
  unsure 514
  unsure 519
aagactgcatactgccctggggcccaagagcctctgtaacttcatgtctctgaatccccagtgacatcccccaacatccacccagagggctgaagtggacaatgttgtttggacccagcagtgcagcagggtcctcagcactccagcttacacagtgtactataccccagggaatggatggtatagtgcattggagaggttatccctgggacaaagggaaccaaagcatgcactccccagcacaagaaagtcactctgcttngctgccactgagagcaacctcatccattctagcagcagggcagggtgcctatgcatgcaccctaaggacaggctctccccacctgtagccactgctgccactgccactgggacgaagtgntggtcctcagagactgagatacacctgcctggacctgctgccaccaacagaaattccacccccttcagcagcaagaccactgcacacttgcacatgccctgagggacnaacaatcctggcctgctacnntgnctgcntgctgctactgccaacaccctgccgggggccaaagtacacattcccca

SEQ ID NO: 9567 - DNA, 579 bp, Homo sapiens
  MAP TO AC008166.1; EXPRESSED IN HELA, SIGNAL = 8.5; EXPRESSED IN BRAIN, SIGNAL = 3.2; EXPRESSED IN PLACENTA, SIGNAL =  18; EXPRESSED IN LUNG, SIGNAL = 9.8; EXPRESSED IN HEART, SIGNAL = 7.7; EXPRESSED IN FETAL LIVER, SIGNAL =  18; EXPRESSED IN ADULT LIVER, SIGNAL =  23
gatttaatttttgtattgagcatggatattatgtttactgaacaaaacacaattgagatggcaagtgatggcaagtaattaataataataagttcataacagagttaccacaacccataatttaccaccatttccaaaatggattatatcattagtgactcacagcaggctagaagtacaaaactctcaagtggaaatagtcttgaaatagctgataaaacaagctgtgaagctgagaaacactttagcacttatgtattcatacttcactgtgcctgtcttaataacacatccaggagctcctatttcagagtcagggacttcagagtgttccaaagcagacaaatcattcactttagagttcagaaaagtatgttcatatcctgcctgtctcttccagttattaactgtattatccaggcaagtcaagtaacctcttgggatttcatatttcccatctgcaaaatgggactaatacctgatttgacaactcatgcattgtcttgattttcaactgaggtgtaatatatgaaaccatttttataaattgaaaacacacaaatttatagcatgcttttc

SEQ ID NO: 9568 - DNA, 981 bp, Homo sapiens
  MAP TO AC006548.19; EXPRESSED IN HEART, SIGNAL = 1.4; EXPRESSED IN BONE MARROW, SIGNAL = 1.4; EXPRESSED IN FETAL LIVER, SIGNAL = 1.6; EXPRESSED IN PLACENTA, SIGNAL = 1.4; EXPRESSED IN BRAIN, SIGNAL = 1.6
tgggggagaggaataaggtcttgccttgattgaattagactctagatatactagagtctgatttctaagcaacctgcaaagtgagtttttaatcaccattttacagatggagaaactaattcagaaagggaaaatactcaaggccacaaggtagtaaactcccaaactagacaaacctcaggtctgcccaattcctcttcctgtgttttctccatatcatctcactacattgggctgtgaacttccccgcctgcctccctggggcagtcctggcctcctctcacccctgccccttcccttctttctctctcttaggagtgccagcttctcccagggttctgaggccccattcatcatgaggagaaacacagccatgcaaaatcttgcccagcacagtggatacagtgttgatggggtcagcggtcacatccatggcttccatagcctttccaagcccagccagcacaatgcagaattcagaggcagcacccacagaatcccctggagcctggcctcccatggccacaccagaggcagcctcacaggctctgaggcggataatgagggtgtgtaccccttcaaggcacccagaagcaccctgttccaggagtttgggggccacctggtgaacaatagtggtgttccggccaccccactctcagtgcaccagattcctaggacagtcacgttagacaagaacctctatgccatggtggtggccactcctgggcccatagcctcccttcccctgcccaaggcaagtcaggcagaagcatgtcagtggggcagccctcagcagagacctttagtcagtgaaagtagcaggtggtctgttgctgctgccatccccaggcggaatacccttcctgcagtagacaacagccgatgtcaccaaggtcagtatgagccctcactgagacccagagggagaggggaggtggcaccgggttctcagtggttagctagtccttggtctcccat

SEQ ID NO: 9569 - DNA, 572 bp, Homo sapiens
  MAP TO AP000353.1; EXPRESSED IN LUNG, SIGNAL = 2.2; EXPRESSED IN HEART, SIGNAL = 1.8; EXPRESSED IN BONE MARROW, SIGNAL = 1.7; EXPRESSED IN FETAL LIVER, SIGNAL = 1.5; EXPRESSED IN ADULT LIVER, SIGNAL = 1.7; EXPRESSED IN BRAIN, SIGNAL = 2.6; EXPRESSED IN PLACENTA, SIGNAL = 1.8; EXPRESSED IN HELA, SIGNAL = 1.7
tccatttccaaaggtgggccagttggatgatatcagtggttttccagtcctttttccaaaagaagcctttctgtcatgcccaaatggaaaacagatgaaagggcagctgttccagcagaggcaggaagggccaggccccacccgctcaggctgcacccccctgcagcctaggctcctgagcaggccgggtgtgagcccagcggaggctgtgggctctcctctgccctgccaccagcggccatcccagagaagtcaacccttaggtcagtggccagcctcctttctggggtggcttcagtctggaaatttgccctctttccctttctcttccctttttcctccctctgctttcccccaaccccacacacaacttttttcctatttggcaagtttgaccaagttgcatctgagagagctgcattgggattgaaatccaaaagcagagcttggtgcctgattaccatgatgacaggctgcagctgacaagtgctcctggggaccaagaggaacagaccaaggactccctcacacatgggcctctgtgatgggtgtcctatacccacctgtgagcc

SEQ ID NO: 9570 - DNA, 564 bp, Homo sapiens
  MAP TO AC009313.2; EXPRESSED IN BONE MARROW, SIGNAL = 5.6; EXPRESSED IN LUNG, SIGNAL = 3.1; EXPRESSED IN HEART, SIGNAL = 4.1; EXPRESSED IN FETAL LIVER, SIGNAL = 4.4; EXPRESSED IN ADULT LIVER, SIGNAL = 4.3; EXPRESSED IN HELA, SIGNAL = 4.3; EXPRESSED IN PLACENTA, SIGNAL = 4.4; EXPRESSED IN BRAIN, SIGNAL = 2.9
atatgttggggaggagggtggtcacagggacacagagactctgagggtctgtcctgatatcctccagagacagctgcttagcttagctgaaatgctgaccaaacccctgttctaagaaaggccctcagcacataggtgggtggagatggtcgagaaaaggccaaggattgccagtatctgaaccagggactgagtctctcttggaagtaagtattgaaaattgaatctgaatccgatacaatttggctggagctctgtctgagcagggatgacctcaggtgactcaggttcaggatatcatcagtgggcacctaaggacacagtgcaggacaagcttggcagcagcatggaaaagggtgagaacgccacacactttgtccatagccaagaaatcagggccgtggaaacctaactgggctttgaaattagcacttcacggagcggagattgattcctccttggttctgtttccccgacgctggcagcagattctgtctaataattagctggtgatagtccatatcatttccttcctaggatgctccaaagtttcacaaagcctga

SEQ ID NO: 9571 - DNA, 978 bp, Homo sapiens
  MAP TO AC008151.1; EXPRESSED IN PLACENTA, SIGNAL = 1.2; EXPRESSED IN BRAIN, SIGNAL = 2.1; EXPRESSED IN HELA, SIGNAL = 1.4; EXPRESSED IN HEART, SIGNAL = 2.3; EXPRESSED IN BONE MARROW, SIGNAL = 1.5; EXPRESSED IN LUNG, SIGNAL = 1.5
tcctgcacagatcacagacccatgggccaattaaacctcctttctttatcaattacccagcctcaggtatgtctttaaagcaatgcaagaatagcctaatacaggtagggtccagccaccaaggttaacctgacctctaggggattctgacacatgcacgcacacacccaaaagcttgagaagcgggtggcttctgtgagttgaggcttccccttgccacccctgcaggtggattttgaagacgtgatcgcagagcctgtgggcacctacagctttgacggcgtgtggaaggtgagctacaccaccttcactgtctccaagtactggtgctaccgtctgttgtccacgctgctgggcgtcccactggccctgctctggggcttcctgttcgcctgcatctccttctgccacatctgggcggtggtgccatgcattaagagctacctgatcgagatccagtgcatcagccacatctactcactctgcatccgcaccttctgcaacccactcttcgcggccctgggccaggtctgcagcagcatcaaggtggtgctgcggaaggaggtctaaagccaggtggggcaacagcggtggcagggcagggggtggtgggccagactggtccccgggggacttcttcacaggggctgctggcgagctctttctctttagggactgctccataccccatgatggagcacacggtgtagggaagccagaaagaaaagacggcccagccacagaagcacaatggcccttcgctctcccccagccccaccatgatgcccccatgcctgggcgtgggggaagatcatttgccaagaggcagctactgcaagtctttgcgttcacttgtactgtaacaacataaaccagcacgcggttcccacccggggccaacctctccacgcgcactcaggaaagtgaccagtgaccactggcgttaggaaggtggctccagtaaagggttttggctgc

SEQ ID NO: 9572 - DNA, 574 bp, Homo sapiens
  MAP TO AC008009.4; EXPRESSED IN HEART, SIGNAL = 1.4; EXPRESSED IN HELA, SIGNAL = 1.7; EXPRESSED IN PLACENTA, SIGNAL = 1.6
ttttcattagtttagatgttttctgtggtttgggcactgctaggtactagagatacaaagttgaaagacccatagagtggaatactttgttatttgttttgaattttaaagatgttttaatactttgatccattgtggtatataaaactgaaatttttaattagctaattagtgtttatgtagctgttttcctcctcagctatagatttcatttataaagaagttgaaaaagttgtctccctttggcaggcaaaagatgtgattgaagagcatggtccttcagaaaaggcaataaacggcccaactagtgcttctggcgatgacatttctaagctacagcgtactccaggagaagaaaagattaataccttaaaagaagaaaacactcaagaagcagcagtcctgaatggtgtttcataaactgaagaagttcctagtttacagttcttttacattacatttacaatagtgcttgtacaagcttgccaaagatagaatatggatcgccagtctttacatcgcactttcagttcctccatttggaattcaaaaaggggagggatcctgaagaaat

SEQ ID NO: 9573 - DNA, 559 bp, Homo sapiens
  MAP TO Z82188.2; EXPRESSED IN LUNG, SIGNAL = 2.4; EXPRESSED IN FETAL LIVER, SIGNAL =   2; EXPRESSED IN HELA, SIGNAL = 2.1; EXPRESSED IN BRAIN, SIGNAL =   3; EXPRESSED IN PLACENTA, SIGNAL =   4; EXPRESSED IN HEART, SIGNAL = 2.3; EXPRESSED IN BONE MARROW, SIGNAL = 2.3
gggacttccaagcctctacctcttatagaaaaggagattgaggctcagagaggggaagtgattggtccaaggtccttcagcaagtgggtccttcaactcagccaagatgcacaaaggcgggacaaggtctcaagccagcatccagagacccagggacagaggcagtgacaacacactgctggtgaccatggccttgagcaggagctgcctcacctaattctccctccctgctcaggtttgcagccagccctcccttggcacttagaggcacctgataaacgtttgatagttgatggtgagtgggcaggaatccttgttcccattttgtatataaggacaggaccagagaggggcactcaccagcatcaggaccgagctggggcaaaagcggctttctaggctctctgctagggtttccctgccctctcctggctgcctgccttcctctagcctgggccagggcatctaaggcagctgagcagagtgtcccggggagagacagcagcagagagagcccagcccacccaagtctggggttgggggttgggtagtgaggaat

SEQ ID NO: 9574 - DNA, 550 bp, Homo sapiens
  MAP TO AC006548.19; EXPRESSED IN HEART, SIGNAL = 1.5; EXPRESSED IN LUNG, SIGNAL = 1.6; EXPRESSED IN BONE MARROW, SIGNAL =   4; EXPRESSED IN ADULT LIVER, SIGNAL = 2.2; EXPRESSED IN FETAL LIVER, SIGNAL = 2.8; EXPRESSED IN HELA, SIGNAL =   2; EXPRESSED IN PLACENTA, SIGNAL = 2.2; EXPRESSED IN BRAIN, SIGNAL =   2
tttcggcaacactctcacagacacaccctggatcaatacttcatatccctcaatcctatcaagttgacactcattattaaccctctcactccccttcatatatatatgtatatagtcctctaattctgtcactctagagaatgctgactaatacatctacacttctgatgatctatttcttttattttaggtcatttatttcccctgggttgcctacactcgcttcttcccactcccctatgaaggacaatataagcctctggacctcactaggtcagggcatgtccctgcttgcactatccatgacactttcctcttttactctttagcaatgagggaatgtcatccttacccagatgccagccacctgtctcacatccaggacagagagtctccatctcctctccagcaaatacccatgtatgtgggcatggtggcatgcccctgtgatcccagctactccataggcttagcggggagaatcacttgtgcttgagaattcaaggttgcaatgagccatgatcacaccactgcacttcatgctgggtaa

SEQ ID NO: 9575 - DNA, 566 bp, Homo sapiens
  MAP TO AL035681.13; EXPRESSED IN LUNG, SIGNAL = 3.8; EXPRESSED IN HEART, SIGNAL = 3.1; EXPRESSED IN ADULT LIVER, SIGNAL = 6.2; EXPRESSED IN HELA, SIGNAL = 3.9; EXPRESSED IN PLACENTA, SIGNAL = 6.4; EXPRESSED IN BONE MARROW, SIGNAL = 3.3; EXPRESSED IN FETAL LIVER, SIGNAL = 4.5; EXPRESSED IN BRAIN, SIGNAL = 4.5
ggccttgaccttgtcttcactctgagaggaacacagcgaaaagcggggtgagcttcaaagtcacctgggggggcccctggactccaccatccagactctgctgatagtgcccacaactgagtctagccggaatctcatcgtgaagaccaaggctgctggggcagacccaggcctcggggccccgtgggcgagccggctcaggactcgaggtgagggaggttggcgggcatggctggggcagcttctgtgcagaccccacccacctccctcccgggcctgctgttccttccggcctcaccttgagcagacccatgtgcacgagcagcctggtgaggaaggtgttggagttgaaggacgaggagttgaaagccttctgcatcagggcatctgtagggcagaagcagcaggggcaggctgctggctatggcagagggctgggccaaggcacccagggttcccccaacaccgcgcagacacaggctcgcctgcctcctcgccctgacgaagaggcgaacacgagagggacggcagagacacaggaaccagagggagtggcagttggcatc

SEQ ID NO: 9576 - DNA, 589 bp, Homo sapiens
  MAP TO AP000189.1; EXPRESSED IN HELA, SIGNAL =  14; EXPRESSED IN HEART, SIGNAL =  12; EXPRESSED IN LUNG, SIGNAL =  17; EXPRESSED IN BONE MARROW, SIGNAL =  22; EXPRESSED IN FETAL LIVER, SIGNAL =  27; EXPRESSED IN ADULT LIVER, SIGNAL =  15; EXPRESSED IN PLACENTA, SIGNAL =  20; EXPRESSED IN BRAIN, SIGNAL =  22
cccaattcagattaagggtaggacatccctaggttaaaattctcttattaaggttctctaagaagtcagatttgagcatacagatggactactactgcagcaatcactgactgagcattttacaaccctatttttaaggtgcctatgtagtttttccctcttgtcacagcttaattgaggtataactggtatctattatgccgtgcatgttttaaatatacattttgataagtttttaacatacgtgaaatcatccccacaatcaaaatcataaatatccattacccccaaaatgtcctcgttgtacacagttttgaaataaatgttgttgggattataagaggaagtaggctgggcacagtggctcatgcctataataggaagtgcatcatgttttcagtaatcaaatctgcctaatgatccatctagcttcctatttatgcaacacatcttacttgtagataattaccaaattcttgaaggccaggctgggcggctcacatttgtagttctagctacctggaagactaaggtgggaggattgcttgagctcaggagtttgaggccagcttgggcaacaaagcaagac

SEQ ID NO: 9577 - DNA, 567 bp, Homo sapiens
  MAP TO Z82201.1; EXPRESSED IN HELA, SIGNAL = 1.5; EXPRESSED IN HEART, SIGNAL = 2.3; EXPRESSED IN LUNG, SIGNAL = 1.5
tctggacttcacccatctccattctgcctctggatgtgttccctccacccacggggtgaggatgcagtctaactccctgataccctcggccctgtctcggggttcgccttattgacttgatcgccctaactttattcaccctcttttacttctcatcacaaaaagagctcagatcatcttgtactggcctctatgtttgaatggctgctgtctacttctgttttgtctgttacaacttgcacgcgccacgcacacctccaccacgacaagccacatgcttttccccagagcccatgcctcatctgtcccggcctggctcaggctgcctcatctatggctccctcctttcctggccagcccaggcttaggccttacgattcagtgtgggggccacctcctccagggagtcctccttaaagggatcttttccttgtgcctccagaggatgctccagttccttcgacaacagccaattactatgaatatgacttgtctgtttaccatctgtgtctgggattagaccgagctccctggggtggggctggtagctttcatccccagcattta

SEQ ID NO: 9578 - DNA, 574 bp, Homo sapiens
  MAP TO AL008582.11; EXPRESSED IN HEART, SIGNAL = 5.1; EXPRESSED IN FETAL LIVER, SIGNAL = 8.4; EXPRESSED IN ADULT LIVER, SIGNAL = 4.6; EXPRESSED IN PLACENTA, SIGNAL =   6; EXPRESSED IN HELA, SIGNAL = 3.7; EXPRESSED IN BRAIN, SIGNAL = 3.3; EXPRESSED IN BONE MARROW, SIGNAL =   3; EXPRESSED IN LUNG, SIGNAL = 4.9
tgaatgagctggaactttgcaagaatattcatattataaatgtctcatctgatggaggaacgtgtgcatttagagagagggagagttttcaaggtttatggcaactttgtggaggacctgggtaactcttacccttggccaaaggaagaggttttcctgtctggcttctgaggttggagggggcacttagcagtgaaccttaagtctgggtacatgtaaccctgctgaggggctgtgcaggccgctcctacggtcctttggcctgaggcagggcgggaggcatgcaagccagtgggggaaaacccctctgaagctgggcagccctctacctgggccccgggagccgtgctccttggaacgcaaagggccgaggagcatctggttttcatggcaaagctctactccagagctcctttaacatctgctaattaagtgcaataaatttttctagaaaatggcaaagatgacttccaggtggatattgctctcttacggtgttggggatgccagaacaccacttggttttatttttctaagtgcatgtgatgtgatagagtgtgtggggctctgtgtc

SEQ ID NO: 9579 - DNA, 548 bp, Homo sapiens
  MAP TO AP000350.1; EXPRESSED IN FETAL LIVER, SIGNAL = 2.2; EXPRESSED IN BRAIN, SIGNAL = 2.3; EXPRESSED IN HELA, SIGNAL = 1.9; EXPRESSED IN HEART, SIGNAL = 1.8; EXPRESSED IN ADULT LIVER, SIGNAL = 1.5; EXPRESSED IN PLACENTA, SIGNAL = 3.4; EXPRESSED IN BONE MARROW, SIGNAL = 2.7; EXPRESSED IN LUNG, SIGNAL = 1.5
attgcccatgaaagaaccagcatggtgccctgcacaagggaggtgctcaggcgagttggttcctgctccagggggagctcagaagacacggtgcctgttgtcattgcctgttctgcagaggcatggagccctgttggggagaaggcttgtttcatctagcacccccacgccaccatccccagaaggctgactggcatttctgtccacagcacattcaggaattcaccaatgagacatggcaggcgcgtactggagagccactgcccgatcacctagtcctgcttatgtggtccctcatcgtgtctctgtatcccctgggaggcctctttggagcactgcttgcaggtcccttggccatcacgctgggaaggtaagtgcttcctgcataccccctgaatgccctttaatgaggagcgctgcagcctgcaggctgaggaatgtggaagaaggaagaggcccggcaagctccaggcccagatcagctcctcatccagcctcttactctgcctggagtttcaccttgcaagacacgtcttcaagggtttggt

SEQ ID NO: 9580 - DNA, 566 bp, Homo sapiens
  MAP TO AL008582.11; EXPRESSED IN FETAL LIVER, SIGNAL = 2.3; EXPRESSED IN HELA, SIGNAL = 3.2; EXPRESSED IN PLACENTA, SIGNAL =   4; EXPRESSED IN BRAIN, SIGNAL = 2.2; EXPRESSED IN BONE MARROW, SIGNAL =   2; EXPRESSED IN HEART, SIGNAL = 2.4; EXPRESSED IN LUNG, SIGNAL = 2.7; EXPRESSED IN ADULT LIVER, SIGNAL = 2.5
caaagatttgcttcccttgcattcttccccttgatgcaaaataactgccttttattggactacacccagtttgactcacagaacttgaagaaattataacctagatgactagatgaacacagtaatctccatagaccataggagattgcagtggatggcaaagtgttactaaacaaaaggaggaaaggtcagatggaaagctgtacacttacgtccttctcctggatggtgcactccttacaataataggcatcagagaccccaggtcctccacagatcacacagcgcccctggtaagatccatagttacactcatcacatatgcgcaccagagtgcagggacgcacataggagtcacaaatcacacacttgccatcacctgtaaggaagagaatggagtcatgctcacaagttcttcagtcctctgctatctcctgccatggggaaatatactagtctcctgggaaatacactagtctccttttgacagtgactttagggccctcctcttggcatcacaaaacttggtttccccagtgtccatctcaagcccctcaacacataca

SEQ ID NO: 9581 - DNA, 571 bp, Homo sapiens
  MAP TO AL008723.8; EXPRESSED IN BONE MARROW, SIGNAL = 3.4; EXPRESSED IN LUNG, SIGNAL = 2.7; EXPRESSED IN HEART, SIGNAL = 2.4; EXPRESSED IN FETAL LIVER, SIGNAL = 1.3; EXPRESSED IN PLACENTA, SIGNAL = 1.6; EXPRESSED IN HELA, SIGNAL = 1.4; EXPRESSED IN BRAIN, SIGNAL = 1.9
tgatgcaaagacagagtccgtccacggtgactctgagacaagtgagaaaatctctgccttaaacagaaacgtgttttacactggacacaatgtgaaacagcaaggatgacttatgaaaagccagtttcacaaggtgattctatgagctgttccaggcaagagggagagagcagacagcaagatacatgtgtagaagagcatgtgagatcaataagacagtggtgcaggtcaggatgaggcaccctgagcacagagatgcaggcagagccactcagacagacctgggagggacttggggcaacagcccagagagggcctggcttctgtgcagcccttaccgtgagagggggcggatggggaggggcagcccttacggtgagacggggtggatggggaggggcaggttcttgggtttctgctctcaaggtgcccactatcagacagggggtgaggagccatgattaaggggtatcacatggcagttattttgtggtgatgaaacagttttgtatcctgactgtgttgattgttgcacaaatctatacatggaagaaagctgcatagcaccaca

SEQ ID NO: 9582 - DNA, 571 bp, Homo sapiens
  MAP TO AP000354.1; EXPRESSED IN BRAIN, SIGNAL = 1.5; EXPRESSED IN HELA, SIGNAL = 1.2; EXPRESSED IN BONE MARROW, SIGNAL = 1.6; EXPRESSED IN LUNG, SIGNAL = 1.3; EXPRESSED IN HEART, SIGNAL = 1.6
ctgcagtctccttgtctccctctgctggaatattcttctctcacttcatctgatcattgccttcaaaactcagctcattttcttatttccttgcccttttcatgtcccttgttttcctccgattaaattaatgttccaaactcaaaagaaaaacaactcagctcaggcatcaccttgcctggaaggcttccctagtcctcctgcctcctgcagacttgtctggcaccctgtgcatttgggatttggcacactatgtctcgtctgcggcctccactggacaatgagaccgtaagtgtgtggcttgacagaaagttgttgactctgctggggtgctggtacagtgctgggcacggcagtgttacagaggaagtgagccacttagtttctgcccttaggagcttttattctagttgcacttgaccctgacagctgtgagacacctcccagtagtgcgtaccaacttttcaaagtctgtttaattgtaccttagtgtctgattccaattttatttcttgaaggaggggagtgtctctaatgtcttattttggcacccagagaccaggtaggcatc

SEQ ID NO: 9583 - DNA, 565 bp, Homo sapiens
  MAP TO AL008723.8; EXPRESSED IN FETAL LIVER, SIGNAL = 1.5; EXPRESSED IN ADULT LIVER, SIGNAL = 2.4; EXPRESSED IN BRAIN, SIGNAL = 2.3; EXPRESSED IN HELA, SIGNAL = 2.5; EXPRESSED IN BONE MARROW, SIGNAL = 5.7; EXPRESSED IN LUNG, SIGNAL = 2.9; EXPRESSED IN HEART, SIGNAL = 2.6
ctcttgcattgtccctgctctgtagggagttagaaaactgggggcatcagcagcagcaggcctgtgtcactgtgggtggggccagggaggggccgaggggcatcctgggtgagtctctcccacggctcctgtttgacttgcccatggccactgtcacaaatgacccctaatttagtggcttaaaataacacacatttattctctcccaggtatggaagtcagaagtccaaaatgaggcctgagctgctaagatcagggtgccagcagggccgggctccttccgggggctctgagacaaatccatttccagaacttttccagcttctagaggacgcccccagctcctggccctttcttctaactacaaagccagagctcagcatcttcagatctctctcctgatcttctctccccccactttctgtcttcctctccctggactcccctctccttctctctccctccatccccacatctcctcctctcactgtgaccctcctcctgccttcctctttcccttataaagactccaccctggagcaatgcggaaaacccagaattgtct

SEQ ID NO: 9584 - DNA, 985 bp, Homo sapiens
  MAP TO AP000353.1; EXPRESSED IN PLACENTA, SIGNAL = 3.3; EXPRESSED IN BONE MARROW, SIGNAL = 4.5; EXPRESSED IN HEART, SIGNAL = 2.9; EXPRESSED IN FETAL LIVER, SIGNAL = 4.9; EXPRESSED IN ADULT LIVER, SIGNAL = 4.5; EXPRESSED IN BRAIN, SIGNAL = 2.8; EXPRESSED IN HELA, SIGNAL = 2.9; EXPRESSED IN LUNG, SIGNAL = 3.6
cagtcacgctgctgagtcctggccaccagagtggtgaggtgttgggaggcagaggtggtgcttgtctctgtccaggggtggcctggctgaggttcggctggtccacgagcatcagtttccccacctccatggtggtggaatgtggagagccataggagcctggtgcatgcacccctctgtgcactgtccgagggtcccctccccacttagaaccatggaatcaggccacagtccgcctctttaatcttggactggaggatatacagatcgagagggtgggagagtggccccaggcaagaggcctgcggagggatagaggggccggttcaggaccaccaggggctctgggaaagggggttagggatgaggctcagcctctcatctgcccagctggtccccgccacctcttccactctcagctggactcccctgccaggggtccagatcctgccagagtagttggtcccccagccatgtccggcctggacacaggactcatggtggggccagacttcagctctgggcagagcagtgtcttagtagcctgcggcctccccactcttcctcaggtccgagacggcgtacacacaggccccctcctgggacacagcctggaccacgttcaggaagaagggcctctgggtctggttctggccacggtcttggagtcccctctgcacctcctggagaggagagaaagcaggttcacaggggagggcagctcagcccatctccaggagggagaggcctctgcaagaaatgagaaaaatgatcaaaaggcaagacggagaggaagagggcctgaagacacaggaagaggggaggaccagatgggagcatggaagagatccaaaggcccatagaggacaagctcagcctccagggactatgtacgaaggacaccacccaggcccgaagacctccaaatgcaagttcatgtctgttctggatccaaggacaccagggccttgaggtgcaaatctga

SEQ ID NO: 9585 - DNA, 983 bp, Homo sapiens
  MAP TO Z97055.1; EXPRESSED IN LUNG, SIGNAL = 4.9; EXPRESSED IN BONE MARROW, SIGNAL = 3.1; EXPRESSED IN HEART, SIGNAL = 2.9; EXPRESSED IN FETAL LIVER, SIGNAL = 5.4; EXPRESSED IN ADULT LIVER, SIGNAL = 3.1; EXPRESSED IN BRAIN, SIGNAL = 3.3; EXPRESSED IN PLACENTA, SIGNAL = 2.6; EXPRESSED IN HELA, SIGNAL = 3.8
gtaggttgctgggtggagagccttcccaccggaatgcctgagaggaggcgaggacgccgggcccctccacgcttttccctgggctccacgctgctctgtgaaagggaagggaatcatccatctggaatatgaaggaagaataacaaaacctcactgtccaccccagagaagacacggtcacagaggctgcatgccacactgcgggtgccacagggagcctgtctacacagcgtcctcacactgcaggtgccacagggaccctgtctacacagcgtcctccgactgcaggtgccacagggaccctgtccacacagcgtcctccaactgcaggtgccacagggagcctgtctacacagcgtcctccaactgcaggtgccacagggaccctgtctacacagcgtcctcacactgcaggtgccacagggaccctgtctacacagcgtcctccaactgcaggtgccacagggaccctgtctacacagcgtcctcacactgcaggtgccacagggaccctgtctacacagcgtcctcacactgcaggtgccacagggatcctgtctacacagcgtcctccaactgcaggtgccacagggagcctgcctacacagcgtcctcacactgcaggtgccacagggatcctgtctacacagcgtcctccaactgcaggtgccacagggaccctgtctacacagcgtcctcacactgcaggtgccacagggatcctgtctacacagcgtcctccaactgcaggtgccacagggagcctgtctacacatcaaactgaaggctccacagggacccagtctacacagcatcctcacactgcaggtgccacagggaccctgtctacacagcgtcctcacactgcaggtgccacagggacccagtctacacagcgtcctcacactgcaggtgccacagggacccagcctacacagcgtcctgacactgcaggtgccacagggagcctgtctacacagcgt

SEQ ID NO: 9586 - DNA, 562 bp, Homo sapiens
  MAP TO AP000344.1; EXPRESSED IN PLACENTA, SIGNAL = 2.6; EXPRESSED IN BRAIN, SIGNAL = 2.4; EXPRESSED IN HELA, SIGNAL =   2; EXPRESSED IN HEART, SIGNAL = 1.8; EXPRESSED IN LUNG, SIGNAL = 2.2; EXPRESSED IN BONE MARROW, SIGNAL = 2.5; EXPRESSED IN ADULT LIVER, SIGNAL = 1.9; EXPRESSED IN FETAL LIVER, SIGNAL = 2.8
ttcagggacttagagacaagccttgtactttgctgaatcttctccaggctaagttgcacccctgccccaacaatgttcttaaattacctacaagggttctatacccctacttattttttttacagctgttaccaagtatccccagtcctcctcttttccatgttccaaatccaaataaataacaaaagggtaggatttgttcacctctctattcaaagggcaaccctgtccccaaaactgccccctctgtcctcacctggctgagggtcagcagctccttggaggattttgtcctcaggcacctcagtggggcctcagagtctgatgcattgtacccacagaattgtgcaactacctgcagctattttcagagaaagaccaggtcagagcatgattttgaaagcatctaggaaaatgaaacctggaaaatgccctcctatcagccacaggcttgtcctccatatataagtccatcctgctacccctgcctagccccatgcccctataaaggaaggtgcacgtggcagacaggttgccactgcctcaccctcactctcttgcc

SEQ ID NO: 9587 - DNA, 567 bp, Homo sapiens
  MAP TO AC002472.3; EXPRESSED IN PLACENTA, SIGNAL = 1.3; EXPRESSED IN HELA, SIGNAL = 2.5; EXPRESSED IN LUNG, SIGNAL = 1.6; EXPRESSED IN BONE MARROW, SIGNAL = 2.2; EXPRESSED IN HEART, SIGNAL = 5.1; EXPRESSED IN FETAL LIVER, SIGNAL = 2.9; EXPRESSED IN ADULT LIVER, SIGNAL = 3.5; EXPRESSED IN BRAIN, SIGNAL = 1.4
tatggaccagccacccttacccttccctaaatggacccgtggccaagggcttctggggcatgacctgcctttggcagttctgagcctcaggactcaggactgatacagggctttcagcttgaagtggctttgagggaaatgtgcagacacaaatgttgctcaaggagcacacttcagtaggtgctgcagttacggggctcgtccgttcctattggctgcgctttgtgtctcctcagggagaaacaaagacagcacctccctcgggagagtgccggccctgttggaatgcagcggccgcaaaggatccagccagaggacaccccgccagcccagcgctaccaggctgcccaagtggggtgggcctggaagaaggcagcaggtgcggggcagcacctaggatgggccagagacttgtcacaccactgtccccagcaaaggctacgtgttgtctccttcagttgataataagtctttctgagatgcagagggtccgggtcatatgttctctactgttttttgatgatattatggcacaaacatagaatgaggtttttatgcaggtcctgg

SEQ ID NO: 9588 - DNA, 561 bp, Homo sapiens
  MAP TO Z82188.2; EXPRESSED IN HELA, SIGNAL = 1.3; EXPRESSED IN HEART, SIGNAL = 1.5; EXPRESSED IN PLACENTA, SIGNAL = 1.2
acgcatacactcactcagcgttaagtgcgtgctcctgcccaccagtgtacacagaggtcgcccagtctccacctctgtggcttgcacatgctgtccccaccacccggtgcccttccctcttccaagccagctctcctaacccaacccctacacctgacaaccccttccccagttctccccatgtggaatccatccttaccactcccgttcatactgtttcaagaactcgttacgtgtcagcggaatcatcctggattggattgcctcccccatgtgacgggctcctaggggtccagccctgttcccggccagaatccagccccacggatacctgggtattggggctgaaggaccctcagaggtcccctcgttcacaggggagccccaggcggtgggttctctgagtgccatccccgcggcgaccacgcaggggagcccgcgggctggctttggtcacctaggaaaccgacgaggggtggggcaaggagggccagacccctgccccgactctggtctggctcctcctgtgggcctcggctctggagagctgagagaccccag

SEQ ID NO: 9589 - DNA, 541 bp, Homo sapiens
  MAP TO AL022238.1; EXPRESSED IN LUNG, SIGNAL = 2.9; EXPRESSED IN ADULT LIVER, SIGNAL = 4.6; EXPRESSED IN FETAL LIVER, SIGNAL =   3; EXPRESSED IN HELA, SIGNAL = 2.7; EXPRESSED IN PLACENTA, SIGNAL = 8.5; EXPRESSED IN BRAIN, SIGNAL = 2.7; EXPRESSED IN BONE MARROW, SIGNAL = 3.7; EXPRESSED IN HEART, SIGNAL = 2.5
gctcagagaggcgaaatgacttgttgttggtcatgctgcttagtaattctgtgctgagtctcgaatgcaacctcttattccagtgctgtttgtatatactccatcagcttcagaagactgtttgcattccagcgaataaaaaatagacaagttctattcataggagttattctggatgatttaatttcctctcttttctcaggcgctatagtggcccctggtaaaacccggggagggtcaccgtacaaccagtttgatatcatccctggtgacacactgggtggccatacgggtcctgctggtgatagctggttacctgccaaatctccaccaacaaataaaatcggaagtaaatccagcaatgccagttggcctccaggtattgtctaggaaatgcttttcccaggatagcatttgttttgtaattgtcagtttcaggttcagaatacattgcttttgtgattcatgttactaaggtacttgcttttatttttttcattcaataattgtctgttagaagcaaggcatgtgctgtgggaag

SEQ ID NO: 9590 - DNA, 587 bp, Homo sapiens
  MAP TO AC004832.3; EXPRESSED IN FETAL LIVER, SIGNAL = 9.2; EXPRESSED IN HELA, SIGNAL = 4.5; EXPRESSED IN PLACENTA, SIGNAL = 6.9; EXPRESSED IN BRAIN, SIGNAL = 4.7; EXPRESSED IN HEART, SIGNAL = 3.5; EXPRESSED IN BONE MARROW, SIGNAL = 4.8; EXPRESSED IN LUNG, SIGNAL = 5.8; EXPRESSED IN ADULT LIVER, SIGNAL = 5.9
accttcctgccatcccaccctctggcagcccacagcgttttccagacagatggacaacacctcacttttacgggtgggtaagggtgggagaagcccacattccaccagagccctgggtgctgagggctggggaggggcagggtgccacccttctctggtcctggtgccaccctgtagacagatgaggcccagccccacccccgctgctcaccttctgagtttgcagctcacactcatgcaacagcagctcacagactttgatgcgcttccggatcatatcctgcttggaggctgacagcaggagacccttggggtcgagggacccaatgatgttgaagtacacagggcagccttcgtagtcgtagccacaaagaccacccgagtcatacagctggatgacctggaagtgtgggtaaggtcccgactcaatccagctcaccaggctgggtccctactccatcaggtggctggacgtggtaggtgggagatgtcaggggtgaggggcctcagatggcctgggggatgctgctcgaggctcacctcagggggctgccatgtgacaatgttgtccaggtcttgttgcttcc

SEQ ID NO: 9591 - DNA, 591 bp, Homo sapiens
  MAP TO Z83840.7; EXPRESSED IN HEART, SIGNAL = 2.1; EXPRESSED IN HELA, SIGNAL = 1.7
ccagagagaggttggaaacgaggacggtagaatgatctggaggcttaggggaaaaaactggaggcttagagcgaagaaacagactgttaaaaagtaaagataatggaaagacccgtttatcagagtggaagaaccaggaacagggtggaggtgggaatgatgaagaaattcaaatacaggggaagagaaacctgagagggaccacagctgatgatggtacagagacccaggctcctgcaggagatgaccagggacagttaagagttgaaattgctgaagagatccaggtacaagggcaaggaaataagaatgacggtggagttgaggatgttgcagaactccaggatataggaagccagagaaagtgcacagatgaggatgttggagagcctcgagcaccaaggggaggaaacaaggatctggtcagaggagaggatgctgtgagggacagtctccaagtcgactgttctgggagtgagaggcccacaggcaggaagcacagcctaccatggcctccagccttcactggctatggatgtgggacccgggaacaggaacaggcagtggctgtgaatggtttcatctctgccc

SEQ ID NO: 9592 - DNA, 589 bp, Homo sapiens
  MAP TO AC004032.7; EXPRESSED IN LUNG, SIGNAL = 1.9; EXPRESSED IN BONE MARROW, SIGNAL = 1.9; EXPRESSED IN HEART, SIGNAL = 1.3; EXPRESSED IN FETAL LIVER, SIGNAL = 1.8; EXPRESSED IN ADULT LIVER, SIGNAL = 2.2; EXPRESSED IN BRAIN, SIGNAL = 1.7; EXPRESSED IN PLACENTA, SIGNAL = 1.9; EXPRESSED IN HELA, SIGNAL = 1.3
gagtctcctccttccaactgcagttggacaaagagagaaagtggaggattgtgggagtggggggtggtttatgggccaggcctacatgtggcttatgtcacgtctgcctccatgggccagaactcaatcacacagccacagctaagagcaaaggagactgggaaatgaggcctccttgtgtgccaagaagaaagcgattgtagtgaagaatccgtctctgccccagagggaatggacgaatgaacaaatggaatgatctctcacataccttccaactcaagatctcgtaaaattccaagtcctgctggtcctggaaatccgatgccaattgctgcctgccctgtttcatctccactgtcggaataactgaaggcaagggctcagggctggaaatgtgcagccccagggacagacagaaagagctgccagggcctgctggccccagataaaagcagcccgagagatctgggctttcctgagagacacctgtgtggaacagttctcactcctgcagagcaagggggaattgaatccatttgctcaggatgacttcatactgggttctacctgggatacagcagacttggga

SEQ ID NO: 9593 - DNA, 563 bp, Homo sapiens
  MAP TO AC004832.3; EXPRESSED IN LUNG, SIGNAL = 2.1; EXPRESSED IN HEART, SIGNAL = 2.1; EXPRESSED IN BONE MARROW, SIGNAL = 2.5; EXPRESSED IN FETAL LIVER, SIGNAL = 2.9; EXPRESSED IN ADULT LIVER, SIGNAL = 2.2; EXPRESSED IN PLACENTA, SIGNAL = 4.6; EXPRESSED IN HELA, SIGNAL = 2.4; EXPRESSED IN BRAIN, SIGNAL = 2.7
tgtggtggcgtggtatttctattggttagtgctggtgtagcctctggctaccaagcccctcagggttgggaagagacccagagctggagagttcagaagaaactcagggaccttgagtcctgcccttccccgtggcagaaggagaaactgaggctggtgtaggagtctctcccttcactcacctgggccagcgacttctcctgcgatgggctcaggtcacccacttgtccactcatgctgcccatgaatgggtccaggctccactctgtggctccctccaggtggcctgccttttgccagctggtagccatgcccacatttatcaccacccagaaatcccactacttcctgtgagcctcagggcaacaggtggggctcattccttactaggtgcctcaggcatggggccctggattcagcctgccctgggttcacatcctcacttgcaaaattaggacagcgatgtttcctcggagcgttgatgacatgttgaaattgacaccacctgatttcacacacacacggaggcggctgttcaccctgcctctcagtcccctaccctc

SEQ ID NO: 9594 - DNA, 586 bp, Homo sapiens
  MAP TO AB016897.1; EXPRESSED IN BRAIN, SIGNAL = 2.1; EXPRESSED IN PLACENTA, SIGNAL = 8.4; EXPRESSED IN HELA, SIGNAL = 3.2; EXPRESSED IN LUNG, SIGNAL = 4.1; EXPRESSED IN BONE MARROW, SIGNAL = 1.9; EXPRESSED IN HEART, SIGNAL = 2.8; EXPRESSED IN FETAL LIVER, SIGNAL =  15; EXPRESSED IN ADULT LIVER, SIGNAL = 8.4
ggaaataatttgttttcctggtttacatctttaatttgtattcagtaacagggcaggaaaaagatgcttgattcagacctcatagtgatcatgtttatctgagtagactcctttcatatgtgccatttctcagattttagactagccctttggaaaaagtatactcatttttctctgtgtctgtgtgtgtgtgtgtgtgtgtgtgtcatttctctctgtctctcacagacacacacacacatacccctacctttgtgttcaacacatttgtagcaatacattttggacctttctggtattggagcggacgtatcgcagatgtgtgggacttgtcttgcattactgtgcacagctctgtcagcccagaaagccagtccttagcttgtaaaatgcagaaagtcacggatggttacatggttaagatttaataatcactcgtcatagtaattagagaagtacctgttgttgatttttacatattatgaataaacacactcattgctttgaagtccaagtcacatgtctggctctgcagtggagatggtgctgggcacacaggagggtgaggaggatgaggatgggcact

SEQ ID NO: 9595 - DNA, 588 bp, Homo sapiens
  MAP TO AB016897.1; EXPRESSED IN PLACENTA, SIGNAL = 1.7; EXPRESSED IN BONE MARROW, SIGNAL = 2.4; EXPRESSED IN HEART, SIGNAL = 2.1; EXPRESSED IN ADULT LIVER, SIGNAL = 1.9; EXPRESSED IN FETAL LIVER, SIGNAL = 1.7; EXPRESSED IN BRAIN, SIGNAL = 2.9; EXPRESSED IN HELA, SIGNAL = 1.6; EXPRESSED IN LUNG, SIGNAL = 2.2
ttcctgggagatggtaggctgttttgagaaagtgatgatcttgagaagccttgcagatggaaggagaagcctgaggcagataagctggaacctcaggaagatcagggagcccagagccagagccccagaacaggagggtgcaggcaggggctggagagagccaggggccacctggcactacccggtggtaaaagagtgtattttctaagaccatggcaggaaatgtgacttgttttcttcacgcagtgcaaagcctctgcagggtttctaggaggggctggggccacccaggtgatgtcagtggctgtcgctctggttgccgggatgggaggggaaggaatggaagcccggagcaggctcctgcaggagttggaggctttgaggaaccagatggtggtgtggccacccagataggagagcatggaggcatgggctggggtgggcacaggtaagctctagagttgtttgcatagctacagagatgccaaagaacagattagaaaagaggacaaaactcagcttggctttcaaacaaattggtaaccatggctttctgtttgaaaactactttcacatgtcttcagtggg

SEQ ID NO: 9596 - DNA, 562 bp, Homo sapiens
  MAP TO AC004032.7; EXPRESSED IN BRAIN, SIGNAL = 3.4; EXPRESSED IN PLACENTA, SIGNAL = 3.9; EXPRESSED IN BONE MARROW, SIGNAL = 4.9; EXPRESSED IN LUNG, SIGNAL = 4.6; EXPRESSED IN HEART, SIGNAL = 2.9; EXPRESSED IN ADULT LIVER, SIGNAL = 4.6; EXPRESSED IN FETAL LIVER, SIGNAL =   5; EXPRESSED IN HELA, SIGNAL = 3.7
acctctacaaggggctccacctgtgcctctacttcccctctgcacaatggatgtgatcatcatgctctgtgcattacatcaccaagtcctctctgaggctacaggtagggaatcagaagcctgagaggaatggggactcgtgccaggtcatccaacagtgagcagaagggctgagggcaagtcacttaatctgtctgtgtcttggtttccccatctgtgaaatgagatcttagacctaccgggcagggctgccaggagaatgacatatgatattaccaataacataattaccgctagtacctatcacatgttcattcttttaaactcaataattcctcatgtaaccctggaggaagcatctattctcctagtcccatttctcagataaagacgctgctagggtcagcccactacagcacacaagtcaaaactggcccactccctgtttttgtaaataaagttttattggaacacagccttgctcatttgtttacattttgtttatggctgttttcctagagttgcatcagattgtaagcattgggcagagttctccagagaa

SEQ ID NO: 9597 - DNA, 977 bp, Homo sapiens
  MAP TO AL035701.13; EXPRESSED IN PLACENTA, SIGNAL =  33; EXPRESSED IN HELA, SIGNAL =  26; EXPRESSED IN LUNG, SIGNAL =  36; EXPRESSED IN BONE MARROW, SIGNAL =  53; EXPRESSED IN HEART, SIGNAL =  32; EXPRESSED IN FETAL LIVER, SIGNAL =  33; EXPRESSED IN ADULT LIVER, SIGNAL =  17; EXPRESSED IN BRAIN, SIGNAL =  11
gaaggaaggctggaacagtgcctcggacaccggaaccgctcattgctaataatgatggcctggctgtcaggcagctcgtagctcttctccagggaggaggaggatgcagcagtggccatctcctactcgaagtccagagcgacatagcatagcttctccttgatgttgcgcacgattttccacttggccatggtgttgaagctatagctgcgctaggtagggatcttcatgaggtagtcagtaaggtcctggccagccaggtccagatgcaagatggtgtgagggagggtgtggcgctcgtagatgggcactgtgtgggtgaccccatctccagagtccatgacaatgccagtggtgcaaccagagctgtggagggtcagcacggcctgaatggccacgtacatggcctgggtgttgaaggtcttaaacatgatctgagtcatcttctccctattggccctggggtttagcggggcctcggtcagcagcaccacctgctcctccagggccacgcacagctcgttgtagaaaacatggtgccagatcttctccatgtcgtcccagtttgtgacgatgccatgcttgatggggtacttcagggtcaggatgccgcacttgctctgggcctggtcgcccacgtaggagtccttctggcccatgcccaccatcacgccctggtgccgggggtgcccgatgatggaggggaatatggctcggagggcattgtcccagcaaagctgcttttcacatgccggagccattgtcaatgaagagcgcggggatctcttcttccattgccactggcagaggagcacgcagcagcgggaggacatggtgcacgtgctggtggtgacgactgagcatctttataaatcttatcataaaactgaaaaatattttatacaacactacataaaaactttctacctcttatggaaaaaaaaaatgcctcattacctgatctgttctcagcgatt

SEQ ID NO: 9598 - DNA, 558 bp, Homo sapiens
  MAP TO AC006992.2; EXPRESSED IN FETAL LIVER, SIGNAL = 3.7; EXPRESSED IN HELA, SIGNAL = 2.4; EXPRESSED IN BRAIN, SIGNAL = 1.5; EXPRESSED IN PLACENTA, SIGNAL = 3.4; EXPRESSED IN HEART, SIGNAL = 2.2; EXPRESSED IN LUNG, SIGNAL = 3.3; EXPRESSED IN ADULT LIVER, SIGNAL = 5.1
tttatgaaatgcctttgggacaaagcagaactttcatgaattcatttagaaactcagaggagaaaaattaagacattactaaaataagttaattttcaaattatgactatgtacagatttttctacaatttcaattttatatgttggaaacagaacagctataagtttgaataacagacaagagctccatccaaggctaaatactatcactcacttattttccaaatatttatgagtggctgctatatgccaggcatcatgctacccatgaaatgtcatgatgagcaaaatgtcctgtgcctgccgtcagagagtgacagtccagcaggaaagacagacaatccagaaatataaatgaaaaattacaaacaatgatcatgactgtgaagaagagggaaagggtgttaggagagtttacaaagagagtgtatgtgtggggctgatctattataaaggggcaggagggcttcccgtagagttgcactttggagctgatgttgactggggaggtggtgcatggtgggggaggagtgtgccagccaaaggaggagcacatag

SEQ ID NO: 9599 - DNA, 577 bp, Homo sapiens
  MAP TO Z83840.7; EXPRESSED IN PLACENTA, SIGNAL = 5.4; EXPRESSED IN BRAIN, SIGNAL = 2.5; EXPRESSED IN HELA, SIGNAL = 5.4; EXPRESSED IN LUNG, SIGNAL = 3.3; EXPRESSED IN HEART, SIGNAL =   4; EXPRESSED IN BONE MARROW, SIGNAL = 3.6; EXPRESSED IN FETAL LIVER, SIGNAL = 3.5; EXPRESSED IN ADULT LIVER, SIGNAL = 4.9
ggtgtgatctgtgttttattttgcactttaaatgaagctaccttatcgagataagtcttccccatggtgtcctaggctggcatcacagctttatggttaattgcagcccagattatacgaggtcccccatgccatgtagctgggatgccacttgtatgtagcatttccagtcactctctcctgacctttccccccagataatgaaggttctggaagcaaaaggcccaaggtggagtattcagaagaggagctgaagacccacatcagcaagggtacgctgggcaagttcactgtgcccatgctgaaagaggcctgccgggcttacgggctgaagagtgggctgaagaagcaggagctgctggaagccctcaccaagcacttccaggactgaccagaggccgcgcgtccagctgcccttccgcagtgtggccaggctgcctggccttgtcctcagccagttaaaatgtgtttctcctgagctaggaagagtctacccgacataagtcgagggactttatgtttttgaggctttctgttgccatggtgatggtgtagccctcccactttgctgttcctt

SEQ ID NO: 9600 - DNA, 574 bp, Homo sapiens
  MAP TO AC005006.2; EXPRESSED IN ADULT LIVER, SIGNAL = 3.6; EXPRESSED IN FETAL LIVER, SIGNAL = 4.8; EXPRESSED IN PLACENTA, SIGNAL = 3.4; EXPRESSED IN HEART, SIGNAL = 3.7; EXPRESSED IN LUNG, SIGNAL = 8.3; EXPRESSED IN BRAIN, SIGNAL = 5.7; EXPRESSED IN HELA, SIGNAL = 6.9; EXPRESSED IN BONE MARROW, SIGNAL = 6.5
aggagccactagccctgcccgaggggtccgggtaggcttcttggaggatcggccataggggtcatactggggtggctggagggggttgtgtccttctgggtgctcatggcggttgtcctgttgcaggtgccctgctgcaggaggagaggctggacgcggtgaccctgctttacgccacctcgctgcccagcttctgcctgctggcgggtgcagccctggtgctggaggctggcgttgccccaccgcccactgctggcgactctcgcctctgggcctgcatcctgctcagctgcctcctgtctgttctctataacctggccagcttctccctgctggccctcacctctgccctcaccgtccacgtcctgggcaacctcaccgtggtgggcaacctcatcctgtcccggctgttgtttggcagccgcctcagtgccctcagctacgtgggcatcgcactcactctttcaggaatgttcctttaccacaactgcgagttcgtggcctcctgggctgcccgtcgggggctgtggcggagggaccagcccagcaagggtctttgagacctgggggatct

SEQ ID NO: 9601 - DNA, 575 bp, Homo sapiens
  MAP TO Z83840.7; EXPRESSED IN FETAL LIVER, SIGNAL = 6.9; EXPRESSED IN ADULT LIVER, SIGNAL = 8.1; EXPRESSED IN PLACENTA, SIGNAL = 5.7; EXPRESSED IN HELA, SIGNAL = 5.2; EXPRESSED IN BRAIN, SIGNAL = 4.7; EXPRESSED IN HEART, SIGNAL = 4.8; EXPRESSED IN LUNG, SIGNAL =   6; EXPRESSED IN BONE MARROW, SIGNAL = 4.2
aatctacagggtgcagaggggctgggcagcagccttcctgccattctgcagaacctgtcagcttcaaagggaggctccactctgcggtggcaaagctgggcctgacccttctggccaagatgtcctggtccccacagctcgccaagcgcaagcacttggcccctaacctgagcctgagggaacctgattctactctgcctcccaaagtgggtgatcctcgtgcaggggaggacagcatcggagatcacactgcttcacagagggatcttcagctgcaaggtcactgctgtactggggccacccttcctaagacagagagtccccagggccaggaggcacctgggaacccaaatggggctccacagaatacacgagcctccaaaaagtttagtattatgaagcatctgaatttttttctcttccagaatggctttaaaaagtagactcaggcccagagtcctcaggacatatcagaaaagctttgagagtgtcctgatccctgcaaagcctctaataaattggtcatttgggccctgtggtgttctgatttctctggcacattttccaagtgcccc

SEQ ID NO: 9602 - DNA, 595 bp, Homo sapiens
  MAP TO Z83844.5; EXPRESSED IN PLACENTA, SIGNAL = 2.2; EXPRESSED IN HELA, SIGNAL = 3.1; EXPRESSED IN LUNG, SIGNAL = 3.3; EXPRESSED IN HEART, SIGNAL = 2.7; EXPRESSED IN BONE MARROW, SIGNAL =   4; EXPRESSED IN FETAL LIVER, SIGNAL = 1.5; EXPRESSED IN ADULT LIVER, SIGNAL = 2.6; EXPRESSED IN BRAIN, SIGNAL = 4.1
agaggctgtccagatcacaactatgaggaaaagggtccttgattaattagtgatgtctgtcagggtgaaggaagggggacatttggcatgtgagtgacacatttaccatcaactggtggtttgtgggctttttgagaacaaggactcaatatgatggatccttgtgtctccattgcccagcacagagccagccagagagttggggtcacaaaccctttgctgagcagatgcatctctttgtcccagggaccaggcccagctggatgcagcctccgtgtcttccatccaggtggtgggcgtcgtcgaggcgctgatccagagcgcagacaccctcttccctggaggtgaagctcctgcctgcatggacgccctgctgggtgccctccttctgccctgctccctcccctgtagccccacaaactcaccataagtccaggaggaagtctgagcctcagtttctcatttttacaacggggatggtctgcctgctttgtggggtggtggtgaggctcacacgggagtggggaagctgaacatggtccagatgggttcaggggaaggggaaacggtcccggccagtggagtgaggagcctg

SEQ ID NO: 9603 - DNA, 593 bp, Homo sapiens
  MAP TO AC007106.6; EXPRESSED IN ADULT LIVER, SIGNAL = 6.5; EXPRESSED IN HELA, SIGNAL = 9.8; EXPRESSED IN PLACENTA, SIGNAL =  12; EXPRESSED IN LUNG, SIGNAL = 6.8; EXPRESSED IN BONE MARROW, SIGNAL = 4.3; EXPRESSED IN FETAL LIVER, SIGNAL = 4.5; EXPRESSED IN BRAIN, SIGNAL = 8.9; EXPRESSED IN HEART, SIGNAL = 4.2
ccaccagagcagctagatacagagtgtctattggtgcattcacaaaccttgggctaaacacagggtgctgattggtgtatttacaatccctgagctagatataaagactctccacgtccccaccagactcaggagcccagctggcttcacctagtggatcccacactggggctgcaggtggagctgcctgccagtcccgcgccatgcgctctcattcctcagcccttgggtggtagataggactgggcgccgtggagcagggggtggtgctcgtcggggaggctcgggccgcacaggagcccatggagtgggtgggaggctcaggcatggtgggctgcaggtcccgagccctgccccgtgggaaggcagctaaggcccggcgagaaatcgagcgcagcgccggtgggccagcactgctgggggactcagtacaccctccgcagccactggcccgggtgctaagtccgccattgcccggcgccagcagggctggctggctgctccgagtgtggggcccaccaagcccatgcccacccggaactccagctggcccgcaagcgccgcacacagccccggttcccactcatgcctct

SEQ ID NO: 9604 - DNA, 580 bp, Homo sapiens
  MAP TO AC006427.13; EXPRESSED IN HEART, SIGNAL = 1.5; EXPRESSED IN LUNG, SIGNAL = 1.4; EXPRESSED IN BRAIN, SIGNAL = 1.9; EXPRESSED IN PLACENTA, SIGNAL = 1.5
gaaaagcagttcccttctgcgacataaatacgaacacacagaccacatcagtgtcagatttgtaagaaagcgtttaaacacgagcatcaccttaacgagcactcaaggcttcactcgggcaagaagccctatcagtgtgataaatgtggcaagcgcttctcacactccggctcgtactcgcagcacaggaatcacaggtattcctactgcaagcgggagacggaggagcgggaagccgcggagagcaaggcacgcgagaaagggcacttggaacccaccctgctgatgaaccgggcttacctgcagagcattatccctccagggtactctgactcggaggagaggaagagtacgccgagggatggcgagagctagaaacagcgcgagaaggcaggcgaggatggctacgggaagctgggcagacaagatggcgacgaggagttcgaggcggaagaggaagaaagtgaaaataaaagtatggatacggatcccgaaacgatacgagataaagaagaaactggagatcactccatggacgatagttcggaggatgggaaaatggaaaccaaatcagaccacg

SEQ ID NO: 9605 - DNA, 555 bp, Homo sapiens
  MAP TO AP000111.1; EXPRESSED IN PLACENTA, SIGNAL = 1.2; EXPRESSED IN HEART, SIGNAL = 2.2
cagtgagtagtcaaaatgcaactgtttttttttttaatttacttattggttgactggttgcttggttggttggttcgttggttgcttggttggttgcttggttgcttggttggctggttgcttggttgtttgcttggttgcttggttggttggttggttgcttgcttgcttgcttgcttgcttgcttgcttgcttgcttggctggttggttggttggttgcttggttggttggttgcttgcttgcttggttgcttgcttcattggttgcttggttgcttgcttcattggttgcttggttgcttgcttcgttgcttgcttggttggttgcttggttggttgcttggttggttggttggttggttgcttgattggttgcttggttgcttggttggttggttggttggttgtttggttgcttggttggttggttggttggttgcttggttggttggttggttgcttgcttgctttgttgcttgcttggttcgttggttcgttggttggttggttggttggttggttggttggttggttggttcgttgattgcttggtt

SEQ ID NO: 9606 - DNA, 566 bp, Homo sapiens
  MAP TO Z83840.7; EXPRESSED IN HELA, SIGNAL = 4.3; EXPRESSED IN BRAIN, SIGNAL = 3.1; EXPRESSED IN PLACENTA, SIGNAL = 6.3; EXPRESSED IN HEART, SIGNAL = 2.4; EXPRESSED IN LUNG, SIGNAL = 2.8; EXPRESSED IN BONE MARROW, SIGNAL = 2.9; EXPRESSED IN ADULT LIVER, SIGNAL = 3.6; EXPRESSED IN FETAL LIVER, SIGNAL = 3.8
caggaagcagaagtgggaagattgcttgagcttgggaggtcaaggctgcagtgagttctgattgcagcactgcactctatcctgggtgacagagcgagaccccgtctcaaataaataaataataaaattaaaataagccctttaaagaaaatggaagagaaactttagggctaaaagagaagaaaggaggaaacctttttaggaggctagtcactgggctttttgttttctagggagctcaaccctgttcagtgctctgctcatcaagtgtctggagaaggaggttgcagcattgtgcagatacacaccccgcaggaacatccctccttattttgtggctttggtgccacaggaagaagagttggatgaccagaaaattcaggtgactcctccaggtatgtggcagagatatttccagggcttctgaaccttgcccatactttggaatcatccatggactcctaatgcagacctactgaatcatagtctctgggaatggggcttaaaaatgtctatttttaagctttcttgggtgaatttagtgcacagccaggtaaggccactaa

SEQ ID NO: 9607 - DNA, 591 bp, Homo sapiens
  MAP TO Z83844.5; EXPRESSED IN PLACENTA, SIGNAL = 1.7; EXPRESSED IN HELA, SIGNAL =   2; EXPRESSED IN BRAIN, SIGNAL = 2.7; EXPRESSED IN HEART, SIGNAL =   2; EXPRESSED IN BONE MARROW, SIGNAL = 3.3; EXPRESSED IN LUNG, SIGNAL = 2.5; EXPRESSED IN FETAL LIVER, SIGNAL = 1.4
tcacctggggataccaagacgtgatctcagctgggagggggtccaggtggtgagggcatccacatcagaagaatgaccaggctggggacagttcccaggtcagtgagggtggccaggcctgggagggtgttcagcttagcagagatgaaggatatctaggaggggccggaagtgagggaggagaggccccaccaagtgtttccagtggaggtgagggcagcgggcgcctggacccatggggtgccgtgtccacaggaaggccttggagatgagctgtgccatccagaatcagctggcccgcatcctggccgagtttgagatgaccctggagagggacgtcctgcagccactcagcaggctgagtgaggtgagcctgtgccctgctttcagcccccagcttccccagcttctggctccctcctcccccagcacactgacccccccatgcccatccccaggaggagctgccagccatcctcaaacacaagaaaagcctccagaagctcgtgtccgactggaacacactcaagagcaggtgggagccccagccgctcagggggctcatatctgggtcagcccacagagatggtc

SEQ ID NO: 9608 - DNA, 559 bp, Homo sapiens
  MAP TO AP000356.1; EXPRESSED IN FETAL LIVER, SIGNAL = 1.7; EXPRESSED IN BRAIN, SIGNAL = 2.3; EXPRESSED IN HELA, SIGNAL = 1.6; EXPRESSED IN LUNG, SIGNAL =   2; EXPRESSED IN HEART, SIGNAL = 2.2; EXPRESSED IN ADULT LIVER, SIGNAL = 1.6
agcatctgctaccacgggccaggctgacttccagggtagggccctcatgcggaccaggtgagggcctcaccaggtgggatttcagcaccagcctcttggtgagagtgcaggtgtcaacctgagaagggaccttggagcagcagtgaggaggggcagtggctgggctacccttaccagctctgggtcttcctctggcgcaggctggacccttgctgctgcttcgagtgaggggtgaggtggtagatgagctgtcggcagatcttgtccgaggacttccagagctcatagtcctgtgggagggcagtgtcaccatggtgaatctgagcccctcctgcccacctcagggccttggggagagggacccaggcagccaagtgtgtgtgtgagcacagtcatgcaccatgcatcaccgagttgcccaccagggcctccccctcctaccccccaacccggctgtggcctggcacagagccaggggaggctgccctctgggagctggacaggctggtccagtcccgcagtgcccggcgggaggaagcccagacaatgagcccttgtt

SEQ ID NO: 9609 - DNA, 594 bp, Homo sapiens
  MAP TO Z97055.1; EXPRESSED IN LUNG, SIGNAL = 1.6; EXPRESSED IN BONE MARROW, SIGNAL = 1.5; EXPRESSED IN FETAL LIVER, SIGNAL = 1.8; EXPRESSED IN PLACENTA, SIGNAL = 1.9; EXPRESSED IN HELA, SIGNAL = 1.5; EXPRESSED IN HEART, SIGNAL = 1.6
aatacagcctctgtgtggggttttaaaaatgtgttctggctgctatgtaaagaatggattatagggggcaaaaaatgaggaagagagacaagagaggaggctgcttcaaggtctaggaggtaactgtggcttaaaccaggtggtagccctgaaggtagacaaaaagtagacagataggagacatgatctatcggatctgtagctgacaaggttttgctgatggattggctgaggaggcgtgtgaggggtgttaaagaaaatagagaaatcaaggataatcccttggtgctggacatgagcaatgagataaatgacagtgtcactgctaagatggagaacacgggggagtcgagagacccgtttagccagttccggtctgagatgccggttagatgcggtgcacgcagaaaggtccgcgaggcaactggatatacgatcgggagcttagtggggaagtgaggatggagctatcattttggttacaggtggcatttcaggacatggagccagatgactcacttaagagagggcagacagggaacagaggaatgagcacagccctgagggggaagaaggaacttaaccctcccacaa

SEQ ID NO: 9610 - DNA, 553 bp, Homo sapiens
  MAP TO AP000356.1; EXPRESSED IN HEART, SIGNAL =  12; EXPRESSED IN LUNG, SIGNAL = 4.8; EXPRESSED IN BONE MARROW, SIGNAL = 7.6; EXPRESSED IN ADULT LIVER, SIGNAL =  29; EXPRESSED IN FETAL LIVER, SIGNAL =  16; EXPRESSED IN BRAIN, SIGNAL =  14; EXPRESSED IN PLACENTA, SIGNAL =  13; EXPRESSED IN HELA, SIGNAL = 5.2
ttctgagggctgtagaaggcaggtggacaggagccaggactcagtactcagatcctctgggcaggcccgactgcaagggcacctgctctgactggctcccaaatcctgcctatagcctctctgctgctgctccctggtctctgcacacctgggtatctacctgggtgtctagcccttgactgttccctcttccaactactggaaccaggtggccttatacctctgtgtggccccacatgggaaggcctggtggctggtcgctcacctggttcttgtagcccttgtcgacacccagggtctgggtacagaagcggtgcctcacgccaaagtggtgcatcaggtaggccaggtcgatggtccagatgctcctggtcagctgcagcttctgcagggctctctcaaactcactgtcgtccagctggcccaggtacctgcaggtagacgagctggggagctcagcttggtcttgagggtcaactggtctgagtcaccctccacccactggcccaagagccccgtcacaggtcccattccccagaagtctccctccttc

SEQ ID NO: 9611 - DNA, 549 bp, Homo sapiens
  MAP TO Z83844.5; EXPRESSED IN PLACENTA, SIGNAL = 1.7; EXPRESSED IN HELA, SIGNAL = 1.4; EXPRESSED IN HEART, SIGNAL = 1.9; EXPRESSED IN LUNG, SIGNAL = 1.8; EXPRESSED IN BONE MARROW, SIGNAL = 1.6; EXPRESSED IN ADULT LIVER, SIGNAL = 4.4; EXPRESSED IN FETAL LIVER, SIGNAL = 1.4; EXPRESSED IN BRAIN, SIGNAL = 1.5
tcctgtaaacagtcctgcggcagccctgttctcccctctgtggagtggctgtgatcaccaaatctgccaccagggggcaacccagagcactcatggcccagcctgggcagaggccccggccagtggagctctcagatctgcagctctaaatcctagaatcccatgtggtctgctgtatggaggggacacttggctctggacatgcaacagggcaggtgaccagctcaccttgggatcatctccaggctcagtcaggcaaccaagaattcaggcagcagtcaaggcctaggaggcagcccgggtagtcacagccatacgaccatggccaacaaggtggagacgctgaaggaggaggaggaggagctgaagaggaaagtggagcaatgcagggtgagggccatgggggtcccctggatatgtaggggtggcaggggtgggtcctggcccatctcacaggcaaggaagctgaagttcagagaggtgacatgacttgcctaaggccacgtggctaggagccagcagagctccgccattccctcgtagcctctt

SEQ ID NO: 9612 - DNA, 569 bp, Homo sapiens
  MAP TO AP000356.1; EXPRESSED IN BRAIN, SIGNAL = 1.5; EXPRESSED IN PLACENTA, SIGNAL = 1.6; EXPRESSED IN HEART, SIGNAL = 2.5; EXPRESSED IN BONE MARROW, SIGNAL = 1.7; EXPRESSED IN ADULT LIVER, SIGNAL = 5.1; EXPRESSED IN FETAL LIVER, SIGNAL = 2.1
cccatatggttttccagagcagctgcaccattttactctaccaccaactgtgtacaggacaatgtgattcttatttagcaaagcatggacatcagggtatttagtgttccaaacaacaaatgcaagtggttgctctgacccaagcctattgatttagtaggatcattcttctttgataaaaaactacaacaattggtttataagtgggactctgccatatttatcatttttccagctggcgaagaaccatgacatggtggtggtgtctcccatcctggaacgagacagcgagcatggggatgttttgtggaatacagccgtggtgatctccaattccggagcagtcctgggaaagaccaggaaaaaccacatccccagagtgggtgatttcaacgaggtgagccacccataagatagataaccagccctgctcacttgcccctctgtatgttgtagatctctgtgggactttctgtggggaagttctgtgcaggatcatactccatgtcacgtacactccacgggagcacagtgtggctgcagtgctcagagggttacctgacattgcc

SEQ ID NO: 9613 - DNA, 572 bp, Homo sapiens
  MAP TO AC007564.9; EXPRESSED IN LUNG, SIGNAL = 1.4; EXPRESSED IN HEART, SIGNAL = 1.6; EXPRESSED IN FETAL LIVER, SIGNAL = 2.1; EXPRESSED IN HELA, SIGNAL = 2.2
tgttttcaaatgaagtgggttgtaactaaattttttttaaatgaacgcaacagataaaatcagagtgcattcatatgatatattgttttgtaaattactattttacgttatctatccttggtagcaatgcaaaacacattactcagtatgaggcacatgcaaaagtttcattgacagtggttgtttaacctaataagcggtttgtgtgtgtgtgtgtgtgttttttttttttaaaggatactattgctgctccaacatattgagctgattccatgtggtgatgtgtgtgggttgaatttatccaccaatgtcatagatgaagcatcccatattttaatatcatctcctgatgaagcaaatctgaggttttcctgcatgactgcgcctacaaatagtttaaaacaatgtattttaaaaacatttaagaatagacatactcaaaaaaaggtcaaaatctaatctaaaacaagtggctctaactcattcatttttgttccaaacagtgcagtcaccaaagcagttgaagtgattttcctaaaacataagccaggtcgcattctcttagctgaccc

SEQ ID NO: 9614 - DNA, 590 bp, Homo sapiens
  MAP TO Z97055.1; EXPRESSED IN PLACENTA, SIGNAL = 4.8; EXPRESSED IN HELA, SIGNAL = 6.2; EXPRESSED IN HEART, SIGNAL = 4.2; EXPRESSED IN LUNG, SIGNAL = 5.9; EXPRESSED IN BONE MARROW, SIGNAL = 6.2; EXPRESSED IN ADULT LIVER, SIGNAL = 5.7; EXPRESSED IN FETAL LIVER, SIGNAL = 7.6; EXPRESSED IN BRAIN, SIGNAL = 5.7
aagagaaaaagaggtgcctggagcacagctgcccccgccaagcccagcccgaagcagggatctagtcaatctgcacacacgggggacagtctggccaagaccagctgggaaagaatcagggccttgcccaaaatcaaaattcagacctaagtctttataactggtcccctcctccagcagagcctaccagtgcccacctacacccctcagctgccctagaggtcacctgcagcgctggtgagggcttctgacctcaagcacctgcacctgcttcccacctggccacagaggaacaggcccagaagtgcagggagccgacgccctgagccacacccaaccactaaaggacaagagttggcacctgccccccacacgccaaagaaggctcctggctgtgttcatgtcgtctctcaagggatcctggcaggctgagccccagggttccacagaggaacccctttcctggcttcttccccccttgccttctgagaccacctcccacctgactagcggaggcccactctctagtacgaaagcacacccgctcacatgcctgggcaggccctgagagaggcgacagtcatgaggac

SEQ ID NO: 9615 - DNA, 581 bp, Homo sapiens
  MAP TO Z97055.1; EXPRESSED IN FETAL LIVER, SIGNAL = 1.6; EXPRESSED IN PLACENTA, SIGNAL = 1.5; EXPRESSED IN HEART, SIGNAL = 1.9; EXPRESSED IN LUNG, SIGNAL = 1.9; EXPRESSED IN BONE MARROW, SIGNAL = 1.9; EXPRESSED IN BRAIN, SIGNAL = 1.8; EXPRESSED IN HELA, SIGNAL = 2.3; EXPRESSED IN ADULT LIVER, SIGNAL = 1.5
cagcgggagagagcagtcatggcggtgagggcaggtggtgcggggctgtgggaggaagcgtaaggcctggagccaggctgagtttctgcgtgcttgatgcttcaggaattgggtcttgcattttggtgtgggctgtctgaggccccccagagacagcaggcagcacagagctcagggtgggtgactggtcaacatcaagtgggaaaacagtctggctggtggcatcaccagaatgatggggctggtggcaagtctagcagaaagtgtccagaagcacggccttccccagcagcaccatcttctcagggagctgccctggaaccagcagctgaaccaaggcaggctcacttctggggtggcttgggaggttgcaggaaggccaggagcctgcaagggaagatgtcgggagttcaggcttgctggctgtgtgaccctcagcaagtctcctaccctctcggtgtctgcctgacctggccatccacaggacagttgtgggcgagctggtgtcaaggaagatgcacctggtccacccggtcctttgccatattgtccaggcctctgggcttcccattcttggaaat

SEQ ID NO: 9616 - DNA, 575 bp, Homo sapiens
  MAP TO AL031587.3; EXPRESSED IN LUNG, SIGNAL = 4.9; EXPRESSED IN HEART, SIGNAL = 4.2; EXPRESSED IN HELA, SIGNAL = 5.8; EXPRESSED IN PLACENTA, SIGNAL =   6; EXPRESSED IN BONE MARROW, SIGNAL = 5.7; EXPRESSED IN ADULT LIVER, SIGNAL = 4.7; EXPRESSED IN FETAL LIVER, SIGNAL = 5.5; EXPRESSED IN BRAIN, SIGNAL = 2.8
gtagggagcagggtgctgcctggggagggtgtgtgctgtggacctgccaggaacaaacacagaggggcctgggagggccctgagcttcccagccggagtctcccctccatcccctcctctgaaggcctcttccccctgacctttctcccttcttttccacttcggcctccaccttgtttctttctctgtccattgctccctccttctcctctttctgtccccagcctcctctctctgggaagctttttaattttgaccccacatcccacagttggtcgctcctgcctcttggtgtccttcttgtcctggccctcctgccctggctccctgtctctctccagccctgtctctgtctctccctgtttttctctccctgatgcgttctctctgtccctccctccatgaatttctctgtctctgtcctgtgccacctctcatctgccctgcctctgtaaatgtggggaggaccctgggaaaatgacagagatggggagagctgacaagttagagaagccaaggcttgtggcaacctgcagtcttccccacctggctccagcctaccttccccaggacac

SEQ ID NO: 9617 - DNA, 556 bp, Homo sapiens
  MAP TO Z97055.1; EXPRESSED IN BONE MARROW, SIGNAL = 3.5; EXPRESSED IN ADULT LIVER, SIGNAL = 1.9; EXPRESSED IN HELA, SIGNAL = 2.7; EXPRESSED IN PLACENTA, SIGNAL = 3.6; EXPRESSED IN HEART, SIGNAL = 2.7; EXPRESSED IN LUNG, SIGNAL =   3; EXPRESSED IN FETAL LIVER, SIGNAL = 2.4; EXPRESSED IN BRAIN, SIGNAL = 4.9
ggccaagcaggaacagtaggaaaaccctgacggtgcagtccccactctcaggacgtccctgtctccaaaggaaacagccacacaacactgaggtggggcggtgaggaaagcagggatcgctggggagtgtgggggatgcacttgtccagcagaggaggcagggctgggcggctcagttgagggaagtgatgattctgagggccctggctggggtggcggctgcagagggtggctcagagtggaggggctgtcccaggagctggtgagcttaccggggacaagatgtcccttgtcagggatgtcacagaggctgttcctcagctgggtcatgctgggtcacctgacccaggggccctccctgtcttaaaatgcacgttgtacaataaagagtggaagaggatgtcaatgggcaggaatggagccaaactctacgggagaacggagctggccaggcagagctgctggacacctgaggctccctccttccaccacaaacaccactgccccatggcctagagaggtgggtaaaaaccgatctccactgagatctcccagg

SEQ ID NO: 9618 - DNA, 570 bp, Homo sapiens
  MAP TO AL031588.1; EXPRESSED IN FETAL LIVER, SIGNAL = 4.3; EXPRESSED IN ADULT LIVER, SIGNAL = 2.2; EXPRESSED IN HELA, SIGNAL = 3.1; EXPRESSED IN PLACENTA, SIGNAL = 3.2; EXPRESSED IN BRAIN, SIGNAL = 3.4; EXPRESSED IN HEART, SIGNAL = 2.5; EXPRESSED IN BONE MARROW, SIGNAL = 2.8; EXPRESSED IN LUNG, SIGNAL = 3.4
tcacgaggtgtaatttttaatttgatcagaactgttaccaaaaaacaactgtcagttttattgagatgggaaaaatgtaaacctatttttattacttaagactttatgggagagattagacactggaggtttttaacagaacgtgtatttattaatgttcaaaacactggaattacaaatgagaagagtctacaataaattaagatttttgaatttgtacttctgcggtgctggtttttctccacaaacacccccgcccctccccatgcccagggtggccgtggaagggacggtttacggacgtgcagctgagctgtccgtgtcccatgctccctcagccagtggaacgtgccggaactttttgtccattccctagtaggcctgccacagcctagatgggcagtttttgtctttcaccaaatttgaggactttttttttttgccattatttcttcagttttcttttcttgcactgatctttctcctctccttctgtgactccagtgactcagacgttagacctcttgatgttttcccactggtccctgaggctctgttcacctttcttca

SEQ ID NO: 9619 - DNA, 596 bp, Homo sapiens
  MAP TO AP000354.1; EXPRESSED IN LUNG, SIGNAL = 1.4; EXPRESSED IN BONE MARROW, SIGNAL = 1.8; EXPRESSED IN HEART, SIGNAL = 1.4; EXPRESSED IN BRAIN, SIGNAL = 1.5
ctcttctccaacggcatctgtgactcccaccacccgaagccgaataaggtagagaacagttaatattcatgcatttcgtgtgtacctttcctggccttttgacagtaaatgatcaagttgtaaaatgatggcatttgagcactgtgatttttctttttctgtgtgttgtttgcgaatctttcttatatccagaattgagtaaatggtatagaagacactgacaaattaaaaatgatagttcctttcctcaagcagctgtatctttttttttttttttttagagaatggttgcatgcaaaacgaagtattatgaaatttaaataccgaggaatgggtggagtgttagggaaggcatcccagaaggttagaatttgagtggggcctcgaaggttgtagacagggagggtggggggcatgattggcaaggtcagtaacttgaggggatgcaccaaagggattagtaagtgaggagtatggagggggatgctgtaggtaggtggttctatagattcagtagactgatacagaaggccagaagaaggtgtacctaccatatcaaggaacagtagaagaaaagattgactaggcaggggatg

SEQ ID NO: 9620 - DNA, 570 bp, Homo sapiens
  MAP TO AL022328.21; EXPRESSED IN HEART, SIGNAL = 2.3; EXPRESSED IN LUNG, SIGNAL = 2.4; EXPRESSED IN FETAL LIVER, SIGNAL = 1.9; EXPRESSED IN ADULT LIVER, SIGNAL = 2.2; EXPRESSED IN HELA, SIGNAL = 2.3; EXPRESSED IN PLACENTA, SIGNAL = 2.5; EXPRESSED IN BRAIN, SIGNAL = 2.1; EXPRESSED IN BONE MARROW, SIGNAL =   2
gtgactgctgagcctctgtgctggagacccacctggcattgcctccagcagcccttctcccacaccccagctgaggaaggctccattcagtaccacacagtgccccacccacccgtcaccctggggcccaggcacacgtccatcacatgcccgtccacatgcatggctggacatatgcaagacctgagagtcctacccgtcatgggcgaggtctggaggccggtccagctgtcccagggccacgcacagcagcctggaagaagagctggcctcaggacaggtgttcatgttgtccagagtccattcccagaactctctgtgcttggccagccaggataggggtgcccacaggtcctgccgtcagaggctcaggatggccaagtgaggcttacctctgggctccgtgggacaggcctctccgaacagccacatccagggtggctgctgcagcagaggctggagtggctgctataccactgttcacctgtgggatgaataaacagtggagaatgaggcaccaaccaactcccaagccaggtaaacagatccacagttcccttcattcggtgt

SEQ ID NO: 9621 - DNA, 572 bp, Homo sapiens
  MAP TO Z97055.1; EXPRESSED IN ADULT LIVER, SIGNAL = 3.4; EXPRESSED IN BRAIN, SIGNAL = 2.5; EXPRESSED IN HELA, SIGNAL = 2.3; EXPRESSED IN PLACENTA, SIGNAL = 2.6; EXPRESSED IN BONE MARROW, SIGNAL = 2.4; EXPRESSED IN HEART, SIGNAL = 2.1; EXPRESSED IN LUNG, SIGNAL = 2.3; EXPRESSED IN FETAL LIVER, SIGNAL = 3.1
acctaccgatgaagccacacacctggagcaggcaaagcaatgcccacagccaaccctgtggttccctccactagcctcgagcaggagggtccacaagcactgcccttactgacagggaaacaaggcactgggaagtgggggccacgcctggagctggagtcgcttcccagcagggccaggtggggccaaggcaggagtgagaggtggaggagtcctagtgaggcctgtcatgttgctgtgggacaaacagggggcatggggctgtggccacactgggccccttgcagagcagtgagggcaaatacaccgctgccgaggtgggggcctgggagggcaccaatcttcctcatcacagctgggcagctggaagccagcccaggccccagtagatccaccctgagtggggaagagtcaagctttcaaacagaaaccaggggagccaacagggcagagccacctgctggccagtgactcgagccaaacgctctccagcagctcttcgcaagtcggctggaagcagtaattcacagaagtgcttctgctgacaccactgcaatcacttctgagtggca

SEQ ID NO: 9622 - DNA, 570 bp, Homo sapiens
  MAP TO Z83844.5; EXPRESSED IN BRAIN, SIGNAL = 1.7; EXPRESSED IN PLACENTA, SIGNAL = 1.9; EXPRESSED IN HEART, SIGNAL = 1.4; EXPRESSED IN BONE MARROW, SIGNAL = 1.4
ccaagtgtttccagtggaggtgagggcagcgggcgcctggacccatggggtgccgtgtccacaggaaggccttggagatgagctgtgccatccagaatcagctggcccgcatcctggccgagtttgagatgaccctggagagggacgtcctgcagccactcagcaggctgagtgaggtgagcctgtgccctgctttcagcccccagcttccccagcttctggctccctcctcccccagcacactgacccccccatgcccatccccaggaggagctgccagccatcctcaaacacaagaaaagcctccagaagctcgtgtccgactggaacacactcaagagcaggtgggagccccagccgctcagggggctcatatctgggtcagcccacagagatggtcatagagctttgaggccctggccacaccaggaggatgctgtggggtctgctgagtacagtgtgtgtacttgtgcacgcctggtccctaggagcacaggtggttagcgtatctgtgagggtgtgcccgcgtgtgtcacagctggtgctggggcaaccctaaagcctgggatc

SEQ ID NO: 9623 - DNA, 557 bp, Homo sapiens
  MAP TO AL031588.1; EXPRESSED IN ADULT LIVER, SIGNAL = 3.4; EXPRESSED IN HELA, SIGNAL = 2.3; EXPRESSED IN PLACENTA, SIGNAL = 4.6; EXPRESSED IN BRAIN, SIGNAL = 2.3; EXPRESSED IN HEART, SIGNAL = 1.9; EXPRESSED IN BONE MARROW, SIGNAL = 2.2; EXPRESSED IN LUNG, SIGNAL = 2.8; EXPRESSED IN FETAL LIVER, SIGNAL = 6.7
gtggtcactggtgagcgtgaaacacccagatcgtcaggactgaacacaagtgtgagcaaacggaggcagtggcggcaccagacacaggagccccctctgactttggcctctccccgcctgtctgcttggtttctgaagtagttatggtggtagaggctacacagaggcaactgcggagcccagcccgccgtggccgcctctccccgccctgacgtcacagaagatggctttacctacccaggtccctggatctgaccggccctctactcctggggggtgtccccaacctgccagaagacttcccagtgcacaaccggcagttcgtgggctgcatgcggaacctgtcagtcgacggcaaaaatgtggacatggccggattcatcgccaacaatggcacccgggaaggtacgggtggccgtcagggcgtcggagctgccgcagtggcatctggctggacgtcggcagccacacagaggtcactgcttgcagatccctggggagccgtgtttttcttagaaatgtatgtgtccagcggtgggcagctcctgggatggaac

SEQ ID NO: 9624 - DNA, 573 bp, Homo sapiens
  MAP TO AL022329.9; EXPRESSED IN LUNG, SIGNAL = 2.4; EXPRESSED IN ADULT LIVER, SIGNAL = 2.5; EXPRESSED IN FETAL LIVER, SIGNAL = 2.6; EXPRESSED IN HELA, SIGNAL = 1.8; EXPRESSED IN PLACENTA, SIGNAL = 2.3; EXPRESSED IN BRAIN, SIGNAL = 2.6; EXPRESSED IN HEART, SIGNAL = 1.7; EXPRESSED IN BONE MARROW, SIGNAL =   3
gagaaagagagagaggcgaggtgccacacgctgttaaaccatcagatcttgtggcaactcactctcatgagaacagcaaggaggaaatccgtgcccatgacccagtcaccttccaccaggcccctccttcaacattggggattataattcaacatgggatttgggcatggacatacatccaaaacatttcagagacctcttagaaagctaaaggctgtgagagacgatgctggcctttagaccattggggttgccgtggaagtagagagaagtcatggaattcccagttttgaagatagagtcaatagatttgtaagaaattatgttgcagtacaaaaaagggttgtggggagaagtggtttgctggggacacttgtcctcaggtctaaagataaaggagaggttttgataagaggttgagactgtagggcgatgatgttgtttatgcctcttggaattaaagtaacttgatttgcacagtgggccatttgctggagtattgtcacacctcctttgcattctagctggtgctttgaggtcagcattaagctaagagctttgtcctgaggctga

SEQ ID NO: 9625 - DNA, 577 bp, Homo sapiens
  MAP TO AL031587.3; EXPRESSED IN PLACENTA, SIGNAL = 3.3; EXPRESSED IN LUNG, SIGNAL = 2.6; EXPRESSED IN HEART, SIGNAL =   2; EXPRESSED IN FETAL LIVER, SIGNAL = 5.6; EXPRESSED IN ADULT LIVER, SIGNAL = 4.9; EXPRESSED IN BRAIN, SIGNAL = 3.3; EXPRESSED IN HELA, SIGNAL = 2.6; EXPRESSED IN BONE MARROW, SIGNAL = 2.1
gccactgtgtccctctgtgggatggggaggaaggggcagcagcaacagcctgtcccgctcctgcacacacaccctctgaaggtctgagtgaaataggcagagaatgggatgtggctgtttgtcctgggggctttaggggaccctccacccgcactgtgataggcaggcagctcccaggcctgtctgaacaggaactctgccagctctccaaaggccctgcaagccccggccactccatcacagctcattgatgggcacttatgggtgctgactgtgcacttggctggtgagccaggcctggagtgggcaggagaggcttctgaaagggtttcagaggagtccacagtctgagagaagagaacaccctgaaaaagggagttcaggggtctgaggagagactgctgtggtctgcagggtgaggtggtgctggtgaaggcagccgaggaaggggcgtcacccactggaaggcttgcagcttagggaaggagacttgaagattagagatggataaggagtggggcatatcacagaatcccagaataggagatgcagaatgtctttggaaatgaccccgtct

SEQ ID NO: 9626 - DNA, 548 bp, Homo sapiens
  MAP TO AL031587.3; EXPRESSED IN BONE MARROW, SIGNAL = 7.4; EXPRESSED IN ADULT LIVER, SIGNAL =   4; EXPRESSED IN HELA, SIGNAL =   4; EXPRESSED IN PLACENTA, SIGNAL = 3.8; EXPRESSED IN HEART, SIGNAL = 4.2; EXPRESSED IN LUNG, SIGNAL = 6.5; EXPRESSED IN FETAL LIVER, SIGNAL = 5.7; EXPRESSED IN BRAIN, SIGNAL = 7.1
acactgtcccagggctaaagcccacagcaggctgtgtacccctgcatcttacaaaatgctggcgcccctgtctgatggggctcctcacgggttgggtcggactgagcttttacccctgggctgtggttgggcggtggggaaaggccatgtatcagggcctagcagaggccttgggtggcatgggcaattggaggccttgccctgggccagtgtggtccccgccatgcgtccccattccgcatcactcggtctctcccacagggatgacggaacacaccaagaacctcctacgggccttttatgagctgtcgcagactcaccggggtaatggcatcccccaaagctgtggtgtgaccgtgggcaatccctggggcctctcactcccatgctgaggtgggtcagacccacagcgcctgacctcaggctccctctgggctgggcctggtcccaggtgctgggatttgcgatgggcctgcggggaacatctagatcagctggtctcttaagggccgcaacgatgaacaggccccaccctgtctcctcacact

SEQ ID NO: 9627 - DNA, 567 bp, Homo sapiens
  MAP TO AL022328.21; EXPRESSED IN ADULT LIVER, SIGNAL = 3.9; EXPRESSED IN HELA, SIGNAL = 1.9; EXPRESSED IN PLACENTA, SIGNAL = 3.6; EXPRESSED IN BONE MARROW, SIGNAL = 1.7; EXPRESSED IN HEART, SIGNAL = 2.4; EXPRESSED IN LUNG, SIGNAL = 1.9; EXPRESSED IN FETAL LIVER, SIGNAL = 5.2; EXPRESSED IN BRAIN, SIGNAL = 3.1
actttcttccctgcagtgcctagcagccaccattctactttctgactgtatgaattcaggtgttctaggtacttcatacaagtggaattaatcatggagtgtttgtccttctgtgaccggcttattgcactgagcatcatgtcctcaaggttcatccatgttgtggtgtgtgtcagaatttcctcccttttgggggctgagtagcattgtattgtgtgtatacaccatacttggcgtatcagttcatctatcagtggacacttgggctgcagacatttgactattgtaagtagtgctgctacaacgggtgtacagatatctatttgagaccctgctttcagtcgtcatgggtacatacccggaagtggaattgttggtaattctagtcttaattttttgagaaaccatcatcttgctttccacagtaactgcagcattccacaccccaccaacagtgccgcagggttccagtttccccacatcctcaccaccacttattttctgggttgttttatagtagccatcttagtgggagtgaggtgtagctcactgtagttttgatttgca

SEQ ID NO: 9628 - DNA, 961 bp, Homo sapiens
  MAP TO AL031587.3; EXPRESSED IN LUNG, SIGNAL = 2.9; EXPRESSED IN BONE MARROW, SIGNAL = 7.2; EXPRESSED IN PLACENTA, SIGNAL = 3.3; EXPRESSED IN HEART, SIGNAL =   3; EXPRESSED IN ADULT LIVER, SIGNAL = 3.2; EXPRESSED IN FETAL LIVER, SIGNAL = 3.9; EXPRESSED IN BRAIN, SIGNAL = 3.4; EXPRESSED IN HELA, SIGNAL = 3.3
gttcccttttctggtaccccctattcctccgttataatttttggttgacatgctgatcctccacttccagcctgtgagtccctcgagggagagactgtgtctgctttgcctccatgtccccgtgctggccccatcctggcacatctgggcaggacgtcacacgacctggttctattcctggtcatgttcctgcccaagccaccccttcggtttccccatccaaaatgtgggagagctgggcttcgccaggtcacttctgagggtacaattgtccagaagatggacagggctggcgtggcccaggcctgtgccaggcgcccaagattgatggttgagggccatgggcagttccctcggtcagcagccccctccgtggctccctgtagccccatgtagagaatggggtgggtgtagagagggggcggagggctgcatgccagggcctcagcagaccagaccccaccaaagaggctagcctggcaccccccagcaggaaggtggcccccaatggttatcaaaggccagcggggcccctccctccaaggatgaaggggtgtccctgacaagcagggccatccgtcagccctgggcacaatggggtcattaacccctgaccccagctcctttttagccacttcctctgagggctgagtgtgtggggctgagaagaacagagcctcgcttttcagcgaggggctgaggagcaatggctgcttggctggtcccaggctctctagctcccaacccctgaggctccctcggaggcctgggggagcctcccactctctgtcccctgagagggcacccccttggccaaccaccctcaagccaaagcagtgtgtatggggagggacagatagagaccctgagaaagagacagagaccgggagagagggaagccgaggtgggcagatcatcagagacagacacttgagacctgagacggctcctttccctttac

SEQ ID NO: 9629 - DNA, 968 bp, Homo sapiens
  MAP TO AP000344.1; EXPRESSED IN BRAIN, SIGNAL = 7.3; EXPRESSED IN LUNG, SIGNAL = 6.7; EXPRESSED IN ADULT LIVER, SIGNAL = 6.5; EXPRESSED IN HELA, SIGNAL = 6.4; EXPRESSED IN PLACENTA, SIGNAL = 6.8; EXPRESSED IN BONE MARROW, SIGNAL = 4.5; EXPRESSED IN HEART, SIGNAL = 5.8; EXPRESSED IN FETAL LIVER, SIGNAL = 7.8
tggcatgaagtcctccagacctgccctaacctccccctccccactctacaatgcgcaccccataaagacctttgtcaggcaacccctccaatgcaatcagaccagcgtggagcctcctgtgcctgaggaactagtcccaagcaatggcagccctcaaacccactgtgggcttgtcagcatggtactatgacagtgctgatgacagtagtgaggatgggctcagtcacagcgaccatagtgacggaggtgtggtgatggtgatggaggtagtgatggtgatagtgatggtgatggtggtggcgatggaggtagtgatggaggtggtgttactggcggtggtggtgtggaagcggtgatgggggtggtgatggtggaggtgatggaggctgtggtggtgatgatggtagtcatggtgatggtggtggtggtgatgctggtgatcatggtgatggtggtggtggtggtgatggtggtggtcaaaatagaggttatgtggtggtactgatggtgatggtgatggtggggatggtgagggtaatggtggtggtgatggaagttgtggttacagtgatggtgttgattgtggtggaggtgatggtgctggtagtgatggtggtggtggtggtggtggtggtgatgatgccggtgctggtggtgatggggtgctggtggagctggccatgatggtggttatggccgtgctcatggtgacagtggtgatgatgtaaatggattctcctcctggagtttcctggagaaacaacttctctgcttccccagggctgcctggtccctccctgcctgggggtggcccccagaggcaggaagagcagagcgtggactgagcctgacagggcagtcagtatcttgaactcacagagaacatttaatcttagttaaaagtaaataagttcatttactgggaggggaagaagggcccaatatttactgcaagcatgtggagtgat

SEQ ID NO: 9630 - DNA, 595 bp, Homo sapiens
  MAP TO AL031588.1; EXPRESSED IN HEART, SIGNAL = 1.9; EXPRESSED IN BONE MARROW, SIGNAL = 2.6; EXPRESSED IN LUNG, SIGNAL = 1.7; EXPRESSED IN ADULT LIVER, SIGNAL = 1.8; EXPRESSED IN FETAL LIVER, SIGNAL = 2.1; EXPRESSED IN HELA, SIGNAL = 1.7; EXPRESSED IN PLACENTA, SIGNAL =   2; EXPRESSED IN BRAIN, SIGNAL = 2.7
actgacggtactccagggtccgctctggtcacgcggcgctctgggagccggcctcgggctgcccctccatcttcatctcttcttaccctgcccctcggtcactgactggctgaggttgctagtttttgttcaacagcaactttcctcttctcagtaagaaatttcagctgtgtgcggaataaagacaacgtgtcctagcatcctgtgcagggaagcgtcgtactcaatgggacacaaacggagtcacagggacaacttgcagtgagggtccttgaaaggtggggatttgctcttcttcacctagaagaaggcttcctgccgggaggtatgagggccagagccggtgcagccacactagaccatgaggatgagaagctcatcacggcagcacaggatggagtaagcctgggtccctgacaccaaggagtactgaccagctgtcgcacgtctacgcagaatcccgaccgcagcggctgcactcccaccctccggcccccatgctgctcccagagcacgtcccacgccttcctgccccaggacctctgcactcctgccgttgcctctgcctggagtgctcccccttgcactttcctac

SEQ ID NO: 9631 - DNA, 555 bp, Homo sapiens
  MAP TO AC002472.3; EXPRESSED IN FETAL LIVER, SIGNAL = 3.3; EXPRESSED IN HELA, SIGNAL = 1.8; EXPRESSED IN BRAIN, SIGNAL = 2.1; EXPRESSED IN HEART, SIGNAL = 2.1; EXPRESSED IN BONE MARROW, SIGNAL = 1.5; EXPRESSED IN LUNG, SIGNAL =   2
cgcaagacctcagatatcaccttctccaagaagtgctccatgaggcccttaagtggagggacagcatgccatacctcctcagcccctgcaggtgctaccacctcccatcttggcccctacccaaattggcacctcagctggagcaggagccagttcgagtctcgtctatgtcaactctcgtagggcatggagatgagtgttactgggcagcgggcactgggagcatccactgtgccaggcctgggctgagcccggtacataccttccccaacagctccgtaaagtgggggcggttggggggtccccatttgacagatgtggtggaaactgaggctctgggaggggaagggactagcccaaggtcacatgtgagcatgtgcagacggctgggctgctttgtgcctgcctgcccacacaccaactcaccaatgcccaccacgcagacgtcagcccgcacgaccttgctgctcttcagcacaacctccttcagctgtggggagtgggtggataaacaggtggacccagctcccaggctcaggggacagaggacagaaa

SEQ ID NO: 9632 - DNA, 564 bp, Homo sapiens
  MAP TO Z82188.2; EXPRESSED IN LUNG, SIGNAL = 3.5; EXPRESSED IN FETAL LIVER, SIGNAL = 2.4; EXPRESSED IN ADULT LIVER, SIGNAL =   3; EXPRESSED IN HELA, SIGNAL = 3.9; EXPRESSED IN PLACENTA, SIGNAL = 3.7; EXPRESSED IN BRAIN, SIGNAL = 3.5; EXPRESSED IN HEART, SIGNAL = 2.6; EXPRESSED IN BONE MARROW, SIGNAL = 4.4
gtttggaacagaccaggctcacattggggctcaataactcaggatgaaagaggagtctggacaggtttccgccctgccctctactccctccacctcagctccctggccctccctgcccactaccaggccccacaggagggcactcacccttcaggatggtgatattaatgtagggtctgatctcaggcagggcgtgggggcggccggaggaagaggctgaggatacatgggcaggatccagggggtcctcagagtcacagcaccgttggcagccgctggccacagctctgtcaaaggtgagctccaccatagggatctcacacatcaggagaaagagcaggagcgctgcccagacgggacccagggcggctgtccccatggtgacctggaacaaggaaggagggacaggaactatacttcactcaacatctactatgtgccgatgcctggggtgggcgggtgctgcgtcctccagccacagcactcctgacctaactccagagggaaggttattgtccccatctatcagacaagaagactgagacctccacagagcagcaagtt

SEQ ID NO: 9633 - DNA, 558 bp, Homo sapiens
  MAP TO Z82188.2; EXPRESSED IN HELA, SIGNAL = 1.3; EXPRESSED IN BONE MARROW, SIGNAL =   2; EXPRESSED IN LUNG, SIGNAL = 1.2; EXPRESSED IN HEART, SIGNAL = 1.3
gtgaccaaatctctgggagcctcaccttctagaaaattgtcttgcccatccctccaggattctcccagggttgcaaataatccccaggaggcctgaagccctcagggccccctccccaggaacttcccaacatcatcagccccttccttagcaccgtccctgtcttacagacaaggaaactgaggctcctggagagtatgcgactcatccaaactcacacgctggatgtattccctcaacctgggcccagctgggggccttctgggaggagtggcattggagagctcctctgtcctgccatgggaggcccagccttctcccacatgaagacccctcagggctagagcccggggcacagatgaggagaaaggcaggcctagttcccacccccagggacggcgttccatgacattctgcaaagagtccgtgtgacttcccatgtccatttcaagctgcacagtttccctgaagtgaaaaaccacaaaaccccttctgccgagatgctatgcaggcctgggggccgatgtcagaaccaagaggaaggagaagggaggggag

SEQ ID NO: 9634 - DNA, 570 bp, Homo sapiens
  MAP TO Z83844.5; EXPRESSED IN PLACENTA, SIGNAL = 2.9; EXPRESSED IN BONE MARROW, SIGNAL = 1.9; EXPRESSED IN FETAL LIVER, SIGNAL = 2.9; EXPRESSED IN BRAIN, SIGNAL = 1.9; EXPRESSED IN HELA, SIGNAL = 1.9; EXPRESSED IN HEART, SIGNAL = 2.2; EXPRESSED IN LUNG, SIGNAL = 2.2; EXPRESSED IN ADULT LIVER, SIGNAL = 2.7
gcctggtgcttagtaggtgcttagtgagtgtttgttgagtgaataaatgaacaggaatggatggagaacaggaacccaaaggaatggatgagtaaccttatttccttggtccttgtctggaaactggggcaactggggctggggttcaggtgagtggccagccagtcatctggtctttgcctccccctcatttttgccaggcctcacatagacggtcagccattggatcataggaactgccctggcctgactcacccaatatggaggaggtgcctggggatgccctgtgtgaacactttgaggccaacatacttacccagaaccgctgtcaaaactgcttccaccctgaggaggcccatggagcaagataccaggtgggccagttttccacgtggttggggtggtttgtgatgggggcatgggtgaaggactgggcctgtggtgtccgctaactcgcagttgaacccagatgctggacttcctcctgtcgagagcctcggttttcccacattgcagggaagtggttgaaccatgtgaatgtttcacaatcttcagtcactttcctcctgc

SEQ ID NO: 9635 - DNA, 593 bp, Homo sapiens
  MAP TO AC007363.3; EXPRESSED IN BRAIN, SIGNAL = 7.2; EXPRESSED IN PLACENTA, SIGNAL = 6.5; EXPRESSED IN HELA, SIGNAL = 5.1; EXPRESSED IN HEART, SIGNAL = 4.4; EXPRESSED IN LUNG, SIGNAL = 3.9; EXPRESSED IN BONE MARROW, SIGNAL = 7.8; EXPRESSED IN ADULT LIVER, SIGNAL = 6.5; EXPRESSED IN FETAL LIVER, SIGNAL = 6.8
attgcaggtttcggattgaccagtccctccctggaggccttactgcctagagatgagcttcatgcacatttaaaggcatgggaaaaccactgcaacggcgttacaatttttcagagtgcagaaaatcctgatgttgggtaggtctccgggcagtcatctaccttgtttgcaaagttgggctccaccacatactgcttctcattttcagcagcaccttcaatggtgatgaagaaaatgttgattcctgactctctcgcaagtcttgaagcctcctccactttgtccgtgggccagccatccaccatcaccaccaccacattgggagccccgcttctgtttccattggctttggaaaagaagttcttggtcacaaaggagatggcccgacctggaagaaaaagaaaattcatgcttggagtgatcacgctgattataaatacaggaagagatcacagcagcacaaagaggtccagaaaaatacactcattccctccctagtttttttttttttttttttcctttgagacagggtcttgctctgttgcccaggctggaatgaagtggttcgatcacagctcactacagcctcaacc

SEQ ID NO: 9636 - DNA, 539 bp, Homo sapiens
  MAP TO AP000352.2; EXPRESSED IN BRAIN, SIGNAL =   2; EXPRESSED IN PLACENTA, SIGNAL = 2.5; EXPRESSED IN HEART, SIGNAL = 1.4; EXPRESSED IN FETAL LIVER, SIGNAL = 2.3; EXPRESSED IN ADULT LIVER, SIGNAL = 2.4; EXPRESSED IN HELA, SIGNAL =   2; EXPRESSED IN BONE MARROW, SIGNAL = 2.3; EXPRESSED IN LUNG, SIGNAL = 1.7
cagtgaacggagctgaagggttatcataatgagtggttattactctcatctcactaccatgtgcctgagttactgcgtgaacgtttaagctggaatgctgacagtatacattttaattttcacagcttgttttaaattagttgtaggatggttggtttaaaagctaacaaaaacaagcagtgtgtggcagcctgttgccctggtcatgggcccatttccagtgtggctgactggcctgtggaacaaatcttagcaactgggaaggctgctcacactagaggtgtcgttctcctaggtgtactttcggctccatgcttccatcctgaagctcctggggaagcccgattctggggttggtgcagaggtcctggtcaactttatgaaggaggctgcagaaggaccctttgccaggggcgaggagaagaacacacccaaagcttcagaaaagtgagtagcaccctttaggcgacccctagcagcttaccccatctgcatcccagatggctcgtttactgcaatgtgttgttcagagggttgct

SEQ ID NO: 9637 - DNA, 567 bp, Homo sapiens
  MAP TO Z83844.5; EXPRESSED IN HELA, SIGNAL = 1.4; EXPRESSED IN PLACENTA, SIGNAL =   2; EXPRESSED IN BONE MARROW, SIGNAL = 1.5; EXPRESSED IN HEART, SIGNAL = 1.8; EXPRESSED IN LUNG, SIGNAL = 1.7; EXPRESSED IN ADULT LIVER, SIGNAL = 1.5
gtttttgtgcagataggggctgcattctaggggcctgaggcagagagaacccgggctgcagggcactatgggccagggtagctctggcttctggccctgggtcagtccagcacctatatccccaggtgctgcttcgcgtaaaagaaaacgaactccagtacctaaagaaggaggtgcagtgcctccgggacgagctccagatgatgcagaaggtaggtccttccgctgggctgggggccgtcggggactctggagccatctggatgccatcctgtgagcacctgctctgtgccaagccctccactcgcttcatccttcctcaggctctcctgtgcttctcccatgtaggtgtcatcatccccattcactgacagggaaactgagactaagaaaggggaagtgacttccccaaggctgtacttggcttctgtttatttagcattatttaatttattgattattattgagcacctactatatcctgggcactgtgctaggtgctgggaagacagatgtgaacaaaataaccccaaatctctgctgtggggagcttgcactccagtgaga

SEQ ID NO: 9638 - DNA, 559 bp, Homo sapiens
  MAP TO Z86090.10; EXPRESSED IN FETAL LIVER, SIGNAL = 5.3; EXPRESSED IN ADULT LIVER, SIGNAL = 6.4; EXPRESSED IN PLACENTA, SIGNAL =  11; EXPRESSED IN HELA, SIGNAL =   4; EXPRESSED IN BRAIN, SIGNAL = 3.4; EXPRESSED IN BONE MARROW, SIGNAL = 2.7; EXPRESSED IN LUNG, SIGNAL = 4.4; EXPRESSED IN HEART, SIGNAL = 5.7
tgttcaaaaagcttcctgccatgagcaatcactgtttttttcactgatcaggtctttattaaaaataagctgtccaaaattatttgacctttatggaataaaccaacaagctcatgcagcaggcttcgtttcctctgtggtaggtttttttttcagctactgatgtcttggttggtagctgctgccctttttcccaccagaggtttctcctgcttaaaaacaacaaccttctttcctttcttccctaccacaggcttcttgactgcaaccccctttctcatctgatttggcctctagtgctgctggtgctgctggtgctgctggtgctggtgctggtgctgctgctgctgctgccaccgccgccgctgccttatccacctggagtttgtggttgctggcctggcaaagcctggtgttgcagagcatggtctttgcatatgggtttagcttcaacatgattttcaggttttccaggaggtttgtccccaggactctacgatgaatcttcctgcaacgtgcttgaagggctttggatgtctgggcttttcaagattctgct

SEQ ID NO: 9639 - DNA, 569 bp, Homo sapiens
  MAP TO Z82188.2; EXPRESSED IN HELA, SIGNAL = 1.6; EXPRESSED IN PLACENTA, SIGNAL = 1.5; EXPRESSED IN BRAIN, SIGNAL = 1.9; EXPRESSED IN BONE MARROW, SIGNAL = 1.8; EXPRESSED IN HEART, SIGNAL = 1.3; EXPRESSED IN LUNG, SIGNAL = 1.6; EXPRESSED IN FETAL LIVER, SIGNAL = 1.7
tcctaatgatcccccaatcccctggctcctggctgtccttggattctccctgcagaaaaccctgaagggaagataaatctctcagaggagaagcccttcttctaatatccctgacactgggcctgcacttcctccctccaatgggagctgtggtccgcactgccctatatggatgtcactgttgatgtgcaaagctcctgggaagggaaggcaccccaaatccaaacaaacgcctctgagcacgcctggctacccctgccccaaggacctggggctgcagcgggctcagagtgccaggctgggtgaagccaagggtagcaaggaacccctaggccgtggcttctccagctggctgggttcagagcatctcctccctgttcttggggctgggagaagagaaggattctgagcctgggtcatcccctaacctgtcctcaacccatccttctccccaacccttcatcaggtctcctgagcctgggacagcagcactaagggaggggcacctggacagtgggctagaggatcctaacagtgctgccagctgctcatcactgagccctgactgt

SEQ ID NO: 9640 - DNA, 559 bp, Homo sapiens
  MAP TO Z95114.19; EXPRESSED IN ADULT LIVER, SIGNAL = 1.7; EXPRESSED IN PLACENTA, SIGNAL = 1.9; EXPRESSED IN BONE MARROW, SIGNAL = 1.7; EXPRESSED IN FETAL LIVER, SIGNAL = 2.3; EXPRESSED IN BRAIN, SIGNAL = 2.4; EXPRESSED IN HELA, SIGNAL = 1.3; EXPRESSED IN HEART, SIGNAL = 1.6; EXPRESSED IN LUNG, SIGNAL = 2.3
acccttgaggaggagaaagcaaattgtgggactgaatgtgagccacctgtggacagagggaggttggaggggctggatctctgcaatccctttgcgtgtcagcaaatgccaagaccaacctagcccggtgttttttaatctcctgggccccagccagctggtatttagagaaattctacttgctccagctccctctgccctcactctcacaccaaggcagggtccttttgtcctgtaggggtatgaagagaagataatcagaggaagggatggacatctgataatcacagaaactacagagtctatacaccgaaatagagatgggaaggaacgttctgacaatgacctgggcctggcaacatgtgtgataactaattgataatagccagtgtgtactgggtgtctgtgatctgcagggctcctcatatgtgcctcattcgatgatcacacacaggccaggagatgggtgcaaccgtggctcccattttgaaacagaagaaacctcaaatgttaagcaaccttgccatgttttcacaataggggtagagccaggacttct

SEQ ID NO: 9641 - DNA, 562 bp, Homo sapiens
  MAP TO Z82188.2; EXPRESSED IN LUNG, SIGNAL = 2.5; EXPRESSED IN HEART, SIGNAL = 1.5; EXPRESSED IN FETAL LIVER, SIGNAL = 1.9; EXPRESSED IN ADULT LIVER, SIGNAL = 1.6; EXPRESSED IN HELA, SIGNAL = 1.2; EXPRESSED IN BRAIN, SIGNAL = 2.3; EXPRESSED IN BONE MARROW, SIGNAL = 5.6
tgagggagtgcaagaggaagcccttctctgcctgggacatgcaaggcaggcagactccctgagctgggccttaaggggagaggtagggtttcccaggctgagctggctggaagggcatcccaagcagagggaacagagacagcaaaggtcaggactgcaaggcaggtgggagcagcacaccgtctgtggataggagagcggccggagacggtcgtagtcctcctgcccagcagtgtcccacagccccaggttcactggcttgctgtccaccatcacattggctgaatagttgtcaaacctgtggggagcaggcaaggcggaggtaaggtcaatctcaaaccccagaacctgggaattgtggtccagctccatgtcattcctcggaggctgagacctagagacagtctgcgactggcccaaagtcacacagcatttgcaattgggtttctttatttgtttcattactgattcattatattttttaaaaatgtaatacaagttaacaagaagaaaaaaagattgtctcttaatccttttcctacccgtacctgtcctttggaaa

SEQ ID NO: 9642 - DNA, 576 bp, Homo sapiens
  MAP TO Z97055.1; EXPRESSED IN FETAL LIVER, SIGNAL = 8.8; EXPRESSED IN ADULT LIVER, SIGNAL = 7.2; EXPRESSED IN HELA, SIGNAL = 5.7; EXPRESSED IN PLACENTA, SIGNAL = 4.6; EXPRESSED IN BRAIN, SIGNAL = 6.1; EXPRESSED IN BONE MARROW, SIGNAL = 5.1; EXPRESSED IN LUNG, SIGNAL = 4.2; EXPRESSED IN HEART, SIGNAL = 4.9
cagaagacggcaggtccccagcaggggtcccaccctcaagccaaaaggcctgataccaagacccaaagtgacagcttacatccccgttttcccgctcagatgttatctcttccaaaaccactccctgcccccaatcctgtgcttataaaaaccccagaattcagccagcagagagagaaaaagtaactggacgtcagagactacggttggacatcggacagaagcagtgtgacttcagaggaacaggctcatggtgtagcttcggagagtctggccagggatggccagactccaggggaagataaccttcccactcagtcccattttcagctccccttcccgctgagagccactttcatcagcaataaaatcccccacatttaccatcttcaattcgttcatgcagcctcattcctcctggatgccagacaagaactcgggtgccacgagtgcaggtgcaaaaggctgtcacactgacccttaaccctcgctggcagaaggcagccgcctcacatgaaaaggcagaggggcccactgagctggtaacacttaagccccgacagctgggttaaaaga

SEQ ID NO: 9643 - DNA, 572 bp, Homo sapiens
  MAP TO Z98884.11; EXPRESSED IN HEART, SIGNAL = 1.9; EXPRESSED IN BRAIN, SIGNAL = 3.1
tttctggtcttttatccgagaacttcgggctgctgaaggtgccaccatcctgtgtgaggtggtgacagattcacgatcgtgctggggaactctggctggcggagacctctctggtttggtgaagttacggacggcatttggatgctggtcccgcaaggctggcgaggccacgtgttgactgcttttcttccagaacacaacctcactcttcctcctgctctgccctagataaccagttcaggatgtccatcctggaacgactggagcagatggagaggaggatggccgagatgacggggtcccagcagcacaaacaggcgagcggaggcggcagcagtggaggcggcagcgggagcgggaatggagggagccaggcacaggtacgaggcggtgctgatgctcagctcccatttcgcttcatgtttatggattggcgaggcagtggatggatcacaggcctcttctctgctgctgatgcggtccctgtattcaggcagaaggcctgagggagtactttacggtacctgtgcttttaagcattataatctgtgcagtatggaagaagccttgga

SEQ ID NO: 9644 - DNA, 574 bp, Homo sapiens
  MAP TO AL022319.2; EXPRESSED IN LUNG, SIGNAL = 1.3; EXPRESSED IN HEART, SIGNAL = 1.3; EXPRESSED IN ADULT LIVER, SIGNAL = 1.5; EXPRESSED IN FETAL LIVER, SIGNAL = 1.4
atggccatgcctaacttccagggggtggggagcaccatttcgccttgtccctgggagaaagagaaccaggcactcgtgcctacgatgggagtttcccagcttgcttcactgggttgttaggatggagagggaattgtgtatgatgtgccttgtgagatatcaagccctctgcagatgtaaattacacacacgaaacacaaatgtaaattacaaacataaaccatgaatgtctcatcattgttgttgtcactcccatcttcaacaccattccaagaatcagccgtggccgtcggacgcatccccttcctgtcaggacaaaagacccggagcagacccgcactgtggctgtgcgggctgcactgggttcctggtgcgctgattgtctttccatttttccttcctctgccaaggtttctatcattatccaatcccaaagccacagaagcaccagaattttagtagacttgggccctagagcctgatagcaagccatcatggtgcacagctacagatggaacgtgctgggtctttaaactgtgacatgaacactgtggtttttataccattccacggg

SEQ ID NO: 9645 - DNA, 543 bp, Homo sapiens
  MAP TO Z82188.2; EXPRESSED IN HELA, SIGNAL = 2.4; EXPRESSED IN PLACENTA, SIGNAL = 1.6; EXPRESSED IN BRAIN, SIGNAL = 2.2; EXPRESSED IN HEART, SIGNAL =   2; EXPRESSED IN BONE MARROW, SIGNAL = 2.8; EXPRESSED IN LUNG, SIGNAL = 3.1; EXPRESSED IN FETAL LIVER, SIGNAL = 2.9; EXPRESSED IN ADULT LIVER, SIGNAL = 2.8
ttacaaccaggacctcaggccctgccaggtgagggtgaggtcacacaccccacacttaaaccgtgaactctgtcctgcctgccacaaggtgtttcttttgctctggcagctaaacaagccgctgcctcgagataagccagatgaaatcaatcacagctcatccagggcccctacgctgagcaactgagcccctgctccaggccctaattccagccttcattagagaagagactgatttcagtagctttctccagatcagaagaccacggaccacggaccagttctggccggtttgcagaagctccgcgcccgtgttccgaagacctttagcggtatagggcctaagtgtaatgcatttacatgttaagtctccaccccaaagtgaacatgggtagtatatcacatgcatgttctttcaatatgcatccgtcagggccaccttcatgaatatgcatagctcctcctgtagcctgttgaatatgtatgtttagccaacgcctttagcataaagctgctaccccaacccctcctcttttgaagtgc

SEQ ID NO: 9646 - DNA, 545 bp, Homo sapiens
  MAP TO Z97055.1; EXPRESSED IN FETAL LIVER, SIGNAL = 1.8; EXPRESSED IN ADULT LIVER, SIGNAL = 5.2; EXPRESSED IN HELA, SIGNAL = 3.7; EXPRESSED IN PLACENTA, SIGNAL = 3.2; EXPRESSED IN BRAIN, SIGNAL = 3.2; EXPRESSED IN BONE MARROW, SIGNAL = 4.9; EXPRESSED IN LUNG, SIGNAL = 4.3; EXPRESSED IN HEART, SIGNAL = 3.3
agggagagaggatgaggacctggctgccacttggccacagctctgggcagggttaaaaacactccccgactccctccaccatgctcaggatagaaatgagcagacttttctgcatcccgatgcccagcctacctgggccaggtctttggggctccatcctctccttaatggcaggggggtggtggggagaagcaccactccatacgcatctcaggacccagcagctctgccaggacaagaccttcggagggtgccttatgaggagacatgggctgcatcccaccaggggtgggtaccacagcttccagctggaaccagccctcaacaggcccatgcttggatgtgtgggcaggttctgtgccgaggaataaaatttcagctgctagcaaccccaggtctgcactggactgccaggggaggcggagagggtcttgtggcctaggcattactttgtaaataccacggaggacagcaggtgttgggtgcagcccgggaggctgagcagtgatcttatacatcaccatccccacattgctccaaacctg

SEQ ID NO: 9647 - DNA, 567 bp, Homo sapiens
  MAP TO AC007719.1; EXPRESSED IN BRAIN, SIGNAL =   3; EXPRESSED IN PLACENTA, SIGNAL = 5.8; EXPRESSED IN HELA, SIGNAL = 3.7; EXPRESSED IN HEART, SIGNAL = 3.1; EXPRESSED IN LUNG, SIGNAL = 8.5; EXPRESSED IN BONE MARROW, SIGNAL =   5; EXPRESSED IN FETAL LIVER, SIGNAL = 6.2; EXPRESSED IN ADULT LIVER, SIGNAL = 5.4
ggaatgttaagccaatggaatacctttcactcgcgtctgtttgaagagaccaccaaacaggctttgtgtgagcaataaagctgtttatttcacctgggtgcaggtgggctgagtccgaaaagagtcagcgaagggagataggggtggaaccattttataggatttgggtaggtaaaggaaaaaggggggttgttctctgacaagcaggagtgggggtcacaaggtgctcagtaggggagcttttgagccaggatgagccaggagaaggaatttcacaagataatatcatcagttaaagcaggaaccggccatctggatgtgtacgtgcaggtcacaggggatatgatagcttagcttgggctcagaggcctgacattcctgtcttcttatattaataagaaaaataaaatgaaatagtggtaaagtgttgagatggtgaaaatttttgggggtggtatggagagagaatgggcaatgtttctcagggctgctttgagcgggattaggggtggcgtgggaacgtagagtgggagagattaagctgaaggaagattttgtggtaagggg

SEQ ID NO: 9648 - DNA, 568 bp, Homo sapiens
  MAP TO AC008272.1; EXPRESSED IN HEART, SIGNAL = 1.5
cagaggaataaccaagggatagctcttaagaagtatagctacagcccgacccaagcctcttgaagtgcgtattctgcatctagcactggagaaaagcctcgctatttctgagcaacaccctacaaaatgtcacccgagaggacaacacccaaaatagtttagatttgtgggtcatgagtcccaatgagcctggggaaattcacattccacacttgaactcaaacttacccccttttctccccatttcagttgccaacatccaaactcgctgttgattgccagctcctgctccttgcagcagcccagcatgctctctgctggtgccaaaatacccttccaccaaaccccgctaacttctggaactgtcctagaggggtaaggcaagtcccgtattttgcttcctctgtgcatgtacttgttactcctttaaaaacacatataatacagcacattttaaaaaggggctctggggagggacataatattcctattttataccctatgggatataaaatactgatagcttttaaaaacgggattctccttacccctacaggccctctcctag

SEQ ID NO: 9649 - DNA, 567 bp, Homo sapiens
  MAP TO AL079300.11; EXPRESSED IN PLACENTA, SIGNAL = 1.2; EXPRESSED IN LUNG, SIGNAL = 1.3; EXPRESSED IN HEART, SIGNAL = 1.5; EXPRESSED IN FETAL LIVER, SIGNAL = 1.4
acaacctggcagatgacctcctggcaggtgacatgcccagctcccctgggtaaggcaagagctagatcctttcttccctgggcttcctctcagtctcactggtgggagaagccaagaaatagcgactatctgcaccttctgagtgtccccaggatgctgtcatcacggctccaccctaaggagccagagaaggcgaggcctgtgccctctttctacagatgaagaaattgaagctcagagagtgataggcccccaggcacccatcaagcatgtgtcagagctggaactgcgccctgggttcactcccccaccaggtgtcaggcaggcctggtgttcaatgccagccttttcagagtgtaactcacctgggacacttctaagactgagtgttctcatttgtgaaatggagacaatgatccctgccagctgcatcctaaaaggtaaaggagactatgcctgtgaaagtgctcagcacagcacggaacatgacgcctagtaggccctcagtaatatcagcttcccttcttcctctagacccatcccccggcctgcccttgcaaataaatt

SEQ ID NO: 9650 - DNA, 574 bp, Homo sapiens
  MAP TO AL035682.16; EXPRESSED IN BONE MARROW, SIGNAL = 1.3; EXPRESSED IN LUNG, SIGNAL = 1.2; EXPRESSED IN HEART, SIGNAL = 1.3; EXPRESSED IN FETAL LIVER, SIGNAL = 1.5; EXPRESSED IN PLACENTA, SIGNAL = 1.4
aaggctaacatcacccatgcccccttgatgagggcagaatacttcggccccctgttttctcagacaactgagcaggcatgtctgatgctcaaaaggaagcaagggaagatcgctggatggacatcgaggaattggaagtgaagtcatcaagacctgagtcctttcagtgtgcaaagtcctgtacagaactagtcagggacaatcctcatttctttgtcaaagacaagtcaaagaccacccaacagagacacatgtccccttttcaggtagaggtcaccaccaggagcgtgactgtacaggccaacctagggtcttcatcaaaaagtgggtcctcatccacacctgcaaagtgagcttgaagcctgaagactgagtaagaaatgaacagcggaaatggcaacatgttgatgtttggtttgtcaccctcccccatagcctctccttgcctgaattgaattcttgaattctgctaccaacagcatcatttctttttccacttatatgagcttgctttgaaaaaaaaaaaaaaaagatcattttcagaagttcataatggggaagaaagggagaaaat

SEQ ID NO: 9651 - DNA, 563 bp, Homo sapiens
  MAP TO AC007567.1; EXPRESSED IN FETAL LIVER, SIGNAL =   3; EXPRESSED IN ADULT LIVER, SIGNAL = 3.7; EXPRESSED IN HELA, SIGNAL = 1.8; EXPRESSED IN BRAIN, SIGNAL = 1.8; EXPRESSED IN PLACENTA, SIGNAL = 3.8; EXPRESSED IN HEART, SIGNAL = 1.7; EXPRESSED IN LUNG, SIGNAL = 2.2
ccattaagcattgagacacaggtatagaagctcactcaaccatttctgaacaaatacaaaccagactatctttctgtgtgtgcaaagcacatctagatcatttagtcaaatttaattaggtctctcgtgagtttttggttgaaacactaattttgaattcacataagctttagggaagttaaaaataaacgtcacaaatagcattgaaaacatgcggatcttacatattatacatattgagataaaacaaaagaaccaaactctgaaaaggaaaatggtttatttgtctgatttctgtgtcatgctaatggagattattggacttaagtgccaagttctccagacagaggctggagaactaatatactttccaatagatgtactaataaattgtaacacttgtaagatcttaaacagctacatacaatttctgttgtaagttcttcatgtattttgtctggatgtattaactattcaccctccaatatagagaaaatcattagacaaattcatataaaagaaagtatcaatcaaactctatgctttttcagagtatacatgga

SEQ ID NO: 9652 - DNA, 552 bp, Homo sapiens
  MAP TO Z83844.5; EXPRESSED IN HELA, SIGNAL = 1.5; EXPRESSED IN LUNG, SIGNAL = 2.1; EXPRESSED IN BONE MARROW, SIGNAL =   2; EXPRESSED IN HEART, SIGNAL = 2.3; EXPRESSED IN FETAL LIVER, SIGNAL = 1.5
gagactgaggcaagtgggagaagcagcttgccaggaggctctgaggggacatagcaagcagggccagcacccgcgtgtctagactcccaaataggcctttctagggacctcttcaccatgccaccctgcctccctgccagccccactcatgccagacgctgcagaggagtaaattgtccctccatccaacagcaaacagtccctgatgccgggcccattttccagggtggaggaggatgcaggagcagctcctgaggctacaagaacccaattattgggctgggctgggaaagtggccacacccacccgcccgcagcccggcgaggaccacacctgaagcgcctctgaccctcggtctaggactccgcctgagatgccccattccttgatctggcagagaggggaggcatgggggaggggcagtggaactaggctgggccccatccagcccttcctatggttgaggttttggggaggcccggaggaaaaagtgaagctgctgtggttggtttccaagcagccacttggtctggaaggaggggtaaggcactc

SEQ ID NO: 9653 - DNA, 582 bp, Homo sapiens
  MAP TO AC002472.3; EXPRESSED IN PLACENTA, SIGNAL = 4.7; EXPRESSED IN BRAIN, SIGNAL = 5.5; EXPRESSED IN BONE MARROW, SIGNAL = 4.8; EXPRESSED IN LUNG, SIGNAL =   4; EXPRESSED IN HEART, SIGNAL = 2.8; EXPRESSED IN ADULT LIVER, SIGNAL = 5.5; EXPRESSED IN FETAL LIVER, SIGNAL = 6.9; EXPRESSED IN HELA, SIGNAL =   4
cagcaagtccacaaatcaaagaattctttctggctggtcagcccagctcggcttatgcaggctttccacacacctggactgtgaggagtcctgcggggaagcgattggtgtagctgtaacttggcgttccccagacgtattgtttgcacgatgccttccagcatcccacggcgctgctgctgggggcagattggcctggggaggcagcacttgctctccagctcatctgggttgcttttccccgcagtggatatcacaggctaaaggagggggcagtccccaccatatttgagtctttctccaagttgcgccggacaaccaagaccaaaggacacagttacccacctggccccgctgaagtcagccggctcagacgatgcaggaagcggtatgtgatatgggtgggggatgccccactcccacccctaggctgagggactgggccctaggggtgtctgccagcagtctcgctggacagggttcttgctacacagaacctgtggatcgggtttgggtgttaagggtggatcaggtgggctggtggaggggggtctggcaagccctcagcctagcccatcagtc

SEQ ID NO: 9654 - DNA, 958 bp, Homo sapiens
  MAP TO Z83840.7; EXPRESSED IN HELA, SIGNAL = 5.1; EXPRESSED IN BRAIN, SIGNAL = 3.3; EXPRESSED IN PLACENTA, SIGNAL = 4.6; EXPRESSED IN BONE MARROW, SIGNAL = 3.5; EXPRESSED IN LUNG, SIGNAL = 3.7; EXPRESSED IN HEART, SIGNAL = 2.7; EXPRESSED IN ADULT LIVER, SIGNAL = 4.4; EXPRESSED IN FETAL LIVER, SIGNAL = 7.1
tcattacccctgaaggtagggatcttgccttattttagtgccatatacaaattcagtgcacatattttgagcaactaataggtactgagcacttatggagcttccatttagtggtaagtaaatattaattgaattttttttttcagtgtatccaaagtgtgtacatcagtaagatcataagcagtgatcgagatctcttggctgtggtgttctatggtaccgagaaagacaaaaattcagtgaattttaaaaatatttacgtcttacaggagctggataatccaggtcagtaatattttaagatcagcttttcccttatatatgagaatatcagtactctgatcaaagaggactgtggagaaggaagcaagttacatcttgtctaggagtatgctttcctccataaggggaccttgctcgatgtggactttgttaaatgggttaaacagctctggggtgaaaaagggtccttctgttagtcttgtggtaaaggcagccactgacattcttctgatttttctttccatttgactccctgcctctgatcaggtgcaaaacgaattctagagcttgaccagtttaaggggcagcagggacaaaaacgtttccaagacatgatgggccacggatctgactactcactcagtgaagtgctgtgggtctgtgccaacctctttagtgatgtccaattcaagatgagtcataagaggatcatgctgttcaccaatgaagacaacccccatggcaatgacagtgccaaagccagccgggccaggaccaaagccggtgatctccgagatacaggtgggcatatttccccgttctcttaaattggcacttaattattgtttttttattttttatttttttaggagttcaggagtcttggctcagcctcagcctcccaagtagctgggactataagcatgtgctgttgtgcccagtgcagttttattgc

SEQ ID NO: 9655 - DNA, 586 bp, Homo sapiens
  MAP TO AB016897.1; EXPRESSED IN PLACENTA, SIGNAL =   5; EXPRESSED IN HEART, SIGNAL = 2.4; EXPRESSED IN BONE MARROW, SIGNAL = 3.5; EXPRESSED IN ADULT LIVER, SIGNAL = 4.4; EXPRESSED IN FETAL LIVER, SIGNAL = 6.3; EXPRESSED IN BRAIN, SIGNAL =   3; EXPRESSED IN HELA, SIGNAL = 3.6; EXPRESSED IN LUNG, SIGNAL = 3.8
tttcttagcttgattgcttgctagtttttaaatgaggtaaaatatagattcggtgagatgcacagatcttgagtgtgcagttcaattgattttgataaatacacccatgtaactgccagctgaatcaagataaagaccattctcattactccagaccttcctgtgtttcagtagctttgttcacatgttcggcagcatgtgagacgaagttacctaagccgtaggcaattttatgtgattctgcatagtagtcaatatggtgataatgttactttcatcagaaggctcaaagtaatggacctgaaaagcaggaaaaagaaggggttatccagaacttcaagagaactctctcaaagaaagaaaagaaggaaaaaaagaagagagaaaaagaggcattgcgacaggcatctgataaagatgatagacctttccaaggggaggatgtgtaagtcagttttggaaatgttcccctttctttgtgctccaaatcagatgtttttgttgcaccaaaattgttaaattttcagataaattatggaaaggatgagtatcagtcaggaaatgtgtttgggtctactcccagctc

SEQ ID NO: 9656 - DNA, 550 bp, Homo sapiens
  MAP TO AC007719.1; EXPRESSED IN BRAIN, SIGNAL = 2.9; EXPRESSED IN PLACENTA, SIGNAL = 3.7; EXPRESSED IN HELA, SIGNAL = 1.9; EXPRESSED IN LUNG, SIGNAL = 1.9; EXPRESSED IN HEART, SIGNAL = 2.5; EXPRESSED IN BONE MARROW, SIGNAL = 2.6; EXPRESSED IN FETAL LIVER, SIGNAL = 4.4; EXPRESSED IN ADULT LIVER, SIGNAL = 2.7
  unsure 66
  unsure 106
  unsure 290
  unsure 292
tgtaatccccagtgttggagttggggcctggggggagaaattaaatcatgggggtggatttctcantgaatgatttagcaccatcctctttgtatcgtccttgcanataatcagtgagttctcaagagatctgattgtttaaaagtgtgtggcaccccactcttcctttctctctctcttgctcctgctctggccatgtaacatgcccacttcctgttcacctgctgccttaattggagtttcctcaggcctccccagaagccaagcagatgccagcatcaagcttcctngntacatcctgaagaaccatgagccaattaaacctcttttcttaaaaattacccagtctcaggtatttcttgatagcaatgcaggaatggcctaataaaataaccaagcttcaaattaagccctccattttgctgtccagtagcataagggagcagactacatcttcttccctgcccgtttgctatgtacttgtaaatttcaacctacaaggcagggttcctattctggtacacagatataattcagtttgtgatcttga

SEQ ID NO: 9657 - DNA, 566 bp, Homo sapiens
  MAP TO AC004032.7; EXPRESSED IN HELA, SIGNAL = 4.3; EXPRESSED IN BRAIN, SIGNAL = 4.2; EXPRESSED IN PLACENTA, SIGNAL = 7.6; EXPRESSED IN BONE MARROW, SIGNAL = 3.1; EXPRESSED IN LUNG, SIGNAL = 4.8; EXPRESSED IN HEART, SIGNAL = 3.1; EXPRESSED IN ADULT LIVER, SIGNAL = 6.3; EXPRESSED IN FETAL LIVER, SIGNAL = 8.9
cgtgcctacatttacatgcgcacgctggtccctcatgagtatctcccctgtccttcacagggcaatgggacaggctgtccaatgcccacctcctcccttgggttgtgggtcacctgggcagcagctcctctcctccttccacagagtggtgtgatgtgactgagccctctaggaagcaacttgctgggggaagagaaggtagaagcttaaagagtacaaaggctagaggagcaggctgtgtaccaaaatccaggtgcttctgagagaaatgttggctgagcctttcctctgtgccaggcacactcttagcaactgtgcacacatcatctcctgtgatcctcacagcagtcccataaggtaagtagggttgcctcattctaaagaaaagataactgaagtacagcaaattacatactttggccagatcaagatgggatgaagggatggggggatggatggatggatggatggatggatggatggatggatggataggtgtatgggtgagtgtgtggataggtgggtggatggatgggtgaataagtaggtggatgggtagatggatg

SEQ ID NO: 9658 - DNA, 573 bp, Homo sapiens
  MAP TO AB016897.1; EXPRESSED IN HEART, SIGNAL = 1.5; EXPRESSED IN BONE MARROW, SIGNAL = 2.4; EXPRESSED IN LUNG, SIGNAL = 1.4; EXPRESSED IN ADULT LIVER, SIGNAL = 1.8; EXPRESSED IN FETAL LIVER, SIGNAL = 1.9; EXPRESSED IN HELA, SIGNAL = 1.3; EXPRESSED IN PLACENTA, SIGNAL = 1.5; EXPRESSED IN BRAIN, SIGNAL = 1.8
tgagcagaaggataaaggagctaaaaattgaaaagaagggacttaggtatttgaaggacatccttaagtatttgaatgatatgaaggaaaggtatctttctgtgttgtttcaaaaaggcagaactggaatgaccaaaaagagaaacaatgaggtaatgaattgttaacataagaacttcttgactagtgttacctgaaaacagaatggattgtattgactgagaggtcaacattaggtccagacagaagagagccgagatagggctccttcccatctcaggttcagagtccatggtgcagagtgtagggtagtcctgagtcgggagggaattcttgaagtccagggtgggatctggagggagctgatggtaaagggcagaggagagagagtggcaggccttggtccccgggaaagatggacgactgcccggcccactggagtcacatatgctgcttctgtcccacctatgcagaggcgagtgggggcctccctcttctacaagatattcgtagtggaaattaaaaagggagaggagaaaggaggtgtttcagtgtgttctgcaggtccatcaa

SEQ ID NO: 9659 - DNA, 587 bp, Homo sapiens
  MAP TO AC004032.7; EXPRESSED IN HELA, SIGNAL = 2.1; EXPRESSED IN PLACENTA, SIGNAL = 2.5; EXPRESSED IN BRAIN, SIGNAL = 2.7; EXPRESSED IN BONE MARROW, SIGNAL = 2.2; EXPRESSED IN HEART, SIGNAL = 1.9; EXPRESSED IN LUNG, SIGNAL =   2; EXPRESSED IN ADULT LIVER, SIGNAL = 1.9; EXPRESSED IN FETAL LIVER, SIGNAL = 2.4
tcagcaatagtggccctttcaaattaacagaggggtggggtaaggttgagggggaaggaaacagacagggggagaggaagggcctggtagaggaggggatctttcttgtcattcaagttagggcagccacgaatgtcccaaatctgttggagatgtcagaatgcagggaccgccaggtgggcacggaggctcgagccttggcgtcacccacgtcgtctgtgcagtggacagacaggcactgcaagtggctgccaggctgggatgctgaggccttgtttgcagggaggtcgtgggctgtggagagagaaggaagagaggacattagtggcacactcgtctctgagggacaccataatgggggccaaagtggcagaggcatacaagacaggcaccgtccacgccctctttccatggctaaagctggtcccagaggatctagagatgttgttttgaatcttcttgctgttacccctgattcatctgtgagatctcagccaagggaagacctccctgttgggcctcagtttccccactgggaaataggaaagtgaggcaggataaactcagagtttgcccatctctgatgc

SEQ ID NO: 9660 - DNA, 569 bp, Homo sapiens
  MAP TO AC002472.3; EXPRESSED IN PLACENTA, SIGNAL = 1.4; EXPRESSED IN BRAIN, SIGNAL = 2.7; EXPRESSED IN HEART, SIGNAL = 1.9; EXPRESSED IN BONE MARROW, SIGNAL = 2.5; EXPRESSED IN LUNG, SIGNAL = 1.8; EXPRESSED IN FETAL LIVER, SIGNAL = 1.9; EXPRESSED IN HELA, SIGNAL = 1.9
atgacagatggcatgaagggttggggagccttcaggcttctaacccgctgggggctctgggagaggtgggggtgggggacacctaggtggggcctaaaaggagaagcatgtgtcccttaagcaggtggaaaggggggtactttccaggtgggggacgtggagcgggctgagccctggagcatgagccaggatagtggccagtgtgtttgctctgtctgtcccagggcgccggtctctggcttcctcattgagctccaatccatatgtcaagtggctgaacttttgggacagtgggctctatggggcaggtacagaggccctggcaggtgccctgagcaaaagcagcagcatctgcggtaggtgctgggtctggggcaggtgggcaggcgtgagtcctccctttcctcagggatgtgcctccacccctgaaagctgggccatgtcacctgggtcctgctggtgttgctggtggatagaggaggggcctcatcacaggagggggtatgtggggtggagttagaccctctgctgtgcagctgatgctggatacaagtcccttcctcatccac

SEQ ID NO: 9661 - DNA, 576 bp, Homo sapiens
  MAP TO AL008723.8; EXPRESSED IN HELA, SIGNAL = 1.4; EXPRESSED IN BONE MARROW, SIGNAL = 1.9; EXPRESSED IN LUNG, SIGNAL = 2.9; EXPRESSED IN HEART, SIGNAL = 4.6; EXPRESSED IN PLACENTA, SIGNAL = 2.1; EXPRESSED IN BRAIN, SIGNAL = 1.9
catccaaggggtctcaactgccccaaacaaccccatcctgccaggccccactccccctgtccctccctcccattgttcagtcccctcaccccctcaccatgggcacctgcagtctcattcagagacaccctcatcttagagtccctgatagtggggagtttggcccctcagaggccttggttgctttggtcaatccataatgcctgggcctgggacccccaccatttcttgttcatcagggacacagcagctgtgaaggcagctgccttcaccagagcagcgatgtagcccagcaagggcagggacagagacgcaaggtctgggggatttttccacaatgctgcagaaagaaagtccctgtggagctcagtctcagccatccctgccccagctgtgagctgaactgaatttcaggcatctcagagtcccttcacctttgcatgacccatttccaggacatgacaggtcaagcccatgggagaggggatcacccaggtctccctcatctccatggacctcctgggaacattgccagggtccactccacccctggacgctgtccccaagcttcaccct

SEQ ID NO: 9662 - DNA, 594 bp, Homo sapiens
  MAP TO AB016897.1; EXPRESSED IN HELA, SIGNAL = 2.5; EXPRESSED IN PLACENTA, SIGNAL =   3; EXPRESSED IN BRAIN, SIGNAL = 3.2; EXPRESSED IN HEART, SIGNAL = 2.5; EXPRESSED IN BONE MARROW, SIGNAL = 3.7; EXPRESSED IN LUNG, SIGNAL = 2.2; EXPRESSED IN ADULT LIVER, SIGNAL = 3.1; EXPRESSED IN FETAL LIVER, SIGNAL = 3.3
cctggtggtcgtttctgtgctgcgatggagaccacggaccgccccagccaccggctgctcctcccggcattgccagagtcactgtggtggggcctgcatccccacccactctcccaaaagtcatcccaggaaattggatacaaatcacggtagcaagtgacctcccactctaccaaatccaataaagagttttaaacaaggacccaagcgacctctccccaacaggtggcattctgcgtcacccactccctccctcttaactttctttctttggcttcggtgacttcatctgctttcttcttttctaatttgcatttgagaaagatttctacagcaacaacataaaggacaggtgggaggggtgctggactggaggcagaggccagttaggggatagccagggcgctgtttcattacactggacaatagcagtgggcatggggcagggagcaacccaaggctgcctacgaggcacagccgaggctctgtccccaggcagcgcggggctgaggctggcgttccgtcattgcttcctgagctgccccactgagagacacgccggggattcccgcggcctctcacctctggcaagac

SEQ ID NO: 9663 - DNA, 983 bp, Homo sapiens
  MAP TO AP000345.1; EXPRESSED IN PLACENTA, SIGNAL = 1.9; EXPRESSED IN HEART, SIGNAL = 1.4; EXPRESSED IN FETAL LIVER, SIGNAL = 2.6; EXPRESSED IN BRAIN, SIGNAL = 1.5; EXPRESSED IN HELA, SIGNAL = 1.6; EXPRESSED IN BONE MARROW, SIGNAL = 2.4; EXPRESSED IN LUNG, SIGNAL = 2.6; EXPRESSED IN ADULT LIVER, SIGNAL = 2.9
cgcagaccaattgttaggaacaggtccaaattggagcaccattaaccaacaatcagtgatgcagaatgaggctattgaacaagtaagggctatttgcctcagggcctggggaaaaattcaggacccaggaacagctttccctattaattcaattagacaaggctctaaagagccatatcctgactttgtggcaagattacaagatgctgctcaaaagtctattacagatgacaatgcccgaaaagttattgtagaattaatggcctatgaaaatgcaaatccagaatgtcagtcggccataaagccattaaaaggaaaagttccagcaggagttgatgtaattacagaatatgtgaaggcttgtgatgggattggaggagctatgcataaggcaatgctaatggctcaagcaatgagggggctcactctaggaggacaagttagaacatttgggaaaaaatgttataattgtggtcaaatcggtcatctgaaaaggagttgcccaggcttaaataaacagaatataataaatcaagctattaacagcaaaaaataaaaagccatctggcctgtgtccaaaatgtggaaaagcaaaacattgggccaatcaatgtcattctaaatttgataaagatgggcaaccattgtctggaaacaggaagaggggccagcctcaggccccccaacaaactggggcattcccagttaaactgtttgttcctcagggttttcaaggacaacaacccctacagaaaataccaccacttcagggagtcagccaattacaacaatccaacagctgtcccgcgccacagcaggcagcaccgcagtagatttatgttccacccaaatggtctttttactccctggaaagcccccacaaaagattcctagaggggtatatggcccgctgccagaagggagggtaggcctttgagggagatcaagtctaaatttgaagggagtccaaattcatactgggg

SEQ ID NO: 9664 - DNA, 580 bp, Homo sapiens
  MAP TO AB016897.1; EXPRESSED IN BRAIN, SIGNAL = 3.6; EXPRESSED IN PLACENTA, SIGNAL = 3.9; EXPRESSED IN HELA, SIGNAL = 3.2; EXPRESSED IN HEART, SIGNAL = 2.8; EXPRESSED IN LUNG, SIGNAL = 3.5; EXPRESSED IN BONE MARROW, SIGNAL = 3.9; EXPRESSED IN FETAL LIVER, SIGNAL = 4.6; EXPRESSED IN ADULT LIVER, SIGNAL = 3.3
aaacccttccagtggctttcactttaactagaataattcaaactcatgatgtgatcatggtctgggaagtcctgtatgatctggtctcagttggttcctgacctcatctgccccttttcccctcgctctgtccgtactggccagtgaacccaaccagacttgcccagccctgggccttagcagttgctggtcccctgctgagacaaagcccttcctttagattttcacatggccacttctgtctggttgttcaggtctgagttcaaatgtttattcttcagagagttcttggccagtcacccaagcttaggatgctctcggtcatgttctttctcacaaccttatatttttcacaatgtgtgtcactattttaaaggtatttatttgttttcttgttagtcttcttcctctgcatcctacttcccaaccacaggatgtaagctgttgaggcaggaatatcatctgacctgcttattgctgttcctctgcattggaacaggagagcccctgggcagtgtgagtgtgcacatggtaaagatgtgctgcaacctgtgattcccctggtctggcttagcaggtc

SEQ ID NO: 9665 - DNA, 579 bp, Homo sapiens
  MAP TO Z97055.1; EXPRESSED IN LUNG, SIGNAL = 1.9; EXPRESSED IN HEART, SIGNAL = 1.4; EXPRESSED IN BONE MARROW, SIGNAL = 1.9; EXPRESSED IN BRAIN, SIGNAL =   2; EXPRESSED IN HELA, SIGNAL = 1.5
aagagaagggctctgggttcagatggacctgctctgacacacaccagctctaggatctcggccacgttcacgaccctcggcctcagtgtcttcatctgtaaagtgaccgcgggcctgacctacatggtcactgtcagaactggagaccgtgtcggggaagcacccagcacctgccaggccgtccacgacaacagacggctccggttctaacatgccgccaggctgcaacactcacgcttatcattcataaacctccggcagaattcttgaaaggtgcctcggtagctcatggtccgcagagagcggtggaactgataataagacaccaccagatccttggggttgcgagccatatagatgacctgtgggtgacaggagcaggatgagtccgtgtctccttccctcccaggcagggctgccccgacacaggccagcctccctgaacctgctggtgcacctcacaaaccaacacctgcttccagcgtccagctggggcccatgtgcacggctgctgggtgctgctgcttcgctgtttcagcagaaaggtgccctgtccatgcagtagagctggccaggaaa

SEQ ID NO: 9666 - DNA, 545 bp, Homo sapiens
  MAP TO AC004032.7; EXPRESSED IN HELA, SIGNAL = 1.9; EXPRESSED IN PLACENTA, SIGNAL = 2.2; EXPRESSED IN BRAIN, SIGNAL = 2.1; EXPRESSED IN HEART, SIGNAL = 1.6; EXPRESSED IN BONE MARROW, SIGNAL = 3.3; EXPRESSED IN LUNG, SIGNAL = 1.9; EXPRESSED IN ADULT LIVER, SIGNAL = 2.9; EXPRESSED IN FETAL LIVER, SIGNAL = 2.2
aaactgggatgagcttccttccttgaacctcctccagctcactaaggacagagtgttcacctgactcctctcccatcccctcctatgaggcactggggtacgctggggctgtcgcctggttaggtgacctctttacattttcctgctcccttttgtgggtgagtattgtctcttttgcagcctgcggacacagccccgctggactccctacccaccttcaccctgcccaaagcacttagaatgcatctaacggcattaggagatcacgtggtttgacttcttcatttcacagatggggaaactgaagccctgagatgtgaagtccttcagcctcctagcaacaagcagcagagccaagtttcagattggggaatttatagagcacctactaagtgctaggcattagcctaagaaagactttacaaacattacctctttggatctttcaaggggtagatgccaccaccccttatagctcatcttatagctgagggagctgaggttcagagaggtgcagtaacttgcccagggatgcccagtagtta

SEQ ID NO: 9667 - DNA, 563 bp, Homo sapiens
  MAP TO AB016897.1; EXPRESSED IN ADULT LIVER, SIGNAL = 5.7; EXPRESSED IN FETAL LIVER, SIGNAL = 4.5; EXPRESSED IN HELA, SIGNAL = 4.4; EXPRESSED IN PLACENTA, SIGNAL = 3.3; EXPRESSED IN BRAIN, SIGNAL = 3.8; EXPRESSED IN BONE MARROW, SIGNAL = 4.9; EXPRESSED IN HEART, SIGNAL = 3.5; EXPRESSED IN LUNG, SIGNAL = 3.5
gagtctttgctgaggatggcgccctctgcagggtggtgggaaacctgagtgaaggtgcagtgcagagaggcgccttcaaaaggcagctgtgtcccgtctgcagcacatcagatgagttctgcacagcaggtccttttgtagaagaggagaaacaaaaatgtatttttgtgcaagttgtttgaaaaagaattttaatgtgaaaatattgtactacttttgtggcctgtttaatccaatattcattgctgtcagtatttgctaaatagtttgagcatttattactgcagcctgtattacactgtcagatttttccagtgtgaatttttctaatgctacaattaatagaaatacattaacactgatttactgcattatgattttaacaatataacattgattgttacttggatacacttagtgacattattacttggatacattgaaaactttgtatctgcatcacatcttttgatcctcaacaatccaccgaagccagtaggaacagggcaaatgttgccgatgggttgatgttacactcacccagagttgctgtgccagtcaga

SEQ ID NO: 9668 - DNA, 582 bp, Homo sapiens
  MAP TO AB016897.1; EXPRESSED IN BONE MARROW, SIGNAL =   2; EXPRESSED IN LUNG, SIGNAL = 2.1; EXPRESSED IN ADULT LIVER, SIGNAL = 1.8; EXPRESSED IN FETAL LIVER, SIGNAL = 2.6; EXPRESSED IN BRAIN, SIGNAL = 2.1; EXPRESSED IN HELA, SIGNAL = 1.6; EXPRESSED IN PLACENTA, SIGNAL = 1.6; EXPRESSED IN HEART, SIGNAL = 1.3
gcctgcctgtgttttaaaggcaactcctagctctttgagaatgaaagtggctgtgcgtcttcctatgctttaataccagtgtgctttgggcactccccgtggacatagtgtccccagcattgctttgttatttcctggtctgtgttcttgcctgccctgcttggcagccctgtatcagatctctgcttgcaacgctgagtgtcaagcttggttggtctgtgtgaggttctaaacccgttgtgctttctctccatgtagagcaccactaggctggacagcgacagagtgtcgtctgcctctagcacagccgagcggggaatggtgaagccgatgatcagagtagaacagcagccagattatcgcaggcaagaaagcaggtaggaaacacatcatttttcaatggtgaaagtactgaaagtattcctaaaaaagggttgggataaagattgttgaatttataaaggttcagctgacatgtttacaatgttagcaataatattttaagggcatttcctttctgtgttattgaattgaaagaaatgctttaccaataattatatccctcacttatatgccacagtg

SEQ ID NO: 9669 - DNA, 576 bp, Homo sapiens
  MAP TO AC004032.7; EXPRESSED IN HELA, SIGNAL = 2.9; EXPRESSED IN PLACENTA, SIGNAL = 3.3; EXPRESSED IN HEART, SIGNAL =   3; EXPRESSED IN LUNG, SIGNAL = 3.8; EXPRESSED IN BONE MARROW, SIGNAL = 4.8; EXPRESSED IN ADULT LIVER, SIGNAL = 3.6; EXPRESSED IN FETAL LIVER, SIGNAL = 4.7; EXPRESSED IN BRAIN, SIGNAL = 4.2
aataaggatcatgacagcccctgcctcctacagtcactgtgagcattcgatgaattaggacataaaactccctgttaagagtaagtagctgctattgtaatgcatgctgcctttgccactggttcactgcatggtcttaggcaaggctgtgtcctctctgagttgaacccaatctcctcatctgcaaaatggacatcataaggccagctccaaggcactgcttgttggatgttcaaatgagacaaacgaaacacacaggctgtgtaagctgtaacacgcttgccatgcatgagagtctgggcattgtgggtctcaagcccacagccacactagtatatgaatctgggttccttaatagattgtgtactcccaaagtgcagggtctctggcaaacttatctcagctgcctcagtatccaacatgcaggagatgagtaggtgatctgtgagtttctgttgaattaatgaattaagggaagtgattaccttgccagacccagaattcagaggaaatcataaatatggtccctgagctatcacctctttctcactacgtctggctcttatgtgaccttgg

SEQ ID NO: 9670 - DNA, 574 bp, Homo sapiens
  MAP TO AB016897.1; EXPRESSED IN LUNG, SIGNAL = 1.9; EXPRESSED IN ADULT LIVER, SIGNAL =   2; EXPRESSED IN PLACENTA, SIGNAL = 1.3; EXPRESSED IN HEART, SIGNAL =   2
agcgaggcaagaggaagagcgccggcggcaggaggaggagcgaacaaaacgagacgctgaagaaaaggttatggtcctttaagggcagctagaattttaccaagttagcctgaacgtaatcgattggctggggcagagcgggctggaagttctgtgtttcttaagaagcacgaggcagagcagggcctggctccccccagctttgtgattggacctgcaactttaccccatctggcccacctacctctcttctggactgtctccagatccccttatctgccaagttttgtctccttcaaacttctgaactcttgggcgtgtgtagcagtgagcctctttgcaaagggttcgtttcctcgggcactcatctttactgaacatggcccagcttgtcattgtgaaggtgacattggttcagtgattgcttaaatggcatgtggaccgtgggaagcagtaggagcgtagtaagacagttggctgccattcaacatttcaaatagatggtttactcaaatcactcacttctggttgatggtaaagagagcagatggcttagaaaacatgatacaggaaa

SEQ ID NO: 9671 - DNA, 572 bp, Homo sapiens
  MAP TO AC004032.7; EXPRESSED IN HEART, SIGNAL = 1.4; EXPRESSED IN BONE MARROW, SIGNAL = 2.7; EXPRESSED IN LUNG, SIGNAL = 2.3; EXPRESSED IN ADULT LIVER, SIGNAL = 2.7; EXPRESSED IN FETAL LIVER, SIGNAL = 1.8; EXPRESSED IN BRAIN, SIGNAL = 2.1; EXPRESSED IN PLACENTA, SIGNAL = 1.4; EXPRESSED IN HELA, SIGNAL = 2.1
ttgcagccacttagaatcccctaaagccccactacttcctggggcccagctaggtgggcgtgttcctgcccatgaaacaggagcctttgccccatttcacagaaggagaaactgaggttctgaatccaaggtttcaaagctagttagtagtggtgaaatctggatgttgttaataccccacccagggcttcctggggagaaggtacaccaggaagcttaaggcatcagatgcagggtttctaggaacatggcaggccctggattctggcaatactgaggcacagtgccccaacctttgctcttgaacccatgcttgccttgttcccagcgacccctccaccctaccctgcttaatatctccaaaggaattttattccaagcactgcaagatctggactggggtggggtgagggaagtagtacctgccacagagagagagaaagagagaaaatctgaaagggggttatttcccccactttgcacaaattatctcaaggaatgaacgtagcaatgcttgagcccactttacagatgaggaaacaaactccgagggatgaagctccttgccaaag

SEQ ID NO: 9672 - DNA, 575 bp, Homo sapiens
  MAP TO AL022329.9; EXPRESSED IN HEART, SIGNAL = 1.9
gtgtcggtgtgtgtggagagggtgctccttcgctcctgctttcccggctcggtggggtcccttcgcggccacccggggagacgtcttagacagtcgtggttcctgtgatctgtgtcctctttgcagaaggtactattgggctgggttttagacgggcaccttgcgagcggatcggcgagttttaattttccggaatgcgctgctgggggctgcggtggcaggcctccggtcttttggtctattttaggcctttctggtgttgagagcttccgaggcctgattcctttgcctgttgcccgtgctgctcactttgaaaacaagagtgtttcggtggaaggatttgagaacaaaatgctggggcaaatggacattcgtaagaatcactctcctcaggccccagctgttcgctaataatttttaaaaatgtgtttagaatcatgagttaatctccactgtgaatctttgcccgcagacgtcagggtttatatttttcctcaactaccagtaatttctgcttcactggtgttcagttatggtcggggaagagccaggcttcccctttcgtgttaacaacg

SEQ ID NO: 9673 - DNA, 558 bp, Homo sapiens
  MAP TO AC004832.3; EXPRESSED IN HEART, SIGNAL = 2.7; EXPRESSED IN LUNG, SIGNAL = 5.1; EXPRESSED IN BONE MARROW, SIGNAL = 3.8; EXPRESSED IN ADULT LIVER, SIGNAL = 6.7; EXPRESSED IN FETAL LIVER, SIGNAL =  12; EXPRESSED IN BRAIN, SIGNAL = 2.3; EXPRESSED IN PLACENTA, SIGNAL = 5.9; EXPRESSED IN HELA, SIGNAL = 3.6
tgccatctgtgtcacctctccacagtgcttattgaactttgatggatactaaaccattgatttagtattacaccagtgattctcccatgtgcacacaccattcaaagggaatagtctggctgggtgtggactactttgggagactgaggcaggaggatcacttgaggccaggagttagaaaccagcctgggcaaccgagtgagaccctgtctctaaaaaaaattaaaaaattaactgggcatggtggtgtgcacctgtagtcccagctacatggcaggctgaggtgggaagatcactcgagcccaggggttcaaggctgcagtgagctatgatcatgctactaaactccagcctgggtgacagaacgaggccctgtctctaaaaaataaaaataaaaaaaggaagagtccatggaaagtcatataagttcacaagctaacagcagtggaagccaataggtatggaaccagtggctacacaaaggtcacagagaacagacacatgccctgaatctggacaagaggtctctgcagggtgagatgaggagccagccttaca

SEQ ID NO: 9674 - DNA, 569 bp, Homo sapiens
  MAP TO Z82188.2; EXPRESSED IN BRAIN, SIGNAL = 1.5; EXPRESSED IN LUNG, SIGNAL = 1.5; EXPRESSED IN HEART, SIGNAL = 1.5; EXPRESSED IN BONE MARROW, SIGNAL = 1.6
tagccccattcctcagacagggaaagtgaggcttccagaggttaaagagtttgccaacgtgcactctggtgaggggaggatctgggattctagagtccatactccaatccatatactatccaccatctgattaccggccttagccgcctccctgcataccctggaggaagggcgaggacccagcagccacctgcaggcatcctccacctctcccctcccccagcactcccagggctcaccatgctgggctgcctcctggggccctgtgcagaatccacctgccccaccactggaaacagggggtgccagagcccaggaggcaatggggtgggaagatgggcacattgaggaccgggaaccaatgcagggctgagggagtgcaagaggaagcccttctctgcctgggacatgcaaggcaggcagactccctgagctgggccttaaggggagaggtagggtttcccaggctgagctggctggaagggcatcccaagcagagggaacagagacagcaaaggtcaggactgcaaggcaggtgggagcagcacaccgtctgtggataggagagc

SEQ ID NO: 9675 - DNA, 554 bp, Homo sapiens
  MAP TO AC006548.19; EXPRESSED IN FETAL LIVER, SIGNAL = 2.1; EXPRESSED IN ADULT LIVER, SIGNAL = 2.2; EXPRESSED IN PLACENTA, SIGNAL = 6.6; EXPRESSED IN HELA, SIGNAL = 1.5; EXPRESSED IN HEART, SIGNAL = 1.6; EXPRESSED IN LUNG, SIGNAL = 1.9; EXPRESSED IN BONE MARROW, SIGNAL = 1.4
tacagacccagaaccccttgaatgaaggggaggctgggtctccccgaggtgtccatggcagataggaatgctgctttgaggctttggcaggcctccataggtgaatcatggtggaggcctctagtattttgcagcaaggcccggtcatcttctccagttaactactctccttttgagagacagctcttgtcctatactgggcttttgtggaaactgaacatttgactatgagtcaacaagtcaccatgcgacctgaactgcctatcatgaactgggtgctttctgactcatctagccataacgtgggtcatgcacagcagcattccatcatcacatggaaatggtgtataagtgattgggctcaagcaggtcctggggggcacaagtaagttacatgatgaagtggctcaattgcccacggtctctactcctgccaccctgccttctctcccacggcctgcactgatgacctcatggggacttgcctttgagcagttgacacaggaagggaggactagggcctggttcacagatggttctccacaataggcagg

SEQ ID NO: 9676 - DNA, 566 bp, Homo sapiens
  MAP TO AC007363.3; EXPRESSED IN FETAL LIVER, SIGNAL = 3.3; EXPRESSED IN ADULT LIVER, SIGNAL =   2; EXPRESSED IN PLACENTA, SIGNAL = 2.8; EXPRESSED IN HELA, SIGNAL = 1.4; EXPRESSED IN BRAIN, SIGNAL = 1.8; EXPRESSED IN BONE MARROW, SIGNAL = 2.2; EXPRESSED IN LUNG, SIGNAL = 1.6; EXPRESSED IN HEART, SIGNAL = 1.4
ttaaaacaagcatgtggagccttttagtattttcagatatgactttgtggtgatttatcatgtaattctaatttattgtgtcgtgattctaattatcagaaaaacgaatgcttcagatttttatgaaatgaggtgggccataaacaaaaaccaacagcacaatgaaaagagcacatttcatcttgtggtaggtttagcagcgtttctccagtgtgtggtcatacctaagacgataaaggattctctccatcgtggtagggataacgattggacaccgttggaataactccctttgtaaccagactgtccagcaaccttccgaacaagtattttccctcctgaattatcaagcacaccactatgaagagaaaaaataatttttcaggaaagaacagaaatattttttgacgtgatcaacaggctagaaaaccagtcgccatctttatttacacataggaaagcagcaaggttaagcaaagtttaccttgacatgaagcccaacccacaagaatggtgcctccaccagcagacccagcatctgagctcccagggtcaatgtccttctc

SEQ ID NO: 9677 - DNA, 567 bp, Homo sapiens
  MAP TO AC005300.10; EXPRESSED IN LUNG, SIGNAL = 1.3; EXPRESSED IN HEART, SIGNAL = 1.8; EXPRESSED IN HELA, SIGNAL = 1.6
gatgggtcagagaaggttgctagtcctgaccaagggaatggtggctccacacagagtcaagagctgcctgggggcgggggttcaaggagccgaggttgagagctgcagtgggagccaggagctgtcccctcactaagggagaaatgcccttcctcctcccgggagtcggctcttgcctctgtggcatctcaggaaatgggcccttgggagtccacctcctctgctcatttcccaccagccccttgcctcactcctgtctccccagcctaggggcctcccacacccctccaggctgcggccattgtgtgtcctttgtctctgggcagtccctcagatccccgcattcccccaggcctgcagaacagtactgctgctctctcatctccagggtgctgccccgctgcctgggcaggcgcagtgggggagcaggcagtgaggctctccactggtctttgctcttctgtttcctctgctgcccccatgaagcctggcacgtcacacagccccccacaacctgcacctggccaggccactcactctgctcgggcagtttccctgactgcctga

SEQ ID NO: 9678 - DNA, 566 bp, Homo sapiens
  MAP TO AC004832.3; EXPRESSED IN PLACENTA, SIGNAL = 2.6; EXPRESSED IN HELA, SIGNAL = 1.3; EXPRESSED IN HEART, SIGNAL = 1.8; EXPRESSED IN LUNG, SIGNAL = 1.3; EXPRESSED IN FETAL LIVER, SIGNAL = 2.8; EXPRESSED IN ADULT LIVER, SIGNAL = 2.4
tcatgccaaactggtctctgttttcattggcatttgtggaaagcctgtagtgcctaaggctactggggagaggacctgggtctgagggtgatcaccaacaaaagagcccaagcagttgtcattcctctcccaaccctgggcaaataatccacaaatagttcagaaatggatgctgctgaaacatgggcctggctatctggatttgaatcttaacttcacctctaatgtgttgtgtgatcttgagtctcacaaggaaattgaagctggtaacatctccttcttacagggtactgagatgaccagtgtagaagagaccaataagctacctcacctactgcctagcacatggtaagtgatcaacagtgtaggcctttaccgctattacgaggctagtcacccagcctgctttcagctccaagactaggacacagctaggcgagcccattctttcctgttgcttctcccctgttctgtggctaccctgctctaccctcttcttgggtctctctgaagtagtgggtcatgctgccagactctgccctttggcggtgctcttggcatgaccc

SEQ ID NO: 9679 - DNA, 552 bp, Homo sapiens
  MAP TO Z82201.1; EXPRESSED IN FETAL LIVER, SIGNAL =   3; EXPRESSED IN ADULT LIVER, SIGNAL =   2; EXPRESSED IN HELA, SIGNAL = 1.7; EXPRESSED IN PLACENTA, SIGNAL = 1.3; EXPRESSED IN HEART, SIGNAL = 1.6; EXPRESSED IN LUNG, SIGNAL = 1.7; EXPRESSED IN BONE MARROW, SIGNAL = 2.7
tttatcaagcccagacagagctgtatgtgctaatagcaaccctgaaatctagtgtaggctcaaagggaatggggttttaatgcacatttggggttagaagacttgggattgtgcaagactgggagtagatttggcacagcagtgaaccaaaatcgatcctagaaaaatagccaaaatgcagccaagagataaagacatgaaaaatataaaagacagtttaagagacatgaagaatgaaatgggaagacccaatatttatgtaatgtaataggagttccagaagaaaagaccagtgagaatggggtggagacaatattcaaagaatcatagctgggaacgttcaaaaactgaaaaatacgaattctcagattgcaatagcaggagtgtgggaaggttaaatagacatctgtaccaagatacatggtagggaaactgtaaagtaacaaaaagaaaaaaaatcttaaaaaagaaatcacctataaaggaatgacagacaaagagcagaacctcacagcaacagcagaggccagaagaccgtgaagagtaccttcg

SEQ ID NO: 9680 - DNA, 564 bp, Homo sapiens
  MAP TO Z97055.1; EXPRESSED IN BRAIN, SIGNAL = 1.5; EXPRESSED IN HELA, SIGNAL = 1.3; EXPRESSED IN HEART, SIGNAL = 1.3; EXPRESSED IN BONE MARROW, SIGNAL = 1.6; EXPRESSED IN LUNG, SIGNAL = 1.2
agccagacatccctcacttgatgtggctcctcagtcttgaacttcccagcctccagaaccgtgagctaaataagtcccttttctttataaatgattcagtctcaggttttctgtgatagcagcagaagaccgactaagacagcacttcagtcttcccatctgtgaaatggaggtgttcagggccacctctccctgagcaattgtgaggatgagatgagggatgtgccaaaggtgctgggcacagcagtggccgtcacgtcccaggacatggggatggtgactgtctcccacagcaggttgctctacctccagctgccaatcatgacaataaccaagccaccagctcctggtgccttctgaggactcagctccagagagcacttaaccctcgacacccctgctgagtggcaggcatatcacccccgcttaacagggagctgagactcagaaaatttgcgtaaataacccagggcccagcagccaggaaatgtcagtgccaggatcagaacgggggggtcagaaaccctccagtcacacttgccctgtggttccagaatcgtgctt

SEQ ID NO: 9681 - DNA, 580 bp, Homo sapiens
  MAP TO AC007539.8; EXPRESSED IN ADULT LIVER, SIGNAL =   2; EXPRESSED IN FETAL LIVER, SIGNAL = 5.9; EXPRESSED IN HELA, SIGNAL = 2.2; EXPRESSED IN PLACENTA, SIGNAL = 2.8; EXPRESSED IN LUNG, SIGNAL =   2; EXPRESSED IN HEART, SIGNAL = 1.4
aagttcctgcagctcgaaagctctgtgaatcttgagatgctctgggaaacaccaaacgagaggttcagagcttgatttctatagtgggataggaaattaagaccagagaaggtaaacctgcaaagaaccagagagctgaagtgaggtgtgccaggggtggggctagggaggaaaggagggtgggaaagaaggcttttctagataaggagaacagtgctccttgaatttgaaaaagaattctgttacaatgcaggttccaggtcagtaggtctggagttgtgcttgagattccgcatttcaatcaagcttccagctgatgcagctggtccttggaccacatttttgagtagcaaagagtgttcttccttctctagtttagcagctgggcctcttagagaagaacagaagctgatctccccacgtcttccttcatgtccctcccacaagaccctaaacaaaggatgtttttgccattgttttttttcccctagtccgtctcccaatcccaaccccaaatacacacacacgtacacacacacacacacacacattcactcactcctcaataccctcacctccc

SEQ ID NO: 9682 - DNA, 588 bp, Homo sapiens
  MAP TO AC004832.3; EXPRESSED IN PLACENTA, SIGNAL = 1.6; EXPRESSED IN HEART, SIGNAL = 1.8; EXPRESSED IN BONE MARROW, SIGNAL = 2.2; EXPRESSED IN ADULT LIVER, SIGNAL = 3.6; EXPRESSED IN FETAL LIVER, SIGNAL = 3.6; EXPRESSED IN BRAIN, SIGNAL =   2; EXPRESSED IN HELA, SIGNAL = 1.9; EXPRESSED IN LUNG, SIGNAL = 1.6
actgcagaaccaaagccatctcagatgtcatctagatccacccagtcatgtactggaaaagaacacagagacctaggcaggaagagtgactcgcctagaccacaattctggcctggggtgattatctcagtttggaaaactctaggtccggccctaactagctctgattgctctctggatgcacagtgcaatcatttggcctggactggaacgggcttctgaagtaggacagcctgacaagacttcctgctctctgttccctgcagttggggaggaaggtggagaccatcaccataatttatgactgcgaggggcttggcctcaagcatctctggaagcctgctgtggaggcctatggagaggtgaggggcaggggtggggaggaaggggacagagggaaggggaggaggagtagacccctctcctaggctgtcctgtgggatgggtgaggcaatgggggcagattctgagcctgctggaatcaagagtgattttgtttccacagtttctctgcatgtttgaggaaaattatcccgaaacactgaagcgtctttttgttgttaaaggtaagttgggaatttcttgtga

SEQ ID NO: 9683 - DNA, 557 bp, Homo sapiens
  MAP TO AP000041.1; EXPRESSED IN HEART, SIGNAL = 1.3
tgccaagaggaaaatcaagcagggaggagtggccacagagtaactgactggagggtggccattgggttgggtggtctgagaaggtctctgggggctcacattttcactaagacctcaacattgagaagacctggatggaggcttcaggcagaaggaacagttggagccaaggtcagacagaagaatgggcttggcctatgttccaggcacatggcttcttcaccctgccccattccaggtaatcacgcacccaccatgtgtcatccatccaccccctctcccaggggcaggaccaatccgaggtctcaggcttctccgaatctgtccctgtcgccaatgagcagccctcccgagaggtaggatgtctgcccgtggttgtttcctcattgttttctccaaagccgactttgctttttctttaagcatggttgggcactccatcaaatattcatgtgcctaagtgacatggatatggaaggaaggtttcttgtaaaattcaaattcagtctcatgatccctgacggaacctgccgaggtcgtcttgaccctcgctactc

SEQ ID NO: 9684 - DNA, 582 bp, Homo sapiens
  MAP TO AC007719.1; EXPRESSED IN LUNG, SIGNAL = 3.1; EXPRESSED IN ADULT LIVER, SIGNAL =   3; EXPRESSED IN FETAL LIVER, SIGNAL = 2.8; EXPRESSED IN HELA, SIGNAL = 5.8; EXPRESSED IN PLACENTA, SIGNAL = 3.6; EXPRESSED IN BRAIN, SIGNAL = 2.9; EXPRESSED IN HEART, SIGNAL = 1.3
  unsure 25
  unsure 122
  unsure 135
  unsure 137
  unsure 174
  unsure 230
  unsure 259
  unsure 312
  unsure 373
  unsure 401
  unsure 450
tccagaaaagcagagaaggggtcgnggggggcagaaataaggggttggggcacagagataagagattgggatgcagagataagaggttggggcacggaaatgagggatcagggtgcagagantaagaggtcaggngnttcctgcccctcccccagaaaagcgggacttgccgcntaagggtgaaggagaaggggttgaggggttctcgcccctcccccagaaaagcagangaaggggtagagacacggagagaaggggnttgggattcttgcccctcccccagaaaagcaggacttgctgctaagggtgaanggaccaaggcaggcatccttgcgtggtttgacacctctgaaacctgggtgaataatcagangaggcatccctgcaatgattaaacaccnaagggaaggctgccttccctagtccgtgactggcaccagagttttgggntccacagataaaacgtgtctcctttgtctctaccagaaaatgaaaggaattgaaattaagagaagggagagattgaagtgtggcaccaagattgaaaggagaaagagtttgagggatagtgagggaggttgg

SEQ ID NO: 9685 - DNA, 1465 bp, Homo sapiens
  MAP TO AL079300.11; EXPRESSED IN HEART, SIGNAL = 5.2; EXPRESSED IN BONE MARROW, SIGNAL = 1.5
tcatttacatggcttgaatttgcacattaaatcatatggttcatttgagagtgcggtagggatggtatttccaaagaaaaataatattagtgcctgtgcttaggggctctcacaccgattgcacaaattgtatgaattgcacaatttctacagactgcatttttcttcttggcacaggataaacgaagaggctggggacactgagaggacccagtcggcattggcactgagcagagcccggtccaccaatgtccacagcaagacctcaggagacaagcctgtttctccccactttgtccgccggcaaaagtactgtcattttggggacggcgaagtgcttgccgtccagagaaagtccacagagagattagaacctgcttcctctcccctggcttctcggagtacaaatacatccccgctgtcgagggaaaagctgcccagtccttcagcggccctctcggagttcgtggaagggctccggaggaagagagcccagagaggccaggggtccacgctgggcctagaggactggcccactctccccatttaccagacgactggggcctccacactaaggaggggcagggctggcagtgacgagggaaacctctcgctgagggttggggcaaagtcacccctggaaatcgaaggggccgctggtggtctcttgaggtccaccagcctcaaatgcatctcttcagacggtgttgggggcacaaccctactccccgaaaagtcgaaaacccaattcagttcctgcgagtccctcttagaatccagaccgagcatggggagaaaactgagctctccgaccacacccagggacatgctgttgtcgcccacactgcgtcctcggaggcggtgtctggagtcctctgtggacgatgcgggctgtccagaccttggaaaggagccgcttgttttccagaaccgccagtttgcccacctgatggaggaacctctaggcagtgacccattcagctggaaactcccaagcctcgactacgaacgcaagaccaaagtggacttcgatgacttcctcccagctatccggaagccccagacacctacctccttggctggatcagccaaaggtgggcaagacggttcacagcgttcaagcatccactttgaaacggaagaggctaaccgttcctttctctcggggatcaagaccattttgaagaagagcccggagcccaaggaggatcccgctcacctgtctgactcgtcctcatcctccggctccatcgtgtccttcaaaagtgctgacagcatcaaaagtcgaccaggaatcccacgacttgcgggtgacggtggcgagcgaacgtcccccgagcggagagagccagggacggggaggaaagacgacgatgttgcgagcataatgaagaaatacctccagaagtaggaaccagttcaggtaaaagcaacaggctggggctattcttgggggaatgagagt

SEQ ID NO: 9686 - DNA, 589 bp, Homo sapiens
  MAP TO AC007539.8; EXPRESSED IN LUNG, SIGNAL = 2.2; EXPRESSED IN HEART, SIGNAL = 1.7; EXPRESSED IN ADULT LIVER, SIGNAL = 4.1; EXPRESSED IN FETAL LIVER, SIGNAL = 6.3; EXPRESSED IN HELA, SIGNAL = 2.1; EXPRESSED IN PLACENTA, SIGNAL = 4.8
atcgatggctcaaaaccgttttctaaaccatctcagagaagacaggtagatgtttgctgtgctgagtgtgtgtgtgtgtgtgtgtgtgtgtgtacacgtttatgctgtacacacacgtggatatgcttgtgtttagacccagaaacaaaccatgaatctaatttcaggaacactctcctccatgtcaaactttgatcctttcttcctgccacaaactaggttgcctggtgtcagcggacctggaggataactctgctgcccattgtgccctagtgtccccagactgcagtgacgtcactggctccttccccaagtgcctggctgggccagtggactccttctccctgggcctatctctccagtgctatcatcatccattcaccaggaccacactggcactgattatccccctgaacttgctcatctttccccatctgttactcacagaagggctgagcttctttttagatccaagaactttactccacttagaaaaacaaaatatggcaccctgagtagaaaactggtcaattgttaggtccctgtataaagagatgggtgcttcagaagagcccagaaagctttgcta

SEQ ID NO: 9687 - DNA, 967 bp, Homo sapiens
  MAP TO AC004832.3; EXPRESSED IN BONE MARROW, SIGNAL = 3.1; EXPRESSED IN ADULT LIVER, SIGNAL = 3.9; EXPRESSED IN BRAIN, SIGNAL = 2.7; EXPRESSED IN PLACENTA, SIGNAL = 2.6; EXPRESSED IN HEART, SIGNAL =   2; EXPRESSED IN LUNG, SIGNAL = 3.2; EXPRESSED IN FETAL LIVER, SIGNAL = 5.5; EXPRESSED IN HELA, SIGNAL = 2.1
gttcatgcaactgggtggtccccttgccaagacccctgactctaagtccatggcctcttacttacctgtctcttagtccagtgatcccggtataggggcttcttaggagctgagcccaaggccctaggttctgaataccagctcttcccccacaatgaatctctgccctcatacctacaggtaggggccactcatctgatccatggccccaaagctggctcccctggagcttacagagatccccccaccctcccgagagctggaaagagagggcaagcagaggggagactggcagggaaaacaattccagtaaaccccgcagctcttacagacgccagcctggaggcaggtgaggctcccatcctcaggcaccatgtgggcattgtagcgctggctgggcagcacctccgtcatctccctagcactctgctgctcccccatcttggtcttcaggaaaaccccaaagccgatgtccccaccatctgaagcaaactgccacctgcagtggatagagccccattggcgaccccctgcctgggctccaggcccctcccagatgtgcccaggtgtagagtggctgccatccctacctgagcacacagcccgggaacaggatctcgttctccacctgcagggaggagccgcggcccacggacctcgtgtgctcatactgcagcctcacctgctcgcacaggtagtagctcttgggcacctcacccccatagttgatctgtgggtgaagggggtgtgtgggcactagatcacagcttctcccctccttccccatcctctgggcaccctgtaccttggtcaggcacttggggttgccatcggggtcagtcatggtccccccaaactccacaggcagctggtcggggctgatgaattttgtcagctcctgcttccagttgtctgcatgggagcaagagagggactccaaagggactcaggagactcaacagagggc

SEQ ID NO: 9688 - DNA, 576 bp, Homo sapiens
  MAP TO AC008009.4; EXPRESSED IN HEART, SIGNAL = 1.9; EXPRESSED IN FETAL LIVER, SIGNAL = 1.3; EXPRESSED IN PLACENTA, SIGNAL = 1.8; EXPRESSED IN HELA, SIGNAL = 2.4
tttcagattgattttaactttcatggatctttctttgaagcagccaaacagtattgcttatttaaacaataatttgtaggacataattttgaacattttaaaaggctttttatagaaatctaagtggtttatgttcttttcttttccaaggtacaaattctgagctgtctaacccctctgaaacggaatctgagcgtaaagacgagctgagtgattggtcattggcaggagaagatgatcgagacagccgacatcagcgtgacagcaggagacgcccaggaggaagaggcagaagtgtttcagggggtcgaggtcgtggtggaccacgtggtggcaaatcctccatcagttctggtagtcttttctatactctgtcagcatccattatttgtaaacagtttaattttacaaaagttaattcatctcccagggccacccatttttggaagtttctcttgctactcattgtcttagagaaagtagtggaccatatagcagtatcaggaaaagccctcgtagagtgtttctcagtgaaggtttacttagaatatactggtcagaactttagttggcagc

SEQ ID NO: 9689 - DNA, 564 bp, Homo sapiens
  MAP TO AC002472.3; EXPRESSED IN LUNG, SIGNAL =  17; EXPRESSED IN HEART, SIGNAL = 8.7; EXPRESSED IN BONE MARROW, SIGNAL =  29; EXPRESSED IN ADULT LIVER, SIGNAL =  26; EXPRESSED IN FETAL LIVER, SIGNAL =  26; EXPRESSED IN BRAIN, SIGNAL =  12; EXPRESSED IN PLACENTA, SIGNAL =  17; EXPRESSED IN HELA, SIGNAL =  16
ggatgtttcacataaatgcggtcatgcgacacgtgatcttgtggctggcttctttcacttagcgccatgttttctagtttcacccgttttcagcatgtgtccgtccttttccttcttttcgaaacagttttattgagatgccgttcacataccatacggttcattcatgtaaagcatctgtaattcaattgcctttagaatatgcacagttacgtagccatcaccacaatacattttagaacattggtatcacctcaaattcctttttattgccaaataatattccactgtatggatataccacattgcatttatccactggtgggcattttcactcttagaatattataaataatgttgctatggatattcatgcacgagttcttgtggggacatatgtcttcatttctttcaagtatatacctaggaatggaaataatgggttatacggtaattctatgattaagcttttgaggaactgtcagacaagccatgtgattgactgattgatttttaaagacagggtcttattgtattgccccagctggtctccaactcctgagc

SEQ ID NO: 9690 - DNA, 589 bp, Homo sapiens
  MAP TO Z83844.5; EXPRESSED IN HELA, SIGNAL = 1.2; EXPRESSED IN PLACENTA, SIGNAL = 2.2; EXPRESSED IN BONE MARROW, SIGNAL = 1.3; EXPRESSED IN LUNG, SIGNAL = 1.7; EXPRESSED IN HEART, SIGNAL = 1.4
tttggtgttgaacatggctcaccatggagactggatcccttcactcatttacccagaggccctatcttcagagccagagctgtgatgccaacacttagcatatctgggggagacgctggagccagcagggctcttcccaggccaatggaagggaggttttgtaccccctgcccaccccagactcaagaccttagatgcatcctgggaaggaagggccaccctccctggggtccatagtggggagggagtcatgcggctggccatgtggcaacctacccatgcggtggccttgcagaccaaggatgctgtctataccttgtcggccatgacctcaggcatccggcggaactggatcgaggctctgagaaagaccgtacgtccaacttcagccccagatgtcaccaagtacgtactaagctggactggggccttgagggaggcacttacccttgcgtccccgagtgggtttctaggtactcacctgagggctgcacctttctgggccctcgtttctctgtcaacaacatgggaagagagtagtgagcattctcggtatcatccagaagtacactgagggtttgaggtttga

SEQ ID NO: 9691 - DNA, 552 bp, Homo sapiens
  MAP TO AC004032.7; EXPRESSED IN LUNG, SIGNAL = 4.6; EXPRESSED IN HEART, SIGNAL = 3.4; EXPRESSED IN BONE MARROW, SIGNAL = 7.3; EXPRESSED IN ADULT LIVER, SIGNAL = 4.2; EXPRESSED IN BRAIN, SIGNAL = 6.9; EXPRESSED IN PLACENTA, SIGNAL = 3.8; EXPRESSED IN FETAL LIVER, SIGNAL = 6.3; EXPRESSED IN HELA, SIGNAL = 5.9
ttcagtcagtcccgtccaacactggtttcgtcatcgttaaatgggagcgcattggagtgctcatgattgcttgttggcgcctcccatgtatgggcttgggattgcatttgatttcttcctcaaaagggccctgagaggtggaggcgccctgagccccactgaggaaactgaggcagaaatgtgactcctttatccacgacctcacagctgagaaatggcagagttaggaggtccatcaagaccctggtcccatgatcttttgtctctgaagagcagcttttggagatgctctgtgccctggtttgttgaatcagggttcagctcatcccctggaaagggaggtctgctccttggctccctccagagatctgaagctaagcaaggaaggaggctgcagctgggccttcaggataccggtgaggttttacaccagccacaggcaaggggaacaactgactgctttgccgaggagaaacctcacatccaccccgtgcagaagaaaggaccatccccattttacagatgaaaaactgaggcccggagcttaagtaa

SEQ ID NO: 9692 - DNA, 959 bp, Homo sapiens
  MAP TO AC006548.19; EXPRESSED IN HELA, SIGNAL = 1.6; EXPRESSED IN BRAIN, SIGNAL = 2.1; EXPRESSED IN PLACENTA, SIGNAL = 1.7; EXPRESSED IN LUNG, SIGNAL = 1.8; EXPRESSED IN HEART, SIGNAL = 1.6
tgcttttgagctttaagcctgcaacttataattcagcatatcagaaaaaagaggacagcaaatccatgagtgggaaagagaaactggaaaagaaatctccatctcctttgaaaaaaaatcaatggaaaccaagaaagtggccagtcctgggtggacgtgttgggagtgtgaccacctgttcatgcagagagatgtgtacatatcccacctgaggaaggagcatgggaagcaaatgaagaaacacccctgccgccagtgtgacaagcctttcagctcatcccacagactgtgctggcacaaccggatcaagcacaaaggcatcaggaaagtgtatgcctgctcacactgcccagactccacaggtacttttaccaaagggttgatgctggagaagcatgtccagctgatgcatggcatcaaggaccttgacctgaaagaaatgacagacgccaccaatgaggaggaaacagaaataaaagtagacgtcaaggtccgcagtcccaagtggaagttgaaagaaccggttctggagtacaggcctcccagaggagcaataactcaaccactgaaaaagctgaaaatcaatgtttttaaggttcacaagtgtgccttgtgttgcttcaccaccgaaaacctgctgcagttccacgaacacatccctcagcacaaataggatggttcttcctaccagtgccgggagtgtggcctctgctacatgtctcacgtctctctgtccaggcacctctttgttgtacacaagttaaaggaacctcagccagtgcccaagcaaaatggggctggcgaagataaccaacaggagaacaaacccagccacgaggacgaatctcccaatggcgtcatgtcagacagaaagtgcaaagtgtgtgcaaaaacttttgaaactaaagctgccttaaacactcacatgcagacacatggtatggccttcatcaaatcca

SEQ ID NO: 9693 - DNA, 546 bp, Homo sapiens
  MAP TO Z98884.11; EXPRESSED IN FETAL LIVER, SIGNAL = 2.9; EXPRESSED IN PLACENTA, SIGNAL = 4.4; EXPRESSED IN HELA, SIGNAL = 1.6; EXPRESSED IN HEART, SIGNAL = 1.5; EXPRESSED IN LUNG, SIGNAL = 1.7; EXPRESSED IN ADULT LIVER, SIGNAL = 1.9
aagttagctgagttggggctcaagtggattaagggaaagtaagtggagaatgtttgtcattcaccagttgctttgcctcgagttccccacctagaggaagaggggtcaccaccctgtggactgatgccggtagagcacttagaaacttacctggcttgcagtttgtgttccctaagccgcaagatgctgttgtcttcagaggatgaagttgtaatttttttttatcttccagtgaacagcaagatcgaaacagagtttctgaagaacttatcatggttgtccaagaaatgaaaaaatacttcccctcggagagacgcaataaaccaagcactctagatgccctcaactatgctctccgctgtgtccacagcgttcaaggtaaacaagccggagagaaatttcatcctacgaatgcaccaggactcatacaagcagccagaggagtggtcagtggggtctcagtcagacaaataatttgagctttttctggtgctttgtggaagatgagcaaatctacaccgattccattcgtgtcttaattgttca

SEQ ID NO: 9694 - DNA, 560 bp, Homo sapiens
  MAP TO AL022318.2; EXPRESSED IN FETAL LIVER, SIGNAL = 2.1; EXPRESSED IN PLACENTA, SIGNAL = 1.2; EXPRESSED IN BRAIN, SIGNAL = 1.6; EXPRESSED IN HELA, SIGNAL = 1.4; EXPRESSED IN HEART, SIGNAL = 1.4; EXPRESSED IN LUNG, SIGNAL = 1.3
tcgcttgagctctgaacctctggtggggctgaatggcgggattaggaagtgataccagtctttgaaagtctccctcactgagtcacttgatcctcattcactcagggctcataagccgaatacctggcgctgatgatgcagagatgacactgccctgctcttacaggaggtacaacccagtggagagaacaggcggaaagtccaacagccacgcccccctctctctactcactttcccccagggtcttcctgggctgatgtttcctagagagttgagggagatgttccaagctgagcaggtgaaagggacagtaccagggagagggccatcggccagagaggtcagcggcaggtaggagcagggacatgtcgtaggtggaggagagacattggtcctggggctgccaggggctgaagtgttgatgttaactgccgggatcactgtcagccaatcagggctgccacgtacagttgctcagcctcgcactgctcagggaggatgagtagaggctggcacctggagaaatgtgtctgtacagagcaggggtacttttctctga

SEQ ID NO: 9695 - DNA, 577 bp, Homo sapiens
  MAP TO AC002472.3; EXPRESSED IN HEART, SIGNAL =  15; EXPRESSED IN ADULT LIVER, SIGNAL =  47; EXPRESSED IN FETAL LIVER, SIGNAL =  17; EXPRESSED IN BRAIN, SIGNAL = 2.2; EXPRESSED IN PLACENTA, SIGNAL =  59; EXPRESSED IN BONE MARROW, SIGNAL = 3.1; EXPRESSED IN LUNG, SIGNAL =  25; EXPRESSED IN HELA, SIGNAL =  22
ctcctacatgggtgcacaagtgcccaggcctgttccagttaccttctagcccacctggtagctgcagggcctcagtcttcaggggtagggtccccaagtccaccctgcaccaccccactggtctcttcatggctgtgccatgtctaccatagatgccccccaactttccagtcatgcctgtaaggactacacaggaagagggtggctttgctggctttactccgtgactttgtccagccatgacatcagcttcctctgggccccaaggagaatcaggtgcacgtgcccctccttggatacccaggcctcaggggccctgctctcccaccttcgcccttcagagcccacctccccatggacatggctctggagattgagaggcagcagggaccccaggcattttactgaggctccaggtggcaggtgattctagatgtcagcccagtctcagccccacccctggccctccacagcttgccctgatcaccaggtacccacagtggaaagcagccccttgcctccctggggtggacacttagaattccctgccccgccctgggaccaagaggagaattcc

SEQ ID NO: 9696 - DNA, 548 bp, Homo sapiens
  MAP TO AP000111.1; EXPRESSED IN FETAL LIVER, SIGNAL = 2.1; EXPRESSED IN PLACENTA, SIGNAL = 1.4; EXPRESSED IN BONE MARROW, SIGNAL = 1.6; EXPRESSED IN LUNG, SIGNAL = 1.2; EXPRESSED IN ADULT LIVER, SIGNAL = 1.6; EXPRESSED IN BRAIN, SIGNAL = 1.6; EXPRESSED IN HELA, SIGNAL = 1.3; EXPRESSED IN HEART, SIGNAL = 1.3
tggccctcacacacagtaaggaagtggcttatctggcaggttctgtcctctcctaatttctgcaaaggacctgactctcagtaacctcagggttatctggtatcagacagccctgcatcttcaatttttgttgtccctagccctccaaatgctggaataagtggaaatggacaaattgctctcaccggtgtagcagcagcttatgtctgtagagccctttgccaagtataaaacccttgcaagtgagaccagcctgagagataatcagggtagatgcatttcaggcggagggcacaggaagttcaaaggctctgaggctggagtgggcccggtgtatttcagcaacagcgaggagaggtggctgaactggagtgaccaggcaggagatgaagaggaggtgaggtcagagggtaaatgtggctggacctggtaggagtttgtgggtctgggtcttctgagtgtgatggaagcctgtggaacccaaggcttaacagagcatcctggctgggctgttaaaaatagaccacaggggcaaagatgggagttag

SEQ ID NO: 9697 - DNA, 577 bp, Homo sapiens
  MAP TO AL021392.5; EXPRESSED IN LUNG, SIGNAL = 1.4; EXPRESSED IN FETAL LIVER, SIGNAL = 1.7; EXPRESSED IN ADULT LIVER, SIGNAL = 2.3; EXPRESSED IN PLACENTA, SIGNAL = 2.4; EXPRESSED IN BRAIN, SIGNAL = 1.8; EXPRESSED IN HELA, SIGNAL = 2.2; EXPRESSED IN HEART, SIGNAL = 1.6
ctgccagaaggccatagttcccatgtgccctggaatgtgggactctctttgagacgtccacttggggacctgtcctcaggccctggggtcagcacacaggtgggcagtttctttgggctcagggtcaggctcctactggtgggtgaaggcagccctttgtctcatgtcttgccccagcgttcctgagtagcaggctccctcccccatcctcttggcagctgtccctccctgctccctcccggtgaccacagccaagccaagaggcctgtgctctgttccccacacgtccatgtagagtggctggacaccggtgttgattgctgtggaggtggctggagggagtggacattccattgtaatgatggcaaaaatagccatgatctttcagccactgctgaaactgctggagtcaggcccttcccaggtatgatttgccctccctgatggtgcatttgtctcccagatgtgcagatgtggaagccgatgtcctggggatcaggggaacctcatgagggaggaggcagggggccaggactggctcctgagctctgcaaccccagtgttgccgtctgtcttt

SEQ ID NO: 9698 - DNA, 569 bp, Homo sapiens
  MAP TO AC005300.10; EXPRESSED IN BRAIN, SIGNAL = 1.9; EXPRESSED IN HELA, SIGNAL = 2.9; EXPRESSED IN LUNG, SIGNAL = 1.5; EXPRESSED IN HEART, SIGNAL = 2.4; EXPRESSED IN BONE MARROW, SIGNAL = 1.6; EXPRESSED IN ADULT LIVER, SIGNAL = 1.7
ttccaagtgaccagtaatgccacactcatggggcagcaagaagggtggcaagggaaccaagccctgacctgagcccagtgatcaggccagagcccagccaatgggactcgcccacaggtccaggctcaccccctcacctccaccgcactgccctcactccaaagcccagccctccttgcggaagaccagctgcacagcctcattcacgtcattcaccacgtgggaggcctccatgagccctggactgaagcataagtctcggtgcccgtggaatggaggctcccctcctccaaggacaggctccgtggactgtgggttcctgggattgtagacgcctgtacacaccaggatggagatgcagctctggcttgctgagggctgttgctgccgtgtgcccccggcccctagttctggcgccccatcatgcgttgccttctgcaggtactggtggaacaggttggcgccgtatacgtcagacatagggttatcactggcaggggcagccacaccggaaaaggaaaaaggagaaaaaaccctaaatcaatgttgcaaagcaaagggagcagaga

SEQ ID NO: 9699 - DNA, 557 bp, Homo sapiens
  MAP TO AL022318.2; EXPRESSED IN HEART, SIGNAL = 2.3; EXPRESSED IN LUNG, SIGNAL = 1.4; EXPRESSED IN ADULT LIVER, SIGNAL = 1.7; EXPRESSED IN FETAL LIVER, SIGNAL = 2.3; EXPRESSED IN PLACENTA, SIGNAL = 1.3; EXPRESSED IN HELA, SIGNAL = 1.8; EXPRESSED IN BRAIN, SIGNAL = 1.6
cagggtatggagtcaggagcttaggtctagggttgagctcagatctcgacatggaccaggcttttcccctgtctcagtgcctcatttatggttcagtttcaggcagcaaaactaatgaatgatttccaaccacagaagccgtcactgggagagccaataaagatacgacagatctggcaggagaacaagatccagcccaggtgatggggtgtgaggcttggtcttagctacaggtaggtcgtttcccttagctcctggatgactcagcttggcagccacccagacttctatcaggacccagaggtgctgccagctctggagccatgtcaggccagctttctccccatgtcaccagggaatggagatttttctggtctgctggggcttttcctaattctgcacggtcggcttgagactgtccacctgttgctccatctaggctgcgttgcccttatgagccgtcttcacaaggtacgtttggaggatgtcaggatgtctttcaaaggatttgtagacatgctttaaagtacttacggagtcaatgtcccctttgcttc

SEQ ID NO: 9700 - DNA, 575 bp, Homo sapiens
  MAP TO AC004624.6; EXPRESSED IN ADULT LIVER, SIGNAL =  11; EXPRESSED IN FETAL LIVER, SIGNAL = 3.5; EXPRESSED IN HELA, SIGNAL = 1.8; EXPRESSED IN BRAIN, SIGNAL = 1.6; EXPRESSED IN PLACENTA, SIGNAL = 5.5; EXPRESSED IN LUNG, SIGNAL =   2; EXPRESSED IN HEART, SIGNAL = 1.3
atccatccactcacccattctttcatccttccatccacttatctatgcatacatctatctatccatccatctttgcttcattacacaaaagactcaatgcagcttaggatgaaaaatatatttcagtgaaataacaataaagtcaaaaggtggataataaactctccctgtagctctcagttcagagaagcagccatcacttgggcacttagaacttcaactagccatgcctggtgcgggtgggcaggcccagctccctttgagagccagtggctttggtttgtgagatgtgaggctggctggaaatgccaaccgttgtgtttccttctaggagagagaacggctgttgcgctccaaaaggcatcgagggaaaagtctgaaaccgcccaaggtgagcctgcgatggtgcacctgccctaccttgccgctgtgtcacggatctgcagggcagatgggtcgtggagtggggaggttttacagaggggtcctgaagcagacacacacatctctgcatgcctgatgatgaaaagcctgtcatcaccgtctctcaaagcaacataaatatggccgtgtca

SEQ ID NO: 9701 - DNA, 556 bp, Homo sapiens
  MAP TO AP000123.1; EXPRESSED IN LUNG, SIGNAL = 2.8; EXPRESSED IN FETAL LIVER, SIGNAL =   7; EXPRESSED IN ADULT LIVER, SIGNAL = 2.4; EXPRESSED IN HELA, SIGNAL = 2.6; EXPRESSED IN PLACENTA, SIGNAL =   7; EXPRESSED IN BRAIN, SIGNAL =   4; EXPRESSED IN BONE MARROW, SIGNAL = 2.7; EXPRESSED IN HEART, SIGNAL = 1.5
tcctcacaatgtccaaaggtctcaaatctttggcttgaatgggctcacttcaaagacctacagagctgagcttggtattgaagccacagaatcaaaagtttttgtatctcagttgcaagacctgtgaggcagaggtggtcactagagccacagcacgctagtggaacaccagccctgggactttctctgttctcgctcactccctcacttttcactttctttagccatggctggctgacagtgcgtgcaacttccagtccctagggaaccaagaaggagtgctcaaacctacagcctcctgggttggttcccagctaggagagagcaccagcggcaagtcctgcctggctctgggtgctgggtgccaccatcacatgtgccatgggtgatgggtgtggttggctgtgaatggaaatgcacgtggtggaatgatcccaggactcagccctatagcagagaccagtctgcacacttcctgcccatggtgtggctgaatgatagggagacaaccacagtgaccacaggaatgactattacgcctggcaatttattcaga

SEQ ID NO: 9702 - DNA, 564 bp, Homo sapiens
  MAP TO AC007092.4; EXPRESSED IN PLACENTA, SIGNAL = 1.4; EXPRESSED IN HELA, SIGNAL = 1.6; EXPRESSED IN HEART, SIGNAL = 1.3; EXPRESSED IN LUNG, SIGNAL = 1.2; EXPRESSED IN ADULT LIVER, SIGNAL =   2
tccatggtacacagaccctgattctaaaattcagtgagtccgatgctagcttccactgtctgctttttagttagagaattcctgactttttctattatgtttattacctaaaggtgaagtgttggattgcttgtttttttcctcccctactaagcaggttttcactccacttcccacatcccaccccagacctctcacaaaaagagtctcatctgatatgtgaatgcagcttatctccccataggtagccaggaacagggtgcacagtcaaggcaaccccaaaaatggcctctctcccggccgcgcctgcaaagtcgtcctgagcgtcctgaacgttcctcagctggaggggcttttccctactcagtgtctggaccattgccaagaagatctgtccagctgtaagcctgattttatatagttattttcacttattttttattttgcaaaatgtaaacgaatctgtttagctaggaaatcacgtcccttgaaagtgattataacctaatttgacatgcagtatttgtatacttattctagtgttatgatgcatttactgtgttt

SEQ ID NO: 9703 - DNA, 555 bp, Homo sapiens
  MAP TO AC006427.13; EXPRESSED IN HEART, SIGNAL = 1.5; EXPRESSED IN BONE MARROW, SIGNAL = 1.8; EXPRESSED IN ADULT LIVER, SIGNAL = 2.3; EXPRESSED IN HELA, SIGNAL =   2; EXPRESSED IN PLACENTA, SIGNAL =   2; EXPRESSED IN LUNG, SIGNAL = 2.4; EXPRESSED IN FETAL LIVER, SIGNAL = 3.5; EXPRESSED IN BRAIN, SIGNAL = 2.2
tgttaaattaggttattagagaaaggccttaaatcaatagagttggtatacttttcagaagaggaggaggcaccagagctcgcttgtgctctctctctctcgttctctttctgcatgtgcacaggggtaagaccatatgagaacacagtgagacagttgccatctgcaacccaaggagagaggccaacctttgttggcaccttgatctaaaaatcaaccgtgttggtaccttgatcttgggtttccagcctccaaaactgtaagaaaattaactcctgttgtttaagccgtccagccagacaaccagaaacatccaagaccagagacttggggcagcccaagaagactgatatagctactatacagtgagggcccgtatcttccatgtctttgccctgaaagagaaacacagatgctggcacacagtgggcactcaataaataaataaatcacttgaaaaaatttctcacagccttatgcaatgctgagacctgattagatcttgtcaagcacaacatctctcgccttccatacctccctctccctagcactgtt

SEQ ID NO: 9704 - DNA, 571 bp, Homo sapiens
  MAP TO AP000053.1; EXPRESSED IN HELA, SIGNAL =  13; EXPRESSED IN PLACENTA, SIGNAL =  22; EXPRESSED IN BRAIN, SIGNAL = 8.4; EXPRESSED IN LUNG, SIGNAL =  17; EXPRESSED IN HEART, SIGNAL = 8.6; EXPRESSED IN BONE MARROW, SIGNAL = 9.1; EXPRESSED IN FETAL LIVER, SIGNAL =  16; EXPRESSED IN ADULT LIVER, SIGNAL =  23
acctgcactaagctgcatccccagaggcgaccccagccctggctgagtcttggctcaagactttgcaatgcagccaaatcacaaaatgcacctcgtccagcccaccccgctaaaccattttcagtagttctcccctcaccgttctggaactttccatttccacgtggcccccacgttctgttttcatttctccttcagtccctttttgttccctttctgttctctctttgaagacctcagtcaccgttttctgagttggggttgagcttggtcggtactggaatctctttccgctgctgcaggagtctgaaggaatcagtcttgccgcctgtaacacatgtccagcgctgctttttctctgatgagtgtcttagtcagtttgggctgttaaaacaaatggcttaggcaacacacgtttctgtctcacagttctggaagctggaagtctgagatcaaggtgttggcagattcggtacccggtgaggacctgcttcctggttcgcgggtagaacacttcttgctgtgtcctcacaaggtgcagagagagaggggggtctggtgtctcttcctg

SEQ ID NO: 9705 - DNA, 586 bp, Homo sapiens
  MAP TO AP000053.1; EXPRESSED IN BONE MARROW, SIGNAL =  14; EXPRESSED IN HEART, SIGNAL = 5.8; EXPRESSED IN FETAL LIVER, SIGNAL =  13; EXPRESSED IN ADULT LIVER, SIGNAL = 8.2; EXPRESSED IN HELA, SIGNAL = 9.1; EXPRESSED IN BRAIN, SIGNAL =  16; EXPRESSED IN PLACENTA, SIGNAL = 7.2; EXPRESSED IN LUNG, SIGNAL =  10
gactgtggtaactcaggggctgagccatgccagtgtttattatgtgaaacaaggactggaacctcacaagaccaagtctgtccatttgaggatggcccaagatgcacacgggctgcttttatcttatgcgcaggttttaaaaaaatatgtttcatttaaatattccatactcttcaggaatgcccaggcagctgagctttcaggatgtcgcattgcagaggactccaatgctacatatggcagctggagaccctttcaaggcaggtggcagaacggaggccctctctatctgctggggcagccctccgggtgccccgctggaaggcagagcagctccatctctgggtgggtgagaggtgctgcatgggctcactatagtatcccaatactgtatggcagtaggctgccagagtatcctaagctgggtggcttcaacaacaggtactgactcacagttctggaggccaaaagtttgaattcaagcagggctgtgcttcctctgaaacctgtgggagaggagccttcctggcttcttcccgacttcttgggatggggatgcgcatccatcctcggccttccttggttt

SEQ ID NO: 9706 - DNA, 563 bp, Homo sapiens
  MAP TO AC006427.13; EXPRESSED IN PLACENTA, SIGNAL = 2.6; EXPRESSED IN LUNG, SIGNAL = 3.6; EXPRESSED IN ADULT LIVER, SIGNAL = 3.6; EXPRESSED IN FETAL LIVER, SIGNAL = 4.6; EXPRESSED IN BRAIN, SIGNAL = 3.7; EXPRESSED IN HELA, SIGNAL = 2.6; EXPRESSED IN BONE MARROW, SIGNAL = 5.7; EXPRESSED IN HEART, SIGNAL = 1.8
gaccacatacctcttgttgcctagcttggaattccacactgctgcccactcccttttggaacccatagaacacttacatgcaacatgcatcctggaagtaaaagagagtggtgaccaggggaccatctttgactaatggaaggaaagaagccgatggataaatgtttttctctttcatctcccagggacataaggatttcaaaaggccctcagaacatcctggtgagaccgaactcccaccctcgcagcagaggccagttcaacaactcattcttgtatctgcttcctgatctactcccaaatttctgctccctgaaatcattttccagaggattagcccatatgagaaccttcgtcttgggctttgcttttggagaacccaggctaagatataagattatttaaaagaaaaaatttataacatgtctataaatggataaaaacagccatttgccattacaaagatgaattcttcccttccatgactttccaaaacttctttgcctgtaaatatctattcctcttagctcattcttcccatccttctgcattttgatagcaca

SEQ ID NO: 9707 - DNA, 571 bp, Homo sapiens
  MAP TO AL049758.11; EXPRESSED IN FETAL LIVER, SIGNAL =   2; EXPRESSED IN ADULT LIVER, SIGNAL = 1.5; EXPRESSED IN HELA, SIGNAL = 1.3; EXPRESSED IN PLACENTA, SIGNAL = 1.9; EXPRESSED IN BRAIN, SIGNAL = 1.6; EXPRESSED IN LUNG, SIGNAL = 1.8; EXPRESSED IN HEART, SIGNAL = 1.5; EXPRESSED IN BONE MARROW, SIGNAL = 1.5
gccgcactcagctagaaaacactcctctatgacagtgttcagaaggatgacttgccaggcaatgatgggatgttgctttaatttcatgacttggtctccttacgtgtgaagcctggaatagtaacttctgctctacctgacttatagcagagatcagagcatcgaataatggttgctaaaatatcttggaaaaggaaacagtcctatccagatgaaatgtgttcataccgtagacatgacagagaccagctcttgttcagtgccccctacctgctggctgcttcctcggctcctcgaacagatcagccgagcttatggaggaacttgccgacagcctctctaggcgggccctggtctcatactagagaagacaaggaaaaggaaatgttaggctccaaagattgtgggcagttttgcaaaaagaatcactgaagagctgtcatttgaaagtgtttgacccccaggctctttctttccaacagttactgaatgccactgccaaggccaggtcctgcgggacagcacaaagctcatgttctgcatgggaggcaggtcacaggcagactgatca

SEQ ID NO: 9708 - DNA, 570 bp, Homo sapiens
  MAP TO AP000352.2; EXPRESSED IN HEART, SIGNAL = 1.4; EXPRESSED IN LUNG, SIGNAL = 1.3; EXPRESSED IN BONE MARROW, SIGNAL = 1.9; EXPRESSED IN ADULT LIVER, SIGNAL = 1.4; EXPRESSED IN BRAIN, SIGNAL = 1.8; EXPRESSED IN PLACENTA, SIGNAL = 1.4; EXPRESSED IN HELA, SIGNAL = 1.6
gaccagccttgggtctactgtgagaggagaggggcgtcagcactgattgcaggccaccactgagcccttatactaccaggagggtgatgggtgcttctagccctggtacagctgaggagaagcagtcacggggaggtcagatggggaggtcagacagggaggcaagtgcacagcaggccctggtcaaaggatctgatttccagtcccagctccattgcatatgtgctctgcaaccttggacaaaggacttcacttctcaatttcctcacctgttgaatggggtaatgtcttcgttatgggtattaaacaaaagtgcttgtacattgcagccacctcctggatggagttctccaagtcattggtggaactagggtaagacctaggtagcactgcatagagggaagagcctgggctctggggccagtccccctcagtttgcaccccacctctctccagctagtggcatggcctcacaagaggtggaggtagtgtcctctgaagcagcagctcctgagtgggcttgggcatggggctttctggatcctggtttcctacccccacagaacaatt

SEQ ID NO: 9709 - DNA, 570 bp, Homo sapiens
  MAP TO AC004624.6; EXPRESSED IN HELA, SIGNAL = 2.3; EXPRESSED IN BRAIN, SIGNAL = 2.2; EXPRESSED IN PLACENTA, SIGNAL = 1.7; EXPRESSED IN LUNG, SIGNAL = 1.8; EXPRESSED IN BONE MARROW, SIGNAL =   3; EXPRESSED IN HEART, SIGNAL = 1.5; EXPRESSED IN ADULT LIVER, SIGNAL = 1.9; EXPRESSED IN FETAL LIVER, SIGNAL = 2.8
ctaccaccacccacgtctgtgctcctggaaggaactcttctccccgcacctcagagcctttgcacactgtctggacctctcttcccaccctctgcctggtcaacctcctccccttctgggacctgcttaaaggccgatctttaatgaggccttctttggccttcatctcctcccactctgggttggtggcctcctgttgatctgtatgatggtttgggtcttgtccatttcttctcaaaggccaggggcctcagcatgggccacatcatggagtcacccagaagctttaaacaagaaccagtgcaggagcctcaacccaaacctattaaccctgagggcctgggcagcgacatcctgtcctgacagccacctgcctgcacccagagggccttgctggctgctgcagctgtcccacgttctcacggtcccattcagctgcctcttgtctttatccatttggttcccactcaaccagaattgcacactttgtcagctgcttaaaatcatcattggagtgtgagagggaaaagagaaaatgagagagaaagaaggcatcaaagaaacgaagtg

SEQ ID NO: 9710 - DNA, 569 bp, Homo sapiens
  MAP TO AP000354.1; EXPRESSED IN HEART, SIGNAL = 2.7
attaccgttgggggaaactgagtaaagagtacgtaggatctctttatattcttaaaactgcatatgagtctataattaccccataataaaaagtctaatttttaaaaaaagtatattgatcacagtccatgcctgtaaggtgtgttacaaccttactatagcagtatggaaagaattaatacggatttataactaaatatctactctgtgcggcatttactttgtgagtccaaacagtcattttaactttgatgttgtttatcttatgatttcagagacattccataagtggaccaatctcaacatccaaacccctgacagccctgtcagataagagaccaaactatggggaaatccctgttcaaggtacgtgtaatatgccatagcatttcacctttttttcaatttttgaattgttctggcttttttggcaaactaaatattttctttgctcttgatactatttcaatcaatctggtatacctttgtatcagaagttcactagtaagtatatctaaattacaagtggggaaagtagttgttaatgaatgcatctttcctgacagctg

SEQ ID NO: 9711 - DNA, 591 bp, Homo sapiens
  MAP TO AC005300.10; EXPRESSED IN HEART, SIGNAL = 2.3; EXPRESSED IN BONE MARROW, SIGNAL = 2.6; EXPRESSED IN ADULT LIVER, SIGNAL = 2.2; EXPRESSED IN HELA, SIGNAL = 2.7; EXPRESSED IN PLACENTA, SIGNAL = 3.3; EXPRESSED IN LUNG, SIGNAL = 2.9; EXPRESSED IN FETAL LIVER, SIGNAL = 2.8; EXPRESSED IN BRAIN, SIGNAL = 3.2
ttgccccatcagcaataaagcgtgccctgctttccactgccctgagaagtcggtcagactcctcaagtttacttccaaggttcccgacaacctggcaccacccttcctgttctttccttcctctccctatcccattcccaacctcctacttcccctgcttaggagcttagccatctcctggggctccgctgtacccctccaagaagccacaggcaactcctgccccagggatactccaagccctcccctccacacctgtggcgccctcctgtgagcttaccggccttcaatcacatgccatcgcacacgctccacacctgtgacgccctcctgtgagcttaccggccttcgatcacacgccatcgcacacgctccacacctgtggcacactcctgtgagcttacaggccttcgatcacacgccatcgcacacgccccacacctgtgacgccctcctgtgagcttaccggccttcaatcacacatcatcgcacacgccccacacctgtgacgccctcctgtgagcttaccggccttcaatcacacgtcatcgcacacgccccacacctgtgacgccctcctgtgagcttacc

SEQ ID NO: 9712 - DNA, 550 bp, Homo sapiens
  MAP TO AP000123.1; EXPRESSED IN FETAL LIVER, SIGNAL = 2.8; EXPRESSED IN ADULT LIVER, SIGNAL = 3.3; EXPRESSED IN HELA, SIGNAL = 2.2; EXPRESSED IN PLACENTA, SIGNAL = 3.1; EXPRESSED IN BRAIN, SIGNAL = 3.5; EXPRESSED IN LUNG, SIGNAL = 2.4; EXPRESSED IN HEART, SIGNAL =   2; EXPRESSED IN BONE MARROW, SIGNAL = 4.1
gattgtttccccaaggtgagtggcagctctaagcaaggaaggatggagtaaagcgcctgtctggctgtagtgagggagacagtgagtcagctgtcagcctgtggacccccaaaatgccaatgagggcatatctgagacagggtaatttataaagggaagaggtttaatggactcacagttccacatggctggggaggcctcacaatcatggtggaaagcaaaggaggagcaaagtcacatcttacatggtggcaggcaagagggcttcacttgggatgcagcattgacgaagaatgtcatagcttctggcagacgtttgttccattcattggaagagccatctgggattttgcctgattctgtatgctgtatatacacatgtatatgtgtgtatatatatgtgtttatgtgtgtattatgtgcacatgtgcatgtgtgcatatctgcagcatgcatgcttgtatatgtgtagtgtgtgtatctaggtatacactgtatgtatggaaggcaaatatattgtatgatggaaggcaaaggaggagcaaagtca

SEQ ID NO: 9713 - DNA, 592 bp, Homo sapiens
  MAP TO AC004624.6; EXPRESSED IN BRAIN, SIGNAL = 2.2; EXPRESSED IN HEART, SIGNAL = 1.9; EXPRESSED IN ADULT LIVER, SIGNAL = 3.4; EXPRESSED IN HELA, SIGNAL = 2.1; EXPRESSED IN PLACENTA, SIGNAL = 2.5; EXPRESSED IN BONE MARROW, SIGNAL = 3.2; EXPRESSED IN LUNG, SIGNAL =   2; EXPRESSED IN FETAL LIVER, SIGNAL = 2.2
caggactggaggaacctggcctggccctggtgggggtccttggcccagcccccaatctgctgctaaccagcatgtggccccattcccttccctgcatttctcaagggcatttgggacaagggcatttgggacagcgagcaaccccaggcctcgggagaattttagcatctttggtgtcttgttcactaaatccagggagccgcagaaaaccctcaccccctcatcccatttctaaaggtctcccgggggtgggatcacctggcagagggcccccctctagccttctgtaatggtgctatgaggctttactcaaagccctcgtgtacatgcgttattttagtgacttctcgctgctgccaggcgatgggtgctgctgtttcccttcttggacagaaggtgagggctggagtagtgggctgagtgatccagcgtctcccagctgggtctgggatgcaggcggtgtcacttcccacactgatctgcgctctcagagaactcctgcctttacggcttcttctgcaagctctgtggggaagcaggaggggccctccctgccgcagctggctgggcctctgtctgggtgggttgaatc

SEQ ID NO: 9714 - DNA, 560 bp, Homo sapiens
  MAP TO AL078474.2; EXPRESSED IN LUNG, SIGNAL = 2.1; EXPRESSED IN BONE MARROW, SIGNAL = 3.2; EXPRESSED IN HEART, SIGNAL = 1.6; EXPRESSED IN FETAL LIVER, SIGNAL = 4.3; EXPRESSED IN ADULT LIVER, SIGNAL =   3; EXPRESSED IN HELA, SIGNAL =   2; EXPRESSED IN PLACENTA, SIGNAL = 3.5; EXPRESSED IN BRAIN, SIGNAL = 2.1
atttgtccttctgtgcctggcaatttcacttaacataatgtcctccagtttcctccatgttgttgcaaatgacaggatttcattatttattatgactgcataatattccattatgcaaagataccattttctctctctcttttcatctgttgatggactcttacgttgactgcataacttggctattaagaatagtgctgcagtaaacatagatgagcagatatctctttgatatactgcttttctttcttttggataaatatccagcagaggggctcctgaattatatggtagttatatttttagtttttatatttcttagttctttgaggagcctcatattggttttcataatggctgtactattttacatttctaccaaaggtgtataaatgttcccctttctctgcatcctcatcagcatttatttcctgtctcagattcttataatgaaactaacacaatgtcaaagattttgaaaaacaatatcagcaactttgattcaagatcaaactcaaaaacagagtacaatgtatttctctcaacgcaaaagacaccaa

SEQ ID NO: 9715 - DNA, 586 bp, Homo sapiens
  MAP TO AP000123.1; EXPRESSED IN BRAIN, SIGNAL = 2.3; EXPRESSED IN PLACENTA, SIGNAL = 5.1; EXPRESSED IN LUNG, SIGNAL = 2.7; EXPRESSED IN BONE MARROW, SIGNAL = 3.2; EXPRESSED IN HEART, SIGNAL = 1.8; EXPRESSED IN FETAL LIVER, SIGNAL =   6; EXPRESSED IN ADULT LIVER, SIGNAL = 3.1; EXPRESSED IN HELA, SIGNAL = 2.4
tgcagataaatagtgggtcgggtggatggctaattggtaagacacaagcccagttctccactgtcccagcccagtgtcccttgtgagagaaacagagccacctttttccatgaaggcctcttggcagcagggttacaggatgctggtggctttgggaatttgaagctctttcctgccatgtgcacacatcacagctcccgtctctgtctgggctgacaggccatgtggcttcatgagagcaattatgtttctttaccttcagcacgggttcctcccctcacatggggtttcctttgtgtccttggtttcacacagccagcctttgtcgggccgactcagatatcccatttccttgaatatctaaagacccacagaaaaccttcagaaatactacactgggtcctttagtcatgtgaatgtattgtgtcctttcggacacctagataaaacctagaagtggaaggagtatgtaaaagccaacactccaatccatgcttgagggctcagagggatcctcatgctatgggtccatatattaattcaatacatatggatatattacctactgtgtgttggactctgtgct

SEQ ID NO: 9716 - DNA, 570 bp, Homo sapiens
  MAP TO AP000350.1; EXPRESSED IN PLACENTA, SIGNAL = 3.7; EXPRESSED IN BRAIN, SIGNAL = 2.6; EXPRESSED IN LUNG, SIGNAL = 3.3; EXPRESSED IN BONE MARROW, SIGNAL = 3.1; EXPRESSED IN HEART, SIGNAL = 2.3; EXPRESSED IN ADULT LIVER, SIGNAL = 3.6; EXPRESSED IN FETAL LIVER, SIGNAL = 5.4; EXPRESSED IN HELA, SIGNAL = 3.2
tcagccttagagcccaagagcagccagggtgagaccccacacccaggcaggaggcagaagttcagggttctggccccagatcatccagagacttgctctatgattctgggcaaagttctggctttctccaggcctcagtgtttctgtctgcctcatgggtgtgacacgaagagggacactgcccacaggctgagctcacacctgcatcagctcctccagggccatgagatcagccagtgtcacctgctggccagcgaggaagggcctgtcccccaggaacttgtcctccagccattgcagggcctggtccatggcagtcctgttgcgttccaccttctcctcgggcacctggaccccaatgaggggccccaacacctgatgggggcagagagtgggtcagtctatggccccggcctactgccaactactccctgatggccaatcactctccagatggctctcctcacctggacccacaggggtataccaaaggtgccacggatgcagtcggcatgccagcccaggtactcatgaacacgggcacgagcctgcaggtcagatggataccag

SEQ ID NO: 9717 - DNA, 578 bp, Homo sapiens
  MAP TO AC007539.8; EXPRESSED IN HEART, SIGNAL = 1.3; EXPRESSED IN FETAL LIVER, SIGNAL = 1.7
tgtattagtttcctgtggctgccgtaataaattactaaaaccttagtagcttaaaacaacgtaatttattctctcgcagttgtgggggccagaagtctgaaaacagtttccctgggccaacatcaagagttggcagagctgcactcactcaggggctggcggggagaatctgttacgcgcctcttccagggtccggtggctatggccacaccaactccgatgttcaaggcccgtgttctcaagcctccctctactggtctccacactggggcctcctctgtgtgttttcagatctctctttgtcgtctgattataacgatgcatgtgactgtatttacagcccacctagataccgcaggataatcttcccatcacaagattcttcatctgctcacattgccaaaaactcctgttttcccctcatgtaaggtaacactgacaagttccaggtattagaatgggaatatcttttgaggggccatttcacaaccttccacaaccacaaactccttacgctgtttgtttacttgccctctctgggccggtttccccacttgtgaagtgagagggttgggtga

SEQ ID NO: 9718 - DNA, 579 bp, Homo sapiens
  MAP TO AC008272.1; EXPRESSED IN PLACENTA, SIGNAL =   2; EXPRESSED IN HELA, SIGNAL = 1.4; EXPRESSED IN HEART, SIGNAL = 1.4; EXPRESSED IN LUNG, SIGNAL = 1.5; EXPRESSED IN ADULT LIVER, SIGNAL = 1.5; EXPRESSED IN FETAL LIVER, SIGNAL = 1.5
tctgagtcaaggtcccagtggggatccatactggggatggcttgctgaccagtagggaatttgtgcctttcttcagctgtcattctatcatttactgactaagataccaggtatctccaaactctcaggctgcagctaaagccacattcttttcattaaagaccagggtttgatctaagagtagcatgacatctctccaagcgaggtcaaaggtttgccctagaccctgtaggacatctacgtacctatcaggatcatctgaaaacttccccaggtctgccttgatctgctttaaatcagagagggagaaggggacatgcacctgggttgggccaagttctctgccccctacagcttgaaggggacataaccgattgcctggggggcgggttgtggtcctctggagatttctttgcttatttccttctgggcaggggagattagaggaggattatcattcataggaaggggagctatagggaggctaggatatgggggtaagctgagaggtcctcctgtgggatgtaaattgtaagctttgcatagttgtgtattctccctcaatgaaaagaaagcttg

SEQ ID NO: 9719 - DNA, 582 bp, Homo sapiens
  MAP TO Z95114.19; EXPRESSED IN HEART, SIGNAL = 2.5
ctgactgaatctgtccgctgaccactgctgggatcccatgaggaaacacaggatcccctcatgaaaggaaaacaaaatctcaggaacctaaactcacgatggaaaagtgacacttggaaactgagtcacacaacacactgcctttcctttccatcctaaaccgatagacaggtgctaggcagaaggccatgtgtctcccagggtggccgccctcaccctgacactgtaaaatcacagttcatcttcacaagtacgtgacacaagacgacactggaaaccatcccgccacccaccccgacacaaatgcatatgtcagtgcttcctgtgctctatgttgactttatctcctgtcgatgcggatggactgggtatgagacgaatgcagaactgactgttcctctgcctgctcctttcacaagcagcaggtggatttagggagcactaatcaaaccctcacaagacagtgaacactcacccactacgtgccctccctctctttttattctttcctctttctcctcctgcccactgttctccctttaaatattgaagctctcaaaaccctcttaggaaaaagtgcaa

SEQ ID NO: 9720 - DNA, 578 bp, Homo sapiens
  MAP TO AP000352.2; EXPRESSED IN HEART, SIGNAL = 1.4; EXPRESSED IN BONE MARROW, SIGNAL = 1.5; EXPRESSED IN FETAL LIVER, SIGNAL = 1.6; EXPRESSED IN PLACENTA, SIGNAL = 1.4; EXPRESSED IN HELA, SIGNAL = 1.6; EXPRESSED IN BRAIN, SIGNAL = 1.5
tcccctcgccctaataagactctttcatgcccattgtttcagtccacactcctgacggctctgtaaggcgggcaggagaaggagctgaggaaatgaggcccagagagggagggagacttgcttgaggtcgccggcagtcagcagggccagaactggcctccagccttcctgacttccctgtgcccgtgtccccaagccccagaagtggccctgctcaccttgagccagactatcttcttcatgggcagctgaaaggccgtgtgttgccaagccacgaactcatccacacgggcacgtgcgtgcgggtctggcgggcaccagtgcgatggtgcgctgtacttgcggcacaggtagtaaaggatggccgcgctgcagaaggggccggtcaggggcactgcccttgccttcctgagtgccactacatcaaccaccccggtgtggcctgggcccaactgctggggcttccagagcaaagaggagcccaaacggccccgagaaagaccttcaccagagctgtctgtctgacagtcagtaagggctgggaaggagccctgcggggtgagtaggagttgggggct

SEQ ID NO: 9721 - DNA, 1478 bp, Homo sapiens
  MAP TO Z86090.10; EXPRESSED IN PLACENTA, SIGNAL = 3.1; EXPRESSED IN BRAIN, SIGNAL = 4.2; EXPRESSED IN LUNG, SIGNAL = 3.2; EXPRESSED IN HEART, SIGNAL = 3.2; EXPRESSED IN BONE MARROW, SIGNAL = 3.1; EXPRESSED IN FETAL LIVER, SIGNAL = 5.1; EXPRESSED IN ADULT LIVER, SIGNAL = 2.7; EXPRESSED IN HELA, SIGNAL = 3.3
tctccaaaatgaaacactcagggctacacataggaaaagcacgcacacacacacacacacacatacacagacacttacttttgtgtccttctggctatgctgacgagttttcctggtgaagcccggggctcacagagtaatctctgcagacaactgtggttcttgcctctggtgcctgcaggaggcaggcatgttgtgtccttccaagacagatggctcagggcactctggtaggattcaccaggaaactcatggagaagggaaaagggacaagattagcaacagtgaagggagggagaatggtgggagaggattccagatgaacggtgggtcgctggaggctgagcatgccagcaggatgtcagttctcagagcaaagcccatgtcaaacagccaacgcttgctccttctgtccccaggatcacctcctcgcacggggagcatctcctacatcaacatcatcatgccttcggtgttcggcaccatctgcctcctgggcatcatcgggaactccacggtcatcttcgcggtcgtgaagaagtccaagctgcactggtgcaacaacgtccccgacatcttcatcatcaacctctcggtagtagatctcctctttctcctgggcatgcccttcatgatccaccagctcatgggcaatggggtgtggcactttggggagaccatgtgcaccctcatcacggccatggatgccaatagtcagttcaccagcacctacatcctgaccgccatggccattgaccgctacctggccactgtccaccccatctcttccacgaagttccggaagccctctgtggccaccctggtgatctgcctcctgtgggccctctccttcatcagcatcacccctgtgtggctgtatgccagactcatccccttcccaggaggtgcagtgggctgcggcatacgcctgcccaacccagacactgacctctactggttcaccctgtaccagtttttcctggcctttgccctgccttttgtggtcatcacagccgcatacgtgaggatcctgcagcgcatgacgtcctcagtggcccccgcctcccagcgcagcatccggctgcggacaaagagggtgacccgcacagccatcgccatctgtctggtcttctttgtgtgctgggcaccctactatgtgctacagctgacccagttgtccatcagccgcccgaccctcacctttgtctacttatacaatgcggccatcagcttgggctatgccaacagctgcctcaacccctttgtgtacatcgtgctctgtgagacgttccgcaaacgcttggtcctgtcggtgaagcctgcagcccaggggcagcttcgcgctgtcagcaacgctcagacggctgacgaggagaggacagaaagcaaaggcacctgatacttcccctgccaccctgcacacctccaagtcagggcaccacaacacgccaccgggagagatgctgagaaaaacccaa

SEQ ID NO: 9722 - DNA, 571 bp, Homo sapiens
  MAP TO AB016897.1; EXPRESSED IN HELA, SIGNAL =   2; EXPRESSED IN BRAIN, SIGNAL = 1.6; EXPRESSED IN BONE MARROW, SIGNAL = 2.2; EXPRESSED IN LUNG, SIGNAL = 1.5; EXPRESSED IN HEART, SIGNAL = 1.6; EXPRESSED IN FETAL LIVER, SIGNAL = 1.5; EXPRESSED IN ADULT LIVER, SIGNAL = 2.9
tcacctaagggtccatcacctactgtcactccccaacctgcggagccctgaccgatggatggacagcctttctcaccctatgtgtctccttaacgattggccagaccttggccagcagttttatgttccctgatggtgaaagtgtggcttctaatagaatctccctctgttttgttttccaaacttcaactctctcctccaggctgactccgtccatacccgtctctgcctttcccagtggcctgggacccagcccagctcctctatcctcacccgggtgcctgcatgagtgctgtggctccttcccccctcctttctccttggccttggtgtctattccttgcagcaccaggggcgtctcctcatgctgccccgttcctgcgcctctggggagcctcaggcctcactgcctctttcctgtgcccacagcacctcctgttcctgcccagctcgacacacccaggcctgatgactcccagcatgaattcccatgtctcccaccccacggcccaaagtcccgagctggtgctcaaagctttccaagcattagctcttttctgcctctccaacc

SEQ ID NO: 9723 - DNA, 986 bp, Homo sapiens
  MAP TO AC007253.2; EXPRESSED IN LUNG, SIGNAL = 4.5; EXPRESSED IN HEART, SIGNAL =   3; EXPRESSED IN BONE MARROW, SIGNAL = 3.4; EXPRESSED IN FETAL LIVER, SIGNAL = 2.8; EXPRESSED IN ADULT LIVER, SIGNAL = 3.6; EXPRESSED IN PLACENTA, SIGNAL = 5.7; EXPRESSED IN HELA, SIGNAL = 5.1; EXPRESSED IN BRAIN, SIGNAL = 4.1
tggggaaagggaaatgatagaccttttggggactactggacattggctctgagcagacattaattccgtggaacccaaaacatcactgtggtcctccagttaaagtagcggcttatggagatcaggtcattaatggagttttagcagaggtccgacttagagggttccaataatgggtccccggactcatcctgtggtcatttccccagtgccagaatgcataattagcacagacatacttagcaactggcagaacccccacattggctccccaactggtggggtgagggctgttatggtgggaaaggccaaatggaagccattagaggtgcctctacctagaaaaatagtaaatcaaaaacaatgtcacatccctggagggattgcagagattagtgctgccattaaggccttaaaagatgcaggggcaatgattcctacaatatccctgttcgactctactcagcctgtgcagaagacaggtggattttggagaatgacagtggattattgtaagcttaaccaagtggtgtctccaattgcagctgctgtaccagatgtggtttcattgcttgagcaaattaacacaccttcgggtacctggtatgcagccattgatttggcaaatggctttttctccattcctgtccataaggcccaccaaaatcaatttgccttcagctggcaaggccagcaatgtacctttactgtcctccctcaggagtatatcaactctccagcttggtgtttaatcttcagagagaccttgatcgcctttcccttccacaagatatcacactggtccattacattgataacactatactgattggatccagtgacagagaagtagcaaacacactggacttattggtgagacatttgtgtgccagaggatgggaaataaatccaaccaaaattcaggcaacttctacctcagtaaaatttctaggggttcattggtgtggggcctgttgagatattcc

SEQ ID NO: 9724 - DNA, 979 bp, Homo sapiens
  MAP TO AL022319.2; EXPRESSED IN LUNG, SIGNAL = 4.8; EXPRESSED IN BONE MARROW, SIGNAL = 3.5; EXPRESSED IN HEART, SIGNAL = 2.8; EXPRESSED IN FETAL LIVER, SIGNAL = 5.7; EXPRESSED IN ADULT LIVER, SIGNAL = 5.7; EXPRESSED IN PLACENTA, SIGNAL = 5.3; EXPRESSED IN HELA, SIGNAL = 4.2; EXPRESSED IN BRAIN, SIGNAL =  11
ttctgatgtttccaccgaccagccatccctcatctctctctccctcttctccagcctccctattccctgagacacaacagtattgaaattcagccattaataatcctacagtggtctctaagtattcaagtgaaaggaagagtcatgtgtttcttaggttaaattaaaagagaaaaacaattaagcttagtgaggaaggcatattgaaggctgagagaccaaaagctaggcctcttgtaccaacacttagccaagctgtgaatgcaatggaaaagttcccgaaggaattaaaagtgctactctagaaaacacaagaataataagaaagtgaaacagccttattgttgatatggaaaaagtctgagtggtccaaatagatcaaaccagccccaacattcccttaagccaaagcctaatccagagcaaggccctagctctcttcaattctatgaaggttgagagagatgagcaagctgcagaagaaaagtctgaagctagcagaagttggttcatgaggtttaaggaaagaaaccaactccctaacataaaaatacaaggtaaagcagcaagtgctgatacagaaactatagcaaggtatccagaagattagataattgatgatggtggctacactaaacaacagattttcaatgtagatgaaacaggcttttgttggcaaaagatgcaactggtaactttaagtggaagccaattgctcctttcccattccaaaaattctaaggcccttaagattcctttcaaaatattactgctcattgacaatgcacctggtcacccaagagctctgatggagatgtacaaggagattaatgttgttttcatgcctgctaacacaatgtccattctgcagcccatggatcaaaaagtcattttgactttcaagtcttattatttaagaaatatattttgtaaggttatagctgccttagacagtgattcctcttatggatctgggcaa

SEQ ID NO: 9725 - DNA, 1487 bp, Homo sapiens
  MAP TO AL022318.2; EXPRESSED IN HEART, SIGNAL =   4; EXPRESSED IN BRAIN, SIGNAL =   6; EXPRESSED IN PLACENTA, SIGNAL = 7.2; EXPRESSED IN LUNG, SIGNAL = 7.8; EXPRESSED IN BONE MARROW, SIGNAL = 7.9; EXPRESSED IN ADULT LIVER, SIGNAL = 8.4; EXPRESSED IN FETAL LIVER, SIGNAL =  43; EXPRESSED IN HELA, SIGNAL = 8.6
taataaaggccggtgcgttatcagactgtatagaggtgggaaggacaaacccaggaattctgtctaaaagaaaggaagaaatgatcacggtggacttctcagaccctgtgggaaaggcctctacccatccagtgaaagtgtctacacagaccaagaggtattttagtttcctgactcagggcatgtgagtagtcaatttgccagtcctgggcagggccaaatcccagagcttgatgtgtagggaagggagggggcctgaacaatccctgaggagtaatagaatagcagatggaacactgagaagtgatttccttgaggatagatttccacaatggaaaggaaatgagaggttctaagaggcaggctagtggcatgtaacctacatggaagaggttatgaaaggacgacagaatagactgggcctgtgaggctggaaggagatatttttcttggtccaagaaccatttgccttgtgtgggaagagattgataggtggaagtttcggtgggggagtaggtgggagtgactgatgagaaggagaaaaaccggccatgagggacagaagttggaatgctagctgcttctttagcattgccctgagcgatgggatccgatgccttttgatggcccttgcagtgaatgactccagcttcctttggaagtaaagcagctttaagaagactttttattaaggaggcattgatgatggaggacccttgcgtagtgaggaaacctctttctgcccatataacagcatggtggtacaggatatggaaggcatatttagagtcagtataaatattgatgtgtagtccctttgcaagagtgagggcctgagttaaggcaatgagtttggcttgctgagaagtagtggagtggggcagagtggtagcctcaaggataaatatggaagatactatagcatagcctgcctttgctggtgagtggcaattaggcctgatggaactgccatcaataaaccaagtgtgatcagggtgaggaacaggaaagaaggaaatatggggaaatggagtgaatgccaggtgtatcagagagatacagtcatgggtgtcaagtgtggtatcaggaataatgtgggaggccagattgaagtctgggccaggaacaatggtaattttgggagactcaacaaagagtgagtatagctgaaggagccggagagcagaaagtatatgcatcaggtgtgaggaagaaaatagattttggaagttataagaactgtagagagtgagttgagcacagtttgtgatttcaagggcctctaaaagtattaaggcagtggcagctgctgcacagagacatgatggccagcctaaaacagtaaggtcaagttgtttggacaaaaaggctacagggcacagtagccttgtgtaggaatcctggtccttgtgtaaaaattccgactgcacagccctgtactttggctgtgtgtaatgaaaagggttgggatgagtcagggagagcta

SEQ ID NO: 9726 - DNA, 590 bp, Homo sapiens
  MAP TO AC008151.1; EXPRESSED IN PLACENTA, SIGNAL = 7.7; EXPRESSED IN BRAIN, SIGNAL = 9.2; EXPRESSED IN HELA, SIGNAL = 6.2; EXPRESSED IN LUNG, SIGNAL = 6.4; EXPRESSED IN HEART, SIGNAL =   4; EXPRESSED IN BONE MARROW, SIGNAL = 7.9; EXPRESSED IN FETAL LIVER, SIGNAL =  16; EXPRESSED IN ADULT LIVER, SIGNAL = 7.8
catgttccatctccctcctggtggagtgaggggtgaaagtaggacaattttggggtggcgagaaggtattaccaagtcacagcctattctgtcaggtgacagacagatggggagggaagtctctgcatgcagaatcccagccctctgaaagcttaggggaaacagctgtcccccagcctcaaaatagctgctcattactactggctgatgctatgcatggtgatgacagtggcaatggggttacacagggacaaatgtgtctcactcctcaggatgctggctgccgagtcgctgaaaacaaaaccaatttttccaggagggccaagggtcacaaaaacaggtaggcaagtatgtatgggctcaggagacacacccaagccaagaaggcattcccatttgtttttctttttcagacaggttcttgctttgtcgcctagactggagtgcagtgatgtggtcatggctcactgtagccttgacctcctgacctcaagcgatcctcccacctcagccttccaagtagctgggactagaggcatgtggctaattttctattttttgtagagacagggtctcactatgttgcccca

SEQ ID NO: 9727 - DNA, 563 bp, Homo sapiens
  MAP TO AB016897.1; EXPRESSED IN PLACENTA, SIGNAL = 2.7; EXPRESSED IN HEART, SIGNAL = 2.8; EXPRESSED IN FETAL LIVER, SIGNAL = 5.1; EXPRESSED IN ADULT LIVER, SIGNAL = 2.4; EXPRESSED IN BRAIN, SIGNAL = 2.4; EXPRESSED IN HELA, SIGNAL = 3.5; EXPRESSED IN BONE MARROW, SIGNAL = 2.7; EXPRESSED IN LUNG, SIGNAL = 2.8
ctttgtcacatacccagcccatgaaccgagccaggagagggccccagaagcctggcgactcttcccaaggcttcactgggatggcccctcctagcctgggatgcttgctcagaatccctccaggacaacaaggctaaactgggggactgatgtccaaacagccgcccactcccctcacaaccacgcagccataggaggggagagccaggcgtgtaggcagaggagagaggggttctgcgtcaagtcctccgggcgcccccaccccacttgcacagagcctgcttctgcggccccagcttggggcactccatcttgacattgccctcctccctctgccccccgtctgagctggatgaggaaggcaggccggagctgaaagggcacagttctgccccgctccagggcctgctgccctgacagccccagggcacggaaagtcaccaggaccctcacctgtgacttaggaaaatgtctaaagagctttgtgaggatttggcacaaaatgcctgcaagtgattctgtcctggatatatttggaagttagagccaacctaatttgctgc

SEQ ID NO: 9728 - DNA, 577 bp, Homo sapiens
  MAP TO AL022328.21; EXPRESSED IN HELA, SIGNAL = 5.9; EXPRESSED IN BONE MARROW, SIGNAL = 3.2; EXPRESSED IN HEART, SIGNAL = 3.8; EXPRESSED IN LUNG, SIGNAL = 4.3; EXPRESSED IN FETAL LIVER, SIGNAL = 5.3; EXPRESSED IN ADULT LIVER, SIGNAL = 4.3; EXPRESSED IN PLACENTA, SIGNAL = 4.3; EXPRESSED IN BRAIN, SIGNAL = 3.4
ctctgctcctccacctcttgtggagggcctgacatcagtcaggcttgcccgcagttatccagaggcctaaacgtctccctgtgatgctgtgcttcagcggtcacactcctagtccactttcatgttccatcctgtacacctggctctgccttctagatagcagtagtaaattagtgacaatactaatagtccctgatatgcagaaataatggcgtaagctgtctttctctctgtctcctctctctctctgcctcggctgccaggcagggaagggactcctgtccagtggacacatgacccacgtgaccttacctatcattggagatgactcacattctttaccctgccccttctgccttgtatccaataaataacagcgcagcccgacattcggggccactaccggtctccatgcattggtagtagtggtctcctgggcccagctgccttttctcttatctctttgtcttctgtctttatttctacactctctcgtcgccgcacacggagagacccactgaccctgtggggctggtccctacagagctgccccagtccaaaggggactcgatcaatg

SEQ ID NO: 9729 - DNA, 950 bp, Homo sapiens
  MAP TO AL022238.1; EXPRESSED IN LUNG, SIGNAL = 4.1; EXPRESSED IN HEART, SIGNAL = 3.1; EXPRESSED IN BONE MARROW, SIGNAL = 3.5; EXPRESSED IN FETAL LIVER, SIGNAL = 2.9; EXPRESSED IN ADULT LIVER, SIGNAL = 3.3; EXPRESSED IN BRAIN, SIGNAL = 4.9; EXPRESSED IN PLACENTA, SIGNAL = 2.8; EXPRESSED IN HELA, SIGNAL = 3.2
aggggtggtgagacgtaaaggaatcctgtgggtttgctgatggactgagtgtggggtctgggcgagggaggagccagaggtgactccgaggtttaggctgagcatcgggagaatggaggtgtcatttctggatccgggtagtactatggtaggagtggctttgaggagaaggtgaagagctttgctcctcatggggtacatgttagaggctcacctggagctgtcagaaagccattagctatgggaatctggatatggtgggagagagctggcctagagccatgaagctcagaccctcctgaagacggaggcttggctgcttggagaacacgtagtagagaatgctttttctttcctccttggctctctcttggcagaaggtgatgagcctggctccagtctgctggcgaactcccctctgatggaggatgctccacagaggctgcggtggcaggcccacctggagttcacccataaccacgatgtgggggatctcacctgggacaagattgccgtctccctaccccgctctgagaagctccgctccctggtgctggccggcatcccacatggcatgaggccacaggtaaggtggccacagggacccacagggtgttgagagggtcctggccccatgatcaggtgtcacgagaaagactgagtgcccttgcggctcccttccctcagctgtggatgcggctctctggggccctgcagaagaagaggaactctgagctgtcctaccgcgagattgtgaagaacagctccaacgatgagaccatcgctgccaagcaggtgaggccggtggcactgtgcaggaagagctggaggctgtgtgggctcgcaggagagagggagcctgcctggggttcttagagtgtgcccttgttgtggggtaggggaggatatttgctccttccttggtcctctgcaggccaaagaaagaattg

SEQ ID NO: 9730 - DNA, 566 bp, Homo sapiens
  MAP TO AC002472.3; EXPRESSED IN BRAIN, SIGNAL = 1.5; EXPRESSED IN HELA, SIGNAL = 1.3; EXPRESSED IN LUNG, SIGNAL = 1.5; EXPRESSED IN HEART, SIGNAL = 1.4; EXPRESSED IN BONE MARROW, SIGNAL = 1.8
caggaggtggcccttagaggggggtatgcgttcaggttggactctcacattcccacgtgtctttgggacatttagaggactgtctacgaggtgactcgaaacgcaggtctatgcttcagagaggtccaggttcctgtgaggcaggaagcaggggaggagagctatgggagaagcccagtaaggctagggtggggagctgagggccgacagagctggatgtccatacccagctggcaatactgtcccccagcacgtacctgctgtgggcacagtggtcccctggggacctgctcccggcttgcctccctcctgtgtctgtcttctgctccctgtcctgctcagcactccctccccacctgcaaacccaggggaaggaaccccagctgggaacaccaggcctcaggtgggcctgagcagtggccaacagaacacctgggtggggcctgggtctcagcaaggccagaggaaaggcaggggagaagatgagggagacacaaggggtgcccagccaccttcagcagagcagcaccccagcccacagaggaggaagggcagcaagaagatgt

SEQ ID NO: 9731 - DNA, 985 bp, Homo sapiens
  MAP TO AL022319.2; EXPRESSED IN BRAIN, SIGNAL = 3.3; EXPRESSED IN HELA, SIGNAL = 3.6; EXPRESSED IN HEART, SIGNAL = 5.3; EXPRESSED IN LUNG, SIGNAL = 3.6; EXPRESSED IN BONE MARROW, SIGNAL = 2.8
ttcctcattaccccatagcctcaagggcccagcaaggctctgtgtgcagcagaaaaggtgcttacagcccccgccttacaggctcagggggcatccaggctcaggtgttatgggtggcatcgggctgcccagcctgcttctttccagaccctggtattggccttgcttatatgtttttacattccttccattcctcagaaatgctactggtgcgaatcaaacctttctgtgaagcaagaaacagagggatttaggattcaagcctaggtcaggcaggctgagcatagctttgatagcagtggaggggctggaagtggaggtgatggaggtggagatgacagcagtggggatgatggaagtggaggtgacagcagtggaggtgatggaaatggaggggacagtggtggtgacagcagtggaggtgacggaggtggaggtgacagtggtggaggtcacagcagtggaggggttggaagtggaggtgacagggtgggggtgatagcagtggaggtgacagtggtgggggtgatggaagtggaggtgacagtggtgggggtgatggaagtggaggtgacagtggtgggggtgatggaagtggaggggacagcagtggggatgatggaagtggaggtgacagtggtggaggtgatggaagtggaggtgacagtggtggaggtgatggaagtggaggtgagagtagtggttgtgaagaaagtggaggtgatggaagtggaggtgttgaagtcaagcatatgatgttagaagcagctgcagtgcaaagagggcacatggtggtgcctcctcatgggtctgagatgggattcacggggatgacatgcccagcctagcacctggcacaggcaagtgcccggtcagtgcccactggctgctgctctgagcctccctttttccagccacatgctgggtgcagaggatgcagaaggggatgaacctggcttccttccctgaagactctccccagctg

SEQ ID NO: 9732 - DNA, 565 bp, Homo sapiens
  MAP TO AC002472.3; EXPRESSED IN HELA, SIGNAL = 1.5; EXPRESSED IN BRAIN, SIGNAL = 1.5; EXPRESSED IN HEART, SIGNAL = 1.9; EXPRESSED IN LUNG, SIGNAL = 1.9
cactaggcccccagagagaccaccagctatatctccggtcaggggagtctataagctcggagctgggtctactgaggctgggggtgggtgctggctagtgaaggtgattgtctgagggcactggctctctgatgcatggctggagcttctgtctcgttcagggagtctacagtgggaagtggggccagagaggatgctggactgggagcctgtagggtgtggggagagaactgagcatgtagggcccagctctgccccgtcactacacgctggggggacaccacactgcccatcttctccttcccaggtgggcgctcctcgccaaaaaaggctaccaggagcgggacctggaaccccagatttccatcacaaccaaactcaaaggggtttccgtgactcagatcaaggagcttggaaaccggctgtgggatgtggccgacttcgtgaagccacctcaggtgggggccctgatgttgctgacgggggcgcaagtcctttccccactgacagcttgaacacccgccatgcagccagtgtgtgcgagagagaagcatgtgatgccaaa

SEQ ID NO: 9733 - DNA, 553 bp, Homo sapiens
  MAP TO AC004032.7; EXPRESSED IN HEART, SIGNAL = 5.1; EXPRESSED IN BONE MARROW, SIGNAL =  12; EXPRESSED IN LUNG, SIGNAL =  11; EXPRESSED IN FETAL LIVER, SIGNAL = 8.6; EXPRESSED IN ADULT LIVER, SIGNAL = 6.4; EXPRESSED IN PLACENTA, SIGNAL = 5.3; EXPRESSED IN HELA, SIGNAL = 9.1; EXPRESSED IN BRAIN, SIGNAL = 6.9
tacagacctgtctccacggggcctgggatgcccagagaaatgtggatcctctggcacaggcatttgagtgtctcctggcagttacaggcgtatacgaaggcggccgaagagcctggctcacctgcctgatggaaatacgtctcaggaacaccaggcccttcaagttggtttgacaagctcccttctggagacgctggggtcctcactgctaagacaaattcctgacagaaccccatactcaccttgaccttgggccgctgggggaagcctgcagagggtttgacagaagcgcacagcgcaatgtcaaggctgctgcagaggggtctgcagaagacaggcccagactgccagaggatcatggtccatcccggcactcagcaaggccagcaccctcttggagcctttacttcctcatctgtaagagggaacagctgaaatcctatccctggagtcactgtgaaaagtcacattttgggttttctaatttattttttttagagacagagtcttgccctgtcacccaggctagagcacaatggtgcaatcacagctc

SEQ ID NO: 9734 - DNA, 579 bp, Homo sapiens
  MAP TO AC005006.2; EXPRESSED IN PLACENTA, SIGNAL = 1.9; EXPRESSED IN HELA, SIGNAL = 1.8; EXPRESSED IN LUNG, SIGNAL = 2.3; EXPRESSED IN HEART, SIGNAL = 2.2; EXPRESSED IN BONE MARROW, SIGNAL = 2.2; EXPRESSED IN FETAL LIVER, SIGNAL = 2.6; EXPRESSED IN ADULT LIVER, SIGNAL = 2.4; EXPRESSED IN BRAIN, SIGNAL = 2.1
catcatgcacaaagggaaactcagcccaggatggtaaaccttctggcttagagcatcaccaccagtcaggtctcagggtatcctactttccctgtaacccctgtggtggagcaaaagagacacactcacctcgggctgtggctggctgcccctttctacccactgcctgagccacgtccaactcccaggctgcctctgcgatcactgggagacaggaatgctccaatgacacccagcagcaagctggctggctccctcccactccagtggtgtgaatattcatgagtttgcttcctggggatagcaggtggcacaccccagtaccctgcaggtgttgcccaggccttctgcctccactggacagctctggccagtcctcacctctctttggaccccaacaagcaagcagctctttcatccaagggcacagaaagattccaggtatccttgggccaaggacacagcaaccgcagacgcctgcagagagcccagaacaggctctaaggctgagtgagggacagagaggtgcaggtgggctggggtgccagagggctaattgccccacctattgcatttcat

SEQ ID NO: 9735 - DNA, 583 bp, Homo sapiens
  MAP TO AL021707.2; EXPRESSED IN LUNG, SIGNAL = 2.9; EXPRESSED IN FETAL LIVER, SIGNAL = 4.7; EXPRESSED IN ADULT LIVER, SIGNAL =   4; EXPRESSED IN PLACENTA, SIGNAL = 3.1; EXPRESSED IN HELA, SIGNAL = 2.6; EXPRESSED IN HEART, SIGNAL = 2.6
gctccctctcagaaaactggccccaaccctactcttcctccttggctctgcaacactctggtctaacagctctcctgggtccttgcttgttggccaggaacccattacttccatctgtgggccctctatgtccagagtctagtgtgataggcctcgttataatacagcaaaagacttagatcctgccctctagaagctcatacataacggaaggacagagaaaacgttgagtttggtgggaacatgaactcaaatgccctttcaccatactctccttccctctcctccggttcaggcctttgctccatcttctccacagacatgcatcttacatgccagacccgcagaacttcttcctgctccctgaccacacaatgctcttcctacctctatgcctttccagatgtggttccctctgttggactacgcccaggtgacatatctgtggaaaccttctcaaataattccaagccattagcaccatgcctcctctgcaaagcccaaggttctgcattcatctatcacaggactcacaatagtgaactggaatgatttgcttctactgctttctccactaggcaaa

SEQ ID NO: 9736 - DNA, 556 bp, Homo sapiens
  MAP TO AC005300.10; EXPRESSED IN FETAL LIVER, SIGNAL = 7.6; EXPRESSED IN ADULT LIVER, SIGNAL = 7.8; EXPRESSED IN PLACENTA, SIGNAL = 5.1; EXPRESSED IN BRAIN, SIGNAL = 8.3; EXPRESSED IN HELA, SIGNAL = 6.9; EXPRESSED IN HEART, SIGNAL = 5.6; EXPRESSED IN LUNG, SIGNAL = 8.4; EXPRESSED IN BONE MARROW, SIGNAL =  12
aggtggctgaggaggacagcactccttcaggtgcacacatcatacccaggaaagccaaggtgtgacgccagagccacacctgctattcctgctatgcaagttctagacatgtgtgtgacctttgctttccagggactcacacccccaatgcccagaagaaaagaaacagatacaaggacataatctacaactgccaaatacacaggcaggatttctgtgttcagctgtggccatgacctaggactaggtgattccatatcccaacccaggggaaagggacttggagctggggcagcggctccattaggaaccaggtccttgggcttccatgcctctggctgccttctcacctcgcaccccagcagggctgacagctcctgggctttgctgtgttgtaagatgttcccagcatttgtaacaaaaaccacgggcacccgcagctgcccctgggagttcaccagccttcggaaggctttcagagcagcagggatcactctgtggccccgcacaagcactccatcgatgtccaacaggaacccaaaggtgggtgggctct

SEQ ID NO: 9737 - DNA, 577 bp, Homo sapiens
  MAP TO AL022318.2; EXPRESSED IN HEART, SIGNAL =   2; EXPRESSED IN LUNG, SIGNAL = 2.5; EXPRESSED IN BONE MARROW, SIGNAL = 1.9; EXPRESSED IN ADULT LIVER, SIGNAL = 2.2; EXPRESSED IN FETAL LIVER, SIGNAL = 3.4; EXPRESSED IN BRAIN, SIGNAL = 2.7; EXPRESSED IN PLACENTA, SIGNAL = 1.9; EXPRESSED IN HELA, SIGNAL = 2.2
tttggaggatgtcaggatgtctttcaaaggatttgtagacatgctttaaagtacttacggagtcaatgtcccctttgcttcaagcttctctcctactgtaggaaataatgtctacggtggcccatttccaaggcaaagtgcctcaaataggcttgggcccacaacctgcggatggacaggatatactagacccctgctggtcagggcccccttagttacccccacccaaagcaaagcgtttagtctagaatgaaagtttactagcctgaaaaatagctcactttatctattcttatcagcttgcctggccacctgggtcataagtcaaatacttgaagagcaccttagctgactatgattgcagtgcattatgggccacaacaaactgcagcgagacaaccctaaagtaaacacctaaaagccccaacccaacgaccaataggtgatgtctgggaagatggtgaccccatggtactcagcctatgaggaaccgggggagggacttgcctactaggggatacattgcttgttgtaactgtactgggtgtgcctgcctaccagacaccagatcttgcaa

SEQ ID NO: 9738 - DNA, 583 bp, Homo sapiens
  MAP TO AC007281.3; EXPRESSED IN PLACENTA, SIGNAL =  21; EXPRESSED IN HEART, SIGNAL = 7.9; EXPRESSED IN FETAL LIVER, SIGNAL =  23; EXPRESSED IN BRAIN, SIGNAL = 1.9; EXPRESSED IN HELA, SIGNAL = 9.4; EXPRESSED IN BONE MARROW, SIGNAL = 1.9; EXPRESSED IN LUNG, SIGNAL =  14; EXPRESSED IN ADULT LIVER, SIGNAL =  20
catgaatgcaaaccccaaggcacttgtattaccagaacagaccctcttgcctgaagcagtatgcaaggtttgcagagtctgcagggaagcagtgaggatcaggacagcagaaggggaaagcagaagtggtttccaagccaaaggaccaggagctgctttcacactaaaatttacttctttttattttcctggttgcttcaggacaatacccatcaaagtctcataacgtgcgtgttcttcctctttccagaatccctgcaggagccctgatcagagctggggtttggtgaggcagggtgttgtgagtgacaagcagcagagcaaagggaaaaatgccttcagttcccacgcttcctctctgccctctaggaccaggatgtctcttcattatcactgcttgcagagccccatgccagtttcccatccctgagtccctatccctcatcctcccctgttcctcactccagccttcatggccctgtcctcccagtatggtaagcttgagctaagatgcccccttgtccctgcatgcacacacacacacacacacacacacacacacacacacatcattcctctgcca

SEQ ID NO: 9739 - DNA, 566 bp, Homo sapiens
  MAP TO AL031587.3; EXPRESSED IN BONE MARROW, SIGNAL = 1.6; EXPRESSED IN HEART, SIGNAL = 2.4; EXPRESSED IN LUNG, SIGNAL =   2; EXPRESSED IN HELA, SIGNAL = 1.5; EXPRESSED IN BRAIN, SIGNAL = 1.4
caaggcagcctctctaggtctgggtgcctaaagcctgcaaaactggtgtgctggggaagaaaggctcctctgggggttttggaaatgatgacgtgcccttcctagtcctgggtctgtgcgtctgagcctcgggtggaatagggggctcacactaggacagaaaaccctgaactgcccccagagtgatcatgctcaatgtcagcttggctcttgggggtctgtctcccagctgggcctggtccagatgcgggggcaggagctgaaaaagaacctcagtaggggaaggtgggccctggtaccacctggttctgccaagggctcccaagttgttcgccatctctgggcctgtgggtgtctccctcttcaggtaatgggctgtagggtccttccagatctggcagtctgggctgtatctagggctatgtccaggttgtagggaagagctcagagcacctgaatgggtcatgcagtcccgtcagcatctcagggctggaggggccctctgaggctgtggcctctccctgcaacttcctgtaggtctctctgtagcaccagccaagaagtca

SEQ ID NO: 9740 - DNA, 558 bp, Homo sapiens
  MAP TO AC007092.4; EXPRESSED IN LUNG, SIGNAL = 7.2; EXPRESSED IN ADULT LIVER, SIGNAL = 7.8; EXPRESSED IN PLACENTA, SIGNAL =  12; EXPRESSED IN HEART, SIGNAL = 4.7; EXPRESSED IN BONE MARROW, SIGNAL = 2.1; EXPRESSED IN FETAL LIVER, SIGNAL =  18; EXPRESSED IN BRAIN, SIGNAL = 2.5; EXPRESSED IN HELA, SIGNAL = 7.2
agcgagacactgactcatgccttcagatactgccttttaaccaatcaatatttttagggttatggttttcagaaggcaggtgatagttttggagatgataacatcccaagctgctgctgacattgagatgcatatttaacatgttcctgggatgacagaatacagcagtgttggaatctccccctagaaatacacatgcacacacacatacacacacacacacacacacacacacacacagccactaacctttaaattcttgaagccccagtacagatttagcaaattgcctcttattaatgtcaatgaacatttgaaaatgtaagaagaattgggactgaatacttttcccttggatggtcctgtcttttcagcgtcgagaaactcctgagaaggaaagggaagaagcagctctccactcaaagatcaatactggggacaggagaaggggacagtgagtatagctaaagcaatgacctttatcagcacatgtcactacctacacagagcggcagttcacatgagaacaggggaaggtgggaaaacaacgggaagata

SEQ ID NO: 9741 - DNA, 585 bp, Homo sapiens
  MAP TO AC007282.2; EXPRESSED IN ADULT LIVER, SIGNAL = 1.9; EXPRESSED IN BRAIN, SIGNAL = 1.7; EXPRESSED IN PLACENTA, SIGNAL = 2.4; EXPRESSED IN BONE MARROW, SIGNAL = 1.5; EXPRESSED IN HEART, SIGNAL = 1.3; EXPRESSED IN LUNG, SIGNAL = 1.3; EXPRESSED IN FETAL LIVER, SIGNAL = 1.5; EXPRESSED IN HELA, SIGNAL =   2
aacttttagtggttgctgtagggattataatatggatctttcacatatcacaatgtatcttgaattaaaattaaaccaccatgtccaatagcataattctatttacacctcctcattctctgtgctattctggccatgtattgcacttctacatatgctacaattcctatcattcattgacattattgtgtttttaaataataaaactcaattgtcttttggataaatttttttaatagtcttgtatttttacccactcatttaccatttctagtgctcttccttcctgtatatctgggcttctatctgggatcatttgtcttcaacctgaagctttctttgatatttattacaatgcaggtcttctagatacaaattctctcagcttttgtctttcaccatctttttgaagtatattctcactgaatatagaaatctaggctgaatttccccgcctcccagcattctaaagctggcattctcttgtcctccgatttacattgtttctgatggagagtcagctgatattcttattgttgtgcatctgaatgtaatgtgtttttccctcctctggctgcctttaag

SEQ ID NO: 9742 - DNA, 560 bp, Homo sapiens
  MAP TO AL031587.3; EXPRESSED IN ADULT LIVER, SIGNAL = 1.7; EXPRESSED IN PLACENTA, SIGNAL = 1.8; EXPRESSED IN BRAIN, SIGNAL = 2.5; EXPRESSED IN HELA, SIGNAL = 2.3; EXPRESSED IN BONE MARROW, SIGNAL = 2.7; EXPRESSED IN LUNG, SIGNAL = 2.5; EXPRESSED IN HEART, SIGNAL = 1.8; EXPRESSED IN FETAL LIVER, SIGNAL = 2.4
cagcagctgatgttgcgtagcaggccctgggcgaagcgcttcatgtttaactgcccaggctgccagcacctctgtgaagcagagggaatagggcaggggcctaggacctccccactggacattccccacttcacagccacccccagcagcccttctgccccctgtggggtgctccctgtgcatggaggtaaggctgggggcagggatggcctctgggcagccacagactcaccaggtcctttgtcccccgctcagtgttgaagaaagtcaagcaccggctggtggagaacatgagttcagggaccgcagatgctctgggcctgagccgggccatcctgtgcaatggtgagtcccttcccacccagctggggccccggggactcaagcccaggctgagaagagtggggggcaccatggctgcccaccaagctgctgtgggtcccgcgggtctgaccctggcctctgcccgtggaactgagaagtcaccatctctgtacccccagaggcctctccagctcccggagggtccacagctgtcagctgggctgtcttagccagtg

SEQ ID NO: 9743 - DNA, 573 bp, Homo sapiens
  MAP TO AL031588.1; EXPRESSED IN HEART, SIGNAL =   2; EXPRESSED IN BONE MARROW, SIGNAL =   2; EXPRESSED IN LUNG, SIGNAL = 2.4; EXPRESSED IN FETAL LIVER, SIGNAL = 1.8; EXPRESSED IN ADULT LIVER, SIGNAL = 1.5; EXPRESSED IN PLACENTA, SIGNAL = 1.7; EXPRESSED IN HELA, SIGNAL = 1.7; EXPRESSED IN BRAIN, SIGNAL = 1.3
agagatgtcatcccagtcgctttgggcatggtggatctgtgggtggggggtgaggttgggagccggtagaggggagactgaggccatgtaacgtggaaggggaagctcccagagctggacccagccaggcctcctgggcaaccatctccatgctgcctgcaggcctcttctcattccagaaagcacagttacataaaccttccagctgccctcttattttccccacagactcgaccttccgtgccccagaggctggtgggggaaccccgtctgtggaccctgccactgtgccgtcagcaaaggctttgatcccgactgtaataagaccaacggccagtgccaatgcaaggtgaggccccgcccccatgatccctgcatgctgtgtttgctcacacacatgcacagctgcccctaaatacacacacgccttcacataccctgtcggtacacactcacacccctgcacacacacctgtgcccactcacatcacatttgtgtacagatgtggtttttggtttccttgctgctcccccgtgctctgtgaatactccatggctgctttccacgtgtaa

SEQ ID NO: 9744 - DNA, 565 bp, Homo sapiens
  MAP TO AB016897.1; EXPRESSED IN PLACENTA, SIGNAL = 1.8; EXPRESSED IN HELA, SIGNAL = 1.4; EXPRESSED IN HEART, SIGNAL = 2.2; EXPRESSED IN LUNG, SIGNAL = 1.7; EXPRESSED IN BONE MARROW, SIGNAL = 2.9; EXPRESSED IN FETAL LIVER, SIGNAL = 1.6; EXPRESSED IN BRAIN, SIGNAL = 2.1
gagggcccttcttcctcaccgatggtgccatctctggcactgtcctctcctggcaggacagcggggagcacagaaggcctgcgccggttccctccagtccgtccacgaggcacaggtccgtccccaaaggccccgcttctcaacgccaccacatcgagggttaagcttccgcgtgaattttggaggtggctcattcaaaccacagcagccaccatcaccacaagccaggtgcccggtgtctccatcacctcgaaggccccacaagccaggtgcccggcatctccatcaccccgaagggcccccgccggcgtgtttccaccccttcccacaccccgttgttccaggaagccgctcttctggtaactcgagtgatctgtcattctgggatcagccccagaacacttgaacgatgctacgcatatgatctgtctgcctcaccaaagaaaaatgtctctggaagatgactgcgctcagtttttcttgcaggtttgttctcagaatttaaaaggaagggagcacaaagggagaacgcccttggcacacacggactcgggtggttcttttc

SEQ ID NO: 9745 - DNA, 570 bp, Homo sapiens
  MAP TO AC004624.6; EXPRESSED IN ADULT LIVER, SIGNAL = 2.9; EXPRESSED IN PLACENTA, SIGNAL = 2.9; EXPRESSED IN BRAIN, SIGNAL = 3.7; EXPRESSED IN HELA, SIGNAL = 3.4; EXPRESSED IN BONE MARROW, SIGNAL = 4.8; EXPRESSED IN LUNG, SIGNAL = 3.9; EXPRESSED IN HEART, SIGNAL = 2.4; EXPRESSED IN FETAL LIVER, SIGNAL = 4.4
ccagcgtttctctcaagctctgacaatgaacacaaaatcccaaagccgaaggcaaaaccacttgccactaaatgagggctctgattgctaccaatttcttaaagcactctctgaaggttctgcttcaaatatttatggagtctatgaaatggctccggagaatgagtggccctattacatttctaactccagcggtgatttatggacctgggaattgctgcaaatgctttgtctaagctcttggtgaaaagccaggatccttgctgggctcaggagctcagagggtgctgggacgttatcgacttggagggcaggacagggcattccgcctttttcttgcagacgttgtgcggggagacctggttccacagtgaccgctgccaggcacgttccaggatcaagcgtggacaccaaggacagagggagctgcaggcaagaggacaatgaaatggtctctgcgtccacatgtttgtaaaagcccctccattcacacatttaatcaaaggaagagatgacagtgatagctaacggtttcggggcactttctgtgcctggcaccaaatactcctc

SEQ ID NO: 9746 - DNA, 575 bp, Homo sapiens
  MAP TO AC006427.13; EXPRESSED IN LUNG, SIGNAL =   5; EXPRESSED IN FETAL LIVER, SIGNAL = 4.6; EXPRESSED IN ADULT LIVER, SIGNAL =   8; EXPRESSED IN PLACENTA, SIGNAL = 5.8; EXPRESSED IN BRAIN, SIGNAL = 4.2; EXPRESSED IN HELA, SIGNAL = 4.5; EXPRESSED IN HEART, SIGNAL = 2.9; EXPRESSED IN BONE MARROW, SIGNAL =   4
tttaacagcacccaagactccttttgaatgctttgctgcttagaaatttcttctgcaagataccctaaatcatctctctcaagtttaaagtaccacaaatctctagggcaggggcaaaatgccaatagtttctttgctaaaagataacaagagttttgctctttgtaacaaagttgtttgctccagtttccaacaatatctccatctgagatcacctcagcttggaccttatagttcatatcaatcatctccatctgagatcacctcagcttgatccttatagttcatatcactatcagcattttgatcaaagccattcaacacatctctaggaagttccaaactttcccacattttcctgtcttcttctgagccctccaaactgttccaacttctgcctgttatgcagttccaaagtcgcttccacatttttgggaatcttttcagcagcaccccactctactcataccattttagcgtattagtccgttttcacactgtggataaagacacacccaagactgggcaatttacaaaagaaagaggtttattggacttacagttccaagtggctg

SEQ ID NO: 9747 - DNA, 567 bp, Homo sapiens
  MAP TO AL031588.1; EXPRESSED IN LUNG, SIGNAL = 3.8; EXPRESSED IN FETAL LIVER, SIGNAL =   4; EXPRESSED IN ADULT LIVER, SIGNAL = 3.5; EXPRESSED IN PLACENTA, SIGNAL = 1.6; EXPRESSED IN BRAIN, SIGNAL = 3.6; EXPRESSED IN HELA, SIGNAL = 2.4; EXPRESSED IN HEART, SIGNAL = 3.2; EXPRESSED IN BONE MARROW, SIGNAL = 4.1
gcctaggctagaaggaagggtgccccaggtcaggggacacccagtggggagatgggaggaggggtcaggatggacagtgggccccatggcagcccccaccctgacgcaccagcaagaactcagggcatctgggcaaggccctctgcgcaccacctggctgcctctggaaccttcccacccagagaaggggaatgcacctctggtccccgcaggaacctgtcttgaggcaccaacaacacgctacgaaggactcaagcccagcaagaggaagagagccaaggacacaggtcagcatcgcaggcacctactctggagtccaggagcagggatacgggggcagaggatggagcagctgggacctcagggagaggtacgcaggttgccatggctgcgtctgcagtccacctgcctttccacgccagggagtcagtgatgtggagccccctgggccccagtggaagcagcgatcagactatgtgtccttgaaataatgtttattccacgctgtcccgacagccccctctgcaggtcccctcggtgtactctgaggtgggaaaccctccctgg

SEQ ID NO: 9748 - DNA, 550 bp, Homo sapiens
  MAP TO AL031588.1; EXPRESSED IN FETAL LIVER, SIGNAL = 1.4; EXPRESSED IN BRAIN, SIGNAL = 1.8; EXPRESSED IN HELA, SIGNAL = 1.7; EXPRESSED IN BONE MARROW, SIGNAL = 1.9; EXPRESSED IN HEART, SIGNAL = 1.5
ttcctctatgctcatgtctattgcattttctctttgcaatgaaaaaaaaaacaaacaaactttccaaatactatttacttcactaaaacctggagcaaggcaagaaaaaggtatgtcactgtctgggacagcaagcctaggaatttgagaccaatttattaccaccttcgtgtcttacctcattgcagagttcttgcggggctcagaggaacgtctccgagctggcacacacaggggagagcccacggccctgggcatcgttttgggggtcatcggtggaaggccagagcagcgccggctggcgggtgtgggcaaggctgacacacgccatgcgctcagcaggctttgtggtgctggcccagatgagcgtctaaccggggtgctgtggacagtgaccctggcaaacacaacatcagtgtcgtgagctgagatgacatagaaaaagtaagatctcatcattcagcctgtgctaatgcagtgctgagggctttggtttcagcccagaagagccaagccagggagcccgtgtgagctccgctctcctgggaca

SEQ ID NO: 9749 - DNA, 575 bp, Homo sapiens
  MAP TO Z83844.5; EXPRESSED IN PLACENTA, SIGNAL = 2.7; EXPRESSED IN HELA, SIGNAL = 4.1; EXPRESSED IN HEART, SIGNAL = 3.5; EXPRESSED IN BONE MARROW, SIGNAL = 5.8; EXPRESSED IN LUNG, SIGNAL =   4; EXPRESSED IN FETAL LIVER, SIGNAL = 4.4; EXPRESSED IN ADULT LIVER, SIGNAL = 6.4; EXPRESSED IN BRAIN, SIGNAL = 5.7
ttaaaaggcactgctttggcttctcagcttactggtggcaaaactgaggcccacagaagggtgtgacctttgagctataggcagacctgtgtctggagttcaggcggtctggtccccaggtgccccattgggtgcaccaaagtctgtcagtgtttggtcccgttagggtgggatgggcacggggagcaggtgggaggggagaagggaataactggggagcagagctgaagaccaggcaggtggaggagtgaccccagatgcggaaggcagcagagaagaagagctgagtcatctgtatcgccctcaggcacgggaggaggcggatggaaattcggtggacctggaggagtgacagctgggagggattccccagctggtatctcgggctgagtgggtgcccttccttcaggggttgggggcttgctgctgcacgacagctgtcgggtggtctggggcttcacccactggacatctggtaaagagaacctttccccactattgcagtggggacagaggcatttctttatctactttgatgtccatgtcaaaggtggcagccaggatcaggacacctt

SEQ ID NO: 9750 - DNA, 548 bp, Homo sapiens
  MAP TO AC005006.2; EXPRESSED IN FETAL LIVER, SIGNAL = 4.2; EXPRESSED IN ADULT LIVER, SIGNAL = 3.6; EXPRESSED IN HELA, SIGNAL =   4; EXPRESSED IN PLACENTA, SIGNAL = 4.2; EXPRESSED IN BRAIN, SIGNAL = 4.8; EXPRESSED IN BONE MARROW, SIGNAL = 3.7; EXPRESSED IN LUNG, SIGNAL = 5.1; EXPRESSED IN HEART, SIGNAL = 2.6
atgggtctcctgcttcctctaagcacagtgcctgacacacagtgagacctcagcacgtatgggctgaggcaatgaaggaatgaaggatcccatgacccaaaagagcgtgttggaaagtgcaggccagggtcccaggtgctggcggggctggctgctgggtgggggcagagaggcaacccctctgtttttttccctctcagggcatgatcacaagggccacccccacactagctactaccagtatggcctgggcattctggccctgtgtctccaccagaagcgggtccatgacagcgtggtggacaaacttctgtatgctgtggaacctttccaccagggccaccattctgtgggtgagtaggtcagaccgtgccaaggccaggctggcactccctcagtccccaggtctgcactgatgacctccataccctggcccccacactcacctttccttggggctcctccgaatcaagtcctttagggacgaattggcgagggctcatgggtgatgcttcagctgtgagccagctttggagctggtaggtgga

SEQ ID NO: 9751 - DNA, 596 bp, Homo sapiens
  MAP TO AL008723.8; EXPRESSED IN BONE MARROW, SIGNAL = 6.7; EXPRESSED IN HEART, SIGNAL = 3.7; EXPRESSED IN LUNG, SIGNAL = 3.7; EXPRESSED IN ADULT LIVER, SIGNAL =   3; EXPRESSED IN FETAL LIVER, SIGNAL = 2.9; EXPRESSED IN PLACENTA, SIGNAL = 3.2; EXPRESSED IN HELA, SIGNAL = 4.4; EXPRESSED IN BRAIN, SIGNAL = 3.4
tagggatgtggagatgcagggctgttgggccccagggcaagaggcaatcctcatggggtctgggctctcaaaatggcacgtgctggagcttcttggatctaaagtgtgtgtgtggtacccagcacgactccctctggaacaatgccattgcgtggacaagtacaggcagcatcctatgctgtctcagggcccacaagagctgaggggctctcccatggccagggttgcaggaatctgtggtgggaatgtggacccctgggaatctctcacttaccttttcccctgcactggggagctcatctggtcttgcttttctctccttccatatctcggatggttctgtcacttccccgctgaattccagcattctctgttagatgctctatttgacatgtgattatctgttttgctccttctttgtggaggagacgaatgttgggcacctctagtcagtcaccttgaagctcttctccaagtgtcatttttttttttgagttttaaagttggcctgttggtctttttattccggatacaactcctttgtcagacgtgtgcgtactctaagtattttcagttattttgtgggttgtttggtc

SEQ ID NO: 9752 - DNA, 573 bp, Homo sapiens
  MAP TO AB016897.1; EXPRESSED IN PLACENTA, SIGNAL = 7.1; EXPRESSED IN FETAL LIVER, SIGNAL = 5.2; EXPRESSED IN BRAIN, SIGNAL = 4.9; EXPRESSED IN HELA, SIGNAL = 6.7; EXPRESSED IN BONE MARROW, SIGNAL = 6.2; EXPRESSED IN HEART, SIGNAL =   3; EXPRESSED IN LUNG, SIGNAL = 7.1; EXPRESSED IN ADULT LIVER, SIGNAL = 9.6
acagtgcaagctgtttgtggatctaccattctggggtctggtggacaatggccctcttctcatagctccactagccagtgccccagtaaggactctgtgtgagggctccaaccccacatttcccttctgcactgccctggcagaggttctccatgagggccccacccctgcagcaaacttttgcctgggcatccaggtgtgtccacacatcttctgtaatctaggtggaggttcccaaacctcagttcttgacttctgtgcaccctcatgctcaacaccacgtggaagctaccaaggcttggggcttccaccctctgaagccacagcctgagctgtatgtcggcccctttcagtcatggctggagcatctggaacacagggcaccaagtccctaggctgcacacagcacagggaccctgggcctggcccacaaaaccacttttgcctcctgggcctctggacctgtgatgggaggggctgccatgaaggtctgtgacatggcctggagacattttccccgtggtcttggggattaacattaggctccttgctacttatgaaatttctgcagcc

SEQ ID NO: 9753 - DNA, 554 bp, Homo sapiens
  MAP TO AB016897.1; EXPRESSED IN FETAL LIVER, SIGNAL = 2.3; EXPRESSED IN PLACENTA, SIGNAL = 1.4; EXPRESSED IN LUNG, SIGNAL = 2.2; EXPRESSED IN BONE MARROW, SIGNAL =   2; EXPRESSED IN HEART, SIGNAL = 1.9; EXPRESSED IN ADULT LIVER, SIGNAL = 1.9; EXPRESSED IN BRAIN, SIGNAL = 2.4; EXPRESSED IN HELA, SIGNAL = 2.2
ctgagtggctgtggctagtgctctgggctgggcatggacagtagtcccagggaagcctccctgtcacgaattatggtggccaattaaccatgtcagccgtagtttcatcataaccagagtttcaaagagagaatgaatcataaaactttaaagcttagaaaagatctcagaaattaagacccgtatcttagagtggagcttctcaaatgtcatcgtgcatgcgatcccctgggcatctcgttagggagagttctgagtcggaggacaggggcagggcagggggcagggatcagcatctctaaccagctcctggggaggccgctgtggggccatgctgggatggcaaggcctcagaggacccagggcttccagtgtagactcagcttcaccccgcagaataagaggaaacatgttagaactcatttttctgtattttcaggtatagagacccttggggagggtccaaccctgctgcgtttagcgtagcttgtcatggagaggttccagtgtgtttacacctttgaaccatcacaacgcccagcatgaactcttca

SEQ ID NO: 9754 - DNA, 570 bp, Homo sapiens
  MAP TO Z98884.11; EXPRESSED IN LUNG, SIGNAL = 1.6; EXPRESSED IN FETAL LIVER, SIGNAL = 2.5; EXPRESSED IN ADULT LIVER, SIGNAL = 2.4; EXPRESSED IN PLACENTA, SIGNAL = 2.2; EXPRESSED IN HELA, SIGNAL = 1.6; EXPRESSED IN BRAIN, SIGNAL = 1.4; EXPRESSED IN HEART, SIGNAL = 1.3
tatgggaacagcatacgcactcatcccccttcagattgtatacatctttaacatatgctgttggctttgctacacgaactgcttaattcagagtcctctgtcactgctgaccagttttccatattgggctttactgtaaccttcttgtgacaataatattctgactttttcaggagcagtttgctaaccaaaaagcaggatcaagctgctcgaaaaataatgaggtttcttcgccgctgtcgccacaggtacactagtccttgtttatacattctgctcagggagaatgatgaagcaaccctgaccttcttaaccctcactaactcctatgtaaagctaatccccctgcagataatcagggcagacgtcccaaattacaatagggcggtagagctctttaactagggatcaggttgctacccttggagtgctggtaaccatgtcagacgatgctgtttgaacaatggagattcatgcccgtgtttttctgttttaatttgggtgtgaggtcaacttagtcggactagcttttaattctaagtttctctttaacctgtgattgatatgcca

SEQ ID NO: 9755 - DNA, 582 bp, Homo sapiens
  MAP TO AL035681.13; EXPRESSED IN PLACENTA, SIGNAL = 3.7; EXPRESSED IN HEART, SIGNAL = 1.6; EXPRESSED IN FETAL LIVER, SIGNAL =   3; EXPRESSED IN ADULT LIVER, SIGNAL = 2.3; EXPRESSED IN BRAIN, SIGNAL = 1.9; EXPRESSED IN HELA, SIGNAL =  13; EXPRESSED IN BONE MARROW, SIGNAL = 2.3; EXPRESSED IN LUNG, SIGNAL = 1.8
cccacagcaagatgcaaagccccacagcagttggcctgggactctggggctctttgacagagttaacactgttcttggcagtttcctcctcagcctgggagggtctccagagcagacgctgtatccatctgggcagtatcttctctgggcctggcctgtcataggtgcttcaggtttccccatttgaaccagataccagtcgggttaccggatgtttgcttaaaatgagtcataggcttcctgctattcctgtgctgcttccagctaggactgatcgaatcagtctggattttccttggggtgatccgcaggctcccttttccaattttacttcttgagactttccttggccctcacacagagacctcccaaagggaagaggaaggtgggcaggggaacatcttagctgatcccgtcctcatccagctgataggacattgggttttcggaactggaagggaattcttagacaacagaaattcagtggccttcaaggacctgggaggtaacaggaagtcatggggcttgtcggggcttggtggggcttggggggagttagagagtggatgttctgcctgaagg

SEQ ID NO: 9756 - DNA, 950 bp, Homo sapiens
  MAP TO AC002472.3; EXPRESSED IN LUNG, SIGNAL = 4.1; EXPRESSED IN HELA, SIGNAL = 4.1; EXPRESSED IN PLACENTA, SIGNAL = 3.9; EXPRESSED IN BONE MARROW, SIGNAL =   4; EXPRESSED IN HEART, SIGNAL = 2.7; EXPRESSED IN ADULT LIVER, SIGNAL = 1.8; EXPRESSED IN FETAL LIVER, SIGNAL = 2.9; EXPRESSED IN BRAIN, SIGNAL = 4.6
tttttagccagtacatcccatcaatagaaaagccccaaaaattgcaaattcagttgaaaccctgacttagctttcctagaatttaggaaacctatccactcaacgcttggcttgtttctcctgggtcaagtcacttccatggcagctccttaagtacatacactcctgctgcaccccaaccgcatgccagcagggcaggctgggaccccactgactgtccatgcaggctctggggtcccacctgctcctgtaggcagagccaagcagcatgacacacagaggtcttggttttatagagaaactttaattgcaaacaacctgaaagcagccatgctgggggcggcaggagagcccaccacaccctcccctcagtattctttgccttcttcagcctccgcttccacagaatccatgcccacctcttcataatccttctccagagctgccaggtccttgcgagcctcagaggactccccctcctccatgccttcccccatgtaccattgcacaaaggcctgcttggcatacatgagatcaaacttatggtccaggcaggcccaggccttggtgatggctgtgatgttgcttagcatccacatggcccattgcaacttggtcaggtttcccccagggaccaccgtcaggggctggtagttaatgcccacctgccagagaagggcaagaaagcggtccgtgaagcttgtatcaaacctagaaatggtggctacctttcctcaaacagaagaccccctgtaggtgacgaggagaatgctcagttcacccccacaaacctcactaagcccttctctgtgccaggcagggtgacggttccagccaaggaataaagagaaaagagccttggaggtggccaccctggcaggatcccaagctgcccgaagggctgtgtcctagcaactgtgacatgtgataggtgcccaggtaaagactgt

SEQ ID NO: 9757 - DNA, 554 bp, Homo sapiens
  MAP TO AL035682.16; EXPRESSED IN LUNG, SIGNAL = 1.5; EXPRESSED IN HEART, SIGNAL = 1.6; EXPRESSED IN BONE MARROW, SIGNAL = 1.5; EXPRESSED IN HELA, SIGNAL = 2.1; EXPRESSED IN BRAIN, SIGNAL = 1.4; EXPRESSED IN PLACENTA, SIGNAL = 1.3
aaatcaagacaatcgtcgccgccatggaatttacaggggcaagagacaggcagcaaacatgcacacggccatccaaacagcgtttttgacatgccaggctgagtgcatgtgtgggtggggcatggggtaggtcccacatgacagcggtcactgaagtcctctgaggacaagaatttgattggaaaattgaagaatgaggaagagccagtccacgaaactcgggggtcaaagcgtttcaagttttaggaggagacagagagagaggtggggaatggtgtggtctgggcaaggaacagaaaagagacctggaggctggagaacttggggccgaggaagatggctgagcctcttgcctgaaattcggatcatcctgaacgcaaagggaagccgtggagggctttaaacagggctgtgatgggatctgaggctgctttaacctcgatctggctgctgtgtggacggggaggtcgggagtacaccagcaaagggctgttgtgtcatccaggtaggagatgagggtgttctggtgagcatgaggcatagaggtgggatga

SEQ ID NO: 9758 - DNA, 582 bp, Homo sapiens
  MAP TO AC007462.2; EXPRESSED IN ADULT LIVER, SIGNAL =  74; EXPRESSED IN HELA, SIGNAL =  12; EXPRESSED IN PLACENTA, SIGNAL =  30; EXPRESSED IN BRAIN, SIGNAL =  28; EXPRESSED IN LUNG, SIGNAL =  11; EXPRESSED IN HEART, SIGNAL =  29; EXPRESSED IN BONE MARROW, SIGNAL =  17; EXPRESSED IN FETAL LIVER, SIGNAL =  47
tttaaagatcccaacccatcccatttgcagatgcataaagccctggggctggtttcttctcacccagcacactagctgaactctgacagccacaggccttggcttccatgcttggaacagccacaaggaggttgtgcacagggagaaatagctttcttcagcttttccacgccaagtgtgggctactggaaagttcaatcctatgcccagatgcctttcatgataagctgacagtttaccacgtcccagcaggatggtgattagatggcttgagctcttcaaggtggtgacatttgtgccttggagcagcaagtacctgcaggtgctcagagctgagttctcaaaggtcaggtgactgctcacaagacctcatcgtcatccagagatgagcctttggtgcaggtccctctttagggaatgccaggagtggtgatgcgttgtcttcttagaattcgagcttcttgttcaagagctgtctttgtcagccatctgagaaggcagatatctgacaatatctctctcattcaagtaagatttaaatcttcagggttttcctagctctcagacctccctccttttgct

SEQ ID NO: 9759 - DNA, 571 bp, Homo sapiens
  MAP TO AC008272.1; EXPRESSED IN ADULT LIVER, SIGNAL =   2; EXPRESSED IN HELA, SIGNAL = 1.7; EXPRESSED IN BRAIN, SIGNAL = 1.5; EXPRESSED IN PLACENTA, SIGNAL = 1.7; EXPRESSED IN BONE MARROW, SIGNAL = 1.3; EXPRESSED IN LUNG, SIGNAL = 1.3; EXPRESSED IN HEART, SIGNAL =   2
tgtcaagttagtggggaggcagatacaggtcgttgttccacataagaagaatctgccttgtctgggtagacagaacttaaccctggcttttaaaggaatagtgtacactgtttttttttctttactatttctttctctctctttctctcttcaactccttctttgtctcttcctctctttttaactctctctttgactttctgtgtctgtccctctttctctctgactccttctctttgtccctctgttccttcctctctctctctctttctctgactttctttttctctccttcttgctggtctttccctacctctgccagtcactcatgctgctgttctcccctcttcttcccattttgatggctttggcagtgtaagagtgccacctacttgtgtttttgcattgcatgcaataattctataatttccttgtggcatttaacaggggttcccccagaggttaggaactccctctctttccatattgcagcatgggcatgtaggattagataagcatatttgctatctgtatacacatttattctttttccctttcccagttctaaggc

SEQ ID NO: 9760 - DNA, 555 bp, Homo sapiens
  MAP TO AC004032.7; EXPRESSED IN PLACENTA, SIGNAL = 1.5; EXPRESSED IN HELA, SIGNAL = 1.8; EXPRESSED IN BRAIN, SIGNAL = 2.4; EXPRESSED IN BONE MARROW, SIGNAL = 1.3; EXPRESSED IN HEART, SIGNAL = 2.1; EXPRESSED IN LUNG, SIGNAL = 1.8; EXPRESSED IN FETAL LIVER, SIGNAL = 1.6
tgttttccaagattcaataagccttaattttaaagttctagagagcttagctctcataattcctgacactgtggtcctctgattccattcttctctgtttcagaggccctctgcagctcagatgccatataggggcactctaagattctaagaatgtggtgtaattatgttattttctgggaagccaggaccaaccaagactgcagaatcagatcctccatctagtgctgagcaaacaagaaggagaagaaggaggagggggaagagcaaaaggaaggaaagacagaggagaaggaggagaaaaggaagagaaggaggaggaagcagtgagataagagaaaagagagaggaaaaaaagacaaagagtgagagttggggagagaaatagaagtgaattgaagagaagggaatgaaagggaaggggagagagatgggaacaagggggaaagaagtaaagaaagagaggcagggagatctccagagaaaaagagagacgtgcctacatttacatgcgcacgctggtccctcatgagtatctcccctgtccttcacagg

SEQ ID NO: 9761 - DNA, 567 bp, Homo sapiens
  MAP TO AB016897.1; EXPRESSED IN BRAIN, SIGNAL = 5.9; EXPRESSED IN HELA, SIGNAL = 8.1; EXPRESSED IN PLACENTA, SIGNAL = 4.9; EXPRESSED IN BONE MARROW, SIGNAL = 9.6; EXPRESSED IN HEART, SIGNAL = 3.7; EXPRESSED IN LUNG, SIGNAL = 7.7; EXPRESSED IN ADULT LIVER, SIGNAL = 5.5; EXPRESSED IN FETAL LIVER, SIGNAL = 6.5
aatgggggagaggaaagaagaaaaacaatgggacaaagcacccagggccgccattcacgggtccatgtgttaaataggtggttatttgaatagttgctgctgaaagcttctgctaccttccccaggtcaggaatgaaacacacaggccctggtggtggctctggttttttctggaattgttctactggaaactgctctctgtgaattgacggctaatgagacaagcatccggagcgaatgaggggcagtgccctcctcccgcgtccccctcgtgggctcctcccaggccgaggaagctcgctgcccaggcttggacagacccccgaacaaagggagctgacagctccacaacactcagcccatggggactgcagcaggtgagtctccacccagcctccctcctttggaccaacacgaactccggagacgtctgggtgcagctgcctcaggccctgctgtcttcaacggggactgaggttgcagtttagctggctttcctgttcctgcttccccgggtccccctcaaagaagccgcctgcaccccgtgccacctcactctggcatagc

SEQ ID NO: 9762 - DNA, 568 bp, Homo sapiens
  MAP TO AC008283.3; EXPRESSED IN HEART, SIGNAL = 1.4
ccatggctccaataaccaagttcagggtagatgactgtcattagaagaatgtggattatacccacacaaaggtgccaaaaaatctaggaaagcaaatagctggccttttcagattttgagttatctgctcccgaataaaacttttaacctgggaaatacttgacatacaggaacaagattctatgttacccatggtggcacaaatgccttaatgaaaaatctgaaatcttttgtatcttagtatagtaaagtacttctaactcaaataacaggctaagttgcgcagggtgtggagagtggtagtgcatggatagattctgctccaggcagttatgcagtcttaaagctgggagatcttttgcctccttcagcacttggattccaagggcatccaggacattgggcttgcagctgctagatggagggaggaagtgtggagaaagcagtctcaagtcctaaaagtctcaggctggaagtgacacatattactttcactcattctctattggtatgaacttgtcatatggtcctacagagacaaaaaggtgggagaaatgtagtccctggc

SEQ ID NO: 9763 - DNA, 580 bp, Homo sapiens
  MAP TO AC006548.19; EXPRESSED IN LUNG, SIGNAL =   5; EXPRESSED IN HEART, SIGNAL = 2.1; EXPRESSED IN FETAL LIVER, SIGNAL = 6.2; EXPRESSED IN ADULT LIVER, SIGNAL = 5.3; EXPRESSED IN HELA, SIGNAL = 3.3; EXPRESSED IN PLACENTA, SIGNAL =  12; EXPRESSED IN BRAIN, SIGNAL = 3.4; EXPRESSED IN BONE MARROW, SIGNAL = 8.2
tgtcagcctgagggaacaggaagtagttgaccaggttcaagtcaaagctggagaccacacagcgccttcacagagagggtagtggtgtcctgtgggtccctggtcccaggccattctcccccttcttgttcaccttcttcattcacctctgtaccctcaacagcccagggatgcctggcaatgtgggtgctcagaggtcacagtagatgaatgatacttacagcacatgaaggccccagacttaatgcagtaggtggaatcactggagagagagatgtgggcagcagtacagaatggggctcgagggggccctgccatggccccacagtctctgtcatgaacctgtgctagcatggacaagggctcaatagcttcttccatgaagtaggctcttgtagtcagatgcaggtaggtcctggggcagggagggtgtcactgtggaggcctgaccagagcttcctttccacccactcctccccctgcacacacttggctgtgatccaggaaggcaaagagccactgcagcctggaaataaaaggctgtgagttgttctcaaatgaagccaagagtgtttgaagc

SEQ ID NO: 9764 - DNA, 566 bp, Homo sapiens
  MAP TO AP000041.1; EXPRESSED IN ADULT LIVER, SIGNAL = 2.1; EXPRESSED IN FETAL LIVER, SIGNAL = 2.9; EXPRESSED IN PLACENTA, SIGNAL = 2.3; EXPRESSED IN BRAIN, SIGNAL = 3.1; EXPRESSED IN HELA, SIGNAL = 2.4; EXPRESSED IN LUNG, SIGNAL = 2.6; EXPRESSED IN HEART, SIGNAL =   3; EXPRESSED IN BONE MARROW, SIGNAL = 2.4
tcaaggaatgtcttgctcccaccttaaagtcattcttcctggagccaacgaagtcacttaaagaccagtgggctcagctttccacacacacctgcctcttctttgggcaaagtgggaaccaattcttccctctgtatctgcagggaaagactctgcaaaggagagcgagctctgggcgcagagcgccaaagggcccaggaggagagcacgccttccgttcttgtcaggagggggccctgaccccagggtcttcccagcacaaccatccacacagtggaaacagatttcagggggtccagctctggccagtttttcagggctgaacgagccctgggcaaaggagaggaaggtctaaaagggattgaatggtgcagccctacactgttaaaggggattgggtggatcttgtttttatatgggaagacatctaagaggtgctgagaaatgaaataaagcaggttacaaagtttgtatacaaccaggctggaagggcattcatcaaaatcttgacagtggtttgctgggaggggcagaggtgttgaaatggtaatggtgacgtttgcttt

SEQ ID NO: 9765 - DNA, 546 bp, Homo sapiens
  MAP TO AP000041.1; EXPRESSED IN HEART, SIGNAL = 2.5; EXPRESSED IN LUNG, SIGNAL = 3.5; EXPRESSED IN BONE MARROW, SIGNAL = 4.5; EXPRESSED IN ADULT LIVER, SIGNAL = 2.8; EXPRESSED IN FETAL LIVER, SIGNAL = 2.2; EXPRESSED IN PLACENTA, SIGNAL = 1.8; EXPRESSED IN BRAIN, SIGNAL = 2.7; EXPRESSED IN HELA, SIGNAL = 2.5
gaggtggtggtgaagaggaggcagtcctacactttaagtgagaaaagtacaaaaaaaaacggtctctaaaacacagctgccaatgtcagtggggttccttcattcttgaaattcacctgatgacgatgaacaggttcaatatgaagttcatttttcaattcattctatctcatctgagtacctactctgggaccatggactgtatagaaattaggacttgaaattgtcctttgccacctccttccttctccttatggagtacagaacaatggctctgggcagggccagcttcaggtgtgcatgacccattgggacagtggcgtagaaccccgtgcttggaagagccttgaacgtggtcaatgctctgctgtcagcccttcctgacttttaaataagggggccccatatttacatttcatactaaggctcaaaaatcatgtagctggttttgctcttggtaatgaaagactccttgaggtggttcccacagttttccatatcccagccagggctctcttcacactgtccccacttccatggctggag

SEQ ID NO: 9766 - DNA, 599 bp, Homo sapiens
  MAP TO AC007556.2; EXPRESSED IN FETAL LIVER, SIGNAL = 4.7; EXPRESSED IN ADULT LIVER, SIGNAL =   6; EXPRESSED IN HELA, SIGNAL = 4.5; EXPRESSED IN PLACENTA, SIGNAL = 6.2; EXPRESSED IN BRAIN, SIGNAL =   8; EXPRESSED IN BONE MARROW, SIGNAL = 5.6; EXPRESSED IN LUNG, SIGNAL = 5.1; EXPRESSED IN HEART, SIGNAL = 3.5
tgatcctcaatgggtaggatgatatcaagctgtctgatctctttctttctgctggtcagtacatttctactttctcttccactaaagacataagcatctccttctgagatgtttcaaatcaagcttttggaggaaggtatttactgaagaatatcttttatgtgttgaatttatttacatccaacttttttttccaaaagaagttgaggtgacttatgataaaggaaaaatgtaataagataaatagaatagaaatagaaaaccaggaccagagaagtagagggaggaagggtgctaacccagagacactgcttcttaagctctttccccaaaatggccttcataggagaggagagagaacttgtgtttgcattattacccttcctagaatagttgactattttaggagggctaacagttaattaacaggacaggttttagtttctctctcccagtcgaaggtattgactacaaggcattggatagggaggttgaggaaaggaagccaagaggctgagatcatatcaaattagatggtcagaacacactcaatgtgtgttctgaaaacaagcttaatgaagccctgcccagagtgtata

SEQ ID NO: 9767 - DNA, 569 bp, Homo sapiens
  MAP TO AB016897.1; EXPRESSED IN FETAL LIVER, SIGNAL =   3; EXPRESSED IN HELA, SIGNAL = 1.9; EXPRESSED IN PLACENTA, SIGNAL = 1.9; EXPRESSED IN BRAIN, SIGNAL = 2.4; EXPRESSED IN BONE MARROW, SIGNAL = 2.5; EXPRESSED IN LUNG, SIGNAL = 2.1; EXPRESSED IN HEART, SIGNAL = 2.3; EXPRESSED IN ADULT LIVER, SIGNAL = 3.4
tttggttggcaatattggagactaaactgcttcttataatttatctttctaaataatggaagttgactcctttaaaacttttaaaccattttagatggcctgtaatatatgaaacctttttttacattcttcaacaaatagcaatataatgtgtgtgtgcgattcagtgtgagtgttaagaaagtaaattttggagcaattatatcattgggtccattgaattctagaaggatttttgaacccacattaaatgttctcaggctttaattactttaactttcatatttcttcttatagtttttcttcttctcctcctccttcttcctcttcttcttcacacttcctgctgtattttccgacaaatcttaggataagaaatgggttggctaagtaattagaaaaagttaaaaaaaaatacctttcagaacagagaaaacaataaagaggtgagagaaaatatcaaaagagcgatgacttgttgctgatgttatagaccctccaggctcagagtttttctgaccccaaacgcttgtccttgtccctgtcctgccctttccctctcctctgac

SEQ ID NO: 9768 - DNA, 568 bp, Homo sapiens
  MAP TO AC008166.1; EXPRESSED IN LUNG, SIGNAL = 1.4; EXPRESSED IN FETAL LIVER, SIGNAL = 1.7; EXPRESSED IN ADULT LIVER, SIGNAL = 2.1; EXPRESSED IN BRAIN, SIGNAL = 1.4; EXPRESSED IN PLACENTA, SIGNAL = 1.5; EXPRESSED IN HELA, SIGNAL =  19; EXPRESSED IN HEART, SIGNAL = 1.3
ttggcctgagtattttgcagcatctttgcaagtaacgtatttttctttgccagggaagaaaatagttcgcctttttcagcatatgcatgcacaataaattcctgctatgtgataggtactcagaaccacacattgctagaattgatataatctgagttagctcaagttctgagattctgaaatatggtgattatgaatataaaagattatataacaaatgcaaacttacccttctaatcttacatctggcagacttctattaagggcaatcaaatcactggccataaggttaaactgattgattttaaacagctctttcattttctcctggtcatctttaggaatcaacacagcttttcccatttctcctggcccttcttggtttcttgaaataacagctgtaagacatacagagatacagacatacatacaaacacacagataatgaactgaataaataaacttgtgtgtctgattagattctgaagcatattatttacatacaggttttataatataatgatcaagattttactgattataaaccacacactctgctaaagaaaaa

SEQ ID NO: 9769 - DNA, 575 bp, Homo sapiens
  MAP TO AC007462.2; EXPRESSED IN HEART, SIGNAL = 6.6; EXPRESSED IN ADULT LIVER, SIGNAL =  16; EXPRESSED IN HELA, SIGNAL = 7.5; EXPRESSED IN PLACENTA, SIGNAL =  17; EXPRESSED IN BONE MARROW, SIGNAL =   3; EXPRESSED IN LUNG, SIGNAL = 8.4; EXPRESSED IN FETAL LIVER, SIGNAL =  17; EXPRESSED IN BRAIN, SIGNAL = 2.7
atgacctggctggttgtttgggcacagtatgtgcatgcccttcaggacatggggttttgtggttgccttcaggctcaagattctggaagactccttgcgtgagctccagacctctgctgaccccttagtcctcctgttttctctgggtccacctgaaaatacaaaggacttctctgcaacccgccagagtctttggggcttctctaatataactcccttctgcaattaccacatctactcctaggccttgactgatagagtaccctgccaaaaatcgagattactctgagaggctttcagagttccccatgaatgtggaaccaacaccagtattttctgactctggttttatctggatgttcttaggttcagctctgttggggaggaaggccaccccagctgcctctttttgtttttccctttttctaagcttttcccccaagcatctgaatggttttcttttctctgtgttgcaggaacttcccttgaggcattttagttatttgcttttctgcaatatactctatggttcctaggcacctcccatctaatgttgaaatgtggaaacattgaca

SEQ ID NO: 9770 - DNA, 949 bp, Homo sapiens
  MAP TO AC007539.8; EXPRESSED IN ADULT LIVER, SIGNAL = 3.2; EXPRESSED IN FETAL LIVER, SIGNAL = 3.6; EXPRESSED IN PLACENTA, SIGNAL = 1.8; EXPRESSED IN LUNG, SIGNAL = 3.3; EXPRESSED IN BONE MARROW, SIGNAL = 1.6; EXPRESSED IN HEART, SIGNAL = 4.5; EXPRESSED IN BRAIN, SIGNAL =   3; EXPRESSED IN HELA, SIGNAL = 3.5
ggcatgtagtaacgcttccggaaagagagcgtggcactgtgtgatctggagagtgtggcacactgtgatccggagagtgtggtacagtgtgatcttgaggttgtgatacagtgttatctggagagtgcggtacgacgtaatctggagaaggtggcacactgtgatctggagagtttggtatgctgtgaattggagagtgtggtacatcatgatcttgagggtgtggtacagtgtggtctggagagtgtgacacactgtgatccagaaggtgtggtacggtgtgatcttgaggttgtgatacagtgttatctggagagtgcggtacgacgtaatctggagaaggtggcacactgtgatctggagagtttggtatggtgtgaattggagagtgtggtacattgtgatcttgagggtgtggtacagtgtgatctgcagagtgtggcacactgtgatccagaaggtgtggtacggtgtgagcttgaggttgtgatacagtgttatctggagagtgtggtacgatgtaatctggagagggtggtacactgtgatctggagagtttggtatggtgtgaattggagagtgtggtacattgtgatcttgagggtgtggtacagtgtgatctggagagtgcagtatggtgcaatctggagaggttggtacactgtggtctggagagtgtggtacagtgtgatcttgagggtgtggtacagtgtgatctggagagtgcggtacggtgtaatctggagaaggtggtacactgtgatctggagagtgctatggcgtgaattggagagtgtggtactatgtggtctggaggatgcggtactgtgtgatctggagagtgtgttatggtgtgatctggagagtgtggcactgtgtgatctggagagtttggtatggtgtgaattggagattgtggtactgtgtggtctggaggatgtggtactg

SEQ ID NO: 9771 - DNA, 585 bp, Homo sapiens
  MAP TO AB016897.1; EXPRESSED IN ADULT LIVER, SIGNAL =  25; EXPRESSED IN PLACENTA, SIGNAL =  33; EXPRESSED IN HEART, SIGNAL = 7.2; EXPRESSED IN FETAL LIVER, SIGNAL =  22; EXPRESSED IN BRAIN, SIGNAL =   4; EXPRESSED IN HELA, SIGNAL = 8.5; EXPRESSED IN BONE MARROW, SIGNAL = 4.7; EXPRESSED IN LUNG, SIGNAL =  12
agtgcaaagcaattctccaacacagtaaaaggtaagtgacccatgtttacggtataatccccttctaataccttccatacacacacacacacacacacacacacacacacacacacacaaccatttcatttctttgcattcagtgtgtattagtccattccattcttgcattgctataaagaaatacctgagactaggtaatttataaagaaaagaggtttaattggctcatggttctgcaggctgtacaggaagcatggctggggaggcctcaggaaacttacaatcatggcagaaggcaaaggggaagcagacatgtcttacctggctggaacaggaggaagctggggaagggaggtaccacacacttttaaacaacaagatttagtgagaactccatcaccagaatagcaccaaaggaggaaatccgcccccatgatccaatccaatcacctcctcctaggccccatctccaacattggagattacaatctgacatgagattcagctttggcatacagatctaaaccatatcacagtgtaaatatgttgtttgtgtatttcagatttagctttttccttcca

SEQ ID NO: 9772 - DNA, 587 bp, Homo sapiens
  MAP TO AB016897.1; EXPRESSED IN LUNG, SIGNAL = 3.7; EXPRESSED IN BONE MARROW, SIGNAL = 6.4; EXPRESSED IN HEART, SIGNAL = 1.8; EXPRESSED IN ADULT LIVER, SIGNAL = 3.2; EXPRESSED IN FETAL LIVER, SIGNAL = 3.4; EXPRESSED IN BRAIN, SIGNAL = 4.3; EXPRESSED IN PLACENTA, SIGNAL = 2.6; EXPRESSED IN HELA, SIGNAL = 2.6
cgtcaactgaatctgcgttaagacattcaataattgtattattgttttgccagtttagttatttgattgatgcaaacctgtcatctgtacaataaaaaaatagtgaggtatgtctatactctgtcagtttgtttaattttaaagatgaaagttaaattttagaacgcttttcatttgcttttttaccgtaagtgggagcagcttttaacttcacgaaaaccactctcctcaaagtcattaaagactttcatgctgacacatccagtcgtttatcttctgatgcagcagcagttgatcacatcttccatcaaattcttccttcacttggtcttcaggactggcctgttgcccagacctcagggtctgatcccaatacacactcttttctccacttattccctaggtgaaatatttcatttttgtggttttaagtgctaatatattccaaatttacatctctaagtttggcccttgttctgaacttcagccccatatagccagtccctcatatctctatttaggtgcactctaggcatctcaaagtgagcctgtccaaaactaaactctgatttcccaccactgcactc

SEQ ID NO: 9773 - DNA, 958 bp, Homo sapiens
  MAP TO AL008723.8; EXPRESSED IN LUNG, SIGNAL = 1.6; EXPRESSED IN BONE MARROW, SIGNAL = 2.5; EXPRESSED IN ADULT LIVER, SIGNAL = 1.9; EXPRESSED IN HELA, SIGNAL = 2.4; EXPRESSED IN PLACENTA, SIGNAL = 1.8; EXPRESSED IN HEART, SIGNAL = 1.5; EXPRESSED IN FETAL LIVER, SIGNAL = 1.7; EXPRESSED IN BRAIN, SIGNAL = 2.1
cagcttccgtgagaagaagccgaagccatccaagaagaaagcaggtggccgcacagaggagagggtcgggcccggggccgcgtggcgtgtttccactacttcgaggacatttatggctactcaggagtgttcatctgcggcccctcacctcactggctcctggcgacagactgaggggtgctgcggctgcaccccgtgggcatcaatggccctgtcaactctttcgctctgttccacaatgtcaactgtccccgcggcttcctgtacttcaacagacagggcaaactgaggatcagcgtccttcctgcctacctgtcctatgattccccgtggcctgtcaggaagatcccgctgtgctgcacggtccactgtgtggcttaccatgtggagtccaagatgtacgctgtggccaccagcaccaacacactgtgcacctgcatcccacatgactggcgaggagaaggcatttgagaccattgagagagatgagcagtgcatccacccccaggaggcggccttatctatccagttcatctccctagtctgctgggaggctattcccaatgccaggattgagctgcagaagtgggagcttgtgaccagcacgaagacagtgtcgctgcagcaaggagaccaggtcaggcttcaaaggctacgcgtggccgccgggacctgcctcatgcaggaggaggaggaggtcatgtcctgagggcggatcttgatcatggatgtgactgaggtggtgcccgagcccagccagcccttgaccaagaacaagttcagagtcctttacgagaaggagcagaaggggcccgtgactgccctgtgcactgcaaggccacctggtgtcggccatcagccagaagattttcctgtgaagcctgcgggccagcgagctgacgggcatggccttcatggtcgacaggcagctctacatccaccagatgatcagcgtcag

SEQ ID NO: 9774 - DNA, 550 bp, Homo sapiens
  MAP TO AC008022.1; EXPRESSED IN HELA, SIGNAL = 1.8; EXPRESSED IN PLACENTA, SIGNAL = 2.3; EXPRESSED IN LUNG, SIGNAL = 1.8; EXPRESSED IN HEART, SIGNAL =   2; EXPRESSED IN FETAL LIVER, SIGNAL = 1.4; EXPRESSED IN ADULT LIVER, SIGNAL = 1.5
  unsure 37
  unsure 55
  unsure 431
  unsure 458
agaagcacctggacattccccggagccctctgcgtgngtcgcgcttcagtggaantttggggacccttggctgccagccatgcttgcttgatagcaacagaaaccagttctgcccgactctgtgccacaaaaaagccacaccccactcacctgacacccaccccatcaagagtccatgctgctgggccctgagggaggggagggctttgtggtcaggctccatggcccgccctggccctgatctgtcgaggatgcgcaggacgtcctctccaactgcaccatgccccattgggctcaggcgagttccatctacaccggagaggggtaggcagagtggtgaggcttttgctgaacttggatcagaagaggacgtaaaaatggccctggaaaaagaccgggaaagcatgggacactggcgcattgcggtgttncaagtcccacagaaccgaggtgagttngggtgttgaaggaagcacggcggtcccaacagtgcgggcagcgccaactacggcttcgcgctcgaactttgaggactctcatctggatgcac

SEQ ID NO: 9775 - DNA, 580 bp, Homo sapiens
  MAP TO AL021707.2; EXPRESSED IN FETAL LIVER, SIGNAL = 3.9; EXPRESSED IN HELA, SIGNAL = 3.3; EXPRESSED IN PLACENTA, SIGNAL = 4.5; EXPRESSED IN BRAIN, SIGNAL = 2.9; EXPRESSED IN BONE MARROW, SIGNAL = 3.6; EXPRESSED IN HEART, SIGNAL = 2.5; EXPRESSED IN LUNG, SIGNAL = 3.6; EXPRESSED IN ADULT LIVER, SIGNAL = 4.3
gcaccagagtggcctatgacaagtcacttcactctcttgtgccacagtttctgcctccaaagcctaaggtaacagggactgaagtgctgtctcccaccctagctcctcctcttccaaatccactcccctcccttccagtccaagggtgaccctgacttgatcctcagtagagaggcccacaggatccccctgcagcccctctggccccaccacaggacagatactcacaaagatggcgaagtccttgggggcactggagatagtgctgttgggtgacaaggccttgggcacatgctctaaggtaacggctgtggggcggatgcgggcagagaggcggaccacggcgaagccttgtggcccctggaaggcccagcagttgcctgggtgcacatctggctggaggagcagaaagtcatgtcaggacagggccctgagtccagctcttgctgaccccagatgggaccagccctcagtgtgctcagagcccccgctgctgtgcttgccaggtgcccacctggaggatgactcggggtgactgggagtggtaccacagggggatgccgaagaggctgaggagggc

SEQ ID NO: 9776 - DNA, 568 bp, Homo sapiens
  MAP TO AC002472.3; EXPRESSED IN BRAIN, SIGNAL = 1.9; EXPRESSED IN LUNG, SIGNAL = 1.6; EXPRESSED IN ADULT LIVER, SIGNAL = 1.6; EXPRESSED IN HELA, SIGNAL =   2; EXPRESSED IN PLACENTA, SIGNAL = 3.6; EXPRESSED IN BONE MARROW, SIGNAL = 1.7; EXPRESSED IN HEART, SIGNAL = 2.7; EXPRESSED IN FETAL LIVER, SIGNAL = 3.6
ccactgacatctttcgggaccacatcccctcggtacaacatgcagcaggctatgtacttgccatggtgagggtcacacttgaccatctgattggctggctcgaagtgggcactggcgatctcggccacggacagctgctcgtggtaggccttctcggctgagatgatcaaggcataggtggccagggggaggtggatgtgggtgtacggcaccaggttggtttggaattctgtcaagtacacattcagggccccaacgaatcacagggaggccgtgatggaggacacgatctgcccaatcagacgactgaggttggtgtacatgggacactcgatgtccaggttgcactgacatgtcgaccatgaaggcacagtcagaatgttccagggtcgtgtaggtggtcaggatggagttgcagggctccatcacagccatggagacatggggggctgggcaaatggcaaactccagcttggacttcttcccgtagtccaccgagagccgctccatgagcagagacatgaacccagagacggtgccgcccccaaagctgtggaagatggggaag

SEQ ID NO: 9777 - DNA, 562 bp, Homo sapiens
  MAP TO AC009266.1; EXPRESSED IN ADULT LIVER, SIGNAL = 6.5; EXPRESSED IN HELA, SIGNAL = 3.3; EXPRESSED IN PLACENTA, SIGNAL = 5.7; EXPRESSED IN LUNG, SIGNAL = 5.9; EXPRESSED IN BONE MARROW, SIGNAL = 6.4; EXPRESSED IN FETAL LIVER, SIGNAL = 4.4; EXPRESSED IN BRAIN, SIGNAL =   7; EXPRESSED IN HEART, SIGNAL = 2.3
tgaggtcaagtgatctgcccgcctcagcttcccaaagtggtagaattacaggcctaagccaccatacctggcctggccctatttataaattaattgtcactgtatttgcgaaaccatctaaagaagtaagcagcatgaaccttgtaagaaaaggtgggaaaacaactcagtgccatggtgggggcactatgtaaaacatcaccttgacaatttttttttgtaaaacacttccctgccttgaaggttccttgaatctatcctttaactcacttttcttcatgatcaggcatatgtttgtttgcctgtttttctttatgtcagaacattttgaattcatggagcagctagaaaaaattcagatgaatcttgaaaacaagttctcatctaagaaggcaaggatataggtaaatttcttttgttgcttttgcaccaccttcaataactctggaatccaaactaaaatctgaagacagatacctggaaataaattctcagacacaaattaggaatttgcactcaggataagaattttaaaaaatcttgtgtcctgcttgaaatgtgc

SEQ ID NO: 9778 - DNA, 546 bp, Homo sapiens
  MAP TO AC002472.3; EXPRESSED IN BRAIN, SIGNAL = 5.2; EXPRESSED IN PLACENTA, SIGNAL =  13; EXPRESSED IN HELA, SIGNAL = 6.3; EXPRESSED IN BONE MARROW, SIGNAL = 4.7; EXPRESSED IN LUNG, SIGNAL = 6.9; EXPRESSED IN HEART, SIGNAL = 5.1; EXPRESSED IN FETAL LIVER, SIGNAL =  14; EXPRESSED IN ADULT LIVER, SIGNAL = 8.2
cagcatgcattggacacaccctggtcagcagcactcactgcagcctgcaggtgcccacagtgctcgcactcaccacgcccagccaagctgccccggtgcccagtgtgacggccgtggggatgagcccgaacttccctgcctgagagagatctgagctgaacctctcagcccacgactgtcagcctcatgcctcctccagccctgtctgcctgccccatcccatccccggcctgacccctacctgtgcctacctgcccggtgacgaggatgtcgaagcggattccatagagcttgagcagggtgcgggcctccacacccggttgctcccaccagtgagtggctgtcctgtgggcaggaaagaaggctctggtgacctgctttgcccacccccaggtggggctggccctgccagacctctgtccaacttgtcaattgactctataaacccccagcccaagcctgagtcctgggtctcagccctatgtaattggtgagaaaacagaaaaagcaaacgaagacctgtccctcagaagttccctgcctgct

SEQ ID NO: 9779 - DNA, 574 bp, Homo sapiens
  MAP TO AP000041.1; EXPRESSED IN LUNG, SIGNAL = 1.7; EXPRESSED IN HEART, SIGNAL = 1.6; EXPRESSED IN BONE MARROW, SIGNAL = 1.6; EXPRESSED IN ADULT LIVER, SIGNAL = 2.7; EXPRESSED IN HELA, SIGNAL =   2; EXPRESSED IN PLACENTA, SIGNAL =   5; EXPRESSED IN FETAL LIVER, SIGNAL = 2.7; EXPRESSED IN BRAIN, SIGNAL = 2.3
tctaacccactcccaacacccacaactcttatttctatccttcttcttcataaaactcattttccatttttccctctagcctaaatcatgagcactagcaccttatcagcagccaagaaaagcacatcatgtttcctttactgactttctcattaagttgcccccatttctccccctactgaaatagttgaagataggagtttcaaaggttttgttttaaaaggtatgcctactgtccagaaaaactttccccaggtctttgatgaccctctggaaagttatttaattttcccaagatctgttgtagataaagaaattctttgggtagggaggatagacttggcacaagctcaactgcaaaagtattattgggttaatacggtagttgttgactcttcttcagggattctcaataatggtcctgttacatttggggccagatacttctctgtggtgggggctgtcctgcgcagtgtaggatgttcagcagtatccctggcctctacttgccagttgccagtgataccctgtccccagttgggaaaactgaaaatgtcaccagacattgccaagc

SEQ ID NO: 9780 - DNA, 592 bp, Homo sapiens
  MAP TO AP000053.1; EXPRESSED IN HEART, SIGNAL = 2.1; EXPRESSED IN BONE MARROW, SIGNAL =   2; EXPRESSED IN LUNG, SIGNAL = 3.4; EXPRESSED IN FETAL LIVER, SIGNAL = 3.5; EXPRESSED IN ADULT LIVER, SIGNAL = 4.2; EXPRESSED IN HELA, SIGNAL = 3.1; EXPRESSED IN PLACENTA, SIGNAL =   5; EXPRESSED IN BRAIN, SIGNAL = 2.1
ttatgtctgctgtgcatctcggcagacgatgctgccaccgtctgtgtatgagcatgtgtgtgtcagactttcccatcgtctccaaacttgttttcagaataatgcttccagtgaaatgagtcggccacatgaggtcacaaagcccctactctgttcagcacctggggtaagtaataatattttggagcacttagtgtggggagtagccctgacccctttacatgtcatgtcttagttcattcttgttgccatccttggaattgaggccaacatcatctgcccatttgccagacaagctgctcaggaggagagggccacagccccttatctcctcgccaaacaagagaagatccccagttgctttttttttctgtggaagagattcttttaaaaacatttttttcatggagaagaaaatctgaaaaaaaagaatgaaaccgaaccaatagtcccatagacagttagttgttgttgttgttgttttgtttgtttgtttgtttttgatgaatacagaaattgacccttctggtcttaaagcttgaaaattaaatttgttttatctgagttgcttcctcaggaaaggagcccaagt

SEQ ID NO: 9781 - DNA, 568 bp, Homo sapiens
  MAP TO AC009266.1; EXPRESSED IN HELA, SIGNAL = 2.3; EXPRESSED IN LUNG, SIGNAL = 3.1; EXPRESSED IN BONE MARROW, SIGNAL = 3.1; EXPRESSED IN HEART, SIGNAL = 2.2; EXPRESSED IN FETAL LIVER, SIGNAL = 3.4; EXPRESSED IN ADULT LIVER, SIGNAL = 2.1; EXPRESSED IN PLACENTA, SIGNAL = 2.4; EXPRESSED IN BRAIN, SIGNAL = 2.4
aaagtgtagttggaagggaggaaataggaatggaagcaagacttctctgcctatgccttttaaatttagttttgaattttaattatgtaagtattttacatattcaaaaatagaaaaggaatgaaacaaagcttaatattaaataagagaaataaattaacctatatagacttatatgtatgtatatgtatgtgtgtatgtccgtgtgtgtgtgtatatatgtctgtgtgtgtatatatatatataaaatattaatgataaaatcacttgaagtgacttttcagcagtccttggaagaataccttcagaaattcaaagtaattttcatcaaatgtggcaaagtaattttaaaccttcctgagctttatggttaataatattaatgaaatttgaattgtgaaactattttgggtatattgcagaatgaaccacataaataaatatattcatgttattatgaaaccaaagggaaagtacattttggtataatttgataaaaagtatccctctatataatgggggttcaaataaaaagggtctaaaaactgcaatatcacagcacccaggg

SEQ ID NO: 9782 - DNA, 588 bp, Homo sapiens
  MAP TO AL022329.9; EXPRESSED IN HEART, SIGNAL = 2.1; EXPRESSED IN BONE MARROW, SIGNAL = 2.9; EXPRESSED IN LUNG, SIGNAL = 3.1; EXPRESSED IN FETAL LIVER, SIGNAL = 2.2; EXPRESSED IN ADULT LIVER, SIGNAL = 3.6; EXPRESSED IN HELA, SIGNAL = 2.4; EXPRESSED IN PLACENTA, SIGNAL = 3.5; EXPRESSED IN BRAIN, SIGNAL = 2.8
caagctctcacctacccccatgctggcagcttgccccaggctctaccccctgcccccgggccttccctgtttcttctcagctgcccccatttacacccttctgacacaaacccgcgttgccttccccaccaagtagcttccttctccagaaggctgcagcactattaaaacacacacctgtgaggtgtaaataaaagagtgacaagtaaaatgcaagggcctagcaggagctataactggagacacgtaggactgggaccagctagactgtgggacagaaaagccagtaaatggctggaggaagatgggaggattgtggggaaggagagcagcatgtacacgccaagtgcacctggggaacccagtggcagctggtcagagctaggggccccaggagatgaggggctgggccatgatggtgattggggtgttcatgggaccagcttttctggtgttggaggttaggtgaaggcaaagtgcagagggcccaggtcacagggctgtgaggattgctgaccaactgagggacacccttctgtggtctggagcagtggctggggtcagcattgagaccgatgcctagacctg

SEQ ID NO: 9783 - DNA, 558 bp, Homo sapiens
  MAP TO AL022319.2; EXPRESSED IN FETAL LIVER, SIGNAL =   8; EXPRESSED IN ADULT LIVER, SIGNAL = 6.4; EXPRESSED IN PLACENTA, SIGNAL = 6.4; EXPRESSED IN HELA, SIGNAL = 4.5; EXPRESSED IN BRAIN, SIGNAL = 5.6; EXPRESSED IN BONE MARROW, SIGNAL = 7.4; EXPRESSED IN LUNG, SIGNAL = 4.9; EXPRESSED IN HEART, SIGNAL = 3.6
cattgcatgttctcactgggaggacctggggtggaccccagtggcgtcaggattggatccatctggaaatccctcaggtgcttggacaagtgggtccccgattctaggagcctaagaagaggacctggcaaggacccagatggtcctcgtcaagatgaggacggggccgcctgtgccttgaaacctgcctggcaagaagtgtccctgctcgtcagggggtggggggagcggggcgagggtgggaaatgtcttgctaggagagagttttttattctttaacttatataagctgtggccacagtgcgctccttcgagacgcagtgttccctgtgcccatactgcaggagcctcagaaggacaataaacttcctgctcattctggaacaggctggtttccatcgtgtcttcctcattaccccatagcctcaagggcccagcaaggctctgtgtgcagcagaaaaggtgcttacagcccccgccttacaggctcagggggcatccaggctcaggtgttatgggtggcatcgggctgcccagcctgcttctttccagaccctg

SEQ ID NO: 9784 - DNA, 584 bp, Homo sapiens
  MAP TO AL049649.4; EXPRESSED IN PLACENTA, SIGNAL = 1.9; EXPRESSED IN BRAIN, SIGNAL = 2.3; EXPRESSED IN HELA, SIGNAL = 1.6; EXPRESSED IN BONE MARROW, SIGNAL = 2.5; EXPRESSED IN HEART, SIGNAL = 1.3; EXPRESSED IN LUNG, SIGNAL = 1.8; EXPRESSED IN ADULT LIVER, SIGNAL = 1.8; EXPRESSED IN FETAL LIVER, SIGNAL = 1.5
ctgctcaaatcctcccaaagccctggggtttcccaccagcaggagtgctcacaaggtgggcggactgatcccccaagggggtttgggaactgaggaggtgagggaaccttggccgcagaattctgactgtcctgctttggtgggcctgagtcagactctaaagtgtgtgtggtgagagttctgtggtaggatcggtcatcccctgcagcttgtatctgactcagggtgatgagtgccccctggtctgctctgaggaggtgagagcccagccccagttcagccaagtggaggcagaggcagtggtagcttctggcctcggagcaggagggtgggcagtgtaggggaggcaagcaggagactgccaggactgaccaggccaggtaactgtttacccaacaagagctgaggccccttttctctcatctctgccactcctaccccctgctgggatgtttttccagagatcaacaatctctacacttgaacaaaacagcttgtttctggtcacctgctgaagcacaatttgtgtgtgcattctttaaaattgtacaggaacttaaagtgccaacattttcttttcaacg

SEQ ID NO: 9785 - DNA, 565 bp, Homo sapiens
  MAP TO AL079295.1; EXPRESSED IN FETAL LIVER, SIGNAL =  18; EXPRESSED IN PLACENTA, SIGNAL =  13; EXPRESSED IN BRAIN, SIGNAL = 1.9; EXPRESSED IN HELA, SIGNAL = 6.6; EXPRESSED IN HEART, SIGNAL = 5.6; EXPRESSED IN BONE MARROW, SIGNAL = 1.8; EXPRESSED IN LUNG, SIGNAL = 7.9; EXPRESSED IN ADULT LIVER, SIGNAL =  11
ggctcctggttaccctaaaacaaacaacaagagaaagaaaaagtgactttgaatccttgttacgtaactatttttaaagtgagtatatggaattctctgaatattctctcactgcataggtaaaatggaatgcttattgctccaggattggagaaaatattattacacatacacacatagatatatgtatgtggacagacacacacacacacacacacacacacacacacacactcacttttgttaatgtgtagttactagacaggcccacaaccatatttaagtggactagatgccaaaggggcaaaaatctttcctttaaattaaaagtaggtggagagcccactttggaccacaagccactacagcctataccacagagagagactctgtccctaaaaaatacgaaaaacaaaaaagaaaaatcaactaggagaaaatattagcaaaaggtaagagagatgctgggttattatcactagtcccagagtgggttaaccaagttgacaagacagacacacatgtacacacaaacacacacacatcccaagagaaaaacaggcaa

SEQ ID NO: 9786 - DNA, 557 bp, Homo sapiens
  MAP TO AC002472.3; EXPRESSED IN FETAL LIVER, SIGNAL = 9.7; EXPRESSED IN ADULT LIVER, SIGNAL = 6.6; EXPRESSED IN PLACENTA, SIGNAL = 6.4; EXPRESSED IN BRAIN, SIGNAL = 7.9; EXPRESSED IN HELA, SIGNAL = 5.5; EXPRESSED IN HEART, SIGNAL = 4.7; EXPRESSED IN BONE MARROW, SIGNAL = 9.3; EXPRESSED IN LUNG, SIGNAL =   9
cataaaggggccaggaggatcaggggtgccgtgtgggtgaacgggggctccgagagaagtgagaggatacccaaaacacgaggactggagcggcctggcatgctgggcccctcagggtctttgctcttcaagggctctgtcctgcaggctgggtggcagaaggccaggatatgagggcacagaggccctggggggatgccccgtggggatagagggaaacctggggagaaggtggaggggagtggggcagaggtggggccacaccaggagtgtgctgcggagtgagaggcagagcccgcagatgggataccgagagctctctgagacccgcgtgttgcagcatccaaacacacggagctccagctgccccagtaatggcagaatctggggtggagaacataagagggggttgtcagagtgatccagctggagggcatggaggccatagatttcacacaggacttgggtgtggagttctccaggccgcgggccaggcccactcaagcctgcctctgtgaactgcagcaggcgccccagcctctctggatgcctgtccc

SEQ ID NO: 9787 - DNA, 562 bp, Homo sapiens
  MAP TO AP000041.1; EXPRESSED IN HEART, SIGNAL = 2.1; EXPRESSED IN ADULT LIVER, SIGNAL = 2.3; EXPRESSED IN BRAIN, SIGNAL =   3; EXPRESSED IN HELA, SIGNAL = 1.7; EXPRESSED IN PLACENTA, SIGNAL = 5.5; EXPRESSED IN BONE MARROW, SIGNAL = 4.7; EXPRESSED IN LUNG, SIGNAL = 3.1; EXPRESSED IN FETAL LIVER, SIGNAL = 2.5
gcttagagggtaagtggctgcttcgaggaagaggctcctctccaatcatggaaaatgtttccacttactgaagtttagaagatgaacgacaatgcttccatcttgcactccactttaaggtgtttggtctttcctgaatgcttaggtacgcaggtgaggctgggtacaagagagcctcagcctgctaactagaccccctggagcctcctgttgtgtttaggaagccagccaggaaaaaaaggggcttttcttttctgccatagaaggatacctgatgaacttgccaagagcaaggtgatggttgggaagagtcattcaattgacacttttgctccctgggtatgcagtgcattgactaggaaagtatatttccctcagaaggtattttcctgcttcttcactgcctcttttctcttctgcacacacaataaatattcaataagaagattaccacattcactgaagtaggctcacaaagcaatggggtgaaaaatgccatgtttttcaaaaacatgaattcacttttctccagcagatttttaggtgtggggaaagacgttag

SEQ ID NO: 9788 - DNA, 578 bp, Homo sapiens
  MAP TO AL035681.13; EXPRESSED IN PLACENTA, SIGNAL =   3; EXPRESSED IN BRAIN, SIGNAL =   2; EXPRESSED IN HELA, SIGNAL = 3.9; EXPRESSED IN HEART, SIGNAL = 2.7; EXPRESSED IN BONE MARROW, SIGNAL = 2.1; EXPRESSED IN LUNG, SIGNAL = 2.2; EXPRESSED IN FETAL LIVER, SIGNAL = 2.2; EXPRESSED IN ADULT LIVER, SIGNAL = 1.6
tgtgcagcctgagaacaaaccagcggcagccgctgggggctgcagaggcggctcaggagaaggtggcatgaagaatcagagctgcccgaggagggcgtgggttaccttgggacctgcaaccctgttcaggacatgttcaaagagctggagccatggggcacacacccagggggcaggcagggggtagaggagtccctgctaaacggagccccagcttccctggaaagacagcagccagcctctatctggcggggcccaactggctctgccacactcgcctcacctcggccatggccacggcgcccttctcagtgaaggtgttgtcattcaggttgatgacccgcagcagggggttgacagcgaaagcctgggccagggcagtgatgccagggtggttgatcccattctgtggcatgtggacctcctccagggtcccgatgacctgtgaagaggaggcagagagtggagggggccccgagtgccaggtgacatccagcaggcaggagagcaattccacacagcaggcacaggaatgggctgccgccagcacagggcaggggcctgtctgtgggattttg

SEQ ID NO: 9789 - DNA, 565 bp, Homo sapiens
  MAP TO AC008272.1; EXPRESSED IN PLACENTA, SIGNAL = 4.5; EXPRESSED IN HELA, SIGNAL = 1.7; EXPRESSED IN HEART, SIGNAL = 2.4; EXPRESSED IN LUNG, SIGNAL = 2.3; EXPRESSED IN BONE MARROW, SIGNAL = 4.7; EXPRESSED IN ADULT LIVER, SIGNAL = 3.2; EXPRESSED IN FETAL LIVER, SIGNAL = 5.4; EXPRESSED IN BRAIN, SIGNAL = 4.4
ttgtcaaaggtgtttgaaccagaggaactctatcttgaataggggctgggtaaataaggctgagacctactgggctgcattcccaagaggttaaggcattctcagtcacaggatgagataggaggtcagcacaagatacaggtcacaaagaccttgctgataaaacaggttgcgagaaagaagccagccaaaacccaccaaaaccaagacggcaatgagagtgacctctggttgtcctcatgactcattatacactaattataaaatatcagcatgctaagagacactcccaccagtgacatgacagtttacaaatgtcatggcaacatcaggaagttgccctatatggtctaaaatggggaggaaccctcagttctggaaattgcccacctctttcctggaaaactcgtgaataatccaccccttgtttagcatataatcaagaagtaaccataaaaccagcagcccttggggctgctctgtctatggagtcattcttttattcctccactttctaaatgaacttgctttcactttactctatggacttgccctgaattctttc

SEQ ID NO: 9790 - DNA, 557 bp, Homo sapiens
  MAP TO AC004032.7; EXPRESSED IN HEART, SIGNAL = 2.7; EXPRESSED IN ADULT LIVER, SIGNAL = 4.2; EXPRESSED IN PLACENTA, SIGNAL = 2.7; EXPRESSED IN BONE MARROW, SIGNAL = 4.1; EXPRESSED IN LUNG, SIGNAL = 3.8; EXPRESSED IN FETAL LIVER, SIGNAL = 4.9; EXPRESSED IN BRAIN, SIGNAL = 2.3; EXPRESSED IN HELA, SIGNAL = 3.4
ccattttatccctcccttcctggccctggccaccgctctccaaacctgggcagcagctgggctctaaacctgataaagtcaggtcacagacagcccttcactcatatccttagaacattcagtggatctatcttttgagaataaagatcaaattcctcactgcagtgtgcaaggccctgcatgcccagcccgggtgaccttgccatgcctggcccagtccctccaccagagctgcactggcccctactgtgcccttctcaccttctcccatcacaggccctggcaggggttgtgcccatggctggagggctttttgctcagtgaaggcacagccacacctcagctcagccgccacatcctcagggaaatgccccccgccgcccccggcaactcctaccagataatcccggcactggaatgctctcttacccccaaggtctgggtagcgcaacatccagcagtgttatcttctgggatccttaatgaatctcagtccaccccactccatcaggagcacccaaccagcaggggttcttcctggttttggccacttctgt

SEQ ID NO: 9791 - DNA, 596 bp, Homo sapiens
  MAP TO AC008022.1; EXPRESSED IN BRAIN, SIGNAL = 4.2; EXPRESSED IN PLACENTA, SIGNAL = 2.7; EXPRESSED IN HELA, SIGNAL = 2.7; EXPRESSED IN BONE MARROW, SIGNAL = 3.2; EXPRESSED IN HEART, SIGNAL = 1.9; EXPRESSED IN LUNG, SIGNAL = 2.3; EXPRESSED IN ADULT LIVER, SIGNAL = 2.4; EXPRESSED IN FETAL LIVER, SIGNAL = 2.2
tgacaggtttaacatgggtggatctttttttttaaaactgactttcatattcacagaagagacttaatgtttagccttgcactgaaagttttccaggcaaaacttttagaaatttcagtattaggaggcaaatctactccatagccaactagacatggacaagcatctgacaagggcctcctttgagccactctcctttgtagctaactgggatagtactgggcatttcctccttctagctattgctgttcctcgcccccagatctgacaaacaggaggaactcagcttttcatggacttacaagaaatatttagcagaactcatcttcgtgtccctgcaaattcgtatgttgaaaccctaaactcaatgggatggtattaggaagtaagacctttgggaattaattaatccgccctcatgatggggttagtgcccttataagaagagacacctataagaagagagtttgcttcctctctctctggcatgtgaagacacagcaagaaggtggccatctgcaaaccaggaggtatgccctcaccagatgctggatctgccagcaccttgatcttggacttccagcctccacaactct

SEQ ID NO: 9792 - DNA, 562 bp, Homo sapiens
  MAP TO AP000352.2; EXPRESSED IN LUNG, SIGNAL = 7.1; EXPRESSED IN ADULT LIVER, SIGNAL = 8.6; EXPRESSED IN FETAL LIVER, SIGNAL =  15; EXPRESSED IN PLACENTA, SIGNAL = 6.9; EXPRESSED IN HEART, SIGNAL = 4.2; EXPRESSED IN BONE MARROW, SIGNAL =  20; EXPRESSED IN BRAIN, SIGNAL =  17; EXPRESSED IN HELA, SIGNAL = 7.8
gcctatggtcctccaaaaagatcctacggtctgtcctctgccagaatctttgggtctgctcaccttgcagtgcccagtctactctgggtcttattactaacctgactgaattagttaaagtggtatctcattattttttaccaggcatttctttgattctaggagcaggattttcctgatgttaactggcaaggccagagcttctgagtgcggtctcagaagtcataaactgtctctttccccgccagcatgtctgtacttcatctgcaaagctttggagaaggattgccggtacagcaaagggctggtcctcaaggagaagatttttgaggagcagccttgtctccggaaggactctctcagaatgttcctcaaatggtaagtcctgcctcttcccatgccatgtgtgcacgcttactgtgtggctggtgaaggtcaggagcacaccacattctcccctcaggtcccatggatggagcccctgtgctctggggcttcatgccctgccgcagcccctgatctagtgaactgaccttggactgccttgttgatcacccacctc

SEQ ID NO: 9793 - DNA, 591 bp, Homo sapiens
  MAP TO AC007106.6; EXPRESSED IN BRAIN, SIGNAL =   2; EXPRESSED IN PLACENTA, SIGNAL = 2.4; EXPRESSED IN HELA, SIGNAL = 3.8; EXPRESSED IN LUNG, SIGNAL = 3.4; EXPRESSED IN HEART, SIGNAL = 2.7; EXPRESSED IN BONE MARROW, SIGNAL = 1.5; EXPRESSED IN ADULT LIVER, SIGNAL = 1.9; EXPRESSED IN FETAL LIVER, SIGNAL = 2.6
acaagcacatgcccttacagaaggtgctgtaaaaccttctgtgacactatcagactaaagtggttattttaattttcaatgtaatagggggattacttaccccacacaatcagatacataataaaagcttggataatcagtgaagctttgcagcaatatctgagctgtactgttttggtgatatttgtttgttgtatactattgacttcaacaaaaatgtacaatttctaaaatgagaaaaatatggagcaaatcctttaaaatgaaagtaagtctagtagtgagaaggtgtaatgaagtgagtttctatttcattctaggcttctctaagagattcaatctgttcatacacataaggatattgatacaaatgttaacaatatctgaaagtttatttttcatatttaaatgtcaatgtgctaaatgttttacatatattatatttattctaacaacctaattaggccaatattatacttctcattttacacataaggaaatcgtggttcagagtggtttactaaatgctcaatgtcataatgctattataggtctggcaccatgtaaaatcgcatccatctgatcccaaag

SEQ ID NO: 9794 - DNA, 598 bp, Homo sapiens
  MAP TO AC007106.6; EXPRESSED IN LUNG, SIGNAL = 4.3; EXPRESSED IN BONE MARROW, SIGNAL = 3.3; EXPRESSED IN FETAL LIVER, SIGNAL = 2.9; EXPRESSED IN ADULT LIVER, SIGNAL = 3.3; EXPRESSED IN PLACENTA, SIGNAL = 2.9; EXPRESSED IN BRAIN, SIGNAL = 2.7; EXPRESSED IN HELA, SIGNAL = 6.1; EXPRESSED IN HEART, SIGNAL = 2.8
ccaaatataaaaacccagcccagttcatggcccatttggcgcaacccttagattctttacagctatagaccctgaagggtcagaaggccgtctcattctaaatatgcattttatcacccagtcagctcctgacattagaaataaagctccaaaaatcaaattccggccctcaaaccccacaacaggacttaattaacctcaccttcaaggtgtacaataatagagtagaggcagccaagtagcgatgtatttctgagttgcaattccttgcctccactgtgagacaaaccccagacacatctccagcataaaagagcttctgaacccctgaaatgcagcggccaggcattcctccaggaccgcctaccccaggatcttgcttcaagtgctggaaatctggccactgggccaaggaatgcccgcagcccgggattcctcctaagccgtgtcgcatctgtgggggacctcactgaaaatcggactgttcaactcacctggcagccacttccagagcccctggaactctggcccaaggctctctgactgactccttcccagattttctcggcttagccactgaagactgatgctgcccaat

SEQ ID NO: 9795 - DNA, 573 bp, Homo sapiens
  MAP TO AC007106.6; EXPRESSED IN PLACENTA, SIGNAL = 5.5; EXPRESSED IN HELA, SIGNAL = 3.8; EXPRESSED IN BRAIN, SIGNAL = 2.8; EXPRESSED IN BONE MARROW, SIGNAL = 2.1; EXPRESSED IN HEART, SIGNAL = 4.7; EXPRESSED IN LUNG, SIGNAL = 4.5; EXPRESSED IN ADULT LIVER, SIGNAL = 4.2; EXPRESSED IN FETAL LIVER, SIGNAL =  14
tgatttacatgccagccactattatagtattagggtaatctgaatttaactgtatacctatttttgccagtaagttttatactttgccctgtttccatgttattaattagcatcctttcattttagcttgaataacgctctttagcatttcttgtaaatcaggtctagtgattatgaacttcctcagcttttacctgggaaaagtatttttctctctttttctgaaggacagaaaagtttgtcaggttaagtattgtttgttgttacttctatttttattttttttagttttcaaactttgcctatattatcttactctctgctggcctataaggtttttgctgagaattctgaataatctgattggtagctttatggaggtttccctgtatgtgaggaaactcttttctaatgttgctttcaaaattctcattgttgttgttattgttgttacaacagtttgattatactgtatattggtgatttgtgtttatgtgtgtgcgtgtgtgtgtgtgtgttgggcggggggagtttaacatgattggagaattgtgagcttcaaataccacgatg

SEQ ID NO: 9796 - DNA, 584 bp, Homo sapiens
  MAP TO AP000053.1; EXPRESSED IN HEART, SIGNAL = 3.8; EXPRESSED IN BONE MARROW, SIGNAL = 5.6; EXPRESSED IN LUNG, SIGNAL = 6.4; EXPRESSED IN FETAL LIVER, SIGNAL = 8.9; EXPRESSED IN ADULT LIVER, SIGNAL = 5.5; EXPRESSED IN PLACENTA, SIGNAL = 5.2; EXPRESSED IN BRAIN, SIGNAL = 2.6; EXPRESSED IN HELA, SIGNAL = 4.1
gtccaaaacaatagcctcccataatttttgtttaatgctgggtcagcggtaggcttggtccacttgcgcttctgcctgggtgggccttcctcttttcctccttttctctctgtggtgaaatccccattcttctttctgtcctccacttcagtttcacctcttcctgcaaccctgcccacagctcttcagcgccaggccctggactcagctctcactacgcaaacctccaacatctcactgagtgggaggtggcccccacctccacaccagacctggaccttgagggtccaggcttgttttccttggtactcctggccctgacgcacccagccaggcacacagaaggtgctccagtatttgatgagtgaatgactggtagcaccagaggaaagggagcagggagtatggccaagaccattagctgccttcctcagtgttccttctccccttctccctagtaatagaaccctgacttttacctggccgtatggtcactcaaaataaaggactacatttcccaccttctctcgcaaccaagcctggccaatcaggtttaagtggaagtgtagtgtgggacttcctgg

SEQ ID NO: 9797 - DNA, 575 bp, Homo sapiens
  MAP TO AC007253.2; EXPRESSED IN FETAL LIVER, SIGNAL = 1.6; EXPRESSED IN ADULT LIVER, SIGNAL = 1.9; EXPRESSED IN PLACENTA, SIGNAL = 4.6; EXPRESSED IN BRAIN, SIGNAL = 1.9; EXPRESSED IN HELA, SIGNAL = 1.8; EXPRESSED IN BONE MARROW, SIGNAL = 2.6; EXPRESSED IN LUNG, SIGNAL = 2.8; EXPRESSED IN HEART, SIGNAL = 1.4
catttgtgtgccagaggatgggaaataaatccaaccaaaattcaggcaacttctacctcagtaaaatttctaggggttcattggtgtggggcctgttgagatattccttttaaaggcaagggtaagttgctgcatttggctcctcctacaaccaagaaaagaggcacaatgcctagttgtcctatttggattttggaggcaacacgttattcatctgagtgtatcactccagcgcatttatcgagtgactggaaaggctgccagttttgagtggggtctacaacaggagaaggctctgcagcaggtccaggctgctctgccgcttgcgccatatgatccagcagatccaatggtgcttgaggtgtcagtggcagacagggatgctgtttggagcctttggcagcccgccataggtgaatcacagtggaggcctccaggattttggagcaaggccctattttctgcagataactgctctccttttgagaaacagctcttggcctgttactgggctttggtagaaactgaacgtttgattatgggtcaagtcacaaggggaccagaactgcctatca

SEQ ID NO: 9798 - DNA, 566 bp, Homo sapiens
  MAP TO AL049758.11; EXPRESSED IN ADULT LIVER, SIGNAL = 1.9; EXPRESSED IN FETAL LIVER, SIGNAL = 1.6; EXPRESSED IN PLACENTA, SIGNAL = 1.7; EXPRESSED IN BRAIN, SIGNAL = 3.3; EXPRESSED IN HELA, SIGNAL = 1.6; EXPRESSED IN HEART, SIGNAL = 1.4; EXPRESSED IN BONE MARROW, SIGNAL = 1.8; EXPRESSED IN LUNG, SIGNAL =   2
acacctgctccatgttctccatgtactggggtgtgccctggtcgagttccttcagggacttctcatacttctctttggtctaaaggaaaatccaggcacaagacagaggttcatttccatttagcccttggctcaccctgcccctggagtgtctcaggccttcccagattccaaatgcaaagaaaaaacaggagctctggattctgacagacttcaagttcaagtcccagttcctccactcctgcaaggtgaatcacactcctgccatctgccctgtctctcagctggagcaaggcccagacaggtagatgccggcaaagggcagtctccccagaactcagtgtgtatggtcttgagcgtgccacacgcccatgtcctcttctccctgtggggaagggctgtgcctggctaccctcaagcctcagatctggcccacagcaaaggtggggctggggctgaatcctgcagctctcttggagcctcactgtcctttatcagatgaggacatctctccttcacagtgttctgatatgtacatgatggggtgcaggaagaaggcattcaaa

SEQ ID NO: 9799 - DNA, 593 bp, Homo sapiens
  MAP TO AP000111.1; EXPRESSED IN LUNG, SIGNAL = 3.3; EXPRESSED IN FETAL LIVER, SIGNAL =   3; EXPRESSED IN BRAIN, SIGNAL = 3.3; EXPRESSED IN HELA, SIGNAL = 2.6; EXPRESSED IN HEART, SIGNAL = 2.2; EXPRESSED IN BONE MARROW, SIGNAL = 3.2; EXPRESSED IN ADULT LIVER, SIGNAL = 2.5; EXPRESSED IN PLACENTA, SIGNAL = 3.9
cagaatcaccatccaaagcccagacctcccaattcttacattggggattaaatttcaacatgaattttagaggagacgaaaacattcaaaccataataggacataaacttgatttctcattgataggatggatgcaactaaacagctcaacagtgttgattaaaaatgcttattatgatagaggaaaatggcagataggaggcaggactaacttgcagctcccactcggatggacagagcagtgcatgaagacccacatcgtcaaattttactccaagaactaacacaggatcataccaggaaaaccaaaagaaaccacagaccctttgaaggcggtgaattgctgctgcaggctctgtgtcccctacaaaatgcatatggtgaaatcctagcccccaatgtgatgctattaggaggtggtgcctttggaaggtgattaggtgatgaggggggagccctcaggaatgggattagtgcccttgaaaaggggactccagaaagtctctcaccctcttcctaccatgagaagacaagtgtacaactcagaagagggcctcaccagcccccagcaacgctggcatcctgctctcaga

SEQ ID NO: 9800 - DNA, 580 bp, Homo sapiens
  MAP TO AC007556.2; EXPRESSED IN HEART, SIGNAL = 1.4; EXPRESSED IN FETAL LIVER, SIGNAL =   2; EXPRESSED IN ADULT LIVER, SIGNAL = 1.6; EXPRESSED IN PLACENTA, SIGNAL = 2.5; EXPRESSED IN HELA, SIGNAL = 2.2; EXPRESSED IN BRAIN, SIGNAL = 2.8; EXPRESSED IN LUNG, SIGNAL = 1.7; EXPRESSED IN BONE MARROW, SIGNAL = 2.6
gagatatttaagaatttgggagacagtaatagtcaaaagaagaagtgctccatgtagtagtactgactgataagtacattaggaaataagtcctctaaaaagaaatcatgatcctgctatccaggattcactgatgtcaattaggagctttcattcttgatgccttccaagctgataaccaaatgtccctgctctcagagaatcaccactgtgactccaatgaatggcagtgcgccaacaaacgttgcatcccagaatcctggcagtgtgacacatttaacgactgtgaggataactcagatgaagacagttcccactgtgccagcaggacctgccggccgggccagtttcggtgtgctaatggccgctgcatcccgcaggcctggaagtgtgatgtggataatgattgtggagaccactcggatgagcccattgaagaatgcagtaagttcctgtgggaggaccaaggcatgaccagagcagggagacacgaggaaacttccatggggactgagagaggacatggagctttctttttcagctgatgggatgctcccccttggcactccctgcaaactct

SEQ ID NO: 9801 - DNA, 543 bp, Homo sapiens
  MAP TO AP000123.1; EXPRESSED IN PLACENTA, SIGNAL = 2.1; EXPRESSED IN BRAIN, SIGNAL = 2.1; EXPRESSED IN HELA, SIGNAL = 1.4; EXPRESSED IN HEART, SIGNAL = 1.6; EXPRESSED IN BONE MARROW, SIGNAL = 1.6; EXPRESSED IN LUNG, SIGNAL =   2; EXPRESSED IN FETAL LIVER, SIGNAL = 1.9; EXPRESSED IN ADULT LIVER, SIGNAL = 1.5
attaccacaggggctcgacatgatcaagtcagtttagtaggaacgacatgtgaggcatggcccggtcacaggcatgaaggttcagaatatagcctggagtacacatgtatccctctgggccaggcagaggcttcacatcttggtgaaaggcctggtcgcactttctctgggtttcagatggactgttaatgcaaagttgtttttgtgtttttgcaaatcccaggagctggtggatggggatggtgtgaccctgttggaacctgctggctggcagccctccttcagagagacaccgtttggaaattaccagaggcctagagcaccaacccctccccagaccttggaagaattcaccatgatcccctggtaggttcaagtccacagaggatggattctgaaggggaacatgcaaacccatcagcaccaacccagagctgttgtaataagtcatcactcctggggcagggagacttgactcttcccctgatgattaggagttttgttgtcttttgatgttcccaggccagatgccacagttaaatt

SEQ ID NO: 9802 - DNA, 580 bp, Homo sapiens
  MAP TO AC007564.9; EXPRESSED IN FETAL LIVER, SIGNAL = 5.4; EXPRESSED IN ADULT LIVER, SIGNAL = 4.9; EXPRESSED IN HELA, SIGNAL = 2.9; EXPRESSED IN PLACENTA, SIGNAL = 6.5; EXPRESSED IN BRAIN, SIGNAL = 2.3; EXPRESSED IN BONE MARROW, SIGNAL = 4.3; EXPRESSED IN LUNG, SIGNAL = 2.5; EXPRESSED IN HEART, SIGNAL = 4.9
cagctggcttgaatttctccccagaaaatgggttttccctttctattgcatagtcaggctgcaaattttccaaacttttatgctctgcttcccttataaaactgaatgcctttaacagagcccaagtcacttcttgaatgctttgctgcttagaaatttcttccaccagataccctaaatcatctttctcaagttcaaagttccacagatctctagggagggcaggggcaaaatgctgccagtctctatgctaaaacataaaaagagttacctttactccagttcccaaaaagttcctcatctccatctgagaccacctgagcctagactttattgtccatattgctatcagcattttaggcaaagccattcaacaagtctctagggagttccaaactttccacatttttctgtcttcttctgagccctccaaactgttccaacctctgcctattacccagttccaaagtcgcttccacatttttgagtatcttttcagcaacaccccactctacttgtaccaatttattttattagtgtgttttcatgctgcttacaaagagatacccgagactgggaa

SEQ ID NO: 9803 - DNA, 570 bp, Homo sapiens
  MAP TO AC007564.9; EXPRESSED IN LUNG, SIGNAL = 1.3; EXPRESSED IN BONE MARROW, SIGNAL = 2.7; EXPRESSED IN HEART, SIGNAL = 1.5; EXPRESSED IN FETAL LIVER, SIGNAL = 3.4; EXPRESSED IN ADULT LIVER, SIGNAL = 3.1; EXPRESSED IN PLACENTA, SIGNAL = 3.8; EXPRESSED IN HELA, SIGNAL = 1.7; EXPRESSED IN BRAIN, SIGNAL = 2.1
agggacttgccttgtctcagatgagactttggagttggacttttgagttaatgctggaatgaattaagactttgggggactgttagatggcctgattgtgttttgaattgtgaggacatgagatttgggaggggccaggggcagaatgaaatggtttggctgtgtccccacccaaatctcatcttgaactatagttcccatattccccatgtgtcatgagagggacctggtgggaggtaatctaatcatgggggcagttaccatcatactgttctcgtaatagtgagtgagttctcgtgagatctgatggttttatcagggccttttccccaacttcactgcacacttctccttgctgcccccatgtgaagaaggacatgtttgctgccccttctgccatgattgtaaatctcctgtggcctccctggttctgcagaactgtgattcaattaaacctctttcctttacaaattatccagtcttagatatgtctttatttagaacatactaatacaggcttaattcctcagtgataaaataatctgtacaacaaagccccaagacatgagt

SEQ ID NO: 9804 - DNA, 559 bp, Homo sapiens
  MAP TO AP000347.1; EXPRESSED IN BONE MARROW, SIGNAL = 1.7; EXPRESSED IN HEART, SIGNAL = 6.3
cgacaggctagggaaagttgtgagagccacgtacctaaaacagtgagctgggtcccactgccaaacacatgcttcactgaattatgcttggattgaaacccccagggccagcatctggcgccagtccaggagccacgctggagcaggaacctgctgggtgtgaggggcacagggctgcagtgtgtaggctgtgacccaggcacagggcaggggggtggccagtatcccagtagtgtcccccagtagtgtctctgtgcctgttctctatctgaggcaggtgccgcccacagccttggagtcaccccagcatatgtccccctctctgaagctgttggtgctgatggcaacgctgggcccagtaggtcccagcaactccctgagtgacacatcccctcaggcagctgtgccgtgtggctgaggagtcctcagctggctcggacctgtccacctcacttggcctcattttaagggcctctgaaatctgccacaagtgtctgcagtcaagccaagttgacttgctccctggaccaggacattgggtcattcctgactcaagagg

SEQ ID NO: 9805 - DNA, 566 bp, Homo sapiens
  MAP TO AL021707.2; EXPRESSED IN LUNG, SIGNAL =  10; EXPRESSED IN BONE MARROW, SIGNAL =  10; EXPRESSED IN FETAL LIVER, SIGNAL =  18; EXPRESSED IN BRAIN, SIGNAL =  12; EXPRESSED IN HELA, SIGNAL =   8; EXPRESSED IN HEART, SIGNAL = 8.2; EXPRESSED IN ADULT LIVER, SIGNAL =  10; EXPRESSED IN PLACENTA, SIGNAL =  11
taatttcctgtctgcctcccccactgggctgtgagctcactaggggcacctgtagtcctagtacccagcatgaggcttggcataaaacctgggagagcctcggtggctgttgttgaatgaagtagcgaatgctctgcttgatggagaggtctgtggcactgtcatgttttaacttggtgtgtgcccaggttttctctcaggtagagaggacccctgttcctctgcagtgctggggtcggggggtggtggcctttgttaggtggggttcctggctggctggttggcaggctggttggtcaggactccctctcctgctgatgtctgggctcttgtcaccagatgggactgagtatgggctgagtgaagctgacatggaggcctcctacgccacagtgaagagcatggcggaacagatagaggccgatgtcatccttctgcgggaacggcaagaagctgggggccgcgtgcgtgattacctggtccggaaacgagtaggagacaatgacttcctggaggtcaggtgaggaggccgcgggacattttggggtccccattcttcacagagg

SEQ ID NO: 9806 - DNA, 577 bp, Homo sapiens
  MAP TO AC004624.6; EXPRESSED IN FETAL LIVER, SIGNAL = 3.9; EXPRESSED IN BRAIN, SIGNAL = 3.5; EXPRESSED IN HELA, SIGNAL = 3.2; EXPRESSED IN PLACENTA, SIGNAL = 3.8; EXPRESSED IN LUNG, SIGNAL = 4.1; EXPRESSED IN BONE MARROW, SIGNAL = 3.4; EXPRESSED IN HEART, SIGNAL = 3.1; EXPRESSED IN ADULT LIVER, SIGNAL = 4.8
tgcaccaggtaggagaggaccaggaagctgcttttgggtttgccaagatgttggtctgggccacttgggttgggagggagaggccagcagagggagtggagacagacttcactgagtggggaagagaagggaccagctgatggagggccttctgagatgggcagagggaagggatatggcgctcggcaaggggagacccgcaacccctgaagcagcaaggaggtgtggtggggggtgggctctagtggggagggctgttgggggacccccaggccgctggatccccaactctcttcgcaaaggaccattccaggcagggaggcatggggagccctgaagcttgtgtgggaactggtgaccgtacattccgcagcatgagaactagaaagataaacttgaggcaaggccagagggcctcaggaccgatggtcaccctgttgggaggacggtaccagtggacaaggactggcagaaacagccagcctggccccgggaaacgcagagaggaggatggctgtgtcccatgagcagatcctgtcctttcaccaagcataacactgggtttctatggcaacct

SEQ ID NO: 9807 - DNA, 594 bp, Homo sapiens
  MAP TO AC006427.13; EXPRESSED IN BONE MARROW, SIGNAL = 2.6; EXPRESSED IN ADULT LIVER, SIGNAL = 4.8; EXPRESSED IN BRAIN, SIGNAL = 1.7; EXPRESSED IN PLACENTA, SIGNAL =   5; EXPRESSED IN LUNG, SIGNAL = 2.8; EXPRESSED IN HEART, SIGNAL = 2.5; EXPRESSED IN FETAL LIVER, SIGNAL =   4; EXPRESSED IN HELA, SIGNAL = 2.5
ctggcacctagaacacagcctggcttgagtcagtgctctgtaagttatatattgagtaagtgagtgaataaatgaatgcaggcatcatgcataggaaaagcttagcacagtgcccggcacatagcagatgagagataagtgttcgttttgatgatgttgataatgacatccaaatgtcactctgaggcagtggcactgtggattggcctctgacattctcagtgtatatctcagtaggttggggagtataaaggaccatccttccaccctaccttccattcctccctgccaccatcagacatgctagagaacagtgctttcaccaacttctgctcctcacttttccctgtctgtgaaattatgattaggcattggggactgttcatcctcttccccaactctcgaagtgaaacactttcagatccttcatagtagtaaatgactaacagcagtctcgtctcatcccatcccagccacctgacctctctcagaatctggaatttcccatctttctttcatgttgtcaaacacctaaagtacctctactttgcgccattttattcctaaagataatctctccaaaatccagagcca

SEQ ID NO: 9808 - DNA, 583 bp, Homo sapiens
  MAP TO AL031588.1; EXPRESSED IN LUNG, SIGNAL = 1.2; EXPRESSED IN FETAL LIVER, SIGNAL = 1.4; EXPRESSED IN HELA, SIGNAL = 1.4; EXPRESSED IN BRAIN, SIGNAL = 1.8; EXPRESSED IN HEART, SIGNAL = 1.4
gtgtttgctgctcctccatcgccctcggcatcctgggtgtttgggaagtgtggggagaagcttattccccacggagacagtgctagggaggggccgtctggaaggatggggatcctcggggctgcactgagcgggtcattcccttactgtgcttccctgaggctgcctgcggggatcacgtttagaccccaccttgttccaggagctcctggcagggtcggggacacagacgtgccagcaagatgtttaacggggccctggggaagcaagggtggctcgtgtccacctgacctgggcatcttctaaagccagctgagcctgcccagagcctggagcacagtctcctggccagctggggaggcagggacatgcaggggaggtagtgcctgacatggacaccaggcagtgtggcccgctggggacccgtgagtgagctgtgcagtgaggcagtgaggtggagcgccaggaggcccagagctgctgggagatcccgcatgaagcagatgtgggaggcggtgagcagccgcgtcaggatttcccacctgggcactgccgccccttggggacgatgacccttcattgt

SEQ ID NO: 9809 - DNA, 586 bp, Homo sapiens
  MAP TO AC007106.6; EXPRESSED IN FETAL LIVER, SIGNAL = 6.9; EXPRESSED IN PLACENTA, SIGNAL = 8.1; EXPRESSED IN HEART, SIGNAL = 2.2; EXPRESSED IN BONE MARROW, SIGNAL = 3.4; EXPRESSED IN BRAIN, SIGNAL = 2.1; EXPRESSED IN HELA, SIGNAL = 2.4; EXPRESSED IN LUNG, SIGNAL = 3.1; EXPRESSED IN ADULT LIVER, SIGNAL = 5.4
tggagaaggaaaagagtaggaggagaacaacattaccagattgttgaatctcagtccactgcggtataaatgtgaaaagattacagttgtcttgttgctcttaagtgtactctgttaaatctttcatccttatgaagttacaggaactcttcatacttgagacagattccatcacctttcaccttttttggcttttaaattttagttcagtcaatttttagacttgaatcacctatcagatccaatgttctcctcctccttcatcacgaggaagtctaatgtcgcacagtaaatggttttctctctcacatttctccatttctttttcatatttcttcttctctcagtttctgtatttttagagcactttataccagtatacttcactctagccacaaagggaagctggggaaaaaaagaagaagagacttgcctctaaacattctccaatcttcacctataggatgactagttacaacttgcttttctctatgcactgtctgtctatctatctgtctgtctgtctgtctttctatctatctaatcatctatcttgtctatccatgcatccatccatccatccatc

SEQ ID NO: 9810 - DNA, 586 bp, Homo sapiens
  MAP TO AP000352.2; EXPRESSED IN HEART, SIGNAL = 2.2; EXPRESSED IN FETAL LIVER, SIGNAL =   4; EXPRESSED IN PLACENTA, SIGNAL = 2.8; EXPRESSED IN LUNG, SIGNAL = 2.9; EXPRESSED IN BONE MARROW, SIGNAL = 3.2; EXPRESSED IN ADULT LIVER, SIGNAL = 2.8; EXPRESSED IN BRAIN, SIGNAL = 2.8; EXPRESSED IN HELA, SIGNAL = 2.3
gggaggtcagtttctggttggagtgccattcctaaacagaccttctcaaagtgggagagactgtaagtggagctcagtttgttctgcttgttcctgacgggcaggggacaggggaggctgtcagcgaagagccactcacctcttttgttctcttctttcattcttagctttttgaaaacctttaggagttagctggtcacggcatttattgaacatctgttgtgtgccaggcatggaaaagggtgccatggggaaagtcaagatgatggtgccttgattcctgctcccaggttggatctgatgtcccatggtatcatgggacagtagttggtgccaaggaggagtgccatgagctggcagacgggagcaagttctggggtttggtgggttgggaagaattcctggagaaggtgagtctctagagaggcctgcaggcccatttagacatggagcttggagagtcctacagcttttggatactgaggtgactggggtggatgaaaaagagactttgaggggagagagcttgggaaagcagctgggctctgagggttgggctctttcctgtgggcagtagggagagtga

SEQ ID NO: 9811 - DNA, 581 bp, Homo sapiens
  MAP TO AP000353.1; EXPRESSED IN FETAL LIVER, SIGNAL =  65; EXPRESSED IN ADULT LIVER, SIGNAL =  19; EXPRESSED IN HELA, SIGNAL = 7.4; EXPRESSED IN PLACENTA, SIGNAL =  65; EXPRESSED IN BRAIN, SIGNAL = 5.3; EXPRESSED IN BONE MARROW, SIGNAL = 5.2; EXPRESSED IN LUNG, SIGNAL =   8; EXPRESSED IN HEART, SIGNAL = 7.4
acatccaggtgctttgtgggtaattaggtcccacagggttttcctgcatagggtgctgacagtgccagtaagcgcagctctttgagcccagagaatcctcaaggatcagggcaggcagtctcaccagcctctgattgtcatagcactatcacatgacgctccagggacctcttggtatgtacacaagcacttcctggggggttggggggtgacagggtaaggctcagcttagtgaggaacctccatgctcagggcctgagtgtttttacctgtcagacatggcagtatccatctgatggggctttggagagggctggcacagatacaggcacagagtgcaggacatcgtgtggtgctgggagggggaccaaggaagctggaacccacaaggcctcggagcccagctgggagcaacattctcccagggaagtctccccagaggctttactcagcagaggcttagcacagaagccctgagctcccctcttccaccacaggactccctcctgctgtgatagccaggcactgggaccccaagctgcccagcccattctgagcctcagtgtgttcatctgtgctgg

SEQ ID NO: 9812 - DNA, 555 bp, Homo sapiens
  MAP TO AP000356.1; EXPRESSED IN HELA, SIGNAL = 4.5; EXPRESSED IN PLACENTA, SIGNAL = 8.5; EXPRESSED IN BRAIN, SIGNAL = 4.4; EXPRESSED IN LUNG, SIGNAL = 4.3; EXPRESSED IN HEART, SIGNAL =   3; EXPRESSED IN BONE MARROW, SIGNAL = 3.9; EXPRESSED IN FETAL LIVER, SIGNAL = 9.3; EXPRESSED IN ADULT LIVER, SIGNAL = 9.8
tgtcagaaaggagactgggcaaatgcttaagccactgtgatttcccccgggggctggcttatttggtgtcagggtttttttgtgtgtgttttgtttttatcatattgaaattctggaacttagagtcacactcaggagtgtaaccacctctggactattggtgatatttcagtttttctgctgagtctaaggaaatcttgaaggtcagaggcatcagtatatggccctttgcttttcagtcaacttactacatggagggaaacctgggccaccccgtgttccagacgcagttcggaaggatcgcggtgaacatttgctacgggcggcaccaccccctcaactggcttatgtacagcatcaacggggctgagatcatcttcaacccctcggccacgataggagcactcaggtcactcagttggtggggtctggggggcttcctggggcccagccagctaaagcccaaggctgggctgtggagctccaaggtggcagcaggcaggcgcagccaccaggatgttaacagagctgagcccccaggattgcatgttgtac

SEQ ID NO: 9813 - DNA, 597 bp, Homo sapiens
  MAP TO Z86090.10; EXPRESSED IN ADULT LIVER, SIGNAL =   5; EXPRESSED IN HELA, SIGNAL = 3.9; EXPRESSED IN PLACENTA, SIGNAL = 5.4; EXPRESSED IN BRAIN, SIGNAL =   6; EXPRESSED IN LUNG, SIGNAL = 4.7; EXPRESSED IN HEART, SIGNAL = 3.3; EXPRESSED IN BONE MARROW, SIGNAL =   4; EXPRESSED IN FETAL LIVER, SIGNAL =   8
caacactgcacctaactcagctgaagttaagacaatatgaacagctatgtttaatttatcaaatttgcaagcaatgatgattccattaaaatgaaaaaaaatcatgttttaggattagttaaatgtggtagcaaatgctggtactgattagaattcttacaactgcaagtgacaggaaacagactaacttaagcaaaaggactgcattaagccaggaaattccaaaagtccctgtagtataacagtttcaggtatggctggattcaggactccagaatataaccaggactcagtttcctgccatttctctttcttttccgcagggttggtgtcagtggcaggtttcacatgctggcaagctggagccagcagctccagctccagctctagcacccctggagttttgagtccagtgaaaaaaacgatgagaggctttgtcccagatattttagcctgagtctcaatgcctctcattggctccaacagatcacatgcccagccctgagccaatcaacatggccacatccgggtcagttactactgcctccgccccatgctgtggagcccggctggaagcccgggggttgttgggtcttc

SEQ ID NO: 9814 - DNA, 573 bp, Homo sapiens
  MAP TO AC007253.2; EXPRESSED IN PLACENTA, SIGNAL = 3.5; EXPRESSED IN LUNG, SIGNAL = 2.9; EXPRESSED IN HEART, SIGNAL = 1.3; EXPRESSED IN BONE MARROW, SIGNAL = 4.1; EXPRESSED IN ADULT LIVER, SIGNAL = 2.3; EXPRESSED IN HELA, SIGNAL =   2; EXPRESSED IN BRAIN, SIGNAL = 2.3
atcctgaagccgctagattgatagaacagtggaatggtctcctgaagtcacaattacaatgccatctaggcgacaatactttgtagggctggggcaaagttgtccagaaggctgtgtatactctgaattgctgtccaatatatggtactatttctcctatagccaggattcacaggtccaggaatcgagaggcggaagtggcaccactccccatcacccctagtgacccactaacaaaatttttgcttccctttcccgtgacattatgttctgcaggcctagaggtcttagtcccagagggactaacactgccaccaggagacacaacaatgattccattaaactggaagttaaaattgccacctggccactttgggctcctcctacctctaagtcaataggctaagggagttagtgttggctgggtggacccagactatcaagatgaaatcagtctactactccacaacagagataaggaagagtatgcacggaatacaggagatcccttagagtgtctcttaaactgccatgccctgtgattaaggtcaatgggaaactacaactgcccaa

SEQ ID NO: 9815 - DNA, 550 bp, Homo sapiens
  MAP TO AC007556.2; EXPRESSED IN PLACENTA, SIGNAL = 3.1; EXPRESSED IN LUNG, SIGNAL =   3; EXPRESSED IN ADULT LIVER, SIGNAL = 2.8; EXPRESSED IN FETAL LIVER, SIGNAL =   2; EXPRESSED IN BRAIN, SIGNAL =   3; EXPRESSED IN HELA, SIGNAL = 3.3; EXPRESSED IN BONE MARROW, SIGNAL = 3.3; EXPRESSED IN HEART, SIGNAL = 2.3
tggaatctagaaaaacaaattggggaattggggcaggattgacttccttctgtctcccatacttcttcctccccacagaaagcttacacaagcatccattttccaggctcagtcttccttttttggtaactattatctagctcagagatagaggcagattgttaagactgatgggaacatgcttgtgttttgctcatgggttttatcttctttccctcctgcagccactcacacgtgcagcagcagtgagttccaatgcgcatctgggcgctgtattcctcaacattggtattgtgatcaagaaacagattgttttgatgcctctgatgaacctgcctcttgtggtaagagagtaagcaagcatgaaaaacatcacgatgcagctagacaacttcagtctcttccaactgcttcaaatacagaccagggtcatggctgctgaatgcttggacttcctgtcccagctttcatctggaatgctgacaccgctcagcggatattcattaagacctgttagtggagagcactgtgtggggagctgatcaggata

SEQ ID NO: 9816 - DNA, 578 bp, Homo sapiens
  MAP TO Z95114.19; EXPRESSED IN HEART, SIGNAL = 6.8; EXPRESSED IN BONE MARROW, SIGNAL = 1.9; EXPRESSED IN FETAL LIVER, SIGNAL =  34; EXPRESSED IN ADULT LIVER, SIGNAL =  24; EXPRESSED IN HELA, SIGNAL =   9; EXPRESSED IN PLACENTA, SIGNAL =  38; EXPRESSED IN BRAIN, SIGNAL =   2; EXPRESSED IN LUNG, SIGNAL =  11
tgcgacaaactccaactcaggtcagtggcgtctctagtgacttccagtacaagagggtgctgtggtcatgaggctcctgttgcttgagcttgtttcacccatattttgttttgtcagaagcctcttgctccatatctgtccagtcccatttgtttcacctttctttattagagtgtataatgggcaaagggattgtgccaaatgaggaatgaatatcctccagtagcccagtaaacctaggaaaacctgcagttgctttactgtctgaggaacagcatggatgcgggcttgatggtcccctggggcccatcggagtctcttcccaggaaattggaggacctgaaggaaaacccttagaggcagcaggcagtggagctgaggcctgaagaggagctggtttcccactgctgacacccctgaggctttccggatccctggtcttccctaaacctggctttaaaattgcctgtgtgtgtgtgtgtgtgtgtgtgtgtgtgtgtgtgtctgtccatacatgtgtgtgtgcacacccatagatttctttatttatttaattctgtgagctttctctctggatt

SEQ ID NO: 9817 - DNA, 569 bp, Homo sapiens
  MAP TO AC007462.2; EXPRESSED IN BRAIN, SIGNAL = 3.3; EXPRESSED IN ADULT LIVER, SIGNAL =  26; EXPRESSED IN HELA, SIGNAL =  12; EXPRESSED IN PLACENTA, SIGNAL =  22; EXPRESSED IN BONE MARROW, SIGNAL = 4.9; EXPRESSED IN HEART, SIGNAL =   6; EXPRESSED IN LUNG, SIGNAL =  13; EXPRESSED IN FETAL LIVER, SIGNAL =  36
tttctgccactcaaccacacagcaaagcaaagattcacacaaagtgctaacttgaataagtcatctagtcatgaaaacacctctaaattcacaaagggtaaaatttttctcttgtgatatgttagcataaggaggaaggagcagattattggatttacgatacttataagaaattaattctaaatgagattactaatagcaattaataaggtatgattaacagcaccaacctgtgtaccagtgctatggaaatgcccaccattttgtgtagcataaaggcctcgtatactttacttccactggatttctctgtctttgattcttccccccgcccccagtactctgctgccagcccatgtcttactccttcttcctctctagaataacatgttctcaagagacaagcttgatctatcttgtttctaaaagacattcctgctttgatattggcttcttatagatccctccaaaatatcaatagaaatattctacagtagaggcattagagattttattttttattttttgctctttaatttagtagtaaaccagataatcagaaatccaca

SEQ ID NO: 9818 - DNA, 581 bp, Homo sapiens
  MAP TO AC007463.3; EXPRESSED IN HEART, SIGNAL = 8.6; EXPRESSED IN BONE MARROW, SIGNAL = 6.1; EXPRESSED IN PLACENTA, SIGNAL =  26; EXPRESSED IN LUNG, SIGNAL =  18; EXPRESSED IN ADULT LIVER, SIGNAL =  30; EXPRESSED IN FETAL LIVER, SIGNAL =  41; EXPRESSED IN BRAIN, SIGNAL =   5; EXPRESSED IN HELA, SIGNAL =  13
agtcacaacctaccccctcccactcacacatctggggcaggaggtcagggtattacagaagggaacaggaacctagaggccattctagaattctgcctacttcattccttattttgcccatttccattgtaatatgtttctcctttcatgtcagctttgcctcttcctttggcattttatgccagttttataggtcccatacatttccttaaatgttgatgaaaatccttagcccacactaagagagtaaagaacatgtctgttctgaccctggtaggattcctctctcacacaattctccggattcccaccatagttcctacattgctcttacccagatatgccttatggagaaggctcctccatgttttagacttcatcttactagtcccagttaatctttgactattgattatgcactacataaagatatttctaaatcctgtttcaagcttgccaatttagttgtacacaaatatgaggtaactttcagtagatatggccagacaggtgagttttctctgcagccataacctctctatcaattttcatggaagtacaccagcatatagattggcttt

SEQ ID NO: 9819 - DNA, 549 bp, Homo sapiens
  MAP TO AP000354.1; EXPRESSED IN PLACENTA, SIGNAL = 1.8; EXPRESSED IN LUNG, SIGNAL =   2; EXPRESSED IN HEART, SIGNAL = 1.3
ctgaccatttcacccacttggcctccttgaggaatagggatggggagccctctggggatgagcaaggccttccaggacaggctcggttctggtcccctgctttttgaggttgggttaaaatgccgaccatggcagaggggtcacagctcaggttcccacacctcacttttcacagcctccaagggcagcagtgcacatggaggagacgtctcccacgaggccaaggcctccaatgctcaccgatgccctctgcgaagctggggtagaactcgtcagtgaagaggggctcaggcagctcacggaagtacagcttcagcgtgcctgcgatggcgttcatgtccgtctcgctcatcatcaccgacatgtccttcttatctggaaagagcacggaaatgcagcggcctccttgaagatcctgagtgagtcacctgccatccctgccttggctaaagcaccgtccctgctatgctgaccactgtgtgggtccctcccgggctttgagcagctcatctgactcctcccaagagctgtgcatggttctgtgtctgc

SEQ ID NO: 9820 - DNA, 575 bp, Homo sapiens
  MAP TO AL022319.2; EXPRESSED IN FETAL LIVER, SIGNAL = 3.5; EXPRESSED IN BRAIN, SIGNAL = 2.6; EXPRESSED IN PLACENTA, SIGNAL =   4; EXPRESSED IN HELA, SIGNAL = 2.8; EXPRESSED IN HEART, SIGNAL = 3.2; EXPRESSED IN LUNG, SIGNAL = 3.4; EXPRESSED IN BONE MARROW, SIGNAL =   4; EXPRESSED IN ADULT LIVER, SIGNAL = 3.2
tgtggtagactggagggaccaaggttcaagtcctggcacgtccccttcctggctgtgtgacagtgggcaagtgctttcccctcactgagcctcagtttcctcacctgtataatgtgatgtgccttgtccagcccctgtgagacagactcgaggcagcatgtgtgatgcgttctggcacacagtggggcctctgtctggggcactgcctgggctacgggctttctgatgggccagtcctctcggctctctctcctctgcgcgctgcaggtgatcactctggaaggctgggtggagatcatgtactacgtgatggatgctcactccttctacaacttcatctacttcatcctgcttatcatagtaagtgtcagggagcctgggctcctaggtgtgctcagaacccatggaccaggggacctgaggagggagggtctttgggagtccctagggagcccctcagagccaggacagccgggatgagggagcaggaagggctgtttctcagcaccaccgggcagcagatgattgaaggggctcatcaggggcggctgtcgggagcatccaacaccttcgat

SEQ ID NO: 9821 - DNA, 594 bp, Homo sapiens
  MAP TO Z83844.5; EXPRESSED IN HEART, SIGNAL = 1.7; EXPRESSED IN LUNG, SIGNAL = 1.5; EXPRESSED IN BONE MARROW, SIGNAL = 1.9
tccctgcatcttagtttcccagtctgcagtaggacttggtcattccttcctgcccagtcaagtggcttctgggaagaggaaagggcacgccagatggagaggggctccatccatgctctcagggaaatgtcacccccaccacgccttgtcatcttgtttccactctcatctgggactgtggccctcctgggttccctcctcccctgccccaaggggctggcctggtgctcaggcagggtggagggaggcacggacactcatcgccggccccaccctccctgcagaagaagcttcccctcatggctctgtccaccacgatggctgagagcttcaaggagctggaccctgattccagcatggggtgagcacagacggggcccagccctcacctggggataccaagacgtgatctcagctgggagggggtccaggtggtgagggcatccacatcagaagaatgaccaggctggggacagttcccaggtcagtgagggtggccaggcctgggagggtgttcagcttagcagagatgaaggatatctaggaggggccggaagtgagggaggagaggccccaccaagtgtttccagtgga

SEQ ID NO: 9822 - DNA, 578 bp, Homo sapiens
  MAP TO AC004032.7; EXPRESSED IN ADULT LIVER, SIGNAL =   2; EXPRESSED IN PLACENTA, SIGNAL = 1.2; EXPRESSED IN LUNG, SIGNAL =   2; EXPRESSED IN BONE MARROW, SIGNAL = 3.3; EXPRESSED IN FETAL LIVER, SIGNAL =   2; EXPRESSED IN BRAIN, SIGNAL = 3.1; EXPRESSED IN HELA, SIGNAL = 2.2; EXPRESSED IN HEART, SIGNAL = 1.6
aaagtgtggtggttggtgccccctagacccaagagtctctatttttaacacactctccagttgattcagacacagggaatctgcagggccaggtcaggacagagaggaagccctgagttctcatcttccctgggacagactctgaaatccagaggagtttgtgcaggcaaggctggctggcaaaggatgggtaatccaggcagagggggcagccaaggccccccggagtaaaagtgctggtgaggtctaagaccccagatctgctcacctagatctgcttcagagcattcccagcacagcaggccagtgcaaggagaagtagaaattaaaaaggatttgatgagcctaactgagtggagaggtccaagcttgcccatactgccaggccaaatttccctgcagcccccagctgggcacagctgagctatggcttccgtgagctgcaggatatttggaataaaggctcaaccttggaaaagtattaatgaaaatgtcacaggcactaaagtcaaagcagatgtgaagccagctacacgggcagacataactgataagaaacagcccaggagagaacaaaa

SEQ ID NO: 9823 - DNA, 572 bp, Homo sapiens
  MAP TO AC005300.10; EXPRESSED IN FETAL LIVER, SIGNAL = 9.8; EXPRESSED IN ADULT LIVER, SIGNAL =   6; EXPRESSED IN PLACENTA, SIGNAL = 6.4; EXPRESSED IN HELA, SIGNAL = 5.2; EXPRESSED IN BRAIN, SIGNAL = 2.5; EXPRESSED IN LUNG, SIGNAL = 4.8; EXPRESSED IN BONE MARROW, SIGNAL = 1.8; EXPRESSED IN HEART, SIGNAL = 4.3
tccccctattacagttagggctttatactgaactaatttttaatatgtgtgtacagaagttatattacctaagaatttcacttcaggataataaaggggatattccaatgttcttggtataaaaaggggagaactgggtttaaaagttgagaaacactagactagatcacctctaggtgtctttccaccactaaaattctctaagcttacggttttcctggaatagtgagtggcatggggaaggaaagactaacaacagtctcagaggtggtaagtggcagatccagaccagagcccaggtgtcctgactccaaggccccttgctgctgaaccaggctgcaggcagtcacactgagacagcctgagggccagagaggagacggagaaaagacctcacaactcatcaaagaggacctctcttaccttcaatgcgggggaagtcattcctcgggaggggctgcagagagacaaaggagaggctatcaacacaagtcgccttccactccaggagaaccacaaccccacctccagggtgctgggaggggaggggagacacactccacagaccccac

SEQ ID NO: 9824 - DNA, 582 bp, Homo sapiens
  MAP TO AC004624.6; EXPRESSED IN HEART, SIGNAL = 1.8; EXPRESSED IN FETAL LIVER, SIGNAL = 1.5; EXPRESSED IN PLACENTA, SIGNAL = 1.4; EXPRESSED IN HELA, SIGNAL = 1.9; EXPRESSED IN BRAIN, SIGNAL = 1.9; EXPRESSED IN LUNG, SIGNAL = 2.1; EXPRESSED IN BONE MARROW, SIGNAL = 1.4
ctaaacccggatgtggggtgccatgggggagtgtgcgatcccccatggcgtgtgttcagggggctaggggagttgaggagagctacagagagctgaggccatgtgagctgggccttgttgggaagggcatgtgaggcgtggctgacagcacggggccgtagcacagaggtgtgggagaacacagaggatatcaccgtgctggggacggagtgggtgagtcggaaagttccagaggggccaggtggccaactccgctgcatggcccaattctgaatacaatggggaacaagctttaggggacttaagtagggaagcctcagggtcagatggtcatttggggaatgccattctccctgcatgggagagagagatgatggaggcagggggagaagttcgagagctctctggagaagcagtgggcagttaagggtggggggctctggaggcagaggcctggagccaaaccctggctctgccactcgatagctgtgtgaccttgggcaagtgacttaacctctctgggcctcagtttcctcatctgtgaagtgggaatgatatagtaccaatcccctcagattgttg

SEQ ID NO: 9825 - DNA, 566 bp, Homo sapiens
  MAP TO AC004624.6; EXPRESSED IN HELA, SIGNAL = 1.4; EXPRESSED IN BRAIN, SIGNAL = 2.2; EXPRESSED IN LUNG, SIGNAL = 1.3; EXPRESSED IN HEART, SIGNAL = 1.3; EXPRESSED IN BONE MARROW, SIGNAL = 1.6; EXPRESSED IN FETAL LIVER, SIGNAL = 1.4
tcagctactgcatcaggcacaaaaagcagcagagtgtctctctgatcccatttggaaaaaagcccccgaaggaacctaataactaggaacagcagccccctgctctgcccccagtatgctggtttctggtcaagcaggaaagtgatgagagcccagaggagatacacacttgagagatcccagggtggctgcctcagctcagatcccagtggctggaagacaagcctgcagggtggaggctgtcagagcccagagcacagggaccacatgcagggaaagctaatcccagagtggtgggccggggcccactgcgatgcacgtgacagtgatgcacggggacagaggatgggccctcccatctcctcagaatcccaggaggtgtgtctttcaaaacaactgcctgaaaagatgcaaaccttaagtccgtgtttcctacacaatgaaaaacaaataaccttgtgggtcgggtaactcatacctggccctctactgcacagtagtcagctttcactgacttggtccaatttgtcacttacttatcgaacaccttctaggtgctgggccct

SEQ ID NO: 9826 - DNA, 576 bp, Homo sapiens
  MAP TO AC006427.13; EXPRESSED IN HELA, SIGNAL = 2.2; EXPRESSED IN PLACENTA, SIGNAL = 1.6; EXPRESSED IN BRAIN, SIGNAL = 2.5; EXPRESSED IN BONE MARROW, SIGNAL = 3.2; EXPRESSED IN LUNG, SIGNAL = 2.3; EXPRESSED IN HEART, SIGNAL = 1.7; EXPRESSED IN FETAL LIVER, SIGNAL = 2.2
cctgccgagtactcactgcagctagaaggcagcgggatatgctgcccacacttcacaccctggtttctgaattccagggcttcccacatggcctacagcaggaggtctcatgccagattggcaagaaacaaaagccatcatcctctccctacctctcacatctctaaagttggtacaattaagaaattaaactctatcatagcaaagtatgaaattaattttgaaaaaagtacaagttattcatttatcttaacatgtatgatgaaccaggcactcttcaagcttatgagctcccagtgagcaagaaacacaagatcccagccctcttgtgggacatgaaaaataaatacatgacaacacagaaacagggcatttgcaggtcaggatgacttagacagagtggttcaggaaggcctgttaaggaggtaacttttgatacatgaactttaaagaataaaaatgaagcatatattggaaaaactaggaaaataataatctaggagcaaagaccaataagggcaaatcctataataaaatggattcaaagaatcaaagaatggaagagggagtttcaaa

SEQ ID NO: 9827 - DNA, 558 bp, Homo sapiens
  MAP TO AC006427.13; EXPRESSED IN LUNG, SIGNAL = 1.9; EXPRESSED IN BONE MARROW, SIGNAL = 2.2; EXPRESSED IN HEART, SIGNAL = 1.3; EXPRESSED IN FETAL LIVER, SIGNAL = 1.9; EXPRESSED IN ADULT LIVER, SIGNAL = 2.1; EXPRESSED IN PLACENTA, SIGNAL = 1.7; EXPRESSED IN HELA, SIGNAL = 1.7; EXPRESSED IN BRAIN, SIGNAL = 1.7
agctgtgtgcttggacctgcagtgaacggtgtagtcactgatttttccacctaatctggggttcagaggactccgggctggtactggtcctccacaattcctcctagatgtaaaccagccccccgaccttttttgcagctgtttgactagctgagcccacttcctcattgataaacagctttgataaataggttgaactaaacagctcccagagacacttccagctctggtcatgcaattgatttcttcaggatgctttcagagacacatcagggcaagaagcatggggcatggggtgaacggaggagggagaggggatccagctttgaatggtaaggcagggcttctccacttcttgttgcattgccatgaaacaatgacctctcgctgtgctcccagtcccaaagaataagctgtaagctgatgtatgagaagaaagatccgaaggagatgcatagacacatagaaatcacaaataataataataataataaaacctaatacaatgcctaacttgctccttagctccttagaaaactgcaatgtggcactagacaa

SEQ ID NO: 9828 - DNA, 555 bp, Homo sapiens
  MAP TO AL022328.21; EXPRESSED IN FETAL LIVER, SIGNAL = 1.9; EXPRESSED IN ADULT LIVER, SIGNAL = 1.9; EXPRESSED IN HEART, SIGNAL = 1.9; EXPRESSED IN LUNG, SIGNAL = 1.7
tctgtggtcacaactccagggagtacttgatgtaggaggaagcactttccagacaggcggcgtcatgtcagggcccaggactgcatgcggcatcacctgctgtggcttctgcatgagttgtgtttaggaactgaagggtttctccaggcagagctgtcattgctgtgctaaggggtgcgtggaggcccaggcagagcccccatgcgtggaggccgctgtgcccagtgctcctgcagccagcgtttgctggactctctctgcagagcagaagtcctagggcaaggacctctccatcctgtcaaccccaaatcgaagggatgccccccacggaggctggggacttttctgacccaggtgaggggatcattggggtcagccctgacactgagaggccacctctctgggctcagtgacctggatgtcctggcaggtgggagagacgcaagaagcaggtgtggggtccacacttgagggagtgctcttgggcagagacgtggggagccagtgttgaggctgggcaggtgtcctcagctgggggacacctcagcaatgatc

SEQ ID NO: 9829 - DNA, 577 bp, Homo sapiens
  MAP TO AC006427.13; EXPRESSED IN HEART, SIGNAL = 1.8; EXPRESSED IN ADULT LIVER, SIGNAL = 2.1; EXPRESSED IN PLACENTA, SIGNAL = 2.3; EXPRESSED IN LUNG, SIGNAL = 2.1; EXPRESSED IN BONE MARROW, SIGNAL = 1.9; EXPRESSED IN FETAL LIVER, SIGNAL = 2.5; EXPRESSED IN BRAIN, SIGNAL = 1.8; EXPRESSED IN HELA, SIGNAL = 2.2
ggcttacttttgtcaggccctcatgtcttctgaagtcatcatcccttaaacattctaccaagagggcctgggtctcataccatatatcttggaaaattctgtggcttccttctcccatcacagactcccacatccagataccacatgcacatacacttgtcccatccccatgtcagcatctcgaaggtacctcagtaagattgtgttttgagcagtcggcatatcctcaaatctgtcttctttccccacttcttggctccaagatggtcggtacggtagatgccactggtgctccgttcatcagagatttgtctcaaccaaaaaggagctgcttcattcagatcacacttccacctcaactccttcagagaagactggggccaatgactgaccgacataagggtttaaagaccatactccttaccctaagaggagtccaactctgtcatgcaattcatgctccagagggctctccatgggatctaggctaatttgatccccagccaaaacaacatccacacttgggcttctttcccaccctgttcttctctcactccccttgtcctgagagcactcc

SEQ ID NO: 9830 - DNA, 565 bp, Homo sapiens
  MAP TO AL022328.21; EXPRESSED IN HEART, SIGNAL = 1.7; EXPRESSED IN LUNG, SIGNAL = 1.8; EXPRESSED IN FETAL LIVER, SIGNAL = 1.3; EXPRESSED IN HELA, SIGNAL = 1.5
agcaccagcatcttctccaggaggttcacagctgcgggggaaggtgcatcaggccagaccacgggaggccccacactccagcacccggtggcccccacactagccagccgtacccagagggcttgcattggtcaggatagaggcaaaatccttcttctccaattcggggaggcccttcatgtagttcttggcctgtgtgggaagaaagggtgaggggccaacaccaaggcccaggtccgcccccacccccacccagctccccactcaccccttacctcatcgctctgcagccgctgcacaaactcagccggaggcgtccccgtcaccttcatgatctccttcagctggtccaggtctgcaccgaggtcaggaacacagctcgggggccagagatcagggcccccactgcccccacctgggcaggagccatccccacccgcccctggtgccgccctgcggctggaggatacggtcgctgcccttgaacagcgtcttgcctgtgatcatctccgccatgatgcagcccacagaccagatgtccactgagatagaagccctggtcagc

SEQ ID NO: 9831 - DNA, 584 bp, Homo sapiens
  MAP TO Z97055.1; EXPRESSED IN LUNG, SIGNAL = 1.4; EXPRESSED IN HEART, SIGNAL = 1.4
ggaggggccaactatctttccccggtctaagtcacaaagcaaagcaatggggataaagcacaggtcaaagcccctgctatgtaaagaactgacgagggaggggtgatcaagggaggctgagtgcctgtgggcatggaggcctgtgtccgtgacaagggacaaaggacagggagcaagaatgttcctaaaggcctctaaatccttcacctggtgacccaggtggccaggtctcccctctgcactgggggaggaaatcccgaacccagctgctgagggtgggggcagtgcatagagcattccagctctgcagacagtgttgtgggagccgccgcggaccacctggctccaagtgggacagccttttcctgctgcagggacagcgtccgtacctgcccccacccaggagatggccagaggggcagagtcctgctcagacccagggggtcctggagggaaggggacagcctcctgcatgctcactgtctgccccttcctcctccttttccaatcccactgcagcactgggccctcctttcctctgcttgctcccttttctcacatttgctccccaaaaccaaactcct

SEQ ID NO: 9832 - DNA, 586 bp, Homo sapiens
  MAP TO AC007281.3; EXPRESSED IN PLACENTA, SIGNAL = 1.7; EXPRESSED IN HELA, SIGNAL =   2; EXPRESSED IN LUNG, SIGNAL = 2.5; EXPRESSED IN BONE MARROW, SIGNAL = 1.7; EXPRESSED IN HEART, SIGNAL = 4.2; EXPRESSED IN FETAL LIVER, SIGNAL = 1.4; EXPRESSED IN BRAIN, SIGNAL = 1.6
ttgattttatttttgcttttctatgcttacatatgagatatctggggtcctaggtattctgaagccttgtggtgacccttgaaaccaaggccacaccatttttccatgacaaatttcctgagataaagatgggcttaggaggatcgctaaacttggaaatttgagctctctgtcccctaccagctttgtgcctttcagccagttactgaggttctgagtcaactttctcacctgtaaaatgaggaagatggtcatggtgctgttggtgatggtgattttggatatattggtaatggtggtagtgatggttgtggttggaatggtggtggttctagatatgttggaggtggtagtgatggtgatgctgatggtgttggtggtgatagtgttggagatgatggcggtagtggtgattatttttggtgttggtggtggtggtggtgatgatggtgatggcactaagatttattaaacaacaagtttcatgctattcttaaagtatccgtatgacttaatctttgcaactatatcaagtagctactcttattagactcattttacagatgaagaagttgaagcttagaga

SEQ ID NO: 9833 - DNA, 573 bp, Homo sapiens
  MAP TO AC007106.6; EXPRESSED IN PLACENTA, SIGNAL = 2.4; EXPRESSED IN HELA, SIGNAL = 1.3; EXPRESSED IN LUNG, SIGNAL = 1.3; EXPRESSED IN HEART, SIGNAL =   6; EXPRESSED IN BONE MARROW, SIGNAL = 1.7; EXPRESSED IN FETAL LIVER, SIGNAL = 1.4
ttttaagcttagctggttggcaaccttaattccacttgatcatgtaaaataacacattcacaggttgtagattaggacgtaaacatttttgggctgttatactgcttactacaggctttcaaaaaataaaaaatgcaaaagacttttcaagttccaaatttccctactgcttggcccctgcccaactctcaatctccatcgcagacagccctctccctttgctcactgggctctggtcacactaacctttagtgacattctgatccaaacaagtgtcatctggcagaggacctttgcccttgctgttcttttgtgtgaagagttctgtcaccagacactcacatgcctggcttattcttgtcatttagtccatttccccaagtgaggcttgggagacttttctgcccaccccagataaaacagttccaactactacactcttataaattattatggtttattcccttcatagaacttatcaccagctgaattgccttatttgttttcttgtctaatgtctttttaacccactagaaagacacatgtgaatatgcatctcgtctgctgttttaa

SEQ ID NO: 9834 - DNA, 566 bp, Homo sapiens
  MAP TO AP000123.1; EXPRESSED IN LUNG, SIGNAL = 1.6; EXPRESSED IN HELA, SIGNAL = 1.3; EXPRESSED IN BRAIN, SIGNAL = 1.9; EXPRESSED IN HEART, SIGNAL = 1.9; EXPRESSED IN BONE MARROW, SIGNAL = 1.9
tatgcagcttcacctagggctgaagagcatgctccccagccacctgtttaaagatgctgccactgaaagcaaccctgccctcctcagcagcagggctgcagtgcagctgctgccatcttaacctgagtatttctccaggggcctggaaatcacctcatctctgcctaacacagccagtgcttatactcagcccagttccatcctccctccccagtgtctgagcatgctgcctggggacctggagagcgccctgcccctggagattgccctgccccatcattggcacctgagcactcctcctggggttctaaggatgggctgacccaacctgctgccaccactacaggtggcactcactcgcacatgccacctgcaagcctggggactggcttgcccagcctgtcccagccactatcaacaccagcacggaccatgtgagagccagatgattgtcccaccactgctactgccactgcccacaccatgcccactgctcaagaacctgaggatctgtccacctacctggcctaccactgccacttctgccacccaaacaagcctcctag

SEQ ID NO: 9835 - DNA, 553 bp, Homo sapiens
  MAP TO AC007556.2; EXPRESSED IN LUNG, SIGNAL = 3.2; EXPRESSED IN HEART, SIGNAL = 1.5; EXPRESSED IN ADULT LIVER, SIGNAL = 1.7; EXPRESSED IN FETAL LIVER, SIGNAL = 2.7; EXPRESSED IN HELA, SIGNAL = 2.6; EXPRESSED IN PLACENTA, SIGNAL = 2.2; EXPRESSED IN BRAIN, SIGNAL = 2.7; EXPRESSED IN BONE MARROW, SIGNAL = 3.1
ggaaaatattgtgaaatggcgttttcaaaaggcatctctccaggaacaagtaagttttaagaatgtgagcaacttggaaattactcatggcccctacattgaatgctgtcacagcttttctacttaacccagtctttgaaggagtggttctagcccccagtttctgccaggattgcgggctcccatgtgttgatgtgctctctgctatcttcttctatagccgcagtagctgtgctgttgacaatcctcttgatcgtcgtaattggagctctggcaattgcaggattcttccactatagaaggaccggctcccttttgcctgctctgcccaagctgccaaggtcagtttcattatggggaacgttgatgtttgaagcctaagaaattcatatgaagccatgtgaaggacttagttttctttctaagttaaaaaagcacaatacgcagttcaccgattccacagaaacaaaaagtagtgaggatgtaaagcagtcacttcaaatcccaacttcttagtcaagtgcttctctaaagcctgagtgacaagctgtgt

SEQ ID NO: 9836 - DNA, 574 bp, Homo sapiens
  MAP TO AL021707.2; EXPRESSED IN PLACENTA, SIGNAL = 4.5; EXPRESSED IN BRAIN, SIGNAL = 5.5; EXPRESSED IN HELA, SIGNAL = 3.6; EXPRESSED IN HEART, SIGNAL = 2.8; EXPRESSED IN LUNG, SIGNAL = 4.6; EXPRESSED IN BONE MARROW, SIGNAL = 2.5; EXPRESSED IN ADULT LIVER, SIGNAL = 6.7; EXPRESSED IN FETAL LIVER, SIGNAL = 2.5
cctagcctttaaccctaaccgagatgctcagagcagctttaaaggtcagcctctccctggcccaggatggtactcggtacgtcctgacttccctgaattgccacttgcctttgtcatgggtactaggttgggtgatttctgctgatcctgagctttgcttgctctgccccaccaccaacctggtagatgccaggggaccggccattgcggggtccaggacaaggcagagcgaggaaagcagagcacgtacctcctgactccagggcgtagtctgccagcccgatgcggtcctcactgtagcgctgcagggcctgcttcacgatgtggtgcacctgctgcaatgcaggcaccaggagacggttgcagcagggagcagacgtgtccccctgtcacctcgtggccgtgggccaaggacccatgggctgaccccttctaggcttgcactgtgctggtgcccaggcagatgtgggcacactgccacccacccatgccagccccacagcatgcaaagcctcctgcttggcacttccatcctggaacctgccagggagctggcagtgtgggactgtccagg

SEQ ID NO: 9837 - DNA, 566 bp, Homo sapiens
  MAP TO AC007564.9; EXPRESSED IN ADULT LIVER, SIGNAL =  37; EXPRESSED IN BRAIN, SIGNAL = 4.2; EXPRESSED IN PLACENTA, SIGNAL =  29; EXPRESSED IN HEART, SIGNAL =  13; EXPRESSED IN FETAL LIVER, SIGNAL =  51; EXPRESSED IN HELA, SIGNAL =  15; EXPRESSED IN BONE MARROW, SIGNAL = 3.2; EXPRESSED IN LUNG, SIGNAL =  19
cacgacgatagaacaatacttccatatttctgagcaaaaatgattactactctaaaattatctagctgtcttatcattcaagtgtcaagaaggaataaaaacattttcagacacataaagtctcaacaacttttcctcccgtgcaccttatcaaggagctacttgaggccaggagcggtggctcatacctgtactccccaccgctcaggaggctgagctgggagaattgctggagcccaggaatttgagaccagcctgggcaacatggtgagaccacatctgtaatgaaaagaagcaaaaaagctacttgaggaactgatacaccgaaacaaaggagtaaaccaaaacaggaagacaggacatccagtctcagaaaggtaaagaaaaatcccaggatgacaggtgagcacggggcccaaagagcaaccagggcaagcagcaggtcgaaagattccagtagtgctatcatcaggaagaagagtcacacacacacacacacacacacacacacacacacacccctcacatgtctaattgtattgagaagaggttacagaaccgggaaa

SEQ ID NO: 9838 - DNA, 574 bp, Homo sapiens
  MAP TO AP000350.1; EXPRESSED IN PLACENTA, SIGNAL = 2.2; EXPRESSED IN HELA, SIGNAL = 2.3; EXPRESSED IN BRAIN, SIGNAL = 1.7; EXPRESSED IN BONE MARROW, SIGNAL = 3.1; EXPRESSED IN HEART, SIGNAL = 2.2; EXPRESSED IN LUNG, SIGNAL = 2.3; EXPRESSED IN FETAL LIVER, SIGNAL = 2.9; EXPRESSED IN ADULT LIVER, SIGNAL =   2
taggggtcatgggtaggatggaagctgccagaagcctcttaggcctggccctgggtgggggtcactgctgcgggggtggcagatggggtcctggctgttcctcagggaggggcaggtaattggggtcttctgcaggggcatccaggagcagctttctgtggggaggggcccgtgttgagcacaggccagcacaggtccccatcggtggggatccttctgagggtggggagagggagggagggctctcaacactcacaggaagccaggggtctgcaggagcctcttgcctccaggctggttggggaagacgtcctccaggaagtagtagatatggcccaccgcaatccctgtgagacagccacggactgtggggtcaccctccacagcccagagtcctagaccagcagagcctgccccaggcccccatccacagcctggtggccctgcaggccccacagcatgagtgccccaaagccttgcacagagtgccagccccgggttggccgtgaaggacaagcttaaaaggcccagaagcaggcaggacccagggaggggagggcctgagaatagtgga

SEQ ID NO: 9839 - DNA, 546 bp, Homo sapiens
  MAP TO AP000352.2; EXPRESSED IN HEART, SIGNAL =  27; EXPRESSED IN BONE MARROW, SIGNAL =   3; EXPRESSED IN LUNG, SIGNAL =  39; EXPRESSED IN FETAL LIVER, SIGNAL =  96; EXPRESSED IN ADULT LIVER, SIGNAL =  90; EXPRESSED IN PLACENTA, SIGNAL =  74; EXPRESSED IN HELA, SIGNAL =  30; EXPRESSED IN BRAIN, SIGNAL = 2.5
catggcacttttgccatttccctgggaagttcaagtggctgtgccagtgccgtgctcctcccgtccccggggtgcatattcaaggagagatctgactgtgtgtgtgtgtgtgtgtgtgtgtgtgtgtgtgtgtgtgtgtgtgtgtgtgtgtgtgtgtgtgtgtgtgtgtttgccctctgcttgtgtcgcttccaggcagtgatgctggactccacagatgtcaacctctggtataagattggacatgtggccctgaggctcatccggatccccctggctcgccatgcttttgaggaagggctgcggtgcaatcctgaccactggccctgtttggataacctaatcactgtcctgtacaccctcagtgattacacaagtgagtcatgctttgatgctttcttccatgtgccagtggtttttggaacagcagaggaaaggcagtttgggtaaactgaaagccaaagttaacactgaaggggtttgccagactgtcagggagaatggcaatgttcttagatttctgctttattctgcatctctttcttg

SEQ ID NO: 9840 - DNA, 571 bp, Homo sapiens
  MAP TO AL022238.1; EXPRESSED IN BONE MARROW, SIGNAL = 5.8; EXPRESSED IN ADULT LIVER, SIGNAL = 5.8; EXPRESSED IN FETAL LIVER, SIGNAL =   8; EXPRESSED IN PLACENTA, SIGNAL = 7.4; EXPRESSED IN HELA, SIGNAL = 5.9; EXPRESSED IN BRAIN, SIGNAL = 4.7; EXPRESSED IN HEART, SIGNAL = 4.3; EXPRESSED IN LUNG, SIGNAL = 6.2
ttacagaagagggccagagcaaggtgggcatccatttcaggcttgtcctaagatgtgggcagagagttgagaagaccctggtacagatagacacaggaaccacctcagcctagaggggttttgtgtagagctgtgtagactgcatggatgggaagtatctgatgactttttaaaagtgttcaaacgccctgttagtagggaactgacaatacttcactgtcttcccaggattgccatgagaaaatcagagtgctttctcagcaggcagcttctgtggttaagcaggaagggggtgacaatgacctcatagagcgtatccaggttgatgcctacttcagtcccattcactcccagttggatcatttactggatccttcttctttcactggtcgtgcctcccagcaggtaagcttccaagaagcctcttttctgctgggctgcagaacctggggtactctctttgatgtttttgctttataggaggtatggtgggaatgggctagttagaagaaaatcagagcaggttgctggctaaaacttagatatttcggttttgtttctgttttgtttt

SEQ ID NO: 9841 - DNA, 592 bp, Homo sapiens
  MAP TO AC007539.8; EXPRESSED IN LUNG, SIGNAL = 2.5; EXPRESSED IN BONE MARROW, SIGNAL = 5.2; EXPRESSED IN ADULT LIVER, SIGNAL = 2.3; EXPRESSED IN FETAL LIVER, SIGNAL = 2.3; EXPRESSED IN BRAIN, SIGNAL = 3.8; EXPRESSED IN PLACENTA, SIGNAL = 2.4; EXPRESSED IN HELA, SIGNAL = 2.2; EXPRESSED IN HEART, SIGNAL = 3.3
cataggaaagaggcaccagcaacatctgcagaggggtgtggcatgccgtgtcccatatgctcagaggtttagagtggaatatggctagttggggtgggtttcctaggtgaagtgatgtttttgagcaagactttgaaggctcgctcaaagacaagtagagttgctgagaagaagttgtactctgtggaggactgacatttctagatggacagccgctcactttcagccaagaccacttgtcctcccactgcccccagagaagggcagctccccacagagtgtccgaggtccatgcactgacttcttgtactcgtctgtttcccccactgcatgatcgacttctccatggcagagaccttctcctgctcattagtagattgcctgtgtcaagcccatggcagggactcaatgaatatttttgaattggagccctgatccctatccctctgaggagcagcagtcctggtgttagctgtgacccaggctgtgaaaaaccagagagcagctggcatttctggtggggctgcttgctgacagatcttggtgccacatggcgagcagaggagccccagggcttggtggaggtgtggga

SEQ ID NO: 9842 - DNA, 568 bp, Homo sapiens
  MAP TO AL022312.7; EXPRESSED IN HEART, SIGNAL = 1.4; EXPRESSED IN LUNG, SIGNAL = 2.3; EXPRESSED IN BONE MARROW, SIGNAL = 1.4; EXPRESSED IN ADULT LIVER, SIGNAL = 1.5; EXPRESSED IN FETAL LIVER, SIGNAL = 2.6; EXPRESSED IN PLACENTA, SIGNAL = 1.3; EXPRESSED IN HELA, SIGNAL = 1.4; EXPRESSED IN BRAIN, SIGNAL = 2.4
ctcctgtgtgcatccaagcctgggggaagcagaaatagacaagagggcacacccactttttgctaaaggcatgagccagaattggcaggctcacctctgctggcctctcattggctgggactcagtcacatggccacaagcagctgctagggaacctgggaagtgtagtcttcagcggggccgccatgtgcctggcctcaccttgggagttatcttattgatggaggagaagagaatggatatgggggaccagtagcatctctgggagagggggagggagcagcaataactcagtcgtcggatccagctctcattgtcagagtttccggaacagcttgctcctgtttccctcactgtgcagcccagggctgggggcagtgaggagcttgcagctctgtgggaaggggaaacaccccctcccctcggcccctcagacgctacccaatgatgccggtttgcagagttggcctgtggaatggctcatgtttgtgcgtgtgtgtgtgtatatttatgggcatgggtgcatgcttggtgtgtatttgtacatgtctgtattgctgtgtccctg

SEQ ID NO: 9843 - DNA, 598 bp, Homo sapiens
  MAP TO AP000352.2; EXPRESSED IN PLACENTA, SIGNAL =  18; EXPRESSED IN HELA, SIGNAL =  14; EXPRESSED IN BRAIN, SIGNAL =  23; EXPRESSED IN BONE MARROW, SIGNAL =  15; EXPRESSED IN HEART, SIGNAL =  28; EXPRESSED IN LUNG, SIGNAL =  11; EXPRESSED IN FETAL LIVER, SIGNAL =  32; EXPRESSED IN ADULT LIVER, SIGNAL =  34
tgaaaccttgggttgacttttagtatttgaaatcagggtcattttaaataggctgtgccaaccctttcagacacacaagatctgaaaggagcagaaaatgggccttgggccttgagtcccttttggtggctctcatttgaagagataacacatccctggactccttcctgtggtgctgcccccttggtagtgggcgggaaccttggcaagcacctcccccacctgcttgcttcacaggccagttgggcatctcatctctgtgtacatagcccctgcctctccagctctgccacagcagcccaccccagcatcatgacctgcaggtggcacccaagactgtggtgagccccattagcagagccttcctcagggccacttaggtaccttgattaccccttaaacaagggtttgtctagaatcaccacaatgccccccagggccagtaccaatctctgctctctggttttttagatggttggcagttccagattctcacatctgtgtctgagaggctcaggaagggcctggcaaagtgtagtcagcagccttttgtccctgccaggtcccttggcttgtgcttgccctgttccactgctgt

SEQ ID NO: 9844 - DNA, 584 bp, Homo sapiens
  MAP TO AP000352.2; EXPRESSED IN HELA, SIGNAL = 6.3; EXPRESSED IN HEART, SIGNAL = 4.7; EXPRESSED IN BONE MARROW, SIGNAL = 9.1; EXPRESSED IN LUNG, SIGNAL = 6.8; EXPRESSED IN FETAL LIVER, SIGNAL =  13; EXPRESSED IN ADULT LIVER, SIGNAL =  10; EXPRESSED IN PLACENTA, SIGNAL =  12; EXPRESSED IN BRAIN, SIGNAL = 5.9
accaccattctactttctgtctgtatgaattttcctattctattttccacctataagtggaatcatataatatttgttcttttgtgtctggcttattttacttagtgtagtttttaaagtttatttcatgttgtagcatgtgctagagtttcctgccttgttaagtttgaatagtattctgttgtatgtatacaccacattttgttcattcatctgttgttggacacttgggttgcttcttaccttttggctattgtgataatgctgctatgaacatgagtgtacaagtgtctgttcaagtccctgctttcatttattttgtgtatatagccagatgtggaatttctgggtcatgtagtaattctgtacttaattttctgaggaactgccatacctttttccatagtagctgcaccattttacattctcaccaggaatgtacaaagactccagtttctccaggtcctcatcaatacttgttattttctggctttattttgctttgataacagcctagatggagggttttaatgctatagtttctactttttttcatattgtatagtggtcccagtgtccatttt

SEQ ID NO: 9845 - DNA, 564 bp, Homo sapiens
  MAP TO AL008723.8; EXPRESSED IN FETAL LIVER, SIGNAL = 2.5; EXPRESSED IN PLACENTA, SIGNAL = 3.1; EXPRESSED IN LUNG, SIGNAL = 3.6; EXPRESSED IN ADULT LIVER, SIGNAL = 3.4; EXPRESSED IN BRAIN, SIGNAL =   4; EXPRESSED IN HELA, SIGNAL = 4.1; EXPRESSED IN BONE MARROW, SIGNAL = 8.4; EXPRESSED IN HEART, SIGNAL = 2.7
gacactcaccctgggttctcagtgtgtgtaaggggggattcctggcacccagtgggatagtagcccagggggagaggctcccagactcccaggggtgtctcctggggaaacaggccaggccatgcatttggtcattgaacacctctctctccattctctctcctctcctcttcctccttgcagcttggcccccaattgctgcctccttcctggatgaagctgtccctggctgaaccttcagatgcaccctctgtccctaccttggtcaagactgtctacccacccaccacggcctctgtttctttagtcttgaaatcctattcttggcctggtgctccactgcccctgacccctggaatgccctcttttctctctgcccagctccccagccctgaaagccgggctgtccaggacactgcagcaccatcaaattcatgaggtctcacgtttggggcccgcctcgattcttcaccttacagcaggttcagaggcgtaaaaaattgggaggaagtcaggacggaaacacacacaaaaggccggcaggtggctcaggatgcttgtgaa

SEQ ID NO: 9846 - DNA, 558 bp, Homo sapiens
  MAP TO AP000352.2; EXPRESSED IN FETAL LIVER, SIGNAL = 2.4; EXPRESSED IN PLACENTA, SIGNAL = 2.4; EXPRESSED IN BRAIN, SIGNAL = 1.4; EXPRESSED IN HELA, SIGNAL = 1.6; EXPRESSED IN HEART, SIGNAL =   2; EXPRESSED IN BONE MARROW, SIGNAL = 1.7; EXPRESSED IN LUNG, SIGNAL = 1.8
gtgccagtgatgaaaccttgatcacctcccccacccccatggacatggcagctccaggagcagctctgccgcctctgtgcaggcaggccattttccactatgcttggagtattcctctgacagggtggtgatcaggtgttgtggccctctccctttagctggaagtgcctcggagagagcttgctggccatgtacaatcatctcaccacctgtgagcccccacgtcccagccttggcaaaaggattgatttgtcggactaccaggaccccagccagcctcttgagtcctccatggtggtgacgccagttaacgtgatccagccaagcactgtcagcaccaacccagctgtggctgtcgccgagcctgtggtctcctacacctctgtggctacaaccagcttcccactgcacagtcctggtctgttggagacaggcgctcctgtgggtaagcaggccccctgaatttggcttccggggagaccccgttcactgagcccagcaggaatgagactgctggggagccctgcctccctagacagaagggtcatgctgatgctc

SEQ ID NO: 9847 - DNA, 588 bp, Homo sapiens
  MAP TO AL008723.8; EXPRESSED IN LUNG, SIGNAL = 2.7; EXPRESSED IN HEART, SIGNAL = 2.2; EXPRESSED IN BONE MARROW, SIGNAL = 4.5; EXPRESSED IN FETAL LIVER, SIGNAL = 1.9; EXPRESSED IN ADULT LIVER, SIGNAL =   3; EXPRESSED IN PLACENTA, SIGNAL = 2.7; EXPRESSED IN HELA, SIGNAL = 1.7; EXPRESSED IN BRAIN, SIGNAL = 1.9
cattcagaagcatttgaaagactgaaaaagtgattatttcatttaaaggtatggttcaaatttttgtatctggaaagtgatcacttgaatttgatgtactccaatgtctcttccctctacccagatgctatgattactttcaccaaagccaaagacaagggaactctagttcacttctacgtctgtacttctccagaggattctaggtgggaaccagggttcactcaccgtccagctatcaggagctctttctccgacgcttgcttccgcatcttggtgtagaggtcaatggtgaagagggtgctggcgctgttgaagatggaggtcagggagctcatgagagaggccagcatgaccgaaagcatcaggcctcgcagtcctggagccgggaaagggtacaagcactggttagtggctggacactgccttgctaaaccagagagggttgaaaggttaaaagtatcatctggaacataggttaactgatgtccttatcaatacacatcagcatgtggagtttcctgcatattttcctggtcacctgagaataatccagtataaataagtcaggcacagaaagacaaaaca

SEQ ID NO: 9848 - DNA, 565 bp, Homo sapiens
  MAP TO Z83844.5; EXPRESSED IN HEART, SIGNAL = 1.3; EXPRESSED IN BONE MARROW, SIGNAL = 1.5
cactcagcgtcatcatctggaaaatgcagactgtaacaatctctaccctgtagggtggctgctgaggactcagcttggctcagtgcccactgcagggttggcactcagtggataagctgatttaactgtgacaatgttaagaccattctgggcggtgtctttcacactctttggaaaccctgggctggagaattctcagggctgggtgcgttctgcccctggcctaagcctgcctccgcccttaggtacctgatgaagttcctggcacggctggccgaggagcaggaggtgaacaagatgacacccagcaacatcgccatagtcctgggacccaacttgctgtggccacctgagaaagaagggtgaggggccgcgggctgggggaggtggcaggaggaaggcagatcccatcccaactatctgttgtctatttttccccggggccttggtgtccccatttttggagtgggttgagcagctcctgtttttgaggctgccgtgaggaacaggccaaaggggctgtgcaggccacagggctttggagagaggcaattctggcattttg

SEQ ID NO: 9849 - DNA, 586 bp, Homo sapiens
  MAP TO AC008022.1; EXPRESSED IN PLACENTA, SIGNAL = 1.3; EXPRESSED IN HEART, SIGNAL = 1.5; EXPRESSED IN ADULT LIVER, SIGNAL = 1.4; EXPRESSED IN FETAL LIVER, SIGNAL = 1.4
  unsure 508
tcagcaagatagccttcaagctctgagattctttcctccacttggtctgttcggctattgatatacttgtggttgcattgtgaagttctcatgtgtttttcagctccatcaggtcatttatgttcctctctaaactgtttattctggctaacagcttctgaaatgttttatcatgcttcttagcttctttgccttgggttagaacatactcctttaacttagcaaagtttattattacctaccttctgaagcctacttctgtcagttcatccatctcagctggagaggtattgcagtcatttggagaagaggcactctggctttttgagttttcagcaattttgttttgcttctttctcatctttgtaagcttatccaccttcagtctttgaggctgctgacctttggatggggttttgtgggatcttttttgttgatgttgttgtttctttctctttgttttttagtagtcaggactttcttccatagggctgctgcagttttctgnggggtccactctagaccctattcaccttggcccctagaggtgtcaccagtggaggctgcagaacagcaaagatggctg

SEQ ID NO: 9850 - DNA, 571 bp, Homo sapiens
  MAP TO AP000352.2; EXPRESSED IN LUNG, SIGNAL = 4.4; EXPRESSED IN BRAIN, SIGNAL = 6.3; EXPRESSED IN HELA, SIGNAL = 3.8; EXPRESSED IN BONE MARROW, SIGNAL = 3.7; EXPRESSED IN HEART, SIGNAL = 3.4; EXPRESSED IN ADULT LIVER, SIGNAL = 3.2; EXPRESSED IN FETAL LIVER, SIGNAL = 3.5; EXPRESSED IN PLACENTA, SIGNAL = 3.4
agaggtctcctgctggctccccccagcatcctcagtggaatgtttgaagaaccagaatggacagttggccaagagatgggccctggcttggcactggctatgtgcaggaagtggcacttcacagaattctgtttgggggactagatacaggggtccaagaaggtaagtgctgtgtccccacagtgaccggtatgctcatgtgacttggttgatttcctcagggcacagcaggtgacacaggtctgggagggagggagtctcatcatctggggctttggtctgtagttcaaggtgcagtgcatgctagcaaacgatggccagctccggcttccctggctgttggtgccacactggagcctggcttgctcactgctcagcctccacttggcagtggaccttacctctgtatcccaggccttctgctcccaggtggacctgggtcttaataaaccccaaccagcatgtcctcactgctgaagccgtctttgggcctgaggggcaatggctgatatgaactctgttgggctcaccattgctttgggaactttcccctttccctcttttgggagca

SEQ ID NO: 9851 - DNA, 578 bp, Homo sapiens
  MAP TO AP000353.1; EXPRESSED IN PLACENTA, SIGNAL = 4.9; EXPRESSED IN BRAIN, SIGNAL = 6.7; EXPRESSED IN HELA, SIGNAL = 4.8; EXPRESSED IN HEART, SIGNAL = 3.5; EXPRESSED IN BONE MARROW, SIGNAL = 6.4; EXPRESSED IN LUNG, SIGNAL = 4.9; EXPRESSED IN FETAL LIVER, SIGNAL = 5.7; EXPRESSED IN ADULT LIVER, SIGNAL = 4.9
gatgtggtctggtagggaggaagggcctccccacccaatttctggtaccccatacctgccagagttggggggaaggagagaaagtctccaaagcccagggtactgtccttctcagcaagaatcagtcatgcccattgtactttaattcgccaccagttggttgtgtaaccttggaggaaccccctccctgcacccagtgagcagatgtgaggtatatgttaggggtgggtacagtggacccaccttccagagcaggtctcagccagtgcctctctcctcagagagagccagtagtccagaaggaggctgttggagcccagcagacctggacaccccaaggcagggacctcatctaggacagcattgccattgccctcccaaaacctctcctagctcagcaggcagggagtgcctagtgactgaattcctctcatcctcaagaattccctaggacgaatgactgggaattagcagccccagagcaaggggaacaggtatatcctgactcagtcacccaggaacccagctgtggccaggccccaaggtctgtgcctgagacatctgtctcctgttgcagg

SEQ ID NO: 9852 - DNA, 561 bp, Homo sapiens
  MAP TO AP000356.1; EXPRESSED IN FETAL LIVER, SIGNAL = 3.6; EXPRESSED IN ADULT LIVER, SIGNAL = 2.6; EXPRESSED IN PLACENTA, SIGNAL = 2.3; EXPRESSED IN BRAIN, SIGNAL = 2.2; EXPRESSED IN HELA, SIGNAL = 3.7; EXPRESSED IN HEART, SIGNAL = 2.3; EXPRESSED IN BONE MARROW, SIGNAL = 4.2; EXPRESSED IN LUNG, SIGNAL = 4.6
tttggtctaatctgcctcccgctgaaacccagcctcattcagccccaccgaggctttcagagttcaggtctctcattcagggtttgagaccccaccgggctcagagacacctgcagcctgcagcggtcccagatcacagcctcagggatgggaccaggagccagcccacatcccacctgcagcagttcctgtgcctttaaagcctcccctccccccgccccgcccccaggccactaggggagggaaggaggagctgggtcacagcagggaatcttagcttggttttggtgtgctgctggatgaccagaccgggcgtcgggtgagcccagaagtgagagcagttggctgtgccccagtgctgtgtgacccagaggcgccgctcaccctctctgagctggtggacatcataggtggggaagctcaggtcagggcactcccatgagtgtctggaggcctgagtcccattctcagctctgccatatgcttgctgcgctctagaggagttcctcttcctctccaagcctcggtttatgtacccgtgcagtgggagtgagttgcact

SEQ ID NO: 9853 - DNA, 546 bp, Homo sapiens
  MAP TO AL022319.2; EXPRESSED IN HELA, SIGNAL = 2.9; EXPRESSED IN PLACENTA, SIGNAL = 2.7; EXPRESSED IN BRAIN, SIGNAL = 3.9; EXPRESSED IN LUNG, SIGNAL = 2.2; EXPRESSED IN HEART, SIGNAL = 2.8; EXPRESSED IN BONE MARROW, SIGNAL = 3.5; EXPRESSED IN ADULT LIVER, SIGNAL =   4; EXPRESSED IN FETAL LIVER, SIGNAL = 2.4
cagcacacctgccagaaaagtatttgttagctccattctgtgggtgaggggacaggagttcatgaatttttttttgcccaagatcacacagctggataatttcagagctgagaccaaaacccaggaccgtgggtccagcactttttcttctataacagtaactacaagagtatgtggcaggcacatagtaggtccttaggaaagtttgttggacgagggcacagctctgccacacagagaagacctctttgtccctctgcctcccaagggcagaagaatagagagctgaggaggggtggctgcagctggagtcactcacagtcctcacccctgcattccgcctccccatgtctcccaggctctgatgtccctctttgtcctggcatccaaggatggttgggtgaacatcatgtacaatggactggatgctgttgctgtggaccagcaggtgggtgtagctgggaccaggccaagccttgatgcagggaggaacatggtgtccttggggcccagtggtttgaatttgaaactggtgccaatgagttc

SEQ ID NO: 9854 - DNA, 597 bp, Homo sapiens
  MAP TO AP000356.1; EXPRESSED IN HELA, SIGNAL = 1.5; EXPRESSED IN HEART, SIGNAL = 1.5; EXPRESSED IN BONE MARROW, SIGNAL = 1.6; EXPRESSED IN LUNG, SIGNAL = 1.8; EXPRESSED IN FETAL LIVER, SIGNAL = 2.1; EXPRESSED IN ADULT LIVER, SIGNAL =   2; EXPRESSED IN PLACENTA, SIGNAL = 1.4
cattctgagcgtggggtcccagtggccactgtggctggccatgtgtcctgagtggcaagggacactaggaagctcccggaagggacactaggaagacgagcgctgagtgacagggccacccacctgtgacaggcgctgcccctgttctgctccgttctcctgtgtggacgggtgtgaggggtggtctagctgagtccaccccacctgctgcctcacatgagccccctctgccccagtgaggtgttctgccgggatagaaaggtgcttcgggagggggagagactgaccctgccgcagctggctgacacctacgagacgctggccatcgagggtgcccaggccttctacaacggcagcctcacggcccagattgtgaaggacatccaggcggccggtgagtgggtaacctcaggggcctgggtgaggaactctgcagtggaaaccctgagctgtagcccagagctatggggtcctcctgtcttgcctgagcctgcaggaagttcctggtggaggagggtcagtgactggccatgtgggtccacagctcctgcttatatcaaaaccaagagaggccacacagtccaggagagcaagtcc

SEQ ID NO: 9855 - DNA, 594 bp, Homo sapiens
  MAP TO AL022319.2; EXPRESSED IN PLACENTA, SIGNAL = 1.2; EXPRESSED IN HELA, SIGNAL = 1.9; EXPRESSED IN BRAIN, SIGNAL = 1.7; EXPRESSED IN LUNG, SIGNAL = 1.4; EXPRESSED IN HEART, SIGNAL = 1.6; EXPRESSED IN BONE MARROW, SIGNAL = 1.3; EXPRESSED IN FETAL LIVER, SIGNAL =   2; EXPRESSED IN ADULT LIVER, SIGNAL = 1.5
tcctgtccatttcctctctgagagggaggggcttgcccatctcaggaggagagccagattcctggtcctatcctcacctcctgcatcccctgcgaaggtgggcgcactcaggacagggctgcagtcccactgtcagcccctgagtgattgtggcccagggtcaccctcaatgggcagatagggactatgtgcggcaccgggtctgatgctgaactcagggctcaggggcttctctccgctccccagggcaccccctctacatgttctcaacatggggtgtccccatcaacatggggtgtccccacaaagcacatgttcctgggaggcttggagaggcaaaagtcaggacctctgggcttcggttggctgcaggtcagggtgcaggccgcctgcaaccacagggagggggcgtgtttccaggcagccacgcagagggacatgggcacaggtctgtcactgcggccccctcctgcagccaggtgggcatttggagggagccccaggagtgctgttcgcagctgtgacgggcaggccatgggcgtctcaggaacacgccaagtgagaggcgctccacccaagccagagcactgcaag

SEQ ID NO: 9856 - DNA, 540 bp, Homo sapiens
  MAP TO AL022329.9; EXPRESSED IN HELA, SIGNAL = 2.4; EXPRESSED IN PLACENTA, SIGNAL = 2.5; EXPRESSED IN BRAIN, SIGNAL = 2.6; EXPRESSED IN LUNG, SIGNAL = 2.7; EXPRESSED IN HEART, SIGNAL = 1.7; EXPRESSED IN BONE MARROW, SIGNAL = 1.9; EXPRESSED IN ADULT LIVER, SIGNAL = 4.2; EXPRESSED IN FETAL LIVER, SIGNAL = 5.1
tggaagatggaaagtgagggagtccattggaagagtccacagggtcagcagccagacatagagcaaagtagaagagatggagggggaatctgaagatggtgtcttcagttctccagcatcctttttttccctcgctgtctggcctccgatatgaccatcacagaaaccaggtgtcaggcagtcagatcattcctgctgagcatctaagctccatgctggtgttctcactggccaacccctctgcctgcctccaggaaccttgtggaacagctgaggaattacatgcttacactcaccaaccagactatgggcaagacagaattctaaatgaagatccaattaataaagaaccaaatagtgacctaagccttgtggccagtggaggggagggcaggtgacagcgggtgtttgggtggaggctgcaggaggctgtcatagaatcctgcagggtgacattggctggcaccctcaggcatggtgtcatggaggaaggtgtccccacaggcacgtgaaggatggcggagtcagagccaggaaggg

SEQ ID NO: 9857 - DNA, 585 bp, Homo sapiens
  MAP TO AL022319.2; EXPRESSED IN ADULT LIVER, SIGNAL =  12; EXPRESSED IN FETAL LIVER, SIGNAL =  17; EXPRESSED IN HELA, SIGNAL = 3.9; EXPRESSED IN PLACENTA, SIGNAL = 3.8; EXPRESSED IN BRAIN, SIGNAL = 5.7; EXPRESSED IN LUNG, SIGNAL = 4.9; EXPRESSED IN HEART, SIGNAL = 3.3; EXPRESSED IN BONE MARROW, SIGNAL = 3.5
caccagcctctccatgctcccgacccatgtcctggcgcttcctgcccccccgccagggcccgtgcagacctctactgcagaccccagcctgccctcccgagagcctcccaactcctagacaaaataagcaggttcagattccaggcctgaaacttctagctgggtgaacctgggaaagtttcttccccactccgagcctcggtttcctcacttgtcgaatgtgggtaactctccttgttactgttctgactcctgcagttcccccctcttggctggaaattagagctgggcagccacggaggcagccaaggccgacaacggcctgtgcctcacctgacttctggcagatgcgtgaccacccttccggtcctcagttgtcaccaagtccttcccctgcctgatcctaccagatgccaagccctgaaggtaccacatccgcaccgctgctgccacatcccacctcactctgggcccgtccatcatgccacccctggcccggggcctcacctgcgcttttgaataaatggatgtgagtgaatgaatgtgatcatagaggctggcctggctatcagccatgttggggac

SEQ ID NO: 9858 - DNA, 567 bp, Homo sapiens
  MAP TO AL023553.5; EXPRESSED IN PLACENTA, SIGNAL = 2.3; EXPRESSED IN HELA, SIGNAL = 2.9; EXPRESSED IN BRAIN, SIGNAL = 1.9; EXPRESSED IN LUNG, SIGNAL = 2.7; EXPRESSED IN HEART, SIGNAL =   2; EXPRESSED IN BONE MARROW, SIGNAL = 2.2; EXPRESSED IN FETAL LIVER, SIGNAL = 2.4; EXPRESSED IN ADULT LIVER, SIGNAL = 3.9
ctggcagagggacacaagacctaggccccaagaatgtgcagaaatcccatgccctcaccccacaccactgtggttcaaacgactggctactcagtgtctccttatctgccaccgtgtcatcacccccacttagaacccttgcaagaactgtccaagaattagcaagaagctcagagaactcagagtcgtggccagacctcaccaagataatgccacaagatctgtgccctttgtcagaccatggatttctgtgtgggccccctctcaaacgattcatctaatcaaatactagaagacttgtcccaacaggacctctaccccaaagggactatattcccttcttggactttccacaccttctctctcaaggtccacacctccatcccccaacagaccctcatcttcaacctcacaaagtaaccagaagccatccacttaaagactccatgagttcccttcactatctagcaacccccaaatcaacctcacctcttctgaagggacctgtctcatgcgtaaagccagctaagcatcctctttctggctccttctcagcccatcaccttc

SEQ ID NO: 9859 - DNA, 571 bp, Homo sapiens
  MAP TO AC007106.6; EXPRESSED IN HEART, SIGNAL = 1.7
tcatttgaaggagtctcatctcctaggctttactgactggctttcagaaagaaacatcagagaaacgtctttaccaatcagcccagctagagaatctgtggctctcagatgttctctatgatgttcactcatacacttcttgctccttcttaggaggaaggattcttaatattgttctctttctcccaaccccacaaagccaggctcagtgcagagagactcacattcattttccctaggttagtgccctgaaatactctcagttatgtcccttttcccaatactacaaggtaacactgactgcaagaagcttgcactcccccaaacaaggggatgtgtttgaggagctggacaaggagtagggggatgcataagctacataaatcatttagggtatgtttgggttagttgtgtgagacctcccaagggttccataagtgggcttcctgacagagcagttggtaagatctgtggcttctgttccctgatcccagcctctcccaaccactcagctgcgctgatcacctaatttatctgggtgagaatagaaagaaatgagtattgggggcag

SEQ ID NO: 9860 - DNA, 580 bp, Homo sapiens
  MAP TO AC007564.9; EXPRESSED IN LUNG, SIGNAL = 1.8; EXPRESSED IN HEART, SIGNAL = 2.3; EXPRESSED IN FETAL LIVER, SIGNAL = 1.8; EXPRESSED IN BRAIN, SIGNAL = 1.8; EXPRESSED IN HELA, SIGNAL = 2.3
gcccaattagacacattttggatctgtgatctatagaaccattagataacaaatttgtggtgtttgaagccaaatagttcatgctaatttatgaccacagcaatgggaaactaacatagatagacttgatcctccatagaaagaaagaaaaaagaaagaaagaaagaaagggaagaaaaataaagaagaaagaaggagagaaaggagaaagaaagaagaaagaaagagaaagaatgaatgaatgaaagaaagagggaggaaggaaagaaggaaggaggggagaaggaggaggaggaaggaaggaagaaaaagaagaaggaagaggaggaggagggagaagaggaagagaagaataattcagcataaaccagattgagcagacataataaacagcaagatcaatatcccaaaagtatcatattatagaaaaatatgacagggaaagaaaattagtacgttttaaatgattggcagcataaaataaataatccaaatcacccaacaagacactgtgagtaaaaaatgggcagatttagtggagaaggaaatagaaattccagaaataaaaagtgaagccttt

SEQ ID NO: 9861 - DNA, 573 bp, Homo sapiens
  MAP TO AL008723.8; EXPRESSED IN HEART, SIGNAL =   2; EXPRESSED IN HELA, SIGNAL = 1.5
gttgggggcgctattgagggccgggtacactgcctgcggtggaggggtgggttgggtgctatcaggggtctgtactgcctagcagggagcgggtgggtgtgctatctggggctgcactggctgcagcaggggcaggttgggtgcactatagggggctacactgcccttggcagggggtggtttaggtgagctgtctgtggccgcactgcccgaggtggggagtaagtttgggtgctatctgtggctgcactgcctggaggcaggaagtgggttgagggtgctatcctgggctgcttctcctggtggggagcaggtaggggcactatccagggttgcactgcccggggtagggggcgatttgggtgccatatcggggcatcactgcccacggcaggggtctggttggggtcgctacccatggctacactgtctacagccactgcctacggcagggagcgggttgggggcgctatcccgggctgcgctgcccaaggcagggggtgggttgcgggtgccattggtgctgcagtgtccgaggcaggggcgggttggggttgccatctggtgctacac

SEQ ID NO: 9862 - DNA, 598 bp, Homo sapiens
  MAP TO AC007556.2; EXPRESSED IN ADULT LIVER, SIGNAL = 1.8; EXPRESSED IN HELA, SIGNAL = 1.7; EXPRESSED IN BRAIN, SIGNAL = 2.1; EXPRESSED IN PLACENTA, SIGNAL = 3.1; EXPRESSED IN HEART, SIGNAL = 1.4; EXPRESSED IN LUNG, SIGNAL = 1.4; EXPRESSED IN BONE MARROW, SIGNAL = 2.1
ggataagcctaggagtgctgcatataatgtgaaaattgcctcaaagttttagcattatatgcatttatctaaatggtattcagatcacgatcagaaataggaatcctgactcccccagtgccctctgtcctctccaaggcttatggaaaggggttatctcaagatgtcctatagttggttacgagtaggtgcttcttttgatacaccacttgactgttatttgtggctgatctggtttgtaatgctgggattttgtttttcagataaaggaaaagaaagaacatgtgctgaaaatatatgcgagcaaaattgtacccaattaaatgaaggaggatttatctgctcctgtacagctgggttcgaaaccaatgtttttgacagaacctcctgtctaggtagagtatattttttccaattcctgtttaggtgaactttacatctaaggttctccacccactcccctttgttaaataaatcactatttaattcccttaatggtaccatactcatggtttcatggttctaggtcattaaactactcaagaattgctttcccccacctgcatgcatgctatctgaccagtgcctacctgagtgc

SEQ ID NO: 9863 - DNA, 547 bp, Homo sapiens
  MAP TO AC006548.19; EXPRESSED IN FETAL LIVER, SIGNAL = 1.5; EXPRESSED IN HELA, SIGNAL = 1.3; EXPRESSED IN HEART, SIGNAL = 1.7
ctctgccccgtaaacaggaggcctctcctgcccctgggctctggcctggtcacctgcatggtctgcagtctcctgtgttctcctattggcccgtcgagggagaggctgtgagttgcacggaggaacctcacccctttccctcccacctcccaaactccagggagctcagctgtgttaccttgagaagttgaggtgagtctctcgcaccaggtggctgagtctgcggaaggccctggagtcccagtggaggttgctgttgaacagatgctgcttctggtacatggggttgtggctggccgagcggtctgggggatgaatgcagggctgggctaggttccagagctcatctcagccccactgctgagcaactcaggtccagggatggacccagtatctgtcctcagaagagtgaggggaactgaggtatgcttcccatgagatgacacgattcaccctgtcatgcctgtgatggtgcatttaatgatcttggtgccagggcaagccctcctccctctgcctacagaggtcactggcacacagagagcat

SEQ ID NO: 9864 - DNA, 577 bp, Homo sapiens
  MAP TO AL022319.2; EXPRESSED IN PLACENTA, SIGNAL = 1.2; EXPRESSED IN HEART, SIGNAL = 1.4
actgctcggcctctcttcagagcctcaggcctgtggctgcacgccccaggacccaggtctgcccatcccaaacctgggtgacccgaggccaccccctcttcctgcaggtgcagctggctgagacggaggccttctccctgaactcagacaggtcctcgtccatcctgctgggtgacgacctgagtctcgaggaccccacagcctgcccacctggccgcaaagacagcaaggtcagctcccctggggactcctgagcaggcgggtctgtccttgaaacctggcccctgcccacccaggcaggacccccctgtctttccagtctaccatgtaaacggcacccactgtgctaggccttcatctcctgttggacagatgagggcagtagggctcagagaggtggagtgatttgcctgaggtcacacagccacaagcccagccagcactccaacccggcacccagcagtactggctgcttcttgttgctttgagtattttctggtccattccacggggggtcatccctggccggcggggctgtgaggctgaagcgaacgggggagtcatgtcaggcacaagc

SEQ ID NO: 9865 - DNA, 559 bp, Homo sapiens
  MAP TO AC007564.9; EXPRESSED IN BONE MARROW, SIGNAL = 8.5; EXPRESSED IN ADULT LIVER, SIGNAL = 5.2; EXPRESSED IN FETAL LIVER, SIGNAL = 2.3; EXPRESSED IN BRAIN, SIGNAL = 3.7; EXPRESSED IN PLACENTA, SIGNAL = 4.2; EXPRESSED IN HEART, SIGNAL = 3.3; EXPRESSED IN LUNG, SIGNAL = 4.6; EXPRESSED IN HELA, SIGNAL = 3.8
taacctctcatagcctcccgagggctcaagccagacatttgtgagtccattctgactttttccccttccttccttctcacaaaaatctaaagaggcaatcactaacccaagtccattttattgttgagtatctttcaaatctgtctgctgctcagcacccctactgctcttatcttgatttaggttatccttatgaccggatagttgaaacagccacttcttaaccttctttccagtctccagtctttcatccctccagctctcctccaaactcctaccataatgatctccataaaatgcaaatccaatctcatgaccgctgttcttaaaatgtatgccctcagaataaagtctgaactcctttgcatgccccccccccgcccccaggccctttgccactacctggtgctgactcctgtaaatcttctctgaccccctggccagtcacactcaccacacacaccatgtaccaccctgcttagccttggcccttgctgctccctctgcttagaacatctcctcctggctcttaacagttggaccagatagcaagggccct

SEQ ID NO: 9866 - DNA, 557 bp, Homo sapiens
  MAP TO AC007564.9; EXPRESSED IN LUNG, SIGNAL = 1.5; EXPRESSED IN BONE MARROW, SIGNAL = 1.9; EXPRESSED IN ADULT LIVER, SIGNAL = 5.4; EXPRESSED IN FETAL LIVER, SIGNAL = 1.9; EXPRESSED IN PLACENTA, SIGNAL = 3.5; EXPRESSED IN HEART, SIGNAL = 1.7; EXPRESSED IN BRAIN, SIGNAL = 1.9; EXPRESSED IN HELA, SIGNAL = 1.7
cttgcccaagttcacacaactaacaagactcaaggccgagattccaacctagacctgtcagaaaccaaggcctattgacattataaattgtatattttattataacaaattcttttttataacctatatatatatatattttttttttttacaaaagaaaaagctttaaagcacttatagttccatgtggctgagaggcctcacaatcatggtggaaggcaaggaggagcaagtcatgtcttacatggatgacagcaggcaaagagagagagctcatgcagggaaactcccatttttaaaaccatcagatctcatgagacttattcactatcaggagaacagcatgggaaagaactgcccctatgattcaattacctcccactgggttcctctcatgaaacacgggaattgtgggagttacaattcaagatgagacctatttttaaccacaatttatccaaaattagacttaagcttgattttattatcagtggtttaccacagtaagtctatacatttccataataaacaattaagttccctgtttaaaaagtggg

SEQ ID NO: 9867 - DNA, 587 bp, Homo sapiens
  MAP TO AC007841.1; EXPRESSED IN ADULT LIVER, SIGNAL = 9.7; EXPRESSED IN FETAL LIVER, SIGNAL = 9.3; EXPRESSED IN BRAIN, SIGNAL = 4.7; EXPRESSED IN PLACENTA, SIGNAL =  13; EXPRESSED IN HELA, SIGNAL = 5.7; EXPRESSED IN HEART, SIGNAL = 3.7; EXPRESSED IN LUNG, SIGNAL = 4.4; EXPRESSED IN BONE MARROW, SIGNAL = 9.3
tggaggaatgccaagaagaggcagtcacaagggctttaagtctacagcgccccctggagttgtgcagtgcacaaccatatgcagcagccctggtgttaggtaaatgtgttgtcctcatgggttgattcaagaggcctaagccataagggttatggggagaataagaacagtagaaagcaaaaataagaaagaaagaagacatggagataagaggctgggggccgggcatggtgtctcacacctgtaatcctagaatttgagaggccgaggtgggtagatggccttagccgaggagtttgagaccagcctgggcaacatggcaaaactcaatctctacaaaaattggctgggcacggtggtacgtgcctgtgatcccagctacttgggaggctgagatgggaggtcaagtctgcagtgagttgtgattgtgccactgcactctggcctgggcaacagagtgagaccctgtctcaaaaaaaaaaaaaaaaaaaagaggctggggatgtggtgtaatgtccagaaacatgtgtgtgcatgtccacagacaaagatctagaaggatatacacaaacccttaacatgagcta

SEQ ID NO: 9868 - DNA, 579 bp, Homo sapiens
  MAP TO AC008283.3; EXPRESSED IN HEART, SIGNAL = 1.4; EXPRESSED IN LUNG, SIGNAL = 1.2; EXPRESSED IN BONE MARROW, SIGNAL = 1.4; EXPRESSED IN PLACENTA, SIGNAL = 1.7
tgctcatggtctcacagcagcatggcctgattccaggtaccaatagctccacaactgctccttaggtatttcagtttaaagtgactgtggtcaatccaaagccatgtaaagaggaatgttctttccttataaaagtagtgtgatatagtcatatttttcttacagtatcagggaagataacagagtattctccagaaacattgaggctggaacttgacaatgattgaatcactaagcacctacctggataatatcgagctaggccagtggcactgccaaaaacctgccacaataatgaagggtcttcctcgcgattctttttgaaaacttcatctaaggcacttgtccagttgagttcatttaacacaattgttgctaacaaaaaagagagaaaccattaattaattcaaatttgtaattaaaaactgaatgtcttcatttatttacaaaataatattaaatatgttcattgttctacctataaaataactctaatccagtagttatcaacaagttttcgacactttagaggacagtttgactggatctactaccaacatgtacatagtattcatcgaa

SEQ ID NO: 9869 - DNA, 570 bp, Homo sapiens
  MAP TO AC007900.1; EXPRESSED IN BRAIN, SIGNAL = 4.4; EXPRESSED IN PLACENTA, SIGNAL = 4.7; EXPRESSED IN HELA, SIGNAL = 3.8; EXPRESSED IN LUNG, SIGNAL = 4.5; EXPRESSED IN HEART, SIGNAL = 2.9; EXPRESSED IN BONE MARROW, SIGNAL = 5.6; EXPRESSED IN FETAL LIVER, SIGNAL = 4.3; EXPRESSED IN ADULT LIVER, SIGNAL =   3
  unsure 126
  unsure 387
tcttcatttctggcccaaagtacttcaaagaccccctaagagatctccctacttgctacatacctccctcaaggtcacgaaaagcaatcttcctagaccccaaatctcatcatactacttttccancttaaatctttcagagattacctgctgcctccaggatagtgaaaacttactagtatggtttataagatccttcataacctcacattcaagatctcacattacttctttagcacctttgcttgtccctccccattaaaccttagtctattctcaagccacaccaacacatacttgcagttccctaaatacactgtgctgtcttgcttctgtctttgtacatgctattccttcaactttaagcactcttccctgcccttcttncacctgctctatcactatctgtctttcaaaactaagatcaaatgtctcttctttcagaatatcttcccatacaagcttagcttgatttgggttaggtgaccctctgcactctatgcttagctctcttaaaattaatcacatgacatttcttgtctgttttgtgccccacctccatgtattttc

SEQ ID NO: 9870 - DNA, 563 bp, Homo sapiens
  MAP TO AC006548.19; EXPRESSED IN HEART, SIGNAL = 2.3
catgggtgcgaagagaagagggagttaatgggagaatcagaaaaatatcaccttaaatgtaggacaatcgaagtcaaattgtggctgagcgttttggggaactaagatgtgtgactctgtagggaggaagaatgccttggtgttttcaagggaagatgactcagctagtgcagtcacctgactccaaactgcaagcctactttagtcataaaaaggcaagaaaataagcaattttacctgcaaagcaaaggacgtagtgttgaaaacgagaccagaaatggtgctgttaaagaggtgaacaaaagcatttactttttgaacgagtttcaaaactgtgagggtggcaaataggaaaggtaagtaggagcagccctcgaccatctcagatcagcttcttcagcctaccttgacctctgcctgtctcagctggggctcttaacataaatctctggatatcaggggtggcttttcccgagtcttgagcctagaaactccctctcttgattctgattttcagagaagagaagcagctgcttagcatttgggtgggacagtggttgtta

SEQ ID NO: 9871 - DNA, 574 bp, Homo sapiens
  MAP TO AC004832.3; EXPRESSED IN HEART, SIGNAL = 1.3
aagcaaactgaggtatggagaagtaacttatccaggggtaaacccatgcaattaaccactctgccattgtgctgttatgctatcccatagtcttggctctaggagcttccaccttagttagggagagagcctaagcatgaaagtcacctatatgtgatgcagttggcatctgagccaggccttgaagaaaggaaggattttgatttatggagagcagaataaagggcatcccaagtggaggggatggcatgggcaaaggcatggaggtgggaaagtgagaagcatgtggagggggtagattacagcaaacaagacagattaggacccagcttgcatagagctcacagtctcccattggtgagcataccctctgtgctgggagctttatatcattatcaaatcattcagaagcaggtatgggtattcccattttacagctaaacaaatagaagttcagagagatcaagaaacttttctgaggtcacacagccagtaaatgaggagccagaacttgaacccaaacctatctgactctggattgcacagcccaccctgctttcccctgtagggctta

SEQ ID NO: 9872 - DNA, 565 bp, Homo sapiens
  MAP TO AC009290.1; EXPRESSED IN HEART, SIGNAL = 1.5; EXPRESSED IN LUNG, SIGNAL = 1.5; EXPRESSED IN BONE MARROW, SIGNAL =   2; EXPRESSED IN FETAL LIVER, SIGNAL = 2.1; EXPRESSED IN PLACENTA, SIGNAL = 2.8; EXPRESSED IN HELA, SIGNAL = 1.4
  unsure 92
  unsure 172
  unsure 482
  unsure 538
  unsure 544
tccatatttcagctaaccaagcaaataaactactagaaccttttttactccccaagctgcaatattaaattcagagtccctacttagtgggncccaaatcaataaatttagcctgatccaactctatgtttcttccactattatcccacacccttaatatccattcccatgncctgttctccagatttctgtttatataaattagaaaactcaagcagttattttcgagtgtagtacacctcctcgtggtcacactctcaacctcatctctaggggcctgccgggactttagtctagttatagatctagaagcaaacaggtgttgggtgtggctcctgagaagaatcaacattatctttcctggcaactgcctcaggggaagtcatcactgttgcttcaggcagcacagggtttatctcctcagacaaaggtggaaaggctgatggcagcatgggttggggaggggctgttgccactactgnggcatggggatgcttttccttctggcaaaaaagtttcatcagagtttacaaactcnagtgtnccccatcttcatcagcatcct

SEQ ID NO: 9873 - DNA, 579 bp, Homo sapiens
  MAP TO AC008272.1; EXPRESSED IN BONE MARROW, SIGNAL = 4.5; EXPRESSED IN PLACENTA, SIGNAL = 9.9; EXPRESSED IN HEART, SIGNAL =  13; EXPRESSED IN LUNG, SIGNAL =  16; EXPRESSED IN ADULT LIVER, SIGNAL =  12; EXPRESSED IN FETAL LIVER, SIGNAL =  25; EXPRESSED IN BRAIN, SIGNAL = 4.1; EXPRESSED IN HELA, SIGNAL =  23
ggacctggccaactgtctcaaatatttatcatttactacaaagtagaccaagacaaattcagcaccaccactaattttttttaataagatagcccaagaaactaaacacacaaaatgtatatggaaataacctatatatcaaacaataaggggaatggttaaataaagaaagttcatatgataaaatattatagacattaaaagacaaactaaaaagtaccatatatatgtaagttccaaaatattcatatctggaatatataaaaaacttttacccatttttttaaaaagaaccaacctaatgacaacaacaaaatcaacaaaatacataatcaggaaattcacaaaaaaggaaaccagaaaagcatataaacataagagaaaatgttgtttcactagtaataaaaaaaatgcaaattaaaatgagaaatgatttcatcttccttagattaccaaaaaagcagcaacaaaaaaaaaaaaaacaaaaacattttaagtctaacctagttgtaaagaattagaaactcacatacattgctggtgagagtgaagaggagagcaatcaggcagtgtccagtg

SEQ ID NO: 9874 - DNA, 551 bp, Homo sapiens
  MAP TO AC008166.1; EXPRESSED IN BRAIN, SIGNAL = 2.7; EXPRESSED IN ADULT LIVER, SIGNAL = 2.7; EXPRESSED IN HELA, SIGNAL = 2.6; EXPRESSED IN PLACENTA, SIGNAL = 4.8; EXPRESSED IN BONE MARROW, SIGNAL = 4.3; EXPRESSED IN HEART, SIGNAL =   2; EXPRESSED IN LUNG, SIGNAL = 3.7; EXPRESSED IN FETAL LIVER, SIGNAL = 3.5
cagagctgtgagctgtgctgcctggagttatgaaaggagtggtgcaagcattccctaggccaccctggctagtgtctcattagatcacatgctccccagttccacttgctctcggcccagaacagaactagaacttgcctaggaattgcagttcttgttgcctagactgcttttcatgcttatttaggactcaagagcaccttagaccacagtagtgaggcttgccaaactcaagttccaaccactgggatggatgattcttctctgtctagggctggtgtacatgctccttccatcagtgtcggctaagttctacaagtttttgctttctgttgtgacagggaagtgctgggttctaatgcaatgtcctataatcactggcctctccatcctgcaagcacacagattctccctgccactgggctgctgccagcagataggggtagagtgatgtccacaattcaagactttctttcctaccctcttctgtgcctctttcaatggcatgaagttaatatcaggtactatcatggcttacctgactggtggtt

SEQ ID NO: 9875 - DNA, 556 bp, Homo sapiens
  MAP TO AL034406.1; EXPRESSED IN FETAL LIVER, SIGNAL =   4; EXPRESSED IN ADULT LIVER, SIGNAL = 2.4; EXPRESSED IN BRAIN, SIGNAL = 2.6; EXPRESSED IN PLACENTA, SIGNAL = 3.1; EXPRESSED IN HELA, SIGNAL = 2.9; EXPRESSED IN HEART, SIGNAL = 3.7; EXPRESSED IN LUNG, SIGNAL = 3.3
agagacttgcctggatttgcagctacttcttggcagaggtggttctagaatccaggtcttttaacacctaatgttaggttgcttcctctgcaatttcccaacttaatgtcaaatacactctcttatttcaccctcttatttttcctcattcccaaaccatcatggtagttcttgtttcttgcttgagagcagagacatctttcctggactatgactgtagtgatagtaatgttgatgcaggtgcttcagcacttcagcatgcatgtgcttattctctctctctctctctctcacacacacacacacacacatcccactccaaaaacattgctgaagtatatgaatgcctttattaacttaatatatctggtagacgtagtagagaagaggagtaaacagaggttggtggagatgaaaaagagaggatacagttagaaaatatcatccagaagcaaaggaaccaggcaaaatgacaatccagacctcagaccattctacaagttgactcaaaatattaatttagcttcctgaatttttcacttattgttattttgcc

SEQ ID NO: 9876 - DNA, 581 bp, Homo sapiens
  MAP TO AL035681.13; EXPRESSED IN LUNG, SIGNAL = 1.9; EXPRESSED IN BONE MARROW, SIGNAL = 2.1; EXPRESSED IN FETAL LIVER, SIGNAL = 1.3; EXPRESSED IN BRAIN, SIGNAL = 2.7; EXPRESSED IN HELA, SIGNAL = 3.4; EXPRESSED IN HEART, SIGNAL = 2.5
gcagccaacgatgagtcacgtactgtgtttacttaaatcacaagacagtgatgtacaccactccctgcctcccgctttagaaatgaagaaaccatggctcagaggggtgtggaggctcacacagcatcacagggcccgaagtggaggagctgggatatggacacaggcccacctgccttcagaccagacccctgtgcccccagccgccccaccacccacagaccccagagggaggacgtcaggcgtccaggctggcacctttagcttgggcaggccgccgcggatggcatctgcaatggcaactgcacccttggagcgcaccaggcagtccccaaaattaatcacctccacctgccgcaaggtcttcaaggtctgtgagggggaagcaagggtccagagtgagggtgcagaccacaccccagccctcagcaagccccgggggccccacacggtcacatcccaagccagccaccacacactgtcctcctctgcaagtcaccagctttgccgtcttctacttgttggcctctgggcccctggccaaacctcctccacccctccccatgttacggccagaactc

SEQ ID NO: 9877 - DNA, 593 bp, Homo sapiens
  MAP TO AB016897.1; EXPRESSED IN HELA, SIGNAL = 8.4; EXPRESSED IN BRAIN, SIGNAL = 9.8; EXPRESSED IN PLACENTA, SIGNAL = 6.6; EXPRESSED IN LUNG, SIGNAL = 8.1; EXPRESSED IN BONE MARROW, SIGNAL = 7.6; EXPRESSED IN HEART, SIGNAL = 4.2; EXPRESSED IN ADULT LIVER, SIGNAL = 8.5; EXPRESSED IN FETAL LIVER, SIGNAL = 7.7
ataaagaatggagagggggcatatttgaactagaaaaaaaaatcattctttatgtgaaattcaaatttaattgggtgccctgtttctttttgttttttgttaagtctggccatcttaacctggattcatccgcgcctgaagccaaacacaccctgggcgtcccaggaaggagcagggtttcctgcactcccagctgaaggaccgtcgctcctgggtcttctctccacaagcaagcaagggaagagaaaatggccccagggctccatgagcgccagcccgaaacagcagcgatggcagggcattgctgcgttggttttctcatacctgaagaagcattaactcctccagaagccttttgcagagaagtcaaagtacttttttaaaaagaagaggagacaggaagacggtctttaaagtgaaactcctaatctaaccctatgataagaatgaaacctaattttcctgtccgctgctacctgctaggttacgtgctgcattttaactccttgtaatccccagaaggcaaaggatattaaaatcaatttttaaaaattgtatttgcaaatcacttccttctctcaagtgtttcgtca

SEQ ID NO: 9878 - DNA, 1486 bp, Homo sapiens
  MAP TO AP000356.1; EXPRESSED IN FETAL LIVER, SIGNAL = 4.3; EXPRESSED IN ADULT LIVER, SIGNAL = 3.1; EXPRESSED IN HELA, SIGNAL = 3.7; EXPRESSED IN PLACENTA, SIGNAL = 3.1; EXPRESSED IN BRAIN, SIGNAL =   4; EXPRESSED IN LUNG, SIGNAL = 3.8; EXPRESSED IN BONE MARROW, SIGNAL =   3; EXPRESSED IN HEART, SIGNAL = 2.1
gtcagctggcagtgggatgaggctggcccctcttccgctttcgttccgggaggcctcccgtagagctgtaggggctcgagatggcatttcatttggggcacgagctggtccgggaggtctgggatctctggttctgacctctgggcacctgctgcagctgtggctgaggcccagaaatgtgaagggcctccatccactccagtagtgaccccaacgtggggttcagtgtggaggggggaggggctgctgtggcagctgcaggagcagaagtgccacgccttgttcttctcatgcctgcatccatgcttgcagctgggaagggggcaggaatcagcgaggtgacctgggctgagtcctgggaatcagaagaggtggcaggaaggggatctgaggaggagaacagggggcctggtggtctgtgcttcttcccagacacgggagctgtagaggggacctctgcagcagatgctaagggggccagtaggcccaggcagtcttgggacttgtgtgtctcctgctgtgcatccatactggatgctttagaaacagcaggcagaccagaagcccctgttgcaagtgaggacaaagtgtgggaaggccatgagggtctgcagtccgagatggccttgtcctcaacctgcagtgcactgttgatgcgctggaatgccgcctccttctcccggtccaggtcttcaacagtgacccggtaccccagctctaagggaggtggcagcatcaaaggctcccctcgcctgcgtggcagcaggggaaacttgtgtgtactgggcctagaggcctcggatgtggaggagtcattcctgagggtgagtgtctgccctggtgctatatctgctgccttttcacactgggtgtgacctgaagagacagcctgaggcctgtcctcactcactgtctttgaggaactgagggtcagctggcagtgggatgaggctggccccctcctccgctttagccccggcaagcctcccgtggagctgtaggagctggagatggcatttcggttggtgcaggagctcgtccaggaggtctgggatgtctggttatatctgatttctgacctctgggcatggaggtctgtctgcagaggcccgggcctgggcacaaagggagagaggcctccattgtcccgcaggggccgaaatgcagacggtgcatccccggtgacctcggggacccttctctgatcaccaggattctcttggactctagggtccttgtcctgctcaggcatccctgccccgctctccttgagggccctcaacactatcttccctggacacaagtctggggacagccgggtgttgtggaccccaaaggggtgactcccggctcctgggccccacagagagtccatgttctcagtgcagtggctgagctggaggacgccctggaactcggagcacacagcactggcttgctgtggtacctgtgcaatcaaattgaaggcaggatcccaggaaggaac

SEQ ID NO: 9879 - DNA, 570 bp, Homo sapiens
  MAP TO AB016897.1; EXPRESSED IN HELA, SIGNAL = 7.5; EXPRESSED IN PLACENTA, SIGNAL = 8.9; EXPRESSED IN BRAIN, SIGNAL =   4; EXPRESSED IN LUNG, SIGNAL = 8.4; EXPRESSED IN BONE MARROW, SIGNAL = 5.2; EXPRESSED IN HEART, SIGNAL =   3; EXPRESSED IN ADULT LIVER, SIGNAL =  13; EXPRESSED IN FETAL LIVER, SIGNAL =  17
actttgatgctctgcttcccttttaaaagggaatgcttttaacagcacccaggtcacagcttgaatgatttgctgcttagaaatttcttccacccaataccctaaatcatctctctcaagttcaaagttccacaaatctctagggcagaagcaaaatgctccctgtctctttgctaaaacataacaaagtcacctttactccagttcccaacaagctcctcatctccttctgagaccacctcagcctggaccttattgtccatattgctatcaggcttttggtcaaagccattcaacgagtctctaggaagttccaaactttcccacattttcctgtcttcctcagagcgctccaaactgttccaaaatctgcctgttacccagttccaaaattgcttccacattttggtgtatcttttcagcagcaccccactctactggtaccaatttactgcattagtctgtattcacactgctgagaaagacatacctgaaactgggaagaaaaagaggtttaattggacttacagttccacatgactggggaggcctctgaatcatggagggagg

SEQ ID NO: 9880 - DNA, 560 bp, Homo sapiens
  MAP TO AL049649.4; EXPRESSED IN HEART, SIGNAL = 1.3; EXPRESSED IN LUNG, SIGNAL = 1.9; EXPRESSED IN FETAL LIVER, SIGNAL = 3.7
caatgaaaaatggtaaacagcagttaaagagaatcaggcctttttggcaatagaatggaaacattcattccttgtagtcaataccctgttttgtgcatgtttgtgtgtgtgtgtctgtgtttgtgagtgtgcatgatggtgatgttttgtctctttttctttaaccattttttcttgtaaaatcatattttctcattctattattcttactgtgctgtgaaaatgactacgcaggaaggccctatgccccttcctgactgctgcagccccactttctctccctcaatgtctcctgaatgacattttctgtgcagttccagcagttcagcatgctctaatcttgataacacctgcatcaagaatggagggagtgtgctgagccaggcccaagcaggcaggctttggctatcaatgcttcctctagaagctggcttttttttttttctggcttatgtattcttttccatttctggcctcattcctccttgccagccagtcctccctctattcacatgtcatgtggatcctttattgatccacatggacagttctttattgga

SEQ ID NO: 9881 - DNA, 591 bp, Homo sapiens
  MAP TO AC007539.8; EXPRESSED IN HELA, SIGNAL = 1.2; EXPRESSED IN LUNG, SIGNAL = 1.6; EXPRESSED IN HEART, SIGNAL = 1.4; EXPRESSED IN BONE MARROW, SIGNAL = 1.6
cttaccctgcaggtctcagcttagaggtcacctcctcagaggcctttcctgaccactctgaccaaaacagccttcccatcgccctttccttctgcttctcatttcactacatattccttcaacactcaccgctctctaaatctaaaacggttgcagttgtcgccctcacccttctagactgggagctccacacggcgggagctgattggattgtccaccactgcacagctggggcccaacaccaggcacatgatcatcctcagtagatatttgtcgaatgagaaaagataatggtgggaaaggcaggagaatttcctgtgggttgttttcctctgggaagacatgaggggtgggctgagaatggactgaccgtatgcctcctccctcaggttttagaccagtgtgtgcatttgccagatgacccaggggtgttgggggtgtctgtgatcagggacagggcacaccttcctgctctctcctcactcctgtccttgtcacagggagaaaaatcttagggaagttgtcaagtgcttgtatggtgcttggcacatagtaggtgctggatataggaggattctcatgattggccta

SEQ ID NO: 9882 - DNA, 570 bp, Homo sapiens
  MAP TO AC007564.9; EXPRESSED IN HELA, SIGNAL = 1.3; EXPRESSED IN PLACENTA, SIGNAL = 1.3; EXPRESSED IN LUNG, SIGNAL = 1.4; EXPRESSED IN HEART, SIGNAL = 1.5; EXPRESSED IN BONE MARROW, SIGNAL = 1.3; EXPRESSED IN FETAL LIVER, SIGNAL = 1.4; EXPRESSED IN BRAIN, SIGNAL = 1.4
atagaaggcagtggtgtgggcaacctgcacactcggtgtttggtgggataggatgccacagaagggacaccagctctgagcatcttgaaggaatcccactcaagagggcagccttctggaactaggggaccccacagtaaaaggctgtgggtgtatcacagggcagggatgtagaagctgagcagggattgcaggaggtcagctggaagtgcactgttcctttcaggagacatgcccacgtcccagcatagttccggatggacccaaagattctccctggctctcccaggaccattggttggggggcacctaggactgcgatgaagaccagggaggggccatgggagggatccacatctgggggccactcagagggcacaagcaagctctaagggcataagtcatgtgagacttttacccttatctcatgtggcttgtgtcctcctgggcctcacaaatgcgaaaaaaaaaatctttgaattggatgtaagattgaaattttgatttatactggagtagacctcataatacttggaagtaaacctaactcccaaaatgggacttgtccat

SEQ ID NO: 9883 - DNA, 575 bp, Homo sapiens
  MAP TO AC007841.1; EXPRESSED IN PLACENTA, SIGNAL = 1.2; EXPRESSED IN HELA, SIGNAL = 1.6; EXPRESSED IN LUNG, SIGNAL = 1.5; EXPRESSED IN HEART, SIGNAL = 4.9; EXPRESSED IN BONE MARROW, SIGNAL = 1.4; EXPRESSED IN FETAL LIVER, SIGNAL = 1.6; EXPRESSED IN BRAIN, SIGNAL = 1.9
tttgtggtatgcagcctctgaaagagcccccaatgagcctggtctcctgttactgtataatcctctgccctcgggtgaggcgtgaatctagtgattcatttctaaaggaaagaacacaaacacagcaaaagtgatgagatgttacttagattgggttacaaaagaatcgggctctcacgtctctttctgggtctctttctctctatctctgtctgtctcacactctctctctctcaaagttcttgccctcaaagaagcaagttgccatgttgtcagtagctccatgctgtcaggcccacatcccaaagccctaccaacagccagcaaggactgggacctgcctgtggggattttcccccagtcccactttgagaccctgacgcagagactcaagctcaggtatgtccagattcttggtgcccccacctcacaattgtgaggttataaatgcttgctgcatgaagacacaatattttggggtaatttgttacattgagatagacaacagactcctaacaaacactgtaaagatgaaaaactgataataagtacctgtatgaatcactggaacttcc

SEQ ID NO: 9884 - DNA, 575 bp, Homo sapiens
  MAP TO AC007539.8; EXPRESSED IN HELA, SIGNAL = 1.8; EXPRESSED IN LUNG, SIGNAL = 1.4; EXPRESSED IN HEART, SIGNAL = 1.4; EXPRESSED IN BONE MARROW, SIGNAL = 1.6; EXPRESSED IN BRAIN, SIGNAL = 1.5
caagtttgtagcctgggagcaatagactatactttatagcctaggtgtgatgtaggctatatagcatctagatttgtataagcacgttctgtgatgtttgcaaagtcacctaatgatgcatgtctcagaacatatccccatcgttaagcaacacacgactgtacatcattctcctttccctctgtctcctgctctctctgcagttgttataaatcaattgttataaatcagctttgatgactcaaaaaatatttatggactgcctttttctagacactatggagcagacaaagagccttgtcctcaccatcaagggggctatggtctggttgagaagaaaataagcagaacagataggaaatagcaggttatttggtgagcttatgtatggaccatgagcattgtgggtgctcagaggagagggagattacttgagggactagaatggaaagggtgggcctcctggaggggcagctaggtgttgtaagagagaaaagaaaaacattctaggtggggagtcgtcatgggcaaagtcatggggtggggacaaatgtgggctgttggataaagacttg

SEQ ID NO: 9885 - DNA, 549 bp, Homo sapiens
  MAP TO Z83844.5; EXPRESSED IN LUNG, SIGNAL = 1.8; EXPRESSED IN PLACENTA, SIGNAL = 2.3; EXPRESSED IN HEART, SIGNAL = 1.8; EXPRESSED IN BONE MARROW, SIGNAL = 1.6
gccttggcaatcttaaaaggagctccaagaaggaaagggagggtgtggttacggaggggaaaccaatccatttcacagatgctacccctgaggctcagagaggaaatggaggggccaggtctcaaattggcattttccgcctccccacccctcctgtgtgcagcatagtgagtttggcagccacacaggacacctgtacaatcacacacactggctctttcattccatcctccttgcagcctccctccccctcgctcaccaccacctctacttcgcagtggaagaaacattggtttgtgctgacagattcaagtctcaaatattacagagactccactgctgaggaggtgaggccatgggtgtactgatgaacccccggaagggcctggggtggcctggctgggttcactggggtgggtcacaccagggcccacacggaccatagtgggccctcttgctccaggcagatgagctggatggtgagatcgacctgcgttcctgcacggatgtcactgagtacgcggtgcagcgcaactatggcttccagat

SEQ ID NO: 9886 - DNA, 597 bp, Homo sapiens
  MAP TO AL022319.2; EXPRESSED IN PLACENTA, SIGNAL = 1.7; EXPRESSED IN HELA, SIGNAL = 3.2; EXPRESSED IN LUNG, SIGNAL = 4.1; EXPRESSED IN HEART, SIGNAL = 2.5; EXPRESSED IN BONE MARROW, SIGNAL = 6.2; EXPRESSED IN ADULT LIVER, SIGNAL = 3.9; EXPRESSED IN FETAL LIVER, SIGNAL = 3.2; EXPRESSED IN BRAIN, SIGNAL = 5.3
tgcataaatgcttgcttgttcattcacaatctagtgtaagtggagcagggcccagagccatttccatggctttttcggtggaggggcagataaaaaggagagggtgtatctggcagccactgaacaggatgggaacagcaaggagcccctgataatgcatccccctccccctccctgtttctctaaccttgctctcactctttcgtctctgggacctctgctccctgtctgaccatccctccaccttttcccctcccaggtatgcggatcctggtgaacctgctcctggacacactgcccatgctggggaatgtcctgctgctctgcttctttgtcttcttcatctttggcatcataggtgtgcagctctgggcgggcctgctgcgtaaccgctgcttcctggaggagaacttcaccatgtgagttcatcccctgccacccatgcagctccggggactcttactaagacacagttttaaccttctgggtcattgggaatcaggaccaatggggtagaagcagcaaaaaaagagaggtcaggtaggaggggaaagggaagttaagacacaagcagaagtgatgcccaggaggaaaaag

SEQ ID NO: 9887 - DNA, 545 bp, Homo sapiens
  MAP TO AL022238.1; EXPRESSED IN HELA, SIGNAL = 4.9; EXPRESSED IN PLACENTA, SIGNAL = 4.8; EXPRESSED IN HEART, SIGNAL = 3.4; EXPRESSED IN LUNG, SIGNAL = 4.1; EXPRESSED IN BONE MARROW, SIGNAL = 6.6; EXPRESSED IN ADULT LIVER, SIGNAL = 4.1; EXPRESSED IN FETAL LIVER, SIGNAL = 4.9; EXPRESSED IN BRAIN, SIGNAL =   7
cttaatgagtgtgggggtggacttggcagtggggatagtggttccattggtgaggctgggaggcagcagaggtgggggaggcagaggaggctgctctgccaggaaaagcatttctctggaatcccggcccatcggaagttgagacacaacctgagagggaaaaagggaagtgaggacatggccacctccaggtagggtgtgcccagcctgccctgaccctacacagggtcctcagacgccaccattgtcagagggcaaatggtgggcagagaccggaggaggagaagagcaacccccagggtggcaggagcaaggaggagctaggaaagagagaaggcaatgaaaaggtcacagaactgaatatactcaagaaaaacaggctgctccaaataaatgaatacagactgggccagtgacgtttgcaatcccactgcaaggcagccatggccagcgtcgtcctccacctgacctctggctgctggagaggggccactgcccacatctcccaccaccggggagctcaagcagccagcacctaagcaact

SEQ ID NO: 9888 - DNA, 578 bp, Homo sapiens
  MAP TO AL022320.23; EXPRESSED IN ADULT LIVER, SIGNAL = 5.4; EXPRESSED IN FETAL LIVER, SIGNAL = 2.8; EXPRESSED IN PLACENTA, SIGNAL = 5.7; EXPRESSED IN HELA, SIGNAL = 2.7; EXPRESSED IN HEART, SIGNAL = 1.7; EXPRESSED IN LUNG, SIGNAL =   3; EXPRESSED IN BONE MARROW, SIGNAL = 2.6
gaccacaagaaagctgattatgcttatgatggttacaggaaacccccctgccccaccaacccatttaaaaatgatgatgatcgtgtgctgcaaaagataagtgcggaacaacggcattccccaaagccccttccatacctggagaagttgtcttgcagctcctttagatgcttgtcaaaataattccattcagtccaatgatgctggtacaactgattgaggttgtctttccgcttcttcatgctgcacagggtctcgctgatgacatcagtatacgttggggtgcagtcagtggcttccgctgtcaaggaaatccccgtactgtggaactgtgttgacgctgcattattagtggcatgagcgcagtgcatggggaagaggggcatggaggacagaacagggaaaatgccctgcgtttctggataagatacctgaaatctgagcaagagatgactctcctgctctttgaccatggcctgctttggagggaagaggccatcctatccgtggccaggcgttctctacgtaggaataaagtccttctctgcccctgtggatggaaggcagggctaagaaat

SEQ ID NO: 9889 - DNA, 579 bp, Homo sapiens
  MAP TO AL023553.5; EXPRESSED IN BRAIN, SIGNAL = 2.2; EXPRESSED IN PLACENTA, SIGNAL = 1.4; EXPRESSED IN HELA, SIGNAL = 2.2; EXPRESSED IN LUNG, SIGNAL = 1.7; EXPRESSED IN HEART, SIGNAL = 1.6; EXPRESSED IN BONE MARROW, SIGNAL = 3.3
gagcaaggagtcagctctgggtggggacaggtcagaggacatgctggaactgggcctttagcactgaacaaggggtggggaaaggggatccaggtggagcaaagggtgaaccgaggcttggaggtgtgaaaccaccagaagtgacagggactgggactggcacttgcagcagggtgtggggtaggaccagggtgttcaaggacaagattgagaagggccttgataaatgaggacaaggagcttggctcttaccccatgggctcgtaggggtccacacgggctgaggggagctggacgagcttactgaggtggccgagggtacccaagaccagcctggcattgggcgttgggcagtaggctgggcctggtgtgcagggccacagcgccacctggtatccatcactctcactgcagcgtgaccttgcctggctctccaacctgggaaccagtggggcagcctcgtcccagacacactctgcctctttcaagagcagccaggccctgtggtcaagggctcacattcagtggtgtgccaggcccccactaggctccttgcgtgccctctcagctacagcctgt

SEQ ID NO: 9890 - DNA, 577 bp, Homo sapiens
  MAP TO AL021707.2; EXPRESSED IN BRAIN, SIGNAL = 3.2; EXPRESSED IN HELA, SIGNAL =   3; EXPRESSED IN HEART, SIGNAL = 2.9; EXPRESSED IN ADULT LIVER, SIGNAL = 2.5; EXPRESSED IN FETAL LIVER, SIGNAL = 3.6; EXPRESSED IN PLACENTA, SIGNAL = 2.8; EXPRESSED IN BONE MARROW, SIGNAL =   4; EXPRESSED IN LUNG, SIGNAL = 4.1
tccatgtctgacacactgaggtatctgttcacccacactcagcacatgcacaccagcatgacaggccgctgtgccctggcacaccccagggagcccctgcacagctctccaactaaggggtcgggggtcaaacagagaagtcagaggagggcactcccctccccatgcaacacccaaacagtccctttggaagggccgaggggtccgaggtgaacatgttggatggggtcaggacccagtcacaggccctgagtgccgcaagcccgctgacctgggaggcccggacgatcttcttgaagaggtcttctgagtcttgctgatgctctgctctcagggcagacagttcttcctgtgagacgggagtgagaggacaggttggacagagccatgcttatagggaccctcatgactaggaagtggcggaactggaattcaaacaaggtctgtttgcttccagagccctggctctcagccttctctgaaccacgcaagactcccgcttcagctccactgcacacctctgcggtgtcaggtaccatgctggggctttctactcgcacagctcactatgggggtg

SEQ ID NO: 9891 - DNA, 584 bp, Homo sapiens
  MAP TO AL079295.1; EXPRESSED IN ADULT LIVER, SIGNAL = 1.9; EXPRESSED IN FETAL LIVER, SIGNAL = 3.9; EXPRESSED IN PLACENTA, SIGNAL = 1.8; EXPRESSED IN BRAIN, SIGNAL = 2.2; EXPRESSED IN HELA, SIGNAL = 1.7; EXPRESSED IN LUNG, SIGNAL = 2.1; EXPRESSED IN HEART, SIGNAL = 1.5; EXPRESSED IN BONE MARROW, SIGNAL = 2.1
aagacccccaagtagatgcctgaaactttgggtagtactgaattctatatatactacgattaagtttaatttgtaagttaggcacagtaagagattaatgataactaataataaaactgaataattatatactataataaaagttacacgaatgtggtttctttatctctctcaaaatataatacttttgaagtgtgattgaccttgggtaactagagatacagaaagtgaagccatggataagggggactactatactgataaactggaaaccactgaacaaatacaagacgaggctaattgtggtatagcaagttttagggatggacaaaccacagttcaaattctaactctgacaattgcaaactgtgtgactttgcaagttactgaaatatctgctttctcatctgtaaaatgaagataatagctaacactcaggtgcactgaggagtaaatgttatcactcaatagacagtttaaaataaaataaaatgaaacaaaaaaaaatcaggttctcccaaaagaagctagcataaaatgaaataagagccatagtttttaaaagatgagattgcgtttccagg

SEQ ID NO: 9892 - DNA, 556 bp, Homo sapiens
  MAP TO AL022238.1; EXPRESSED IN LUNG, SIGNAL = 3.9; EXPRESSED IN BONE MARROW, SIGNAL = 3.5; EXPRESSED IN BRAIN, SIGNAL = 3.2; EXPRESSED IN HELA, SIGNAL = 3.2; EXPRESSED IN ADULT LIVER, SIGNAL = 3.1; EXPRESSED IN FETAL LIVER, SIGNAL = 3.5; EXPRESSED IN PLACENTA, SIGNAL = 1.8; EXPRESSED IN HEART, SIGNAL = 2.6
atgcctggagtggatgtaggaacagcctgctggctcagaagcttaaaaaaagctctgtgtgttttcagtttttctcttcttagttctcaatgaaggttttggcaggagcccaaaatcttgtacatttgataatttaacatcagtttcatctgcttactctccagatagcctgttattcagctggtgacgtcagtaattttccacagcagccattcatgagctcatgcagactgtcacaaggaaatgggaatagcacaatgagtgttacagaagaaaaaaagatcctgtttctttgccatcacatattatacacagacttagggaatctagactggagcacaagatatgtgggaggggttagaacaccactcctacctgtagtaataatcattgaaaccacttattggatgccttctgcttaccagacactagttgtcacaggtcactgtaagtgacagggccagaatttaagtctacctgactctaaactctgctcttttgtctgtgctgtactaccttatcaacaactgtgttcaagtctttctcattcttaaaa

SEQ ID NO: 9893 - DNA, 570 bp, Homo sapiens
  MAP TO AL035681.13; EXPRESSED IN LUNG, SIGNAL = 5.5; EXPRESSED IN BONE MARROW, SIGNAL = 1.9; EXPRESSED IN FETAL LIVER, SIGNAL =   2; EXPRESSED IN PLACENTA, SIGNAL =   2; EXPRESSED IN BRAIN, SIGNAL = 3.1; EXPRESSED IN HELA, SIGNAL = 5.9; EXPRESSED IN HEART, SIGNAL = 2.1
cttcagcaggcgagcatctccagccgggaacaatgccagtgcctgagcctcaagataagagccctctgccttgaattcctttgtattcctgggaggaaactgctactttcatcaaaataacccacaatactgaaaggagtatcagaagggatggctaggtcaaatggcctgagacgtcctgattccaaagccatcatactgtgtgtaggggtggggacccggggtgtctttcccttttaactaaagccctgacctggaagtggactcatcagagcttccactcctgaacccagctccgcttctacatgagcctcccggggctgacgcagggagaaagcactgctgccatttcccagtcgcgcacgtgactgccaactgagattagtattgctctcatcaacgatagttccgggtctggcttccaaggcagaacttgcttaccttcagcttggggtcttttcaggagttccttcccggctcccagccagaaattaggaacactttatagactgacttgtgcccatcccaaaaggctggatccctaaccccagtacctcagagtatgacctt

SEQ ID NO: 9894 - DNA, 570 bp, Homo sapiens
  MAP TO AL022328.21; EXPRESSED IN HEART, SIGNAL = 1.8; EXPRESSED IN LUNG, SIGNAL = 1.3; EXPRESSED IN PLACENTA, SIGNAL = 1.3
acacatctgccccaagtttctagtgaggtaaaacatcctcactgacccatccctcaagagccactatcgggtttcagatgttagcaaggaaagaaaaggtttagactctctggtcctgcagaaggacctctgagattctctcttccaggtcgtgtgcaccgttctcacaaaggtgtgtgacaaccatgaggcaaaggccatacctggaacacgaggcccttgctgtacaaagagtccaggacgggctgcagagagaaatgactcaggcgcgtgtagcaggtcccatactcggccacttccgagagcaggctgctgatgctctcgggagacgctcctgacacgtggacgccccgcttcaccacaaaggcctgggccggctgcacaggggcagaggacactggtcacagaggccaggcacccagacccccagtaaggtgccgtctccctccacccttgcacccaaccccacgccacctagagtgcctccaggacccaaaagcaaatgcccagaaggcatacccagaactcccacaccgagggaccaaaccgaggcacaaatcctcactgacc

SEQ ID NO: 9895 - DNA, 558 bp, Homo sapiens
  MAP TO AL035681.13; EXPRESSED IN PLACENTA, SIGNAL =   3; EXPRESSED IN HELA, SIGNAL = 3.4; EXPRESSED IN BRAIN, SIGNAL = 3.6; EXPRESSED IN BONE MARROW, SIGNAL = 2.4; EXPRESSED IN HEART, SIGNAL = 2.5; EXPRESSED IN LUNG, SIGNAL = 3.6; EXPRESSED IN ADULT LIVER, SIGNAL = 2.5; EXPRESSED IN FETAL LIVER, SIGNAL = 5.1
ctggagcaggtatgcagtggcactccctctgcgttgccaagccaacccaagaactggggatggttgcttggcaaccccaccctcatggacgcctctaccctccggccacaggctgttgcctttgaggcctttctcttttgaaaacaacggctgaccatcccagatggtggtggccaagggccagggcacatatgtcagacggatgtggatggaccaggggactctgcggggagggggctgccacacccaccttgccgccgccaatgcccatgccacagttgttgagcttgagttcctgcagggtgaagcaggctgagctcttgagcagggcctcgaagccttgcacaccgtcgggcccgaatgcgttgtcgcttaagtccagctccaccagctgagccccagctgtgatgagtccttcccctagtgagatctgggcacagaggaagctcgtgtcagtttcatagacacccagcttctgtgctgggtgctgcttctgtgccaggcccagctctgccttccaaggacaccccggctggtgcagaaccaacacagacacaa

SEQ ID NO: 9896 - DNA, 582 bp, Homo sapiens
  MAP TO AL035682.16; EXPRESSED IN FETAL LIVER, SIGNAL = 3.2; EXPRESSED IN ADULT LIVER, SIGNAL = 3.2; EXPRESSED IN PLACENTA, SIGNAL = 2.9; EXPRESSED IN BRAIN, SIGNAL = 2.1; EXPRESSED IN HELA, SIGNAL = 1.5; EXPRESSED IN BONE MARROW, SIGNAL = 2.2; EXPRESSED IN LUNG, SIGNAL = 1.9; EXPRESSED IN HEART, SIGNAL =   2
ctcctcactatcccctgctgcgctgatgctctccttccccccatatcccttagatgatgccttggtgcatgggaagtactcaataacatttatttatgaacagaacacagaagcttagaaagggattgggaaacttcaggtcacagtcaggattgtcctccccaagtcggcctctgaggtttgggtgctgaaccactctcctgtattattgccatcaacattttattcctccaataatctaccctaggccagcaactgtacctctcctcctacctgttcccaaatggggccacgtgcagtgttctgcctcttcctggaagccgccccacattcctgccatggtgccctcactcgctccaaaagcaagtactaaatttccaagtagccccactcgtgcatggcaccatgcacacagcaggtgcttaatgcctgcattagcccaccccaaagaccctgcaccatcagtctaggtcccttggtttaaggaagctgattttcatgcgattgacaaatgggttgctgatctgttacttgtttggagtctttctctctatgaaagaatacgagccattcacatttcct

SEQ ID NO: 9897 - DNA, 550 bp, Homo sapiens
  MAP TO AL022327.17; EXPRESSED IN HELA, SIGNAL = 1.9; EXPRESSED IN BRAIN, SIGNAL = 1.9; EXPRESSED IN HEART, SIGNAL = 1.5; EXPRESSED IN LUNG, SIGNAL = 1.4
ttcctgatgacgctgacttgactcactgggttagggggatctgtaggttcctctgttggatgggcacctcttcctttttataaccaagaaatgcccttttcccacttattgtgaggagcctgccttagttccgcacaatgtaggcagagggaggatgcatgctcttcatcctcttcatctccccgaaggtgtccaggtgccagcaccccagcccggcctgctggggagggggctgcatcagccaggggctgtggtgagagggtgggcaggacagagatgggctccgagcaggggagcctgggcagcagggagaagactggggagctgaggggctgccagtgcaaaggccccaagccagctgctgaggtgggtgtggccctggccagggaggctgaggtgtcaatacaggggtctctcctgggcttggtgcttctgaaagggccttctagctgtaagcagcagtgagggcacaggaagggatggtggcttcagggtggcctattcagggccccagtgagccatgggagggcgggagtttccccgttcaccc

SEQ ID NO: 9898 - DNA, 569 bp, Homo sapiens
  MAP TO Z98884.11; EXPRESSED IN HEART, SIGNAL = 1.4
gaactgtaaatacatccttcttgtttctctttaatgtcttatattgttataagcataaaattctggtttcatattacctctttatgacagtaaggtttaatttctcagttacaaacttctgtaaactgggtcttttatgtaaatttctcgttgggaatttttcttttcactgtcagtttctcttacaccaccagctggtttgcaaatcccagccatacctaaatcagaaatgccaacaaatggacggtccatagacacaggaggaggagctccacagatcctgtccacggcgatgctgagcttggggtcgggcataagccaatgcggttacagcagcaccattgtccatgtcccacccccagagacaggtaccacactcgcctcttactttgaaaatatactcaactttaactacattgtgatgagaaaacaaaagtcatgaataccattcgctcggttgtaacttctaaactacacatattttttcctttctttagttcagttaaagtatttctggaaacattatcatgtttatgttggttacatattttggacagtatttctcagtt

SEQ ID NO: 9899 - DNA, 590 bp, Homo sapiens
  MAP TO AC004624.6; EXPRESSED IN HEART, SIGNAL = 1.5
ctcagtcgttcttttctggatgtctctacttagatcctcagggagaagccagaaacaaagccagatttccaggagaggaaggagcgtgctcagagaggccatggacacgcacagttcccgacaccgacactcccgcctccaagaacgactcgttttggcaccggctgtgtgcatccacccctgactccacttgaattccctatcgtaagttttggttttgcctagaaatattttatgccattgtgaagacattcaagggacagccgaagggaaccaaaagctgctgggagcctcctctgtgatgagcactattttcgggtggctgcttctggtcttgacccctgtcctgcatggggtgtgctaggtctgctgtgagaggcaggaggctggatgctgtcagttcttcctcctcctgccatagcagaggagtgtgagtccccgccccactgatgttcacgcgacttactgtggcatggagcgggcctgaatcccagccctctgcctgaagcaaagcctcccagctgagcccagcctagtcagccgaaccctagccaagctgcagacgagagagtgaaaaagaatggctggga

SEQ ID NO: 9900 - DNA, 574 bp, Homo sapiens
  MAP TO AL022319.2; EXPRESSED IN PLACENTA, SIGNAL = 2.4; EXPRESSED IN HEART, SIGNAL = 1.8; EXPRESSED IN LUNG, SIGNAL = 2.2; EXPRESSED IN FETAL LIVER, SIGNAL = 1.5; EXPRESSED IN ADULT LIVER, SIGNAL =   2; EXPRESSED IN BRAIN, SIGNAL = 2.3; EXPRESSED IN HELA, SIGNAL = 2.3; EXPRESSED IN BONE MARROW, SIGNAL = 1.7
atgagtatgccccgtcctcgggggcttttctacagtgacacccacgccttgtgtccacatgtttttgtgcatgccccactcaccctgtggctgcacccacattcttgtaatgtggtatctgagagccagactctgcttgcacgtgccttcatgttctcttctcccaagtttacacacgtgcacacatgcgtgcacacacacgtccccaccggcctggggctgagtgggcagggctgggtctcgcccgcagtgctgaagctgttgaagatggccacaggaatgcgggccctgctggacacggtggtgcaagctttgccccaggtaagagccactctttctggcagccctcctaggggtcattggtgtcaggctgggccctggggcatgaaggccctgatttcccttctcctcacatctgccagagccagggcagatgctgtctctggggatgcattttgagccaggggctgagaggcaggaagggtccctttatgcctctttcttccagtttcaccatgtggttgccagtgccactctgtgtccagccctgtgcacgcactgagggtccacattg

SEQ ID NO: 9901 - DNA, 552 bp, Homo sapiens
  MAP TO AL022327.17; EXPRESSED IN ADULT LIVER, SIGNAL = 1.6; EXPRESSED IN BRAIN, SIGNAL = 1.5; EXPRESSED IN HEART, SIGNAL = 1.3
ggactgtccctaccctggtgggactaagccacaacctggagcagctcaaggctggcacaacagacacccataaattaataaaaataattgtgaaaacacaagcaaaacaagctcgtcggcatccaagagttctgcagcagcagggttagtctgagagttgctctctctgtcccacctggggctccagggcgctgcagtccgtcaccagagggaccagatgctcgtggccctccaagggcttagtgtggagctactcacccccatcagcacagagaagacccacgtcttgtggctgaagcaggggggcagtctcttcgacagctgcaggtcgctcggcttcgcgtctggggcatagctggcggggtcttgccggccccgctccagcgtgggcatccggtcataggccagctcctctctgaatggctcctgggtcatggcacttggggacaccacagctgtgctgaatgtacagccacgtgtcaccagttctttatctggaataaaattatcatcggctttggccactctgaggaaacttcaataagttgtttc

SEQ ID NO: 9902 - DNA, 561 bp, Homo sapiens
  MAP TO AL023553.5; EXPRESSED IN LUNG, SIGNAL = 1.3; EXPRESSED IN ADULT LIVER, SIGNAL = 1.7; EXPRESSED IN HELA, SIGNAL = 1.4; EXPRESSED IN HEART, SIGNAL = 1.6
ttctgtggttgcacttaggccagggcagagctggtctagctctgaaggtggaggtaatacaggtgcgcatcagtgggtggagagaatggcagccttctgtgttagaatctgccatcagggcaggcccacctggttgggagggcagatgggggccagaggaagggcactgaccgtgaatggggattttcaaggttggccaaggcaggggcagggacagaggccacacttacgtggagagaacttcagagggcaggtctgtgatgtaagaaggaatcttccgcccagtcaggaactgtgccacttcgttgctgaaggtgttacaattgtgttcaaagaggttgtaggcctcacctctgtacattgaaaggtttgcagaacatatatgagaaaccagcaagcgtctatgtggaataactcaagctaggcagtggaatggtgagcacagctcaatgtgaggattgcgatttcccccgtctcatacaccagaaaagcactgcttatttgccattctggccattaataactgatttttaagggaaggagaaactgaaaagacatggc

SEQ ID NO: 9903 - DNA, 588 bp, Homo sapiens
  MAP TO Z83844.5; EXPRESSED IN HEART, SIGNAL = 1.3; EXPRESSED IN FETAL LIVER, SIGNAL =   2; EXPRESSED IN ADULT LIVER, SIGNAL = 2.4; EXPRESSED IN HELA, SIGNAL = 1.3
cacccacccctgatagtgtctgacctccagtgcttttcgtgcctgggtgaagggcctgtgtctctgagctgagttgctggcaggcactctggaggtagagcaggccaactctggcatgaacttggcggtcctggcattcgcaacctgtcctgacatcccctccgtgagccaggtggtgagtcaccccacaatgcaatcttaaactgaggctttctgccctcccctaggatctcctccctcacagcatcactacatgcacacagccgcaaaaaggtcaagaggaaacatccccgacgggcccaggactccaaaaagcccccaagggcccctcgtaccagcaaggcccagcgccgccgtctcacaggcaaagcacggcacagcggggagtgagaccgagaacgaagcggtgccccagtctaggctgcggggacctgtccttgctcagcttggctgtccctgtagcccagcctgcacctaggtaatgactgcacagctcaaggttgggaagccaggacctctctggcctggggccagctgcctttgcctggggtcagctgcctttgcctggggtttgaattcccgaaggag

SEQ ID NO: 9904 - DNA, 566 bp, Homo sapiens
  MAP TO AL021707.2; EXPRESSED IN PLACENTA, SIGNAL =  14; EXPRESSED IN LUNG, SIGNAL = 9.5; EXPRESSED IN HEART, SIGNAL = 8.3; EXPRESSED IN BONE MARROW, SIGNAL =  11; EXPRESSED IN ADULT LIVER, SIGNAL =  14; EXPRESSED IN FETAL LIVER, SIGNAL =   5; EXPRESSED IN BRAIN, SIGNAL =  14; EXPRESSED IN HELA, SIGNAL =  13
gatctccaacgttacaggcgagaacctagatctgctgaagatgttcctcaacctcctctccccccgcaccagctacagggaggaggagcctgctgagtttcagattgatgacacctactccgtcccggtaagtggctctgggcgggtagctgggtgggcacttcctacagtggcatcagggggtgggtctgtgctggggatgcacttatgaggccagggtcttctccttggcagggtgtggggacagtggtttcggggacaacactgagaggcctgatcaagctgaatgacacgctgctgctgggcccagaccccttgggtaacttcctgtccattgctgtcaaatccatccatcgcaagcgcatgcctgtcaaggaggtgcggggtggccagacagcatcctttgcgctgaagaaggtgagtagcgatgatactgaacgctcccctcagactccatcatgctaggctcttggccagatgccctgctcacccactctagtcctcatggctgctctgcaaggtcgggattactggcttcatttttacagatgaggaaactgaggctc

SEQ ID NO: 9905 - DNA, 563 bp, Homo sapiens
  MAP TO AL022238.1; EXPRESSED IN BRAIN, SIGNAL = 1.8; EXPRESSED IN HELA, SIGNAL = 1.7; EXPRESSED IN LUNG, SIGNAL = 1.7; EXPRESSED IN HEART, SIGNAL = 1.3; EXPRESSED IN BONE MARROW, SIGNAL = 1.6; EXPRESSED IN ADULT LIVER, SIGNAL = 1.5; EXPRESSED IN FETAL LIVER, SIGNAL = 2.1
caggtaggtgctcttattgaggaatacagatcactgcagagactgtaaagacctttgttaccaaaggctttgttttaaatttgaattattttaaaaatgtgtaaatggctaaggagtaatatattgtagaattaaaggtgattgtttagaccttaacgtctgacccagttttcctcaccagagatgtgtccttccatcaccttgggtgagtttagtgtccacatggaaaatccacctataacctgggcttctcaacccttcctccagcccaccccagtcacacatacccatgctcacccaaaactgctccccaccagagtcactaattttagcatcctggaccatgacctcctctccttccaactggatcccactcctctggctatgttgacttcatcaaccatacccgcctaatccggtttagattctgtagcctgtaatttcagtaacacgcttgctaatacccatactttacctgccgctctgttttcttgacacctgtctgaccacattcccactttggaaaaactctgtcccccagcacccaaaagcagcccagcatt

SEQ ID NO: 9906 - DNA, 584 bp, Homo sapiens
  MAP TO AC005300.10; EXPRESSED IN BRAIN, SIGNAL = 1.4; EXPRESSED IN LUNG, SIGNAL = 1.7; EXPRESSED IN HEART, SIGNAL = 1.4; EXPRESSED IN BONE MARROW, SIGNAL = 1.6; EXPRESSED IN FETAL LIVER, SIGNAL =  64
caaactccctgaatgccatccttattctggaactttccttgttagcttgttagaactggctgtctgctctcccttctccagtgacagccgtcccctgtaggcctctgaagagggtcagcgctgagctctgagcagccctgctgtgtcagcagcctgagcctgccctgggatgtcagggtaccaacaggcacattgcgctcccttcccagggagttgccgctccacccagacaggcatcctcgcatgcccccttaacaggcagcccttctgttcacagcatgggttaccaggtcaaaccctgccaccaccgtggggaacttgattcggagccccatggccattcggatggattctgcgatgacagccacatctttggatctgtgagacagacagagaagccaggagacagtgcccagcaccgacagagcacaaaccccagagcacaccctccgtgcagggctgggccagccccaagtgtgcaggtcccgtttcccaaacctgaggcacccctgccctcctgaccccaccctgaccaggccattgtgatccctgagagatatgtagcccaaatccattcttatcaa

SEQ ID NO: 9907 - DNA, 579 bp, Homo sapiens
  MAP TO AL008723.8; EXPRESSED IN HELA, SIGNAL = 1.9; EXPRESSED IN BRAIN, SIGNAL = 1.9; EXPRESSED IN LUNG, SIGNAL = 1.3; EXPRESSED IN HEART, SIGNAL = 1.3; EXPRESSED IN BONE MARROW, SIGNAL = 1.9
tcttcagtcccagcaaggaggtggcccgaagaagcagccagcccctgccgactgggactctgtacccttccagacagagcccatccactggtgcctgctgttgcaggagaatggcaccatggtgacctgccagctccccgactggcggctggtgttcttggtgaagaacttccctgtggggcagcgggtcctcatggacagctcctttggagagcccaccacacagggcgaggcccgcagggaggaggccatgtgccaggaggagctgcctctctcgtcaaggaggtgctgctggttgtgctgggcagccgccagagcacaccttacctgctggtgcatgtggaccaaaagctgcttatctacaaggccttcccccacgactctcggctcagccagggcaatctcaaagtccactttaagaaggtccttcacaacatcagcttccgtgagaagaagccgaagccatccaagaagaaagcaggtggccgcacagaggagagggtcgggcccggggccgcgtggcgtgtttccactacttcgaggacatttatggctactcaggagtgttcatctgcggcc

SEQ ID NO: 9908 - DNA, 575 bp, Homo sapiens
  MAP TO AP000347.1; EXPRESSED IN LUNG, SIGNAL = 1.7; EXPRESSED IN BONE MARROW, SIGNAL = 4.2; EXPRESSED IN FETAL LIVER, SIGNAL = 1.4; EXPRESSED IN PLACENTA, SIGNAL = 1.3; EXPRESSED IN BRAIN, SIGNAL = 2.4; EXPRESSED IN HELA, SIGNAL = 1.5; EXPRESSED IN HEART, SIGNAL = 1.6
aaagcaatttgagggtgctcgtgcctggttcttcctcagagggatgacggtgagaacaacggcaacagctacaggaaactgagccctcagaggccctgtgaggtagctgtggtttgcatcactctttacagaagaggaaacagtctcagggaggcccggctgcaagactgggtgacacacacagggagtgtggatctgggccagtggtatgagcacggtgccaggtggctcccgccactccctggggatccaagtgcggggtggctggggtgtaactgggggagaggaggagagcctcactgtccctgtcgctgacacctggcaggcggggagctttaaggtggccacccaggagaggaacccccagagagtccagatgaggctgcggaggcagaagaaggtgagtgagcctgtggcatggacgggccgcaggggatcagaggacagggctcccttccccgccagctggaggcctccatatcaagacagcgggggcttcctccccagccctgtcctcctgtggccactgggcctggaaaaccttcatttgagagaccagaggaagggtctgggaa

SEQ ID NO: 9909 - DNA, 574 bp, Homo sapiens
  MAP TO AC007092.4; EXPRESSED IN BRAIN, SIGNAL = 1.4; EXPRESSED IN PLACENTA, SIGNAL = 1.2; EXPRESSED IN HEART, SIGNAL =  16; EXPRESSED IN LUNG, SIGNAL = 4.7
atcattccacccccaaatgcctcttcacctacattgttgagtgtgatctgtgttaggacattttttcattactataaaggaatacctaagagtgcataatttattaagaaaagatgtttaattggctcatggttctgcagactttacaggaagtgtggtgccaacatctgcttctggtgtgcgcttcaggaagcttacaatcatggtggaaggtgaaagggaggcagcatgtcacatggccagagctggagcaagatagtgatggtgggaggtgccacgctcttttaaacaaccagatctcatgtgaactgactgagcaaggactcactcatcacccagaggatggagctaaaccaattctgagggatctgccccatgatccaataacttcccaccaggccccaccttcaaatctgggcatgacatttcaacatgagattcagaggggacaaacatacaaaccatatgatgatactatgcagctgatgtatgagccacagtttgtggagtaactgagcattgtggaagctcagagaaagggcgcatcctatcaggctgatgtagtgagggggaa

SEQ ID NO: 9910 - DNA, 585 bp, Homo sapiens
  MAP TO AC007281.3; EXPRESSED IN LUNG, SIGNAL = 1.3; EXPRESSED IN HEART, SIGNAL = 1.4
catgctacctctacttttaacccagtatcgatctaaaagttaaaagctcttcactaattccttttacctcatcatatttcaatctcgtggatttctgtttagaatatctccatcacctttttacataaatttatttataagtagggtgactatatgccgcatttttcatgagacaatcttggtttacacatactgtaattgttaacagccccccccccacctttaacttgctaagcattgcaatttggaatataaatggcatagtaactctatttataagttaagtatgcacggaaataagcaaaattttgtacagactttaaaaaattcttataatttttttacaattaaactcctgaaacacctttctcatactagtttcctatctattcataagtgaaatagataccttgataagagactgagttttctggcatcacttcatatcccttaaacatttaaaaatatttctaaatctcagcaatggatttaggatctagttaaacactctcggaagccgtttgggtaggagggtttgtttttgttgtatttccccccttaggaactgggcattgggacagataa

SEQ ID NO: 9911 - DNA, 557 bp, Homo sapiens
  MAP TO Z97055.1; EXPRESSED IN LUNG, SIGNAL = 3.4; EXPRESSED IN ADULT LIVER, SIGNAL = 1.5; EXPRESSED IN FETAL LIVER, SIGNAL = 2.7; EXPRESSED IN PLACENTA, SIGNAL = 1.8; EXPRESSED IN BRAIN, SIGNAL = 4.7; EXPRESSED IN HELA, SIGNAL = 2.4; EXPRESSED IN BONE MARROW, SIGNAL = 2.7; EXPRESSED IN HEART, SIGNAL = 3.4
tcctgcatgctcactgtctgccccttcctcctccttttccaatcccactgcagcactgggccctcctttcctctgcttgctcccttttctcacatttgctccccaaaaccaaactcctcgccatgccccaacagtgccctcctgacccagcccctgcctgccctgctccccccgacccccacccactgccggcccttccctccttcagtctcaccccagggcctttgcacctgccattgccttcacctgcaaaacccagcctctcatcctcagtctcagctcagttgtcacctcaggaaggccttcctgggccacccgggccaatgttgctctcacccccaccctgcctcactctcacacgatcttgttttcttcacggccccaccactcctggaaaaatctcatatttacattttcccgtttgttgttcagcatctgctcccgcacgcccaccagaatgtaaggtttcttcaaggcagtgtctccagggcctataactcactaagcataagctgataaatgaatgaaagaatgaatgagtggcttattgtctcttt

SEQ ID NO: 9912 - DNA, 562 bp, Homo sapiens
  MAP TO AC008022.1; EXPRESSED IN LUNG, SIGNAL = 1.4; EXPRESSED IN HEART, SIGNAL = 1.3; EXPRESSED IN HELA, SIGNAL = 1.3
  unsure 288
  unsure 312
ccctactccttaccttgcccttacatctctgcccttctgaattatttgaggtttcacataacctatgaggtttcatgcctcaatactcatgagtcccctctgtagaagccctccctgctcccatccagcccacttgagaaagccttccctggctcttccctgatcccaacattctgccttcctctgtgttctcaaggcacctgagtttcccacccactcactgtcatggtatttcacctacctgctttgttatctgcctctcccaccaaacatggagttcctggaggnctatgccttcttttctgtttctcntgcctccataattcgtgagtaagagaaaggatcccaatacaggacattaacaaatcttttgaccagagagatgaaaatccaggctggaggcatctcatataggctatcaaaaaaatttattcctgttctgaaatacattccagaacactgccaagaccctggtaagactggcggacacttatttaaatgatagctctcattctctaaaatctgaatttctcctgaaagccttcatgctttaatgagattc

SEQ ID NO: 9913 - DNA, 974 bp, Homo sapiens
  MAP TO Z98884.11; EXPRESSED IN HELA, SIGNAL = 1.4; EXPRESSED IN BONE MARROW, SIGNAL = 1.4; EXPRESSED IN LUNG, SIGNAL = 1.5; EXPRESSED IN HEART, SIGNAL = 2.4
ttttatccggaattttgttcatctttttagagccactttttgtcattctggtagtattggcaaatgctcattcgtcagctacttataactacctgtaagtggcatccttctcttctttttgggtttaattttccataatttgcctctacctttatccttccaggagattctacttccaagcagacgcggtcggccggctgcaggaaagggaagcacaagcggaagaagctgccggagccgccagacagcagcagctcgaacaccggctctggtccccgcaggggagcgcatcagaacgcacagccctgctgcccctccgcggcctcctctccgcacacctcgagcccgaccttcccacctgccgccatggtgcccagccaggccccttacctcgtcccagcttttcccctcccagccgcgacctcacccggaagagaatacgcagcccccggaactgcaccggaaggcctgcatgggctgcccttgtccgagggcttgcagccttacccagctttcccttttccttacttggatacttttatgaccgttttcctgcctgacccccctgtctgtcctctgttgtcgccatcgtttttgccatgtccattcctgggggcgacagcctcttctgcgatatcaccctcaatgtcgtcagcaatgagtccaactctggacccacccccttcagtcaccagccaaaggagagaggaggaaaagtgggaggcacaaagcgaggggcacccgttcattacttcgagaagcagctcacccttgcagttaaacttacttcaggaagagatgcccagaccctctgaatctccagatcagatgagaaggaacacgtgcccacaaactgagtatgtaagtgatgctcattttcaacactcaagtgagaaagtgaatatcttactaaagttaaggtggttgcgttgggactcagtgctgacattctcagtaggtaatccgcgtggcta

SEQ ID NO: 9914 - DNA, 573 bp, Homo sapiens
  MAP TO AL008723.8; EXPRESSED IN HELA, SIGNAL = 1.3; EXPRESSED IN HEART, SIGNAL = 1.3; EXPRESSED IN LUNG, SIGNAL = 1.3; EXPRESSED IN BONE MARROW, SIGNAL = 1.8; EXPRESSED IN BRAIN, SIGNAL = 2.2
gggcttttgtctgcctaatgagctttatgcaggggaaactgaggcctcatcccatggagaagagagaatgagaggcttgagggagtgaccacctgcaagactttagaaggacctggaacccttaaagccgagactggggaagaaaaatcagagtctcagggcctagtcctttgggctgtgggactccagatccagtctaggaacaaggtaggaggtgcagggccctctccaggtttccgtgggctcccaaggagagagctctgtgctggcctgggactcaggaagcccagtcaggagagaggggaaggctgtggacatgaagcagccgggcaaagggtcacagaaggacatgctgttcgtggaggtggatgctgagtctctgtgggaggcacccctagaaccaagaactcctgaattcaaatctgacaggcagatcccaaggcagaaaaactgtagataagacctaaacacagagggtctctaaccggactccacagacagagaaccctggacagacagtgggacttgggtgagcaaaggccctgaccccactgcagaggctcaggagagact

SEQ ID NO: 9915 - DNA, 572 bp, Homo sapiens
  MAP TO AL008723.8; EXPRESSED IN FETAL LIVER, SIGNAL = 1.6; EXPRESSED IN BRAIN, SIGNAL = 3.4; EXPRESSED IN PLACENTA, SIGNAL = 1.8; EXPRESSED IN HELA, SIGNAL = 2.3; EXPRESSED IN HEART, SIGNAL = 3.1; EXPRESSED IN LUNG, SIGNAL = 4.9; EXPRESSED IN BONE MARROW, SIGNAL = 4.3
acaggatgtcacttgtccccttatctgtgggggtgagggtgaggggtgtgtggactcaatgagcagatgccaccagggggagtggccagagcttccttcctcacagctgcagtgggggctgggggtaggggcatcccagggaggggtttttgtatgagcctgtgtcacaatgtggcgctgggtctgctggcgggcctcctgatggttcttgcctgtgcccatggcagcaggtgggacagaacaatcctcaggctcccaggtgcttgcctggaagtgcagcggcggcgagtggggcaagtcttccctcaagccctgggacagtatctgggtgggctggttcccagacacaatgaaggtacgtgcaattttgtgtcagccctgctgctgggggtgggatgtggggttgctgtcagtggcagcagccacaggcagatggctctcaggctcatgcacttgggtttcctttgtcatggagctggcctccttggtgcactgcattgcccattccctggggtgtaggactcttgtgtgggctagagtgctggagacgcggtcaaaccgctggtctagcc

SEQ ID NO: 9916 - DNA, 565 bp, Homo sapiens
  MAP TO AL008723.8; EXPRESSED IN HELA, SIGNAL = 2.1; EXPRESSED IN HEART, SIGNAL =   2; EXPRESSED IN LUNG, SIGNAL = 2.2; EXPRESSED IN BONE MARROW, SIGNAL = 2.2; EXPRESSED IN FETAL LIVER, SIGNAL = 2.8; EXPRESSED IN BRAIN, SIGNAL = 2.2; EXPRESSED IN PLACENTA, SIGNAL = 1.6
atctgatcccagtggaacccctggaaggtcatacaatctttgccaaagggaatttttcttgaattgcataaatgataaatggagtgacaaagcaatgagaaaggaacctggagatagaagaatatcaccagtgctccccaagtcttcccacatacagtgacgataataatataatctagcattaatgtgcaatttttacagagagtcttcacatagatcacttacgctgctctcagcctaagtgaggcagatatgagaagcacagttattcttatcttagagagggggaacttgagccttacagagattaagggggcccaaggtcacagtgacagggggagcagctcagttctctgcagcctgctcatcacacccacttggtccataggtcattctggccatgcctctggagactggcttcattctggtgtccatggcactattaaaacaaagctccagccatagggcatatctggaggctgggtccatcctggactcctggatactactgaagtaaatgtaggggcaaaatcttcagcaggggaggggcacaggtatgtgtgat

SEQ ID NO: 9917 - DNA, 595 bp, Homo sapiens
  MAP TO AC004032.7; EXPRESSED IN BRAIN, SIGNAL = 1.7; EXPRESSED IN HELA, SIGNAL = 1.3; EXPRESSED IN HEART, SIGNAL = 1.8; EXPRESSED IN BONE MARROW, SIGNAL =   2; EXPRESSED IN LUNG, SIGNAL = 1.2
ctctgggaggaactgcaaagccacattgcaaaggatacagatacagagaagggaggcaaattaagaacatttttgcaaacaatcacgtaattttttaatttttaattttttaattctatttttaaagtttttaccaattttctaacttcagaaaatgttttaatgcatattattggattataccctgctttccttccctctgtttattggccactcatcaattgactctttgcacccgaacactaatctttatatacaccctggcccacactccgcctggaattccagtccatgctccttctggaagccagccgtcacccccacgcttcagctcctccttcgcataatgaatagcccaggagcctgcaggagagagagccatggccaaccaccaccagcacttcccccgggcaagccccatgatgacaccatccatcactgccaccctcggtggctgtgcgccccaggcccggccaaggaggagagaaaacactgcccacagctcagtggagcccttaatgattacgtcaagtggcaagccatttattagtctccttagcggccaaaaaaaataaggcctgagaagccagaaagc

SEQ ID NO: 9918 - DNA, 574 bp, Homo sapiens
  MAP TO AP000350.1; EXPRESSED IN BONE MARROW, SIGNAL = 1.5; EXPRESSED IN HEART, SIGNAL = 1.4; EXPRESSED IN PLACENTA, SIGNAL = 1.5; EXPRESSED IN BRAIN, SIGNAL = 1.4
gagcggatctgagaaagccctccctcagaagttctgaagagtagagttgggatcctgttggcccttcatcaggtgaagcagaacccctgagtgtggggggtgagggatcagccctcagtgccaggatccagttgagtggctggacagtgctgagtggggcaggggagacaggctgggtgtcgtggagtgggggtcccagctggtggctgacgtgcctctgctgtgcacacgtccaggtgtgagcatgaacatccagcccatgtacctgggggagagcgcccctaaggagctccgaggagctgtggccatgagctcagccatctttacggctctggggatcgtgatgggacaggtggtcggactcaggtaagcacccctcccccacatgcattgagtatttcggagataccagtaaaagcgtttcttcacctaaatgtctcccctacccactagtagattaaagcattattgctttgcatgaaggcatcgaatcctctatccacatctctgctgccaattcacgaaatgggtatcagtcaacacactgcaatgtgaatcaccttttcccatcctc

SEQ ID NO: 9919 - DNA, 576 bp, Homo sapiens
  MAP TO Z97055.1; EXPRESSED IN PLACENTA, SIGNAL = 3.6; EXPRESSED IN BRAIN, SIGNAL = 4.3; EXPRESSED IN HELA, SIGNAL = 4.1; EXPRESSED IN HEART, SIGNAL = 3.1; EXPRESSED IN LUNG, SIGNAL = 4.1; EXPRESSED IN BONE MARROW, SIGNAL =   5; EXPRESSED IN ADULT LIVER, SIGNAL = 3.3; EXPRESSED IN FETAL LIVER, SIGNAL = 3.1
gtagtggtgatgatggtgcggacaacaatggcagacagggcaatgaccccaacacatgccccatgcacatctttgccgcgggacttcacggcccctcataaaggtcctgctctgactctgggcacgaccatgtgacatggccaacagagacctttgcatgtctctgcttattcttctgcacttccactgtcgccaagagaaggccattggcccaggctaggctgctagtcccaggaagagaaaaagaggtgcctggagcacagctgcccccgccaagcccagcccgaagcagggatctagtcaatctgcacacacgggggacagtctggccaagaccagctgggaaagaatcagggccttgcccaaaatcaaaattcagacctaagtctttataactggtcccctcctccagcagagcctaccagtgcccacctacacccctcagctgccctagaggtcacctgcagcgctggtgagggcttctgacctcaagcacctgcacctgcttcccacctggccacagaggaacaggcccagaagtgcagggagccgacgccctgagccacacccaaccac

SEQ ID NO: 9920 - DNA, 547 bp, Homo sapiens
  MAP TO AL023553.5; EXPRESSED IN HEART, SIGNAL = 3.1; EXPRESSED IN LUNG, SIGNAL = 1.2; EXPRESSED IN HELA, SIGNAL = 1.8; EXPRESSED IN BRAIN, SIGNAL = 1.7
acttgactttgatcccagcgatttttgtctataaatcccttgcacttttttcctaccccaggctgtgttccttgtggctgctttgtcatccctgtcctgcagatgaggaagctgaggctgcagttactgaacagctcttgacactttaattcctggatttttttcaccatactgagctgccctcggggatggactctcctaagtgctccattgacagtggctgtcatgtttcttcttgcagaaagctctgggtgtgcggcagtaccatgtggcctcagtcctgtgccaacgggccaaggtggcgatgagccactttgagcccaacgagtacatccattatgacctgctagagaagaacattaacattgttcgcaaacggtaaggctgcagatgggaggctgtgactgtcaagggcattgcgtctgctgcctgcccgtcaggcagagaaggaggtgttttgtgaaggatgcttggtgatagtggcagggtcaaggtattcaaggtacaaaggtttctgctgaggaaaggcattccagatcagtggtgt

SEQ ID NO: 9921 - DNA, 569 bp, Homo sapiens
  MAP TO AC008009.4; EXPRESSED IN HEART, SIGNAL = 1.4; EXPRESSED IN BONE MARROW, SIGNAL = 1.4
acgcattttcgaggctaaacgtgggctaaactaggagactaatacctttggcactgccctgttgtttcctaacaagacaggcccaaatatgttcaggaagcatggagaagacatctgtcagcaaaagccaaagagaaggacatagcaaagtggagctagtgctgtgaagatgtgttagggcaagggcacttataatcaaatacgtttccactaatctccgagtccatgacagcctctgaccttacaggagttccaggcaagcaacacctgcagagcccgtgcggacaagaagctggagaaccgtgcagaaagacgatgtaaaaacacaaacccccaagagagcgagccaacagggttgtgtcctggtgagtgtgactccccaataaccgaaacctcccgcccgcagtcgcactaaggagcacaacttcaactccacacctccgaggcggggagctgaggttgaggcctgggccggaggtcgccaagaagaccggaaggccgcactcaccatggctccggctgggctcccttgcttccaccgggagcacggctcatcccagctcagaggc

SEQ ID NO: 9922 - DNA, 548 bp, Homo sapiens
  MAP TO AC008272.1; EXPRESSED IN LUNG, SIGNAL = 5.1; EXPRESSED IN HEART, SIGNAL = 2.3
tgccaattatttactgagtgcctgccatgtgcttagttagcactgtactagatactgggaatctagccggaacataccaaatgagtcccacactagttaggtctttcttctcttttcctcagtaatacttcctgagaaactgcaagattcatggcaccatgaaggactctttcttttaaactcaactgtaagaatggtgaccaagagtaatacgatatgcctcagcacagacaaatctacttacatcctttgaccagaaattgatgtctgtgcctcttcatcgttccttgggccacctcctctcttggacagacagcctcttagaggactgctcatccaaatctgcttcttcattctctggccagagataaaataaagtatgaactttaagaatctgcgggatgtgcactgtggaggggcctgtgtcttttgaagctctacataccatttttgtccatttcctttgcagttgtagtgtttgtggtagtctttgaactctcagaatcagggactgaaaatctatttgtccatagcaggtgggaactggt

SEQ ID NO: 9923 - DNA, 595 bp, Homo sapiens
  MAP TO AL031587.3; EXPRESSED IN BONE MARROW, SIGNAL = 1.5; EXPRESSED IN BRAIN, SIGNAL =   2; EXPRESSED IN HELA, SIGNAL = 1.9; EXPRESSED IN HEART, SIGNAL = 1.4
agtagtcaaactgggggcgggagatggaggggaaggctgagccatagtggggcaggctgagggaggtgtaggcgatctgtgaggtggatggctggtcggtgtagtgtgggggcccctggggccccgcggtctctgtcttcacctgggctttggcatccacaccaggtggtgagaccgtgggcagagccacgcctggtggcttggagatccaggcggagtgtccactggccacggccagggcactgcccagcccatagccggctgctgagtagctgctcacatggcctgggtgcccattgggcggcaggtactggtccaactcagccacatcaaaggtctccatgttggacattacctcgtggctgatctcaccaatgtccacgttgccgaagtcgatgtgaggcttcccgccctcccccatggagcgcccgtcccgcttcgggtctgccttgcccgactgcagctctgtcttcggggtggttggaggggtgggtgggccatggctctggcctgggtagaagggagacagagagagagagcgcaagggggaagcaggttagaggcaggtgggcgcacgtgaacttccatggttcac

SEQ ID NO: 9924 - DNA, 545 bp, Homo sapiens
  MAP TO Z97055.1; EXPRESSED IN PLACENTA, SIGNAL = 1.4; EXPRESSED IN BRAIN, SIGNAL = 3.8; EXPRESSED IN HELA, SIGNAL = 2.4; EXPRESSED IN HEART, SIGNAL = 2.6; EXPRESSED IN LUNG, SIGNAL = 2.6; EXPRESSED IN BONE MARROW, SIGNAL =   3; EXPRESSED IN FETAL LIVER, SIGNAL = 1.5
cctgctttggattaggctggccacagccatgtttgactgtgaggtaaaaaccaacccgtcgttaaaaacttgggtaaaatgctagagacgcatgacccaagaccacctcagaagggatcttcacgtgtgggctccttgggaagacagcccccaaggccaggtaagtgccagggacctgcatgtgtattgcacagggaccttgggctcctcttggtggggactcatctcgggaggcagaggaggtgccagcttaccttggagtctccattgtggaggtcagagggcagaaagcggtagggcaggtggctcttgatgaggcggggagaggtcagttcctgcgtggagtcagagggagaggcaggtcagaggaaagggtgagaccaaggggaggagtggggccaaggggaagggggccagaggaggaaggaaggggtggggttcaggggaagtggagttatcagagggaacggcgggtctagggtagcggaggggtcaggagagcgtcaggtaagagggaggggtgaggccagagggaggggtaaggc

SEQ ID NO: 9925 - DNA, 569 bp, Homo sapiens
  MAP TO AL022319.2; EXPRESSED IN FETAL LIVER, SIGNAL = 1.4; EXPRESSED IN HELA, SIGNAL = 1.6; EXPRESSED IN BRAIN, SIGNAL = 2.4; EXPRESSED IN PLACENTA, SIGNAL =   2; EXPRESSED IN HEART, SIGNAL = 1.5; EXPRESSED IN BONE MARROW, SIGNAL = 4.5; EXPRESSED IN LUNG, SIGNAL =   2
tggcttctgtatttgcttcatcagtgtctctcatagtgaatattctggtgttcctatagatcaggttttgctgatttgggaaaataaagactatggatcaactaggaatactgttcatattaatgagaaaatgcttctgttagaaccttgttgaaggcacaattttgagttgatccagttcttgaactctgtagactctgataattctgaatctgttgttttgtcttttgctgatattttgtgtgtggcaaatgtcgaggaagccagttttctcagatttcaaaatagtatatggaaaaatgaagagaaaatgcaatgtgtccatcctttgcaactagtttgggatccagtgtcatctgctctaaaacacaacaaaccagtgaaaaatgatctgcttgtaaatgaagctgcaattaaaaaaaaaataggtgcccttgaagatgagctaacttttcttcactctcagattcctgcaattttggaaatgcaggaactgaaaaacagtacaaattctagttcctttggcttgaatgatgggcccattagtttgggacaaatgccatcatcac

SEQ ID NO: 9926 - DNA, 568 bp, Homo sapiens
  MAP TO AC006548.19; EXPRESSED IN PLACENTA, SIGNAL = 1.7; EXPRESSED IN BRAIN, SIGNAL = 2.4; EXPRESSED IN HELA, SIGNAL = 1.7; EXPRESSED IN HEART, SIGNAL = 1.8; EXPRESSED IN BONE MARROW, SIGNAL = 2.6; EXPRESSED IN LUNG, SIGNAL = 2.3; EXPRESSED IN FETAL LIVER, SIGNAL = 1.3
ggaggctgaaaggaagaaccaacctcagtgcctagacatgagcggcagtgctgaaccccacgtggagcccacatcacaggttaactctaaaggtcatctgtcccaagtccacagggacagggggagcttggccagtgcccgggctcctggggagtggccagacctgccacagcagtccccgggctggccagggctgggcctggtgtgtggagggcagggggaactcacctgtctctgaggatcacatactcagcaggcacctgaggctgtcctagccttctccactgagtcttccaagcctgcatggggcaggcgtggggcagggagggactcagcaggaggcccaggcccatcaacagcacagttgccaagccaacagccagcagcacccctggaaggtgggcgggagaggggaatggggctacatggtggccactcagagcccctccaggctgcctgggaacgtgagaaccgctgttttgcatttgcctcagtggccctggcctctgccctgctgcccttgcggttgaactcttcacagctcctttcctgtctctgggccattagt

SEQ ID NO: 9927 - DNA, 577 bp, Homo sapiens
  MAP TO AC006548.19; EXPRESSED IN HEART, SIGNAL = 2.1; EXPRESSED IN BONE MARROW, SIGNAL = 3.4; EXPRESSED IN LUNG, SIGNAL = 2.7; EXPRESSED IN FETAL LIVER, SIGNAL = 4.6; EXPRESSED IN ADULT LIVER, SIGNAL =  15; EXPRESSED IN PLACENTA, SIGNAL = 4.8; EXPRESSED IN HELA, SIGNAL = 2.5; EXPRESSED IN BRAIN, SIGNAL = 1.6
tgctagaagcaaggagccagcaagtctagacacattccagaggccactaggggttttatgccctgagccctggattccatccacgccacgaggggttttatgccctgggcttagattatggtgcggcagggcagccttccaccctttggcacagaatttggtgttccaaaggccaagaggggttttagaccctggaccctggacatgttccgagactcttttacattatgtcagacatgcaagccctgcctcagcttttttcccaacactcagcttttccccaacagaagtcaggtaatatgattcctccagttttgttctttttgctcagggttgctttggctgttctgattcttgtgtggtttcatataaattttagaatttttgtttctatttctgtagagaatactgaatgtattttgataggcattgattctgcagattaggtggtgtggacattttaacaatattaatttttgcaatcatgatcatgtgatattgttccattttcatgtcctttttaatttctttaataaatattttatagtttcattgttgagatcttttacttcttcaa

SEQ ID NO: 9928 - DNA, 551 bp, Homo sapiens
  MAP TO AL031588.1; EXPRESSED IN HELA, SIGNAL = 1.5; EXPRESSED IN HEART, SIGNAL = 1.7; EXPRESSED IN LUNG, SIGNAL = 1.5
gaaactgtatctgtgtatcggggttcagggatgattaagagaccagcatacaactcagcctaatgaataccttaaaactctcctgccaccatggccagtcccaggaaaggcaggggaccaaggacaggaacagagttagtcacagcctccaggaagccacggctgctggaggccttctcaagccctggtctggaagcactgctggccctgccagaaccagccccagtgctgtctcagaggccggcccactcaccacaaacacgtcacccttgacgctgtccttctccaccacgtaccagggctctctcaggccacctatgtttgctctctggcccaaggtatacaggaaccaacctacagaaagacagtttctccatgaggctgggcaacaagttacagcccacatgtcacgcctcatcatgaaggcagatgctgggagggcagcccagagcaggcccagcaatggtgtaactcactaggaagatacgattctccaaccaccaaagccagccctgaccaagcacctgagcacatctcatcattgtccaggc

SEQ ID NO: 9929 - DNA, 572 bp, Homo sapiens
  MAP TO AL079300.11; EXPRESSED IN HEART, SIGNAL = 1.4
tgctctcctgcaaatgtttcctcttgcttttataccctgaggccatttttaacagggcgcccatgtcttgaaagaaccctagaccataaggactagatgaaagcctcaaggtaattttacaggtggggaaaatgagtctcagagaagaaagtgagttttccaaaggcactcaatagcaaagctgagtttagaactcaacatttattcattcaacaaatagcacctcatgtcctgagcacggttgcaggcactgtagaaaaagctaagaatgggataggcaaaggccctgtcttcgtgaagcttatggtttactgtgggggacgggtaatatacttggaaatacatacattggccatgtccctaccacctgatgtcccaccagtagtccagaagctacaggtcatccttctgtgtctgcatgatattttgccaaacaccaggggtttggcctaagtccagttgctcatatcgcagaccatgagtattgccagggaagaaaatctttattatggaaatgaacaattatcaaaatactaactgcagtagcaaataacaagcccaagagtgtccaa

SEQ ID NO: 9930 - DNA, 575 bp, Homo sapiens
  MAP TO AC004832.3; EXPRESSED IN ADULT LIVER, SIGNAL = 3.4; EXPRESSED IN PLACENTA, SIGNAL = 2.5; EXPRESSED IN BRAIN, SIGNAL = 3.4; EXPRESSED IN HELA, SIGNAL = 2.3; EXPRESSED IN BONE MARROW, SIGNAL = 3.7; EXPRESSED IN LUNG, SIGNAL = 2.7; EXPRESSED IN HEART, SIGNAL = 2.4; EXPRESSED IN FETAL LIVER, SIGNAL = 3.6
aagatgggtgaaagggcagcttctgcaagcaggacccatcctcagtggactggatcatcttcagcgttctcattctcagccgcattctctgggaacagggaaagaggttcctgtctgaatcttcagcatgggctatgcactggtggccccttcctgcttggccactgtgccaggtgagcctacaatgagatgaaatggtgacgtgggacaagtggctctctgcagccacctccagcaccaccctgcctgggaaggcaggggtcagaggggtgggtgtgaaggggttggagtgcacaggtagaggtggctggggtcttcactgtgttggggagggtctcatcgccttgagactctgcagcgtctcctcagaggccttgtcgggaagcagcacctccacagtgtagctgagcttcttggcatgcatccggctgtaggtgttgtcgaagcgcaggacatctgcagtgatggagaggtgatcagggagcacaaaccccgcacatctgcaggaagagccagccctgcatgggtgcatccctggaacccttgggaatgagctgcatccctggaacgtcctg

SEQ ID NO: 9931 - DNA, 595 bp, Homo sapiens
  MAP TO AC005006.2; EXPRESSED IN HEART, SIGNAL = 4.8; EXPRESSED IN BONE MARROW, SIGNAL =  11; EXPRESSED IN LUNG, SIGNAL =  11; EXPRESSED IN FETAL LIVER, SIGNAL =   9; EXPRESSED IN ADULT LIVER, SIGNAL = 8.6; EXPRESSED IN PLACENTA, SIGNAL = 8.6; EXPRESSED IN BRAIN, SIGNAL = 4.4; EXPRESSED IN HELA, SIGNAL = 5.9
ctcttctctgaccaggcaccagcagggcagctccatccaagggaagcgagggctgcccactggcccagccagagagcatgaggggtcagggctggctggagaaaggaggaggagaagtgactctggtccatcacacttaggtcctctggcctgcctctgccacatccagctgctaggggctggcctcagccctgtgaggggccgcaggcactcactccggccttgccttcttggccttcttctcagacctcaccgcctcatcgtgggctttccgcttctccgccagcttgttggcctgtgagggggaaggcgaaggtcaggctgaggtatgtgtagaagggagggtggggggcacagaactcaaagctatatcccttaaaagcagagcttcaagaaaaggtcacaaattctcacaggaaaaaaatctacctgacccacttcatggtgagaaaacatgcgctagccctgctttaacaacattatttcatgggcccacaaatctcgagataagagaatcctaaactcccagagctggaaggagccttggcaactgccccatttccctacaccacctgggaaagctggatgccactag

SEQ ID NO: 9932 - DNA, 570 bp, Homo sapiens
  MAP TO AC007567.1; EXPRESSED IN HELA, SIGNAL = 3.7; EXPRESSED IN PLACENTA, SIGNAL = 6.6; EXPRESSED IN BRAIN, SIGNAL = 1.9; EXPRESSED IN BONE MARROW, SIGNAL = 1.5; EXPRESSED IN LUNG, SIGNAL = 3.5; EXPRESSED IN HEART, SIGNAL =   3; EXPRESSED IN ADULT LIVER, SIGNAL = 6.6; EXPRESSED IN FETAL LIVER, SIGNAL =  11
cacctgctccccttctttcatttactagtttgtgaattggaggaaatcactaactttccctaagcttcagttcccaaagggatataattatacttgcctcacagtgctgttgtgaaaatgaaatgacacagtggctgtaatgcccaccacagtgtcctgcagaggctctggaagtgtgttccaatgtagtcccatctattcaaccactgagtcacaccacacacacacacacgctctcacacacacacacacaccccttggtgttgcctaggcaaacagccttctaaagtcactcctgtctggctcaggacctccaaaatcaagattaagaatccaaacatattaaagtgagaattgggagttattttcacttcagatttcatttaaaaataacaaattacaaaacagtagctagaaagggaacctgctaatgcatattcatgaggactgctaaccagaaataaagacaaaagctgtcttttcttgtaacattaaagtgaaaacaaataagatacggagaaggcagcacgacagccagaacgatacttccatttcagggatgagggaatt

SEQ ID NO: 9933 - DNA, 558 bp, Homo sapiens
  MAP TO AC005006.2; EXPRESSED IN PLACENTA, SIGNAL = 4.2; EXPRESSED IN HELA, SIGNAL = 3.9; EXPRESSED IN BRAIN, SIGNAL = 3.5; EXPRESSED IN BONE MARROW, SIGNAL = 4.7; EXPRESSED IN HEART, SIGNAL = 3.2; EXPRESSED IN LUNG, SIGNAL = 5.4; EXPRESSED IN FETAL LIVER, SIGNAL = 5.1; EXPRESSED IN ADULT LIVER, SIGNAL = 5.5
agataggaggggatggatggcagggacccagcccagcccatcccagcccagctagcccatcctgacaatccagttcagttctcctccattttcccttggaccacacctagcaaacacaactcactaaagcaagggcggtgagaaagagaaggaataccagaaccccagaatgggtatggcaactcaggtaagacagggatgcagctgagttttcaatgtgcaattcactgcccgggcttcccacggtccctctatattcacctaaagtcagccaagctcagctggagcttcttccgggctttgttccgggtgatgtagttggtggccgagcctcgttcatactgggagaggaaaaaaacaattctccattagcaatgattgtagtgactgacatcaaactctgggcatgcctagttccagaggcaactatcactctggataagtggctgagatgagtctaggagaggaaacactgcagggaaggagccgacctgcctggatgagctctcctgtaccatccttgcggctgtcagcatagggaacacatacatctgcatg

SEQ ID NO: 9934 - DNA, 560 bp, Homo sapiens
  MAP TO AC006992.2; EXPRESSED IN FETAL LIVER, SIGNAL = 5.1; EXPRESSED IN ADULT LIVER, SIGNAL =   5; EXPRESSED IN BRAIN, SIGNAL = 2.6; EXPRESSED IN PLACENTA, SIGNAL =   4; EXPRESSED IN HELA, SIGNAL = 4.1; EXPRESSED IN BONE MARROW, SIGNAL =   4; EXPRESSED IN LUNG, SIGNAL = 3.7; EXPRESSED IN HEART, SIGNAL =   3
aatggctttgaccaaaatgctgataatgatatggacagtaaaatccaggcagaggtagtctcagatggaatgaggaacttgttgggaactggagcaaaggtgattctttttatgctttagcaaagagactgacagcattttgcccctgccatagagatttgtggaactttgaacttgagagagatgattcagagtatctggtagaaaaaatatctaagcagaaaaacattgaagaggtgacttgggtgctcttaaaggcattcagtttaaaaagagaatcagaatataaaagtttggaaaatttgcagcctgacaatgtgatagaaaaaaaaatcctattttctgaggagatattcaagctggctgcagagatttggataagtaatgaggagccgagttattcaccaagactatggggaaaatgtctccaggacatgtaagagatctttgtggcagtccctcccatcacaggcccagaggcctaggagagaaaaatggtttcgtggggtggccccagggtccctgtgctgtatgcagtctagggaattggtgtcctgcat

SEQ ID NO: 9935 - DNA, 575 bp, Homo sapiens
  MAP TO AC006992.2; EXPRESSED IN HELA, SIGNAL =   5; EXPRESSED IN HEART, SIGNAL = 4.1; EXPRESSED IN BONE MARROW, SIGNAL = 3.4; EXPRESSED IN LUNG, SIGNAL = 3.8; EXPRESSED IN FETAL LIVER, SIGNAL = 8.4; EXPRESSED IN ADULT LIVER, SIGNAL = 6.4; EXPRESSED IN PLACENTA, SIGNAL = 5.6; EXPRESSED IN BRAIN, SIGNAL = 6.4
ggcaagttgttttcctttccatatctgatattcatttaaaaggaggaaataaaaaaaatgcacctttcactattattgtgaggattagcactagtgcccagcactgtgtctggcactgatgcaggttcttagtaaatagtagcctttgttatttacagatggggaagctgagggccagggaggaaaagtaagattcaagatggcattagtatgtgctgaaactggaaacaaggagagaaaacagattaatctgaaatatgccatgtcagatcagtattagagagctttccagccacattgtacctcatctaggttcgtcccaggaaggcaagctgcctgctcgtgctgccagtagtaggtgggaggattctagaagtaaagctgttgtcactaatcactgaatcattttttttttccttcctggttggctgagaacctctcctaaaagccaaaccattcttcccagatccctgacaactcaacaaaaactcaacttattctatgtaatgggctcatcttggtgctttagaaaatttaaaaaatgagtatatcctactgcctgcctttgagttttc

SEQ ID NO: 9936 - DNA, 544 bp, Homo sapiens
  MAP TO AC006427.13; EXPRESSED IN BONE MARROW, SIGNAL = 1.3; EXPRESSED IN HEART, SIGNAL = 1.4
cttaagcaccctgcctcttcattattttcacttagcatgccacataacttcttaaacacacactccctgttattcgtacacctgcggcttttgctgcatttgtgtgggagcaaagacacaggctcccttgtaacaagtataaatctctggggagatttgtacttctttttaccctaagtctcagatgaccttcaacccttcccctgtctgctggcacattgccgggacagacactaattggaattccagctctgccagatctttatgacttaccatatgtttttcattcctgttatgccgcagggccgagttttccagtggcatttgaagcagtttcttcgcccgcatagggtctcactctggccctttaaggattccacctacttgctttttttgagttagcacccctttgggcggaaagaaattcttcatttgccatttgtgagttctcaccccaagtcccaagtcctccagaggttcctcctttatgtcgagagggcacataaagccctcttgaatccaagggctgctatttttgtgagca

SEQ ID NO: 9937 - DNA, 578 bp, Homo sapiens
  MAP TO AC007841.1; EXPRESSED IN FETAL LIVER, SIGNAL = 1.2; EXPRESSED IN HELA, SIGNAL = 1.2; EXPRESSED IN PLACENTA, SIGNAL = 1.8; EXPRESSED IN BRAIN, SIGNAL = 1.5; EXPRESSED IN HEART, SIGNAL = 1.3; EXPRESSED IN BONE MARROW, SIGNAL = 1.6
agagcagcctaatcccacagggaggacatgcaagcctgctggaaggctgaggggttcagggaaggctgcctcggccctccttcgggccacacgttcccgacctggattatttcctaaaatggtttcattttacaaatgagcatgaggctccgctggaagcagccaacattggcagagattaaataattagcatttcaaagtgttcgttttcattttcctctttgccagggtgagaaccactacaggacaaaaatgagctccttttttccagtctcagcccaggagggatcttcacagagaaagcaagcccagcccatccccacagctggctccctggtgcccattctgaaaggctggacccatcctgacctgtccctgccccaaggactgcctggtgagggatggcttaccaacactgtgactcagtccttccaacatgcccaacaggtcaattctgggatattccttacaggaattaatgagagcacattgccggtaatgttggcattagtagattacatttaaatttaaaaattccttttatggggtttaagaatagagacaagacacccatgcaa

SEQ ID NO: 9938 - DNA, 557 bp, Homo sapiens
  MAP TO AC008272.1; EXPRESSED IN PLACENTA, SIGNAL = 1.5; EXPRESSED IN HEART, SIGNAL = 1.5; EXPRESSED IN BONE MARROW, SIGNAL = 1.6; EXPRESSED IN ADULT LIVER, SIGNAL = 1.6
tatggcataacctgcccttcgtatcccattctccataaatgaacttccgtcggtatataggttaaggtcaggattagttaaagggacttctaagagatcatctcaggcggcaaaagtctggactataatttgttggcagtcatgctcgattggttccccatcctctgggagaaaagtggcagggttgagggccatgcacatgagtatttgaagcgccagtccctcaaggagtagcacctggtatctaagtaggtggttgtctgatagccacaaacttcctttggcacctagtatgccatttacatcatgagtagtccagacagtgagatcctttccttgtattattttgatagcctctgacactaagacggccactgctgcagctacccttaaacagtgagggcagccttttgctactacatcaatttccttacctaggtatgcccctggttgtggggttgtcccacgagtctgagtaatgactccaagagctatcctagctctctttgtgaagtataaagagaagttttgtcctgtgggaaggcttaaagctggag

SEQ ID NO: 9939 - DNA, 559 bp, Homo sapiens
  MAP TO AC004832.3; EXPRESSED IN HEART, SIGNAL = 2.8; EXPRESSED IN FETAL LIVER, SIGNAL = 6.7; EXPRESSED IN ADULT LIVER, SIGNAL = 6.3; EXPRESSED IN HELA, SIGNAL = 4.3; EXPRESSED IN PLACENTA, SIGNAL = 4.3; EXPRESSED IN BRAIN, SIGNAL = 5.1; EXPRESSED IN BONE MARROW, SIGNAL = 7.3; EXPRESSED IN LUNG, SIGNAL = 5.5
atgtgcccaggtgtagagtggctgccatccctacctgagcacacagcccgggaacaggatctcgttctccacctgcagggaggagccgcggcccacggacctcgtgtgctcatactgcagcctcacctgcttgcacaggtagtagctcttgggcacctcacccccgtagttgatctgtgggtgaagggggtgtgtgggcactaggtcacagcttctcccctccttccccatcctctgggcaccctgtaccttggtcaggcacttggggttgccatcggggtcagtcatggtccccccaaactccacgggcagctggtcggggctgatgaattttgtcagctcctgcttccagttgtctgcatgggagcaagagagggactccaaagggactcaggagactcaacagagggcagagggggctgagcccaggtctgtcctttggccagctgctctccctccctggcgcgcttttgccactccattgcctagagcagtcctgtcccagaagagggaagccaagtggccctaggtcttgtcctggggctcagcatgtgctgtg

SEQ ID NO: 9940 - DNA, 586 bp, Homo sapiens
  MAP TO AC005006.2; EXPRESSED IN FETAL LIVER, SIGNAL = 3.5; EXPRESSED IN ADULT LIVER, SIGNAL = 5.7; EXPRESSED IN HELA, SIGNAL = 4.2; EXPRESSED IN PLACENTA, SIGNAL = 6.9; EXPRESSED IN BRAIN, SIGNAL = 4.6; EXPRESSED IN LUNG, SIGNAL = 4.3; EXPRESSED IN BONE MARROW, SIGNAL = 8.6; EXPRESSED IN HEART, SIGNAL = 3.4
agatcttgaaggcccagacccccgagggccactttgggaatgtctacagcaccccattggcattacaggtgggaaagagaccctggagccatggccaccctggggaacagtcaggggtggagtggtcaggtgctggaacacctagcccctccctgccggctgacttcctctctctcttcctcactctatcaccagttcctcatgacttcccccatgcgtggggcagaactgggaacagcatgtctcaaggcgagggttgctttgctggccagtctgcaggatggagccttccagaatgctctcatgatttcccagctgctgcccgttctgaaccacaagacctacattgatctgatcttcccagactgtctggcaccacgaggtagcccaactttttgtggaagcacagccctttacaatctgctgcgcacccattgacgtcccagtgaggggaggttgcttcatcctgatttgctgagtcagcacaagattgtgggtgtgcatgggacacagcagccaaaatgtggtcatagcttctagaagctcacagtgtggggaggaagacagtaaatggagatccctgggc

SEQ ID NO: 9941 - DNA, 578 bp, Homo sapiens
  MAP TO AC004832.3; EXPRESSED IN PLACENTA, SIGNAL = 3.2; EXPRESSED IN BRAIN, SIGNAL = 3.3; EXPRESSED IN BONE MARROW, SIGNAL = 3.4; EXPRESSED IN LUNG, SIGNAL = 2.4; EXPRESSED IN HEART, SIGNAL = 2.2; EXPRESSED IN FETAL LIVER, SIGNAL = 2.6; EXPRESSED IN ADULT LIVER, SIGNAL = 2.8; EXPRESSED IN HELA, SIGNAL = 2.4
atgcccagatagtgctccctgggcgttcttgagtagtcctttctaggccaggggagcaagaatgctttactggccctttcacctctggagcctctgtttgcccttctgtgaaatggggatagtgccagaatcttcaaagcctgctgtgtagactgaatggggtgacgcttagctcagtgcttggcatgcagaattctcaacaaatgatggtgtatggtggtgttggggctaggaccagatcccagttcaggggtctgaccctgatgaccttccaacctgtgccttccaggtgcctggtgaacggcaagaacttccactcccacttcgtgccccaagaggtccccaagagactggagctctccttccaggccttcagctttactggtactcctgctgatgtgagtggaaacagataaccccctccccactctgccaccccgtaggaacagagacccaagctgaggaatctttggaagttacggggtgcaccacaagctgttgctctggaatctaaaggtcccatctgatgctaccaagaaggcctgttccttccacaggggcactcatggtgagtcatg

SEQ ID NO: 9942 - DNA, 555 bp, Homo sapiens
  MAP TO AC004832.3; EXPRESSED IN ADULT LIVER, SIGNAL = 9.5; EXPRESSED IN HELA, SIGNAL = 6.9; EXPRESSED IN PLACENTA, SIGNAL =   9; EXPRESSED IN BRAIN, SIGNAL = 7.1; EXPRESSED IN LUNG, SIGNAL = 5.8; EXPRESSED IN BONE MARROW, SIGNAL = 9.4; EXPRESSED IN HEART, SIGNAL = 5.1; EXPRESSED IN FETAL LIVER, SIGNAL =  14
aagctggaacgtgtggtctcagtacagtgttgtccctgaaacccattctgtgggatcttctaggaaaggtattaaggccttctggagtttgagtcacaatgagggagcccaggacatttttaaactaaatcttggctctcagtaagcagctgggtcatggcaggccaagctggtcatcaaagcaagcggggggtggccctaggacttctccttacctcctggtacacttctaccagaggtttccagaagtgtttcagtcccaggccctcacagtcaaatatcatcacgatggtctcaatcttcttccctagctgcaaggatgagagcaagaagtagttctggagttcagggtgtaggcttgggagatggtaatccaagtacatgaccccttggggcttcttctagaccccgactctgtcctcagaggaacaagtagactaaccagtgaatgcatttccccactcatccatccatccatccacatccatccatccatccatccatccatccatccatctatccaaccatccacccacccacccccgtatatatcaa

SEQ ID NO: 9943 - DNA, 565 bp, Homo sapiens
  MAP TO AC006548.19; EXPRESSED IN FETAL LIVER, SIGNAL = 3.5; EXPRESSED IN ADULT LIVER, SIGNAL = 2.4; EXPRESSED IN PLACENTA, SIGNAL = 4.8; EXPRESSED IN LUNG, SIGNAL = 1.4; EXPRESSED IN BONE MARROW, SIGNAL = 1.4; EXPRESSED IN HEART, SIGNAL = 1.4
gggagactgcctacaaatggtgccaacagcttctgcctgcaaacacagtccagcttctcatcttgacgtgagggccttttatgtgacctttcccttcataccaccttaaagtatgcccattttatagattaaatgactaagattcagatagagaaaataattggccaggtcacatggcagtgaatgaaggattcataagttcttacaggagtccagcagctacagccctggtccattggccaaatccagtggcatcaagacctcagtgtgaggcccagcgctcgtcctcacttgctgtctggccatggtcagtgagcctctctgactcaacctgtaaacctccctgggcctggatttcctcatctgtcaggtgaggatatgtctaccttctattagtttggcattctatacttccatggtgcttacccacaatcatgttcctgctttcatcttctacttttagatttgcagagtcaacttgcaagacaattagtcacccccttggaacatgatcctacagtcaggacaatgggagggtgctgggggtctgtggtgtggtcacgag

SEQ ID NO: 9944 - DNA, 579 bp, Homo sapiens
  MAP TO AL034406.1; EXPRESSED IN HEART, SIGNAL = 1.5
ttttcttctctttgtcacacagttcttagtctattctgttattttatttcagtcaacgtttctcttttttcagcttgggaagtatgtgttgaaacatcttcaagcttactgattctttccttggctctgtgtattctattgatgatttcatataagatactcttcattttgttggagttcttttttttttatccctagcattttcttttgattttttcttagggtttctacctttctgattagctatctcacgtgttcttcatgatgttcattttttccattctcttagtatattagttgtttttttaagttctcagtctgataattctaaaatatcagctatgtctgaatttggttctgttgtttgctctgtctcttcagattgtgttacttgattttgtttatgtttgcattttttttcgtttaaagccagaaatgatgtaataggagagactgaagtaaataggcctttggtgataggttttatgctgatctggctgggagttaggctatcataaatggttgctcgacctgtggcattagtgtctacattttcctctagtcttgtttctctcctcc

SEQ ID NO: 9945 - DNA, 575 bp, Homo sapiens
  MAP TO AC004032.7; EXPRESSED IN HEART, SIGNAL = 1.3
cctcctcatctgtctgaggctgagctggagaaggctgggaggacagagagaaggggcagaggccaaagcccccctcaggccctgccagggctgtgctcctggactagagggctgcagtccggccaccgggcacaggctggctaattgccgacgcgcagcgctgccctggactatgacacaggcccctgacagacatgatttatgagggccctcggcaaagcggaacccactcaattgcctattacctcacttagcagacaccttgtcaccgcccgagagccgggtgttaaaaatacaaaccaggcggccagtcggccccgagtgtggcccctccacctgctccgcaccagataaccagccttccagccagccagctgatctctgctcggctgaactggggagaagacgctgagagtggattaatgaagtagatgtcatcaggtctcagtctctgggttgaggaggtggacagcgggagcagggatgggaccccaatatccagactggtccatctgctggtagtgcctgctgcagagatggggacaactgaggcacagcaagatgcagccactcat

SEQ ID NO: 9946 - DNA, 582 bp, Homo sapiens
  MAP TO AC008151.1; EXPRESSED IN HEART, SIGNAL = 1.3
tgggttcagggtggtagaagtacgtgtaggaggccagggtgttgtctgatggctgagtcccctatcatcttccatcatggaggccactctccaccccactgaagccaccccaaggaggggagggatacaaactgataggtaccttatacacaaacatacgccatcacctaggagcagagcacttatgccagcacagcctgagcctcaggctgcagccctggccctggctggtgggtcacgccgtggatggctgggagcagctcctctggctggagctgcgatggctcaggacaaaggaggacgagttgctctttttgctggcactcgtctctcccaggcgtctgcccttcaggtagctggcggagcagcacaggaagcgctgcacgagttcgtggaagaggtggcccgtgaacagcatgtagatccaggggttgcagcagctgttgaggctggccaggagcatgacgatgatgaaggccgaggctgagggggtgggggcaggagaaaggagaaaagggcattaattaacactggagccacttccagacctatctgacttaaacatcatttcctgagcgacag

SEQ ID NO: 9947 - DNA, 574 bp, Homo sapiens
  MAP TO AC008022.1; EXPRESSED IN HEART, SIGNAL = 3.5
  unsure 386
  unsure 408
  unsure 412
tttttgttttactttctgatatggcaaataatatagatattaccccataaacaaaggctctttggggtctgcagtaatttttaagaatgtaaggaggtcctgagaccagagagtttcagaaccgctgctctggtgctttgcagttagcagggtactttcccacaccttatttcattggttcctctcgtccctgtctctttccttgtctctttcagcctccccccaccctccacccctcacaccaacacatgcaacacatgcacactgaaagacacacctgtagtttttagcttggtcttctgtcatatcttggtttccaagttttgcttcatatggttttatcatctggaggaaatggggaagattgcatgaaaacatctagcaantgatccaacgatcttttctaantggntcagcattcatttttaacttgtcgtgaccttaaagctatctgtgtagaactgttttatagaaaaatatctggaactggaaattcccaggaaaatcataaaaaagaaactagttatgaaagactggagaccttacttctaaaccactctcactgaaccagcca

SEQ ID NO: 9948 - DNA, 555 bp, Homo sapiens
  MAP TO AP000129.1; EXPRESSED IN HEART, SIGNAL = 1.6; EXPRESSED IN ADULT LIVER, SIGNAL = 2.2; EXPRESSED IN FETAL LIVER, SIGNAL = 1.3
aaatctcctcctcactcccgctggatagacttttatctcctttctttcactaaggtataatttacatatagtgtatgaacaattcgattagttttaacaaatgtatacacttttgtaacctatagtcttatcaagatatagaatattctatcacaccagaaatttttcttatgcttcccaaccccccatcaattaccactcctaggcaaacacttttctgatttctatcatcacagattaattttgtgtgtgccagaatttcatataaacgaaatcatgcagggtgtgctatttggggtctggcttcatctactcagcatcatgtttttgagatgcatgcatgtggcactattagtaatttactccattatattgcattgtatgaaatttttttccaatttctcccttccatctttattgattctcaagattttgcacagaaaactctttggggtctagaagagcagtaattgcatcacagtttccaagacttcaagtttcaaaagcaaatcattaaaaaaaaaaatacagctcctgatttgagttagatacagg

SEQ ID NO: 9949 - DNA, 573 bp, Homo sapiens
  MAP TO Z83844.5; EXPRESSED IN LUNG, SIGNAL = 1.6; EXPRESSED IN HELA, SIGNAL = 1.4; EXPRESSED IN HEART, SIGNAL = 1.3
caagtcttgtccccgttttgctaggattttcattcctgaatgtttaagtatgtcctggaagcttctaggggcaggaaagggtttggaaacagaccttcccctgtgtaatccttgctttagggcagatagacttcttccatcagaagccttctctagtcccaacccaggcctgtgatgcagcagggcgcgccaccacttgccagagccatggtggctcggggtgcccagcccaggtccccccagctactgctccatgtaagtcattgtcttgtgcctctttagggaggggctggagacaggtctgaggaggaggcgtcatccacggagaaaccaaccaaagccttgcccaggaagtccagagaccccctgctctctcagcggtgagtcttggcctgctgcctccccggtcccacccctcctggctggcagtagtgacctggcccttagggtggtgtggagcaggtgtagggcccggagcagccctctgcctgtccagtgatcctctgcctctcctcattgccccgtcctgtcccacccacccctgatagtgtctgacctccagtgcttttcgtg

SEQ ID NO: 9950 - DNA, 548 bp, Homo sapiens
  MAP TO AC006548.19; EXPRESSED IN PLACENTA, SIGNAL = 1.2; EXPRESSED IN BRAIN, SIGNAL = 2.2; EXPRESSED IN BONE MARROW, SIGNAL = 6.5; EXPRESSED IN HEART, SIGNAL = 1.5
aggatggacctactctgggccatgggtgggagtttcagatgactgactgggtgcagcatccagtgtgtgaaggagaggcacagtagtaacacctggctcacaggactgctgaaagggtttgaatgagcagagagtgccccagtgcatggctcagagtaggacccagtgggctcgtagctacgcccacaggtgtgttccactgggtgctgggtctgtgtcctgaactcatttgcaggattttcctccttgtgacagcagaacccggcatctgcatttcctgtttccggtggcaccagcagttcagccccgccgaggagcactggtaacatccactacgcggccctggacttccagccgagcaaggtgcctggggtggagctggggttgggcagagcccttgggccctgggggagagactgtggggccaggcccttcagcaccggcagcactgggctgctgggctgccactcccagcccagtgcctggctcttatgctcagtggtgctctgatctggatctcggggctcctgttccttccctctcagcgt

SEQ ID NO: 9951 - DNA, 575 bp, Homo sapiens
  MAP TO AL079300.11; EXPRESSED IN HEART, SIGNAL = 1.7
ggtagctgttgtgaccaatgactatttcatccactaagttatagaaccagccccggcatctttgtggctggatgcttatcctctggctctttcccatagcaggtataccagaaggatattcctttttggacagactacagggtgggcagaagaagtctccaaggcttttctggagcctctccttgaagagtaacagtgcccctgcctatcctgcctcatagtgactctgagagccttctatacgtcatccctctccctggcccaggctctgggaagcaggcacggtaacatgttgattatctgacatccctccatcatgatgatggagagttccatctgagccacaccgacctggtcctgtgaggacagctagaaaaaaaaaaaaaagactcttactggtccccggatgaagtcagacaggatgtgtttgaagtgtccagtgctgggacaggaatggggatgatcatccagcctcactcagcagaacttgggatccttatcccaaagcctacaaaacggcatctgaattcagattaaattcttcagtctctatacagaaagaagtggatgcaagg

SEQ ID NO: 9952 - DNA, 578 bp, Homo sapiens
  MAP TO AC007462.2; EXPRESSED IN HEART, SIGNAL = 1.4
gatttgcacatggtatctcatctcaattaattcccagaacaatacacaaggtttgccagtgtattctttgatgctcaagggttcataaaaaggactaggagggctcataaggctcatttggatctgacaggtgttggcaatatttaggccaatttcccataactaccctagtacaagcagagcccatttgccatctcaagtttattagaggttgactagtatgatgttagttatcaatattcctaacctgtctgtgggaagttctctcctccctctcccctcctcatgccccactcacactcccctacccacaatacacagactccttaggcctctcaccactggcttccccttagagttctgggactgtaaaaagaattcaaacactataagggcctgtactagtgtaccattctttctctaacacaacagccctttgacagttaaaaatttaacatgtgtagttcccgatattttttgtgaaacccaatgaactcagtttcccaaaatgatatccaaaatgacattaaatgtcttttggctgcgacatgtgtgaatcatgcacatcaatagagtgg

SEQ ID NO: 9953 - DNA, 563 bp, Homo sapiens
  MAP TO AC007556.2; EXPRESSED IN HEART, SIGNAL = 1.6; EXPRESSED IN ADULT LIVER, SIGNAL = 2.2; EXPRESSED IN FETAL LIVER, SIGNAL = 1.6
catcggctccaacatcaagctgcctgggcttgaaccctggcccacactcactagcagtgtaaccttaggaagttgcttgtctctctgtgatttcacttctccatctctaaaaaacacacgtaagtgagatatgattagggttacgtgaaatcattcatgtaatagacagtaaagtgtatttaaaatctgacctatacttaagtattaagcaatcattatgactatttctcctattatgcccatggcaagtcaggttgtttggattacctggttcataattcaggcatcaacattaattgggtggcattatactcaagttacggttgccatacctaggagaaaacagacccagaacacagtaagtaaatattttatctacatacggggatagatggtttttgcccagaacttaaactatgtattcatagcagaatactttctgtttccagtttctcaaaaggaagtaaaatggagcagttcaggagagttgctagttgtagaatgagagaatgctctgttgctctcgcctgaactattttaggctggattgctatttctaggga

SEQ ID NO: 9954 - DNA, 584 bp, Homo sapiens
  MAP TO AC007463.3; EXPRESSED IN HEART, SIGNAL = 1.4; EXPRESSED IN BRAIN, SIGNAL = 1.5
tgcatcactaacgagtcaacgtggagagaaaacacttggtgtcaatgttggggcatagttagagaaatctgtttcttgaatctcctctcataatgtggaaatggtaacaaaggcagaaagaaaaccatacaaagcaaaatatgggggtcccagagttccctgggagacaaagcagcccagcccagtgaattctccgcagcgaccttcgcagatactcgcctgtgcccagccggccgggtgaccccgcagccccactctgctcgaggtccgtcccatcatacatccggaagccaggcagcatccagggcttgctcatgagccctgccttcagcggcatcaccttcttatactcatcaaggaaaggctggacctcttcaaaggccttcctggctcccagctctcttcatgttgtcttcataagaaatctcatctgggcccatgccatcaaatgcccatgactatttcgccactcctcatgcatgcatcccccggtacacagtctgagatgttgtactcaatggcttccttaggaaatctcaaatccacctaaagaaaatgtgtattacaccacactcatgatcccc

SEQ ID NO: 9955 - DNA, 548 bp, Homo sapiens
  MAP TO AL022329.9; EXPRESSED IN LUNG, SIGNAL = 1.8; EXPRESSED IN HEART, SIGNAL = 1.5
tctgaagggttttaatgtggcctttccctgctcttttcaagagattctggagaaggtggcagcgtgacccatcagctagtaatgccactgggggtggacacgtagggtgtgcttccttcaggggttccagggacgctggtaatcaataggggcagcctccgctgttggcaaaatgggtgagcctgtcacaacggctgcctttgtattccccctcagagtgatccagagtttgtgcagtggaagaaagagttgaacgaaaccttcaaggaggcccagcggctattgcgtcgtgccccgaagttcctcaacaaacctcggtcaggtactgtggagctcccaaagccatccctctgtcacagaaacagcaacggcctctagcacccagaaacagggagggtcctcgaggaggacacaccagggtctcagccttttggggtgaacgaggatgaggcatctgatctattcgctaccgggactcctccaggctcccgagaggagtcgggacccttcggcttggggtcagctcagctccctgccttgtcacattt

SEQ ID NO: 9956 - DNA, 581 bp, Homo sapiens
  MAP TO AC007363.3; EXPRESSED IN PLACENTA, SIGNAL = 3.2; EXPRESSED IN HEART, SIGNAL = 1.4; EXPRESSED IN LUNG, SIGNAL = 1.5; EXPRESSED IN FETAL LIVER, SIGNAL = 2.9; EXPRESSED IN ADULT LIVER, SIGNAL =   5; EXPRESSED IN HELA, SIGNAL = 1.4
ggaggcaaaggagaaaggacagcatatatttaaaaatgtgggttattaagctgaccgtggcttggtgaacaagtgtagttgattgcctggtctcacaggatgtcttcagagagatagtatgaaactattacagctccctcctgggggtgtaaggcaaaagaattagcctctggcttctatttccaattgattaaagttagcttcacagggcattacgcccccacacttccaggttgcaccacctggtctcaccatcagctgttggggaggctaaatccatgacagcaactgcggcatctgcagcataagccgccatcctcagggcaagccagagaataggcctgagacagtggccttcccacatccctgcctgcaacttgcagcctcaaaggccctgttagatggatacccaatgggttctgcagcaccgtttagctgaaaaccccagcttctcatgtcccagtatctcatgccccagcagcaaaagggaagtccaggtcagatgccggttagttatgctcacaggtgtcatgagggaccacagcattgcctgatgccacagccataggaacacgtaagcc

SEQ ID NO: 9957 - DNA, 562 bp, Homo sapiens
  MAP TO AL022319.2; EXPRESSED IN HEART, SIGNAL = 1.4
gtgcatgtgagtccgatgagcctcttccatcctttccccagcatccttgggatgcatatttttggctgcaagttcagcctccgcacggacactggagacacggtgcccgacaggaagaacttcgactccctgctgtgggccatcgtcactgtgttccaggtgagtggccgctgcgtgttcatgtttgctggggaagcgatgggacagtaggcctgggaggggcggggctgacaactcccatgcctccttgtagagcctagccctggactaggggtaccccagggctaactgtgtctccccaacagatcctcacccaggaggactggaacgtcgttctctacaatggcatggcctccacttctccctgggcctccctctactttgtcgccctcatgaccttcggcaactatgtgctcttcaacctgctggtggccatcctggtggagggcttccaggcggaggtgactgtggtcttggcagaggaagcacccccacagggtctgcgaaagactgggcgagggagaggtggcctggatgggggagggctgcaattcaaacttct

SEQ ID NO: 9958 - DNA, 592 bp, Homo sapiens
  MAP TO AL022319.2; EXPRESSED IN HEART, SIGNAL = 1.5
tggggtggatcaacatcttcctctttgccccctccctttcctccacctttctgtcctttgtgctctgtgccctttcccttgaccccaaccctctgtggtctttgccactccccctgcaccacctgcagaggcccagcggctgccctactatgccacctattgtcacacccggctgctcatccactccatgtgcaccagccactacctggacatcttcatcaccttcatcatctgcctcaacgtggtcaccatgtccctggagcactacaatcagcccacggtgagccctggtctgcctcccagcccaaggttacaaggtgagggtggggtctcagcaggaccccaccccagggatagggtggggaaggggttagctgatagcaggatgtgagcagcccctccatgctgggctctatgctgggcactgcagtgggaggaggtgccggacaagcttgccctcaggaagctcagagtctggaagggaacggtcagagggaaggtgggtcagggaggcaggatttggaccgtggcttgcacatgggtggcaatgactgtgatgtgttaaatattgactctttgcaaggcacgctac

SEQ ID NO: 9959 - DNA, 560 bp, Homo sapiens
  MAP TO AC007556.2; EXPRESSED IN HEART, SIGNAL = 1.4
ttgtttagaaggaatcggcacatttattagaaattggtgattgctcttcttgatggaaaagtgactcagaatatagttaaaaggttaatgggcagaacttccatggcgcttcttagggagcatttaatgtagaagctgttgcaagtgctattgtggaggggtcaatgtgaacggtggctgcatccatcttttacttcttctgggattatctttcttcaggtccaaatggtgccgagtgccagtgtccacatgagggcaactggtatttggccaacaacaggaagcactgcattgtggacaatggtgaacgatgtggtgcatcttccttcacctgctccaatgggcgctgcatctcggaagagtggaagtgtgataatgacaacgactgtggggatggcagtgatgagatggaaagtgtctgtggtgagttggactcttggcgcttttggtaggagctaatggcatcttgatgtcaagtgtttggtatggaatcctgctatgtgtgaatgtgtttgaaatgtgtgcctaggcatcctggtagagctgaaaaatgtttcctc

SEQ ID NO: 9960 - DNA, 585 bp, Homo sapiens
  MAP TO AC006548.19; EXPRESSED IN HELA, SIGNAL = 1.3; EXPRESSED IN BONE MARROW, SIGNAL = 1.5; EXPRESSED IN HEART, SIGNAL = 2.2
ccatataccttggtcgtgggtataggaaagcaggaaacaggtcagactgtgaaaggcctcgtaggttctgctgagtagtgtggacaggtcctggagagcaagccagatgaacagtgtgctgggcttggggtgcagcaaagtactacctgtccatgatacctctcttccttgccaacaccacaggagagtctgagatgccatggaaggacaggcaggaaagctgggtttccaagaatgcggcttcagttggcaagcctcgcttcacccagacagccttagctttgagggaggccatgacagaggagccaccatggaggagggaggtggcagcactcaccactgcagaggctgtcttgcctgggggcccggaccacactcctggactgtggggaaccacgccgtctgggagtggagcagtcagggcccagggcactatgaggcctccaggctgctccagggtaggaaagaggcagagcgtctgctcctcagccaggatagccaggaggccccagccctcctctgggaggacagaggaggcaggcatgtgagaggaagagtgctggtgctggattaccgccactgtct

SEQ ID NO: 9961 - DNA, 573 bp, Homo sapiens
  MAP TO Z82201.1; EXPRESSED IN HEART, SIGNAL = 1.3; EXPRESSED IN LUNG, SIGNAL = 1.7; EXPRESSED IN BONE MARROW, SIGNAL = 1.8; EXPRESSED IN FETAL LIVER, SIGNAL = 1.7; EXPRESSED IN BRAIN, SIGNAL = 1.6
ctctcattagggcttgtggccccccagcaccctgggaagccctctagagtgtgtggagccaggactctgtgacgttagaagggatgttcactgtggggattgagaggtgttgagtggatctttcagtctgggttgctgtggctgtttgggctctgggtgccggcttcccacaggatgattccgacgctgccttgttctcttcgatgcctgccctctgcagaaagcatcttcccttcttgacgctgacacacagaagctcacctgggagcaccacctcaccaggaggctggttccaagcacaatatccaaggacaccagcacagtccacagcatcagtactccacacacacaagcatcattccatacatgtaggcatcataccctacacgcggtcatcattccctacgtgcaggcattattctgtacatgcaggcatcattccatacacacaggcatcattccctacacacaggcattattccctacaagcaggcatcataccctacacgcaggcatcattccctacatgcaggcatcattccctacacgcaggcatcattccgtacatgcagg

SEQ ID NO: 9962 - DNA, 551 bp, Homo sapiens
  MAP TO AB016897.1; EXPRESSED IN HEART, SIGNAL = 1.8; EXPRESSED IN FETAL LIVER, SIGNAL = 3.2; EXPRESSED IN HELA, SIGNAL = 1.4
gacagcaccttctccacgtcctcacatggcaggaggtgaggaaggaacagactcgccccttgagccgctttctaataaggagctagtcctcctgcacgtccctcctctcagcaccgtcacactggtgaccacgtctccacatatgaatcttggtggacacattcaggccacagcagacgcaatggaaaggatagttcaaaacataaaaatggtcacaattttagtagcaaaaggccagcctcctgtctggactgacgttgggccttctgctgtgggtttcctgagagcctcactcccctcttcacacgcaggcctccttcactctcccgggggtcctggctaggaacctccacgcccaccacccactgctcatcttctgctgcccccacagcttagatggcctgttcacccagtgtttctcatctgcctgcctacaccatctcttcacatctcagcttagccacgaccgtctctcggagccctccggaccttggaagactggtctaggggctttcctatgcacttacaaggcagcctttaagccccagtag

SEQ ID NO: 9963 - DNA, 574 bp, Homo sapiens
  MAP TO Z95114.19; EXPRESSED IN HEART, SIGNAL = 2.7
aacacaaaggcatagttctggtctttttattgggttttaataagattacacatgtaagcatctggattccagtgaaaacgccctccagatcatctaatttcaaaaggagcaggtactaagtgcacagccctacatcataacaccttgctcaaccacgaccccacgggaaacagcagtgataaaaaaaaaaaaaagcaataaatgaaagtttgactaagctatactaaactattagggttggtaaatttcatgccagctaccggagtcatacaattaacccaaactcacaaaaacaagcattcagcgtgtttaaggcaattctcataataaagctaaactttaaaccgagccatgaaaagctcaagctaaaataaaaagaaactacaacaatgattttagtatcctgagaacatgatagctaaggcccaaactgggactaaatctctcactgtgcttagccataaacttaaataatttaataaacagaattatttaccagagcactataagcaatagcttaagcctcaaaggacatggcgatgctttacagctctcgagaggggcctgttctata

SEQ ID NO: 9964 - DNA, 556 bp, Homo sapiens
  MAP TO Z83844.5; EXPRESSED IN HEART, SIGNAL = 1.3
tggtgggacacatttcagtgttaaatgctttcatatgttctgcactatttcccatgtgcatgtgatatttattccaaaataaagttttaaaaaatactaaaatagtcctgaacggagcatggtaggggagtggcagggctggcaccaaactcagggctcactggctggctctgccacacacctgcttcaatcaatgatcttccctggaaattcacttcctcacctgagatgagatgaagaaatgggattaagtgaggccctgagcgtggccaggcccactgagtctgagtagcagctgttattcctgttaatatcctggtcaagcctgttccaggcacctgagtgacacagacatgaagggacacgccctgtccctgcgctcaccctgcaagggcaaggggagagacagcaacaccagggagagctgatgcaactgacccggtgcaactaactcggccagaggagccagggaaggctgcacaggacaggtgacgcctgcaccgaggcttcaaagataaataggtgtaatcgggggaccaaaggagagagggtgctc

SEQ ID NO: 9965 - DNA, 569 bp, Homo sapiens
  MAP TO Z98884.11; EXPRESSED IN HEART, SIGNAL = 1.5; EXPRESSED IN BRAIN, SIGNAL = 1.4
tgtggtcacagctgttcagtcagcttccacagacattgacttcatttgtctaaagatgatggtgatggcaagcatgctaacctaggatttatcatgttctgagcacttacatagattaacagccctctgaggtaggtgtaactactgtccccatttaagggttgaggaaacggaggcatgaaaggttttgttctaagttcaaagctacacagcttttatatggcagagccagggctctgcacagccattcactggtctgactcctgcacacctccagctctatcgtctcctgcgtctcctgctctccctccctctgtgctccagccacacggtcttctgctccctgaaagccctgcctcagggccttcgcatgtgctattaccaggcctcagttctggacatgtttggctctttctcatcattctgagcaaactcgaagtgtcacctttcctgacttgtctaaactctgtccccatcccatccctccttattacgttatcctgccttcttcacttaccaaggcctgcctgtgctagagtagggagagacctcccctcttcgctattgaa

SEQ ID NO: 9966 - DNA, 577 bp, Homo sapiens
  MAP TO Z98884.11; EXPRESSED IN HEART, SIGNAL = 1.6
gattgccgttgtattcagggtgatccaggaactcttaggaagtctaattggaaacagcgaccagaaggagggcagggggtgagccacaccggtatctgaggggtggcaagtgtctgagaaagtgtgttccaggcagagggagcagcaggcgcagaggccctggggtgggccatgcctggcctgtgggaggagtgacacggagctgctgtggcctgagtggaggaaggaacgaggatggaagaagacgggaaagcacgggccacaccacagggagcagtgacttctgcacgaagtgttttatttcagtttatcacttgcttattttcaaaacgttttactttgggaattttcaaacataacacaaaagaagagaagataatgtaatgaactgctgcggtgtcatcacccagctttttaagaactcgaaccctggccagtctggcgtcatctctgccagcagcagttctttaaccccctcttcccaggttaccagacagcgtagctcagatctcgtctgatttcctgcatcagtatttcagaatgtcattctaagagaggaagttctcattcacgtttg

SEQ ID NO: 9967 - DNA, 563 bp, Homo sapiens
  MAP TO AC006427.13; EXPRESSED IN HEART, SIGNAL =  15
tcaccattttaatgccatttcaaggataccttacatttccgttcagatctgccgttttatccagctggatttcttttcaattcaacccaattttaaccccaatgctcaagttattttttcccattatgcccacgaatagaagcaaatcataccatcttgcataaatgcagctgttttctctcctcttttctcattttagatgaaaatcttctttcttctttttttattaacaacagcaccccctccttgctccctgctgagggcctcaccattggctgtgtttgttcctcatctcctgtgctctttcctgtttcttcagggagtccctgcagagatgttttcttatgtaatcaaattataggtcaaattcatcaaaagaatagcacacaggtacattccttacgaacattaatgaatgcagtaagtaacacattctttttttaagtggaggaattggtaaataaagatgctctttggtaaagaaaaatgaagcaaggaacatagctttaaaatatgccaaatttccttgttaaactgtaaagttgtgcaaatgtttattgcca

SEQ ID NO: 9968 - DNA, 571 bp, Homo sapiens
  MAP TO AC007539.8; EXPRESSED IN HELA, SIGNAL = 1.5; EXPRESSED IN HEART, SIGNAL = 1.3
tgtgtcttcccttgcctttgccacacagtcttacagttgccttctgttcccatgactctccttctttgtcctttgaaggctcctttccctctatcccatcccataacttttctgacgcacgctctatccatagttggcattgctcattcctagggcttccgccgctctttccacgatgattctcagatctccatcagtcccagatcgttccagggctctaggcacagatatgcagttgcctactggacatctctacttagttgtctcgtgggtttccccacttagacatggcaagaacaactcctcctcctcctcctcctcatcctcatcaaaactgcctcttacgttgtattctctatcgtagccatcggcaccaccaaccacacacatgccctaagaccatgagaatcatcgctgattcctcattgtccttcccttctgtgtacgatccaccatccactttttaattctacctcttatgcatgtctcaaatatatctacttcccttcatgtccgttgctatcaccccagactctgctaccataatctctcgcctgaaccactgcataat

SEQ ID NO: 9969 - DNA, 555 bp, Homo sapiens
  MAP TO AC006427.13; EXPRESSED IN HEART, SIGNAL =   3
cttcactcaataaactgggaatgataaccacagtcattatgaaagtaggagaagctaatcaaagttccatcttcataattttcattttagagaccagcagctaaaaacaagtagacaggaagagaataattggccacttattctaatccctgccatttgtaataataataaacagcacaaatagcaaacaaattaatgactgctccccctgagccaatcaattaccaagctatgatcactttacctcctacttcttgaatcttttccttcaccactgactcattcaagctgtcttttcctctttcgtggatcatggcaatagcttcccagcctctattcttgtttctcttaaaaatatcctccatattggtcactaaaatgagctctctcatacaaaaaccaagccactgccttgcttaaaacccatcaatggctctgaaagcatcatggaatgtctaacctccttattgcaacatgtaaacttgatagtttcctgactcctacctgtaaatcttctgcactcagactcatagtgcaccagactgagctctttaa

SEQ ID NO: 9970 - DNA, 561 bp, Homo sapiens
  MAP TO AP000353.1; EXPRESSED IN HEART, SIGNAL = 1.3
tttccctggaaggctctctccacccagccccataggaagtttaggctaagtctggctctcctacatcaaagaggctttccatctgtctcttgctctgcctcagaaccagggggcccagaaccccctcctcacccaaaagcccctccacagaaaaacagcttgactctgacttcttccatctggccttgctctattaggcgaggcaggagaacaaaatgcctctgccaccaggcttggcagcttttgtctatagagcacaggcagacccagccggtcctctgagggctcagcacaggccattagcacacaaagttgcatgtcagcccatttgaacctagggccacaggatcccaaagatcctgtggaggaggtaggactggagccaggcctgtaggctgttcctgaggccagaattccctctccacacatactcaaagactccccagttcacttgggcagcatgagagtggtgcattatggtgctaggctgcgttcagctgtctgggaagcgggtggagtatggctcagggagtggtccttgcccaaaggtacatggctgat

SEQ ID NO: 9971 - DNA, 574 bp, Homo sapiens
  MAP TO AP000356.1; EXPRESSED IN HEART, SIGNAL = 1.3
gctcacacgacaaaggctgcccgtggccagtgaggtggctgagcccagccaggacctttctcggactcccgggatgtggctctgctcgtgagctgcctggtcagctctctcggggtgagaggggcttgtcacacgggcccctgcctgcagtgtgacccttctcagcttctctcagcagccctgcctgcagagtgtcaccaccaccatgatcatttccctgacactgcgagggtcgggggacgtcctgggtagagacagggcccgtggcagcagcaggctcaggggcgccctacactggtgggctggggacctggtggagaccacgccaagggctggacaaggggacgagcctccaccctggcctctccgcaggcctcagcagcccctcccacaggcagaagggttgacactgggttctgccctcactgcaagagctgcaagtgccacgtgctgttctgcccaatctggtgtctgcaggtgaggaaaggactgccgctggcccgtttctgagtgttcagcacctaagggtgacagcactgtctgtccctaccctccgggtcctgtttgaagatca

SEQ ID NO: 9972 - DNA, 577 bp, Homo sapiens
  MAP TO AP000354.1; EXPRESSED IN HEART, SIGNAL = 1.6
gcatgatatgccattacttttgacatcattatatttttaggagggatcatgtttaaattgtcagttcttaaaaaggattggtggacattcttggctgagagtcttcattacatacaaggtttggtgtttttcttagcccagtcacacaccagcccgtgaccagaaagaacaattctggttgtccttgtgactgcctctctgtgtcctggtctgaagagtcttgtcgggctgtagccctaggtaagaagtgtgcaggaagagagtcagcaggacaactccggtctgtgtttggtgggggctggcagggaagcaggtcctggggaagtgatgttcaactgagacctgaagggtgatcaggttagccaggattaggagggaatagaggaggaggtgaggggacagctggtgccaatgcccaaggaactaaaggaactcccaagacagcttgtgtttagagaacaagggaggagtagaacaaggtgaggctgaaaatggagatggtcgaagcaatatctgattgtgtccttccctgaaggctcaaaaatgtttgatgcttccttgttgccctcagactaaa

SEQ ID NO: 9973 - DNA, 558 bp, Homo sapiens
  MAP TO AC004832.3; EXPRESSED IN HEART, SIGNAL = 1.4
ggtttttgctgagcttgaggtcacagcaggtcatagtggggatggagtgtctgtgttgctttgctgtgaccatcgggccaccactaggacactgtcccagccgttcctgaggagtgggccagctgtgatgcataggctgtgacctgctgttgtagaatccctgttcctgagaggttgaacagggtctggccagggaaggctgtgaactcattgtggattcagagatcaaagaggagggtgtggggaccatgaggttcacctagaatttctccatcttctccatgaaggtttggtctgggagcagtacctccacggtgtagctgatgcgtttagaatgaaccaggctgtaggtgttgtaaaacctcaggacatctgcagtgagggacagacattcagacaagatgccccacctgggactctgacttccatggtggtaaatctctgcgtgggtacccagaccagggaaccattgccacaattgagagcccagagccagcctcacactgtgcccaccagaaccaagggccctcacctggtaggacctggatgcacattgta

SEQ ID NO: 9974 - DNA, 567 bp, Homo sapiens
  MAP TO AC006427.13; EXPRESSED IN HEART, SIGNAL = 1.8
aggtcagtgcagattcccaccatcatcctgcagacctgcgtaatgtggcagagtgccagaagtcatatttagtctaaatgttgttgttccctgaaggactttcaatacggtgattaaaatttccagggatcattcacccaatggtttcagaacatttggatagtatctgaactcagtgaatctctgcctgcagcatttagtttgatctatggccatcaacagcacccaccaggaggtggaggccacggcttcatatgctgtccactacttgccgatcagtctacatttttcaatgacttattgtccttcaaacctttgtccactagatacttacttaattttagtgattgacaaggacatttctacagttagaagcacatgcatcatctggaataacaaagggtagggttagccatgaggtagggataaagtgctgcgaaatatacatggattttcttcatttggccaaaatgtggcttttctcttaaggttgtcttccttctaactaacttatattttaatatccttataacttagtcattcaacaggtttttcttgaatgcctgc

SEQ ID NO: 9975 - DNA, 571 bp, Homo sapiens
  MAP TO AC007556.2; EXPRESSED IN HEART, SIGNAL = 1.6
tggttctcttctctcaatgcccatttaaatgccatttgtatttgtgactttggttacatgttaactaaattttaactgagaattacatgagttatacactaagtatgttaagttcaatagcatataaagaaaacaaaattaattgcagtatctggagaatctctgtttgttctaaatctctggaagtcatgtagtttgtcccagtgttaacagccttaatttactactgctttttctaggtatctattcttcactgattggttccgtcctgctaaaattatgagagcatggagtgacggatctcacctcttgcctgtaataaacactactcttggatggcccaatggcttggccatcgattgggcgtaagtaggaatcatcatccccgatacttagttctcttttactgcagaacacataatgaggcaggttgggtgatatgatggtgtaaggaaactggtactgcttgccctcgcggaattttaaataattaattggtgatgggagaaggatattgaacaagaacacaaaggacataaacatagttggccagctactgctggggtgaaaa

SEQ ID NO: 9976 - DNA, 576 bp, Homo sapiens
  MAP TO AC007567.1; EXPRESSED IN HEART, SIGNAL = 1.7
tcaccatcaaaaacaaatcttaggtctctccaggtaatttttgtatccaaaccatttaatagtgaatacaatgaaagcccagaataaaaagacaccaacagaatcctgtaggttaaaagctggcctgatctcaacatcagtaggttcacagttattttgtttggtagctcaaaataaaattattcttcccaacaggcgaatgaacttagaagcgctagcaattctggctcctttcaccagaacaagctgcaatctgcaataaacaggaagaggcttcatatgtgaggtaaaagcctctcttactccctctctgccaaggacgattgccaatgcagttttgataagtaaataaagaattactggatggccaagaactaccaccctaagcatatccagcagtcagcccatgctattcaattgtgctacaactacctttaaaaagaatgactgaactcacagaatggtaagagttggaatggagacctcccactggacagcaatgaaagatgaaaccctaaatatatctgaagtgaattttttcattgaactgtctcaaaaatcatgatgagattaacc

SEQ ID NO: 9977 - DNA, 596 bp, Homo sapiens
  MAP TO AC007539.8; EXPRESSED IN HEART, SIGNAL = 1.6
aagcagcaaatgcaaaggtcctgatgtagagcaaactcgtgcaaggaacagcaaagaggtcagtgtggccggaccagccttgagagaggcagtggctggagaagaaggaaggagagggtctgggccagggtattgagggggtctctggatattttgaggactttggattgactccgaatgagatgggaagtcaccagggctctgagcagaagaccacaggatgagtctaatatttctgaatgctcactctggttgcttagtggagactagaccgtgggggcggggacagagtggggagccagtggaggcagttgcagtggtccaaggggaggtgacagtggcgcaaactagggtaggagccacggagatggtgagacaggttcaggtgctgactacgtttcaaaggcaaatcattcaatatttgttcatggagtgagtgtgaggcatgaaagaaagaggtcaaggatgacgccaagattttgatatgaacttgaagaatatcggtgagggaagacatcaggtatttacttatgaacatgtgacatttgtgacagctgctgcatatccatgtagaaacgtgcaacattcaagggaat

SEQ ID NO: 9978 - DNA, 558 bp, Homo sapiens
  MAP TO AC007841.1; EXPRESSED IN HEART, SIGNAL = 2.2
gaggaaatctgtcgccaatcacagcagggtgaaaacagggggccaaggtgcttctaggggagccttctaaaccttcgtgttggtctttgtccatcactcccctgatcaccaggtagcttagacagcctgctgaaaagaattcagagcctctcaagctctcagcgggaaaaccttggagccctgttgttggaaatagctcccaacctgcatcttaggcaggtatttttaggttctgtcttgaagacacggaaactttcatacatttcagcttctttgtctggagtcactgcaaccccagacatgtcattgaaagggggtataattgtggtctcctccacccaccaatctgagcaagtctgaaagagtttcctgctgtgcagcagggaggctggagagccttttctggcaagggaaagtcaaaatggattttttaaaataataatatgttgatcaagaagagaaaaaaaaatctactgaggagagggggctctgctttcgggctgatacagagaggaagtttacctattattttgaaacctcgtcttaattctcctttgc

SEQ ID NO: 9979 - DNA, 574 bp, Homo sapiens
  MAP TO AC007281.3; EXPRESSED IN HEART, SIGNAL = 1.3
cctttaactcttggcagttcgaaagttagaaagagaaagagaggaagaggatagttaagaaggaaggtggggaagcaaaatgagtgggctgtgacaagaaaagaccaaggcagagaagaaaggtttttaacagtaagataactctctgatgttccctttcttcaccatttttttttttatctcttccctgctgcttattggagcctttcaaatagaagcactgtggtttcaaaagctatgactatttttgatctttcctctaatctatattatgaggtggtcttggccaggagatctgttctcttgatttacatagtgcactgtaccaaaagtaggaggtttagcagcacaggcaaagacaagtacaaaataaggggtaaacagaaaacagagagtatgggcaggcaccccagtagccttttccacgctgcggtccctagctctgagttcgaagaggctggtgcaaatgagtgagtcctatagttttgctacctaggcctgtctgaaaaatccagacaagatatcctcagtttcaccactgtacagattgcacagctgctgatagaaggtgcag

SEQ ID NO: 9980 - DNA, 568 bp, Homo sapiens
  MAP TO AC008151.1; EXPRESSED IN HEART, SIGNAL = 1.5
agaggtgaacaccacccaagcaaggtccctgatctcacagacatcacattccagggagagaagacattcagtcaaccattagtcttttggttttttcttttcacaaatagtttttgaatgcctactgtgtaccagacactattctaggcctggcagacagtagcaaacatggcagagtccctcctgccacagggcttacattccagtagggaaagaaaagcaacaaacaagcaggcaaataaataactctggacagtgcatattatgaagaaaagaaaacagagtctggaacagatactgatgtggaggagcgaggaggtcttttagaaagagaggtccaggaaggctttaatgagaaggtgacatttgtgcagctctcaaatgatgagaagcagccagccgtgggaggatcccagagaagacgattccacaccgaggaagcatgagagtgaagccctgaaacaggagcaagcctagcatgtttagcaaccgtaagaagggctgtgtggctgtagcccagaaaacagcaaaagagtggaagggcacaggccagcgaggtggatgaagc

SEQ ID NO: 9981 - DNA, 466 bp, Homo sapiens
  MAP TO AC007032.2; EXPRESSED IN ADULT LIVER, SIGNAL = 3.4; EXPRESSED IN LUNG, SIGNAL = 3.9; EXPRESSED IN HELA, SIGNAL = 1.3; EXPRESSED IN PLACENTA, SIGNAL = 0.7; EXPRESSED IN BT474, SIGNAL = 2.1; EXPRESSED IN BONE MARROW, SIGNAL =   2; EXPRESSED IN HBL100, SIGNAL = 2.5; EXPRESSED IN BRAIN, SIGNAL = 0.69; EXPRESSED IN FETAL LIVER, SIGNAL = 3.5
ggcagtgggaaatgactgacctgtattatctctcttaaataatctttttccttattgttcttcctttttccaaatctctgtctccttaggtctgttattacctaatatctcccttctttccttgtttctgagttaaggtcagtagtacccaacaacatattaacagtccacggccacatcaatctttgacaaatgcactcaataaccacattctacctagatacataaggaaggtagtaacacagaagtaattaaaaggtgacataccccaaggccattagttacaacatagctacacttgaaggaacaattcaagagatctcttgtcaacttctgtagcaaacctccaccagaaccgaaggcaatattttcaatactccacattttttgtttcatgccttctacaatctagaagattaaaacaaaacaaaaccaaaccaaaccttaatttggaagagaatggaga

SEQ ID NO: 9982 - DNA, 444 bp, Homo sapiens
  MAP TO AB000882.1; EXPRESSED IN LUNG, SIGNAL = 1.6; EXPRESSED IN BRAIN, SIGNAL = 1.6; EXPRESSED IN HBL100, SIGNAL = 2.6; EXPRESSED IN ADULT LIVER, SIGNAL = 0.81; EXPRESSED IN BONE MARROW, SIGNAL = 1.7; EXPRESSED IN HELA, SIGNAL = 1.3
gatcttccctggtagggctctatttctttaggtgaccaaccagaccctaagtgaggagttgactacattgcactccttccatcctggaagggccagaggttcatcttcacagggataggcacctattccataggtgggttttcctgtcctgctctcagaccctcagccagcaccactctctgggggctgttgatattcctgatccacaggcttggcactgctctccgtgcagtatcttcgtgggggacccacttgacagcgaaggaggtgcagtgtggccatgctgtgggacccactggtcctatcaccatctgcaccaaccaagggctgctggccataaagaatgttgaaaagagcttctataggcacagctcaacgccagcttgcaggaagcactctgcgggtgggagggtgccatctttcaggacatggtgcattttaaaa

SEQ ID NO: 9983 - DNA, 467 bp, Homo sapiens
  MAP TO AC000353.21; EXPRESSED IN PLACENTA, SIGNAL = 0.62; EXPRESSED IN BT474, SIGNAL =   2; EXPRESSED IN HBL100, SIGNAL = 1.8; EXPRESSED IN FETAL LIVER, SIGNAL =  39; EXPRESSED IN ADULT LIVER, SIGNAL = 0.91; EXPRESSED IN BRAIN, SIGNAL = 1.2; EXPRESSED IN LUNG, SIGNAL = 1.3; EXPRESSED IN HELA, SIGNAL = 2.4
ccactgacttcattgatctctaatcttttttaattccttgggccaactttgttcgtgcccccacactgtagccagaagcccgttggcgagctctggcacctgcaaaccaccccgtggaacgagtgtttcctctggctgagggttggagaggaggtgtggtctcagcaggcggcccgtagcctcacagccaggcctggtggtgaggtcaccatgtccaccaaggtgcccatctatctgaagcgtggcagtcgcaagggcaagaaggagaagcttcgggacctgctgtcctcggacatgatcagcccaccgctgggggacttccgccacaccattcatattggcagtggcggcggcagtgacatgtttggcgacatctccttcctgcagggcaagttccacctcctgccggggaccatggtggaggggcctgaagaagatggcaccttcgacctccccttccagttcac

SEQ ID NO: 9984 - DNA, 443 bp, Homo sapiens
  MAP TO AC002470.5; EXPRESSED IN BT474, SIGNAL = 1.2; EXPRESSED IN BONE MARROW, SIGNAL = 2.1; EXPRESSED IN HBL100, SIGNAL = 1.2; EXPRESSED IN FETAL LIVER, SIGNAL = 0.89; EXPRESSED IN HELA, SIGNAL = 0.74; EXPRESSED IN ADULT LIVER, SIGNAL = 1.2; EXPRESSED IN PLACENTA, SIGNAL =   1; EXPRESSED IN LUNG, SIGNAL = 0.66; EXPRESSED IN BRAIN, SIGNAL = 1.2
gggctgagttcacaacactgactgcaactgctcagaagcctgtttcctatcagagagaagatgatgcggagcttagatactgggaggtgttactagacgtggtgtctggtggtcatgaaggaggggcatacgagaaaagtagagggtgtttttgcttggtttttcagaaagtttgcatgtcttgggagaagttgaaaaaagtctcatgcttacgagggcacaaaaatgaaaaccctgctcaaatgtggatgtgcatgtgcatggtggtgaaggcacgtgtacctcatgtactccagccggtacacagagaggaggtaggtggacatggcgaagtccagcttgttgatgagtgcggacacctcgggaggggggtccagcaggttgatgatagtgctgcggagctcactcagctcagcctggagggagagaaacatccgagggct

SEQ ID NO: 9985 - DNA, 490 bp, Homo sapiens
  MAP TO AC002470.5; EXPRESSED IN BRAIN, SIGNAL =   2; EXPRESSED IN HELA, SIGNAL = 0.9; EXPRESSED IN ADULT LIVER, SIGNAL = 0.94; EXPRESSED IN BT474, SIGNAL = 1.4; EXPRESSED IN BONE MARROW, SIGNAL = 0.73; EXPRESSED IN HBL100, SIGNAL = 0.96; EXPRESSED IN LUNG, SIGNAL = 0.85; EXPRESSED IN PLACENTA, SIGNAL = 0.61; EXPRESSED IN FETAL LIVER, SIGNAL = 0.8
catgtcaccacagaaaagcctaaagaaccagcaagatgcagcagagagcatacacaggccctgaggccacgggcatccccatcctcccaggtccagtgccctccatgcaggacaggacaccagacgtgcagagcacagcaggggctaatgctccactctgcacgtgcccaggaggcctactgcaactgcctgtgctggtaacagagccaagtgttctagaagtagtttggggaaacttgtggcaagaaagcctctgggtcatgcctggagctcacatgagaggcaaggcagtctgtctcaccctgctcgtccttcacagcccacaccatgaggtccacacaggcagcattcgcctgacagcgcagtttgagggggctcagctcattgtggatccggtctgcgtcatgtagaatcttctggagctccccctggctcgtgttgaactgctccagcacaaaatcatggatctccttcacaaaagaggtcggga

SEQ ID NO: 9986 - DNA, 478 bp, Homo sapiens
  MAP TO AC006160.9; EXPRESSED IN FETAL LIVER, SIGNAL = 2.1; EXPRESSED IN ADULT LIVER, SIGNAL = 0.88; EXPRESSED IN BRAIN, SIGNAL = 0.87; EXPRESSED IN BONE MARROW, SIGNAL = 2.2; EXPRESSED IN HBL100, SIGNAL = 2.5; EXPRESSED IN HELA, SIGNAL = 1.4; EXPRESSED IN PLACENTA, SIGNAL =   1; EXPRESSED IN BT474, SIGNAL = 2.1; EXPRESSED IN LUNG, SIGNAL = 1.2
aatctgtgtcatcatattcacagtctaaactttgctaaagacaaaaaaaaaatacttacttggtttatccaagctacagacatgttataaagtactcaagaaattaacagcttataaaaatagtggaaaatttttcaatgggagcataaaactaaaatgaactcattatctggcaaagagttcttccaaaatgtcaagtccacaggaaggaatgtgtggccaacctcacgcatcagcccactcataggccaactgcctctgccctttgctcacgttggcttcagaggtgcagggatgttggcagatgcctgctccaggtaggccaaggagccctgagggatgtcggcgggctttttgtgctgcacgttgatgtcctccagcacctgctgccaatgcctcagctttgtcaagtgcttctggactagtgcatctttccgctgtaattcattccttagttctgacacatcctgcagatgaa

SEQ ID NO: 9987 - DNA, 454 bp, Homo sapiens
  MAP TO AC004832.2; EXPRESSED IN HELA, SIGNAL = 3.5; EXPRESSED IN FETAL LIVER, SIGNAL = 1.8; EXPRESSED IN LUNG, SIGNAL = 0.94; EXPRESSED IN PLACENTA, SIGNAL =   1; EXPRESSED IN BT474, SIGNAL = 2.2; EXPRESSED IN BONE MARROW, SIGNAL = 0.65; EXPRESSED IN ADULT LIVER, SIGNAL = 1.3; EXPRESSED IN BRAIN, SIGNAL = 1.3; EXPRESSED IN HBL100, SIGNAL = 1.9
tccagtccctacaaccttgcctagtgcagtccatagacagtcctgtttgtaggacagtgtacccctgcccccacactcccactccccgaactggatgtggcagactgtaccccactcctgggtgcggacaagtccactggccacttgcccctcccggtctagcctcgtgccccttgtcgcaggattttctgcctctgccccagctggattaagtgtctctgcgcccaccaggtgcccagccctgaagcaggccgcagcgccagggtgactgtggctgtggtggacacctttgtatggcaggctctagcctctgtggccattccgggcttcaccatcaaccgcgtgtgtgctgcctctctctatgtcctgggcactgccacccgctggcccctggctgtccgcaagtggaccaccaccgcgcttgggctgttgaccatccccatcattatccacc

SEQ ID NO: 9988 - DNA, 475 bp, Homo sapiens; identical to SEQ ID NO: 2906
  MAP TO AC007002.2; EXPRESSED IN BRAIN, SIGNAL = 0.76

SEQ ID NO: 9989 - DNA, 469 bp, Homo sapiens
  MAP TO AC008273.1; EXPRESSED IN HELA, SIGNAL = 3.6; EXPRESSED IN BRAIN, SIGNAL = 1.7
cacgtatgtatgtactcctaaacagtcatataccttatatttcaataaaaatggaattgtggggcttaatatttttaaccctacattactaaaggtgggaaaaacaacctacctatcttgttgggttgtgacatatctggaagctgtgaatgaattaattgttatgcatatacagtggagcagactcagttgattagttattatgtgcaaatgtgttttagtttttttaagctctcatgtgttttttcacaggatacttcggatctgcttgtgaagaaaaggtggacccctgcgcctcgtctccgtgccagaacaacggcacctgctatgtggacggggtacactttacctgcaactgcagcccgggcttcacagggccgacctgtgcccagcttattgacttctgtgccctcagcccctgtgctcatggcacgtgccgcagcgtgggcaccagctacaaatgcctctg

SEQ ID NO: 9990 - DNA, 475 bp, Homo sapiens
  MAP TO AF118808.1; EXPRESSED IN ADULT LIVER, SIGNAL = 1.3; EXPRESSED IN BRAIN, SIGNAL = 0.81; EXPRESSED IN PLACENTA, SIGNAL = 0.79; EXPRESSED IN BONE MARROW, SIGNAL = 0.85; EXPRESSED IN HBL100, SIGNAL = 2.1; EXPRESSED IN LUNG, SIGNAL = 0.59; EXPRESSED IN HELA, SIGNAL = 0.69; EXPRESSED IN BT474, SIGNAL = 2.9; EXPRESSED IN FETAL LIVER, SIGNAL = 0.77
ttcaacatctaaaaattcatacaggagagaaacatcatgagtgtaatcagtgtgggaaagcctttagtcatagctctaatctaattcatcatcagagaattcatagtggagagaaaccttacaagtgcaaagaatgtgggaaagccttcaacagacaatcaaaccttattcagcatcagagaattcattctggagagaaaccttatgactgtaaggagtgtggcaaagccttcagtacacaattatttctcattcagcatcagagaattcatacaggagaaaagccctatgaatgtaatgaatgtgcaaaatcctttagcctgaaccgaactcttactgtccatcagagaattcacactggagagaaaccttataggtgtaatgaatgtgggaaatcctttagtcaatgctcacaagttattcaacataagagaattcacactggagagaaaccttatatctgcaatgagtgtgg

SEQ ID NO: 9991 - DNA, 452 bp, Homo sapiens
  MAP TO AL034553.12; EXPRESSED IN LUNG, SIGNAL =   1; EXPRESSED IN HELA, SIGNAL = 2.9; EXPRESSED IN BRAIN, SIGNAL = 0.92; EXPRESSED IN PLACENTA, SIGNAL = 0.77; EXPRESSED IN HBL100, SIGNAL =   3; EXPRESSED IN FETAL LIVER, SIGNAL = 1.4; EXPRESSED IN ADULT LIVER, SIGNAL =   1; EXPRESSED IN BT474, SIGNAL = 4.2; EXPRESSED IN BONE MARROW, SIGNAL = 1.3
gattctggccaataaacccctggctatgagaactgaccaggacagaagtgcattgcattgggcatgctcagccatacatacataaattattgaatttttgtttcaacttggagtgccagtgaatgataaagactatgcgagattggtctcctcttcagactgctgtttgtgctggccagaatgagactgtaaaagcccttctgggaaaaggtgctcaagtgaatgctgtcaatcaaaatggctctactcccctacatcatgcagcttccaaaaacaggcatgagattgctctcatgttactagaaggtggggctaatccagatggtaaggatcattatgaggctacagcaaagcaccaggccacagccaagggtaacttcaagatgattcatatccttctgtactacaaagcatccacaatcatccaagacactgagggtaacactcctcca

SEQ ID NO: 9992 - DNA, 493 bp, Homo sapiens
  MAP TO AL096772.5; EXPRESSED IN LUNG, SIGNAL = 4.5; EXPRESSED IN PLACENTA, SIGNAL = 1.2; EXPRESSED IN ADULT LIVER, SIGNAL = 0.93; EXPRESSED IN BRAIN, SIGNAL = 1.2; EXPRESSED IN FETAL LIVER, SIGNAL = 0.97
ggacagcagtgggtgctatgtagaagaaggtgatggggacaatgtcacctgtatctgtgaccacctaacatcattctccatcctcatgtcccctgactccccagatcctagttctctcctgggaatactcctggatattatttcttatgttggggtgggcttttccatcttgagcttggcagcctgtctagttgtggaagctgtggtgtggaaatcggtgaccaagaaccggacttcttatatgcgccacacctgcatagtgaatatcgctgcctcccttctggtcgccaacacctggttcattgtggtcgctgccatccaggacaatcgctacatactctgcaagacagcctgtgtggctgccaccttcttcatccacttcttctacctcagcgtcttcttctggatgctgacactgggcctcatgctgttctatcgcctggttttcattctgcatgaaacaagcaggtccactcagaaagccattgccttc

SEQ ID NO: 9993 - DNA, 459 bp, Homo sapiens
  MAP TO AP000110.1; EXPRESSED IN BT474, SIGNAL = 0.64; EXPRESSED IN LUNG, SIGNAL = 0.93; EXPRESSED IN FETAL LIVER, SIGNAL = 1.1; EXPRESSED IN ADULT LIVER, SIGNAL = 0.75; EXPRESSED IN BRAIN, SIGNAL = 2.2; EXPRESSED IN PLACENTA, SIGNAL = 0.77; EXPRESSED IN HELA, SIGNAL = 1.2
tcacacacctgccaagagtcaggagttctaaggggtgaagaaaggctttttaagcgaggcaaccaaccacctctgtccaggtggccaggaagattaaatgtccaggtggtgttacatacagctcaacccttatcctacaaagcatagtttctcacccaccacagccaagcgaaagtcatcaagtgtctcctgttgtttcccacgttctaaaattggaggaaagttattgcacaagtgcctaagtagtgcagctgatccatctggaaaggctgttcttaaaccttggcttaaaacacctccaaattccttaaacagcatagcaaaatcaagaacatattttcaaaagacaatttaatcaatatctcttacattgaaacacacacacacatatatacacgcgccttttataaatacatattttatagcacttttagaaatgggggaaatgtcacgaaacaa

SEQ ID NO: 9994 - DNA, 442 bp, Homo sapiens; identical to SEQ ID NO: 2777
  MAP TO AP000132.1; EXPRESSED IN BT474, SIGNAL = 2.5; EXPRESSED IN BONE MARROW, SIGNAL = 1.1; EXPRESSED IN HBL100, SIGNAL = 1.2; EXPRESSED IN LUNG, SIGNAL = 0.6; EXPRESSED IN ADULT LIVER, SIGNAL =   1; EXPRESSED IN BRAIN, SIGNAL = 0.93; EXPRESSED IN PLACENTA, SIGNAL = 0.69; EXPRESSED IN FETAL LIVER, SIGNAL = 0.81; EXPRESSED IN HELA, SIGNAL = 1.2

SEQ ID NO: 9995 - DNA, 473 bp, Homo sapiens
  MAP TO AP000151.1; EXPRESSED IN HELA, SIGNAL = 1.3; EXPRESSED IN PLACENTA, SIGNAL = 0.96; EXPRESSED IN LUNG, SIGNAL = 1.4; EXPRESSED IN BRAIN, SIGNAL = 1.2; EXPRESSED IN BT474, SIGNAL = 4.7; EXPRESSED IN HBL100, SIGNAL = 2.8; EXPRESSED IN FETAL LIVER, SIGNAL =   2; EXPRESSED IN ADULT LIVER, SIGNAL = 1.4; EXPRESSED IN BONE MARROW, SIGNAL = 1.6
gaggaacatggtcccttggacatgagtaacaagatgttctctgcagaatatgagtttttcccagaagaaactcgacagatactagaaaaagcaggaggtttaaaaccttttctcttgggatgccctcgttttgttgtgattgacaactgtattgcactgaagaaggttgcatcacggctcaagaaaaaaaggaagaagaaaaacattaaaacaaaagtagaagaaatttcaaaagcaggggagtatgtacgagttaaactacaactgaatccagctgctagggaatttaaaccagatgtaaagtctaaaccagtgtcagattcatcttcagcaccagcttttgaaaatgtgaaacccaaacctgtgtctgcaaattctcccaagccagcttgtgaagatgtgaaggccaaaccagtatccgacaattcttctagacaagtttctgaggatgggcaacccaaaggggtctcttc

SEQ ID NO: 9996 - DNA, 461 bp, Homo sapiens
  MAP TO AP000153.1; EXPRESSED IN HELA, SIGNAL = 0.81; EXPRESSED IN ADULT LIVER, SIGNAL = 0.83; EXPRESSED IN BRAIN, SIGNAL = 0.99; EXPRESSED IN PLACENTA, SIGNAL = 1.4; EXPRESSED IN BT474, SIGNAL = 0.82; EXPRESSED IN BONE MARROW, SIGNAL = 2.1; EXPRESSED IN HBL100, SIGNAL =   1; EXPRESSED IN FETAL LIVER, SIGNAL = 1.1; EXPRESSED IN LUNG, SIGNAL = 1.2
tgctttgtactttggcgatgtcaagttgaatgagacacattgtctgcccgtatggaagttacagtccagtagaggagagaagacttaaaaactattcattataatgtccttaagaatcattttctttttatgaatgagccctacaaccataacaggacaggttgtgaatatattgtacaagttcagaggaacggagaggccacgtgaggtgatccttttgtaaaaagcacagcttgagacaggaggagaaactttttttttttttttttttaaaccgcagagagaacagtgtcggttgctcagaggactcttctttctaccctggtgcatttactaggaccttgtaggcaaataaaatgatagagaaacttgcatagatgaaggatgtgtcccattccctgaagtcaagggaagcagagctaagattggttatgcagaccatgggctaggcactccctaca

SEQ ID NO: 9997 - DNA, 409 bp, Homo sapiens
  MAP TO AP000246.1; EXPRESSED IN FETAL LIVER, SIGNAL = 0.61; EXPRESSED IN LUNG, SIGNAL = 0.7; EXPRESSED IN ADULT LIVER, SIGNAL = 0.67; EXPRESSED IN BRAIN, SIGNAL = 1.7; EXPRESSED IN PLACENTA, SIGNAL = 0.7; EXPRESSED IN HBL100, SIGNAL = 0.86; EXPRESSED IN BT474, SIGNAL = 0.65
tgtcctgagaagatggggaccctcacctcttttttctcaccagtctgttcagcaatcagctggtcaaacacagccccaaactcttcatggattttctgcatctcattgatgtgactggcaaccttgttcatggtcttgatggccactggaagaaaacaggttgtgaaatgagaggctatttagagaccctcatggagactcaggcctgccgggggtcccaggccgaggcctaccgtccaggtggtagtgctcctcgctctccgcatcggtcagggcgaacagctccctgagcagaagtgggtacttgaggatcctctggatgggcttgatgaggtacgactccagcgtggatgagtgctgctgcttcgggttctgggcatccaagaatgccttgaaagccgtgtctgtc

SEQ ID NO: 9998 - DNA, 479 bp, Homo sapiens
  MAP TO AP000207.1; EXPRESSED IN FETAL LIVER, SIGNAL = 0.83; EXPRESSED IN HELA, SIGNAL = 0.69; EXPRESSED IN ADULT LIVER, SIGNAL = 0.73; EXPRESSED IN PLACENTA, SIGNAL = 0.66; EXPRESSED IN BRAIN, SIGNAL = 1.9; EXPRESSED IN LUNG, SIGNAL = 0.95; EXPRESSED IN HBL100, SIGNAL = 1.2; EXPRESSED IN BONE MARROW, SIGNAL = 0.63; EXPRESSED IN BT474, SIGNAL =   1
ggcttcagaaccaagtcagctgccaaaaccgtgtgtgcaagagcgcgacctaaggggacattcttgtcgacggtacaggagggtgggcagagttagggcaggaagtatctacacacattctctacggggcaggtgacgcagtcagatctcagtgttcagtttcctggagggggcaaagtcttcacgcctaacccaaatgacttcctcgcttgcgctctccaggcctccattgatccccgacagggcagcttgcttcttgagctgtgccatgcgggacgcgtgactatccagggttttccggcctctttcccgctgactgatggaggtggcctgaagccgctcctgcaggtctctgtccactgaggcacccttcacggactcacagaactcatcatcgtcactgaggatgtctgtctccttgatgtcatcttgctcctcatactgagcaagatcaaactgctcctctacccatcggtcag

SEQ ID NO: 9999 - DNA, 445 bp, Homo sapiens
  MAP TO AP000057.1; EXPRESSED IN FETAL LIVER, SIGNAL = 0.9; EXPRESSED IN LUNG, SIGNAL = 1.3; EXPRESSED IN PLACENTA, SIGNAL = 0.89; EXPRESSED IN BONE MARROW, SIGNAL = 3.1; EXPRESSED IN HBL100, SIGNAL = 1.7; EXPRESSED IN ADULT LIVER, SIGNAL = 0.67; EXPRESSED IN BRAIN, SIGNAL = 0.68; EXPRESSED IN BT474, SIGNAL = 1.6; EXPRESSED IN HELA, SIGNAL = 0.74
gaagcagtccttagtttcatgctgccctgaatggttctaacatatgattcagtcagcctaatttccttttgccctctaaaaggatgcttcaaaaagagctcagtgcacagaaacaagctttgagtagcgagagtattgacaatgcaactttttggctttacgggggcctgacatccccctgggggaaaggttgaacccaaggaatctgagacatggtccctgagtataccagcctggagggtgtaccagcctggagggtgtaccagccccaagtggatgcacttacttcgaggttctcggggcccatccactgtgattttgatggctctgtggtaggtggcgacttgcggtgggtttgtgaagacagtgatggtcagagtgaagcttttccctgtggggacacgatagagaacaaaacagaatgaggttggtggcctgaacatat

SEQ ID NO: 10000 - DNA, 455 bp, Homo sapiens
  MAP TO AP000047.1; EXPRESSED IN HBL100, SIGNAL = 1.7; EXPRESSED IN FETAL LIVER, SIGNAL = 1.1; EXPRESSED IN ADULT LIVER, SIGNAL =   1; EXPRESSED IN PLACENTA, SIGNAL = 0.77; EXPRESSED IN BT474, SIGNAL =   1; EXPRESSED IN BRAIN, SIGNAL = 6.8; EXPRESSED IN HELA, SIGNAL = 1.7; EXPRESSED IN LUNG, SIGNAL = 0.69; EXPRESSED IN BONE MARROW, SIGNAL = 0.67
attcttgcctgcaacactgattaatttgcaagacaagtctctaaatgtatgagcagttactcaatctgacttaaaaaaaaaaaaggtatgaaagcaccataagcaccatctgggaaagacaaaacttcctgtctttgtatctttaaatttccaaagaaaaacttaatggaaggcagcatctgctattttgcaaaggagagcatttcacacttaatttgttactttaacacataactattttatttcagagttacctgtatacttttaggcaaagtaacttctgttgccctacaatgctggacaagaccttgagcttcttcctgtgctttcaaatgatctgcccaggtaaagggttgagaagaggtgaaaaggagtcgcgttttaatactccagtccacaggtaactcagtactttttgaggacggaatatcaggctcggagaatgatacatgtga

SEQ ID NO: 10001 - DNA, 360 bp, Homo sapiens; identical to SEQ ID NO: 396
  MAP TO AC007732.1; EXPRESSED IN BRAIN, SIGNAL = 1.1; EXPRESSED IN HBL100, SIGNAL = 3.9; EXPRESSED IN FETAL LIVER, SIGNAL = 2.8; EXPRESSED IN LUNG, SIGNAL = 1.6; EXPRESSED IN ADULT LIVER, SIGNAL = 1.1; EXPRESSED IN PLACENTA, SIGNAL = 1.1; EXPRESSED IN BT474, SIGNAL = 3.8; EXPRESSED IN BONE MARROW, SIGNAL = 2.4; EXPRESSED IN HELA, SIGNAL = 1.9
  unsure 78

SEQ ID NO: 10002 - DNA, 458 bp, Homo sapiens
  MAP TO AP000046.1; EXPRESSED IN ADULT LIVER, SIGNAL = 0.85; EXPRESSED IN BONE MARROW, SIGNAL = 2.2; EXPRESSED IN BRAIN, SIGNAL = 1.3; EXPRESSED IN PLACENTA, SIGNAL = 1.4; EXPRESSED IN BT474, SIGNAL = 1.2; EXPRESSED IN FETAL LIVER, SIGNAL = 1.8; EXPRESSED IN LUNG, SIGNAL = 1.1; EXPRESSED IN HELA, SIGNAL = 1.2; EXPRESSED IN HBL100, SIGNAL = 2.6
aagtcccctgcatgttgaagagagaagacaaaaacttagcctatgaatagaaaaccaaaacataaaaatcaacctggagaatgacaccagctctacaataatgaccaagtagcaaaccaaggtaattcattcccttttagctctaagtaatcagagactaaaaccactaaatgcttgctcaggcatttccaagcaggacagtttaaacatgagggagtttacctaaagtctggtcaccacaaccatcaggtgctggagaggagtactggagggaagattttgccacgattttcctcacaaggctaaatccattgctatgaagaccagatgaagctattccaacaacaacatcaccctcagtgattctttccaggtgagggagtttctgatctcgctccatggcaccaacggcaaacccagctaggtcatactctccagggggatacatgtcaggcatt

SEQ ID NO: 10003 - DNA, 472 bp, Homo sapiens
  MAP TO AL049575.7; EXPRESSED IN FETAL LIVER, SIGNAL = 0.57; EXPRESSED IN PLACENTA, SIGNAL = 0.72; EXPRESSED IN BT474, SIGNAL = 0.64; EXPRESSED IN BONE MARROW, SIGNAL = 0.84; EXPRESSED IN LUNG, SIGNAL = 0.77; EXPRESSED IN HELA, SIGNAL = 0.66; EXPRESSED IN ADULT LIVER, SIGNAL = 0.76; EXPRESSED IN BRAIN, SIGNAL = 1.9
gacgcctgatgcttctcttcataatcacatttttttaacagttccttctgggcttttaatgaacataggaagtgctctgaaaacatcacccaacaaattctttttgggtgacttgtgtcctgattcattctgcagaggcctggtacatgcagaggtaaaaatgacctatacggccctaggtgcaatctgcacccagtattcacaggtgttgttccttcgtccgaatttcccaagtctggccggaccatctcctgccctgggtctccaggcacttacctcgccgttgaggactgccgatgactcctggctcctgtccgaggtggggggcaccatggggagggctgtgggttttatggcaatgagctgcacagacccagaagatgtgtcaaagggttcagcggccaccttgctggagttgtcaaatagaaccgctccctcctcttcgtcactcgctggcactgaagcacaacat

SEQ ID NO: 10004 - DNA, 466 bp, Homo sapiens
  MAP TO AL031280.6; EXPRESSED IN PLACENTA, SIGNAL = 1.9; EXPRESSED IN LUNG, SIGNAL = 0.72; EXPRESSED IN BRAIN, SIGNAL = 1.2; EXPRESSED IN FETAL LIVER, SIGNAL = 0.7; EXPRESSED IN BONE MARROW, SIGNAL = 0.75; EXPRESSED IN ADULT LIVER, SIGNAL = 0.67
ccctgcagatctgtggattcccacggtccctggggctgggctcaggaaaatgcaagtgccaagaccccagctggaatggaatgaaatttaccagggactttctcagatactttccaagccagtggccttttgatattgacttgggattaaactccccactgcctcagatactaggatcatctatgcagttgtccaatattttatattttagaaatactttgatatgaatcttcttgcataatccttctaaccttacccctttgaggctggccagagttaggaactagtcttcccattttcccattacagatggggaaactgaggtcattacagatgaggtaaataacttgcctggggtcacacaggcctcctgcctgcctctcagtccagtgctctttctactatatgtcatgtcctctcataatgaggtgggggtggggaacaaggagatggagggatgtgttgg

SEQ ID NO: 10005 - DNA, 495 bp, Homo sapiens
  MAP TO AL031280.6; EXPRESSED IN ADULT LIVER, SIGNAL = 0.81; EXPRESSED IN PLACENTA, SIGNAL = 1.9; EXPRESSED IN BONE MARROW, SIGNAL = 0.82; EXPRESSED IN HBL100, SIGNAL = 0.68; EXPRESSED IN FETAL LIVER, SIGNAL = 0.72; EXPRESSED IN LUNG, SIGNAL = 0.76; EXPRESSED IN HELA, SIGNAL = 0.75; EXPRESSED IN BRAIN, SIGNAL = 0.77
ttgggaaagtcctttcaacttctccaggtctgagtttcaactacaaaatgtggggataaaactcgatctccaagctcccttgctgcagcctctcactcagctcctggagtccgtggatctcagggagggaacctgctgtccaacactgctcttccagggttaaagttccccttctgcaaggtgagggcgagctgaagaaatgagcccctcttgcctctgtgattgtgattctcagatgctctcaaaataccaaataactagtttagttacagggaactggtggacacttgtagtttaaatctctttccttggcttcaagggagtgagctgagtttgacaagcacaaatggaaaactgttctcaggttctttcctctggcccttggggatagtggatgactgatgtctggggcagagtctagctttttagaaggcagactcttcctccgacatcctctccaactcctgctttctctccttgtgtctcttatcggcc

SEQ ID NO: 10006 - DNA, 480 bp, Homo sapiens
  MAP TO AC008266.1; EXPRESSED IN PLACENTA, SIGNAL = 0.63; EXPRESSED IN HELA, SIGNAL = 1.4; EXPRESSED IN BT474, SIGNAL = 2.9; EXPRESSED IN BONE MARROW, SIGNAL = 1.2; EXPRESSED IN HBL100, SIGNAL = 2.7; EXPRESSED IN FETAL LIVER, SIGNAL = 0.96; EXPRESSED IN BRAIN, SIGNAL = 0.97
gggtacccaacttaacgattttcactttctaagaaaccgatatcttacaaatacatataaactcactatgcatctattataaaacatatatccacccatccacctgcacatacacacagatgtattataccactcataacgaaaaaagaaaaggcttccaaagaccaaaatgatactgacttaccacagagctggaaattgaggcattaaccaaagacgcatcatcagcacttgaggatagggctttattcaaagaggcatcgccatccctttgggaacagaatgtagcttcctgcttaacactgctgctattgatcctagcagatgctccacttgcagaggaaaatttggataaacaagcggtaccaggctgttcttgtacactgttttgttttgcaaatgagtgatttacatcatcttcccaggagcaaatagttgcagcaagattggccagacggccccttctgccaactggagttg

SEQ ID NO: 10007 - DNA, 470 bp, Homo sapiens
  MAP TO AC007847.1; EXPRESSED IN FETAL LIVER, SIGNAL = 0.75; EXPRESSED IN PLACENTA, SIGNAL =   2; EXPRESSED IN BT474, SIGNAL =   1; EXPRESSED IN BONE MARROW, SIGNAL = 1.4; EXPRESSED IN HBL100, SIGNAL = 0.7; EXPRESSED IN LUNG, SIGNAL = 0.92; EXPRESSED IN HELA, SIGNAL = 0.76; EXPRESSED IN ADULT LIVER, SIGNAL = 0.72; EXPRESSED IN BRAIN, SIGNAL =   1
  unsure 237
  unsure 260
  unsure 268
  unsure 332
ctttccacgtcagcttagggaacacacagaactgatctctatgtccgctgcagcctgagggaaccacctgagggccctgagggtgagggggtcccagacccagcatggctggcatacaagaggtgctccctgactctcaggtccagctgtgggaggagagatgcagtgggcccagagacctgaggaacagttccaaggtcagggcatgctggaatgtgcagggcctttgggccaagnagaaacaggcaccccttcccccnagggaganggcccagagcatcagtggactccagcccctcctctgtaagaacctctatcggggcacaaatggnctcatccaccaggaacgccttatccaagacactaacttgcctctcatgggctgtacctgtttcatccacctcgctgagtagagatactgcagaccatctttcaacatgtttagacagtgcactcactagcatgcctgt

SEQ ID NO: 10008 - DNA, 485 bp, Homo sapiens
  MAP TO AC007790.1; EXPRESSED IN BONE MARROW, SIGNAL = 0.75; EXPRESSED IN BT474, SIGNAL = 1.1; EXPRESSED IN FETAL LIVER, SIGNAL = 0.73; EXPRESSED IN LUNG, SIGNAL = 0.72; EXPRESSED IN HELA, SIGNAL = 1.9; EXPRESSED IN BRAIN, SIGNAL = 0.74; EXPRESSED IN HBL100, SIGNAL = 1.4
ctgttgctgataccgtgagctcaagcgttgcgagtgtttgcttaaactgctgtgtgatactaatcatctccctgtgagcagtccatctctccagtaaatttcatacggcagtgagaagtgatctttggcagttctcatgtattttccatcgtgtttagtgcaatactgtaagctttgaataactccatggaacccatacaaagcaccgttagtcacagtggaagtgctcccaagaagcaggggaaagtcatgacattacaaaaaaaaaaaagatgctgaattgcttgataggtactatacattgaggtctgcagctgtggtttcttgccatatcaagataaatgaattcagtgtaagggccattgtaaaagaaaaggaaatttgtggagctgtcactgaagctgcatcagtaggcatgaaaaccttgttcttttcacgaaatacctttttatctggtattgaaaaggcagcttttatgtgggtgt

SEQ ID NO: 10009 - DNA, 454 bp, Homo sapiens
  MAP TO AC007677.2; EXPRESSED IN BRAIN, SIGNAL = 0.98; EXPRESSED IN PLACENTA, SIGNAL = 0.72; EXPRESSED IN HBL100, SIGNAL = 0.7; EXPRESSED IN FETAL LIVER, SIGNAL = 1.8; EXPRESSED IN LUNG, SIGNAL = 1.1; EXPRESSED IN ADULT LIVER, SIGNAL =   4
tcagggagcaagaaagaagtgtcttcaccttcccaatgtgacaccatgactgtgtggaacagctactcattcagtctatcagaacaaagagccttctgctgatgcctcccttttcttcctctcttgcatctgcaggttacctacctgggcaaagtctccaccactggcatgcagtttttgtcaggctgcacagaaaagccagtcattgagctctggaagaagcacacgctagcccgagaggatgtctttccggccaatgccctcctggaaatccggccattccaagtttggctccatcatctcgaccacaaaggggaggccacagtgcacatggataccttccaggtggcccgcatcgcctactgcaccgccgaccacaacgtgagccccaacatcttcgcctgggtctacagggagatcaatgatgacctgtcctaccagatggactgccacg

SEQ ID NO: 10010 - DNA, 377 bp, Homo sapiens
  MAP TO AC007567.1; EXPRESSED IN PLACENTA, SIGNAL = 0.86; EXPRESSED IN BT474, SIGNAL =   2; EXPRESSED IN ADULT LIVER, SIGNAL = 0.7; EXPRESSED IN BRAIN, SIGNAL = 2.6
tgggattcttttgtgaggaagatttgaacaagtaaatttttaacctgatttagatgcactaccaatagcaatgagaagagagtcaaggtaccatgaatgttgacataactttacatttaccattactaaaaatgtaatgaaaaccacatttaattaaagtttcagggtctctcatgaaggcaagaagaatggattttaaacaatatacctttaactctaacagaaatggtatggtggatggctcctaatgcgttttttgctatacattggtaatttccagagtctgcttctgaaacatgaatgatctgcaaggttttctcaaagttcttataaactgtcctgtttttgggtagcattccatcttcctttgcccagta

SEQ ID NO: 10011 - DNA, 386 bp, Homo sapiens
  MAP TO AC007040.2; EXPRESSED IN BONE MARROW, SIGNAL = 1.2; EXPRESSED IN PLACENTA, SIGNAL = 0.64; EXPRESSED IN BT474, SIGNAL = 1.4; EXPRESSED IN LUNG, SIGNAL =   1; EXPRESSED IN HELA, SIGNAL = 0.66; EXPRESSED IN BRAIN, SIGNAL =   2; EXPRESSED IN FETAL LIVER, SIGNAL = 1.3
aatttcggtaagtcgcattgcgccgttccacccctcccccggcagctcctttacggcccaaaacggggatacaaatgtccccgagagaacagcggtatactgggatagatgaggatggtcacgtggtggagaggcgtgtttttggctaccagcccttcacctccgtcgaccttctcaactggaaaagcaatacaccgccctataccgaaaagccacaagccctaattgatttgctccaaactgttatccagacccacaaccacacctgggctgattggcaccagttgctcatgttcctctttaacagcgaagaaaggcggagagtcctccaagcagcaactaagtggctggaggaacatgcaccagctgattaccaaaacccccaa

SEQ ID NO: 10012 - DNA, 482 bp, Homo sapiens
  MAP TO AC006970.2; EXPRESSED IN BRAIN, SIGNAL =   1; EXPRESSED IN BT474, SIGNAL = 1.9; EXPRESSED IN HBL100, SIGNAL = 2.2; EXPRESSED IN FETAL LIVER, SIGNAL = 1.2; EXPRESSED IN LUNG, SIGNAL = 1.2; EXPRESSED IN HELA, SIGNAL = 1.1; EXPRESSED IN ADULT LIVER, SIGNAL = 1.7; EXPRESSED IN PLACENTA, SIGNAL = 0.95; EXPRESSED IN BONE MARROW, SIGNAL = 1.3
ccagtcagtaggaatcatccgactagaaacagcaacattccttaacagtcccattgcaaaaggagaaactggtccatactgaattatagcttgtttaaattctttgagtaatttaaaaggaaatggctcaaatgtagctatactatttccctgttgatctggggggtgtattctaacagggaactgccaagcctctaaatcaccctctcatctagcttgctgaattcctgcctgaatagaactgagagtgctcgcttaaggtgctgttgaacagtcaccggggcaactacttttcccccagtgtcctccagaaaagaaagatcttgagggtttttatcttcaaaataataatgagggggtgcaaaagggtagagatgaacctctccttcctttgctgctttagctttagctggtaaataaacatgttctgtaacctcttccattacttcactatactctccttcctcctcattatcagtgtg

SEQ ID NO: 10013 - DNA, 535 bp, Homo sapiens
  MAP TO AC004887.2; EXPRESSED IN BT474, SIGNAL = 1.2; EXPRESSED IN BONE MARROW, SIGNAL = 0.87; EXPRESSED IN LUNG, SIGNAL =   1; EXPRESSED IN HELA, SIGNAL = 1.1; EXPRESSED IN ADULT LIVER, SIGNAL = 0.86; EXPRESSED IN PLACENTA, SIGNAL = 1.4; EXPRESSED IN BRAIN, SIGNAL = 0.82; EXPRESSED IN FETAL LIVER, SIGNAL = 0.91
gattttcaaatgtttaaccagcctgtatccttagggcaaattccacttaatcatggtatgtaatgattttcaaatgtttaaccagcctgtatccttaggacaaattccactgaatcatggtatgtaatgctttttatgtattgttgaattctgtttgctaatattttgttcataatttttttgtctatattcatgcataacattgttctgcacttttctgtactgtctggttttggtatcagggtagtactggcttcatagaatgagttaggaagtgttcttgcctcttctgttttctggagagattgtgtaattagtatcaattcctctttaagtatttggtagagttctccagtgagtccatctggaaatttctttttctgtagattttcaattatgaattcatttttctcaatagttatagggatattcagaaaatctgtttcatactgggtgagttctggtagttggtacttttcaaggaattcatccatgtcatctaacatcaaatttacgtgtgcagagctgtttgtaa

SEQ ID NO: 10014 - DNA, 477 bp, Homo sapiens
  MAP TO AC004890.2; EXPRESSED IN PLACENTA, SIGNAL = 1.5; EXPRESSED IN HBL100, SIGNAL = 2.2; EXPRESSED IN LUNG, SIGNAL = 0.99; EXPRESSED IN HELA, SIGNAL = 1.4; EXPRESSED IN ADULT LIVER, SIGNAL = 1.9; EXPRESSED IN BT474, SIGNAL = 2.3; EXPRESSED IN BONE MARROW, SIGNAL = 2.3; EXPRESSED IN FETAL LIVER, SIGNAL = 1.3; EXPRESSED IN BRAIN, SIGNAL = 0.85
aaagatgaggcatacgcaggcagtactagaactatattcaaattaatctctgctggacagttaagcagtccttatctgattttagtttggagttagggttccttctaacactcaatgtcttgttccatctttccactgcatgcagacatctgaatgggactccgagtgccttacatccctgcagccccttcctcttcctacacccccagcagcaaatgaggcacacctgcagacagcagctatctctctgtggacagtggtggccgccgtgcaggctatagagaggaaggtggagatccacagccggcgactcctacacctggaaggtcggacagggacagcagagaagaaactagccagctgtgaaaagacagttaccgagcttgggaaccagctggagggcaagtgggccgtgctgggaaccctgctgcaggagtacgggctgctgcagaggcggctggagaacttggagaacct

SEQ ID NO: 10015 - DNA, 466 bp, Homo sapiens
  MAP TO Z98884.11; EXPRESSED IN PLACENTA, SIGNAL = 0.86; EXPRESSED IN BRAIN, SIGNAL = 1.8
tcggagatactttgggatgggaatcttcaatggccccaccgagattgccagcaaggaccagtttgtcagttggcagcaatggcaaaagtcaggtctggtcttgacctctgattgagaacgcttgctgtgtctccctgtcttctagatgtgggcgtgtgccctagggcacttggaagctgccgtcgtgctgtacaagtgggaccgtcgggccatctcgattcccgactctctaggaaggctgcctttgggaattgccaggtcacggggtcatgtgaaattagcagagtgtctggagcacctgcagagagatgagcaggctcagctgggacagaaccccagaatccactgtcctgcaagcgaagagcccagcacagagagctggatggcccagtggcacagcgaagccatcagctctccagaaatacccaagggagtcactgttattgcaagcaccaacccaggtaag

SEQ ID NO: 10016 - DNA, 373 bp, Homo sapiens
  MAP TO AL049569.13; EXPRESSED IN BONE MARROW, SIGNAL = 2.7; EXPRESSED IN BT474, SIGNAL =   2; EXPRESSED IN BRAIN, SIGNAL =   3
atgtgaatgcttttgcacacacatacatacagaggcagattgcctggttttccacttcagctctgccatttgtgagtgacttagccccactccgtccctatccaatcacagttactacttcacagggttgccgtgagggttccatgagcttaggataggcatgtgtgtactaggtgctcactaaatggaagctgttgccatcgcaatcccccgtcacaggtgaacatgatcgtgctggacaaggacctgggcatccccaagccattcgggccacaggttgaggaggaatgctgcctggagatgcacgtgcgtggcctcctggagcccctgggcctcgaatgcaccttcatcgacgacatttctgcctaccaca

SEQ ID NO: 10017 - DNA, 475 bp, Homo sapiens
  MAP TO AL049569.13; EXPRESSED IN BT474, SIGNAL = 1.3; EXPRESSED IN BONE MARROW, SIGNAL = 1.9; EXPRESSED IN BRAIN, SIGNAL =   1
gctggcaatttcctatcagccgttcacgagagagcttgcttattttatagatggggaagccaaaagccagagagggtgactgtctggcaaagcgccacacagccagcacacagcagtgctgagacaatgacaatgacctagccatggccattctggtggcattttctgcttgtgcttttctctctgtctagaggacaagttactttgcccttttgtccccatcggtgatcccaccccaccgacctctttctgatgcgggtgggagtctgacgttggtccttttccctccagacccgttcttcggccaacgctatatccacatcctgggccggcggaagctctaccatgtggtcaagtacacgggtggctccgcggagctgctgttcttcgtggaaggcctctgtttccccgacgagggcttctcaggcctggtctccatccatgtcagcctgctggagtacatggcccaggtgag

SEQ ID NO: 10018 - DNA, 464 bp, Homo sapiens
  MAP TO AL008629.9; EXPRESSED IN PLACENTA, SIGNAL = 1.2; EXPRESSED IN FETAL LIVER, SIGNAL = 1.1; EXPRESSED IN LUNG, SIGNAL = 0.7; EXPRESSED IN HELA, SIGNAL = 2.2; EXPRESSED IN ADULT LIVER, SIGNAL =   2; EXPRESSED IN BRAIN, SIGNAL = 0.72
gcaacaaaatgaattctgccaacaaccacatgagcttcccagaggatcttgagcctcagatgagtccccagccctaaccgacaccttgatcgcagccttgagctgagtacctacctgaactatgcccagactcctgactcacagaaactgagataaaaaaaatgtatgtcgttttaagctattaagtttgaagtaatttgttacatagcaagagataataaatacaatgcttacacacagggaagaaaaaaaaaaaagaaaacctagtaaggactgaaagtttgtgttacctcgaaattcatatgtgaaagtcttaacccacagtgcgatggtatttggaaatgagacttttgggaagtagttaggtttagatgaggtcataagggtggagcctgcattatgattagtgcccctataaggagatgaagggacagaggtttctcactttgccttgtgagcaacag

SEQ ID NO: 10019 - DNA, 469 bp, Homo sapiens
  MAP TO AC009225.1; EXPRESSED IN LUNG, SIGNAL = 1.1; EXPRESSED IN BRAIN, SIGNAL = 0.86; EXPRESSED IN BONE MARROW, SIGNAL = 4.1
tgtgtgtgtgcaagtatctttttcatataatgacttctatgaaagctagtttaaagtaaggaggctggctaatacaaaacaaaatatcctctctgctcttttcatagactgggaaggactaggatttgcttcagaaaacctatgtttgatgtcttttactatcctttacgggtacatgggcctggcatgtgcaacttaaaacttcaaaactcagggtactactctaagtttgaaataagttaacatgtacaaaggcactttgaaatctacactcttttctcttttcttctcaaagacaaagttgctggaggagtagaacgccatcaggcaactgatggcatagactcacctcatcatgaaccagctctagtggctctatcatatacacgaaggtatcatcttcaaacatgccactagcacaaaagaaaccacacaaaggagggaataaacaaacacaggaaatggcaag

SEQ ID NO: 10020 - DNA, 481 bp, Homo sapiens
  MAP TO AC007664.7; EXPRESSED IN HBL100, SIGNAL = 1.7; EXPRESSED IN LUNG, SIGNAL = 1.3; EXPRESSED IN HELA, SIGNAL = 1.2; EXPRESSED IN ADULT LIVER, SIGNAL = 1.6; EXPRESSED IN PLACENTA, SIGNAL = 1.3; EXPRESSED IN BT474, SIGNAL = 1.7; EXPRESSED IN BONE MARROW, SIGNAL = 1.9; EXPRESSED IN FETAL LIVER, SIGNAL = 1.6; EXPRESSED IN BRAIN, SIGNAL = 1.1
ctcagagctttggccgtggccagcagtgcatttggaccgcccccccttccctcccaagcacatcatgaagacctccccatcagcccagagctggccccttgtcctgggccactgagacccagaagtaccaaggctggagtcagcttgcagcacagccagggtcgaggtcactccctccctgaggactctagcacggcacagcccctctgcctctctcctggtggtggcgttgaaacagcaccctctgcttcggtcctcgacaggatggcagagaaggaggcagtcaataagatgtccctgcacaaccttggcacggtctttggccccacgctgctccggccctccgagaaggagagcaagctccctgccaaccccagccagcccatcaccatgactgacagctggtccttggaggtcatgtcccaggtatgggaagacaggctccagcccatgcaaccccagcctgacagaggtggcctct

SEQ ID NO: 10021 - DNA, 466 bp, Homo sapiens
  MAP TO AC007655.1; EXPRESSED IN PLACENTA, SIGNAL = 0.71; EXPRESSED IN FETAL LIVER, SIGNAL = 1.9; EXPRESSED IN ADULT LIVER, SIGNAL = 1.7; EXPRESSED IN BRAIN, SIGNAL = 0.87; EXPRESSED IN BT474, SIGNAL = 0.7; EXPRESSED IN BONE MARROW, SIGNAL = 0.76; EXPRESSED IN HBL100, SIGNAL = 0.66; EXPRESSED IN LUNG, SIGNAL = 0.76; EXPRESSED IN HELA, SIGNAL = 0.63
tggcctcaatttagataaagaataccttttagcagctgacagttatatgtgctcaggttcccagttgacctcaactgcaaccagtctcctcttgggtggtagctcatatttataactttaaacagctcatagggagggatcaagacttccttcttgagggagaagtactgtacaggtgcacccaggcaggtgaatatggtaaatagtgtctggttcccaaactcctgtgcctcttctttcaggagggatgtggagaggaattggccaaatcgaatggtggcccctgtgtaggcattaaagtggacatccttcgtcctataatgcacctcatagcacagagtgccattctccatgatgctgtctttcctcagcagctggattgctgaggtgaggtagtagtgtaaatatttgaagtggaatgaacgttcatactgctgtggagtcctggcaacagaggccatggctc

SEQ ID NO: 10022 - DNA, 459 bp, Homo sapiens
  MAP TO AC007554.1; EXPRESSED IN PLACENTA, SIGNAL = 1.2; EXPRESSED IN BT474, SIGNAL = 1.1; EXPRESSED IN BONE MARROW, SIGNAL = 3.2; EXPRESSED IN HBL100, SIGNAL = 0.86; EXPRESSED IN FETAL LIVER, SIGNAL = 0.7; EXPRESSED IN LUNG, SIGNAL = 0.88; EXPRESSED IN BRAIN, SIGNAL = 0.71
  unsure 128
agccaacaggactggttttgagtacagtaatggacagagtagttgctgaaaatataacccaaacatccagggaaatagtgatttcagagcgattaggagaaccaaattatggggcagaaataaggggncttttccacaggttttcctttggaggaagatttcagtggcgactttagagaatactcaacagtgtctcatcccatagcaaaagaagaaacggtaatgatggaaggctctggagatgcagcatttagggacacccagacttcaccatctacagtacctacttcagttcacatcagtcacatatctgactcagaaggacccagtagcaccatggtcagcacttcagccttcccctgggaagagtttacatcctcagctgagggctcaggtgagcaactggtcacagtcagcagctctgttgttccagtgcttcccagtgctgtgcaaaagttt

SEQ ID NO: 10023 - DNA, 468 bp, Homo sapiens
  MAP TO AC007405.2; EXPRESSED IN PLACENTA, SIGNAL = 0.6; EXPRESSED IN LUNG, SIGNAL = 0.68; EXPRESSED IN ADULT LIVER, SIGNAL = 0.86; EXPRESSED IN BRAIN, SIGNAL = 2.9
aaccctgaatttgtggtgttgtctataagagttttttggttttgtcttcattttttattttactatcattgttccatgactgactttcaaaattcggttgcacagtactttctgagggaacttgtgaccaggtagtcatttgatattagcccctgaagattcctggatatgaaatatttctttgcttttatgtcaatgtaaacacaaatagtaaaatgcaagttgggttgaattgttaaaaagagagggtgttcatatcaatcttgagttttgttttgtgttttccatcacaaggtggctccaaaaatcaaagccctgatgatggagtcaggtacgaccatggttggctaccagccccaaggggacaaggccaacttcttccggatggtcatctccaacccagccgctacccagtctgacattgacttcctcattgaggagatagaaagactgggccaggatctgtaa

SEQ ID NO: 10024 - DNA, 487 bp, Homo sapiens
  MAP TO AC007404.2; EXPRESSED IN FETAL LIVER, SIGNAL = 1.2; EXPRESSED IN ADULT LIVER, SIGNAL = 0.79; EXPRESSED IN BONE MARROW, SIGNAL =   6; EXPRESSED IN LUNG, SIGNAL = 1.6; EXPRESSED IN HELA, SIGNAL = 0.7; EXPRESSED IN BRAIN, SIGNAL = 0.69; EXPRESSED IN PLACENTA, SIGNAL = 0.64; EXPRESSED IN BT474, SIGNAL = 0.97
acatgaaaatttagtttgaacttccaaaaaattttgaaatatattttcccaacaatataaaaaagctcatttgtttataacataatttaactttcaacattttgacagagatttgtagatcaaaagttattacttttaaataaaacctataatttacatgtatgtatctttatacatatatctatatgtatatatcagaagtaaaacaatttccattattttaagaacgcacattaaatacttaccactagaagctgccaggacatctttacaaagcattagccaatgagaaagtttttctactgccagcgaagaaagcatatgtcccaaagtgtcatgaatatcagaacataattttcgatctgtctcccggtctagcattccaaaaagaagtccctcaagaccagtttctgttatattaacaccttggtgccggcaatggatatcagttcgagaactaaccccaggggcaaaaggactgacatct

SEQ ID NO: 10025 - DNA, 468 bp, Homo sapiens
  MAP TO AC007245.3; EXPRESSED IN BRAIN, SIGNAL = 4.5
tggtgaacttccctttaattattctttgttaaaacatgaaaatctattactgtagtcctggcttgtccaagtgatgttgtggtgaagggaaagcagttcacagaaataataattgcaaaaagtaaaagtaaaaactggaaaaccaaaggcttgagcaaaagggccttaaagcaaaaaaaggataaatgagacttaaaaaataagaataccttgtagagaaagccaggaggcaattcctgagaggcctcccttgcagatgctagctggtcagcagcccccatggctggtgcagaaggcgtgggctgagggtcctggataggcttctgctccgtagccagctccggtgtctcgctggtggggcccggaggagccgcgtcctcggtggtctccttgggctctgcacctatagttatttcgttttctccttcctcttcatggttggaggcaggctctatgaccaccgaagga

SEQ ID NO: 10026 - DNA, 490 bp, Homo sapiens
  MAP TO AC007224.2; EXPRESSED IN PLACENTA, SIGNAL =   4; EXPRESSED IN LUNG, SIGNAL = 1.7; EXPRESSED IN HELA, SIGNAL = 0.73; EXPRESSED IN ADULT LIVER, SIGNAL = 3.8; EXPRESSED IN BRAIN, SIGNAL = 0.72; EXPRESSED IN BT474, SIGNAL = 1.5; EXPRESSED IN BONE MARROW, SIGNAL = 0.71; EXPRESSED IN HBL100, SIGNAL = 1.1; EXPRESSED IN FETAL LIVER, SIGNAL = 1.3
cctggaaggtggattctgtcagtgtgcccatacaacacatcaggaaagtgaggcttctgaagctaaattacttgccccaatttattagtttgtatccacccaggtgctagcaccgatttcaagtaggatacattcccatccacacacatagcttctaacagaggcttcactggtcttaggaaatgcacacaaacacatttccaataaaattgcatggggctcatcgaaccccagattcccacccacggatactggtcacaagcctctgccatcggtggtcactttcccctttgggatccaggtggaggatctgattgtgaaatatcggaaaaagaagaagacggtggccgggatcatcgtggagcccatccagtccgagggtggagacaaccacgcatccgatgacttctttcggaagctgagagacatcgccaggaaggtcagtggacagggccgaggttggatggagccattgggttttctgggttga

SEQ ID NO: 10027 - DNA, 490 bp, Homo sapiens
  MAP TO AC006548.19; EXPRESSED IN BONE MARROW, SIGNAL = 0.65; EXPRESSED IN LUNG, SIGNAL = 0.61; EXPRESSED IN BRAIN, SIGNAL = 5.2
ttccacaaatttccaaggtatgaacaattattttgtcaaagtgttgccttttaaaatgactaacatgaaactgccagtatttgctctaaagaaaaagcccagcagcttgaaacataaagcgaggtgtttgaacgtctacgttagtttggtgggataggcatctgtactgcagagcagttgtctgatgatgtgtcagagctgtaaatgcattggctgaaacactgtggcaaatatttgtgtgtaaaaattaagttattatttgtactgagactggatatcttgcagttcctgttctttctttgctttgatatcctggtaagcctgcattttgctagcatccaagtaagcccagttagaaaactgtatcatgagaaagtggatcttgaagggaagggtaagcatgatggctagtgagcatatgagaaggcaaagcgaggtgctagttatattagatggacttgactttaaagaggatgagggctactctgtg

SEQ ID NO: 10028 - DNA, 458 bp, Homo sapiens
  MAP TO AC006548.19; EXPRESSED IN LUNG, SIGNAL =   1; EXPRESSED IN FETAL LIVER, SIGNAL = 0.63; EXPRESSED IN HELA, SIGNAL =   1; EXPRESSED IN BRAIN, SIGNAL = 1.7; EXPRESSED IN PLACENTA, SIGNAL = 0.94; EXPRESSED IN BT474, SIGNAL = 1.3; EXPRESSED IN HBL100, SIGNAL = 0.69
atggaaaccaagaaagtggccagtcctgggtggacgtgttgggagtgtgaccacctgttcatgcagagagatgtgtacatatcccacctgaggaaggagcatgggaagcaaatgaagaaacacccctgccgccagtgtgacaagcctttcagctcatcccacagactgtgctggcacaaccggatcaagcacaaaggcatcaggaaagtgtatgcctgctcacactgcccagactccacaggtacttttaccaaagggttgatgctggagaagcatgtccagctgatgcatggcatcaaggaccttgacctgaaagaaatgacagacgccaccaatgaggaggaaacagaaataaaagtagacgtcaaggtccgcagtcccaagtggaagttgaaagaaccggttctggagtacaggcctcccagaggagcaataactcaaccactgaaaaagctgaa

SEQ ID NO: 10029 - DNA, 492 bp, Homo sapiens
  MAP TO AC005064.2; EXPRESSED IN FETAL LIVER, SIGNAL = 1.9; EXPRESSED IN BRAIN, SIGNAL = 0.99; EXPRESSED IN ADULT LIVER, SIGNAL = 1.9
tttcgaaatatccttcccctcatatcattagcctcatacagaaacagtataagtagtgaatacctaatatcaaagtcaggaaaatcagttgtcatttcctggctgaaaatttctttgggaagttcacagtatctgaagtatactggtggtttatgaggaggcaggagattctagatatattgctatgttggtatatttgttattataggaattacctggactttgctccatgagatggattaccagaaatacatttctgttagacacgactacatacttcttcctgaagatgccctcaccaacacaactcgacttcgctggtggcagccttttgtgatcagcaatggaattgtggtctctggggtggagcgtgctcagtgggcactggacaacattttgattggtggagcagaaatcaatcccagccaattggtggacacttttgatgatggtaagaaacaagacattgaacaattttctttcctgtgagcc

SEQ ID NO: 10030 - DNA, 456 bp, Homo sapiens; identical to SEQ ID NO: 1296
  MAP TO AB023054.1; EXPRESSED IN HELA, SIGNAL = 2.5; EXPRESSED IN BT474, SIGNAL = 2.7; EXPRESSED IN BONE MARROW, SIGNAL =  33; EXPRESSED IN FETAL LIVER, SIGNAL = 1.2; EXPRESSED IN LUNG, SIGNAL = 1.4; EXPRESSED IN ADULT LIVER, SIGNAL = 1.8; EXPRESSED IN BRAIN, SIGNAL = 0.72; EXPRESSED IN PLACENTA, SIGNAL = 0.71; EXPRESSED IN HBL100, SIGNAL = 2.1

SEQ ID NO: 10031 - DNA, 467 bp, Homo sapiens
  MAP TO AC007098.2; EXPRESSED IN BT474, SIGNAL = 1.1; EXPRESSED IN FETAL LIVER, SIGNAL = 0.95; EXPRESSED IN ADULT LIVER, SIGNAL = 2.5; EXPRESSED IN HELA, SIGNAL = 1.1; EXPRESSED IN PLACENTA, SIGNAL =   1; EXPRESSED IN HBL100, SIGNAL = 2.4; EXPRESSED IN BONE MARROW, SIGNAL = 0.93; EXPRESSED IN LUNG, SIGNAL =   1; EXPRESSED IN BRAIN, SIGNAL = 1.8
tggggtatcacaaaccaaggtatgagttttttacaaaagcatattctaagagagtacttcttgagtatttttaaatgaagccaaaaagttgatgtggaaagcagcaacagttatcttctaatttactatgcttcctttaggtgttttgcaacatatcaataggttagaagctttatatttttgaagcaacattttgaagtaagaataaaaagtcccaaaaggtccactgtggatttctgggttgtctgtagaatgatagaagattctttaactcacctccagatgcctttgacctttctttcaacttttctgcagccatttcaccatagctgggaagttctgacatcttcactccagatcgagcttctgctattagctgacgagctctctctctcagctgccgacgtcgctcttcatcttgctgctaagatatattgaacagttgccaactcagtaattgacagaaa

SEQ ID NO: 10032 - DNA, 469 bp, Homo sapiens
  MAP TO AC007375.4; EXPRESSED IN BONE MARROW, SIGNAL = 1.2; EXPRESSED IN BRAIN, SIGNAL = 2.8; EXPRESSED IN ADULT LIVER, SIGNAL = 0.98; EXPRESSED IN BT474, SIGNAL = 2.2; EXPRESSED IN HBL100, SIGNAL = 1.4
tgggacatgttctaaaggagcagtggactaggagtggggagtcctgccactgaaccagccctgggagcacctagatgctcatcaaatgatcaagaacaattaggtgggtgggacagacaggacccaggctgctggggaagaaggcaggctccaaggtctggaggagacagaggcgatgggggtggggcatgaggggagagggtgtgcccagggccttgcccccaacgtgaccttgctcctgtcccctgtctctatcccaagcagctgtatgtggccaccgtgctgcaagaaccggagttgaatctgacccccgcctcctccccagccaggcacacctatggcaccatgaacaaccagccggaagagggagaagaagagagtggtctgaggggctttgcgagggagctagactcggcccagttccaggaagggctggaactggagggccagaaccagtaccactgaccgg

SEQ ID NO: 10033 - DNA, 462 bp, Homo sapiens
  MAP TO AC009497.2; EXPRESSED IN BT474, SIGNAL = 1.6; EXPRESSED IN FETAL LIVER, SIGNAL =   1; EXPRESSED IN HELA, SIGNAL = 1.7; EXPRESSED IN PLACENTA, SIGNAL = 1.2; EXPRESSED IN HBL100, SIGNAL = 1.7; EXPRESSED IN BONE MARROW, SIGNAL = 0.99; EXPRESSED IN LUNG, SIGNAL = 0.88; EXPRESSED IN BRAIN, SIGNAL = 0.97
aagttggggaggggattatgtgtacttaagaattatctattaatgagatgtatgtagaagcacaaggcacgcagtgggctcattcagttgccagtactgttgcttataccagacatacacatcagattcgaattttgttttaaattacacatacatgtgcctgtcttcactgtgggctaacctcagttatgattgagcttaaatggggaaattgaactggataaacccttgcaaatagcatataaataaaactatataattataatttcctgtttctgttttgtttagggcaagaggcctgggacaactcattagagctaagaatataaaaactattggtgatttgagtactcttacagcatctgaaataaaaactcttcctatccgttctccaaaagtgtccaatgtaaaaaaggctctcagaatatatcatgagcagcaggtaaaaacttagatattagc

SEQ ID NO: 10034 - DNA, 496 bp, Homo sapiens
  MAP TO AC009294.6; EXPRESSED IN LUNG, SIGNAL = 1.4; EXPRESSED IN BRAIN, SIGNAL = 1.2; EXPRESSED IN BT474, SIGNAL = 1.2
tggggaaattctgagaacacaaattctggttcttctcaaatcataacatgccgtgccacctggttacccatgagtaacctgggtgtgtaggacccagtgctgtggatggagctcttcacatctccttgaggccagggctctgtggggtgttagcacagcatgcacagcgaaactgatgtttctggatcccagctgtataaatgagctacaatggccagatgtgaccgtcctgaccctgtttgtgtgcagcatggacatgcagcctccatgactccccagggaccttgctggctctgggattctatgacagcagacttcggcaagttgctcatcgaaaagtcagcagaactcccatataaaagaaaaattgtactcacagatgccgctgtctccaaagagagggcaaatgtgggtctatctgatgaaagcaaactcaacaatgtccttaatcacaaggatgatcagcctggtcagctgaaagggtatggctagcacg

SEQ ID NO: 10035 - DNA, 483 bp, Homo sapiens
  MAP TO AP000407.1; EXPRESSED IN BRAIN, SIGNAL = 0.95; EXPRESSED IN FETAL LIVER, SIGNAL = 1.3
tgtggggaatctaccctaaatgaatgatgaaaattaatacctgtggtataaaaaatcaaattatagcatgagactatgaaattgaatgcaaccatagaaaataagaaacaaaccacaatttatggaggtgttaaacatttcttggtaggattcaccacattcttgaagtgaaataaggaataagggaaagtatttgaaaatagccataattgaagaaaaggagatgaatgtgggcacagtgaagatatttaaggagaaaatgactgtagggatttaaatattctctgtcatgattctcttgcttcttatggtgtagatgccttattggaggaactggaacgctccacccttcaggacagtgatgaatattccaacccagctcctcttcccctggatcagcattccagaaaggagactaaccttgatgagacttcggagatcctttctattcaggataacacaagtcccttgccggtaaatttt

SEQ ID NO: 10036 - DNA, 444 bp, Homo sapiens
  MAP TO AL035454.16; EXPRESSED IN HELA, SIGNAL =   1; EXPRESSED IN PLACENTA, SIGNAL = 1.2; EXPRESSED IN HBL100, SIGNAL = 1.3; EXPRESSED IN BRAIN, SIGNAL = 0.97; EXPRESSED IN BT474, SIGNAL = 1.6; EXPRESSED IN FETAL LIVER, SIGNAL = 3.8
tgtaagactgcacaatgtagttggagacactgaacatcttggttggctatagaggagctgtgcttagatttttagaatgtttttctaccagtttagttctcactgagctacagttgctgcttactcactcccagtctttcagacccagcccttgttctttctgtagtagactttgatgttattttgtaaaatggaggtaatcatccggatttccagtaaaaattcttcactctgatatgtgagtatatcacccacgtttgcttatcttttcattttttatttctgtagtctgatgcaggctgggaagaatactttgattacatctttccagaagatgctgccaaccaacctaacctcaaactcctggccatggccaaactgtggaagaaacagcagcaggaaaaggaggatgctgagcaccatccagatgaggacgtcgatgag

SEQ ID NO: 10037 - DNA, 458 bp, Homo sapiens
  MAP TO AC007038.3; EXPRESSED IN BT474, SIGNAL = 1.2; EXPRESSED IN FETAL LIVER, SIGNAL = 0.93; EXPRESSED IN BRAIN, SIGNAL = 3.1
tgttattttaggccatttacgtgaaaatgatttttctacgtaagtcttactctttgtaagaagataaaatcaaacatgcgcaaaatgttcaaacgtgctctcatttattaataaaccagcaatgtttttattttaaaaaatccccaggagacactggttaataccaactattaagcattgacggtccgtttccaccaactcctccccaatttactgtttcacctctacctgcagcggatcagaaacgatctgtgaccttcattgaggctcagccagagccagcagctgccccaacagatgcgcttcctgcaacaggccaactacagggctgtagcccagccccttctaggaaaccagaagcaatggacgaaccagtcctcacatcttctcccgccatagttgttgcggatctccacagcgtgtctcccaagcaggtgagggcactagagaaacaggca

SEQ ID NO: 10038 - DNA, 408 bp, Homo sapiens
  MAP TO AL080249.11; EXPRESSED IN BRAIN, SIGNAL = 0.98; EXPRESSED IN ADULT LIVER, SIGNAL = 4.1; EXPRESSED IN FETAL LIVER, SIGNAL =  15; EXPRESSED IN BONE MARROW, SIGNAL = 0.93
tgccgacaagtttatcaaggatttcctttatggcttatgagacttggatattgcctagaaaggccttcatccagccctgcctggaaatactggatctgggctttcttctagatcttttatggctttatttgttattcttaaatctctgctcagctccatgtatttggaggtcagaactgagccttctattttccccacaaatggtggcagacccctggtctaggaactaaccatggcttctcttacctcctccagcaaactacagggctcctttgatgtcagtgtcaagggcatcagcatttcggtcaacctcctgttgggcagcgagtcctccgggaggcccacagttactgcctccagctgcagcagtgacatcgctgacgtggaggtggacatgtcgggagactt

SEQ ID NO: 10039 - DNA, 474 bp, Homo sapiens
  MAP TO AL034384.1; EXPRESSED IN BONE MARROW, SIGNAL = 1.4; EXPRESSED IN BRAIN, SIGNAL = 1.5; EXPRESSED IN ADULT LIVER, SIGNAL = 1.2; EXPRESSED IN BT474, SIGNAL = 1.6; EXPRESSED IN FETAL LIVER, SIGNAL = 1.2; EXPRESSED IN HBL100, SIGNAL =   1
tgagagagaggaccagaccgtagccctccacagccccagctggtctgtctgagatgaacttccaggaggaacaattaagtgataaataagaaccatgctgcagcctgaaccttcaggtgctcacgtgttccccagcccagggtgattaccaatgccaaatgccactcccatcctacccaagatgtatgcagtggggctcagtaaactcctttccctctctctctatctcctaccactaaccatccccttccttctgccttcttccccgagtaacctcagctcccctaccaagggccccaaggacagccgcatgactcagggactatgcaagagcctcctttccatcaccagcacctctaccatccacacctgcagcatcaaaacctccgcttccaccatcaccaccctcatctccaccaactccactaccaccactaccatcattactatctccccatccatcatcaccatcac

SEQ ID NO: 10040 - DNA, 495 bp, Homo sapiens
  MAP TO AC007898.1; EXPRESSED IN BRAIN, SIGNAL = 1.1; EXPRESSED IN BONE MARROW, SIGNAL = 0.97; EXPRESSED IN BT474, SIGNAL = 1.6
  unsure 455
  unsure 471
aaagccaaatcaaataaatgtgcaactcataaattctgcagctaaaaatttacccctgagggatagcaacaaggcaccgtggaaggcttccccctctcttgccctcataaagagggatgaggagtgaggcttctctctccagctccgagaggccccgtccagaagcacagcaccaggccgcctgcctggtcctagccttgttaacgaatttactcccctcgttggtgggcgtgaagctgctctcttccaaggtgatgtcagcttctccaggccccaacatgttgctaggcaacacgtgcctggacctggcacctgaccactcctttgcttcagctatgggggtgcgggggatgctcgggcacaggatgctgcgtggaccgcagatggctatggaaggaagagcaggggaccatcgaatgaccaacatccaagctcatcaagccacctcctttttnggactccaagtatgtncattcccagcaaaacttgttcgaa

SEQ ID NO: 10041 - DNA, 460 bp, Homo sapiens
  MAP TO AC009613.2; EXPRESSED IN BONE MARROW, SIGNAL = 1.7; EXPRESSED IN BRAIN, SIGNAL = 1.1; EXPRESSED IN BT474, SIGNAL = 1.3; EXPRESSED IN FETAL LIVER, SIGNAL =   1
  unsure 71
  unsure 81
  unsure 97
  unsure 336
catttccatgtccttgactccaagattcttttcctggtattataccataaaactgaagaaagaattacagnttgacacttngaacaaatcagaggtntaggggcaccaaccctcccatgcagtcgaaaagccatatataatttttgactcaccaaaaactttactaatagtctactgttgaccagaagccttactggtatataaacaggtgactaacacatattttgcatatgtattacatactgtattcttaacaataaagtaaactagagataagaaaatgttattaagaaaattataatgaagagaaaatatattgactattcattatgcatnaagtgggtttcataaaagtcttcatcttcatcatcttcatgttgaataggctaaggaggaggaagaagagaaggggctggtcttgcttgtctgtcttagggatggcagaggtagaagatctgca

SEQ ID NO: 10042 - DNA, 500 bp, Homo sapiens
  MAP TO AC009444.1; EXPRESSED IN BRAIN, SIGNAL = 1.9; EXPRESSED IN BT474, SIGNAL = 1.4
  unsure 59
  unsure 164
tctacaggccctgcaaaatctaccgtaattgtctttggtatgagccagtcaggctgtantcagtcaaaggttgacaaaaagtgtccagtgcatagttggtaaagtctccagaagctccctatactggatcaagtcctaaagagatgacttatcttctcatacanaaaaaatcatgaatgtgtacttcactcagtgttctggaatttggtgacagtcatgagaaaaatcaccactgaaaagtgagaatgggagagtcaaaaagagtaggaccattgagcgaacaacatgtacctgtaggataatgttcattcactggccagttgtccacctgcagggtggcgttgccgccgttcctggtgaagcgtaccacatggtatttgccgtcatttacaggggttctctcctctttgatggagatgtcaactgtgccaatgttgaagacaactccaattttcccctgttcctataataaagaaacacaaaaggcatagttatcacca

SEQ ID NO: 10043 - DNA, 400 bp, Homo sapiens
  MAP TO AC009408.2; EXPRESSED IN BONE MARROW, SIGNAL = 1.1; EXPRESSED IN BRAIN, SIGNAL = 1.1; EXPRESSED IN BT474, SIGNAL = 0.96; EXPRESSED IN ADULT LIVER, SIGNAL =   1; EXPRESSED IN HBL100, SIGNAL =   1
tgaaactgcaaattcaaagtggctttgtaatcggtccacttggttgggctgagctacatttcccagaatccccttccctggatgtttctgcttcagtgggccacaggagaccatctttgagatttggaggacagagctgaagcaacagccatattattttttacacatggaaggcctaggtgggtgcttttattgcacgttgttgcctctctgcttaccttgttggcggggacggcgtccgggcctgcacctgctccccctggccctgctccttccttcagttctatgactgctgagccaggtgtgtgtctagctccatgacaaagggtaccagcttttcctgcaggacacccttcatcaaggtgggaggtggtgagtgactgacacagtttcttgccca

SEQ ID NO: 10044 - DNA, 485 bp, Homo sapiens
  MAP TO AC010888.1; EXPRESSED IN BONE MARROW, SIGNAL = 0.97; EXPRESSED IN BRAIN, SIGNAL = 1.3; EXPRESSED IN FETAL LIVER, SIGNAL =   1; EXPRESSED IN BT474, SIGNAL = 1.4; EXPRESSED IN HBL100, SIGNAL = 1.3; EXPRESSED IN HELA, SIGNAL = 0.96
ccggcaaatggctttcttagttacctttctgcatatctgaaccacatatctaaacagcacatacagaatgcgtaaaagaaaccatgtaatatgacagtaaagtgacttctccagaagttaccttactttaataacatgtgcaagtacaaaaaatcattcgtctttcaacaagttgttagctgaggtaggcacattttatttttcgagagaaaatctttctaaaggaaactagcccacaaaggcggatagcaccaacaattagtcacgttaatagtcaaatcttttggggggaaataaaaagcaaagagcatactcacattcctttcaggcgctgccacattttttcagtctgttctcctgtaagatacttaaaagtggtgttttccaattcttcaatctctgtggcactagaccccatgatgatgctcctaagacaatacagttacagtcagtttcagcagctagaacaagcattcctcagtcca

SEQ ID NO: 10045 - DNA, 476 bp, Homo sapiens
  MAP TO AC010092.1; EXPRESSED IN BONE MARROW, SIGNAL = 1.1; EXPRESSED IN BRAIN, SIGNAL = 1.4; EXPRESSED IN ADULT LIVER, SIGNAL = 1.3; EXPRESSED IN BT474, SIGNAL = 1.6; EXPRESSED IN FETAL LIVER, SIGNAL = 0.96; EXPRESSED IN HELA, SIGNAL = 1.6; EXPRESSED IN PLACENTA, SIGNAL = 2.9; EXPRESSED IN HBL100, SIGNAL = 1.6
aagcttttcatattccccagtctagacctcttgcattttctacttatgtcataggctaactgtgatctcagacggcaaatagatgaacaacaaaaattacttgaaaaatacaaagaacgattaaataagtgcatatcaatgagcaagaaacttcttattgaaaaggtaggctaaaagttgagtaaattttcgctttcccttcattagccccttttgctttgtatgcttttataaattaatgaatacaattgagtgatgattttttttctccttttcagagtacacaagaaaagctgtcaagcagagagaagagtatgcaagatcgattacgcctcgggcactttacaacagttagacatggcgcttcatttactgaacaatggacagatggttttgcatttcagaatcttgtgaagttagtcattcttaacatttaaaagtttttagtattcgtttgggttttcattactttaaaa

SEQ ID NO: 10046 - DNA, 435 bp, Homo sapiens
  MAP TO AC010885.1; EXPRESSED IN BRAIN, SIGNAL = 1.2; EXPRESSED IN ADULT LIVER, SIGNAL =   1
acctggtaatcaggcagacctgatttggaatctcagctgtaccactgattaacgtggcaattttagcaagaaacttagcttctctgaacaactacttcttgatatctaaagtgggaataataacccctactctgcagggttgctataagaattaaattcaataatgcatataaaggaattatactttctaccacatggtaattgctcaataaaatgtttttattagtggtaatcatgtatccataagcatagtaattgatatatgctgactcacctgaaaaaatggcaagtagaatttggaaatgacagcctcttttcttccttttttccttctttgcttccatccttccttcctttcctctttctttcctttcttcttttttccatctctctctcctccttttctttctctcttctttgtttctttctgaggca

SEQ ID NO: 10047 - DNA, 495 bp, Homo sapiens
  MAP TO AC010102.1; EXPRESSED IN BRAIN, SIGNAL = 1.1; EXPRESSED IN ADULT LIVER, SIGNAL = 0.91
acgtcacaagtcggtgtgaggactgggcctgccagggctgacccctaacgtgtggctgccggtggtatttttcaagtgggcttcgcagggtgggagggggagatgcattccacacctacagacggagcacctactgtgtggcagacttgacatggccgtggacatcggggcctgtctcaatttaaaatgtctgggcagaacagagtggcaggaaaggcagcaggtctggaaagccgtgcgtcccgtctcagctctcttgtccttgtttctgaaggtacctgctccccagaggaaacagctctcctctgattgccaccttagtgccagcagtgaggtggggaatacagtctgccttgccctcggactggtagaagcgggccctgtgcaggacataggcgaacactgcccctggagatgccggcacgaccccaaggtctgttttgccaggctgaaggtgacggcccccgtcctgagctgcagcaagcgattcacagt

SEQ ID NO: 10048 - DNA, 488 bp, Homo sapiens
  MAP TO AL049821.6; EXPRESSED IN ADULT LIVER, SIGNAL = 1.5; EXPRESSED IN BT474, SIGNAL = 1.2; EXPRESSED IN HBL100, SIGNAL = 1.1; EXPRESSED IN BONE MARROW, SIGNAL = 1.4; EXPRESSED IN BRAIN, SIGNAL = 1.2
tcctcacagaggaggacaggcaggaaggtagagtgggctgctttgggcacatgtggttctgtggatgttctcttttgacagcttcagttcttcagggaattgggagcaagttcatcagctgagagtgaacatggggcagacagtgtgagaggtcaaagcggcaagagtagttgtgccacagtcttttaggagagagggaaagtaaatggaatggggaaggaaagtaaatagcatggctgctgagctgcgttacaagcccacccggtgttgggttgtgaggtgtagttgtgggctcttcttcagtcggattgtcagcatgggcggctggcagagagttgaatctgacagggcagcagttctggaaaatgagtatgatgagtcaagaaagggaccaggaagtggaaactgtgtgtgaggcagtgatgctgatgaatgactgtggaaaacaatggaggtgaggagggagtggatgttgagtggctagggga

SEQ ID NO: 10049 - DNA, 472 bp, Homo sapiens
  MAP TO AL050342.29; EXPRESSED IN BONE MARROW, SIGNAL = 0.93; EXPRESSED IN BRAIN, SIGNAL = 1.3; EXPRESSED IN BT474, SIGNAL = 1.3
agctcctttgctgtggagaccctccatgatctggcccacatttttcttcgcagcctcttctcatcccacttcctttcttctccaggtgctgtgaaggcagcaagcttcccctgagcgcacactgctctttcctgccgcagggcctttgctgttccctttgcctagaaaactcccacccgttgccaggctggctcctactcttccttcaggaggcaacttaaaacatcgctgcctccaggaagccctcggttattaccttattctcaggatgggggctgtccttcttctgggcttcctgcctgcatcttgtcagtgtcctggggaaaggggtgaccagggccggttgagcactcacgtgtggctatctctgtgctctgtggcaggtgacggatggtggcaccatcaagcaaaagatcttcaccttcgacgccatgttctccaccaactactcacacatggagaactaccgcaa

SEQ ID NO: 10050 - DNA, 457 bp, Homo sapiens
  MAP TO AL033527.25; EXPRESSED IN FETAL LIVER, SIGNAL = 0.98; EXPRESSED IN ADULT LIVER, SIGNAL = 0.98; EXPRESSED IN BT474, SIGNAL = 1.1; EXPRESSED IN HELA, SIGNAL = 1.4; EXPRESSED IN PLACENTA, SIGNAL = 1.2; EXPRESSED IN BONE MARROW, SIGNAL = 1.4; EXPRESSED IN BRAIN, SIGNAL = 1.2
tgtgtatataaatcactggggactcccgttataatgcagattctaattcagtaggtctggagtggggcccaagaatcagcatttctaacaagttcccagagaatgatgatgccacagtctaaggacaagaatttgggtgacaaagacactgtatctttcagtccatagtctgatggggatggcatccatcagtatttaggccttgggtgccccttctgagaagaaattgccactagaaagaaaacttctctcttggcttgggctgctttcacccaccaaacccagctgctgcctttcctaaggatatcagagcagttgctctatttctgaagtccaccactgtgtaattggtcacaagaggatccacaaagctgatcatgtggtgccggcagattctctgctcttgggcagaaaccttgttggtgatgatgtctaggccttcatagacctaggggaa

SEQ ID NO: 10051 - DNA, 492 bp, Homo sapiens
  MAP TO AC011290.1; EXPRESSED IN BT474, SIGNAL = 1.5; EXPRESSED IN HBL100, SIGNAL = 0.99; EXPRESSED IN BRAIN, SIGNAL = 1.2
gaaaaatataaaatcaggaaaagcgtatatagagttatgaaagaggggttatgaattataaacagttttatgattaagtccaatcgtttaattgttattgaaagatagtcttatatttttaagtcctattttgctatttaacccttgtttatacttttgttcagtgctttgctctcctggtgtcaccttcataataataattcaactttgatcaataaaataaacaatcttctggatgcagttggccagtgtgaagagtatgtgctcaaacatctgaaatcaatcactccaccgtcccatgttgtagatttattggactccattgaggatatggacctttgtcatgtagttccagctgagaaaaagattgatgaagctaaagatgaaagactctgtgaaaataatgctgagtttaacaaaaactgtagcaagagccatagtgggatagattgttcatatgtagaatgttgtagaacacaggagcatgcacat

SEQ ID NO: 10052 - DNA, 469 bp, Homo sapiens
  MAP TO AC009403.1; EXPRESSED IN HBL100, SIGNAL = 1.1; EXPRESSED IN HELA, SIGNAL = 1.2; EXPRESSED IN LUNG, SIGNAL = 0.95; EXPRESSED IN BRAIN, SIGNAL = 1.2; EXPRESSED IN ADULT LIVER, SIGNAL =   1; EXPRESSED IN PLACENTA, SIGNAL = 1.5; EXPRESSED IN BONE MARROW, SIGNAL = 1.4; EXPRESSED IN FETAL LIVER, SIGNAL = 1.2; EXPRESSED IN BT474, SIGNAL = 1.3
tctgctgtacgcattaagggtttagggcactggctctgtatagcattttgagtactgttggagttaatgtgcatttgtcagtaactggaataactttttatcagtcatggtttaaatctttgtaacagctatttatataatgatttagtttgagctcctctcttcattgggtgctttttttttttattttcgtcctctctagttctcagggtgttacaattagtctgaatgctacatctggcatggttacatcatttgaactctctgacaacactaacgaccaatctggagaacaggaatctgagtatgaacaagaacaaggagaggatgaactggtttatcacaaatctgatggatcagaattgtatactcaagagtacccagaagaaggacagtatgaaggccacgaagctgagttgacagaagaccaaatagaatatgtggaagagccagaggaggagcagcttta

SEQ ID NO: 10053 - DNA, 469 bp, Homo sapiens
  MAP TO AF176315.1; EXPRESSED IN PLACENTA, SIGNAL =   1; EXPRESSED IN BRAIN, SIGNAL = 0.93
gacacttttgtacatcagcaaacactgtgaactgagtgaaaagataacccatggattaggaaaaagatttgcaaatcatatctctgaaaagaggctgatatgcatcatatacaaagaacagctagaactgaacaacaagaaacccaaagcatcccattaacaatggtcagaagactcgagtagacatgtccctaaagaagatacagcaatggccaataagcatctaaaatgatgttcaaaatcactcatcatagggaagcgcaaatccaaccaagaatgtgataccacacatttggatggatgtgataaacaaacaagcattggtgaaactagagggaagtaggaatgctcgaatctgattggagggaatgtaaaaccgtgaaggaacagggaaaatagaatggcgtgtactggaaaaagtagaaacaggattaccagatgttcccgcagttgcacttgtgggtaccct

SEQ ID NO: 10054 - DNA, 447 bp, Homo sapiens
  MAP TO AL034582.10; EXPRESSED IN LUNG, SIGNAL = 0.88; EXPRESSED IN BONE MARROW, SIGNAL = 1.2; EXPRESSED IN BRAIN, SIGNAL = 3.3; EXPRESSED IN FETAL LIVER, SIGNAL = 0.98; EXPRESSED IN BT474, SIGNAL =   3; EXPRESSED IN PLACENTA, SIGNAL = 0.99; EXPRESSED IN HELA, SIGNAL = 1.3; EXPRESSED IN HBL100, SIGNAL = 1.5
cactttaggccaactgagggttcctcctgacagcagctggtctgtgtgcatatttcctgaagattcatcccttgttgcttagcaaccgtaatagttccagtgtatatttgtgggtgttctcttttaaatctaaagcattcaggaaattgacaatgcacatgattagctgctgagcactataattagtctgtggcgggatagagggagatgcggcctccttggcccccttaccgcgtaatgatttggagaaaatggatttcatttcaggtatgcagaacatgcacgataaagggatgactgtccagcctgaacttaaagcttctttttcctatggggctctggaaaacaatgacaacatttctgagatctacgctcctgccaccctgccagtcatgcaagaagagcacggctccagaagtgcctctggggtcccctaccgagtcctag

SEQ ID NO: 10055 - DNA, 458 bp, Homo sapiens
  MAP TO AC009706.2; EXPRESSED IN PLACENTA, SIGNAL = 2.4; EXPRESSED IN HBL100, SIGNAL =   1; EXPRESSED IN BONE MARROW, SIGNAL =   1; EXPRESSED IN BRAIN, SIGNAL =   1; EXPRESSED IN ADULT LIVER, SIGNAL = 1.2
  unsure 144
taggattagggagggcacaggccactggtgcaatggataacgcatctgactacggatgagggaatttagcctggaataaggaacttttatttccagcttagtgatgcacacaaattttcaaaataaaataaaaatcatgttttnatgtgattcctgtttctcctaatgcaaagatgatgggtactattactaaaaatatttttaaaatgtaagggctaaggccccagaagttctgctatgattttttatgtttcatagagtgattatcatcacagaagctcaagcattatgtaaatacaaacacatatactccgacctggtaattctgattccggaaatttatcttcaggtccacccgcacatccacaaattgatgcatattcaatgttatgtaccgcagcactgtttataagagcaaaagactggaaacagcctaaatttccatctataaaagacta

SEQ ID NO: 10056 - DNA, 457 bp, Homo sapiens
  MAP TO AL022068.2; EXPRESSED IN BONE MARROW, SIGNAL = 1.3; EXPRESSED IN LUNG, SIGNAL = 6.4; EXPRESSED IN BRAIN, SIGNAL = 1.1; EXPRESSED IN BT474, SIGNAL =  31; EXPRESSED IN ADULT LIVER, SIGNAL =  13; EXPRESSED IN FETAL LIVER, SIGNAL =  14; EXPRESSED IN HELA, SIGNAL =  47; EXPRESSED IN PLACENTA, SIGNAL =  74; EXPRESSED IN HBL100, SIGNAL =  27
tagatgcccccaaatctcaggacctcgccaagatcacagcagacatctcgacccgatatgacgagctggctcggaagaaccgagaagagctggacaagtactggtctcagccgattgaggagagcaccacagaggtcaccatgcagtccgccaaggttagagctgctgagatgacattcatggagctgagacgtacagtccagtccttggagatcgacctggacttgatgagaaatccgaaggccagcttggagaacagcctgagggaggtggaggcctgttatgccctgcagatggagcagctcaacctggatcctggatcctgctgcacctggagtcagagctaacacagacccgggcagagggacagctctccaagcccagaagtacaaggccctgctgaacatcaagaacaagctggaggctgagatcgccacctactgcctcctgctggaag

SEQ ID NO: 10057 - DNA, 466 bp, Homo sapiens
  MAP TO AC007708.13; EXPRESSED IN PLACENTA, SIGNAL = 4.5; EXPRESSED IN HBL100, SIGNAL = 1.5; EXPRESSED IN HELA, SIGNAL = 0.92; EXPRESSED IN BRAIN, SIGNAL = 0.91; EXPRESSED IN FETAL LIVER, SIGNAL = 0.98; EXPRESSED IN BT474, SIGNAL = 3.1
ccttgtgctatctgttgacccctaaaatatgctgggagttttgggattttttttaaagtcaaatgcatggcataaagcaaaattacactactaaagaactgagtcaggccagacgctggcaacgtgaagacagcttctccttacccactaggttcatctttgcactgttaactcccaaagtattgcttctcggtgctgggtgtgtggcattcatattccccggcatcccgggcctgaagatctgtgatgtgcaatagggttgggttcccctggactctttctatgaagatcttccctccgcggacgcgctgggtgtagatggcataggggaaggaagagtccatggtgctgacgatctgcacctctcgctctggcgacgaaggcaggtaaatggaccactggaaattctgttcagaaggtccctggtagccactcacattgcaccagatagtgatgtgggagccct

SEQ ID NO: 10058 - DNA, 454 bp, Homo sapiens
  MAP TO AL022329.9; EXPRESSED IN LUNG, SIGNAL = 1.1; EXPRESSED IN BRAIN, SIGNAL = 1.2; EXPRESSED IN ADULT LIVER, SIGNAL = 1.6; EXPRESSED IN BT474, SIGNAL = 3.8; EXPRESSED IN FETAL LIVER, SIGNAL = 1.6; EXPRESSED IN PLACENTA, SIGNAL = 3.3; EXPRESSED IN HBL100, SIGNAL = 1.9; EXPRESSED IN HELA, SIGNAL = 2.4
tgcttattccctctctattcgtgattgggatgaggtaaggggtgacaatgtgaaacaccacaaaattaggaaacttgacaatggtagatactatatcacaaccagagaacaacttgatactctgcagaaattggcaaaacactacacagaacatgctgatggtttatgccacaagttaacaactgtgtgtccaactgtgaaacctcagattcaaggtctagcaaaagatgcttgggaaatcccttgataatctttgcgactagaggttaaactaggacaaggatgttttggcaaagtgtggatgggaatatggaatggaaccacaaaagtagcaatcaaaacactaaaaccaggtacaatgatgccagaagcttttcttcaagaagctcaggtaatgaaaaaaataagacatggtaaacttgttccactatatgctgttgtttctgaagagcca

SEQ ID NO: 10059 - DNA, 451 bp, Homo sapiens
  MAP TO AC011336.1; EXPRESSED IN BRAIN, SIGNAL = 0.91; EXPRESSED IN ADULT LIVER, SIGNAL = 0.97; EXPRESSED IN PLACENTA, SIGNAL = 0.96
tttttggctgttcaactaaaccagtcttttgaatgttgggggttttacagttagagtcctgatgactttttcttgtttactgttgttaaaaatcactacctccagtggtcacagagaatgagtaagagaactggctgtgcatatcaagatgaagtatggtgtaagaaatatttcagagcatgtcctttggcccaagattgagccatttggacacctaagcaggattggctgaatgttatcctttctgctgaggcatcagtggagatgatcattagtggtggccgaaaagtgttgtcgaaggtgctcttgcttgacacacttccaatgcgggacatagtttgagtgatagatggctaattcattgataatgtacttgttgccttgcagtcttgtgtactgctggctacctctggtctgtgtgccagtattgagcagcattctatgggaggaa

SEQ ID NO: 10060 - DNA, 461 bp, Homo sapiens
  MAP TO AC011415.1; EXPRESSED IN HBL100, SIGNAL = 1.3; EXPRESSED IN BRAIN, SIGNAL = 1.2; EXPRESSED IN ADULT LIVER, SIGNAL = 0.98
tcacgtacaagtggacaggagatactgaggataggagagcctcaggaggaggctcttacaggtaactcaggctgagagtagactgactggcacttagaccaggtctttgccaaaacaataactactatctctgcctcttctcagggcttccagggcagcgattgaggagaccttaccaaggagcaccacacagtagatgctgagacatcgtactccaggataagaaacagtaacatggcagcacctgcttgaaagaaattaaaaaccaacagactccatttagaaaggaacaatgtccaagaaagggcgaaataagggcgagaagcccgaggcactcattgttgcccttcaagctgccaatgaagacctcaggaccaagctcacagacattcagatagagctgcatcaagagaagtccaaggtgagcgagggctacctgaggtcgtggcattaagagcagc

SEQ ID NO: 10061 - DNA, 476 bp, Homo sapiens
  MAP TO NM_006994.1; EXPRESSED IN PLACENTA, SIGNAL = 1.4; EXPRESSED IN HBL100, SIGNAL = 2.1; EXPRESSED IN BONE MARROW, SIGNAL = 1.3; EXPRESSED IN LUNG, SIGNAL = 1.2; EXPRESSED IN BRAIN, SIGNAL = 1.5; EXPRESSED IN BT474, SIGNAL = 1.2; EXPRESSED IN ADULT LIVER, SIGNAL = 1.3; EXPRESSED IN HELA, SIGNAL = 1.1
tgcaattggatcctttcctcttagagagctcacagtttgtgtggccaattggtctgctggtgttctccaacatcaatgttctttcttccttaccctcatccttttcttcttccttcctatttcttgcttcctacttccctctttttttcctttactttctctcttcacagaagagatgcaataggcactgagacactgccttttggctgtgccctggtatctctccccaggactggactctgagcccgtcattgaaatgagagaccacgaggacgggggcatccagctggagtgcatatctggagggtggtacccaaagcccctcacagtgtggagggacccctacggtgaggtcgtgcctgccctgaaggaggtctccacccctgacgcagacagcctcttcatggtcaccacagctgtgatcatcagagacaagtctgtgaggaacgtgtcctgctctatcaatgacaccctgc

SEQ ID NO: 10062 - DNA, 486 bp, Homo sapiens
  MAP TO AC007064.22; EXPRESSED IN BT474, SIGNAL = 0.96; EXPRESSED IN BRAIN, SIGNAL = 1.1
gggtcaataaaataaattgctgctaacttttaattatattaaatttctatggattccagcagcatctttttataatctgctaatcaaataaattcatagaaactcaatcttataaaaaatttagtgcaactgtaatttgggattacatatttcaacttctcaatttctattatattagtacactttattgacctttgtgtgtctttcagcatcaagtaactcaacttacctctattcaaaggccattctcgtatagtgagactgatatacatctgcaaaattaattgtggaacagaaccgagaaaagcctgaatcactgacatgtacttgaaagccttctgctgcatgaaattatcccggattgagaatgcaatctccctttccagcatcgtgtttctctttgtgatgctaacttgagtctcttccttctcctgtttaagatttttcaaccatttgtggtaatttctaatggtgtgcaaacacctg

SEQ ID NO: 10063 - DNA, 451 bp, Homo sapiens
  MAP TO AC010140.1; EXPRESSED IN PLACENTA, SIGNAL = 0.94; EXPRESSED IN HBL100, SIGNAL = 1.4; EXPRESSED IN BRAIN, SIGNAL = 1.3; EXPRESSED IN BONE MARROW, SIGNAL = 1.7; EXPRESSED IN ADULT LIVER, SIGNAL = 1.6; EXPRESSED IN BT474, SIGNAL = 1.4; EXPRESSED IN HELA, SIGNAL = 1.5
acttgcaagatgcaatggtggtacaggcattgagtaggcattcccattccaaaatagagaaaatagccaatagaaaggggcaataggccccccagaagtctgaaacccagcagggcagactttaattcttaaagctccaaaataatccttgaatccatgtcccacatctagggtacactgatgcagggggtgggttcgaaaggccttgggcagctctacccatatggctttgcatgatgtagcccctgttgctactctcatgggttgaagttgagtgtctgtggcttttccaagctcagggtgcaagctgtcaatggatctaccactttggggtctagaaggctgcagctctgtttccacagctccactaggcagtgccataatggggactctctgtggggtgtccaaccccatacttcccttccacactgccccatcaaatgtattctga

SEQ ID NO: 10064 - DNA, 479 bp, Homo sapiens
  MAP TO AC010721.1; EXPRESSED IN PLACENTA, SIGNAL = 1.5; EXPRESSED IN BRAIN, SIGNAL = 1.9; EXPRESSED IN FETAL LIVER, SIGNAL = 4.9; EXPRESSED IN BONE MARROW, SIGNAL = 2.3; EXPRESSED IN ADULT LIVER, SIGNAL = 1.1; EXPRESSED IN HELA, SIGNAL = 1.1
ccagcattctgtgtgtttgtgtgtgtgtgtgtgactgtgtgtgtgtgcacacgtgcatgtaggggctcatttttgtgttcactcccttaaaaatgtgaagtcttacttcaagctatcaggcaatgagacttagggagaagaacattagctgaacagatgttatacttccaacaagcttgtcctgctgagatcaaacgagttatatatccctgcattaaaccctataagcctagttgaggagatgttaagataattctaaccctaaatattctccatctctttagggatgacaacctcacatttctcatttagaatagccacaggcacttccctcttgcagaaaatgaccttcactctaagtttgcaccaagtgtggataacactgacccagccagtataagcatgagaatcaagatcctcctgaggattctcgactgcctgccagcaagtcattatctctggattggtttgaatgcatt

SEQ ID NO: 10065 - DNA, 474 bp, Homo sapiens
  MAP TO AC011370.1; EXPRESSED IN HBL100, SIGNAL = 1.6; EXPRESSED IN BRAIN, SIGNAL = 1.4; EXPRESSED IN FETAL LIVER, SIGNAL = 2.3
tgcataaggcagataatcagacaccatgaaattcaaagggtatttcatgaaaacgtagttctaaaaatagtagcagtattcagtccttctgaaatgccaattttctcaagattgaattattataaaactgtcatttttgtatgtgcatgaaggtagaaaacaatggttatttattttactctctgaaaataacttgtatctcctgggcttctccgtacccatactcaataccgtgtacctagtactaagttccatttgctagtactaaccctacgcagaggcagtgactcagtcctcacctgatgggcttgctgtaagagctccattctctcctgaagaatctgacagtcatactctctgctcttcctcagcatttgccgccgtaacttttctactgccgtcctcagctcctcttgctgtttttcacttaataattcaccaaacttgataacagtttcttgctgtagagcattg

SEQ ID NO: 10066 - DNA, 459 bp, Homo sapiens
  MAP TO AL035685.13; EXPRESSED IN HBL100, SIGNAL = 1.1; EXPRESSED IN BONE MARROW, SIGNAL = 1.5; EXPRESSED IN BRAIN, SIGNAL = 1.2; EXPRESSED IN BT474, SIGNAL = 1.1; EXPRESSED IN HELA, SIGNAL = 2.5
cagatgaaaatgtggggacccttgttcaaaaactatggatttcatgacagtgacagcagagcctctaacaaagtgtggggcccttctgagaggggcgtctggtactactgcactggttgcacacccgtgacaaagcctgttgttagcttgcagctgggaggacgggtgtggcagtggccggggaggggacagcagtgatgatgatgctgtttgatttcccccaactccaccttcacctagtacagtgcctggcatgttgtaggtgcctaagaagttctagttcattctctcattcccctaacacagggcccaccatggcagatgaggcctgtccccaccagggtggaagctggatcactgggcccggcttggcacctggtaacgatccctctccagggggctgtgccctggatcctctctctcctccctcctccaccttcccccagaaagagtgatcct

SEQ ID NO: 10067 - DNA, 461 bp, Homo sapiens
  MAP TO AL031963.11; EXPRESSED IN BRAIN, SIGNAL = 1.2; EXPRESSED IN BONE MARROW, SIGNAL = 1.7; EXPRESSED IN BT474, SIGNAL = 1.3; EXPRESSED IN ADULT LIVER, SIGNAL =   2; EXPRESSED IN PLACENTA, SIGNAL = 1.6; EXPRESSED IN HBL100, SIGNAL = 1.2
cagaggaacctccaaagcagcatcccccaaacacatcctgtcgacactgtcctgcagctcgccccgcttcacccctcttcatatgcttgggaagtggcatcgcatccttttaccaagttgttgcccaataagaaacttcagagtcatcccagactcgcccttgcccctctctcccacattctatcagatctcaaaacctgtgaattcaagatatatgtatgactcaagatatatctgcaacccatctgcctttctctgtctccactggcctctgctcagttcaaaccctcctcgtttctgcagcaggctccttccaccgtccaccattcatgtggcagccaaaatggtcgtcctaaaaggcacatgcaaccctctccctcacatattggaaatccttcccagatgctctgtggtcttcaggatgaagttcgaattcctcagcgtggaataaaaggccttca

SEQ ID NO: 10068 - DNA, 461 bp, Homo sapiens
  MAP TO AL117338.4; EXPRESSED IN PLACENTA, SIGNAL = 1.2; EXPRESSED IN HELA, SIGNAL = 1.8; EXPRESSED IN HBL100, SIGNAL = 1.8; EXPRESSED IN BONE MARROW, SIGNAL = 2.4; EXPRESSED IN BRAIN, SIGNAL = 1.4; EXPRESSED IN ADULT LIVER, SIGNAL = 1.8; EXPRESSED IN BT474, SIGNAL = 1.5; EXPRESSED IN FETAL LIVER, SIGNAL =   1
gaaagcatgaatagtacacataaacagacaactaactcacggtgtagggtaagtactaatgtaaccacctgaggggttcttcctgcccactgcacaaaggaggaccatggcattgcagtaaagaaaggttgaatagacacgacatcaaccataccacataggagatggagttagtattcaagtcaatctcattcaaggctctttcaaaggcagtttgggggaagggctggggatggccaggtaatgggtgcttgatgctgattggctggggcagagatgagctcataggggtcaatgctgtcctgttaagctgagttgcttctgggtggggccacaggatgtgagggaggccttgggtccaggtggagccatgggtgtcagacatgcaaaaagcctgaaaagatacctcaaattccaacttgcaatagtggtgttgcatatcttcccattcctctccatca

SEQ ID NO: 10069 - DNA, 451 bp, Homo sapiens
  MAP TO AL109756.7; EXPRESSED IN BRAIN, SIGNAL = 1.1
ggtatgtgagcagaccctggtttcagatatgacggttccctgcagcgtctgcttgcccggtgctttctgtttaacacgtccatctgctagggagacgtcggctttcacatgagctgaggacagtgttcccaagccttctgaaagagtccagtcataaaaggataaaacccaagcaatgttctgatgtgtagtgcaatgggcgatgccagtttttgctaaaataggattaagttaaaaaacacacactgtaaagcatttgtcttgcttaaataatttaacaggtcttgcattcctgtttcagtcagtttcaacagaaacgcttctctgggggttgtcctcgtgaacatcatcagactaatcatgtggaagcgcgcctggtgccagttggatcaggagagagcgggtggatgccttgtggtcctggtgaggatgggaaaggaagcaacgtaaa

SEQ ID NO: 10070 - DNA, 362 bp, Homo sapiens
  MAP TO AL109801.5; EXPRESSED IN HBL100, SIGNAL = 4.9; EXPRESSED IN HELA, SIGNAL =   3; EXPRESSED IN BONE MARROW, SIGNAL = 2.4; EXPRESSED IN BT474, SIGNAL = 1.2; EXPRESSED IN FETAL LIVER, SIGNAL = 1.6; EXPRESSED IN ADULT LIVER, SIGNAL = 1.1; EXPRESSED IN PLACENTA, SIGNAL = 1.1; EXPRESSED IN BRAIN, SIGNAL = 1.5
ttttgcatttgctgtccttgttttataaagggaataatcttcctgcatgaaaaaatgatttataaaattcactggttgcctggggaatgtgaaaggagtataattatatctggagtatgagtcatttgcagagttttagatagttcaccttcttcttgcttaaaactagtagaatatgatatgcttcgggagatgttcagtgattctagaagtaacaatgatgatgatgaggatgaggatgatgaagatgaggatgaggatgaggatgaggatgaagatgaagacaaagaagaggaggaggaagattgttctgaagagtatctggaaaggcagctgcaggccgagtttattgaatctggcca

SEQ ID NO: 10071 - DNA, 444 bp, Homo sapiens
  MAP TO AL079307.2; EXPRESSED IN BONE MARROW, SIGNAL = 1.2; EXPRESSED IN BRAIN, SIGNAL = 1.3; EXPRESSED IN LUNG, SIGNAL = 0.92; EXPRESSED IN ADULT LIVER, SIGNAL =   1; EXPRESSED IN BT474, SIGNAL = 1.5; EXPRESSED IN HELA, SIGNAL = 1.2; EXPRESSED IN PLACENTA, SIGNAL = 2.1; EXPRESSED IN HBL100, SIGNAL = 8.4
cctcaaatctgttgcactggtttttattcatttttcagtcttctgaagtcaaattcctatctaaattattactactttccaatcactagattctgaatttgaagttatccttgttcttggcctgatgagtcacttaagctcaccagccgttccttctgtcttggttaatgaactgtgttccccaccacgtagagaagaagcagtaccgggaatcttacatcagtgacaacctggacctcgacatggaccagctggaaaaacggtcgcgggccagcgggagcagtgcgggcagcatgaaacacaagcgcctgtcccgtcattccaccgccagccacagcagttcccacacctcgggcattgaggcagacaccaagccccgggacacggggccagaagacagctactccagcagtgccatccaccgcaagctgaaaacctgcagct

SEQ ID NO: 10072 - DNA, 483 bp, Homo sapiens
  MAP TO AC011503.1; EXPRESSED IN HBL100, SIGNAL = 1.2; EXPRESSED IN PLACENTA, SIGNAL = 1.7; EXPRESSED IN BRAIN, SIGNAL = 1.2; EXPRESSED IN BONE MARROW, SIGNAL = 1.4; EXPRESSED IN BT474, SIGNAL =   2
gaattagggtctgtggtattttgcaaaaccatcttgtttttgtaggttgtataattttataggtaagatttttaaactatatttatgtcagtatagtaagtggagtaaattattttaatttttttttaggtatatgtcctcattttgctcaagacatttggccagagcagggcgtggaagattcttttcaaaaagtaatactaagaagatttgaaaaatgtggacatgagaatttacagttaagaaaaggttgtaaaagtgtggatgagtgtaaggtacacaaagaaggttataatggacttaaccagtgtttcacaactacccagggcaaagcttctcaatgtggtaaatatttgaaagtcttttataaatttataaatttaaacagatataagataagacatactagaaagaaacctttcaaatgtaaaaattgtgtcaaatcattttgcatgttttcacacaaaacccagcataaaagca

SEQ ID NO: 10073 - DNA, 463 bp, Homo sapiens
  MAP TO AL079299.8; EXPRESSED IN PLACENTA, SIGNAL = 1.1; EXPRESSED IN BONE MARROW, SIGNAL = 1.3; EXPRESSED IN LUNG, SIGNAL = 0.94; EXPRESSED IN BRAIN, SIGNAL = 1.1; EXPRESSED IN BT474, SIGNAL = 1.5; EXPRESSED IN FETAL LIVER, SIGNAL = 0.95; EXPRESSED IN HELA, SIGNAL =   1; EXPRESSED IN HBL100, SIGNAL = 2.2; EXPRESSED IN ADULT LIVER, SIGNAL = 1.3
tgttcaagtttggatcttggtgtaagatcaacaatagatctgtacctctgactccaatgcaggggctcgtgggatggctcacagtggaatcatcaaacggacttccttctcatagatgtcagggatcattcccactggggaactgaccatgtgcacagtgttcttgccaaacaattggaactcatagtggatgagctgctcccaaaagccgctgttgggtcggatgatgggccggcatgacttggtccacgtgtgggcgtccagcagggacatggcgtggtacttcatgaggtaggcgaggcacagggcagctgagcggctcacaccagcagcacagtgcagcaaagtacggccctgcttcatctccacgctgtggatatggtcagcaatagggtcaaagaagtcacagagacgtgagttaggggagtcagccacaggtacctgcatgtactggatatcctca

SEQ ID NO: 10074 - DNA, 456 bp, Homo sapiens
  MAP TO AL109624.1; EXPRESSED IN PLACENTA, SIGNAL = 1.1; EXPRESSED IN HELA, SIGNAL = 6.3; EXPRESSED IN HBL100, SIGNAL = 1.2; EXPRESSED IN BRAIN, SIGNAL = 1.1; EXPRESSED IN BT474, SIGNAL = 1.8
tcaaagcctacacatttgctgacaatttagtgcaaaggaccaagacatatgaacacctgagactgcaggagcaacagggcggcgcgtttttcactcacgtgtcagtttgctgttctcctctggaagggtctgatattcacatggctcaacaaaagaggtgcactagcagaggaaaactgggggaacctcttcccggaattccctacatgaactcccaaccaagggcatgtcagagagtcaaagagaggggctggagctgcagaacttgagcgacctgatgaggtagaggctgataatcgtgtcgaagtagctgtagtacacggcgttgttgacgtggccatactggtcattgtcctgccaccttgtctggatgggcaagaagtacccataggcctcgtggtgccaatggtaggcctcaactgtctggtcctttgatgatgtaaccaaggaatgggc

SEQ ID NO: 10075 - DNA, 450 bp, Homo sapiens
  MAP TO AB023048.1; EXPRESSED IN HBL100, SIGNAL = 1.5; EXPRESSED IN HELA, SIGNAL =   2; EXPRESSED IN BRAIN, SIGNAL = 1.4; EXPRESSED IN BT474, SIGNAL = 1.3; EXPRESSED IN FETAL LIVER, SIGNAL = 1.2; EXPRESSED IN ADULT LIVER, SIGNAL = 1.3; EXPRESSED IN PLACENTA, SIGNAL = 0.96; EXPRESSED IN BONE MARROW, SIGNAL = 1.4
ttcaagcagttcttttcgagtgtagtacatctcctcatgggtcacactctcaacctcgcctctaggggccctccaggaaatgatacctaacagtgtacaggcttgacttgagacagggcagagatgatagaaacaggtgaagagctagtggttgccattggaattaaaatgtgtgtgatcagagaagacatgggggttagtacctgacacaactgttttggtgatggtctgagtagaaatgtcagtgaccttgttgggcacgaaagtggcagagacagtggtggaggttgcagtggccccagaggctgtggtagaggccaagaagggcgatgaggccaaagcgaaggctgtggaggtcacagatactgctgtggatggcatggtggcctcagagcctgtggtggaagccatgctgcttccagaccctgaagtgacctcagaggctgtgct

SEQ ID NO: 10076 - DNA, 471 bp, Homo sapiens
  MAP TO AC006364.3; EXPRESSED IN BT474, SIGNAL = 1.6; EXPRESSED IN BRAIN, SIGNAL = 1.1; EXPRESSED IN BONE MARROW, SIGNAL = 0.91
gggattccactgcaagagtcaactttactagcgctgcacagggatgggcacctctctggttgcaatgccattgtatattgctgaggcatcttgcccaaggctggatggagtggttacttgcaagtgtggacatcagtcatgctttcacacctcctgcaacggacatagcagcaccagatgaacttacactcacacctctccacgtgcctgaccacatgggtgttgtaacctcggccacagcagaggaggttgcagccatctgcaccctctgatgtacggttgcattctctgccttgtgtccctgggattcccagtttcttatcttctacacagtagttgggagacttattaacatagagcagatcatccttatggattggtattttcctctgatctttttctctcctgcgcattttcctctttgttttgtctgatatctggatactgttttcatatttatccttcaacaaa

SEQ ID NO: 10077 - DNA, 481 bp, Homo sapiens
  MAP TO AC011494.1; EXPRESSED IN FETAL LIVER, SIGNAL = 1.2; EXPRESSED IN ADULT LIVER, SIGNAL = 2.2; EXPRESSED IN HELA, SIGNAL = 1.4; EXPRESSED IN BONE MARROW, SIGNAL = 1.4; EXPRESSED IN LUNG, SIGNAL = 1.1; EXPRESSED IN BRAIN, SIGNAL = 1.3; EXPRESSED IN BT474, SIGNAL = 0.96; EXPRESSED IN PLACENTA, SIGNAL =   2; EXPRESSED IN HBL100, SIGNAL = 0.97
attcccccactttgagaacctcactcattagtgggagttctcactttcatcctcactacccatgtcttcttgcaagacagattgatagtgattcatatagtacacttgtgctgaagcattttgatgcactaaagtagtaacaaaacttttcattacttgaaggagcaaaggcagcacacagggaagcaacatgcaggtttctattactattataattcctattatagtagttttaaatcctcctagtgctggaaaccattttccaaacatggacctaggattaaacccatgccacacctgcatgggaacatgtgccagctttgttattttaattatatcttcaactatttgcccttggtcatctatgtgcagacagcaattggtcatgttaaactttccacagatccctccttcagctgctagcaagtagtctagggctagtctacttttatagatagcatttctcatctggatttcttgc

SEQ ID NO: 10078 - DNA, 496 bp, Homo sapiens
  MAP TO AL034348.5; EXPRESSED IN BONE MARROW, SIGNAL = 1.6; EXPRESSED IN LUNG, SIGNAL = 5.6; EXPRESSED IN ADULT LIVER, SIGNAL = 9.6; EXPRESSED IN BT474, SIGNAL =  31; EXPRESSED IN FETAL LIVER, SIGNAL = 8.1; EXPRESSED IN PLACENTA, SIGNAL =  53; EXPRESSED IN HBL100, SIGNAL =  22; EXPRESSED IN HELA, SIGNAL =  19; EXPRESSED IN BRAIN, SIGNAL = 1.2
cgatttttgtttggacctctgaactttttattgggttatccaaaggacaccttgcttctgctgcctcaaaacctcagaactttagtgtcattggtgggagatgctactttgccgtccactatcctgcaagtggtggtctttcagatggcttgcatgggattgctgctatccagggcatcaccgggattgaagtccctcccatcttccagcaggcagcagtaaggtggccagcttagccgacactttgaccttgatgttcagcaggccctcctcatatacctaggcctggcgccacccctctgccagagtctgtgccagctctgactccaggtgcagcagaaccccattgagcttctccatctgcatggcattgtgggcctccacctcccttgggctgttctccaagctggccttaagatttctcatggagtccaggttgatctccaaggactgaactctacctctcagctccgtgagcatcaccttgcatttctga

SEQ ID NO: 10079 - DNA, 475 bp, Homo sapiens
  MAP TO AC006466.3; EXPRESSED IN BRAIN, SIGNAL = 1.3
cacagagtgaagtgctatatgcgcttgctaatattattataagatgtggaaactgagaccccaggagggagtgggacctgtccaaagccacacattgagttggtgactgagaagagcccttatggtgtctctcaaggtgaatgtcagggcccctgctggccctgacatctcttgtcaccctcctctctgcttctgctccccactccccccaagacactgcccctggggctttggtaggagagcttacagatgggcctcctacccgctcccaccatccatcctgtgttctcctacaggcccctgccatgcattctgactgcatcttcaagaaggagcaagccatgtgcctggagaagatccagagggccaatgagctgatgggcttcaatgattcctctccaggtgagcggggcggcagggagcatgccacgtccccagtgccagcttttagaactgttttcctgtgctcaggctc

SEQ ID NO: 10080 - DNA, 483 bp, Homo sapiens; identical to SEQ ID NO: 28
  MAP TO AC004019.11; EXPRESSED IN ADULT LIVER, SIGNAL = 0.94; EXPRESSED IN BT474, SIGNAL = 1.1; EXPRESSED IN HBL100, SIGNAL = 1.2; EXPRESSED IN BONE MARROW, SIGNAL =   1; EXPRESSED IN BRAIN, SIGNAL = 1.6

SEQ ID NO: 10081 - DNA, 455 bp, Homo sapiens
  MAP TO AC009532.2; EXPRESSED IN FETAL LIVER, SIGNAL = 0.87; EXPRESSED IN ADULT LIVER, SIGNAL = 0.92; EXPRESSED IN HBL100, SIGNAL = 1.2; EXPRESSED IN PLACENTA, SIGNAL = 0.97; EXPRESSED IN BRAIN, SIGNAL = 1.1; EXPRESSED IN BONE MARROW, SIGNAL = 1.2
  unsure 197
  unsure 399
agtcaggagaccctgcaccacattttttccctgtcagttttgtcacactttcacataaacaggaaggatgactgaggagtgaggggaaatggtactggcgtgagctgccttaggattcagtggagcttcccagctttttcctgttttgtggaaccataggaagcacataattattggaggtgctgctcaagtccccntcccctaggaactcaggaaaggatgcactgcatctgccctttccagactcaactgttcctttttgccccccagattccaagaaggtctaaagaagaccaaagaacttcaagacctgaaggaggaggaggaagaacagaagagtgagagtcctgaggaacctgaagaggtagaagaaactgaggaagaggaaaagggcccaangaagcaggtgggaagcctgtgtttggagtccttgccgttgctgaaatgggggttac

SEQ ID NO: 10082 - DNA, 457 bp, Homo sapiens
  MAP TO AC009664.3; EXPRESSED IN BONE MARROW, SIGNAL =   1; EXPRESSED IN BRAIN, SIGNAL = 1.2; EXPRESSED IN BT474, SIGNAL = 1.2; EXPRESSED IN HELA, SIGNAL =   1
tgtccttcccttttacttctcagacttaaggtttttttccattttccaaatcaagggttcagtgaagatttttcgacagtgacagtattttcatcccattccctctcatatgctccaaatttctctataatagctgtgcatattacagttctgaatacaggcatgagatatacagtgaccaaagtatctcagagtcattgataatttagcattttaacatacaatagattttaaataatattttttaggggtttactagctttataaactctaaacatacccacttttttttctcacttttcaggttctccatgtcaacaaggcaaaataataataataagaagaagaagaagaagaagaagaaggaggaggaggaggaggagaaggaggaggagaaggaggaggaagagcgggggaaggttggacctgtaggcaagatattggatttactgttttt

SEQ ID NO: 10083 - DNA, 471 bp, Homo sapiens
  MAP TO AC010099.2; EXPRESSED IN BT474, SIGNAL = 0.95; EXPRESSED IN FETAL LIVER, SIGNAL = 1.6; EXPRESSED IN HBL100, SIGNAL = 1.1; EXPRESSED IN BRAIN, SIGNAL = 0.97; EXPRESSED IN BONE MARROW, SIGNAL = 0.92
ttacatactcttctacctgaacacttgagtgtttttagttaaaaggccaaagaactacagttattatttagtcttctctttctttaactcatatatccaactcactttcaagtctcatagatccagcaaaatgcatatcaaatctttaaattttgttcttctctactgttacttttttttcttttctaccatgaaaaaatgtggaaaaatgctttgataactttaaggccatacataacacactaattattaccaccactgcttctacctctagcactgccattgccacaaacaccatcagtatcaccatcacaaccattactaccaccgtcaccataaccaccaccaccatcagcacctgtaccataactaccatctccaccatcatcagcaccattatcatcagtatgccaccaccaccactgccattgccaatgcctgagtggaagaggagtagagcagcgaggtgct

SEQ ID NO: 10084 - DNA, 1379 bp, Homo sapiens
  MAP TO AL035462.12; EXPRESSED IN ADULT LIVER, SIGNAL = 0.95; EXPRESSED IN BT474, SIGNAL = 0.96; EXPRESSED IN FETAL LIVER, SIGNAL = 1.3; EXPRESSED IN HBL100, SIGNAL = 9.2; EXPRESSED IN BONE MARROW, SIGNAL = 1.2; EXPRESSED IN BRAIN, SIGNAL = 1.3
ctggccctaaccatgacatctatgagctgcctgaccttgagcaactcacttcatctctctgagcctcagttttctcatctggagaatgtgtgtccctttagctgccatatgtattaaactagtaatgggacaggcagtgtgctgagtatattgaattttcacaagagtccagcaagacaaggttaagttgtattattaccatcccatcttatagatgaggaaactgaggcttcaatagggaaagcaacttgtccaaggttacatatttgaggcagcaaagctggaactctatttcaagtttttcttactctaaccccatctgtttagaccctgggctctacggccttcccatacacatagccatgcatgtgcaggaggctgttgcaaatgcaccataaatttgcattgttcaggagacaagactcatcacaggtcttaaacggagcaagatgggaagctcagaatgagatttgaagaagggctgtggcaaagatggtgtgcaacaggcaaaatggagtggagtggtgtaggaagggtgctccaggagggaggggctgtgggagcaaaagcatggaggtagaatgaagctggcatgtccaagtttagaggcccagctgggagcaggaagagtcaaggtcaacgagagtctgggtgagcttggatgtctggctggagcacgaaggagctataatgcattcttgggcagggcaagtgggatggtgtggtgggtagtggccatcaagttgtgtaagggaggtgatgggggagcaaccgagtattcagtatgcatgatgatgtctctgttcgggacataaggtcttgtgcttgtggtatcagttgtgacatgctggaaacaacactggacccatcgagagggaacaagttctggccctaaccatgacatctatgagctgcctcttaacatcatcttcacctacctttattaaacacctactgtgtgctaagccctgatctaagcactctacgtgtattatttcacacaatgtctcaacagctctttgaggcaggtcctactattatccccattttatagatgggaaactgaatttcagagaggggagaacctgaccacatttactaagctaggaagtggccaagttatgacttgaaccttagtctgactccatagcccatcctcttaaccacctgggaggtcctctgagacttttgcggaaaaaagaggctgagactgggcaggggaagagtaggctgggtgggctgcagcccccacctcccccagggctggcacccaccctcgttctccagcttcctcttctccagctccgcctcaatctggtccagcaccatggccagttccccgaggatcttcttcaggtagctcacatcatcatgctcca

SEQ ID NO: 10085 - DNA, 390 bp, Homo sapiens
  MAP TO AC011309.1; EXPRESSED IN BRAIN, SIGNAL = 1.2; EXPRESSED IN BONE MARROW, SIGNAL = 2.1; EXPRESSED IN FETAL LIVER, SIGNAL = 1.2; EXPRESSED IN BT474, SIGNAL = 0.96; EXPRESSED IN ADULT LIVER, SIGNAL = 1.3; EXPRESSED IN HELA, SIGNAL = 1.4; EXPRESSED IN PLACENTA, SIGNAL = 1.3; EXPRESSED IN HBL100, SIGNAL = 1.2
gaccctttaacaatgtggcggttaggggtgccaaccccgcaatgcagtaaaaaatctacgtgtaatttttgactccccaaaaacttaattactaatagcctactgttaactggaaaccttaacgatagtacaaacagttgattagcatatattttgtatgtaatgtgtattatatgctgcattcttacagtaaagtaagctagtgaaaagaaaatgttaagaaaaccgtaagacagagaaaatatatttactattcattaagtggaattggatgatcataaaggtcttcatcctcaacatcttcacgttgagtaggctgaggaggatgaggaagaagaggggttggtcctactgtcctataggtggcagaggtggaagaaagtccatgga

SEQ ID NO: 10086 - DNA, 499 bp, Homo sapiens
  MAP TO AC011364.1; EXPRESSED IN PLACENTA, SIGNAL = 2.9; EXPRESSED IN HBL100, SIGNAL = 0.97; EXPRESSED IN BRAIN, SIGNAL = 1.1; EXPRESSED IN BT474, SIGNAL = 1.1
gccaaggacgtaataggcactgttctaagcacttagttgtatctcaatttcatcctcacaacaatccgctcaggtgggcacaattataggtctgttttacagataaggaaaccaaggcacagaaggatcctgtacgttctcaaagtcacacagctgattggggtagagctggcattcaatcaggcccacctccctgtgtgatgtgggacatggctgttcctgctcagagcttctgtttcatcctgtgctgagtggaccctaaggcccctttgagccttcacacctcacaagttcatgtctgtccccaggtccctcaggaggtcactcacatgcatcaaggagagcctgcgtatcttcattgacctgggggagacagacaaggctgctgaggcctggcttggggcggggcgactccactacctcatgcaggaagacgagctggtggagctgtgcctgcaggtaggcctcctgcagagctctctgggagttgttgacttgg

SEQ ID NO: 10087 - DNA, 480 bp, Homo sapiens
  MAP TO AL035587.5; EXPRESSED IN PLACENTA, SIGNAL =   2; EXPRESSED IN HELA, SIGNAL = 2.2; EXPRESSED IN BRAIN, SIGNAL = 1.1; EXPRESSED IN BONE MARROW, SIGNAL = 1.3; EXPRESSED IN LUNG, SIGNAL = 1.5; EXPRESSED IN ADULT LIVER, SIGNAL = 1.6; EXPRESSED IN BT474, SIGNAL = 2.9; EXPRESSED IN FETAL LIVER, SIGNAL = 1.1; EXPRESSED IN HBL100, SIGNAL =   3
cgcctttcacatctttcaggtctcaggttgaagttcctgctttagagagggtgtcctcaacccctctccctagtgagcactttaccctcatagcacttattttcaagcctatctgtctaaggtcttccaaatattgcagactaaattgtgctcaaccctgacatcctagcacaatttgcctgagtggcttggggcatattatctccctagaaaggggtctaaagcttaagcaacactttgccccagcctcatgcaattagaaagacaccagttccttacctttcgatgcgtacaacaaaggccaaggaatgtttatctggcaattccaaggcatgaggtttcacttctagtcgtctgagacgcaccttgtcacgtttctgccgccaggaatcatgtaggaatgattccagtcgcttaaacctgagcccttttcctttcttctgctacagagaagacagaccatcatcatcatcttgtgcc

SEQ ID NO: 10088 - DNA, 463 bp, Homo sapiens
  MAP TO AL035553.10; EXPRESSED IN BT474, SIGNAL = 1.1; EXPRESSED IN HELA, SIGNAL = 1.1; EXPRESSED IN HBL100, SIGNAL = 1.3; EXPRESSED IN BRAIN, SIGNAL = 1.5; EXPRESSED IN PLACENTA, SIGNAL = 1.7; EXPRESSED IN BONE MARROW, SIGNAL = 2.1; EXPRESSED IN ADULT LIVER, SIGNAL = 1.8; EXPRESSED IN FETAL LIVER, SIGNAL = 0.99
aaagaatgagagctcttttggtgatggaaacttgaggaaattaaaatgaccagtttggaaaaagaaaacattagtgaatatcccaaatcatgcacattaacgttttatcaaaaggtgtatgctatgctctgaatctttttgtccccctccaaaattcataggttgaaatcctaaccccccaaggttatggcattataaggagatggggcctttggaaggtgattaggtcacaagggtgaagccctcataaatgggattagtgtccttataaaagaggcccaggagaaaccccttcccccttccacagagctggaaggtgccatctgtgaaccagaaatcaagacctcaccagaccctgaatgtgcggatgccttgattttggacttcctagcctccagagctgagaaatgaaattctgtagtttatagcctaccaagcttatggtattttgttagggcagccc

SEQ ID NO: 10089 - DNA, 456 bp, Homo sapiens
  MAP TO AL121760.1; EXPRESSED IN BONE MARROW, SIGNAL =   1; EXPRESSED IN BT474, SIGNAL = 1.1; EXPRESSED IN HELA, SIGNAL = 1.3; EXPRESSED IN PLACENTA, SIGNAL = 0.99; EXPRESSED IN BRAIN, SIGNAL =   1
gaagacagccagacgaggagagaggcaatcgtgggcagtgcaggagaacaggaaacacagggggctttgcaagcacagaatagggactcagtaaatattcgtggttgaatggaaagctcttaggataatggctctcaggtagctctccaatgtgccagcctattgtgttagttagggcaggataactgctgttacagacaacccccaaatctcagtgactcataatctgtttacttgtcactcaggtcacagtccagtgtaggtcaactcctcatggtcactcagagacccaggtccttccatccaggggaggggatcttgatttcttttttgatcttctgcatcccccggcagaggagaggaaaagacagggtgtggaggagcatgggggaggttttatgggcaggcctggaagggattcatggccaattcacctggtcttgtgtgggggtgtag

SEQ ID NO: 10090 - DNA, 425 bp, Homo sapiens
  MAP TO AL096678.8; EXPRESSED IN PLACENTA, SIGNAL = 0.97; EXPRESSED IN HELA, SIGNAL = 0.89; EXPRESSED IN HBL100, SIGNAL = 1.2; EXPRESSED IN BONE MARROW, SIGNAL = 1.3; EXPRESSED IN BRAIN, SIGNAL = 1.1; EXPRESSED IN ADULT LIVER, SIGNAL = 0.98; EXPRESSED IN BT474, SIGNAL = 1.1
caggacaactctcaaaggggaaaatacagtctctaaaacagactcctgggaagtcataaggcaacttatgcaatatcatgcttgtgatgatctgagcacccaaaagggaataaaaggagtaatacaataagcaaacccagcacgtcagggaaggagcccatgctccatactcttgcctcccatacctcttccttgacgtaattgagcttgtactccctcttcaccgcagggtcaaagcgtgcctggggaagccatgtctgaatctggagcaagccgaggctcacccagaggctcccacgctgggctggctcaggcaggctcctcttactctccccttcaccaacaaagtggtgcagggaggtgagcaactggcagagcagttccttgggcagcacctcctgaccagccatgtccccaagtgtctg

SEQ ID NO: 10091 - DNA, 486 bp, Homo sapiens
  MAP TO AF170802.1; EXPRESSED IN FETAL LIVER, SIGNAL = 1.2; EXPRESSED IN BT474, SIGNAL = 0.97; EXPRESSED IN HBL100, SIGNAL = 0.92; EXPRESSED IN BRAIN, SIGNAL = 1.1; EXPRESSED IN BONE MARROW, SIGNAL = 0.97
ttgtgaggaagagtacatgacgtattacatgtaaaagagctggcacatagtaaagcttccaaagtgttcgtttatttcgtgatttatagacaaacgtatggccgaatgatgtgaaaagccactgtgtttatttcatacattcacactaaggccactgatcctaccaggatgccctcccaaatccgaaaccaattcaatttacctgctaggtaagacatttcatacatgaatcagaatgacttactaaagcctaaacaaaacaccccagctgtcagcagtcccgtacctcgcccccctccctagcagccttaccttccgggccccatgcaggtcagcagagctcctgatgttgttgaagtccaggaccagagctcccaggggagagcagagccagctcagccccagcaggacggccgccaccatccttcaatcccggggctcctggagggtcccagcactgtgcgtcaccaaagcgaggctgctctc

SEQ ID NO: 10092 - DNA, 459 bp, Homo sapiens
  MAP TO AL109801.5; EXPRESSED IN BONE MARROW, SIGNAL = 1.7; EXPRESSED IN FETAL LIVER, SIGNAL = 0.96; EXPRESSED IN BRAIN, SIGNAL = 0.91
gaccccaccattttcttgtgggtggtagggggttgggagtgagtgactgctctgattcccaccacggcagacttcatggagctgaggctggagatatttgatgggctcagcactggggcagaggcacgcctaacttatagtactttctagataaaattgaaatgatggcaccagcagcccccctcaaccatgtatgatatatcttccactgctacttccaccccatcagccctttgtcctaggccaatccttctaaggtcccaccaggtctcggtgaaggaactgctttgactccaggtattccatggcttcacagacatccttgcacatctctagcagctgctgagtctggaagcggtggcgcatctccctcaggtagttcaggaggcagccattggccatgtactcagtgatgatgaagatggggcgctgcttggtgcagacgccatacaactgcac

SEQ ID NO: 10093 - DNA, 462 bp, Homo sapiens
  MAP TO AC009944.2; EXPRESSED IN FETAL LIVER, SIGNAL = 1.6; EXPRESSED IN ADULT LIVER, SIGNAL = 1.2; EXPRESSED IN PLACENTA, SIGNAL = 6.6; EXPRESSED IN HELA, SIGNAL = 1.8; EXPRESSED IN BONE MARROW, SIGNAL = 1.4; EXPRESSED IN BRAIN, SIGNAL = 1.2; EXPRESSED IN BT474, SIGNAL = 4.3; EXPRESSED IN HBL100, SIGNAL = 3.8; EXPRESSED IN LUNG, SIGNAL = 2.5
  unsure 106
  unsure 379
tgtctccaatgttgaggtggtcgagcctcctagccttgattggcagttgaaaaaaatatatttatttcaatttgtggtaaaagtttattgagagccaagtttgccntgcaagtgaagaaaatgcagcaacgaagaacagggaacacggggcacataataatattctaagactttgtgccattaagttaaaaatatctgttcataagaaaattgggttccttttccacctcccacccccaaattggaattttcaggctttaaaatttaagtaattccacctggtctgaggatatgatctcttgccattttttcttcaactgttacttgtgagggtttagtttggagatgatgacttaataggtttctctttggagtgaangttttcccattgtaggcactaggaagaaccaaggcaaaagctgcagttagcgtctcatgtgtcccatttgataactctctcgg

SEQ ID NO: 10094 - DNA, 467 bp, Homo sapiens
  MAP TO AC006020.2; EXPRESSED IN FETAL LIVER, SIGNAL = 1.6; EXPRESSED IN BRAIN, SIGNAL = 1.6
tttgctattagagcccagccttgctcagtattctgatgtgctgtccactactcatgctgcttcagagacgctggaatttggtagtgaatctggtgttctttataaaacgcttatgttttctcaagttgaaccacccagcagtgatgccatgatgcatgcacgttcttcagggcctgaaccttcttatgccttgtctgataatgagggctcccaacacatcttcactgtttcttacagttctgcaatacctgtgcatgattctgtgggtgtaacttatcagggttccttatttagcggccctagccatataccaatacctaagtcttcgttaataaccccaactgcatcattactgcagcctactcatgccctctctggtgatggggaatggtctggagcctcttctgatagtgaatttcttttacctgacacagatgggctgacagcccttaacatttcttcacctg

SEQ ID NO: 10095 - DNA, 451 bp, Homo sapiens
  MAP TO AC008132.19; EXPRESSED IN PLACENTA, SIGNAL = 1.1; EXPRESSED IN BONE MARROW, SIGNAL = 1.3; EXPRESSED IN BRAIN, SIGNAL = 1.5; EXPRESSED IN BT474, SIGNAL = 1.4; EXPRESSED IN FETAL LIVER, SIGNAL = 2.6; EXPRESSED IN HBL100, SIGNAL = 1.5; EXPRESSED IN LUNG, SIGNAL = 0.92; EXPRESSED IN ADULT LIVER, SIGNAL = 1.4
caaccaaacaacaaaacagtggagtttatccaaagaaacagagactcttagaactgagaaaaggggccctgtttggctctagagacccacaccctgctctcggagtcaccgtccccttcccaaaggctactgagagagtccaagcgaagcttacatgtggggaaactgagtctcagaggggtgaaggtattgctcaggtccacttgcccagttttcagggcccatgtcccatgccctgccccgctcacctcccaatctccaagcactgcttggcatccgcggccacggcagccctggtgtacacatggttgtcaggttccttggaggccgagggcagccagagacagaggccgacaatgaccagcaccaggaccacggccagcaggcccagcaccactaacttcttcttcatggctctgctgcacccacggggtaaggagcagggtcaggc

SEQ ID NO: 10096 - DNA, 463 bp, Homo sapiens
  MAP TO AL049697.8; EXPRESSED IN ADULT LIVER, SIGNAL = 1.1; EXPRESSED IN FETAL LIVER, SIGNAL = 5.9; EXPRESSED IN PLACENTA, SIGNAL = 1.1; EXPRESSED IN HELA, SIGNAL = 4.2; EXPRESSED IN HBL100, SIGNAL = 1.1; EXPRESSED IN BONE MARROW, SIGNAL =   1; EXPRESSED IN BRAIN, SIGNAL = 0.94
gcacaatttgttattccaggcagtagaatcttgaaaaagctaccatgcactccatgtccacttgatttgaggaccatcccagtggaaaggtaacaacctgggcctctagcctaccgtgcacacaagtgtaacagttacttttgtttaaagtgtgaatggaatatttaatacattttaaccaggcatttacatctttataccctgtcaatagctatggtttgccttaggtctcctatttctactactgagaccttgcttttgtcatttggcatgaggcgaggcatagttttatttcgtaggtttgtgaaaggggcagttgtaggaggtagagcagggagaacaaagcgcatcttaaagaagcctatagggtcctttccagtgacttctgctcctaaaccatagaaacgctctaaagtggggttagagttgctagtggtaggaacagtaatggatataggcactg

SEQ ID NO: 10097 - DNA, 478 bp, Homo sapiens
  MAP TO AL121796.1; EXPRESSED IN HELA, SIGNAL = 1.3; EXPRESSED IN PLACENTA, SIGNAL = 1.7; EXPRESSED IN HBL100, SIGNAL = 1.7; EXPRESSED IN LUNG, SIGNAL = 0.88; EXPRESSED IN BRAIN, SIGNAL = 1.1; EXPRESSED IN BONE MARROW, SIGNAL = 1.7; EXPRESSED IN BT474, SIGNAL = 1.4; EXPRESSED IN FETAL LIVER, SIGNAL = 5.5; EXPRESSED IN ADULT LIVER, SIGNAL = 1.4
atgtggagggatcagtggagtgtaagcccagccattgaaggaatgtttaggtgaggcactgcagaagtcagctggacacaatcaggagtgtaagtgttaaagaaagaggaaagaaacacaaaacgcagccttggggctgacatatctctggccggagggaggttatctcggggctggcatgcctctggtgagggaggggtttggaatgtttctggtctgagatgttatttgtggtttttggtcatgctgaccttagccattaggtgatgccctttggatttaggcggtttttgtcagggtgaacttaaaatggcagtgcttgtccaagatggcaatactcctgctgctggttggccactcggaattgtcttcgtggagagagaagactttatggttatgggccacaatatctagggtgtggccatgggagaggagggctggggtagttttgaggtcaagaccatgaaaggagagcagg

SEQ ID NO: 10098 - DNA, 978 bp, Homo sapiens
  MAP TO AC008015.4; EXPRESSED IN BONE MARROW, SIGNAL = 1.3; EXPRESSED IN FETAL LIVER, SIGNAL = 0.93; EXPRESSED IN HBL100, SIGNAL = 3.3; EXPRESSED IN HELA, SIGNAL = 1.4; EXPRESSED IN LUNG, SIGNAL = 1.8; EXPRESSED IN BRAIN, SIGNAL = 1.1; EXPRESSED IN ADULT LIVER, SIGNAL = 1.4; EXPRESSED IN BT474, SIGNAL = 2.6; EXPRESSED IN PLACENTA, SIGNAL = 1.8
gagaaggatctagtcccccgaatttgttttgggtcctgtcccagttgtcttctggttagtaggtttttgtgcttaagaatatgttgacttcaggcatttaacaagggacaaaacatctatttttagtgacttaaggaagtggtaggaacagaatctaagtgtagccagatgaaaggtgacttattttgtttagacaggcagaactgtggactaccatgatctgtttcatcaaattattccaaaacaacagatcctttttcaggctttctttttctttttcttttctttctttctttttttcctaaacttccttttggcagatgtggcctcatggatgagctggtacacgacttagcctcagccttggagcagacatctgagcagaataagcttggtgaactgtgggaggagatggcgctgagcccccgacagcagaggcggcagcttcggaaacgccgaggtcggaagcgtcgttctgacttcactcacctggcagagcatacctgctgctacagcgaggcctctgagtcaagtctggatgaggccactaaggactgtcgagaagtggctccggtgaccaattttagtgactctgatgacacaatggtagccaaacgacacccagctctcaatgccattgtcaagagtaagcaacattcttggcatgaatctgactcctttactgaaaatgcaccttgtcgaccactcaggcgcaggcggaaggtgaagcgagtgacatcagaggtggctgctagccttcagcagaagctgaaggtgtcagattggagctatgagagaggctgcaggttcaagtctgctaagaagcagcgtctgtcccgctggaaggagaatactccctggacctcatcaggccacggattgtgtgaatcagcagaaaataggactttcctaagcaaaacaggaaggaaagaaaggatggagtgtgaaacagatgaacaaaaacagggctctgatgag

SEQ ID NO: 10099 - DNA, 965 bp, Homo sapiens
  MAP TO AC009401.1; EXPRESSED IN PLACENTA, SIGNAL = 7.4; EXPRESSED IN HBL100, SIGNAL = 1.3; EXPRESSED IN BRAIN, SIGNAL = 1.1; EXPRESSED IN BONE MARROW, SIGNAL =   1; EXPRESSED IN BT474, SIGNAL =   1; EXPRESSED IN ADULT LIVER, SIGNAL = 1.2; EXPRESSED IN FETAL LIVER, SIGNAL = 0.93; EXPRESSED IN HELA, SIGNAL =   1
cagacagcaagaagctgcacctaggtgacccctcctagttattccccctagatgtcccatgctcccctggagcctcctcagtctcccaattctaaggggaggcccaccagttctctagtgcaggattccaccacaaggtcatcaggcacctctcccccttatccaactagccccagcctatacctctcactgcccaaggaagtaagccctaccagtaccaacaggagggtacccctatatcagcccctaaaatcaaacctgtgtccattgtgggaggtagctgatagagatgggagggacagtcaatcacagtacatgtgtctttttctatgtgtgatttggctttatgcaaggagaaatttggccagtttttggaggatccagggaagttcattgaggagtttgttgagttgactatgtcttctgacttaatttcacatgatttgcaaaaattattgtgcacctgctataccacagataagaaacagatggatctgagtactgtccaaaaatatgcagatggagtggccacacataacctagaccatgctagttatcatgtggaaggagatacagttccagatatggaccctcagtggaattaccagagggcttcccaagatctcaaatgcaaaaatcacatggtaacttgcttaataaaagatatgaaaaagcatgtagttaagccagttaatcatgacaagattaaagaagtaactcagagaaaggctaaaattcctgctatatttcaaggccatttggttgaggcattcaggaaatatacagaaacagactcccaagaatggcaaactctcctgtgtatgcattttatactcaatctgcctctgacattaggaagaagacataaaaggcagaattgggacctcaaattcctatgagccaactcttaaacatgggcattataatttacaataagaacagagcagaggaagaggagaaaatca

SEQ ID NO: 10100 - DNA, 485 bp, Homo sapiens
  MAP TO AC007666.12; EXPRESSED IN ADULT LIVER, SIGNAL = 1.1; EXPRESSED IN HELA, SIGNAL = 7.7; EXPRESSED IN PLACENTA, SIGNAL =   1; EXPRESSED IN LUNG, SIGNAL = 2.9; EXPRESSED IN BRAIN, SIGNAL = 0.97
gattacccaggttgcatcttctatttattagaattgtcttttgtgacctatagttctgtttctatagtttctataaactatagtttctataaacaatttctgtaaactatacctagaagtcaatcctcctgtcttcctatagagtataccaagatgtctgataatttagagaggtgtttccatcgggcaatgatgaaacattttcctggagaagatggagacacagatgaagaattttggattcgagaggatgaaaagcgggagaaaagacggagtcgggctgggcgaagtggtgggagccatgtttggacccgctccagggacccagaagggtccagcaggaaacagcagcccatggagaatggaggaaagtcgttgccccccacacgccgagcgccctcttctggggacgatcagagcagcagctccacacagcccccgcgggaggtgggcacttccaatggccgaggtttttctcatcccct

SEQ ID NO: 10101 - DNA, 411 bp, Homo sapiens
  MAP TO AC009185.2; EXPRESSED IN BT474, SIGNAL = 1.4; EXPRESSED IN HBL100, SIGNAL = 1.4; EXPRESSED IN BONE MARROW, SIGNAL = 0.98; EXPRESSED IN BRAIN, SIGNAL = 1.4
ggcaacataaaatgctgctgctccagagatgggggaactgagggtttgattccatcttgagatataaaactctacaaagatcaagttcttccaaggcccagctctatgccctgttcctcaaaccacactgaaacaggccaagcctcactatgtttgggggatggctagtttggtatcaaagaaaaagcaggtgagaggggctccattctcttcctccacttgacaggcagccctggaggaggggcctggatggggaaaggggagagggggaggttgccctgacctcttgtaggcagagtggtcattcttgacgctgcacttcatgttctttagctcatccaggacagcaaacatgttgatgaacttgccaagggtcaggaggtaggcctcagagacaaagtccttcctgcg

SEQ ID NO: 10102 - DNA, 442 bp, Homo sapiens
  MAP TO AC009892.1; EXPRESSED IN FETAL LIVER, SIGNAL = 0.89; EXPRESSED IN PLACENTA, SIGNAL = 1.1; EXPRESSED IN BRAIN, SIGNAL =   1
ggtccatttaagggaagctgagataaatataattgtttaactttttatagtatataccggggcagcgccttcaaggatacctggtcttccctttaattcaaggggttctgggtctataaactggtgaaattctagtaattgattaagagactgtaactgtctattttatgattttaattagattcttgttctctttgccaagaaatgttctgcttatacaaatcaagtaagaatgaagtaagtttcctatctatttcacgtcttagaacgctgcggtcaactagacaacactaaagggctgcatgagacagtctattctgattactgccttgattctgctttccattatgatcaccacacccagttctatgataaccacacccaattcaacacaccagattctcacctttgtcgactgacttctgacacttgagtcctgcca

SEQ ID NO: 10103 - DNA, 447 bp, Homo sapiens
  MAP TO AP000407.1; EXPRESSED IN PLACENTA, SIGNAL = 1.4; EXPRESSED IN BRAIN, SIGNAL = 0.9; EXPRESSED IN BT474, SIGNAL = 2.1; EXPRESSED IN FETAL LIVER, SIGNAL = 1.4; EXPRESSED IN HBL100, SIGNAL = 1.6; EXPRESSED IN HELA, SIGNAL = 1.2
aaaaggtagaatttcatgaatccagttacttaagtgtattttgcatagttagcattgcattttttagaagataaggcagtataaaattactactttgcaacatgaagtaatttctttagcatgatgacattaaggataagttttatctcattttcctttttttattatttcaattaaagtcttcagttttttttcctttgaaaatatttaatttatcttcaactgtatttacaattagtagatatacagggatggttattggttaactgtaaacttaaagagaatggtatgtctttttatttagatcccaaggaagaaaaagaggaagaagacgattctgccctccctcaggaagtttccattgctgcatctagacctagccggggctggcgtagtagtaggacatctgtttctcgccatcgtgatacagagaacacccgaagctct

SEQ ID NO: 10104 - DNA, 455 bp, Homo sapiens
  MAP TO AL096702.3; EXPRESSED IN FETAL LIVER, SIGNAL = 0.92; EXPRESSED IN ADULT LIVER, SIGNAL = 1.1; EXPRESSED IN BT474, SIGNAL = 1.8; EXPRESSED IN HBL100, SIGNAL = 1.5; EXPRESSED IN HELA, SIGNAL = 1.1; EXPRESSED IN PLACENTA, SIGNAL = 1.6; EXPRESSED IN LUNG, SIGNAL = 0.93; EXPRESSED IN BRAIN, SIGNAL = 1.4; EXPRESSED IN BONE MARROW, SIGNAL = 1.3
tcgactggttaagatccttccatcataatgcggaccacaccagatgcatgggttccaccaaacagcttcacacagagtgctccaaagtaaaagcccataaaccaacccgagatgaagcagggtcctgcccagtgtgccaccacaggtccgggcttagttgagtctgcctgccctgctcactgtcggtattccaattcatctacactgataactttggcgggcatggagggcaggggttgctgtagcacatctgagccaaaccatttggcaaggcccacaggggagctgctcctctggctggggcgatgctccagctgggagtgcatgtggggcaggcctgaccggctgggcacgttctgaggggttgtctgaacgctgacagctgctgcatgggaaccagagcctggaggatgcagaactgtggagataagaagggttatcattcacagcatgag

SEQ ID NO: 10105 - DNA, 465 bp, Homo sapiens
  MAP TO AL096801.15; EXPRESSED IN BONE MARROW, SIGNAL = 1.1; EXPRESSED IN LUNG, SIGNAL = 1.4; EXPRESSED IN BRAIN, SIGNAL = 1.4; EXPRESSED IN ADULT LIVER, SIGNAL =   1; EXPRESSED IN BT474, SIGNAL = 1.1; EXPRESSED IN HBL100, SIGNAL = 1.2; EXPRESSED IN HELA, SIGNAL = 1.2; EXPRESSED IN PLACENTA, SIGNAL = 2.4
taaggttgcccttggttttggtgtaagaatgtgagtttagtggttcagttccatttttgccttccacatgaaggtgccattagggtctttatgaaaatgtgcaacacaatttattcttaagccccaagggtcatcttatctttgattatctggcctagcttggagatgaccagggaaaggagggaatgtatagatccccaaatatggaaaagctcttcccccctccttactcttttttctaggcatgaactcaacagaatccaactcttctgcctctgttagaccaaaggtactgagtagcatccaggaagggacagtccctgacaacacaagctcagcaagggggaaggaagacgtgaacaagaccctcccaaaccttcaggtagtcaaccaccagcaaggcccccaccacagacacatcctgaagctgctgccgtccatggaggccactgggggcgagaagtc

SEQ ID NO: 10106 - DNA, 451 bp, Homo sapiens
  MAP TO AC010083.1; EXPRESSED IN BRAIN, SIGNAL = 1.2
aagaaaatctatggaaaacgatccagaaaggagtcctcaccgatcatgctactagctcgcagatgggaggtctgtgctttgttagaaagcaggactgggcatagagaaaaggggtcttcccttcagagccttagttcaggctctgagggaggggacaggaggggagcaagccagtgtcccagcatcccaccctgacacagaggtgcagtggccctaaggaaacaaggacagaaggggacgtgctcaccacaccggcctcggggttccttttcctcccgttgctgaaggtggaagccaaggtggaagagcagctctcgtcgtacagggcagtcctgccgtcgttgatggctgagttgatggagatggtccacatgctggaggcgtagccgtcgcagttgcagtcgtcatagctgccgccgtccccggaggcccacacgtagatgctgccttt

SEQ ID NO: 10107 - DNA, 1488 bp, Homo sapiens
  MAP TO AL096711.9; EXPRESSED IN BRAIN, SIGNAL =   2; EXPRESSED IN LUNG, SIGNAL = 2.3; EXPRESSED IN BT474, SIGNAL =   1; EXPRESSED IN HELA, SIGNAL =  13; EXPRESSED IN HBL100, SIGNAL = 1.2
tgttatcccatttcagaatttttcaaaagttacaatgtactattctcagtgttaaaaactacaccttcaaggttcatgttgagttatatttatttacaaacagggtcaagaggctaagaagagtccaaaacttgtgccctcattctatttatatgaattggacatataaacatgattcagagccattgctaatatggatgctaccaaattatgttatatttgctttctcacctctgttatctttttcggatctattccttgcttcacttcctgtcccccccacacagctgtcttttgctgaaactgttgttccatttggagcatttctaaatgctgacttaatgtggcaccaccactgacatcagaattacatttggtccaattatcctggaagcacttagaattttgcaatgcagactctgttgctgtctcataggttttcagcagcttttccacaacaccataatttgacctgggatcagctgacctcggacggccagacaaattactcggtctccagtcatgctcgtggagcatatttcgataactgcgaggacttaggtgtccctgcatttgtcttactaggcctgttgtggatttcttggtgggattatcaggcacattttccatgggcacaggcatgtgggcattggttttccaaataccggacacatcgttactttgtgatatgctacctgtgtgagtagatgaggtatcacagggcttgagatcctccgatgattttgagcagctgtgattttgctgtattgcctgacaatttctatctgttctaaatacagttctgttaaattcatcagtctttgctgccagcttctcattccttgtagtcctttcaaagccacaactgaaatttctaagtgggctactgctctctgctactgaggagctacagtcattacttacatgaagatcaggatgagatttagcagggtgatctgggatcaccatttcatattttggattactgggggtagagcaggttttctgaaaccacgaagtagaggggctcctttttgcacctatcccaatgtcacatgaccacatgctaagtccaacatcttcattacttggaggcttgctatctattttgacttctggtaccaaagaggaaaagatgataccatctttcgaagttttcccttcatttggatacaacatagacatctcttgttgtctcaaagggaagtgagggttgtaattccttttacttcgaccctcatggggcacccagctgttgtggtctaacctttccttccatctttcataggcttgttcagaatccgagctgggaaaatttcgagaggtgcttcttggaggaggaactggtggagtttcatttctttttaaatcgattgtatcaattccacattttttcgtagaattgctctggagcacattggtacagctcagattcttcctgtttttctgtttttctttttctaaactgattggaagaatgcactggtc

SEQ ID NO: 10108 - DNA, 464 bp, Homo sapiens
  MAP TO AP000512.1; EXPRESSED IN ADULT LIVER, SIGNAL = 1.1; EXPRESSED IN BT474, SIGNAL = 1.9; EXPRESSED IN FETAL LIVER, SIGNAL = 0.88; EXPRESSED IN PLACENTA, SIGNAL = 1.5; EXPRESSED IN HELA, SIGNAL =   2; EXPRESSED IN HBL100, SIGNAL = 1.9; EXPRESSED IN LUNG, SIGNAL =   1; EXPRESSED IN BONE MARROW, SIGNAL = 1.3; EXPRESSED IN BRAIN, SIGNAL = 1.2
tgctgcaggaagatacgatgtggggtcagcatgtagcatccaaagaggcccagatttgagtatgtcattgttttggttgtgcattgcagagggaaggtagagggtgcatcctgaggttctcatgcctgcctgtcaggggatttttcccttgtagggattggtagagaaaggggttgctcctccagcaagatgaggattcgactgtcctttcccaactcaggtccctgagctgcggaagaaatctcgccgagagtacctggctaagcgggagcgagagaagcttgaggacctggaggcggagctggctgatgaggagttcctttttggggacgtggagctgagccggcacgagcggcaggagctcaaatataagcggcgagtgcgggatctcgcccgggagtaccgggcagctggggagcaggagaagctggaggccaccaatcgctaccacatgcccaaggaaa

SEQ ID NO: 10109 - DNA, 483 bp, Homo sapiens
  MAP TO AC007898.1; EXPRESSED IN FETAL LIVER, SIGNAL = 0.92; EXPRESSED IN BRAIN, SIGNAL = 1.1; EXPRESSED IN BONE MARROW, SIGNAL = 1.1
  unsure 300
  unsure 305
ggttgctgtttctttgaatgcaggatagagtacagttgacacttgaacgatgcggaggctcgaggcgccgacacccacacagtcaaaatcccctgtagctttcgactttccaaaaacctgtccactattgaccagaagccctgccaataacataaacagttgattttatcctgtattgtatactgtagtcttacaataaagtaagctatagaaaagaaaatgttattaagaaaagcataaggaagggaaaatatatttactattctttaagtggcttacttatactggccgggagatgtnagganggaagtttcctgcagggatggggaggaggctctgagaaagattttgttttccaataagagcaccaggtacattggtacaaggattactataaaggccttcatcatcattgtcttcacattgaataggctgaggagggggaggaggaggagggataggtcttgtgtctcagggacagca

SEQ ID NO: 10110 - DNA, 450 bp, Homo sapiens
  MAP TO AC005412.5; EXPRESSED IN PLACENTA, SIGNAL = 0.97; EXPRESSED IN LUNG, SIGNAL = 0.91; EXPRESSED IN BRAIN, SIGNAL = 1.1; EXPRESSED IN FETAL LIVER, SIGNAL = 0.96; EXPRESSED IN BT474, SIGNAL = 1.2; EXPRESSED IN HELA, SIGNAL = 1.8; EXPRESSED IN HBL100, SIGNAL = 0.92; EXPRESSED IN ADULT LIVER, SIGNAL = 1.3
agctagcacccagtgaggagtagctgtatcatttggttatgtctggactggagacacatgaggctctgttcgaataacctttctctctgtgtgtttctgtttgcagcagcaaagtggggcaccaaggccctgtgctaagcactcataatcctctgggggtgctacccctacaaacagcacccccaccatgtttaacctaatgaagaaagacaaggacaaagatggcgggcggaaggagaagaaggagaaaaaggagaaaaaggagcggatgtcagcggcagagcttcggagcctggaggagatgagcctgcgacgtggcttcttcaacctgaaccgctcctccaagcgtgaatccaagacgcgcctggaaatctccaaccccatccccatcaaggtggccagcggctctgacctgcacctgactgacattgactccgatagtaaccgggg

SEQ ID NO: 10111 - DNA, 459 bp, Homo sapiens
  MAP TO AC010130.2; EXPRESSED IN BRAIN, SIGNAL = 2.3; EXPRESSED IN BONE MARROW, SIGNAL = 1.6; EXPRESSED IN ADULT LIVER, SIGNAL = 1.2
aatgaggcaactcttggtgggctcctggatgatcaccagaaagaccaagccgtgattagaagcttggaaccttcagttccacccaactcccatcctatgcggaggggaaagggaatagataatgagttaataatcaatcatgcctacctgatgaagcctccagaaagatacctgaactaaggggttcagagagcttctgagttggtgaatacatccacgtgctcagagtggcacacccccagtccagagggaaagaagttgctgcgcccaggacccttccagacctcaccctacacatctcttcatctggctgatctggccgttcatttgtatcctttatcatatccttttttaataaactggtaaaagtatttccctgagttctgtgagctgatcccaagaaggtgctggtgggcacctccaatttgtagctaagttggacagaaattgaggatagcc

SEQ ID NO: 10112 - DNA, 467 bp, Homo sapiens
  MAP TO AC011296.1; EXPRESSED IN BONE MARROW, SIGNAL =   1; EXPRESSED IN FETAL LIVER, SIGNAL = 1.2; EXPRESSED IN HBL100, SIGNAL = 1.4; EXPRESSED IN BRAIN, SIGNAL =   1
tagatcgaggtacccatccgctttccctccttacaacgctgttattggtttgttttgattactgttttgttttgtggtggggagccatcctgaacctcttcctgagaagtgggaaagttgcaccgccctccacaaggctgactctgagttaggactgggagggagcattcccatttcttatgggtttaccatttatttggccccccgggtgccctgaggtgggagtactacctctggagagccagggccgcatgagcgcctctattcctcactggatctcagggactgggagactctttcccacggcttttgtacctggttgccaattctgcctccacaggaagttgtcgctcagcctcttcttccactggccctgagcgtacttggcaaagtccaattgcccggaggtaagttcctccccagagttcctgtcttcaagcatcacctcttgctgctctcaccatctg

SEQ ID NO: 10113 - DNA, 486 bp, Homo sapiens
  MAP TO AL035457.11; EXPRESSED IN PLACENTA, SIGNAL = 1.2; EXPRESSED IN BRAIN, SIGNAL = 1.2; EXPRESSED IN BONE MARROW, SIGNAL = 0.9; EXPRESSED IN ADULT LIVER, SIGNAL = 0.95
tgccagaatgatgtctgaggctgcacagcttctgcaggtttcttttgggacacatgtctttgaatccctgagctgtgatgtcacaaacccagccatccttaaaccaccatgctgcacagatcatgaagaggaatcacccagagatgaaaagaaatgcctaaggagctctggctgtttgagctcagagccagcagcatcatcaacacctgcctcagcatctgtatcagcaccaatacctgcttcagcacctgcatcagcatcaacacccgcttcaacatctgcatcaacatctgcaccagcatcactaccagcatcagcatcactaccagcatcagcatctgcacttgcatcaacacatttttcagcacctgcatcaacacctgcttcaacatctgcatcaacatctgcacaagcatcactaccatcagcatcactaccagcatcagcatctgcacctgcatcaacacctttttcagcacctgcttc

SEQ ID NO: 10114 - DNA, 470 bp, Homo sapiens
  MAP TO AL079299.8; EXPRESSED IN BRAIN, SIGNAL = 1.1; EXPRESSED IN BONE MARROW, SIGNAL = 1.4; EXPRESSED IN BT474, SIGNAL = 1.3; EXPRESSED IN ADULT LIVER, SIGNAL = 0.95; EXPRESSED IN PLACENTA, SIGNAL = 0.94; EXPRESSED IN HBL100, SIGNAL = 1.1
accgctgtcagaacaggtgtcggaggcagtttcggaggcagtgccaagatcggaacctgtgtccgagacgacgtctgagccggagccaggggctgggcagccatcggaactgctgcaggggtcgcggccggggtcagagtcaagctcaggtgtaggggctgggcccttcactaaggccgcatcggagccgctctcccgggcggtggggagcgcgacctttctcagacccgagtcaggatcgctgccagcgttaaagcccctgcctcttctgcgaccaggacaggcgaagactcctcttggggttccaatgtcggggactggcacgacctacagtgccacactgtccttactgcctctggacagcttcgagggctggcttctcaagtggaccaactatctgaagggctaccagcgccgctggttcgtgctgggcaatggtttgctctcttactacaggtatggaagcgcca

SEQ ID NO: 10115 - DNA, 491 bp, Homo sapiens
  MAP TO AC007882.2; EXPRESSED IN BONE MARROW, SIGNAL =   1; EXPRESSED IN BRAIN, SIGNAL = 1.6; EXPRESSED IN BT474, SIGNAL = 1.1; EXPRESSED IN FETAL LIVER, SIGNAL = 0.94; EXPRESSED IN PLACENTA, SIGNAL = 0.98; EXPRESSED IN HBL100, SIGNAL = 1.1; EXPRESSED IN HELA, SIGNAL = 1.4
gaaatcgagacactcgtgagggggcttcttgaggcgatcccaagaggcctgagaactgccacatccgcggcccttaacccagccctagggacgggccgcactgcgcatgtctgaaagggagtgacaagaggaggagcgaaggagggtggggctgaggaggaggcggggtgagaaaaggggcgggcggcaccccttgtctgaggagcgttaccttgacaacactgcggcggaggcagtgagaggccaccgaccctttgttgatctgcaaggtatcaaacttcgaacatgacaagcataaaagcctgcagctcgaggagacagggtgtcacaattaccaggtgaaactagccgccctagctccaatgtctcttcagcaggagagatttggaaacagcaaggctcctctccgcagggcgaaactgctgggctgcgaaaggcgggacagggagcggaaccgtcttcaaccgttccgggagttctggtgtctggtc

SEQ ID NO: 10116 - DNA, 471 bp, Homo sapiens
  MAP TO AC007638.1; EXPRESSED IN BRAIN, SIGNAL = 1.3; EXPRESSED IN ADULT LIVER, SIGNAL =   1
  unsure 398
aggtttgtttccttcatgggtttaaaatcactccaacattttactgcttctccttgtttctgttcagcatcaagacataaaagtgcatttcaaaaaatacccagagaggaaacaactggcctagaagtcacatgccaagaaacaggatcagaaatcagaaatccttcatgcactagcttctgggatcatcctggggtcacccttttaatctgtctgtggatcccactctccatttgcccaaagactgattaccagttccaatttaccttcaggtcatcagggatgaagactttgcgagctttcttgatcatgggctgtggcttcagttcttcctcagagaacttgcgtttgcgagggtcaaacatttcctggccagggatgctggaaagggcaagatnctgctgggtctggctcataacccactgggacctggatggtgtcaggatcaatgggacttggtgtattgcggtt

SEQ ID NO: 10117 - DNA, 480 bp, Homo sapiens
  MAP TO AC006020.2; EXPRESSED IN BRAIN, SIGNAL = 1.1
tgccaacaatacataataaatgaagaggtaaggaatgagaagaggttctttcttctgtgaccacttcctttcctctgtctgacttccttccaggttttgtaagcaatcttgtgtgggtcttcccccattctgtaaaactctccttgtctgtcaatggaaggtactatgtttgtaggtagatacatatgaggaaaacttgaactaatgttgcttattgtcattgttttgccaggagcaatatgtcttcattcatgatacactggttgaggccatacttagtaaagaaactgaggtgctggacagtcatattcatgcctatgttaatgcactcctcattcctggaccagcaggcaaaacaaagctagagaaacaattccaggtgagtcctcttggaagcctcttggatgtcactacagaactgaatgtccctgcatcttctcatttgagttgacagggtcacgttgagtgggcagtatgggt

SEQ ID NO: 10118 - DNA, 470 bp, Homo sapiens
  MAP TO AC006318.2; EXPRESSED IN HELA, SIGNAL = 0.94; EXPRESSED IN PLACENTA, SIGNAL = 1.1; EXPRESSED IN BRAIN, SIGNAL = 0.96
catctgactgaaagggcaccatgctgaagtttcaaatcctcatagaaagagctgagattgggttttagattcttttaaaggcacgcacacagctttgttggacaaccacttcagcatcccaccaaggatatcttctccacctgttacgaaaaaccacagtggaggaagcacctaaggaagggattttgccgccacaggaaagagcgaacccaagcttcctcacctgtctgagtgccttcggcattttctttctcttcccaaggtgctggcagagattgcggtcattttctcgatctgagctgtagtggtgtgggtggctgagtctgctcttctttgaatgaaaggacaagccattggtaagtgcttctcgtttcttcttggtcaggggcgtctggcgtttctccacacgttcctgaggcttaagtgctacatctttctgtagaaaagaagagaaggaaagggaagtggtg

SEQ ID NO: 10119 - DNA, 972 bp, Homo sapiens
  MAP TO AC010150.2; EXPRESSED IN HBL100, SIGNAL = 1.8; EXPRESSED IN HELA, SIGNAL = 1.7; EXPRESSED IN LUNG, SIGNAL = 1.2; EXPRESSED IN BRAIN, SIGNAL =   1; EXPRESSED IN ADULT LIVER, SIGNAL = 1.6; EXPRESSED IN BT474, SIGNAL = 1.9; EXPRESSED IN PLACENTA, SIGNAL = 1.5; EXPRESSED IN BONE MARROW, SIGNAL = 1.4
ttgaagaaactgaagtaaagaaggctagtcatttacttaatatcacacggacggtaggtatcagagccagaatttgaatccaggcactctgactccagaactttcactactactaatagtgaagataatacatgaatacctgctgtgtcaggggttctcctaggcattgtcatcttccattatctctattaatgaatgctttcgcaacatgggctatttttcaactggaatatttcttttttcccctttttagttctggcctgagccttgaagattctaagaaattgacagcttctcccagtgatcccaaagtaaagaaaaccccagctgaacaaccaaaatccatgcctgtgtcagaggcctctcttatcagaatagttccagtagtctcccagtcagagtgtaaagaagaagcattgcaaatgtcatcaccaggcagaaaagaagagtgtgaaagccaaggtgaagtgcagccgaacttctccacatcttcagagcccctgctttcctcagctctcaatacacatgagcttagcagcattcttcccatcaagtgcccaaaggatgaggatctcttggagcagaagccagtcacctctgctgaacaggaatctgagaagaaccatctcaccacagcttctaattataacaaaagtgaaagccaagaatctttagttacatcgccaagcaaacccaagagtcctggggttgaaaaaccaatagtgaagcccacagcaggagcgggtccacaggagactaatatgaaagaacctctagcaactcttgttgatcagagcccagaaagcctcaagaggaagtcttccctcacccaagaagaggcccctgtgagctgggagaagaggccacgtgtcactgagaatcgccagcaccagcagccatttcaggtctcaccacagccctttctcaatagaggggacagaatccaggtgcgaaaagtaccacctctcaagg

SEQ ID NO: 10120 - DNA, 479 bp, Homo sapiens
  MAP TO Z95114.19; EXPRESSED IN BRAIN, SIGNAL = 1.8; EXPRESSED IN BONE MARROW, SIGNAL = 1.1; EXPRESSED IN ADULT LIVER, SIGNAL = 0.94; EXPRESSED IN BT474, SIGNAL = 0.97
tgtggtaccaagcaaagggcaccgtgcccgtggagccaggatgtacagcagccccagcaacatctccaggtctagggcaaacagtgtgtgtctgagaagagggaagacatcaactggtgagagtcccagtgaccatgacctctttcccttctcttaccagtctccaaaacacaacaaaggaagggtgcatgaatttgtagctaacatttagtggacaggtggcaggcgcagcccgaggtaatttccatctatttactcatttaaccctatcaataaccttatgaggcaggtactattgtgcccacttgacaggtgaggaaactgaggctcagggaggtgaagtcacacagctagggggtagcggtgctggcatccaaacccaagcgtgtggccacagggctcaaatgcttaaccactgacccatactgcctctcagatcccagggtgatggtgcaggccgcctcaccttacggaatctg

SEQ ID NO: 10121 - DNA, 463 bp, Homo sapiens
  MAP TO Z98752.9; EXPRESSED IN BT474, SIGNAL = 1.1; EXPRESSED IN ADULT LIVER, SIGNAL =   1; EXPRESSED IN HELA, SIGNAL = 2.4; EXPRESSED IN PLACENTA, SIGNAL = 0.99; EXPRESSED IN BRAIN, SIGNAL = 1.6; EXPRESSED IN BONE MARROW, SIGNAL = 1.1; EXPRESSED IN LUNG, SIGNAL =   3
tgggaaatctgtctcatcccaccaatgacagagcactcgctgtgaacactctgtggtggaggacataggagcagataacccagacttactctggaaatcttcctgcggaatctttcgatacttcggagggcgtccaattctggagaaagacggaccaggtccatggcagggaatcagtgtctggcccagtccaagaggctacaaggccccacacccccaggaagcccgggccctgattccctggcctccataccggccgtgatggcgaggcttcttccttggggagaagcctgagaggttcttcttgcgggctgaggcctccgagtcagacagctccgctttcagccggctctggttcctctcagccagtgggcagcctgagaggcaatggtgagctgtgaacttgcctgtgacatggccagagccgtcgcaaccaggagtggggcacttcctggggaagaag

SEQ ID NO: 10122 - DNA, 967 bp, Homo sapiens
  MAP TO AL035698.12; EXPRESSED IN BT474, SIGNAL =   1; EXPRESSED IN BRAIN, SIGNAL = 1.5
tggggacataattgtccaggtaagacaatgatgtatctttatttgtgtaatagtgtgcatttttaaaaaagcattaaatgctgtaaatcatgaaggatgcaaagatgactgtgtctctggtaattaataggcaagttgttattcctagcagaaaccttggattcatgctcaaatgatttttctcatcacaggctgtgagcccattcctgtgcgctatcttgagtggagcaacatcgaatccattatagccatcgccttttcatgcctgggaatccttgttaccttgtttgtcaccctaatctttgtactgtaccgggacacaccagtggtcaaatcctccagtcgggagctctgctacatcatcctagctggcatcttccttggttatgtgtgcccattcactctcattgccaaacctactaccacctcctgctacctccagcgcctcttggttggcctctcctctgcgatgtgctactctgctttagtgactaaaaccaatcgtattgcacgcatcctggctggcagcaagaagaagatctgcacccggaagcccaggttcatgagtgcctgggctcaggtgatcattgcctcaattctgattagtgtgcaactaaccctggtggtaaccctgatcatcatggaaccccctatgcccattctgtcctacccaagtatcaaggaagtctaccttatctgcaataccagcaacctgggtgtggtggcccctttgggctacaatggactcctcatcatgagctgtacctactatgccttcaagacccgcaacgtgcccgccaacttcaacgaggccaaatatatcgcgttcaccatgtacaccacctgtatcatctggctagcttttgtgcccatttactttgggagcaactacaagatcatcacaacttgctttgcagtgagtctcagtgtaacagtggctctggggtgcatgttcactcccaagatg

SEQ ID NO: 10123 - DNA, 484 bp, Homo sapiens
  MAP TO AC007666.12; EXPRESSED IN HBL100, SIGNAL = 0.95; EXPRESSED IN BONE MARROW, SIGNAL = 0.91; EXPRESSED IN BRAIN, SIGNAL = 1.6; EXPRESSED IN ADULT LIVER, SIGNAL = 1.1; EXPRESSED IN FETAL LIVER, SIGNAL = 0.93
ttcctgaagggatcaaggacaacgcctggtctgggtagttttctctgtcactgttttcagcttccatgcggtgctacctccctagcaggctttgttttaaacttagtcccctgtccgtacagagaccacacctaagggctagctgatgacttgaccagctgggtgagtggcagccacgggtgccatccagggaaagtccccctctcacaagagggcagctgcaccagggcaggcctgtggcctgcggctgaaggagcctgacgcctgttcccataggatgcagcggaacctgaagatggagatgcttgccgggtgtggggctgggatgtgccaggtcgtggtgacctgtcccatggaaatgctcaagattcagctgcaggatgctggacgcctgggtgaggcctgtccccacctcctatgggaacagtaaagggctgggattggaaccaggcacatcccacatcccaacctcatttgctaggct

SEQ ID NO: 10124 - DNA, 474 bp, Homo sapiens
  MAP TO AL049697.8; EXPRESSED IN BT474, SIGNAL = 2.3; EXPRESSED IN LUNG, SIGNAL = 5.3; EXPRESSED IN BRAIN, SIGNAL = 0.9
tgacttagttttgattgtgaaggcaaaattgctttgggatagcaatgccccaaaatatctaacattagcaaaaaatgtgtaaaatttaatagaccacatagccctctgggcattgttttggaaaaacagtgttatataggaactaccaattttagtacaaactctcagatggctccttctaaggaaaacagtattttccttttcctaggtaaagtatggcatctctggggatgaaaattgcctcaccattatgtaatgtttcatttatttgagtgataagattttatttctctctgtatacaagttcttgcaagtgttggtggcctctacacttctgttgtggttaagtacacagacaacatcatgaaaggcttttctgcagcagcggccattgtcctttccaccattgcttcagtaatgctgtttggattacagataagtatgtcttagtttgtgttgagtttttaacatgga

SEQ ID NO: 10125 - DNA, 485 bp, Homo sapiens
  MAP TO AF186192.1; EXPRESSED IN FETAL LIVER, SIGNAL =  18; EXPRESSED IN BONE MARROW, SIGNAL = 1.1; EXPRESSED IN BRAIN, SIGNAL = 1.2
ccttttctcacaaaaacgtgctctattttcttggttctttatgtgtttgttaattttggagtggagactgtggattctgtatgtatgggtgtatgtgtatctgcatcgtgtgtatgtacatgtttacgcatgtgagtgtgtgtgagtgtgtgtatgagtgtgtgtgtacatctgtgcagctggtcaccagcatgtaccttcacaagttagattttgctggcatatccacgagctgtcaccactgtgccctgggcactgagctttctgaggcttgtgtgttggcctgtcccagggctctgccatcgtcagtattggccccactcacagatgttctttcctgggttgggccagctccttttggacacttttgagatccacctcgggcccgtctgcgtttgcgatgctgcttttctgtggctccttccggctactgggactgttcccttctggcattgccttcggcagcacttcgaggaactcagcct

SEQ ID NO: 10126 - DNA, 468 bp, Homo sapiens
  MAP TO AP000425.1; EXPRESSED IN PLACENTA, SIGNAL = 0.96; EXPRESSED IN HELA, SIGNAL = 1.2; EXPRESSED IN LUNG, SIGNAL = 4.1; EXPRESSED IN BRAIN, SIGNAL = 0.96; EXPRESSED IN BONE MARROW, SIGNAL = 0.93; EXPRESSED IN ADULT LIVER, SIGNAL = 0.99; EXPRESSED IN BT474, SIGNAL = 1.2
tcacattttgtttattttccattcaaacttagtatttgaagaagggccaattttaagtaattcaatattttcaatgtattagggatggtttccagtcatttaaaaaacaaccagaggccgtcccattttgtcacatgattaaaatcattagttcagtcttttgggggaagtggaagtctctagaccctgtgaagtgtttaatacccatgtctattacaggttttatatcatggaaagcctgatagaggaataatttttctttcttcctttaaaaaaaaaaattactaaggaacctcgagccagttactcagctgtatgtcagtgtggatgccagtaccaaagacagcctgaagaaaatcgaccgcccactcttcaaggatttctggcagcaattccttgacagtttaaaagccttggcagtcaaggtaagaattatgacatcttaaaaataaataaacaaccctcagg

SEQ ID NO: 10127 - DNA, 468 bp, Homo sapiens
  MAP TO AL109954.10; EXPRESSED IN BT474, SIGNAL = 1.1; EXPRESSED IN LUNG, SIGNAL = 0.9; EXPRESSED IN BRAIN, SIGNAL = 2.7
caatatccagttacttttgccacaataattatgactgttaatgaatttttttcttacacgtttgaaaacagagaaatgtcaagcccaggaacttgtcactagtatcaaaatagtaacaggataatgaaaaaataaacaattttttaatgaagaaagttataaactggaatgattaatttcaaatgatgaaaaaagttagtagattatggctgtaaaggtataaacagcttggggtactattattttgtgtttttaatgtatttacatggggtaattcctgttcctctttccttatactaggtgaaggaatttgactcaatatctcgcttggatcagtggctgaccaccatgttgcttcgcatcaaaaagtccatccaaggggatggagaaggagatggagacctaaaatgaaatgtttttgtctttgtggcatgcagctaactcctctttagttttgtcttagggtca

SEQ ID NO: 10128 - DNA, 458 bp, Homo sapiens
  MAP TO AL035703.17; EXPRESSED IN BRAIN, SIGNAL = 1.1; EXPRESSED IN BONE MARROW, SIGNAL =   1; EXPRESSED IN BT474, SIGNAL = 1.5; EXPRESSED IN ADULT LIVER, SIGNAL = 1.1; EXPRESSED IN HBL100, SIGNAL = 1.2; EXPRESSED IN HELA, SIGNAL = 2.1; EXPRESSED IN PLACENTA, SIGNAL = 1.2
tgccttcttgaacgtacctgaggcatgggcaaattctctgccacagaggtcacatgtcactggaagcctcttcttcttcttcttgggggcatcgggctctccacctgcaccatgggcctccagctgatgtttgtccagctctttctttgaatccttggtctcactgcactccttacactgcacctgtttgctcttagccacccggcagcgcttcatgtgcacctttaggcggcagtagaaatggaagcttttgtcgcaggccttacagatgaagctcttcttggcagggtctggggaggctgaagcctctttctcttgctgtcctggcaaggaaccagtctctccttgatcattctgttccccaggctggctgtcttctttggctgccttttcatcttctttgttgttggcttcaaggtgaaatttattactcaccttccacgtttccttctctccat

SEQ ID NO: 10129 - DNA, 452 bp, Homo sapiens
  MAP TO AL080274.10; EXPRESSED IN HBL100, SIGNAL = 1.1; EXPRESSED IN BRAIN, SIGNAL = 1.7; EXPRESSED IN BONE MARROW, SIGNAL = 1.4; EXPRESSED IN FETAL LIVER, SIGNAL = 1.2; EXPRESSED IN BT474, SIGNAL = 1.2
cacaaattacacattttgcatggttttagcatagactgatttttctagaaatggaatggtagtgtaagaagattgtactttgttatttgcagagctttaacaagaaatgttcatccttttggcaaatcacaacactgatagtaactgtaacttgtgataactaagtgaccaaaacaacacaccaattttgtatttttttggaattcatggtgatttttttgtgagtaggtacaggaataaacttacgtgatcctcatttcaaggagaagaaggagaagttgaagaaggaggagaaggagaaggatgagaagaaaaacaagaagaggaaggagaaggaggaggaaaatgagaaggagaagaagagaaggaacagcagcagttgcaggaggaggagaaagaggaggaggaggaggagggagtgtgcagaagctggggggtaaatgcaatcttga

SEQ ID NO: 10130 - DNA, 456 bp, Homo sapiens
  MAP TO AC009946.1; EXPRESSED IN BONE MARROW, SIGNAL = 1.1; EXPRESSED IN BRAIN, SIGNAL = 1.4; EXPRESSED IN BT474, SIGNAL = 0.98
tgggagcacatacagggaactaattctatggcgcagggagtgggtggcgggaaggctgagggccacaggggctggctcatgccaagtttcaactgcgtatatgtgaccctggagagccacaaaggcttggagcagggtgtgaagacttctctgcccccagccttcctcactgtctctctggcaggcagcagggtctgccccagcccctgctaacagcctctcttctgttcctgcaggacccccaaagtggttgacatccccacttacgaggaagccgtgagcttcccagtggccgaggggcccccaacaccacctgcataccctacggaggaagccctggagccaagtggatcgagggatgccctgctcagcacccagcccgcctggcctccacccagctatgagagcatcagccttgctcttgatgccgtttctgcggagacgacaccgagtgcc

SEQ ID NO: 10131 - DNA, 493 bp, Homo sapiens
  MAP TO AL031848.11; EXPRESSED IN BT474, SIGNAL = 1.9; EXPRESSED IN FETAL LIVER, SIGNAL = 1.1; EXPRESSED IN HBL100, SIGNAL = 1.1; EXPRESSED IN BRAIN, SIGNAL =   1; EXPRESSED IN BONE MARROW, SIGNAL = 1.2
gtgtgcagatattcgcatggctctgtgtgttcatatctgtatgctgtatgtacacatgtacaagtgtgtgcttttgtatgtgagtagctaagaataatgaatggtgggcgacacacgtggactttgtgggtggggagagtacatgtggatgtacatgtatgtttgtgataagcacacacaagtatgagtgacatctgtctctcaccagaaggggtgtcgcctccccatgtttaagagcaagtgatgagggtagtgtccgatattggctgtggcagggcggcccaaggccaatcctcacagcccagcagtctggcttcagtctgctctccctccccgtcttcctcctgggcacactcaccacatggagggtgctggcccttgatgctggagtggctggaggagcaggagtcgtagttggagagggtgctggtaggcgagctgaggtcaaagttcagcggctggaccgacaccgtggtattgggtgaggacatgc

SEQ ID NO: 10132 - DNA, 489 bp, Homo sapiens
  MAP TO AL080275.8; EXPRESSED IN BONE MARROW, SIGNAL = 1.5; EXPRESSED IN LUNG, SIGNAL = 1.2; EXPRESSED IN BRAIN, SIGNAL =   1
tggtgccttttacttcctgtgcagtgcttgtttacatagctagaggagcagcagcgccattgcaggcagtgcgggggtggcgggggcttgactgaaaaagcctactgttgccaaggagtgcaaggggaactgaggaccttagggtggagtgaaggctgggagaacattggccccgccctcttctcctgagaatatgaaagagaggcaaacccaagaagcagagttcaaccaaccacagcacgtttattttagacacaagtcaacacacccaaggttgtttctgccttccgtgctttcagtgttgcagtgacagtaactccggggactttgtttttgctttccagggttctctgggtagccctggcctccctggcttgcctgggccccctggacttcctggaatgaaaggtgacagggtaagagctccagcactccagaaggttctttatttggaagggtgatttctaccatgttgagaaacaaagcttg

SEQ ID NO: 10133 - DNA, 453 bp, Homo sapiens
  MAP TO AL034582.10; EXPRESSED IN BRAIN, SIGNAL = 1.3; EXPRESSED IN BONE MARROW, SIGNAL = 0.9; EXPRESSED IN LUNG, SIGNAL = 6.3; EXPRESSED IN BT474, SIGNAL = 1.1; EXPRESSED IN HBL100, SIGNAL = 1.8
cgggcctcagagaactgaacttactgcccatgcttggcagtttagaagtgatgtctaggattaccttcagggggttggctttcctccctcctttaggatgtagtcagcacagagcatgggagtccatgggagaggtgcacacgagacccagtgcaaacggcgtctgtcactgtgcaaactgccggcttgactctgttcctgttccctcccctctgtctccccaagtcctttggggttatagactggctttccggacctaactctctgcatttccctgaggctccccattcgcccttgtctcccatctgcaggctccatgacagtggtgacagtcaaggccgtggctgggatgcttgtcttgtccattcaagggaacctgcagcttgactaccccatcttctacgtgatgttcgtgtgcatggtgcaaccgccgtctatcaggctgcgtgagtt

SEQ ID NO: 10134 - DNA, 469 bp, Homo sapiens
  MAP TO AL080317.11; EXPRESSED IN LUNG, SIGNAL = 1.6; EXPRESSED IN BRAIN, SIGNAL = 0.98; EXPRESSED IN BT474, SIGNAL = 1.2; EXPRESSED IN PLACENTA, SIGNAL = 1.2; EXPRESSED IN HBL100, SIGNAL = 0.93; EXPRESSED IN HELA, SIGNAL = 1.2
aaacagttgcaaggctgacctattcccaatcctcttcatgagtcatccatccatgaagctggattaatcatatggtgatccatgtcaattggtaagacaactataatgaatggattagctgggatacagtccatttatcttgctcatagggaaggtgtccagagcaaagagacactcagaaagtgtctaattttagtaagaagtacaaagcacaacaatattattgtaaatgtgaaaaaaaccttactttcccaagttctccacatggccaaggcaggtggaaaagcagtagttatatgcaatcacaatagaaggataaagtgattggaaatccaaaacgagaacagagttgctatagaagcgggattcaggctccataattagaggaacacactgtggggctctcatctgggatctttgctgaacactaggtgtcacaggaatatagttcattggtttagcaatacgc

SEQ ID NO: 10135 - DNA, 443 bp, Homo sapiens
  MAP TO AC008014.5; EXPRESSED IN BRAIN, SIGNAL = 3.2; EXPRESSED IN ADULT LIVER, SIGNAL = 1.2
aagttctagggcttcgggtccctgtggatgattttcttttggtggcagtattgtacagcagatataatttgcctgaacttgctttgggcctcttctccttcatgggccatgttctaggatatagtcaaagggctctccactgccattggactccaggactaaatacaaggtgtccatggtgttgatcacttgaaagagcttgatgacattgggatgatttagagccttcataatgctgatctctcactgtacactctggaggctggaggatctctgctgacctttcaagatgacattcacagccacctgggtccctgtgagaatgttccggcccaactttaccctggtgaagcttccttggctgattttcttgaggagcttgtaatccttaataagggtcttgtcatcagcagagttggaggccaaactgtgtcacataggtc

SEQ ID NO: 10136 - DNA, 449 bp, Homo sapiens
  MAP TO AC010899.1; EXPRESSED IN BRAIN, SIGNAL = 1.1
atgagcatgaatgccctcagagggccacataaaacaagcgcaggaaatagaattaagaaaaaataggatgattgatacatgctttagcagctttgtgaagttaagagcaaaatattgcatagttacatttaacaacaattgttccatttaaaaccttcccttagcttttcagttctccttgcctatttgaggcaatcagatttctgagtcttcttgtctcactggtagctccgttctgcttatattttcttgttctctttctagacctaacactgccttgttggatccaagctcccctgaattctctgctgtggtatcagtgggcgattggctccaggccattaaaatggaccggtataaggataacttcacagctgctggttataccacactagaggctgtggtgcacgtgaaccaggagtaagtactcaacgatgtaacacgaaagg

SEQ ID NO: 10137 - DNA, 456 bp, Homo sapiens
  MAP TO AC011282.1; EXPRESSED IN ADULT LIVER, SIGNAL = 0.99; EXPRESSED IN BT474, SIGNAL =   1; EXPRESSED IN FETAL LIVER, SIGNAL = 1.1; EXPRESSED IN HELA, SIGNAL = 0.93; EXPRESSED IN HBL100, SIGNAL = 1.4; EXPRESSED IN LUNG, SIGNAL = 0.9; EXPRESSED IN BONE MARROW, SIGNAL = 1.3; EXPRESSED IN BRAIN, SIGNAL = 1.3
agtgacagtggaatctggggtcattcacacatgccagaagcagcagtagcatggcggtgttcaggcatttgcagcagcaatggcagagctgccagggatttgtgctcatgccagcagcagtagtgcagtggaatgcacatgctctggtaggggaggggagaggaggtctacccacgtgtgtgcacaccagcaaagtggctgaggggtggccatgggtgagtacatgctagaaaagtggctcagaggggactgtggtggggggaaggtgtgggtggcctggtgcacttcagtgggggctgctctgctggagttctccagtggccaggtgcaggttgccagtgaaggtgttatgatgtgggctcacaagaagcaccttgattgggcatcgaaggctgcattgcaagagggcatgcccgtgctggagccttagaagaggccagcaaacaagaggatgct

SEQ ID NO: 10138 - DNA, 477 bp, Homo sapiens
  MAP TO AF186190.1; EXPRESSED IN FETAL LIVER, SIGNAL = 4.6; EXPRESSED IN ADULT LIVER, SIGNAL = 1.1; EXPRESSED IN BRAIN, SIGNAL = 0.99; EXPRESSED IN BONE MARROW, SIGNAL =   1
cttcacctccctcgtgatgcactgcaggggatgaggaggtcccttgtacacacagcccatggacccaacccagtcttcccattggggccagcgcagtggatttcctgggagaggatactgaggctcacagacaccaccttcccaatgaaatggatagatcagcctcacaaacaggtccccataccaagttcaggcccacccaccatacccaggatgcagctcactgcattctagaaggggacctgcattgctgatcccaaagtcaggcagcccccgtgtgacaatgaaaggggaacacaagctcacacgatgcttaccacgtataggcatagtgcaagcttcagcctcacagttagccctaacagaaggttggtgatgcagacgcacagacacacaggcacacgcatgcgcgtgaacacacatacacaccccacggtgcaggactttcggctgcctgctaaaagggaagaggggcag

SEQ ID NO: 10139 - DNA, 466 bp, Homo sapiens
  MAP TO AL118523.3; EXPRESSED IN FETAL LIVER, SIGNAL = 0.89; EXPRESSED IN ADULT LIVER, SIGNAL = 1.1; EXPRESSED IN PLACENTA, SIGNAL = 1.3; EXPRESSED IN HELA, SIGNAL = 1.6; EXPRESSED IN BONE MARROW, SIGNAL = 1.3; EXPRESSED IN BRAIN, SIGNAL = 1.2
tgatctagtcaaatacaacagcttgtaattgactgactgttttatgaagtattgttctgagaatttctcattgctatgccctccctgtctaagtcttggtttcatacttttacttgttaaaatcccatccatgctatcatatcatattcttcatggcattttctctgattcgtcgccagatgttaattctccattcctagaaactctgcagtacataaatgtatgcccttatcatattctttcttgtaatatgattgcctccacacacataatgaggcctcctctgtgtacctaccatgagaattccagtgtgaaatttcagttgaggttgtccaagattctatttaagcagaaaccctataagccttgtggaaatgatgatgatggtgatgatgatggtgatggtgacgatgctggtgatggtgatgatgatggagacagagagagagggagcgagagagaaagg

SEQ ID NO: 10140 - DNA, 488 bp, Homo sapiens
  MAP TO AC011425.1; EXPRESSED IN BT474, SIGNAL = 1.3; EXPRESSED IN HELA, SIGNAL = 1.9; EXPRESSED IN PLACENTA, SIGNAL = 1.1; EXPRESSED IN HBL100, SIGNAL = 3.1; EXPRESSED IN BRAIN, SIGNAL = 2.1
tggggatttttcccctttagaacatattttcctcaaatgatgacttttaaaccatttcacttaaaaacaaaacaaaaaaacacaaaatattctagagaaccactaaatctgtatgctgggaaggaaacagcctcaggaagggagtcaggtgggccttggcatcttcttggggcagaaagctggggagtgagcagggaggaaagcatcaggcttggtggcagctgagatatgccttttgtttggcagggtttgacactagcatcctgcccatctgcaaggactccctgggctggatgttcaacaagttggacatgaactatgacctcctgcttgacccttcagagatcaatgccatctacctggataagtacgagccctgtatcaagcctcttttcaactcgtgtgactccttcaaggatggcaagctttctaacaatgagtggtgctactgcttccagaagcctggaggtaaggtgggatggagggtt

SEQ ID NO: 10141 - DNA, 477 bp, Homo sapiens; identical to SEQ ID NO: 843
  MAP TO AP000181.1; EXPRESSED IN BT474, SIGNAL =   1; EXPRESSED IN HELA, SIGNAL = 1.5; EXPRESSED IN PLACENTA, SIGNAL = 1.3; EXPRESSED IN BRAIN, SIGNAL = 1.6

SEQ ID NO: 10142 - DNA, 458 bp, Homo sapiens
  MAP TO Z99716.4; EXPRESSED IN PLACENTA, SIGNAL = 1.2; EXPRESSED IN BRAIN, SIGNAL = 1.4; EXPRESSED IN BT474, SIGNAL = 1.1; EXPRESSED IN HBL100, SIGNAL = 1.6; EXPRESSED IN HELA, SIGNAL = 0.92
ttagtgccaagatggagcagcccctgggttagatgcacagatgtgggcttcagagcagtgaggtgcatttgaaagtgcccagcaaccagagaacctggcactggcccagattttacctctgacctgctctgtgttcttagttgagttctttctcctccaggcctcagtctctttgtctatgaaatgagggacctggactggatgatactaagatcccttccaggcccaactttgtatgattctgtagcaagagaaaaataccatggtttccatgtgacctctgccgtcctcctgatcacccctccgacccctcccaccttggctctgcagggctcccagagaccaggacggacgcagccatgtcagagctggtgcctgagcccaggcctaagccagcggtgcccatgaagcccatgagcatcaactccaacctgctgggctacatcggcatcgacacc

SEQ ID NO: 10143 - DNA, 446 bp, Homo sapiens; identical to SEQ ID NO: 3377
  MAP TO AL035448.28; EXPRESSED IN PLACENTA, SIGNAL = 2.2; EXPRESSED IN BRAIN, SIGNAL = 1.9; EXPRESSED IN BT474, SIGNAL = 3.7; EXPRESSED IN HBL100, SIGNAL = 3.1; EXPRESSED IN HELA, SIGNAL =  20

SEQ ID NO: 10144 - DNA, 469 bp, Homo sapiens
  MAP TO AC008116.8; EXPRESSED IN BRAIN, SIGNAL = 1.2; EXPRESSED IN BONE MARROW, SIGNAL = 1.4; EXPRESSED IN BT474, SIGNAL = 1.9; EXPRESSED IN ADULT LIVER, SIGNAL = 1.6; EXPRESSED IN HBL100, SIGNAL = 2.2; EXPRESSED IN HELA, SIGNAL = 3.6
cctttgccttagccacagtcactttccctttgactggtagaaccaccactgatttataatttgccaaatgcttcatgtacgaaagtgcccttggaacagccctttcaattctgttttttttttcccaggttgattccaaagatagttctcataactccacaaactctgaatttgcagctgaagctgagggtcagaatgatacaattgaggaacccaacaaggtccagaaaaggaagagggatagacttcgagaccagggctccacaatgatctacctgaaggctatccagggcatcctggggaaatcgatgccaaaaaggaagggagaggctgccactcgggcaaaaccaagcgcagcagagcatcccagccatggagaaggaccagccaggagtgaaggaccagccaagactgcagaaggagcagccaggagtgtcacagtcactgctgctcagaaggagaaagacgc

SEQ ID NO: 10145 - DNA, 475 bp, Homo sapiens
  MAP TO AL117343.1; EXPRESSED IN BONE MARROW, SIGNAL = 0.91; EXPRESSED IN BT474, SIGNAL = 1.4; EXPRESSED IN HBL100, SIGNAL = 1.2; EXPRESSED IN HELA, SIGNAL = 1.6; EXPRESSED IN LUNG, SIGNAL = 2.2; EXPRESSED IN BRAIN, SIGNAL = 1.2
cagctgatagaagaaacaagacctagtattggacagatcagtagggtagctctagttaacaacaatctattgtcaatttcaaaatagcaagaagagagtaatttgaatattcccagcataaaggaaagttaaatgtttaaggtgatagacatacataaaaatatcacatgcaccatgaaaatgtgtgcatctattatatatcaaataaatgaatgaattaaaaataggtccacccttaccttctgcgcacacgcagctctcttctcttgcttggctttcatctctgccagcagaccactgcccatcacctggaccccatacctccgccctgcctgtgggctgctcttgctgtcactccgttccaccttccctatttcttccccttgactctcttcaaaggagtcaggtgtttttatctcctctatccgttcagaattgccattgtgctcggcggcctttgtgtccttcctgggac

SEQ ID NO: 10146 - DNA, 463 bp, Homo sapiens
  MAP TO Z82188.2; EXPRESSED IN HELA, SIGNAL =   4; EXPRESSED IN PLACENTA, SIGNAL = 4.8; EXPRESSED IN HBL100, SIGNAL = 2.2; EXPRESSED IN BONE MARROW, SIGNAL = 1.8; EXPRESSED IN BRAIN, SIGNAL = 1.7; EXPRESSED IN ADULT LIVER, SIGNAL = 1.2; EXPRESSED IN BT474, SIGNAL =   3; EXPRESSED IN FETAL LIVER, SIGNAL =   1
cacctcattcaatatgcagcctgcagcccagacccgcactcctgaagccccttttcatttcccagagcactgatcaccatcgaacattccactccactaacttaggtgatgtgtgccttgctcacagcccatctccccaccgagaacgggtgctcaggcaggaggcatcttggtctggtttgttcacgctccgtcatcagtgtttggaacagaccaggctcacattggggctcaataactcaggatgaaagaggagtctggacaggtttccgccctgccctctactccctccacctcagctccctggccctccctgcccactaccaggccccacaggagggcactcacccttcaggatggtgatattaatgtagggtctgatctcaggcagggcgtgggggcggccggaggaagaggctgaggatacatgggcaggatccagggggtcctcagagtcacagca

SEQ ID NO: 10147 - DNA, 973 bp, Homo sapiens
  MAP TO AL049870.1; EXPRESSED IN BT474, SIGNAL = 1.6; EXPRESSED IN HELA, SIGNAL = 1.7; EXPRESSED IN HBL100, SIGNAL = 1.2; EXPRESSED IN BONE MARROW, SIGNAL = 0.96; EXPRESSED IN BRAIN, SIGNAL = 0.98; EXPRESSED IN ADULT LIVER, SIGNAL = 0.98
caatcacgtaagtattttaggaagaagaaaaaaaactaaaaagaagcaaagaaaagtaaaaaggaaaatcaaactatttttaaaatatagaaaatctgcacatttaaaaagcataaaatcaattagcatcattcatttaggaaagccttctatttacctatccaaacaggcaaagagtccagatttccctcctactgcacaaagtactttgggagcacagcgaggtcgtgtcatcaagactgtctgatgagagagtctatgttcaggcataaagtggtactttagggcttcattcaaaagatgtttacaagtgcgatcatcacgaataagatgatttgcttcatatagtctagtgagaaacttaacactcaacaatggtaatcgtacactgtttagtaactgtgctaagtatttctggcgttcttgtacatcatacttgatccaagactctaatgcataaaaaacagtctcttcggtagctacattcaaacagtcattggaaacaatttcatccaagtcagcatgtgtaagctcaaaaaactcttcagtctggcaaacagcttcaaaattctggcatatgtatttagtggctgccaaataaaggtcacggcaaccatatgtttctgcaaaacgagaaattccaatacaattaccaggatcaagttggctttcaagaaatgcacaacattctttcaggacaagttttatctggagtaggtttgctgctggcaggagagattcaactgtgtcctgagaaataaaaacagtccctgtataggcatactccacaatggcctggagagcagtttcatcaatgcattgaaactcaacctcactgttctctttttcagaaaggtttccagtgaacatagctttgaaatacgggctgacgctggcaagtaccactttgtgagcatgaattttaacatcacctactcgaagaatgatgtcacagagttcgtgatgttggcga

SEQ ID NO: 10148 - DNA, 963 bp, Homo sapiens
  MAP TO AC009962.1; EXPRESSED IN BONE MARROW, SIGNAL =   1; EXPRESSED IN BT474, SIGNAL = 2.2; EXPRESSED IN HBL100, SIGNAL = 4.2; EXPRESSED IN BRAIN, SIGNAL = 1.5; EXPRESSED IN LUNG, SIGNAL = 1.5; EXPRESSED IN ADULT LIVER, SIGNAL = 1.9; EXPRESSED IN FETAL LIVER, SIGNAL = 0.94; EXPRESSED IN PLACENTA, SIGNAL =   4; EXPRESSED IN HELA, SIGNAL =  11
tttattcaatgttgccattatgctttgtgcttatttctgattttttaaaaatacaaattctagtgcttagagtaaaaatcttgctccttcccacccagtgaatgtagagaaggtttaagtgttagatgaggaaaaaatagggttttataatctttgtgatctaagtgtagtttttggaattctaaacaataatatgcatttaatatatgtgtatgtatatatataaatataaacatatcattaatattgtttcttttggtaggccgttttcgtcaaattgaagtgcttactactgtggccaatgcgttttcttctttatattctcaagtctccgggacgcccctgcagagaattggaagtatgtcctcagtgacctctaacaaggagacagacccacctccacctttaactcgaagtaacactgcaaatcgtttaatgaaaacactctcaaaactgaatttatgtgttgataaaacagagaaaggagaaagtagtagtccttctccatcagctgaaaaaggaaagattctaaatgtttcagtgattgaagaaagtggcaataaaaacgatcaaaagtctcaaaaaattatgaagaagaaagagtcatcttctatgttggctacagttaaagaagaagtctctggtagttcagcagctgttacggagaatgctgatagtgatagaatttctgatgaagcaaatagtaattttaaccaaggaactgaaaatgaacaaagtaaagaaactcaaagtcatgagagtaaactgggtgaggaatctggtattgtagaatccaaattagatagtgatttcaacatatccagccacagtgagctggaaaatagcagtgagctgaaaagtgtccatatatccacacctgaaaaagagccttgtgcaccactgacaataccatccataagaaatataatgacacagcagaaggactccttcgaaatggaagag

SEQ ID NO: 10149 - DNA, 461 bp, Homo sapiens
  MAP TO AL035415.20; EXPRESSED IN ADULT LIVER, SIGNAL = 1.2; EXPRESSED IN FETAL LIVER, SIGNAL = 0.87; EXPRESSED IN HELA, SIGNAL =   2; EXPRESSED IN BONE MARROW, SIGNAL = 0.95; EXPRESSED IN BRAIN, SIGNAL = 0.92
gagtaaaaatccaatctgaaggctagtgatggtgcacaggacagatggtaaatgcttggcacatactccggcattcctcccttgctcgtgtcagacattgcaagttgatcacggtaactctttttctgccaacccgggttcagaattattttcagaacacagccttctagtcagccattatcaatcgaatagcatcgccatgcaaggtgagtttgttgtcatcggagtcacagaccaggctggaagttggccagtgatgttgtttcctggtcgtttggatttccagataagtgaaagttggatgcagacggtaaatgaattccatttggaagccctgtacctgcttgacagccagccaccagcttccaggaaggccctggaggatcttagggaggtgcatggtgattgactgaagaaggtttgcttgcattggagtgccaggtggtgaccctgaagaggac

SEQ ID NO: 10150 - DNA, 468 bp, Homo sapiens
  MAP TO AL118507.4; EXPRESSED IN BRAIN, SIGNAL = 1.3; EXPRESSED IN BONE MARROW, SIGNAL =   1; EXPRESSED IN ADULT LIVER, SIGNAL = 0.92
cagaggggacaatgcttatgaaagtatagcagagcagattgaaacaacctaactcttcttggcttagaactcacagagcatggagctcaacttttagtttccacggtggagtcaaacagagaatggccaagaaatggcagctgaagtagttgattgaatgaatgaatgtcctctgttcttcattcttccacgcaaccacccctttgccattgttcatccccaccctttgactttgagttggactttctttggccagcgtcccttgatgagtgtcagcatggtagttctgagcattgcgcgcctctgcttgctgtcttgcctctgctactgccacaagcagtacgtgccctggcaagaccatctgtccaagaagcataagtcacccacacctgagtacaccgtggcccactctagttgtgacagcctgaatcaggcgtgtccaacaaagtccggtctgaagacatgccc

SEQ ID NO: 10151 - DNA, 467 bp, Homo sapiens
  MAP TO AP000567.1; EXPRESSED IN ADULT LIVER, SIGNAL =   1; EXPRESSED IN BRAIN, SIGNAL = 1.4; EXPRESSED IN BONE MARROW, SIGNAL = 1.1
tgctataacacgaaaattatagcacccataaatacaatacatggaaaactattcaaatgcaattacagacaagattacgcagttacacatatgtaaatgagggatcacaaatatgtaaaggatgaccctgttgggcaccacacctattgctgagaggatataaatgcccttgtccaggatgcgacattaaaactcagaatcttcttaggtacactcagctgaactcccatctctcatcagcatgtcctacaactgctgctctagaaacttctcctcccgctcctttgggggctacctgtactacccaggctcctaccccagcagcctggtctacagcactgccctctgctctcccagcacctgccagctgcgttcctctctctacagggactgtcagaagacctgctgggagcccgccagctgccagaaatcctgctaccgccccaggacctccatcctctgctgtc

SEQ ID NO: 10152 - DNA, 444 bp, Homo sapiens
  MAP TO AL121657.1; EXPRESSED IN ADULT LIVER, SIGNAL = 1.7; EXPRESSED IN BRAIN, SIGNAL = 1.2
gactgtgcaccacacattcctcccatctctaaggaggcccagctacaagctatagctttaaggaggtttctcattattctcttgcaagttcgagtgtgtgcttcataccatgcacaatgaagggtggccattgatgcaaggctgcccggttaggagagagcccaacacctctcctctgtgcagaaccttccctgcagtttgccagcctatccctggcctcccctggactgagtggatgcttgaggggcatcataccagggtggtgaacttgtccacgcaggcattgcggatcttctccggggtggcagggctgtctagccggaagagttccttcacgttattacctgtgtgctgagctcgagctgcacggatggcatctttgatggcaaagaagatagaagcagccaggaagaggggcggctctccaacagcctgaacacagac

SEQ ID NO: 10153 - DNA, 466 bp, Homo sapiens
  MAP TO AL118496.4; EXPRESSED IN PLACENTA, SIGNAL = 0.94; EXPRESSED IN FETAL LIVER, SIGNAL = 1.1; EXPRESSED IN ADULT LIVER, SIGNAL = 0.91; EXPRESSED IN HELA, SIGNAL = 4.6; EXPRESSED IN HBL100, SIGNAL = 1.2; EXPRESSED IN BRAIN, SIGNAL = 0.98; EXPRESSED IN LUNG, SIGNAL = 1.1; EXPRESSED IN BT474, SIGNAL = 4.4
tcccactgctcctaccagtccagcaatgccagataatgcatcacaggcagaactcatgattacattagtaacaggattggcttctcttacatctagaacttctatgggcatcgataatgttggaggaatgatttggaaaactataggctggaaactcatatctgtttcattaactatgtatggagctttgtatctttatgaaagactgtcctggaccacccatgccaaggagagagcctttaaacagcagtttgtaaactatgcaactggaaaactgaagatgattgctagctccacaagtgcaaactgcagccaccaagtaaaacaacaaatggctaccacttttgctcgcctgtgccaacaagctgatattactcaaagacaactggaagaagaaattgctagattacccaaagaaatagatcagtgggagaaaatacaaaacaatttaaagctcttaagaaat

SEQ ID NO: 10154 - DNA, 463 bp, Homo sapiens
  MAP TO AL049762.19; EXPRESSED IN BRAIN, SIGNAL =   1; EXPRESSED IN LUNG, SIGNAL =  11; EXPRESSED IN ADULT LIVER, SIGNAL = 1.8
aattagcttcacagataccctctgtagataaactcctttaatttctttcttcctaacatacaaaaacattcccaaatatggtttgatttcccccaaaaaatgtaacaaaatggtgggaggatgggtgggtctgataacttgagaaatgcagggcaggtgtgattaatgaaaggtcctccctcttttttcctctcaggggagtgtttaaagacaccagcaaagacaaatttgactacattgcctacatggatgatatcgctgcctgcataggcacaaagcccagcatcccacttctgttcctcaaggatcccagactagcttgggaagttttctttggaccatgtactccttatcagtaccgcctcatgggccctggaaaatgggatggagccagaaatgccatcctgacccagtgggacagaacattgaaacctttaaaaactcgaattgtccctgattcctc

SEQ ID NO: 10155 - DNA, 464 bp, Homo sapiens
  MAP TO AL118513.3; EXPRESSED IN HBL100, SIGNAL = 2.2; EXPRESSED IN HELA, SIGNAL = 2.3; EXPRESSED IN BRAIN, SIGNAL = 0.95; EXPRESSED IN ADULT LIVER, SIGNAL = 1.5; EXPRESSED IN BT474, SIGNAL = 7.5
ggggacaagagcttcaacagttgagaaatttctgatcaagggacagtggttcttaatttaggcagatccaaggacccttttgagactctcatgaaagccatggaaatttctccctggggagaaaaaaatagccaaataccaaaagcaaaaagaaatctatatattcactggctcatcaacttccccacccaagaagctagtgaaaacgcccttgttttctgtagattaccagaaaataaactattaccttgaactgcttgttctcctcccgtagcctctgaacttcaccttgcagcctcttacattcttccataaccttcttaacttcggtgtcatccaaagaagaactcagagacttagacactattggtgtttctgtctttgatgcagttgtggatataattttatttatttctacatcatgctgttcaaaaacaaatgaaagcctaagtgtcaccgaccat

SEQ ID NO: 10156 - DNA, 483 bp, Homo sapiens
  MAP TO AC009966.2; EXPRESSED IN BRAIN, SIGNAL = 1.3; EXPRESSED IN BONE MARROW, SIGNAL = 1.3; EXPRESSED IN BT474, SIGNAL = 0.95; EXPRESSED IN ADULT LIVER, SIGNAL = 1.4
ctgtgcaaccttatccagccatcttgactcttctcctgcctcagtgtttggtggagagagaataaacatggccagatgggagacaaagaatggtctcaaccttgccctgatgcctgtgggggcctgggatgggaggggggcagcaggagcatggaggcagcgcaggcaggaagcaaatgcaagccacacagtcactttatctctttatgtttctttctctcagctccgagggtggtaataaaagatggctgcacggctctccccgggaaactgaacgggagccaaaccatcatgtggtgaacaaatgctgtgatcgctcaactgcagagctgctgctgcaccgtattaaaaaggtgacagcctctcctctgacccttgaaccatggaaatgggcagccaccagcccacccactcagaaagccccaatgctctgtcaccagcagaggcccaacacccactccgacgtcagaaaaagaaggtggc

SEQ ID NO: 10157 - DNA, 455 bp, Homo sapiens
  MAP TO AL035251.11; EXPRESSED IN BRAIN, SIGNAL = 1.3; EXPRESSED IN BONE MARROW, SIGNAL = 1.2
cccagaggagatacccttatgtaaagagcaggccatatcttttctaagtaatgatgtataaaacagctgtcttcttttattattactatttcacaaaagaaagaatagtttaatagtaaaaactgggagaaagatatggtctcagaattaagcttctcccaagaaaggagagggagcaatggtgcacaaatgtgaatatcatctatattgtggagaagatgttagagcaaaagagaaattgctaaagtattcaacagagaaatatcaaatgcccctaaataaaatgtatagattggaggaagaaattttcagtgtgtgcagaaacgatgatgatgatgatgaggatgaggatgatggaggtgatgatggtaaggacgatgatgatgaagatggggtggtgatgatgaaggtggacatggtgatgatgatggtgatgaagatggaaatggtggtgg

SEQ ID NO: 10158 - DNA, 1422 bp, Homo sapiens
  MAP TO AC007383.2; EXPRESSED IN HELA, SIGNAL = 1.3; EXPRESSED IN PLACENTA, SIGNAL =   1; EXPRESSED IN BONE MARROW, SIGNAL =   1; EXPRESSED IN BRAIN, SIGNAL = 0.93
aaaaattatgcggatccttcctaagtattttcagttttttaaaaaaaatttattgccacatcacaaggagtcaagaggatccttcctaagtttcatatccacacaaaaatgtgatgcctatatagtgaccagaaacaataactatgaaagtggagtcggctctctatcttggaaacaattttaatctgaaagcatcagtcagaggacccacataaaaagccatatactgatttgtggaaaagtaataacttattgagctgtttccaggagacacagattcttggtttctgagttcctgagctgttcactcactgtgccagaacagctgacttcccacagtgtgtacttgagtatctcagcaactgaggaccggaagcgagcttggaacttcttactaattaggacataaaggatggggttcaagcaactattgaggaatgccaaaccagtggagagggggattccagcctgcatcacatggtgggaatagctattgtggtgaatggtgagctcccaaatgctaaacaggtgataaggagtccagcaaaccacaaaggccacaaccacaaccagaattgtccagaaatgcctactggagatcaggatgcttcgcttcttcaccttgaagatgagacacaagtagcaaatactcattgttagcaaagggaagagatagccaatgataaatttcacccaagtcagaacatggtgcctgatcaaagtgaggtcaggatcatgcttctgaaaattgttatagcaaagagtatgattattgaactccacagtgtcccggaagtacagggcaggaccgccaattagagaagccaaaagccagatgaatataatgacaatcagagagttcttgagggttcgatgccgatgagataagacaggatggatcaagtggatatagtggtccaggctgatcactgtcaggaaaaaaacactggcaaacatgttcaactgggcagtgaaggaattggctttgcacagccagatgccaaagggccagtggaaattcatggccacataggagatgtacaggggcagaaagagaagaaaaatgaaatccgcaatggctagattgaggaaccacagagtggtgactgtcttcttccacttgaaccccgtgaaccaaatgacgatggcatttcctggaattcccagaacaaaagccaaacaatataacaccagggagacccagtgaacaactcccagctggactttctcctccaaatcagactccagagagtaatagtctaggtcataggaatagttttcaaattcttcaaataatgtttcctccaaatcttccatgaccttgctaaatggagaatgaagaaatctgtagaagcaaatttaaaaagaaagaaaaaattttaaaagaaaaataaaagttcagtgaatgataaggaacgtgaa

SEQ ID NO: 10159 - DNA, 475 bp, Homo sapiens
  MAP TO AC006452.2; EXPRESSED IN BRAIN, SIGNAL = 1.2; EXPRESSED IN BONE MARROW, SIGNAL = 1.3; EXPRESSED IN ADULT LIVER, SIGNAL = 1.3
tcgggcctggtttattattcttttaatgtactactgaattttatttgctaatattttaagatttttgtatcagtaaataaattagactggtctagacttgggttttattgcactatcttttttttgcagaatacatacaggatgattgcactatctttactaggtttgagtttcagtgttacttgaggtctggagaagaacttagatgcttccttctttatgttctgagaaaatctgaatccatctccaataataaatcctttctccagccagtgccaaagcccgggtccccgagcactcccatgacttccctgcccctgcccagtgcttcccacagcagcccttccacgccccttctggctcttcctccaaggaggtcccacacccccagggacaggttgattctgggaaactggaatccttcatctgtgtcatcactgggcaggcgagtcaacctggggaacagttattccca

SEQ ID NO: 10160 - DNA, 473 bp, Homo sapiens
  MAP TO AC006977.3; EXPRESSED IN FETAL LIVER, SIGNAL =   1; EXPRESSED IN ADULT LIVER, SIGNAL = 1.3; EXPRESSED IN HELA, SIGNAL = 1.2; EXPRESSED IN PLACENTA, SIGNAL = 1.6; EXPRESSED IN HBL100, SIGNAL = 1.4; EXPRESSED IN BONE MARROW, SIGNAL =   1; EXPRESSED IN BRAIN, SIGNAL =   1
gctgagtttgctgtgtcttccacttagaaacaacactgtggaccaggaggacacacagctcccagggccatcaccacacaaagtgaaggctggtgaatccgaggcttctagcccttgccgggccaggcccgcagcactccgctccccaacccagccgctgctttgtcgcaggaacctcagcagggcagggtgtttcctaggaggacatccgattcccagccattcctttcagtgaatcacctgagctcacattcttttttcttttatttttgaagctcttagccaatctgcttcgcgatgaaccagttttgcttgaagcagacaaacccgattgtcaggagacagtgatgatttcttcagtctctgaggaagagttttcattttccccaattcgcaaaaaaagtcaggtccctccctccctccctctccgtagaatattttccatgtgtgttaacaatggctgagcgtggtag

SEQ ID NO: 10161 - DNA, 466 bp, Homo sapiens
  MAP TO AC010133.1; EXPRESSED IN BONE MARROW, SIGNAL = 2.2; EXPRESSED IN LUNG, SIGNAL = 1.7; EXPRESSED IN ADULT LIVER, SIGNAL =   1; EXPRESSED IN BRAIN, SIGNAL =   1
tgtaggtcttccgccttttctatatcttccagatgagacacctcccatggtgctgacacagaatcctcagtcataggatccttgaagtgattcccacctgctttatattgagagagtgttaaacatgcaggaaaaggggagcacaggtctgatctgggaagttcagagaggtcaggccacagtggagttataggtgtgggtggtgggggtgccaaggaagaagtaagggattctgaagatttctttgagataaaagattagagagcttttgattaacatttctaagttgctttttcacctcttgtagggagatcacatggtcttcaccccttttgctactctccaggtaccactgaaaataacctttccattctggttgcttagtttctgtgcctgcattttccatactggttcaaaggtacactaatttgagaacctcaaaatatccccatttaggccattgtaa

SEQ ID NO: 10162 - DNA, 489 bp, Homo sapiens
  MAP TO AC004900.2; EXPRESSED IN BRAIN, SIGNAL = 1.1; EXPRESSED IN LUNG, SIGNAL = 4.3; EXPRESSED IN BT474, SIGNAL = 2.1; EXPRESSED IN ADULT LIVER, SIGNAL = 1.1; EXPRESSED IN HBL100, SIGNAL = 1.4; EXPRESSED IN HELA, SIGNAL = 4.1
gcaaccttttgacaatctctttgatctcctcaatgttaataaaactacccactgaaacacattctcctcgttcatagaagattttgaggctggtgtcagttgaagtccaccctatcacatctctacaggaacaattgaagaccacgctctttgtttcctgttcaatgagcacaatgaactcattggagatccctaaaaggcagtctagttccatggccttgttgtagtcttcagcccggactgcccatacaatggcccccatgctgctgagctcggctcctggatatggcttagacttttccttcttcttggaagccagagagatgaacggaaacttgccagaagggtcgataggggtgttggtgacattcttttctgccagatctttcaggtattcctggcgggtccgagttgccatggcccgaaacttctccgatttatgagcagcattttctgcattaatcactttcgccaaaaggaagtccctga

SEQ ID NO: 10163 - DNA, 452 bp, Homo sapiens
  MAP TO AC005998.3; EXPRESSED IN ADULT LIVER, SIGNAL = 1.4; EXPRESSED IN HELA, SIGNAL = 1.1; EXPRESSED IN BRAIN, SIGNAL = 1.1; EXPRESSED IN BONE MARROW, SIGNAL =   1; EXPRESSED IN LUNG, SIGNAL = 2.4
acattgtttccaacttggggctcctataacaatgttgctgtgaatattctatccacttctcttggtgcttatgtgtgcagttggcagtgaaattactggaaggtagggtatggacatactcagttttagtcaatagtgacagttttcaaaataactgtatgaattactctctgatcatcagcacatgtaagtttttattgtcattttaaaagggtttgggtagtaaaaggtgacaaacatttttcaacttccatatctttacatctaatatagattttatgacatgcccaaagaaaagaaaaagcttatcagtcagaaacacctgaatgtacatttacactgtgatatgctttggctctgtccccacccaaatctcacgttgagttgtaatccccataattgtgtcaagggtgagaccaggtggaggtaattgaattatgggtgtggttccc

SEQ ID NO: 10164 - DNA, 456 bp, Homo sapiens
  MAP TO AL022328.21; EXPRESSED IN BRAIN, SIGNAL = 1.1; EXPRESSED IN ADULT LIVER, SIGNAL =   1
caccatcgtttcttatttctctgtctctttaagtttttttcaggtagaagggtaaatctggtccttgttagtccaccttggccagacctggaagtttgtccttttttcacagatgtctgtggaagccaaattctgccttcccagaattaacgtggacaacctgaaaaagagcagggagggtggacaggagtgggcagtgcagggagggacaccgccagctggagccccactgcctcatgccaaaggccagggagtgtgctggagccccatggccctcgtgctgaaggccggggaacttactgaggcacctgcagactccggcgaggatcgccccacctggggggccatctgctgaactggagctgttggaactttcctgctccggagctgctactttccagagtgctgctgagctgttgctgactttataacatttgggtgttttccagcttctga

SEQ ID NO: 10165 - DNA, 440 bp, Homo sapiens
  MAP TO AL049822.17; EXPRESSED IN LUNG, SIGNAL = 5.2; EXPRESSED IN ADULT LIVER, SIGNAL = 0.96; EXPRESSED IN BRAIN, SIGNAL = 0.91
atttctgtgtgttctgcccgaggtttattggcctggggtttgtgagattttgtgtccctgcggaaagccttcctggatcttgagtctagagttttggtatttttggttttgttacgtggaatgtataaggaaagggaaaaagcgccgcaaatatgacaatggttgttacagtagtttctctagagtagtagttctcacgttcacttcaccctggaaggaccctccgtctgaaactgggcggaaatacctcccagattcttcccactcccctctctatttcagcttgggtaacttgtttcatcgaactccaccccagctgaaggagccaatgctgtcccaagagaaggatcgctatggggccctaactaacctcagtctctatgctgatgtgacccaggttagtagcctaaggcactgccacattacaggtcccacctgct

SEQ ID NO: 10166 - DNA, 454 bp, Homo sapiens
  MAP TO AL050317.9; EXPRESSED IN LUNG, SIGNAL = 3.4; EXPRESSED IN BRAIN, SIGNAL =   4
ggggatgctcctcttttatccaatatctctctggtgtcatttatttactcagcaaatgtttgctgaggacctactatgtattagagcctgagctgggcactgggatgacaaagttatgcttcctaccctcaaggtgctcactgttgaggaagtgagtcaagcaggcagacggtgacagtggagtcaggagtggttattaaaaaatgttgaggaagagcacctcacccagactgagggcatctgtggcgacttcctggaaaaggtgatgtctcaactgagtcccgaagacaagtgagagaggtggcagccagggaaggaagggcagtccatgcagaagaggcagcaggatggggtaagagctggtctcccttccaggatcagttttctccagggtagacgaggaagccgaggtttgcctggcagctgctcccagcgtcccattcatttgcagctc

SEQ ID NO: 10167 - DNA, 471 bp, Homo sapiens
  MAP TO AC007427.2; EXPRESSED IN BONE MARROW, SIGNAL =   1; EXPRESSED IN LUNG, SIGNAL = 8.7; EXPRESSED IN BRAIN, SIGNAL =   1
  unsure 94
  unsure 107
  unsure 123
  unsure 238
  unsure 310
  unsure 339
  unsure 367
  unsure 412
ttcagcatctacttggcaccaagcaccatgctaggcattagggattcagcagggaactaaacaaaaagcccagtcctcctggaacataccttcntgctggcagtgcntgagaatttaataagnacagtgtcagtgatggccccggcaagaagtgcctaggcccctaaactgtgctccatcagagtgggatccagggacggttgggtccaagattcattccgggctttgagggacttcntagtctgtctggagtggcaaaaggagcccagatgggaggaaagcagcatgtacctggcctggcctcacctgncttctcgtcatcacagtggctgccccttnctccgttcaagcagctgggctgccaccntgctctgctgccacctgccttctgctgtccacttgctgggttgcncatggcctcagatctggctgcctgggtggaccacactcaacagacagaagggcaccctt

SEQ ID NO: 10168 - DNA, 472 bp, Homo sapiens
  MAP TO AC009297.2; EXPRESSED IN FETAL LIVER, SIGNAL = 0.89; EXPRESSED IN ADULT LIVER, SIGNAL = 1.5; EXPRESSED IN LUNG, SIGNAL = 1.1; EXPRESSED IN BRAIN, SIGNAL =   1
aaggcaaatatagccactcttcctttttaagtcaaattctaaaagtgatcttcaaacactaactcagtcctttgatttccacatcccaaatgaatgttacattttctgtatattttaaggccagataacactttgagatcgatcctattctatttctaccattgagattaataaaatgtgtgtatcaaagtgaaaaaaaatgcacaagtctgaaaaaaaaaaacattgtattaagggattatattaccttcactggcaacctccttttattccaccagattatttctctaggcatttaaacttgctttagtatccattgccttagaaggagaagaaggatggggggaagaaggaggggaacagggagaggaaggagaaaggaaagtgggaggagaagagaaggtgaggaaaagggataggaggaggagaaagaaaaggagaaaaagaataggaagaaaaagaagcaagagga

SEQ ID NO: 10169 - DNA, 483 bp, Homo sapiens
  MAP TO AL031768.9; EXPRESSED IN BRAIN, SIGNAL = 1.3; EXPRESSED IN BONE MARROW, SIGNAL =   1; EXPRESSED IN ADULT LIVER, SIGNAL = 1.3
aatgaaggctaaggaagggggctcggatggcaaacccacaaaatgagaccctgaagagtcctggtccagcccccacatgcacttgagcaaaggcactcacagtctctgagcctcaccgatggcctggaaactcaggcttctgcccgcctgtgatgcgaagtcctcctcttctctgcgtccgccgccagtcgccccttttcctcggcaccctcttcgcttcggcatccatgagccctctctggtttcatcccgtcctgcatcccagtgactgtggcttttcccttctccatctgcctcttccaccctctcctcctctcaggccatgtcccctccttactggcctggaacctctcactcttcagggccaaacatgcccaggacagctgccacctctgggcactgtgggccagcgcagggcctggggcctccttggcatttgctgaatttaatcgagaagaaaacaaaggtatgtaccaagcgagc

SEQ ID NO: 10170 - DNA, 482 bp, Homo sapiens
  MAP TO AL050320.16; EXPRESSED IN BRAIN, SIGNAL = 1.2; EXPRESSED IN ADULT LIVER, SIGNAL =   1; EXPRESSED IN HBL100, SIGNAL = 0.9
aaaaatgagttaaaagaatggaaagtgtctttatgtagaaggtttactgacaaaaggtctagggaagagggtggttgagatgcagtagagggaaagggtatgggaggtgaggaggtccaagaactggggaggtcatctacatggatgttgaagtcaccaaaaaggacaacaggaggtcaatggtaaagaagactaagccagaagctgggcttttagatgaacggagaatgaccagaaactccacagagcagttggaacatccagcatcttgaaaggagcaggatttgtttgttcagtttttgtttttatttttcaggaggaaggggaagaaaaagtcaggagttagccatggaaccaagaagatccaggagaaggttgaggggatgttcagagaagtggaaaatgagagattgattatcatggaggaaaagcccgagaaggtccagtaaaaggtttgggaaggtgaaggaggacaggctgag

SEQ ID NO: 10171 - DNA, 468 bp, Homo sapiens
  MAP TO AL121654.1; EXPRESSED IN HBL100, SIGNAL = 0.98; EXPRESSED IN BONE MARROW, SIGNAL = 1.4; EXPRESSED IN BRAIN, SIGNAL = 1.4; EXPRESSED IN LUNG, SIGNAL = 0.91; EXPRESSED IN ADULT LIVER, SIGNAL = 1.8; EXPRESSED IN BT474, SIGNAL = 1.1; EXPRESSED IN FETAL LIVER, SIGNAL = 0.87
aaaaacagaaaatgagggtagatgaggacaagcaacttttctgaggtcacacatccagcaaggggctgagccaggcctgtgggactccacagctaggggcctttgcaggaactggagtgtccagggatttccagtgggctccaggtagtcagtggggcagagggatagggtgcagaggcaagtaaagtcagggggaggtgaggatgggcaagaggacctagaaacacccccagaccccctggcagccccagggcagcctccctggcccttaccaatctccgtgttccccacgaccagcttggcgtcagggtgctgagccttgaggtccagcagctccttgagggttgaggcctgtatccacgtcacacgctccccttcaaatcgcagctgcttccgaggagtgtctttcagcctctgggaaatgcagttttcttactacaatgtctccctcttcctactgtcattcct

SEQ ID NO: 10172 - DNA, 460 bp, Homo sapiens
  MAP TO AL109659.17; EXPRESSED IN BT474, SIGNAL = 0.99; EXPRESSED IN FETAL LIVER, SIGNAL = 1.4; EXPRESSED IN BONE MARROW, SIGNAL =   1; EXPRESSED IN LUNG, SIGNAL = 4.8; EXPRESSED IN BRAIN, SIGNAL = 1.2; EXPRESSED IN ADULT LIVER, SIGNAL = 1.4
taacatccggagttggttgggaataccttgggtgagctgcttgctaactttccatgcacttacacagtttacctttcatttcttaagtactttttcatctctcgacaaccctgttgatcaatttcaagataaagttaccagggaagaggtgttttttcctattattctgaaaggaggagtggtccagggttggcgaaggacttacttgaaatcatgtggagagctggagcttgaacccggtgctctggctgccagtccagggtccaacccagccacctctgttcagggtaacccagggcagggcagaggggagagggcacttcggaaggagggaaggaggggccggcgcacctgcccaccaccatcagctcctgctctgttgacttcctgcggaagcgctgccacacatcaatggtgaacagggtgctgctgctgttgaagatggaggtgagtgagctca

SEQ ID NO: 10173 - DNA, 444 bp, Homo sapiens
  MAP TO AL031651.32; EXPRESSED IN LUNG, SIGNAL =   1; EXPRESSED IN BRAIN, SIGNAL = 1.2; EXPRESSED IN BONE MARROW, SIGNAL = 1.1; EXPRESSED IN ADULT LIVER, SIGNAL = 0.9; EXPRESSED IN FETAL LIVER, SIGNAL = 1.5
gtctcaggctctgcttctggggaacccagtatccaccttggctgcttcactgatggatggacaagtagacagatggacagacagatagatgggtggatggataccaacaaattgctttcatctattccaattctcccatgggaaagatgaggaaactgaggcccaaggaggcttggtctagaacctaggcctccagggcattccctgcctcccctccacccaacagcagctgaagatgctctggggcccccagctccctccctaccacctcctgcttgaatcccctggaacctggcaggcatgctatcctggagcggaaaaccttgacacctagagccccaatcctgggctcaggccctgggggctcctcctccagggtggggcctctttctggggagcctgcagaagcttctggcaaggcagccttttcctcagtcagtgggc

SEQ ID NO: 10174 - DNA, 465 bp, Homo sapiens
  MAP TO AB020878.1; EXPRESSED IN HELA, SIGNAL = 0.91; EXPRESSED IN PLACENTA, SIGNAL =  33; EXPRESSED IN LUNG, SIGNAL = 1.5; EXPRESSED IN BRAIN, SIGNAL = 1.8
tcctctccttttcccctctgtctaagttctagtcagaccaatttctcctggggtccacaggaaactctaaggatgggaataaagctctttccccaagaactcattccctcatctcttctgcataggtcatcctgatgttgaacagccctgtaagtccagtgtccgcacctggagcccaaattcagctgtcaacccacacacggttcctccagcctgccctgagcctcaaggctgctacctcgagctggagttcctctaccccttggtccctgagtctctgaccatttgggtgacctttgtctccactgactgggactctagtggagctgtcaatgacatcaaactgttggctgtcagtgggaagaacatctccctgggtcctcagaatgtcttctgtgatgtcccactgaccatcagactctgggacgtgggcgaggaggtgtatggcatccaaatctacacgct

SEQ ID NO: 10175 - DNA, 363 bp, Homo sapiens
  MAP TO AC004852.2; EXPRESSED IN BRAIN, SIGNAL = 0.97; EXPRESSED IN FETAL LIVER, SIGNAL = 1.2
tttctggccaagatggataactagaagcagctagtgtgtgcagctctcatggagagaagggagagtagtgactaaacactagctcttcaactggaacatccagatggacacattgggattcatcaaggaaacaacttgattcacagagaatagagacgagtgagacaggacaactgcccatctgtgagtggcatggagccaggtttccccactgtggaaaaacagagtccccagggaccgacacttttgcaacctggggctcaggaggtcccccataagccctcacaacagaggcctgcagacctacatggagagctatgtgggcagagacgttgcttaatcacagacagagtccttggagcc

SEQ ID NO: 10176 - DNA, 446 bp, Homo sapiens
  MAP TO AC010092.1; EXPRESSED IN HELA, SIGNAL = 1.5; EXPRESSED IN PLACENTA, SIGNAL = 1.8; EXPRESSED IN HBL100, SIGNAL = 1.1; EXPRESSED IN BONE MARROW, SIGNAL =   1; EXPRESSED IN LUNG, SIGNAL = 2.1; EXPRESSED IN BRAIN, SIGNAL = 0.98; EXPRESSED IN ADULT LIVER, SIGNAL = 1.2; EXPRESSED IN BT474, SIGNAL = 2.9
tcttctcatagacatgcctgcagagagtatagaatacacaaagaactggatcaccccagaatagttaaactctatgattatttctccttggatacagatacgtaagtgaatattaaggttcaatttttaaggaaagatatgcttgctttctctttccccatcctgtgttgatgatataaatactctccatttccccattgtgattctgaattcttggatattacttatgtctaatttttttctcttctctgttgtaggttttgtacagtgttagaatactgtgaaggcaatgacttggatttctatctgaagcaacacaagttaatgtcagagaaagaagctcggtctattgtaatgcagattgtaaatgcactaagatatctcaatgagatcaaaccccctattatacattatgatcttaagccaggtaattatgaaatttgtct

SEQ ID NO: 10177 - DNA, 477 bp, Homo sapiens
  MAP TO AL109954.10; EXPRESSED IN BONE MARROW, SIGNAL = 0.94; EXPRESSED IN LUNG, SIGNAL = 1.5; EXPRESSED IN BRAIN, SIGNAL =   2; EXPRESSED IN BT474, SIGNAL =   1
gcccttagctgatgtttattatatgttagtggaattgaattgagtagcccaagacttggctactggtactgaatggacagatcagggaatagtggcttagtgcccagggacacttggaaagtctgctggagctgaggtggagaagctttcatcgctgtttgacttgattctggttatttttatatttgcccgaggtgcactggaccacatggatttttgcttctgactagaatgcttcttttcagtggaatataatttttctagggaggtccagtgcttacagcatgggctgctctgggggggacttgttcctctgtgtttaattgtagtgtcttcttcagctgcaggaaacgcattttgtcaggcagccaagctccacatgcagcttcagagcaaacatgactctgctaccagctttgtggatgctggaaatgcttacaaaaaggcagatccccaaggtaagacagccaggcatgt

SEQ ID NO: 10178 - DNA, 466 bp, Homo sapiens
  MAP TO AP000406.1; EXPRESSED IN PLACENTA, SIGNAL = 1.2; EXPRESSED IN BRAIN, SIGNAL = 1.1; EXPRESSED IN LUNG, SIGNAL = 2.9; EXPRESSED IN BT474, SIGNAL = 1.2; EXPRESSED IN FETAL LIVER, SIGNAL = 0.99
gaatccagtctgttttggttccaatgccaaagtcatctttctcttctaacatattttctttgtaccacgccttatatttttatgtttctatacttttgcattgtatatttttatttctcaaggtgtttccatctgatccatacacatcagctgtggtataatcgtcaagatttactggttaggcccacttacagatgcagaaattgaggcacagagggtgaagccgtggctatgacccttggaggttgaggcagactcagggctgacagccaagtctttgactctcagtaccccacgagacaagaggctggtacctttcttggcttgttttttggtggtcttgcggcttgtgttggaaacccctgggatggattttatttcactcttgctgacggggggtgggtgtaggaccagctttggtggcctggtgagacacacaggcagccccgctgcactcatgaggatc

SEQ ID NO: 10179 - DNA, 467 bp, Homo sapiens
  MAP TO AL096776.9; EXPRESSED IN BT474, SIGNAL = 2.6; EXPRESSED IN FETAL LIVER, SIGNAL = 1.2; EXPRESSED IN PLACENTA, SIGNAL = 2.3; EXPRESSED IN HBL100, SIGNAL = 1.3; EXPRESSED IN LUNG, SIGNAL = 0.93; EXPRESSED IN BRAIN, SIGNAL = 1.3
ccgcttgggtaaacagtaggatcgtttcaaggatgctggctcttccttctagaaccagcgggtcttctatcacctgccagaccctttcatgaaaaatgtgaaggtgatctttttactgatgagaattcatgaaaacataacttttgggtactttgcttggttgcaggatgaatttgacaagctgaggcctctctgctacaccaacacagacatcttcctgctctgcttcagtgtcgtgagcccctcatccttccagaacgtcagtgagaaatgggtgccggagattcgatgccactgtcccaaagcccccatcatcctagttggaacgcagtcggatctcagagaagatgtcaaagtcctcattgagttggacaaatgcaaagaaaagccagtgcctgaagaggcggctaagctgtgcgccgaggaaatcaaagccgcctcctacatcgagtgttcagccttgactc

SEQ ID NO: 10180 - DNA, 461 bp, Homo sapiens; identical to SEQ ID NO: 785
  MAP TO AP000103.1; EXPRESSED IN BONE MARROW, SIGNAL = 1.2; EXPRESSED IN FETAL LIVER, SIGNAL =  73; EXPRESSED IN ADULT LIVER, SIGNAL = 0.93; EXPRESSED IN BT474, SIGNAL =  36; EXPRESSED IN HBL100, SIGNAL = 1.1; EXPRESSED IN HELA, SIGNAL = 0.97; EXPRESSED IN BRAIN, SIGNAL = 1.4

SEQ ID NO: 10181 - DNA, 481 bp, Homo sapiens
  MAP TO AL050325.20; EXPRESSED IN PLACENTA, SIGNAL = 1.1; EXPRESSED IN BRAIN, SIGNAL = 2.1; EXPRESSED IN BONE MARROW, SIGNAL = 1.6; EXPRESSED IN BT474, SIGNAL = 1.7; EXPRESSED IN FETAL LIVER, SIGNAL = 1.8; EXPRESSED IN HBL100, SIGNAL =   1
gaaggcttggtccgttcagcccttggtcagggctgaatggatttctgttggatgaatgaagggacggcagttaaagagccaggttgccagctgacattgcccaatcttgctgtgtggcctcagacccacccctgcccctctttgtgcagctcagagacagccctctgtgctcagggaaggcctcttggatggacactccacctgctgattgtgacagaccccaaagccgccctctgccccctgcaaacctcccatgccccgtaccttcttcagccactgcgtgttgttctgcagtgcctgctccagctgtttcacctgctgggtgggcaacttccccaggtgcagtgggttggccagtgattctctctggagggtgttggagtccctggagacctcaggccccggagggcagggctcagacttgggcagcaagaaggtgtagctacagtggccgtgctggactacaagtgtctcgcagccc

SEQ ID NO: 10182 - DNA, 447 bp, Homo sapiens
  MAP TO AL109823.6; EXPRESSED IN HBL100, SIGNAL = 1.1; EXPRESSED IN HELA, SIGNAL = 2.2; EXPRESSED IN PLACENTA, SIGNAL = 0.99; EXPRESSED IN BRAIN, SIGNAL = 1.1; EXPRESSED IN BONE MARROW, SIGNAL = 0.9; EXPRESSED IN LUNG, SIGNAL = 2.8; EXPRESSED IN BT474, SIGNAL = 1.3
gagaacggcctatgcaagagttctgaaacaggaaaatgcttgccgcattgggggaactggaaaaggatgagttaatgggcaactgggaggccggggagccaggcagggactgaatcatgtgggggctgtgcaggccagggcagagagcttattctgtgtataaagtactcatgcctgttgttaatagccaaggtgatcattgtaacactttatttacagcccagtggttcccagacacaggtaatcttgggcacctccaagagcaaagtttaggagaagagggaagtcatttgaaccaaagaccagcagctcttgagaagagcaccaccacagctgaagacatcgaacagtttttgctgaactacctcaaagagaaggatgtggcagatggaaatgtctcggattttgataatgaagaaggtaacttgtttattttggcttagctgg

SEQ ID NO: 10183 - DNA, 449 bp, Homo sapiens
  MAP TO AL049593.4; EXPRESSED IN HBL100, SIGNAL = 0.98; EXPRESSED IN PLACENTA, SIGNAL = 0.96; EXPRESSED IN BRAIN, SIGNAL = 1.5; EXPRESSED IN BONE MARROW, SIGNAL = 1.2; EXPRESSED IN LUNG, SIGNAL = 1.7; EXPRESSED IN BT474, SIGNAL =   1
gcatgagagaaaccactcccataatccaatcaccctccccaaatatgtgaggattacaattcaacatgagatttgggtgaggacatagaaccaaaccatatcataacccattaagtgaaagggaaatcatatttctactcttgcttctattccattttgcttataattcaacatttgctgaagagcatttgtggctctttaaagtattctcttatgtctttgttatttgcatatcaaaattccttatggattgattgatttattgattttctagattatttcaggtcagtttctttctgataagaaagttgggacttacgtggaagtagatatgtttggtttgcctgtggatacaaggaggaaggcatttaagaccaaaacatcccaaggaaatgctgtgaatcctgtctgggaagaagaacctattgtgttcaaaaaggttggtcaca

SEQ ID NO: 10184 - DNA, 464 bp, Homo sapiens
  MAP TO Z97055.1; EXPRESSED IN BRAIN, SIGNAL =   1; EXPRESSED IN BONE MARROW, SIGNAL = 1.3; EXPRESSED IN BT474, SIGNAL = 1.2; EXPRESSED IN FETAL LIVER, SIGNAL =   2; EXPRESSED IN HBL100, SIGNAL = 0.98; EXPRESSED IN PLACENTA, SIGNAL = 1.3
acggagcactgcttctgtgctaagttcctgatgccaaggaaagtgagagagacatggccctggcctcaagaagctttcccggcagatggccgtgtatccgggatatgttaagggaggtgtaatattaaccaaaagtggagctctgagctcctacccttggcagagggcttcttggagtagatcatgcctggactgtgcccaagggcgtcttggagtagatcgtgcctggatcgcactgaatcagtgtaagctgggtcaagtcggggaatggcaacccaggcggagggaagtgcatacttgggacacggagggcacagacaagccgtggttctctggcagtgagatgggtgccaggccacaaactggatctgagagattatttccccatctgggaactgcatgtactatggattgtaaagggtcaacctgagagacagaaacagggaaaaggccctcaaccattc

SEQ ID NO: 10185 - DNA, 488 bp, Homo sapiens
  MAP TO AC009493.1; EXPRESSED IN PLACENTA, SIGNAL = 2.7; EXPRESSED IN BRAIN, SIGNAL =  16
atccaacaaaggcaaagcacacttaaaaggatggttgactcttttggaaaaggcaagtcatttttaggagaataccacacataatagaacactttaaactttgtacttatctcagtcttggctaattcagtagaaagtcaacaaatgtctagtacactaatttttatatcttcatatttcagttgcagttattctctttttctgtatatatctctgagatgcaaatctatatatgattatgttaatgagcttttttttaattcctaataatactttgtttttgtatgtcttactcctagggggattatggtggcccacttgtttgtgagcaacataaaatgagaatggttcttggtgtcattgttcctggtcgtggatgtgccattccaaatcgtcctggtatttttgtccgagtagcatattatgcaaaatggatacacaaaattattttaacatataaggtaccacagtcatagctgaagtaagtg

SEQ ID NO: 10186 - DNA, 463 bp, Homo sapiens
  MAP TO AC007970.3; EXPRESSED IN BT474, SIGNAL = 1.5; EXPRESSED IN PLACENTA, SIGNAL =   1; EXPRESSED IN HELA, SIGNAL = 1.3; EXPRESSED IN BRAIN, SIGNAL = 1.6
ggtggaaaattactgtgagccagtttatcattggcagtctgttttagtatttaactaaaaattttatttaaaacatgtataagttacaacggtattttataaattttgttaatgtgatgttgttgtttaagaatagaaaataaattgtttagtcttccaggtggaaaaatatgtcctaagtggaaaagaaatacctttctgtctttgatagcttatagtccagcaagctgggtgacccacattattttgatacttgttttcctttaatatctagctgactcctgagttctcacaacgcttgaccaataagattcgggagcttcttcagcaaatggagagaggcctgaaatcagcagaccctcgggatggcaccggttacactggctgggcaggtatgaagtgctgactgtgagctggcataagcattgtgcttaagagccagagcatttttccgagagctgtc

SEQ ID NO: 10187 - DNA, 450 bp, Homo sapiens
  MAP TO AF161326.1; EXPRESSED IN LUNG, SIGNAL = 2.6; EXPRESSED IN BRAIN, SIGNAL = 1.5; EXPRESSED IN BONE MARROW, SIGNAL = 1.2; EXPRESSED IN ADULT LIVER, SIGNAL = 1.2; EXPRESSED IN BT474, SIGNAL = 1.1; EXPRESSED IN HELA, SIGNAL = 1.3
atttaaggccaggcattcgtgacttcagagtgtaagaggcaacgaatgcagagaagtgggaagggccttaaatgctaagctaggaggcccatctagactttatcctgttggctatgggagccatagaaggcttttgagggagggagtggcaaggctgttgtatgcccaggagagctggcatggccatcccttcttcctacagaaaccatccacggagcagcccctgtacagcagcagcctgtggggcccggcggttgatggctgtgattgcgtggctgagggcctgtggctgccgcaactacacgtaggggactggctggtctttgacaacatgggcgcctacactgtgggcatgggttcccccttttgggggacccaggcctgccacatcacctatgccatgtcccgggtggcctggtaagagggccctgctggaaaatgggggtatgg

SEQ ID NO: 10188 - DNA, 1976 bp, Homo sapiens
  MAP TO AC005666.1; EXPRESSED IN HBL100, SIGNAL = 0.98; EXPRESSED IN HELA, SIGNAL = 1.3; EXPRESSED IN PLACENTA, SIGNAL = 4.9; EXPRESSED IN FETAL LIVER, SIGNAL = 1.1; EXPRESSED IN BT474, SIGNAL = 2.1; EXPRESSED IN BRAIN, SIGNAL = 1.4; EXPRESSED IN BONE MARROW, SIGNAL = 0.91
cgcatctgcttactgtttggcctcttgctacaacagccataggaaagcagccgccgaggggtggcctccccacttgggaatgaagtcaccatcccttggaagctgtcccagttggaccctagaaaagagaactcactgatctggctctgagaaattggcttccggaccaattccaatggcattttcccaaagcgaggattttccaataactgcccattcctattatttcctcttttaccaatgtcttcctccccatgggtcagatccggcacagaactcagttgttcctggtgggagatacttgccacagaccctgagggatcttggttgaggaagtcagtgcttgggtctagaggagtttggcaggcagcactcggtgggttgcaaacggtgctgaggctgtgatcaagaacacacttggagggcacacctagcatggagtctggctgggcctgttggggcgtacctgtaggagagttctgggaagactcaggaaaattacaaactccatcacacttgttagaaatgaccttggagagtgcactgacagcttctgtttcaggacaatgttcaggtggctcccctatgccatctaaagtcctacccagctcatcctgggcagaagggtctggagctggtcccttagtctcttctaggactttgatctcaggatcagaggtgttgctcttcatttcccgaggcactgcggtattaagcagtttgtaacttggagaacagcttttgtgactcttgaaaggtttattgctcaagtagtctttctggctgctgggcagaggaggaggaagacccacttctcctacagtttgctgaggccctcctaccccagagtccacaaagcttgtctctgatccctcaggattgctgtgccagggctccaggcctaccctgacctcctgacagtggttattcaggttagggtcactggatgtacgagtcagggggctgcttgtgtcacaggcagaaagaagatcatccatggatctggttttaggtaatctggaaagacaaatataacacctccaggtcaggagatgggcacttgcaatacaatatatggaactgaatcaatggagcaatatcaaagccagagtttagaaataatgacacttaagaacacttaagtttagaaataaggacccttaagatcacaaataaccaatgttcactgaaagtttactctgtaaaaaaagcatgagacatggaccgtgtcctccggaacccaaaaatctatcctcagcttttgtcagcactcaacctaccagtctccctgggcaatctcaaccactacagtggtttcagctgccttctatgccaatgccttctgaatctactgttccagctaggactatacctgagactcaaacccaatatcccactgcctccatcacagtaaaacagaaagaagatgggttttggagctagacaatattggctctgacgctaattagctacatgactacaaataagtaaattaacctctcagatacttggtttctccctttatacaatgatgataataaatcataccttgtagagatgctatgagaattcaaaatacaggcaaccaaccacaaacataataaccacaaactttattaagacaacacaactccctcaacactgctcttgataaccacttagcagcagtgtgctcctctgcttcccaaggccccatgaaacttcccctagtatatagcactcagagttctagaggcattcatatataccagataggttaagggacattttcaagagtgaccatcctgattattaatgcagttcaaagtccttagagcaatgaaaacttgagtgaaattcaccagggaaacagtagaggcttcactggcctcctatttttagatggctcagtcagttcagcctatgcggaaaaattccccaaaggcagttacaacgcagcttattttaagtaatcggtttttgaaacttaaaacaaa

SEQ ID NO: 10189 - DNA, 1992 bp, Homo sapiens
  MAP TO AC010127.3; EXPRESSED IN BRAIN, SIGNAL = 2.6; EXPRESSED IN HBL100, SIGNAL = 1.4
tctgactagccattgtgcatcttatcttcagcagtgtcagctggtagtgagaacagtaacctcctgtcaaggtcatctcccctttacacagagtcacagtttgctgacaaggggtcactgtcttattgtaggcactgaccttaaggagatttgtgtaaaaacagtcagtttggcattgacctcctaaaggagtcctgttgataaaaatacatcaccttcacaggctgtaaacaatttgtcacccaattatttttatttattttcatttatttccctttggctttttcatctttgccttcttgctcatgtttttccacaattggctttgtcacccggtcataggaaggtggacaagctgcagtggacatggtcagatcagttttttctgtaatagagttttcatttattctgtcaattatcatgtcttcttttataagaagattagccccacctttgattttgtttttattgtacgtaaaggaagcttgttttacagttcgctttaaaaggtggcgtctgtaagcacgctgaataatgacagcagatacttcctcttgttttcgttttaaagtagtagtgattggctgataggagaccttggaaggattggaagccatgaatcgctcttccatctgtattcgtagagcatccatctctccactctctcctagaacccgctttgtaaaagcaaataagatatcaagacagtggatccggtcaccactcaccatgggcaaatccatggcaatgagctggagtttgtttggttgtggcagattgagaggcggttcaagcgcagctgcaaactgagataatttttcaaattccatgaactgagttgcatcgggatcaaacttctcccaaacctcatagaacatctcaaagtcatcctcactcagaggctctgcactttcttcagtagcaacactgaagttctccaggatgaccgcgatgtacatgttcaccacaaccaggaaggatatgatgatgtaactgacaaaaaagaaaattccaacagatgggttcccacagtctcccttaactgagcttccagggttaactttattagggtcacagtcgggtggcttactgttgagaatgggtgctagcaatccatcccagccagcagaggttgtaatttggaataggcagatcatgctgttgccaaaggtctcaaagttgaacatgtcatcgatcccaacttccctcttaacataggcaaagttggacatcccaaagatggcgtagatgaacatgactaggaagagtaggaggccgatgttaaacaacgcaggaagggacatcatcaaagcaaagagcagcgtgcggatcccctttgctcctttgatcagacgtaggattcggccaatcctagcaagacggatcactcggaacagggtaggggacacgaaatacttttctatcagctcggcaagaaacatacctatgaataaacaatgagaataccaaccagtgaagaaatcatgcgttaaaataaacatatgtttcttctaaagctccaaggtaaggttcagagtcctgaacccagttatattaaatatgacaactatatataatatatatataattgtacataatatattataaatcttaattttgaaattcagcaataatttcaattataaggattatagtacttttttttatctttaagagatgtttataaactacttttagtttatgtaaagtcccaagtcagaatttaaaaagaaaataagttaaaaatgcacatttggccgaacagtagcagcccaacagtataggtacaagtttatatgtatacagtgactttttctgaaattgccatattctaaattctctatttactccttttccatctgaaagtattggtagcttttgatgctactttcatctccccatgatcttggtacttacttaaattccactctaatatttttatatactcatttatgtatgttctggtgcatttctgaaaggatcccaggttga

SEQ ID NO: 10190 - DNA, 1974 bp, Homo sapiens
  MAP TO AC006213.1; EXPRESSED IN BRAIN, SIGNAL =   1; EXPRESSED IN PLACENTA, SIGNAL = 1.3; EXPRESSED IN ADULT LIVER, SIGNAL = 1.1; EXPRESSED IN FETAL LIVER, SIGNAL =   1; EXPRESSED IN BT474, SIGNAL = 1.4; EXPRESSED IN LUNG, SIGNAL = 1.3; EXPRESSED IN HELA, SIGNAL = 1.2; EXPRESSED IN HBL100, SIGNAL = 1.4
ccatctgaaggtcttcccacattctttacaattatatggtttctctcctgtgtggaccatctgatgcttacaaaaatctcgcctacaaatgaagccttttccacattgctcacatttgtatggcttctcttctatgtggaccatggaatgactattaagtgctgatctctgacgaaagttcttgccacatgtatcacatctgaatgctttttctcctgtgtgaaccatggaatgcctattaagtcttgatctaacacggaagctcttaccacatatatcacatttgaatggcttctccccagtatggattctctgatgttcttgaagctgtgaatcatgaatgaaggctttcccacattcctcacaattataaggtttctctcctgtgtgcaatttgcaatgaacattaagtgctgatctactatggaagcctttcccacattgcccacatttgaatggtttctctccagtatggactctctgatgagtttgcagatgtgagctctgattaaattccttaccacacacatcacacttatagcatttttctcccatatggactctctgatgaatatgaagggctgggctgtaacagaagctttttccacactcaccacatgtatgagatttctctcctgagtgtgattgttgatgaagatcaaagacagaaacatcactgaaggactgtttacattcattacaacggtaaggtttctgttgcacgtgacttatagatagtcttgcctcaatctggcaggggacatcaccttctttgaagaactgagagctgttccttatggagttttgagacctggttaggtcacttgcaatttgttcccatatttgctgacaggaccactcttcatgtggtcctgcttctggaacagtctccatctcaatttggatcttgcctcctaaaaagacacagaattaatatatgtgggcaagtgaagccctattcaatgttttcaagatttcacacttaggacatggcattaaactttaatgaaaacaggaaacattaagttcatgttttccgagtgcactatggtctttggttttcaagagaacaatttagaaccacatcacatctcatatgtaaaatcctggtagaaataaaagactgaattaaataattaataacatacatacacttaacccgttactaattctggtaaatttcctagtctaaaatcttgtatgataaattattaaactaataaaatatgaacatgaataatgaagccaaaggaactttaaagaaggaaggcagttgcaataagttatgaaagaagtttggcaatttagaccagggtgatggaaataggcatggacagaagtaaaacagatggaagagtcatgtacaaggatgcacagttacttggttcttacctgaattcccttctctttggcttgttgtcttcatcttccaaaacttttccttccctaagaagtggaaagtatcttggtggaatggttgattccctgtgaacacacagtgacatgcttaattccaacccattgtaggtaatatctagggaaaatttactggaaatttaggttcccaatgcatactcaaacttggaatacaaagccattcctggggcctaacattctgttacagagggtgcctgtcctcacctactgagagcaggttcctgaagttctctagcatcacatctcggtacagcttcctctgggcagggtccagcagccccagctcctcctcagtgaagaccacagccacatccttgaatgtcactgcctcctaaaatatccaacatacaaaacctaaatcttatgaccaatgattattcaaagaagggtggcactaagtaggcaaaggggacaggtgtggtaagttgtcctagatcttgagggatgtaggtcaacatacagatttcccactcattctgcctatatcctgacaatgacacacgcagattttcatgagcttcatcagaagtgcaatga

SEQ ID NO: 10191 - DNA, 389 bp, Homo sapiens
  MAP TO AL109913.5; EXPRESSED IN HBL100, SIGNAL = 1.1; EXPRESSED IN PLACENTA, SIGNAL = 1.1; EXPRESSED IN ADULT LIVER, SIGNAL = 0.96; EXPRESSED IN BT474, SIGNAL =   1; EXPRESSED IN FETAL LIVER, SIGNAL = 1.5; EXPRESSED IN BRAIN, SIGNAL = 1.1
tgcaagactgttcctcaacctctgaaattctttcttctgcttggtctagactattaataaagctttcatttgtgttttgaaattccttaagtcaatttttcaattccaaatgctctgactgatttatcttcaagatgtttatctctttattttctgaattgctttataagtttctttgtgttggttttcaaccttttcctggatcttattaagcttccttgtaatccatgctttattttttatctgtcatttccaattttccattttgattaggaaccattgctggggagttagtgtgattatttggtgatgtcacgacattcagatttttcatggtgccggaattcttacactggtttcttcttatctggggacactggcacttctaa

SEQ ID NO: 10192 - DNA, 418 bp, Homo sapiens
  MAP TO AP000072.1; EXPRESSED IN BONE MARROW, SIGNAL =   1; EXPRESSED IN ADULT LIVER, SIGNAL = 1.3; EXPRESSED IN BRAIN, SIGNAL = 1.2
ctgagatgatgccttgttgctacatcctctggaagtgagaaatgctgtataaccttatatggcagaaagcaggaggacaagagagccaaacactgaatgaagcttcttttgtaagagccttcttctcattcacgagggaggagccggcatggcctaatcacctcttaaaggcctcccacctcttaatacaaccacattggcaacctctgaattttggaggggacacattcaaaccacggcagctgttcttgataatcattaatcatcaaggcatacattagctggcagagatgaatgctgtgaggtgggaagaggaggcactcattcagcaactcaacaaatatttacagagagcctactatgggctggccccactctttgttccggaaatatctcagaaagcaaaacagatggacca

SEQ ID NO: 10193 - DNA, 368 bp, Homo sapiens
  MAP TO AP000078.1; EXPRESSED IN BT474, SIGNAL = 1.2; EXPRESSED IN FETAL LIVER, SIGNAL =   1; EXPRESSED IN BRAIN, SIGNAL = 1.1; EXPRESSED IN BONE MARROW, SIGNAL = 1.1; EXPRESSED IN LUNG, SIGNAL =   1; EXPRESSED IN HBL100, SIGNAL = 1.1; EXPRESSED IN PLACENTA, SIGNAL = 0.9; EXPRESSED IN ADULT LIVER, SIGNAL = 1.2
tttggggaagcagaaaaggaggctgcggagtgggacatacagtaacaatataggagagaggacaaaagcaccgatagtgcagaatgctcttaaaaataatggggtcattgatctcaagtcacatgggtccaaccatttgcatgaaataccattgtagtgtgattctatcatgctcattataaagtgacaagcctttgagctgtgaaagcccatcagatgtgtccatcagaattgtgccatcccgggctaagtgaataactgggtgttggatgaagacctcatctaccacgtgacctcccatctgggagcctgccactgcatcaggctctacacaggtccttatatcatctctccctgttccactgtcc

SEQ ID NO: 10194 - DNA, 413 bp, Homo sapiens
  MAP TO AC007881.2; EXPRESSED IN HELA, SIGNAL = 0.96; EXPRESSED IN HBL100, SIGNAL = 1.1; EXPRESSED IN BT474, SIGNAL = 0.99; EXPRESSED IN LUNG, SIGNAL = 1.1; EXPRESSED IN BONE MARROW, SIGNAL =   1; EXPRESSED IN BRAIN, SIGNAL = 0.96
gcttatatgttgttgggggccagaatctatacttatacttcattcaaattttattttacaaaagagttgggttttttttatttttattaagagtgctgtgaaattattacctgtaattctaaatctcacttaattcctcccaataggattcaagagggattggcatcaaagttcacttctttaacaaaagtgctttatgactttaataaaatattagagaatggtaggatccatggaagccccttgcaaaaacttgtgatagaaaattttgatgatgagcagatttggcaacaactggaattgcaaaatgaaccaattttacaatactttcagaatgcagttagtgaaacaattaatgatgaagatatcagtcttctcccagagagtgaagaacaggaacgtgaagaggatgg

SEQ ID NO: 10195 - DNA, 1962 bp, Homo sapiens
  MAP TO AC005409.1; EXPRESSED IN BT474, SIGNAL = 1.5; EXPRESSED IN BRAIN, SIGNAL = 2.4; EXPRESSED IN LUNG, SIGNAL = 1.4; EXPRESSED IN PLACENTA, SIGNAL = 0.98; EXPRESSED IN HBL100, SIGNAL = 0.93; EXPRESSED IN HELA, SIGNAL = 1.4
cccctggctaaatcccttactcattcacacttgggctgtttcctaaactacaaaatggggacagcaataataaataccttcatatgacattttttattattagggttattgggtaaattaaatgaaaccatgtaagaaaagcatttagttccatggccggcacagggaagtgctgaataaatggtagctataatgatattatcatgagattatttactcttcctgagcatgagaaagaatgaggctggatgttacttacgtcgagaagatcttggaaatacttttttttctcccatggcaaaaagcccaagtaactatctgtgtaatgctgcagctttcttccaagtaacacttcagtaacgcctatgtgattttcagcattttcctccattctactgttctctttttctttccctgtgattttcttttcttttgtcatctggctttccagtggaacaatcagagatgggggcttttcttttgtcacatttccgcctatggttttttgggtgtgagtttccactctaaatcttgctgtggtctccaagtccaggggtggattctgaccctggtcatgaccattcacttttacactcactgcaggaaaagtcaacctctgcaatctttcagacactcctaagctgtttggcaagatgcttttatgaacctgtttttcctgtggagccaccaaactgtcatttgtttcatctgttattatagcttgattttttattttagcatgctgtgagttcatcagaaatgatctcagcaaggctgacttggacaaattgtatcctttcaaagtgatgtctccatgttccagttgcaaatccaaggtattgagactcaactgggcgtcttttggaaggagtgaaatatttaccaggggaattttcacctcttcctgggctctccttgttgagttaacatcatgtctcttaaacttcgggaagcgtttttctttgggaatatcctcaaaaaggatttccgcctctggaagaagtgttatgggactaactaaattttcgtaacccttctgggctgtagaattcagttttggtccctcccttgtgtccacctccactgttatctgcattttgaactcttcatcgtttgtattttgaaacgtgagattaaaatgtattgtggtggcattcattccactgtgcattatgaggtggatggttttccacttgttggcaatagaagcatgtcgaattattggattgtcactataggcaccttcaactcctcttttggctacttctgcaaagctgaaataaggcaggcattcaccttttggaataatatagtgagtctggtttgggagaaggatcactttatacaattcatgaaaatgatctacaggaaaaaacagaaacatgattttttttttaactgggcatttttcctctgttttcctttaattctttgagtctgagttttcactttcttttaaaaaaaataatagggaatgcatcatgaatttgcatgtcgtccttgtgcaggggccatgctaatgcctaaactgttctaattttagtatatgtgctgctgaagtaggcactgagttttcactttctaagagtgactttaatttcaaaataatcagatatcctaatacaacagttactggtatagggcttatttcactatctgaggcagtcacaataattaccatgaaatagtgatcctgactcactatagagatatggcatggttcttaacaataaattacaataatcaatttccatctttttatccatttgaaaaaaactttctgccaaaacaaactccattaatacgctatcaacaaaatccagtgtttgaaccatctttatttaatgaattattgatatccttttttgtttccaaattaaaacttcaccacatattttcagctaaggtaaatctgcttggtccaaacaaaacaaaacaaaacaaaacaccagactgcaacaa

SEQ ID NO: 10196 - DNA, 456 bp, Homo sapiens
  MAP TO AC010872.3; EXPRESSED IN LUNG, SIGNAL = 1.1; EXPRESSED IN BRAIN, SIGNAL = 1.2; EXPRESSED IN BONE MARROW, SIGNAL = 0.92; EXPRESSED IN HBL100, SIGNAL = 1.3; EXPRESSED IN HELA, SIGNAL =   1; EXPRESSED IN PLACENTA, SIGNAL = 1.3; EXPRESSED IN ADULT LIVER, SIGNAL = 1.6; EXPRESSED IN BT474, SIGNAL = 0.98; EXPRESSED IN FETAL LIVER, SIGNAL = 1.2
tgcgcttattcccatctttagagtgaggaaactaatgcataagaaagtcaagtgacttgctcaaaatcacatgactaataagtgcctaagtagggctcaagcccaggccagctagtttcagatgccacagttctgaaccattgtgctgcaccactgctttcacagagactgcagctgctgaagtcaaataatatacagagacaaatctccaaatttaaaaccttttatttgggaagcaagaattccaattcaaggcaaacacgcagactccctggtcttccctaggtctgaagaacaaaaagaggattgggagttttatcagaaagagaaatatcacatactgttttgaaagaaaactctttggcactaaagaagcttttgggagctggcaagctctgactggtgagtgacagtggtaggtaaaattagtcttagaggcaggttgttttagcagct

SEQ ID NO: 10197 - DNA, 466 bp, Homo sapiens
  MAP TO AC007949.1; EXPRESSED IN BONE MARROW, SIGNAL = 1.2; EXPRESSED IN LUNG, SIGNAL = 0.8; EXPRESSED IN HELA, SIGNAL = 1.1; EXPRESSED IN BRAIN, SIGNAL = 0.78; EXPRESSED IN BT474, SIGNAL = 1.4; EXPRESSED IN HBL100, SIGNAL = 1.1; EXPRESSED IN FETAL LIVER, SIGNAL = 0.76
  unsure 63
  unsure 143
  unsure 365
ttctctagtttgaacttgtggggaacatttatatgcatagagtatccagtacctatcgttgtngcttgctaatggtgattcttcatagaatgaatgtaacttgctgtttccatttgcaaaccaattttaaacatgcatatttngacttttaatgcatttgtatgtaatatatctatttctaaaatattccttgaaacaagctttaatgcatctcataattatattgatctttttgtgtgtgcagggagtgacattaactgatcttcaagaagctgagaaaacaataggaagaagtcgttctacccgaaccagagaacaagaaaatgaagaaaaagaaaaagaggaaaaagagaaacaagataaangagaaacaagaagaaaagaaggagtcagaaacatctagagaagatgaatataaacaaaagtactccagaacgtatgatgaggtaacagtatatcaaaagca

SEQ ID NO: 10198 - DNA, 472 bp, Homo sapiens
  MAP TO AL034371.16; EXPRESSED IN FETAL LIVER, SIGNAL = 0.66; EXPRESSED IN LUNG, SIGNAL = 0.77; EXPRESSED IN ADULT LIVER, SIGNAL = 0.65; EXPRESSED IN BRAIN, SIGNAL =   1; EXPRESSED IN PLACENTA, SIGNAL = 0.84; EXPRESSED IN BT474, SIGNAL = 0.93; EXPRESSED IN BONE MARROW, SIGNAL = 0.68; EXPRESSED IN HBL100, SIGNAL = 1.4; EXPRESSED IN HELA, SIGNAL = 0.75
tgggtaccaggaaaggtttgatggcatctttatctggattttttcccatttcttccacaatcccttaagtctaggcattgactagagcctgttgtgatagctgccatgcagattgctctttattaaagctgcagttattcagttcctccagagtgtagtaaattctgaacgactcattctaaagtgaccctgtggagctgatatgtacctgatgcacagtagtaacttgtttccacacaattccaggacattagcttattgccagtgggtggacaatctcaatgagacccggaagatgctctctcttagtggtggtggtcccttcagcaacctgctgaggtgggttgtgtgccacataacgaaaggaattgtgaaacgcgagatgcacggccacggcattggccgcttctccgaggaagagatttacatgctgatggagaaggacatgcggtctttagcagggcttttgggt

SEQ ID NO: 10199 - DNA, 437 bp, Homo sapiens
  MAP TO AF007544.1; EXPRESSED IN BRAIN, SIGNAL = 0.98; EXPRESSED IN ADULT LIVER, SIGNAL = 0.97; EXPRESSED IN FETAL LIVER, SIGNAL = 0.97
ggtaggaaatagcaaatgctcactaccactaataagaacatttctaaatctgatgttctgaggatttttagagcttatagtagcaaaaagaaaagggaaattctatccgagatgtcctttgttgtaggcctaatgagaaaaggttgaagataaagttctggtactcatttaagtgtaatattgaaaattgatattaccgaatctggaacaaccaatttaaaataaggaaagaaagacactgtgttttctaggttaaaaatgcccagctggcaggggccaaaggagtcattctctactccgaccctgctgactactttgctcctggggtgaagtcctatccagacggttggaatcttcctggaggtggtgtccagcgtggaaatatcctaaatctgaatggtgcaggagaccctctcacaccaggttacccagcaaat

SEQ ID NO: 10200 - DNA, 1850 bp, Homo sapiens
  MAP TO AC007228.1; EXPRESSED IN BRAIN, SIGNAL = 1.1; EXPRESSED IN BT474, SIGNAL = 1.1
tttggcagattcctttttcctagcacacgaaaaaggaaatatgtgttttcttggtatctttcaggccagcgatctgtacatgagacccaggaattatttccaaagcaagattcatatgctgaaggggtaacagacagaacctcaaacactaaacttgattgttccagtttcagagaaaattgggattctgactatgtgttcggaaggaagcttgcagtaggtcaagagacacaattcaggcaagagccaattactcataacaaaaccctctctaaggaaagagaacgtacatataacaaatctggaagatggttctatttggacgattcagaagagaaagttcataatcgtgattcaattaaaaattttcaaaaaagttcagtggtaataaaacaaacaggcatctatgcaggaaaaaagcttttcaagtgtaatgaatgtaagaaaacttttacccagagctcatctcttactgttcatcagagaattcacactggagagaaaccttataaatgtaatgaatgtgggaaggcctttagtgacggctcatcctttgcccgacaccagagatgtcacactggcaagaagccctatgagtgcattgagtgtgggaaagctttcatacagaacacatcccttatccgtcactggagatactatcatactggggagaaaccctttgattgcatcgattgtgggaaagccttcagtgaccacatagggcttaatcaacacaggagaattcatactggagagaaaccttacaaatgtgatgtatgtcacaaatccttcaggtatggttcctcccttactgtacatcaaaggattcataccggagaaaaaccatatgaatgtgatgtttgcagaaaagccttcagccatcatgcatcactcactcaacatcaaagagtacattctggagaaaagccttttaagtgtaaagagtgcggaaaagcttttaggcagaatatacaccttgccagtcatttaaggattcatactggggagaagccttttgaatgtgcggagtgtggaaaatccttcagcatcagttctcagcttgccactcatcagagaatccatactggagagaagccctatgaatgtaaggtttgtagtaaagcgttcacccagaaggctcaccttgcacagcatcagaaaacccatacaggagagaaaccatatgagtgcaaggaatgcggtaaagccttcagccagaccacacacctcattcaacatcagagagttcacactggtgagaaaccctataaatgtatggaatgtgggaaggcctttggtgataactcatcctgtactcaacatcaaagactgcacactggccaaagaccttatgaatgtattgagtgtggaaaggcattcaagacaaaatcctcccttatttgtcatcgcagaagtcatactggagaaaaaccttatgaatgcagtgtgtgtggcaaagcctttagtcatcgtcaatcccttagtgtacatcagagaatccattctggaaagaaaccatatgaatgtaaggaatgtaggaaaaccttcatccaaattggacaccttaatcaacataagagagttcatactggagagagatcttataactataagaaaagcagaaaagtcttcaggcaaactgctcacttagctcatcatcagcgaattcatactggagagtcgtcaacatgcccctctttaccttccacgtcaaatcctgtggatctgtttcccaaatttctctggaatccatcctccctcccatcaccatagcctcgagacgtcatttctgtttgactactccagcagtttaaaaccccatctccctgcccttttgttttctttttgtc

SEQ ID NO: 10201 - DNA, 466 bp, Homo sapiens
  MAP TO AL035682.16; EXPRESSED IN BRAIN, SIGNAL = 0.8; EXPRESSED IN BT474, SIGNAL = 0.83; EXPRESSED IN LUNG, SIGNAL = 0.59
tacacccccgcattttagagacttataatgtccgctagcaggataaagactctcagaagtcctgcaacaaataattaaacaaaagcaaaaacaaaaaacttggtttaacctagttttttcatcttttaaagccatggaaccctccttcagaaaatagctcctaacatcccatgggctggggtcatacagcatgtacctaaatttcacctcgctcggttctctgagacatccttagagctgactcaggtttggacctagcgggactccccctcaccacgactttgaacctgcctgcgttgagaaagggcctcaggaggcccaaaagggtctcggtgctcagctgctttctctgtaacataagcttctttggaaacggcaaggacatctgtggatccggggctgccatagccagtcatgaccacctcgggccacttggacacgggtgccccaatatccaaggcactca

SEQ ID NO: 10202 - DNA, 403 bp, Homo sapiens
  MAP TO AC012444.1; EXPRESSED IN HELA, SIGNAL = 1.1; EXPRESSED IN ADULT LIVER, SIGNAL = 0.97; EXPRESSED IN BT474, SIGNAL = 0.97; EXPRESSED IN FETAL LIVER, SIGNAL =   1; EXPRESSED IN BRAIN, SIGNAL = 0.95
gtgagttgggcataaaaggctaattaatgttattgtattcggttgattgactttaaggctattaaatcattattttattgtctgaatctctgcctcactcaggctaaagaagccattttatcagaaaaactgtgttttttctttgtttctttttttaaaacaaacaaaaaacaaaaaacttctgctgcttctaaggagaccaattcgtgcgcctgaacttggcttcttatacagttgagtttgcatccctgaatagatcttccagtgcattttaggtgatgtaaaatctacatccgccatcaagaacaaattaaaagtggatgtgacaaccccgcagaggggtcagcagccacatctggaaagtactgcagaggtcgtgttgtccaacactttgcaccaacag

SEQ ID NO: 10203 - DNA, 479 bp, Homo sapiens
  MAP TO AL049550.5; EXPRESSED IN ADULT LIVER, SIGNAL = 0.79; EXPRESSED IN LUNG, SIGNAL = 0.86; EXPRESSED IN HELA, SIGNAL = 0.79; EXPRESSED IN BRAIN, SIGNAL = 0.9; EXPRESSED IN PLACENTA, SIGNAL = 0.61; EXPRESSED IN FETAL LIVER, SIGNAL = 0.58
agtctggtcaggcattttgagaaaattcctcaacttagatttatttgatatttttcttacaatttgactaggactaggtgtttgagagaaaggccacagcattattttcatcacagcatatccaggacacatacacacacacacactattgatattagcattgatcatttggctggggtggtgtttattttgttttccactgacaagttgctcttccccctcacctttaatattgtactctttagaaagaagtcactgtgtgatttagaggaaaatgacagattttcctctaaaaggagccaggactaacctgcagctcccactcagatggacagagcagtgtatggagattcacatcatggacttttgttccaagaactaccacaggaacataccaggaaagcagagaatccatagaccctttgaaggaagcagattgctgctccagtttcctggagacagccgaaaaactgtgagtg

SEQ ID NO: 10204 - DNA, 470 bp, Homo sapiens
  MAP TO AC012553.2; EXPRESSED IN BONE MARROW, SIGNAL = 1.5; EXPRESSED IN HELA, SIGNAL = 1.2; EXPRESSED IN PLACENTA, SIGNAL = 2.9; EXPRESSED IN HBL100, SIGNAL = 1.2; EXPRESSED IN BT474, SIGNAL = 1.4; EXPRESSED IN BRAIN, SIGNAL = 1.7; EXPRESSED IN LUNG, SIGNAL = 1.6; EXPRESSED IN ADULT LIVER, SIGNAL = 1.5; EXPRESSED IN FETAL LIVER, SIGNAL = 1.4
acaaacccaaggcacaaaaccaccctggattcatgattacgattaagtaaatcagagcagtgatttagtatgtcattctagtttccaagtaccttgaggtgtgatttgtttcgctggtctttgttgtagcatttgcagactgtatgctgtttgcttcactaggaggatctttcagaatgtcagactttggtctaaatgagggagatacaaaacaaacaaacaaacaaaaaaaacaggcatttagaagatatcttgaattcacttgcaaagtaatatcctgtacttagttaaccagaaacttacttggttttcttgttggtatttttcttggtaacactaggactaatttccttgtctttctcaggtttctctttgtcctgcttttcaactttctccttcttctcctttttagggggtggtggggtggcatactgttgtgccacttgttgtgccaccagctgagaattgat

SEQ ID NO: 10205 - DNA, 487 bp, Homo sapiens
  MAP TO AP000516.1; EXPRESSED IN BONE MARROW, SIGNAL = 1.2; EXPRESSED IN BRAIN, SIGNAL = 0.94; EXPRESSED IN ADULT LIVER, SIGNAL =   1; EXPRESSED IN BT474, SIGNAL =   1; EXPRESSED IN HBL100, SIGNAL = 0.98; EXPRESSED IN HELA, SIGNAL = 1.3
ggctagacttccctcctttcaaaagaatgaatcttttctttggaacagattaagcacataattgctgaccagagataagaacacaaaaatggttagaaggggatgggagaaatcacttttccgtagcaaagaccctttgagtacacctggcagaaagaactggatttagagaaggagagcagaagaatgagtatcccaggctgacaaatcccaggctacgcaaagctacgctgcactcagcctgaggggctatgcaggggcaaaggtcgaaccttaagcatctcgaagcctgactgtaagcacttgccctccacctcggcagccaagtgggccaggtcccggcgcttgtccccaaggtgagcagcattttctcggagtcgctgcagaatgtcctgttcctcttcttccagtcgtgaaagcaacacctgctgctcttcatccagccgcctatgaagctcttcaaactccctcaagatctgctgtcggc

SEQ ID NO: 10206 - DNA, 461 bp, Homo sapiens
  MAP TO AP000106.1; EXPRESSED IN FETAL LIVER, SIGNAL = 0.62; EXPRESSED IN LUNG, SIGNAL = 0.84; EXPRESSED IN HELA, SIGNAL = 0.82; EXPRESSED IN BRAIN, SIGNAL = 0.79; EXPRESSED IN PLACENTA, SIGNAL = 0.8; EXPRESSED IN BONE MARROW, SIGNAL = 0.81; EXPRESSED IN HBL100, SIGNAL = 0.81
acaaaaagtaaaacagatatacaagggaaatcatgaaaaaaagagcaatatatatcatcttagtggattgtcactaaatgactagatacgttatatatacatacttcccaaacttagggaaatacctatcttccatttattcactagtatccactgtgaaaggaagtatcaaagaaggcataaaagcacattaaacagaattctaagacacatctattaatttaaaccatctattaacttttaaaaggccatttaaaagctttatgaagagaggaaaaagaggatattctgtaatgttatgatagatctagatataccttcgctttcccttcaagagctccagttcctgcatatatcttactgattgaatcaccattcacggaccacattgaccgaaaaacttcttgaaagcgagtcaccaactgaggcttttcagctaaaccaagagcttccaactgttt

SEQ ID NO: 10207 - DNA, 490 bp, Homo sapiens
  MAP TO AC007158.5; EXPRESSED IN HBL100, SIGNAL = 1.9; EXPRESSED IN LUNG, SIGNAL = 3.1; EXPRESSED IN BRAIN, SIGNAL = 0.96; EXPRESSED IN ADULT LIVER, SIGNAL = 0.97
taccattgtgggctatgtgcggaagaattgacagaaaggctgctgtgatggtgaagtaggaggttctggaagttgaggtcttgtgaatgccaataaaactacatgggaatgtgagataggcccaggatgttaagaacatccaggacagaatggaagtttgcagtcacaacaattagtaccagttgacaaggtcttttagaaacatgtcagcagaagaggccacatatggtatctcttttacacctttctaaagttgggagaagagtgagaggaggaggagaaatgctgaggggcctgatcattaagctgcgggtctggaggagcagcggcagcgggatcagctgcctgctgagcttggtcaaagggctgtggctgaactggtgcagccagctggagcaggggcggcaggaatagaggcagcaggtatagcagattgtaaaataacaggaaactgccatgcctcgggatccccatattcccttgcctgaga

SEQ ID NO: 10208 - DNA, 433 bp, Homo sapiens
  MAP TO AC008168.2; EXPRESSED IN ADULT LIVER, SIGNAL = 1.1; EXPRESSED IN BRAIN, SIGNAL = 0.9; EXPRESSED IN HBL100, SIGNAL = 1.3; EXPRESSED IN FETAL LIVER, SIGNAL = 0.72; EXPRESSED IN HELA, SIGNAL = 0.7; EXPRESSED IN BT474, SIGNAL = 0.7
agcaagggccaggaataaactacagagccagcaacgacaatgatgattccaacagcctcacatatgaaactaatttattaagacatatcagaaactcttgggaatgaagtgtctgctaattaggccaacacaaacagattcccaaaccttaacacagtttttccaaacatctgatgaagaactttgatttatgggctgtccaggtgaaacctgaacagatggtatcttttaataataattgacacatgagtttgttaaggatttcagtctcttgaaaacatgcagctctgtagaggaaaacaaagaggcacatttttagagttatctaccttgtctttatcttcaacaacatctgccaagacatcatctggatccaggattcctccatctgtatattctaagtgatgaatcttcacccagtaaccaggaccct

SEQ ID NO: 10209 - DNA, 466 bp, Homo sapiens
  MAP TO AC004689.5; EXPRESSED IN HELA, SIGNAL = 0.83; EXPRESSED IN LUNG, SIGNAL = 0.78; EXPRESSED IN BT474, SIGNAL = 0.66; EXPRESSED IN FETAL LIVER, SIGNAL = 0.73; EXPRESSED IN BRAIN, SIGNAL = 0.71; EXPRESSED IN HBL100, SIGNAL = 0.73
ctttctcccaccagagttgtgttttaataagttctagtatttctagcagttactgctttaagtgtgtggctactagattttctggctcattcagattcatgacaatgaaatctttgtggattgtgcctggcacccttacataataccactcttcccgtgaatgctttccatcatgcgttcttccttatcaatagtaatttgccatttttcaaatgtctgctgtgatcttctacttctcaatatttttggtgtgtttcttgtaaatagcgcttaactggactttagtttttgccccaatcttacagactttggatgggaaattcagcccattcaccgtgttacgaaggcgggtagccatggctttatttattttatctcatcttatgtttactattattaagcttattgttcttgctattatttactttcccccttaattttgcttccttactctccctccacccct

SEQ ID NO: 10210 - DNA, 413 bp, Homo sapiens
  MAP TO AC012513.2; EXPRESSED IN HBL100, SIGNAL = 2.2; EXPRESSED IN HELA, SIGNAL =   2; EXPRESSED IN PLACENTA, SIGNAL = 3.6; EXPRESSED IN ADULT LIVER, SIGNAL = 0.97; EXPRESSED IN BT474, SIGNAL = 1.4; EXPRESSED IN FETAL LIVER, SIGNAL = 1.2; EXPRESSED IN BRAIN, SIGNAL = 1.2; EXPRESSED IN BONE MARROW, SIGNAL = 1.2
gatcttcccccttcctatgcctcccaacctctcagtatcacccatgcagagaacagggaagtgagtggagggctgggagcccaggcactgttttaaactgattaatttcacattaaaccctattaacacattacctccccctcctcagagcaaaatatacccatatactcatagctgaaactctgggggtgtctcatcaaactgctgtacgattcccagaataaaggaaatttcttaaagtcttctctggcagaaaaaggatacagtcagcctgttgagaacctggttggattttgctttcaatgtcctccagcaaatcaaaatctggtagcatcagatgtctgtgcactgtgatgttctgatactgatccccaccagaaaggggattgtcagtgccatctgtaccaaacagg

SEQ ID NO: 10211 - DNA, 485 bp, Homo sapiens
  MAP TO AC008177.1; EXPRESSED IN BRAIN, SIGNAL = 1.1; EXPRESSED IN BT474, SIGNAL =   1; EXPRESSED IN HELA, SIGNAL = 1.5; EXPRESSED IN PLACENTA, SIGNAL = 0.93
tgagaggtttttgttttccccttttcatttaggtgacaaaatggaatctcttcaaacgaaaatctaaacaaactaccaactttgaaaatccaatctatgcacaggtaatttttaacaatttttcttagcacagacattttttcttagaaattatttgcttggttaaattggacacacacttagattattctgagcagagtggccacaaatagtcttctttatgaaaaaccgtgtatggtgaccttgggggaataaatggctgattcctgttacattgtattcttagatggagaacgagcaaaaggaaagtgttgctgcgacaccacctccatcaccttcgctccctgctaagcctaagcctccttcgagaagagacccaactccaacctattctgcaacagaagacacttttaaagacaccgcaaatcttgttaaagaagactctgaagtatagctataccagctatttagggaataattagaaa

SEQ ID NO: 10212 - DNA, 463 bp, Homo sapiens
  MAP TO AC009227.1; EXPRESSED IN BT474, SIGNAL = 0.67; EXPRESSED IN BONE MARROW, SIGNAL = 0.77; EXPRESSED IN HELA, SIGNAL = 0.66; EXPRESSED IN ADULT LIVER, SIGNAL = 0.96; EXPRESSED IN PLACENTA, SIGNAL = 0.73; EXPRESSED IN FETAL LIVER, SIGNAL = 0.66; EXPRESSED IN LUNG, SIGNAL = 0.71; EXPRESSED IN BRAIN, SIGNAL = 0.69
tccatacaaattacccaggctcataagttctcattagcatgtcagtggacagaactacattaactggctgattgactattccaactaataatacatagtgattatgtgttgaatttatcatttactattattaccacaattttattttaatggagtaaaaatgagataatgaattttacaaaatcatagcttctgcacagagctgtcacacaggaagaggattatcagacaactttcaatttatttaactctaatatccacagtcaaaagttacagcaggtcttgaggctgagttttctaggcaattacctcaaacttcagatcagtgtgacaataaagatctcatattcaaatgcttggtccaagatcattgagaatatgggaaataagaaaagtgagtatttgcagtagtcttttaaaataaaagaacaatttgatatccattgagacaaacacagactga

SEQ ID NO: 10213 - DNA, 481 bp, Homo sapiens
  MAP TO AP000268.1; EXPRESSED IN BT474, SIGNAL = 0.93; EXPRESSED IN HBL100, SIGNAL =   1; EXPRESSED IN BRAIN, SIGNAL = 1.1; EXPRESSED IN PLACENTA, SIGNAL = 0.7; EXPRESSED IN BONE MARROW, SIGNAL = 0.97; EXPRESSED IN FETAL LIVER, SIGNAL = 0.81; EXPRESSED IN LUNG, SIGNAL = 0.73; EXPRESSED IN HELA, SIGNAL = 1.5; EXPRESSED IN ADULT LIVER, SIGNAL = 0.88
atgagcccatgataacggcactaagatctcaaacacaacttctgtaagccagttaaggccttgaaaacaggtttgtatttgctgtttgaccacaagtcagaggagacatttcttcaccctggatttgacagaaataaaacattctgacactgtcttggcaatgcttccttagctccgagagccggagggagatgagcctcagtgcagccagtgtaaggaaatcaggagataaaatctggatacggaatggaagggctggggtgaggggtcaccttttacttggctgtccgggctctcctctccgtcagacgtcagtagagtcggcagaaacagcgagtgctgcatgagcatcacgtagaccaccgggagctggatgagcttcgtgcgcacggagctttctgggctgtacaggagctgtacggcggtgaggagcatctttaaaaatgtgtggtcctggtaccgaaatctaggcggcgagagt

SEQ ID NO: 10214 - DNA, 477 bp, Homo sapiens
  MAP TO AP000244.1; EXPRESSED IN PLACENTA, SIGNAL = 0.62; EXPRESSED IN LUNG, SIGNAL = 0.65; EXPRESSED IN ADULT LIVER, SIGNAL = 0.68; EXPRESSED IN BRAIN, SIGNAL = 0.74
aaaaatgagaaagtgtattcaagagagaacactaagggtgtggccaagagtccctttgataaggagattaatatgggtgtaaaacatgaacttaataagccattacagctggatgccagcttgaacagaaggggaagaagatggaaagaaataaaagaaggctctcagacttcttggattttataggacagaactgtagagtcattcagctgagaatgtgcactattctttaagaaaaggggagcatgaccccaaagatgattcaggatcatcagggctgccttttcattttcaaaatgggggaccattaccttgttttcaacaggccagacagcctctgcctgcagccagggggatagggtcacccaaagccatttgggagaggccaaccagacctgtgggcatgggacctcccagtagagccctagggctgcaaaccctgccaggtagagctggaggtaaggggtcaggacttcc

SEQ ID NO: 10215 - DNA, 456 bp, Homo sapiens
  MAP TO AC004987.2; EXPRESSED IN PLACENTA, SIGNAL = 0.68; EXPRESSED IN BT474, SIGNAL = 0.65; EXPRESSED IN HBL100, SIGNAL = 2.1; EXPRESSED IN LUNG, SIGNAL = 0.65; EXPRESSED IN ADULT LIVER, SIGNAL = 0.99; EXPRESSED IN BRAIN, SIGNAL = 0.81; EXPRESSED IN HELA, SIGNAL = 0.83
gagaacatttatcactgtgcatttcataataaatacgtatacaagtctgtctccattaatgaaaatttcaataaaataaaagtaataacaaaaacactttcagagggttgaagtataatagtttcagaaagaagaaggtgttagaatgaagaaagacaggaaaattatttaaaagaaataaatatgacatttgggactatctacttgaatggtttttaataacagcatttaagcacaggaaaattctcagatattcactaacttaccacttctaccatctttgtgaacaaaacgtaaatttgacgttactggtttgctcttgtggaacactttcaataacatcaatatcattttgtctttttgcacttgctgatttagttgtttcttcctatgaaaaacaaaccaaaaagctttggaaaacattgtatttattcacccacccactcaatcagtcaa

SEQ ID NO: 10216 - DNA, 471 bp, Homo sapiens
  MAP TO AC007367.3; EXPRESSED IN HELA, SIGNAL = 0.59; EXPRESSED IN BRAIN, SIGNAL =   1
gcactgggtttctgttaaataggtcagcctgggcgcttaaaagttatgcaaaacttatttctgccacaaaggagatatgtcactagtcaagctgtataaaaatcagctttctaggcaggaagaaaattttcctcatcactggggggaaaaattctttcgccatacataaaatgtcttaaatactatactacacttgtcatatgtctttaggccacagaaagtaataaaagcaatgaggctgatgaaatgcctaacaattctggtattcatttaagtggatggggttctttgaacactactatagaaattcttattcttccagcaaaagcaaacaggatttcaaaggtgcacaggtctcagctgccaaacctaagtgatgaatattttcagaggatgcagaccttactgattgcttttaacagtgatgaaacacgaaaagttgcatctcatcagggataaggtggtcttcct

SEQ ID NO: 10217 - DNA, 465 bp, Homo sapiens
  MAP TO AC003666.1; EXPRESSED IN BONE MARROW, SIGNAL = 0.73; EXPRESSED IN BRAIN, SIGNAL = 1.2
cagagccttagtttcctcagttgtaaaatgggattaaaatctctatttcataagcttattgtttattagaagttatttcctattgattaaaggaatgtcaagtgcctggcacatgagaacattcaagaaaggccagttcccctttttttcccaccgcaattttattttagagagtagggtgctgtccccagaaggacatgggtccccaccccatcttccttccctttcacttaccttcatgccaaaggtaaatatggtaacgacgattttgaagatcagtgccagggccagctgccacatggccgtgtaaacaccgacaccagccggccggtctggaatgtcatccacaggccgagtcatgttggggtcattgatgtagtcacagagctgggaagactcaagggctccacagtcattgaacagctcagaaatgagctcgctggtgctctggcgtgtgtagggatt

SEQ ID NO: 10218 - DNA, 464 bp, Homo sapiens
  MAP TO AP000239.1; EXPRESSED IN BRAIN, SIGNAL = 0.72
aaaggagcaaacaatcggggccaaagttaatctcaacatgtcagctatcttctttccaattatatagtgccttcaaaatataggagtgaactttcctgtcctttgcaagtcaatttgtggattggggtctcacaacagccgtaacatagttatgacaaagatgataattaagaatacttctggatgtcttcttcaacattttggtgaccaatatccagatggttttacttccaggttctccttaccgggataaaattactattgctattcttcaactccaagaagaagggaagctgcatatgatgaaagagaagtggtggcgtgggaatggctgccccgaggaagacaacaaagaagccagtgccctgggagtggaaaatattggaggcatcttcattgttctggctgccggactggtcctttctgtatttgtagctattggagaattcatatacaaatcacgg

SEQ ID NO: 10219 - DNA, 462 bp, Homo sapiens
  MAP TO AP000209.1; EXPRESSED IN PLACENTA, SIGNAL = 0.74; EXPRESSED IN LUNG, SIGNAL = 0.74; EXPRESSED IN HELA, SIGNAL = 0.65; EXPRESSED IN BT474, SIGNAL = 0.67; EXPRESSED IN BONE MARROW, SIGNAL = 1.6; EXPRESSED IN FETAL LIVER, SIGNAL = 0.59; EXPRESSED IN BRAIN, SIGNAL = 0.94
cgatccctttcttaaatgcaacagaaatggtactgagaccacacaaagatatccttcaactcatgacaaacagagcaagtttctcacatccaactcatagccctccttagccttcacttggaaaacttctgaatgtacctactcctggaatttaatatagatgtttattttgtcattcactgtttttgtttttataatgagcaacagattaatctcaccactaaaaaaaaaaaaaaaaaaaaaaaaagcagtggagggagactgggtgcctaggcaagaaaagaaggtagccagttcagaggtttgaaatgccctgcaaaggaagtgcccaacaaacctgaaaaaggaaggcatcacccagggaattgctgaggcagaagacaaagtccttcttggggtgctcaggcaccgcctgcacaatgctgttctccacccagacggcgtgtttggggatgctgttgt

SEQ ID NO: 10220 - DNA, 475 bp, Homo sapiens
  MAP TO AP000199.1; EXPRESSED IN PLACENTA, SIGNAL = 0.76; EXPRESSED IN BT474, SIGNAL = 0.76; EXPRESSED IN FETAL LIVER, SIGNAL = 0.59; EXPRESSED IN LUNG, SIGNAL = 0.78; EXPRESSED IN BONE MARROW, SIGNAL = 3.5; EXPRESSED IN HBL100, SIGNAL = 0.72; EXPRESSED IN ADULT LIVER, SIGNAL = 0.66; EXPRESSED IN BRAIN, SIGNAL = 1.2; EXPRESSED IN HELA, SIGNAL = 0.82
tgggccacaatggcttatagatcaaggtctccatgtaatagctgcctccgtgcaaatgctgtccaatagtgagtgaactgggctcttctcagctacaaaagtgaagccttgagatcatcaatcttgactcccccacctgtggagaaagtatcctccctatcattatttgaaccattgggactttgaatacctttaggtcgtatttttccagccctcttctgctggtgagtgtgttttctttccctccagaaatcaaaaatctccacctatgagaagatgtgggctttcatgagcagcaggcagcagaccgccctggtaagaaacagtgatgaggggatccagagagtgctcaccacagactacgcgctgctgatggagtccaccagcattgagtatgtgacgcagagaaactgcaacctcactcagatcgggggcctcattgactccaaaggttacggagtgggaacacctattg

SEQ ID NO: 10221 - DNA, 412 bp, Homo sapiens
  MAP TO AC009447.1; EXPRESSED IN BT474, SIGNAL = 1.6; EXPRESSED IN BRAIN, SIGNAL = 0.9
  unsure 356
tgggaattcatgtataaaacacacactcaaattcaagattcttaacagcagagcttttagccaagttcaggacccttttgagcgcagggctttatgtgattgcacttgtcacctgcccatgaagctgaccctgtgcctactttatgacattgtaaatctcctagcagaggacataataggtgacttaaaatgtccttccattttcttatagaaaacattagattccttcagagtagacatacatgaggatagaactctgaatcttgaggcccaaggagtgatgaaaactattcacattgacctgttacttttactaagagaagaaattacaactttacaggttcttcagaaaccanctttaaatctttttgtagtttgttctgatgtagtcaccatgattgttttggtgagc

SEQ ID NO: 10222 - DNA, 430 bp, Homo sapiens
  MAP TO AL079341.13; EXPRESSED IN ADULT LIVER, SIGNAL = 0.98; EXPRESSED IN BT474, SIGNAL = 0.98; EXPRESSED IN FETAL LIVER, SIGNAL = 0.96; EXPRESSED IN BRAIN, SIGNAL = 1.1; EXPRESSED IN HBL100, SIGNAL =   1; EXPRESSED IN PLACENTA, SIGNAL = 1.1
aaaaatggttgattgggcactatttggtctgggaatccttctaaccctttaattttaaggtggctcctaaaggaaaaggtgattctcaaaaaataacaaagtctacaaggatgaaatcttcatagatattgaattgagagactgcaagactttgtcattatacttggttatatatttttcatagagcagaaaataccagtgttttctacaagtgaactaaattttcaaaaaaagtattacacacttaccgaaaatattggcacctggctgctaaaattaccctgtgggcaggaaaacgtttcttttccaccacgaatgtgacgtcgccatattcttccccaatcaacaaggcaccaatatgttcagacaaaatgtgcacatgatcaatttcccccactgcagtaaaggggcgaagagggtggctgttact

SEQ ID NO: 10223 - DNA, 376 bp, Homo sapiens
  MAP TO AL109935.20; EXPRESSED IN BT474, SIGNAL = 1.2; EXPRESSED IN BRAIN, SIGNAL = 1.1; EXPRESSED IN HELA, SIGNAL =   1; EXPRESSED IN PLACENTA, SIGNAL =   1; EXPRESSED IN HBL100, SIGNAL = 0.98; EXPRESSED IN FETAL LIVER, SIGNAL = 0.98; EXPRESSED IN ADULT LIVER, SIGNAL = 1.2
ccatgttccacaagaagcagaattaattggatagccctcttcaccttgggcaagataggatgcctgtagattggtgctggaagagagagattgccagggactatgaaggcgtctggggatacatagcctatggtacaagtttcattccagttagtggggaggcattggtgaactgattggccacaaatatagatggctccttgggttttaagacaagtagagatgtccaaatgaaataagtcggtgaggacagcttcaaaaaatcctgaggctgccaacatgcccaggtagctcatggctattgtcatacctggtaagacttgggtgcctggggttgctagctgattccaatatgtgcccggaattagaatattga

SEQ ID NO: 10224 - DNA, 479 bp, Homo sapiens
  MAP TO AC004890.2; EXPRESSED IN HBL100, SIGNAL = 1.2; EXPRESSED IN FETAL LIVER, SIGNAL = 1.1; EXPRESSED IN ADULT LIVER, SIGNAL = 0.93; EXPRESSED IN BRAIN, SIGNAL = 1.1; EXPRESSED IN PLACENTA, SIGNAL =   1; EXPRESSED IN BT474, SIGNAL = 1.1; EXPRESSED IN HELA, SIGNAL = 1.2; EXPRESSED IN LUNG, SIGNAL = 1.2; EXPRESSED IN BONE MARROW, SIGNAL = 1.3
ggaaccatatttcttttccccaacaacattacatgttctttcctcagcaaaaagtctgagttgtacacatttttgaatccctcaaagcatttagcagagtgctgggcatacggaagacagcaggatcccgtggctttgcctgaaacgcggaacctggtcttgacttttgagtgactgagccctcctggtgcccgcactctggccgggagtgccaagcagcgttctccctcccgccgcacgggggcacaatgggaagcctgcacagtgaggaagagcggctggagccggtcttgtgccggggaggtcgctgctcccagaatgcacctggcatcaacacggcggcggcggcggcggcttccaacaggctctggggcgccgagcggacaggaacgcagcacgggggctccgaggcggggtctgggtgttgaggggcgactggagccatggcggagtcggcgcctgctcgggtaaagaggcac

SEQ ID NO: 10225 - DNA, 455 bp, Homo sapiens
  MAP TO AC010684.2; EXPRESSED IN HELA, SIGNAL = 2.2; EXPRESSED IN PLACENTA, SIGNAL = 1.2; EXPRESSED IN HBL100, SIGNAL = 1.8; EXPRESSED IN ADULT LIVER, SIGNAL = 1.3; EXPRESSED IN BT474, SIGNAL = 1.6; EXPRESSED IN FETAL LIVER, SIGNAL = 1.5; EXPRESSED IN BONE MARROW, SIGNAL = 1.3; EXPRESSED IN LUNG, SIGNAL = 1.4; EXPRESSED IN BRAIN, SIGNAL = 1.3
aagaacctggaaagttgccctctaagtcagagaatattgtacctattccttaatatgtccccagtggtatctccctcatctcacccaatcagcacagaaagttcacttaactaaaaaagggttttgtgtgcataggtacataaactatcattaaaagcaacttgaacacaaagctgaaagcctgacctagacatttacagaaacagcaccttttctgaaagccttagtttcaactctcctccctgctcacacctgttccccaagtccccgtctctaatacttacagtggccgcaggggacccagttcatcacaaaccaccagatgttcagcatcgaggcatggtggtagacgtgcaggaccgtgatctggtggttgttcttgcgcaggatgaagaagaaagtgtccataaattctatgagtttggagaagtagtaccaccagaggacacggataa

SEQ ID NO: 10226 - DNA, 425 bp, Homo sapiens
  MAP TO AC010873.2; EXPRESSED IN PLACENTA, SIGNAL = 1.1; EXPRESSED IN HBL100, SIGNAL = 1.1; EXPRESSED IN BT474, SIGNAL = 1.2; EXPRESSED IN LUNG, SIGNAL = 1.1; EXPRESSED IN BRAIN, SIGNAL = 1.2; EXPRESSED IN HELA, SIGNAL = 0.99; EXPRESSED IN ADULT LIVER, SIGNAL = 1.4; EXPRESSED IN FETAL LIVER, SIGNAL = 1.1; EXPRESSED IN BONE MARROW, SIGNAL =   1
acccctagtcctagacatttccagcataaaactctgacaccgagatgctgagaactccacaaatatgtcacagggtcacagtcaacctacatggctttccttgggaaacaacagtagtaacaaaataaggaagcaaaacttagatttgtccattcacttttacctagatatatggcatatttttaaggcattgtatctacaactgagaagactctaccactaattttctattacagcaacgtctgtcagcattcaaaagtcaactctcaggttgacaaagagcagcaaaggaccatagccactgtggctgtgagtgtgttctatggcagaaagactgtgcaagaacaaccaacggtgatatttaaaacacttcaccaccaacaggatagatgctgaccaggggctgggtcctctctggcctctag

SEQ ID NO: 10227 - DNA, 469 bp, Homo sapiens
  MAP TO AC007391.2; EXPRESSED IN LUNG, SIGNAL = 0.69; EXPRESSED IN PLACENTA, SIGNAL = 0.71; EXPRESSED IN FETAL LIVER, SIGNAL = 0.67; EXPRESSED IN BONE MARROW, SIGNAL = 1.5; EXPRESSED IN BRAIN, SIGNAL = 0.95
aggtttattgcccatggttgatattcccaatcatgcaatcttacaattaatgttcataataaaaatgtaccaaaagtctccatttctaaatggccttctcattcctccaaggattctagaattcactctgagttactgttaatgtactttatcctaggaatcaataagcagaaaacagatacctttaaggaaaggagtttcttgtctaaggcacgagcaagttccaacatcattgcacatggcacggctgaatcagtggctcctacaaacactctgttgttccagtgggaaaaatacttggagtcatagtggcaggcgaggaccaaatgtcgtttagcagtgggattgagggtgctgatgatatttgagaaagaccggtacccatagggtgtctgactcaagaaggtgtctatttccaagacccagtcagcctgaagcctctgaattcgctgcatgatgtgctgatcaa

SEQ ID NO: 10228 - DNA, 1913 bp, Homo sapiens
  MAP TO AC004974.1; EXPRESSED IN HBL100, SIGNAL = 1.1; EXPRESSED IN BT474, SIGNAL = 1.2; EXPRESSED IN BRAIN, SIGNAL = 1.1; EXPRESSED IN LUNG, SIGNAL = 2.6; EXPRESSED IN HELA, SIGNAL = 1.3
aaatgcaaaaagaaataaattgagcaaatggttatttagctattttaccatcaagaaagataagacatgcaaatcttatgtcacattgttaataaatatcttaatatacagtacttttcttcagaaagtactgcaaaagaaaatgtaagaaataaaggatctctacttacccttctggtagaaaaattttctataatagtatgcacccagatctacgtgttccacgatgtatcttttcactctatctaggtgcaacaccaagttctccttgggcacttcaagtactgccactcctgcatttgtgcaatgggaactaagggtagactcaaaggaggcactttcacatccactaaaggagccagaatttgattttgaaaggctgattttcctctccccttctccacctatctcattccgaaaatatggacagctcattacaagctcattgcttttatcatctccctggtccatgctgaggcttcctttggaattcaggtcctctgtgctgcccattggggagctaaaactggctgaatgagacagaggtccagagaccaaggatgccacggcagctgcggaagctccagtggtggtgtttctcctcttaataacattgtgcctgttcataattgcctcattcaaatcaaataatatactctggacatcatagtgggcaaagcactttggacatgtccagggcctgacagagtcttctgatcggttatcttcaagatctgatgacttcccaagttcttcacctttggcattgcgcaatttacgaaaaatagatgagtctccagtttcagattttgaacgtcgcttgagtggtttttccctttccttaaaaagcctgaggttctctctctgtgagataggcccgtctattacatccaaagagaaaccagaacccttgccaccaccagtaatgagaaagtcactgagcttggttggagttggacctcgatcagatttgtcatctttgtagccctttaacaaatcaaaaaagctttctccagatgttccctgtttatcaattgaagatgtgctaccatattccctgtgcagtgatggtccagtcttgtatgtaggtgagatacattcatcaaagctatccacatcaagttcacttatggtgatatcactgttgcttcgctggcgtattctgcgaagagcttttctgggggagctggggtaggcttcaggcatgagaaatctggagtccatgttctccgacggtcttgtcttgtttttcagcgtgttctgtatgcttttcagcatggctgagtcattggaattgaggctaacagaacttccctgactcacaggactgcttttggaggacaggctatcaaggcaacttgaggtttctatttcctggcttgaacggctagattcttttatgttttcctttcttgggggccaatctgcaatccttgcccttacccccatttttgggactccgggggttgaggttatatggtgagaaccttcacttcgggggggtcctacaggagccataactgatgatcctaagctgccattttgggaccggaagcgccgcatgtagaaatcatcagtgtggactttgggggtgccgtctgtgccaacaacagaggccctgtcagtggcaagaggcctttctgtctgtgaccgtttcaagctggtcatgatgtaaaagcaagtagacttaaatccctgcagcaaggaccatcatatctgtgttttaaatgtgcacttcccttttggagaatggcttccagaaaatacaacagttgcatgagatcttaatctttttcatttaaaaggttaaatgatgctttatttgtaaagcactgaaaaattggaacttctaaacgttataatccacaacagtttctttgcttcactttaacagagggctttctttcagaaaa

SEQ ID NO: 10229 - DNA, 486 bp, Homo sapiens
  MAP TO AL034554.8; EXPRESSED IN PLACENTA, SIGNAL = 0.66; EXPRESSED IN LUNG, SIGNAL = 0.67; EXPRESSED IN BRAIN, SIGNAL = 0.68
tggaatacggagcataaggctaggatcatttcattcaagaagatgatatagaaatactaaaacctaagaaacaacctgaagcacaagatactctgctcatttttataccttgctctttgtcctgagaaattgtgtatgcttggaatttcataatatgtctgttagagaagagaggaaacctatctctcaaggcctcaaatgagaaagtaaaagtggtaagtggatgtcaccaaggtcaagcatctgcttattaaaaagagagtcaagtttccttgccccccgggaaactgtaacctggccatgtctatagatctctctggtgaattaacttctgtttttctttatttaaggggggtgggcaggtctccacactttggacatttaaaaaaaagaggaagaagcctcctcagcagaaggctaaggatcccaaacttatagtacttgattctaacctatataacttcaagcaggaaataaaaggggctt

SEQ ID NO: 10230 - DNA, 459 bp, Homo sapiens
  MAP TO AP000217.1; EXPRESSED IN LUNG, SIGNAL = 0.66; EXPRESSED IN BRAIN, SIGNAL = 0.92; EXPRESSED IN PLACENTA, SIGNAL = 0.59; EXPRESSED IN HELA, SIGNAL = 0.84
tggttctggctccatcttatcttgtcataatctttgtaactcatcttgaatgcttttttggagttgcacctgttccttggtttatatatgctccagggatttcttgtcagctggccgtaagacatgatttggcaatttgtcattccatttactggattcatttagctgtgtaaaattgacacttatggatactttagtttcaggaatccttcttataacagtgggctttcacaatctccttcctatgccatgcagaaataatcctccacaagccaagcacaaaagaaaaatcaggttggtggagaacaagtaaagaaaaggaggagaaggtaagtgagagggagaaggtaagtgagagggaggaggaggaaagggagggcctgagaaaagcaaaggtgagaaaagtctctgctgccgtagagcctggagcagcacgaccggcttggccttctccatccc

SEQ ID NO: 10231 - DNA, 462 bp, Homo sapiens
  MAP TO AP000206.1; EXPRESSED IN PLACENTA, SIGNAL = 0.7; EXPRESSED IN LUNG, SIGNAL = 0.61; EXPRESSED IN HELA, SIGNAL = 0.87; EXPRESSED IN FETAL LIVER, SIGNAL = 0.69; EXPRESSED IN ADULT LIVER, SIGNAL = 0.71; EXPRESSED IN BRAIN, SIGNAL = 0.73
gggattcacagcttgaaaggtgggattctaggtcattctacaggaagggctccccttgctgctgccactgattctgttgtgtttgttgccagaattgagtcttgactttgaagagttcacaaggcaccctttgctgctttgtctggtttatcaagaaagtggctgcgcaattcacagagggggtaaaaagacctgaaaggagaattaagtcaggatgatagacagattctagtgatccaaagaatgagttcactcttcagtagaaggcagagaatccatatcctccgtagtataatggtcggcaacagctgaatccatagcctccgtagccacagccatagcccaacctgcggaagctgccatagccgcagccatagccatagccccagccaccaaagcctccatagccatagcccaggcctccataatagcttctgtagtagctcatggttcagcaactgt

SEQ ID NO: 10232 - DNA, 486 bp, Homo sapiens
  MAP TO AP000094.1; EXPRESSED IN FETAL LIVER, SIGNAL = 0.77; EXPRESSED IN HELA, SIGNAL = 0.76; EXPRESSED IN ADULT LIVER, SIGNAL = 1.6; EXPRESSED IN BRAIN, SIGNAL = 0.79; EXPRESSED IN PLACENTA, SIGNAL = 0.97; EXPRESSED IN LUNG, SIGNAL = 0.81; EXPRESSED IN HBL100, SIGNAL = 0.94; EXPRESSED IN BONE MARROW, SIGNAL = 0.7; EXPRESSED IN BT474, SIGNAL = 0.76
ttcgcaaaatatttgttccttgaatcaagtcttttgtggctgatctgggttgctttatttttttttaaagaacttgaaacgaagcagagttataacttcaatttactccaaagtgtgaggtattattttggagaaaaatagctattggagagtgaaaactacctagctgaagagtaaatggcctttgagatcagacagataagagctatggaagcagggagagtgattatgcaagtaaaggaaggtaagcaaaagtggaatttaagatgcggtgtgtgttttcctccacagactgaagcggctctgatgtacgatgctgtgtacatggtggccattgcctcgcaccgggcatcccagctgaccgtcagctccctgcagtgccatagacataagccatggcgcctcggacccagatttatgaacctgatcaaagaggcaagtgatgctccctcacagcccaggggcccttctgagcactgttgggct

SEQ ID NO: 10233 - DNA, 1979 bp, Homo sapiens
  MAP TO AL096801.16; EXPRESSED IN PLACENTA, SIGNAL = 1.4; EXPRESSED IN HBL100, SIGNAL = 1.1; EXPRESSED IN HELA, SIGNAL = 1.3; EXPRESSED IN BRAIN, SIGNAL = 1.2; EXPRESSED IN LUNG, SIGNAL = 2.1
tttgagatgcattgtcagtttcattttacaaatggaaaaaaaggaagctgaggcaaaggtcaggcagtgaaaccaaagcatcacagccagtagatcaagctgtagggtgggatccaagtcttcgtttctctcgttctactgtgttgcagcatgctgtcaagaggatgcagtcctggtcggatctttaacaggaatgatgatggtggtgctggaattgttggccctttttctgctctgctcctatgtaacatcttcttggtttttgttcctttccctccccttctgtttctttcagcttggattccttagcaccaccacagctcagccagaacagaaggcctcgaatctcattggcacataccgccatgttgaccgtgccaccggccaggtgctaacctgtgacaagtgtccagcaggaacctatgtctctgagcattgtaccaacacaagcctgcgcgtctgcagcagttgccctgtggggacctttaccaggcatgagaatggcatagagaaatgccatgactgtagtcagccatgcccatggccaatgattgagaaattaccttgtgctgccttgactgaccgagaatgcacttgcccacctggcatgttccagtctaacgctacctgtgccccccatacggtgtgtcctgtgggttggggtgtgcggaagaaagggacagagactgaggatgtgcggtgtaagcagtgtgctcggggtaccttctcagatgtgccttctagtgtgatgaaatgcaaagcatacacagactgtctgagtcagaacctggtggtgatcaagccggggaccaaggagacagacaacgtctgtggcacactcccgtccttctccagctccacctcaccttcccctggcacagccatctttccacgccctgagcacatggaaacccatgaagtcccttcctccacttatgttcccaaaggtaacttaacctcatgaattatttatttgaggaaggctttgagcccagtggaggtaccaagagtgggcttataccaaagatgttttctccatttcgtgtattccaaagtcaccccttggagagaggccttcatatggtggctaattaaatctggcttttttggacttaatagaaacatgtagactcagaatttttctgttaggggagatcagatatctaaaaactaggtcacatcaagctataaaatatgaaccaagagaaacaaggacagcgtgtgaccttatgtaagttacttaacctcttcaggcctcagtttcaaacttgtcaaacaaatgaataatttagatgtttaaggttccttccagatcaaaagttttccaacatggagtcagtcccaggtagacatagccaggagcagagaagagggagaaaggaagaaaataccattacatccggaagcgagagatgaattttgaatccaggtggggcaaagaatgggtaggaaagttagaagctcaggaaataagcaaatttgtatcagattgaaggtaactagcactcatgtctggaaaataataactttattttttccaaatgattttaactttactccttatatcaattattcaagttttccatcagaacctcaagcagaatataaaatttatcctttattttcaaatcctttttgatttaatgtaattttcatgagatgatgaccaacttgagttgttcctcctagtgtcctctcatgcatgattacatttagccttcatgataagcctgtgaagacagccatcttacaattgccagttgaaatgaagaaacagcctccaagagctcagatggccactctagctttgcttaggccaagtcctgtctcttgggactcaaaattcccatctctcatacttcttaatgaaaattacttatggaggcttctctgagagaagtctgctaagctgccagcccaaatcttgtttaatcttttgataacagatgctcttatttgctgacctgtcctaccaagtc

SEQ ID NO: 10234 - DNA, 1988 bp, Homo sapiens
  MAP TO AL109928.12; EXPRESSED IN BRAIN, SIGNAL = 1.1
tccctttgaaaataaccccactcagggtagaaataaaggtggacaaaaatgccagtcaactacttaaatgtcagtatttgtaaaattccttaaaattcacagtattttgacttttggaagcgctctaacattgaggtacctgcaggtcttggcaattcagcattttagatatttattttagtttatatgtgttttgctttactccgtttgttttcagttttttctcactcgatacagtggcatgaccacagctctctgcctttccctttttcctaggatgtgcatgtgcttgtgttttggaggccttacaggaatctgctgagtccagaatcacagctgcctgtttgggaactcgaatgtgaccgctggtttccaccttagagctgcttccactgccggacagatcccagcgctgcagcttcgtactcttacttgatttctttttcttttcttctgtcctcatttcaagggtttgcctctgagaacaaaacctggtaccaccaagcacatcaatgggtctaggggaagtctcaaatgcataatgtgatgggtggatttcttcatggtgaaaagctttctttcgggaagggcctgactttgaagccccttcctggtgaggtagtggcttggacagagcactagcaattagcttacttctcccagggcttttcagtgcccctgaggtcccaggggcagtggggggccttgctttgcccccctttgctttttcacactgtacagtctggacttgcagccactcaagctgaataagtctatcgatatacttcccaagaagtcctcccactcggggcacggcttccgttttgttctctgcgttcagaagcagggccatatctcgtaggtcccaggagctgaaaggggatggaaggaaattaggataatagtattcaggttttgtatggccctgaccagggtgaagatcaaagtaaactggatcaatttcttcagctcgaagattgagatctggaggtgtgaggggagaaggaggaatgggaattctttccgaatcagagagatcacttgcactgtcctcatcagcattctctttaataattttcattgactgaaaatcaagaaacagtttattccctgaggccccctgacacctggaaccgagtggattccttttgcgtcttgcttccggggaaatgctttctttaagtttttcttcagtaggctgggtgacagctgtgaggctgcttctcggctgggaagaagcgtggggtacttgggatttactctgcctttttcctgaagaattctttgaatgttgcactttattccaagatgggccagcattcatattgctgtgagaaaataaaactgcaattcttaccacatatgacaaaaaatggtctggctataattaaacaaacaaaaagaatcttctagttgtacttttttttgtctcagctattagtaggcattagaaaatgtcagcttccaaactccttaaagcataagtaattttacagaacattttcccatataatactctatttgagatacattatataatgcatgtgacaaaagagaatgcacagtttccattttatatcaaatattagcatttaggaaaaacattaacatttctcaaagtgcttgtttcatactttcgtgtgtactttaaaaaaaaaacattagtttggaaaaaatcagtcgtagaactctggaattgttaccatcaaaagcatttaataacattcagaagtaaaaacagttttattttatacacctattttaaattaagtgtaaatatcaaataaacatgcaagttttgcagtttaatcactgattggtggcgattctgagctgagtgaaattttaatatataaaagtattgcacatacaaacctgtaccttaaatcaaaagcttgttacaatgttttcaaacagaaaacacatttgggaaaattgtgtttaaagaacagaaataaaatcatatggtgccctgtaacacatatgaa

SEQ ID NO: 10235 - DNA, 449 bp, Homo sapiens
  MAP TO AL035464.20; EXPRESSED IN LUNG, SIGNAL = 0.65; EXPRESSED IN BRAIN, SIGNAL = 0.7
tttagcttgttgctctcatggagctactagtgagtgtccttttcattggctaccaccagaatctccattgttttctacagcaccttcaggcttgaacttcctcatagtctctgttccaagtaccctcagttccttggggaaagctataaagctctctgttgttatgcctgccttgtcctgtggaacaaatctctaagccattgctctggaactggcagtggggacagtggtctgcttctctggaagcaacaccctgctttatgagtgaggtgctgggaaggggggaagtagccttttgccttctcagcttacttctcctggcatggagccatcactttatgagcaggcaaaggcaatcgagacctggtattcttggcctgcttcacctggaagagaacttctgccttacaaagaggggcctgggtggaggaaggaagccccagatctct

SEQ ID NO: 10236 - DNA, 459 bp, Homo sapiens
  MAP TO Z86090.10; EXPRESSED IN BT474, SIGNAL = 0.67; EXPRESSED IN PLACENTA, SIGNAL = 0.72; EXPRESSED IN FETAL LIVER, SIGNAL =   1; EXPRESSED IN LUNG, SIGNAL = 0.78; EXPRESSED IN HELA, SIGNAL = 0.74; EXPRESSED IN ADULT LIVER, SIGNAL = 1.3; EXPRESSED IN BRAIN, SIGNAL = 1.2
agaccatgtgcaccctcatcacggccatggatgccaatagtcagttcaccagcacctacatcctgaccgccatggccattgaccgctacctggccactgtccaccccatctcttccacgaagttccggaagccctctgtggccaccctggtgatctgcctcctgtgggccctctccttcatcagcatcacccctgtgtggctgtatgccagactcatccccttcccaggaggtgcagtgggctgcggcatacgcctgcccaacccagacactgacctctactggttcaccctgtaccagtttttcctggcctttgccctgccttttgtggtcatcacagccgcatacgtgaggatcctgcagcgcatgacgtcctcagtggcccccgcctcccagcgcagcatccggctgcggacaaagagggtgacccgcacagccatcgccatctgtctggtcttct

SEQ ID NO: 10237 - DNA, 485 bp, Homo sapiens
  MAP TO AL050315.8; EXPRESSED IN LUNG, SIGNAL = 0.7; EXPRESSED IN BRAIN, SIGNAL = 1.2; EXPRESSED IN PLACENTA, SIGNAL = 0.6
ggacatggcttcaagtacactgaagaatgagttcagttacacaaaaatcccattgatctgaaaatgtcagccgtggttgcattttagaagacttaaaaacttaggctgtggagaaatgatgctattgcttcatacacatgtggacatgactgcttatgggaggcgggaggctttagtggtggaaccccagagttctcagaggcacttcgcaggaaatggaagaaaacacacttcagcttccgaacaacagaaagtagaggttggtgaaatttggtgagactggctaaagtaacaaagaactagaaaattcatacctgtgaggtaggtgttgtgcgaggaattaatgaaatagtgagaaaggggctgagacatgtcttcattcaaatccagtttctcaggtgaaacgactccgttttcttctccactcagatagcgcatgaacccatccactgatatttgtcctggaggaaatgaagttagaaagg

SEQ ID NO: 10238 - DNA, 474 bp, Homo sapiens
  MAP TO AC007744.1; EXPRESSED IN PLACENTA, SIGNAL = 0.69; EXPRESSED IN LUNG, SIGNAL = 0.64; EXPRESSED IN BRAIN, SIGNAL = 1.4; EXPRESSED IN HELA, SIGNAL =  38
cctcaagtgcttagtgtgcagtcagagttggggaccacttacgtaactacagtaagttaatacatcattttaaaattttgaccctggttactaacaaggtttagtagtccctactactaagtagttcttgtgttttaggaagcttgtcatcacattttattttgtatttgaactcattcatgtggatattttgtctcttgtctttacttcatcttcgctcctctcttaatttacccttaagaaatgcaaatctccttgtgaaagaggaaaagtaagatactcactccttctttttttttttaaggttgtgtggaggaaacttggagatgctgcaggttcgtgtcctggaattaggcaacatttgtcaggaaaccagtacaaaggaccaatgtgagatgcactctttttcaaacaggagatcaccactgccagaaagtgatagaagacaagaagaaaaaggaaagagtgggtttc

SEQ ID NO: 10239 - DNA, 468 bp, Homo sapiens; identical to SEQ ID NO: 2977
  MAP TO AP000210.1; EXPRESSED IN LUNG, SIGNAL = 0.68; EXPRESSED IN HELA, SIGNAL = 0.6; EXPRESSED IN BRAIN, SIGNAL = 0.74; EXPRESSED IN PLACENTA, SIGNAL = 0.59; EXPRESSED IN BONE MARROW, SIGNAL = 0.67; EXPRESSED IN ADULT LIVER, SIGNAL = 0.67

SEQ ID NO: 10240 - DNA, 460 bp, Homo sapiens
  MAP TO AC006499.11; EXPRESSED IN ADULT LIVER, SIGNAL =   1; EXPRESSED IN PLACENTA, SIGNAL = 0.82; EXPRESSED IN BT474, SIGNAL = 0.66; EXPRESSED IN FETAL LIVER, SIGNAL = 0.76; EXPRESSED IN LUNG, SIGNAL = 0.6; EXPRESSED IN HELA, SIGNAL = 0.74; EXPRESSED IN BRAIN, SIGNAL = 1.1; EXPRESSED IN HBL100, SIGNAL = 1.1
catgggggtccaacatacaccatggaagtgggcaaagccaagccaaacacatctggcatcaacttccactctatgaagcaatgtgacattggcaaggctccctcccattatgggagctcaaggaagtgacagaggtgagaagtactttcaatagaagaagcattaatggtccaattaaaatgagatgcacacctttcctatgagctcagaggatagagaaaagcatccctcaatcaactacatgtgcacaaaatatttcacataccatttcctcccctaacatgtagtgaggtgtatgccaatgaaaagcagcaggtgatgaacagtacaatactcaagcatcttagagcagttcacgtgtatctcagcaatttagtgctattttctcgtacaaggccttcctgcactggtacacaggtgagggcatggaagaaacaaagtttgccgaatccaagagtaa

SEQ ID NO: 10241 - DNA, 449 bp, Homo sapiens
  MAP TO AC007219.1; EXPRESSED IN HBL100, SIGNAL = 1.1; EXPRESSED IN HELA, SIGNAL = 0.94; EXPRESSED IN PLACENTA, SIGNAL = 0.78; EXPRESSED IN BRAIN, SIGNAL = 0.9; EXPRESSED IN ADULT LIVER, SIGNAL = 0.94; EXPRESSED IN LUNG, SIGNAL = 0.92; EXPRESSED IN FETAL LIVER, SIGNAL = 0.84; EXPRESSED IN BONE MARROW, SIGNAL = 0.94; EXPRESSED IN BT474, SIGNAL = 0.7
actggtgtcccagattcctgcgagcctagaattcccactcagaatgaagtcctgggccaggcaggcagagtccgggttttcagcggaggcctggtacccatctgccttcccctgggggagctctacccgactccactcccaccaatagggaagggcagccggctcccgccttgcctccgctccatccccagggaggggaggccggaaacgaggccacctctccgcagcctccttctctgctccactgcctctcacaccctgttcccggagtcctgcagcttcccaagccctgaggaatgcaggtgaccgtccccacatgctgctgcctcagcctgaccttcctcctgctctctctctctctctctctcccctggcgccaaattggcctgccctcagatctggcacttaacaagacagacagacagagaacaaagaccagcgtgaactcc

SEQ ID NO: 10242 - DNA, 379 bp, Homo sapiens
  MAP TO AC007244.1; EXPRESSED IN ADULT LIVER, SIGNAL =   2; EXPRESSED IN BT474, SIGNAL = 1.3; EXPRESSED IN FETAL LIVER, SIGNAL = 1.2; EXPRESSED IN LUNG, SIGNAL = 1.2; EXPRESSED IN BRAIN, SIGNAL = 1.2; EXPRESSED IN BONE MARROW, SIGNAL = 1.3; EXPRESSED IN PLACENTA, SIGNAL = 3.3; EXPRESSED IN HBL100, SIGNAL = 1.4; EXPRESSED IN HELA, SIGNAL = 1.6
attggagtattgcaggggctagtccatggttttattaggccttgggcttttaggtcctcaacaaccttttggagtccttgttggactttgggtctatggggatactgcctttggtagggaaaggaggcagcatcctttagtttaacttgaacaggacaggcattctttgctcatccatattgtccttctgttgatcagacttcaggattaattccttcctcatgcaggtggaaacaaacaggtgttccttctcctatgttcaggtgtataatgacccctgcttctgctagaatgtctctccctaataagggagtggggctttcaggtataattagaaaagcatgtgaaagtaaagttccccagtcccaacttagtggct

SEQ ID NO: 10243 - DNA, 458 bp, Homo sapiens
  MAP TO AC007255.2; EXPRESSED IN PLACENTA, SIGNAL = 1.4; EXPRESSED IN HBL100, SIGNAL = 0.98; EXPRESSED IN ADULT LIVER, SIGNAL = 1.2; EXPRESSED IN FETAL LIVER, SIGNAL =   1; EXPRESSED IN BONE MARROW, SIGNAL = 1.2; EXPRESSED IN BRAIN, SIGNAL = 0.99; EXPRESSED IN HELA, SIGNAL = 0.99
tcactcaaactgggcctttcaggtcacatgccggaggctgctgcagacaggacccagctgcctcaaatctgccgcctaacataagctgcggttcgaaaatcctgacagcacagggcttcctgggctctgcagagcaaactggaaagagctgggatccaggcactatgttctctgaagaactgtggctggaaaatgagaaaaagtgtgctgtggttcggaagtctaagcagggcaggaaacgccaagaactgctggccgtagccttcggggtgaaggtgggtgtcaaaggcggctttctttggccccctctcaaactctttgcctgttcacagatctcctccctggttcgaagggctgccctcacacacaacgacaaccacttcaattatgagaagacacacaactttaaggtaagcaagcctctgcattccttcttctgttacaaaagggcaggtgga

SEQ ID NO: 10244 - DNA, 465 bp, Homo sapiens
  MAP TO AL034420.16; EXPRESSED IN FETAL LIVER, SIGNAL = 1.1; EXPRESSED IN LUNG, SIGNAL = 0.65; EXPRESSED IN PLACENTA, SIGNAL = 0.67; EXPRESSED IN BT474, SIGNAL = 0.74; EXPRESSED IN BONE MARROW, SIGNAL = 0.79; EXPRESSED IN HBL100, SIGNAL = 0.86; EXPRESSED IN HELA, SIGNAL = 0.85; EXPRESSED IN ADULT LIVER, SIGNAL = 0.73; EXPRESSED IN BRAIN, SIGNAL = 0.72
gcagcatagcaacaatcgtgattgtagcacttgcctgaggttgtggtcacaaccaacgtagtaaacatcatttgcatatcagtaagaaaaagaaaacaggaggagatgagttcttacaaaacaaagcagattctagagatttcactgtgtctgcattgctccttccacgcaagttctcccttagctgaccgcaatcttgttttcttccaggaagtgaggaaactggtgtttgggaacgccgtcagtagcacttggtttttccacatctgcactgatacccgactgggagccatccatcttggagacagtggcgttattcacaacggaggtggcccccaaggaaaccgggagggtaggaacccccccactctggatcacagagatctcattggtcttcacggccagaccgccattgagcatgctggtgtactggttccacacaacagggtccacattcactgaagg

SEQ ID NO: 10245 - DNA, 452 bp, Homo sapiens
  MAP TO AL049767.9; EXPRESSED IN LUNG, SIGNAL = 0.75; EXPRESSED IN HELA, SIGNAL = 0.61; EXPRESSED IN BRAIN, SIGNAL = 0.7; EXPRESSED IN PLACENTA, SIGNAL = 0.61; EXPRESSED IN BONE MARROW, SIGNAL = 1.1; EXPRESSED IN ADULT LIVER, SIGNAL = 0.71
tggagagtccccaacaattctaaacaatgagagagatatctcccctatttgctaaaaaaaaattaccttgatattggtccatcctttcacatggttaccgaatggtaggtttatgtaaataatgggtttcggtcgttgttaagatgttgtgccaaatgacgatcactgtcatcttcctgctctataattacaatatccaatcccccatgagatccatgttggtgtctgcctttttgttcatgactgagtaggtcttgttctctatttgtagattggccagactctccttttgcattttcaccatgccatggctcttgcttaggatttggtgcctggatttgagacttgcctgctactagcttttcagtttggctataaatactgcgttgggatacatctttctgcacaccattttctccatagtggagtcgtctttcttccgtacttgaaga

SEQ ID NO: 10246 - DNA, 481 bp, Homo sapiens
  MAP TO AC009227.1; EXPRESSED IN FETAL LIVER, SIGNAL = 0.65; EXPRESSED IN LUNG, SIGNAL = 0.71; EXPRESSED IN PLACENTA, SIGNAL = 0.67; EXPRESSED IN BONE MARROW, SIGNAL = 0.71; EXPRESSED IN HELA, SIGNAL = 0.66; EXPRESSED IN BRAIN, SIGNAL = 0.93
tgaacaaaaggtgtttggggtacacagtaaattttaagaacgtaaatgaccaaaagctttagaactgttaaaaaaattttttttttgttcaatgttaaaatttctgctcatttttatgattccttatgatgaagacttcatggtccttgaaatatgagaagttgtttaaaacagatctaattaaaaatcccttacagcattttcataacataaaaaatactgagctccttagaaattgctccatttgcaaaatatatttataacttaaccaaaataaataattcatacctcaccaagtgagtaataacgtcttgggatctgggagtccggatagatgttttctaggtaccaagaaaagggcttacacttcagattttctcttagtgtttttctgactgacacatctccataatccactttgacaacacctggaatttttcagagaaacacaaatcagtttgtgctatttttgttttagtac

SEQ ID NO: 10247 - DNA, 475 bp, Homo sapiens
  MAP TO AL049594.4; EXPRESSED IN PLACENTA, SIGNAL = 1.3; EXPRESSED IN BRAIN, SIGNAL = 0.9
ccatccctcagtactcgtgctggagatcccagaccccacactgatggaactcagttgggctacttccagccttctcttattcccttggggccaagtagaaaagaagtctgtcttccctgcggtgtgggggagcagcagcaggccccagccccacatttgtttcttgcagttaaagaactgccctggtcatagcaggggtgagcacagtttccccctcagccttctctgcatcaacaatgcctttttctgaatcaggagccgtagatgagccctccactcactgcttgttccgacttgcttacaatgacttcctttttcttctccaactctgcagaccaacaaagccgtggccaagggggacttgcaccaggccagcaccagctcccggcgggccctattcctggcagtgctgtccatcaccattgggactggcgtctatgtgggcgtggccgtggccctcatcgcctacctctcc

SEQ ID NO: 10248 - DNA, 380 bp, Homo sapiens
  MAP TO AL049828.2; EXPRESSED IN BRAIN, SIGNAL = 0.84
tcatttaacaagggttctgggaataaaattcatttaaggcaaagtgacttcttcacttcctattaactgaggttattgaaagaaaaagcttttggtatggttaaaaatttatgttttcttcctttgaattaataggttcagagcagaaagagtgacttacttttcaaagaataatatttctcaataaggaaagcaaaaaagtcaatcataaaataatagtaatagtgtgataacaattataattatagcgttgcttgcccttccacagtctttgctaaagaaatcacccagaatgatatttttacaggtcatatcatgacacatctcttgtggcatcccatcttcttcattgccagtagtcaaattcaagccctgcctac

SEQ ID NO: 10249 - DNA, 412 bp, Homo sapiens; identical to SEQ ID NO: 368
  MAP TO AP000084.1; EXPRESSED IN FETAL LIVER, SIGNAL = 3.1; EXPRESSED IN PLACENTA, SIGNAL = 0.7; EXPRESSED IN BT474, SIGNAL = 0.61; EXPRESSED IN BONE MARROW, SIGNAL = 0.79; EXPRESSED IN HBL100, SIGNAL = 5.3; EXPRESSED IN LUNG, SIGNAL = 0.62; EXPRESSED IN HELA, SIGNAL = 0.66; EXPRESSED IN ADULT LIVER, SIGNAL = 0.75; EXPRESSED IN BRAIN, SIGNAL = 1.1

SEQ ID NO: 10250 - DNA, 435 bp, Homo sapiens
  MAP TO AC007881.2; EXPRESSED IN BRAIN, SIGNAL = 0.99; EXPRESSED IN LUNG, SIGNAL = 1.1; EXPRESSED IN PLACENTA, SIGNAL = 0.94; EXPRESSED IN HELA, SIGNAL = 1.2; EXPRESSED IN HBL100, SIGNAL = 0.97; EXPRESSED IN ADULT LIVER, SIGNAL = 1.2; EXPRESSED IN BT474, SIGNAL = 1.1; EXPRESSED IN FETAL LIVER, SIGNAL =   1
gacacttgagcctggtctccctcagtccaataacccttctgccaggttgagcagggccccttcctccttgtccggggcctcctgctctgagtcaccttgttttcttttgagctgagggcatttgttcttccagtgtcctatttctttacaagaagcacactggttacactgcaaactctgacagccaagctgagtttcattcccagggcccccccttcccttgcctccttcggaggacccctctgattgctgcagctgacaaccaggtcggtgtttcgccgggcctgatgtccattctctttgcggttttcctcaaggcttactgcagccctgtttacaaacacctggttggctatttctaataattgtgatgtattcatccctgcaaacccagcctgtttctgcagttttcttccaatgtcttctgcgctttga

SEQ ID NO: 10251 - DNA, 393 bp, Homo sapiens
  MAP TO AC007511.1; EXPRESSED IN PLACENTA, SIGNAL = 2.1; EXPRESSED IN ADULT LIVER, SIGNAL = 1.2; EXPRESSED IN BT474, SIGNAL = 0.96; EXPRESSED IN LUNG, SIGNAL = 1.1; EXPRESSED IN BRAIN, SIGNAL = 0.99; EXPRESSED IN HBL100, SIGNAL = 0.98; EXPRESSED IN HELA, SIGNAL = 1.6
  unsure 168
  unsure 193
ttgaggaaggaccccactacactaccaacaatttatgctgttaatctttctcccatccttccccaaagggacctttggcctttcaccagggtaactgtgcatgggggaaaggaaatattcagacatttcagggattattggacactggctctgagcagacattgattnccaggggacccaaaacatcactgtnggtcctccagttaaggtagggggttacggaggtcaggtgattaatggagttctagctcaggttgaacttacagtgggcccagtgggttctgggactcatcctgtggttatttcccctgtgccagaatgcaaacttgacatagacatacttagcagctggcagaacccccacattagctccctgacttgtagggtgagggc

SEQ ID NO: 10252 - DNA, 412 bp, Homo sapiens
  MAP TO AC010092.2; EXPRESSED IN HBL100, SIGNAL = 0.99; EXPRESSED IN PLACENTA, SIGNAL = 2.9; EXPRESSED IN BRAIN, SIGNAL = 1.5
ggtggggagatagaagatcccatgaaattatatatggcaacacatctttccctaatctaggggtttagagaatacctcacttaaaaaaattctttcaaatgagacctgaaggataagtacaaattggttcacaagagtggaaccaaaaggttacgaatgtatattttatggtttttcatgttttttatgcattttttccaagtttagccttgaaaagtaatggaaggttaatatggttttatttgtttatttttacacaggcaacaagaatgggtgaatcagcaaagggaagatattgaaaggcaaaggaaacttctagccaaacgcaaacctcccacagctaataattctcaggcaccctctaccaattctgaaccaaaacaaaggaaaaacaaagcagtcaatggagcag

SEQ ID NO: 10253 - DNA, 347 bp, Homo sapiens
  MAP TO AC011743.2; EXPRESSED IN BRAIN, SIGNAL = 0.97; EXPRESSED IN HBL100, SIGNAL =   1; EXPRESSED IN PLACENTA, SIGNAL = 0.93; EXPRESSED IN ADULT LIVER, SIGNAL =   1
cttgggatagaagctgagccttctctgtgatatactaccatgttatgcgtggaatagagaccatccctttcttgaaagttaagctaactcttagaaagccagccctccatataaaacgttttgagatttctgtatttctgaaaatggtttgaataagggacttcaaggctaagaaatttttctatatggaaaatacagggaatgatgttattaaagccatcaaatgtcacaattggggtttggtttttccaggtgaattattggaattctaacatgaatgaagtccagggggtggtgatagatcaggaggggaaggcggtgtaccggctgtttggaaagtggcatga

SEQ ID NO: 10254 - DNA, 494 bp, Homo sapiens
  MAP TO AL031284.9; EXPRESSED IN BT474, SIGNAL = 1.2; EXPRESSED IN ADULT LIVER, SIGNAL = 1.2; EXPRESSED IN HBL100, SIGNAL = 0.97; EXPRESSED IN HELA, SIGNAL =   1; EXPRESSED IN BRAIN, SIGNAL = 0.94; EXPRESSED IN BONE MARROW, SIGNAL = 0.93
ttgcagtattttgaagtcagacacttagcacatttttaaaatagtggtgggatttaaatggtttttttccatcttaagtagaattaagcgtttttggtatcatcttatcttgatagttttgggtctgagaatgaacaccagagcatttaaaatgcagatgggccacggcagcatctcttttttgtgctttatctccattgttttcatgatatatggaggtatttttttgtcgttttaaacagaaacagtgaattttctatttctagttattcacaaatgaccttaaattaattctttatttttatattttgcagtacatttttatacctgaaattcctggtggtgtgggcacttgtcctcctagcagattttgtcctggagttcagatttgaatacctgtggccattctggcttttcatcagaagcgtctatgattccttcagataccagggactggtatgtctggtaatacatgttttccatgtgtggggacc

SEQ ID NO: 10255 - DNA, 448 bp, Homo sapiens
  MAP TO AF109907.1; EXPRESSED IN BONE MARROW, SIGNAL = 1.3; EXPRESSED IN LUNG, SIGNAL = 1.8; EXPRESSED IN PLACENTA, SIGNAL = 1.7; EXPRESSED IN ADULT LIVER, SIGNAL =   1; EXPRESSED IN BT474, SIGNAL = 1.2; EXPRESSED IN BRAIN, SIGNAL = 1.1; EXPRESSED IN HELA, SIGNAL =   1; EXPRESSED IN HBL100, SIGNAL = 1.9; EXPRESSED IN FETAL LIVER, SIGNAL = 1.1
acaatctcccagcatccaagattggagattcctggtctgtgtagagtatatggttttgcacgaaatctttctagtcttgtgattgcttcagtttaatttgtcacataaaaccacaagtatttaatattaatgtatcagtggtttggtgtttttgttcccagtactgggctttgcgccgggaaaaatctgaatactggagctacagagttaactctaaaagtgcttttattggtttctagaaactggaagaagagaaaggcaaaaaggaaaaagaaagacaggaaattgagaaagaacggagagaaagagagagggagcgtgaaagggaacgagaaaggcgagaacgggaacgagaaagggaaagagaacgtgaacgagaaaaggagaaagaacgggagcgggaacgagaacgggatagggaccgtgaccggacaaaagagagagaccg

SEQ ID NO: 10256 - DNA, 495 bp, Homo sapiens
  MAP TO AC007679.2; EXPRESSED IN PLACENTA, SIGNAL = 0.85; EXPRESSED IN BONE MARROW, SIGNAL = 0.79; EXPRESSED IN FETAL LIVER, SIGNAL = 0.97; EXPRESSED IN ADULT LIVER, SIGNAL = 0.71; EXPRESSED IN BRAIN, SIGNAL = 0.77; EXPRESSED IN BT474, SIGNAL = 1.2; EXPRESSED IN LUNG, SIGNAL = 0.82
aggttatgtgcaaatactatgctgttttatatcaggatcttgagtatcctcaaattttagtgcctgagggaagacctggaaccaatccaccacacatgtagagggacgactgtgtttattttaaggtggtctacctaaatacagaatctttcactgcaccactctgcctcattgtgattccacccccatcacatatggggtaattatgaaagggaagctccacacaaccgaacacattttgtcatattatgtgtctatgatacgataaaatagataactcacctaaatggggaaacagatcagtgtccaactgatgtttctgggtgcacagtttcaccagtctctgcagtcggcttatacatgagaagtgtggagagaaggctgtggctttcatgaggatccggtcagtcctgggtgggtccacagtgggagccctactggatggcaggaggggcagaggcctcttgtgagacaactgccgtgcttgtgctatag

SEQ ID NO: 10257 - DNA, 478 bp, Homo sapiens
  MAP TO AC008079.7; EXPRESSED IN FETAL LIVER, SIGNAL =   1; EXPRESSED IN LUNG, SIGNAL = 0.68; EXPRESSED IN PLACENTA, SIGNAL = 0.65; EXPRESSED IN BONE MARROW, SIGNAL = 0.64; EXPRESSED IN HBL100, SIGNAL = 1.8; EXPRESSED IN ADULT LIVER, SIGNAL = 1.1; EXPRESSED IN BRAIN, SIGNAL = 0.89; EXPRESSED IN BT474, SIGNAL = 1.2; EXPRESSED IN HELA, SIGNAL = 1.4
agtcatgctgatccccctctctagagggtcccctgtagagcagattcactcacatggtgcttctcaaccttgaccacacattgaaataatctgaggaactgaaaaattctgataactgcccgcgccccgccccccggacccagaattctggtttaatttgtatgggagtggcctggatatgaagatttaaaatttctcccaggtgattccagtgtgcacctagctttgagaactacatgtaaggaggtttctggctgttcttgtgtggcaggatcacggtgcccaggggagctgacgagcagaggagaagcgtccctttccagatgcttctgctgctggagaagatgcaggacagccggcagaaagcagtgcggcccctggagctggcctactgcctgcagaagtgcaacgtgccctgtaagataccctcccactgggctcctggctgctgatccaaaggggatgggaagcttagaga

SEQ ID NO: 10258 - DNA, 469 bp, Homo sapiens; identical to SEQ ID NO: 3770
  MAP TO AL035551.6; EXPRESSED IN LUNG, SIGNAL = 0.67; EXPRESSED IN ADULT LIVER, SIGNAL = 0.74; EXPRESSED IN BRAIN, SIGNAL = 0.7; EXPRESSED IN PLACENTA, SIGNAL = 0.67; EXPRESSED IN BT474, SIGNAL = 1.2; EXPRESSED IN BONE MARROW, SIGNAL = 0.81; EXPRESSED IN HBL100, SIGNAL = 0.97; EXPRESSED IN FETAL LIVER, SIGNAL = 0.62; EXPRESSED IN HELA, SIGNAL = 0.68

SEQ ID NO: 10259 - DNA, 357 bp, Homo sapiens
  MAP TO AC008277.1; EXPRESSED IN ADULT LIVER, SIGNAL = 0.85; EXPRESSED IN BRAIN, SIGNAL = 1.3; EXPRESSED IN PLACENTA, SIGNAL = 1.5; EXPRESSED IN BT474, SIGNAL = 1.3; EXPRESSED IN FETAL LIVER, SIGNAL =   1; EXPRESSED IN HELA, SIGNAL = 0.89; EXPRESSED IN LUNG, SIGNAL = 1.1; EXPRESSED IN HBL100, SIGNAL = 0.86; EXPRESSED IN BONE MARROW, SIGNAL = 1.4
tttccacctagttttaggaaacacaaggtaaaatcttttagtaacaatccttgagatctgccagtatccaatgctgtattttaagtaaaggtaattcacccacctagcattttaagaggaaaccataataacactattctcttgatatatagggttggatgtgtccagagcctgcatcagaaagggaggacttggtatattttgaacataaatcatttactaaattgtgcaaggagcatgatggagaatttactggcgaagacgaaagcagtgcacatgcactagaacggaagagtgacaaccccctagatatagctgtaaccaggctggctgatttggagcggaacattgaaagaa

SEQ ID NO: 10260 - DNA, 370 bp, Homo sapiens
  MAP TO AL035686.11; EXPRESSED IN FETAL LIVER, SIGNAL = 0.82; EXPRESSED IN LUNG, SIGNAL =   1; EXPRESSED IN BRAIN, SIGNAL = 0.95; EXPRESSED IN HBL100, SIGNAL = 1.2; EXPRESSED IN HELA, SIGNAL = 0.69; EXPRESSED IN ADULT LIVER, SIGNAL = 0.72; EXPRESSED IN PLACENTA, SIGNAL = 0.72; EXPRESSED IN BONE MARROW, SIGNAL = 0.7
agaccagggtgaggtcaatggagaactcactttggagcagaagttaagaggccaccaaggaacacagtaatcaagataagtcatattttaatgccatattgttaaaaaattgaaatgaccaaaaaatatgtcaaacaaaatgtcatacacacagacacacatatatacacacacatacactcgctcaatgcatatatatatgatatatatatatatatacacatacatatatgatgctgtatataaagacaggatcagtcacagcactgtgccgagccatattagagcccgatgcatacggaaacatcaccaacactgatcctttctttatctgaaattttaatattttcttcatcatggatttttggca

SEQ ID NO: 10261 - DNA, 479 bp, Homo sapiens
  MAP TO AC008176.1; EXPRESSED IN FETAL LIVER, SIGNAL = 0.67; EXPRESSED IN LUNG, SIGNAL = 0.87; EXPRESSED IN ADULT LIVER, SIGNAL = 0.88; EXPRESSED IN BRAIN, SIGNAL =   1; EXPRESSED IN BONE MARROW, SIGNAL = 0.65; EXPRESSED IN HELA, SIGNAL = 0.64
tgatctctgccacttgctttctaaattctataatgacaatacattgtatagtagcaataaaacctcttttatggatactaaataggtctgaaaaaataaaaaataaaataaaaattttaaaaacctcttttaaaaaataaaaatcaaacgagagaatgttttctgaaagaaaaatactataaattgcttaacaaatataaggcttcactattgttagcacacataaaaacaatacaatgggctcacatttcatatagtatcacttaccaatcccactgtcatctaaccgcatgtagccttccgccagcgagctgaaaccagttaatcctcccatggctgcataaggaatgtcctgtcccactggtttttcctgagccaatctttcttgcttagtttccactactgtgtcatgggcatatgcaggctgaccacaagcacaagtgaagcagctatggaatcctgaacacttggaacctgaa

SEQ ID NO: 10262 - DNA, 486 bp, Homo sapiens
  MAP TO AL035420.14; EXPRESSED IN HELA, SIGNAL =   1; EXPRESSED IN PLACENTA, SIGNAL = 0.65; EXPRESSED IN BT474, SIGNAL = 0.73; EXPRESSED IN FETAL LIVER, SIGNAL = 0.58; EXPRESSED IN LUNG, SIGNAL = 0.69; EXPRESSED IN BRAIN, SIGNAL = 0.71; EXPRESSED IN BONE MARROW, SIGNAL = 0.67
tgtgtcttcctggattaggtttgtactggaatgagaagaggaaaagtattgaaagaggaatccaaatatctgcgtccatgccttgttatgtgactgagggccaatcactttccccttttggcacgtgtccatctctgtaaaatgaaggtattgggatgggtggcacacttagtagtggttactagcactggctctacagtcattcggggcttgccatgtactagctggggggactagggcaagtgattccatttcctcatttccttacttgtaaaacaggaccagtactagtatctgtttcacaggattgttttgataattaaatgagataacatccttggaatgcttagcataatgtgagtgcataagaaacatttgataaatgtcaactattatgaccattattgctactccacaattcagctcaacattcttgaaggcctttgtattgggccctaggcctacaaaaacagaaatgaatccagc

SEQ ID NO: 10263 - DNA, 474 bp, Homo sapiens
  MAP TO AL096773.6; EXPRESSED IN ADULT LIVER, SIGNAL = 1.2; EXPRESSED IN BT474, SIGNAL = 0.99; EXPRESSED IN BONE MARROW, SIGNAL = 0.92; EXPRESSED IN BRAIN, SIGNAL = 0.9; EXPRESSED IN LUNG, SIGNAL = 3.3
tggtccagaagaatgtgtggatcagacgtaggaaataaattggatgtacagatatacagaagaagcaagcattcttattgcctctagcctaacctttcacatccttgcatgggcacgccacagttgtaatggattttttattgctggaccacctccaccaactgtcagctcacatcctcattattcactttgtcccaacgcagtgggatttgcagcaccatatcctctaaacagagtagcataactaaggctgattgatgtttttttctttctttgaatatacatacaggtggacacccatatccatgcagccgcttgcatgaaccagaaacatctgctgcgttttattaagaaatcttaccaaattgatgctgacagagtggtctatagcaccaaagagaagaatctgaccctaaaggaactttttgctaaattaaaaatgcatccttatgacctgactgttgattctctgga

SEQ ID NO: 10264 - DNA, 458 bp, Homo sapiens
  MAP TO AC007910.1; EXPRESSED IN LUNG, SIGNAL = 0.83; EXPRESSED IN ADULT LIVER, SIGNAL = 0.83; EXPRESSED IN BRAIN, SIGNAL = 0.73; EXPRESSED IN PLACENTA, SIGNAL = 0.73; EXPRESSED IN BT474, SIGNAL = 0.85; EXPRESSED IN FETAL LIVER, SIGNAL = 0.8; EXPRESSED IN HELA, SIGNAL = 0.92; EXPRESSED IN HBL100, SIGNAL = 0.79; EXPRESSED IN BONE MARROW, SIGNAL = 0.94
tgacaggaacagaggaggaaagtaaatgaccttgtactcttttgtcttacatttatatctttggggtgtaccctttatcttccttccattttgttgtgcccaatttcaaggatctcacaatcaaacaattcacacaatggaatttaaagtatatgtagaaatcttttatcattgtcataaagtatttggataatcaaggaaggtatgctcatagtacttcatattttttttccttctcttttaagctgagccattatctggatattgtggaagtaaacattgctcaccagatctctctacgttcagaagcattttttcatgcaatgacctctcaacacgagttgcaggactacctcaggaaaacttcccaggctgtaaaaatgcttcgagataaaattgcacagattgataaagtaatgtgtgaaggatcactccacattttaagactggcacttacc

SEQ ID NO: 10265 - DNA, 356 bp, Homo sapiens
  MAP TO AC007498.2; EXPRESSED IN BT474, SIGNAL = 1.1; EXPRESSED IN FETAL LIVER, SIGNAL = 1.2; EXPRESSED IN BONE MARROW, SIGNAL = 1.2; EXPRESSED IN LUNG, SIGNAL = 1.4; EXPRESSED IN BRAIN, SIGNAL = 1.4; EXPRESSED IN HELA, SIGNAL = 0.96; EXPRESSED IN HBL100, SIGNAL = 0.94; EXPRESSED IN PLACENTA, SIGNAL = 0.97; EXPRESSED IN ADULT LIVER, SIGNAL = 1.5
gattcatcctcagtgggtggtgacatggaaagccaaagtgctggcagcccagccatctcagagtctacctcttccatgcaggctctgtccccgtccaacagcacgcaggagttccacaagtcacccagcattgaggagaaaccacagagagcggtcccaagcgagtttgccaatggtttgtctcccaccccagtgaatggtggggctttggatttgacatctagtcacgcagagaaaatcatcaaagaagattctttggggatcctcttcccttttagagaccggggtaaatttaaaaacactgcttgtgacatttgtggcaaaacatttgcttgtcagagtgccttggacattca

SEQ ID NO: 10266 - DNA, 463 bp, Homo sapiens
  MAP TO AC006344.2; EXPRESSED IN HELA, SIGNAL = 0.7; EXPRESSED IN BRAIN, SIGNAL = 0.69; EXPRESSED IN BT474, SIGNAL = 0.68; EXPRESSED IN ADULT LIVER, SIGNAL = 0.67; EXPRESSED IN PLACENTA, SIGNAL = 0.78; EXPRESSED IN LUNG, SIGNAL = 0.89; EXPRESSED IN FETAL LIVER, SIGNAL = 0.72; EXPRESSED IN HBL100, SIGNAL = 0.82; EXPRESSED IN BONE MARROW, SIGNAL = 1.5
gggtcttcgataatttttaaatgtgtaaaagagttcaaagactgagaagtctgagaactgatggacaaatgcaaagtctttctgaatattttgtattaggacccaaaatttctaggtgtgccactgctcaaccctcatgaagccatcttaatgtgttttcttgtctggagtctgcacatagaatccaaactcatgaaatacacactgtgtgcccaaaaaagtgctcagaaatctgtctatgaatgttagtctgttcttttggatagcatgaagcttttacttacttggggaaagagtggtctctcatctcttttctttttgaggcactctgccattaatctcttcatggcttttggacagttactccgtaccttactgagatctggagacaggtatcctcgtcccaccataaaaattatctggagagagaaaaaaaagggaaataattcaaccttgtagataa

SEQ ID NO: 10267 - DNA, 375 bp, Homo sapiens
  MAP TO AC008045.4; EXPRESSED IN BONE MARROW, SIGNAL =   1; EXPRESSED IN LUNG, SIGNAL =   1; EXPRESSED IN BRAIN, SIGNAL =   1; EXPRESSED IN HELA, SIGNAL = 0.94; EXPRESSED IN PLACENTA, SIGNAL =   1; EXPRESSED IN HBL100, SIGNAL =   1; EXPRESSED IN BT474, SIGNAL = 0.91; EXPRESSED IN ADULT LIVER, SIGNAL = 1.2; EXPRESSED IN FETAL LIVER, SIGNAL = 1.1
tcatctctgaagacagggacacatttatggacattccttcctctgctctctaagactgcagtgattttatgtgcacatacatacattgaaaatgtatagttggctagatcctggaccccatataatagcttactggttactatacagcaggaggaactgaagagaaagaaagaatcaacagcaaaggtgcccatacctgttgcaatttgtattttgctcatgtcctagttcagcccatccaagggccaaccctgatagggcttaaatgttctcagcattagcttctcttcattaatatctgtttgtacctttctttgatgccgtatctatcctccataaggtacttattaattttcgcatcatcctgcttcatgt

SEQ ID NO: 10268 - DNA, 481 bp, Homo sapiens
  MAP TO AC007683.2; EXPRESSED IN FETAL LIVER, SIGNAL = 0.9; EXPRESSED IN LUNG, SIGNAL = 0.85; EXPRESSED IN BRAIN, SIGNAL = 0.9; EXPRESSED IN BT474, SIGNAL =   1; EXPRESSED IN BONE MARROW, SIGNAL =   1; EXPRESSED IN HBL100, SIGNAL = 1.4; EXPRESSED IN HELA, SIGNAL = 0.72; EXPRESSED IN ADULT LIVER, SIGNAL = 1.4
tttccagctgaaacactcccttttttccattagtattacagcgtgggggtacataaggttttatacatctaagttatgaaattttgggttttctgtgacaaaatttttttaatgtgagatacattttaaatgtgaatttaaaaattttaaaatgtgagttattcaatgtagttttaaaatgttaaaatatacatgaaaaagttttcatatattattaatataaaataatactcattgtttcatatttcaggtggattcatcattcctttccctttatgacagccacgtagcaaaggagattcttcttcgagtacttacgctatttcagaatataaagaactgcctcaaaatagaaggccatttagctgtgcagcctactttcactgaaggttcattgtttttcctgttacatggagaagaatgtgcccagaaaataagagctttagttgatcaccatgatgcagaggtgaaggaaaaggtt

SEQ ID NO: 10269 - DNA, 410 bp, Homo sapiens
  MAP TO AC010906.2; EXPRESSED IN ADULT LIVER, SIGNAL = 1.4; EXPRESSED IN LUNG, SIGNAL = 1.1; EXPRESSED IN BRAIN, SIGNAL = 1.1; EXPRESSED IN PLACENTA, SIGNAL = 1.4; EXPRESSED IN HBL100, SIGNAL = 0.98; EXPRESSED IN HELA, SIGNAL = 1.1
aaagccatccttggtgtgtcaccgattccaggacattaaggactcactgcagcacataatctgtgggcatctgtgtggggtgtgacttcattctgttctcccttatctcatagcttccttgtcctctgcaaacccaaactccatgtttcatgtctctggataatatccatacacccatgggattacaattccccaaacaggggaaaatgaaaaattaaaatggttttagagttgaatgtagttgtgactacaggaaagatgtcacatcatctcaaaaagtgagggtccgaccagaaagagactaaccagcatcctccaccatgagtcctcctcatgctctgggaacgcctcctcaaggctgagctgcagcattggcctggagccctgagtcagaggggtcctagcatcaa

SEQ ID NO: 10270 - DNA, 493 bp, Homo sapiens
  MAP TO AC007842.1; EXPRESSED IN BONE MARROW, SIGNAL = 1.5; EXPRESSED IN HBL100, SIGNAL = 0.96; EXPRESSED IN ADULT LIVER, SIGNAL = 0.67; EXPRESSED IN PLACENTA, SIGNAL = 0.59; EXPRESSED IN BT474, SIGNAL = 1.2; EXPRESSED IN FETAL LIVER, SIGNAL = 0.8; EXPRESSED IN LUNG, SIGNAL = 0.61; EXPRESSED IN BRAIN, SIGNAL = 0.74
ttcaaagggtttctcaccagtatgaattcggtaatgttcagtaagctggtaatgatatctaaaggtcttcctacactccttacatacaaagggtttcgcactggaatgagttttctgatgctgaataaggtttgaaacacgactaaagcctttcccacactccttacattcatatggttttacaccagcatgaatactctgatgttgaacaaggtttgagacacgattaaaggacttcccacattctttacatttaaatggcttctcacctgtgtgaatgttcttatggtgattaagctgggtgtgaagactgaaggccttgccacattccttacattcaaagggcttctcaccagtatgaaatttctgatgtcgaataaggtgcatatgaagtcgaaaggctttcccacattccttacattcaaagggtttctttccggtatgaatacttcgatgttgattaagatttgaaccacgacgaaagaatttccca

SEQ ID NO: 10271 - DNA, 449 bp, Homo sapiens
  MAP TO AC005973.2; EXPRESSED IN BRAIN, SIGNAL = 0.68; EXPRESSED IN BT474, SIGNAL = 0.75; EXPRESSED IN BONE MARROW, SIGNAL = 0.78; EXPRESSED IN ADULT LIVER, SIGNAL = 0.68; EXPRESSED IN FETAL LIVER, SIGNAL = 0.8; EXPRESSED IN LUNG, SIGNAL = 0.63; EXPRESSED IN PLACENTA, SIGNAL = 0.77
aaaggttctccaggtgatgggggaggctaagtttaggcgaaccagtgggtcccgaaccccagagtaaaggtagggtggcacggaagtgtgggggcggggcaccacagggtggggaccgaactggctcccagcatctgcagccagtggagagagaagggagcagagggcgggggcccagccgcggcgggagtccgggaaaggggcacgggtcgccaaggggacccaagctggtggagggggcgcccgggagcacgtgaggcgtgcagccaccccgctccctcccctgcggcggggacaggaaccagggcgaggctgggggacggcgcgctcacccgcagggcggacaggtcgatgtcgtccaggctgcgggcgggggctgggtcgcccatggcctccgtggggaacggggcaccggggccgctcacgctccggctcggttactccactgc

SEQ ID NO: 10272 - DNA, 437 bp, Homo sapiens
  MAP TO Z98884.11; EXPRESSED IN BONE MARROW, SIGNAL = 1.1; EXPRESSED IN FETAL LIVER, SIGNAL = 2.2; EXPRESSED IN LUNG, SIGNAL = 0.68; EXPRESSED IN HELA, SIGNAL = 0.6; EXPRESSED IN BRAIN, SIGNAL = 0.78
gatattttcatccattttggtttggaaaaaaaagtctgtaaaaagaaaatatcacctttggaaagtgatatttgaattaattgtatgcgttctaaaaattagcatattgtgaacagatttatttagaatttgttggtaccagtatactgtggcatggtgcaggaaactggattaaagtgattactgtgcttcagtcattatatcttcaaagaaacagaagctaagtgtattttgtttatgtatcttttagtggacatttttataatttttgaaacatattttatcattcctttccctaagatgaccttgcagcaggtctatgccagtgtgaacaaaattaaaaatctgggtcagcagctctacattgagtcaatgaccaaatcatcattcaagccagtgacggggacacgcacagaaccgaatggtggtggtgagtc

SEQ ID NO: 10273 - DNA, 418 bp, Homo sapiens
  MAP TO AL022319.2; EXPRESSED IN HELA, SIGNAL = 0.66; EXPRESSED IN BRAIN, SIGNAL = 0.92; EXPRESSED IN ADULT LIVER, SIGNAL = 1.1
tcctatcaccaggttccactctacacacttcgcatttgtaaatttattaaatccccacaatatctcaatgtggtagttccatcattatctttgttctatagatgaagatactgacctgcaagaggtcaggtgtcttgcctaaggttgcacatttagtgggtgggctgggattatgatcccaggcaatctcactccagagcctgtgctatcagcaactatgctattcatccaagtaggagcctagcttgaatttatggtgaggtttaaagggacattcgatttattctccgatctccctctaggactgggagctttgccatcctctcctatcaggctcatgctgcctcttctgtggaactaggcaactttcaaattgtggccctccgtcatggagccaagccatgctctgaccaattct

SEQ ID NO: 10274 - DNA, 414 bp, Homo sapiens
  MAP TO AC007405.2; EXPRESSED IN LUNG, SIGNAL = 0.72; EXPRESSED IN ADULT LIVER, SIGNAL = 1.5; EXPRESSED IN HBL100, SIGNAL = 0.94; EXPRESSED IN HELA, SIGNAL = 0.65; EXPRESSED IN BRAIN, SIGNAL = 0.69
tgaatactagaatttattccttccatctaactgtatttttgtgccccttaatggacttctctttatctcccttcttcccgtccagcttctggtaaccaccattctatgttctgcctccatgagatctacttttttagttctcacagtagtgattttaaatcttcagtctttagttatttcaatattttaaagtttcttcaattatatgcacaagtaaaacttacttctgccattaactctagtggggcctgagtattctttttagggttactatcttcatcatcatcttcatcattggtatcatcttcaccatcatcctctgctgattctgacaatttatcatcaatatcctgaaggcaatattcattatttttctcctgctttacaatgactgcatctttgctcacttcacct

SEQ ID NO: 10275 - DNA, 444 bp, Homo sapiens
  MAP TO AL121760.4; EXPRESSED IN BONE MARROW, SIGNAL = 2.2; EXPRESSED IN BRAIN, SIGNAL = 2.4; EXPRESSED IN HELA, SIGNAL = 1.6; EXPRESSED IN PLACENTA, SIGNAL = 1.7; EXPRESSED IN LUNG, SIGNAL = 1.7; EXPRESSED IN HBL100, SIGNAL = 1.5; EXPRESSED IN ADULT LIVER, SIGNAL = 1.5; EXPRESSED IN FETAL LIVER, SIGNAL = 1.4; EXPRESSED IN BT474, SIGNAL = 2.7
gaagacagccagacgaggagagaggcaatcgtgggcagtgcaggagaacaggaaacacagggggctttgcaagcacagaatagggactcagtaaatattcgtggttgaatggaaagctcttaggataatggctctcaggtagctctccaatgtgccagcctattgtgttagttagggcaggataactgctgttacagacaacccccaaatctcagtgactcataatctgtttacttgtcactcaggtcacagtccagtgtaggtcaactcctcatggtcactcagagacccaggtccttccatccaggggaggggatcttgatttcttttttgatcttctgcatcccccggcagaggagaggaaaagacagggtgtggaggagcatgggggaggttttatgggcaggcctggaagggattcatggccaattcacctggtcttgt

SEQ ID NO: 10276 - DNA, 354 bp, Homo sapiens
  MAP TO AC011330.4; EXPRESSED IN HBL100, SIGNAL =   1; EXPRESSED IN HELA, SIGNAL =   1; EXPRESSED IN PLACENTA, SIGNAL = 1.1; EXPRESSED IN ADULT LIVER, SIGNAL = 1.1; EXPRESSED IN BT474, SIGNAL =   1; EXPRESSED IN LUNG, SIGNAL = 0.98; EXPRESSED IN BRAIN, SIGNAL = 1.4
aagtgctcagtaaccggcagatgctcttgttggcattgatgttgtagttagtctactttgctcctaataccaacaactcctgcaatgattgatgtttagttttagggaaaaaaaatcaaaagaaagaagttaagtaaatttttgtttcttcctattatcatgttaacttgttctttcgattcacctaggcacattcttcatcccactaaacgaaccctcaggatctctatccttaccaacatggtaacaacaaagtcaaagacattccaggcactcttccagaaaacagaaaagttggatagccacttaagaaggatctccaggatgaaaataagcaagataaaccaagctgcc

SEQ ID NO: 10277 - DNA, 1971 bp, Homo sapiens
  MAP TO AC002382.1; EXPRESSED IN HELA, SIGNAL = 1.5; EXPRESSED IN FETAL LIVER, SIGNAL = 1.8; EXPRESSED IN BT474, SIGNAL = 1.3; EXPRESSED IN BRAIN, SIGNAL = 1.2; EXPRESSED IN LUNG, SIGNAL = 1.4; EXPRESSED IN BONE MARROW, SIGNAL = 1.2; EXPRESSED IN PLACENTA, SIGNAL = 1.8; EXPRESSED IN HBL100, SIGNAL = 1.2; EXPRESSED IN ADULT LIVER, SIGNAL = 1.7
accaagccatctggaaagtgttttacacaataccatctccataaactctaaaattttgcaagacaaacacgactctattgatgagacactagaagattcaattggcattcatgcttcattctctaaatctaacattcatctttcagatgtagattttactcctaccagcagagaaaaagaaactagaaatacattgaagaacactttagaaaattgtgttaatcacccatgccaagcaaatgcttccttcagcccaccaaacatttacaaccatagtgatgccaggatatctgaatgcctggatgagttttcatcactggagccaagtgaacaaaagagtacagtgcatctgaatccaaattccagaatagagaacagagaaaaatctttagataaaacagaaagagttagcaaaaatgttcaaagacttgtaaaagaagcatgtacccataatgtggcatctaaaccactaccttttctccacgttcaaagcaaggatggccacaccactcttcaatggcctacggaacttctgctctttacaaaaacagaaccctgtatctcttatggctgcaacccactgtattttgattttaagctttctcggaacacaaaggaagaccacaatctagaggacttaaaaacagaattgggtaagaagcccttggaattgaagactaaaagagagagccaagtctcaggtttaactgaagaccaacaaaaattgatccaagaagattatcaatatccgaaaccaaagacgatgatagctaatccggattgggaaaaattccagaggaaatataatttggactacagtgattctgagccaaataagagtgaatatactttcagtgcaaatgatttggaaatgaaaaatcctaaagtgcctctttacctcaacacatctctaaaggattgtgctggaaagaataatagtagtgagaacaaacttaaggaagcttcaagggcccattggcaaggctgcagaaaggcagttctaaatgatatagatgaggacctatcttttccttcctacatctctaggtttaaaaagcataaattgattccctgcagtcctcatttggaatttgaagatgaaagacaattcaactgcaagtccagtccttgtacagtagggggtcacagtgaccatgggaaagacttcagtgtaattttgaagagtaaccacatcagcatgaccagcaaggtttccggatgtggaaaccaaagatacaagagatactctccacagtcatgtttgagtagatattcttcctctttggacacatcccctagcagcatgtctagcttgagaagtacttgttcaagtcatagattcaatggtaatagcagaggtaatttgctctgcttccataaaagagaacaccactcagttgaaaggcacaaacggaaatgtctaaagcacaactgcttctacttgtctgatgatataacaaagagcagccaaatgcagtctgaaccacagaaagagaggaactgcaaattgtgggaatcatttaaaaatgaaaaatactcaaaacgtagatattgtcactgcagagaaagacaaaaactgggcaaaaatcaacaacaattttcagggctaaaatctacgagaatcatctattgtgattctaactcacagatttcctgtactggaagcagtaaaaaaccacctaattgccagggaactcagcacgacagattggactcttactcaatagagaaaatgtattacttgaataaaagcaagagaaatcaagagtctttgggcagccctcacatttgtgatctgggaaaagtcaggcccatgaagtgtaactccgggaatatcagctgccttctaaagaactgttccagtggcccttcagaaaccacagaatcaaacactgcagaaggagagaggacccctctaacagcaaaaatccttttagaaagagtacaagccaagaaatgtcaagaacaatc

SEQ ID NO: 10278 - DNA, 1963 bp, Homo sapiens
  MAP TO AC005004.1; EXPRESSED IN PLACENTA, SIGNAL = 2.4; EXPRESSED IN BT474, SIGNAL = 1.2; EXPRESSED IN FETAL LIVER, SIGNAL = 1.1; EXPRESSED IN BONE MARROW, SIGNAL = 1.3; EXPRESSED IN BRAIN, SIGNAL = 1.6; EXPRESSED IN HELA, SIGNAL = 1.6; EXPRESSED IN HBL100, SIGNAL = 1.4; EXPRESSED IN LUNG, SIGNAL =   1
tccagattcggtaacatcctggggaacaaagtgctagaagtgtgtgaaggccaaggacagagcagtctgctctggtctggactatggcagtgcctccatagtcttggagaggagctggaggctggggaggagcctgagtgtgggtctgactatggacgccagtgtcttccctgaatgttgccatcccagggcaaccgtgggacaagaagaaagaaaaggtccacttgggaggttgagacgggcactggagggcctctcctaaggcaagccttgccggagcacagtgctcaggaaaagtccttgaggactcagtcgtgcaatctgagctggatgatttcacatgaaaggatactgggaagatttcagaaccaaacagcagggacggcatcttgttgctcaaatctatgaaggtcatcttgatggattcgagagaataaagtgccatgggcttactgttaggcctcttatcccatccactagctgccaaatatggattcagctgctctgtgctggatgaaaatccgtccaggagtcttttatatctgaggcgcttgtagcttttagccattggaagaagttcagaggaacaccgtcggtatcttagcttctgagtcttcatggctggggccagtttggaggcaaggatggacagcttgtttagtaaggctgattctttggtagtcttcctaaaattcaggctcctcaagggatggcacggtgtagacatctgctttggtatgtgactaaccaagctcttggtaggtgctgtttcaggttctaatcgtgtaggtgcagacagagtacacaaactgagaagtctgtgcgcttttgtggggatgggattggaagaactctttaaaaaggcagaacttctgattttacctatttttctcccaacaatgatttgctcctgataggaaactttcttacaagttcgatggggctgcttctttaagggaagaactcctttcttcgcaaaggcaccatgtatttgatcacacccagcagaggaggggtcttgtgctttccgaggggcaccaagaaggcaaggacttgtgcatgactcagtgtccttccttaatggatgatgtaacctttcctccttctggtcttctaacttctgagtctgtgccacaatgctgtccttggccagctttgctagggtgatttcattgatcatggtggactcatctttgtcagccttcggttggttctgattttgtgcatcatctaacaacagactagatgatatgcactgttgcgatatcgtatgtgctttttgttgacgtatatatttctcttctttctgcaacatgtagtccaaaacctcagggctctgctgtttttcagcatgattaagtatcccccggcatttaaaatgggtctgagagatgttgctcacgggatcgccatcgccagtttctctggtaaccaactcctcagattgctccccaacagttaagtaacccagtcgtcccctctgatgctcttcggtttcttctcctttcactttaatatctgttttcactgtcaaaggcaaatgtctgtcagaggaattctcgtgagggtgacaagctttgcaagcattcttttccacacaggtacatacgctgtctctgtcactagaattactccaatctcttgatactatttccttcatctcaggaaggactgtgcagtcctttacattttcacaaagcatttcaccatcttttggtttacaaagatttttcaggtcagtttcttcactgttaacattagtttctgaattttcttgagaaggcattatttcaatggatttcaggcttcttagggaaacagagctttcatcatggcaagacatcgactcttttgaggaaattccaaaggtactttctttgccaaactcagagtttggttctagtcttgatccttcagtcatttcttgtgtttctctgagagatgttcctttatcttgctgtcc

SEQ ID NO: 10279 - DNA, 459 bp, Homo sapiens
  MAP TO AP000037.1; EXPRESSED IN ADULT LIVER, SIGNAL = 0.7; EXPRESSED IN PLACENTA, SIGNAL =   1; EXPRESSED IN BONE MARROW, SIGNAL = 1.4; EXPRESSED IN FETAL LIVER, SIGNAL = 0.83; EXPRESSED IN LUNG, SIGNAL = 0.64; EXPRESSED IN BRAIN, SIGNAL = 1.1; EXPRESSED IN HBL100, SIGNAL = 0.83
tccctttcacaccaaaatcctcttcttcctcgaaggttacccatcctttcgggttgctaatttttaatgtagactggccctgtagatcaaaactgtccttaaagccatcaagtgaagatgaagccctgcttttgttatgaccaagaggctgcagagaagggaaaggactgatagtaacgggctcttctttggagaaccatgaagttgcctctgattcttcagacttggctctaaatgggtttccaggagcagcagtcctgtcactgaaaggatttgtcctggtcaagccagtaataaatgggtttggagaacttcgcatattttcctgggattgactccgagctggaattggaggcattgttggcatgcaacttacagaactcaaaacattactttgcgttgcagaaggcaactgaatcaacctctttgggtctggggtgggaacaggtgacgtttgaa

SEQ ID NO: 10280 - DNA, 437 bp, Homo sapiens
  MAP TO AL132780.1; EXPRESSED IN BT474, SIGNAL = 1.2; EXPRESSED IN BONE MARROW, SIGNAL =   1; EXPRESSED IN BRAIN, SIGNAL =  22
atcatgacaggctctccaggggctgaaatgaaaaccactggaatatgacagaacattaatacacccgggattctctcatactcacttttctgctgttgcttgatgctgaacgagaacgtgaacgtgaccttgatctggactctgatgttgatctggagcccatcttgggtctaccacgagggttggcatgagtacgtgcctgggctacatctctctgcttggatctgagcggtgaatgagaccgagaacctgaactgtcaggagagcgagatcttgatctagaactggaggaggaagatgaggaggaccggctagaggatgaatcagctgactgtttcaatctgtggcttgggagaagggtatgagaagctcttctgccttccttctgttccaaagatggctgtttcagacattcttcagtgattcctttggccagt

SEQ ID NO: 10281 - DNA, 383 bp, Homo sapiens
  MAP TO AL121760.4; EXPRESSED IN BT474, SIGNAL = 0.92; EXPRESSED IN FETAL LIVER, SIGNAL = 1.5; EXPRESSED IN BONE MARROW, SIGNAL = 1.2; EXPRESSED IN BRAIN, SIGNAL = 1.1; EXPRESSED IN HBL100, SIGNAL = 1.3
cacccagtcttctccagaccccatggctgaccacagttttaggctgctatccctgactgatgggccgaattgctgagttctgagcccctcatctttgcccctagacgttggctggactctcgaccatctctgttttccccctcccctatgtggatcagggcatttcagaagtaggcctagaacagatggtttcagcaaaaatatcccgggccttcccacctgaactctccctgcccctcactctctagaagaaaaaacaagtgatggcaaggcaacctggaaaaatccacacatttacacaagctctgatccttctgtacatcttcatgttttgcatgcaccaccacccacagaccctgtggtccctgatccaagacaaggag

SEQ ID NO: 10282 - DNA, 330 bp, Homo sapiens
  MAP TO AL050326.3; EXPRESSED IN ADULT LIVER, SIGNAL = 1.1; EXPRESSED IN HELA, SIGNAL = 0.76; EXPRESSED IN BRAIN, SIGNAL = 0.74; EXPRESSED IN PLACENTA, SIGNAL = 0.96; EXPRESSED IN BONE MARROW, SIGNAL = 0.86; EXPRESSED IN HBL100, SIGNAL = 0.84; EXPRESSED IN FETAL LIVER, SIGNAL = 1.4; EXPRESSED IN LUNG, SIGNAL = 0.67
ggcacagccagattcacctggggatacccatactcacctgggcacagccagattcacctgggaatatccagattcatgtgggtatattcatattcacctgggcacagccagattcacctgcaagcacccatcacagccagtttctcctgggactatccggattcacctgggtatattcatattcacctgggcacagccagattcactggccacacccagattctcacagccaatggactgtcagatgcgccagtgctcacattccagcccctgctgcctgatgccccagggcaagagtcattctcaacatctcacacagcacaagcagct

SEQ ID NO: 10283 - DNA, 485 bp, Homo sapiens
  MAP TO AP000031.1; EXPRESSED IN FETAL LIVER, SIGNAL = 0.59; EXPRESSED IN ADULT LIVER, SIGNAL = 0.68; EXPRESSED IN PLACENTA, SIGNAL = 1.4; EXPRESSED IN BT474, SIGNAL = 0.6; EXPRESSED IN BONE MARROW, SIGNAL = 0.63; EXPRESSED IN LUNG, SIGNAL = 0.71; EXPRESSED IN BRAIN, SIGNAL = 0.69
cctggtcgaaagaaaatggattttgtagttcatcccaagttctaattccagcgcagccacttgccgggtggtcttgggtgaattacttaaccacccttagcctttttttctctgctgtagagtgactaacagagccttcgaacagggtctgggtagacttgggggcggtggagagtatctcgaagactttccaaaggcttcgaaagcacatgggtggttttaagagaagcagtgtgcagattcccaacctccactttctccctgatacggtttggaactgtgatctcacccaaatctcctgtcgaatggtaatccccagtgttgaaggtgggcctggtgggaggcgatgggatcttgggggtggatttctcatcagtggcttagctccatccccttggtgctgttctcctgacggtgagtgtgtccttgcgagacctggtcgtttaaaagtgtgtggcgcatcctccttcgctttctgtcttgct

SEQ ID NO: 10284 - DNA, 480 bp, Homo sapiens
  MAP TO AC008168.2; EXPRESSED IN BRAIN, SIGNAL = 0.97; EXPRESSED IN BT474, SIGNAL = 0.73; EXPRESSED IN HBL100, SIGNAL =   1; EXPRESSED IN HELA, SIGNAL = 0.93; EXPRESSED IN FETAL LIVER, SIGNAL = 0.96; EXPRESSED IN LUNG, SIGNAL = 0.64
tgaagccatatccctgtatgcattttagtaaatgtgataaaaataaattttagacagtataaggtaccaccaacgattatcaacattaggaacttttaaacacatccacatacaaagctcctcactctctgttctaaagtgcataagcgatgtggattaataaatacataggcaaatagaaatagtgaaaatcaagttgagatcataactaggcaattccagtttctactactacaataatcgggatgtaataataggtatgtagacaaggttaatgaaataatggctctggcccttgcaaaatctgattatgggcacaatccttattttaaaagggtgaggcaattcaaaaagaacaatttaattaaaagtaatcagaaaactggaatcaatagttattactgtcaagaactcactaagttcaggtaagccactgaaaaagagtcctttcttcaacagcaaagtaagcctcattctcca

SEQ ID NO: 10285 - DNA, 469 bp, Homo sapiens; identical to SEQ ID NO: 4790
  MAP TO AP000057.1; EXPRESSED IN ADULT LIVER, SIGNAL = 0.7; EXPRESSED IN BRAIN, SIGNAL = 0.85; EXPRESSED IN PLACENTA, SIGNAL = 0.73; EXPRESSED IN BT474, SIGNAL = 0.67; EXPRESSED IN LUNG, SIGNAL = 0.79; EXPRESSED IN HELA, SIGNAL = 0.8; EXPRESSED IN BONE MARROW, SIGNAL = 1.2; EXPRESSED IN HBL100, SIGNAL = 0.86; EXPRESSED IN FETAL LIVER, SIGNAL = 0.6

SEQ ID NO: 10286 - DNA, 457 bp, Homo sapiens
  MAP TO AC006008.2; EXPRESSED IN PLACENTA, SIGNAL = 0.67; EXPRESSED IN BT474, SIGNAL = 2.2; EXPRESSED IN FETAL LIVER, SIGNAL = 0.82; EXPRESSED IN LUNG, SIGNAL = 0.76; EXPRESSED IN ADULT LIVER, SIGNAL = 0.69; EXPRESSED IN BRAIN, SIGNAL = 0.8; EXPRESSED IN HELA, SIGNAL = 0.64
atagtagagacatctgtggagttcagaagatcattcaggaattttctttaagaaatgtctttggctccagtattaaagtggcttcttggaagaattggactgtagagtattgccaccaataaaactttctggaaagtgttggaacacacaccaacaatttaaaaggtactaggaaacctgttaatcatgagttagggatcaccttacatacctatcaggtgtccaacaaatacttgctccaatgaatcatattaattcaatagtcatcaatcatccatttaataaacatggtaaacccctattaagttccaataatatgagaacggagagccgcaatatgaacttagacattgccttcactgtccaacatgcagttctagtcataccctatccttcgttctttaaaatctttgatggcctaaagtgagatgatggtgaaatccattagctagaagga

SEQ ID NO: 10287 - DNA, 470 bp, Homo sapiens
  MAP TO AC011409.1; EXPRESSED IN PLACENTA, SIGNAL = 0.94; EXPRESSED IN LUNG, SIGNAL = 5.2; EXPRESSED IN BRAIN, SIGNAL = 2.3; EXPRESSED IN BONE MARROW, SIGNAL = 0.95; EXPRESSED IN FETAL LIVER, SIGNAL =   1; EXPRESSED IN ADULT LIVER, SIGNAL = 0.92
tacaatcccaccaagcaatgcctgagagatccagtttctccttatcctcactagcagttagtgttgtcactgctttgtattttagttgttctaataggtatggggtaacagctcctcatatttttaaaatatatttttgtcagtgcttgtggttattatatgtccatacaggtagaaaaaattaaagttcagaaatattttgaagataataggtaaaataatctgactattgtaaaaacacttcgcaaacctagaaatctagttaacaaagatggtggtgatctggttggtcataccttcatccaggacagcttgccactgaagtatatgctttggggaggaagttctaacactataagcctgacattgccagtctctgaatccaggcaaacctgcaggacaaggtggattctcacatattctgtattgttttctgggaccattacaatcccttgcttcagaatctagcc

SEQ ID NO: 10288 - DNA, 484 bp, Homo sapiens
  MAP TO AC007629.3; EXPRESSED IN HELA, SIGNAL = 0.9; EXPRESSED IN FETAL LIVER, SIGNAL =   1; EXPRESSED IN LUNG, SIGNAL = 0.79; EXPRESSED IN BT474, SIGNAL = 1.5; EXPRESSED IN ADULT LIVER, SIGNAL = 0.98; EXPRESSED IN BRAIN, SIGNAL = 1.1; EXPRESSED IN BONE MARROW, SIGNAL = 0.76; EXPRESSED IN HBL100, SIGNAL = 1.1
accgatgtctagagtttgaagcttttgttcatctgtctcctcacaaataaagggtggagacatatccttcttcttatcactaacatataagtcactcaattctaaagtctcagctttcaatagtctctttttgcctaacaaaacctgtgcttgggttgaatctgtattggaacatattccagggtcatcagatcctgaagtccttccagagctctgctgagacttctggggttctgtgtcacttttagtcctgcgacagtaaggggaggctgtgcttggactaaggtgatcatcaggagtttgatgctcactttctgactctccaaccccgctatcatttacaaatacagagtcatcctgtgataagaagtctactgctccgctgataggctgttgtagttcaggctcccgcttcagatcactaagctctgcatagaatttttcttgatcaacagaactgtttgtatctgtttcatagtttcca

SEQ ID NO: 10289 - DNA, 377 bp, Homo sapiens
  MAP TO AC010873.2; EXPRESSED IN PLACENTA, SIGNAL = 1.1; EXPRESSED IN HBL100, SIGNAL = 0.93; EXPRESSED IN FETAL LIVER, SIGNAL = 0.94; EXPRESSED IN ADULT LIVER, SIGNAL = 1.4; EXPRESSED IN BT474, SIGNAL = 0.96; EXPRESSED IN BRAIN, SIGNAL = 1.2; EXPRESSED IN BONE MARROW, SIGNAL = 0.99; EXPRESSED IN HELA, SIGNAL = 1.1
caggcctgaggaactgaaagaagaacatgtgtcaagaatgcaaaaagcacggagcacaagatgatgcttaagaggaaagcaagaccaggcatacaggtccttgtaggccatggtagcaattttcattttgaaacaataatattgccagatgtacatatctggtaactgtgtggggaagagaatagagaaagacaggagcagatatggggagatatttaagaaactacttcacagaccaggtaagaaatgatgacatgtttgactaggatggtggctgtggggagggagagagtcaagatgaccaaatttgctgatgtaacggatatgggtgtaggaaagagacagttgtcaatgatagttcctgggtttctgatttg

SEQ ID NO: 10290 - DNA, 484 bp, Homo sapiens
  MAP TO AL031390.4; EXPRESSED IN BT474, SIGNAL = 0.82; EXPRESSED IN HELA, SIGNAL = 0.69; EXPRESSED IN LUNG, SIGNAL = 0.81; EXPRESSED IN PLACENTA, SIGNAL = 0.97; EXPRESSED IN BONE MARROW, SIGNAL = 0.95; EXPRESSED IN HBL100, SIGNAL = 0.71; EXPRESSED IN FETAL LIVER, SIGNAL = 0.83; EXPRESSED IN ADULT LIVER, SIGNAL = 0.87; EXPRESSED IN BRAIN, SIGNAL = 0.73
ttcgatttgaaaagtcacttgcttagtaaaggaagcagctttaacatcacaagttaaagaagctttaatatcacaagatcagatgttctatttcaaaagaactgaggttaccacctggagcaagtcattgttaataaatatacaatttatgaccataaggttacttaccagtatgacatttgagactggaatggcaacatgggagacatttaggtacaagatcatcttttctgaaccaaagatggacacctgagtcctttaaaaaatcatctctaagttacgagggagctctaagcccaaactcttcagatggaatttctcaacctgcctctccgagttcacgagtcgaacaccccagccaagagccattccctaggcacactgcaggcccagtgctatgcacctgagcagcaaagtgagcctttgggagggcagatgcaggaaagaaacctgcgcaaagccctggatgtgggcttgggactat

SEQ ID NO: 10291 - DNA, 490 bp, Homo sapiens
  MAP TO AC007640.1; EXPRESSED IN ADULT LIVER, SIGNAL = 1.3; EXPRESSED IN BRAIN, SIGNAL = 0.98; EXPRESSED IN BT474, SIGNAL = 1.7; EXPRESSED IN FETAL LIVER, SIGNAL = 1.2; EXPRESSED IN PLACENTA, SIGNAL = 0.81; EXPRESSED IN HELA, SIGNAL = 1.6; EXPRESSED IN LUNG, SIGNAL = 1.3; EXPRESSED IN HBL100, SIGNAL = 1.2; EXPRESSED IN BONE MARROW, SIGNAL = 0.94
atcagtcctccctgatggcaatggagacccatctaactaatcacacttctcctgattacctttctttttctccttaaaaacctaaaaatctcatcatttctattagcctgaaaataacgtctctctgttcttctcttcctccttcagcactaaatctcacttacactaggtttaatttaatgattctcctccttatattttctgtctcaccagtgtcctctcacactgatttacctgctacacataattattcttattgggcttatgtgccttttcctccgcttattcgacctctcacctggatagaggctgcagcagaaatctccactaacaatagtgtgtggatacctggaactacagataaacgttgccctgctcaaccaggagaacaaggcattgcatttaatgttaccatgggttataaatacccccctctgtgcctcagacatgcagctggttgcaaccatctagaaactcaagtctgggctgc

SEQ ID NO: 10292 - DNA, 454 bp, Homo sapiens
  MAP TO AL031297.4; EXPRESSED IN ADULT LIVER, SIGNAL = 0.75; EXPRESSED IN BONE MARROW, SIGNAL = 0.9; EXPRESSED IN HBL100, SIGNAL = 0.82; EXPRESSED IN BRAIN, SIGNAL = 0.68; EXPRESSED IN PLACENTA, SIGNAL = 0.78; EXPRESSED IN BT474, SIGNAL =   1; EXPRESSED IN FETAL LIVER, SIGNAL = 0.72; EXPRESSED IN LUNG, SIGNAL = 0.79; EXPRESSED IN HELA, SIGNAL = 0.75
taatcgttgagggatctgggctcttatgaggcttacactacaatgatggaactggaaatttctgtagagccatttaaatattagtaaattgaatgatgtcagaacaagtaatagatctttgccttatgtgaaatatagtgggtagggaggaaggtagggagctcaaaagagccttaactgcaagtatacattttctgatttcccccataatgtatatgaaactataatctggtttggggtcattaacttcagctcttcggtttgtatttttaaagcatttgaagacacttcgtcacccttgcttgctaagatttttatcttgtactgtggaagcggatggcattcatcttgtcactgagcgagtacagcccctggaagtggctttggaaacattgtcttctgcagaggtctgtgctgggatctatgacatattgctggctcttatcttccttca

SEQ ID NO: 10293 - DNA, 458 bp, Homo sapiens
  MAP TO AC005674.9; EXPRESSED IN PLACENTA, SIGNAL = 0.8; EXPRESSED IN BT474, SIGNAL = 0.6; EXPRESSED IN LUNG, SIGNAL = 0.98; EXPRESSED IN BRAIN, SIGNAL = 0.81; EXPRESSED IN FETAL LIVER, SIGNAL = 0.72; EXPRESSED IN HELA, SIGNAL = 0.91; EXPRESSED IN ADULT LIVER, SIGNAL = 0.73
agcagctgcctcttgtatctctaccatccatgcacagcactgctcagaatcataaagacttacataatgaattactcaggggctgcctcctttgcccaagcatcaccttaagccccagatgttgtgtctttcttgttcactgaagccccagtgccaaaaacagtaccttactccttgtaggtgctcaaaaatgtttgtttggatagatgaatatggttacgtggcttgtccaagagtctggcccaggatcagatttcaaagcccatgtgtgttttcctatagtttcttatatgttttttctgctttgctccagacggaagaaccagatccaatgatatgtgtaagaagaataatttcagtgcaattgaaagaacagatgcacaattgactctgtcaagtgatggaatgacccgtctcaaataaagccaatgaggttggtgatggtgaagatgatgatg

SEQ ID NO: 10294 - DNA, 476 bp, Homo sapiens
  MAP TO AC007344.2; EXPRESSED IN HELA, SIGNAL = 0.62; EXPRESSED IN BT474, SIGNAL = 0.63; EXPRESSED IN FETAL LIVER, SIGNAL = 0.63; EXPRESSED IN LUNG, SIGNAL = 0.6; EXPRESSED IN PLACENTA, SIGNAL = 0.68; EXPRESSED IN BONE MARROW, SIGNAL = 0.67; EXPRESSED IN ADULT LIVER, SIGNAL = 0.88; EXPRESSED IN BRAIN, SIGNAL = 0.82
caaggtacttcgattggggggtgggttttgggggagaagagttgggggaggggcagctttaaaatgatcaactcaatttcctaatagttatagttttattcaaatttctatttcatattagatgatacaatactttgtacttttgtggaattgctccatttttatctaagttgtcaaatttatgtggctagagatgtttctagtattaccttactattctcttgaagtctacagagtctatatgatattccttatttaatttcggatattggtaatttgtgttggtcttgttggaggattgtcaattttactgatcttttccaagaaccatctgtaagttgtaaggatttccaatgttgtttttctgtttctaatctcattgatttctgctattatttttattatttctttcattatcatactttggatatactttgcagttctttttctaggttattaaagtgggaacttaggtt

SEQ ID NO: 10295 - DNA, 471 bp, Homo sapiens
  MAP TO AC007736.3; EXPRESSED IN ADULT LIVER, SIGNAL = 1.7; EXPRESSED IN FETAL LIVER, SIGNAL = 0.58; EXPRESSED IN LUNG, SIGNAL = 0.65; EXPRESSED IN HELA, SIGNAL = 0.74; EXPRESSED IN BRAIN, SIGNAL = 0.68; EXPRESSED IN PLACENTA, SIGNAL = 0.73
gaaaccaggttacaacatcttcagtaaagtacacaagtcataacccattctttataaatctggagaccatttcttgttgctttttccatttttgtataagaaaacgcatagtttgattgctgagagtccaatatcattgtttttaaaacctagtcacaggttgattccttaacattggacactggaattcttgcagcttagagatagtttcttaccagggataatgccgtaagaaagtagaaaatccatctcagaacgactttgccatcctcacaaccaccacctttctgtcagggtcttccactgccccacacctcttccgcatctctctcctatgccccactgcagtacactgtgcattcttctctccacaagccaaagtgccttccaaaagagatactgttgtgaagctaaaaggacacgctaaaacccccaagaaagaaatgaacattgaggtcaagggggacagag

SEQ ID NO: 10296 - DNA, 466 bp, Homo sapiens
  MAP TO L29074.1; EXPRESSED IN PLACENTA, SIGNAL = 1.2; EXPRESSED IN LUNG, SIGNAL = 0.71; EXPRESSED IN HELA, SIGNAL = 0.8; EXPRESSED IN BT474, SIGNAL = 0.79; EXPRESSED IN BONE MARROW, SIGNAL = 0.88; EXPRESSED IN HBL100, SIGNAL = 1.2; EXPRESSED IN FETAL LIVER, SIGNAL = 0.68; EXPRESSED IN BRAIN, SIGNAL = 0.97; EXPRESSED IN ADULT LIVER, SIGNAL = 0.78
atctctcccgttttgtgctgataccataggaaaggatcagccttccacttgtgtagaaagaaagaatattaggcagccttccttatggttcatacagatatatgaataaatgctgataactaattcagcatcttggtgggtctaaacagcatcccttcattaactcacattgacctgtagatgcagaattataataactgtgaaatattttctgttacttagcagcaggctagattattagccattgtgtaactggaatcactggggtattgattacatttcagattctgtggttggtttaaatagagggtgtgggaataaagaacttccagtaagcatttcagaatcagtaactgttgaaccttttgaaaatattctcataggaaacgacgatcactcccgaacagataatcgtccacgtaatccaagagaggctaaaggaagaacaacagatggatcccttcag

SEQ ID NO: 10297 - DNA, 481 bp, Homo sapiens
  MAP TO AC006317.3; EXPRESSED IN LUNG, SIGNAL = 0.63; EXPRESSED IN HELA, SIGNAL = 0.61; EXPRESSED IN BRAIN, SIGNAL = 0.68; EXPRESSED IN PLACENTA, SIGNAL = 0.61; EXPRESSED IN BONE MARROW, SIGNAL = 0.76
tttgctatccacaatgtaatggatgcaaatacaacatacttttaaatttaatctgtattaataacatttcctccatcattcttttaagtgtagacaatcaacaaaacaaatgaccaaatttggatttgtacagtgctatggtttgaatgtgtccccccaaaagcatgtgttgcaaacttaaccccaagtgcaacagtgttgggagatggaacataatgggaaatgtttaggtcatgagggctctaccctcatgaatggattaatgctgattataaaagagcttcaaactctcttgagcatgttctctcaccatgtgatgtcttctgccacactgtgatacagcaagaaggtcctcaccagatatggccccttgatcttgaacttcccagtctccagaaccatctgccaaataaacttctattgcttataaattactcagtttgcggtgttctgttacagcagaacaaaacagaataagaca

SEQ ID NO: 10298 - DNA, 425 bp, Homo sapiens
  MAP TO AC007778.1; EXPRESSED IN LUNG, SIGNAL = 4.2; EXPRESSED IN BRAIN, SIGNAL = 0.97; EXPRESSED IN FETAL LIVER, SIGNAL = 0.92
  unsure 105
  unsure 118
  unsure 179
  unsure 207
  unsure 225
  unsure 288
aaaaattctcaaagtcttgattgaaataataatttaatcattcatgccatcagagtttatattaagttaataaatgcaaaacactactacgtatgatttttgaantgcatacatatgntagtagaagtataaaaattatgcaggggaatgataaatgtagcatagtgttttcctctganagaaagagtagattatgattggggaagnaggatactgaggtttaantgtgtatgtagaacattttattattcttataaatctgttgtgaataaagaaaaatattaagtncaatagttttgtgatgagtaaggacactatgtccatgatattgttctttgtaactttagtatgtttgtcacgtttcatgagaaatatatttcaaaaaagaaatatgatcttaatttgtgttgggctatggaaactga

SEQ ID NO: 10299 - DNA, 419 bp, Homo sapiens
  MAP TO AC012079.2; EXPRESSED IN PLACENTA, SIGNAL = 1.1; EXPRESSED IN ADULT LIVER, SIGNAL = 1.4; EXPRESSED IN BT474, SIGNAL = 1.1; EXPRESSED IN FETAL LIVER, SIGNAL = 0.98; EXPRESSED IN BRAIN, SIGNAL = 1.3; EXPRESSED IN LUNG, SIGNAL = 0.99; EXPRESSED IN HELA, SIGNAL = 0.97
actggtcctacccctgtgcagtcctccaactgcggcagccggctctgccctgactccactgaaactaccttgtcaaagtcccggagacttccaggtatggaactcggtgggaatatcttagaccttgtatcacatgacctttcttcagctttgaacactatgtactgcttttttcttttccttggaactgtctagtcccttggtttcactctgtatttcccttctgtctctggccacgctttctcagtctcttttgccaattttgaatacactatcattcccttaaacattggcttcttctcttctttctcttcctcttcccttctcttcactttatttactcttgctgcattgattgcttctgcttctgtggcttcattcatcaccgatatgcagatggcccacacattgtttttcct

SEQ ID NO: 10300 - DNA, 448 bp, Homo sapiens
  MAP TO AC007898.1; EXPRESSED IN FETAL LIVER, SIGNAL = 0.95; EXPRESSED IN BRAIN, SIGNAL = 0.92; EXPRESSED IN LUNG, SIGNAL = 2.2
  unsure 311
acacttgctgatggtatcgcggtgccgataattaaaactgccacccgaggattgcgattgcgagtctacagctgggatgttgtcaggaggcagcaactccagcagcttttaacgccatctccttacaggtggacctcgagtcccagcgccggaggaagcggcggcctccgcacatcattcgcaacgtctcacacaaatgaagaaaatctattaacaatccaataagtgaaatacaagcacgatgacccaggggttaaactgtctgcttggacgcaggagttggatccattaggtattgttcttttttctcnccttttgctgtatttaccgaaaagatcgccaaatggtctcccacttctgagcatagcttcaagttttcacgggtgaggctggagatgatgcgaaggatgggtagttcagcacctgcctgagttctttcctgtatctg

SEQ ID NO: 10301 - DNA, 480 bp, Homo sapiens
  MAP TO AC006552.7; EXPRESSED IN HBL100, SIGNAL =   2; EXPRESSED IN BT474, SIGNAL = 1.5; EXPRESSED IN BONE MARROW, SIGNAL = 7.3; EXPRESSED IN HELA, SIGNAL = 1.2; EXPRESSED IN ADULT LIVER, SIGNAL = 0.91; EXPRESSED IN FETAL LIVER, SIGNAL = 1.3; EXPRESSED IN LUNG, SIGNAL = 0.62; EXPRESSED IN BRAIN, SIGNAL = 0.85
tcttaaatccagggctttcggctctgcttgactactatttgtctgtatgtttacaatgaaataatttataatgtcgtggccttcatctctttatccataaaatgaaggcattaaatctgacactttttttagacttggagatgtgatgattgagggggcagaaagaaagtgtaagcagtggaaaaatgagccctgggtgtgtttcaaaatgtgttgaattcattgacatttattatgtgtctgcaaggtacattgccttgatcatggaattcttgcttactgtgaaaaagtaagcataaactcaaaaagcaccttaattattttgcctacctgagaacaatgctttcaaagaagtgggagaagagcctcccccaactggaagctgtgttactgacactatcagcaggtgagttacagagtctgtcagcaacgataagagcactggcgtatttcctattcagactgacgctgcactgagac

SEQ ID NO: 10302 - DNA, 417 bp, Homo sapiens
  MAP TO AC011493.2; EXPRESSED IN FETAL LIVER, SIGNAL = 0.98; EXPRESSED IN BONE MARROW, SIGNAL = 1.2; EXPRESSED IN ADULT LIVER, SIGNAL = 1.7; EXPRESSED IN BT474, SIGNAL = 1.2; EXPRESSED IN BRAIN, SIGNAL = 1.2; EXPRESSED IN LUNG, SIGNAL = 1.1; EXPRESSED IN PLACENTA, SIGNAL = 1.1; EXPRESSED IN HELA, SIGNAL = 1.5; EXPRESSED IN HBL100, SIGNAL =   2
ggtttttgagggtggtatgcctcagttataggagcagatttattatggtaaatgctgagaccagaaagcacgtgtaaatgcatcatagagtgattacatccaggcattattgccagccaagattgataaatatgcccaataagtataactgttctctgtgttagcccttgctgaaggaatactcatggcaatggtgatcactgctatcatagctatcattaaattactcaccgtgcctgctttcctcaggttttcttccaccatctgtgacagcttcttgatctgtccccaggtaggtggctgtatttgatgggtgttgctcatgatagttggggtcctcctcagcatcagtcttgacatgactgcaaccagggggtccttgggatcctcccagaatctcttcctcagcatctggct

SEQ ID NO: 10303 - DNA, 390 bp, Homo sapiens
  MAP TO AC012129.1; EXPRESSED IN ADULT LIVER, SIGNAL = 1.5; EXPRESSED IN BT474, SIGNAL = 0.99; EXPRESSED IN BONE MARROW, SIGNAL = 1.2; EXPRESSED IN BRAIN, SIGNAL =   1; EXPRESSED IN PLACENTA, SIGNAL = 0.97; EXPRESSED IN HBL100, SIGNAL = 1.2; EXPRESSED IN HELA, SIGNAL =   1
ccaaaggagctcaaaaggcttagacagcaggcagctgcagccattgccagtcacctctcccccaggagttcagtaggcttaagcagattccagctaagaggctgtaagaatatgcacatctgggcttggtatgatagtcccctgtggcatgggttcaggagtgggatcttctggtccacgggttgcacagttccataggaaaagcagtttccctggctggatagcgtgctcactcactgcctcccttggctgggagaaggaggttccccttcccagtgtggctctcagctgggctgccacattgcactgctcttccttctctccatggatcacaccaaccttctagtcaattttgatgagagaacctgtacactttggttgctggtgaag

SEQ ID NO: 10304 - DNA, 375 bp, Homo sapiens; identical to SEQ ID NO: 4015
  MAP TO AP000038.1; EXPRESSED IN ADULT LIVER, SIGNAL = 0.9; EXPRESSED IN BRAIN, SIGNAL = 0.72; EXPRESSED IN BONE MARROW, SIGNAL = 0.68; EXPRESSED IN LUNG, SIGNAL = 0.93; EXPRESSED IN HELA, SIGNAL = 0.77; EXPRESSED IN PLACENTA, SIGNAL = 0.78; EXPRESSED IN BT474, SIGNAL = 0.74

SEQ ID NO: 10305 - DNA, 472 bp, Homo sapiens
  MAP TO AL079305.2; EXPRESSED IN LUNG, SIGNAL = 0.88; EXPRESSED IN PLACENTA, SIGNAL = 0.92; EXPRESSED IN BT474, SIGNAL = 0.73; EXPRESSED IN BONE MARROW, SIGNAL = 0.86; EXPRESSED IN FETAL LIVER, SIGNAL = 0.61; EXPRESSED IN HELA, SIGNAL = 0.75; EXPRESSED IN ADULT LIVER, SIGNAL = 0.66; EXPRESSED IN BRAIN, SIGNAL =   1
gaaccacttcctgagaaaccactaaaggtaatactatagttacttaagaccaattaatttgagctactgatcttgccttcaaaattttcagtactatacttgggaccaaaaaaaaaatgtcagcaatttcctcagatgttctaggaagtatggtttggagacactgaaacgtcaaccttattgttgacttctattgaacagtcagtggtagagaaggagcccttaaaatatagttagctgtgattgtttttcctggagcctcatagctacatttgctaggcaaccaagaggcaagttttggggatataaaagcagtacaatggggtaatggtaagatgagagagatgctgttatatacatggagatctgccagtactggaaaagttataatagttaaaatgatgataatgatgatgatgatgatgatgatgatgatgatgatgataatgatgatggtggtgatttggtagga

SEQ ID NO: 10306 - DNA, 449 bp, Homo sapiens
  MAP TO AL023513.1; EXPRESSED IN HBL100, SIGNAL =   1; EXPRESSED IN PLACENTA, SIGNAL = 0.82; EXPRESSED IN BRAIN, SIGNAL = 0.97; EXPRESSED IN ADULT LIVER, SIGNAL =   1; EXPRESSED IN HELA, SIGNAL =   1; EXPRESSED IN LUNG, SIGNAL = 0.8; EXPRESSED IN FETAL LIVER, SIGNAL = 0.85; EXPRESSED IN BONE MARROW, SIGNAL = 0.8; EXPRESSED IN BT474, SIGNAL = 1.1
aagatgttttcaatttacagtgggttagtcaggatgtaaccccatcataagtcaaagagcacctatattgtcattcctcttaaggttttatttgaaggaatgattccattatacagagggtaagttgaggcccagaaatgacaagggacttcccaaaggctgcagagtgagttaataaggctttctgactgtcctagcccagagctttctctgtcataccacaggcctcagtttgcccatctgtaaaatgacggtgctaggccagcacccccacctcctaggtgccttttggttctgcctttacagaagttattctcccacctttttctgcagtctagtcctcagttggagcatctggctgtcagctacctttggggccacgaagtgtcctccttcatccccaggactcctaccctgaggagtcactggggaccttttagctggagcag

SEQ ID NO: 10307 - DNA, 456 bp, Homo sapiens
  MAP TO AC005075.2; EXPRESSED IN BRAIN, SIGNAL =   1
aaaatgcagctgttacacacaagtgtattttgccaaatgcctaaaaattccgtcacaatcacatcatcgtcatccatccagtgatcttcaaagactataagcaggtaatgtaaatatagtggtcaatgctgtaaatgtgtctctccataattcgtatttgtccaaaacatgtgatatccctttaacctgtgcacagtctggaggcagttttattgagtgagtagttgagtgagagaacaaaatgcccagcaaaacttctggcctccacagtttgctgatgcaggagcccactctgctgccgatgggctgctccctggaaatcatctatcccatccgtccatcccatctcatcccagtgagccagcccctcagcagtgtgtgctgctgagattaagcaagtgcaccaaagacacatgagacaacgtactgccagtgagctggtagcttctggtttgc

SEQ ID NO: 10308 - DNA, 1969 bp, Homo sapiens
  MAP TO AC003037.1; EXPRESSED IN BRAIN, SIGNAL = 1.2; EXPRESSED IN LUNG, SIGNAL = 1.3; EXPRESSED IN HBL100, SIGNAL = 1.2; EXPRESSED IN HELA, SIGNAL = 2.1; EXPRESSED IN BT474, SIGNAL = 1.2
tgagcagagaggggcttatcatagagtaacggttcagagcaagggctttggggtcagacttgggcttgagtgccagcttcacagtcaactgtgacctgagaaaagggaagagtgagcccttcccagctgtttcagagaataatggtagaatagtagcctgcacatggctaagtgctcagtaaacaacaagtcttattattaggtattccctggggccatatgttttatttcagctaaatgctgatattcgtagaatcatgtagaagaatgtgtaggtataaaggaatgtaatggtgcctttttattttacagggttcttgaagcttttgagattaacaatggcaggaaaatcatcactttttaaagtaattctccttggagatggtggagttgggaagagttcacttatgaacagatatgtaactaataagtttgatacccagctcttccatacaataggtgtggaatttttaaataaagatttggaagtggatggacattttgttaccatgcagatttgggacacggcaggtcaggagcgattccgaagcctgaggacaccattttacagaggttctgactgctgcctgcttacttttagtgtcgatgattcacaaagcttccagaacttaagtaactggaagaaagaattcatatattatgcagatgtgaaagagcctgagagctttccttttgtgattctgggtaacaagattgacataagcgaacggcaggtgtctacagaagaagcccaagcttggtgcagggacaacggcgactatccttattttgaaacaagtgcaaaagatgccacaaatgtggcagcagcctttgaggaagcggttcgaagagttcttgctaccgaggataggtcagatcatttgattcagacagacacagtcaatcttcaccgaaagcccaagcctagctcatcttgctgttgattgttagattgttgatgcattctaaccaactcacacatatacacaaaatcaacatggggatggagaagagaattagcgtttgcagcagtgtatcatctactaataaaattaaactaatgttgctgcttcattagttggtgggagaagggacacatccactcttggaggaatatatttactcaataatggcaccttacatttataaattgtaacagttgtctaataacgtttctttaatttaaatatgtaagttgcagagctaataaatgaaatgaccaagactttaattataataaaaataagaaacttgactattctagaagttatacttggattttttcctgggaaaatggagaactactttttatatgtgtatgtttttatgcaattagcattgtattcttggttcagggaaatactttcctaaagcaataatgttagatattaaagattaaaatctaatgtatttgcaatgcattgttaatttacttcttcattctcttcaaaatgatttaaccattcctgttttcattctacatactagaattactctcactagtaattactcatcatttgtgtgccattcatgcacccccacccccataaatcatgttccacagtctcaggcggagggtgggcccccagtggtacaagagttgcttcatacagtctgtaatacatccagctaaattcaagttgtctatgaatggaaagcctttccatagatagagttcagttttaagaaaaaggctaactactgaacttggagaacagacaaatgtgcatttgataactgatgtaataattacaatgtactgtgtggaagatacaaaattacaattcgattaatggactaaatatttttgttactttcttgacccttggggaaagtttcttaattgaagttaaaacattcctttataacacaagacacaagctgactttatcactctcagaagaaatactaagaaggattgtactttgtgagagggtaaacgaagacatctttattcggcaatgtattt

SEQ ID NO: 10309 - DNA, 403 bp, Homo sapiens
  MAP TO AC012111.1; EXPRESSED IN ADULT LIVER, SIGNAL = 1.1; EXPRESSED IN BT474, SIGNAL = 1.1; EXPRESSED IN BONE MARROW, SIGNAL =   1; EXPRESSED IN BRAIN, SIGNAL = 1.1; EXPRESSED IN PLACENTA, SIGNAL = 0.93; EXPRESSED IN HBL100, SIGNAL = 1.1
tccagggttgaagagacaatgcatctctgcaggatacgttactaaagagtaaatgtgtgtgtgtgtgtgtgtgtgtgtgtgtgtgtgtgtcagagaataagcaagcaaggatggggagatctgtaggtaactactgtactcaggtgctcacttgtgccagcggggactcacatagctgtgcattataaactcacagtcatcaagattgatgtatacgcagtcaaggggagagaaaaaaagggcttggtttccaagactatcatggaaaactgactattgtttcaccaaggccaaaaccttacagttgccctcacagtcgttattggtggagttactggtggcatatttggggccatcatgagttccctagctcctattaatcccgtggcctctgtggttaatt

SEQ ID NO: 10310 - DNA, 405 bp, Homo sapiens
  MAP TO AP000009.2; EXPRESSED IN BT474, SIGNAL = 0.98; EXPRESSED IN BONE MARROW, SIGNAL = 2.5; EXPRESSED IN BRAIN, SIGNAL = 0.96; EXPRESSED IN FETAL LIVER, SIGNAL = 1.4
ttaggggaaaatgaggagggactgctaatgcgtatggagtttctttttgaaaatgttctaaatttagaccgtggtgatgtcagcacatcctgtgaatatgctaagaacaccgaaccgtacacttcatttgagttgtatagtgtgtaaattatgtctcaacaaagctattataaaaaatacaacacagggattcttggatttacctctcttcatacaagattgggatagaggcataggagctattgataacaaaaagccagcactggaagcatggcatgagtctcttgggggcttcattagcagtggaataattctccagggagtccacaaacaacagtggcagagctgcaaggaggaagataatgggagtgttaggattctggatgaggtgatgttgggcaagag

SEQ ID NO: 10311 - DNA, 409 bp, Homo sapiens
  MAP TO AL121789.3; EXPRESSED IN BONE MARROW, SIGNAL = 1.1; EXPRESSED IN BRAIN, SIGNAL = 1.1
cagaatgagcccttccactcgttccgaatggcctgtgcagtcgcattcagggggctgggactgcccgtggcacctgcacagcacttctcccaccatttctccaactgtgctctgcactgttctaaaaataagtttcctgtagttcccaatgtttcacagtttgttcatgctatttcccttatcctggaatgtattgcccttgtcctccaatcagagttaaaattacttctgtttaagaactcaagtcaaacaccacctcctcctccatataacttttctgctccttttccctcaagcaagtttctggctccttcctttgtgctctcggtgaatcttccactgaagcaacacggaaaccacacacaaactgtcatttgtggcaggctgttgagtgcctgtggcttcaaat

SEQ ID NO: 10312 - DNA, 1988 bp, Homo sapiens
  MAP TO AB001523.1; EXPRESSED IN BT474, SIGNAL = 0.93; EXPRESSED IN BONE MARROW, SIGNAL = 1.2; EXPRESSED IN BRAIN, SIGNAL = 0.97; EXPRESSED IN PLACENTA, SIGNAL =   1
ttgtcgtttgaaattgagaggtagttgacctgtatttctcttaggtttgtcaaagcagacttgagaaggttaatttctgtacattttatgatttctaggcattacgtaggtatttgctaatattctgcttttgatacaatagcctttggggggtgtgaagatggcaggaggctgggctcagctgctgtgcccatcactgctgcttgcttcagtctgctctcggtgatcttactgtgtccgcggcctgctgctgcttactgtcaggaagtgtgacttggggagtcacttacgataatgtctatttacaggtcataagatagtgctacccatgcattcctttgcacaactgcgagatctccattttgatccctccaatgccgtggtccacgtgggcggcgttttgtgcgttgagataaccatgtacagccagatgcctgtgcctgttcacgtggagcagattgtggtcaatgtccacttcagcattgagaaaaacagctaccggaagactgcggagtggcttaccaagcacaagacgtccaatgggatcattaactttccacccgagaccgcacctttccctgtatcccaaaacagtttgcccgcgctggagttgtatgaaatgtttgagagaagcccatctgataactccttgaacacgactgggattatctgcagaaacgtccacatgctcctgagaaggcaggagagcagctcctctctagagatgccctcaggggtggctctggaggagggtgcccacgtgctgaggtgcagccacgtgaccctggaaccaggggccaaccagataacattcaggactcaggtatgcgttcagggtgggaacttgactttcaagtttgtaaagcagggccgtggagcttacaagaactgtctggagtgtgctgtgaattgagtagagtcctttgttctcctaaccctgtttttgtctctgtccttatacaaaaatacactgatgttttctttcgtgttttatacaattttctgacatttgataaattctgagtgaagttcttaacgtagatatttgttcttagattaagttagctttttaactcattggattattggattcagttagctttcccccctgcatatgaaaatacacaccctcatttgttaaaatgagctttcaaagaaggtggtacactttcccactcaaacttattttccttttgtggctggctgggtgtcaaaactggtgtttctcacccactctaacataaagttttctctgacacaggatatcctgtaagttccactaactcaacaggatttggcctgtggaaagtacagctatttgtcacattttttagtctagggcagggcttaaatctcgtgctgaatgtctctacaatgccacaaatacagtttagataagttgaaaataccttattaaagttaaatttaagcatcagttactcagaaaatcacgaattgagagattctgagggccttgtgaagagcccaagcttagaggtttaggcacaagagcagggggtacaagagggaaagaagtacaggcctttctggagttcagagagaccgctgcaccgcgctaccgcaggaagctaactgcaaaactgggtgacgtggtttcaaatgcctgattctttgactctaggccaaggaacctggaacgtatacactcaggcagctgtgcgcctcggtgggctccgtgtggttcgtcctccctcacatctaccccattgtgcagtacgacgtgtactcacaggagccccagctgcacgtggagccgctggctggtgagtggggtccccagcctttgaggaggcgtgctgctggggcagttctgaggagacctgctgagatgccaggcttctcataagttttagctgtgtctgcctttaagagatattttgggtaacataatggaaattttgcctgggaactagctgactgcctcttttgtttatctgaatgtttgctttcctgtaattgctttttca

SEQ ID NO: 10313 - DNA, 463 bp, Homo sapiens
  MAP TO AC008165.2; EXPRESSED IN HELA, SIGNAL = 1.2; EXPRESSED IN BT474, SIGNAL = 0.91; EXPRESSED IN FETAL LIVER, SIGNAL = 0.62; EXPRESSED IN LUNG, SIGNAL =   1; EXPRESSED IN BRAIN, SIGNAL = 1.3; EXPRESSED IN HBL100, SIGNAL = 1.1
gcccaaaatatggacttgacctcaaggtaaacaactagtcaattaggaattttttctttaataaaaatttggaattgaaatatcatcatttcatagctcctaataaattggtaaatctaggcaatagtcttcagtggctgctgacaccatagggagaggccgccagacaccatgtgctgctggtggaccttgcttgccccgtgcaaggagctcagtaacagccactcttgccacatgtgcagatacaacatagggcttcatgtgcaaaacctgtcacagagaagtgatggatgctcactcctacacagcatgggctggatgcaggagtttcgggtgcaccatggttgggagaggcactggctgtcgggctggtctgcgtgaacacccttgtagggcagagccagccctgcccatgtcatgtaacatctttgtgggtgagcctcagaggtgggaacattgagtt

SEQ ID NO: 10314 - DNA, 480 bp, Homo sapiens
  MAP TO AP000311.1; EXPRESSED IN BT474, SIGNAL = 0.87; EXPRESSED IN BONE MARROW, SIGNAL = 1.1; EXPRESSED IN HBL100, SIGNAL = 1.3; EXPRESSED IN FETAL LIVER, SIGNAL =  32; EXPRESSED IN LUNG, SIGNAL = 0.66; EXPRESSED IN BRAIN, SIGNAL = 0.69; EXPRESSED IN PLACENTA, SIGNAL = 1.1; EXPRESSED IN HELA, SIGNAL = 0.92; EXPRESSED IN ADULT LIVER, SIGNAL = 0.98
ggacagttatggggtaaggcttttttaaaaagtgcagagaataagagcttgaattatagtgcattttttttttcagcattactgcttagactcttttcccagacacttggactaagatgaagagattcctatgccatatgtcaatctaaagagggcagaggcttgggacttcactgtagttgggtgctgggtctattcaggggttaatttagttctacttaaagctgtgactttttccacaggtggatgaaagccaaactggagaacccggctggcttggaggagaattaaaaggaaagacagggtggttccctgcaaactatgcagagaaaatcccagaaaatgaggttcccgctccagtgaaaccagtgactgattcaacatctgcccctgcccccaaactggccttgcgtgagacccccgcccctttggcagtaacctcttcagagccctccacgacccctaataactgggccgact

SEQ ID NO: 10315 - DNA, 464 bp, Homo sapiens
  MAP TO AP000037.1; EXPRESSED IN LUNG, SIGNAL =   1; EXPRESSED IN ADULT LIVER, SIGNAL = 1.3; EXPRESSED IN BRAIN, SIGNAL = 0.92; EXPRESSED IN PLACENTA, SIGNAL = 1.3; EXPRESSED IN BONE MARROW, SIGNAL = 1.1; EXPRESSED IN HELA, SIGNAL = 1.2; EXPRESSED IN BT474, SIGNAL = 1.4; EXPRESSED IN HBL100, SIGNAL = 2.2; EXPRESSED IN FETAL LIVER, SIGNAL = 1.6
ttgctgagtgtggattgctctgaaatctgaaaacatgacttgtgaattgcttatatccaaaatgcagacacaatgctgggtgttggtttacttgtttccggtttttcaaccctcttttctaagcaaaagatgtccaaactatacagacccacagaatctaacagatgtctttatattcctcctcctagaactctcagaggatccagcactgcagctggtcgtcactgggctgtgcctgtgtgcctggtcacggtgctgtggaacctgctcagcatcctggccgtcagccctgactcccacctccacacccccatgcacttcttcctctgcaacctgtccttgcctgacatcggtttcacctccaccacggtccccaagatgatcgtggacatccaatctcacagcagagtcatctcctatgcaggctgcctgactcagatgtctctctctgccatttttggagg

SEQ ID NO: 10316 - DNA, 475 bp, Homo sapiens
  MAP TO AL049837.3; EXPRESSED IN PLACENTA, SIGNAL = 0.77; EXPRESSED IN BRAIN, SIGNAL = 0.85; EXPRESSED IN LUNG, SIGNAL = 0.71; EXPRESSED IN HELA, SIGNAL = 1.7
ggtgaaattgggtgaggatgcccccaattccagtgtggtgcatgtctccagtacagaaggaggtgacaacagtggcaatggtacccaggagaagatagctgagggagccacatgccaccttcttgactttgccagccctgagcgcccactagtggtcaactttggctcagccacttgacctcctttcacgagccagctgccagccttccgcaaactggtggaagagttctcctcagtggctgacttcctgctggtctacattgatgaggctcatccatcagatggctgggcgataccgggggactcctctttgtcttttgaggtgaagaagcaccagaaccaggaagatcgatgtgcagcagcccagcagcttctggagcgtttctccttgccgccccagtgccgagttgtggctgaccgcatggacaataacgccaacatagcttacggggtagcctttgaacgtgtgtgcatt

SEQ ID NO: 10317 - DNA, 487 bp, Homo sapiens
  MAP TO AC011019.1; EXPRESSED IN FETAL LIVER, SIGNAL = 0.94; EXPRESSED IN BONE MARROW, SIGNAL = 1.1; EXPRESSED IN BRAIN, SIGNAL =   1
tctcttatttattgctctaactggaactttcagtactatgttgaataatagtgatgaaaacaggtatccttgttcagctctaattttatttatttgtgtcttctctctctctctgtccttttagttattctgactaaaggtttgtcattattgtttatctttgcaaaacaacagctttcctttggttgttctttgtgatttttgtcatcatttcaatttcatttatttctgctctgatctttgttattttttttcttctactagtttggggtttggtttgctcttgcttttctagttatttaagatgcatatttaggttacttatttgaagtttttctactttttcaatatagaagcttagagctataaaggttcctcttagtactgctttcactatatcccacaggcttttatatgttttgttttccttatcatttgcttcaagaagtgtttcatttttcttcttaatgtcttcattgacctggtg

SEQ ID NO: 10318 - DNA, 394 bp, Homo sapiens
  MAP TO AL132708.1; EXPRESSED IN BONE MARROW, SIGNAL = 1.7; EXPRESSED IN ADULT LIVER, SIGNAL = 2.5; EXPRESSED IN FETAL LIVER, SIGNAL = 2.9; EXPRESSED IN BT474, SIGNAL = 1.3; EXPRESSED IN BRAIN, SIGNAL = 1.4
ggagataaaagtctgcaggggcctcaaccccccaggcatcagctctcagagccagcccccgcctaccacagaatcacacccaccattaccaattttgctttgcgtttgtataaagagctggcagcagacgcccccggaaacatcttcttctcgccagtgagcatctccaccaccctggccctgctctctcttggggcccaagctaacacctcagctctgatcctggagggcctgggattcaacctcacagaaacccctgaagccgacatccaccagggcttccggagcctcctccacacccttgccctgcccagccccaaactcgaactaaaagtaggaaactccctgttcctagacaagcgactaaagcctcggcagcactatttggacagca

SEQ ID NO: 10319 - DNA, 385 bp, Homo sapiens
  MAP TO AL050327.6; EXPRESSED IN LUNG, SIGNAL = 0.67; EXPRESSED IN BRAIN, SIGNAL = 0.7; EXPRESSED IN PLACENTA, SIGNAL = 0.59; EXPRESSED IN BONE MARROW, SIGNAL = 1.1; EXPRESSED IN HELA, SIGNAL = 0.6
gcattttgtagatgcccctcaaaaatcaagcccccctgaagtgcactgaattgtttctccccaaaagataggtccacctggattgtgacctaatttggaataagggtcgttgcagatgtcactaaggtaaggatctggagatgatatcatcctacattggggacggccctaaatccaatggcaggtgtccttttgagaagctaaaaaggaggagacatgaggagaaggccgtgtgaagactgaggcagagactgggggtgatgtgtctacgagccaaggaatgccaggatccccgcagccaacagacactgggagagagctgggagggacaggtccttccacaccgccttcagagggagtacggtctggacggcatcttcatttt

SEQ ID NO: 10320 - DNA, 482 bp, Homo sapiens
  MAP TO AL031770.12; EXPRESSED IN LUNG, SIGNAL = 0.85; EXPRESSED IN HELA, SIGNAL = 0.78; EXPRESSED IN FETAL LIVER, SIGNAL = 0.67; EXPRESSED IN ADULT LIVER, SIGNAL = 0.67; EXPRESSED IN BRAIN, SIGNAL = 0.79; EXPRESSED IN PLACENTA, SIGNAL = 0.98; EXPRESSED IN BT474, SIGNAL = 0.86; EXPRESSED IN BONE MARROW, SIGNAL =   2; EXPRESSED IN HBL100, SIGNAL = 0.87
tattggtggttgtgcattgggatttaatttcgtatcagccctggagtgtggacatcacagagagttaaagtagtctcccatttcacacatgtaagatgggttaacaaaagcctcagagataaatttttaaagtaccaagtcttcaaagagatgccagcctactctgcaacaaatatttatagcacatttgagatctctactttgataaaaacagaccgagtgtcacaccctgtaaacaccctgcaggcagtgccgggtttccatggcggaagctgccagcagatggctctgaggatcgccttacctgagagggcatcctgtgcttcgaagaatgtactgagaccgcctttcacataggccaggctgccctcactcttcttgttagcctgtctctttaggttggtgactgccattttgagctgctcaaaactgaaatgaaataaagaaaccaaagtttgacacttctaacatgcaagaaagaa

SEQ ID NO: 10321 - DNA, 453 bp, Homo sapiens
  MAP TO AC006111.2; EXPRESSED IN HELA, SIGNAL = 0.67; EXPRESSED IN ADULT LIVER, SIGNAL = 0.79; EXPRESSED IN BRAIN, SIGNAL = 0.77; EXPRESSED IN BT474, SIGNAL = 1.8; EXPRESSED IN BONE MARROW, SIGNAL =   1; EXPRESSED IN FETAL LIVER, SIGNAL = 0.84; EXPRESSED IN PLACENTA, SIGNAL = 0.73; EXPRESSED IN HBL100, SIGNAL = 0.99; EXPRESSED IN LUNG, SIGNAL = 0.62
acatagttccagctgacatggtgactgaacctgcccccagggagtgtgcctcacacgacgtggctgtctccacagaggtcagggagtttgccattgttcccctgcatgcggccccgggggacgcagtagccgagatcgacgctctctatgacgtctacctggatgtccaagagaaatggggcttggaggtgaggccctcccaggggcagtgggcaccagcggcctccgcatgtcccagggccacaggcagcgtttcctggtaggacgtcatgttgatgggcgacttcaatgcgggctgcagctatgtgagaccctcccagtggtcatccatccgcctgtggacaagccccaccttccagtggctgatccccgacagcgctgacaccacagctacacccacgcactgtgcctatgacaggtgagcagggcctcgcgcttagggcagactgaggg

SEQ ID NO: 10322 - DNA, 465 bp, Homo sapiens
  MAP TO AC007510.4; EXPRESSED IN BRAIN, SIGNAL = 0.76; EXPRESSED IN PLACENTA, SIGNAL = 0.61; EXPRESSED IN BONE MARROW, SIGNAL = 0.7; EXPRESSED IN LUNG, SIGNAL = 0.76; EXPRESSED IN HELA, SIGNAL = 0.72; EXPRESSED IN FETAL LIVER, SIGNAL = 0.58
agaaggctttctcccgcagttaaactggtgcatgaattggaaggccgtctcctatagggatgtgaatctgaggattccatggtcttctttctatgtatggaaagaatgggctcagtccataaggaacaaaagcaaagagcttgtctattctcttctctcatcctgcaactccttctttattcttgggatttgacagctgtcctatggggtatggagcaagagagtgtgacataggaagatatcttggagccccagagacagaccccaacttgggggaaattcaacttacttagcctcttcagagatgaatacttgctggggttggtctttactgcagactcgtaggatgggggcaggtgggccaagttctggaacgagcgggagaaggagaggtcatagggctcggtggctgatgtcaggatgttgttcatccgtggcttctctgcaagaaaagggaggggtgtt

SEQ ID NO: 10323 - DNA, 475 bp, Homo sapiens
  MAP TO AC005632.2; EXPRESSED IN LUNG, SIGNAL = 2.6; EXPRESSED IN PLACENTA, SIGNAL = 0.65; EXPRESSED IN BONE MARROW, SIGNAL = 0.76; EXPRESSED IN FETAL LIVER, SIGNAL = 0.67; EXPRESSED IN HELA, SIGNAL = 0.72; EXPRESSED IN ADULT LIVER, SIGNAL = 0.72; EXPRESSED IN BRAIN, SIGNAL =   1
cattgccatcactgcagaactgtgctcccagggctggcaggtggaggaccctgagcctctggtgtcatcctcactgcagaactgtgctcccggggctggcgggtggaggaccctgagctgctggtgttgccgtcactgccgaactgtgctcccagggctggccgaatgcctggcttccaccctcagactttctttccaatgtgtgcagagggaacacggagggacagcagttgcagcagcccacacttgctgtgtcgggcatggtctcagtggctggagcgtgaagatggaggcggggatgggagtgggcggctctgagtcaagggacacctggagcccccagaagctggaagaggcaggaggggtcctggagcccccgagggagtctggccctgccaccaccttgatgttggcctctggcctccgggactgtgagagaagaaagggctgttgtcctaagcccctgtttgcagac

SEQ ID NO: 10324 - DNA, 466 bp, Homo sapiens
  MAP TO AP000238.1; EXPRESSED IN FETAL LIVER, SIGNAL = 0.63; EXPRESSED IN LUNG, SIGNAL = 0.65; EXPRESSED IN PLACENTA, SIGNAL = 0.84; EXPRESSED IN BONE MARROW, SIGNAL = 0.79; EXPRESSED IN HBL100, SIGNAL = 0.67; EXPRESSED IN BRAIN, SIGNAL = 0.86; EXPRESSED IN BT474, SIGNAL = 0.87
aagatgggaggtgtttgctgaaagctggaaaggacaattgcattctaaataaatttaaaatgctcctgggaaaattatgcttccaagccacacacacccacaaagggaaaatggtataatccaccacaggaagatgagtgacaaatgggaagtcaggagtgtaacctttaggaaggtggccactgggtatgttttggagttgaaacgagtttaactaaatggcaataaacaatactctgtcgacagaacagtctccattgcatgattgcatgtcattttctaggtctaattcgtctacaagagctcatcaaagctccctccagatataatattaaaatcaaaatccgccagctgccctctgggaataaagatgccaagcctttactcaaggagatgaagaaaggcaaggagttctatgtgatatttgattgttcacatgaaacagccgctgaaatccttaagcagg

SEQ ID NO: 10325 - DNA, 427 bp, Homo sapiens
  MAP TO AC011750.2; EXPRESSED IN ADULT LIVER, SIGNAL = 1.1; EXPRESSED IN BRAIN, SIGNAL =   1
aaataatctatacactccgaagaaaagaataaaaaagtacaatttcaagaaatttaagttacctaagtatacacttaaatctattctttgatacaattaaatgaagggagaattaactaaattagccttaatgcatttctcttaaccaattttacatgttacaataatagaatgctattaggcataatttaataattacctttctttaggtcaatcttaattttctttgcatttttattgctgccaaatcccatgagaggcgagagtgagggagaggatggttttcctcccagccttggtactcggggactcttgttttgttgcagggaagctgatgcatctgtttcaggactatcggttcctgtgagatttgctgtctttagtcccgattttccatggacaggaggcggcactttggttttcaaaa

SEQ ID NO: 10326 - DNA, 441 bp, Homo sapiens
  MAP TO AP000138.1; EXPRESSED IN HELA, SIGNAL = 0.65; EXPRESSED IN BT474, SIGNAL = 1.1; EXPRESSED IN BONE MARROW, SIGNAL = 0.86; EXPRESSED IN FETAL LIVER, SIGNAL = 0.62; EXPRESSED IN LUNG, SIGNAL = 1.1; EXPRESSED IN ADULT LIVER, SIGNAL = 0.95; EXPRESSED IN HBL100, SIGNAL = 0.83; EXPRESSED IN BRAIN, SIGNAL = 0.79
gggtaggagagaaacactgccaaatacacacaattatatagtcgcttaacgtacattatcacttcacactagaaagaaaaaagggaaacatgccactatgttgatataatgagaaaggctggtccaagaacagagaagtaaaacaaagtgagaaaattatcaagggacatgggtaacattttcctcagcgaaataaatgagatcacagaggtctcagactggaaaataatacactgtcacatgtatatcaaatataaaaatttttaagacctgaattttctttattacatataatactgggagagttagccttgatttaaagaaagccaacacttacttgctgtgttgaaatatttccaatgccacttttgcttcaacttccagagtttcaaatggaagatctttataaattaaagcatgagcatcttttgtgaaggaacg

SEQ ID NO: 10327 - DNA, 486 bp, Homo sapiens; identical to SEQ ID NO: 10232
  MAP TO AP000198.1; EXPRESSED IN PLACENTA, SIGNAL = 0.66; EXPRESSED IN FETAL LIVER, SIGNAL = 0.6; EXPRESSED IN LUNG, SIGNAL = 0.6; EXPRESSED IN BRAIN, SIGNAL = 0.79

SEQ ID NO: 10328 - DNA, 466 bp, Homo sapiens
  MAP TO AC005902.7; EXPRESSED IN FETAL LIVER, SIGNAL = 0.61; EXPRESSED IN HELA, SIGNAL = 0.78; EXPRESSED IN ADULT LIVER, SIGNAL = 0.74; EXPRESSED IN BRAIN, SIGNAL =  20; EXPRESSED IN BT474, SIGNAL = 0.68; EXPRESSED IN BONE MARROW, SIGNAL = 0.96; EXPRESSED IN HBL100, SIGNAL = 0.78; EXPRESSED IN LUNG, SIGNAL = 0.71
tcttttgccaagttgtctaatgtcaatttgttttctggcactgcttcttgaatgtcttccttgttgtccagcactggtttgggagctctcatctctatcaagttgtcttctattaattcctcaggtatagtatcaattagctgtttaatttctcaaagatctatatcttgaaactcttcacccctcacctttttgccatattcatgatctcttccatgactggctatgtcataaatcccgtgacgtcatgtacaacagctgaacagctttctccagcaggaacttactgtttcagtcttgatggctttcacagctttttctataacaatgatggcatcttccatggtataatccttccaggcttttatgatgttctctctactagggttctcttccatagcattggcaatcctttccatacagtactgtgtataatgagctttaaaggtcctgtgacaccctgatt

SEQ ID NO: 10329 - DNA, 459 bp, Homo sapiens
  MAP TO AC009758.1; EXPRESSED IN ADULT LIVER, SIGNAL = 1.1; EXPRESSED IN BRAIN, SIGNAL = 0.92
  unsure 58
  unsure 256
  unsure 269
tgtcttccttagccatgtgatgagtctatgacaatgggaaggtcaaacctctactatncagaccagactataggtgcactcctggtttgacctgactcgtagatctgtgaggaatgaaacctcattttccttatcatactagagaattgtcaaagatactctgcaattttcctatttagatttttcccctcaaccccaatccagcattctcattacttggcaagtgggataaaaaaagagaactatccatctacantgttctttctctnggaatagactgagcacatactcacgaatctgcttggtcttgactccatatatgataggattgaccatgggtgggaaaaggagatagaaaatagcaaggagtatgtggacacgaggggcagcatggcgggctacacggtgcatgactgaagagatgactactggagtgtaggtggacaggatggcacctat

SEQ ID NO: 10330 - DNA, 448 bp, Homo sapiens
  MAP TO AL080239.11; EXPRESSED IN ADULT LIVER, SIGNAL = 0.69; EXPRESSED IN BRAIN, SIGNAL = 1.2; EXPRESSED IN PLACENTA, SIGNAL = 0.8; EXPRESSED IN BONE MARROW, SIGNAL = 0.73; EXPRESSED IN HELA, SIGNAL = 0.7; EXPRESSED IN BT474, SIGNAL = 0.7; EXPRESSED IN FETAL LIVER, SIGNAL = 0.7; EXPRESSED IN LUNG, SIGNAL = 0.8
tccaaaataaactaggggatggatttgacctacaggccagaggtgtcaaccccttggctagattctgaagggtcttgaaggagttttactttcaggtgctttgggaagtcaatgaagattttttaaaagcagtgcagtggcatgattaggtttgtttccaacagacttccttctgcttctggaggctggactagaggtggtgaggagcagagtataagtggggaaagaagtcaggaagctcttgcaatagtgccgaccaattataaacctaatcccagctaagatgaaggaagaatagggttgtgagctatattttgaatgtcgactccatagcacttgccaatatactggatatgaaggtcgagggtgacagtggaatcaaggaaaaccctgagttctgtgccatgagcacctgcgctgataaagatgccattctctgagatgagga

SEQ ID NO: 10331 - DNA, 419 bp, Homo sapiens
  MAP TO AC012449.1; EXPRESSED IN BRAIN, SIGNAL = 1.2; EXPRESSED IN BONE MARROW, SIGNAL = 0.97
atccttcattgcaaagtggcatatgttgggtggcatattctgctacctttcattagggtcagaatagcaagaatattatttcaaagatacagcaaaggtctatgggaacaagagcagtcttcttacctctgtacctccacatagagagttgcaatgataaagaattgtttcctgagcatccttaaggaacaacattcctgaatcatgtctacttcattattatccctggcagaagagttggagaagtagttgcagttcactgtgtcaccaaacaagaatctcctttcctctacatatagggtaatgcccctccaaggaagaaatatgaggctgtcatagctccagccacttcccctggcctgacattctactcattggcctatgatgctcctaaaaagacagaggacacagtgtggagg

SEQ ID NO: 10332 - DNA, 376 bp, Homo sapiens
  MAP TO AF011889.1; EXPRESSED IN LUNG, SIGNAL = 1.1; EXPRESSED IN PLACENTA, SIGNAL =   1; EXPRESSED IN BRAIN, SIGNAL = 2.5
aaaaactggtccaattaccaattataaattttaataaagactaaacgaaaaggtttggctgttacatattctcaggccaaattgttgatgcatgtttggattaactagccctcaggctgcttccaatattatgggtaatcacaaaacgaccagctctaactcctcctctcaccagctggaagggagcacatcacatttgccatccatggttggcaaaactcaaggcatcaacaactggaaaagatctccaccttgggaatcattatacatattgtgatcctgcaatgggtcagaatccacaaaatacagttcccctgcatggatgtcagaaaagttagctagaaattcatcaggattgaagccaacccacacagta

SEQ ID NO: 10333 - DNA, 439 bp, Homo sapiens
  MAP TO AC012460.2; EXPRESSED IN BRAIN, SIGNAL = 0.98; EXPRESSED IN HBL100, SIGNAL =   1; EXPRESSED IN HELA, SIGNAL =   1
ggagaaaaattcacttccaaggtgatatatcaaagaagtgaattacaaaagaatattttcccttctgtctatctcaagcatgtccaattaatagttacgtaccctgatgaaaagtgcagtcctctcaggtccactgctctgtaacagggctccaataactgcaaagaaagtctgctgtaacacagctgggggcactgggaattcttcactcagtgttaactgctccacagccaagtttctagccacgtgacacacgacttcctcaccagtgagaaagtcaacaagattttttatgccttcagtgggcatgtctgggtactcgtcttcaagaaactgtgtaaggcaagtctgtgaaaaagatgtcccttgttcggatagttcttgattacttttaagattcagaagaacagcttctttctctatcccaagttgttggcgt

SEQ ID NO: 10334 - DNA, 431 bp, Homo sapiens
  MAP TO AF024533.1; EXPRESSED IN HBL100, SIGNAL = 1.1; EXPRESSED IN PLACENTA, SIGNAL = 0.94; EXPRESSED IN ADULT LIVER, SIGNAL = 0.99; EXPRESSED IN BT474, SIGNAL = 0.92; EXPRESSED IN FETAL LIVER, SIGNAL = 0.94; EXPRESSED IN BONE MARROW, SIGNAL = 1.1; EXPRESSED IN BRAIN, SIGNAL =   1; EXPRESSED IN HELA, SIGNAL =   1
agctggttcaccaggaagtggaaaactaggagcgcatttgggcaaagaagccacctgagtggggcttccagatgtgcacatggtggtggggcctgtcatgtgcggacgcaacagaaagagttagcagaaatgcagtgacaagcggggctggtgtggcagcccttcagtgggggtaggggcagcctgtggtccggcaggctgtggatgagagggagtagaacggtatgtgttgcaggctggagcctggaagcctcagctcccaggggatgaagtgaacgtgggggttgggggagaagaggaggaggaggaggagcaagaggaagaagaagaggaagaggaagaaagaagaagaggaggaggaagaaagaagaagagaggaagaaagaagaagacaacgaagacgacaattaagacgacgactaactcccagg

SEQ ID NO: 10335 - DNA, 421 bp, Homo sapiens
  MAP TO AC012306.2; EXPRESSED IN HELA, SIGNAL = 0.96; EXPRESSED IN HBL100, SIGNAL = 1.1; EXPRESSED IN ADULT LIVER, SIGNAL = 1.1; EXPRESSED IN BT474, SIGNAL = 0.98; EXPRESSED IN BRAIN, SIGNAL = 1.1; EXPRESSED IN BONE MARROW, SIGNAL = 0.97; EXPRESSED IN LUNG, SIGNAL = 0.93
tggaagccacaggtatcctctatcagtactttgggagctgttaacatgtgggttttacaaaaaccaaggctgtcacttaaccattaaactgcaattccaataaatacacacagcttgctagggcaaagggtaattttctaggttttatattctacaggatatacttaaacactaaagcctcaagattttgtaacaaaaacttatggtttttttgaaaccggaaaattgtggttctgtttttctcttctattttaattaagtttacaccaatttcatgcattaatatcaagtgtttctggggaaactaacctttgacccggacgtcactgtacctctgaaagtggtggtaagcagctttccaggggttccgatagtgacgaagcaaagtaatggggggtcttggacgcactgggacatatct

SEQ ID NO: 10336 - DNA, 441 bp, Homo sapiens
  MAP TO AC010908.1; EXPRESSED IN BRAIN, SIGNAL =   1
agcaattttgcctgaatttgagccattttgataaataaaagtgagttgtgtataatttatataatcttccagataaaatttatatttgtgtttggtgtttagctaggttagagagagatcaccttaacctaatctgaaattcaactgattataagctgaattttagtctttattaaagatgatttctttatccacaggtatagccttttgaaacctataactgatagcctgggttacttaccatggttacttcttcctgaaacaattacatcatatttccttttaaggtccattctcctgctaaaagttttgttcaccttcttcacttcttggccatagtttaataattgggaaatacctccagggtaaaagttgagacaaatcactatcctgcacttcatttttgtccgagatcttggctcttcgagtccttgctgcatt

SEQ ID NO: 10337 - DNA, 495 bp, Homo sapiens
  MAP TO AL049548.6; EXPRESSED IN FETAL LIVER, SIGNAL = 0.64; EXPRESSED IN LUNG, SIGNAL = 0.66; EXPRESSED IN ADULT LIVER, SIGNAL = 0.9; EXPRESSED IN HELA, SIGNAL = 0.79; EXPRESSED IN BRAIN, SIGNAL = 0.75; EXPRESSED IN BONE MARROW, SIGNAL = 0.67
cctattcagtttgcttgaaatgctaaattatacctcacctcctaactacttcccaacagctgtttgttcccaaggagaactgggcaaaattctgaaagaatcagtacagatctagtacaagtactcaaaaacgcaccaaaatgtatacaccatggagtggattcaacaatgtcaatttcagattgtaaaacagtaccatagtgaagtaaatggagtatttctctcaagttatgaatatccttcataatatacttttattctgtaggatatacaaaaagaacttcaaagtcaacaaagcaacatcagctctacccaagaaaatctcaatagcttgtgccgcaagtaccactcagctgagttggagagcctgggccgtgcaatgactggtctgataaagaaacatgaagccgtgagccagttgtgctccaaaacccaggccagcctgcaggaatctctggaaaaacacttcagtggtgagttctgaggggccttagc

SEQ ID NO: 10338 - DNA, 476 bp, Homo sapiens
  MAP TO AC008039.1; EXPRESSED IN FETAL LIVER, SIGNAL = 0.78; EXPRESSED IN HELA, SIGNAL = 0.71; EXPRESSED IN BT474, SIGNAL = 0.83; EXPRESSED IN BONE MARROW, SIGNAL = 0.7; EXPRESSED IN ADULT LIVER, SIGNAL = 0.98; EXPRESSED IN BRAIN, SIGNAL = 0.76
cctcctgtcatgttgggatagatgttaccttactaccctgcactcttgtagagagaaggggaaggccatggaagcaacacatgccccttttggtttattagccatggggctgccatcagagcacacatgccctgaagagaaaggaaagttgcctgatttctcagctcttcctgtttgaatgaaatcatgagtgggcaccatctgtctcagagcattaagcacagataacagtactggtgggaaaggccttcccccctcccaaaagggaactataaaggattgcatcaaactgcaaactccagggggcactaatcactttgccatttctgtaaatggcgccccctggagttgtaagtcatggtggccctgccggcgctcagcaattgcgctaggtcgcgaacccagagactacaggtaaggtctctgcatcaccagctatgtgacacctgggcaaggcacatcttcctgggcttcat

SEQ ID NO: 10339 - DNA, 397 bp, Homo sapiens
  MAP TO AC007744.1; EXPRESSED IN HBL100, SIGNAL = 0.88; EXPRESSED IN BT474, SIGNAL = 0.66; EXPRESSED IN HELA, SIGNAL = 0.66; EXPRESSED IN BRAIN, SIGNAL = 1.6; EXPRESSED IN LUNG, SIGNAL = 0.64
tgaattccattgattattagtgatgcaatggattgcttttaatggccatttgaaaatcaaatagaatcattccaaatagatttcagaacaatcagctatttaaaaaatatgtttccatatgctaatccactctgatatgcagacatggagaaaactaaaggttttacaaagtggagctccttgatggttttatcataactaacaagcttttttccatgtgaaatttgcttttctttttcaacaaatccaggtcttggatgttcaggaaactatagatcgtcaacagggtaaagagtatgaacatgaccttagtgagacagaaaaagctatagtcagagaaatgtgcaatgtaagtttaatgtgctttattgtgtattctgtgttgaaagccacatcg

SEQ ID NO: 10340 - DNA, 465 bp, Homo sapiens
  MAP TO AL049575.7; EXPRESSED IN PLACENTA, SIGNAL = 0.8; EXPRESSED IN ADULT LIVER, SIGNAL = 0.72; EXPRESSED IN BRAIN, SIGNAL = 1.4
tacctgtcttcaccaggagcttactggacatctgacactccaggttggatgccattttgccagtcgtgaccactgcagccgatgcagcaggaaggacagcatctgtgttttctgctcgcaatggtggcaaccgggtggccttcactgaggctgtaatggatgtcagcgcggccgtgactgtcagtgggcgtggcgtggatgctctgggcatctccaggttggtggggtttgggaggccggtgtgcatggcttgtggtttcctggggaggtaagttgtagacaacaggccagaggcagtgtccatgtttccttgcatggctgtatgtgtgctcgtggtatgtcctgttcttgcatacatgtaggttggtgtgaatgggaaggctgtatggactgcccctggtgtcctctttgggccagatgcggccttgtttgtgacatttttagcaagagtagtcatcgaactgc

SEQ ID NO: 10341 - DNA, 467 bp, Homo sapiens
  MAP TO AC007876.1; EXPRESSED IN PLACENTA, SIGNAL = 1.1; EXPRESSED IN HELA, SIGNAL = 0.95; EXPRESSED IN ADULT LIVER, SIGNAL = 0.91; EXPRESSED IN BRAIN, SIGNAL = 0.95; EXPRESSED IN BT474, SIGNAL = 1.4; EXPRESSED IN LUNG, SIGNAL = 0.88; EXPRESSED IN FETAL LIVER, SIGNAL =  91; EXPRESSED IN HBL100, SIGNAL = 1.1; EXPRESSED IN BONE MARROW, SIGNAL = 1.4
gagcaggaatagctcttggcgtccttactcagactcatgggacaaccccacaaccagtggcatacctaagtaaggagattgatatagtagaaaaaggctggcctcactgtttacaggtagtagtggcagtggctgtcttagtatcagaggctatcaaaataatacaaggaaagtatctcactgtctggactactcataatgtaaatggcatactaggtgccaaaggaagtttgtgactatcagacaaccaccaggtactactccttgagggatgggtgtttcaagtgcatatgtatgcagccttcagccctgcagtggctcacagtgttctcgcagaggatggggagttggtcgagcatggctgtcaacaggttgaagtccagatttttgccacctgagatgatctcttagaataccccttggctaatcctgaccttaacatatatagcgatggaaattcatttgtg

SEQ ID NO: 10342 - DNA, 447 bp, Homo sapiens; identical to SEQ ID NO: 3702
  MAP TO AC007790.1; EXPRESSED IN PLACENTA, SIGNAL = 0.77; EXPRESSED IN HELA, SIGNAL = 0.64; EXPRESSED IN BRAIN, SIGNAL = 0.83; EXPRESSED IN FETAL LIVER, SIGNAL = 0.63; EXPRESSED IN ADULT LIVER, SIGNAL = 0.7; EXPRESSED IN BONE MARROW, SIGNAL = 0.83

SEQ ID NO: 10343 - DNA, 460 bp, Homo sapiens
  MAP TO AC007736.3; EXPRESSED IN PLACENTA, SIGNAL = 0.68; EXPRESSED IN BT474, SIGNAL = 0.68; EXPRESSED IN HELA, SIGNAL = 0.77; EXPRESSED IN BRAIN, SIGNAL = 0.69; EXPRESSED IN BONE MARROW, SIGNAL = 0.76; EXPRESSED IN FETAL LIVER, SIGNAL = 0.79; EXPRESSED IN LUNG, SIGNAL = 0.75; EXPRESSED IN ADULT LIVER, SIGNAL = 0.78
gcccaccaggttaatctctctagcttaaagtaaactgaccaatcttaatttcatatgttaccttaattctcatttgtcatgtaacatcacatatacaaatgttctagggactaggaagtagacatctttcagatggtgttactctgccaaccataaggacggaatgtattgtcttttttatgaaaaaggtgtcttaacagcactaagaatattccgaattaaatgtaaataaaagtcagtgtgctagaagacttacctcagagatgtatttggaatgaaaagggttacaaattaagctgatgacgtaactaaaaaacatatcttcggaaacttttagtgttaatttagaagtccaatcttcaggaaacgttgagtcaaattcaacttctgggcctgacattctggagaatcttactcaaggaaagcattagtttttaaacagtccatgagacaacagagg

SEQ ID NO: 10344 - DNA, 400 bp, Homo sapiens
  MAP TO AC007993.8; EXPRESSED IN HBL100, SIGNAL = 1.3; EXPRESSED IN HELA, SIGNAL = 1.1; EXPRESSED IN PLACENTA, SIGNAL = 0.99; EXPRESSED IN BT474, SIGNAL = 1.3; EXPRESSED IN LUNG, SIGNAL = 1.1; EXPRESSED IN BRAIN, SIGNAL = 1.1; EXPRESSED IN BONE MARROW, SIGNAL = 1.5
acaccaggtcaggatcaagctcagcatccaatgtcacccagcattacagttcaacctttggactgggacttaccatcactccagaacccactacggaggttggacattctatacccctgaagaagactttagttcctccaaagcaccctaaggtgacacttccacatccagaccaggttcagacccagcattcaaacctgactcaagtcacagttgaacctctggacctggagcttaccataactacagaacctactacagaggttaaactgtctccaaccacagaggagacctcaactcagcctccagacccagggcttgccataactccagaacccactacagagattggacattctacagccctggggaagactacagctcctcatccagatcagct

SEQ ID NO: 10345 - DNA, 464 bp, Homo sapiens
  MAP TO AC007860.6; EXPRESSED IN LUNG, SIGNAL = 0.74; EXPRESSED IN BRAIN, SIGNAL = 0.74; EXPRESSED IN PLACENTA, SIGNAL = 0.65; EXPRESSED IN BT474, SIGNAL = 0.68; EXPRESSED IN BONE MARROW, SIGNAL = 0.87; EXPRESSED IN FETAL LIVER, SIGNAL = 0.6; EXPRESSED IN HELA, SIGNAL = 0.9; EXPRESSED IN HBL100, SIGNAL = 0.95
actcaaccaggaattggcacactatggcccacagcctgtttttgtaaataaagttttattggaacacagctatgcccatttctttacatattgtctgtgactgctttcctgctatagtgggggagtggaatcgtgagacagacctgtgccctgccgagcctaaaatatatattgtctggctctttacagcaaaactttgtggtttctgctctgaatgtcagggtaaccctgtctgaggatgatcacggatttcattttcccttgtttgttagcgttgcggtcagccgcaagttgaaaacaaggaaccagcttgaggtacgcattctcgatgccctttctaagatacttatggagacttttcttttccactccaattctgccatgctctttcggcatggtcagagctggcttctctgtgccctccagatctcatatgtaagatggtgttactttcatttctttgt

SEQ ID NO: 10346 - DNA, 1983 bp, Homo sapiens
  MAP TO AL121716.2; EXPRESSED IN BRAIN, SIGNAL = 0.95
tcttggcattgtttagacattaggaaagtgatttcatgaagtagatgaaatagtcatttgaaaacaaggatatagatcctagagacttgtatatatgtatttttgtcctcaagaatctaaccttatgtatgctgtgtgtgtagtgcatagtaaatacttggtgaatgaataaatcagtgtggggctgctttaagagtcaacagaatgggcagattaagttgtgaatagtctaaaacatctcaaaagtggtcatttctaattcctaatatgtacactttgctactcagccttttgttttcttaaaaatctctaacaggtatcatcagtttctcatgaaaatcctactgaagtgtttgaagatggagaaaatccaccaagtagtcgatcatcagagagtggattcactgagtttatacaatatcaagcagaccgaactgatgatattgacagagaactgagtgagggccagggggcagctgccatcccaattggtagcacatcctctgagacagaaacagcatccactgtgggatctgaagaaaccatcatccagaccccttccgtagtcactcaggggacagcaacccgaagtaggaagacagcccaaaagactgcaatgcagtgctgcttggagtatgtccaacagtttcttaccagacttatcaacctctacatcattcagaataactctttttctcagtctttggctacagaacatcaaggggatcttggtcgagaacaaggagagacttcaaaatgggacagaaattcacaaggagatgtaaaagagaaaaacataagtaaacaaaaaacttctaaagaatacctgtctgccttccttgctgcctgtcagctcttcctagagtgctcaagtttcccagtttacattgctgaggggaaccatacatcagagttacgttctgaaaaattggagactggtaaggtcatctcagttttgcttatatttcagtattgtctgtagtatgttttttctttttaaaagaggcactcaaaactggggtttttttagccagttactttttttaatgttttaatttgcaagtttttttaaaaatgaaatactgtcactatggggagattgatatattggaagattttgtgattttgatgtctttcacagtttgcatgcagataagtaggagctgaaaaggaaatctctggagaaaagtagcagtagatctgctggttttctttgttatgaccagtaacatatgtatttacctttattttgatttttatatatacacacaaagtgcagtgaatactacataatgcttattgatcaatatactgtttttcgggacagaaaactagattgtatgacttggcataagaaaaatatatattgaaaaaagtataagaaattcttgttgctactttattaaagctctagactaggtgagaaaccatggttttgttaacagatcaaggccttaaaagtatttagtggctttgttttttgaaattaacttagagtgtgtgtgaaatgtttagtataatgaactctgattgctaccatcttttgtttcagactgtgagcatgtgcagcctccacagtggctccagactctgatgaatgcttgcagccaagcaagtgatttcagtgttcagagtgttgctatttcactagttatggacctggtgggactgacacagtctgtggccatggtcactggggaaaacatcaacagtgtagagcctgcacaacccttaagtccaaaccagggaagagtagctgtggttattagacctcccctcactcagggcaatctgaggtacatagctgagaagactgaatttttcaaggtaaattctaagaaatgcatatatgactatgatgattacagccatgtatgatacttgacctagtttgctttaagaattattttttaaatgttaataaagcttcatttaaacacctcttaataggccataccatgtagaaaatgatgccacagctga

SEQ ID NO: 10347 - DNA, 376 bp, Homo sapiens
  MAP TO AC007446.8; EXPRESSED IN BRAIN, SIGNAL = 0.84; EXPRESSED IN BT474, SIGNAL = 0.66; EXPRESSED IN FETAL LIVER, SIGNAL = 0.67; EXPRESSED IN LUNG, SIGNAL = 0.93; EXPRESSED IN HELA, SIGNAL = 0.69; EXPRESSED IN ADULT LIVER, SIGNAL = 0.73; EXPRESSED IN PLACENTA, SIGNAL = 0.8; EXPRESSED IN BONE MARROW, SIGNAL = 0.76
tttcacagaagacacagtcacatcttcaattatcgctttttagtttgagttgacagaggttctcttacatacagtagcagcattcacataactgttggtgagatgctgtttcaggccttttatcaatattcatcaaaatcttatttgagaagaggagtaatatgaatattatttatgataacatttttcagcatatttatgataacattgttcctcatttcacttgttttcttcttgtgattttcttccagaaattgaaaagtttcaaggttctgatggaaaaaaggaagacgaagaaaagaagtatcttgatgtcatcagcaacaaaaacataaagctctcagaaagagtactgattcctgtcaagcagtatcca

SEQ ID NO: 10348 - DNA, 435 bp, Homo sapiens
  MAP TO AC011998.2; EXPRESSED IN HBL100, SIGNAL = 1.7; EXPRESSED IN HELA, SIGNAL = 1.3; EXPRESSED IN ADULT LIVER, SIGNAL = 0.96; EXPRESSED IN BT474, SIGNAL = 1.3; EXPRESSED IN LUNG, SIGNAL = 1.1; EXPRESSED IN BRAIN, SIGNAL = 1.1
tctgctgaagatttctggggtggtgaacctgaagttgtatattcactggctctcttttgcccaatctcaaccttttatacaggtttccaggatagtgttactgtgctcttacaagaaggaggaatgtggaagagatccttgattaaaacattgatattgtttgttgctttcaatgcaacaactttaattttgttctcttctgttttctgttcttttctgttctcacctgtttcacctggagagctaagtgaagttgtctgatataaacttgcaggcctcgtgcaaagtattgcagcctgattttgaaatctttgagtttttctgcattcagtttggctgttaagaaatctggaagtttttggcccaactggtgaaaactgtacaacaaacattccacataactgaactgtagtttgggttcttcatcaccagcat

SEQ ID NO: 10349 - DNA, 471 bp, Homo sapiens
  MAP TO AF170801.1; EXPRESSED IN BRAIN, SIGNAL = 0.98; EXPRESSED IN LUNG, SIGNAL = 3.1; EXPRESSED IN ADULT LIVER, SIGNAL =   1; EXPRESSED IN BT474, SIGNAL =   1
tcccagtttccccagtttccccaggaggccagattctgtgctacctgacgtcaagagcgtgcaaagagttcacccacgactggtcctggtgcgagcgaaccttcagtttggccgtgttggcagctgcacctgccccatatggacctcgcacagcagggtcctggctgactcagccagcgggaggacgcgggcgaaggaagctttcttctcagggctcagcgcaggtcagggctaacactcactgccttcctcctgcactgaagcttttggactcccctctggtttagaaggacagccatcagcaccgaggagccagtccttcttcggggtctgcactcagcccccagccccttcggcgctggttggtgccacgcggttgccacggccaagcatgtgtcctcgccagccgcactcactagctctgtgacatcgcacgaggcactaaataaatgaaagggggtgaaaatggag

SEQ ID NO: 10350 - DNA, 488 bp, Homo sapiens
  MAP TO AC003666.1; EXPRESSED IN ADULT LIVER, SIGNAL = 0.78; EXPRESSED IN BRAIN, SIGNAL = 0.7; EXPRESSED IN PLACENTA, SIGNAL = 0.73; EXPRESSED IN LUNG, SIGNAL = 0.62; EXPRESSED IN HELA, SIGNAL = 0.81
ccatctgtaccttgacagtttggaaactgtgatgatgtattggagaaatgtgtagcaaacacaaacacagccttagtctattttgttacatatgcagattaatgtttcttaaaacaaagatcccatgtaaatacaacctggagttttagatgtctataatcatctgcaaaatctcgtttgcaattcaggtgagctatttgacagagcggattccctcaaaccttataaggtctcagagagatagagaacttggtctagcagctccctactgttcctgatctccaaggcaatatggaaatgcaaaaaaggaggaggaagaagaaagaaagagaagaagagggagaaggagaagaagaaagaaagaaggaagaagagaagaagaaggagaaagagaaagagaaggagagggagagggaggaggaggaggacagaaggaggaggaggaggagaggaggaggagaggagggggaggaggaggaggaagagga

SEQ ID NO: 10351 - DNA, 461 bp, Homo sapiens
  MAP TO AC006111.2; EXPRESSED IN FETAL LIVER, SIGNAL = 0.69; EXPRESSED IN BRAIN, SIGNAL = 0.74; EXPRESSED IN BT474, SIGNAL = 0.75
tgattgtggtgacagttgcccaactgtgtgaatatcccaaaagtagtgatttgttcagtttaaatgggtgaactatatgttctgtgaattgtatctcaacgaagttatttttaaaaaggggtaggttgacaacaaagctgaggtgctgttgtcatggtaaggtgtggagatccgcactccagccctggggtgcttggggattctggtcacatacacgggagaggcgacggcccaagctgcccccacctgttcacatgctgttcccttcgggtcacgttcatggctgagaggttcttttgacaaatctggcagaagaacaaacccttttcctccaggctatcatcatgtgccgatgctcctacccgtgcaaactcctgctgcagggtcaaggccaccgcagcgtcgctctctggggcagggggcccaagcccatacactgtggagaagcaccaaagatccgt

SEQ ID NO: 10352 - DNA, 1902 bp, Homo sapiens
  MAP TO AC005859.1; EXPRESSED IN ADULT LIVER, SIGNAL = 1.1; EXPRESSED IN BRAIN, SIGNAL = 1.3; EXPRESSED IN HBL100, SIGNAL = 1.4
tccaaatgaatcagcagttccagaaataacagattccagtattttcttgatattcattaaaatggaaatttgttatgagatatcaagaggcagtctttggaaagcagggtgaccttagcatcggcagcccttccagactacaaccttgagaaatgacagacatcatgtagagatgtagtaaaaatgacctcccaggagatgcttaatgattctctctgtttttctactacccctagtgtagctttgacagagcctgggaaggagagacgaggaggcatgccttcagcttggtctcaacatcctgaagctgatcccatcctgctaccatcaaacattcactcggaatcaaaggtgccaattccaaatcaagaccctaatgatttctcccaagcaaatcaggcatacggagaggctgtgagctggcggccaccggatctgagaggggggagcctcaggacacctcccagccagaaggctctgagacatagcagcagtatcctctccggatctgtcgatttggagaccttccgagagagaaccaagggtgcagtcagcttaaagtgtccaggcatcacagaagcacaggaggccagttctgaaaggcgagcagaactccccctggggaggaagctcaccaaaagtttttcccaaagctcaatgcacttgagctctgaggggaggtttcacaaaaggtccccagtggctcataaagactcaaagctgtataggacattacccttgcggaagctggagggcagcaattggagatgccggggacccttcagctattgcttcctgaaccgagggcaggatgaagatggtgaggaagaagaggagaggggagaggccaccgtccaggtctcttgcctctatagaccacaggtgactcaagccatgccagaaccaagcagcccatgcctggctgtggcgattcagaagcaacgaggggagctatccagagggtcagtgctgaaggtctgggcagaagacctgcgagacccagatgacttggacttcagcaacctggcttttgatgcccggattgcaagaataaatgccctaaaggagagcacatatgcaatgcctgatgggttccttgcagcccaaaatgatgccaatgagctgctctgtctcgtcagggcaaccaaggagaagagggaggagtcacgccctgaagcgtacgaccttacactttctcagtacaagcaactgttatccattgagtccagacagttgggaagtgcctgtaggaaaatggcgatggctgagaaaagcccggaggagatgctcctagctatgacttccagctttcaagtgctctgttgcctaacagaagcttgcatgcgattagttaaagtcgtgaactcagaaacacagcggcaggaaattgtagggaagatcgatgaagtggtcataaattacatttgtctactgaaagctgccgaagcagccactggaaagaaccctggggaccctaatgttggactctcggcgcgacactcaaccaccatggccgctctcgtaagcacactgacacgttctctcaagaggcttttaaacaaataaatatggaagtcacgtcataatctacctttgcaaagccatacatgaacttttatttactttgtgtgtatgatgaacagatgtctcctttcttctctctgtatattttgttattttatataaaataggagataaaagtcacactgatgaaatgttgaaatgtactaatcagatgtattctgtttatattatacatatatatacacgtaaaagaaatatccaagaaagtgatgacatttggctatttttcatatagttaaaactccaggtatatgatgtgaaattttaaattctaccatgttagagcaaaacaatgaatcctatcccctttctttccaa

SEQ ID NO: 10353 - DNA, 1953 bp, Homo sapiens
  MAP TO AL049911.2; EXPRESSED IN BT474, SIGNAL = 2.4; EXPRESSED IN ADULT LIVER, SIGNAL = 1.4; EXPRESSED IN BRAIN, SIGNAL =   1; EXPRESSED IN BONE MARROW, SIGNAL = 1.1; EXPRESSED IN LUNG, SIGNAL = 2.2; EXPRESSED IN PLACENTA, SIGNAL = 1.6; EXPRESSED IN HELA, SIGNAL = 1.7; EXPRESSED IN HBL100, SIGNAL = 1.8; EXPRESSED IN FETAL LIVER, SIGNAL = 1.6
catttgaagttttgattcaatggttcttcaactgatacctacttataaaaaccctttcattgtataaacgtacaagttattctttaatttcagaggaactatgatatgccattttactgagtgctagttaaatgtttattttgttttatttaggtttctcacactcatgaaagtgaaaatgatctctttcatgaaaattgcatgttgaaaaaggaaattgccatgctaaaactggaagtagccacactgaaacgtcaacaccaggtgaaggaaaataaatactttgaggacattaagattttacaagaaaagaatgctgaacttcaaatgaccctaaaactgaaacagaaaacattaacaaaaagggcatctcagtatagagagcagcttaaagttctgacagcagagaacacgatgctgacttctaaattgaaggaaaaacaagacaaagaaatactggagacagaaattgaatcacaccatcctagactggcttctgctttacaagaccatgatcaaagtgtcacatcaagaaaaaaccaagaacttgctttccacagtgcaggagatgctcatttgcaaggaataatggatgttgatgtgagtaatacaatatataacaatgaggtgctccatcaaccactttatgaagctcaaaggaaatccaaaagcccaaaaattaatctcaattatgcaggagatgatctaagagaaaatgcattggtttcggaacatgcacaaagagaccgatgtgaaacacagtgtcaaatgaagaaagctgaacacatgtatcaaaatgaacaagataatgtggacaaacacactgaacagcaggagtctttggagcagaaattatttaaactagaaagcaaaaataggtggcttcgacagcaattagtttatgcacataagaaagttaacaaaagcaaggtaacaattaatattcagtttcctgagacgaaaatgcaacgtcatctaaaagagaaaaatgaggaggtattcaattatggtaaccatttaaaagaatgtatagatcaatatgaaaaagagaaagcagaaagagaagtaagtatcaaaaaatataaatacttttcaaccttcctgaaagaaaatggccttggctaaatgctgaatctagttgaatatatatatatacacacacacacacacacacacacacacacacacatatatatatatatgtgtgtgtgtatatatatatacacacatatatatgtgtgtatatatatatgtataaatagatgataaatgtacttactatatcagcttagaaacatgcctcatttccaccaaattgaaagctaagagacgttttactttgagtaaaggcattgtgtcactgatgaaattataagagtttaagttaaagatttttaatagattaacattaatgacattggcttatactgctgaaataaaggttttaatgtctctttgtggccacattttttgactacaatgaagcagaaaaatgggaatgcccatatcagcaattagtattttgaaattaagattcagttcagcaatttacattgacagttaattctaaattttccagaggaacagaagtgtatttgaagtatattttgaagtgtacatttctgcatcttgtaataacacttttttagtagctttttatatattttagttggtagaattttattttcatttatgtcaatttgacttaatctgaacatatttgaatctgaaattatgtattgttaaaacctcaattttttaaaggcatctgtgttttgttaaataataccttaggacaaatgtagtggattttagcaatatcaaatttgatttaatcaccccactggtattcataatttattttgaatattgttacaaatcatttgctcataatttctatttcaaggctcaaaaactatcatgtggatagaactttgtcccacagaaagatga

SEQ ID NO: 10354 - DNA, 1996 bp, Homo sapiens
  MAP TO AC011301.3; EXPRESSED IN BRAIN, SIGNAL = 1.2
gcacaggcttaccctaatattttctatcaagtgatgtgtctgtgctttacccctgtcttcccaaggaatgcatttcccactgaaatatcctactattcatctgctctagtaatatgatgttaagctgctttatgtatttctcagacaaatattttatttgcttgtcagaaacgtaatcacaaaatatccttctggaatcaactctaagaatgtgcagtagagacataattcagtgtgagtcacactttaactgtagactaccaccaacatcctttaccctagctcatgttttcatgaggcaacttacgttaggtagaaatattacctttaccatagtatggctttttgacatggctgtcactggatttaggctttctgtcctccccgggaagttgtctcggagactggtcctcatatgacctcatattgtccctcctcccagcttccatggccatcttctccctcatggcctttgctctttccgtttccaaagcgatggctttctccagcagggtcaggttccccttggtcatgtcgaacacctcttcagacctgtccgagttcacagaggtggtatcgtcgtcccgctcatgacacccatcctccttcgcacagctggcaaacactctcgaccgggggctcaactgctcctccagccgcatgaggttcagcatgtccgagtagtttctgtccggcgtccttccggggaagtcctcttctggccggacatgctgacggatgttcatgttctgctgcggattcctctcctgcgggttggtctcactgagcttcctggccaggtcgaagcactgattcctcaaacactccagactgctcagacacacctcctcatcgctctcctccaccatcttttccatgagtccgttgttcatgggcttccccaacatgacgtaattcatatttctactgtcttgctgcgacatgctgtctgcataatttctgtcattcatgttttctgagagcacaacaccgtgtccttgggctaatagtttaagggagtccactgtttctctaacaacatcactgtctaagtctaaactcaactcacttttccgacccaggttttcgtttttgtcactatcgtcttccagactattggaggtattgctgttcatttctgactcagtcctggcccggtaggctgcatcctcagcgattttgccgaggtttaacaatgacttggccaccagttcatcgtaattgtcatattcgtcattattgttatcatccttttctgtgtcttgcattattcgagtattgtgacaattcatttgatggtcttctgcaaagaaaataaaaaagacaaaaaagaaaagaaaaggaaaaagtggctagaactggaagcttagttgcaacagcatggatagcacgttaactgcaagtcaaaccgtctatcatctcacagaactgtaagtcccatttgcagctgggttgaaaaagttgacataaagaaaacggatgttgctaaaaagcagaaggccatttaaaatacttgttgtgaattattaatttctttaatggatcttaagataaaccagtcaatgtggcaaatatgattttaaaaattaattttgtatttttcatacatttcaagaatgacttattttctccattggcttgctttatctatagcctcgccagatgtgtattaactgtgctcctcacattactaggctttctaagagttcatgaactttacttgttgccaactctgaagcagatgtttgcagcaattgcttttaaatggtctattttcacagtggcgtgtaggcaacacagaggacagcctcaggttcctgagagtcaggcaggggtgccggctgcattgggagctcagattcataagcacatgttggggctgaattaagagttcttttgaatccataccttcaagacaatttatcatgatacacagtgaaacaacagaaattccatagtaaatgtttagacagtaaatctgattcctctgtctgtg

SEQ ID NO: 10355 - DNA, 469 bp, Homo sapiens
  MAP TO AL109982.1; EXPRESSED IN HBL100, SIGNAL =   1; EXPRESSED IN BONE MARROW, SIGNAL = 1.2; EXPRESSED IN BRAIN, SIGNAL = 1.1; EXPRESSED IN ADULT LIVER, SIGNAL = 0.94; EXPRESSED IN FETAL LIVER, SIGNAL = 0.95
ccttcagttccatttatgttggtacaaatgacaatacttcattttttatggctgaatagtattccgccgtgcatatatatcagcttttctttatccatccatctggtacttagtttattccatatcttggctattgtgagtactgctgcaataaatggaaatgcagatatctctttgatatactgatttctttcttcttgatatatatggctgggttatatagtagttctatttttagtttttttgagaaacctcctgacggttgtctgtaatggctacactactttacattcctaataacagtgtacaagcattctcctttttcagcctccttgccagaacttgttattttgttgttgttgttgtctttgttgttgttgctgttgctgttgacaatagccattctaactgttctaactggggcgagatatctcattgtcaatttgatttgcattaatctgatgaacag

SEQ ID NO: 10356 - DNA, 485 bp, Homo sapiens
  MAP TO AC007402.3; EXPRESSED IN HELA, SIGNAL = 0.66; EXPRESSED IN BRAIN, SIGNAL = 0.73; EXPRESSED IN PLACENTA, SIGNAL = 0.61; EXPRESSED IN BT474, SIGNAL = 0.64; EXPRESSED IN HBL100, SIGNAL =  12
ccccatcacaaaagcatcagagatatacctgcctttcctggttctgagtgtagtccacatagtttccaacctcagctattccacgtctttctttgcatcttctcttctgcctgcataagtccagaggtgggcaccatagggcacatctatatgacaataaaatctgattctgcccttttatttcaagatgcagatgagtcagcacagcgaggtgttctcgaggaacctgtacctacactggctggctagcagcagcctaactgtaattggtaattgttacgaaccgttaagatgtatttcactaatcctaaatttactgtgtccacattatcaacttctcttagttggacctccaaaatgactttagccactttaatgccagcagagataaggggaagaactgtgacaaaagggccgtcagagtagaaagatgagaggtcttcaaaaacaaaaaaaaattgggctgagggaagaagccaaaacgt

SEQ ID NO: 10357 - DNA, 405 bp, Homo sapiens
  MAP TO AE000659.1; EXPRESSED IN FETAL LIVER, SIGNAL = 1.2; EXPRESSED IN BT474, SIGNAL =   1; EXPRESSED IN BRAIN, SIGNAL = 1.5; EXPRESSED IN BONE MARROW, SIGNAL =   1; EXPRESSED IN LUNG, SIGNAL = 0.99; EXPRESSED IN HBL100, SIGNAL = 1.3; EXPRESSED IN PLACENTA, SIGNAL = 0.91; EXPRESSED IN HELA, SIGNAL = 0.97
ggatcaagaccattatttgggtaacacactaaagatgaactattctccaggcttagtatctctgatactcttactgcttggttagtgagatgccttttaaaatttggtctctgtcttctatcaagccaaaaaaatctttaaccataatttgacctaagagcattatgctcaaggctaaacagatctctctctctctctctctctctttttttttttccctaggaagaacccgtggaaattcagtgacccagatggaagggccagtgactctctcagaagaggccttcctgactataaactgcacgtacacagccacaggatacccttcccttttctggtatgtccaatatcctggagaaggtctacagctcctcctgaaagccacgaaggctgatgacaagggaa

SEQ ID NO: 10358 - DNA, 467 bp, Homo sapiens
  MAP TO AC007375.4; EXPRESSED IN BT474, SIGNAL = 1.3; EXPRESSED IN ADULT LIVER, SIGNAL = 1.1; EXPRESSED IN LUNG, SIGNAL = 4.8; EXPRESSED IN BRAIN, SIGNAL = 1.1; EXPRESSED IN BONE MARROW, SIGNAL =  15
tcaagccaatgcatgtatcccctaacacacccatgctttatgtggtccctgcccctccctgctcaggggactgcttgttaacttcattgggttggggacatatatattataggagagagacagagaaaaagaaagagaggaaatgttattctccttgtctgtatctgtatctccactccgattcccattccctctgctgctctcctctctctcctcccttttaacatctctccctctccctgtggcttctgttgccaccttccctctccctcactgcccaggtgtgtgttcctgccagacaacggcgccttctttgtcaactacgtgatcacggcagctttacttggcacaggcatggagctgctgcgtctggggtcactcttctgctacagcacccgcctcttcttctctagatcagagccagagagagtcaacatcagaaaggtacagactggctctccgctgag

SEQ ID NO: 10359 - DNA, 388 bp, Homo sapiens
  MAP TO AC012275.1; EXPRESSED IN BONE MARROW, SIGNAL = 1.1; EXPRESSED IN FETAL LIVER, SIGNAL =   1; EXPRESSED IN ADULT LIVER, SIGNAL = 1.2; EXPRESSED IN LUNG, SIGNAL =   1; EXPRESSED IN HELA, SIGNAL = 1.1; EXPRESSED IN HBL100, SIGNAL =   1; EXPRESSED IN BT474, SIGNAL = 0.93; EXPRESSED IN BRAIN, SIGNAL = 0.98
tttttctttcttcaataataaattggccttaacttactgcaatatttttactttatatgccttttaatttttttaactttctgaatcttttgtagtaatactttgcttaaaacactaacacatcatgtagttgtacaaaaatatttttttctttacattcttattctaaaagcttctttttattgtttttttttttaacttttaaaaaggacacaacactcaaattagcttaggcctacacagtctcagaatcatcaatatcattgtcttccatctccacatcttgtcccactggaaggttttcaggggaaataacactactggagctgtaatctcctatggtaacaatgccttcttctggatgacttcctgaagaacctgcctgaag

SEQ ID NO: 10360 - DNA, 389 bp, Homo sapiens
  MAP TO AF134471.1; EXPRESSED IN BONE MARROW, SIGNAL = 1.3; EXPRESSED IN HELA, SIGNAL = 1.9; EXPRESSED IN PLACENTA, SIGNAL = 1.1; EXPRESSED IN HBL100, SIGNAL = 1.1; EXPRESSED IN BT474, SIGNAL = 1.1; EXPRESSED IN FETAL LIVER, SIGNAL = 1.1; EXPRESSED IN ADULT LIVER, SIGNAL = 1.4; EXPRESSED IN LUNG, SIGNAL = 1.2; EXPRESSED IN BRAIN, SIGNAL = 1.1
agccatccttcattccttcccagttcattccctttcatctcacactggctgttctcctgctgaagtggcttaagtccatggttcacacccatattactctccttatcagagggacttgggcacacctgtagtgttttcccctgaacgggcctttttaaaaatttccatagtctggctagaacttttcaaatctttaagttctacttcatttttgcttaacaactctgtctttaagtcatagctctcttctcgcattttactataatcaggcaggaggaggcaaacttcatctttgacattttgcttagaaattgcctcaggtaaatatccaatttcactcttaagtcctcccttccacaaaatactagaacatgcacaaatttcaacca

SEQ ID NO: 10361 - DNA, 480 bp, Homo sapiens
  MAP TO AP000045.1; EXPRESSED IN FETAL LIVER, SIGNAL = 3.5; EXPRESSED IN ADULT LIVER, SIGNAL = 0.64; EXPRESSED IN BRAIN, SIGNAL = 0.7; EXPRESSED IN BT474, SIGNAL = 0.6; EXPRESSED IN BONE MARROW, SIGNAL = 0.69; EXPRESSED IN HELA, SIGNAL = 0.69; EXPRESSED IN PLACENTA, SIGNAL = 0.62; EXPRESSED IN LUNG, SIGNAL = 0.71
atttccgtgggaggaaatcccagaattcccaattcagattaagggtaggacatccctaggttaaaattctcttattaaggttctctaagaagtcagatttgagcatacagatggactactactgcagcaatcactgactgagcattttacaaccctatttttaaggtgcctatgtagtttttccctcttgtcacagcttaattgaggtataactggtatctattatgccgtgcatgttttaaatatacattttgataagtttttaacatacgtgaaatcatccccacaatcaaaatcataaatatccattacccccaaaatgtcctcgttgtacacagttttgaaataaatgttgttgggattataagaggaagtaggctgggcacagtggctcatgcctataataggaagtgcatcatgttttcagtaatcaaatctgcctaatgatccatctagcttcctatttatgcaacacatctt

SEQ ID NO: 10362 - DNA, 483 bp, Homo sapiens
  MAP TO AC007629.3; EXPRESSED IN HBL100, SIGNAL =   1; EXPRESSED IN HELA, SIGNAL = 0.66; EXPRESSED IN BONE MARROW, SIGNAL = 0.93; EXPRESSED IN FETAL LIVER, SIGNAL = 0.68; EXPRESSED IN LUNG, SIGNAL = 0.66; EXPRESSED IN ADULT LIVER, SIGNAL = 1.1; EXPRESSED IN BRAIN, SIGNAL = 1.1
tccccaatgaatcagtagaacagtaaagatcttactttttttttaagcagtggcatatcaatgaggcacagatgtgtattccaactctgcatggatgagcacactgttcaatagtgctggctcacacggtatcagggcgagttatcacttcccatgaaggcactcttatcaccagggcccagagaggtggctgcaaatcgcagcctttttattttcaaggcagttttgctgaacattcaggcttcaaagattcacacttccaaaactctataagagtttgtgaacgctcaatttgccaaaactgtttacagtgtaattgggcaccgtacctgtgtccatgagatagcgaaggcgcttctccaccagcgcggcacgggtgtcaatttgcttttgctcattctctagtgctgccaattctcctactacatactgactggtgtctttgaaccctttctgttaacaagaacaaacaggaaggaaaaa

SEQ ID NO: 10363 - DNA, 488 bp, Homo sapiens
  MAP TO AC008088.1; EXPRESSED IN HELA, SIGNAL = 0.65; EXPRESSED IN PLACENTA, SIGNAL = 0.64; EXPRESSED IN BONE MARROW, SIGNAL = 1.1; EXPRESSED IN HBL100, SIGNAL = 0.98; EXPRESSED IN FETAL LIVER, SIGNAL = 0.59; EXPRESSED IN LUNG, SIGNAL = 0.67; EXPRESSED IN BRAIN, SIGNAL = 1.3
  unsure 29
  unsure 92
  unsure 294
tttgccagtcatcttctaagcttcatttnacatgaaaataaattagactgcgacaatgataacaaaccaggcattggacatatttttagtancagataagaactttcataatgatgcaagcactaagaaagcaaggaacccagaagtggttacggttgaaatgaaagaagaccaagagtttgatttgcaaatgacaaaaaatatgaaccaaaatagtgacagtggcagtacaaataactataaaagcctgaaacctaaattagaaaatctgagttctttaccaccagattctgnacagaacatcagaagtatatctacatgaagaattacagcaagacatgcaaaagtttaagaatgaggtcaacacattagaagaagagttcctggctttgaagaaagaaaatgttcaacttcataaagaggtagggttttacttgctgccactctttgttttttctctcaattatctggtccattctgattttcca

SEQ ID NO: 10364 - DNA, 473 bp, Homo sapiens
  MAP TO AC008067.1; EXPRESSED IN ADULT LIVER, SIGNAL = 1.1; EXPRESSED IN BRAIN, SIGNAL = 0.7
ttggatgggtggaaataatacacagatatcatttttcttaaaattagcatatcactgcaagttagacttactatacctgtatgaggaaataataaataaaatatattttttaaagtaaattagggcagcttgatttttctgactgcattccggctaatactcacccacatagctgtgtgggtgctatgtaggatgctataagctctgtttgctgggggatatttagcctttgcaatgaagtgtgtggatgggggtgaagattatcaatttaagtatgctgacttatatctttttgtctttagaccccagaagaactagaggatgattctgactttgagcaggaagattatgatgtgcgtagcaggacaagtgttcagactgaggatgaccagctcattgcagggcagagcgcacgggtgagtggacacctaagactttggcttggcacacagggaccgtgtttactaaaatgg

SEQ ID NO: 10365 - DNA, 457 bp, Homo sapiens
  MAP TO AC007639.5; EXPRESSED IN HELA, SIGNAL =   1; EXPRESSED IN ADULT LIVER, SIGNAL = 0.79; EXPRESSED IN BRAIN, SIGNAL = 0.7
gagcaagggttcagtcctccatagagctcagagcaaaaggaatgacccagccgggatgaacttgaacctatggccacctagctctggtttctgcttggacattttatttcaatcttatggcctgccttgcgctccaagggttacttatttcctctgcacatattttattttgatgccaaaatttcagatctgttttcttaagagcagaaggtcttgacctcaaagcccgggccatcacacagctctctgtggagtggggtgagggaggccagctgccggtcaccttctgctccagcaccgtgggaggcctgagtggcaaagctccagccccgctgctcccgggcggtgtccgcaacaagaggcttccgccccatcccaccagccatccacggagacgccctccccagaggtcaggagggtagcgggggaaggaaatgccaatcaatccatcaaagcc

SEQ ID NO: 10366 - DNA, 481 bp, Homo sapiens
  MAP TO AC007539.8; EXPRESSED IN PLACENTA, SIGNAL = 0.6; EXPRESSED IN BRAIN, SIGNAL = 0.72; EXPRESSED IN HELA, SIGNAL = 0.61
tatcagaggccctgttctggtgttgcctggaatgaagtcactcactagccatgggtgtgtcacctctcctcctgtacttcaggactgatctgatcagtaagggactggattatttgtcctctatgacccctgccagcctactatcagatgacttgctatctgctagttagaagtctcattctgttctgatttttgatccttcatgtcataatgaaagatgcactgtagattaccagatagtcaggaatctgagttaaccttatctacctaaaaccctgctgctgtgtataatactaacttctcattacacggagccatttgatcatactctgtgttatggtatctccatgcttttgcatatggtgctttctctggaataccctcatcccccttttcatcccgggaaactctaatcattctttaatcacagttgaaatgtctcctagtcattgaagtctctccttaatcctctgggctggaa

SEQ ID NO: 10367 - DNA, 448 bp, Homo sapiens
  MAP TO AC008266.1; EXPRESSED IN BRAIN, SIGNAL = 0.89; EXPRESSED IN BT474, SIGNAL = 0.9; EXPRESSED IN BONE MARROW, SIGNAL = 0.66; EXPRESSED IN HBL100, SIGNAL =   1; EXPRESSED IN FETAL LIVER, SIGNAL = 0.59; EXPRESSED IN HELA, SIGNAL = 0.81; EXPRESSED IN ADULT LIVER, SIGNAL = 0.77; EXPRESSED IN PLACENTA, SIGNAL = 0.85; EXPRESSED IN LUNG, SIGNAL = 0.77
cactggcctgagcaagaacttgctaagaagtctattctaaatgcagaagattcattgatcattgacaacaaaagaagcatttcacatttgtcctcgggagtgctaaaagacattttcacaactggaaccagtagttacaatgtcctactacagagcaaggaggaaaaaaagtatcattcacaaaaacagtcttcctccacctactccaaaagatgtagaaaacccagcaaatctcctaacacttctcgtagcaaagatcctcgcaggatgaaagccctggtgcctgtgacaagcagtggtacttggtactgcctggagaggcggcctgctgtttttgtcactagttcagtgtcaagtcctgtaaagtttacacatgatatctctgttacagggaatggcatagtactgccacctaaacccaaaagcaaggtcaagtggtgccatttct

SEQ ID NO: 10368 - DNA, 477 bp, Homo sapiens
  MAP TO AL050342.29; EXPRESSED IN BRAIN, SIGNAL = 0.93; EXPRESSED IN BT474, SIGNAL = 1.1
ctctctggtttttcttggggtaattcaacattggaaaagaaaacctgatttctcagaggtgctttctcacattggaaaaaggttcctaccagtttgcccactggtaaatcatgactggcaggtctggggtgtccctctagtcaggagtaagggagctttccatggtgaccttgtcctgtcccagcttcaccacccagggcctcaggacaaagggcttgaggtgcagaagctgaagctgagagccgatgacctgcctgaggtcacacagtcctgggaggtagagcagagtgtggtgagccccacccgtccagcaccaaaagtccccttgcagtgtgaagatagaactgagaaagatgtggctcaaacatggcccagtgtgagtcaagagttgtcccctcgttctcacccttcaaggtcagcaggaggaaatggccaaggagctaaggcagctgggccgccaacgatcaggccaattta

SEQ ID NO: 10369 - DNA, 475 bp, Homo sapiens
  MAP TO AL023913.5; EXPRESSED IN BRAIN, SIGNAL = 3.1
ccttgtttagcattttatctgtggatctcttagtgaattatattttgagtgatagaaaattcatctggaggctcgtagcctcccataggccgtgaatttcttggcagtaggggtggtgtctttctcatgtgtacatggcccacagtgcctagcacaatgcctggctgacaggagcctttgagaatatttgctggattaaatttgaccctcttattttcactccaattctgttgctgagtcctatatttttctcttggaaaatgaagaacatttccagctatcagtgcgcctgaatccaaggtcgtgttttgaggatcttgttatgcccttcacacttcctgttggtcatttcagaagtgactcgcagtagggacttgctgactgccacgtgctcaccttctccatgatcctgtcgatctggcgattctgtgtatcgatctcattgcccatatccagggccatgtgacggaggttc

SEQ ID NO: 10370 - DNA, 370 bp, Homo sapiens
  MAP TO AL031666.3; EXPRESSED IN HELA, SIGNAL = 0.96; EXPRESSED IN FETAL LIVER, SIGNAL = 1.1; EXPRESSED IN BT474, SIGNAL = 4.4; EXPRESSED IN BONE MARROW, SIGNAL = 0.93; EXPRESSED IN BRAIN, SIGNAL = 0.99; EXPRESSED IN LUNG, SIGNAL =   1
tgcttggctaatttggttcacatcaagaaaaaagcaatcttggaaattactgaagttgacttaaactctctttatcttttgcccttctagggcctgggttccaataaataattgctacctcatgtctaaagaaattcctttttctgtgaaaaagactaagagcatcttcaacagtgccatgcaagagatggaggtttacgtggagaacatccgcaggaagtttggggtttttaattactctccatttaggacaccctacacacccaacagccagtatcaaatgctgctcgatcccaccaaccccagcgccggcactgccaagatagacaagcaggagaaggtcaagctcaactttgacatgacggcatcc

SEQ ID NO: 10371 - DNA, 392 bp, Homo sapiens
  MAP TO AL132661.2; EXPRESSED IN BONE MARROW, SIGNAL = 1.6; EXPRESSED IN HBL100, SIGNAL =   1; EXPRESSED IN HELA, SIGNAL = 1.3; EXPRESSED IN PLACENTA, SIGNAL = 1.3; EXPRESSED IN FETAL LIVER, SIGNAL = 1.2; EXPRESSED IN BT474, SIGNAL = 1.9; EXPRESSED IN BRAIN, SIGNAL = 1.1
gaagctgtgtggggaagaagggagggtggggtgggaagggaagaggccaagaggtattgactggggacagctgactgttttccctcatgcctgcctggctgtcatgtgcattggtgtggacacaccgtactggggatggagagcctacatgaatgcctgtgtgcaggacacctgtgtccagagggcaggggtgccggtgagatccccctcgggctccttgctgatgagggacagcagggagggacgtttacttcttccatgcttctccagtccagggatgcttagggctgcgtcatgtgaaatcttcatcctctgcacaggcagggccctgtgcctcctcctgaagttggaggtgaggtttttgaagcaaatggggtgatgtgctgtgattt

SEQ ID NO: 10372 - DNA, 427 bp, Homo sapiens
  MAP TO AC007282.2; EXPRESSED IN HELA, SIGNAL = 0.81; EXPRESSED IN BRAIN, SIGNAL =   1; EXPRESSED IN BT474, SIGNAL = 0.72; EXPRESSED IN FETAL LIVER, SIGNAL = 0.73
catgaatgcttagaagtggagaactacttttctctcttgcttcactgttcatactaacttctggtttagaaaataatttgtctgaaaggtcttgcagattttcacttaaaattgacttgagtatcattgattgttttaaatattctatatggggggtaaaatttaaagacttcgagaggtgacatgtgtttgcctgtacatttccagcccttgatgattctcctttgatgcttggtaaagatacatttggtagattttcttttaaactattctttgtatctaaaccctttattgtattgatagtaggatcaggggctaacttattctcagtttctaacatctttgttgtgaagatattagggtcatgggcccaggttgtattagcaggtcctgcagtttttgattgtgctggataaggaggatcctg

SEQ ID NO: 10373 - DNA, 408 bp, Homo sapiens
  MAP TO AC007496.2; EXPRESSED IN BONE MARROW, SIGNAL = 1.1; EXPRESSED IN PLACENTA, SIGNAL = 0.98; EXPRESSED IN ADULT LIVER, SIGNAL = 1.5; EXPRESSED IN BRAIN, SIGNAL =   1; EXPRESSED IN HELA, SIGNAL = 1.1; EXPRESSED IN HBL100, SIGNAL =   1; EXPRESSED IN FETAL LIVER, SIGNAL = 1.1; EXPRESSED IN BT474, SIGNAL =   1
tccacagttgagactcacgtcatactcatcttgatattccccacagtgtctagcacagttacttgcacctaacaaacactcaataaataatagttaattgctaaactggacggtgccgacttgtcggttttgcatataatccgtgactagctaggaggcagaaggggagacagataccggtggagaacacctcagtgtgctagttgatccatataagtaacttatacaaagtgttatacttgttgagccccgatcaaagttctaaagctgattaacttggaatagtaaatcctattcattacacattctaggttccaacaaccagattttacagccttaacaaagatgtccagagtggatccattctgggggtaggtggtgatgggatggctggggtcacagagaata

SEQ ID NO: 10374 - DNA, 475 bp, Homo sapiens
  MAP TO AC008110.1; EXPRESSED IN HELA, SIGNAL = 0.7; EXPRESSED IN BRAIN, SIGNAL = 0.73; EXPRESSED IN BT474, SIGNAL = 0.82; EXPRESSED IN FETAL LIVER, SIGNAL = 0.63; EXPRESSED IN LUNG, SIGNAL = 0.71
caatccaccataccaaaataacttcttctaagatgccttgtataagtaaaactagtcatgttgctgcttcttctgtgaatgtatattcttcctcaatgagactttaagctcagccacatttgatgagaaatttttaatagcaaagttattatataatatttctagagtgctatgtcataactagctacgacttacaaaataaacaaaaatttcctgacattctagaaaagatgctactcagggtttgtacatagttttatagtaatacaaatgtgtaaaactgacaatgttgtcttacaaaagaaaaatgtggaggtccactcttacctgcttaaaaagctggaggttaatggcagtttccaggaactgtttcatcacgcttgagcggtgctttacaaaactctcctcacagaaagtgatgggctcaccctagatagaaataaagattttaagggcatcaataaaaggttagtca

SEQ ID NO: 10375 - DNA, 383 bp, Homo sapiens
  MAP TO AC010092.2; EXPRESSED IN PLACENTA, SIGNAL = 1.1; EXPRESSED IN BRAIN, SIGNAL = 1.1; EXPRESSED IN HBL100, SIGNAL = 0.92; EXPRESSED IN ADULT LIVER, SIGNAL = 1.1; EXPRESSED IN BT474, SIGNAL = 0.97; EXPRESSED IN BONE MARROW, SIGNAL = 1.1
ccccagtctagacctcttgcattttctacttatgtcataggctaactgtgatctcagacggcaaatagatgaacaacaaaaattacttgaaaaatacaaagaacgattaaataagtgcatatcaatgagcaagaaacttcttattgaaaaggtaggctaaaagttgagtaaattttcgctttcccttcattagccccttttgctttgtatgcttttataaattaatgaatacaattgagtgatgattttttttctccttttcagagtacacaagaaaagctgtcaagcagagagaagagtatgcaagatcgattacgcctcgggcactttacaacagttagacatggcgcttcatttactgaacaatggacagatggttttgc

SEQ ID NO: 10376 - DNA, 484 bp, Homo sapiens
  MAP TO AL109613.10; EXPRESSED IN BT474, SIGNAL = 1.1; EXPRESSED IN HELA, SIGNAL =   1; EXPRESSED IN BONE MARROW, SIGNAL = 1.3; EXPRESSED IN LUNG, SIGNAL = 1.3; EXPRESSED IN BRAIN, SIGNAL = 0.99
ttgcccagaatattcatccccagatactcaggggcttgctccctcccaccattcaggtctctgttcacacaccacctcctccgagagaccttccttacctagcctatttagatttgccccaccactcccctctatctgctaatctggctttatttttttccatcatacctgatattatagtaaatgtctgtttgctcagggtctatctttcccctggaatacaaccctccaagggtgaggctttgtccagtttactcaccttggtaccctcagtgctttgcacatggcagttgcccagtgagcatttgctggattcttgagtaagagaacaataaacctaagcgcagcgttcggggcagcagcaggaacagtaaggggctgggagctgaggctggagaggaggcagggccaggtcacaaggggcttggatgccacacaaacatgcttagactttatcatgatagcaatgggatttattgaagga

SEQ ID NO: 10377 - DNA, 499 bp, Homo sapiens
  MAP TO AC009228.2; EXPRESSED IN ADULT LIVER, SIGNAL = 0.74; EXPRESSED IN BRAIN, SIGNAL = 0.92; EXPRESSED IN BONE MARROW, SIGNAL = 0.95; EXPRESSED IN HBL100, SIGNAL = 0.98; EXPRESSED IN FETAL LIVER, SIGNAL = 0.78; EXPRESSED IN PLACENTA, SIGNAL = 0.93; EXPRESSED IN BT474, SIGNAL = 0.67; EXPRESSED IN LUNG, SIGNAL = 0.97; EXPRESSED IN HELA, SIGNAL = 0.92
gggccgtagagtctctgtcacaaccactcaactctgcaattgtagaggaaaaacagccatacataaaagaatgaatgtgactgtgttccaataaaattttatatttatggatactgaagtttgaatttcatataatttgtaagtgtcacgaagtgttattcttttgattttttttccccaaccatttaaaaacatgaaaaccattcttagcttgcaggccataaaaaacaggtagtgggctaaatttggctggccaccagccatagttggctgactcctgctctaaccatgtaacctctccaggtaacgcccagtgatgtccgaacactggtgaatggatttgccaagaaccctttgcaagcccgaagagaaggactgtatttcaagggaaaagattacagatgtgtccgggcagatgaatattctctttatgccaaaaatgtgagtgctcaagatttgaagagagctgagtaaaagaaaagaatttgcctccaaattt

SEQ ID NO: 10378 - DNA, 475 bp, Homo sapiens
  MAP TO AC007944.1; EXPRESSED IN BT474, SIGNAL = 0.83; EXPRESSED IN BONE MARROW, SIGNAL = 0.69; EXPRESSED IN LUNG, SIGNAL = 1.4; EXPRESSED IN HELA, SIGNAL = 0.6; EXPRESSED IN HBL100, SIGNAL = 1.1; EXPRESSED IN FETAL LIVER, SIGNAL = 0.9; EXPRESSED IN PLACENTA, SIGNAL = 0.85; EXPRESSED IN BRAIN, SIGNAL = 0.99
ttgtgcttggagcaaatgagttaaggcgcatactggtacaacaaggacttctcgtaataggacgtgaataccatttacataagggtctgattgttgatttattgacagtttatcctgccgcacctggaatcctgagacaaaccaaggtgctatgtgtttcacgtcccagtgcagagctctgagcagctcatcagcctctccaatgtctctcatttttttaggtatcgaccaaggtcaaatgacctatgatggccaacactggcatgccactgagacctgtttctgctgtgctcactgcaagaaatccctcctggggcggccattcctcccgaagcagggccagatattctgctcacgggcctgcagtgctggggaagaccccaatggttctgactcctctgattccgccttccagaacgccagggccaaggagtcccggcgcagtgccaaaattggcaagaacaagggcaagacg

SEQ ID NO: 10379 - DNA, 464 bp, Homo sapiens
  MAP TO AC006317.3; EXPRESSED IN PLACENTA, SIGNAL = 0.89; EXPRESSED IN FETAL LIVER, SIGNAL = 0.83; EXPRESSED IN ADULT LIVER, SIGNAL = 0.97; EXPRESSED IN BRAIN, SIGNAL = 0.81; EXPRESSED IN BT474, SIGNAL = 0.7; EXPRESSED IN BONE MARROW, SIGNAL = 1.4; EXPRESSED IN HBL100, SIGNAL = 0.8; EXPRESSED IN LUNG, SIGNAL = 0.72; EXPRESSED IN HELA, SIGNAL = 0.77
cgtgctttcttgctgcactaaacactaacacatgcgtgcatttgtttccactttaaatgttaggttcatgaagtcggaaaagaggtaacattatacacaatatatacacaatccaactgcagaatttcaaaggactagcatacaacgttaatcaaatatactaatttagaattgccccatatgctaaacatataaaaccaattttcaaaaaactttggaacatgcacataaaatatactaaaattacactaactaaaattttcaattttgaggtcacagatcacatttgggaatctccctgtttcaggcttcatcagccacttccttgcccttgttgattttgcacagctggtgaccaggcccaagtgcccctctcttcttcagcagccagctcagcctttaagatccaggtgggttcctccttcccgtacacctcccaaacttccctctttgagcaagtgcat

SEQ ID NO: 10380 - DNA, 452 bp, Homo sapiens
  MAP TO AL034345.3; EXPRESSED IN FETAL LIVER, SIGNAL =   1; EXPRESSED IN BRAIN, SIGNAL = 1.8
ggggaggcacttaagcatagtcctggcatatatggtaagcactcaataaacattagcttcttttattgttattatacaaggcttaaaatggttttttgcccttattctatgatacttacttgaattgttttaattttctagaaatttgtagagtgaaaatactatttcttctgaaagctttaaatatttatttatatatatattctaagcctaagaaaagcttagaaaatggaagactgcgaggaactgctcaaaggaatttactttaatataccttaaaatatagacaacttaggaaataagtttgttcttattcgtgttttatattatgttgaataaatatttgctcactattcagatctataaattttgcttgaaaggtttctattggctttcatgtgtttcctcaacttaacaggtattagcagaagtcacagtaagcgctcaggctt

SEQ ID NO: 10381 - DNA, 375 bp, Homo sapiens; identical to SEQ ID NO: 4577
  MAP TO AC007552.4; EXPRESSED IN HELA, SIGNAL = 0.69; EXPRESSED IN ADULT LIVER, SIGNAL = 0.72; EXPRESSED IN BRAIN, SIGNAL = 0.77; EXPRESSED IN PLACENTA, SIGNAL = 0.59; EXPRESSED IN LUNG, SIGNAL = 0.71

SEQ ID NO: 10382 - DNA, 405 bp, Homo sapiens
  MAP TO AL031650.21; EXPRESSED IN BONE MARROW, SIGNAL = 0.93; EXPRESSED IN BRAIN, SIGNAL = 0.91; EXPRESSED IN BT474, SIGNAL = 1.2
tcttcagattacccaaatgaaggtagtttataccaacggattatatacattgtccaaaaatgtgcttgacaaggtgcttatgttttaaacattagaacttttaagcttaaattacattgtcctttaattactgtttagttaagaacatattgtaggcttcgagtaggcagctgcggccacattcccatgacaggctccattttctggagactgtacagccctttgaggtgaaatggctccagcgagagagatgcaggcagtggcaaagaagggacctctgagacctcaggctgcccatagggagggatcctgaggacccaagagtcgctagggcttgtgctttttttctttgcagtcaccgtgcctatcatgaggatgaccttggcctggatcacctctttccag

SEQ ID NO: 10383 - DNA, 447 bp, Homo sapiens
  MAP TO AL080239.11; EXPRESSED IN FETAL LIVER, SIGNAL = 0.62; EXPRESSED IN LUNG, SIGNAL = 0.7; EXPRESSED IN BRAIN, SIGNAL = 0.68; EXPRESSED IN PLACENTA, SIGNAL = 0.67; EXPRESSED IN HBL100, SIGNAL = 0.88; EXPRESSED IN ADULT LIVER, SIGNAL = 0.79; EXPRESSED IN BT474, SIGNAL = 0.73; EXPRESSED IN HELA, SIGNAL = 0.72
atgatcaggctgtttggtcctttttccagtgggatgtcattgtggtgtttcttggaactttgcccagcaagataccataggaaagtttctttagttggacctgtgtccgccttgtgttacgacgattaggcaagatttttctcatggcccgaacccccgtggaatgtttcactttgatcaaggtctgcaaaatagcagggtgcttactaaatggtggtttggactcacattcttgccttctactttagtataaaaggaagaggggcattgttgattatctggctgcttgctgccgaataggggagctgtaatcagggtttgggttttgaagcagggggtgacggacttcagagttgttttcctggaggcactggtaccggacttggcagaggagaaggatggtatcaatgtgttgctgggtggctgcctggagaggggagtttagcc

SEQ ID NO: 10384 - DNA, 459 bp, Homo sapiens
  MAP TO AL078475.2; EXPRESSED IN PLACENTA, SIGNAL = 1.1; EXPRESSED IN LUNG, SIGNAL = 0.75; EXPRESSED IN BRAIN, SIGNAL = 0.75; EXPRESSED IN BT474, SIGNAL = 1.1; EXPRESSED IN ADULT LIVER, SIGNAL = 0.78; EXPRESSED IN HELA, SIGNAL = 1.7; EXPRESSED IN FETAL LIVER, SIGNAL = 0.7; EXPRESSED IN HBL100, SIGNAL = 1.1; EXPRESSED IN BONE MARROW, SIGNAL = 0.83
caaaacgggataggaagccagccagctatcaaggaagcaaagcaatccctaatctagaggcttctttggctctaagaaagatctgcaataaaacaaaactaataaaactacacgtgaatacacaaaattaatgacagcataaatttaaatgaattgtcttaaccaagaatgtttaaactatattaacataagctgaatattcaaatttgtatgaataaaccattgatgggcatggagggagaaagcacctcacctattaataataaatgaaatcccagctgtgttctccaaaatccatttcagggttgcaagatcatagttctcagggtgtttaaaggcaacaccttccggaagcccctgtactatcaaagctgactggtcttgtagcatcttctcatatggtacaggtacctctgtgggtttttgtaaagctttccctgggagaggcaaaaagcagat

SEQ ID NO: 10385 - DNA, 477 bp, Homo sapiens
  MAP TO AL049875.2; EXPRESSED IN BRAIN, SIGNAL = 0.71; EXPRESSED IN ADULT LIVER, SIGNAL = 0.66
tttttacacaggtccctggccccattcctcttcacttggcaggatctccttaccaggctttccagccacatattgcaggtgtgtttgggaaggcaacaggtttgtacctccctgggatggagctcccagaaggagggacaggcgccatctttagtatttcatagccttcactattgataccttcaggaaccgaaaaatcccaggtgactagggactggagcagatcccagcatactgcagcagccctatggaaaagaggccagattgttatgtgggtgcccacttccatatctcctcactgggtagttcttccaggtctgggtctccagccactgccaactggggctatggagccagtggcagctctgcaactccctggacaagagctcccagtgggaggggcgggttgccatttttgctgtctcacagcccttgcccttgctgtcttcaggctctggagagtcatggggaccaaag

SEQ ID NO: 10386 - DNA, 440 bp, Homo sapiens
  MAP TO AL109941.9; EXPRESSED IN BT474, SIGNAL = 0.95; EXPRESSED IN BONE MARROW, SIGNAL =   1; EXPRESSED IN BRAIN, SIGNAL = 1.1; EXPRESSED IN HBL100, SIGNAL = 0.99; EXPRESSED IN HELA, SIGNAL =   1
atggccttgctgataccttgattttggactgctagccttaaaaactgtgagagaataaatttctgttgttttaaactacccagcttgtggtaattcattatggccctaggacactaacatagacactaatggtgcattactagaacttgtatgtttattacattgctttttctttacatgacaatttattccattcacgcatgtacacacacacacacacaaacacaattagcccctttccatcggaaagtaatactatttatccactcccagaaaagcatgcccttggagtttttttcccattagtgggaatttattggtaccatattctccctccactttctcttcatttctcttgtaatcatcatcatgcatttgcaacacagactataaggatatgagtacaatttttaattatggagcagaatgtttctctatgc

SEQ ID NO: 10387 - DNA, 487 bp, Homo sapiens
  MAP TO AL109984.5; EXPRESSED IN LUNG, SIGNAL = 2.9; EXPRESSED IN BRAIN, SIGNAL = 0.94; EXPRESSED IN ADULT LIVER, SIGNAL = 0.95; EXPRESSED IN BT474, SIGNAL = 1.2; EXPRESSED IN HELA, SIGNAL = 1.2; EXPRESSED IN HBL100, SIGNAL = 1.5
cactgccatttttcccaaacagggtttggcctgtaattttctccatcaatcagatttttatgtcatctttcccttaggatttctgaactatcaatgaatgatacacattcttgtttcccaatatgctgatgtagacttcagtatctttctctctcagtatttggacaggaggaggcggcacacccatatgcccaggctatcatcttggtcaaatctttgtagccatcttgaccaaaaaacctttaactttgactccttatgtgtttgaaggagacaaaccgcacaagtgtgagttctgtgacaagtgcttcagccggaaggacaacctgaccatgcacatgcggtgccacaccagtgtgaagccacacaagtgtcacctgtgtgactacgctgccgtggacagcagtagcctcaagaagcacctgcggatccactctgatgagcggccgtacaaatgccagctctgcccctatgccagccgcaactc

SEQ ID NO: 10388 - DNA, 412 bp, Homo sapiens
  MAP TO AP000054.1; EXPRESSED IN HELA, SIGNAL = 0.6; EXPRESSED IN LUNG, SIGNAL = 0.96; EXPRESSED IN BRAIN, SIGNAL = 1.4; EXPRESSED IN PLACENTA, SIGNAL = 0.67; EXPRESSED IN HBL100, SIGNAL =   1; EXPRESSED IN FETAL LIVER, SIGNAL = 0.62; EXPRESSED IN ADULT LIVER, SIGNAL = 0.67
ccccatcattatcaacccaggaaggtcaggggcaatgtctgaggttgctttcaaatgcaccttgatatcttcttaaaacaagtgagacgctgaacattcagagtaggaattttgtctttctcaaggtgaagtctcagagtttccggtcagcatataacataagcaacgtataagctgctttacaaaagggagggagggaggagggagaagcatgcatagcaatgaacccaactcacctgagcaaaatataacttcatttcctttcccagaaactcagtcttatgcagctggagcctggcatctgctgcggagaaggggttgctgaagtttattctgactcgtttgaagctcttaaaatactgaaaggtgatgtccttgtcatacgtcctaaagagggactcaaatttggcct

SEQ ID NO: 10389 - DNA, 491 bp, Homo sapiens
  MAP TO AP000044.1; EXPRESSED IN LUNG, SIGNAL = 0.86; EXPRESSED IN HELA, SIGNAL = 0.77; EXPRESSED IN ADULT LIVER, SIGNAL = 1.4; EXPRESSED IN PLACENTA, SIGNAL = 0.7; EXPRESSED IN BRAIN, SIGNAL = 0.72; EXPRESSED IN BT474, SIGNAL = 0.78; EXPRESSED IN BONE MARROW, SIGNAL = 0.78; EXPRESSED IN HBL100, SIGNAL = 1.1; EXPRESSED IN FETAL LIVER, SIGNAL = 0.92
tggcacagtgtacctttcttaggtactcttcaaagactcaccacagaaggtactaagatatgagtgacctcactaatgatgcttttaaacattataaggcaattagtatgttcttaggcgactttttaatatgcatgccagaagataggttttctcagtaatggatgtaagaaactaaagctattacaactagaaaaggaatttttattattttaaataattgatttctactctttccctttttttaaattagtatttctctgaacagccattgaagaatcttctgctttcaacttctgaggaacaaatcgaaaaatgtttcataattgaaaatataagcacaattgctacagtagaagaaactaatcaaactgatgaagatcataaaaaatacagttcccaaactagccaagattcaggaaattattctaatgaagatgaaagcgaaagtaaaacaagtgaagaactacagcaggactttgtatgaccag

SEQ ID NO: 10390 - DNA, 382 bp, Homo sapiens
  MAP TO AC011739.2; EXPRESSED IN LUNG, SIGNAL = 1.2; EXPRESSED IN BRAIN, SIGNAL = 1.3; EXPRESSED IN BONE MARROW, SIGNAL = 1.1; EXPRESSED IN HBL100, SIGNAL = 0.99; EXPRESSED IN FETAL LIVER, SIGNAL = 1.1
cttgggcacaagctaagaggtattagagaggatggcacctagcagaaaaagtaactcccatgcatgaaaagcatgcagaatggaaggtgccatgtgccgtgaaatgatacatgatcctctggtccttcagggaaacccttgactcttcactaatcctcaaccttgaaatccctttgtatggcttttgtacagcgagtcacctgttcccctacgtgaagaagagaatacaagtaattagccaatcgagcacagaactgaatccaattgaagtggcaattgacgagatgtccaagaaggtttctgagcttaatcagctttgcacaatggaagaagtggacatgatcagactgcagctcaaactgcaaggaagtgtcagcgtgaa

SEQ ID NO: 10391 - DNA, 475 bp, Homo sapiens
  MAP TO AL049735.4; EXPRESSED IN LUNG, SIGNAL = 0.68; EXPRESSED IN HELA, SIGNAL = 0.79; EXPRESSED IN ADULT LIVER, SIGNAL = 0.65; EXPRESSED IN PLACENTA, SIGNAL = 0.61; EXPRESSED IN BRAIN, SIGNAL = 0.76; EXPRESSED IN BONE MARROW, SIGNAL = 0.63
tgctttctggtttgcacttcttcagtgtcatttcctctctattgtcttcatctttttgtgaaataactcctatttcctttttactgacagcttggtggctttgaagaaaaaatagcaataaatgcatgtgttcaatttactagatattactaaaattcctcacatacgtaatttttattttcttaaatttatataaataaatctgtcacctaaattctctctgaattcagatttaggagttctaaatgtaagaaataagttggtatatcatgttaacctatatcgttttggggccttagcctcaaatggcaatgataaaaaggagaagaagaaagaagaagagggagaagaagaaggaagaacaagagggagaagaacaaagaggaggaggaggagaaagaagaagaaagaagaaaagaagaaaaaagaaagaaagaagaagaaagaagaaagaaggaggaggagaggaaggaga

SEQ ID NO: 10392 - DNA, 494 bp, Homo sapiens
  MAP TO AP000105.1; EXPRESSED IN LUNG, SIGNAL = 1.1; EXPRESSED IN HELA, SIGNAL = 1.8; EXPRESSED IN ADULT LIVER, SIGNAL = 0.93; EXPRESSED IN PLACENTA, SIGNAL = 1.2; EXPRESSED IN BT474, SIGNAL = 1.5; EXPRESSED IN FETAL LIVER, SIGNAL = 1.7; EXPRESSED IN BRAIN, SIGNAL = 1.1; EXPRESSED IN BONE MARROW, SIGNAL = 1.2; EXPRESSED IN HBL100, SIGNAL = 1.1
ggagttttaacccagactgtgcggctctggccaaggccagtggcctatctctcaaaacaactagatggggtttccaaaggctggcccccatgtctaagggccctggcagcaatggccctgttagcacaagaagcagataaactaacccttgggcaaaacctgaatataaaggccttccatactgtggtaactttgatgaataccaaaggacatcattggctaacaaatgctagattaaccaagtaccaaagcttgctatgtgaaaatccccgcataatcactgacgtctgtaacaccctaaatcccgccaccctgctcccagtatcagagagcctggtcaagcataactgtgtagacatgttggactcagtttattctagcagacctgaccttcgggaccagccatgggcatcagcagactgggagttatacatggacgggagcaacttcatcaatccacatggagaaagatgtgcaggatatgcggtggtaac

SEQ ID NO: 10393 - DNA, 494 bp, Homo sapiens
  MAP TO AC009944.2; EXPRESSED IN BRAIN, SIGNAL =   1; EXPRESSED IN BONE MARROW, SIGNAL = 0.96; EXPRESSED IN LUNG, SIGNAL = 1.1
  unsure 114
cacccaaattggaaacaaagaagtcaaaatatccttgtttgcagatgatataatcttatatttggaaaaacccatagactccaccaaaaaactattagaactgataaacaaatnacagtaaagttgcaggatacaaaatcaacgtacaaaaatcagtagcatttctactgttgtttccagcaacaaacagtctgaaaaagagaagcaatcccatttgcagtagccacaaataaaattacatacctaggaattaaccaaagaagtaaaagatctctacaatgaaaagtataaaacactgtgaaagaaatcgaagaagacagaaaaaaatggaaagatattctatgttcgtatatcggaagaatcagtgttgttaaaatgtccataattacaaaaggcaatgcaattgctaccaaaatgccattgtcattcttcacagaaatagaaaaagccatttgaaatgttttatggaaccagaagaaactcagaataaccaa

SEQ ID NO: 10394 - DNA, 419 bp, Homo sapiens
  MAP TO AC008469.2; EXPRESSED IN HBL100, SIGNAL = 1.2; EXPRESSED IN HELA, SIGNAL =   1; EXPRESSED IN PLACENTA, SIGNAL = 1.2; EXPRESSED IN ADULT LIVER, SIGNAL = 1.2; EXPRESSED IN BT474, SIGNAL = 0.96; EXPRESSED IN FETAL LIVER, SIGNAL = 1.3; EXPRESSED IN BRAIN, SIGNAL = 1.1; EXPRESSED IN BONE MARROW, SIGNAL =   1; EXPRESSED IN LUNG, SIGNAL = 1.1
aaaatttatccctaagcattttattgtattgatactattatgaatggaattattttttaaatttcatttttgaattgttcattgctggtatatagaaaaataatcgatttttgtgtattgatcttatgttttgtgaccttgctggaattacgtatatcctactgtttatttagctgggtggttttgctgtcagtgctggtgttcctagttcactcagaagcccctttgctctgatcccgacaatttccagtgccatttctactgtcagtaatgaacccacaattgtctgcagactgcacagcctcatctgcagctgaggcagagtcagccctttctccttgtcctgcttttcagcagggttggaaatgcacagtctgggatgcttcttacgggggatagcctgagatgctggaggagtc

SEQ ID NO: 10395 - DNA, 449 bp, Homo sapiens
  MAP TO AC008833.2; EXPRESSED IN BRAIN, SIGNAL = 0.97; EXPRESSED IN BONE MARROW, SIGNAL = 1.1; EXPRESSED IN HBL100, SIGNAL = 0.92; EXPRESSED IN PLACENTA, SIGNAL = 1.1; EXPRESSED IN ADULT LIVER, SIGNAL =   1; EXPRESSED IN FETAL LIVER, SIGNAL = 0.96
agcaggtgaccaggagaatcactattctatttttgataaagtttcactgatcttttttcaactagtcttaccaaattctctgagcaacacctgctgcatttgatctcaactcaatttcaactccactggggtgcatgggtgggaacaagagaaaaataagggaaatatttaagtaaatgaaatttagcaatgtcagaagagacagcaggacaaattgcaatcaataatccaccagcaatgctaatcacttaaaattgtacatttacattttccaatgcaggaataatgatatcaatatgaataccaatgacaacagtaacgataatgagttcacatttattgagtatttactgtgtgctgtagactgtgttaaatcatttgcatggcttatttcatttaatctcacaagaatcccaggtggaagagactggcatttcctttcctccttt

SEQ ID NO: 10396 - DNA, 497 bp, Homo sapiens
  MAP TO AF020503.1; EXPRESSED IN FETAL LIVER, SIGNAL = 1.1; EXPRESSED IN BRAIN, SIGNAL = 0.95; EXPRESSED IN LUNG, SIGNAL =   1; EXPRESSED IN HBL100, SIGNAL = 1.8
gctttgggttttatgttggcatacgattctgatactctaccaaattacaacccagcaagagaaatgtattatgaacttgtgtgatataataacaagttaaaaagagtcatcctttcttggaaatcagcatgttcaccccttttgtttttgcttttgttcttagaacttgctgctgtacctcttgcaaagtcccataaggtagaaccaggtgatatcactacctttacctgatacaggagacagaaaagaatttaaaaaaaagccattttacacagaaagggacctaattctgaatgattcaccaatattcgatgaaatcactgatgaagctatacctttgccctcttcagattccttcttggctgtactaccagtaagtttgaccatgtcaatgccagggtgtttactcaacataactgtaacaagtttctaaaaatgtctagcaataaatatattattcttggaagttatgttctcgggaaaaagaggtgtctcca

SEQ ID NO: 10397 - DNA, 482 bp, Homo sapiens
  MAP TO AL022319.2; EXPRESSED IN LUNG, SIGNAL = 0.65; EXPRESSED IN ADULT LIVER, SIGNAL = 0.7; EXPRESSED IN BRAIN, SIGNAL = 0.8; EXPRESSED IN PLACENTA, SIGNAL = 0.71; EXPRESSED IN FETAL LIVER, SIGNAL = 0.59
cacatttgtgcaagtacgcagaagaacacttggtacataaaaggtgctgcataaatgcttgcttgttcattcacaatctagtgtaagtggagcagggcccagagccatttccatggctttttcggtggaggggcagataaaaaggagagggtgtatctggcagccactgaacaggatgggaacagcaaggagcccctgataatgcatccccctccccctccctgtttctctaaccttgctctcactctttcgtctctgggacctctgctccctgtctgaccatccctccaccttttcccctcccaggtatgcggatcctggtgaacctgctcctggacacactgcccatgctggggaatgtcctgctgctctgcttctttgtcttcttcatctttggcatcataggtgtgcagctctgggcgggcctgctgcgtaaccgctgcttcctggaggagaacttcaccatgtgagttcatcccctg

SEQ ID NO: 10398 - DNA, 396 bp, Homo sapiens
  MAP TO AF043945.1; EXPRESSED IN LUNG, SIGNAL =   1; EXPRESSED IN HELA, SIGNAL = 2.5; EXPRESSED IN PLACENTA, SIGNAL = 1.3; EXPRESSED IN HBL100, SIGNAL =   1; EXPRESSED IN BT474, SIGNAL = 1.1; EXPRESSED IN BRAIN, SIGNAL =   1
atatcaccccaggctttgtgattgacacaaatgttattggacaagggaaaaagaatgccacatgctcttataaatgaaatagtctttataagattccatatataagtgagatcatggattttgtatgtgtgtgtctggcatatatcacttagctaatgtcccccaggttccttaagtatatacaatttagcataaaaaaagaaatgaaatagttttcctttctaggcctgtatttgttacttatagcattctggttttcctggttccaagtgggctttgggttttattaatagtagaatcgttgaatttttatgcaaatactgctgatttacaggttggaaatctggacaaaatcagacctgccctagaagatgatgctgtggaaagtgtttgcct

SEQ ID NO: 10399 - DNA, 466 bp, Homo sapiens
  MAP TO AC009886.2; EXPRESSED IN PLACENTA, SIGNAL = 1.1; EXPRESSED IN ADULT LIVER, SIGNAL = 2.5; EXPRESSED IN FETAL LIVER, SIGNAL = 2.8; EXPRESSED IN BRAIN, SIGNAL = 1.4
  unsure 129
  unsure 167
  unsure 176
  unsure 275
caggtccaatgatgttgaaggtagcatcaatatgcatgggattgggatctttaaaggagatgatatgcactctgtagtctggagcaagatgcctacgcatccattcaatgcctaggtagtttgtaaccntgaaaacaaaagaaagacatacgatcgataaatatttnggttctatngtctagaaaactaaaaatattcaaggtgaaaaaaatttaggatgaaaatattttaatttggaagtaaagaatacaataatatagtgtgaaatttcaganggcagcctgcgttcacctggcttctctgtgcaaaaatatctcttccagctcgaatgaagtcagcagcatcaaagcatggctcaaactcagttgtcacaaattttccctgagcagccaatttgtgtctgtcttctacagagtggatgggataatcctaattggaacaagaatgaacacacacaatgcactgg

SEQ ID NO: 10400 - DNA, 463 bp, Homo sapiens
  MAP TO AP000136.1; EXPRESSED IN BT474, SIGNAL = 1.2; EXPRESSED IN HBL100, SIGNAL =   1; EXPRESSED IN BRAIN, SIGNAL = 0.68; EXPRESSED IN PLACENTA, SIGNAL = 1.1; EXPRESSED IN ADULT LIVER, SIGNAL = 0.92; EXPRESSED IN HELA, SIGNAL = 0.85; EXPRESSED IN LUNG, SIGNAL = 1.3; EXPRESSED IN FETAL LIVER, SIGNAL = 0.89; EXPRESSED IN BONE MARROW, SIGNAL = 1.2
tgattgcagaaactgaaagaccatcagcatgataaaccactggaaatactgacacagatctgttgacagatcagtgcaatggactgtattgtgttccaattcatacgttgaattcatatgttgaagcccaaagttcatatgttgaagccctaacgccttatgtgactatctggagatagggtctttaggaggtaattaaggttaaataaggtcataagggtggggccctaatctgatagtacagtggcttatatgaagaggaagagagagagagacctctctccttctctccaggcacgtgcacctgaagagaggcgatgtgagcacacaaagagaaggcagccatctgcaagtgaggaagcaggctttcaccaggaacccaactggctggcatcttgatcttggacttctcagcctccaaactgtgagaaagtaaatttctcttgttcaagtcaaccagtct

SEQ ID NO: 10401 - DNA, 391 bp, Homo sapiens
  MAP TO AC010778.2; EXPRESSED IN LUNG, SIGNAL =   1; EXPRESSED IN PLACENTA, SIGNAL = 1.3; EXPRESSED IN ADULT LIVER, SIGNAL = 1.6; EXPRESSED IN BT474, SIGNAL = 1.4; EXPRESSED IN FETAL LIVER, SIGNAL = 1.3; EXPRESSED IN BONE MARROW, SIGNAL = 1.2; EXPRESSED IN BRAIN, SIGNAL =   1; EXPRESSED IN HELA, SIGNAL = 1.6; EXPRESSED IN HBL100, SIGNAL = 1.4
attattgccagccaagatcgataaatatgaccaataagtataattgttctctgtgtcagcccttgttgagggaatactcacagcagtggtgatcactgctattatggctatgattaaattactcatggtgactggttgtcctgctttcctcaggttttcttctgctatctgtgacagcttcttgatctgtccgcaggtagttggctgtgttcaataggtgttgcttgtgacagttggggtcctcctcagcatcagtcttgacatggctgcaactggggggttctcgggttcctcccagagtctcttctttggcatctggctcatgataaggctttagatgtcttgatggcacccaaattggctgttgatttggtcctggagaaacacaagc

SEQ ID NO: 10402 - DNA, 402 bp, Homo sapiens
  MAP TO AC011301.3; EXPRESSED IN BRAIN, SIGNAL =   1
tcccctgaagttttgctcacctacagctgtgtggacctgaggggctttcagctcctgggctgtgctatgaaagtcctgttcttttggtacccattgagtgaccaccaccgctcaactaatttgtaggacattgatatacacaacaacaacatcatcaatggcaacgtgtctctcatgtataagagtgtgcacctcctaccatcatcatatcctttgggggatatatccctggtttgcaccttgggagctatggctcgcttgccataagtatggttgtcgtaactgttgtattcaaacgaggtcttggaatatttctcgagctccttggccaggttggaacgcggcgtagttgtggggacattgtttctgtagccatactgaggaatctccagctgcttcaca

SEQ ID NO: 10403 - DNA, 377 bp, Homo sapiens
  MAP TO AP000197.1; EXPRESSED IN BT474, SIGNAL = 0.62; EXPRESSED IN BONE MARROW, SIGNAL = 0.7; EXPRESSED IN HBL100, SIGNAL = 1.3; EXPRESSED IN LUNG, SIGNAL = 1.2; EXPRESSED IN ADULT LIVER, SIGNAL =   1; EXPRESSED IN BRAIN, SIGNAL = 1.5; EXPRESSED IN PLACENTA, SIGNAL = 0.74; EXPRESSED IN FETAL LIVER, SIGNAL = 0.61; EXPRESSED IN HELA, SIGNAL = 0.65
caaattgtgtccatcttaagggtgataatgtacaaatgtggccatttccagtagtcatggagtaggcaaatgaattgaagaagtatgattttgacaaccctggacagcattagaagctcattgtccaaatatgagacaagttagacagacttacaagcagaaaaaaagaaaaagttgatagcctcactatcaaaagaaaagattcatgatatgcaactctcttgctagcaagtaaaaaagaggaaatacattaaattattagaaaatgttaaaagtaatgagcctttatctgttcacagagtcatcaaaagttatttctgtgtaggaagtgtcaagtagcatggataaagagtattcgggaaattctttagttgtgg

SEQ ID NO: 10404 - DNA, 475 bp, Homo sapiens
  MAP TO AC007394.2; EXPRESSED IN BRAIN, SIGNAL = 0.73; EXPRESSED IN HBL100, SIGNAL = 0.68; EXPRESSED IN FETAL LIVER, SIGNAL = 0.71; EXPRESSED IN LUNG, SIGNAL = 0.8; EXPRESSED IN HELA, SIGNAL = 0.71
aaatctctgttgtataagccccccagtctatggtattttgttacggcagcctgggctaactcatacaccatggatttactatcttaattttgtattttcctctccagtcttttgtctgtgcatttgttcacatttatgtttacagttacacacataatgttcattccattttgatctctgactctcaaactgagccctgctacgtacagattgggaggagatgggggtattggccatagtgctgccaggtatccatgggatgctgtgcagacctgtcccagaggtgcagcctcaccttaccaacctcaccatgctggcagagaaaagccagatggatgtggaaagaagcactgttgaattcattcaagatgaagtgatgtttgtctctgtcacttggctgctgacttgcaagggaaagatactggtggatacttgttttttcatcatgttgttcaaccaagtgcccagcacagtg

SEQ ID NO: 10405 - DNA, 462 bp, Homo sapiens
  MAP TO AL031676.2; EXPRESSED IN PLACENTA, SIGNAL = 0.61; EXPRESSED IN BT474, SIGNAL = 0.69; EXPRESSED IN BONE MARROW, SIGNAL = 0.8; EXPRESSED IN FETAL LIVER, SIGNAL = 0.62; EXPRESSED IN LUNG, SIGNAL = 0.62; EXPRESSED IN HELA, SIGNAL = 0.68; EXPRESSED IN ADULT LIVER, SIGNAL = 0.88; EXPRESSED IN BRAIN, SIGNAL = 0.77
tggacagagagagagacagcagggacgtgtggcacagaagaaagaccacgtgaggacacagaagttggccatctgcaagccaaggagagaggcctcaggagaaaacaaacctgccagcacctcaatcttcaacttctctagcccccagaactgtgagaaaatacatttctgttgtttaggacactcagggtatggtaatttgttatggcagcccctcataaatgaatacactacctacatgtgtaactcacttctattacctacacagcaccgacagcattgaagttgccaatttctggtcaagagatgagtgacaagataccttctggaataaatctcagagccagttctgctccctttctgagcttccaaagaatgacatgcagccccatcagcatttccatcccagcactgcccgtcaccctaagaaacacttatttctctgttgaagcgaaagaccct

SEQ ID NO: 10406 - DNA, 416 bp, Homo sapiens
  MAP TO AC010983.3; EXPRESSED IN PLACENTA, SIGNAL = 1.3; EXPRESSED IN ADULT LIVER, SIGNAL = 1.3; EXPRESSED IN BRAIN, SIGNAL = 0.96
cctaccatctagggacagcgtagtcatcataacatcgtaacataacactttactcatgtgtttgtggtgatgctggtgtaaacaaacctactgtgcttccagtcatataaaattacagcacatacaattatgtacactatgtaatactagttaatgaaaataaacgatgatgttactggtttatttatttactatagtatactttttaaatcactattttagagtctgctccttttacttataaaagaattaactgtaaaacagcctcagacaaggattctttcagtacatattcctgaagaaggctttgttatcataggagatgacagctccatgcatgctattgcccctgaagaccttccagtgggagaagatgtgaaagtggaagacagtgatgaccttggctttgtgtaggc

SEQ ID NO: 10407 - DNA, 379 bp, Homo sapiens
  MAP TO AC007880.1; EXPRESSED IN HBL100, SIGNAL = 0.67; EXPRESSED IN BRAIN, SIGNAL = 0.87; EXPRESSED IN PLACENTA, SIGNAL = 0.78; EXPRESSED IN BT474, SIGNAL = 0.71; EXPRESSED IN BONE MARROW, SIGNAL = 0.87; EXPRESSED IN FETAL LIVER, SIGNAL = 1.9; EXPRESSED IN LUNG, SIGNAL = 0.83; EXPRESSED IN HELA, SIGNAL = 0.69; EXPRESSED IN ADULT LIVER, SIGNAL = 0.69
ctgagcatccctcaatacccattctccattctttgttttggtggaaggaccctgattatattctgggtgacaatgtgtcttgctaaaaaaaaacccttcatttctcagactttcttagagctaagtgtgcacaacctatgtgactaggtcctagcaatgagacaagtgcaagtgttctgggggcttcatgggagatgacagcagggagtggaggagcttttgtctttctttcctccttccagcctgcaactccatgtgatgtaacgactggaacttcagcagccatcttggatcatgaggtgaccttgaggatagaagctgcatacccagatagtgatcaaggggccactgtaccagtcctggactgctcgcctcttat

SEQ ID NO: 10408 - DNA, 455 bp, Homo sapiens
  MAP TO AC004832.2; EXPRESSED IN HBL100, SIGNAL = 0.92; EXPRESSED IN FETAL LIVER, SIGNAL = 1.4; EXPRESSED IN HELA, SIGNAL = 0.73; EXPRESSED IN BRAIN, SIGNAL = 0.73; EXPRESSED IN PLACENTA, SIGNAL = 0.76; EXPRESSED IN ADULT LIVER, SIGNAL = 1.2; EXPRESSED IN LUNG, SIGNAL = 0.8; EXPRESSED IN BONE MARROW, SIGNAL = 1.7; EXPRESSED IN BT474, SIGNAL = 0.63
cagagagacttgggcacctctccccaccttcctgccatcccaccctctggcagcccacagcgttttccagacagatggacaacacctcacttttacgggtgggtaagggtgggagaagcccacattccaccagagccctgggtgctgagggctggggaggggcagggtgccacccttctctggtcctggtgccaccctgtagacagatgaggcccagccccacccccgctgctcaccttctgagtttgcagctcacactcatgcaacagcagctcacagactttgatgcgcttccggatcatatcctgcttggaggctgacagcaggagacccttggggtcgagggacccaatgatgttgaagtacacagggcagccttcgtagtcgtagccacaaagaccacccgagtcatacagctggatgacctggaagtgtgggtaaggtcccgactcaat

SEQ ID NO: 10409 - DNA, 464 bp, Homo sapiens
  MAP TO AL023656.8; EXPRESSED IN PLACENTA, SIGNAL = 0.65; EXPRESSED IN BONE MARROW, SIGNAL = 0.63; EXPRESSED IN FETAL LIVER, SIGNAL = 0.59; EXPRESSED IN LUNG, SIGNAL = 0.7; EXPRESSED IN ADULT LIVER, SIGNAL = 0.74; EXPRESSED IN BRAIN, SIGNAL = 1.4
ctcacttccctctgtttcagctagctgtgaggtggttggaacacaactgccactaccagtacatggacgagctcctgcaatacatccgctttggcctaatggatgtggatactctccatacagttgccctgtcccacccccttgtccaagcaagtgagactgcaacagcccttgtcaacgaggccctggaataccaccagagcatctatgcacagcctgtctggcagactcgcaggaccaaaccacgattccagtcagacactctgtatatcattggtgggaaaaagcgcgaggtctgcaaggtcaaggaacttcggtacttcaatcctgttgatcaggagaatgctctcatagctgccattgccaactggagtgagctggctcccatgcctgtgggaaggagccaccattgtgtggcagtcatgggggacttcctgtttgtggcaggaggggaagttgagcat

SEQ ID NO: 10410 - DNA, 474 bp, Homo sapiens
  MAP TO AC007326.22; EXPRESSED IN PLACENTA, SIGNAL = 0.89; EXPRESSED IN BT474, SIGNAL =   1; EXPRESSED IN FETAL LIVER, SIGNAL = 0.65; EXPRESSED IN LUNG, SIGNAL = 0.62; EXPRESSED IN HELA, SIGNAL =   1; EXPRESSED IN BRAIN, SIGNAL = 0.73; EXPRESSED IN BONE MARROW, SIGNAL = 0.9; EXPRESSED IN HBL100, SIGNAL = 0.76
cccaaaaacaaagatcttccagttcttaaaattgactacttggattctacctaaaataaccagacgtgaacctttagaaaatgctctaacagtatttactgatggttccagcaatggaaaagcagcttacacagggccgaaagaacgagtaatcaaaactccatatcaatcggctcaaagagcagagttggttgcagtcattacagtgttacaagattttgaccaacctatcaatattatatcagattctgcctatgtagtacaggctacaagggatgttgagacggctctaattaaatatagcatggatgatcagttaaaccagctattcaatttattacaacaaactgtaagaaaaagaaatttcccattttatattactcatattcgagcacacactaatttaccagggcctttgactaaagcaaatgaacaagctgacttactggtatcatctgcactcataaaagcaca

SEQ ID NO: 10411 - DNA, 356 bp, Homo sapiens
  MAP TO AC005193.2; EXPRESSED IN BONE MARROW, SIGNAL = 0.75; EXPRESSED IN HBL100, SIGNAL = 0.66; EXPRESSED IN FETAL LIVER, SIGNAL = 1.2; EXPRESSED IN HELA, SIGNAL = 0.75; EXPRESSED IN BRAIN, SIGNAL = 0.73
aaaggaactgagatttgtcatggcatgcagtttttaaaaaacatcaaagttctcagcctataccagctaaaatggcaggcaatttctaggccaaagtcccagaaatgttcagtttactctcattgcccatctctgaagaatatgagacgcagccacacgaaaaaccagtaactgacctgcaacaggcttctcctggggtgagctagagtgactatacttactggagtcctcctcccactggagtaagtgtagcttccacgcagaataatacaaaaatcccagtaccagaaagaggcagagggctagcagcagattgcgcacaaataccaagagtcccatcttcacatgatttacga

SEQ ID NO: 10412 - DNA, 460 bp, Homo sapiens
  MAP TO AC007262.4; EXPRESSED IN BRAIN, SIGNAL = 0.69; EXPRESSED IN BT474, SIGNAL =  15; EXPRESSED IN HELA, SIGNAL = 0.63
gtgcctctgccctctgtatcgttgacagaggctgcatgtttggcaagagaacatagtgactgctgaactgaaagttgactctaactctcgctaccaagtttttccctgacacagtgaaagagtattaagacatcagcctaggacaccttgagaaccaaggacaagatggacagggccaagtaactgggcttcaaccatgactgggactaagaataagacaagaggccaggccaaagcggaaaagagtctgctatacaagctaaagctggagaagagagggaggctacgggtgtggttaggcctgtagccaatacctgggccaaagcaaaagacaagccagggtctctgacagatgcagtggcagagatgaaggcagtgtctaagaacaaggtcggtgctgagatgaaggaaggagcccctgtcagagcctaaggctctgggcaaagccactggagatttc

SEQ ID NO: 10413 - DNA, 461 bp, Homo sapiens
  MAP TO AL096816.12; EXPRESSED IN BONE MARROW, SIGNAL = 1.1; EXPRESSED IN LUNG, SIGNAL = 2.4; EXPRESSED IN BRAIN, SIGNAL = 0.93; EXPRESSED IN FETAL LIVER, SIGNAL = 0.92
tcaattttcctctaagcaccgaggagcacacctcctaattcctattacaatatgctcctgtgggcaaagcagctctcagcctgctgacaggtatgctatttggaattatgttgtgaggttcatttctcctctctgcatgctcacaaatactggctactgtgttggcagggcagggtttgccaagacggagggtctgatagcttcctgaactgctctctgatatctgcttctctgtactgccttattgcttagtcaagacagtcaccaccgaagagtacctggtgaaccctgtgggcatgaaccgctacagcgtggacacctccgcctccacctttaaccacaggggctccttgcacccctcctcctcgctgtactgcaagaggcagaactctggagacagccaccttgggggtggtcctgctgccaccgctggtggtccccgcactagccccatgtcttct

SEQ ID NO: 10414 - DNA, 463 bp, Homo sapiens
  MAP TO AC005064.2; EXPRESSED IN FETAL LIVER, SIGNAL = 8.2; EXPRESSED IN ADULT LIVER, SIGNAL = 0.82; EXPRESSED IN BRAIN, SIGNAL = 1.2; EXPRESSED IN PLACENTA, SIGNAL = 0.74
ggaaaaatgtacacagatttattatggactagaataggaaattcacatgaaattttcagagaagatacaagcttccagaatggcattttgggttatactcccagagtctaagaaatacaagttctctcacctctgccagcagggtgcttcaggaagacatttgggaagcccttttctcacaaatagtcccctctcccagaggctggaggcaggatgcagccatggaagtaacaacctactgaatcccttctgctctctgtggttctttcagtgcaacacagttccgctggatccagaagggagaagaaactgagaagcaaagctgggcaattgaccacgtgtacattggagaggcttgccccaagctctgcagcgggcacggatactgcacgaccggtgccatctgcatctgcgacgagagcttccaaggtctgaatcccaggctgccaactttgatagagga

SEQ ID NO: 10415 - DNA, 434 bp, Homo sapiens
  MAP TO AC007537.3; EXPRESSED IN LUNG, SIGNAL = 0.77; EXPRESSED IN PLACENTA, SIGNAL = 0.73; EXPRESSED IN HBL100, SIGNAL =   1; EXPRESSED IN FETAL LIVER, SIGNAL = 0.79; EXPRESSED IN ADULT LIVER, SIGNAL = 0.8; EXPRESSED IN BRAIN, SIGNAL = 0.79; EXPRESSED IN BT474, SIGNAL = 0.87; EXPRESSED IN HELA, SIGNAL =  17
tcaccatatcctaaaatagacagccattaaagagctgtttactggaaaccaatatatatgtcatgttatcttagtcaatgttttcaggaacctgtgaaaaacagaaacaccacacagaatttactatcagtagagcttcttacccaaccatgggatctaacacaatagcccggggttcctctaagtcctctgaaatcaagatcttcctcatggtcccattgagccttgtcacttctattcgatcagtgccagtgtctgtccaataaagatttcgtgcaacccagtccacagcaataccatcaggatgggcaatttgagcagtgaccacaaactgactgccagatccatctataaatgaacggcgtatggccctcacttcatcatcagtccagtagatgtagccttccacaggatcgtaatctatggcaatggca

SEQ ID NO: 10416 - DNA, 476 bp, Homo sapiens
  MAP TO AC007403.2; EXPRESSED IN BONE MARROW, SIGNAL = 0.7; EXPRESSED IN LUNG, SIGNAL = 0.69; EXPRESSED IN HELA, SIGNAL = 0.89; EXPRESSED IN BRAIN, SIGNAL = 0.99; EXPRESSED IN FETAL LIVER, SIGNAL = 0.71
agtacaagagcctgggatggcaaatttaaataccatcagagaaagaactgagcattatttcatgagaaaatattgttactatgtctgccagcccatgctcagatactcagaaccaaaattctcaggaataattgtgggaggtaagcataatctaaaagagcaagtaagaatcaagctgaaattccatcatgtggtgaggttgtaaacgaaatgtttcttagattcaaaggcagattgtattttaaaggtggaaatgagattcagtaaaagattaaaagaaaacatgtttgtgctgagagactcaacatggattgtcatcaaggatgtgcaaattaaaaccacaatgagttatcactacactggaatggctaaaattaaaaagaccatcaacaccaaatgcaaaacaactagaattctctcacacactgtgacactgctggtaggagtgtaaagtggtacaaccactgtggagaact

SEQ ID NO: 10417 - DNA, 447 bp, Homo sapiens
  MAP TO AC005883.6; EXPRESSED IN LUNG, SIGNAL = 0.69; EXPRESSED IN HELA, SIGNAL = 0.93; EXPRESSED IN BRAIN, SIGNAL = 0.98; EXPRESSED IN BONE MARROW, SIGNAL = 0.68; EXPRESSED IN HBL100, SIGNAL = 1.2; EXPRESSED IN FETAL LIVER, SIGNAL = 0.61
ttttggatgctgcatttgagggtgagagagcgcaagtgacttgttcagaggcatacacaagctagtaagctagaagaaaggctggcttcatgtgtggaggtataatgggccttcagctcaactgaacccatggaaaaaagggactctgtggggcttatacagccctttcctcatacagccaataccacctagcttggccagagtctctgtggtcttatttcttccctagtgcatttaagaggatggttggatctcacggccacttctctctcctcagatgcattccttgcgcctgctcagccagaaccagccatctcagatctttctgagcatgagtgacaacttcaggcctgtccagccactcaacaaccgctgcatccgcaccaatatcaacttcagtttacaggggaaggactgtccaaacaaccgagcccagaagcttcagta

SEQ ID NO: 10418 - DNA, 475 bp, Homo sapiens; identical to SEQ ID NO: 10220
  MAP TO AP000095.1; EXPRESSED IN BONE MARROW, SIGNAL = 0.79; EXPRESSED IN LUNG, SIGNAL = 0.63; EXPRESSED IN ADULT LIVER, SIGNAL =   1; EXPRESSED IN BRAIN, SIGNAL = 1.4; EXPRESSED IN PLACENTA, SIGNAL = 0.68; EXPRESSED IN BT474, SIGNAL = 0.9; EXPRESSED IN FETAL LIVER, SIGNAL = 0.65; EXPRESSED IN HELA, SIGNAL = 0.62

SEQ ID NO: 10419 - DNA, 475 bp, Homo sapiens
  MAP TO AL049814.6; EXPRESSED IN HELA, SIGNAL = 0.7; EXPRESSED IN BRAIN, SIGNAL = 0.82; EXPRESSED IN LUNG, SIGNAL = 0.59; EXPRESSED IN ADULT LIVER, SIGNAL = 0.69; EXPRESSED IN PLACENTA, SIGNAL = 0.61
cacctaaatcactctggggcttaacataaatagagcaataaaagggagccatctaaaatagcattaaccttttaaaatcatgtttcccattgagtataagctaaggaattggggtaattgagtgactcattttggcatgattataaaaggggcagaggggaaacgtgcaaatatgttgatattcatctaacaaatatttttaataaattaaattgagtctatccctggctatggattcctgaagaataatcacagtttatcagttaaataatctccagcctaacccgtatcctcaccttctctcatctccaccaaagaaaataatgagatttgacttgctgagatggatatgtatctcaccccagctataacctgagcctctttgaccagtgagtttatgggaaggtcttttcccttccaggggatcagagaccacctgctctaagaagagcagggagaaagttggacacacgca

SEQ ID NO: 10420 - DNA, 454 bp, Homo sapiens
  MAP TO AP000037.1; EXPRESSED IN PLACENTA, SIGNAL = 0.94; EXPRESSED IN BRAIN, SIGNAL = 1.2; EXPRESSED IN BONE MARROW, SIGNAL = 1.1; EXPRESSED IN HELA, SIGNAL = 0.62; EXPRESSED IN ADULT LIVER, SIGNAL = 0.7
cttgggcacatgtcattctgaattctggaggctatatcatggccacatccttaaccttggcaaaataaactttctaaattgactgagccctgtctcagatattttgggttaatactcatgaaatatctatttaggtgaatattcttaatgtttctaggaactatcttaaatttccaaaaacattgatgtagaatttggggcaaattaaaatatatttcaaagctttatcttcaagaacaagcagcaagagcttaccataggaaaactcaattttcgtgctatttctataaaatcttcatttctttctttgacttgtgactgccctgcagcaaagtggctacagacgaagcaaaggctggttgtatggaagagcattcggattgcaactgctcccttatttccagttgcacctcccattccagtcttcacagtatcaactgcaacatccctttga

SEQ ID NO: 10421 - DNA, 1972 bp, Homo sapiens
  MAP TO AC005880.2; EXPRESSED IN LUNG, SIGNAL = 1.4; EXPRESSED IN BONE MARROW, SIGNAL = 0.95; EXPRESSED IN BRAIN, SIGNAL =   1; EXPRESSED IN HELA, SIGNAL = 1.2
ggcttccagtctcaatttggaaaggtattccgtgtttgatgtagctaggcatcctaaagccacatcttcaagttttaaactaacatgccccaaacagatgagacctcccaacttgaaaggatccctgcaccacaatgcaatgtttaagtacctgtgacaggcttctatgtcaaacaaacaggatgctctggttcttgtccattttcctagcttattacgataaagaatttctgatgattcccatgtttgacggtcgtccgaactgtccttagtagggcaggaagtttctgaagtgacatctttggccacttcttgctttgctaaaaattgcttaggtgcagctgcatcgtctatggcatccacattttttgcttgcttttcagcagatttatctacaagaggaggtggcaccaccttctctggcttttcaacgagaacatctggttctgcctgatttggagcatcggcggaaggcaaaggaactttcgcttgtggtcgtggtggcacaggtggtttgaaagcagatccttgggttggttttgacacttgtgctgggtctgttatctcagaagtttttaggggtggaggtttatttccatctttggactgaattttcggtggtagtgggtgacttcctacagctaatttacggtttaaaactggtgatatagctccaaggggtttaatagaaagtgttgttggaacacgtttgggactatgacttaatgattgtgcctcatctttgaactcattttgtgctctgacatcacttgccaagtcttcaaattcagaatccagctctctactttcagtatctactgtcaacccggcagcttcctcttcataacccgattggcatgagcttgacaaaaagttttcttccaactggccaaagttatcttgcagcactgcaccttgattactctggccaacaggcctttcatagtacaccaggactcggtcaccagcctgcttgataagcttcaacacttgcagtgttgatgtgattttcacacctggtttaagattttaaaagggaaaacatgtaaattattgcaatagaaattactacatttgttaaatgtatttaattaaatatatataattgccattacctctggttatttaactaatagaagaataataggaaaatctcaacaatattttatttggcttttggatgaatcagtgtgctaattctcaaaccctgaatgtgctgatatcctggagatgtttaccttttcaaaccagatgatgacacaggatcccaaaaagagtgccaggatgctaactcctaattgctttctatctcttcttaggttagatgacatctctcagtttgaactgaagaagtgaacagagagagatctatttaaaggattctattaatggctaaatcagacttagagtgagggaaagctgtgattccactgaaggaaattctaaaatactccagggattacaagacatatgatgaaagattcaaattaagagagcagtgcttgaaaataatgtagcaaaatactatactatgaataacgtacttttacagattctttttatcaaccgtacccatcacattcatctttttcaaaaccagaaagaacaagtaagggataaactgctttaaagttaaacaagctggttactatctgcatctgtaatatctacgttgtttttatttttcttattttttaattgttacacgtagtttaaaatttgaaaggtataaaggtataaaaagatgtacagtaaaaaatattctttccacctctgtctcccagccatactgtcccttccctgaccttagtagcttctagtgtatgcttctatagatattctaggtgtgttagcacttaaaggtgctacttgtttcctgtcactcttcccacactctctaaaacagcacttgcccaagctatccctttatgtagaacttagagaaagaatgagaaggctctttgttttccaa

SEQ ID NO: 10422 - DNA, 1964 bp, Homo sapiens
  MAP TO AC002553.1; EXPRESSED IN BRAIN, SIGNAL = 1.2; EXPRESSED IN HBL100, SIGNAL = 1.6; EXPRESSED IN HELA, SIGNAL = 1.7; EXPRESSED IN PLACENTA, SIGNAL = 0.96; EXPRESSED IN ADULT LIVER, SIGNAL = 0.99; EXPRESSED IN BONE MARROW, SIGNAL =   2; EXPRESSED IN FETAL LIVER, SIGNAL = 1.1; EXPRESSED IN BT474, SIGNAL = 1.2
gatatgttcgctccccttccccttcagtaagaactcaggagaccatgttgcaacagagacccagtgttttccaaggaaccaatggaaccagtgtaatcacacctttggatccaactgctcagctacgaatcatgtcagtctcttgtacatattttgacaaaaaatgtctcttgcatatacattttaaaatttgtgactgcaatagtctaagtatagtcatgcttttctgcccatgccatgaaggctttttttgttgttgttgcagtttgtccttccatctccccaccacattcccagcaaatggtcttcccttcacagagctgtgatttggttttatttacaggccactgcctgctgggggcccttcaataagccaaggcctgccagcctcccgttacaacactgctgcggatgccctggctgctcttgtggatgctgcagcttctgcaccccagatggatgtgtccaaaacaaaagagagtaagcatgaagctgccaggttagaagaaaatttgagaagcaggtcagcagcagttagtgaacagcagcagctagagcagaaaaccctggaggtggagaagagatctgttcagtgtttatacacttcttcagcctttccaagtggcaagccccagcctcattcttcagtagtttattctgaggctgggaaagataaagggcctcctccaaaatccagatatgaggaagagctaaggaccagagggaagactaccattactgcagctaacttcatagacgtgatcatcacccggcaaattgcctcggacaaggatgcgagggaacgtggctctcaaagttcagactcttctagtagctgtatgtatctcaatccgagtttcacaatgtgatgtctgagtaaagaattactttattctttaggtcaagtagaactatatggtatttaaaaatcctaacggttgatagtaaatgtaatgcaaaaatgtatcttctgctgtttttatgattatttaaatatcccagtttcctacatataagcctatcaatgtatcttccacaagaaaactgtatcattcatgtaattaaatttggaaagtagaaggcagaccttattaacatatttaggcatctgaaaggtaatggatatatcgccaggctctgggctactgaggtgtaatttctcaggaagcatttgctaggacatggttctatatttatgccaataccccaaagcctctaatatcctttttctaagacacaggtttttaaaagtgagactacctattattggtgattggtatttatattgcatcgtttttgcaagttggattttgttcaagtctggttagtcattaggatggctacactgcaaatgtgttagaattcacaggtctacattaaaatgctagaaaagttactttttaaattttcttttaaactattgccttaattctatgtggaattgcagaaagaacaagcaagtatttaaataagcatctgctaatactggaagtaatttaatcatatataatcatctttctgttatctccattgaataaattcagtagagttagacatcatgaaaaaaaaaatgatttctcatgctccagaatgcaatgtgcagttcttttgatctctgagtatccactagcttaattataatttgtttacgtcatatctaccgcattgctgaggcttttagagagagagttagtgttgtgtagacaaaagacttcttttaacctgagattaggaaaatctgcaatatagattttctgcatgcagaaaattgctagctgagaaagagatattctatagttgtatgaataggtcttttgaagggaagtcaccggcacactgggagatcccacctgggcttattgaatggtatagcacatgggttccttaatcattggattaaacatttcttttcagtttgcatcacaaaccaaaccttgctttaggaatttgattttcagaaggtg

SEQ ID NO: 10423 - DNA, 451 bp, Homo sapiens
  MAP TO AC009477.2; EXPRESSED IN BT474, SIGNAL = 1.2; EXPRESSED IN HELA, SIGNAL = 1.1; EXPRESSED IN BRAIN, SIGNAL = 0.92
aggcctcttactttggttgcttcttaatgtaagtgaatcccaataagtacaaaattctctgagaactaatctacacacaaaagccaagttctaaaaatcaagcctacggtagctttgcagagcagtatgaaactaccaaaggctttcttaaagcatagtaacagagtgatttgtagtctacaaccagaaaatatagctcatgtaaccttaaactgaaaaataaaaacgtttacaggtctctctggtctactcagcaaatggagagaaatgaggaatgaaaggccggcgtgagttacctgcatatgggtactggtagggcacggcatacgcctgcccattcgcagcgtagacaacttgagttcctggcgggtacgcaccaccgtatggcccatagccataagcctgctgaaaagaaacaggcccattagaaatacaattgtgaaacctctgg

SEQ ID NO: 10424 - DNA, 1958 bp, Homo sapiens
  MAP TO AC003002.1; EXPRESSED IN HBL100, SIGNAL =   1; EXPRESSED IN HELA, SIGNAL = 1.2; EXPRESSED IN PLACENTA, SIGNAL = 1.4; EXPRESSED IN FETAL LIVER, SIGNAL =   1; EXPRESSED IN BT474, SIGNAL = 1.4; EXPRESSED IN BRAIN, SIGNAL = 1.1
tccctatgttgttccccatcatcaggactctttcgttatgggtttctgtcagtcccggttctgcccagtaggctttcctctcactggctttaatgtcccatgcctgtcaccaatcccatggtcttatttgtgagttggtctgacagacatttgttatggggctgcctcttccctccaaagtcatcatgcacttcatgagcatttctgttttaggttgttggcatggagccaaggatgaggaggcaccttccaagcaatgtgtttctgtaggagtgtcacaggtcacaactttaaagccagctttgtccacccagaaggcccagccctgtgagacatgtagctcacttctgaaggacattctacacctggctgagcatgacggaacacaccccaagcgtacagccaagctttacctgcaccaaaaggagcatcttagagagaagctcaccagaagtgatgaagggaggccttcgtttgtgaatgacagtgttcacctggcaaagaggaacctcacatgcatgcagggtggcaaggattttactggtgattcagatcttcaacaacaggctcttcacagtgggtggaagccacacagggacactcatggtgtggaggcctttcaaagtggacagaataattacagctgcacccaatgtgggaaagacttttgccaccaacatacactgtttgagcaccagaaaatccacacagaggaaaggccttatgagtgcagtgaatgtggcaaattgtttaggtacaactccgaccttattaaacatcagcgaaatcatactggagaaaggccttataagtgtagtgaatgtggaaaagccttcagcctcaaatacaatgttgttcaacaccagaaaattcacactggagaaaggccttatgagtgcagtgaatgtgggaaagcttttcttagaaagtctcacctacttcagcaccagaggattcacaccaggccaaggccttatgtgtgtagtgaatgtgggaaggccttccttacacaggctcaccttgttggtcaccagaaaattcatactggagaacggccttatggatgcaatgaatgtgggaaatactttatgtacagttcagcactcattagacatcagaaagttcacactggagaaaggcctttttattgctgtgaatgtgggaaattctttatggacagctgcacactcattattcaccagagagttcatactggagaaaaaccttatgaatgcaacgaatgtgggaaattctttagataccgttccacactcattagacatcagaaagttcacactggagaaaagccttatgagtgtagtgaatgtgggaagttctttatggacacttccacactcattattcatcagagagttcatactggagaaaagccttatgaatgcaacaaatgtgggaaattctttaggtattgcttcacactgaatagacatcagagagttcactctggagagaggccttatgaatgcagtgaatgtggcaaattctttgtggacagctgtacactgaagagtcatcagagagttcacactggagaaagaccttttgaatgcagcatttgtgggaaatcctttagatgtcgctccacacttgatacacatcagagaattcacactggtgaaaggccttatgagtgtagtgaatgtgggaaattctttaggcacaactcaaatcatattagacatcggagaaatcactttggagaaaggtcttttgagtgcactgagtgtgggagagtttttagccaaaattcccacctcattcggcaccaaaaagttcacactagggaaagaacttacaaatgcagcaaatgtgggaaattttttatggacagctccacactcattagtcatgagagagttcatactggagaaaagccttatgagtgcagtgaatgtgggaaagtctttagatacaactccagcctcattaaacatcgg

SEQ ID NO: 10425 - DNA, 483 bp, Homo sapiens
  MAP TO AL035416.7; EXPRESSED IN LUNG, SIGNAL = 2.1; EXPRESSED IN BRAIN, SIGNAL =   1
agtgaggcagccatatgaactacctctcacttgagttcttgctttctgtcttcctcacctgggctccataccttacatccattgctcacctggcccattggaagaacaatctggcttggccagctgtcttgcctttgacctcagtatcccttgcaggtataattccagcatttatttttcagcttcttatgcttccaccatagtgaggtaggactctacttccacacacccacttagcacatacccagggacctcctcttattttattttatccttaaaatataggagaccaaatgaaagatgggattggcgagtctaagatgagactggaagcaatagtcaggcagagggatggaggcaaaaaggctagccaagaagctgttagatgtggtaagaacctagactccaagagtggaagaggtgaaggtgtatgggaagatgccaccctagatttagatgcagggtggaaggatttggctgaat

SEQ ID NO: 10426 - DNA, 414 bp, Homo sapiens
  MAP TO AF017257.1; EXPRESSED IN FETAL LIVER, SIGNAL = 1.1; EXPRESSED IN LUNG, SIGNAL = 1.9; EXPRESSED IN BRAIN, SIGNAL = 1.1; EXPRESSED IN HELA, SIGNAL =   1; EXPRESSED IN PLACENTA, SIGNAL = 1.3
tcccaggaggtttcactgagctggggccagggagcagggacctcattccccagtggttctgccccttggggacacagtgcccctaccataggtactcaaaggtactcagaggtactcaaaaggtcctcctgcggaccttgtgtaggtgtcaagttctctctagagtgaacatgcctcagaatcataatcagggaggaatgtcattcactttttcttcattgacaaattgagtttaactcttttccatccatgttcaccaaaggtggcccgccggtggggaaagaggaaaaataagcccaagatgaactacgagaagctgagccggggcttacgctactattacgacaagaacatcatccacaagacgtcggggaagcgctacgtgtaccgcttcgtgtgcgacctccagaactt

SEQ ID NO: 10427 - DNA, 473 bp, Homo sapiens
  MAP TO AL031671.11; EXPRESSED IN ADULT LIVER, SIGNAL = 0.77; EXPRESSED IN BRAIN, SIGNAL = 0.81; EXPRESSED IN BT474, SIGNAL = 1.8; EXPRESSED IN HELA, SIGNAL = 1.1
ctgggactgaggaggcatagcatcctgctgtctgtctccccacaacctaagagtccataatttttgagaactggatgaagagggaaaggtgcttcttagatcttaccatcttcaagaagcatgcagacatttccgcagaagacattactgcattaatgatgaatttgagattctgagtgtaacttgcagaaggttctgcctatcagtgagaatctgtgtggcatttcagttttggctttgataaaattgaggagtatatgagcagtaacacccaggagggtgtttctcactattatcagcccctccaatgctccaggacccactccattgatttcccttcttcctctccccagcgcaaggatctgggtggttttctttgttgttgttgttgttgttgttgttggcttctggagtaaagttccagtccccaatcatcctcccttcaacaactcagctgctatgacgtcacctct

SEQ ID NO: 10428 - DNA, 421 bp, Homo sapiens
  MAP TO AL021919.4; EXPRESSED IN PLACENTA, SIGNAL = 0.95; EXPRESSED IN HBL100, SIGNAL =   1; EXPRESSED IN FETAL LIVER, SIGNAL = 1.1; EXPRESSED IN LUNG, SIGNAL = 0.95; EXPRESSED IN BRAIN, SIGNAL =   1; EXPRESSED IN HELA, SIGNAL =   1
caaataagaagaccgacggcctttttggcatgtaatgaaatacagagccattctgaagatgggctccttggccactggggaaggccatcctttggttttggcctcagctccttgccttttgattcttttccacctcctcatcagaaggctaacaatctaaacaccaagctcaacacacccacatcagttagtaggcagttttagccacatatagcacaacacaagtaatgtccatgaaggacaaagcatattcaagtgcgtaaaggactggtatactgcctggtacagaaccaagcctgattttagcatgcatctttcatctttttctaaatccaacttgtaccaaaatacattatgagaaaaactgtctctctaaactctgtgaaaacaagaccttttctggcaagactcctggtgtagc

SEQ ID NO: 10429 - DNA, 437 bp, Homo sapiens
  MAP TO AJ011929.1; EXPRESSED IN FETAL LIVER, SIGNAL = 0.98; EXPRESSED IN BRAIN, SIGNAL = 0.98; EXPRESSED IN HELA, SIGNAL = 2.2; EXPRESSED IN HBL100, SIGNAL = 1.1; EXPRESSED IN PLACENTA, SIGNAL = 2.7; EXPRESSED IN ADULT LIVER, SIGNAL = 2.2; EXPRESSED IN BT474, SIGNAL = 1.3; EXPRESSED IN LUNG, SIGNAL = 1.6; EXPRESSED IN BONE MARROW, SIGNAL = 1.4
tgtcttggtcagaggcaatgctgtgtggaataccatgacggtggataatgtattccgtgaacccacggatggtagtcttggcagaagcattgtgtgcaggataggcaaacccatatccagagtaagtgtctattccagtgggaacaaacctctgccctttccatgatggaagagttccaatataatcaacctgctaccaggtagctggctgatcacccctagaaatggtgccatattgaggactcggtgttggtctctgttgctggcaaactgggcactcagcagtggccatagccaggtcagccttggtgagtggaagtccatgttgctgagcccatgtgtaacctccatccctgctaccatggccactttgttcatggacccactgggtgatgacgggggtggctggggaaagaggctgagtggtgtccacagaa

SEQ ID NO: 10430 - DNA, 470 bp, Homo sapiens
  MAP TO AL035703.17; EXPRESSED IN BT474, SIGNAL = 1.2; EXPRESSED IN FETAL LIVER, SIGNAL = 1.5; EXPRESSED IN HBL100, SIGNAL = 1.4; EXPRESSED IN HELA, SIGNAL = 1.6; EXPRESSED IN BRAIN, SIGNAL = 0.9; EXPRESSED IN LUNG, SIGNAL =  12
ggggaaaagcagcattagttcacgacaagtctgctgtctaagagaagaagcgtatgaactctctgctccaataatgagctcccccactgcagcactccgaccagatctccttagagaatctggatcacaagctgcatccttcatgagaatcagccaattgtcacatcctggatacaagatatgatctgcaagccaccaacccgggcatcagggaagatcaaatggagagtaggtcaggggtgaggggaagagctcccagtggcacctgaggtcacctggtaggccttgttgcagatcccgcagctgaagggcttccctccaacgtgggtcaccacgtgccgctccagcatggacggggcactgaagatcttcccacacgtggggcaggggtggtactctttggagtgcacctcatggatgtgcttccggtgatcctgaagagtggggaaactcatcctgcacttcttgca

SEQ ID NO: 10431 - DNA, 1970 bp, Homo sapiens
  MAP TO AC004613.1; EXPRESSED IN FETAL LIVER, SIGNAL =   1; EXPRESSED IN LUNG, SIGNAL = 1.1; EXPRESSED IN BRAIN, SIGNAL = 1.3; EXPRESSED IN ADULT LIVER, SIGNAL = 1.1
aatattggccagatgctgatggtgcttttaaaacgtaattatttaattctgagactctgggagagggggcttagatctctgctttgggtgttcttctcagatgcggtgcttttaaaaaaaagtgtaattatttaatcctgagactcagagaaggcttagatctatgcattgggtgttattctcagatgcagagatgtaaatgccatttttctcttctgttttcaggtcacatgtgccaatttaacgaacggtggaaagtcagaacttctgaaatcaggaagcagcaaatccacactaaagcacatatggacagaaagcagcaaagacttgtctatcagccgactcctgtcacagacttttcgtggcaaagagaatgatacagatttggacctgagatatgacaccccagaaccttattctgagcaagacctctgggactggctgaggaactccacagaccttcaagagcctcggcccagggccaagagaaggcccattgttaaaacgggcaagtttaagaaaatgtttggatggggcgattttcattccaacatcaaaacagtgaagctgaacctgttgataactgggaaaattgtagatcatggcaatgggacatttagtgtttatttcaggcataattcaactggtcaagggaatgtatctgtcagcttggtaccccctacaaaaatcgtggaatttgacttggcacaacaaaccgtgattgatgccaaagattccaagtcttttaattgtcgcattgaatatgaaaaggttgacaaggctaccaagaacacactctgcaactatgacccttcaaaaacctgttaccaggagcaaacccaaagtcatgtatcctggctctgctccaagccctttaaggtgatctgtatttacatttccttttatagtacagattataaactggtacagaaagtgtgccctgactacaactaccacagtgacacaccttactttccctcgggatgaaggtgaacatgggggtgagactgaagcctgaggaattaaaggtcatatgacagggctgttacctcaaagaagaaggtcacatctgttgcctggaatgtgtctacactgctgctcttgtcaactggctgcaaaatacactagtggaaaacactctgatgtaatttctgcccagtcagcttcatccctcagtataattgtaaatcatcacagattttgaattcacacctgaagacatgctctcacatatagaggtacacaaacacaccgtcatgcacatttcagcttgcgtctatcatgattcctgttgagagggctttcattgtctgactcataatggttcaggatcaactatcatcaaacggaaggattaactagacagagaatgtttctaacagttgctgttatggaaatctcttttaaagtcttgagtacatgctaatcaataatctccactcatgcattcctactgcttggagtagctgtactggtaaatactactgtaggagtatctgcttgttaaaatggaaaaatgtgtctttagagctcagtattctttattttacaaacacaacaaaatgtagtaacttttttccagcatacagtaggcacattcaaagtggtccaagatggctcttttttctttgaaaggggcctgttctcagtaaagatgagcaaacatttggaatttacatgtgggcagacattgggataacaactttcatcaccaatcattggacttttgtgaagttgacaccagctaaggctgcttaaaataagttctgatcattatataagaagggaaatgcctggcagacaccatgtaagttataagtgtctgtcttatctttactacacatattgtaacaaattcaatatcctagtcttcatttgtatgaatggtttgtattgtacatagtttaaccaagtgttatttgagctgcttattaatattaacttgtacttgtctctctgcttgttattgg

SEQ ID NO: 10432 - DNA, 402 bp, Homo sapiens
  MAP TO AC012123.1; EXPRESSED IN ADULT LIVER, SIGNAL = 1.1; EXPRESSED IN FETAL LIVER, SIGNAL = 0.98; EXPRESSED IN LUNG, SIGNAL = 0.98; EXPRESSED IN BRAIN, SIGNAL = 1.1; EXPRESSED IN BONE MARROW, SIGNAL = 0.98
ttttaatatccatacccctcagctagtaaattttagacaccaaatatagtatatatatatagatagatatatagatatacacatatatgtatttatacacacacacatacatgcacacatctaaaagccaatcataagttaaatgcttataatcttttaaaaaattaaagcaaattaaatttgacacttaggtttttataatcatcccttgagatagtttttgcatcctagggtatcacaaaatcaaggtactttatgctccagtgctggaagtattttggccttcagagaataaatggcgtttatcagagggacttactagtaagggagagtcacttcctgtggatctacaggaagtccattagcaatcccaaccactgctccagagggatccttgatgat

SEQ ID NO: 10433 - DNA, 459 bp, Homo sapiens
  MAP TO AF166112.1; EXPRESSED IN LUNG, SIGNAL =   4; EXPRESSED IN BRAIN, SIGNAL = 0.91
caaggggcaagttatgaaccaaccattttagggaagccccctacccctgagcaggtccccccagaggctgggctggggacccaggttgctgtggaggactctttcctcagtcatcaccactggctgtgggtgaaacttgccctaaaaacaggaaatgtgtctaagatcaatgccgcctttggagataacagtcctgcctattgtccacctgcatgggggttgagtcaacaggactacctgcagagaaaggccttgtctgcccagcaagagctcccatcctcatcccgtgacccctcaaccttagagaacagctctgcgtttgaaggtgtccctaaagcagaggccgacccattggaaacctcaagttacgtatcttttgccagcgatcagcaggatgaagcacctacccagaacccagcagccacgcagggggagggcaccccaaaggaaggagctgac

SEQ ID NO: 10434 - DNA, 407 bp, Homo sapiens
  MAP TO AL021331.1; EXPRESSED IN BRAIN, SIGNAL =   1; EXPRESSED IN BONE MARROW, SIGNAL =   1; EXPRESSED IN PLACENTA, SIGNAL =   1; EXPRESSED IN ADULT LIVER, SIGNAL = 1.4
ttgcctttctggacaaaaccaatgctcatcttaaccaaaccaatgttcatcttacgtatgttgattgatgtctcatgtctccctagagtgtataaatctacagtgtgttctgaccaccttgggcacatctcgtcaggacctcctgaggctgtgtcacgggcaccggtcctcaacctgggcaaaataaacattctaagttaactgagacctgcctcaggttttcggggttcatgctatcatctggcatgtaaaatcattctgttgtgaaaaaagaaaaatgtcttgatttagttgagaaaatggggcagtgggaaagctgtgctcttttcacaaacagggtcactgtggggcccatggcagagctctcactccgctctctcctctgcagctctctacggcgttctgtt

SEQ ID NO: 10435 - DNA, 454 bp, Homo sapiens
  MAP TO AL008631.1; EXPRESSED IN BONE MARROW, SIGNAL = 1.3; EXPRESSED IN HBL100, SIGNAL = 1.4; EXPRESSED IN HELA, SIGNAL = 1.1; EXPRESSED IN PLACENTA, SIGNAL = 0.95; EXPRESSED IN ADULT LIVER, SIGNAL = 1.5; EXPRESSED IN BT474, SIGNAL = 1.6; EXPRESSED IN FETAL LIVER, SIGNAL = 1.2; EXPRESSED IN BRAIN, SIGNAL = 1.1
agccagtttccccattctgtatttatacaactgattgttttaaaatctgttcactcaacggtcttttattgggcacccattatgtatcataaggtatgagccctgctcccaacaatctttcaggtcacagtgtacaaatatgtccacaagtcatagtgcatggattaggaggtgggccacatgggttggaatgtagcttatgccattttgacctttggtgcattagttaatgtctctgtgcctcagttcctctcctaaaatgagaaaaattgtgttatctacctcatggggttgctacaagggttaaatgagtcaccaaacagaaatacttacaagagtgccttgtacgttgtaacaccccatgatgtcagttgctggcattgtgattttaacatcatcatcatcatcgtcgtcgtcgtcgtcatcgtcatcatcatcaaagtgctgcatccag

SEQ ID NO: 10436 - DNA, 428 bp, Homo sapiens
  MAP TO AH005332.1; EXPRESSED IN PLACENTA, SIGNAL = 1.1; EXPRESSED IN HELA, SIGNAL = 1.1; EXPRESSED IN HBL100, SIGNAL = 1.1; EXPRESSED IN BT474, SIGNAL = 1.7; EXPRESSED IN BRAIN, SIGNAL = 0.95
tggacttgttaaaatgaaattggtatttaggaatttggagatttttagtagttacacaagaatcaatgaaaaagaacgaagctggtttccaaagctgatatgtctgatttggttcctttcttctcaggtgaaaagctccgggtcttaggctataatcacaatggggaatggtgtgaagcccaaaccaaaaatggccaaggctgggtcccaagcaactacatcacgccagtcaacagtctggagaaacactcctggtaccatgggcctgtgtcccgcaatgccgctgagtatctgctgagcagcgggatcaatggcagcttcttggtgcgtgagagtgagagcagtcctggccagaggtccatctcgctgagatacgaagggagggtgtaccattacaggatcaacactgcttctgatggcaaggtagg

SEQ ID NO: 10437 - DNA, 465 bp, Homo sapiens
  MAP TO AC010127.3; EXPRESSED IN BRAIN, SIGNAL = 0.97; EXPRESSED IN BONE MARROW, SIGNAL = 0.96
aaaacatttttgtttcatttcttggttatattgcctatagttgttttcctaagtgtattgcttaagaaaaaaaaatgaattttaagatttttttgaaccttgcttttacatatcctagaataaatagcattgatagaaaaaaagaatggaaagaccagagattactaggggaattttttttctttattaacagataagaattctgacttttctttttttccatttgtgtattaggtggttgtgaatgcccttttaggagcaattccatccatcatgaatgtgcttctggtttgtcttatattctggctaattttcagcatcatgggcgtaaatttgtttgctggcaaattctaccactgtattaacaccacaactggtgacaggtttgacatcgaagacgtgaataatcatactgattgcctaaaactaatagaaagaaatgagactgctcgatggaaaaatgtg

SEQ ID NO: 10438 - DNA, 432 bp, Homo sapiens
  MAP TO AL021026.1; EXPRESSED IN BT474, SIGNAL = 1.2; EXPRESSED IN FETAL LIVER, SIGNAL = 1.2; EXPRESSED IN LUNG, SIGNAL =   1; EXPRESSED IN BONE MARROW, SIGNAL = 1.2; EXPRESSED IN PLACENTA, SIGNAL = 0.94; EXPRESSED IN ADULT LIVER, SIGNAL = 1.1; EXPRESSED IN BRAIN, SIGNAL =   1; EXPRESSED IN HELA, SIGNAL = 1.1; EXPRESSED IN HBL100, SIGNAL =   1
gtctatgcttagccatccccaagcaaatgtatagtagtactgtagaagacctttattagacactctgccaaataattagaacagtacttgtgctctaatccaattcgctatccctttcaccgtagcaattcatcaatctaaaaaggtaaaaacaaaacacctcaggccaaaggaaactccttatgagtcctttaatcctcaggtttacataaatgccattaaagtcctgtgagaagtgccaaataagtttaaagcacaaaatcaattagctgcagaatttaaatccacattgttctagtaagtaactataaaaaaaagtaggctaaataaactatatctattacaatcagcaacgattcataaattacactgaggacaccatcaaagagatacctaagcaattaggacctatcagccagatggcctagaaaa

SEQ ID NO: 10439 - DNA, 456 bp, Homo sapiens
  MAP TO AC011402.1; EXPRESSED IN BRAIN, SIGNAL =   1; EXPRESSED IN BT474, SIGNAL =   1; EXPRESSED IN ADULT LIVER, SIGNAL = 0.95
ttcaaggaaactcgtggtggaaagtgtcaccctctttgtacaaccagtatgatctgcagaatgaaactcaaggaagtcaccaactttggaaagagattatcattccatggcaccaaacgctggtcacaacagcccactttttctttggcttctttctccctctggctatcatcactggctactacatccttgtagccttgaagttaagagaaaggcagctggttaagtttagctgacccttccaggtccttgcgactgtggtaaccaccttcttcctctgctggttgcccttgcaagtgtccctgtggctggacttcacatcatttcgggaagacagagagggcctgaaccaggtggccttactcctaagacccctggccttgtctatggcctttatcaacagctgtctcaatccagttctctatgtcttcattgggcatgatttctgggagcact

SEQ ID NO: 10440 - DNA, 448 bp, Homo sapiens
  MAP TO AF186193.1; EXPRESSED IN BRAIN, SIGNAL = 0.93; EXPRESSED IN LUNG, SIGNAL = 1.3; EXPRESSED IN BT474, SIGNAL = 1.5
tgctgggagataaccctgagtgtggacactgaaaaacctgtctatcaagaagataatggtcagtgctagaatatctgagctgcccctggctgagggccacagaggctgcaagaggagggggatccagaggaggtctcgagaagaaagaatgggtgatgagatcactgggcactccctgctgggacacgagcaccccagcatggactggggatatttggtctatgagtcaagagagcccaggggaccagtcacctggggatggggagcagggacctgaagcccaccatgtgatgcttatccagagctggtagggtgcagtggttctcgagcatcacatcctggtagagtgctctctgagggggtcccaggtgctgcccctcctcctgtgtgaggtacatggccacctcctcaaacatcactgtgccctggaatcacaggtgctcactgc

SEQ ID NO: 10441 - DNA, 462 bp, Homo sapiens
  MAP TO AJ239320.2; EXPRESSED IN HELA, SIGNAL =   1; EXPRESSED IN BRAIN, SIGNAL = 8.4
tgctaatggtatgcttcagggcctttcagggaaaagcataaagcctcctgagttccaggcaactttaccctctaacacaaaccaaaaacacatggtgaaagacagaggtcttcctgcggcctacttcttttgcaaacagagctcagagccgctacaaagggggcccaaaaaagaagtatgaggaagagggcacaagaaagtgaccgtggctcctcaaagacctctgaatgtcatcaggttggagtaaaaacatttctctattgagaaaacaacaggtttgcctacctgttcttgaaggaacaagtcattggcaatatgcactattttttccacagcaatgatgcttccgatgctatgaatttcaatatctgccagcatggtgaggacaaggatggcttcaaccagcagctgacggtactctggctgaggtacacgattcaggacagactccacatgaacaga

SEQ ID NO: 10442 - DNA, 471 bp, Homo sapiens
  MAP TO AC008088.1; EXPRESSED IN BRAIN, SIGNAL = 2.3; EXPRESSED IN PLACENTA, SIGNAL = 0.59; EXPRESSED IN BONE MARROW, SIGNAL = 0.73; EXPRESSED IN HBL100, SIGNAL = 3.4; EXPRESSED IN FETAL LIVER, SIGNAL = 0.69; EXPRESSED IN HELA, SIGNAL = 0.67
  unsure 212
cttatcactgtgtaccaagcagctgctgggggctgcacccatcccgatggaggagcttctttctccccatgcagcctcatgctccctgcttgtttggtgtgctgacggggctgctgaacaggacgggttttcttttccccctgagaagcctcctacattgtggggagaagagtgtggtaggaagagcaatccagagacagtcttgtaggtcntttaagaccttctcatcttggtctgcttgttgcgaattggggttatacagagatggtgatggtggtagtgatgacggtggtggggatgatggtcatggttatgaaggtaatgacgacggtggtggggatgatggtcatggttatgaaggtactgatgatggtggtggggatgatggtcatggttatgaaggtactgatgatggtggtggtggtagtgattcctccttgaccaaataagtctgggaaatgctggcatgta

SEQ ID NO: 10443 - DNA, 470 bp, Homo sapiens
  MAP TO AL049546.3; EXPRESSED IN BONE MARROW, SIGNAL = 0.85; EXPRESSED IN BRAIN, SIGNAL = 0.73; EXPRESSED IN PLACENTA, SIGNAL = 0.68; EXPRESSED IN LUNG, SIGNAL = 0.6; EXPRESSED IN FETAL LIVER, SIGNAL = 0.62
gttatagtgatggaaagagaggtattcaatagaatgcctaggcttctggcttgggaactgggagaatggcagcgcctttcacaggagaataagaggtgaatcacatccaggaggactgagggatatcatgaatgcatttttgtacctgttgaatttgagatgcttggcagggtataaaaatgggaatgtcctacaggtgtttgaattattgatcaaaaccacaataaaatgatataggtaaagtgattgattttttgaatcattgtggtatttgaaggcatttaagtgggaaaaatcagccaaggatcgtgtgaggatcaagaagcacaataaaaacaacatggattttagaacctctgctctgaaccccaaggatgacctcagtgggctcagaattcccattacactggagatccataccatgctcatggaaaccttctggtatgtttcatactaggcgatctggttgc

SEQ ID NO: 10444 - DNA, 397 bp, Homo sapiens
  MAP TO AL132780.1; EXPRESSED IN HBL100, SIGNAL = 1.1; EXPRESSED IN PLACENTA, SIGNAL = 1.3; EXPRESSED IN BT474, SIGNAL = 1.3; EXPRESSED IN BRAIN, SIGNAL = 1.1; EXPRESSED IN BONE MARROW, SIGNAL = 1.3
tgatggggtccttttcaaacacttcatatgtctgagattccagattgtccatcagtggctgatgaatgaggaaaaggacaaagttagccagtttctggcaaaggacaatgcactaaaatatcaaaaactttccactgctttctgagttttagtaagatttggaggcatatattctcaagaaacattttccatcccaccttcctcctctaagtgcactccagacccacctgaagcggggactgcagatagtcttcatagcccttggcaaagagttcataggcattaggtggaggacggttctggcttaagtattccaggtattggaggtaggagcagaactccttctctgagtggtggttggtgcctgtgatgatgaactgcacctccaactgtgaga

SEQ ID NO: 10445 - DNA, 381 bp, Homo sapiens
  MAP TO AL035586.3; EXPRESSED IN HBL100, SIGNAL = 1.3; EXPRESSED IN HELA, SIGNAL = 1.5; EXPRESSED IN ADULT LIVER, SIGNAL = 0.95; EXPRESSED IN BT474, SIGNAL = 1.6; EXPRESSED IN LUNG, SIGNAL = 1.1; EXPRESSED IN BRAIN, SIGNAL = 1.8; EXPRESSED IN PLACENTA, SIGNAL = 1.5
tggctaccttaagccactaggatgacaaaatatacacctgactcagccatgcctcagtacttgggtttgactcctttcagttattatagtctatagtcttaatgtagttgggtaataagctgccatggaagactggacaggaatggaaaatatttaacaggtgtattataaaattcatactccttgacagtagatatttggattgaataggatgcttccaggtaacctagaagcagcctgctcctgctcttctcattatgaaggttgtacttaccatgataatccttatacaatgggttagtttctctctcagaaccaataaatgattccagaccaactactacatctgacaaggttgtgacacgggcaataatggcttta

SEQ ID NO: 10446 - DNA, 404 bp, Homo sapiens
  MAP TO AL132633.1; EXPRESSED IN FETAL LIVER, SIGNAL = 2.3; EXPRESSED IN BT474, SIGNAL = 1.2; EXPRESSED IN BONE MARROW, SIGNAL = 1.7; EXPRESSED IN BRAIN, SIGNAL = 1.4; EXPRESSED IN HBL100, SIGNAL = 1.3
tgaaacaaaaatgtgtgtgttggttagtggttttaagacatttcatttctgaaaacatagagatgataacaagcaacaaaagaaaggttcccaaaagcaaatattcttttttttttttcttcctctaatagagcccattctcctcctgagggagccctttcctgctcagctgtcattgagccttcaggggagttttcctcctggtaatttctcagagcctaataggtctgttcctggcccactgggtttttctgagggctgatgtattcctctcttctagatttatcctccttctcatttgttcctcccaactccagtggccagaaaaatcagattcgctgggaacatctgggattccagagagctctgatgtgggaaaggaagggcatcgtgatctcacagaa

SEQ ID NO: 10447 - DNA, 396 bp, Homo sapiens
  MAP TO AC012111.1; EXPRESSED IN BRAIN, SIGNAL = 0.95; EXPRESSED IN BONE MARROW, SIGNAL =   1
catgaacataaaggccctggctgtgacagtgatgaccactaggctttgacaatgataaaactgcactgcctgaagcgcaaactgtgcaaaccctttggggctagtgctccaaagagagctgccaccatcaacttctaaaactccaagagcccgttgttcacattaatacatacaacattgtttgtagggagacagccccctcatccactgcaaattctgtccttcagccatgactcaggaaccaggaaggagaaggaaagagaggctgacttaccaagccaacttctgtttaagtacacagacacaaacacggggggcaccgtgaagaaatccactacagagttcacttccagccagaaccacaatttatcgttggctgcaataaactgggggaaa

SEQ ID NO: 10448 - DNA, 483 bp, Homo sapiens
  MAP TO AC009231.1; EXPRESSED IN FETAL LIVER, SIGNAL = 2.9; EXPRESSED IN HBL100, SIGNAL = 0.92; EXPRESSED IN BRAIN, SIGNAL = 0.92
ttttgtctgtatattgaataagtcctgttcaataaattattagaataaacttttaaagttcacttttatttttaaagttcaaggcaagcagtagtggataactttttttttccatctctatatcccttcctttggaaattgttattcatctgtggcaattgattttgatgtaaatcttagagttaacatctctcactccagaagtgtaatcaactgaaaaacctcttcctcctgggcagaatgatcagttcaaggataggcacatgactcatgctgggaaaatcagggcctttcctgtgatttctcagctacagctgtcagggaagatgccatctgctactggggctactatgctgaagaaacgtgaatcctgtacagctaatggctattatggacatcacagagaaaggacctatcttagaaatagtgagatagatagcattgtttgaactcctggttccaactgggcctgaaatcagacat

SEQ ID NO: 10449 - DNA, 466 bp, Homo sapiens
  MAP TO AC010719.1; EXPRESSED IN HELA, SIGNAL = 0.96; EXPRESSED IN BRAIN, SIGNAL = 1.1; EXPRESSED IN FETAL LIVER, SIGNAL = 0.99
gtcactcacctgggcaaatctacttgcctatcaaacagttattcatgaagtctcaccttaaaactctcttctttgttgcatccatcaactctaaacaattttatcataaactttgcctaattctaatcagattactgattaaaattaaaccacttgaactcaggccccaaaactcaatgactatttttcttctgacacactactaagtctccaccaaggtgatactttcccttattatagtaaataataaactcagctttgtttgatcagctgattattctgatggtctttcaggagcgtcagatactccagatggattaaatgaaggaaatgtaatgaagcagctcctttcagaagtgaaggcaagattactgcgatacacgaggaatagtgaggtgtccagggaccagcaagagtgggaagccattgccacccctagggctgaagggacaaggggaggaattag

SEQ ID NO: 10450 - DNA, 449 bp, Homo sapiens
  MAP TO AL035409.15; EXPRESSED IN ADULT LIVER, SIGNAL = 0.72; EXPRESSED IN BRAIN, SIGNAL = 0.72; EXPRESSED IN BONE MARROW, SIGNAL = 0.63; EXPRESSED IN HELA, SIGNAL = 0.63; EXPRESSED IN LUNG, SIGNAL = 0.65; EXPRESSED IN FETAL LIVER, SIGNAL = 0.58
aagaataaacaaacaccagaggactaagatcaatttataactataaagataactaatataataaaaatataaatgctctaataagagcacaaaaatataacttcacagagaaaacaaagtgaagataactgaccatagagtgaataatttaattaaaatattggcaaggacacagaagatagtgacagaatcaaaaacgtgatacaggatatgaaaggaaaaattttcagtgaagtagatagcataaataaaaaccagtcacaacttctggaaatcaagggcacacttaaagaaatgcaaaatgcacaggaaagtctcagcaatagaatcaaagaagcagaagaaagaatctcagagcttgatgacaaagctttcaaattaacccaatctgtcaaagacaaagaaaaaaaaatttttttaatgaaaaaggcttccaagaagtttgggac

SEQ ID NO: 10451 - DNA, 458 bp, Homo sapiens
  MAP TO AF161801.1; EXPRESSED IN BRAIN, SIGNAL = 1.1
tcttcacaaataagtggggatatgtttttgttaatatgagagagttctctccgcagctgatgaattttcttctttgcatgacccaagcatgatattccatcaaagtgctcattgtcaaagacaattgaaagggaatgcagaagaaaaaagagactattaagcactctttgaaatttattgatctaattctagcttatgaggatatgtcagttaggaatgcttcttgccataagtcatagactgtatgtctaagagtggaacaaatgacacatgtacatgtattatctcccttaagtggaccagtggcagatgctcctgggctgatcagttgtgcagaaacgtcactgggtctgttttcaccattttggctgctcatcctcatgcttgttggtctcgtgattgtaatatggctgccaaactccttccacaaagaaatcaaggaggtaggaatgggagca

SEQ ID NO: 10452 - DNA, 383 bp, Homo sapiens
  MAP TO AL109755.14; EXPRESSED IN PLACENTA, SIGNAL = 1.1; EXPRESSED IN HELA, SIGNAL = 0.98; EXPRESSED IN ADULT LIVER, SIGNAL =   1; EXPRESSED IN LUNG, SIGNAL = 0.93; EXPRESSED IN BRAIN, SIGNAL = 0.99
tcctgagctttccctcaatgacgcatgctttggcattacagcatgccctagcaaagcttctggagcaggggttgcaaactcaaatctctacaaagtttaaaacagtgaggaacaatgggactgtggtaaagtgaaaaggacattctttgtgtaaggggcagatgctcagctcaggccaatggctgccatgtttgaactcagggcagggttgccacatctgcataattttcaagggaagtatgctatctaacattttaatataaaatcttctaattttggaaacactgcagaggccacatgaagtatttctccaggtcaaactggacccaagggttgccagcgtggtcactgtagtagacagaacccctcaggacaaattccat

SEQ ID NO: 10453 - DNA, 408 bp, Homo sapiens
  MAP TO AL109756.9; EXPRESSED IN BRAIN, SIGNAL = 1.2; EXPRESSED IN HELA, SIGNAL = 0.95; EXPRESSED IN PLACENTA, SIGNAL = 0.92; EXPRESSED IN BT474, SIGNAL = 0.9; EXPRESSED IN ADULT LIVER, SIGNAL = 1.1; EXPRESSED IN FETAL LIVER, SIGNAL = 1.2
cagatatgacggttccctgcagcgtctgcttgcccggtgctttctgtttaacacgtccatctgctagggagacgtcggctttcacatgagctgaggacagtgttcccaagccttctgaaagagtccagtcataaaaggataaaacccaagcaatgttctgatgtgtagtgcaatgggcgatgccagtttttgctaaaataggattaagttaaaaaacacacactgtaaagcatttgtcttgcttaaataatttaacaggtcttgcattcctgtttcagtcagtttcaacagaaacgcttctctgggggttgtcctcgtgaacatcatcagactaatcatgtggaagcgcgcctggtgccagttggatcaggagagagcgggtggatgccttgtggtcctggtgaggat

SEQ ID NO: 10454 - DNA, 425 bp, Homo sapiens
  MAP TO AL121588.14; EXPRESSED IN BT474, SIGNAL = 1.1; EXPRESSED IN ADULT LIVER, SIGNAL = 1.1; EXPRESSED IN BRAIN, SIGNAL = 1.2; EXPRESSED IN BONE MARROW, SIGNAL = 1.3; EXPRESSED IN LUNG, SIGNAL = 1.2; EXPRESSED IN PLACENTA, SIGNAL = 1.1; EXPRESSED IN HBL100, SIGNAL = 1.4; EXPRESSED IN HELA, SIGNAL = 1.4; EXPRESSED IN FETAL LIVER, SIGNAL = 1.4
tggaactacagcaccaccagctacagcttgaaaggtgctactaaaaaaggagaagcacactgtgtcctgcagcctgagtcctgggataaagctgctagattcaaatcctgaccattgcgtgcacactctgttagatatatcagcctcacttctgtaagcctcagctttctcatatagaatagaataatagtaatatccacctcaaatggttactgtattaaataagataataagtataaagtgctgagcacagtgaccaacatgtggaacttagtaaatgttagatatttttgttattgctgttaattccccttcagttccatccttgtagaaaaatggcctgtttcccttgtgcctggtttgccttttgattcatttcctcgacaggccatggaggaagatctggtagtccaagacgtccttga

SEQ ID NO: 10455 - DNA, 429 bp, Homo sapiens
  MAP TO AL121822.6; EXPRESSED IN HBL100, SIGNAL = 0.93; EXPRESSED IN BT474, SIGNAL = 0.98; EXPRESSED IN BRAIN, SIGNAL = 0.97
tatcataggcagtgggggaggggagagaaagcaagaaagactgctctcggcacttgtgcttttgttagttctacagaagaggcagaaaaacaagagataacaaaggctccgtttcctttctgtgagagaaggcttttgtctttcctcctgctacgatgtcagtgtctggcaagaaagagtttgatgtgaaacagatcctaaggctacgctggaggtggtttagtcatccttttcaaggttccaccaacactggaagctgtcttcagcaggaaggatatgagcatagagggaccccggttcagggcaggttgaagagccactctcgggacagaaacggactgaagaaaagcaacagtcctgtccaccacaatatactggcaccagtgccaggaccggcccctgcccatcagagagccgttcagaatttgc

SEQ ID NO: 10456 - DNA, 429 bp, Homo sapiens
  MAP TO AP000556.2; EXPRESSED IN FETAL LIVER, SIGNAL = 1.1; EXPRESSED IN BT474, SIGNAL = 2.1; EXPRESSED IN BRAIN, SIGNAL = 1.8; EXPRESSED IN LUNG, SIGNAL = 1.1; EXPRESSED IN BONE MARROW, SIGNAL = 1.9; EXPRESSED IN PLACENTA, SIGNAL = 2.2; EXPRESSED IN HBL100, SIGNAL = 1.2
cagggaaattaaatggacgcacttaatctcctaaatcagttgaactgagggaaaatttgcctacatctcgctgggaggctagctctaagtacacgggacacatgcacagggctgaaaggtatttaaatccacagggccagggatactgaaggaggaggttggtgagcacaactgggcaactgtgtattcctgtgagtgacttcctgggggtctggggcgatggagcacttggaggggctgggccgtccctggatgctgcacagcacatcttgggggagtacctgaagtagtcaaaggcagtggagtagatcttctcgcgaagcacattgcggatggttgcatttggaaccacatcggcatgcaggagggacagccccagggtcagcagcctgtgagggagccccggacccggtcagagcaggagcctgg

SEQ ID NO: 10457 - DNA, 398 bp, Homo sapiens
  MAP TO AL034419.13; EXPRESSED IN HBL100, SIGNAL = 0.99; EXPRESSED IN HELA, SIGNAL = 0.95; EXPRESSED IN PLACENTA, SIGNAL = 0.95; EXPRESSED IN ADULT LIVER, SIGNAL = 1.2; EXPRESSED IN BT474, SIGNAL = 1.2; EXPRESSED IN BRAIN, SIGNAL = 1.2; EXPRESSED IN BONE MARROW, SIGNAL = 0.99
atgcaagttggaagtgagggagctggggtttgaaaccaggttgtctgactccagtagtaactaatgcttccatcttcttattttggtgttaagccacaataggattcctggctttcctcttccctggctgtgtggatttgacgggttatataatcttctcacctgcaaagtggggatagtgatacctactttagagaatattgtgagaattaattaagaaaacgcatgcaagtgccgggcatctagtaggtgcgcagcaagcattgcctattcataatggtgatgttgatgttgatgatgatgatggcgatgagtcccaggggattcagcatcctcttgctgggttgcacccagggagcagaataggcaaagggtgaggccattttccagcagacttc

SEQ ID NO: 10458 - DNA, 484 bp, Homo sapiens
  MAP TO AP000236.1; EXPRESSED IN FETAL LIVER, SIGNAL = 0.62; EXPRESSED IN BRAIN, SIGNAL = 0.97; EXPRESSED IN LUNG, SIGNAL = 0.69; EXPRESSED IN HELA, SIGNAL = 0.79; EXPRESSED IN PLACENTA, SIGNAL = 0.61
tctctctctgtgtctctctctctttacatatatgtgggtttgtgtgtgtgtgtatatatacatacgaatatgaatacttccttatcaaaatatatcattccctacagaagcaaaatatcattgtcatatgttagaatatttgaaatatatatttgttttgaaatgtagtcaaattaattatttttagaattgaaatgaaaatgttgacaatttaaatattcctaattgtccatcccaatttttttatatctattaaccagtgctcatgcattgcctttagtggttatgctactttagttgcttttaatctaaaatattgttttaccttttttgtggctgcttatgattctgttatcttgaaggttaagccagtcattgtttaggatttttcttatgtataccttgcgatcaatttcagatttaacatttgtgccaggatctttcataacagtatttcttattgtgtcacataggaaggcccata

SEQ ID NO: 10459 - DNA, 395 bp, Homo sapiens
  MAP TO AC006029.2; EXPRESSED IN BRAIN, SIGNAL = 1.2; EXPRESSED IN HELA, SIGNAL = 0.69; EXPRESSED IN BONE MARROW, SIGNAL = 0.69; EXPRESSED IN FETAL LIVER, SIGNAL = 0.63; EXPRESSED IN LUNG, SIGNAL = 0.88
gcaaagttgccttttcttggttttcatcttccacagcttgccttccttaaatgtttgtgttccttatctttaggtacactataccgtcctcccaattctctcaagactatttttccttttattattggacattttccttttcgatataaatgtaggtgattctcaaaattctatcttcagatctcatctctgttctgtagatattttcctcctttgcatcaaccatcacttcaacacagaagatgcccaattttatacttctagaaaaattcctaactgcctgcagcagatctccatgtgaagatatgtacacccccaaatcagtgtctgttaccatttgtacatgccctttgtctttcttcttctgcatctttcctcttgccatttcctccatc

SEQ ID NO: 10460 - DNA, 448 bp, Homo sapiens
  MAP TO Z92540.1; EXPRESSED IN BT474, SIGNAL = 1.8; EXPRESSED IN HELA, SIGNAL = 1.1; EXPRESSED IN LUNG, SIGNAL = 1.2; EXPRESSED IN BRAIN, SIGNAL =   1
aatgaacatataaatcatcatgccaaaaagcagatccttaggtgaggtgaagctcaagattctgtcttcctaacagacttctgatccagaaatcatattttgagtaacaaggctttagaggcttactgattagagtcagaaattgggttagaggatcccacaggtacttctgctttttaagatattattcgtgattagagtgttgtttaaactgaaaccatcaaaggtagcaaaaattggcagactcactgaatctcagcattggagaccactctgttctctggaaaactccctgctgatgtaacctattctttttccccagcagcagtgaggtttgaagtgatgcttgacaccacggtacagaacctcttggaatccttgccaaaattctttgaagtaactgttattccttttattttcaaagtgaagaaatggataggaatggcca

SEQ ID NO: 10461 - DNA, 433 bp, Homo sapiens
  MAP TO AC010826.2; EXPRESSED IN ADULT LIVER, SIGNAL =   1; EXPRESSED IN LUNG, SIGNAL = 1.1; EXPRESSED IN BONE MARROW, SIGNAL = 1.1; EXPRESSED IN BRAIN, SIGNAL = 1.3
cccaatctcttggtcactccactattgtaaacagtaaatttgccaaacatgtaacaagacaggatccttaataccaggaaaactgactcatgagcaagtaagaacacttctgaacactttttttttttctgttggcttttgttttgtttgcttacatttgttttgtttgcttacctattcatacccttcatttttctaagaagaactagagtaaatgcttctaaaatatgttttcaagcatgttctctatttggcaggttggttactggaatgatatggataagttagtcttgattcaagatgtaccaactcttggcaatgacacagctgctattgagaacagaacagtggttgtaaccacaattatggtaagtgttggtctatgctttatggtgttccgttttgtccacaggcaattttaactccccagcga

SEQ ID NO: 10462 - DNA, 416 bp, Homo sapiens
  MAP TO AL022727.1; EXPRESSED IN ADULT LIVER, SIGNAL =   1; EXPRESSED IN BT474, SIGNAL = 0.98; EXPRESSED IN LUNG, SIGNAL = 1.1; EXPRESSED IN BRAIN, SIGNAL = 1.4; EXPRESSED IN BONE MARROW, SIGNAL = 1.1; EXPRESSED IN HBL100, SIGNAL =   1
ggaatggctttttcttcaccattcatttatttactcttactttttatatcagtacgagctttataattcttcttttgttaagttcattactactaatggttaaattgtcctacaattaaatgatggcaagcccttcaaactggattttattttttttacgtatcctgatgttttttggagcatttgtttactgctttttgagtttacctgattttttttttctctcaggtaataggaaatgaatgatgatggaaaagtcaatgctagctctgaggggtactttattttagttggattttctaattggccttatctggaagtagttctctttgtggttattttgatcttctgcttgatgacactgataggaaacctgttcatcatcatcctgacgtacctggactcccatctccata

SEQ ID NO: 10463 - DNA, 474 bp, Homo sapiens
  MAP TO AC004599.4; EXPRESSED IN FETAL LIVER, SIGNAL = 0.66; EXPRESSED IN LUNG, SIGNAL = 0.79; EXPRESSED IN HELA, SIGNAL = 0.62; EXPRESSED IN ADULT LIVER, SIGNAL = 0.67; EXPRESSED IN BRAIN, SIGNAL = 0.74; EXPRESSED IN BT474, SIGNAL = 0.83
accagattctgccctttgagcgacaggaagataaatagcgctgttctccagtgtcacttgtgactttcctctgtgagttcattgtcagggtgctcctgagctgagctgtggccaccactcattggtgtggtccctggagacacttggataaaattgtgatgacagagggctctcaggctcatgagatcacacagaggagggtggagctcaaagggctatctcagaccgggatgctccagaggttaggtcttggtgctgtgtttggcccccagctgctctttcaggccttggtcttgcccttgcccttggtctctggaaggctgaatagctgcatcttgttcatctggaaactctctgggatgagtgactttagcatctcggatgttgccatcgtagcccatgtgcataacaacttattgtgcaagcatgtacagtcatattgaaaataaatgtagaagtgaaggaggcagtcca

SEQ ID NO: 10464 - DNA, 450 bp, Homo sapiens; identical to SEQ ID NO: 3263
  MAP TO AC007463.3; EXPRESSED IN BRAIN, SIGNAL = 2.5

SEQ ID NO: 10465 - DNA, 418 bp, Homo sapiens
  MAP TO AC004832.2; EXPRESSED IN FETAL LIVER, SIGNAL = 0.84; EXPRESSED IN HELA, SIGNAL = 0.79; EXPRESSED IN ADULT LIVER, SIGNAL = 0.74; EXPRESSED IN LUNG, SIGNAL = 0.97; EXPRESSED IN BRAIN, SIGNAL = 0.7
tacatgctgcctttgttgcctgcctgcctgccaaaggaggggccagggcttccatttttctgtttaatcctcccaagaatcctcccaataatcccatgcagtagacacaatcaggtcccattctatagatggggaaactgaggcttgaggtcacataggcgtcgttcaaggctggtatacctgcaccctctcccatgtgaacaacatggttctgggtaatgggggctgtcatccagtctcctccctgcccctgctggtgcacttcctgcctctgctggtgcactttctgcccctactggtatatttgctgcctctgctggggcgcttcctgcctcggctggtgtatctcctgcccctgctggtgcactttctgcccccgctgatgcacttcctgcctctgctggtgcacttcctggct

SEQ ID NO: 10466 - DNA, 387 bp, Homo sapiens
  MAP TO AC007038.3; EXPRESSED IN HBL100, SIGNAL = 1.1; EXPRESSED IN BRAIN, SIGNAL = 0.93; EXPRESSED IN BONE MARROW, SIGNAL = 1.1; EXPRESSED IN ADULT LIVER, SIGNAL = 0.99
ccatacagaaatgctgtttctccacatttatttaaatttttattatatttatcagtaatagttcataattacaattcaataggtatcgcacatttcatgttaagattgttcttgtattttatgtgtacatgagttgtaaaaagtgagtattaaaaattaaggattttcatgtattcttttcttagattttatttttcttagaatgcaaaaatagtaagtataaagacataaaaaggcatatagagtacaagaactgtaaatgtgacataccaggtgatggagatatgatatattcatctacaaatttattttcagcaagattgccttttatttcagtcttttttaacagtgtttcaaagtgaaaatgaagaggcacatctggaaaaa

SEQ ID NO: 10467 - DNA, 1978 bp, Homo sapiens
  MAP TO AC006115.1; EXPRESSED IN PLACENTA, SIGNAL = 7.7; EXPRESSED IN FETAL LIVER, SIGNAL = 2.9; EXPRESSED IN BRAIN, SIGNAL = 3.1
tcagggtcatccttctgagggtcttccatgtctgagccttgaatgacagggtcttcaattgtctcctgaccatgggtctcctcgctgtgggtctcctccccatcagtattctcgccttgagactcctcgccatgagacttctcttggtcatagattttctggtttgtgttgaggtcttcgctggtagcaaaaaattgtctgaagtccttacatttgttccgcgcttgctctttagcatactgctcttgggcgtaacttgtttgagggtcagtaggggccaagctgcgaatgacagaccattcatagtttctgcttccagagggcttctccctatcatgaatcttctggtgctcagtgaggtcagagctatgagcaaagcactccccacactcctgacattcatagagcatccctcgagggcgaaatgtttgttcaccaaaaggcagagagtgaattacagaggtctcattgctcctatgctcaatgtatttctttttagcacgagccttctggtattcacggacatttgagctgggaacagagaattcgccatccttcttaaactcaccagatccctctccaggaacacttttctgaggtttggcacggaatacactctgtatgacagagtcttcatagttgcgattcttactgcccccttcacaagggttctctctggcaggaatcttctgtcgcttatcattaaggtctgagatataaatggaggattctcccttctcattagattccaccaattcatttccattgtgacttcttggaggtttggaagccactaagctatggataacagacctactgtattcccttccttcagaggtgttccctccagcacgaactctctgatggttgatagcatcgaagctctgaatggtagactctgccattacttttggtttactgggccctgctacactgtgacttttctgagcttccacagaggctaagctatgaataacagacctctcatatgattttgcctcatagacattttccttagtgggaatcttctggttttcataggggttagagctaatggtgaacgccttttcgtcctcatcactttcaagaggtcttgttatagtatgactcttctgagattcagtgaatggcccactatgaatgacagatttctcataccctctgccttcaaagaggttctttcgagaatgaattttctgatgctcactgagctctgagctttgcatgaaggcatcccggccatctgtaaagtcacagagcttctccttattgtaagttttctgacgccttttaagggactgaccaggaataaaggtttcctcacacactttacccttgttttcaaatgggttccctctagtatggattttctgatgttctttcagggatgagctatgaaggaaagtctccccacacaccttacattcgtacattttctctttaccatacattttctgaaactcattaagggctgggctgggcctaaaggtttccccgcgctcacgttcacgttcacgttcatgttcacgctcattatctttgtcatccccaaagtggattttctggtgctcaatcagggcagaactatgaaggaaggtttccttacacaccctgcactcgtagaatttgtctttgccatatattttctgaagctcactaaaggtggggctaggcatgaaggcttcctcacattcctgattcttacattccacaagataacctctagcatgaatcttccgatgttcagccaaggcggcactcttattgaaggtctctccacagtccttacattcaaaacgtttccctccaacctgacttttctgaacttcactgacagccacactgtggataaaggactcaccatactcatagaggttctctctagtatgcatgatctggtgctcaacaaattctgagatgacactgaacgacctcccacactcatcacatacatatggcattgccccaaaatcaattg

SEQ ID NO: 10468 - DNA, 426 bp, Homo sapiens
  MAP TO AC007327.1; EXPRESSED IN BT474, SIGNAL = 0.98; EXPRESSED IN FETAL LIVER, SIGNAL = 0.93; EXPRESSED IN ADULT LIVER, SIGNAL = 1.2; EXPRESSED IN BONE MARROW, SIGNAL = 1.4; EXPRESSED IN BRAIN, SIGNAL = 1.1
tctcgcgtgaactaccagagcaagaactcactcattactgtgggaagagtaccaagccattcatgagagatccacctgcatgacccaaatacagatatggaaactatcccatttctgtatatgggatataagacacatatcccaatagacaccacctccaacattagggatcacatttcagcacgagatttgttggggggcaaacatccaaactatatcaggcacctcgtgctggttggctgtggagatgactgagtccagccagtgcagagggaggaaaagctcccttagagggtggaggaggtctcgggggaggatggagaggacgttgaggcaggtttggacttcctgcaggcagcgagggtttccaaagcagacaggcagctggagatgaggtggtgggtgggtaggggaagtggagggaag

SEQ ID NO: 10469 - DNA, 441 bp, Homo sapiens
  MAP TO AL031683.1; EXPRESSED IN BONE MARROW, SIGNAL = 0.98; EXPRESSED IN ADULT LIVER, SIGNAL = 1.3; EXPRESSED IN BRAIN, SIGNAL = 1.1
tactcttgggcctggtatggggggaattgaaatgatccatatgaaaagcttagcaatgtgtccagcacagggcagacactcaaagatgttgaaaagaaagttggagaaagagggaaaggagcccttggcacagaattaatgaagcaagactaagaatgcacttctaaggcatggttgtttataagctgcttggagaattcttctcaaactgtgccagcagatgggtcataactcatcactgaaaaaggacaccggaaatctgggtgattttttttgttgtggtttcataagttatctgtagagccagatgagcacatatgactctcttctggctttcattcattaattgcacattgacggagctcctcctaagtccacacatctttccccacttgatgctttagctacccacatcacagcgcctccgtcagtggcactaat

SEQ ID NO: 10470 - DNA, 460 bp, Homo sapiens
  MAP TO AL049691.17; EXPRESSED IN LUNG, SIGNAL = 4.4; EXPRESSED IN BRAIN, SIGNAL = 1.1; EXPRESSED IN ADULT LIVER, SIGNAL = 0.92; EXPRESSED IN BT474, SIGNAL = 1.5
cagtgtctggtggtgtctgccccttcttcaggcataaaaactggaaagtggtcattcccacatgagaagtccaatgctctgaatccaccagtccaggccagagcgtggccaggctaggattcctgctgtgcaggcactgcagcccagtagaagagagccagaggctggtgagggatctctgcctgctctggactgtggcaggagccagcaggaggactctctgagccagccagcaagaagccactcaccttcctgtcctctccctgcctctccctgtcctctggccagggctgaacatgatgtgggtgatgcaaggcctatggttctctaaatatgtccctcaccttgctggatctctgtctttccagctgcagaggtgagagctggggctgagtggccttgcagggctgtcatccagaactgaagctgtttctgccaggtgcgaccacctaagaatagg

SEQ ID NO: 10471 - DNA, 482 bp, Homo sapiens
  MAP TO AC006450.11; EXPRESSED IN PLACENTA, SIGNAL = 0.7; EXPRESSED IN BONE MARROW, SIGNAL = 1.2; EXPRESSED IN HBL100, SIGNAL = 5.7; EXPRESSED IN LUNG, SIGNAL = 0.85; EXPRESSED IN HELA, SIGNAL = 0.69; EXPRESSED IN BT474, SIGNAL = 0.64; EXPRESSED IN FETAL LIVER, SIGNAL = 0.82; EXPRESSED IN ADULT LIVER, SIGNAL = 0.66; EXPRESSED IN BRAIN, SIGNAL = 0.73
atggggactcaaagtgcaaccagtgcgagaagagcgcccacactgtctagagtaatctaacatagggtgtcagaacccaattgtgacaagggtgcccacagaggagagtgaactagtgtggggagaaaaagcccaagcagggatacacagtcatccacagggaacagctgcatggcagggggtgtcagtgtcaacgcagtttgagaagcgtgtccatgttaaaagatgatctggtgtgaggtgtcagagcacctgagcagggtaaggaactttccatgcaggggccacctgatagggtgtcagatcctgaggaggattatgcagggaacaacatggaaggacatggcagccatgcacggggtgtcaaaattcaaagtgaagagagcacccacacagaaggaccagcctggcagggcttgtcaaagaccaaggtggatgaggtgggcattcaggcagaagaggcagagcgacacagggtatca

SEQ ID NO: 10472 - DNA, 373 bp, Homo sapiens
  MAP TO AC007011.1; EXPRESSED IN LUNG, SIGNAL = 0.95; EXPRESSED IN BRAIN, SIGNAL = 0.95
cgtaacagcgaatccaactgtaactgcttttggcctaagccacaataatttaccttcacaggctgcttcttattaataacgcattggctaaattacaagctgtttaacaatacaacaaggccaggtctttaaatattttaacatgtaattgctgaaggacagaaccttacctccgtaacccttcctccacaggaaaagccttttgcttaggaagttctactccaagccatcttccttatttaggtttgcaaaacagagatgacctgacgctactgggctttggagccccacaggaacacctgggcagtggctggacaaaaggggaccaggtcattcctaaagccacagtactgctgctggtgcacaaatgttt

SEQ ID NO: 10473 - DNA, 457 bp, Homo sapiens
  MAP TO AC010083.1; EXPRESSED IN LUNG, SIGNAL = 0.91; EXPRESSED IN BRAIN, SIGNAL = 1.1; EXPRESSED IN BT474, SIGNAL = 0.97; EXPRESSED IN FETAL LIVER, SIGNAL = 2.1; EXPRESSED IN HELA, SIGNAL = 0.98
taggcgtttgtttccgagagagttagcctattttccaaccagcgtattttctttctctctcagtgacaattatacttgaatttctgcctgtgtgtttttccagatcttaccagagctctgcaggatataacagcagcaaaaccaagacaaaaagccctccccaagaatgttccaaggagaaaagagattataacaaaagacaaaaccaacggagctctggaagatgcaccattaaaaggtttggaagacacaaagctggtacaggtggtacttaaagaggaaagtgaatctaagtttgaatcagaaagtaaagaagtaagtcccctgacacaagaaggggctccagaggatgtgccagatggagggcagataagcaaaggctttgggaaactatacaggaaggtcaaggagaaagtgagaagccccaaagagcctgagacccccactgagctctaca

SEQ ID NO: 10474 - DNA, 423 bp, Homo sapiens
  MAP TO AL023283.6; EXPRESSED IN BONE MARROW, SIGNAL = 1.1; EXPRESSED IN PLACENTA, SIGNAL = 1.4; EXPRESSED IN LUNG, SIGNAL = 1.2; EXPRESSED IN HELA, SIGNAL = 1.3; EXPRESSED IN HBL100, SIGNAL = 1.2; EXPRESSED IN FETAL LIVER, SIGNAL = 1.4; EXPRESSED IN BT474, SIGNAL = 1.2; EXPRESSED IN BRAIN, SIGNAL =   1
cacatgattatggaggctggtcagtctaaaatccatagggtagattaggaggctagaaatttaggcaggatttatatgttacaatcttgaggcaaaattcttttttctctaggaaacctccgatttttgctcttaagaccttccactgaccatgtgagtcccatctacattatgcagggtaatttgcttgacttcaggctaactgattatagatgtgtaaattacacatccacaaataccttcacagcaatacctgtgcaagtatttgaccaaacaaatgagcatgatagcctagccaagttgacacataaaattaatcatcacaatatgcaaactatctcaggtttctctactcatcattatctttactgctgctattcttgtttaaacaaccagtttctttcacctggacaaatgcaacag

SEQ ID NO: 10475 - DNA, 355 bp, Homo sapiens
  MAP TO AL080274.13; EXPRESSED IN HELA, SIGNAL =   2; EXPRESSED IN BRAIN, SIGNAL = 1.2
caaggcaattttccattaccaataaaaagcttctgggaaaagaggaaacagatttgtgttcaaatacattacaggttttgcaaaagcagaaacttcaacacaggaaaacttttaaagtaaatagactagcgcggcacttacctctctctaatggtgggataaagaccctgccagtttggggccgggataaggttgttgttactgagattctgctggtggtactgctggacgctggtgctgctggagttggctggctttttacgggggaatatatcagcagccatcttcttctttttagtcttcaaggtaattatttcataacaaactggtggcaacttgctgctgttgctactgc

SEQ ID NO: 10476 - DNA, 469 bp, Homo sapiens
  MAP TO AL035685.13; EXPRESSED IN FETAL LIVER, SIGNAL = 0.96; EXPRESSED IN ADULT LIVER, SIGNAL = 2.5; EXPRESSED IN BRAIN, SIGNAL = 1.1
tgggagtgaggattattctggatattaagtctggttcagggttctcctgggatccaactccagcccagagtgcatgcagtggtgagagagggtgtcttccctcagcacccgcagcttccagtccctcctgactgtcttataataacagtgttttcaatgcagaccttctgggttccctgccgcgaatcactcagccacccttccagggagaaaacaaaaagcagtgtttttccgtgtctattttaggctgctgcctacatctttgttcttcgtgaggaacacacactcccggggggcccttttctcagctgtggcccagcagtcgggtctggaccaccaggctgggttccgttatgggaaagaaccagcagatgtaatggaatcatgccaattaggccaggagctgcgtggggatgatgttatcattaagttccagaagacgtggaggtgagggggaaggtagctcatt

SEQ ID NO: 10477 - DNA, 409 bp, Homo sapiens; identical to SEQ ID NO: 9997
  MAP TO AP000246.1; EXPRESSED IN PLACENTA, SIGNAL = 0.75; EXPRESSED IN HBL100, SIGNAL = 1.2; EXPRESSED IN LUNG, SIGNAL = 0.83; EXPRESSED IN HELA, SIGNAL = 0.7; EXPRESSED IN BT474, SIGNAL = 0.65; EXPRESSED IN FETAL LIVER, SIGNAL = 0.69; EXPRESSED IN BRAIN, SIGNAL = 1.1

SEQ ID NO: 10478 - DNA, 417 bp, Homo sapiens
  MAP TO AP000217.1; EXPRESSED IN HELA, SIGNAL = 0.63; EXPRESSED IN BRAIN, SIGNAL = 0.84; EXPRESSED IN FETAL LIVER, SIGNAL = 0.6; EXPRESSED IN LUNG, SIGNAL = 0.88
ttgactgcaagaaatgtgccttgttaatctcaaaatgcagctgaacttaaagtggcattactctgactctcctaggcgcctgcttccctaacgatatggattatgaagaatgtggactattgcaaatgtaatcagctggtgacttcaattacagctgctgtaccagatgagaaatctctgctggagaaaatcaacatattctctggcactttgcatgcaggtactgatcttactcatgcttttttctcaaaccagtttgcaaggaccaccagaagcagtttacttttacctgacagggtgaacagtatacactcacagtgttgcctgaaggacatgccagttcttctgctctaagcaatgatattgtctgcagagatctagtcatcttgtcagttcacgcaacattacactggtcca

SEQ ID NO: 10479 - DNA, 409 bp, Homo sapiens
  MAP TO AF064862.1; EXPRESSED IN HBL100, SIGNAL = 0.94; EXPRESSED IN FETAL LIVER, SIGNAL = 1.1; EXPRESSED IN BRAIN, SIGNAL = 0.98; EXPRESSED IN BONE MARROW, SIGNAL = 0.91
tagggtgttcttttccctgcagggctgattaaacacgtaagtatcagatgaaggtttcaagccataaaggaaagggaaagtatcctctgcacaggagaagtcaaggaagttttcctggagggcgtgggcgagtcggcagtgctgggtgggtggcactgacctctacgcttgctctcagctgaccacactcctgcagacaaaggcagacatgattcttggctcttcacagatcccaccaccaggaggaatgccaaggctgggcccacagcgagaaaccgctatgccagccagtggaccctcaaccgaccccaccccaccatctcagcacacaccctcaccacagactggaggctgccaacacccagggctgcaggatcagtagacaaagagagcgacagttacagcgtca

SEQ ID NO: 10480 - DNA, 447 bp, Homo sapiens
  MAP TO AL050349.9; EXPRESSED IN HELA, SIGNAL = 1.4; EXPRESSED IN PLACENTA, SIGNAL = 1.4; EXPRESSED IN HBL100, SIGNAL = 1.1; EXPRESSED IN ADULT LIVER, SIGNAL = 1.6; EXPRESSED IN BT474, SIGNAL = 1.1; EXPRESSED IN BRAIN, SIGNAL = 1.3; EXPRESSED IN BONE MARROW, SIGNAL = 0.98; EXPRESSED IN LUNG, SIGNAL = 1.1
gacagaagaaacgagggtgcctggtgcccatgcagtcacatgatccccagattgtctggcttctggccttgacttacacaggagagaaacaaaattctatcattttgaagtcattgatattttgaattttctattacatgcaaccaaacttgaacaaccataaaagggaagaccagaaccaagtagcttgtggattggccaatgttgaggaaagatgcccatggcaggctgggggcccaccttccgggagtcccctggcacctttagctcgtcgggtcttcagcgttgctggagagtcaaaggtggccaccgtgcccccggtggcgctggtcatgggggcggcggggtttggtcctttgggtttgaatccctgtttgccagggctgtacactgtgggggtgggatatactggaggctccacacactggtttggcacctaggaggaca

SEQ ID NO: 10481 - DNA, 487 bp, Homo sapiens
  MAP TO AC009237.1; EXPRESSED IN PLACENTA, SIGNAL = 0.73; EXPRESSED IN BT474, SIGNAL = 0.62; EXPRESSED IN LUNG, SIGNAL = 0.95; EXPRESSED IN ADULT LIVER, SIGNAL = 0.74; EXPRESSED IN FETAL LIVER, SIGNAL = 0.58; EXPRESSED IN HELA, SIGNAL = 0.66; EXPRESSED IN BRAIN, SIGNAL = 0.75
tctgctccctctccccttacccctctgattggatctcggttgcttttctctagggctcaccttggtttctgtatgcatctcacacttgcaatttgggttttgtctactgtgtataaagtgactccttggatcaggaacccagacacactcatgtcagctcctaggactgagaatggacaggggatgcaggggcttagaggaaagagggctgccagagatattcagacctcagcttcctgacccaatctctgtcatttagcttgaatcctctcatctgcaagttgtttggcagtgtttgcaaagggtgtggcacacacttggagatgctccatgaaagatggctgctgttgttgctgctgctgtgatgtttatgatcttatgactgcaggcccccttgacggctggatggtgagagaggaaaagcacagctgtaccagaaagacaggcagaaagaggtcccaggcacagcagatcccttcagggtggt

SEQ ID NO: 10482 - DNA, 465 bp, Homo sapiens
  MAP TO AL049565.3; EXPRESSED IN HELA, SIGNAL = 0.8; EXPRESSED IN BT474, SIGNAL = 0.74; EXPRESSED IN BONE MARROW, SIGNAL = 0.75; EXPRESSED IN ADULT LIVER, SIGNAL = 0.93; EXPRESSED IN BRAIN, SIGNAL = 2.6; EXPRESSED IN PLACENTA, SIGNAL = 0.84; EXPRESSED IN FETAL LIVER, SIGNAL = 0.81; EXPRESSED IN LUNG, SIGNAL = 0.91; EXPRESSED IN HBL100, SIGNAL = 0.94
cataaggatgatatacagatggcacataaacagatgaaaagatactcaacatcactagccctcagggaaatgcaaattaagatcacaatgagatatcacgctcacctatcacagtactaaagtaaaaacagtgacaccaccatatcctgccaagaatgctgagaaactatcatttatattactggtgggaatgtaaaatgtctcagctactctagaagtagtttgtcagtatcatttaaaaaagtacagaatgccttatccaccatgatggtattacacgtagcaccatttttgatcaagaaagtcatttcacagcaaatgaagaatggtaatgagcctttgctcgtggaattcactagtcttgccatgtttcccatcatgctgaagaagcgggtttactacaatggtggaatggctttttgaagattgagctacagtaccaggtaggtgacaatgtcttccaga

SEQ ID NO: 10483 - DNA, 466 bp, Homo sapiens; identical to SEQ ID NO: 4027
  MAP TO AL035090.10; EXPRESSED IN BONE MARROW, SIGNAL = 0.76; EXPRESSED IN HELA, SIGNAL = 0.87; EXPRESSED IN ADULT LIVER, SIGNAL = 0.82; EXPRESSED IN BRAIN, SIGNAL = 0.85; EXPRESSED IN PLACENTA, SIGNAL = 0.75; EXPRESSED IN BT474, SIGNAL = 0.6; EXPRESSED IN LUNG, SIGNAL = 0.69; EXPRESSED IN FETAL LIVER, SIGNAL = 0.78

SEQ ID NO: 10484 - DNA, 484 bp, Homo sapiens
  MAP TO AL034420.16; EXPRESSED IN PLACENTA, SIGNAL = 0.72; EXPRESSED IN HBL100, SIGNAL =   1; EXPRESSED IN FETAL LIVER, SIGNAL = 1.1; EXPRESSED IN LUNG, SIGNAL = 0.75; EXPRESSED IN HELA, SIGNAL = 0.76; EXPRESSED IN BT474, SIGNAL = 0.78; EXPRESSED IN BONE MARROW, SIGNAL = 0.75; EXPRESSED IN ADULT LIVER, SIGNAL = 0.86; EXPRESSED IN BRAIN, SIGNAL = 0.81
tcctctacatcgatgctttcgatgacatcatcatggcagatagcgccggtgctgccgttctcacccacggtcattggctcagaacccgtaaagtcacagggattctctggcaggggcgtgttgggaatctgaccgcccatgtgcatccgaatatgttgctgcagcatcacggcattagtgaacttcttctggcagatggggcacgaatgctgcgtcttaatggatgtgttggttcggtgaaccccaaggtgtgtcttcaggttacctttggtagaaaaggctcggccacagatcttacactggaacggtctctccccggtgtgggtgcgataatgcatcttgagggagctctgacagcttaagactcggtggcaaatgagacattcgttgggatcagtggtggccttgtcaatgttctccaccaactgctgcaatttcagggtctctgaccctggctcaggggtcccactcccttggaagccac

SEQ ID NO: 10485 - DNA, 473 bp, Homo sapiens
  MAP TO AL022397.1; EXPRESSED IN BRAIN, SIGNAL = 1.5; EXPRESSED IN HELA, SIGNAL = 0.93
cactcattccctttggatgctttacttttaacacatttttcagctttctttaaatgatctgaatgccctaaatcgggaagatgtttacatttattgaaatgccccatattctcttgatctcttcccaaatatacatgtcgagatttagaatattcctcctttttacaattatctgtaccaacatatttcttttgctcatacaatttgtttattccgttggcattcttctgatttcctttcatttcttgatatcctacctcctttaaatcattcttaccattattggaaattcctactccaattgttttacatctgtcagtactttcaagttcttgacaaatagatccagcccttgtattctgtctgataactgatatcccaccattattcatgtagcctttcaaagaagaatcaccagtattaccagtgtcttgatattctgatagagtttgttgcctatcattaacatgttt

SEQ ID NO: 10486 - DNA, 455 bp, Homo sapiens
  MAP TO AC007368.11; EXPRESSED IN BRAIN, SIGNAL =  49
tccaaccctatcagactttggacagcaaagggatttctctagaacatttttattaatttatctcctaatattaaaacattgtgggatttcatccaatattttggtattttactttccttgaaaaatcaaacaacacgaagaacagtaagggttgtggaatcgtagctcctgagtcctaatcccgcaggccaagggtacagctggagtcatgatgcaacgaacacatctccattccatgaccttccgctcccttattaaccacaaagagagcgccgagcacacctgcccaggcactgcttttctgaatggtccctccccacagaacaaggagagatcactggggcagactatgagccttggaaggttcatcttgatttcttctgttgagaaatctcattttgtgcagtgcttctgtgttctgtgtgtctctgaaatccgatatgaactcgacctcg

SEQ ID NO: 10487 - DNA, 432 bp, Homo sapiens
  MAP TO AL122057.1; EXPRESSED IN FETAL LIVER, SIGNAL = 0.96; EXPRESSED IN LUNG, SIGNAL = 1.8; EXPRESSED IN BRAIN, SIGNAL = 1.1; EXPRESSED IN HBL100, SIGNAL = 1.6; EXPRESSED IN HELA, SIGNAL = 1.7
tggaaaacaataatcaagcatttctcaagctactagattaacatttactgaagttaatatcactttttaaacaggtatataataatctgaaaaatacattatttgacttccaaatccttggtaatagtgatccactatgttctaaaatgtcttaccctataacagtttgcacagttgaatcataatttaaaaaaaaaaacattttggaggtacctagtgtctgagcggcacagacgagatctcgatcgaaggcgagatggcggacgtgctagatcttcacgaggctgggggcgaagatttcgccatggatgaggatggggacgagagcattcacaaactgaaagaaaaagcgaagaaacagaagtgtcgcggctttggctccgaagaggggtcccgagcgcggatgcgtgaggattatgacagcgtggagca

SEQ ID NO: 10488 - DNA, 482 bp, Homo sapiens
  MAP TO AC009237.1; EXPRESSED IN BONE MARROW, SIGNAL = 0.73; EXPRESSED IN ADULT LIVER, SIGNAL = 0.82; EXPRESSED IN BRAIN, SIGNAL = 0.74; EXPRESSED IN PLACENTA, SIGNAL = 0.63; EXPRESSED IN LUNG, SIGNAL = 0.85; EXPRESSED IN FETAL LIVER, SIGNAL = 0.58
ggtggataaagtaggagggaccttaggtctggtagaattactaggagaggctataccctcccatcaaagcagcattagttatagaaatgtgtttttggaaacaaatcatggaagtaaagggggagatggatttcaggagagaggaaaaacacccatgcatgtgaatgttcaacatcccgataccccatggtcagtctgtacctggagtagctccacatctgctttatggcacattttcttcagctcctaatacattcctcttaaaatctccctcgcatgttccattctggctttgctgtcattgagttgctgaaaaatgtccttgccctgcttttgcagcctgtccaagtgatgttgctcttcttcatggagaaatgcaggcatcttctgatattcagctctgattacttctatccttaaactcacataatcctgcagtgacaattggtcaaaatagaaatgttgtatccatcttcttttga

SEQ ID NO: 10489 - DNA, 487 bp, Homo sapiens
  MAP TO AL049556.13; EXPRESSED IN BRAIN, SIGNAL = 0.74; EXPRESSED IN BONE MARROW, SIGNAL = 0.63; EXPRESSED IN ADULT LIVER, SIGNAL = 0.74; EXPRESSED IN LUNG, SIGNAL = 0.67
tggagaaacgttagaccctcccatggtctggtcaggttcctggggtctaagccttctgattgattagcatttattgaccaaagccctgggctatagccagtttccatggagctttgctggagtcctacaagaaatgagtcttaaacaggttaatcctttactcccaatctgccttctgaatccaaaaggtggtgtctatgcactatacctccatgtcagaaatatatactatttcaatcctgagagctatgagaccagtcactgacatcactttaagagacatgggaagatggttagtaatagttgactacccccaggaggcaggtcattctcacccgaagactgaggggaattccattcataataacaaccaggaggggcatattctccagtttgaaaagtatagccatgtcagcagcatctggagctgtagcccaggggttgaccaaatgttaactaaaatttgcagcattattctcaagccttc

SEQ ID NO: 10490 - DNA, 482 bp, Homo sapiens
  MAP TO AC007749.2; EXPRESSED IN BONE MARROW, SIGNAL =   1; EXPRESSED IN BRAIN, SIGNAL = 0.95
gcttctctgagcaccaacatcattatgcactgtcctttctattcccaagacttcctagttgctgcaagtcaagttcgacattcaactatttcctcggggtccttttttgggagaagcaaggctttgagttcactctttgacttcaagtgaagtccattttcctcttagacactaccccagtggttctcacactcaaggaagcaccaaagtccctggaggacccgtctaaatgaaggatgctaagccccacctcacagagattgatgcagtacgtcccaggaatctgcatgttaaaggagctctgcaggtgattctgatggaggtggcccttgcaggatgctttgagaaactatatgttctatccctcgaactctgcctgcagaacagcctgagatggctcttccatgctttgaccatttggccctccacagtagtccctgagctgcgtcttcttcggaccatgagcagaatgtgtgtcccct

SEQ ID NO: 10491 - DNA, 485 bp, Homo sapiens
  MAP TO AC008176.1; EXPRESSED IN BRAIN, SIGNAL = 0.74; EXPRESSED IN FETAL LIVER, SIGNAL = 0.58; EXPRESSED IN ADULT LIVER, SIGNAL = 0.94; EXPRESSED IN LUNG, SIGNAL = 0.61
gcaaaggaaaacactgaaaggtttaaaaaaggaagaaaaactagttgaagaccccaggactagaggaacaacatagtaacaggttgtcttataaccctcccaactgaaaaaaaaaaaaaaaaaaaaaaaaagtgagccagatctgatgtttcccaactcctaagcctgcaacagaaagcagcccaggtagattcattcttctcttgaatttaataggattgccatcaacaccaccatgtgaggccagaagaaacagcaagaaggttcaactggaaacctccctgtcaataagcagccaggggaagcattcaccatcctcagcagcagcaccacctgagacaccaacgaggccacaggcaccaacaaaggaaaaccacaccacaagcagctggtccagtaaatacactctgacacccataagtagggggatcccaccataacaagggatggttctggaggtattctgcatcggtcataggaaagga

SEQ ID NO: 10492 - DNA, 477 bp, Homo sapiens
  MAP TO AC006391.7; EXPRESSED IN BRAIN, SIGNAL = 0.91
ccactaacccaggtaattcagctgtgcagtaaagtttgtacaaaatagcactcaaatatgctgccatccccccaaccatgagttgacaaaatcactagcatccaccacatctcccactctcacttcctgccaaccaatgagcaggaggaagaaacagaataggaaaaagggaaagggaagggaagggaagggaaaggagaaacttgtcccaaattggactccattttggttcagggcaggtcaatgcccagccctctgctcttctggttcttggacttacagaaccactgtccccccagcttttgaagcaggtgctgatgggcctgacaagcctcagcaggaggcaccctgaatggctggtgatgtctgcccagctggagcagttgaagcagcagccaaaaccctggatgctcatcccttcccacatcagaacacagctgctctgggtcatcgcccagtgagcagggtccatcatct

SEQ ID NO: 10493 - DNA, 493 bp, Homo sapiens
  MAP TO AC009594.2; EXPRESSED IN BRAIN, SIGNAL = 0.93
cattccaagattgagtcaggaagaaatagaaagcttgaacagacaaataacaaataaaggaattgaaaatcatttaaatcctcccaataaagaaaagcaggaagatttcatggttgaattctaccacatattcaaataattactaccaatacttcttaaaccttcattaaatagagctagagggaatacttccaaaaatattttacaagaccagcatcaccctgatatatatgccacacaaggacactgcaagaaaagacaactataggccaatacctctgatgaacatcagtgcaaaaatcctccataaaatattagcaaaccaaattcaacaacacatcagaaagattatgcatcatgaccaagtaggacttttcgttggcattcaagtctggtttaacatatgcaaatcaatcaaagtgatacatcacattaacagaataaaagataaaaaccatatgatcatctcaactgacatggaaaaagcatttga

SEQ ID NO: 10494 - DNA, 403 bp, Homo sapiens
  MAP TO AL022098.1; EXPRESSED IN FETAL LIVER, SIGNAL =   1; EXPRESSED IN BRAIN, SIGNAL = 1.9; EXPRESSED IN BONE MARROW, SIGNAL = 1.2
ctgagcctcgttccaatagcagtgccctggaaccacagatttgggagctgaataggactgtcatctctttgctgtgtcacacactagtgatggaagcctgcagaattctcccacagatggacagtttagttatgaatcccacaccaacttctgctcatcaaacatcctcctttcatgatataggcagaaatttcagaagattatttgataatgccttgttttatttttttgacacaactgtcaaccacgccacttcaagatgtggtttgtccctcatggcatgaaacaggtctcaaacgacttgctatctggcaacaaaatggtacaccaacacattaaactccttcaacaggagaacatcttcatgacaaagacagtggttcgcaggttggacaccaatctt

SEQ ID NO: 10495 - DNA, 469 bp, Homo sapiens; identical to SEQ ID NO: 9989
  MAP TO AC008273.1; EXPRESSED IN HELA, SIGNAL = 1.7; EXPRESSED IN BRAIN, SIGNAL = 1.5; EXPRESSED IN ADULT LIVER, SIGNAL = 1.1

SEQ ID NO: 10496 - DNA, 453 bp, Homo sapiens
  MAP TO AL049780.2; EXPRESSED IN HELA, SIGNAL = 0.61; EXPRESSED IN PLACENTA, SIGNAL = 0.72; EXPRESSED IN FETAL LIVER, SIGNAL = 0.58; EXPRESSED IN BRAIN, SIGNAL = 0.71; EXPRESSED IN BT474, SIGNAL = 0.87; EXPRESSED IN HBL100, SIGNAL = 0.81
tgagagaaagtcctatgaccctgaaggagttatctctctttaatagaaaacctttggaccttgagaagtcatctgaatcactagcctctaaattatccagactgaagggttccgaaagagaaactcaaacaatggggatgatgagtcgttttaatgaacttccaaattcagattccagtaggaaagacagcaagttgtgcagtgtgttaacacaagatttttgtatgttatttaacaacaagcatgaaaaaacagagaatggtgtcatcccaacatcagattctgccacacaggataattcctttaataaaaatagtaaaacacattctaacagcaatacaacagagaactgtgtgatatcagaaactcctttggtattgccctataataattctaaagttaccggtaaagattcagatgttcttatcagagcctcagaacaacagataggaa

SEQ ID NO: 10497 - DNA, 474 bp, Homo sapiens
  MAP TO AF161800.1; EXPRESSED IN ADULT LIVER, SIGNAL = 0.79; EXPRESSED IN BRAIN, SIGNAL = 0.74
agtatcttaggcaaactttgatttgataattaatttgagtcttatagtcacaacatctgaaatggatacttcagaaagcagatattcattattatagcagaactgattatagctgggtttagcagggataatggtacccatcttgcctacttctcagttatcactgtaaaaatctagttacataaaaggtgtgagcatgcggtacaaataagatgtcatggtgatgattaaagtgtactttgttgttggacagtatgtttcacagtgctttcatcttcatgttccatttggttgttttcaggtgtcttcagaattcggcaaagtagatgggactgcagacgttaccattccctgtgactcttgctacgatcttacagacttcattgtgctgggcttagatgtcttcagagtcaccaggtacttggttgttcctagatagtgggcctgcctgatcaggatttggtatttttccca

SEQ ID NO: 10498 - DNA, 485 bp, Homo sapiens
  MAP TO AL023513.1; EXPRESSED IN HELA, SIGNAL = 1.1; EXPRESSED IN BRAIN, SIGNAL = 0.84
gagggtgggaggaaaagaaggaagaaaagagaaagagggagagagggaaggaggagaaaaaagaaaggaagggagggagggagaaaggagaagttggtttagaggccagccggacgagctttgggcaccgcccttaggagggccaccctcagagtctgacagcaggtgaaggtcctaaatctccccaaactaactggtgtcttttctcctcttccaagatgctcttcccgagggagatgctagccctttgggtccttacctcctgccctcaggagccccggagagaggcagtcctggcaaagagcaccctgaagagagagtggtaacagcgccccccagttcctcacagtcggcggaagtgctgggcgagctggtgctggatgggaccgcaccctctgcacatcacgacatcccagccctgtcaccgctgcttccagaggaggcccgccccaagcacgccttgccccccaagaagaaactgcctt

SEQ ID NO: 10499 - DNA, 1989 bp, Homo sapiens
  MAP TO AC004886.1; EXPRESSED IN BRAIN, SIGNAL = 1.5
tccagttcccagaatgaatgatgctttttgagtttgaaaaccctctcatcttgatgaacataatgaatgagactgcatgcaaatccacagggtaacctaattatatgcggaatgaaagcaatgttgaacatgcaggcgcatgcagtgattttgagcagaacaaattttttttaaaatgaaggaacaaaagcgcacttgtactccaaaatatgctgctataacatccaaagaaagagaaaaagtaacaaaactggaaaagaagccacattttcatcctgaaatgagatgaggaacaccataatgatatttcaaggaaaggtctgctgccacatcatactgacctgtagtaactctccctgaagtcagatctactgctgtgtcagttccttcagaataatcaaaagcattcttacttttatagaaaaaatgtccagcttctgctaaatttgtgtcagacatggaaggcttcattcccccaatccctctataaccatatggccctgatcgatcatactgatagtggtcatccctataaccaaaacgatcctcaggaagagtagttgcaggctgctgtgctgtgcagctccttccaaatggtaatttataaaccacatcacagcacacagctcttctccctgcggttaaatcaacgggtttttcatcttctattattttggtcatcacacttgaagtagactcatccattgttacgactgttctgtgagacttggttgtactgagatccactacttccccatcagtgattccctgggatacggtgctatcagtccatccatttgtgacaccaacaggaggcacagtgacaggttttgtaatagccaatgtcactgcatgtgctggagtacctagagataagtttattggtgcttcttccctagctataggaaagacctggtcacttggtatcctgtatgggggctcagcatgctttgatgttgtaagttggagtggtgttgtcattgcatgttctgcacccactaggctttctgtgcctgtagtgtaacttgcactagctgtgcatgtgacaaaggtcactgtctcagtggccagagatacaggagtcactattgatgatgtcacactaagatttataatagagggttggacagcactaatttgtttcccataaacttcatttgctgtgatctgccttttcacatccattgtagaagcagaaagatcaatacatttatcagttgttttaacttctacctttggtactgtacgcaaatcaattacatcaccaacaagttgcaattttccatcttctttatactgaggcttctctaaatgtatgttatctagagcaagaggctctggaggaattgttatggaaatgctgctgagaccaacactaggagctgtacttctggttgctgaaacctcagtcttggaaacttcagtagtgagaaactgtgtaactgatgtgggagctgcttgaaatgaagagggtgctgtgacaggggtagcagaaaatgtctgtaaagctccagagatgtagaaggtctgttctgaagaaattggaatttctacagctgtcacaggaggaactacagaaaacacaggttcaacagaaaccagatctttggagggtgatcccaagggccaactggtaattgcttgactagcagaagaatctgttggagtccctggttcagatggcaatgtaataactacataagtttctgtgagggatttggaaaatcttggtgaagacttgttggagtgtggggaaagtggggaggtaggggaaggcaatttataatctgctgaagtcactaaatttaaggtcatacttgaagttaaagataggcctgttggtttggggtgtatatctgttggtttttgtgtagttgttggaagctgaggaatcactggtttgggggcgattggaggtttgcttggctcaggcctgtgggtaaatacaagtccagatggaattgaagatggcttaggaggaacaggagg

SEQ ID NO: 10500 - DNA, 468 bp, Homo sapiens
  MAP TO AC007560.3; EXPRESSED IN HELA, SIGNAL = 0.61; EXPRESSED IN ADULT LIVER, SIGNAL = 1.1; EXPRESSED IN BRAIN, SIGNAL = 0.71; EXPRESSED IN BONE MARROW, SIGNAL = 0.84; EXPRESSED IN LUNG, SIGNAL = 0.61
cgtcatgatgaatttattgaaatgtagaaaattgtaaaataatgagctgctaaatgacttccttttggttttaccaatttatgtttgtggcttgtcagtcacactttacacacacaaatttgcagcagtaaaaaattctctcacttagggattaccttgtcaggctacatagaacatgatataatcgtttcatactttttattcccctatctaatcactcagaatatttcctaaaaacatgcagtttttcctacttaaaccttttctggtatttattttctttattttcagataatcttttcttgtatcaacttcaggggagagataagaagagaaaagataactagaaatggtcaaaatattgctgctaataataatactgtgtcatgtgaagctggcctgcaagtgggtgacagagtccctgaggttttcctgccagactccatactgaaaatcaaccgtgcatgg

SEQ ID NO: 10501 - DNA, 471 bp, Homo sapiens
  MAP TO AC007217.2; EXPRESSED IN HELA, SIGNAL = 0.64; EXPRESSED IN ADULT LIVER, SIGNAL = 0.8; EXPRESSED IN BRAIN, SIGNAL = 0.84; EXPRESSED IN PLACENTA, SIGNAL = 0.87; EXPRESSED IN BONE MARROW, SIGNAL = 0.65; EXPRESSED IN HBL100, SIGNAL = 0.69; EXPRESSED IN LUNG, SIGNAL = 0.71; EXPRESSED IN FETAL LIVER, SIGNAL = 0.62
tttcaattttccactgtattcccaaggccataaaccctggcatataataactgttcgatgcatattttgaatgattgaattaacaaactgaactatagtcaggttcacagtagggtttactagagtaaacccttgagaatttaatttatactgcagattcaggaaggtctcatctctgtcaattctgattcaggaggtctatgctggattgcgtacctctgcatttttaagcacatttcacaggtgcttgaacacagctatcttggacccactaaaagaataatcacaagctgtgcttcataccaagacagttagggtctgagcactgtcctggaaggcgatgattagggtgatgggagcagaggtcatcacgggagttctcctccattcgacctgctccatacctgctagcagggaaatgagtttccccataaagagatgtaaatctagggacacagattcaaaacaaaa

SEQ ID NO: 10502 - DNA, 440 bp, Homo sapiens
  MAP TO AL031675.1; EXPRESSED IN PLACENTA, SIGNAL = 1.2; EXPRESSED IN HBL100, SIGNAL = 0.92; EXPRESSED IN BRAIN, SIGNAL = 0.97; EXPRESSED IN BONE MARROW, SIGNAL = 1.1
tgtcttcccatccatcacaggccaaaacatgttcccaggcaacccgaagtcctcacccaataataactcaggagaagatagccagtaaaagggtggtatcccaatttcctcttcctccagccatacaaaggggcctgtgattatttattatgcagagacaaaggagcagagagtccctgatatgactctgcaaagcattcatttgccctatcatagtacattaagtgcctttacttcaaaattccctgccagcccctccacacccccttggtgggctcagccatggcagcagagattgggaggcaggtttctggggaaaactcaccctggggtctctctccagctgctgcttgtggtgtaggctgcgtcttctcttggcctttgcaaggccattgtgataaaagtggtacagaccttcagcaaagggaagctgtggagag

SEQ ID NO: 10503 - DNA, 483 bp, Homo sapiens
  MAP TO AL034378.2; EXPRESSED IN FETAL LIVER, SIGNAL = 1.6; EXPRESSED IN BT474, SIGNAL = 0.96; EXPRESSED IN HELA, SIGNAL = 4.9; EXPRESSED IN BRAIN, SIGNAL = 1.1; EXPRESSED IN BONE MARROW, SIGNAL = 0.93
atctgctagactgggggatgcagaaatgaaaggcctggccttttgttttcagggagttcacaatctggggaggaggcagacacacacgaacagcctgtgctgagatcctcaggaggggagggtggccgtgcccagataggatgggaggaagatgctctgggggaggcctcctggacagatcaggaggattctcagaggcttttgagctgaaacttgagggtgagttaggattccccccatacaaatggggtacagcagtgtatgggagagcggcagagagtaagagagcacctatttgttcactcagtggccatgtggggcctcaacttcgaagcaaattccgtcctgtctgccaggggtgaggaggtggtgcagaaacaaactatcaagatgtggaccctgttcttggaactggatggacaggaacctgctgtagggagcacagcccctctggagaccaacactgtgaagggaagttgctcc

SEQ ID NO: 10504 - DNA, 1919 bp, Homo sapiens
  MAP TO AC006213.1; EXPRESSED IN LUNG, SIGNAL = 1.1; EXPRESSED IN BRAIN, SIGNAL = 0.97
tgctcctatggtaattctgatttgcaactaaatatgagaactagtgactttgtctttgcctactcataaatcttacatcctcctgtgcactttcataattttctgagcccttcttgccttttaaaaattgcatggcagtactttagaattttctaaactcttttattactaacagatacactttttagtttatcactatttttaatatagatgtcctctccctacccctattattggaaaatagcatttgtttgttttttcattttcttccagactttaatttcacaactgaaagcaacaagttatcttcagaaaaaagaaattatgaagtaaatgcgtaccatcaggagacatggaaaagaaataaaaccttcaaccttatgaggtttattttcagaactgacccacagtacacaattgaatttgggagacaacagagacctaaagtgggatgttttagtcaaatgatattcaaaaaacataaatcccttcctctacataagagaaataacacaagagagaaatcatatgagtgtaaggaatataagaagggctttagaaaatatttgcaccttactgaacatctgagagaccatactggtgtgataccctatgaatgtaatgaatgtggaaaagcatttgtagttttccagcattttattagacatcgaaaaatccacactgatttgaaaccctatgaatgcaatggatgtgagaaggcctttaggttttattcacagcttattcagcatcagataattcatactggtatgaaaccctatgaatgtaagcaatgcgggaaggcttttagacgtcattctcaccttacagaacatcagaaaattcatgttggcttgaaaccctttgaatgtaaggaatgtggggaaacgtttagattatatcgacatatgtgtctgcatcagaaaattcatcatggtgtgaaaccctacaaatgtaaagaatgtggaaaggcttttggtcatcgttcaagtctttaccaacataagaaaattcattctggtgagaaaccatataaatgtgaacaatgtgaaaaggcctttgttcgcagctatctacttgttgaacatcaaagaagtcatactggtgagaaacctcatgaatgcatggaatgtggaaaggcttttagtaagggctcaagccttcttaaacataagagaattcatagtagtgagaaactctatgattgtaaggattgtggaaaggccttttgtagaggctctcaacttacacagcatcagagaattcatactggtgagaagccacatgaatgtaaagaatgtgggaagacttttaagcttcattcatatcttattcaacatcagataattcatactgatttgaagccatatgaatgtaagcaatgtgggaaagccttcagtcgtgttggagaccttaagacacatcaatcaattcatgctggggagaaaccctatgaatgtaaggaatgtggaaaaacctttagacttaattctcaactaatttatcatcagacaattcatactggtttgaaaccctatgtatgtaaagaatgtaagaaggcctttcgttctatctcaggtctttctcaacataagagaattcatactggtgaaaaaccctatgaatgtaaagaatgtgataaggcctttaatcgcagtgatcgacttactcaacatgagacaattcatactggtgtgaaaccacagaaatgcaaagaatgtggtaaggcctttagtcattgctatcaacttagtcaacatcaaagatttcaccatggtgagagactcttaatgtaatgagagggaaagcctttagccatggcacatttttactgttgtcactattatgatgctatagtgaagattaaactagttaatatagaatataaatacttggaaaggcatctggcacatcgtatt

SEQ ID NO: 10505 - DNA, 1943 bp, Homo sapiens
  MAP TO AC005004.1; EXPRESSED IN BONE MARROW, SIGNAL = 1.2; EXPRESSED IN HELA, SIGNAL = 1.6; EXPRESSED IN PLACENTA, SIGNAL = 1.4; EXPRESSED IN FETAL LIVER, SIGNAL = 0.92; EXPRESSED IN BT474, SIGNAL = 0.92; EXPRESSED IN BRAIN, SIGNAL =   1
ttccacagagtgtcctgttccttggcagcagtgatcacggtgctgaaatgcattttcatattttgttatcaaagagttatcaacttgcaggctgattttgctggacttgaaagcagcagaagcagaacacatgttttcctgggatacattttttcttacacgatgacagctagagatatcctgagattgaacgctgtgacattctatgacagagaccacttgaggaaagccagctgcttctctcttatttgagcgcagcctggaatgtagagcttttgttcctgaatcagccatttccttttttctctctaggcttactggtttgatgtttaaggtgggacagtttgaagaggcaccacaggtttggttacctggtggagagatgtcttttatttttgtctgaatgggaatggtttgtatatcagcaatgacatctgctctaccctctaatggagggtgatggctctgatgggcatctctgcctgttgctaaaggcatctctttgtttaaatgcagtagagagtcagttggcaaatttgcatgttcttgagaattaagggacacttgttgatttaaaacacattcactttctactttgtttacaaccagttcattggtacaagaaagttcattcatctcacaggctatgctctgttcatctaaaagtggaatatcatcatgtgaggtctgtataactttttctgactcaggtctgtaatcaaattctggggatggtagcaacagagcagtaccttgcttgggttttaatacctcacttacaggacttatttgatcctctggcattaaactcacaatggattttctttcaaacagaaaatcattacatgatgcttcatttaactgggtgttgccttccagatttctctggatgctgactaaggagttacagtctttagtgtaaaaagatttacttaatatattgggctctacaggggttgtctgtcctgcctcttcaatctgcatcaaggaggaaaaactgctttcttcagagtgtccaccaggatggctcatattagtaaaagtttctttatggtcctcagggtttgtcaagttaccttgaacgtgtacagtaattttcaaatcatttttatttaacattacttctgtggcttcagtaaaagaattgggcattaaagaactagagttccctgtatggagactgtcttgaatgcagttattgtggatattttcctttggagaaacaacaggctctttttcaccagaacaacgaccactaatctccttttctggttccctggcattaaaaagaaaaggtccacctctttcactcctaggaatcaaaagccgttcctcattttcttctctagaagccaagttcttcccttgatcatcccccctataaaaataagaactgtctgtcttttcagcagatctctttagcaaaccaccaccttcaaaaccacagttttctaaggatattgttctggattctggaccagacaagtctgatgtgaaacatgaaacttcagaattttctttcaaagggcttgtggctgtgggactatcatgtgtagaactgggttgttcattatggtggccatgaagctgttggtgattgtcatctgcttcacagaccaggtttggtttacacaactcttccttcccattgtccacattagaaatggcactgtttcctggtaatgacaaccaaggacaactttttaattcttcacattctttttctttaggagttgcttctgttaatacagggtccacaaaggttaaaggttctggggtaactaatgtgctggtttctgaaacctcatcactggtcatgattttgtctacttcttggaattcaccgcatccagctgagagatctttactcacattgccatttttgtgtccttcattattatccgtcttagtcccattgaccttcataccttgtacttcggcgg

SEQ ID NO: 10506 - DNA, 473 bp, Homo sapiens
  MAP TO AC008157.1; EXPRESSED IN BONE MARROW, SIGNAL = 0.74; EXPRESSED IN HELA, SIGNAL = 0.67; EXPRESSED IN ADULT LIVER, SIGNAL = 0.65; EXPRESSED IN BRAIN, SIGNAL = 0.69
  unsure 89
  unsure 101
  unsure 117
  unsure 126
  unsure 138
  unsure 156
  unsure 168
  unsure 175
  unsure 186
  unsure 208
  unsure 216
  unsure 233
gaactgtatgtagcaaaccccctatgtgagactcacttgtcctgagcatatgggctctattaattgattaaaagtgaattgatattttngctataaatctngatataaatgctttcnttttcctancgtagccctagnttggatcttgtaaaatgnattaatgctagntagaggnaaattgaacanaaggaaagtagaggaaaatganacaaagtnggggaagagagagaagntaaaggaaataattgctgggaacacacgatgtttacctattagaatgattttttttctttctacatagagaaaagaaagtgaaggaaatcgtagaagaaaaggtcacagggagctacctgaaatgaggaaaatgaactggaatagattctcaggggattgtagtagtcccagccctgatattagccagctgtgggacttttagtaatgtctttagcatctgcactttaatttatcctttg

SEQ ID NO: 10507 - DNA, 456 bp, Homo sapiens
  MAP TO AC007182.3; EXPRESSED IN BRAIN, SIGNAL = 2.2; EXPRESSED IN BT474, SIGNAL = 0.6; EXPRESSED IN PLACENTA, SIGNAL =  37
gacaaatatcagcagcttcacgtggttcagcctcatatctatgtgtatacatgcacacccacccatgtgcttacgtaaacgcgcccatacacacctacaaacatatatacacttgtgcacacattcacacgtgcaggaaaattctctggtgcccttctccatggctgtgctagtgaacaactaatctggcccctcctgtgtccctccgcaccccacccaccttgcctccttcctagacactaacctccggtgctgatccccacccctacaggagagcgaagacctggagaaacagaacgcggctctacgcaaggagatcaagcagctcacagaggaactgaagtacttcacgtcggtgctgaacagccacgagcccctgtgctcggtgctggccgccagcacgccctcgccccccgaggtggtgtacagcgcccacgcattccaccaacctcatgt

SEQ ID NO: 10508 - DNA, 493 bp, Homo sapiens; identical to SEQ ID NO: 3442
  MAP TO AP000055.1; EXPRESSED IN LUNG, SIGNAL = 0.72; EXPRESSED IN ADULT LIVER, SIGNAL = 0.66; EXPRESSED IN BRAIN, SIGNAL = 0.8; EXPRESSED IN FETAL LIVER, SIGNAL = 0.62

SEQ ID NO: 10509 - DNA, 375 bp, Homo sapiens
  MAP TO AC007163.2; EXPRESSED IN BT474, SIGNAL = 1.5; EXPRESSED IN FETAL LIVER, SIGNAL = 1.1; EXPRESSED IN LUNG, SIGNAL = 1.1; EXPRESSED IN BRAIN, SIGNAL =   1; EXPRESSED IN HBL100, SIGNAL = 1.4; EXPRESSED IN HELA, SIGNAL = 2.4
caactgaaaggtgccctgagctccagtctcttgtatttctgggcctcagtcaggcactgaagaagcatatgcaaaagaatgaggcaaagttccagtataacatcctgttactattaactcaatctcatcctggtgaagtaagttcctcaaattagtgaaaatctctatgccagaagcttagccataaaaagacggtttaaacaaaaacttacatccttaaatggatcaccacgggacatctgttcttgaagttctttctggagctccttacgagctccgatggtttgctgattccgaacatattctgaaagctctttcaagcctgcctcagtaaaatattttgtgaagtgttcaacactttgcttattggcagga

SEQ ID NO: 10510 - DNA, 432 bp, Homo sapiens
  MAP TO AC008174.1; EXPRESSED IN BRAIN, SIGNAL = 2.5
tgtcatggcagctgaataaagtttgtgaaatacagtcctaacaatattatctgttactatggttatatctgcttccgaaagtaaaggatccatcattttatccataaattgaacagatgtttggggagttggctcatcaacattgtgaggcatgccattaaaattagagtgggagagagaaaggacatttaattgattgattaaagtactttgaaaaatttcattcaaaatatttcttataatgggagcaattggagatatatgtggttctttgagttttacttcaattttgtttaaggttttttcgagagcccattgtttaagagaacgtgttttcacttcttctctttgtggggatctctcatcaataatttttttcgctgtatatgcatcatcttctagaaatgaatctgattcagctcctccaggaag

SEQ ID NO: 10511 - DNA, 441 bp, Homo sapiens
  MAP TO AP000072.1; EXPRESSED IN BRAIN, SIGNAL = 1.4; EXPRESSED IN BONE MARROW, SIGNAL = 1.1; EXPRESSED IN BT474, SIGNAL = 1.1
  unsure 311
cctcagggtgcaaagaagagaaatgcaataaaatgataatgaggaggcccaggacccgcacaagggcaccactgcaagtagatacttcgaggaaacttcctgatgcttgtccagcccttggtggtggtgcccggcagcccgtattcttatcccaaagcaatatgtgtggagacagcccagcaaaagctgagagattgtgtgtccagagacatgttccaggaatggaaacagagagtggaggagtttcttctctcctcccgtctcccgctagagtgggcgggccctttggtgtcatcgcactgtcttcatancctactgcgctccaggcctgtggccccatggcggtcttggaccacgagtgagccatgagccctcccaagccccaaggccaggtctgaagcgggctgatgtgtgcccctggctttgttgcccagatcctca

SEQ ID NO: 10512 - DNA, 477 bp, Homo sapiens
  MAP TO AC011193.1; EXPRESSED IN LUNG, SIGNAL = 0.89; EXPRESSED IN BRAIN, SIGNAL = 0.94
  unsure 58
  unsure 83
  unsure 176
  unsure 214
  unsure 386
  unsure 396
ccaagcttagtcagctgtaaagtagaagggtcaggatttacacctaagctgtctgacntccagagttttgtcctctgcccctntatatgaaatgtgtcatcctcttgttgattgatgtaggccagcctgccaatcagcccgctgtcctgagcaccgatggtatgctctgtgcaggntctctgcgcttgaaggttggggagctctcaccccgagngcatcctctgctcccctgggctcacaatgggcagatcactctggatccaacaggacgtgggtgtcagcttgaatggagatgaagacagagacaactctgtgttccacatgcttcctccacgtgccctccaaatggcacagaccgcatggcccaaactctcctccagccccanatatctaccnctggctccagccaaatgaggcctgaataattcatggccaatgcgcatggcccagtcgtggagcagctttctggtggctaaa

SEQ ID NO: 10513 - DNA, 404 bp, Homo sapiens
  MAP TO AC007653.1; EXPRESSED IN ADULT LIVER, SIGNAL = 1.9; EXPRESSED IN BRAIN, SIGNAL =   1; EXPRESSED IN HBL100, SIGNAL = 2.9
  unsure 249
  unsure 252
  unsure 254
  unsure 372
tgttgatgacaacatcaaatggtagctgttcattgacgagtgaaagtcatttgacaaaactgtccgtgaagattttttagtaattcacctggccatggtctccatccatgagcactgcataaatttttagccatcttcctttctctgcagagaaatacaggaatgctctgtcattgtgccttgtactgggttgttagaaagttctgattttgtcatcaggactattcactatggaaccgcctcggggcngancncttggcgaacggagaccgcagcgaggaagccgtggaggcctatacgcgagcactggagattcagccaggattcatccggtccagatacaacctaggaataagctgcatcaacctgggncgcctacaggtgaagtacagcaacaggccaag

SEQ ID NO: 10514 - DNA, 445 bp, Homo sapiens
  MAP TO AC007832.1; EXPRESSED IN BRAIN, SIGNAL = 0.69; EXPRESSED IN ADULT LIVER, SIGNAL = 0.79; EXPRESSED IN BT474, SIGNAL = 4.4
  unsure 380
cttcaaaaccctcattgtgcaattcttttggtttctttctaggcttcctttattctcgtctggatcatttggtaggatgttgctataattacgtttggtgatcctaccttcccctgaattgcctgccctttcatgctcttgatcaaacacagctctccccctcatcttattctcctctgtcttcctcttcctccttcttttattcctccccttcatctttattctcttcttcctcttcttcctagtcctcctctttttcctggtgctcttactcttgcagatttggagatttgttttcttgctgaaaattagccatgataaaacaccggcacaggtggttcttgagatacgtctgcagccttctagtcttcaagagcatncccacatttggggtcatcctttctcttccccaacctctccctatctgccttgtgtagaatgtgtt

SEQ ID NO: 10515 - DNA, 469 bp, Homo sapiens
  MAP TO AC009594.2; EXPRESSED IN BRAIN, SIGNAL = 1.3
  unsure 153
gctttgaatgtgctgctgtgtagtcctaagatatattgggtttctcaatgtctcaattttcataatcaataaaactagtacaatatccatactgttttgcttactgagagtattctaagaatcaaacacaatatcggaagcaaatttgtattngaaaatttgtagatgtacagatttacagattttgatgtatcaaacatttcaatttacctgaatcatgtccttttctatactacccagcaggcaggtgacctagaacacatggagacaagaaattactctgccatgactgaattctttctggtggggctttcccaatatccagagctccagctttttctgttcctgctctgcctcatcatgtacatgataatcctcctgggaaatagcctcctcattatcatcaccatcttggattctcgcctccatactcccatgtatttctttcttggaaacctctcattcttgg

SEQ ID NO: 10516 - DNA, 458 bp, Homo sapiens
  MAP TO AC009705.2; EXPRESSED IN BONE MARROW, SIGNAL = 1.2; EXPRESSED IN BRAIN, SIGNAL =   1; EXPRESSED IN FETAL LIVER, SIGNAL = 0.99; EXPRESSED IN ADULT LIVER, SIGNAL = 0.95; EXPRESSED IN HELA, SIGNAL = 0.91
  unsure 169
cgtcatttctctttgactctttctttcttccttccttaggttccggattcatacaggtatgaatctacttccccatctttgccaaccctggcatcgtgcccccttgattccttggcttttcacaggctagatgcttaatggactctggaagcctttatctctaggacgncctttatctgtaggactgggcttttttgtttgtttgagacagggtctcactccgatcacccaggctggagtgtagacctggggtttctaaacactcttcaccttgtgctcagctccttgtatgataccgaccggatcctatccatggacaataacaatcttgaatgtgttcacaatgcctgggggaataagtcccaatccggccaggaaatgctgatctccttccgacgggatctgcttgtctcacctcagcgccagttgcttccctttacaatctctttgctggccag

SEQ ID NO: 10517 - DNA, 461 bp, Homo sapiens
  MAP TO AC004624.6; EXPRESSED IN LUNG, SIGNAL = 0.62; EXPRESSED IN HELA, SIGNAL = 0.77; EXPRESSED IN BRAIN, SIGNAL = 0.96; EXPRESSED IN BT474, SIGNAL = 1.1; EXPRESSED IN BONE MARROW, SIGNAL = 0.7; EXPRESSED IN FETAL LIVER, SIGNAL =   2
gtagcccctactccactgggccaggctcggaggtgcaggggtgaacctggcccagcctctgtctccttcatttccagccgcatcagcaaaaaggacctgcagcacctacctcattcgtttgcttgctgcaaaccctgccctctcctgccccttgcctccgtggccagtcgtctgtttccctccagccactcagtcaggtggcctgtgaccaggggaccccagtgctcccacccatcctgttaatccgcaggtatctttgctctagatttacagactggaaatggaagagaaccagctgaagaatgaaatgcaagacgccaaggatcagaacgagctgttagaattcagagtgctagaactcgaagtaagagactctatctgttgtaaactctcaaacggagcagacattctctttgaacccaaactgaaattcatgtaaagctctcagatgttttcaagca

SEQ ID NO: 10518 - DNA, 376 bp, Homo sapiens
  MAP TO L05367.1; EXPRESSED IN BRAIN, SIGNAL = 1.6
gccttctcattgctactttgcatttttcttcactaacctatctgtttgttagtaagtttttcagttccttcttcatcttttctttcccttgtagctgtgagcactccagtagattgcatcactaggttgggtcctgtgagctgttttgttcttttccaagtgtctgattcagcgggccatagaccgcttgccagaaaatcgccattgcttctaggctgacgcttgcctacttgttttgatcgtctgagagaagagactttgtttgccaaaaccacagttgatagaaatagaaaggtacagataagaaaaagcactgcaattataattaagcaaattagcatagccatgttgttgttgttttccgcacagacatcct

SEQ ID NO: 10519 - DNA, 480 bp, Homo sapiens
  MAP TO AC009301.1; EXPRESSED IN FETAL LIVER, SIGNAL = 0.57; EXPRESSED IN HELA, SIGNAL = 0.97; EXPRESSED IN ADULT LIVER, SIGNAL = 0.98; EXPRESSED IN BRAIN, SIGNAL = 0.74; EXPRESSED IN BT474, SIGNAL = 2.3; EXPRESSED IN HBL100, SIGNAL = 0.81
caaatatctggagcccatgccctgcaggagggcattgatgggtgacttgaagcccacgaggcctcatgtggggccttccgaagcctcagaagcattagggaagcctcaggccctaacactggatgtgacaggcctgccttccctatccaagcagagtctgggtagtacgaggtgcagccccggccagttcaaatcacacaggcagcctaacagagcaccagggacggctgcaacccttaccagcagccgcccagccttggctgcctgtgctgctgcccacccgcgctgagcccctgggcacttactttatatacgtgttggcatttccatcagggaaaacgtaggggtgcttcttccggaagacgtgccccactcggctgcaggggacgatctctaggctgcccccgcacatccacactcggaaggagatttctgcaagacagtcacgcccctcctatgacctcttatcactgctgctgc

SEQ ID NO: 10520 - DNA, 410 bp, Homo sapiens
  MAP TO AF064862.1; EXPRESSED IN BRAIN, SIGNAL = 1.1
ttggagaaagcctgttggtccataaagtctctattaacaggggacaagttgccagtggcctgtgagccagacttggactgagctcctggcctcgctggaggaagcagtccgagggaaatgcgtgaagatgctgatggcctccccatgtgtcctgtgagctgacctccatgtgccttctcccccagagccccagttctcaaaggagcaggagctgtttgccagcatcaacaccacacgcgtgaggctgaacctcattggctggaatgatggcggctgccccatcacctccttcacactagagtacaggccctttgggaccacagtttggaccacagctcagaggacctctctctccaagtcctacatcctgtatgacctgcaggaagccacctggtatgagctgcagatgc

SEQ ID NO: 10521 - DNA, 352 bp, Homo sapiens
  MAP TO AL109806.7; EXPRESSED IN LUNG, SIGNAL =   1; EXPRESSED IN BRAIN, SIGNAL =  14; EXPRESSED IN HELA, SIGNAL = 2.5
caactgttgcagtattgggcttcccaaaccaaaccatgcttttttaaaaaaaataaaaagtcttgcaaatctagccaaaacaggaaagggcagacagccacagcccattgattgaatctcctatctattttcttccttcccttctttagaatcctggccctcttatacctcagccttcgagtcaacagactcctgagaggaaaccccgcttatctgaacactgccggctctactttggggcgctcttcaaagccatcagcgcatttcacggcagcctcagcagcagccagcccgcggagatcatcactcagagcaagctggtcatcatggtgggacagaagctggtggacac

SEQ ID NO: 10522 - DNA, 382 bp, Homo sapiens
  MAP TO AL021877.1; EXPRESSED IN BT474, SIGNAL = 0.92; EXPRESSED IN LUNG, SIGNAL = 0.95; EXPRESSED IN BRAIN, SIGNAL =   1; EXPRESSED IN PLACENTA, SIGNAL = 0.94; EXPRESSED IN ADULT LIVER, SIGNAL = 1.3
aatgtcttccaccagatgccccagatcatcactcttaagtttagctttccacaaagtcctaggacatggacacaatgcagccaagttctttgctatggtgtaacaagggagacctttgtttcagttcccaatgagttccccattttcatctaaggcctcatcagcatggcttttactgtccatatttctattggattttggtcacgagcacttaatcattctctaacaagtttcaaacattccttcgtcttcctgtcttcttctgagccctccaaattcttccaattgctgctcattacccagttccaaagccacttccacatcttcaggtatctttataacaaaactgcactccttcataccaattttctgttttaggcca

SEQ ID NO: 10523 - DNA, 446 bp, Homo sapiens
  MAP TO AC006362.2; EXPRESSED IN BRAIN, SIGNAL = 0.9
tgagatagggtgggatggtgaaaaagctgtggattagaaatcaggagacccaatttctaactggttgtaaggctctagcagatcatttctccagcctgggtttcagatgcatctgttgataaatgagggatttggggtaggtcagtggtttgtaaccaggggatgtttcagaatgctgctgatctaagctgggctggcctcccagctatagttggggctcaggtcttctccacccagctcccagctttcagttttctggggccagcagacgaccctgagtatatccttctcttagcagtggtgaaagtggaaacacgcagtacttctggaggcctgggggagctgaggctcactgtcccttctgccctcttcccactggccaagacaagtcacatcgccaatctggacagacctgggacggggatggatgctctgcctctcttggt

SEQ ID NO: 10524 - DNA, 1976 bp, Homo sapiens
  MAP TO AC004925.1; EXPRESSED IN BRAIN, SIGNAL = 2.7; EXPRESSED IN BONE MARROW, SIGNAL = 1.1; EXPRESSED IN HELA, SIGNAL = 1.8
ctccatgaccctcaaaccactacagtgtgttttctttttttatgcttacaatgattcagctgacgtcctgagcccagttacccatgcctcattctggaaaactgttctctctctctctctcatttttatttatccatatttttttttacagttttgccaatctgcatttatttcctagtgctttgatctttcgggggacaccgggaataaatgtcttctatgttcccccacaggtcgcttctctgggagtcaccactttcaccttatgtgctctgtgcatagaccgcttccgtgctgccaccaacgtacagatgtactacgaaatgatcgaaaactgttcctcaacaactgccaaacttgctgttatatgggtgggagctctattgttagcacttccagaagttgttctccgccagctgagcaaggaggatttggggtttagtggccgagctccggcagaaaggtgcattattaagatctctcctgatttaccagacaccatctatgttctagccctcacctacgacagtgcgagactgtggtggtattttggctgttacttttgtttgcccacgcttttcaccatcacctgctctctagtgactgcgaggaaaatccgcaaagcagagaaagcctgtacccgagggaataaacggcagattcaactagagagtcagatgaactgtacagtagtggcactgaccattttatatggattttgcattattcctgaaaatatctgcaacattgttactgcctacatggctacaggggtttcacagcagacaatggacctccttaatatcatcagccagttccttttgttctttaagtcctgtgtcaccccagtcctccttttctgtctctgcaaacccttcagtcgggccttcatggagtgctgctgctgttgctgtgaggaatgcattcagaagtcttcaacggtgaccagtgatgacaatgacaacgagtacaccacggaactcgaactctcgcctttcagtaccatacgccgtgaaatgtccacttttgcttctgtcggaactcattgctgaaggacagtacttggttgggtcagatttatttgtttgattttcatatcccgtgaaagtttttaattcatatttttccttatagggaaaaatgcaaaaaagaaacaataaagaaagaaatattaactactgtagaactgattttacaaattaatatttgtgctttgaaaaaaagtttctatttagttatttaagaagaatgagaaggccaatagttttagattattttatctggtatggtgctaatattttatttgaaaaaagttactgcaacttaacttaaaattgctaacgttttttcttcttttaaaaatacaattattgtatattgattatagcaatgtgattttgtaggttattttatatttgagttgtgattgaaagtatgttgtatatggtattgtgagatgatttgtacttggaagcattcacaaagtagcaccaaataaattacactttattctttaatgtcattgtcaatctacttttaaccaatattcaataaatcttctaattgccttaaagatacaattactggttctatgcacaatttaaaaccggccttactgttttataacgtattttcttttaaggcaggtaatcattatgttataaagaagtttttctaatagcagtattttatatgcatgattcataaaactatgttgtatgttaaaacaaagctgtatttttaatattcaggtatagatgtcaaattacttctgaatacttataaaatatgaataaatagcagagtaggaagaaagtttcttttttaaaaaattcacctctgaactagcacatagagctacagattttcccttggggaattatgggcagaatcaagaattttaaaatgcagttgtcatctgatttcctctgaacactgacctttgaagctttgtgaatcctacgtaaagcactctg

SEQ ID NO: 10525 - DNA, 459 bp, Homo sapiens
  MAP TO AC009666.2; EXPRESSED IN FETAL LIVER, SIGNAL = 2.1; EXPRESSED IN BONE MARROW, SIGNAL = 0.98; EXPRESSED IN BRAIN, SIGNAL = 0.93
  unsure 31
  unsure 232
  unsure 433
gactctccaactgctcatcttgatggatcanaagccaagagaagtgaagtattttcacagcgccaaggcttcatgttacaaatcttagtgtaaggtgttagtccagactgacagcgggcttgtcagaggcagccacgagagaattgacaggatcagggcaggtggcaaagtaactgtgcccagggccacagcacacggagggtgggaggtaaagggcgtcaggagcacaggngaggcccctccacacacggtgacacacagcaggggtgggagtggcatgtggcatcaggtatatggagaggtccccacactcagggtgatgcacagcagggcaggggtgagggggacacgtggcatcgacggatggggaggcagcatcattcgcattggccaaaaggtggaagcaaaccaagtaaccacagatggatgaatnaaagaaaatgtggtatttacacacgg

SEQ ID NO: 10526 - DNA, 483 bp, Homo sapiens
  MAP TO AC007326.22; EXPRESSED IN FETAL LIVER, SIGNAL = 0.84; EXPRESSED IN ADULT LIVER, SIGNAL = 0.7; EXPRESSED IN BRAIN, SIGNAL = 1.1; EXPRESSED IN PLACENTA, SIGNAL = 0.8; EXPRESSED IN LUNG, SIGNAL = 0.76; EXPRESSED IN HELA, SIGNAL = 1.2; EXPRESSED IN BT474, SIGNAL = 1.1; EXPRESSED IN HBL100, SIGNAL = 0.72
aaaacaagcaggtaggaagggtaatatcattccacttacagtatggaatgattgggccattattaaagcagctttagaaccatttcaaacagaagaagatagcgtttcagtttctgatgcccctggaagctgtttaatagattgtaatgaaaagacaaggaaaaaatcccagaaagaaacggaaagtttacattgcgaatatgtagcagagccggtaatggctcagtcaacgcaaaatgttgactataatcaattacaggaggtgatatatcctgaaacgttaaaattagaaggaaaaggtccagaattagtggggccatcagagtctaaaccacgagggacaagtcctcttccagcaggtcaggtgcccgtaacattacaacctcaaaagcaggttaaagaaaataagacccaaccgccagtagcctatcaatactggcctccggctgaacttcagtatcggccacccccagaaagtcagta

SEQ ID NO: 10527 - DNA, 414 bp, Homo sapiens
  MAP TO AF165124.1; EXPRESSED IN BT474, SIGNAL =   1; EXPRESSED IN BRAIN, SIGNAL = 0.99
tgcttcataaaggggtcattgttttttttttcctacagcttctatctgagatatctagcaatatgtgaatttctaactctagctctcaagcttcacttgaaaataatatttcttcattttgaatgtattgacacctctcccactcataggcctgaatgctatttaaacactacttttacaacatataaaaaagtataatttaaatcttccttgctcttgaactacactgatgttttatctattaaagtagacatgtttatgtgctcctatctatagcacaacgcaaaagactttaacaaacctcctatatcaggccgaagtttattgtcatatccttccagcaggttgtttaagatgacagtgacatcaccctcaggaacttttggagtcaagacccatgttttgttagaagca

SEQ ID NO: 10528 - DNA, 449 bp, Homo sapiens
  MAP TO AC009411.1; EXPRESSED IN BRAIN, SIGNAL = 0.93; EXPRESSED IN BT474, SIGNAL = 0.95; EXPRESSED IN FETAL LIVER, SIGNAL = 0.9
ttgctcattctctcttgcctctccaaccttttctttctcctttgtagtgtggaatccactgatccaactgcccatgcccccacctaccaagctgtttgctctgcctgaaaacgccttgcatgggtgtttttaggcagatcgtataacatattatatgtatccaataaagttatgtgcatccaataaaaaaagaagttattttcttaacaatccaagaaactaagaggccgtctattctgtagagggctccaaaacaatggcctaggggaggtcactacatgggcatgtccacacccagcagaggcctgggatggctggtgatcacctctggatgggagagtctcacaagcatggtcgccttccaacccacaacctttctctgaatccggatgtccacccataggaccctcatgagtagagtctctagtgctctggtcaggtgctgtgag

SEQ ID NO: 10529 - DNA, 385 bp, Homo sapiens
  MAP TO AL035451.5; EXPRESSED IN BRAIN, SIGNAL = 0.96
atcccatatctctccgaggcttcattcattttttgaaactcctttttctttttctttgtctgtgtaggttgattagaataaccagtcttcaagcaccaaaattctttcctctgctttgtctagtctgttgttaaggcattcaactgtattttgaaattcctatagtgaattttccaatttcagaagttcagtttggttatttattaatatgactgcttcatctgtcaagtcttggatcgtttttctggcttccttggattgaatttcaaggatgcttactgagcatccttgacatccagtttctgaattctttgtctcatttcagacatttcaattgaaaagagattcttagaaaatagttgtgtttgtatgaatgtgtatctct

SEQ ID NO: 10530 - DNA, 465 bp, Homo sapiens
  MAP TO AC005037.2; EXPRESSED IN ADULT LIVER, SIGNAL = 0.69; EXPRESSED IN BRAIN, SIGNAL = 1.1; EXPRESSED IN BT474, SIGNAL = 1.4; EXPRESSED IN HBL100, SIGNAL = 1.7; EXPRESSED IN FETAL LIVER, SIGNAL = 0.89; EXPRESSED IN HELA, SIGNAL =   1
gaggaatcatgaagctcagtccagtaaggaagacttctgctctccttactccataagaataaaaaatgtttcctttttcaaatgcaatttaactgccaaatttcagcaacattattttaaaattattatataaaaatggaatcatgccctccccaaccctaaagcagttaaaactttactggaaagacatcctaaagtttcaaagtatttgcagggaaaatatcaaatatgaaagaggcttctcaccaagccctttagccaaccagttgttgacgccctggggcgcagcatcataggctgtatgaggagagtagataccgactctgttctccagagcccggatcaccaggcgctccttccatgtgttccaggttatgcgcttcatgggtcggaagataggcggatggtaggagagaatgaggtctgccttcttttgcagcacctcctccatcacttcctcagtca

SEQ ID NO: 10531 - DNA, 464 bp, Homo sapiens; identical to SEQ ID NO: 10218
  MAP TO AP000199.1; EXPRESSED IN BRAIN, SIGNAL = 1.4

SEQ ID NO: 10532 - DNA, 470 bp, Homo sapiens
  MAP TO AC011310.2; EXPRESSED IN BRAIN, SIGNAL = 0.92
ttcttcagaactccagcatccttatcattgtcatcattgtcagaagccacatccgagatataaaagtggggtgtgtgtgtgaatgtctgtgtatgtgtctgtgtgtgtagctgtatctgtggcgatgcatgtttgctggtgataaggaacatatttattgtccaatttgaggtgaataagctggaaaaaagttctagatgaatttagccaccagtgaacaacagatggaggagcatgtctctattataggtcatttcagcaaatagctggatctactctgtaggtctgtgttcccttttgggctgcctgtctattctttctggtttcagcgttcttggtgctctcggtaattctgttgccaaggatgccactgagaagagttaccttctccagggatttaagaaccacagtaagaaaacctaactctataattccattctttgttactgagggcttgaaatgagatgcat

SEQ ID NO: 10533 - DNA, 479 bp, Homo sapiens
  MAP TO AL117374.5; EXPRESSED IN ADULT LIVER, SIGNAL = 1.1; EXPRESSED IN BRAIN, SIGNAL = 0.95
gacatcacttctcaagggggcatgtgcctggtctagaccaagagatcagggtctggctgcagcgcaggctgcacgtgaaggtgtcaggcctttaaaaggtggccggtgcttatcaaggacaaagaggacagagaactaagctgcagcccagaagaagagctccaaaagtcagaatggggtggtttctgaaggtctggctgagaagcaaggtggaggggtggtggtaagaaaggaagagagccttgtgtctcccaccctaggtagcatgtcatgttgtgcaccctggtcagcgtcaccctgctgacttgggtgaccaacgtgtcccagttttccaagaactttcccagtttctgcactggaagccctgaatcctggcaaaccacgacagctggtcaccccagcaccagcccaggctctggcgggggcttcactgagctcctggagaaggaccttaaaaatcctctatccaccctggacac

SEQ ID NO: 10534 - DNA, 449 bp, Homo sapiens
  MAP TO AL121575.6; EXPRESSED IN BRAIN, SIGNAL = 1.1
taaaaaggcgcctcccttagccaagtattacaatgtaacacagggcaagtcaccttaatcagctctgaaactatcaatacctgtctggcctgtcactgtatcgatttcaaaggatacaatgaacttgacagcagtttgagaatcactaaacttccccgcatacaacctcggtgtcaaaacaagggaataaaaagggaggcgtgagaggaggttgcccaggccagtttccttggtcggctgcccccgcgtctccccgtccccaagccgtagtcctggatggccggcagctgcactcaccaccacctcttcgaaaatgctctgcagttgcgtctccatctgtactatcacccccgcctttccagggtgcccggcaaggcccggatcagactcgagctctgggaatataggggcagaggggcggagacctctggaggaaaccgtagctcctc

SEQ ID NO: 10535 - DNA, 479 bp, Homo sapiens
  MAP TO AL121588.14; EXPRESSED IN BRAIN, SIGNAL = 2.4
ccataggtgatttgcgtctgttacttccaatcttcaaaatatcccaatgtaatagatatcattattaacattacattacatgtgaggaaactgaagataagaactgacagaagtggagagtagacaaaagaggatggtttgtgtttccctaaaataaatttgataccaaaaaggagagagtaataagtgtaaaactgcctccatatgcccctaccttctttgactctgtccccaccttcttcccatttctggatccagaaagccctcatctgccctgatgttgctccaaaactggaattctttagctccagtggcaggctcaaccctcctccagagttgcaaatcaacaagatggcaggaatcaatactgaatacaccataagcccatttccccagactgataaaagttcagatccagggcaggtgagaaggattacagaaaaggttcaacctttcatcccgtctccttctatcagcca

SEQ ID NO: 10536 - DNA, 472 bp, Homo sapiens
  MAP TO AL035690.10; EXPRESSED IN BONE MARROW, SIGNAL = 0.94; EXPRESSED IN BRAIN, SIGNAL = 0.9
cagtggtgtgcatgatagtggtagagggtggtgtttggccacatgcggtggaggcttccattaagggaggagagttatgcagaggaggggaggaccataaccccctacggcatcttaacagcaccggggcagaaggtcctgtgcccaggaagagggttacccagtgggccttgccccttgctcagcagtgcgttccaagtaccatgttagaagaggggtcaaggtctcccacccccgtgccacaggtccagggtgggtgatggcggttcttaccccagcctatgctcacgtagagcctgaagatccattgctcagataagaccgagaaggccagcagtgtgtacaggtacacgccctccaccaagagccagtagtaattggccgccacacagtactgcatgagcagaaacaccaggcggcagctcagagagtcctgggggtagaggaagggtgtcatggggacaacagctct

SEQ ID NO: 10537 - DNA, 465 bp, Homo sapiens
  MAP TO AL078645.18; EXPRESSED IN BRAIN, SIGNAL = 0.93; EXPRESSED IN HBL100, SIGNAL = 1.2
aaaagtcataagtgttgggcttgatgaatctaatagctgatgaaaatattgaaacaaaatagacaaaagagaaatagaagtgaaccccagctcaaaaaaaaaaaaaaaaaagaaaaaagaaaaaagagacttttaagactctcgggagaaattaatgaagtatgaccaagggaaagcataaaaagaactcaaaaggcacagaattacttatattattaaaatagagtaaagttatttggtccaaagatgtagctgtcatcatcatcatcatcattgccttcatcatcactgtcatcatcatcattgtcatcatcaaagctatcactgatgcagcacttattatgcagcaggcaccattcttaatgctaaaaataaatctatgtggtgggtgccattattgtctccatctaacagatgaggaaactgaggcccagagagataacttgtccaaggcccatagctaaa

SEQ ID NO: 10538 - DNA, 491 bp, Homo sapiens
  MAP TO AC008174.1; EXPRESSED IN BRAIN, SIGNAL = 2.6
aaaactcgctatttttgaaacaggtatgtcacttatgctctttttatcttttgtaatggactggtatatatttgaatgagaaagatcagcataaatggaatcaaccatagactggatatcttttgctgaaatcatactctgttttttattcccatatttaataatacatatttcatgttttgaaattattgacataatttcatttatcagttttatcactgtattacttaagtctgatttagtagtatctgactgctctgcactggtgttcaatggacttatctgagatgtaagctgagtaactattttttccaaatgactatgtgataacatagtggtatacattgttgaagcttgtctttggaatcttgatttacttatatcatattgaactctttgtattaaaacatttgcactgagtttggaatgtgatttaaaaggcagatttgctataagatctggatgaatttggaaatcaaaaatttcagcca

SEQ ID NO: 10539 - DNA, 381 bp, Homo sapiens
  MAP TO AC007719.1; EXPRESSED IN BRAIN, SIGNAL = 0.72; EXPRESSED IN ADULT LIVER, SIGNAL = 0.65
tgacctctctttctgctgccagttaatgtagtaccttgataagccaacttatcctaaagtcattagtatacactcagccatggtaactactataatcctttaatctgaaaggcagtacaaacagttaaaaccttacatggttttattaattacaaaacacacaaaaatacttatatactcatcaatactttcatataattactgatttttaaatattgagaatatacttacttgtacagttaggtaaagttccagaccatgttccattggctgtgcactgtctaactgaaggtccagaaaggatgtatccctccatgcaggaataaatgactgaactagaaaatgttgtgccatcaattcggaagactttcccattggctg

SEQ ID NO: 10540 - DNA, 460 bp, Homo sapiens
  MAP TO AC006499.11; EXPRESSED IN HBL100, SIGNAL = 0.78; EXPRESSED IN BRAIN, SIGNAL = 0.74
aaacctgtgggactgaggtctccatctcctgttctttggtaagcttgtgtcatccatgacatgaaacctcacctttgcctcaattcatgcttgccatccacctcagaattgacatcaacaaggaccttcacgatttcatatgcccctttaccagattactagggaatttcaaggaaacaggaagcaaggagtcacgaagcaccaacactgcccccaacacctggccccagctcagaaatctgtaggagaaaggtcaacactatgatcttgcatctcacagatgctctctgcaccgaccccacaagtcgctgcatgagggctctccattctattttgctccaggttaactcattcccgtgcatcccgtggacgcatggaaatgaagtgatgttaaagttctggacgaaagggatgtcagcatttgtagactccactacaagcaccaagagctcatcgctct

SEQ ID NO: 10541 - DNA, 458 bp, Homo sapiens
  MAP TO AP000240.1; EXPRESSED IN PLACENTA, SIGNAL = 0.62; EXPRESSED IN BRAIN, SIGNAL = 0.85; EXPRESSED IN BONE MARROW, SIGNAL = 0.68
cttggtcaagacaaggaggcagttattatctatgcctcttagcagctgaccttcaactgtaagagaccattctggatgtagcaagttcctaaatgacatattgctattccttttagctatcaagatgcttggcagaattttttgtctctagaaattaccatgggatctacaagcactgaagaccagttttattagtagacttttgtggagtgttgctggaattagtgatggtatcttaagtcacaactgggtctttgaatactgactgcttctttggcttcgggtaccccaaatcctccaagctcttcttgatttggtggatcttttggaaaaacttctttggtttgtctacttttgccatactcaactctcaggttttcatagccttttatctttgaagaccccactgaagataatgcagtcccctgttgtattagtccgtttttacgctgctgata

SEQ ID NO: 10542 - DNA, 399 bp, Homo sapiens
  MAP TO AL008638.1; EXPRESSED IN ADULT LIVER, SIGNAL =   1; EXPRESSED IN BRAIN, SIGNAL =   1
aagcactcgccaatatcctgctgaatgtcagcagtttgaatgggaacgcggactgcacaaggagatcggggacgggaagagttaaactcttcacaggaggaaggagccagacttcactggcaaaaggaatttttttttctttctttctgcctttgcagccccaagcctggagcttggtactctagggaaggcaccaatcagattgttgcctgcatgttggaaaatatttatgtcacctaccaagctgggagcatactcagcaggcttcccggggcctcctgatagacaaggtcgcatcccagcagctgtgagaaaggaggcgtgccggcctggcagctgtgctgggcgccgggaggctgccagcgaacgtggcatcacacaggagagggagatgcactt

SEQ ID NO: 10543 - DNA, 489 bp, Homo sapiens
  MAP TO AC007363.3; EXPRESSED IN BRAIN, SIGNAL = 0.81; EXPRESSED IN HELA, SIGNAL = 0.61
ggagcaaggaagaacctagctgagaattcgagtacactgctcctccacagctgctggtgggtgtggggttttgctttgagagggtaattgcaggtttcggattgaccagtccctccctggaggccttactgcctagagatgagcttcatgcacatttaaaggcatgggaaaaccactgcaacggcgttacaatttttcagagtgcagaaaatcctgatgttgggtaggtctccgggcagtcatctaccttgtttgcaaagttgggctccaccacatactgcttctcattttcagcagcaccttcaatggtgatgaagaaaatgttgattcctgactctctcgcaagtcttgaagcctcctccactttgtccgtgggccagccatccaccatcaccaccaccacattgggagccccgcttctgtttccattggctttggaaaagaagttcttggtcacaaaggagatggcccgacctggaagaaaaagaa

SEQ ID NO: 10544 - DNA, 1921 bp, Homo sapiens
  MAP TO AC005208.1; EXPRESSED IN PLACENTA, SIGNAL = 1.2; EXPRESSED IN ADULT LIVER, SIGNAL = 1.4; EXPRESSED IN BRAIN, SIGNAL =   1
tcacagtgtttacccaagccttattcatatataaaaatgttattttctctaattgcatattttgcctctataatgactggttaaattctaaactgaaatgagtaatcaatactgtgcacctaatgttcagatgaagtcgtagctattttagatggtatgacactgctccaaatttggcaaattgctataaagatggacattgaaagctaaaaagtgtgtttttgttgttgttgttttttaggttctaactgaaaacccaaaccaagaaatagcaacaagtctagaattcttactactacaaaactcacctggatccctaagggcacagcaaagaatgagctattacggcagcagctatcatattatcaatgcggacgcaaaatacccaggctacccgccagagcacattatagctgagaagagaagagcaagaagacgattacttcacaaagatggcagctgtaatgtctacttcaagcacatttttggagaatggggaagctatgtggttgacatcttcaccactcttgtggacaccaagtggcgccatatgtttgtgatattttctttatcttatattctctcgtggttgatatttggctctgtcttttggctcatagcctttcatcatggcgatctattaaatgatccagacatcacaccttgtgttgacaacgtccattctttcacaggggcctttttgttctccctagagacccaaaccaccataggatatggttatcgctgtgttactgaagaatgttctgtggccgtgctcatggtgatcctccagtccatcttaagttgcatcataaatacctttatcattggagctgccttggccaaaatggcaactgctcgaaagagagcccaaaccattcgtttcagctactttgcacttataggtatgagagatgggaagctttgcctcatgtggcgcattggtgattttcggccaaaccacgtggtagaaggaacagttagagcccaacttctccgctatacagaagacagtgaagggaggatgacgatggcatttaaagacctcaaattagtcaacgaccaaatcatcctggtcaccccggtaactattgtccatgaaattgaccatgagagccctctgtatgcccttgaccgcaaagcagtagccaaagataactttgagattttggtgacatttatctatactggtgattccactggaacatctcaccaatctagaagctcctatgttccccgagaaattctctggggccataggtttaatgatgtcttggaagttaagaggaagtattacaaagtgaactgcttacagtttgaaggaagtgtggaagtatatgcccccttttgcagtgccaagcaattggactggaaagaccagcagctccacatagaaaaagcaccaccagttcgagaatcctgcacgtcggacaccaaggcgagacgaaggtcatttagtgcagttgccattgtcagcagctgtgaaaaccctgaggagaccaccacttccgccacacatgaatatagggaaacaccttatcagaaagctctcctgactttaaacagaatctctgtagaatcccaaatgtagtcctaaattgcaattatgagggctaccactgaatcattttatctttcagccaatcaagtcgttgtaaacgtggcttttttgaaagtgttatggctatgttttatgatgatgctgggtaagtagagtaagttaaacttggtaaaagataatctaaaaattccatagttctcagttattaaaatttttcttgttcgccaattttgtattaagaatgctattaagcctaattgattaaaatttatcttttttattatcttacatgcttgtatcttcagttggaggtgtagtattcaaaaacggggaatgaaggcaggaaggaggctggaataa

SEQ ID NO: 10545 - DNA, 429 bp, Homo sapiens
  MAP TO L14561.1; EXPRESSED IN BRAIN, SIGNAL = 3.4
aaatttttagccaatgacaatgagattttcttaatattactttgaattctttacctcttaattcttagagtatgtggttttgttgttctgtagtgtcttactaaaatattcatttttttacagtgtattgcaagttccactgcattacatgcaaatatgattcactcatacctagctgtttgtggattcaaactcataaatgaaccatttttaagttgttaatagtgtactgacatatttctgtattttctgatatttacagattcgagtggtgaatgcatttcgtagttctttatatgaagggttagaaaaaccggaatcaagaagttcgattcacaactttatgacacatcctgagtttaggatagaagattcagagcctcatatcccccttattgatgacactgatgccgaagatgatgctcctac

SEQ ID NO: 10546 - DNA, 462 bp, Homo sapiens
  MAP TO AC005632.2; EXPRESSED IN PLACENTA, SIGNAL = 0.59; EXPRESSED IN BONE MARROW, SIGNAL = 0.84; EXPRESSED IN BRAIN, SIGNAL = 0.76; EXPRESSED IN HELA, SIGNAL = 0.63; EXPRESSED IN ADULT LIVER, SIGNAL = 0.7; EXPRESSED IN FETAL LIVER, SIGNAL = 0.81; EXPRESSED IN LUNG, SIGNAL = 0.93
tagtgatgcaaggatgcagggacccagggactacgacctcccaacccccggcccgcgccccgtactcacgcacggagtggcaggctacgagcttggctgcctcctcgggcaccgggcaggtggggaagagcggcttgagcaggtaggtggcgaagaccagggccacgatgtactgcgatgaaggccggatgatgagcagctcgatccagagcttgaggaaggcgggcagcgagccgtagacgtccagcatgtaggcgtagtcgccgcccgatttggagatggtggtgcccagctccgcgtagcagagcgcgcccacgatggagaagacgccgcacgcggcccacaccaccagcgccagccccggcgagcctgcctccttgagcacgcccgtgggcgtcacgaagatgcccgagctcatgatggcgaccacgatgacggccacgcccttgagtagcgtgatgt

SEQ ID NO: 10547 - DNA, 341 bp, Homo sapiens
  MAP TO AL121760.4; EXPRESSED IN BONE MARROW, SIGNAL = 1.1; EXPRESSED IN BRAIN, SIGNAL = 1.8; EXPRESSED IN PLACENTA, SIGNAL =   1; EXPRESSED IN HBL100, SIGNAL = 0.99
ccaatcccacgataaccaacccactcccatgataatggcattaatcattccttaaaggtcctacatgtcaccactcttgcactggggattacatgtccaatatgtgaactctgggggatacattcaaaacttagcagaggggaagaggctcccagtgagtcttgctcttctctgagtctagagcaaacctaccaaacacagaatcattgatgacacagagacaatggcccgactcatggccctatctgccactctaagccattggactcctgtgagcctcaccaggttacacagggaagccccaacctgtgactcacaagagctcactcccaagtctgctc

SEQ ID NO: 10548 - DNA, 471 bp, Homo sapiens
  MAP TO AC007832.1; EXPRESSED IN PLACENTA, SIGNAL = 0.94; EXPRESSED IN BRAIN, SIGNAL = 1.1
  unsure 124
  unsure 200
tgattgtgtttggaataggattgaagcaataaagatggagagaagtaaacacacctttctactgtatcttgagagtatcaagttggtcaagaattgagtggggtggatgaggaagagggagganatgaaggcagctggatttatgattgtgcagttctggaagacatcagaactggagaaaggcactggggagttatcancataggaggctgagaggagtttgagagtgaatgaggtcacactggggcatgtgtaaagtcagaagatgagacatcacaagccaacttcctgggctacacagcaggaatcataggaaaagcactaagaaaggtcataaaaataggccagaaaagtgtgggagtaaagggagacgaagaggatttcaagaaacagggaaagtttaacaaagtcaactaccaaggagtggtccagtcagacaaggaatggaaagcttgatcgtgaacttggcaa

SEQ ID NO: 10549 - DNA, 411 bp, Homo sapiens
  MAP TO AC007857.1; EXPRESSED IN PLACENTA, SIGNAL = 0.78; EXPRESSED IN BONE MARROW, SIGNAL = 0.73; EXPRESSED IN ADULT LIVER, SIGNAL = 0.72; EXPRESSED IN BRAIN, SIGNAL = 0.81
aaagatgtagttaggcctgagagcttacataccattttaacaaagagtgataaatgtgtggagaagtgactggacaaaggaaaagagtttgggtttttaggggtggtaaattctggaaaggtcattatacagggaaaactaaaggaagaaaaggattatttcagtaaggtttgtttgtgcagattcaagtcagtgccatctcccatgataagagtcttctatttttggtatgggagaaatgtgggggacaccttcacaaatggaaatttatgccctgcatgtaggcagaaaggaggaggatagagagctttgtttgcatctgctgtttttgaattgccttcagctcaaaataatcttcatgctcaagtggcatatttgggggttgcatactctgaacccctttgcagtgtt

SEQ ID NO: 10550 - DNA, 437 bp, Homo sapiens
  MAP TO AJ009612.1; EXPRESSED IN PLACENTA, SIGNAL =   1; EXPRESSED IN ADULT LIVER, SIGNAL =   1; EXPRESSED IN FETAL LIVER, SIGNAL =   1; EXPRESSED IN BONE MARROW, SIGNAL = 0.92; EXPRESSED IN BRAIN, SIGNAL = 1.5; EXPRESSED IN HELA, SIGNAL = 0.99
gttgcttgagggtgtaagggcacgtgggctgtaggggcaggaggctggatcccaaatcacagggagctgagccccactacttagtgagcactgagtatcaggcgagtcttcagcttcttgagtcctgattcttcctgtcaggctaggataataacactgccaagaattgggagagtaaactcggtggacactgctaaaggaaaaaattatttaatgacatgagttaaagcatcgtaaggaagactttattcaggaccattaccataggtgtagggacctctgctatgagattttgcagttgcagggagagagagattgagctcaactccaattacagcatgggcaagtgggaattcgttgctaaggagcagggtgggggtcagcggatagaaacttaataagggaaacatcagggctgagggggattctggctaaac

SEQ ID NO: 10551 - DNA, 477 bp, Homo sapiens
  MAP TO AC011231.1; EXPRESSED IN BRAIN, SIGNAL =   1; EXPRESSED IN BONE MARROW, SIGNAL = 0.89
aagttgaaataattcatccaagtttacattactgatggaatgcttatttcaacaagagtgtccacattctgaaccactaaattatgttgtctctgttccaccaaaattcctaatttcatactgcttgtgttggaaagtgtgttaattgacttctacttacctgtgaattgctgaatgtaatctctgagtaattaacatccttgtttttctgcctgtaggtccgtggggaaggtgtacaggagactgtggtcccggaggagtccagagtcgggcagtgtggtgttttcatgttgacgggtggacaagtcacctgtctaactgtggtgagagcaacaggcctccaaaggaaagaagttgtttccgagtttgtgactggcacagtgacctctttcagtgggaggtttctgactggcaccactgtgtgcttgttccttacgctcgcggtgaagtcaagcctcggactgcagagtgtgtgac

SEQ ID NO: 10552 - DNA, 404 bp, Homo sapiens
  MAP TO AL031117.1; EXPRESSED IN FETAL LIVER, SIGNAL =  18; EXPRESSED IN ADULT LIVER, SIGNAL = 2.6; EXPRESSED IN LUNG, SIGNAL =   1; EXPRESSED IN BRAIN, SIGNAL = 0.95; EXPRESSED IN PLACENTA, SIGNAL =  17; EXPRESSED IN HBL100, SIGNAL = 1.2
tgcttctgtgagatcaccatcttctgaatttccttctgcttcaatctcttttgctagattcttttccttttttagacttccagtatttgaaagccccagtgctcaggtcttacatctcttttattttttatttacatatttttactaggtgatcatatccagttccaaggctttacacactgctatggtttcaatgtttgtcccctccaaaactcatgttgaaacttactccccaatgtggcattattgaaaggtggggttttttagagatgattgggtcatgaaggctctggatgaatgggttaatggattaatgagttaccatgggaggagaactgatggcttttataagaagagaaagtgagacctgagctagcatgttcagtccccttaccatgtgatgc

SEQ ID NO: 10553 - DNA, 1979 bp, Homo sapiens
  MAP TO AC006239.5; EXPRESSED IN BRAIN, SIGNAL = 2.7
ggaatcaaagagctggaaggacccccaaggaacatttactccaaccccttcactttgcagatgaggacattgaacattaggaaggtaaagtacgatgtcatgcagctggtttgtggcattaggaggagctacaatgtagttcttacgtttatattcgatgcccttcctgtattgtcactgctccatccagtcctttcatctttttggcagctccagtttgcattatcagttggataactgtaactcacagacccactcatggtagctaaccttctccaattttcctttatctcccaggacaattcagcagtggcttgcaagggtccagtcactcctctactgtaatgagaatgggttttggggaaccttcctggagagccagcggagctgcgtgtgccacggcagcaccacgctgtgccagcgccccatcccctgcgtgataggcgggaacaacagctgcgccatgtgcagcctggccaacatctccctctgcggctcctgcaacaagggctacaagctgtatcgaggccgctgtgaaccacagaacgtggactcggagcggagcgagcagttcatcagctttgagactgacctggacttccaggacctggagctgaagtacctgctgcagaagatggactcacgcctctacgtccacaccaccttcatcagcaacgagatccgcctcgacaccttctttgaccctcggtggcgcaagcgcatgtccctcactctcaagagcaacaagaaccgcatggacttcatccacatggtgatcggcatgtccatgcgcatctgccagatgcgcaacagcagcctggaccccatgttctttgtctatgtcaacccctttagcgggagccattcggagggctggaacatgcccttcggggaatttggctacccacgctgggagaagatccgtctccaaaacagccagtgctacaactggactcttttgctgggcaatcggtggaaaacatttttcgagacggtccacatctacctacgtagtcggactcggctacctaccctactgcgaaatgagactggccagggccccgtggacctgtcggatccctccaagaggcagttctacatcaagatctcagacgtgcaggtgtttgggtatagcctgaggttcaacgccgacctcctgcgcagtgcagtgcagcaggtcaaccagtcctacacacagggcggccagttctattcctcttcgtcggtgatgctcctcttgttggatattcgggaccgaattaatcgcctggcccctcctgtggccccggggaaaccccagctggacttgttctcctgtatgctgaaacaccgcctgaaactgaccaacagcgagatcatcagggtgaaccacgccttggacctgtacaacacggagatcctcaaacagtcggaccagatgacagccaaactctgctaacccgggactccttgccatggacttttcctgttgttgtacacacacaacagaacaaaatgaagcaaaacaaaacaaaaaaacccacaaaaatttgtaaaatgtaattaatattcaaagaaaaggaggaaaatcttcatttgttggaaatgaaaacgttctagcaactgtataaaagcgttgggcatgtttgttatttctatactcactctgtcatgaagaagggtctcagccttttgtggagcattgagggagttgcttcttaggcctcaggtgctgtattgggggagaagggagaaagcatatgcaatgaattgtaaagatctctgctgtgcaggtgctaagattaaacactaaaaagaaagagagatatatgtaatgtacaactgacactgccatttttcctttttggaggaaatggacatagataaagaagatatttcttcggttaagatttattccctctttatgcttaattaattccttgtgtgtgtgtgttttctcttctttttgactctttctcacacaggggtgggaatacagt

SEQ ID NO: 10554 - DNA, 454 bp, Homo sapiens
  MAP TO AC004624.6; EXPRESSED IN BRAIN, SIGNAL =   1
acatggaccctgcgtagaaggtgctcgttctccccacttaaggcccggatcatgtcttctattcctagcacgatatcctttatcagctctttataactgacgccaagctccgagatcagtgtctggagcttccagttttccagggtgacttgctccatcgtgtctttggatttcctgacactctcagacgtggctttctggagttggcccagattccctttcagtgtttcattttcctcttcaagctccaaaattttgcagtaactcttcccattgcagtcttcaaggtcagagattgcctgtaaatattgatccagttctttctttaactgagagatgtcccctaccagcctgtggttatcccgctcgagcctggatatttttgtcacctctctctctctctctctttcaagggcgcacactctttcatggaacctctcttggtctccgtgaa

SEQ ID NO: 10555 - DNA, 482 bp, Homo sapiens
  MAP TO AF186191.1; EXPRESSED IN BRAIN, SIGNAL = 1.1; EXPRESSED IN BONE MARROW, SIGNAL = 0.92
tcccagcacagatagggaagggacacagcccggaatcccaggcggcagccgcactgccacgtggaggaacaagaaggcccatgcagaatgtggctggaggcaaaggtgcatggtgaggaacaggcggggtctgtgggtggagccccctatggtgcagcaggttgctgcccagggccggtgacccagcaggaggacacagagactgcagacaggaggctccagggcacagggtttccacatggttctgtccttggtggcctgaggccccctgtttaactccaagctgcaactgcagcctcctacccaaccaagaacaccaaacataccttgttgcaggtttcaaccagacataccaacggtgacagggaagatgcctccacctgcatcttccacctgctcatggctctgtgaccattcactttaagagagggacaaaaacctaaagggaaaacaaataaaaagcgtcaggtgattctgcttgt

SEQ ID NO: 10556 - DNA, 468 bp, Homo sapiens
  MAP TO AL031431.8; EXPRESSED IN BRAIN, SIGNAL = 0.94; EXPRESSED IN HBL100, SIGNAL = 0.67; EXPRESSED IN LUNG, SIGNAL = 0.89; EXPRESSED IN HELA, SIGNAL = 0.69
gaaaggaagctgtggactggtggaaaaagcatcacctgcctgcaggtagctttcgcccagtagacataccgtaagtgagtgaggtcagaaagggacaaatgagaaaggcaggagtgagggaatgaatgaatgtgtaaatgaatgaaggaatgaaacagggaagggtggggcttccaggcttggccaccttcagggtggactgatcctccttgaagtctgcgcttcaggagtcccttcagtctgcggcagggagtcgtgccggaaggcagcctggatgggtgcgtggggaagcagccagggggctctgtccactcctcccttctgctcaggaagccactggagtctgtggggctggggtgaagtctccagggagcaatgtctccagctcaagacaaaggcaatggcagcagtccggctaggatgccaggccagagtggtagagccaccccccaagttgtcagctgccac

SEQ ID NO: 10557 - DNA, 375 bp, Homo sapiens
  MAP TO AC007126.5; EXPRESSED IN BRAIN, SIGNAL =   1
accaacaagctcaatcaccctgggcaaatcttcttcctttcacgttatttcttattccctacacagtgggttctgacttgcctcagactgacaggttttctgtgatgtgggacttttagctctaaaaccaggaaaatcccaagcaaactggaaagagttggtcatcccagttttggtcttgaacaattttcattctctacagtcaagttcttaaactcctgtgttttcttcccagcatctcccctttaccgaggtccacttgctgatggacacacagagttatttacgcctctgcatgtcccaggcagctctcatcctctccccttgccattcattcccatccctgcttctccacctgcgttccctattggagtc

SEQ ID NO: 10558 - DNA, 407 bp, Homo sapiens
  MAP TO AC008430.2; EXPRESSED IN BRAIN, SIGNAL = 1.1
aacctgcacaaatagatgaatccacctaatataaaattaattggtggactgaaatcaccatgatttgacttcaaaatggtaaaaatggttgttcaaggagtcttgcactacattaacccagtggcaatatcaaaattataagccaataatagactcagtcattggtttcaaaatacaaataactagacagatttttgattttaggatatatatagttttattctcttgacatcaaaagacttggaagtttacaacttggttgtcgcatttaaagcctgtatttttcttttttttaaggtggatcttcttgttccaaccaaagtgactggcatcattacacaaggagctaaagattttggtcatgtacagtttgttggctcctacaaactggcttacagcaatgatgg

SEQ ID NO: 10559 - DNA, 416 bp, Homo sapiens
  MAP TO AC006020.2; EXPRESSED IN LUNG, SIGNAL = 3.7; EXPRESSED IN BRAIN, SIGNAL = 0.93
ttgtcaattacagaagcaataagcttatcattgttgataagctaagagcataaaataataaagcaatagtttgggttcctaagtgtgatattttattcagcacatcaatctagttgaaggcacgagaaagatgttaagagtaaatattcagattcaaagaaaaattggagttgaaatttctgtgccaaccaattaactttatttcacaatctgacttattggtcattttattaaaatctagactcttctttcatttgcaattctgcaggcagaagatgaatttgtttactggccaaataaagatgagcctataaattgtgagagctttaaggtcactcttatggctgaagaacacaaatgtctatctaatgaggaaaaacttataattcaggactttatcttagaagctacacagg

SEQ ID NO: 10560 - DNA, 447 bp, Homo sapiens
  MAP TO AP000117.1; EXPRESSED IN BRAIN, SIGNAL = 0.69
ttgcaccataagacactggcatgctcctagaggaaaagccttagaaattaccattgagactcttcttgatacttggaatcccctgaactgtgcctttgtctgactttgatctcttggctccaaagtcttcaaagctatccttgacttttgcctgagatccgagtctgctggggcctggcctctgattctgatggagcccatgctttcagatgcggagaaacaaaaatgctacactttgggttttgttttcctttctcagcaacttgtgttcaattcagtgaccaattgcttggggccgcgcaaatttctgcacagtgggaagctctacaaggccaagagcaacaaggagctgtatggcttccttttcaacgacttcctcctgctgactcagatcacgaagcctttggggtcttctggcaccgacaaagtcttcagccccaaatcaaa

SEQ ID NO: 10561 - DNA, 483 bp, Homo sapiens
  MAP TO AL121758.4; EXPRESSED IN BRAIN, SIGNAL = 0.91; EXPRESSED IN BONE MARROW, SIGNAL = 0.91
tgtagtaaaaggtaaaacattcatggaaataataaacatcaggattgtggcttctaagagggtggatggggatggtggggagggataccagggaccctctgtattagcaatcgatcctgcattagaaatcatcccaaaacataatgttttcaaagtactaacagtcattttttatatctcacagtttctgaaggcaggaatatgggcatggtttagctgggtggttctggtcctcaggaagctaaattcagctgtcagctgggcctgcagtcatctgaaggcctatcgggttggggagttggagggtaagctggagaatttgctgccaagccaaagggggttcatctgggtggctagcaaatttgtgatggttgttgatcagggactgggaagaggggagagggcctcagttcctctccatgtgggcccgcccatgcatcttgggttctatcacaacatggtggctggattccaaaagtgagc

SEQ ID NO: 10562 - DNA, 1954 bp, Homo sapiens
  MAP TO AC004886.1; EXPRESSED IN BRAIN, SIGNAL = 2.1
agcagacaccaaacaaatcaagcaaacaatcaagaaacagaacaataaaggaataaagtaaaactaaataaagaaaagcatgctacagaatctatacacatgataaaatttccatttacaagaaataaaattgaagtaaacatgcaaaagacacaccaagaaaagtaggatacatctctggagaagggaaattaaacatgcagaaaaataagagtttgagttttgagagtaacagggtagtttgaggcccaatttaccttcactgtctgacatggcatgttggaagtcatccatgatgaatgctatgtcacggtcatagcctcgagtccgtgattcttccctcatgtgttgctgaacttcaggcaatgagtggcttgatccaaactgatccctggtgtctgcagatattggtggcaggggtccagctgcagccctggccattcccattggctggccaacaggactgagtgggctttcttcttcagaattctgggccacaattggtattcttcctctactttgactaattggcaaactggtcggcttagttctggcagaggatgatgcatgactaaaggaaacatctagagcttcagcctcttgagctttcagtcttagggaagagctagaagaatcccttttaattgataaatcaagcccatagacagaggaaggtctggaggaaggtctggacctgctgccactactgtatggcttatccgcttcatcctgcagagctgagcgtatggtatttcctaatgtgcccagtcctgtgccaagagaagatcccataaatttttgttggtctgtaatattttttctgaggccaaaagtgatgtcatcttgaaggagccttgccctggaggaaatgccaccaatagatgaagtgctagaagtcatatagcttgaataatcaggttcaaggtctctactttcttgaataggtgaaaattttgacattttagggtcaattagtgatttcttatgctttgactgcttttgataaagtatggctgctggcagttgttttgctgcttgtttttcaagtgtgagtctactgatgctatacttctcagattttggaaaatgtctgtagctagtatcagcatggtaataatgagaaagaccagcaaggtgatctaagctctctgtccctctacgaaattcctgtttaatctgatgtttcagaagctttaactcgtaaggatcctccattgggtcttcctccgccttcacataactatgcaatctagaggaagactgtaaaggtgctaggaaatctgtcacttcttgagaccggcgtgtctcagtggttcgaaggagacggtctgtttttgacagatccttttcatgaaggctaaatgcggtgcttaatgccgctgttcctttggtgatctctccaatgtcgtcaattaggacataatttcgtggagtatggtgatcaatatctgcatagaaagaatctgcagatatgcttgatattggactgcttgccatgctacttctttcctccaaacctattctcaagtctaaactattgtacttactaccaagatgggaaacagcaaatgtgttatccgtagaaacaggtgctatcataaggggttggttgcgaatcacttcatagtttgaggttatcttgggctccaaatataatgtagtttgccgtggcttctgttgtatcaccatcatctgtgaaggtaactgataagaaggctgtggggttggtgtaggttgaacttgaggtgtgaaggacattgttgccacagcttggaatgttggctgagtctgataaggtgaaacttgctgatggtacaaagtttgttgctcaaaatgagactgttgagtgtatgaggtgggtgcttgggtaggaagagcaggggaagagtactggtattgtgtgtaaggacttgtcggaggaactagttgagattctgtttgggtttgtggtggt

SEQ ID NO: 10563 - DNA, 479 bp, Homo sapiens
  MAP TO AC007372.4; EXPRESSED IN HELA, SIGNAL = 0.72; EXPRESSED IN BRAIN, SIGNAL = 0.87
gcacaatgccttctactcccaaatcacagcaagatattaataacccttagtagaaagattccttattaggtcacacagagtcattatggcttaatagctgtcaccctcccaagctaacctgtgcaacaggtgtggaaagtaaacttagaggctcacttggcaaccccacaaatagggcttcacagctctccccccaatgctcccaatggcctctggtccccagcatatgagcccctgcccctgtagacctagggagaagcccttctcagctcagctcacctgtttgtaggcatcgaggaggaagctcttccagacgcagcgcagtccctctgaggtcagcatgcgccgccactctccgcgagtggacttggagcggctcaacagcagcaccacgtgcttgagcagaatgaccgagtcatagagagccaggaagaggcagttggagaaaaaaactggcagaatttgcagtgtgatcagca

SEQ ID NO: 10564 - DNA, 461 bp, Homo sapiens
  MAP TO AC007391.2; EXPRESSED IN HELA, SIGNAL = 0.67; EXPRESSED IN BONE MARROW, SIGNAL = 1.6; EXPRESSED IN BRAIN, SIGNAL = 0.96
aacttaattgggagcctcggggtgtgctattgaatggtcaagagtgaaggactgtgtaatgttgtaccccaaatagagatttcacacataaactattgacattaacatgtaccacttaattcagaacagacatgtactctcagtcatttgatttttcttggttgactatttggtgaatgaggagatgacagatctgaatattagacacctcagaacttcagccataacattatccctcatgagaaagcacagtattcacacaagcttgaggtttgtgtcccatgttctcacctgacgagcagcatagcttccaggggatcccgggtatcgctctatcagcaatggctgtaagtcattttgccacatttcagagatactggtgccttctgcaatttgccgaagagccgatgaattcaaaatggctggctggtggtaattctgaggattgaatgaaatcattt

SEQ ID NO: 10565 - DNA, 380 bp, Homo sapiens
  MAP TO AC007556.2; EXPRESSED IN FETAL LIVER, SIGNAL = 0.62; EXPRESSED IN HELA, SIGNAL = 1.5; EXPRESSED IN BRAIN, SIGNAL = 0.81; EXPRESSED IN PLACENTA, SIGNAL = 0.81; EXPRESSED IN BT474, SIGNAL = 0.69; EXPRESSED IN LUNG, SIGNAL = 0.76
tctcagttgaagcatttgtagctcatagctcaagtttgataggttttaaagtttgattatactgatgtcattgaattattcatattataacaacagtgaggagggaggtagagatgtcaataaacgaacagtacttcacctgattagacccctgttcttcctttacttgatgctcttgacatgaaactgacctgtgtgtcttcctctgtaggtgttgtgtattacactgtgcgaggggagggctctaggtttggtgctatcaaacgtgcctacatccccaactttgaatccggccgcaataatcttgtgcaggaagttgacctgaaactgaaatacgtaatgcagccagatggaatagcagtggactgggttggaaggta

SEQ ID NO: 10566 - DNA, 414 bp, Homo sapiens
  MAP TO AL035594.7; EXPRESSED IN ADULT LIVER, SIGNAL = 0.75; EXPRESSED IN BRAIN, SIGNAL = 0.97
agtttctcccaagcgtgatgataatccaaaacctcctttcactgtctgctctttcacctcagagggacttccaaacttttatctaccttcaacctcacagttgatcatctaagttcctcttacctgtaaattcaacatcacaaaccacagtatagccactttttggtttcaaactttatcaagacaaatcatcaaaactagacaccattgcccttaacttcttgtcaccaagctaaaaacctctgtgcatcctctctattgttacttcctttccgtcattcttggaagatgagctgacgttagctgttcagggccaactctaagcatttgactatttgcttttcctggatctcattccgtctgtcatcaatttcttctgtatctttaacatcccctttctatttactcctttcc

SEQ ID NO: 10567 - DNA, 459 bp, Homo sapiens
  MAP TO AC009226.2; EXPRESSED IN BRAIN, SIGNAL =   1
actgcacaagcaggacaatgtaaccagtgttatgcagggtctggtctagtgggaggagaagacagtgaccatggcccatgatgagtgacagaatgaaaagtaatcaggaagatatgataggaaatacagggagaatgggagagtctgctttatgttgcataatcagagggcagctctggacaggcaaaatttgagctgagacctaaatgacaaggagtgaagccaatggaacatctgaaagaatagttttctagaaagagagcccagctagtgtgagccctaaagtaggtagaaaatgggcttggagggttttatatgaggagcagcgggaagtaggcagaggcctggtcattgtaggtcatgttggctagagtaaagagcttgtgtttgattctcagggcaatgaagagcctttggagaatttaaagcaaagtggggagggggaacaagagctgattt

SEQ ID NO: 10568 - DNA, 467 bp, Homo sapiens
  MAP TO AL096769.7; EXPRESSED IN BRAIN, SIGNAL = 0.79; EXPRESSED IN PLACENTA, SIGNAL = 0.64; EXPRESSED IN FETAL LIVER, SIGNAL = 0.57
tccattcgacttgtctgtgcagaagacagatggatctgggagaatgataatgaattatcattctcatgtttgaccagatgatgactacaattgaagctgctgtaccaaatgtagtttcattacttgaataaaataatacatcccctggtacctgacatgtagctattgatcttacaagttcctttttctccatttctgtcaacaaggactatcagaggcagtttactgtcagctgtcaaggctagaaatacaccttcactgtcctatctcaggtgtatattaactctctagccctaggttataatttagtttgcaaggatcttgatcaccttctccttccaaaagataccacactggtccattacactgatgacattatgctgattggacctagtgagcaaaaagtagcaactattctaggcttactggtaagatatttgcatgtcagagggtgggaaataaatccc

SEQ ID NO: 10569 - DNA, 489 bp, Homo sapiens
  MAP TO AL078474.2; EXPRESSED IN BRAIN, SIGNAL = 2.6
ggataacctatatgatgtttgacttgaaaatattaaatgcataattttaaaaatatgattgttcttctattacagtcaacagtgtttacaggattccttgattcggttacagtgtaaccataaatgtaagtaaatatgttgtcatatcccacttcaagcattctgtttaaaattctgaatagagttttatgtcacctgaagttattttgttaccactcaattttcaccatcagaagaaatgccaaaaatgaaatagatgctctttctccaattattttaatagcttgtggaaaaaaactggcagctcaagacatcaccccaaagattgttggaggaagtaatgccaaagaaggggcctggccctgggttgtgggtctgtattatggcggccgactgctctgcggcgcatctctcgtcagcagtgactggctggtgtccgccgcacactgcgtgtatgggtgagtgtgatgtcaagtgtcccttcccaaa

SEQ ID NO: 10570 - DNA, 429 bp, Homo sapiens
  MAP TO AL096801.16; EXPRESSED IN ADULT LIVER, SIGNAL = 1.1; EXPRESSED IN BRAIN, SIGNAL = 1.1
agcttggttcatatgcctccccgtttttagtactcatgcatatcctcactgtatttttgaagggtttaaaagtctgtgtatgtgtctagcaatcatataaataagttaaggtcaactgaagtgggaggatgtatatataaaatgttaaatggaacaaaaaaaatagcctctgaggagggattttaattttactgtttttttttctatatataataaaaaaaaattttccctcctacagctggaaactgacaaactagctctcccgatgagccccagcccgcttagcccgagccccatccccagccccaacgcgaaacttgagaattccgctctcctgacggtggagccttccccacaggacaagaacaagggcttcttcgtggatgagtcggagccccttctccgctgtgactctacatccagcggctc

SEQ ID NO: 10571 - DNA, 490 bp, Homo sapiens
  MAP TO AL050349.8; EXPRESSED IN BRAIN, SIGNAL = 1.1; EXPRESSED IN HBL100, SIGNAL = 1.8
tggtgaccatagctaggaaggaaaagaaaattagggtcaggacaggatgtgatgggtattctgttctgtagggtgatcagggagggtctccttggggaggtggcactgagtcaaggcctgaatcaagggagagaacatgaagggtagaggccggtgactgaatgagcattactccgagctccttggctggttgttaggcatgcccagtgcgtaaaagccctttggggctgctgagcctgcactcatggcaggggcacctgtgtttgtgcagcctccaggagaagctgtgggccatactgcaggccacatatatccactcctggaacctggcacggtttgtgttcacctacaagggtctccgtgccctgcagtcctacatacaaggcaagacctacccagcacacgcattcctggcggccttcctcgggggtatcctggtgtttggagaaaacaataacatcaacagccaggtaaagatcctcccgagatg

SEQ ID NO: 10572 - DNA, 482 bp, Homo sapiens
  MAP TO AC007679.2; EXPRESSED IN LUNG, SIGNAL = 0.77; EXPRESSED IN BRAIN, SIGNAL = 0.87
agaagaaaggcatgtctggggaagctgctgtatggaaaagtaggaaagtcatcctataccagcagttctcaaacttgagcacacagcagaatcaccgagggacctcttaaaacacacattggtgggcccaccagcagtgccactcagtcagcgagtcagggtggaatctggtacctgccctagttctaacgagctcccaggcaatatgcatgcagacgctgccagtcaggcagccagatttttagaacgcttaccaaaactatttcacctgttttcccaggtcacctgcgcagatgggtcccgtgaaggatacacacagaaaaagggccgaaaggaagggctcaggatcgagcagagaatcctgcctaggagagaaacatggaaagagattccacaggaaaacacaggtagtagaagaacagcagccagcatttatggattgagcacttactatgtgcagagccccctctaagtgcttcatg

SEQ ID NO: 10573 - DNA, 1964 bp, Homo sapiens
  MAP TO AC004142.1; EXPRESSED IN BRAIN, SIGNAL = 1.2
cagttgcttttactttcagtgatgtacttttttcttttcctgcttcccagagatttatcagaggaggataaagctcacctaatgcaaaggttggtttctgtaagtaattcctcacatagctgtgtccaccatcacagttcatttctggagagaggcagctgataagacatatcacaccaataatccccagaaggcctccaagacaggccataagtgttgtggtattattcttttcatactctttttgatcagggtgcaaacctttggtggtgacatttacacatttttttctgtttttctgatagatggtgggaatatcaatacaaattttatactcagttgatggattcagatgagtaagattatataccttgacatcagatggtattcgagcactttgcgcagcatgagaattttcagtcttgacaaaggctgtccatttaacactagatttgagaattttagaacttgctttccaggacaccaaaactgaattggcctgaatatctcttattttaatattcaaagagccattgttatcttgtggaaaagatccatccactttgatcataacagacttcaagtcagcgccaactaggttagttgctatacaagtatataaacccccttctttgggagttacgccatttatatctagtgttccctcagaatggacatagaacttgtctgtcagggtattaggcaagagtttttgaccagaaggtgttatccagtagatttcaggctgtggttctgcagtagctctacagtgaaaggaaacatagctcccagcttctacatttagattagaaggaaagctctcaggagctataagagggagacaaatttccatcatgtccctgaaatgcacttgccgaacattctgaccttggaattcaggtgggtccacgcaaaacagtgaatctggctccatgaatcgaatgttggttttgttcatgttcatccaacggatgacacagtcacacctgatggggttactgtgtatgctgatttccttgaggtttggcagagactcaatggtaccatggtacagggcactgagagcattgctgttcagcatgagtgattccagcttggggagtctgaaaaatgcattggggtgaatgtaagacaatctagggttgttagtagcttctatttttcttaaatctggcaggttatccacagcaagactatcgatggaaatcagctcaggcatattatttatccccaactcttttaagtgtagcatattgctaaaatcaccccttcgtattctattaataggatttttatttagatccaaaaatttgagatttacaactttttgaagagcaacatggggtactttaataagcctgttatcgtaaaaagagatgctttctaagttttccagtccaaccaaggcgttatctggtatttctgtgaggtttataccagctataaccaggctgcgaagattgataagaggcttaaagttcatgtctttgattctgataattggattttccccaatcatcagaatctctagatttggaagagcatcaaaccacttactgttgatcatctgcaatctatttgaattgagatgaagtcgaagaagattatgtaggccaataaaggctccaggtgaaattgtagaaagcaagttgtgattaatatagagttcttgtaagttgctcagttcggacagacatttttcaggcagttcagtaagtttgttttcctctaggtacacagaaaggagctgaggcatcttttttacattaatattggtgactgaagataaattgttttgagataaatccaggccagtaaggtttactggaaagtctgtggagtattcaatttttgcaatattgttagtctgtaggagaagaatctgtgtgttagctggcaatctggctgggaaagttaaaagacctaaatcattacaatccactgtagatgcttccatataaatg

SEQ ID NO: 10574 - DNA, 1996 bp, Homo sapiens
  MAP TO AC004886.1; EXPRESSED IN BRAIN, SIGNAL = 1.1
ctttggcctttcccttcttctctgagctcgaagttcatctttgtctttctttgattttttactagaactctttctttgttgctgttctatttccctctgcttttcttgctcctttaataattcttcttcctctctcaattcttcttcctctgaagaatcttcaatagtaggcaaaagagggccatgtggtctgtgccgagctttgcgttgctgtttgctctctccttttttgtgactcgggctactgtcactgtcctcatcaagtgatgatactgatgtaggggatgtaccaggagtgaagctggaagcatgcagactcgaagatccctctccccttgacctatcttcaggtgagtctgtcaggctttccatttccaattctggctcttcgtcaaaatacaaacttgtttttttctgtgatgactctgcagaatatttatctgctattgtactgttgagctcaattgttttaaatcggcgtagccctcctcctccagtaactacaagttcttcactttcctgacttttagtttctctgtatttaagttcaggactttcatcaaatgcttcatcgtcttcatcatgccatgagtgacgtcttcctgcatcttcatcaatgcttgtgctactttttcgagtcagtcgtctgtgtttccctgctgttattttgccttttccctttgtttcttccttcttctggctctcagtactgctactaatctctttgagctggtttctgatgaactcatcatcttcagaacctgaagcatcttcatcagcactcatttctatgatttgttttcgaatgaagtcctcctcttcccctgatccttggctgtcttcctgtttatactcatcactgcttgatgagccaacactagttcttcgttttctttgtggaacaggtgagttttcactttcactactctcttcaactgaatcataaggctctcttctagtagttatgtcatcaacaaactcagacttctctttatggtccttgctggaaggaatatcttgttggctatcttttttaaaagtgtctttcctttcttcttgactctctttgatctcctcttctgaaatagtaatttccaaggtttcagataaactctgagttttctcttggtctttaggctgttcaggagaaacttcatggggttgtgttttcttttctgacttttcatcagcaagtgtacttgcttgagcttccaaaatagataggactgtactttctaacttagccaaatctgaggggctggaagggctgctttcttgtgaaaaagagtcctttttgagtcccttgagaatatccttttcatcagttggaataagacttggaatttcaccaagtgagcttgatattccatcggaagaatatcccgtgtcgctcagaccttgggggcttttaggctgctgagaacttgaggtgtctgatttgtcatcttccttttcctaagcagggagataaagatacaggaaaacttaacatggttaaactaaaaacatggcctctccattactaccaaataactattaggaactgaaaaataattttggaaaattttttcaaccatatctcagtattttttaaaagtttgagaaaaatattgttgatatgcgttggtaaggttagtttccatttaaactaaatttaattaaatgtcaattctcaatgatatttgatcttctttcataaatactctaccttttcacatttcaatgtcattttccctcaaaaatatgattacttttctcaataaatttgctttaggataaagtttataaattgtgatgaagatatttaaagataaattttctattaacataagttatacttttggattatgaggtcaggtaaagttcaagaaagcatcagacaacgggctttgtgcctggctgcaagttgtaagggatgttggagaatttactaaacaaaaaaaaagcaaataacatgtcataataacatatatgccatgtaccacaaataattttg

SEQ ID NO: 10575 - DNA, 1965 bp, Homo sapiens
  MAP TO AC004886.1; EXPRESSED IN BRAIN, SIGNAL = 1.9
tttctaaggcaataatcttcaccctaatctagtattaggtttctaaggtaccaggagcctgatcgcctcctaaaagtctgaaaacacatgattaataactcatccattgccttccaactgaaaagaatcactcttaccgtatagccctcggtatactgaaaaggagccctggaactttcgtctgctgttggactcagaggcttggggtcagacatagaacgctgcatcatcttggctgtcttaggacttgctgggggaactttagccatatctggatgcagtactttctgtggacttatatcatcagggaggggtttttcataaggtacaaaggctgattctaaggctttgcctggtgaaagtggtgagatgggtgagtaaaggactttgggggatttgggtggggaaggagccagctgtactgtggaatctgcccggaggtgagatgaataaccaatctctaaaggtgttgggcgtttcttgtctttgggtggagatgtggcactcagatattgaggactttgtgtgtctgaatctgcttctgtttgacatcctaaactgccccctttgtaagtcttttcaggtgctgaaatgtgtttaattatttctaccttggcatccactcgtgcccgtatggagggtgttcttatggttccaactggttcagtttgcacagatatctctgctaccgtttgaactgctatgctggagactttggaaaggggtttggtcttgtcagcctctgtcatgctgtcaccatatttccctacacgagctttcctccttgatctagtaggcatatcccactcatcctgatcttcatcatcagtttggacgcttgtatccacactctttttagttctccttctcctactcacatagctccgatctgtggcatcttcgtcatccgtttgtacaccactgtccactatctttttaaaacttcggggatcatctgtcatattttctcccatgtcatcatactgtcctcggactttagctccagaacttctctttttgggttgtttttcctctttcacaacaacatctgttagaggtatttctgaaacagtgctcaggataccaggtggggcaatgtactgagtaacaccatcagactgaacggtgtaccatccttggctttgtggtatttcaattgccacaacagctgaagctgtggtggttgcatcttcagttgcccaaaattgactgccttccagagcagcatactgaccttccaaaattgcctgctctgtagtggtttgtggagaagcagttccagaagggtcatagttatactggtagatctgccgaatcttttgctcctccagctgctggtgaagctgttgttgcagctgttggatctgctcaagctgtaactgttgctgagctaacgtctcctgcctcatcatgaactgggcttgccgctcttcttcttgctgaaagagaaggtgttgcttcatagactgcagctcctccaactttttctgaaccatgatcttttcttgttctcggaacctttgaatttcctgacgttcccactccaattcctcagcaaagcgctgttgcttaattttctccagttccaggagctcacgctccaagtctagctgctgctgttgtttatcttcttcagggacaattaaaagagcactttcatctcccaccacttcaggaaacacttcggatgctgtggttaaagtgggaacagagtctatcgtctcagcagtaagagactccatagtaatagtttgcaaactggcactgatatcaataccagttactgcaatgtccgtttcagatgcacctgttgttataaaatatgatctaggcattggctggctatggtgcatggcaggtaatgaagtcactgcatcagccgtatgaataccagacaaatccctcactgtggtgctgaaaatggagccaggttgtgtggtgatagcaaatgtagagggtgttgga

SEQ ID NO: 10576 - DNA, 1966 bp, Homo sapiens
  MAP TO AC005859.1; EXPRESSED IN BRAIN, SIGNAL = 0.99
ccctctcgaaagctattttgctaaagagctaagatgctaaaagctaaatatgtaactaaatagttgcaaatctcagtaactgacaaatacagtcatggggttggggatgctgtttagacagctgaaaataagacctgaattgtttatttttaaaatgttgcaaaagagaggcagcaaatgggaatttttaattctgattcttggtatgttttagaacaatgatttgttctttcttatactttcaggtgtttccaatgtggacactgaagagacaaattcttatcctttttaacataatcctaatttccaaactccttggggctagatggtttcctaaaactctgccctgtgatgtcactctggatgttccaaagaaccatgtgatcgtggactgcacagacaagcatttgacagaaattcctggaggtattcccacgaacaccacgaacctcaccctcaccattaaccacataccagacatctccccagcgtcctttcacagactggaccatctggtagagatcgatttcagatgcaactgtgtacctattccactggggtcaaaaaacaacatgtgcatcaagaggctgcagattaaacccagaagctttagtggactcacttatttaaaatccctttacctggatggaaaccagctactagagataccgcagggcctcccgcctagcttacagcttctcagccttgaggccaacaacatcttttccatcagaaaagagaatctaacagaactggccaacatagaaatactctacctgggccaaaactgttattatcgaaatccttgttatgtttcatattcaatagagaaagatgccttcctaaacttgacaaagttaaaagtgctctccctgaaagataacaatgtcacagccgtccctactgttttgccatctactttaacagaactatatctctacaacaacatgattgcaaaaatccaagaagatgattttaataacctcaaccaattacaaattcttgacctaagtggaaattgccctcgttgttataatgccccatttccttgtgcgccgtgtaaaaataattctcccctacagatccctgtaaatgcttttgatgcgctgacagaattaaaagttttacgtctacacagtaactctcttcagcatgtgcccccaagatggtttaagaacatcaacaaactccaggaactggatctgtcccaaaacttcttggccaaagaaattggggatgctaaatttctgcattttctccccagcctcatccaattggatctgtctttcaattttgaacttcaggtctatcgtgcatctatgaatctatcacaagcattttcttcactgaaaagcctgaaaattctgcggatcagaggatatgtctttaaagagttgaaaagctttaacctctcgccattacataatcttcaaaatcttgaagttcttgatcttggcactaactttataaaaattgctaacctcagcatgtttaaacaatttaaaagactgaaagtcatagatctttcagtgaataaaatatcaccttcaggagattcaagtgaagttggcttctgctcaaatgccagaacttctgtagaaagttatgaaccccaggtcctggaacaattacattatttcagatatgataagtatgcaaggagttgcagattcaaaaacaaagaggcttctttcatgtctgttaatgaaagctgctacaagtatgggcagaccttggatctaagtaaaaatagtatattttttgtcaagtcctctgattttcagcatctttctttcctcaaatgcctgaatctgtcaggaaatctcattagccaaactcttaatggcagtgaattccaacctttagcagagctgagatatttggacttctccaacaaccggcttgatttactccattcaacagcatttgaagagcttcacaaactggaagttctggatataagcag

SEQ ID NO: 10577 - DNA, 422 bp, Homo sapiens
  MAP TO AC007535.3; EXPRESSED IN FETAL LIVER, SIGNAL = 3.6; EXPRESSED IN BRAIN, SIGNAL = 0.89
ccacttctccaaataacctcctttgacttggaaataagatcatctttcagttttacagatgagaagtcaaagcacaaaattggataattagccaaaagtaagattatacagaaaattcttgacagaaccaaaacttggctgaaccaaaacttgtccaaatttctaactctcagtctagctcagcgagtaatgctgcctgaattgtctgcccccactgtaggttttcagcatctagcagtggagaaaagtcacgaaatctaggcagctgatttagccagatcttatctatgaaatttccctttgtagacacacacacactccacatacatctacagagacaagtcaaaaagagcaagaagaaagcaaaaatttgaaaatcagaaaggttagagaggtttccacggtgaagaaaacttggtcaa

SEQ ID NO: 10578 - DNA, 484 bp, Homo sapiens
  MAP TO AC009484.1; EXPRESSED IN BRAIN, SIGNAL = 0.97
tgcctccccattcttctaggaacaaatccaaactccttaccactgcttcaaagtctcttcagaacatcacctctgcctgcctctccagcctcagtggctcccttcttcctttttagcttctcaaatatgccaaacgcttttgttttggaggttttgccccatctgttccctctgcctaaaacgtgtgttcccctcccttttcctgacttccccaaccttcaagccacaccaaaatgtaccttcctcagacagttcttcccaagccctctaatacacacttctgaagctgcaatgtccagtgcagtggccgccagccagatgtgaccactgagcccttgaaacacagtgagtctgaagtgagatgtaagcatgcaaacacatgcccaagtatgaagatggagaacaagaagcagcatgcaaaatatgtcagtaacatgttttattaatatattggttatatgttgaaatgagaacattttggatg

SEQ ID NO: 10579 - DNA, 1970 bp, Homo sapiens
  MAP TO AC006385.3; EXPRESSED IN BRAIN, SIGNAL = 6.5
tcgttccctgtaagtttggagcaagcagttacagattcagccatgacctctaaaacactggagaaagccatgaccgaaccatctgcattaattgaaaagagctcaattcaggaactttttgaaatgagagttgatgacaaagataagattgaaggagttggagctgcaacatcagctgagcttgatatgccattttatgaagataaatcaggaatgtccaagtactttgaaacatctgccttgaaagaagaagcaacaaaaagcattgagccaggcagtgattactatgaactgagtgacactagagaaagtgtccatgagtctattgataccatgtctcccatgcataaaaatggtgacaaggagtttcaaacaggaaaagaatcccagcccagtcctccagcacaagaagcagggtacagcactctcgcacagagttatccatcagatttacctgaagaacccagttctcctcaagaaagaatgttcactattgatccaaaagtgtatggagagaaaagggacctccacagtaagaataaggatgatttgacccttagcaggagtttaggacttggtggtaggtctgcaatagaacaaagaagcatgtcaatcaatttgccgatgtcttgcctagattccatagcccttggatttaactttggtcggggacatgatctttctcctctggcttccgatattctaaccaacactagtggaagtatggatgaaggggatgattaccttccagccaccacacctgcactggagaaagccccttgcttccctgtagaaagcaaagaggaagaacagatagagaaagtaaaagctactggagaagaaagtactcaagcggagatatcatgtgagtctcctttcctagccaaagatttttacaaaaatggtactgtcatggcacctgaccttcctgaaatgctagatctggcaggcacaaggtcaagattggcttctgtgagtgcagatgctgaggttgccaggaggaaatcagtcccatcagagactgtggttgaggatagtcgtactggcttgcccccggtaactgatgaaaaccatgtcattgtaaaaacggacagtcagctcgaagacctgggctactgtgtgttcaataagtacacagtcccattgccatcacctgttcaagacagtgagaatttatcaggggagagtggtaccttttacgaaggcactgatgataaagttcgaagagatttggccacagacctttcactgattgaagtgaaactggcagcagccggaagagtcaaagatgagttcagtgttgacaaagaagcatccgcgcatatctctggtgacaaatcaggactgagtaaggagtttgaccaagagaagaaagctaatgataggttggatactgtactagaaaagagtgaagaacatgctgattcaaaagaacatgccaagaaaactgaagaggctggtgatgaaatagaaacattcggattaggagtaacctatgagcaagctttggccaaagatttgtcaataccaacagatgcatcctctgagaaagcagagaagggtcttagttcagtgccagagatagctgaggtagaaccatccaaaaaggtggaacaaggtctggattttgctgtccagggtcaactagatgttaaaattagtgactttggacagatggcttcagggctaaacatagatgatagaagggcaacagagctaaaacttgaggctacacaggacatgaccccctcatccaaagcaccgcaggaggcagatgcatttatgggtgttgagtctggccacatgaaagaaggcactaaagttagtgagacagaagtcaaagagaaggtggccaagcctgacttggtgcaccaggaggctgtagacaaggaggagtcctatgaatctagtggtgagcatgaaagtctcaccatggagtccttgaaagctgatgagggcaagaaggaaac

SEQ ID NO: 10580 - DNA, 1907 bp, Homo sapiens
  MAP TO AC006531.1; EXPRESSED IN BRAIN, SIGNAL = 1.5
actggtcgttgttggaaagcccctcttcattatgcaaggggttccggttcattggcagcgtggagtcccccttgcggaagttttcactgggatcctggtaggggtccgggaagtccacgttctcgggcagggtcacattttcaacaaactggggtggatctaagtggaaaccaggctccttctcaccatctatagtgtagatcttgtctctaggggagcttgatttggttttcaggtaggtgcgctcgacctcactacagtccttggggtatttggaggccactgaccttttaaagttgtccttggttttgtggttcttactgttgtcaggttccctgtggcacgtggcccgatttgacgtttctgaaatgtcagagtgggccatctcttctggaagatacctagggctctttagggagtgggtcctattctctgctgttgcctcatccctctgggagactggattctgggatagtgaatcctggcgtatggaatccacggatttcttccacagctgccggggtctagagttcgctttggattctgtgctcacggccacctccaccgtgttagggttggactcattgagagtaagaggatgttgtccctggaatacatagttattgaggttatccttctgccggttggccacaaatgtttggagttcgttcatgttgtctccaaaaatgctctctttcccctgaaaggacctgttgtctgagtacatcaaattccccttatctgaaaccatgtccatgatgagggaacctctttggatgaagtcagcagctcttttgggtgagtccattcttgaggagttcatgttggacatgctggaaatgtttttggctgaccggaggagttttaacatgttgctctgggatcccgtcagattgaagtctggagacttcttcttttcttcaatgtgcactccatgaatgcagctgtagatgccctgtaggggagcaacataaagcactgtcagcagcagcagcagtgaacatgaaaccactttgcacttgaactttacctgcaaaggtgagatttgcacttcttgcaggagccctggagaaacagcaaaattcagtctgaatcctgataatgtctcttaaaggtatgagacaagttgcaaagcatagggtttatcttattgctctggctcaagattagctgacacctttgcaaagagtcacacatggagtttgagaaaaggtatcaaccgatgctcatacaactgtcaatgcctcagtgtctccaaagtggcatataagaacagataactgagcctcccagcacccgggtcaccaatccaagctttcattaaagtttcccagcatcatctttgaaagtttaggcaccagagagttaactactgacaaacacagtcagcatgaaaggatcatccattgttaattcttttctggaattacccctactcttatgcaaaagctaacaatcaaagaatgtgtcctaagtggccaatcagaaaatctcttctccatgcacacattgattcatctaaaggaaggcatgaaattcatgtgaggctcatcatactctttgagggggggatagatgtggatgcttggatagaaggagttgcagacttaccatcatgtgggggtgtgagcctatcagtgaagccattgcagtgaaaagtagagcccaagagatagagaaagacatggtttaaacccctggagccactcccttgaacttttttacttaatcgactcaatctattccttgtgtgtttgtttgtgtgtgagtctattcaatgtagttagaactgggttttagttactagtcacagtgaagagttctgatgacacagtgacaccgcctttaaatccatccagggaactgaatgacttaagggctcctgggcagcccaaatacaagcacct

SEQ ID NO: 10581 - DNA, 1976 bp, Homo sapiens
  MAP TO AL022143.1; EXPRESSED IN BRAIN, SIGNAL = 1.6
tttcatggttcagctggttctttttcttaatctcttccttggctcctttctttcaattgcattcattttagaaagcaccaatcaactttacagatctgaggctgcttagttgtagcctccctgtgccagtgtgtgtgtgtgtgtgtgtatgcgtgcgcgcacgcacgcagtagctgtttctctctcgcctgcttcagctcgagcctcgaggtcccatctactggatgctgaaagtctcgtgggagcacaccctgttggcactaaggtgagggcttagattatctttgtaccccagattcatggatcccctccttgcccagtgctgaagtgggccgcccattagctacagagtttgccggtctcatattccacagggtttggcagcttagaattgaaagccctcagggaggactggatcctgcccacctcattgttggccagcttaagccgatgccggagcaagcaggagaaaaggtcaagtcggactttgccaggtggagaaagctggttcacccggtccctgagctcaatgagctgcaagagtgcagagtcctgggaaccttgagtatatgggtagtccaactggagaattaagtcccggatagcatctgggtcaaagggcaggctgtagccaaagacctgcaaggtgttaattttcatgtaacccaaattcttagagggatcagtcatctccaggggctcatagtagattgtctcattggagctgtcatccagggacttgattcggctccgtaggtaaacatgaactgtctcaaagaaagtcttccacctattccccaaggtgatagtccagttttggcactgggcagctgcatccacgttagtcctttcccagtcaggaaagctgccctcattcacaggcatgaaccagctctcagagtggctgcccccaaaggggttgacgtagatggccatgacaggctccagggtgctgttcttggtgagacagatctgcaaggacaaggccaacatcacgtgcaccagcccaggcttgtacttgttgctcttcagggtgagcagcatgcgcttcctccaggaagggtcaaaccagctgcccagccgcatgtcattgctgatgaagatggagtgtacctcaatgcggctatcctgcttctgcagcaggtactttagctccaggtcctgcaagtctgtctccagcccaagaaagttttccagggactcggccacctctggccggcacagcccctgggccagcacatagcccgggttgcagctcccacagcgtgtgctattgtctggagcacagtgggcacacgcgggcccttcgcccaaggcacatgggatggggccctggcaggaagattggtcataggggcaggtgcagctgtggctctgttccaggaaagtgccaggaaaggtgctttccccacagtagaggagggactggattcggttccaccagtaggacaaggaccttggggagcagagataaaatgaagtaagagtcaaaagaagtcacacactgacacccttcttaagggcagcaagacattgaccactaggcgtggaaggcaatgaggaaaataaaatccccaagatctctgagtggcagaaactctactttgctactttggactgattgagcaaagcctagagctctgtgtctgatgggtcagcaccagaaatactggacaccaaatttgtactgagagcaacaaggctcatctctcccaagtcctacttcattcccttattcaaaaacctacagaggatctccagcatcttttgtgtcaaatctgttttcagccttctaaataagatggttcttcaaatcttctaacttcttgccaacttccattccctcttcaaggtttctgtcctttctattctctctgctcctctcactcctccaccaagaacagaaattttatatggctgattctcttaaaattttgattttagctcttatgttacctcttcaaagaagtctttcc

SEQ ID NO: 10582 - DNA, 495 bp, Homo sapiens
  MAP TO AC010724.1; EXPRESSED IN ADULT LIVER, SIGNAL = 0.94; EXPRESSED IN BRAIN, SIGNAL = 0.97
tgagcttccaacaaagttcctacctcactctcacttcttatcacctcctgtagtctccaatagctttttctcccactgcgtgggagatggtgggtagagggctagatacagaagggccagtactcgtgacttgtctagaaaaagatattatggtgctggtatatgctgatctgcagacctgggtcaggcctctctcctcactcccatggggaagtatcacaatcttggtctactcccaggggccaaccaagctttcgcacacagaagtgggacacttaccaatgggatacttgtgcttatctgtgtcaatcccggcatacaccactccaccaaataggtcgttcaagatggctgccagggcctcagcatttagcattccatgcagagcaccgacaaacaccgtcctgctggggtcaagcctctgagatgggctccggacaaagttactgtcggctaatacccaggggatcacctgcacctgaaaaccacccaaag

SEQ ID NO: 10583 - DNA, 446 bp, Homo sapiens
  MAP TO AL009182.13; EXPRESSED IN LUNG, SIGNAL = 1.3; EXPRESSED IN HELA, SIGNAL = 1.3; EXPRESSED IN BT474, SIGNAL = 0.94; EXPRESSED IN BRAIN, SIGNAL = 1.3
cccctcaaaatgatgtacggtggtaacttcctcccatcagccaagacaccaagcattgctgtgattttcagtttttccctgcctggtgtcttgaccaagacaggcttttcgccctggttatcaacagttacccgtgatggcacctctaaacaaatgggcgtctcatctgcattccccatctgagctacctcatagtcatgcgccctgcgcagagccaggacactgcgctggtaagtgacgagtttctcagtcaggtcttccggcaggtgctggggcacgggcactttatgcctcagagacaggtcataccttctcatcattcttcgacaccaacccaagcttgccttgaaccctttctctggaatgttcatttcctgggcgatttcgagagctttcagctgcatcgcctcccgggtgatggggtcccctttggcctgcatgtatct

SEQ ID NO: 10584 - DNA, 480 bp, Homo sapiens
  MAP TO Z98884.11; EXPRESSED IN ADULT LIVER, SIGNAL = 1.2; EXPRESSED IN FETAL LIVER, SIGNAL = 0.59; EXPRESSED IN BRAIN, SIGNAL = 0.9; EXPRESSED IN PLACENTA, SIGNAL = 0.66
ttcataaacgtctaagggtattgctattaaaatttttctccaagaagggcaagatattttgatattttagggaaaaaatatatgtctgaaggcaacccttaaagtaatattttacattttggaaaggtaggtgtaaagattcctcatttgcctcttttgtgattaaaccccggacagagaatgtgataatagaggggaaaagcattttctcttcttcccttcccggtaagctcgaaggacgctgagcccgtgcagcccctgttgttactgtgtcgcttgttcttgtttcccctgcagtacgcactttataaaaagatgacacaggctgccatccttatccagagcaaattccgaagttactatgaacaaaaaaaattccagcagagccgacgggctgctgtgctcatccaaaagtactaccgaagttataagaaatgtggcaaaagacggcaggctcgccggacggctgtgattgtacaa

SEQ ID NO: 10585 - DNA, 466 bp, Homo sapiens
  MAP TO AL078599.19; EXPRESSED IN BONE MARROW, SIGNAL = 0.94; EXPRESSED IN BRAIN, SIGNAL = 0.99
tgggtggcttactaaggtgtgacctttactgggagcacgtgaaaacaacgtatgcaaaaagttatcctcctacttcagccctggtggtttcctagttctgttaccagctacctccttcaaaaaacatgttttcttaacatgacttgagctaaatttactttcctggtaccctaaagtccccaacttgaaaagtagtcaagtgtcaagatttatgataatttatcataagaaataaccaagtactttcctggagcgtgaggttctcttcatgagtacaacttttgtacgttagcatggaactgtattcatcttttatttcaagttatttgtttctgtccatatttctttagctaagtgtaattgaagttagaagacagaatttcatccacaggaagataatcctcatgagtaatcttaccccacttggcttctgtttggtaagcaaggctactcctgacacatgtgg

SEQ ID NO: 10586 - DNA, 491 bp, Homo sapiens
  MAP TO AP000159.1; EXPRESSED IN BRAIN, SIGNAL = 0.75; EXPRESSED IN PLACENTA, SIGNAL = 0.91
ttccctaatgagggttttgctactgagtaagagacttcaacagatcttctaaacaagtatcattaagcttagtggaattttttaagtactgggctgagtatatagtacctttaaatttaagcaataaataaataaacaggtagttgtttttaggttctaattttaagtgtcctgctaattgtgatgatatcaaggctcaattacacacccagaatgactttcattattaaaggacaatccatattgcaaactcaatggctacatggtctccctgcttccaccctcactccttttgttaatctcagccagaaaaagcaggttatatcctgtcacatccctgggcagagtttccagtgcctcttcctcccgttcataggaatggcctgagtccttataggcccctgcatgacctcgaccttcatcagcccccagtgcttggatcatgtcacctcccacttttcttctcactcactgcttctcatccacactgg

SEQ ID NO: 10587 - DNA, 476 bp, Homo sapiens
  MAP TO AL049556.13; EXPRESSED IN BT474, SIGNAL = 0.67; EXPRESSED IN HELA, SIGNAL = 0.67; EXPRESSED IN BRAIN, SIGNAL = 0.73
tgctgctggtgtacagttccggcttactggacaattttagttcaggtcaccaaagccaccttctggcaaatgagtctttgtaattgagagaatttccatcagtattctatgcccataaataagaggaaaccctctactctaaagggaagtaaagctcattttctaagtctgttacctgtgggtgttttaaccccttgccacctcagacaactcctaatattccaatctcactatctccttgtggctatttaaatttgaacccgctcctggttctctctgaactagaaatactgaagccgtggtgacaactttattaaactccttctccttcacctgcagagggctgtctgctgagccccatgggcagctgcagaatcatgaacatcatgccaagaacagatttcttaagaaactttttcctgtgggaagaaagatccctcttccctccttccaaaaccaaacaaaaagcaaaacgg

SEQ ID NO: 10588 - DNA, 400 bp, Homo sapiens
  MAP TO AP000022.2; EXPRESSED IN BT474, SIGNAL = 1.2; EXPRESSED IN BONE MARROW, SIGNAL = 1.1; EXPRESSED IN BRAIN, SIGNAL = 1.1
caagaagtggcaattcctccctagaaaggtcacctttcatagacatatacacacgtgtgcatatgtgtgtgcacacaagcaaggctgcatgtttgcctggacatcctctttctctctgtctctctccatacgtagtgtgtgtgtgtgtgtgtgtgtgtgtgtgtgtgtgtgtgtatttttctctatgtggcaaaataaagagctggggctacatactgctgtctcacatattttttaaatatttgtatttttaaatacaggtgtatttttcttgctttgctgtcgatccgtgaacatgtcctcatgcatagacctctgccagctcccatttacaagccctgctctggacaaaggagatgtgatcaatgccacaggtgggggagaagagctccctgaggct

SEQ ID NO: 10589 - DNA, 363 bp, Homo sapiens
  MAP TO AL031983.1; EXPRESSED IN BRAIN, SIGNAL = 1.1
cccatgaattccatctgtcctgactggctggaaaaggccactcagaaatacaggggctggggagaaacttagaaggaagaattgtcagcctttcctactatccccaagacttgtagatttctctttttagttctactgctcttccctgattcccaagaggctaaatagtatcaagtgagataagacaaaaacaaacaaatgagcaaacaaaaactcagccattctcctctgtattcaggtgtacaaggagcgtctctttgggaagaagtacgtctggttcctcattgggtggtatgctgacaattggttcaagatctacgacccttctatcaactgcacagtggatgagatgactgaggcggt

SEQ ID NO: 10590 - DNA, 384 bp, Homo sapiens
  MAP TO AL034425.6; EXPRESSED IN BRAIN, SIGNAL = 1.3
tgcattcatctgtttcctgctggccagtcaaatgccagatgttacccttccagcagttcttacatccaatgatgtttgtttaaaaatttctgagcatcctaaatgtgctgtacaacatggaaggtgaaggggatagaaagaataatttactcctgccctgaacaaaaagtgactgtccaactccaggcattcaatggctggacacagtacgaaggggcttctttattggggcttacattctggtggtaggggcttatattctagtgggtaggataacaagatttgatcttgggccttggggatggcaccagcaggtccacccgaacatttgtctctgccctgctgctctgcccacctggcctcacgttggacacaggcatgtat

SEQ ID NO: 10591 - DNA, 474 bp, Homo sapiens
  MAP TO AP000175.1; EXPRESSED IN BRAIN, SIGNAL = 0.69; EXPRESSED IN BT474, SIGNAL = 0.63
gcacactcaagggttaaggggtaaaatgtcatgatgtttgtaatttaaaatacttcagcaaaaaaaaaatgcaaggatggcaaagtgatcactggtatatctagatgatggtatacataaagtgattgtactattccctccgcttttctgaatacgagaacattttcaaaataaaaactcaagtcagtgaatgaatgagtgaatgaatgaagctgattgtgcccagggggtctgtgtggggctctccgtgaagtgcaggggtgactggtcctctctctctgcacctcgcaggatttctctggaagatctgagcccgagcgtcgtgctgcacatgaccgagaagctgggttacaagaacagcgacgtgatcaacactgtgctctccaaccgcgcctgccacatcctggccatctacttcctcttaaacaagaaactggagcgctatttgtcaggggtaagtgcgaccctagaggc

SEQ ID NO: 10592 - DNA, 473 bp, Homo sapiens
  MAP TO Z83844.5; EXPRESSED IN BONE MARROW, SIGNAL = 0.9; EXPRESSED IN BRAIN, SIGNAL = 1.1
cgaggatgactccaaagagggagcatttgggggctctgctaggaatgtgtgtagaagtccacaactcattccctttgcttaagctggggtcacaaacctaacgccctgaaggccaggcaggtaacaatggtgagaaggtgggggggcaccgagggcacttgtgtgactcctcggttccagatagctgttgccatggggaagacgggcccagagtttccacatctttcgatatttcaagaaacactggagatatgtatttatatgtgaaatctctaacctaatgtgaaatactctgaaaacactatgtgggcagaaacatacctgtggtctgcaccccctccagctggcgcccgtggtttgactttagggtgatgacgtgcacaccttcaaaggtgctgagccctgggagccttgtcagtccaacacgatgtagtgtgaacaagttaaccagctcgtctcggcagttctgggag

SEQ ID NO: 10593 - DNA, 471 bp, Homo sapiens
  MAP TO AC008085.1; EXPRESSED IN PLACENTA, SIGNAL = 0.7; EXPRESSED IN BRAIN, SIGNAL = 0.7; EXPRESSED IN ADULT LIVER, SIGNAL = 1.3
ccgctgacatttttcatgtgatacttttagttctttttgttcttggtcagtcccttttagatagagggagtcaggtaagtgctgtaaataaataaatagcattgcccatcacccagattaacccttgggaattgtgtctctattccattgtgatttgtttgccagcgctcaggtaatgctccttttttttttttcacatgccttccttcataaatatttatcttttgccatcaggacaccagggaggatggaactctgagatggaaaatccatcaaaatggcaaacattctagcaatcacacttctaagaatctgtcccaaagaaatcatcagagatgtgcagagatttatgtacaaggatgtgcatcccagtgctatttataacagtgaaatattggagactctccaagtgtccatcagtgggaggatggtaaatgatgggacattcctcaagtggaatattatgtgaca

SEQ ID NO: 10594 - DNA, 427 bp, Homo sapiens
  MAP TO AL031301.1; EXPRESSED IN BRAIN, SIGNAL = 1.6
agcagccatctgtgaatgacacacctgactgttcacctctgtggggatataagtatatgcatatggtttatatgaacagtcgatgaaccagaatacctcatttcccaaccattttaggtcccaggaattgttggaaaagacaaagctttagttctttcacatcttgaacaacactgtgatcattgacatcaacatagtgacgatgatgatgatcagatacatcatcatcatcttcttcagcaccatcatcatcaatatcaccatcatcatcaccctcatcaacagcaccataacagcaccatcaacattatcatcaccaccatcaacattatcatcaccaccatcaacattatcatcaccaccatcaacattatcatcgccatcaacattatcatcacccccatcaccctcatcatcaatagcaccg

SEQ ID NO: 10595 - DNA, 491 bp, Homo sapiens
  MAP TO AC006390.8; EXPRESSED IN HELA, SIGNAL = 0.7; EXPRESSED IN BRAIN, SIGNAL = 0.86
tcagaaggtcccatgtgatgtttttattcctctctctcttctcctcttcttctctttcctcttcctcctcctcttccttcttcttctcctccttttgcccttcttctttctcttaccctacctcttcccctccacttcctcctcctcccccttctccttcttcttctctctctttctccctcttcctctttctctttccctccttcccttgcactccagctccctcttcctccctgtgtttccctttctctctctctctttcatgcagtggaggctgcagaccctgaaaatgcagcagtgcagactgtagtatccatgcacatggtggtggctgctgtttcttctgtttctgatcaggccttcaccttggagttggtcatcctttaccaaatcttatcctcaagctcattctccagcactccagtgtcaactgtgaaatagtcaataatcttatttatttatttatttctaaagatgagggcttgctattt

SEQ ID NO: 10596 - DNA, 478 bp, Homo sapiens
  MAP TO AL023513.1; EXPRESSED IN BRAIN, SIGNAL = 1.1
ttgccaagaaaagctggcttttatcatagacagccctacagtttccagtggcaaaaagtcagggctctgaagttacgggccatgggaaggatccatataggatgtggaaaggcattaaaacacaacaactccacagggtggagaagacagagattcttactcctattttagatttttttaaatgaggtcccaaggagtcaactgggtggccccagggttctcaacacgtcagctggaaccaggacacgtaatttggtacctgttttctttggggcttttctaaacagcacaggggacccatcttctgaaatatagcaccgtggggtagtccctgcatcatctgaactgctgcctctctttcccttcctcagcgtttgagaaaggccactgctatgagccctacatccagaatgggaacttcactacatccgacccgacctataacattgggactatagtggagttcacctgcgacccc

SEQ ID NO: 10597 - DNA, 476 bp, Homo sapiens
  MAP TO AC007237.3; EXPRESSED IN LUNG, SIGNAL = 0.68; EXPRESSED IN BRAIN, SIGNAL = 0.73; EXPRESSED IN HELA, SIGNAL = 0.61
tcataattataagagattgtagggtgctattatttaatccattatttgatttatagctgtattctaggaggcttaactgtattaaggcactatcccactattctctcacaaataaaaaagctgttaccagaatttcatgtttttttctttttttttttttttccacgtctaacttgctacatcatttatatcccgctatgacctttttggcactgttgaaagaaatgtgtgaaactcactcaatgaagtagacttcgcccttctctgtataggccatttcccagttatcaggcaatgggtctggttcctcattgtcttcaggtttagttggctttgtgtcatccatctgctccttcagctcctcaggctgactgtacactggtgcaggataaggctgggagggcatctcccctgaggcacctgcacttttgtcttcatgttcactggattctataagagaacaagagcacgtggtt

SEQ ID NO: 10598 - DNA, 453 bp, Homo sapiens
  MAP TO AC011425.1; EXPRESSED IN BRAIN, SIGNAL =   5; EXPRESSED IN ADULT LIVER, SIGNAL = 1.1
ttcctatttgacacattgtctggatgtgtcaatgtcttgaaactggcttagttcccaccaagcctcactctcattctggggtcgagtctcggggagagatttcacatgtgttcacttgcccattggttctgtcattcacttctctgaggcagtctcatttccagagagtcctagagtaggtaggtaggaggtttggacctcactgatctctctaccccaggacccatctgtaaacttcctaccttaagcagtgatctggaatatgaagcccacccccagggataacatccccaacaacacatacattctctctcagtgtctctgggatgctggcagcaagctcaaggaactcctgctgctccaagaggccactgaacatattggtaaacatgctcaaagccactggccctgtgttgctgtgctggataatacctttttccagtgaaccttctc

SEQ ID NO: 10599 - DNA, 468 bp, Homo sapiens
  MAP TO AC009817.2; EXPRESSED IN BRAIN, SIGNAL = 0.97
  unsure 139
gcaagcatgacttctctcctgaacaaggtaatgtcttatgggaatgagtggtaaatgcataagccctactttagttcacagtgtatagttctcctaccccagaaaataggatcatataagatgatacaagcatgagtanggatgttctggcaacagagaacctgtgaatgcttcttagaggtgttgctacttgtgctaggatttgaaggacaagtagatgagccaagtgatgaagagatgacaggatcacaggaagggaggaaagagattatatgaaggcaaaacggacatccgctattgctgtagaggtaatatttgtagccctgcaaaatttaaatgttgaaatcctaaccaccaagatgatgatattaggaagtgggacctttgggaggtgactggatcatgagggtagagctctcatgaatggaattagtgccattataaaagagtccccagagaagtgccttt

SEQ ID NO: 10600 - DNA, 1904 bp, Homo sapiens
  MAP TO AC004074.1; EXPRESSED IN BRAIN, SIGNAL = 5.6
tctgaggactgtgatgatgaggaaatgtgtcatgaagagatgtatggtaatgaggagggtatggtacatgaatatgtggatgaggacgatggttatgaggactattattatgattatgctgtggaagaggaggaggaggaggaggaggaggacgacattgaggctactggagaagagaataaagaagaggaggatcctaagggaattcctgatttttggctaactgttttaaaaaacgttgatacactcactcctttgattaagaaatatgatgagcctattctgaagctcctgacagatattaaagttaagctttcagatcctggcgagcccctcagtttcacactagaatttcacttcaaacccaatgaatatttcaaaaatgagttgttgacaaagacctatgtgctgaagtcaaagctagcatattatgatccccatccctataggggaactgcgattgagtattccacaggctgtgagatagattggaatgaaggaaagaatgtcactttgaaaaccatcaagaagaaacagaaacatcggatctggggaacaatccgaactgtaactgaagattttcccaaggattcatttttcaattttttctctcctcatggaatcacctcaaatggaagggatggaaatgatgattttttacttggtcacaatttacgtacttacataattccaagatcagtattatttttctcaggtgatgcactggaatctcagcaggagggggtagttagagaagttaatgatgcaatttatgacaaaattatttatgataattggatggctgcaattgaggaagttaaagcttgttgcaaaaaccttgaggcattagtagaagacattgatcgttagagcagagtatacatggccctgaaattaactgccctagatatagttactcaaggtataagaagccttgtgttctgtatttttcttgtagtgttagttaaaacatatgtttcaaaaatataagaaaagttcaaaaactaattaatttgaccttgagttttagtagtagaatgttttcaagaaatgtacactgtggtaaatgatttaaaacactagtatagtgttgtgtagcttaatccttctgaagtctttttgtcatgtagctattaatctgtggctatgaaatgatcagaaatgctaagtgagatcaatatttgtttggaaaaaaaatcttgggaaacaacccaagggttttcgctgttgttgtttttctttttctatttttgtttacttagtcctttagctagtggatttaattttgttgtgcctgcttcattttgcaataacaatgcagtagaatttaaaacttggatgcttaagaggcctgcatatagataagaatttcaggcaaaactacatttattgttaataacagcttgttcataggctcttgtattttatgtaactgtgataaataatgaaacttagttatattgaggttattgtttgtcggtgaagtgttagtcacagtattttcaaaagtttgcacatattgttctgtgtaattgtgtaagccataattacagtgtttaattctcttttcctattacatcattcattgaaagtgatcactttaccattttgaaaagatatttcgtgttctttcactgcaaaataaaaagaataaaaatttcagagtgtctcatgtttaaaacttaatgtatttcttgttataaaagtaatatgttcattgggggacatttgggcaatactgaaaaaattcattaattaaacacaaaatccatataccacccacctaccccaaaataagcactgttaatgttttgatttattttctacaattatatttctatatgtttatacacgcatgcagatttactaagactatactaaaatgtgcaaagaaagtatacctt

SEQ ID NO: 10601 - DNA, 458 bp, Homo sapiens
  MAP TO AC010149.1; EXPRESSED IN BRAIN, SIGNAL = 2.6; EXPRESSED IN ADULT LIVER, SIGNAL = 1.6
tcacatttcttgtctccctgcattttaaaagtgaaggtaaagaaaatgtagaaaatagaatcccaggttaaagtgaccccattgcaagaacagtatctctgggaataaactgacaatccacagctggcagtctgaggtgggagagtcactatgttccagtcactattaccagaaattgagagcaattcatccgcatggagcatcttcactcagtctggctcccctcttacaccttcctcttgttcctgttttccccttcccacttgtccttacatgtttattatacatctgcctctgtttcaccatgaagactttggaagccacgtgtcaaagaaagcaggactcccatcagccagaatccctaaatggctgtgtgactcaaagaaccctgacaaccagcaaccaccttatcctgataatgtgagcaagaaataatctccttcttgtgtttgagccaa

SEQ ID NO: 10602 - DNA, 480 bp, Homo sapiens
  MAP TO AC011406.1; EXPRESSED IN BRAIN, SIGNAL = 0.9
atgcaggcatatcaatggtgataaatccctcccccttcctagccccagtctttgctcatttccttcatgtaagcagtggcttccttggaggcctcttcccttccaacaccctcccctaacaagggcaggtcctctggggtagagattggcattgtcctctctctgactccagccggtattgctcactcagccaggcatcatggactaggacaaggactccacgggagcccactcccagaggggccccaggaagccaggcaatgacggagtctctctctgtcctccttcttgggcagggggaaggccgcgtggtgtacattcaaaatctctccagcgacatgagctcccgagagctgaagaggcgctttgaagtgtttggtgagattgaggagtgcgaggtgctgacaagaaataggaggtgagttgaaccaagccatggcaaatgaagggagcagagaggggcactggtcctgatccaga

SEQ ID NO: 10603 - DNA, 475 bp, Homo sapiens
  MAP TO AC010083.1; EXPRESSED IN BRAIN, SIGNAL =   1
aatcttcagtcatacactggtgcactttttcagaactgaagagaattccactagttgttggtcatagcctccaccctaggagacaagggctacttagcagttccagaagaaagcagattagagaactagatgcacaggtggtgacagaaaatcaatacatatgtaaggggacagagagggtcactgggttggatactggctaacatcctagtgaataatgaggatacaggaattcatcttttatccagagtctcaagatgggaaatgtccaaaaggacataaagacactcaccagataccactgctttgtaaaaagaggatcgttcatgttgatgtcgatctcattgatgtctctgtaacctcgcttttttcggtcaaatccttcctgctgcaaagccatctttacctggaatgacaatgctgacatattacctgaatataatctgaacattctgtcttctggaatttgtttcca

SEQ ID NO: 10604 - DNA, 500 bp, Homo sapiens
  MAP TO AL078602.10; EXPRESSED IN BRAIN, SIGNAL = 0.98
  unsure 373
aggtcactttgccctcgtagaagtctcctagtggtgatgttgaatggtgatacgagatggaaatctggagtctattcctggaacctcctctgactcatcccgttatccggggacgattatttcatcattactcttgcatctgaaggatgtggatgtatattaatgctctaaccttcacgcatccttgaatcctgagtagtctgctggagtctgtcctgcagcagcttcctggaagagtggccagcccgctgcgtggagggacttggaggggtcaaggtctcagcagcagggcctggggtgactgcagaggccagagatgctcttcaggctgtgcctgaggcatggaacggtctgcaatgcctcctgagcttangtctgggcatgtgccaagtgactaatcgtatgatttttataacaggttagaggttctaaggacatatgcatgttaaaacctttacaagataataggttcctttgatttaaagaaatattggtgtggg

SEQ ID NO: 10605 - DNA, 485 bp, Homo sapiens
  MAP TO AL121796.1; EXPRESSED IN BRAIN, SIGNAL =   1
tatctgcaccccagactgcctgtggtgctgcagagtggtgccgaggacggagcagggcacacctggagtctatatcacctgccttccctagggagtcttgggccctctccacattcaaggcgaggggagcaggggatctccacgaagaccccctgagcacctcccttctctttttgctgataaataacccaaggcttaaggggttttggaaccaagacatggtcactgatgttagaggaatggctcgctctccctcctagcatccctaccaggtaagggggggcaattggttgctccaagcaccctggttgctgtaggaaggagaatggagacatcgggctgagcccactggcctccttcagcgctcgggctctcccctgcagacagccttcctcagcagccgcacagctcagggcttctcctccctgggtgccagtaaccccaggtaagcctctggctgcccggcaattccaatacccagaggg

SEQ ID NO: 10606 - DNA, 452 bp, Homo sapiens
  MAP TO AC008080.1; EXPRESSED IN BRAIN, SIGNAL = 1.1
tcccaatgagaagagaacccatgcttattcaggcttgcccatttgggcaggtctttgcatgtcctggtagtatccaggtgaatctccatggtccaatgtcagcttggtttctgcactagcatctagtccctctatgatcatcagtgtctgagaagtctgagtcccagttaaggttaactgtaaaatcctgtctgttggtacaattcattaaaagacaatttacctataatagctacttaatgtgtctgcagtatattttcaccatagacagaatcaatagagatgatcaataaaaagaattatcacaaatttcctgacaactccatggtggcagcagctgggaagccacagcaaaggggtgggcctgttggtcgggctgcacggggtgagagtttgtctctcagcccttggaagacagtctagactggttatcttgtagtgccagccttgtg

SEQ ID NO: 10607 - DNA, 407 bp, Homo sapiens
  MAP TO AC007115.1; EXPRESSED IN BRAIN, SIGNAL = 0.96
cccttcattcattgttcatccatctgtaccttttccattaattcatttaactttttaaaaaataaagcttctactatactccagaaatggcttaggtgctggagacactgtagtgaacaagaccggcaaatctttatcctaacaaagttgacatttataggggattcaatcagcagataaacacacagtctatgacatgatgacagtagtgataagcgctatgaagaaataaatgacctgaaggactatgaagaaatggagggagtggtgatttttttgggtgataaggaaagacttgtggggagcagacctaactgtcattataacatatatttggacattaatttaaatgttacaatacattagataattcaaggaatgttctttaaggattattttagctcaaa

SEQ ID NO: 10608 - DNA, 450 bp, Homo sapiens
  MAP TO AB020861.1; EXPRESSED IN BRAIN, SIGNAL = 1.1
gcacaatctccaaaatgaagccacattcatttgggtgcccctgtgtgcccagcacaatgctaggggcaggggaaatatgaaatgtacttgtatagttggaggcttcaggtgcactagacctccaggaagtagccagcagggtgcccagacactgactatgccaagaggaaccgcccctttgcagatgaagcaacctgcacaagagatggcagtcggctagcctttgcctgtctccagtttcacaactcaggtgcaaagacatgcatcgcaacggtgacacttactttaggccgggtgtcaacgacataaacgaagtcacttcctggattggctttcctaatggcctggagcatctgctcgtcctccaggcaccgggcactgaagccggacaggggctggctgctccggcagatggaggcctagggggagaggtcacagcaacacaacacc

SEQ ID NO: 10609 - DNA, 463 bp, Homo sapiens
  MAP TO AC009481.1; EXPRESSED IN BRAIN, SIGNAL = 0.91
tccccaaatctctggaaaccagatgagttttgcaactcagaatgcagaattaataaaggcaacagggtgcatatgacagatattacagaacacccaccaaggtctggggtggtcccttagaatcaaacccaatatttctgcacccaaaatagaaagatttatattaagcaagtaaagcctataaatagtttcaatttgaagtcgcagatcaaggattgtggcccagtgaacttaagcaattggctcaatatcacataccaagttttgaaccctgagaccagagactctgctctaattactatagtgcactcctgcagtaatgaaatcctctcacctgaatcaatgaagacgttaagggatttggatctgattcacaagaaggtgagagctgctttttgttaatatctttaataaatatatatggattattcctcctggaaataaaattaaagatatggttgca

SEQ ID NO: 10610 - DNA, 470 bp, Homo sapiens
  MAP TO AC007403.2; EXPRESSED IN BRAIN, SIGNAL =   1
ttgggcagcattaccaaaaggagataccattagagtcagagtgtaaacttcaagtttatttctgttttagagctggataaatatagacaagttatttaaatcctaaatagcccattcctcatctgtgataaggggcggactgtatttctttcacaagtttattgtgaaggccaaacgaaataaagtttacaaaattaccatataagctgaataatgttaaactaatacataccttgctttaagtggaagagacagctagttatttaggtaggtgtcctgaaatagctctgttggtagtagtgtcttgacatgtggatgaaactcattctgtttgtgatttccattgagtagctgctccaagttacataagacttcctgccctacaacttcatcctttatatctgcagcatggacataaactaaagtagaaggggaaattattgttattattactgccaacaacacagcaa

SEQ ID NO: 10611 - DNA, 474 bp, Homo sapiens
  MAP TO AC007462.2; EXPRESSED IN BRAIN, SIGNAL = 1.2
tggcatcatttaagtgttcttcctatatgcaactgagtaccaaggagggatttggctccttgtattttagaatgtgatattgttatgaaagcctaaagttgaaagtgcctttcagatacagaaaataatcatatattatcttctcttttaggtcaaatggcaggtgatcatactaggctggagttccataacatagagactggcatcatcacagaacgacggtatctttcttctgtcccctccaacttcattggacacctgcagagcttgacatttaatggaatggcatacattgacctgtgtaaaaatggcgacatagattactgtgagcttaatgccagatttggcttcaggaacatcatagcagatcctgtcaccttcaagaccaaatcgagctatgttgccttagctaccttgcaagcctacacttctatgcatctttttttccagttcaagacaacatccctagatgga

SEQ ID NO: 10612 - DNA, 1866 bp, Homo sapiens
  MAP TO AL121716.2; EXPRESSED IN BRAIN, SIGNAL = 1.2
tttgatcagtctacatttctacatttcaattattttaatgcattttgtatttttcttcttttactgtttttctcatatatcagtgagccaagtacaactcatcacatcaaaaggaaatggtgaaaagccacttaccatggatgaaatagagaactttagtctcactgtgaatccattaagtgacagactttccctcctaagtaccagcagtgagacaattccaatggttgtgtctgattttgatcttccagaccaacagatagaaatacttcagagttctgactcgggatgttcacagtcctctgctggggacaacttgagttacgaagttgatcctgaaaccgtgaatgcccaagaggattctcaaatgcccaaggaaagctccccagatgatgatgttcaacaggtagtatttgacctgatatgtaaagttgtaagtggcctcgaagtggaatctgcatcagttacatctcaattagaaattgaagctatgcccccaaagtgcagtgatatagatccagatgaagagacgattaaaattgaagatgactccattcaacagagtcagaatgctttgctgagtaatgaaagttctcagtttctgtctgtgtctgcagagggaggccatgagtgtgtggcaaatggaatctccaggaatagctcctcaccttgtatttcaggaaccacacacactcttcatgactcttctgttgcttccatagaaaccaaatctagacaaaggagtcacagtagtattcaattcagcttcaaagaaaaattatcagaaaaagtttcggagaaggaaacaatagttaaggagtcaggtaaacaaccaggagcaaaacctaaagtaaaacttgccagaaaaaaggatgatgacaagaaaaaatcttcaaatgaaaaactcaaacaaaccagtgtattcttcagtgatggtctggatttagagaactggtatagctgtggagagggagacatttctgaaattgagagtgacatgggttctccaggatctcgaaaatctcccaatttcaacattcatcctctctatcaacatgtgctcctgtatctccagttgtatgattcatccaggactttgtatgctttctctgccatcaaagccatcttgaaaactaaccctatagcttttgtaaatgccatttcaactactagtgtaaataatgcatatactcctcagttgtctctccttcagaatctattggccagacaccggatttctgttatgggcaaagatttttatagtcacattccagtggactcaaatcataacttccggagttctatgtacatagaaattcttatttctctctgcttatattacatgcgtagccattacccaactcatgtcaaggttactgcacaagatttaataggcaatcgaaacatgcaaatgatgagcatagaaattctgacactactcttcactgagctggcaaaagtaatagaaagctcagcgaagggtttccctagttttatttctgatatgttatctaagtgcaaagttcagaaagtgattcttcattgtttgctgtcatctatctttagtgctcagaaatggcatagtgaaaaaatggcaggtaagaacctggttgctgtggaagaaggtttctcagaggacagccttattaatttctcagaggatgaatttgacaatggcagcacgttgcagtcacaacttcttaaggtgcttcagaggctgattgttctagaacacagagtaatgactattcctgaagagaatgaaacaggttttgattttgttgtatctgacttagaacacatcagtccccatcaacccatgacttctcttcagtatttgcatgctcagccaatcacatgtcaagg

SEQ ID NO: 10613 - DNA, 425 bp, Homo sapiens
  MAP TO AC010961.2; EXPRESSED IN BRAIN, SIGNAL = 0.95
tcatgttagaaacatcgcaggtttactttgtgtagtaaatctttcaggattaaacctagcctcaataattagcttaatactctatttcccactttaatttagattttacttttaatattccttattttcttttgaattaatcaatttaagaagatatctggcattttcagaagtttttcagtgggaaagtgggtgttccatatttccagaaaggaaagtctcagtatttgcttttcgactggcaaatatcaatataaaacttagaaaagaaaaaaagttaccatggttttttagtaattccttatagcaaggatgttctcagcacaggcatgccaggagttagtgattcctgactatggagagttgtgtgggacagagaccaatgagagcttctcccagtggaaaggttagttttggtgagggcc

SEQ ID NO: 10614 - DNA, 372 bp, Homo sapiens
  MAP TO AC011741.2; EXPRESSED IN BRAIN, SIGNAL = 1.1
ttttaatgccttgactccgtgtcttgaaataacataaacaccgaagcatctaagagggtgttataatcacatttgcagagatgatcaaaaaagctcaaagatctaaggagtgcgcctgaaacacagatccatgacatttgcgagacattccttatctcgttcagttaccctcctccagctgccttgtaagggacctgtttgtgatgattacctgagacagagaggaagtcatccactgaggtgatgtcatccacggcctctgtcaacactcggacctgcttctcccactggtctttgaagacgtccatgttatcctgagcaactttgctctgtggccgggcagccagtgtcagagcggcattgatgacctat

SEQ ID NO: 10615 - DNA, 490 bp, Homo sapiens
  MAP TO AC010127.2; EXPRESSED IN BRAIN, SIGNAL = 1.1
aaccttctttggataagggattgttattctgagaaatacacattagtaaatggcaatttaaataactaaattttaacaattaatatgctataaatcattcttacaaaaatcagggccaatgactactttgcaagaaactagaaagtcaattaatgcagaaagtacttaatgctaatgcacatgagaaaactcctttgttgttaaaagcatttctatttctctacagaacaaatttcaaggaatggtctttgacttcgtaaccagacaagtttttgacataagcatcatgattctcatctgtcttaacatggtcacaatgatggtggaaacagatgaccagagtgaatatgtgactaccattttgtcacgcatcaatctggtgttcattgtgctatttactggagagtgtgtactgaaactcatctctctacgccattattattttaccattggatggaatatttttgattttgtggttgtcattctctcc

SEQ ID NO: 10616 - DNA, 413 bp, Homo sapiens
  MAP TO AC012145.1; EXPRESSED IN BRAIN, SIGNAL = 1.4
gtccaaccatcccattgaaggtcaggatggacagtctagataattgagcaagaaatcatcataaactatttttcagaagaatgacatgatgaaagctgtatttccaagtcataatgttaggtttcaagttaaatcatctcagctcctggggagcaggataagacttggtacttaccaaagctcccgggcccacacactcaccttgtagccctggcatacgtcttcaacaagagctgtggtgtgccctttgtgctgtggtgcccgctcacagcgccagcagatgagctgcccctcgtcttcgcagaacaggtggaactgctctccgtgttcctcacatgacatttcttgatccgtctctttgagggcttcaatgaggcttcccagctgcttgttgggtcggaggctatccatat

SEQ ID NO: 10617 - DNA, 388 bp, Homo sapiens
  MAP TO AC011422.2; EXPRESSED IN BRAIN, SIGNAL = 2.5
gctgtgattcctttgtgtgcccagcaacagaatactaacttctaagcaatattttccaaataaacattccaggaaagagcaaaaacttccaaaacaacatattatttcctttacagatgtcaattattcaggaaaactgaatggatgtaaaactggatggagcaatatttaaaaattccacacagtaaaattttttctgctctgaaaaaaggggtcacaaaacaagaagaaatgttctcaccgattttgagtggtgcatctggggctggagttgcataaagaagattctctggtttgagatcacgatggacaatcccattttcatgtagatactaaagagggaaaataatgaaataacatttgtgtaatgctatttatggttcgaatg

SEQ ID NO: 10618 - DNA, 423 bp, Homo sapiens
  MAP TO AC005661.1; EXPRESSED IN LUNG, SIGNAL = 0.71; EXPRESSED IN BRAIN, SIGNAL = 0.81; EXPRESSED IN BONE MARROW, SIGNAL = 0.5; EXPRESSED IN PLACENTA, SIGNAL = 0.67; EXPRESSED IN ADULT LIVER, SIGNAL = 0.84
cctactaggaatgtgtgttttgctaaacagcttacttatgtttatagttgctacttacaaaagtgacaccagaaaagaacctgtattctgaatacagtgaccagagcagaatgtctacagcccttgccaatataacaacactaatcatgtgcttattgaaaaggacttccaaacatgtcaggcttctggtttatggatcagcagttggagctgtctgtctctctcacgttttcaatgctgtcttctttgttttctggttgaatttcgccttcatcctccttgtgttgagttggatctttttcagcaacctggtctttggtttggggttcatgtgtagaaacaggatctaaaactacaactggttcggcttgtttttcaccgtcaatgtattttttcctgcatccaatgctactgggaggccta

SEQ ID NO: 10619 - DNA, 485 bp, Homo sapiens
  MAP TO AC005079.1; EXPRESSED IN ADULT LIVER, SIGNAL = 0.81; EXPRESSED IN BRAIN, SIGNAL = 0.77; EXPRESSED IN BONE MARROW, SIGNAL = 0.71; EXPRESSED IN LUNG, SIGNAL = 0.79
ctttcaggggaagaaaaggcatagaaaataattggactctagagctaggtaaatagttctttgatttaaccccaaagcattaaaagactcattaaaaattaataaattggactttatcaaaattaaaaccctttgatctgtgaaagactcgttgagaggatgaaaaagacaagctacagactagaagaaaatatttgccaaccagtccttatcaacaaaggactactacctagaatacataaagaactctcaaaactcaactataaaaaacaaaaaaaaagcaattcaattaaaaaatgggcaaaaggcatcaacaaacaattcaccaaaaacaacatccagatggcaaataagcacttgagaagatcaacatcattagccatcagggaaacgcaaataaaaatgacgaaaaggtatcactatacgcctatcagaatggctaaaattaaaaataataataataatgataccaaatgctggcaagg

SEQ ID NO: 10620 - DNA, 456 bp, Homo sapiens
  MAP TO AC005697.1; EXPRESSED IN PLACENTA, SIGNAL = 0.89; EXPRESSED IN ADULT LIVER, SIGNAL = 0.67; EXPRESSED IN LUNG, SIGNAL = 0.7; EXPRESSED IN FETAL LIVER, SIGNAL = 0.71; EXPRESSED IN BRAIN, SIGNAL = 0.81; EXPRESSED IN BONE MARROW, SIGNAL = 0.75
gctggcaggcaaagtatgagatgagacaggagcaggaaagaacccctaatagggagtattattcatcaagtcaccacactgtgctattgaagttcaatactgctgggtaactttgggggactgcagaataccgtttcctaacccggctgaacgttgcactcatcagggagatttaaaaaatatgaatgcctgagttctatccacagagattctgacttaattggtctgggatataggctgggcaccagtatttttttttacacccccaggtgatcaaatgtgcaggaaagtttgaaatcactggtgtagaatacatctcaaagctgtcccagtcaagaggtgaaaaaccagggtgtttatccaccaactctcatccatctttggttgaggatgtttccagcgtattctgtgagtgtcctcgaatgctaccttgaccagaaaacaaaaagcaaaaca

SEQ ID NO: 10621 - DNA, 357 bp, Homo sapiens
  MAP TO AC004106.1; EXPRESSED IN ADULT LIVER, SIGNAL = 0.82; EXPRESSED IN PLACENTA, SIGNAL = 1.2; EXPRESSED IN FETAL LIVER, SIGNAL =   1; EXPRESSED IN BRAIN, SIGNAL = 0.83; EXPRESSED IN LUNG, SIGNAL = 1.2; EXPRESSED IN BONE MARROW, SIGNAL = 1.2
ttttcaaaggatttccctgcctttatcatttcagcctcagtaattatcaatcaaaacactagttattttaaaaacacaaagctttaccttaaacctatttcatctaaatctttattaatcgttatttataaatgtcatcactgaagtctgcaatttcctaaatgacctaacatttgattctatttcacctttctgacaaacaaaaattataccttttgtaaacaatcttcagatctcgccactcaaggaagctgcacattttaggtttccgtgctaaaacggtctgaacaagttctcttgtgatctttttcttctctttgtctgatagtgggacataccatttttgcagtcgaagct

SEQ ID NO: 10622 - DNA, 443 bp, Homo sapiens
  MAP TO AC005217.1; EXPRESSED IN BONE MARROW, SIGNAL = 0.73; EXPRESSED IN ADULT LIVER, SIGNAL = 0.56; EXPRESSED IN PLACENTA, SIGNAL = 0.78; EXPRESSED IN BRAIN, SIGNAL = 0.74; EXPRESSED IN LUNG, SIGNAL = 0.64
caatccagttgccaaccttcctgctccctccacagcgcagcccccgaggctcacagtctctgtcccagaggggctctcttcccagaaactgtcaacacatgccccctttagactcctctcatcctcagccaggactctgactcccactccacaaaggaggcagaagccgtcagaggactccccgcatcttcctggcctcccagactcttctcttaccccttccttcctagcagggccatctcctccctggtacttggagacctcctttctcccccacccacaccaaagcttcgggggctttggtgcttgagcatcctcttcctttcttctgtctccagtggccccttctcagctataagaaacactttcaggatctccagaagagcaacaaacctcccccaaagcccttggctccaccagctgctaatcttgctccctgccat

SEQ ID NO: 10623 - DNA, 456 bp, Homo sapiens
  MAP TO AC005079.1; EXPRESSED IN PLACENTA, SIGNAL = 1.1; EXPRESSED IN LUNG, SIGNAL = 1.1; EXPRESSED IN FETAL LIVER, SIGNAL = 0.98; EXPRESSED IN BRAIN, SIGNAL =   1; EXPRESSED IN BONE MARROW, SIGNAL = 1.2; EXPRESSED IN ADULT LIVER, SIGNAL = 1.1
ttgaccagctgaaatcatggaattgcaactaattgcaatgaaaaagaccttggagatggcaggtttgaaggagaatagcaggaactcagttcgggacatatttggtttgagatgtccactagatagacatggattggaactaacaataatctctttgtaccaagtctgacttgtgtgcttgatttaggggactttctacatcatccacatctgggatttcaccagtcaaagccattctatgagctggggtgttgtgctggatgaatacttgctcaataatgatgcttcaaacctccaggtccaagctccaagcattgtcagcacagccatgtggagcaacttcgatgcacagaacctcttcaagtccaaccaaatagacaccacccacttgggcaacaagccatctcagagggcaaccacctcatggggctctcgacactcttcccctagcaacca

SEQ ID NO: 10624 - DNA, 471 bp, Homo sapiens
  MAP TO AC005014.1; EXPRESSED IN LUNG, SIGNAL = 1.2; EXPRESSED IN BRAIN, SIGNAL = 1.1; EXPRESSED IN PLACENTA, SIGNAL = 0.92; EXPRESSED IN BONE MARROW, SIGNAL = 0.86; EXPRESSED IN ADULT LIVER, SIGNAL = 1.1; EXPRESSED IN FETAL LIVER, SIGNAL = 0.78
gatttagagatggctttggagccagcggcctgagttcaaatgctggttctgctgtttcactagccaggaaacttgcagcaagctaccaaacctctctcttctcagttttctcatttgtaaaataacgttagcgatgacagtagagatactaatatacctcatgtagttgataggaagattaaataatacatgtaaagcattgagaagagtgtctgacacatggtaggaacaaaataacttcttctttttttaatcagacggcaaacttgatgtcaattctaactgtgttaatgaagagcaaccagaggctgaagtaggtatctctcaaaaggattccaatcctgaagattccggggaaggaaagaaagaatctcttgaaagcgaagctgagttggaaggcttacaggatgctcctgcagggccacaggtgtctgaggagtaaaagccagagcaagtgccagtgtggatgat

SEQ ID NO: 10625 - DNA, 366 bp, Homo sapiens
  MAP TO AC005587.1; EXPRESSED IN PLACENTA, SIGNAL = 0.95; EXPRESSED IN BRAIN, SIGNAL = 1.3; EXPRESSED IN BONE MARROW, SIGNAL = 0.57; EXPRESSED IN ADULT LIVER, SIGNAL = 3.8; EXPRESSED IN LUNG, SIGNAL =   1; EXPRESSED IN HELA, SIGNAL = 1.9; EXPRESSED IN FETAL LIVER, SIGNAL = 1.9
gtccctgggcacactcttagccttactcctcattctcatctatattgttaagataaggatgctaaaatcagcaatctaataacgatcacttcaaatgcagaactgctaaatagcatacaaaaaggccagaaaatgtcaatgctcaggaaaattcacagtgatgataatagcagggtaaggttaagtagacttataatgacaaatggttattaaaggcattatgagataagtaaacagatacacgaacctaacagccagccactgttgatccacaaagagatgaactttgtcgattctgacgttcttggcatagtgcagtcgctttggcaaatcaggagtcaaatagggcttgaaatgctgatcagg

SEQ ID NO: 10626 - DNA, 463 bp, Homo sapiens
  MAP TO AC004921.1; EXPRESSED IN PLACENTA, SIGNAL = 1.3; EXPRESSED IN LUNG, SIGNAL = 1.5; EXPRESSED IN FETAL LIVER, SIGNAL = 1.1; EXPRESSED IN BRAIN, SIGNAL = 1.1; EXPRESSED IN ADULT LIVER, SIGNAL = 1.2; EXPRESSED IN BONE MARROW, SIGNAL = 1.3
tgctatgaaatgactgcaaagacatctttattataacagcacttggaattggcaattcaggaattattcatcttgaacatcttatgtagttttaaaaattctctagaaaaaccacaactgttttcatcttctcttgtataaatctttaatactattcttgaaattatactaagaagaacactgaaaagttagtgaacatatgtaaagtagatcaccttgatttaggatgcctatttattttattaggatcactgtgttgtgctgtgcacagagtgtgtgtttcggaggactcatattcctctcccctcttgcctactgcatcttggtgaggtctctgctctgcaacaaatcaacacaggcttgaaactcagtaatccagtcacgaagagaaggaaagaaaaccacctccatttaaagcaccagatagctagaccagtgctccccaaacttcggtgtgcacaag

SEQ ID NO: 10627 - DNA, 424 bp, Homo sapiens
  MAP TO AC005385.2; EXPRESSED IN BRAIN, SIGNAL = 1.2; EXPRESSED IN PLACENTA, SIGNAL = 0.9; EXPRESSED IN LUNG, SIGNAL = 1.1; EXPRESSED IN BONE MARROW, SIGNAL = 0.95; EXPRESSED IN ADULT LIVER, SIGNAL = 1.1; EXPRESSED IN FETAL LIVER, SIGNAL = 0.84
tttgcttcaaacctaaaaggaagaacatacaaatctcaatttatttcttaaaaaaaaaaatactttgctgaacatgtttacttagagaccaaagcaaaacaaacaaaaatttttcacatactccaatgattacaaaataaacattaaacaggatgaagaaatgcctctatatttataatctgataaacattcaacgaagaaaaaaatgtaaaatgagttaacagttatacacgaactagatcacaaaatatattagcagaatttctatgaagtcaggagatttactaccaaaaatcttaagtaaactcacccccatgcaagtttcttcttttttcgggcagcctgtgaattttcaacctcctttttggcttttacaaagttgtggcaggcaactgctttggcaatttttacaccaagctaagaa

SEQ ID NO: 10628 - DNA, 450 bp, Homo sapiens
  MAP TO AC003035.1; EXPRESSED IN LUNG, SIGNAL = 0.89; EXPRESSED IN FETAL LIVER, SIGNAL =   1; EXPRESSED IN BRAIN, SIGNAL = 0.97; EXPRESSED IN BONE MARROW, SIGNAL = 0.86; EXPRESSED IN PLACENTA, SIGNAL = 0.84; EXPRESSED IN ADULT LIVER, SIGNAL = 0.8
cacctcagcctcgcaagtaggtgggactataggcactcaactctttgccatttctctcagtgtataataaccccttggtaggtgaatgatgataataatctgcaggtcttgcctcaaaatctggtaagcatctcatctggaacacttgggcctggtttcacagttggaaagggaaagatgagggaccttagggggctgcagatggcatggccagcagcagcagcactcactgggctccttctgcagtgcacacacgtgtgtttatgttcatgttcacgttcgtgtttgttctcagggcggcagcagcagctggatgcagagcgcctggacagctatgtgaacgctgaccacgacctgtactgcaacacccgccggtcggtagaagccccaactgagaggcctggtgagcggcgccaggccgagatgaagcgtttgtacggggacagtgct

SEQ ID NO: 10629 - DNA, 360 bp, Homo sapiens
  MAP TO AC004127.1; EXPRESSED IN ADULT LIVER, SIGNAL = 1.4; EXPRESSED IN BRAIN, SIGNAL = 1.3; EXPRESSED IN BONE MARROW, SIGNAL = 1.1; EXPRESSED IN PLACENTA, SIGNAL = 1.1; EXPRESSED IN LUNG, SIGNAL = 1.1; EXPRESSED IN FETAL LIVER, SIGNAL = 1.2
gctggtctggtcagtttgtatgtggtgtgaagaaaatacaggaagataaagtaatcattcactggtcaagtgattcctagtcaaaaatcatggctgatttgagaaactcaaatacattgcatctgttttgtatatatttttaggagaacagtgatctcaagtatttctgcacagttggagcccttatcactgctgtataacaataacaattcattaggaaaaggctgctttagtcacatataccttttccatgacaagccgagcaagtttaatgggatttgctatacactggactgcggacactgctcctgcagacaggtcttttccatccatgatactagcatccatttcaacctcacc

SEQ ID NO: 10630 - DNA, 494 bp, Homo sapiens
  MAP TO AC005392.1; EXPRESSED IN PLACENTA, SIGNAL = 0.91; EXPRESSED IN BRAIN, SIGNAL = 0.9; EXPRESSED IN BONE MARROW, SIGNAL = 0.94; EXPRESSED IN ADULT LIVER, SIGNAL = 0.77; EXPRESSED IN LUNG, SIGNAL = 0.99; EXPRESSED IN FETAL LIVER, SIGNAL = 0.8
ctttctccgtctgtgaaggcccttatactgcatagtgcttggggctgataaagccatttccctacatttctcaggctggacccaaggtcatccaccagaaatctggaaaacaaagggaagagaatctgtagatatgaattgggagtgttcaggagaaaaatttgggatttacttttgtgcatgggacacaggctgagaataaaaatgttttcctggctctttcttggaaagccagataggcttcacctgaaagcatattgccaatgctccagcgatccacttaccagggactgtgattttcttggttgcgaagtttttgccattagtgactgggttatggacataacacagatagtccccactattctctgtagtgacttgggggataaagagctcttgtcctgtttgctggttattcccattcagcagccaagaatactctgctgatgggttagagcccatgaggcaggagaggttgaggtttgaccctgcat

SEQ ID NO: 10631 - DNA, 469 bp, Homo sapiens
  MAP TO AC005410.1; EXPRESSED IN PLACENTA, SIGNAL = 1.2; EXPRESSED IN BONE MARROW, SIGNAL = 1.2; EXPRESSED IN FETAL LIVER, SIGNAL = 1.3; EXPRESSED IN LUNG, SIGNAL = 1.3; EXPRESSED IN BRAIN, SIGNAL = 1.3; EXPRESSED IN ADULT LIVER, SIGNAL = 1.5
gcgcaatcctgagaagtcactaaagcctttcccacagtaatcacatttacagggcttctctcccgtgtgagttctctgatgcttcacaaagtctgaactccgcagaaaggcttttttgcagatggtgcactgaaagtatgtctctccggtgtgagttctttggtgaaaaataagctgagaattcctataaaaggtcttcccacactccctgcaggtggggagcttctgggccatgggggctcttggctgccccttctgggaggtctctctcttctcctcaagccacatggtggacatttctcctgaatgaggattaggcaaatgctgacctagttgtttctcagaaatcctttcttgaggagacagctgttcccctgttccctcatcctgaatgttttgcagagcctcagggagattctctccttctccaaagcatcctggctcatcctcagtgaagaagcccctcaag

SEQ ID NO: 10632 - DNA, 494 bp, Homo sapiens
  MAP TO AC003685.1; EXPRESSED IN PLACENTA, SIGNAL = 0.76; EXPRESSED IN LUNG, SIGNAL = 0.9; EXPRESSED IN BRAIN, SIGNAL = 0.81; EXPRESSED IN BONE MARROW, SIGNAL = 0.72; EXPRESSED IN FETAL LIVER, SIGNAL = 0.81; EXPRESSED IN ADULT LIVER, SIGNAL = 0.78
gcatgttaagacagtctcgtcgtccactaattcatataacctactataacagttgtatggttgaaaataattttcaaagactacgaatagctcctaaaacatacctgcaatatgttctagcttcatggtatgaatcctgtaaaaaaagttacatcaaaattttatcataatgctacacaaaatgccatgtttgttgggaagatatgtcttatgtgaaatgttccgcatagaatagaatagtgatgacatgaaccaaagctgacttttcctaaaagaccctatccgacaggcaaaagtgacttaaacactttaccccgtgtgttcatctttttcagcaaaaggttctctttccccatgctcatcagttacatcttcctcccttgtttctgtaaaagggtttctttcctcacattcatcacggactggatcctttcctgcattaaaatgtaaaagacaaaccatttttagaggaagacgctgttgtggacatcttt

SEQ ID NO: 10633 - DNA, 493 bp, Homo sapiens
  MAP TO AC004932.1; EXPRESSED IN LUNG, SIGNAL = 0.91; EXPRESSED IN BRAIN, SIGNAL = 0.99; EXPRESSED IN ADULT LIVER, SIGNAL = 0.97; EXPRESSED IN PLACENTA, SIGNAL = 0.99; EXPRESSED IN FETAL LIVER, SIGNAL = 0.9; EXPRESSED IN BONE MARROW, SIGNAL = 1.1
gaagtggcttttgctgttccagtttcacacttagagctttggcctagaacttgggtacttgcccctttcccgtccctgccctccaatgccttctgatagtgaaaatggtctcttggggcagcctccttcctgtatccccattactgttttagctcctccacccaagcccgccagccctccagctactctataaacagtctccttcctccttaaccttgccctgggagtctgcctttttatccctccttgtacatctgaaggccagctttcccgtgaagccatccctccccttcaacctccagaactgagagggtggggtcaccttctcagcctcattctccatgttgcccccaaaccccagctcctccaccatccctccctgcttctctctcaaagccatctcctttcaccacgctctcctctccacattcatgtcttctccacaaacctagtggaaatttttagaactaggctaacaatcgtattttcctca

SEQ ID NO: 10634 - DNA, 485 bp, Homo sapiens
  MAP TO AC003688.1; EXPRESSED IN PLACENTA, SIGNAL = 0.88; EXPRESSED IN BONE MARROW, SIGNAL = 0.92; EXPRESSED IN ADULT LIVER, SIGNAL = 0.83; EXPRESSED IN LUNG, SIGNAL = 0.8; EXPRESSED IN FETAL LIVER, SIGNAL = 0.82; EXPRESSED IN BRAIN, SIGNAL = 0.87
tggcaataaaagaagtcggggacgttggtcttcttaatcttagcacaggagaggtggatccacgtcccacacaggctgcactcaatcatgggccgccctgcaaagggctttcgacagtaacatgtgatcagatcccatgagtcatcacctggggaaaaaaaggtttgtttggtattctgcctgagctgttggatccacaacaccctcaaacccctcgccccagcccaaacctctcacctgattctaccatgatgtcctcgtccatgacccgcatctcgccttcactggagctggcatctccatcttggcttgtttcagtgctgcccacctccttgctttcactgtcagcaggagggactccttcagggtgcactgtggcagggggcctaggagcctcagggggtgttggcagcacagggactggggcttcaccccctaccactgttgccatctcttcttcttcttcctcttcctcctcttcctcc

SEQ ID NO: 10635 - DNA, 486 bp, Homo sapiens
  MAP TO AC005033.1; EXPRESSED IN LUNG, SIGNAL = 0.67; EXPRESSED IN FETAL LIVER, SIGNAL = 0.8; EXPRESSED IN BRAIN, SIGNAL = 0.64; EXPRESSED IN ADULT LIVER, SIGNAL = 0.73; EXPRESSED IN BONE MARROW, SIGNAL = 0.63; EXPRESSED IN PLACENTA, SIGNAL = 0.69
caagtcagtgcaatcattgtctatcttctctgtgagttactcagcagcagctttattgcctgtatgatgacgattatcttgttgttgtcatgtgacttttgggcagcaaagaatatcacaggtagactaatggttggcctatgttggtggagtcacattgatgaagatggaaagaaccattgggtgtttgaatctagaaagtcttcctctcaagataataaaactgtgtcagaagctgaatcaagaatcttttgattgggacttacagtctgtgcagtgctttgggtgatatttgcctttagtgccttgttctccttcagagtaaactggttagcagtggttatcatgggtatggtgttagcagatgccaacctatatggttacatcaggtgtaaggtaagcagcagaaataatttaaccaacatggctacctcgtatcttgtaaagcagtttttaagacgaaacactggagatgatcggagaagc

SEQ ID NO: 10636 - DNA, 484 bp, Homo sapiens
  MAP TO AC003074.1; EXPRESSED IN PLACENTA, SIGNAL = 0.65; EXPRESSED IN BRAIN, SIGNAL = 0.72; EXPRESSED IN BONE MARROW, SIGNAL = 0.74; EXPRESSED IN ADULT LIVER, SIGNAL = 0.78; EXPRESSED IN LUNG, SIGNAL = 0.7; EXPRESSED IN FETAL LIVER, SIGNAL = 0.69
ttttagtgcccttttgtgccactgtgcttttaactgctgttaagataaggagtaatgtccctccagctgtacataatagtgttgtaattccatcaaggggctttgataacttcataaaccctgacagaaaagcttgagtggattttcatgtcaccataacaccaagatggaattacagccttaatttactgggtgtacattttgggaggtacattacttaatgttaaatcttgttaaaaacaaatcagctgatgccatctggctgttcccgttccacagtggtctccaagctgcaccctgattttgggtctttgttctccgtcaccctgcttttcctgatttttattttcctcatcatcataattgccctgatcatcatcatcatgcataccttatactcatataactttttttttaagtttacagagtgtttttcatacatgatcctatgagcctcaatacttgcttttctctctcctcttga

SEQ ID NO: 10637 - DNA, 485 bp, Homo sapiens
  MAP TO AC003950.1; EXPRESSED IN PLACENTA, SIGNAL = 1.3; EXPRESSED IN LUNG, SIGNAL = 1.1; EXPRESSED IN BONE MARROW, SIGNAL =   1; EXPRESSED IN ADULT LIVER, SIGNAL = 0.72; EXPRESSED IN FETAL LIVER, SIGNAL = 0.8; EXPRESSED IN BRAIN, SIGNAL = 1.2
ctttggcttgtgtgttctggtatgtctgttttggttgttatggtaatgttggggttgagtgtgtattttacttgccgttttaaaagaaaattctttttgtgggatttatgggactccggtggtaaacaatggctcttgccattttgggtgaaaagggtttcagatgcagggatgattagaatataggagagcttcctgtaggtgagccaccgatcacagccaacctgggggagatgctcaccttggcctctcgcacgcagaccaacaagactactgatgccttgagatcagctgcctcaagtctcatggcagatgagcagaatgtctttgctgaagcacccttgcatcttctgagcacactcatcacctcgcaggtttccagggactgggaggctggcactgcctgcctcccacaatgccccatgtcccagctcagactaaagctgatcacctttgagatttctggagcagccaacatgtgatct

SEQ ID NO: 10638 - DNA, 472 bp, Homo sapiens
  MAP TO AC003957.1; EXPRESSED IN PLACENTA, SIGNAL = 1.3; EXPRESSED IN BRAIN, SIGNAL = 1.3; EXPRESSED IN BONE MARROW, SIGNAL = 1.4; EXPRESSED IN ADULT LIVER, SIGNAL = 1.3; EXPRESSED IN LUNG, SIGNAL = 1.4; EXPRESSED IN FETAL LIVER, SIGNAL = 1.2
caactaaaacgaggtcttaccttttcaaaagaggagaataaagtttttcttttataaaaattgctccccaaactcacaaacacccaaaccgacataaaaagttggtctatcttcttaggaatcaataagaagtgaggttacaggggagagggaggaacaagcatgacggttcctgtgaaatccatcccaccgagcagtcactcttatgtttccagtttggccctcgggagttttcctaaaggaaaactcagtcatctaagcctatgtttctgaaaaggtaggacatggactccccattgtggatccgacggatcgcctctgaaaggatcatgctgatatccacagttttaatcttggggcactggagcttctggacttcatgtggaattgtattggtgaccaccacctgtgaagcaaaagaaaaaaaaccacagcatcagaaagccaagtagcttcatggtttgatctggaa

SEQ ID NO: 10639 - DNA, 465 bp, Homo sapiens
  MAP TO AC006515.7; EXPRESSED IN ADULT LIVER, SIGNAL = 0.89; EXPRESSED IN PLACENTA, SIGNAL = 0.93; EXPRESSED IN LUNG, SIGNAL = 0.76; EXPRESSED IN FETAL LIVER, SIGNAL = 1.1; EXPRESSED IN BRAIN, SIGNAL =   1; EXPRESSED IN BONE MARROW, SIGNAL = 0.91
ggaatcaccaaccctagcactgagtttccattaaacaggaccatcttgcatattcttttgttttagatcactggttcacagccttggctgcacatgggcatctcctggggagccttaaagaatactgattggaggggctgggggattcccacccttcgaggttctgatggtttgacttaaatcattttggccttcctggccttagagttcacctgcagggttatgtaaccaggtagagaagtttctggcattagagaggcctcgttgatgctgttaagaaggagaaaccaaatgatgcacttgctaccgagatgttgagtcatgcccagatccagggcaaacatcacttctctaatctctctgatgacagcccaggccccactggacctgaaattgttagggtgatgatgggggtggggatgaggaagagaagaaggatcaaatggaaggaaagtgtgtggcctt

SEQ ID NO: 10640 - DNA, 456 bp, Homo sapiens
  MAP TO AC005255.1; EXPRESSED IN LUNG, SIGNAL = 1.6; EXPRESSED IN BRAIN, SIGNAL = 1.6; EXPRESSED IN BONE MARROW, SIGNAL = 0.97; EXPRESSED IN PLACENTA, SIGNAL =   3; EXPRESSED IN FETAL LIVER, SIGNAL = 0.98; EXPRESSED IN ADULT LIVER, SIGNAL = 1.5
aggtgtcagaacaggcaaggtggaccacctgattaatttcacagaaaaaatgagggatttccatgtgtgtacaaaagggcagtggcaacaccattaagctttgtaacatggaattcagaacactcatgatccaggatgccagaaccagcagtccacagagttgagggttcataatgaccatgtagtgcagagggtgacagatggccacaaaccggtcataggccatcacggtcagaaggaagttatccaatcctacaaagagtaagaaaaagcacatctgggtgatgcagcctgcataggtgatgactttgttgtgtgtctggatgttcaccagcatcttcgggacagtggtagagacaaaacagatgtctacgaaggacaggttggagaggaagaagtacatgggggtgtggaggtgggagtctgagattgtggccaggatgatgagcaggttcc

SEQ ID NO: 10641 - DNA, 482 bp, Homo sapiens
  MAP TO AC002449.1; EXPRESSED IN PLACENTA, SIGNAL = 0.94; EXPRESSED IN LUNG, SIGNAL = 1.1; EXPRESSED IN BRAIN, SIGNAL = 0.93; EXPRESSED IN BONE MARROW, SIGNAL =   1; EXPRESSED IN ADULT LIVER, SIGNAL = 1.1; EXPRESSED IN FETAL LIVER, SIGNAL = 1.1
ggtctgtccctccatgttactgacatcattctcttaaaaatcatctcaattgtcaagtttaatggtggctttcatgttctcatcctgtcagtgtgccagaggatgtgtaaaaacttggataagcatgatgcatcttccagattcatcaattttgcacagactcaagaaacttattttctatcaaaacaaatagttatgcagtcagacacaaaatttgtatgaaatttgtcttagtccattttagtttgcttataacagaataccagaaactgggcaatttttaaagaatataaacatatttcttacagttctgaaaactggtatgtccaaggtcaagaagccagatctggtgagggcctttttctggtggggactctgcagagctccaaggcggtgcaaggcatcaaatggtgaggaggctgagcatgctagttcaggcctgtcttcctcttcttataaagctaccagttccactctcatga

SEQ ID NO: 10642 - DNA, 348 bp, Homo sapiens
  MAP TO AC005367.1; EXPRESSED IN ADULT LIVER, SIGNAL = 1.1; EXPRESSED IN PLACENTA, SIGNAL = 0.96; EXPRESSED IN LUNG, SIGNAL = 0.98; EXPRESSED IN BRAIN, SIGNAL = 0.99; EXPRESSED IN FETAL LIVER, SIGNAL = 0.83; EXPRESSED IN BONE MARROW, SIGNAL = 0.91
gacagggaatgggtgaaaacatattttgtgttttaatcttaagacatacatttttatactaaagtcacatactacatttcgatcacaagcacagaaattctgttcttttttgccccctcccaccctgggggaaaaatagattcaaatttttggagacttaattgccctaaactttcatctttatgatggaaatgacatttttcctggaagatggaacttggcccttcactgctccatgactttctcggactgagttgtgtccttgaggaagagggagtgggtaaactggaggagggtgggggtcctgagaaggaatgtgggcaactgggagttggatccttggcacac

SEQ ID NO: 10643 - DNA, 414 bp, Homo sapiens
  MAP TO AC005161.1; EXPRESSED IN LUNG, SIGNAL = 0.85; EXPRESSED IN BRAIN, SIGNAL = 0.83; EXPRESSED IN BONE MARROW, SIGNAL = 0.76; EXPRESSED IN PLACENTA, SIGNAL =   1; EXPRESSED IN FETAL LIVER, SIGNAL = 0.69; EXPRESSED IN ADULT LIVER, SIGNAL = 0.76
aaatgcattcagaattttctccttttaaaaggtagaaggagttcctagaggaagaaacttcctatagtacatgcaatgtttaaaaaaatattgatcaggcaactacatttcaaaggtgtctgtcttgccttaagtgagaggcttctttccagtatccagttataatgtcaaaggagaaacaaataaacaaacaaacctaagacaaaaaaaacaaaaacaaaaacctctcaaacacattgtaaatgaaagaaggcgagttatctatctccccattgccctttttttagtaggcaatttggctgtacctatcagaatcttacagccagtaaatttagaattctattcagcaaaaataattgcaaaacacataagagcatgtgtatgagaatgatccttagagcatacagccaaaaa

SEQ ID NO: 10644 - DNA, 490 bp, Homo sapiens
  MAP TO AC004600.2; EXPRESSED IN PLACENTA, SIGNAL = 1.2; EXPRESSED IN FETAL LIVER, SIGNAL = 0.97; EXPRESSED IN BRAIN, SIGNAL = 0.96; EXPRESSED IN BONE MARROW, SIGNAL = 0.7; EXPRESSED IN ADULT LIVER, SIGNAL = 1.1; EXPRESSED IN LUNG, SIGNAL = 0.94
ttcactaccacttaatacatttttcctaagaattttaaaaagttcaaatcaatctattaacaaatgaacttttggcatatgatctgcttctaattagcaatgattagacctgtaaaatgtagttattattcctgtccgttaccacaataaaaaattggttctacgatatcaaaatgtctttatgtcacagaagaaaaaacaaataaaaactaatacatttaaatctcccacatggttttcaggcaacaattctcaattgaaaataaaacatcttacctttaaaatcaattctagcgcctttcttgttcatttttatctcagagcaggagttgttgggggcacctttcgagttctcaaggtaagctgagcttgctcctttcttggagggatgaggatcacagagttttgcattaatcttataaagctcgagggctttaatagctgctgcattattatccatacgaagaaaagttggacaggaagcacaaaa

SEQ ID NO: 10645 - DNA, 469 bp, Homo sapiens
  MAP TO AC005385.2; EXPRESSED IN PLACENTA, SIGNAL = 1.1; EXPRESSED IN ADULT LIVER, SIGNAL = 1.2; EXPRESSED IN LUNG, SIGNAL =   1; EXPRESSED IN HELA, SIGNAL = 1.8; EXPRESSED IN FETAL LIVER, SIGNAL = 0.74; EXPRESSED IN BRAIN, SIGNAL = 0.76; EXPRESSED IN BONE MARROW, SIGNAL = 0.84
aaaatgccctgtagctcaatgtcttcagccaaaaagaactaatccaattgagtgagaccaaagaaaacgactggggatgtatggttccagaatgtctctgaggtattcaaacccaagtcaatttaaggacttgtaagttaataactaggactttacacataatcctgtactttacaggtagccagtgaaggttttatacaaccagggtaatgtgattttcatgcttggtgtcagtcaaaatgtcagtaactgagttccagaccaagagaagttcctcaatcagtccattgtagagtcccccggaacagcgacaggcggaggcagcaggggtcccaggaagacaggagacacaaacacatataaagaggagagagcagtggacagcagccatggagagggctggttcaccggggcttttaatggtggatctggtaaagaattaaataggaagccttaaagatacgtcagg

SEQ ID NO: 10646 - DNA, 472 bp, Homo sapiens
  MAP TO AC005090.1; EXPRESSED IN BRAIN, SIGNAL = 1.1; EXPRESSED IN BONE MARROW, SIGNAL = 1.1; EXPRESSED IN ADULT LIVER, SIGNAL = 1.1; EXPRESSED IN PLACENTA, SIGNAL = 1.3; EXPRESSED IN FETAL LIVER, SIGNAL = 1.3; EXPRESSED IN LUNG, SIGNAL = 1.1
ttgctctattttctgccttggctatgaaacttagctaagctttgtcccagagatggaggcccagttgtaaacaaaactgtaagatgatagaaaatatcatggatataactgtatgccctggtcccaaacagacagggtgtgaatctaggcttgccactttctaataggtagctttttaaatagttgtgaagattaaatgagataatctgttgaaagtccttgacctaatatctgtcctatggaagtggtcataaatgctggctattattaccattattattaagatggaatgatgatgatgacgatgatgatgatgatgatgatgatgatgatgagatgacaatcattatgatgaaagagaaggaccaaaggaaagaaaacaggaatgagagtgttcctagtaatggaaaaggaggtaaagctttaatcaatttttttaatcaagtaaaatgaacccccaaaagaagtgatt

SEQ ID NO: 10647 - DNA, 464 bp, Homo sapiens
  MAP TO AC004050.1; EXPRESSED IN HELA, SIGNAL =  56; EXPRESSED IN BRAIN, SIGNAL = 0.66; EXPRESSED IN BONE MARROW, SIGNAL = 1.4; EXPRESSED IN ADULT LIVER, SIGNAL = 0.93; EXPRESSED IN PLACENTA, SIGNAL = 1.4; EXPRESSED IN LUNG, SIGNAL = 1.6; EXPRESSED IN FETAL LIVER, SIGNAL = 1.1
cttgtccagggtcacagagctagtaagtaccagttcagggttctaatccagtctatgtaactctccagtcctagctcaggatgtctaccctcttacaaaactgtaagtcatcgttactggtggtcaaggatctcacgtaccttcttcctctttgtcttccaggagatacaatattcattattctgaggaagcagaagctgatcttcctgcactggtatcaccacatcactgtgctcctgtactcttggtactcctacaaagacatggttgccgggggaggttggttcatgactatgaactatggcgtgcacgccgtgatgtactcttactatgccttgcgggcggcaggtttccgagtctcccggaagtttgccatgttcatcaccttgtcccagatcactcagatgctgatgggctgtgtggttaactacctggtcttctgctggatgcagcatgaccagtgt

SEQ ID NO: 10648 - DNA, 446 bp, Homo sapiens
  MAP TO AC002463.1; EXPRESSED IN PLACENTA, SIGNAL = 0.59; EXPRESSED IN BRAIN, SIGNAL = 0.94; EXPRESSED IN BONE MARROW, SIGNAL = 0.88; EXPRESSED IN ADULT LIVER, SIGNAL = 0.93; EXPRESSED IN LUNG, SIGNAL = 0.7; EXPRESSED IN FETAL LIVER, SIGNAL =   1
ttaagaatccagggtggcagcagcaggccctgcttttggggtagaggtggccagctagaagggcattgtaccttccctgggtcccgccccttcccaggtgagctgggtccctttgtgatgatgatgaaaatgcctaggagggggatatgacaatgactcgctcctaccgcctactccagtcctctccaccccaaggtaggcagcttcccgctcctcgtcttgggacctaaacccaggaagtcaaatgtccttttctagcaggtcgcctggttagaggccgtggacgaagcggtccaggcacagccagctgcagggcgcggcctcggcggcgctgctcgtggccctggtcagtgagcgcactcactcctggactaaggtaacccgcgtggaggagacccagctcccaggtggccatcccagttcccacaaagccctccctgactttt

SEQ ID NO: 10649 - DNA, 491 bp, Homo sapiens
  MAP TO AC004054.1; EXPRESSED IN LUNG, SIGNAL = 1.9; EXPRESSED IN PLACENTA, SIGNAL = 1.7; EXPRESSED IN FETAL LIVER, SIGNAL = 1.3; EXPRESSED IN BRAIN, SIGNAL = 0.8; EXPRESSED IN BONE MARROW, SIGNAL = 1.7; EXPRESSED IN ADULT LIVER, SIGNAL = 0.87
gctcactgaggtggaagctcactggtgtcccttgcaatgcatgactgccaccttttggggtttccatactgcctctaataattgtagaatttcttgttgatattttatgtcctttcccccgaatttaataggcctttttctttatataatgctccatatacttgaatggttagaaaggcatatcaagagtcagtataaatgtttacagtcttaccttcactaagttctagagcccgagttaaagcaatgagttcttccttctgggctgaagtgccctgaggcaatggtttggcttcaataacatcatccaaagttaccaccgcatatcctgcgcatctttctcctcgtggactgatgaagctgctcccatccacgtataactcccagtccactgatgcccatgactggtctcgaagatcgagtctgctagaatacactgagtccaacacttccacacagttatgttcaacagggctgtctgatactgggag

SEQ ID NO: 10650 - DNA, 477 bp, Homo sapiens
  MAP TO AC004615.1; EXPRESSED IN LUNG, SIGNAL = 0.97; EXPRESSED IN FETAL LIVER, SIGNAL = 0.86; EXPRESSED IN PLACENTA, SIGNAL = 0.82; EXPRESSED IN BRAIN, SIGNAL =   1; EXPRESSED IN BONE MARROW, SIGNAL = 0.87; EXPRESSED IN ADULT LIVER, SIGNAL = 0.84
tcaaaattagatgcatgctttgagaatttaattgaacatgtatttatcttcatattttttatcaaacaaggtgcagatacagcaattaaatttatttgataaaaatcaaattgtttaatagctctgttgttattttttggtcaatatctgaaaggtttatttgttgttttaatggtttacattttattaatggcttacatatttattagataaaatgtattccttctcaccattcttcttgtgctcagactttgttagcatgtttatcattatacatatatatatatatatttttaattaatttatttattttccctcaggaggaatgtcagaactacatccgggtgcttctggtgggtggcgaccggttattcacctgtgggaccaatgcattcacgcctgtctgcaccaaccgctcggtatggcttctttttgtgcctcaaaagaatttaatatcagaagaggcaaaacattgtg

SEQ ID NO: 10651 - DNA, 472 bp, Homo sapiens
  MAP TO AC005410.1; EXPRESSED IN LUNG, SIGNAL = 0.95; EXPRESSED IN FETAL LIVER, SIGNAL = 0.76; EXPRESSED IN BRAIN, SIGNAL = 0.8; EXPRESSED IN PLACENTA, SIGNAL = 0.95; EXPRESSED IN BONE MARROW, SIGNAL = 0.89; EXPRESSED IN ADULT LIVER, SIGNAL = 0.9
gctgaatccatcctgtttgcttgtttttgtaagtaaagttttattggaacatagccacacccatctggctgcatagttgcaggagactagtggcttgcaaagcctaaaatatttgctatctggttctttacagaaaaaggttgtgactcatgatttagatggtgtactggatttttcaaggcttctgtgagattaccacaaacttggtggcttaaaacaacagaaatttattctctcacagttctagaggccagaaatctgaaggtgttggcagggccatgcttctcccgaaggttctgggggaggatcccccctttctttcagcttctggtactgctgctcttccttggcttgtggcagcataaccgtaatctctatggtcttcttccctgtgtctgtcttgtgcatctctatcttctccttttctttgtttggtctcctataaggatagttattttatttagtgcccacc

SEQ ID NO: 10652 - DNA, 470 bp, Homo sapiens
  MAP TO AC005030.1; EXPRESSED IN BONE MARROW, SIGNAL = 0.7; EXPRESSED IN PLACENTA, SIGNAL = 0.66; EXPRESSED IN LUNG, SIGNAL = 0.87; EXPRESSED IN FETAL LIVER, SIGNAL = 0.7; EXPRESSED IN ADULT LIVER, SIGNAL = 0.8; EXPRESSED IN BRAIN, SIGNAL = 0.67
tgaaatgtgtttgcctaagagggagatatcgaagaccatctttcctgcagttatttgacagcagagccctttttccctcagagcgcttattaacatcctgtggaaaagtgatttttgggtcaccccactaggaacatgtgtcccttggagccacatgagacaagttgtaatggtcatttactggagaaattggctggattgtgctaacaaagggagaggaaaccaaataagaaaactgaccgtcctccgagggtcaggattttcttttgtttttttagctcaagggtccaatgttcccggggagcgtcaaagtgggttctttctgctatgacagcggaatacccatgaacactgggcgggagagggttggccaggagcacgccccggggaacctgtgtggtaagagacctccagtggggggcggtgatttcactcctagtgggctcagcccccaccagaagagcttcatt

SEQ ID NO: 10653 - DNA, 439 bp, Homo sapiens
  MAP TO AC004057.1; EXPRESSED IN PLACENTA, SIGNAL =   1; EXPRESSED IN LUNG, SIGNAL =   1; EXPRESSED IN FETAL LIVER, SIGNAL = 0.75; EXPRESSED IN BONE MARROW, SIGNAL = 0.84; EXPRESSED IN ADULT LIVER, SIGNAL = 0.62; EXPRESSED IN BRAIN, SIGNAL = 0.82
ttgtactggcacaaaataaaattctgtacactttctgggacatgtacagctttatattttttcagtccttttgtatctcaaagcagcactctgctaagcgcttttcacacttacgaagatgtactccccacctcctgggatttacagacaacagttataccttgattaatattataactaactcactccaactagctactcagtgactcaaaatactgaccaacaatttggaaaaaacttagaagaaaattaatatgattttaaaaatcaagaacaaattttcaagaggaaaatattaattcaacctgaaaaatagaataaatattagtttcttcatcttcaaaacaaggattaaagtcttcaactgacacagtagtaaggcttaaacagagcaatggaaataaagtgacagtttagcagctggtacatggtgccaatt

SEQ ID NO: 10654 - DNA, 476 bp, Homo sapiens
  MAP TO AC006477.2; EXPRESSED IN PLACENTA, SIGNAL = 0.92; EXPRESSED IN FETAL LIVER, SIGNAL = 0.84; EXPRESSED IN BRAIN, SIGNAL = 0.57; EXPRESSED IN BONE MARROW, SIGNAL =   1; EXPRESSED IN ADULT LIVER, SIGNAL = 0.82; EXPRESSED IN LUNG, SIGNAL = 0.98
tggcctttctcatgaccagcccccaaccaagaactcaccaagagtcacctcattagaacagaagatacacccaggaaactccaaggaattaggagttctgcatcaggaaccatggtcaaagaccaaatattagaacaaaagatacctattacccctattgctcagaaagttacaagccctttaaggagctctgtgccaggactgtggataaagaccaagatatatatatttcctataaatcacatactcacaagaagagaaattttgacaacagtaagtgccaaaatactgaatagatcttggtagttcatagggcttgaaagcggggacaccaccaacattcctggcagccaagtcagatgcatggacatcgtctttaaccacatcttcacactcatccctcatctgaactatcaacaatttcatggattttgctatctaaatgttcatgttctctaatccatttccttctcccc

SEQ ID NO: 10655 - DNA, 477 bp, Homo sapiens
  MAP TO AC004626.1; EXPRESSED IN LUNG, SIGNAL = 0.54; EXPRESSED IN BRAIN, SIGNAL = 0.57; EXPRESSED IN BONE MARROW, SIGNAL = 2.1; EXPRESSED IN PLACENTA, SIGNAL = 0.59; EXPRESSED IN ADULT LIVER, SIGNAL = 0.4
tcaggtttgggaaatcttgggggtcatggttctgcagtgtcttctggcctcttgcatagctgctgtatcatcaaatggttcaataagatattagacaacaaaagaaaagtaaattgtttctaattttcagctaagctaattaccaaaactttcagctgaaccaactatgaggaacagctgttgatttttatttctatagctcaaggaaactatggataaattacccaatgataatctttcctgcgtcctaataaaggaggcccaaatggaagatggttaagggaaaaacctatctaaccttggagcatgcgtacctggtttcgtgtgagccagagctccctaacatcaaaaatcccattctagatctgatggagaataatgttatcagtgtcattgttttgaggatgaataagagcctttaaattgacacacaggttattctttaaatggacacacaggttattttcttatttggca

SEQ ID NO: 10656 - DNA, 412 bp, Homo sapiens
  MAP TO AC002532.1; EXPRESSED IN ADULT LIVER, SIGNAL = 0.75; EXPRESSED IN PLACENTA, SIGNAL = 0.64; EXPRESSED IN LUNG, SIGNAL = 0.66; EXPRESSED IN BRAIN, SIGNAL = 0.82; EXPRESSED IN BONE MARROW, SIGNAL = 0.71
gcaaattgcaaagaaaaagaagaaagacttttaagtagaagggtgtggtgaaggaagatgagaacagagaaatcgccttgagatttatttagagtgaggtcgctgatgaccttggaaaggacagtgttagtggagtgttgggggatggaagccagagagcacagtgtgagaagggagttctgaaaaagtgggaaagtcagagcagtacatttgggttgaaagatctttaaatcttctgatggcctatgaacgatgccaaaggcaaaaattcttgcctgccatgaaactgttggacgacgtgttcttttttcagattgctgttctcagaaagcccagggcaatcagatctcagccagatgtgttgagggtcaggactgagatcaacatcttgggaggtgaggttgagggaaca

SEQ ID NO: 10657 - DNA, 366 bp, Homo sapiens
  MAP TO AC006501.5; EXPRESSED IN ADULT LIVER, SIGNAL = 0.68; EXPRESSED IN LUNG, SIGNAL = 0.73; EXPRESSED IN BRAIN, SIGNAL = 0.81; EXPRESSED IN BONE MARROW, SIGNAL = 0.63; EXPRESSED IN PLACENTA, SIGNAL = 0.72
tcaacaggattaaaacaggaaggatttaaatatccatacctatataatttgtatgactgtgcattccacaaaaccacagttccatcagctgcccctgatgccaaacacgtggagtctggggaaaactggcaaaccctcacagggctgccactaggctgttccatcactgccagcatctgtccattttcagtattccataggacagtggtaccatctgttgaacacgatgccaaaatatgtcctgaaggggagaaacagcagcagtggacagcataggtatgaaacttcaatggagaatgtggcagttcagtaaagtcacgtaacgagtacaggcgaattgttttgtccaaggagcaagtagccaag

SEQ ID NO: 10658 - DNA, 457 bp, Homo sapiens
  MAP TO AC005613.1; EXPRESSED IN LUNG, SIGNAL = 0.88; EXPRESSED IN FETAL LIVER, SIGNAL = 0.76; EXPRESSED IN BONE MARROW, SIGNAL = 0.87; EXPRESSED IN PLACENTA, SIGNAL = 0.81; EXPRESSED IN BRAIN, SIGNAL = 0.99; EXPRESSED IN ADULT LIVER, SIGNAL = 0.86
tgcactggcaagactacctcttttaaaaccttgctcaacaaagtaatgataaatgcttgagatgatgaataacccaattatgctaatttgatcattccccattgtatgcttatatcaaaatatcagatgtaccctgtaaatatgttcaactgttaaatatccataaaaattagaaattaaaaatttaaaaagtaaataaaatcttgctcaagcttttaattattttctatagggtattgcccaacttaatcttgtacctagatttccatgtatttctgcatgtgcatcagggacctgtgataaaattacctaatactgcagtgcaggtttacaagctcagtagtgcatgccagttgataaaattcatgtgtgtcccattcaagtacatgatcaatgaatataacaaatataaaacacattattggaaacaagtgatcattggaaccttcatttttgc

SEQ ID NO: 10659 - DNA, 457 bp, Homo sapiens
  MAP TO AC004063.1; EXPRESSED IN PLACENTA, SIGNAL = 0.9; EXPRESSED IN BRAIN, SIGNAL = 0.66; EXPRESSED IN BONE MARROW, SIGNAL = 0.74; EXPRESSED IN LUNG, SIGNAL = 0.74; EXPRESSED IN ADULT LIVER, SIGNAL = 0.57
agaattagcataatgtttaagggccctaaaattttcagaatgataaacaaacactggcttcaacttgaagtcaccagctgcatgaactcctaactagagagtcagcctgtccttaaagctctgaagccaggcactgactttcctctctagctatgaacgtcctagattggtcttttcctccaataaaacactgttttgtctacataaaaaaaaaaatctattgtttagcatatccaccttcatcaattatcttagctagatcttctggataatttgctgcagcttctacgtcagcacttgctgctccactttgtactttcacgttatgaggatggcttctttccttaaccttcatgaaccaacattttttagcctcaaacttttcttcttcagcttcctcacctctctctgccttcacagaattgaagagagttagggccttgctctggattaggct

SEQ ID NO: 10660 - DNA, 452 bp, Homo sapiens
  MAP TO AC005881.2; EXPRESSED IN PLACENTA, SIGNAL = 0.68; EXPRESSED IN FETAL LIVER, SIGNAL = 0.76; EXPRESSED IN BONE MARROW, SIGNAL = 0.84; EXPRESSED IN LUNG, SIGNAL = 0.85; EXPRESSED IN BRAIN, SIGNAL = 0.65; EXPRESSED IN ADULT LIVER, SIGNAL = 0.76
aatgtgctcattgggtttttgtaaaagatgttcaaacattcgtaatgtcattatgcttatctgaaaccaaaattgataaaagctaactgaaaaatgtctttacataagttactcttcttaccatcttgtgagtcatgctttcaatttctaaagccaataaaagaggttgtattgaaaatatctgaagtataatacattaaaaccgtatttcaaagaatctaagtccaattctaaatcattacgtagcttacctcatcagatatgtgatcacaatgttcaattaacctatgccttaaaggatgtctgctgatttctgccagagtttctggttccctctgttctccaaggataaaaaacaccatttcttgaagcaaaacatcagaggtcacttgccgaacgatgcgatgaagcagagcagtggatgtgagaatacccatctcagaactgagcac

SEQ ID NO: 10661 - DNA, 456 bp, Homo sapiens
  MAP TO AC004638.1; EXPRESSED IN BRAIN, SIGNAL = 1.6; EXPRESSED IN ADULT LIVER, SIGNAL = 0.67; EXPRESSED IN PLACENTA, SIGNAL = 0.71; EXPRESSED IN LUNG, SIGNAL = 0.72; EXPRESSED IN BONE MARROW, SIGNAL = 0.68
cccgctactgtgttggaatctgaatgctacatttgctgataagtcttagctagatgggcttggaactagaactaggtaaagcagagcccagaccctttagtgagtaaataaatgagggtcctgcagagaaaaatgagtggggaagagtagggacagaccctaagggaaggaggagggaggggtagagctggctgggcaggtatgccagatgatgcatctggggtcatagaggaccacagcacccccaatctgccctgagcattccttctgcttcctcaagatggggaagttccggagcctgctttttacctcggaggacgatgagaggatccacatggtgaacaacttccggccaccacagccactgaagggccgcgtggtaaaggcctccttccgggcctgagctgcccatctgcctagccggccactagggcaccatcttctcaagggcttcca

SEQ ID NO: 10662 - DNA, 366 bp, Homo sapiens
  MAP TO AC005681.1; EXPRESSED IN LUNG, SIGNAL = 0.92; EXPRESSED IN FETAL LIVER, SIGNAL = 0.79; EXPRESSED IN PLACENTA, SIGNAL = 0.98; EXPRESSED IN BRAIN, SIGNAL = 0.79; EXPRESSED IN BONE MARROW, SIGNAL = 0.75; EXPRESSED IN ADULT LIVER, SIGNAL = 0.82
ttcttgtggatacgcctgtgtatgagtctctaattctgcattttggataaaactttatacaagtaactgctggctaagtacattctgaaggtttgtaggacaacttatatttaaactaccagtatacaagaatgccattttcttcacactgaggatagtaccataaaaataaacaacagcacaaggtatactaaagataaatatatatgatatattgctgtttaaatctttgtttctttaaatctttcctgatgtattattgtttgcatttttgccctccttatgtttgttgatcacttgtatgcctccccttttattgcttagtaaattgacattcgtgttccttgccaagttttccaacatgct

SEQ ID NO: 10663 - DNA, 384 bp, Homo sapiens
  MAP TO AC004944.1; EXPRESSED IN BONE MARROW, SIGNAL =   1; EXPRESSED IN PLACENTA, SIGNAL = 1.2; EXPRESSED IN LUNG, SIGNAL = 1.2; EXPRESSED IN FETAL LIVER, SIGNAL = 1.1; EXPRESSED IN ADULT LIVER, SIGNAL = 1.2; EXPRESSED IN BRAIN, SIGNAL = 0.97
actgtaatttcccctaccttactgtaatttttttactttatacactttttaaaaaaattatttgatagttttataacaacacttggcataaaacacaaacacattatacatttgcgcagaagtattttgtttctttacattcttattcaagaatctttattttttattttttactttttacaattttgtttaacagcaagacacaaatacatgcattagcccaggcctactccgggtcaggatcaccaatatcactctcttccatctccacatccagtcccactggaaggtcttcacgggccataacacacatggagccatcgtctcccatgataataatgccttcttctacaacacctcctgcaggatctgcctgaggctgtt

SEQ ID NO: 10664 - DNA, 466 bp, Homo sapiens
  MAP TO AC005483.1; EXPRESSED IN PLACENTA, SIGNAL = 1.1; EXPRESSED IN BRAIN, SIGNAL = 1.1; EXPRESSED IN BONE MARROW, SIGNAL =   1; EXPRESSED IN ADULT LIVER, SIGNAL =   1; EXPRESSED IN LUNG, SIGNAL = 1.1; EXPRESSED IN FETAL LIVER, SIGNAL = 1.1
ttttagggcactctctctgtttgtaatttaatatattcttatttttatattaaagaggtatttagttatcacccatattcattaagaatgaaaaagagttacatgccattttataagtatcgatatgttcagatgagtgagatcaactattttgtaatgtaaaagttacttttcattgattgagaccaaagaggagaagctgggtaaggacagtgtcctgtgccatggctgccttggcctggaacatttacctgctggccgggcttgatgggtgacagcgtgatgccctgggtgttgatcacgggcaggatctggttcccaatgactgtggcgatgatctggccctgggcgtttgtgaggagctggggggtgattggctgcacttgcaagccctgagtgccgcttgctgcttggctcgatggccctggattaggcatcagtggaatggtcccgataatctgcaaga

SEQ ID NO: 10665 - DNA, 480 bp, Homo sapiens
  MAP TO AC006518.17; EXPRESSED IN BONE MARROW, SIGNAL = 0.65; EXPRESSED IN ADULT LIVER, SIGNAL = 1.4; EXPRESSED IN PLACENTA, SIGNAL = 6.3; EXPRESSED IN LUNG, SIGNAL = 0.74; EXPRESSED IN BRAIN, SIGNAL = 1.1
ggggaggtcagtatttcaaaagataagaattctttgaaccacttgttaaaaatacaaggacttgcaaccttatccaagaatatctgaatacaaatctttagaaatggggtccaggattatgtaatttcaacatatttccaattgatttgtgaacacgataaagtttgggaatggtagcagtttgggcatttaatggagaatgaactggaatcatacctgccactgaattctagattaccagagtggttgctcctggggatgtcttgctggtctgtccctctggaagaatgatgatgcttcctgcaggctgacagaaggaaatcggggtagagagagttgacggtgtcctcgtcggggtggtcgttgctgattttgaaaaggaggtgggggaggatggcggtgatggcctcctggttttggtggtctctgctgaggaccatcatcttggttaccactatcaccagggggtctaggtaggag

SEQ ID NO: 10666 - DNA, 458 bp, Homo sapiens
  MAP TO AC005038.1; EXPRESSED IN LUNG, SIGNAL = 1.4; EXPRESSED IN BRAIN, SIGNAL = 1.3; EXPRESSED IN BONE MARROW, SIGNAL = 1.4; EXPRESSED IN PLACENTA, SIGNAL = 1.5; EXPRESSED IN FETAL LIVER, SIGNAL = 1.6; EXPRESSED IN ADULT LIVER, SIGNAL = 1.2
ggtagcagctcctcaggtgggctgtgcacctggcactgggtgctgtggggctggtgagggaagctctgcttggcgccctctggcagccactactctctgcttccctcctttgccaggcctgcctgaagctcctgccagcagaggggaagcccggggaggggtgttggaggggccacggtttccctgctgggggaggcccagagggtcaggcatggagcacaaatgccttgctgatggtagcttctctcctgtccccacagaatggtgctgtgcccagcgaggccaccaagagggaccagaacctcaaacggggcaactggggcaaccagatcgagtttgtactgacgagcgtgggctatgccgtgggcctgggcaatgtctggcgcttcccatacctctgctatcgcaacgggggaggtacccagtgggcacagggcagggaccacccacttgggtag

SEQ ID NO: 10667 - DNA, 478 bp, Homo sapiens
  MAP TO AC005659.2; EXPRESSED IN BRAIN, SIGNAL = 0.89; EXPRESSED IN PLACENTA, SIGNAL = 1.2; EXPRESSED IN LUNG, SIGNAL = 1.3; EXPRESSED IN BONE MARROW, SIGNAL = 1.4; EXPRESSED IN ADULT LIVER, SIGNAL = 1.4; EXPRESSED IN FETAL LIVER, SIGNAL = 1.3
gatcacagttggaaggcccctgaaggtccaggcccctcttctcagctgaggctcagagaggaagggtttcctggcacagcacatggccacggaggctccagaacccagctgagggactggtggggccctgctcctccctccacagccaacagtccccgctaatgaggactttgcgttcttggccctgctcctgcccagctggccttttggctgagaacatcttaggctgcatgagagccttgccctcacaggcacacccccttggacctgcctatccagatcccaacaccctggatcttgtccacactctggtcccttctgagaagggtgaacaccatgataacatggttcgttgctgttagaaaactcatccccctcctggcacccatcctctggcagacaatcactgttcacagccttccaggtgcggctggcccaggctatgagcaagcgagcagcaagagtgtgaacaccaccg

SEQ ID NO: 10668 - DNA, 473 bp, Homo sapiens
  MAP TO AC004835.2; EXPRESSED IN BONE MARROW, SIGNAL =   1; EXPRESSED IN ADULT LIVER, SIGNAL = 1.2; EXPRESSED IN PLACENTA, SIGNAL = 1.2; EXPRESSED IN FETAL LIVER, SIGNAL = 1.1; EXPRESSED IN BRAIN, SIGNAL = 1.1; EXPRESSED IN LUNG, SIGNAL = 1.2
gctctttttccttggggaagtgctcccattctccctgggcatctgtagccactacttttaagtgttttttcaaaccatttagcttgataatcttcccatgtaactttgccttcaggatctgaaccaaacttcgggtttcagcctcaccctccaattgaatgaagtcctttgtactcttggagagctgaactgtggtgaactggtcagggcaaatcaggctcttcagctggtcaagaacttcccagttagagaagggccttacaggttctagactccctggaagcaatatgttgatcaacaattttgctatgggcttgaggtagaggtgctgagctgcacagagctctgttgcctcagagttatcatacaccactgtgactgtcatgttgtcctcagaccaccttagagaacgaaagagaaaattttgatacagatggagtaatacacagatttggattgtgaaatggtgctgg

SEQ ID NO: 10669 - DNA, 450 bp, Homo sapiens
  MAP TO AC004656.1; EXPRESSED IN LUNG, SIGNAL = 0.73; EXPRESSED IN ADULT LIVER, SIGNAL = 0.64; EXPRESSED IN PLACENTA, SIGNAL = 0.88; EXPRESSED IN BRAIN, SIGNAL = 0.74; EXPRESSED IN BONE MARROW, SIGNAL = 0.77
tccatgtcacattgggagaggaagaacggattgggcacctggcacgtgtcactgctttagaacctgctgactgcaactgacagaccttaaaccacatcctcctccttcattgaccaataagagttgttcacccatcaattgtgtgtattccattgctctaagttgctgtggatgctaaaatgatttttacacataagatatcctttctaaacataagcccctatatttccctgtgtgaccatcccagcctgctgtgttttaatcccctccctttccttttgtgttcgtctagcacttctgtttgggggtgacactaatcctgttcatcctaaacacataggaagtatcgatcccacctgtaacgtggcggatgtggtgaaaggtaaggagaccgttgtaatggtatcgatcgtagttcaaattggattgtggtttattggaggcagcttg

SEQ ID NO: 10670 - DNA, 472 bp, Homo sapiens
  MAP TO AC004707.1; EXPRESSED IN PLACENTA, SIGNAL = 0.78; EXPRESSED IN LUNG, SIGNAL = 0.82; EXPRESSED IN FETAL LIVER, SIGNAL = 0.84; EXPRESSED IN BRAIN, SIGNAL = 0.97; EXPRESSED IN BONE MARROW, SIGNAL = 0.73; EXPRESSED IN ADULT LIVER, SIGNAL = 0.88
gagacacgcagaatgagtgccagttgcaaatctacccccttcagatccaagggaaaagttgtttctgtttcggtctgtggagacattttttctcttcagggcctggggagtttttgcttgaggaaggaatgtaggtagatctgcacggaggagactagcagagattagtatagagcaggtctcctctgactgaacttgctttgtctactgttacttttcctccagaatctaagtctggctcccgtccccgcaagccaccaccccggaagcacactcgttcctgggctgtgctgaagctgctgctgctgctgctgctatttggtgtggcgggagggctggttgcttgtcgggtgacagagctgcagcagcagcccctctgcaccagcgtgaacaccatctatgacaatgcggtccagggtctacgccgccatgagatcctccagtgggtcctccagaccgactctcagcagtg

SEQ ID NO: 10671 - DNA, 473 bp, Homo sapiens
  MAP TO AC005562.1; EXPRESSED IN PLACENTA, SIGNAL = 0.78; EXPRESSED IN BRAIN, SIGNAL = 0.73; EXPRESSED IN BONE MARROW, SIGNAL = 0.77; EXPRESSED IN ADULT LIVER, SIGNAL = 0.69; EXPRESSED IN LUNG, SIGNAL = 0.69
gaggcctgtttgttcctgactcagcctgctgcccccagaaaaggggcatgtgggccacacaggggccccaaggcaggtttccagaacctaagccacagccaaaccacccttggctccctgagaccctatggctggactccatgcctttggccagggcaggagttggggggaagaagtcatgccccccggagacccctcccaccagcagaccctaccttgttctgcagctcctcgattgtcctgtagtactggctgtagtcacgggcgggccccggggcctgcctctggtaccagtcacggatcttcacctccagctcagtgttggcctcctccagggcgcgcatcttgtccaggtaggaggccaggcggtcattgaggttctgcatggtggccttctcacctccggccagcagcccatcaacgcccccaaagctgctgccatagccaccgccagagccaaagcagtagcagct

SEQ ID NO: 10672 - DNA, 454 bp, Homo sapiens
  MAP TO AC004841.2; EXPRESSED IN ADULT LIVER, SIGNAL = 0.84; EXPRESSED IN BRAIN, SIGNAL = 0.72; EXPRESSED IN BONE MARROW, SIGNAL = 0.86; EXPRESSED IN PLACENTA, SIGNAL = 0.81; EXPRESSED IN LUNG, SIGNAL = 0.74; EXPRESSED IN FETAL LIVER, SIGNAL = 0.8
tgtctcccagtgataacccaggcgatgttacaaaaatgagtaactacaagagaaactgctaacaaaactgaagacacagaaatgaaatgggaaaagtagcaacactgagtcaaacgtagatggaattagagaagaaacagctgactggaaatgctgacactgttggcctttgtggcactggatgaacggccacaggaactgagtgaggccaaaacttaccaacataattgagccaagtggctgtgatgaaaaggatgaagatgtttcagggaaagcgatgccagcaaaacaacaacaacaacaacaacaacaacaaaacaaaacaaaacttcaccttaaaggaactcttgaagatacttcacaacattgtaattgcaaggatgaaatgttggaagctgatccaaatttggcaaggagtatggcaatttgctaaagcatagaaaagatgctcgcc

SEQ ID NO: 10673 - DNA, 470 bp, Homo sapiens
  MAP TO AC005157.1; EXPRESSED IN LUNG, SIGNAL =   1; EXPRESSED IN ADULT LIVER, SIGNAL = 0.93; EXPRESSED IN PLACENTA, SIGNAL = 0.93; EXPRESSED IN FETAL LIVER, SIGNAL = 1.1; EXPRESSED IN BRAIN, SIGNAL =   1; EXPRESSED IN BONE MARROW, SIGNAL =   1
tcctttttcatcaacagagatccctttctagatcagtttctaggccactaactgttcatccaagtacagctaatggctctcttctcccaaccctggacataatttctccttagagtctgtggtggctttgtagcatgtcaacgtggctggactcaactagatttctcagaatctcctgccttatatatttctgagcagagtaggccaaagagaccttcttatggaggatctggaaggcagaagtgccacagtggattgggtgtgtgagctcacatacctcgtcacttatctgctgctcacctctttggcaggcaacagcagctgggcccacgctgccccaccttccactagactctcttccagcttcttccatttctgggcctgtcctacaattagctccatgatgagagatgccagcatctcctccaggatacatacatcaaggtcagaggcagcaagaactgatctga

SEQ ID NO: 10674 - DNA, 476 bp, Homo sapiens
  MAP TO AC005899.1; EXPRESSED IN PLACENTA, SIGNAL = 0.97; EXPRESSED IN ADULT LIVER, SIGNAL = 1.1; EXPRESSED IN LUNG, SIGNAL = 0.96; EXPRESSED IN FETAL LIVER, SIGNAL = 0.99; EXPRESSED IN BRAIN, SIGNAL = 0.7; EXPRESSED IN BONE MARROW, SIGNAL = 0.92
aagatggataaatgaagcagagacatgagcttttcctgcaacttcatagtaatccagtggctgagtagggaacagaatgcaaatttggtatatgatgttaacttatttttgctattctgctatttgctaggaatgctttaaactcctagtaagtttcacttagactgattccagtgatgtaagtaccgatttttatgacgttgggtcagtttcttaagtgggtattttgtctcaaatgttgatgtttactcctctttttgaattgcctttcctacagagcttggaggactcctgaagtatgtacgacccttcttgaattccatcagcaaggctaaagcagctcgcctggtccgatctcttcttgatctgtttcttgatatggaagcagctacagggcaggaggtaagtgatattaatgacagaaagtagacaatatggagaaaagtttgtttccaagaaagaaatgcctacctgca

SEQ ID NO: 10675 - DNA, 477 bp, Homo sapiens
  MAP TO AC004664.1; EXPRESSED IN PLACENTA, SIGNAL = 0.61; EXPRESSED IN LUNG, SIGNAL = 0.71; EXPRESSED IN FETAL LIVER, SIGNAL = 0.77; EXPRESSED IN BONE MARROW, SIGNAL = 0.8; EXPRESSED IN ADULT LIVER, SIGNAL = 0.65; EXPRESSED IN BRAIN, SIGNAL = 0.58
ttcttggctgagaaagtcgtctttataattcaggagctcagtgtcaaaaaggcagcttggtgtagtagcaaaagcatagacttcagatcaaaatagacttggcttcaaattctggctccttcactgaccagctgtgtggccctgggcaggttaattaacctctccagacctctggttcctcacacataaaataagagatgtagaaacgtcatgtgaatcttctgaggattaaatgtgaagacaggcaggtagcgaggtcccaatacaggtcagatttcttctcccttttgaaagcagggccatggaggagagtgcccagctgggtccccatggctctgctttcctggagaccaagaacctggactgggctgcctcagacagtgtgaggcaggagcaaggtcaggaagccccagtagagcctttgaggaggctcgagtgagtctgttaggcatggtgccacatgcaggcagagacatc

SEQ ID NO: 10676 - DNA, 480 bp, Homo sapiens
  MAP TO AC003093.1; EXPRESSED IN PLACENTA, SIGNAL = 0.7; EXPRESSED IN LUNG, SIGNAL = 0.77; EXPRESSED IN BRAIN, SIGNAL = 0.66; EXPRESSED IN BONE MARROW, SIGNAL = 0.78; EXPRESSED IN ADULT LIVER, SIGNAL = 0.6
atcaacccagggaaagcagctccctatatatcctcaaggcctggatccagcagtgactggagccagtttccccaagtgtttcagctacatgagccaatacactcttgctcatttaagacaacgtgagttgggtttctgttaacttgctacggaaagagtcctgactaatgaagacaccacccaaagaggcccccaaccaaggtctccaggactgctcagccatgaacgcagggcagcccgactgcacgcacctgcaccgtcttggtctggatgcccacgatgccaccacacttctcctcgacctgcatgtgctcagagatcacacacttctgcatcgtcgtgatcttctgtgtcaaaacgcacaggacctcattccttccttccagcacctgctggagcacagggtttctcagatttattgttctgaaaaagaaaaacggatgtgagtggcttagtgcctcaggggacattggtgtagtg

SEQ ID NO: 10677 - DNA, 469 bp, Homo sapiens
  MAP TO AC004738.1; EXPRESSED IN BONE MARROW, SIGNAL = 0.76; EXPRESSED IN ADULT LIVER, SIGNAL = 0.92; EXPRESSED IN PLACENTA, SIGNAL =   1; EXPRESSED IN FETAL LIVER, SIGNAL = 0.88; EXPRESSED IN BRAIN, SIGNAL = 0.77; EXPRESSED IN LUNG, SIGNAL = 0.88
cagtaacatgtcattagagggctgttagttgattttatctaccagtgcttaggtagatgggttttgttgttgtttgaatttcatgttaattcaaacggaatgaaaacttggtttttgatgaggacagaaagattttacatctcatttcactggttcttttttcttctgaacgttggacttctatgtgcttatttaaaaaaatatgtggctactgccatctgttggatggaatgtgagtcctgctcagacacgtgtgccctttaaacaatgtctgtcccttctaacttcacaagtgtctcctcaaggtaaggagacacttaccttgagtgtctcctcaaggtaaggcctttgctgtagctgcatgcatcccagcttccagccccagaactgagttcattttgggaacgttttctattgttgtggggcactttctcttcagacatgtaaatgctctctactgaagagtgtg

SEQ ID NO: 10678 - DNA, 472 bp, Homo sapiens
  MAP TO AC004648.1; EXPRESSED IN PLACENTA, SIGNAL = 1.1; EXPRESSED IN LUNG, SIGNAL = 1.1; EXPRESSED IN FETAL LIVER, SIGNAL = 1.1; EXPRESSED IN BRAIN, SIGNAL = 1.1; EXPRESSED IN BONE MARROW, SIGNAL = 1.1; EXPRESSED IN ADULT LIVER, SIGNAL = 1.3
acatgaagccacgagaaaggaagaccagcagagcaccttctgtgtacaccgtatggattcatttatgatttgaaaagaattggatttgactacaatttgaatttgctccaatacaaaattcattgtgtagaagaacccctctgttgtggcttccctgattgccagaaaaactcagccacgtgccaaaggttgagatgaatgatggcttaaaacagaatggaaatcccatacccctgacacatgacatcttctgcagcatgtgtcttatcctgtgctgccatttgaagcagctgtaaaggaactgaccgcagtctactccattgccttcgacattgcttccaacagcttctgggtgtcggccgttcacgtgtgcctgggcaacatcagaaattcctatgtgagccccatttggaaaaccaaaggcataacctcttgtttcttttcctggtgaaacgcaggctgtaggaaggat

SEQ ID NO: 10679 - DNA, 488 bp, Homo sapiens
  MAP TO AC006531.1; EXPRESSED IN BONE MARROW, SIGNAL = 0.57; EXPRESSED IN LUNG, SIGNAL = 0.49; EXPRESSED IN FETAL LIVER, SIGNAL = 0.76; EXPRESSED IN BRAIN, SIGNAL = 0.7; EXPRESSED IN ADULT LIVER, SIGNAL = 0.48
aatgctgcaacccagacttcactgtctttaaattatccttagttcagacctttcctactgggatttgagaacagacatacagcgcaccacacaattaccacagttcacccagagaaagcattccaattgcaccttacagatttagtctgccttgttgcaagaaagacgtgctcttggctgtgagatgggatctagagcagctcaacaggaaatgcgtgggagaaagaagcactgtgagcccctttattgcccatgctttcttccctcccctgcattcagcacacagaaggatgctcaccttttcccattcccggtctttgttcagcacaatcaccaccagcctggggtgcacctggtagccttcctcagtgaaggataagtctttgccatcccatgtaacattgaccataaatctagaaaggggaagagagaaagacaaatttttaggaaagaattagagcaatcgaacaaataagtggatgccacca

SEQ ID NO: 10680 - DNA, 453 bp, Homo sapiens
  MAP TO AC006239.5; EXPRESSED IN PLACENTA, SIGNAL = 0.8; EXPRESSED IN LUNG, SIGNAL =   1; EXPRESSED IN FETAL LIVER, SIGNAL = 1.2; EXPRESSED IN BRAIN, SIGNAL =   1; EXPRESSED IN BONE MARROW, SIGNAL = 1.2; EXPRESSED IN ADULT LIVER, SIGNAL =   1
ctcagaatgaaaccaaccctgtcaacaccttcgtctcagacttttaccctccagaactgtaagaaaataaatttttgttaagccacctgatctgtggtactttgtatggcagccctggcaaactaatactttacttctctgaacctcagtttgtagtataaaaagggaatttttgtgagatttagatatgatttatgtaaagtaggtgctctataaatgatacctggaagttgcagtgatggcagtaatagtagcagaagggttggtgattggaagaatattattggctccatcttcagggctgttgaggtgatcaaacgcaaggataatttgtatgcaaaatataaatttcaacctctgaaattaaaggacctaaatgtgaatcctggctccaccattgatcacacagctgatctggaatatactcaatctctccagacatcccttttcaca

SEQ ID NO: 10681 - DNA, 491 bp, Homo sapiens
  MAP TO AC005586.1; EXPRESSED IN PLACENTA, SIGNAL = 1.4; EXPRESSED IN BONE MARROW, SIGNAL = 1.1; EXPRESSED IN FETAL LIVER, SIGNAL = 1.1; EXPRESSED IN LUNG, SIGNAL = 1.2; EXPRESSED IN BRAIN, SIGNAL = 1.2; EXPRESSED IN ADULT LIVER, SIGNAL = 1.2
tcagcctgtgtaagggtgacctaataattccatgagacgcttacgcctggcccatcctgcacctgaggacgcaggggctggggaatgagtgcagtcacgatgctaggaagcgctcagcccacgtggagacccacgcagcttggccctgacgcctatactcttaaccacgacaaactaaaaataatactgctcaaaacgcttcccacaaaagccaaaagccaatatgatcgattctaaaaaaaacacttaattcagaaaacaaagtgatcccttatcacttttgatacagtgtgagaaatcagcagatctcctggatgacgttctggcggtcagcagtcttctggacactttccggacaccagcccacagtcattccctcccacagcccactcagaactgcaactggaaatccaaacgcattcaaaaactggctaaggcaggtcagcattttagccagaaagtatctgcttcactcaagccagcagattctc

SEQ ID NO: 10682 - DNA, 487 bp, Homo sapiens
  MAP TO AC005552.1; EXPRESSED IN PLACENTA, SIGNAL = 1.9; EXPRESSED IN BRAIN, SIGNAL = 1.8; EXPRESSED IN BONE MARROW, SIGNAL = 2.1; EXPRESSED IN HELA, SIGNAL = 2.1; EXPRESSED IN LUNG, SIGNAL = 2.1
gtggggagcagcatctttcaggattctatgatccagttccctgacaccagaagagcctggactgtcccaaggtccccagcctctcccctccctcccctcagcacaggcctctccaggtggctggagctctgtgggcctgggccgggctggaagctgacccagccctgggctgaggccatggctgtgatctcccccaggaccgttccatcttcgctctcttcgtcttcagctccttctgcttcttgccaccagatgaacttcctgctgagtaattggagctggagaaatggtgcatccatccagctgctgcgcttggagactttgattaagggtcagcaggttaacttgttgccattcagcatgcaggcggggtgggggcacctcctgatccctcccctccaccagccagtagctttgccaggagagcagcaaatgagaagcctggaggctctgggagggcagggaagggagaaggcagggtccagag

SEQ ID NO: 10683 - DNA, 491 bp, Homo sapiens
  MAP TO AC003101.1; EXPRESSED IN PLACENTA, SIGNAL = 1.6; EXPRESSED IN LUNG, SIGNAL = 1.6; EXPRESSED IN FETAL LIVER, SIGNAL = 1.4; EXPRESSED IN BRAIN, SIGNAL = 1.4; EXPRESSED IN ADULT LIVER, SIGNAL = 1.6; EXPRESSED IN HELA, SIGNAL = 2.3; EXPRESSED IN BONE MARROW, SIGNAL = 1.4
tctctgggaactctcctcccctgatcgggtctccctgctccaggagcggcagcgcatgtctgaccgtctggaggacaccagcctgcggctcaaagatgagatggacctgtacaagcgcatgatggacaagctgcgacagaaccgccttgagttccagaaggagcgggaggcgacgcaggaggtaggtcccaggccagcaggcaccagggctccttccagcatccctgctcctgccaacctgcttctctccctcgcagctcatcgaggacttgcggaaggagctggagcacctgcagatgtacaagctggactgcgagcggccaggcaggggccgcagtgcctcctctggcctaggcgagttcaatgccagggcccgcgaggtggagctcgagcacgaggtcaagcggctcaagcaggtgggtctagcagtctctgtgtccagtggggcagggtggccgggcccaccacgtgggtttcctgtgcaggatctg

SEQ ID NO: 10684 - DNA, 477 bp, Homo sapiens
  MAP TO AC005384.1; EXPRESSED IN PLACENTA, SIGNAL = 1.4; EXPRESSED IN LUNG, SIGNAL = 1.4; EXPRESSED IN FETAL LIVER, SIGNAL = 1.2; EXPRESSED IN BRAIN, SIGNAL = 1.5; EXPRESSED IN BONE MARROW, SIGNAL = 0.96; EXPRESSED IN ADULT LIVER, SIGNAL = 1.4
cagcaggctttctggtcttcgtggcctgtggagctccagtgtgtggagtggaacttgttatggataagacaaaggatgaggtcttgttagagtgggggttttgaaatggagtttggagataggtgcttcttcatgagaagtcacttgcttcccctggtattctctgctgagggtgggctgcacacccccctgtgccaaccctgtcgatttcagtgaggattgtccagtaacctcttggctgtgagttgaatggttcttccaggccaggcttcctcgacattggcactattgacattttggtctgcaaaattgttacggggggctgtcctgtgcattgtagggtatttagcagcgtccctggcctctaccgtccggataccagtagcacctttctcaactatggcagccaaaaatgtcctttcagcactgccaaatgtctccagggggcagaagcgcacctgcttgacaatcactgcc

SEQ ID NO: 10685 - DNA, 466 bp, Homo sapiens
  MAP TO AC006539.1; EXPRESSED IN BONE MARROW, SIGNAL = 1.1; EXPRESSED IN FETAL LIVER, SIGNAL = 0.92; EXPRESSED IN ADULT LIVER, SIGNAL = 0.82; EXPRESSED IN PLACENTA, SIGNAL = 0.78; EXPRESSED IN LUNG, SIGNAL = 0.79; EXPRESSED IN BRAIN, SIGNAL = 1.2
gaagaactaatcagctggggcctggagcaggtaaaaacccagctcttatctcaaggataggaaattaaccttagtaaaattcaaggacaagcacaaactgtaaaattcctcggcattctatggaatgcagggaaatagtccattttaccaaaggccaaggctaaaatactagaatttgcaacccctaccactaaaaaggaggcccagaaatgtattggcttgtttggattctggagacatgatattcctcacttgggtaacattttacaacctctgcatgcagccactagaaaacgctatgactttctttggggagagaaagagagcatggcttctgaacaagctaaacaagtgggtcaactggccctgggtctatgacctgtacggggtgggccagtagaactgcaagtaactgtcctaaatcaacatgctaattggagccttaggcagaagcaagatgggaaga

SEQ ID NO: 10686 - DNA, 492 bp, Homo sapiens
  MAP TO AC005283.1; EXPRESSED IN LUNG, SIGNAL = 0.91; EXPRESSED IN PLACENTA, SIGNAL = 1.3; EXPRESSED IN FETAL LIVER, SIGNAL = 0.9; EXPRESSED IN BRAIN, SIGNAL = 0.91; EXPRESSED IN BONE MARROW, SIGNAL =   1; EXPRESSED IN ADULT LIVER, SIGNAL = 0.88
acagggaaggatgtttagcggtggcctgggctccgtgctgccttcctcacactgaagccagtcggtgttaaatcccccaggaactgtgctggaggaaaactgactcagagcctcgaggtggatgggccacgtttctgggagtctgtggtgattcctgtgttcccctttcctttgcagtgacaaagctgcaggtgagcaaatcgaagaggaccctcaccctggtggaaaacaagcccattcagctgaactgctcagtcaagtctcagaccagccagaactcccactttgcggtgctctggtacgtccacaagccctcagatgccaacggcaagcttatcctgaagaccacccacaactccgccttcgaatacggtacttacgtggaggaggagggcctgagagccaggctccagtttgagaggcatgtgtcgggggacctgttcagcctcaccgtccagagagccgaggtcagcgacagcggcagctactact

SEQ ID NO: 10687 - DNA, 467 bp, Homo sapiens
  MAP TO AC005696.1; EXPRESSED IN LUNG, SIGNAL = 0.98; EXPRESSED IN FETAL LIVER, SIGNAL = 0.74; EXPRESSED IN BRAIN, SIGNAL = 0.77; EXPRESSED IN BONE MARROW, SIGNAL = 0.94; EXPRESSED IN ADULT LIVER, SIGNAL = 0.96; EXPRESSED IN PLACENTA, SIGNAL = 0.93
gccctgctgtcactcagacctgggcgtaagtcccagctccatcacctactgctgtggccgcacctgcattcccctcaatgggagcccgagagaaaggcttgcaggctgtggcttatttgggaagcaatctcaggaaacaagggcgaggacatggggtttgaaggagagggaggggaagcaacaatttgattattcccaccactctcctgggcggtgttctgaggagccttacagacagaactgctctgttggggagagaaacagggaagcacttacccattagccccatcccctgccagacaagggtggctctgtggacattcgctcccgtgtggacttccagattgcacatgtgtggggctcaagtggttccctgtgggtactccacacggcagcttccaagaaggcccagcgtggcctgacatgaagcactgtcccattgcacctgtaagatgctgcttggagcc

SEQ ID NO: 10688 - DNA, 455 bp, Homo sapiens
  MAP TO AC006385.3; EXPRESSED IN LUNG, SIGNAL = 0.85; EXPRESSED IN FETAL LIVER, SIGNAL = 0.83; EXPRESSED IN PLACENTA, SIGNAL = 0.9; EXPRESSED IN BRAIN, SIGNAL = 0.98; EXPRESSED IN BONE MARROW, SIGNAL = 0.77; EXPRESSED IN ADULT LIVER, SIGNAL = 0.84
attttccacacatcatatggccttagtagcttcagtagtcccatgagagctgagactagctttgagactataagttaaatattttcaaaaactacagctgttattgtggtcatgattgaagtaatagtataactgtctaactggtattgtaggttaatgtagggagaactaagacattgctttcattttattagtgcgatctcagatctccaccatcacagttgcgaccttcaataccactttggcgtcattcaacgtaggctatgcagactttttcaatgagcatatgaggaaactctgcaaccaggtgcctatcccggagatgccacatgaacctctggcatgtgctaacctacctcgaagcctcacagactcctgcataaactacagctacctagaggacacagaacatattgacgggaccaataactttgtccacaagaatggaatgcttg

SEQ ID NO: 10689 - DNA, 496 bp, Homo sapiens
  MAP TO AC005296.1; EXPRESSED IN PLACENTA, SIGNAL = 1.2; EXPRESSED IN LUNG, SIGNAL =   1; EXPRESSED IN FETAL LIVER, SIGNAL =   1; EXPRESSED IN ADULT LIVER, SIGNAL = 1.2; EXPRESSED IN BRAIN, SIGNAL = 0.91; EXPRESSED IN BONE MARROW, SIGNAL = 1.2
ttcaatgcatggctaggaccaagggcaggagaggcacaaggggctatgctaacctgcagaagcgctttgtttggtcagcctagacctcatgtttactgtctcctccaccttctcttcttcctcctcctctttggttttcttctcctcctcctcatcctcttcctcttccttctccccctactccttccccttctcctttccttctttccccttctccttttccttctttttctccttctccttttccttctcttttcccttctccctctcctcctcactcttcctctttcctccctccccttcctcctcttccctccctcctactccttctctcctcttccctcccctcctcctcttccctccctccccctcctcttccctccctcccttccttttctcctcctccttcttcttcttctcctccttttcctcctcttccccctccccgccctccttctcctccttcttgcagtgggcaagcactctccaattgcag

SEQ ID NO: 10690 - DNA, 454 bp, Homo sapiens
  MAP TO AC005020.1; EXPRESSED IN BONE MARROW, SIGNAL = 0.75; EXPRESSED IN PLACENTA, SIGNAL = 0.68; EXPRESSED IN LUNG, SIGNAL = 0.98; EXPRESSED IN FETAL LIVER, SIGNAL = 0.72; EXPRESSED IN BRAIN, SIGNAL = 0.62; EXPRESSED IN ADULT LIVER, SIGNAL = 0.66
tcacttctctcaactgggtcccaggtgagctggtgcccctttgccctcagagaggacccatcctgaaccttcaccaagagttctgtttctttagccagtgactaggcccatcttgggttggtaccttcattcctttggcctttttcctttctgcctagtccttccccatcctctttgaggcacagttcctccccctgtttcttttcttaatgagcccagttcttcccctcactccaaatttggacatagggaatgagaatttagtggagatctcctgtttcagaagttggtgaaaattgaagaggtggctgatgtggctgtatccttcatcctggaggaatgggggcatttggaccagtcccagaagtccctttatagggatgacaggaaggagaactatgggagtattacttccatgggtaaggattatttcatctgcatggattaggacatg

SEQ ID NO: 10691 - DNA, 439 bp, Homo sapiens
  MAP TO AC003030.1; EXPRESSED IN BRAIN, SIGNAL = 1.1; EXPRESSED IN PLACENTA, SIGNAL = 0.85; EXPRESSED IN LUNG, SIGNAL = 0.79; EXPRESSED IN BONE MARROW, SIGNAL = 0.78; EXPRESSED IN ADULT LIVER, SIGNAL = 0.79; EXPRESSED IN FETAL LIVER, SIGNAL = 0.9
caatgagcgcctgtttgcctgagggctggccatgggctccctggagggctggcgagaagcctggcattgggctttcactgcccagccagccctgttctgccctatgagggcggctggcgcatgggctttgtgatcccaagacagggctcaggtccagtgacgtgccaggcacccagagatccaccagtgcagctgggacttgaccttagggctccatctgcaccgagtgggagggcctgggcagtgacagggcaaggcgggcccccatgctcatgtcccactctcagacctgaataaagcctgtgggaacgccatggatgcccatgaagccgcccagatgcaccagaacttctcgcagcagctgctccaggaccacattgaggcctgcagcctccccgaacacaacctcatcacggtacgggtgtgggtgttaggggac

SEQ ID NO: 10692 - DNA, 483 bp, Homo sapiens
  MAP TO AC004925.1; EXPRESSED IN BRAIN, SIGNAL = 1.2; EXPRESSED IN BONE MARROW, SIGNAL = 1.2; EXPRESSED IN ADULT LIVER, SIGNAL = 1.1; EXPRESSED IN PLACENTA, SIGNAL =   1; EXPRESSED IN FETAL LIVER, SIGNAL = 1.1; EXPRESSED IN LUNG, SIGNAL = 1.4
catggatagatttcatgtttgggtaagaagaaattagaacgccactcattattcatatgatttttatcaattaatttctgaggtgtgcagttactactttacacatatttaaagcctcctataaataatttggaaaagtactgacagggcctttgtacatttcttgctctttcacaccataaaatgtagtgcgtaagtgaatttacagaaaaaagatctgaagtaatatcactgcaggcagtggcagcaggagagagtagatgtctaggactggcatttgggatgcagttgccaagagcaactgcatcccaagcgctagctgcatttggagcagtgctactttctttggctccttcagcaactttctctgttgctcttgtgacccttctggactgtttaccctgttgcagctggatcctaactgcagagagtactatcagagaaaagttcaatttgaaaacagaagcctggatgtaggagctt

SEQ ID NO: 10693 - DNA, 469 bp, Homo sapiens
  MAP TO AC005023.1; EXPRESSED IN LUNG, SIGNAL = 0.87; EXPRESSED IN FETAL LIVER, SIGNAL = 0.9; EXPRESSED IN PLACENTA, SIGNAL = 0.77; EXPRESSED IN BRAIN, SIGNAL = 0.97; EXPRESSED IN BONE MARROW, SIGNAL = 0.89; EXPRESSED IN ADULT LIVER, SIGNAL = 0.71
agagaacagccaccatccacctttaatatatttccctgtttccagaacaaaacaagctttttcactcgaagagtaagggggtacctccagcaaagggggctctataaggagaggcattgctagagttctttcttcaggtgaagccttgctcattgctgcctgccgagcctcttggtctgcctttctgttgccctgcacctcatagcttttcctgatttggtgtcctttgcaatgaatgacagccaccttctccggagcccatacggcttccaataattgcaaaatttcctccttattttttatttcttttccttcagtagtcaaaagtcctctctctttgtgtattcccccatgggcacgcagggttgcaaaagcatattttgagtcagtacatatgtttactttcttccccttggccaataacagtgctctggttaatgctattaattcagccttcttagcggaagtc

SEQ ID NO: 10694 - DNA, 379 bp, Homo sapiens
  MAP TO AC005521.1; EXPRESSED IN LUNG, SIGNAL = 0.77; EXPRESSED IN ADULT LIVER, SIGNAL = 0.66; EXPRESSED IN PLACENTA, SIGNAL = 0.59; EXPRESSED IN FETAL LIVER, SIGNAL = 0.85; EXPRESSED IN BRAIN, SIGNAL = 0.8; EXPRESSED IN BONE MARROW, SIGNAL = 0.69
tcagcatactgccttgttggtaagtgctttagaaatatttgttgcatcaagccgaattacagtgagaagaggcaaagtgtgtatcatgccaaatcccttaattccccaaatccgcatactgccaacaacaaactgtaaatcagaactgctacagatatatttgaacttctgtttaaattcctcactaagttagtgcttttaagtttaacactctagtcacattcctggcaggaagagaagcaccaagaaggaaaattagagaagtctagtctagtgctcatcttggcattgacatctggctgcagaagccccagggcaagaggcataatgcttctcaccctcagttttcttacttgggtggtaagcgggaaagaaggag

SEQ ID NO: 10695 - DNA, 441 bp, Homo sapiens
  MAP TO AC005919.1; EXPRESSED IN ADULT LIVER, SIGNAL = 1.4; EXPRESSED IN PLACENTA, SIGNAL = 1.3; EXPRESSED IN LUNG, SIGNAL =   1; EXPRESSED IN BRAIN, SIGNAL = 0.85; EXPRESSED IN FETAL LIVER, SIGNAL = 0.96; EXPRESSED IN BONE MARROW, SIGNAL = 1.1
catgcaattaacaatatcggtccttaattgtataatgtaaaatacacttaacacattccaactaagctgtagctgttacaaaataaacacaatttcctaaaacatgccgctgcacatatccttagtacccaaaagaaagacatttaagcagatattacatttgatactctttaggagaaaagagaacggctgatcaatttctagtctatacagttagaaaagacgcaaataaagcatatttaagtaggcaaaacacagttgaagtatcaaaggcatgaaagaagtgtatattacttgcagcggtacatttgggtggcagaggtgatagtggtgatagtgttggtagtggtggtgatggtggtggtggtggtagaagtaatggaaagaaaaaaggaagaagaataattcatttagtatccattctgttggatgttttaatcc

SEQ ID NO: 10696 - DNA, 485 bp, Homo sapiens
  MAP TO AC005291.1; EXPRESSED IN PLACENTA, SIGNAL = 0.79; EXPRESSED IN LUNG, SIGNAL = 0.91; EXPRESSED IN FETAL LIVER, SIGNAL = 0.86; EXPRESSED IN BONE MARROW, SIGNAL = 1.5; EXPRESSED IN ADULT LIVER, SIGNAL = 0.94; EXPRESSED IN BRAIN, SIGNAL = 0.81
gcctaggcatctgtttgttcttctacataacattttcttaaaaataatatgttctatgtgtatttaattcagttacctttgtgcggtcagctgtataatttgttaagagaaaaaaaggatcgtttaacaaggtgtttgggaaatggaagacaggtactttccctgcttcatctgggaggcgaatgtggacccgtttaccttcaggattccttgggtgttcctgtagttccttaaactctctgcagctaagcgattggcatggttcagctggatttccatttcattcagatctccttccattttcttcttgactctcagagcatcatttctgcttctaatctctgcatccagcgtgctctgcattgtctccacgactctagtgtggtttctcttcagctggtcaatttcctcatccttttctgcgatttttctatcaacttcagacttgacttggtttaactcaagctggatacgcagaatctttc

SEQ ID NO: 10697 - DNA, 488 bp, Homo sapiens
  MAP TO AC005355.1; EXPRESSED IN LUNG, SIGNAL = 0.92; EXPRESSED IN FETAL LIVER, SIGNAL = 0.73; EXPRESSED IN BRAIN, SIGNAL = 0.55; EXPRESSED IN BONE MARROW, SIGNAL = 0.74; EXPRESSED IN ADULT LIVER, SIGNAL = 0.76
tcctgtgcatcagtacaccgatgtcctatatagacccagaccagaagaatcctgcccatacatgactgtttcctattgatagctgttgtcatttctctgcttagtacccactccccctcttctggtaatagcaccccaattttacctggggaactactcttgtcattttcagctcatgtacttcaggtggaattaattccatggcgtaagagtcacaggtgaatcaagcctggctaatcagagctgtatagcgcattatgcactatgcagagctgcacagtggttggtttagggatgggcatgggacccaagccaagccatgaggtccaatcagagcgaatatcagatattcaagtggacagaaaaagatgctcttctttctcttggacttggagatgtgagagcatcagcagctgctgacagctgtcttgccaccagagtctgagaacaaggccaactctaaagaaagcagaagtgaaaaatggcct

SEQ ID NO: 10698 - DNA, 469 bp, Homo sapiens
  MAP TO AC000097.1; EXPRESSED IN LUNG, SIGNAL = 0.74; EXPRESSED IN FETAL LIVER, SIGNAL = 0.83; EXPRESSED IN BRAIN, SIGNAL = 0.8; EXPRESSED IN BONE MARROW, SIGNAL = 0.89; EXPRESSED IN ADULT LIVER, SIGNAL = 0.67; EXPRESSED IN PLACENTA, SIGNAL = 0.87
ctgtcccctttgcctgtgagatctcaggttgctcatttcttattcatccatccatcgaggctgctgggcatctgtgccttgtggtctcctgtgggtgcccgcttccgcctactgctgagttctcctctccttgccatgccatcaggtcaggaatgagcatggggaaggagctggagcatggagcggcttggcctcagtctggcctgatttcatggtccccagctgtaccccgtgttaggtgggtggcaggtggcaatttgccctgacatggcacagcagggcctctgcatggcccgctgattgctcctcacaggcacctacgggctgagcaacgcgctgctggagactccctggaggaagctgtgctttgggaagcagctcttcctggaggctgtggaacggagccaggcgctgcccaaggatgtgctcatcgccagcctcctggatgtgctcaacaatgaagaggcgt

SEQ ID NO: 10699 - DNA, 471 bp, Homo sapiens
  MAP TO AC006254.10; EXPRESSED IN BRAIN, SIGNAL = 0.97; EXPRESSED IN ADULT LIVER, SIGNAL =  30; EXPRESSED IN PLACENTA, SIGNAL = 0.65; EXPRESSED IN LUNG, SIGNAL = 0.44; EXPRESSED IN BONE MARROW, SIGNAL = 0.56; EXPRESSED IN FETAL LIVER, SIGNAL = 8.1
ggcgttctgaaggcttattgactggagacaagttaattctcaaaggcctcaactgagggtggccgtcgccgaggatttaggggcccctccaaagccttagacaccaagggacaagtggagagattgtgggagccagcccccagtgtgaaggagtgctgagaaaggggcacccctcctgatgagggagggagctgctgcagaactccagggggtgtgatcaggggggactccccatgcaggtcggtgtcagacctggctggggcccagctatgacctctctggtctggtcctcccaggggttgaggtgactggccagtatgagagggagaaggctgggttctcatggatcgaagtgaccttcaagaaccccctggtatgggttcacgcatcccctgaacacgtggtggtgactcggaaccgaagaagctctgcgtacaagtggaaggagacgctattctcagtgatgcccgg

SEQ ID NO: 10700 - DNA, 486 bp, Homo sapiens
  MAP TO AC005666.1; EXPRESSED IN PLACENTA, SIGNAL = 0.8; EXPRESSED IN LUNG, SIGNAL = 0.68; EXPRESSED IN FETAL LIVER, SIGNAL = 0.96; EXPRESSED IN ADULT LIVER, SIGNAL = 0.63; EXPRESSED IN BRAIN, SIGNAL = 0.97; EXPRESSED IN BONE MARROW, SIGNAL = 0.81
gggctcagactcaccatgtctgagctgggtgtgtagaggaagttatgaaagtttttattgccagctcgaaggagcgcccacacagagcaggtccgcttgtagatgttgcgcttctctcgctcacaggggttgttggccaggaaggtgccgtagaggcaggagtatgtgtgttgcaccagttttacctagaaagcagagagagcttgcacctgggggcctcgggctgtcattccccccatccctgttgtcacaggccttaggacttaccaggaatgcttcattaaattcaaacaggcaggggaactgcttaagcaactgatgaacagaatcaagccactggaggaacacagggcattgttcgttttggtcctccacattctcttggtggccacagcgatctccaaacttgtgcccaaaatccagccagtcagactccactaacacttggaagccctgcaaaaaaagaaactgttcaaacatagggcc

SEQ ID NO: 10701 - DNA, 489 bp, Homo sapiens
  MAP TO AC003667.1; EXPRESSED IN LUNG, SIGNAL = 0.76; EXPRESSED IN FETAL LIVER, SIGNAL = 0.97; EXPRESSED IN PLACENTA, SIGNAL = 0.92; EXPRESSED IN BRAIN, SIGNAL = 0.68; EXPRESSED IN BONE MARROW, SIGNAL = 0.93; EXPRESSED IN ADULT LIVER, SIGNAL = 0.86
aaccacacaaaaattctgaaactgaagaattttaaatctcagaacatgcacaatggtcttttgaaataacctagtcagtcaaaaataaagaaaaaattaaaaaagatttagaaaagccctcatgacacatgagacaccataaatcagttcaacatatgcaaatcaatatatacaaatcagcatatgcaaatcaataaatgcaacacaacacatgaatctctgggatgaataaaaatacaaaaacatcaacagaatgaaggacaaaaaccatatgactatctcagtaggtgcagaaaaagcatttaataaaattcaacatcctttcatgacaaaaactctcaacaaactaggcatagaaggaacataccttaacataatgaaggccatgtatgataaacccatggctgtcatcatactgaatggggaaaagctaaaagcctttcctctaagaatggaacaagtatgcctactttcaccactcttatttga

SEQ ID NO: 10702 - DNA, 480 bp, Homo sapiens
  MAP TO AC002080.1; EXPRESSED IN LUNG, SIGNAL = 0.74; EXPRESSED IN PLACENTA, SIGNAL = 0.66; EXPRESSED IN BRAIN, SIGNAL = 0.64; EXPRESSED IN BONE MARROW, SIGNAL = 0.68; EXPRESSED IN ADULT LIVER, SIGNAL = 0.54
atcacctttccaaaacctcgcttcatgataacatgattttgagggttaggatttcaacctatgaatttgggagggacataaacattcagaccactgcagtcaccttagaggccccccaatggcacaccagctatcaatctattgcctctgagctccaaacctacccttcattgcctgctgatgatcctggagctggatcttataaatatttctcctctgccagccagcccaaagtgaagctttgtcagtgaagataagtggagactgaagaaggaaggggcttctcttcttggttccagttttcttttctctcttcttgctcctgtggtgcttgtccagtataaaggacacacagtggtgctcagcagcctccccatggacagcttcccagacagtgccactggtgccacagccagcttcccagccagaagggctggaaagtggcttcctggcatgttcagcagcaaccctacaggtagc

SEQ ID NO: 10703 - DNA, 385 bp, Homo sapiens
  MAP TO AC005792.1; EXPRESSED IN BRAIN, SIGNAL = 0.77; EXPRESSED IN PLACENTA, SIGNAL = 0.92; EXPRESSED IN LUNG, SIGNAL = 0.84; EXPRESSED IN FETAL LIVER, SIGNAL = 0.78; EXPRESSED IN BONE MARROW, SIGNAL = 0.91; EXPRESSED IN ADULT LIVER, SIGNAL = 0.81
tctgaaagaagaagtcagctatgcaaaataaaagaatcagagtcaggttacttttcctgtgagcaatactagatgctagaggacaatgcggtgtgactttcagatttctgaaggaatttattttatacccagaattctatacccagccaaattatccaccaagttcaaggtaaaaataaaggtagttttcagacatgccaatactcggaaagtttctctcccacatacctcttctggggaagttacttaaggatttagtcttgcctcagaaaggtctagctgacatggaagaagacaaggaacttggagagcaggaaggaatccaaatgtcagttgtatggcagccagaggagccaccatccctgcctggagcatcaaaacaaca

SEQ ID NO: 10704 - DNA, 468 bp, Homo sapiens
  MAP TO AC006257.1; EXPRESSED IN LUNG, SIGNAL = 0.74; EXPRESSED IN FETAL LIVER, SIGNAL = 0.77; EXPRESSED IN PLACENTA, SIGNAL = 0.76; EXPRESSED IN BRAIN, SIGNAL = 0.85; EXPRESSED IN BONE MARROW, SIGNAL = 0.83; EXPRESSED IN ADULT LIVER, SIGNAL = 0.71
ttcatctcaaaatccctgccacctagaacataatggcactcaataatatgcattgtacaataaataaatgaatgagtaccaaaccctcaacaaatatttgttgaatggattgctgaatgaaggatatgaattacctcaataaatacttgttgaatggattgctgaatgaaggaaatgaattaccttcattcattctcacaaagggtaagtgagcttctcaagaatatatacattctaatttaaatagtacttacatttaactctatcaatagccaagttttcaaattctattaaagatatgttttcagaaggtggctgcaagtaaaactgaaggcaatgagggtaggaagcattcctctggtcacctgccaacctcagcttcctccactttcttccagaaaactccatcttggtcaccttagaaggaagtacacaaaaagcgtaaaatgatggaaaacaaagttgggg

SEQ ID NO: 10705 - DNA, 463 bp, Homo sapiens
  MAP TO AC005971.5; EXPRESSED IN PLACENTA, SIGNAL = 0.85; EXPRESSED IN LUNG, SIGNAL = 0.72; EXPRESSED IN FETAL LIVER, SIGNAL = 0.87; EXPRESSED IN BRAIN, SIGNAL = 0.66; EXPRESSED IN ADULT LIVER, SIGNAL = 1.1; EXPRESSED IN BONE MARROW, SIGNAL = 0.82
ccacaaattcgggttaatttctttccttttcttttttttttctttttttcttttttttgatatggagtctcactgtgttacccaggctggagtgcagtgacaccatcatagcccactgcagtctgggttcaagtgatcttcccgcctcagcctctcaagcagctggaactataggcgtgtgctactatgtctggctaaattcaggctaatttctgagacctaatggctaaagaaccccgacaatatgaccacagttgacccttgaacaacacgtttgaactgcgtgggtccacttatacaaagatattttttcaacaaaagttacaccaagtgtgcctgcctctcccgccttcccatccacttcctccacctcttccgcctccccatccacttcctccacctcttccgcctctgccacccctgagacagcaagatagcctactcaatgtgaagacagggatga

SEQ ID NO: 10706 - DNA, 459 bp, Homo sapiens
  MAP TO AC005409.1; EXPRESSED IN PLACENTA, SIGNAL = 1.1; EXPRESSED IN LUNG, SIGNAL =   1; EXPRESSED IN FETAL LIVER, SIGNAL = 0.89; EXPRESSED IN BRAIN, SIGNAL = 0.68; EXPRESSED IN BONE MARROW, SIGNAL = 0.95; EXPRESSED IN ADULT LIVER, SIGNAL = 0.93
cctcatcacagcacagaaaggtatgtgtattacacagagtaaaatatatgcagcaatccctttttgaggttaaggccaaaatacaatagcagctgttttgcttctctttgtgcatttttagaaaagtttatcagacatttaagaatgaatcatttctattccactcagaattttgttattcaaacatccaatgataacatgattttaaaatatccataaaaagatcttaccatccttagtactgtcaaaaacaacaactgagacattggtagaagggttttttggttttgcaacattgaaaatgtcactggcagaatgaaaagaaggataaagagatggcaggtccttcagggtgatgttggctggcagggctgggtccaggacaagcattggcaccttaatgcagtgtgttagcaaacactctaactgcttctcactggaaagaaacaccaacatgct

SEQ ID NO: 10707 - DNA, 489 bp, Homo sapiens
  MAP TO AC005318.1; EXPRESSED IN PLACENTA, SIGNAL = 0.76; EXPRESSED IN LUNG, SIGNAL = 0.98; EXPRESSED IN FETAL LIVER, SIGNAL = 0.87; EXPRESSED IN BONE MARROW, SIGNAL = 0.66; EXPRESSED IN ADULT LIVER, SIGNAL =   1; EXPRESSED IN BRAIN, SIGNAL = 0.59
acagcaactatcaaagggggttttacttctccaattacagatctgaccccaaaacgcagctgcatatcccaggcttaaggggtctgatggggcatctccaatgtatgatatgcagacaaaacaaggtgagtccaagactcagaaacttctactcagtcggccacagtgttccccggtcttcacagaacagtgtgttgtgcgtcggggcatctctataaataagggctaactgaaggccctgatggaaggcggagatgactcacctcagtgcactgtacccctggcacacgctgacgcagcacaggaccttctcttggtttgcctgagtctcccccaagtatttgcacacaatgttaccacccaggctgaagcccacgacgaccagctgggtcaggggatatgtcttcttgatgtagttcaccatggctccaaattcccacgtgcagcctgtgggcaaaagggtgagattgctcaatcatttcaggtgca

SEQ ID NO: 10708 - DNA, 424 bp, Homo sapiens
  MAP TO AC004769.1; EXPRESSED IN BRAIN, SIGNAL = 0.94; EXPRESSED IN ADULT LIVER, SIGNAL = 0.87; EXPRESSED IN PLACENTA, SIGNAL = 1.4; EXPRESSED IN FETAL LIVER, SIGNAL = 0.8; EXPRESSED IN BONE MARROW, SIGNAL = 0.7; EXPRESSED IN LUNG, SIGNAL = 0.83
gggtcaggttgaaactagatgggtagacttcttgcttaacactactgcttcttttgagacttcttgcttaacactgctgcttaacactgctgcttctttgcctcacgctaacatttttagatatctgagatcccattaatggactaaacagcacaacacccttctatattcctgtcctggatacaccttatattttggatgctggctcaactcccctctattccctattgctgctgtgtgtatggaataacatatacaatgtccactctcaagctcactattgtagctactcacacatacagctgcacgctggttattacctcattctggttcttacacagaataccctgcagaataagctccttgaggtgggggacagtttctctggggttaaacactgtgtcttcaacaataaagtatctgg

SEQ ID NO: 10709 - DNA, 447 bp, Homo sapiens
  MAP TO AC006486.1; EXPRESSED IN LUNG, SIGNAL = 0.81; EXPRESSED IN PLACENTA, SIGNAL = 0.73; EXPRESSED IN FETAL LIVER, SIGNAL = 0.89; EXPRESSED IN BRAIN, SIGNAL = 0.78; EXPRESSED IN BONE MARROW, SIGNAL = 0.87; EXPRESSED IN ADULT LIVER, SIGNAL = 0.91
ttccaggacaccatggatacccagggaccagtctcccagccttttcagcagcctgagaaacctggtcgtgtccgtcgtcggaagactaggcgggaacgtaacaaggccctggtgggcagccgccggccattagcccaccacgatcctcctgtggccattcgggatccacctgtggtccctactgcctccaagctcgtggtcataacccagggccggctgagccgggagcaccggggtctcttcaaccacgaggtgaaatccctagatgttgcaaggctgcttagcagtgggaccctggtgccaggcagccccacactccccgccaagccctccccaagcccaggcagggcccaggaaccagccccacggtccagggacaaagagaaccaggtgcctggaggttcgggcccaggcccacccagttccccagagttgtctggcgtgggg

SEQ ID NO: 10710 - DNA, 465 bp, Homo sapiens
  MAP TO AC004962.1; EXPRESSED IN PLACENTA, SIGNAL =   1; EXPRESSED IN LUNG, SIGNAL = 0.94; EXPRESSED IN BRAIN, SIGNAL = 1.1; EXPRESSED IN FETAL LIVER, SIGNAL = 1.1; EXPRESSED IN ADULT LIVER, SIGNAL = 0.95; EXPRESSED IN BONE MARROW, SIGNAL = 1.1
cgggtgctacatggtttctcccgcagctgttctaagaagtctttgaggttgtaggagccggggcccagcttttgctcctgtgccaagagaagagagaaaatgaaagccttaaacttgggaaaatccacgcaggaagaagcccaaggcacgatggtgttccttaaaggataatctccatctggccttgggaggacactgaaggccacacagagcagcagcaatggacaggaagacctggcaccagagagggagaggcatggccccagaggcctcaccttcagccgcttctctttcatgatggcctggtactggaagtggggtagctgggtcagccgcgtggcttcctgggccttggcccagcctgtgtccacctccttcatcagcttcttcttgctgaagcaggtctctttggagctgtaagtcccagggcctatgtgggactgagtcagagtgtggtcagagctg

SEQ ID NO: 10711 - DNA, 406 bp, Homo sapiens
  MAP TO AC005922.1; EXPRESSED IN LUNG, SIGNAL =   1; EXPRESSED IN FETAL LIVER, SIGNAL = 0.69; EXPRESSED IN BRAIN, SIGNAL = 0.72; EXPRESSED IN PLACENTA, SIGNAL = 0.86; EXPRESSED IN BONE MARROW, SIGNAL = 0.73; EXPRESSED IN ADULT LIVER, SIGNAL = 0.69
caacacccacagttgaggagatagcaacgatcgacactattcactcttctgatttttctcaatccaatgatggagaaataatatctgatagttgttttaattcttatttctttcaatattgagtttaaacatttcctcacatgtttttattttagccttttggctttcttcttctccaggaatgcaactggaaacagctgttacaatgtttcttttatgtttgattgcacaatgttttctactttagaccttcacatgtacttcattttttttctgtctttttaaaggaaacaggtcaaaatgagcaagagacgcatgagcgtgggtcagcaaacatgggctcttctctgcaagaactgtctcaaaaaatggagaatgaaaagacagaccttgttggtatgcttca

SEQ ID NO: 10712 - DNA, 481 bp, Homo sapiens
  MAP TO AC006543.7; EXPRESSED IN PLACENTA, SIGNAL = 1.1; EXPRESSED IN FETAL LIVER, SIGNAL = 1.1; EXPRESSED IN BRAIN, SIGNAL = 1.3; EXPRESSED IN LUNG, SIGNAL = 1.2; EXPRESSED IN BONE MARROW, SIGNAL = 1.1; EXPRESSED IN ADULT LIVER, SIGNAL = 1.2
tctctgctgtctgtgccttccgaccacaagacattcggacagtgctgaatggtcccttcagagaactaaaacatgactgcaacagaggactgcctgtcgtggacaatgatgtgccccagcccagacctggagaggtgagggggcagatcttcattctaggcctgaagtcaagagctgctattaaggcaagagccccactaagcatcactggcatgtcctgttcctgggaaactttgtcaccagccctgtatttcctctagtgcatcaccaacaacatgaagctccggcactttggctcatctctctccctgcctgaccgcgtactcaccttcatccgggaccacccactcatggacaggccagtgtttccagctgatggccaccccctgctggtcactacagatacagcctatctcagagtcgtggcccacagggtgaccagcctctcagggaaagagtatgatgtgctctacctggggac

SEQ ID NO: 10713 - DNA, 380 bp, Homo sapiens
  MAP TO AC003663.1; EXPRESSED IN ADULT LIVER, SIGNAL = 0.96; EXPRESSED IN PLACENTA, SIGNAL = 0.97; EXPRESSED IN LUNG, SIGNAL = 1.1; EXPRESSED IN BRAIN, SIGNAL = 0.8; EXPRESSED IN FETAL LIVER, SIGNAL = 0.95; EXPRESSED IN BONE MARROW, SIGNAL = 0.91
acagcatattggattttgttttcttttttgattatttttatggcttcatttttaaaaatgtaaatctttaatcctttgaaggttaatgtggatggacagaatgagatgtggaccctcccttatttatatacatgtttatttgtttatctctggatgggctaagttgtcccagttgtcctgtgacctttcactgacaagtctgtctttccccatgacctgtgatggcatctttagtgcgtcctgggtcccggctgtgctggggtctggtagcagcggctggtttagtgtgtcctgggtcctggctgtgctggggtctgttagcagcggctggtttagtgtgtcctgggtcctaactttgctggagtctggtagcgacagct

SEQ ID NO: 10714 - DNA, 478 bp, Homo sapiens
  MAP TO AC003687.1; EXPRESSED IN PLACENTA, SIGNAL = 0.93; EXPRESSED IN BRAIN, SIGNAL = 0.92; EXPRESSED IN ADULT LIVER, SIGNAL = 0.91; EXPRESSED IN LUNG, SIGNAL = 0.84; EXPRESSED IN FETAL LIVER, SIGNAL =   1; EXPRESSED IN BONE MARROW, SIGNAL = 0.88
tccggaagcacaggtacaaccctatccctctccccctccatcagaaacaatcctccctccattcctatagccctaaggcagtctcctatctgggaccccaattcagactgatggaagacctaccctcatcccttgtcccatctccctctcctccgtgggcccagcctgatgtgggggaaccctcactcagagatgggggtagcaaactaaactgggaatggaacaaaagctaatgcagggcctgactcctgccagccctgggcccaggcccagctacctgagcagtacatccggcacacgttggggacgttcggggtgaggttgctgcaccacctccggctgttgatctggaagatcccgttgttggtgctcccatcagcctcgtagtccaaagcagctgcgttgaaaccgcttgtgaaataagcaaggcagacccctgcatagggcagagcataggcctgggggtcagatggttaca

SEQ ID NO: 10715 - DNA, 444 bp, Homo sapiens
  MAP TO AC000025.2; EXPRESSED IN ADULT LIVER, SIGNAL = 0.58; EXPRESSED IN PLACENTA, SIGNAL = 0.68; EXPRESSED IN LUNG, SIGNAL = 0.68; EXPRESSED IN BRAIN, SIGNAL = 0.56; EXPRESSED IN FETAL LIVER, SIGNAL = 0.71; EXPRESSED IN BONE MARROW, SIGNAL = 0.65
ccccacctcagattcatagcatcacagcttggcaaggaagggaaactgccctgtctccccacctcccaagctgcagcggccatttggcctcattcacaggccctgacacacacctggtgtgcatgtttgcacacatgtgtatacaactctgctctgagcccatagggagggagaagccagaagccccagtctaggtgttggggcagctgcaaagcagcattgcagcagggaaattggggggcaggagggggtctgtcggagggaggcaccttgagcttgtatgtcctcagctcatagatgttgggacccattctgggctgtggctcattccagaagctgaactcgaggagcagctggtttctcctggacagcagcatctggctccgctcccttcggaactccaggtactcctgtgggcatggtggtaaaggcatggctaccagg

SEQ ID NO: 10716 - DNA, 452 bp, Homo sapiens
  MAP TO AC006097.1; EXPRESSED IN LUNG, SIGNAL = 0.89; EXPRESSED IN BRAIN, SIGNAL = 0.62; EXPRESSED IN ADULT LIVER, SIGNAL = 3.6; EXPRESSED IN PLACENTA, SIGNAL = 0.81; EXPRESSED IN FETAL LIVER, SIGNAL = 2.5; EXPRESSED IN BONE MARROW, SIGNAL = 0.75
ggcacattaggtatgtcggggcgctgggagcacctgggcaaagggctacaacttaacctcccaaggaccccatgggggaagttgagtgccctccatccctcagtaggaaatcccagtgtgtgaacaacacctagacactattgggcaaggctgtcactgctgtttcctctggtgctgccccttaacccacaaaagctgggagttgagaggcctgaaatgaacgaaggaggaagtgccatgcgggagccggcccctgggggcgttaaaggtaccctcacggcccctctcagccacctcttcacagaagggaccattctcaaagggagccagagcctgggcatgctgggccggtagagggtttgcccggattcgcagtcagggctgcacctccggccaggaggctgagagggaggacatccacccagcaactggggagcaaagtggacaggggt

SEQ ID NO: 10717 - DNA, 478 bp, Homo sapiens
  MAP TO AC005367.1; EXPRESSED IN PLACENTA, SIGNAL = 1.3; EXPRESSED IN LUNG, SIGNAL = 1.3; EXPRESSED IN FETAL LIVER, SIGNAL = 1.5; EXPRESSED IN ADULT LIVER, SIGNAL = 1.2; EXPRESSED IN BRAIN, SIGNAL = 1.1; EXPRESSED IN BONE MARROW, SIGNAL = 1.3
atactcccattgctggagccatggcccagggcctcattacgtcttgctttggaaactgtgatggtttcctaatgggctctgttgctccaggctgtagcctctccattttatcctgcacaactccgtccctgtgaggcttctaaaggcaaaccccagcattttactgaccttccagcaaccctccattgcactccatcacgggactttgttccagaacagccctgcgttccggccactgcctcctccctggctatactccttgtgcctgtgtgctctttggtgcatgccctgtgctcaggccgaactgtctgtagttccctactcatgccaaactgtgtcacttcctcctcggctaacttggccccatctcctacctggcaatgctggttctgctccagcattagcacctgtaaaactcctttcctaatgacaaaaaagttgataatatgcctaggtcatatttgtgtgttgacataga

SEQ ID NO: 10718 - DNA, 468 bp, Homo sapiens
  MAP TO AC005572.1; EXPRESSED IN BONE MARROW, SIGNAL =   1; EXPRESSED IN PLACENTA, SIGNAL = 0.95; EXPRESSED IN LUNG, SIGNAL = 0.94; EXPRESSED IN FETAL LIVER, SIGNAL = 1.2; EXPRESSED IN ADULT LIVER, SIGNAL = 1.1; EXPRESSED IN BRAIN, SIGNAL =   1
cttggcatctcctgatttccagcaagctggctgaatgcaaagccttcctttgtgtaaaattacgtataatttgcattcagggcaggcattaattttgttaaaagagtttcaaatacaaatcaggacattttggacaccttttgaacatcttaaatcaggtcagttacaatttctttccaacgtttgactgaatgttccaattccaccaccgggttggaaagaagagaaacatcacgatttacttgcaggggcaactcaaagcacagacaatgaacagagcggcgctagtacctcatgctgctcatgctgccagtctcggatccgagcttgcatcgctccagctggctggctacgatctgccgttcagcctccagctctcgggtcagcctttcaaactgtaattcctgaaagaaacccatcaacaagatcaattcaatcatctacatgacaggtgaaattcagaccaaa

SEQ ID NO: 10719 - DNA, 468 bp, Homo sapiens
  MAP TO AC006249.1; EXPRESSED IN BONE MARROW, SIGNAL = 0.64; EXPRESSED IN PLACENTA, SIGNAL = 0.68; EXPRESSED IN LUNG, SIGNAL = 0.83; EXPRESSED IN FETAL LIVER, SIGNAL = 0.7; EXPRESSED IN ADULT LIVER, SIGNAL = 0.78; EXPRESSED IN BRAIN, SIGNAL = 0.59
tggtttggatattgtttgcttgtttcaccaaatctcatgttgaaatttgatccccagtggggagtgttgggaagtcttagtgggaggtgtttgggtcatagaggcagatccctcacaaatggcttggtgcccttttcacagtagtgtgtttgttcttgctctcacaagactggattggctctagggactagattagtttgcccaagagtagattgatataaggccaggttgtcccttggatttggtccctctttgccagggcccactttccctttgaccttctccatcatttttagatgcagcatgaaaagccctcaccagaagctaagcagacgctggtgtcatgcttcttgtacagcctgcagaaccatgggctaagtaaacctctcttttttaaattacccagcttcagatattcccttatggaaacacaaaatggactaagacactatgctaaatgcttgcatg

SEQ ID NO: 10720 - DNA, 482 bp, Homo sapiens
  MAP TO AC004240.1; EXPRESSED IN PLACENTA, SIGNAL = 0.64; EXPRESSED IN LUNG, SIGNAL = 0.91; EXPRESSED IN BRAIN, SIGNAL =   1; EXPRESSED IN BONE MARROW, SIGNAL = 0.63; EXPRESSED IN ADULT LIVER, SIGNAL = 0.75
tttctaaccaagccttctacagcatttagaacttggtgagattccttgagaacagctgatagccacggtaaaactaatttgctttttcttgtagttaatgtagtgcagaaattgttatgggtttcacattcattatgttttttggcccttgaatgtcaaaaagctgtacctgcccaaggctgcatagttagtgagtggtggaactcaagctgagatctcctgacaacaaaaacccctgctctcctggcaacaggctgcacttgctgtttgttaccttattcacaactttccttcgtaagaacctctgcagcagtccttgcatgggctcgccatcccaccgcagctgcacccagcggaaatgctgctgcaccagcaagtcggagccctggagacaggccttggcgatggttcccatcagaaagcagttctcatgaaagtaataacattcggacagtccatttcctgaaacaaaccaaaaagca

SEQ ID NO: 10721 - DNA, 446 bp, Homo sapiens
  MAP TO AC006285.9; EXPRESSED IN LUNG, SIGNAL = 0.44; EXPRESSED IN BRAIN, SIGNAL = 0.59; EXPRESSED IN ADULT LIVER, SIGNAL = 0.43; EXPRESSED IN BONE MARROW, SIGNAL = 0.61
tggactattttggccttttgtttgctgttagcatgggtgtgcaaatgtgtgttccaggctctacttttcagttcttcagcgtaatacccaaaagctgaattctaggtcaaatggtagttctaggtttaattttttgagggactggcgtctgtgccttttctcaaactaaaatataactggataagttcctagtgcggccagggccttccctggaatgccgtatttgtgaaggatgctgaccagccacttctagaggaactgaggcgaccgtggagtcagtgcctgcgaggtctcggcctcctgggaagagtagctcggccccagctcacagcgtggcaggaaggtcacttgccagcagctggggaacttaagctctttgagggacctgaataaaagagatatgagactgaatgtacaaacagacatgactggaccccgttaccttc

SEQ ID NO: 10722 - DNA, 472 bp, Homo sapiens
  MAP TO AC006254.10; EXPRESSED IN PLACENTA, SIGNAL = 0.75; EXPRESSED IN LUNG, SIGNAL = 0.66; EXPRESSED IN FETAL LIVER, SIGNAL =   7; EXPRESSED IN BRAIN, SIGNAL = 0.7; EXPRESSED IN BONE MARROW, SIGNAL = 0.64; EXPRESSED IN ADULT LIVER, SIGNAL =  15
tcttgctctcttgcaccttgggatgaatgatgcgaaaaataacaattggtcactgggggccgagggactgcaactgataaaggccatattggccccattccagccaatccagcccccaggatgcctgtgtggagggatgttcaggcctggggtgtatgtggcatggtggggatgagggtactactctggggaaagagaggcctctgggggatggcaggaatggggaacagtgtgggtttggagcctctagggtgctgcctggcctctccaccctccatggcccaccatttaccccatgggcctgcacatcagccttgaagctgctctgtttgttgtcagcaatgcgcccggccaccacaatctctgagccttcgtagtactgtttatggtggttctgggtcagggccaagacagcatcctgggggtactgcaaatccacatccaccagcaggggtttggctacctggctgta

SEQ ID NO: 10723 - DNA, 457 bp, Homo sapiens
  MAP TO AC005533.2; EXPRESSED IN PLACENTA, SIGNAL = 1.3; EXPRESSED IN LUNG, SIGNAL = 1.3; EXPRESSED IN FETAL LIVER, SIGNAL = 1.4; EXPRESSED IN ADULT LIVER, SIGNAL = 1.3; EXPRESSED IN BRAIN, SIGNAL = 1.1; EXPRESSED IN BONE MARROW, SIGNAL = 1.4
gggcgcacaaagagtacaacagcagtcttttgaaggaggggtgctgtgattgctgggcattggggcagacaggggcatgactgggctcccaggatgtccagagccacagaacaaccaggccaaggtttatctggggagatcataatattccaacatatgatcatctgataatgcaaactctagccaggtcctgagggctctggacaaactgctgcactgcttcttcctcttctggccccctgcaccccattcacaggtccacaatgccagtgggatcaaagaggtgaaggaccatgcacacgtcctgctccccaatggcatgcgcattcacacttgggctgtagagaggggagcgatggcccagctggcttggtaggcttggtaggcttggtaggcttgggaacatgaacctaggagaggtaaggcctggcagagtggggcctcacacttgttttga

SEQ ID NO: 10724 - DNA, 371 bp, Homo sapiens
  MAP TO AC005410.1; EXPRESSED IN LUNG, SIGNAL = 2.2; EXPRESSED IN FETAL LIVER, SIGNAL = 1.6; EXPRESSED IN BONE MARROW, SIGNAL = 1.4; EXPRESSED IN PLACENTA, SIGNAL = 1.8; EXPRESSED IN HELA, SIGNAL = 3.8; EXPRESSED IN BRAIN, SIGNAL =   2; EXPRESSED IN ADULT LIVER, SIGNAL = 1.6
atccgtggacccaaaactccggcgccggtcacggactgggaaggcagccttcccttggtgtttaatcattgcagggacacctctctgattatacactcacatttcaagggtgtcagaccacacagggacgcctgccttggtccttcacccttagtggcaagtcccgcttttctggggaagggtcaagtaccccaaccccttctcttgtctctaccccttctctgcttttctggggcaggggcaagtacccctcaaccccttctccttcacccttagcggcaagtcccgctttcctagggggcaagaaccccccaatcccttatttccacaccccaacctcttatctctgcgccccagtcccttatttccac

SEQ ID NO: 10725 - DNA, 482 bp, Homo sapiens
  MAP TO AC004817.1; EXPRESSED IN PLACENTA, SIGNAL = 0.95; EXPRESSED IN ADULT LIVER, SIGNAL = 0.85; EXPRESSED IN LUNG, SIGNAL = 0.98; EXPRESSED IN FETAL LIVER, SIGNAL = 0.87; EXPRESSED IN BRAIN, SIGNAL = 0.84; EXPRESSED IN BONE MARROW, SIGNAL = 0.76
gaaaggcatgaggagtctttgagttgtcttcaagcagaggggtatgggtcacatctgcaggccagtgtttggaggacctggggtttcaagaacctcaagttgaactgtgatgcagttatgacagaggcttcagccaatctcacagatagctctagagctgccatgattcccatctcaagtctccctcccagctggggccttggcatagtggactcatctaaatggagagtccagtcttctctggagctccattcacttctgagcctcagctgcttctgccctctggttgaagaagatcaggatctctttatatgctaccaaggaggcctgttggacttcaacactttgtcctcgcaaagagtaactgcccttggccttttgctgtctttctccagtgcaaccatagccctcaacctgtgaggagtgaaggaagcactttggccagagggagaagctgaactgcaatgcagtcaccacagagg

SEQ ID NO: 10726 - DNA, 475 bp, Homo sapiens
  MAP TO AC005326.1; EXPRESSED IN PLACENTA, SIGNAL = 0.73; EXPRESSED IN LUNG, SIGNAL = 0.56; EXPRESSED IN FETAL LIVER, SIGNAL = 0.69; EXPRESSED IN ADULT LIVER, SIGNAL = 0.53; EXPRESSED IN BRAIN, SIGNAL = 0.85; EXPRESSED IN BONE MARROW, SIGNAL = 0.58
tggcacattcccattatgttctgtttatcagactgcaactaaaattttcatgggttcggctttatgttgaacagaatttgcagaatatgagttgaagcgaaccatagtttaataatgctgtgattctcctaaatcaccaaagtgcatgaaaggattatagagctcagaaatactgaagcatctttgcaataaaaaattattagtgaatgtacaaggagtctaacattttggttttgctttcgcttcctaagatgcaacagcattttgaatttgaataccagaccaaagtggatggtgagataatccttcatctttatgacaaaggaggaattgagcaaacaatttgtatgttggatggtgtgtttgcatttgttttactggatactgccaataagaaagtgttcctgggtagagatacatatggagtcagacctttgtttaaagcaatgacagaagatggatttttggctgtatg

SEQ ID NO: 10727 - DNA, 477 bp, Homo sapiens; identical to SEQ ID NO: 6051
  MAP TO AC005606.1; EXPRESSED IN LUNG, SIGNAL = 1.3; EXPRESSED IN FETAL LIVER, SIGNAL = 1.4; EXPRESSED IN BONE MARROW, SIGNAL = 1.3; EXPRESSED IN PLACENTA, SIGNAL = 1.2; EXPRESSED IN BRAIN, SIGNAL = 1.4; EXPRESSED IN ADULT LIVER, SIGNAL = 1.2

SEQ ID NO: 10728 - DNA, 492 bp, Homo sapiens
  MAP TO AC004682.1; EXPRESSED IN LUNG, SIGNAL = 1.2; EXPRESSED IN FETAL LIVER, SIGNAL = 1.5; EXPRESSED IN BRAIN, SIGNAL = 1.2; EXPRESSED IN BONE MARROW, SIGNAL = 1.2; EXPRESSED IN PLACENTA, SIGNAL = 1.3; EXPRESSED IN ADULT LIVER, SIGNAL = 1.1
ccaaggcatttctaacctctaccatctcgtctttattcacctttgtttttccccacaaattcctacctaccttcagtattacagaatcataataaaatcataaagctctaaatctccaacaggaaaactgagagataaacatgagctgttattttccagcctccgttcgcttccctctgggctaacccatactaaggcctttacctgtctttccggatattttggccagcctggtcaccgccctcttcctcagcatccttctggtcatccttgctctcttcccagtccttgtaggaggagactttggacttcttcttgtcctccccatcgtccttctcctctcgctctctccgtttcagggaagccagcaagtccagtccgagtaatgaagggcggggagcaggagccttgaagacatgctgctcgctggccgcacttttggacttgcaaataagaccaccaacctgacagtccagatcagtgccttccaat

SEQ ID NO: 10729 - DNA, 463 bp, Homo sapiens
  MAP TO AC006120.1; EXPRESSED IN PLACENTA, SIGNAL = 0.92; EXPRESSED IN LUNG, SIGNAL = 0.81; EXPRESSED IN FETAL LIVER, SIGNAL =  17; EXPRESSED IN BRAIN, SIGNAL = 0.61; EXPRESSED IN BONE MARROW, SIGNAL = 0.66; EXPRESSED IN ADULT LIVER, SIGNAL =  42
ggctctgatgcttctgttctgaccttctgtggctactgtaggggaagagaaggccatcttggaagctatgaataatggttctattgacagagaactgcaattagcaatcatattaccattacttactatatatattcttggatttttcttgccttgaccaatttgtgtaggtgtactcatctactgtttcaaatgctatactctctttcagaaagacttcctgaactcttaagtcctgattacaagtattctctctttcagcatcttgtaaagtacctgtgaaaaaagccactgtggtgtaccaaggagagagagtaaagattcaggaaaaatttaagaatggaatgctacatggtgataaagtttctttcttctgcaaaaataaggaaaagaagtgtagctatacagaggatgctcagtgtatagatggcactatcgaagtccccaaatgcttcaagggtaa

SEQ ID NO: 10730 - DNA, 470 bp, Homo sapiens
  MAP TO AC000403.1; EXPRESSED IN LUNG, SIGNAL = 1.4; EXPRESSED IN BRAIN, SIGNAL = 1.1; EXPRESSED IN BONE MARROW, SIGNAL = 1.2; EXPRESSED IN PLACENTA, SIGNAL = 1.2; EXPRESSED IN FETAL LIVER, SIGNAL = 1.3; EXPRESSED IN ADULT LIVER, SIGNAL = 1.4
actccatacattttaaaaacataaacctatccttatgtgctaaaataaaatattttttaagtagcagtaattttgacattaatttgctagtaatactaccttagatgtgaaaacactaatattagcaccagacttcaggagcaataacccttacaaacgtctctcgggttaaccgtattagcagtagaagaaaagagtgaattctcaaaacacccacaactcaaataaaatgaatctccctagccctttctctctctggggatttgtagatagatttaaacttacattttattcataatgtgtagcatgtctccaaagacagttatccaatatccatgcctcctggtattgatgcccttttggggtcccctctccttgaatcgaatctcacttttgatccattgaaagctgcagaagtgatgcagagagacttcttggctacattgtaagaggaaagcccaagtctcttg

SEQ ID NO: 10731 - DNA, 474 bp, Homo sapiens
  MAP TO AC005538.2; EXPRESSED IN LUNG, SIGNAL = 1.7; EXPRESSED IN BONE MARROW, SIGNAL = 1.1; EXPRESSED IN PLACENTA, SIGNAL = 0.97; EXPRESSED IN FETAL LIVER, SIGNAL = 1.1; EXPRESSED IN BRAIN, SIGNAL = 1.1; EXPRESSED IN ADULT LIVER, SIGNAL = 0.92
ttctgggtaaaactttacgtgtgttaataacaaaatgaaaatcttacaagattaaaaaaaattcccctaaggaagcaccttaacgctgatttagagttactgtgtgaagctcccccgctatctgccagagctccgtgtccattcatttgaggatatggctttcaataagataacgattaatcagatgcttctagcagcacccggattctccggaattgcacacgggaactgccttctctgctccccaaacttggtgcagcccgaatggaagaacccgcggtcgctgctcccaccctcacctttggactgcgcgatgtagatgagccggctgaagatcttgcgcatgcgcggcttcagggcgaagttcttggcgcccccggtcacagaaatgaccaggttgggtgttttcaggtgccagtgctgggtcagcagctcgtaaaggatttccgcgtccgtgtcgcaggacagacgtat

SEQ ID NO: 10732 - DNA, 462 bp, Homo sapiens
  MAP TO AC004831.1; EXPRESSED IN BRAIN, SIGNAL = 0.68; EXPRESSED IN BONE MARROW, SIGNAL = 0.71; EXPRESSED IN ADULT LIVER, SIGNAL = 0.81; EXPRESSED IN PLACENTA, SIGNAL = 0.84; EXPRESSED IN FETAL LIVER, SIGNAL = 0.81; EXPRESSED IN LUNG, SIGNAL = 0.89
gccaccagttaatgaatcagcatgtatctgaactacattggcatgctttctgttaactttatgaaaatagcacagtaggaagtgatatcaactgtttatagatgacaacacagaatttcagtcaaacaactttcccagctctagagtaggaagtggggccagggtgaaagagaaggtttgtttcacttcaagatccataggcaacagatgccaagagtggcagtggtggattggagaaaggcactagggtttgtgagactggttttaagcaggatattgaacaacgtattttactttgtattgtgatttttcctgaggacaagatgaaatgtgagctgagtgagaacacaaagaacaggatttatcagggttggattactataatccagtcatcgttccatctgtcattgattaattttgtagagaagtggttctcgaactgtgcgaatcagttacttgcaa

SEQ ID NO: 10733 - DNA, 467 bp, Homo sapiens
  MAP TO AC005477.1; EXPRESSED IN LUNG, SIGNAL = 0.99; EXPRESSED IN FETAL LIVER, SIGNAL = 0.92; EXPRESSED IN BRAIN, SIGNAL = 0.83; EXPRESSED IN BONE MARROW, SIGNAL = 0.93; EXPRESSED IN ADULT LIVER, SIGNAL = 0.9; EXPRESSED IN PLACENTA, SIGNAL = 0.95
cctgaaagtaggcagaagttaagcagtaaattccttcagattttaaagtttcaaaaatatgttactctaatctctattctagcaccattttacatttttataatttagcagtagttctatcattagtgatagaaacagatatggaatcttatctactgaccccccaatacaatgacatttctactctcatacactgataagtataaaatttgatcttcctgggaggtgatataagtaagattacaaaataggatgccccagatctcattccctgcccaccccccacagacttaccaacaatatattgtacaaaatgcctttataagacctccagaaaccagttatgaaaccacagtgcccctaggcaaatacaaagtgaagaacagcagaattaaaacaggtaggaaaagtcattttattttgctattcttagcctttccccaggctggcacagctcaatgaattgg

SEQ ID NO: 10734 - DNA, 476 bp, Homo sapiens
  MAP TO AC005495.1; EXPRESSED IN PLACENTA, SIGNAL = 0.8; EXPRESSED IN ADULT LIVER, SIGNAL = 0.67; EXPRESSED IN LUNG, SIGNAL = 0.77; EXPRESSED IN FETAL LIVER, SIGNAL = 0.91; EXPRESSED IN BRAIN, SIGNAL = 0.68; EXPRESSED IN BONE MARROW, SIGNAL = 0.81
tttcatctgtatttctaacagaaactgctatttcagaaaagagatatttcaaagtttaattttgacaaagagtgcaaatcggggtttctatattcatggaaattttagttgctataatacgtccctggtaacatagatcatcatattggaaataggaacagattacttatgaataaatattttcatttgtataagctttagaactcgattcatagaacaacagaaaatgcagtcagcacaatcgtgaacacttacatatattctatgtgattacacagtaagttacctggaaatttgttcgttttttccaaaggcaaactatatacaagtttttcttcactttctgttgttaacttggcatcaggaatgtgctgcttaataagggatgtgattttttctgtgtcacacatttcattcctgtgtaaactattatttcaaaagagccataagtctcttgaattcttttccaacaccac

SEQ ID NO: 10735 - DNA, 466 bp, Homo sapiens
  MAP TO AC002299.1; EXPRESSED IN LUNG, SIGNAL = 0.71; EXPRESSED IN BRAIN, SIGNAL = 0.73; EXPRESSED IN BONE MARROW, SIGNAL = 0.79; EXPRESSED IN ADULT LIVER, SIGNAL = 0.77; EXPRESSED IN PLACENTA, SIGNAL = 0.65
tgtggatctccgtcttttcagaagtgctgtctctttgtgtccttgtgagacacttggcacagttggctgtgtagaaaaagaaaagcacggaggcttgcggacctctttttatctccctgccagactgtaagctgttggaggtcaaaggctggtttctactgacctttgtgcccacacaacacctaacacagtgttttatgcataatgagtggctgttggttggcttgaaatgcatagcgtttaattaaatctctaaattcttgtgtctgccatagtgacctaaaacttgacaacgtgatgctcgattctgagggacacatcaagattgccgattttggcatgtgtaaggaaaacatctgggatggggtgacaaccaagacattctgtggcactccagactacatcgcccccgaggtgagagctgctgggcacacgttcacattgcggtgatgtaccctctgctccc

SEQ ID NO: 10736 - DNA, 365 bp, Homo sapiens
  MAP TO AC004796.2; EXPRESSED IN BONE MARROW, SIGNAL = 0.79; EXPRESSED IN PLACENTA, SIGNAL = 0.98; EXPRESSED IN LUNG, SIGNAL = 0.78; EXPRESSED IN FETAL LIVER, SIGNAL = 0.76; EXPRESSED IN ADULT LIVER, SIGNAL = 0.94; EXPRESSED IN BRAIN, SIGNAL =   1
ggccaagagccactgattaacaaaagttacttagcacttttcagataattatctatttataaaggtaacctgattccccactagttctaacgagaaaactatccatatgaatgccaaaaagacacataacaaaattggtttattaaaagaatgataatattgatattttaaacatttccccctaacagagcaaaacgagaggcttgaggaaccataaacctaccatcacacgtaaaagtaactggtagctgaaatccttcaatgtcaatggagaccttcacactagcattttctccgcatatgtttctttgcgctgtgactggacttaacaaatagcctgggtttgtgcggtgattggtatatgg

SEQ ID NO: 10737 - DNA, 473 bp, Homo sapiens
  MAP TO AC006425.9; EXPRESSED IN LUNG, SIGNAL = 0.51; EXPRESSED IN BRAIN, SIGNAL = 0.58; EXPRESSED IN ADULT LIVER, SIGNAL = 0.59; EXPRESSED IN BONE MARROW, SIGNAL = 0.7
gggccatgatagtttaaccctactggttcttcacaagtttaacatccccatgttacctctaatacatgttatttcattttcacatcttgcaagcaggaaggaattgacttcaggcactggattttgtttatagaaatgtaattgtaatttcttattgcatatgctctttagcctttactggtaaagtttttcttttttatttcagaagcagaagtgtcagaacactccacaggtataacccatcttcctcctgaggtaatgctgtcaattttcagctatcttaatcctcaagagttatgtcgatgcagtcaagtaagcatgaaatggtctcagctgacaaaaacgggatcgctttggaaacatctttaccctgttcattgggccagaggtaggtaaatgggtttttaaaatattttcatgtatttttctagatgaatattcatttacattaatgagcaaggccagagagagaa

SEQ ID NO: 10738 - DNA, 359 bp, Homo sapiens
  MAP TO AC004381.1; EXPRESSED IN BRAIN, SIGNAL = 0.63; EXPRESSED IN PLACENTA, SIGNAL = 0.86; EXPRESSED IN LUNG, SIGNAL =   1; EXPRESSED IN BONE MARROW, SIGNAL = 0.68; EXPRESSED IN ADULT LIVER, SIGNAL = 0.75
accagaaaatctcatatccgacatattgaaatcagttgatttaatactattttaagaacattttaatatatttgttctacactcaaaaatgtaagccttaaatctttaaaaagaaaaaaatccttaaaaaacaagtatttaccattgaatgcctatggaaaatcactaagagaaacatacctgccaattctctgataacttcttctctattcacatgactgttatttcgagatttgtacacaatctgaaatgtccctttgtttggagctttaaaccagggttccaaaaatgtttctgcatattttttcatatcttctaaaaaagccttgcatgtgcctgagatgggtaacattcgcaaa

SEQ ID NO: 10739 - DNA, 482 bp, Homo sapiens
  MAP TO AC004886.1; EXPRESSED IN BONE MARROW, SIGNAL = 0.74; EXPRESSED IN ADULT LIVER, SIGNAL = 0.75; EXPRESSED IN PLACENTA, SIGNAL = 0.92; EXPRESSED IN LUNG, SIGNAL = 0.8; EXPRESSED IN FETAL LIVER, SIGNAL = 0.7; EXPRESSED IN BRAIN, SIGNAL = 0.62
gggtacttaggccagagttagaggtagaattacccagagattatatgcaaaagaagagaacagcaggcagatcttgaagaatagattcattcaataagaaaccagcaaagcatattaaacaggatcattcaaaaagtgtaaggaaaaccagtagtttttagtaaatctgagtgaagaaagatcagaatttcaagaaagtgacaggcgatatcaccaaatatagtaatgagactaaatgacatatgtcaaaaaggttggcagatgtctctttctataatggaactgagtactctaaaaattaatatttctttcttaatccttaattttgtttctgtcacctttgcaataattgtttcaacttttctcaggtagtctgcataattggctataagaattgttttacttgtatttaggtatgtgcctatacttaaaaaaaggagttatgatggatattacattgcttcatctttacgtaataagaa

SEQ ID NO: 10740 - DNA, 448 bp, Homo sapiens
  MAP TO AC003104.1; EXPRESSED IN ADULT LIVER, SIGNAL = 1.1; EXPRESSED IN PLACENTA, SIGNAL = 1.1; EXPRESSED IN LUNG, SIGNAL = 0.92; EXPRESSED IN FETAL LIVER, SIGNAL = 1.5; EXPRESSED IN BRAIN, SIGNAL = 0.87; EXPRESSED IN BONE MARROW, SIGNAL = 1.4
tttaatcttctcagacatcagccttgagtcagaggagttattattaggcattgttgttaccattatctccattttacagacaggaaactaagatgtgaagagaagggacaagttcccagtcacacgattagtggcgaagttgcaacgtaaacacatttgcctgacttcaagttactccagttccccgcagtccctccaaattacacccgcagacacacatgctcacctctctcccccacctcctcccccttccatcttaccacaaccctgaggccacccccagggagatcatcctgtccatgcccctgcctctgccccagtgcagtggagcctccacgtggcctgtatctggagctcatctggtcatggtccaggagaaggtgacagtgggaaagtcgggggagtcaagggtgtcagctgctgctgcttctttttgagcaaagacttt

SEQ ID NO: 10741 - DNA, 463 bp, Homo sapiens
  MAP TO AC000085.4; EXPRESSED IN PLACENTA, SIGNAL = 0.9; EXPRESSED IN ADULT LIVER, SIGNAL = 1.2; EXPRESSED IN LUNG, SIGNAL = 1.2; EXPRESSED IN FETAL LIVER, SIGNAL = 1.3; EXPRESSED IN BRAIN, SIGNAL = 0.97; EXPRESSED IN BONE MARROW, SIGNAL =   1
tgcctagtgtcatcctgcacatgtcttatctccactgtgggctggtaatccccttgagagttgattcacaggcttgggtggatctattacaggcgtagaaaagcaagctaatgtttccttcaagtgtttacctaatgttaacttttttctaaattttatttaacttctcctcttttgcctttggctacagtcagtccatttcagaggaaaaaaatttaatcaaatgctttttttctgtttagctccaaaaccttggaattaatccagctaacattggattcagcacactgaccatggaatctgacaagttcatatgtatccgagagaaagttggtgagcaggcacaggtcacgatcattgacatgagtgacccaatggctccgatccgacggcctatctctgcagagagtgccatcatgaatccagcctctaaggtgatagctctgaaaggtaaacccgatgg

SEQ ID NO: 10742 - DNA, 483 bp, Homo sapiens
  MAP TO AC004988.2; EXPRESSED IN PLACENTA, SIGNAL = 0.7; EXPRESSED IN LUNG, SIGNAL = 0.6; EXPRESSED IN BRAIN, SIGNAL = 0.73; EXPRESSED IN BONE MARROW, SIGNAL = 0.65; EXPRESSED IN ADULT LIVER, SIGNAL = 0.67
aaaaggaccattggtggatgcctcagagtcacctgggaaacttttccaatatacagattccagagctccaggaagagaaaacacaggtttaggatggagttagggatatctgaagttttaaaagattctgcaaggatttcattctagaactacagaatattttagatagagtgctgttgctgtgtacatagttttcacagttagacatagtatttttccatcatcgtcattacagaggaaaaagtaataaccttactgtggaagaatcttatagacatcagcttaaccaagtcatcatacatcccgagagcgaacttccatatcatgtaccccttggtatcatgtataatctcaatttcctgcccgaaatgcatggcttcaatctaattgtgggaaaacatctggccaacttaaacttagggaccattgtccctaagctgaccagtattcttcagaagcatcaaggttatggaagacaaagcc

SEQ ID NO: 10743 - DNA, 374 bp, Homo sapiens
  MAP TO AC005541.1; EXPRESSED IN PLACENTA, SIGNAL = 0.75; EXPRESSED IN LUNG, SIGNAL = 0.9; EXPRESSED IN FETAL LIVER, SIGNAL = 0.75; EXPRESSED IN ADULT LIVER, SIGNAL = 0.85; EXPRESSED IN BRAIN, SIGNAL = 0.67; EXPRESSED IN BONE MARROW, SIGNAL = 0.87
tctctcagcttagggggttgcagaagcaactctatctactaggaccaatcatgggccttatttctaactccactacaacctactgaataactgtatccattcacacctttgtattccttatcaacacaattcagagttttagcagattcaactttatcagaccaattttttttttagggtcatcaatgactcagttactgagccattccctgggaataacatcttgactaaacataatctttatcttcaaggacctctcattattcagtggagtaaagacacggggaaatggggaattttcatgcagtcgttagaggtaagagctgaaaatgttaggtatatggtgctatgggagtccttgttggtgggtcaag

SEQ ID NO: 10744 - DNA, 474 bp, Homo sapiens; identical to SEQ ID NO: 5648
  MAP TO AC004773.1; EXPRESSED IN LUNG, SIGNAL = 1.4; EXPRESSED IN FETAL LIVER, SIGNAL = 1.2; EXPRESSED IN BRAIN, SIGNAL = 1.1; EXPRESSED IN PLACENTA, SIGNAL = 1.2; EXPRESSED IN BONE MARROW, SIGNAL = 1.5; EXPRESSED IN ADULT LIVER, SIGNAL = 1.7

SEQ ID NO: 10745 - DNA, 349 bp, Homo sapiens
  MAP TO AC004768.1; EXPRESSED IN BONE MARROW, SIGNAL = 0.85; EXPRESSED IN PLACENTA, SIGNAL = 0.74; EXPRESSED IN LUNG, SIGNAL = 0.83; EXPRESSED IN FETAL LIVER, SIGNAL = 1.5; EXPRESSED IN BRAIN, SIGNAL = 0.68; EXPRESSED IN ADULT LIVER, SIGNAL = 0.73
gcttttcctctttcttctttcctcaaatcactactaaaacactcttggctaaattcttaaaattctctgaagatacatattttaggttcagatttcagtttaatgataataaccaaccagaaggatgctgaagttgcttggggatactctgaggggaatcaaaaaactaatggtcctcttcccttcccaggttctaaacaagctttaaaatgatgcagagaatagaagatgaagggcaagttattaccttttcctagacacagtcctaggaatgccagacttcttgttctcaggaggatgcccattgacagtacagcaaagcagcttgccaacccaagtgtgcagtatt

SEQ ID NO: 10746 - DNA, 476 bp, Homo sapiens
  MAP TO AC005042.1; EXPRESSED IN PLACENTA, SIGNAL = 0.59; EXPRESSED IN LUNG, SIGNAL = 0.65; EXPRESSED IN ADULT LIVER, SIGNAL = 0.57; EXPRESSED IN BRAIN, SIGNAL = 0.65; EXPRESSED IN BONE MARROW, SIGNAL = 0.63
tcccctgaatctctttctgtgcatctgtgcgtcatgatttccttaagatcataagcatctgggcctctgcatatgttcatcagggggaaaaattatttaggtatgtattttttaggatttttgtaacttcccatttttgtctcagctgagctttttttccttataccaagtgtttttttcagtgtatttttacaacatgggccttcctttctgaagccatgtttttctcatgtagggagtttgcctggcgtgatcctgagttgcctgaggtcattcacatgcttcagcaccagttcccatctgttcaggcaaatgcagcggcctacctgcagcacctgtgctttggtgacaacaaagtgaagatggaggtacaggacatggtgcctgggatgactggggaaaataatgcctttgcatttaacagccacgtgcttctgtatttaagaaattacccagtgtaattcaagagtcttttt

SEQ ID NO: 10747 - DNA, 478 bp, Homo sapiens
  MAP TO AC004992.1; EXPRESSED IN BRAIN, SIGNAL = 0.92; EXPRESSED IN BONE MARROW, SIGNAL = 0.81; EXPRESSED IN ADULT LIVER, SIGNAL = 0.86; EXPRESSED IN PLACENTA, SIGNAL =   1; EXPRESSED IN LUNG, SIGNAL = 0.91; EXPRESSED IN FETAL LIVER, SIGNAL = 0.8
tgccaagaaattggaaaagctagaagaaatgggtaaattcctatacacatacaacctaccaagattgaaccatgaggaaatccaaaacctgaacagagtaataacaagtaaagagatcaaaactgtaattaaaaagtctctcagcaaaaacaaaggctgcaagcttaaggcttcacggctgaattttactaaacatctaaagaagtactaacaccaatcttacggaaactattccaaataatggtggaggagggaatgcttccaaactcattctacaaagccagtattaccctgatactaaagccagacaaaaatgtgtcaaaaaaagaaaaatacaggccaacgtccctgatgaacattgaggcagaattcctcaacaaaatactagcaaaccaaattcaacaatacattaaaaaggtcattcatcacaaccaagtaggattcatcccagggatgcaaggatggcccaacatacaca

SEQ ID NO: 10748 - DNA, 461 bp, Homo sapiens
  MAP TO AC005729.1; EXPRESSED IN PLACENTA, SIGNAL = 0.64; EXPRESSED IN BRAIN, SIGNAL = 0.66; EXPRESSED IN BONE MARROW, SIGNAL = 0.56; EXPRESSED IN ADULT LIVER, SIGNAL = 0.96; EXPRESSED IN LUNG, SIGNAL = 0.64
caagcacactttaccactcggtccttattgtttgaagcaaatatagcaagaattaaataccaaaaaagttagggatgcttcaagtacatttacttatttatggaccattcatgaaagaaacaagcatgaatagaacaaatgcttgcaactttagcagaatcagcaaaggaagtagaaaggacaacaataatacatgcatgattgtttatgaatattgaaatcaaacttacataatgtttatctgggttgtatttcttatgatatgtaaaaacagagacttccttgattcgaccatcttgtctaaaggagtatgttttaggtgaaaatgaaaggatgggctcatcattagaaggaagaccagaaaaacgaagctgagcaaggttgtgaatgaagaagttaaactttgtggcaatgcttcccaaacttgattcaataagcctacaaaataatcagaaaattcg

SEQ ID NO: 10749 - DNA, 458 bp, Homo sapiens
  MAP TO AC006285.9; EXPRESSED IN BONE MARROW, SIGNAL = 1.1; EXPRESSED IN PLACENTA, SIGNAL =   1; EXPRESSED IN LUNG, SIGNAL = 0.95; EXPRESSED IN FETAL LIVER, SIGNAL = 0.91; EXPRESSED IN BRAIN, SIGNAL = 0.82; EXPRESSED IN ADULT LIVER, SIGNAL = 1.2
aattacatatcaaaaagtacgggatagagcacggcacagtggtgggcacctatagtcccagcctgtgctcttggctattcaggacctgaggcaggatcacttgagcccaggagtttgagaccgaagcctgccatgatagtgccagcaattagacactgcactccagcccgggtaacacagcaagaacccatctcttaagaaaaacaacaaacctaattttttttcaagaaaatatttttaatatataacagctcatacccagccaccttgctgaatgatgtactctgccgaatagtcctccaggtatgtcacgccaaactgcagcagtgcgctcaaaggttcttgaccacgtcttgtcaattccaaaagcatttgtcgtagcaaaaccagaggcaccaaaatcttcaatgcaaagatgagagaataaaaaaccacactgaaattcttataatgtgttt

SEQ ID NO: 10750 - DNA, 479 bp, Homo sapiens
  MAP TO AC004935.1; EXPRESSED IN BONE MARROW, SIGNAL = 0.95; EXPRESSED IN PLACENTA, SIGNAL = 0.83; EXPRESSED IN LUNG, SIGNAL =   1; EXPRESSED IN FETAL LIVER, SIGNAL =  14; EXPRESSED IN ADULT LIVER, SIGNAL =   1; EXPRESSED IN BRAIN, SIGNAL = 0.99
ttctgggccataaaacaaatctcaataaatttaaaaggattgaaatcatgcagagtatgttttctggccaccgcagaattaaatcagaaatcagtaacagaaagttatctggaaaatcgccaaagagttagaacttaacaacacacttataaataatccatgggtgaaaggagaaaatgcaaagggaattagaagatattttgtcatgaaagaaaatgaagacccaacataaaaatggggagatgagcctaaagcagtgcctggggatactgatggcatcaagcacttacactagaaaagaagaaaggtctgacttcagggatctaagtatccactttacgcaacttgaaaagaagaggaagaagaagaagcctcaggacagcggagtggaaagagaaagggggcatgggtccttccgtgagttgcttcttgtcttcctcatcactgcttcgtggtcacgagatggctacactgtctcc

SEQ ID NO: 10751 - DNA, 398 bp, Homo sapiens
  MAP TO AC006316.2; EXPRESSED IN LUNG, SIGNAL = 0.85; EXPRESSED IN BRAIN, SIGNAL = 0.94; EXPRESSED IN ADULT LIVER, SIGNAL = 0.62; EXPRESSED IN PLACENTA, SIGNAL = 0.79; EXPRESSED IN FETAL LIVER, SIGNAL =   1; EXPRESSED IN BONE MARROW, SIGNAL = 0.66
atccaagtcattggtgagcctcctaatttactaaaaactagggcaaattaactctcaataaactgtaggctccctccaaccctagttaaaaatgagatgtctatcagaaaaaatataagaaataaaaatggacagtataactaaattcaacattagtatctggtttttgtatgtattctaccctgccttcactcacctggattgtgagctgtcaaggaaagatgtaattagctgacgccgcccatctttgttgaaaaccagggccttaccactggccaagacaccacaaccaaagctgacttcagcaccacggatagagtaaaagttatggtaagaggagagcctggaactgccaaagctttcagaaataaacattgggaatgtctgggatgccatct

SEQ ID NO: 10752 - DNA, 477 bp, Homo sapiens
  MAP TO AC005696.1; EXPRESSED IN BRAIN, SIGNAL = 1.1; EXPRESSED IN PLACENTA, SIGNAL = 0.88; EXPRESSED IN LUNG, SIGNAL = 1.3; EXPRESSED IN FETAL LIVER, SIGNAL = 0.91; EXPRESSED IN BONE MARROW, SIGNAL = 0.89; EXPRESSED IN ADULT LIVER, SIGNAL = 0.73
gactctgtcaccagatacaaatcgaaatttttctttttgttaaagagttaaggcaattgtactgaatttttctcaatttttagtttcctcacatgacttagattttgatgctgtacaaaataaataattttcatttaaatttgacaaatgctttggagattactgaaattttttcaagtatcctacatacatagttgcaaaataaaggcagttttttaaaatgtcacatgctatttttattgaaatctatctgtacgtaactacatgttctttttcaaggttatggaattagaatcaaagctaaatgaagcaaaagaagaatttacgtcaggtggacctcttggtcagaaacgagacccaaaagaatggattccccgtccgccagaaaaatatgcattgagtggtcacaggagtccagtcactcgagtcattttccatcctgtgttcagtgttatggtctctgcttcagaggatgct

SEQ ID NO: 10753 - DNA, 476 bp, Homo sapiens
  MAP TO AC006299.1; EXPRESSED IN PLACENTA, SIGNAL = 0.8; EXPRESSED IN LUNG, SIGNAL = 0.7; EXPRESSED IN BRAIN, SIGNAL = 0.67; EXPRESSED IN BONE MARROW, SIGNAL = 0.7; EXPRESSED IN ADULT LIVER, SIGNAL = 0.66
tgcaatgtattatctttttccctgagactttctctttgatctataggttatttacacacatgtgttgcctagttttcaagtgtctagagatttttcttttatatttttgcaatggactgaattatcataaccccctccccaccattcatatgttgaaatcctaacttccaaggtgatggaattaggtggggggggggggggttggaaggcaattaggtcatgaaggtagagccattatgaatctgattagtactcttataagagaagccttggaaagacctcttacccttccactatgtggagacacaacaagaaagcactatctacaggccaagaaatcgatcttctccagacaccaaatctactgaagccttgacctcggactttccagctcaaactgtgagaaataaataactgttgtttacagattactctgtttatagtattttgttatagcaggcagaatggttaaagtc

SEQ ID NO: 10754 - DNA, 484 bp, Homo sapiens
  MAP TO AC006457.2; EXPRESSED IN BONE MARROW, SIGNAL = 0.59; EXPRESSED IN LUNG, SIGNAL = 0.55; EXPRESSED IN BRAIN, SIGNAL = 0.58; EXPRESSED IN ADULT LIVER, SIGNAL = 0.41
tgaagtaatacgctgtataccctgaactcagctatgaggtatttaacgtatcatgggatatataaataaattaacttccatcaattcctagactacttacactgaaattatggaccaaagctttctaattcaattcccaagtggtgttaaaaccaaactgtattgtatttcaagaaactttatccatggttacaaaagtttaaaaacttatcaaacacgtgggaaaactgcaatttaaagataaatgattaggtttcctatttttttaagaccaactacaatgtgaaacataactacactaactgggtgttctctatcaaagtcaacactgcaaacaacaaagggtatcatctggccaagaaaaagataatttctgattccaattcaacacagctcctgtgtaacaggtgtttctctagttctcagctccacatttatgcttgagttatttctatgctagttgtagttttctttttaagttgcc

SEQ ID NO: 10755 - DNA, 484 bp, Homo sapiens
  MAP TO AC005831.1; EXPRESSED IN BONE MARROW, SIGNAL = 1.2; EXPRESSED IN PLACENTA, SIGNAL = 0.85; EXPRESSED IN LUNG, SIGNAL = 0.82; EXPRESSED IN FETAL LIVER, SIGNAL = 0.87; EXPRESSED IN ADULT LIVER, SIGNAL = 0.9; EXPRESSED IN BRAIN, SIGNAL = 1.2
aggcacttagtggaagcgtgttgaatgaatgagctgcagaatgctggctggtttgtttttccctctcccggactgctcttgtccaaaggtgtgatgctccttgggtatctgttcgtcacaaaagctgttatgcagcccgtattgaaatattttgtgaaatcctcccaactcttctctcttccccgccccagtagccagtcagaggaggaggaggaggtgtttggcatcccaaggagaagctccctgggcctgagtggatatcccctaacagaagaggagccaggaaccggggagccagggcctgggggtccgtacccccggccgctccgcagaatcatctccgttgaagaagaccccctgccccagctcctggatggtggctttgagcaacccctgagcaaatgctcagaagaggaagaggtctctgaccagggggtacagggacaaatcccggaggccccacccttgaaactcacccccacat

SEQ ID NO: 10756 - DNA, 480 bp, Homo sapiens
  MAP TO AC006425.9; EXPRESSED IN LUNG, SIGNAL = 0.71; EXPRESSED IN FETAL LIVER, SIGNAL = 0.86; EXPRESSED IN PLACENTA, SIGNAL = 0.84; EXPRESSED IN BRAIN, SIGNAL = 0.62; EXPRESSED IN BONE MARROW, SIGNAL = 0.72; EXPRESSED IN ADULT LIVER, SIGNAL =   1
tgagcttaagcctttccaggagcttactcatcagtctgcccttagtcatcctcaaacagatgtatggtggtattgtggtgaacacttactggacactctgccaggtaactggagtggtacttacactcttgtctaattggctatccctttcaccctgacatttcatcaaccagaaaaagaaaaaccacaacacctcccccgccaaaaaaaaaaaaagaagaagaaaagcctcttatggatcttttgactctcaagttaacatagacgtcattggagtcccacaagaagtgcctaacagattcaaagtccatgaccaaatagctgcagaatttaaatccatatttccacaggtaactattaataaaaatgtggcttggataaattacatctattataatcagcaacagtttattaattacaccaaggatgctatcaaaggaatagctgaccaattaaggcctactagccaaatgacttggg

SEQ ID NO: 10757 - DNA, 444 bp, Homo sapiens
  MAP TO AC005038.1; EXPRESSED IN LUNG, SIGNAL = 0.68; EXPRESSED IN FETAL LIVER, SIGNAL = 0.85; EXPRESSED IN BRAIN, SIGNAL = 0.74; EXPRESSED IN BONE MARROW, SIGNAL = 0.82; EXPRESSED IN ADULT LIVER, SIGNAL = 0.65
ggtctggctacagaaggctgagaaaggatctgcacctgggcacctggaagcaggtagcaggtttcaggcatattggctcctggagtttggccagtaacccgggcaatctcctgacctctttgccccctggttgccattgggtgattttggctttgggtcattaatgtttcctttgaaggttcttactcgttctttgctgcattcaaggggcgggattgcctaggagttgcggaagcccagggcaagaggggaagaagctggtgccaggagagcttaccactctctccttgtagacgatgtatttcaaccacttaaagtcctgccacttgaagccggcgaggacaaagagagaatcgcgctcgtactgctcaggccgctgcatggcgccctcggggtaggtgatgcgcagtgtcgttttgctgcccacgtccttctcaaagcctt

SEQ ID NO: 10758 - DNA, 469 bp, Homo sapiens
  MAP TO AC006324.2; EXPRESSED IN PLACENTA, SIGNAL = 0.6; EXPRESSED IN LUNG, SIGNAL = 0.72; EXPRESSED IN FETAL LIVER, SIGNAL = 0.8; EXPRESSED IN BRAIN, SIGNAL = 1.1; EXPRESSED IN BONE MARROW, SIGNAL = 0.75; EXPRESSED IN ADULT LIVER, SIGNAL = 0.61
ttcagatttattttagggagaaatgtctagaaaaatattttaactttatcatcaaaagaaaatctgcaatacgtctatggagggaagatatttattggtgttaccaccatcttcattaagaaaccaaaaagaaatgtacaaaatgttaacattggctattttgggatgttggagttatgaaagatctaatgtttaatgtgtgccttaagggtttttttttttaaccgtaaatttaccattttatttaggaaaagaaaatgtacacagatgtttagattcagaaaggaaatctcttggctctagggctgctccatggatttgccttcttacctgtccccaccgtgattgtggtctggctcatctccctgcattccttcctcctgccagctgactttcatgccatctttctgccacacaaacatgtggctagttaacttcagctcatctttcccccttcctcttacacttt

SEQ ID NO: 10759 - DNA, 468 bp, Homo sapiens
  MAP TO AC004860.1; EXPRESSED IN LUNG, SIGNAL = 1.1; EXPRESSED IN BRAIN, SIGNAL = 0.82; EXPRESSED IN BONE MARROW, SIGNAL = 1.1; EXPRESSED IN PLACENTA, SIGNAL = 1.1; EXPRESSED IN FETAL LIVER, SIGNAL = 0.98; EXPRESSED IN ADULT LIVER, SIGNAL = 0.94
ggttctgtttctctgtagaaccctgaataatatggtatcgttcagccctatttatgttcattggtatattccatctttgtctctcatctgcagactttctgttgttttataaatcattcatgactcttccatttaaacaatcaaatccttccttaactttacatctgtctctggcccgtggcctcctgcttcctgtcttccatggacagactcccaaagtagcactgggtactcactgccttccttttcatcatctcttctttcctggcccactgctgccagcctgtgaacaggatcacaccacggggcggctttccccagagtcaggaggttcactacgtagctagggccagaagtcacttttttgtaataagaatttttattgcatttttttctgttgcataagttggacatgatccctgtggacactttaaaagagaaaagcaaaatgacagaaataaaaatcca

SEQ ID NO: 10760 - DNA, 474 bp, Homo sapiens
  MAP TO AC002089.1; EXPRESSED IN PLACENTA, SIGNAL = 0.85; EXPRESSED IN BRAIN, SIGNAL = 0.96; EXPRESSED IN BONE MARROW, SIGNAL = 0.85; EXPRESSED IN ADULT LIVER, SIGNAL = 0.66; EXPRESSED IN LUNG, SIGNAL = 0.68; EXPRESSED IN FETAL LIVER, SIGNAL =   1
acgggttaaacacatccagctgtgaatcagaagacctatgttttacgagtttaacattttggatagtaaccaagaaggagggggttgaaagtcattcaggaagagcaaacaagataattttggattcttgctttttactgacagagcaggcaaaaattatgaggatggctgataaaggtagaaatagctactcaactaaacatagaagagatagtatgaaaaggacttttccaaagaaccttcagcattacaccccattgtaagagaggaggcagtgaagtagcttaacacccacgcctttaatatcctgtatcacagaaatacacgatgtgtcactatgggcacataggccaactctgaacatgacactagtgacaattttatcattggcttttgtggggtcaacatttccatattcaactttggtctttatctctctagggtattctaggagacatgaaacttaggtgagaa

SEQ ID NO: 10761 - DNA, 470 bp, Homo sapiens
  MAP TO AC005414.2; EXPRESSED IN PLACENTA, SIGNAL = 0.77; EXPRESSED IN LUNG, SIGNAL = 0.79; EXPRESSED IN FETAL LIVER, SIGNAL = 0.8; EXPRESSED IN BONE MARROW, SIGNAL = 0.81; EXPRESSED IN BRAIN, SIGNAL = 0.74; EXPRESSED IN ADULT LIVER, SIGNAL = 0.69
gagtcggctggctctaattgagccaacaagtttgtcctgttcgctctgggctcccagggatgggagctgcatccttaaatgcaaagcccttcttcaaggtggcaggggaggaagaagattgtcttctgccccttgaggaaagagaggggctctttccattctccactcccacccagtgcctgcctccatccgcaaagtgctgattttctctgctgaaatgttcgacgtctttggacagaaggttttattttctcaagaaagagatttcacatttctggatcggtgtatgtgagcaggttgcctctgtctgggctgctcttaagggatcttcaccgtctccatttctttgtggctgcatttttgctctgtcttttggaggaactcggctagtaccctccccaagaccaagtctgctgtcttcagggcttgttcctgcagaatcggagcgcggttttccaggagctgtgctt

SEQ ID NO: 10762 - DNA, 471 bp, Homo sapiens
  MAP TO AC004655.1; EXPRESSED IN LUNG, SIGNAL = 0.92; EXPRESSED IN FETAL LIVER, SIGNAL = 0.92; EXPRESSED IN BRAIN, SIGNAL = 0.8; EXPRESSED IN PLACENTA, SIGNAL = 1.1; EXPRESSED IN BONE MARROW, SIGNAL = 0.89; EXPRESSED IN ADULT LIVER, SIGNAL = 0.86
cacccattaccctgaactggaataagctggcaaataattatcttgtttttattagtctttcttaaatgtatacatagctcacatgtatttcaatgttgaatgatactagcagtgttttggtctttatttagaagtgtggtggtgttgaagtggcttctttctcagtatagttattgatttgtggtgacatgcctgaatcagccaagtctgttcctgctccaaagaagggtgccaagaaggtggtgtgaccaagagccagaaggatggcaagaatcacaagcatagccacaaggaaagctactctatctacatttacaaggtattgaagcaggtccatctcaactctggcatctcatcgaaggccatgggcatcatgaactcatttgtcaatatcttcaagtgcatcattcctgatgcattacaagtactcgacgatcacctccagggagatccatacagcttgtgcctgct

SEQ ID NO: 10763 - DNA, 461 bp, Homo sapiens
  MAP TO AC004690.1; EXPRESSED IN PLACENTA, SIGNAL = 0.99; EXPRESSED IN LUNG, SIGNAL = 0.96; EXPRESSED IN FETAL LIVER, SIGNAL = 1.2; EXPRESSED IN BRAIN, SIGNAL = 0.94; EXPRESSED IN BONE MARROW, SIGNAL =   1; EXPRESSED IN ADULT LIVER, SIGNAL = 1.1
tctttctataatttctccacactgagaattataaactccattatacccccaagaaagccagcaaatatttctacagacaaaatagtaaaaccctcatgagggatagatcacatctacatcagggaaagaatgtgagtccaagtctttggcgaataacttcccactcttacccttggcatggtagtctctaagcatcatagtctgtatgatcttaagccacatacctacccacttcgaccttcctaccttgactcctaggccaatcaaatctcctcctccatctttctagatctatttctgatggatttttctatcccactctccccatcctcatcacttctacattcagcctcagtctctctctctacctgctgcttatcttgacacatggcttttgatctctgctttttcctcttcacctacactggcccatcctcatcccaccccattatctgagcctc

SEQ ID NO: 10764 - DNA, 455 bp, Homo sapiens
  MAP TO AC004808.1; EXPRESSED IN PLACENTA, SIGNAL = 0.68; EXPRESSED IN LUNG, SIGNAL = 0.54; EXPRESSED IN BRAIN, SIGNAL = 1.3; EXPRESSED IN ADULT LIVER, SIGNAL = 0.47
aatgtttccttttcaagctatttcttagatttctttcatttgctctttagaaaaatagtactttactgaggttaatcaattagaaggtcataagcagaaaaatgagaatgagagatattataaaatagcaagtggccagacttttaagaaactgggtcatcatcaactagaaagagggcaaacctacagcaaccccgcttgacagcatgcttcagtactcttccaataccacagtcggtttttctttcagaattaagcaattctataaaaagagactgttcttaccctcatcctcccattccttattgctggtccatcttctgccagtctcaacacatacaaatccattttgtattcccttcctccacgaatgctgaatccaaatcctttggctcctttctccatgtccacagtgaaataatcaaaatcctttggggttggggagaaaatggaat

SEQ ID NO: 10765 - DNA, 436 bp, Homo sapiens
  MAP TO AC005230.1; EXPRESSED IN LUNG, SIGNAL = 0.73; EXPRESSED IN PLACENTA, SIGNAL = 0.75; EXPRESSED IN FETAL LIVER, SIGNAL = 0.76; EXPRESSED IN BRAIN, SIGNAL = 0.65; EXPRESSED IN BONE MARROW, SIGNAL = 0.7; EXPRESSED IN ADULT LIVER, SIGNAL = 0.58
tttctttgtaaaagatattgaagttgcaaccaaaacatttttaatggatttaagatagtcactgtttagaaacccattaccttaagttttatatccagaggacaaaaccagaaaacatttcccaacatgataaccaggtaaaaacctcagtgggtaattaaagacacttcatcttaaaaataaaatccacacgtatcattaatatcacactataatctcacctatcaaacagggccaaaagtgtgagtctgtcaaagttaatgccaatccacagctggggtaggatccaaaagcgataatagtgtttaaccttttgggcagcttcttctgttgggccgtaagtagctgccaagtcagggcttagatcaatgtcctgttgctccaacaaatctgtatcaatggtcaatagtctattcaatcgaatctgtgggagaga

SEQ ID NO: 10766 - DNA, 485 bp, Homo sapiens
  MAP TO AC004999.1; EXPRESSED IN BRAIN, SIGNAL = 0.61; EXPRESSED IN ADULT LIVER, SIGNAL = 0.63; EXPRESSED IN BONE MARROW, SIGNAL = 0.7; EXPRESSED IN PLACENTA, SIGNAL =   1; EXPRESSED IN LUNG, SIGNAL = 0.72; EXPRESSED IN FETAL LIVER, SIGNAL = 0.72
ttgcagttttcaactttttgtgttgaaatttttataaaaagaagttggagaaataaaaaacaagaaaacagaaccataagatttttatttaacatttttgattaaaggaattgtattgcaaattatgactttttaatttggcaacttccttttaatggtgttctttctttgtccttctctttctcttcctctctctctccctctcttccctaaagctccattccgacttagacaagggagagggcactgcgaaatacaccctctcaggagatggcgctggcaccgtttttaccattgatgaaaccacaggggacattcatgcaataaggagcctagatagagaagaaaaacctttctacactcttcgtgctcaggctgtggacatagaaaccagaaagcccctggagcctgaatcagaattcatcatcaaagtgcaggatattaatgataatgagccaaagttttgggatggaccttatgttgct

SEQ ID NO: 10767 - DNA, 475 bp, Homo sapiens
  MAP TO AC005553.1; EXPRESSED IN BONE MARROW, SIGNAL =   1; EXPRESSED IN PLACENTA, SIGNAL = 0.92; EXPRESSED IN LUNG, SIGNAL = 1.1; EXPRESSED IN FETAL LIVER, SIGNAL = 0.97; EXPRESSED IN ADULT LIVER, SIGNAL = 0.92; EXPRESSED IN BRAIN, SIGNAL = 0.87
cactaattcattcatccatttgttcaacaaatattgattgtatgactatggggtacaggcactgttctatgtgctggggatgcagcaaagaaaaaaggaacaggcaaagtctgtctcttagggagattacgtttgcttggaggagatggagaataaatatatacagaagagagtttcagataacatccgctgctctgaagaaaactcagcagggtaatgtattaggtcaaaatttttgattcctagtaagaaactgattttacactgcagcccaatgtacacacaagcatacaaaaaagaaaaatgaaaatgtgaagaaacactacttacctttattacacatgatgtgttctgatattttctcttctgttttattgtagaagatgctggttatgggccacattagataggttgtacagtctaggaatggattgcagcctgcagtttgaaaaacactggaacagctagggagtgg

SEQ ID NO: 10768 - DNA, 463 bp, Homo sapiens
  MAP TO AC002302.1; EXPRESSED IN LUNG, SIGNAL = 0.79; EXPRESSED IN BRAIN, SIGNAL = 0.74; EXPRESSED IN PLACENTA, SIGNAL = 0.83; EXPRESSED IN FETAL LIVER, SIGNAL = 0.81; EXPRESSED IN BONE MARROW, SIGNAL = 0.91; EXPRESSED IN ADULT LIVER, SIGNAL = 0.79; EXPRESSED IN HELA, SIGNAL = 1.9
ttggcacatctggggtatagttatttaactgccttctagtttacctcaatatgacccctcagtggagggaaaatggagcacaatgactagaagaatgttgagagatgaggaaagagagaatgggatggaaagaacataaaataggaaagcattgacattgtcacttcttggctatttcttcctgtaaaattttgcctggagtgccctacaatggggtccccatcctctgccctgataacatcttagtggatcactcctctctcccttttcattctgcaggacttgcccattggggctctttcagacctgactggtcattgggtatctgtggccatgataatcactctcttcctggacgtgaccctcctctcgttaaccaggatgcctgtgttcttaaggttggccgtttccaaggacagagagcttgcatcccatttctaggggactggggatccaaggactc

SEQ ID NO: 10769 - DNA, 470 bp, Homo sapiens
  MAP TO AC002093.1; EXPRESSED IN LUNG, SIGNAL = 1.1; EXPRESSED IN FETAL LIVER, SIGNAL = 1.1; EXPRESSED IN BRAIN, SIGNAL =   1; EXPRESSED IN BONE MARROW, SIGNAL = 1.1; EXPRESSED IN PLACENTA, SIGNAL = 0.99; EXPRESSED IN ADULT LIVER, SIGNAL = 1.4
  unsure 82
  unsure 170
  unsure 218
  unsure 346
  unsure 360
  unsure 375
  unsure 448
aatagggccttgaacttggggccaaatccagcaggtgacagactacaagtccccagagggcgaggagggcaggaagcctcangaggggagggagctgggatcctgcccaggcccccccagaacccactgctctcccccagtcttcaacaggaggggagccccctggggcncgcatgaacctgtgtgtcggggagggtggtgctctcggagagagccgnctgagctgagggtcctgggggaaggtgtaccccaccctgaacagaatggtgccctcacctgggccccagccagccagggtcacagcgctgacagtggccagtatctggctcacaggcctccccatgtncggcagtgagggcnactgctgttcgccanctctcgccaaaggtgccaggcaggcagggctgctggcactgggtcccgttccagcccggctcgcaggactcancagctgcctgtgtctggagagc

SEQ ID NO: 10770 - DNA, 465 bp, Homo sapiens
  MAP TO AC003665.1; EXPRESSED IN ADULT LIVER, SIGNAL = 1.1; EXPRESSED IN LUNG, SIGNAL = 0.68; EXPRESSED IN PLACENTA, SIGNAL = 0.67; EXPRESSED IN FETAL LIVER, SIGNAL = 0.73; EXPRESSED IN BRAIN, SIGNAL = 0.67; EXPRESSED IN BONE MARROW, SIGNAL = 0.66
ctctattgaacacggggctcatgttcaaagtccttgtttccaggaaaagtagaggaagttagggggtgggatgctgtatgattccgctgttgtgccagagtaacagattcagaaaagaagcactcttctaccatcaccatctccaccactaacaccttcactagccccgtcaccaccaccactacaaccagcaccatcaccaccagtagcactgtaaccacccatcaccaccatcacaaccaccgtcactacaactgccccctccaccatcacgataaccacgatctccaccagcaccagcacgggcaccaccatctacagccaccaccttcaccgtcacaaccaccaccagtagtaccgtcactacaaccaccacctccaccagcaccaattccatcaccagctccaatggcttagcctttctcttctaacacaagcaggaagagcagagttttcagaatggca

SEQ ID NO: 10771 - DNA, 468 bp, Homo sapiens
  MAP TO AC004662.1; EXPRESSED IN ADULT LIVER, SIGNAL = 0.88; EXPRESSED IN PLACENTA, SIGNAL = 0.88; EXPRESSED IN LUNG, SIGNAL = 0.83; EXPRESSED IN BRAIN, SIGNAL = 0.85; EXPRESSED IN BONE MARROW, SIGNAL = 0.81; EXPRESSED IN FETAL LIVER, SIGNAL = 0.82
tgtttactgaatgaacacatgagatgattttaaaatatagttaccattagtgtacatacagcttgcttatataaacatttcactatctattatcattttacaatcttccttcaaaaagtacaggaaccagagacaagtagcttttaacacagaagctcaaacactttcaagggctattgaggactaagagacttttccaccaccacaccacaatgcaaaactgctttattttccgtctcttattagcttctccaaagtacctgctgtttatccccacccctctaatctgtgttacactcatttttatctccgctttttcttttcttttctggtttcttgtctcttgacaattttcttacactctttgattctcacaaaactggccattatgagggactgccaaccagacatctcatgttccttcctcgagatgagtggaccaaagacacacaggtcaagattttggtt

SEQ ID NO: 10772 - DNA, 451 bp, Homo sapiens
  MAP TO AC005699.9; EXPRESSED IN LUNG, SIGNAL = 0.69; EXPRESSED IN BONE MARROW, SIGNAL = 0.71; EXPRESSED IN PLACENTA, SIGNAL = 0.73; EXPRESSED IN BRAIN, SIGNAL = 0.75; EXPRESSED IN ADULT LIVER, SIGNAL = 0.7
cttcgttgaccctggacttccctggttttagcactaaaagttccctgtcccaggaaaagtgtcagacccaggcaaacaaagactgttagtcactgtttttggcttctcaacttccctctatttgactgtgagatgcctcaaagaattcagtgtaacctctatttgtttttgacacatggttggtacaaagcgttaataaatagacaaatcgatgactgaataaaaggagtatgtcatagaagagttttggaatcaaaaagatgtggactaaaatctcacatcagtcatgttggactatacaactgactttatgtttactaagcctcagttccatcataagcaaaagcgtggaggggagaagaataataagagccacttcatggacatgtcataggaataagatgagactatgagctcctagtaggcttgtaaatcacttgcatgcataggc

SEQ ID NO: 10773 - DNA, 460 bp, Homo sapiens
  MAP TO AC005740.1; EXPRESSED IN PLACENTA, SIGNAL = 1.1; EXPRESSED IN BRAIN, SIGNAL = 1.2; EXPRESSED IN BONE MARROW, SIGNAL = 1.3; EXPRESSED IN ADULT LIVER, SIGNAL = 1.2; EXPRESSED IN LUNG, SIGNAL =   1; EXPRESSED IN FETAL LIVER, SIGNAL = 1.2
acgccaacctgtaaccaatccagctgtttttatacctcacttccaatttccctacatcgtttcccttttttgtctataaatcttctaccacgtggctgtgctggagtctctctgaattggctgtgattctgggggctgcccaattcgtgaatccttcattggtcagttaaactcctttaaatttaattcggctgaagtttttcttttaacagtgtacaaatacctcttcaagattctgctttcaattcttttggacatgcacccagaagttatgttgatagatcggccctgaggtgaactaaagccagcagccccacatcatgtcaaagttcggccgggccacccggggcctcaggaagcccgaggtcggcgatgtgatccggaccatcgtgcgggcaggcctggccatgcccgggcccccactaggcccagtgctgggtcagagaagggcttccatcaa

SEQ ID NO: 10774 - DNA, 483 bp, Homo sapiens
  MAP TO AC004587.1; EXPRESSED IN PLACENTA, SIGNAL = 1.2; EXPRESSED IN BONE MARROW, SIGNAL =   1; EXPRESSED IN ADULT LIVER, SIGNAL = 0.83; EXPRESSED IN LUNG, SIGNAL = 0.96; EXPRESSED IN FETAL LIVER, SIGNAL = 1.1; EXPRESSED IN BRAIN, SIGNAL = 0.92
ggataaattaactttaggaacattctgtattaaggtataatttcaaaaagtaatctgaacagaaagaattcacatttttatctagtagcggacccaatcatgaccacgattgagcgtgcagctgcaggaacattctgtgagtgctggggaatgtttcgagagaaactgtttcagggagataggatctttaagcaggaaggatcttttaagttgatgggttttgtgacaagtttaaatttttatctgatgttttataggtcgaaggtagatcagattcaagagattgtgacaggaaatcctacggttattaaaatggttgtaagtttcaaccgtggtgcccgtggccagaatgccctgagacagatcttggccccagtcgtgaaggaaattatggatgacaaatctctcaacatcaaaactgaccctgtggatatttacaaatcttgggttaatcagatggagtctcagacaggagaggcaagg

SEQ ID NO: 10775 - DNA, 462 bp, Homo sapiens
  MAP TO AC006463.3; EXPRESSED IN PLACENTA, SIGNAL = 0.94; EXPRESSED IN LUNG, SIGNAL = 0.6; EXPRESSED IN BRAIN, SIGNAL = 0.83; EXPRESSED IN FETAL LIVER, SIGNAL = 0.72; EXPRESSED IN BONE MARROW, SIGNAL = 0.54; EXPRESSED IN ADULT LIVER, SIGNAL = 0.7
ggaatgtacgcagagtgtggagggctacacaagtgtgtccttttactggaacagaaaatatgttcttgaaagaaatggaagagaaggctagaaggtaggttgagggagacttggatggataaaaagcctggcacaaaacagtgccaacaaagaatccattgactggctttgggcacacaaagtgacctggaaaaaaaaaatactgtcaccaagcacttacagtgagttcggaatcttgtcccatggaaatgatggtttggttcacagtctggagaagtttctccatgataatctggatctgcctctgagttggccccatgtccttcctgtacagcacctccaggatgtggctgagcagctgacagcaggcctccaggttctcctgtctctccagatggtacttgagctgatcagtcatcatgggaagcaggatctctctgtagtcatgctgtgtgaagtgga

SEQ ID NO: 10776 - DNA, 481 bp, Homo sapiens
  MAP TO AC005866.3; EXPRESSED IN PLACENTA, SIGNAL = 1.1; EXPRESSED IN BONE MARROW, SIGNAL = 1.2; EXPRESSED IN ADULT LIVER, SIGNAL = 1.3; EXPRESSED IN FETAL LIVER, SIGNAL = 1.3; EXPRESSED IN LUNG, SIGNAL = 1.3; EXPRESSED IN BRAIN, SIGNAL = 1.2
ggaagtgaaatgtcttgcccagaggcacatgcagcaggtagccggcagagctaggtcgcgggcttctgaccactgtccccctctcttccccaacagattaatcatcttgagaccttgaattaactccctccagggtggcaactcacaccaccaccaacacgcatcccccacgggcagggaaaaagagcatagagtggcagctcctctgagaacctgcagtgggcagttgtgagaatgaggcacgatggggaggacagcaaggggcagagtgctgacctccctcctgttggctctcaggtactggaactccttgagcaacctggtggcatccttgctgaactctgtgcgctccatcgcctccctgctccttctcctcttcctcttcatcatcatcttctccctcctggggatgcagctctttggaggaaagttcaactttgatgagatgcagacccggaggagcacattcgataacttcccc

SEQ ID NO: 10777 - DNA, 469 bp, Homo sapiens
  MAP TO AC006453.3; EXPRESSED IN PLACENTA, SIGNAL = 0.83; EXPRESSED IN ADULT LIVER, SIGNAL = 0.87; EXPRESSED IN LUNG, SIGNAL = 0.94; EXPRESSED IN FETAL LIVER, SIGNAL =   1; EXPRESSED IN BRAIN, SIGNAL = 0.99; EXPRESSED IN BONE MARROW, SIGNAL =   1
cctcctcctctggcttttggcaaactctgttctactttctgtctttatgagtttgaatattctagatgcctcgtataaattgaaccatacagtattggtcttcttgtgtctggcttatttctcacagcataacgttctcaagggtcatccatgatgtagccagaatcatggctgagaaggagccgtgtatttgtgtgcacatgtctgtctcaccctatggtgcctgaggctctcccagggctgcttgagaactgagtccttgtgtttttcaggtttggggtgatccacttggtgttcaccaacctgcttctgtgggccaacggcgtcctcaatgagtcaaagcaccaactcaatgagcacaaggaatggctcatcactctgggctttgggaacataacaacaggtgagtgctgagagaggtgagtggcccctctgccatgttggaatgtcttggaaacctgcagagtcc

SEQ ID NO: 10778 - DNA, 462 bp, Homo sapiens
  MAP TO AC005702.1; EXPRESSED IN BONE MARROW, SIGNAL = 0.84; EXPRESSED IN PLACENTA, SIGNAL = 1.1; EXPRESSED IN LUNG, SIGNAL = 0.89; EXPRESSED IN FETAL LIVER, SIGNAL = 0.83; EXPRESSED IN ADULT LIVER, SIGNAL = 0.74; EXPRESSED IN BRAIN, SIGNAL = 0.86
aagcatggattactcttataacaaaactaatttaaaaagtaaattacaaatactatttttaaaaggcaaatagattgggagaagtgatgttgctattcaggtaaaatctccaaagtgatatgaaaagaaaaaaaggaattgtgggagaaatagagcttcctaagagaagttaagaagagttaatatagttctaccttacttcaccccagaggatgaggcagattttaatgagtttctgaaagcaaagtgattgtaggcacttaatgcaaagtataactgaattgcctctccaattcttttagttgatccagagtaccagaaggaagcagaacagagacatcgagaattggcagctaaagctggaggatttaatgactttgcaactttagctgtcatctttgaacaatgcaaatcaaggtatgtaaggtagtcctttgtcctgaaaaatgtcaatttgatgtg

SEQ ID NO: 10779 - DNA, 446 bp, Homo sapiens
  MAP TO AC006319.2; EXPRESSED IN LUNG, SIGNAL = 0.72; EXPRESSED IN PLACENTA, SIGNAL = 0.7; EXPRESSED IN BRAIN, SIGNAL = 0.77; EXPRESSED IN BONE MARROW, SIGNAL = 0.65; EXPRESSED IN ADULT LIVER, SIGNAL = 0.67
tgatactgtaatgtgctaggagacagcatgatgagaggttttgggtgggaagtccatgctaaacatcttaaatgcttcagaaacttctttacagaattctctgcctttaggattctcctgttcaataaatatatttttcaccactttagaaataatcttcttaaagcccttccttgaactcatgcatctgtaatgactgcccatgaccagcagtactacattgtggaatgcaagacctaattagtctaagcatgaaagaccttttagtttcatcagctaagcccccttgtcctcccaggcattcctctttccaggtgctgtctccttctgcagcttcccgtaggcctcttcccactgctctttctgctcttctataaaactccacatttaatgcctacaccttaccaaactccaggaaacttccttgactcttgcgggctatatgg

SEQ ID NO: 10780 - DNA, 477 bp, Homo sapiens
  MAP TO AC005007.1; EXPRESSED IN PLACENTA, SIGNAL = 1.1; EXPRESSED IN LUNG, SIGNAL = 0.85; EXPRESSED IN FETAL LIVER, SIGNAL = 0.89; EXPRESSED IN BRAIN, SIGNAL = 0.79; EXPRESSED IN BONE MARROW, SIGNAL = 0.74; EXPRESSED IN ADULT LIVER, SIGNAL = 0.87
ggcctctaaatagagagcactgtcaatttctcttgtcaagagaaaaataattccctgtgttaaacaggcagattatcactcttatttacatttaaatccagagtataaccatgtgtgagaggttaagaagtggatgaaatctgtttctaaagtactgtttccactatataatattttaagaaaggtcttatcctgcaattgttttttcattttttctgtgatgagaaaataaatatagaactttcatcccctaaagacaaggttttagcatccaacttacctgacaagattttcattgtctccagttcccttgcaagttgcacattcagttcttaaatcttcagccttgggcttcttttgcaacacagactgtctttgtcttctctctctaggaactctttcctgccatacaagggataataaaataaaacataacaaacaaaataaggatatgagggaaacaattttaagcaagaa

SEQ ID NO: 10781 - DNA, 460 bp, Homo sapiens
  MAP TO AC005630.1; EXPRESSED IN PLACENTA, SIGNAL = 1.1; EXPRESSED IN LUNG, SIGNAL = 0.91; EXPRESSED IN FETAL LIVER, SIGNAL = 1.1; EXPRESSED IN BONE MARROW, SIGNAL = 1.1; EXPRESSED IN BRAIN, SIGNAL = 1.3; EXPRESSED IN ADULT LIVER, SIGNAL = 1.2
gtcttttcctctggacctcggtgtccccatctgagtgagaaaaggcagtggggaggtggatcttccagtcgaagcggtatagaagcccgtgtgaaaagccatactccaaggggctccaagtccagcgcacagtcccagaagggcccagcaaggcagccagggcggcacaggcaccaggtcccaaccttcttccctgtttgcccactctcagaccccggagttcatcatctcggagccgctggccagtatgtactcatgtgggaaccagaacacactgatggaggagttggcagagcaggcacagcagcacgacgagatgctgcacatgcaccacgcgctgaaggaggcgctcagcatcatcggtgacatcaacaggaccactgtcaccatgcccatgcccccgcccgtggacgacacctggttgcaggtgcagagcatccctgacgcacacaggtaccag

SEQ ID NO: 10782 - DNA, 469 bp, Homo sapiens
  MAP TO AC004802.1; EXPRESSED IN LUNG, SIGNAL = 1.2; EXPRESSED IN FETAL LIVER, SIGNAL = 1.1; EXPRESSED IN BRAIN, SIGNAL = 1.3; EXPRESSED IN BONE MARROW, SIGNAL = 1.3; EXPRESSED IN PLACENTA, SIGNAL = 1.3; EXPRESSED IN ADULT LIVER, SIGNAL = 1.1
acagaaggggcaaaagaatgtcagttcaaacactttggcaatttacaaggcacttttgagaaacagcatgaaaagcactactggaagatactaacagtgtttaaatttttaaaaactgaatatatagagcagtcttaacaatctacctaccgcaacaagagttccaaattactaatcacaaaaatataaactgaaaaatgagcaagaaactctgacagcatttagaaataacttagtggtaggagtgaagatgtatgaggaatgggccactgaactcgaaacacctgtaccttaccttcttctgaagaacattaaccttccgctccttcacatccaacatgtccttgaggtcatgtatctctccagcttgtgtccccttctcttcagccatatcctgaatttgttttgtctttttattcaacatggtttccttctcttccaaacgcaatcggagagcatccacctaaga

SEQ ID NO: 10783 - DNA, 476 bp, Homo sapiens
  MAP TO AC002088.1; EXPRESSED IN PLACENTA, SIGNAL = 1.1; EXPRESSED IN LUNG, SIGNAL = 0.78; EXPRESSED IN FETAL LIVER, SIGNAL = 1.1; EXPRESSED IN BRAIN, SIGNAL =   1; EXPRESSED IN BONE MARROW, SIGNAL = 0.97; EXPRESSED IN ADULT LIVER, SIGNAL = 0.58
caatatatcactgaattgctccaatctcattataaaacttgaattaataaggagttatttcttaggggttgagcaagaaaaatgttttcttgggatggagtgtactcctggtgaagatgcagtgggcattgttgaaatgacgagaaaggatttagaatattacataaacttagttgataaagcagcagcagagtttgacaggattacctccagttttgaaagaaggtctactatcggttaaatgctataatactaagcagcattccatgctacagagaaatgttttgtgaaaggaagatttcatggatgttgcaaacttcattgttatcttgtttgaagaaattgccacagccactccagccttcagtaactactaccctgatcagttagcagccatcaatatcaaggcaagaccctccacaagcaaaaagattatgactcactgaaagctcagatgattattagcactttagcaa

SEQ ID NO: 10784 - DNA, 456 bp, Homo sapiens
  MAP TO AC003669.1; EXPRESSED IN BONE MARROW, SIGNAL = 1.2; EXPRESSED IN ADULT LIVER, SIGNAL = 1.2; EXPRESSED IN PLACENTA, SIGNAL = 1.2; EXPRESSED IN LUNG, SIGNAL = 1.3; EXPRESSED IN FETAL LIVER, SIGNAL = 1.2; EXPRESSED IN BRAIN, SIGNAL = 1.3
tttcacaggatcccaagtccattcattcagttacctctcttattcccttttcaataatacaaaaccaaaagttgacatgttctgatatatacttaaattttttcaccagtagtaatttccagttacccataaatacctcataccttatgtggcaaaaagtaaatatttcctacataataaataccttttcccatatcagattaaagaacctccaaaacaagccatgagaaaatgtccataccattgtcttcttgaaaatcgggtgacagaagaccaatggattttaaatgcttaggtgtggctgcagaaagtgacatgatttccccaacagcttcatggaatccttcattagctccatttcttagcagaaaaggttgtgcagcatatgccatatcatactggatatgccccatctcatgatgagctgtcaggaagtcgtccattgtcacctttgtg

SEQ ID NO: 10785 - DNA, 378 bp, Homo sapiens
  MAP TO AC005495.1; EXPRESSED IN ADULT LIVER, SIGNAL = 0.95; EXPRESSED IN LUNG, SIGNAL = 5.2; EXPRESSED IN PLACENTA, SIGNAL = 0.72; EXPRESSED IN FETAL LIVER, SIGNAL = 0.82; EXPRESSED IN BRAIN, SIGNAL = 0.76; EXPRESSED IN BONE MARROW, SIGNAL = 0.78
tgtatgccatgctatgttctaggtactcagtaaattcatttaatcttcacaataattctataaagtaggtactattacgctccctactttgcagatgaagacacaaaggcaaggagtagctaagaaacttgctgttaagtggcagaaacaagatttgaactcacatggtaggctctagagccctcatcctttatccctctgctgtgttgcctcttatataagtcgaatactctacttacacgagaaaatgaagtgctctccatttgaataagctccgtgaagttaaaaattcccataagggcattgctaacaattcccataagaacaggaaaacaattcaatttcttggtattacacgcaacagaaaatctgtaatcc

SEQ ID NO: 10786 - DNA, 492 bp, Homo sapiens
  MAP TO AC004704.2; EXPRESSED IN LUNG, SIGNAL = 0.81; EXPRESSED IN FETAL LIVER, SIGNAL = 0.73; EXPRESSED IN BONE MARROW, SIGNAL = 0.79; EXPRESSED IN PLACENTA, SIGNAL = 0.85; EXPRESSED IN BRAIN, SIGNAL = 0.71; EXPRESSED IN ADULT LIVER, SIGNAL = 0.71
ccacgttatctataggcactttttcaacagtgttaacaatatcatcttcatgatcactattatcataatcaccttgattcagaaccattttggctatttcaccatcagacaacgaatgaacaactgttaaaaacttcttcaatatccacttcttccagcttactgatggactctgaaggtatatttttgcatatgtaagaaggtcaggcctggatttttctcacttgacatatgaaatccttcaaaattgccaccttgttcatcatcatcgctgagcataatcacaggccagaggttgtgccaagcacacacaaatgtatcttcagtgttctaactgttggcaacagcacgtacagcatccttcatgctaaacttcttttgaaaccttccacacccacacctctgttcactgctgctaccatgatgttcaagaaagtgtttttatatttactctctattgatctcaggatacccttgtcaggtggctgaatt

SEQ ID NO: 10787 - DNA, 498 bp, Homo sapiens
  MAP TO AC003042.1; EXPRESSED IN PLACENTA, SIGNAL = 0.68; EXPRESSED IN ADULT LIVER, SIGNAL = 0.69; EXPRESSED IN LUNG, SIGNAL = 0.72; EXPRESSED IN BRAIN, SIGNAL = 0.68; EXPRESSED IN BONE MARROW, SIGNAL = 0.71
aggcaagaagggaatggtgggacacgattaatattggccaagattataacccagtcagggtctcgtcaacaatttaagagtaaggcatcccacaggccaggggtaaccaggtggagagaatcctctttccaccggatagggatgggaaacaggcaaagcgggatggggaatgagaggcgaacagcctctttattaacacaattattttatttgccgaaaggtaatcatcctaagtgaggtcaacggcggctggcacaggactggccctgcaggcggctgggccacgttgccatggtgacggagcccgctcacttccagcagctgcaagggctggagaatcctgaggaaggagaccccaggtctcttttctttcccccaaaaggggctgaaggagacctgcaggtgtttgcattccccgtcccagcccccaagagacagactaagagcccctggggaaatgtcccagcccaggttcgcagggggtccatcctggagcac

SEQ ID NO: 10788 - DNA, 476 bp, Homo sapiens
  MAP TO AC002117.1; EXPRESSED IN HELA, SIGNAL =   2; EXPRESSED IN FETAL LIVER, SIGNAL = 2.4; EXPRESSED IN BRAIN, SIGNAL = 1.4; EXPRESSED IN BONE MARROW, SIGNAL = 1.5; EXPRESSED IN ADULT LIVER, SIGNAL = 2.3; EXPRESSED IN PLACENTA, SIGNAL = 1.6; EXPRESSED IN LUNG, SIGNAL = 2.3
ccactcagcttaggaataatgactagacaatctactgactagactccatgtaagtcatgccacttaaccttcgaccagaccctgggaggaagacaaactgttgtgccattttacacatgtggaagctgagtctggaggaggtgaggtaacctgcccgagatgatgcccgcgccagcccgcagcagaacccgcttagctgggaacacagccctttcaggtgccacgacctggccgtgccaccccccccacctgtctcgttgagctcataggtctgaatgagctgctgggcgcgggccagtgtggcgccctcctcgccctggtcctccaggaactccagcagctcaggggcactcagcacgcggtcctcgcccgagtactgatggaagatctcctccagctccggccgcttcagcagccgccgcaggaactcctcgatctcagccccctctagacggtcgttgttggagtggtcacac

SEQ ID NO: 10789 - DNA, 360 bp, Homo sapiens
  MAP TO AC004053.1; EXPRESSED IN PLACENTA, SIGNAL = 0.58; EXPRESSED IN BONE MARROW, SIGNAL = 0.52; EXPRESSED IN ADULT LIVER, SIGNAL = 0.42; EXPRESSED IN LUNG, SIGNAL = 0.43; EXPRESSED IN BRAIN, SIGNAL = 0.6
aactgtgtgctgctcctctgtatttccagcatctaacaaagtttcgacaaaaagagtggccaaataagtgtttattaaattgacatgtataagattaagtttctcttcctaactatataagtaataatgcttatccgagcaccagtaaagggaaaactaatgggtaaaaacaagaatgaagctccttcgaggttcactttcacagatgcacctgctgctaccttagccaccacctcttcctccctctcagcacacgtgggcacagagtggaccacagtgaggaccctgctattagggaacccttctccagatgcagtatcttggtattcttgacaaactgcagtgcagtacatgtcgcct

SEQ ID NO: 10790 - DNA, 482 bp, Homo sapiens
  MAP TO AC004125.1; EXPRESSED IN PLACENTA, SIGNAL = 0.72; EXPRESSED IN FETAL LIVER, SIGNAL = 0.7; EXPRESSED IN BRAIN, SIGNAL = 0.61; EXPRESSED IN BONE MARROW, SIGNAL = 0.65; EXPRESSED IN LUNG, SIGNAL = 0.62; EXPRESSED IN ADULT LIVER, SIGNAL = 0.58
ttatttccatgcttggcagggagcagggtgggtgtgtctgcaggcatccaagagggacccctgcttcatctcaacaggtatcagtggccttatatgcctttagcatggagatgtaaccacagaagcatcccaaactggccctactctgttgataacagaacattcactgtcaggttaccttttatgtctaagagaaccaaaattcaagtcatgtagcccaggcatgcaatagaaaatgtattgacctctaacaatacccaaaaccaatgtttcctccctgcagaaccaagaagatagacatgtccagagcccaggagaagaacctgaatgctggaaccctttcagaagaaaaggttcctctgagcccttctcagaaggggtctgttggccaggaaaatccagtgctgaaatttgcttgaacataccttactgtaaatggtcaaatttgaagacctccaatcagactctgccaagccaacatt

SEQ ID NO: 10791 - DNA, 480 bp, Homo sapiens
  MAP TO AC004167.1; EXPRESSED IN LUNG, SIGNAL = 0.57; EXPRESSED IN BONE MARROW, SIGNAL = 0.58; EXPRESSED IN ADULT LIVER, SIGNAL = 0.56; EXPRESSED IN BRAIN, SIGNAL = 0.62
atcctgctctattctctacagtgacttaaaaacacaatatagaaactttaaaaatagaatttgttattcccagtggcccaaaagggatatttaaaagagcctaaaagcaaaatataatgtaattcattgtagtgctgcttttagtgtaacttggggcttttaaaaaaaagatgcatactggttttttttctgattataaaatatgtctattgtgaaaaattgtttaaactcatgaaataaaaatcatcagtaatccccaaaccaaagataatccctactgacattttgggatatttcctttcatctttttttctagggacagggccagttacaagagcgtacaacctgtgcggtcacgcagggcccctattcagaagggtcccacacttgatttgaggttctgttgttgctttcttaaaattcttaataattttgaactgcattttcatttgcactgggccctgcaaattacacagccag

SEQ ID NO: 10792 - DNA, 468 bp, Homo sapiens
  MAP TO AC006324.2; EXPRESSED IN ADULT LIVER, SIGNAL = 0.42; EXPRESSED IN LUNG, SIGNAL = 0.45; EXPRESSED IN BRAIN, SIGNAL = 0.59; EXPRESSED IN BONE MARROW, SIGNAL = 0.52
tgcacaggcttcaccataacaagtataagcaacatgtgctagagggtccaataatgtgatggaccttggatattctgctaaggggatgagatgttatgggagccttagccacttttaactaagggaatcttgtaagaaagaaaagagaagctgaatatctatttccaaatagttgaggagaatcaaatgattactaaaacactgacggaaaagatgagtgtcccttcaatctttagctcacctagtctgttctcttcctctaccttgtctgcagcagctggtttttgtcttggattcttttagcctcaacctcttgtctgcctcgctgctgagtggttctgtagaaaatgtcccttgctgatgggatgcagaataatttgggataggagagtctgaaagacaatctggaaaatggtgttttatgttaagacctgcaagtagatccttcttcattttccagtaatgttg

SEQ ID NO: 10793 - DNA, 451 bp, Homo sapiens
  MAP TO AC004231.1; EXPRESSED IN BONE MARROW, SIGNAL = 0.96; EXPRESSED IN PLACENTA, SIGNAL = 0.96; EXPRESSED IN LUNG, SIGNAL = 0.97; EXPRESSED IN FETAL LIVER, SIGNAL = 0.94; EXPRESSED IN ADULT LIVER, SIGNAL = 0.86; EXPRESSED IN BRAIN, SIGNAL = 0.84
caaaaagagaaagagagaaagagggaagagataaaggaaagcagattttagcatagttgatcatttgggttttggatttatttgattaggaaacaataaataaagtgcttggagatctatcagtagtgtcacaaagaaaccattttttttaaatgatacaggtcacaggtgacctgggcttaaaggagtcattataaatcctactatccttctccatggtagagagattcccaagagtgcatcctaacggagacagaggctcgctacacggccttgctgacccagatccagagtctgattgataacctggaagctcagctggcagagatccggtgtgccctggaaagacagaaccaagaatacgagatcctgctggacgtcaagtcccggctggaatgtgagattaccacataccgcagccttctggagagctcggatggcaagtatgtaa

SEQ ID NO: 10794 - DNA, 464 bp, Homo sapiens
  MAP TO AC005873.2; EXPRESSED IN LUNG, SIGNAL = 2.8; EXPRESSED IN BRAIN, SIGNAL = 1.2; EXPRESSED IN ADULT LIVER, SIGNAL = 1.5; EXPRESSED IN PLACENTA, SIGNAL = 1.6; EXPRESSED IN FETAL LIVER, SIGNAL = 1.4; EXPRESSED IN BONE MARROW, SIGNAL = 1.7
ttctgtactctttctcagcctgtcatttgaatctttgtttctttgtagcaattttcctagattctaccttcaattctcttttctcactcccatgagttcaagtacatatgaagaagacccaaccttctgacccctccctctttttgacccagactatccctatattcagttacttactttctatatattctacattgtcaaagttatcagtaatatttgcaccttaacattttgacaatcactagttcagcgcctgcccttccaaattgtttctctacctcaattattcttcaatccagttgatgctacaaaatgctgccagtgtaatctttctaaaattaatcataaaactcttctcaaaaaccttctgtgtgatcctcggcatcttgtttaaattgtcttccatgatatgctcctatatttgctaccttaactctcacagctgcttcctcattgggtgaatg

SEQ ID NO: 10795 - DNA, 471 bp, Homo sapiens
  MAP TO AC004057.1; EXPRESSED IN PLACENTA, SIGNAL = 0.75; EXPRESSED IN BRAIN, SIGNAL = 0.69; EXPRESSED IN ADULT LIVER, SIGNAL = 0.64; EXPRESSED IN LUNG, SIGNAL = 0.53; EXPRESSED IN BONE MARROW, SIGNAL = 0.61
aaaggaaagggcacagaagccagaaaataagaagccagtcacagaaaaaggaattaaatattataaaactatattcacacatttttatagggatagatgctgagtaaaggaagccgaagccctgtattccttgtgtgaatccatttacttctgcatacgcctatgtatgtgctacaatactttcaacaaaaagaagttcaaaactaaaagctccaaacatcttgtgagtgaaaaagtactgtacatgtatttagtttgaaaacgaagaataacagggctgaagctagtcagtcactcatactcactgtggtggtggtggtgacctcctcagtcacaaccttcagggtgtcgaccacggagatgtagcccagacgcttagcaatcgccaaggcagtgttgccattctgaagagagagtgaaagagagagagtgagaaataagagagaggactgcgatgtgagccaatgagct

SEQ ID NO: 10796 - DNA, 420 bp, Homo sapiens
  MAP TO AC006464.3; EXPRESSED IN LUNG, SIGNAL = 0.61; EXPRESSED IN BRAIN, SIGNAL = 0.55; EXPRESSED IN BONE MARROW, SIGNAL = 0.69; EXPRESSED IN ADULT LIVER, SIGNAL = 0.61; EXPRESSED IN PLACENTA, SIGNAL = 0.67
caaaggtgtcattccagtttttacaagtctttagactgaatgaccttggggatagctgtttcttccatttctggtttccatactggcaaatatggtggaaacaacactgtggcatacagaagaggcttatgctggaaataattctcattaattggttgcttatgtctgatgtaatgtgagagcctattttagagtttgacttagtttgtgctgtttcattgttttccttcccattttaggcaattggcgtccgattgaatgagctgtgccacggggaaagtgagagcccagccaacctgctgggtctcatttacgatgaagagaccaagaggagacttagaaaggaggatgaggaggaagactttttagatgacagtaaggagactccctttactacaagaacccctgcttgtaagaacc

SEQ ID NO: 10797 - DNA, 471 bp, Homo sapiens
  MAP TO AC005019.1; EXPRESSED IN LUNG, SIGNAL = 0.76; EXPRESSED IN BRAIN, SIGNAL = 0.75; EXPRESSED IN BONE MARROW, SIGNAL = 0.68; EXPRESSED IN ADULT LIVER, SIGNAL = 0.88; EXPRESSED IN PLACENTA, SIGNAL = 0.6; EXPRESSED IN FETAL LIVER, SIGNAL = 0.85
cactggagaccttacgataaagctagtcagggaagtttccagaaacagaggcagcttaggcatgaggagctgtcccaagatcatgaatcaagacttctctgctatcatgaaactcttagttctcttaatttttaattttttgcttatgcctacctcttttgcttggcaggtatcttagttcatttagtgttgctatagagacatacctgatacttggtaataagtaaagaaagaagttttatttggctcatgcatggttctataggctgtacaggaagcatggcaccagcatctgctcctggtgagggcctcaggctgcttccactcatggcagaaggtgaaggggaatcatgtgcagagattgcatggtgagggagtaagcaaaagagaggaagaggggaagtgccaggctctttgtaacaaccagctctcacaggaacgaacagagtgagaagttactcaccccctccc

SEQ ID NO: 10798 - DNA, 455 bp, Homo sapiens
  MAP TO AC006475.3; EXPRESSED IN PLACENTA, SIGNAL =   1; EXPRESSED IN LUNG, SIGNAL =   1; EXPRESSED IN FETAL LIVER, SIGNAL =   1; EXPRESSED IN BONE MARROW, SIGNAL = 1.1; EXPRESSED IN ADULT LIVER, SIGNAL = 0.77; EXPRESSED IN BRAIN, SIGNAL =   1
cagttatggcaacctctcattgtataaatgtacgggttattatttaatttcagaaacaatcacaatatgttatcctattggatactagttacaagttttctttgttttatttagatttctgaaactgatgaaaaagaagacctgctgcatgaaaacctcttgatgcaagatgaaattgcctggctcaggctggaaaaagacacaataagaaaccaaaacctggaaaataaatacttaaaagactttgaaattgtgaaaagaaagcgtgaagaccttctaaaggctctaaaacggaatggggaaacattagcaaaaatgatagcctgttacagtggacagcttgctgctctgacagatgaaaacacaacgctgcattccaaactggagaagcaaagggagagcaggcaaagactggaaacagaaatgcaatcatgtggttgtagactcaatgctgc

SEQ ID NO: 10799 - DNA, 473 bp, Homo sapiens
  MAP TO AC005881.2; EXPRESSED IN BONE MARROW, SIGNAL = 0.85; EXPRESSED IN PLACENTA, SIGNAL = 0.72; EXPRESSED IN LUNG, SIGNAL = 0.77; EXPRESSED IN FETAL LIVER, SIGNAL = 0.89; EXPRESSED IN BRAIN, SIGNAL = 0.97; EXPRESSED IN ADULT LIVER, SIGNAL = 0.88
cagctgcaatataccaggaaaagaatctatctatttttcatttcttaattatttatggtttctcattatgggataattttctgcatttttaaacatggcttatgtttaaggaagaaaaaataaaccataatcacattattccaaattatgccatttatcaacattatcattgttagcactgcaaaaacactattgaaatatgaagatgcatgctctatgatttggcactgagtgcttggtatgagccaggctcaggggatcctagctcctttccttatagagttccagagtgatgaaggtgagagacctgtctgcagaagttgcactacaacgtgtccagtggcacgatggcgttacatacaagatgttcaggagaacagaggaaggataccagtgcatcctgattggatatggggccaaggaagactttacaaagcaagtgatatttaaatagggccttgaagaacaagtgg

SEQ ID NO: 10800 - DNA, 452 bp, Homo sapiens
  MAP TO AC004127.1; EXPRESSED IN BONE MARROW, SIGNAL = 0.78; EXPRESSED IN PLACENTA, SIGNAL = 0.78; EXPRESSED IN LUNG, SIGNAL = 0.8; EXPRESSED IN FETAL LIVER, SIGNAL = 0.7; EXPRESSED IN ADULT LIVER, SIGNAL = 0.72; EXPRESSED IN BRAIN, SIGNAL = 0.8
ccagaagcacacattctcaggatttcccaagagctgtatcagaggccattggtcactcatatttgcctcagtataaatctctacaaatattttagcgtttgactcttttcagcacaggtagaaaaattaaatattgtttcttttttacatacttagtttcaccccaaagctcattagattccctaacactatgtaggttctatttattctgaagaaggagcttgacctgactcacattatttactagctgaaaggcacatttacctgcgttgaactcgggatcgtcttccagggcgacgacagctccctctacggcatccacggcgctcccgccctcccggaggatgccgtagcccacggtggcggctctgaccatgccctggtgcactcgctccttccgatccttggagatgggaccggctccgccgccgtggaccactacgatgggattc

SEQ ID NO: 10801 - DNA, 458 bp, Homo sapiens
  MAP TO AC005669.1; EXPRESSED IN PLACENTA, SIGNAL = 0.9; EXPRESSED IN LUNG, SIGNAL = 0.79; EXPRESSED IN FETAL LIVER, SIGNAL = 0.9; EXPRESSED IN BRAIN, SIGNAL = 0.8; EXPRESSED IN BONE MARROW, SIGNAL = 0.88; EXPRESSED IN ADULT LIVER, SIGNAL = 0.76
ttcattatgggtagctccaaacaatagctctacacccactggttcaagtagttactattattcctagtttatggaagaaaaagaaggtgagggcagttaggctcctggcacatttgctagtgaattgcagagcccgtggccccaggagtgaggacaccggccccacatgctctctgcccacgtcacatcacctccccatcacggatgggccctgaggcccaggggcagtgctcagcaggtgctctctgctgacactcagtctctcctttcagggccagctcgtgaccaaagattacccggcctatgcactggctgtcatcgggctgcttgtggcctcctccaccatgtgcatccccctggcggccctggggacttttgttcagcgtcgcctcaagaggggagacgcagaccccgtggcctgagatgtgggcttcccagccgctcacggttttacagat

SEQ ID NO: 10802 - DNA, 464 bp, Homo sapiens
  MAP TO AC003090.1; EXPRESSED IN PLACENTA, SIGNAL = 1.1; EXPRESSED IN LUNG, SIGNAL = 1.2; EXPRESSED IN FETAL LIVER, SIGNAL = 2.1; EXPRESSED IN BRAIN, SIGNAL = 0.86; EXPRESSED IN BONE MARROW, SIGNAL = 1.1; EXPRESSED IN ADULT LIVER, SIGNAL = 2.4
aatgaaaggtttttattaatccaggttttaataggctacatttcttcatacctaaagaagtaaaatgggggaaaaattgaaaatagtaacaggaattgattatttttaatctttgtaagttcaagataactcagttgattgttttgtatctctttgacagaaaaacgaaatcaggcacacacaaaaccggattctctgtgtcctcatgaaacctgcctctaaggatgcatttctatttattttttagtagaaaaattatcttccttatggtttgcctgtgcttccttttcattgctgcagggtttcagagcctggggaactgggcttctggggtccaggagagtcagtgatgccggcagatgctgtgtcagtgccttgcacgtgccatcctggatcttacggaggtcaagatttttcctccttcttttgttcatcttgttctaggggtatgagagtgcttctcc

SEQ ID NO: 10803 - DNA, 367 bp, Homo sapiens
  MAP TO AC005703.1; EXPRESSED IN PLACENTA, SIGNAL = 0.71; EXPRESSED IN LUNG, SIGNAL = 0.81; EXPRESSED IN FETAL LIVER, SIGNAL = 0.94; EXPRESSED IN BONE MARROW, SIGNAL = 0.82; EXPRESSED IN BRAIN, SIGNAL = 0.83; EXPRESSED IN ADULT LIVER, SIGNAL = 1.1
ggcgagaagcaataaacagctcagcccctcctttggagcatcgtgttctaggttttctggggcataccacagtggtagcagtggagagacctgggcctaggctgatggcttctcgttccatggtttaaactggggcaatgaattcagctgcacattcagggcagtgaatggagcaggggatgggggtgtggcctctcatgtccaacagcatccccagccagtcctcccacttcacatcccatgtcctggatagtgaccaccaggctcatgccatccgtccccacactgctagccaaatctcagccaatgccatcagaattgcaccccaaaatgaaatgcttccactagaacagtgcggtctgatgag

SEQ ID NO: 10804 - DNA, 451 bp, Homo sapiens
  MAP TO AC005840.1; EXPRESSED IN ADULT LIVER, SIGNAL = 1.2; EXPRESSED IN PLACENTA, SIGNAL =   1; EXPRESSED IN LUNG, SIGNAL = 1.1; EXPRESSED IN FETAL LIVER, SIGNAL = 1.2; EXPRESSED IN BONE MARROW, SIGNAL = 1.1; EXPRESSED IN BRAIN, SIGNAL =   1
ttctgggatattcagggtggtaaacttgccacaggattgttgctagttgaaattctgttggggaggagagaagccggagaactcctactttgacattgtgttgatgccactctcaaaaagggaaattctgaattaccccatcctcccccatctccctgtgctactgctctgtccccagttccatccacctttcttctggactacagccttggccccctaacgggtgtcccacccccgtgttgatgtgggttggacttggtgttagctttctcctccctgtggtagaggattagggttctcacaaccaacagttaccccattgtcaactgccattgcatcctgttgcatcttttgaagaccaccatcaagaggctgtctttgttggttttctgccagcttttccttgtagacaggagctcccctctacgtggcctgtgctctgtggatgtgt

SEQ ID NO: 10805 - DNA, 491 bp, Homo sapiens
  MAP TO AC005731.2; EXPRESSED IN ADULT LIVER, SIGNAL = 0.85; EXPRESSED IN PLACENTA, SIGNAL = 0.9; EXPRESSED IN LUNG, SIGNAL = 0.81; EXPRESSED IN FETAL LIVER, SIGNAL = 0.86; EXPRESSED IN BONE MARROW, SIGNAL = 0.78; EXPRESSED IN BRAIN, SIGNAL = 0.77
cagtgactgggtttgtctccaaagagaatgctgagtactagagacactcttctgcctgatagagaaagtcctcacttggcatctgagccttatcaaaatgaagagacatttgatagacaggcagcctagtgtgagggaaggctttgatgtctggtggaattcctgatttaaattcagtgttcttagacaaccttgaatgttaggatcatcagtgtccaaattcagttgactccaattctgaaatgtctctagaatctggtctccactatttttactgtctgtgccctgacccaggccaccaacctgtgttacctggagtactacgatggcagtctaactggtttccttgctgcctccttctttcagtcaatctatattctttacttcctgaaatctcaccggcaaataccaagcctcgtatatggtcttgaatgaattcctattcctccacttgaatgactttccatatcacccagtatgactcaaaggaa

SEQ ID NO: 10806 - DNA, 482 bp, Homo sapiens
  MAP TO AC004816.1; EXPRESSED IN PLACENTA, SIGNAL = 0.92; EXPRESSED IN BRAIN, SIGNAL = 1.1; EXPRESSED IN BONE MARROW, SIGNAL =   1; EXPRESSED IN ADULT LIVER, SIGNAL =   1; EXPRESSED IN LUNG, SIGNAL = 0.88; EXPRESSED IN FETAL LIVER, SIGNAL = 1.1
acaacttgccgtgtttacccactcaggtaaatgaaaggttaaatacgatgttttcaagatgtttttgacttgcttctttttttcttccctttctcagtgttagaaattgattttgcggagctcaccttggaagagattattggcatcgggggctttgggaaggtctatcgtgctttctggataggggatgaggttgctgtgaaagcagctcgccacgaccctgatgaggacatcagccagaccatagagaatgttcgccaagaggccaagctcttcgccatgctgaagcaccccaacatcattgccctaagaggggtatgtctgaaggagcccaacctctgcttggtcatggagtttgctcgtggaggacctttgaatagagtgttatctgggaaaaggattcccccagacatcctggtgaattgggctgtgcagattgccagagggatgaactacttacatgatgaggcaattgttcccat

SEQ ID NO: 10807 - DNA, 470 bp, Homo sapiens
  MAP TO AC004843.1; EXPRESSED IN LUNG, SIGNAL = 1.6; EXPRESSED IN FETAL LIVER, SIGNAL = 1.4; EXPRESSED IN PLACENTA, SIGNAL = 1.6; EXPRESSED IN BRAIN, SIGNAL = 1.6; EXPRESSED IN BONE MARROW, SIGNAL = 1.4; EXPRESSED IN ADULT LIVER, SIGNAL = 1.5
cctaccttggcttctttagtgttgaaactacaaacagaaaactttttttctctttgacctgctatcaataggttatgtgtttattgtaggaaagtttattgcatcgtgctcattgtttatgcaaatgaagcagtgacattgtgtgcatttaaagtttcatatgtggctctcatgtgtggcttgaatacaaatgctcacagtgtttcccttggtctcctctagacacctcaaagaggagatgcaggaggatgagcagtctgcagtgcaggaggttggagacaaagagaaggtgatgtcacagaaacctacgggcacatggtcccttctccaaggtactcattacaccaaagtgagcatgcatgtgaccgagggtgccctggagaggggacattcacttccgaaaagggtgattaccaaaggccacgtgacagaaggagacctttggtttgggctggaaggattgttcagga

SEQ ID NO: 10808 - DNA, 480 bp, Homo sapiens
  MAP TO AC006199.1; EXPRESSED IN BONE MARROW, SIGNAL = 0.65; EXPRESSED IN LUNG, SIGNAL = 0.45; EXPRESSED IN FETAL LIVER, SIGNAL = 0.84; EXPRESSED IN BRAIN, SIGNAL = 0.6; EXPRESSED IN ADULT LIVER, SIGNAL = 1.1
agagactccagaggtaggcagtataaaacaaaacagtattttagggacatctaagtcattgggtgcattcagttttaatctcactagaagcactacaggagtaaattcagggtgcttttgtggtacattaggaagcttgccccaatccagacttgaggattggattgggaagaggtagtcacagaaggcttcctaagacctaagagaccaggaggatttagtttgggtagtttttcaaatagaagaaagagcacatataaggattattctcctcttgccttccactgacccagggggaaaactttatctatacctatatctatatctatatctatatctatatctatatctatatctatgtacatatatatgccctacttttctatgagatagagtggtaatcctttactaaagtcacattctggctcaagagagatctgggcacgtattctctaagttcacagagtccttggaacttcc

SEQ ID NO: 10809 - DNA, 445 bp, Homo sapiens
  MAP TO AC005683.2; EXPRESSED IN LUNG, SIGNAL = 0.83; EXPRESSED IN BRAIN, SIGNAL = 2.4; EXPRESSED IN BONE MARROW, SIGNAL = 2.1; EXPRESSED IN PLACENTA, SIGNAL = 0.91; EXPRESSED IN FETAL LIVER, SIGNAL = 0.86; EXPRESSED IN ADULT LIVER, SIGNAL = 0.64
tgcactttgcattccagttcatattaacatatcatttgactgagttatgtttttgctgtaactattctcataatactaacatacagcagaaaatatactctctacccatatgttcatagtatgagagggctgacaaacaagtgcttaggataaacattctagagaaatggaatattggcaaagagcttaaaaattaaacaaaggaattcatggcgttgacaggagaaggtgcctctgagctttcgtttccttcagccggctctttctctttcttaccactgtattgtccaataaaggagccatcctcattgaactggccattaaccccttctccatagtcaactaggctgtcgtcactatcttcttttttcacagtcctgtctgaaggagttcgacttccttttttcaaaggcttgtggtcttctgcatcactggaagaaagaga

SEQ ID NO: 10810 - DNA, 468 bp, Homo sapiens
  MAP TO AC003098.1; EXPRESSED IN BONE MARROW, SIGNAL = 0.67; EXPRESSED IN LUNG, SIGNAL = 0.84; EXPRESSED IN ADULT LIVER, SIGNAL = 0.67; EXPRESSED IN PLACENTA, SIGNAL = 0.63; EXPRESSED IN BRAIN, SIGNAL = 0.7
ggtcagcttgcctgtgatactttaataaatgaaatgtgttgttttctgatatgcccctttcaaatcatgatccaaagaggtgcagtgaaaaacaacagacaaaaaccaacaacaaacaagacttcccacttatactcttctcgatgatggaatttgtggagaattctctccctctctgcgcttgagattccttgatggtaaaatgagggagtctggactagatgatcttcaaggtcccgtccagcttggatgttctgggataaagttacctgacccaactaacaggtacccagtgagtgtccttgctcagcttctctaagaccactttgagctggctgtaggcaccctggagatcctccttcaccagcacggcgtctaccaggtgcccgtaatgccggtctatgaaggcggcagaagcggccatctcttgctgctgctcatcctgcaaggaaaggggtggtaaaagga

SEQ ID NO: 10811 - DNA, 496 bp, Homo sapiens
  MAP TO AC006504.1; EXPRESSED IN PLACENTA, SIGNAL = 0.9; EXPRESSED IN LUNG, SIGNAL = 0.78; EXPRESSED IN BRAIN, SIGNAL = 0.65; EXPRESSED IN FETAL LIVER, SIGNAL = 0.75; EXPRESSED IN BONE MARROW, SIGNAL = 0.74; EXPRESSED IN ADULT LIVER, SIGNAL = 0.89
cccagtccagaatcaacaggaaataaattgagtcacattatctctgacttcccagtaaactgcagaatgtcaaaaacctagtagccttcattcaatatgtgaactaaattgaaagatataaacaggttgtttctaaaatcatttttgttccaatattttgtttaatttactgcatgaaagaccaaagactagtatactagtctgttctggcattgttataagaaaattcctgagactgggtaattcataaagaaaggcatttaaccagctcacaattctgcaggctgtgcaggaagcacagtgccaggatctgcttctggtgaaggactcaggaagcttccaatcatggcagaaggcaaaagtggagcaggcagctcacatggcaaaagtgagagcaagagagcaaggggagagatccctcatactcttaaacaatcagatcacacatgaactcagagtgagaactcatgcatcactaaggggattgtgctaagcc

SEQ ID NO: 10812 - DNA, 374 bp, Homo sapiens
  MAP TO AC005771.1; EXPRESSED IN PLACENTA, SIGNAL = 1.3; EXPRESSED IN LUNG, SIGNAL = 1.5; EXPRESSED IN FETAL LIVER, SIGNAL = 1.2; EXPRESSED IN BRAIN, SIGNAL = 1.2; EXPRESSED IN BONE MARROW, SIGNAL = 1.2; EXPRESSED IN ADULT LIVER, SIGNAL = 1.3
tcctcaaagttttcacatgccacacatcaagacacacactttttttcttgtatactttaggtattaatttcttatcaaatgaagttcagcaccaaatcaccatttccaggaaaaaaaatgagatcaaggacaggacctttcaaaactcattggattagatacttatagaaatatcaccttacattttgttattaatcaaatccatttgcatgccgctagtattctgtggattcttattataactggctttgtgtcttttggaggttgtgaattccagacaatcctggtggctgggaagaatctgaaaatgttcgtattccatgtcacttgtgatgtgaggaaacaatcttacagccttaaaatccttcatgaaa

SEQ ID NO: 10813 - DNA, 414 bp, Homo sapiens
  MAP TO AC005518.2; EXPRESSED IN BRAIN, SIGNAL = 0.68; EXPRESSED IN LUNG, SIGNAL = 0.68; EXPRESSED IN BONE MARROW, SIGNAL = 0.59; EXPRESSED IN ADULT LIVER, SIGNAL = 0.49
tgcacatacaatttaaaaatccgtaagtttaaaacaatggactattttttcctcaaaatcattctttcttagcttcattccccagaaaacaagcccaatgattttattttacttatttacagcttccttcctactgaagactagactataagataatgaaccacacctgttggattctttaggcaattctaagcaccagctgagatagtgattaaaagtaacattccattctcagcctacctggggtgttcaacaatcttgacatcttgcagaaataggagacatactgctcgcagtactcggcactgtcagtgatggcacttatctggtccatggaggcgctgtaaacgagctgtgtcactgagtatttttctgggttgtagccgaccacaggcgtctgcatctgcaagtcat

SEQ ID NO: 10814 - DNA, 459 bp, Homo sapiens
  MAP TO AC005023.1; EXPRESSED IN PLACENTA, SIGNAL = 0.66; EXPRESSED IN BRAIN, SIGNAL = 0.57; EXPRESSED IN ADULT LIVER, SIGNAL = 0.67; EXPRESSED IN LUNG, SIGNAL = 0.7; EXPRESSED IN FETAL LIVER, SIGNAL = 0.7; EXPRESSED IN BONE MARROW, SIGNAL = 0.82
cttgggacccctacatagccaggggccttgagccccctacataacttttgactttggaggagagggaaggcgactggggcagagccaaaggcggccctagaagagccctagcgtcctgggaactgggcacctccagagcaagctgcttaccaagcgaacatgtccggatattgagaaggtcagaaaatgctgtctagctccttcaggtgcaacccgccgaacgtgctggggctgaatagacgctcctgatcttggggttgcggatcctcagcggaggagtcctgggccaactcctcaggctgctgctgccagggctcctggtggccaccaccgcccttctggttctcgtggatcatggggtccgcagctcccgcgtacacgtgactttcttttcctgctcctgctccctgctcgggtttggtccgtattttcttctcatcgtctcctccagcttcagtc

SEQ ID NO: 10815 - DNA, 457 bp, Homo sapiens
  MAP TO AC006480.2; EXPRESSED IN PLACENTA, SIGNAL = 0.93; EXPRESSED IN FETAL LIVER, SIGNAL =   1; EXPRESSED IN ADULT LIVER, SIGNAL = 0.94; EXPRESSED IN LUNG, SIGNAL = 0.96; EXPRESSED IN BRAIN, SIGNAL = 0.93; EXPRESSED IN BONE MARROW, SIGNAL = 0.95
cacaatgcctattatccccttctttttgattctgtgaaatagggtagcttttagaaggtggagttcagtctcttgggggtaaaagagatctgaatatgcctctcaaactggggagacagctaggaaatgaagcataacagatatttttactagactgttgggttttgacatccaagcccctatgacttcatatacctggtcataactttcccatccttttcatacatccttttgtaggactcgggggactatcctctgacagctccaggtctatcctggaagaagttccagggcagcttctgtgagtttgtggggacattggtctgtcggtgccagtacatcctcctccatgatgacttccctatggacaacctcatctccctgctcactggcttctcagactcacaagtctgcgccttctgtcacactagcaccctggctggtgagcattcatttt

SEQ ID NO: 10816 - DNA, 453 bp, Homo sapiens
  MAP TO AC004074.1; EXPRESSED IN PLACENTA, SIGNAL = 0.93; EXPRESSED IN LUNG, SIGNAL = 0.81; EXPRESSED IN FETAL LIVER, SIGNAL = 0.87; EXPRESSED IN BONE MARROW, SIGNAL = 1.2; EXPRESSED IN ADULT LIVER, SIGNAL = 0.96; EXPRESSED IN BRAIN, SIGNAL = 0.96
tctaccattctggggtctggagaatggtggccctcttatcacagctccactcagcaacgccccagtggggactctgtgtgggagtgcccataccacatttcccttctggaccgtcctagcagaggtcctccatgagcactccacccctacagcaaacttctgcctggacattcatgcatttccatacatcctctgaaatctaggcagaggtttccaaacttcagttcctgacttctgtacacccacgggctcaacaccatgtgaaagctgttaaggcttgggactcacaccttctgaatccatggcctgagatgtcgcttggccccctttagtcatgactggagaagctggagtgcagggcaccaaggccctagagttcaaacagcagagcaacactgggtctggcccacaaaaccatttttttttcttgtaggcctccatgtctgtaatggg

SEQ ID NO: 10817 - DNA, 476 bp, Homo sapiens
  MAP TO AC004220.1; EXPRESSED IN BRAIN, SIGNAL = 0.76; EXPRESSED IN ADULT LIVER, SIGNAL = 3.2; EXPRESSED IN PLACENTA, SIGNAL = 1.3; EXPRESSED IN LUNG, SIGNAL = 0.61; EXPRESSED IN BONE MARROW, SIGNAL = 0.81; EXPRESSED IN FETAL LIVER, SIGNAL = 0.78
aatcttaaaggcagaaaccactctagacacttcaagtagagagagatttagtacacagaattaagttacaaaattgtcaagagggctggagaagcaaaagagagtcatggtatgatccacagatgagaactataggaaatcactgcccaccccagagcctgcacttttctgttccatgcccctcagcccctgtgctgcccaggtggctgctgcaggaggccataagcctccactgctgccttcatgggtgtgcagccatctgctggtgccactgctgccaggactgaatgaagaagttcattcctccctgtctgcccctaagtgcccaagcattgtcccatgggaagagcccaaaccagatctctgctaacaagaaggtctggaaaatgtagtttatacactttcaacccttgtggtacagagggctatggggatgatggatagaattcagggtatgcatgatctgagatggggaa

SEQ ID NO: 10818 - DNA, 422 bp, Homo sapiens
  MAP TO AC003684.1; EXPRESSED IN LUNG, SIGNAL = 1.1; EXPRESSED IN BRAIN, SIGNAL = 0.79; EXPRESSED IN BONE MARROW, SIGNAL = 1.1; EXPRESSED IN ADULT LIVER, SIGNAL =   1; EXPRESSED IN PLACENTA, SIGNAL =   1; EXPRESSED IN FETAL LIVER, SIGNAL = 1.1
tttgagttcttcattccccggggccctctctctccaccaaaacctcacagctttacatcccgtcccataaggaccaaatcccagctccgatataattagctccagccacagaatagtatgccgtaagttacacaaagatcatagctgtatacaaaccacatggaaatgtcttccgtacattttaaagatcttttccacatagcacagccttcttgcagatagtataatttacttatttgttattatcacatattgtctctccctctgctagcatgcagatccatggtcctgggggagctctgtatgctttatttgatgatctacctatcccacgccttcaagcagtgcctgggaatccctggcaacaggtgctccatgaatacgtgttcgatcaacatgctgagtgtgcttaaggctttcca

SEQ ID NO: 10819 - DNA, 471 bp, Homo sapiens
  MAP TO AC005846.1; EXPRESSED IN PLACENTA, SIGNAL = 1.1; EXPRESSED IN LUNG, SIGNAL = 0.68; EXPRESSED IN BRAIN, SIGNAL = 0.65; EXPRESSED IN BONE MARROW, SIGNAL = 0.59; EXPRESSED IN ADULT LIVER, SIGNAL = 0.63
ctcccttcatctgtggaatggtaatgagtagtcttctccctctcacgttgcattaatgtgtaagggaagcagcacacacattcttgagcttcctggaagaagccctaagcccagacttgtgcctcccctactggatgacctggaacaaaattcttttgctcatgtcttcatctgtagtaatggagatgaggaatttcccttccttatattgcattatgtgaaagataaacaccacagaacaagttctttgagcttcctggaagaaacccaaccattgtccctggggattctatagttgtgggatgagtgacgcaatgacaatgttgaggcctttgtcttgatgcccttgaccccagagggacagctcctggatgaaggcctctgcgtggagagcaccgagtgtccctgcgtgcattccggaaagcgctaccctcccggcacctccctctctcgagactgcaacacctggta

SEQ ID NO: 10820 - DNA, 463 bp, Homo sapiens
  MAP TO AC005068.1; EXPRESSED IN BRAIN, SIGNAL = 0.64; EXPRESSED IN LUNG, SIGNAL = 0.65; EXPRESSED IN BONE MARROW, SIGNAL = 0.53; EXPRESSED IN ADULT LIVER, SIGNAL = 0.73; EXPRESSED IN PLACENTA, SIGNAL = 0.64
tgctcgttttcttacaaaggcagaaggtagatatgagagctacattcttctttctcatcccttccccaaataatcacatggccaagaacagcatggagtcttggcaggggtagtactcagtgaggctggatatgcttatccagctgattttgaacagaaaacgtaaaagtaacaagtacagaatcagagtcatcatgtagtaaaaagacctttccgtagggtgagagcaggaagggagaaggtgcagttcaaaatctggattcacaggcttcacctacctttgcccagacagcagctgacagtccaagaacaggactgatggccaaaatcacaagggttagcttccaaccacgtgtaaatcctactataaacccagtgaaaaatgttgccattgactgaaagaacattccaattttgtcaccaattccttcattaatcttggagacatcactgaaagaacaga

SEQ ID NO: 10821 - DNA, 493 bp, Homo sapiens
  MAP TO AC003103.1; EXPRESSED IN BONE MARROW, SIGNAL = 1.4; EXPRESSED IN ADULT LIVER, SIGNAL = 1.6; EXPRESSED IN PLACENTA, SIGNAL = 1.5; EXPRESSED IN LUNG, SIGNAL = 1.7; EXPRESSED IN FETAL LIVER, SIGNAL = 1.6; EXPRESSED IN BRAIN, SIGNAL = 1.4
ccagaagcaaatgcagtgtctagtacccagtaagtgttcaaaaaggtctgctgaatgattgcataagctgcaacatatgccctaccacctcttctaacaagatgtcgtgacatgacatgttagggggagtagctgggggaggaaacagcttggatctctatgtttcccttctactcctgcccttagaggcctgtggactctttgctggcgagacttgcagccctcaggtggtgtgaggaactcagcaaaaaggcttctctttgagtgtcccacctaccttcactgttccttccacttccacaaaccagcgccttaacatggcttgaatctggccatcagtcagctcagggttggcattgtggattttcttcttgaccaggtcctccagcagaagacgcctcagccgccagtagaagaaggtacgggatgttttccaatccaggatatcctacatgcagagaagaataaacttagcccagtcctaattcctgct

SEQ ID NO: 10822 - DNA, 457 bp, Homo sapiens
  MAP TO AC005863.1; EXPRESSED IN BONE MARROW, SIGNAL = 1.2; EXPRESSED IN ADULT LIVER, SIGNAL = 1.2; EXPRESSED IN PLACENTA, SIGNAL = 1.3; EXPRESSED IN LUNG, SIGNAL = 1.3; EXPRESSED IN FETAL LIVER, SIGNAL = 1.3; EXPRESSED IN BRAIN, SIGNAL = 1.2
actatgacgcggagttggaggaatgagggattgtctggaaggaggtgatgagaactctaaataggaatagaacatataaggaatatcctctacccctagggatgagatagagcaaccaaggacaagacccgcatctaccctagagcttagcctcagatcacattggggaaggaaagaccgtggctccctgaatggcagagaagagtttgtagtgctgcgccggcagaacttgctggaaacctcctctccagaatttgccagatatcctctttctaagacagcagggggcgcttttcaaggggcaggtcgagggaagttgctggccccgcggctgctgctgtgcatggcagggaacctggttcccgggctgccgctcacactgttcaagtcgagcactgggagctgcatgcactgctaagagaagacgctagaaccgacaaagacccttcttcctgca

SEQ ID NO: 10823 - DNA, 479 bp, Homo sapiens
  MAP TO AC006518.17; EXPRESSED IN ADULT LIVER, SIGNAL = 0.94; EXPRESSED IN LUNG, SIGNAL = 1.1; EXPRESSED IN FETAL LIVER, SIGNAL = 0.99; EXPRESSED IN BRAIN, SIGNAL = 0.96; EXPRESSED IN BONE MARROW, SIGNAL =   1; EXPRESSED IN PLACENTA, SIGNAL = 1.2
caacctttcagaggtccaaactgatatgaaaaaagacagagagaaaatggcatagagtaggaagaaagtgatcacacttttaactcctctgtgggctttggtgctggcgtctccggatattttgacagtgtgctgcatcttcttgcgatgtttccacatggagaagatgaggagaagaaacattgccagggacaaagtaaagggtatgaaaatgaacacagtgctggttaatacaataagactggaaaatcgtgtaaagttacttgaatcagaactgcaagtcttgtttcttctgtatccattgatactggcatttatatggatgtttatcagtgcaatatttaaaaacaagaagaccgaagtcacaagaagcagcaccaaaaccacctttttaaccctccactttaggtagagaaaaatagagttagaaaaattggctatcttgagaaaataaaaagtaccgaggcctgtagctaacc

SEQ ID NO: 10824 - DNA, 449 bp, Homo sapiens
  MAP TO AC005070.1; EXPRESSED IN LUNG, SIGNAL = 1.2; EXPRESSED IN PLACENTA, SIGNAL = 1.2; EXPRESSED IN FETAL LIVER, SIGNAL = 0.97; EXPRESSED IN BRAIN, SIGNAL = 1.4; EXPRESSED IN BONE MARROW, SIGNAL = 1.1; EXPRESSED IN ADULT LIVER, SIGNAL =   1
gcagagaagctggcaacagaaaaaactgttcaaatatagatgaagcagcaactacaaatttaaatggccttttaaagggggacaaaagtaaatacttccaatattaaaatataatgtagctggggcattttccatttcaagggtgcagttatttccagcaattaaacttttccaaaatcttccttatgtgtaacgtttgattcagataccttcaacaactgcaactttgcaagctcccaatgcccccacactgaaatgaagctggctcagctccctcacctgcagaccctgaaggaggaggagcacctgctttctgccactcagtggcctcagctgccattcttctcacatatgcatcatccacacacatcaagatattttccggctttatgtcagtatgaatgatcttgcacttactgtgtaagtaatctaacccttgaaggacctgg

SEQ ID NO: 10825 - DNA, 384 bp, Homo sapiens
  MAP TO AC000111.1; EXPRESSED IN PLACENTA, SIGNAL = 0.86; EXPRESSED IN LUNG, SIGNAL =   1; EXPRESSED IN BONE MARROW, SIGNAL = 1.4; EXPRESSED IN FETAL LIVER, SIGNAL = 0.92; EXPRESSED IN BRAIN, SIGNAL = 1.2; EXPRESSED IN ADULT LIVER, SIGNAL = 1.1
aaacttgtctcccactgttgctataacaaatcccaagtcttatttcaaagtaccaagatattgaaaatagtgctaagagtttcacatatggtatgaccctctatataaactcattttaagtctcctctaaagatgaaaagtcttgtgttgaaattctcagggtattttatgagaaataaatgaaatttaatttctctgtttttccccttttgtaggaagtcaccaaagcagtacagcctctcttactgggaagaatcatagcttcctatgacccggataacaaggaggaacgctctatcgcgatttatctaggcataggcttatgccttctctttattgtgaggacactgctcctacacccagccatttttggccttcatcaca

SEQ ID NO: 10826 - DNA, 472 bp, Homo sapiens
  MAP TO AC004460.1; EXPRESSED IN PLACENTA, SIGNAL = 0.87; EXPRESSED IN LUNG, SIGNAL = 0.97; EXPRESSED IN BRAIN, SIGNAL = 0.58; EXPRESSED IN BONE MARROW, SIGNAL = 0.95; EXPRESSED IN ADULT LIVER, SIGNAL = 0.81
tctctgggcatgacttcctccaggcccctcagtaggaaatttagaacaaagagtggtggtccaaactcagtcctcagtttcccctgtctgaggtctgcatgccagcagatagcacttttcatttgttggtgtcttggtttctggaaatcaacttaaggacttctgttaaaatgttatctttagtctctatgggaactttggtctattctgtgacttaaacttccctggctattgttttaagttattcttcccttcttgcttcagttgctcatttacttccctgtgctggctaggtacctggaaatgcctttgaaggaacttaagatttccttttatttccatgcttgggggcaggtgcccggcaagcccctaagaggggtctctgctccatctcatcttcatatcagccccttgcatgtccctgaagtggttctccaaaacaaattctagtcaggtaactccatttcctcca

SEQ ID NO: 10827 - DNA, 466 bp, Homo sapiens
  MAP TO AC005833.1; EXPRESSED IN PLACENTA, SIGNAL = 0.64; EXPRESSED IN BONE MARROW, SIGNAL = 0.68; EXPRESSED IN ADULT LIVER, SIGNAL = 0.67; EXPRESSED IN LUNG, SIGNAL = 0.71; EXPRESSED IN FETAL LIVER, SIGNAL = 0.69; EXPRESSED IN BRAIN, SIGNAL = 0.73
tccagggagaaatatgtggacgtttttgggagagcccattacctatcacagtgccaagtaatttttcttcaggattctgtttattcaaccatctagccacacacccatatagcatttattgagctcccactgtgttccatgtgcttgtgaagtgctgggatatgaaggatgcacagtacatagtctggtaggagatgagaatgaacaattgcaatgcgtttgaccagcaatataatgtagatgtgcagaggagaccatgggggtactgaggagaggcatcaaacccagaccagagaatgggatggcacctgacctcatctttatggaggctgggactggggatggagggctatgcagagggaacagtatttgcaaagacctggacagcatggtgtgctctgggacttaagatagttcaaattgctggagcataacgtactcttttcctactctacctctgccctcc

SEQ ID NO: 10828 - DNA, 407 bp, Homo sapiens
  MAP TO AC005702.1; EXPRESSED IN PLACENTA, SIGNAL = 0.67; EXPRESSED IN LUNG, SIGNAL = 0.89; EXPRESSED IN BONE MARROW, SIGNAL = 0.64; EXPRESSED IN ADULT LIVER, SIGNAL = 0.6; EXPRESSED IN FETAL LIVER, SIGNAL = 0.68; EXPRESSED IN BRAIN, SIGNAL = 0.77
catgacccagatgaaagtcgagagtgtggtgagcacttccctgtccagatcaccccccagccacagtctcctgtgtatatctggacgcctggggtggccacaaaaggatccggcaccgcccagtgggagactgaagtggccacggggtatgagctgtgaccattcccaggtaactcccctggcctgatatccaccctgtccctagagcgcctcacgaagacgtccaggtgtggcccgtgggcacgtttttggaaccggttcgttgatgcctgggccagggatgatgacactgtgctcaagcatcttagggcctctatgaagaaactaacaagaaagcagggggacctgccacccccaggtgggctccagtgccatgtcccctcccatgtcaccctctggggtagtca

SEQ ID NO: 10829 - DNA, 467 bp, Homo sapiens
  MAP TO AC004875.1; EXPRESSED IN PLACENTA, SIGNAL = 0.82; EXPRESSED IN FETAL LIVER, SIGNAL = 0.8; EXPRESSED IN BRAIN, SIGNAL = 0.91; EXPRESSED IN ADULT LIVER, SIGNAL = 0.79; EXPRESSED IN LUNG, SIGNAL = 0.71; EXPRESSED IN BONE MARROW, SIGNAL = 0.8
gaatagcaacaaaagtttggaccaaaagaaaataaataagtgaatttaaaagaccccccccacccacctaccccaaataaattctatattcatatcttccaaactttcagaaattgatggtaccatcctctgaaagtggagaacggttgaaactctatttgataataagtaagtctatacatccatcacctccagcaaaataaataagcaaataaaataactgacttttattctcaaatacaggatttttggacttccaatatgagaaaagatatctttggaaagataaaactgacagcatacctgatacattcgaatgtatggagatgagcaagacatatgccaatgagattgagattgaattattgagaagtacatagaaagtacatagtacaccaaataattggcagcagcaacgaggccaacaacaaaacaataaataccaagaaataaaagctgtgtgtagg

SEQ ID NO: 10830 - DNA, 455 bp, Homo sapiens
  MAP TO AC005533.2; EXPRESSED IN BONE MARROW, SIGNAL = 1.2; EXPRESSED IN PLACENTA, SIGNAL = 0.8; EXPRESSED IN LUNG, SIGNAL = 0.98; EXPRESSED IN FETAL LIVER, SIGNAL = 0.93; EXPRESSED IN ADULT LIVER, SIGNAL = 0.84; EXPRESSED IN BRAIN, SIGNAL = 1.1
actgtgggaaaccccattacagcagttaccccaaggcatgggatgactcatttacgcccttttctagtaactgctggaggaactgggtagagaattctttctctcaagcttccgtggcttgttcacacacagcacttaaaaggttcaatcacccacagctgggttccactgtggtttccaggaactcaaagcttgctcaatcttcagagttgaacatttgaaagggtttttaaactggccacgtctcctcctgagagtgcaagctgtcaattcattcacctgtttccggatgtcctcttttgttgttttcctgattggttggctgagtacatgcaccgggctctgtgcctgggactcttcagtcacgccatacacggactaggagaagaagcaagcacagaggatcatccacccacagaattggagggtggcttaggggtcagctagtccaatga

SEQ ID NO: 10831 - DNA, 455 bp, Homo sapiens
  MAP TO AC006501.5; EXPRESSED IN LUNG, SIGNAL = 0.71; EXPRESSED IN BRAIN, SIGNAL = 0.74; EXPRESSED IN BONE MARROW, SIGNAL = 0.61; EXPRESSED IN ADULT LIVER, SIGNAL = 0.64; EXPRESSED IN PLACENTA, SIGNAL = 0.68
ccctagtggtggtgatcctgaggggacctgaaggctaggcccagggatggttctgtgctctgtgtctattcatgcatgcattccagaaacacatttgagtgttcaccaagtgctcagcactttgctaggcattatgactcagatgagacccttagcctcccggagtttacatctttgtcacgggcataaatcagtgactaaggcaatgggtggtgaattgagggtgggtctgcggtgtggtggaatgggctcttctgctgtgagcctttgtattccttcccctaggaacgggcacgcgctcttggcattcatgttctcgcgtcaggagggcaagttgaaccgccagcagaccatggagcttggccaccacatcctgaaggcgcacattttcaaggtgagatgcacaccaacttggggaagggtttctttgttgtcattttgaggttttgctttgg

SEQ ID NO: 10832 - DNA, 389 bp, Homo sapiens
  MAP TO AC004973.1; EXPRESSED IN LUNG, SIGNAL = 0.72; EXPRESSED IN BONE MARROW, SIGNAL = 1.2; EXPRESSED IN ADULT LIVER, SIGNAL = 0.69; EXPRESSED IN PLACENTA, SIGNAL = 0.93; EXPRESSED IN FETAL LIVER, SIGNAL = 0.81; EXPRESSED IN BRAIN, SIGNAL = 0.86
taggcggaactgacttctccatatatagttttacatgtccagtgaataattttccacagactagtttctggctctgtacattccaaatctatttctcctcagctacacatattcccaatgctgggtgctataggaggcggtagtatttgagatatgatctttggccctgcaccactagccagcatagtaaggtaattgaggtgagagtatttctggaagccactcctatgctgagatggttaacagtggtatagaggtgactgccagccatggaaatatatctgatcaaatcaaaaataaatgtaaacccaattcaatttcccctctgcatgatcccaacaatgttcacagccaccccaatgccaatcccgccatgaaggaagagtgat

SEQ ID NO: 10833 - DNA, 469 bp, Homo sapiens
  MAP TO AC004583.1; EXPRESSED IN PLACENTA, SIGNAL = 0.81; EXPRESSED IN LUNG, SIGNAL = 0.83; EXPRESSED IN FETAL LIVER, SIGNAL = 0.75; EXPRESSED IN BRAIN, SIGNAL = 0.81; EXPRESSED IN ADULT LIVER, SIGNAL = 0.66; EXPRESSED IN BONE MARROW, SIGNAL = 0.98
gggggagtaattcctagaagtagagagagtagctttactgagcattttaatatcttttatatcttcctaggatatttatgtatttcatccttccgtttatcttctttttatcctatatcagtaaaatattcataatattatattgataaaacatatagtatggattgttcaaaattacgatcttcattagtactttgtgaatgttttgtgtgtattaaggggacactgtagctacttgttggctcagctattgtttttgacgctccatcaggccccagttgtgacaacgttgaggaagatatgaatgcttctgctcaaggtgcttctgccacagttttggaagaaacaaggaaggaaacggctcctgtgcagctccctgtttcagggccagaactggctgccatgatgaagattggaacaagggtcatgagaggtgtggactggaaatggggcgatcaggtactcagag

SEQ ID NO: 10834 - DNA, 498 bp, Homo sapiens
  MAP TO AC005729.1; EXPRESSED IN PLACENTA, SIGNAL = 0.72; EXPRESSED IN LUNG, SIGNAL =   1; EXPRESSED IN BRAIN, SIGNAL = 0.78; EXPRESSED IN ADULT LIVER, SIGNAL = 0.59; EXPRESSED IN BONE MARROW, SIGNAL = 0.64
cctctgcaatactgggagtaatatcatcctctatttccatggatattagacacaataccacaaaaaggtgtacagcccctgcgatattgggagtaatattatactctccttccctggatattagaaacaatatcatagggagtgaacaccccctgtgataatgggagtaatattttctctttcacaggacattaggaacaatatcacagggggtgtttatgcaccctgcgatattggaggtaatatcctctaccccccggaataataccagcaatatcacaggggtggtgtacaccccctgtgatattgagagtaatatcattctctccacccccagatattaagaacaatatcatggcggggggttgtatatccccagtgatattgggaataatgtcatcctctccttccctggaaattaggaacaatatcacaggggggtgtacaccttctttgatattggaagcaatatcatcctcttccccgctggatattaga

SEQ ID NO: 10835 - DNA, 483 bp, Homo sapiens
  MAP TO AC002288.1; EXPRESSED IN ADULT LIVER, SIGNAL =   1; EXPRESSED IN PLACENTA, SIGNAL = 1.1; EXPRESSED IN LUNG, SIGNAL = 1.2; EXPRESSED IN FETAL LIVER, SIGNAL = 0.93; EXPRESSED IN BRAIN, SIGNAL =   1; EXPRESSED IN BONE MARROW, SIGNAL = 0.9
gccttgcatatctggaaattgtctttctattgctttcaaatttaaatagcaaatttacttttgagttacaatcttttctcctcaaaattgtatatgggcagtttcctccaggatatactgtgaaatgaaaaagccaggtagagaaatgtgtctatatcataccaccatttctctaaaaaaaaggggagatacgagagactggagacgtccagcttcagagcaggaaccttagttgcgccagcaacgaaaaacagaactaaatatgggtgatgttgagaaaagcaagaagatttttgttcagaagtgtgcccagtgccacaccgtggaaaagggaggcaagcataagacagggcctaatctcttcgggtggaagacaggtcaggccattggattctcttacacagacaccagtaagaacaaaggcatcacctggggagaggatacactgatggagtatttggagaatcccaagaagtacatccc

SEQ ID NO: 10836 - DNA, 356 bp, Homo sapiens
  MAP TO AC005872.2; EXPRESSED IN BONE MARROW, SIGNAL = 0.81; EXPRESSED IN ADULT LIVER, SIGNAL = 0.94; EXPRESSED IN PLACENTA, SIGNAL = 0.93; EXPRESSED IN LUNG, SIGNAL = 0.91; EXPRESSED IN FETAL LIVER, SIGNAL = 0.94; EXPRESSED IN BRAIN, SIGNAL =   1
gcttgaccttacaaactccctgaaagtgtcttggggacccctttgaactcagagatcacactttaagaataatgctctaaggtgacaactgagcagagacttaggctaaccaaccatcaagatttgcatggggctgtcctagtgttagcactaaaagtcccacatgattctactgggagagatctaaatgaagtgagcgtgcatgacagaataacagctaatggaatcagcatttcaagcagaggaaacagcaagtgcaaaggccctggggtcaaagaatgattggcatatccaagaaaaaacagcccattacaaaggttcacacccccataaacctgactgtcctcaggaaggtg

SEQ ID NO: 10837 - DNA, 457 bp, Homo sapiens; identical to SEQ ID NO: 5351
  MAP TO AC006461.2; EXPRESSED IN PLACENTA, SIGNAL = 0.79; EXPRESSED IN BONE MARROW, SIGNAL = 0.84; EXPRESSED IN ADULT LIVER, SIGNAL = 1.1; EXPRESSED IN LUNG, SIGNAL = 0.71; EXPRESSED IN FETAL LIVER, SIGNAL = 1.1; EXPRESSED IN BRAIN, SIGNAL = 0.67

SEQ ID NO: 10838 - DNA, 397 bp, Homo sapiens
  MAP TO AC004881.1; EXPRESSED IN BONE MARROW, SIGNAL = 1.2; EXPRESSED IN PLACENTA, SIGNAL = 1.2; EXPRESSED IN LUNG, SIGNAL = 1.2; EXPRESSED IN FETAL LIVER, SIGNAL = 1.2; EXPRESSED IN ADULT LIVER, SIGNAL =   1; EXPRESSED IN BRAIN, SIGNAL = 1.2
gcagagaggaggacaaaagccacgcctctgaagctgtcaactggctctgaggctgacaaggaagcactctctgcagcaagttccaatccctgccgcaggaaggaataatttcaccactttctcactatttactgtccacagcaaaaagaaacccccacacctccacttagcaccatcgtgagcatccctagagtccaataaattacagaagagaaactaaaactttcctttgcttcatttcaagggcctgtgactgtgaagtcacatgagctgccacatccaaggcgttgtcatggagacagtggtggttgcataaatgatgttggtccccactttcataaaaaaaaaagtaatttaaatttttatgtataagaccagttcattagactgagaaatt

SEQ ID NO: 10839 - DNA, 472 bp, Homo sapiens
  MAP TO AC005538.2; EXPRESSED IN BRAIN, SIGNAL = 1.2; EXPRESSED IN PLACENTA, SIGNAL = 1.2; EXPRESSED IN LUNG, SIGNAL = 2.1; EXPRESSED IN FETAL LIVER, SIGNAL = 1.1; EXPRESSED IN BONE MARROW, SIGNAL = 1.3; EXPRESSED IN ADULT LIVER, SIGNAL = 1.2
attagaaatagcagagactcaccctatagacagacaccttatcttaaataaagggagttaaaaaaattaacattgtcagtgtgttaagtattttatggcaataagatagggagtagggaaaatggagatatcttatgagggaagcctcaaaatatccgagaactcaagcaggcaactctcccagtacctacgtggagttctatgtccatctcgtcccggccatttctgtcttccttccggaagcctcttcggaagttcgcaaccagtttccagacaaacgtgaggagggcatcattataggaattcttggcgatctgcagattccggtacacaagcgtgctgaagtggttggagaagagttcagtgaggacatcatgggtgagaaacttccgtaggttcaagccattctccagaaagaggcggacaaacttgggtctgtcctttatgagagccgtaaacatgacttcttgaa

SEQ ID NO: 10840 - DNA, 345 bp, Homo sapiens
  MAP TO AC003071.1; EXPRESSED IN PLACENTA, SIGNAL = 0.71; EXPRESSED IN BRAIN, SIGNAL = 0.87; EXPRESSED IN ADULT LIVER, SIGNAL = 0.51; EXPRESSED IN LUNG, SIGNAL = 0.58; EXPRESSED IN BONE MARROW, SIGNAL = 0.51
gatctttcatgctgcccaagacagctatgaagggtgtacaaaatggaggctctagtcctagttgaagagacaagatgtatataaatgaaatttctctttttctttttttttctgtgaagcttttattatgaacagagggcagggcaaggcagggggctcagtccttggcagcggctttcctcatggtggccaggacattgcgcagctcctcctacttcctcttggtgcggatgtgtgttcccacctttttcttgatgaacttgaaggcccttttgtccttggagaccttgagctactccatgggatgctgcccatacagggtgaagccacacacctctcagatca

SEQ ID NO: 10841 - DNA, 458 bp, Homo sapiens
  MAP TO AC004977.1; EXPRESSED IN PLACENTA, SIGNAL = 0.82; EXPRESSED IN LUNG, SIGNAL = 0.94; EXPRESSED IN FETAL LIVER, SIGNAL = 0.8; EXPRESSED IN ADULT LIVER, SIGNAL = 0.76; EXPRESSED IN BRAIN, SIGNAL = 1.3; EXPRESSED IN BONE MARROW, SIGNAL = 0.82
gactgaaatgttaggaagaatgaatgaatactataatgactagacagagctatcaagtaggtataaataaaggagtaatggaaattttagtgggggtgggcaggagcttttcaagagggtttgattaggattgactgtggattactggggaattgtgtaaggaatttagtagctggggtcaggcagaaaaaggagtgagcaaatctcatgtggccttaggataagataaagagtcagcgaatgagaatcagcacggagttttcaaagctgcacaacttcctggttgaagaagaggacctgtttcttcagagattgaacaaagaagaagaagagacgaagaagaagctgaatgagaacacgttaaaactcaatcaaactatcgcttcattgaagaagctcatcttagaggtgggggagaagagccaggctcccaccctggagctgcttcaggtgagaca

SEQ ID NO: 10842 - DNA, 471 bp, Homo sapiens
  MAP TO AC004103.1; EXPRESSED IN LUNG, SIGNAL = 0.79; EXPRESSED IN BRAIN, SIGNAL = 0.95; EXPRESSED IN BONE MARROW, SIGNAL =   1; EXPRESSED IN ADULT LIVER, SIGNAL = 0.85; EXPRESSED IN PLACENTA, SIGNAL = 0.93; EXPRESSED IN FETAL LIVER, SIGNAL = 0.97
gcataatcatgaggcaggtctagtcctgcttagtctttagtcaatgtcgggaagtccatgaccaaattgtcaagtcaaaggaacaactacctggatctggagtcatgtttcaagactggattggaaacaatgagattaagatttagtgtaaagatgaggaactgaggttataggcataaaagatacagaagtagataggaaggtatcaaggatcgtggctcatggatttatgtgaagacagttacaaggaaacccacttggtaggaggaaagtattagagtcaggcattgccatagtaatcagaactgggttgagttatgtgtcctctttggagaattgactctaataacacctctatagtaatcacgatgatgacaacgatgataccaaagtccatggcagcttcttatgcttaatgggaaaatagtaagcactccataaattgaatcagtaaaccaattaatggtatcc

SEQ ID NO: 10843 - DNA, 464 bp, Homo sapiens
  MAP TO AC003104.1; EXPRESSED IN PLACENTA, SIGNAL =   1; EXPRESSED IN LUNG, SIGNAL = 1.1; EXPRESSED IN FETAL LIVER, SIGNAL = 0.93; EXPRESSED IN BONE MARROW, SIGNAL = 0.84; EXPRESSED IN ADULT LIVER, SIGNAL = 0.99; EXPRESSED IN BRAIN, SIGNAL = 0.88
taagagcttaggccacgtcccaggccccagagtcctcagccccagtcttcagaggccctcagggagccctcactaggacacgggagacagtcccaccccatggcctccagtctgaagagggaggtccagcccctccctaagggagcccacagtctgtgacatctcaggtgggaggaaaaggccctgtattcagggaattccaacttgaggagagaagcccagtctgaggccagagacccagaccctaccctctctgtctcacctccaggtctggggtctgcagatgatctacaagtcagtgaagctgccagtgctcaaagtccgcagcatgctgctggagacccctcaggggcggatccaggccaaaaagtggtcccgcgtgcccttctccgtgcctgactttgacttcctgcagcattgtgccgagaacttgtcggacctctccctggactgaccacctcatt

SEQ ID NO: 10844 - DNA, 462 bp, Homo sapiens
  MAP TO AC002065.1; EXPRESSED IN PLACENTA, SIGNAL = 0.72; EXPRESSED IN LUNG, SIGNAL = 0.8; EXPRESSED IN FETAL LIVER, SIGNAL = 0.79; EXPRESSED IN BONE MARROW, SIGNAL = 0.83; EXPRESSED IN ADULT LIVER, SIGNAL = 0.6; EXPRESSED IN BRAIN, SIGNAL = 0.75
tgaatgactgacttatcagcttccagtttcttctttttctaattgatatcctatctgaatatcagatttttgtccctaatatgcccaactctaaagtcttcagaggctctctaacccacagaacaagatcccacctacacagccctgcattctacaacacaaccgcaactgagggccagttcctaagctcatctcaaggcttaaaatgaaattatgttgccagtcaaagccaggtctcagtgtgctaaggattcattgcattccccgcttctctgtgtttcccagaagctaacctttaatgtgcctcaggagcttgcctcacacccagccaaagtgaataagaagatcatcaacaacttcaatgtgatcctacttgcttcttcccttgaacctcccactgatgggcctgcttgtcacactggtccttcaataccactacgaaccttcttgtcaccttggacc

SEQ ID NO: 10845 - DNA, 490 bp, Homo sapiens
  MAP TO AC004147.1; EXPRESSED IN LUNG, SIGNAL = 1.1; EXPRESSED IN BRAIN, SIGNAL = 1.1; EXPRESSED IN PLACENTA, SIGNAL = 1.1; EXPRESSED IN FETAL LIVER, SIGNAL = 1.3; EXPRESSED IN BONE MARROW, SIGNAL = 1.1; EXPRESSED IN ADULT LIVER, SIGNAL = 1.3
aaaaccagccctccttatcgcctggaaaaaatcaagagctagagtttgaatgggttttatataaacactcacccctgtcagcgtgcggctgggctctcaggataaactcacagcatctggcgcgatgcttgccttgcgttctctcccctgaacgtcaaggtttaagcagagcccgaggactgggagctcttctctgaaattcgatcaacctgaagccagttgcggaactgcacggggtcccgatggacctcaaggaaagccccagtgagggcagcctgcaaccttctagcatccagatctttgccaacacctccaccctccatggcatccgccacatcttcgtgtatgggccgctgaccatccggcgtgtgctgtgggcagtggccttcgtgggctctctgggcctgctgctggtggagagctctgagagggtgtcctactacttctcctaccagcatgtcactaaggtggacgaagtggtggctcaaag

SEQ ID NO: 10846 - DNA, 473 bp, Homo sapiens
  MAP TO AC005541.1; EXPRESSED IN LUNG, SIGNAL = 0.83; EXPRESSED IN BONE MARROW, SIGNAL = 1.1; EXPRESSED IN PLACENTA, SIGNAL = 0.78; EXPRESSED IN FETAL LIVER, SIGNAL = 0.86; EXPRESSED IN BRAIN, SIGNAL = 0.99; EXPRESSED IN ADULT LIVER, SIGNAL = 0.89
tccttcgttgatgttttgtaggtttcattgtagaactctttcaccaccttggttaaatttattctaggtattttatacttttgtaactattttagatggaattgctttcttttttttttttcagctagtttgttgttcatgtatagaaatcctactgaattttgtaagttgattttctatcctgaaacttttcttatttcattaaaagttctaagaattttgtggtggagcctttaggtttttcaaaatacaagaacgtgtcatctgcaaagtgggggcaatttgacttactcttttccaatttggatgccctgtatttctctttcttaattgctctggctaggacttctagtactatgctgattaagactggtaaaagtaggcatctttctcttgttccagttcttagaaaaaaggctttcagttctttcccattcagtacaatgttagctgttggtttgtcatacatggcc

SEQ ID NO: 10847 - DNA, 464 bp, Homo sapiens
  MAP TO AC004046.1; EXPRESSED IN PLACENTA, SIGNAL = 2.5; EXPRESSED IN LUNG, SIGNAL = 0.85; EXPRESSED IN FETAL LIVER, SIGNAL = 2.4; EXPRESSED IN BRAIN, SIGNAL = 0.59; EXPRESSED IN ADULT LIVER, SIGNAL = 1.6; EXPRESSED IN HELA, SIGNAL = 2.4; EXPRESSED IN BONE MARROW, SIGNAL = 3.9
cccccttcccagtaatacacacatttctaaacacatggcataattgctattaacataatagatcacacacatgtgatgagtaaatcatgttcttggttggggagaaatattctccattcttcctgtttccatctggggagactttggctagaaagaaaccctcagccttcctttctacccctacttacctctccctatgagagaagaatcaattgatttgactagtgaatgtcaccgagcaagttcacctcagccttttcctctttctctctctttccagagccatctaaccaaggggccttagccttcgggtctgccccatgccacgtggtaaccatcctgacctgtgagggagtctgcagcaatacagtggcttacaccaaataagtacatgcatctaatggtggtgaaatgttaggaaggcaattgtagatgcaaatctaagttgcacgcttcatagcaga

SEQ ID NO: 10848 - DNA, 447 bp, Homo sapiens
  MAP TO AC003078.1; EXPRESSED IN LUNG, SIGNAL = 0.66; EXPRESSED IN PLACENTA, SIGNAL = 0.74; EXPRESSED IN BRAIN, SIGNAL = 0.62; EXPRESSED IN BONE MARROW, SIGNAL = 0.71; EXPRESSED IN ADULT LIVER, SIGNAL = 0.75
catttgcatctcagtcctggatgaatgatggagttcacaagttgcagtgggagactccattcctagactgtctcccaaagcaacagtaccaagaataactttcttcagatttacaatggacaaattcactgaataattcttcacaaatgatatgttcggttcctgggaggatggagaatactttaaatgcatggtctttctcccaggaaatgatggctcagtgatcacgatgctgtgtttgcttcacattcaagcagatgactcttgctctatgatattcaaagggatgatctcagcactctcctcgccttggttgttggctggttcattcctcagctcctgatggcagatgtaaattgggatgtcgccagcctccgcagcagcggctgcagcgcgagcagagcggttggaggggcgcctcccccaacgctggttccactgaatttt

SEQ ID NO: 10849 - DNA, 494 bp, Homo sapiens
  MAP TO AC004123.1; EXPRESSED IN PLACENTA, SIGNAL = 0.78; EXPRESSED IN LUNG, SIGNAL = 0.77; EXPRESSED IN FETAL LIVER, SIGNAL = 0.8; EXPRESSED IN BRAIN, SIGNAL = 0.63; EXPRESSED IN ADULT LIVER, SIGNAL = 0.75; EXPRESSED IN BONE MARROW, SIGNAL = 0.77
cctctgagaaagcgacatagtgaactgactgactacccaggagatcactgtggaagtggtggggtttctctaggagagtgagcacaaggctttttgctccatgtaaatttcaggagcccatcagggctttgtctgaagaggaaatattttctcctacagaatggaaaaagcaatggagtagaattcagttcctagcacactccctgccccaactctttcactatcctgctgtgagattggtacaaccatttaacttctttgagcctcagtaaacaaagatggtaatatggaggaggaagaggaggaagaggaagaagaagaggaggaagaggaacagaaggaggaggaggaaaaggaggaggaggaggatactctcaccatgcgttttctctgtgaccccagaatactctcagcatgtgaaaggctggcttcccattgccttttgccatgattggacgcttcctgaggcctcagcggaagcagatgccagcacc

SEQ ID NO: 10850 - DNA, 491 bp, Homo sapiens
  MAP TO AC003664.1; EXPRESSED IN BRAIN, SIGNAL = 0.93; EXPRESSED IN BONE MARROW, SIGNAL = 0.99; EXPRESSED IN ADULT LIVER, SIGNAL = 0.87; EXPRESSED IN PLACENTA, SIGNAL =   1; EXPRESSED IN LUNG, SIGNAL = 0.98; EXPRESSED IN FETAL LIVER, SIGNAL = 0.87
caggtgagactgtccctagtaaaacagttactacaaatcacatctacccttcatatttgagtttggagttacaggtgtccatcttgaatacttcattgaatctgagaacttgaaggcggctgctatgaactgaatgttttcacctcccccacccctaatttatatattaaaacctaatcaccaagatgatggtgttcgaaggtggaaattttgggatgtgattaggccatgaggatggagcccttatgaatggaattaatgccctataagagagaccccagagagctaccttccccttccaccatgagaggatacaataagaaaagagctgttcatgaaccaggaaacaggctctcactagacactgaatctgccagcacctctgtcttggacttccagactccagaactgtgagagataaatttcttgtttttataagttaccaagtctatggtattttgttataggagcccaaacaaattacaggggca

SEQ ID NO: 10851 - DNA, 449 bp, Homo sapiens
  MAP TO AC005875.1; EXPRESSED IN ADULT LIVER, SIGNAL = 0.91; EXPRESSED IN BONE MARROW, SIGNAL = 0.99; EXPRESSED IN PLACENTA, SIGNAL = 0.91; EXPRESSED IN LUNG, SIGNAL = 1.1; EXPRESSED IN FETAL LIVER, SIGNAL = 0.91; EXPRESSED IN BRAIN, SIGNAL = 0.95
cactccttgtgagaaaggggccaaaatagtctctaaaaaacaaactcattggatggatatcagttccatgttcatctgggacagaaccaaatgggaaacagcagaactttttaaatgagggccattttgggtcagcctttttcaaccagcataggcagactacttctcttttaccatccaaggccataaatgctccaaaacacgtgatgttataaaaatagcaaaataacagggtcgttcctgtatagatgcaaaaacattgtacggacctaaaagagctcataatccctgtatataaggccaggatgttagtgatggtggtgattgtaatagacactgccgcttttgaatagacattggacatccgctctcgtatgtcacctgcaaggttggtcttatgccaggcagaaatcatgataaacatgtcatcgaccccaacacctgtaaaa

SEQ ID NO: 10852 - DNA, 453 bp, Homo sapiens
  MAP TO AC005722.1; EXPRESSED IN BONE MARROW, SIGNAL = 0.99; EXPRESSED IN ADULT LIVER, SIGNAL = 0.86; EXPRESSED IN PLACENTA, SIGNAL = 0.9; EXPRESSED IN LUNG, SIGNAL = 1.1; EXPRESSED IN FETAL LIVER, SIGNAL = 0.95; EXPRESSED IN BRAIN, SIGNAL = 0.96
tccccttgttatctaacctaagctttcaggaaccagataagagaatctggttgccttcagccaaatcctaacttttgtaaaacctcccggccttccaagaaggtttgcatctttctacaatttttcccaccacccgacctatctcctacatgctcctgactactgggtcacacaaacctgccagtactgaatagttcatgcatcgtattaactagtttacatatatatatatatatatgtctctttagaccacagctcctttcaaaatccctaaaactcaagcatcttccaacctgttagccttggttactcgtcatgggcctgctgaagaacagtcgaaagatgggaatgagccacgggaatgtgcccattgcctcttagtgcaaggaagtgagaggcagcgggccgagcagcagagcaaggcagtgtttggcaggtaaaagactgtttcca

SEQ ID NO: 10853 - DNA, 457 bp, Homo sapiens
  MAP TO AC006254.10; EXPRESSED IN PLACENTA, SIGNAL = 0.85; EXPRESSED IN BRAIN, SIGNAL = 0.8; EXPRESSED IN BONE MARROW, SIGNAL = 0.9; EXPRESSED IN ADULT LIVER, SIGNAL = 6.5; EXPRESSED IN LUNG, SIGNAL = 0.91; EXPRESSED IN FETAL LIVER, SIGNAL =  10
aatggtgaggtaggcccagagccgctcaatgtaattcccgaagatgtagtcccgctcctgcagggccttctccatctccttcatgtccacctcctctgtgaaggtcaggtcgttggtggcctagggtgggggtagaaggaggcaaggggctggaggcttgggtggatcaggttcaggggccaccactcctggaccctcatgaggccagagccctaccactgctgataccccatccccagcacacttccaggccctgtccccactcaccccatggcccttcacatctgccttaaagctgttcatgtcctcgtccaccaggcgcccggccaccacgatctcagagccatcgtagaagtgctggtaagtgttctgggtgaggtccaggatagcgttctcggggtactccatctccacacccgtcagcagtgggttggccacctcctcatagaagccctga

SEQ ID NO: 10854 - DNA, 476 bp, Homo sapiens
  MAP TO AC005079.1; EXPRESSED IN LUNG, SIGNAL = 0.83; EXPRESSED IN BONE MARROW, SIGNAL = 0.71; EXPRESSED IN ADULT LIVER, SIGNAL = 0.63; EXPRESSED IN PLACENTA, SIGNAL = 1.1; EXPRESSED IN FETAL LIVER, SIGNAL = 0.73; EXPRESSED IN BRAIN, SIGNAL = 0.7
aagtgggagaatagtttagtggcactaaagagtaagtaccctttaacagtgagttaaactacgtgaaatcaaacacttcaggaccactatttgctagttgcatgaatctaggcaagttattttaactctctctgctatagttttttttaacctataaattgatataataataggacctacctcatgggattattgtgaacattaaatgagctaataactttaaagtactttccaatcctgagatttaagaactctataaaaatactccctctctccccatccccagcaaatgtacatatgaagttatggacgatgagagcctttttgagatcacttgcagcacctaactcaatgtagtgcttaagatcaactatttcataggacagttgtgaggatgaatgtagtactacctgtaaagaacttagaacagtgcctgatacattacatagtaagtgctcaagaaacaacagctattc

SEQ ID NO: 10855 - DNA, 419 bp, Homo sapiens
  MAP TO AC005746.1; EXPRESSED IN LUNG, SIGNAL = 0.83; EXPRESSED IN PLACENTA, SIGNAL = 0.82; EXPRESSED IN FETAL LIVER, SIGNAL = 0.69; EXPRESSED IN BRAIN, SIGNAL = 0.76; EXPRESSED IN ADULT LIVER, SIGNAL = 0.78; EXPRESSED IN BONE MARROW, SIGNAL = 0.69
ttcgtggacatccttgtctcatctctcttagctttctcttcactaggaaaaccatcctaaattctaaagctctgcccccagcttccatgtgtctttaaataattatattcaaattaaagtgcgcaggagtcatactagacaaaaaaattcacgttattgctatgcgccctggagggaatgatataaccattctgatacagaaatgagaagtcttgacaatctcagtctacagtgaaacagcctcatatgagttgtgagctttggctggggtatagctaatttaaacaataaggttcaaccaattcctgtatatgcaaccatcaatttgtacactagaaatcgtggagatggtcacatcaaacaccacatgatttaccattttagcttttgaaactagggggaaaacatgcggaaaagaa

SEQ ID NO: 10856 - DNA, 471 bp, Homo sapiens
  MAP TO AC005844.7; EXPRESSED IN LUNG, SIGNAL = 1.4; EXPRESSED IN PLACENTA, SIGNAL = 1.4; EXPRESSED IN FETAL LIVER, SIGNAL = 1.2; EXPRESSED IN BRAIN, SIGNAL = 1.3; EXPRESSED IN BONE MARROW, SIGNAL = 1.2; EXPRESSED IN ADULT LIVER, SIGNAL = 1.2
gggcttggtcttcccttgggctctgccgcgcctcctcttcgccctgtgcctgctgttttccagtctcatgacatccctctgcttgtctttcaaaactctgcttatccttctctctcatctcttccctgaagccttcctcaattattttagaaccagctgacttcgttctttctggaacttgtgttgcacctaagttttctgaaacttacaattgatcactgactttctttcattcctacttcatctgggttggtcttgcgtgtcccagctaggttgctagagaagccaaagatggctccagagtatctggttaggacagtttgcttcactctccccacagcattgatggaatgcttggaagaggcaggcagttcccttagaatcgggtcggcgcaggcttcgctgtgcccgtgtttcctccgtatggacatggccatccttgctgccttaacttctggcattgctgttgtg

SEQ ID NO: 10857 - DNA, 430 bp, Homo sapiens
  MAP TO AC000016.1; EXPRESSED IN LUNG, SIGNAL = 0.41; EXPRESSED IN ADULT LIVER, SIGNAL = 0.47; EXPRESSED IN BRAIN, SIGNAL = 0.7; EXPRESSED IN BONE MARROW, SIGNAL = 0.6
cttcagctgcctccaatttcctctcaattttattaatttttaagaatctggctttgttttctaactaaacataacccagcagcttactgatatttaatgttggtgactacattgtggaacagaatttggaacaaacattaggcaaaagtgtcaaacttaccagagtgagcttcaaaaatcataggaaataaatatttttctcattgagaccactgaaaatatttagaacactccctggctgctctaagaggacagggctaaatgttggacaccaggcacagctcctggcagaccctcagggttgcagtcctctcactggtgcttctattcccactctgcaacttgtcagctctgtagcacagcttcacaggacccaggagccccaagttctcaacccttaaccacctcatcaggctctcgaacatcatca

SEQ ID NO: 10858 - DNA, 368 bp, Homo sapiens
  MAP TO AC003117.1; EXPRESSED IN BRAIN, SIGNAL = 0.85; EXPRESSED IN BONE MARROW, SIGNAL = 0.54; EXPRESSED IN PLACENTA, SIGNAL = 0.67; EXPRESSED IN LUNG, SIGNAL = 0.88; EXPRESSED IN ADULT LIVER, SIGNAL = 0.69
ctgggatctatcagcttcattgagttagttagctaaataaacttgttataaaatcattacattcaaaacacacaaacgcatgcacacatacgcacacaaaacacaagcactgtaatttaggtctgctatatagcctaaacttcaaacttgagtatcaagctgctttatcttttaaggaaatttttctatcactaactaaggagattcttttttgtgtttgttttttgtaacaacttactcaagctttgagattggagtgatttctgaggtagatgagctggaaatattttcaacagtttcactgtccacaactgcattggaagactcttcatgcaaatcaactgtagggagtgtctccaccaccggtg

SEQ ID NO: 10859 - DNA, 473 bp, Homo sapiens
  MAP TO AC005988.1; EXPRESSED IN LUNG, SIGNAL = 1.1; EXPRESSED IN FETAL LIVER, SIGNAL = 0.88; EXPRESSED IN BRAIN, SIGNAL =   1; EXPRESSED IN BONE MARROW, SIGNAL = 0.97; EXPRESSED IN PLACENTA, SIGNAL = 0.92; EXPRESSED IN ADULT LIVER, SIGNAL =   1
ttccacaaccattttggaccccggaccacccactctacttcccttcctcatcccagaatgtgtcactgtcttacctttctgggtctcctccggccaggatgtccccaggaccctgctcctgtccccacgtccacttcccaccccactcgagctgtgtcctgtgcagaccccagccaagggagatgaggcaggccccagcagcgagcccatcctctgctgtcttctccctgtagagtgccggggtgatgtctgtgtacctgtttatgaagcggtacaccgcggaggacatgtacaggccccaccctggcttctaccgccctcggctgagcaactgctccgattactcaggccagttcctacacccagacgcctgggtcaggggccgcagcccctccgacatctccagcgaggcctccctgcagatgaacagcaactaccccgccttgctcaagtgccccgactatgatcagatg

SEQ ID NO: 10860 - DNA, 490 bp, Homo sapiens
  MAP TO AC000056.1; EXPRESSED IN BONE MARROW, SIGNAL = 0.71; EXPRESSED IN PLACENTA, SIGNAL = 1.5; EXPRESSED IN LUNG, SIGNAL = 1.2; EXPRESSED IN ADULT LIVER, SIGNAL = 1.5; EXPRESSED IN BRAIN, SIGNAL = 0.91
agagatccccttccttcctgtccccttttaaagcagttacagactttcattgtggactcagccaattatagggaggggaaggtgaatgtcaaatcccacagggctggattctgtcttcttcaaactgggagttcttcaattctatttctgaaaggagtagagctgtttctggggaatacaattcctataatatccattctgtgacctagtgtgtcctcttaaatgtcatcccacacaccatgacattgcccatgttggttccctcacttgaaatgctttccttcctggaattacagaatgagaggtactttagagggcatccgcttcaacctctcagtcaagactgacttctctcctgtgatgttcctaaacatctgtgatcagcccagccttttgcgggagggagagcggtgagatgcggtcttactattttggccagggtggtcacaaactcctgggctcaagcaattctcacaccttagcctcccaa

SEQ ID NO: 10861 - DNA, 452 bp, Homo sapiens
  MAP TO AC004050.1; EXPRESSED IN LUNG, SIGNAL = 1.6; EXPRESSED IN BRAIN, SIGNAL =   1; EXPRESSED IN PLACENTA, SIGNAL = 1.9; EXPRESSED IN FETAL LIVER, SIGNAL = 0.95; EXPRESSED IN BONE MARROW, SIGNAL = 1.8; EXPRESSED IN ADULT LIVER, SIGNAL =   1
ggggaaaacccaaacaagagattctcaaaggtcagaataaattaatagaagaaaagagatggatgattagagcaaaccaaagcaccagaattcgaatgctccttctcatcataattatgaacatcatatttatcatccccaaccaaataatttcttatgagattccaaatgccgatttctattttttctgtgttgtctcttgtgcattacacagttcttctttcctcagctcttccattatcttctttaaccctctacgtgttcaaggtgtgtagtaagcagcatcttctgcctctcttgaggctcttcacactggggaggaaaatttccgctctgaaacatgggaatccagcaggcatgctccgtggcttcaggggtccagagttgagcaaacccagcccgaatgaatgcaaagaatgtgaataattctgctttggaatccatgaagtgct

SEQ ID NO: 10862 - DNA, 497 bp, Homo sapiens
  MAP TO AC004492.1; EXPRESSED IN PLACENTA, SIGNAL = 0.95; EXPRESSED IN LUNG, SIGNAL =   1; EXPRESSED IN BRAIN, SIGNAL = 0.58; EXPRESSED IN FETAL LIVER, SIGNAL = 0.67; EXPRESSED IN BONE MARROW, SIGNAL = 0.82; EXPRESSED IN ADULT LIVER, SIGNAL = 0.72
aaatgggaagtgctgctttcctgtggaatgagctatttcaccttaaccttgaaataccaaagagagggataattattttgttaaatacaaagaaaaatatatctggtataaaagtatctttaaactctccctttttttttttaactatttatgcttaagtgggcttacttttctttgtgctgcaactctttaaaaacaccgatgaaaacacattctttcatttaatagatgatattgaggccaaaacattttttcttttgtagtaattcatcaatgtacctgtgcaaaatcagcagcaagtcgcattttcccaccttcaccaagaggtcttatgagactggcatggcggataaaaagttcaacagctctttgggcaatagcctcagtgttgtcaaagacaaaatccaagcattcaaagtgtttaaaatagtcactcataactctggcaatgaaaccttgtagctccttcatgtacagagaacaaggaacatcaggtt

SEQ ID NO: 10863 - DNA, 453 bp, Homo sapiens
  MAP TO AC006531.1; EXPRESSED IN LUNG, SIGNAL = 0.57; EXPRESSED IN BRAIN, SIGNAL = 0.95; EXPRESSED IN BONE MARROW, SIGNAL = 0.52; EXPRESSED IN ADULT LIVER, SIGNAL = 0.53
taggaaacacgaccactcggggaagccaggcttccaaattagatctggaatcttttaggtctaggagagctaaccttaatgttctgtttcaaaaactttgagaaagaggacaatttgagttaaagagaaaaaaccttctggcttttgtgcattcgagttgatggatctcaatgagaggcacctgaatctcttcctcctgaaaggagagcagttaagaccaaccctcagatggagaggaaagcaaggtgaccttacctttttgtcactgaggccggtcacttggtccacaaattcctcttggatcatgaaggcagccagattggctgtgtagctagccaggaatatgacagcgaagaaggcccatacagataccatgatcttgctggtggtccctttaggattctggacaggcacggagttattgaacaccaggccccaaagaagccatatagc

SEQ ID NO: 10864 - DNA, 420 bp, Homo sapiens
  MAP TO AC004992.1; EXPRESSED IN LUNG, SIGNAL = 0.59; EXPRESSED IN BRAIN, SIGNAL = 0.95; EXPRESSED IN BONE MARROW, SIGNAL = 0.71; EXPRESSED IN PLACENTA, SIGNAL = 0.65; EXPRESSED IN FETAL LIVER, SIGNAL = 0.68; EXPRESSED IN ADULT LIVER, SIGNAL = 0.53
gaaatggagattttgggcacttaatgttgaattattgggcatttttataatattaatcacttgaaaatcagatcccatctaatctggttttcaccacaccgcttcaccaaaactgtattttcatggtcactatttagctacctctatatcgttaaatctaacagttaattcttagtcttaatcttacttgatgtataagcagcatttgacatagctgatcacccctcctcttggaaatatttccttcaatttcctaccaggaaccacacagtcctggtttttctcctttctcttgctgctgcttctgtctcctttgtaggtttcttctcatcgctacagttcctaaacattggagtacccccagggatcagtacttgatcctcctcttttcttttgacactctcttcctcggtgatttca

SEQ ID NO: 10865 - DNA, 456 bp, Homo sapiens
  MAP TO AC002073.1; EXPRESSED IN LUNG, SIGNAL = 0.78; EXPRESSED IN BONE MARROW, SIGNAL = 1.1; EXPRESSED IN PLACENTA, SIGNAL = 1.1; EXPRESSED IN FETAL LIVER, SIGNAL = 1.2; EXPRESSED IN BRAIN, SIGNAL = 0.88; EXPRESSED IN ADULT LIVER, SIGNAL = 0.91
aaagtggaaaactgagggggcaggggaagagacccctgggccaggggcacgaggagccctgctcatggaaccaggcctggccgcagggtcccccggtattgctgttgctacgaggtcggggggtagcgattgtcctatgggagccaccgttcgcctgggtcggggaccctcacttcttctggggtgtgctcagcttctgcatggcccggatcttgtccagcaggccagagatgaaggcctctgtgggtttgtaacagtcaaccagcagctccttgaccctggaagcccaggcatcgtcactctccatgtccaggagctcatccacgtcaatctctagttctgagatctcctcttcctggcagtcgtagaggcgcgtgagctgctccaggatccactcctctaggttgaggtgcttccgtagctccttggggtcatacttgatggtgaccttccctt

SEQ ID NO: 10866 - DNA, 468 bp, Homo sapiens
  MAP TO AC004166.4; EXPRESSED IN LUNG, SIGNAL = 0.43; EXPRESSED IN BRAIN, SIGNAL = 0.64; EXPRESSED IN ADULT LIVER, SIGNAL = 0.46; EXPRESSED IN PLACENTA, SIGNAL = 0.62
attgtccccactatacccccgcaatctttggggacctcggagccagtcagcccctatgactgtgtccaggcctgagggcccaagatcccaagttttctcggagggaagaagtggccgaagggtggctccagtgtgggtcaggcagaggagctgtcttttccatggctctgccactgtaacctctaggtgtctgttcccatctcccctcccattgacttggcctcctcctcagcaactctggagctccaagtcataaaaatgcctaattcccaccagctgactgacagcccagccctcggtttattttccatccctaaagagagaggaatgcagccatccgtgacatttttgggacatggatctctgccccacctcacatcatctctgatagcaccactcagcctgggaggtatgttgctcatctacccgcaaaacaaaaccatctattctccaaaaacagggaccaga

SEQ ID NO: 10867 - DNA, 454 bp, Homo sapiens
  MAP TO AC005901.1; EXPRESSED IN PLACENTA, SIGNAL = 1.2; EXPRESSED IN LUNG, SIGNAL = 0.84; EXPRESSED IN FETAL LIVER, SIGNAL = 1.2; EXPRESSED IN BRAIN, SIGNAL = 0.83; EXPRESSED IN ADULT LIVER, SIGNAL = 0.95; EXPRESSED IN BONE MARROW, SIGNAL = 0.95
gtctgtgagggttccaaaggcagcatgagagatgagaaccagcatccctgcactggaaaagatggccctgcgcccagctgtgatccctaacccttcaggcccactctcccaggccacacaagcacgagatgagtgtgtgtgtgttgggggggggggcgctgcagagtggtttcggggagaacctcaccgctcctcttaccctctagggcttctagaccaggagagccctacctcgtcttttcaggcagtgatagaagaggcttgagtccctctgggtgggaaaggtgctgaggggcaggtcctgcggctccgcgagctgtgagtgtgccccgttctcgtgctggtagtgctggagtgcctggtgggtgccgagcagggggcccacgtccggtgtggctgagagctggggggagatgagcctctgcctcatgatgcttttggaaatcacggggta

SEQ ID NO: 10868 - DNA, 474 bp, Homo sapiens
  MAP TO AC004898.1; EXPRESSED IN PLACENTA, SIGNAL = 0.7; EXPRESSED IN LUNG, SIGNAL = 0.63; EXPRESSED IN BRAIN, SIGNAL = 0.92; EXPRESSED IN BONE MARROW, SIGNAL = 0.73; EXPRESSED IN ADULT LIVER, SIGNAL = 0.65
ggtttcccttcttcccagacaccacttcatccttagttatcacttctggttagtttcccattgccaccataacaagttacaaaatgtggcttaaaatagcacaaatttattatcttaacaattctataggttaggagtccaaacgggtttcgcggtgcttttaacatcagtttgtcggcagcgttgcataggagaattatttatttccttgtcattccaccttctagagaacatccgcattccttggcttgcggccttctatcttaaaaaccagcactgtttcatctctatgacccttctgttaccacatctctctgacaccaccctggagaggttctctgcaggactcatgattaaattagtcccattgcataatctgggcttatcgcctcgtcttgaaatccatagtaaccttaattacatctgcaaaatctcttttaccatttaaggttacatacaggtttggagattagg

SEQ ID NO: 10869 - DNA, 445 bp, Homo sapiens
  MAP TO AC006262.1; EXPRESSED IN PLACENTA, SIGNAL = 0.99; EXPRESSED IN BRAIN, SIGNAL = 1.2; EXPRESSED IN ADULT LIVER, SIGNAL = 0.95; EXPRESSED IN LUNG, SIGNAL = 0.91; EXPRESSED IN FETAL LIVER, SIGNAL = 1.1; EXPRESSED IN BONE MARROW, SIGNAL = 1.1
tctttctctcccagctcctgcttatgtgtcagtctgtctcctcctcttgtgtccaagggaagtcatcggtgagtacaaggatgggcaagagtgaagaggaaggaggctgactttggaaagtgggcatgggggttcacagagggctcctgattgggggatgtagtgcctggttatccttgagctcacaccaacaatgtctgtccatctgtccagctcccgctggctcagaaccatggctgtgccagccggcacccaggtgtggagacaagatctacaaccccttggagcagtgctgttacaatgacgccatcgtgtccctgagcgagacccgccaatgtggtcccccctgcaccttctggccctgctttgagctctgctgtcttgattcctttggcctcacaaacgattttgttgtgaagctgaaggttcagggtgtgaattccca

SEQ ID NO: 10870 - DNA, 469 bp, Homo sapiens
  MAP TO AC004578.3; EXPRESSED IN ADULT LIVER, SIGNAL = 0.92; EXPRESSED IN PLACENTA, SIGNAL = 0.83; EXPRESSED IN BONE MARROW, SIGNAL = 0.79; EXPRESSED IN LUNG, SIGNAL = 0.94; EXPRESSED IN FETAL LIVER, SIGNAL = 0.83; EXPRESSED IN BRAIN, SIGNAL = 0.93
gttagcgggagaggagtgtgcagagctacaggatggaaggaatctgagtccctgcatcacaatgctcagagaagagctgcccaggaagcacctggctaggaatacccacattggaccattgcacaagtgagaaacttcatcctaggaagccactgaatcactggggctgtttgctacagcagcaagcctaccctgacatagcttgctgcctcttagatccagagatctggcttccatctacactttcctgcagacccagcatgtctcagccaagtccttggaccagtgcagagaggcctgtttgtctgagatgggcttgccaatctgcagttcagatgacaccagctcgccttggaagaaggctgactcaaaacaccagtgtttacagaggaaaagtgagaaactgatgagcttccacaggaagaaatccatgcactcgagagattatgggctctttattgcaacgctt

SEQ ID NO: 10871 - DNA, 454 bp, Homo sapiens
  MAP TO AC006337.2; EXPRESSED IN PLACENTA, SIGNAL = 0.77; EXPRESSED IN LUNG, SIGNAL =   1; EXPRESSED IN FETAL LIVER, SIGNAL = 0.72; EXPRESSED IN BRAIN, SIGNAL = 0.83; EXPRESSED IN BONE MARROW, SIGNAL = 0.78; EXPRESSED IN ADULT LIVER, SIGNAL = 0.82
actgagacagggcattggactgggaccgataatcaaattggactgcagcgacgtatcaaagtcactgcagactcatttctatatgtgttattgggaaaggccattgagaggttctgaatgaagatacctggggatatccctaacttctgggaattcactgccccaaagtgaatgaataggtgtcattaatttaaggtaggaagtccttacctaggtttgcaatcataaatgtggacggagaaaataatgtacatccttaattttctcttacctttaattgaaatacagcatttccttcaatgatcaatgcagatagcaaactggcatagaatttgcagtatctgagattgttcataatagaaatcacacgtatttttatatcaatcacatcacactggtgcagatgccacataatatcagttacgctcatcacgactgccaataattagaatca

SEQ ID NO: 10872 - DNA, 447 bp, Homo sapiens
  MAP TO AC005553.1; EXPRESSED IN PLACENTA, SIGNAL = 1.1; EXPRESSED IN FETAL LIVER, SIGNAL = 0.95; EXPRESSED IN LUNG, SIGNAL = 1.2; EXPRESSED IN BRAIN, SIGNAL = 1.2; EXPRESSED IN BONE MARROW, SIGNAL = 0.87; EXPRESSED IN ADULT LIVER, SIGNAL = 0.99
cgtttgctcatgtgctttgtgatgatgattcttcaggtatttcacaagagattgaaatctttcaatctttcactgaaagaatcaaccaatacatacatatattctgtattgagctgggggctggggacagaaagatgaaaaagacataaacttgcccatagggcactcatggtccgagatggtgggtttcaaacggggatctatggggtcctatggtttctgtgcagagcctgattctcctgggggtgggggatggcaaggcctggaaggataaacagatgaacagaggacccccccacctccatctcttgcttcaaccatcccctgatcaccatcatgagctgttttacacttaggcctcagcagaaaggcttctgccactagaacaaacttggaaataatatagttggttgtaagctctctgagggcaagcatcaggcctcctat

SEQ ID NO: 10873 - DNA, 459 bp, Homo sapiens
  MAP TO AC004504.1; EXPRESSED IN LUNG, SIGNAL = 0.57; EXPRESSED IN BRAIN, SIGNAL = 0.65; EXPRESSED IN BONE MARROW, SIGNAL = 1.2; EXPRESSED IN ADULT LIVER, SIGNAL = 0.47
acatccatgatagtatgaattattgcttagaatgaggtgaagtttttaaagtatgttaatttctctaaaaagaatattaaggaaataattgaacataggagtaactctcaaacatggcaaaatttgtaaaagttgcttcccaaatggctgaggattgtgaaacactgttctatagcacagctaggactctttctaacacacaatgcaaaaaggaggagcttgcatccttcatttaataaaatccaacaaagacagtaaaaagaataatggggcagaaggtagggatgaagaattcacttttcaagttcagattatcccagctgattatccaagtgatcactttgatgatgagattctggaaaaataaacttcactgccaatacttcaccttacaagcaggtgaacactcttctgcatatttaggaaatatttattttgtgagggttcaagagaatggca

SEQ ID NO: 10874 - DNA, 489 bp, Homo sapiens
  MAP TO AC006538.1; EXPRESSED IN PLACENTA, SIGNAL = 0.8; EXPRESSED IN BRAIN, SIGNAL = 0.88; EXPRESSED IN ADULT LIVER, SIGNAL = 0.85; EXPRESSED IN LUNG, SIGNAL = 0.78; EXPRESSED IN FETAL LIVER, SIGNAL = 0.97; EXPRESSED IN BONE MARROW, SIGNAL = 0.87
cttcttcctggtggggactctggagccctgaggcggccagggtgtcacatggcaaggggagggggctaagcgagccggttccacccaggtctctcctcctcacaaagccccaggccctctgccacattaacccatctgtcccttcatccatgaatccatgaatggattcatccattcctgaaggcagaggccacatgacccagctgcctcttgaaggccccagtacctaatcctgccatctcccaataccaccatctccaacaccgccatctcccgatacccacatctcccaatacccacatctcccgataccgctacctctcaataccgccacctcccaacactgccatctcccgatacccacatctcccaatactgctacctctcaataccaccacctccaacaccaccatctccaacactgccacctccaacaccaccatctccaacaccgccacctccaacaccgccgtctcccgatacctccac

SEQ ID NO: 10875 - DNA, 454 bp, Homo sapiens
  MAP TO AC004999.1; EXPRESSED IN PLACENTA, SIGNAL = 1.3; EXPRESSED IN LUNG, SIGNAL = 1.1; EXPRESSED IN FETAL LIVER, SIGNAL = 1.2; EXPRESSED IN BRAIN, SIGNAL = 1.3; EXPRESSED IN ADULT LIVER, SIGNAL = 1.5; EXPRESSED IN BONE MARROW, SIGNAL =   1
ggctcttgggtactccttccaaacggcaccttctccctgccttccattcacaaatggaacacatgtcctgattttagcatttatcattcccatctaattctttatactttcatgactaatatgcatgttcctaaataacagaaaatttaatagttgtttttgaagttgtataagtatatgtcaatagaaacactgtactaatcacttaagttaaagacattttacactattaaataaggactaatgagacatcctttgaagttaaatctcaacattttaaaataacctgttgtaaggaagctgcagtattcttcttttggcttttattcttcttagcaggttttcttttaggtgtggtttttggtttacccgaagtttcacaaatgtcaccattctttagagcatgctacgaaaataggaataaaaatgtacatgttacagggtggtgcacaga

SEQ ID NO: 10876 - DNA, 483 bp, Homo sapiens
  MAP TO AC003678.1; EXPRESSED IN PLACENTA, SIGNAL = 1.3; EXPRESSED IN LUNG, SIGNAL = 1.2; EXPRESSED IN FETAL LIVER, SIGNAL = 1.3; EXPRESSED IN BONE MARROW, SIGNAL = 1.5; EXPRESSED IN BRAIN, SIGNAL = 1.6; EXPRESSED IN ADULT LIVER, SIGNAL = 1.1
agcttctgggaagaagtggggcccgcctggggcagtctcaccagagggaggtgatgacaatattgctgggcttcagtctcctgcctttagagggtgagggccagtccacaggagttcagatcataaggcccaagtcccattctccgccagctccccgcctgccaggtgaggacaccagtcaaggacttctgttagactgagtcacttgggagacttagctctctttgggcacagcttggtcccctgtgcatgtggccagatgccagggggctgggcacttctgggagatgggcctctcggtgcatcaagatggcttcacagtgagcgtgactgtgaggctgttgtgcccctcctccctgatcttctgccacgaccctggagcccacttcagtcaccactgccaaaccatcaccttccatcacacacactcggactgtggtcacacccagaccaccaggatggacacacagagctgaagaccca

SEQ ID NO: 10877 - DNA, 496 bp, Homo sapiens
  MAP TO AC005773.1; EXPRESSED IN BONE MARROW, SIGNAL =   1; EXPRESSED IN PLACENTA, SIGNAL = 0.97; EXPRESSED IN LUNG, SIGNAL = 1.2; EXPRESSED IN FETAL LIVER, SIGNAL =   1; EXPRESSED IN BRAIN, SIGNAL = 0.99; EXPRESSED IN ADULT LIVER, SIGNAL = 0.98
cacaaggattccagtgcaagaagtttatctgggaggtgattccaagaaacatcagtaaagagtggggatataaggcagggaaggaaatgaagcagatacacaccacacacaactgaggccttcctgctggggaactctcagtggcagtgtggaagattcctccgaggtttcaactctggtcagttattgcttgagggcggtggggagctgctaactccttggcacttccagctttctgggcaggttcagataactagagaaagcgctcaaagagacataggtgttcatggttggaagctgtcagattgatgtgtgcagaaatggtgacagctaagatgatacaagggggaagagtaccaacagcgttaacagcaactactacagcgtaccaggaaatcattgccatcttcctggccatcatgatctatgttcaaaactaacaaggaatgcagtgtaaaaaaatgacagaaaacagaccttctctgctctaggacca

SEQ ID NO: 10878 - DNA, 458 bp, Homo sapiens
  MAP TO AC004059.2; EXPRESSED IN ADULT LIVER, SIGNAL = 0.51; EXPRESSED IN PLACENTA, SIGNAL = 2.9; EXPRESSED IN LUNG, SIGNAL = 0.65; EXPRESSED IN BRAIN, SIGNAL = 0.59; EXPRESSED IN BONE MARROW, SIGNAL = 0.55
cttcagctgcctccaatttcctctcaattttattaatttttaagaatctggctttgttttctaactaaacataacccagcagcttactgatatttaatgttggtgactacattgtggaacagaatttggaacaaacattaggcaaaagtgtcaaacttaccagagtgagcttcaaaaatcataggaaataaatatttttctcattgagaccactgaaaatatttagaacactccctggctgctctaagaggacagggctaaatgttggacaccaggcacagctcctggcagaccctcagggttgcagtcctctcactggtgcttctattcccactctgcaacttgtcagctctgtagcacagcttcacaggacccaggagccccaagttctcaacccttaaccacctcatcaggctctcgaacatcatcatcaaagaaaagccagaaacaatcttctt

SEQ ID NO: 10879 - DNA, 491 bp, Homo sapiens
  MAP TO AC005237.2; EXPRESSED IN LUNG, SIGNAL = 1.2; EXPRESSED IN PLACENTA, SIGNAL = 1.2; EXPRESSED IN FETAL LIVER, SIGNAL = 1.2; EXPRESSED IN BRAIN, SIGNAL = 0.91; EXPRESSED IN BONE MARROW, SIGNAL =   1; EXPRESSED IN ADULT LIVER, SIGNAL = 0.98
tttttcatcaagagaccagttttagaataaaaaataacttgagaagattcaagtaaaggacccaaaagctttaagagaatgaaaagcttccttgatatctctgggccctttcgctctagtccttccatcacagctattcctcctcgtcgtcgtcctcatcctcatcattgtcctccgcctcgtcgtcgtcctcatcatcgtcatcctcatcattgtcatcctcatcattgtcctcctcatcatcgtcatcctcatcctcatccagacttgcccttttgtcatcagatgtgctgctctcagactcctcctcctcccgagccaggagcttcttaaaaacttgaaactcctcaacagaagtacaggctgtcctggccaaaaactcagcttctgaaactctgagaatgtccttgagcaatgggttagggatctgtgtctgccccttcttatcaggggtttggtaccgtcccaggcgctccaggtaaatgtgtctc

SEQ ID NO: 10880 - DNA, 455 bp, Homo sapiens
  MAP TO AC006021.2; EXPRESSED IN LUNG, SIGNAL = 1.4; EXPRESSED IN BRAIN, SIGNAL = 0.72; EXPRESSED IN BONE MARROW, SIGNAL = 0.9; EXPRESSED IN PLACENTA, SIGNAL = 0.94; EXPRESSED IN ADULT LIVER, SIGNAL = 0.79
ggggttcaaggaaatgcttctacccaaacctaatgcctttccaatttgtttctttttccatctctttcaaacttaattatgtgtagcgttctcagtcactgaatcaccagcctttcctgacacttcaatctcatgcattttagcaaaagattaacctggctgtttgcttttaattctgaagctgtgttaatactcactcccgctagattagaaaagaagaaaaacacactcccacataccccgccatggcaccagcaaggctccagggtgagacggctgacgctgtcacagtccctagggctggctgcacttaccatttcaggagggccaagagagccactgacagggccaccgtcaccatggggccattcacttccaattttagaaaccccaaggcttccatcattcctctgagaccccagagtggtggtcttccagatgagacaggaggctga

SEQ ID NO: 10881 - DNA, 410 bp, Homo sapiens
  MAP TO AC003683.1; EXPRESSED IN BRAIN, SIGNAL = 0.7; EXPRESSED IN BONE MARROW, SIGNAL = 0.73; EXPRESSED IN PLACENTA, SIGNAL = 0.59; EXPRESSED IN LUNG, SIGNAL = 0.68; EXPRESSED IN FETAL LIVER, SIGNAL = 0.87; EXPRESSED IN ADULT LIVER, SIGNAL = 0.6
tgagaagtggagcatgcataattttaaaaagtgagaaattactattttcatgcttgcattttctacatggtttacgaatagttgccaaatcaattgatacctcaaaatatcaaatcattaccagtaagtgaaatagtcatctaataacagagagtggaagactgagcagagacaggagatgctcttacaacaaagtataggactctaaatttaattttcattaaattttatggcattttttcacagaaccaagataaatggaacacatagtaataatgctatgaatactgggaaaacccactatgttcctttcaggtttacacctcctactatgattaagaaaaaatataggctggtttttattagaatcatcatcatcatcatcatcctcaccaccaccaccatcataa

SEQ ID NO: 10882 - DNA, 480 bp, Homo sapiens
  MAP TO AC005737.1; EXPRESSED IN BRAIN, SIGNAL = 0.59; EXPRESSED IN BONE MARROW, SIGNAL = 0.51; EXPRESSED IN ADULT LIVER, SIGNAL = 0.46; EXPRESSED IN LUNG, SIGNAL = 0.56; EXPRESSED IN FETAL LIVER, SIGNAL = 0.75
tgtggggtcatgtattgaagcacatagtaaatgcgcaattaagtagcattctgcttttttttctagttttacagtccaggcaatccaggcacttcatcttcagtggcatcagtgttgactttgtctgacgtgggctgttttgtgtctctatgaccgagttacgtatttaagggcaacagtcctcagcacgtccccatgtgagcaatggacagcactttgcagacttagagggctgggagggcattgaattgggagaggcatgaaccactttatatccaacaatgatcactctggctgtcaagaattgactgagggtcggggggaaatggagtcaagccggtctttttttggaagccactgcaacaaaagtgatctgagttcaggcattagcattacagatgcccacatgagacaggattttgcaggtggaggtattttacaggttgagaggtacaattgggtggttgattggatgcacag

SEQ ID NO: 10883 - DNA, 459 bp, Homo sapiens
  MAP TO AC004584.1; EXPRESSED IN BONE MARROW, SIGNAL = 1.3; EXPRESSED IN ADULT LIVER, SIGNAL = 1.1; EXPRESSED IN PLACENTA, SIGNAL = 1.2; EXPRESSED IN LUNG, SIGNAL = 1.2; EXPRESSED IN FETAL LIVER, SIGNAL = 0.97; EXPRESSED IN BRAIN, SIGNAL = 1.3
tgagctggggacagttgtatctattttgtgtccaagaaaactgaggtgaaggacacagttgcacagctgggagttgggactggaaccctggtctgtactgtcctctgaaaaggatgaagggaagtagtaagtattagaatgcttcaaaaagctccaagcaggcaagactcgggtgacaggacttggggtggcaagacttgggtggagtggaagaggaaggaatctatcctgtgggatagttccagggatggcttctggtggggctgggctgaagaggtgcattctcaacctcatttgttttccctgcaggccaccctgaggcacaaactaactgtcatgtacagtcagatcaacggggcgtcgagagcactggatgatgtgagaaacaggcagcaggatgtgcgggtgagtggcagggctctccaaggccagccctgccctgtggcttcgctcagcttc

SEQ ID NO: 10884 - DNA, 477 bp, Homo sapiens
  MAP TO AC005740.1; EXPRESSED IN BRAIN, SIGNAL = 0.86; EXPRESSED IN ADULT LIVER, SIGNAL = 0.68; EXPRESSED IN LUNG, SIGNAL = 0.75; EXPRESSED IN BONE MARROW, SIGNAL = 0.68; EXPRESSED IN PLACENTA, SIGNAL = 0.69; EXPRESSED IN FETAL LIVER, SIGNAL = 0.7
gcttcctttcgacttaacactttagaaatgttgcttataaaatgcttcagttctcagggatttcatggtgaaaatgaaagatgctcttggataacttgaatgtgtcatccaggccaacagagctgagatgcagtgcaatttctcccccgcctctgctatcatccctcccttcacagatggcacctccactcacccaagtttcaatcagactctgggagtcatccttgagtccccttttccttgtcctccaccctcggtccctcagcaagtcctgctgggcttacctgcaaatcctctgtctccatccataccagcacaggcagcccttcagctctcacctgggccagcgcagtggtttcctcatgggtcccctgcttcaactcttgccttcctgcaggaagtccattgtcccctaggctagcagagggagcatttaaaagcatcagtgggatcactcccctcttgtgcttaaaggca

SEQ ID NO: 10885 - DNA, 464 bp, Homo sapiens
  MAP TO AC002036.1; EXPRESSED IN PLACENTA, SIGNAL = 0.61; EXPRESSED IN BRAIN, SIGNAL = 0.58; EXPRESSED IN LUNG, SIGNAL = 0.64; EXPRESSED IN BONE MARROW, SIGNAL = 0.56; EXPRESSED IN ADULT LIVER, SIGNAL = 0.48
ttaggccaatgggtcataaactttacagcattagaatcactttgggagctttcataaaatcccagtgtcccggtcatctaaacactaattaaatcagcttatcagaagtgggaaccaggcatcagtagtttttaaagatccctaagtacatccaatgtgcagtaaagtttgggaaccacttgtttagactgttattaaagagatatttatctttttcagactcttccccacctaattctaccttttatctgtaggagctgaatgccaaagcagcttctctttttgaaacaaatgatgatcactccgtaactgagggcattaatgtgatgaatgaactgatcatcccctgcattcaccttatcattaataatgacatttccaaggatgatctggatgccattgaggtcatgagaaaccattggtgctcttaccttgggcaagatattgcaggtatatgctcttgg

SEQ ID NO: 10886 - DNA, 456 bp, Homo sapiens
  MAP TO AC002040.1; EXPRESSED IN BONE MARROW, SIGNAL = 0.82; EXPRESSED IN PLACENTA, SIGNAL = 0.78; EXPRESSED IN LUNG, SIGNAL = 0.7; EXPRESSED IN FETAL LIVER, SIGNAL = 0.92; EXPRESSED IN ADULT LIVER, SIGNAL = 0.86; EXPRESSED IN BRAIN, SIGNAL = 0.79
tggactacttccatctgggcatgtgagaggaaaaaaaaaagccgattatttatttaatttatcatattattgggtcaatacccaactccatttggcactaattgtgtcactctcccgaattctaggaagagggcgggacgagtagaaagaggagagagaagagaataaggccagaaggaagagtagaaaggcttttccctccctttgtcacctactgaatctgaatcccaagtcccaagaaagctttccttgactcagtgaccaggccaacccccgctccaaccacactatcaaatgcctctttctttcctgcaccctgatctacagcatcgatcacaattgccacgtcacactgttctttggcccttgtgtctcctgcaggtgtgctttcaatgggctcaggttctaggtttgttgtacaaagcctgccagggcagggggaacaggacgtgattc

SEQ ID NO: 10887 - DNA, 482 bp, Homo sapiens
  MAP TO AC005919.1; EXPRESSED IN LUNG, SIGNAL =   1; EXPRESSED IN BRAIN, SIGNAL = 0.64; EXPRESSED IN ADULT LIVER, SIGNAL =   1; EXPRESSED IN PLACENTA, SIGNAL = 0.97; EXPRESSED IN FETAL LIVER, SIGNAL = 0.96; EXPRESSED IN BONE MARROW, SIGNAL = 1.1
cattcaattatcaagatatagatgcagaaaaattttaaaggaactaacgcccagtgtcaattacattctaaataaatctagagtgataccatggaaagttgttttttttttcttttctattttctactagcttttcagattgtacttgatttgaaacttgctaaaactgtaaatctcagtctctgaataaaaaacaatttcttcatttttaagaaagtgattttaacaacaaaatcatggtatcggtgactcaccctccctctccaccgagcaggcggtggtaggtctcgatctccacctccaggcgtgtcttgatgtcctgcagttgtgcatactctgtgttctggtattcagtctcgccccggatctggcagatctgctcctccaggatgctgatatacatcttaatttctgacagctgagccacgtagccagcttctgtgtcagccagggttccttctggggagctttgctacaaatgc

SEQ ID NO: 10888 - DNA, 448 bp, Homo sapiens
  MAP TO AC004616.1; EXPRESSED IN LUNG, SIGNAL = 0.77; EXPRESSED IN BRAIN, SIGNAL = 0.69; EXPRESSED IN BONE MARROW, SIGNAL = 0.65; EXPRESSED IN ADULT LIVER, SIGNAL = 0.76; EXPRESSED IN PLACENTA, SIGNAL = 0.87
catcactccaaatggaaatctgtcaagcagttacgcttcatcctgcttccctgcagcagcccatccctgcagggaaagcaactgaaaatttgctttctgtctctgtggatttctctatctgtacatttcatataaacgaaatcatggagtatgtgaccttctgtgtctggcttctttcacctacagtataatgttttcaaggctcatctctgtcattgcatacatcattactatttatccttatagctgaataatatcccattgtatggatgtaccacattttatttatttattctcactggttgatggacattttgattgtttccacattgtagattttgtgaatcatgctgccataaacatgcatgtgcaagtatttgttgaatacttactcgttctattttcaagcctgactcatcttctgaattccagaactgtcatcccaaca

SEQ ID NO: 10889 - DNA, 465 bp, Homo sapiens
  MAP TO AC003685.1; EXPRESSED IN LUNG, SIGNAL = 0.57; EXPRESSED IN PLACENTA, SIGNAL = 0.64; EXPRESSED IN FETAL LIVER, SIGNAL = 0.89; EXPRESSED IN BRAIN, SIGNAL = 0.61; EXPRESSED IN BONE MARROW, SIGNAL = 0.66; EXPRESSED IN ADULT LIVER, SIGNAL = 0.49
gtattggaacaccaccaccctctccccacacactgaagtatttctgtggctgctttcaggccaccacggcagagctgagtagtagctgcaacacagaccatacagcccacaaaccctaaaagattttctatcagaccttttggaggaaaagtttcctggccctggtttagaatctcccagttgcttctggacatcaatagccttctacatgtgtgtctcttgtgcttcagacccggagaaccaacagctcattggaacctcatgtgaacatgacacagacccttcaaaccaaacatgctcagttgaattttccatcttcttcccaatttgcccctcctctgggtgttataacccaggagaaactatccccacctactccagggttgattcccaaacaccctttctctcagtcccccgtcctaaaagcacagaagcctgatcattctgaaccacctgctctgcaga

SEQ ID NO: 10890 - DNA, 461 bp, Homo sapiens
  MAP TO AC006070.1; EXPRESSED IN PLACENTA, SIGNAL =   1; EXPRESSED IN LUNG, SIGNAL = 1.4; EXPRESSED IN BRAIN, SIGNAL =   1; EXPRESSED IN BONE MARROW, SIGNAL = 1.1; EXPRESSED IN FETAL LIVER, SIGNAL = 1.2; EXPRESSED IN ADULT LIVER, SIGNAL = 1.3
tgggataaggagattcccacattcgaaaaactcactgtcttggaaacctacctagaacctccaccctctgacaccatggttaactcttgttgtggctctgtctgctctgaccagggctgtgatcaaggcctctgccaagagacctgctgccgccccagctgctgccagaccacctgttgctgccccagctgtgttgtatccagctgctgccgcccatcctgctctcagactacctgctgccagaccacttgctgtcgccccagctgctgccacccagtctgttgtcagaccacctgccgccccagctgtggtgtgtccagctgctgccgcccactctgctgtcagaccacctgccaccccagctgtggtatgtccagctgctgccgtccactctgttgtcagaccacctgccgccccagctgtggtgtgtccagctgctgccgtccactctgctgtcagac

SEQ ID NO: 10891 - DNA, 488 bp, Homo sapiens
  MAP TO AC006487.7; EXPRESSED IN BRAIN, SIGNAL = 0.98; EXPRESSED IN BONE MARROW, SIGNAL = 0.86; EXPRESSED IN PLACENTA, SIGNAL = 0.88; EXPRESSED IN LUNG, SIGNAL = 0.97; EXPRESSED IN FETAL LIVER, SIGNAL = 0.81; EXPRESSED IN ADULT LIVER, SIGNAL = 0.69
ctctaggggcaaaggcattcaatacctttgtacatcatcatccatgccttgaaaatgatggcctaggtccactacagagaggaaaaacagaaatgtcattttagagagcagcttttttggttctgagcattgttaccggaatacaaagatatatttagctgcagtttgttttgtagttgagttcaaaaagttgaagttgttcaaaaggtgattatgcaatcacttgtttttccttatttcaccaaaactataaaattcctcatgaataaataccaacctgctaagatagccttgtgagcctggaattcctggccggcaacacacaagcagcagtctgtgaaccgggaattctcccacagtcctcctaactcatctgccagccggcactcaggaacctttaccatgttcatggtattctggccagaaatgttgacagaatcttgcacaacactcacctgtgaaagacaaggaaacacaagccaagcttt

SEQ ID NO: 10892 - DNA, 394 bp, Homo sapiens
  MAP TO AC005185.1; EXPRESSED IN PLACENTA, SIGNAL = 0.58; EXPRESSED IN BRAIN, SIGNAL = 0.55; EXPRESSED IN BONE MARROW, SIGNAL = 0.61; EXPRESSED IN ADULT LIVER, SIGNAL = 0.45; EXPRESSED IN LUNG, SIGNAL = 0.56
atgctacctgttggcaaatgtcttctttaactatggaacagagaaatttgtgactgtctggaataaaattatttctttaattgaatacaaaaatactctgcatgtaaaaatattaagaaagtttattttaaaatattttacactcttttgcccacagctctttattcttccctcatggtgaactgcactactgcacttgtgtggcccacatgactttatatctttgtacagagcatttccagcatcatatcatccatgctgactgtgccgatgatgggcctgaagaacagttcagcaatgacattggcattgatgaatctcagcaggaaaagggtactattaagttcgatgaatctgtcatggggcccttggtgcgtcatcctggtgtgttcac

SEQ ID NO: 10893 - DNA, 454 bp, Homo sapiens
  MAP TO AC006360.2; EXPRESSED IN ADULT LIVER, SIGNAL = 0.46; EXPRESSED IN LUNG, SIGNAL = 0.53; EXPRESSED IN BRAIN, SIGNAL = 0.57; EXPRESSED IN BONE MARROW, SIGNAL = 0.52
aggcccttcagcaagaggagaaaaatgtaaaaatcgccctgccgggtgctgcactgacaagggttggggtatcctcttacagggagccggtgtcctctgatctgcagggggtatcatgtttcccatcttctgcaggtgtcatgtgaaaagagaacccttctcgtttcagaacaggaatcttaactttccttggcaattcacacagtggatagattttaacagaaaaagaaacagatgttggagatggttttccaccagctttctgccctgtctcttctgtggtcccaggagctttaataccttttatcctccaggtcttggaattggacgtcacactactctggaaagtggcattgggtgccatgttgcaatgggcaccatgattaactcctaggaaatgggacagacgtgggagaaggcagcacacattagaagattcctggtgtttagggcc

SEQ ID NO: 10894 - DNA, 478 bp, Homo sapiens
  MAP TO AC004592.1; EXPRESSED IN PLACENTA, SIGNAL = 0.95; EXPRESSED IN LUNG, SIGNAL = 0.95; EXPRESSED IN FETAL LIVER, SIGNAL =   1; EXPRESSED IN BRAIN, SIGNAL = 0.68; EXPRESSED IN BONE MARROW, SIGNAL = 0.92; EXPRESSED IN ADULT LIVER, SIGNAL = 0.88
gagttgggttgtgcattggtttattataaagagaagccaggtggctggactagatagcttccagcagaaaatggtagaagacaacgtgcatgatgtagtgaatcttgattagagacacctttggggcatcccaccctcactgatacatatcatcttttggcctctccactggagaagagaaagcaaagaaatacttctaatgagctcaatctgaccaaactgtttggggtcaccagcttcctatagcatccaagtttcttacctgcctgccattgtacagcctgactttggggaggtttggattcaaaagctgtccttactgcttttggatgagaacttgggaaaactcgcttatttggacacagggcctttcctgctactggaggtttgctgttctgagcaccttcctggacagaatctagcagctcaagaaggacacccttgttcagaggaagaagcatttctgttctgttcatgg

SEQ ID NO: 10895 - DNA, 464 bp, Homo sapiens
  MAP TO AC006211.1; EXPRESSED IN PLACENTA, SIGNAL = 0.8; EXPRESSED IN LUNG, SIGNAL = 0.73; EXPRESSED IN FETAL LIVER, SIGNAL = 0.9; EXPRESSED IN BONE MARROW, SIGNAL = 0.8; EXPRESSED IN BRAIN, SIGNAL = 1.1; EXPRESSED IN ADULT LIVER, SIGNAL = 0.78
cagagattgatatttcccggtgtttttctccctcagttttgtggaggtgtcacctcagaggagacccaaaccacctccggagagcaggggtctcagcctgtcaatggaacttgttttcctgttaaatgtctcagtgtgtttcatgtgccctaattcccaatggctgtcagttacaatatcagaaattaaaacccacgcagaaatcacattgtctttgttttcactgtcttccagtgtcatcttgcattacaacatataagaagacaccacctccagtcccacccagaactaccacgaaacctttcatttctatcacagcccagagtagcacagagtcagcccaggatgcctacatggacggacagggccagcgaggagatattatcagccagtctggactcagcaactccaccgagagcctggacagtatgaaggctctgacagccgccatcgaagctgcaaac

SEQ ID NO: 10896 - DNA, 473 bp, Homo sapiens
  MAP TO AC005731.2; EXPRESSED IN BRAIN, SIGNAL = 0.99; EXPRESSED IN ADULT LIVER, SIGNAL = 0.85; EXPRESSED IN LUNG, SIGNAL = 0.77; EXPRESSED IN FETAL LIVER, SIGNAL = 0.83; EXPRESSED IN BONE MARROW, SIGNAL = 0.8; EXPRESSED IN PLACENTA, SIGNAL = 0.66
tgccagagaaatatccacccagccctctctggtatttgaagacaaaagcagtggtgtgcatggagccctcggtggtggtcaaaggcagtggagactttggtgtttaatgttagaaaagaagaagagtgggcctcattctatagtgtggcactgtagctctgggtggcttggtcagatgaggcaggtatggggtggtaataatctctgtatccactagagcccctggaaaaagctattgtgttgacaaaagctattgcattgacaaaagctgtagctgtactgtgagaagagtcagtgggatgtcagaacaagctccactctgatggggcttcacatgtgtacgctatgctaaacttcactccagcaaatggcattctgatgagatcccagcgtgatggggaaggcctagaaccccactgtcactctttcctaccagcctaacaaggcttgtctctttccatttcccaggaaca

SEQ ID NO: 10897 - DNA, 487 bp, Homo sapiens
  MAP TO AC004500.1; EXPRESSED IN BRAIN, SIGNAL = 0.64; EXPRESSED IN ADULT LIVER, SIGNAL =   1; EXPRESSED IN BONE MARROW, SIGNAL = 0.83; EXPRESSED IN PLACENTA, SIGNAL = 1.2; EXPRESSED IN LUNG, SIGNAL =   1; EXPRESSED IN FETAL LIVER, SIGNAL =   1
tcccagaaatcaagggaaatcatagaaacagatacctcatcctcagattcagatgaaagtgagagccttcctccttcctcacaaactcctaagtaccccgagagcaataggactcctgttaaaccctcctcagtggaggaagaagatagcttttttcggcaacgaatgttctctcctatggaagagaaggaacttctttcacccctcagtgagcctgatgacaggtacccacttattgtgaagattgacctgaatcttttgactagaataccaggaaagccttacaaagaaacagagccgcccaagggggaaaagaaaaatgtgccagaaaagcacacgagagaggctcagaaacaagcctcagaaaaagtttccaacaaaggcaagaggaagcataaggtttgtgaagggtttttgttgtttgttttgaaacatcagaatctgaaatgcggtggaaatctcagtaagccacaaagtaacaaggtgg

SEQ ID NO: 10898 - DNA, 475 bp, Homo sapiens
  MAP TO AC005841.3; EXPRESSED IN LUNG, SIGNAL = 1.2; EXPRESSED IN FETAL LIVER, SIGNAL = 0.88; EXPRESSED IN BRAIN, SIGNAL = 1.2; EXPRESSED IN BONE MARROW, SIGNAL = 0.77; EXPRESSED IN ADULT LIVER, SIGNAL = 0.88; EXPRESSED IN PLACENTA, SIGNAL = 0.83
tcggggtggagatgttactgtcttttatttcttcttatttaaaattgtcaagatggcaatgtagtgaccacccctcacccccaaacaaaagagctgaagaactcacggtgaatgaagacttacatcactcacccctcacccccaaacaaaagagctgaagaactcactggtgaatgaagacttacatcaggggatacgtcagaaagggaagtgaggggcaaacacttccctggcatgcctaacacgcctatctaacttaagtgtggttagaaaggggccatgggggcgggggtcacctgcacagaaggcacggatattttcatccacttggaagcggacgacggtgcggttgtgatcaatgatatatgtctgtccatcccaggcgcatgcaactacctcctcatgcccgttgccctgaaaaaggacagagacaaaaggaacataaaggagctgtggactggattctggatgacaa

SEQ ID NO: 10899 - DNA, 479 bp, Homo sapiens
  MAP TO AC004228.2; EXPRESSED IN PLACENTA, SIGNAL = 0.9; EXPRESSED IN ADULT LIVER, SIGNAL = 0.81; EXPRESSED IN LUNG, SIGNAL = 1.1; EXPRESSED IN FETAL LIVER, SIGNAL = 0.73; EXPRESSED IN BRAIN, SIGNAL = 0.96; EXPRESSED IN BONE MARROW, SIGNAL = 0.96
ctcctctggctcctgctgcccctcttcctgcctccctcccctccctctctgcctcttcctgccctcctgcctctccaggactgtcaggccctctcccctcaagctctcccagcccctctgagctcagcccatccttccccagcaggtccagccagagctttgggaccacgcagctccgacagtcccccttgaccacggggctaccaggcatacagccctctttgctgctgggtgcgtgtctgggcaggtctgggtaggacagggaggttgctgtgttctgtctttggggcttctctggctcatacagcctctggcctcctcagtgaccaccagcctcaccagctcggccccaggttctgctgtccgcaccttggacatgtgttccagccacccctgccctgtcatctgctgttcctcacccactaccaaccctaccactggtcctagtcttggccccagctttaaccctggccatgttc

SEQ ID NO: 10900 - DNA, 388 bp, Homo sapiens
  MAP TO AC004629.1; EXPRESSED IN LUNG, SIGNAL = 0.48; EXPRESSED IN BONE MARROW, SIGNAL = 0.64; EXPRESSED IN BRAIN, SIGNAL = 0.56; EXPRESSED IN ADULT LIVER, SIGNAL = 0.55
gccatcagaaattcattcacagtcatagggctgtcaataggatatactctgctctccattggtactaaatctaaatactattctcttttcaactccacctgaaacctattttatagttttggattgaggttctgctttctttggcatatatttacatttgaacagttcatacttgtttaccttgagagaatcaaatatatgcagactgtcatacctcagatattgaatgaggctctgtcttatttttcataagtttttaatcaggatctcaaggacctcacgttctccagtaatggtattctcatccaatatgtggattatttattgcaaaactctgaagataacgcaagctctaaaagctaccttctccccaaaaaggaacataacg

SEQ ID NO: 10901 - DNA, 456 bp, Homo sapiens
  MAP TO AC005723.1; EXPRESSED IN ADULT LIVER, SIGNAL = 0.61; EXPRESSED IN PLACENTA, SIGNAL = 0.64; EXPRESSED IN LUNG, SIGNAL = 0.69; EXPRESSED IN BRAIN, SIGNAL = 0.63; EXPRESSED IN BONE MARROW, SIGNAL = 0.49
tgggtctcctggttatcagctagatctttgataagttttataatagctgagctttgtttcctcgtatgtacagtgctactgagaattcacatttgtagtggtttgtggttttggttgataagctgaccgatgacggagtgctgtgaggtttggcaatcctgaccgctagtcctgactataggacagctgatattatgcattgcattcgtaagtacattagtgttcattacatccctgcgagcatcttctgcttaattatgagattcttctcagtttatctagcttctctactaccattgtgattcctttaactctgctccagggtgcaggcagtgagtgaggccatagggaatttcacggagccagatccaggtctgctgactagccattttcccattttcagtctagtcctaagcatcatcccaacatactctacaagcaaaaggaggattgtca

SEQ ID NO: 10902 - DNA, 488 bp, Homo sapiens
  MAP TO AC003103.1; EXPRESSED IN PLACENTA, SIGNAL =   1; EXPRESSED IN FETAL LIVER, SIGNAL = 0.9; EXPRESSED IN ADULT LIVER, SIGNAL = 0.89; EXPRESSED IN LUNG, SIGNAL = 1.2; EXPRESSED IN BRAIN, SIGNAL = 1.6; EXPRESSED IN BONE MARROW, SIGNAL = 1.1
acctggtcatgggaagctctcaccagccaccctcagaaatgaggtcctgaatgagccataaccacaccctatgctttaccactgtctccctggggagcagaacactttataaacattaattctttgaccccctgggcacctccacttacgtggtaaataagactgaaggcctttcttctacaatatagatgaggaaacatcagcccagaagggaaattacttgatgagagacaggtgagcagccatgggccccagggtgtttggagtctcagtagctgacctgcagcagcactcgtggctgccgacacccaggagacacagtcctgttccgttcccctttctgcttctcagagggtagtgggggttgggccttttgtctcttgtatggaatgtgaaatgctgcaaagacgagcaattgttcttcaatgctttgtcctcccctataagaaagaagaaatcaatacacattttctcatacacacacttgg

SEQ ID NO: 10903 - DNA, 472 bp, Homo sapiens
  MAP TO AC002087.1; EXPRESSED IN PLACENTA, SIGNAL = 0.92; EXPRESSED IN LUNG, SIGNAL =   1; EXPRESSED IN BRAIN, SIGNAL = 0.81; EXPRESSED IN FETAL LIVER, SIGNAL = 1.1; EXPRESSED IN BONE MARROW, SIGNAL = 0.88; EXPRESSED IN ADULT LIVER, SIGNAL = 0.78
atgcaaatcgacagaaagccgactccacctccacaggaactatgttctcaagacacctggcctgtgctgcaaactaacgctaggtcttgcttaaaccccagaataattctgaggtccccaaacctagaagttggtttctaagtggagctgccccagaaaggccagctccccactccttctttccaaaaagtccttgggggaatgacggataaaagcaggggttccagtgggcagaatcaccatccagagctcacttctctgccagggcagtaagtcctgctcttctggcccagggggacatagacattgctcttggctgctcaccattgccgtggtctgttggttgaatctctctctcccctttcccagtggcatcagcaactgcacaccaggtccatgatggttgctgcttctggggaggagagtgggaaagggttccaaagatctttaccaacatgtcaacatctgttca

SEQ ID NO: 10904 - DNA, 458 bp, Homo sapiens
  MAP TO AC005880.2; EXPRESSED IN LUNG, SIGNAL = 0.76; EXPRESSED IN FETAL LIVER, SIGNAL =   1; EXPRESSED IN BRAIN, SIGNAL = 0.58; EXPRESSED IN BONE MARROW, SIGNAL = 1.3; EXPRESSED IN PLACENTA, SIGNAL = 0.65; EXPRESSED IN ADULT LIVER, SIGNAL = 1.5
gttgtctgacgtgttgggtgtgtgttttggtgaaggttctacgagatcggttcctggttcagaaaggcgagttttagagacttgacgcaaatttaataaacgagaactagtattgataatatgccttgtcaaacctgttgttttattgactgacttgctagcttcagcatcaacacgaggaggcaggcctaagagggtttcctgtccttccagcctaaggtttttcagtgtcctgtctatttgcctatcagttgctccacaaacagaagtctcagctagacacttttcttgacattttttatggcaaacataagcacaaaacatacactgggaagctgctttagtccaaacttttttcttacagtagtcacaccatgttgggttctggaactgagtatcctgaaaactgtgtttgttttctgttaaacccatctgtccaacaaattgctcctctttag

SEQ ID NO: 10905 - DNA, 483 bp, Homo sapiens
  MAP TO AC004648.1; EXPRESSED IN PLACENTA, SIGNAL = 1.3; EXPRESSED IN BRAIN, SIGNAL = 0.9; EXPRESSED IN BONE MARROW, SIGNAL = 1.3; EXPRESSED IN ADULT LIVER, SIGNAL =   1; EXPRESSED IN LUNG, SIGNAL = 0.93; EXPRESSED IN FETAL LIVER, SIGNAL = 0.94
gctggcagtctctgttcagtctactgtaacaaaacagcttagaccaggtaattcacaaacaacagaaatgtatttctgacagttctagaggctgggaagtccaagatcaaggcatcagcggcttcaagatctgctgagggctgctttctgcttcacagataataccttcctgcatcctcagatggtggaagaggctaacagactccctcaggcatcttttataaggccactcatcctattcatgagtgtctcacttaataccatcaccttgggggttaggtttcaacatataaattttaggagggacacagatattcagatgatagcagtagccaatgctaatttagaagtggatatctccacctaccaccatgatatgaaccagatggagagcaagggcaaagttgtggctagcttgtttgcaacttcatgtaacccacagcccactgcatctcgctgcatggtaaggggccagtgcatgta

SEQ ID NO: 10906 - DNA, 472 bp, Homo sapiens
  MAP TO AC005068.1; EXPRESSED IN BRAIN, SIGNAL = 1.5; EXPRESSED IN BONE MARROW, SIGNAL = 0.97; EXPRESSED IN ADULT LIVER, SIGNAL = 2.5; EXPRESSED IN PLACENTA, SIGNAL =   1; EXPRESSED IN LUNG, SIGNAL =   1; EXPRESSED IN FETAL LIVER, SIGNAL =   1
cccagaaatgttcctctctcctaaacctgaagtggtcgaacactttcatcccttcctcacaaggagggtcaggtgatcaggtaaaggtaacaactaacccaaacaggaagtgtggccagatgcttgtatacaggtaagggtgtgatttggttgctaatttctcttcacttctgggagaccagccccttataaatcaaactataggccagagaggctgccacatgctcccaggctgtttatttgaagagagacttacattaggcagtgactcgatgaaggcatgtatgttggcctcctttgctgccctcacaatctcttcctgtgacaccacccggctgttgtctccataggcaatgttctcagcaatgctgcagtcaaacaggatgggctcctgggacacgatgcccaggtgtgctcggagccactgaacattcagtcgctttatttctttgccatcaagcagctgaaaaca

SEQ ID NO: 10907 - DNA, 483 bp, Homo sapiens
  MAP TO AC005858.1; EXPRESSED IN FETAL LIVER, SIGNAL =   1; EXPRESSED IN BRAIN, SIGNAL = 1.1; EXPRESSED IN ADULT LIVER, SIGNAL = 0.86; EXPRESSED IN LUNG, SIGNAL = 0.94; EXPRESSED IN BONE MARROW, SIGNAL = 0.95; EXPRESSED IN PLACENTA, SIGNAL = 0.89
tggctatagatggaaggagaggccatttttatttcaacaggtagaaaaaaggaaaagccctgacttttgaagaccaggtttctctgtgcaaaaggaggatcacagtcatctaccaagagtaagtgagaaggcaaggctgtcagaagaaaacaaaatgatttgaagtagcagttagagaaagttgaagagcaggaaactataaatggattgctgcaaaggatttaagatccagtcgtttcacatggtgtcacctctctgttgtagggctttgcccagaagggcttactgcttaggtgtagatggagaaagtggatagcgatatccatgcttggttggcgatgtgccatatggatgaggagtaccaacagagacaccttcggaaagctaaagcagttccatgaatggaagataaggactagcaggtataaggctcacacttaatctctgttaccaagggtatccttggtatctgacagtgagtca

SEQ ID NO: 10908 - DNA, 472 bp, Homo sapiens
  MAP TO AC006221.1; EXPRESSED IN ADULT LIVER, SIGNAL = 0.55; EXPRESSED IN LUNG, SIGNAL = 0.6; EXPRESSED IN BRAIN, SIGNAL = 0.81; EXPRESSED IN BONE MARROW, SIGNAL = 0.54
ttcctttttcacacaatcttgccttactgctccctcccaattcccctccgaatgttccttttcttctctccatgctagttgtgctctcttacccccactttctacctttgcaatccctcctttctttagatggggtgacaatctagatttctcatgtttttacggctatgtggattggataatcggctgactgacaggaatgtggacttagaaccttcccagcactgaactgacacagtggtatgtttcaggggtgttgtaaagccctgggccattggtatccatgtgccccaccattcagaatggagaactctgccatcagaaatcagaaacccagtctgctttgaagcaggttatgactcagctggtgggagagaaattcaacacccaagataacaactggtgaggataccataaaacatggtgcacaagtgtaatttaatataggggagaacatcagagtcttggggtg

SEQ ID NO: 10909 - DNA, 446 bp, Homo sapiens
  MAP TO AC004600.2; EXPRESSED IN BRAIN, SIGNAL = 1.5; EXPRESSED IN LUNG, SIGNAL = 1.6; EXPRESSED IN BONE MARROW, SIGNAL = 1.4; EXPRESSED IN ADULT LIVER, SIGNAL = 1.2; EXPRESSED IN PLACENTA, SIGNAL = 1.7; EXPRESSED IN FETAL LIVER, SIGNAL = 1.2
gccaaatcccaaacctcagtcagttcatagacacagagtcatgtgagtgaaggtgagtctgggtacagctgaggataacccaataagttcatgctgtatattttccttctagccctcctgaaggagctacgcgatcgtttagcagaataaatgttcaccaagggaaaggaaatatccagatctttcagggatttgggggcactgtcactgagctaacatgtaataattcctggcgaccataaagacactctggtccttcaagcctgatgagggcttgtgaacatcagttgacatcatttctcaatgggtccagtaggtccatgagccatcctgttaattcctcagatcctgaatgtgagttgtaatagacatacttgttatctgacaagatcctcagttgttccactgacccatagaatgagggactctcgtgatataaacctatg

SEQ ID NO: 10910 - DNA, 473 bp, Homo sapiens
  MAP TO AC005096.1; EXPRESSED IN PLACENTA, SIGNAL = 1.1; EXPRESSED IN LUNG, SIGNAL = 1.4; EXPRESSED IN BRAIN, SIGNAL = 1.1; EXPRESSED IN FETAL LIVER, SIGNAL = 1.2; EXPRESSED IN BONE MARROW, SIGNAL = 1.4; EXPRESSED IN ADULT LIVER, SIGNAL = 1.2
ccttggtgtctctctctgaggaaataagggcttaatatgtcctattcaattaatcctcaccgcatccttaaaggtgactggaaggcagatagtattaactccattttacttaaaaagcagcggaaacatggtgatttggaactccctgggagccctcgaacttttctctaaactccaccggtagctgaggagcaggacacacgcacagaggaaggacatatttatggcgcatcgccttggtgccaggcaccgttgggaactttttaggatcgtgatgtctttgaattctcaggacgtttctgcgaggtggtgggcggtatcatcctggtttttcagggagaagtcaagtcactggcccaggtcctcaagctggccagtgtggcccggtctgaccccgaggttctgcccgggtttctgtccctccagcctggcatcgtgaactcaggggaaacagatggggaatctgttgttgt

SEQ ID NO: 10911 - DNA, 464 bp, Homo sapiens
  MAP TO AC005726.1; EXPRESSED IN LUNG, SIGNAL = 1.6; EXPRESSED IN FETAL LIVER, SIGNAL = 1.4; EXPRESSED IN BRAIN, SIGNAL = 1.9; EXPRESSED IN BONE MARROW, SIGNAL = 1.5; EXPRESSED IN PLACENTA, SIGNAL = 1.4; EXPRESSED IN ADULT LIVER, SIGNAL = 1.3
gagctgtgcagctggtccaggacggcatgtgcgatgggcaccatcatggctgaggtggccgtgttgctgatccacatggacaggaaggccgtgaccagcatgaagcccaggattagcctagggatgggcagacagacacactgctgttccagcttcccttcagggactgggtgcccagaatatctcctcgtcaggttctcccgtgctggtttgcaggaggaactcacggggcaggccgcaccccaacgatgaggaggacacggagggcgatgcgtttatgcaggttccagtgttccaccgcgatggccaccagcagccccccgaagaacaggaggttggagtccttaagatactcgacggcaacctggcaggtggagacatggctgagcggcgggaagaccctggagtctcccacggtgcccccgaggttatgggatgcagtcactgacattcccacagactgg

SEQ ID NO: 10912 - DNA, 473 bp, Homo sapiens
  MAP TO AC000005.1; EXPRESSED IN PLACENTA, SIGNAL = 0.6; EXPRESSED IN LUNG, SIGNAL = 0.67; EXPRESSED IN BRAIN, SIGNAL = 0.73; EXPRESSED IN BONE MARROW, SIGNAL = 0.64; EXPRESSED IN ADULT LIVER, SIGNAL = 0.59
aacattggattacatggctgcagaccttgggattcaaaagggaaagatgaaaccttcacagcaacttggagtttctttcaaggggaattttcattacagaatgttttgttttaactggtaattaaaggtaggtgaaacactcctgtagtaaggggttttcctcctctccaacctgtccctccaagagaaacaggcacaggcagggccacgaggcctgccctcctctctagaggtaactgctcctgagagtttatggtctggtccacttcggtttctcatgtgtcacctttctaggggctgcaaggcccagagatctggacacaagccaagaagtcaagaactgttgaagccgcagtctccactctcctactgacaccagagaccacccagcccagccaaaccatatggcctcttgttttcctgatgtatgaggtgggtagaatgcttttcccccaaaagaggactccaaggga

SEQ ID NO: 10913 - DNA, 499 bp, Homo sapiens
  MAP TO AC000117.1; EXPRESSED IN PLACENTA, SIGNAL = 0.81; EXPRESSED IN BONE MARROW, SIGNAL = 0.87; EXPRESSED IN ADULT LIVER, SIGNAL = 0.75; EXPRESSED IN LUNG, SIGNAL =   1; EXPRESSED IN FETAL LIVER, SIGNAL = 0.84; EXPRESSED IN BRAIN, SIGNAL = 0.98
tctcatccatattttgaagcaagttaataaaatgcatgcagttataatcacatttaaccccaaaactatatagaacttggtaatttgcttgctttaaaagattccatttatttcagttgtgctttcttaccagtagaagaaaaaaaggaaaatactgctggaaataaaataataaaacaagccagcagattaaaaagatgttttacaatttttgtttttccaaatgcagtaaatgtattattctttaacgtaagactgagtcagaaagatgagcactgtatatgtggatgggtagatgtctacagtgactatgcattgcctactgatgtgatgtctgtttccaggactgattcagtccgagaagagatgggaaagtcagtagatattgaagcctcagaggttccacaggtaaccaaccctaagcctttcgttttaatagtgacgtcattcttctgaggtttgtcctcaaaaacagctgaggcagctagacaccttctgg

SEQ ID NO: 10914 - DNA, 446 bp, Homo sapiens
  MAP TO AC006518.17; EXPRESSED IN PLACENTA, SIGNAL = 1.1; EXPRESSED IN LUNG, SIGNAL = 1.1; EXPRESSED IN FETAL LIVER, SIGNAL = 1.1; EXPRESSED IN BONE MARROW, SIGNAL = 0.95; EXPRESSED IN ADULT LIVER, SIGNAL =   1; EXPRESSED IN BRAIN, SIGNAL = 0.77
ttctggggaccatgagtaaagaaatttgatttttcaccaccctaatgtggattaagaggagttctaattaggaagccttgggaaggggggaggttgggagttgagaggcaggtcagggagagaggggccggccgtgtggtgaagacagagagatatgaagacaggagggttttccagcatgagctcagctcttcttgtttcaactcacacagatggaggagactctgagcagttcatagatgaggagcgtcagggaccacctttgggaggacagcaatctcaaccctctgctggtgatgggaaccagaatgatggccctcagcagggaccaccccaacaaggaggccagcagcaacaaggtccaccacctcctcagggaaagccacaaggaccaccccaacagggaggccatccccctcctcctcaaggaaggccacaaggaccac

SEQ ID NO: 10915 - DNA, 357 bp, Homo sapiens
  MAP TO AC003037.1; EXPRESSED IN LUNG, SIGNAL = 0.66; EXPRESSED IN BRAIN, SIGNAL = 0.7; EXPRESSED IN ADULT LIVER, SIGNAL = 0.61; EXPRESSED IN PLACENTA, SIGNAL = 0.69; EXPRESSED IN FETAL LIVER, SIGNAL = 0.76; EXPRESSED IN BONE MARROW, SIGNAL = 0.67
tcacccttgatagggtccagataaactctttttgtgtatgagacttagttttaaaattagctattaaacaaaatgtttttcccccctaaaaaaagaaaagtagccccataaatggaaacttacattttcacctgactgtgaagtctacagactcagagcctggcatctatgttccatgttcttctggtttgtgagcccaaactttagttagttacctttactaagaaggtaaggatatgccccgcagtgacaaatgccgacacaaaccactcgttgaacttgtccacagttttcaagtacatgttgttcgatagccacatgttctcatctacgaggtcgagagcagcatgagctatg

SEQ ID NO: 10916 - DNA, 480 bp, Homo sapiens
  MAP TO AC003108.1; EXPRESSED IN BONE MARROW, SIGNAL = 1.2; EXPRESSED IN PLACENTA, SIGNAL = 1.2; EXPRESSED IN LUNG, SIGNAL = 1.4; EXPRESSED IN FETAL LIVER, SIGNAL = 1.3; EXPRESSED IN BRAIN, SIGNAL = 1.3; EXPRESSED IN ADULT LIVER, SIGNAL = 1.2
gccatctcagtccagtgacctctcaattaatttttttaacacttcctaaccctaacttcctactttcccttccttgacagttgtgatcctgagtcatgtccatttgtcacaaaaactaagcatcccctgcagatggttaagtctctgctgcaaatgaaccatccattcaactaccagaatgggaggaaagtacccactggagtgtttcactggggagagttgtgggagttccgttttacctccagaaattttcctcacaggtcacagagtcaaagacaaagaaagtgaaccggaaaggaagcacttcttccacgtcctcctcctcctccagctccgtggtggacccgctgagcagcgtcctcgatgggactgaccccctctccatgtttgcagccactgctgaccccgcagccttggcagctgccatggtaatgcaccccagccatggtcgtccagtgggggttggttttgtgggtgcag

SEQ ID NO: 10917 - DNA, 415 bp, Homo sapiens
  MAP TO AC004706.1; EXPRESSED IN PLACENTA, SIGNAL = 0.91; EXPRESSED IN LUNG, SIGNAL = 0.97; EXPRESSED IN BRAIN, SIGNAL = 0.76; EXPRESSED IN BONE MARROW, SIGNAL = 0.86; EXPRESSED IN FETAL LIVER, SIGNAL = 1.4; EXPRESSED IN ADULT LIVER, SIGNAL = 2.2
aacagcatgttggtgtccttcatgtactggacacacacctggagcgtggcacgaaggcctcatcaggactgtcccttgccacacactagagccacccagtccccagatgctgacttcagggacagcttggagtggggatgcaggctcgagtggtgtctccctgccagggagaatccacaaatgagggttttccggtcacccccaggcctgtgcgactcacagtggggactagagaaagagagaaggggagaaccagaaagtcaccaggatcccttgggtctgctcacctgcctggagtccagaatctggaagagtgggaaaagcaagacaggcatgagagaggtgacagccagagggatgacttctgtgcaccagtaaatggccatgaggatgatgacgtaggcacacctgacaa

SEQ ID NO: 10918 - DNA, 477 bp, Homo sapiens
  MAP TO AC002094.1; EXPRESSED IN PLACENTA, SIGNAL = 0.7; EXPRESSED IN ADULT LIVER, SIGNAL = 0.81; EXPRESSED IN LUNG, SIGNAL = 0.67; EXPRESSED IN FETAL LIVER, SIGNAL = 0.71; EXPRESSED IN BRAIN, SIGNAL = 0.83; EXPRESSED IN BONE MARROW, SIGNAL = 0.73
tgggaaacagggtggataagaagagcagagatcggaatctggaaaacttgggtttaaggtcctgcagcaaaccttgttccaggaactttggtttcctaatctgtaaaatggggatgggacccccatggggtcagcctgccacccagaagggcagtaaatgaagcccccgagaaggcccccttcccttcatctgccccacgccaccatccccaaggctcacccatctccctcttcttgccctctccagcctgacggggtgggaggtcttgacgccattcccaggattgggcgctgcggtggccccaacacggggtggggccaacctgaagcagtgtgacctgctgatgctgaagttttcccagcggcagaagcagctctgctggagggacccctacctggctgagaccctgcgggacgctgcacacctgggcctgctccagtttcagtcccatcctgagttccatcctgagttccagc

SEQ ID NO: 10919 - DNA, 480 bp, Homo sapiens
  MAP TO AC004839.1; EXPRESSED IN PLACENTA, SIGNAL = 0.85; EXPRESSED IN ADULT LIVER, SIGNAL = 0.85; EXPRESSED IN LUNG, SIGNAL = 0.82; EXPRESSED IN FETAL LIVER, SIGNAL = 0.75; EXPRESSED IN BRAIN, SIGNAL = 0.74; EXPRESSED IN BONE MARROW, SIGNAL = 0.6
gccaaaacatagaagcactaggtctaagataaaacttgttttttgtcctttgttgtcaatagtgaaatagctaaatttgaggtcttgtgtaggaactgctccctgaagaaaaccttgctgataatgacatagagtaataatatgatatagcaaagctaactaatttggtagatgaaataccattttagtcagttaatgttagcattaagatttgtgtgctgtgaacagataaatgtaattttgaaattgtaggatccatgatgaccttaaaagaactgtagatctttgtcaaaaggctgaagcaacaggagtttcatggattacagtccatggaagaactgctgaagaaagacatcagccagtgcactatgattccattaaaataattaaggaaaatatgtctatacctgtaattgctaatggagacatcagaagcttaaaggaagcagaaaatgtgtggcggattactgggacagatgg

SEQ ID NO: 10920 - DNA, 488 bp, Homo sapiens
  MAP TO AC006377.3; EXPRESSED IN BONE MARROW, SIGNAL = 0.51; EXPRESSED IN ADULT LIVER, SIGNAL = 0.52; EXPRESSED IN BRAIN, SIGNAL = 0.64
tccaataagtaggaaaacaatttgcatattattaacatttcaagtttgtattcaatgtaattaccattcaatttccttccaactatacatcattttgtaatagctttggggtgggataaggggagggatctgaaccagtaattcattgtcgtttgtggtcagctccagtatattctaataactgaacgtgtcaaaagcctaaagctttttcattttgtgctatatttaatagaaaaagaaaagaagaattgggaagacttacttatgcagtcccatctcacttgccagcaccacctccctttctttgtagatgaagaatgggactcctttcacttttagttctattaaaatagctctggctttctctgtggttaaaaatatgagcttgatatcgctcaggtagtgacacaaggtaaacgctaatacaggaccaactcccatagctatttagaaaaaaaaatcctcctctgttagctatttctatcaca

SEQ ID NO: 10921 - DNA, 390 bp, Homo sapiens
  MAP TO AC003043.1; EXPRESSED IN BRAIN, SIGNAL = 0.65
agcagctgtctcaaggctgggtccctcaaaggggcgtcccagcgcggggcctccctgcgcaaacacttggtacccctggctgcgcagcggaagccagcaggacagcagtggcgccgatcagcacaacagacgccctggatggtcagaggggggcgagagggttggacgaggtgggacctggtccctggccatacccagccccaggatgggggttggcactgacctggcggtagggacagcaggcccagccctgtcggttgtctcggcagcaggtctggttatcatggcagaagtgtccttccccacactccacgtccttcacacccacgtgagggctacgggccaggaaggtggcaggctgggcagagaccacttccttctcgcaggatc

SEQ ID NO: 10922 - DNA, 410 bp, Homo sapiens
  MAP TO AC005079.1; EXPRESSED IN PLACENTA, SIGNAL =   1; EXPRESSED IN FETAL LIVER, SIGNAL = 0.89; EXPRESSED IN BRAIN, SIGNAL = 1.2; EXPRESSED IN BONE MARROW, SIGNAL =   1; EXPRESSED IN LUNG, SIGNAL = 0.88; EXPRESSED IN ADULT LIVER, SIGNAL = 1.2
cacatggtacagatggttaggcataggcttctgggatttaaataccagttatttattagctggatttaattttctgcaatttattttatctttctaaatgtgcatctgaaaaatggggatagtaactccctcttaagtgagacagtgatcttaaagagcagaatatagtccctagacatggtaaatgttgtctaagtgtaagaatacaatggcacaagagagcatctacttacagttcacagatgccacctctggcaggaatgagaggcacaagttgcagtaaaagcttgacaccattttgccattcttcttctctttcaaattcacagtacaagtagctacattcatcagaggaaaactggtagaaaacataagtatcttgaaagtatagatgctggtccactgtttga

SEQ ID NO: 10923 - DNA, 469 bp, Homo sapiens
  MAP TO AC006481.3; EXPRESSED IN BONE MARROW, SIGNAL = 0.58; EXPRESSED IN ADULT LIVER, SIGNAL = 0.68; EXPRESSED IN PLACENTA, SIGNAL = 0.58; EXPRESSED IN LUNG, SIGNAL = 0.59; EXPRESSED IN BRAIN, SIGNAL = 0.57
tacccgctggaggtaacaagcttgaaatttgggctttcaggttaattacactaagtaacagctgcttgtaggagaagctacacagaaggcaatgacaatatgcaaacaggctaactagtctcatgtttccaaccagcttcctccatccagggcagtccttcatggggagattcttctgagaccatgtatgtgtgtgtgtgttttgggggtgggggtgctacaacgcatccatcaggatgatcacgaaactgcagactcaccactacagcccaggcttccttcttctctttctttatccttatctggtgcttcttgtgccaacaccccagtgacttatgaagccagcaatagaaaagccaagagtactggaccctgtagccaaatgtgaagtatatttcctctttaatctgtgaaaatacatgaggcaaatgaaaagggctagcttacttctgtccttcctctcctccct

SEQ ID NO: 10924 - DNA, 469 bp, Homo sapiens
  MAP TO AC005261.1; EXPRESSED IN ADULT LIVER, SIGNAL =   1; EXPRESSED IN PLACENTA, SIGNAL = 0.93; EXPRESSED IN LUNG, SIGNAL = 1.1; EXPRESSED IN BRAIN, SIGNAL = 1.1; EXPRESSED IN BONE MARROW, SIGNAL = 0.99; EXPRESSED IN FETAL LIVER, SIGNAL = 0.98
tcccttgggattggtatctggaaaaggaaggaaggtgggacgtggggatgaagaacagactgggtgtgtggggtgctggctcctgggaacgagaactactgatagggctgggtctgtgtgagaagggaaagcggcagaggaaggatacaatgaaagaggaaggggagcattggcatccctgactttccctccgcctaccctacctcccaagctgaggcttttttcttcctctcctgtcaggcggcgcctcacagtcgatgactttgaaatcgggcgtcccctgggcaaggggaaatttgggaatgtgtacctggctcggctcaaggaaagccatttcattgtggccctgaaggttctcttcaagtcgcagatagagaaggaaggactggagcaccagctgcgccgggaaattgagatccaggctcatctacagtaaggacagtctctgcttcctctttcatctttgacg

SEQ ID NO: 10925 - DNA, 495 bp, Homo sapiens
  MAP TO AC005915.1; EXPRESSED IN PLACENTA, SIGNAL = 0.85; EXPRESSED IN ADULT LIVER, SIGNAL = 0.63; EXPRESSED IN LUNG, SIGNAL = 0.68; EXPRESSED IN BRAIN, SIGNAL = 0.82; EXPRESSED IN BONE MARROW, SIGNAL = 0.55
tcctaagtatggtatcatgaacgtcacatgttaggatctagcagagtttgaagaattattgtaaacccctgtaaacacagagcaaggtagaaagtgattttcatcgttctcttgctcctcttaccatcctacctgggaaatacactcccattcttatttggactgatttttttcctatgtagtgcagtggccttcattttaaagcctacaattcaacatgatgtttttgggtttagaagttatgttcttgatggtgtgaaagctacatcaaatttcagatttgtcttgtgtaatgtgatacatggacatgcggtcgctggtattggttgcttgtagccaaagaaccataaaaagtacacctaggaatagggcctatggttttgacagtaagtatcgttagagatatagctttccttctaagttggcctactaggttgagattaatgaggaaggtgtgtgtgtgtatacacataccattcactcaatcaattccag

SEQ ID NO: 10926 - DNA, 459 bp, Homo sapiens
  MAP TO AC005162.1; EXPRESSED IN BRAIN, SIGNAL = 0.62; EXPRESSED IN ADULT LIVER, SIGNAL = 0.71; EXPRESSED IN PLACENTA, SIGNAL = 0.73; EXPRESSED IN LUNG, SIGNAL = 0.86; EXPRESSED IN BONE MARROW, SIGNAL = 0.71; EXPRESSED IN FETAL LIVER, SIGNAL = 0.68
tcctccacctcgaataattaccttaaaaagaaaaagtaaaagaacggaaatttagagaaatggatattctaaatacatggaaagttttcattcagattaaactctatttaaaactcacatgaaatacagaacatattctcccaatgcatgcctttggacaagctgcctatctggctgttgatggcttttgtaacaggcatgttaaggtagaaaagttttaaagcttagttaattttacgcaaagttgtattcttttctcatgagtgtaaaaattgaaaattattccttgtctttttcctctagagagtgatctgcctgctccccgcagttgagagtgctgcactgcaagtgttacctggtgaggcccacctccagcccactacttctggggtatgtgaggtctgcctgcaatggggtggattgtctacttaattccacccttcagttagccagcccaat

SEQ ID NO: 10927 - DNA, 465 bp, Homo sapiens
  MAP TO AC005920.1; EXPRESSED IN PLACENTA, SIGNAL =   1; EXPRESSED IN LUNG, SIGNAL = 0.59; EXPRESSED IN BRAIN, SIGNAL = 1.3; EXPRESSED IN BONE MARROW, SIGNAL = 0.78; EXPRESSED IN ADULT LIVER, SIGNAL = 0.76; EXPRESSED IN FETAL LIVER, SIGNAL = 0.82
tcagaacatatccccattgttgactgatgcatgattatacttttatagataagattttttttttaaattggaaggtgtacagaagaaatgggggggaatatccagcgagaatgatggagcgggaatacatgaaattatcacaagaataggtatcttttaatccaccacagtgacactaattagtggaaatcttttgactgtttgagattattttggttccttttatttgtgcacttcacccagttgcctaagttgatgacccattattatacctcgactgatacactggggagaggtcttctgggatctgaactcccaaaggatctgtaaagacatgctctgtgtagacgccagtttgggagatgtccactgtgtcttcagctgaccccgcattcccttctgtagcttcagttgcttcttctgctgttggaacattttcatcaacctcactattttctgcttcca

SEQ ID NO: 10928 - DNA, 465 bp, Homo sapiens
  MAP TO AC004622.1; EXPRESSED IN PLACENTA, SIGNAL = 0.65; EXPRESSED IN BRAIN, SIGNAL = 0.6; EXPRESSED IN BONE MARROW, SIGNAL = 0.63; EXPRESSED IN ADULT LIVER, SIGNAL = 0.66; EXPRESSED IN LUNG, SIGNAL = 0.74
agccaataccaccaaaatggaaaatacattaaatctaacaacacttcaataaaggcatattaattgaacatttcttttcataggcattgaatacctaagtagaaaatcagctgcatgtaatgacaaaaccatacagacatttgtacctatttgtaccaacttaccttattattgcaaacatggaattgaagttcttacattctcgacaatgaagtgcaattttaataaaatgcttaataatcttcattcgtttgagctgatttgcttcagttaaaatttctgaggcaacccagaatgtctcttggtttacaatgtcctcaaacctcttcaaatgagtatttcctgttttggaatttaacttaaaaaggtcatcgatgtactcagtcggttcaatattacgaaacaaatcaaagtccctcattgacagctgggtggccacctcaatggtactgagctgcagcatgg

SEQ ID NO: 10929 - DNA, 494 bp, Homo sapiens
  MAP TO AC005104.1; EXPRESSED IN LUNG, SIGNAL = 1.2; EXPRESSED IN BRAIN, SIGNAL = 0.88; EXPRESSED IN PLACENTA, SIGNAL = 1.1; EXPRESSED IN BONE MARROW, SIGNAL = 1.1; EXPRESSED IN ADULT LIVER, SIGNAL = 1.1; EXPRESSED IN FETAL LIVER, SIGNAL = 1.2
ccacttgtgtgtgcaaaagggttgctgaagaaaaggcttatgtctaggggggcctcggtttcagagtcccatgagtctgactctgtgctgctggagtcctcggccgtcgtgggtgggtagctgagctgctctaactggtcgatgatgtcagagaactggaaggccgagctggactcagagcggactgagtaggctgggaagttgaccatggagctggcctcagattgactggctgagctgcatgtgtgcacagacagcccaccacgtagtggcatgttattgagggagctgttttcagactggctgtttctcagtgagctggtctcagaaggacccagcaggcgctgcatccggctggcctgcgccttcacctcaaatagctccgaggtgtctgaggggtgtgcgttcccattgaagtcactttcctcctcaaatgcaaaaccgtcttctgtgttcatatctactgcctccatggagtacctgtctgggctgga

SEQ ID NO: 10930 - DNA, 461 bp, Homo sapiens
  MAP TO AC005144.1; EXPRESSED IN PLACENTA, SIGNAL = 0.78; EXPRESSED IN LUNG, SIGNAL = 0.8; EXPRESSED IN FETAL LIVER, SIGNAL = 0.73; EXPRESSED IN BRAIN, SIGNAL = 0.56; EXPRESSED IN BONE MARROW, SIGNAL = 0.61; EXPRESSED IN ADULT LIVER, SIGNAL = 0.76
tgtatcaacacctaccgccgccaccaccggcgcttcagtgattttatgttcagtttgatttctccagacagaacttttccacatcattggaactaattgaggtaatggagaaattattctggtgccagaacactcttactttctttcacccacttctccctttggtattgaaagacaacaatacgcacagtctctccgtgtttctttacagtcaaaaggggagaacttgattatgtcgctatggcacccaggctgcttctggacaattaaggctagaaaacagactctcacctccgtctttctttgcttcccagggctgcacgttctggcatgtccctgtgccatgctcatgagctgcttctcagtggggatttcagaatcccctctgttgttctccgactgaccgcaagaaatctaacattcgctaaaacaactagcagatggaaacaaacattttatga

SEQ ID NO: 10931 - DNA, 453 bp, Homo sapiens
  MAP TO AC002449.1; EXPRESSED IN PLACENTA, SIGNAL =   1; EXPRESSED IN LUNG, SIGNAL = 1.1; EXPRESSED IN FETAL LIVER, SIGNAL = 1.1; EXPRESSED IN BONE MARROW, SIGNAL = 1.1; EXPRESSED IN ADULT LIVER, SIGNAL = 0.83; EXPRESSED IN BRAIN, SIGNAL = 1.2
aacctgttgctcacattttgcccactctcttcctggaattccattaccacctttctttacttgattatatccagctcatccttcatgatttagctcatctccaaatcctcagctaaggctaagtatacattcttaattttctcatagcacctttttcagatctcttatatggtgagctcatttatttattgaactttgtcttccacttcattctcaaagtcaagaattaagtgttatttatctttgtattctttatgtccaccatggttcctttcacatagaggcacacaacaagtatcggctgaactacatgaaacacactaacaagtgtcattttctatgtgaagccttttccaaccatgagcaaagctttgcttacagctatagtcactgttaccaagctgcaggttgaggctactacttttgtggattggtcagtgaatgagttttaaa

SEQ ID NO: 10932 - DNA, 474 bp, Homo sapiens
  MAP TO AC005151.1; EXPRESSED IN LUNG, SIGNAL = 1.1; EXPRESSED IN BRAIN, SIGNAL = 0.94; EXPRESSED IN ADULT LIVER, SIGNAL = 0.97; EXPRESSED IN PLACENTA, SIGNAL = 0.89; EXPRESSED IN FETAL LIVER, SIGNAL = 0.8; EXPRESSED IN BONE MARROW, SIGNAL =   1
agtgctggttactcggatggcacatatcccagtgcccagctcctcccctccctgcccaaaaggaacaatgagcctctgcaggtaggtgctgccatccccagccagcccaggaggtgtccccagtgctggacccagttggcacatacaaagcggtggcaggcactgaaggtgcggttggacaccatgcgaaggcagggcgagcagtcagttgtggcgcagctgtctgggcggaagcgggtctggcccactgaggtcagggagctgggcacctgccagctgtccagaaagggagcagggtcctcagccccacccaccactgagccatccttcagggtaaggtcattggctgcatctccatcacagatacctgaaaggggccaaacaatcccaacagccacgatcatcactaccactcccatgtcgtcagctctcactttttgtattcctcacagttctttgaggtcaataatacca

SEQ ID NO: 10933 - DNA, 487 bp, Homo sapiens
  MAP TO AC005549.1; EXPRESSED IN LUNG, SIGNAL = 1.3; EXPRESSED IN FETAL LIVER, SIGNAL = 1.1; EXPRESSED IN BRAIN, SIGNAL = 1.3; EXPRESSED IN PLACENTA, SIGNAL = 1.1; EXPRESSED IN BONE MARROW, SIGNAL = 1.5; EXPRESSED IN ADULT LIVER, SIGNAL = 1.3
atgccttctcaggggatgtcccagggcacatgccagtttctgggcattggatgcctacagtcctgatgcccagtacaagcttctgctgtgatatcttgctatgaaaatgtgttggccatttttattatataatgcatagggaggtttccatttcctaagctttttttcatccccattctgtctgcccatgacaaaaagctgaaggtcaaagaagtaaccccagaatcaagccagggcctcagctcctcacacagcagccagctctcaccagaaggtcccaccctgccaggccctctcctgtctcctcacctcatgtcaccctcagccccactctctgcttccagaacacaccatagctccattccaccttgaggcctttgcccatgctggaccccagcacctggtacagtatcttccatgtcgtaggttcttaacaaatatcatttaaattaattattaacagttcaagaatctctagtcacttccc

SEQ ID NO: 10934 - DNA, 487 bp, Homo sapiens
  MAP TO AC005667.1; EXPRESSED IN PLACENTA, SIGNAL = 0.73; EXPRESSED IN BRAIN, SIGNAL = 0.83; EXPRESSED IN ADULT LIVER, SIGNAL = 0.86; EXPRESSED IN LUNG, SIGNAL =   1; EXPRESSED IN FETAL LIVER, SIGNAL = 0.84; EXPRESSED IN BONE MARROW, SIGNAL = 0.9
ggggagcttgatattgtgatgtgtgagttattctatggagctattctatgtgagctattctatattttagacagcaaacgtatcccaccacttggaaatatcacccattttgattgaaaacaaagtagaatcaatgacctgaccaaatcacacgtgtgtgtgtgagggagactgggtctttccactcctgatgttttctttcttctgaaaggagtccaaacactccttgcttctctccacccgccccctcttccctgagaaggaggagtggtttaatatgactggtgagtttggaaggaggaactgtgccttatatcatcctctcttttcttcttgggagcaagcttcgctcccgtggggtgggaagagtaggcccattccagctcagctgcctgtcatcgagccgccaagtctgcctaactctgaagttgagtatcgggaagctcgattgtctgatgatataagccacgttctctaatatcagctt

SEQ ID NO: 10935 - DNA, 476 bp, Homo sapiens
  MAP TO AC003669.1; EXPRESSED IN PLACENTA, SIGNAL = 1.3; EXPRESSED IN ADULT LIVER, SIGNAL = 1.2; EXPRESSED IN LUNG, SIGNAL = 1.3; EXPRESSED IN FETAL LIVER, SIGNAL = 1.3; EXPRESSED IN BRAIN, SIGNAL = 1.2; EXPRESSED IN BONE MARROW, SIGNAL = 1.4
gccccaggtagctcaagaagatcattcctacttataatctaaaggaccatttgttcttataatatttcattcttatagtctttctattggtaattaatggtcagtgactgaaagaaggaggaaagcagcgcaattctgatcatctgtaggggctgtcctattattctctaaaatctttcaaactctaatattccataactttatgaggcctgggaatggctgaccaatgtgttaagaatgagccagaatgcctttagtcactgtccctctttcccatacactgccccacaactgtttgtgtgtacagttccttgcttacctcttcaaaggtatgttccacatcttcaatcaactggccgcggctgtagtcatagccatctaccccatttacttcatagtctcctctccaataatccccatagtcctcataatctgtttgtttttttttttaaagagaaagggaagaacataaggga

SEQ ID NO: 10936 - DNA, 479 bp, Homo sapiens
  MAP TO AC002037.1; EXPRESSED IN PLACENTA, SIGNAL = 0.96; EXPRESSED IN ADULT LIVER, SIGNAL = 0.83; EXPRESSED IN LUNG, SIGNAL = 0.94; EXPRESSED IN FETAL LIVER, SIGNAL = 0.69; EXPRESSED IN BRAIN, SIGNAL = 0.89; EXPRESSED IN BONE MARROW, SIGNAL = 0.8
cccatcacctcctcaaattcaaccttcagaggaatgtgtgtgagagccgtcatgactccatgctatcaataaggagactgggcttggagaagttgggagtgaggggcatggaggtggaggaaagaagggaagacgttgcagaggcaggtgcttgtggaagggcaagtgctggggctttgaactggcatctgtgtgattcctagtgctgtgctgctcacacagggccgtcggtgccagctcttccatgggcacttgcactctggctgtcgctgtctacctttacctcaccagttggcagccagattcttccagaccagtgatcagaaagggcctctgtgtctctagtccctggtcactaggctctcgggatcctgctctttttatgggagccgagttggcaggagcttggcttctgaccagctgctggaagaaggatgagaatcagatcttcagaagggtggacctttcttggtggattg

SEQ ID NO: 10937 - DNA, 459 bp, Homo sapiens
  MAP TO AB019440.1; EXPRESSED IN PLACENTA, SIGNAL = 1.3; EXPRESSED IN ADULT LIVER, SIGNAL =  50; EXPRESSED IN LUNG, SIGNAL = 1.3; EXPRESSED IN HELA, SIGNAL = 6.3; EXPRESSED IN FETAL LIVER, SIGNAL =  13; EXPRESSED IN BRAIN, SIGNAL = 1.2; EXPRESSED IN BONE MARROW, SIGNAL = 0.82
ccaaagttcacatacataggatgggtcccaataaaaacattgggtcttaatgagcacattcctttccttttctggggtcacactgagataggaaagctgttagcttgcacggggtttgggatgcctccagctgcaaggaggtaccagggacctggcatggaaactcctcccccctttttcagcacatgcatggtggaaggagataaggaacgtggagcagaccaagctaagtccccacctgcataataaaagcatgagatggggctgccagagacttcgctctctgcagatggcacacctggtcctgcttttgcaccttatgttgataagaagccatctccccacgagcacatttataaaaatccttacgttgataagatactgtctccccacgagcacatttataaaaatccttacattttactgcggcacagcaacccatctgggaccctttctgtg

SEQ ID NO: 10938 - DNA, 458 bp, Homo sapiens
  MAP TO AC003103.1; EXPRESSED IN ADULT LIVER, SIGNAL = 0.64; EXPRESSED IN PLACENTA, SIGNAL = 0.83; EXPRESSED IN LUNG, SIGNAL = 0.73; EXPRESSED IN BRAIN, SIGNAL = 0.87; EXPRESSED IN BONE MARROW, SIGNAL = 0.78; EXPRESSED IN FETAL LIVER, SIGNAL = 0.76
agtttcaggtaccacctcccaataagcctgaggttctcccttacagtttttttgggtgctacaaacaccatggtcttcagcttcctgaaatgctagagtgaggacctggactgtaatggaaggaaaaagctttggtttggaatcacaggatgtgggtgctgtagtgccatggctgtaacattctccaggaggaaaccaacagctacagggtccctaaaggcagtgaatggaaatgtggaaggcacgctacctgctttctcggtcagcatacatctccatgtgccgggggttgatggaggagtcaatcaccacccaggagccaccccgcagctcagcctggggaggaatgtaaaccagcacaggctggcagcactccctcaagccatccacaatgtaagcaccaaacttcagcacttggtcgtacatatctatggagaatgagacaaattagaaatcaa

SEQ ID NO: 10939 - DNA, 491 bp, Homo sapiens
  MAP TO AC005726.1; EXPRESSED IN PLACENTA, SIGNAL = 0.95; EXPRESSED IN ADULT LIVER, SIGNAL = 0.71; EXPRESSED IN LUNG, SIGNAL = 0.71; EXPRESSED IN FETAL LIVER, SIGNAL = 0.69; EXPRESSED IN BRAIN, SIGNAL = 0.58; EXPRESSED IN BONE MARROW, SIGNAL = 0.73
tttgcctgattgttttctcctagtcatttctctactcagtcacctagacacctctaaaaacatttactattccctgcttccacctccatcccatcctgttgggcctgacctattgtgaaatccacattgccacattttctgcattgacctactactgttgctattaccagtgacagataaaggttagctttctagaagagaccccccccatttctttctcctttctctatttcactttactacaagacttgtctacttaaaaatcatattcatttccctttccattcctttaggaacatagtgagaagaagcaacgggtcaggttccagcttgagatctctagcaatccagaggagcaacgcagcagcatactgcatttgcaggaggctgtgcggcagcatgtggcccaaatacgacagctggagaagcagatgtattctatcatgaaggtagtcactgcagatagatagtttgagaaccaggaagtctcc

SEQ ID NO: 10940 - DNA, 480 bp, Homo sapiens
  MAP TO AC005849.1; EXPRESSED IN LUNG, SIGNAL =   1; EXPRESSED IN BRAIN, SIGNAL = 0.57; EXPRESSED IN PLACENTA, SIGNAL = 0.81; EXPRESSED IN BONE MARROW, SIGNAL = 0.61; EXPRESSED IN ADULT LIVER, SIGNAL = 0.62
tgtctccaaacacatcgtctctaattcagtctctagatcaaggggttcgtaaggaccttaaaggctcattacacatatacatggtactctatggaaaggactgtcaactctatggaagcgaaccctgatagaacatcgtgaaagtctggaaggattataccactgaagatgccatcattgttatggaaaaagccatgaaaaccatcaagcctgaaacaataaattcctcctggagaatactgcgtccagatgttatgcatgatttcacaggattgatgataaagccaagcaaggaaatcatgaaaaagattgtggatatggcaaaaaagatggggtgaagggtttgatatggatctcagaaaaattgaagagcttaatagacaccacccaagacgaattaacagaagatgactcgatagagatgagtgcttctgaacctgtgccagatgaagaagaagatgtagaagcagcagtggcaga

SEQ ID NO: 10941 - DNA, 457 bp, Homo sapiens
  MAP TO AC005695.1; EXPRESSED IN PLACENTA, SIGNAL = 1.5; EXPRESSED IN LUNG, SIGNAL = 1.5; EXPRESSED IN FETAL LIVER, SIGNAL = 1.3; EXPRESSED IN BRAIN, SIGNAL = 1.5; EXPRESSED IN BONE MARROW, SIGNAL = 1.3; EXPRESSED IN ADULT LIVER, SIGNAL = 1.3
cctcaagggactggtgtactgtgtgagaaagacacagaaatagaatattctaattcagattgttaattgttaactaaatccacacgtcagcagataccaacataacctttggtgggcctgagccagtggcaggcgtcactaagagactgctaagtcttctgcagcccaagtgaatgaagcctcaagtccaacaaggtgtcttgttgcctctctggatgggctgctgttttttttaatggcacagatggcagataatagaggacgatacttagaactagtggcatagctggaaacttgagttcctctagcaaaaactctagaaagttcatcttatgaggcagaatttgcatcttgaagaaggcgtaggaggctgctggcaggtgtttctctggctcgaatgcagatttggtctctatgtcttttcctcctagagatgggaactccctgggtcagacac

SEQ ID NO: 10942 - DNA, 483 bp, Homo sapiens
  MAP TO AC003108.1; EXPRESSED IN PLACENTA, SIGNAL = 1.7; EXPRESSED IN BONE MARROW, SIGNAL = 1.1; EXPRESSED IN ADULT LIVER, SIGNAL = 1.4; EXPRESSED IN LUNG, SIGNAL = 1.4; EXPRESSED IN FETAL LIVER, SIGNAL = 1.3; EXPRESSED IN BRAIN, SIGNAL = 1.1
caattggtttaaacagctgtctctcaatttatcaatgttaggtgttacgtatttacttcccgtgatggtgggtgaggatttgtttttcctgcattatcactcactcccctcacacccctgtcctcctagagggtcatcagagcagagttgtacaagaggggaaaatggggctcagaatgtggagattcactgttgtaagtttctttccttggaaatacatgagggatgaaaacaggagtatgattctgccaccgttgcactgctagcgttaatgtttcttcccttctcctaggcctgtgttgcctactgcttcatcaccatcccctccctggcgggcatcttcacacgtctcaatctctacctgcattctggtcaggtggccttggccaaccagtgcctctcccaaggtaagtccatcattctctcatctcgggcactcccttgctgcttaggaaaactgactcaggtgtgtgcgtatgtgtg

SEQ ID NO: 10943 - DNA, 459 bp, Homo sapiens
  MAP TO AC005137.1; EXPRESSED IN LUNG, SIGNAL = 0.92; EXPRESSED IN PLACENTA, SIGNAL = 0.84; EXPRESSED IN FETAL LIVER, SIGNAL = 0.98; EXPRESSED IN BRAIN, SIGNAL = 0.91; EXPRESSED IN BONE MARROW, SIGNAL = 1.1; EXPRESSED IN ADULT LIVER, SIGNAL = 0.98
ggcatttcttgttctgtcccaacaatcatgctctatagaatctatctggctactagacagcctcctccatcagactgtgagcaacctgaaaacagagaccaatctgtctggctcacaactatacccagcccctagtacaaagccaagtacaaagtacttgtgtaaatagttgctgaaatgagtgaatggtatgtccatttgatttccaggagccgtgagcatccaccctctgagctcctctgtctcagaacaacccatcccagggctccctgaagacaaaggaacccaagtggcccacaagagctggacccagcacacttactggtggtacattcgcagcacatcatagagatagtccttctctgcatcattttcaatcagaaaatccacctggaaaatccaatagcagaatcacagctccaggctcagcacccgcccccatagcagacctcagggagg

SEQ ID NO: 10944 - DNA, 479 bp, Homo sapiens
  MAP TO AC002067.1; EXPRESSED IN PLACENTA, SIGNAL = 0.85; EXPRESSED IN BRAIN, SIGNAL = 1.1; EXPRESSED IN BONE MARROW, SIGNAL = 1.1; EXPRESSED IN ADULT LIVER, SIGNAL = 1.1; EXPRESSED IN LUNG, SIGNAL = 0.96; EXPRESSED IN HELA, SIGNAL = 3.1; EXPRESSED IN FETAL LIVER, SIGNAL = 1.1
ttctgcactgggagataaaggagtcaagcaaatgaaaataaaagtaccagcattattgctgattgatgttaaatttgagggagtaacttagctgtgtgataagagatacctgatgctgaataccagaattcgaccagcttaaccacccaccacaacaggtagcaggggaaaactgtggcctccccctgcaggggcagaacttttaccactaaacttaccttgaggctgagagcagaccaaagcacatgcaaccagacaaatctcaaagagaaaagaaggggaggaaggactaggctacgtggtcaaagtccctgctcctaacgtcactcaccagatcaaagaatcttttcctggggatgcagatgaagtgagagagtccaggagtgttgtgctgatggcctctacgtggaccaataactatggagggagaaatacttagtactctgcacttgccctggagcctgctgattccctattca

SEQ ID NO: 10945 - DNA, 447 bp, Homo sapiens
  MAP TO AC005857.1; EXPRESSED IN ADULT LIVER, SIGNAL = 1.3; EXPRESSED IN PLACENTA, SIGNAL = 1.4; EXPRESSED IN LUNG, SIGNAL = 1.4; EXPRESSED IN BRAIN, SIGNAL = 0.97; EXPRESSED IN BONE MARROW, SIGNAL = 1.1; EXPRESSED IN FETAL LIVER, SIGNAL = 1.3
cactcattgattgatgggcatttggactggttacatatttttgcaattgcgaattgtgctgccataaatatgcatatacaagtatctttttcgtataatgacttcttttcctctcggtagatacccagtagttatgcaaaggttttagaaagtgtggcagatagaggttacgaaatagcaaagctcaataacatgagacatcgctgtcttacagttgcctggccccactcccatcctacctcagggaccatctcctggactggcctccttagccccaactccagacatcacatgcccaaccccatcatccttgtcagagctcaccctacttctttctactccccagaactcatgaaattcctctggtttcattttgcagagtggtttagccttatctttgttgtgaaaatccttccagatggcccagcagggaatagaggtgggtca

SEQ ID NO: 10946 - DNA, 489 bp, Homo sapiens
  MAP TO AC004857.1; EXPRESSED IN PLACENTA, SIGNAL = 0.84; EXPRESSED IN LUNG, SIGNAL = 0.99; EXPRESSED IN FETAL LIVER, SIGNAL = 0.78; EXPRESSED IN BRAIN, SIGNAL = 0.94; EXPRESSED IN BONE MARROW, SIGNAL = 0.87; EXPRESSED IN ADULT LIVER, SIGNAL = 0.87
cattccttatgcttttggcagtttctctcttaattttttttaattttctttttcttcttcagctcaggtacctgacaatgatgagcagtttgtaccagactatcaggctgaaagttgtaagtatagtatgactcatctcttgtatttttctgtctttctggtttccttctttcttctttctctttggttggttttcacgtccagtgtcttgtcttacattgtaccagcacctttttaacttacagccataagatgatttgatttgttaggttgtgacatcagcagaaactctgttttgagcagaatgcttgaattctgtatatcggaagagaactccaaatagtaggcaaggaagactgagttgattgaaagatggtcttgttcttcatattggtaaatatctttgggaggaaatagcatgtgatccatgaacatgcacatgtttacttccagtttgccaatatgcttacagagaaatgcctggatgct

SEQ ID NO: 10947 - DNA, 479 bp, Homo sapiens
  MAP TO AC005697.1; EXPRESSED IN BONE MARROW, SIGNAL = 0.84; EXPRESSED IN PLACENTA, SIGNAL = 0.92; EXPRESSED IN LUNG, SIGNAL = 0.99; EXPRESSED IN FETAL LIVER, SIGNAL = 1.1; EXPRESSED IN BRAIN, SIGNAL = 0.79; EXPRESSED IN ADULT LIVER, SIGNAL = 0.95
tactgcctcccattctcaggccaagctccttcccatattcttccccaaagattccaagcttcttcagggccagccccgcaccatgtcccttccttcttcacataccgtcaggcacagcgaggtgcccaataatcagcggctgcattgaattccaacagggactttcaagaagcaatgaggagatcagacctcaggtgagagaggaggagcagagagaggaattctgagtcatcggtgccgacagggcatgggtgcccaaggagacaagcaggaggttcccccagggaaaactcacctggaggtggcacagggggctttctccacattgttgttgatgtctttttccccattcattgcatactggtggaatttggtcttgaacagaaatttccaaggacaggccatctctatggctttacaaagcaggtcacttatgtcacttatctggatttgagctcagatgttcttcactgtggggc

SEQ ID NO: 10948 - DNA, 461 bp, Homo sapiens
  MAP TO AC002070.1; EXPRESSED IN LUNG, SIGNAL =   1; EXPRESSED IN FETAL LIVER, SIGNAL = 1.1; EXPRESSED IN BONE MARROW, SIGNAL = 1.1; EXPRESSED IN PLACENTA, SIGNAL = 0.91; EXPRESSED IN BRAIN, SIGNAL = 0.96; EXPRESSED IN ADULT LIVER, SIGNAL = 1.1
catctgcctgttccctgttcctcaggctgacgctcccgctgtcctccccgcctcccctcactccttttctccctcccttcctccttgtggggaggctcttggccagggtccctgagcccgggcgggtgctggcagaggacgcagaaggggtgaggtcacgtctcccttgagccccgagccgctggcttttcagagcctcgccacaagccggcggccagagccccagaccacacagaccgtgcgctcctccgccctcccggcgccgccggcctcgcccatgtctcagtacgcccctagcccggacttcaagagggctttggacagcagtcccgaggccaacactgaagatgacaagaccgaggaggacgtgcccatgcccaagaactacctgtggctcaccatcgtctcgtgtttttgccctgcgtaccccatcaacatcgtggctttggtcttttccatca

SEQ ID NO: 10949 - DNA, 449 bp, Homo sapiens
  MAP TO AC002541.1; EXPRESSED IN FETAL LIVER, SIGNAL = 0.9; EXPRESSED IN BONE MARROW, SIGNAL =   1; EXPRESSED IN PLACENTA, SIGNAL = 0.97; EXPRESSED IN LUNG, SIGNAL =   1; EXPRESSED IN BRAIN, SIGNAL = 1.6; EXPRESSED IN ADULT LIVER, SIGNAL = 0.84
acaaaatgtcacactggccctttactcttgctggcagaaagaagctgcctcacatgaaaaggcaaaggtccactgagctgttaatgcttaagccatccgtgaatggcagagctaaatgagcatgtaacacaccctctggggctttgggagtagcaggcacccccgcctggatgctgccacagggactgcacagagttcactgctgctggtgcccaaaaatggtcagccagagcctgtactcattcacctacttattccctcccacaaggggataagcacagtgagctgagtaaatggagtttgttcctgccagcggtcaaaagcacttgctctgtttcctgcactcatttgccctcatgttacctccagcgagtggtagacaggggaaagctaagcaagtgaggcactcctgttgcgagtcccatgacggggtaaagaaaatattctga

SEQ ID NO: 10950 - DNA, 480 bp, Homo sapiens
  MAP TO AC000062.1; EXPRESSED IN PLACENTA, SIGNAL = 0.83; EXPRESSED IN BRAIN, SIGNAL = 0.6; EXPRESSED IN BONE MARROW, SIGNAL = 0.77; EXPRESSED IN ADULT LIVER, SIGNAL = 0.82; EXPRESSED IN LUNG, SIGNAL = 0.77; EXPRESSED IN FETAL LIVER, SIGNAL = 0.83
ttgcagttccatgaataacctgtatgcaattaacatctgatttctagaatgaaagggagtcaaagtaattaactttcttgaactacaaaattattcttatatggggaacatttgtcaccattaagagacaggctcttgggaatgtactaataaagattatgaaagaaaggactgtgatacggaagaaaatattttagtgagtagtgcttggggttacttgtgaaataaaaagtttctcagtaattggcagtgctaccagtgttctaatcacctgcattttcctccataggtcatcagctcaatgagctccctttctgagtactgcctgccttccattctacgtacattatttgactggtataaaaggcaaaatggcattgaggatgaatcacatgaatacagaccaagaacaagcaataaatcaaaaaggtacatttcttttgtgtaaggatcatggttttattttgttttgttttcagg

SEQ ID NO: 10951 - DNA, 478 bp, Homo sapiens
  MAP TO AC000382.1; EXPRESSED IN PLACENTA, SIGNAL = 0.69; EXPRESSED IN LUNG, SIGNAL =   1; EXPRESSED IN FETAL LIVER, SIGNAL = 1.2; EXPRESSED IN BONE MARROW, SIGNAL = 0.65; EXPRESSED IN BRAIN, SIGNAL = 0.64; EXPRESSED IN ADULT LIVER, SIGNAL = 0.55
  unsure 36
  unsure 274
  unsure 429
  unsure 443
tatgtccgttcggcaaatgagccaggaaattatacngcccaaacaccgccagcacgccgtgcgggcgatgtctcaggctcgccgcgccgtccggcatttcactaccctgctcgccggtacgaacgtgatacgccttaattgatatcgcgattttattgatcatcgccgtcacttcggttgcccgcttctcagcgcggcttacccgtttctctggcaataatcgcggttaatcggctttattgcttccagcagtgcggcaaagcgttcgacaacngcatgacgttcagcaaatgaaaaccgcgccagcgcggaaacccgcacgggctgcccgacaagctgctcgagctgagcggcatcggcatcattgccttgccataacacctcgccgaataccgaaataccttcacacgcgatgcgccctggcccgtnattcaatcaccgtnaatcatagagtcatgctgttttctcctctgcgcac

SEQ ID NO: 10952 - DNA, 447 bp, Homo sapiens
  MAP TO AC005154.1; EXPRESSED IN LUNG, SIGNAL = 1.3; EXPRESSED IN BONE MARROW, SIGNAL = 1.3; EXPRESSED IN ADULT LIVER, SIGNAL = 1.1; EXPRESSED IN PLACENTA, SIGNAL = 1.3; EXPRESSED IN FETAL LIVER, SIGNAL = 1.4; EXPRESSED IN BRAIN, SIGNAL =   1
aaggtatggatgttggaagggaaagcagagaaactgaactctgccttggtaaacagaatctaagggtagaccaaaaccataccatgggagactggagatcaattcgaagttcatgggcacttattaccagaaacaccagacagccagagatctgctggccctggggggcaatcctttcctttctttgcttggtaaagggtgggtccagttgatgaagacggtctggtcctctcttccaggcaaagagaggacggagattgggctggggccaggtatctgggagctgggtctgctctcctgggtggagctttcccaggccagtggtgcagaccaatggggactgaagttggagatcctggtaagacagctccagggatacccaaaggaaaaaaccaagctaatggaggcagccagaaaacaggacacaccgcagaacaaaagatggat

SEQ ID NO: 10953 - DNA, 471 bp, Homo sapiens
  MAP TO AC002076.1; EXPRESSED IN LUNG, SIGNAL = 0.94; EXPRESSED IN BRAIN, SIGNAL = 0.88; EXPRESSED IN PLACENTA, SIGNAL = 0.85; EXPRESSED IN BONE MARROW, SIGNAL = 0.87; EXPRESSED IN ADULT LIVER, SIGNAL = 0.89; EXPRESSED IN FETAL LIVER, SIGNAL = 0.95
gaagcatcaagcaatatactgaaagaagtgtcatgctcaagtaatgttcttatttccataattgtacatctgatactctctgctctcttaaaaaagactgcatagtgagcaaagatgagtagcacatatgcttttatacataaccctatctatatggtgcttaagaaagtctccttttaatttcattcttccttccttaaaaagcatgttggttttatctgggaaaactaaaacaaactagttcttccacttaggatgcagtttctcccaagttatttatgaaataacacagctgcctttttctttaaaggggttcttgtcttctggaattccctttactagaggatcctctccagaacgttcttcaatatagttctttatttcttcagaacatttagacaccttaagtatagaaaaaaaagagaatacattaggttagggttgtttaaactttgtccctacgccttaatg

SEQ ID NO: 10954 - DNA, 451 bp, Homo sapiens
  MAP TO AC005740.1; EXPRESSED IN ADULT LIVER, SIGNAL = 1.1; EXPRESSED IN PLACENTA, SIGNAL = 1.1; EXPRESSED IN LUNG, SIGNAL = 1.2; EXPRESSED IN BRAIN, SIGNAL = 0.99; EXPRESSED IN BONE MARROW, SIGNAL = 1.1; EXPRESSED IN FETAL LIVER, SIGNAL = 1.4
ccccatgagccctatcaaggaagttcctgagatgatatctccatttatggaagagaattaggaggcaaccatcagcagggtaaacagttacctgaccaggagtggccaccgaagggcactttggttctgggcagttgaggcattgaacctggccatctctgatctggatttcaaagtagtccttcagacaggctttgcagtacacatgcctgcactccaagaagtacatgcattcactacccagcttctcacagaaacagatactgcacaggaacaatttactattaaagcattttatctgctgagcttgatcaaagtccaagatttcctggatcagatttgacagtgattccacatcctgcactgctctctcatccacaatttcctcttggtctacatcagatccagcagctcctccaaaatctagctctgtgttgggagaagcttgagc

SEQ ID NO: 10955 - DNA, 468 bp, Homo sapiens
  MAP TO AC004914.1; EXPRESSED IN PLACENTA, SIGNAL = 0.88; EXPRESSED IN ADULT LIVER, SIGNAL = 0.95; EXPRESSED IN LUNG, SIGNAL =   1; EXPRESSED IN FETAL LIVER, SIGNAL = 0.91; EXPRESSED IN BRAIN, SIGNAL = 0.91; EXPRESSED IN BONE MARROW, SIGNAL = 0.89
atgatgctagcacccaggtctcggggttccctgccaggatctttccaccttctcgcttggtgggaggcatatgctctttggtcagagagaagtccaggttggcccggtgtgaggggaaccatccctcagcacaagcttctttgctctggtgccagccgagtgtcccagagagaggcagtgcctgcctctggtgaggggtgagaactgccttaagaagtgggactgcaaaaacagtgactgactgggggccgggatatctagctatgccattttcatgaaaaagttggttcattttaaggaaccaccctccctctggacctccctccttttcagccacttgaaccagttactcatccagttgaagttcttgcctatagccagggaggtgaggagtttatccccttccttccagtcttaaattactaattaaaatgtcttggagactaagcccattgcaaaaatagcctg

SEQ ID NO: 10956 - DNA, 466 bp, Homo sapiens
  MAP TO AC005261.1; EXPRESSED IN PLACENTA, SIGNAL = 0.98; EXPRESSED IN LUNG, SIGNAL = 0.86; EXPRESSED IN FETAL LIVER, SIGNAL = 0.98; EXPRESSED IN BONE MARROW, SIGNAL = 0.96; EXPRESSED IN ADULT LIVER, SIGNAL = 0.93; EXPRESSED IN BRAIN, SIGNAL = 0.78
acaccaggagaactggttggtaggcgagtatttgggacccttcatgccagacccagagttgagacagcatctgtctgcacacttgcctggttctgctctgggctggacacagtggtgagagggacatgaggagagagcagacactagtggtgccaaggtctgttatctcctcttagttgggaggctggggaggcgagggactagagagtgggtgtgtgagtgtgtagactggggaggagggggttctggggagagatgctgactgtggactcagctgtacttatcatggcagagttgtgtgaccttcgaggatgtgttcgtgtacttctctcgggaggagtgggaactccttgaggaggcacagagattcctgtaccgtgatgtgatgctggagaactttgcacttgtggctacactaggtaagtctgtgttttagttatctaatgctacatggcaaattatccca

SEQ ID NO: 10957 - DNA, 491 bp, Homo sapiens
  MAP TO AC004677.1; EXPRESSED IN PLACENTA, SIGNAL = 0.96; EXPRESSED IN LUNG, SIGNAL = 1.2; EXPRESSED IN BRAIN, SIGNAL = 0.99; EXPRESSED IN FETAL LIVER, SIGNAL = 1.2; EXPRESSED IN BONE MARROW, SIGNAL = 2.7; EXPRESSED IN ADULT LIVER, SIGNAL = 1.6
cagccaagaaacagtataccaggaaaaatcaactaacaccccactaacagtctttagaccagttcatacaagggaatgaccagagcagctcctgactgttagactagaaagatgtccttctgcgtatccttcaattgtacaagaatttacatttaaccaaaggggtctgtgcaagtagcaccgtggtacttgtagtctcaattgagtcatagcttctagagtgctgttccctgtataccttacatagctttttcaccacttttgttgatttctttgtcagcttctttccctttttctcctcctttgtcagttttgtcttctctgttgattccttcctctttttcttctccactatcagctcctttctctcctccattcttggtgttctcttcttctccactgtcagctcttttttctcctccattgttgactcctttctctccttctttgtcctgaacactgatataaacagctttgttatagccttcccg

SEQ ID NO: 10958 - DNA, 468 bp, Homo sapiens
  MAP TO AC005666.1; EXPRESSED IN PLACENTA, SIGNAL = 1.1; EXPRESSED IN LUNG, SIGNAL = 1.1; EXPRESSED IN FETAL LIVER, SIGNAL = 0.94; EXPRESSED IN BRAIN, SIGNAL = 5.6; EXPRESSED IN BONE MARROW, SIGNAL =   1; EXPRESSED IN ADULT LIVER, SIGNAL = 1.5
aatctcctcccggatctgacaaacagatgaggggcccacagttctggggaccacatcctttctagaagcccacctgatcccctcccaccaccagcttccctcactttgcgtttcttgtggtccacttcgggaggtgtcagtgtgtctgccttagccaggataggcacgatgttgacccgctgatgcagggccttcatgaattcaacatccaatggccggagcctggggaacaggaacctgtgaccacctgctagtggcagccctgcccctggtgctcttggcctgttcccttgacagcacccggtggtgccaggagcctcaggcttggaccatacccatggccgaagggtgagatgaagtacaggcagcagtgcaccctgttgtcttggatgttctttcggttcaggccactctcgtctcggaaatactgctcaaactgctgatcaatgtattctgccacaggcttcc

SEQ ID NO: 10959 - DNA, 474 bp, Homo sapiens
  MAP TO AC002080.1; EXPRESSED IN PLACENTA, SIGNAL = 0.72; EXPRESSED IN LUNG, SIGNAL = 0.55; EXPRESSED IN BRAIN, SIGNAL = 0.63; EXPRESSED IN BONE MARROW, SIGNAL = 0.66; EXPRESSED IN ADULT LIVER, SIGNAL = 0.67
agaacctctaacattgtgtggcaatgctatgctcactggacaataatgttactttttcacatacctgctaacaataaaggaaaggaaggaatcagatttttaaaattttaatcaccgttatgacaggatttgcacacatagttgctaagtctagaaaattccatcaaatgatatttacatgtaccttttgtgtacttactttataattaattaacaaactagatacccctctggaagctctttccaccccttctcttcacagatcacgaagatcccattgaatggcttgggctgcagacatttccagtcctgcagtcaatgcctctctgccccaccctttgttcagtgtggctggtgccacgacaaatgtgtgcgatcggaggaatgcctgagcgggacatggactcaacagatctgtctgcctgcaatctacaaggtaggaatctctaacagctggcatacatgtttttgttt

SEQ ID NO: 10960 - DNA, 479 bp, Homo sapiens
  MAP TO AC005157.1; EXPRESSED IN BONE MARROW, SIGNAL = 1.1; EXPRESSED IN PLACENTA, SIGNAL = 0.96; EXPRESSED IN LUNG, SIGNAL = 0.94; EXPRESSED IN FETAL LIVER, SIGNAL = 1.2; EXPRESSED IN ADULT LIVER, SIGNAL = 0.92; EXPRESSED IN BRAIN, SIGNAL = 0.85
ctagacaggaaaagggtgggctcggcttcctcttttcctctctttctctgtcttctgtctccatgatgatgctcccttgaccctccaagagtcacagggatcctgggggtggggaggtcagtgttccatatatttctccttaagcatcacactacaatatgggccctatttgccttttggtgtgggctgccccatgcagcctcttagcctcaagagtctcagttcatatacatccacaaactctggcaaatggcccatgaacttttccatattttcctctctggcagcagaagcaaggatgagctatgggttcaacagctcagcaagaatccaatcagtgagaaggttaacaccctgcttcttgtaggacccctaatcatcaccagtgatttccctggagccctcctcatttggcttagtgggaggaaaaatttagatttagaaagtgttctttaggaaaacctatgaactgtgactct

SEQ ID NO: 10961 - DNA, 465 bp, Homo sapiens
  MAP TO AC003693.1; EXPRESSED IN PLACENTA, SIGNAL =   1; EXPRESSED IN ADULT LIVER, SIGNAL = 1.1; EXPRESSED IN LUNG, SIGNAL = 1.1; EXPRESSED IN FETAL LIVER, SIGNAL = 1.1; EXPRESSED IN BRAIN, SIGNAL = 1.3; EXPRESSED IN BONE MARROW, SIGNAL =   1
aagcactcggcttagctttgcccatgtgcctgggctgtgggtggcagagcccggccagcatcctccgatctccaagggtgcatctctactggaggcccctcctgggcctcttgctccccgcttcccagatcattaggatatttggggtccagaagggcctcccagccatcctgggccttgtcctccggggccaccagtccagccagtgacaaccacagcatccccggcctggaacgaggctgcccccagcacgttcctcgtactcctgtccagggacaggaggggctgcccctgccaccgagtccccttctccaggacctggggcctgtgggtgtgaggcaggtgttcttggaaggggtcactctccaggcacccggcggccaaggcttgtggctggagcagctcccgctgtggggtcggcgtcgggccccgtgtggccggagaggagctgaagggtcacttagc

SEQ ID NO: 10962 - DNA, 465 bp, Homo sapiens
  MAP TO AC005799.1; EXPRESSED IN PLACENTA, SIGNAL = 1.2; EXPRESSED IN LUNG, SIGNAL = 1.1; EXPRESSED IN FETAL LIVER, SIGNAL = 1.6; EXPRESSED IN BRAIN, SIGNAL = 1.2; EXPRESSED IN BONE MARROW, SIGNAL = 1.2; EXPRESSED IN ADULT LIVER, SIGNAL = 4.4
atgaagccagtgctttttgggaaaaacggagcaaggcaacgcacgacagaagcggtgcaccaaggagtaaagattcagttccatgggccccacttgctgtttgagaaaatgtcctgcttccttcctagctgacttgactcccagcagtaacaggtgggagtgaggacgcagggtcggcactcgagtcgactgctctggctccaggcgtattttctgaaactggactctgccagcccttagcttgtcaagttagcctggccagagtctggggccgactgttccactgggccgtcgactatgacactctgctgtccatgggccactatgcacccctccactgtccttaggatggtttggagccttcgatccagggcaaggaggtggggttcagtgaggacagggctgagctggtcttccagcagtgattctcgcatcacatcgctgagtctgtagtcagcttgggcc

SEQ ID NO: 10963 - DNA, 480 bp, Homo sapiens
  MAP TO AC005277.1; EXPRESSED IN LUNG, SIGNAL = 0.89; EXPRESSED IN BONE MARROW, SIGNAL = 0.9; EXPRESSED IN PLACENTA, SIGNAL = 0.92; EXPRESSED IN FETAL LIVER, SIGNAL = 0.79; EXPRESSED IN BRAIN, SIGNAL = 0.63; EXPRESSED IN ADULT LIVER, SIGNAL = 0.79
acccaacttgatgtccaaccattcaatttgattccgacactaactacctggagtcagcactgaccccacagtttaaaggctcagccccacaagactaccccctacttcagatgccaacaacaaatggggtctccaggctacttgcactgataagaccctgaaaaacaggatgtggaccaagcaggctggacctaacatggcactgactttgacctaggtttctcctaggacctcattatatgttcattaacatactcaacacacatccactagcatcatgactgttcctagaacacccatatttggtgtaaaactgggtggcaccacggttccaagaaatctttttccaggaactttcatgaatattccagctcgtgttaaagaaatccataaaggtaacaacgccaaagtcccttccatgtgacttttttgggtatgcccataagctcatttcttgagtgtgtcctttttgctttgcaa

SEQ ID NO: 10964 - DNA, 481 bp, Homo sapiens
  MAP TO AC005017.1; EXPRESSED IN PLACENTA, SIGNAL = 0.9; EXPRESSED IN ADULT LIVER, SIGNAL = 1.2; EXPRESSED IN LUNG, SIGNAL = 1.1; EXPRESSED IN FETAL LIVER, SIGNAL = 1.2; EXPRESSED IN BRAIN, SIGNAL = 1.1; EXPRESSED IN BONE MARROW, SIGNAL = 1.9
caaatccagcatgtccagtgccctcgagatggggcagctgccggaaggtgtgaatccactggtctaatggagccaactgaagacactgaggatcctgcttcatacagctgtctgtcctccacatacaggaattggtttattttggcatacactgataatcaaaaccgtgcacttcctgtgtcctgtgtggacatctgttaatgatgcaagaggatctatatgaacattagattctatcttgaatctaactctatactgccttcaactgtagctttctctggctttttagattgttttccaggtccctcttgaggtgcttttcaggtttactagatatttcttctattgtcaccactgtgtcgaaggagcagatcatgaaccttggtcttcttcagctcatgcaagtctgtggacgcttacaatgtctgatgttccctggctcttgaatgctaaggctgccacttccaccaacagcaacctt

SEQ ID NO: 10965 - DNA, 468 bp, Homo sapiens
  MAP TO AC003670.1; EXPRESSED IN PLACENTA, SIGNAL = 0.93; EXPRESSED IN BONE MARROW, SIGNAL =   1; EXPRESSED IN FETAL LIVER, SIGNAL = 0.75; EXPRESSED IN LUNG, SIGNAL = 0.76; EXPRESSED IN BRAIN, SIGNAL = 0.94; EXPRESSED IN ADULT LIVER, SIGNAL = 0.73
caaacagttggaggggattggaaggctccatgtttttagttattttcagttctaactcatgacaaagcaaaaacactgagaccgaagaggctgacaaatccagttcacagaaagaaacattcaatagggatttacagaagtgatgtcttgggcagccatgagatggtggatccctgcacccaccctccagaaagtattctttacatagcaagcttttagggtaaagcatgtgctgctgcttgtcacaccttcagattttctcgtggatacttgtgaccacttctttatgaagggtaatttatactacaggcattgtttaaaggccttgctgcagaacaccctggcctatgggggtcaaacatcagttatcatggtgcttttgcttcaagacagcatcactcttaccatgcaacagctgttttcctacatatacaaatgtgtacatgaagagagaaggaagcaaaaaca

SEQ ID NO: 10966 - DNA, 491 bp, Homo sapiens
  MAP TO AC005162.1; EXPRESSED IN PLACENTA, SIGNAL = 0.69; EXPRESSED IN LUNG, SIGNAL = 0.84; EXPRESSED IN FETAL LIVER, SIGNAL = 0.7; EXPRESSED IN BONE MARROW, SIGNAL = 0.72; EXPRESSED IN ADULT LIVER, SIGNAL = 0.7; EXPRESSED IN BRAIN, SIGNAL = 0.81
tcataataaaccatcaaggcatcattatttagtgttttttcttctgaaaagagcagtgcccccagactgaacgtatcccatgtagttcggggaggatgatatctcctgacaatggcatctctacctcacatcttccttcaccactcagaaggcacaggtttccttaaaagtattcatcctggcagcaaggaaggtaaaaagaaaactgtccttttctacacacattaggaaattatatgcataaaaccacaaggcagatgtgaaataaccaagtcaaatttttcatctgggatttggcagttttgccaaacatcatggtttgtatcaacatcaacatcatggttaacaacatcaccacattatttccaagacaaggcattacacacgaagtagaccactcttctgtgggaggtggagaatgggcattttccagggttgttgccaaataatgggagtgtcacttcctattcacttccctaacctggctctga

SEQ ID NO: 10967 - DNA, 385 bp, Homo sapiens
  MAP TO AC004526.1; EXPRESSED IN PLACENTA, SIGNAL = 0.66; EXPRESSED IN BONE MARROW, SIGNAL = 0.53; EXPRESSED IN LUNG, SIGNAL = 0.56; EXPRESSED IN BRAIN, SIGNAL = 0.85; EXPRESSED IN ADULT LIVER, SIGNAL = 0.49
gggaactcttccttaaatggcatagtgttttgtttggttggttggtttctggagccttttagaattttatgtaaaagagtttaattcttctccacttcaccccgtcaccaccactttccaggttggttctactgctgtccaagtaacttcagcagagcgaacaaaagtcctagggcaatcagtctttctaaatgacatttattatgcttcggaaattgaagaaatctgcctagtagatgagaaccagttcaccttaaccattgcaaaccagggcacgccgctcaccttcatgcaccaggagtgtgaagccattgtccagtctatcattcatatccggacccgctgggaactgtcacagcccgactctatcccccaacacaccaag

SEQ ID NO: 10968 - DNA, 393 bp, Homo sapiens
  MAP TO AC003953.1; EXPRESSED IN LUNG, SIGNAL = 1.2; EXPRESSED IN FETAL LIVER, SIGNAL = 1.2; EXPRESSED IN BRAIN, SIGNAL = 1.3; EXPRESSED IN BONE MARROW, SIGNAL = 1.1; EXPRESSED IN PLACENTA, SIGNAL = 1.2; EXPRESSED IN ADULT LIVER, SIGNAL = 1.2
aaatgtggaggtaaggagctgcatttgaattttttgactaaatgtctccaaaaccaatagaaaagagtaagcctcttgaagagtgtggatagatacatgagaattttctcaacatatttttaaaatgttgggactatgaagttgaggaactatgtttatcacttaataaaggctattttaaagcaaaaatacaatataaatatttattactattttctcctatagttatcttacagcttattttttgacaatatacacttcttcagcttctcccaccccacctataagcttatctgcaacaatcccatcattacgtctttctttctttttgccaggatgtcattcttcttgtctacagttaaccctttagcctgtgccctggatcacattctc

SEQ ID NO: 10969 - DNA, 485 bp, Homo sapiens
  MAP TO AC002301.1; EXPRESSED IN PLACENTA, SIGNAL = 0.57; EXPRESSED IN BRAIN, SIGNAL = 0.66; EXPRESSED IN BONE MARROW, SIGNAL = 0.6; EXPRESSED IN ADULT LIVER, SIGNAL = 0.49; EXPRESSED IN LUNG, SIGNAL = 0.68
tgctcttttcttcccactccagccccagaatgttgacagtcgctctcctagcccttctctgtgcctcagcctctggcaatgccagtaagtgagataccaggagcctggtaatggggactggggaaggcagccttgggcactgctgttggccaaggcttttggaggttggcttggggtggggagctgagttgtcggaggaacaggggtggtgcagagaaactgaactcctggaagatttctccctccaactcctgcttgcccctccagttcaggccaggtcttcctcctatagtggagagtatggaagtggtggtggaaagcgattctctcattctggcaaccagttggacggccccatcaccgccctccgggtccgagtcaacacatactacatcgtagggtaagattctttgaattcctggctgggcgcggtggctcacatctgtcattacaatgctttgggaggcagaggcagatcgcttgag

SEQ ID NO: 10970 - DNA, 449 bp, Homo sapiens
  MAP TO AC004240.1; EXPRESSED IN PLACENTA, SIGNAL = 0.67; EXPRESSED IN LUNG, SIGNAL = 0.72; EXPRESSED IN FETAL LIVER, SIGNAL = 0.77; EXPRESSED IN BRAIN, SIGNAL = 0.94; EXPRESSED IN BONE MARROW, SIGNAL = 0.55; EXPRESSED IN ADULT LIVER, SIGNAL = 0.73
caatgccaatgatttgttcctatagtagacaagataaaatgtttgaaattgccctcatatttcttattaacaaactacaaataaatgatttttattaaaagtctcttatacccttgaccataagtaactactacataggaataatgtcaatttgtattggtaaataacatctgcaattgtatcactcagtctccaattattcaatttaagtgcacttaatctatagcagacaactttgctgctcatcaaattacagctgcatgatgaggccagctgctaccagacacaccttaaaacctttggaagcagcaatgtgggcagcagtccagccttctctgttggcgtggttaatgaggtctgcaggaacaacaggcttggatatgccttcaggactctcttctcctccatccaagtcaaagacacttgactcggactcctcctcattgaaa

SEQ ID NO: 10971 - DNA, 491 bp, Homo sapiens
  MAP TO AC003080.1; EXPRESSED IN PLACENTA, SIGNAL = 0.62; EXPRESSED IN BONE MARROW, SIGNAL = 0.49; EXPRESSED IN ADULT LIVER, SIGNAL = 0.51; EXPRESSED IN LUNG, SIGNAL = 0.49; EXPRESSED IN BRAIN, SIGNAL = 0.59
tcaagataatacagagaaggaattcagaattctatgagataaatttaacaaagagattgaaataattaaaaagaagcagaaattctagagttgaaaaatgcaactgacatgctgacgaatgcatcagagtctcttaatagcagaattgataaagcagaagaaagaattgggaagcttgaagacaggctatttgaaaatacacagtcagaggagacaaaagaaaaaagaatagaaaacaatgacgcacttctacaatatctagaaaatagcttcaaaagtgcaaatctaagagttattggtcttaaagaggaggtagagaaagagatagtgctagaaagtttctttgaagggataataacagagaaattcccaaacctagagaaagatatcagcattcaagtacaagaaggttacagaacaccaagcagatttaacccaaagaagactacctcaaagcatttaataatcaaactccgaaaggtcaaggatga

SEQ ID NO: 10972 - DNA, 478 bp, Homo sapiens
  MAP TO AC005057.1; EXPRESSED IN ADULT LIVER, SIGNAL = 1.3; EXPRESSED IN PLACENTA, SIGNAL = 1.8; EXPRESSED IN LUNG, SIGNAL = 1.6; EXPRESSED IN BRAIN, SIGNAL =   1; EXPRESSED IN FETAL LIVER, SIGNAL = 1.5; EXPRESSED IN BONE MARROW, SIGNAL = 1.2
tcgagagctacccattcctgaggatacacaaaaaagataaagttgaggtcgtgtcattaccttgctgcgcaaacatggaaaaattcatttggaagacatacaactcaagtgatggaaggttcaatgaaatcattttaagagcttttgcttccaacagaaaacaaaaaacgccaggcttgcagaagcatcagccattctttctaggattttacgcaaacttttaagagctcacgagaacctatcacacctatgagataatcgagttctactaggaacgttcacgagttggaattggtaggcatactgcaaatctttatgatgttcagctttagaagaaccaatcacctctgtcatctggtccaccttttctgaatccaaagccacctttatcttgttttctgccttctgcaatgtccacacgaagtgaccgatcgcccaacagctaatgataaagggaaaatagtgtaagtattggcaa

SEQ ID NO: 10973 - DNA, 430 bp, Homo sapiens
  MAP TO AC005166.1; EXPRESSED IN LUNG, SIGNAL = 0.92; EXPRESSED IN BRAIN, SIGNAL = 0.97; EXPRESSED IN BONE MARROW, SIGNAL = 0.89; EXPRESSED IN PLACENTA, SIGNAL = 0.86; EXPRESSED IN FETAL LIVER, SIGNAL = 0.87; EXPRESSED IN ADULT LIVER, SIGNAL = 0.94
tttaaactacagacccagagaactgatagttacttttattaacctctcctctgattataatacgactgtattagaagaccttaagaacaaattcagtaaagtaaaatttcatttcaatgcctttttataacctttcagttcccagaataggaataataattagcactctcatttctagtgcttgaaaaacaatgaagtatgtgctttaaagaacgaagttatatcattttcacctgcatcgatgctccttctactcttgccacacaggcgacccgatccaagaaagtcactgccacaggcaccgccacaaagaagcctttacaaaaggccttgatgtatcttttcacccacccttgtgactgtgccatacctaaaaatacaaagaaaacaactatgaaattagtctcaagaaaggtgaaaaacaaagaca

SEQ ID NO: 10974 - DNA, 481 bp, Homo sapiens
  MAP TO AC006534.2; EXPRESSED IN PLACENTA, SIGNAL = 1.6; EXPRESSED IN LUNG, SIGNAL = 1.7; EXPRESSED IN BRAIN, SIGNAL = 1.4; EXPRESSED IN BONE MARROW, SIGNAL = 1.6; EXPRESSED IN FETAL LIVER, SIGNAL = 1.4; EXPRESSED IN ADULT LIVER, SIGNAL = 1.7
  unsure 214
  unsure 270
gcagctgtgttaaatctggccattagaggtaacggaaaatctttaccaccctcaaaggccaagatgtagaccagaatgaaaatatttttcatttgagggagccgagtgatttggatgaagctctttgtaccgaagggtacagctaaatatgacaatatttacttagttgatctctctgttccctttctgagggccggtccttagcaaacaacantttaatctctcacccttgacagttattggaaaagctagatgtatctccttttgttnctgttctctctcccttaacagagaattcaacagatatttagatctgtggggaccaatgaactggctgccaaggagttcttggtccaggaaggctatgacccagggacctggagacttagtcacccaacttaaggggaaagttcaaaatcaaattctgtctgaaaaacatttaattatgccacgtcaggggcccatgcttctaggacagcct

SEQ ID NO: 10975 - DNA, 392 bp, Homo sapiens
  MAP TO AC003084.1; EXPRESSED IN LUNG, SIGNAL = 1.3; EXPRESSED IN FETAL LIVER, SIGNAL = 0.99; EXPRESSED IN BRAIN, SIGNAL = 1.4; EXPRESSED IN BONE MARROW, SIGNAL =   1; EXPRESSED IN PLACENTA, SIGNAL = 1.3; EXPRESSED IN ADULT LIVER, SIGNAL = 1.2
acaatagtatccaagctccccatgggcagtgcaaccggccagtgtacatcaattaatctcaccaccagaggcaaatgtgtcagaatgctcactgtgacttgctccaacccactgaagcaactgcacttcctatgtttgaattgggtcatatttcagtgcgtctgtgacccactacctatttgtgtttctattcttggatattttaaaggtttgtcttgaggggtggatgggggagaccatgtaggcctgtagtggagttttttgttttgttgggttttgttttgttttttagagcctgaagaccaggagcagaatgccctcattttacacagagagacactgaggaaggaggactttggtacctctgagccaggcagtggcgaagaaattta

SEQ ID NO: 10976 - DNA, 473 bp, Homo sapiens
  MAP TO AC004457.1; EXPRESSED IN PLACENTA, SIGNAL = 0.72; EXPRESSED IN BRAIN, SIGNAL = 0.72; EXPRESSED IN BONE MARROW, SIGNAL = 0.58; EXPRESSED IN ADULT LIVER, SIGNAL = 0.65; EXPRESSED IN LUNG, SIGNAL = 0.69
agtttctctgcgagactgcctaatgtgccactgacgctgtctctgacatgagaaggacttaaatgccagtttactaaagttagtattatacaggggttgatagcctgatttatggagttggcattcctgagttcttaacacagctttgctgcttactatgggacctgtgctcattcacttagtcctatttcgctatcacatattcactatctgttaagcataactgttttgaggattgaatgaattaatatgattagtaagtagtcaataaatactggcacttactgttgctgtgcttggttttgtctttgacactaactagcttcttgacatcagcatcagttttctcatcagtaaaaggagtagttaaatggtagttaagattcataaaattctatgttgaggaatattggattatacatattacactcagaaaaaattattttgaagtaaaagctgttgtagaactcctt

SEQ ID NO: 10977 - DNA, 449 bp, Homo sapiens
  MAP TO AC005686.1; EXPRESSED IN PLACENTA, SIGNAL = 0.77; EXPRESSED IN ADULT LIVER, SIGNAL = 0.7; EXPRESSED IN LUNG, SIGNAL = 0.76; EXPRESSED IN FETAL LIVER, SIGNAL = 0.82; EXPRESSED IN BRAIN, SIGNAL = 0.68; EXPRESSED IN BONE MARROW, SIGNAL = 0.71
acatcaaaatatcattgtgtccctcagtcccacaacaccgggttgatatgaaagcccttatcacaagaatctcttgtactgaaaagacctgggtttgaatcctgcctccactacttacaactgtgaactttagtaagtacttacctctccaagtcagtttgctcacctgtgaaatgtagatagcatgccatgacattgtgggaagggtcagtgttatattctctcagtggagggcccacagtaggtgttcagtaaatgctacttactttcttttctcttcctcctcctcctcctcctcctcctccttgtcctcctcccctaccttcttttccttcttctcctttctctctagtaaaatggagatagtcgtagcatccttacctgtggagttattgtcaggattaaatgtaaaacatttagactagtgcctcaaacacattaaatgctgc

SEQ ID NO: 10978 - DNA, 492 bp, Homo sapiens
  MAP TO AC005094.1; EXPRESSED IN BONE MARROW, SIGNAL = 0.93; EXPRESSED IN PLACENTA, SIGNAL = 0.62; EXPRESSED IN LUNG, SIGNAL = 1.1; EXPRESSED IN FETAL LIVER, SIGNAL = 0.87; EXPRESSED IN BRAIN, SIGNAL = 0.83; EXPRESSED IN ADULT LIVER, SIGNAL = 0.77
gaggcaatgtttcaggcttcaaattgaaggcaatgagaccaacaaaaatttaagcaaggctatatcagatatgaagaaacttgtaatgacctggattggagaccagacacagaagcatatccttctcagcaccatgaaaattatggccaaagcaaaaagtttgtgatgttgaaagaaaaggctggacctgatcacaatgttgaatttgctgccagctctgggtggtttaaacaattcaagaatcattattcattgcatcatgtaaaaatgagcagtgagtctgcgagtgctgatgtgaaggcagctgaagaatttttggaaactctggatgtgctgattgtggaggaaaattacttgccagagcaaatcgatagggatgaaaccttcctattctgcaaatggatgcctgagaggactttcatccataaggaagccaagttaacgccgactgtcaattctttgaaggacaggataacagttttgcttcgaggc

SEQ ID NO: 10979 - DNA, 455 bp, Homo sapiens
  MAP TO AC004534.1; EXPRESSED IN PLACENTA, SIGNAL = 1.3; EXPRESSED IN LUNG, SIGNAL = 1.3; EXPRESSED IN FETAL LIVER, SIGNAL = 1.1; EXPRESSED IN BRAIN, SIGNAL = 0.9; EXPRESSED IN ADULT LIVER, SIGNAL = 1.4; EXPRESSED IN BONE MARROW, SIGNAL = 1.2
tcccgctcctagcatcttacccttgtttctgctctattgctgtgatcccctaggtcattccccagatccccttatccctttcatccccatctcctgtaccactctgtgctcctctcagttaaccctctcctctctgtgtctatcttctctccatctacacccccctacccccacccagataactagagtgacctacccccgtaggttccttaccttgtcccccaggacccacaggggccgtccttgtggctgctgtcactgccagcaacatccatcagcagtggcatcagttggggggtgtggacagggccaagggggaaaggaagatcggcccttcgcacaggtggggggctgaagagtgggggggtcaccaccctctgagcaccctcactgggttgggtgggggccaaagtctggtcagaagtcagcagcatggggggctctaggaacagaag

SEQ ID NO: 10980 - DNA, 483 bp, Homo sapiens
  MAP TO AC005234.1; EXPRESSED IN BONE MARROW, SIGNAL = 1.2; EXPRESSED IN PLACENTA, SIGNAL = 0.89; EXPRESSED IN LUNG, SIGNAL = 1.3; EXPRESSED IN FETAL LIVER, SIGNAL = 1.1; EXPRESSED IN BRAIN, SIGNAL = 1.2; EXPRESSED IN ADULT LIVER, SIGNAL = 1.1
ttgagaacgtgtccatcctggcatccctccagcccacttcctgagttttgccctctactcatgagcccagacatgacaaagggcattctgacagagaaaggctcaccctgcctctgagaagatgcaatgtcaggaccactgtcctcttctgcttcccatacctcagcatcctccttaccctggggctcccagcgatggctggaaggttggagaaaggaggtggaacggaatgctcccttaacactcaccttgcccctgtcactttgagtccatgcctttcctgccatgttcaatagcctgctcccctccaggtgccacaatgacccaaccaagcccacagtgacagggaaacaggagcccaggatcatggatctctttctcatacggaagaacaaggatgatggtctcaccctttaggatgacacaatcttttgagttgggacgtgctgtctttgcttcttttcaatggagaccacaagcctc

SEQ ID NO: 10981 - DNA, 486 bp, Homo sapiens
  MAP TO AC004025.1; EXPRESSED IN PLACENTA, SIGNAL = 0.64; EXPRESSED IN LUNG, SIGNAL = 0.79; EXPRESSED IN BRAIN, SIGNAL = 0.95; EXPRESSED IN BONE MARROW, SIGNAL = 0.77; EXPRESSED IN ADULT LIVER, SIGNAL = 0.73; EXPRESSED IN FETAL LIVER, SIGNAL = 0.74
acaaaatgttggcctccttgccttcaaaatgctactctcctctggtgcaatgtatacttcagagtgctctgcaggatcaggttgaaactgaactcccagtgacagcccatgatcgctcactttcttcccctgcctcatcttgctctcctcactactcttctcctgagcattctcccctaataaaccacaggcacaagaattctgaaacccaacccaagacagttgtaaattcttcaatttgtagttttattattactcattattcttttctttttttattacctattattactttcttcttattttttattactgcaggcaacagccttgcatttcagtctggtaattaaggaggatgagcaggatcatgctttgggcaaagcaatacaagggaatgaagcaggaatgcaaagtgagtcccggaggaagtgtagccagcagcagggtggagggaaggagtggcctggaaccaggaggggattgagt

SEQ ID NO: 10982 - DNA, 460 bp, Homo sapiens
  MAP TO AC004531.1; EXPRESSED IN PLACENTA, SIGNAL = 1.6; EXPRESSED IN LUNG, SIGNAL = 1.7; EXPRESSED IN FETAL LIVER, SIGNAL = 1.5; EXPRESSED IN BRAIN, SIGNAL = 1.3; EXPRESSED IN BONE MARROW, SIGNAL = 1.7; EXPRESSED IN ADULT LIVER, SIGNAL = 1.4; EXPRESSED IN HELA, SIGNAL = 1.7
agacggtgatgaggcagttcctgagctaggagattggtaaggcataggctgaagctgaggagatggtggcccagaaagcggtgaactagccaagggatgagaagctgctggggaagctgttgtagcagaccctgaatgtgaaggaccatatgtaataggttgtaactgagacgaaggctgacctgtaatctggtcagccactggagaagaaagagatctttgtcctgtatttgaacaatgatatcccattgattgcagatgaggcagggtatgcacagaatgaggtgtatgggctaagagatgtcctgttgagcctgaatttgaagaatgaaatggtatggatgacagtggttgacagccaagattcactaaaccagaaagagttgcatcctgctgaaacaaaactgaatcaaattcttgactagaggcagcattaataggaagacaagttggtccattg

SEQ ID NO: 10983 - DNA, 470 bp, Homo sapiens
  MAP TO AC004968.1; EXPRESSED IN PLACENTA, SIGNAL = 0.97; EXPRESSED IN LUNG, SIGNAL = 0.84; EXPRESSED IN FETAL LIVER, SIGNAL = 0.85; EXPRESSED IN BRAIN, SIGNAL = 0.89; EXPRESSED IN BONE MARROW, SIGNAL = 0.86; EXPRESSED IN ADULT LIVER, SIGNAL = 0.92
ttcaggaagtacaggaaatcccaatatagatgatatcagcagaccagaccagtgaaaaattctgagaaacagaaagcatatggaaacagcacgaggacaaaccccatagggccaagagaactgtaactcgttacaagtaagaggacggaccttcaaataaattttcctagcagaatccaggaataactaaccatgtcagccgattctgggagaagcagcaggccttggatggtgagccagggaattaaaactcacacatcttatgggaaaatctacactactcaacagggtacactcaccatggcttctgtaataacagtctacatgcactaccaggtgaataaaagtctttacagcaaagctgaattcaactttttagttctaccacttactacaaataaatctatgacaatcgctactcatcccatgaaaatcagcaacatgaaaaggagtactgaactcaagaatac

SEQ ID NO: 10984 - DNA, 463 bp, Homo sapiens
  MAP TO AC004541.1; EXPRESSED IN FETAL LIVER, SIGNAL = 1.2; EXPRESSED IN BONE MARROW, SIGNAL =   1; EXPRESSED IN ADULT LIVER, SIGNAL = 1.3; EXPRESSED IN PLACENTA, SIGNAL = 1.2; EXPRESSED IN LUNG, SIGNAL = 1.1; EXPRESSED IN BRAIN, SIGNAL =   1
cttcctcaccctattcgcagcctcatcagggcagtaataaggattgtctttcctcaaatatttgtatttttcgaggaacaatagagtcccctgagaatttgtaaatttaagccaattttcacttaggatttcagtcaggattgacagcacctaggtggccctaaaatattccaaccaatgattgtttaaaccatattcattctgataattcccctagatactggtgttctcagtctgttctcccactgctgtaaagaactacctgagactgcgtaatttatgaaggaaacagttataactgactcttagttctgcaggctgtagagggttctgcttctgtggaagcctcggaaaacttacaatcacggcagaaggcgaagaggaatcaagcacctcttcatggtgagggcaggaggaagaaagggagcaaaaggagaagtgctacacactttcaaacaaccaa

SEQ ID NO: 10985 - DNA, 455 bp, Homo sapiens
  MAP TO AC005728.1; EXPRESSED IN PLACENTA, SIGNAL = 1.1; EXPRESSED IN BONE MARROW, SIGNAL = 1.1; EXPRESSED IN FETAL LIVER, SIGNAL = 1.1; EXPRESSED IN LUNG, SIGNAL = 0.99; EXPRESSED IN BRAIN, SIGNAL = 1.2; EXPRESSED IN ADULT LIVER, SIGNAL = 1.1
gaacactttggaccacccacttttgtgaatataaaatcacttaagtaaggcaagctgactttggtggaatagcctttatttttcatccacttacataactcggcattgtcaaagtgcaccaataactggtgctgtcatctctcatgcccccaagaaaaaactcctttggggctctttctacatttattttcaattgccagatccccagaggaaaaaatcaaatcactgacgctatttcaaacttcatgctcaaggcagccactaagaggataatagggcagctcagtttttgctctctttgagacaggaagacaccccatggctgtgaaggaaaggcaggacacgtgtgtggacattcaaaatatagcaaggaaacccaaaacaacagaaagacaagaggagctggaggaaaaagctgtttggaactatgaatcatcccaaggtaacttattatg

SEQ ID NO: 10986 - DNA, 490 bp, Homo sapiens
  MAP TO AC002533.1; EXPRESSED IN LUNG, SIGNAL = 1.2; EXPRESSED IN FETAL LIVER, SIGNAL = 0.8; EXPRESSED IN BRAIN, SIGNAL = 0.67; EXPRESSED IN BONE MARROW, SIGNAL = 0.84; EXPRESSED IN PLACENTA, SIGNAL = 0.94; EXPRESSED IN ADULT LIVER, SIGNAL = 1.1
aaggaaaacattgtcaaacaaactaaatctataccttctatttctgaaggcatatatttagtgagccactgcacctagccctacctgcttttttctaagcttcatataggccatggcctattagtgataataaaatcaatgtggttggtcacaaacagtgtatttccaaaataaagaaaacatgtagaaatcaagttcattgcaaatagtaacaaattgaacactgcaaatgttcaaataaatatacataaaaggtagagttggtatggggtgtctgctttttgtttctcttcacatggactggcaggataatttccataatagaggaaatagatcatctgagactaactatattagacaatgttggtacaacagatccaagatgaggtaagtgctcacatgacagctcatttcaaacccctcataaatcaggaacctgtggctatatttcaacacttcctatacaatcaataaaacatcagtgttcatt

SEQ ID NO: 10987 - DNA, 474 bp, Homo sapiens
  MAP TO AC006211.1; EXPRESSED IN ADULT LIVER, SIGNAL = 1.3; EXPRESSED IN PLACENTA, SIGNAL = 1.4; EXPRESSED IN LUNG, SIGNAL = 0.92; EXPRESSED IN BRAIN, SIGNAL = 1.1; EXPRESSED IN FETAL LIVER, SIGNAL = 1.4; EXPRESSED IN BONE MARROW, SIGNAL = 1.3
gctactgcagggtacaaccggccacactcaccccgggggcagagccttttattttccacggtccgcacggcaggtggaagacgcttcggcaccacccctgaccatgcacactgcaaagtctccggtcacacctgaggggatggtgcgtggctgtcctggtcctgagaggcctgtggttgactgtgatcattgtggccaccgtcgtcctcaggggccgggcccagcaatctcctcgcctctgggtcagccgacaaaggctcaccggcacattcttccagtccattctctctagtctccatgggcacctcctccccggagccctcctctggctctgccacctccactgccatctccgctgccgccgcctcctcttcctcctcctcctcctggtctctcaccttgtggacaatgaagaggtggcggctgagggagctggcagaggtgtagcacaaaccacagaggagacattgggct

SEQ ID NO: 10988 - DNA, 478 bp, Homo sapiens
  MAP TO AC004417.1; EXPRESSED IN LUNG, SIGNAL = 0.95; EXPRESSED IN BRAIN, SIGNAL =   1; EXPRESSED IN BONE MARROW, SIGNAL =   1; EXPRESSED IN ADULT LIVER, SIGNAL = 0.84; EXPRESSED IN PLACENTA, SIGNAL = 0.89; EXPRESSED IN FETAL LIVER, SIGNAL =   1
atctgtgtgaaacacggtgctgccaattgcacttacaacgactagctcgggatgggccagtgacataggttcagtaaggcagctcctgggtctttgctggaagaattaagaaagaagtggactctttctgcctggacttgctaaggcacagaacataaacacggagcgacaggggccacctggctggcacttggggagtcagacatcaaagaatgaagccatggaagaaagctgatgctagagatggagaatgtgttaaaccaagagcttcattctggagaggctcaagtggggagttcccaccttggttttctgtgctggtacatttctctttctttttgttctatgctattttgggtggagtttctgtttcctatagccagaagagcccgaatggagtcctaaaaacaaaaacaaaaacaaaacaggccatgcctggcagagaaggcccttctaaggaagggagtagttgggccag

SEQ ID NO: 10989 - DNA, 461 bp, Homo sapiens
  MAP TO AC005186.1; EXPRESSED IN BRAIN, SIGNAL = 0.57; EXPRESSED IN LUNG, SIGNAL = 0.54; EXPRESSED IN BONE MARROW, SIGNAL = 0.65; EXPRESSED IN ADULT LIVER, SIGNAL = 0.62; EXPRESSED IN PLACENTA, SIGNAL = 0.75
tggcaaacttcactgtggtcttattccacaaaattgccacagccaccaccctgatcagtcaaccaccatcaacatctaggcaagaccctccatcagcaaaaatactatgattggctgaaggctcagatgagcattagcattcttttagcaataaagggatttttaaaattaaggtatagttattgttttttcgacataatgctattgcacacttcatagactagaatatagtgtgaagacaagttttaaatgcactgagaaaccaaatacatttgtgtaacttgctttattgcaatattcagttgattgtggtggtctggaaccaagcccacaatatctccaaggtatgcctgtgcaaggtctacaccaacaactcacacagcaaagtcatgaaatccactctgtaggccagattaaggtttccctgtcacatgattgtgcccaatgaaattaattctttc

SEQ ID NO: 10990 - DNA, 477 bp, Homo sapiens
  MAP TO AC005923.2; EXPRESSED IN PLACENTA, SIGNAL = 1.1; EXPRESSED IN LUNG, SIGNAL = 1.1; EXPRESSED IN FETAL LIVER, SIGNAL = 1.1; EXPRESSED IN BRAIN, SIGNAL = 1.3; EXPRESSED IN BONE MARROW, SIGNAL = 0.99; EXPRESSED IN ADULT LIVER, SIGNAL = 1.2
caagtccaatgtgcgtgggatccatgccaatgtggcagccgccctgggggtggcagagctcctcttcctgctggggattcacaggacccacaatcaggtgcaggatcagggccagggaacttgtgtcctgatgaccctactggcccaggaggcctggggccaaaactcagggtcagaggtcagggatgctcaggttggggccagggttttcagcaggatgctggggtaagatattgtggtttaggggtgagaggtgggaagcagatgcctggggtaggggtcagaggtgggtgaggcaggagaggtcctgacacgcccccctgccctcagctggtgtgcactgcagtcgccatcctcctgcactacttcttcctcagcaccttcgcgtggctcttcgtgcaggggctgcacctctaccgcatgcaggttgagccacgcaacgtggaccgcggcgccatgcgcttctaccatgccctg

SEQ ID NO: 10991 - DNA, 483 bp, Homo sapiens
  MAP TO AC005145.1; EXPRESSED IN BONE MARROW, SIGNAL = 0.9; EXPRESSED IN PLACENTA, SIGNAL = 0.68; EXPRESSED IN LUNG, SIGNAL = 0.88; EXPRESSED IN FETAL LIVER, SIGNAL = 0.72; EXPRESSED IN BRAIN, SIGNAL = 0.67; EXPRESSED IN ADULT LIVER, SIGNAL = 0.64
caaagttcatgagaattactggaaagaatagcattcttttgatgaaaatctgctgatttgaggtctactttcaaaattttaatacttcatccatccaaagtaaaatatacattcttatcatccttgagattgatactattattgatgggagagtaatctaatgggaagaaaattggcttctagggacagttttacaagtatgtatctttagagttgttacttggtgtgtcagttcacctgggttggaactgcatttccaatatttcctctcccttgtggctagggttggccccaagagaaacttacgtgagattaaggaggtgcaagtgagcagcctttatgacctaaaggccagcgcagggcttcaagcactgctattgctcacgcatatcgttgcctatctgctggctcactttgttggttccagcatccaccaggtcttaacttgttcagcttccaccaggtcgtgcccttcagtttctc

SEQ ID NO: 10992 - DNA, 479 bp, Homo sapiens
  MAP TO AC005736.1; EXPRESSED IN PLACENTA, SIGNAL = 0.83; EXPRESSED IN LUNG, SIGNAL = 0.79; EXPRESSED IN FETAL LIVER, SIGNAL = 0.88; EXPRESSED IN BRAIN, SIGNAL = 0.8; EXPRESSED IN BONE MARROW, SIGNAL = 0.83; EXPRESSED IN ADULT LIVER, SIGNAL = 0.89
tttctttatagtaatttgaatgtggtgattttaatcctccatggttttcttatccttcctcaacaaacagcaaagaggctgctggaaagccacatgacatttgctgtgatttgcacggctgatgggaaaacactacttggttctgaaggacagggttgtcattggatacctttgccctctgacccgagtgagaatctcacctggacaaagacccgagttgtgaaatcacacagagaaagtgtgattccgaacctgctgctgtcctgtgcttcctgaggacaagtgagtgactgactccgtgtgccaggaactgcaggaggttaaaaactttcagaactaccatgcaaataagaaatttcaaaggacttttctctaacacacatttcatagtgaacgtctcagctggattaacataattaacgctgtgttctttctggctcctgaaagaaattgtgattaggaacactttcagggctgat

SEQ ID NO: 10993 - DNA, 468 bp, Homo sapiens
  MAP TO AC005045.2; EXPRESSED IN BRAIN, SIGNAL = 0.68; EXPRESSED IN ADULT LIVER, SIGNAL = 2.4; EXPRESSED IN PLACENTA, SIGNAL = 0.8; EXPRESSED IN LUNG, SIGNAL = 0.61; EXPRESSED IN FETAL LIVER, SIGNAL = 0.88; EXPRESSED IN BONE MARROW, SIGNAL = 0.62
tcaaccaccagtctgtaacctgaagtatggtggttttgagcttctcactacatttgtatgaggtaggcataatgtattcccatttacaaataaggaagcttggtatcctgaagtgccttgtccaagttgttaatgttagtaaatcaacatattttgttacaagattttgttggcataactttggtaattgtttgggggataaaaagtagtctcttctgatttcagctactctttaacttacgtggggtaacgtctcgatgaaaggatgtatgttggcagctttggctgcactcacaatttcatcctgtgatacaacccggctgttgtctccataggcaatattctcggcaatgctgcagtcaaataggataggctcctgagacacgattccgagttgagctctgagccactggacattgagtttctttgcttcttgaccatcgagaagctgaaaaccaaagtccacaa

SEQ ID NO: 10994 - DNA, 379 bp, Homo sapiens
  MAP TO AC004585.1; EXPRESSED IN PLACENTA, SIGNAL = 0.79; EXPRESSED IN LUNG, SIGNAL = 0.78; EXPRESSED IN FETAL LIVER, SIGNAL = 0.73; EXPRESSED IN BONE MARROW, SIGNAL = 0.68; EXPRESSED IN ADULT LIVER, SIGNAL = 0.68; EXPRESSED IN BRAIN, SIGNAL = 0.61
agctgcatctcataagttttggtatgctgtgttttcattttcattcatttcaaagtattttctaatttcccttgagttccttgattcatttccacatacttatggattcttcaaatttccttctgttactggttgtggtcagagaacagactttgtctgatctcaattcttttacattttttgagacttgttttatgtcctaacagatggcctatcctggagaatgttctatgtatatctgagaagaatatgtattctgctgttgttgggtggtgttttatagatagacgttaggtctagttggttcatagcattgttcaaatcttctgttttcttgttgatcaactgcttagttgttgtatctattattgaaaggagg

SEQ ID NO: 10995 - DNA, 471 bp, Homo sapiens
  MAP TO AC004382.1; EXPRESSED IN PLACENTA, SIGNAL = 6.3; EXPRESSED IN LUNG, SIGNAL = 0.79; EXPRESSED IN FETAL LIVER, SIGNAL = 0.73; EXPRESSED IN BRAIN, SIGNAL = 0.66; EXPRESSED IN BONE MARROW, SIGNAL = 0.7; EXPRESSED IN ADULT LIVER, SIGNAL = 0.73
tggtcagaggaggaaattgggcctcaggctacagctgatgcttagttgttctgaatccccgctcctagagctgactgtcccagagtgtagacattggaccctaagtggcttctcagaagctccaagggtagggtcttggagggctcagaatcctctggtcaccatccttccacatgagaacagaaaaactgcatctctttcctggagcctggagaggccgagatcaggggctggggccgagggtgacctctctgggctccagcttgtgaattcactggggacccctcccctaggcccctacggcgccaacatggaagacagcgtctgctgccgtgattacgtccgttaccgtctgcccctgcgcgtggtgaaacacttctactggacctcagactcctgcccgaggcctggcgtggtgtgagtagggagctggggccacagggccttggtgggcctgacgggtacagcctg

SEQ ID NO: 10996 - DNA, 470 bp, Homo sapiens
  MAP TO AC004390.1; EXPRESSED IN FETAL LIVER, SIGNAL = 0.78; EXPRESSED IN BONE MARROW, SIGNAL = 0.74; EXPRESSED IN PLACENTA, SIGNAL = 0.82; EXPRESSED IN LUNG, SIGNAL = 0.92; EXPRESSED IN BRAIN, SIGNAL = 0.93; EXPRESSED IN ADULT LIVER, SIGNAL = 0.79
gcaaggccgagagacagtagagtgcctcgccagttggagggatggagaggaagacggtggtgctggggtgcagtgagcaagggggaagagtggtcagaagtgaggtcaaagaggcaccaggaaccaaacatgtggggcctagtggatcacagtgaggagcgtggctttcgtcgaggcagccagcagccgtgggcaggggcaaagcccaagcttgaaacacaggaagacctaggttcagatattggctctgccacttaccagccccatgacctgggcaagtcacttcacctctctgagtctgagcctcagtctccccgtttgtgacacgaggccgatcctcactgggctgttgggataattcagccctttggaacccggtacgcaaatgccaggtattattaacaccatggaaggggctttgccaactgcctggtccaacctgcttattttccagatgaagagaacgaggc

SEQ ID NO: 10997 - DNA, 480 bp, Homo sapiens
  MAP TO AC004039.1; EXPRESSED IN PLACENTA, SIGNAL = 0.72; EXPRESSED IN LUNG, SIGNAL = 0.67; EXPRESSED IN BONE MARROW, SIGNAL = 0.95; EXPRESSED IN FETAL LIVER, SIGNAL = 1.3; EXPRESSED IN BRAIN, SIGNAL = 0.61; EXPRESSED IN ADULT LIVER, SIGNAL = 0.86
gttgcctgtgtgtgaagtgggtccctgtcccaccacatgtctggcaaggggggcacccactgtaatgctacagtgtgctctagggcaggggaggggtgtagggacatgtcatccctgggtccaccgagctcagggccctggacagaggaggcccaccaggctgagccctgggcaaggggaaggctgaggtcggctaggctgaagacgggcagcacaggctgaggtctaagctaaggaattttacccctccctaaccctccttcccgcctacccaagacatttttgacatcagaaagaaaaatgaatctgcaacttcaatagtcaggtcctgtctctgcaaataatgatgctttcgaagtttcagttgaactgtccctcgcgaaaaagtttctttaaatgtaagagcaggtcctttacaaactgggccacctcgattttggtgtctcggacatgcaagctggaaaactgctgcaggacaaa

SEQ ID NO: 10998 - DNA, 455 bp, Homo sapiens
  MAP TO AC005803.1; EXPRESSED IN PLACENTA, SIGNAL = 0.9; EXPRESSED IN LUNG, SIGNAL = 0.85; EXPRESSED IN FETAL LIVER, SIGNAL = 1.1; EXPRESSED IN BONE MARROW, SIGNAL = 0.89; EXPRESSED IN ADULT LIVER, SIGNAL = 1.1; EXPRESSED IN BRAIN, SIGNAL = 0.94
agggtggttcccagaaggccctctgaaggggagatgccaagggatggggcagaagccttcccacagagacccccagagtggaagttagaggagaacacagtgaacccctgagaatggtagtttacaatcttatggagactccttggacttctcaggaggtgctcgaataaaacataaaatagcaccaagatggcaactggctttacctccatcgtcttgttccagggaggggctgctgccagccttggaggcagagctgccggagcagagcgagtggttggaggccctgggggacgtgctggggctgctggtgcccgagctctctgagtacgggccagacgtgtccaggagctcgccgtcctgagccgtgtctccaggtgggtggaagggcagctgctgctgctgctgctgcaggagctggatcttctccagttccttctggaactgctggtgct

SEQ ID NO: 10999 - DNA, 485 bp, Homo sapiens
  MAP TO AC006221.1; EXPRESSED IN LUNG, SIGNAL =   1; EXPRESSED IN FETAL LIVER, SIGNAL = 1.4; EXPRESSED IN BRAIN, SIGNAL = 1.1; EXPRESSED IN BONE MARROW, SIGNAL = 1.2; EXPRESSED IN PLACENTA, SIGNAL = 1.2; EXPRESSED IN ADULT LIVER, SIGNAL = 1.4
tcaagctcacagagattcggtagcattcagagcttctcctaggaagggatagaacagggactttaatccaggaacaaagtcaccttctcagtgaaactgtgtttgacatctccctctgccttccctccctcagccctgccatgcacacacacacttctttttccagtggaaataacaattccctccttcgtgctcccttaggacatccaagatgtgtaaataaattgttacaacgcaatgtgttgtttctaccagtaatcaaaagcaaactgaagtcagtaactttgtcttaataatttttgtgtccccaaatttagctgaatgggaagcactcagcaccaacaccagtcctagcacacttctgaaaatgtgttccattgactctactgggctatcaggaataaatgaaatagttggtaggtgtctggaaatttaaaaacaccatataacgatattattgttattcaaaagtagattccgaaaca

SEQ ID NO: 11000 - DNA, 480 bp, Homo sapiens
  MAP TO AC004984.1; EXPRESSED IN LUNG, SIGNAL = 0.87; EXPRESSED IN FETAL LIVER, SIGNAL =   1; EXPRESSED IN BRAIN, SIGNAL = 0.77; EXPRESSED IN BONE MARROW, SIGNAL =   1; EXPRESSED IN ADULT LIVER, SIGNAL =   1; EXPRESSED IN PLACENTA, SIGNAL = 0.91
actgcccagccttcacaggtccccggcagacgcaccttccacagaggacccaccatagaagcaaaaggcttccctcacaggaatgcatgagtgtgataatttaacagtcccaattagaagtagtcacagcatggtttgtcagacttgtaggatcatggttgtctggataataataccaaaaatttataaggctggacaaagagtaacattcaggagaagatcataaaacctagaaaaatacctccaaattccacaactatttttttcagattataaaaatgatacagaggatgattctgggaagatggcagaggagagagaaccaggagtctgtattctcacctggacaacaattgcactggcagaatctgtccagtataactattttggaactctggaggctacttaaggcttccaacttccagaagaaggcttggacagtaaattgaagttattttcagttaatttcagctcttggca

SEQ ID NO: 11001 - DNA, 473 bp, Homo sapiens
  MAP TO AC004106.1; EXPRESSED IN ADULT LIVER, SIGNAL = 1.4; EXPRESSED IN PLACENTA, SIGNAL = 1.5; EXPRESSED IN LUNG, SIGNAL = 1.5; EXPRESSED IN BRAIN, SIGNAL = 1.3; EXPRESSED IN FETAL LIVER, SIGNAL = 1.4; EXPRESSED IN BONE MARROW, SIGNAL = 1.7
gggattcacgatccttctagcttcctatcctgccattcttaggaagtggcttttgccccagagttgcaagatgactgctgtagttccaggcattacttctatgttccaggcaaggaaaagagggaaggacaaagggcttctcctatttttcttcaggtaaagtaactctgctcaggaatttctgcctttatctcatggtcagagctatgccaatatggctaattctaataacactgcaggttaaatctactttagctttctgtctttatgatagagaaggtcaagggaaaacgaatggtggtaagaatagtttggggcaggccaattcatactattgccgtcagcttgcaccttgcagctaattctgttgctttcttgtttttggttgaaattcttggagtaggctgttatgacaaaagtgaacattttaatgtttaatagggaaataggatcaacaaattatctttccattt

SEQ ID NO: 11002 - DNA, 471 bp, Homo sapiens
  MAP TO AC005152.1; EXPRESSED IN LUNG, SIGNAL = 1.1; EXPRESSED IN FETAL LIVER, SIGNAL = 0.97; EXPRESSED IN PLACENTA, SIGNAL = 0.97; EXPRESSED IN BRAIN, SIGNAL = 0.99; EXPRESSED IN BONE MARROW, SIGNAL = 0.84; EXPRESSED IN ADULT LIVER, SIGNAL = 0.79
tctctggtcactcagaccttgttatgggcttaattgtgtcccccacaagatatatgttaaagtcctgacccctaacacctcagaatgtaaccttatttggaaatagagtctctatagatggctgtggtctgaatgtctgtgttcctcgaaaattcatacgttgagacccgatagccaatgtgatcatattaggagatagtcttttaggaggtgtctaggttaggaaggtggagcccttatgaatgaaatttgagctcgtataaaaggaacccagtggaactcactttccctttccaccatgtgggaatacaattagaaggtgtcctctatgaggaagagggccctcaccaggcaccaaacctgcctgagccttgatcttaaacttcacgtccactagaactgtaagaaataagcttctgtggtttatatgccattctgtttatagtatttttattctagcagtttgcatgg

SEQ ID NO: 11003 - DNA, 447 bp, Homo sapiens
  MAP TO AC004549.1; EXPRESSED IN ADULT LIVER, SIGNAL = 0.65; EXPRESSED IN PLACENTA, SIGNAL = 0.8; EXPRESSED IN LUNG, SIGNAL = 0.92; EXPRESSED IN BRAIN, SIGNAL = 0.91; EXPRESSED IN FETAL LIVER, SIGNAL = 0.88; EXPRESSED IN BONE MARROW, SIGNAL = 0.67
tgcctgactcgctgtactttagcttccttgtgtataaagtagtagcagtgaaaccaagtacatagggttgttatagagggaacctaaaacaaagttacttcttaagttttttgtaggcatatactctgtaagtcatgagtagaaaaaccaatatctaaaattttggccctgttgaaatatgtgcgaaaattgtttctgcttctgttttttacttgagtggttgaattacaaatatatttatctgctttcttcaggaagatacttgttttttaaaggagcaacttcgtaaagcagaggaacaggttcaggcaactcggcaagaagttgtctttctggctaaagaactcagtgatgctgtcaacgtacgagacagaacgatggcagacctgcatactgcacgcttggaaaacgagaaagtgaaaaagcagttagctgatgcagtggcag

SEQ ID NO: 11004 - DNA, 474 bp, Homo sapiens
  MAP TO AC005738.1; EXPRESSED IN PLACENTA, SIGNAL = 0.98; EXPRESSED IN LUNG, SIGNAL = 0.95; EXPRESSED IN FETAL LIVER, SIGNAL = 1.1; EXPRESSED IN BRAIN, SIGNAL =   1; EXPRESSED IN ADULT LIVER, SIGNAL = 1.6; EXPRESSED IN BONE MARROW, SIGNAL = 1.2
aacttacgtaactgaaataaaaagaggaattaagattataatgcaaatattagagtgagacagactttagtttacaaaatgacaaacctgccatgcttgcaaatggacaagagatggatagctagctttggtaagtggtgagttccttgtccctgggggtatgtaagcattgtctgagtatctgtttgctgtggatgttgtggtgggtgttcacatattagatggggctagatgacctggtgggggggtcccttcccatcctgagagccacagctgggtctggtgggaaggaaggtgagtagaggcggggcgtacctgcgcttctcgttccaggcgttgtaccacttgatgaagcgcttggtgctctgcagcttggggtgcaggcagtgctcctgacctcggtacctggacacgctcttggtggtgatgctgaaacggagcaggatgaggtggagggttgaggagcctgaataa

SEQ ID NO: 11005 - DNA, 480 bp, Homo sapiens
  MAP TO AC006375.2; EXPRESSED IN PLACENTA, SIGNAL = 0.74; EXPRESSED IN LUNG, SIGNAL = 0.84; EXPRESSED IN BRAIN, SIGNAL = 0.73; EXPRESSED IN ADULT LIVER, SIGNAL = 0.61; EXPRESSED IN FETAL LIVER, SIGNAL = 0.71; EXPRESSED IN BONE MARROW, SIGNAL = 0.79
aaggacctagcagaatcaatggaaaaggaatattttgaaaaccggaggaatctcctcgtccccagcaggaacttaagccacgctcagccttgctcctccctcttcaccctgtccagtgctcattctcctaacctccttgttccagtggagtcaggagagaaagtggatatggctccaggggtagctgaagcctccatctattgttttagtgttgatctttaaatatatgttcaaatacacactccttatgctactgctagtgtacctagcgcggaaggatattatacatgtggttttaatgtaaacttcttcaccgcaggtccaaacttacaacttcgaattctatactgtggtctttccaccaacagccgtggtggctttggcaaagctctttatcctttgtgacctcacttttgttatttattgactaaaatcttttcatactaggaattaaaacttcccagctgatacaggtgtttc

SEQ ID NO: 11006 - DNA, 454 bp, Homo sapiens
  MAP TO AC004896.1; EXPRESSED IN ADULT LIVER, SIGNAL = 0.83; EXPRESSED IN PLACENTA, SIGNAL = 0.67; EXPRESSED IN LUNG, SIGNAL = 0.83; EXPRESSED IN BRAIN, SIGNAL = 0.65; EXPRESSED IN FETAL LIVER, SIGNAL = 0.75; EXPRESSED IN BONE MARROW, SIGNAL = 0.78
ttcagtaatgaatggggcatcttaacatggcacaatattttccttaaagataatttgaaatatgtagattttttttgctaatatcctaaattcctccatataatttcttagaataatgtttaatgtcttgtggtagtttttggtattatttttagtaccctgccttccatttacccatattttgttattggacttgattctatttttctttttgccctgtaagtgtactctctccttatagcttcactatcttcataaatttactgtaaagagggcattgaataaaatttaaagaaaacactgttgctctggatactctttgacattcaagaatgcttggaggcagtgcatattcactgcgtgcatagtctgtgctgggcgagcctcagatttaaactggtggatgaaatgtggcaccacctcctgccagagatgcagagaccagtggaggaga

SEQ ID NO: 11007 - DNA, 458 bp, Homo sapiens
  MAP TO AC004129.1; EXPRESSED IN LUNG, SIGNAL = 1.1; EXPRESSED IN BRAIN, SIGNAL = 0.88; EXPRESSED IN BONE MARROW, SIGNAL =   1; EXPRESSED IN PLACENTA, SIGNAL = 1.1; EXPRESSED IN FETAL LIVER, SIGNAL =   1; EXPRESSED IN ADULT LIVER, SIGNAL = 0.99
ggaaaatgcaatctacaactgcaaaagcaacgatgtctgtctgtacttcaacacctgttccaccaattaaagctctgccttctcgctgtgatcccaccttgatgactttgccagtttgaaagtggattcaaaattgttagagaaacattcaaagcaaaaacagtgtacctggaaaaaaaaactcattaaaatgtgtcttatcttaggattaggataaataggtttttggaaggtggggtttatattaatatcaacagtcatcttatcacaggagctccgagctgggttcctgtcctgatcacagtccctctggacacagaacaggccaacacccccgcctacctggaggccatgaaaggggtcatgtccagctccagggcaaggaacatgtacgtggtgattgtccgctgcagcttggctgagtgttcaaatcactgcagaaataggaaaaaggcaga

SEQ ID NO: 11008 - DNA, 476 bp, Homo sapiens
  MAP TO AC004492.1; EXPRESSED IN PLACENTA, SIGNAL = 1.1; EXPRESSED IN LUNG, SIGNAL = 0.78; EXPRESSED IN FETAL LIVER, SIGNAL =   1; EXPRESSED IN BONE MARROW, SIGNAL = 0.83; EXPRESSED IN ADULT LIVER, SIGNAL = 0.91; EXPRESSED IN BRAIN, SIGNAL = 0.84
gggttggatcaattttagggatatgaaaggtaacaagattgttgtcaattaatttgcattttcaccgtctgtttttgttattgattccaatagggagattcggctgattcttttttcattgtagaatctggagaagtgaaaattactatgaaaagaaaggtaagcattctaagtcctcagaacccacatactgttagcaaggaacacaacagatctactttttgatgtttagactgaggttaattttatttttcataagctgaggaaaagctcatctttttaattgccttgtcagggtaaatcagaagtggaagagaatggtgcagtagaaatcgctcgatgctcgcggggacagtactttggagagcttgccctggtaactaacaaacctcgagcagcttctgcccacgccattgggactgtcaaatgtttaggtagggattgcaacagtgggcgtgcttctgctggttgaactt

SEQ ID NO: 11009 - DNA, 467 bp, Homo sapiens
  MAP TO AC004112.1; EXPRESSED IN LUNG, SIGNAL = 0.76; EXPRESSED IN FETAL LIVER, SIGNAL = 1.8; EXPRESSED IN BRAIN, SIGNAL =   1; EXPRESSED IN BONE MARROW, SIGNAL = 1.1; EXPRESSED IN PLACENTA, SIGNAL = 0.87; EXPRESSED IN ADULT LIVER, SIGNAL = 1.2
gaggtgcatctgcagtagtttgctgcatatggtcttgcaggtcagccaattttaaaagtcctgtaatattaaacataaatctgcttctgtcattttaagaatttatacccctctgctgcttagagcacctacagttcatcttggacgttgggtatatttttaaaaaggactgcttatatacgaaagggtcctgagccaacacatagaacttaatttatataaccaacagttagggatgttctgatgagttttcagattaaaaacagtaacatttaaagatgcaaaatggcaaacctgtttccaaggaattcttcattgcaaaacatacaaacgccatgaaaattggtatcatttcgttcttgctgctgttgttccagaatttctctctggaaagtagaaacagatttatggtattatcttaatgcacaattggctaataaaaaatgtcaaagtctggatgggaggaa

SEQ ID NO: 11010 - DNA, 483 bp, Homo sapiens
  MAP TO AC002523.1; EXPRESSED IN LUNG, SIGNAL =   1; EXPRESSED IN FETAL LIVER, SIGNAL = 1.5; EXPRESSED IN ADULT LIVER, SIGNAL = 1.5; EXPRESSED IN PLACENTA, SIGNAL = 0.93; EXPRESSED IN BRAIN, SIGNAL = 0.83; EXPRESSED IN BONE MARROW, SIGNAL = 0.8
tctatcagcccccagttcactaacaatgctcatattttgcttcaaaccattaatttggaaataaccaccttggtgctcatgatgtgctgatgaggaattatctgccctgggaacttgccaacaagaattatttaaaaaaaaaaaaaaaaagatttgcattagctgaagctcaaagaggagagccaatgaggaagaaggaagaatatattcccactgtttgcttctcttaccctccagagattgcagaatggtttctgacatctctcacatcccagagagccccaacgtcctgatgggtgaggtgcagattgactccttttcttttgactatagctgcagctgccctaagatgacgtaaggtttcctggccagggggcttgccaaggacaacttccttttctggtccctgctttccaagcactcctggaagacctaagccctgctccccacgtagcatcagactcttgatggggccaagtttta

SEQ ID NO: 11011 - DNA, 469 bp, Homo sapiens
  MAP TO AC005065.1; EXPRESSED IN PLACENTA, SIGNAL = 1.5; EXPRESSED IN LUNG, SIGNAL = 0.93; EXPRESSED IN FETAL LIVER, SIGNAL = 0.89; EXPRESSED IN ADULT LIVER, SIGNAL = 0.8; EXPRESSED IN BRAIN, SIGNAL = 0.85; EXPRESSED IN BONE MARROW, SIGNAL = 0.95
cctaatatctggtcagaaatcaacatctaattattatattattttaatgaaaaaaattttttgtggtagttaactaggaatgtaaattactaaaaaggattgcttataattaatagtaattgcatacaattttgtggagttgcagcttaaaatggattagaaaatttccagttttgttttatattttgaaataaatatttaactggttatctttccagtaagtacaaggtggactgtgcatgcctcaaagaaaacccagagtgccctgttctaaaacgtagttctgaatccatggaaaatatcaatagtggttatgagaccagacggaaaaaaggaaaaaaagacaaagatatttcaaaagaaaaagatacacaaaatcagaatattactttggattgtgaaggaacgaccaacaaaatgaagagcccagaaactaaacaaagaaagctttctccactgagactatcag

SEQ ID NO: 11012 - DNA, 460 bp, Homo sapiens
  MAP TO AC004408.1; EXPRESSED IN LUNG, SIGNAL = 1.2; EXPRESSED IN FETAL LIVER, SIGNAL =   1; EXPRESSED IN BRAIN, SIGNAL =   1; EXPRESSED IN BONE MARROW, SIGNAL = 0.85; EXPRESSED IN ADULT LIVER, SIGNAL = 0.96; EXPRESSED IN PLACENTA, SIGNAL = 0.97
tccatttgatgtctctgggtccaggagggagtaggcagcctatgaaacgctgagatgctgtgattttatgacccagtctgggccctgcttccatcccctccccggggattcttctctccaccctgtcctccggggccaaccccaaatgatatgtgatttgcatgtaggacaagcacacctggggcagctggtgagacctcccccacccccacttcgctccccctccatgttcctccagcactcaccaccaccctggtcctgttatctggcagcgtgtccatggccagggtgcccccacccaggtcctggctcagctgggtcctgtccggctctgacacatgcccagggctctctcgggctctccggttccagccccgcacggtccctttggcagcccatccagagcctgggccctcatcgtgacctgggagaaggggacagaaacctgagtgccagcagt

SEQ ID NO: 11013 - DNA, 468 bp, Homo sapiens
  MAP TO AC005274.1; EXPRESSED IN LUNG, SIGNAL = 1.1; EXPRESSED IN FETAL LIVER, SIGNAL =   1; EXPRESSED IN BRAIN, SIGNAL = 1.4; EXPRESSED IN BONE MARROW, SIGNAL = 0.91; EXPRESSED IN ADULT LIVER, SIGNAL = 0.9; EXPRESSED IN PLACENTA, SIGNAL = 4.8
tgactactttttctttcttttgatgagaactaattaatactgatcacaactgtgtcagctaagaaggctacactgacctctggtctaaagggcggcaagccaaagaaactcatcccagacacagcagatacagtttaattgctacgagtcacctaaactgctgagagtcagtgcagccttcccgtaattgtatttttcttatgcgtcacccatccacccccaccacctcccctaatccccagtgctgagaaagagacaccagttcatacccatcctttttgtaaaactccagcatcatattatccgtggcgacgctgaggggccggcgggcctgctcgggctggcgccggtcagcagggtccatgtctggggagggcattgagctgtagttggcattatggttcacgtgtactggactcccataattgccagtaatgttgaactctatctctgcggggaagaaagaat

SEQ ID NO: 11014 - DNA, 470 bp, Homo sapiens
  MAP TO AC005870.1; EXPRESSED IN LUNG, SIGNAL = 0.8; EXPRESSED IN BRAIN, SIGNAL = 0.88; EXPRESSED IN ADULT LIVER, SIGNAL = 0.83; EXPRESSED IN PLACENTA, SIGNAL =   1; EXPRESSED IN FETAL LIVER, SIGNAL = 0.86; EXPRESSED IN BONE MARROW, SIGNAL = 0.7
gggttttcatttgaaaggagtcatctcattcagtagtatctatctctttaaattgacatggttctatatttggcatttcattggaaattatatcacaaccaagtcccttattagagtaggcaagataaggaggataggataaatatttgaagtatagtttatctgcccatcctggaaagggaagaacaatagcttgtccatgttcaggaagctaacatgacctaaaattcctaacgtcgcatgggagctaatgaggctgtttaccctgttccctcgtctttgggcagtattacagtaaacttaagtcagccttgcagaaagtcaagtagaaaaaaacacctgcttttatttgtgtaactttctggaggaagaacaagatgaccatctacatggccaagaaccttctgtggttcccttgcaccttgctgttacaagttgtaggatacccttgggtgtttttgctgtggttc

SEQ ID NO: 11015 - DNA, 463 bp, Homo sapiens
  MAP TO AC005146.1; EXPRESSED IN LUNG, SIGNAL =   1; EXPRESSED IN BONE MARROW, SIGNAL = 0.91; EXPRESSED IN PLACENTA, SIGNAL = 0.99; EXPRESSED IN FETAL LIVER, SIGNAL = 1.1; EXPRESSED IN BRAIN, SIGNAL =   1; EXPRESSED IN ADULT LIVER, SIGNAL = 1.1
ccttcttcttgactcgcttcctaatctatgtggtttatgtcattactggctctccaaaagacctagaatatatgggaatgtttttgttttcctgtcatactttaatttgtgtaggtatggaattcttcattaaaaatgtttttttcttagaatattgaaagtgtttctctatagtcttctaatttcctgggttgttgttgagaggtttgaagctctcctgggataaaccaaagattaggaaacagaagctctcagccaatgtttttcaatctcagcatcattggcattttggattttataattccgtgttgtagaaagtgtcctgtgcatgataaggtgctgatcagcattccaggactctgcccaccagctgccagtagcaccccctgtccaagtgtgacaatcaacaataaatgtctccagacactgcccctggggaaggtggagagcaaaatcacctcca

SEQ ID NO: 11016 - DNA, 478 bp, Homo sapiens
  MAP TO AC005215.1; EXPRESSED IN LUNG, SIGNAL = 0.57; EXPRESSED IN ADULT LIVER, SIGNAL = 0.44; EXPRESSED IN PLACENTA, SIGNAL = 0.58; EXPRESSED IN BRAIN, SIGNAL = 0.58
cagggtcttccctctctgtcaatttcacagggaccacctacctgtccccttggcttcttctgtcatcaccctcccttaagtctattgacctggagttcagcacaaagggcctcccctgatttgacagaggtgggctcatcatgcaggctcacagagatgggcttggctctcatctaaggctctgacagctttgtaaatccttatgctgggccatcatgcatgagggcggtcagcacttcttgtaaagcagtgttaacgtccaggacacttcctgcagcagtggcttcctgggccttggcggtgggtcacgactgaagccaaatcaaggccacacctgagccttcacatgattcagcagcagcagcagcagggaacaagcaatcaccaacctctatctttttataaacggggagactaaggtcccgagagagtaagtgatgggcccaaggacacaaaactattttgtggcagaggctga

SEQ ID NO: 11017 - DNA, 467 bp, Homo sapiens
  MAP TO AC004055.1; EXPRESSED IN PLACENTA, SIGNAL = 0.63; EXPRESSED IN BONE MARROW, SIGNAL = 0.63; EXPRESSED IN ADULT LIVER, SIGNAL = 0.67; EXPRESSED IN FETAL LIVER, SIGNAL = 0.74; EXPRESSED IN LUNG, SIGNAL = 0.57; EXPRESSED IN BRAIN, SIGNAL = 0.83
gcagctgaggaatctttgaatcagttatttcatgcagcttagcattctgcccaaatcatcatactcttttagcaactgtataatgcattcttattatctgtattcactatgctatccaattgatcacaaagaaagaaggtacttattccttctgatactttgtatccttcgattataatatcccacctaccccactccccagcctctgtaaccataattctacccttttattgttttagattccacatataatgagaagatgcagtatttctctttctatgcctggcttactttatttagcataatgttctccagttccatccgttttgtcacaaatgacagaatttccttctttttaaggttgaatagtattccattgtgtttatacaccacattttctttatccattaatatgttgatggatacttagattgattccatacttggctattgtgaatattgctaca

SEQ ID NO: 11018 - DNA, 455 bp, Homo sapiens
  MAP TO AC004508.1; EXPRESSED IN PLACENTA, SIGNAL = 0.79; EXPRESSED IN LUNG, SIGNAL = 0.71; EXPRESSED IN FETAL LIVER, SIGNAL = 0.7; EXPRESSED IN BRAIN, SIGNAL = 0.63; EXPRESSED IN ADULT LIVER, SIGNAL = 0.71; EXPRESSED IN BONE MARROW, SIGNAL = 0.67
tccgcagtcccatagctaacataccagaatcttttcttctcgtcttttggaaagtgtaggtctgtgcacctacatattaaacagccatcttggtggcttctgagatccctctgcaggcttctctgaaatgttttctaaacaccagggacctactgaagctctcataccctggaaaggagcagtcattaccttcaggaactgcttcctcacagggatcattaatgagggctctgggtttctcccctcctggcctccatagcccagaacgtcatggccgggaatggccggggcatcagccatgagctcatcagcctggagatcacctcccctgaggttccagacctgaccatcattgaccttcccggcatcaccagggtggctgtggacaaccagccccgagacatcggactgcaggtgagcccttctggaatttgggattgggctctgctgaagtg

SEQ ID NO: 11019 - DNA, 473 bp, Homo sapiens
  MAP TO AC005020.1; EXPRESSED IN LUNG, SIGNAL = 1.1; EXPRESSED IN FETAL LIVER, SIGNAL = 0.92; EXPRESSED IN BONE MARROW, SIGNAL = 0.96; EXPRESSED IN PLACENTA, SIGNAL = 0.93; EXPRESSED IN BRAIN, SIGNAL = 1.2; EXPRESSED IN ADULT LIVER, SIGNAL = 1.1
aggatctgtctgccatcctcccaccccaggccccgccaaaaaaaaaaaaaagaaagaaaaaaaaagtatagcctcacagaaatcttaggccacttcggttagggagtgacagtcccacgactaacttgggtctcctgactcctgtctatgggactttctgctaacactcaccttctaactccaattccacctgtcccaagtcaaaaaccctaatttcagcatctccgggtcggggtccaggtgcctcaccgtcccttttgcttgtgtcccacgctccagactccgcgcgcgcctgggcgaggctgttgggtagggcgtgcgcacgaggcacccaggatgggggacggaggtgttcactgcaggcgccaaccgcatgctcacaatgctcacctgcaggccttgccacccagggtgggtatggagcactggagtcttctgtataactacagttctggctctggattttccgagat

SEQ ID NO: 11020 - DNA, 467 bp, Homo sapiens
  MAP TO AC004601.1; EXPRESSED IN BONE MARROW, SIGNAL = 1.4; EXPRESSED IN PLACENTA, SIGNAL = 0.98; EXPRESSED IN LUNG, SIGNAL = 1.1; EXPRESSED IN FETAL LIVER, SIGNAL = 1.7; EXPRESSED IN BRAIN, SIGNAL = 0.93; EXPRESSED IN ADULT LIVER, SIGNAL = 1.6
agcatcactccaggaccaactgtgagtttccactgtcacatacaaacaggaaccagaaggcagctatttctcactgctcttgctcaggtgcatttagttccctctggccccgtgcactaaacactctggtatacctgtgttttatactcacctgtgctgctggcatgccaggcctctcccataggcccaggtgcactatggatgctctacaggtatgtctgagtggactgttgggccctgggtcaggggtgacaagaactatgcaggcagctgctgactggctgtcagggaggctgaggaacggggatatggtgctgcgcagggcaggtggaggctgggggctgctggatctctctccataggcatggtgggaacaaccctgtctgtccccacaggctgcaggaggatgggctgggctgccacatttggtccatacagctatgcttgagcattttgaatcctgagga

SEQ ID NO: 11021 - DNA, 396 bp, Homo sapiens
  MAP TO AC004100.1; EXPRESSED IN LUNG, SIGNAL = 1.2; EXPRESSED IN FETAL LIVER, SIGNAL = 0.94; EXPRESSED IN BRAIN, SIGNAL = 0.9; EXPRESSED IN BONE MARROW, SIGNAL = 0.97; EXPRESSED IN PLACENTA, SIGNAL = 0.86; EXPRESSED IN ADULT LIVER, SIGNAL =   1
ctatacgccaggcattgtcctggaccctgcatatgtctccttaattaaattatccaaatctatgaggcagagtgacagttttaaaaccatcccttccgcgtaaacctgggcaggcttgtgacagcctagaccaataggagtgcagtggaagggatgcaatgtagcatctaaggctgggctataaaaagtcacatggcttccaccatggtctctcgaaatgctcaccctccagacatttcctcccaggatgtgcctcccagaaccagtgcaccacactgggaaaagcccaagccacacagagaggccactcgtgggtgctctcgttggcagtcccagctgagtccagccttggagtcacatgtgagtgagaagtctccagatgattccagccactca

SEQ ID NO: 11022 - DNA, 475 bp, Homo sapiens
  MAP TO AC004926.2; EXPRESSED IN PLACENTA, SIGNAL =   1; EXPRESSED IN BRAIN, SIGNAL = 0.77; EXPRESSED IN BONE MARROW, SIGNAL = 0.98; EXPRESSED IN ADULT LIVER, SIGNAL =   1; EXPRESSED IN LUNG, SIGNAL = 0.99; EXPRESSED IN FETAL LIVER, SIGNAL = 1.4
ttactttggggccatttcacgtttctgttccattgactgcttatatttaattgactctggattcaattttcttttctttaaatatgtatttattttcttgaacactggatattgtagaactctggatcctactctctttctttgagtgtcttgattcttcttaaagtggcttttatctactggttactcatctgaatttctgtaagcatcattttcaatttttttgaatagatattaatcatctgttgggtcttatgtgataaaagtttttcttttaatttatatctatttacagggtgaatgtgcagatttattacatacctgtatttgattatggtaagaactgggcttttaatgtactcctcaccagaatagtgaacactgtagccaaaaggtaatttattaaccctcagcccactctaaccttttttagtctctaacgtctatcattccactgtgtatgtccatgtggacc

SEQ ID NO: 11023 - DNA, 367 bp, Homo sapiens
  MAP TO AC004864.1; EXPRESSED IN PLACENTA, SIGNAL = 2.3; EXPRESSED IN LUNG, SIGNAL = 0.98; EXPRESSED IN BRAIN, SIGNAL = 0.88; EXPRESSED IN ADULT LIVER, SIGNAL =   1; EXPRESSED IN FETAL LIVER, SIGNAL = 1.1; EXPRESSED IN BONE MARROW, SIGNAL =   1
tgggtttatgacccagaaaagttaagaatctctttaaactctaaaagataaaatccaaactctttccctggcacaggagctgatatctaattgcttctctgcccacctttttagccttatctaccaccatctccttttctctccgagacacaacaggttttcaccagttctcccaaataaactgtgcagtgtcttaactgcacacattttgctcatcttgtcccctctagtggtctcctgatcccttccctcttggtaacactgattcttctgcctattttgaggcaggctcaggaacgccctcctccaggaatccttcctacgccagtctgtggcatggcatgtgctgcttctctgggctcccata

SEQ ID NO: 11024 - DNA, 486 bp, Homo sapiens
  MAP TO AC005210.2; EXPRESSED IN BONE MARROW, SIGNAL = 0.57; EXPRESSED IN ADULT LIVER, SIGNAL = 0.64; EXPRESSED IN PLACENTA, SIGNAL =   1; EXPRESSED IN BRAIN, SIGNAL = 0.67; EXPRESSED IN LUNG, SIGNAL = 0.57
catgtacaaggaatggcagcatccataaagagagaacacagacacactaaagagagaaaagtgcactcccaggccaaacttggaaacctcaggagtaagaaaattactcccagatactgcaggggaatcatatgccctaagtcatgtgaatcaatcctaagtaggattgagaatcaaaggactgatctttgcagagctatatctgatcataaaccatgcttatcacaggaagcgccaagaaccttaatgtgctgtattgacatggatcattgtctcttgatcttgcagcagcagatcactggcaagatgtctcatcttggctgtttaaccattaactgtgactccatagaacagccactgcttctaatacaggaaatctgtgccaacctggggctagaactgggaacaaatctgcatctagctatcaactgtgctggacatgagctgatggactacgtaagtttccacttcagaacattcacttcc

SEQ ID NO: 11025 - DNA, 452 bp, Homo sapiens
  MAP TO AC004558.1; EXPRESSED IN ADULT LIVER, SIGNAL = 1.9; EXPRESSED IN PLACENTA, SIGNAL = 2.2; EXPRESSED IN LUNG, SIGNAL = 1.6; EXPRESSED IN BRAIN, SIGNAL = 1.1; EXPRESSED IN FETAL LIVER, SIGNAL = 1.9; EXPRESSED IN BONE MARROW, SIGNAL = 8.3
atgcaggaaaggaattctggtctgtggaagtctgtctcccctgagtgtgtcctgcactaaatgtccaaaccctaaagtgggatgtaatgcagagagggacatgggcacagcccaggcctaacaatcctgtgtgtgggaagtagaactgacccccaacacccagaggtcatggggaatcactcacgatgtacgctgaactggccagttacttcttcactcataagatttagctttatgacttgtagggtgtaggatcctgtgtcatttctggtgacgttccgcatcagcagggatgcattggggtatattgtctctcgattgctgtatgcaggccctggggtaatctgttgatttgatattacatatcctataattcgacggttggcatccactgtttcccctttgtaccagttgtagccacgagggtcctggggcagattgtggacaagtag

SEQ ID NO: 11026 - DNA, 453 bp, Homo sapiens
  MAP TO AC002124.1; EXPRESSED IN ADULT LIVER, SIGNAL = 0.93; EXPRESSED IN LUNG, SIGNAL = 0.74; EXPRESSED IN PLACENTA, SIGNAL = 0.58; EXPRESSED IN FETAL LIVER, SIGNAL = 0.69; EXPRESSED IN BRAIN, SIGNAL = 0.71; EXPRESSED IN BONE MARROW, SIGNAL = 0.71
tgatgataatacataaggaaagctggaagagcaacattttcagtatttagaatagacttatgccagactacctgggtacagagcctggcttcatctccttttacctctgtaaccttgggcaagatacttaccctgtctgtctgttttggtttcctcattgatctaatcaaattataaataggcataggctttccagatgtttttatggttaaacaagttgatattgataaaacatttagaatagtactggaacataaaaaagactatataaatgttaattgttatgagaaatatccttttcatgatgatcattaccaccaccatcaccaccatccacttctgctgcacagagatgcaatccaatgtttccattcttctaaagtataattattttgaaataagtggtattattttaaaaatagtgaagctctgtaataagcttcactgtttaga

SEQ ID NO: 11027 - DNA, 471 bp, Homo sapiens
  MAP TO AC005959.1; EXPRESSED IN PLACENTA, SIGNAL = 0.71; EXPRESSED IN BONE MARROW, SIGNAL = 0.73; EXPRESSED IN ADULT LIVER, SIGNAL = 0.73; EXPRESSED IN LUNG, SIGNAL = 0.77; EXPRESSED IN FETAL LIVER, SIGNAL = 0.69; EXPRESSED IN BRAIN, SIGNAL = 0.64
agtataaagaagttttagtttgccttgaaattatatttccaccttaaaatgaaattactttagtgcaattttatttcatattactgccattggaaatgacatttttccttgggttagaatattacatttaaatgaatgtgtactgtagctatttttttatgcaaaggattaaggcactagatgtaccctcacaaataagatgatgaatggagtaagttacacttgtgaaatttatagagctcagactttgtggaattgcttggaattaaactcacattttattaatgtttctttttagggattttaagtatgatagaacgagggctgattccaccaacagcaaggattacctttcagaatccacccattacacccagagcagctcctctgcatagttttgatgaagcacgtaagattccaactgtaggtaagatactcatgcatctcagttcagttggggacacacagaaa

SEQ ID NO: 11028 - DNA, 462 bp, Homo sapiens
  MAP TO AC005866.3; EXPRESSED IN BONE MARROW, SIGNAL = 0.51; EXPRESSED IN ADULT LIVER, SIGNAL = 0.57; EXPRESSED IN LUNG, SIGNAL = 0.53; EXPRESSED IN BRAIN, SIGNAL = 0.64
taagtccccaaacaaaagccagttatgaatgtcagagcaggatttgggaattcagagattctcaaaggtctcagatgtaaccttctaaaatatcaaagatgatatgtgcaccatgggggtgagcagttgtcattaccaagcagcagtaagacttcagaatgaagaggtcacttcaggccaacaagcacctgttgccagctgctggggagagctgaggagaggggctcccaagagccgactggtgcttccccttgtctgccttgacttgtctctcctcctgtcccctctcccgtacaggtttcgcctccagtgccaccgcattgtcaatgacacgatcttcaccaacctgatcctcttcttcattctgctcagcagcatttccctggctgctgaggacccggtccagcacacctccttcaggaaccatgtatgcatcgcctgtgtcttctgcactccttcccc

SEQ ID NO: 11029 - DNA, 441 bp, Homo sapiens
  MAP TO AB019441.1; EXPRESSED IN PLACENTA, SIGNAL = 0.66; EXPRESSED IN LUNG, SIGNAL = 0.46; EXPRESSED IN FETAL LIVER, SIGNAL = 1.1; EXPRESSED IN BONE MARROW, SIGNAL = 0.74; EXPRESSED IN BRAIN, SIGNAL = 0.78; EXPRESSED IN ADULT LIVER, SIGNAL = 0.8
ttccagagagaagcagctcagccacactgcccaggcagagcccgagagggacgcccacgcacagggaggcagagcccagctcctccacagccaccaccacctgtgcacgggccaccaccttgcaggcacagagtgggtgctgagaggaggggcagggacaccaggcagggtgagcacccagagaaaactgcagaagcctcacacatccacctcagcctcccctgacctggacctcacctggtctggacctcacctggcctgggcctcacctgacctggacctcacctggcctgggcttcacctgacctggacctcacctggcctccggcctcacctgcacctgctccaggtcttgctggaacctgagtagcactgaggctgcagaagctcatccagggttggggaatgactctggaactctcccacatctgacctttctgg

SEQ ID NO: 11030 - DNA, 486 bp, Homo sapiens
  MAP TO AC005277.1; EXPRESSED IN PLACENTA, SIGNAL = 0.97; EXPRESSED IN LUNG, SIGNAL =   1; EXPRESSED IN FETAL LIVER, SIGNAL = 0.98; EXPRESSED IN BONE MARROW, SIGNAL =   1; EXPRESSED IN ADULT LIVER, SIGNAL = 0.98; EXPRESSED IN BRAIN, SIGNAL = 0.95
agccagcaaagttgcatttctctaaccctgcttccattattgcttctctctctctctctctctctctccctttccccctacccctctctctctctcccccccctttctttctctctctctctctctctctccctttccccctacccctctctctctctccccctccctttctttctctctctctctcaacctgaccacagtctgagagggttttccacttttaaggactcacaattagattaggcccacctgaataatccaggataccctttctacctcaaggtctgtacccttaccttcatcaatcacatttgcaaagtttgttttgccagataacatgaaatattcacattttctgaggattaagacacaaatatctgcccatcgcagtaagcttaaaaaacaaaacaaaacaaaaaaaagcacttgtcagtcctttgctctagctatgaggttagtctttacagaaatgcaatgaaattggaa

SEQ ID NO: 11031 - DNA, 486 bp, Homo sapiens
  MAP TO AC005078.1; EXPRESSED IN PLACENTA, SIGNAL = 1.3; EXPRESSED IN LUNG, SIGNAL = 1.3; EXPRESSED IN FETAL LIVER, SIGNAL = 1.3; EXPRESSED IN BRAIN, SIGNAL = 1.4; EXPRESSED IN BONE MARROW, SIGNAL = 1.1; EXPRESSED IN ADULT LIVER, SIGNAL = 1.2
aaaacagatcattggcagggaaggaaaaggcctctttgctgttcttattctaaggattgttcattgtatcagttcagccttctcatgttctgatacatcaattttaaacatttaacctccctattgatagaatgccatcttaatggagaacagtaccaatatctcatgcttcacatatgaggagtaaaaataacaaacatctttagttttttaggtgtttgttagaccttgtattggcttttttataaaatgtttttttttctaggtactcatgagagcattaagggatttcaatatgcccaaaatagtgactgacgacatcccagtgtttctgggcctggtcggtgacctgtttccagccctggatgtgccccggaggaggaagctgcactttgaacagatggtcaggcagtctaccctggagctccgcctgcagcctgaagagagcttcatcctcaaagtaaaaggagcatttgcttttcatgg

SEQ ID NO: 11032 - DNA, 461 bp, Homo sapiens
  MAP TO AC005699.9; EXPRESSED IN PLACENTA, SIGNAL =   1; EXPRESSED IN LUNG, SIGNAL =   1; EXPRESSED IN FETAL LIVER, SIGNAL = 0.9; EXPRESSED IN ADULT LIVER, SIGNAL =   1; EXPRESSED IN BRAIN, SIGNAL = 0.96; EXPRESSED IN BONE MARROW, SIGNAL = 0.77
tgctttatgtctttttaattctgcctactttatgaaaatagagaagcttagtgattacaagcactgaccctagagtgaaatgaccaggatataaatcctttttcacattctgtgtgatcttagaaaagtagctctttctttctgagcccatgttttcatctcagtaaaacaaggaaataaatatcggaatcgagtgctgtagcaaagattaaaatatgtaagttatataggtagagcacattgcattgcatttgacatgttaagcattgaatacatgataagaagccttcatattataagatgggctgtgaaaatatcaccaaagatactttgcattgttgttttattgttgatgatgatgatgatgatgactggtttctttgtttccttcagtccactagtggaagaaaactatatcctatagaaggtaaaaaaaaatgttggcaaaatcacacatagtg

SEQ ID NO: 11033 - DNA, 418 bp, Homo sapiens
  MAP TO AC004106.1; EXPRESSED IN PLACENTA, SIGNAL =   1; EXPRESSED IN LUNG, SIGNAL = 0.85; EXPRESSED IN BRAIN, SIGNAL = 0.59; EXPRESSED IN FETAL LIVER, SIGNAL = 0.81; EXPRESSED IN BONE MARROW, SIGNAL = 0.8; EXPRESSED IN ADULT LIVER, SIGNAL = 1.6
aaataaatacagataaacatggggggatacatgattcaaaagttttctccctttgaaatgttggctcaaagtttacaaacttttcatccaatatattacctcttcctagcagcatcatgttatcttctcatttaataagagagccttcatctttgtcaattcatgtttactgaactatgtaggattatgtgaatgttccagcatatataagaggataagacatttgctgttcttaggacgtttaactatctggatggagatgatgatgataatagtggtaattttggaggaggtgacaatgttaatggtggtgatgatgctgatgttgctggtgatgatgatggccaagaaagagataaagaagaaagtcttatttatggttgagattaaagcaaaatgggaattgaaggcttctcct

SEQ ID NO: 11034 - DNA, 489 bp, Homo sapiens
  MAP TO AC006064.9; EXPRESSED IN PLACENTA, SIGNAL = 0.98; EXPRESSED IN LUNG, SIGNAL = 0.8; EXPRESSED IN BRAIN, SIGNAL = 0.85; EXPRESSED IN ADULT LIVER, SIGNAL = 0.79; EXPRESSED IN FETAL LIVER, SIGNAL = 0.94; EXPRESSED IN BONE MARROW, SIGNAL = 0.97
ttcttggcatcaggtacacgagggctgcccttgggcttcctccgagcattgggacctaaaatcaggatatatccaaatatataccacaagaccaaagatggggaaaataaaatcttctccacctaagcttgcttccccacattcagattcccaaatttccctccaaaatccaagactcattcctccctcctatctcctaccttagggctgacagaccagcattcccatgctgtctttgacatcttaagcccacactagacacccccactcccatttgaaccccatttcacctttgccctccttggtcttggccttgcggataggcacctccacagggggaggtggtggtgcaacctcagtggctgtcaccatgctctccaccacagctaccgctgctgctgccgcagctgccactgatgccccagaactgcctttgaaggggttattggtactgaactcccgccattttgcacccaaaaccatcatcat

SEQ ID NO: 11035 - DNA, 489 bp, Homo sapiens
  MAP TO AC004460.1; EXPRESSED IN BONE MARROW, SIGNAL = 1.1; EXPRESSED IN PLACENTA, SIGNAL = 1.2; EXPRESSED IN LUNG, SIGNAL = 1.3; EXPRESSED IN FETAL LIVER, SIGNAL = 1.1; EXPRESSED IN BRAIN, SIGNAL = 1.1; EXPRESSED IN ADULT LIVER, SIGNAL = 1.1
ggtaggcaccatgttacctctgtaaaatctggaacattccaaacagcccaagtagttttaaataaagcatttgggacttgagtaggaaacgtgttatgtttttgagtttttccacttaaacttcccctactgtgcactgttcgactagattgtttcctctgaggacgtggtgaccccctctgcagtgactccatcggccctctcagcctccgctgggccatttatcacagtgacggatgacccgggagctgcaagcatctttgcagaaaccatgaccaaaactgaagaggtaaagaggcattcttttttcgctttgtattgtgaaattaccaaatggcaggtggagccgcagatcgatgaccccaacagcaaccttgaggaggtgattaatgaggcagaggccatcacctctgagaacagcctgggatgtaagcaagccttgaatacagattaccttgattctgattaccaaagaggacagctgtaccc

SEQ ID NO: 11036 - DNA, 470 bp, Homo sapiens
  MAP TO AC005837.1; EXPRESSED IN BONE MARROW, SIGNAL = 0.64; EXPRESSED IN PLACENTA, SIGNAL = 0.7; EXPRESSED IN LUNG, SIGNAL = 0.59; EXPRESSED IN FETAL LIVER, SIGNAL = 0.7; EXPRESSED IN ADULT LIVER, SIGNAL = 0.82; EXPRESSED IN BRAIN, SIGNAL = 0.72
cagggttgtatactcattcccctatttggaccactctggggaaaaccgcctatgtaagttagtgcaagagccggacaccataagcaagagcctagtgataaccaaggttcatctgtgacaaccatcactggccctgccactcactcacaccacaagaacaggaaagctttagagctggatcacagaaacagtaaccaaggtcaacactgccttctatttccttgcccatggaaacatatggattgagtgagaaagctgaggcctggagacatgaaaggaattgctgccactgtccagggtcacacacatcagtggcaaggccaggaacagactcaacttccctgtgcaccttttcaccacctcccttcctctggtgaccttttttttcttcctccctcgcagctcctcctttattttcttccttttcttgcctgtggtaacctacagagagtactggacatcagttaggg

SEQ ID NO: 11037 - DNA, 427 bp, Homo sapiens
  MAP TO AC002541.1; EXPRESSED IN LUNG, SIGNAL = 0.8; EXPRESSED IN FETAL LIVER, SIGNAL = 0.81; EXPRESSED IN BRAIN, SIGNAL = 1.4; EXPRESSED IN BONE MARROW, SIGNAL = 1.1; EXPRESSED IN ADULT LIVER, SIGNAL = 0.73; EXPRESSED IN PLACENTA, SIGNAL = 0.81
tgggaaacggtatatagataatggataacaatctaggatttgaagtcagacagaactagacatgaatttcagctcatacatcaatagacagtacaacctgaataaatttcttaatttttcaacatttcaatttcctcattgaaaaattgtcataataatactattatgattgtggcgaagagaaatgaattttttttgcatatcaaaattgttcaataaacactccctataattactgctgctttgctgtgctgtagtttttattaatgtagaaaggcattagctcccatttctttaaattcagcagtgtaattatgaatatccatcaccatttctgctgccaagaccactgcaatgaagtagggaaaagggaatggcatactgagatgagagccagtgggagtggcctgccccatggtaaggagta

SEQ ID NO: 11038 - DNA, 467 bp, Homo sapiens
  MAP TO AC004253.1; EXPRESSED IN ADULT LIVER, SIGNAL = 2.2; EXPRESSED IN PLACENTA, SIGNAL = 0.93; EXPRESSED IN LUNG, SIGNAL = 1.9; EXPRESSED IN BRAIN, SIGNAL = 1.4; EXPRESSED IN FETAL LIVER, SIGNAL = 1.2; EXPRESSED IN BONE MARROW, SIGNAL = 0.9
gcagagatttttggagagagtaacagttttgactttaaaacagtgatacattatggagtcaaatgcaaaatttggattttttcaatataaaagagaaggtgtcacagaaattggagacctgtaacagataccagcctaagctcatagatgtggacccctgttccaaactgccttcagggctggtctgacaggtgtgtctgagaaggcctagttcaggacccccagagactccacacctaccatatggattcccttgatctgctttcaactccgagtcccagtcctcattaaaaagatcgccaggctgttccttgggtggacagtttgtcccttctgacagctcccaggtattcagttctccatcagagtcctcctcatccatggcaaagccttcctcttcagaatgggtgccctcaccccgggcaggactgtcattaggaatgctctgtgttccacgggctaaattg

SEQ ID NO: 11039 - DNA, 473 bp, Homo sapiens
  MAP TO AC004875.1; EXPRESSED IN ADULT LIVER, SIGNAL = 0.81; EXPRESSED IN PLACENTA, SIGNAL = 0.74; EXPRESSED IN LUNG, SIGNAL = 0.9; EXPRESSED IN BRAIN, SIGNAL = 0.69; EXPRESSED IN BONE MARROW, SIGNAL = 0.78; EXPRESSED IN FETAL LIVER, SIGNAL = 0.73
ggaggtagttggagccatagtgatattgtcaggggtggatacagcacatatatcatggatattgccatttgaggtgaaaaatttaaactgaatctctttttgtttagatagccgtacctcctctggcaggaaacttgagtaatattggactgagctgaaacctcatcattcatctctagcttctaaatttacagaggtgaaataaagcacgctaggtatcttaaagctctgtctctcaaccaaggactctggtaagtgtctcagctggaagtagttctctgtacatctctcagaatcataatgaaaataatctctctcctggaaataaatgcatctgatatagcggtcataagcacaaaaggaaaaaatatgatgtcattaaccatcttgaccccaaccaattgtaacctcacttaccttcatattatctttttctttcttatttcaacctaatgctatctggttcaaagttt

SEQ ID NO: 11040 - DNA, 489 bp, Homo sapiens
  MAP TO AC005562.1; EXPRESSED IN PLACENTA, SIGNAL = 0.89; EXPRESSED IN LUNG, SIGNAL = 0.82; EXPRESSED IN FETAL LIVER, SIGNAL = 0.9; EXPRESSED IN BONE MARROW, SIGNAL = 0.87; EXPRESSED IN ADULT LIVER, SIGNAL = 0.76; EXPRESSED IN BRAIN, SIGNAL = 0.81
cagtgagcacaggtggagggggccatgtgcagttgctccattgggcagcggctcagctgacctgctgctccctctgttgtcctgatgacctggctgcctgtggcctgctgggactcccacgtgctgtccatacccatgatgctttaggccctgggagattattacccagtaggatgtcctgaaggcacgtcttgtgaggtctatccagatatactgaaagcattgggcagatgtcacagaaagaggaggagaggtcagaggccgggcctcctgctctccgaggctcagcgccttctcccctgggcaggtgtgtggagatcgtccacctcctccaccaaagggatgacacggtgagggtggaccctgagctgcaggcctgggatcaggagatcatggaggtggggctgtgccaggcccaggaccgaggtaagatctgtcccagagataggagctcctgggagactctgccagggacccttcccagtgctg

SEQ ID NO: 11041 - DNA, 400 bp, Homo sapiens
  MAP TO AC001228.1; EXPRESSED IN ADULT LIVER, SIGNAL = 1.1; EXPRESSED IN LUNG, SIGNAL = 1.1; EXPRESSED IN PLACENTA, SIGNAL = 0.96; EXPRESSED IN FETAL LIVER, SIGNAL =   1; EXPRESSED IN BRAIN, SIGNAL = 1.2; EXPRESSED IN BONE MARROW, SIGNAL = 1.3
tggggttgaagtggtttttcccaaaggccccggtcccggctgttagggcgcagggctcgccgggacgcgggcagtcactcaccgcggcgggctcatggcgtgcggggtttgggctgcggggatggcctggagggctccgagggctcggagggtgcggcggccgcggcagccacggcgtcctcggcgggtgcggcgggtgcggtgcgttcctggcggctgcgaaagtcctgcagggcgcggcggttctggaaatcgatgagcgccagcgcgatggccgcgttccagcagctctcgcccgcgcagcggaagtcgatctccttgtggtcggtggtgacgatggtgaagtacacgtacttgcccgtgcgctccacgcagtccaccttgaggatggagtggaagc

SEQ ID NO: 11042 - DNA, 466 bp, Homo sapiens
  MAP TO AC005918.5; EXPRESSED IN LUNG, SIGNAL = 0.65; EXPRESSED IN BONE MARROW, SIGNAL = 0.58; EXPRESSED IN PLACENTA, SIGNAL = 0.67; EXPRESSED IN FETAL LIVER, SIGNAL = 0.76; EXPRESSED IN BRAIN, SIGNAL = 1.4; EXPRESSED IN ADULT LIVER, SIGNAL = 0.7
caggcactcctacccttgtcgggttataaagaaacaggaaatggtgtgatgtgcacacacaagaaataggtgactttagaagaccaacgtgagaaaatgactgtcagatggtatcacctttccgaggcttttaaaaatacaagattgtcactttttctcttttcagtactgagaaaacaaattccagcaaaaaaaaaaaaaacaggaacaaaaacaaaaaaaaccctccgaaatgtctcctgctaagtggaacccaggtgggaactgcggtgttagttgttagttgtgcggtgttagttgtttttacttctccattcatcctcagctgccataattcttggcaggaagccagagaggaaaatgggcaggaacctactggcctctggggtacactggatggtctggctctgcccagagaactatgagctacttcaaggtggggaggggaaaggggcttctagcagct

SEQ ID NO: 11043 - DNA, 489 bp, Homo sapiens
  MAP TO AC002060.2; EXPRESSED IN LUNG, SIGNAL = 0.81; EXPRESSED IN PLACENTA, SIGNAL = 0.68; EXPRESSED IN FETAL LIVER, SIGNAL = 0.69; EXPRESSED IN BRAIN, SIGNAL = 0.75; EXPRESSED IN BONE MARROW, SIGNAL = 0.73; EXPRESSED IN ADULT LIVER, SIGNAL = 0.75
ccaggttggaagaacattataaaagaagatagaagccattttaaactgtgaaagaaggtcaaataccacagaaaattctggggttccaattagacttgtcaagaagtattgctttccttcctattgacaatggtgttttccctatttcttcactttccctattttctctttttcatttttgcctgttataggagacatattgctcatctccaaaattctctgccacctgcagagttacctgtttttcagccacagttagggtttgccttagcagcagcataacatccctccgtgagaagtcaagtacctgagttaaattttggaaagcttctatatacctatcagggtcattagaaaattggcctaagtctccctttacctgtctaaggtcctgcaatgagaagggaacttgaaccctagtggcatcacctccattgggcatttcctgtaggggtaagagtgaaggtgggggagtgggaaattttggag

SEQ ID NO: 11044 - DNA, 427 bp, Homo sapiens
  MAP TO AC002301.1; EXPRESSED IN ADULT LIVER, SIGNAL = 0.55; EXPRESSED IN LUNG, SIGNAL = 0.53; EXPRESSED IN BRAIN, SIGNAL = 0.71; EXPRESSED IN BONE MARROW, SIGNAL = 0.57
ctcccaaactggacgctggcctctggcctctgctcgggttcagcccagctcaccaggcctgtggcggggggcctcccctcccagggctggggcccccagaaggtgctccgggctgggacctccagtacggtctgggggcccaagttgctgggagcagaatttggggctgagggggcaggtggggctgttgctcgggcctccaaagtgcccacctgggtgggaggctcaggggcccgatctgtcagcagggggaccgcagagccataccagtcctcagagcgctctcgggcggtgcccatgggctcaatccacagctctcctcctgggcgccacaccagggtgggtgcacggtggctggggtctgggcggagagcacggcggaacaggcgttcagccaacacagcggtggtgaggatgaagagcgcag

SEQ ID NO: 11045 - DNA, 448 bp, Homo sapiens
  MAP TO AC005972.1; EXPRESSED IN PLACENTA, SIGNAL = 0.82; EXPRESSED IN BRAIN, SIGNAL = 1.2; EXPRESSED IN BONE MARROW, SIGNAL = 0.92; EXPRESSED IN ADULT LIVER, SIGNAL = 0.95; EXPRESSED IN LUNG, SIGNAL = 1.2; EXPRESSED IN FETAL LIVER, SIGNAL =   1
gggacttaggggacctctacctcaagtttcactctcctagaatttccagtggaagcttgcagactaggtccttttatctgctatggtacagtcagaaaaacagatacccctctaggtatctcagatagaaggaggcttatacagggaattagaggcttaaataactctaggaaagctgcaagagtgatagtgatcgggacacctctttcaggaaatctggtagtgcaggaatcacaaggaagccactgccattgctctcagctgcctgtagagccagttggagtattttcaggagaacacccaaaagttttaggcaaaattccatgtcagccatctgctgctgcctcaagaaaacaatggcttctccttttcttcccaaccaaatctcatgcaagtgcctctcattggtggagtccgggctgaatactgttggcaagatcagggaaat

SEQ ID NO: 11046 - DNA, 449 bp, Homo sapiens
  MAP TO AC000004.1; EXPRESSED IN BRAIN, SIGNAL = 0.6; EXPRESSED IN BONE MARROW, SIGNAL = 0.81; EXPRESSED IN PLACENTA, SIGNAL = 0.58; EXPRESSED IN LUNG, SIGNAL = 0.66; EXPRESSED IN ADULT LIVER, SIGNAL = 0.7
taaataacccaggctgtggcattttgttatagcagcaggaacggactaagatatccatgtcttttatatcagtactttgctcctttctgttgctgaatagtattccattgtatactacattgtttttatccagtcaccagttcatgcatatttggattatttccagtttggggcattctgaataatactactctgcctgcttgtgtcaaagtctttgtgtgatatgataagttcaactctaaaaaactgccaaactgttttccaaagctgccgtaccatttacactccctccagcaatggaggaatgttcttcacatccttaccaacaaccgttattgtcttctttatagccattctagtgaatatgtaatggtacctcattgtgattttattagcattttaagtggtaaatgatgttgagcatcttttcccatatgcagtagctattc

SEQ ID NO: 11047 - DNA, 452 bp, Homo sapiens
  MAP TO AC006095.1; EXPRESSED IN PLACENTA, SIGNAL = 0.74; EXPRESSED IN LUNG, SIGNAL = 0.84; EXPRESSED IN BONE MARROW, SIGNAL = 0.78; EXPRESSED IN ADULT LIVER, SIGNAL = 0.87; EXPRESSED IN FETAL LIVER, SIGNAL = 0.89; EXPRESSED IN BRAIN, SIGNAL =   1
tccatcttggaaagccactcaacatagtgagaagagcttggcctttggcatgagagagactaatttggaatccagctccttcatttgctatcactgtgatcttgaacaagttgtcagcgtcagtttcctcagctctaaaatgagataacagtactcatctttcagggatagcataagaattacatcagaaaaatgcacgggaggtgcttggaatagaggagccactaagaccatcacgatgtatcaggtatccttttggttaggaaccatactttggacagatttccaagtcctcagataccctgtttcctttttgatgatgccctttgggttgatgagattaaacactgctgagaccttcagaaagtggtcaaatgggtgggtgattacgctcttggatggatgctatggtaaaatagaaaagggtaacaagaagctctttgggaagcttg

SEQ ID NO: 11048 - DNA, 478 bp, Homo sapiens
  MAP TO AC003080.1; EXPRESSED IN PLACENTA, SIGNAL = 0.61; EXPRESSED IN FETAL LIVER, SIGNAL = 0.72; EXPRESSED IN BRAIN, SIGNAL = 0.63; EXPRESSED IN LUNG, SIGNAL = 0.59; EXPRESSED IN BONE MARROW, SIGNAL = 0.61; EXPRESSED IN ADULT LIVER, SIGNAL = 0.69
cctgtaagcatctctgaaggagtgttaaatcccattaaacataaaaaacaataatgtaatcattagttttcattctttccagaaataaagttttaattgccatacttttgtatttgactactaaatacatttaccatccaaataaacaatggttttgagaaaatgccttttagtgttttgtttttaattgcatctgctgaccaatggctacaaaatatacaaaatggcttttcagaggcacaatttcctccaagagactcaccctacctgggttggtataaagctggctttccacggttttgccaatgcactgcagtttgatggcctgcagggaatcatccacatgcaggatggtcggcagactgcccagggtgtcctggaccaagttggctacttcccggacatcaaagagcttcaacagttctgagtacacggcagggaaagagctcagaaacacagccttaaaaagaagaagaca

SEQ ID NO: 11049 - DNA, 465 bp, Homo sapiens
  MAP TO AC005920.1; EXPRESSED IN BONE MARROW, SIGNAL = 0.68; EXPRESSED IN PLACENTA, SIGNAL = 0.68; EXPRESSED IN LUNG, SIGNAL = 0.53; EXPRESSED IN FETAL LIVER, SIGNAL = 0.69; EXPRESSED IN ADULT LIVER, SIGNAL = 0.61; EXPRESSED IN BRAIN, SIGNAL = 0.97
ttgtcatactgtactgtttaggggataataagaaaaaagtatgtacatgtttagtgcaggcacagctatcatttttttttcaaatattttcaatctacagatgcagaaccacagatatagagggccaactatatctgcctattttataaatacaaagcaggcaacacccacaaagacatattttctcatacccacattatccaggtttactgaatactttcctagtaagtaaagaactagggtcactcaccagtagatacatttctagtttcctgggctacctgtacttcaatgtgtttgcttatctctgatttatttggcgcatctgtaaccttcacaaatccttcgttttcttcctttaagggagtatcagtaggaattgttgccacatctgaattagctgttgatgctggagtggtagctttagatccgccttggctaacatcagaaagctcatcctacaaa

SEQ ID NO: 11050 - DNA, 466 bp, Homo sapiens
  MAP TO AC002303.1; EXPRESSED IN LUNG, SIGNAL = 0.6; EXPRESSED IN ADULT LIVER, SIGNAL = 0.54; EXPRESSED IN PLACENTA, SIGNAL = 0.71; EXPRESSED IN BRAIN, SIGNAL = 0.57; EXPRESSED IN BONE MARROW, SIGNAL = 0.65
aagcaaacaaaacacgtgccacgaagaaatgatttgcaagcagccaggagataccacaggaccctctcctccaaacccatgatgatgtggtacaagtgacagtgtcaggcctctcattaggatggcaccaagggcaaccgcaggtgtttgctgaactgaaggggtgtttcttgcaggtgcccagcagtgcagtgcacgcagcccctgcccaccccacgtgctccctacccttggttggggtggagtgatgaggctgggtcttgggccggaggtttgcagaggctcttgtgtctttctgggaccctctgcctctccgcttgctgctgctcctctcctcctcactgtccgactcagagaggaaggtgtcctcgccttcaggcagaagcgactcctcctgcatagacgccaggctcacggtggtcaagagctcgctgcgggccttctctctttggtactgccggcttag

SEQ ID NO: 11051 - DNA, 476 bp, Homo sapiens
  MAP TO AC005840.1; EXPRESSED IN PLACENTA, SIGNAL = 1.1; EXPRESSED IN LUNG, SIGNAL =   1; EXPRESSED IN FETAL LIVER, SIGNAL = 0.96; EXPRESSED IN BONE MARROW, SIGNAL =   1; EXPRESSED IN ADULT LIVER, SIGNAL = 1.2; EXPRESSED IN BRAIN, SIGNAL = 0.85
gctgttttatgatttggctttcatatatgctattgtttctatcttgagtgttcccttccctctaagctagttaacttggctcaaatgccatcttctctgtctacttagtcttgtctctattactggactaagctcctggagggcatgatcaggaattattcatctgtgatctccagccttaagcacattgcctgacaccctggaggctggagtataatgaagtctcaggggatgtgtggtagaagctgtggcagctgccgccttgggaaaatagtcaggagcagaggcaggagcatgaagccagggctgcgaacaaagtggatgggcagcagaacaaggccatagatgagctggggcaggagagccatgagccctagtgtggaggtggggaaaaggaggacactcccagtacctggtgggacaacctgggtgctggccccaaggggctcctccagagagatgtgtgtgacctggca

SEQ ID NO: 11052 - DNA, 466 bp, Homo sapiens
  MAP TO AC006501.5; EXPRESSED IN LUNG, SIGNAL = 0.88; EXPRESSED IN FETAL LIVER, SIGNAL = 1.3; EXPRESSED IN BONE MARROW, SIGNAL = 0.81; EXPRESSED IN PLACENTA, SIGNAL = 1.9; EXPRESSED IN BRAIN, SIGNAL = 0.73; EXPRESSED IN ADULT LIVER, SIGNAL = 0.72
aaaaatgggcaatggatctgatcagacatttctccaaagaagatatataaatggcaaataagcacatgaaagatgcatgtcattaggtaaatgaaaatcaaaaccataatgaaattccacttcacagctgctaggatggccataatcaagaagatgggtcattagtgtagtgccagaacattaagaagaaaccattaatgcaacaaaatccaactgcagagtaatttggtaaaagttgttttgaagattgcctatctttcactaagcttaccaattttcaaatcatcagccagactttcttttgtaagattcaacagttcttttccatcaatgttattcatcttgaaaataccaacaagatcttttaaatcttgtgcacaaagccatgttgagacatcctcctctgaccaatcttcggtaaattgcttcagctgatgttctgtgcgccttgcttaaaataaacaaa

SEQ ID NO: 11053 - DNA, 478 bp, Homo sapiens
  MAP TO AC004974.1; EXPRESSED IN LUNG, SIGNAL = 0.55; EXPRESSED IN FETAL LIVER, SIGNAL = 0.71; EXPRESSED IN BRAIN, SIGNAL = 0.89; EXPRESSED IN BONE MARROW, SIGNAL = 0.73; EXPRESSED IN PLACENTA, SIGNAL = 0.8; EXPRESSED IN ADULT LIVER, SIGNAL = 0.67
ccgtacatatggaagattatcaaaagaatttaacgtagtttaaagtgccttatttataaattctgacatgcagaatttcatcagatgagaaatgttcagagttcagagttaagaaaaaacaaaatgagtaattgcaaagagagtgtctttcacaataaaaagtatcaattatctccatcaaaacaagaaacattaaggtctgtattccggaagcctagcaataaacctgagcaagaatgctctcctcagaaaggcaaactcaccccttgttcatccagtttcatgagctgctctgtgaccttgggtgtgttgaaggccaaccgcaggcactggacattgagctcaggaaccacgtgctccagcacttctttgagaggcaggcctctggctgtcgagtgcttggctgtcgacggaatggcgtcctccaggaccgaacctctcagtgtcatgagctgcaagagagacaggtgctgtggtg

SEQ ID NO: 11054 - DNA, 459 bp, Homo sapiens
  MAP TO AC005879.2; EXPRESSED IN BONE MARROW, SIGNAL = 0.93; EXPRESSED IN PLACENTA, SIGNAL = 1.1; EXPRESSED IN LUNG, SIGNAL = 0.99; EXPRESSED IN FETAL LIVER, SIGNAL = 0.88; EXPRESSED IN ADULT LIVER, SIGNAL = 0.95; EXPRESSED IN BRAIN, SIGNAL = 1.2
aaaagggtagttcagaccaatgagtacacaagaatgtgacacttaccactttctggaactgttccaaaggaatctaactggtgtccgagaagatgtgtttgacctatggtgccagccttcagtttctcagaagacatatgggacccagataaatcagacattgaatgcgctgacgagagtcgctgaggacccaagagaaaaggcttttttggtttggatttcatctgtatttcaccacttgaaaattcactattggcatcgggcatgtgagtacttggaatgattgcagaagacgtatcagaaaatgttccatcattttttctacccttcatcttatcttttaactttgcaaaaggagatctggttttgtccttcattgataagtcaaacatacttgcggtcatattgttcctcataaactgaatattgacctttatctcacccctgtttttgattcgt

SEQ ID NO: 11055 - DNA, 478 bp, Homo sapiens
  MAP TO AC005747.1; EXPRESSED IN BRAIN, SIGNAL = 0.62; EXPRESSED IN LUNG, SIGNAL = 0.72; EXPRESSED IN FETAL LIVER, SIGNAL = 0.71; EXPRESSED IN BONE MARROW, SIGNAL = 0.94; EXPRESSED IN ADULT LIVER, SIGNAL = 0.65; EXPRESSED IN PLACENTA, SIGNAL = 0.59
gcctccttgagtccctaaaagaaacttctcaaatgaggctttagtagatgcaaatgtcctccggcctcttccaaacctggcactatccaagtgtcctcaggcctcactacttggtgtagatagatgaatggggtgacaatgtatgtggcagcaatcatcagcacctcgctggcttgaatatcccacttgctcacatcagacgcccacccccaccagcctccttggacgaatccaaaagtgactcgcttgggctccccaaccaggttgcaactccagtcgccatggagtgtccggcatactcttcttcatctgcattagctacttcctccccaacaccatcactgtcctctgtccacgaagtggcaagaggaagcctcacactgtggctgtcactggcacccatcataagaggtagacattagggccatgggagttttctcccagccatgggcctgaaggctgaaccacttgggacact

SEQ ID NO: 11056 - DNA, 446 bp, Homo sapiens
  MAP TO AC003691.1; EXPRESSED IN PLACENTA, SIGNAL = 0.82; EXPRESSED IN BRAIN, SIGNAL = 0.72; EXPRESSED IN BONE MARROW, SIGNAL = 0.77; EXPRESSED IN ADULT LIVER, SIGNAL = 0.64; EXPRESSED IN LUNG, SIGNAL = 0.79; EXPRESSED IN FETAL LIVER, SIGNAL = 0.79
tttctcatttatcttatgaattcccagaatacttgaaattatattcaaagcattaaaatatagttcaaaccaattataaattatttttgaatatatttatttgctgaatttgctgaaaataaatttaattttacatacctctatatctcccaaatgtaaaggtcctcctgagtctgaaaaggaattgaatattacctgcagtcactaaaaaactgaaattttgatagtttcatggtttaaagttttacaaatgaaaaataaaatcttacggtaacagcgaatatccatagcatgatattctcccttgtggtagaaaatgaccacttctctatcatggacaacagctgtcattctttcagattttttaatgtcatcttctctgcccacacacacagaagaatattccctcttttcaggatcttgtgcagagccatcaagattcatgc

SEQ ID NO: 11057 - DNA, 476 bp, Homo sapiens
  MAP TO AC004881.1; EXPRESSED IN PLACENTA, SIGNAL = 0.9; EXPRESSED IN BONE MARROW, SIGNAL = 0.83; EXPRESSED IN ADULT LIVER, SIGNAL = 0.91; EXPRESSED IN LUNG, SIGNAL = 0.83; EXPRESSED IN FETAL LIVER, SIGNAL = 0.79; EXPRESSED IN BRAIN, SIGNAL = 0.93
accttatccctatagaaaaatctgtgtaacactccagtaaaaaaaaaaaaaaaaaaaaaaaaaatccttaaatttaagtgaacttcaagtctctttagggaattaatggtctatgttacccatcctctaaatttacaactataggctttgaacaagaatagctaaagcaggtgtgttaggagtggctctaattcctctcaacagagaaatagaaacctcatcctggaaactaaactccaggccccaatgcccacacaatttgtctcccaattctaaatctagatgtcactgataaaataaaggctttgcttcttgtctcagtaagaagaaaaaccttggagaatacagttaccattggagtcacaagttcgatcttatctcattaatactgacacttcccccccagtgaattcaacttgaggttgccataacaacttccctgtagagttcaaagcccagaagcccatttccactgt

SEQ ID NO: 11058 - DNA, 474 bp, Homo sapiens
  MAP TO AC005585.1; EXPRESSED IN LUNG, SIGNAL = 1.1; EXPRESSED IN ADULT LIVER, SIGNAL = 0.99; EXPRESSED IN PLACENTA, SIGNAL = 1.1; EXPRESSED IN FETAL LIVER, SIGNAL = 1.1; EXPRESSED IN BRAIN, SIGNAL = 0.76; EXPRESSED IN BONE MARROW, SIGNAL = 0.95
cttacctccctccctgttccaaccctcctccacaaacagatcaagagagaggttcccacttgcatttaaagggctctttctctttcaaactgacccacccaacactcaggccccactaaaaggcagctgcacttctcagccaacagtgtccgacctcaagaatgaagctctaaaaaagtcagttccagggtagatgctggcttactgtgggtggtcggggcactgaagtgatgggtggagccgagctggggatgttggtggctgaagatggtggcggtggctgttgagggatttcattgggcttgctggggccaatcttctctttagtgtcatcctctggcaccaggcctttggccttgtgaatggcctcaatctgctcctggagggtgatgttggcctgggcagcctgctgggtccgggccatgctgcctgagtggccatcccaggtcacctgcaagtgaaagcaaagccaca

SEQ ID NO: 11059 - DNA, 422 bp, Homo sapiens
  MAP TO AC005228.1; EXPRESSED IN BRAIN, SIGNAL =   1; EXPRESSED IN ADULT LIVER, SIGNAL = 0.86; EXPRESSED IN PLACENTA, SIGNAL = 0.9; EXPRESSED IN FETAL LIVER, SIGNAL = 0.84; EXPRESSED IN BONE MARROW, SIGNAL = 0.75; EXPRESSED IN LUNG, SIGNAL = 0.9
caggaaaccagaaaagagccacagtagggttttaaagatctgtgggccccaaagagatgctatggctcataacaaatttctaatcttgaatgccttgttccaggtgggatgtcatttgtgattacttgttctgacaacatgagctccaggcatgatttttaaagaagaaagatgtaaacagtaacgtcagtgagaatcatgatttccaattacttatagagttttaagaggaggtcaggtaaagacatactagttttttcagacagaggattcctgtgatctgttgtttattgtagctttcacatgagaggaattgctggaagaaacatttggtatcatggaagaaacatttggtatcatgcttcagaatgtgagttttgagatgcctgcaataaaatatagggttaaatgcctgaatgaga

SEQ ID NO: 11060 - DNA, 368 bp, Homo sapiens
  MAP TO AC004982.1; EXPRESSED IN PLACENTA, SIGNAL = 1.1; EXPRESSED IN LUNG, SIGNAL = 0.98; EXPRESSED IN BRAIN, SIGNAL = 1.1; EXPRESSED IN BONE MARROW, SIGNAL =   1; EXPRESSED IN ADULT LIVER, SIGNAL = 0.93; EXPRESSED IN FETAL LIVER, SIGNAL = 0.93
ggtcctccttacaaattcggtctaagatatataacatcaaggaaatgaaaggttcctttatcagccctaatgcgacagtgacctttaagctactgtcttttatctcacactaaataagaggccagcacttctactgtcttctgtgtgtcacccttgggaatcctgtacagccttttccattgtgtcactgcccatggccctttaagaaatacaatagtgaatattacatggcctgggaaatcaccagctctaagcagcagcaagtcctcttcaaatgggatttttttgtctttcatacagctatatttttcaaatatggaaatagaattgtcagatttattgagagctgaagaaacctatttaataaa

SEQ ID NO: 11061 - DNA, 459 bp, Homo sapiens
  MAP TO AC002490.1; EXPRESSED IN BRAIN, SIGNAL = 0.8; EXPRESSED IN ADULT LIVER, SIGNAL = 0.49; EXPRESSED IN PLACENTA, SIGNAL = 0.72; EXPRESSED IN LUNG, SIGNAL = 0.7; EXPRESSED IN BONE MARROW, SIGNAL = 0.68
  unsure 214
gtcccttcaccggctctctcccctggggccgcaaacctacctgggcccccctctggcagaaaggggtcctctcagacccacaggtccaacggctaatcctggctctgcttcccctgggagccttctgcggctgcccccaccctgggctgggtgagtgacccccatcaccctggcagctgagcagtggggctccccactcgccccagctgcaggncgggccctggcccgggaagctcactccggctctgtcgctgcagaatgaatggaacgcctactatgaggaggtggtgtacgtcctagaggagatcgagtacatgatccagaagctccctgagtgggccgcggatgagcccgtggagaagacgccccagactcagcaggacgagctctacatccactcggagccactgggcgtggtcctcgtcattggcacctggaactaccccttcaacctcacca

SEQ ID NO: 11062 - DNA, 464 bp, Homo sapiens
  MAP TO AC004586.1; EXPRESSED IN FETAL LIVER, SIGNAL = 0.96; EXPRESSED IN BRAIN, SIGNAL = 0.65; EXPRESSED IN BONE MARROW, SIGNAL = 0.79; EXPRESSED IN ADULT LIVER, SIGNAL = 0.75; EXPRESSED IN PLACENTA, SIGNAL = 0.59; EXPRESSED IN LUNG, SIGNAL = 0.7
gccccatcattcagtcattcaatgtttatcgaaagcttaatgtgttgttaccgcttcatactttttcaaatatcacttgagaatcataaagtctgatgaggaagaaagggcaaatcagatcacctccactttggaggaggggcagaggcccagcgggtgcaggggcttgctcaagccctctgttagtaagcggatgcctcagcacccctgtggcgaaagccgtgcccccacttcctcacccctcctgtgcccacaggtgtctgtgcctgtccgcctgccagccctgggcctgggcgtgctgcagctacagctgggcctggatgggcaccgcacgctgccctcctctgtgcgcatctacctgcacggccggcagctgtccgtcagcaggcacgaagcgtttcctctccgtgtcattgactctggcaccagcgacttcgccctcagcaaccgctacatgcaggtct

SEQ ID NO: 11063 - DNA, 451 bp, Homo sapiens
  MAP TO AC006237.1; EXPRESSED IN ADULT LIVER, SIGNAL = 0.58; EXPRESSED IN LUNG, SIGNAL = 0.66; EXPRESSED IN PLACENTA, SIGNAL = 0.71; EXPRESSED IN FETAL LIVER, SIGNAL = 0.68; EXPRESSED IN BRAIN, SIGNAL = 0.92; EXPRESSED IN BONE MARROW, SIGNAL = 0.69
cagtatcgccccagtcaaagggggagctgcccagggcaaaaactgtgtcttccccgtcagacgaggggctgctgggggagggcctacccctcgccatcctactgggtctgtggggaccagactcgggctctgcagcaggtgtgactgacgtgggctttctgggtggcaggtaacaaatggtacaagcagcacctctcctaccgcctggtgaactggcctgagcatctccggagccggcagttcggggcgccgtgcgcgccgccttccagttgtggagcaacgtctcagcgctggagttctgggaggccccagccacaggccccgctgacatccggctcaccttcttccaaggggaccacaacgatgggctgggcaatgcctttgatggcccaggtgctggcacaaagcctccctcccgcacagcaggaggggaacccaacttggagaagca

SEQ ID NO: 11064 - DNA, 393 bp, Homo sapiens
  MAP TO AC004457.1; EXPRESSED IN ADULT LIVER, SIGNAL = 0.53; EXPRESSED IN LUNG, SIGNAL = 0.57; EXPRESSED IN BRAIN, SIGNAL = 0.59; EXPRESSED IN BONE MARROW, SIGNAL = 0.61
tgaatatgtgcaagacagtaaacctttatattttgttttagataatttactttgttaaaaatatgattttgatagtctcatttagtggttttgttgtatactttttggaaaatatgaaattctattacacgctaattttatagcagatttattagcagatcctacaatcttaaaaacaatatagtagtgattcttatttggggaagatcaatgacaatcacagaatcacctgggaaatttcagaaattaagttactacccaccttggatattcgaaataactctcccaataccatgggagagcagggtgatggttcttatcagaatctgaaagaagtaatccacttgaactgggacttctgctgtcggtaaaagtgaagtaattggggccaaa

SEQ ID NO: 11065 - DNA, 381 bp, Homo sapiens
  MAP TO AC004737.1; EXPRESSED IN BONE MARROW, SIGNAL = 0.56; EXPRESSED IN ADULT LIVER, SIGNAL = 0.59; EXPRESSED IN LUNG, SIGNAL = 0.57; EXPRESSED IN BRAIN, SIGNAL = 0.79
ctgagcgcaatcatacttcggatataactgtaaaacgacttcagctgactttgcagtgttgcagtgtcacattaaaccctaagttgtttgtgtttccctacacatcactctccaggagcattatagttcagaagattagagtaatttcttagactaaagccttgatgggttattattacataaaacgttttccactctgatggagaagtcaggtgcattcgctcatgtctccgtggcagggccgggactcctggtcccccgcgattctgagcggtgcctcacagcctaggtcctccaacctcacagggcggcccgcagcaaatgcgccactgtccggtgcggccaaccagctcgtggtgcgctgtgggaaggtcacaggac

SEQ ID NO: 11066 - DNA, 467 bp, Homo sapiens
  MAP TO AC005291.1; EXPRESSED IN BONE MARROW, SIGNAL = 0.65; EXPRESSED IN PLACENTA, SIGNAL = 0.74; EXPRESSED IN LUNG, SIGNAL = 0.79; EXPRESSED IN FETAL LIVER, SIGNAL = 0.85; EXPRESSED IN BRAIN, SIGNAL = 0.72; EXPRESSED IN ADULT LIVER, SIGNAL = 0.82
gatcccacctcgaaactgacactattctgccaccatggaatagctgttaatgtattttggaatttcttttaccaatgtaattcccttcatatatttattgcttcttcttctggggatatcaactttacatggtataaaattgactttggaatttgctcgggaagaaatctggcttgcactcgctttttttttttttcttttcaattacgtgattgtttttagccccacttgtagctagctttaccactctaaataatacacttaccctctgctgcgtgtgttatccaactttagatggtatcaatgaactttcccttctggaggatgagaagatcagtgctgtcactcatctttcgcctctcttctgccccctccaccttaactcctgacatctgtccactggatgctcagttttagcctgtcagagtttataatatttatagtctgttctgtaactgaaactgtga

SEQ ID NO: 11067 - DNA, 479 bp, Homo sapiens
  MAP TO AC006534.2; EXPRESSED IN BONE MARROW, SIGNAL = 0.59; EXPRESSED IN PLACENTA, SIGNAL = 0.68; EXPRESSED IN LUNG, SIGNAL = 0.52; EXPRESSED IN ADULT LIVER, SIGNAL = 0.61; EXPRESSED IN BRAIN, SIGNAL = 0.61
  unsure 68
  unsure 231
  unsure 259
catcgattttcactcctctgctcttttatggtgcaggccgttttactagtcccacaaaagtgtttccnactctccatgttcttggttttatgaccgaaataacctccacgtcaagcaactttaagggatcgaaatgtctggaagagagaggtgacactgcccaatttagatccagctcaggttctgcagcaacagggtctgggtgacgacatgtttctatggaaggttgcngaaccgggcatctgcagtatttcccagnatcagtttacatgtgcatttgtgaaagggtgggcaacatgttttaaaaattctacgtacacttgtttgggcatgactctctatgtcatccacaggggaggaatgctgattgcaaacttttatgttggtttgttcatgcatgtttttctcgtattcccgaacatcatccattgtcatatctgaaagaggtcaagatgttggcaacttccgttattagatgc

SEQ ID NO: 11068 - DNA, 468 bp, Homo sapiens
  MAP TO AC003083.1; EXPRESSED IN BONE MARROW, SIGNAL = 1.2; EXPRESSED IN PLACENTA, SIGNAL = 1.2; EXPRESSED IN LUNG, SIGNAL = 1.1; EXPRESSED IN FETAL LIVER, SIGNAL = 1.1; EXPRESSED IN ADULT LIVER, SIGNAL = 0.94; EXPRESSED IN BRAIN, SIGNAL = 1.2
tggctcattaaacacaagctcatatatttaactgaaggactggctgaagattcaactaaaggaaaagtagacagctggtacaatatggcataagaatttctcagataatctaaccttaccaaagtagtccgaaatcttgtctttgctctaagataataataagttcagaaagaataactgagaaaccaaagtagatagccatatgttttggtacaactaactattaattagttggaaaaaaaagtattacacttactcataccactgtttattgtgttttcggtaaagcaacgtatccaaggcaacagcattgacatccagagctcctggagaaggccactggttggtgagatgggcagttaactcttgtctcgatcttaaatcattattctttagcacagtcctgtgaatattaagatggtgagtgcttttgtcttcactgttctacaatggcagaggaacctaatg

SEQ ID NO: 11069 - DNA, 482 bp, Homo sapiens
  MAP TO AC002307.1; EXPRESSED IN PLACENTA, SIGNAL =   2; EXPRESSED IN LUNG, SIGNAL = 0.72; EXPRESSED IN BRAIN, SIGNAL = 0.86; EXPRESSED IN BONE MARROW, SIGNAL = 2.8; EXPRESSED IN ADULT LIVER, SIGNAL =   1
agaccccttttctctgggagagggtatcctgggtcccccaatgaggtgcgcatccctgctaggtgcccccttccctagagcacccatgccagctggggccatctgtgtggtgttggtcctccctggtaggcgggcctcagaggtagcaccctctgccctgcccctgtggcacctggcactttagactcctggatgttgagataatcttcactgcctggaggccaagggagaggccagggtgggacaaagggcggctgccagccccaggcctcctacctccctcccgctgcaggatgtggtgcaggtgcatgatgtccaggatggcttccaggtcctgctctgagtagcccttccttcgcatgtcctccactgagtccgggtaggtcacctggtcacgcagggaacccacagacatgtagggcctgtgggaaagctgggtgtccacggagggaagggccagccctgcctcccccaagatactc

SEQ ID NO: 11070 - DNA, 368 bp, Homo sapiens
  MAP TO AC006544.19; EXPRESSED IN PLACENTA, SIGNAL = 1.1; EXPRESSED IN LUNG, SIGNAL = 0.99; EXPRESSED IN FETAL LIVER, SIGNAL = 1.1; EXPRESSED IN BONE MARROW, SIGNAL =   1; EXPRESSED IN ADULT LIVER, SIGNAL = 1.2; EXPRESSED IN BRAIN, SIGNAL =   1
ttttctctgggaccccaacggagagtaaatactgcaactctactgttcctaagaggcattgctcccattcccattcctcaggactggaagatgatgatgagtacctccttttgcaggctcattttgcaggctgttttttttgttttgttttgttttttacctcctcactgggcaggaacactagcacatctcctggaagctccttccgacacaattcaagcactgcttggcaggcagcttccacccgatcaggtgggatggtgtcccagtagatgggggaaggtctctcaccaggctctctgggtatatgcacaataggaggattgccccagaaagctcggagcttaggttcaagggctgggtcagta

SEQ ID NO: 11071 - DNA, 489 bp, Homo sapiens
  MAP TO AC004023.1; EXPRESSED IN PLACENTA, SIGNAL = 0.85; EXPRESSED IN LUNG, SIGNAL = 0.84; EXPRESSED IN FETAL LIVER, SIGNAL = 0.94; EXPRESSED IN BONE MARROW, SIGNAL = 0.9; EXPRESSED IN ADULT LIVER, SIGNAL = 0.9; EXPRESSED IN BRAIN, SIGNAL = 0.86
ggcagcctgacaatgagatagaaaagaaaatcctgttttctgaggagaaatacaagccggctgcagaaatttgcataagtaatgaggagccaaatgttaatgggggaaatgtctccaggacatgtcagaggtcttcacagcagcctttcccatcacaggccttgaggcataggaggaaaaagtggtttcatgggcaggtcctagggtccccatgctgtgcggcgcctagggagttggtcccctgtgtcccagccactccagccatggctgaaagaggccaatgtagagcttgggccatggcttcagagggtgcagtccccaagctttggcagcttccacatggtattgagcctgcgagtgcacagaagtcaagaattgaggtttgggaacctccgcctagatttcagaggatgtatggaaatgcctgcgtgcccaggcagaagtttgctgcagaggtggggccttcatggagaacctctgccaggtcag

SEQ ID NO: 11072 - DNA, 447 bp, Homo sapiens
  MAP TO AC002310.1; EXPRESSED IN PLACENTA, SIGNAL = 7.2; EXPRESSED IN ADULT LIVER, SIGNAL = 2.8; EXPRESSED IN LUNG, SIGNAL = 1.1; EXPRESSED IN FETAL LIVER, SIGNAL = 0.68; EXPRESSED IN BRAIN, SIGNAL = 0.6; EXPRESSED IN BONE MARROW, SIGNAL =  14
ccttcaaggtccttcaccccatggatggagcgtccaaaccactgaattcctgagagcacttgggtcccttctatccgctgagagcaagaaagaaattgccactaagctgaggagaggtaggttggagggagggaaggatcgggctggggagtggggtctgggcttgggggcttagggcacctgagaatggagtgtgattggcaggcagcatacgtcacctgacttggctggggactaagccccccgtgcctcccattgaagatgtacacagccccctgctcctccagaggggcccccacagccacgtctaccagcccatcgccgttgatgtctgtcagagcagtgatggcttctccaaaccgcccgagtgggtagccggggtccccctgcagctctgagacttcttcaaaccccaactaggaagtagcaagagacaggtcacaccca

SEQ ID NO: 11073 - DNA, 469 bp, Homo sapiens
  MAP TO AC006153.2; EXPRESSED IN BONE MARROW, SIGNAL = 0.63; EXPRESSED IN PLACENTA, SIGNAL = 0.79; EXPRESSED IN LUNG, SIGNAL = 0.78; EXPRESSED IN FETAL LIVER, SIGNAL = 0.67; EXPRESSED IN ADULT LIVER, SIGNAL = 0.72; EXPRESSED IN BRAIN, SIGNAL = 0.71
tcccctcatgatttgtcctcttgtgtgtcaccccctagtctgactgacagtactccacaagcttgcctgccatgggctgtcgggatgtccacgcagccacagtcctttccttcctgtgtggaatcgcctcagtagcaggcctctttgcagggactctgcttcccaactggagaaaattacgattgatcacattcaacagaaacgagaagaacctgactgtttacacaggcctgtgggtgaaatgtgcccggtatgacgggagcagtgactgcctgatgtacgacactacttggtactcatcagttgaccagctggacctgcgtgtcctccagtttgccctacccctcagcatgctgatcgccatgggtgccctgctgctctgcctgattggaatgtgcaacactgccttcaggtcctcggtgcccaacatcaaactggccaagtgtctggtcaatagtgcaggttgcca

SEQ ID NO: 11074 - DNA, 493 bp, Homo sapiens
  MAP TO AC005881.2; EXPRESSED IN PLACENTA, SIGNAL = 0.73; EXPRESSED IN LUNG, SIGNAL = 0.6; EXPRESSED IN BRAIN, SIGNAL = 0.9; EXPRESSED IN BONE MARROW, SIGNAL = 0.68; EXPRESSED IN ADULT LIVER, SIGNAL = 0.76
tggggtatttattccctggactccttctctaccaggtcactgttggttgtctgtctatgaaaggccacaggtcctgacaagcccccctccctctccactcagctactcacttcaggttctagcatcgactccaccccttgcctctttaggcctaggggtaagcaacagctccccactgttgctggctcagggtagtgcatgccccttgtgggtttacctgaaccctgaccacacctttgtaaatatcccctttgttaaacctttttcaagttctccagtttgattgtaacatctgtcacctgccaagactctggctgatatgcaggtttagcgtgggggctggcacgcctggtgttagagtggtgtctgtgactgtgagatttgggtctatcataagctttacagttggcttctcaatggtcttaacactgtcaccatggaaactgaacatcaaaagacaagggaaggttatggatgaagaggctctgagaca

SEQ ID NO: 11075 - DNA, 466 bp, Homo sapiens
  MAP TO AC005754.1; EXPRESSED IN PLACENTA, SIGNAL = 0.9; EXPRESSED IN LUNG, SIGNAL =   1; EXPRESSED IN ADULT LIVER, SIGNAL = 0.96; EXPRESSED IN FETAL LIVER, SIGNAL = 1.2; EXPRESSED IN BRAIN, SIGNAL = 1.2; EXPRESSED IN BONE MARROW, SIGNAL = 1.1
caaaacattcagaacggtgctgttattcctctaccttttatccagaatccaaaaggaagaacgccaaggatgatagctgtctctacctactgtcttgttttgagcttcctggaacctaatttcattggaaatacagtgatgttgcgtgtagctctcttttctggtttgcattattaggttgtcagattatggaatattttaaatatccaatgaaaagaaaactctggtaggaaggatcaaagctttttcttgttttgttttgtttttgttgttgttgttgttttatctcagggtgctgagattatggttcttaaacagatgaagtcttcccagaagtgctccaggatgaggcagataagtgtcaacatgaccaattctatgtgattgtcatccaatggcatggtcttccaccgtccttcacatgaagaaacaatttctgaaactatttctgcttgtaattgcctga

SEQ ID NO: 11076 - DNA, 464 bp, Homo sapiens
  MAP TO AC004486.1; EXPRESSED IN LUNG, SIGNAL = 1.9; EXPRESSED IN FETAL LIVER, SIGNAL = 1.2; EXPRESSED IN BONE MARROW, SIGNAL = 1.5; EXPRESSED IN PLACENTA, SIGNAL = 1.5; EXPRESSED IN BRAIN, SIGNAL = 1.3; EXPRESSED IN ADULT LIVER, SIGNAL = 1.4
ttgacccttcttgtcttaaagcttgaaacttacatttgttgtatctgaatttttttcctcaggaaaagaccccagcctctcaaaaagtatcaaagaaccaaaacgcaccagatcatggcacccaaacaataaaatgccaggtccctcctgcatcaggattgcttccttgcccctccctagttcctattttcttacacatagttacatttcttccttgctatataaacccctaattttaattggtcaggaaatggatttgagattgatctcccatcccctcagctgcagcacccaattaaagccttcttccttggcaacactcgttgtctcagtgattggctttctgtgcagcaagcagcagaacctagaccaaaccccttgtgtttcagtaacaagtagacaccgactggtattcagggacaggtctgctttggaggcacgaggcagggaaaggaccatcctct

SEQ ID NO: 11077 - DNA, 471 bp, Homo sapiens
  MAP TO AC005876.2; EXPRESSED IN ADULT LIVER, SIGNAL = 1.1; EXPRESSED IN FETAL LIVER, SIGNAL = 1.2; EXPRESSED IN BRAIN, SIGNAL = 1.3; EXPRESSED IN BONE MARROW, SIGNAL = 1.3; EXPRESSED IN PLACENTA, SIGNAL = 1.3; EXPRESSED IN LUNG, SIGNAL =   1
aagaccaggaacctgcagactctgtaaaggacacatgtaaatatttttggctttgctgctatagagtctcttgcaaacgtagtagtattcaagtctgcctatatagtgtaaaagcagccacaggcaagatggaagtgaaggggtgttgccagctttgaccagtaggcagattttcctaatttgtacactcctgctgtagacaggaagttaaggctttggggggatccctgtgttactatgttgaggaggcaaggatatgaggagagactagcaaatgagaccgagaaggagtggcatgtgaggtaggaagagaacctagagaatgtctactgaatgccagatgaagagaatgtctactgaatgccagatgaagaggatgtctcaaggatatgtgagtgtatactgtgtctaggtctgccagtagatcagatactgtaataactgaaaatctgcaacctagagggcattgac

SEQ ID NO: 11078 - DNA, 479 bp, Homo sapiens
  MAP TO AC005926.1; EXPRESSED IN ADULT LIVER, SIGNAL = 0.7; EXPRESSED IN BRAIN, SIGNAL = 0.66; EXPRESSED IN LUNG, SIGNAL = 2.6; EXPRESSED IN FETAL LIVER, SIGNAL = 0.71; EXPRESSED IN BONE MARROW, SIGNAL = 0.73; EXPRESSED IN PLACENTA, SIGNAL = 0.58
caggcttgctttatgctgtgcatgttattttattattgtacctgctgtggcttcttgaaggaacctaatacctggaaatcacaattagactaaaaatttgactctcttgtcatagaggaaatcacctagtggtcagagtacatagtcgtcccattttttttcttcatgattcatgttgctaaaaatgatggtatgcaacatgaatacacatttactgcaggccaggcagagcactaacactttacttgcgttatgtcatttaatgcttttaggatcaggaacccagctagcagtggtttcgggaatcaaggtcggaccaccagattccaaaagccaggtgcttggccactggatttcagtacttcctctgcccacagtttacttttaagcaacaaaaatcatcatcctccaaatcattcctttgctagttatgcctcctgtgcagaatgtaggatttttatcaaagaggttcctccggg

SEQ ID NO: 11079 - DNA, 459 bp, Homo sapiens
  MAP TO AC004499.1; EXPRESSED IN FETAL LIVER, SIGNAL = 0.88; EXPRESSED IN BRAIN, SIGNAL = 0.64; EXPRESSED IN BONE MARROW, SIGNAL = 0.84; EXPRESSED IN ADULT LIVER, SIGNAL = 0.8; EXPRESSED IN PLACENTA, SIGNAL = 0.89; EXPRESSED IN LUNG, SIGNAL = 0.89
tctcagtggttttgttcaccactgcattcccagaaacatggtacagaatatgccatatggtagctgcttagcaaatatttgttgattgaatcaaatccaaaaatcatttcaaattccataaaggacaactgaccttggtgattgggaaggggtgaaggaaggagagaatgcatggaaagatgatttatttgatgatgctgtgttgcaaagccacagtcccacaagaggccacaaagagagaaaaatggcaggatgaaggcaaaatacaagttgagatgcattcaggaggtgaagcgactgagagggaactgactgttggccttggcattgcacgtcttctggatagcgttgtgggcaatggtgctgccaggcaggactcccttcatttctctcaggataacactcctgaggccaacggggagactggagccacccacatcccaaaagcatccagagaag

SEQ ID NO: 11080 - DNA, 451 bp, Homo sapiens
  MAP TO AC006531.1; EXPRESSED IN PLACENTA, SIGNAL = 0.68; EXPRESSED IN BONE MARROW, SIGNAL = 0.89; EXPRESSED IN FETAL LIVER, SIGNAL = 0.71; EXPRESSED IN LUNG, SIGNAL = 0.77; EXPRESSED IN BRAIN, SIGNAL = 0.8; EXPRESSED IN ADULT LIVER, SIGNAL = 0.76
tcacctcatattgctggtggaattaaatgaatgcaagtgtggcacatctctaggaatttatctaagtcttttttaaattgattattgtattatacctactataacgacgtgtattttctatgacattttgtgattcaagtacacatattgttactatcgatgatccatgctatttcaaagggttgggcacgttcaggtgacagcattcctgccactcacttgattttgacgaacttccgacatggcacggtgttcctcacacacgtctcggtcagggggtctatgtcttccacgatgacgaatggggcctcctccagggtgacgatgctgagatggttgtcatccggctcacagtcggagaaggacttgtacctgggccacacggcgtgcctcaggctcagcgtatggttctcccacttgcccacctgcagcacaaacacaaagacacagc

SEQ ID NO: 11081 - DNA, 476 bp, Homo sapiens
  MAP TO AC004582.1; EXPRESSED IN BONE MARROW, SIGNAL = 1.2; EXPRESSED IN ADULT LIVER, SIGNAL = 0.82; EXPRESSED IN LUNG, SIGNAL = 0.76; EXPRESSED IN PLACENTA, SIGNAL = 0.95; EXPRESSED IN FETAL LIVER, SIGNAL = 0.73; EXPRESSED IN BRAIN, SIGNAL = 0.63
cctcggcctgatatccttctatctttgctaaactcctatgcatttttaagaacccaattcaaataacatttcttttttgttagtgtcttcagaattgaccattccatctttagtgctcctttggccttttgtacatacctctaatagcacttttcatctatacagtagatattaacttacatacctggaagttctttgagggcaaagactgtgtatttttcatccttgtatccacctccccatccacttccactgtatggccaacactggtgcatgacaggtgtcaaccaatgtttatggaatgggcaagaactcaaaagtcaagaaggaggtaaatgtcagaaagatccaggagagcataaaaggtgggacagcacacaaacagccagtggtggggatggtgggcaagaaatccaagaaggcagtgtcactgaggtcagtcctaggcaataagggcacagccatagggatgacag

SEQ ID NO: 11082 - DNA, 479 bp, Homo sapiens
  MAP TO AC005104.1; EXPRESSED IN BONE MARROW, SIGNAL = 0.74; EXPRESSED IN PLACENTA, SIGNAL = 0.6; EXPRESSED IN LUNG, SIGNAL = 0.82; EXPRESSED IN FETAL LIVER, SIGNAL = 0.78; EXPRESSED IN BRAIN, SIGNAL = 0.66; EXPRESSED IN ADULT LIVER, SIGNAL = 0.7
cagaatgctcctccccttggggacacctggccttggacagctggacctgtctctcaccacccacctcagaagcacaaaaggattcacacccagatctctagaaaaatgatcaaaagcaggttccttctcgcagccaagcttcctggacatggtagttcattgcatcttgggaaagagtaaatcattttttcagctgtcaatactgtgtccctcacatccttgaaccttgttcttgcaaaatcttggccttctttctgggttcactggccatactgtatggggtgttgtgaagtttcttggacaccacatagaggaacttggcctgatcttcattcccatagttgtaagaagagccattgctgaccagttgttcaaacttccagctgtcggacatggtggacaccacctgtgtgagttcctcctcctgacactgaagcacgtggtacacatgcttcatgggcacctgtgatgttttgctc

SEQ ID NO: 11083 - DNA, 467 bp, Homo sapiens
  MAP TO AC004468.1; EXPRESSED IN PLACENTA, SIGNAL = 0.82; EXPRESSED IN LUNG, SIGNAL = 0.89; EXPRESSED IN FETAL LIVER, SIGNAL = 0.84; EXPRESSED IN BRAIN, SIGNAL = 0.96; EXPRESSED IN BONE MARROW, SIGNAL = 0.88; EXPRESSED IN ADULT LIVER, SIGNAL = 0.81
gagaatgtaaacgaacaactgccaaaatatactacttagtcaattatcagatgctttgcacttcagttagcatgttcacatttagttgactatgtgaaagtttttagaaatcaggatttgtgaactattataagtctgagaaataatagttccggggtgactgatagtgggctttacttacatccttctcaatgtccaatagatgcccccaaatgcgaacattccatatattataaattctattgttttacattgtgatgttcagtaataagttgctttcaaagaggtcataataggcttctttcaaattttcagtttacatagagttttaatggatctccagaatcagaaactgaaagagttgaatgactggctaacaaaaacagaagaaagaacaaggaaaatggaggaagagcctcttggacctgatcttgaagacctaaaacgccaagtacaacaacataagg

SEQ ID NO: 11084 - DNA, 487 bp, Homo sapiens
  MAP TO AC000384.1; EXPRESSED IN PLACENTA, SIGNAL = 0.77; EXPRESSED IN LUNG, SIGNAL = 1.1; EXPRESSED IN BONE MARROW, SIGNAL = 0.88; EXPRESSED IN ADULT LIVER, SIGNAL = 1.1; EXPRESSED IN FETAL LIVER, SIGNAL = 0.96; EXPRESSED IN BRAIN, SIGNAL = 1.3
gcaggaaaaatggcactgagactcaggaagaaagaacaatggaggtaaagggaaataatttggcatcccttcctatcacaagcatgtcagatctaggccaggaaccaaggcaccaagatccccctctaggctagcttggctgaactaggctgggaatccggctatctcttaggggaggaaggagaaggcacactggctcgaggtcccccaggtcatgatatgtgtataaaagaagagatgaggggcaccctgccaacgtccccctacctttgtgatccttgaggctgcgggtctccagggcaccagtggaccccgtttccgactcaatatcatccacagatggcctctcagaaatatccgaacgggttgtctcgtctgcttcctggacacttgtgggactagagagggcatctagcggtcctggagacatggctggtgggtctgagggaggtgaagaggggcctccgctggtccctgcatcatcctg

SEQ ID NO: 11085 - DNA, 484 bp, Homo sapiens
  MAP TO AC004031.1; EXPRESSED IN PLACENTA, SIGNAL =   1; EXPRESSED IN FETAL LIVER, SIGNAL = 1.1; EXPRESSED IN ADULT LIVER, SIGNAL = 0.94; EXPRESSED IN LUNG, SIGNAL = 0.89; EXPRESSED IN BRAIN, SIGNAL = 0.75; EXPRESSED IN BONE MARROW, SIGNAL = 0.95
tgccacattcatgattcctcgtgaaatcagatttcattggtttgtttcattcagagaactcttgcttctgaatgtctatagatcaacatttctagcactgtgtaccttttcttccttttttcccaggagccacataggtaaagccatcctgagccagccagcttgtgtgtccaaactcctctccctgctgcttgaccaacgcccgtctccaaagctagtccttattattctccagctgtgccgggcggcgctgcccctgatgagcgtagaagactgtggaaacgtggagctcccaccctggagctactctgtcccctccttaaacagtgagcaggaggatcccagcgacccagcttccaagatcgcctccctgctcttagcaaagctggcagattatgtggttccaggtgagaagctcctcaacaggagagtagcatggcagtgcagcattcctgtgcccagtcaggtcccccttgcatctgtg

SEQ ID NO: 11086 - DNA, 481 bp, Homo sapiens
  MAP TO AC002078.1; EXPRESSED IN PLACENTA, SIGNAL = 1.1; EXPRESSED IN LUNG, SIGNAL = 1.3; EXPRESSED IN FETAL LIVER, SIGNAL =   1; EXPRESSED IN ADULT LIVER, SIGNAL = 0.98; EXPRESSED IN BRAIN, SIGNAL = 1.4; EXPRESSED IN BONE MARROW, SIGNAL = 1.2
gctgtgcctagagcaaaaggagcagcagggagttctgagacagtgttggaatggcagcctagcagtatcaaggtctccctagttggtgtgagagcaggtgtaacaaaggacactttacacctggaggcatggtccccttttttatgatggtggcagtgctggcttagaagtagaattcagaatggttttgtggattttcagaagttttcaatcttcttggccacgatatgctataagaatatattttattccactacccagcacacacacacgcacatatgcgtggctgctgcccggatcactgctattgctaccctggaaaccaggagtgcttctgcagccgcctccacccgtgacagtgatcatctgccgtgcctgctccctagtgctgttcccagaaaggtgcatctgactggctgagcgtcagtcatcttctatcttatcactccctttgaacatatgtgcgtgtgtatgctgggta

SEQ ID NO: 11087 - DNA, 499 bp, Homo sapiens
  MAP TO AC006027.1; EXPRESSED IN LUNG, SIGNAL = 1.2; EXPRESSED IN BRAIN, SIGNAL = 0.85; EXPRESSED IN ADULT LIVER, SIGNAL = 1.3; EXPRESSED IN PLACENTA, SIGNAL = 1.2; EXPRESSED IN FETAL LIVER, SIGNAL = 1.1; EXPRESSED IN BONE MARROW, SIGNAL =   1
tgcttcagaaatattccactttattcatatttattcaacattttacttatctattcccccgtgtactaaaagtcaaaagcattactaatttaataatgtcatatttgttcttctaattattttttgctgcataacaaagcactcctaacttagtggcttacaatgataacagtcatttattttattcaaaaatctgcaatttgggctacaattggcagaacagctcatctttgctccttacagtattggctggagttggcgatgactcagcagatcaaggctggaagactcattctcgtcaggtggttgacgttggctgtcagttggaacctcacctggggctgtttgccagaacacctacacatggcatgtccatggagctatttgacttcctcactgcaatggctgggttccaagagcagttatcccaagagaacaaggcagaagtgcatgacttttagaatcttgtctcacaagtcacacagagtcacttccacca

SEQ ID NO: 11088 - DNA, 470 bp, Homo sapiens
  MAP TO AC002451.1; EXPRESSED IN PLACENTA, SIGNAL = 0.9; EXPRESSED IN ADULT LIVER, SIGNAL = 0.84; EXPRESSED IN LUNG, SIGNAL = 1.1; EXPRESSED IN FETAL LIVER, SIGNAL = 0.98; EXPRESSED IN BRAIN, SIGNAL = 0.99; EXPRESSED IN BONE MARROW, SIGNAL = 0.9
aaagtgggaattctgcctccagattgtcttcagattcatgactgaaacattaactcttccctgggtctccagcctgctggcttcccctgcagatttcaaacttgttagtccctataatcatctgagccaatctcttaacatattttttatctctctttctatgtatatataacctacgggttctgtttctttggagagtcttgactaatacaatggatgaatatgctgtaaacactcttgttcaaatcttttttgtgggcatgtttccatttcccttgggcaaatatctagaagtgaaattcaaggtcagccactttaattttacaagaaagtaccaaactgttttccaaagtgatgtacatgtttgcatttctaccagcaatatgagagttccggttgctgtcattcttgtcaatagttggtgatgtaagtctttttaattttagccattctgataggtaaatagtgat

SEQ ID NO: 11089 - DNA, 460 bp, Homo sapiens
  MAP TO AC006151.3; EXPRESSED IN PLACENTA, SIGNAL = 0.8; EXPRESSED IN LUNG, SIGNAL = 0.93; EXPRESSED IN FETAL LIVER, SIGNAL = 0.72; EXPRESSED IN BRAIN, SIGNAL =   1; EXPRESSED IN ADULT LIVER, SIGNAL = 0.83; EXPRESSED IN BONE MARROW, SIGNAL = 0.97
ggttgaggcggaggtagaggagaggtctgagacatctcctgggtctggtgctgctgctattgtgtaaccatggcaaccgcgggggcaggggtggtcagagccttcccagttctgcacgtggaaagaaaaatgtgaagggcagagaagggagagagccacatgtcatcactccagtgatgccttgccttctcctttttgttctccttttccttctccttttccttctccttttccttcttctctgaggccagatagcaaggaggatgagcaagaagacacacatgtcatcactccaatgatgccctcccttctccttttccttctccgaggccagacagcaaggaggatgagcaagaagatcggggttgggagtgatcagccccagctggccactgctttaacccagtcgggtcttagagtctctgagactcgccccagcggataagacgggtcaggggtg

SEQ ID NO: 11090 - DNA, 445 bp, Homo sapiens
  MAP TO AC005028.1; EXPRESSED IN FETAL LIVER, SIGNAL = 0.68; EXPRESSED IN BRAIN, SIGNAL = 0.74; EXPRESSED IN BONE MARROW, SIGNAL = 0.6; EXPRESSED IN PLACENTA, SIGNAL = 0.63; EXPRESSED IN ADULT LIVER, SIGNAL = 0.5; EXPRESSED IN LUNG, SIGNAL = 0.58
agaggtgtttggagagtcgggggctccctcccacaggaaccagtggtcagcacagcccctgtccttgtcactggaatccctactccttcttcaacacacttccaaatcctacatgccactccaagtccaggtcaagtcccatttttcaatgaagtcatcctagtcccctgtctgggtggtgccctgttcatctctgtgccctgtttactcacaatccctgaagctttactgatgttcccttgcactcatattctccttttttcagatgtgtgactggtctcctccaagtacacggttatatcctccatgactaggattgcatctgcgatgcttggtgtctccacaatgccaggtataaaaccttcattaactgacttttcaacagggctctgagcctcctgaaccctcatgtcactccatgtggccacactggatagctctgggg

SEQ ID NO: 11091 - DNA, 472 bp, Homo sapiens
  MAP TO AC004082.1; EXPRESSED IN BONE MARROW, SIGNAL = 0.51; EXPRESSED IN ADULT LIVER, SIGNAL = 0.71; EXPRESSED IN PLACENTA, SIGNAL = 0.86; EXPRESSED IN LUNG, SIGNAL = 0.8; EXPRESSED IN BRAIN, SIGNAL = 0.66
tctgggagaaattcacttttataggtcatagtcttccattataggcctaaaagctcaacacaccgcatatgtgaaatttgttgtttttcgccttctcacttggggagaaaagtggaattaaaaacttgctaattgaagttctcaagtcatcacattgcttgtttctttcttggaatgcttaacttcacaggcttcacagtgtgatacttgtgaaattttttttataagtttctctctgttcaaagattgaacgagcttgttctttgctactaaaggaagaaaggacgtgcttactgaggttgtctcaaagcaggtggttgcgttaattgtgggtccattgctacctcttatatctgaccttttataggtttgtaatgcttttgtcttttgaagcaaatacatggatggaggcaaaatcctccgtgtttgcaggttgggcagcagctccagatctgcttgagcctttgaacaa

SEQ ID NO: 11092 - DNA, 446 bp, Homo sapiens
  MAP TO AC005000.1; EXPRESSED IN PLACENTA, SIGNAL = 1.6; EXPRESSED IN BRAIN, SIGNAL = 0.57; EXPRESSED IN BONE MARROW, SIGNAL = 0.77; EXPRESSED IN ADULT LIVER, SIGNAL =   1; EXPRESSED IN LUNG, SIGNAL = 0.85; EXPRESSED IN FETAL LIVER, SIGNAL = 1.1
tttgaggacttcaggaaagctccttaatctctctgtgcttttgtgtcattattgcaaaatgaattgtaaagtgccagacaaatgtgaattactagtaaagaagagagtcatgtaattaggctattttcctgaataactctatagcattaccttatgttcattctagttaccaccatttaatcacctccattaagtgagagcacgaaagtctgcatgactagaaaaaaataaccaataaacaactgccagaatgactgtgttccattaccttcattcctgcttaattcaatgtcagcgaacaaaccgatcttaatgatctgccaaagcagtcccaaaaccagatgaggtttcccagccctcaaatcttctgcaccaatgttcacaacatgacacccaatggcagaagcagagttcagtgccaagttcaagttttcctgcaagacagc

SEQ ID NO: 11093 - DNA, 459 bp, Homo sapiens
  MAP TO AC005319.1; EXPRESSED IN PLACENTA, SIGNAL = 0.68; EXPRESSED IN LUNG, SIGNAL = 0.64; EXPRESSED IN FETAL LIVER, SIGNAL = 0.69; EXPRESSED IN BRAIN, SIGNAL = 0.67; EXPRESSED IN BONE MARROW, SIGNAL = 0.76; EXPRESSED IN ADULT LIVER, SIGNAL = 0.69
cagtcatttccgtccctctggagtgtgaagtcagaaaagcgcaggctccgctcgggatcacagagatgaagaaaggagcctgggaggcagcaacgtcttattcagacccaacatggtgtctttccaggtcagaggtagcagagagaaaaagactaagggaataggcttttgtaagcaaacaactgctttcactactccaggccagcccctaagaaccttctttgggagagtggtggccacctccatggcagcaaggctgactgcatttggcattcatgaaaactccaacaatgggggcattcaccctggaaagcctggaaagagaaatactgacattcataaaagaaacagtgggggtgaaatacccgatggacataaatacccatctttaagcctagagttcctgatggtatttcctcaagtgttgagtttacagcagcccttctcagagccttcatg

SEQ ID NO: 11094 - DNA, 439 bp, Homo sapiens
  MAP TO AC006354.2; EXPRESSED IN ADULT LIVER, SIGNAL = 0.68; EXPRESSED IN LUNG, SIGNAL = 0.6; EXPRESSED IN PLACENTA, SIGNAL = 0.72; EXPRESSED IN FETAL LIVER, SIGNAL = 0.82; EXPRESSED IN BRAIN, SIGNAL = 0.7; EXPRESSED IN BONE MARROW, SIGNAL = 0.65
attccaataaagggtgtgccataagttatttaaccaatccccgagttttcacttttgcagagtactacaaatgacacttttgtatcaatattttccatatggtttgttttgttttgttttttgctttagaacaggaaagtggtatctctcagtcacggagatgcacagttttaaggcatctccttgaccaagagacaccacctttatattaacatgtactttataagctgacaatccttgctctctttgcaaattcctgagattgtgcatgttcattgcccaggtcataatggctgctgacattcaatctttccatgaggagtcccttgcagtcccagcacatcttcctggtgttttctcatctgttcttggtgagatggtggggaaggtgggtggagaaccagacaatgtcttctcttcacctcccttctgagatcca

SEQ ID NO: 11095 - DNA, 484 bp, Homo sapiens
  MAP TO AC004587.1; EXPRESSED IN PLACENTA, SIGNAL =   1; EXPRESSED IN LUNG, SIGNAL = 0.77; EXPRESSED IN FETAL LIVER, SIGNAL = 0.8; EXPRESSED IN BRAIN, SIGNAL = 0.61; EXPRESSED IN BONE MARROW, SIGNAL = 1.1; EXPRESSED IN ADULT LIVER, SIGNAL = 0.88
aaaaagcttagatgtgtgtggcaattgaacatgtttctttttctttccatgtatgatgaattttgatatgaacaacatgacttcctaactccaaatcaaccagaagcctcccttggccaatgtgccctattgctccagctctcaggctggttgtgcagtgggtagttgcctagcgtggaacttttctttcgccccagttcacatctggcacacaaggcaggcctcagtccatctggatccctccctacattgtgtcctttttccttgttccacagacttgattaactgtcaaaatgttttgttttgttttgttaataggacctgctgcagctacagtatgaaggagttgcagtcatgaaattatttgatagagctaaagtaaatgtcaacctcctgatcttccttctcaacaaaaagttctacgggaagtaattgatcgtttgctgccagcccagaaggatgaaggaaagaagcacctcacagc

SEQ ID NO: 11096 - DNA, 460 bp, Homo sapiens
  MAP TO AC002299.1; EXPRESSED IN PLACENTA, SIGNAL = 1.1; EXPRESSED IN BRAIN, SIGNAL = 0.92; EXPRESSED IN BONE MARROW, SIGNAL = 0.87; EXPRESSED IN ADULT LIVER, SIGNAL = 0.86; EXPRESSED IN LUNG, SIGNAL = 1.1; EXPRESSED IN FETAL LIVER, SIGNAL = 0.83
ctggcttacagacagccaccttctcactgtatcatcaaggggcagagaaaaagagctctcatctctcttcaccttcttataatgaatcacatcccatcatggtgcaccatccttatgacctcatctaaacctaatgactgcccaaagtccccacctccaactaccatcacattgaggataagggcttcaatatctgaactttggaggaacataaacattcaactcatagcaataaaaatggcattgctaattgtgatcatgaggaaaaatagtgatgcactttgtggaattaacgtaagtggctgtcttcagtctggttgttggccacagcctctctgagaaaatggcctttgaaggacatgatgtgggatctgcaccatgtgatcctggagaaagagcatcccaggcagcagaaacactgagaggaaaggtagggtttggggaaaggcttggtaccttc

SEQ ID NO: 11097 - DNA, 468 bp, Homo sapiens
  MAP TO AC002453.1; EXPRESSED IN FETAL LIVER, SIGNAL =   1; EXPRESSED IN BONE MARROW, SIGNAL = 0.99; EXPRESSED IN PLACENTA, SIGNAL = 1.1; EXPRESSED IN LUNG, SIGNAL = 1.1; EXPRESSED IN BRAIN, SIGNAL = 0.92; EXPRESSED IN ADULT LIVER, SIGNAL = 1.1
ttcagaaagccttgtgaggtagataatgtcattagtgccatgagatattgaggctttgaggattaattgatttgtgcaaagttgtgaagccaagatctaaagccgaagtagtttagtctcctgagcctttgctaactaccatgctagactgctgccctcgtacactcacaggggactcaccatcaaccgtgacttgtatcttctgactggcagatagagttccatttccctgaatgttgaccttcacgatgtaattgccttcatcagggaactgcagtgggttgataagcagagatgcattgggtggcatcatggtgaacttgtgttggtattccaagtcaggaaccacagacttattcacagagcccagtaagtatttgggcattgtgtggggtctctcaaatagccatatgatctggatgtctgatgctggagtgtggaagccatagtggacgggtaggtagaggg

SEQ ID NO: 11098 - DNA, 434 bp, Homo sapiens
  MAP TO AC004491.1; EXPRESSED IN BONE MARROW, SIGNAL = 1.2; EXPRESSED IN ADULT LIVER, SIGNAL = 1.1; EXPRESSED IN PLACENTA, SIGNAL = 1.2; EXPRESSED IN LUNG, SIGNAL = 1.2; EXPRESSED IN FETAL LIVER, SIGNAL =   1; EXPRESSED IN BRAIN, SIGNAL = 1.1
gctcactcccagtactcttattctctatggtgaacttgtttattaattctaagaccttttttccatcgatctcctgggttttcagtggatagaacaaggttctaggctggttccatcaatgtgtttcggcagatcaggatagaaaacggggatggtgacgtctgtggggaaggaaagagtgagttctccatataaagacattcagttccaagttttaaagaacacggcacgggccaaacaaaatgggcccgcaaaagaatccagccctcgagacgccagtctgtggcctctgctgcagagtggtctctgcttactcacatcgtcctcctctcttcccctcagccacaccctccagtccttcaagcccctgatccgggtccaggcctaccagaccctgaaggtgggttcctccttcatctggctcctctgagctt

SEQ ID NO: 11099 - DNA, 483 bp, Homo sapiens
  MAP TO AC006358.2; EXPRESSED IN BONE MARROW, SIGNAL = 0.65; EXPRESSED IN ADULT LIVER, SIGNAL = 0.51; EXPRESSED IN LUNG, SIGNAL = 0.5; EXPRESSED IN BRAIN, SIGNAL = 0.58
tcctcctccgtggagaatcgtaccaattaatcactggaggcagacaaccactagagctcacgatccctgcctctcccttcatgatgtgaatgaggagagctcctggagctgggaacggcaccatggaaacgagctctggggcagaggcggcagtctggacaccgtcccagcctccccaacccgtctcactggcacctgacacccagagggcctgccggggtggcgtcagatgatgtgttgagtcaacagaaccccaggagagccctggttggagtcccatggcagccggctgcagccagcaccccaggaagggagtgtctgccaccggctgcagccgccacctggcctcctgggagacctggcgggaaggggaaagccgggcaggaaccacactcacagacggtctccccatccccgcctctgccgccttctcctgcttcgctgtacgtggctctccaaagtggaggtttgggaatgtgcttc

SEQ ID NO: 11100 - DNA, 462 bp, Homo sapiens
  MAP TO AC001228.1; EXPRESSED IN BRAIN, SIGNAL = 0.98; EXPRESSED IN ADULT LIVER, SIGNAL = 0.53; EXPRESSED IN PLACENTA, SIGNAL = 0.92; EXPRESSED IN LUNG, SIGNAL = 0.51; EXPRESSED IN BONE MARROW, SIGNAL = 0.54
ttggcattgaaaattagacagcaatattggtaagcatttttataagtgtaattagtggcactgtgatgaattcagttgttttcctgtaagtggcaggaatgtcacctactctccactccactccagtacatctttgctggtgactttgtcacaggccaggggaccttacctatggagacttcagcgcccctgacggaactggcttgagtaacatacactttgtgaaagcctgtgagactgacactaccctagggacagtagcctacaaaggaccgagaacagaaagcaaagggctcggtttctagagcagacagcaagaggcccaccttcagggcggcctgaacatcctccaagagctgtgccgcttcaggcctcttctcccgatactgctcgaacaggtggttctgccgggccctcttgatgatctggggagggaaggcagacattggggagtgatgcttg

SEQ ID NO: 11101 - DNA, 458 bp, Homo sapiens
  MAP TO AC005189.1; EXPRESSED IN LUNG, SIGNAL = 0.6; EXPRESSED IN BONE MARROW, SIGNAL = 0.72; EXPRESSED IN ADULT LIVER, SIGNAL = 0.71; EXPRESSED IN PLACENTA, SIGNAL = 1.2; EXPRESSED IN BRAIN, SIGNAL = 0.65
ttcagcattgtgggaaattgcacccaaattccaagactaatagttttattcaggaatcacagtaagatttttgccaacttgtcagacttcccaaaatataatgcaataaatacagtaccttatgctctaattttaattgaagttctaacatgtcttaactgtaaaacatgtatctttacagagatcgagccactgctgaagaatgtctaaagcacccctggttgacacagagcagtattcaagagccttctttcaggatggaaaaggcactagaagaagcaaatgccctccaagaaggtcattctgtgcctgaaattaattcggataccgacaaatcagaaaccaaggaatccattgtaaccgaagagttaattgtagttacttcatatactctaggacaatgcagacagtctgaaaaagagaaaatggagcaaaaggccatttccaaacgatttaaa

SEQ ID NO: 11102 - DNA, 448 bp, Homo sapiens
  MAP TO AC002041.1; EXPRESSED IN BONE MARROW, SIGNAL = 1.2; EXPRESSED IN PLACENTA, SIGNAL =   1; EXPRESSED IN LUNG, SIGNAL = 1.2; EXPRESSED IN FETAL LIVER, SIGNAL =   1; EXPRESSED IN ADULT LIVER, SIGNAL = 1.1; EXPRESSED IN BRAIN, SIGNAL = 1.3
acagagcagagcctggagaggtgggcagggggtgggcgtggcaggggcaggaggagtgcagcactgtgggtgggggtggggcactaggcggggcctaggaccagctgggctaggactggagggggagaggcatctatttttggtgggttgtgatatttttggcgttttattaaaaatggaaaaagttgttttagtgagcactcatggtgctttctcccctcctctcccaggcagaccccaaaagcgtcagggaaaggcaggccccctggaggggtggggtggggatgaagcaggggctgctatggctaccagaggtgagctggtgatgtgagctgagctgtcccatgacactctccaccacgacgaccttgctgctctcggacactggggtcagggtggtcaggcccctgacatctgcatcctgagctcggtactccaagtggtggag

SEQ ID NO: 11103 - DNA, 482 bp, Homo sapiens
  MAP TO AC005154.1; EXPRESSED IN LUNG, SIGNAL = 0.7; EXPRESSED IN FETAL LIVER, SIGNAL = 0.82; EXPRESSED IN PLACENTA, SIGNAL = 0.68; EXPRESSED IN BRAIN, SIGNAL = 0.7; EXPRESSED IN BONE MARROW, SIGNAL = 0.78; EXPRESSED IN ADULT LIVER, SIGNAL = 0.76
ggcataggcatggattaattgatcctgaagaatagtacagactttatgacaacttgtagaaaagaattgtctttttattgtctagttaatgtcttctttcttatgggaaggaagaatgtgggagagggtgagaaatagatttgaggaagaattttctctggcatccattactgtcatggatacatcattactatagatatgggagcttccatctttgagatggatataaatattgatggggaattatcttataaggtaatatctatgtgtaatttgtatgagaatgacaaattgggttggcatttgttaatttaggacctctggccatgtagacaaatttgctgacttcatggtgaaagacgtaaaaaatggagaatgttttcgtgctgaccatctattaaaaggtgaggttcttcatctccttcaggtaggattgatcaaaataaaaggtttaaactttctctcagatgtctttcattaaa

SEQ ID NO: 11104 - DNA, 464 bp, Homo sapiens
  MAP TO AC002519.1; EXPRESSED IN PLACENTA, SIGNAL = 1.1; EXPRESSED IN LUNG, SIGNAL = 1.5; EXPRESSED IN FETAL LIVER, SIGNAL = 1.3; EXPRESSED IN BRAIN, SIGNAL = 1.4; EXPRESSED IN BONE MARROW, SIGNAL = 1.5; EXPRESSED IN ADULT LIVER, SIGNAL = 1.6
cattaggtggggtgttttggggtcctgacatttatgacacaattaatgtctatattactaaatgtaaattttaaaacattacaaataataaatctacatataaactgaatatgtcagcaattacaattattgttattcatcattattctaagtgtgatcattattattaccacaattagaaatagtggttgtgattgttgttgctgctgctgctgctgttgctgcagggatggtgataaaaacaccgggtaaggctctgctgcctcctccacttgtggcatcgggagctgctggctcactagtttggtgcacactctggacctctttggtgaagctgcagctgaagagccttcaggctctgctatggcagagaaagagcctgagtcaaggccgagagcagaatcctgtgaatttgaaagtggcaggtaggatggtcccggggtgcagttgatggtgaagaggca

SEQ ID NO: 11105 - DNA, 409 bp, Homo sapiens
  MAP TO AC005007.1; EXPRESSED IN PLACENTA, SIGNAL = 0.86; EXPRESSED IN BRAIN, SIGNAL = 0.86; EXPRESSED IN ADULT LIVER, SIGNAL = 0.84; EXPRESSED IN LUNG, SIGNAL = 0.81; EXPRESSED IN FETAL LIVER, SIGNAL = 0.83; EXPRESSED IN BONE MARROW, SIGNAL = 0.78
gcattttgtaaaaacccacaacatattaggaaaataaacatccctctatgatatatgcagcatggctaataaatttctaaaaattaacagtatatcaaacattttcattaacaaattgttctcagtgaaaatgtgcatgtaccagtgtctatactgaccaaaataataattcacaaaatctgcagtgagagctggttgcttatgttttctccttccatccacactagaactagtatctgaattgtccactggaaagatatctgtactgatccccatgagttctgctttccgcataagtttacgaatagctgaagcactgctggtgagtggtctgggcaatttttcccttggaacccaggcctggggtctggtagatcgagctagttctgctttggcacgatactgctga

SEQ ID NO: 11106 - DNA, 385 bp, Homo sapiens
  MAP TO AC002536.1; EXPRESSED IN LUNG, SIGNAL = 0.77; EXPRESSED IN BRAIN, SIGNAL = 0.6; EXPRESSED IN BONE MARROW, SIGNAL = 0.67; EXPRESSED IN ADULT LIVER, SIGNAL = 0.84
ctccctcctccctgcctcccggctgttacctcataggtcgagggcgctcagtagccccctaaccagctggagaagtcgagtagctcgcgctccgcaggactcagcgcgccttcgcagccgctgtcgtccgacgagtaggcggaacgcggggagccgggctccgagctgcccccgcggcccggggacgaagaagcgcgggagggcgaggcggcgaccggggtggtccctggcggcccgcggggcgcagacggccgcacggcctgcggcctcagccctcccgccagcgcgttgcgcacggcgtcgtgctcggccagcaggcgctgcagcgcgcggatgtactccacggctgagcgcagcgtctccaccttgctcagcttcttgctgg

SEQ ID NO: 11107 - DNA, 458 bp, Homo sapiens
  MAP TO AC005324.1; EXPRESSED IN LUNG, SIGNAL = 0.62; EXPRESSED IN BRAIN, SIGNAL = 0.6; EXPRESSED IN ADULT LIVER, SIGNAL = 0.84; EXPRESSED IN FETAL LIVER, SIGNAL = 0.78; EXPRESSED IN BONE MARROW, SIGNAL = 1.6; EXPRESSED IN PLACENTA, SIGNAL = 0.86
cagaattggtcctcacatgcatattatggatgcgccttccacctaaacactcaagtatttaatacagtgataaaaccaacttacatttcttcacattcagtaatttttcagggttgctcttcagtgtgaactctttgatgtctgatgagagatgaactgcacttaaagcttttcccacactcattacatctaaagggtttctctccggtatgagttctctgatgttgaatgagagctgatgaatgaatgaaggcttttccacactcgctacatttgtacggtttctttccaatatgaattctttgatgtttagcaaaattggagctccggctgaaggttttcccacattcattacactcatagggtttctctccagtgtgaattctctgatgttgaacaagatgtgtgctctgactaaaagtttttccacattcactgcattcatatggcttttctcc

SEQ ID NO: 11108 - DNA, 452 bp, Homo sapiens
  MAP TO AC004455.1; EXPRESSED IN PLACENTA, SIGNAL = 0.89; EXPRESSED IN BRAIN, SIGNAL = 1.2; EXPRESSED IN BONE MARROW, SIGNAL = 1.4; EXPRESSED IN ADULT LIVER, SIGNAL = 0.87; EXPRESSED IN LUNG, SIGNAL = 0.96; EXPRESSED IN FETAL LIVER, SIGNAL = 0.97
tttcattcactcattcattcacctgctttatctgtcaaagacaaaataaattatggtaaaatctccccaggttagttgctatttgtcccctttgcatttctaggtcgtgaaagtttcctccattctccagtgaattatattctcgttgtagtaatcagtggttttcacgagcatttgtattgttcttctttacaccttaggtgtatttgtttgtgggggtaaatagtgtatattaggaaacattagtatgcatttgaaatgaaatttttgcccctagcatcctaaagaggaaatttcaagaaagccctgtattccagcacaggaagcaggaatgtcttaagccacactgcgctgtttctgctggagacatctccctgctctcaaaccttccttcactggtaggttctaagatgcatttttgcagagtgatgtttcttccatagtgaaatagg

SEQ ID NO: 11109 - DNA, 423 bp, Homo sapiens
  MAP TO AC005924.2; EXPRESSED IN PLACENTA, SIGNAL = 0.8; EXPRESSED IN BONE MARROW, SIGNAL = 0.86; EXPRESSED IN ADULT LIVER, SIGNAL = 0.69; EXPRESSED IN LUNG, SIGNAL = 0.89; EXPRESSED IN FETAL LIVER, SIGNAL = 0.83; EXPRESSED IN BRAIN, SIGNAL = 0.8
cacaaaaactagaacaaaatcatgtgaaaccgagttatcagctggcattgatgaactggtctgtaagttgttgggttacatcataaaatgggatgtttcacatctcaggcacagacgacttggaggttgctctcagagggcagactttttgtagaggaagtccggcttgcttggtgacctccttcctctgcttattgaatcttccctttccaaatctgtatttctctgagctccatggcccagggactcactgtctgccagtcttctaccggatctctcttcgggagcttcagagctacatgcagaaagtgaaggtctgttaggagtcagcccaaaagtcaagtcagtttctactgcagttcgtcccctgacatgggctggaccggtactagcattttctggggctgccaaaggaaagtctga

SEQ ID NO: 11110 - DNA, 474 bp, Homo sapiens
  MAP TO AB019440.1; EXPRESSED IN PLACENTA, SIGNAL = 0.84; EXPRESSED IN FETAL LIVER, SIGNAL = 0.89; EXPRESSED IN BRAIN, SIGNAL = 1.1; EXPRESSED IN ADULT LIVER, SIGNAL = 1.1; EXPRESSED IN LUNG, SIGNAL = 0.95; EXPRESSED IN BONE MARROW, SIGNAL =   1
gggattcccaagtgtttgtattcagtgatcaggactgaacacacaggactcaccatggagttggggctgagctgggttttccttgttgctatattagaaggtgattcatggagaactagagatattgagtgtgaatgggcatgaatgagagaaacagtgggtatgtgtggcaatttctgacttttgtgtctctgtgtttgcaggtgtccagtgtgaggtgcagctggtggagtctgggggaggcttggtacagcctggggggtccctgagactctcctgtgcagcctctggattcaccttcagtagctacgacatgcactgggtccgccaagctacaggaaaaggtctggagtgggtctcagctattggtactgctggtgacacatactatccaggctccgtgaagggccgattcaccatctccagagaaaatgccaagaactccttgtatcttcaaatgaacagcctgagagc

SEQ ID NO: 11111 - DNA, 451 bp, Homo sapiens
  MAP TO AC000114.1; EXPRESSED IN PLACENTA, SIGNAL = 0.75; EXPRESSED IN BRAIN, SIGNAL = 0.98; EXPRESSED IN BONE MARROW, SIGNAL = 0.77; EXPRESSED IN ADULT LIVER, SIGNAL = 0.65; EXPRESSED IN LUNG, SIGNAL = 0.65
actgcccaagaggttcattctgtctcccttaatgaaaaacatttgggcaattagaagagctgacaaattcagggacagctagaaataaagaaaagtggcaggagctctcagtggatgctgcacacagattttggcagtagctccacagtacccatcagtggcctcacccaaatgcaatccctgccatcagccctccaaaagtatgccctctactatctggccctgcttgaatgcaaagccctgccagctgctccacctgaacatgaaaaaaccctcaacagtggccttgctcaaatgcaaagccttgtcagtaacaccagcaaaacatggaaatcagcctgctggccctgtctgaccatgaagcccctccagctggccttgttcaactgcacacaccagaaggaggccctataccctccaaagaccatgatgacaggccctgaacatcatc

SEQ ID NO: 11112 - DNA, 470 bp, Homo sapiens
  MAP TO AC005192.1; EXPRESSED IN PLACENTA, SIGNAL = 0.72; EXPRESSED IN LUNG, SIGNAL = 0.57; EXPRESSED IN FETAL LIVER, SIGNAL = 1.3; EXPRESSED IN ADULT LIVER, SIGNAL = 0.69; EXPRESSED IN BRAIN, SIGNAL = 0.97; EXPRESSED IN BONE MARROW, SIGNAL = 0.9
cagggtaaatctgatgctcagtcagagtgtgggaggtgctgttcttcgtaatggagatggaagtgtcgacactcaggagctctccttctctttgcagacaggtgaactgtgatcattctataccctgggcctaatggccagtccagggaagcctcctgagttggtccagtcaaacacacgaaatggcattgatggcttggtctgtgggtgtgatatgcattactcaggatcgcttgatgtttttgtctccagggcctctgctggagcaaccagcattttatgaaaattgccttctgtgggaagtctggccgaggaggcagtgtcccacagaagagaaagataaagacataggtagcaactttcagacttccaagagctccagttttttcacctgtgaaacaggtttaatcataacccatgcagctgtaaggcaggaacaaggtgatgtgtgtgtgagtcctaagtaagtt

SEQ ID NO: 11113 - DNA, 489 bp, Homo sapiens
  MAP TO AC002045.1; EXPRESSED IN LUNG, SIGNAL = 0.79; EXPRESSED IN BONE MARROW, SIGNAL = 0.88; EXPRESSED IN ADULT LIVER, SIGNAL = 0.88; EXPRESSED IN PLACENTA, SIGNAL = 1.1; EXPRESSED IN FETAL LIVER, SIGNAL = 1.2; EXPRESSED IN BRAIN, SIGNAL =   1
agtttctgctccttgcaaccaacataatcttgacaattaatagtagctagcattttgtgagtgtttactgtgccatgcccattaatacacctaatcctctctacaattggacaggtaaggtgcttttagtaacctccaatgtacaaaaaggaaaacaagttgggtgaagtgaaatgacttgctcacagtcgctgggctaacaagggggcagagtcaaagtttaaagccagagcccatactcttccctattgtataacacagacatgctgtctctgttcccagtgctggggaatgcagagaactggggactgaaggaagagcaggcgttcaggtaagcattaatcaggggaccttccacaagggaaaagggagtactggcccagttgaagtccagccagcactcagcatggtcaaggatggggtggtgctctctccagccattcaaggtgctgagaaaagaacagaactttcatctgaggaatacaagcc

SEQ ID NO: 11114 - DNA, 375 bp, Homo sapiens
  MAP TO AC006212.1; EXPRESSED IN BONE MARROW, SIGNAL = 0.65; EXPRESSED IN ADULT LIVER, SIGNAL = 0.49; EXPRESSED IN LUNG, SIGNAL = 0.58; EXPRESSED IN BRAIN, SIGNAL = 0.77
tgctcctgtgtctttgcatctctccttcaacataaagtcccagatagttgagccttctccaactgagaagagagaagacacggtcctttccatttctgaaatggaatcctcccaaaactgacacagtggtgaacttgcccaaaccacagaaagcatacagatgctgagtagtcaagagaataggaaaaggaccctgtctgtcatctgagtatcaggcctaccttgtttgtgcttcgcatagttgcaaattttttcatattgaagatttctggcaatcctgtgattagcaacattcccttaagccaaagcttaatccagaggaaggtcctaacccttctcaagttcatgatgtctgagagagatgagaaaactgca

SEQ ID NO: 11115 - DNA, 473 bp, Homo sapiens
  MAP TO AC002090.1; EXPRESSED IN LUNG, SIGNAL = 1.8; EXPRESSED IN BRAIN, SIGNAL = 1.2; EXPRESSED IN PLACENTA, SIGNAL = 1.9; EXPRESSED IN BONE MARROW, SIGNAL = 1.3; EXPRESSED IN ADULT LIVER, SIGNAL = 1.5; EXPRESSED IN FETAL LIVER, SIGNAL = 1.1
tcactgcattaggtgggtcctaaagcctgtccctggatctagccccctttttctttctaggacagaagctgcttgaatcctcaggcccagatgctctgaaatggagattatcatttttgcatctcactgcagggggcctcatttttcataaatctcatgtatataaaaggcaccatcccatagttttcttaggcatggatagcaccccttttaatatttctaactccaacagagaccgtaaattggtattctgattgaggtggggatggtgagaagaatgaaggaatgcaagagacttacttttataaatatagaaactaccaccaatccatttggactctttgcagcttctgtgacattcgtatatagctcatggttatagtggatgagctgcacctggcaggagggaaaaacaagaatcagaacaataatccaacattaaaaggtatgaggcatagcacctgcccctacat

SEQ ID NO: 11116 - DNA, 388 bp, Homo sapiens
  MAP TO AC004829.2; EXPRESSED IN LUNG, SIGNAL = 1.1; EXPRESSED IN BRAIN, SIGNAL = 0.96; EXPRESSED IN PLACENTA, SIGNAL = 1.1; EXPRESSED IN FETAL LIVER, SIGNAL = 0.78; EXPRESSED IN BONE MARROW, SIGNAL = 0.93; EXPRESSED IN ADULT LIVER, SIGNAL = 0.93
gaggttaaaatgtggggcagcgagcagtaaatagataattcatttattctacaattagtcccattttcagacaaatgttatcctattgtaagattaaataaaataatgaaatacagcaggaaaataaatcataaatagtaacaagagcctaaggataaattcctaatgtaaaaaggaataagttatgtctctttattctcaagaaagtgtttccttaccatgtaactttgtctttgaaggttttgaagcataataattctgctgaagcagcataatgttaatattttgcacttatttagagaaacagtttgggacagatgtactaaaatacaaatagaattggaaaaaaatataagatactggccaataagaatgtgaatagctataa

SEQ ID NO: 11117 - DNA, 472 bp, Homo sapiens
  MAP TO AC006153.2; EXPRESSED IN BRAIN, SIGNAL = 0.68; EXPRESSED IN ADULT LIVER, SIGNAL = 0.68; EXPRESSED IN PLACENTA, SIGNAL = 0.68; EXPRESSED IN LUNG, SIGNAL = 0.75; EXPRESSED IN BONE MARROW, SIGNAL = 0.72
tgaattttatctgtgtgaagtccagatacccatatttgactctagacgcaaaattacaactgtctctaggatatcatttaagctaaaacatactaacacatgacttaaccagagtcattttctgaaattcttccttttgttttctgttgttgggatttattgcatttcggtgatgtgaatgggttttagatcacctgggtcattaattaccaaataagtagtttatacagaaaccagtactaaaattattgggttttctcttttgatttaaaggagttggaattgtacaaagaggaacttcagacaaaacctgcactcttggcagttaataaaatggacttgccagatgcccaagataagttccatgaattgatgagccagctccagaatcctaaaggtaaacctatttattcatttaattctaatttaaagaataattacaatgtacagagaatgctgttataatcagtgg

SEQ ID NO: 11118 - DNA, 484 bp, Homo sapiens
  MAP TO AC004655.1; EXPRESSED IN LUNG, SIGNAL = 0.8; EXPRESSED IN BONE MARROW, SIGNAL = 2.1; EXPRESSED IN ADULT LIVER, SIGNAL = 0.73; EXPRESSED IN PLACENTA, SIGNAL = 0.79; EXPRESSED IN FETAL LIVER, SIGNAL = 0.76; EXPRESSED IN BRAIN, SIGNAL = 0.87
cccttgtttagtgtctccgcaggatatcagttgaattgggaattttcctctttttagagaaaaaaataacagtgactttaattgttttaacaggatcttggaggaactttctggcgagtcatgtatatttggatatgtatgtttggccatgagctttgtgaattatttacattataaacattatctacttgtatattactaaaattgtatgttattgttggctagaaacttttcctttgtgtttgagggaagatggctgacaattttgtaacatctgttgtaaattttttttcttttttcagctctgtcagattcagggagttttgtatcttctcgagcccggcgagaaaaaaaatcaaagaaggggcgccaagaagccctagaaagactgaaaaaggctaaagctggtgagaagtataaatatgaagtaagtaaccatttttcttctttattcttcctgtgcatcatctaattcatagcctgc

SEQ ID NO: 11119 - DNA, 490 bp, Homo sapiens
  MAP TO AC004508.1; EXPRESSED IN BRAIN, SIGNAL = 0.95; EXPRESSED IN BONE MARROW, SIGNAL = 0.94; EXPRESSED IN LUNG, SIGNAL = 0.94; EXPRESSED IN ADULT LIVER, SIGNAL = 1.1; EXPRESSED IN PLACENTA, SIGNAL = 0.79; EXPRESSED IN FETAL LIVER, SIGNAL = 0.87
aagtgtgagcaaagaaatgacctaaagttggaaattatatttaaaggggaagcagagcataaaagtttggaaaatgtgcagcctggccatgtggtagaaaagaaaagcctgttttcacaggaggaattcaagcaggctgcagaaatttgcataagtaaaaagaagccaagtgctattagccaagacaatgggaaaaaggctccaaaggcatttcaaagacctttgcagctgcccctcttgtcacacaggcccagaggcttaagaatacagaatggtttcgtgggtcagccccagggccccactaacctgttcagcttctagacactgttccctgcatctcagcagctctagtttcagccatggctcaaaggggcccaggtatagctcaagctgctgcttcagagggtgcaggccataagcctggggggtattcacatgatattaagcctgcaggtgcacagaatgcaagagttaatgcttgggaggctcc

SEQ ID NO: 11120 - DNA, 475 bp, Homo sapiens
  MAP TO AC005281.2; EXPRESSED IN LUNG, SIGNAL = 0.76; EXPRESSED IN BRAIN, SIGNAL = 0.77; EXPRESSED IN BONE MARROW, SIGNAL = 0.62; EXPRESSED IN ADULT LIVER, SIGNAL = 0.57; EXPRESSED IN PLACENTA, SIGNAL = 0.66
acagagctcttgtgaaccttatgtagaaagacaaacttattttactgcaggggtaacatattaaagaacttgattcttctctcaaatattcaaattcagcggcaattactttagttgtgagaaaaagcaattttggattatatgagcttgatagctaaaccaggataattttccatttccttacttttgtctccactgccagattcatattttcccttaatttcttattttcctgtttactattattattattttaaatttcagattcaagttcttccagaaggaggtgaaacaccaatcttcaaacagttttttaaggactggagagataaagatcagagtgatggcttcgggaaagtttatgtcacagagaaagtggctcaaataaaacaaattccctttgatgcctcaaaattacacagttctccgcagatggcagcccagcacaatatggtggatgatggttctggcaaag

SEQ ID NO: 11121 - DNA, 423 bp, Homo sapiens
  MAP TO AC004055.1; EXPRESSED IN LUNG, SIGNAL = 1.7; EXPRESSED IN FETAL LIVER, SIGNAL = 1.5; EXPRESSED IN PLACENTA, SIGNAL = 1.3; EXPRESSED IN BRAIN, SIGNAL = 1.1; EXPRESSED IN BONE MARROW, SIGNAL = 1.2; EXPRESSED IN ADULT LIVER, SIGNAL = 3.6
aaacactggagtggagaccgagggaatttgtattttaagtctccacagctaaaacaataatacaaacaaaaagccatcagtggaattgctgcttaggccaaacaaaagtttattattttaggtaaaaaatattttcaattttgagtattactctaaatccattctccatttttctttaagcagagcaatttccttttaagtggaagtagttgcatcttcacaactattttaaaatgcagttagatagtaatataatacactacagctggaaaatgaacaatccatttttcctcttcctagacagggtcatactgctgagcatactcgagttaagtgtgatacagaagttaagccataaattcaatgagatggaagactctggcatccgaggcacacgcacggtccagtgtcagaggggcttac

SEQ ID NO: 11122 - DNA, 492 bp, Homo sapiens
  MAP TO AC005207.1; EXPRESSED IN PLACENTA, SIGNAL = 0.61; EXPRESSED IN LUNG, SIGNAL = 0.53; EXPRESSED IN BONE MARROW, SIGNAL = 0.54; EXPRESSED IN ADULT LIVER, SIGNAL = 0.62; EXPRESSED IN BRAIN, SIGNAL = 1.9
aaaaccattctcaggtcacagactatacaaaagcaggttgtggaccccgtctctgcccagtaagtagcactcattaggtgcaaccaagccaaatattactggctgtgtttttttagtactcaccataatagttaaccaaagaatgttgtctcacaaatgacaataattaaaaaaaaaaaaaaagaagtagaagcagaagaagcaaaagcagtagagcggaaaaagtagaagtagcagcagcagaagaagaagaaagagaagcggcagcggtggttttagtaatctgtgtaaaatgacatcatgtgctgcaccttcatccgggggctgtgtcatgaccatgaaggagtcgtgaaacccgcccacactggtatgctcttcctgctcctcattctcagtgtcacattcaatgtcactgtcgctactcattcctggcaggaaggaaggagaacatgtttctgaaaagaaaccactgtaagtaaaaggaaacagaaa

SEQ ID NO: 11123 - DNA, 467 bp, Homo sapiens
  MAP TO AC002476.1; EXPRESSED IN LUNG, SIGNAL = 0.99; EXPRESSED IN FETAL LIVER, SIGNAL = 0.86; EXPRESSED IN BRAIN, SIGNAL = 0.57; EXPRESSED IN PLACENTA, SIGNAL = 1.4; EXPRESSED IN BONE MARROW, SIGNAL =   1; EXPRESSED IN ADULT LIVER, SIGNAL = 0.81
agcacagacaaaaatatggagagtaaaaagacatagcacttcaagggaaacgcaagcaggttggcagagctagaacaatggatcaaaaggtatttttggctggatagaaggcagaaaaagtgtgcagggacccaggtcacaaaggtactatatgctcttaggtagtctggccttatcctgatgaaaaaaaaattcagcagcaggatattaagcaggatttcatttcagaagttatggcagatggaggtagtaaggtaggacatatctttatcactagagtccaggtaaccaataatattgtcctgagctggattaatgaagtgcagaagaaaagcagaaggcacagactggagatcaaattagaaggcaaaattgaccaaacggatgtagggggtgtacgaggaggagataatagaatggtttccaattccacacttgactgattatgtagatgctggtgccattct

SEQ ID NO: 11124 - DNA, 469 bp, Homo sapiens
  MAP TO AC004111.1; EXPRESSED IN FETAL LIVER, SIGNAL = 0.68; EXPRESSED IN BRAIN, SIGNAL = 0.62; EXPRESSED IN BONE MARROW, SIGNAL = 0.72; EXPRESSED IN ADULT LIVER, SIGNAL = 0.78; EXPRESSED IN PLACENTA, SIGNAL = 1.2; EXPRESSED IN LUNG, SIGNAL = 0.81
ctgttagccctccagctcacccctgccatgctcccaaactctccatctgttgtacatacagagtcagagcccagtttcttcaataaccacccagaagactcaaaacttcatttttccctaaatgtagatgtgcctttccctataagtctgaatattcagtggcctacatatagctcgtacgcatcttcatctttttctaatgaaattgtgtatctatgtgaaaaaatggggcagggatgggaccagagctagtcactttggctcgctgtttccaatcattgttggcagtaaaaacacccatagacaatggccaagtcattatgtcattccatcaaggacccagagcagcagaagagatatccagaaggactcactctccaagacaagaagtgaaaacagcagggtgggagggaagcagaggaagacagagaactgaataaatggagaatcccagaagctttgccagata

SEQ ID NO: 11125 - DNA, 459 bp, Homo sapiens
  MAP TO AC004616.1; EXPRESSED IN PLACENTA, SIGNAL = 0.63; EXPRESSED IN BRAIN, SIGNAL = 0.95; EXPRESSED IN ADULT LIVER, SIGNAL = 0.86; EXPRESSED IN LUNG, SIGNAL = 0.88; EXPRESSED IN FETAL LIVER, SIGNAL = 0.88; EXPRESSED IN BONE MARROW, SIGNAL = 1.1
ccatctgcagctccataattctcgacagagctacacagaggaaatgcacatatgaagttaagtaaatgcacatacacacacgcaaaaccagatcaagacgcacgcactgacagtgggaaggttcgggaagaaagtggtacaaaccccaaattgattctttccacgtgtttagcaatgccagcgggcacggaagccagggatcggaacgtgcagtggacctcgctggggacgtagcaggcacaaggatgcgggcaggccagcgccactcgcggatggccccaaagcaggatcagcaccacggagagggccccccagtgcgcgcgcttgggcatcttgtcggggtgcctgattctcggatacctgaggtagaacaacgaagagatgagcttattcacaggtagcaccgacgaactgtgggcaatttttaaatttgaattgtgcatcagggtttcaagcttc

SEQ ID NO: 11126 - DNA, 484 bp, Homo sapiens
  MAP TO AC005539.1; EXPRESSED IN PLACENTA, SIGNAL = 1.1; EXPRESSED IN LUNG, SIGNAL = 1.1; EXPRESSED IN BRAIN, SIGNAL = 1.1; EXPRESSED IN FETAL LIVER, SIGNAL = 1.1; EXPRESSED IN BONE MARROW, SIGNAL = 0.91; EXPRESSED IN ADULT LIVER, SIGNAL = 1.1
tccaaatgtcataatccaggagttttaaaattttaattattagactgatttagttaacttattctaaaatgaaatttgaatttaatttagtgtgagtattcttttacaataaattcctttttaagagagaaggatttcataaagtctttccatttagcatgtggatgagaactatataaaaatgccacaaataaaatatgactttcacattacaacttgagctacaaacttgcaggggagggttgggctgcccagttaggacgtctagtcacaaagtccaagccgccgtctgatgaagttggagattaggagctgaggccgttgctggtactccaccaggacatcatgaggcaagttgatctgatcacagtcgagtctgtcgagaagtgtcacacagaccacagcagctagaagagcaattagcacaactgatggaatgaatgggttcatcttttctatagaagcattagccaaacacaccagc

SEQ ID NO: 11127 - DNA, 466 bp, Homo sapiens
  MAP TO AC004773.1; EXPRESSED IN PLACENTA, SIGNAL = 0.72; EXPRESSED IN BRAIN, SIGNAL = 0.82; EXPRESSED IN BONE MARROW, SIGNAL = 0.83; EXPRESSED IN ADULT LIVER, SIGNAL = 0.68; EXPRESSED IN LUNG, SIGNAL = 0.8; EXPRESSED IN FETAL LIVER, SIGNAL = 0.71
cctcccataatacctaagcaggtctctatcacagtccatacattgtttcctgtgtgtgtctgtttcttccattagactataatttccttgaggactgctcttgtgcctcactcatctttgtgagtacagtgccaagcatacagtagatgctatttaatgaaggtgggcatgtatgggtgaatattcccagtgtttcaggatgttttttctttctcctctggcttttctattctctgctcacctggaatgagagcggataaaataatacagacaggaaaccaggaagcagaagagaaccccagccacctacctacacttccccctcttagatgccctgcaacagagatctgtcctggggactccacctcatctttgccagcggtgtgcagctggcttcctaaaatccacccagagtaggggttagcttgtcagaaaaatacaaattggatgtcttctgcagggcttt

SEQ ID NO: 11128 - DNA, 476 bp, Homo sapiens
  MAP TO AC005997.2; EXPRESSED IN LUNG, SIGNAL = 0.77; EXPRESSED IN FETAL LIVER, SIGNAL = 0.75; EXPRESSED IN PLACENTA, SIGNAL = 0.79; EXPRESSED IN ADULT LIVER, SIGNAL = 0.59; EXPRESSED IN BRAIN, SIGNAL = 0.6; EXPRESSED IN BONE MARROW, SIGNAL = 0.62
accacaagctggagacatccagactgcacactgccataaatcaaatttagattatgttgtgcttctgaattctcctttctgcttatgcctctttgttattcagcaacagggttctccggacaatcatatccatgcttttgtttccaactgagcaacaaactttaggcttgactgagagtcagaactggcccattctcagaagtaaggttccccaaacttctggcttgtacttctgaatctagtcacacatttcaatcaatcaacacaatgttacatatgatttccctttcattttaggtttctcgtatcagcactagcatggattgtggtgctgtagaactacaattgctttcatggttagaatgcatggtggtgagtacagtgaagagaaaagttcataaacacgacccagttctgctactagtgagttaaggactttgaactctcaatcacagttttattttgttttgtctctt

SEQ ID NO: 11129 - DNA, 416 bp, Homo sapiens
  MAP TO AC005164.1; EXPRESSED IN BRAIN, SIGNAL = 1.2; EXPRESSED IN ADULT LIVER, SIGNAL = 0.82; EXPRESSED IN PLACENTA, SIGNAL = 0.84; EXPRESSED IN LUNG, SIGNAL = 0.83; EXPRESSED IN FETAL LIVER, SIGNAL = 0.99; EXPRESSED IN BONE MARROW, SIGNAL = 0.77
cgccatccctaaatacaagggtatacctaagcaatcagagtatgattacacaagaactattaggaaaaacccaccttcctaaaagacagcaactttattgaggactagagagccacacatcatgtggctttgcaaatgttctacataagtaaactctactgccaccttgctattaaaaaccaggagatcttcaggatatagcccttctgagtctcaaagcatatttaagagacttactgtgtctggtgacttaaatgaacttccatcatggctgggatgaggtgaagtggtttctgcagtatatgcagattctggacttggtacaggagaaattcgacccaaggtttgtgcaaatttagcttccttcttatttgaaataagataactgatatctttgctgagaaattcttcaactc

SEQ ID NO: 11130 - DNA, 468 bp, Homo sapiens
  MAP TO AC004060.1; EXPRESSED IN LUNG, SIGNAL = 0.78; EXPRESSED IN FETAL LIVER, SIGNAL =   1; EXPRESSED IN BRAIN, SIGNAL = 0.91; EXPRESSED IN BONE MARROW, SIGNAL =   1; EXPRESSED IN PLACENTA, SIGNAL = 0.98; EXPRESSED IN ADULT LIVER, SIGNAL =   1
tactgcaaatgagtcctcggggcaggcataggttttttaaaggaattattgttacgctgaaacacttgatgcctagtcctgaataactgtgcatcatcaggtgaatgacataaactcgctgatcaccagtctacagacttctatatggtctacggtccgaggcgttgcaaagggtgctcttgtgccgattcatgtgagtcacatggcactacaggtctacccaacagataatcggtcatcgagcgcagctcagctgtcgatgattgagaataccaatagatatgccatggctatgtaagtgacactgatgactgacacaagctgcatgctagtaggcaccatactgatccaaacccttgagcaggtattgatttgcatcaacagtgtattccagaaattgcacataattgcgagccttttaaaagatggaacatctcagataagattccacatattggcgtcgtgtgc

SEQ ID NO: 11131 - DNA, 463 bp, Homo sapiens
  MAP TO AC004843.1; EXPRESSED IN LUNG, SIGNAL = 0.63; EXPRESSED IN BRAIN, SIGNAL = 0.67; EXPRESSED IN ADULT LIVER, SIGNAL = 0.61; EXPRESSED IN PLACENTA, SIGNAL = 0.61; EXPRESSED IN BONE MARROW, SIGNAL = 0.5
aagctaatgaacttcccgacagaaagtgtctacttttcagcaaagcaggggtacaactttctgcgggacatgaaggcccatgcatggagtgagaggatggacacagccacattcaggagtggcagcatgagttcaccaccacacccagaagcaggacactcatttctgggtagaaatctttaactttcagtgaatccaacacatgcagttgtattatctgatctatctccagcaggagacagaggagcagagctcgtgcacagttggcttgattttgaatgagactgacaatgcagctgaaacaggatggtggccagggcacagtgaggcaggtagaaagcctgtgggagcaaaatataaggaggtgctcaccttcagtgtcatgcaagtgactcagataaatgtcgtgaagatgaaggaggaagacagagggaaagacaaatgaccaaaaggaaaggggtgt

SEQ ID NO: 11132 - DNA, 425 bp, Homo sapiens
  MAP TO AC006011.2; EXPRESSED IN ADULT LIVER, SIGNAL = 0.68; EXPRESSED IN BRAIN, SIGNAL = 0.57; EXPRESSED IN PLACENTA, SIGNAL = 0.58; EXPRESSED IN LUNG, SIGNAL = 0.56
ctctgctccatgcctctttcttctatttcctctcatagcatggatgataataagcaggtgaggacagaacagagaagactgataacaaactcaatacaactgcaaagcagtagatgagaaccatgtctaagagtacgtgaacatgggaaaaatgctccagtacagaaacaccttcaacagtgagataatccaagagaaacctcaaactaaccaaccaaaacctctctgcgtggatgaggtggagtcacttttacttacctgctggaactgagcaggaatgggttttgcataaggaactttcttctgaggtacttttttctgatccttttgcatcacttcctccattccccaatctaaacctggaattgtcatttcaatttcatttgattcatctttccctgtaaccgtaaagaaaagtggtttgc

SEQ ID NO: 11133 - DNA, 473 bp, Homo sapiens
  MAP TO AC006121.1; EXPRESSED IN LUNG, SIGNAL = 0.83; EXPRESSED IN FETAL LIVER, SIGNAL = 0.9; EXPRESSED IN PLACENTA, SIGNAL = 1.1; EXPRESSED IN BRAIN, SIGNAL = 0.98; EXPRESSED IN BONE MARROW, SIGNAL = 0.78; EXPRESSED IN ADULT LIVER, SIGNAL = 1.2
tcaaaaacaaggaaaaatacttacacaaaacacaaaacttagtgatataccaaccaaaaaatccgaaagactacatgctatactttaatgctataactctaacacctaacacagtcccaaacataacaaatgctcaattagtatttactgattaaacgatagtctctggtttgattttattgaaaaatctgttaactatacatacataccgatttatcttttaagtttaattgtccaatcaactttctatcatctgcaggatctatcagctcaccgcccacaaagagctcaatttttgtatgggctacgttggctttaatacgattgagaatacatcgtcgtactgaaccaattgtatcatttgtatgagaccatacctccaagtcatcaacctgtctgccctggtttggaaatcgaactacaaaagagaggtgtttaccgcggaatgctctggggggaaaaagaaagacaga

SEQ ID NO: 11134 - DNA, 476 bp, Homo sapiens
  MAP TO AC005295.1; EXPRESSED IN PLACENTA, SIGNAL = 0.94; EXPRESSED IN ADULT LIVER, SIGNAL =   1; EXPRESSED IN LUNG, SIGNAL = 0.78; EXPRESSED IN FETAL LIVER, SIGNAL = 0.79; EXPRESSED IN BRAIN, SIGNAL = 0.79; EXPRESSED IN BONE MARROW, SIGNAL = 0.81
tcagtaggcttgagaaatgcagttagagagacttaatttagctagcagcactggacggcctccaaaaaatatttagagttgcctggagtcttatttttaatttagtttttgtttaaaagcaatcaactttattgatcaatacttcacatacaataaaagtatcagttttaagcacacagttcaataagtttcaactaatgtatacacccaagtcactaccgccacaaatgaggtgtagaacatttttgtcaccccaaaatgttccttcatgctccttggcagttaaaactctttcaccccatctcccaatccctcactttctggcagctgctgatcattttttcatcattacagattacagttgacccttgaacaacaggtctgaactgcatgtgcccacttatacaagaattttcttccactctgccatccctgagacagcaagaccaagccctccttttcctcctcctcagcct

SEQ ID NO: 11135 - DNA, 368 bp, Homo sapiens
  MAP TO AC004740.1; EXPRESSED IN LUNG, SIGNAL = 0.66; EXPRESSED IN BRAIN, SIGNAL = 0.55; EXPRESSED IN BONE MARROW, SIGNAL = 0.6; EXPRESSED IN ADULT LIVER, SIGNAL = 0.73; EXPRESSED IN PLACENTA, SIGNAL = 0.73
atggcaactttcctctttccttaatgactttcaaaacaaaagaaaatgcttataaaaggaaacacttgtggcctaattttattttttaaaattaaattcttattacttaaaaaaattggtattatctcatgaaaagtcagtaagagtcagacaatctaagtatttttgtacatttgtttgtttttaattctaaattatttcctaaaatgctcatagaggggtattaataaatgttaattaaattgctataatttttacctactttattcatcattgtcatctgttgctgctcttgcagcagaataaggaaattggtataaaccattcgaagttcagaagtccgtcttgaatgccttttaaaatgttca

SEQ ID NO: 11136 - DNA, 469 bp, Homo sapiens
  MAP TO AC006352.3; EXPRESSED IN BRAIN, SIGNAL = 1.7; EXPRESSED IN BONE MARROW, SIGNAL = 1.1; EXPRESSED IN LUNG, SIGNAL = 0.41; EXPRESSED IN FETAL LIVER, SIGNAL = 1.3
tctgaggctgaaaaacacaggaaccactgctttaggtgccctgtgagacaggccctgctcaccacagaagcgcaagctcacacagcttcctagaaggcaaacttgaagtaccagaatcaagttctttcaagtgctaatgttggtgctgggtcctagtgtaaagccaatttcccttatcatacagtaactgagcacaagttcacctactggtttcagctgattcaatgggcaaatgtgacacgtccgcatgtcagagaactgcacggtgattttgcccttcggggtgatgccagtcacggtgccttctccaaactcatcgtgcacaatttggccgcccaggcacaggcgaccatcgatgcctccaatcacagccaggaccgccatgaggccccccacttcagggttctcggagttggggaagtagtcctctaactgggcctagtgcagaccaaacagtgagctcgaccag

SEQ ID NO: 11137 - DNA, 471 bp, Homo sapiens
  MAP TO AC004811.2; EXPRESSED IN PLACENTA, SIGNAL = 0.59; EXPRESSED IN LUNG, SIGNAL = 0.51; EXPRESSED IN ADULT LIVER, SIGNAL = 0.72; EXPRESSED IN BRAIN, SIGNAL = 0.89; EXPRESSED IN BONE MARROW, SIGNAL = 0.7
ttgcggcaaagatggattactcccatctccagactccatggtaccagccgtctacctgcactttctgctggaaatgagtccaatctcatttcttggggaccttacgcctggctctcactactctgcaaaacacagatcttgcttttgtgctctccctctctctactctctgccattggctgtgatgtgcctcatggagccatcatgaaacaggatgagacacacacaacaggaagtgccacctccaagggaagggggcttcagggaaggctcacactgcattctgtgatgtaggtagcaaggtcctgctccaggagggatctctgagtctcagaggccttcagctccacctccttctgactaagcacagcctccacctctgacactctccgatgtaaccgggtcatttcctgctccatctgaaataaacacatcgacaggttaaaaaggcccgtggaggttcattaggagc

SEQ ID NO: 11138 - DNA, 479 bp, Homo sapiens
  MAP TO AC005216.1; EXPRESSED IN PLACENTA, SIGNAL = 0.62; EXPRESSED IN LUNG, SIGNAL = 0.85; EXPRESSED IN FETAL LIVER, SIGNAL = 0.87; EXPRESSED IN BRAIN, SIGNAL = 0.94; EXPRESSED IN ADULT LIVER, SIGNAL = 0.75; EXPRESSED IN BONE MARROW, SIGNAL = 0.92
tgccaagcactttacatgctacatacattgtgtcatttaattctacccaaccctatgacagaagtactgctattttcccattttgaagattagaattgagactcagaggtcaaatgacctgtccaaggcaataaggactagaacccaggactctaagccaaaaccttaatccctcttctcaatggcaactatcaacgtggttgagattggagagcatggacaaatgagatgtgccgctgagtttgctaggatggggctggagatggaggagggtttgtctcacagggtcaagccctcccagaaaaaaaccatgaggttaggtcttgctgtccaacaagtaggggtgggaagtaagataactgagagtcttatgcacagagaaatccaaaaagcaaatctacccctgctccaaaagttgccagacacagccaagccacttgaaaaagaactgaagcttacaatgtggttctggatcattg

SEQ ID NO: 11139 - DNA, 377 bp, Homo sapiens
  MAP TO AC005358.1; EXPRESSED IN PLACENTA, SIGNAL = 0.95; EXPRESSED IN LUNG, SIGNAL = 0.88; EXPRESSED IN FETAL LIVER, SIGNAL = 0.97; EXPRESSED IN BONE MARROW, SIGNAL = 0.9; EXPRESSED IN ADULT LIVER, SIGNAL = 0.98; EXPRESSED IN BRAIN, SIGNAL = 0.95
agcctggtctgatggaactggatgccgtttaaatgatattgaactttcccctggtttgtaattggtctggatgttttaccacaaaaaaatagttatttcccaaaggatcaccattacagagtctgaatatgtggcatttgtagagtactttagaagagaagaggtgtttctttgcactttagctttgcctgtaaatggattggttgatgtgtagggattctagcattatcatcgtcattgccatcaccaccaccatcattatcatcatcgtcatcaacatcatcatcatggctctcatttgtaggaaatctaccatgtaccaggctctgtcccgagtgttttctttatatctgtttacccacggaattctctccata

SEQ ID NO: 11140 - DNA, 490 bp, Homo sapiens
  MAP TO AC002541.1; EXPRESSED IN LUNG, SIGNAL = 0.91; EXPRESSED IN FETAL LIVER, SIGNAL =   1; EXPRESSED IN BONE MARROW, SIGNAL = 1.1; EXPRESSED IN PLACENTA, SIGNAL = 0.67; EXPRESSED IN BRAIN, SIGNAL = 1.3; EXPRESSED IN ADULT LIVER, SIGNAL = 0.86
ccttctcttagggacaccaatgagtagtagatttggtctctttacataagaccacatttctcagaggtttcgttcattcttccttattgtttatttatttttgtctgactgagttattttggagagccatcttcaagttctaagtttcttttctctgcttggttgattttgctgttaatacttgtgattgtattctaaaattcttgaagtaagtttttcatttctatcagatcagtttggttatttcttaaaatggccatttcttcttttatctcctgtatcattttactgcattccttagagtcctcatattgagttttgactttctgctgaacactgatgctcttcattcctatccagagtctgaattctatttctgtcatttcagccatttcagcctggttaagaaccattgctggggaaatattcctgtttttggaggtaagaaaacactctggctatttgagtttccagagtgcttgtgctgact

SEQ ID NO: 11141 - DNA, 486 bp, Homo sapiens
  MAP TO AC005079.1; EXPRESSED IN LUNG, SIGNAL = 0.77; EXPRESSED IN BRAIN, SIGNAL = 0.94; EXPRESSED IN BONE MARROW, SIGNAL = 0.65; EXPRESSED IN PLACENTA, SIGNAL = 1.3; EXPRESSED IN FETAL LIVER, SIGNAL = 0.69; EXPRESSED IN ADULT LIVER, SIGNAL = 0.69
ggaaacaggctgtcaggaacaaacaaacaggagcctatcaggcgcacacttagtagcaaatgatttagtttgctctgtccttcaccctcttaaagtagggtgatacgcagactcaactttaagtcttttggcatggtgctcttaggttataataatgtaacttcaatttttgaaaggcaaaatattttaccaagaccatgatttaatccaggcagtggaaaagatgagcttattataaggtgaactttgcggtggtgtcatgtcctgggactgtggttttaagtatatcttcgctttttctccaactcttaaggcaggggtgatgtgcaagctccaggaaagagatgaaatcggacgaattgaactagtccagaagctggcaaaagaaaactatcagtttttgcagacggacaaaaaagaacaggagaagtctgaacacgtaagccttttgcctcttggggatgcaggtttgaaggggtggaaaat

SEQ ID NO: 11142 - DNA, 473 bp, Homo sapiens
  MAP TO AC002457.1; EXPRESSED IN LUNG, SIGNAL = 0.42; EXPRESSED IN BONE MARROW, SIGNAL = 0.53; EXPRESSED IN BRAIN, SIGNAL = 0.57
aatgtgcagtagagcaaaacaagatactttctgaggaaatttctgagcaatttgaaattcctaggttgaatacttcttgtgtacacgatgtccatttcctggggccatgtgggctatggatttttgttgttaatgacaaatatcctagtagaaacttctaccctgctaaataaaacaaagcataggcacaaaatactctagccataaactaccctacactcaaaacaggcttcacgagaaaagttgatgtttacaattctgacaattatttctaacactatctgttctttcagtgatgtctccaagattaatgaaggaattggtgacaaaattggaatgttctttcagtcaatggcaacatttttcactgggtttatagtaggatttacacgtggttggaagctaacccttgtgattttggccatcagtcctgttcttggactgtcagctgctgtctgggcaaaggtaggtga

SEQ ID NO: 11143 - DNA, 446 bp, Homo sapiens
  MAP TO AC004816.1; EXPRESSED IN BRAIN, SIGNAL = 0.58; EXPRESSED IN BONE MARROW, SIGNAL = 0.52; EXPRESSED IN ADULT LIVER, SIGNAL = 0.42
ttgggctcgcttttcttatccttaattaacagccagaatggaatgagtacagaactgctgcatttcatttccattttcactctttatggttgtaatggtggacagtttgctttacttcctgagccttatttgaggttacctaaattctgatctctgtttctggaagaagtaagaggtagttttctgggaagtgaggccatgtaatagcctaagtcttacatgtttgcttctgtccattcatgctttctgagtattcacatgttctattcagactgctggaatcctgatccccactcacgaccatctttcacgaatatcctggaccagctaaccaccatagaggagtctggtttctttgaaatgcccaaggactccttccactgcctgcaggacaactggaaacacgagattcaggagatgtttgaccaactcagggccaaagaaaa

SEQ ID NO: 11144 - DNA, 449 bp, Homo sapiens
  MAP TO AC005220.1; EXPRESSED IN LUNG, SIGNAL = 0.92; EXPRESSED IN BRAIN, SIGNAL = 1.4; EXPRESSED IN BONE MARROW, SIGNAL = 0.79; EXPRESSED IN ADULT LIVER, SIGNAL = 2.8; EXPRESSED IN PLACENTA, SIGNAL = 1.1; EXPRESSED IN FETAL LIVER, SIGNAL = 0.98
aggcatagcggaagtgactgccgccatggtgtcgtgctgtgacgaagggagatggcattgtaaacgccagagcgaggttctgcctaccccgagactgctgctgttcggagacctgcaggtgaatgccccatcaccatgtctgacctggaggcaaaaccttcaactgagcatttgggggataagataaaagatgaagatattaaactcagggttattggacaggatagcagtgagattcatttcaaagtgaaaatgacaacacctctcaagaaactcaagaaatcgtactgtcagagacagggcgttccagtgaattccctcaggtttctctttgaaggtcagagaattgctgataatcatactccagaagaactgggaatggaggaagaagatgtgattgaggtttatcaggaacaaatcggaggtcattcaacagtttagacattctt

SEQ ID NO: 11145 - DNA, 480 bp, Homo sapiens
  MAP TO AC002126.1; EXPRESSED IN LUNG, SIGNAL = 0.46; EXPRESSED IN BRAIN, SIGNAL = 0.58; EXPRESSED IN ADULT LIVER, SIGNAL = 0.46
tttgagtgaaaggagcgacccggaggtgaggcagtggggcgtgtgggtgcgcatgagtgcgaacacacgtgggggtgcaagtgcatgtgtgtatgtgcacgcaggttgctcctaggggtgcaaaggcgcgcgcacgggtgcggggtgcgcgccccctcgcggcgccttcacggccctcccgcccctcgccctgcagagtacagcggccgccggcagccctaccccttcgagcgcatgatcttcggcgcctgcgctggcctcatcgggcagtcggcctcgtacccgctggatgtggtgcggcggcgcatgcagacggccggcgtcacgggctacccgcgcgcctccatcgcccgcacgctgcgcaccatcgtgcgggaggagggcgccgtgcgcggcctctacaaaggcttgagcatgaactgggtcaagggtcccatcgccgtgggcatcagcttcaccaccttcgacctcatgcagatc

SEQ ID NO: 11146 - DNA, 419 bp, Homo sapiens
  MAP TO AC005368.1; EXPRESSED IN HELA, SIGNAL = 1.7; EXPRESSED IN BRAIN, SIGNAL = 0.82; EXPRESSED IN BONE MARROW, SIGNAL = 1.3; EXPRESSED IN PLACENTA, SIGNAL = 1.1; EXPRESSED IN LUNG, SIGNAL = 0.78; EXPRESSED IN FETAL LIVER, SIGNAL = 1.5; EXPRESSED IN ADULT LIVER, SIGNAL = 1.2
ttttatttctgggtggtaatgaaacttactttattcttaatgtttttctgtattttccagattttctgtcttatgtattacttacccccaacacaaaccaaaaaccagtatattatttttaaaatatgcaccatgtaactagattacctattagtagctgaaccctccctaggagcgagatgactgactcctgttccaagccatgtgcatcctgaggttacaggtcattctgccttccctgctcaggcattacctctcctgtgagctgggacacctctgcttccaggtcctgtttctctgtggcaatttgctgcttttcagaatgcagtgcatctttttctccctgaagatcttgaagcttctgctcaaagtcactttccatctttttcatttccacctgtagctcatgtcgggctgtt

SEQ ID NO: 11147 - DNA, 379 bp, Homo sapiens
  MAP TO AC002543.1; EXPRESSED IN PLACENTA, SIGNAL = 0.95; EXPRESSED IN BRAIN, SIGNAL = 1.5; EXPRESSED IN BONE MARROW, SIGNAL = 1.3; EXPRESSED IN ADULT LIVER, SIGNAL = 1.1; EXPRESSED IN LUNG, SIGNAL = 0.93; EXPRESSED IN FETAL LIVER, SIGNAL = 1.1
tgttcgtgaatatttcagagtacaattaattttaatgaattgtattttatttagtgtccccttttgtggtccactaataatttgattacgcataaatatttgagaacatgtttttctagctactatattggaatgatggcctactttgtattttatgtgttcttgtcaaagtactgtacaatttgcagtattttatagatttttaaagttggacattccatggccctaaattcattcttatgcttattttctttgccaataaggtgtatggcaaaaaaatagatggacagcaaaccattattgcatgcatagaaagccatcagttccaagcaaaaaatttttggtaagttaaaattttggatattggggagttttggca

SEQ ID NO: 11148 - DNA, 478 bp, Homo sapiens
  MAP TO AC004132.1; EXPRESSED IN BRAIN, SIGNAL = 1.2; EXPRESSED IN BONE MARROW, SIGNAL =   1; EXPRESSED IN ADULT LIVER, SIGNAL = 0.87; EXPRESSED IN PLACENTA, SIGNAL = 0.9; EXPRESSED IN LUNG, SIGNAL = 0.82; EXPRESSED IN FETAL LIVER, SIGNAL = 1.1
ggtcacaggatgactctgggagactctcaggctttaatcagatctgtttaatgcccatctccaacccacaactcattgtggaacttgagcaagtaaattaatatctccaagtctccgtttctttacacttgcctcccatggaatctcctatgtaacaggctcagcccggtgactgggacattgagcgggggctcaaatgatggcatccatccacctctccttatcccaggagctgtctgtgatcttttcctcttgctcccacaggcctcaacacctcccaagcacagagtgtccctgtcatcaacagtgtggccggcagcctggcagccctgcagcccgtccagttctcccagcagctgcacagccctcaccagcagcccctcatgcagcagagcccaggcagccacatggcccagcagcccttcatggcagctgtgactcagctgcagaactcacacagtaaggacacgggcatgtg

SEQ ID NO: 11149 - DNA, 464 bp, Homo sapiens
  MAP TO AC006016.2; EXPRESSED IN BRAIN, SIGNAL = 0.66; EXPRESSED IN ADULT LIVER, SIGNAL = 0.64; EXPRESSED IN FETAL LIVER, SIGNAL = 0.72; EXPRESSED IN BONE MARROW, SIGNAL = 0.68; EXPRESSED IN PLACENTA, SIGNAL = 0.69; EXPRESSED IN LUNG, SIGNAL = 0.64
ctggaaaatgttcccctcaccgtgatcctttgctttgctcacattttactcatttctgctcccgagttgtgattccctccttttctcaactcccgtttcatttctctttcctgtttctctctcatcccctcttatttttatagactttgtgctcttccttctagattctctttctatattttactgcaataggaaaaaaacaaatggagcagtggtgttttgtgaaagtttaaaggattaccattgtcatactaaaattctaacttccagcactggaattacagattacattaaattctcccagaagaacttgagcaaatacgtgagtattaatattatgtggggagagatgttccaagggaagcactggtatgatcccaaggggacaaggaatcagtacgatgttgagatgttgagcagactaccaccgtagcacatgaagatctttggaacccaacaccact

SEQ ID NO: 11150 - DNA, 391 bp, Homo sapiens
  MAP TO AC006143.1; EXPRESSED IN BRAIN, SIGNAL = 1.3; EXPRESSED IN BONE MARROW, SIGNAL =   1; EXPRESSED IN ADULT LIVER, SIGNAL = 2.1; EXPRESSED IN FETAL LIVER, SIGNAL = 1.6; EXPRESSED IN PLACENTA, SIGNAL = 1.5; EXPRESSED IN LUNG, SIGNAL = 1.1
tcaaattcttcttcgggcagttcatagatttgcatttctttaggtctgatttctggaattttatcttattcctttaattgggccatgttgcttgttcctttgtatggctcattaatttttgccgcagtttcggcattcgaaataacaatagtcactcccgatcgttgtacaggggaagaccttcggcaatcttccctgctggaaattctaggacctctcagacattttctcatgtcttacttccccttgcatctgcccctggagctgcagctcgaatgtgctccttgcctctgttctcagcagtttccaaattggtatcagtcctatcagcagtctatgtcaagtggaacagaaaacaatccctcaggtagcacccacagaagccagtaca

SEQ ID NO: 11151 - DNA, 478 bp, Homo sapiens
  MAP TO AC005083.1; EXPRESSED IN LUNG, SIGNAL = 0.48; EXPRESSED IN FETAL LIVER, SIGNAL = 0.72; EXPRESSED IN BRAIN, SIGNAL = 0.58; EXPRESSED IN ADULT LIVER, SIGNAL = 0.43; EXPRESSED IN BONE MARROW, SIGNAL = 0.6
cacacattccctttggtgtgtgagaccacctctcggaattattgttaactataacagtggggcagagaaagaactcatagttcagttctctcagtctcctagagaaagcaagagcatgaaaggaaaacatccaagtttggtctcctatgttgaatatcttgtctgagttccacttatatctcagttccaaacttggatgttttcctaaaaatgttgattctcagatcccattctagactaacttttaatcaagagaacattccatggttactactcatggaaaagatggtgcaccctgcttccttacatggatgtcttgctttctctctgtcacctgtaagccccaggcacactgagtccataaatgccttcttggcagaggttctcagcatcatagttccatggaaatagccatgcctatgtgagagaagagcatcagtggtatgaaatgtgagtaagcaagtggattccctgttga

SEQ ID NO: 11152 - DNA, 451 bp, Homo sapiens
  MAP TO AC005585.1; EXPRESSED IN PLACENTA, SIGNAL = 0.84; EXPRESSED IN LUNG, SIGNAL = 0.84; EXPRESSED IN FETAL LIVER, SIGNAL = 0.76; EXPRESSED IN BONE MARROW, SIGNAL = 0.79; EXPRESSED IN ADULT LIVER, SIGNAL = 0.8; EXPRESSED IN BRAIN, SIGNAL = 0.75
cctcctgcatgatcttggggctgaggctccgcagtcgctcgatggtctcgtactggccctggcaggctttgaccttctcaggggagcccagcgcgtgcttcagcagcaccagccccacccggaagatgatcttgacccctgcatgggggatgggcagtaagtacaaggaagctttttggggtttctctgcaaagagaggccccactgtgggctgctggggacaggggtgctccccccaagcccagcccagtaccttcacagaagaacatgtcccagacacgcagcacagagctccagggcaaggttcgggagaaggcgcacatgaaccattctgtcatatagaggagcgggtcgatcttctgacggctgaggtgcttgtgggccaccggcgacaccttctgcaacagcgagaaaaggatctccccgtccagctggatcgcctcctagggag

SEQ ID NO: 11153 - DNA, 465 bp, Homo sapiens
  MAP TO AC004820.2; EXPRESSED IN BONE MARROW, SIGNAL = 0.83; EXPRESSED IN PLACENTA, SIGNAL = 0.7; EXPRESSED IN LUNG, SIGNAL = 0.57; EXPRESSED IN BRAIN, SIGNAL = 0.68; EXPRESSED IN ADULT LIVER, SIGNAL = 0.51
tgtcattctagtttcactgactttccttcacatatctatatatgtatgtatgtgtgtgtatatatatatattttttcctgtggtttgtagataaaaatggacattccaataggttgtatagacattaaccttaaatatgaagtctgctgggcttttcttttaaaatactttctttttttcaatacttctggattttaaggaattctcaagggtctctttggaggcttaccaaggacatccagctgcacagtgaaggtggcttctcctgctctattcttggcaacacatgcataagcccctgcatctgaagctctgactacttcaaagatgagtgaatgaagacccttctcagacactatcattttgtgcaaatcatctgattgaactgttcttccatttagataccatgacacatcaggagctggcagtccactcacctagaaagaaaaacacaaggagatggca

SEQ ID NO: 11154 - DNA, 384 bp, Homo sapiens
  MAP TO AC005383.1; EXPRESSED IN LUNG, SIGNAL = 0.82; EXPRESSED IN PLACENTA, SIGNAL = 0.84; EXPRESSED IN FETAL LIVER, SIGNAL = 0.75; EXPRESSED IN BRAIN, SIGNAL = 0.63; EXPRESSED IN BONE MARROW, SIGNAL = 0.72; EXPRESSED IN ADULT LIVER, SIGNAL = 0.66
ttttcacagagtgaacaaaccagtataaccaccttgatcaagtagttgatccaccggaggcttcctccctgcccactcccggtattgattgcatcccttttgcaaatggcaaccaatagtgggtatattttcaagtatcatgtatattttatatacatgtatatattttaaatatattttaatacacaaagggtttttggattgattagacttgccattcttttgtatagtgttaatagtagcactggaaattttcttcacaaaagattgcttttatatattttagaaaatcaggaaaagctgtgcatgttgacagctgaattattagaatactgcaatgctccgaaaagtcgaccaccctatagaccaagaattggagacgca

SEQ ID NO: 11155 - DNA, 477 bp, Homo sapiens
  MAP TO AC005284.1; EXPRESSED IN PLACENTA, SIGNAL = 0.91; EXPRESSED IN LUNG, SIGNAL = 0.91; EXPRESSED IN BRAIN, SIGNAL = 0.69; EXPRESSED IN FETAL LIVER, SIGNAL = 0.93; EXPRESSED IN BONE MARROW, SIGNAL = 0.83; EXPRESSED IN ADULT LIVER, SIGNAL = 0.85
agcatcttctgcagcttctatgagagtgtttttgaaaatttcgtccacttgcacctcatgaaaaatgcaagtaggtagcacacagagccctcagtgctaaggagcataggtctcgcccctagaaaagccatatttttttcggcagtgcctagacagaccagttgcatctgtttttgatgggaagcaaggatgacttctcttagaagtcgtgagggaggaaatgggaatctctcagtgggctctggttcttacagaaaggagaaatgtgtgttcagaaatagggagaatgatcaaacacatgatgttttgtttaggagtctatgtagctcttaccttgcaaccagaacttctgatccagaaacacatcttctattctgcctactacctggagatcagagcccaaaggaaggtgggaggaatgattttatttctttgaatgaatatgctttctaatatccttttgcctggtggctctta

SEQ ID NO: 11156 - DNA, 470 bp, Homo sapiens
  MAP TO AC005178.1; EXPRESSED IN PLACENTA, SIGNAL = 0.84; EXPRESSED IN ADULT LIVER, SIGNAL = 0.81; EXPRESSED IN LUNG, SIGNAL = 0.82; EXPRESSED IN FETAL LIVER, SIGNAL = 0.84; EXPRESSED IN BRAIN, SIGNAL = 0.72; EXPRESSED IN BONE MARROW, SIGNAL = 0.84
tcccatctgtaatgatctatgtcctcgtataaagtctaccaaagaatttgccatataagctgcagttgtggatctacactcagctgcattaggtgaaggcaggactgtttccaggcagggctggaggcccgatcggtcaaacaagtctagcctcggcttgggaaacacacccaggggagagggatgcagggagggggaattcccaagacaggccagccttgaggatggtgaggaagtgagacaggcattgagggagcaaaaaggacttcctagggtcaactacagagagcctgtgtggcccatcaggtggcaaagataacaacaacaacaacaaccattataatagcaatagtaacagtggtgactgctctatccagactgttaagtgtcaggcactgtgtaagcacttcccaggcattagttcactgattctcactcatgaggtggggactatcaccattctcatttca

SEQ ID NO: 11157 - DNA, 466 bp, Homo sapiens
  MAP TO AC004863.1; EXPRESSED IN BONE MARROW, SIGNAL = 0.95; EXPRESSED IN PLACENTA, SIGNAL = 1.2; EXPRESSED IN LUNG, SIGNAL = 1.3; EXPRESSED IN FETAL LIVER, SIGNAL = 0.95; EXPRESSED IN BRAIN, SIGNAL = 1.1; EXPRESSED IN ADULT LIVER, SIGNAL =   1
tggaatgtggaatctctccctctacacaggaataaaatctgtcataaatcctggcaatggcacagactgggcctcgagagcaggtttcctcccacttgtagttcagcagctctgtggctgctggttagcgtttctttaaaagaaaattgggtactgctattgtcacatgctaacaaccatacagaagagaaagacaaaatgaaagtgaaccagaaagggaataagtaaaaataaaacaaaaaagaatgtaaagagagtcaatggtcaacactcaagagcaagatgttacctccagatacaacagtactttctcccgggtgctgggtccacacttccctggtctctatttcctccgtttgaatgtctctttcaacattatcttcgttacactgaacatatgccttaaaaacaaaaatatgccaaaattaacattggtttcaatttcggagcaatctgtcattactga

SEQ ID NO: 11158 - DNA, 366 bp, Homo sapiens
  MAP TO AC004869.1; EXPRESSED IN BRAIN, SIGNAL = 0.62; EXPRESSED IN BONE MARROW, SIGNAL = 1.6; EXPRESSED IN ADULT LIVER, SIGNAL = 0.57; EXPRESSED IN LUNG, SIGNAL = 0.65
tgaacatttggttgctttgacttttgaactattacaaaattagctactttgaacattcctgtacatgtctttgcatgaacatatactttcatttccttggaaaaatacctacaaatgagaagactatcatatagtcagtggatgtttaactttataggaagctgttaaactgttttccaatgtgattgtaccaatttatatttccacagactgtggattagagtttcagttcctccacattattgtcagcacccttgtagtcattgtttccaattttgatcattctagtaagtatataattgtgatttttctttatatttccataatgactaatgatattgagcatctctttcatgtgcttatttg

SEQ ID NO: 11159 - DNA, 478 bp, Homo sapiens
  MAP TO AC005358.1; EXPRESSED IN PLACENTA, SIGNAL = 1.3; EXPRESSED IN LUNG, SIGNAL = 1.2; EXPRESSED IN BRAIN, SIGNAL = 0.96; EXPRESSED IN FETAL LIVER, SIGNAL = 1.1; EXPRESSED IN BONE MARROW, SIGNAL = 1.1; EXPRESSED IN ADULT LIVER, SIGNAL = 1.1
tgcagatttttgtgtggacgtaagttttgaagcccaaggagtgaaactgctggattgtatggtgagaccttgcattttcattgcaatatttccagcagctagaacaatgtcttgcacatggaagacactcaaaatatacctgttgaatgaagggatggaatgaaagcgtggttggaattttgcaagttccgtcactctatgctcatagcaaagagactgtggcacatcctgttgtacagtatatcattgtgagcattgagtatatcattgtgagcattgagtatatcattgtgagcactgagtatatcattgtgagcgttgagtatatcattgtgagcgttgagtatatcattgtgagcgttgagtatatcattgtgagcattgagtatatcatagtgagcattgagtatatcactgtgagcgttgagtatatcattgtgaaaattgagtatatcattgtgagcattgagcaaatgca

SEQ ID NO: 11160 - DNA, 459 bp, Homo sapiens
  MAP TO AC005368.1; EXPRESSED IN PLACENTA, SIGNAL = 1.4; EXPRESSED IN ADULT LIVER, SIGNAL = 1.6; EXPRESSED IN LUNG, SIGNAL = 1.4; EXPRESSED IN FETAL LIVER, SIGNAL = 1.6; EXPRESSED IN BRAIN, SIGNAL = 1.2; EXPRESSED IN BONE MARROW, SIGNAL = 1.7
aaaggctcaaatcccagacctccttcttactagctttatgtctaagcaaattcctaaaagtcttagcttgtttccttgacataaaactggatacttaaaaatcttgcagtgctattgaagaaattaaacatgatactgaaaattcactgtgcaatggttggtatatagcaggaattgaacaattaaagttccatatcaagggaccatagattcaagagaattaaaaattcttaaaagaattccttcacattttgaatagttgggaccaagagatactcacagagattctgggctgtctttgaatccaacacctttaactcttttacttttttcttttgcacagatttcttttcttctccaccttcttgatccttcttggctagcagggaaaagattagaaaagcatgattaaaagtaagccacctctgtgctttaccaagcaactactgtccagcgtga

SEQ ID NO: 11161 - DNA, 473 bp, Homo sapiens
  MAP TO AC005529.7; EXPRESSED IN FETAL LIVER, SIGNAL = 0.94; EXPRESSED IN BRAIN, SIGNAL = 0.94; EXPRESSED IN BONE MARROW, SIGNAL =   1; EXPRESSED IN ADULT LIVER, SIGNAL = 0.91; EXPRESSED IN PLACENTA, SIGNAL = 0.87; EXPRESSED IN LUNG, SIGNAL = 1.1
cggaggcttcatgttcttgtaggcatcttcagggaactggcaggagcgctttgggttggagactctgagcagggcccttgggtttatagcctgcccaaggaactgggcctggctgcgggactcccatggttggaccttgtctagattcagtgaaagttttgaaggacagtgcatgacagacgtcactggtcaggttcaccagagcttggctcacttgtcttcagaaggattcaaaggcagttgaccagacttggcaagtcccagactggtgcagccactgtcctcgagaccctggttgtacaccctgaggtgcttctgcttcattacctgctgaaatttggagacctcttcttcctggataaccttcaagatactcattgtgcatgcgaggaattccccgccctcctggggggactccactccccaggcaggcaaggttgggcaaggggagggctgttgctggattgccaaag

SEQ ID NO: 11162 - DNA, 476 bp, Homo sapiens
  MAP TO AC002536.1; EXPRESSED IN PLACENTA, SIGNAL = 0.62; EXPRESSED IN LUNG, SIGNAL = 0.58; EXPRESSED IN ADULT LIVER, SIGNAL = 0.74; EXPRESSED IN BRAIN, SIGNAL = 0.68; EXPRESSED IN BONE MARROW, SIGNAL = 0.71
cccactcagcctgttagtgtcaatttcccctggtgttgggaccaatttgatcctggagaagctctcctcaggggagcaaacctcctacacaggtgggctgtgcggggggtgggggtggagtaaggcgtgttgggtcatgggtgctactggtgtcctccccaactccttttatctggaccgtgtgcctatcccccagctgttaagtgttgacaactaatggctcaatgaagagctgtttagctaaagggaagccccacatccgggacgtgtgtgccctgggggacacacagcaaatgactgacaaggaggaacagaaggcagcctcttgcttccagtcctgggagaccatgctgaagccctgcctcctggcttatctgtatctcctgcacaagaattccagcccaggctctgtttctagggagtgtgccctgagatgccagcgcttgagcttcgagagcacgagggggtaggttctg

SEQ ID NO: 11163 - DNA, 474 bp, Homo sapiens
  MAP TO AC005988.1; EXPRESSED IN LUNG, SIGNAL = 1.5; EXPRESSED IN FETAL LIVER, SIGNAL = 1.6; EXPRESSED IN BRAIN, SIGNAL = 0.87; EXPRESSED IN ADULT LIVER, SIGNAL = 1.3; EXPRESSED IN BONE MARROW, SIGNAL = 0.82; EXPRESSED IN PLACENTA, SIGNAL = 0.8
tgtttttggttttgagattttgagtagcaaagcaatgctgtgtgtcgctgctgtgcccgctctctccttgccctctttaagacgccgctaggttctgagaacagaaagccatggtggcgacacgtgggctccagcacgtagtccagaaagctgcacgtctggtgtgcgcagccttggagaggcggtgtgtcaggcagccgggctgccgcaatgaactaccacagactgagtggcttaaataacgcacatgaattttcctacagttctgggtaccggagtccaagatcacggtgttggcaggattggtttcttctgaggcctctgtccttggcttgcagacggctaccttcccgctgtgtcctcatgtggtctgtgtgcccgtgtccctggtgtccctcagtgtgtccacattccctctcctggtgtccaaggacaccagtcagattggattcgggtccatccccgattaattgg

SEQ ID NO: 11164 - DNA, 451 bp, Homo sapiens
  MAP TO AC006097.1; EXPRESSED IN PLACENTA, SIGNAL = 0.89; EXPRESSED IN LUNG, SIGNAL =   1; EXPRESSED IN FETAL LIVER, SIGNAL = 1.8; EXPRESSED IN BRAIN, SIGNAL = 1.1; EXPRESSED IN BONE MARROW, SIGNAL =   1; EXPRESSED IN ADULT LIVER, SIGNAL = 2.9
ttcctgagacaatgcctgcctcacagcagggactcgatatgtattcattcccctacttggtccctctcaggaatagatcagggtctacttcctggaagaagtgagtttcaagatgattctttttgggtgggaagggacacagaccagtcaattcccactgggtggagtcaatccagggataatgaatctttagaaagcctagggaaaaggaccatcttgggtgcctgccacaaaaacatcagatgcatctggccttccatgcagaagggtgcaggtacaagatagggcacagaaagtctagcgtcgaaggggcctccaccacttaccttgggagcagctgggacctgtgtaagggtgtttacagacacagcggtagtagggaggactctgggtaatgagacattggccccggccacatgggttgtccttgcacgtattttgcactgtagga

SEQ ID NO: 11165 - DNA, 453 bp, Homo sapiens
  MAP TO AC004547.1; EXPRESSED IN BRAIN, SIGNAL = 0.66; EXPRESSED IN ADULT LIVER, SIGNAL = 0.4
tcaattttagacatgatacatgggagaacactccagttctagagaccaccaatccagcctttattttaccacactgcaatcaaaatgacccttattttgctttcatcattcaaagcttttaaatagtttacacaactacaacatgtgctatgtggatcatgtatttttaaatgctgttatcacaaggtgaaactataatttgccaattggctctccactctcatttctactatctttttccttttcatctctctaacatttttgatatttagtgtttaatctcttttcacatgttttttcttttcatttagggagagctttggaagtttgtcctctacatcactgagttgattctccgcagtgttgtctgttattctattcatggaaatttaagcctgttgtttatttgtatggtggtctggcttattgaggcttggtctatttcacttcaga

SEQ ID NO: 11166 - DNA, 468 bp, Homo sapiens
  MAP TO AC004879.1; EXPRESSED IN LUNG, SIGNAL =   1; EXPRESSED IN FETAL LIVER, SIGNAL = 0.89; EXPRESSED IN BONE MARROW, SIGNAL = 0.94; EXPRESSED IN PLACENTA, SIGNAL = 0.84; EXPRESSED IN BRAIN, SIGNAL = 0.77; EXPRESSED IN ADULT LIVER, SIGNAL = 0.98
gggatgatgtaaagctctcaaacttccattcttttaaggcatttaatttataataaaatacatcatgaaattaatatctggtagatgtgttacattaagattttgagtcatatgtcattacatatatacacacacacattgtatatttatatattatatatacattacatatagtttcctaaactaaaatctctctctcattaaaggatatttgagaaactacataaataacacagcggtcaagagttcagctctggagaccaaatgcctggtgaggcatagaaacatagagaccgtggctctatgtttcatttgctgtgaaccagagcaagataccgaacttccctatgcttccgtttcctcattgctgcaacaggataaagatgattttaattagcatttccctcatagtttgttgtaaggataagtcaatacatgaaaacacttggaaaattgcctggcacatag

SEQ ID NO: 11167 - DNA, 473 bp, Homo sapiens
  MAP TO AC006350.2; EXPRESSED IN ADULT LIVER, SIGNAL = 0.96; EXPRESSED IN PLACENTA, SIGNAL = 0.7; EXPRESSED IN LUNG, SIGNAL = 0.6; EXPRESSED IN FETAL LIVER, SIGNAL =   1; EXPRESSED IN BRAIN, SIGNAL = 0.66; EXPRESSED IN BONE MARROW, SIGNAL = 0.66
aagaatggccagtgatgtgcttggtaataggcacaatcacaacctagaaatgggtggcaagaagaaggatgaggaaaaaccaagctccagaccagggctactttagaaatcatgatatgtcagttgataagttagggatgatgcaaaactaaaagttattctcacagtgtcatgaattcccagaaaacaatgtgctccgtcatatttctttaagttaaataccaccttgattaatacgagatctggttatgctattagagagaagtctaaccaacatttatgtattttttcttaaaggattttgcagaaaagaagtccacagcaaaggccctggaagatgtaaaggcaaacttttactgtgaattatgtgacaagcagtatcacaaacaccaggagtttgacaatcatattaattcttatgaccatgctcataagcaggtaaggcaaagtgggaaaagtccttcatattcctg

SEQ ID NO: 11168 - DNA, 467 bp, Homo sapiens
  MAP TO AC006354.2; EXPRESSED IN ADULT LIVER, SIGNAL = 0.78; EXPRESSED IN PLACENTA, SIGNAL = 0.66; EXPRESSED IN LUNG, SIGNAL = 0.62; EXPRESSED IN FETAL LIVER, SIGNAL = 0.7; EXPRESSED IN BRAIN, SIGNAL = 0.81; EXPRESSED IN BONE MARROW, SIGNAL = 0.65
gaattacaaaaggatgagtgtagcctagtataacaatgtgaagttcctgagggccacagatatatgaggcttcctaatctcttgcagccttttctccataaacccaacagacatagaaatgactgacacaaatccagaaaaatctccccaggggtgctgtttgggttgctgtttggccactgctgaaatgccacccagacctatctccctggtgtccccataatttatagggaaaagaaaagcaacaataaaaacaaatatgtcagcttagaacatgtagggaaacccatcatagctggaggaacggaacatggaggagatagttccacctttgtggtacagataggaatacctgatagacccagcatgactgctggaggaggggcaggaatactttggaaagccatattcctgaaaacaaaagccacagtcactaacagaaattgatgcttaatcagaacacaccc

SEQ ID NO: 11169 - DNA, 453 bp, Homo sapiens
  MAP TO AC004984.1; EXPRESSED IN PLACENTA, SIGNAL = 0.66; EXPRESSED IN LUNG, SIGNAL = 0.69; EXPRESSED IN BRAIN, SIGNAL = 0.58; EXPRESSED IN BONE MARROW, SIGNAL = 0.56; EXPRESSED IN ADULT LIVER, SIGNAL = 0.62
accagtgagaatgactttttccatctatttacctaggtagttctgtgtcacactgtttgcaaaattttctattatcatgcctggatttttctctcctagtttcctaatttatatattacatcatgcacctggttacccaagagttctcatggagatgaatgttggtttcatgccacagcatccattctgcagcctatgaatcaaggagtaaatttgactttcacgtcttactatttaagaaatgcattttgtaagtctatagctgccacggatgatgactcctctgatggtcttggaaaagtcaatcaaaaaccttctgaaaagcattcatcattctagatgccatcaagaacattcgggattcatgagaggaggtcaaaatatcaacattaacaggagtttgggagaagctgactccacccctcatgggtgagtttgaggggttcagcattg

SEQ ID NO: 11170 - DNA, 438 bp, Homo sapiens
  MAP TO AC005538.2; EXPRESSED IN PLACENTA, SIGNAL = 0.74; EXPRESSED IN LUNG, SIGNAL = 0.79; EXPRESSED IN FETAL LIVER, SIGNAL =   1; EXPRESSED IN ADULT LIVER, SIGNAL = 0.8; EXPRESSED IN BRAIN, SIGNAL = 0.98; EXPRESSED IN BONE MARROW, SIGNAL = 1.3
ctgtgcacatggatggtttagaatggtaacacacctttactttatgtgtatcttttctcccaggatactgcagtcgtatctccagaaagagtcctggtgacccagcgaaaccagcttcatctcccagagaatgggatcctttgcatccttcctccacagacatggccttagtacctagaaatgacagcctctccctacaagagaccagtagcagcagcttcttaagcagccagccctttgaagatgatgacatttgcaatgtgaccatcagtgacctgtacgcagggatgctgcactccatgagccggctgttgagcacaaagccatcaagcatcatctccaccaaaacgttcatcatgcaaaactggaactccaggaggaggcacagatataagagcaggatgaacaaaacatattgcaaaggagccagacgttctc

SEQ ID NO: 11171 - DNA, 452 bp, Homo sapiens
  MAP TO AC004991.1; EXPRESSED IN PLACENTA, SIGNAL = 0.99; EXPRESSED IN FETAL LIVER, SIGNAL = 1.1; EXPRESSED IN BRAIN, SIGNAL = 1.2; EXPRESSED IN BONE MARROW, SIGNAL = 1.1; EXPRESSED IN ADULT LIVER, SIGNAL = 1.1; EXPRESSED IN LUNG, SIGNAL = 1.1
gcttggaaggtaaagatggaggtatcagtacaaaacttgagccctcttctgtcatgtatctgggagagagtaatgtggtgaaaatgggccatgtaagtgtgccgacccaggggtggtgttcctggggcagatggtgatatccttggtggcctgctgcagcaggcatggccacgtgggaatgagcactagtcgaggtctctgcccgcaggcccctcgcctacagcacgctggccgacctcgtgcaccatgtccgccagcacctgcccctcagcgacctctccctcgccgtccagctcttcgccaagaacatcgacgatgagtccctgcccagcagcatccagaccatgtcctgcaagctcctgctgaacctggtggactgcatccgttccaagagcgagcaggagagtggcaatgggagagacgtcctgatgcggatgctggaggtaccagct

SEQ ID NO: 11172 - DNA, 480 bp, Homo sapiens
  MAP TO AC006210.1; EXPRESSED IN ADULT LIVER, SIGNAL = 0.69; EXPRESSED IN PLACENTA, SIGNAL = 0.8; EXPRESSED IN LUNG, SIGNAL = 0.81; EXPRESSED IN FETAL LIVER, SIGNAL = 0.81; EXPRESSED IN BRAIN, SIGNAL = 0.72; EXPRESSED IN BONE MARROW, SIGNAL = 0.77
tctatatctggaaagcagagcatacattatatttctctgcatacaggtaaaaaacaataaacgaaggctcagggaagttaagaaactgtatcataccgtagtgatgctggaaagtgtcttgttcttgtttagattagtctttttaactatgtctgactgaaatgttaacatgttccctgtctttaagaagacaatagtttaagtgggaagaaaatttcaatcaacatagcttaaatcctaactttcagtatgcagacacactaatattaactacaggaaaatgctcccaaatgtacagcacagcctggttgtcgtccatcctgccatcgctgcttttgtcccatttgaagtgaacgcagtgctgccctcctggcaggtcctggcacagcagcttcaccacccaccgggtcccctcacaccagtggctgctgaccaccgtggtgagagagaaggcgagggcgatgcagatgggtaggagga

SEQ ID NO: 11173 - DNA, 493 bp, Homo sapiens
  MAP TO AC002465.1; EXPRESSED IN LUNG, SIGNAL = 0.54; EXPRESSED IN FETAL LIVER, SIGNAL = 0.7; EXPRESSED IN PLACENTA, SIGNAL = 0.63; EXPRESSED IN BRAIN, SIGNAL = 0.62; EXPRESSED IN BONE MARROW, SIGNAL = 0.78; EXPRESSED IN ADULT LIVER, SIGNAL = 0.52
agcatgggattgtttgtaaggttcaatttagcaagatgcaatgaaaaaataaaacaaaaatatttctatgtgagttaacaagaagacatattgtttgcttcttggtaaatgactttataaaaattgactttacaaagtacatctaatttcagaacacagtatcttccaaaatctattaccctgggaaaatgatggtatcaagtaaaatgactcagacattatgaaaattaaactaaaaagaacaattggttcttaacactattaataatataaacaaataagttaattttacctgatttccaactttgtctcttcagatagctctccaaattgtatctcttctacctgtagttctttaagagcagccagaattttctgctggtctttactggtaattccattctaagcagaaataattttaaggtacagtaagttagttatacttgagtaatttaaaactcaaaattgctaaagatgttttcttgatgaattc

SEQ ID NO: 11174 - DNA, 472 bp, Homo sapiens
  MAP TO AC005411.1; EXPRESSED IN ADULT LIVER, SIGNAL = 0.96; EXPRESSED IN PLACENTA, SIGNAL = 0.96; EXPRESSED IN LUNG, SIGNAL = 0.98; EXPRESSED IN BRAIN, SIGNAL =   1; EXPRESSED IN BONE MARROW, SIGNAL = 0.85; EXPRESSED IN FETAL LIVER, SIGNAL = 0.87
cgcccatgtcccttataaacggttgaattctcaagcaaagaccagcgtttgtgacaggttacaatacctgactatgtgaataaataacggatatacctccctcttctttcccttctccccatggccatgaccaccctgtctttttggaataggcaagcagtaactttggctctgtctctaggaaaaaggagccgcagcctgcaagagtggactgagcttccatcacatgccaggagatgagtcagacacagtcatggtctggaggagtccaggatcgctcattctgcaagaggcagggacagacgtgtgtgccgtggacagacagacagcctcgtctattctgcgaacatttcacatcctgtcaccagtgtggctgctcgggcacacacgagggacagcgggtgggggggaaagtaaccctatccaattcctgacattgcagccccctcacacccgctctgatctccattac

SEQ ID NO: 11175 - DNA, 474 bp, Homo sapiens
  MAP TO AC006213.1; EXPRESSED IN PLACENTA, SIGNAL = 1.1; EXPRESSED IN LUNG, SIGNAL = 0.94; EXPRESSED IN BRAIN, SIGNAL = 0.97; EXPRESSED IN FETAL LIVER, SIGNAL = 0.97; EXPRESSED IN BONE MARROW, SIGNAL = 0.85; EXPRESSED IN ADULT LIVER, SIGNAL = 1.1
aatgtaaggtttctctcctgtgtgtaatttacgatgaacattaagtgctgatctacgactgaaacctttcccacattgctcacatttgaatggtttctctccagtgtggactctctgatgagtttgcagatgtgagctttgactaaattccttgccacacacatcacacataaagagtttctctcccacgtggactctctgatgaacatgaagagctgagatgtaacagatgctttttccacactcatcacatgtataagacttctcttctgagtataactgctgaggaagatcaaagatgggaacatcactgatggactgtttacacttcccaccctgggaaggtttctgtcctgtatgaattgtgggtagtcctgcttcaacctgggaggggacatcaccattttcaaagaactgagagttatttatgatagagtcctgagacctggttaagtcttttgcaatttgttccca

SEQ ID NO: 11176 - DNA, 463 bp, Homo sapiens
  MAP TO AC005629.1; EXPRESSED IN BRAIN, SIGNAL = 0.91; EXPRESSED IN PLACENTA, SIGNAL = 0.83; EXPRESSED IN LUNG, SIGNAL = 0.89; EXPRESSED IN BONE MARROW, SIGNAL = 0.68; EXPRESSED IN ADULT LIVER, SIGNAL = 0.74; EXPRESSED IN FETAL LIVER, SIGNAL = 0.83
  unsure 74
  unsure 120
  unsure 139
  unsure 415
ggcttaattcttcagctgcctccattgcaaaataaaactctgtgtccccatggccatttttgcagggatcctantgaggcagaacttctaatgatgaagagtcaggaaattctgccaagnccagggtctacagtaaaangcttgagggagttttattttctgggtatgtaacaggtttattgagagaattcacatggcatataattcacccatttaacatgtggaattcaacggtttagtctgttcatagagttatgcaaccattgccaaaatcaattttattttttaaaaaaatttaatattcttcctacatagaaaccttgtgccattgcaatgcctcctctgggtcatggaagcgcttttgttttctcgtttggggattaaagtcttagaaatgtataaggattttttcccnacagcattggtaaacttggtatggctcagaaggaaggatttgataaat

SEQ ID NO: 11177 - DNA, 470 bp, Homo sapiens
  MAP TO AC006227.1; EXPRESSED IN BONE MARROW, SIGNAL = 0.72; EXPRESSED IN ADULT LIVER, SIGNAL = 0.71; EXPRESSED IN PLACENTA, SIGNAL = 0.86; EXPRESSED IN LUNG, SIGNAL = 0.77; EXPRESSED IN BRAIN, SIGNAL = 0.61
gtcacctagacaccgcttcccatgccttgttgacgtggccaatgtcaagtccactttgtctttccagcaccatgagattgcagaaagctctgcctgttcctttcagtgctggcagtggccttgtaaccaagccctctgcctgcatgcccgctctctgcctcccacagaaagctggcaaggtctccaaagagaaaggagcagtgtcagcacctaggctcacctccctaaagttccttcttacagggactttggccacataacttctcgttacctcagcaaatcatcaacaccttcaagcgctttctccgtctctctcttttgtatttcatccagtttttccaggtgttcttagcgggagtgttggtctgctgcgagtacttcagcatagccagatatggagtctgaaatcgattctttcaagcaatagtatttcaaatcagaatgtgctacattttctgttatttttgaaa

SEQ ID NO: 11178 - DNA, 470 bp, Homo sapiens
  MAP TO AC006377.3; EXPRESSED IN LUNG, SIGNAL = 0.64; EXPRESSED IN BRAIN, SIGNAL = 0.59; EXPRESSED IN BONE MARROW, SIGNAL = 0.56; EXPRESSED IN ADULT LIVER, SIGNAL = 0.53
tgaactcaaactaaatcttctctggtaaacaaaaaaattctgagcaaaagcaaaagcttttcctaatgatgctacagagattaaaatagatatgtttttgccatttctcattcaagactatctgtttctacccacaattttcagtatttataaagataggaaaactacattaaagcaaagcttccagttattggaaacgtgttgctttggctgctttagtcactaaatgacaatgaatgacatctttacctctccacaaatatcccagcctgcactgcgtgaacgatgctcttgaaccggggcttctcgtcgctcctcctgagcatcatccccatctgccgcgtgaaggtggaggccagccagtctcggacctcagaaggcacagcatctgactgaatgtcactgagctcatcctctgtatccaggagtctcctgaacacaagaaacagaatcagcacactgagattaaa

SEQ ID NO: 11179 - DNA, 455 bp, Homo sapiens
  MAP TO AC004957.1; EXPRESSED IN PLACENTA, SIGNAL = 1.2; EXPRESSED IN LUNG, SIGNAL = 1.3; EXPRESSED IN FETAL LIVER, SIGNAL =   1; EXPRESSED IN BONE MARROW, SIGNAL = 0.89; EXPRESSED IN BRAIN, SIGNAL = 1.1; EXPRESSED IN ADULT LIVER, SIGNAL = 1.3
gccataatgaggaatggattgtgtgattagtatttacttaactgacacaacctcaatgaccacaaattttctttgcctaacctctggtgaaagggagctttcagcactgaagtcattctttgtaattataacatgttgcattccttgtagctaatcatgtctctaatagttctgataaacaggaattcttgaaaggggaaagatgttgccattactgcataccaaacttctttgttctgctatttgtgtaaagtacatgttctgtttcaccagagacagaaaggagcaaaagagagaaggggaatgtcaaggagaaaaagagagagaaaggagagaagaacaaagaagacaggagaaggaaagggaggaggagagaagggatggtgagaaggaggaagaagggaagtaagaggaagagggggaaaagaggaggcaggagaaggggaggacaaaga

SEQ ID NO: 11180 - DNA, 437 bp, Homo sapiens
  MAP TO AC005365.1; EXPRESSED IN BRAIN, SIGNAL = 0.92; EXPRESSED IN PLACENTA, SIGNAL = 0.91; EXPRESSED IN LUNG, SIGNAL = 1.1; EXPRESSED IN BONE MARROW, SIGNAL = 0.79; EXPRESSED IN ADULT LIVER, SIGNAL = 0.91; EXPRESSED IN FETAL LIVER, SIGNAL = 0.72
ttgtcattgagagcagattttctgaaataacatcatgaattgatttaatctaatcttgggattaaaaatctttcgttttaatatatggagtgctgctgagctgtgactttgtcctttatgtccattttttctgtaatcttacatacatatttccctagagccttacatacttctttgagcatgtctttaaaaaatgttttaaaaacatagtatttatttgcttttatagatacaaaatcttaccctaatcagtgtggagttgcatgctcgaactagacgagacttagaaccggatcctgaatttgacccaatctgtgctctgttctactgcatctcatctgacactccactgccagatacagaaaaaacagaactcacaggtgtaatagtgattgataaagacaagacagttttcagtcaaggtattgtccattttt

SEQ ID NO: 11181 - DNA, 447 bp, Homo sapiens
  MAP TO AC006238.1; EXPRESSED IN ADULT LIVER, SIGNAL = 0.69; EXPRESSED IN BONE MARROW, SIGNAL = 0.9; EXPRESSED IN PLACENTA, SIGNAL = 0.73; EXPRESSED IN LUNG, SIGNAL = 0.77; EXPRESSED IN BRAIN, SIGNAL = 0.81
tcctaatgccatctatcaaacatcaatataagcaacttcagcatcaaccaatgaactaaactaacaagagatcgagcaaaagtaacttaaagggagcaccactggctgatgttctgctgaggctctgggcgttcaggacctggttacagggaaaacagaatcaaaccagcaggtactctggacccaaaccctcacattgtgacctgcctcccttctgggggccctgtcgtcccatggtccccctgacacttccgggcccctgtgggctgcgggcagaaccccaggagccaaagcaccaccccggagaagctggaacttggcctcaaaatcagctggcttctgcctgctgtggtcattttcttcccggagcggctggagcgctgtctcagtggatacagcagccatccggccttcctgggccattttctcacggaagaagatctccct

SEQ ID NO: 11182 - DNA, 465 bp, Homo sapiens
  MAP TO AC003086.1; EXPRESSED IN ADULT LIVER, SIGNAL = 0.61; EXPRESSED IN LUNG, SIGNAL = 0.56; EXPRESSED IN BRAIN, SIGNAL =   2; EXPRESSED IN BONE MARROW, SIGNAL = 0.61
attggagaaggtacgaggggcattggtcaacaatcgacaaaggcatttacgggtcaatccaactgagtagaggaactttatattattctctaagtttaggttgttattggaccgaaaaaaggattcaggagaacgttccaaaatatttacaatttcaaggtctgatgtcacaatctttctccacagatcccaccgttttgaaagattctcgggagtacgtgttattgctcgtggatatcttgatatgatgctagcgatcacttctttgctagctcctttggaaagaaggaacatcttcaggtcctgctcattggtaatcatcctatgaaaaactccaggctgtcgtttccttgccatgtcaatatctactcccatagtaagtaagtttttcagtaggtcctcatttttcaaaggctcactgtctgtattatgacacttcacaccaaaaagcctaaatgaaactga

SEQ ID NO: 11183 - DNA, 466 bp, Homo sapiens
  MAP TO AC005562.1; EXPRESSED IN BRAIN, SIGNAL = 1.1; EXPRESSED IN ADULT LIVER, SIGNAL = 1.3; EXPRESSED IN PLACENTA, SIGNAL = 1.2; EXPRESSED IN LUNG, SIGNAL = 1.4; EXPRESSED IN BONE MARROW, SIGNAL = 1.2; EXPRESSED IN FETAL LIVER, SIGNAL = 1.1
ttgctccttcagaacgttttacagaaaacactaatgtaaaagacacaactaatgtaaaagacacaaaagagatgtgttcaaagacacatctctgaaaacacaaactacaatcatcctcctgaggcagtttccgctgggactgcattcaacttagaaccaactgttaaacaaactgagacaaaatgggaatacaacaatgtgggcattgacttgtcccctgagcccaaaagcttcaattacccattgctctcgtccccaggtgatcagcttgaaattcagctaaccgagcagctacggtccctcatccccaacgaggatgtgagaaagttcatgtctcatgttatctggaccttgaaaatggaatgttcagaaacacatgtgcaagggagctgtgccaagctcatgtcgcgaacaggcctcctgatgaagcttctcagcgagcagcaggaagcaaaggcattgaatg

SEQ ID NO: 11184 - DNA, 487 bp, Homo sapiens
  MAP TO AC003091.1; EXPRESSED IN PLACENTA, SIGNAL = 0.82; EXPRESSED IN LUNG, SIGNAL = 0.7; EXPRESSED IN FETAL LIVER, SIGNAL = 0.72; EXPRESSED IN BONE MARROW, SIGNAL = 0.79; EXPRESSED IN BRAIN, SIGNAL = 0.83; EXPRESSED IN ADULT LIVER, SIGNAL = 0.68
tccccatcttaagtccaccctccatatacatctaaggattgtttctgaagaagagggcagatcatagcgtttatctgcttcaggacttcagtggccccctcgctgccaataaagtgccaaaccttcaccacagaattcagagccttcatgacatgatttgaatctccctattctgcctttgttcctcctcaactacccccatttccaacccacaagtcttgcttccgatgtgcagttgcctccccaagctactctgccttccctgagccttccaggctctttgatataattcgcatctttgcaaatgctggaatattcttcttaccttttctggctaacaaactcctgtccatcttcaacatccagcaatcccatgatctcttcattgaaggattgtgcaacatccctttatttccaggtttcctcagaaatctgaacgtagctaaataaattgttttattatgattgttttcctatatggctgccc

SEQ ID NO: 11185 - DNA, 472 bp, Homo sapiens
  MAP TO AC005586.1; EXPRESSED IN PLACENTA, SIGNAL = 0.85; EXPRESSED IN BRAIN, SIGNAL = 0.68; EXPRESSED IN BONE MARROW, SIGNAL = 0.83; EXPRESSED IN ADULT LIVER, SIGNAL = 0.86; EXPRESSED IN LUNG, SIGNAL = 0.91; EXPRESSED IN FETAL LIVER, SIGNAL = 0.81
ccaaatctcgccagctaaagctggtgatgctgttgtgtcctgtacctctattatcaaggctgctgcacttcctctctccactacttcccaacaagcggaactgattgctttaaaccatgcactctctctcgccaaaggaatgcacattaacatttacactgactccaaatatgctttccacagcctccataaccatgctgccatttggactgaaagaggttttctcaccacacagggctcttccattatcaatgcctctctaataaaggcccttcttaaggctgctctcttgctggccaaggctgaggtcattcactgtaaaggacaccagaaaccaacggatcttattgctaaagaaaatgcctacgccaacaaaatagccaaggaaataaccaatgcctccacacctgctaatattccagcccccactccagaaggccagtatttttctttctcctctatgactcccacc

SEQ ID NO: 11186 - DNA, 469 bp, Homo sapiens
  MAP TO AC005392.1; EXPRESSED IN PLACENTA, SIGNAL = 1.4; EXPRESSED IN LUNG, SIGNAL = 0.84; EXPRESSED IN BRAIN, SIGNAL = 0.56; EXPRESSED IN BONE MARROW, SIGNAL = 3.1; EXPRESSED IN ADULT LIVER, SIGNAL = 0.79
cgtcccctccccttatattcttggttaaggctgtgcctacctaggttttcccagggcagggagtcatggccacctcggatgtccagaagtaaaggtgtctatacttggactggagagagactgagagacctggcctctggtggtttggatttaagctggtgtcctggcccacagaggaacaaaagatactcacagaggacattcagggtgactgggtcactgcggatgccaccatatcggtcccgtatttcacattgataaggtcctgtttcatttctcgtgacattgggtagaatgaggatcctgttttcaatgggtcgctttaccctgggactgacagggaggctctgaccatttagccaccaaatgtaggtgtagttcttactcttaggttcacaggtgaaggttaagacatccttattctctctggggtttaagttgttgattgtgatgtagggcttggacagct

SEQ ID NO: 11187 - DNA, 469 bp, Homo sapiens
  MAP TO AC005691.1; EXPRESSED IN FETAL LIVER, SIGNAL = 0.85; EXPRESSED IN BONE MARROW, SIGNAL = 0.83; EXPRESSED IN PLACENTA, SIGNAL = 0.95; EXPRESSED IN LUNG, SIGNAL = 0.94; EXPRESSED IN BRAIN, SIGNAL = 0.79; EXPRESSED IN ADULT LIVER, SIGNAL = 0.99
tcatctcctgtgataatggtgctttctcctggaattcctcctgaaggacctgcctgaggctgttcctgaggtagtgtcactcttttcagaaacgtatccatggtagtttgcttggttgttttcttttttcatcatagatttgcttgtaagcaaataatgcaccatgaacattcctctctattaatgcaaaccttttgttgttagggtctacattttcaaaccttttaaggagcttgttgcggtctgcaaaagcttctgctaaactcctcactgtgaattttcttcagggttctttttcttctcctgtactttccctttttcttgcctcttcttcagctatgtgatcctgttccagttccaacaattcctccttagtcaattcttcattaaccacctctgagagctcctcaatgtcatcctcatccacacccgggttgaagctgtttgccatttcaaccacagccttgtt

SEQ ID NO: 11188 - DNA, 413 bp, Homo sapiens
  MAP TO AC000120.1; EXPRESSED IN BRAIN, SIGNAL = 0.57; EXPRESSED IN ADULT LIVER, SIGNAL = 0.42
gaacttcctgaaagcacatgtataagtatcataactattagaaaatgtttcaaatgctattatatttgatagaaccattcagttaacaaaatcctaaatcataaactggcttttagaattacacacttaaaaaaacagtaaactacaagagttgttttgtacacttcattctcttcgaatgcctttgtggcttacagtgataatcacatatattcgttccttgcaacctttttcattttgatcttcgtttgtaacggataactgggttttcaggggtgtgaatcatagttgtataattcacagtgggaaagtatccatcaatgagatcaaattcatataaacgaagcatagtggaccaaattgtcttaatttgaacataggcaaaattttccccaatacaacgatgacgccct

SEQ ID NO: 11189 - DNA, 465 bp, Homo sapiens
  MAP TO AC005831.1; EXPRESSED IN LUNG, SIGNAL = 1.1; EXPRESSED IN BRAIN, SIGNAL = 0.62; EXPRESSED IN PLACENTA, SIGNAL = 0.8; EXPRESSED IN BONE MARROW, SIGNAL = 0.87; EXPRESSED IN ADULT LIVER, SIGNAL = 0.7
agcaatccattacccacaggcagctcaacaactcaatgtgacttgggctccacgcctctacacaaaagatgcttccctgccctgttctcctccttcctgttgtgaaagcagcctcccttgcccttacccagctgtggctctctcagcggcttcctctagccccaaaggcctgctcagaataaggacctgcacacaagttgtgtggccctgggcaaaacctggagctgcttgatgttctgagcctgctttcaaatctgcaaaatagtgctctctgccttactccctcgcaggctcgtgtgaaggtcaaaagagaactcctgggaaagagcttagtcagctgaaaggctctaaacaaatgatagttattacatcgtcctctgtctccccatgcaagagaccagaacaaaacaatatacaaaagagagagaaaatcccacacctcttggtaactggaaaggctgaggc

SEQ ID NO: 11190 - DNA, 488 bp, Homo sapiens
  MAP TO AC005879.2; EXPRESSED IN PLACENTA, SIGNAL = 0.82; EXPRESSED IN ADULT LIVER, SIGNAL = 0.7; EXPRESSED IN LUNG, SIGNAL = 0.88; EXPRESSED IN FETAL LIVER, SIGNAL = 0.68; EXPRESSED IN BRAIN, SIGNAL = 0.62; EXPRESSED IN BONE MARROW, SIGNAL = 0.72
ttcaccgacatagtctcttggtagaccagaaggtgtatcttatctggaaagactgctatatctacacccacaaaaagcattatttatctgaacactaaattctgacttccttgccattttagggagccactttaaaacattttcaatatttgctattttgtagcagcaaatccttcagaaggaggtcaagtgatggcctttatctgttcccagtgtcttgcccttaggtcctcagggcaccccctggacagcagccttaggaaccaggtacaaagcacaagcactgctggtccgcatggtaaggaatcacttccagactgggccttcccatgggcttccctgagcttcctggactcaaatcatagtccttcttttcctctcccctttggacttgataaacgcagtcccattcatttaatctccaacttagaaatccggagaatgtgagccctgggatttactttcagacaccctcgtcgataaccttg

SEQ ID NO: 11191 - DNA, 436 bp, Homo sapiens
  MAP TO AC004129.1; EXPRESSED IN PLACENTA, SIGNAL = 1.2; EXPRESSED IN LUNG, SIGNAL = 1.3; EXPRESSED IN BRAIN, SIGNAL = 1.5; EXPRESSED IN ADULT LIVER, SIGNAL = 1.8; EXPRESSED IN FETAL LIVER, SIGNAL =   2; EXPRESSED IN BONE MARROW, SIGNAL = 1.4; EXPRESSED IN HELA, SIGNAL = 1.8
ggtgtccctccttcaattccaactagacagatataaaacttcaaaagtaataatatttgaagtaatatctctgacgtaatatctccaaaatgattactaagccaatatccccttgcctggtttagtggcttttctgtattctgcacctcccaaaactaaagccaagcatttactctaaatctttgccattttctgataactttcaacgtattttatttatttttcctttttccttctttttttaactggaaccactccaactgctttctccccctcttcctctcccaaaggaagagaagaacgatcatcaatggcaagtgacagtagcagcaaagcaactccatgagccagcttcatgctcaggatcatcctgcgccttctcctcatgggttctgctgctcttctgcaggtctgtacgcattcagagaaacttccc

SEQ ID NO: 11192 - DNA, 465 bp, Homo sapiens
  MAP TO AC005038.1; EXPRESSED IN PLACENTA, SIGNAL = 1.2; EXPRESSED IN LUNG, SIGNAL =   1; EXPRESSED IN FETAL LIVER, SIGNAL = 1.2; EXPRESSED IN BRAIN, SIGNAL = 1.5; EXPRESSED IN BONE MARROW, SIGNAL = 1.3; EXPRESSED IN ADULT LIVER, SIGNAL = 1.3
tgagagaacagaaagagggaggactaagtgctatacagatacaacgcattagaaaggggggaaaaagaacagggctgttgtcagtgacaccaaatcagagacaaaaatagagagcccctgtaggagaaaaccagaagatggaaatgaggaggtggaagctgtttgggggaatctatagttataggtagagaaggagagcacttcagcttctccagaaggagggtaaggctaggctggggacaaggacacagaggcttcccaaggggattcatcacctgaagaattgcgacgatgaccccaaagaggccaatggcgctgccaaagatctccacgatgagaatctttacaaagaggctggggttctgagcatcggccagggcagccccactgcccacgatgcccacgcagactccacagaagaggttagacaggcctacggtgaggccagccccaaacatggagtag

SEQ ID NO: 11193 - DNA, 496 bp, Homo sapiens
  MAP TO AC004827.1; EXPRESSED IN ADULT LIVER, SIGNAL = 0.56; EXPRESSED IN PLACENTA, SIGNAL = 0.59; EXPRESSED IN LUNG, SIGNAL = 0.64; EXPRESSED IN BRAIN, SIGNAL = 0.71; EXPRESSED IN BONE MARROW, SIGNAL = 0.7
ggttttggtttagttctgctctcaaatacagatttatttcttgttgtctgatgtctgggcagagttatcatttggactgagtttttcacgttctaaaggagagagaagagagtctgtaaatgacttctcatccaccaagatgggaacaggcatgagtagaggccattatcttagcagaagtaaatgagggaggtggcaggcaagtctcactttgccattggcttcatgagggctctgatggtgtctggttctagaaatatgggttttttcttcatccctaagtgttttctaacccttatttccatttagatgggcctgtgttccactccaatactctggaaagaaaaactcccattcagatcctgggacaagagcctgatgcagagatggtggaatatctcatctaaacggccaaatcaagagctgcagattatcagcaaaaatgcttttaatcattttcccccttttattggttcttgttttgagggtgaggaca

SEQ ID NO: 11194 - DNA, 461 bp, Homo sapiens
  MAP TO AC004694.1; EXPRESSED IN LUNG, SIGNAL = 0.72; EXPRESSED IN BRAIN, SIGNAL = 0.64; EXPRESSED IN BONE MARROW, SIGNAL = 0.91; EXPRESSED IN ADULT LIVER, SIGNAL = 0.67; EXPRESSED IN PLACENTA, SIGNAL = 0.65
caaacttcatttgctagatcaggccagaacaagtacacataacacactatcaacacaaatgtgaagaagctagattgctccattattagagatagaaaagctgtaatagtgaaaactctaaagatcacgtatagaaaattgcagtgacaggaaaagaccctgaagctgctgaatgctaggtacacaagtcagccctcctcttttgtgggataggataacacaccctcccaagtgcgccactcacagcttaactatatgtgacttagtgcaagggccctcctcaccattcacccccagctttgacagatttcaaccccattattgttaccaacaaccataagcacagaagtgttttcttttctcattgtcaagggagtccagacattcctgatagcaaatgtacgtgtgtcaatgtaaccttgacagacggaaactcaaactcaagtacaatggcaaccttt

SEQ ID NO: 11195 - DNA, 458 bp, Homo sapiens
  MAP TO AC006084.1; EXPRESSED IN PLACENTA, SIGNAL = 0.94; EXPRESSED IN BONE MARROW, SIGNAL = 0.96; EXPRESSED IN ADULT LIVER, SIGNAL = 0.74; EXPRESSED IN LUNG, SIGNAL = 1.2; EXPRESSED IN FETAL LIVER, SIGNAL =   1; EXPRESSED IN BRAIN, SIGNAL = 0.72
tgagagcaaacttcaaacgctacacctcactgaactcagcagggtcaaaaaaaaccaaaacttacaaaaatgtgctctataaaatcagtgagaaagctctgaattctatgtctagaagactcaatctctctcttttttttttttttttttttgagatggagtttcactattgaagcccaggctggaagactaaatctctcaaaagacttgggtacataataggaattgcctcttgtaagtacataaaaatcatatacctagtaaaagacagtgctttagatgaggaatccaacttttctggatcatgtaggaaacgctggctttgaccaaaatctaaactgcggtgtgataatactggaggacagtcctcttccaaggggtgatgattcattcttccagcttgtggagacagctgagcttctccagactcagagtcctcctgccaagacttaaaagca

SEQ ID NO: 11196 - DNA, 480 bp, Homo sapiens
  MAP TO AC004111.1; EXPRESSED IN BRAIN, SIGNAL = 0.84; EXPRESSED IN PLACENTA, SIGNAL =   1; EXPRESSED IN LUNG, SIGNAL = 0.96; EXPRESSED IN BONE MARROW, SIGNAL = 1.1; EXPRESSED IN ADULT LIVER, SIGNAL =   1; EXPRESSED IN FETAL LIVER, SIGNAL =   1
gacaaacaaaagtcacccagcaaatatgccatggctattaaaaatagattgtccagggaggaagaataaaccactaattaaacacttttgtttctctttttttttaagccattaatactgatacctagagagaaaaataaaaaccagaaatactttcaaaagccaagcatgatagactagcatttatcagttacctttttattttcaatcctcaagaaatgcaatcgcccaaataaattttaagtataccaaaacactaagaaattacaaaactcaatagcaaaataactcacgtgttacaaccataattacttctataactagaaaattattatcctcataggaaatcctggcaaattgctgaaaacatttctcttctgagttaatctaggagggaaaaaaaataaaacttcagagtccagtcactttgaagtccttatgcccaaaaagacattatctccatcaattgtctacatgcga

SEQ ID NO: 11197 - DNA, 468 bp, Homo sapiens
  MAP TO AC005386.1; EXPRESSED IN LUNG, SIGNAL = 1.1; EXPRESSED IN ADULT LIVER, SIGNAL = 0.99; EXPRESSED IN PLACENTA, SIGNAL =   1; EXPRESSED IN FETAL LIVER, SIGNAL = 0.9; EXPRESSED IN BRAIN, SIGNAL = 0.93; EXPRESSED IN BONE MARROW, SIGNAL =   1
atgcattaataaggccagtaccagcaccaactaggttgaaagtcgtttggactaagacacttacagaccccatttccctccaattgtcaagtggtaagacagtatcaggaaacatgggaggaggagactttaagtcctgtttgttcagggatttcatcttatcatgagctttgagcatcttatgatccattagaccctcccatgaacaccaaaattattccaggcagattcagacttttcttgacatctaggagccagccatattgaatggatctgccacatgttctacatcagtggtgagatggtcatgattctagccaccgtttaccatccagccatgtctctctccaacatcagcctagtgcaagcttcagtgagctctcgcctgtgctatggcagtgtcctctcaacgagattcaccatctactgtgggttcctccagttggccccagattgatgcctgaacaa

SEQ ID NO: 11198 - DNA, 481 bp, Homo sapiens
  MAP TO AC005090.1; EXPRESSED IN PLACENTA, SIGNAL =   1; EXPRESSED IN ADULT LIVER, SIGNAL = 1.1; EXPRESSED IN LUNG, SIGNAL = 1.1; EXPRESSED IN FETAL LIVER, SIGNAL = 1.1; EXPRESSED IN BRAIN, SIGNAL = 0.93; EXPRESSED IN BONE MARROW, SIGNAL = 1.1
tttcctttccttcctcttaccctctccaaagttcataaacaataaggactaggttatgttgcaataataaaagacccctaaatctcagaagcttctagcacagagggctgtcctcactcatgctaggacccagcactggctgcagctcactccagtcacctccactctagaacctagactgatggagcagcctagggcatcgcagcctccatccggctcatggcagaaagagaagaaaacatgtcaaaggccacacagctctagaacttccacccacaagaggtagatatcacctttgctcaggcttcattgcccaaagcaatctcatggccacacctgatttcaagaggaagagatgcatcatcctcctgctggagaggatggtgaatctggtgaataatactacaaagaacaacatgaagaatcacaattagcagcccagactgacagcaaggtcaagacctaaagtaaagggccagca

SEQ ID NO: 11199 - DNA, 450 bp, Homo sapiens
  MAP TO AC006539.1; EXPRESSED IN LUNG, SIGNAL = 0.59; EXPRESSED IN FETAL LIVER, SIGNAL = 0.84; EXPRESSED IN BRAIN, SIGNAL = 0.6; EXPRESSED IN BONE MARROW, SIGNAL = 0.66; EXPRESSED IN ADULT LIVER, SIGNAL = 0.58
atttctgtgtgccccaagacaatgaaagggcagtcagataataaagtctcttataagccatgaagaggactttggctctcactataacctcaaagtaaggttactttttagagaatttaggagcattagacagaagatgcctctgtacaagagcaagaataaacaatcacgttcctcaaaaatcatctccattggagcagagcttctcaaataactcttgaagtctgtcttccttcttggcctttggagctttcacctgtggcatgtgtttcattcatccaacctacctgggggtttggctatggtctcatgtctcttcacattccagggctcctgtctttgctccagacggctaatcagttctggcttagaaacagtaagacctgttttattagaaaaaagtaatgtgattcttgctgggattctccaattaccaacctagtgttgtgc

SEQ ID NO: 11200 - DNA, 468 bp, Homo sapiens
  MAP TO AC004127.1; EXPRESSED IN PLACENTA, SIGNAL = 1.3; EXPRESSED IN LUNG, SIGNAL = 1.3; EXPRESSED IN BONE MARROW, SIGNAL = 1.2; EXPRESSED IN FETAL LIVER, SIGNAL = 1.1; EXPRESSED IN BRAIN, SIGNAL = 1.2; EXPRESSED IN ADULT LIVER, SIGNAL =   1
caggagaagggggcagtagagagacattgagcctggatgtgggagggaagacccctctgctcaggctgatgctagggcgctgtctcagggcaaggaggtgaggaccctccttttaagcattcaggcgttcatttaccaaaaaatccttgctagctcactttggcatttcaaatggcaagtgattttcccatgagattcctttcagtaatgtgtgttgtttctcaacccttccttgttttcaggaaagacggtagaagaggctgcggacctatcgttgggttatatgaagtcaagggttaaaggtttaggtggcctcatcgtggttagcaaaacaggagactgggtggcaaagtggacctccacctccatgccctgggcagccgccaaggacggcaagctgcacttcggaattgatcctgacgatactactatcaccgaccttccctaagccgctggaagattgtattc

SEQ ID NO: 11201 - DNA, 475 bp, Homo sapiens
  MAP TO AC005411.1; EXPRESSED IN PLACENTA, SIGNAL = 1.1; EXPRESSED IN LUNG, SIGNAL = 1.2; EXPRESSED IN FETAL LIVER, SIGNAL = 1.1; EXPRESSED IN BONE MARROW, SIGNAL = 1.1; EXPRESSED IN ADULT LIVER, SIGNAL = 1.1; EXPRESSED IN BRAIN, SIGNAL = 0.99
gcagttataaccactttgagacttttctttatgttaacttatttgtattttcatgtactttttatattaatttttaatatttatgtatacactactatacaatatactagatatacagtaaatgattatgcattctattttaattatctagatccagaatgtgggtaaaactgagcactataatgagagtttagtaatctggcctctagttttgtgtctgccagtaacttactttctgagggagtcttatctgggcctcagttcactcatttacaaactttgcgaatttgaactggaaccagatgccctgtggcagtctcagaattctctccagaactctgctggctggaggatgcatactaggagaaagacatctcaggatgagattgtgctctattatatgtcacgtttgctttgcactgagaggcctattgttaatactgccaatacctacagcatctcagacacagcgaga

SEQ ID NO: 11202 - DNA, 442 bp, Homo sapiens
  MAP TO AC004600.2; EXPRESSED IN PLACENTA, SIGNAL = 0.64; EXPRESSED IN FETAL LIVER, SIGNAL = 0.85; EXPRESSED IN BRAIN, SIGNAL = 0.63; EXPRESSED IN BONE MARROW, SIGNAL = 0.67; EXPRESSED IN ADULT LIVER, SIGNAL = 0.74; EXPRESSED IN LUNG, SIGNAL = 0.83
aagcaaagaaatccctccaactgttccaatataccattctaaagtgctttcaattcagtttaccaaagagataatttccttcattagaatattccttctaagaaataaaagaatttgaataaattagtgatacaaatcagttcctaaaacctacaaattcagtcatgatgtgtgattctgggtaatccataccaaatccttcttttgctgctcttcatagctgaaaatatttacaaagtaagataaacaaataactaactcaaaagatgatacgacaccataatcacattactaatgtatttaccaatatctggattgaagatttcctccacaaccagctgaaaaaattctttggaaacacctccctcatcaactccttgttctccttcaaattccacatacaactgcttcttcaagtctgcaggattttccatagcgatca

SEQ ID NO: 11203 - DNA, 457 bp, Homo sapiens
  MAP TO AC003688.1; EXPRESSED IN PLACENTA, SIGNAL = 0.64; EXPRESSED IN LUNG, SIGNAL = 0.46; EXPRESSED IN ADULT LIVER, SIGNAL = 0.46; EXPRESSED IN BRAIN, SIGNAL = 0.91
cccagctttagagtccagggagagctgaccgtcataagaactgagaggccataacatttcctctgccttgaacccacttgggatagccagcagaatgccagtcaagggcctgctctaacccgggacagcaggccccctacaagctgctgcggagggggttaggtttcacttctctgagttgagggcaagggaagatcagaaaggcctcaactggattctccaccctccctgtctggcccctaggagcgagttccagccatgagctacgtctccattgtggccatctttggcttcgtggcattttttgagattggccctggccccattccttggttcatcgtggccgagctcttcagccagggaccccgcccggcagccatggctgtggctggtttctccaactggacgagcaacttcatcattggcatgggtttccagtatgttgcggtaggtcccc

SEQ ID NO: 11204 - DNA, 448 bp, Homo sapiens
  MAP TO AC004740.1; EXPRESSED IN LUNG, SIGNAL = 0.6; EXPRESSED IN BRAIN, SIGNAL = 0.6; EXPRESSED IN BONE MARROW, SIGNAL = 0.66; EXPRESSED IN ADULT LIVER, SIGNAL = 0.66; EXPRESSED IN PLACENTA, SIGNAL = 0.65
gaaaagttaaagatagctgtgtctgcttctcttccctccagttgtttaaatcaatactcaacattcacattattatagttgtgtaaatattgtttcctgctcaaatatatatagtttgtaatttttggttcagttttcctgtaattaataatggctgtttctcctttgcttacgtttctatatcattttaccaaaattgtcattaaaattataaaatattttataaaaattcaaatatattaaaattatctcccctccttttttcttggaaatattcctttggagtttatcatctttttgctccagtgtgagcttgggtgctccctagtttctgaaaagttgtcctctgggacttccctgttaacacccttctggatggagctcctgtgtcctgtgtcagggttttcctctttgctggtgtataccttcatttagtacgggctgcaca

SEQ ID NO: 11205 - DNA, 352 bp, Homo sapiens
  MAP TO AC006478.2; EXPRESSED IN PLACENTA, SIGNAL = 0.82; EXPRESSED IN LUNG, SIGNAL = 0.96; EXPRESSED IN FETAL LIVER, SIGNAL = 0.83; EXPRESSED IN BRAIN, SIGNAL = 0.95; EXPRESSED IN ADULT LIVER, SIGNAL = 0.89; EXPRESSED IN BONE MARROW, SIGNAL = 0.86
tcattgaacaagtccctcctgaaaaagttacttagagaagaatcagtggactcgaaagtagagtttcattttgtgcacagatcatggcacctgtaatacatctcactttctatcatttgagaaaatgggaaacagaaagaagcagtaagctcatttaaagcaaaggaagaaagaatgggtgattcaggcattttaccctgaaatttatcaatccgtgggcagcctaatggggagtcctgagggaggaaccatttacacagagagatttattgagccagccaccgtggcatgtgtaggagctaatgaagatgctaagaggaaagaattagcttcaggaccagagagtggagct

SEQ ID NO: 11206 - DNA, 492 bp, Homo sapiens
  MAP TO AC004130.1; EXPRESSED IN PLACENTA, SIGNAL = 0.98; EXPRESSED IN BRAIN, SIGNAL = 0.76; EXPRESSED IN BONE MARROW, SIGNAL = 0.85; EXPRESSED IN ADULT LIVER, SIGNAL = 0.68; EXPRESSED IN LUNG, SIGNAL = 0.85
tgtggaaggtccttgtcctctactattgcagcagaattgaagccagacccccaaacctgaccaaaatcagatttttgtcactcttctttctcccaaattcataactaaatcataattatccaggtatctattaattacaatgagccggtcgactctttccaataaattatatatctttgttgtcagatttttgtaataaaaggtcctcttgtttcagtttttcatttgtttcaattgttcatttgtttcattttagtctagaattatatacgctttctattttgagagtaaattataactgttttctccttcattgcagaagacaatagatgtgcatcttcaaatgcagcatcctgtgccaggtgccttgcgctgggtccagaatgtggatggtgtgttcaagaggtgtgccatttttttttttctttttctcatggttgacttgagctatagcatgacttcattttcctaatattctgtgccttgaaggtg

SEQ ID NO: 11207 - DNA, 492 bp, Homo sapiens
  MAP TO AC004605.1; EXPRESSED IN PLACENTA, SIGNAL = 1.1; EXPRESSED IN LUNG, SIGNAL = 1.1; EXPRESSED IN FETAL LIVER, SIGNAL = 1.5; EXPRESSED IN BONE MARROW, SIGNAL = 0.98; EXPRESSED IN ADULT LIVER, SIGNAL = 0.9; EXPRESSED IN BRAIN, SIGNAL = 1.1
cgcacttctttgtattgagacgaacttttatatgttatatcctaactccttccaggtcaagagtcattaaacacagagcattttattcatttaaagagtatcttcagtgccgccaaatacagctctgtgtaccattgactttacaataggatcaaatgatagaaaagttgagcctcgcagaagaaagtttttctctttgtgcatgcctctgttatcattgtaaagataaaataagaagtgaatggtcacgcaaacgggttttaaagcagatgctttttatttcatactctttcttcctgttttttactccactatggtgaatgcctttggactggttttcattgaaagaggacaggaggcagctgtgattctgatgtgtccactagtgggcactgcagtgcttctaacgttctgtatattttaaaatctgggcacaggataaaaaaatcgtatagtgaatggtgagtttccgccccttcagagcttctgtcc

SEQ ID NO: 11208 - DNA, 471 bp, Homo sapiens
  MAP TO AC005630.1; EXPRESSED IN LUNG, SIGNAL = 1.4; EXPRESSED IN BONE MARROW, SIGNAL = 1.3; EXPRESSED IN ADULT LIVER, SIGNAL = 1.2; EXPRESSED IN PLACENTA, SIGNAL = 1.3; EXPRESSED IN FETAL LIVER, SIGNAL = 1.3; EXPRESSED IN BRAIN, SIGNAL = 1.2
aaatgatggcttatttcataatagttgtgactttgtaaagcttttaaatctgctttccccagagtctagcttttaaataaaatacaggatataaaaggtgggagcctcttgaatggaatgtgggggctttttctctctccccataggatagatatattctgtttcctgtcccccaccgagtcaagaataatttaagttttggcataagaaactgctgaaggaaagtgggttgaatcggctaatatttttcttctttttgcaggatatagaagacttagatcactgtgagatgaaagaagagcctactagtgagaagaagttggaggatgaaggaactgaaaaagaaaactgggcaatattagagaaaattaggaagactgaaaggcaaggccatttaaatgtgtaagtgtgtataaatatctgtactttttggtgaagtaatcatagttaataccaggaaattcatgaaca

SEQ ID NO: 11209 - DNA, 465 bp, Homo sapiens
  MAP TO AC004626.1; EXPRESSED IN PLACENTA, SIGNAL = 0.65; EXPRESSED IN BONE MARROW, SIGNAL = 0.51; EXPRESSED IN LUNG, SIGNAL = 0.55; EXPRESSED IN BRAIN, SIGNAL = 0.61; EXPRESSED IN ADULT LIVER, SIGNAL = 0.5
tgagttttccctttgcaatctacaaaacaatgaggataaaaccagtgaaactatggctttgatgctttttagctttcactaaagtgaaggagggctaatgaagataaaaaagttgttcccctcatgatggccaggcaggaggaggaagaatctgagcactccagggtctcaacaaggatgagtaacggcgaataaatgtgattgcatactctttccatcaaataaaaacatataaaacaaaccccaaaagccaagtactgtttgaagtatcaatgaacaactctagtgcttacctcataacaatgtgcagatccagtgaaaactttcccaatatccagcaattcaaagttgaagtgaatcttaggtcccatgccttcccctttgattcggaggggcagacggatttctcggcctagaaaaacagttcagactttatcatccaaatggtgcttcatttaccccaaa

SEQ ID NO: 11210 - DNA, 489 bp, Homo sapiens
  MAP TO AC003042.1; EXPRESSED IN FETAL LIVER, SIGNAL = 0.68; EXPRESSED IN BONE MARROW, SIGNAL = 0.74; EXPRESSED IN ADULT LIVER, SIGNAL = 0.8; EXPRESSED IN PLACENTA, SIGNAL = 0.83; EXPRESSED IN LUNG, SIGNAL = 0.7; EXPRESSED IN BRAIN, SIGNAL = 0.71
cattaggctgggccatctcaagcccggctccctaccctcccagggctcccaagggctagggggatgagagttctgggacaggtaagtctggctaagggatcacccaagggccaaggtgcttaggaactcggctgcgtctccaagttggggcacatagagaatgagggacgtccgtgcctgtttctccggctggtgatgaccttatccactccgaggaagtgtgcggaacgcagcacagccccaaaattccggggatcctggatcccatcgaggacgagccacaactgctgggggtcgtcgcctgggctcgcctccccggcctctctccaaggccggggccgcagcgggctcacctccatgcagacaccctggtggacctggtagcggcacattgtgtccagtttctgccgtctgggccgcagaactggaatgtcccgcgcctcggccatccggagcagctcggcccgcttcccctgcagcccagcttta

SEQ ID NO: 11211 - DNA, 373 bp, Homo sapiens
  MAP TO AC005495.1; EXPRESSED IN BONE MARROW, SIGNAL = 0.88; EXPRESSED IN PLACENTA, SIGNAL = 0.92; EXPRESSED IN LUNG, SIGNAL = 0.98; EXPRESSED IN FETAL LIVER, SIGNAL =   1; EXPRESSED IN ADULT LIVER, SIGNAL =   1; EXPRESSED IN BRAIN, SIGNAL = 0.75
tccaggttatacagtgacccaagttctttttctcttgtcctcatcatccctgtcatctccaaaatcagagtaaatctgcactgttcctcataaggtgttttctataaatgaagtttaaatacccattttcttctcttatgattcacttcccccccccacctcctgtgctattcaacaataaaaataacttatttctggatttaaattttatttttcttttcacctgtgttattgatgatcaacaggctggtacggggttcctggggaagttgtccaggagagagaaaatacaattcgtttttaaattcccaatcgatcttttcatttaacatagcatacattatattttcaacaatcaaagggaatattgcga

SEQ ID NO: 11212 - DNA, 466 bp, Homo sapiens
  MAP TO AC004775.1; EXPRESSED IN PLACENTA, SIGNAL = 0.7; EXPRESSED IN LUNG, SIGNAL = 0.72; EXPRESSED IN BRAIN, SIGNAL = 0.61; EXPRESSED IN ADULT LIVER, SIGNAL = 0.68; EXPRESSED IN BONE MARROW, SIGNAL = 0.71
cagaccagggatgaggattgggggtgagtgagtgcagaaacaggttgaagagggtggttggtgccagaccattaagggccttacacatccttgatgactaaagctgaacatgtcccagctgaactggttatcttcttccctaaccctcctttccctcccccagggttccccagctcaaaaaaaggcaccatcacccacccaatctgggtctggcagagacctgggcatctgtcatgattcttcttcaccctctttagtacctcctgaattcctcctgctctctccattcttatgccaggccataatcaactcagcctggacatctgctgcagtcctccctcccctctccctgttgtacccaatctccttgctcccagtctggcttgcctccacactctgttttctgcttacagccggagcattccatttagaaaacagatttaaccatatcacttggctgtctgtg

SEQ ID NO: 11213 - DNA, 499 bp, Homo sapiens
  MAP TO AC004850.2; EXPRESSED IN LUNG, SIGNAL = 0.68; EXPRESSED IN PLACENTA, SIGNAL = 0.64; EXPRESSED IN BRAIN, SIGNAL = 0.76; EXPRESSED IN BONE MARROW, SIGNAL = 0.77; EXPRESSED IN ADULT LIVER, SIGNAL = 0.65
cagtttggaaatgcagctattgatgtttgtacatttcatgtttctgttgggtttgagtcacccatgccatctaagaaaatctcctttgtccagaaagaagggtggaggtttccttgtggttttagttcccacagggtttgtgtggagcaggagcattttccttgcatgctcagtaaacactgctaatatttctccgtgctggttattggtagtatgtagcaggggctgttaataagttttctgttactttcctcctgagtagaggatgcttactgctgtattattttccagggtgtgaagatttttgacatcatctcaaagcaaagaatcaccaatgtgccccgggatgatataagtcttcgcccagacatgtatccctgcagcctctgctggaaggacaatgtgacactgattattggctgggggacttctgtcaaggtggttttgcttgtctttataataagtccgtgttgttatagatccactgagggtggtccaa

SEQ ID NO: 11214 - DNA, 464 bp, Homo sapiens
  MAP TO AC005293.1; EXPRESSED IN PLACENTA, SIGNAL = 0.82; EXPRESSED IN LUNG, SIGNAL = 0.58; EXPRESSED IN BRAIN, SIGNAL = 0.65; EXPRESSED IN BONE MARROW, SIGNAL = 0.64; EXPRESSED IN ADULT LIVER, SIGNAL = 0.62
tgagttacaaaatgatagtgctgatgatgatgatggcagtgaacacactgagtatctacaatgtgccaaacacgcatattacctcatttaatcctcgaaacactcttaggaagcagaaaccattatggctctcattttacaaatgatgacattgaggcttagagaggctgaatgccttgtccgggtcacatggtgagtaagtggcctatctagtgaaccctagggccatcagatgaccaaaaggaaaatgtaaaatcttcactcctaggaattgaggatcaagttttcccctttcggtggtttctgaatcaaaagcatcttctgggaagcttcactattcctaagaataacaggaataacagattcttcattcctaccctcagaggttctgttccggccaatgtggatgaggcctaggaatctgtattttctcaaagatcatggggggattctgatcatgattt

SEQ ID NO: 11215 - DNA, 379 bp, Homo sapiens
  MAP TO AC005250.1; EXPRESSED IN PLACENTA, SIGNAL = 1.2; EXPRESSED IN ADULT LIVER, SIGNAL = 1.1; EXPRESSED IN LUNG, SIGNAL = 1.4; EXPRESSED IN FETAL LIVER, SIGNAL = 0.98; EXPRESSED IN BRAIN, SIGNAL = 1.1; EXPRESSED IN BONE MARROW, SIGNAL = 0.89
tcctcacatcctgagcttcccctacaccccatataatcaacctgggttgggagcccctctttcttataactacagaactctgcacttacctctactttaacacatgaactcttgactttcatgtttaccccacaaaccataagttccttaggagagaacctggcacatactagataatcaacgtttcttgaatatattactgaatgactcattaccttacacaatttgccaaattcaacacagtcagttgcttcaaaggtgaaagggatctgaggctgctgtctgttattcccttgcagtcagccatataaatgtgactgagatttggataattcttgtctataaatttgaaggatgcatcagtaacccttttatttcc

SEQ ID NO: 11216 - DNA, 446 bp, Homo sapiens
  MAP TO AC004227.1; EXPRESSED IN PLACENTA, SIGNAL = 0.74; EXPRESSED IN LUNG, SIGNAL = 0.69; EXPRESSED IN BRAIN, SIGNAL = 0.75; EXPRESSED IN BONE MARROW, SIGNAL = 0.92; EXPRESSED IN FETAL LIVER, SIGNAL = 1.1; EXPRESSED IN ADULT LIVER, SIGNAL = 0.81
tctttcccaaaattcaaaataatgctattatataatctgaaagtagtaacttcatgaaagtgatagggagaagttcaaatgtattcttatttgagtactgtttgaagactttatgatacattagttatataacaaagcaaaacttacccaagcctccccccaccccaaataaaaactttacagtgaagatgaaaattcctgcatagctaagatcggcattacctacctaaatagctttggaggcaagatactaaatcgtgttttatccaaaatcttcctgattttgtttcttccacctgaaacagtatttgctttaactttcttacttcctttctcctgtgatgtctgttcaatatctcctggcacatgctggatagaatggcgattactttttttttcagcaattttgggaatatgaggaacaccagatttctcttgttcagtcc

SEQ ID NO: 11217 - DNA, 410 bp, Homo sapiens
  MAP TO AC004825.2; EXPRESSED IN PLACENTA, SIGNAL = 1.4; EXPRESSED IN LUNG, SIGNAL = 1.4; EXPRESSED IN FETAL LIVER, SIGNAL = 1.3; EXPRESSED IN BONE MARROW, SIGNAL = 1.5; EXPRESSED IN ADULT LIVER, SIGNAL = 1.3; EXPRESSED IN BRAIN, SIGNAL = 1.3
tctcatattcactctggggcatatgctcatagaatttctctctccatgtttatctggcagaacatgtataactgagttcaagtaagctaaaagcatgtgtaactctgtattactactatcaccataacattttatgttaatgtttccttaaatatcatattaaattgttataaacttctgccaaattgtatgcagcatattctacaaattaactctggtcaccacagtatatgacatcatggtaaagtataacgttcttaccttgttcttcacttccttccttacaaagactagaactttggcccagacttaaactgatatcatcagaagtcttagcagtgtctgtatctcctacaaagttaagagaaacatgtgaggaccttatattaacagtaaggctgtagggtggc

SEQ ID NO: 11218 - DNA, 468 bp, Homo sapiens
  MAP TO AC005154.1; EXPRESSED IN LUNG, SIGNAL = 1.1; EXPRESSED IN FETAL LIVER, SIGNAL = 1.1; EXPRESSED IN BRAIN, SIGNAL = 1.1; EXPRESSED IN PLACENTA, SIGNAL = 1.1; EXPRESSED IN BONE MARROW, SIGNAL = 1.1; EXPRESSED IN ADULT LIVER, SIGNAL = 0.99
agcttttctaatttcttcttgcctaaaaaaaatccccccaataataagaatgatagaagaaactagtaacttaaaccttaaatcctacgttcatatcttagattttgaacaaatattgaatccttttctttgaataagagataagactttgatagtcttgtgtaagcaaatatcagtgatcacacatacactagaaaaacacttgatctttatgcctatattacttactgtttctatttctgatgtctaatctaaacagcactgctgttaggatcaaagtgaccatccatgatgcacagagcacgtaccagggtaaagttccagctgggacgcaggcatcagcaattgtagaatttgggttctcccttcctcagatccctgactgtccttggtcattcaagaaagattcactgtccctaggccaagagtcaggagcaaaacaggaacaccaagggtatggtctgagga

SEQ ID NO: 11219 - DNA, 461 bp, Homo sapiens
  MAP TO AC004659.1; EXPRESSED IN PLACENTA, SIGNAL = 0.76; EXPRESSED IN LUNG, SIGNAL = 0.67; EXPRESSED IN BRAIN, SIGNAL = 1.1; EXPRESSED IN ADULT LIVER, SIGNAL = 0.76; EXPRESSED IN BONE MARROW, SIGNAL = 0.75
aaccaatgcatagaagaatgaatgaatgaacagatgaacaaggaagtcaactagtgatgaaatcatcccagaaagacatgaatgaatgagttggtgagtgggtaagtgaatcacccaatacgtaaatgaatgaccaaaagtccccagcaagcccttcggcagcttccccacagcctgacttcccagctctggctccaccatcccgtgggcacagaccaggactcaccagataatgatgcccaccagcctcataatagcctcattgaggctgtcgaagaagtccctgaggactctgcccttgtgtttcatgccaccaatgaccagcccaaaggccacagagaagaccacgaggcccagggcgttgatgccattggcggagccaggcacgggtacagtctcctcaaagctcagcatctcctgcagggtacccaaggcccgagtgacattttccaggaagctgg

SEQ ID NO: 11220 - DNA, 358 bp, Homo sapiens
  MAP TO AC006524.1; EXPRESSED IN LUNG, SIGNAL = 0.74; EXPRESSED IN FETAL LIVER, SIGNAL =   1; EXPRESSED IN BRAIN, SIGNAL = 0.75; EXPRESSED IN BONE MARROW, SIGNAL = 1.2; EXPRESSED IN PLACENTA, SIGNAL = 0.92; EXPRESSED IN ADULT LIVER, SIGNAL = 0.87
tttccccatgaatgagaaggattactgctccccaaattctgggcagctgaaaggtaattgcaagacctatttatccatttatttatcggtatttctgcagtgccaactatgtgccattcactgcactggaaactgaagagaaaacaaataatgagtaaaaactgacagcctggaatttacagtctggctaaatttctgactgactaggaattggctagcccctcttcataatcttcctcttcttcctcctcctccttctccttctctttttgtccttgttcttgttcttcttctccttcatcatcatcatcatcatcatgccattagcataataggagttaacatttatggacttggt

SEQ ID NO: 11221 - DNA, 469 bp, Homo sapiens
  MAP TO AC004796.2; EXPRESSED IN PLACENTA, SIGNAL = 1.7; EXPRESSED IN LUNG, SIGNAL = 1.4; EXPRESSED IN FETAL LIVER, SIGNAL =   1; EXPRESSED IN BRAIN, SIGNAL = 1.1; EXPRESSED IN BONE MARROW, SIGNAL = 1.1; EXPRESSED IN ADULT LIVER, SIGNAL = 1.1
ggaggtaaaggaattcaagaaaacaattttcatcagaaaggaataaataagcatggaaataaataagcatgggaaaatcactgattttaataggttgtgaaatatgttcctatatattttaaacaatctttgaatttatctgccccaaatagcatgggtatagttagagttctactgggagtctaccaataaagaatagcaacttaattagtcagcaccataaagatccttcctttaacattaacacatttatattaccttttatgggtacatacctgtctggctgatccactagcctgccttactttttctgctactcctcctaaaagctgtacaagtttcgtctgttttagaagttcttctctaagtcgttttcctcctactgacaggagagcacccaaaacatgttcgtatcgggtactaaactgtacatcatgcagggcatctttgagaagcctaatacagcaaa

SEQ ID NO: 11222 - DNA, 473 bp, Homo sapiens
  MAP TO AC005206.1; EXPRESSED IN PLACENTA, SIGNAL = 0.66; EXPRESSED IN LUNG, SIGNAL = 0.78; EXPRESSED IN FETAL LIVER, SIGNAL = 0.76; EXPRESSED IN BRAIN, SIGNAL = 0.93; EXPRESSED IN BONE MARROW, SIGNAL = 0.76; EXPRESSED IN ADULT LIVER, SIGNAL = 0.75
ccttgaattggatggtggagaattaacagcttttaaaaaaatctgttcaatcatgtcagtatgtttaagaggagaatggagaagttaagcataaaatgcttcccacatagggaaatggttcggtttatttgcatttatttatcctacaagcattttttttggacatctattatatgcctagtctagtagggaaaccaatccaagggagcagaaagctgtggtactaattttgcagtgtgagaggatgagggattattatgcaaggtcctccccactttgggccaaatggctcgccacatcagccaggaccctcacacaggaccactggaccctcacaggcacctactttctgctgaagcaattgctcataaagcctttcatctgaaaccagtaagtggctcgtgtcctagagcggggcatggggtaggctctggagctagagcaactgagctcaaatactgatttcccttaga

SEQ ID NO: 11223 - DNA, 475 bp, Homo sapiens
  MAP TO AC004662.1; EXPRESSED IN LUNG, SIGNAL = 0.92; EXPRESSED IN BRAIN, SIGNAL = 0.68; EXPRESSED IN ADULT LIVER, SIGNAL = 0.78; EXPRESSED IN PLACENTA, SIGNAL = 1.6; EXPRESSED IN FETAL LIVER, SIGNAL = 0.88; EXPRESSED IN BONE MARROW, SIGNAL = 0.77
ggatataataaggaaattcatgtgcttaggtaaggggtgtatagtacatttggcagaaatgcttaaggattgaatatgaaaactggagtcaagtcctagactgtgatctacctaatttgaagggtcaaattgtacattaaccaaccaaaaaacaatcatgtaattaaaacacttacttcttcaagtgctttaatgcttttaacattaaatttgcttagttggcactcagaacaagatataaaaaatataaaggcaatatgcctttttatcaacactgcacttttacctgtatcatacattcaaactggtacatacaaaggcccaattctgccatacttggtttaaaaagttcacgaagtctataatcttgcattaatttaacaaatacacagaaagcttcttcttctggcatctacattggaagaaaaaaaaacaacataggttaatgttctctgatacacaaataaaccaatga

SEQ ID NO: 11224 - DNA, 456 bp, Homo sapiens
  MAP TO AC005283.1; EXPRESSED IN ADULT LIVER, SIGNAL = 0.96; EXPRESSED IN PLACENTA, SIGNAL = 1.1; EXPRESSED IN LUNG, SIGNAL = 1.1; EXPRESSED IN BRAIN, SIGNAL = 0.89; EXPRESSED IN BONE MARROW, SIGNAL = 0.91; EXPRESSED IN FETAL LIVER, SIGNAL = 0.93
gtggaatgggagcttagccccgggagtctcagattctgtggctttgtgactgcagtctcaggacatttctgtgttgcagtgatcccagactccctgcagaccactgccatgccccagactctgcacagagtggagcaggacccactggaactcacttgtgaggtggcctcggagaccgttcagcacagccaggtgctgtggcctggctctggcagaaagttggcgagaagcccgtggaggtcatctccctgagccgagatttcatgcttcactccggcagcgaatatgcctggaggcagagcctgggggaggtgcggctggacaagctggggaggaccaccttccgcctcaccatcttccacctgcagccttctgaccagggcgagttctactgcgaggccgccgagtggatccagaatccggatgggtcgtggtatgctatgacccgaaagcgtt

SEQ ID NO: 11225 - DNA, 455 bp, Homo sapiens
  MAP TO AC005209.1; EXPRESSED IN PLACENTA, SIGNAL = 0.66; EXPRESSED IN LUNG, SIGNAL = 0.75; EXPRESSED IN FETAL LIVER, SIGNAL = 0.79; EXPRESSED IN BRAIN, SIGNAL = 0.68; EXPRESSED IN ADULT LIVER, SIGNAL = 0.79; EXPRESSED IN BONE MARROW, SIGNAL = 0.67
agcatttcctaagtgccaggcaccctgctaggtctaaggcgtacaaagaggcctacaaaagttcttgcccgcagggagctcacagtcttgtgggagtaacaggcaagtaaaccagaagttgcaattcaatagccataggagccccccaggaaggaaaagggagagctttgtagccttcaaagcatttgtatctacataacagtatgagatatggcagaccacatgacttggcctcattttccaaatgaaaaaaaaaactcacaagggttttaaaacaggctccaagtccactggctcaaaagtggtggtgctggggccagaactccagtcccccggtgcctcctgctccactccacacaccactccacacgacttatctgcaccattgaaggatgattccctgctgtaagtgatcagggtgaaactgggaagccacagagcccatgtgaaggaat

SEQ ID NO: 11226 - DNA, 470 bp, Homo sapiens
  MAP TO AC003958.1; EXPRESSED IN LUNG, SIGNAL = 1.3; EXPRESSED IN FETAL LIVER, SIGNAL = 1.8; EXPRESSED IN BRAIN, SIGNAL = 1.4; EXPRESSED IN PLACENTA, SIGNAL = 1.4; EXPRESSED IN BONE MARROW, SIGNAL = 1.1; EXPRESSED IN ADULT LIVER, SIGNAL = 1.6
ctacagcacctcctcatgccctctgggttgcaccatggctcctggagcaagaaatgtctttgtctctcctatcgatgttgggtgccagcctgtggcagaggccaatgctgcctccatgtgcctcttggccaacgtggcacacgccaacagagtccgtgtggggtcgactcccctgggccgccccagcctctgtctgcccccaaccagtcacactgcttgtcccttgccagggacctgtcacattcccggcaacatcggaatctgtggggcctacggcaaaaacaccctgaatggccatgagaaggagaccatgaagttcctgaatgaccgcctggccaactacctggagaaggtgcgccagctggagcaggagaatgcagagctggagaccacactcctcgagaggagcaagtgccacgagtccaccgtgtgccccgactaccagtcctacttccgtacaatcgaggagc

SEQ ID NO: 11227 - DNA, 449 bp, Homo sapiens
  MAP TO AC005215.1; EXPRESSED IN PLACENTA, SIGNAL = 0.9; EXPRESSED IN LUNG, SIGNAL = 0.7; EXPRESSED IN BRAIN, SIGNAL = 1.1; EXPRESSED IN FETAL LIVER, SIGNAL = 0.93; EXPRESSED IN BONE MARROW, SIGNAL = 0.92; EXPRESSED IN ADULT LIVER, SIGNAL = 0.92
gtcagtactaagggcctccgaaatcagtcccatttctgaacctgacctcacccgcagttctcctggtaactttaaaaccatttcttcctgccctgtgctgtatttatcccatgtgtttattttctatacgatccatcccgaaactgagctctgtgtgagtttccaggtcaccatgtcccatcggggcaaactcaacagatgtgggataagctggaagataaaatgggccatcctgccattgctgagcacagcctggcactcactgtggaggggggtttcttgttccagggccagccagggaaagttagcgtctgtgatttgtgcaatcaatcttctttttccgaaggacatcctgtgggcaaggcaggtcctcccaaccccatcgccaagaatgttccttgctgacatgttcaacacgagtggaggtcacagcaacatccacagattcc

SEQ ID NO: 11228 - DNA, 489 bp, Homo sapiens
  MAP TO AC005094.1; EXPRESSED IN BRAIN, SIGNAL = 0.76; EXPRESSED IN ADULT LIVER, SIGNAL = 0.8; EXPRESSED IN PLACENTA, SIGNAL = 0.9; EXPRESSED IN LUNG, SIGNAL = 0.96; EXPRESSED IN BONE MARROW, SIGNAL = 0.98; EXPRESSED IN FETAL LIVER, SIGNAL = 0.79
cctgaaatcctaatactcccaaaagagaacatagaagaaaagttccttaatattggccttggcaatagttttttggctattacaccaaaagctcaggtacaaaagcaaaagtaaataaatgagacttcatcgaactaaattttctgcacagcaaaggaaacaatcaacaaaacgaaacagcaatctatggactgaaaaatagtgtttgcaaaccatacatttgataaagtgatagtatccaaaactcatgccgcttaatagtagtaaaacaaataacttgatttaaaaatgggcaaaggacataaatagacatttctcttcagaaaacataaaaatggtcaacaggtatatgaaaaggtggtcaacatcatcaatcatcaggaaaatgcaaactaaaactactgtgagtaatcacctcacatttgttgacatgactattgccagtcaagagataacaaatgttggagaaggtgtgaaggaaagggaacc

SEQ ID NO: 11229 - DNA, 413 bp, Homo sapiens
  MAP TO AC005021.1; EXPRESSED IN LUNG, SIGNAL = 0.59; EXPRESSED IN PLACENTA, SIGNAL = 1.1; EXPRESSED IN FETAL LIVER, SIGNAL = 2.2; EXPRESSED IN BRAIN, SIGNAL = 1.3; EXPRESSED IN ADULT LIVER, SIGNAL = 1.9
tgaaatctaaacattctttcaggtgttacctgttaggaatttcaaaatgtagcataacttactgccagctgaagaggcaaatgaacaagttctttgtaatgaagaatacagaaatcactcatgagttaattgttcttctcttcctagaaatatgatccaaatctatttttcacagtcatttgtgaaccatcacacgttactaaatgttggtagcccattggctcttaccgttgtctatgaaagtgctgatgccatgtggattgaatgaggccaaatcaaacccacgactgattcttaattcccgtgcccttggtttttcttcttttagatccatcattagtattcctccaggcttatctggtgcaaagctgtggagtcctgggaattttagaccctttccaaaacggtgaaaa

SEQ ID NO: 11230 - DNA, 414 bp, Homo sapiens
  MAP TO AC002457.1; EXPRESSED IN PLACENTA, SIGNAL = 0.74; EXPRESSED IN BRAIN, SIGNAL = 0.73; EXPRESSED IN BONE MARROW, SIGNAL = 0.6; EXPRESSED IN ADULT LIVER, SIGNAL = 0.65; EXPRESSED IN LUNG, SIGNAL = 0.68
aatattacccattttctctaaatttccaaatattttagtctttattctattgtgattatatatcccttcttctgacagacatttctttattttggttgaattattctgtacttattaggtatttgtctattttatttatctattcaggtcacttttaatttcaatagttaaaaatccattaattttactgtttagctgaattaattgcattctcctacttttatgtttcatatttttgtgcttcatttgtttcaatcttttatttttcttgttaaaaggaatccattattattcacattatcattgacaactgtgagaatctgcagaaaaaaacaatatggaactacaacttcacgttcttgagaaaagcttgcagtgtaagatgcgtttgtttgtggtgcctgaggaagagag

SEQ ID NO: 11231 - DNA, 477 bp, Homo sapiens
  MAP TO AC005243.1; EXPRESSED IN BRAIN, SIGNAL = 1.3; EXPRESSED IN PLACENTA, SIGNAL = 1.1; EXPRESSED IN LUNG, SIGNAL = 1.3; EXPRESSED IN BONE MARROW, SIGNAL = 0.87; EXPRESSED IN ADULT LIVER, SIGNAL = 1.3; EXPRESSED IN FETAL LIVER, SIGNAL =   1
ggcagccttctaatccatcctcctcccatctaaactgaaaagtggatattaatccaagatttccacaatccgtcacctcagaatccacacgcccaaaaccaaagtcataatttctgaaactatctcctaccaccccctaaagttcctgtgtttgccccaagaactactatttttatccaagccaaaacatgtaaagtcatttttgattactctccgtatgtcagtctctaagagtcaccaagaacagttcatgtttccttccaagtatgtcattgcagtcatcctttccactgtcccacttttctaattcaagccatttctttcaaattccagcttaaatgccttctcttccatgaagacttccttgatcactcctgtctttacagatgaacggctaactggaataccaacagaataaacagactttagtcctgccatctgccctggcccatgcagcctggcattgtttaggggatc

SEQ ID NO: 11232 - DNA, 452 bp, Homo sapiens
  MAP TO AC004031.1; EXPRESSED IN ADULT LIVER, SIGNAL = 0.63; EXPRESSED IN PLACENTA, SIGNAL = 0.58; EXPRESSED IN LUNG, SIGNAL = 0.74; EXPRESSED IN BRAIN, SIGNAL = 1.9; EXPRESSED IN BONE MARROW, SIGNAL = 0.64; EXPRESSED IN FETAL LIVER, SIGNAL = 0.73
cacctctggagctgacctgtcagctctgaatcttagctctcttgtctggtagctgttgtgccttccagccaggcctccacctcccaacctctgtttctccatctgtaagaagggactgaattgcgcagtcagtgttcacagggttgttatgagggttgattccaggctcagaactgcgcctggaacatagccagtgctgcatagtaattactgttactattttcatttgcctcaggaaacttcttgtggaccacggacatggcagcctgcgtgaaggagcttgttttccatctcctggcagagctcctgcgcacggtgcacaccctggagcagaggcggcaccccgctggcctgtcctcctcaatcgccctccagctgaacccctgcctggccatgctgatggccttgcagtcggagctccacaagctgtacgacgaggagacgcagaactg

SEQ ID NO: 11233 - DNA, 461 bp, Homo sapiens
  MAP TO AC002080.1; EXPRESSED IN LUNG, SIGNAL = 0.6; EXPRESSED IN BRAIN, SIGNAL = 0.65; EXPRESSED IN BONE MARROW, SIGNAL = 0.65; EXPRESSED IN PLACENTA, SIGNAL = 0.62; EXPRESSED IN ADULT LIVER, SIGNAL = 0.56
atgtgaccaaaaactacttccttacaagtaatctggatatggtttggatatggattgttcatgcccgccaaaactcatgttcaaacgtgatccccaaagtggcagattgggcctagtgggaggtgtttgtttttgagaactgggagcagatccttcataaagattcagcactgttcttgtagtagtgagttctccttctggcgagaaggaattagttcttgagagaatggattagttcccaagagagcggattgttataaagcaaacttcctcctgctatttagtcccccttcccacattcccacttcacctttgaccttctccaccatgttttgacacggcagaaaaatcctcgccagaagcccagcagataccagtgccatgcttcttgtacagcctacagaaacgtgagtcaaataacccttttttctttataaactaccgagacccaggtattcctt

SEQ ID NO: 11234 - DNA, 394 bp, Homo sapiens
  MAP TO AC005386.1; EXPRESSED IN BONE MARROW, SIGNAL = 0.68; EXPRESSED IN PLACENTA, SIGNAL = 0.79; EXPRESSED IN LUNG, SIGNAL = 0.86; EXPRESSED IN FETAL LIVER, SIGNAL = 0.76; EXPRESSED IN ADULT LIVER, SIGNAL = 0.74; EXPRESSED IN BRAIN, SIGNAL = 0.72
gggggataatattcaccttgcatatgtatctccactcattggctttcaataacttgagatctttatgttttaggtatacctcttgtaataggtatatgcatagaatgcttttaacccaatctaatacctgcttccaactatagaatttagtccatttacattaatatagttgccaatgtaccagatttggattctttactataattttatcatatgcttctgttcatccacttttttctatttgtgttttctttggccttttcttgatgtcttttggactgactgagggtcttctcctccacatactggcaattccatttcttctttctactttgtttggaaatcatattttcattcttgtaaaggaactctgttgtgtggatgtttcataggg

SEQ ID NO: 11235 - DNA, 489 bp, Homo sapiens
  MAP TO AC005393.1; EXPRESSED IN PLACENTA, SIGNAL = 0.79; EXPRESSED IN FETAL LIVER, SIGNAL = 0.68; EXPRESSED IN BRAIN, SIGNAL = 0.61; EXPRESSED IN LUNG, SIGNAL = 0.78; EXPRESSED IN BONE MARROW, SIGNAL = 0.72; EXPRESSED IN ADULT LIVER, SIGNAL = 0.64
ggtcatattccacccattgctagtacaatcctacacccacttttcccttgaaacccaggacagcagagagtagaaagggcttcccttgttccaataaatgtgagactctctctcacaccaaaaaaccgaattcctgaggaacatgaggatgcccctttatactcaacatccattattaacctcccccctcctccctccttagatctggttcaagaaccagcgtgccaaatggaagaggcagcagcggcagcaaatgcagacacggccatcactagggccagcaaaccagacaacttcagtgaagaaggaggagactccctcagccataactactgcaaacattcgtccagtaagtcctggaatctctgatgcaaatgaccatgatctacgtgagccttctggtatcaagaatcctggaggagccagcgcctctgcgagggtttcatcctgggattctcagtcatatgacattgaacagatatgtctggg

SEQ ID NO: 11236 - DNA, 467 bp, Homo sapiens
  MAP TO AC006021.2; EXPRESSED IN LUNG, SIGNAL = 0.61; EXPRESSED IN BRAIN, SIGNAL = 0.79; EXPRESSED IN BONE MARROW, SIGNAL = 0.69; EXPRESSED IN ADULT LIVER, SIGNAL = 0.75; EXPRESSED IN PLACENTA, SIGNAL = 0.69
aatccggagaacagttgtggccagtgagacagggaaggcattaatagttttatctctgttataagaggctgattaaaaaaaaaaaaacttaaaagaaaatctgttattagtttcagggctccaaatgaattaggtttctggccggaataaagttaccagtcaggccctggataacgaggctgtaaataacctatagactgtaaatatttttttttcagactctcttagaaacaaaggggctgtttagaaggcaacagagagatgttattccaggggctttcctctttgattctgaagaacacaaggtccatttaaccattcgacaaaacaaaacgaaatttctgatcactccaccacgcagaatagaacatgccggtggacatgtgaacatgcgggagaacccatgtcgggcgttcattgttcatctgcgtctacaggagggggctacagtcaatgctcccactgtc

SEQ ID NO: 11237 - DNA, 465 bp, Homo sapiens
  MAP TO AC002486.1; EXPRESSED IN LUNG, SIGNAL = 1.1; EXPRESSED IN FETAL LIVER, SIGNAL =   1; EXPRESSED IN BRAIN, SIGNAL = 1.2; EXPRESSED IN BONE MARROW, SIGNAL = 0.95; EXPRESSED IN PLACENTA, SIGNAL = 0.96; EXPRESSED IN ADULT LIVER, SIGNAL = 1.1
gatctggcaaggttttaggccaattattcttttgcagttttgttggtgcccatctaccagaaaaagtctatggacaatatatatgttagaaatattttatcaaaatatagtcagtctttgatttctaaaatatgctacttctcagcttatattttggtctagtatgaaaaaccctaaaatcaatacagtaaaaggcatcacaacatggttcattctttggattggcagatcatggtggatgagaatgacatcagagctttaaatgtgcggcattatcgagaccatattggagtggttagtcaagagcctgttttgttcgggaccaccatcagtaacaatatcaagtatggacgagatgatgtgactgatgaagagatggagagagcagcaagggaagcaaatgcgtatgattttatcatggagtttcctaatgtgagtacactgtgcagcctgtgtccttagctt

SEQ ID NO: 11238 - DNA, 456 bp, Homo sapiens
  MAP TO AC004139.1; EXPRESSED IN LUNG, SIGNAL = 1.1; EXPRESSED IN FETAL LIVER, SIGNAL = 1.2; EXPRESSED IN BRAIN, SIGNAL =   1; EXPRESSED IN BONE MARROW, SIGNAL = 0.99; EXPRESSED IN PLACENTA, SIGNAL = 0.97; EXPRESSED IN ADULT LIVER, SIGNAL = 1.1
atctacgggcaggtgtcttctgtatcctggtgacatgtttctctggttctgggctccctgtgcctatcctagccattgtgcaaattactagaaacttcagtcctgaaggactgtcctgctgccctgggtatacggcgttggcctagagagaactcgagagcttggaactcgaataagaaaatatttgagaggacatatttcacagctctttttctgttcccctcttcagagctgtcccatcaccaaacccggcctgacaggacccacaggcagcacttagacgatgtgggggccgtgcccatggtggagcgagtgacagcgccaaaagcagagcgcttgctcaacccaccaccacccgtgcatgacccaaaccacagcaaaatgagattgcgagaccattcatctgagagaagtgaaggtagggccaggcccatggcacctctacctgcaactgca

SEQ ID NO: 11239 - DNA, 485 bp, Homo sapiens
  MAP TO AC005247.1; EXPRESSED IN PLACENTA, SIGNAL = 0.72; EXPRESSED IN BRAIN, SIGNAL = 0.73; EXPRESSED IN BONE MARROW, SIGNAL = 0.7; EXPRESSED IN ADULT LIVER, SIGNAL = 0.7; EXPRESSED IN LUNG, SIGNAL = 0.84; EXPRESSED IN FETAL LIVER, SIGNAL = 0.7
gttggtcgtgttttcaccgctgcatttaatttactgcctcagtccatcaggcattgtgtatagactgcatacacaccattagttgtcagtagatgagggtcctcatgagtcattctgacagctggcttgcactatcacaataaaataggccctgttctgttatttcccagaagctggaaacaagccttctccaaggcatgcatatcttttgagacattgcagatcatttatgcattaagcatcttgtctttaaaaatggttttgttactacttgtgtattaatagtattattaattaattaactggcctctttgttcttcttacagtttttggcattgggcacacattatggcaaggtttatttacttgatgtccaggggaacatcactcagaagtttgatgtagtaagtattctgtataaaataatgtatgagctaaacttcatgttaagtatttgtgttttagaatattggtttaccagtttg

SEQ ID NO: 11240 - DNA, 487 bp, Homo sapiens
  MAP TO AC004040.1; EXPRESSED IN PLACENTA, SIGNAL = 0.79; EXPRESSED IN BONE MARROW, SIGNAL = 0.88; EXPRESSED IN ADULT LIVER, SIGNAL = 0.62; EXPRESSED IN LUNG, SIGNAL = 0.66; EXPRESSED IN FETAL LIVER, SIGNAL = 0.81; EXPRESSED IN BRAIN, SIGNAL = 3.9
tgacatgccaaatgtagctgtagcagtaattaaattggtggggggattttagtaattcggttgacagcttttgggaaatgacattggctggattaaagaccataggaaacccagaaagtttttatgctgctatactagtaaaactgccattaatgtggactgttcaaaatgctgaaagacatatggaacctcaactttctacaggcaagaagcaggctgagaaagtcgttcaaagggtatattttttcatgttctcttcaaaaatggccaaatagggtgatggaaaaagaagaattccaagaacatggagccaagggctgtggaaaacaactgactgaggagccactcccaggaagccaaactggggcattatcagaaaatattattcatcctaaaaatagacccgccatccagtgggattgtagaattgctatgtaccagtgagtacaatgtgcctcctctctttccctgtgtgaatggcagtgtt

SEQ ID NO: 11241 - DNA, 474 bp, Homo sapiens
  MAP TO AC005255.1; EXPRESSED IN PLACENTA, SIGNAL = 0.86; EXPRESSED IN BONE MARROW, SIGNAL = 0.85; EXPRESSED IN FETAL LIVER, SIGNAL = 0.95; EXPRESSED IN LUNG, SIGNAL = 0.96; EXPRESSED IN BRAIN, SIGNAL = 1.3; EXPRESSED IN ADULT LIVER, SIGNAL =   1
ttggaagcaagaagaaacagagattgaaagcaagaagaaacagagattgaaagcaagaagaaacagagattggaagcaagaagaaacagagattggaagcaagaacagagagaggaccggctgcaagaatccccttcagagcgagggacacaaactgctcaggactttgaatcaatcctctttcaccatctcatcatttctggctgtttcccagaagacttggttaataaaagcttttcttccctccacaaaactttcccacagtacttacgggtttactctggcttctcttgatatccctcaatggacttggctctgttgaccttccctccttgcacaatcggtgcaggcagggcaagggggtgggtgtcaggggctggttctctggagtggatggacatttcagagaggcatagagaaggtgctcttggtctggggctggtgaactgcaggtgggttctgcaaagggagaat

SEQ ID NO: 11242 - DNA, 456 bp, Homo sapiens
  MAP TO AC004605.1; EXPRESSED IN LUNG, SIGNAL = 0.58; EXPRESSED IN FETAL LIVER, SIGNAL = 0.72; EXPRESSED IN BRAIN, SIGNAL = 0.55; EXPRESSED IN BONE MARROW, SIGNAL = 0.67; EXPRESSED IN ADULT LIVER, SIGNAL = 0.92; EXPRESSED IN PLACENTA, SIGNAL = 0.7
tcactcctagcaaccgtgagcatttccagtatatgaactgtgagtcattcttgttactggtatttgaaagagtggaaactggggcttgggagtaggaagtgtgaacagtataactcagaagacataagggaagctgaggagggtgtaccctgtgtcttaacgccgcatccctggtgctgtgggaggagggcacagaatcagccggggaggacaattcctgagggttgtgaggaggttcagaaatacacaccatgctgagtaggttacataaatgttacctgcagtagtagcagcagcggtagctccttctctgcttcctcatcttcttccccttcttcttcctatttctcttcctcatcaccttcttagtgcagtcattctgtaacttgattactctgtgggacctggaaagaatttattctgagttataaaattgggaagggattgaatatttgg

SEQ ID NO: 11243 - DNA, 474 bp, Homo sapiens
  MAP TO AC004774.1; EXPRESSED IN LUNG, SIGNAL = 1.3; EXPRESSED IN FETAL LIVER, SIGNAL = 1.3; EXPRESSED IN BRAIN, SIGNAL = 1.7; EXPRESSED IN BONE MARROW, SIGNAL = 1.5; EXPRESSED IN PLACENTA, SIGNAL = 1.3; EXPRESSED IN ADULT LIVER, SIGNAL = 1.3
caataactttaggtatccaggcaagatacctagtatgttgtaggaagtgggactgtaagaggctagaaagaggtggaaggaggcggggacttggcttgtaggcgttggcggtggttgttttttgttttttgtttttttgcttttttaatattgcttctaaatccctgagtgacgttagaggcactggtttgatgtttatgggcctaatgattgctgcatttcttgcaggtgaagatatggtttcagaacaaacgctctaagtttaagaaactgctgaagcagggcagtaatcctcatgagagcgaccccctccagggctcggcggccctgtcgccacgctcgccagcgctgcctccagtctgggacgtttctgcctcggccaagggtgtcagtatgccccccaacagctacatgcctggctattctcactggtactcctctccacaccaggacacgatgcagagaccacagatg

SEQ ID NO: 11244 - DNA, 452 bp, Homo sapiens
  MAP TO AC004638.1; EXPRESSED IN PLACENTA, SIGNAL = 0.96; EXPRESSED IN ADULT LIVER, SIGNAL = 1.1; EXPRESSED IN LUNG, SIGNAL = 1.2; EXPRESSED IN FETAL LIVER, SIGNAL = 1.1; EXPRESSED IN BRAIN, SIGNAL = 1.3; EXPRESSED IN BONE MARROW, SIGNAL = 1.2
acctctctgggcctcctatcagcactggaaggtgagttttagtgagaccatttcacagacaaagaaatggaggctgaaaggggaaatggcaaagctgggattggaactccaagctgtgcagctccaatgcaggggctcacctctgaaaggatgctgaagagaccattcccctatgggtgtcctcggcctgaagcccagagatcctggctggcctgagtccttgccctcctccccacctgcaggcccctcgcattggcacaagctgtatcccattgcccagggagatcgccaatcacccatcaatatcatctccagccaggctgtgtactctcccagcctgcaaccactggagctttcctatgaggcctgcatgtccctcagcatcaccaacaatggccactctgtccaggtagacttcaatgacagcgatgaccgaaccggtaagtggcccc

SEQ ID NO: 11245 - DNA, 497 bp, Homo sapiens
  MAP TO AC005066.1; EXPRESSED IN PLACENTA, SIGNAL = 1.1; EXPRESSED IN BONE MARROW, SIGNAL = 1.1; EXPRESSED IN ADULT LIVER, SIGNAL = 1.1; EXPRESSED IN LUNG, SIGNAL = 1.3; EXPRESSED IN FETAL LIVER, SIGNAL = 1.1; EXPRESSED IN BRAIN, SIGNAL = 1.2
actttctgcatgggaaggagggctggtctcatgagtgtatgaactgtgcaaatgctcaggggcccatcctaagaagggccttgggcttagcttagttctctgctgtcaccatcttcaaattcttaataatatttgaagaaagggccctgcctgttaattttgcactgggtcccgcaaattcaggactttcccaacattgtttatttgatgtgtgatgagtagataacttgtcttttagtgactagccttcagaccaaaagaaacctgtgcatcacttccaaagagcctcatccacacctagatctgatgatgagatcctggaccttgagcctgagctgaatgctgttttatatgggatgaaacatttagcaggccttaaaggggtcaatatgttttatgaagtggaggaatataagtagtttgttgccagagggcagactgtggcagctttaaaaagtttttgacatgtcttttcagagtgtcgatctaaaaggaag

SEQ ID NO: 11246 - DNA, 474 bp, Homo sapiens
  MAP TO AC004051.1; EXPRESSED IN BRAIN, SIGNAL = 0.71; EXPRESSED IN PLACENTA, SIGNAL = 0.73; EXPRESSED IN LUNG, SIGNAL = 0.95; EXPRESSED IN BONE MARROW, SIGNAL = 0.86; EXPRESSED IN ADULT LIVER, SIGNAL = 0.98; EXPRESSED IN FETAL LIVER, SIGNAL =   1
ccgtgattatggtcatttcagttcacgtgatgactatccatcaagaggctatagcgatagagatggatataatagtgatcatgactattcagatcatccagctggagattcctacagagattcatatgaaagttatcgtaactcacgtagtgctccacctacaggagggcccccgcccccccatcttatggtggaagcgatgattatagcagttcacgtgacggatatggtggaagtcgagacagttactcaagcagccgaagtgatctctaatcaagtggtcgtggtcgggttggcagacaagaaagacggcttcccccttctatggaaatcctccacgtgattcccacggcaattcaggcggtggagcaccaagaggtggtggcagtggaggaagccgatctgatagagggggaggcagaagcagatactagaaacaaacaaaactttagaccaaaatcccagttcaaagaa

SEQ ID NO: 11247 - DNA, 452 bp, Homo sapiens
  MAP TO AC004166.4; EXPRESSED IN PLACENTA, SIGNAL = 0.79; EXPRESSED IN LUNG, SIGNAL = 0.83; EXPRESSED IN BONE MARROW, SIGNAL = 1.1; EXPRESSED IN FETAL LIVER, SIGNAL = 2.1; EXPRESSED IN BRAIN, SIGNAL = 0.69; EXPRESSED IN ADULT LIVER, SIGNAL = 0.8
caggaaaatcacaattaaccctggctgtgtggtggttgatggcatgcccccgggggtgtccttcaaagcccccagctacctggaaatcagctccatgagaaggatcttagactctgccgagtttatcaaattcacggtcattaggtaagtgagagtttcctgcttagtcacaggagcgaatctggagctcatgaggctgactcttctaaaatgcagccacaggtagtcatcgaatccggcttcctatgctgtgcaatcaacaaatcaaaataacttgtgtcatcattagaatgtcagatgtgcttctacgaactaagctgactcttttaattctttggcaaagggttggcaaactaggactgtttgccaaattcaggctgcctcctatttttagagtcttcctgaaacacagctacacccgtattatccatggctgctttcctgtcacagtg

SEQ ID NO: 11248 - DNA, 461 bp, Homo sapiens
  MAP TO AC004222.1; EXPRESSED IN PLACENTA, SIGNAL = 1.3; EXPRESSED IN FETAL LIVER, SIGNAL = 1.5; EXPRESSED IN BRAIN, SIGNAL = 1.9; EXPRESSED IN ADULT LIVER, SIGNAL =   4; EXPRESSED IN LUNG, SIGNAL = 0.91; EXPRESSED IN BONE MARROW, SIGNAL = 0.97
tttcagaatgtctagaatgattacgcaaaaaatgatcttcataacacaagacatctgctataataaaatgttttatcatgaaaataaggtccatcaggtacctaactaatgaattcctttgtaatataaacaaataaaacaaaagcacataactgaaaaccatagggtatttcaaatataaatgtaagaggaagtactgtaagaaaagctgaaaatttagttggaaggggaatttaagatagctagattatcaaaataattcacctttgacattaacttcaagcccctttcgattctaggtggtggctttttatctaaaatccctgcttcatacggtgagacaatggcaggattgataaatctgaggaacatggcacttcctactgcaccgatgctgttctgagggaaacgctggctaaccacctaaaaacaaggagttgagaattgagtataaggtttga

SEQ ID NO: 11249 - DNA, 465 bp, Homo sapiens
  MAP TO AC002482.1; EXPRESSED IN PLACENTA, SIGNAL = 0.77; EXPRESSED IN FETAL LIVER, SIGNAL = 0.85; EXPRESSED IN BONE MARROW, SIGNAL = 0.7; EXPRESSED IN LUNG, SIGNAL = 0.65; EXPRESSED IN BRAIN, SIGNAL = 0.73; EXPRESSED IN ADULT LIVER, SIGNAL = 0.59
ccttccctggttcctactccattcccagtggctgcctgtggctgggctcactcctcggtcttggtccaggactgtggtttctgtgcaggctgccagtgaagaagtctaggcctgtgatccacttactcctgatatcacctctccctggaagtggctcctcaatttgaccccacacgctgatgacaaatacttagggaggtgatctagcaggaggaggtctagtgatacaggatgcattcatatctgtgatcttgagcccaggctgccttcatgtagcttcttttgtctgctgctgtacagaggtgggagatcatgaacccaaaaaggagacagttgaaggtgtggaacccaatgctgcatcaggagagttcattgcaaagatcactcgtgacctaatcctcccctgaagaaaacaagcagccactggtctttacccttgaagtctctctgctttccctgacagga

SEQ ID NO: 11250 - DNA, 428 bp, Homo sapiens
  MAP TO AC004056.1; EXPRESSED IN PLACENTA, SIGNAL =   1; EXPRESSED IN BRAIN, SIGNAL = 1.1; EXPRESSED IN BONE MARROW, SIGNAL = 0.97; EXPRESSED IN ADULT LIVER, SIGNAL = 1.2; EXPRESSED IN LUNG, SIGNAL =   1; EXPRESSED IN FETAL LIVER, SIGNAL = 1.1
cacaggaggagaaatctggcagatagatcctcaccatcatctgaacactcgaactggacttccttttctgaattgaccagtcaaagagaaaggaaaagaaaaaaaaatatgaccggttgaatttagagtatcaaagcatggagtatagaataattttgtttttaaagaggagctataagttgaatggaaggaaaaagttctggaaatgcgttctatgtaaggatagtaatgaaaataaatatctcaataggaactgtgagctctccatcactgaacggtacaggaaagcccaggagaagaaaatgtttggaaaatgtaagataccacatttctactattgtaacattgggaaaaaggcagtcatcaactatcattcttaaaatctaaatggaataaactaatcagaatgaagacacaattgcaggctg

SEQ ID NO: 11251 - DNA, 467 bp, Homo sapiens
  MAP TO AC005208.1; EXPRESSED IN PLACENTA, SIGNAL = 0.92; EXPRESSED IN BONE MARROW, SIGNAL = 0.82; EXPRESSED IN ADULT LIVER, SIGNAL = 0.78; EXPRESSED IN LUNG, SIGNAL = 0.7; EXPRESSED IN FETAL LIVER, SIGNAL = 0.72; EXPRESSED IN BRAIN, SIGNAL = 0.81
ctggaagtaaccctctggggaagtcactatacagaattgttaacattaaaatatagttaatgaacaaatgaagctgggcaacttttcctgcagattttgaagggagagtgaacatccctttccaaccttataattctttgtctttactgagatcttctcgagttgttaaatttcaacctgttctttatagtgtcaaatgaaagtgccattagggtaatcccatagaactagttcgtgactttcttttttttacagtgatactgtggtttggatgttcagaacatccaggcacttccagatcagtatcagcttcaacggctcaaagttgttccaggaaatgaatgaagtgccctgtgtgacctccagtaagcttgcttatttcaagagagcttggtgttttctcgtgacaaccttgcagattacttcggtgacaatgtaagccttgttccaacacccagaggaaaaga

SEQ ID NO: 11252 - DNA, 469 bp, Homo sapiens
  MAP TO AC004804.1; EXPRESSED IN PLACENTA, SIGNAL = 0.96; EXPRESSED IN LUNG, SIGNAL =   1; EXPRESSED IN BRAIN, SIGNAL = 0.99; EXPRESSED IN BONE MARROW, SIGNAL =   1; EXPRESSED IN FETAL LIVER, SIGNAL = 0.89; EXPRESSED IN ADULT LIVER, SIGNAL = 0.95
ccctgaagcctaatataacccactcattaaactgtcattgaacttaccaattaagtgtgatcaacttgaagcaagatgaactttctcctatgctgaggtgtcctcataaagctgtggaataaaacttgcattttctacttaaagccattccttcattgctaaacagttggtctgagaggaaggcagcaagcagggttagaaagagaaaaaagaggaggataaagatgaagagaaaaacaacatgcgattacggatcaaatgtcttcacccgatcctttcagattctccttgtgttctaacctgtagctgctgagagctgtcgttgagattgtcctcccgtcgtcgcgcctcctctaacatttgtgcactcttctttttttccacctgttccttgtgcttcagatttgctaccttcttattctggtctttcacttgcctaatgacagaaggagaaaaatcaagctttgca

SEQ ID NO: 11253 - DNA, 473 bp, Homo sapiens
  MAP TO AC005212.1; EXPRESSED IN PLACENTA, SIGNAL = 2.4; EXPRESSED IN LUNG, SIGNAL = 0.93; EXPRESSED IN BRAIN, SIGNAL = 1.4; EXPRESSED IN BONE MARROW, SIGNAL =   1; EXPRESSED IN FETAL LIVER, SIGNAL = 0.91; EXPRESSED IN ADULT LIVER, SIGNAL = 0.83
tggaagtgacaatcacatcactcttctcatttgctgtcagtgtgtggtgcgtttccttccttctcccgtgggaccactgagcggccacgggggtcctgagctgaagtcactctgttgccccaagcatctcttcccccatggaccccatgcacgtggccctctgccctcgagagcagctcctcgaggtggctgggccatcctctgctcccgcacccagggtacatccgggaaggcttcctggccgtgcagcatgctgtggaccgggccatcatggagtaccatgccgatgccgccacacgccagctgttccagagactgacggtgaccatcaagaggttcccgtacccgccgttcatcgcagaccccttcctcgtggccatccagtaccagctgcccctgctgctgctgctcagcttcacctacaccgcgctcaccattgcccgtgctgtcgtgcaggagaaggaaaggaggct

SEQ ID NO: 11254 - DNA, 471 bp, Homo sapiens
  MAP TO AC005365.1; EXPRESSED IN BONE MARROW, SIGNAL = 0.92; EXPRESSED IN PLACENTA, SIGNAL = 1.1; EXPRESSED IN LUNG, SIGNAL = 0.94; EXPRESSED IN FETAL LIVER, SIGNAL = 0.89; EXPRESSED IN BRAIN, SIGNAL = 0.96; EXPRESSED IN ADULT LIVER, SIGNAL =   1
gccttaaatgtccagggatgatccaggactttcttgactactgggatatctgagctgatctgtgtgttagaaatattggatgtcttaaaagatttgtaacaagatataagtacataaggaaagtaataaaacaggagagcttacatagaaagcatcttaaagagtaaataggagaaagggagttttctttggcattagacaagagtcatagccaggaaagttactcttgataaaatttttgttataatgacttcctcattaccttactttatttttaatccccttagtatgtttgtgctactgaaaggagccactaaggagcagtcttttaagattggtcaggaaattgccgaagctgtaactgctaccaatcctaaaccagtgaaattgaagtttgaaaaggtaagaggaatgtaatattagtaattacatataaaattcatataccttctagagacctctgatttgttc

SEQ ID NO: 11255 - DNA, 473 bp, Homo sapiens
  MAP TO AC004691.1; EXPRESSED IN PLACENTA, SIGNAL = 0.78; EXPRESSED IN LUNG, SIGNAL = 0.58; EXPRESSED IN BRAIN, SIGNAL = 0.72; EXPRESSED IN BONE MARROW, SIGNAL = 1.2; EXPRESSED IN FETAL LIVER, SIGNAL = 0.7; EXPRESSED IN ADULT LIVER, SIGNAL = 0.71
tgcgtggaactttctagtggaccagtagctaagtctcactcggcaacatcctcgtggtatgaacagagcagggttgtgacaaggagcatggactctcttgatctggttgctttccttccgctaagggtctgggaacttcagaacagagctggggtgaatgaatgcggggaggaaccctcctttcactcaaaccttctacaaacttagcaatgtctgtggtgttcagtgacttcatgttctgttctccgtgagtcataacgaagggctcacatggccatggttttctttcagaggatgtggaggatgagttgataagggaagaggtcatcctgtcgccagtcccatcagtgctcaagttgcagacagcatcaaaaccaattgacctctcagtagcaaaggtaagtgtaaggagactcctgggttaaatgtgtcttgatttgaatggatatagatggcgtgattttggtgtttct

SEQ ID NO: 11256 - DNA, 459 bp, Homo sapiens
  MAP TO AC002545.1; EXPRESSED IN LUNG, SIGNAL = 1.1; EXPRESSED IN BONE MARROW, SIGNAL = 1.1; EXPRESSED IN ADULT LIVER, SIGNAL = 0.93; EXPRESSED IN PLACENTA, SIGNAL = 0.93; EXPRESSED IN FETAL LIVER, SIGNAL = 1.1; EXPRESSED IN BRAIN, SIGNAL = 1.1
catgtccggacttcagcccttgcttccagaaagttcagggcaaaactcatgaattccaggaatgcacggaaagagaatcaaagaacaaaactggatttctacctaagtttagaaatcaaaggctactgatctaatgctttagctgaaatcttttattagaaatggcaataaaacccaactaaacagctagaacacagatcatgttttattcctttacataatcatttcttaacttcatgttgacaagaacaacgtgatcatgagttatattatttcctggcttagagtaaaaatgcctacctttttacagctggggaatgatttgtcacccttcctctccataccacacttcttctcttccaccagaaacccattatctgttggagggactgaggcaaggagctgaatcatatattttcctagtgtcctttacttgttacatctgtcttgttaaacaca

SEQ ID NO: 11257 - DNA, 456 bp, Homo sapiens
  MAP TO AC005587.1; EXPRESSED IN LUNG, SIGNAL = 0.9; EXPRESSED IN BRAIN, SIGNAL = 0.56; EXPRESSED IN BONE MARROW, SIGNAL = 0.84; EXPRESSED IN ADULT LIVER, SIGNAL = 0.53
cggggatggaaactctgtaggtcacaatgtgaggctgttatcagtctgtccacaaggaagcagtaagctcctcagctcagagttaaggctgccacaagagatgaatgggcagctcagctctccagcagttgctgtattataaacacagtgaaataatcacagagacaaaaaggactttaaggattcactcaagtatgctctttggcagtaagctgtgactagggcccactgggaaacagctgctgatgacagcccagtctggcagcccctgcgagaggtggagttgcttttgcggagcaaatttgggcttcaagctaatcatgattcaagcgggcattgaaaaaaacaatcacaggtgcctcatagagagccttgttgccatgcgactctattatgtcaagaaaataaataatgataaataataagatcataccagctgccacttattggacattt

SEQ ID NO: 11258 - DNA, 446 bp, Homo sapiens
  MAP TO AC005532.1; EXPRESSED IN PLACENTA, SIGNAL = 0.91; EXPRESSED IN BONE MARROW, SIGNAL = 0.88; EXPRESSED IN ADULT LIVER, SIGNAL =   1; EXPRESSED IN LUNG, SIGNAL = 0.94; EXPRESSED IN FETAL LIVER, SIGNAL =   1; EXPRESSED IN BRAIN, SIGNAL = 0.67
caacctgattcaacaatgtgcaaaagactcaaatacacatttctcctaagatacacaaatggccaataaacagatgaaaagatactcaacatctctaatcattagcaaaacaaatcaagactacaatgagatgctaccttatacccataacaatggttaccatcaaaattcagaaaattgttaagtgttgaagagaatgtggagaaactggaacccttgtatactattggtatgaaagtaaaatgttatttctgctatggaaaacagtatgaaaattcctcaaaaaattaaaaatagaattaccatatgatccagcaattccacttctggatatatacccaatgagagcagggtttcaagaaagtatttgtacactcatggtcattgcagcagtattcacaagagctaaaatgtgaagcaaaccacgtgttcactgaggatgaatg

SEQ ID NO: 11259 - DNA, 477 bp, Homo sapiens
  MAP TO AC002537.1; EXPRESSED IN PLACENTA, SIGNAL = 1.1; EXPRESSED IN BRAIN, SIGNAL = 1.3; EXPRESSED IN ADULT LIVER, SIGNAL = 0.95; EXPRESSED IN LUNG, SIGNAL = 1.3; EXPRESSED IN FETAL LIVER, SIGNAL =   1; EXPRESSED IN BONE MARROW, SIGNAL = 1.1
tttgcttcctcagctttaaccttaagcatatacttaccttataagtataaatataatgtaaaaatttatactaactatgtttatacaactacttcagggttcttttcctcatattgagatgaaaaattgaagaaaatgtgaaaaaatgcaaaaccatggctggttgtgtactgcatgaaaaatggaacataatctcacatttctgtaactaaaacagggtgcaaaaatggcattgcttccaaactagcaaattaaaataattactggaataaaaatatggcccacttgtgtgagtataatatcagctgctcaaatactaaaagaaacaatagtctgacctcatcaaaaaattgctgagttttgcgaagtataaattttaattcggtcagttccaggaagtttctcttcagagcttcctggtttgtgttgatttccttcagttcattttcaatcttctcaaaattggcctagatgaaa

SEQ ID NO: 11260 - DNA, 472 bp, Homo sapiens
  MAP TO AC004503.1; EXPRESSED IN BONE MARROW, SIGNAL = 1.5; EXPRESSED IN ADULT LIVER, SIGNAL = 1.2; EXPRESSED IN PLACENTA, SIGNAL = 1.1; EXPRESSED IN LUNG, SIGNAL = 1.1; EXPRESSED IN FETAL LIVER, SIGNAL = 1.3; EXPRESSED IN BRAIN, SIGNAL = 0.95
ggcatagttgagaaaatgcgaatatttattaagcccctgctctgtgccaggccctgtgctaggagctgaggattaagtggttactcaacagcagcacctgcccttcccttgtggagcttaggttccaggccaagagccctggactcagcagtgtgattatgtgcttaatgtctccgttaggaacttggggaagtaccataaagaaaaagaaggtggttctatcttagcgcataatgaggggacctggcctaggccaagggtcagggaaggcttctctgaagaagtgatgcctgagccaagatctgaaagacgggctggggcgctggaggtgctgagggtgctggaggtgctggaggtgctgggggtgctggaggtgctgagggtgctggagcagcgccaggggaaaggagagccaggcagtccaggcacagggcgcagcaggcaccacggccctgcaagaagacagccagtg

SEQ ID NO: 11261 - DNA, 475 bp, Homo sapiens
  MAP TO AC003025.1; EXPRESSED IN BONE MARROW, SIGNAL = 0.67; EXPRESSED IN LUNG, SIGNAL = 0.66; EXPRESSED IN ADULT LIVER, SIGNAL = 0.77; EXPRESSED IN BRAIN, SIGNAL = 0.61
ctcggcacagtaaacacacggcttggcggggctttcccacatgggcaggaaggagctaagaccctcagcttacttggtgctgctacagtcaacctcggccaccttcactgtgggcagcgtctgcgaagccaccggctcaatggtgagcgtgttgtcctccacggcggcccgtaccagcaccgagagctgtggcagaccagggaggcaggcagggtggtaaggggctgggccctggcggaggggtgtgtcccccagctggccccgcccctgccatgcctcacctcctgcattgtgaagtccaggcaggggcccacgtcctctcggtacaccctttccaggaaggggcaggtcttgtccagggtgggggattccctccaggcctggaactctgcaaacaggattgtgtccacctgtgggggagggcaagcgagggtgggggcggtcagggtactggggccagcatagaagatgcagg

SEQ ID NO: 11262 - DNA, 493 bp, Homo sapiens
  MAP TO AC002060.2; EXPRESSED IN BRAIN, SIGNAL = 0.55; EXPRESSED IN ADULT LIVER, SIGNAL = 0.58; EXPRESSED IN LUNG, SIGNAL = 0.66; EXPRESSED IN BONE MARROW, SIGNAL = 0.63
cctgtcctggatgagaaaccacagagcaggtttcctttggatttcatggtgggaaaagagagttgctgagggagaagaattctcaaggctgtgcttcaggaagcccgttgcactgggtgaggaaacatcttcagagcaaaaagggagcctgagagcccagggcaggttttcgtctcagttccccaagaacttggaccactgtggttaagtggcactgcttgtatatgagcagcactaataatcagcctcgtcctcagcctggagtccagagatggtcatggaggccgtattgccagacttggagccagagaaacgatcagggacccttgagggctgagtattgacattgtagatcatgggtttggggactgtgcctgggtgctgttggtaccaggagacatagtcataactcccaacatcactgctggttccagtgcaggagatggtgactgactgtccaggagacccggacacggagggaggctgaatcagg

SEQ ID NO: 11263 - DNA, 480 bp, Homo sapiens
  MAP TO AC005384.1; EXPRESSED IN PLACENTA, SIGNAL = 0.77; EXPRESSED IN LUNG, SIGNAL = 0.71; EXPRESSED IN FETAL LIVER, SIGNAL = 0.73; EXPRESSED IN BRAIN, SIGNAL = 0.64; EXPRESSED IN ADULT LIVER, SIGNAL = 0.68; EXPRESSED IN BONE MARROW, SIGNAL = 0.66
ttgccaaacttttcagtaggcttgaaattggttcacaaaaatatttgaaaatcactgaggtagcagaacagataagatacacgtcaaggtcccaaacctacaaggggaggtcaccccatctctactcagagatgaccatctgagtggacatattgcagaatgaagaattccttagagtgcaccccaaaagatcttctcttatggacatatagagattgatgagtttcatgtcatagagcataattgtgatcattttatcttagaacatttttgtagtaagagaactatatacccaccttatccataggagcacaccattggaaggcccatggaatacaaggctgatgatcccacctacatgagctacttgccaaaactgatgccaagaggactgaatgaggtgaattgctgaagtggtttattagctataaagaaattattaatgagttttgattctggcaataattaaatagcaggggc

SEQ ID NO: 11264 - DNA, 449 bp, Homo sapiens
  MAP TO AC002090.1; EXPRESSED IN PLACENTA, SIGNAL = 0.95; EXPRESSED IN LUNG, SIGNAL = 0.76; EXPRESSED IN ADULT LIVER, SIGNAL = 0.57; EXPRESSED IN BRAIN, SIGNAL = 0.74; EXPRESSED IN BONE MARROW, SIGNAL = 0.73
agctgcaacattgtctcagaaggaaagagctagtttcattgtagccttccctggaaaatactagaagcttgttattgacttcgatgtcaatttgcaaaagacagatggagaaagaaggcatgggccttctcatttcatagattagagcgaatccctttgttatgttatcccatcttggacacaaacaggcacccaatcttataagttgacatttaaccttagtactttgacagactaacatacctccccagagaaggcctgtccattgaggaggtgctccgacccttggctgtcctcactcccaaagtgtagtcggatctcctccagccggtggctgtatgtcatgggccctccagatatgttgaccaagtgctccttgtccaggcgaagggatacgtgtcttccagtgttgtacatggtcccactgacctgcaaggcaattagcaaca

SEQ ID NO: 11265 - DNA, 480 bp, Homo sapiens
  MAP TO AC004513.1; EXPRESSED IN BRAIN, SIGNAL = 0.73; EXPRESSED IN ADULT LIVER, SIGNAL = 0.92; EXPRESSED IN BONE MARROW, SIGNAL = 0.73; EXPRESSED IN PLACENTA, SIGNAL = 0.8; EXPRESSED IN LUNG, SIGNAL = 0.73; EXPRESSED IN FETAL LIVER, SIGNAL = 0.68
ccctactaattaactccaagcaactcttgcttacctgtaaggatcagtaaatgcttaggaagagccagctactattggcactaatgaagtatgaaatagactaattttatcgtgtttctttgcctattttttctaccacacaggagcagacatgcagaaattgtgtctctcagatacacaaaaattaggtaatattctctctagtatttttccttttcaaatctcttgtaacaaaatacaaccagaagcagaagcaccacaaccaccatcgctgtcaccatcatcatcattatcctacacttctggagacttgcctcatccaatggtgtttccttccattatgttctctacattggtgttgacttgcgtttttctcctaaaacacaccaagagtttctctgtattcttaagatgaaagccaaactatcccatggcacgcaaagccccaaatagtcagactcttccacatttttccagcga

SEQ ID NO: 11266 - DNA, 442 bp, Homo sapiens
  MAP TO AC000004.1; EXPRESSED IN LUNG, SIGNAL = 1.3; EXPRESSED IN PLACENTA, SIGNAL = 1.2; EXPRESSED IN FETAL LIVER, SIGNAL =   1; EXPRESSED IN BRAIN, SIGNAL = 1.1; EXPRESSED IN BONE MARROW, SIGNAL =   1; EXPRESSED IN ADULT LIVER, SIGNAL = 1.4
caaagaaggcaaaaggatgcaatctgatgcatcagttttcctgtgctgattaagcattcctagtgtctgttgcctgatgggatcgtgcacacatttcatccgggaggatgctagtgggacctcatacacaaggcctatgtattgcatgaagtcatccagggattctgttcacacatgtaccatgctatgctacacaggagatgcttttcagtaagtggagctcataaacactgtcaggaccctcagtagctccatggaaacaaagacttttgaagaattggtgaggcttcctctgcaggaagacttctgccgcaacacacacaccagcagtcctagaaccacctgctcgccgatgatgctcatttccttcaaaccaaattgctaccattacaatgatgacaagaagaacagtgtctgaagttggacttgcaaatgaggtgga

SEQ ID NO: 11267 - DNA, 456 bp, Homo sapiens
  MAP TO AC005592.1; EXPRESSED IN LUNG, SIGNAL = 0.95; EXPRESSED IN BRAIN, SIGNAL = 1.5; EXPRESSED IN BONE MARROW, SIGNAL = 0.96; EXPRESSED IN PLACENTA, SIGNAL = 0.93; EXPRESSED IN FETAL LIVER, SIGNAL = 1.1; EXPRESSED IN ADULT LIVER, SIGNAL =   1
gccatgggatttaacacctggttaaagatccccagagctgggggcaaatttgctgttaggtagctatggtaggcagcctcaaacataatggtctcaatgacctcgcttcctaatattcatgcccttgtttaatcccttcccactgaatgtaggctgaacttgtggattcatttctaataactagaatacagcagaagtgacaggatgtcatttccatgattatattggttgaaattttaggtgtatgctctctttctctttagcctctttatttagcccagccaccaagtaaagaagtccaggctacctttctggagaagccacatggagaagagaggtcctggaggttgggaggccacatggagaactgaggcatcccagctgacagccagcaccaactgccagccatgtgagcgtgccttattggaagtagaccctacagccccaatcaaagct

SEQ ID NO: 11268 - DNA, 407 bp, Homo sapiens
  MAP TO AC002066.1; EXPRESSED IN LUNG, SIGNAL = 1.1; EXPRESSED IN ADULT LIVER, SIGNAL = 0.94; EXPRESSED IN PLACENTA, SIGNAL = 1.1; EXPRESSED IN FETAL LIVER, SIGNAL = 0.73; EXPRESSED IN BRAIN, SIGNAL = 0.87; EXPRESSED IN BONE MARROW, SIGNAL = 1.3
ttcacttgctaatcacctttggaataacaaagaaaatgtttaaatattttgtgacctataagaaaatgtcaaggcaatgatcatagcagctttttgctgatttttggcattgcttaaagcaattaagtgcaaaacacaatagaaaagtagagtttttcagtctctgtttttaaatttgagtctatggatgcctctaaaaatgagacattccatttataaattacccagtcttatggtgagtgatggggaatggcctcaacttacagcattctagaagaaaatttggaaaatgctgcctaatttcttcagttatctgcaaaagcaaatacttttctcgaaggatctttttcaatgagaaaacagtccctctgtggtagaatttcctctttttacatttgaaggtgaaa

SEQ ID NO: 11269 - DNA, 330 bp, Homo sapiens
  MAP TO AC005342.1; EXPRESSED IN PLACENTA, SIGNAL = 0.68; EXPRESSED IN BONE MARROW, SIGNAL = 0.83; EXPRESSED IN ADULT LIVER, SIGNAL = 0.9; EXPRESSED IN LUNG, SIGNAL = 0.83; EXPRESSED IN FETAL LIVER, SIGNAL = 0.89; EXPRESSED IN BRAIN, SIGNAL = 0.99
gtcccagagccccagaaccgagcctgcgcaatcttggggcctgcagccttggcctcagacggggcccaggttccgagtcccgcagctgccctcggcctctcccacgcggtgttggagggcgtgctaggattgcctccggtggagccccggccccgtttcctccacacgaccgggttcacacctgaacaccccccaggactgcgtcacggacatccccacgccaactcccacgccggactgcctcacggacatccccacgccaactcccacgccggactgcgtcacggacatccccacgccaactcccacgccggactgcgtcacggacat

SEQ ID NO: 11270 - DNA, 477 bp, Homo sapiens
  MAP TO AC005229.1; EXPRESSED IN PLACENTA, SIGNAL = 0.84; EXPRESSED IN LUNG, SIGNAL = 0.86; EXPRESSED IN BONE MARROW, SIGNAL = 0.8; EXPRESSED IN ADULT LIVER, SIGNAL = 0.83; EXPRESSED IN FETAL LIVER, SIGNAL = 0.76; EXPRESSED IN BRAIN, SIGNAL = 0.67
gccatatggtgagggtgaggtaatcattattactttacaatgaatgcccttaattactttttcagtagtaatattagtccttctgtttatttgagtacctaagagctgcaggcaacgtgatctgaattacatggaggacaagctccagctgactttccgtaaactcgcattaggattctaataggagacgacaggagcaggtggggataatgagctggcggaaggggctgcctatcacactgctcggtggcccctctttcacccccactttgcctcaggcattttctactcagctgtgaccttacttatggtgatgccaatccagtggtcaggagcgaggcgcccagcctgtgtctgaatcctcctactgaccctggggatccgtgcgacttgatcttagatattggtggtgaagcgccgctctccttgacagcatccaggaaaggtaattacctttgccaaaatgcaagtggaagt

SEQ ID NO: 11271 - DNA, 466 bp, Homo sapiens
  MAP TO AC002428.1; EXPRESSED IN PLACENTA, SIGNAL = 0.72; EXPRESSED IN LUNG, SIGNAL = 0.54; EXPRESSED IN BRAIN, SIGNAL = 1.1; EXPRESSED IN ADULT LIVER, SIGNAL = 0.44
gctttccaagcagttcatattttcaaatcttttacaattacctgaattttaataacagcatacaaatgatggaaactgcattttaagtttttcaattacggttcaagttctacacttcaatcgatgcaaataactgcagaaaaacaggaaacctctttggataaaatgatttgcaaaattcactgactgcctcaaaataaggctctagatatacaaaagcattgttaacgaaatgtaagtcatggtttccatttaatgcttatttttcttaccttaaagctgacatactgaagatgagcaaaatgctttttaatgatctgctgaatgagatcaggatgagtggacttaaaagatgaagtagctgactggttcagttcaaattcaaactttctccaaaggtcagaaatatgaaaaacttcattccacctcctacatacagaagatgcacaggcccgatctagtaaag

SEQ ID NO: 11272 - DNA, 449 bp, Homo sapiens
  MAP TO AC004738.1; EXPRESSED IN PLACENTA, SIGNAL = 0.6; EXPRESSED IN LUNG, SIGNAL = 0.51; EXPRESSED IN BRAIN, SIGNAL = 0.61; EXPRESSED IN BONE MARROW, SIGNAL = 0.57; EXPRESSED IN ADULT LIVER, SIGNAL = 0.55
ccaaatcccaaacctcagtcagttcatagacacagagtcatgtgagtgaaggtgagtctgggtacagctgaggataacccaataagttcatgctgtatattttccttctagccctcctgaaggagctacgcgatcgtttagcagaataaatgttcaccaagggaaaggaaatatccagatctttcagggatttgggggcactgtcactgagctaacatgtaataattcctggcgaccataaagacactctggtccttcaagcctgatgagggcttgtgaacatcagttgacatcatttctcaatgggtccagtaggtccatgagccatcctgttaattcctcagatcctgaatgtgagttgtaatagacatacttgttatctgacaagatcctcagttgttccactgacccatagaatgagggactctcgtgatataaacctatgaacg

SEQ ID NO: 11273 - DNA, 482 bp, Homo sapiens
  MAP TO AC005599.5; EXPRESSED IN PLACENTA, SIGNAL = 0.72; EXPRESSED IN BRAIN, SIGNAL = 0.88; EXPRESSED IN ADULT LIVER, SIGNAL = 0.68; EXPRESSED IN LUNG, SIGNAL = 0.47; EXPRESSED IN FETAL LIVER, SIGNAL = 0.87; EXPRESSED IN BONE MARROW, SIGNAL = 0.81
gcttggtaccaggtcctctggtgagaactcaacatgcgtcattcacataatcttcaaaagagccctctgggtcaacttctattattatgaaccctgttttcagaaagagaaagtggattggagagactttctcaaggtcacacagctagtaagtcatgggggcagacgttaacctagggttgtttaattcagaaaccgcacctttaaatagtgtgcaatatggtggcatgtacatgcatcttcttatttcaggcagacccccaaacgttacctgcatattcagattcctttataggccgggctggtaaaattttaatcgactgccatgtctcttccatccgaagctcagggtcatcatagtcatcatcactgtggccttttgctccatccaggactgcagcaaagtttctttcctaagcaggtggtaacattccagtgagtcaaaggaaggtacaatgttgacaaagacaggctacagtgct

SEQ ID NO: 11274 - DNA, 473 bp, Homo sapiens
  MAP TO AC004614.1; EXPRESSED IN BRAIN, SIGNAL = 0.75; EXPRESSED IN BONE MARROW, SIGNAL = 0.69; EXPRESSED IN ADULT LIVER, SIGNAL = 0.8; EXPRESSED IN PLACENTA, SIGNAL = 0.71; EXPRESSED IN LUNG, SIGNAL = 0.66; EXPRESSED IN FETAL LIVER, SIGNAL = 0.71
caaagggcagatctttgtggactgtgttaatgcccatcaggcagcatctgcattagaggcagaattgagtatctaggtagggaagaaattttgacctgtggatatcagctaacctcttgcttcagattggccattgtatcagggatgggtgctatgtatggacgcagtagttagtataagcttcttctcaccgaggctggtcaaactactacaattgctaaggaccaacctgtaagaagcagtcagccaatatcacacacttcctaacacaaatagaacagcaattcattcttagcaaaattgacacttacctgcatatgcatttgtcttctatggctacagtgccttctccagcatcataatcagaggacttgcagatgcctggtttcttggtcttgtattttatgtatgaataatattgctttattcaaaagaatatatcttatagtaaagggacatgacaagcagcaatg

SEQ ID NO: 11275 - DNA, 373 bp, Homo sapiens
  MAP TO AC002112.1; EXPRESSED IN LUNG, SIGNAL = 1.1; EXPRESSED IN BRAIN, SIGNAL = 1.5; EXPRESSED IN BONE MARROW, SIGNAL = 0.77; EXPRESSED IN PLACENTA, SIGNAL = 0.9; EXPRESSED IN FETAL LIVER, SIGNAL = 0.84; EXPRESSED IN ADULT LIVER, SIGNAL = 0.91
gaagtcggatccttgagctgcggcggcggcagccaactgctccatatttggcttctattacacatttacatactggagcgagcgagcgagcgagcgcgagagagcgcgagggagggagggagggcgggcgggcggagggaggagggaggggaggggagcgggaggagggggaggaggaggaggaggaggaggagagagcagagtataccgcagacatcatttctactacagtggcggagccgtacaggacctgtttcactgcagggggatccaaaacaagccccgtggagcagcagccagagcaacagcagccgcaagacattgtttctctccctctgcccccccttccccacgcaaccccagatccatttac

SEQ ID NO: 11276 - DNA, 452 bp, Homo sapiens
  MAP TO AC004744.1; EXPRESSED IN BRAIN, SIGNAL =   1; EXPRESSED IN BONE MARROW, SIGNAL = 1.2; EXPRESSED IN LUNG, SIGNAL = 0.84; EXPRESSED IN FETAL LIVER, SIGNAL = 1.5e+02; EXPRESSED IN ADULT LIVER, SIGNAL = 1.4; EXPRESSED IN PLACENTA, SIGNAL =   1
aaggcgtgatttttctcaccatttatctcatcccctctatttctctgtgaactgcaaccacatgctccagctctgcatttcacatgaagaatgaagcaatgaattctcgatagcctaaagcatgtgctgtggcatctgtggctttggagaggacaggtggtggaagtggaggagacaggtgaaggaaagccaggaggaagattcacaaatatcaacgatgagcctggatatgactgacccggattattcccgcacgttggattcatacctgctgtcttcctgagcaaagggctgttccacatccactgttagggaggccagggcagaaacggtctctgtctcctcttgcaactgagcaccagccagagcacagccccttggcacagccaccatccttactgacttccaatacttgcctaggaaaaacatccatcatacttcataagaattgt

SEQ ID NO: 11277 - DNA, 357 bp, Homo sapiens
  MAP TO AC004464.1; EXPRESSED IN BRAIN, SIGNAL = 1.4; EXPRESSED IN ADULT LIVER, SIGNAL = 1.5; EXPRESSED IN PLACENTA, SIGNAL = 1.4; EXPRESSED IN BONE MARROW, SIGNAL = 1.2; EXPRESSED IN LUNG, SIGNAL = 1.5; EXPRESSED IN FETAL LIVER, SIGNAL = 1.3
cgtcaagctcactcaagtccttaaaactttaatttggatacagcaataacctcctacataatctgccaccttcatctttttcacccttcaccttcacccctgtctatccttcccatctaccccgtaatttccagtgtctcgtatcaatctttagctccttatccctctctgaatgtaagtttcctcaattcagctgcattttatgttacatcttacacttctttgcattgcccctgggcctagtccagacctctgctcaccatatgggctatttgcgtactggctgactcagggctgatgtatccatcaggcacagcagacacagatttatagcccacaacatttctaggggcccat

SEQ ID NO: 11278 - DNA, 469 bp, Homo sapiens
  MAP TO AC003044.1; EXPRESSED IN PLACENTA, SIGNAL = 1.2; EXPRESSED IN LUNG, SIGNAL = 0.95; EXPRESSED IN FETAL LIVER, SIGNAL = 1.3; EXPRESSED IN BRAIN, SIGNAL = 1.2; EXPRESSED IN BONE MARROW, SIGNAL = 1.2; EXPRESSED IN ADULT LIVER, SIGNAL = 1.1
tccccacaatcaccatagaaggtagatattgttacatccagtcacaaatgttgaaactgaggttcagagagtttttaagaaacccggttttagaaacaagtatgtagacttctggtttcagttccaacacataagaacttggaagtcaccacttttatcctaacaacaagaaaaagctggacaaactgaaaatcaatgacttgtacttgtacaggacaaatgatcaccccaaaatctggagagacagagaatatagcagaggtctgcttacctggaacagaagcaactggagccatagactggcaagagcatgcaagtggtcactttgacaaattgttggaagttgccagtggagtagctggagagtgagaaactgctggggccaaagtttttgttgccactggaaacaagggtaagaattatagcagaattcttgtcagaaaccatgcaaaagtcaagtggggtgaaa

SEQ ID NO: 11279 - DNA, 466 bp, Homo sapiens
  MAP TO AC006116.1; EXPRESSED IN LUNG, SIGNAL = 0.67; EXPRESSED IN BRAIN, SIGNAL = 0.55; EXPRESSED IN ADULT LIVER, SIGNAL = 0.9; EXPRESSED IN FETAL LIVER, SIGNAL = 0.92; EXPRESSED IN BONE MARROW, SIGNAL = 0.71
ctgatagggtttctcgcctgtgtgagttcgctgatgttcaatcaactgtgagcttcgactaaaggccttctcacaatctttacattcatacggtttctcaccagtatgaactctctgatgttgtataaaatttgaaccagaattgaaggcctttccacattccttacattcatatggtttcttaccagaatgaatattctcatgttgaattagtcgtgagccatatttaaaggccttcccacattccttacatttatagggtttctcattagtataaattccttgatgattaataaggagttccttttgccagaagtcttttctacatttattatacccaaaaggtttttctctagtatgaattttctgataaaaagtaagggatgcatgctggtcaaaagtgggcatttcttcatgtctgatgatcatctgatggaaatgtctgtctggatttccctgttgtctg

SEQ ID NO: 11280 - DNA, 386 bp, Homo sapiens
  MAP TO AC004686.1; EXPRESSED IN PLACENTA, SIGNAL = 0.93; EXPRESSED IN BRAIN, SIGNAL =   1; EXPRESSED IN ADULT LIVER, SIGNAL =   1; EXPRESSED IN LUNG, SIGNAL = 1.1; EXPRESSED IN FETAL LIVER, SIGNAL =   1; EXPRESSED IN BONE MARROW, SIGNAL = 1.1
gactttgcctggtacagttgtctatttatgtattctatgaaccttgactgagtacctattatgtgccaggcttttacatgtgtggtggtatgaaaagaagggaaaactgaacttctgtacatccctcaaacataccagctaagtggtcatgatcacatcctttgctgatagctgacaaagactgaagatgactgctggaaccagggcataaaaatcaatctattcaagacagacaacagctctcatttcaaaaatattgcctacctttccatagccccctttaccaagtacccgaagtagctcaaaacattctggtctgattttttctggccctctgttcacactagtttctgagatttcaaatttctcacaatgttccatgccac

SEQ ID NO: 11281 - DNA, 468 bp, Homo sapiens
  MAP TO AC005297.1; EXPRESSED IN PLACENTA, SIGNAL = 0.77; EXPRESSED IN BONE MARROW, SIGNAL = 0.92; EXPRESSED IN ADULT LIVER, SIGNAL = 0.88; EXPRESSED IN FETAL LIVER, SIGNAL = 0.83; EXPRESSED IN LUNG, SIGNAL = 0.9; EXPRESSED IN BRAIN, SIGNAL = 0.9
tgatcaaccaagaataagaaaatgctttcttttaccatcatttattttgtaacactcttcctgcctgcatgtagatctgagtttctgatatatataattttccttctctctgacaaacttcttttaacctttcttgcaaggcatgtctactggtgataatgtccctcaggttttgatttttatttgagagagttttttctcccccttcattttgaagattatttttactgaatataaaattctaggcttttttattttaaaagtttatgtctttaactcaactctcttctgtctcatttttctgtttacccaccattcttgcatgttgtgcactttttccattatagtccttagcatattaatcataattattttaaattcctggtctgataattccaaaatgtctgccatatctaagtctggttctgatgattgatctatctcttcaaactgtgtattttgtctttt

SEQ ID NO: 11282 - DNA, 497 bp, Homo sapiens
  MAP TO AC006013.2; EXPRESSED IN LUNG, SIGNAL = 0.83; EXPRESSED IN FETAL LIVER, SIGNAL = 0.77; EXPRESSED IN BRAIN, SIGNAL = 0.72; EXPRESSED IN BONE MARROW, SIGNAL = 0.86; EXPRESSED IN ADULT LIVER, SIGNAL = 0.61
cccaattgtaagcaaatgtgagtgttctgagtacatttaagggaggccaggctaagctatgattcagtaggttaggtgtattaaatgcatttttgacataccatactttcaccttatggtgggtttgttgggacataactctatcatacattgagaagcatctgtgtgtgtgtgtgtatatatgtgtatatatatatgtgtatatgtgtatatatatgtgtatatatatatgtgtgtgtatatatatatatatgtagtagaattggctcacacaagctgagaagacctacgatttgctctcttcaagttggagacccagagaagaccatgtcatcattcagtaagagttcagaggcctctgagaaccgggggagttgatggtgtgaatgccagtctgagaaccggagaagatgagatgagacgttccaacttaagaggtgaggcagaaacaagaggtgactgtcttcttcctctgctgccttttgttctgttctggc

SEQ ID NO: 11283 - DNA, 474 bp, Homo sapiens
  MAP TO AC004467.1; EXPRESSED IN BRAIN, SIGNAL = 0.9; EXPRESSED IN LUNG, SIGNAL = 1.2; EXPRESSED IN BONE MARROW, SIGNAL = 1.1; EXPRESSED IN ADULT LIVER, SIGNAL = 0.86; EXPRESSED IN PLACENTA, SIGNAL = 1.8; EXPRESSED IN FETAL LIVER, SIGNAL = 2.4
atgtttcccatcgcttgttcttccatttggaaaatgttgtctattgttgaaattgtaactgccattagcttgaggaaatcttgtagaggttttctaactttttcaaaaggcatcttttttcttttaatttacaaacagaacaattaaagaaatcaagcagtagtatttcaagtgtgataaagagtcatgagcaaaagtatgtattggttagcatctgggggcagctgggttttttggctatctgtactttatgttcacggctctgtgtcacttgcagggtgccatgtcagtggattctatcaccgatcttgatgacaatcagtctcgactactagaagctttacaactttccttgcctgctgaggctcaaagtaaaaaggaaaaagccagagataagaaactcagtctgaatcctatttacagacaggtccctaggctggtggacagctgctgtcagcacctagaaaaacatgg

SEQ ID NO: 11284 - DNA, 474 bp, Homo sapiens
  MAP TO AC003065.1; EXPRESSED IN LUNG, SIGNAL = 0.53; EXPRESSED IN BRAIN, SIGNAL = 0.66; EXPRESSED IN BONE MARROW, SIGNAL = 0.59; EXPRESSED IN ADULT LIVER, SIGNAL = 0.52
tgggtctctaaattggtggcagtgggtgtagatgcgcctgtgcacatctgtgtgctggtgtgttcttaggggtctgtctgcattgcacgtgtgcatatgtgtatacctgtgtttgcgctcatttatgtttgttgagaaaaggcagccaatgtaggtgcccaaaataggaagggcttcaagatgagatgtgatagatgcagatgcagaggagcaaacaactctgaaagccatttttacctccttctttttcttcttctcctcctcctcctcctcctcctcctccttcacctcctcctccttctcctcctcctcctccttctcctcctcctccttctcctcctcctccttctcctcctcctccttctcctcctccttctcctcctcctccttctcctcctcctccttctcctcctcctccttctccttctcctcctcctcctcctcctcctcctcccctcctcctccacctgtttc

SEQ ID NO: 11285 - DNA, 473 bp, Homo sapiens
  MAP TO AC002079.1; EXPRESSED IN LUNG, SIGNAL = 0.95; EXPRESSED IN PLACENTA, SIGNAL = 0.76; EXPRESSED IN FETAL LIVER, SIGNAL = 0.8; EXPRESSED IN BRAIN, SIGNAL = 0.75; EXPRESSED IN BONE MARROW, SIGNAL = 0.85; EXPRESSED IN ADULT LIVER, SIGNAL = 0.82
cagtgagtgccacaggacacctaggcaggccctatccctgtccttcaaaaactgacgtcagctggaagactccctgatggaccttcccaaatattccttagactgtacagcagcccagcacacttctgcctaccctaactcccttttcctgaactcaaagtcagactttggtggaggtctgatggctctccctgctattctagcatgctcccattttctgtcacacacatgttttccctaacataatccctgcatgcttagctctaccttaatgttcgcttctaggaggacccagatcagcataagaggcatttagctttgaaggaagtcagtggctgcaagttgagtccctggcaccagtgtagcagtggttacagagaagtcaaggtcttgatatcagtgcttggtgagggctatggtagacatttctttatcagggaagttctaacatatgggttggagcattttcccta

SEQ ID NO: 11286 - DNA, 461 bp, Homo sapiens
  MAP TO AC005325.1; EXPRESSED IN PLACENTA, SIGNAL = 1.3; EXPRESSED IN LUNG, SIGNAL = 1.1; EXPRESSED IN FETAL LIVER, SIGNAL = 1.3; EXPRESSED IN BONE MARROW, SIGNAL = 1.2; EXPRESSED IN ADULT LIVER, SIGNAL =   1; EXPRESSED IN BRAIN, SIGNAL = 1.3
gggagaagacctgagcaaggcttatgagttgagtcccagagccaatgtcagatcatgtctaaggaatcacctcaccggccaaatctggcagtctgtgtgcaagaatgagcatcacaaaaggggtcataggtagggagacaaggtgattggcaagtctgggaacaggctaaggagacggggtctcagtcaacatgggagattgtttctgttgagccaaggatagaggtggatcacatgggcaggaaagctcctcttaaggggccaggctgggaaggactgctgcatgttgctttcctcatgcccactggactctgatgataaatcttgacgatctcatcaaggtcatggtcttcattatagtcatgatcatcattatcatcatgaacaaaggcatcctaaaatgagggagagcaatgaagttctttgaaggactaggagacccctgggggcaatcttaccac

SEQ ID NO: 11287 - DNA, 442 bp, Homo sapiens
  MAP TO AB013139.1; EXPRESSED IN BRAIN, SIGNAL = 0.68; EXPRESSED IN BONE MARROW, SIGNAL = 0.7; EXPRESSED IN PLACENTA, SIGNAL = 0.6; EXPRESSED IN LUNG, SIGNAL = 0.67; EXPRESSED IN ADULT LIVER, SIGNAL =   1
aaaataaaaactccaaatgaaaagtgttaaattatttttaatacataaatcccatgacatgtccagatctgtatatagtaatagctataaaagaagggcaaaaacagatgggtttagaacagagttactgctctcacttttatttgtagaatataaacatctttggcacttatgcatgatttaccatctttgctttttaatctttttaaaaaaatggtcatttttgtttgttaatatgatttactgtactacttttattattcaataggtcacatatcctggagcaggaaaacttccacacatcattggaggatcagatctaatagctcatcatgctcgaaagaatacagaactagaagagtggctaaggcaggaaatggaggttagtaggaagtgaggcccagaaacttgcttaaattgcactttggtccattatggtggc

SEQ ID NO: 11288 - DNA, 394 bp, Homo sapiens
  MAP TO AC005536.2; EXPRESSED IN PLACENTA, SIGNAL = 0.88; EXPRESSED IN LUNG, SIGNAL = 0.77; EXPRESSED IN FETAL LIVER, SIGNAL = 0.74; EXPRESSED IN ADULT LIVER, SIGNAL = 0.68; EXPRESSED IN BRAIN, SIGNAL = 0.93; EXPRESSED IN BONE MARROW, SIGNAL = 0.8
tcagattgttgactgctggcataaagaaatgccagtaatttatgtatgaccatttcaattgatggtggaaaagtattcaatgaaatttagcacctcttcatgattaaaaactcaaaaaactgggcatagaaggaacatgcctcaacatgataaaagccatatatatgacagacccacatataatatactgagtgagaaaaaactgaaagacttttccctaaaatctggaacaaaatcatgactttcactactgtaattaacacagtactagaattcctagctaaagcacttcaacaagaggaagaaatagagcacccaattggaatgaaagaagtcaaattatcctcatttgctgactatatggtcttagatgtagaaaaacctaaagattcca

SEQ ID NO: 11289 - DNA, 474 bp, Homo sapiens
  MAP TO AC005495.1; EXPRESSED IN PLACENTA, SIGNAL = 0.75; EXPRESSED IN LUNG, SIGNAL = 0.74; EXPRESSED IN FETAL LIVER, SIGNAL = 0.93; EXPRESSED IN BONE MARROW, SIGNAL = 0.64; EXPRESSED IN BRAIN, SIGNAL = 0.81; EXPRESSED IN ADULT LIVER, SIGNAL = 0.97
ggttcactttgaattaaaataagtttcatgatatctataggtatatttatcctgtaactagaaattaaaaaatgacctttttataactatcataatttacagctatcagtatattttcatatatcataaagaatatatgaaaaagtaataaacattttctataaaaatcattgtccacagaaatgcttgttatgaaattttaaaaatatgaaatgcaaacctttcctctaagtaacaaaaggaatctaaagacaattattttaccgacttatgacttctttcatgtcacttgcactcattcctttgacagctccataaatttcaaaatgttcctgcaatgtagtatctggccacaaagggtttatctgaggacagtaacccatacacttcagtgaatcatcatcttcacttgtctctgaagaataatctcctaaaaatacctatagaaacacaaaccaatttttattattttgc

SEQ ID NO: 11290 - DNA, 491 bp, Homo sapiens
  MAP TO AC006239.5; EXPRESSED IN ADULT LIVER, SIGNAL = 0.57; EXPRESSED IN LUNG, SIGNAL = 0.67; EXPRESSED IN BRAIN, SIGNAL = 0.55; EXPRESSED IN BONE MARROW, SIGNAL = 0.55
cctgcatgatggattctagaggaagaaactaatgtaaagatatcaggagagaaaataataatgaaagagaagagcggaatgccagaccatagccattctgtaaagattatatagctacattgaggcaaccaagaaaataatgttaagctgatattttcagacaaaataaaggcaggtataagttgataaaattattctgttcttatatcaaccctgataggtgacttttactgtcttcattttactgatgtggtaattgaagttcatagacagacctgaggtcacagaagtcaggaatggtggagatgtgctacgagctgcattctttttgctacatgacagctgcctctcactcatatccacatagtggacacaatgtgtgtgattcatggtcacatgttttgttttgattttatcccaatacacgatttagtatttgacaaagttacttttgcaaatcttaataaaacaaacgtaaggggtcattttaa

SEQ ID NO: 11291 - DNA, 453 bp, Homo sapiens
  MAP TO AC002299.1; EXPRESSED IN LUNG, SIGNAL = 0.66; EXPRESSED IN FETAL LIVER, SIGNAL = 0.71; EXPRESSED IN BONE MARROW, SIGNAL = 0.84; EXPRESSED IN PLACENTA, SIGNAL = 0.65; EXPRESSED IN BRAIN, SIGNAL = 0.57; EXPRESSED IN ADULT LIVER, SIGNAL = 0.67
ttaatcttggtatgggaagagcagtgtaaaagtcagaaatccatttttaaccaacacagaccagagttgacatcttatcagcccatctcattttgtgcactgcttcagctatggatgttaataaaattaaatttctcactaaacaagtgtgatgccaaagaaccttccacaagttctgcagctgtcactgcttggtgcttaaacatgttggacagtattaatgcaaaaactgctttttctttttcagtaagagatgctaaaaaccttgtacctatggaccccaatggcctgtcagatccctacgtaaaactgaaactgattcccgatcccaaaagtgagagcaaacagaagaccaaaaccatcaaatgctccctcaaccctgagtggaatgagacatttagattgtaagtggaaatgactgcagtgagcatgggtggtggaggttgggttatg

SEQ ID NO: 11292 - DNA, 456 bp, Homo sapiens
  MAP TO AC005342.1; EXPRESSED IN LUNG, SIGNAL = 0.84; EXPRESSED IN BRAIN, SIGNAL = 1.1; EXPRESSED IN BONE MARROW, SIGNAL = 1.2; EXPRESSED IN PLACENTA, SIGNAL = 0.73; EXPRESSED IN FETAL LIVER, SIGNAL = 0.94; EXPRESSED IN ADULT LIVER, SIGNAL = 0.76
ccaggcagcaacacaattcgcccagggccatggggactgcgggtaggtgcaaggctgagatttacagcctggcagttctgatgtccccaaaccatattctggtcccttaccccaaacttcctacatcaggcctctgtgtctcgggtagccataattttggaacactcaattaaaatgcatctgaaagcaagaatggctctaataggaaagcagatttgaatgggggccatccttctagggtccctgctggtgatcccatccatggcagcaggagaagcttttttctccctggacacccgtgggagggtcaccttacagtctggccagttatacttctcaaacaccggctcgtagtcctccacggcgccgtcgctgatgagcatgatggcctggttgcagaggcttccttgcttggcctcttggaactgtgtagggaagaggagtgcccatgaccac

SEQ ID NO: 11293 - DNA, 452 bp, Homo sapiens
  MAP TO AC003669.1; EXPRESSED IN PLACENTA, SIGNAL = 0.93; EXPRESSED IN LUNG, SIGNAL =   1; EXPRESSED IN BRAIN, SIGNAL = 1.1; EXPRESSED IN BONE MARROW, SIGNAL = 0.89; EXPRESSED IN ADULT LIVER, SIGNAL = 0.81; EXPRESSED IN FETAL LIVER, SIGNAL = 0.87
aggtggtctggagaatggggcaaagatgatgaatttattatccacagtgggaggagtcaaaagtataaagtgctttttaaaaatcaacatatttataaaacccaaagcaaaggcagcagaaaaactgtagctattgtgtaatttattctataatcctacatcagtctcatttattaaaatcagcatttatattatcccttaataggaaatcgttgaggaaaagatatgaaggttaaagagaacttacctagatgctgcaaatactcattttaattatttattttgtttaggatgataatatggatacaaaatctattctagaagaacttcttctcaaaagatcacagcaaaagaagaaaatgtcaccaaataattacaaagaacggctttttgttttgaccaaaacaaacctttcctactatgaatatgacaaaatggtgagacatcatgtg

SEQ ID NO: 11294 - DNA, 451 bp, Homo sapiens
  MAP TO AC004413.1; EXPRESSED IN PLACENTA, SIGNAL = 0.67; EXPRESSED IN LUNG, SIGNAL = 0.58; EXPRESSED IN BRAIN, SIGNAL = 0.6; EXPRESSED IN ADULT LIVER, SIGNAL = 0.66
gacctcctgtacctccagtttagaatagaatctcaatatcagctatttttgggggactttagatttccctctatttccttccaaatggtgttagagtttcacagaattctcccgttggtttttcaagaaatagctctcttccatatttaaagtactaataattgttttctgcatcaattctgcctaccctatggacaatataccttttgctcctttcaaaacatggagactctttcactattgaccactgaggacaatctgcatcattctgcataactgtcaaagtaactgttttgttgatgctggtgagtctactgatgtctatgacaaagttgtcagtgttaaagcccaagatattgttgcctgagctaagggcaatgacgcccatgaacagcacatttagcacctcactttccatgtcatcagtagtggcattaccacctcactcatt

SEQ ID NO: 11295 - DNA, 484 bp, Homo sapiens
  MAP TO AC004687.1; EXPRESSED IN BONE MARROW, SIGNAL =   1; EXPRESSED IN FETAL LIVER, SIGNAL = 0.99; EXPRESSED IN BRAIN, SIGNAL = 0.94; EXPRESSED IN ADULT LIVER, SIGNAL =   1; EXPRESSED IN PLACENTA, SIGNAL = 0.83; EXPRESSED IN LUNG, SIGNAL = 0.99
ttcctgattttgttttacagtgaacatatgttctggaattctttattcatctgggcccttctgctagtcctggaccactgctagggacagcaatggctcagtgtgcatttttccagaaagatgacaagaagggggcagtggtaaagcttccctggataatccccttgtccttgggcccttctgttcccaggctagactcacctgccaggaagcagggcacacgggcagtggtgttgatgaactcacaggggcttggcttcttgctgtcatagggcaggtagggtagtccatggtctgagacctcctggttgacagccatgaggcccagggggctgctgaggttgcggaggcggctggccaggcttggctcggagctgtacacaaagctggcatccaggaaggaggtcagagcgttgatctgctctcgggccagggacttgtagggtggagtggggcagacgaacccagctcggaagaaaggcat

SEQ ID NO: 11296 - DNA, 459 bp, Homo sapiens
  MAP TO AC005663.1; EXPRESSED IN LUNG, SIGNAL = 0.71; EXPRESSED IN PLACENTA, SIGNAL = 0.74; EXPRESSED IN FETAL LIVER, SIGNAL = 0.82; EXPRESSED IN BRAIN, SIGNAL = 0.75; EXPRESSED IN BONE MARROW, SIGNAL = 0.82; EXPRESSED IN ADULT LIVER, SIGNAL = 0.74
ttgcagaagcagtcagatggccacacgcccatcctctccaggcggaaaatgcttacccctctccattctgtcaactggcctcacggccaccgggatagcagttgggcaagtaggttacagggcgggtggggcaggtgacgcaaaacctggctgccagggcgggtccaaccccaaccggaaggaggctgggccagggcaccacaggtgggaagatgctgatgagctcctccctgtgctgtgtgctctgcagctgtgatctcatctcaagagtcccaggtcacatggcagggatgggcaaggtgagcctggaggggctcatggtggggcacctgctggttgggctagaggtgaagaagcagtgagctggccaccccgagcaggcacacgtgggatgctgggatcaagtgggcctgctggaccctgcacccacggcctggcagcccctgagagagtcaggat

SEQ ID NO: 11297 - DNA, 462 bp, Homo sapiens
  MAP TO AC005703.1; EXPRESSED IN BRAIN, SIGNAL = 0.91; EXPRESSED IN BONE MARROW, SIGNAL = 0.7; EXPRESSED IN PLACENTA, SIGNAL = 0.76; EXPRESSED IN LUNG, SIGNAL = 0.7; EXPRESSED IN FETAL LIVER, SIGNAL = 0.72; EXPRESSED IN ADULT LIVER, SIGNAL = 0.77
tggcatcatggaacgtgtaggttgtactttaacgacaacttacgcccaccctagaccaacaccaaccaactttctaccagccatcagtaccatggcctcaagctacagggaccgctttccccactccaatttgacccatagcctgagccttccttggagacccagcacatactacaaagtcgcctccaattccccaagcgtggccccgtactgcaccagatcacagagggtgtccgagaataccatgcttccctttgtttccaacagaaccactttcttcacaagatacacaccggatgactggtacaggtccaatttaaccaactatcaagagtccaacacttcccgacataattcggagaaactaagagtggatacatctcgcctgattcaagacaaatatcaacaaacaagaaaaactcaggcagacacaacccaaaatctgggagaacgtgtcaatga

SEQ ID NO: 11298 - DNA, 465 bp, Homo sapiens
  MAP TO AC006500.4; EXPRESSED IN PLACENTA, SIGNAL = 0.59; EXPRESSED IN LUNG, SIGNAL = 0.7; EXPRESSED IN BRAIN, SIGNAL = 0.71; EXPRESSED IN BONE MARROW, SIGNAL = 0.63; EXPRESSED IN ADULT LIVER, SIGNAL = 0.69
tgcagagcattatctttgaggtggagagatcagttaggaaattatttcataatctaaggcagtggtgatgagagtttggatgcagttagaggccacagtggcatagaggaggaagcatattgaataaatatctctaatataaaatattacattggtgttatgcacaactaagtcttgcagatgtggtaaaacatggtcctccttctaggtggaaggctgtggccaatatgagaagagtaaggaagcagagaccagggaggggacagaaaagactaacccttggcctgcttgtcagtttggccctcttcactgcagagagcttggattttgttgaacacagaggaaccctttcctctttccagctgagcacatctggttttggcgttgaaaggatctgaggtgtcaggtttaaatgccttatctgaccagctaaagaggagaaaggatgggaagcatgtcaacact

SEQ ID NO: 11299 - DNA, 465 bp, Homo sapiens
  MAP TO AC005343.1; EXPRESSED IN PLACENTA, SIGNAL = 1.8; EXPRESSED IN LUNG, SIGNAL = 0.7; EXPRESSED IN FETAL LIVER, SIGNAL = 0.79; EXPRESSED IN BRAIN, SIGNAL = 1.8; EXPRESSED IN ADULT LIVER, SIGNAL = 3.7; EXPRESSED IN BONE MARROW, SIGNAL = 0.78
caagagttatcataccacatagggctaatgtatgtaatgaggtaatccgtgcaaagcactctgtaccatgctgagcaccaaggaagtgctcactaaatgttagttattattgtacttattgtccagagaaagctcaatagggagttaggaccaggatacaactctcctgactttgtgtctaaaactttttctattgcatcactctgcaggatgccaataactcatgagcagatacctacacactcagtcaccccgacatacttacccagatgtcacatttgccagggaaaaagcgttcggggatccgggcagcatacagggcagctcctgtgatgtagaggctggccatcagcatcaaccagcctatctgccctatggtggcggccttaaggaacccctccgagatgacatagtgcaaggtaggaatgattccactcaggcctaggcccaaaaacactcctagga

SEQ ID NO: 11300 - DNA, 406 bp, Homo sapiens
  MAP TO AC006515.7; EXPRESSED IN BRAIN, SIGNAL = 0.65; EXPRESSED IN ADULT LIVER, SIGNAL = 0.7; EXPRESSED IN LUNG, SIGNAL = 0.7; EXPRESSED IN BONE MARROW, SIGNAL = 0.67; EXPRESSED IN PLACENTA, SIGNAL = 0.78; EXPRESSED IN FETAL LIVER, SIGNAL = 0.75
tgtgctgaccacaacaaagctatgtctgatctactgtgcatgttaaaatgaaaaaaaaatttgtgatccgaatcctaagtatggctagtgtgacttttgtttccctttttcatgaagataaacatggaacaatacttgtctaggaaaacacccatgtataggttgacaaccactttttattttctaactcaactaaagttaggtcatcccaagcagaacttgaataaatctattctagacacaaatcccttagcttcttgattctctgatgggtcattgcttggaatgagaaaattcttacctcagaaaattcttggctggcattcttggagtttctgatttttacataaggttctaaatattctgtggactcttctatacagtgcgtctctgcttctggttcatc

SEQ ID NO: 11301 - DNA, 490 bp, Homo sapiens
  MAP TO AC005352.1; EXPRESSED IN LUNG, SIGNAL = 0.49; EXPRESSED IN BRAIN, SIGNAL = 0.59; EXPRESSED IN BONE MARROW, SIGNAL = 0.55; EXPRESSED IN ADULT LIVER, SIGNAL = 0.43
gaaaatacataaagccaaaagtacaagaattataagatctcttgatgctattattcagagatcctatgtataagttctggtgtatatccttccaaatatttcttttggtgtatacttacataaactgtagctggtatattgcaagctttaacagtctataattaaaaactaggcttgtatgaatatttgacacccagattatttccaattgttgtgtagtctatctatcctgatctccaacaggtatctatcaccttctttcctccctgccctggctcctctgggtccatgtttactattgcggttcctgaaggaacctcatcatcaccattgttgatggtgtcccctacctgtgtgaaggttctcatggggcttagaaggctggcaaatatcttgcaggcctcgaaacagcattgccatgtgccatgactctcctttagcttcttagagctcagttccctatcagcaatcctgcaaacaaacacgaatg

SEQ ID NO: 11302 - DNA, 466 bp, Homo sapiens
  MAP TO AC004505.1; EXPRESSED IN LUNG, SIGNAL = 0.78; EXPRESSED IN BONE MARROW, SIGNAL = 0.55; EXPRESSED IN PLACENTA, SIGNAL = 0.68; EXPRESSED IN BRAIN, SIGNAL = 0.56; EXPRESSED IN ADULT LIVER, SIGNAL = 0.65
tgtctcacacgatcattcttcagatcagttttctagaatgattttgacccatactcgggagtcaacacactctttgcacctttgctttttagagttctctggaaacaggaatcagaacaggagcattttgtcttcactgaaacctctagaaacgggctgaaggggcttgaccctgagctggatggcattagtttgggaagcatcgattggctatgaaagctcagtaaattgtaatgaatgagccccaaagtgacttccatcaattttttcttccaatagccccaccccctagaggagcagctaacccagtacgtcacctttgccctgggtcagtacgtcacctttgccctgggtcacttagtacaacttttccaacagatcctccagcaatgccaccttgccattggcttcacgctcacagagagcaaaagcagccatgttttatatcaacaattggccctctgtc

SEQ ID NO: 11303 - DNA, 468 bp, Homo sapiens
  MAP TO AC002092.1; EXPRESSED IN LUNG, SIGNAL = 0.64; EXPRESSED IN FETAL LIVER, SIGNAL = 0.99; EXPRESSED IN BONE MARROW, SIGNAL = 0.58; EXPRESSED IN BRAIN, SIGNAL = 0.67; EXPRESSED IN ADULT LIVER, SIGNAL = 0.65
  unsure 242
gagaccagagtcagcatcccttggagactccttaggagtggacatttttcagccccaccctacaccttctgaatcagacactctgggagtagcaatgtgggtctgacgagcccgccaggtgattctcatacaccctcaagtttaaggattgcgggactggagtcactatttcagctggagtttcactgggtggccatggtggttgaccagcagttgtgggagtgagatgaacgacatggccntcattcatccgttcctggggatttagatactgtctttgtgccagctgtcccacctgcgttgcctcggcccgggactgccctctgagctccagacactcagacccgatgtatctgtccctggggtgctggtttccttgtgcatggcagtgctgtctggtggcctcaggtcggaaatcaggggccgtgctgatgtcttcctctaagccctcacttccagcctgttggt

SEQ ID NO: 11304 - DNA, 480 bp, Homo sapiens
  MAP TO AC003683.1; EXPRESSED IN FETAL LIVER, SIGNAL = 2.2; EXPRESSED IN BRAIN, SIGNAL = 1.3; EXPRESSED IN BONE MARROW, SIGNAL = 1.8; EXPRESSED IN ADULT LIVER, SIGNAL = 1.4; EXPRESSED IN PLACENTA, SIGNAL = 1.3; EXPRESSED IN LUNG, SIGNAL = 1.3
tgctttatggttttggtccagtgactctttagatcacacattctcacactattattatcactattattccacagtaattatttctattactggttcagttggagaagagttgaattggttacgtagggtgaacattttgtgcaatcttccaaatccatctgcagtagtcttttttttttttttttttaaacaacgtgggataatggaattggaaatataaattcaggctggactttaaatgatcatttcctccttctaggaaagtttacctgcattgaggtcaagtttcatctggaacgccaaatgggatattatttgatccagatgtacatcccaagcctgcttatagtaattttgtcctgggtttccttttggataaatatggatgcagcccctgccagggtcgcactgggcatcaccacagtcttaacgatgaccacccagagttcaggctccagggcatctctgccaaaggtaaga

SEQ ID NO: 11305 - DNA, 486 bp, Homo sapiens
  MAP TO AC005858.1; EXPRESSED IN PLACENTA, SIGNAL = 0.95; EXPRESSED IN LUNG, SIGNAL = 0.93; EXPRESSED IN FETAL LIVER, SIGNAL = 1.1; EXPRESSED IN ADULT LIVER, SIGNAL = 0.78; EXPRESSED IN BRAIN, SIGNAL = 0.93; EXPRESSED IN BONE MARROW, SIGNAL =   1
ccactccacccttaaaaataagctcagaaaacaaaaaaggcagaatatgagtaaggaccctgcaacactattggcacaagccttatttacccttaatttcttcaatttagatgataaatttcaattaggtatagaaaagcgctttgcaaaaatcactcaagatataaaaccttcagttttatggaaggatgtaaatagtaatatatggtgtggtccaaatgatttgctaatgtgggaaagaggatatgcttgtgttcacaccccgtcaggtcctctttggattccagcacgaggcatcaaaccataccatggcatggctaggacccaacccggtaccaaaatgaagaaaatgaccctacaggacccacaatcccggatgatgtggcttccttggatgacacaggccctggacattacctgggggatgctgaagaagacaactcaggaggccaagcaaatcctgctccaggcacagacaccattcac

SEQ ID NO: 11306 - DNA, 455 bp, Homo sapiens
  MAP TO AC003042.1; EXPRESSED IN PLACENTA, SIGNAL = 1.3; EXPRESSED IN LUNG, SIGNAL = 1.3; EXPRESSED IN FETAL LIVER, SIGNAL = 1.3; EXPRESSED IN BONE MARROW, SIGNAL = 1.3; EXPRESSED IN BRAIN, SIGNAL = 1.1; EXPRESSED IN ADULT LIVER, SIGNAL = 1.2
aaaaagcctgcctcccttcaagcaagaactagcagaggactgaaccaaacaccagagaacagtttttccctattttcagtcaattaagaaatgcatactttaaagagaagcaaaatctttacaggcatactttaatttatacatatatcatatgtactgaggcagaaggtgatgaaaataaactttcagtaataaaatgaagcaaagcgctagatagcccattctagcaaattacatactcataccctcctgcgaactctggctcagcacgacccaaaagatgtgcaatgaagtctgtttcacagcaaacatgtatgtgtcgttcatgtggacagcaccgcaagccttcataaagtgcagcacagtagcccttttctttgctgcagtcaagttcaccaataaggatattgtatgctcggaggactttatttttgcaatcagtgcaaaacctgttg

SEQ ID NO: 11307 - DNA, 499 bp, Homo sapiens
  MAP TO AC003049.1; EXPRESSED IN PLACENTA, SIGNAL = 1.1; EXPRESSED IN FETAL LIVER, SIGNAL = 1.1; EXPRESSED IN BRAIN, SIGNAL = 1.1; EXPRESSED IN BONE MARROW, SIGNAL = 1.1; EXPRESSED IN LUNG, SIGNAL = 1.1; EXPRESSED IN ADULT LIVER, SIGNAL = 1.1
tctgactgcaagcaagatgccccatgctgtgtcccttatacaagacacagccctgcacgactgttgcttggcagccctgtgaacatcccatcatggccagaatttttttccagcaattcaggtgtgcaataaatgtcacagtactttatttgtctaaaatcaaattaaatctgactctaatccccccatttccccaggctggagggaaattcaatcattattgaagctctcctcccacagtttcaacagtttcctggagggtcttaggaaataaaaggagtaagtcctttagatggatgctgatgcccaggtctgtgcatgttggggagaggagacacaagaagggtaacattcccagaaaagtttggaggaccagcaccacagaccatggggccagcatgagctgtgtcaaaggccaggactgtactgtgaggttggaggagggacctatgctttgtttaaggtgatgagttcattctcatattcttgccctgaaaca

SEQ ID NO: 11308 - DNA, 456 bp, Homo sapiens
  MAP TO AC004825.2; EXPRESSED IN ADULT LIVER, SIGNAL = 0.67; EXPRESSED IN PLACENTA, SIGNAL = 0.68; EXPRESSED IN BRAIN, SIGNAL = 0.65; EXPRESSED IN LUNG, SIGNAL = 0.72; EXPRESSED IN BONE MARROW, SIGNAL = 0.73
gaagatagcgcaagctagaagctaaatttcctaaggctattcacaactgtcataatcaaaactatacacccaaagatgagtctgtggtaatgctcaacaaatctgtaattaatcaatgtgaaaagtaacttaaaaagaatattaataaaagatgttattaataagcaattaaaaataataatcagaaagatatgacaaaacatcagccgacttaaagacacgagaataacggagaccaccatcaggaggagggaaaaaggcaaaataaaacagcgcaggttcctacctggttgcttggatctagaccggcataagaatttctggaactgcaaccaactgggggtgtggcctctcggatgaactcagacatttcaatccctccaccaggatcactgtggagaaaaaaatgagaaaaagagtaactgtcattattctgactccaatgcttttcctttg

SEQ ID NO: 11309 - DNA, 470 bp, Homo sapiens
  MAP TO AC005678.1; EXPRESSED IN LUNG, SIGNAL = 1.3; EXPRESSED IN FETAL LIVER, SIGNAL = 1.4; EXPRESSED IN BONE MARROW, SIGNAL = 1.3; EXPRESSED IN PLACENTA, SIGNAL = 1.1; EXPRESSED IN BRAIN, SIGNAL = 1.3; EXPRESSED IN ADULT LIVER, SIGNAL = 1.4
ttcaactgcaagtgtgctcctggtggtctttaagtctttgggaaggtcttagttctcaaatctggaaataattatcctgatattctaaggagcagagcaggagcagcatttagggaggtagagtcacctgatcagttctcccatcgcatcctccaataacacattggtaaaaccttctggaattagaatatggctatctggcaatgctgcttccaaaagagttgaaacgtgagttcttaccaggatactgagctgccaagcctcaataggcggccacattgacaaacaggacgtgcttgcctgcaaactgcttgaattggatgtactcctcgccgttgagggtgagggctccatactcatagatggtgcctgttacccctttgttgcaatccacctggaattttacaaaaataaccataacgatataagataaaaaataattcccaacatttgtggactttttcaaaaca

SEQ ID NO: 11310 - DNA, 448 bp, Homo sapiens
  MAP TO AC003693.1; EXPRESSED IN PLACENTA, SIGNAL = 0.8; EXPRESSED IN FETAL LIVER, SIGNAL = 0.73; EXPRESSED IN BRAIN, SIGNAL = 1.2; EXPRESSED IN BONE MARROW, SIGNAL = 0.87; EXPRESSED IN ADULT LIVER, SIGNAL = 0.79; EXPRESSED IN LUNG, SIGNAL = 0.89
ctgggaggaggaggtacaatcctgctccttctccccacctgggctgtcagcggtgtgagggtccctacctgtctgccttctccccagcaccctgacacgcggctgctggccaaggcgcgggtggagccgtctgcctaccttgcagggtgtgcctgtgggcccaactctcaagcctctcctcctcctcttccccgcccacaactcctggcacctgggcagccaatgccagccctagggagctggccatgaaccaacacagggcaccacctcacctgctccacacggccgagcccacaggcctgctgtctccaaagccacccagacaccaagggctggccgtcctcaggtgtgattggcaccaaggccctgggggcatgtccgatttgactgggagaggagaccctgtgtggacgtggcttctaggccacttagattgctgtcgttgcct

SEQ ID NO: 11311 - DNA, 482 bp, Homo sapiens
  MAP TO AC005686.1; EXPRESSED IN BRAIN, SIGNAL = 0.66; EXPRESSED IN BONE MARROW, SIGNAL = 0.49; EXPRESSED IN ADULT LIVER, SIGNAL = 0.45; EXPRESSED IN LUNG, SIGNAL = 0.45
atccttacccttgagtgggggagaacagatggtaaataaacaaaagtaaacaaggtcatttcagagagcagcaagttccatgaagactaacaaaatggtaggtgttgcagagtaactgggctgggagtgggagggtatgtcaatatccaaccaagaaatgaaaaccacctcaggatttttttttccatttttaaaattgtagtaagatacacataatgtaaaatttagcaccttcactattttaaactattaaatggtgttaaatatactcataggttgtacagtcatcaccaccatccatctgcatcatccttttcatcttgtgaaactgaaactttatactcgttacacaacactccctgtttcccccactccccatcacctggcaagcaccattctactttctgtctctaagattctgtctactccaagtacctcatataagtggaatcatacagtatttgtcttttatctttttgtga

SEQ ID NO: 11312 - DNA, 470 bp, Homo sapiens
  MAP TO AC005531.1; EXPRESSED IN ADULT LIVER, SIGNAL = 0.85; EXPRESSED IN PLACENTA, SIGNAL =   1; EXPRESSED IN LUNG, SIGNAL = 0.97; EXPRESSED IN FETAL LIVER, SIGNAL = 0.74; EXPRESSED IN BRAIN, SIGNAL = 0.81; EXPRESSED IN BONE MARROW, SIGNAL = 0.89
gagaggctctgcctaaaggggagatggtgacagccacaggcttgcgctccccgccacctacttcctaacccaaggcagcatcaccctttccgacatttgcggcgaagctctttttccctgactttggagttaccccagctacctttcctctgaagaaatgcttgtgaaatgcagcttctcagcaccctgctaaaacgtctccttttgcaagtcctggtctgtccccaacagtaccgtcatgacgatgcagcctccaagcagctttgacatcagagccagcgctcctgtgggcctgggggcagggggtcgtggtgcctacagcgagaaagacacacaagcagcacgcagctcgcgctgtgctctctcggaagaaggagaccttaccttcaggaaaaatagagccacagcagtgccacatgccagggcgagcattctggttgacaggggccaggctgtacttgctgctaggg

SEQ ID NO: 11313 - DNA, 476 bp, Homo sapiens
  MAP TO AC005220.1; EXPRESSED IN LUNG, SIGNAL = 0.6; EXPRESSED IN BONE MARROW, SIGNAL = 0.56; EXPRESSED IN BRAIN, SIGNAL = 0.57; EXPRESSED IN ADULT LIVER, SIGNAL = 0.5
gcccctgttgataacattcgaagattttattttgctgctgtggtggagaatggctgttgaaggtcattaggagctagttaatacaggtcatatttcttgggagagctgatggagattggcctggtgattcctgaagaagtgacaagaagtggacaggtttgagacactaattacagttctagacaccgagtccctcctctgggaccacactcctttacagacctcatctctttaggatggcagcatcccttcaggctgggactgcttctgccacacctcccagacacataagccaggcctccaagaagctgtgtcttttgctgaacattccacaggttgtcagagacagaggcagcattcagctcaggccccctagaccccaagtcctgcatcgtcccagtgtcacaaggcctccagcaatgatggaggacggaggggggcttccctgccgctttccaaagaccaagcctcgaaga

SEQ ID NO: 11314 - DNA, 460 bp, Homo sapiens
  MAP TO AC006207.5; EXPRESSED IN BRAIN, SIGNAL = 0.99; EXPRESSED IN BONE MARROW, SIGNAL =   1; EXPRESSED IN PLACENTA, SIGNAL = 0.73; EXPRESSED IN LUNG, SIGNAL = 0.82; EXPRESSED IN FETAL LIVER, SIGNAL = 0.94; EXPRESSED IN ADULT LIVER, SIGNAL = 0.91
tcagtctcgccatgttgaagtcagaatggcctgtattcactgtcttcgagagaacagagagaaatttgaagcgattataggaggatcatttgaaggatatttaaagcgcttggaaaatccacaggaatgggtaggacaaatggaaataagtgccctttctcttatgtacaggaaagattttataactaatctggaacctaatgtttctccttcacaagtaactgaaaataattttcctgaaaaggtgttactgtgtttttcaaatggaaatcattatgatattgtgtatcccgtaaagtataaagaaagctctgctatgtgtcagtctctcctttatgaattgctgtatgagaaggtatttaaaactgatgttagtaaaattgtgatggaactagacacgttggaagtagctgatgaagacaacagtgaaatatcagattcagaggatgacagctgcaag

SEQ ID NO: 11315 - DNA, 390 bp, Homo sapiens
  MAP TO AC005389.1; EXPRESSED IN LUNG, SIGNAL = 0.95; EXPRESSED IN FETAL LIVER, SIGNAL = 0.75; EXPRESSED IN BONE MARROW, SIGNAL = 0.82; EXPRESSED IN PLACENTA, SIGNAL = 0.83; EXPRESSED IN BRAIN, SIGNAL = 0.9; EXPRESSED IN ADULT LIVER, SIGNAL = 0.78
catgtgaagaattttactaagccactatgacatgctgctaggaatagtggtgaactaggtgccttatcctgggaagctaatacttagtgaaggcacaaccaaagacctactttgtgatggtttttcacacagactaaatcatgggttttcaaacagtgtttgaagaatcacaggtcctgggaaggttcttgaaagggctctacaggagatgacgagactatttagtgaagaagagcaaaggagaagaaaaaggtggggaacagaaaaatcaggaggaaacaaaagcaaaggagagacaacaaaccacaaagatgaagacgacaatgaggaagatggccatggaaatgcatatgatgaagacaatcaggctggcaaagaaaacagccaaga

SEQ ID NO: 11316 - DNA, 464 bp, Homo sapiens
  MAP TO AC000382.1; EXPRESSED IN PLACENTA, SIGNAL = 0.92; EXPRESSED IN BRAIN, SIGNAL = 0.9; EXPRESSED IN BONE MARROW, SIGNAL = 0.84; EXPRESSED IN ADULT LIVER, SIGNAL = 0.84; EXPRESSED IN LUNG, SIGNAL = 0.78; EXPRESSED IN FETAL LIVER, SIGNAL = 0.84
aaaagaactgagcctggtcggctgaggccagtcctgtcctgtcagggtcgagattgcacgcgggtcactcattcccactcaggcccgcgctccctgggaggaccctcgtaatttatgctctgccctagagccgctttcctggtgggatcctttcatggcgtcttcccaggacctcctgccagctcccattgggagttttgggtcccctccaccccagtaggtgcatacttcttccctccccagccccagctcacaccccccaacacccccaagctggtgagtgaggtggaggagctgtacaagtccatcacagcgctgcaggagaagcttctacaagcagagcagtccctgtgcaacctcgaggacatccacatgagcctggagaaggacatcactgccatgaccaacagtctcttcatcgaccgccagaagtgcatggcccatcgtacttgctaccccaccat

SEQ ID NO: 11317 - DNA, 495 bp, Homo sapiens
  MAP TO AC005409.1; EXPRESSED IN LUNG, SIGNAL = 0.95; EXPRESSED IN FETAL LIVER, SIGNAL = 0.94; EXPRESSED IN BRAIN, SIGNAL = 1.9; EXPRESSED IN BONE MARROW, SIGNAL = 0.98; EXPRESSED IN ADULT LIVER, SIGNAL = 0.77; EXPRESSED IN PLACENTA, SIGNAL = 0.82
agctaaactgccccgacttcttttacataaaccaatgatccttcttttgtactttgacaaatttctgtcacttggaaatgcaggaaccccaaacaatataaatgccttttatgagtatggtatgtgcctatacgtctgtggtttacagttcagtaggtttaaaacacatggccagcaatggttaatgaaacctggctcagttccactggtcacaataaaaggctaggttgtccattcctacttgagacttggttgattataaacctaatcatgataccaacaagtattttttcttcttgttcctcagctttctgcatatctaaatcccactgctgaaacaaagtcagaaactgctgagaatattcttggttaagcttctgcctgtaaaacataatgatgaattattgtcatatttcataccaatataaaaagaatttaaaacaaaactgagttgacacagttatactatataagaaaaggaaatacctgcagctt

SEQ ID NO: 11318 - DNA, 476 bp, Homo sapiens
  MAP TO AC006254.10; EXPRESSED IN PLACENTA, SIGNAL = 0.85; EXPRESSED IN LUNG, SIGNAL = 0.91; EXPRESSED IN BRAIN, SIGNAL = 0.83; EXPRESSED IN BONE MARROW, SIGNAL = 0.92; EXPRESSED IN FETAL LIVER, SIGNAL = 0.89; EXPRESSED IN ADULT LIVER, SIGNAL = 0.91
tccctgctttcagttccttggattacatacttaggagtggaattgctgagtcatatgttaattctatgtttaactttttgaggaacctcttgttgcattttgagttgattttgtataagatatgaggagtgctataataatttccaaacatcttttcattcagggtgaaggcaaatgtttgtcccaggagaaacccagggcctctggtctcttgaagtcacctgccagtctgaaagcccatacctgcaaacaggacttgagcaataccacagaactagccacaatcagtagcgtaaatattgacatcttacctgcaaaagggagggattcagtgagtgatggctttgttcaggagaatcagccaagatatttggatgcctctaatgagttaggaggtatatgcagtatttctcaagtggaagaggagatgctgcaggacaacactaaatccagtgcccagcctgaaaacctgattc

SEQ ID NO: 11319 - DNA, 469 bp, Homo sapiens
  MAP TO AC005324.1; EXPRESSED IN LUNG, SIGNAL = 0.73; EXPRESSED IN FETAL LIVER, SIGNAL = 0.7; EXPRESSED IN BRAIN, SIGNAL = 0.75; EXPRESSED IN BONE MARROW, SIGNAL = 0.88; EXPRESSED IN ADULT LIVER, SIGNAL = 0.76; EXPRESSED IN PLACENTA, SIGNAL = 0.85
gggatctcagaggtcatagaggaattcactctctcatcaaatggatgaggagaccaagttaatacgtaaatcctttttccaggaacctggaattcacatgagaataaaggattccttttacaatagggaactgctccctaatatatgtgtttctcaagctgacatttctgtatgttgagtttctatcaagttggatgcctcactaagaaatgtttggctgccttccacccccaccccctgccaggtgtcggtgtcagaggtcaaagcggtggctgaaatgcagtttggggaactccttgctgctgtgaggaaggcccaggccaatgtgatgctcttcttagaggagaaggagcaagctgcgctgagccaggccaacggtatcaaggcccacctggagtacaggagtgccgagatggagaagagcaagcaggagctggagaggatggcggccatcagcaacactgtccag

SEQ ID NO: 11320 - DNA, 471 bp, Homo sapiens
  MAP TO AC004100.1; EXPRESSED IN FETAL LIVER, SIGNAL = 0.76; EXPRESSED IN BRAIN, SIGNAL = 0.92; EXPRESSED IN BONE MARROW, SIGNAL = 0.66; EXPRESSED IN ADULT LIVER, SIGNAL = 0.6; EXPRESSED IN PLACENTA, SIGNAL = 0.66; EXPRESSED IN LUNG, SIGNAL = 0.67
cccatttgttgagcacctgtaatgtgtcagaaacctcatctttaatcttcgatcaccattcgatcggccaaaagaattctttttaaatataagtcaaagcatatcatttatctgctcaaaaccctccaaggcttccttttcacttggagtcaaaaccaaaatcctaacaatgccccacagagccctacatgacctgccatcttgccagccctctcttctcctgctgacccctactcactgcactgcagccatgctgggatcctcaccggaccatggcacgccaagcatgtgctcacctgtggggctctgctctggctgttccctctacctgggattctcttcccccagaccagtggttctcaaccaggggacagtgttgcccccaagggacatttgatgtttttggttgtcgcaactggagagagggtgctactggcacctagtgggtagagaccacggatgctgctaaac

SEQ ID NO: 11321 - DNA, 454 bp, Homo sapiens
  MAP TO AC004582.1; EXPRESSED IN PLACENTA, SIGNAL =   1; EXPRESSED IN BONE MARROW, SIGNAL = 0.81; EXPRESSED IN ADULT LIVER, SIGNAL =   1; EXPRESSED IN LUNG, SIGNAL =   1; EXPRESSED IN FETAL LIVER, SIGNAL = 0.85; EXPRESSED IN BRAIN, SIGNAL = 0.62
gggctgtgactgtagagctgaccagccttgaggaccaggggcttccagaaacaagccattgacaaatgtcagtatcagacagcacattaatgaatgagacagtgatgaattgattttgtcaaaccaatgtagagcttgaagctcaaagttccccactgcttcttgctgtctgtgtgctggcatagaggtcaggacactgaacaccacaggctgcaaaatcccagtgttatactccctcagtgaaactgtatcaatgaccatttgcttcataatgctcctgtcagcatctacccactgctcagctgcaggcagctttctagaagatgctgttaacaatggcaatgcgcccaagagaaagagattcaggaccaggaagctagatgagtcccaggtcctcctctttctggctctgagacctaaagggcaaggtatttgatttgacctcttgggcctc

SEQ ID NO: 11322 - DNA, 349 bp, Homo sapiens
  MAP TO AC004259.1; EXPRESSED IN LUNG, SIGNAL = 1.3; EXPRESSED IN FETAL LIVER, SIGNAL = 1.4; EXPRESSED IN BONE MARROW, SIGNAL = 1.2; EXPRESSED IN PLACENTA, SIGNAL = 1.5; EXPRESSED IN BRAIN, SIGNAL = 1.1; EXPRESSED IN ADULT LIVER, SIGNAL = 1.2
gaaatcaatcttacaaaagcttcgtgctgacagcaatatataaaaatgtccccctttgagtttttaagtgtttctggtacttcggtcagattaaaacatttttatcttattgataagagtatcaacaaagattctaaacaaaaactttaaaattttgacataaattaaatttttgcatttaaataaaatctaagagactgaattaaaaaaatgacaaagaacttactgggtgagagtctcccaagtcacgaaaagttccttttttccccattagcttcctgtagacaaccatgggaaaatgtacatccagtatacagttattgtaaatagccagacccagtactatgcc

SEQ ID NO: 11323 - DNA, 466 bp, Homo sapiens
  MAP TO AC005383.1; EXPRESSED IN ADULT LIVER, SIGNAL = 1.1; EXPRESSED IN PLACENTA, SIGNAL =   1; EXPRESSED IN LUNG, SIGNAL = 1.3; EXPRESSED IN BRAIN, SIGNAL = 1.2; EXPRESSED IN FETAL LIVER, SIGNAL = 1.2; EXPRESSED IN BONE MARROW, SIGNAL = 0.96
tcacaaccccctttgagaacttgatgaaactactagacctttctggttcagaaaaagtacattcatccatacacacaaaatcctgtatacaatttcagattagggagaagttaaaatctcctgacataaacaagctcgaaacctctgaggtcagggaccatcctgtccctccttccctgtccctgccccttccccaaggagaggagtcgggggacaagacgacgtaaggcagactgaccagaagcctgttgtccttgatgacacagagctgcttggcccactgtcccagccacttcttgcgccacaggaaggcgcagatgcgggcgtcacgcatcagctcgatgccggcctccggcgagggccactggtaaggggccgacttgcccttgctgccgtcctcttcatcgtaggactcgtaggagctgctcacagcctctccgtcctctgcaaggaagaccagctcggt

SEQ ID NO: 11324 - DNA, 470 bp, Homo sapiens
  MAP TO AC006265.1; EXPRESSED IN BONE MARROW, SIGNAL = 0.51; EXPRESSED IN ADULT LIVER, SIGNAL = 0.56; EXPRESSED IN LUNG, SIGNAL = 0.67; EXPRESSED IN BRAIN, SIGNAL = 0.62
ttcccatcatatccattgaactcacttatttgtatttggcctgtaaagtaggtggatcttagagaatgacagtagaatataataagcttaactaggcagtgacttcaattgcagccactgtaccagatatgattttatcgtttaagcaaattaacacacctctaagtacatggtatggtgctattgatcaggcaaagatttttctttatacctgttagtaaataccaccagaagcaatttcctttcagctgcaaggccaacaatacacctgtccagtcctacttcaaagatatagcaactttcaagtcttatgtcataatttagttcacagagatcttgattacctttcccttccacaagatatcacactgattccttataatgatattctgctggttcggacctagtgagcaagaagaaataacatctctagacttattggtgagacatttgcatgtcagagagtgaga

SEQ ID NO: 11325 - DNA, 482 bp, Homo sapiens
  MAP TO AC005536.2; EXPRESSED IN LUNG, SIGNAL = 0.8; EXPRESSED IN FETAL LIVER, SIGNAL = 0.75; EXPRESSED IN BONE MARROW, SIGNAL = 0.81; EXPRESSED IN BRAIN, SIGNAL = 0.77; EXPRESSED IN ADULT LIVER, SIGNAL = 0.7; EXPRESSED IN PLACENTA, SIGNAL = 0.63
caaggtaaattggattttctattgcacatatggctccaaaagtttgcaaactgatacaggagctttaagacaagtgggaaaaggctgagaggatccctaccccaatgtcagctctgctggttatccaggaccatggattagaatctctactagtccacttttgccttcagaaggtgtcatattgaagggaatgagaatgaaggaaggcattttcagtgaacctatgtcctggaattgaatcatacaataggaagttagttcagcagtgtcaatcactcctctaggctggagagatacagcagaaaatccaacaagatttccaatgacaaggagtttactgtttcaaaggagaagaaaggcaataaacaaatggacaggtctataacctgtcatgtgggaataagtactaagaaggagagtaagaataagggtgagtaagtggtagaggatgatagtaagagagtgtgctattttaaggaagg

SEQ ID NO: 11326 - DNA, 466 bp, Homo sapiens
  MAP TO AC005774.1; EXPRESSED IN PLACENTA, SIGNAL = 0.66; EXPRESSED IN LUNG, SIGNAL = 0.65; EXPRESSED IN BRAIN, SIGNAL = 0.76; EXPRESSED IN ADULT LIVER, SIGNAL = 0.63; EXPRESSED IN BONE MARROW, SIGNAL = 0.59
ctggcctctagatgtttgtggttaaggaaacagattgattatgtttactaaacagacccagactttaggagtgtcctgatatcccaatatcttgtgaacagaagcattcctaaatttgctttaaagataatattgattcttgcaaaatatagtaattaagaaaattaatcctttatcacaaacccttgtagcagagcacatttccccatgatcttatttttttttatcctatataaacaagtattataccaaggggtggacatgctcctcctcttacttttgggaacatcctactgtctatggagtagctgtactttccccattttactttctttataagcttccttttgctttgcactgtggactggccccgaattctttttttgcacaagatccaagaatcctctcttagggtctggataggaacccttttcctgtaacacaactgaaacttagtcacaatccc

SEQ ID NO: 11327 - DNA, 470 bp, Homo sapiens
  MAP TO AC006211.1; EXPRESSED IN LUNG, SIGNAL = 0.58; EXPRESSED IN BRAIN, SIGNAL = 0.66; EXPRESSED IN BONE MARROW, SIGNAL = 0.49; EXPRESSED IN ADULT LIVER, SIGNAL = 0.56
aggccagaagtcaaaacagctttcttgaagttttattattttgatttttaaggaaaggagtccaatgaatttgcaaattaacgaagcagtgtttgaaaagaaaatatgcaagagatacttaagtgttaaaggaaactaaagctttgagaactagagataagatactttaaagtaactatccaaattggtttgtaggcagcaaacgttaactgtgtaaaatgtggagcatttgatgcaccaagaaatatttactgactgcccacttggaacttaaaagttcagttgggaaccaagaagataattataatgtaataagtgctctgcctgattaaaaactgctgtgttctcatgagaactaggaaaggcattcagaaggacattcctgacgtcttcttggaagaggtcgaacgtaagctcgtatctgaaggaaaaaccagaggaaagaatatccctaacgaggaatcgattgc

SEQ ID NO: 11328 - DNA, 486 bp, Homo sapiens
  MAP TO AC006410.1; EXPRESSED IN PLACENTA, SIGNAL = 0.74; EXPRESSED IN LUNG, SIGNAL = 0.91; EXPRESSED IN BONE MARROW, SIGNAL = 0.98; EXPRESSED IN ADULT LIVER, SIGNAL = 0.97; EXPRESSED IN FETAL LIVER, SIGNAL = 0.95; EXPRESSED IN BRAIN, SIGNAL = 0.94
agagatgaacaccacctgggtctgacctggaagcgctcatgcagccagaccctgaaggcctggggacagggactgggcctgacaatcttggcagattccacacagaacagcctaggtcttgctcagagaacattctcaggaaagactgaacaagctggagaaccaagtgaaattctttaaaaaatgctctaacaaatgctttaataaaaaagatatttatgcattctagagtgtcgccctggaaccttcctctgggtgcctgtctggtccccagatgagcagcagttcctctcctctccttccatctctatcaccgtcaccatcatcatcaccatcaccgtcaccatcatcatcaccatcactgtcaccatcaccaacactttaaaagttttcactcttccgggccttttacacattaactctcccagtcctcaccacagtgctatgaagtaggtgctattattttggtcccgattttacagacca

SEQ ID NO: 11329 - DNA, 425 bp, Homo sapiens
  MAP TO AC004108.1; EXPRESSED IN FETAL LIVER, SIGNAL = 0.71; EXPRESSED IN ADULT LIVER, SIGNAL = 0.61; EXPRESSED IN PLACENTA, SIGNAL = 0.75; EXPRESSED IN LUNG, SIGNAL = 0.73; EXPRESSED IN BRAIN, SIGNAL = 0.65; EXPRESSED IN BONE MARROW, SIGNAL = 0.78
aaccaggaaactgaaatgtgcagttgttaaataatttacccagagttacagagatgacaagaaacagagctgagtttcaatcttaggttgtctgactccaaaactggtttcctttacagaacattgcactgaaactgaagacaggggagaaatacattccatctatatcaagggcttaggaagaaggcagcatgggtcagaagagccctgaccttcagccaatttccttctctttgccatgttttgagagcatgagggatggtgggtgctctgataccaccatatttcagcctattaattgcatctctgcagcctgtttgttttggctctagcactatacgtattttatccttaggagtggtgttacatgtctgttttgttatctgaccattgctctcttccctggcaaggtggcaaatcacata

SEQ ID NO: 11330 - DNA, 447 bp, Homo sapiens
  MAP TO AC003669.1; EXPRESSED IN PLACENTA, SIGNAL = 0.97; EXPRESSED IN LUNG, SIGNAL = 0.81; EXPRESSED IN BONE MARROW, SIGNAL = 0.64; EXPRESSED IN FETAL LIVER, SIGNAL = 0.72; EXPRESSED IN BRAIN, SIGNAL = 0.57; EXPRESSED IN ADULT LIVER, SIGNAL = 0.68
tcatcagtcttctgcttcttggtatcaacgttgtcatcctcagcatcttcaactgcccatttgcccatagcatcctcagctgccacatcttcatcttcatcctcttcctcaccatcaccttcttcctcctctttttcctccccatattcttcctattcttcttctacctcattgtcagcctcctgtttcccattttcctcattagcgttcccattaccaggaccatctcttcccttctctgcctcctccacaacttctttcttctcctttaagactttggtgatgatcttggagctggtgtccacagttgcatctgacatggtggggcacaccagtgaccaatgcagtggactaaaaagaaaccgagagtttggggactggcaataatgcagagtccgagaagggcaggtgtagctgcagcaagctggaagccaaacccaaaaacaa

SEQ ID NO: 11331 - DNA, 473 bp, Homo sapiens
  MAP TO AC006368.2; EXPRESSED IN BRAIN, SIGNAL = 0.63; EXPRESSED IN BONE MARROW, SIGNAL = 0.55; EXPRESSED IN ADULT LIVER, SIGNAL = 0.49
catgtcatcagcaaacagaggtaatttcacttcttcctttcctatttcaatgtttttaatatatttttatctaattgttctagctacaactttcaatactatgctgagtaaaaatgataagagtggccatcattgttttatttctgattttagagaaaaaggtttcatcttttcactgtggggtatgatgttaactgtgggcttttgtatacggactttattatgtggaggtacattccttctgtggctaatttgctgagtttgtatcataaaaagatgttgttttttgtcaaatggtttttctgcatctaagaagatgatcttatggcttttgtccttcattttgttaatatgttgtaaaacatttattgatttgtgtatgttgaaccatccttgtaacccaggaatacaagggataaatcctgcttgatcacatttaacaatccttttaatgcactggtgaattccacttg

SEQ ID NO: 11332 - DNA, 385 bp, Homo sapiens
  MAP TO AC005920.1; EXPRESSED IN LUNG, SIGNAL = 0.54; EXPRESSED IN BONE MARROW, SIGNAL = 0.6; EXPRESSED IN ADULT LIVER, SIGNAL = 0.59; EXPRESSED IN BRAIN, SIGNAL = 0.74
tcaagatgatataatgcttcactttttttcctatataatttgaaataaaatagtaaaaaacacactctttggtaagagctcatttccaatttaaaaaaccaattttacaaactaaatgtatacaaacaattacattttactatactgtggtcgtctagcacttcaattaggataagaaagtttatgaaatataaactgacacaatttcagcagcataaagcttaccttcaggctggtatgagaacgtggttgacttaattcctgaaatttccattgctcagatccaggggtctctcctcctttctgagcatcaggtgtaagcaatccatctccagcaggtaatgggaaaattcctaatgatatagggcgttcttttctatttgaa

SEQ ID NO: 11333 - DNA, 489 bp, Homo sapiens
  MAP TO AC005389.1; EXPRESSED IN LUNG, SIGNAL = 0.71; EXPRESSED IN FETAL LIVER, SIGNAL = 0.7; EXPRESSED IN BRAIN, SIGNAL = 0.61; EXPRESSED IN BONE MARROW, SIGNAL = 0.71; EXPRESSED IN PLACENTA, SIGNAL = 0.76; EXPRESSED IN ADULT LIVER, SIGNAL = 0.62
aaaacacgattctgctatcaccttatttggaagtttagtacggctgaaagatgtatctgactgccaagctgacaagggtgaaccatgatggctctgtgttgtgtcaatttagttaatccagaactacattgcccagaatcccctttctgtacagttttaggttagggctggccaaaagaagcttacgtgagatgtggacgttggaaatgaagcagtagccatgcttacacttggaaaattggcataaggtcaggtactacagtggagcacacacaattgtgaatctgttggctcacactgttggcctggagcagtgctgggcctgcagcttctgtagctcctgccagatatccttgggttgcagctgatccccgagcttttccagcttcttatcatcctgggccaagtatgtgtgctgctccttggtggaacatacaagctcttctgtaggtcatgtgcatcatcaaagtccgatgtttagaagtggca

SEQ ID NO: 11334 - DNA, 476 bp, Homo sapiens
  MAP TO AC004677.1; EXPRESSED IN PLACENTA, SIGNAL = 0.87; EXPRESSED IN LUNG, SIGNAL = 0.74; EXPRESSED IN FETAL LIVER, SIGNAL = 0.73; EXPRESSED IN BRAIN, SIGNAL = 0.8; EXPRESSED IN ADULT LIVER, SIGNAL =   1; EXPRESSED IN BONE MARROW, SIGNAL = 0.64
tccaagccttctggctatactacctaaataaactgatccatcctcctctgaaagggctgatgggtggagatttaaaatgtccaagacaaaaaggagaaaaaaatagactcaacaacatgaaaagtccataaactggaaaaacattcatttcctaacttagttgattacaactagaaaagaagttctggttctttacatatttttctcaaacaaaaaaagagcttaaatgtaaaaaaacattcgcaatcaaaaattgttggttaaatgctaagtaatatttaagaaagagaatttttacctctttggctgattctgacttgagttcttctgggtccaacacatctatcctaagggtctcaaaatttttccggaactcagagtaaatttggtcatctactttggtgagtttcaggaactgtgggtcaactgatgaaatcagctgcgaaacagtaagacaacatacagatgctagtctg

SEQ ID NO: 11335 - DNA, 470 bp, Homo sapiens
  MAP TO AC005161.1; EXPRESSED IN PLACENTA, SIGNAL = 0.82; EXPRESSED IN FETAL LIVER, SIGNAL = 0.84; EXPRESSED IN BONE MARROW, SIGNAL = 0.73; EXPRESSED IN LUNG, SIGNAL = 0.97; EXPRESSED IN BRAIN, SIGNAL = 0.8; EXPRESSED IN ADULT LIVER, SIGNAL =   1
atggcattcatccatacctctttactaaacttatttccaactgattcttcttagtagatcataggtactctttattataattttccttgaattctttgcagtgcttgatcggactgtctaacacttcatcacaaactgtcttctcccttaacttcacgattccacattgctatggtctaagtgtttgtgttcccccaaaattcatatgatgaagcttaagcaccaatgtgatgaggtatttaggaggtaattaggtcatgagagtggagccctcatgaacgagactagtgcccttataaaagaggtgctagagaatttccttgcccttttcccaccatgtgaggatagaaaaaaggtgccaactataaaccaggaaacaggccctcagcagacactgaatctgccagcacactcatcttgtactttccagcctgcacaactgtggagaagtaagtttctgttgattctaa

SEQ ID NO: 11336 - DNA, 463 bp, Homo sapiens
  MAP TO AC003071.1; EXPRESSED IN PLACENTA, SIGNAL = 0.61; EXPRESSED IN LUNG, SIGNAL = 0.54; EXPRESSED IN BRAIN, SIGNAL = 0.59; EXPRESSED IN BONE MARROW, SIGNAL = 0.51; EXPRESSED IN ADULT LIVER, SIGNAL = 0.56
agatgatgtggggagagagcatgctggcagacttcatagtcagcttcctcctggtagtaagggggatattcagggacctccccggggcccaggcagtcgccggcgcctgagggagcccccactgtgccttgcgggcagtacttggggtcgtatatctgctggcccaggccaagacctggctactctggttggtgtcctatgtctaacccatctgcagggatatggaggagttaccacacttgtcggttcccagcttggtgtcagagatgtgccgctgcgtcccaggagccgtcatggccacctggctgacacacttgtttatacgcatctggacactgatgatggagtggtccatggggggcaggatgtagttgttggggtcgtagaaatgcctcctcatgccgtatgcggtcatccctgactggctggcgcatttgttggtgcccatctgcagcccgaggat

SEQ ID NO: 11337 - DNA, 456 bp, Homo sapiens
  MAP TO AC005069.2; EXPRESSED IN FETAL LIVER, SIGNAL = 0.68; EXPRESSED IN BRAIN, SIGNAL = 0.84; EXPRESSED IN ADULT LIVER, SIGNAL = 0.66; EXPRESSED IN PLACENTA, SIGNAL = 0.99; EXPRESSED IN LUNG, SIGNAL = 0.95; EXPRESSED IN BONE MARROW, SIGNAL = 0.7
ccaactcagcttaggccttgctgaggagggatgcaggttttctttgtttaaccctcttgtgtgtcacagagtagctttgcttcaggtagagggagtgtgtttatggccaagtgtgaagattctggagtaggggaggggtccctctcctaccacattcaacatatctgaggctgtggcactcacacactgaggacttgaggtttttttaaatatttttggagacagcacttaataaagcacttgagaaccaaaaaactcagttcaatgaaattcaacacaatacacaagcatgaggtgatgaccaagaagaggatgaagatcgtcttctcagtgggtttggagatgaagcagtccacagtgttgggacaaggcttcaaatcacactttataaggtagggaacactaaagccatcatatagcttataaaataaaacaaggaagccaatttcaaaacca

SEQ ID NO: 11338 - DNA, 476 bp, Homo sapiens
  MAP TO AC005690.7; EXPRESSED IN PLACENTA, SIGNAL = 0.59; EXPRESSED IN LUNG, SIGNAL = 0.64; EXPRESSED IN BRAIN, SIGNAL = 0.61; EXPRESSED IN ADULT LIVER, SIGNAL = 0.64; EXPRESSED IN BONE MARROW, SIGNAL = 0.96
ggctgttgggatttcttatggttatcatataccacagttgggaaaatatttgtttacttgaccaatcttggaaaatacagactttgtctccataagagttggacatgttatctggggatgatccattcaattatttgcaatttccttctcaaccaaattttccgtggtcatttttgtggcagttttctccttctttgcttttcctgtcttattgggaggtctgtttgggttttttgtttgtttgtttgtttgtttttccttcctgggaaaaaagaccattgctctccttaagtgtattttataccttccacattcagaacgactgtttttacctgaaaatgcccaggcaccttaagggcctgaatgaagtctttggagaagagggaggtggctgggaagaggggtgagtggggagagatgggagtgagatggagtggagggcaaagaatataacagcccttggaacaacagcaagt

SEQ ID NO: 11339 - DNA, 479 bp, Homo sapiens
  MAP TO AC004685.1; EXPRESSED IN LUNG, SIGNAL = 0.55; EXPRESSED IN PLACENTA, SIGNAL = 0.61; EXPRESSED IN BRAIN, SIGNAL = 1.1; EXPRESSED IN BONE MARROW, SIGNAL = 0.62; EXPRESSED IN ADULT LIVER, SIGNAL = 0.44
atcgtgggcaagaaactcctcataagagtctggaatagaccagaggtggcattcaatgtagtttctggctacatgctgggttgtgacccacccagtggacaaaaccatgcatagggatgaattattcccatggcatgttcctccctccctgacagctttacagcatagacctgggctctggggagggactcaattgccccctccctttccatatctgattggcaccgtcagaagagagggacagcctgccacaggctcagggaagagctcaccagacagtcttagagaggccctcaatgaggtctgagtggaagaggcggatgggcctggtcaccggctggtgaacccactcatcgtacttctctcccaagtggcccacctgccacaggagaggctttcgccagtccaccaggtcctgcaagagatgaagccaagtggacgtttgatattcacgtcttcccatattcgttctcccattt

SEQ ID NO: 11340 - DNA, 480 bp, Homo sapiens
  MAP TO AC005872.2; EXPRESSED IN LUNG, SIGNAL = 0.98; EXPRESSED IN FETAL LIVER, SIGNAL = 0.97; EXPRESSED IN BRAIN, SIGNAL = 0.67; EXPRESSED IN BONE MARROW, SIGNAL = 0.9; EXPRESSED IN PLACENTA, SIGNAL = 0.98; EXPRESSED IN ADULT LIVER, SIGNAL =   1
tgggttcaaccaagtttaacaaccatttattgaggctctactaagtgtaaaattctctgctgggtactataggggatacaaagttgaaaaggtacagaccctactctcctggaggtgatagtctaccaaatgggacatagtatgcacaaataactccaaggcatgctgtgtttaagagcttcacccttgtgctatgggaatataggagagggagtgagaagaagtcatacgtgggtgatctacgaagactatcagtaggatataaaatatgagctgggttttaaaggagggtggtacttcaacaaatataaagtaatggagaaaaatagcagaatgttggatggggtcaacagttggatgatgtttaacatgtttatatatgtgttggaggactacataatgtttgtgatcgggtaagtcatgggtcagagttgttttatgcagtctattcatggcaggaagttacaagtagtaaaaaga

SEQ ID NO: 11341 - DNA, 476 bp, Homo sapiens
  MAP TO AC005592.1; EXPRESSED IN BONE MARROW, SIGNAL = 1.2; EXPRESSED IN PLACENTA, SIGNAL = 1.1; EXPRESSED IN LUNG, SIGNAL = 1.2; EXPRESSED IN FETAL LIVER, SIGNAL = 1.2; EXPRESSED IN BRAIN, SIGNAL = 1.4; EXPRESSED IN ADULT LIVER, SIGNAL = 1.1
tggtacaaaccctcaggtccaattttttaaaatgcaggtcagaagttaccacccaaaggtgtacagatttttttaaattttcaatgagctgcctatttaaaaatgaagaaattttacattatgagaaagaaatccagacatccaatttctgtcgaaaaactggatgacttcgcaactcagcttctacttgcccccggtaataattgtcgggatttgtgtatcactgcccacttcagggtggacacgtgctctccagctcacgcgacccctccaggccctccagcttcttacctggcctgcttcatgctataggcatttgagtttgtgacctcaggaagagaagatgtcttcacaataacaatatacacagttttcctctgctcagaacctatcacacctctttggtacatctatcataaaactcagactttaactgctccctcctccatctgggagcccatcttgcctcacttcct

SEQ ID NO: 11342 - DNA, 497 bp, Homo sapiens
  MAP TO AC004707.1; EXPRESSED IN PLACENTA, SIGNAL = 0.96; EXPRESSED IN LUNG, SIGNAL = 1.1; EXPRESSED IN FETAL LIVER, SIGNAL = 1.1; EXPRESSED IN BONE MARROW, SIGNAL = 0.7; EXPRESSED IN ADULT LIVER, SIGNAL = 0.91; EXPRESSED IN BRAIN, SIGNAL = 0.68
tgctcaaccgaatcacacagttacaagttgtcttagaaataatcactaataagactggcagggccttgactattctggcctggcaagaaactcagatgagaaatgctatctatcaaaatagattagctctcgactacttgctagcagctgaaggaggggtctgtaggaaatttaaccctactaattgctgcctacacatagatgatcaagggcaagtagttgaagacatagttagaaatatgacaaaactggcacatgtgcctgtgcaagtgtggcatggatttgatcctgacgccatgtttggaaaatggttcccagcattaagaagatttaaaactcttgtaataagagttataatagtaatagaaacctacttgctgctcccttgtttgctacctgtacttcttcaaatgataaaaagcttcatcactaccttagttcaccaaaatgcttcagcacaagtgtactatatgaattactatcgatctgtcttgcaa

SEQ ID NO: 11343 - DNA, 445 bp, Homo sapiens
  MAP TO AC005599.5; EXPRESSED IN LUNG, SIGNAL = 1.3; EXPRESSED IN BRAIN, SIGNAL = 1.2; EXPRESSED IN BONE MARROW, SIGNAL = 0.77; EXPRESSED IN ADULT LIVER, SIGNAL = 0.76; EXPRESSED IN PLACENTA, SIGNAL =   1; EXPRESSED IN FETAL LIVER, SIGNAL = 0.9
gacagtagggaatctggagggatgaatgagcaaagcctgtgtcatcctagaggtcgtgtggaggtttgcaagagtaaaggatgcttagaactgtgtctcacagaggtaacgtaggaacacacagcattgatttgagagaggagtggactctgtaatattctagggaataggtatgatggcctggacagaccgtttatcttgtttcccatgtggccaccaatgccctcttctccttatttgggcatattcttggtacctatgtaatggaactcacactgacataactagaacagaatgcaactggaattctcagactgcctaccctgaacctctagctcctaaatgggaggtctggtgcctaacacagtgcctggagcatgtgcacaccaatgtggtgctgaatgggtaagagtgagtgaatgtgtgagtgaatgaatgccacagg

SEQ ID NO: 11344 - DNA, 494 bp, Homo sapiens
  MAP TO AC004749.1; EXPRESSED IN ADULT LIVER, SIGNAL = 0.72; EXPRESSED IN PLACENTA, SIGNAL = 0.82; EXPRESSED IN LUNG, SIGNAL = 0.73; EXPRESSED IN BRAIN, SIGNAL = 0.97; EXPRESSED IN FETAL LIVER, SIGNAL = 0.71; EXPRESSED IN BONE MARROW, SIGNAL =   1
ttggtgggagcaagagaatcaataggatattaacctccattctgaactcaaatcctttcaagtttcaaagtatttattcgggacaaaggcagctatgaagagttgcgtacaagaaacagaaacaaatacctaatccaggaaattcaaagagattaatttttcatcagtagtttgcttctctcttctatgctcatattatgtatttacattcactgtacacaaattcatttagcataatgctattaaaaatgcttgtgcctgtcacacaggtttcatatgactatgccccaatgccctacctgcatgtcccaccaacatacttactgaattcattccactgaacaggtctcctgatccaacatgagctgtatgcacaaagtttgtgggctctccaatcatacttctgtcaatccgccgtcgccttttctaaaatatggggaacaaatgtgttgagaaagtgatcttatgagcaacttattctgatggatttttat

SEQ ID NO: 11345 - DNA, 474 bp, Homo sapiens
  MAP TO AC004849.1; EXPRESSED IN LUNG, SIGNAL = 0.68; EXPRESSED IN FETAL LIVER, SIGNAL = 0.72; EXPRESSED IN BRAIN, SIGNAL = 0.75; EXPRESSED IN BONE MARROW, SIGNAL =   1; EXPRESSED IN PLACENTA, SIGNAL = 0.74; EXPRESSED IN ADULT LIVER, SIGNAL = 0.77
ttcaggtgatgaaaagaaacaagaaataacatccaactttaaggaggaatctaatgtgatgaggaacttccttcaaaagagccagaagccatctagaagtgaaattccaattaaaaggtaggcttgctgatagtagtaagtcttattatattgtaaggtaaatactatgaacactttttttagttttaaattttaccaaaaatgtcatcagaaaaaatagactcttgtgtttttggatcatctcttctttagggaatgtcctacctcgacgagcacagaggaagaagctattcagggcatgctgtctatggcagggttgcactattccacgtgtttacaaaggcaaatacaaagcacagactgcagtggtgaaagaaactctctccaggatcccagcagctgccatggcagtaaccatgaggttaggcagttgtatcgctatgataaaccagtggaatgtggtaagaaacataa

SEQ ID NO: 11346 - DNA, 471 bp, Homo sapiens
  MAP TO AC005303.1; EXPRESSED IN BONE MARROW, SIGNAL =   1; EXPRESSED IN FETAL LIVER, SIGNAL = 4.6; EXPRESSED IN BRAIN, SIGNAL = 1.1; EXPRESSED IN ADULT LIVER, SIGNAL = 1.2; EXPRESSED IN PLACENTA, SIGNAL = 0.99; EXPRESSED IN LUNG, SIGNAL = 1.3
aaaactaatccctccccttatgatctagatcctattttcaacagctcctccagggatttaatttcataaatgatctactttctcacctgaggtttcaacactgttctatactggggcttttcccatcagtatttaaaggtgcttaattctcttcccgcaccctctaccccaaattatttttctttttatgtatctcatcctatctcattctcatgtcacaccctcttcacagacacactcatgggaagagtcgcttgcagtagctccatacagccaggagcgctcagtactctgaagtttggcaggctcgtttccactgaaaccccctgattcaccactgccaatggacttgtggcaaaatccaggggcacttttgtgtcatactcgacaaagggcatcagaaagattaaattgatgaaaatgttgaatcagacaaatggcacccctagaagcaggagtccccaaattagt

SEQ ID NO: 11347 - DNA, 466 bp, Homo sapiens; identical to SEQ ID NO: 11075
  MAP TO AC005754.1; EXPRESSED IN PLACENTA, SIGNAL = 0.69; EXPRESSED IN BONE MARROW, SIGNAL = 0.65; EXPRESSED IN ADULT LIVER, SIGNAL = 0.84; EXPRESSED IN LUNG, SIGNAL = 0.75; EXPRESSED IN FETAL LIVER, SIGNAL = 0.77; EXPRESSED IN BRAIN, SIGNAL = 0.72

SEQ ID NO: 11348 - DNA, 448 bp, Homo sapiens
  MAP TO AC005071.2; EXPRESSED IN BRAIN, SIGNAL = 2.2; EXPRESSED IN LUNG, SIGNAL = 1.5; EXPRESSED IN FETAL LIVER, SIGNAL = 1.7; EXPRESSED IN BONE MARROW, SIGNAL = 1.6; EXPRESSED IN ADULT LIVER, SIGNAL = 1.3; EXPRESSED IN PLACENTA, SIGNAL = 1.4
ctctgatgacaacgtgtgggtgacaaagggcaggtcccgcttgagcacctaggggcaagaagttgaggctgtgtgtgcctggtggccctggggcaccaacctctcaccctgagactctgcccccaccctggaatagcgtggaagggcaaggctgcaaggggtgggagatgggagtgagtgtgtcagaggcgggcccaagtgtgcaaggcgtgtctgtgatggtcagctcaccaggatgaagtctgtctgatacgtggacagcatgaacacggatatgttctggtcagccagtggggcgatgactgacttggcgatcttggtcatgccaataggctgggagctggagaagctgccaccgccggacaccacgttcagggccagccaggtggcatccgccacactcaggtgctccgaggagggcagctctggagggagacacagaaggcag

SEQ ID NO: 11349 - DNA, 460 bp, Homo sapiens
  MAP TO AC002300.1; EXPRESSED IN PLACENTA, SIGNAL = 1.1; EXPRESSED IN ADULT LIVER, SIGNAL =   1; EXPRESSED IN LUNG, SIGNAL = 1.2; EXPRESSED IN FETAL LIVER, SIGNAL = 1.1; EXPRESSED IN BRAIN, SIGNAL = 1.1; EXPRESSED IN BONE MARROW, SIGNAL = 0.91
tggatggatggattgatgacagatagccaaaggaaggaagaaaagaaggaaaaaagggagggagggaggggggagggtaaagagggaggaagaacggggacgtaccgccgcccagttcctggacgtgactgggacatcctcgcaggcaaggctggtgtcccagctgatgtgcgtccccatgcctctctgcaggtgccactatgcacgtgaagaagtacctgctgaagggcctgcatcggctgcagaagggccccggctacacgtacaaggagctgctggtgtggtactgcgacaacaccaacacccacggccccaagcgcatcatctgtgaggggcccaagaagaaagccatgtggttcctgctcaccctgctcttcgccgccctcgtctgctggcagtggggcatcttcatcaggacctacttgagctgggaggtcagcgtctccctctccgtaggctt

SEQ ID NO: 11350 - DNA, 370 bp, Homo sapiens
  MAP TO AC003108.1; EXPRESSED IN BRAIN, SIGNAL = 0.6; EXPRESSED IN BONE MARROW, SIGNAL = 0.76; EXPRESSED IN LUNG, SIGNAL = 0.53
cggagatccctagacactgggagcgatcaagggccgggagtgtgccttgtggacgaatgaggaagtgggaaggccgtcctgagaagatcggggaaccctgggaaggaaaagtagaagtccgagctctcgggaggaccgaggggcgcgaacgtgggggtctcacctgccgaatggccgccagcgtgttctcgggcgcgtcgtggctgccgccacggtgggcgatggcagaaatgcggtcccggggcttgagcacctgcagggccctgcaagagggcaccggctcaaagctgaagacgcgcagtagaacgaagaggctgccggtgaggaggcaggcattgaccgggctccgcgtcaccagcagcagcactag

SEQ ID NO: 11351 - DNA, 448 bp, Homo sapiens
  MAP TO AC005516.1; EXPRESSED IN BONE MARROW, SIGNAL = 0.99; EXPRESSED IN FETAL LIVER, SIGNAL = 0.89; EXPRESSED IN BRAIN, SIGNAL = 1.2; EXPRESSED IN ADULT LIVER, SIGNAL =   1; EXPRESSED IN PLACENTA, SIGNAL = 0.9; EXPRESSED IN LUNG, SIGNAL = 0.92
aaccaccaaataaaacactgggttgaccagaatgcaggaggcagtgtaggaggtaagggttcgggctttagagttagccttggcccgccctcaccccagcactctaaagctgtgtgctgcctgatcacctccataacctctcggagctgtgggatcccccctgtaaagtaggtgggcaataccaacctgagatggcattgtgagaagaaatgaagtcagctgtcccatgactagcacggagaactgctatcaaggcacagattaggactgaaggaagagctgattccagccacccacctttcacaaggaccttaagctaccatcactatgcaacaacaagccaaggctgcggggacaaacctgctgtttggctaacattgggaggatgatgtcagctatctgtcgagacagtcgcttccacttgtcttcattctccttgtggcactgc

SEQ ID NO: 11352 - DNA, 467 bp, Homo sapiens
  MAP TO AC005875.1; EXPRESSED IN PLACENTA, SIGNAL =   1; EXPRESSED IN LUNG, SIGNAL = 1.2; EXPRESSED IN BRAIN, SIGNAL = 1.1; EXPRESSED IN BONE MARROW, SIGNAL = 0.94; EXPRESSED IN ADULT LIVER, SIGNAL = 1.2; EXPRESSED IN FETAL LIVER, SIGNAL = 1.3
attgcagatctggggaaatgtcctccaggatgccacatatactctaaatcagtatccaacatatgatactttttctcctatatccaggattcataggtctaggaatcaaggagtggaaataggagtgtcacttgccattactattacccttactgatgcacactatttttttcttgtctgcacaactttatgttctgctggtctagagtctcaattataaaggtatgcttccacctggagacacaacaatgatttcattgagatggaagttcagacttccacttggccactttagactcctgatgcctctgaattaacaggcagccaaggaagttactgtactgcctggaaggactgatcctgattaccaaggagaaattggagtgctgctacataatggaggtaaggaagagtatgtatggaatgcagaagatcctatagcatgtctgttagtattataatccctg

SEQ ID NO: 11353 - DNA, 456 bp, Homo sapiens
  MAP TO AC005210.2; EXPRESSED IN BRAIN, SIGNAL = 1.2; EXPRESSED IN ADULT LIVER, SIGNAL =   1; EXPRESSED IN LUNG, SIGNAL = 1.3; EXPRESSED IN FETAL LIVER, SIGNAL = 1.2; EXPRESSED IN BONE MARROW, SIGNAL = 1.2; EXPRESSED IN PLACENTA, SIGNAL = 1.7
acagcttcttgctctctggcgcctctccaggcctgtccccactactgcatctgctccaaaggaccctttcctaaaaagaggattcaaaaagacagatgttgctcaccgccataactgcagcttcctcttgggtatacagaactggcagagcactggaaaaggcgagactttcggagagaaagagggcagctacctaaaacctgtcatggctggttcttccagtcgcacaggatccctggggagggacccggggaagacacgggttggtttatgcaaggctatgtggaccagagaggtggaaaacaaccgaagcccaccgaaggagaactgaagaatgtgaactctgagcagcgcttaacaaataaaacacccagccaggtgaaggcagcgctccaagccatggggggtgctggggtcgcaaggtgtttcttcttttgttttgttttccccctggtt

SEQ ID NO: 11354 - DNA, 485 bp, Homo sapiens
  MAP TO AC002993.1; EXPRESSED IN BRAIN, SIGNAL = 0.56; EXPRESSED IN ADULT LIVER, SIGNAL = 0.41; EXPRESSED IN LUNG, SIGNAL = 0.59
tcagttgtattttaaatgactttatggtatttggttaggctgctgcatcatactttacctagccatcctcctgttgcagtatcagagtaatgtccatttggcactattatagatagtgctccaataaaatgtcagggatgggaaccccaccttttaaaaaggtcaccgatgtagagtagaaaatcatacttgttaattttagtgcttttcctaatgttttctggttaaatttcttcagggctagtgaatgttcccgaggaacccattgaagaggaggaagaggaggaggaggaggaagaggaagaggaagaagaagaccaggacatggatgcagatgacagagtggtggtagagtaccacgaggagctcccggctctcaagcagccccgggagcggagcgcgtctagacgatccagtgccagcagctcagactcagatgaaatggactatgatctagaactgaaaatgatttccacgccttcacc

SEQ ID NO: 11355 - DNA, 452 bp, Homo sapiens
  MAP TO AC006195.1; EXPRESSED IN LUNG, SIGNAL = 1.2; EXPRESSED IN ADULT LIVER, SIGNAL = 1.2; EXPRESSED IN PLACENTA, SIGNAL = 7.6; EXPRESSED IN FETAL LIVER, SIGNAL = 1.4; EXPRESSED IN BRAIN, SIGNAL = 1.1; EXPRESSED IN BONE MARROW, SIGNAL = 1.1
gggtcaagggctaagtctccatgtgggagaattaaatcagctctgttccagggccagacgacatggttagctccaggcagccattctgtaaatgtctgtaattgatcacaaactgggcaagtgggcaggaatggattcacgaaatccaccatccacataagaaaaacaactagaagcacatagcctaatggcatgcatacagaatccttctatagcatctatttctctttcatatatttaaggattatagatgatgtgggttatgatcatacatacctcaaaatgatgatcaatcaactcaaaatattcttgaaggggtatagatcccgaaaaagaacatgcaaaatctttgactccctgtttttcaaaatattcttgaaggcgaagaataagctcattggttatgagccaaagatcttcaaattgttcactctgaatgcgatatcgttctg

SEQ ID NO: 11356 - DNA, 499 bp, Homo sapiens
  MAP TO AC005293.1; EXPRESSED IN PLACENTA, SIGNAL = 1.1; EXPRESSED IN LUNG, SIGNAL = 1.2; EXPRESSED IN FETAL LIVER, SIGNAL = 1.7; EXPRESSED IN BRAIN, SIGNAL = 0.95; EXPRESSED IN BONE MARROW, SIGNAL = 1.4; EXPRESSED IN ADULT LIVER, SIGNAL = 1.2
aaatgcctgacacacattcacattttatatataatttcaggaacttcaaggactcttggaagcctgatctaacctcccttcctccattcagagatgacaaaactgaggacagaggagtgagggacttcccacaaccacaggcagccagcttgagtgtgtctgctgcacagttcacagcaggtcctggaaggcagatggccatggacgtggagaccttgcaaagggccacatccctggaaattgcttctcttctttcacacacctcagtccccctccccatcccacgtgctgctgggaaaaagcacacgggccagctgggaaggaggttgcaccttccgtaggtgatccttggtgatgtgcctctgccttaggacaccatccatcttacgtgctgtaatgaggacattgccccccacccactcccaagcagggcccccaaagaggccagtcatgttatttaaggctttatctctacacaaataataaatgcagagatcac

SEQ ID NO: 11357 - DNA, 476 bp, Homo sapiens
  MAP TO AC005722.1; EXPRESSED IN LUNG, SIGNAL =   1; EXPRESSED IN FETAL LIVER, SIGNAL = 0.8; EXPRESSED IN BRAIN, SIGNAL = 1.4; EXPRESSED IN BONE MARROW, SIGNAL = 0.72; EXPRESSED IN PLACENTA, SIGNAL = 0.94; EXPRESSED IN ADULT LIVER, SIGNAL = 0.95
cataaaagagccagtttagaagggttctagtatgaaatttatgaagcatacctctgaataccagaaggctgtgtttgaaagcagaccgactttttatgaagttgctcttatatattgctcatcccaaagaatctttgagttttatgtagttttgcagactgtatcactttaccaaaatgtgttaattttaggtggattccatttaaagcttcattgcccaaatggatttgtattttcttggaaaaattgagagaattgtgtttttgttgactggttccaggttcagtctgcagccctggatgagatgtttcagcagaccgaagatattgtttatcgctatcataaggcagcccttcttttggaaggcctaagtaggattctacaggaccctgcagatattgaaaatgtgcataaatgtaagttgacttacaaagtagtgtatttttttacttcattttagttgtctatcacaagca

SEQ ID NO: 11358 - DNA, 451 bp, Homo sapiens
  MAP TO AC002303.1; EXPRESSED IN LUNG, SIGNAL = 0.62; EXPRESSED IN BRAIN, SIGNAL = 1.5; EXPRESSED IN BONE MARROW, SIGNAL = 0.63; EXPRESSED IN ADULT LIVER, SIGNAL = 0.5
tggtaacgtcatctcccaggaggtcttggtgtctttacccctaatttgaggaaaactctacttgtcaggcaggaaggaagatgaggaagaaagcctgcaggttcaggaagtgtggattatgtttccatttggatcagaggctgcagccagtttatataaggaaaaggaactatcatgtttctccctggatcctactactgggcctgcccgccccaggtgcaggagtggcaggggcctctcacctgtctccgtggcaagctccacttcagcctcccaggtgacaccatcttggctgcctttagatggggcttcagagcaggcctcccaggcacttccagaggaggacggccggacgcctgccctgcctgactcctgctttatcgttctccgttcactgatgaagcttggcttctccacggtgttgctggcagggtgcccgtagatgaggtac

SEQ ID NO: 11359 - DNA, 469 bp, Homo sapiens; identical to SEQ ID NO: 10677
  MAP TO AC004738.1; EXPRESSED IN LUNG, SIGNAL =   1; EXPRESSED IN BONE MARROW, SIGNAL = 0.96; EXPRESSED IN PLACENTA, SIGNAL = 1.1; EXPRESSED IN FETAL LIVER, SIGNAL = 0.96; EXPRESSED IN BRAIN, SIGNAL = 0.85; EXPRESSED IN ADULT LIVER, SIGNAL =   1

SEQ ID NO: 11360 - DNA, 465 bp, Homo sapiens
  MAP TO AC005586.1; EXPRESSED IN LUNG, SIGNAL = 0.82; EXPRESSED IN FETAL LIVER, SIGNAL =   1; EXPRESSED IN BONE MARROW, SIGNAL = 0.83; EXPRESSED IN PLACENTA, SIGNAL = 0.83; EXPRESSED IN BRAIN, SIGNAL = 1.1; EXPRESSED IN ADULT LIVER, SIGNAL = 0.89
tccaattatgccagacatgccatggatatacgtagagaaaacaccggaggcaacataccaaaatattaaatgtaattgactctacgaggtaaaactgagttttatgttcccctatttcctatttatgcaatagatttaaaaagtatttttacgactaattatacaattcaaaaattgcctgtgttgaaaagcatgaaagtacatgaaattgtactaccctggaaaccccaggaagtgtttagtttggaaagccagggccacctgctagtgggtgagtcatgggcacaggctcgcacctgccaccgcagacgccacacaggctgctgagcctttccaagcgaaatgccccacgtgcgccaacggccacctcggccgtcgccccacgcttggcccgcagccagaggaagcccagcaacttctgctctttcttaatttctagaaaagagtgaagagaggccttttcaa

SEQ ID NO: 11361 - DNA, 467 bp, Homo sapiens
  MAP TO AC004746.1; EXPRESSED IN PLACENTA, SIGNAL = 1.1; EXPRESSED IN LUNG, SIGNAL = 1.2; EXPRESSED IN FETAL LIVER, SIGNAL = 1.2; EXPRESSED IN ADULT LIVER, SIGNAL = 1.2; EXPRESSED IN BRAIN, SIGNAL = 1.1; EXPRESSED IN BONE MARROW, SIGNAL = 1.1
tttatcctcagcagaaatgggaaactactacatatttttgtatggattttattgatctctcagcgatatctgtcacattttctactgtggttcctaaaacctttgatacccagtgtctccagtacagtgtcactgtaataacatatcttctatcgtaggtctgcacttactctttacagtttcagtgtacaatttacagtttcagtgtactttcaaaataagtatcttaaagaataagatatcttattcttacaggaatctgagatatgtagcacatactttaactattttggagaagggagaaatgctgagtgttccagcagctatcataataacccttgcatatttttcagtagcataagattagaattatgggaacaagaaggagatgcagccatgtgggatggaggagaagcaagagaagtgaatgctgtgttggggctggggggacccaatgctaaggacaa

SEQ ID NO: 11362 - DNA, 487 bp, Homo sapiens
  MAP TO AC002119.1; EXPRESSED IN BRAIN, SIGNAL = 1.7; EXPRESSED IN ADULT LIVER, SIGNAL = 0.65; EXPRESSED IN PLACENTA, SIGNAL = 1.1; EXPRESSED IN LUNG, SIGNAL = 1.1; EXPRESSED IN BONE MARROW, SIGNAL = 0.93; EXPRESSED IN FETAL LIVER, SIGNAL = 1.2
ggagtctcaactaaaaggcaggagaactcatattttcatatttgggagcacaggggtttggggaaacagtaggttctttttaaatgaatatccttggcagccatgccccccacaaatcctttttctgcttctctaggaaaggtgctggaaagcagccagcacataggaattaaaaagacaaccggcacagaagagaaatgtgtgctaaaaatactaaaaccaacaaggattcatcatctgaaagcaaaataggttttctgtgtgcccctgcttctggacttgctcacagtcgtgatggctctgtgttatttgggggtgacagtaattatggagctggagtgctcctcgacaaagacagacagagctcctcgcagagggatggtttccatggcaatagcatcagcatctgaatgacttcctgtcacaacaagttggtgatttaatgagttcattactgaattccaaaggaaaaccagagagtggatga

SEQ ID NO: 11363 - DNA, 484 bp, Homo sapiens
  MAP TO AC004848.1; EXPRESSED IN BONE MARROW, SIGNAL = 1.2; EXPRESSED IN PLACENTA, SIGNAL = 1.1; EXPRESSED IN LUNG, SIGNAL = 1.3; EXPRESSED IN FETAL LIVER, SIGNAL = 1.1; EXPRESSED IN ADULT LIVER, SIGNAL = 1.2; EXPRESSED IN BRAIN, SIGNAL = 1.2
tgtattgctacgatggttcaagtatttacttttatgtaggaaaaatagatatgaaagggtaagctgaagttcatatttcttataatgattactgcaaatactgtggtttcatccttgatattttttgatttattgcatccattgattcattactgtcatttttatttgcatcagaaaagacaaactattaattcaaaacaattttctgtcagtaatcatgcttttaaatagctagagaattatctataacttgagatgcttcaaaataactatagtgcatatattagaatactgataccttttgaaaatccttgatattaaccaggtcgaatgaaaatatgtgatcctttgctccaacatacagcctactccgttcctcatccaaaaggaaggtatgataactggagctgttggccaagccattgaaagtgatcacattgttggattccaacatttctgcaaggtaacaaagcaaaacattggg

SEQ ID NO: 11364 - DNA, 463 bp, Homo sapiens
  MAP TO AC006463.3; EXPRESSED IN PLACENTA, SIGNAL = 0.74; EXPRESSED IN LUNG, SIGNAL = 0.93; EXPRESSED IN BRAIN, SIGNAL = 0.95; EXPRESSED IN BONE MARROW, SIGNAL = 0.77; EXPRESSED IN FETAL LIVER, SIGNAL = 0.79; EXPRESSED IN ADULT LIVER, SIGNAL = 0.73
ctgactcaaacggaaaagccatttggacagctcacctgaatataacatttcaggttggaaatgagatcacatcggaattaggagagagtggagtgttcgggaatcattctcctctggaaagggtgtctggtgtggtggcacttcctgaaggatggaatcagaatgcctgtcatcctttgaccaatttcagcaggcccaaacaggcagactcatggctggccctcatcgaacgtggaggctgtacttttacacataaaatcaacgtggcagcagagaagggagcaaatggggtgatcatctacaactatcaaggtacgggcagtaaagtatttcccatgtctcaccaggggacggaaaatatagtcgcggtgatgataagcaacctgaaaggcatggaaattttgcactcgattcagaaaggagtctatgtgacagtcatcattgaagtggggagaatgcacat

SEQ ID NO: 11365 - DNA, 462 bp, Homo sapiens; identical to SEQ ID NO: 5330
  MAP TO AC005317.1; EXPRESSED IN FETAL LIVER, SIGNAL = 0.69; EXPRESSED IN PLACENTA, SIGNAL = 0.75; EXPRESSED IN LUNG, SIGNAL = 0.49; EXPRESSED IN BRAIN, SIGNAL = 0.83; EXPRESSED IN BONE MARROW, SIGNAL = 0.57; EXPRESSED IN ADULT LIVER, SIGNAL = 0.8

SEQ ID NO: 11366 - DNA, 467 bp, Homo sapiens; identical to SEQ ID NO: 10687
  MAP TO AC005696.1; EXPRESSED IN LUNG, SIGNAL = 0.86; EXPRESSED IN FETAL LIVER, SIGNAL = 0.95; EXPRESSED IN BRAIN, SIGNAL = 0.75; EXPRESSED IN BONE MARROW, SIGNAL =   1; EXPRESSED IN ADULT LIVER, SIGNAL = 0.88; EXPRESSED IN PLACENTA, SIGNAL = 0.99

SEQ ID NO: 11367 - DNA, 484 bp, Homo sapiens
  MAP TO AC005358.1; EXPRESSED IN FETAL LIVER, SIGNAL = 1.3; EXPRESSED IN BONE MARROW, SIGNAL = 1.2; EXPRESSED IN ADULT LIVER, SIGNAL = 1.2; EXPRESSED IN PLACENTA, SIGNAL = 1.4; EXPRESSED IN LUNG, SIGNAL = 1.5; EXPRESSED IN BRAIN, SIGNAL = 1.2
cctgcagactggttgcttacaaaatctccaaattgtacattttttcacgaatcctcgcaaagcaagcttctctaacttttccatgtgcctctcgatttgcctttatttggaagtgtctaggctttggtgctaatccctgtaaagtgatgatgattgcatcgaaaaattattaggatggtagagcacaatgtgacacaatcgtttgtaaccacaagccaaaaaacaaaaaagagagagacagagacatcaaattctagaactgatccttttcatttcaaccctttagcttccactgcagagaggtccattccaactgctcagatgaagctgaaaagagcccgactcgccgatgatctcaatgaaaaaattgctctacgaccagggccactggagctggtggaaaaaaacattcttcctgtggattctgctgtgaaagaggccataaaaggtagttagaacaaatggcatgtctctccttggtgct

SEQ ID NO: 11368 - DNA, 494 bp, Homo sapiens
  MAP TO AC006251.3; EXPRESSED IN BONE MARROW, SIGNAL = 0.71; EXPRESSED IN ADULT LIVER, SIGNAL = 0.69; EXPRESSED IN LUNG, SIGNAL = 0.69; EXPRESSED IN FETAL LIVER, SIGNAL = 0.75; EXPRESSED IN BRAIN, SIGNAL = 0.74
cactaagaggtagacatttaggtcagtttaaagaatgtttgaaccctctggagatgacagtggtgtggaatatgaagtggaatccagactaaaacaggaaagagccaggagcactttctggagtcaggtgaatggaatgaccaggtgagcccaggagccatggggtggactccaagatgtgctgaggctacagtagaaccatcaaggaagaaactcactgaccatgcttttctcagcccagttcatgaggggctgccctggcaggagggctttcctgtggaggtggccaaggagcactgtgctctcctccctccaccaggtatcaaaagtcaacctgctgcccacccgcattcacagcagcactctgaacaatagcagaaaggtggaagcaacccaagcatccatctacagataactggataaacaaaacatgattcatttatataatgggatcttattcaactttaaaaaggaaagaaattctgacaacagtg

SEQ ID NO: 11369 - DNA, 459 bp, Homo sapiens
  MAP TO AC003086.1; EXPRESSED IN PLACENTA, SIGNAL = 0.76; EXPRESSED IN ADULT LIVER, SIGNAL = 0.76; EXPRESSED IN LUNG, SIGNAL = 0.75; EXPRESSED IN FETAL LIVER, SIGNAL = 0.68; EXPRESSED IN BRAIN, SIGNAL = 1.2; EXPRESSED IN BONE MARROW, SIGNAL = 0.73
tgaaaggcttagcttcctggtagctacaggaggggaaataacagaagcacaaccacctacatgtggtcaggatgactgtgattctacaagatagaaaatagcccacctgctcagaagtaagcctttcctgtcttagtggtctaaggagaatttaagcatggattctcacaaagggagcatcagttttttgttgctttttttttttcaagatggctaactagggatgtcagatgccagttctcctcagaaataagatcaaaattataggtgaatggtcaaaatctgaatgaaaaaatgaaggaagacaaccaggatctgtcagagagtccagagaatgaagctgtagtgcagaaaaggaaagcagcaggagtgcagcagagatcaacccctgagaaacccatagccctacggaaagggtagggcttctctgctcctcttacccctgtaacaatttgctga

SEQ ID NO: 11370 - DNA, 471 bp, Homo sapiens
  MAP TO AC004526.1; EXPRESSED IN LUNG, SIGNAL = 1.2; EXPRESSED IN FETAL LIVER, SIGNAL =   1; EXPRESSED IN BONE MARROW, SIGNAL = 1.8; EXPRESSED IN PLACENTA, SIGNAL = 1.1; EXPRESSED IN BRAIN, SIGNAL = 1.2; EXPRESSED IN ADULT LIVER, SIGNAL = 0.88
gctgtagctttggcttctggaaatgtgaaattggtttcaagcaaggtaatcacttttcttttgccttctgtactatagcatatctgttttatcatcaggaggttttttgttttgtaattacttttaaattaaactgaacttttttgtgctaaaactttgagtcccatgtttttttttttaaaaaaaaaaaatcctgcttctttacaggttattggaaggatgtgcaaaataattgacaagacatgcttatctccaactcctactttagaacaacatcttatgtgggatgatattgctattttagcacgctacatgctgatgctgtccttcaacaattcccttgatgtggcagctcatcttccctacctcttccacgttgttactttcttagtagccacaggtccgctctcccttagagcttccacacatggactggtcattaatatcattcactctctgtgtacttgttca

SEQ ID NO: 11371 - DNA, 486 bp, Homo sapiens
  MAP TO AC004912.1; EXPRESSED IN PLACENTA, SIGNAL = 0.73; EXPRESSED IN LUNG, SIGNAL = 0.98; EXPRESSED IN BRAIN, SIGNAL = 0.76; EXPRESSED IN ADULT LIVER, SIGNAL = 0.8; EXPRESSED IN FETAL LIVER, SIGNAL = 0.7; EXPRESSED IN BONE MARROW, SIGNAL = 0.83
tgttgattatgcttttaagatgggttaagtgactgttgctcatttaaaatgtgataatgcccagtcaagactggtcagaccttttaggaggtctcctagaaagagactcaatgattgtctgtttctctcttcaaaaattaaatggattcctccctgtagttaaagtcagtgtttcaggaaaaggattccctatacatttccatttgttgattaagtctttataagtatatttttaacttatggggctttgcactctctgcagagggagtgaggtgcatttgcagtcagctttcgctcaccactaagatggatgcagagcatccggaactcaggagttacgctcagagccaaggttggtggacgggagagggcgagttcaatttttccgaagtcttttctccagttgaggatcatctagactgcggtgctggcaaagacagcttagaaaaacaagaaggtgagttagtctctccctcacgattctcc

SEQ ID NO: 11372 - DNA, 481 bp, Homo sapiens
  MAP TO AC003664.1; EXPRESSED IN BRAIN, SIGNAL = 1.2; EXPRESSED IN ADULT LIVER, SIGNAL = 0.89; EXPRESSED IN LUNG, SIGNAL = 1.1; EXPRESSED IN BONE MARROW, SIGNAL =   1; EXPRESSED IN PLACENTA, SIGNAL = 1.2; EXPRESSED IN FETAL LIVER, SIGNAL =   1
tgggctaaggcatgttactaggaatgaagaagaaatacatatttgatttttacatgtctcctttaaggaggaatataattgataggatttcggtaattgacttttcgtaggggttatgcaaggtggaaagggagcaaacagggaagaccagcaactttctggcttgagtcactggaggagctgatgtcattgaggcttgaaacatgactaggagataagatctgtgagtataattaaacttgagggtctgtgtggtaattgagtcagcaacgtgggtctggagagcaacctgggtgatggtgaaactgacggggttgagaaattgatggtgccatcaatcagcggaatgttggagctggagtcagggatttgcccctttgctgcagccaaagaagccctataattactgaaagccaggctgatggccctagaagtatcatagaggcttggcttgcggcaagccctacctctccaaatgtgc

SEQ ID NO: 11373 - DNA, 446 bp, Homo sapiens
  MAP TO AC006355.3; EXPRESSED IN LUNG, SIGNAL = 0.49; EXPRESSED IN BRAIN, SIGNAL = 0.56; EXPRESSED IN BONE MARROW, SIGNAL = 0.52; EXPRESSED IN ADULT LIVER, SIGNAL = 0.57
ccatttcatgtatggtctgttctgagctctttagctggtgaaataaaaatagactcctaatagattttttttaatccaaattttaccaaactcatttagagtgaattttataaaatgtggaataaattttatgaggattctaagcagtatagccattttggttattaaaattaatttaaaatgtctctgaattattctaaatgttttaaagttttttttttttttttttttttttttttaaagaaacaacattactggaaaatgaagaaggatctacttgcaggtcttaacataaaacaccattttccagattgtctttcagactctcctatcccaaattattctgcatcccatcagcaagggacattttctacagaaccactcagcagcgaggcagacaagaggttgaggctaaaagaatccaagacaaaaaccagctgctgcag

SEQ ID NO: 11374 - DNA, 371 bp, Homo sapiens
  MAP TO AC005021.1; EXPRESSED IN PLACENTA, SIGNAL = 0.82; EXPRESSED IN ADULT LIVER, SIGNAL = 5.4; EXPRESSED IN LUNG, SIGNAL = 0.74; EXPRESSED IN FETAL LIVER, SIGNAL = 1.9; EXPRESSED IN BRAIN, SIGNAL = 0.76; EXPRESSED IN BONE MARROW, SIGNAL = 0.67
agaggaggaggccacatagggccaaaaatactagtgttccttctttaatgcaatgtttacaaggttttatacctatttatcatttaaaaaaaacacatctgtatggtaaaatagcatcttctctcttcctgttacataaatattgaggggctggagataaatggtttctatttccctcatttcccccttatccctaaacatacaggttttacctttgtcgatgaaaatactgatcccatgtggattaaataattctttgtcaaatccaccactgatttctagcgcttgtgcccttgggttttgttcattcagatccatcaagaagatttttcctggttcatctggcgcaaagtttggcatgcctggatatt

SEQ ID NO: 11375 - DNA, 488 bp, Homo sapiens
  MAP TO AC004542.1; EXPRESSED IN LUNG, SIGNAL = 0.61; EXPRESSED IN BONE MARROW, SIGNAL = 0.57; EXPRESSED IN BRAIN, SIGNAL = 0.74; EXPRESSED IN ADULT LIVER, SIGNAL = 0.58
tgggctctctttacagtccttcccactgactcaggtgggcccttgcccaccccaccctgggaaggctgggccaggatggggcaggcacctcaccccggccaggaacaggaacgggcaccatctcggggactgatgttttttgaatggcgctatccaccctgccctgctcggcctggctgtgcaggcctcttggtaccacgtctgttcgtaatgaccgtaacaactctattttcttccacagatgactctggggacgacgacgaggctaccaccccagccgacaagagcgagctgcaccacaccctgaagaatctttccctgaagttagatgacctcagcacgtgcaatgacctcatcgccaagcacggcgctgcactccagcgctccctgacagagctggacggcctcaagatcccatctgagagtggggagaagctgaaggtggtgaatgagcgggccaccctcttccgcatcacatccaatgctat

SEQ ID NO: 11376 - DNA, 479 bp, Homo sapiens
  MAP TO AC004983.2; EXPRESSED IN PLACENTA, SIGNAL = 0.75; EXPRESSED IN LUNG, SIGNAL = 0.67; EXPRESSED IN BONE MARROW, SIGNAL = 0.53; EXPRESSED IN ADULT LIVER, SIGNAL = 0.57; EXPRESSED IN BRAIN, SIGNAL = 0.86
ggagcgaagccttacaagtgttgggagtgtgagaaaacctcccacaagtcgcgcctcatcgagcaccttcgctcccacacgggggagaagccctgcggctgcagggaatgcggaaaggcctttttccagaagtcacacctcatcctgcgtcagaggactcacacgggggagaagccctgcgactgcgcggagtgcgggaaagctgctcccaggactcctgcctcctgacccacaggcggactcgcggggaagaaaccgtacgagtgctccgactgcgggaagacctcccggaaggcgaacctcatccgccaccacgggatccacacgagggagaagctgcatgggtgaagagaccgtgggatcgtcacaaagtcacatcacgaggtcgccgaacctctaggagggacatcgccagggaaacagccctcaaccaaaactacgacgccaccctaggcagaggtcccatatcggggtgaaat

SEQ ID NO: 11377 - DNA, 461 bp, Homo sapiens
  MAP TO AC004123.1; EXPRESSED IN LUNG, SIGNAL = 0.77; EXPRESSED IN FETAL LIVER, SIGNAL = 0.99; EXPRESSED IN BONE MARROW, SIGNAL = 1.1; EXPRESSED IN HELA, SIGNAL = 1.8; EXPRESSED IN BRAIN, SIGNAL = 1.5; EXPRESSED IN ADULT LIVER, SIGNAL = 1.2; EXPRESSED IN PLACENTA, SIGNAL = 1.4
agaagtgtggaggaagcaggcaaggacgggtgatgatgtgtccaggaagttgtggtgtagtccagccttgagctgcaggtagcctgggccagtggcgggagggtctgggactgcaggtagatgggttagcctcagaaggattcagagcatggggaacaaagtgagattatatcttgcttctcatggtcctttagtcctttggcttcaaaagccctcatgtactttcatattttacctttctagacaaagcagatgtacaatgttgtgatcaagtctgctcgagtgtcctccctcccaggagaaaatataccatccatttgttcatttattcattcatttctttaaaaatactccttaaagtcctgctctatgccagtttctgtcttaggagctggagatgcagcaatgaacacatcagacaaaaatgccagctcttgtggagcttaatttccagaggggga

SEQ ID NO: 11378 - DNA, 494 bp, Homo sapiens
  MAP TO AC004148.1; EXPRESSED IN PLACENTA, SIGNAL = 0.7; EXPRESSED IN BONE MARROW, SIGNAL = 0.66; EXPRESSED IN ADULT LIVER, SIGNAL = 0.88; EXPRESSED IN LUNG, SIGNAL = 0.77; EXPRESSED IN FETAL LIVER, SIGNAL = 0.69; EXPRESSED IN BRAIN, SIGNAL = 0.78
gcataattttgaggtttccaggtacaaatgatatgtccatgtctatatggttcagtcccaggagttgagcaaagatgctttcacgctcctggaagtcaggcaccttcagctgattccaaggcttctctaagcgccaacctggaagcctgctgtaaggacaactgtagtccaagctcccagggaccagtgattctggcggcatcctggggcggctcagtttctggcggttctcagcttcctcctaaagtactcaggggcagcctcgtacagccactgtgcatctatgacgcagaggtcccgcatgtagcacttgttggtgtagagcagctcagtgtacacgacgcaggccggcttgcagtggaagaggacagacgacgggtggatggccactggctggtgggtgtccgtggtggcataggtgccatctggctgaagctcggcggtgctcatgaagaggctgtgagccaggcagcggcggacactctccacgtctc

SEQ ID NO: 11379 - DNA, 492 bp, Homo sapiens
  MAP TO AC005058.1; EXPRESSED IN BRAIN, SIGNAL = 0.89; EXPRESSED IN ADULT LIVER, SIGNAL = 2.1; EXPRESSED IN PLACENTA, SIGNAL = 0.69; EXPRESSED IN LUNG, SIGNAL = 0.79; EXPRESSED IN FETAL LIVER, SIGNAL = 0.96; EXPRESSED IN BONE MARROW, SIGNAL = 0.7
aaatctggcagctgttaggcaattcaactaataaactgattattttctattttataaatgtttaatttcaaagtatacatattggtgctaacaaaataaaatgaattgattagcataatgtatgtcacaaaataaatagggtaattactgaatacacatcacatgtataataaaaaccacaaaattcaaatggaaaaatgaaaggctttgccttctccattttagattttttttagtacttctattccaagacaaaactagattaaataaattagaaattaccttgacagccactccttttccttcaggaaattctagaagatgaaaagtcagttcttcaaccctagtaatgcagagctttgggtcagttgttcttcttaatgcctgaactaatgcccgggtcctgttatcaatactcacccttgcgataatctacaaagacatattaaatagatatgattagaatacaaaactgctctaaagaacaatgaa

SEQ ID NO: 11380 - DNA, 485 bp, Homo sapiens
  MAP TO AC004891.1; EXPRESSED IN LUNG, SIGNAL = 0.81; EXPRESSED IN PLACENTA, SIGNAL = 0.79; EXPRESSED IN FETAL LIVER, SIGNAL = 0.75; EXPRESSED IN BRAIN, SIGNAL = 1.8; EXPRESSED IN BONE MARROW, SIGNAL = 0.82; EXPRESSED IN ADULT LIVER, SIGNAL = 0.77
tctggaagaaattctgcaccatacacagagcttctctcattttatcaaacaaaaatgattaggaaatgattttggttggaaaattcctacctaagttgagagaaaaattctgatcatcttaacctcagaataaggtacacttgtttacatatgaaaaatcattaaatagatgatttgggcttaaaaagacacgcaaaagtggctctggaaatgggttccaccttacctttgttgcaaaatgttccatcatatgcagtattagagcaatcgcaggagtaaccgtggtatctctctaggcatttgcctccattttcacagtttgttccatagctggtgcaatggcccgagcatccggatatgaacccagatgtgacctttgctctttcctccaggtcaagtgtcaccccattcatcctcaaggagcggatgcagcccaggaagccctgctggcccccagcaccacctgggaatgacagaaggcacag

SEQ ID NO: 11381 - DNA, 456 bp, Homo sapiens
  MAP TO AC005191.1; EXPRESSED IN PLACENTA, SIGNAL = 1.2; EXPRESSED IN LUNG, SIGNAL = 1.1; EXPRESSED IN FETAL LIVER, SIGNAL = 1.1; EXPRESSED IN BONE MARROW, SIGNAL = 1.2; EXPRESSED IN ADULT LIVER, SIGNAL = 1.1; EXPRESSED IN BRAIN, SIGNAL = 1.3
cctgggatctcatgtgtgtgcttgtttctttcctacctcacctaacttcacttcatcccctagtaccctgtagcaagagaagaacattcctccacctctgacccttcgggtggatccacagtgagcactgccttcacagtcaagtggcagtgatgaagctgtaggctgaaaacaggacaaaaatggagaaggcggaaaaaatggcaaaaaaaaaaataaataaataaaggaaaggggatcgtcttacgtggagaaggcattgttctgtttctcacatcggatccccttgcagttgttaggctcatcgatagctctggtttcataatagaagtaaagctggttcagtccattggcaaaagctagtagtaccaggcagtagataaagaggaatttgaggatatcaagcagcatgcgtcccaaagagatctgcagaggtcctaagtgggagttggctgt

SEQ ID NO: 11382 - DNA, 416 bp, Homo sapiens
  MAP TO AC004990.1; EXPRESSED IN PLACENTA, SIGNAL = 0.71; EXPRESSED IN HELA, SIGNAL =  58; EXPRESSED IN BRAIN, SIGNAL = 0.55; EXPRESSED IN BONE MARROW, SIGNAL = 0.57; EXPRESSED IN LUNG, SIGNAL = 0.56; EXPRESSED IN ADULT LIVER, SIGNAL = 0.64
tttggatgctgtttcaaatccttttctgaacagaaatattacaggataatatttgacaaatggctgttgaagtacttttaaaagtaaaaatgccttaaaagtatagtcactgatttaagatattttttcagaaaatcaggtaatactaattagttactttgtggtagttgaggatattttgaagttgtgtgtatatatgtatgtgtaatttcaaatttcatagtttaaaagctaaaaggttggttagaaattacctataatcctctttgtgtactcccaacttaggatacccaaaggacaataacaaatgtctctgatgaagtctccagtgaggaaggtcctgaaacaggatactcattacgtcgtcatgtggacaggacttctgaaggtgttcttcggaatagaaagtcacacca

SEQ ID NO: 11383 - DNA, 493 bp, Homo sapiens
  MAP TO AC005606.1; EXPRESSED IN LUNG, SIGNAL =   1; EXPRESSED IN FETAL LIVER, SIGNAL = 1.1; EXPRESSED IN BRAIN, SIGNAL = 1.3; EXPRESSED IN PLACENTA, SIGNAL =   1; EXPRESSED IN BONE MARROW, SIGNAL = 1.6; EXPRESSED IN ADULT LIVER, SIGNAL = 1.2
tttgaatcctagctcctgcgcttaccgccccggtgactggaccaggttcctcactgctttgtgcctcaatgtcctcatctgcgagctggggccatgacagaacccgcccggaagccctgcctgtgctcagcgtccaccccaattcccgggggcgaggcctggtgctccctgggactgtggccctgtctggaccaaaagcgtgagttctggctccgagcatctggaaggttcagccctccccctcccccaagggtcccaactgtgactcactgagccccggccggtgcacctcccgcagggtgtgggtcatgcccgccttgtagcccaggaaggccgtgaggtgcacgggctggctggggtcatcccgcggccacgtcttcaccttgccccggtgccggtggctcctcttatggggcaggaagcccaggtgtccgtgccgaggggcggaaaacttccggtgggactggggggcaggaaggaaggaggtcagacc

SEQ ID NO: 11384 - DNA, 461 bp, Homo sapiens
  MAP TO AC004126.1; EXPRESSED IN BRAIN, SIGNAL = 0.58; EXPRESSED IN ADULT LIVER, SIGNAL = 0.56
gtttctcttggctagtggggctgcggcaaggatcaatgttctgaaggttcagagacagggcaagaaaagggcagggggctggcaggagggctgcatggccccgaagcagctcagctctttggtatgacactggcggtgtgtggggcatccggctcactcctcctccacactgcgggcccccttggccgctcgcctctggcgccagcgcagctcctccacctggcgttccagccctcgcaccttggcctcgagttgggccccagaggctcgggagccagtgagccggctcagcagggcgtagaggatcagcaaggccaggagtagcagggcccgggtggaagggtcaggcaccgacctcatcagggccacgaagccggccaggaagatgacaagcttcaggccccacaggatccgccccagcaaggccaagaccaagccgaggagcagagacagcagccagt

SEQ ID NO: 11385 - DNA, 469 bp, Homo sapiens
  MAP TO AC004896.1; EXPRESSED IN PLACENTA, SIGNAL =   1; EXPRESSED IN LUNG, SIGNAL = 0.88; EXPRESSED IN FETAL LIVER, SIGNAL = 0.96; EXPRESSED IN BONE MARROW, SIGNAL = 1.2; EXPRESSED IN ADULT LIVER, SIGNAL = 0.9; EXPRESSED IN BRAIN, SIGNAL = 0.95
caattcacagctcaaggaaatgataaacagaaataaattgatcatttaaaatgttagatttttgtgaccaaacattcacttagggtttcaaaagccaatcaccctctccatgaagtaatcaacatatacccttataatgcagagcagcacttttgctttaattgctagttgctgcattcttttcgtggtccctacaattaaagaagccttaaggtaaggcaatgaaccagtataaatgtctcaaacatgagtaagtgatgaggcccctgtctacagaccagctgcttaccagcacttgttgtgaggttgtgtgaattattgatgctataccataattcctataaatgtcagttgcctgaagaggcttagatgcctctcttttggcatcaggctggccagctgtcccctcaatgttgcctggcactatgatgtgaaggaaagaacataatggcacatctgattagcttgg

SEQ ID NO: 11386 - DNA, 483 bp, Homo sapiens
  MAP TO AC002364.1; EXPRESSED IN LUNG, SIGNAL = 0.48; EXPRESSED IN BONE MARROW, SIGNAL = 0.64; EXPRESSED IN BRAIN, SIGNAL = 0.62; EXPRESSED IN ADULT LIVER, SIGNAL = 0.42
aaaaaggtggggagcagcagggcctggaagcatccgctgcttcagtcctggcttggaagtcatcctccttgtgagtgacttcccccatccctggggtacatcgttctatgcttagttgagaaaggaactttttgcaaaggactctgagactgtagccacagctgcccaaagggggctgcacgtggggggtctgtgcgcattgtgtaggtcgcgcctgccctgggactgcgccatctgtgagcgccgcctgcacgcgctcttccctcccccgttctgtttgcagccacatccgagtctatttgcccccactggactcgggcacgcccaacacttactgctccaaggctctggagttccaagtgccgctggtgtttaacgaagtgttcagaatccccgtgcattccagcgcgttgacactgaagtcacttcagttatacgtgtgttcagtgactccgcagctgcaggaagaactgctggtatggc

SEQ ID NO: 11387 - DNA, 449 bp, Homo sapiens
  MAP TO AC004129.1; EXPRESSED IN BRAIN, SIGNAL = 0.69; EXPRESSED IN ADULT LIVER, SIGNAL = 1.1; EXPRESSED IN PLACENTA, SIGNAL = 0.69; EXPRESSED IN LUNG, SIGNAL = 0.72; EXPRESSED IN FETAL LIVER, SIGNAL = 0.88; EXPRESSED IN BONE MARROW, SIGNAL = 0.84
aagaagaatgctttccaacgtttggaaattccttgaacgatgcacatataatgtatatgcaataactcttcagtaaaggaaaagacataaagaaatgagagactgcataaaagcctgggcaattctatattttaaataataaggtgaaacggcaaaatgttttgttctacgtggtatctgttcaactgtaattctgtactccacatgatgtgaaaatctaagtttgagcaaagttggccttctttttttctttaatccacactgacattgtgcccagagatggggctccagctgttgagggactagaagaacctcagggagtgagtgatcagctcaataccgaatcctccgtgtgccaagaggatccctttgaccctgaagccattgcaaattgttgctttttcttgtaagtagagtctgcccccacgtggtgaaagtgagaggctgct

SEQ ID NO: 11388 - DNA, 476 bp, Homo sapiens
  MAP TO AC005070.1; EXPRESSED IN PLACENTA, SIGNAL = 1.2; EXPRESSED IN LUNG, SIGNAL = 1.2; EXPRESSED IN FETAL LIVER, SIGNAL = 1.1; EXPRESSED IN BONE MARROW, SIGNAL = 1.2; EXPRESSED IN ADULT LIVER, SIGNAL = 1.2; EXPRESSED IN BRAIN, SIGNAL =   1
aagagacgcacttatagtcaagaggtaagaagttaacttaaaaagggtgaattggtagtttttttcctattacattgttttccttaaattactggtaaattttgaaataaacagtcccaagatgtgattatttgtgtaatttttttttttaatttgtaaacagggatatgacagatcttcaaccatgttaacattggggccttttagaaattctaatttaactgaactgggtctgcaagaaataaagactattggttatacgagccctaggagtaggactgaagtcaacaggcagtgtcctggagaaaaggaacctgtgtcagaccttcagctaggactcgatgcagttgagccaactgccctacataaaaccctggaaacgcctgcacatgacagggctgagcccaacagccaactggactcgactcactctggacggggcacaatgtattcttcctgggtaaagagccctgaca

SEQ ID NO: 11389 - DNA, 484 bp, Homo sapiens
  MAP TO AC004417.1; EXPRESSED IN PLACENTA, SIGNAL = 0.61; EXPRESSED IN BRAIN, SIGNAL = 0.56; EXPRESSED IN BONE MARROW, SIGNAL = 0.73; EXPRESSED IN LUNG, SIGNAL =   9; EXPRESSED IN ADULT LIVER, SIGNAL = 0.79
tttctacaatgttcaaaccatgttctatcattgaagcagaccagacatgagaaagaactgaaaatttcactttagcttctgtactgctgattcctcctatgggactagggtcatagggagaaaaatcaatggactccagagccaaacagatctggatttgaattctaccttttcaccaaccatgtggccttgggaaagtgactataatctcttttagttccctcatttctaagagataaaaacataccttcagggacctctgttccatgcttcctgggcaccctgaactttgtctttcagaacgctttttgtagtttcttacaatcacttgtttgatgttcatttgcctttgttgctggactgaaggcaccttgaaagcagtgactggatctgcgttggtcgcagctatatctttatcctgtggtacagtgcctggcacataagtatttgctgaaagaatgaatgggtagatggatgaggggat

SEQ ID NO: 11390 - DNA, 474 bp, Homo sapiens
  MAP TO AC005696.1; EXPRESSED IN PLACENTA, SIGNAL = 0.96; EXPRESSED IN BONE MARROW, SIGNAL = 0.88; EXPRESSED IN ADULT LIVER, SIGNAL = 0.76; EXPRESSED IN LUNG, SIGNAL = 0.82; EXPRESSED IN FETAL LIVER, SIGNAL = 0.95; EXPRESSED IN BRAIN, SIGNAL = 0.68
cagcttgtgaggtaagcaacacatttgaaacttataaatatgaagtttctcttctgatgttaaaaaaaagaaagaaaaacttataactaagaatataatattatggatgtagtatgacaggggctaaaagttctggaggctttgcgggggtgtcctttttaatgaaatacttgtatgatttgaaagggaatactcttgaaaagagtatcttcagggttaatgagattttaaataaattctatttcttcagaatagaaatgaggtcttttttttaggagtcatttgaatttttctttcagaaatcgagctatagcagattatcttcgttcaaatggctatgaagaggcatattcagtttttaaaaaggaagctgaattagatgtggtatgttttactttttacaattcaaagtatagttaatgagtggattttcactcaagtatctgtagttaacagttacgcacaattttgtca

SEQ ID NO: 11391 - DNA, 477 bp, Homo sapiens
  MAP TO AC005213.1; EXPRESSED IN LUNG, SIGNAL = 0.77; EXPRESSED IN BRAIN, SIGNAL = 0.62; EXPRESSED IN BONE MARROW, SIGNAL = 0.54; EXPRESSED IN ADULT LIVER, SIGNAL = 0.44
caaagggtgacttaggctgccttcacttctcatttagggttgtaaacctcctgggaaggtaggagcatctcaagaattctagggctcttacgagaacaaagtttgtaatgtatgccctgaagactcacctcagtggggcagggatgtttctgttttcagaaagtaaactgcttggttttaccctacaattcaggcaaaggaacccctgacgtgggtcatgaggtataagtggaaactaacctcaatgctttttttaatctttcagaagaggagcaggaaacctcaggggattttggcagtggtgggtccgtggtcctgctggatgacctagaatatgaacgggagctgggaccaaaggacaaagaggggaagctgagggtgcacacccgagccgtgacagaggatgatgaggatgaggatgatgacaaagaggatgaggtcgggtacatatggtagtgcccacaagaaagaggacac

SEQ ID NO: 11392 - DNA, 383 bp, Homo sapiens
  MAP TO AC001226.1; EXPRESSED IN PLACENTA, SIGNAL = 0.61; EXPRESSED IN LUNG, SIGNAL = 0.5; EXPRESSED IN FETAL LIVER, SIGNAL = 0.68; EXPRESSED IN ADULT LIVER, SIGNAL = 0.64; EXPRESSED IN BRAIN, SIGNAL =   1; EXPRESSED IN BONE MARROW, SIGNAL = 0.57
tctaaatttttaagcattttccctgaaaaagcaaatattttaaaggcatgagaagatgtactggtttaggaaacaaagccactaaaaatactttattttttaaaagaaggatttaaaatattaccttgaagctgacatattgtagatggtttgaatgtcttttaataatctgtttgatcagctctggatgggtagctttcaaataagatgtagctggctgattcagttcaaattcaaaacatctccacaagtcaggcatgtgaaatacctggttccagttgcggcaaacttgtgaagcatgagcccggtcaagaagaggcaaatatttaaatacttggagaataatgtcctgaaggagattaccccaatcacaagtctgagaa

SEQ ID NO: 11393 - DNA, 487 bp, Homo sapiens
  MAP TO AC005823.1; EXPRESSED IN PLACENTA, SIGNAL = 0.74; EXPRESSED IN LUNG, SIGNAL = 0.93; EXPRESSED IN FETAL LIVER, SIGNAL = 0.91; EXPRESSED IN BRAIN, SIGNAL = 0.69; EXPRESSED IN BONE MARROW, SIGNAL = 0.95; EXPRESSED IN ADULT LIVER, SIGNAL = 0.83
accttcaccaacctttccagaaacattctctttccaaaagtttatatatcacattttctcttaagttgacatccctacatcccaggaggcccctgtttcctttttgcacacagaacactgattccttagatttcccagatatgcctaaactggcatcctcttagttgagccactcagatgggaaccccctaccccagatggagaaaagggtacacacctgggagctcagaccggttcaacggtcaggttatgggaaggagaaaagaccaacacaagctcatccgggtctagggaggcgccgagtgaagcctcgggcagtgttaggggtcatggccgtgcccatggactggctggatctgagagacatggccatgaccatgctgccccagagcaccagctccttcagagtgtggacgctgaccacgtggtcccaggtagggaggcttttgcggagtttggggtgcggcgccttttctgtgtaaaggaa

SEQ ID NO: 11394 - DNA, 459 bp, Homo sapiens
  MAP TO AC003954.1; EXPRESSED IN PLACENTA, SIGNAL = 0.82; EXPRESSED IN LUNG, SIGNAL = 0.87; EXPRESSED IN FETAL LIVER, SIGNAL = 0.8; EXPRESSED IN BONE MARROW, SIGNAL = 0.66; EXPRESSED IN ADULT LIVER, SIGNAL = 0.88; EXPRESSED IN BRAIN, SIGNAL = 0.73
aactaactagacctgtttaaccaaccaggttgctttcctgacctctatggacttaatggtgttttagctgagttcacctctaagagtgttatgtgactttcaccttaagtcgtagaataccagctcagggcatgcaagcaatagaatgctttccaccaaaagagggtcaggaaaaagaagaaagtccataaaaatcctctactaaatgatataacctcagtaaagaatagctgcccgatatgatttattttatatgatgatatttctactgactaattctccataggcagtatagattcattgtttctttcaaatctttatgatatcctttaaagattcagacacattaaactgctcaatccctttgaaatacacaacccgtattttagcctgatgggttctcgattgaatctttgaaaagaaaaacaaaaaagagatataaggtatgacccctatgca

SEQ ID NO: 11395 - DNA, 500 bp, Homo sapiens
  MAP TO AC005828.1; EXPRESSED IN PLACENTA, SIGNAL = 0.59; EXPRESSED IN FETAL LIVER, SIGNAL = 0.67; EXPRESSED IN BRAIN, SIGNAL = 0.88; EXPRESSED IN BONE MARROW, SIGNAL = 0.79; EXPRESSED IN ADULT LIVER, SIGNAL = 0.63; EXPRESSED IN LUNG, SIGNAL = 0.77
ctccgaagcaatactggctggatcaaaagataagaaccccacaagttttcctaggttgtcaaaccaagattaatggcacagcagtcaggaggagctattgccagtgtagtgcaacatgacagcatattctcttttttgcaagtaaagcaattcactcggccatctctagagactttcaaaagcgggtagatctccacattttcaacactaatagcgttccatcctgtcaaccataagaagccacagctgtgagacatgaatttactgtagccgtccacatatccagttggttctaccacccaaattttacttgcaagtatctgtttgtttccatctctcatgatcataatgaccacatcctgggatctcacatggattactttcacctcttggtctcccttcttgccctcttcgagtccattctccaccagcagccagagcaatcttataaaaacacaaatcagaccatgtaacctcttcctgaaaatcctccagtggct

SEQ ID NO: 11396 - DNA, 461 bp, Homo sapiens
  MAP TO AC006504.1; EXPRESSED IN ADULT LIVER, SIGNAL = 1.2; EXPRESSED IN PLACENTA, SIGNAL = 0.82; EXPRESSED IN BRAIN, SIGNAL = 0.82; EXPRESSED IN LUNG, SIGNAL = 0.7; EXPRESSED IN BONE MARROW, SIGNAL = 0.54
catcattaagattaccatgttgcacttatagtaatataaaaaatgcccttttcttccaagctgtcatcagacttacagccaacaccttccttctcttccacatcttcacaacccttctggatcacaagcctaagtccactgaccacatcacctgtcacctggaccttgcacacttagtgatgctcctcattgcggtcttcttggcatctccagacctgtttaagtaactacatttgcagaataacttaaagtgcaaggcatttttctacatgtacagggtgatgaggagcctctccagctccatcacctttctcctgactgtgctccaggtcatcaccatcagccccagcacctcctggttggtgaagactaaacagaaattcacaggttacattttctactcctgtttcttcctatgggttctcagtttgtctctcagtagtaacctgctttcccccact

SEQ ID NO: 11397 - DNA, 458 bp, Homo sapiens
  MAP TO AC005832.1; EXPRESSED IN PLACENTA, SIGNAL = 0.91; EXPRESSED IN LUNG, SIGNAL =   1; EXPRESSED IN FETAL LIVER, SIGNAL = 0.71; EXPRESSED IN BONE MARROW, SIGNAL = 0.83; EXPRESSED IN ADULT LIVER, SIGNAL = 0.94; EXPRESSED IN BRAIN, SIGNAL = 1.2
gtccgtctggttttgcattcttttggatatttttgaaagagcggtgtaattttattttaaaatgtcactatttacaatatgatggaaatgacatcctctgcaactatttaaatttatgataaaacgttagatgtcgacttgacaagtacaagggagtacacaatttcaaaactccttttagggaatactcaacaacaacaacaacaacaaggtatgcaggccatggtcctgggcgagtctggtgcagccccgtgtctgagggccaagcccacggtctccgtgggagccgaccgccagccctccgcgtacctccatgatgcaggccagctgctccacctcattctccccggggaacagggggtagcccgtgtacaactccgccgtgatgcagcccaggctccacatgtcaatggccacgtcgtaggggtggcccaggatcacttctggggatcggtaga

SEQ ID NO: 11398 - DNA, 489 bp, Homo sapiens
  MAP TO AC004622.1; EXPRESSED IN PLACENTA, SIGNAL = 0.72; EXPRESSED IN ADULT LIVER, SIGNAL = 0.62; EXPRESSED IN LUNG, SIGNAL = 0.71; EXPRESSED IN BRAIN, SIGNAL = 0.79; EXPRESSED IN BONE MARROW, SIGNAL = 1.5
ccatgaatttttgggaaataacttgtttgtttgtgaaggaaagaaaggttgttagagaatgaatttttgcgacgataaaatccagggccaagatatcccaatgccattttttgactacttaatctctaaatgccacagacaacaaaaacacaacttaccaatcaagcccttttctgtacttgaagtgacagttttataaactgggtcagtggcatccttggggtccaagccttcagatgactcagctggggtgctctccaatactctccgtttaactgtcccatagtttggttcatacgtgtcagacagagaactggaggaggtccaactctttctctctaggcttcctttacactgcccacaagttctagagcagcttttagaacaggaatagggctcagagtcagtgggttcaacttcagcaatggggtcatccaaatgggtatgtctgtaagagttcaaaaaatcccagctttttgggtttggaag

SEQ ID NO: 11399 - DNA, 463 bp, Homo sapiens
  MAP TO AC002042.1; EXPRESSED IN PLACENTA, SIGNAL = 0.74; EXPRESSED IN BONE MARROW, SIGNAL = 0.72; EXPRESSED IN ADULT LIVER, SIGNAL = 0.73; EXPRESSED IN LUNG, SIGNAL = 0.77; EXPRESSED IN BRAIN, SIGNAL = 0.99
tgaaatacaactgagaacccagagagagtaaaatcagcaaaatgtcaagaatgtacagctccaaacacctgctcctccacagaaacagggaaaaccaagcagaactgtcagaaacgatgttgtaaaacctgttgaaaaccatcaagttgtacagcaaccatgtaactacaaaatcaagaaaaacaatgaagaacaggagaaaagcctcgtggactttttacacgtccttgcccatatccttcccttacttgatggcagtcttaaaaacaacatcctgagttgccagtatgggcctctgctcagtggttccagagggaaaagaggaggtcttacttgcaaagtattgtgttgttacattaaaatctgtattagggctatccagaggtctgaaacaaggctctcttttttctctaagtcagaaaaaaaaatcagtttaaaaaattggcacgagttacttgggagt

SEQ ID NO: 11400 - DNA, 479 bp, Homo sapiens
  MAP TO AC004063.1; EXPRESSED IN BRAIN, SIGNAL = 0.58; EXPRESSED IN ADULT LIVER, SIGNAL = 0.5; EXPRESSED IN LUNG, SIGNAL = 0.5; EXPRESSED IN FETAL LIVER, SIGNAL = 0.76
ggcaggaactgcattttacacagactccaaagcacttgcacagtaatgaacatacaataggaatttattagctagacactcagaaggtttatgaaccctctttttgcctatttatattttctaaaagatattgatcttttatttatttcagtaaaatattacatgcatgtatagtatgaaataggtttatagcctctatttaagagatctttctgggacgctcaaaacaatctaataagcacttagaatgatacttttatttcttctcactttctcttcttttctatacagagaaccttggcaatatcctgaatttagtactaaaagcaaaggataaggaaggtgttatgtggcctctgtataacagagaatgttctatactgaaaacttatgatatactttctaccttagacaaagccagacaggtaagattttctttatcatagtgtctagcacaagctggggaatataactgctca

SEQ ID NO: 11401 - DNA, 458 bp, Homo sapiens
  MAP TO AC004219.1; EXPRESSED IN PLACENTA, SIGNAL =   1; EXPRESSED IN LUNG, SIGNAL = 1.2; EXPRESSED IN FETAL LIVER, SIGNAL =   1; EXPRESSED IN BRAIN, SIGNAL = 0.86; EXPRESSED IN ADULT LIVER, SIGNAL = 0.97; EXPRESSED IN BONE MARROW, SIGNAL = 0.96
tggccaagagaaacaagagcatgcatccacaaaaagaatgtagaagatttattcatgacagcaccaaactgaaacaactcaaatgtccacctataatataattgatgaaaaattgtgtcatattcatacaatgagatatcatacagcaataaaaaatactactccatgtaactacataaataataacaaaaacatgtagagtgaaaggacaaagacctaaaatgtatctactgtttgattctgtttatatgaaatttagaaagagaaaaattctaatttatggtgacagagtttaggatgtttgttacctctgggtgtagttggttattgatatggcttggctgtgtccccatgcagatctcatcttgaattgtagctcctataattccgatgtgttgtaggagggaactggtgggatgcaattgaattataattccatgctttactcgtgatagtga

SEQ ID NO: 11402 - DNA, 449 bp, Homo sapiens
  MAP TO AC005858.1; EXPRESSED IN ADULT LIVER, SIGNAL = 0.71; EXPRESSED IN LUNG, SIGNAL = 0.76; EXPRESSED IN PLACENTA, SIGNAL = 0.8; EXPRESSED IN BRAIN, SIGNAL = 0.79; EXPRESSED IN BONE MARROW, SIGNAL = 0.71
ccattcattccacagcattgattgagtgtccgctgtatacaatgggataaggaaaagatgtccgttggttcatgcgcaatgatggtaacaggttttcattgctgaacattacatatttcctttttaattttaatgtttaattttcgtgggtacatagtgggcatatttatttatggggtacatgagattcactctaataaggtgtagtgagttccagggatttcagagttgatcaaggaaaaccatatggccacaaggtggcagtagcgcacaatgaatttgttcaggcttcgctttgacagatttgccagcagggcaagtccctcatggcacgagaccatccagaggccatggttcaggagccctacctagaagatgaagaggtcaagggaaattctagggaagatggggcttatgtttccaggtgatgtttctcagcagcacagtgg

SEQ ID NO: 11403 - DNA, 485 bp, Homo sapiens
  MAP TO AC004064.1; EXPRESSED IN PLACENTA, SIGNAL = 1.1; EXPRESSED IN LUNG, SIGNAL = 0.99; EXPRESSED IN FETAL LIVER, SIGNAL =   1; EXPRESSED IN BRAIN, SIGNAL = 0.94; EXPRESSED IN BONE MARROW, SIGNAL = 1.1; EXPRESSED IN ADULT LIVER, SIGNAL =   1
tcccaatcaagaatcaagaaatcaagactgctaccagccagtcaagaaattagatgggtcataccagctagtacaggaccttagagctatcaaccaaatagtccagagtacccaccctgttgtcaccaatccttacaccattcttagcaagattccatataatcatcaatggtttactataataaatttgaaggatgctttttgggcatgtcccctggctgaagatagctgagatatatttgcttttgagtgggaggatccatactcagggtggaaacaacaatatcgatggaccgtcttgccccaagggttcacagactcccctaaactttttggccaaattttagaagaagtactagaaaaagttgtcatcccagaacaaatatgccttcttcagtacctggatgacattcttatatctggtgaagatctagagaaggtaactgacttctctacacatattcttaaccatctgcagtttgagg

SEQ ID NO: 11404 - DNA, 472 bp, Homo sapiens
  MAP TO AC005738.1; EXPRESSED IN PLACENTA, SIGNAL = 0.67; EXPRESSED IN LUNG, SIGNAL = 0.7; EXPRESSED IN BRAIN, SIGNAL = 0.64; EXPRESSED IN BONE MARROW, SIGNAL = 0.7; EXPRESSED IN ADULT LIVER, SIGNAL = 0.61
gagaaacccaagaaggggtcgccagaacgtgggctttctttcaccttctttgggggagcggccatctccccgtcagatggccaaggaccagcccggaggggaacaaagccaggagggtaatttaaaggtacccttgtcttaccccctccaggggtagcccctactattgtactgagctccccaccccgttttctaccaggatccatcaatcataaatatgcacgaataactgaggcccaaatcctttcccatttcttcagtggggctccccagcactcgggacaagaaggaaatttggaggcaggaactcagaggaatcgggcagaactcacgtttccaactgtgcaagacaactccctggaactcacagcagccatcataattatcgcttgcagaaggggtcttatcacataacagctttctcactcctcagggggcagggggtggggcccagtctcaaccgcagggactt

SEQ ID NO: 11405 - DNA, 478 bp, Homo sapiens
  MAP TO AC004223.1; EXPRESSED IN PLACENTA, SIGNAL = 1.1; EXPRESSED IN FETAL LIVER, SIGNAL =   1; EXPRESSED IN BONE MARROW, SIGNAL = 1.3; EXPRESSED IN ADULT LIVER, SIGNAL =   1; EXPRESSED IN LUNG, SIGNAL = 1.2; EXPRESSED IN BRAIN, SIGNAL =   1
cttattccctggtcagactggctgtccccagggtactgctccattcaggtttgctgagcagatacagggtgcccagcagaagggtctctggcccatggctggacacacaccaggaatgtagtctgtgtccactgcagtggacacagataatcatgagatctcagggctggaatgtgagactgggtccctgcccttggatctctgcccctcacaccgccctcttcaccataccagccccctccctatccttaccatctttgctgttggagttactcagcttcccttctgctttcttggtactggctgagggcttgctgggggccttgcgggacacagcagaccctgagggacccttattctcttcactgctaccccctgtagtggagctcccctcatctccagccactacagtgaagtctgccttctccttggacaactggtacagttcctgaggcggggagggacaatgtcagagggt

SEQ ID NO: 11406 - DNA, 484 bp, Homo sapiens
  MAP TO AC004134.1; EXPRESSED IN PLACENTA, SIGNAL = 0.87; EXPRESSED IN LUNG, SIGNAL = 0.91; EXPRESSED IN FETAL LIVER, SIGNAL = 0.82; EXPRESSED IN BRAIN, SIGNAL = 0.7; EXPRESSED IN BONE MARROW, SIGNAL = 0.93; EXPRESSED IN ADULT LIVER, SIGNAL =   1
cacagaggagtctttcaccgattttatgtgtggtcactggtattcagatggagctccctggggttgtatagtagtaggtgtccaaaaatgtacagcagttcttttccagactataaaagcataaagaagcaaaaatgtacagcagttcttttccagactataaaagcataaagaagagcaacgctgtctaaacaagagtcatttctcactcagagacagttcacaccttcttacctcccatgatgaattggcaagtgtttacgatgaattccatgacttccttccacaaaagcattgggaggcttatgatacacagaggccaaagaaccaatgtggcagattagctcatccagcagagttggctcaataaggtccgtctcctcagagatcagtggcttctcagacaagactacttctttagctgtaacagggtcagttgagagaaggcgccaataaatatagccccggtctcgaaggtcaggat

SEQ ID NO: 11407 - DNA, 475 bp, Homo sapiens
  MAP TO AC004141.1; EXPRESSED IN LUNG, SIGNAL = 0.94; EXPRESSED IN BRAIN, SIGNAL = 0.71; EXPRESSED IN ADULT LIVER, SIGNAL =   1; EXPRESSED IN PLACENTA, SIGNAL = 0.91; EXPRESSED IN FETAL LIVER, SIGNAL = 0.76; EXPRESSED IN BONE MARROW, SIGNAL = 0.78
ctaatgactggaagggtgggaaaaagcaaaatgagttcacttttaaaaagtctttctcctttgttagagatccattttcaagattaattttgggggacagaatcaaattgctcaacacatcaacagatattaaatcttggatggctgaatttctggttgttgactttcatagaatatcatcttttccaggctacacaaaaaagatgcacactaacttttgaaacgaacctagatggcgtctgaagctggcgactcaccttcttcacccgcataggccagaatggatcgtgctcgtatctgtttcccttctgtcgttttccctgagcaggtgtgtgagcaggaggaccacgtagaccatgtgctgagcacacagtctttcgggcatggggcatcacaggccacagggatggggaagatggcatctctgcacagctgtctgtcaacttcttctcctggggaaaacatgaccaccaac

SEQ ID NO: 11408 - DNA, 459 bp, Homo sapiens
  MAP TO AC004526.1; EXPRESSED IN PLACENTA, SIGNAL = 0.72; EXPRESSED IN BONE MARROW, SIGNAL = 0.56; EXPRESSED IN ADULT LIVER, SIGNAL = 0.62; EXPRESSED IN LUNG, SIGNAL = 0.73; EXPRESSED IN BRAIN, SIGNAL = 0.83
tgcatggctttcagaaaatgcaggttcatctggaagctttaagctgaatagaactccctgttgtaagtcctatggtagtctataaatattactccactccccttttttaatgataagtaatacaaaggaagaaaaatagtaaattaagtccaaacaaaattaatatttttggcttcagatggggatttacttaaaaaaaaggaactaaaataatttcctattttccattacagcaaacacaaattccagactatgctgagcttattgttaagtttcttgatgccttgattgacacgtacctgcctggaattgatgaagaaaccagtgaagaatccctcctgactcccacatctccttaccctcctgcactgcagagccagcttagtatcactgccaaccttaacctttctaattccatgacctcacttgcaacttcccagcattccccaggtcagtaaa

SEQ ID NO: 11409 - DNA, 450 bp, Homo sapiens
  MAP TO AC005552.1; EXPRESSED IN BRAIN, SIGNAL = 0.87; EXPRESSED IN PLACENTA, SIGNAL = 0.77; EXPRESSED IN LUNG, SIGNAL = 0.8; EXPRESSED IN BONE MARROW, SIGNAL = 0.77; EXPRESSED IN ADULT LIVER, SIGNAL = 0.63; EXPRESSED IN FETAL LIVER, SIGNAL = 1.1
caataaaaagcacaatgcaaaagtggtcagtatagacggccaatatacacaattagatttattattaaacatgttcagatgatgtcttaagtcaggaattttgactgacttaagtcagtcaattttgagtggagcaagaggcccatctagaagctgaaatttttaaaggtgaacttcaccacagtccaatgaagagatgtgaatataatgtccattatgggcttcctcatagagaaacaggctcagagttagtcactcaaactgatgtttttctcaacttctgaagtttcagctatgtacacagcaatattgttgaccttcttcacttcagacagccgacagaagagaattgctatttttttcagtccttttggtctgtcttttgttttagtcccaacattggacattagaatagtaattgctcccaagagacaatgttttaatttacca

SEQ ID NO: 11410 - DNA, 484 bp, Homo sapiens
  MAP TO AC004053.1; EXPRESSED IN LUNG, SIGNAL = 0.74; EXPRESSED IN FETAL LIVER, SIGNAL = 0.7; EXPRESSED IN BRAIN, SIGNAL = 0.71; EXPRESSED IN BONE MARROW, SIGNAL = 1.1; EXPRESSED IN PLACENTA, SIGNAL = 1.1; EXPRESSED IN ADULT LIVER, SIGNAL = 0.52
ctcacaattccacatggctggggaggcctcacaattatggcagagggtgaagcagaagcaagacatgtcttacatggcaacagacaagagagcttgtgcaagggaactcccatttatgaaactaacagatctcatgagacttattcactaccacgagaacagtatgggggatccaccaccaaaactcaattttctccacctggccccacccttgacatgtggggattattacaattcaaggtgagatatgggtggggacacaaagccaaaccttattaccttccctctccaggattgtccggagatatagttacagtcatttccatggtgtaacactacagtcagctcaataccacagccccatttgggctctacctcttttcttgaattttttttactgttgttcttcacttctagtccctggaattgtctttcctataaaataagagcacattagactgtttgggctcttctttctgggaaa

SEQ ID NO: 11411 - DNA, 485 bp, Homo sapiens
  MAP TO AC005666.1; EXPRESSED IN LUNG, SIGNAL =   1; EXPRESSED IN BRAIN, SIGNAL = 0.94; EXPRESSED IN PLACENTA, SIGNAL = 1.1; EXPRESSED IN BONE MARROW, SIGNAL =   1; EXPRESSED IN ADULT LIVER, SIGNAL = 0.94; EXPRESSED IN FETAL LIVER, SIGNAL = 1.1
gcaagatgaaaaggtttgggacattagttgcacaacaatgtgaatatacttattaaggttattggactgtgcacttaaaaatggttaagatggtaaattttgttatatacattgtatcacaattaaacatttttaaagcaaaaaaagcaacgctttttaaaaaagtaaccctttaggaataggggctattaggatagtatgaaaaaagaccccactttttttctttcttatttgtcaatattagaaaaaaacctaacataaactatacaattttttaaatcctttcaacagtccagcttttcctgttacctctctgtgtcctctccaagatcttcagtttctttggacaaaagcatactactatcttcttttttactgtcagtttcttgttcttctaagtgcctttgatctaaaaacagttgaaagaattaactttattagaacgaaaaaaaaattgagaaagcttgccttaaaatagagtgcaa

SEQ ID NO: 11412 - DNA, 471 bp, Homo sapiens
  MAP TO AC005669.1; EXPRESSED IN PLACENTA, SIGNAL = 0.98; EXPRESSED IN LUNG, SIGNAL = 1.3; EXPRESSED IN FETAL LIVER, SIGNAL = 1.1; EXPRESSED IN BRAIN, SIGNAL = 0.99; EXPRESSED IN BONE MARROW, SIGNAL = 1.1; EXPRESSED IN ADULT LIVER, SIGNAL = 1.1
gatggaaataccagcagttcacaaatcatattttatgtatttggaattcagtggctactgagtgtcggctgtgtgcaagacaccacgtacccagggctgacaatggactggcctgctggtgactctgaaggggctggcacttacctaggctggcaagggaggctggcatgcacacaaaacatacatcatttttttcatctcctatgatgttgaatcaccattctaaaacagttatttttagaatatcaacatgaaattacatgcatgcatttatttttcataggattttataaaggcccaagacttaagtaacttagaaaacactgtcgctgccttaaagagtgagtttcagaagacacttaatgacaagacagaaaaccagaagtcactggaggagaatctggcgacagccaagcacgatctactcagggttcaggagcagctgcacatggctgaaaaggtcagaagacc

SEQ ID NO: 11413 - DNA, 474 bp, Homo sapiens
  MAP TO AC004880.1; EXPRESSED IN PLACENTA, SIGNAL = 1.6; EXPRESSED IN LUNG, SIGNAL = 1.6; EXPRESSED IN FETAL LIVER, SIGNAL = 1.3; EXPRESSED IN BRAIN, SIGNAL = 1.5; EXPRESSED IN BONE MARROW, SIGNAL = 1.4; EXPRESSED IN ADULT LIVER, SIGNAL = 1.4
taccctccatagcagttggcttactgatgtccacctaagaagtactcaggaaatgcacgtttcaaaaaaagtgaaagatgacacagagggtgtgatcaacttcccagtatctacagaaatgtttaccttttgtctcccatttccaaatttcctgtcagttttagcctcacaatagttttcagtctgcgtgagggaacagtagggttctgggaacttttcttagattgagtaaaaagctgagccatgtggctaccctttgtaaacagtggagggggagaggtcgtatcaacagggttggggaggccctgctggagattcaacaagagcggtttctcactgatgagttcacacttctggattctgctttcatttggaaaattctcctcaagcggcgagatcatgaaccccctgacaaaggaaagacatttcacaaagatacaaagatttagaaggacacttccatggtgcttgtgt

SEQ ID NO: 11414 - DNA, 471 bp, Homo sapiens
  MAP TO AC004467.1; EXPRESSED IN ADULT LIVER, SIGNAL = 0.61; EXPRESSED IN PLACENTA, SIGNAL =   1; EXPRESSED IN BONE MARROW, SIGNAL = 0.69; EXPRESSED IN LUNG, SIGNAL = 1.2; EXPRESSED IN BRAIN, SIGNAL = 0.83
caacttagagttgcaaatttttattcaatatgctattgagatgatcactgaactgtgagcttcaatccaagatattaaagcaaaaggaaaataatgatgccctccatggattctgacagagaggatggcatccttgcaggattaaaaaaaaaaaaggagagtaaaaggtttcattgattgttgaatcacccagtatcttgaaaggcaaacataacaacagtccttgtgttctgttctcttataggtcactgggaataaaatgacatctctaaacttagccaccatatttggacccaacctgctgcacaagcagaagtcatcagacaaagaattctcagttcagagttcagcccgggctgaggagagcacggccatcatcgctgttgtgcaaaagatgattgaaaattatgaagccctgttcatggtaggtggcccttctgtggcaggacatcacagcaaactgcctattgg

SEQ ID NO: 11415 - DNA, 500 bp, Homo sapiens
  MAP TO AC005536.2; EXPRESSED IN LUNG, SIGNAL = 0.92; EXPRESSED IN BRAIN, SIGNAL = 0.9; EXPRESSED IN PLACENTA, SIGNAL =   1; EXPRESSED IN FETAL LIVER, SIGNAL = 0.97; EXPRESSED IN BONE MARROW, SIGNAL = 0.75; EXPRESSED IN ADULT LIVER, SIGNAL = 1.1
tttgttgaataaatgattgaaattgaattttataaaatctgagaaaaaataaattttgacttcagaaagaaccagggccatgtcctttcaaaacaatactctttagattttttcccctggagacctaccattaacatggaagcccatttttatggatagaatgtgtctaaagtcccgttcgatgttcattctctgttagcatacccaaacagttagtttggaggaagatacaactaacttgcctatcatcatcattaaatagcacctcaaacatttctgtgcttagattctggagcagtgaccaacactgaaatgcctacttaccatgttcatataaagacatgaggcggtctaggtgtaattcagtgggagaagtgtaccctgtgtagtgtaccctggtgacaatgtgctgaagtagaaaaaaaaaattcctctttgaaagagtgaagctcctattcaattttggctgagtgttctattgggtcaaagcacatgttgtt

SEQ ID NO: 11416 - DNA, 494 bp, Homo sapiens
  MAP TO AC000114.1; EXPRESSED IN FETAL LIVER, SIGNAL = 1.5; EXPRESSED IN BRAIN, SIGNAL = 0.6
tgaaggtgacaaaaatagagggtaaacaacagatatcaattctgcctactagccaaatttgctgtgaataaaactctgatattgattgcactttgggaagtcctagactaaatattttaaaggagacttcattcatagccttagagttggacaaagtgaagggggtgagaatgggtttccccataaggctacactccccactcctccctgccccaaagctacccaacctacccaatcccagaagcacagtcttacctccaacaaactgcgctgctcccatgcaacgtcccatcattctggagatgagctcctccatgcagcaacccaggacagcagctagtgccaccaggagcagcagagcacagccggcacctgtcaccactgtgcacatctgccaggccaggcttgggatggcattgaagctggcatagcgcccacattcttccaccatgatcagactgtgtccctctccccgcacagggtagttgcacctc

SEQ ID NO: 11417 - DNA, 368 bp, Homo sapiens
  MAP TO AC002454.1; EXPRESSED IN LUNG, SIGNAL = 0.91; EXPRESSED IN ADULT LIVER, SIGNAL = 0.97; EXPRESSED IN PLACENTA, SIGNAL = 0.85; EXPRESSED IN FETAL LIVER, SIGNAL = 0.85; EXPRESSED IN BRAIN, SIGNAL = 0.64; EXPRESSED IN BONE MARROW, SIGNAL = 0.82
ttgtgcccaagaaaacacagggaaaactaaataacccaaatcaagccctgagtattcatgtgcagactatcagcttcacacttagtcatagtcaacttcacacctaaatgccattgaaaagaagcagggccaaatgttcctggaaaatgggactcttaggttcacagacgtttgctgaaaatacctgagccccatgctttggggagatttcactaagaagattgatatgcagcttccaggggaaagaatgaaggaggggcaggatgtggtcttggtgaatcagaagcggccctccttccccacccctcttctgagtcagcatgcagccacatggccccacatggtgcagttctggttctcggatgagc

SEQ ID NO: 11418 - DNA, 476 bp, Homo sapiens
  MAP TO AC004104.1; EXPRESSED IN ADULT LIVER, SIGNAL = 0.74; EXPRESSED IN LUNG, SIGNAL = 0.64; EXPRESSED IN FETAL LIVER, SIGNAL = 0.78; EXPRESSED IN BRAIN, SIGNAL = 0.94; EXPRESSED IN BONE MARROW, SIGNAL = 0.92; EXPRESSED IN PLACENTA, SIGNAL = 0.84
agctatgagaaggtgggtggtagtttcacctaaggtcaggtctgaagctatcctatgacagaaggcactgccttgagatttagtgagttctgtgtccctggaggtatttcagctgagtgtgggaggatgtttgccaaaaatggagtgggttatttcaatcttatattggggagtgatagagatggtaagatgttatggtttagctcaatgagttctaatgtctattccaattccaagcactgactggtctgtggttcaaggccttgagacaaagagacagtaatgaaacataacaaagaagagatgtggttcgtcagaagcaaggaaaaccaagatgcaggcaccaatcttcacattttctatgttgacagtgtccaaccagaaacttacagcagggcccacattcctgaaattatgatttgaaataatttgagctatgagttctttaactgcaaaatgtactgtatgctattaat

SEQ ID NO: 11419 - DNA, 485 bp, Homo sapiens; identical to SEQ ID NO: 11411
  MAP TO AC005666.1; EXPRESSED IN PLACENTA, SIGNAL = 0.93; EXPRESSED IN BRAIN, SIGNAL = 1.2; EXPRESSED IN BONE MARROW, SIGNAL =   1; EXPRESSED IN ADULT LIVER, SIGNAL = 1.2; EXPRESSED IN LUNG, SIGNAL = 1.1; EXPRESSED IN FETAL LIVER, SIGNAL = 1.1

SEQ ID NO: 11420 - DNA, 484 bp, Homo sapiens
  MAP TO AC000002.1; EXPRESSED IN BONE MARROW, SIGNAL = 0.63; EXPRESSED IN PLACENTA, SIGNAL = 0.57; EXPRESSED IN LUNG, SIGNAL = 0.67; EXPRESSED IN ADULT LIVER, SIGNAL = 0.69; EXPRESSED IN BRAIN, SIGNAL = 0.71
agatacacacacacacaaacacacattttttttgtttgggtagagacagggtttcttcatgtttcttcttgttgcccaagctggtctcaaactcctgggctcgagcgatctgcccatctcagccccccacagtgctgagattacaggcatgagccaccacacccaggggacctcttttgatttttgaacacagtacctgggcaaactttttttaaatttaattttaaaatagaataaaattatgtcatttattcatctcttagaacttggcaaaatttcccactcagctgggtcacttggccgtgtacttgatcttccttcctcctttgccctggccaaggaggctccagtcctgacaatccccacagcccttgaggggtgccatagtggggactggtgcccccagcagatgaggtgggtgctcaccctggttctgagacactgcctggacctccagttactgtgggggctctcacgatatttt

SEQ ID NO: 11421 - DNA, 473 bp, Homo sapiens
  MAP TO AC005217.1; EXPRESSED IN PLACENTA, SIGNAL = 0.64; EXPRESSED IN LUNG, SIGNAL = 0.71; EXPRESSED IN BRAIN, SIGNAL = 0.79; EXPRESSED IN BONE MARROW, SIGNAL = 0.8; EXPRESSED IN ADULT LIVER, SIGNAL = 0.71
ctgagtgacagtttggctgggtaagaattctaggttagtatatttaagagactgatttaattttttgatgtgtgacagcttttaaacctcactgttccctcttccccttcccacctcacctctgggtgacaagagagccttggtgttccatcttttggcaatggtagcaagtttaaaccatgcacaggaaacctcaacctggtccaatcctcttaacatcatgaaaactacaggccaggtctccttcccctgcattctcaagtcattttcagtcctgcttggagtcacctttcccccgagaaaggctcgttatatgagtaatatacctttccataccttcttggtgtgtggatggcataatcagtgttgacatccaggacaacttttgagtgggagtccattttgactctgcaaaatcagtgttcttcagaattctgaatacgtttttctctccaccatgttctaccttctgg

SEQ ID NO: 11422 - DNA, 397 bp, Homo sapiens
  MAP TO AC002064.1; EXPRESSED IN PLACENTA, SIGNAL = 0.74; EXPRESSED IN LUNG, SIGNAL = 0.64; EXPRESSED IN ADULT LIVER, SIGNAL = 0.61; EXPRESSED IN BRAIN, SIGNAL = 0.7; EXPRESSED IN BONE MARROW, SIGNAL = 0.65
agtgacttttaaagaaaagtaaactgctattctcttaaatacacatttaaattacctcctgttattttctgtggaaaattatatttggggggcatcacctgtcttctgcccattccatgagatcttgaaagcaagcagtctacatacatgtcccagaaatcctgagctatgtttaagaagacattataatgtccaggccgctgagatttttgcaagaacaacatgaaattccaaaaagcatccacattgtgctctatcttgagttccttgagatctatcaatgtcaaagagcaagctttccagcactggagatcaatgtctttggtgattcctgggctgatgctggcaagcactcctttttgaaactcaaagtcagcattaaccagattgatcagca

SEQ ID NO: 11423 - DNA, 417 bp, Homo sapiens
  MAP TO AC005079.1; EXPRESSED IN BONE MARROW, SIGNAL = 0.55; EXPRESSED IN ADULT LIVER, SIGNAL = 0.67; EXPRESSED IN PLACENTA, SIGNAL = 0.71; EXPRESSED IN LUNG, SIGNAL = 0.75; EXPRESSED IN BRAIN, SIGNAL = 0.67
tcttccttacattctgaaaaatcacttatataaggattctaggtgaacattattgaatgaggcacctctaaaactaactcattttgaatttaatgtattactattcaccatgttctctgttagtgtattaataatatgggaggaactacctgaagtagctcttaaaatttgaccgagttttgtatcaaccatactttgctataaataaaccctggcatgaatacattttctttcagcaagagctgatctacttcacgttcagcagacagggaagtggggaacacactgcaaatctcagccttctgctccagagatgcaatgaggtccagctttgggtggccacggagattctgctctgcagccagctgggcaagcgagtgcagctggtgaaaaaattcatcaaaattgcggctcagt

SEQ ID NO: 11424 - DNA, 470 bp, Homo sapiens
  MAP TO AC002458.1; EXPRESSED IN PLACENTA, SIGNAL = 1.3; EXPRESSED IN LUNG, SIGNAL = 1.5; EXPRESSED IN FETAL LIVER, SIGNAL = 1.1; EXPRESSED IN BONE MARROW, SIGNAL = 1.3; EXPRESSED IN ADULT LIVER, SIGNAL = 1.1; EXPRESSED IN BRAIN, SIGNAL = 1.3
gccatcttcatactccaaagcactgaagatttcaagtgtagtataaagtgtggtacattgaagtagacttcagttatttttacattattttttacatcatttctgtatgctttattcaaaaaatgttttcatttttaaataaccctattgagtgctttttaactaacataactcaaatgaataggtcaggtcatgtgaagtcacacacaggacattctagtcagtatgaccttaaatgaatgttaaaggaaatttaaaagtatggtcttacccagtagtgagaatatgtgaagcaacttacaatactgctcttgtgagaaagaaggcatccaggttctgaataatggtacactgccatttatccaagcctgttgatgactggttatgttttgtaaaatgaagtttcttggagaggctagttgttgtattaaatattactgtcatcatgttgctggttttgggagagctct

SEQ ID NO: 11425 - DNA, 485 bp, Homo sapiens
  MAP TO AC005738.1; EXPRESSED IN PLACENTA, SIGNAL = 0.84; EXPRESSED IN LUNG, SIGNAL = 0.88; EXPRESSED IN BRAIN, SIGNAL = 0.88; EXPRESSED IN ADULT LIVER, SIGNAL = 0.93; EXPRESSED IN FETAL LIVER, SIGNAL = 0.98; EXPRESSED IN BONE MARROW, SIGNAL = 0.89
ttgttctttgggcaatctccatgaggggttctcagtaagagctcatgtcaactgacctcagctgggtgtcgcaggagctctacccttgaaaaaagcacactccatgccatctgtaattttggtaaatactccttctctagacagtcatgctacctaagttattcatttatttatttatttcagcaagtggctgccttatggatgacagagttgctgaggtgaaagtagctcatggcgcgagatccagcaccttctgcagtatggtcatccttgttactggggctgataggatctgatgggaagaactcagctgtgtccaccgtcattttgacaggagacatccttttaacttcatgaagccccacatgatctggcctctgcctctctgtgatcacctccgccctctcctccacctcactggttccacccacactgacgtccctcctgtcccagccattccttttgcttggagtgcttgtccctct

SEQ ID NO: 11426 - DNA, 467 bp, Homo sapiens
  MAP TO AC003687.1; EXPRESSED IN LUNG, SIGNAL = 1.1; EXPRESSED IN BRAIN, SIGNAL = 0.79; EXPRESSED IN PLACENTA, SIGNAL = 0.77; EXPRESSED IN BONE MARROW, SIGNAL = 0.64; EXPRESSED IN ADULT LIVER, SIGNAL = 0.46
ctgactctgatggcctctggagttgggctggcctatgactctatgactgttctatgtgactgggctgacttaaccactgaggatctcagccatagctcctccccagaacttcctgccctggaggtcagccctggaggcaaagcctcaaccagaaccattccacggggtttccaggcggttcaacccagaatcactgggcttctgcttagaaatgttctttcctccattctctggagggttgttccagaaagggcagttcctctgcccagaaaaaccttggaagactctggggtttggtagtcagtcgtcacaacaaagccagccctgcaaagatgttatccagcatcttaaaactcttgcattggcttccagccatcatgttcaggtccacctccctggacagttaggaaaatgacaagcacatagagacagaagagacctaaagatcatcaagtccttccccttga

SEQ ID NO: 11427 - DNA, 493 bp, Homo sapiens
  MAP TO AC002117.1; EXPRESSED IN PLACENTA, SIGNAL = 0.6; EXPRESSED IN LUNG, SIGNAL = 0.74; EXPRESSED IN BRAIN, SIGNAL = 0.65; EXPRESSED IN BONE MARROW, SIGNAL = 0.59; EXPRESSED IN ADULT LIVER, SIGNAL = 0.63
tctttggtgccattaccctggcaatataaagaaaataagcaacataaaagcaagaacggaaaaggccctttcacacaaataggacatcccttgcccagcactccctccctgaaagccgagggggcgcgagtcaggaggagtgctggtgtcctccaaatgccctttctggacctgggttcttcagcctgcttctgaaaccaacaggcttgattaaggaaggtctggctccacagaaagctctttgtcaggggtagcacaaaacagattttttttaaaccctgcattagtatttactttttgttacagtggtttgagtccagccaatgacactggagccaaaaagaagaaaaagaaacaaaaaaagaagaaagaaaaaggcagtgagacagattcagcccaggatcagcctgtgaaggtaacaaggaggttctgttttttgtgactcagtcactttttcacatgagagagttttgaggtgaatgtataggatcaa

SEQ ID NO: 11428 - DNA, 494 bp, Homo sapiens
  MAP TO AC005865.1; EXPRESSED IN ADULT LIVER, SIGNAL = 1.2; EXPRESSED IN PLACENTA, SIGNAL = 0.97; EXPRESSED IN LUNG, SIGNAL =   1; EXPRESSED IN BRAIN, SIGNAL = 1.2; EXPRESSED IN FETAL LIVER, SIGNAL =   1; EXPRESSED IN BONE MARROW, SIGNAL = 1.1
gctcagacgccctttatttgtcctcagataatgctttcgagcttcaagggttgcctggggttctatttcaggatctgttaggcaggtctgtgttggccctcttcactgtccttcatgattttgcagactctgatccaaccccatcagccctgtttttccagaatggagttcatgcctttttagggttcacccatcatgtctcactttttcacatgcctcttgggtgtctggtgtatttcatgtgtgagaatgagtctccccagaagagtggggtgccctgagggcagggccattattccctttcctctagacctgcccacagctccacacacaggaagaccttctcattgcacaggtagcccaagacgccctgtccttctcccactcccaggcctggccagcccatgctgaggccagcttctcagcagccacagatatcacccatctcaggttggctggctcagggtgcagtgtccatgacaccagaacccttt

SEQ ID NO: 11429 - DNA, 474 bp, Homo sapiens
  MAP TO AC003049.1; EXPRESSED IN PLACENTA, SIGNAL = 1.2; EXPRESSED IN LUNG, SIGNAL = 0.97; EXPRESSED IN FETAL LIVER, SIGNAL = 1.1; EXPRESSED IN BRAIN, SIGNAL = 1.8; EXPRESSED IN ADULT LIVER, SIGNAL = 0.93; EXPRESSED IN BONE MARROW, SIGNAL = 1.1
atgggagagaggcagaagtggagatatgcttgtgttgtcaccaactctaaagaaaatgctgcttaaatttcaccattatctatggttgctcttggattttactagatgcctttggatgcaaaatattacatctcatactctttttgttaaaattctttctgcccatcattttgtccttatcgggtgtttttaagtagtttggtctactctattctcttgttgcaaagtaagggatttccagtgcttaaccttgaaacagaaaagctttttaactgctatcgagagaaatttcaggaagaagaaaatgtttcttctatcccccaagagctgcagaaaaagcagacagtatacctgcatcataagctacttcaaaggcaagatggtgagaatattaacaaattcatcagttttactttcctattgggtgtgaagaatgctgtgtaaatatataatcctgctctgcttcctgttact

SEQ ID NO: 11430 - DNA, 490 bp, Homo sapiens
  MAP TO AC005188.1; EXPRESSED IN BRAIN, SIGNAL = 0.59; EXPRESSED IN ADULT LIVER, SIGNAL = 0.48; EXPRESSED IN PLACENTA, SIGNAL = 0.6; EXPRESSED IN BONE MARROW, SIGNAL = 0.61; EXPRESSED IN LUNG, SIGNAL = 0.58
ttacccactctcgggtatgtctttatcagcagcatgaaaatggattaatacagttgcctatctgattttgtttccatcatttattcccttcccagatcttatacaatgttcagctttgggatgcacatataatactctcccctcgcccatattaacctaatgctgtaacaaaactgtatgtatatatgtaaatctttaaccatcagaacaagatggagaatattataactaggaaatagggatttataatttttctgtaataggacagtgctgcctacttgaacaacttccacaatacaagccataactgctcacctagtgaacaacagagaagacaaagtcatcacagtcagagggatataactcttggccttttggactatatccccacccagattcttcaagtgattggaatgactgaatctaatgagataaaagataatttcaggagaatccgcagaccctttgagggaactgtattgccactgca

SEQ ID NO: 11431 - DNA, 412 bp, Homo sapiens
  MAP TO AC002067.1; EXPRESSED IN PLACENTA, SIGNAL = 0.81; EXPRESSED IN LUNG, SIGNAL = 0.76; EXPRESSED IN FETAL LIVER, SIGNAL = 0.85; EXPRESSED IN BRAIN, SIGNAL = 0.81; EXPRESSED IN BONE MARROW, SIGNAL = 1.1; EXPRESSED IN ADULT LIVER, SIGNAL = 0.81
aagtaactttgggagccgccgtctcccgcggaacttctcggcgggggcccgctcccaggcccgctcccgagcccgttccgctcccgtccgccttcttctcgccttctctccgcgtggctcctccgtcccggcgtctccaaaactgaatgagcgagcggcgcgtagggcgcgcggcggcggcggcggcggcggcggcatggagcgcagtggctgggcccggcagactttcctcctagcgctgttgctgggggcgacgctgagggcgcgcgcggcggctggctattacccccgcttttcgcccttctttttcctgtgcacccaccacggggagctggaaggggatggggagcagggcgaggtgctcatttccctgcatattgcgggcaaccccacctactacgttccgggacaa

SEQ ID NO: 11432 - DNA, 467 bp, Homo sapiens
  MAP TO AC002478.1; EXPRESSED IN LUNG, SIGNAL = 0.66; EXPRESSED IN FETAL LIVER, SIGNAL = 0.74; EXPRESSED IN PLACENTA, SIGNAL = 0.73; EXPRESSED IN BRAIN, SIGNAL = 0.88; EXPRESSED IN BONE MARROW, SIGNAL = 0.65; EXPRESSED IN ADULT LIVER, SIGNAL = 0.78
tccctttaccatctccaaagagaaaattctaccaggtattctatgctaagcactttgcagtactgatgaaatcatcctctcatcagccctctaaaatggcaactatgatcctgagtttacagaagaaaaaactggcccagagaggttgcacttagtggtgttagtcccagacaagacctggttcaagtctcagctcttttactttcttgctgagtgaccttacaggagtaatttaaccttaaagttttattttcctacaatagaaacaaagaaatactgacctcagggggttgcagtgatgaatgaatgaaataattattacatagcagtttgtttagggtctggcacattgtagggacatagatatcatcatcatcatcatcatcatcactgttcatctctgaatccagaaaaaattatatgcacaacatatgtgtctatccttgtgtagattcatttatttttga

SEQ ID NO: 11433 - DNA, 494 bp, Homo sapiens
  MAP TO AC000111.1; EXPRESSED IN PLACENTA, SIGNAL = 0.92; EXPRESSED IN BONE MARROW, SIGNAL = 0.94; EXPRESSED IN ADULT LIVER, SIGNAL = 0.94; EXPRESSED IN LUNG, SIGNAL = 1.1; EXPRESSED IN FETAL LIVER, SIGNAL =   1; EXPRESSED IN BRAIN, SIGNAL = 1.1
aatcatgtgccccttctctgtgaacctctatcataatacttgtcacactgtattgtaattgtctcttttactttcccttgtatcttttgtgcatagcagagtacctgaaacaggaagtattttaaatattttgaatcaaatgagttaatagaatctttacaaataagaatatacacttctgcttaggatgataattggaggcaagtgaatcctgagcgtgatttgataatgacctaataatgatgggttttatttccagacttcacttctaatggtgattatgggagaactggagccttcagagggtaaaattaagcacagtggaagaatttcattctgttctcagttttcctggattatgcctggcaccattaaagaaaatatcatctttggtgtttcctatgatgaatatagatacagaagcgtcatcaaagcatgccaactagaagaggtaagaaactatgtgaaaactttttgattatgcatatgaaccc

SEQ ID NO: 11434 - DNA, 475 bp, Homo sapiens
  MAP TO AC005370.1; EXPRESSED IN BONE MARROW, SIGNAL = 1.2; EXPRESSED IN PLACENTA, SIGNAL = 1.1; EXPRESSED IN LUNG, SIGNAL = 1.1; EXPRESSED IN FETAL LIVER, SIGNAL = 1.1; EXPRESSED IN BRAIN, SIGNAL = 0.99; EXPRESSED IN ADULT LIVER, SIGNAL =   1
cctgtgctgctattaccacgttgaaccaagttaatcctctcaactcagcaatggctccttcctaacttcttgaaaggcaccattcggtcctccagggaacatgcttgtaatctgttatgataggaaggaggaagcagcataaacgaaaacagtttttccaaagaactgactgttttccttggagctggggtgggccagagctgaggcccggccctgtttggatgtgggagcctgcggttacctggctctatcttcatcaaccctgctgggtgagccacaggcctgcagccctctgctctcccctgcctgctcctcctgcaggtagaagagaagccccttctccctctttctctctctcagtcccgtgtgaatgcctggggcccactcgccaggcaaagggagattggcccctggaaggagccaaccctaaagagggagtgtttccttccaacgaggccacaacattcatggagtc

SEQ ID NO: 11435 - DNA, 475 bp, Homo sapiens
  MAP TO AC002483.1; EXPRESSED IN FETAL LIVER, SIGNAL = 1.1; EXPRESSED IN BRAIN, SIGNAL = 1.2; EXPRESSED IN BONE MARROW, SIGNAL = 1.2; EXPRESSED IN PLACENTA, SIGNAL = 1.2; EXPRESSED IN ADULT LIVER, SIGNAL = 0.94; EXPRESSED IN LUNG, SIGNAL = 1.1
ctgtcaaaatgtgacccaggttcttaaattttgcacttaagctgcttatcatctagcataggaagactgatgaccacacaccaaggtcaaatgtggtaggtgcaggattggtgtttcagattcaaagccagcccagtgcactcagcaaaagcactgtgcaagaatgagtagtcaggctgagccttgatgaggatggataacttcagttcgggtttaacttacaacctacctcttatacctacaggcaacattaccactcacccacaatgtggatctgcagtggttggtggaatggaacgcagtcctggtcaatagccattatgatgtgaaaagcccttcccatgtctggatatttgcacagtctgtcaaagacccctgggtcctctgcctcttcagcttcctccggcaggagaacttacccaagcactgccccacagccctcagctatgcctggccttatgccttcactcggctc

SEQ ID NO: 11436 - DNA, 475 bp, Homo sapiens
  MAP TO AC005483.1; EXPRESSED IN LUNG, SIGNAL = 0.81; EXPRESSED IN BRAIN, SIGNAL = 0.66; EXPRESSED IN BONE MARROW, SIGNAL = 0.67; EXPRESSED IN ADULT LIVER, SIGNAL = 0.67; EXPRESSED IN PLACENTA, SIGNAL = 0.73; EXPRESSED IN FETAL LIVER, SIGNAL = 0.68
ccctggggtagtgtatttccaatgagactgccttggaagttctttgtgagttgacaggagttatcaagccaggacccccaaatttgcttcagcagcgtcgtttgcatcaagatcaccaatcccaacatatagctgcccccaaactttgttcccactctctgcccctccagctttgcccacccgacgaagaaaagctgaaccgcgaggacaaatgaggcccagggcggctagaagaggtgacagcatgcaggcgcgcgttacctgcagatggccgactggctgtacgcggggccctctgtagcactgagagcctgtcccacctgagtctgggtcaggccaagggacaggcgccggattttaaaagctttggcaaattctcggatctcctccagattaaccccatccacctcacccgctgccgtttgaggatctgtggagatgtttttaaaaataggatcaatacgtcaacacacag

SEQ ID NO: 11437 - DNA, 406 bp, Homo sapiens
  MAP TO AC005587.1; EXPRESSED IN LUNG, SIGNAL = 1.1; EXPRESSED IN BRAIN, SIGNAL = 0.69; EXPRESSED IN BONE MARROW, SIGNAL = 0.81; EXPRESSED IN PLACENTA, SIGNAL = 0.78; EXPRESSED IN FETAL LIVER, SIGNAL = 0.86; EXPRESSED IN ADULT LIVER, SIGNAL = 0.83
ttaccaaacagtgctttccagtttataaagcatatttccctacttaatcttacaatgtatgcattctcacttctcgtttccaggtaaggttcagagaaaccacatatatttactaagtaaatatccaaggcggaacacaaacctggttgttgctaccccagttgtcagctacccaggttaagaatagcttgcccctttacgttcttatggatgcatgaagttgttacttacattttgtaggtgagggcagaaacagtcaagagactctgtgggcaatggattagcaaagccacaaacagaaaactttgacacctcctctgcatgggatggctcataaaaaggcaccttcagaagatggtttaaactaccatgggttccattgtttggtgctggttgaatgcgtaga

SEQ ID NO: 11438 - DNA, 456 bp, Homo sapiens
  MAP TO AC000115.1; EXPRESSED IN PLACENTA, SIGNAL = 1.1; EXPRESSED IN LUNG, SIGNAL = 1.3; EXPRESSED IN BRAIN, SIGNAL = 0.88; EXPRESSED IN BONE MARROW, SIGNAL = 1.3; EXPRESSED IN FETAL LIVER, SIGNAL = 1.3; EXPRESSED IN ADULT LIVER, SIGNAL = 1.2
ctacctaagtgctctgccccctggcaggtagagcaaatctcagtattaacatgcgtgttcatatcactgacattaagtttcatttcaccctcaaaagccaaaggacgatcagtcttcgatattctgttagctaatcccataacatataatcatgcagaaggtttcagaaattcaggtgtgctttcctgcttataagccaacacactttgtgacacaaataataacaaataatcaacagatattttaaccaggcagaagtccatccaatggattattcagccttggttattattctctgttacctgaagctgatggagttggtaattctgaataaactgaagagcaccattgtcacccacttcctaaaggaaagtaccagctttcagaaggacaatgcccatgtctgagccatctctgtattttatcatgcctagcacagcaacctagttcagtaaa

SEQ ID NO: 11439 - DNA, 478 bp, Homo sapiens
  MAP TO AC004702.1; EXPRESSED IN PLACENTA, SIGNAL = 0.71; EXPRESSED IN LUNG, SIGNAL = 0.7; EXPRESSED IN FETAL LIVER, SIGNAL = 1.1; EXPRESSED IN ADULT LIVER, SIGNAL = 0.61; EXPRESSED IN BRAIN, SIGNAL = 0.95; EXPRESSED IN BONE MARROW, SIGNAL =   1
gcaggatacttggctagaactggcccttcatatgtaagtgaggagcttagcagcctcttatgctgcagcatggcagggactgggtactgtacagaatgttcctagtggtaaggtggtgctagtaattcagggtgatctcagaaaggaaatagcagaacctggcacagacatgaagagtcccatccccaccagggagccccatacatagtgattgagaagcaagcacggccctggtgcccaccagactcacggaggggcggctctgctggtgaccaccctgccgtggccctgcacatcccccagctccttctgcaaccgggcattcttctcctcctcctccagcagtttcctcttcacggtgcgcagctcctgctgggcctcacacttgatgtcattggccaccaccactgcggtctgcagatccgcctggaaccgcctccattcctcggtctcctcctgaaaatgtcagagcccatcc

SEQ ID NO: 11440 - DNA, 487 bp, Homo sapiens
  MAP TO AC005274.1; EXPRESSED IN PLACENTA, SIGNAL = 0.95; EXPRESSED IN LUNG, SIGNAL = 0.96; EXPRESSED IN FETAL LIVER, SIGNAL = 0.73; EXPRESSED IN BRAIN, SIGNAL = 0.83; EXPRESSED IN BONE MARROW, SIGNAL = 0.79; EXPRESSED IN ADULT LIVER, SIGNAL = 0.86
gcgggtatggaaaggaaagaataaagaatggtgtctgggatttagaggagcaagtgcgtggatttacagtaccattctctactgctctgccctctttgctgggtcctcctcctggtagagcaggaaatgctgcagttcccagggttcctgattcaaaagccatatgtcttctcaccctgcattttctccccaggtgatcacagcagctcccatggattcaacagtcacttggggttgagaccatgagacctctctctcttcttcatacgcccacatccactcagttaccaagccctgatactctccctccaggatctaccatggacgccgatttttctccatcttcaggtcctcgttgcatctcactgaaattgttcccatctctgtgtaactggcctctcacttctaccatggccccacccatgagtcctttattcatacaattttgaacatatctgatcatgtctccctctgttaaaatgctggc

SEQ ID NO: 11441 - DNA, 447 bp, Homo sapiens
  MAP TO AC003093.1; EXPRESSED IN BRAIN, SIGNAL = 0.55; EXPRESSED IN ADULT LIVER, SIGNAL = 0.59; EXPRESSED IN PLACENTA, SIGNAL = 0.66; EXPRESSED IN LUNG, SIGNAL = 0.6; EXPRESSED IN BONE MARROW, SIGNAL = 0.62
gagagtgcccatggattagcaatgcttgttctggggttaagaacccgggacccagcagcccagcagaggtgttgctgtaagtaagcatgacagggaggtgaagactggatgaaggaaagagggcctacacctctaacctagttcaaagcagaagaggctggagatgctgaacagacactactcctgtcctctgtggcttcttgtgtcatgcccacccatccacccactcacagcctggggtccacaaacccagacactcacttgctctccatacacaggcagaagaggagccgccgccacagtagatgctttcatgccatttcccaaacagccgatgaaccgcttttccactcctgtcaaacactgtgccttcaatctcatgggcattagtgctccagtattttgcctaggattcaaatgagttgttggcttagtcctttagcatca

SEQ ID NO: 11442 - DNA, 484 bp, Homo sapiens
  MAP TO AC002557.1; EXPRESSED IN LUNG, SIGNAL = 0.41; EXPRESSED IN BRAIN, SIGNAL = 0.62; EXPRESSED IN BONE MARROW, SIGNAL = 0.57
caggggaccctacaataatggaagggggccctggggctgggcaggcctggtgctccccaccagtgggctccagcacccaccggatagcccactgtacagaaggggaccctgcggggcagctgctgagggggactccaaccctggttaccccgtgggcttcctggggctctgaggcctgcttcagcccctggcctcaccacccagccccactcaccgggccccctggtggctcctggcggacccttgtgtccagctgctgctttcggacctctcccccggagctctccctaaccagacggctgggttccgtgacctcaggggctcctgggcctcccagctggggtaagcccccccatcgcagagctccagcaggaccttgggtcccaagacctggggaaacaaggccatggctgcaggcagctgcccaccctggggcagaagacttgggaatggggtgggcatgcctcatcccccactctggtgt

SEQ ID NO: 11443 - DNA, 459 bp, Homo sapiens
  MAP TO AC004886.1; EXPRESSED IN PLACENTA, SIGNAL = 1.5; EXPRESSED IN LUNG, SIGNAL = 1.5; EXPRESSED IN FETAL LIVER, SIGNAL = 1.3; EXPRESSED IN BRAIN, SIGNAL = 1.4; EXPRESSED IN ADULT LIVER, SIGNAL = 1.4; EXPRESSED IN BONE MARROW, SIGNAL = 1.3
ttcttcttgtatagctgtgctggatatgttatacaaacttaataatgatctgttggaggaatgaatcacttaaattggtagaagtatcacagctatgctccattttcagtcagtcatagctgatgaagtgagctgtgttactcctttatgttattggaaaaaatcatttgtgaaattaataaacaaacatctcattccttttaggacaattaagaccattctagggtagacttgagtcttttttgataaatctaaaagaaattgctaaatatagcacttacttgctcttgatgttgactgagtggtctagagtggaccaatctttccggcagttttcggtccagaccatgtccattttccaaacgagactccctgggtttatcaaaccaatctgtttcctcacgacgcagatgataggctttggacaccaaggaaacatcatacattgcaacggcaagt

SEQ ID NO: 11444 - DNA, 464 bp, Homo sapiens
  MAP TO AC005859.1; EXPRESSED IN LUNG, SIGNAL = 0.48; EXPRESSED IN BRAIN, SIGNAL = 0.55; EXPRESSED IN BONE MARROW, SIGNAL = 0.51
tggaaaatgccctaaattggaagtgtggcgatctagattctggttcctgatatgctgctagcaagctgggtgaccttgggaaaaatgtgtacaccactctgggtatgagcatctttctgcaaaaattagaggaaagatgattgcagaagtccccagcagttttaataggcaatgccatttatgctagatgtagttggaatagttctaactgaaggcacagatggttgctctcaatagggtgaccaacttgtcttggtttgcgtgggacttttctcgatttagccctgaaagacctatatcttaggaaacccctcagtcctgggcaaaccaggacgtttggtctcccgttccctcttctaaggtggatagttctgcatccccggcactaccttggtaaggaatcccacgagcatggctttgatcttgtgctggttgcaaaaacaagcaggctatatgatgagccc

SEQ ID NO: 11445 - DNA, 491 bp, Homo sapiens
  MAP TO AC005866.3; EXPRESSED IN FETAL LIVER, SIGNAL = 1.9; EXPRESSED IN BRAIN, SIGNAL = 1.5; EXPRESSED IN ADULT LIVER, SIGNAL = 3.5; EXPRESSED IN LUNG, SIGNAL = 2.2; EXPRESSED IN BONE MARROW, SIGNAL = 1.2; EXPRESSED IN PLACENTA, SIGNAL = 1.4; EXPRESSED IN HELA, SIGNAL = 1.7
taatggtttcgctgggattcagaaagctgtagtgaatcatactaacagaccactaaacagtgatcatgaccttttttggtgtaagtttggctttgggaagtgctttggagcttcttctccatccaacccctgagctggtcgttgctggttgttacacaaaatccacttttcctcacacatcacaatttgattgagaaatagttcattgttgttgagtacaataagagaaggtgacacttcaaaacaatgatttttttttttttttttgctcagctcatgaggcacccacttatcaagctttttcacctttccaataagcttcaaatgcctaacaaccatagaatggttgacattgagttattcggcaaattctcttgtagttgtaagaggatcggctttgatggtggctctcaattggtcatcgtcaacttcccatggcctgccattatgctcctcatcttcttcattatgctcctcatcttctttgcaaa

SEQ ID NO: 11446 - DNA, 407 bp, Homo sapiens
  MAP TO AC000015.2; EXPRESSED IN BONE MARROW, SIGNAL = 0.95; EXPRESSED IN PLACENTA, SIGNAL = 0.77; EXPRESSED IN LUNG, SIGNAL = 0.66; EXPRESSED IN FETAL LIVER, SIGNAL = 0.73; EXPRESSED IN ADULT LIVER, SIGNAL = 0.71; EXPRESSED IN BRAIN, SIGNAL = 0.67
ttctccactcttactatgacaaacctaagaaaaaaggggtggggggtaaacttttttcatgcttaaagggattaaagccaaaatagaaagctttgtgaaaaacaaccccaaagagataaccagacttattttcatgtttcattatctcacacaaactaatcaaaaggcaaaaaagtagacaggaattagtaggagctagcttttattattttaattaaacttcagcattcatttattaaaacagaggtggttcaaaacaacgtgcacatactccactaaagccataacttactttatctactgctttccgtacaatttctttatattcttccttggtgatatctttattttggtaaaatggcttgatggccaattttacctcttgtgctgctttttcttgaatttgc

SEQ ID NO: 11447 - DNA, 469 bp, Homo sapiens
  MAP TO AC005823.1; EXPRESSED IN LUNG, SIGNAL = 1.1; EXPRESSED IN BRAIN, SIGNAL =   1; EXPRESSED IN PLACENTA, SIGNAL = 1.4; EXPRESSED IN FETAL LIVER, SIGNAL = 1.5; EXPRESSED IN BONE MARROW, SIGNAL = 1.2; EXPRESSED IN ADULT LIVER, SIGNAL = 1.5
agccatcaagttatgccctgggtctgacttgcatctctcatgctgcactctgggcctgtctctattagtccagatctctgtggagaggaacagcaacaggtctgaaaagaagagactgtatgtctgtccatcttcagatacctccaccaccaatgaccaactttccttcctgggaaaatggggagccagagagagaacagaaaggtgcagtagacagcaatgtcctggtcattgagacctgaatttggggccatgaggattccaggccctgttatgtccagagatggaacatgagctgggcctcaccttggcttcccatttcccctggctgattccacacccactgggattttaatttgacctttgtgtgtcctgatattgggaaggggtgtgcactgatttagggactggaacattctagttacaaaaaaagaagaatgggatccaccatgagaaacagacactttgg

SEQ ID NO: 11448 - DNA, 457 bp, Homo sapiens
  MAP TO AC005692.1; EXPRESSED IN BONE MARROW, SIGNAL = 0.92; EXPRESSED IN PLACENTA, SIGNAL = 0.93; EXPRESSED IN LUNG, SIGNAL = 0.94; EXPRESSED IN FETAL LIVER, SIGNAL = 0.82; EXPRESSED IN BRAIN, SIGNAL = 0.67; EXPRESSED IN ADULT LIVER, SIGNAL = 0.9
gggcatggagaatattgggtaggccaactagacaagtgaatttcaaggttacaacactccattgtggggaattcattcaaagacatgcttttaactttcatttaggaggaatttattagcctagaatatttcttttcttctttagacaaagggacagcttcattctttgatgtttaccctccattatttatgttctttttaccttcaaaagactggacacattcaagggaaactcctctttttttttttttcctcagtgaatcagtggcaagctctgtcacttgaggtcctgatgacgtgcagttgggtttcttgaggattttgcttttgtgttgagaatgattccacagagtttggtaaggggtttttcccctaacaatcacagccgtgccctctgcaccttccatgaaaccctgaaaagactggaaagaatgcgtcacctccgtgacagcttctt

SEQ ID NO: 11449 - DNA, 454 bp, Homo sapiens
  MAP TO AC003108.1; EXPRESSED IN LUNG, SIGNAL = 0.69; EXPRESSED IN FETAL LIVER, SIGNAL = 0.74; EXPRESSED IN BONE MARROW, SIGNAL = 0.67; EXPRESSED IN PLACENTA, SIGNAL = 0.75; EXPRESSED IN BRAIN, SIGNAL = 0.62; EXPRESSED IN ADULT LIVER, SIGNAL = 0.78
gtaagttgcttccagcagccgacttctggaggctactttctcaagcctgttaggggaattgctttagaggagaatattacagtgcaggaaggctctgggggataattcggttttactgtgaaatgtttcttttctttcaccaaaagatggcagtaacctccatccaacttctaggatcctagctgcctgaaaaccgacgttcttcccatcaattgctttctcaattccataccatcattcattcatatttttgtttctttctggttttgttttccttcttggtaggagggcaaagataaaatgttcctgatagaaaaattgatcaagctgcaggatatggagaagaaagcaaaccccagctcacttgttctggaaaggagagaggtggaggtgagtctggaggctgccttggggacccctgggacacgagcctgcctccatgtaaaaagcgcat

SEQ ID NO: 11450 - DNA, 459 bp, Homo sapiens
  MAP TO AC004898.1; EXPRESSED IN LUNG, SIGNAL = 1.2; EXPRESSED IN FETAL LIVER, SIGNAL =   1; EXPRESSED IN BRAIN, SIGNAL = 1.1; EXPRESSED IN BONE MARROW, SIGNAL = 1.1; EXPRESSED IN ADULT LIVER, SIGNAL = 1.1; EXPRESSED IN PLACENTA, SIGNAL =   1
taattccacgatttcgctcctaggtggtctgttccagagttctctgcatgcttagtgcgtgcattgaatgcctgcacgggatcctggagcacagtacctgcccactgaatatcagcttccatcttcggtactatgaggagaaaatacctgctctcttaggattgggtttaatatcaagttgagcatatggctctttgtttgtagaaggcttgtatattcgatgctaacgttgtcactgttctcttttgaaggctctctatgagaacatgctggtggagctgccctttgcaggcttctttctttccaagttgcttggaaccagtgccgacgtggacattcaccacctcgcctccctagaccctgaggtgtataagaatttgctctttctgaagagctacgaagacgatgtggaggagcttgggctgaacttcactgtggtgaacaatgacctgggagagg

SEQ ID NO: 11451 - DNA, 483 bp, Homo sapiens
  MAP TO AC005348.1; EXPRESSED IN LUNG, SIGNAL = 0.83; EXPRESSED IN FETAL LIVER, SIGNAL = 0.92; EXPRESSED IN BRAIN, SIGNAL =   1; EXPRESSED IN BONE MARROW, SIGNAL = 0.98; EXPRESSED IN PLACENTA, SIGNAL = 0.76; EXPRESSED IN ADULT LIVER, SIGNAL = 0.86
aaattctgtgtggtgacctggtatcatggacaacacactccaatttgcccttgatcaccataggtaaaatccccctgaaaactctgcttggtggcctggttgcatgagcacttccccagcatcctctgggaaggccatctggcatttgctgctgttctccactgcaatgaacatttcacacatttctttcctaagcctccagcatacctgatgcaatagtgggagagagaaacaaaagcagaactgagaccagcttcactgctaagataagaactttcaggggtaagaaaaaggctagtaattggtcttaaacctactttgccaagtggttcatgagcagctgtaacatctgccgatttttctctgggagccgatgaacaaggctgtggatttcagagacccgagactcctggttctccagttctgcaaaggaaggagggaggtaatatcttatcagtgtcacagctaaacaactttaaggtt

SEQ ID NO: 11452 - DNA, 472 bp, Homo sapiens
  MAP TO AC005871.2; EXPRESSED IN BRAIN, SIGNAL = 1.2; EXPRESSED IN LUNG, SIGNAL = 1.1; EXPRESSED IN FETAL LIVER, SIGNAL = 1.9; EXPRESSED IN BONE MARROW, SIGNAL = 1.2; EXPRESSED IN ADULT LIVER, SIGNAL = 1.5; EXPRESSED IN PLACENTA, SIGNAL = 1.4
tgcatgtgtgcatgtgtgagtgtatatgtgcctttcagagaaggggaaaatccatactctctcttctgactgaattaatcaaataaatcttctataaggagctgctaaatgaattacagatggctctgcccttttacaggttgcagaaagcacccgttacagttcttttaatttatcagaggaaaaaagatgccctcgtgtgccccttccctcttgcaataataatcagaaccagtctattttccaagggtccgagactcattttcaaaaaatgtgtatccatagatgtaacagcgggaagattattttgccaagttccagcctccagcatggggaaggtgccctggctggggagagcgtttataaaaccacatttaataaaagagagtgttatattaagtatgtttgctagtgtatataagcatatggtttccatatcaggcctaaagatgccaaacacatgctttacctt

SEQ ID NO: 11453 - DNA, 377 bp, Homo sapiens
  MAP TO AC005550.1; EXPRESSED IN PLACENTA, SIGNAL = 0.96; EXPRESSED IN ADULT LIVER, SIGNAL = 0.95; EXPRESSED IN LUNG, SIGNAL =   1; EXPRESSED IN FETAL LIVER, SIGNAL = 0.79; EXPRESSED IN BRAIN, SIGNAL = 0.81; EXPRESSED IN BONE MARROW, SIGNAL = 0.8
agtctacctccccaaatcgctcttttcttttttgatgtaatttctattttttataaaatatgtatcataaatttgaatagaaaatatctagatatgtacactgtataaccatgcacaaaagctaaagttcgatcaatgaattaattttagttattttaactaaaactgggcagtttattcctactactagattgctcaaagagcaaccaaatgtaattgaagccaagcaattcacactatttatagacatttttcagaatcacctgctttgtagtgatttttttcagcagttgtaaagttttgatttttaagagtccctttgaagacgtggcagatgttggctttgctaataatgctggaaagcgtagcaggttcaa

SEQ ID NO: 11454 - DNA, 461 bp, Homo sapiens
  MAP TO AC004905.1; EXPRESSED IN ADULT LIVER, SIGNAL = 1.3; EXPRESSED IN PLACENTA, SIGNAL = 1.1; EXPRESSED IN LUNG, SIGNAL = 1.3; EXPRESSED IN BRAIN, SIGNAL = 1.4; EXPRESSED IN FETAL LIVER, SIGNAL = 1.4; EXPRESSED IN BONE MARROW, SIGNAL = 1.3
tgcagatttttaaaagtaggtgaggaagtgctctcttccatgtctagcctgggacacataatctgtccttggtccttggctttgaaaaccctttctcactgtacctctgcaccatcccccccgccgccatcctacccccttcccagacacatcctggccaactcaactcatccattattttcttcaaaaagttgtccttgactccccaggttgaggcaggtaacaacctttggttcccatagcctcctgtgcacacatttccattaggcaacaatgagtgcgttcttactgagtggccgttatggccagggagctggagatgcaattgttggccaaacagaggtgagcctgccctcagggagcttactgtctgatgcaggcagcacataccaaacaggtaaacaggtgagtcaggtatggtcacaaatggagacaagcactatgagcaaataaaagagacg

SEQ ID NO: 11455 - DNA, 461 bp, Homo sapiens
  MAP TO AC005296.1; EXPRESSED IN ADULT LIVER, SIGNAL = 0.86; EXPRESSED IN PLACENTA, SIGNAL = 0.85; EXPRESSED IN LUNG, SIGNAL = 0.87; EXPRESSED IN BRAIN, SIGNAL = 0.8; EXPRESSED IN FETAL LIVER, SIGNAL = 0.83; EXPRESSED IN BONE MARROW, SIGNAL = 0.71
tacgtctgtttcctgccaagtaattaaatcgtagattcataatctatgtaccgaataaatgtggaatgtttttgttttgttttgttttaatgtataagacttgggtcaaggtgaggagggaaagaaagggtttccttgaaagattcttgtgtttaattagaattaattgaaaccactgtgcttaaaacagagaatgatgttagaagaaagccttggaacgatgatcaacataagactacacagtatgtgggataaactattccaacttacagcatttttgttttttgtattgccagtgctacagctagaatgaagcacatcaacctatcatttgcagcgtgtggatttctgggcatttaccacttgggggcagcatctgcactttgcagacatggcaaaaaacttgtgaaggatgtcaaagccttcgctggggcgtctgcgggatcgttggttgcttctgt

SEQ ID NO: 11456 - DNA, 424 bp, Homo sapiens
  MAP TO AC004240.1; EXPRESSED IN LUNG, SIGNAL = 0.74; EXPRESSED IN BRAIN, SIGNAL = 0.95; EXPRESSED IN BONE MARROW, SIGNAL = 0.65; EXPRESSED IN PLACENTA, SIGNAL = 0.6; EXPRESSED IN ADULT LIVER, SIGNAL = 0.73
aaaagttggcataacttcctggtattgaagttcaatcctacagaattaaaaaaaaaagcaacaaaatgttggttataaatacattctttacaaaaaaaaattgaatagtggtcccgcactcataatttatattacagtgaaaacattttatcaatttaaaggtatttgtatcttgttgtccttggtttctgtgtgaaatagaggaagttaataatgagaatattgtaggcaggcctatttgttaggtttttctaggtgttcatttttgtgtaagttccaattcacttcttttgagttgttgttgatttctatttgccttgtattactgctgctgctgcttcttttggtgttctgggaacactgggtgactttacttctaggaacaggaagaaaagatttaactcttgaaacacccaactcagtc

SEQ ID NO: 11457 - DNA, 422 bp, Homo sapiens
  MAP TO AC005738.1; EXPRESSED IN BONE MARROW, SIGNAL = 0.64; EXPRESSED IN PLACENTA, SIGNAL = 0.69; EXPRESSED IN LUNG, SIGNAL = 0.63; EXPRESSED IN ADULT LIVER, SIGNAL = 0.53; EXPRESSED IN BRAIN, SIGNAL = 0.72
tcacacagctggtaagtggcagagttggtatgtccactgggtctgactaaccccagcccctgccggtcccccagggagcaggcccttgccccggttctgcaggaactgcagtcattggctcctgctcaaagcctcccaataaagagaatttgggggaaatcccttccgcaggagaagctggtgaaagacaagcccccttcctggatattctcagcacaattcaggacttgctaattactcctgggccctacctttctcttctcaagtaggcggcaaagtttactggtgattgcgaagtgattgcagagcggttggagagtgaatggatccggagcagcgtagcaaacagcgcagtctggggggctccatcccgccgcagggccaaggcctttcctgccagtccgacgaactgccggtagatg

SEQ ID NO: 11458 - DNA, 376 bp, Homo sapiens
  MAP TO AC003657.1; EXPRESSED IN LUNG, SIGNAL = 0.72; EXPRESSED IN BRAIN, SIGNAL = 0.73; EXPRESSED IN PLACENTA, SIGNAL = 0.71; EXPRESSED IN BONE MARROW, SIGNAL = 0.8; EXPRESSED IN ADULT LIVER, SIGNAL = 0.73; EXPRESSED IN FETAL LIVER, SIGNAL = 0.72
gaggccaaaaatttaaccacagtgtttaccatatttgagaacttaatcagtgaagaaacacaacctcagtaatgtgactcttcaaaacagtcaaattatgtgagaagtctgaaattttgatgtcactgatttaataagtaatctgtgctttttgtgtgatgtattgctttccaggaagtagttaattatattgccttttactttatatcctataaaagcaaatctgttcattttatttagatgccaccaccaaatcaaacaccagctccagatcagccatttgcattgtctactgtcagagaagagtcatccattccgagagcagattcagagaaaaagtgggtttacccttctgagcagatgttctggaatgcaa

SEQ ID NO: 11459 - DNA, 344 bp, Homo sapiens
  MAP TO AC005740.1; EXPRESSED IN PLACENTA, SIGNAL = 0.62; EXPRESSED IN LUNG, SIGNAL = 0.62; EXPRESSED IN BONE MARROW, SIGNAL = 0.69; EXPRESSED IN ADULT LIVER, SIGNAL = 0.64; EXPRESSED IN BRAIN, SIGNAL = 0.65
catttcccttccctcctttgtccactgcccttgccctgctcattgccccaccctcacccgcctggcccttcccggagcctggccctcactgtgtcccctccttcccccacaggtctggccctggaccggctgagcgcccctgacccggcctggatggcgagactctctttgcccctcaccaccaactaccgtgacaatgtgatctccccggatgctgcagccacggaggagccaaggaccttccagacgttcggcaaggcagaggcaccagagctgagcccaacaggcacgaggctggccagcacctttgtctcggagatgagctcactgctggagatgctgct

SEQ ID NO: 11460 - DNA, 474 bp, Homo sapiens
  MAP TO AC005510.3; EXPRESSED IN LUNG, SIGNAL = 0.88; EXPRESSED IN FETAL LIVER, SIGNAL = 0.7; EXPRESSED IN BRAIN, SIGNAL = 1.1; EXPRESSED IN BONE MARROW, SIGNAL = 0.69; EXPRESSED IN PLACENTA, SIGNAL = 0.86; EXPRESSED IN ADULT LIVER, SIGNAL = 0.65
ttgaaacaaaccaaggagggatcaagttttgcgagcaggtgctaactggttgcaaaagaggagtccatcacttcagcaaaaggtttcactgtaccttggggaggacacagcttttctgaggaaagtcattactggacagagccataggctcttattttgtcttaggacacggaggagcttgtaaaaaacaaaaaaacacaaaaaacaatcctccgctgtgacaaacaactgttttcctttcctgtgttttccccttgatggctgatttactttctcctcagatggacaatggagtaatttacaggtcagtaaacactttcctggagatgccggagcagtttcattttggtacagataatatgggatttgttgtgactcagaatatcagtccagagtgggactgacacagccacctaccctgactgtttaagaaaaaacaattctaagtacaatgcataaataaacctaacagca

SEQ ID NO: 11461 - DNA, 428 bp, Homo sapiens
  MAP TO AC005771.1; EXPRESSED IN BRAIN, SIGNAL = 0.84; EXPRESSED IN LUNG, SIGNAL = 0.99; EXPRESSED IN FETAL LIVER, SIGNAL = 0.81; EXPRESSED IN BONE MARROW, SIGNAL = 0.76; EXPRESSED IN ADULT LIVER, SIGNAL = 0.74; EXPRESSED IN PLACENTA, SIGNAL = 0.98
aaggctaaatgaaactccttggaagtaaattgttatttgaggtatctaaatcagaaatttctgttcttcagttttatgtgtctggggtattgctgtaaagcactgaccatttctttgctggaacatagtttatacataatggagaaggaataggccaaggagagatgatgatgaatgtatgctttcccctgcagaaatccctttcaaaaagagtaatactaacaaaaacaaaggcaagttgaaaatgtggtggacctcaccctcagaccaggtgagccttcagattctgcacctcgctggccgtgcataaagaaggctgggacatccctgaattcacagtcagggtggtcgtctgtgtgcagaactgaaagcaaacaagagtaagctatagccagatgtgggggctttcaggttcactgacggttcct

SEQ ID NO: 11462 - DNA, 462 bp, Homo sapiens
  MAP TO AC002094.1; EXPRESSED IN PLACENTA, SIGNAL = 0.84; EXPRESSED IN BONE MARROW, SIGNAL = 0.68; EXPRESSED IN ADULT LIVER, SIGNAL = 0.8; EXPRESSED IN LUNG, SIGNAL = 0.99; EXPRESSED IN FETAL LIVER, SIGNAL = 0.89; EXPRESSED IN BRAIN, SIGNAL = 1.1
aggaagggtgatggtgagcagataggacaggacgcagtctccagaagtgctcaggggcaaggcaggggaatgtggtccctcctctgcccagaccctctgacctctgagcagggcctgtcatgcctctgggtgctagagcagagacccaggcagcagcagcatggggtggccaatggggcgggttccacaggatgggagatagggcctcccgtgccctgactccctgagggtctggtcagtcgcgatgggtagactggtggccgagctgccggtcatcgtaagtgctgtagcgcttgacgtggatgcggcggacacggtcccgcagttcaaaggtctcctcatcttcactgggggaagcctggctgcggctacggcttgtggcctccaacaaggagttgtcggggacgcggggagtctcatagagtaggacgttgagtgtctcctcatagattcgggcctctg

SEQ ID NO: 11463 - DNA, 474 bp, Homo sapiens
  MAP TO AC005518.2; EXPRESSED IN PLACENTA, SIGNAL = 1.4; EXPRESSED IN LUNG, SIGNAL = 1.3; EXPRESSED IN BRAIN, SIGNAL = 1.1; EXPRESSED IN ADULT LIVER, SIGNAL = 1.6; EXPRESSED IN FETAL LIVER, SIGNAL = 1.3; EXPRESSED IN BONE MARROW, SIGNAL = 1.2
ttgtctgccagttcaaccaccaccttgttgatttttccaacctgctcatcctgagcaaatcatttgaagtcattgatgaacctcttgagtatcttcttccagctgccatttatacactccttagtgacaccaccccaagcccaagcaagattcttggtgcagtcagagatgtcgtaatccttccagaattgcattggtatcttttatttttttattttattttttttattattttttttttttgcagcagcagcctgggtaaaagtccttctcaggtaataggccttaaaaagtgctttaatgccttgatgcaatggttgaatcaaagaggtggtgtttggagggaaaaacattactttgatattgggatggagatcaccaataaaaggagcatgtgtgggaccatcaccaacaataagcaaatcctgaaaggtatgttattctccaatagtacttctcattttgctggcatag

SEQ ID NO: 11464 - DNA, 474 bp, Homo sapiens
  MAP TO AC004612.1; EXPRESSED IN PLACENTA, SIGNAL =   5; EXPRESSED IN LUNG, SIGNAL = 0.93; EXPRESSED IN FETAL LIVER, SIGNAL = 0.85; EXPRESSED IN BRAIN, SIGNAL = 0.97; EXPRESSED IN BONE MARROW, SIGNAL = 0.84; EXPRESSED IN ADULT LIVER, SIGNAL = 0.98
ttgttcaactatatttgtgaaagcaagaatatgttattttttaaaattgggtgtactgactggcctaagcatagactttcttcttttcaatcatatggttacaaaaactgtatattacaaacagtatagaaacaagctgaaaagaatgagccacacatcctggataattatctatatgcagttaaatttacagatataaaagaaaatacagcctactcccttatagtgcacagttattttttagatacagtgtatcactagcaagtggttgcggccaccaactctagttatccccagcacagagaataagagcaagatccgttcggtacagcttccctccatccgacaaagccattatgttcttcttgtatgttgtaatattattaatatccagatcctgtacagaatataaatggcattgtaatccagttaaatatggaagttaattaaccactgtcaagtgataaaatgtga

SEQ ID NO: 11465 - DNA, 459 bp, Homo sapiens
  MAP TO AC000100.2; EXPRESSED IN BONE MARROW, SIGNAL = 0.59; EXPRESSED IN PLACENTA, SIGNAL = 0.59; EXPRESSED IN LUNG, SIGNAL = 0.59; EXPRESSED IN FETAL LIVER, SIGNAL = 1.6; EXPRESSED IN BRAIN, SIGNAL = 0.64; EXPRESSED IN ADULT LIVER, SIGNAL = 4.2
acctgaaggaaactgcaaggctcaggccaggtctataaaaccctcaagtctcaggaatccacccctaacactggctccctctttcctcttctctctctcttcctctctctctccctttctctctctctctctctccctttgtctctctctctctctctctctctctctctctctctctctctctctctctctctcattctcttactctctgttcctcatatagctccagtcttggagtccctttgacaattccaagtggaacatccaacagacaacactaattcagtcgtctggtaagatctaccttttcctggctttctcttggtactggagaaagtccagcctgctgtcgagttcttcgaacgaccaataggactaagctagaggaaaccttggggacatgtagtgctttctcagtgtaactgtcctctttcataaagaggattccgggtctctgtc

SEQ ID NO: 11466 - DNA, 357 bp, Homo sapiens
  MAP TO AC003667.1; EXPRESSED IN PLACENTA, SIGNAL = 0.96; EXPRESSED IN FETAL LIVER, SIGNAL = 0.76; EXPRESSED IN BONE MARROW, SIGNAL = 0.82; EXPRESSED IN LUNG, SIGNAL = 0.69; EXPRESSED IN BRAIN, SIGNAL = 0.71; EXPRESSED IN ADULT LIVER, SIGNAL = 0.68
gcagaggtcaagaaataccccagcttttcccaaacataaagaaatatcctactccgctgataattttcaaacatcttgggtggatattcatgaatgtgaaatgcctctttataattatctgtgaggaaagcctcatttcattttacatagaaacacaaagaatgtttgtaacgttctaaaataatctgaattttccagaagtgcaacttacatgtgaattgaggaaagttgtgcttcggtgtcttcagaatggttacccttgttattaatgacataagacagcttaaattctcctttaaattgaccttgagaactttttagaagttttatttggaagtcagcctcagctctatgctt

SEQ ID NO: 11467 - DNA, 478 bp, Homo sapiens
  MAP TO AC005872.2; EXPRESSED IN LUNG, SIGNAL = 1.5; EXPRESSED IN BONE MARROW, SIGNAL = 1.3; EXPRESSED IN ADULT LIVER, SIGNAL = 1.4; EXPRESSED IN PLACENTA, SIGNAL = 1.5; EXPRESSED IN FETAL LIVER, SIGNAL = 1.3; EXPRESSED IN BRAIN, SIGNAL = 1.4
attttcttcctccactttttattgttatatcttcaagacctagaacagtgcctatcacataacagatatttatttattaaatgaatgaccaaatgttcatgtcacatgtacttctaaatcatttgaaactgctcacaatagaagatacatcttcattaaatcaataaaagtaaaagaatcgctatgcaataacccaatttgctcatgaaaaagttaaatttttggaaaattcattcattcaaaataagttattttcattaatgcaagacaaatgaggtgatatttattcataccacttttcaacatgtttgcttggttttctaagtcagatatttcaatcttgacattttctttcatcaaaagctctcttttctttgttatttcataatcattattaaagtctgtaatttccttaataaatttgtcttcctcctctatcatttgtttctttatagcctcctgaaaaacataaataaaa

SEQ ID NO: 11468 - DNA, 456 bp, Homo sapiens
  MAP TO AC005668.1; EXPRESSED IN PLACENTA, SIGNAL = 1.4; EXPRESSED IN ADULT LIVER, SIGNAL = 1.4; EXPRESSED IN LUNG, SIGNAL = 0.55; EXPRESSED IN FETAL LIVER, SIGNAL = 1.1; EXPRESSED IN BRAIN, SIGNAL =   1; EXPRESSED IN BONE MARROW, SIGNAL = 1.5
cagtggcatttgaatggaaactttttcctggagcctttaccaattctgttttgtgccaaaagatacactcgatttttttcttgttagctatttttattctttaacttactgatcaatttcgatacccaaaagtatgtgagacagtcctttgggcaccaagaaaaccagagtgtccacttgcagacctacagcccaagatcttcatcaacactgtcatcatcgtcatcgctgtcatcatcatcgctgtcatcatcatcaccatcgctgtcaacatcatcatcatcatcactgtcatcatcatcaccatcactgtcatcatcatcatcaccatcactgtcatcatcatcactgtcatcatcatcatcatcatcactgtcatcatcatcatcatcatcactgtcatcatcattgtcatcgctgtcatcatcatcactgtcatcatcatcatcattctca

SEQ ID NO: 11469 - DNA, 481 bp, Homo sapiens
  MAP TO AC006065.3; EXPRESSED IN FETAL LIVER, SIGNAL = 0.81; EXPRESSED IN BRAIN, SIGNAL = 0.65; EXPRESSED IN BONE MARROW, SIGNAL = 0.74; EXPRESSED IN ADULT LIVER, SIGNAL =   1; EXPRESSED IN PLACENTA, SIGNAL = 0.71; EXPRESSED IN LUNG, SIGNAL = 0.82
tgcagtggtcttccagggaagatcctcttgtatcagaaggaagagatgatcagttcagaaggcccgagaaaagacaaggtcatttgaaagtgatagttcatccaggtgtgatcctggagcacgaagtgacaaaaaagtcacatgtcaaggcaccgacgtagaaagggtctccctgtctcagagcccacctggtctcttccttctcagggtggctcctctctctctctctgcctctgccccttgtcttagcccagcatgggtgcaggtcccaggttctgtgacatcacagttcagggcccaaagcccaatctcggatcacggcattgagagtatctgattggccactggccagccaatggtggggcaaactttggagcaggctatcacggttggaacaatcagtgctgaaggagttgaagaggatgggcaagccacggcttctccttctggaaacggagatcatctccaaagaagaccatca

SEQ ID NO: 11470 - DNA, 483 bp, Homo sapiens
  MAP TO AC006075.1; EXPRESSED IN PLACENTA, SIGNAL = 1.6; EXPRESSED IN LUNG, SIGNAL = 1.5; EXPRESSED IN BONE MARROW, SIGNAL = 1.4; EXPRESSED IN ADULT LIVER, SIGNAL = 1.6; EXPRESSED IN FETAL LIVER, SIGNAL = 1.5; EXPRESSED IN BRAIN, SIGNAL = 1.3
atggatggatggatgaatgcaatagatggatgggtgagtggatggatggatgatgggcagatgaatggatgtaacagttgggtgggtgagtggatggatgaatgacgggtagatgtatggactgaataggtgggtgggtggatggatgggcaaaagaaagaatttggccttgggttttaacatcagtagtaatctctactttctagacattgagttttaggatggataccaacaattattatgttttgagacacactttctggagaaagtccagagatccttttaactcacttggcatgggcaattgttaccttgcacttgccattttgtacaaaagtatgtttggttccgtgccttccttccttctctggcaaattgaaaattatgatggaaataagaatttccaaaaacctgtggaggtgaaagaagacataaaaacaaagccacagattattgtacatttcctgttgccagattaaagcc

SEQ ID NO: 11471 - DNA, 464 bp, Homo sapiens
  MAP TO AC005803.1; EXPRESSED IN FETAL LIVER, SIGNAL = 1.2; EXPRESSED IN BONE MARROW, SIGNAL = 1.2; EXPRESSED IN PLACENTA, SIGNAL =   1; EXPRESSED IN LUNG, SIGNAL = 0.94; EXPRESSED IN BRAIN, SIGNAL = 0.98; EXPRESSED IN ADULT LIVER, SIGNAL = 1.3
gcgtctcacataatgcttgcaacaatgccatagggcaccacccccattttacagctggagaaactgaggctcagagaggacttagggcttgctccaggtcacaggagaatttgaagccgggtctgtctgagccccagccccggctcaccttgctatcctcaggctctgagaaagtgtcggtttcctcctcggtgggcatctccaggtcggactcctcggaggcgatgggcacctgtatggtcaggtaggggttgttgatgaagttaaggtggtccagctcgaggctggatggggggccgtcagccaggcccatgtggttcaggatgtgattgtccttcttcaggtcctcctcgggcggctccttcttctcatcctcgggggcagtctcccccgcctctccagcctccccggccccgtcagcctccccgaggctgagcatgatgtccttggggctcaggatcttg

SEQ ID NO: 11472 - DNA, 462 bp, Homo sapiens
  MAP TO AC004529.1; EXPRESSED IN LUNG, SIGNAL =   1; EXPRESSED IN FETAL LIVER, SIGNAL =   1; EXPRESSED IN BRAIN, SIGNAL = 0.91; EXPRESSED IN BONE MARROW, SIGNAL = 0.91; EXPRESSED IN PLACENTA, SIGNAL = 1.1; EXPRESSED IN ADULT LIVER, SIGNAL = 0.95
cctgacccttctcctgacactaaagtatgcaacttagtatcagcactgatctggggccccttttgctcttagcccactctatttctttttatttgttgttgttgttcttgctcttccttgtgctgttcgtgcttcctgtaaagtggggatgtggttcttgctgccaaagctcgaggtctcaagcccattccctgcagctgaggtggggctcaggctgtggctcctgcagccatgtgggagaggctgataggactttcctctctcccattgctcagcaccctccagtgtgtcatgtggagactcacctgggaatgcaagtggccaacagtagtgaagaggatgagcttgtgtggtcaaaatgggatgtggatgtgaaatttatcctgtgctgtgcaaagtaccacagagtgagtcaccttcctcaccagtagtgttagaaagaggctgtgaaagttgtcagaa

SEQ ID NO: 11473 - DNA, 485 bp, Homo sapiens
  MAP TO AC002303.1; EXPRESSED IN LUNG, SIGNAL = 0.79; EXPRESSED IN BONE MARROW, SIGNAL = 0.75; EXPRESSED IN ADULT LIVER, SIGNAL = 0.68; EXPRESSED IN PLACENTA, SIGNAL = 0.91; EXPRESSED IN FETAL LIVER, SIGNAL = 0.67; EXPRESSED IN BRAIN, SIGNAL = 0.75
agtgtgatgaggccagttcccaaggggaaggcccagaagagcctgggggatgggcaggtcggggagcccctctttccagagttccagtacagtgggaaacgtgtcagtctgtgactctggccaaagcacccgtcccctgctgcaggaggctcggcagacccaaggccagggcacagtggggtctgccgagcaccaggcaggagtggtgtggcaggcggtggctgggagggaggggacgcccacaggggtcctagaggtggatccacttgttccagttgacctcgtgggggaacacacggcccagccggagggtacagtccaaggtgggctcatagaaagccatggggctctcgtccaggctggagggcacttccacctcttccaccacgggtgtagagaagagcgagacaggccttggctttctcagccagcgcttccggatgcagccgagggactccaggccctggagacaccagacacacagg

SEQ ID NO: 11474 - DNA, 366 bp, Homo sapiens
  MAP TO AC004067.1; EXPRESSED IN PLACENTA, SIGNAL = 0.94; EXPRESSED IN LUNG, SIGNAL = 0.97; EXPRESSED IN FETAL LIVER, SIGNAL = 1.2; EXPRESSED IN BRAIN, SIGNAL = 0.94; EXPRESSED IN ADULT LIVER, SIGNAL =   1; EXPRESSED IN BONE MARROW, SIGNAL =   1
agtggtgcgaacttgtacccagcttgctcaatcactagaacggcaagattctagcagtggttaagtttttccacagccgaaggacaccgtcaaggtctgccttgcatctgtcactcacacctccaggatctccgtcaccccaatcccccgaaagcacgagccctcgctgggcccgggtgccccctcaccgtcactgcatttatactggcagagaccgtcctcgcctcccaggaggtccaaggcggcgttcaggtacgtgtctatcttatgaacgccgttccggatggtcttcagggtggctctccagtcggtggtctgggcctgctcctggcacctgacaacagcggccatgaggaggagcaggag

SEQ ID NO: 11475 - DNA, 383 bp, Homo sapiens
  MAP TO AC005670.1; EXPRESSED IN PLACENTA, SIGNAL = 1.1; EXPRESSED IN ADULT LIVER, SIGNAL = 1.4; EXPRESSED IN LUNG, SIGNAL = 1.1; EXPRESSED IN FETAL LIVER, SIGNAL = 1.2; EXPRESSED IN BRAIN, SIGNAL = 1.1; EXPRESSED IN BONE MARROW, SIGNAL =   1
cctatctgtggctagtgggccctgaacacactgccttaggcctgctgtacttagaagctgagaaaggaaagtgtcattccttccccattttctgtgtccttttcatttcatatggaaggcacatgggagaggagtgttcaggggtgctgggcccccaagtgctgttggtaagttccccaccatggagcctctgtgagccatccctccccgcctcatccccatgtccctctagtacagggttcccaaccttggctctgcattggaattccctcgggagctttaaaaacccatgtgtgggtcttccattcaccctcttattaattggcctggagtgcagccggggcattgggagttgcccaaggcgattgtaatgcccaggggta

SEQ ID NO: 11476 - DNA, 490 bp, Homo sapiens; identical to SEQ ID NO: 10644
  MAP TO AC004259.1; EXPRESSED IN LUNG, SIGNAL = 0.76; EXPRESSED IN FETAL LIVER, SIGNAL = 0.8; EXPRESSED IN PLACENTA, SIGNAL = 0.81; EXPRESSED IN BRAIN, SIGNAL = 0.76; EXPRESSED IN BONE MARROW, SIGNAL = 0.61; EXPRESSED IN ADULT LIVER, SIGNAL = 0.83

SEQ ID NO: 11477 - DNA, 442 bp, Homo sapiens
  MAP TO AC005844.7; EXPRESSED IN PLACENTA, SIGNAL = 1.3; EXPRESSED IN LUNG, SIGNAL = 1.4; EXPRESSED IN FETAL LIVER, SIGNAL = 1.5; EXPRESSED IN BRAIN, SIGNAL = 1.3; EXPRESSED IN BONE MARROW, SIGNAL = 1.2; EXPRESSED IN ADULT LIVER, SIGNAL = 1.3
tgaagttcgcactcaggaaagtacctgtaaagaccagtctatgaaccagtgagcatgggtagatacattatactttacccagtaaaacatgtaagattgccagtgatcagatttttaaacctgctaatattttacaaaatttatatatcacaccattttaaaagaaccactctcttccattttggaataatccttgctttcaggtgtgctgtgtgcgcatcctcatgtctgcatttatactttctttcctagtcttcaccacacccaagaactgctctatgagagcaccaaagattttctgcaactcagatctgaaaaccaaaataaagagaagtcatggatgcttgaaaaagataatttgatgtcaaagattaagcaatatagggtgcagtgtaagaagaaagaagataaaattggaaaagtgttgcccgttatgcatgag

SEQ ID NO: 11478 - DNA, 480 bp, Homo sapiens
  MAP TO AC005815.1; EXPRESSED IN PLACENTA, SIGNAL =   1; EXPRESSED IN BONE MARROW, SIGNAL = 0.68; EXPRESSED IN ADULT LIVER, SIGNAL = 0.71; EXPRESSED IN LUNG, SIGNAL = 0.81; EXPRESSED IN FETAL LIVER, SIGNAL = 0.71; EXPRESSED IN BRAIN, SIGNAL = 0.64
tgcccatgacagttaagaaaactgtttattaacccataatcaagctcaaatttatcttccagacacagttggaaccaacagtgacatcctccctctgtacttgggaaactcacttgtatctagaacacggatgccgatgggggctgactcctcctccgtcagccggtaccattccttctgagggctgggcagccactcctccacatggcaggagtaattgcctgtatcttgggggcttgcctgcagcactgtgagccggtagagcaccggggagagcctctggaagcgaagcctgccctcccaaggactgccctctgggccaaagacagcatctgggcccacgctcagcagggccgtccgctctgttgggtcgtcgtcgtcgtcgtcctcctcctcctcctcctcctcctcctccctttcctcttcctgttcttccaggccagggctgctccttttccccccagctttagtcctcaggga

SEQ ID NO: 11479 - DNA, 442 bp, Homo sapiens
  MAP TO AC005961.1; EXPRESSED IN ADULT LIVER, SIGNAL = 1.2; EXPRESSED IN FETAL LIVER, SIGNAL = 0.99; EXPRESSED IN BRAIN, SIGNAL = 0.91; EXPRESSED IN BONE MARROW, SIGNAL = 2.8; EXPRESSED IN PLACENTA, SIGNAL = 1.8; EXPRESSED IN LUNG, SIGNAL =   1
atccttagccctgatccctgaattttcagggagacagatttgagtaagaataaaactggtctctcattcagctggctatgcctgaaataaatcctttctttattacaattcctctgtcttgataagttggctttgtctaggtaacaggcaaggagaatccattgggctgttaaaagtgggtgtgatataataaaaaatacattctttgtctctggttcctggcacagagcttctgatacccttggaatttcttaagcgataagaatgactgtctcttgttattttaactatacagtcctctggactacacctaagttatgctaatgaagtctgtcagggtggaatccatggagagcttcagggtggggccgccagaaagatcaaatttgtgattagaaggtaagaactttcagctccattccccaatctccaggaaggggag

SEQ ID NO: 11480 - DNA, 452 bp, Homo sapiens
  MAP TO AC004470.1; EXPRESSED IN BRAIN, SIGNAL = 0.58; EXPRESSED IN ADULT LIVER, SIGNAL = 0.7; EXPRESSED IN LUNG, SIGNAL = 0.76; EXPRESSED IN FETAL LIVER, SIGNAL = 0.7; EXPRESSED IN BONE MARROW, SIGNAL = 0.64; EXPRESSED IN PLACENTA, SIGNAL = 0.65
agtttgtctgctgttgctttccttccttaccaattggtttcctctcaaaattatgtttacttaagatagatttacctttccccataagaaaacattatcatttagttaaggacattgtatatgtgtgtgcatacatttgtgcatacatatgcatgtatgtacctctacaaagagaaataaagaagatatgtcccatatgagtttataaggtatagtagataacattaatagccccaattctttattcctctctgattccaggcagacaattttccatgtaactttttagtttttccagctaaagaggtgaagttgatttccctactcctggttttggagttagataatgtgacattttttggccaatggaatgacagcggaagtcatgtgtctaaaatgctagacatgcttgtatatgatcaggtttattctcttgcacttctgccgttact

SEQ ID NO: 11481 - DNA, 482 bp, Homo sapiens
  MAP TO AC002299.1; EXPRESSED IN PLACENTA, SIGNAL = 0.82; EXPRESSED IN BONE MARROW, SIGNAL = 0.69; EXPRESSED IN ADULT LIVER, SIGNAL = 0.82; EXPRESSED IN FETAL LIVER, SIGNAL = 0.67; EXPRESSED IN LUNG, SIGNAL =   1; EXPRESSED IN BRAIN, SIGNAL = 0.76
gatggcaggtagtgatggttgagatggaaagaagtagatgaattctagagacagctgggaggaaagaaatgacagttctggttatggttgagacatgagggataaaagaaagatggagttgcaaaggatgtccgacaggtttcaggcttgtggagtgatgcatggctatgcttttcatggggacagggtgccggagctgcaggaactacagcttcccattgtgtgcctgtgccttcctacaagatcgtcctcaaaccctgagcatgttttctgtgtgcttcctttttgcagagggccaagatcagtcagggaaccaaggtcccggaagaaaagacgaccaacactgtctccaaatttgacaacaatggcaacagagaccggatgaaactgaccgattttaacttcctaatggtgctggggaaaggcagctttggcaaggtatggtatgatttggtggctccacctgctttggaaggaacatc

SEQ ID NO: 11482 - DNA, 451 bp, Homo sapiens
  MAP TO AC005827.3; EXPRESSED IN LUNG, SIGNAL = 0.84; EXPRESSED IN FETAL LIVER, SIGNAL = 0.67; EXPRESSED IN BRAIN, SIGNAL = 0.95; EXPRESSED IN PLACENTA, SIGNAL = 0.74; EXPRESSED IN BONE MARROW, SIGNAL = 0.65; EXPRESSED IN ADULT LIVER, SIGNAL = 0.79
gcacactgaattggtgacaacttgggaactattaataaataaaagaaagaaaattgttctgcattggacgatccaactggctaatgggaaggcatctcggagtcaactaacatttattcagtgcccagcatgggctcagctctgtgctgggtcaaaggtacaaagagcctccaatctactttggtttcactcttgactggaatcaaagaaaagagtatgcattaactttactagttttatctcttgacaggagtaaaaagcttcccaagaagcacaagtcacatacatgttttcctaatttgcttttaatctcaagagtttacaagttggctaactctaatgcacaagtcacatctgtaatagcagccttcatctccactgccgttgtcaagagggctcggaaatataaagtgagtgattaagaagaaagcccctttactgttagaatcaa

SEQ ID NO: 11483 - DNA, 457 bp, Homo sapiens
  MAP TO AC003117.1; EXPRESSED IN ADULT LIVER, SIGNAL = 0.86; EXPRESSED IN PLACENTA, SIGNAL = 1.1; EXPRESSED IN LUNG, SIGNAL = 0.97; EXPRESSED IN FETAL LIVER, SIGNAL = 0.86; EXPRESSED IN BRAIN, SIGNAL = 0.95; EXPRESSED IN BONE MARROW, SIGNAL =   1
ttgctaaaattgcgcttacctctattatatcatgagataattaaatcctctcctgtaatcacaggtcatactctatgctgcttaactcactgtgtgaagctgactgtgctaattcataataaagcttacctttggctaagctcctccagatagcgaccactgagagacatgttaacttctaaggctttaatacgattattaagtctcataaatactgactccttttggtttgatccatgtacaagatttccattagcatatcctagatctgtagaattttgcaattcagcataaaaatctgtagctgtcctctgtaaccctctcaaaagggcatcttctggagactgttcttcttcttttacttcaggtaatgaagaagaatccacaacagaaatcaaagtttgctttgctgtgtcagctatattcattttggcttccccatcttcattgtcgggta

SEQ ID NO: 11484 - DNA, 500 bp, Homo sapiens
  MAP TO AC005772.1; EXPRESSED IN LUNG, SIGNAL = 0.53; EXPRESSED IN BRAIN, SIGNAL = 0.69; EXPRESSED IN ADULT LIVER, SIGNAL = 0.58
gttggccactgctctttttgtctctttttacctggctaggtgataagatttttatctcctctacttccttctctatatatgcctccccgagctgttacacaaacttctgtgatctctgaaccttctcaccaaagtggttagtgcaccagtttttgtttcctaacactaatgagaaaaaagtttttctagataagtacacgtggggtagacatagggtatattcttttctgaatttgtgtttccaccagtaatctaagaatagcgttgaggttatgacttctatttcatttcaaatactcaagaggagtttatgaagctccttcctttctaggtcatccatgacgacccagtacatttattctgcaggaattcacatctacagaaggctggcagtcatcttccatctgtaagttttagaaaagaaaacaattctttttttcttagtctcaatgcctataaaatgattcttcgttagttatcacatttggctgccacttctt

SEQ ID NO: 11485 - DNA, 483 bp, Homo sapiens
  MAP TO AC005666.1; EXPRESSED IN BRAIN, SIGNAL = 0.56; EXPRESSED IN ADULT LIVER, SIGNAL = 0.42; EXPRESSED IN LUNG, SIGNAL = 0.5
ctttggatgggctcagtttgtactgcttcatcctttgggtaagacaaaatcctacggggaactctgactccttgggggttctggaccttggatggtgggtcatcttctaagatttgtgattgtaagttattcttctggtcttgaaaactcaactgatgagtagatttggcatctgggattgatgaagcatgatggccgacctcgcgccctgacttgctctcactgcctcttcgtgctgcttcctctctgggtggactaactttccattgtctgcttgaagcatgggaagccagtgtctgagtcttctggctctttagatggggagaggaatggcgggatgattctgttcttggtccagtctcgggtccccgaggagtgggtactgcatagtgtccaggtcctgactggagggagacagatcgagggtagtctgatgctgaatggggagtggtgggatgtgcagcttctgatcttcggtgggaa

SEQ ID NO: 11486 - DNA, 465 bp, Homo sapiens
  MAP TO AC004594.1; EXPRESSED IN ADULT LIVER, SIGNAL = 0.84; EXPRESSED IN PLACENTA, SIGNAL =   1; EXPRESSED IN FETAL LIVER, SIGNAL = 0.93; EXPRESSED IN BRAIN, SIGNAL =   1; EXPRESSED IN BONE MARROW, SIGNAL = 0.77; EXPRESSED IN LUNG, SIGNAL = 1.1
acaagttacccatgccttgctgtgacagtaaaaagagaatagcattaggttgccagtgtcccaaatcagtttcaaaattgatgacattagctcttcatgaaacataccactaataaaataaatgtcaagatactttcatgcagcttctgcttataaggcctaaaagtgcgttcaggaaagcaaatcgtagtatagaaagaaaaaacatgtatatctattctttttttattttgcagggatggtttagccctggccaagtctttgtgttagatgagtactgtgcccgttatggtgtgagaggctgtcacagacatctctgctaccttgcagaactgatggaacattcagaaaatggtgctgtcattgaccctaccctgctccattacagctttgcattctgtgcctctcatgtgcacggcaacaggtatttttacttgcaaatacaaagtgaaatgtatggggttg

SEQ ID NO: 11487 - DNA, 467 bp, Homo sapiens
  MAP TO AC005856.1; EXPRESSED IN PLACENTA, SIGNAL = 0.83; EXPRESSED IN LUNG, SIGNAL = 0.8; EXPRESSED IN FETAL LIVER, SIGNAL = 0.79; EXPRESSED IN BRAIN, SIGNAL =   1; EXPRESSED IN ADULT LIVER, SIGNAL = 0.91; EXPRESSED IN BONE MARROW, SIGNAL = 0.9
tcatacatatactcagtccatcttcctgctaacaagaactttactttgtatatcttcccatcatccatggtacagagatgcacatgatagatgcttaaagatttctcttataaatcaatgggaaaataataaagataaagcataaaaataaaaactgctttctataatcaaatataggagaaaagatgggactatcaaattgatagaaagcaaatgcttttctactctcaattagaggtggttgaaaaaaattgaagattaacaacttcactctgacccacctccttctatccaaaagcgagcacatgatatttagcagacatccttcagacatgatcactacaactgggttccagctctgctgcttggttgacaacttcaggcacaactctacacaccacagggtatccaagtgtagtaaatcagctgttttgaaaacacttgagctgagtgtttcattaaatggc

SEQ ID NO: 11488 - DNA, 446 bp, Homo sapiens
  MAP TO AC005695.1; EXPRESSED IN ADULT LIVER, SIGNAL = 0.82; EXPRESSED IN PLACENTA, SIGNAL = 0.71; EXPRESSED IN LUNG, SIGNAL = 1.1; EXPRESSED IN BRAIN, SIGNAL = 0.94; EXPRESSED IN BONE MARROW, SIGNAL = 0.96; EXPRESSED IN FETAL LIVER, SIGNAL = 1.2
ggaggcaaggcttcttggccctgttgttagcaggtgggggtctacgatcagcttgccaccacccacgcgctcctgtatgggccactctgtgcagtcacttcctggggctgggtctcctttcccttctccccaggctcaggcagggcggacctagccacagcagctgggagcccacccgtctgcctgtgcttccttgcagccgtccagatccacatcctgaaggcggacaaggcgggggactggtggaagttcacggtgaacatcatctccgtgtataagcagggcacgagccgcatccgccgcggtgaccagagcctgtggatccgctcgcgggacatcgcctgcaagtgtcccaaaatcaagcccctcaagaagtacctgctgctgggcaacgcggaggactctccggaccagagcggcatcgtggccgataaaagcagcctggt

SEQ ID NO: 11489 - DNA, 448 bp, Homo sapiens
  MAP TO AC003662.1; EXPRESSED IN ADULT LIVER, SIGNAL = 0.52; EXPRESSED IN LUNG, SIGNAL = 0.72; EXPRESSED IN FETAL LIVER, SIGNAL = 0.72; EXPRESSED IN BRAIN, SIGNAL = 0.62; EXPRESSED IN BONE MARROW, SIGNAL = 0.84
atgtgggcctggagaaccccagtgcagcccaggctccagggggtctggggttactcagggtggatctcaaactcacacacctccttcaaggtgcttctactgccgcccacccccaagaggagcagagggctatcgtgcacaccttaccgccccaacccgacctccatccctcaggccccccagcccgctggcctgagtctggaggagagggcagcccggcggccgccactgcccaggctgcggaggtggctgcccagctcaccccagccaatgcagatgaacatccatttgcgcagccggtcagtggagtaggtgagcacgatggctgtgtgcaggtagcagccctcgccgaacatccagaagaagttggtcacatggaagtagttgtaggcggctgtcaccaacctgcaccagccctgccaccccacccccaaccagagatgatgat

SEQ ID NO: 11490 - DNA, 476 bp, Homo sapiens
  MAP TO AC005552.1; EXPRESSED IN PLACENTA, SIGNAL = 0.8; EXPRESSED IN BRAIN, SIGNAL = 0.83; EXPRESSED IN BONE MARROW, SIGNAL = 0.81; EXPRESSED IN ADULT LIVER, SIGNAL = 0.99; EXPRESSED IN LUNG, SIGNAL = 0.77; EXPRESSED IN FETAL LIVER, SIGNAL = 0.98
acaatggctcttcttcggtgctctgtagaacttactggtgtttcatttctccccaaagttgctagttgcttaaactcagtgttaaccctacaaggacagtgcctctgcattctcttggccagcacaggaccacaaacacagcagatcgtcacaaatgcttattattgtacctcatatctgactcattcgttcactcaatctttctttaaataagcactaacaagtaccaggcattagagaggtgacttagagatgaggatgaggatgatgacaatgatgatgatagttatcttagtactggtagctataacaaaataccacggactgagtaccttatacacaacaggaatttatttgtcacaactgtgaaagctagaagttggagatcagggtaccagcatggtcaggttcttgtgagagccttcttctgggctgaagacttctgacttcttgtactgtcacatggcagaagaggg

SEQ ID NO: 11491 - DNA, 456 bp, Homo sapiens
  MAP TO AC005739.1; EXPRESSED IN PLACENTA, SIGNAL = 1.1; EXPRESSED IN BRAIN, SIGNAL = 1.1; EXPRESSED IN ADULT LIVER, SIGNAL = 1.4; EXPRESSED IN LUNG, SIGNAL = 1.3; EXPRESSED IN FETAL LIVER, SIGNAL = 1.3; EXPRESSED IN BONE MARROW, SIGNAL = 1.6
ccatttcaccataaatgcctgattgatttccagggcagtctttgaccctctctcctagtggcctcgctcttactgaagctatccccaccacagtagtaatcttgctgtttactgaaaactagtatcatgttcctaacttaggacatttctctagctatttcttttgcctgaattattttgcaccttagaagccatatggttaaatctctcacgtcttttaaatattttttcaaaatgttagtttgaagagcattggcttcaacttaaagtcttcttctccattagcccctaaccaggaagtcagccagtcctttgaagctttgaagccagacttttcatctacattgaaaatctattgttttagtgcagccaccttcatcaatgatcttagctagaccttctgatgctacagcttcaccgtcagcacttgttgcttcaaccttgcactttaatatt

SEQ ID NO: 11492 - DNA, 460 bp, Homo sapiens
  MAP TO AC004587.1; EXPRESSED IN PLACENTA, SIGNAL = 1.1; EXPRESSED IN LUNG, SIGNAL = 1.1; EXPRESSED IN FETAL LIVER, SIGNAL =   1; EXPRESSED IN BRAIN, SIGNAL = 1.2; EXPRESSED IN ADULT LIVER, SIGNAL = 0.87; EXPRESSED IN BONE MARROW, SIGNAL =   1
tgaacgggaagaaaatagggatgaggagaacagttaggaggctgctttttgaagaaaacatcttgattgagacatggttcacataccgtacagttcacccttcttcagacaaaggaggctgcttttttaaagacgaaagttccacttcaaacttcatggctgatagccacagaatgtgatatttttcccatgaagattggcaccttcttcccctgagggctctctaagcccactgcgtttctgactcctgttttttacacaggattggcagcagtagcactgattaatgctgcaatccagaagggtgttgctgagaagactgttttggaactgatgaatcccgaagcccagctgccccaggtgtatccatttgccgccgatctctatcagaaggagctggctaccctgcagcgacaaagtcctgaagtgagttcactaaacctgtcctgtttgtgagcaa

SEQ ID NO: 11493 - DNA, 466 bp, Homo sapiens
  MAP TO AC004417.1; EXPRESSED IN PLACENTA, SIGNAL = 0.7; EXPRESSED IN LUNG, SIGNAL = 0.63; EXPRESSED IN BONE MARROW, SIGNAL = 0.6; EXPRESSED IN ADULT LIVER, SIGNAL = 0.63; EXPRESSED IN BRAIN, SIGNAL = 0.64
cagtgctctttttgcttaacagaatgtcaagagtattgttccaggtcagtgcatagagagctttctcagtcctcattacaggggcatggtatccatcggaagacgtaccatagttaatttaactatttccttctaacagagattggtaaaccaagccttgaaaagatgatccctgccagccctgtacttactgtactatttcataaaaacatttgggcctctcactaaagctgatagggttcttgaaagtagaggctgtggttttatttatatttatatccatagcacctcagcaaaacctggagatacaagacaaagcaaaaacaagcatgatcccttccttcgtggcaggacttacaacatgcagggagaaatcattgtttttggaactcacatcaataaatacagaactatagttgttgataagttatataaaggaaagtacaggggattgtaagagcataga

SEQ ID NO: 11494 - DNA, 481 bp, Homo sapiens
  MAP TO AC004048.1; EXPRESSED IN LUNG, SIGNAL = 0.71; EXPRESSED IN BRAIN, SIGNAL = 0.89; EXPRESSED IN BONE MARROW, SIGNAL = 0.94; EXPRESSED IN PLACENTA, SIGNAL =   1; EXPRESSED IN FETAL LIVER, SIGNAL = 0.97; EXPRESSED IN ADULT LIVER, SIGNAL = 0.89
tcatttcagaatgaagattaaactggaaagaacaaaaaagcaacatataatgctttaggataaatataagatgggaaagagaaaattaggagaaataagtaaagagataaaaaattcaacagaataatatagatgcgatagataaagaagatccaacatacttataatagttttcaccaaataagaaacacaagcaatgaaacaagtcaaatactaaaaacaataatcaattttttttctaaaataatgagaacaaaaccaaaaagatttcaaactacctatatactttcttaggggaaaataaatccaggatggacaacaccatgacatattctagtaaaactactgaccttgaaaaaaacaacctttggccagtgggcaaaaacatcatgtcacttacaaagaacatttcaacagacacgttttatatcagaagacaattaagtaacatatttaggatacccaagagatgaaaatgtga

SEQ ID NO: 11495 - DNA, 469 bp, Homo sapiens
  MAP TO AC005683.2; EXPRESSED IN PLACENTA, SIGNAL = 0.71; EXPRESSED IN LUNG, SIGNAL = 0.61; EXPRESSED IN FETAL LIVER, SIGNAL = 0.68; EXPRESSED IN BONE MARROW, SIGNAL = 0.57; EXPRESSED IN ADULT LIVER, SIGNAL = 0.57; EXPRESSED IN BRAIN, SIGNAL = 2.9
accaatcccctgtggataccaagggacaactatactgcaatcaccttgaacgttctgaacttctctttcttacacagcaggctgtttaaattcagagaagtcgtgcaaaataattgccacctccctcccttgcaacctgagcaaggagaaatggccttggcttgcaccttggtaagtctgttttgctggggaaaagtaggaaatggcatcacttacggtcttctccagaatgtcccatgactacagctggctcgggggcaaaccccatgtcattcagggcctgaactttgatcaggtatggaacaaaggttggcgtgcctgagacaatatatttggatacatttgccacaaccacagatgtccattcatcatcaccatctttctggcgccagctaactttgtactgaaggcctggcccattagattcgaaaccattcaagggctacaaggaaagccaaataaccagagc

SEQ ID NO: 11496 - DNA, 487 bp, Homo sapiens
  MAP TO AC004112.1; EXPRESSED IN PLACENTA, SIGNAL = 0.85; EXPRESSED IN ADULT LIVER, SIGNAL = 0.85; EXPRESSED IN LUNG, SIGNAL = 0.72; EXPRESSED IN FETAL LIVER, SIGNAL = 0.78; EXPRESSED IN BRAIN, SIGNAL = 0.59; EXPRESSED IN BONE MARROW, SIGNAL = 0.82
tctgccaccatggagtgtcatggcagccagaactgcctccaaacttcatttacctgacagaaaaactgctctcttatttaaatcactactattttggattttctgtgactcatagaggaattaaccttgctaacaaaccagagatatgtgtatcccattttaataaaattatgtaggtgtgtatgctacatgtgtgcacgtgtgagtatgtgtgtgtgttgactctagccactcagcatccattctccccttttaatatcattctaatttctttgtagggaattgcctctctcccactgtgtgatgtcattgtgggatggtcaatacacatgcctatcctctctccaggtaattcaagggggtttctggaggtccctttcatcaggtcattcttctcactgccctgtttcagtgggaggtaagttagaatttcttagaccttggtccttaatactctccatttctcagctgtgttccctcacaaagg

SEQ ID NO: 11497 - DNA, 467 bp, Homo sapiens
  MAP TO AC004451.1; EXPRESSED IN BRAIN, SIGNAL = 0.6; EXPRESSED IN BONE MARROW, SIGNAL = 0.59; EXPRESSED IN PLACENTA, SIGNAL = 0.7; EXPRESSED IN LUNG, SIGNAL = 0.71; EXPRESSED IN FETAL LIVER, SIGNAL = 0.77; EXPRESSED IN ADULT LIVER, SIGNAL = 0.75
tgtcacattttctctttcccttgaacttttatatggtgggaaagaattccctaagagttcagtagaaacattacaatactaaacatccatccatgaatacctattatacataggaagtgaggtcaaggtaataacagttacaaactaagcaatagcagcatctgacctttggaaatatgagcttatatcagaaggattgcttgaaagccacatatctcctctacccgttgacccccaaaaagaaacaccctaagtcaatgaaatgctggatgtgaatccatatgatgaagaaaggggaaccagtaatgtgctgaccctgtgtgaggcagtgttgctagaagaaaggggagaacgagtctttgaacacgaagacaatgacctgaatctcagagctttaaatgagacattgttcggtcttgtcttagatatgtcacatgagtatttgcaataacatttgacttgtcaca

SEQ ID NO: 11498 - DNA, 468 bp, Homo sapiens
  MAP TO AC004499.1; EXPRESSED IN PLACENTA, SIGNAL = 0.83; EXPRESSED IN LUNG, SIGNAL = 0.83; EXPRESSED IN FETAL LIVER, SIGNAL = 0.72; EXPRESSED IN BRAIN, SIGNAL = 0.66; EXPRESSED IN ADULT LIVER, SIGNAL = 0.8; EXPRESSED IN BONE MARROW, SIGNAL = 0.81
tttctggcggtttgattttctttgaacagaagtcagtgttgtgttttctgcatggcatgcatatgtgctacctctggggtaagatgatgcctaccaaagtggcagaccacgaggaatggatacaagtggagagacactggagctggctcgaactgggtgctttatccttgtgtctgtcatgtactgctgagctgtgggaaagctgagattaattacaggaaatggaggtacatcaaaggcaaggaacaggcagctcagagctcctggctgaggagaccaagttgagacacaaatggggatcatgtagaagccaaccatggcagtggtcaaaatggaatgaactgaagccagttggaagaaggtgagcaagttggagtctaacgtgtcaaagagtggccacctgtcaaggaattcaggggctgcattcccaccctggagggaaaaagaaggtcaggaaagcaatgcaat

SEQ ID NO: 11499 - DNA, 464 bp, Homo sapiens
  MAP TO AC004127.1; EXPRESSED IN LUNG, SIGNAL =   1; EXPRESSED IN FETAL LIVER, SIGNAL = 1.4; EXPRESSED IN BRAIN, SIGNAL = 0.95; EXPRESSED IN PLACENTA, SIGNAL = 1.2; EXPRESSED IN BONE MARROW, SIGNAL = 1.1; EXPRESSED IN ADULT LIVER, SIGNAL = 1.4
aggaggtagaggctgcagtgagccatgattgagctactgaattccagcctgggtgacaaagggaaaaaaaagagtttggctgttgatatgaagtgctttcctttattgtgagagcttgaggaagtcacacctgaagggtctggcattgtcatcagcacaacaaatgtatgtgaacatacaacccaggggatcctgtctggtctaacgtcagggagccaaagagaaaaatcgactttcctaacatcaactatatttttattcttttgctgcagccaatgccgagttctgcccagctcttgtttctgagctgttagacttcttcttcattagtgaacctctgttcaagttaagtcttgccaaatttgatgcccctccggaagctgttgcagccaagttaggagtgaagagatgcacggatcagatgtcccttcagaaacgaagcctcattgcggaagtcctggtaa

SEQ ID NO: 11500 - DNA, 468 bp, Homo sapiens
  MAP TO AC005697.1; EXPRESSED IN LUNG, SIGNAL = 0.5; EXPRESSED IN BRAIN, SIGNAL = 0.65; EXPRESSED IN BONE MARROW, SIGNAL = 0.55; EXPRESSED IN ADULT LIVER, SIGNAL = 0.44; EXPRESSED IN FETAL LIVER, SIGNAL = 1.7
tgtctttgactgcggttttgcagaagcaaaaatggtttaggtctcaccatgaaatcatgaaagctcgaatcagtgacgtttcttctcgggagagcagtcaatttataattaagctcccgcgtccacgcctgatcccatgtcacttttatttttgactttggttcagggatgagaggtggttgctcacaatgacttgagtttcagaaagatggatttgagagtcacggctgatacaggtaacacaaacaagccagcttgagtcagccaccagaaaacccccatgccttctatttccactagttgctcaatactgtatttacctctatgtgctgctctcaagagagaaagtaaaaaaaccagggtgatcttggctagagttgccacaaggactagcactgacttcatggcctgaagaggagcttcagctgttggaaattctcagtgtgcacattttggcaatttccacct

SEQ ID NO: 11501 - DNA, 499 bp, Homo sapiens
  MAP TO AC004073.1; EXPRESSED IN ADULT LIVER, SIGNAL =   1; EXPRESSED IN PLACENTA, SIGNAL = 0.59; EXPRESSED IN LUNG, SIGNAL = 0.89; EXPRESSED IN BRAIN, SIGNAL = 0.88; EXPRESSED IN BONE MARROW, SIGNAL = 0.78; EXPRESSED IN FETAL LIVER, SIGNAL = 0.82
tgacacagacaattaaaagtgcatacacatacacatttatccacatggatatactttctccttctctcacacacgtacacccacacaagcaaatgtatatgtatctctgtaagtgtgtgcatgcatatgtgtgtacatctatagcctcatagctgtacaggtgagcataccatacccttcagtttctgcctagataatccagttttccgggggtctgacaaaggccctgtttgtaaattcctccacttgatactgataatgtcccttttgcccttgctgaggcttcttctctgtctccaccttgtttgcagagtagcacagctgctgcaaaaattcaagctgcagtatgtgacatacacatgtctggagaacatggatccttgtccagttgctctttgaatagcactacgactctagcctgcacagcatatttatagccatgtttgcaaagagctgacagcattttcagacttttttcaaaacgtagttaatccagcca

SEQ ID NO: 11502 - DNA, 474 bp, Homo sapiens
  MAP TO AC006065.3; EXPRESSED IN PLACENTA, SIGNAL = 0.64; EXPRESSED IN FETAL LIVER, SIGNAL = 0.68; EXPRESSED IN BRAIN, SIGNAL = 0.73; EXPRESSED IN BONE MARROW, SIGNAL = 0.6; EXPRESSED IN LUNG, SIGNAL = 0.54; EXPRESSED IN ADULT LIVER, SIGNAL = 0.47
tgctgtttaaaagagactggattccttttgaactatagattgaaaccaatggatcttgaaccatttttcatgagataaaaatgagacagaaattccataattcttactaatagagcttttatttattagtcaattacttggaggtggtcctggtgatatatgccagttcacgtctctcctctttatggaaagggtcttatcactgcttcttccataataacagtcccccagttttattcacaaaccaaccaaacagacctgtgcccttgagaggagatgactgagaagctgaaaaggtgagtcatgcctgttctagccagttttggcccttgtacctgtgcttggtcttggaatgagcctttcagccagtttgcacctatgagtccgatgggaggtttgctggggcttctaggaaaggtggattcttcataacagaacattgtcagaaatgtttccttttctgcctgctctgtc

SEQ ID NO: 11503 - DNA, 488 bp, Homo sapiens
  MAP TO AC004081.1; EXPRESSED IN PLACENTA, SIGNAL = 0.99; EXPRESSED IN BONE MARROW, SIGNAL = 0.76; EXPRESSED IN ADULT LIVER, SIGNAL = 0.85; EXPRESSED IN LUNG, SIGNAL = 0.7; EXPRESSED IN FETAL LIVER, SIGNAL = 0.83; EXPRESSED IN BRAIN, SIGNAL = 0.72
tggcctataaatgctaggggaacttctttgtaaagtagtctttacaggtattaaacttcatcttgcacaccgaagtcatcatacatacagggcaaagtcagagcttttacatttgcatttattcttcatttaactttttaaaacactactatagttgaatattaaacaaaaacaagagcaagtagtgagcatgttatgatcacagtccttcactcatttactactgcacataaaatgccaccagtgggtgttattcactggcccattaagaggtctgacaccgaacaccacctctgggatgatgttcatcatcctcatatgcttctccattgtaatggtgccatctttcctgatttggatcaaagtccaccagttctacttgatccatctcatcagtttcttccacttccttcctcttgggtaggagtttttccagcaaagacagtttatcaggagagagaaagtcattctcaggcaagtttaccttg

SEQ ID NO: 11504 - DNA, 470 bp, Homo sapiens
  MAP TO AC005726.1; EXPRESSED IN ADULT LIVER, SIGNAL = 0.51; EXPRESSED IN LUNG, SIGNAL = 0.56; EXPRESSED IN BRAIN, SIGNAL = 0.62; EXPRESSED IN BONE MARROW, SIGNAL = 0.58
ggtacattgcagaacggttgcccatcaaccggcgggacctggaccccaatgctgggcgctttgtccgctaccagttcacgcctgccttcctccgcctgaggcaggtgggagccacgtgagtcgctgggctatgggtggtggtgggggtgagggagagggtgtgagtgggcccttctcagcctctcgtaggggtggcctgtcctgagcctggctggctagttgacttcaaggacagacttagccctgcctccttttcttgctcagggtggagttcacagtgggagacaagcctgtcaacaacttccgcatgatcgagaggcactacttccgcaaccagctactcaaaagcttcgacttccactttggcttctgcatccccagcagcaagaacacctgcgagcacatttacgacttcccccctctctccgaggagctgagtgcgcgggcagggtcttctgggagtggggaag

SEQ ID NO: 11505 - DNA, 483 bp, Homo sapiens
  MAP TO AC004580.2; EXPRESSED IN LUNG, SIGNAL = 1.2; EXPRESSED IN FETAL LIVER, SIGNAL = 1.3; EXPRESSED IN BONE MARROW, SIGNAL =   1; EXPRESSED IN PLACENTA, SIGNAL = 1.2; EXPRESSED IN BRAIN, SIGNAL = 1.1; EXPRESSED IN ADULT LIVER, SIGNAL = 1.2
ctggaaaacagggcaatctgttgctataggaggggccgccggacaggagctgcaggccaagaaggagaagcgcaagccaggaatgaggccttcctcgcagccctccacagggaccaaccttgccgtcacctcgacttggggcttctggcttccaaaactgcaggaaaataaattcctgttgttcaagaccccgggtctgtggtgctttgtgtggcagctgcaggaaactgacatgaaggaacttgacaggagcagcacagtcagcaagggtgagctgggacgaagccaggcccttctcccttcaggacctgcagccaggcctggtcaccaaccgtgctgctgccccagccgaggagtgcggggatgtccgggctgagccagcaatgcctgaaccctacatggtaatagatggctgtacacgacactatgaggtggctgctgccaccacagcccatgttgagggcctgatagactcccagccaa

SEQ ID NO: 11506 - DNA, 473 bp, Homo sapiens
  MAP TO AC006075.1; EXPRESSED IN PLACENTA, SIGNAL = 1.4; EXPRESSED IN LUNG, SIGNAL = 0.88; EXPRESSED IN FETAL LIVER, SIGNAL = 2.8; EXPRESSED IN BONE MARROW, SIGNAL = 1.6; EXPRESSED IN ADULT LIVER, SIGNAL = 1.5; EXPRESSED IN BRAIN, SIGNAL = 1.1
agactggaacatccacggactccagccttcctttagaagggcgtaattcgtcctcacagactcctcactcatttgtaaacctctctgaatcccaaacttgtgtgcgtgtctgcatttagccattgaaaatataatcaggctaatgcattctcttactgaattttaaaccagcccattaaaactcctttaacgtgctaaagtcggcttcagagagggtttccatttcatctttattgagctgaggctatggttcattctccctttgcaccacagtgagcgcctgtcaataattcaatagcgtagccttgatgggcccaggcccaacctagactttcaaccacgccaagcagcttgtcaaagcctgatgctctgtcaatggctgagtgatctatactgcatgaatcccccccttcagctcttgatgtgtccctgggaataaaaagaaagccatttcagaagtcagcccagtgaga

SEQ ID NO: 11507 - DNA, 452 bp, Homo sapiens
  MAP TO AC004029.1; EXPRESSED IN LUNG, SIGNAL = 1.1; EXPRESSED IN FETAL LIVER, SIGNAL = 1.1; EXPRESSED IN BRAIN, SIGNAL = 0.8; EXPRESSED IN BONE MARROW, SIGNAL = 1.4; EXPRESSED IN PLACENTA, SIGNAL = 1.2; EXPRESSED IN ADULT LIVER, SIGNAL = 0.79
gtttctgcaccatttgttggtaaaattcttctttcttcactgaatcccctttgcacctttgtataaatttacttgcttatatatttggaagctatatctggacccttcttctgttgatctgtttgtctatcttgatgtcgatgttacactgtgttaattactgtatttttgtaatgtcttgaaatgacatagtatatttttccaactttatctttttctaagttattttgtatattccaaatcattggcatttctataccaatttcagaatcagcttcttaatatctaccaagaaaaacctgaacaagacaaaaaacaaatcctgctggatctttgattgtgattgcattcttactgtgggagatgagcccgtgattttgaagtttttcttcttttctcactaaatatctcactagatatttaatgttgtgcattttcttttaatttctact

SEQ ID NO: 11508 - DNA, 473 bp, Homo sapiens
  MAP TO AC005961.1; EXPRESSED IN BRAIN, SIGNAL = 0.59; EXPRESSED IN BONE MARROW, SIGNAL = 0.53; EXPRESSED IN LUNG, SIGNAL = 0.5; EXPRESSED IN ADULT LIVER, SIGNAL = 0.44
ttccatttagaatagaaaagctggtataaaactcttaagaacttaagcagtgaagtggaaaaactatgcttcacaacaaaagaacaattaaaaatgtatctcatttgaaatacgtgctggggacaaatttgaaagaacttaaaaaatgttgtgttgcaataatacttggctgatttctgttttttgatgctgactactggttcttttaatgaattattcttattatgaagatcaaatatgacttcctatatgaaaaggaacacatctgctgcttagaagagtggaccagccctgtgcaccagaagatctacaccaccttcatccttgtcatcctcttcctcctgcctcttatggtgatgcttattctgtacagtaaaattggttatgaactttggataaagaaaagagttggggatggttcagtgcttcgaactattcatggaaaagaaatgtccaaaatagccaggtctgtt

SEQ ID NO: 11509 - DNA, 475 bp, Homo sapiens
  MAP TO AC004583.1; EXPRESSED IN FETAL LIVER, SIGNAL = 0.76; EXPRESSED IN BRAIN, SIGNAL = 0.94; EXPRESSED IN BONE MARROW, SIGNAL = 0.81; EXPRESSED IN ADULT LIVER, SIGNAL = 0.84; EXPRESSED IN PLACENTA, SIGNAL = 0.7; EXPRESSED IN LUNG, SIGNAL = 0.81
gtattatgatctttgtagactgtgggtcctaacgaattgtagctgacaaaatacagcagttttaataacacacccaaagcaaatgaattgtgcttaatattaaagcaaagcagattatcctcaagaagttaatgttaaaagctgtctgacctgaatggcctaggaaatatctttcttgcagcggaagtcataggcttgaagctgcatctgcatccctcttcccttgtagggaagaaggtgattgatgtggctgcaggctccacccactgcctggctctgactgaggacagcgaggtccacagctgggggagcaacgaccagtgccagcactttgacaccttgcgcgtgaccaagccagaacctgcagcattgccaggactggacaccaaacacatagtgggaattgcctgtgggcctgcccaggtactgaatatagagcttgatttggtattttggaggattttggtttccagtt

SEQ ID NO: 11510 - DNA, 483 bp, Homo sapiens
  MAP TO AC006079.1; EXPRESSED IN PLACENTA, SIGNAL = 0.72; EXPRESSED IN LUNG, SIGNAL = 0.83; EXPRESSED IN FETAL LIVER, SIGNAL = 0.79; EXPRESSED IN ADULT LIVER, SIGNAL = 0.8; EXPRESSED IN BRAIN, SIGNAL = 0.78; EXPRESSED IN BONE MARROW, SIGNAL = 0.78
cccaatctttgtcgagcatcggtgtgtactcagagcctagcatagtgccaggcacacagcagtttttcagttattaactgaatgctcgagtctgaggcacactgctggaggctgggcatgcaggagtgaatcaggcaggcttcaggctattcttaacagtgcttcagtgcatagaggatataacagacattagaaggatggctacatatatactaggtgctgaaaacgtggatcttcaaagttgccttagtttatttaggcttctatacaaaattcagtagatcaggaagtttacaaacaacagatttctcacaattctggaagctgggaagtccaaggtcaagatgctggcagattcggtgcgcagtgagggcccattcatcatagacagtcatcttttcactgcaacctcacatggtggaagggcacgaatcttttataagggcactaatctcattcataagggcttcattcctatgacct

SEQ ID NO: 11511 - DNA, 497 bp, Homo sapiens
  MAP TO AC004142.1; EXPRESSED IN LUNG, SIGNAL = 0.71; EXPRESSED IN BONE MARROW, SIGNAL = 0.53; EXPRESSED IN PLACENTA, SIGNAL = 0.66; EXPRESSED IN BRAIN, SIGNAL = 0.57; EXPRESSED IN ADULT LIVER, SIGNAL = 0.63
ttggagttccttatacttatatcatggtgtagtatttttattttaaatatttggccttgacattaaataatatatgggaatatgagctctcataatctcataatcttttcagggcataaaataatctgatcaaggctgatgagggttataaaaatatattgttatattctgtctttgatggcttctgggtgagtctgagagaaaattctctcttccacttgggtacatagttgatcacccaaactctaagtgatacctgatgagtaaaggtgtcaaccataaggttgctctgtgccagtgcgacttctgtttgctctcattacctttcgccagattctgcctgataaccacagatttccatgtggctccctcctactcctgctcctgcttgtcaacaagctctctcacctgcgtctactacatagttcctggctgtagaaatggaaccaagtagctttcttttgtagaataaatggacttatccttaaccagcaatg

SEQ ID NO: 11512 - DNA, 447 bp, Homo sapiens
  MAP TO AC004045.1; EXPRESSED IN FETAL LIVER, SIGNAL = 0.83; EXPRESSED IN BRAIN, SIGNAL = 0.69; EXPRESSED IN BONE MARROW, SIGNAL = 0.84; EXPRESSED IN ADULT LIVER, SIGNAL = 0.6; EXPRESSED IN PLACENTA, SIGNAL = 0.82; EXPRESSED IN LUNG, SIGNAL = 0.53
ttggaagttatccagccagcattaatctggtttttgcaatatggcttaataagaccttgtcagtcctcatacgatactcctttcctgccattaaagaagcctcattcccataagtataggtttgtgcaagatcacagagctattaatgatactgtggaagacattcaccccatcgtggctaacccatacactatgtttgcttcactacctaaggatcacgaatggtttacagtgctagacttaaaggatgccttcttttgcataccagtagaaatagaaagccaactattgtttgctttcgagtggacagaccctgagacagctgcacagtttcaatattgctggactgtgctccctcaagggtttaaaaactccccaagtatatttggagaggctttgattcaagacttgagaggcttacaattagaaaatggggtgctacttcaa

SEQ ID NO: 11513 - DNA, 449 bp, Homo sapiens
  MAP TO AC004485.1; EXPRESSED IN PLACENTA, SIGNAL = 1.2; EXPRESSED IN FETAL LIVER, SIGNAL = 1.1; EXPRESSED IN BRAIN, SIGNAL = 1.1; EXPRESSED IN BONE MARROW, SIGNAL = 1.1; EXPRESSED IN LUNG, SIGNAL = 1.2; EXPRESSED IN ADULT LIVER, SIGNAL = 0.97
aataacattcattctaaagtaagcccatgcaagtaggtacttgaaggaggaagtttaataaatttcagctaaattaattaacatgccccatgttgtatgaaaagataatcatcccactcattgtatttctcactcaaattctaacagtagtgaccaaaatagatgtatagacctcaacggtctgatatggtagccactagagacttaatggccatttaagttaaaattcattaaaattaaataaaatttaaaactcatctctttatttgcacttactacattcaggggctcaaaaaccacatgtggctagtggctgccatattagacagagggataaaggacattccacagaaagctctagttagtcaggaagttcttctgctgacagcactggttaacaaggttagcaaaagggttccaatgttaatggggggaaagctcagaaaaat

SEQ ID NO: 11514 - DNA, 446 bp, Homo sapiens
  MAP TO AC005988.1; EXPRESSED IN PLACENTA, SIGNAL =   1; EXPRESSED IN LUNG, SIGNAL = 1.1; EXPRESSED IN FETAL LIVER, SIGNAL =   1; EXPRESSED IN ADULT LIVER, SIGNAL = 0.94; EXPRESSED IN BRAIN, SIGNAL = 1.9; EXPRESSED IN BONE MARROW, SIGNAL = 0.93
cctagggtatggagtccacgtgggaatgactgcaagttcaggtggaacttggccgactgatgctctgcgagtttttaatagacactggggacaactgcttaaggtttagaaacttccaaaccacaggaaagacatttttagtgtcccccatccagaggcagccctggaataggattcccaggggtttctgggacccctttccttgctccgtgaggctctgtggccatcttttggcaggaggaggatgcttccttggctctgtgcccagacccgcctggtccccaggtctctcaccttgggtgaagattcagagatgccctgtaaggattttgcccactgggcaactcagaaatacttcgatctcccaagatataagaggcagcagcaaacgtgcctattgacgtctgtttcatagttaccacttacgcgagtagacagaactcggc

SEQ ID NO: 11515 - DNA, 492 bp, Homo sapiens
  MAP TO AC004590.1; EXPRESSED IN PLACENTA, SIGNAL = 0.63; EXPRESSED IN LUNG, SIGNAL = 0.52; EXPRESSED IN ADULT LIVER, SIGNAL = 0.52; EXPRESSED IN BRAIN, SIGNAL = 0.55; EXPRESSED IN BONE MARROW, SIGNAL = 0.65
attagggcatcttgtgggtcaagactgcccaccttgcctgacattcagcacccctggcccactaagtgcctagcaccccatcactgtaacaaccccagactccctgactcattttacacatactcacagggcggggtagccccaggtacgagactctggagcctctcacctctactctcctgttccaggtgcctgccaaagctcttgcaagatctccagcccttgcttgaaagcagacagtggagcctgtggtccagacagctgcccctactgtgcccgggccggggcaggggaggtggagctcgccgaccgtgaaatgcctgactcagacagcgaggcagtttatgagttcacacaggatgcccagcacagcgacctccgggacccccacagccggcggcaacggagcctgggcccagatgcagagcccagctctgtgctggccttctggaggctaatctgtgacaccttccgaaagattgtggacagcaa

SEQ ID NO: 11516 - DNA, 394 bp, Homo sapiens
  MAP TO AC005886.1; EXPRESSED IN LUNG, SIGNAL =   1; EXPRESSED IN FETAL LIVER, SIGNAL = 0.95; EXPRESSED IN BONE MARROW, SIGNAL = 1.1; EXPRESSED IN PLACENTA, SIGNAL = 1.1; EXPRESSED IN BRAIN, SIGNAL = 0.9; EXPRESSED IN ADULT LIVER, SIGNAL = 0.83
aaaactattataagaaaaatgtgctccttttaaaaaactacatatagatctaatactgtacacagttcatcacactgaatagccgtgctaactagatttttttcctttttggtcatctgtagtcccagcatgaaatttacctgtttcaaagtctcagatgtgggaatgaataattgatatatctggaaccttctatgaatatatcagatggcctttacttttgcaaatagcatcagatggagggaaaaattaattaccttaccttgagagctgtgatcacccaaccacccagacagaaccttctcctttaagcacttcatttttagctctttgaaagtcataattaccatcatcactaccatcatcatcattatcgtcatcaacaccatcatca

SEQ ID NO: 11517 - DNA, 449 bp, Homo sapiens
  MAP TO AC004492.1; EXPRESSED IN PLACENTA, SIGNAL = 1.1; EXPRESSED IN LUNG, SIGNAL = 1.1; EXPRESSED IN FETAL LIVER, SIGNAL = 1.2; EXPRESSED IN BONE MARROW, SIGNAL = 1.1; EXPRESSED IN ADULT LIVER, SIGNAL = 1.2; EXPRESSED IN BRAIN, SIGNAL =   1
gcttttgtattatctgcagaggttttttaaaaaaattaatttcagttagcacatatacagatttcattttataagcaactatcagtggcaaaagttgttagtgttggtaacatgatatagggggaaatgcactgaaatttccaatcagatgttttcttttttttttttttaacctgctttttagaaatcagagaattcaaaattgaattaaaatattattattttttttaattttatagctatgacttcacacctatggattcttctgcagtttatgtgttaagtagtatggctcgccagcgtcgtgcatctttgtcttgtggaggacctggtggtcaagactttgcaagatctggattcagtaaaaactgtggctcacctggatcatcacagctctcttccaattctttgtatgctaaagctgtcaaaaaccacagctcagggactgt

SEQ ID NO: 11518 - DNA, 462 bp, Homo sapiens
  MAP TO AC004594.1; EXPRESSED IN PLACENTA, SIGNAL = 0.67; EXPRESSED IN FETAL LIVER, SIGNAL = 0.95; EXPRESSED IN BRAIN, SIGNAL = 0.97; EXPRESSED IN BONE MARROW, SIGNAL = 0.93; EXPRESSED IN ADULT LIVER, SIGNAL = 0.89; EXPRESSED IN LUNG, SIGNAL = 0.72
ctctgtcatggactgtttccctaggttattttttatttctgaggtaatatgggagcttaaccctttttgttattgtttttcttcaaatctttgattgtggatttgatcctttaaactaaatattctttaaaacatttaactgctaatatcaaagccattcttttccatgaggtcagttagtgaatgagacgaaaatctgccaatcctataaatttttaatgatgtctttttgtttcctccacaggccttcagggtggttgtatgttctttaatgctgttaaagaaggagatactgtaatctttgccagtgatgatgaacaggacagaatattatgggttcaagccatgtatagggccacaggtcaatcatataaaccagttcctgcaattcaaacccagaaactgaatcctaaaggaggaactctccatgcagatgctcagctttgtaagttttgttaaaaa

SEQ ID NO: 11519 - DNA, 385 bp, Homo sapiens
  MAP TO AC004054.1; EXPRESSED IN PLACENTA, SIGNAL = 1.6; EXPRESSED IN LUNG, SIGNAL =   1; EXPRESSED IN FETAL LIVER, SIGNAL =   1; EXPRESSED IN ADULT LIVER, SIGNAL = 0.71; EXPRESSED IN BRAIN, SIGNAL = 0.82; EXPRESSED IN BONE MARROW, SIGNAL = 1.4
tcctctccatttgtagcttcctttctgtataaacagatttcttccctatagtggtgcttgccagctttcctttatgttttaattccagttgcatgattttagtatttgacattttagttcctagtgaatttgtcatttaaggtctctttccattttctcagatattttccatccagaaaaatctatttttatttaggaacacataaagttggttcacattgatggaagagctagatgaagtgaaacatagataaatctttagatatttttcatgttgtaggagagcaagatgataagaatatggtcatcagtatgactggggaaaaaaggcacttcataaggaagatctcagaaccttttacagctttgtgagaatgactgcttt

SEQ ID NO: 11520 - DNA, 469 bp, Homo sapiens
  MAP TO AC004168.2; EXPRESSED IN PLACENTA, SIGNAL = 0.58; EXPRESSED IN LUNG, SIGNAL = 0.69; EXPRESSED IN BONE MARROW, SIGNAL = 0.6; EXPRESSED IN ADULT LIVER, SIGNAL = 0.64; EXPRESSED IN BRAIN, SIGNAL = 0.56
caatcctcgtgaccttgtcctaaacactattgaaattctgccatatgggaaatcaaggccttttcttggtcttcatttctctctacttctctacaattctgaacattactagccacccctcctttgcaaaaattccctccctcagaattcaaatcactgcattatcctaatttccttcatacctttctgccatatccttccatttatcctaaactagccctcttttcatccattaaaatgcagtatttccctacaccactatcctaggccctcttttctttcctttctatactctccattgttatcttatccactagcatagcttctactatcttctccgtgcaaatgaatcacaaaattgattatcatagccgcaaaattgattatcacagttttatagataagaaaaccaaggcttgagaaggtcacaagaacttggaagtggcagagccacttcttgaatcttggc

SEQ ID NO: 11521 - DNA, 448 bp, Homo sapiens
  MAP TO AC004601.1; EXPRESSED IN LUNG, SIGNAL = 0.89; EXPRESSED IN ADULT LIVER, SIGNAL = 0.7; EXPRESSED IN PLACENTA, SIGNAL = 0.87; EXPRESSED IN FETAL LIVER, SIGNAL = 0.93; EXPRESSED IN BRAIN, SIGNAL = 0.68; EXPRESSED IN BONE MARROW, SIGNAL = 0.84
aaggctggattcaagctgacccacccacactgcggcctgggccccaggacagccaatagcaccaggggccaaagtggtcaagtgggttttgggagagaagctgtaaccattgagcagacagtccactcataagaacaaacggcaaataatgcagtgcagcaggtagaatccagctgcctcagacaaactcaggaacagaaagcttatgtgcccatccctagcttcctggtgcctgggaaaggagagaactcagccagagccatttcctccaggattctcactcctcggcttcctcacctgcttgtgcagccagcccctcaccaccacgggaacattggggttcctccgaatggcctggtctctcttcccaaagctgtggactttactgctggactttatgatctatgaaaaagcagactgaactttagcaacagggaatttaaggtga

SEQ ID NO: 11522 - DNA, 401 bp, Homo sapiens
  MAP TO AC004063.1; EXPRESSED IN PLACENTA, SIGNAL = 0.65; EXPRESSED IN LUNG, SIGNAL = 0.45; EXPRESSED IN BONE MARROW, SIGNAL = 0.83; EXPRESSED IN ADULT LIVER, SIGNAL = 0.42; EXPRESSED IN BRAIN, SIGNAL = 0.61
tagtccagcagtaccaggggagatgtactggcccaaagactctaatcctctagactacctgtagagcaagatatctttccatttatatcatctccatatggtaactagtactctatgatgcataggtaaaatccgaggttccctagctttggaatattagatactattaaaagagatgagattgggaacattaatgtcacaaactagtttgctcaggagttgggcagacctgctctctaacctaagctgtaccacctgctgagttagtcttctacctcttgatgcctcatcttcctcaatgagattcatcagttgaaaatgatcacttctaacttgaaattctataatgttgaaagtcgttattttcctgaactttctgtagaagttgcaatggaagcctg

SEQ ID NO: 11523 - DNA, 476 bp, Homo sapiens
  MAP TO AC005919.1; EXPRESSED IN PLACENTA, SIGNAL = 0.89; EXPRESSED IN FETAL LIVER, SIGNAL =   1; EXPRESSED IN BRAIN, SIGNAL = 1.5; EXPRESSED IN BONE MARROW, SIGNAL = 0.81; EXPRESSED IN ADULT LIVER, SIGNAL = 0.79; EXPRESSED IN LUNG, SIGNAL = 0.77
aggtgactttggctgtttggttcctaattttggaagactagaaatggttctttcatatattctttgcagtgcataccttattgtatgggctcagtgagtacaccatgatgatgatggggtttttggatttaatttctctgactacatcaacaatggcataagtggctctgtatttctggccccttgtcattaactaaatggatttaggtacctgatttcttctttttctaggaggtggcgataagttgctatttcttgttccagcctcatcttcgtgttgagaagcatctcgtgctcttgaagctgcttttcgatgccgcgccttacttcctgtagctctttttctagtccttcaatcacagtctctaggtcttgcagctgcatctggtaatgctgctcgctggcatgtagggagttttcaaggcccctttcctgttttatatagattttcatcagtgaatcagtaacacagaatg

SEQ ID NO: 11524 - DNA, 407 bp, Homo sapiens
  MAP TO AC005879.2; EXPRESSED IN LUNG, SIGNAL = 0.77; EXPRESSED IN ADULT LIVER, SIGNAL = 0.75; EXPRESSED IN PLACENTA, SIGNAL = 0.71; EXPRESSED IN FETAL LIVER, SIGNAL = 0.8; EXPRESSED IN BRAIN, SIGNAL = 0.94; EXPRESSED IN BONE MARROW, SIGNAL = 0.64
gtcccctaccacctccaaactgttttacttactataacttgcagtagacttaatattcagtataacaaatcttttcttcttattattcccactctcccgccctcttacacttctaggagtttcttcattattcttggatctttactttttgaatgaacttggagtgattgccctagtggactgagatatcccattggagttttgatgaagatcagaaattgttatctttataatattgagtctatgaatctgttaacatggatttcacttgatcacagcttttctataatcttcagtggtgcctccccttttctccgtgaccttattatacatctttgtttcatttattcccaggttccttatagattttactgtcattgtaaatgccatgattttgttctttttca

SEQ ID NO: 11525 - DNA, 409 bp, Homo sapiens
  MAP TO AC006239.5; EXPRESSED IN LUNG, SIGNAL = 0.66; EXPRESSED IN BRAIN, SIGNAL = 0.58; EXPRESSED IN BONE MARROW, SIGNAL = 0.68; EXPRESSED IN ADULT LIVER, SIGNAL = 0.66
gccttgaatgcaactcattatcacagtatgtttttaagcaggttgagagatgccacctggcgtggggaagggcacatgggaagagggaaggaaagaagtagagaaaatagagattttgtgggatttaaaaataaatgctatgatcattatagttgtagtttgctagtgtaaactagtgttgttcctgttgttattattttaggctcctcttaagctttcctggaactctatagccataaaaaagcaaaggaggctttttctgctcctcctcctcttcctctttcttccacttctttctctgcctctatatcctctttaaccttagccttgccttcctttttttcacttacctggtcattaaaattataaatatgtatatattatatttcccctacgtggaagacttagc

SEQ ID NO: 11526 - DNA, 472 bp, Homo sapiens
  MAP TO AC006518.17; EXPRESSED IN BRAIN, SIGNAL = 0.66; EXPRESSED IN PLACENTA, SIGNAL = 0.74; EXPRESSED IN LUNG, SIGNAL = 0.75; EXPRESSED IN BONE MARROW, SIGNAL = 0.82; EXPRESSED IN ADULT LIVER, SIGNAL = 0.56
tgcaacgacaaagaatatacggtgcaatgataacattagattatccattaaacaagacaaaagtgtgaaggaacacaaaacaaatcttcagaatcatgacagatattaatgacttccaatagcatataagagaaaatgaatgcaaacaagagaagggagaatgccttttgttgatttctttcatccttgtagtcaggatactctttaggggtctctatggaacaaaaggctttcttcttctaaggaaacacttcacaaatcttaacatcttcagaaaagcttccctcaacttgctatttcccataattagaatgaatgaatggcttgatgggaaaatgacagttactatgtcaccaatcatcaacactaattttccctgaggaatcagagcgctagaggtcataacaagaaagactgggtagtacacgatgaggaggagcagaaagatgatcactgcctttatggccctcat

SEQ ID NO: 11527 - DNA, 436 bp, Homo sapiens
  MAP TO AC004383.1; EXPRESSED IN LUNG, SIGNAL = 0.71; EXPRESSED IN BRAIN, SIGNAL = 0.71; EXPRESSED IN BONE MARROW, SIGNAL = 0.62; EXPRESSED IN ADULT LIVER, SIGNAL = 0.64
ttgggcaaaatgaggaattgccttatgataactgtcatcctaaaccagagattttgtttcagatgaacttttattatctcaataatagtgtgttttcctatctgttagataaaaatgggtctgtaactaattggggagtattttttaaagtgtggatgaggaaacccatgttttaaatgggcactagcctcatccactaatgttggcaggaatgttcatcagcagtgacaaagcattttgagatttttgtctttcatcattgtagactatactgtaaaaatcatagtggaaatgatgagagagatgaagaagatgaggaacgagagagtaaaagccgaggaaaagtagaaattgatcagcaacaactaactcagcagcaacttaatggaaactaggtatgaaagttaattatatgggatctgttgtcaggatacaa

SEQ ID NO: 11528 - DNA, 470 bp, Homo sapiens
  MAP TO AC004888.1; EXPRESSED IN LUNG, SIGNAL = 0.65; EXPRESSED IN BRAIN, SIGNAL = 0.62; EXPRESSED IN BONE MARROW, SIGNAL = 0.65; EXPRESSED IN PLACENTA, SIGNAL = 0.92; EXPRESSED IN ADULT LIVER, SIGNAL = 0.59
tattttgtccccacggagagagatggaaaaacctaatggcacatagtagagacaaaataaatatttataattaaaaagatgattaaggaaaggtaatgataatcacagatgggaatgaatgagtttggatagtgcaggtcaaaaaaaggagagagaaaatgaatgaaaaaatataatagagaaattggggctaaactaatgggtgccatggaaatggagggaaaattatgtggagtagtaggtggaagagaaggagaataaaatgaaggaatatatgctaatagaaagacatcgaaatagagaagaggagtgtaaaaaggcaaataagaaggttagaaaacaagagtacagtcaacaagatggagaaagatggaagaaggaccctgaaaggagtagatgaggcaaaacaaaagaggtgagcaggcaaagaagtgaaaaggatgcctctgtgcaagagtgaaggaattggg

SEQ ID NO: 11529 - DNA, 407 bp, Homo sapiens
  MAP TO AC006007.1; EXPRESSED IN BONE MARROW, SIGNAL = 2.4; EXPRESSED IN ADULT LIVER, SIGNAL = 3.8; EXPRESSED IN HELA, SIGNAL = 1.6; EXPRESSED IN FETAL LIVER, SIGNAL = 5.6; EXPRESSED IN BRAIN, SIGNAL = 1.3; EXPRESSED IN PLACENTA, SIGNAL = 3.1; EXPRESSED IN LUNG, SIGNAL = 1.2
cagtgtttccaaaagcaaaattcattttaacgtgtatagaaagaacaagaaaagagaaaagtttatcaacacctaaagaatccattcaattgctattgaacaaatagacattgtgtctaccatgtgcttaggaaagtgtaaggtttctaatggccaaaacacaaagatcctgatggaatgaagtttgaatttgagcaggtgaggcagacaatgccaaataaacataaaataattatcttatctgcatgtcagaaagtggcaagtgttatagaaaagaaaattaaggtgtctgatggtatgaagattaagaattgggtgtgggctagggtgagattttttaaaaggtggtcacttatagatattttcagaagggttttttgagcaaagagttgtagatggggaaggga

SEQ ID NO: 11530 - DNA, 403 bp, Homo sapiens
  MAP TO AC002088.1; EXPRESSED IN LUNG, SIGNAL = 1.2; EXPRESSED IN BRAIN, SIGNAL = 1.7; EXPRESSED IN ADULT LIVER, SIGNAL = 0.58; EXPRESSED IN PLACENTA, SIGNAL = 0.97; EXPRESSED IN FETAL LIVER, SIGNAL = 1.4; EXPRESSED IN BONE MARROW, SIGNAL = 1.3
tttctcttccatgccaaataagaatatactttatgtcagttgcccatttaggtataagcaatctgttggatctgaaccttccatacactcatttttcaaatattattatggtactttactaagcaaatcagtgtcacattcctacatgatgaaattcagcccattattaatcatcttaaatgtgacttggggtctcattttcttctaaatgttgtcagtggtgtactgttggcttctgctattttcttgcagcgaattcaaggtcgaaaagccagcctggaggaaatacagcttgttcattctgaacatcactcactgttgtatggcaccaaccccctggacggacagaagctggaccccaggatactcctaggtctgtacgggcctccactgtactgggaac

SEQ ID NO: 11531 - DNA, 462 bp, Homo sapiens
  MAP TO AC006116.1; EXPRESSED IN BONE MARROW, SIGNAL = 1.3; EXPRESSED IN ADULT LIVER, SIGNAL = 1.2; EXPRESSED IN FETAL LIVER, SIGNAL = 1.3; EXPRESSED IN BRAIN, SIGNAL = 1.3; EXPRESSED IN PLACENTA, SIGNAL = 1.5; EXPRESSED IN LUNG, SIGNAL = 1.4
acggagccctcattacactggataatgatgtagccaggcatgaactgagggtccttgtttacgaagggaggctctgtccccagccagattccacagagggtcacttgggtaaaggagcaaaggaagacaacagaatttgttttttggggacccatccactttcggatcctgctttctggccttatagcctggaaggccctgcagaaaacacagccactgtgaacacagctgcaaaggtggtctgtgagaggaggcaggtggcagggctggggcggccgatgaagagcgaggaagagagaaagcagagtgtgagggagacaaggagggtgtagctcagagtctggttgctggccttgactatgggagtgttttggtgccacacaaactccacaaggatcagaacagagaggacagagtagaacaaggctgtgcatgccagagtcaggcccaaagtttcatcat

SEQ ID NO: 11532 - DNA, 456 bp, Homo sapiens
  MAP TO AC000134.14; EXPRESSED IN LUNG, SIGNAL = 0.69; EXPRESSED IN BRAIN, SIGNAL = 0.7; EXPRESSED IN ADULT LIVER, SIGNAL = 2.2; EXPRESSED IN PLACENTA, SIGNAL = 0.77; EXPRESSED IN FETAL LIVER, SIGNAL = 0.9; EXPRESSED IN BONE MARROW, SIGNAL = 0.75
catcttggctgaagagggagcctctcgacttacggtcggggacctgaatcttgacttgtgatctggggggattggacacctcggccagtagccaggagagctgtatgtggttcagcagggggagggggccacctccttgacagcagtgcaatccccagcccctcaccccttgaccagctcgatgacaatgaagtcattgccgttgcccgagttgaacagaagaagcccatcaggggccgtggtcttgaactggaagaagaggtgcatggaagcataggcttggagcgtggcgagtgccaggtagctgctgcgactcttgaaggtgacgggatcggccacaatggcacgcaggccaaagcgagcattgagctcacagtaggtgatgtcaccatccttgcactggtccatgtagggctggccattgaacacgagcccactcagatgcccgatgaagtt

SEQ ID NO: 11533 - DNA, 461 bp, Homo sapiens
  MAP TO AC005833.1; EXPRESSED IN BRAIN, SIGNAL = 0.95; EXPRESSED IN PLACENTA, SIGNAL = 0.68; EXPRESSED IN LUNG, SIGNAL = 0.73; EXPRESSED IN BONE MARROW, SIGNAL = 0.66; EXPRESSED IN ADULT LIVER, SIGNAL = 0.64; EXPRESSED IN FETAL LIVER, SIGNAL = 0.79
gccttcgttccatggtagtcagtactgacccaatgcttccatctcaggagaggctgagggcatcacacgaagccagcgcaacatcgcctggttagtcagtttgccatggggctggtagaggaagcacggggtgatctcatcctacattctgcttccctttcttccctggatgacttgtggagcactgaggggtccctcaagaatgtggctgagcacagcagggagagcagggctagaagagatgatgaattactgaggcatttcagcaccttggctctgtctctcttcccctccagggaggagctgtcataaacagagataccaagcggtgtctggagatgaagaaggatcttttgggtagccacgtgcttgtgctccagacctgtagcacgcaagtgtgggaaatccagcacactgtcagagactggggtcagaccaacagccagtgatcctcagatggt

SEQ ID NO: 11534 - DNA, 451 bp, Homo sapiens
  MAP TO AC005702.1; EXPRESSED IN PLACENTA, SIGNAL = 1.3; EXPRESSED IN BRAIN, SIGNAL =   1; EXPRESSED IN ADULT LIVER, SIGNAL = 1.1; EXPRESSED IN LUNG, SIGNAL = 1.3; EXPRESSED IN FETAL LIVER, SIGNAL = 1.2; EXPRESSED IN BONE MARROW, SIGNAL = 1.2
cacatttctgatggctcaggatgttaaccagagcagaccttgtgagttccaaggacttgctttaagaagttgaagacctcctgggtttttttaaagctgaaattagacttttggaaacatctctttggccaaacagatttctaaagcatttacattttttctaggtaaaaagcaatgcagtccgggcccttggaaatttgcttcattttctgcaaccctctcatatagaaaaacccacatttgcagaaatcattgaggagtctatccaggccctaatttctactgttctaacagaagctgccatgaaagtccgatggaatgcttgttatgcaatgggaaatgtatttaaaaatcctgcccttcctttaggtaagaaagtttcccttcactccctggtggaaagcctcttgggacacacaccaatctacgttgttgttaaagatgtttgtca

SEQ ID NO: 11535 - DNA, 474 bp, Homo sapiens
  MAP TO AC005839.1; EXPRESSED IN LUNG, SIGNAL = 1.3; EXPRESSED IN FETAL LIVER, SIGNAL = 1.2; EXPRESSED IN PLACENTA, SIGNAL = 1.2; EXPRESSED IN BRAIN, SIGNAL = 3.1; EXPRESSED IN BONE MARROW, SIGNAL = 1.1; EXPRESSED IN ADULT LIVER, SIGNAL = 1.1
caagttgtctcacaattccagaacttgacattataactacccttatttgaagctcggaagtattttataacaaagtaaaaaatccttccctgatgttttgtcttagtgaagtgactactaagcactagtgaaatgaattctttagttgaaagaaaaagaaaaaaaattcaatgagtcagcatctgtcatgccagaccatgctttgtctcccaccaccctacccagtacttttaccctctgaagtacctgagatgctgatgtgactaattacctgttttgaggctgggactgaactctcggctagtgctgggaggtgggaaggcctccggggctgtctgtgctggaagggttcgatatggaggaggagtcaactcttcgtcaccagagaagctcctccgcaccccacctgtcatgggcaggctcgacaaactgacaggcttcttcccaattggcatcttcctctctaaatatcaa

SEQ ID NO: 11536 - DNA, 376 bp, Homo sapiens
  MAP TO AC006145.2; EXPRESSED IN LUNG, SIGNAL = 1.1; EXPRESSED IN FETAL LIVER, SIGNAL = 0.86; EXPRESSED IN PLACENTA, SIGNAL = 0.91; EXPRESSED IN BRAIN, SIGNAL = 1.1; EXPRESSED IN BONE MARROW, SIGNAL = 0.93; EXPRESSED IN ADULT LIVER, SIGNAL = 0.81
cccctaaatccatattttcatcagatgcttttttattttacaacttctttctttcattaccaataaaactaaaattttgacttaccaggcagcagcagtggcccaccagccaatttgtaatatgtctgctactgatggctataaaataaaataataaggtcatttcagtagtctacttgatactgaggacacttgagtaccccttgagaattgattagaccgtggatattactgaccacatatgctgagcgatgtcctgctccttgttttggtgcagcaccgggctcacatactgactgataatcataagatttgttaaaagcataaactgatatattaaccaggtgtctcatcaagctgggatcaatctctccaa

SEQ ID NO: 11537 - DNA, 360 bp, Homo sapiens
  MAP TO AC005959.1; EXPRESSED IN LUNG, SIGNAL =   1; EXPRESSED IN FETAL LIVER, SIGNAL = 0.87; EXPRESSED IN PLACENTA, SIGNAL = 0.75; EXPRESSED IN BRAIN, SIGNAL = 0.84; EXPRESSED IN BONE MARROW, SIGNAL = 0.84; EXPRESSED IN ADULT LIVER, SIGNAL = 0.75
gtatttgtgggagcaatgggatacacggaggaaaatctacacaaagttccttttctgtgaataaaagggactgattagcagcctaaataaaagatccaaatatatttttttccagtgagaatttcattaaaataattatttccaaagaactttaaactcctttgaggatataaaatgttagtaagcatttttgttcatccagcatgaaagtttcattgtttctttgtttcagcgaaagatagggttgaatgtaaaaatcttgcaggatcctgaaaacatccaccacagagctgctgtaaatgcgaactatggaatcagtttgccatatattaatcagagaaaagcatgtgtaagtaatga

SEQ ID NO: 11538 - DNA, 493 bp, Homo sapiens
  MAP TO AC004691.1; EXPRESSED IN ADULT LIVER, SIGNAL = 0.98; EXPRESSED IN PLACENTA, SIGNAL = 0.72; EXPRESSED IN FETAL LIVER, SIGNAL = 1.1; EXPRESSED IN BRAIN, SIGNAL = 0.59; EXPRESSED IN BONE MARROW, SIGNAL = 0.69; EXPRESSED IN LUNG, SIGNAL = 0.62
tgaatttgtttgcttgtttactggtcttattttatagggcagacttgccttgataccagagtattttctgttccttgtctttcatgataacgcactggctggttagaagtcatcatagatttattaatgggcttgctttgaatgcacattgaatgtggaatttgctatctttgttactgattccttttggggagtctgttttaatggaaatattcctttttcacagacatgacaatcttgatggagatgtacttggtaattttgtatcatctaaaaggcccccgcacaaaagtaagcccatgcagacggtcccgggtgaaactcctgtgttgacttctgcatgggagaagatagacaagcttcactcggagccttccttggatgtgaagaggatgggagagaattccaggccaaagtctggtctgattgtgcgaggcatgatgtctgggcccatcgccagctccccacaggtggggctgttgctctttctgtt

SEQ ID NO: 11539 - DNA, 464 bp, Homo sapiens
  MAP TO AC004828.2; EXPRESSED IN BONE MARROW, SIGNAL = 0.87; EXPRESSED IN ADULT LIVER, SIGNAL = 1.1; EXPRESSED IN PLACENTA, SIGNAL = 1.1; EXPRESSED IN FETAL LIVER, SIGNAL = 1.1; EXPRESSED IN BRAIN, SIGNAL = 1.3; EXPRESSED IN LUNG, SIGNAL =   1
ttgttttccatcttcatcaactggttacacctgctggggaatatggtctcagtgcaagcagaattggatgtgcttatatctctgttttgcccttgatctgaataactgggtggtgaagaatgtgggtagggccctgtttgggtccccatttttttccctacgtcatgctaccctgccctgcctgcacactgggcatcaatgtgtttccagtgagtggtgttgaggggtggcagttcatactttggccctaatgctgttgtttctggcttcctccaggtcacccaacctgcctgcagtttaccctgaacatgaccgaggctgtcaagacctacaagtggcagtgcatagagtgcaaatcctgtatcctctgtgggacctcagagaatgatgtgagtttggggctttccctgtgggagggagaaatccacagagctggggtcctttgaggggtgaagaggaaggaa

SEQ ID NO: 11540 - DNA, 450 bp, Homo sapiens
  MAP TO AC004875.1; EXPRESSED IN BONE MARROW, SIGNAL = 0.67; EXPRESSED IN ADULT LIVER, SIGNAL = 0.66; EXPRESSED IN PLACENTA, SIGNAL = 0.74; EXPRESSED IN LUNG, SIGNAL = 0.7; EXPRESSED IN BRAIN, SIGNAL = 0.65
gctcctaaagaattccttcaacctgatggcaaatgcttaaattaactggcccaaaagacattccctcaagggtcatgaaaacataatccagtaaatttgcaaaaaactattatggctgcaccactgtttacaacctcaagtcagaataacctattcaatatgatttaggttatagctaggggaaatgtcttgctaaatttaagaaataataaagaggacggaataaatttgaggctaagcctactcaggcaagatcagtgtttacaccaacagaggccctagttcatgtaaattacttctcacccaactgcttagtctcttcttctttagtgtctgatatctctgggttccagatttcccagacagtgtagccaatttttaagtctaataaatatttttaaaaatagtctaaaggaaaaaatggaaagggaaaatcttggaacagaattt

SEQ ID NO: 11541 - DNA, 391 bp, Homo sapiens
  MAP TO AC004533.1; EXPRESSED IN BONE MARROW, SIGNAL = 0.79; EXPRESSED IN PLACENTA, SIGNAL = 0.76; EXPRESSED IN LUNG, SIGNAL = 0.86; EXPRESSED IN FETAL LIVER, SIGNAL = 0.69; EXPRESSED IN ADULT LIVER, SIGNAL = 0.75; EXPRESSED IN BRAIN, SIGNAL = 0.9
ccgcgctattaacatgaatcagctcataaggagaaaaaaaaatgctttgccccctattttgacaagagcaagtagagtgtaggtgaattcaaggggggaggaaagacatataaataacaatctttcaaacttctgttcacgaatattgttttttgtcatcacaattgcacaatgaaatatgaaagttcaatttcctcttcatttccttttaataaaacttctgttcatttcatttctgagagaagattgaatctaaattactttgacttcttttggcctaactttggtgatgctaccagacatgaaaaggaggcctttttgagtatcacccacggaaataaagaggtatggcttcgatctctgtatttagccctggctctttctcttttgc

SEQ ID NO: 11542 - DNA, 469 bp, Homo sapiens
  MAP TO AC004381.1; EXPRESSED IN PLACENTA, SIGNAL = 0.84; EXPRESSED IN FETAL LIVER, SIGNAL = 0.84; EXPRESSED IN BRAIN, SIGNAL =   1; EXPRESSED IN LUNG, SIGNAL =   1; EXPRESSED IN BONE MARROW, SIGNAL = 1.1; EXPRESSED IN ADULT LIVER, SIGNAL = 0.84
tgtctcaactgaataactgtctttgtttctcacttctgtagtaagcttccccctgcacagatctcccctctcaccccatgaaatgcttaaaaggtaacctgactctttgttcagggctcagtcctttggatgttaatctgactgggctggtgcacctaaataataaatacatcctcctcaaccccactggtctctctgattcctaaattatcccacaacaactgtactcagagattatattcatcagaccagagactcacttaaccagcgatcggaagtccagccacccttcacggctgtgatcagacaccaggagcttggttttcagagaggggcactgagaagctatggagtccacctctgaggcaagggcatctatggtcacaatgcccttggctttagacaactgtagtcgatagagaatgtctttggccttcaacaggatggtcgcaggaatgaagatgatccc

SEQ ID NO: 11543 - DNA, 468 bp, Homo sapiens
  MAP TO AC006515.7; EXPRESSED IN BRAIN, SIGNAL = 0.67; EXPRESSED IN BONE MARROW, SIGNAL = 0.55; EXPRESSED IN ADULT LIVER, SIGNAL = 0.54; EXPRESSED IN LUNG, SIGNAL = 0.57
cctacaggatttttgcatctttgatgttaggggttactgaccctttatattttctattaaaaagtttgtgtttagctcaattgaattgctaaagtattcttttcagggaaagaaattattaaaagtaagaggaaagcacagggccagaacactggactgtgccaaatggaaagataagctctggggagggtttgaggcagctcatagtgtgctttctgccctctttttcagggccttctcaccttctgaagaatggcttctgtttggcagagattgggtttttatgcctctcttctgaaaagacagctaaatggtgggccagatgtcatcaagtgggaaaggagagtaattcccggatgtaccagaagcatctacagtgccacgggaaagtggacaaaagagtatacattgcagacaagaaaggatgttgagaaatggtggcatcaacgaataaaagaacaggcctcc

SEQ ID NO: 11544 - DNA, 480 bp, Homo sapiens
  MAP TO AC004701.1; EXPRESSED IN PLACENTA, SIGNAL = 1.4; EXPRESSED IN LUNG, SIGNAL = 1.1; EXPRESSED IN FETAL LIVER, SIGNAL = 1.1; EXPRESSED IN BRAIN, SIGNAL = 1.4; EXPRESSED IN BONE MARROW, SIGNAL = 1.1; EXPRESSED IN ADULT LIVER, SIGNAL = 1.1
gattctcatgttaggtgaagctcattatttactttactggagaaaggcaatattaaacttacaatttggacagctaaggttaggacattgcattgtataataagccaccctaaaacttgatgatttctaataacagtaatcattaatttgtttacaaacctgcaatttggataggatttgacttcgtttcatgtggcatcaactgggatagctcaactggggctgcaggatccatttctaagatgactcacttacatggctggtaagttggtgctgttaactgggagattaaatgggctgttgaccaggcttctcagttcctccccacatggtcctccccattgggatgtttgggctccctcaacagcgtgcagctggtttccaagaacaagtatcacgaaaagacagaaagtgaaagctgccagcatcctaaggcccagacactggttcagcatctcttgtgccatatcctgttggtca

SEQ ID NO: 11545 - DNA, 462 bp, Homo sapiens
  MAP TO AC005972.1; EXPRESSED IN BRAIN, SIGNAL = 0.8; EXPRESSED IN ADULT LIVER, SIGNAL = 0.74; EXPRESSED IN BONE MARROW, SIGNAL = 0.77; EXPRESSED IN LUNG, SIGNAL = 0.79; EXPRESSED IN FETAL LIVER, SIGNAL = 0.87; EXPRESSED IN PLACENTA, SIGNAL = 0.8
ggtatctgtgaggggtcgtgaaactaatgcctgctggatactgaggggcaactgtatagtcacatggagggtgttgcattttaggccaaggaaacagcatgaataaattgatgggggcccttatacatttcctctttgagtatcatcaagtactttggtgctgccagagttcaggggagtgtaatactcagattttttatggttgcaagtaacaggaaatttgactcagaattgcttggcataagaggttagcaaactttttctgtaaagtgccagatagtacatattttatgctttgcaagccgcatagtggccagagataggggagttttcttcggtaattcaatgtcaacaaggaccttgtgttccagctcgccacactgtatttcataatgttggcagccagcatatccagggacttcagggtctttttctatgtctggagattaagaggaacatttt

SEQ ID NO: 11546 - DNA, 475 bp, Homo sapiens
  MAP TO AC004831.1; EXPRESSED IN ADULT LIVER, SIGNAL = 1.2; EXPRESSED IN BRAIN, SIGNAL = 1.3; EXPRESSED IN BONE MARROW, SIGNAL = 1.3; EXPRESSED IN PLACENTA, SIGNAL = 1.4; EXPRESSED IN LUNG, SIGNAL = 1.5; EXPRESSED IN FETAL LIVER, SIGNAL = 1.2
gcctttctttgagggaatatgaaagtatgttgcagtaacaaattagttcagaaacctcagtgacaccataccacaggtttatttcttgctcatactatatattcagtgcattttggtggaggatgctcttctatctcattgctcagggactgagctgcatgaagattcttcaattttttcatgtcagtgcttcaacatgcagttctgtacttgctgcagcaaaggaaaaagagacagtatttttttttaaaataatctttgcttataattaccttcaaatgtaaataacacaggtctctttaactcatggggtttctagcagaaccagaaacttctcttccaaccccacactatctagccaggggactgggaggtcttcctgtgttcccaggaagagaggaacatggactatggtgagcacctgtcaccccaccagataattaaatagtagtaagctgggtggtatgtggaggaa

SEQ ID NO: 11547 - DNA, 409 bp, Homo sapiens
  MAP TO AC006487.7; EXPRESSED IN LUNG, SIGNAL = 0.77; EXPRESSED IN FETAL LIVER, SIGNAL = 0.79; EXPRESSED IN BRAIN, SIGNAL = 0.7; EXPRESSED IN BONE MARROW, SIGNAL = 0.68; EXPRESSED IN PLACENTA, SIGNAL = 0.72; EXPRESSED IN ADULT LIVER, SIGNAL = 0.68
gactcacctcgcagaagagggtaagcttgtcatcagggagaagcccgttggcctcatccaaaagaaaatctctacggatgaatttcttgaatccccagtctttgccttgcacaaacctatatgcccgttgactctctggggtggggaaaaaaaaagtcatatttaaggttacgcaaaaaccagatcaaagccacaacttgtcagtgtatgaaacttctggatgtgaaacttaagagttgaacaaagaggagaacatttacccatagctttggtttcttctcccttggcattcaggatggagaatttgaattttgcccgaacttcactctttggacagctgaccagtaacaggtaaagtgacaggtaatctttgctttcttcatctaaccctttggggtttactcgcaaa

SEQ ID NO: 11548 - DNA, 465 bp, Homo sapiens
  MAP TO AC006095.1; EXPRESSED IN BRAIN, SIGNAL = 0.72; EXPRESSED IN ADULT LIVER, SIGNAL = 0.68; EXPRESSED IN FETAL LIVER, SIGNAL = 0.78; EXPRESSED IN BONE MARROW, SIGNAL = 0.82; EXPRESSED IN PLACENTA, SIGNAL = 0.58; EXPRESSED IN LUNG, SIGNAL = 0.81
ttagttcttattcacagtgttttgttctttctgggtgatttttataaatatagaacttttctgcttttgcatatgagaaagtcctggtaacctttttgagcatagaggggaaattttccacctcaggcacctttctctgctgaaagggggttgttgtttccagttctgtggttcctggcagaggcagtgtcttcagggcctataggaagtgatttgggcagacaaagctggcgaggcatggaagggagtgcaggtcccccttggcaccatgggctggggttgttatcctcagagggcactaggggttgtccatgttcagggccaagttggttatgtgcttgtagcaatcgccaaagcaagggtgaattttagtcagaacagaggtggcacctttgttgttctcctccttgaattcttctgtcattgtgctgagggtagtgacaaggctcacagagataggctgtg

SEQ ID NO: 11549 - DNA, 470 bp, Homo sapiens
  MAP TO AC005996.2; EXPRESSED IN FETAL LIVER, SIGNAL = 0.95; EXPRESSED IN PLACENTA, SIGNAL = 0.94; EXPRESSED IN LUNG, SIGNAL =   1; EXPRESSED IN BRAIN, SIGNAL = 0.9; EXPRESSED IN BONE MARROW, SIGNAL =   1; EXPRESSED IN ADULT LIVER, SIGNAL = 0.95
tcgctgctgaaatttgtctgccccactgtgagctcctaagggtggggaggaacagtagctgtgtatggcatcagcctgccagctgttcgttcttttgcccaattggcaaatagtgttgggcacctactgtgtgcagcaggtctgggcttttgggggcctgggagtaggggttccatccagggtgttgggacccagacgccagcctccaacgctgacggagagaagcccctgaccctgagctctgtaacctgccctttctagatcactctctatgaaggcaagcacttcacagggcagaagctggaggtcttcggggactgtgacaacttccaggaccggggctttatgaaccgagtgaactccatccacgtggagagcggagcctgggtctgcttcaatcaccccgacttccggggccagcagttcatcttggagcacggcgactaccccgacttcttccgctggaacag

SEQ ID NO: 11550 - DNA, 458 bp, Homo sapiens
  MAP TO AC004737.1; EXPRESSED IN BRAIN, SIGNAL = 1.2; EXPRESSED IN ADULT LIVER, SIGNAL = 1.2; EXPRESSED IN BONE MARROW, SIGNAL = 1.2; EXPRESSED IN PLACENTA, SIGNAL = 1.1; EXPRESSED IN LUNG, SIGNAL = 1.3; EXPRESSED IN FETAL LIVER, SIGNAL = 1.1
tggggattctttgtttagccagcacatatgcagagtcaccattcagcctgtgtctatctcatgtatcactgcaggaatgttgaagatgtgttgtatcgggttgttgtatttttgtctttctttttttctgctaggctttcttcacctgtgcacaacacattctgaataagttactagcctgcacctgccaaaaatcaaaaggttaattttaacctttaagcagtttggttgtaaatacggagtggctttaaccaataggtttataaacattttttttttttttacacagctcacctatgaccatgacaatatctattctctggcttttaggcttgcaatgggcaacaaaattctacagtgtaattgtcaacagaatacgtggtcaattcctgatggagtctgtagggtcagtagaatgaaaagagcttaattatcacaggatgccctgagaaacttga

SEQ ID NO: 11551 - DNA, 482 bp, Homo sapiens
  MAP TO AC004844.1; EXPRESSED IN BRAIN, SIGNAL = 0.84; EXPRESSED IN ADULT LIVER, SIGNAL = 0.98; EXPRESSED IN PLACENTA, SIGNAL = 0.98; EXPRESSED IN FETAL LIVER, SIGNAL = 0.92; EXPRESSED IN BONE MARROW, SIGNAL = 1.6; EXPRESSED IN LUNG, SIGNAL = 1.1
ctggggacaataatcgctgatcagcccgtgtctcccagctttttctaatctccttagcacatctttttaaagaaatgtatttaaaactttctaccagtaacttaataattcgaggccttgccttcctgaggaatttgcattttaatgagaggcagtgcccttagcccaataaacaaggtgaggcccagcctggtcacctcccagatgtggagaaggaaacatggggttcacatgaggagtttcaggacccaaaccagcaaatggcgaaccacaccactcacctgggcctggctctgcggtatagaggcttgggatctgcatttgccagaccatccagaaagccggcttcctcgctttccctttgtttttctgctcttgtagcttataacccgtcttgcatttgcctaaagggctcagagctttctcaaggtcattaactcgagtcatagccgagctcacagggactggaaggaccatagcca

SEQ ID NO: 11552 - DNA, 478 bp, Homo sapiens
  MAP TO AC006531.1; EXPRESSED IN BONE MARROW, SIGNAL = 0.6; EXPRESSED IN LUNG, SIGNAL = 0.66; EXPRESSED IN BRAIN, SIGNAL = 0.64; EXPRESSED IN ADULT LIVER, SIGNAL = 0.63
aggtgagacggtgccattacttcttgaaaccatgacactgattcccgtttccacaaagggcacagagaagtccaccacttcagaacgttcctcattgatggtgagcgagccaactgccatgactgcccgttgatagaccacctggatgcaaggcaaaaaaaaaaaaaaaaaaaagagagagagagaacaacagtactttacttttcctgctaacattcctgaggactgcaggccctttgtctgagtaagagcctaggggatgaaaagataacttacttcaccgatcattccattccacacattgttaactttcttgccatgcttcccattggtcaccagatagaggtcgtaagtaaacttcacagttctggaaagcttcttcagaatatcaatgcagaaccccttgcagcatttcttcacattcatcccctcattggttgaattgctgtaaagaaaaaccccaagaccacagaatgtt

SEQ ID NO: 11553 - DNA, 492 bp, Homo sapiens
  MAP TO AC004103.1; EXPRESSED IN BRAIN, SIGNAL = 0.6; EXPRESSED IN PLACENTA, SIGNAL = 0.74; EXPRESSED IN LUNG, SIGNAL = 0.7; EXPRESSED IN BONE MARROW, SIGNAL = 0.62; EXPRESSED IN ADULT LIVER, SIGNAL = 0.73; EXPRESSED IN FETAL LIVER, SIGNAL = 1.2
aaggtcatgcaaagcaaaggtcaagtcactctctacaaaccataaaaccttgttaaacaggctttttattcaccaggtataatgtggcttgatttccaaactgactctggtatagcatcacatgacagatagcagaccctgagggaaataaaaatattttatatatatatatctcatttaattaagttctccttaagaaatttagaacaccaacttgtgaggataaattccattcatcggggcaaatacagatcgcaggtagccctggagctgaggaatagctttgatttttggtaaactttgtgagtccacagctttctgattgatcttgcactgctctgttatctcatatttctctttttctgtgtcaaagatctcacttgcctggtgtctgggcttctgcagctgctgcttcttgaagtaaatgccagtaagatgtttagggatttttacattgctgatatgaattttggttgaggtggcaatgacaaa

SEQ ID NO: 11554 - DNA, 489 bp, Homo sapiens
  MAP TO AC004551.1; EXPRESSED IN LUNG, SIGNAL = 1.2; EXPRESSED IN BRAIN, SIGNAL = 1.1; EXPRESSED IN BONE MARROW, SIGNAL = 1.1; EXPRESSED IN ADULT LIVER, SIGNAL = 1.2; EXPRESSED IN PLACENTA, SIGNAL = 1.1; EXPRESSED IN FETAL LIVER, SIGNAL = 1.2
aaccagtaagccttgcagatgttctgtaagaaatgtctttgtccccacattatgccaatttgctgtttaatgtctctcctgtgatagatcatgaccgtattcattcttgccccgggacagatcctaagatctcctcccaccctgctttagagagatgccctgttggggcaaaaagctctcaaactgtgggagatttctgctcagaaatgggaagagggagaaaaagaagctgggagctctcacccagggcatcaaaggcaggcagcacatcgaactccaccccctccccgagctggagcgaactcagtacgaagctgagcgcacgggggttgccccagcgtggagcctggacctcaaacttcacggaaaatgctctctctctttgacaggcttccagctgtctcctaatttcctggatgaactctccccggcgatttaactgatcctgaaaagtggtgagaggactgaggaagacaaccaggtcagcgt

SEQ ID NO: 11555 - DNA, 371 bp, Homo sapiens
  MAP TO AC004108.1; EXPRESSED IN PLACENTA, SIGNAL = 0.73; EXPRESSED IN BRAIN, SIGNAL = 0.61; EXPRESSED IN BONE MARROW, SIGNAL = 0.68; EXPRESSED IN ADULT LIVER, SIGNAL = 0.76; EXPRESSED IN LUNG, SIGNAL = 0.73; EXPRESSED IN FETAL LIVER, SIGNAL = 0.77
agccagttgactgaacccactttataccgcaatcaaacacccacaggcatcaaagggaaaaaaaagcaatgaaatccatccaaaggacagtaacatcaaatataaaaaggaacatcagcccatacagataagaaagaaccaggataagaactctggcaaatcaaaaagccaagatgtcttcttagctccaaacaactgcactggttctccagcagtggtttttaaccaggctgaaatggccgaaatgacagacattaaattcagaatatggataagaataaagatcattgagatacaggagaaagttgagacccaatccaaggaatctaaggaatataacaaaatgattcaggagctgaaagacaaaatga

SEQ ID NO: 11556 - DNA, 469 bp, Homo sapiens
  MAP TO AC005919.1; EXPRESSED IN PLACENTA, SIGNAL = 0.91; EXPRESSED IN LUNG, SIGNAL = 1.1; EXPRESSED IN FETAL LIVER, SIGNAL = 0.86; EXPRESSED IN BRAIN, SIGNAL =   1; EXPRESSED IN BONE MARROW, SIGNAL = 0.9; EXPRESSED IN ADULT LIVER, SIGNAL = 0.87
ggcacagatagtctcacctggtttctgagatcttcaattattgaatagtatttgctataatctcttcccgatccaccgtctccagacccaggcccatatttgtcataccactccttgattttgttctccagatcagtgttagcctcctccagggctctgaccttgtctaggtaattggccaagcggtcattgaggttctgcatggtttgcttttcccctccagagaaaagccccccatcgccaacaccacctcccataccaccaccatagctgtagaagcctccagtagcaccactgctgaatctagaactcccacagaatccagaacccctgccaaatccagagaccccgccaaagctagaacccccaccaaatcctgtcccagagcctgaagctcccccaaaaccaccccctactgagcagctaccaaagccccctccaaagctgcccccaaaagcaccgctagacc

SEQ ID NO: 11557 - DNA, 480 bp, Homo sapiens
  MAP TO AC006024.1; EXPRESSED IN HELA, SIGNAL = 2.2; EXPRESSED IN PLACENTA, SIGNAL = 1.3; EXPRESSED IN LUNG, SIGNAL = 1.5; EXPRESSED IN FETAL LIVER, SIGNAL = 2.4; EXPRESSED IN BRAIN, SIGNAL = 1.4; EXPRESSED IN BONE MARROW, SIGNAL = 1.5; EXPRESSED IN ADULT LIVER, SIGNAL = 2.8
ccattaatagaattaaacatgacagtgaatctttggcaagatacgtcaaaagtccatacctttatccactctatggccttggagaactgccacaaggctgtttgcaaggctaagtgctatttatggaggtacctatatgctgaataagccaattgaagaaatcattgtgcaggatggaaaagtaattggtataaaatccgaaggagaaattgctcactgtaagcagctcatctgtgaccctagctatgtaaaagatcagctagaaaaagtgggccaggtcatcagagttatttgcatcctcagccactccatcaagaacaccagtgatgtcaactcctgccagatcattattccacagaaccaagtcagtagaaagtcagatatctgtgtttgcacgatctcctctgcgcacaatgtagcaacacaagagaagtatattgccatagttaccacaactgtggaaaccaaggagcctgagaa

SEQ ID NO: 11558 - DNA, 484 bp, Homo sapiens
  MAP TO AC004123.1; EXPRESSED IN PLACENTA, SIGNAL = 0.83; EXPRESSED IN BONE MARROW, SIGNAL = 0.95; EXPRESSED IN FETAL LIVER, SIGNAL = 0.9; EXPRESSED IN LUNG, SIGNAL = 0.85; EXPRESSED IN BRAIN, SIGNAL = 0.9; EXPRESSED IN ADULT LIVER, SIGNAL = 0.87
gtatccttgggatggcagacctggcacagtctttataggatgaaacccaagactctcagggtgcgcacatacacaggaggatccctcgaagccaaatgggctgactgggtcacacaaggctgagcaggaggccagaggttactgccgggagggcatttatggtccacagcacagagaagggaaacctgggcggagcccagtggactctctaagttgaagaaataaggttgggagtcgggggagggcgaagcagctaaagttctcagggcaaagtactagagttcacaggtcagagagtagggaggaggaggaggagaaggaggaagacgaggaggaagaggaggaggaggaagaggaatacgagaaggaggaggagaaggaagaggaggaggaggaggaggaaagagatctggagtttagtaaaggacccttcttgtcttcagttgagtcatgatcagcccatgcatgtcaggaaaaggaaacc

SEQ ID NO: 11559 - DNA, 481 bp, Homo sapiens
  MAP TO AC004126.1; EXPRESSED IN PLACENTA, SIGNAL = 0.63; EXPRESSED IN LUNG, SIGNAL = 0.57; EXPRESSED IN FETAL LIVER, SIGNAL = 0.77; EXPRESSED IN BRAIN, SIGNAL = 0.78; EXPRESSED IN BONE MARROW, SIGNAL = 0.72; EXPRESSED IN ADULT LIVER, SIGNAL = 0.95
ctcatttcccagcctttctggcaaggaaagggcaggagccaggaaaggataggggtggagctaaaaggccctaggacagcaatcaaataacgaggaattcaaagacaagtgctgtgtggcttctttttgtggaatttggggctctctgcaccagagaggatgtggaactaagatgaggtggccattaccaacctttcttcttttatttttccttaatgtgtgtagtcacacagggactaccttccttacctctgacaccaggtgcatggtctctggcccaatccaggcatccagtgtccctcgcacagatcgacctatctgggtcaagacatcaactggggcttctctcttctgttggcctggtggtgcaaagtctcgacgggactgggccaatgctgagtggaggaggataagggccactaggaccatcagaatggctttgaacacatgctttccccatggtgaactgatgctggaggct

SEQ ID NO: 11560 - DNA, 481 bp, Homo sapiens
  MAP TO AC005690.7; EXPRESSED IN LUNG, SIGNAL = 0.41; EXPRESSED IN PLACENTA, SIGNAL = 2.1; EXPRESSED IN BRAIN, SIGNAL = 1.1; EXPRESSED IN ADULT LIVER, SIGNAL = 0.86
cagagcctgtaaaacaccagagttctggaagagcaacatttctggaaacccggcatgtgaatcaagtgctgggttgtctcaagattccggcagaaactgtcctctgctacaagagttgctgtgcctggaaacccagcgtccaaactcgtggattcatcctggcgctcatttccacgtacgtggtagtatcaagtgggacacttcccatagaattcagccagaaaccctaggaaaagctcatgcatagcttaacaaaaatacacaaacacatccccaaggttgaagtacttacctctgtgcgagactgcagtctcttgttcatctcatagattcggtactctggctgtaccatgtatggtgtatgcctcctataaaatgggccgaaaggagaagaatagaaggggtcatgtggtgtgctggacatcttgcctgcttttcgaaaatcaagctaaacagagtatcagtaacgtccatgcagagc

SEQ ID NO: 11561 - DNA, 463 bp, Homo sapiens
  MAP TO AC004857.1; EXPRESSED IN LUNG, SIGNAL = 0.75; EXPRESSED IN BRAIN, SIGNAL = 0.74; EXPRESSED IN ADULT LIVER, SIGNAL = 0.84; EXPRESSED IN BONE MARROW, SIGNAL = 0.69; EXPRESSED IN PLACENTA, SIGNAL = 0.78; EXPRESSED IN FETAL LIVER, SIGNAL = 0.74
aggtcaacattttgcatctcccttgactgaactgtagtttattccacaaagtaaagacttttttttttttatgtgtatctgctattagttgtttgcttttttgggccagagttacccatcctttcctgtatattaaaccacgtttttggctttttccttcctgtccttccccatctggcgatggtgaggatgggtttttctcttccatgttatcatcaggtggctggagagagatatgtctacaagtttgtgtgtgatccagaagcccttttctccatggcctttccagataatcagcgtccactgctgaagacagacatggaacgtcacatcaacgaggaggacacagtgcctctttctcactttgatgagagcatggcctacatgccggaagggggctgctgcaacccccacccctacaacgaaggctacgtgtattaacacaagtgacagtcaagcaggg

SEQ ID NO: 11562 - DNA, 466 bp, Homo sapiens
  MAP TO AC006012.2; EXPRESSED IN BONE MARROW, SIGNAL = 0.61; EXPRESSED IN PLACENTA, SIGNAL = 0.84; EXPRESSED IN LUNG, SIGNAL = 0.87; EXPRESSED IN ADULT LIVER, SIGNAL = 0.74; EXPRESSED IN BRAIN, SIGNAL = 0.55
aaactggaatgaaccttgcctatgctatccagcttaagaagttcctccatcacgctaaccaccaggctgtttggctgtcagcagctctttaacattaaatgtgatgcagttcacgaaataactattttccatatcccttggtcttgttctgaccctgacccagatgttaaactattttttcttctttttaaatattttaagtaggacagaaaacaggtacagtcctcaaaccgctgttgcctctcaaaaggtcaaaaacatcttaagtggcaacagaaacactgccctcttctactttttccagaacagctgtgcaagcacaagaccttggttcttaaccttttatgggtcactgaccccttggagaatctgatgaaagcttaaaacaaaaaaaaaaaagtgtgtacacaaaatcttctgctcctggcttttgggaagtatgtgaatcctttaacactcaacccaa

SEQ ID NO: 11563 - DNA, 461 bp, Homo sapiens
  MAP TO AC004616.1; EXPRESSED IN PLACENTA, SIGNAL = 0.83; EXPRESSED IN LUNG, SIGNAL = 0.94; EXPRESSED IN FETAL LIVER, SIGNAL = 0.99; EXPRESSED IN BRAIN, SIGNAL = 0.87; EXPRESSED IN ADULT LIVER, SIGNAL = 0.83; EXPRESSED IN BONE MARROW, SIGNAL = 0.85
tggtaacgtttaaagtctgagttcctgtctagctgattgggtgctcagatttcatcgaagctcagatttcattgaataagtcaatataagaaccttggagaatggaacgtctccaaaaagataaaagaatgtgcagctaggagtggtctgctctcctctcttcttacctctggattttgcatcccattccaaaaaccatctcatctcacaatcgcaggtccacggatttccctgcaagtaaagattctccagaagcggcatgttccgaagcatgctggcaggaagagttctaaccatgttctctgctaagtagaggtgccttatggtggagagtctgaaataatccaaaaatgtgaacgtggagaaggtgctggggtgcagctggtggaggagatttccttccaaatggagtagcctcagagacgttaagccgttgaaagcttgagggtggataaactcga

SEQ ID NO: 11564 - DNA, 464 bp, Homo sapiens
  MAP TO AC005884.1; EXPRESSED IN PLACENTA, SIGNAL = 0.59; EXPRESSED IN ADULT LIVER, SIGNAL = 0.56; EXPRESSED IN LUNG, SIGNAL = 0.51; EXPRESSED IN BRAIN, SIGNAL = 0.57; EXPRESSED IN BONE MARROW, SIGNAL = 0.51
tgggtatagaattgacagcattgagatcacctgtagattgtcaccaacaaaacaaaacaaaatcactcagtgggcaattcattaacgttcatactgagaggatagtttttcttcttgactaggcttgagtagttgagaagtgacatgctaattacattaaaaaaattggtttccagactactgggtacaagattattctagggaaactgctaaaaattttccttaagaagcaaaaattacaaatagagcattcatttttcagtaaaaatacatacctttttctcttttcagacctgcattatttgcaaaccatgacctggatgttccgaagatagcagccacacaaaattctccgcccatcgatttgctgggtgaaatttgtggaggaggtttaactttgcttaaaaaataaaataagagtaaaaaacaattatcatgatgaaatgatactcctttaggtaatg

SEQ ID NO: 11565 - DNA, 493 bp, Homo sapiens
  MAP TO AC002461.1; EXPRESSED IN LUNG, SIGNAL = 0.49; EXPRESSED IN BRAIN, SIGNAL = 0.78
ttagcactaaatggccttcctaacagtcatacaatggtatatgaatcataagagtcatacaatggtttagttattaagatatcacttacaccaatttatactgagaagtcaaaggagtctacttcaaaatctcatttctgaaagttgactgttctgcatatgtgttattgttttattcgaaaagccatttgacagagggcctctaaagagtagaagaatcaagtatttcctatctaaagttttcagagaacagtttaaagaaatgacctgttttagtttggagctctctaaggagtttgcttcacctttatcattgatctttctgtttgaagcattcatttaccatcctgacatagtctaggtctgcactgcatgatgttgatgatacttttgtcaacgtgaagaatgcagtgccattgttacagaaactgtaagaaacagagaccttaatatgtaccatctgttttacagaaaaactcaatgtgataatgca

SEQ ID NO: 11566 - DNA, 468 bp, Homo sapiens
  MAP TO AC004692.1; EXPRESSED IN LUNG, SIGNAL = 1.2; EXPRESSED IN BRAIN, SIGNAL = 0.87; EXPRESSED IN ADULT LIVER, SIGNAL = 1.2; EXPRESSED IN FETAL LIVER, SIGNAL = 1.2; EXPRESSED IN BONE MARROW, SIGNAL = 1.2; EXPRESSED IN PLACENTA, SIGNAL = 1.4
catttgcaagtctgtctgctcagtaaaatcatctgtggagcttggacatggattttcagctgcttgggatttacctggttcagtagctggtcaaggctcaaacatccgcactttaaaaaaaaaaaaaaatcctggtcattttgatgcacagcccgtttcgggaaccactggcaacctcttggagcctctcattcctcctttcttgaatgaggacagtaacagagaagcctcctgagtttttgagagaactgaacggtagcatgaagggaaggaagagtcctgccacatgcctacacatagttgttgctcacttgttggtagtgatgatgacggtgatgaccatggtggtggtgatggcgaggatgcaggctccatttacacactcactgaataaactcaaatctagcctcctttatttctcaaatacaagccttactttatgtacacatctgtttagaagcccacaaa

SEQ ID NO: 11567 - DNA, 465 bp, Homo sapiens
  MAP TO AC004614.1; EXPRESSED IN PLACENTA, SIGNAL =   2; EXPRESSED IN LUNG, SIGNAL = 0.82; EXPRESSED IN FETAL LIVER, SIGNAL = 0.75; EXPRESSED IN ADULT LIVER, SIGNAL = 0.69; EXPRESSED IN BRAIN, SIGNAL = 0.81; EXPRESSED IN BONE MARROW, SIGNAL = 0.76
cggtgtcagaaccagagaactgcttctatgtcattgttagtttactcattaactaattaattcactatgcatttatttacttatttaccttttcattcaacaaaactaaaggcatcaagacattctgggcactagaatattcagacaaaaagacaaaacaaagatcataatctcaaggatctacattttattatagaaataatgtcacaaaagaaacaataaaatattagaggtgctatgttttgtctacagagagagagagagaaagtgcgtgcagataacaacagagataatgagttcttcctggaaggaggttggcaggatcaagaatggcctcctagagaaaatgctgctagcgttaaggattagaaggcatgcaccaggtctaggatggagatggccaaagaatatgggaacaaaaagagcaaaggcactgagaattgcagcagtaattgttccgtgtgg

SEQ ID NO: 11568 - DNA, 470 bp, Homo sapiens
  MAP TO AC004648.1; EXPRESSED IN LUNG, SIGNAL = 1.7; EXPRESSED IN FETAL LIVER, SIGNAL = 1.5; EXPRESSED IN BRAIN, SIGNAL = 1.5; EXPRESSED IN BONE MARROW, SIGNAL = 1.8; EXPRESSED IN PLACENTA, SIGNAL = 1.5; EXPRESSED IN ADULT LIVER, SIGNAL = 1.7
ccgagctggatgagtaatctgttaagtacagctcctggggaagaacttctctccgtctgtgaacctgtgaaaataaggaagcaacatatctgctcccaacatgcagtgatgggacgacatagtaacaattatagacactccagttctaaaagggggaattgaaaataaaatggagttgctgctccaaagcagcctggaaacccagcccagccaatgccattgggtttccaggccagagcttatcgaacgtcagcctcagctttgccctccgggtcagatgtcagaaaaagatgacagtggaaatgcctcttgtaagggacttgaatgcatcaggctggtgggggaagaagccctgcttcagtccacttttgagtatcgtgcaaacgtcacacatttccacctgcacagaacgacaaggacagaactgcatttccacctgccgtggaactacaagaggcaggagtggtacc

SEQ ID NO: 11569 - DNA, 442 bp, Homo sapiens
  MAP TO AC006070.1; EXPRESSED IN LUNG, SIGNAL = 0.71; EXPRESSED IN BRAIN, SIGNAL = 0.93; EXPRESSED IN BONE MARROW, SIGNAL = 0.72; EXPRESSED IN PLACENTA, SIGNAL = 0.63; EXPRESSED IN ADULT LIVER, SIGNAL = 0.6
atggtggttctcttggaacgtgatcagcagcaagaaggctggcagcagctggacacacaggtgggctggaagcaagtggtcctgcagcaggtggtctcacagcaggctgggcggcagcagggctggcagcagttggagccacagctctggtttaggcaaccaggcaggcagacagtcgtggggtggtagcaggttcttctgcagtacacaggtgcacaggagctgctctgaccacagctggacccacagctggtttggccacagcaggtgggctgacagcagggtgtgctgcagcaggaaggctggcagcagctggtcacacagatgggctggcagcaggtgttttgacagcaagttgggcggcagcaaggctggcagcagctggacacacagcaggagggctggcagcagggtgtgctgctgcaggtggtcacagtggtgg

SEQ ID NO: 11570 - DNA, 465 bp, Homo sapiens
  MAP TO AC004703.1; EXPRESSED IN LUNG, SIGNAL = 1.4; EXPRESSED IN FETAL LIVER, SIGNAL = 1.2; EXPRESSED IN BRAIN, SIGNAL =   1; EXPRESSED IN BONE MARROW, SIGNAL = 1.2; EXPRESSED IN ADULT LIVER, SIGNAL = 1.5; EXPRESSED IN PLACENTA, SIGNAL = 1.3
caatctggtgattcctcaaaagtttaaacatagagttaccttatgactcagcaattccactcctaggtttatacccaagacaaatgaaaatgtacatccatataaaaacttgtatgtgaatgttcatagcagcattatccataatagccaaaaagtttaaagaacccaaatgtccatcaacagatgcatggataaacaaaatgtcatatgtccatacaacagaatattacttaaccataaaaaggaataaagtactaaaaagaaaaggaacaaaaataccgacacatggtacgacatgtatgaaccttgaaaacactgtgctgagtgaaggaatccagacacaaatgtccacatattgcatgaatccatttgtatatgaaatgtccagagtgggcaaatccatagagacagagaagacattcgtggttgtcaagggctggaaggagggggaaatgggagtgatta

SEQ ID NO: 11571 - DNA, 470 bp, Homo sapiens
  MAP TO AC004842.2; EXPRESSED IN PLACENTA, SIGNAL = 0.61; EXPRESSED IN LUNG, SIGNAL = 0.58; EXPRESSED IN FETAL LIVER, SIGNAL =   1; EXPRESSED IN BRAIN, SIGNAL = 0.61; EXPRESSED IN BONE MARROW, SIGNAL = 0.6; EXPRESSED IN ADULT LIVER, SIGNAL = 0.67
tcagtggctgcctctctttaggaaaggatatcattgtccattccttgtttcatttgatcaaaatcatgtatcatctaccaatcccaggcagtaggtgtcgggatacaggggtcagaccttgccctcagtggcctagtcaagaatagatgccctaacttaacaagaatgcccttgaccctgtctaggtacaaatcatatctcttctggtctcaccgaggcaagtgctagccctccatcctttcccacgaagcattcccagcctgtgtttctccctgtgtccagactgccatcatctgcataggaaaccaggcaaaggcagtggtcctaagggagagtcagtctccacctgtgtgcatgggctctggaccagacagcagctcagggaacaccgtcagctgtgggcctatctcattagaattgccatatggctttcatatgtttaaaaggacaccgtggttccagaattgttt

SEQ ID NO: 11572 - DNA, 481 bp, Homo sapiens
  MAP TO AB019439.1; EXPRESSED IN ADULT LIVER, SIGNAL = 0.54; EXPRESSED IN LUNG, SIGNAL = 0.57; EXPRESSED IN BRAIN, SIGNAL = 0.56
ctcacttaggcacccacaggaaatgactacacatttccttaaattcagggtccagctcacatgggaagtgctttctgagagtcatggacctcctgcacaagaacatgaaacacctgtggttcttcctcctcctggtggcagctcccagatgtgagtgtctcaggaatgcggatatgaagatatgagatgctgcctctgatcccagggctcactgtgggtttctctgttcacaggggtcctgtcccaggtgcagctacagcagtggggcgcaggactgttgaagccttcggagaccctgtccctcacctgcgctgtctatggtgggtccttcagtggttactactggagctggatccgccagcccccagggaaggggctggagtggattggggaaatcaatcatagtggaagcaccaactacaacccgtccctcaagagtcgagtcaccatatcagtagacacgtccaagaaccagttctcc

SEQ ID NO: 11573 - DNA, 464 bp, Homo sapiens
  MAP TO AC005962.1; EXPRESSED IN LUNG, SIGNAL =   1; EXPRESSED IN BRAIN, SIGNAL = 0.99; EXPRESSED IN BONE MARROW, SIGNAL = 1.1; EXPRESSED IN PLACENTA, SIGNAL = 0.99; EXPRESSED IN FETAL LIVER, SIGNAL = 0.98; EXPRESSED IN ADULT LIVER, SIGNAL =   1
ccagtatgcactctgcaagcatataatcagagatactggcagctcccccaggccctctagcaggcagagaagggagcagcagcctcaccacctgtagactgtgcccattctattccaggctggctgccagcagcagcagctcacagcagttcctagacaggctacttgtctccccttactaggctctgacataacacacagaactcagtgaggcaaaaaagctagaggaagcaaagatggaagctatgagaccctagaaagaacaatacctcctccaaattggtgtatctatcagagtcagtgtaggtaaagattcgtcggtttttcttgccacccgaattctccagcttcaggatctcctgacggtactgataatccaaaggactctgacaggctgtttcattttggtacagatctacttcaaactgaggttaccataaggaaacagagatgtgtacatcatt

SEQ ID NO: 11574 - DNA, 451 bp, Homo sapiens
  MAP TO AC004828.2; EXPRESSED IN LUNG, SIGNAL = 0.78; EXPRESSED IN BONE MARROW, SIGNAL = 0.79; EXPRESSED IN PLACENTA, SIGNAL = 0.71; EXPRESSED IN FETAL LIVER, SIGNAL = 0.82; EXPRESSED IN BRAIN, SIGNAL = 0.88; EXPRESSED IN ADULT LIVER, SIGNAL = 0.81
tcctggcaaagaacgacttccaaatgcagggatggaatataagcagaacgtcatgggctcagcagtgactccaccacccgaggccgaggccgtgcttctggaagatagaaggagacatcatcgtgtgtttcccctccccttgcccctgttaagaaacgtatcaatacccattggatgatcaaggctaccgtatttcttctatttttttttatagtgcctgccaggcactttgttttatgtttccaatagcacttcctgaaataaaccaaagcaacactgctcaaggcccctggggcgatggagaaggccacccacctcactgacagtcccaagaatgaccggctgcgaggtcctagtcaaaaggtatgtcttggctaacctgtcttgcaatgtgggcaaaaccatcatatctattttttagttttctttttctttttcctttttcccccag

SEQ ID NO: 11575 - DNA, 465 bp, Homo sapiens
  MAP TO AC002042.1; EXPRESSED IN ADULT LIVER, SIGNAL = 0.69; EXPRESSED IN PLACENTA, SIGNAL = 0.78; EXPRESSED IN LUNG, SIGNAL = 0.79; EXPRESSED IN BRAIN, SIGNAL = 0.89; EXPRESSED IN FETAL LIVER, SIGNAL = 0.7; EXPRESSED IN BONE MARROW, SIGNAL = 0.91
ttttagggcatggctaggagcagttttgttttctcttctcaagacagagtttttgtaggatgtcatagagttcatgtctgcagctcacagtgtcattgcctgtgtccccagctccacgtactggcaggtgtgctgcaagctgggcaggtgctctgtgtccgtgggataccttacccgacactcccggccctcctctgcaagccgtgccctgatcctccctgcagggactggggattgggtctgctcacccagaagctgggatacctggctgagggcacttctctccctcttctctttgaacagagtggccgcaaacccaaaggtgcgggagcaagtgcggctggagctgagcttcgtcaactcagacctgcagatgctcaaggaagagctggaggggctgaacatctcagtgggcgtctatcagaacacagagtaagtgggagcagcacacttccagaagcctct

SEQ ID NO: 11576 - DNA, 477 bp, Homo sapiens
  MAP TO AC002059.3; EXPRESSED IN LUNG, SIGNAL = 0.79; EXPRESSED IN FETAL LIVER, SIGNAL = 0.87; EXPRESSED IN BRAIN, SIGNAL = 0.74; EXPRESSED IN BONE MARROW, SIGNAL = 0.8; EXPRESSED IN HELA, SIGNAL = 1.7; EXPRESSED IN PLACENTA, SIGNAL = 0.92; EXPRESSED IN ADULT LIVER, SIGNAL = 0.76
acggttgtgcaaccattgttacaatctcatcttagaacctctttattcccccctcaaagaaaccccactagtagtcactcctgtttttcccatctcccatgcccctggatctaggcagccacaaatgtacttcctgtttctatagtacagtgcttttctgtattaaccggttcttaaggtgactatttcgcattgatgaagttgctctagctagaaagccaaggctctttcatttccttctgcccttctcctttgccatccttcaacaccaaggagaatggtccagcaacagctcggtccaagcttgtcaaccgcccacctccacacactccagccccggtccacatcccccaaggctccttgtgggattcctcagcagcaccaatgcactgactgtcactatgttctcctagatttggtcgaagatctcagtgaatacccatctgtccatcttgaagacctcatgacaccggagat

SEQ ID NO: 11577 - DNA, 413 bp, Homo sapiens
  MAP TO AC004845.1; EXPRESSED IN FETAL LIVER, SIGNAL = 1.1; EXPRESSED IN BONE MARROW, SIGNAL = 0.85; EXPRESSED IN ADULT LIVER, SIGNAL = 0.98; EXPRESSED IN PLACENTA, SIGNAL = 1.1; EXPRESSED IN LUNG, SIGNAL = 0.91; EXPRESSED IN BRAIN, SIGNAL = 1.1
ttgctcccttctctccattcactttttctctagtttctttctggaacttggattttgttcttctggcctgcatatctatgctaaatccacaaaatgattttgtttcctcagatgccaaggagtctctaatctccgtatattaacgtttgcagcttaggaacagtgtgatctaatgacaaattaactgtattgattattgccatgttgttcacggatacattccactcagtttgccacttggaggcacatccaatattgccgtatgggccaaatgatgcagttcctactttctgtcttcggcaggcatttggtctaattttccctgagaagatgcctgtggctgtgtgacgaatgactattttgtggagggggtgccaggcttctctcctgctgctgtggagtttgctggaaca

SEQ ID NO: 11578 - DNA, 470 bp, Homo sapiens
  MAP TO AC004748.1; EXPRESSED IN PLACENTA, SIGNAL = 0.7; EXPRESSED IN ADULT LIVER, SIGNAL = 0.65; EXPRESSED IN LUNG, SIGNAL = 0.63; EXPRESSED IN BRAIN, SIGNAL = 0.75; EXPRESSED IN BONE MARROW, SIGNAL = 0.58
agttttggtttcttggtgggtttacatcaggtgaggagcagtcctgtcccaccccctatgcccttgcaattcttttgtttggttcagccaaagttgactgttatgctcagtgctcttattgctttataggtatttcagagatctcactgtagaaagatgtagtcctgtttgatttgggggtatggcctttttttctctacatgggctgctttttaaattgttttctttgaaaatattatagggtcccacacataatgctgaatatttctattctttgttctagctgtgctcccaaacatgctgttagaagttatggaagaaagcaatattgtcactgtggcaggaatgtgtcccttctttctggtgattgttaggacaagcattattattcttgctgttgcccaagttgaatgatttatgggtgcaatatttaatttttggagcacttgacatttttgacctctcaccca

SEQ ID NO: 11579 - DNA, 449 bp, Homo sapiens
  MAP TO AC002065.1; EXPRESSED IN PLACENTA, SIGNAL = 0.77; EXPRESSED IN ADULT LIVER, SIGNAL = 0.98; EXPRESSED IN LUNG, SIGNAL = 0.94; EXPRESSED IN FETAL LIVER, SIGNAL = 0.91; EXPRESSED IN BRAIN, SIGNAL = 0.83; EXPRESSED IN BONE MARROW, SIGNAL = 0.81
cagtgagtttaggatgcaggcacatactccacttgttaaataacctgtttgtgtaagttcatacttggctgtaagccattatttattgtctgttaaaggtataattgccctgctgacactgtgcatggggggcttggtttagcatgggtcagtatggcatggcatggcttggctattgcacctagagaaaaagagagtaccggagttgtccatcttgcagatggacagaggggagccagggtactacatggctcgacatggctcacactcatgcccagagggaaggagttaagctgctgacactgcaggcaagggagagctggccgtgcagctgtgtgtgggagcagccagagcggcagagctggctgctgagaggagctgtggagccggagcagacaaccaagataaaggcggacagtgtgagagagctgttgatgagagagctgctg

SEQ ID NO: 11580 - DNA, 454 bp, Homo sapiens
  MAP TO AC005920.1; EXPRESSED IN PLACENTA, SIGNAL =   2; EXPRESSED IN ADULT LIVER, SIGNAL = 1.3; EXPRESSED IN LUNG, SIGNAL = 0.93; EXPRESSED IN FETAL LIVER, SIGNAL = 1.4; EXPRESSED IN BRAIN, SIGNAL = 1.5; EXPRESSED IN BONE MARROW, SIGNAL =   1
tttcaaaagtaagcaagtctcctaaagaaaaatcaacaaatttatctttgggggtgggagagatattccaaagtaacttcattcaagtatccctatagcaccttagtcacacctccattacagaacttccttcgtatatattgaaattacctgcaattcgagtacttagccttagactattaggtagtggaaccaagagatgacagaagagagacaattacatggaacatctcaacagaataatctaacatacctgggactgccacaaagaatttcacagcatcccggtgcccatggaagcaaagctgtgcatgtgccattgaacaatagggtataaatgtccctggagtcactttatcactgttttcatcaccatatacacggattacacttccaggacgatttcctggtacacctgaggttttatttgctgcaacagaaaaaccaaatacca

SEQ ID NO: 11581 - DNA, 465 bp, Homo sapiens
  MAP TO AC004676.1; EXPRESSED IN BRAIN, SIGNAL = 0.73; EXPRESSED IN BONE MARROW, SIGNAL = 0.61; EXPRESSED IN PLACENTA, SIGNAL = 0.68; EXPRESSED IN LUNG, SIGNAL = 0.58; EXPRESSED IN ADULT LIVER, SIGNAL = 0.71
tccatttcaaagtattttccccaatctaaatcacttcagatacttacttctatacttaccaggctgtgacggctcataattgttgtactattcctccgagttctaagtgtgtaaggttggaaaacctgtgaaaggtcactgaaaaaaacaaaaacaaacaaacaaaaaaaacaaaattagtaatgttttctaatggaagatctctttcaaatacattagcatcagttatctagttaacaacgaaatcttccatggctcctcatttcatacagagaatgaactcctcaccgtcctctctgcagagcttcccaagtggtatgctgtggattatgggtttgcagagatactgatctcagtggtcggggggcagctgggagaggtgatgcaggcggagctccagactggttgactctagctgcttctggtcagagctacgcccccaaaccggttaccaccagacctgag

SEQ ID NO: 11582 - DNA, 488 bp, Homo sapiens
  MAP TO AC000016.1; EXPRESSED IN LUNG, SIGNAL = 0.65; EXPRESSED IN FETAL LIVER, SIGNAL = 0.87; EXPRESSED IN BRAIN, SIGNAL = 0.68; EXPRESSED IN BONE MARROW, SIGNAL = 0.82; EXPRESSED IN PLACENTA, SIGNAL = 0.76; EXPRESSED IN ADULT LIVER, SIGNAL = 0.8
acacacacacacacacacacacacacatacacacacacacacacacacacacatatatatgtaaaatgtaaaggccagtaaagaacttcaatcggagtcaaagggtttactttagacccttcatgggatcttaggcaactgcctcacctctcttctctggaatggggatcatgggcatgtcttccctgtgcaagagggccgtctgactcggtgaactaatgagctagtgtctgtgcagggatgaaaggtgctatataaacaaagaagagttctcactcctgttttcgtgtgatcacagcctgggccatggtgtcatgtcgtgacatcaagagaagtgaatggatggaaacaggaaaagacacagtgaagatggagaagaggagcaggacgagaaagaccagaagccaccctgcgggtaccacaaatcaaacagaatcccagagctgtttgaaaggaggtctaaaaagtctccatcaaaaccacagact

SEQ ID NO: 11583 - DNA, 475 bp, Homo sapiens
  MAP TO AC000134.14; EXPRESSED IN PLACENTA, SIGNAL =   1; EXPRESSED IN LUNG, SIGNAL = 0.62; EXPRESSED IN FETAL LIVER, SIGNAL =   1; EXPRESSED IN ADULT LIVER, SIGNAL = 0.68; EXPRESSED IN BRAIN, SIGNAL = 0.57; EXPRESSED IN BONE MARROW, SIGNAL = 0.79
ctcagccatggaaaaggaaggtcccctgcaagccacagagggtgggacagggtgttgttgggctggaggatgcaaactggcaccaaaggcctccaatgccaggctcatgagttgaggcgggaccctgtcttcacccacccactgaaggtgcctggcccccctgccaagccctcagcaggccttaccccagcccatgggcgctgctggccacaacagctcgtggccacgagacttgcggcctgcgccatccacgtagatgccagcagtggtgaagagtagcaggaactcgctgaggctaagctccacggcacccagtgcctcacccaggcccccgcgggatggtggcagctcctcaggcaccaaaccggcccccagcgccaacggcgcagcctcgttgagcagcgggtagagtgcaaagccaccggcggcgcccacacatagccggtcgcccagcagccccaggctctgcacagtg

SEQ ID NO: 11584 - DNA, 470 bp, Homo sapiens
  MAP TO AC004881.1; EXPRESSED IN BONE MARROW, SIGNAL = 0.71; EXPRESSED IN ADULT LIVER, SIGNAL = 0.63; EXPRESSED IN PLACENTA, SIGNAL = 0.71; EXPRESSED IN LUNG, SIGNAL = 0.63; EXPRESSED IN BRAIN, SIGNAL = 0.78
gcttttccaagaacaggacgggagaggggccagagaaggcatccactgactggggtgtcctgagtaagaggtgggtatttgctttttgttttgtttttttttttttttgaagaccaccagtacctttagcaaccttaggtaaagggagcagagcagtgctggagagggaggaaacgtgtagttgtgattaggaaatgacaggattccacctcttgggcaatactgtaaaacatatacactcactgtctattttccgaaggacatcgtgtcttgagctatggcactccacacgtacagaaaagtcaggatcaggcaaggatggttcagaaaggagcaagaaacccagcacacagctggagtcttcctcaacaagtctgactggattccactctgaaatctctcttgaaatggattctatcatttggtcagaccttgactgtaacctcctatctacatctgggagcctgcag

SEQ ID NO: 11585 - DNA, 473 bp, Homo sapiens
  MAP TO AC000066.1; EXPRESSED IN LUNG, SIGNAL = 0.61; EXPRESSED IN BRAIN, SIGNAL = 0.6; EXPRESSED IN BONE MARROW, SIGNAL = 0.56; EXPRESSED IN ADULT LIVER, SIGNAL = 0.52
ttgatgccccacttttcttcgtatatctgcctcagtctcaggagacctaggttctctgctgtatcatggaaaagataagtttattggctcggcttgggtatacctatctagtcagccaaggtagcatgtttgctagggtctcaagcctgcagagttcccagagagctattgcagggacaccccaaaggtgtctgttccctaatacagtcacttcagaatttaacgttttgaggtttctttctattttcagttacaggctagtgaaactctgagaaacagcactcatagtagcacagctgcagacttactacaagccaaacaacagatcctcactcatcaacagcagcttgaagaacaagaccacttattagaagattatcagaaaaagaaagaagacttcacaatgcaaattagtttcttgcaagagaaaattaaagtatatgaaatggtatgtttattttaaggaagtcagc

SEQ ID NO: 11586 - DNA, 474 bp, Homo sapiens
  MAP TO AC004988.2; EXPRESSED IN BONE MARROW, SIGNAL = 0.9; EXPRESSED IN ADULT LIVER, SIGNAL = 0.88; EXPRESSED IN LUNG, SIGNAL = 0.86; EXPRESSED IN PLACENTA, SIGNAL = 0.91; EXPRESSED IN FETAL LIVER, SIGNAL = 0.97; EXPRESSED IN BRAIN, SIGNAL = 0.93
tttttacttcactataatcctgttgcttagtcattatgtatatccatttcattctttctctagaagacattcttgggggctttttgaattttgagtgattgttttctagacctgttacacagctaatgttctgagaattattttcaaagaactcttaagttggttttgacattctttattactgctatctttcttttttgatcctctcaattcttattttgttagagtactacttgatatctctacatggatgtctcataaacatctcaaatttttctgctagtcttgctctacccaccgtcttctgcatctttatttatggcaagtccatctttcccgttgctcaggacacaaatcttgaaactacagttgactgtctcacagtccacatctcactcaacaggaattgctgtagctttactgccaaaataagtcagaacctaaccagacttctactgaagccatgagcagcat

SEQ ID NO: 11587 - DNA, 373 bp, Homo sapiens
  MAP TO AC004894.1; EXPRESSED IN PLACENTA, SIGNAL = 0.7; EXPRESSED IN LUNG, SIGNAL = 0.68; EXPRESSED IN BRAIN, SIGNAL = 0.62; EXPRESSED IN BONE MARROW, SIGNAL = 0.72; EXPRESSED IN ADULT LIVER, SIGNAL = 0.74
tttatgaagatactctttccatgaggtttaactttttttctaataaatattttagtactattatttctgcagtttaaattgatgctaaagatgtatagaaatgaaactggtaagaaaaaagcgattttttttgtttgttttgttttgtttttaattcccagaggaaaagcctcaagctgcagcaggacagtttttctccagggtccaattataacagagccaattatgttttgggatgcattcacgacccttgcaattcttctacatgcatacataaaactctgcacatgtatgtgtcagaatttactaatatggattccaaatattgcttcatccatcaacagaactgtacacccaaaaacgaagtggaaac

SEQ ID NO: 11588 - DNA, 381 bp, Homo sapiens
  MAP TO AC004638.1; EXPRESSED IN PLACENTA, SIGNAL = 0.82; EXPRESSED IN FETAL LIVER, SIGNAL = 0.78; EXPRESSED IN BRAIN, SIGNAL = 0.72; EXPRESSED IN BONE MARROW, SIGNAL = 0.65; EXPRESSED IN LUNG, SIGNAL = 0.86; EXPRESSED IN ADULT LIVER, SIGNAL = 0.71
cccccgtctagtgggaatacttagatagattaggaagaatttttaaaccaacagtctaagactactccctgggtacatcttcaattacttgttgcttagagacagattttctttttaagattattttatcctctagtttttaatatatttaatgctttagataatagttcagaaggtatagccataattacaattttaaagctgctgaattaattacttttgttacagataagtgatttccttagttcacttttatatctgtcttcagcttccacaatgactttgtgacgatcacattggtatgggcaagagtgcaagagcttgctaaagtttcggctattcagggatttttctactgctatgcaacctaaaagaaaacaa

SEQ ID NO: 11589 - DNA, 476 bp, Homo sapiens
  MAP TO AC000403.1; EXPRESSED IN PLACENTA, SIGNAL = 0.58; EXPRESSED IN LUNG, SIGNAL = 0.72; EXPRESSED IN FETAL LIVER, SIGNAL = 0.78; EXPRESSED IN BRAIN, SIGNAL = 0.56; EXPRESSED IN BONE MARROW, SIGNAL = 0.62; EXPRESSED IN ADULT LIVER, SIGNAL = 0.98
gtgtttgagggcaagtaggcccctttgacacctttggtgttgaactcatgaggttttgaatgtccagggacattggccaatatcaaaagaactttaaaagtcagtttggtaaggtacttcttgacttcagggacaaaacagcaatggaaccaatccagaaaaagggttctcattgtccaggccttctggtacaaccaaaagactggcagctggcatttatcttgtcccttcaaggctcagaggttaacggttttatacataagggtagtcctgatcataaacctagcgacagcagaggataaaaaatttcagttctccttaaagaaattaggggtaaacaatatccctggtattgaagaggtgaatatgtttacacaccaaggaacagtgattcactttaacaaccctgaagttcaggcatcgctggcagcaaacactttcaccatgacaggccatgctgagacaaagcagctgac

SEQ ID NO: 11590 - DNA, 454 bp, Homo sapiens
  MAP TO AB003151.1; EXPRESSED IN LUNG, SIGNAL = 0.65; EXPRESSED IN FETAL LIVER, SIGNAL = 0.71; EXPRESSED IN BRAIN, SIGNAL = 0.98; EXPRESSED IN PLACENTA, SIGNAL = 0.8; EXPRESSED IN BONE MARROW, SIGNAL = 0.72; EXPRESSED IN ADULT LIVER, SIGNAL = 0.59
agagcccggatcctgaagggcgcagcgtgggcagggggcgggcccgggagttggaacagagggcacagacggcccctcctcggaggggagggaccggagccggggcctttttctttaagactcgcagcactggatcccagaacttagtctgcgcggcggcattgacactagctgggctcctcggggcgcgccccaggtggtccgaagcccggtccgccctccacgcaggtgccccgcgctccccgctcagccatgtcgtcctgcagccgcgtggcgctggtgaccggggccaacaggggcatcggcttggccatcgcgcgcgaactgtgccgacagttctctggggatgtggtgctcaccgcgcgggacgtggcgcggggccaggcggccgtgcagcagctgcaggcggagggcctgagcccgcgcttccaccaactggacatcgacgacttgc

SEQ ID NO: 11591 - DNA, 457 bp, Homo sapiens
  MAP TO AC004782.1; EXPRESSED IN PLACENTA, SIGNAL = 0.84; EXPRESSED IN LUNG, SIGNAL = 0.84; EXPRESSED IN FETAL LIVER, SIGNAL = 0.95; EXPRESSED IN ADULT LIVER, SIGNAL = 0.87; EXPRESSED IN BRAIN, SIGNAL = 0.91; EXPRESSED IN BONE MARROW, SIGNAL = 0.88
cagttcctggcacataatgctcaatcaattttacccaccactgccaccaccataaccatggctgttgtcattgtaactaccacggttgacacctttaccaccaaccttacattatcatcaccaccatcactaccaccaccagcaacttcatcgtcatgacagtgtaagagtgattagcaatgcaaatctgagccaactctgaaggtcaattccaatgcagcttccccccaggtacattcttcactgcaagtgatcaattacatattaccttttcgtggttttctattaggatctcaatgacaatgttctgaaatttgatgtccatgatggctgctactgtttcttcctgaggcctcagcagagtgggtccaaacaccacaccaaggtttgccaccgtcatcaaattctgcttgtggttgttagcaacactgggaggaaggaaaagaaaaggtaccaa

SEQ ID NO: 11592 - DNA, 473 bp, Homo sapiens
  MAP TO AC002037.1; EXPRESSED IN PLACENTA, SIGNAL = 0.63; EXPRESSED IN ADULT LIVER, SIGNAL = 0.56; EXPRESSED IN LUNG, SIGNAL = 0.55; EXPRESSED IN BRAIN, SIGNAL = 0.61
aagaagccatgagcaatgtgaaaaacctctgaattgtacattttaaaagggtgaactttatggtatgataattatatctgaatttaaaaatattaaaacaggccgggaatggtagtgcattcctgtaattccagctactcaagaggtcaagtgggaggatcacttaagcacaggagttcaggaccagcctggacaatgagaccccatctcaatgaaataaataaaatttaaaaaatgtaaaaacaacaaaaaggaagaatcactgagcagacactctggctcagatagaatataatagtagtaatagacgtagtaatagactggaatgactcagtctctcctttatctctcctgaatgattcaaacttgatggtgttgatcttggccttatacagcttcaccctttcagaaaacaagggcacgtgggcgatcttggtggtaggttgatactcaggcagtacctgtgaacccac

SEQ ID NO: 11593 - DNA, 452 bp, Homo sapiens
  MAP TO AC006241.1; EXPRESSED IN PLACENTA, SIGNAL = 1.1; EXPRESSED IN LUNG, SIGNAL =   1; EXPRESSED IN FETAL LIVER, SIGNAL = 0.89; EXPRESSED IN BONE MARROW, SIGNAL = 0.95; EXPRESSED IN BRAIN, SIGNAL =   1; EXPRESSED IN ADULT LIVER, SIGNAL = 0.86
caaatgcatatatacccatgtaattcactgtctcaatatttctgtgtttccatcttctgcgaaagcccctctatccccataagcactgttctgatttctttttccatagatcattttgcctgttcaacaatgtttgtatgttctttaagcttagtaaccatcattttcgtcgccatccttattaatagctaacggttattgagaacttgcagggtgctcatttgctcagaaccctccaacagctttccatctgtcttggagtaaagcccaggtcttcccactggtctgcaaggcccatgtggtctagcccctgttgtctctctgatctcagctcctgttgttcacactctgctctcccacacaagccgccttgctttttctcggacagatcaggctttaggctctgctctcgctgttcccacaggcaggaatgctgtctctcagaattccgt

SEQ ID NO: 11594 - DNA, 481 bp, Homo sapiens
  MAP TO AC004857.1; EXPRESSED IN LUNG, SIGNAL = 0.54; EXPRESSED IN BONE MARROW, SIGNAL = 0.69; EXPRESSED IN PLACENTA, SIGNAL = 0.59; EXPRESSED IN BRAIN, SIGNAL = 0.57; EXPRESSED IN ADULT LIVER, SIGNAL = 0.42
tttgtaagtaaatgatgtgtgtcattcatattgacacaggatttattctgcacctgtgttatatatagttatctgtaagttcgtacagcttgctcatttatattcaaccatttaactattttaaattcctctttaatggtaataatatatttcataaatgcccataaagtggttgattgtggtttaaccatattagtgattgatttaatgtacattttatgtaagatagcatagtattgctaataatagaaacttaaaaatgttttaatttaggagacatcaaacaagagccaggaatgtatcgggaaggacccacataccaacggcgaggatcacttcagctctggcagtttttggtagctcttctggatgacccttcaaattctcattttattgcctggactggtcgaggcatggaatttaaactgattgagcctgaagaggttagtttaatagattttaattaggacactcagacatg

SEQ ID NO: 11595 - DNA, 469 bp, Homo sapiens
  MAP TO AC005920.1; EXPRESSED IN BONE MARROW, SIGNAL = 0.9; EXPRESSED IN PLACENTA, SIGNAL = 0.9; EXPRESSED IN LUNG, SIGNAL = 0.69; EXPRESSED IN FETAL LIVER, SIGNAL = 0.88; EXPRESSED IN ADULT LIVER, SIGNAL = 0.88; EXPRESSED IN BRAIN, SIGNAL = 1.3
aaagcccagtacctggtgagtagggaagtgtcctcccaggtggttccaacctttaacccaattcctctgtcttggaggcaaagggaaaggacgtggctgatccccgcagagcccaaggccagccaccatcctttcatggagccaggcagcttcgagaagccactgaggctccttgtgctccttgtgtgggcacaaagtgtgggcttctggagggggtccttggacctctatctcagcagggacattcctcctccccccgccttccagacctcctgctccagatgcctggcttctccagggcaccccgatgggtggctctgccaccccaggacactggactggggccacccttacagaaccggttcgaagccaaacaatggcacgtcacagtccagctgagccggaggcctcagcagggtaagtacaagtgaggctgtggccaagaggggcataggtgccagggactcag

SEQ ID NO: 11596 - DNA, 348 bp, Homo sapiens
  MAP TO AC003661.1; EXPRESSED IN BONE MARROW, SIGNAL = 0.9; EXPRESSED IN ADULT LIVER, SIGNAL = 0.88; EXPRESSED IN LUNG, SIGNAL = 0.98; EXPRESSED IN PLACENTA, SIGNAL = 0.83; EXPRESSED IN FETAL LIVER, SIGNAL = 0.73; EXPRESSED IN BRAIN, SIGNAL = 1.6
ctcggaaaccatgacccccggcgcgggcccatggagccatggcctatagggtcctgggccgcgcggggccacctcagccgcggagggcgcgcaggctgctcttcgccttcacgctctcgctctcctgcacttacctgtgttacagcttcctgtgctgctgcgacgacctgggtcggagccgcctcctcggcgcgcctcgctgcctccgcggccccagcgcgggcggccagaaacttctccagaagtcccgcccctgtgatccctccgggccgacgcccagcgagcccagcgctcccagcgcgcccgccgccgccgtgcccgcccctcgcctctccggttccaaccact

SEQ ID NO: 11597 - DNA, 473 bp, Homo sapiens
  MAP TO AC001228.1; EXPRESSED IN LUNG, SIGNAL = 0.67; EXPRESSED IN BRAIN, SIGNAL = 0.76; EXPRESSED IN BONE MARROW, SIGNAL = 0.58; EXPRESSED IN FETAL LIVER, SIGNAL = 0.84; EXPRESSED IN ADULT LIVER, SIGNAL = 0.91
ccagagattagccgatagccatcagcatgggggagaaattcctcggccagctgaagcagctcaactgacccaagcacctaagttgtgacctgctgaccaagcggccctggctggccaccaggcctcctgccaagtgctgaacatgcagaacaagacagagagggtctcactgttgagaaaaatttattatcaatgtctcagagccaacgacgacacgaacctacatgaacacaactcttaatttaggacccaagggtgactgtaaacatgataggagcgctgggacattgtcactgaggcagacagcagccactagtccacaatggtttaaaaagtcagtcctgtgccccctcactggaagcttccattctgggccatctgcagatattccttgtagagcttctcctgagcctcgaagagcttcttcagcttcttggcttgccctttgctgagctctttgccctccatgtcat

SEQ ID NO: 11598 - DNA, 469 bp, Homo sapiens
  MAP TO AB019438.1; EXPRESSED IN ADULT LIVER, SIGNAL = 0.6; EXPRESSED IN LUNG, SIGNAL = 0.44; EXPRESSED IN BRAIN, SIGNAL = 0.6; EXPRESSED IN BONE MARROW, SIGNAL = 0.5
attccgaggtgtttccattcggtgatcagcactgaacacagaggactcaccatggagttttggctgagctgggttttccttgttgctattttaaaaggtgattcatggagaactagagatattgagtgtgagtgaacacgagtgagagaaacagtggatatgtgtggcagtttctaaccaatgtctctgtgtttgcaggtgtccagtgtgaggtgcagctggtggagtctggaggaggcttgatccagcctggggggtccctgagactctcctgtgcagcctctgggttcaccgtcagtagcaactacatgagctgggtccgccaggctccagggaaggggctggagtgggtctcagttatttatagcggtggtagcacatactacgcagactccgtgaagggccgattcaccatctccagagacaattccaagaacacgctgtatcttcaaatgaacagcctgagagc

SEQ ID NO: 11599 - DNA, 365 bp, Homo sapiens
  MAP TO AC005004.1; EXPRESSED IN PLACENTA, SIGNAL = 0.77; EXPRESSED IN LUNG, SIGNAL = 0.7; EXPRESSED IN FETAL LIVER, SIGNAL = 1.2; EXPRESSED IN BRAIN, SIGNAL = 0.65; EXPRESSED IN BONE MARROW, SIGNAL = 0.78; EXPRESSED IN ADULT LIVER, SIGNAL = 0.67
aatcatgagccaaccgtcagcatctgtattttatccagagaaagctgtcattcacactcaactcttcggaatggagatttcatttcttacctgactcgggctagtcttttcttcagcagctgtggaatgttgatgtggatcttcctttgctccctcagagggttctcttataattcctgcctggccccctggatctctgaagacctttggctccatgctctcgcttctctttgccctatccaagatcccagatgccacagaacctcctgctgtggagtccactagcccacatcgcccaggctcactcccatgatccaaggtctcataggtttcttcacaacaactctccacatgagtcctctgca

SEQ ID NO: 11600 - DNA, 474 bp, Homo sapiens
  MAP TO AC002302.1; EXPRESSED IN BRAIN, SIGNAL =   1; EXPRESSED IN BONE MARROW, SIGNAL = 1.2; EXPRESSED IN ADULT LIVER, SIGNAL = 1.1; EXPRESSED IN PLACENTA, SIGNAL = 0.86; EXPRESSED IN FETAL LIVER, SIGNAL = 1.2; EXPRESSED IN LUNG, SIGNAL = 1.1
caaggcactttaagggatcttcaagggagtgtaattttgagcatatggaatctttctaaccctagctaactttagaagtttaactcctatgcaagatgaagcatctatgttcccaagagtttgacttcagcaaaggacaagctgcagaagctgacattattgtttattttggcataaaggctttacttgttggtgaagttcaagtttaatgatctcttcctccctttctctctcttcctcctctccgctttccttcttcccttcctcccaccctgattttctcttttgcagtttgctgctttgtggtgcacaagcggtgccatgaatttgtcacattctcctgccctggcgctgacaagggtccagcctccgatgtaagtaatgggcatcgattgcttttctctgtccacagtcaatgctgccttgtgattaaatgtgagtgagcattcttagacgagtaagtgtggacgatct

SEQ ID NO: 11601 - DNA, 476 bp, Homo sapiens
  MAP TO AC002089.1; EXPRESSED IN LUNG, SIGNAL = 0.99; EXPRESSED IN FETAL LIVER, SIGNAL = 1.7; EXPRESSED IN BONE MARROW, SIGNAL = 0.93; EXPRESSED IN PLACENTA, SIGNAL = 0.91; EXPRESSED IN BRAIN, SIGNAL = 1.3; EXPRESSED IN ADULT LIVER, SIGNAL = 0.68
cggctgaaagtgtcctgtgagaaaacacacacaaaagcatatgtgtgtcccgaactcttgagtatgcacatttaagaggcgccagccaactcgatctttcttcttctggtaaacatgcctcactgggtattcaaagagcccattccgtaagagaccatgcagtattgtttataatttttatcggtgtggtttttctcaccacctacttaaaagttcattttttctccttttctctacttctttgcttctcctttccttataagaaaaaaaggcaaactcagcaaacctaaggcattagacagagaagacattcttatgaagactatttttaacattctcttagtttacatcttcctcatctttgaagctgacagtatgtatagggtaaaagttcctgagtacagaacaacacacagagtgtatcctgaagtggcagtttctagccaaggaaaggcttctgagacaaaggtagtcca

SEQ ID NO: 11602 - DNA, 464 bp, Homo sapiens
  MAP TO AC005044.1; EXPRESSED IN LUNG, SIGNAL = 0.59; EXPRESSED IN BRAIN, SIGNAL = 0.69; EXPRESSED IN ADULT LIVER, SIGNAL = 0.56
tttgtaagcagcatattgagttcagaagaaaggaagtagaggaaggactcctacaggtaatattagtctatgaatcagcaagtatctaataatttttgcaagaattgtaagagaaataagtgaatcaaaagatgacctgtcacttagaaaataagagagaatacaaatatttatcttcaaaaataatttccatccagactgtaacatcctctagaaaatcaagtgtattttcatctgatagcttaataaaataatgatgctgtgccttcaagacataatactaacctgataacataattcccatgtccagtaggagttgccagactcctatggccatagatctgcactggacgaaaggacagtgttctagaagccagtctaccagctctgacccaacgcagctcctcctgaacaaaagcaaagccattcacagtaagatattgctgacatccgtttgccaaaaa

SEQ ID NO: 11603 - DNA, 461 bp, Homo sapiens
  MAP TO AC005495.1; EXPRESSED IN PLACENTA, SIGNAL = 1.4; EXPRESSED IN LUNG, SIGNAL = 1.3; EXPRESSED IN BRAIN, SIGNAL = 1.1; EXPRESSED IN FETAL LIVER, SIGNAL = 1.2; EXPRESSED IN BONE MARROW, SIGNAL = 1.2; EXPRESSED IN ADULT LIVER, SIGNAL = 1.4
taaagggggacacaaaccagatatttctcagtggtcagataatgggcaattatttttcttctttaaatttgctaggattttacaaatgatctgcctgctttgtttatccatttgataaaacttttttgttgttcttatttagtttctcaacagcagaatttcttaaaacacagagtggctgattattaaatttcatgaggcaccaaattcttgaataagaacatattttgaaaatctaataataaaatcttgaaataattatgttcttacctgggccattccagcagtgaaggcaaaagggctaagaagacttaatacccatcccaaagataaaggaagttgtctatataacacagtgaatcccagacatccccaaaatacagtgaagagaaatccagccaaaccagcgagcataggtttccttattaaaacactcatgaggaaagccaatgctatctgaa

SEQ ID NO: 11604 - DNA, 473 bp, Homo sapiens
  MAP TO AC002549.1; EXPRESSED IN BONE MARROW, SIGNAL =  11; EXPRESSED IN ADULT LIVER, SIGNAL = 2.1; EXPRESSED IN PLACENTA, SIGNAL = 5.4; EXPRESSED IN LUNG, SIGNAL = 0.8; EXPRESSED IN BRAIN, SIGNAL = 0.64
accccctcaaatttttctcccaaagcaagcacctcagtctcttcactctggccctggtaaacatggcacatcttccttatagtttatcaatggaaactgatgtccttatcattatataaaaacaaacacagatgtgcaaataatgtgaactcggcacacacactcatgtaagacaaaatgaaacttccaagcccttctttgcctctaatgggtcacagcaggggccccatccctacctccaagggatgccgcctccctccccaccactgggggtgttttcatggaagtcactggcctcctctgctctccctggactgcaggaaaagctccaagcgcaagccgcggacagcagacagctctcactcccgacacagatgggtttccgccctgccatccgaccagaaggagggcaacctgctcagggatgaggcctccagcgctcggtgcctccagggctccttcggtaccttcca

SEQ ID NO: 11605 - DNA, 499 bp, Homo sapiens
  MAP TO AC004707.1; EXPRESSED IN PLACENTA, SIGNAL = 1.1; EXPRESSED IN LUNG, SIGNAL = 1.2; EXPRESSED IN FETAL LIVER, SIGNAL = 1.2; EXPRESSED IN BONE MARROW, SIGNAL = 1.3; EXPRESSED IN BRAIN, SIGNAL = 1.4; EXPRESSED IN ADULT LIVER, SIGNAL =   1
gacaggtaggctggaagctgacagcatggatctaagatcaggtccttgttatctgctgcactcctctctggggtatcatggaggggaacttcagggatctttggaaagggctttttccagtcacatgatgcaccttcattattttgatgatccaaaacacttttaactggggagctagagtcctcagggctcagttgcttgtgggtcagaaacttacatgtaagcctttgagccagaggaataaattcttcttcatcttcactttcactgcttagcaacctgactggctgtgtttgtgtgacagtttcagctatttctgggacaggtggtgaaaataactctggtgctggaggacaggaggcttcacaatctgagatgtcaaccactacaatcttctcttccctttcaggctgtctcctctttgttgaagatggttccttcttcagaaaggcaaatgttggcaactcctcagagtcactatcaccagaatccagtgagg

SEQ ID NO: 11606 - DNA, 453 bp, Homo sapiens
  MAP TO AC002557.1; EXPRESSED IN BRAIN, SIGNAL = 0.85; EXPRESSED IN LUNG, SIGNAL = 0.54
  unsure 192
  unsure 222
ggacaggcatagagagcaggacagacagacccccctcggccagctccagcctcacctttatatctctccgtctcccccgtgggtggggacgtgggcagggggttatggatactgcagtctttgcctgtccagtctggctgacagatgcacttcccttcattgctgcagacctagaggcagggcagggccagngagaggtgagcaggggcctgtcccctcttngtaagcttctcccgccatcccaggctccaggcagtcaccccgtggtgggagcaaatccggcgctccccactgccggggcaggtgctgaagttgaaggcagaagctggcaggcagcgatggtccaggcacaacatgttaggcccgcagctgtgccatcctccacatagctcaggtcagagccgtccgccagctgcacgtggcctcccctggggaagtgacacagccagcctc

SEQ ID NO: 11607 - DNA, 474 bp, Homo sapiens
  MAP TO AC002117.1; EXPRESSED IN LUNG, SIGNAL = 0.5; EXPRESSED IN BONE MARROW, SIGNAL = 0.69; EXPRESSED IN BRAIN, SIGNAL = 0.62; EXPRESSED IN ADULT LIVER, SIGNAL = 0.45
ctttcctaccttgggggaacctggaacttggaaaggctccctgtcctagtcttgatctgttctgggccaggtcccagcttgagctgcctctgagatttgggctgtgcggatctctggagtgagctctgtttcggttgacccaggtcatggaatggaaacggtgaggccccagtggctgttctggaagaaacagatctcctggcaaaggccccagcatctccctcactgaaaccaggtggccggctcctcggactctgctttatgttgcggtgagaactctgcccaggtgtgcagggtttggcttgtgggctgcttgctgctcatctgatttttgtcccagtagtccctgcgttcttcattcaaccccttctgggacttcagctcagagagcaccatcccgggggtcagggcctccccacaggagccctgcagtgtggtagcgccatggctgtctcaaaccaagcaaaggaagga

SEQ ID NO: 11608 - DNA, 461 bp, Homo sapiens
  MAP TO AC006204.1; EXPRESSED IN LUNG, SIGNAL = 1.6; EXPRESSED IN FETAL LIVER, SIGNAL = 0.96; EXPRESSED IN BONE MARROW, SIGNAL = 0.73; EXPRESSED IN PLACENTA, SIGNAL = 0.96; EXPRESSED IN BRAIN, SIGNAL = 0.79; EXPRESSED IN ADULT LIVER, SIGNAL = 1.7
ggaaggctaaatggagaggagagaatcatttttaacagccatatattttcatatgactcaatatttatgaaaaatttaaaaaataactcatttaagtttctaggaggcaggtggaataaaggcagactaacatatttggattgaaggcataagagcaggggctctcacctttggcatgcatcagaatattgatacaacccagcatgctgggccccactccaaagtttctgattaagtaggtctgggataaaactctaaaacttgcatttctaataaatccctagctgctgctgctgctgctgctgttgctggtccagagaccacctgtgagaggcattaacatggagtatgtctggttaaaagtagcagcatttgagtataaaaggtcatcagaacaataaaagcaataatactaacagtagtggcagaggtaaagcaatggcaaaataataagctacaga

SEQ ID NO: 11609 - DNA, 460 bp, Homo sapiens
  MAP TO AC004746.1; EXPRESSED IN PLACENTA, SIGNAL = 0.96; EXPRESSED IN FETAL LIVER, SIGNAL = 1.1; EXPRESSED IN BRAIN, SIGNAL = 1.2; EXPRESSED IN BONE MARROW, SIGNAL = 0.99; EXPRESSED IN ADULT LIVER, SIGNAL =   1; EXPRESSED IN LUNG, SIGNAL = 1.1
ttcaaggacatatctaggaaacccttaggtgtagaaattccaacaaaaatgatgtatggtattatttcactatcataaaagtatgcatctgactcaagattggttttgtacaaatcaggcacattgtacatttcttcccctaggccatcctttccctaaatcccaagcattctcacctccagttggactgaaggtgtcaattcctggctagagtctggttttatgacttatgttatagaacataactcctcactctttaagggggagatgtgcttcgtgacctccttccaaagagtgctgtatggaaatgtgggaaagagtaacttcacagtagagaaacctgaaaaacaccacccgatcaaagtgagaaagttgagcattagtagtgataaattatgtctataatatatgcctttgttatgttgttatgagaatttttacctctgttgtcctcctcccc

SEQ ID NO: 11610 - DNA, 437 bp, Homo sapiens
  MAP TO AC003106.1; EXPRESSED IN BONE MARROW, SIGNAL = 0.72; EXPRESSED IN BRAIN, SIGNAL = 0.78; EXPRESSED IN ADULT LIVER, SIGNAL = 0.59; EXPRESSED IN PLACENTA, SIGNAL = 0.62; EXPRESSED IN LUNG, SIGNAL = 0.61; EXPRESSED IN FETAL LIVER, SIGNAL = 0.95
aatgtgtggtattgtttcttttccatatatgtaaaaatattatgaagtgatggatgtagtagtactcatttcttttttaaaaaaaaaaaagctaaattgtcagcagacaagaactctagacattttagtatcttctgagttaacctccgtgaggcagttaccaaataaaaatttagttgtcacatgcaatgcatgtaatagctattcttttcttgatagttagttcaaaagcactacataacaatgagtttaagtgttcttttccagacattgtcaaggatcattccaggaccaataatttcaacatcagtgaaagatttaattaaagcagggaaaaataaaaatggcaataaactgcatcctaagcttcagctttgtatgcatgttttatcaactcacactcttctgagaaagatgcctgggacacgaacatttct

SEQ ID NO: 11611 - DNA, 459 bp, Homo sapiens
  MAP TO AC005730.1; EXPRESSED IN BONE MARROW, SIGNAL = 0.76; EXPRESSED IN ADULT LIVER, SIGNAL = 0.64; EXPRESSED IN PLACENTA, SIGNAL = 0.69; EXPRESSED IN LUNG, SIGNAL = 0.74; EXPRESSED IN BRAIN, SIGNAL = 0.75
gaatttacatggtctgaattgccattaaaagagatatgagaattattgagtaacaaataactttttaataatttaggcaagttttggacgattgtactttgtttagaaaccaaaagcatagtatttgtagtttttttatttactttagttgctaggaagtaaactttattcaaggtctctggtaccagttgttgctaaaagtgattgactaatctgtcaatctgaaattatttgttgctgaactgctaattcttttgcttctatcttttaggcagatcttgtctggactaccagactcaagagaccaaatcaagcctttctaagacccttgaacaagtcttgcacgacactattgtcctcccttacttcattcaattcatggaacttcggcgaatggagcatttggtgaaattttggttagaggctgaaagttttcattcaacaacttggtcgcgaata

SEQ ID NO: 11612 - DNA, 487 bp, Homo sapiens
  MAP TO AC005858.1; EXPRESSED IN PLACENTA, SIGNAL = 0.59; EXPRESSED IN LUNG, SIGNAL = 0.71; EXPRESSED IN BRAIN, SIGNAL = 0.81; EXPRESSED IN BONE MARROW, SIGNAL = 0.72; EXPRESSED IN ADULT LIVER, SIGNAL = 0.61
gtactcgcttcatccatcggccagggtctgtgggacagaccaggcaggtggtgccccatgtgaggaacgctgcaatggattgcaagggaacccctgaaaacaaatgtgaagtgactgagcagtaagtaattggtgcgcgctggggatttccaagttcgaggggattttcaagctagggtttcttcatgggacaacaattatcagctcaacagcaacagtatataaagtattgaaacagctgcttaaagctagcagagcctcggtctcagaggcccaattaagggacctaatgcaaactgttgttttccacaacgcgtggttcccagaaaaagtcacgttagacctagagctctgggaacagtgggaaaaagtcttaaacaacatcgtgcgcaagggcaacgggtcccagtaacatctttaatgttatgggccttagttagggctgctttggccccactctacacagaagagcctaaaaagggagggg

SEQ ID NO: 11613 - DNA, 478 bp, Homo sapiens
  MAP TO AC005863.1; EXPRESSED IN BONE MARROW, SIGNAL = 0.94; EXPRESSED IN ADULT LIVER, SIGNAL = 0.89; EXPRESSED IN PLACENTA, SIGNAL = 2.8; EXPRESSED IN LUNG, SIGNAL =   1; EXPRESSED IN FETAL LIVER, SIGNAL = 0.85; EXPRESSED IN BRAIN, SIGNAL = 0.85
tgtggtatgaggtatgggtccaacttcatagttttacatattcagttatcccagctgcattggataaagagactcttctttcccccattaaattgccttggtgccattgtcaaaaatcaattaaccagaaatgtgatagttagtttcttgattctccattctatttcattgatctatgtccttatgtcagtacccactatcttgattactttagctttgtagttaagttttaaagttgggaagtgtgagtaccgtaacttttttctttcttaaagatgtctgactattctgggtctcctgaatttccaaatgaatttttggaccagttcatcaatttctgtaagcaagccaactgggattttgataaggattatgttgaatctgtgggtcaatttcagaagtactgtcatcttaacaatgacaaatctgatttatgaggatggggtgtctacttagttttcaatgttttgacattttt

SEQ ID NO: 11614 - DNA, 452 bp, Homo sapiens
  MAP TO AC004860.1; EXPRESSED IN PLACENTA, SIGNAL = 1.1; EXPRESSED IN LUNG, SIGNAL =   1; EXPRESSED IN FETAL LIVER, SIGNAL = 1.2; EXPRESSED IN ADULT LIVER, SIGNAL =   1; EXPRESSED IN BRAIN, SIGNAL = 1.2; EXPRESSED IN BONE MARROW, SIGNAL =   1
ctttgacctgggctgtcttccttactgaatcctcagtctctgctcagcacctatattcatgtctttgttgtctcgacagtagaaagaactacatgattctgtgatgggttggttctctttttggaaatattgaacgggtattactgcatctctttccgtgagatgcaatgaaagacaagaaaattctcaagtatctctggagagtagttcaggactggtcagggcagaaaagcttagaaaaggcagccaacaccaaagacaaaactaagctacagcatccacacgttgcatagctcctcacccacgggatgtgatgcctttgccatcattctcccaatacaccacgctcttttttctacacctgctatagggaattaatgacttatccttttacatttttccatcaaaatgtatttataatattcctttcttcattatccccactgctgacc

SEQ ID NO: 11615 - DNA, 466 bp, Homo sapiens
  MAP TO AC006375.2; EXPRESSED IN PLACENTA, SIGNAL = 1.1; EXPRESSED IN LUNG, SIGNAL = 1.2; EXPRESSED IN FETAL LIVER, SIGNAL = 0.96; EXPRESSED IN BONE MARROW, SIGNAL = 0.95; EXPRESSED IN BRAIN, SIGNAL = 1.3; EXPRESSED IN ADULT LIVER, SIGNAL = 1.1
aactgaagaaaaatggggctccttaaagattttatatgattaggaaataaaattcaaaagtagccaaatcacaactgtaaaatggatgcctagtgacttcccattgaaatgcttacaaagttgcccttgtttgatgagcgcaatgagcagacgcattgtcatggtggagaaggactctctgaggaagattgcctaggtgtttttttctgctattgctttggctaactttctcaaaacactctcataataagcagacattattattatttttttgccctttagaaagtcaacaagaaaaatgtcttgagcaccccaaaacatgttgccatgacctttgctcttgaccagtctacttttgctttgattcgaccactcccaccttttggtaaccatattggtaaccattgctttggtcatgctttgtcttcaggattgtactggtaaagccatgttccagttctttgaa

SEQ ID NO: 11616 - DNA, 494 bp, Homo sapiens
  MAP TO AC004954.1; EXPRESSED IN PLACENTA, SIGNAL = 0.83; EXPRESSED IN LUNG, SIGNAL = 0.79; EXPRESSED IN BRAIN, SIGNAL = 0.68; EXPRESSED IN BONE MARROW, SIGNAL = 0.72; EXPRESSED IN ADULT LIVER, SIGNAL = 0.77
cctcatgtaattggaatcatgcatctttctgttactggattatttcacttagtgcaatgtcctcaacaatacctcttcttttcacaggcacaacagaacctaaagtgcagaactcctgttttcttgtttcttccttccttatttttcttcttgcaaatttaacaaacaatgcatttaaggtataaagcatggtgcctgataaaagggtgtttttacatggtagtttttactaatttgcagccaaatagttatttctgagttggtatcaatccagattttagaaaataattacatcgattctatggccttagacttaaaattctctgggatcactcacccacagtatgtgaaaaagaaggagaaaaaaattcatgtgggccaagagggacagcagcccaaggctctttacttctaccccagccaggtcccagagtaacagacctgcttggtgtatgtctctgctaatcactgtatgagaaatttggggcctgatt

SEQ ID NO: 11617 - DNA, 360 bp, Homo sapiens
  MAP TO AC005273.1; EXPRESSED IN PLACENTA, SIGNAL = 0.81; EXPRESSED IN LUNG, SIGNAL = 0.82; EXPRESSED IN BRAIN, SIGNAL = 0.7; EXPRESSED IN ADULT LIVER, SIGNAL = 0.67
tccttgattaagctgtcattgcaataaaagggaattttcttccccacatatgtgcacctatctaagacttactttcttggcctttttttaccttgttccttttcgtcagaatataaactgacactattttgagatttttctgtttatgtttttcttattttcatagaatactcagctagttgtggaggagagtgaagataacgtatgaaagatctcatcgctaggatatcattcaaatgagactttcaaacatcctgaaagtttacatttctgagcccattcccttattcttgatcaatatttctttttttatgatttgtgacatgaacagcatctgtatgaatgtcgctgtttgcagaa

SEQ ID NO: 11618 - DNA, 474 bp, Homo sapiens
  MAP TO AC003077.1; EXPRESSED IN LUNG, SIGNAL = 0.7; EXPRESSED IN BRAIN, SIGNAL = 0.64; EXPRESSED IN BONE MARROW, SIGNAL = 0.71; EXPRESSED IN PLACENTA, SIGNAL = 0.62; EXPRESSED IN ADULT LIVER, SIGNAL = 0.68
aggcacacatcctaattgccatcaagtcttcacatagggagctattaaagcaagttccagtattatttggctttccctcacttacatttgtgttttcccaaaaggaaagcctcgcaaatagcagacaaggcaattgtatttgagggctccctggtaaaacagtgcagtttggtagaaaaaccacaagatgtcactattggatacatcatcatccctttaacaagcaaacggcagtgatcaggctgccccgccatggacacctaagtatacatacctgtatccctaagctcgacttcatcacaaagaattggtcaaccagctttttgtgaaggggtctcatatcttgaggtacaaacttctcatgcacggccaaaccaaattccagaatctgtgccttaattcacaacataaggaaaaaacctcacatcaatgactacctctcactaagtgcctgctatgggccgagcactttac

SEQ ID NO: 11619 - DNA, 476 bp, Homo sapiens
  MAP TO AC004896.1; EXPRESSED IN ADULT LIVER, SIGNAL = 0.88; EXPRESSED IN PLACENTA, SIGNAL = 1.3; EXPRESSED IN LUNG, SIGNAL = 1.6; EXPRESSED IN BRAIN, SIGNAL = 1.1; EXPRESSED IN FETAL LIVER, SIGNAL =   1; EXPRESSED IN BONE MARROW, SIGNAL = 0.91
ttctttgggctgaactttgcaactttactttctgtttttttccccctacatgctgattttaaaaaaatgatgcttaattgttcacatcaaacatgaactttttgaaaagcacagtgtcaaaatgttttattgctctaataatacatttcatcatcttatctaacaaatccagcaatatgttgctgattagatgttgtgataaaaacatagcaccaaagaaacaaaccattggtggaactacttattcgtgacatatagaaaagcatcttcataaaacataaatatgacacagttacctgtcatgttgcagtaaactttcagaggccccagaggtccgctgccatcaggatctatccagtaataatttgatgtctgtcctaggtgtttgtaggcttcacaggaaggctcgtagatagctagaacaaacaaaatatcctacataagcacagcacagaacaaatggctccccagataaa

SEQ ID NO: 11620 - DNA, 498 bp, Homo sapiens
  MAP TO AC004994.1; EXPRESSED IN LUNG, SIGNAL = 0.68; EXPRESSED IN FETAL LIVER, SIGNAL =   4; EXPRESSED IN BRAIN, SIGNAL =   1; EXPRESSED IN BONE MARROW, SIGNAL = 0.72; EXPRESSED IN ADULT LIVER, SIGNAL = 0.67; EXPRESSED IN PLACENTA, SIGNAL = 0.78
agaagggcatttacacaggcttctgatgcatcacagatggctgtgagatcatgtcctccttctagagccaacaccacacgtccatcagccaatgtcatcaattgcttcgtcaaatgaccaaaacctaccataatacaaacagaacatttcaaagtattaaatcaagagaaagtgatcactagaatctaacattgagcatgtattttgagtaagtcattactaagcattttctgtgtgctaactcatccaatacttaaaataactttatggattaggtcctattattatctctattttacagataagggacccaaagcccaagatcccacagctaagaagtatcacaaccaagactggcaccaatctagctcttcaccagtgcacagggctgcttttcataacatggtctgtatgtatctggataaaaaaactgaatactcttcagcaggtgttaacaaggtaaactcttccatttgcttaccatatgcttcctgtcgc

SEQ ID NO: 11621 - DNA, 485 bp, Homo sapiens
  MAP TO AC004864.1; EXPRESSED IN LUNG, SIGNAL = 0.52; EXPRESSED IN BRAIN, SIGNAL = 0.66; EXPRESSED IN BONE MARROW, SIGNAL = 0.53; EXPRESSED IN ADULT LIVER, SIGNAL = 0.45; EXPRESSED IN PLACENTA, SIGNAL = 0.69
gacctcattccctgttgagggcatcaaataaatcctacttgcaaaatttgttttgtttatgtcttgattcttaactgcaagttacctgaggcaagatgaatgacaacactaagtttttcaaatagaatacaattatataccgtttttatacatcgattcaattgtacagattcaatggcatataattgtattcaagaagtattattttagaaaatcactggattactatctgatatagtaggctgaataatggaccactaaaaagtcctcaattgtaatccccggaacctgccaatatgctacttacatggcaagaggaactttacagatgtgattaagtctgattaatctgattagtcttgggacgggattatccttggctatccaggtggtcctagtgtagtcacaagttccttaaaagaagaaggcagaagactcagagtcagaaaaaaaaaaaaaagtgacaccagaaagagaggtcagaa

SEQ ID NO: 11622 - DNA, 482 bp, Homo sapiens
  MAP TO AC005968.1; EXPRESSED IN BRAIN, SIGNAL = 0.64; EXPRESSED IN BONE MARROW, SIGNAL = 0.52; EXPRESSED IN ADULT LIVER, SIGNAL = 0.46; EXPRESSED IN LUNG, SIGNAL = 0.49
cacacaatagcttccttccaatcttcatgaaattacctgtaatttatgtatcactcgggagcactgcaacccacattatccatggttctaatctcacattgaaaatcgaaatattgtgtgataaaattagaaagaatatgaaataacttaagtcttttaactcaagtgcaactcttcgctttgaacttagtgaaaggattctctttgttttggctttggagatgactcattttgcagaaaaagaaaaaaaaaaaagcccaacattgtctcgcctactgcccataactcaccttaatccttagttcgtaaatcagggttttcgcctttctcagcttctgaaaacaaatccaaaccttcataaatgcattttctattgatccggtggttatgaaaacctttacattttcactagggtctaccattcatgcctatctcccaagataaattacagtttcaaactgagatgagctaaactggttcaa

SEQ ID NO: 11623 - DNA, 445 bp, Homo sapiens
  MAP TO AC005078.1; EXPRESSED IN PLACENTA, SIGNAL = 0.59; EXPRESSED IN BONE MARROW, SIGNAL = 0.58; EXPRESSED IN ADULT LIVER, SIGNAL = 0.62; EXPRESSED IN LUNG, SIGNAL = 0.64; EXPRESSED IN BRAIN, SIGNAL = 0.62
tggtactttgatggcattatccaattgctctcctcaagctacaatgtctgaactctaaccattcaaaattgaaaataaggtggaatctctcctgttgggtgctaatctgaactatgaattatttggatttcaattataaagtgactgtgttgagtttgatataaaattttggaatgcctctctctcgcacgcactctctctctctttctgatctttgtctcattctgtttctcctcccagacagttctcgttcacacaacagagacagctcgtcttagatatttcatggagttgttgcttgagaaaggaaaacctctaatgctagtaggaaatgcaggagtgggaaaaacagtctttgtaggtgacacattggcaagtctctctgaggattacatagtatcccgtgtgcctttcaactactacacgacatccacagctctgcaaa

SEQ ID NO: 11624 - DNA, 425 bp, Homo sapiens
  MAP TO AC004028.1; EXPRESSED IN PLACENTA, SIGNAL = 0.61; EXPRESSED IN LUNG, SIGNAL = 0.77; EXPRESSED IN BRAIN, SIGNAL = 0.57; EXPRESSED IN ADULT LIVER, SIGNAL = 0.59; EXPRESSED IN BONE MARROW, SIGNAL = 0.63
ttttacaaaatatcctttttgggcaaagctaaaattcattaaattttctttctaaagtgatgttttttaatcctccctgactgttttttttctaaagtgacttcaaatcttctatgtgatgatttgaggattataatttttccccaaattaatgtattgaataaaatggttttatgagcttgaaattttttttaggattactcatcattaatatgttccttaaagatgctatatgtatgaatgatcatgttaaagctttgaaaactgtttttggaattgagaaaatgaaacaccgtttagctctacttcacagaattcttcttactgtacttatcaaggaaaaaacgaaatttaagcagaatctcagaatgttttgcccttatagttaattgtataagtggaacccaaatgccccaatcaaaata

SEQ ID NO: 11625 - DNA, 477 bp, Homo sapiens
  MAP TO AC005083.1; EXPRESSED IN PLACENTA, SIGNAL = 0.78; EXPRESSED IN BRAIN, SIGNAL = 0.69; EXPRESSED IN BONE MARROW, SIGNAL = 0.61; EXPRESSED IN ADULT LIVER, SIGNAL = 0.62; EXPRESSED IN LUNG, SIGNAL = 0.78
aaatcttgagctcctcgctgacttccaagttgcaataaaaaataaagggggaatgaacactgagaggattttgtgagaatgatttttgaaggactatcccaatccagaggggtaggtgaggagatgaaggatgctattgtttcacctcattgcacattccaggaaagcttggtgtgtttgcctgcctggaaaccagagctcagggaggctttagctgacttaaaaattggatgcatcattcacttcataggtttagccgttgaaagcttctcaggatcttccaaagtgcatgtatgcacgcacacaccatcatcatcatcagcagcagcagcaataaatatttgctggttctcgaaaggagggtcaaagcttccaacttcggagccctcagtagcagcagtagctagttagttgggcgatggaagaggtgaggtagaaaaagaggagatacgcacttgtatccctcttccccaaagg

SEQ ID NO: 11626 - DNA, 465 bp, Homo sapiens; identical to SEQ ID NO: 6420
  MAP TO AC004820.2; EXPRESSED IN PLACENTA, SIGNAL = 0.61; EXPRESSED IN LUNG, SIGNAL = 0.74; EXPRESSED IN BONE MARROW, SIGNAL = 0.81; EXPRESSED IN ADULT LIVER, SIGNAL = 0.59; EXPRESSED IN BRAIN, SIGNAL = 0.61

SEQ ID NO: 11627 - DNA, 491 bp, Homo sapiens
  MAP TO AC006241.1; EXPRESSED IN LUNG, SIGNAL = 0.82; EXPRESSED IN BRAIN, SIGNAL = 0.58; EXPRESSED IN ADULT LIVER, SIGNAL = 0.6; EXPRESSED IN BONE MARROW, SIGNAL = 0.56; EXPRESSED IN PLACENTA, SIGNAL = 0.78
aaaattccgcaagctgtgacaaaaagattcatgatgattgtgataacgatagctggtgtttattgattaggcactctggagaatctcatttttcctcatgacagttctggaaagtgagaattacttaagcacagagagttcaagtgacttggccaaggttacacagctagtaaggaacgaaccaggaatcacacttagattttgtctgtttcaaaaaccaacacccatcatcagtcctaatcaccgtgctgtggcagagatggccttttactaagagactgtgagatgttcctaattgttttttctttccttgttcagtgtgacaacatctggggtgatggaaagtatgaagaaagtcaagaaggtgaccaacggctccgtggagccccagggcgagtgggaaggcgccgtgtgacagagccgaccctgaggatggcactgtccaaggaaactgttaacttattcatagtcctattggacagcaggagcag

SEQ ID NO: 11628 - DNA, 498 bp, Homo sapiens
  MAP TO AC004957.1; EXPRESSED IN BRAIN, SIGNAL = 0.58; EXPRESSED IN ADULT LIVER, SIGNAL = 0.63; EXPRESSED IN PLACENTA, SIGNAL = 0.63; EXPRESSED IN LUNG, SIGNAL = 0.66; EXPRESSED IN BONE MARROW, SIGNAL = 0.66
ttgccctttcttatattcatcacatattgtcttattcagattattgtcttgtgccttagcaaaactccatgggaagcatttatgaattactataagggatatacaaaacagaaggcaatgtttttataggtaaggaattcttttctttaaattaagtagaaaactacgtggctacagctctagggagctcatccaggtctctgtgatgtcttcgatttcgtttcttcttcatttcctgcatgtgcttccactttgggccccccttgtttctctgtctccgcttctccctgtgccacatctgttcgcagtactggtcgaggctgaagtttgggctgctaaggatttggatgtagtctttgtatctcaaccgtgactcagccaatagatccttgaccttcccctcctcatgctctgccctctgggtattttccatctgttcattctcaatgacattcaaagtcagcttcactatggtgtggatgaaagtgtgctcctggg

SEQ ID NO: 11629 - DNA, 437 bp, Homo sapiens
  MAP TO AC004849.1; EXPRESSED IN PLACENTA, SIGNAL = 0.67; EXPRESSED IN ADULT LIVER, SIGNAL = 0.62; EXPRESSED IN LUNG, SIGNAL = 0.64; EXPRESSED IN BRAIN, SIGNAL = 0.68; EXPRESSED IN BONE MARROW, SIGNAL = 0.66
ggctttgaggagtagagtacaaggttactactcaatgtaaagcaaaattcactgtgagactagtctgtttttaacacagtctaagaggattttgtatgttaatgagaatctccttagaaggcattatactagctacacgaactctgaaacctggcttactagtatttggcgatgtctgtaacagtttagagaatccaaaaattggtttagtaaatttgtttttacatattaaagtgtaaataactttggttttcttatttttgttaatccaaatacagcttgtatctgaacatgcctttgaaattccagacaatgttagacctggacaccttattaaagaactttctaaagtaattcgagcaatagaggtaagagtggaaactgtcatgtaaatgcttgattattatctgctttgagaagcaaatggatctattcca

SEQ ID NO: 11630 - DNA, 487 bp, Homo sapiens
  MAP TO AC004804.1; EXPRESSED IN BONE MARROW, SIGNAL = 0.81; EXPRESSED IN PLACENTA, SIGNAL = 0.91; EXPRESSED IN LUNG, SIGNAL = 0.81; EXPRESSED IN FETAL LIVER, SIGNAL = 0.73; EXPRESSED IN ADULT LIVER, SIGNAL = 0.9; EXPRESSED IN BRAIN, SIGNAL = 0.8
caaactgtggatttagaggggaaaaatcagactatggtagatcaccttaatactaaaaatataaaatatctgtaatcattgttcattgttgtattaatgagttacttcgaaacttagcagcttaagaaaacagtgaatactgattatctcacacagtttgtgtgggtcaagaactcaaaagcagcttagctaaacagttctggtgccagggtctcttatgaggtggtagtcaagatgtcaaccaggattcagtcctttgcttccacttacatggctggcaaggtggtgcagctagtggcaagaggcctctgttcctctccaccgggctgcttgagtgtcattacaacacggaggctggctctcaccagggcaagtgattcaggagtgcaaggcagttgcatcagtatcttttgtgatgtagcttcagaagccggcgccatcacttctgccttcttgtacggttcatacagaccaatcctgacagggt

SEQ ID NO: 11631 - DNA, 470 bp, Homo sapiens
  MAP TO AC002044.1; EXPRESSED IN BRAIN, SIGNAL = 0.67; EXPRESSED IN PLACENTA, SIGNAL = 0.8; EXPRESSED IN LUNG, SIGNAL = 0.83; EXPRESSED IN BONE MARROW, SIGNAL = 0.81; EXPRESSED IN ADULT LIVER, SIGNAL = 0.71; EXPRESSED IN FETAL LIVER, SIGNAL = 0.82
gaccccagttgagggtggcggagggctggggggtgcctcagctgtggccgtgaccatgagcctggtgtctgactctctccttctctccttccctgcagtgggcggtgagatccccctagacatgcggctcgggggcgggcagctggtgtcagaggagctgatgaacctgggcgagagcttcatccagaccaacgacccgtcgctgaagctcttccagtgcgccgtctgcaacaagttcacgacggacaacctggacatgctgggcctgcacatgaacgtggagcgcagcctgtcggaggacgagtggaaggcggtgatgggggactcataccagtgcaagctctgccgctacaacacccagctcaagtccaacttccagctgcactgcaagacagacaagcacgtgcagaagtaccagctggtggcccacatcaaggagggcggcaaggccaacgagtggaggctcaagt

SEQ ID NO: 11632 - DNA, 498 bp, Homo sapiens
  MAP TO AC004811.2; EXPRESSED IN LUNG, SIGNAL = 0.99; EXPRESSED IN BONE MARROW, SIGNAL = 1.1; EXPRESSED IN ADULT LIVER, SIGNAL = 0.95; EXPRESSED IN PLACENTA, SIGNAL = 0.9; EXPRESSED IN FETAL LIVER, SIGNAL = 1.1; EXPRESSED IN BRAIN, SIGNAL = 0.81
tcaaactccattaatctgtgcctctaacttactgagggataatattctaaaggccacataaacacagagtttgataaatgacccagttctacacaaacaattttaaggcagaattattactcaaagacagctacatcattagcctttactactcctgtagataattaaagcctttatttatgtaatttacagaagcttctttgggccagaacaatctcagatctctcttgagtgtttcataatcccaacatcccaaattaaggaaaacagccctacttacagttacgaatgttgttccagtcaattttagagaagaaaggatggcagcaaagaccttcaaacttcagtctctctttctggccgcacaacaagctttgaatcagatcaagaaagtcactgctcactttggggtcatctggaaatttcaaaaaccgctgttccaaaaaaaataagagaattatttccttagtagggattccgtttctcatgctgcaaagt

SEQ ID NO: 11633 - DNA, 367 bp, Homo sapiens
  MAP TO AC006324.2; EXPRESSED IN PLACENTA, SIGNAL = 0.58; EXPRESSED IN ADULT LIVER, SIGNAL = 0.73; EXPRESSED IN LUNG, SIGNAL = 0.67; EXPRESSED IN BRAIN, SIGNAL = 0.65; EXPRESSED IN BONE MARROW, SIGNAL = 0.56
aaacaaagttgacttcaaaacaaggaagattaccacaaatatagcattagataatgacaatggggtcgatttttaaagaaaacataacagtcctaaatgtgtatgtacctaaccaaaggccatcaaaatatatgagacaaaaattaatataaatgaaaggagaaacagggagtccactatgagagttggagactccaaaatccatctgccagtgattgaaaaaccaagcaagcaggacatcagtaaggatatagttgactcgaatagcaccacgaatcagtttaacctaattgacatttatacaatagtccatctaacaagagcaagcgatatgttcttctcaaactcacctggaacagtcatcaag

SEQ ID NO: 11634 - DNA, 469 bp, Homo sapiens
  MAP TO AC004770.1; EXPRESSED IN PLACENTA, SIGNAL = 1.3; EXPRESSED IN ADULT LIVER, SIGNAL = 1.4; EXPRESSED IN LUNG, SIGNAL = 1.3; EXPRESSED IN FETAL LIVER, SIGNAL = 1.7; EXPRESSED IN BRAIN, SIGNAL = 1.2; EXPRESSED IN BONE MARROW, SIGNAL = 1.1
gctcagggaggttaagcaacacagccaaggatcacacagttagtaaatggcagagcaaggacttagtcccctgaactcttaggcactatcccatggcacctcctcctgtcatcctcattgtcgtggtatctttgcctaggactgtggacttcccacagctacctcagtgggaggtccttgagcctgagagggcccttgtctccagtagcattggggtgcagatgagaagaataacagctcctcttcctcttctgcagaaagagctgacagatgagttccgggagctgcgggccacagtggagcggatggggctcatgaaggccaaccatgtcttcttcctgctgtacctgctgcacatcttgctgctggatggtgcagcctggctcaccctttgggtctttgggacgtcctttttgcccttcctcctctgtgcggtgctgctcagtgcagttcaggtgagagcctttgg

SEQ ID NO: 11635 - DNA, 488 bp, Homo sapiens
  MAP TO AC000005.1; EXPRESSED IN BRAIN, SIGNAL = 0.65; EXPRESSED IN PLACENTA, SIGNAL = 0.58; EXPRESSED IN LUNG, SIGNAL = 0.49; EXPRESSED IN BONE MARROW, SIGNAL = 0.55; EXPRESSED IN ADULT LIVER, SIGNAL = 0.54
acggaggagaaatggcaagacacattaagctttcttaatgtgggttctagtaacataggtttttatgttctcagcaagacagggttcttgtaagccaggcattggtaagagataatcttcaaggttcctttagctctgattaccatataaagacctgggcctgcaggtctgatctttgaggttcttataatccagaaaactcaggacactgcatgccagtgtcagcttcaaggagcaagggaagctcagttcttccagtcctggggcacgaggaggaggagggagggcgaggaagggaagcctagcggccgcacacttgtcatagtctctctcacagctaacattgtggagcgggagcctctgcaaaatgggctttttttctgccccctgcttggaatcattggaggaggccccatttcagaatgggagtgtgggtgggtactgaaggaacacacgtggctggaggaaggtgggatggatgagcacac

SEQ ID NO: 11636 - DNA, 466 bp, Homo sapiens
  MAP TO AC004816.1; EXPRESSED IN PLACENTA, SIGNAL = 1.2; EXPRESSED IN LUNG, SIGNAL = 1.3; EXPRESSED IN FETAL LIVER, SIGNAL = 1.2; EXPRESSED IN ADULT LIVER, SIGNAL = 1.2; EXPRESSED IN BRAIN, SIGNAL = 1.4; EXPRESSED IN BONE MARROW, SIGNAL = 1.4
ataaagcccccttggttcagtgttcaattccatgtcctgctcatcacaccattgaacctttgtgtccctgagactgagacaggaggcctggggtgaggggaaagggccagattcttattcctgccacctcatttccatttcctgtttctcttccactcttgtcatcttcacagaggatgaggacagtgaaggcccagggagtggagagagtcgcctacagcattcacccagccagtcctacctctgtatcccattccctcgtggagaggatggcgatggcccctccagtgatggaatccatgaggagcccaccccagtcaactcggccacgagtacccctcagctgacgccaaccaacagcctcaagcggggcggtgcccaccaccgccgctgcgaggtggctctgctcggctgtggggctgttctggcagccacaggcctagggtttgacttgctggaagctggc

SEQ ID NO: 11637 - DNA, 464 bp, Homo sapiens
  MAP TO AC006251.3; EXPRESSED IN FETAL LIVER, SIGNAL = 0.99; EXPRESSED IN PLACENTA, SIGNAL = 0.98; EXPRESSED IN LUNG, SIGNAL =   1; EXPRESSED IN BRAIN, SIGNAL = 0.77; EXPRESSED IN BONE MARROW, SIGNAL = 0.94; EXPRESSED IN ADULT LIVER, SIGNAL = 0.93
gggagcaatagaaaccacaaggaaggaatgattctatttaaaaaagaaatttggaaagagaatcaaataacacttctagaaatgaaaatgtggagttaaaaccacaatgagatgtgtcgccaaactgatcagatgcaggagaagagagaactaatgaattgggaaataaatatagggaaattacccagaatataaaagagatgttaaaaaaatagaaaatataatagaggggttgagttagtatgtgttcaccttcaagaaaccagcagttgcttaaaccattagtagtttcaggattggttcaccactcagtgttttaatcagggccccagagtgtctcctctccatgctcaccatctttaatctgttggcttttgtccccatacttgttcctgtgtggctggttccttttagctgccaaactttagacatcacttccacctgcagggcaggaagaagaagaa

SEQ ID NO: 11638 - DNA, 481 bp, Homo sapiens
  MAP TO AC004861.1; EXPRESSED IN BONE MARROW, SIGNAL = 0.77; EXPRESSED IN LUNG, SIGNAL = 0.43; EXPRESSED IN BRAIN, SIGNAL = 0.58
tgttgaacagtaggtattacgaggtttataatgtatgtcttaaaatctgtatgtgagaaataagttctataagatgctgaaacagtgactacatgtttacatccatgccatatggaatagctaccatgttttatcagaaataagtgcagtggcagaccaaagctggtgagaaagaaggatgcctgctaactccctgctaactaaatacaacagattaaccctgtttcctttcttcgtaagcttccttaaagctaatcaagcccaaatctataattaattaggtgacatttaacttcttgagtgcttactctgtaccttttagtctctgttgtagcggcttttggtagatattaaaatcttggcatctttgcttgatatccttacgtgtcctctctttttccatatatgctgcattaacaatttcctgcttcactgctccttcctataaaacagttgtaaggttttgcagtcttacagcaga

SEQ ID NO: 11639 - DNA, 380 bp, Homo sapiens
  MAP TO AC005063.1; EXPRESSED IN FETAL LIVER, SIGNAL = 0.8; EXPRESSED IN BONE MARROW, SIGNAL = 0.83; EXPRESSED IN LUNG, SIGNAL = 0.68; EXPRESSED IN BRAIN, SIGNAL = 0.86; EXPRESSED IN ADULT LIVER, SIGNAL = 0.82; EXPRESSED IN PLACENTA, SIGNAL = 0.99
agcacatcactaaaaccagcctgtactcaaggggaagaggttacctaagagcatgaataccccgaagcagggatcattgggggttaattttagcagctacctgctgcactacataaggtcaatatcattgtgaataattaattcattggtaatccaactctactatttggttggttataagtattgacttcaaaactatgaaagttactttaattggaagtcttatatcattgtttgtttctctttttctttattttccagaataacctgggtatcttgtggtctgaaagagaagaaattgaaactgcacaggcttacctagagtcatcagaagcactatataatcagtatatgaaagaggtatgttacatgtcagatga

SEQ ID NO: 11640 - DNA, 481 bp, Homo sapiens
  MAP TO AC006375.2; EXPRESSED IN PLACENTA, SIGNAL = 0.7; EXPRESSED IN LUNG, SIGNAL = 0.57; EXPRESSED IN BRAIN, SIGNAL = 0.73; EXPRESSED IN ADULT LIVER, SIGNAL = 0.68; EXPRESSED IN BONE MARROW, SIGNAL = 0.62
ttcacaaagacggttctcccactttaaaggagcaaagccaccttcttctgagaaggtcaccgttttctgctgggaatgaaatttcaggagggactttcctgaaatggtaaaggagaaaggagcagcccagtctggacagtcagaacaactgaataaaccctggttatcagtggggaaagaggctgtcaccaggtcattttcacatcttacaaaggaatcttcaaggaagagcagagagatagcagataagaaagcatgcaaaggtggagagcataacttgaggaaaaatgaagaagaagaaagcaggcgactatcaccaggtagaaggaagaggccaggagggtgatgtggaagacgatgggttacagaagacagataaagccacagtaattatcacagagcagggtaggcaaactatacccagttccaaaccagcacaatacctctttatatattaaaggtttatgtaaatgcagccaca

SEQ ID NO: 11641 - DNA, 488 bp, Homo sapiens
  MAP TO AC004911.1; EXPRESSED IN PLACENTA, SIGNAL = 0.62; EXPRESSED IN ADULT LIVER, SIGNAL = 0.66; EXPRESSED IN LUNG, SIGNAL = 0.73; EXPRESSED IN BRAIN, SIGNAL = 0.63; EXPRESSED IN BONE MARROW, SIGNAL = 0.59
catgttgttgccattgagttctacattgttcttgtagtactcaggaatctttaattacagtgtttaatattgattggaattacctatttatttatgttgcatagtatcacacattcttagagcttcagtactcaacaaaatgtgttgaattaatgaataaatcaataaatcaataatctccttgtgatctggggagggaaaaggaaaaaaaaaatccccaaacacatgccttcggagtagagattgacaagatgatgggttaatgacagcagagttaagagagtgattgaagagattctgcttccatttaacatgtggaattttaccaaagaaaattattgccacactgacaagaaaaagttggatatcttccaaaatcatgattattttaagcccatcagagagctgatgtcacaaaataaccaaatgaactaagaagaatgacagcccctactagaaaataaaagggcatacaagagtttcgtctt

SEQ ID NO: 11642 - DNA, 466 bp, Homo sapiens
  MAP TO AC004686.1; EXPRESSED IN PLACENTA, SIGNAL = 0.69; EXPRESSED IN LUNG, SIGNAL = 0.55; EXPRESSED IN FETAL LIVER, SIGNAL = 0.77; EXPRESSED IN BRAIN, SIGNAL = 0.58; EXPRESSED IN ADULT LIVER, SIGNAL = 0.59; EXPRESSED IN BONE MARROW, SIGNAL = 0.58
ccccactacaatttgatggctctgcatcacttaggtattcgtttttctgttaagtgagtgattacaaaggaattaaaataaaattttacagatgagggaaaaaaatctttagtttcctccatatttgtctgccaatagaaacatttggtcacatctgaattttgtacttcagtgtactcatcaattttaagcactatttgatcataatgggaaaaagtattcttccattgaaaaataacattttgacccagtttctggagcaaatgcaaataattacaccaaactctgtgtactgaccactgagatactcaaggatgaggtagagttttccaccagtctgaaaggcataaattaaatccacgatgaagggatgctttacttcctccagaatattccgttctgcttttgtatgagctgtatctttagcatttcttactatcattgcctaaaggaaaagagatcatct

SEQ ID NO: 11643 - DNA, 468 bp, Homo sapiens
  MAP TO AC005015.2; EXPRESSED IN ADULT LIVER, SIGNAL = 0.68; EXPRESSED IN PLACENTA, SIGNAL = 0.64; EXPRESSED IN LUNG, SIGNAL = 0.53; EXPRESSED IN BRAIN, SIGNAL = 0.71; EXPRESSED IN BONE MARROW, SIGNAL = 0.71; EXPRESSED IN FETAL LIVER, SIGNAL = 0.73
gtccaccccaacctgtttccacccctcagtccatgcctgctccagggaggaccgagtctacatcccccagcccaccccgaccagggaggggtccgtctgaaactcacctctctcctgtggtcaccccaggcccagcctctgcagcatccagccctaaagaagggttcctccctccagcagcccacaccgtcctgaatcccaggctctgctgggcattcttcctgaaccaaatggaactccaaaccccacttctgtgccccctcctcccaaaccaggagaacagagtctctgctcagcagaggcggccggggaacccagggcaagagcggcccggatggcttaccctggaaagaacagagccagctccccatggagaagcccgtggccaggccaccaggcaggcagacaggtgctggcagccggacccccgccccgtcagatcgatcctggaccacgtcagggacatta

SEQ ID NO: 11644 - DNA, 417 bp, Homo sapiens
  MAP TO AC000097.1; EXPRESSED IN PLACENTA, SIGNAL = 0.9; EXPRESSED IN LUNG, SIGNAL =   1; EXPRESSED IN FETAL LIVER, SIGNAL = 0.98; EXPRESSED IN BRAIN, SIGNAL = 1.2; EXPRESSED IN BONE MARROW, SIGNAL = 1.2; EXPRESSED IN ADULT LIVER, SIGNAL = 0.79
ggtccaggccatacttcttgggaacgggaagcatacgggtaggggaggcatcagtcgtgactttaggcttgtaagttctcagaccaaaacgtgcacatccacacacatggcaccgcagccaagcagaggccggtgaaaggcatcagagtttcagactctcgggttgtccttgtaatccatattgcaatttcactatccacagaaacacgaccctcctctgagtagcatcccttgtctgcattataagaaaatgaaggacaacgaggaacgggagcaaagcagtgacctcacccctagtggggatgtgtcccccgtcaagcccctgagccgatctgcagagctggagtttcccctggatgagcctgactctatgggtgctgacccggggcccccggacgagaaagacccactaggggc

SEQ ID NO: 11645 - DNA, 464 bp, Homo sapiens
  MAP TO AC005209.1; EXPRESSED IN ADULT LIVER, SIGNAL = 0.89; EXPRESSED IN PLACENTA, SIGNAL = 0.9; EXPRESSED IN LUNG, SIGNAL = 1.1; EXPRESSED IN FETAL LIVER, SIGNAL = 0.85; EXPRESSED IN BRAIN, SIGNAL =   1; EXPRESSED IN BONE MARROW, SIGNAL = 0.98
cacttctgccattaaaagtcattgagttgcacaacatgtgagtgcacgtaacgccattaactgtccacttaaaaagggtttcagatggtaaattttctgttacgtcttaccacaatttttaaaaattatgtgatgctaagaccagtcccccctctggctgccttcctgacaactatttactgctaacagagctaagcagatgcctgtattgagggggggctccttccttcccactagaacattcacctggtggccaagtggctcagcaccctggagaagaagctggaggagcacagtgagaacagccacccagagttcagggtcttcatgagtgcagagccagcaccctcccctgagggccacatcatcccccagggcatcctggagaactccattaagatcaccaatgagccccccacgggcatgcatgccaacctgcacaaggccctggacaacttcactca

SEQ ID NO: 11646 - DNA, 472 bp, Homo sapiens
  MAP TO AC005077.1; EXPRESSED IN FETAL LIVER, SIGNAL = 0.67; EXPRESSED IN PLACENTA, SIGNAL = 0.85; EXPRESSED IN LUNG, SIGNAL =   1; EXPRESSED IN BRAIN, SIGNAL = 0.76; EXPRESSED IN BONE MARROW, SIGNAL = 0.69; EXPRESSED IN ADULT LIVER, SIGNAL = 0.75
tccattcttccactccaaggagcttattgtctaaatttgagaactaacacaacccaaagaatataatcagaagttaagacatacacaaaatgaagaaactattgaaagctgttcattaaaggttgactgagaagaagaggagaaaacatccttttccttaattttaaactgacttgctgataggtcaaagcagaaatttaaaaaaatgtatctggacggtgacagaagtatgtatccagtcacgtcactgttcaactacccctagttaagtccttttaccgctccgccagctcccagtcctcctgaatctccttctgcctggctttgtggtactcttccctccagcacttggagcagaaaccctgccaggcagggttgccgtagtaaccacatccttccttgcacaggaggtctgactgatgcacatgaattcctcagtgttcagacttaaggctcatcttcttcctgctaa

SEQ ID NO: 11647 - DNA, 458 bp, Homo sapiens
  MAP TO AC003119.1; EXPRESSED IN LUNG, SIGNAL = 0.57; EXPRESSED IN BRAIN, SIGNAL = 0.55; EXPRESSED IN BONE MARROW, SIGNAL = 0.55; EXPRESSED IN ADULT LIVER, SIGNAL = 0.46
tgggtacacctgcatagctggttgtcatggcaatgactggagtaaaaaaagttagtcaaaagcaggtgaagcggggatcaagaaatatcaaatacaggagttggggtgaggggctgaagtgtcccctggaatattatctgccagcagtctcttttcctctgagtatggagaggaggaagcttggggatgctgcatctccacacacaaaggccgccatctttgattcttgtggagcctctcagagcttttccatctgctgttttatctgttcctcacagaaatcctgcaggaagacggggtgggggtgaagaaccctatcgtgcaggtgaagaaacgtgttcaaaaccttacactactaggtaagggtcacatagagtattggtagcagcactaagctcaggtttctagaattgattctcaacagtagtccactaactacttgcatcagaatccccaaa

SEQ ID NO: 11648 - DNA, 495 bp, Homo sapiens
  MAP TO AC004228.2; EXPRESSED IN PLACENTA, SIGNAL = 0.73; EXPRESSED IN LUNG, SIGNAL = 1.6; EXPRESSED IN FETAL LIVER, SIGNAL = 1.1; EXPRESSED IN BRAIN, SIGNAL = 0.84; EXPRESSED IN ADULT LIVER, SIGNAL = 1.1; EXPRESSED IN BONE MARROW, SIGNAL = 0.68
atccattcatccatcacgagatctttgtgttgtttctacctttttcctgatgtgaatagagctatgaacacagggtgtataaaatgcaagcttttgagtcaaagcctttctctgtcactcttacctagctgtgacaaatatacaggccccagggctgtgtggggcatgtggtaacagcagctattgtagggactcctggagggtcgaggcttgtggcttggccccctcttgccacagcttctctgggttgtgcattggctgttgaaatggcagctcgagacatatgttccctccagagtggctggtggctgactcctttccctgtgctcttggtcaacagtcaaagatcactgaggacttccgggccctgaggaagacggctgaggacatgaacctgttcaagaccaaccacgtgttcttcctcctcctcctggcccacatcatcgccctggagagcattgcatggttcactgtcttttactttggcaatggctg

SEQ ID NO: 11649 - DNA, 491 bp, Homo sapiens
  MAP TO AC006347.2; EXPRESSED IN ADULT LIVER, SIGNAL = 1.3; EXPRESSED IN PLACENTA, SIGNAL = 1.1; EXPRESSED IN LUNG, SIGNAL = 1.1; EXPRESSED IN BRAIN, SIGNAL = 0.92; EXPRESSED IN FETAL LIVER, SIGNAL = 1.5; EXPRESSED IN BONE MARROW, SIGNAL = 1.2
ggttcaagtttggcagacaggtttaaatgtcaaatccaacactagagacaataccatttatttcagttaaggaatatagactttgccaccaaataattacatatttttcattcctgtatgacatggatgcctctatttgcatgacctctgagtatgaagtaataatatattaattttcaacaactgatctgtctgaaaaatacaaagaaacagcaaaatggtgatattaaaactgactcaccactgtcctctgtttgttgggcaggaagactctaacgataggtttttgtggtgacttggggttgctccgtgccacatctgtgggattttgaaaaactgaaagagatgaaggtagcactgaaaggctagaagaggaagaagatgtaacggtatccattgatgcagagctagaaacagaaaaatcagttccgttccccagagattccaataactgttgttctctttgttggagtgcatctagcttgctggtg

SEQ ID NO: 11650 - DNA, 484 bp, Homo sapiens
  MAP TO AC005215.1; EXPRESSED IN PLACENTA, SIGNAL = 0.63; EXPRESSED IN LUNG, SIGNAL = 0.55; EXPRESSED IN BRAIN, SIGNAL = 0.63; EXPRESSED IN ADULT LIVER, SIGNAL = 0.53
tgctgaagttgagaaaccttgttctagaccattctatttcaatgtcctagggactctggccttatattcatagacatcatgtcacaggcttgagtaacttagtctctatggcatttcaatcagctcctcttttaaaagaagagcctttgacaataatcagtgtgttttaaaactttgtggaccatacggtagtttgccctgacccaaattaaatctctcatctctcccacccaggcccccagattccccattttggccatggtccttcagaagagtccagagagcctcaaggcactacaggctgttcagtgcgtgcaagaaatctgtggttaatcacttcaacctgctttacttcaacagattttcggagacctgtttattgttccactgcttggctactctggagttatctatgaccgaagtcttacatttgtttgcagagcagaagaaggtatatttttattctcacatcccttccaagtcc

SEQ ID NO: 11651 - DNA, 476 bp, Homo sapiens
  MAP TO AC006354.2; EXPRESSED IN LUNG, SIGNAL = 0.49; EXPRESSED IN BRAIN, SIGNAL = 0.65; EXPRESSED IN BONE MARROW, SIGNAL = 0.55; EXPRESSED IN PLACENTA, SIGNAL = 0.7; EXPRESSED IN ADULT LIVER, SIGNAL = 0.57
gaaggaggcagaattaaaaatatgtagaaagaagacctaaaatcattcttaggttttcagcttagataactgatttcaagagactcaaaggttgtttagagatcttaaattgcacacagatgatatctggagagatgagaatcaagagcaaagagaaaaaccagacagaagtaatggcaatgggcctaataaataatatttgctatgtgaagatattagagactagacatttctagttaaaactcaaacctaagtgagttcctaatgcttttctaatgttcacaactcagggagcccagaagaaccttatgaactccaggagaaaatgtagtcttatgccagaactgacgctgctgctgatgataatctggatacatttgaaggggtgcagggaaattacactgggtgcctctctgaacatcctgagaagcacaacctactggtagctaagtgccccacatggaagcacactcagc

SEQ ID NO: 11652 - DNA, 459 bp, Homo sapiens
  MAP TO AC006388.3; EXPRESSED IN PLACENTA, SIGNAL = 0.76; EXPRESSED IN LUNG, SIGNAL = 0.72; EXPRESSED IN FETAL LIVER, SIGNAL = 1.7; EXPRESSED IN ADULT LIVER, SIGNAL = 1.5; EXPRESSED IN BRAIN, SIGNAL =   2; EXPRESSED IN BONE MARROW, SIGNAL = 0.7
tggaacacacgtgataagcctgtgtccttttctggggaggaagccagggttcagacaccgttgatccattgatccagccgcacttttccctcccttgtgtgtgctccacctccagcccccttcccccagcccacacaaagtaatttccttctgttcatcatgttactcaacagagctctgttctagtgtctcaaagatacagttaacccagtggacaccatctgtaccataacaactctgttctttcctcctggcaggtgacagagctgaatgagccactgtcgaatgaggaacgaaaccttctgtctgtggcctacaagaacgttgtgggggcacgccgctcttcctggagggtcatcagtagcattgagcagaagacatctgcagacggcaatgagaagaagattgagatggtccgtgcgtaccgggagaagatagagaaggagttggaggctgtgt

SEQ ID NO: 11653 - DNA, 479 bp, Homo sapiens
  MAP TO AC005219.1; EXPRESSED IN ADULT LIVER, SIGNAL = 1.4; EXPRESSED IN LUNG, SIGNAL = 0.61; EXPRESSED IN FETAL LIVER, SIGNAL = 1.8; EXPRESSED IN BRAIN, SIGNAL = 0.67; EXPRESSED IN BONE MARROW, SIGNAL = 0.69; EXPRESSED IN PLACENTA, SIGNAL = 0.76
ctggaggcaaggaacatacactgaggtgagatgctgtaagaggagtgctgggaatcgcgcggacagcatccacgcgaatacagaaaactgggctgtgtccgaggggagctaatatagctgggcaactccgcaaagagcaatgtgtcctcacattccttagtgtggtgcattcaaaaccaacagctcccaattcactctgcaatcagtcacataggcacagtttaactatcacaattacatgttattctcatcattgtttagaacagtttttcttctctccaccaactgccacatgaagaaaaggactggctgcagagtcagtggggatgcgacacttacctggaggctgcagaacattggtgatgacatggaccacgccatttgtggccatgatgtcaggctcggcaacaggctccttgttgacactcaccacattgtttttctaaaagaaaaacagagtagtggttgaaagtagagca

SEQ ID NO: 11654 - DNA, 486 bp, Homo sapiens
  MAP TO AC003667.1; EXPRESSED IN FETAL LIVER, SIGNAL = 0.74; EXPRESSED IN BONE MARROW, SIGNAL = 0.78; EXPRESSED IN LUNG, SIGNAL = 0.83; EXPRESSED IN BRAIN, SIGNAL =   1; EXPRESSED IN ADULT LIVER, SIGNAL = 0.85; EXPRESSED IN PLACENTA, SIGNAL = 0.8
caagtatctctctgcttaatgtcccttaaaaggatatttgtgattgtatttagattcgacctgggtaaaccaggataatctcctcatctccacatccttaacttaattacatctgcaaagactcctttttcctatatccagagataaggaactgatatctctcattattcagcttaccacatcaaccaactttaaattataaagtagtactctttaacgatttgattcatcacacacccacatcactgattaataggattcatttggaagctacaagttttaaaatagatttggttttcaccaattcagggggaaaatgaattccataaatggaaacacttcatgggaaacacctgatattgagggttatgtcatcatcaacttaaataccacagttatttcaacagctgagtcagtgcttatgaaacatattagctggaatgcaaccaagaccataagcttctgaatcactaaattaagagcatc

SEQ ID NO: 11655 - DNA, 496 bp, Homo sapiens
  MAP TO AC005225.2; EXPRESSED IN PLACENTA, SIGNAL = 0.66; EXPRESSED IN LUNG, SIGNAL = 0.8; EXPRESSED IN BRAIN, SIGNAL = 0.68; EXPRESSED IN FETAL LIVER, SIGNAL = 0.68; EXPRESSED IN BONE MARROW, SIGNAL = 0.63; EXPRESSED IN ADULT LIVER, SIGNAL = 0.64
ttcaagttcctgggttcctcaagtcccttaacaggagacacctccctggctgtgaagacagaaagctctgccaatcccgaaaagaagctgaagaaatcaaagccagccagcaccgtccgggaagcaccccgccctctcatccatcatccctgcatgcatccagatatgctgggtcggccaccttctctagatgtgaacctggaggaaagagaagcctggcttctgcctcctgagaaggaggccagagcgtgggaggccactgtgctggaaaagctgaacgagcgcacagcccgatggatccagagcaagcgtcctcgaaggcctggggcatcccccaacaagtggcagagcttcctgcgccagcagtacgactggagtcacattcgggatgagcttacctctgccagtgacctggagctcctgaaacagctggaggcagaagagacagcagagtttgaggatcaaagtgtcatcctgcccccacaggaaaagaaga

SEQ ID NO: 11656 - DNA, 481 bp, Homo sapiens
  MAP TO AC004977.1; EXPRESSED IN PLACENTA, SIGNAL = 0.85; EXPRESSED IN BRAIN, SIGNAL = 0.74; EXPRESSED IN BONE MARROW, SIGNAL = 0.68; EXPRESSED IN ADULT LIVER, SIGNAL = 0.79; EXPRESSED IN LUNG, SIGNAL = 0.79
tagtctcctcccccgatacccacactgacccggggttagggacatttataaatggagccattgaggactcaggagaaactcatgcaactgaaaaatgtcccctatttcctgggtcctaggcagctccccactttccactcccacttcagacatttagacaaggactttggtcactctggctagaccatctgtgtaacccagaatggtggggtcacaactcttggtttccaaggatataatcacatgttgtgagcaaaaatgtgctgaacacacctgactctgtggcttcttcttgagaagtgattttgcagagcggggaagggtcgactctggaaacgtttcatttgtctattggccatttggatttcttctgtgaagtgccttttcatgactatcatctatattctcttaagtttgtccttgttattgatttgtagttctttatatatccctgataacaaggcttgctttttcatgctct

SEQ ID NO: 11657 - DNA, 465 bp, Homo sapiens
  MAP TO AC006262.1; EXPRESSED IN PLACENTA, SIGNAL = 0.64; EXPRESSED IN LUNG, SIGNAL = 0.71; EXPRESSED IN BRAIN, SIGNAL = 0.78; EXPRESSED IN ADULT LIVER, SIGNAL = 0.63; EXPRESSED IN BONE MARROW, SIGNAL = 0.81
gagaaaattaagtttgaagttcagaggtaccttagggataacattaggcattagctcagcttggggctggggatgacttaccgaagattctgggcaccatggtttaggcttcagagcagcagatgagagagcagcagtggaaatgggtcagtgactttacacaggagattattatagggtatgaacttacccatatttagggaggtgtgcagaaggagtggtttcttaaaaagggtggggcatgaaaagccacagaaagcataacaaaataaaagcattgacacattagtaggatgctactggacctgttccagggctgtcatgttctcagacagctcaaaactcagggcatgaaggacattttctccggtattcactgtgagaacctcatagggttcctggaggtaaaactcttagaaaagtgcagaggctccccttagactgggccccctggaatttttaatt

SEQ ID NO: 11658 - DNA, 472 bp, Homo sapiens
  MAP TO AC005015.2; EXPRESSED IN PLACENTA, SIGNAL =   1; EXPRESSED IN LUNG, SIGNAL = 0.87; EXPRESSED IN FETAL LIVER, SIGNAL = 0.78; EXPRESSED IN ADULT LIVER, SIGNAL = 0.8; EXPRESSED IN BRAIN, SIGNAL = 2.5; EXPRESSED IN BONE MARROW, SIGNAL = 0.78
gccctgcatctgtataaccctccttaacttccagagaaaggcttagggttccaataaatcagttatataaaaacagcaataaaggtaaatggctcaattttccctattaaaagatatgcactttcttctttgttcaaaaatcccaaactggaactagagtaagtcaggggcagaccagaacacctggatctcttacatcctcacccctcccaaacgcacaccagagaatccccttctgcagccccaccctcaccaggccactgcggctgggccgaccccccacggaggaggccacagagctgacggagctgatggaggaactgctgggactgtgggtcagtgctgacacacccatggccatacgcttggtcttcttggccttggctgggctggtagatgggaagccgatacggatcactttgtggatgggcgcgaagagaccaaacttgggtgggcactggaagtacctgtg

SEQ ID NO: 11659 - DNA, 392 bp, Homo sapiens
  MAP TO AC005875.1; EXPRESSED IN BRAIN, SIGNAL = 0.72; EXPRESSED IN BONE MARROW, SIGNAL = 0.61; EXPRESSED IN ADULT LIVER, SIGNAL = 0.75; EXPRESSED IN PLACENTA, SIGNAL = 0.68; EXPRESSED IN LUNG, SIGNAL = 0.82
aaaaacttgggtgggaaaaaatgtttgaataagttttacctttaacaaattcaaatatttatcataagtgcacagaaaagccatactctctaatagttcttgtaaaaatattaatattaaagtaaaatcttagacaagttctttcaaactattttcatttgaggaatgtttgagcttccaaatataaaaaaacttgcatatgttaatgttaaaacaaacagatttcaaatattttgaaaataacattggttaaggtctaccttgtttttcacttcgatgtctgcaccacgtgacagcagttttgccaccactgacaaattctcactataaacagcataatggagagccatgttgccatacacatctacaatatttggactgggaccagaatc

SEQ ID NO: 11660 - DNA, 481 bp, Homo sapiens
  MAP TO AC005020.1; EXPRESSED IN LUNG, SIGNAL = 0.83; EXPRESSED IN BONE MARROW, SIGNAL = 0.58; EXPRESSED IN ADULT LIVER, SIGNAL =  13; EXPRESSED IN PLACENTA, SIGNAL = 0.7; EXPRESSED IN FETAL LIVER, SIGNAL = 3.5; EXPRESSED IN BRAIN, SIGNAL = 0.62
atttcagtccctggggtgaggatggtcttgaatatctcctacattcataactcctccacacatctcagtaggtcactgagcacatcaatggacatgccagttattaaaatacttcacgaatactatgatcatttaccagtatgagttattctctggagcttctaatacttcaatagtactgcatggactcagttgagagttaattcaaaatctcagattatccaattctgtttctttccttccaggcaccacctacctatgatgccgtggtacagatggagtaccttgacatggtggtgaatgaaacactcagattattcccagttgctattagacttgagaggacttgcaagaaagatgttgaaatcaatggggtattcattcccaaagggtcaatggtggtgattccaacttatgctcttcaccatgacccaaagtactggacagagcctgaggagttccgccctgaaaggtacaagtc

SEQ ID NO: 11661 - DNA, 490 bp, Homo sapiens
  MAP TO AC006212.1; EXPRESSED IN PLACENTA, SIGNAL = 0.85; EXPRESSED IN ADULT LIVER, SIGNAL = 4.7; EXPRESSED IN LUNG, SIGNAL = 0.79; EXPRESSED IN FETAL LIVER, SIGNAL = 2.4; EXPRESSED IN BRAIN, SIGNAL = 0.76; EXPRESSED IN BONE MARROW, SIGNAL = 0.78
tgagcaaacgctattgatgggtgtgtgatacaggcaagaaagaggtgtcagatgaacacttctcagaatattatatatttgaattgaggttacgccaattaaaaaaaggggttttcctggcaatttactaaatacatagttctcattgctaatcatcaaagacaaaaatatatctccattcctctggcaagagagtactatgtagtgattaagcgtttgtctccggaccagcctccctgggtttaaatctcactgccatcatctacttattcggtgcctttggacagtgtatccaatgcctccagtttctatgtcctcatttatgaaatagccacagtaatagaacatagcaagcactgcataaacactatggtcttcctcatcaccatcctcatcttcatcctcaccatcaccgtcgccaatcagagcaatggaaaagcacattaaataaaattagtgaataactttcgctgcagtatgatgacatttt

SEQ ID NO: 11662 - DNA, 482 bp, Homo sapiens
  MAP TO AC005704.1; EXPRESSED IN PLACENTA, SIGNAL = 0.72; EXPRESSED IN LUNG, SIGNAL = 0.71; EXPRESSED IN BONE MARROW, SIGNAL = 0.68; EXPRESSED IN BRAIN, SIGNAL = 0.69; EXPRESSED IN ADULT LIVER, SIGNAL = 0.78
gacgtgggattgcaagagaggctctttccactggatataagttagtccagtaaacccaaggataacagctcctcaaataattggaatttgaatatgcagaagctgattggccattggttccatcctctgcccatttctgtcccaagaccagggcaggctaagactggggttgacatttttggggagaagctgggggtagagagctgagagagggcaggtggcaatggaaaagtcagagacccctcctggaaaacgctgagtcctcatagatcctattttcttctggccctacctccaggttgaggctgaggagcagattcagctcaccaactcagagagtcttggaattactgccaggattctggaagccagccagccccaggaggccgaactgcccctatagatttttatgctttgagcagagagctaccaacaggtggcgacaaactgcagccactccaggatggatttggagggttcct

SEQ ID NO: 11663 - DNA, 409 bp, Homo sapiens
  MAP TO AC006305.1; EXPRESSED IN BONE MARROW, SIGNAL = 0.81; EXPRESSED IN PLACENTA, SIGNAL = 0.59; EXPRESSED IN LUNG, SIGNAL = 0.45; EXPRESSED IN BRAIN, SIGNAL = 0.55; EXPRESSED IN ADULT LIVER, SIGNAL = 0.55
aaaagcagctcaaccattgcagagttaaacatcctaattaattacatcgtctgagaatgcagctattacatgcatcaatgtatttgtttttcattaaaagtcaaaaacccttccttggtttcaaaacataacaattttaaaatccttaatcctaaatctcaaatcttgatcttcaattggagtaacttatacaaactactttgtagggtgagtctctcagcctagcctctcctaacctgctcaaaaaggccctccagcaggcaattggggtatactatagaatcaaccaacagaaacgcaaagctatctccaccgtggctacaaatgatatcacaatgaggcgtgcatctgctttgctgaggatacctgtgattgttaataaagtaagtggtaggagtggggcagtttt

SEQ ID NO: 11664 - DNA, 487 bp, Homo sapiens
  MAP TO AC006226.4; EXPRESSED IN PLACENTA, SIGNAL = 1.2; EXPRESSED IN LUNG, SIGNAL = 1.3; EXPRESSED IN BRAIN, SIGNAL = 1.3; EXPRESSED IN BONE MARROW, SIGNAL = 1.1; EXPRESSED IN ADULT LIVER, SIGNAL = 1.2; EXPRESSED IN FETAL LIVER, SIGNAL = 1.1
taagaggagatgctgagcgggcagttggatataagagtctacagttcaggggaaaagtctgagcaaagccagaagactaaataaagccattaggaataagtgtagaaaaagagattatcaaaggactgaaccttagttggctggagacataagaaaattagtcaaggggactgacagagtagttagtgaagcaggaagaaaaccaggaggcgttgtatcctggaagctaagtgcagagagtatttcaaagagacgagagtgatcagcaattatttatgttgctacttaataaaataagatgagggctgagtactgaccattggattcagcaaaaaggaggccattgatgacgtgaataatagcagtttgggtaaaatactgagggcaaaagtctgctggaactggaagagaaactggcaaaagaagaactagagacaattctttaaaacatccactggaaagtgaaggaaggaaataaggcaacagc

SEQ ID NO: 11665 - DNA, 400 bp, Homo sapiens
  MAP TO AC005066.1; EXPRESSED IN ADULT LIVER, SIGNAL = 0.7; EXPRESSED IN PLACENTA, SIGNAL = 0.71; EXPRESSED IN LUNG, SIGNAL = 0.76; EXPRESSED IN BRAIN, SIGNAL = 0.57; EXPRESSED IN BONE MARROW, SIGNAL = 0.86
ctgcattcatatcccattgcacatgagaatgagaagaggctattttagacactgggactcatctcttgtaggaaacagtcatgttcactttgatgtcttagcaaacagttatttttcaaatctcagatcttttcattttttttcagcaagtggttcaggtgatacctaagctaggacttgagatttttcttggaaatggtactaaacttcttgtggtgatggctgtgattcccctttctcccaggatgatacagtcgcaacatcaggctacactgccttaggccttgctgggttcctagatgagtgtgacagaggaattggggaagagatgaaacactttgcacacaacagatcaaaggctgaggggctgtcaaaggaaggcactgggggaccactagta

SEQ ID NO: 11666 - DNA, 486 bp, Homo sapiens
  MAP TO AC006377.3; EXPRESSED IN ADULT LIVER, SIGNAL = 0.67; EXPRESSED IN PLACENTA, SIGNAL = 0.65; EXPRESSED IN LUNG, SIGNAL = 0.68; EXPRESSED IN BRAIN, SIGNAL = 0.97; EXPRESSED IN BONE MARROW, SIGNAL = 0.58
gcaatgtaaagatggcaaaataaagtagttggaacttaatcataacattccatagcctttatttataaatatttgaatatctgtataaagaaaaaagagaaataagacatacatacatacacaaagagagggtgagagtgagagaaagaaagagagagaaagcaacacgaatcaacattttaagcaaggtgttcttttctcaaaaacagcatacttcatccaacttcaaagttccttccctggcctacaaatctctctcttttctcatccttacctccagtcatcctttgagaggttaatcaaaatattcatttcctcgtcatcttgcagaaggcgataagctgcacttaaatggtgattctccagtacagatctgtcattatacagaatagctggatcagacctgaacagaaagccaagcaaaattcagaatgttaaacagttgtgatttacttgggtaattctaacaggctagaacgcaccacc

SEQ ID NO: 11667 - DNA, 475 bp, Homo sapiens
  MAP TO AC005195.1; EXPRESSED IN PLACENTA, SIGNAL = 0.96; EXPRESSED IN LUNG, SIGNAL = 0.82; EXPRESSED IN BRAIN, SIGNAL = 0.92; EXPRESSED IN BONE MARROW, SIGNAL = 0.85; EXPRESSED IN FETAL LIVER, SIGNAL = 0.77; EXPRESSED IN ADULT LIVER, SIGNAL = 0.84
aaagggagactgctgtggtcaacccttaggaacttcccaaggccaattcttaaaagcagaaacagagaccaccaaatatcacacacttagtcctccacccacagacactgccctcactgtcccatgtgagggcagtagctgccaagtccccagtggaatcctggaagaagtgcaaggaaatagccaaaggaatgttaatatgttaattctcagaggttcagtggctgcctgatggtgaaagaagagaaattgttggggaggagggggaataggggcagaactcatctctccccacagaaggtcaagaggccacccaccgcccagccccagaagaccacctcaaactctgctgccctccaggaggaggggatgcctcctctgatgtgacgttgtctgctttggccttccaaagctcaatgtcatcaaatgtcctttccctagattcaaaaatatgtccttggggataagagcacaa

SEQ ID NO: 11668 - DNA, 462 bp, Homo sapiens
  MAP TO AC005029.1; EXPRESSED IN PLACENTA, SIGNAL = 0.95; EXPRESSED IN LUNG, SIGNAL = 0.86; EXPRESSED IN FETAL LIVER, SIGNAL = 1.3; EXPRESSED IN BRAIN, SIGNAL = 1.1; EXPRESSED IN BONE MARROW, SIGNAL = 1.1; EXPRESSED IN ADULT LIVER, SIGNAL = 0.98
cctctctatgaccagcacccagcatagcccatggcacacaacaaatccaaaatatatacactaatttggcatgtatttaatgatttccttttacatatagaaatgatggtaggccccaggaaaagtcaaaatgactttacaaagaaatttttgattggtttgttagtagtaaagaccatcctggcaatggattgtgttttcaggaaagaaatagaactcagagaaggaggaggttctgataataggtactaaaaataaatctgggctttattaattgaaacctttgtaccccctcccatcttcatttcccttcccttcgccatggctgacaggcataactttccattctttctgaatgcttatcccaaagtagccatgagtgactttcctgatactgcttcgggggtgggataagttcagaagaactaagaagataaacaacaaacaaagcaaaacattaca

SEQ ID NO: 11669 - DNA, 469 bp, Homo sapiens
  MAP TO AC006238.1; EXPRESSED IN LUNG, SIGNAL = 0.82; EXPRESSED IN FETAL LIVER, SIGNAL = 1.1; EXPRESSED IN BRAIN, SIGNAL = 0.92; EXPRESSED IN PLACENTA, SIGNAL = 2.4; EXPRESSED IN BONE MARROW, SIGNAL = 2.6; EXPRESSED IN ADULT LIVER, SIGNAL = 0.95
ggaatgccactttagaatcccatacacataataaggcagtaagacttttgtacacatccaacaatttttaaaggtttttttttttttttagcaaaaatgcaactacatcccctccatgtgcatttcatacactaaaggccattttgtggtggtgtggtgggttttcccagggttttctaaaatccttttcaggtacatttcctgccccgccccctgcaggtcttccaggatgcaaagccagtgtgctcactcttctcaaagtgaggtgccaggccaccgagcgtagggtccttcagcagtgcacaggatgtgggctctggcttcttcaagtaccgtggaccacggcccttgggtcaacagcaccggcggctggcttgcatggttggcttctcaactttgattgttccattgtttccattttcatgggggtccaagggtgggatctggcggcctgcaacaaaaaggaggc

SEQ ID NO: 11670 - DNA, 481 bp, Homo sapiens
  MAP TO AC004083.1; EXPRESSED IN LUNG, SIGNAL = 0.75; EXPRESSED IN BRAIN, SIGNAL = 0.82; EXPRESSED IN BONE MARROW, SIGNAL = 0.7; EXPRESSED IN ADULT LIVER, SIGNAL = 0.79; EXPRESSED IN PLACENTA, SIGNAL = 1.2
ttttgtctgactccaagcccctgttctccagtcttgttatttgttctgcgtttgaggaatgtactcaatggcagggataatcttagcacccaagacagcctcagactatctgttgaggatggtgttgtgatactgtctgggctgaaagttcagccagacaaaagcagtgatgaacttgtcacaagtggggaaattcacccaccaaatgattctgaaacatactgagtattgttgaagtctacatctgaacggccaggactatttattgacttagtgtgtgttaaatgggcaccacttaccctgtgcctcactgccattgcttggtatttctgccttccagaggcagccctttggattcatcatatagataagttctgtcatatcgatgtctttctcttctcagttgtcagaagattataaggaatagaggagttttcctgacattatgataactggatcctgacttgttaatcacacctcc

SEQ ID NO: 11671 - DNA, 469 bp, Homo sapiens
  MAP TO AC005728.1; EXPRESSED IN BONE MARROW, SIGNAL = 0.75; EXPRESSED IN BRAIN, SIGNAL = 0.71; EXPRESSED IN ADULT LIVER, SIGNAL = 0.9; EXPRESSED IN PLACENTA, SIGNAL = 0.72; EXPRESSED IN LUNG, SIGNAL = 0.82; EXPRESSED IN FETAL LIVER, SIGNAL = 0.79
acatcttgtccacagcttcttagaaaagtataggcatacttcactttattgcacttcacagataactgcggtttttgttttgttttttacaaattgaaggtttgtggcaaccctgagtccagtaagtctattggcgccatttttcgaacagcatgtgttctgtgtgacattttggtaatttttgcaatatttcaaacttttcattgttattattacatctgttatggtgatctgtaatcaatgatcattgatgttactactgcaattattttggggcatcatgaaccatgcccatataagatggcaaacttaatcgattgtgttctgactgctccaccgaccagcccttcttccatctctctccctctcctcaggcctccctatttccggagacacaacaatattgaaattaggccaattaataaccctaccatggcctctaagtattcaagtgaaaggaagagtcaca

SEQ ID NO: 11672 - DNA, 462 bp, Homo sapiens
  MAP TO AC004905.1; EXPRESSED IN PLACENTA, SIGNAL = 0.66; EXPRESSED IN LUNG, SIGNAL = 0.67; EXPRESSED IN BONE MARROW, SIGNAL = 0.54; EXPRESSED IN ADULT LIVER, SIGNAL = 0.57; EXPRESSED IN BRAIN, SIGNAL = 0.57
agggggattctacaaaagggccggttggaagaaccaagcacttgctattctgttggtaaacaccagctcagcacacatttcttcctgtccaaggataaaagaacagaaaacaaaaatttcaccttgagcctctggaaacacaaggtaaagggaagataattgtgactgctcagattaaatatgccatctttgaaatttattttctaatgaaaaggaaggaaattgagcatttccttcttcttcttaacaggatgcagaaagatcctgcaatgggaaatgaggagaggggctggggggaagataatatcaacccaggcctcaaaatatttctgttagtgttcaaatctagtatcccacaaataataaaaaatagtgtggcctatgaagagacaacacattatgaacccaaaccagcaaaaacagcagagaacagaaacagacttggagggaattccaatattg

SEQ ID NO: 11673 - DNA, 474 bp, Homo sapiens
  MAP TO AC006320.2; EXPRESSED IN LUNG, SIGNAL = 0.76; EXPRESSED IN FETAL LIVER, SIGNAL = 0.95; EXPRESSED IN BRAIN, SIGNAL = 0.75; EXPRESSED IN BONE MARROW, SIGNAL = 0.86; EXPRESSED IN PLACENTA, SIGNAL = 0.87; EXPRESSED IN ADULT LIVER, SIGNAL = 0.94
gctgcagctaagcacgaacgcgccccacgggagcgtgctgtggggccgcggcctaagtaggggtttcaaagcggtggctgtcaacactcctcagtccacctccgcgaacttcgcacctaaccactggggacactccagcacagggatgcggagggggccttggctggggtggggcagggccagggttgtgtgtgaaggagaaggcagggatgaagcagccgcatcccagacctgctgtgtcccaccccgcctctgcacgcctgctggcagctcgggcgccacgtacctcagtttctcccggagcccaggagctggcttggaccgcagctcctgcagttctggaggctggagaagcctgcgggcgctgcaagccatcccaggagccggctgggggctgccgtagaccatcgggggccaggattccccgccaggtcagggaatgccggggcctcgcagggatctggctctggggtc

SEQ ID NO: 11674 - DNA, 452 bp, Homo sapiens
  MAP TO AC004958.1; EXPRESSED IN PLACENTA, SIGNAL =   1; EXPRESSED IN LUNG, SIGNAL = 0.97; EXPRESSED IN FETAL LIVER, SIGNAL = 0.94; EXPRESSED IN ADULT LIVER, SIGNAL = 1.1; EXPRESSED IN BRAIN, SIGNAL = 0.86; EXPRESSED IN BONE MARROW, SIGNAL = 0.97
tgcattctctgaatatgaatacccactaattaatgtagaaaagcaaattaatcacaaggaaaaaaaaacaagcttgaataaaaactattcattcaataaaagcttggaaagatctgagagcccaacaatgaaaaaggagtttgtggtcactatagaaaataacttacctttaatggtaaagagttaaaaatctagtgacagtaatatttgaatgagacaaagccatgtaaaatttagtagctacaaataagataaatcctacctgagaaaggtacatctctaagaacagtaggagcccagcccctccaaagggaaatccaaccatcttcagatactttcttgctgacaaatcgatgcagttccacgtaagaaaacttcttggactgcatcttggttctaatcaattctagtggacttatcacagttactgcaccaactaatacaaacaagtt

SEQ ID NO: 11675 - DNA, 468 bp, Homo sapiens
  MAP TO AC004870.2; EXPRESSED IN PLACENTA, SIGNAL = 1.3; EXPRESSED IN LUNG, SIGNAL = 1.5; EXPRESSED IN FETAL LIVER, SIGNAL = 1.3; EXPRESSED IN BONE MARROW, SIGNAL = 1.5; EXPRESSED IN ADULT LIVER, SIGNAL = 1.3; EXPRESSED IN BRAIN, SIGNAL = 1.1
cattcctgtgtatttctccatcagtaactttcccaatttggccacatcccactcttctcccacctcactaccttcttgcaagccatggacatctctcatccaggctattgcaaaaatttctacattggtgtctctgtttccccacttgttcccctgcagcctgtccctcacacaacagacagagcaatgcttttgtatgttccatcatgcattttgtagaatgtcccttaatttaagttttgcataaaggcaaaaaaggttatgcatctttggcaggagtaccacaggatcaatgtgcccttcccagtgcatcacatcaggaggtacatgacttgatatgcctcaggatgggtgaggttgactttgatcatgtggttcaggtagtgttggatgggctcctctagtaaagttaccatctatctatctgtctgtcattaatacacatcttgcggagggagtactttgaga

SEQ ID NO: 11676 - DNA, 444 bp, Homo sapiens
  MAP TO AC004231.1; EXPRESSED IN ADULT LIVER, SIGNAL = 0.85; EXPRESSED IN PLACENTA, SIGNAL = 0.96; EXPRESSED IN LUNG, SIGNAL = 1.1; EXPRESSED IN BRAIN, SIGNAL = 0.83; EXPRESSED IN BONE MARROW, SIGNAL =   1; EXPRESSED IN FETAL LIVER, SIGNAL = 1.1
ggaagggaggaagcaaactgtcatattgatgtggctctaaacaacaacagtgtgcgaaggcccaggggcactttgggattgaccaagaggaaacacaagttgcacaatgatacaatcttgttggtacaattgtcagagaagggaactcccacagcaaaggccataaaaccatccagggcagtctggggcggctcagttctgcggtgccagggagtggagcagagctcagccccgtcccaaacacagatgggaccatgaactccggacacagcttcagccagaccccctcggcctccttccatggcgccggaggtggctggggccggcccaggagcttccccagggctcccaccgtccatggcggtgcggggggagcccgcatctccctgtccttcaccacgcggagctgcccaccccctggagggtcttggggttctggaagaa

SEQ ID NO: 11677 - DNA, 499 bp, Homo sapiens
  MAP TO AC005013.1; EXPRESSED IN FETAL LIVER, SIGNAL = 0.89; EXPRESSED IN BONE MARROW, SIGNAL = 0.84; EXPRESSED IN PLACENTA, SIGNAL = 0.63; EXPRESSED IN BRAIN, SIGNAL = 0.79; EXPRESSED IN ADULT LIVER, SIGNAL = 1.1
aatggggaagttcacatatccatgactgaaacacatcaaatcattttactgatacagaaagcatggctttgctcgtagatataaactggaaaggcatagcattgtgacaacagttgaaaataaagttttgaaattaactttcagaagaaaatgtgtgaaacttctatttcaagtaaatatctagtacagtttctctgaggagtccacaagtccatacaaaaaagacctatattggtgtgtgtgtatgtgtgtgtgttgtctttttttttctccctaggtccagagagtagccctcctgctagtcctgtcccagcttgctcccagcaacaagtcatccagcataataccatcactacttcctcatcggtcagcgaggtggtaggaagctccaccctcagccagctcaccactcacagaacagacctgaatccgattctttaaaatgcaccatcagacctggcctccaagaagagctgtagcgtaccatgcgtcctttctt

SEQ ID NO: 11678 - DNA, 370 bp, Homo sapiens
  MAP TO AC005873.2; EXPRESSED IN PLACENTA, SIGNAL = 2.4; EXPRESSED IN BRAIN, SIGNAL = 0.6; EXPRESSED IN BONE MARROW, SIGNAL = 0.67; EXPRESSED IN ADULT LIVER, SIGNAL = 0.79; EXPRESSED IN LUNG, SIGNAL = 0.74
gaaataatagttccaattaactcccctgtgatcttaatatgtttcctacttgggagaggtatagaggagaggaaacctacctccactacgtgatgttacaacccactgaaagtcttggtttttattttaaggatccttgagcctttgttgtttgtggtacgcatgtgtctccgtcagttcaggctatcataacaatttagcataaactgggcggcttaaacaacaaacgtttatttttcacagttttagaggctgaagagaccaagatcaaggcaccagtaggttcagtgtcttgcaagggcactcatcctactttgcacatggctgtcttctcattgtaccctcacgtggcaaagagcaaagagcagga

SEQ ID NO: 11679 - DNA, 455 bp, Homo sapiens
  MAP TO AC004127.1; EXPRESSED IN BONE MARROW, SIGNAL = 0.59; EXPRESSED IN LUNG, SIGNAL = 0.47; EXPRESSED IN BRAIN, SIGNAL = 0.61
ggagtctctgggagcatcagagggtttgggggctgtattctggcagtttcttgatcttttctttctcagtttcactttcatctcttgctatcaccaaggagtgtgagtagcccatggcgaccggctctgagaaaatgccatgcagagtcttcacctcctgggctgcagtggaagacttgggcttgtgatccctgtagcccagttccccaaaggtcggtgatgggccccagctgatggtgctctcatcggctgccacaatgatgctgctcttcccacaagccaggctccagattctccagctgcagaggtcctgcactgcttttgggtacatggtagattcatgggaggtgttggtggccccccagaaaaacagaccacccacttcactgacggcaaaggagcaggtgtaaccagcatagatctgggaagccccatgcccagggaagtcaaatagc

SEQ ID NO: 11680 - DNA, 482 bp, Homo sapiens
  MAP TO AC005939.1; EXPRESSED IN FETAL LIVER, SIGNAL = 0.99; EXPRESSED IN ADULT LIVER, SIGNAL = 0.94; EXPRESSED IN PLACENTA, SIGNAL =   1; EXPRESSED IN BRAIN, SIGNAL = 0.8; EXPRESSED IN BONE MARROW, SIGNAL = 0.94; EXPRESSED IN LUNG, SIGNAL = 0.94
aggcctgtttggagaaagtcagcagagtagtttccatctggcatttgtttcatctgcagaagaatttttttttcctttttaaatagggcttgagctgaaagcccacttcatttagatgttaagtcctaggataccaaggactttgcaaactgccaggatacccttctcattcccttccttgtacacctcccaccagccggtcatcctggagctcagtggaaaaaaataagatccagggattaaaataattctactgcaaggtgagaaccttcaggccacctgcgccctcttagtctcgagcagcatcagccacagatgaatgggctggatgaaagaggcacagaggtttgctttcgtagtcaacatataatgctgtgtacacagatattcaacaagcttctgtgtatctggaataaataaattttaaaaagaaacaactaacagcttattcaagcatgcagctgaatactgcatggcctctt

SEQ ID NO: 11681 - DNA, 488 bp, Homo sapiens
  MAP TO AC004928.2; EXPRESSED IN PLACENTA, SIGNAL = 0.89; EXPRESSED IN LUNG, SIGNAL = 1.1; EXPRESSED IN FETAL LIVER, SIGNAL = 1.1; EXPRESSED IN BRAIN, SIGNAL = 1.3; EXPRESSED IN BONE MARROW, SIGNAL =   1; EXPRESSED IN ADULT LIVER, SIGNAL =   1
ctataggtccaccgcaatcccagagattgttctatttttggaggcaagactagggagaaaccaaatcactcttatctggacaggaggactcatctggggtttggagatgaaacacacttgaaatggcctcaaagatacaagacctgactttagtctatcatactggggacccctagaaaaggacccacctgggggctcctctgcttttcccagacatggccagacctgagcatcttccaggtagtcacctgtttccagctcttcctctctccctggaaggcctgcaattcactaggagtatggtctttggcattcctttcatttagaatgatatacttggctgttaagacccctgacttgtgcctttttgtttgcttgctttttctgggtaaaaagtgacttttggaattggaagtactaaggagcttatgcatgacagctgtatctgcaggcccctaatgatgagggggaagtggaatggtggctaa

SEQ ID NO: 11682 - DNA, 347 bp, Homo sapiens
  MAP TO AC006065.3; EXPRESSED IN FETAL LIVER, SIGNAL =   1; EXPRESSED IN BONE MARROW, SIGNAL = 0.9; EXPRESSED IN ADULT LIVER, SIGNAL = 1.5; EXPRESSED IN PLACENTA, SIGNAL = 0.99; EXPRESSED IN BRAIN, SIGNAL = 1.3; EXPRESSED IN LUNG, SIGNAL = 1.1
aatgtgcccaagtcacaccactaagcaactggcagtctcaccaggaagtctgaactgagaccctctgtgtgctaagcagataatgtcccctcccccaaagatgtcctagtttctctaatctttgacagtgtcaccttatatggcaaaacagatttggaggtgtgatcaagtggaccttaaagtgggagaaattatcctaaattgttgggtgggctcaataataacaagggtttttcaaagtggatgatggatgccaaggagggtcagagaaacacacatcgaagtgagtcaatgtgggaaggactcaccaccattgctggctttacagataaaggcagcaatgagcc

SEQ ID NO: 11683 - DNA, 479 bp, Homo sapiens
  MAP TO AC005026.1; EXPRESSED IN LUNG, SIGNAL = 0.59; EXPRESSED IN FETAL LIVER, SIGNAL = 0.76; EXPRESSED IN BONE MARROW, SIGNAL = 0.75; EXPRESSED IN BRAIN, SIGNAL = 0.59; EXPRESSED IN ADULT LIVER, SIGNAL = 0.68
ttgatgagatgtgcagagccctggcaggtgctacatgggctggggacagcccatgtggtacccacagccccagctttgtggtggacacatgatttacaccctcaaagactggacagtctgactgggaggaggagataaggaaacataaaagcatagtgaacaacaagaggtgaaacataaagaagccataattgtgtattgcgactctatgggctgagagagggaggagtacagaggaatactggaaaagactcctaggaaacaggtggaaaatatggttagggtcaaagtaaatcatgcaggtaaacttttgaggcctgatgaaatgatgatggtggtgatgatgatgatgatgatgatggtggtgatgatgatgatttgagaagaattagcacctgatttgaaggaataattttgtttcccatcattacccagtggcagtacagtgtgaatgtgtttcaaagcagacagacctgggt

SEQ ID NO: 11684 - DNA, 470 bp, Homo sapiens
  MAP TO AC004932.1; EXPRESSED IN PLACENTA, SIGNAL = 0.87; EXPRESSED IN FETAL LIVER, SIGNAL = 1.2; EXPRESSED IN BRAIN, SIGNAL = 1.1; EXPRESSED IN BONE MARROW, SIGNAL = 1.2; EXPRESSED IN ADULT LIVER, SIGNAL = 1.2; EXPRESSED IN LUNG, SIGNAL = 1.1
agctgtgaatcaggtctggcagcttccagaaagtcagtcctggagggaagccatcatttaattttacaaagctgagtgttcccatactgataaaaggtactaactaggtaacctcagtgtgccatgggggtaaagctctgggctagagcttttgactgtagagcaagaggtccctcgctcagatccaggttctccattctttatgttcaatgttggtagataactttatccacatacaacttagactggcataggccacacagagggtagggtcaccttctcagtctcattctccacgttgcccccaaacaacagctcctccactatccctccacgcttctcctctctcaaaaccatctccttccaccactctctcctctcaccattcatgtcttctctgacatatgggactccacaaacagtggacacttttagaaccaggctaacaatcttattttcctcaccgccct

SEQ ID NO: 11685 - DNA, 403 bp, Homo sapiens
  MAP TO AC005038.1; EXPRESSED IN LUNG, SIGNAL = 1.1; EXPRESSED IN ADULT LIVER, SIGNAL = 0.49; EXPRESSED IN BRAIN, SIGNAL = 0.97; EXPRESSED IN BONE MARROW, SIGNAL = 0.56
gaaccccaagaatagccctcttacaacagacctggacccctggcacacccctgggtccagatgccatttctctagtcaaaccaataaaaccctgtttccccacaggcaggccctaccctccaggctcaccaagaccaggtggcgagtcaggacagggtggcagcgtgggagccgtgggaccgggcagggcactggggacctcagggagcccggagctagaggcggtggcgttgggccgggagcagttgctgctgctgctgctgctgctagcagctgggtggagggcatgggcagggcctcgggcactgaagcggctgaagaaggccaggtgctgggcgtagacgtcaaagtagaggatgacggccacgaggaagtgcagcaggcagagaaggagcacagcctt

SEQ ID NO: 11686 - DNA, 490 bp, Homo sapiens
  MAP TO AC005988.1; EXPRESSED IN PLACENTA, SIGNAL = 0.88; EXPRESSED IN BRAIN, SIGNAL =   2; EXPRESSED IN LUNG, SIGNAL = 1.2; EXPRESSED IN BONE MARROW, SIGNAL = 0.96; EXPRESSED IN FETAL LIVER, SIGNAL =   1; EXPRESSED IN ADULT LIVER, SIGNAL =   1
atgcagacttccagagagcccccccaacggacgtgctgagaagggagagggaggcgggggctgtagtcaggaaggagccagagaagaacagggtttgggtgcatccagaaatatgcctgcagtaggagggagaggaaggggtgccaccgtcaacggcttcccatcggaggtggttggtgcagatggaagtttctgtctgctggccctcaagagagtgttttgccagggacacagtctgttcctcctcagaaaacaccccccaaatgctaacaacatccccaccagctgctagaagcccctttcccctccccaccttgaagtagctcatagttctctgggcagagccagaccatccagtgtaccccagaggccagtaggttcctgcccattttcctctctggcttcctgccaagaattatggcagctgaggatgaatggagaagtaaaaacaactaacaccgcacaactaacaactaacaccgcagttccc

SEQ ID NO: 11687 - DNA, 475 bp, Homo sapiens
  MAP TO AC004952.1; EXPRESSED IN PLACENTA, SIGNAL = 0.73; EXPRESSED IN LUNG, SIGNAL = 0.64; EXPRESSED IN FETAL LIVER, SIGNAL =   1; EXPRESSED IN BONE MARROW, SIGNAL = 0.77; EXPRESSED IN ADULT LIVER, SIGNAL = 0.85; EXPRESSED IN BRAIN, SIGNAL = 0.84
ccgcatcctaaggaaagatgaacccgtgttcacaccttgttctggtgaaggatggagcaggaaacaagcttcacagggaaatccacgtggggccccaccattcatcacagccatgagaccaccctttcagtgcacaggcagtgacctccagagacggggaagagacagatggccttccaggggtcagcacagggtgtgggcacagggcttccctgtgccgtgggtgactggctcagcagctgtctcccatgtcacctgcctgcagggtaccagattgcctaccgcctggccagcagcagcccccacaccttcaccaccgtggaggtcggcgccacagtgaggcagttcacagccaccgacctggccccggagtccgcatacatcttcaggctgtccgccaagacgaggcagggctggggggagccactggaggccaccgtcatcaccaccgagaagagaggtaagaccttggggg

SEQ ID NO: 11688 - DNA, 391 bp, Homo sapiens
  MAP TO AC006011.2; EXPRESSED IN BONE MARROW, SIGNAL = 0.85; EXPRESSED IN FETAL LIVER, SIGNAL = 1.1; EXPRESSED IN BRAIN, SIGNAL = 0.66; EXPRESSED IN ADULT LIVER, SIGNAL =   1; EXPRESSED IN PLACENTA, SIGNAL = 0.91; EXPRESSED IN LUNG, SIGNAL = 0.98
gacactgctttaagccccaaatcaaaaattcacccatcattagattaaaaggaaaatctaaattgagacaaacacataatccatggcttacacagatgtgttatattatccctttgggaatattttaattataaaaatgtaaaaagaaaagaccattttggacttgaagtcacacagtgaaggctaaaatattcaagcaaggaagtgtttattaagctagtatgacacatcatgtacttacatcattgtaataacctgcatcaggctgaattgcccgcatatctctctggtctctttgccatattctgttctgttaaataaataaataaataaataaataaataaatagatcaattaatgactatatggtctgattatactcaatttgaaa

SEQ ID NO: 11689 - DNA, 485 bp, Homo sapiens
  MAP TO AC002087.1; EXPRESSED IN LUNG, SIGNAL = 0.8; EXPRESSED IN BRAIN, SIGNAL = 0.76; EXPRESSED IN BONE MARROW, SIGNAL = 0.73; EXPRESSED IN PLACENTA, SIGNAL = 0.77; EXPRESSED IN ADULT LIVER, SIGNAL = 0.62
atattttccaaaagtgggagcagcattaacataatttccacatctaccgtatgactttgtccctccatccagtaaaaggttgaatcatgtcactttcctttgaaactgtgtgggctttggtttcctgagacaaatagagtatgatgcaatcaatgccttgactcgtggattaagtcagaaaaagtcatggagcctctacttggtgatattgaaaagctttcttcccagaggtcccctttcaacatgctcttatgctgttacaagcccaaaccatgctgacagacaacaactggatacttggataaaaactttagttgcatcagccttcagattgtcccagtccaggtgttccatttcccagtcacggacatctgagatgtcatgggacagagaagtgtcatctgctgtggacttcctgagttcctgagccctgcaatacccgagaatatcaaattagtattttatgcagcaaaatttggggttgt

SEQ ID NO: 11690 - DNA, 482 bp, Homo sapiens
  MAP TO AC006287.1; EXPRESSED IN BRAIN, SIGNAL = 0.83; EXPRESSED IN ADULT LIVER, SIGNAL = 0.63; EXPRESSED IN PLACENTA, SIGNAL = 0.62; EXPRESSED IN LUNG, SIGNAL = 0.74; EXPRESSED IN BONE MARROW, SIGNAL = 0.68
cccaaactcagcctcaattctgatgcctggagccaacccagaaaaggaagctttgcaaatagtctgagaacctgcctagaccctgtttgacactggtgccaaatgcaaaccgctgtggctgagcagtgtgacccatccctggttctgacgagactgataagaaggagctagaatctggtgagctaaccactttgggcttcattagcgtagaacccgtgctgtatgaactcatccatgtccctgcttttgtgtttttctttcttttctttggttgttcttccactgttgtagttgcctacatctaaactcagccttcaggaccctgaatccgaatttcagattccttaaccagtttactagacatgagcatcctgaggagtggagagaggatgacgaagaggttaggaacacacacttaagagtcagacctaggtaagaatcctgatctttaatatctatgtggccctgaaaaagtccctttc

SEQ ID NO: 11691 - DNA, 470 bp, Homo sapiens
  MAP TO AC006321.1; EXPRESSED IN BRAIN, SIGNAL = 0.61
actgaatccattcccagcacttagagttgaataaatagttgttgattgagtggataaatttataattttaagcttctggctctcttagctaatccaggagtccggggaaatcagtctctgtgaagttttgatcaaagaggccttagatccctccggaacaaggatggatagaaataataataattttaaaggtgggccaccagtgccggggaaggacgggaagtgctgtttcccacattcagcaggcacccgaccactgcctgctacgggcatggctgcgggaggccaagtgggacgagaagcgaatccctgccgtaaaactgttcccagccgagtggaggagagagggtgtgaacacactctcaggacgctgtgctgtgactggggttttagtgcagcagattgagaaagggaaaaaacgtggcaggtgggaaaccccctgggtaagtccaagaatctccagccacaca

SEQ ID NO: 11692 - DNA, 468 bp, Homo sapiens
  MAP TO AC004934.1; EXPRESSED IN PLACENTA, SIGNAL = 1.2; EXPRESSED IN BRAIN, SIGNAL = 1.2; EXPRESSED IN ADULT LIVER, SIGNAL = 1.2; EXPRESSED IN LUNG, SIGNAL = 1.4; EXPRESSED IN FETAL LIVER, SIGNAL = 1.2; EXPRESSED IN BONE MARROW, SIGNAL = 1.2
tcaatggatttccagatggggaggtttggaaatcactttgcttgcattctaccagcctccatgctgttcccctagcatgccaagcacagtccctcacctcagagcctttgcacatgctggttttttggcctggaaagctcttgcccaggatttctgtctgactttcttatttttctttcttcattttgtggtccttgcctgactcctctgtgaaaaacagatgattcctccttgaccttgactttccccaaccagaatatctatccctgttcccattctttatatttctttatgacttttttgccagctatttatttctttgttttagtttttttgttgttgtcattgttgttgttgtgcttttgttttatctcctgccattagaatataatttccatgagagtaagaactttatctgttttactgataaagttttactttctaaaacagtgcttgatgcatagaagg

SEQ ID NO: 11693 - DNA, 482 bp, Homo sapiens
  MAP TO AC005549.1; EXPRESSED IN PLACENTA, SIGNAL =  20; EXPRESSED IN LUNG, SIGNAL = 0.85; EXPRESSED IN BONE MARROW, SIGNAL = 0.7; EXPRESSED IN ADULT LIVER, SIGNAL = 0.66; EXPRESSED IN BRAIN, SIGNAL = 0.66
gctgaaggcacagttaaggcaccagcttggaaagagtatcctacaaggaagaaatactatcctctaggattcaatatagaccttaaatcaaataataagtgaagctgtattcccaataggtaaaattcatagattcatgtcaaaggtggaagtaaaattgccctacttaccattactcctagtgatccactttgggggatttgtgcacatcagggctgtacggatttagaaatcctgtttcccagaggaagaatgcttaccccttggttcctagagggagtctcattaatcctcagctgtggctgcactctatctctttagacttgcaggccaagaaactaacaggcaaggagaggaagaggtcactatccgggccagggtaatgggccctggtcatcagaagtgagtggagctgcttttactcaatggggttagataagaatatgtttggcatctgggtgacccatttggatgtctcttga

SEQ ID NO: 11694 - DNA, 481 bp, Homo sapiens
  MAP TO AC004949.1; EXPRESSED IN LUNG, SIGNAL = 0.97; EXPRESSED IN FETAL LIVER, SIGNAL = 0.84; EXPRESSED IN PLACENTA, SIGNAL = 0.86; EXPRESSED IN BRAIN, SIGNAL = 0.7; EXPRESSED IN BONE MARROW, SIGNAL = 0.71; EXPRESSED IN ADULT LIVER, SIGNAL = 0.73
tgcatgttccttaatattcctgtggtacttacatgttaagatcacttaacagctccctccgccaccaggctgtgtgctgcttcagtctttgggaacgtggctgttccagggaggggaaagtgaaggaatctagggcagtatttgggtggcccaaaattatctagagtttgtgtttgtgtcagttatcaggaactgggatcttgctttgtttgtgacttcatcacttaccttcccacttacctgtcctagcacatagatgatgacaccttgttctagttccttgacccgctcctcattctcaagttgagaatgcttgtccccagtgaaatgctcctgtttgtccccaatgaaatgctgctgttctaccttgcttttgcccttcttgcagggtgaagacttctttctctcatgctccaaagacacagagagttccagtaagtggattcaggcctttcctttaggccctaagtcctgcttctga

SEQ ID NO: 11695 - DNA, 478 bp, Homo sapiens
  MAP TO AC005772.1; EXPRESSED IN BRAIN, SIGNAL = 0.84; EXPRESSED IN ADULT LIVER, SIGNAL = 0.74; EXPRESSED IN PLACENTA, SIGNAL = 0.68; EXPRESSED IN LUNG, SIGNAL = 0.66; EXPRESSED IN BONE MARROW, SIGNAL = 0.6
cacttgtgccaatcaccaagttttggcccatcaaatgtagccaactgttataaccgtgttcgaataaggcaaacactgggctataaccaatccaactgtttctctacctcacttccattttctgtacgtcactttcctttttctgtccataaatcttcttccaccgcatggccgtgctggagcatactctgactctgaaggctgccctaatgtgtgaatcgttcattgctcagttaaacgcctttaaatttaattcagctgatgtttttcttttatcagatgaggatgaggatgggatccaaagaagagcttctaacgacccccgaggaatgctgagtgaccgagcaaggtacccactgaacccaattgtgtccgttgatctcttggagcagccagggatcctggtgagttctctctgtttccaaagctgcacagatttgtgttttaagctctccaagttcctttgagcaaattcctg

SEQ ID NO: 11696 - DNA, 450 bp, Homo sapiens
  MAP TO AC003685.1; EXPRESSED IN BONE MARROW, SIGNAL = 0.98; EXPRESSED IN PLACENTA, SIGNAL = 1.1; EXPRESSED IN LUNG, SIGNAL = 0.99; EXPRESSED IN FETAL LIVER, SIGNAL = 0.81; EXPRESSED IN ADULT LIVER, SIGNAL = 0.93; EXPRESSED IN BRAIN, SIGNAL = 0.94
atgctgacctcagttggacccctaatgctgcgtggcaattatattcccctagtacatgagtccacttatgggcccccctctctgggctcatgctctcttccttctttgctggatttctgcatgaactattactacctgagacattgatacaataggttaatcataaagctaagcctgataccaacaatttgttcttcctcttcctcttcttcttcttcctcttcctcttcttctgtttcttctccttctcctcctcctcctccttcttctccttcttctcctcctccttcttcttctccttcttcttcctcctcttctttctcctcctcctcctccttctcttcctcctcttcgtcttctactactattacttctgctgctgctgctgcggcttctgctgctgctgcggcttctgctgctgctgctgcggcttctgcttcttctgcttca

SEQ ID NO: 11697 - DNA, 474 bp, Homo sapiens
  MAP TO AC005031.1; EXPRESSED IN PLACENTA, SIGNAL = 0.83; EXPRESSED IN LUNG, SIGNAL = 0.7; EXPRESSED IN FETAL LIVER, SIGNAL = 1.1; EXPRESSED IN BRAIN, SIGNAL = 0.6; EXPRESSED IN BONE MARROW, SIGNAL = 0.8; EXPRESSED IN ADULT LIVER, SIGNAL = 0.8
gcttcaccctggcctaatgcccccacctcccccacaccagccagagaggagtgaacaaaataagctactgccaagtcgcggcagggcctccactcaacgctatcaaggagcccaaactgctcgaggaaggagcttgcggatgtggttcgcagggaacggagtgggaaaagacgtagaaaaacgcggaccacaactccagtgagcggatcgacttgatgctgtcccgaggctgcggaaggagagttgggccggaagaagggtgctgagagcgctaatagggagactgcactggctgcgacctcacctggcctgtgccgcgccggaacagcacggaatcctcctgctccgggacgccgccaccactgccgccgctgctcatcgccatagcaaacccgcgggtgcgcagcgtggggccccgtcccttcttaagagtgacgacttccgccgcccggggcttctgggagcggaacagta

SEQ ID NO: 11698 - DNA, 469 bp, Homo sapiens
  MAP TO AC003070.1; EXPRESSED IN BONE MARROW, SIGNAL = 0.81; EXPRESSED IN PLACENTA, SIGNAL = 0.68; EXPRESSED IN LUNG, SIGNAL = 0.81; EXPRESSED IN FETAL LIVER, SIGNAL = 0.84; EXPRESSED IN BRAIN, SIGNAL = 0.65; EXPRESSED IN ADULT LIVER, SIGNAL = 0.8
ttttccctttcctcacctccaggattaatgcaggaacctacttgatcacgtgtgggacacaggaagcccctagacaggcctagctgtgtctccagctcagagttaggattgtcaactgggcagagcctggacctttgtagcctcatttggagtatggtgagggcagtatatagtgtaagacagggagaacccgagagctgaagcttttagactgaaggactgtccccctaaaggtcctactgagaaaatgactctggcctgtcaggcagtctgacccttcttgacatcatcttacagaaaacaggtttagtcacaatgcagtaattggcaactactactgctactattactactactactactactactattactaccaccaccaaacaccaccaacaagaacaacaacaacaacaacaacagttacagcctctatgttctgtgctgggcactgggctcagcactttac

SEQ ID NO: 11699 - DNA, 480 bp, Homo sapiens
  MAP TO AC006500.4; EXPRESSED IN LUNG, SIGNAL = 0.7; EXPRESSED IN BRAIN, SIGNAL = 0.61; EXPRESSED IN PLACENTA, SIGNAL = 0.87; EXPRESSED IN BONE MARROW, SIGNAL = 0.67; EXPRESSED IN ADULT LIVER, SIGNAL = 0.55
tgcctaggaacaataggccataccatatagcctaggtgtgtggtaggctataccatctagggttgtgtaagtacgttctatggtattcacatgagaaaatcaacaaatgatgcatttctcagaatatatccccataattaagtgatgcacaactgtatctttttaccgcaaacccggagaagtgtttgacagatggtagatactcaagaatgtctcatgaatgaagaattaattaattaatggatccaaaataaagaacatgtgtggaaaactgaggcatgcttaccacaaatgaaggggtcaacttctacttagcaacagctgtgaatgccatgataaatgtgggcccagtattgccagctcttccaatttttcaagacaagcaaaaaaatgtgataaatgtgattgtattgtggaaaatattataatttttaatattttcaagtcctttaaaattatttaaaatctggcctggcaaat

SEQ ID NO: 11700 - DNA, 471 bp, Homo sapiens
  MAP TO AC003692.1; EXPRESSED IN PLACENTA, SIGNAL = 1.4; EXPRESSED IN LUNG, SIGNAL = 1.2; EXPRESSED IN FETAL LIVER, SIGNAL = 1.5; EXPRESSED IN BRAIN, SIGNAL = 1.2; EXPRESSED IN ADULT LIVER, SIGNAL = 1.5; EXPRESSED IN BONE MARROW, SIGNAL = 1.6
ttatggcagccttagcaaactaatacagccaccaagctcatccatgtattatcagaccattttataatacaggaaagtggagctcaaagaggtgtgtgggttttgttgttgctaaccccaacaccatgggaactgtagggcactgccccgagacactcacccacaacttcaagctggactgttccctgtgccttcagaggggtgaccaccacctcacatcggtactctcctgcttcctccagctggattccaggcagccgcagtgaggcgtccccactcttcagcctccatggagacacaatggctccaggtcggaatgcctcttggtgatctccaaaaaattcaaagactttgacttctttgtcaaacgtcagactcttccaaaaccaggtgatacccatagacgtgatgttgaggggttgggaataaaagatattgcagaatatggtgacattgtcattcaggggtgtg

SEQ ID NO: 11701 - DNA, 399 bp, Homo sapiens
  MAP TO AC006515.7; EXPRESSED IN PLACENTA, SIGNAL = 0.71; EXPRESSED IN LUNG, SIGNAL = 0.77; EXPRESSED IN FETAL LIVER, SIGNAL = 0.7; EXPRESSED IN BRAIN, SIGNAL = 0.72; EXPRESSED IN BONE MARROW, SIGNAL = 0.72; EXPRESSED IN ADULT LIVER, SIGNAL = 0.63
ggcactaaaagaggaacagaggaacaaaaatagcatgcaacatatgggaaaaaaaggtcaaaattgcagaaataaatataacatattaataataacaataaatgtgaatagatcaagcattacaatcaaaagtcagagattgtcagactgcattttttaaaatccacctatatgttctctacaggaaacacaccttagattcaaagatataaattcagtcatgcatcacttaatgacagggatacattctaagaaatgcatcattagaccattttgttgttgtacaaacctcataaagaatactcacacaaatctagatggtatagcctactacatacctaggtatacagcatagcctagtgctcctaggctaaacctgttcagcatgttaactacatg

SEQ ID NO: 11702 - DNA, 499 bp, Homo sapiens
  MAP TO AC004945.1; EXPRESSED IN PLACENTA, SIGNAL = 0.95; EXPRESSED IN ADULT LIVER, SIGNAL = 1.2; EXPRESSED IN LUNG, SIGNAL = 0.7; EXPRESSED IN FETAL LIVER, SIGNAL = 1.9; EXPRESSED IN BRAIN, SIGNAL = 1.2; EXPRESSED IN BONE MARROW, SIGNAL = 0.82
ttctattgcaggtacctaattcttctatctttactccatttctacaggttgttctgcaggcaagtctttctcagttttccatagcattaccctaatgaaaccactcaacttagtcctctaaccaaggaacatacatgattcactcaatgcagacagatgcaaagcctttttccatttttgctgcatctacacatttgatgtccagtcaggaaagcccagctgaagtcagtataaaaacctgttgtagagaatgcaagaagctcccatgatgctaccaggagaaatgaagacagtagcaggcattgaaacttacctttattatatccttatcccaaatctattttcccaggcttgtagaactccagcacaacttaaaattggaaatctatcagatgtgatgaaggatgagattgttgtgtgggttgtttttagtgatgcatgtagaatatgtaatgtacatgcacatcgatacatatgtgtgtttattgcttttcaggtg

SEQ ID NO: 11703 - DNA, 388 bp, Homo sapiens
  MAP TO AC004382.1; EXPRESSED IN BRAIN, SIGNAL = 1.1; EXPRESSED IN PLACENTA, SIGNAL = 1.3; EXPRESSED IN LUNG, SIGNAL = 1.1; EXPRESSED IN BONE MARROW, SIGNAL = 1.1; EXPRESSED IN ADULT LIVER, SIGNAL = 1.4; EXPRESSED IN FETAL LIVER, SIGNAL = 1.1
tgctgtgggcaagttactcctctaagcctccatttcatttcttcgtctgtaaaatgggaacattacattcccccttgggattgctaggccaataagtaaaccaagctcctagcacagtgcccaacacagagtgaatggcagccaccatcacaccatagtaggacagggctgggaggcgagagggtcctaccggccagcctcgaaggtaaagcgtgtggcatcccggccatagcggcgcagtgagcagaggggccacgagacgagcttcacacgggggttgtggatgtcccagaggtagatgttctcgtgggtgatctgcagcttgcactcgccatacacgtccaggttggggcagggcagcaggaagacattgaagcgatctggagtg

SEQ ID NO: 11704 - DNA, 489 bp, Homo sapiens
  MAP TO AC004542.1; EXPRESSED IN PLACENTA, SIGNAL =   1; EXPRESSED IN LUNG, SIGNAL =   1; EXPRESSED IN BONE MARROW, SIGNAL = 1.2; EXPRESSED IN FETAL LIVER, SIGNAL = 1.2; EXPRESSED IN BRAIN, SIGNAL = 1.2; EXPRESSED IN ADULT LIVER, SIGNAL = 1.3
tgaagagaaaaggcagaggcccagcagcccagccccattaccgatggcaatatccttccaatactgcgccaggtgctcccccattgctcggagcaggtgccggtactccttggcatcagcaaagtcctgtttgttgtgtgtaggctccaggaccaggtagggcacatcaacaaccccaacaaccccgccacatgccctacagggagaaagagaacaagctctgtcaccccactggcaacgccctcctgccaactatcctgggctagacagctctctgtgggtagtactcacatgcccccttccagctgtgggcccactttctcatacattttgatcagtcggctacagttgtagatgaacatgccatccagatcccggtgttcaatgttgacaccaaaaacaaaattcagttccttaggttctttaagtgctctaagaagacaaaaaaactcaagcagatctacacatcggcacacaagcaccatagtg

SEQ ID NO: 11705 - DNA, 472 bp, Homo sapiens
  MAP TO AC005039.1; EXPRESSED IN FETAL LIVER, SIGNAL = 0.78; EXPRESSED IN BONE MARROW, SIGNAL = 0.79; EXPRESSED IN PLACENTA, SIGNAL = 0.88; EXPRESSED IN LUNG, SIGNAL = 0.97; EXPRESSED IN BRAIN, SIGNAL =   1; EXPRESSED IN ADULT LIVER, SIGNAL = 0.86
aaagtggtctgattagttggagctggtttggccctaattctgagtttatcattccacatgcactccctatcttgccccttcatcctcttggactggcctttgcaatagccctgagaaagatgcctggctctgagctcagaaatcttccaagctattcttctaggaacagtaactacatttgggtcccatctgtgtcagtttgtttaggctgctgtaacaaaatatcacatactgggtggcttttaaacagcataatttatttctcacagttctggaggctggaaagtctgagaacaaggcccaggcagattcaatgtctgaagaggacctgtgctctcactctcactcagacacagcttcttttcattgtgtcctcacaaagtagaaggggcaagcaaggtcccctgggtgtctcttataaaaaaattaatctcttttatggaagtcctaccctcatgacctaattacctcc

SEQ ID NO: 11706 - DNA, 474 bp, Homo sapiens
  MAP TO AC003957.1; EXPRESSED IN LUNG, SIGNAL = 1.1; EXPRESSED IN BRAIN, SIGNAL = 0.86; EXPRESSED IN BONE MARROW, SIGNAL = 0.99; EXPRESSED IN PLACENTA, SIGNAL =   1; EXPRESSED IN FETAL LIVER, SIGNAL = 0.86; EXPRESSED IN ADULT LIVER, SIGNAL = 0.88
ccacacccaaggactccagctgggcagcagcacaaaagcccagttacctgttagagagaatttcctcctcctcactttgcagatggagacgccattacccaaagagagaaaggggcttggtcaaggtctccaagcaagtctaccccaggctgggaggaggaccacaaggatcactaggccaccagctgggaccaatgctgacaccacagggacatgctggaccccggttcccaccccaagcaccaaccctgagagcccacttggccaacaccaccacaggtccccttacccatatgcccacggccacgttcagagcaaaatacacagtgatgacgatgatgtcagccacgctcagctgcgtcccgggagtgtggaggtcgctggtggagttggcggccatggctgtcctgccgcaggcactaggtatgagcccgagggactgaggggcaaaccaggtcagaaagggtttcctgg

SEQ ID NO: 11707 - DNA, 446 bp, Homo sapiens; identical to SEQ ID NO: 5407
  MAP TO AC004894.1; EXPRESSED IN LUNG, SIGNAL = 1.1; EXPRESSED IN HELA, SIGNAL = 2.1; EXPRESSED IN BONE MARROW, SIGNAL = 0.98; EXPRESSED IN ADULT LIVER, SIGNAL = 0.9; EXPRESSED IN PLACENTA, SIGNAL = 0.83; EXPRESSED IN FETAL LIVER, SIGNAL = 1.1; EXPRESSED IN BRAIN, SIGNAL = 0.72

SEQ ID NO: 11708 - DNA, 496 bp, Homo sapiens
  MAP TO AC003083.1; EXPRESSED IN LUNG, SIGNAL = 1.1; EXPRESSED IN FETAL LIVER, SIGNAL = 0.99; EXPRESSED IN PLACENTA, SIGNAL = 0.99; EXPRESSED IN BRAIN, SIGNAL =   1; EXPRESSED IN BONE MARROW, SIGNAL = 1.1; EXPRESSED IN ADULT LIVER, SIGNAL = 1.1
tttctggaactgcccttgagagagttgaaaccagaaaaagtaaagtatatgaaaatagatttttaagaaatactttgtcaagggaaaaatctgtggcaattatgttgacatcatgacacatttaattttaaggttttcagacattatagactaaaagtttaaaatataaaatctgtgaatattaatttttacagtatatgtgtttgcatagtacatggctttatttttgttttcttttttttaacttgtttgtattagttggtgcagtaactgtgataagtccactagaattgattagaaccaagatgcagtccaagaagttttcttacgtggaactgcatcgatttgtcagcaagaaagtatctgaagatggttggatttccctttggaggggctgggctcctactgttcttagagatgtacctttctcaggtaggatttatcttatttgtagctactaaattttacatggctttgtctcattcaaatattactg

SEQ ID NO: 11709 - DNA, 499 bp, Homo sapiens
  MAP TO AC004993.1; EXPRESSED IN PLACENTA, SIGNAL = 0.9; EXPRESSED IN LUNG, SIGNAL = 1.2; EXPRESSED IN FETAL LIVER, SIGNAL = 1.1; EXPRESSED IN BONE MARROW, SIGNAL = 1.1; EXPRESSED IN ADULT LIVER, SIGNAL = 1.2; EXPRESSED IN BRAIN, SIGNAL = 0.79
tggcaccactacaagtctgcaagaaccacagtgttaccgggttctttcaaatatctgaaagccttctcagggaggatggctacaaataagcccagacagtgaagactaaaataaatacctaattattcaatgcccagacactgaagaacatctactggcatcaacactattcaggaaaacatgacttcaccaaatgaactaaataagataccaggaactaaccttggagaaacagagatatgtgaactttcagacagagaattcaaagtaactgttgaggaattcaaagaaattcaagataacagagagaagaaattcagaattctatcagataaacttaacaaagagactgaaataattaaaaagaatcaagcagaaattctggagctgaaaaatcctactgacatactgaagaaggcatcagagtcccttaatagcagaatggatcaagcagaagaaagaattaatgatcttgaagacaaacaatttgaaaataccc

SEQ ID NO: 11710 - DNA, 472 bp, Homo sapiens
  MAP TO AC004547.1; EXPRESSED IN PLACENTA, SIGNAL = 0.94; EXPRESSED IN BRAIN, SIGNAL =   1; EXPRESSED IN BONE MARROW, SIGNAL = 1.1; EXPRESSED IN ADULT LIVER, SIGNAL = 0.77; EXPRESSED IN LUNG, SIGNAL = 0.75; EXPRESSED IN FETAL LIVER, SIGNAL = 0.86
aagagaagaaaagcaaaaaggagaaaaattatgctttgggtttttctctagtcttaactaaccagccaaagtatatgttttaagaaaagcttttaaatacagcacagtgtcaaagaggcagagcttcagcgaccttgacttcactatttcctagctgtgtggtaccacataaattactcatttgtaaaacagtcctcatatcagttgtatagttatcaggcattaaataacataatgcatgtaaggagcttagcacagtgcctggtacaccatcaccatcatcaccactaccaccaccattatcactgtcaccatcaatatcatcatcaccaccatcgtcatcataactactaccatcaccaccactatcattatcttcactactatcactatcaccatcatcatctttctcctactcatcatcatagccaaagcttgtcatgtaccagacactgttctaaataagtacaaa

SEQ ID NO: 11711 - DNA, 449 bp, Homo sapiens
  MAP TO AC005004.1; EXPRESSED IN LUNG, SIGNAL = 1.1; EXPRESSED IN BRAIN, SIGNAL = 1.2; EXPRESSED IN BONE MARROW, SIGNAL = 0.94; EXPRESSED IN PLACENTA, SIGNAL = 0.91; EXPRESSED IN FETAL LIVER, SIGNAL = 0.98; EXPRESSED IN ADULT LIVER, SIGNAL =   1
tccagaagcctaattcccagatactaagggctgctctgcccctggaagcagtgcggtagtagaaagggcacagggtatggagacaaaggtacctgagcgccatcccactctgctgctgtgtagcttggtgttcctgtgtgaatccattagtcattgtaagcctcgtttcaaaatagaacctcatctgtcaatggggtggcaataccatcctgatggggttgtgaggaaccagtatgagaacatacagtgtacctaatgagtgtttttctacttgaagtggctgaattgtctttcagatgatgagctagttgtgaaccccaaagtgttccctcacatcaagcttggagacattgtagagattgcacaccccaacgatgaatacaggtgagtgtctcataggatccatggaactgggcaattcactgtttccaaatgatgtccaaggcaga

SEQ ID NO: 11712 - DNA, 443 bp, Homo sapiens
  MAP TO AC004551.1; EXPRESSED IN PLACENTA, SIGNAL = 1.3; EXPRESSED IN BRAIN, SIGNAL = 1.3; EXPRESSED IN ADULT LIVER, SIGNAL = 1.3; EXPRESSED IN LUNG, SIGNAL = 1.4; EXPRESSED IN FETAL LIVER, SIGNAL = 1.3; EXPRESSED IN BONE MARROW, SIGNAL = 1.3
aaagtggtctcctcttcctgccccccatcccctttctctcttagctccttccttctataaggggaagtgtctctccagtgtttgtttaggggacaaaatgtgactatggtttggaatgtgaaaagcactggctggacctcccctctttcagacagacccatctgcctccccacccatggtggctgccattcttctggtccagcactggcttgatagggcaaggctgagatctcattccaaagaggtatgcctggcatgcggatgatgaggtacagggatagggtgtgagaagcttggcacctcgctgattggagctggtgcagcaggatgttcctgatggtctcatcttcaaagttgtagttgaccatccaatagatacacagcttctcctggcatttgatcagctccagtacggttctgacgccttcagcaatgtcaaagtt

SEQ ID NO: 11713 - DNA, 478 bp, Homo sapiens
  MAP TO AC005230.1; EXPRESSED IN ADULT LIVER, SIGNAL =   1; EXPRESSED IN PLACENTA, SIGNAL = 1.3; EXPRESSED IN LUNG, SIGNAL = 0.98; EXPRESSED IN BRAIN, SIGNAL = 1.1; EXPRESSED IN FETAL LIVER, SIGNAL =   1; EXPRESSED IN BONE MARROW, SIGNAL = 1.1
aatggttcttaaccagttatacatcagatttatctaataagattttgaagataagaatgctcagattctacttcttgaagttcagaaataatgggttcatattgtaccatggcacctgtaattttttctacaagcttcccaggtgatgcacactgcctagattaagagggtcaggaatacaccagcactgaataatacaatcccttggctcacctgtgccaggttgacactatgaagttcctgatatttcccaagctgataggacccccaagaatgtctttaagctgttcgtggctgtcagagtaagaagttgtcaggggtgagacaaagattgggtagccaataggttgatcacaagatgagtttatcatgtttctcagggcttgctttgcattttggatgctacctctctctgggttacggttacgtagaaaaacaagctcctgctgttgccctgcccaaagacctcggacacatt

SEQ ID NO: 11714 - DNA, 490 bp, Homo sapiens
  MAP TO AC004417.1; EXPRESSED IN PLACENTA, SIGNAL = 1.1; EXPRESSED IN BRAIN, SIGNAL = 1.2; EXPRESSED IN BONE MARROW, SIGNAL = 0.99; EXPRESSED IN ADULT LIVER, SIGNAL = 1.2; EXPRESSED IN LUNG, SIGNAL = 1.1; EXPRESSED IN FETAL LIVER, SIGNAL = 1.1
tgcccaaaaatgacacctatcactatttccatttcattggccaaaaaaagccacgtggccatcctaacttcagatggaacaaggaagtgcagtcctaccatggctacgtgactacgtgcatttgtcaaaactcacagaaacgcatgcttaaaatgagtgaattttactgtatctaaagtatgtgtcaacagttctgactttttaaaaaacaccttagtgcattttttaactagactgcttttaaaaattattaaaattatattgtaaacaaccccttaaaatatgatttgatttctaaaaatcaattttatggatccttttagaggcatcataacctgtggcatgctgctagtgctgctgacattcaacagccaggaatgtcttcccttcagggcaggggtaggcaggtgagcaatcctgttctcccaccatggctgattccaggctacggatgtaatgttactgagttagctgagaagaaatgcacaca

SEQ ID NO: 11715 - DNA, 485 bp, Homo sapiens
  MAP TO AC004553.1; EXPRESSED IN PLACENTA, SIGNAL = 0.69; EXPRESSED IN BONE MARROW, SIGNAL = 0.69; EXPRESSED IN ADULT LIVER, SIGNAL = 0.68; EXPRESSED IN FETAL LIVER, SIGNAL = 0.82; EXPRESSED IN LUNG, SIGNAL = 0.64; EXPRESSED IN BRAIN, SIGNAL = 0.67
gtgccacgctggttaaagtgtatggtactgacagaaccggcatggcttccaagaagatactgcaggcggaaacgctgcacaaaggttcttgccccacaggcctcatatacaaagcgggcacttgaacccagctgccgctggcgaagagcagtaaggacttgccagcgagatcggggcagggcagatgtctctgaggaaatccactcctccaacgcctgatcctcgtctaacaaacactgatcatggttggtgccaccgcatcgtggacacatccgaggctgttcttcctcctccccttcctcctccatctcttcttcttcctcctccctttctgtctcctctcccactaacgggtaaccaaataaaccttcacccatgctttcaagttcgacgtcttcacttgaactttctgagtctgtgttttgattttctgtgctggcatcgttcaggaaaccaccatccctggtatcaccaccatctccggt

SEQ ID NO: 11716 - DNA, 442 bp, Homo sapiens
  MAP TO AC006477.2; EXPRESSED IN FETAL LIVER, SIGNAL = 0.85; EXPRESSED IN BONE MARROW, SIGNAL = 0.98; EXPRESSED IN ADULT LIVER, SIGNAL = 0.91; EXPRESSED IN PLACENTA, SIGNAL =   1; EXPRESSED IN LUNG, SIGNAL = 1.1; EXPRESSED IN BRAIN, SIGNAL = 0.94
ttctggtgttggatgagctgtgtaggactattggcaaaagaagaactagtagttaataatgtgctaataacccatattctttacagaagttactgtgaatgccttgagagtaagggaactttgggcacctgggaataaggaaaaggtttaaataaatactgtatgctgaggagtaaaaacagtgtctcaggagcaatgctaccctgtcagtcaaatttataatagactctggtacttttgatttctttatattactaagctctccattatatttattacaggttctattattgtcaaggtcccatcttcacttcaagctcatttacagttatcagggaaagaggttgatgtgaactcagaagtccatgttcaggaaatggctgaagttcgtaaagatgatgttgtaacagtgactggtaaggaggctgcattttgctctgtc

SEQ ID NO: 11717 - DNA, 484 bp, Homo sapiens
  MAP TO AC003689.1; EXPRESSED IN LUNG, SIGNAL = 1.2; EXPRESSED IN PLACENTA, SIGNAL = 1.3; EXPRESSED IN FETAL LIVER, SIGNAL = 1.6; EXPRESSED IN BRAIN, SIGNAL = 0.79; EXPRESSED IN BONE MARROW, SIGNAL = 1.1; EXPRESSED IN ADULT LIVER, SIGNAL = 0.75
caaggggaaaaggagaaaggaagggtaaaagaagagagggaaagtaactttttaaaaaacaaagcaaggccaggcatggtagctcaagcctgtaatcccagcacaaggcaggaggattgcttgaggccaggaatttacgactagccccgggaacatagcaagaccagtctctacaaaactaaaaactaaatattagccaagggtagcacgtgcctatagtcccagctcctcaggaggctgaggtgggaggatcgtgtgagcccaggagatccaggctgcagtgagctatgatcgtatcactgtgtatcatgcccctgcagggtcagagcaagaccctctttctacaagaaaacaaacacaagcacaacaagaatatgaagaggtggggaaaatggatgtggacgggatggagaaatagtcaaacaggttgctttgataagaagtgagctccctgtcagtggaggcattcaagcagaagcagctg

SEQ ID NO: 11718 - DNA, 409 bp, Homo sapiens
  MAP TO AC004626.1; EXPRESSED IN PLACENTA, SIGNAL = 0.84; EXPRESSED IN LUNG, SIGNAL = 0.75; EXPRESSED IN BRAIN, SIGNAL = 0.75; EXPRESSED IN BONE MARROW, SIGNAL = 0.66; EXPRESSED IN ADULT LIVER, SIGNAL = 0.73
aaaaactagatctccaaacagcatctgtatctataataacttatacatgttcactagggaaacactgatggaaatttaacacactctattatgctgatgtgttcatatcaacaaagatagtcatcagcatccaagacaggatctacttaaaaagctaaaaaggcaataggttaaaacttctgttagtttctacattcattataaatgtaccttacctaatggtcagtttcacaggctcaggtgacccattgacattgaccaggaactcttcttcaaagtttcccaggatggtagagctgaaggagatctggatagcttggactccacttggttcaatgatgccttccttgggactgaaaacaaagcaggcccccaaagctgaagttggaggggtcatgttgaagagagc

SEQ ID NO: 11719 - DNA, 374 bp, Homo sapiens
  MAP TO AC005229.1; EXPRESSED IN PLACENTA, SIGNAL = 0.82; EXPRESSED IN LUNG, SIGNAL =   1; EXPRESSED IN FETAL LIVER, SIGNAL = 0.92; EXPRESSED IN ADULT LIVER, SIGNAL = 1.2; EXPRESSED IN BRAIN, SIGNAL = 1.1; EXPRESSED IN BONE MARROW, SIGNAL = 0.91
tggccatgggtcagaattacttgctttttatacgtcttggatttttttccttttttattttattgaaagagtgtactttaatactagtgagtaagagttacttatgtcctgccatttcacatttaccttttaaacataacttaaactgaatgctacacctaagtatattctgtgaaatataaccaaaaaaatagggtaattgaaatatagctcatattcatttctagtggaattggggctgaatgaagatgatgcatttgcaaagggccctacgttaacagtgtataaagaatcctttgaatctcaatttttggctgacacagagagattttataccagagagagtactgaattcttgcagcagaacccagtta

SEQ ID NO: 11720 - DNA, 459 bp, Homo sapiens
  MAP TO AC005069.2; EXPRESSED IN LUNG, SIGNAL =   1; EXPRESSED IN FETAL LIVER, SIGNAL = 0.87; EXPRESSED IN BONE MARROW, SIGNAL = 0.78; EXPRESSED IN PLACENTA, SIGNAL = 1.1; EXPRESSED IN BRAIN, SIGNAL = 0.78; EXPRESSED IN ADULT LIVER, SIGNAL = 0.88
cagctcattctaaatggtcccttatataagggccaaaagtacttaacttttaaaagttagcaatataatctcttcttgcttataaggtcaagtcttttgtgatagccttactagcaataatagaaaattgaaaaaaagcattttagttcccgtgtttaaaaatatttcttataagtgttggtattgcaaatgaattattaccaaatgttaataatctattatgtcttgttttttaaagtgaatgaatttttagcttttgagggtcccatcttgttggatatgagaattaaacatctaatcaaaacaaatcagttaagtcaagcaactgctctagcaaagctgtgttctgaccatccagagattggcataaaaggtagttttaagcaaacttaccttgtctgtctttgtacatcatcaccaaatggaaagttaatcgaagaggtgagtatgttttctttc

SEQ ID NO: 11721 - DNA, 423 bp, Homo sapiens
  MAP TO AC005094.1; EXPRESSED IN LUNG, SIGNAL = 0.78; EXPRESSED IN BONE MARROW, SIGNAL = 0.89; EXPRESSED IN PLACENTA, SIGNAL = 0.99; EXPRESSED IN FETAL LIVER, SIGNAL = 0.96; EXPRESSED IN BRAIN, SIGNAL = 0.84; EXPRESSED IN ADULT LIVER, SIGNAL = 0.9
tctttcctccttaaatcaaagattgtaaaaaattgaatttaaataagaatgtactttgtcacttgagattatctctaaagtagccccccacgccacttcattgtcatgcaaatgacttcctttagaaagaaactatattacatacagtatatgactatatataccctatattcaaccatatactgttgtgatcattatgaaactgcaagtcttgtcttgccagatttaagagataaatatatctaattaatacactgctatattttttaactcagctttatagattatgaaaaaaacatgcataaatactgccaagatatatattttcttttgcaaaagcttcccttttactctgttttcagagaagaaaaatacgtacttcttgttttggaaatggagattgtcatggtccttgttctcctt

SEQ ID NO: 11722 - DNA, 500 bp, Homo sapiens
  MAP TO AC000117.1; EXPRESSED IN LUNG, SIGNAL = 1.6; EXPRESSED IN BRAIN, SIGNAL = 0.67
agagtaaaaggccgaaatgcatacatggaggattactgatatataacttttaaaaaatatttaagaaactgaaacaatagagacacattacataagtgagactagtcagtgattccaaaacacagcagtgcccttctaatttccaagacccccagtggatgcctgaaacctcagatagtaccaaacccaatataaactgtgcgtggatttctctttctttttctacagttacatggatggaagattcgttctaactgtagatcctagcaacctcagtatatgatatttttctttccttattaagtggagaactttcacctcttcacttaaatgacgcacttcatggcttttctttggcgtatttgaattgcaagcatcactacacttgtactttggtgccctaaataagaaaaataagagctttttgaacgcaagcactatgatactgtgatagtcgatctgataacctacaaggctactaagtgactaatgggtgggga

SEQ ID NO: 11723 - DNA, 450 bp, Homo sapiens; identical to SEQ ID NO: 6120
  MAP TO AC003077.1; EXPRESSED IN LUNG, SIGNAL = 0.67; EXPRESSED IN BRAIN, SIGNAL = 0.6; EXPRESSED IN BONE MARROW, SIGNAL = 0.54; EXPRESSED IN ADULT LIVER, SIGNAL = 0.88

SEQ ID NO: 11724 - DNA, 472 bp, Homo sapiens
  MAP TO AC002091.1; EXPRESSED IN LUNG, SIGNAL = 0.45; EXPRESSED IN ADULT LIVER, SIGNAL = 0.49; EXPRESSED IN BRAIN, SIGNAL = 2.3
tgggatcctcatctccactcaggaaggggcggcggcgctgggggcgtgaagcaggggccagaagccagctgggcagctgggtaccgagtttgggctggggcagggagcgggagcgctgggcccgggaagggggtgatactggttcgtccagggggctgcagaggctccctgcccgcctcaggggcagggccgtgtccgagctgccctccaggctccgagagtccctccgcagtaccagctggctggtgctcttgaagagtttatagatcctgatgaacttctgcccaggcctgcggtggcctcggcgttcctggctgccacgcctccaaggccactcggaggagctctcctcgctgtcctccacgtagccgctgtccatgccatcagagaggcctgagacaaaggaagtcagcagatggcgcgagagggccggccccgaggcctgggaggatgcaagggacagggtggagtc

SEQ ID NO: 11725 - DNA, 379 bp, Homo sapiens
  MAP TO AC000120.1; EXPRESSED IN LUNG, SIGNAL = 0.49; EXPRESSED IN BRAIN, SIGNAL = 0.56; EXPRESSED IN ADULT LIVER, SIGNAL = 0.5
gctgaagggtattctaatgcagaaatgtaatataatattaacgccttactgacagtgatttagtgtcccccttcctcttatgtaatgaatgagttgcaatgaacagtcttgtatatatgccatttctaaattcttcatgtaggttggtactgttgttttaactattatatgacatgattggtaaaaaagagctgaaaatctaccttagtttccatgttgaggagatgaagtccttttatattcactcctacatacacagggatgactttatgattgctggggcttgcctttgtaaatatctgtcctgtgaaaaatgctgctccataagtaggaatttcccagcaattctgtaagaacatgcgctgaaggtgatgcattt

SEQ ID NO: 11726 - DNA, 486 bp, Homo sapiens
  MAP TO AC005209.1; EXPRESSED IN LUNG, SIGNAL = 0.55; EXPRESSED IN FETAL LIVER, SIGNAL = 1.3; EXPRESSED IN BONE MARROW, SIGNAL = 0.67; EXPRESSED IN PLACENTA, SIGNAL = 0.76; EXPRESSED IN BRAIN, SIGNAL = 0.58; EXPRESSED IN ADULT LIVER, SIGNAL = 0.55
tctgtgttcatcttattatgctaggcatgcaagtcccaggaacttggccagcctatgaagaggtcctactgtggtcagtcagtcctcagccctgacctagttgacctcgacaagcaggcaagagtttggccatgtcagtgggtggaggggcagcagacgatgggtgattggcatctctagtcccacactgcaggaaaatggattccttctggagaatagagccctttcttaacgctgtgtttccttctgtggggcaggtcaaggcacttctggaagaaatattggagcgggtgacagacgagtttaacatcccagaactgatggccaaagtggaggagcgcaccccttacattgtagttgccttccaggagtgtggccggatgaatatcctcaccagagagattcagcgctcactgagggagctggagctcggcttaaaggtgagcgcggtcttgtaaggcatggaggggacattgctagaggaca

SEQ ID NO: 11727 - DNA, 467 bp, Homo sapiens
  MAP TO AC005243.1; EXPRESSED IN BONE MARROW, SIGNAL = 0.74; EXPRESSED IN PLACENTA, SIGNAL = 0.95; EXPRESSED IN LUNG, SIGNAL = 1.2; EXPRESSED IN FETAL LIVER, SIGNAL = 0.89; EXPRESSED IN ADULT LIVER, SIGNAL = 0.87; EXPRESSED IN BRAIN, SIGNAL = 0.79
ggggacagtggtaccagaagaaaggtgaacatcaaaaccaagatgtccacacaggtctggtgagtccccacctcaatgatagtccccctgcaccaccatggatgaaggttggcctggcagctaaaacccaggctctggaagaccatgcttcctggtcctcaatcacttactataggtaccaccttgagcacataggtgaaactctttaagactcagttttctcacctgtaaatagtaataataatggcacctagtttatcaggttttgcaatgacctgagcaaggctagctggctcttgagggcagcagttgagcaggaaggggaactctacgtggattcctgtgaaccccaggaatgaaagcctaggacacaccaaggtgcctctgatgatcacaattactacccttcctgaacagggaagtattttaaaaacaaatcttccttctgtagacctttgagcccaggg

SEQ ID NO: 11728 - DNA, 472 bp, Homo sapiens
  MAP TO AC004801.1; EXPRESSED IN PLACENTA, SIGNAL = 0.75; EXPRESSED IN LUNG, SIGNAL = 0.73; EXPRESSED IN BRAIN, SIGNAL =   1; EXPRESSED IN BONE MARROW, SIGNAL = 0.56; EXPRESSED IN ADULT LIVER, SIGNAL = 0.65
gaaactattttggaaagttacccagatttgggtaattgctgttgtaattccaagatcgtatggtagcatagcatgttatgatatgtcgtaaatgttcttggtctgtccagtcagtgctactcattgtacataagacaaatatagatagtcccctacttgtgatggttcgactaatgattttttgactttacaaaaaagcgaaagcaatgggcatttaagcacgctctttgacttatgacaggtttattgggacataaccctatcataaatcaaggaacatccacagatttctttatcccacttactctgaagttttatctttcagagattgcaggagcgggaacattcagtacatgattcagtagaactacatcttcgtgtacctcttgaaaaggagattcctgttactgttgtccaagaaacacaaaaaaaaggtcataaattaactgatagtgaagatgaatttcctgaa

SEQ ID NO: 11729 - DNA, 418 bp, Homo sapiens
  MAP TO AC005077.1; EXPRESSED IN LUNG, SIGNAL = 2.2; EXPRESSED IN FETAL LIVER, SIGNAL = 1.4; EXPRESSED IN BRAIN, SIGNAL = 1.3; EXPRESSED IN BONE MARROW, SIGNAL = 1.3; EXPRESSED IN PLACENTA, SIGNAL = 1.2; EXPRESSED IN ADULT LIVER, SIGNAL = 1.3
aaatatccttcaatgggtgaatgaataaacaaactatggtgcatccatacaacagaatgctactcaggagaacaagaacaacaggtatcagtacacccaacaacttcgatgaatctcacaggctttatgctgatagatgccagcatcttagttccttctggctgcagtaacaaaataccataaactgggtaggtgataaaaaaaacagaaatttatttctcacagttcaggaagctggcaagttcaagatcaagaagtcaacagatgttggtgtctggtggttcattgaaggtaccttctccctgtgtcctcacatggctaggctctctgcggtctcttctaagtgcactaatcccaatcatgagggctccactttcatgaactaatcacctcccacaggctccacctcctagtagca

SEQ ID NO: 11730 - DNA, 450 bp, Homo sapiens
  MAP TO AC004664.1; EXPRESSED IN PLACENTA, SIGNAL = 0.7; EXPRESSED IN ADULT LIVER, SIGNAL = 0.71; EXPRESSED IN LUNG, SIGNAL = 0.68; EXPRESSED IN FETAL LIVER, SIGNAL = 1.2; EXPRESSED IN BRAIN, SIGNAL = 0.77; EXPRESSED IN BONE MARROW, SIGNAL = 0.56
gcccacagatgagcacatagacaagcaccacatcaggacaaatgctggaacacccaggctgctcacctctccctgacctgaagcctcagacatggagtgggagaataattggtaagataatgggacacctgtgttcttatcgcctcttctctttcctggaagtgcaagtagattgtttgaatattttttcctgaatattcttaatttttagcctctcagctccagctgtaatggtaacagcagtgactgctcactaagcatgtgatcagcaccagcaaggggaagcacctgcccaccttgaggtagctgagccatcccaccagggttccctgcaggtgtcatggcatccactcgagctcaatgagggtttggaagttgtcatggtcagagatgggcaaactacggctcttggccaaatccagccctgggccagtttttgtatggcctggg

SEQ ID NO: 11731 - DNA, 371 bp, Homo sapiens
  MAP TO AC004805.1; EXPRESSED IN LUNG, SIGNAL = 1.2; EXPRESSED IN FETAL LIVER, SIGNAL =   1; EXPRESSED IN BRAIN, SIGNAL = 0.91; EXPRESSED IN BONE MARROW, SIGNAL = 0.88; EXPRESSED IN PLACENTA, SIGNAL = 1.2; EXPRESSED IN ADULT LIVER, SIGNAL = 0.96
ttttgatcgtacgcaactggtaaaattctatgcaaaaggattaacaaggcatatcataggaaatcactttgcccaatataagcagttctcagcacatactcaaatgcacacaaacatgaaaatcggaaataaaggaatgttaaaaaaataacttaggcagacacaaataaaaccaccccactagtgtatgaatgatgcatgtttttatgatcttaattacatttaaggatttaaaaaatgccactgatctcacagtttacaatatccaaatcttcaaacctgctggaagaagtccacagcacagcctggaaattgcatccgttgcattctctcgtgcagttacctgtaaaccaaaaatcgcagtcacgact

SEQ ID NO: 11732 - DNA, 470 bp, Homo sapiens
  MAP TO AC006534.2; EXPRESSED IN LUNG, SIGNAL = 0.76; EXPRESSED IN FETAL LIVER, SIGNAL = 0.92; EXPRESSED IN BRAIN, SIGNAL = 0.66; EXPRESSED IN PLACENTA, SIGNAL = 0.84; EXPRESSED IN BONE MARROW, SIGNAL = 0.72; EXPRESSED IN ADULT LIVER, SIGNAL = 0.78
gcaagcacaggtgactgattcaggaatgtcagggaactgctgtagacagagttgtaacaactgtacatctttcttttttaaggcaatctccattaagtcggggcacaaactaagacaaaaaaatctgaatcactattacatattaagaaaattctcaactgcagaacatttataagccttttgagagtttcagaagattagaactataaaaaacaaggtcagaagaattatgcacgtacagtgtggtacacacaaacagctacctgtaagaaagcacatgcgtttggataagctgcatcagacagttccggggataaaatgatggttctgctttacacctttccagaagtcctgttactgtgtccccaatgacagtatgaaagtcaggtgtctgcttcagagccaaaaatttccgtacttctacttcaatgtgtttttctgaatctttctgaaagcgcagaattaaagaa

SEQ ID NO: 11733 - DNA, 473 bp, Homo sapiens
  MAP TO AC003964.1; EXPRESSED IN PLACENTA, SIGNAL = 0.69; EXPRESSED IN LUNG, SIGNAL = 0.69; EXPRESSED IN ADULT LIVER, SIGNAL = 0.55; EXPRESSED IN BRAIN, SIGNAL = 0.55; EXPRESSED IN BONE MARROW, SIGNAL = 0.63
acttaagggggttcgtggacctcctgaagaggtcaaaggaccacaggttaaaaattcctgtagagataagagatttccacagcaacactgggaggcaggaggcaggtgttcaatgagataatgcacgaagcatctttaaagaactaggcctggcgaagtgtggctttggggagaggtggtgtccgaagaatccttggaaaccaaattcttttgcacctagcagctggggcggtggttgctattgacgcttgcctcctccaatcatcgcgcggcttgctaggctgtgcggctccgtggttaccgtggcaacggacggcaacagctcgggcggcgcatggagagtgcgggcggcttcaagctgggtatggagcccctcagcggcggcggggtctgtgagttggacgcggggtcttggcggggaatggaggtagaataaacgtgggacccggagtgcaccaaggtcagaggtcctc

SEQ ID NO: 11734 - DNA, 455 bp, Homo sapiens
  MAP TO AC005079.1; EXPRESSED IN PLACENTA, SIGNAL = 0.6; EXPRESSED IN LUNG, SIGNAL = 0.74; EXPRESSED IN BONE MARROW, SIGNAL = 0.64; EXPRESSED IN BRAIN, SIGNAL = 0.63; EXPRESSED IN ADULT LIVER, SIGNAL = 0.74
tgtgcctatgaatttggcagagttctggtggtgaaaggagtctcctcttttcacagcagtcttccttccctgtccagatctttctgcacctacccctctcccagcagaaacatttcacacatgtacatcccatcctccccctccttccctgtcatggcagttgggaggctatgcaggagaatggaaagagtcatgggctatggaggcgggagatttacgtctgacttgctgtgtagtaacagtggcttcagctggcatccaaccttagtttcttcattcataaaatggagaggatgatgatggcggggcctacctcataagactgctctaagagcaccctctgcatactgtagtgcctatgcctagtgctgctgtctttgattgggcccttcagaaagttgatcctgaagcaagcccagggcagtgagagtgaaagcaaaggtggaattgaggaa

SEQ ID NO: 11735 - DNA, 495 bp, Homo sapiens
  MAP TO AC005220.1; EXPRESSED IN PLACENTA, SIGNAL = 0.7; EXPRESSED IN LUNG, SIGNAL = 1.3; EXPRESSED IN BONE MARROW, SIGNAL = 0.73; EXPRESSED IN BRAIN, SIGNAL =   2; EXPRESSED IN ADULT LIVER, SIGNAL = 0.68
gctttctgggatagcataaaatgtattaatgaattattagataactaaataaatgtccccaccatgacttcataagtgcacattttacctttttttatattcatttcacctaggattcatgaaaatgtagataccacccaacatttgaacatctctgttttaacatatttattcccttgctattgagagttgtcctgcagccactaaaaatgtactttgtttgaaattgctgtagacatcagactccacagaaaagactatcacaccgccagagcctgaaccaacaggagcaccacagaagggtaaagagggctcctcgaaggacaagaagtcagcagccgagatgaacaagcagaagagcaacaagcaggaagccaaagaaccagcccagtgcacagagcaggccacggtggacacgaactcactgcagaatggggacaagctccaaaagagacctgagaagcggcagcagtcccttgggggcttctttaaagg

SEQ ID NO: 11736 - DNA, 469 bp, Homo sapiens
  MAP TO AC005225.2; EXPRESSED IN PLACENTA, SIGNAL = 0.66; EXPRESSED IN LUNG, SIGNAL = 0.76; EXPRESSED IN ADULT LIVER, SIGNAL = 0.55; EXPRESSED IN BRAIN, SIGNAL = 0.72; EXPRESSED IN BONE MARROW, SIGNAL = 0.66
ggcaggtcttccatgttatttgttctatatttcatcccaaaataggcaaatatcctaacaggcaaggatgggatggaacatccctcttctaggaatcctttggaggtaatgtcccattctgacctatccctaaaattctaatggtgattaccatccaaaagggaaggtattgtttgcaaaactcaatttatttctggatgctagaatatagtaagctcagtcttcagtgacatgctgccctctaatctctgcagctttgggacagattgggcaagtaagtcccgagctgacggatcttctgctctgggctatccactatgaagagtcaccaggtgtacggctggaagcttgccgtagcatcctagccctgaaacttcaaggggaccgggtcagggacaccttcctagacgtgctgctcctggagaaccacgatgctgttctaaagtaagcactaaacctctggctccca

SEQ ID NO: 11737 - DNA, 447 bp, Homo sapiens
  MAP TO AC004682.1; EXPRESSED IN ADULT LIVER, SIGNAL = 0.81; EXPRESSED IN PLACENTA, SIGNAL = 1.1; EXPRESSED IN LUNG, SIGNAL = 0.89; EXPRESSED IN BRAIN, SIGNAL = 0.97; EXPRESSED IN FETAL LIVER, SIGNAL = 0.93; EXPRESSED IN BONE MARROW, SIGNAL = 0.89
gtccctagcccacatcagagacacaaagaacacagaccacagaggcaggtcccaatgcacctgttcccatcaacagtacttcccctcaaggaagtactgcaaaagagagaagtacgagccggggctttccttaagctactaaaaggctcatcacccactcctcttccacctccagaggatctgggcttctcggcaatcaggggacaagctgtgctgccctcacttggggataacctgctgcttccccacgtgctctacctccagctctgaatctgctccaacttctgcaggcagcctcacctcattgatctgtctccgctgagctgaaatgcgcttctgcttctgtttatgcaggtgctgctcccgcctcctcacgtagtcctcggaggagtaggccagcgggttgtggaactcgtcatagccctcgtccatcatgtaccaatcccg

SEQ ID NO: 11738 - DNA, 485 bp, Homo sapiens
  MAP TO AC005185.1; EXPRESSED IN PLACENTA, SIGNAL = 0.81; EXPRESSED IN BRAIN, SIGNAL = 0.56; EXPRESSED IN BONE MARROW, SIGNAL = 0.64; EXPRESSED IN ADULT LIVER, SIGNAL = 0.57; EXPRESSED IN LUNG, SIGNAL = 0.66
ggatggaggaatagatggatgactagatggagatagatagacaatcatacatgggatttctgaaagggatttgacttttcacaatcatcaggagaactgtttaaagagtctgtgtggagcagttatttctgtgtctggtattgaagcttgaagcctgaagaaaagtcattcaaaatatattgggggaggatattaggggaaataagaacaaactggaatacacaaagctgagctagaactcgtggcaacttaccagagcttaggttgatctctcaccacttcaatcttccaagttccacaacaggagtgtcctgcaggaaaatctgctgtccagaaccataaagctaaagattcatctagccagagagagaagctgaaggagaagttggaaaggctcttggtccagctggtaccccacaccaaccctgaaagctcacagaaaagtttatgtgattgcttcgtatgggtctcatgcgctacactga

SEQ ID NO: 11739 - DNA, 478 bp, Homo sapiens
  MAP TO AC004655.1; EXPRESSED IN PLACENTA, SIGNAL = 0.89; EXPRESSED IN LUNG, SIGNAL = 0.96; EXPRESSED IN BRAIN, SIGNAL = 1.1; EXPRESSED IN BONE MARROW, SIGNAL = 0.99; EXPRESSED IN ADULT LIVER, SIGNAL = 0.88; EXPRESSED IN FETAL LIVER, SIGNAL = 0.76
ggaacataatttggatcaagccttaaacactaatagaaaggcattaatggaaaacatgaagcatttacccttggtggtactatcagtccatctctctctgaggatcagggttatacaatcccatgatgtaacttcccctatggtttttcaaacatcattttaaatttcaggcagtgaacaagcgagccagtatgggctgaattggaagcattaacaatgtgagatttttactgatggaactctgaaaggggctcttttcagaaagcatacaataaaagagttttctagacaaaaagaaaatgcacttcttacctcctaccaacaagtagctgttgggaaacagtgtttttgcttgcataagggctcttgcatgacctgagtggaagaggtcaaatattccatcggcgtatactctgacaggcctgtcagctgtgggagaaagaaaacactgttaacagaactgcagaatgaggaatcc

SEQ ID NO: 11740 - DNA, 468 bp, Homo sapiens; identical to SEQ ID NO: 10771
  MAP TO AC004662.1; EXPRESSED IN PLACENTA, SIGNAL = 0.81; EXPRESSED IN BONE MARROW, SIGNAL = 0.89; EXPRESSED IN ADULT LIVER, SIGNAL = 0.88; EXPRESSED IN LUNG, SIGNAL = 0.74; EXPRESSED IN FETAL LIVER, SIGNAL = 0.9; EXPRESSED IN BRAIN, SIGNAL = 0.84

SEQ ID NO: 11741 - DNA, 464 bp, Homo sapiens
  MAP TO AC006077.1; EXPRESSED IN BRAIN, SIGNAL = 1.1; EXPRESSED IN BONE MARROW, SIGNAL = 0.96; EXPRESSED IN FETAL LIVER, SIGNAL =   1; EXPRESSED IN ADULT LIVER, SIGNAL = 1.1; EXPRESSED IN PLACENTA, SIGNAL = 0.88; EXPRESSED IN LUNG, SIGNAL = 1.1
agcctgcatagttgttggaagacagactgttttctcactgaatgctgcatacaggtatgtatttgtgtgtgtgtatttatatatatttgtcttttatttttggtagaaaatgatgcatcctgttgccagcagtaatccagctttctgtgggcctggcaagccttcctgcctcaatgaagatgccatgagagctgctgatcagtttgacatatattcctcccagcaaagcaaatacagccacacagtcaaccacaaaccaatggtttgtcagaggcaagacccattaaatgaaacacacttgcagactacaagtggcagaagcatagaaataaaagatgaactaaagaaaaagaagaatctcaaccgatctggtaagcgtggccggccttcgggaaccaccaaatcagcaggataccggaccagcacaggcagacccctgggaaccaccaaagcagctggattta

SEQ ID NO: 11742 - DNA, 495 bp, Homo sapiens; identical to SEQ ID NO: 6354
  MAP TO AC006094.1; EXPRESSED IN FETAL LIVER, SIGNAL = 0.86; EXPRESSED IN PLACENTA, SIGNAL = 0.76; EXPRESSED IN LUNG, SIGNAL = 0.9; EXPRESSED IN BRAIN, SIGNAL = 0.69; EXPRESSED IN BONE MARROW, SIGNAL = 0.9; EXPRESSED IN ADULT LIVER, SIGNAL = 0.8

SEQ ID NO: 11743 - DNA, 442 bp, Homo sapiens
  MAP TO AC002465.1; EXPRESSED IN LUNG, SIGNAL = 0.6; EXPRESSED IN BRAIN, SIGNAL = 0.62; EXPRESSED IN BONE MARROW, SIGNAL = 0.64; EXPRESSED IN ADULT LIVER, SIGNAL = 0.65
tctgaacctggaggatgtgccatattggagtgatggacagagcaaagagtgaaaagacaacagcctggggttctacttcttccttttgattcacctcttacaaacctctagacatgttccttgatttctctagtcctcacctgtagaacagggacaatgacgcccaactgaacaaacttctgatggaataaaatgcaatagaagataagcagggtctttgaagatggagtgagggagctgtgcatgagtggagagccatagggctgggtgaaggcaggagacttacttcggagtaggaccctgccaaaaaggctgtgatccctgtccagggtgttgcaattccagcggtgctggcggaactggtgctggcattctgctgtccactcggccacgccctggctaatggcacgcatcacatctggatgtcggtgacacagctgcc

SEQ ID NO: 11744 - DNA, 475 bp, Homo sapiens
  MAP TO AC004920.1; EXPRESSED IN BRAIN, SIGNAL = 0.56; EXPRESSED IN ADULT LIVER, SIGNAL = 0.44; EXPRESSED IN LUNG, SIGNAL = 0.42
tccaaaacaactttataaatgaaatgtagtatgtatctatctaaattcaagcagtttttttcttagaactagtggaataatcctaaaactaacaaaataaaataagcggtaagatggtcaatcatagagcattaagggagaattactcatcatctagtaaaatgcaccctaaagcaaaagtagttaaaatagtgtgtacttggcacaaaaatacatgctactgttcatccagaagagtcaaatctgcaaatacgaacatgagtatttttatcatggcaccatgtgctatacaagctacactgaaacaagagtgggcacgtgtcttcactccacaatcgagcacacaggatccctgggactagaatcccagggctcacagccattcctgactctccagatgatgccacccaagatggtggtgacagctatgataactgtactcagggcaatggcagccacccttgattgacaacct

SEQ ID NO: 11745 - DNA, 470 bp, Homo sapiens
  MAP TO AC005162.1; EXPRESSED IN LUNG, SIGNAL = 0.77; EXPRESSED IN PLACENTA, SIGNAL = 0.86; EXPRESSED IN BRAIN, SIGNAL = 0.84; EXPRESSED IN BONE MARROW, SIGNAL = 0.7; EXPRESSED IN ADULT LIVER, SIGNAL = 0.7
ctgaggagcaaatgtgtagacctgtacaacctcaagtgttctctcccataaatacagaatccttttatggtgatttaataaaatctgtccaggcagatgtgagaagaaatagcctttaaatcgcatatctagtttgaggcatgtattatgttttatactctctgatttctggtagatagttctctctttcttattgctatgccatttattagcaatttatctgttttgtaaatttatcaagatgctagaatccctcagcatggtacacatgaaaacgtagcaaccagtcattgccagctctcatggtatgtttcccgctgtcgaacttctgtccccagagacgcttgtcatcacctgctgtctactccaaatgccaagttgttttcttcacttggtggctttgggcagagggggagaaatggctcatcacaaagaccagcagcaccttgggcttcaaaggtgggggttac

SEQ ID NO: 11746 - DNA, 481 bp, Homo sapiens
  MAP TO AC005084.1; EXPRESSED IN BONE MARROW, SIGNAL = 0.84; EXPRESSED IN ADULT LIVER, SIGNAL = 0.89; EXPRESSED IN PLACENTA, SIGNAL = 0.8; EXPRESSED IN FETAL LIVER, SIGNAL = 0.72; EXPRESSED IN BRAIN, SIGNAL = 0.75; EXPRESSED IN LUNG, SIGNAL = 0.88
tcatgtcttcaaagggtaggaagaaacataatagtcatcttctgaaattttttgctaccccttgccatatttctacttctagctcagtttaacttttcattttagttaaattttgcaggctaaaccaagttgagaaagcatcagctgtgtctttatacacaggccaaacaagaatacagttttcataacattatgaaaaggaaaaaaaatgaaacagagtagtgactgaaccacaaattatgtcatatttcagatttaatagggtactgatttatctgtactcaccagtggttccccagctcttttgtgaataccaagaatacgaatggcatctactggtaataactgattattgatagaagaattattcatttctgggcttgatggaggtgaatcataacactttgatgccacaatatcatgggcctccaacagtgactataaggagtcaaaatagcctgtggttatttatgatatgtgg

SEQ ID NO: 11747 - DNA, 491 bp, Homo sapiens
  MAP TO AC005091.1; EXPRESSED IN PLACENTA, SIGNAL =   1; EXPRESSED IN BRAIN, SIGNAL = 0.72; EXPRESSED IN BONE MARROW, SIGNAL = 0.87; EXPRESSED IN ADULT LIVER, SIGNAL = 0.79; EXPRESSED IN LUNG, SIGNAL = 0.83; EXPRESSED IN FETAL LIVER, SIGNAL = 0.68
gccaacatatggttacaattgagcaatgatttgacaaatggagttgcatctcaatctgctaactctttccccagtaaatcttttgtcattaaatctgacatgtgtactttatttttcatgatggcttcatttaacaaccagcttgcaaaattcctgaaaatttaatactcagctctcacaatctggtacaagccaactccagcacaccgtcacttacaactccacttcacttacaaactccatgcagagaagtttacactccttccaaactccacttaccaactccacttctctgacttgaaggacaaaatgaggagccatctatttttgttatccaaataatacttctctgacatgaaaatatctttcttctctgtaatcccatctctctgaccattcccacatcccaccataggaaatccatacacctcagggactgtacagtcaggtctgcctctagaagagaaaaccagaaatttggctcagagtgg

SEQ ID NO: 11748 - DNA, 481 bp, Homo sapiens
  MAP TO AC005229.1; EXPRESSED IN PLACENTA, SIGNAL = 0.96; EXPRESSED IN FETAL LIVER, SIGNAL = 0.9; EXPRESSED IN BRAIN, SIGNAL = 0.86; EXPRESSED IN LUNG, SIGNAL =   1; EXPRESSED IN BONE MARROW, SIGNAL = 1.1; EXPRESSED IN ADULT LIVER, SIGNAL = 0.86
acgtgtcacctaatgctgggagggggcacctttgctatgtcgaaattaattaaatgctaactaaaatagttacgtgtgcctaataggcatccgaaagtcagaacgggggaaaaaggctgacagctcagacctccttttctcaaggcaggaaggaggctttggtgagactggaaggaaaggtttggaatcctagatgatgtcaataaaccagactctttgatcccaagtggaattcagggaatagacatgaagactaggccatttccccctccccaaacttcaagcttatctataggaacttggagactttggtgtgggggatggtggagaagaaaaattccagactgattcttctgacttctctcattttaaatacgtaaaatctttaaaacgtttgcttgccattttatcttacatgcaataataacccttagtctaggttgagcatccctaatttgaaaatcctaaatcctccagaatc

SEQ ID NO: 11749 - DNA, 491 bp, Homo sapiens
  MAP TO AC005304.1; EXPRESSED IN PLACENTA, SIGNAL = 0.96; EXPRESSED IN FETAL LIVER, SIGNAL = 0.76; EXPRESSED IN LUNG, SIGNAL = 1.1; EXPRESSED IN BRAIN, SIGNAL = 0.75; EXPRESSED IN BONE MARROW, SIGNAL = 1.4; EXPRESSED IN ADULT LIVER, SIGNAL = 0.85
ctgctgcatacaggggaatctttttttctctctctcttttcctttccaactcagggagctcgatggacagcgccaaagcacggaggcaactgcaagttgctggccagggccactctctggtgaaacagaaaggtttccatgtggaagcccctgaccaccacccagttcaggtgagggacctgagtcctttcccttttttttcctttttctgaatcctattcctttttccctttttctgagttcattttttattcctttttcagtgtttcggctgctatttcctagtagctcccttgtacgtgagggcaactggccgggaccactgtctggtgctgtctgaaggccaaggaatgaacaaggatgactgcccggcccaaaaaaggaaaagactattttctaccctttctagttatagtccctggtccctacgtgtgatgcagcgggcagtggcagcttgtccagggtgaactcacacaggtttcaggcaactt

SEQ ID NO: 11750 - DNA, 468 bp, Homo sapiens
  MAP TO AC005527.3; EXPRESSED IN PLACENTA, SIGNAL = 1.3; EXPRESSED IN FETAL LIVER, SIGNAL = 0.93; EXPRESSED IN LUNG, SIGNAL = 1.1; EXPRESSED IN BRAIN, SIGNAL = 0.97; EXPRESSED IN BONE MARROW, SIGNAL = 1.1; EXPRESSED IN ADULT LIVER, SIGNAL = 0.89
gagattgtgaggccggtgggggccatgcagggggtaaactaaatttacacagtctgagaaagtacgttacccagagaaggcctctggatgaaaacacccaggtcaatgtgtgtatatattcctgaggccagcacttcttcctcccagacacaagcttatcacaccaactgggtagggatgcagacaaggccatccttatactatactctaatttagggtaatagacctggcaaagcccaaagggtgacatgacttctggcagcgcctggtcagtggtgaaggcaaagcaaaaggccagagggccccacctgcatgatgctgttgaggcggggctggaggctgctcaggtactccttcttcacctcaatctccttgagaatcttctccttgttagataggcactctcggtacttctctgccagcctgttgggggaggaaagagcattgtcacctgatatcccccagtga

SEQ ID NO: 11751 - DNA, 413 bp, Homo sapiens
  MAP TO AC005138.1; EXPRESSED IN LUNG, SIGNAL = 0.72; EXPRESSED IN BRAIN, SIGNAL = 0.56; EXPRESSED IN PLACENTA, SIGNAL = 0.8; EXPRESSED IN BONE MARROW, SIGNAL = 0.56; EXPRESSED IN ADULT LIVER, SIGNAL = 0.71
ggaaaactctcagtttcgctgtgaaaaaactaaaaaagtgggctcaagagagaatattaagggtgttgctaagtgacgccttactaaagggattaatatggatagaatgaagccaggctctatccataaagactatgaataaataaacataaaggaatttcagagatcttcaaggcaagctaagaccctgagggccaggttatcagagaggtgcccatggacctcagcattcactgtccagggcttgtttgtgactctgctccccacattccagcacagtgctcctctgctgccccagcagttgctcaaacaggcccagatgtggctcctgccacagctctggagggtgaaagcggtaagccttggtgacatccatgtcatcagcatccacatggttctggctttgcagacat

SEQ ID NO: 11752 - DNA, 476 bp, Homo sapiens
  MAP TO AC004140.1; EXPRESSED IN BONE MARROW, SIGNAL = 1.3; EXPRESSED IN PLACENTA, SIGNAL = 1.5; EXPRESSED IN LUNG, SIGNAL = 1.6; EXPRESSED IN FETAL LIVER, SIGNAL = 1.6; EXPRESSED IN ADULT LIVER, SIGNAL = 1.5; EXPRESSED IN BRAIN, SIGNAL = 1.5
gcacaagactgtcaggagtttccttccttttccgcagtagctgacacaactgcttcaaagcaatgattttttttctttagggactgtatcattgacaggttttacaatttcatttaacactgtgctttgttgagaaataaccacttatttctattttaagggagtcatcatattggaattaaaacacatgtttacaatacatattggcacaatatgaaaaataaacactttttgaattttcaaccccaaacaattgttattaaataaataattattcctcatagtgcatgtcttaatttacctgtcattgcccattgacacaaatgaagctgaataaataatgttaggtagtttattaacgtcttctttcataattctgcattgcactcctttcataagccactgaaaacaaagaagagataaagtgttttttaagtgaattcactgagggagttacacaactaaagttcagggca

SEQ ID NO: 11753 - DNA, 482 bp, Homo sapiens
  MAP TO AC002492.1; EXPRESSED IN BRAIN, SIGNAL = 0.65; EXPRESSED IN BONE MARROW, SIGNAL = 0.51
attccatcctctctcaggcggggaggcttgtacaagggagtcaccttagctgtgtgcaatcaggaatacagcccaggggccgtgcctgacagttaagaggactcagtgtgatcaagctgatcaatatgaagtgggttaggcagctgccagtgctaaattctggttgggagttttccaagaaccagccccacccgtgcgtatctctctgggtaaacctcctgagacttgggagtcaccttagctgtgagaaccgtttttggaacttaccagcaaaaatgacagcccagggtattccaggcagctgcttctccagctccaggcagatgattctggccctgccttgcaacagaaatggaatcgtttcgaggggatggtctccttgctctggatccagcagcagcagatgctccagccgaagacgtgtgtccactctgagcaaggctgagagaatcaaattaatttcttttatgacccgaggcaag

SEQ ID NO: 11754 - DNA, 462 bp, Homo sapiens
  MAP TO AC005154.1; EXPRESSED IN PLACENTA, SIGNAL = 0.68; EXPRESSED IN FETAL LIVER, SIGNAL = 1.1; EXPRESSED IN BONE MARROW, SIGNAL = 0.97; EXPRESSED IN LUNG, SIGNAL = 0.86; EXPRESSED IN BRAIN, SIGNAL = 0.91; EXPRESSED IN ADULT LIVER, SIGNAL = 0.96
atacctggagaaagtgcagcacgagaagaaggttaaaatttaaggaagtgagagcacaaataagagagtgagaaagagcagctggatgtacagaggacacatcaggagatagcggatcatgataccatgaaaatcagactgtcaaggcagcattttctaaaagaagggatgagtaaaagtaggctggaaaatgccactggcttgggcactaggttgtggttgaccttggtgacagcagaggcagcagaggcccggcatggcctggcctcggtgcctctccatggccatctccggcaccctggagatgccatcctctggccatacttgccatttcacggagctgccacagctctcaagcttctccattttccttgacccatcccagtttgtcctcttgaccaactctgactgattctccaaaattcagctcaaccttaggtctccaggtcagtttctcccaaa

SEQ ID NO: 11755 - DNA, 471 bp, Homo sapiens
  MAP TO AC005273.1; EXPRESSED IN PLACENTA, SIGNAL = 1.1; EXPRESSED IN LUNG, SIGNAL = 1.2; EXPRESSED IN FETAL LIVER, SIGNAL = 1.1; EXPRESSED IN BRAIN, SIGNAL = 0.94; EXPRESSED IN ADULT LIVER, SIGNAL = 1.1; EXPRESSED IN BONE MARROW, SIGNAL =   1
tctctgccttgcgtttatccatgtgaaacaagctggtggtgagttcaacaaccaaagggtcatgtgattaaatacattttgaaatgactgcctgccctagcctcttaaaaaaattcacaatgctcattagcacaacaatgacttgaataaatctcccaatagaaaaatctgcttcattttacttaacacactcatgtctcaaattagttgaatacgaaaacctgtttttttttttaatttatgtaaacattattaacatttctcagattgaatattttaaataacatacatactttgggaaacattcatgagaatcatagcattcgcactccttagcctgacacatttcttcataatcacgtccttgctgtccagtcttatattccattacttctccgtggacatggtcatccccaggaaggcccgtccacttttcagtctattctctctgaccactcttactatccctcc

SEQ ID NO: 11756 - DNA, 487 bp, Homo sapiens
  MAP TO AC005536.2; EXPRESSED IN LUNG, SIGNAL = 0.69; EXPRESSED IN BRAIN, SIGNAL = 0.66; EXPRESSED IN BONE MARROW, SIGNAL = 0.5; EXPRESSED IN ADULT LIVER, SIGNAL = 0.62; EXPRESSED IN PLACENTA, SIGNAL = 0.71
ttcccagagatattctgacagatgagagagaagattgttcacctctagatttttccctcttttttcttttgatatcgagtgagcatgtatgtcttatttgtgtgcagaaatataaataatgcaatgaaggatcacaaaagaggagcctcctcacaactgatgagccatttttttttaattaacagaagaaaaagataaggaccatactgaaacaattgtctgaggtcccagaggtaaaccttaatacctgcattttaacaagtgtttgaaattgaaccaagtattggaatagaggaggatataaaaaatgactatgttgtcaattatttcacacttcagaaaaataatacacatttgaaatctggcaagcatgaaaaaggtcacgtggaaaagaactctgctacagatgaaggtattgctttgctgtcttacacataaattattgaataagattacagtatttacaaggaaagaaatttttcaactg

SEQ ID NO: 11757 - DNA, 486 bp, Homo sapiens
  MAP TO AC004108.1; EXPRESSED IN BRAIN, SIGNAL = 0.91; EXPRESSED IN ADULT LIVER, SIGNAL = 0.74; EXPRESSED IN HELA, SIGNAL = 2.2; EXPRESSED IN BONE MARROW, SIGNAL = 0.78; EXPRESSED IN PLACENTA, SIGNAL = 0.78; EXPRESSED IN LUNG, SIGNAL = 0.82; EXPRESSED IN FETAL LIVER, SIGNAL = 0.86
aaatccacccagggaaaatctggtcaccttccaactgcctcattgcttcatagcttatgaagtcctttcatatcatctttcatttgctgtcacaacagcccgtgaggtacacagagcaggagtaattatccatattttacacaagaagaagctgctttcctcacgttggagctggaaaggtcacgttggaacctgaaggcagaatttcccggaaccaacctggtgcaatttccaccatgtcaatgatgaactttgctgacggtgtcccagaagggtcatctccatgaaaggacgttgtcattagtcacttgctgcttcactttccagtagatagtacacttcagttcttccacgtgtatatagcactttataatttccatccgcagtataaaaaggtcatagaaaatccacagaaacctcaggcctcccaggagctgaaaggccattctactgggcaggccccattcctctgtacccacttcagca

SEQ ID NO: 11758 - DNA, 470 bp, Homo sapiens
  MAP TO AC005539.1; EXPRESSED IN PLACENTA, SIGNAL = 5.1; EXPRESSED IN BONE MARROW, SIGNAL = 0.68; EXPRESSED IN LUNG, SIGNAL = 0.9; EXPRESSED IN FETAL LIVER, SIGNAL = 0.8; EXPRESSED IN BRAIN, SIGNAL = 0.81; EXPRESSED IN ADULT LIVER, SIGNAL = 0.8
ccaaacatttaaggaagaactaataccaatcttactcaaactatctgaaaaatcaaggagaagtgactacttccaaactcattctacaaggctattattgccccaataccaacaccaaagatacctcaagaaaagaaaactacaggtccatatctctgatgaatactgatgcacaaatcttcaactaaatacatatttaacaatacattaaaaagatgattcatcatgaccaagtgggatttatcccagggatgcaatcatggttccaacatatgcaaaataatcaatgtgatacattatatcaacagtatgaaggacaaaaaccatacaatcatttccatcaatgctgaaaacccatttgacaaaattcagcatctcttcatgaaagaaaaccctcaaaaaactgggtacagaaggaacatacgtcaacctaataaaagccatatacaaaagatccatagcagatgtca

SEQ ID NO: 11759 - DNA, 458 bp, Homo sapiens
  MAP TO AC004056.1; EXPRESSED IN PLACENTA, SIGNAL = 0.58; EXPRESSED IN LUNG, SIGNAL = 0.56; EXPRESSED IN BRAIN, SIGNAL = 0.57; EXPRESSED IN ADULT LIVER, SIGNAL = 0.52; EXPRESSED IN BONE MARROW, SIGNAL = 0.6
aaattccagagaagggggtgtacctcacaagcttagttcaggttttatgctcaccccttagataagggagaaaaagatagctggggcagacccagcaggctacatataatgaggaaatgttggtcttgcagttaaattgtggtggtttccaaaagaacacaatagctaagcaacaaaaataaaagatattaatgatgcctatcttttatcttaagaaaaaaaaagttttctggttctttacgtatttctgcctaaagacccattaaaaactgaagggctcactcatattcacagatccctgctgaagctgggaaccagagggctgagtcactctcccctgctgtttatccgggtcccacaccagcttgctgtcctttctcatcatctcactttgggccaaatgtaactagagacttctcagcttatttttagtagctggtagagaaacataatgtgtt

SEQ ID NO: 11760 - DNA, 465 bp, Homo sapiens
  MAP TO AC002528.1; EXPRESSED IN PLACENTA, SIGNAL = 0.95; EXPRESSED IN LUNG, SIGNAL = 1.3; EXPRESSED IN FETAL LIVER, SIGNAL = 1.1; EXPRESSED IN BRAIN, SIGNAL = 0.97; EXPRESSED IN ADULT LIVER, SIGNAL = 0.86; EXPRESSED IN BONE MARROW, SIGNAL = 0.97
ttttagatgaccttgcctcagtctagtaggtcttatgttcatctaggtaactgatacttcaaagacaagtgaattaagttttctttaaaagtacccttttcctaagcttggatctgagtctactcttcctgagatctttttttttcttttttttttttttcatgtttgactcttagtatctgagtccttctccacttaactggaatttcatcctattttctgtagtttgaatataatgtagaaggagtgacttccaaggaaatggctacccaacttgccttcatgcgcctgctggccaactatgcctctcagaacatcacctaccactgcaagaacagcattgcatacatggatgaggagactggcaacctgaaaaaggctgtcattctacagggctctaatgatgttgaacttgttgctgagggcaacagcaggttcacttacactgttcttgtagatggctgc

SEQ ID NO: 11761 - DNA, 460 bp, Homo sapiens
  MAP TO AC004123.1; EXPRESSED IN BRAIN, SIGNAL = 0.94; EXPRESSED IN BONE MARROW, SIGNAL = 0.86; EXPRESSED IN ADULT LIVER, SIGNAL = 0.9; EXPRESSED IN PLACENTA, SIGNAL = 0.72; EXPRESSED IN FETAL LIVER, SIGNAL = 0.92; EXPRESSED IN LUNG, SIGNAL = 0.85
gaatatcccagcaatggggaatcataacaaaagtaaccatagtaacagcaacatgtttacagaccttttcatttataaagtacttttgtaatttctgattcttaccaagaaaggagagctataaattaacgtcccctagtgaggaggttcacttcgtgcctagggtcactcagggatgagctgagctgagctatggatccagacttagtccgaggccacatgccttgaaccctggcttccaggagacttgcaggggatgggaatctattctttgctgtgcctttttctcatgtttctccctcacagcatacacagtgggaagatgacagaatttcagatccaaaaagccatcacagtcatcattctctctctttccaccactcaagtggaatgactgtattgatcaagattcttttggttgtaagtaacagaaagcgccactcaaaatgatgtaagaaaa

SEQ ID NO: 11762 - DNA, 375 bp, Homo sapiens
  MAP TO AC005350.1; EXPRESSED IN BONE MARROW, SIGNAL = 0.71; EXPRESSED IN PLACENTA, SIGNAL = 0.79; EXPRESSED IN LUNG, SIGNAL = 0.88; EXPRESSED IN FETAL LIVER, SIGNAL = 0.71; EXPRESSED IN BRAIN, SIGNAL = 0.81; EXPRESSED IN ADULT LIVER, SIGNAL = 0.64
aattttaacatttgtacttcagtgtccaaattgtttaattagtaagaatcaatcaatctatctacctatcatctctctaatgcaccttatatataccttatatgtaatagatacattagatatttaggtagtatataaaatataatcatacatgtgcagagaggatgagggagagagtaggttaatgcagtaatagtaatacagacagagacttctatataattatcttaataggtttctattttcttcctcattccctattttctagcagtttcaacacactcttttatgtctacttcgatctccgatcggcccagccaaaccatgagaacagctctcttgaaggtcaccaatgcccatcatttggctatatct

SEQ ID NO: 11763 - DNA, 472 bp, Homo sapiens
  MAP TO AC002536.1; EXPRESSED IN PLACENTA, SIGNAL = 0.92; EXPRESSED IN FETAL LIVER, SIGNAL =   1; EXPRESSED IN BONE MARROW, SIGNAL = 1.1; EXPRESSED IN ADULT LIVER, SIGNAL = 0.97; EXPRESSED IN LUNG, SIGNAL =   1; EXPRESSED IN BRAIN, SIGNAL = 1.1
agccacaggtaacaaaacaggaaatgaaatgttccagacattccgaaaagttcgaaagaaacacaccctagcctcaaaatctccggttaaaccgtggttgcacaacaggttctatttattcctgcattttctcaataagttcttctttatatttgcctttctcttttccaacttgttgagacttggctttgcgttcaagaatttttttccgatccttgtccagttttagcctggtgataaccaccttgcttgggtgaatgcccacgtggacagtcgtgccgttggccttctcacgctgcacccgctcgatgtagatgacatatttctttctgtacacctggattaccttgccaatttgctgacctttgtagtgtcctcgaactacctggacctcgtcgtccttgcggatgggcatggagcggacattgtacttctgccgcagctccttggagagcggggatgacatgatctt

SEQ ID NO: 11764 - DNA, 489 bp, Homo sapiens
  MAP TO AC005178.1; EXPRESSED IN BONE MARROW, SIGNAL = 0.56; EXPRESSED IN PLACENTA, SIGNAL = 0.73; EXPRESSED IN LUNG, SIGNAL = 0.63; EXPRESSED IN BRAIN, SIGNAL = 0.63; EXPRESSED IN ADULT LIVER, SIGNAL = 0.52
tgttgacatcacctttttacccattttttaaatggggttgtctctgagttattgagttctgaatattctacattctaaatacaaaatctttttcagaaatatgtattgaaaatacattctctcaatctgcggcttgttcatttccttaacagtatctttaaaagaacatagtttaatttcatgaagtcaaatttattagttttagttttatcatttctatttcttggtttttgtgtcctaagaatctctgcctatccgaaagtcatgacgatttttctcctaatttttctggaggttttatagttttagcacttacgtttaggtttataatccatttcgagttgacttttgtgcatggcatgaagtaaaagttgaggttcattattttccttatgagcattcaggcattccagcaccatttgttgaaaagactaacctttctccatcaaattaccttgacaaatttgttgaaaatcaattggccaccta

SEQ ID NO: 11765 - DNA, 467 bp, Homo sapiens
  MAP TO AC004808.1; EXPRESSED IN PLACENTA, SIGNAL = 0.76; EXPRESSED IN BRAIN, SIGNAL = 1.2; EXPRESSED IN ADULT LIVER, SIGNAL = 0.76; EXPRESSED IN LUNG, SIGNAL = 0.85; EXPRESSED IN FETAL LIVER, SIGNAL = 0.81; EXPRESSED IN BONE MARROW, SIGNAL = 0.88
ggaggagttgagggcattagttgtgttcttgccttcttcttgagccagaggtcagtaactgtctgctagtcagtggtatggatgccttatttgtgcccacagcctgtggctttcaggctatacagtatgtccgtgacagtcttctgatatacttgtccggtatctgtatcactggaacaaatcaaaacaagaccccttattcaaatgcaggcaaatttcagcacttacttatagtggatccagactcaggcctgttcagggagctgatgatgacaaagccgaagccctcattctctttgcggtgaatgaccacatcactggtctgcaggctgtgggaggcgaagccttcagggggagaggcattgctactgggggcagcgtggttgctgttggtgtaggttgcgtagtcactgcgtggagagctgtggtgggtggatacagagcctggacttctcccgttctctggg

SEQ ID NO: 11766 - DNA, 426 bp, Homo sapiens
  MAP TO AC002540.1; EXPRESSED IN PLACENTA, SIGNAL = 0.71; EXPRESSED IN LUNG, SIGNAL = 0.5; EXPRESSED IN BRAIN, SIGNAL = 0.86; EXPRESSED IN BONE MARROW, SIGNAL = 0.68; EXPRESSED IN ADULT LIVER, SIGNAL = 0.42
tccattaccacctaattaaggaaagaaataaaagtaggacataaaagtcaagtaaatagtaacaaatatgggtctctatcaatttcaataagccagcgaatatagaaggaaatatatatccttctccttaaacactatcttaagaaagtaacatgtaaaatatttttcatgttaaaatttagcattataggaagcatgacaacattctgaaggttttacctgtggaagaaaaacaacaacaaaacaacaacaacaacaacaacaaatatccgaagaaagagttaattcacaaagacctaaagatgaatagtcttcttcacatttgtattaaaatcttatcatccttctttcctcagaaatcttttcgccttatttttttccctactatttggaacaatctatttctctgcccaaaagatggagaaa

SEQ ID NO: 11767 - DNA, 445 bp, Homo sapiens
  MAP TO AC004129.1; EXPRESSED IN LUNG, SIGNAL = 0.68; EXPRESSED IN BRAIN, SIGNAL = 0.98; EXPRESSED IN FETAL LIVER, SIGNAL = 1.8; EXPRESSED IN BONE MARROW, SIGNAL = 1.2; EXPRESSED IN ADULT LIVER, SIGNAL = 1.7; EXPRESSED IN PLACENTA, SIGNAL =   1
ttgtggcaaagatggttttggtttcctcctaatttatctatgtgacctaattaacttttgcttccctcccaatgaagccatttgcatttcagtaactaaggcattactttgtttgattagaaagtacaacctcttcactttttcactctcattaattaaaacacatcgtggtaaattaagccatttggatttcatcgtgggtgggtgacattttaactactgccccttcaaccttctctctctgtcaatctcagctatgtcctacatcacgggagagcgagagggcaatggcagcaggctgatggaggaacggagccagcagggagccaggggttatacatcactgcagtcggtgacttctctgatgcatgaggcactcacttgccaatcaaacctgatacagcttttaccttgtggggttatgcgtgactttatccaagacatg

SEQ ID NO: 11768 - DNA, 483 bp, Homo sapiens
  MAP TO AC005224.1; EXPRESSED IN LUNG, SIGNAL = 0.5; EXPRESSED IN ADULT LIVER, SIGNAL = 0.48; EXPRESSED IN BRAIN, SIGNAL = 0.63; EXPRESSED IN BONE MARROW, SIGNAL = 0.55
tggaaaagtctcaaaacaagtggactattgtagccttcaacaatcaaaacaaacaaaaaacccaaacaaaactaaccaaacagaaaccttcagaaaactgggaagaaaatctgatcttcagagttaacaacataataatagtcaaatatccaattttaaacaaaaaaatcacaaagcataaaaagaaataggaaaacatgacccacttttcaaaggaacaaaataaactgacaaaagttgtcctaaggaatcctagacatttagacttttttgacaaagactttaagacaactgcattaagtatgtccgaagggctaaaggagaacacagaaaatgaaatcaggaaaacaatgtttgaacaaaatgagaatatcattaaagagaaaggaattataaaggggaaacagacagaaaatctggagaagaaaagtacaataacttaaattaaaaaaaaatcagaagaggggatcaaaagcagatttg

SEQ ID NO: 11769 - DNA, 457 bp, Homo sapiens
  MAP TO AC005084.1; EXPRESSED IN LUNG, SIGNAL = 0.61; EXPRESSED IN BRAIN, SIGNAL = 0.69; EXPRESSED IN BONE MARROW, SIGNAL = 0.66; EXPRESSED IN ADULT LIVER, SIGNAL = 0.5
cagggttcctggtgttaatgaagaaatctactatttcctttacaatagtaaaatagcattgtttaaaaattcaaaaattcacccatgacaaaataagccatttcagaacactcaaatcaattttttctcttttctttagcaaaatagtagcaactgatagttatttccaacactgtgattaaaaacatgaaagtatttttaatactaccaaaaattttattactaacctgttgaggagtaatggtatctctataacttggtaagatttttagggtgacacttccactaatatttttcagtaattcttgtaattcctttggattatttccaacctcatggccattgacttctttaattatatctcccacatgaagtagaccttgtcgatctatcattcccccatggaggattcgggcaattaccagatcattattttcaaccctaaatgtcacaccct

SEQ ID NO: 11770 - DNA, 488 bp, Homo sapiens
  MAP TO AC005229.1; EXPRESSED IN LUNG, SIGNAL = 0.93; EXPRESSED IN BRAIN, SIGNAL = 0.98; EXPRESSED IN BONE MARROW, SIGNAL = 0.87; EXPRESSED IN ADULT LIVER, SIGNAL = 0.86; EXPRESSED IN PLACENTA, SIGNAL = 0.79; EXPRESSED IN FETAL LIVER, SIGNAL = 1.1
tcagaaagcctgtgggctactttaacatgaaataatgaccttaatcacatttgacaaccctttctacttaaaattatttatgagattcaagcgagtagttaggaacttaatgaccgatctcactttaaatggtccttccttcctaatgcttttgctataatgacttgcaacataaggttgactttgttggttctagaaagtaagacaaagactttccttcatttaaaaatgttattttaaaaatttctttccttaagctaaaacagatgagattcaaaaagggcatatgtccctaattattatgattaagcatttattcttttcacgttagtgtttgggcatcttttggtcacccagtcctgttctctcttctcttttttcgctttcctgcctgccacatttcctgatggcaaagaaaacaaataattcaaaagagaaaagtacacaatatacacagatatacaaatgtagagagagggctcttgcaa

SEQ ID NO: 11771 - DNA, 379 bp, Homo sapiens
  MAP TO AC004038.1; EXPRESSED IN LUNG, SIGNAL = 1.3; EXPRESSED IN FETAL LIVER, SIGNAL = 0.9; EXPRESSED IN BRAIN, SIGNAL = 0.58; EXPRESSED IN BONE MARROW, SIGNAL = 1.3; EXPRESSED IN ADULT LIVER, SIGNAL = 0.88; EXPRESSED IN PLACENTA, SIGNAL = 1.3
ttccttcagtaataaattaaccttagcttattgtaatttttttactttgtcaactttttaattttttaattttttgactcttttgtaataatgcttaacttaaaacaccaacatatcatacagctgtataaaaatattttttctttatatccttattttatagccttttttctattttaaaaatatttttaactttttaaactttcttgttaaaaactaagacgtgcacacacagattagcctaggcctacacagggtgaggatcatcgatggatcatcaatatcactgtcttccacctccatgttttgtgccactggaaactcttcaggggcaaaaacacatatggaactgtcctctcctgtgataacaatgcctcct

SEQ ID NO: 11772 - DNA, 485 bp, Homo sapiens
  MAP TO AC006324.2; EXPRESSED IN LUNG, SIGNAL = 0.54; EXPRESSED IN ADULT LIVER, SIGNAL = 0.49; EXPRESSED IN BRAIN, SIGNAL = 0.59
ttttctccgactaagccacccaattaaatcagttgctatgtttacctggcaggggaataggagccactgctgtttccccagcagttcacagtgtgttatcttctttgaagccctgctctcctgtttatttcctttgtccttcccacctgaagtccctcctgcagcagctatttgatggtcttgttatcagccactctgctcctttgtctatgccagaaaaaaaattatagtagcaggcagctgtgccctcagtcatggtggagtgcttacatcctgggataggtcttctaaattgggtgagatgacataggctttcagtttagcagtgaactttgtgtcacattgatgctgcagcctgtttctaagactccccagatgtgtgtgacagttcttattatgcttctccagaacagggaccctcaacatcatggtgtcatttgtagagtttgttatgagtaatttcttgccaatcataactcaatgaa

SEQ ID NO: 11773 - DNA, 381 bp, Homo sapiens
  MAP TO AC005294.1; EXPRESSED IN PLACENTA, SIGNAL = 0.92; EXPRESSED IN LUNG, SIGNAL = 0.9; EXPRESSED IN FETAL LIVER, SIGNAL = 0.85; EXPRESSED IN BRAIN, SIGNAL = 0.64; EXPRESSED IN ADULT LIVER, SIGNAL = 0.9; EXPRESSED IN BONE MARROW, SIGNAL = 0.82
ggccctaggaatacagccacgaataaaatagagaaacctctaccttttcagagtttacatgctagtatgtgaaaacagacaataaactaaaatacattggggaggggcaaggattgctgctttaaatagattctaagggagggcagcattaaaaagaggcatctaacctgtgcactgagggatgtaagggtgagccatgtgactttctgaggataatgcatcccaagcagaggaaactgcaagttcaaagctgtggggtgaggagatacttggcctgttcagggaaggggagaagccagagaagagctcaacaaggtgaggggagaccaggccatggagagcatttgcggcccctgcaaggcctttgactgctaccatgca

SEQ ID NO: 11774 - DNA, 456 bp, Homo sapiens
  MAP TO AC005509.1; EXPRESSED IN BONE MARROW, SIGNAL = 0.69; EXPRESSED IN PLACENTA, SIGNAL = 0.71; EXPRESSED IN LUNG, SIGNAL = 0.9; EXPRESSED IN FETAL LIVER, SIGNAL = 0.78; EXPRESSED IN BRAIN, SIGNAL = 0.69; EXPRESSED IN ADULT LIVER, SIGNAL = 0.62
caacatttcttttcgaagatgctttacatagacaagttaattgctctgcatttcaaaattatttgccgaacatacagcgctatctcttcttctgtattccttagtgtaccactttagtatatcatgaggtaatttacattgatattttcaatgatgaaagaacagaataatttatttcatgcagatattatttgttgtgtgctttcttgattaaaggagattattctggactgatacagggattaatccacgaattgaaagttcttccctccaaggccttggccgtctggttatagccagctctgatctaatctggcccagtggaataacgattgacttcttaactgacaagttgtactggtgcgatgccaagcagtctgtgattgaaatggccaatctggatggttcaaaacgccgaagacttacccagaatgatgtaggtgaggctttgggatg

SEQ ID NO: 11775 - DNA, 450 bp, Homo sapiens
  MAP TO AC005304.1; EXPRESSED IN LUNG, SIGNAL = 0.94; EXPRESSED IN BRAIN, SIGNAL = 0.7; EXPRESSED IN BONE MARROW, SIGNAL = 0.85; EXPRESSED IN ADULT LIVER, SIGNAL = 0.88; EXPRESSED IN PLACENTA, SIGNAL = 0.8; EXPRESSED IN FETAL LIVER, SIGNAL = 0.87
ggactgttttctgttcagcccttagggaagaaaccctactggccattagcaagagaggggatataatgagacctatgaaccccccatctggttatgaccaggaactcagctttgaaggattttctgaggatccttcagccaagaaaggggtctgttcagtcaactgggggcttaaaattttacttttatttctcattcaccacttttggtgaagatttgccacagacagcatcaatggccaaacctttattttgtcccgtatcattgtcagaatgatgttgctgcccgccccaggtccgtcctgtccatgacccatcctgtggtcaaaagacttagagccaaaaatcttacagccaatttcatcattccagacaggaacggaggtggacaggtatctatcaacccttaaaaccttttaagcaatgtaagagccaaaaatcaaagccaaaa

SEQ ID NO: 11776 - DNA, 485 bp, Homo sapiens
  MAP TO AC002059.3; EXPRESSED IN PLACENTA, SIGNAL = 0.94; EXPRESSED IN ADULT LIVER, SIGNAL = 1.1; EXPRESSED IN LUNG, SIGNAL = 1.1; EXPRESSED IN FETAL LIVER, SIGNAL = 1.1; EXPRESSED IN BRAIN, SIGNAL = 1.3; EXPRESSED IN BONE MARROW, SIGNAL = 0.98
actatgaacaagagggatttgttacaattctatttcaatcttctctaagaaattctacggaatcagggaatgcagggaagtttctatttgctgatttaccttttttctttccacagtggatatgacgtcagatattgacacagccaacaatcgactcatcatttctgaagacctgtggagtgtccattgtggatttcttagaaccgcacagagtatgccgagattcaaacaagtcatctgtgtcctgggctcccctcgcttcacctctggacaccattactgggaggtagacatggggacaggcaaataatgggatttgggtgcctgcaaagaatctgttaatcgacaagagaattgtgtggtcttcagaacttggcttctggactgtgggtatgaggaaagaaaagctctttgcagccagcactgtgcctttaaccaccctctgggtgagtccggggctatgcagggtaggcattttcctggat

SEQ ID NO: 11777 - DNA, 423 bp, Homo sapiens
  MAP TO AC005600.1; EXPRESSED IN ADULT LIVER, SIGNAL = 0.63; EXPRESSED IN PLACENTA, SIGNAL = 3.6; EXPRESSED IN LUNG, SIGNAL = 0.64; EXPRESSED IN BRAIN, SIGNAL = 0.72; EXPRESSED IN BONE MARROW, SIGNAL = 0.61
gaactcagggcagctttcagttgctgctgggctggcccaccgggtgcccaggattcagttgctggtctgtccgagtcagggactttgcaggcaggcatgggggtggggcccgtctgggtcctgactgtgctggagcatgtagaaacccctcctgggcgccccacctgctgtttctgcggcccctgataaacgtgtggtgggcactgcgggctcaggcgtgctactctcggtcccaagggtgactgggagggcgtcccacagcaagcaagcagctctgaccctgtgtgctggccgggctcgtgttccaggccatggcatgtccgaacgaggtggtgtcctatgagatcgtcctgtccatcaccaggctcatcaagaagtataggaaggagctccaggtggtggcgtgggacattctgctgaaca

SEQ ID NO: 11778 - DNA, 461 bp, Homo sapiens
  MAP TO AC006409.2; EXPRESSED IN LUNG, SIGNAL = 0.63; EXPRESSED IN BRAIN, SIGNAL = 0.67; EXPRESSED IN ADULT LIVER, SIGNAL = 0.6
cagaaagagggaacattgtgggaagacctgggttctatccccagctctgatgctacttgtctgagattttgggcaagacctggcctctctggggctcagtttcctcattggtagtaataggagggccccaggtgatcgctaaggtccatctgctgattctcccaggtccctcttgttcttgcctgggtctttccttgcctctggggaaagcacacggccctcctgcctcagcttccattcctggaaggggaaaaggatcctaggaagtccctcccccacggtccctctaacccttccccactccctcccctagacccctacgtgaaggtatggctgatgtacaaggacaagcgggtggagaagaagaagacggtgacgatgaagaggaacctgaaccccatcttcaatgagtccttcgccttcgatatccccacggagaagctgagggagacgaccatcat

SEQ ID NO: 11779 - DNA, 485 bp, Homo sapiens
  MAP TO AC005610.1; EXPRESSED IN BONE MARROW, SIGNAL = 0.61; EXPRESSED IN ADULT LIVER, SIGNAL = 0.64; EXPRESSED IN LUNG, SIGNAL = 0.73; EXPRESSED IN BRAIN, SIGNAL = 0.84
ctcaggatcaagagtgctggccagtagctacttaatgtaaatctgtgtaagtggtcacataagttctgtagttaaaaaaagaaagtaaagaagaaagaaatgtttatcttgaagatttaaataaaatcttttgagaaattttatattttatccttagcaaactttaagattatgactaagtactaattattaaaataaatgcataataaactctgttgatcaatttttgatatattttttcttctaaaatgtgtatgaacaactattaagcacctacggtgtgcaggcactttgcagatactgaggacagcaaagaatgaacaaaataaatgcttacccatgtggagctcagtttctagaggggaagacagatgaagcaaatcagcagacgtaagtgcttgaggcactgtagatgtaggtgaagaatattgagagctggtgggaagggacacgctctctgaaggggaagcagagggaggaccttt

SEQ ID NO: 11780 - DNA, 473 bp, Homo sapiens
  MAP TO AC006241.1; EXPRESSED IN ADULT LIVER, SIGNAL = 0.64; EXPRESSED IN LUNG, SIGNAL = 0.95; EXPRESSED IN PLACENTA, SIGNAL = 0.96; EXPRESSED IN FETAL LIVER, SIGNAL = 0.89; EXPRESSED IN BRAIN, SIGNAL = 0.87; EXPRESSED IN BONE MARROW, SIGNAL = 0.82
ggagaaagatgtacctcagaattgtgtggttactaagatcttaggcttaagagagactacctggatcctcgtccaactacttcctagcttggtgcccttgggcaagttatttaacgtttctgagcctcagttttggtatctgtagaatgtggataatagaatctacattgtagaacatgataaggactgcatgagcttggcacagggcctacacgcagcgtgctcagtggccaggagcactgctttgaccttttttccttctgtcttatttgaatgtagggtaagagtaaagtctccaccagaagctggtacccagttaccaaagatcatcttcagcagggatgagaaagtccttggtcagagccaggagcctaatgttaaccctgcttcagcaggcaaccagacccagaagacacaaggtaaaccgtaaggtggaaactggctttcagttttcactacctgctttgtagctt

SEQ ID NO: 11781 - DNA, 476 bp, Homo sapiens
  MAP TO AC005536.2; EXPRESSED IN BRAIN, SIGNAL = 0.62; EXPRESSED IN BONE MARROW, SIGNAL = 0.64; EXPRESSED IN ADULT LIVER, SIGNAL = 0.58; EXPRESSED IN PLACENTA, SIGNAL = 0.64; EXPRESSED IN LUNG, SIGNAL = 0.75
aaacaactgcaaacatataggtcaagacattatgattgagaccaaaaaggttttttctctttacttatttaatgttaacatggaggatcatgtgagtgcctattttccctgtagtaattatagctgattttaaataacactacataggagctttgcagtaatactggtactactgcattgtaattcatattagtttaccagcaaggattaaaaatgatttagtgattaaactttccttacaatgttctcctgaaaaaaaaaatgctaaattctggttcacaggtgggaaagatgaagcgcaacgctgtgattatctaagggcttgtttaaaataccagaacatgcagcaacttgagagtcaggaaatctggatccaatggctcacaaatgaccacaagccatgtaagactcttgggccttaattttcacaggtataaaatcagtgttatagctaaaggactctgacagatgtaaca

SEQ ID NO: 11782 - DNA, 474 bp, Homo sapiens
  MAP TO AC005510.3; EXPRESSED IN BRAIN, SIGNAL = 0.6; EXPRESSED IN ADULT LIVER, SIGNAL = 0.66; EXPRESSED IN PLACENTA, SIGNAL = 0.69; EXPRESSED IN BONE MARROW, SIGNAL = 0.71; EXPRESSED IN LUNG, SIGNAL = 0.68
tgagcaacaaggtgctgaacaacacgggtgaaaaacagagacaagggtttatgaatgttgtatttatggcacttcttttaggtctgaagtgtagtccctctggttaaacaacaaaagtctctgttttagtttgactaccaagcactttacagttgtgtgtatttatttcataacttttgagggatttcactgatgtaaccattgtggcactactaaataacatcaagacatgccttcagcttgcgccatgccacaatctgctatcctacaacaaaatgctagtccagacaaatttcaaatggtcacatatacattttcacagatttccatgacatgtgaaatgtgcctaacaacgacagaagtaagtgtgccaagactcacatttctcagaacttttggtaaaggttagtatggttactactcttcaaacaatttcccttaactgaattctctttgatatctggggtctcagaa

SEQ ID NO: 11783 - DNA, 474 bp, Homo sapiens
  MAP TO AC004098.1; EXPRESSED IN BRAIN, SIGNAL = 0.61; EXPRESSED IN BONE MARROW, SIGNAL = 0.77; EXPRESSED IN ADULT LIVER, SIGNAL = 0.76; EXPRESSED IN PLACENTA, SIGNAL = 0.59; EXPRESSED IN LUNG, SIGNAL = 0.45
gcttaaaatgtatttatttgcagacctaatattaatgtaaaatgtagacgtatatgtacatataatttgcttgaatgcagatatttattgtaaataaataataagaaacgcattattggaaagatataggcatggaaataaggcatgtaagaattgtagaagaaagttatgagaaaagtaaaagtagctcagatgatagtctggaaggtttgctttgcccagagagacctcatttccccctcacttttggccttgctttgagaagtccagaagtttgctattagactactaattattgtctttctctacagattgaagtaggactggttgttggaaacagtcaagttgcatttgaaaaagcagaaaattcgtcacttaatcttattggtaagatttacagtttttagaagatttgaaatgaagtgggcctatttctatatgtaactcaactacagtgatttccaaatggggaaa

SEQ ID NO: 11784 - DNA, 390 bp, Homo sapiens
  MAP TO AC005324.1; EXPRESSED IN LUNG, SIGNAL = 0.71; EXPRESSED IN BRAIN, SIGNAL = 0.66; EXPRESSED IN BONE MARROW, SIGNAL = 0.65; EXPRESSED IN ADULT LIVER, SIGNAL = 0.5
cggaaatggatttttgtcatcgtatgagagtggggatccctcagagcctgttaattctcaaccttgccttctgctgcctcccttgttgaaaggccctggattttcctttacaccactgctgtaggcaaaagtcatggggctaagtcagtcccaggagggacactgactcttctttcatggataatccttttcccctggcactcaggtgggatcaaaaccgagtcatccactattccgggggagatctgatagctgtgtcatctaatcgaaagatccatcttctggacatcatacaagtgaaagcgatacccgttgaattccgaggccatgctgggagtgtccgggccctcttcctgtgtgaggaggaaaactttctcctaagcgggagct

SEQ ID NO: 11785 - DNA, 450 bp, Homo sapiens
  MAP TO AC003682.1; EXPRESSED IN LUNG, SIGNAL = 0.41; EXPRESSED IN BONE MARROW, SIGNAL = 0.51; EXPRESSED IN BRAIN, SIGNAL = 0.61; EXPRESSED IN ADULT LIVER, SIGNAL = 0.41
gttgaatcaagctggtggtgatatatttcatagcaggaaaatggaggaaatacatgtccataatcagaggatttgaatcaaggatgaaagcttcatgatgtaaaatattacatggcagttaaaaacaattggctagaggtaagcccatgaaatataggatagaaatataatattttgctgtagtttgagtgaaaaagaaaaaaaaagaattgtgaggtctacaataaaacataatttaaaaataatttaataccacaaaaactccaaagaaaaaaaaccaaaacaacccagacacttcttactagaacatatgttccatgcttctatctcggcttctggtagccccgtgtgttccttggcttgaagatgttcttcctgtgtcttcacatcgtcttccctctgtacatctgcctctgtgaccaaatttcccatttttctaaggacacagtc

SEQ ID NO: 11786 - DNA, 498 bp, Homo sapiens
  MAP TO AC003043.1; EXPRESSED IN PLACENTA, SIGNAL = 0.67; EXPRESSED IN LUNG, SIGNAL = 0.69; EXPRESSED IN BONE MARROW, SIGNAL = 0.49; EXPRESSED IN BRAIN, SIGNAL = 0.66; EXPRESSED IN ADULT LIVER, SIGNAL = 0.56
tttctttttggagtgatggaaatactctaaacttagaatgtagtggttgtagaactcggggagtaataaaagccactgaattgtgcactttaaatgggtgaattttatggcatgtgaattatacttcaataaagatgttacaaaggaaacttataacagtatacttccatttcttctgtccctgactttgaatattgttgttagacattttactgtagttggtatattcatgcatattaatgagattggctattttttcagatgcttattgagccaggtgaggtgatgtgagcctatagtcccagctacttgggaggctgaagcaggaggattgcttgaggcccgtcctggactgtagtgcgctatgcagatcgggtgtccacactaagttcagcatcgatatagtgacctcccaggagtgggggaccaacaggttgcctaaggtggagtgaaccagcccagggtggaaagggaggaggtcaaacctcccatgctgat

SEQ ID NO: 11787 - DNA, 477 bp, Homo sapiens
  MAP TO AC002073.1; EXPRESSED IN ADULT LIVER, SIGNAL = 0.61; EXPRESSED IN LUNG, SIGNAL = 0.64; EXPRESSED IN BRAIN, SIGNAL = 0.6; EXPRESSED IN BONE MARROW, SIGNAL = 0.59
tcagcacagcaagtagcaggtagtaagtgctcactaaatggtaagtattattactttagagatggggagaacgagcttagagtggagacaggatttgcccaaggtcatccagctcattggtagcagagctgggatgggaactcaggtctcttgtcccttgagcctgagtgtattcccaaagtgagcaggaagcattctgctccaaaccacccagggccacaggctttccaaacttggcaatgtgctctctggggtggaagtaggggtactgaccagaagaggtggccacacaggctgatgacggcatccttggctgtgtccaagcagatgttgcactcgaaagtgctgtcctgccctccgctctcgccagcgccattgctgctcccactgggcccccctgcactggagttctcaggagatgcagaggccgagggccccttgcttgccatccttggctgtcagcgaagctctgagtga

SEQ ID NO: 11788 - DNA, 371 bp, Homo sapiens
  MAP TO AC003007.1; EXPRESSED IN ADULT LIVER, SIGNAL = 0.58; EXPRESSED IN LUNG, SIGNAL = 0.67; EXPRESSED IN BRAIN, SIGNAL = 0.64; EXPRESSED IN BONE MARROW, SIGNAL = 0.6
gatctgtgtcagttttctgattggtttttaaaaaattaaaatattaaatgctacagacagtgaattgatcgatcttaaatttatttgtatcatcagcactaatacagatagtgatttattttccatataattttagaagatttattttccatttatcacttccttgaattttttgtttttcaggttgttgctgtagcccgtgctgtttatcaagcagtgctcagcttgaagaatattcctgttttggagactgcctataagttaatattgggagaaatgacttgtgccctaaacaacctcctgcacagtctgcagcttcctgagtcctgttctgaaataaaacatgaggcttttaagaatcatgtgttcaa

SEQ ID NO: 11789 - DNA, 491 bp, Homo sapiens
  MAP TO AC000384.1; EXPRESSED IN LUNG, SIGNAL = 0.66; EXPRESSED IN BRAIN, SIGNAL = 0.67; EXPRESSED IN BONE MARROW, SIGNAL = 0.62; EXPRESSED IN ADULT LIVER, SIGNAL = 0.67
gaccactcaaggaccagaggtcacgggatctctttagaagatacagcttcaataaccaattgcacctagtatcccatggtgctcacaggtgtgggggagcgtagatcctgacaccccaagagtgcacagtgagcaacgggctggggcccagattttagtgtttccacagagcccactggtgcaggactttccgaacatgggacacccaggcctcatgcttctggagaggcaactcagagagggcccacggactccccctaccaggctgttccctaccccttttgcgccagcagggcccctcccgcacggaataggacagctccacgaactcgatgtccacggctgagcgcttgggcaggtgggagaagcgctgggcttcagtgatgtggttctccaccttcttcaggtgcgtggtcagcacagggggttccgccccgtcctccagcgtcacggccatggccacagcccccggccctagtccacagcccacg

SEQ ID NO: 11790 - DNA, 480 bp, Homo sapiens
  MAP TO AC005630.1; EXPRESSED IN ADULT LIVER, SIGNAL = 0.41; EXPRESSED IN LUNG, SIGNAL = 0.45; EXPRESSED IN BRAIN, SIGNAL = 0.71; EXPRESSED IN BONE MARROW, SIGNAL = 0.52
ttgaaccaaaatggtggagctataagggatggctggctggagtgaatgccagaggcccctctgggccatcagaaagcccagggtcctctgagggaccctggggaaggcagggagggcaggtagccagatgccattggccatagacttctaagtctaacagggcagcctcaactggttggcggggggctgcaggttacataggtgaggctgggcccttcctgctgggaaaagcagaagagggagactccgcggcaggaaagggaagtgagctctctaggtggagctcagctgggccagcagcactattggctgaatagcacaggcgacccctagaagcaacaggccaaggtgcgtgagcctgctggccagcagtagtgcttcagcaggggccagggaccctgccttcagtcgcacgctagcagctatcatggtacctgggagggagggaagggggctgtgtgtccttccatggcctatgaa

SEQ ID NO: 11791 - DNA, 470 bp, Homo sapiens
  MAP TO AC003082.1; EXPRESSED IN PLACENTA, SIGNAL = 0.66; EXPRESSED IN LUNG, SIGNAL = 0.58; EXPRESSED IN BRAIN, SIGNAL = 0.71; EXPRESSED IN BONE MARROW, SIGNAL = 0.63; EXPRESSED IN ADULT LIVER, SIGNAL = 0.51
tcctaagttgttgcaggtgatggttttaatactggttcttcaaagcataatataaacccccatctttacagatttaacaacacttttcttgccactcattgcccaaacaaaatgccaataacatattgttaggttctatgtttttgtagcacaaaaattctggtaccattttttatatcagtcatgattgcctagataatgctatagtaacaaacaaaaacaaactctttgtagattttagtaataaaagttaatttctcattcacaccagatgtctagcatgggtcttaaatattgtgctctatatagattccaggtcaaaaagaataaaacatctggaattgtactagttttattgtctggtgaattaaaaaaggaggaggaggagaggacaaataagaaaaatgaaagaggaggaggggaacagaagtaaggaagaatatggcaaaacatttactctcttaaaattt

SEQ ID NO: 11792 - DNA, 345 bp, Homo sapiens
  MAP TO AC002045.1; EXPRESSED IN LUNG, SIGNAL = 0.75; EXPRESSED IN BRAIN, SIGNAL = 0.93; EXPRESSED IN PLACENTA, SIGNAL = 0.75; EXPRESSED IN BONE MARROW, SIGNAL = 0.71; EXPRESSED IN ADULT LIVER, SIGNAL = 0.57
tgtttgacccatgaatgattgtgatgccaaccccctcacagttggaaatccacctataacttttgactcccccaaaacgtagctactaatagcctattgttgaccagaagtcttaccaataacacaaacaatagacacatatgttgtattttagatgattatacactgtattcttacaataaaataagccagagaaaacaatatatgattaagaaaatcataaggaagagaaaatgtatttgttattcattaagtggaagtggatcatcataaacgtcttcatcctcattgtcttcacattgaggagactgaggaagaggaggaagaggaggaattggttttgcc

SEQ ID NO: 11793 - DNA, 464 bp, Homo sapiens
  MAP TO AC005683.2; EXPRESSED IN LUNG, SIGNAL = 0.58; EXPRESSED IN PLACENTA, SIGNAL = 0.63; EXPRESSED IN BRAIN, SIGNAL = 1.7; EXPRESSED IN BONE MARROW, SIGNAL = 0.52; EXPRESSED IN ADULT LIVER, SIGNAL = 0.4
tgcttactcactcccacactaagattttaatgtaagtttaagaaagtttcacatggagttgaaaaatatcagtccaatatgaactaaatagctgattatatatcagaatgagaaattacaaataagtgtttgcgttaatcaggtaagacagacgttccatagcaagaaggaaaaagcataaacttaaagatttttatttcatgatgcttataattatatggattttatacatacccatcttaccttcatccacagttgttactgcttcctctgtaatttgacttcctgatcctgctgatgtttgtgcatagaaataaaacttatatcgagtgctgaaatttaaattttttaaagtccaccgtgtcttgttggcaggaattttcaaatctaccagagggcctaattcatgtgtgctgttaactgtcaataagaaataatgaacaagtgcattctccattaactgc

SEQ ID NO: 11794 - DNA, 461 bp, Homo sapiens
  MAP TO AC003684.1; EXPRESSED IN LUNG, SIGNAL = 0.47; EXPRESSED IN PLACENTA, SIGNAL = 0.58; EXPRESSED IN BRAIN, SIGNAL = 0.65; EXPRESSED IN ADULT LIVER, SIGNAL = 1.2
ctgcccacggttttcatatcttcaggggccctggaacatatcactcctccatgtaggcagcctacattttaccataggagagaacaccctaaaaaggcttctgaaatatggcgtttgcgtatggtagatttgcttgtttctctgcagcatcaattgctagtggcacattttgtactagaaaggccattgtgcccagaacggaaaacgactgtgaaccacctagtgatttgcattctgcttttggggataatcggacccccctaccggccaaaatccacatcacatttgcataattcacttttgaaacgctgtgtttcattctcttgagcccacagctgctgtgcggggaactggcgtggtccacatccagcttcagattctctcctacataatccccaaagcagagaagttttgcacgcagtgaagcaaggggacgctgatgttcaacagggacagacttt

SEQ ID NO: 11795 - DNA, 453 bp, Homo sapiens
  MAP TO AC003002.1; EXPRESSED IN BRAIN, SIGNAL = 0.63; EXPRESSED IN BONE MARROW, SIGNAL = 0.57; EXPRESSED IN ADULT LIVER, SIGNAL = 0.91; EXPRESSED IN LUNG, SIGNAL = 0.56
ttacccaaaagacacagcggcggacacaagcagcgagtgtagccaatgaaggcctagcagagcggcgtctacgggggttcgcaatgcgtgtgggcgggacttcctgcaacgcctcctggggttgtcaatatggctgcgttgggatctgttcaccttcaggctgagtcgagactgaggtgaaaaagcggaaaaacgcgagaaaaggtttccccgttgtacagaggctagagtgaggctcggttgaatcggttgcaggcgttggtgcctctgtcagcgtccaggtcactgccgctcccgccccgctcttccctggctgtgctggcggaggctgcgccgatgaacctgactgaggtgggtgccgcgtcccagggcgccccgcccgatccctcctccgagtgccgaagccccgaggaggggccctgcaggtcaggcccctgtgtcccaaagagagga

SEQ ID NO: 11796 - DNA, 488 bp, Homo sapiens
  MAP TO AC005703.1; EXPRESSED IN BRAIN, SIGNAL = 0.69; EXPRESSED IN PLACENTA, SIGNAL =   1; EXPRESSED IN LUNG, SIGNAL = 0.58; EXPRESSED IN BONE MARROW, SIGNAL = 0.59; EXPRESSED IN ADULT LIVER, SIGNAL = 0.6
gtagtgtggcctgggaattggtgacagtgaaagaaagagaaatagggcagaaaatgtaaagaaaaccctcaggtattaaggcctaggtggccaagattggaaatagagagcaagttgttttccttgttcccatatttttgtgctacctcctttcaattctggacctggaagcagatttccttccagaggtagaaatgttcttcctacccagcaattgtcagcatccggggtggcggagagggggccgctctgccatggactctccgtcacccagcttgtccctctccttccccaggtctgtgcgtgatgagtgctgcggccatctacacggtgaggcacccggagtggcatctcaactcggattactcctacggtttcgcctacatcctggcctgggtggccttccccctggcccttctcagcggtgtcatctatgtgatcttgcggaaacgcgaatgaggcgcccagacggtctgtctgaggctctg

SEQ ID NO: 11797 - DNA, 348 bp, Homo sapiens
  MAP TO AC004384.1; EXPRESSED IN PLACENTA, SIGNAL = 0.62; EXPRESSED IN ADULT LIVER, SIGNAL = 0.49; EXPRESSED IN LUNG, SIGNAL = 0.48; EXPRESSED IN BRAIN, SIGNAL = 0.58; EXPRESSED IN BONE MARROW, SIGNAL = 0.51
gagtagggataaaccaatttgccctagctggcagaacaagcttatattagagagtgatagaatattttaaaaagtcctactgttccctataaaaacattattatctttgtagattaaatggataaatttagctctggtaatattaattagaaggattcatactgaacaaaatttaaaaccattagctactgaatcaatgttagtctggtgtatgcttttttttttgtatttgactctctcctactcaaagtttggatatcttactcatagatgagaaatttccaatactcagatggacagtgtcaacaaaaaaggagattcccatccccggagataatcagtaagagg

SEQ ID NO: 11798 - DNA, 442 bp, Homo sapiens
  MAP TO AC004169.3; EXPRESSED IN LUNG, SIGNAL = 0.46; EXPRESSED IN BRAIN, SIGNAL = 0.73; EXPRESSED IN ADULT LIVER, SIGNAL = 0.54; EXPRESSED IN BONE MARROW, SIGNAL = 0.77
tcctcactttctcctcctgcctgtgagcagccactgagaaggtttaaaaatgcacccacaaattccttaaagctccttcctggagtgtgggctggtcttggtgacttggttctaacagatggaatgaggcagaagtggcagtgtgcgactgtgacaccaggttataaaaggcgctgaggcttcctccctcactctgagggaagtggccgccatgctgtgaggatgctcaagcagcgcctgaggcctcgtggccaggagcccgtcgctcaccacaggaagtccgagtcccggcactcgcacacgcgggacgtgagcgccgacgtgaagctcctccccttgatgcaccaggacgtggactttcttttccggaaacttctctgctggcccatgatacagcggtcgccctgcagcaggaacatcagggtaaggagctgcctgagac

SEQ ID NO: 11799 - DNA, 462 bp, Homo sapiens
  MAP TO AC005831.1; EXPRESSED IN LUNG, SIGNAL = 0.68; EXPRESSED IN BONE MARROW, SIGNAL = 0.62; EXPRESSED IN ADULT LIVER, SIGNAL = 0.61; EXPRESSED IN BRAIN, SIGNAL = 0.62
ggcctgctgttccatctaagatccaaggagcatcgtgaagggggagcggtcattgcacacacagggactaggagacaccacaggcaggcctcaggcaccttgcaaaagcatgataaactgaggctcttggagaaggcggctgttttctgctttcaggatgactctgttacggcctcaccttttatggcagcaggggattctcaagcgaggtcccatctgtccagccggcattgttagcctgccctctgggcaatcctatgacacccctctcagttgaaaacattttctgttctgcaggaagctgtgggagaccgggtgcctgttcttctgctgggtaataagcttgacaacgagaaggagcgggaagtcccccggggcctcggagagcagcttgccacggtaaagagcaagcatttccatctctctggacagagtgtgaccccgagggaagttgggcaagtg

SEQ ID NO: 11800 - DNA, 491 bp, Homo sapiens
  MAP TO AC004053.1; EXPRESSED IN ADULT LIVER, SIGNAL = 0.48; EXPRESSED IN PLACENTA, SIGNAL =   1; EXPRESSED IN LUNG, SIGNAL = 1.1; EXPRESSED IN BRAIN, SIGNAL = 0.74; EXPRESSED IN FETAL LIVER, SIGNAL = 0.75; EXPRESSED IN BONE MARROW, SIGNAL = 1.2
gacattactgtctttggtcttctttcatgattttttttgctggagaaatcatttagtggccaatcctgctaaaagcacaaacataaggattctatcaacgccactattaaaatctggtcctccctaatgtttaacccatttttaattatcttttttcataaaatagacattaatacaatttaaagtttttaacattttaaatatatctttttgcattttgtttatgcatatactttgtggattcctctttctatcaatcccagcattctgaagagtaagaaaaaattctatgaaaaaaagaatgtgtattccaaaaaacggcacatgaacgggtgccttaaggaaaagctgagtatcccagaggagaagagcaactcaaaccttgtagatctattggttagagatgcccccaatgattgccatgagttgtcccagggaaagagcaatgttaggtacagggttgtctcaaaccatcaagatctatgcaaccg

SEQ ID NO: 11801 - DNA, 447 bp, Homo sapiens
  MAP TO AC004066.1; EXPRESSED IN PLACENTA, SIGNAL = 0.58; EXPRESSED IN LUNG, SIGNAL = 0.76; EXPRESSED IN BRAIN, SIGNAL = 0.64; EXPRESSED IN BONE MARROW, SIGNAL = 0.52; EXPRESSED IN ADULT LIVER, SIGNAL = 0.47
cacagggcgctatctaccccccagccggcagccctgcgcctctgctctccgctttggggtcttgatccgccgcctcctcgctggcagttctcgtgactcggtgcgcgctcccgcgggaagtaaggtggcctggaccgcgcggctaccgctgagggccccaaaaagagagaagggagaccgcgcggggcgtcccaagtgtcccccattccatcccccacccaggtttctccggtgcgccgctcggcgaacctccgggagctacttactaaagaagaggcggtaattctgcgagcagggctggccgcgctcctcagtgtggtacagggccatagcacggcgcgacccggtccctgcactggtccccaaccgcaggcacgcagcggctggggcacccgtgcgcagcagccgcagcagcgcgctcatggcgtcaatgacggtcctgctgtg

SEQ ID NO: 11802 - DNA, 478 bp, Homo sapiens
  MAP TO AC005884.1; EXPRESSED IN BRAIN, SIGNAL = 0.85; EXPRESSED IN PLACENTA, SIGNAL = 0.8; EXPRESSED IN LUNG, SIGNAL = 0.99; EXPRESSED IN BONE MARROW, SIGNAL = 0.89; EXPRESSED IN ADULT LIVER, SIGNAL = 0.87; EXPRESSED IN FETAL LIVER, SIGNAL = 0.71
tggaattgcttgaaaagtgcagtgactattagatttagggagaatataatctgaaaagcaagtatttattgcacgtaatgtgatcccacgagaccctatataccatctcaagtaatgacagggaattacgtgcaacagtacatgtagtctgcaacatgatactgtgccaaaaggggaaacctaaatattacatatgatgctcatttcacacgaacatattaatccttttgttcaaatcactccctaattctcatttcctacctgagactgttgagatcaagatcatctgtatcaaaatccaaaagaggctgtggcgtgtcactcggaccatgagactgcaacacagatgaactggatgagataactgtggtttggcctgagggatggatggttttgaactggaactgtggacccatccacagacgtctatggggtccagtgtgtgttacaatttcaacctggaatggagtagcaatga

SEQ ID NO: 11803 - DNA, 430 bp, Homo sapiens
  MAP TO AC002364.1; EXPRESSED IN BRAIN, SIGNAL = 0.55; EXPRESSED IN ADULT LIVER, SIGNAL = 0.57; EXPRESSED IN LUNG, SIGNAL = 0.48
gttccatttttgatcctgccagccccatataagagcatctgttgctgcacatttctgccaatacataggtcatcattaaagaaaaacaatttgctgttactaaccttgatactgaactagagatttacattcctcttgcccacatctgtgttttttaaccttgggcgtgcttagagaaatacgtgtgcctgacctgtctcctattaattgtggaagaaccttctagaaggcctgagtgagggctcacagctggcgtctcttgcagtcatgcaggtcttccctggctgagctcatggcccgcacctccctggacttggagctggatctccaggcgtcgagaacacggcagaggcagctgaatgaggagctctgcgccctccgtgagctgcggcagcggttggaggacgcccagctccgtggccagactgac

SEQ ID NO: 11804 - DNA, 473 bp, Homo sapiens
  MAP TO AC006075.1; EXPRESSED IN PLACENTA, SIGNAL = 0.67; EXPRESSED IN BRAIN, SIGNAL = 0.7; EXPRESSED IN ADULT LIVER, SIGNAL = 0.48; EXPRESSED IN LUNG, SIGNAL = 0.5; EXPRESSED IN BONE MARROW, SIGNAL = 0.57
gtgttgccctcatgagaatgatgctccctgagggcagggatttttgtctgcttttcccactgcctaatcccagattcataatgagcacccagtggacgctcagaaaacacttgctgaatgaatgcatgcatgcatgcgtcagcattttcttcccttctcagattgcttagttctgatcttttcctgccactcatggcaagcaaaagagcatcggaagagagcactgtggtccactgagaacctcttcggtttcttcttgttcttttagcagacagatgacgcagcaccgacggatggccagccccagacacaaccttctgaaaacacggaaaacaagtctcagcccaagcggctgcatgtctccaatatccccttcaggttccgggatccggacctcagacaaatgtttggtgtaagtatcacctttcttcccagcagtgcccgctctgggggttccagagacctccctgtct

SEQ ID NO: 11805 - DNA, 473 bp, Homo sapiens
  MAP TO AC004844.1; EXPRESSED IN LUNG, SIGNAL = 0.56; EXPRESSED IN BRAIN, SIGNAL = 0.63; EXPRESSED IN BONE MARROW, SIGNAL = 0.51; EXPRESSED IN ADULT LIVER, SIGNAL = 0.52; EXPRESSED IN PLACENTA, SIGNAL = 0.57
tgtagctgcatgcattctaagtcaaaataaactgcaatgtcctgctgatttctcttgcgtcatgtcaccggcttatagcaaggggaagccatgtggagctgtgctaattaccaggaccatatgctgcgggaaaatcaggaggtgttattaaaatgcctcttggactactgctcaagcttatgagattctcttcttccaggactgcaacttggtatttgttgatatttgagtaatgaggctgtccgcacatatttttaggtttccctttcaccgggcagtctccaaatacattccgtgggctgagctctgtgctatgtctgagcagggatcccaccatcaaccacatgcagcttcagctcctgaagcttttcctgcaatgtgagttccccaaacggttaacaaatatcaaacacacttgcttagtatacgctggtttaacaaatatctatggtgcatccactaggtacaaagca

SEQ ID NO: 11806 - DNA, 461 bp, Homo sapiens
  MAP TO AC002070.1; EXPRESSED IN ADULT LIVER, SIGNAL = 0.51; EXPRESSED IN LUNG, SIGNAL = 0.53; EXPRESSED IN BRAIN, SIGNAL = 0.65; EXPRESSED IN BONE MARROW, SIGNAL = 0.65
gtgaagctggactttgagcctgaatctcccagctccaaattccatctcccgtccttaacatttgctgggctccagtgaccagttgtctcactgtgggctcatttaatagggtctgaacgaccatcctgatgctattgggaagatctgtcctttctacatccagggagatgcttagggaggctccaggtgagggcagagaacccaggtggctacagggagtcccccatgcagagcaccttggggctaaggggggccagagtgggacccaggttactaggggacatccctgggctccattccccaagcccttcttatctgtgtccacagccgcactaattgtgacatcaacatccactacaagagtggggtgtgtaacaccatgagggccaagttttacagcgtagcccaggaggctggcttctgcctgcaggacaagatggaaatcctcatgaagtaagcgc

SEQ ID NO: 11807 - DNA, 466 bp, Homo sapiens
  MAP TO AC002490.1; EXPRESSED IN PLACENTA, SIGNAL = 0.69; EXPRESSED IN LUNG, SIGNAL = 0.78; EXPRESSED IN BRAIN, SIGNAL = 0.9; EXPRESSED IN ADULT LIVER, SIGNAL = 0.7; EXPRESSED IN BONE MARROW, SIGNAL = 0.71
  unsure 233
tttttaggcagaggtggtggactggttggagtgtatgtggtcctgctacattttgagtagccacaggaggatggcagttctaagagtatttgcagttatgagcaagctagttatgtagcaagctagccgatgtgcttacctaaattttaccactttgcagcactaagctagaagtcatatctaaactattaccaagcagaaagaagaaaacatattcagaactgttaactttnggggcaaagatagaatagagatgacaatatagtgatttttttcattagttcttcatttttgttattttatttctagataaatgtagtattgagagaagactgtcggcgctctgccatagcaccgcaaccgtgtgagcagcaggctcatcccgtggaccggtggtgggaacgtgaggtgatgcctttgggattacagcttgagttctgtcaccccatccccaggaaactgtagc

SEQ ID NO: 11808 - DNA, 413 bp, Homo sapiens
  MAP TO AC000121.1; EXPRESSED IN LUNG, SIGNAL = 0.55; EXPRESSED IN BRAIN, SIGNAL = 0.57; EXPRESSED IN BONE MARROW, SIGNAL = 0.51; EXPRESSED IN ADULT LIVER, SIGNAL = 0.44
gccatctaatcatagtgatgttccatgtttaatgatatccattgatgctgacaattttattactgaattatttatttttacatccaaaaataggccatagaatcacccctcccaattttaagatatttgtaataggactcataaatcatatttgaattttcatctgaactttaagagcataagaaaaacttttgttggcaaaaagctcagtaaatactataatggaataatgtacatgaatagcacatacttaccagttctcgtgggccatatggttcacagaaggtgacggcattgccatgcataatcgcgccacactgttctccagtctcacagttgttacattcaaccctgcaggaaaacagaacacagtccccgtctgagaactaagtagcacacgtggtttactgctc

SEQ ID NO: 11809 - DNA, 443 bp, Homo sapiens
  MAP TO AC006456.2; EXPRESSED IN BRAIN, SIGNAL = 0.61; EXPRESSED IN BONE MARROW, SIGNAL = 0.61; EXPRESSED IN ADULT LIVER, SIGNAL = 0.47
ttcccactacttgctttccgtaacttatacatcctaatacacaaatattctttccatataattatgacttgaaaggagttatttctaaagttctacttaagtagacacattttttattatcaggacattatatccttatttcacatactgctgtagaaatgaacatccactttagctagaaattataaactcttgttacttagaaaaaataattggggacttttaaaatacaaagtctacaagagtgattcatgataaagttaaaaatatccagcactccaactaatactgtgaaggacatgattttaaaagtgaaccctttcctcttccttcttttcccccttccctttcatcctctccctttcctcctcctcatcttctttttcttcttcttcttctggtttaatattgatgacagcacttgattttggtcatgcctgctt

SEQ ID NO: 11810 - DNA, 446 bp, Homo sapiens
  MAP TO AC006322.2; EXPRESSED IN ADULT LIVER, SIGNAL = 0.46; EXPRESSED IN LUNG, SIGNAL = 0.54; EXPRESSED IN BRAIN, SIGNAL = 0.56
tgctacacacatgattgattttgtaaatgtaatgccattttctggtagacaaatctccgtctatgttttatataacccataccaaaatgattagtcgatttaggtaggcatttgggctctgaaaccttacatcactgacatttctgtcatcctcaatcaatgtgaaacaacttccaacttggcaataacttgtctcctgaatttccaaataaaaactttggaaagttgaaattacttctctaatattttctcattgcattttctcatcactggccagataatcaccatggccacagccctgaagagagaatcatctatggtgtagagaatagtagcacatttttggaatgcagtccgaagtcgcagagagcgctggtctattggcaattccagaggcgaaatgaagagcgaaaagaagaggtacaggaatgaaactgactggatca

SEQ ID NO: 11811 - DNA, 455 bp, Homo sapiens
  MAP TO AC003104.1; EXPRESSED IN PLACENTA, SIGNAL = 0.6; EXPRESSED IN LUNG, SIGNAL = 0.51; EXPRESSED IN BRAIN, SIGNAL = 0.67; EXPRESSED IN BONE MARROW, SIGNAL = 0.63; EXPRESSED IN ADULT LIVER, SIGNAL = 0.44
agccaaggtggttgtattggtcaacagggtgagtggtctgtccctaccccgctctcccaccaccaagcagggtcttagctcttcaggcatctcccagtccccaccagaactccaaagctgctgtggccatcgctaagctcacctgtctttccaccctggctcagtacccagccatgtcctgcgggtcaccttaccgcctccctacccctggccccagattcagctctcttttcccagctcattctccacccccaggtgcacctggtgacccagcatggtgaagagttcaggcgcatgctggatggacgctggaccgtgacaaccctgagtggggacatgggaccacgtgctggctttggccacctggcccggtgccatgacctgctcatctgcacagcagagcttctgcagatggcactgaccagccccgaggaggaggagcacgtggagctcac

SEQ ID NO: 11812 - DNA, 401 bp, Homo sapiens
  MAP TO AC004682.1; EXPRESSED IN BRAIN, SIGNAL = 0.56; EXPRESSED IN PLACENTA, SIGNAL = 0.6; EXPRESSED IN LUNG, SIGNAL = 0.58; EXPRESSED IN BONE MARROW, SIGNAL = 0.53; EXPRESSED IN ADULT LIVER, SIGNAL = 0.47
ggagggtcagttgttaaacccttaccagcatacccttccctcttcttatgcttcattggccagaactcaatcatgtggcttcacctagatgcacggactagagagcaattagattagctgtgtgtccaagaaagagagaaccacgtataggacacactcatctctgcccagggaaaacaactcaaagtcctgtccagtcacttcattccagctcagagtccggggtctctggatgatgcaaagatctatcatgtgactcttcttggcgtggcacccaatgaactaaaagaagttatctttcctccctttctcgcttcactactacttatactgcagcgaagcaagctgcctgcaataattgcaattacaaattccctgtcagaaaaggaacaaaaaggggg

SEQ ID NO: 11813 - DNA, 452 bp, Homo sapiens
  MAP TO AC004877.1; EXPRESSED IN PLACENTA, SIGNAL = 0.71; EXPRESSED IN LUNG, SIGNAL = 0.59; EXPRESSED IN BRAIN, SIGNAL = 0.58; EXPRESSED IN ADULT LIVER, SIGNAL = 0.55; EXPRESSED IN BONE MARROW, SIGNAL = 0.57
agcctcttccatcactccggctggagctagaaggagagaagtgagctgaggctctagaaagtgctgcactcctgcctttctttttcccaagggtgctcttgacatctggagtgcagtcagcaggcctttccgagtgggctggctgcctcagatgcctcagtccctgttgctggggatgcttcggtggggcctcctcactgtgggccttctcttgggtcagtgtgatcctcgtgtcccttccctgtgccagcgacactcgtgggcttcacgtggctggcccctgctcccagggctcttgagatgctgcctctgactgcagctcctgccacactggcacctgtgtggccgctgctcccctctgcacctgggaatagctgcccagagacttcctgttttgaaccttttgccttgctcaggcagccagcaagggccctggcactcacaacagaagg

SEQ ID NO: 11814 - DNA, 358 bp, Homo sapiens
  MAP TO AC006299.1; EXPRESSED IN LUNG, SIGNAL = 0.46; EXPRESSED IN BRAIN, SIGNAL = 0.62; EXPRESSED IN BONE MARROW, SIGNAL = 0.82; EXPRESSED IN ADULT LIVER, SIGNAL = 0.53
tcatcagtattttgaggctttcagaaaacaaatcctgtacatattttgttagatttacaactataattttatttttgtagatagtatgatatttttaattgcaggtgttcattgccagaatataaaaatagaactgatttttgtatttttatctgtatcctataaacttgctgaattcacttattatttctagaagtttttgttttttagatgccttacaggtcagttttatttactccttttcaatatgtattttttgaatttcctttgcttgttttattgcactggctagaactcctagcattatgttgaataccagtgatgagagtacacatccttgccttgtttctattctgaa

SEQ ID NO: 11815 - DNA, 453 bp, Homo sapiens
  MAP TO AC006319.2; EXPRESSED IN LUNG, SIGNAL = 0.56; EXPRESSED IN BRAIN, SIGNAL = 0.71; EXPRESSED IN BONE MARROW, SIGNAL = 0.58; EXPRESSED IN ADULT LIVER, SIGNAL = 0.59
tttaatttacagtggtctaccttcacatgatgttatatcacttcatgaataatacaagaatattatatttactcttctatttacttacatttacgcctttatagcctttatactgtcgatgacatgagttttacttttgtatttgttaaaaaggctacaaaacattgttactatttctgcttaaacagtgaattatcttttaaggatattttaaataattaaaaaaaaaatcttgtatatatccccatgttttcacaggatccttagggtgtcacttcgtcagccagaaacctctgtggccagcgttgcctctgcttcagtttttctcattcctgctgggctcattccacccactctgcccgacaggctgcgctcagcttgtgctaccaacctcggtcctacgccaagggtgagccacatgcagagtggcaaggattgtgtgagcaagtgagc

SEQ ID NO: 11816 - DNA, 487 bp, Homo sapiens
  MAP TO AC006458.2; EXPRESSED IN LUNG, SIGNAL = 0.44; EXPRESSED IN BRAIN, SIGNAL = 0.56; EXPRESSED IN ADULT LIVER, SIGNAL = 0.48
ttcatgagctgcatattattgagttactaagtcatgagttcatggatgtttcagaaattcatcatgaaatggaaattgtacaattaggacaggactcacgaaagctcgagcagcatgagtaaagttcatgaactgccactgttccgccaagagacatgggtattaactcttccagaaaatgactgttctaaagaagatattcaaatactttctttcagaaaagtgaattgagaagcacggagagggaagtttatcttctctgcatttccgttccctcaacggtcaaaattcattccatggattgttactatccctgaattttaggctgcattatctgaccctttgacagccattggggaagtcggttccatgccatgtggtgcagtatttcatctggaagtggtgggaggatcacaagactctgagcatcagtctcaggtaggaagaacatcattgcaaatggaattggtggtcttggtagaagcca

SEQ ID NO: 11817 - DNA, 472 bp, Homo sapiens
  MAP TO AC006463.3; EXPRESSED IN LUNG, SIGNAL = 0.46; EXPRESSED IN BRAIN, SIGNAL = 0.63; EXPRESSED IN ADULT LIVER, SIGNAL = 0.51; EXPRESSED IN PLACENTA, SIGNAL = 0.66
tttggggccaacattatgacattagttaccatgtattataaaacattttgaatcattgtggagtatttggctgaaatatttgtagaaactctggctggattgctgaaagcaagtggtgttagcatctacacctaattgtaattgttttttgttttgttttgttttgttttgttttcaggtttttctaaagagtgaccgagtggccagaatggtacagagtggagggtgttctgctaatgacttcagagaagtatttaagaaaaacatagaaaaacgtgtgcggagtttgccagaaatagatggcttgagcaaagagacagtgttgagctcatggatagccaaatatgatgccatttacagaggtgaagaggacttgtgcaaacagccaaatagaatggccctaagtgcagtgtctgaacttattctgagcaaggaacaactctatgaaatgtttcagcagattctgggtatt

SEQ ID NO: 11818 - DNA, 469 bp, Homo sapiens
  MAP TO AC005028.1; EXPRESSED IN BRAIN, SIGNAL = 0.64; EXPRESSED IN ADULT LIVER, SIGNAL = 0.46
taactgccccttttcctgaggtttcactttctgtggtgttagttacccatagtcaacaatggtctgaaaatattaaatggaagagtccagaaataaacaactcataagttttaaattgcctgctgttctgagtgacatgatgaaattttgtggtgacttgcttgggatgttaatcatcccttggtttagcgtatccgcactgtatacattacctgatccttagttgtcgacattgtctgctactgacatccaaccatcgaaataatcatggctcaataatccaacatcacctgaagcatatgatcctccttctgatgtattgtcagaaggtcagtggtaccctactgctctgtcacaatgcctacatcattcacctcacttcctttcataggcacggtatcacctcacatcatcacaagaaaaagaagtaaagaagtagagtacaataatatcctttgaaagagacaga

SEQ ID NO: 11819 - DNA, 471 bp, Homo sapiens
  MAP TO AC005042.1; EXPRESSED IN BRAIN, SIGNAL = 0.65
gcaagtgacgttgcaataaatgttagctttccccttataatgacatttgtccttttcttctttgccatgggttttgattttttcccctattattgtctctttgggggttttatttttaagagattgcatgccaccagaatctgaacaacaataacaaaaacctagtaccttctggaagtagaatttactcttttgccgttggcaggcaaatacgccatgcgagacctggtcaaccggctccccggcggcaatggccccagtgtcttgtctgatgagaccatggcagccatctgctgtgctctgcacgaggtcaccagcaaaaacatggagaacgcaaaagccctggccgactcaggaggcatagagaagctggtgaacataaccaaaggcaggggcgacaggcaagtctgcggcaaggaggtgcaagcagtgctcttattcctgagattgtcctgtgatgaggcctttgtt

SEQ ID NO: 11820 - DNA, 468 bp, Homo sapiens
  MAP TO AC004025.1; EXPRESSED IN LUNG, SIGNAL = 0.62; EXPRESSED IN BRAIN, SIGNAL = 0.6; EXPRESSED IN ADULT LIVER, SIGNAL = 0.64
gcaacacttgcccttttcacgcaactggttagtattagatttaggactagaactcaggtctctgactccgaatttagtgctattaaatccttagtgcctagcacatggcctaatatacagtaggtatcaagggaatagttactaaatgaactcatcacagatatttggtttggaaacagattgttcaaagtgacagtgaaatttgtcaccattgaactggctgcttttaactgggctcccaaccagcccttcccctgcccaccatccttagcttagcccttctacccgtggctcttagtcttaaaaatgaaactgaggcttatgtagtccctatttcttttatagccttggatgtctctctgaggcaaaccgaagttcatcgtcttggttctccgacagtagatctcagcaataaccaataaccaaagaaaaccctttaaagcgttcttcaagtagagaagtaagttt

SEQ ID NO: 11821 - DNA, 393 bp, Homo sapiens
  MAP TO AC004656.1; EXPRESSED IN LUNG, SIGNAL = 0.76; EXPRESSED IN BRAIN, SIGNAL = 0.91; EXPRESSED IN BONE MARROW, SIGNAL = 0.73; EXPRESSED IN PLACENTA, SIGNAL = 1.8; EXPRESSED IN ADULT LIVER, SIGNAL = 0.56
gcacttctgaaagaagggtttctgtagaaaaaaagtttcaagcaaaaacttggctcatactttagtttcttgtgggtggttccttgttctatgtagtaagaataatgtctctacttataaaaataccagcagacaactagtctggggacagagctgggaagtctgtgcatcagcccatgagatattaagactgaccacgttttgtttccctctcacacagctttctacaagttctgattaaagtcagaaatagacacaatgatgtggttcctacaatggcacaaggagtgattgaatacaaggagaagtttgggtttgatcctttcattagcactaacatccaatattttctggatcggttttataccaaccgcatctctttccgcatgctta

SEQ ID NO: 11822 - DNA, 479 bp, Homo sapiens
  MAP TO AC002480.1; EXPRESSED IN PLACENTA, SIGNAL = 1.3; EXPRESSED IN LUNG, SIGNAL = 0.65; EXPRESSED IN BRAIN, SIGNAL = 0.66; EXPRESSED IN BONE MARROW, SIGNAL = 0.61; EXPRESSED IN ADULT LIVER, SIGNAL = 0.54
gagtatgttaaagcagcttctctgcagtactagtactgtgctccaagaaaggcaggtttatacttagctgtggtcctcagtggagtccccagacctgcaatatctgggaacagctaagaaattcaaattctcaggctccagtgcagacttaagagatcagaaactctatctaggggtggagttagcaatctggactgtgaccagccctccaggtgattgtgagaatgcatcctaagacagagaaccacagagccacagaaagaagaggccctgtgaagggagacccgagggtatggagagttgttggctccagcttgggcgcactcgttctctctttctgtttctttcttccctcttcccttctgttctcttttccccttccgcctcctcttcctccccctcctcctcctcttcctcctccccctcctcctcctccttcttcttcttcttctctctctctctccctttctccctccctc

SEQ ID NO: 11823 - DNA, 491 bp, Homo sapiens
  MAP TO AC005079.1; EXPRESSED IN PLACENTA, SIGNAL = 0.87; EXPRESSED IN LUNG, SIGNAL = 0.59; EXPRESSED IN BRAIN, SIGNAL = 0.76; EXPRESSED IN ADULT LIVER, SIGNAL = 0.47
cgtgactcgggtctctcattacataatgaaaagattaaatactacttgtgcttgttggctggctttacaacatctgagtttcatgtgtttgcaagcacacatttatagacgtataccctcaggtgctcatgtacatatataaaaaatctaactctatatgtgttatactgaagagaatagcaaggtgggttgatttagaaaagttgatcaaggtgccttgatttggaaaagtctatacctcgtgaccactgttctctgtttccaaacaattcttttcatttgtgcagttttctgccacgtgtatataacagagcactcctatgtcagtgtgaaggcaaaagtttccagtatagcccaagagatcctaaaagtcgtggcagaaaagatccagtatgcagaagaggatctggctctggtggccatcacattctctgggggtaagttgttttctacccttgaatattaatctttcactgatctccttcaaaagg

SEQ ID NO: 11824 - DNA, 485 bp, Homo sapiens
  MAP TO AC005319.1; EXPRESSED IN LUNG, SIGNAL = 0.54; EXPRESSED IN BRAIN, SIGNAL = 0.64; EXPRESSED IN ADULT LIVER, SIGNAL = 0.66; EXPRESSED IN BONE MARROW, SIGNAL = 0.67
gagatcaaagcaagttggggacatttacttctttttcctgtgccatatggactttttttttttgtagttcatttacccatttgtttaacctatgttgccaaacttttgctatgggactcaagaattccaagagtatcattaagttacaaacctaattagaaactggagacaggaagggactaaggctggagggtggcattgaacatctagaatcgcagccattgggctaattagcccaaaatgaaggaatctagcagtagcagccagccctcaggatggcagagcaggaggctctcagtctgttgaccttttttgtgaagcaaacagatggccacatcttgttccagctgcaaacgccatgcagccttctgcgaggccggctggtgtgtgcctcaggacaagtctgcatggatgtgctggtgaggctaggccatctcagcaaggcctttgtccatggaagggagccgccttctggctaaattcct

SEQ ID NO: 11825 - DNA, 478 bp, Homo sapiens
  MAP TO AC002091.1; EXPRESSED IN FETAL LIVER, SIGNAL = 0.72; EXPRESSED IN BRAIN, SIGNAL = 0.66
cccctgtggctaaaatcaggattatgtctgtactgatttacttcccagctgggtttcaggaaaagcctcaaaaagaccacagggttgtgcctcagattggcacatgaggccagcttcccttgggtctgtgctttctggacaaaaagctaatacgaagggagatactcagaggaaaaggccccatcccacagcctccctctctctatagccccctttgagtcttggcaagtgtatttgtgacagctagaacaaatcaaatgtattttacaagtttagcctcaagcagaccaagtgccagctttggtagacatgtccaaagggattttgaccctggactagtggttctcaatggagatgctattgttcatttagagatttggggggtcgtggctttggctgtcatagtgattggcagtcactactaccatttagttgtcagggaccagaggtactatatgtcgtcaatgcatgtaagcaa

SEQ ID NO: 11826 - DNA, 449 bp, Homo sapiens
  MAP TO AC000385.1; EXPRESSED IN BRAIN, SIGNAL = 0.56
gaagtcaaagccacacagccgagaagcggcagctggcgtctcggaggccgtcacgcgctgtcactccgcgcccttcggagttgccgctaaaataccaacttcaacccggggccggccactgagcctcccgccgcccctaccggcgcccccggcacccccggaccccggcgcccgcgtcacttactcctctgccttcgccacctgtctgggtgccggtctcctccctgcctggccgcggcgcgtcctccccgtcctcgcagtcctcgggttctgcgcttcccccctccagctacagccgcagcctcttctcttcgggagggacgtcgtcctcctccctcctgggccggccatccctgcctcggggcttgccagtggcttcggagctgccggaagggctggccacggctggggggctctgcctgcacctggagaagaggaaggatacggcg

SEQ ID NO: 11827 - DNA, 379 bp, Homo sapiens
  MAP TO AC002553.1; EXPRESSED IN BRAIN, SIGNAL = 0.59
gttttctccagcttgatggggttcgacaggctagtgcaggtctgtagaagttacgtgaattgaacacaatagtacttcaacctaatcaatacctcctttttctgccattcaaccagtcttttaatttacatgtttattcgttggcccttgccctccctacataccacttcacaaatctatcaatccagtgacatccctcccttaaagcaagtcagttaagtttacattgctacctacctctgtgcatcaaaactgcagctagattactgagtaccatgtgtagctcaggatgatttatctgtcttgccagatctgatgccctttgcatataaatataggcctcatcaaagcggccctgtgcatccagggtagtagccag

SEQ ID NO: 11828 - DNA, 472 bp, Homo sapiens
  MAP TO AC003663.1; EXPRESSED IN BRAIN, SIGNAL = 0.73; EXPRESSED IN BONE MARROW, SIGNAL = 0.55
ggaaatatttttctcttcccccatcttttagctttctccctttgtctcataaccatgtccaccaatgagaatgctaatacacaagctgcccatcttcacagatctaagaacaagggaaaggacagtacagtgagtaccttctgttgctttcttatggtgttatttaaatgggaagacatttggaaagggatgaaaacttagggatctttttaaaaatgtcctcacttagcaacaaaaactgatgtggtaggtgaaacagcatgttatcttttctcaaggaaacgaggcgtcacagaatagaggtcaatgtggagctgaggaaagctaagaaggatgaccagatgctgaagaggagaaatgtaagctcatttcctgatgatgctacttctccgctgcaggaaaactgcaacaaccaggtaaaaaaatatattttagattatgagttacatgaaatccagaaaatcagtaggga

SEQ ID NO: 11829 - DNA, 351 bp, Homo sapiens
  MAP TO AC003007.1; EXPRESSED IN BRAIN, SIGNAL = 0.65; EXPRESSED IN BONE MARROW, SIGNAL = 0.56; EXPRESSED IN ADULT LIVER, SIGNAL = 0.53
ttcccttcaaaacaaaaggctttctcttactgtgtgcttgcctcttgtgagtagaagataaatgatgtaagggtatagtgtaatagataaaactactgcaatcaatctgaagtagccaaactatattgcagtcttggacttaagacttgctatatatctgcaaacatatcaacagcctgttttacgttgagtaattttggtttttctctggcaggactgtcttattccactcttcggcgaagctttacgttcatgtaaacagcatgacgtgaggccgtggatgcaggcattaaggtatactgtgtaccagaatcagttgttggagaaaattaaagttaagtggttttcctt

SEQ ID NO: 11830 - DNA, 468 bp, Homo sapiens
  MAP TO AC006208.3; EXPRESSED IN LUNG, SIGNAL = 0.85; EXPRESSED IN BRAIN, SIGNAL = 0.86
gtctctcggttggcttggggcccttggtgctcccagccccaccaggggccggttccaggctatagcccaggtggcatctctctgcagggaagatggagaactacgagctgatccactctagtcgcgtcaagtttacctaccccagtgaggaggagattggggacctgacgttcactgtggcccaaaagatggctgagccagagaaggccccagccctcagcatcctgctgtacgtgcaggccttccaggtgggcatgccaccccctgggtgctgcaggggccccctgcgccccaagacactcctgctcaccagctccgagatcttcctcctggatgaggactgtgtccactacccactgcccgagtttgccaaagagccgccgcagagagacaggtaccggctggacgatggccgccgcgtccgggacctggaccgagtgctcatgggctaccagacctacccgcagg

SEQ ID NO: 11831 - DNA, 475 bp, Homo sapiens
  MAP TO AB019438.1; EXPRESSED IN BRAIN, SIGNAL = 0.56
ttaagcacccacaggaaaccaccacacatttccttaaattcaggttccagctcacatgggaaatactttctgagagtcctggacctcctgtgcaagaacatgaaacatctgtggttcttccttctcctggtggcagctcccagatgtgagtatctcagggatccagacatggggatatgggaggtgcctctgatcccagggctcactgtgggtctctctgttcacaggggtcctgtcccaggtgcagctgcaggagtcgggcccaggactggtgaagccttcggagaccctgtccctcacctgcactgtctctggtggctccatcagtagttactactggagctggatccggcagcccccagggaagggactggagtggattgggtatatctattacagtgggagcaccaactacaacccctccctcaagagtcgagtcaccatatcagtagacacgtccaagaaccagttctcc

SEQ ID NO: 11832 - DNA, 455 bp, Homo sapiens
  MAP TO AC006385.3; EXPRESSED IN BRAIN, SIGNAL = 0.76
tgcacctgatttcagaaacgagactctcagcttcttgagtactatagtgataactgtttctaaataccttagaaattaaacgtattatgacttctaacaatctatgggaagagggatgttttgaggagaattgtctgactctggtttggttttggtcttgcttgttaatacagggtcagagccaattcgcagagcagggaagagtggtacctcaacacccactacccctgggtctactgccatcactcctggcaccccaccaagttattcttcacgcacaccaggcactcctggaacccctagctatcccaggacccctcacacaccaggaacccccaagtctgccatcttggtgccgagtgagaagaaggtcgccatcatacgtactcctccaaaatctcctgcgactcccaagcagcttcggcttattaaccaaccactgccagacctgaaga

SEQ ID NO: 11833 - DNA, 472 bp, Homo sapiens
  MAP TO AC006329.2; EXPRESSED IN BRAIN, SIGNAL = 0.55
cggttacaagtccacaaactgtttaactggacatatgtgaggtggtaaatccctccattttacaggtctttgggaagttctggggccaggaaatccaaatttgataataggattttctcaactgaactcagggcagagcacagatggtctgagtgaacgccctgtgtgacaggtgccttcctgcaggtaggaacacttcctctgcagtcagagggagaagaaaacatcaggagctggatgtgatttcagatctgcaccgagaaacatgctgatttcactggggatgtggcagtcccaggtgaaggctggctaggtcataattgacatctcctccctgtctctgctctcagacatggagttgattatgctttttaaatactttatgaattccatccggatctcctcagggtcatcttccaggtttgagtgcaccagcttcagcttgttcaagggtggcgcttgaaaatgaaga

SEQ ID NO: 11834 - DNA, 461 bp, Homo sapiens
  MAP TO AC000380.1; EXPRESSED IN BRAIN, SIGNAL = 0.56
tttcaccacttggtgcctcagtttccccatctgtaaaatgaggatgtcaaaagcatctgcttcatagggtgtgtaaggcctaacggaggtggacgtcaagcacagagcacgtgcctggcacttactagttggtcaggaaagcccagtcattgtcactgttctcattatttgtcttcaggtccttggggcaccatgggtgggagtctccacctctcggggcctgggtgctgggtgaagggaggctcccctgtgtcccgagctgggtcttgcctcccccaggactcactgggtactcctggcgcacatcgatctcggaaggcaggacggtcatggcaggacagcggctggggccctcgctggcactggtccagaaatgctgctggctggaattggtgcagtcctgctgcaaggtgcacctggggtggcaccgcagggtcaggacccaggtcagctcctcccac

SEQ ID NO: 11835 - DNA, 597 bp, Homo sapiens
  MAP TO AC018583.3; EXPRESSED IN PLACENTA, SIGNAL = 0.83; EXPRESSED IN FETAL LIVER, SIGNAL = 0.81; EXPRESSED IN BONE MARROW, SIGNAL = 0.78; EXPRESSED IN ADULT LIVER, SIGNAL = 0.74; EXPRESSED IN BRAIN, SIGNAL = 1.9
agcataggcagatgaatgcgctgaaaatttcaaaagatatttagatgatggaagttaaaatagacagacttcttcaaaactccaagaagagctgttggaaaaaaactcatgatttttgtcatttgaacattaaacactcctagcaaaggagatatcatgaatgcttttctgaaatgctattcatttagtaaatacttccctctccctaccaaagaaaattatataggagctccagaatattgcccactgttgacctctttgtcctgtttttcttcacagacatcgatgagtgtgctgaagggcgccattactgtcgtgaaaatacaatgtgtgtcaacaccccgggttcttttatgtgcatctgcaaaactggatacatcagaattgatgattattcatgtacaggtaaacggtggctatttgtgaaataaaatatttttatgtcttaagtttacttttaaaaatttctttgactctcatttttttgataagtataccataaatacaacaaaacattagcaaaatcatatcttcttgatttggtagttatttcttaatctgttctaaagaaaaaaaacacctgcttgctctggataa

SEQ ID NO: 11836 - DNA, 545 bp, Homo sapiens
  MAP TO AC011938.3; EXPRESSED IN PLACENTA, SIGNAL = 0.63; EXPRESSED IN FETAL LIVER, SIGNAL = 0.53; EXPRESSED IN BONE MARROW, SIGNAL = 0.55; EXPRESSED IN ADULT LIVER, SIGNAL = 0.65; EXPRESSED IN BRAIN, SIGNAL = 0.78
tccattcctatgctccttgcactttccaggactttccacactctccttttgctcaagacttcaaccttcatccaaggtacatattcctccatgaactcaattcaaaagataaaagaagaaagtgtttatctatcttagggcaaatttccaatttcactttgttccagcctactttcttttccagttatagttctgcctggaggtttctgagttttcacttttagaacagggtcaaagtccactttatcacaccttacctttgatgcccggaaagagaaagctgtggacttggtgtctgactttgcccggtcttgcagtataaggccttggtcttctgtcaaggccaggtagtggcctgtggtgagatgccggagtcggaaagcctggccccatctgatgttactgccactccagctgggcagatgaaacagacaagaaattgcatttatacaaaaataagtccttttcagtatttatcctatgctttcttacacatgctagcagacttataacccttctggtgtccatccttaagggaaaacgca

SEQ ID NO: 11837 - DNA, 541 bp, Homo sapiens
  MAP TO AP001537.1; EXPRESSED IN LUNG, SIGNAL = 1.1; EXPRESSED IN PLACENTA, SIGNAL = 1.3; EXPRESSED IN BRAIN, SIGNAL = 1.2; EXPRESSED IN ADULT LIVER, SIGNAL = 1.1; EXPRESSED IN FETAL LIVER, SIGNAL =   1; EXPRESSED IN BONE MARROW, SIGNAL =   1
aggcagactctgaatggtgctcaactaatagtcattctcttcttccttagagcaacctcatttggatggagcagcaaagtgccaactggaagacgtggaatcccagcttctcttacagtgtgtggtggcccctgacaagaaggttcttacctgtcagatatgggtagataaatttggggtttttgtcttttcaaagatataatgtttatccttgtcttgaacttatccttttaccagcccttcttccccactggaacccagccacagtgcttgaaatgcacgcctctatacattttaagaaaaacaatccttcattttgtttaacccattttattgttttgatgatatatttgtagtatgtagctgaacttacgcttaacataggcatggtggcttagaaagttatatatctagcatggccaaatctaaattgtcaagtccatgtttaaaaactcaacttatccatctccacaattcatgtacttttcataatgctgcactttcttttgaaagtcctagatgctcaatccagtgctcatca

SEQ ID NO: 11838 - DNA, 569 bp, Homo sapiens
  MAP TO AL117341.26; EXPRESSED IN PLACENTA, SIGNAL = 0.62; EXPRESSED IN BRAIN, SIGNAL = 0.63; EXPRESSED IN BONE MARROW, SIGNAL = 0.67; EXPRESSED IN ADULT LIVER, SIGNAL = 0.79; EXPRESSED IN FETAL LIVER, SIGNAL = 0.81
tcagcgttttcaacaccaagagagaaccctccagaagacctagcacccctagactagctttcctctcagaactttctgtccctattatcactgttgcaccagggtaaacattctatgtaccttgaaagtttggcccaaatcacatgatcatctcaatagctgcagaaaaagcatctaacaaaattcaacaggatgttttaaatttcaccataaaaactgtcaaattaagtataacttaccccaacaaaataagggtcatacatgaaaagcccatagctaacatcatactcaatggagaaaaactgaaagcttttcctctaagatctggaatacacaagaatgccccacactcactacttctattcaatatggtacgagacgtcccagccagagcaatgaggcaagaaaagatataaaaggtatccaatgtaaaactatctgtttgcatataacataatcttatatgtagaaaaccctaaagatcctaccaaaaaactgttagaataaatgaattcaatacaaaaacaatgagttgtgtttctgtacaccaacaaaacaatccaaaaagg

SEQ ID NO: 11839 - DNA, 593 bp, Homo sapiens
  MAP TO AC013332.4; EXPRESSED IN BRAIN, SIGNAL = 0.59; EXPRESSED IN PLACENTA, SIGNAL = 0.53; EXPRESSED IN FETAL LIVER, SIGNAL = 0.72; EXPRESSED IN ADULT LIVER, SIGNAL = 0.74; EXPRESSED IN BONE MARROW, SIGNAL = 0.66
agctgttcacaccttccaccacgtgaggaagcagcaagacgtgccatctatgaagcagagagagccttcaccagaccctgaatctgccgacaccctgatcttggacttctcaagctccagaagtgtgagcaatacatttctatggtttataaattccccagtctgaggtattttgttatagcagctcaaatggactaagacagatggctagctagctagatatgcaaaatgggatcattgcactgcatacttttcataatatacttcttttccgctcagaattctacagtgatcatctttccatgttcttgaatatgtttctacaatgttttcatgagtgcatggtatttataaaatggaaaactagcatatccaaccaggtcacttcacagagacttattaaggaaagtatacctgacagctgaatccaaaaagagagatggatttcaatcaagagccctttaattttgttcccaaatttcatggtacagaaaaaaagtgctgatgatggttactgactagtaaatttgttttttggaagggtctaattttcatacacagtggatttgccatggaaacaccgagtatgtgca

SEQ ID NO: 11840 - DNA, 517 bp, Homo sapiens
  MAP TO AC013597.3; EXPRESSED IN BONE MARROW, SIGNAL =   1; EXPRESSED IN ADULT LIVER, SIGNAL = 0.82; EXPRESSED IN PLACENTA, SIGNAL = 0.74; EXPRESSED IN FETAL LIVER, SIGNAL = 0.63; EXPRESSED IN BRAIN, SIGNAL = 0.55
taaaatgtctcccctggtcgtttgggttttttttaatttttaatttttgtaggtacccctagtagttgtgatttctccaaaacttctaacttgctacaaaggaggacaacagagattatccagccagagaagttcttacataaagaaatgcagggcctgtgtgctcagcatggtaaggacaaggtaatataaacaggcacaaaaagcatttgtttttatttcttatacagtaatatggatctaagtttgggaaaattttaatggaatcttcctgaacatatattcttaatgatacaattggtttatattaaaatttgctattgaaacaaatgtagttttggtaaagaaaagctatcatatacctatggaattttagacaacttcctccaaaccattaatctttgcacacttgcttcttaatgagcccatttgcacaatcctatttatcattttacttacatgcttgtccatctctctgaaacgttgggggaacatgaccagaacttcacccggttta

SEQ ID NO: 11841 - DNA, 536 bp, Homo sapiens
  MAP TO U82670.2; EXPRESSED IN PLACENTA, SIGNAL = 0.52; EXPRESSED IN FETAL LIVER, SIGNAL = 0.58; EXPRESSED IN BONE MARROW, SIGNAL = 0.6; EXPRESSED IN ADULT LIVER, SIGNAL = 0.72; EXPRESSED IN BRAIN, SIGNAL = 0.71
cggtgcttctctactcccaggtattgcccctcctgctttccctctgccatggccaccctaaaatctgctctctgggtctctgagttttagccacccagcacagcatcctctgtggcccacactcacatgcagacaagcaagaaactcacctttgcagagaggaacaagattacaaatctcaccgcagtgctcagcagttcaggctcccctgtggctcccaccaatgactgggcagacattgcaagactcgggatgctgccaagagaaccacggctaccagtgcttctcagggaatgggtggcacgacgcctgccaccagcagcccagcctgagtgaaatctgtggggaccctgcttcttcccacctcgggcctcagactcagtggatagtaggttcatatgattggtggagcctgagttaggtgcccatgctgtagctacaagagaagctgggagagtgaatactaaccatctttgagatctagagtgggaggcaaactctacttcatgggataggcaatgccccaaacaaagaat

SEQ ID NO: 11842 - DNA, 547 bp, Homo sapiens
  MAP TO AC010492.4; EXPRESSED IN ADULT LIVER, SIGNAL = 0.91; EXPRESSED IN PLACENTA, SIGNAL = 0.91; EXPRESSED IN BRAIN, SIGNAL = 1.1; EXPRESSED IN LUNG, SIGNAL = 0.99; EXPRESSED IN FETAL LIVER, SIGNAL = 1.1; EXPRESSED IN BONE MARROW, SIGNAL = 1.7
ctggggtgctgagattgaccgcggagggatgggggcttgggttgctggatccggccgcgaaggggcggggctgtaaagggccgctggtttcctggagcgggtggaaccaggactgcagaggttgttagcgggtggggagacggctgcatcagttcacgttaaggaggatctctggagagccagacctggggaaccgggaggcccgcgccttgggaaatggagtccaagcgggcatctctcctgccttcaggtggagctggaggagacagtggtgcggcgccaggctgcggtgcggacgctgggccagcaagccagggtttggttggtgcgggtgctgctcaacctgctggtggtcgcgctcctgggggcagccttctatggcgtctactgggctacggggtgcaccgtggagctgcaggtgcggacggtcttggaagaggaagccagggggtcctggaacctacatttccaacggtggagggaggggacggaagtttgggatgccagagatcttagagaggaagtatgggagagggtatgttcggac

SEQ ID NO: 11843 - DNA, 560 bp, Homo sapiens
  MAP TO AC026212.1; EXPRESSED IN PLACENTA, SIGNAL = 0.49; EXPRESSED IN ADULT LIVER, SIGNAL = 0.67; EXPRESSED IN BRAIN, SIGNAL = 0.64; EXPRESSED IN FETAL LIVER, SIGNAL =   2; EXPRESSED IN BONE MARROW, SIGNAL = 0.64
aagttgttctgaggcaagcgctcccacaggctgctgagaaacctggcgggacgctccgcttcggccttccccacctcctgcagacgctccagcagcagctccgcctgggtcttcatcagagagtcctcctggagatttgggttctctctatagccattgaagcgcagcatgtgcaccgcagaccgccggcgggcaaggcgggccaggctctcttggagtgtctcctcatcggcgtcccggacgcccgggccgggaaagagttgctgcaccaggtggtaacgagctgcatccccgagggcccggttctccagcaggcgcagagagagcaggacgtcacagtgaccgagggcctggaagttcgctaatcccggaactggaccccgcccaaagccgccctcttgcctccactggttgtgcagccgccgctccagagccgtgcgaatggggccatgccgaccaaagcgccgatggatgtggcgcaggtagcgcgcccactgcaaggcccggcgcacggtggcggggtcccaggtgctgacgtaggtagtgcttgagaccgccag

SEQ ID NO: 11844 - DNA, 594 bp, Homo sapiens
  MAP TO AC015842.4; EXPRESSED IN LUNG, SIGNAL = 0.97; EXPRESSED IN ADULT LIVER, SIGNAL = 1.2; EXPRESSED IN BRAIN, SIGNAL = 0.91; EXPRESSED IN BONE MARROW, SIGNAL = 0.81; EXPRESSED IN PLACENTA, SIGNAL = 1.1; EXPRESSED IN FETAL LIVER, SIGNAL = 0.96
catttgaatttccaccaccctctgccatgtaccattactgtgcacatgctggcttcctcacttctctctagtttgcctttgtgtgtttctaacacagcctctgtatggcaatgaactctgagatgaactgagccttcccataatatctggttattatgatgaccaaaatcaatttaacctcagagactgggatctgggaaaggcaggtctataaacacttaagatgttcacgaaattctctgatcacaaagtctaggcagacgggggtgaggggagcggagtttgggctcaagactctgtttctgagtgaacactcttcccacctccatgcttcgtcctgctgttactcaccccacatctgtgagggctctggatggaggctgctgtcctacgtgtagaatgggatcagtgttgggcttcaccagacctctgatttttgtgtgtgtatgtctgctgttcttcaggcagcagaggaaggaatcctggagttggagtcagccattggagttgcaaggtaggtggaactctaccacttcaagttgcatgaattgggcaagaacaagaatagccaccactgctaccattcaggaagcc

SEQ ID NO: 11845 - DNA, 501 bp, Homo sapiens
  MAP TO AC009597.4; EXPRESSED IN ADULT LIVER, SIGNAL = 0.79; EXPRESSED IN BRAIN, SIGNAL = 0.8; EXPRESSED IN BONE MARROW, SIGNAL = 0.62; EXPRESSED IN PLACENTA, SIGNAL = 0.51; EXPRESSED IN FETAL LIVER, SIGNAL = 0.7
catttccttctttttcaaccggtttctttctgcattgggagtttttaaaaatcataggttaagaactcaaatggtatttttgaaaaagttttagaaattcaaaatatctgttttttgtgaacattttatgtaaaagaagaattattgacaaacatgacatagggaaacaggctcataacttactaaacattcacagctcagtttaaacaagcaaacaattttctaatgtttaaaaaagtacagctttaagctaatatttattactggatatttgtaagtacctaaatatgtgatgctttattataaataaactgagagggatatgcgcacacttggtgtgatgacttgtcagctgtgtggacctccagtagttctcagtactcatggaaggattcacaaggccagaggtaaaggctatgtgtgaagaaaaaaacaaaatcaaaacagaaagaaatactttccctatgtttagtattacatgaaaagcccagcatacatgaa

SEQ ID NO: 11846 - DNA, 570 bp, Homo sapiens
  MAP TO AC013629.3; EXPRESSED IN PLACENTA, SIGNAL = 0.52; EXPRESSED IN ADULT LIVER, SIGNAL = 0.57; EXPRESSED IN BRAIN, SIGNAL = 0.51; EXPRESSED IN BONE MARROW, SIGNAL = 0.44
aataaacgggtgtttcgtgcgatgctatgtgatggattttctacttgcccttctttacttcaagttgaaatcactcaccaggctggcagaagtttgcttaaaaggtgcaggggtgagggtggaggagccaatgtgcttgcttttcctgccaatgaaaactaggaggtacgttatttttaagagtctctgccagtcctccccactccgtctgcaccagcccatcttccccaccgagttgaatcaacattttcagtggcagcccctctggagtaatcaatgagaggtgttgctgggagaggaactgaatgatttagcacaatggtaaggcagcatatcgaccaccaacagcaggaggtggggggccgactgacagtggcttttatagcctctgcctccttgtgaagaatggtgcataatggggaagagtggaatagtgcaaggactctgtatctgtcaggcacagataatctttcctttttacacagtcaattgggatgtcatttgcattttcgattgaagggagatgaatacacaattgagttaaggagcagaatccctcaaggcaagtga

SEQ ID NO: 11847 - DNA, 598 bp, Homo sapiens
  MAP TO AF241727.1; EXPRESSED IN PLACENTA, SIGNAL = 0.55; EXPRESSED IN BONE MARROW, SIGNAL = 0.47; EXPRESSED IN FETAL LIVER, SIGNAL = 0.75; EXPRESSED IN BRAIN, SIGNAL = 7.2
tcacaaggcagtgattgaggagaccacatttgatctgccatttttttattcttttcctttccctgttaatagctgagctgctgtggtgtgcagaactacaccaactggagcaccagcccctacttcctggagcatggcatcccccccagctgctgcatgaacgaaactgattgtaatccccaggatctacacaatctgactgtggccgccaccaaagttaaccagaaggtacccgctttctcctggcccagatgggaccagtggtgaatgtttgggggggcttttttatttccatgaaattatgacaaatagatttgaaatagtagtcaagggaaagagaatcttactttgtggttccttgattgcctgggagaggcacttgaggctgctcacttctaaaagagaaagctgtgactcagatcagccttgtctttctctcccacagcaaggatctaccaggcatagttaggaaggtttagcaagcagttcctgttaaccctgatgcttatgtcagacagcgagtgttggctttcttcttttggggtgtccgtcttctgcttaatataccatctaaacatgaaattgtttgcagctgggt

SEQ ID NO: 11848 - DNA, 584 bp, Homo sapiens
  MAP TO AL161777.1; EXPRESSED IN LUNG, SIGNAL = 1.1; EXPRESSED IN PLACENTA, SIGNAL = 0.93; EXPRESSED IN FETAL LIVER, SIGNAL = 0.87; EXPRESSED IN BONE MARROW, SIGNAL = 1.1; EXPRESSED IN BRAIN, SIGNAL = 0.97; EXPRESSED IN ADULT LIVER, SIGNAL = 1.1
ccagaggctgagaaccactcacttattggacaaatatgttttctctttattaattcatgtttttttttttcttcttgattttcttaccaggctcgtcaatgctgtgatgaaggggaatgtcttctagctaatcaggaaatagataagtttcagtctaaagaagatgctcagaaagctctccaagacattgaaaattttcttgaaatggctctaccctttataaattatgaacctgaaacactgcagtatgaatttgatgtaatattatctcctgagcttaaggtagaggcttttttattttcaaataaatatttaaagaaaattataattgcagtactgtgggtaggaggagttttactacctcacagctaactttatgtcaaattgcacttacattgtcctcttaggggtgatagtagtgccactgtcaagcatcaaataattcaaaggcatatgtttgctatataatgaagaataatttcctttttgagctccaaatccattattttaaaactcttttatgtgctaggtgttctcacacatattttgttgtgcatcactggagaaaggcccaaagctcttct

SEQ ID NO: 11849 - DNA, 566 bp, Homo sapiens
  MAP TO AL158150.2; EXPRESSED IN PLACENTA, SIGNAL = 0.56; EXPRESSED IN FETAL LIVER, SIGNAL = 0.46; EXPRESSED IN BRAIN, SIGNAL = 0.45
gccaaatggcagaggattacttttactttgctgctataagcagctcttaaggctctttccttactcttggtcacctctatcccattcccagtcaggcagcttagtgacctcctgattggttaggtgggattctctaagcaccaataacactgccagtaggtaatactctagcttgagaatttgcaacccagattctcgtaatagacagggaagagggactccataagggcctgcttaaagcagtattttatgtcatattcattcatgttattcatttagcagttttttatggagtatttaatccaggttagatcaaatttctcctaatccaaggagccacagataaacaagatacaattttcaggaagctcacagtctgggaaggagaaaagttatgaaatatgtaatgataatacaatgtgatatgtagatacggttgttgttttcttattataaaatattagagtattaaagaaattttagaaaacacagaaaaatttaagagtccaaaaaggaaagaaaacagcttgttcaaagtcgttctctccaaactcaaccacagctga

SEQ ID NO: 11850 - DNA, 563 bp, Homo sapiens
  MAP TO AL133260.7; EXPRESSED IN LUNG, SIGNAL = 0.88; EXPRESSED IN PLACENTA, SIGNAL = 0.66; EXPRESSED IN ADULT LIVER, SIGNAL = 0.71; EXPRESSED IN FETAL LIVER, SIGNAL = 0.95; EXPRESSED IN BRAIN, SIGNAL = 0.68; EXPRESSED IN BONE MARROW, SIGNAL = 0.86
gctggtgctgttgttatccccattgtacagataaggcaaataaggcccagagaggttaagtattttgcccaatgtcacacagctagtgaaggttagagccaggattcaacctgaactctgatccattattctatactacactccatcacgaagaaggaaggtggtgatttacctagcgtcccagtgtcgattgaacccagctgtgtgaatctttccctaatccacatggtcacggtctctccatccaccacctccctcaccctccagtctggttcttgcacatttctgcagcatcacttcctttgagaagctttttctgactctgctccaggctcctcccttctgctacctccctgcctccacctctgtcttgggtcctatgacgctcttttgcctactcaatagtgaacctcctgagagcagacacctcgcccatcatctttgcattctcagggctgggtgcagggtctgccacatcgtggtgctctataaactgtggaaacaaagacaggaggaatcaccattctgcattccatggaagttgtgtgcttatctgcctgcag

SEQ ID NO: 11851 - DNA, 567 bp, Homo sapiens
  MAP TO AC011272.3; EXPRESSED IN PLACENTA, SIGNAL = 0.75; EXPRESSED IN BONE MARROW, SIGNAL = 0.59; EXPRESSED IN ADULT LIVER, SIGNAL = 0.68; EXPRESSED IN FETAL LIVER, SIGNAL = 0.52; EXPRESSED IN BRAIN, SIGNAL = 0.63
tcctgaaggactttgatgggtggatgactggcattcaattctaagtctgtttccatttgctctagtgaaaacccctcttctactcctcaaagtcctgggttgattttaccatacacaatatgctctgcagagtgggtctttttgtggcaatcaaagacggagcctacttttctatcttagccttctgtggaccagggagcaatatagagctgataaaacgagccattaactgtgaaaaacccaaagatgaccggggcaaggtaacccctctcgctgatccagacttccacaggggcatgaagccaggagcagggagaccccagctcacttgggttaaacaggcagaaatagcgcaggtatttactcaatgtggaatttatttaaagactttatcaaagcctacctttagaagatgctgtatggagaaagaattccctcgttgagtattttcaggttgcgtcaagactcccagctccctgctaagcatttcctcctgaggcagctgatatcagctgtcctctcttctctcttagtcagcaagaaaagccagggggttcctttcttttc

SEQ ID NO: 11852 - DNA, 583 bp, Homo sapiens
  MAP TO AL161441.2; EXPRESSED IN ADULT LIVER, SIGNAL = 0.61; EXPRESSED IN PLACENTA, SIGNAL = 0.57; EXPRESSED IN BRAIN, SIGNAL = 0.67; EXPRESSED IN BONE MARROW, SIGNAL = 0.61; EXPRESSED IN FETAL LIVER, SIGNAL = 0.67
ttggaattttgatttgcaagctcaccttgtttaacaactgttttctcctccttactccttcccacaacttgccccacccccatggtagttttgcagctgcttctgcatctatatctgtgtttttctatttctctagatgagaaaccccatgtaagtcgtaacttgcagcatttgtcagcaacaattttctttggtttcctttcataaacatcatgcagtctaagtccagcccctctgttaaaaaattaaaataacagaacaaagtaaaaagatttacaagctgtgtttaatgtcctcattgtattagtccattctcacactgctataaagaaccgccttaggctggataatttataaagaaaagaggtttaattgacttacagttccacgtggctggggaggtctcaggaaatttataatcatggtggaaggggaagcaaggcatgtcttacatggcggtgggtgagagagagtgtgtgaaggagaagctgtgaaacacttataaaaccatcagatcttgtgagaactcacccactgtcaagagaacagcatgggggaaacagcacccaggattcaatcacct

SEQ ID NO: 11853 - DNA, 523 bp, Homo sapiens
  MAP TO AL162261.1; EXPRESSED IN PLACENTA, SIGNAL =   1; EXPRESSED IN BONE MARROW, SIGNAL = 1.1; EXPRESSED IN ADULT LIVER, SIGNAL =   1; EXPRESSED IN FETAL LIVER, SIGNAL = 0.84; EXPRESSED IN BRAIN, SIGNAL =   1; EXPRESSED IN LUNG, SIGNAL = 0.99
aacaccttacaatccacgggagggcccctcccctaccccgaagtagccattccgcagaggtggagagactcgcgtgtagctcaatgcccacgcacttagccaatgggaaattacgaattgatgaccagttggctcttggatctgaggaaaaaactccagagtcagagggaactctcgaagttttgcccggagcaaacggaagggtggcgttgccatcgcctaagatgggaaaatggcaggtgtcacaggttgcaggggaaggtcggagaccagctgagggccccggagccttcctggaaagagtttcccatccagcccgtctcggtttccgcatccgtctgattccttatgatgttgagggtgctggcgtctgggtcctttatgatgcagagggtgcccccgtctcaccccgggcgcctccgcgctcccgcctcctcctggcaacctggtgcgcggctccggacctggcgacccacgaccggctggtcacttgctgccacctcgcaaaggcgcatctctagtt

SEQ ID NO: 11854 - DNA, 599 bp, Homo sapiens
  MAP TO AC019281.4; EXPRESSED IN BRAIN, SIGNAL = 0.45
aggggcagactgcaattatgacctcaatagacatcaggccttttctgcctctgagacagggaaagtgtaagagtatcatgggaggaaaattgctgatgggagataaagtccagggctcttagaatgcacaattgattactatatcttacaacaggtcaagcccaaaatcacaaaagatagcatcttcccatgtccagatggactgctctatatgcctggtcctcacctgggtaagaatctcctgggagttttccctctatgaaccatttttcttttcttttcctcatttgaagcattatacctggtttgggaaattgatcacacctgtggtagatactgcacttgatcacccaacatccatatttcttatcttccttattaaattgcccaagttttttcaaagtggcaataacccacataaattatttccttctcaacttcctttacctttttagccaaagagacatcagatgcatcccgtagttggaatatgagggagggaacccttgggaccccatgttagggttgggaacttcagggcatcaccgtgtatgactttcatatgaagaaagtcataatgcaaggaagtgggagatcac

SEQ ID NO: 11855 - DNA, 509 bp, Homo sapiens
  MAP TO AC005297.1; EXPRESSED IN PLACENTA, SIGNAL = 0.68; EXPRESSED IN ADULT LIVER, SIGNAL = 0.63; EXPRESSED IN FETAL LIVER, SIGNAL = 0.52; EXPRESSED IN BRAIN, SIGNAL = 0.65; EXPRESSED IN BONE MARROW, SIGNAL = 0.51
tgaacaaaaactcccatcaccttttacatggaagtagataaatacatctaaacatcacagcaaaaacaagtagagggtactttttctatcaacattcatagtaattttaacacatttgagcctgaacctttgcccctcacctcatgggctccggtgtggaaactatattatcccagaaaaaatagatccctgaagctcaacaaaaattataaacctagtgctttagcttcatgcaacaggataaaggagcacaattacaaagaaatcaagagaaacaaggagctcaatgacttgcccagagaatctgacagacacaagcatgagtattatcacacaattctagtttcaattaaatcaaatgagcaggatagcctgagaactgagtgggatgagtacaatgattacaagctttcgaaaaaattgtacgaaaatccaaggatgccatgaaaagtttatcatcaagactgaaggaaaatgaactaagtaatgctcctttattggaaaaccaa

SEQ ID NO: 11856 - DNA, 599 bp, Homo sapiens
  MAP TO AL157392.2; EXPRESSED IN PLACENTA, SIGNAL = 0.73; EXPRESSED IN ADULT LIVER, SIGNAL = 0.73; EXPRESSED IN FETAL LIVER, SIGNAL = 0.92; EXPRESSED IN BRAIN, SIGNAL = 0.76; EXPRESSED IN BONE MARROW, SIGNAL = 0.92
gttaggcagctgctcaggtcgtgcagggaccactcgtgggacctggcgtctggttgccggggcccgggcgtgggagtggggtgggggcagcccggttggcactgaccgtctatgatcagcgaagccctctgggtgggtttcttcccagacttgatgcggttctcattgattgcattttcaatctcctgcagtttcttcagtgcattcagatacgaggttttcctttgtttcttcagttttttgctgacgttggggtcactggctaggcggcgggcggcctccgtaatctgggactgaatggcaaactctcgttccaggcgttccagctcagcttcctgtgggagggaaagcaccggtttgggttactggggatgctgagcagggagaccctcatccttccctcccctgtcccaaggcaagtccagttccatgggagacactcttaagagtagccccactcctaaaatctgcacccactgaagtccccaggcacacccactgttgtaacccttgctcctgttactttctgaagacaagtgttggtgtgaacgctgccgccatcgctgagaacagagttcccacgatgcaggtttagggat

SEQ ID NO: 11857 - DNA, 571 bp, Homo sapiens
  MAP TO AC010397.3; EXPRESSED IN FETAL LIVER, SIGNAL = 0.51; EXPRESSED IN BRAIN, SIGNAL = 0.57; EXPRESSED IN BONE MARROW, SIGNAL = 0.57; EXPRESSED IN PLACENTA, SIGNAL = 0.68; EXPRESSED IN ADULT LIVER, SIGNAL = 0.52
agagtggatgggttttgactgttattatactttactggtgtgaggaggataaataaatgctagaggtagttaaagagggggtactttcttagtttgaaatttcattgaaaatagcaaccatatttattctgaaagtgtttttgtttttaaatttgtttccagacttttgtagaaaactgttttttaaatgtttattataacaatgatataatttttaaaaattcctttgtttgttaatgtgtcacttttatttattaatcacatgccttatctacttttggaaaacaaatgaagatagctgtactttggagttcatgtaaagttaacccgattttttgtttcatttttgttttagccaccagaaaggcagattgtggttggaatatgttccatggcaaagaaatccaaatccaaaccaatgaaggaaattcttgaacggatctccttatttaaatatatcacagtagtagtatttgaagaggaggttattttgaatgaaccagtggaaaactggcctttatgtgattgtcttatttctttccattctaaaggtattaaggggagtggggga

SEQ ID NO: 11858 - DNA, 549 bp, Homo sapiens
  MAP TO AC022882.3; EXPRESSED IN ADULT LIVER, SIGNAL = 0.72; EXPRESSED IN BONE MARROW, SIGNAL = 0.51; EXPRESSED IN BRAIN, SIGNAL = 0.56; EXPRESSED IN PLACENTA, SIGNAL = 0.59; EXPRESSED IN FETAL LIVER, SIGNAL = 0.66
agccacatagcggtcataggccattgcagccagcgtgaaaatctcagccacaatgaaaaccaagaatccacccagttgggctgcacatccatagtatgatatggttttcttggtaaccaggaagttaaccagcattttaggggcaacgacagtagaattgcaaagattaataatagccaagtgtcagaggaaaaagtacatgggggtttgaagttgagggtcaacactggtgagggtgatgatgcccaggttccctgccacggtcagcaaatagagcaccaggaagaccaggaagaggggaatctggagctccggatcatctgagactcccacaagaatgaactccgtcacccatgtgagatttcctgaagccatttgtattgttggcttcatcttttacctgaaaaagttgaaagaaatcaattgatgataacattgatgtttctgttagatgctaggttgttaaatatttcatttgaaatcagtttattttgttttacaaactcttacaagtttcagaacctaattgtttttctccccatgttttca

SEQ ID NO: 11859 - DNA, 589 bp, Homo sapiens
  MAP TO AL136313.3; EXPRESSED IN BRAIN, SIGNAL = 0.5; EXPRESSED IN PLACENTA, SIGNAL = 0.64; EXPRESSED IN ADULT LIVER, SIGNAL = 0.6; EXPRESSED IN FETAL LIVER, SIGNAL = 0.59; EXPRESSED IN BONE MARROW, SIGNAL = 0.44
taggaaagccctggaaaaggcattgctgcatttttctctgttgcatgtgtcttttctccccttagtgtcatgtccaagcatgatgtcactcacatgtcatctgcacatcccaggtccctttgcaaatggaaactacagaagaaacaaaaattgattgagtgcataaaatctatttcaggaacatcctaaagggtctatctcagaagcactgagttccaaaggatttgctgacatttattgttctgcttcagattattaaatgtctttctgatcacatgatgccatgttttgcatagtgtgacatatctgtcctgttttaaattcataggaattggcaacaagctcatttcactggtgggtttgctgaagcattatcacaagacagtcagaatgactgatgagtgctcttcaggtagggaaatgctgccagcctggtttgtattttgtcttaccaagagttttgctccttaattttctatttcagttatgaataatcccttttcatgctagtagccataatcacattataaaggatttaaaatttgtcatttcctggtagtatttcttacagcgtaagcatttttggttc

SEQ ID NO: 11860 - DNA, 502 bp, Homo sapiens
  MAP TO AC018583.3; EXPRESSED IN BRAIN, SIGNAL = 0.83; EXPRESSED IN PLACENTA, SIGNAL = 0.66; EXPRESSED IN FETAL LIVER, SIGNAL = 0.57; EXPRESSED IN BONE MARROW, SIGNAL = 0.55; EXPRESSED IN ADULT LIVER, SIGNAL = 0.77
gttacatgcacaggctttggaattgaaaatacagctcagcctctcactactacctgtgacctaggtagatcatctaacctctcaatgcttcagtttcctcacctgttcaagaaggattcaatgtgataatccacactaagcaagatgcctgaaacatagcaagcactcagtaaatggtaactatttttattattggtcaataatcccaatttggcatcatttataaggtccagattcttaaggctgattctgtgaataacgagcaatttgaatatgttttttaagtgcaagaatgcagaagccaggaaataaacaaggcaaaaacagattaatccactctagtggattaatccaactagtggatatcactggtatgcggggactctagtataatgaaatataaagagtgaactacagtggtagagccaaaattattgtgagttaggtggctttcctcatttattatagaaaattggctgtttcatcttgccacttccagtga

SEQ ID NO: 11861 - DNA, 578 bp, Homo sapiens
  MAP TO AC011938.3; EXPRESSED IN BRAIN, SIGNAL = 0.44
tacccattgacgctatgtgctgaaatattacagtaatattaacaggatgagttataagttgcttgaaaataaatgtgctaaaaggagtcacttccctttgtttatgaaaatagctttaaacttgaatgtgaatatttccttctgttgctctgatatctgggaaacttcattttgtagctgctggtacagtggccgcccaaggaagcaactcatggtgcaccgtggggggctgttaggagtgggacccagtgggtgttcatcagggccctgctgctggccagtgcctaaaccatgtcaatctcatggtttttagcggaaacaatcgcacagctgcccccatcaccctgcctatagaagaagtcctgcagaccctacaggacttgatcgcctacttccagcccccagaggaggagatgcgacatgaagacaagcagaacaagctccgctcactcaaaaacagacaaaatcttttcaaggaagaggtaagtcgaaaaatgaaaagttgaaattcacttagtgtccagagctagaatatccctgtgactacaacttagctttgtctttctgcatgcacgtgt

SEQ ID NO: 11862 - DNA, 514 bp, Homo sapiens
  MAP TO AC018787.3; EXPRESSED IN PLACENTA, SIGNAL = 0.75; EXPRESSED IN FETAL LIVER, SIGNAL = 0.69; EXPRESSED IN BONE MARROW, SIGNAL = 0.57; EXPRESSED IN ADULT LIVER, SIGNAL = 0.74; EXPRESSED IN BRAIN, SIGNAL = 0.72
cccattacactggccatttctcagcagccttggctaatacctccccttttctccagtctcttaatttcaggatgatattccagggctccaatcttgctcctctttcttatctaccctcactcccttggtgctccatacagtctctttactttaaacatcatgcacatgtcaaggactctgaagcttatatttccagtgtgagcctctctcttagacttgagactcctgtggccacctttccatgtctccgttaagatatccaagacaaacctcaaacctaacatgtactccccatcttctctcaccctaatctcctgctgcatcccaatctcctcatctcagttagccctctttaggccgaagtccttgcagccctctttgattatttcctttctctcatatcccatatccacgctattattcaaacatgtcctgcaaatttccacatcagagtaatgactcttctggttcactctgcttagaaagcatagaagtgctcctctactgcaaaacg

SEQ ID NO: 11863 - DNA, 578 bp, Homo sapiens
  MAP TO AL122058.19; EXPRESSED IN LUNG, SIGNAL = 0.91; EXPRESSED IN PLACENTA, SIGNAL =   1; EXPRESSED IN ADULT LIVER, SIGNAL = 1.1; EXPRESSED IN BONE MARROW, SIGNAL = 0.9; EXPRESSED IN BRAIN, SIGNAL = 0.79; EXPRESSED IN FETAL LIVER, SIGNAL = 0.88
tcgggatgaattatgggaagaaataacagggacagagataaaaaaaagccaccaaggcccaccagatggcctcaggccacaggacaggaagccaacgggcatttggcccccagatgctgagtaggggatactggctgtgtctctggcattaactggattgaacacagtggtttgccatctctgcccagctgggtggctttttccagagggatccttgcagatccatgagaggaccccaagcggaaccaaaggcattaagggcctgccactccctctcaggcagcttcagtctcggttctggagtgaggcccagagaaagggactgcgaggaaaaatgccaaggctccttgatgagggctgctctcctctgaccttccaggacatcctggaagttcccagcagccaaaaggaatcctccttgccctctgaaaaggctactcaggaagctgacctggcacatcctgagaaggcagctcaaaaccagaactcatgccctggggctgaggtgtagtggcaaggggtagaagccaggagacgaggaaacaggcatgtagccttcaggagcagcaagaaactcc

SEQ ID NO: 11864 - DNA, 575 bp, Homo sapiens
  MAP TO AC019221.3; EXPRESSED IN PLACENTA, SIGNAL =   1; EXPRESSED IN FETAL LIVER, SIGNAL = 0.79; EXPRESSED IN BONE MARROW, SIGNAL = 0.73; EXPRESSED IN LUNG, SIGNAL = 0.93; EXPRESSED IN ADULT LIVER, SIGNAL = 1.5; EXPRESSED IN BRAIN, SIGNAL =   1
agaaggctgctgttgtgtcccttgttgtactgttagagcgggctctgccctggtgaattctactcccatggaagttaattccaaagtttcattttttaaacatgatgattaaaaagaagcttttgactcagatttagagagagggaactcacttctttctcaaggtgatttcagtgcagaggaatatgaagaccgctcagggttagtgttatttaagagagagagagattcctgtgacttttaaaatgatgttatcattacttgagatactctttccttgagatgccactgtgtagtgcttcattttttttttctaaaacagtatgttttgaagagtgctttttaaaaccgttggagaaatgtctgtttctttttctaggccatgaccttgcctcctttcctggagttcggtgtcccgtccccagcccacctcagagcctggacggtggagaggaagcgcccaggcaggcttttacgaactgaccggcagccactcaggtaggttccttgctggacgcaacactgtccctctctgctgctgacgcactggctggtgtgagggatggaggaggaat

SEQ ID NO: 11865 - DNA, 599 bp, Homo sapiens
  MAP TO AC009597.4; EXPRESSED IN LUNG, SIGNAL = 1.1; EXPRESSED IN PLACENTA, SIGNAL = 1.1; EXPRESSED IN ADULT LIVER, SIGNAL = 1.2; EXPRESSED IN FETAL LIVER, SIGNAL = 1.3; EXPRESSED IN BRAIN, SIGNAL = 1.2; EXPRESSED IN BONE MARROW, SIGNAL = 1.1
agggcacatggaataagcacctgcccaaacagagcagcataggatgcataagctcactgaagaatggaaaaggcagtaagtaattgaaggagcatcagaaaggttcctgaaaacatgaagagggtgatgggttgatttgtgtcataagtttaagtcctaacccccagttcctcagaacgcgactttatttggaaaactgaagaagaagatgttgaaagtgaagataatctcacttaggcatgtcagccaggaaatccagtcagagaactgggtttttgatatcagtgaaatccaaacagaaatagaaaaattacctatggtcgatcatagtgttatcatcattggccagagaaggaatttccaggtacatttggctcagatagtttgtgcaaacaggtgaaaatagttgttaccaaattgtatgagtataataaaatagctagtttaagaacacacctgtgtccagaacacactatgaggatgaacagactttctcctgggactgtggagatgatggggaacagcatctggtaggtgttttctccattgcataggggtttttaatgtgaggggtgtcatggtgtttgtgtcacactggc

SEQ ID NO: 11866 - DNA, 592 bp, Homo sapiens
  MAP TO AC011280.3; EXPRESSED IN BRAIN, SIGNAL = 0.61; EXPRESSED IN BONE MARROW, SIGNAL = 0.56; EXPRESSED IN PLACENTA, SIGNAL = 0.58; EXPRESSED IN FETAL LIVER, SIGNAL = 0.5
ggtgagtcactggatgagggctgagtgaatgtgaaggcctaggacattactgtacactactctagactttacaagcattgtacacaggctacactaaattcgtaaaaagtatttttctttcttcaatagtaaattaacttaacattatggtaactttttaactttataaactttttaaatttttataacatcttgactcttgtaataatataacacacattgtacaactatacaaaaacattttctttatcattattctataagcttttttctatttttaaaattttctattttttattttaaatttttaatcttttttgttaaaaactaaaacataaacgcacacattagcctaggcctacactgggtcaggatcatcaatcaccactatctttcatttccatatcttgtccagttggaaggtcttcagagacaatgacatgtatggagctcttttctcctataataacaacgccgtcttctggaatagctcctggagaacctgcctgaggttttacatttttttttaataagtagaagaagtatactctaaagtaatgataaaatgcgtagtaagaaagccaggccctgt

SEQ ID NO: 11867 - DNA, 582 bp, Homo sapiens
  MAP TO AC011181.5; EXPRESSED IN PLACENTA, SIGNAL = 0.51; EXPRESSED IN FETAL LIVER, SIGNAL =   7; EXPRESSED IN BONE MARROW, SIGNAL = 0.79; EXPRESSED IN ADULT LIVER, SIGNAL = 0.94; EXPRESSED IN BRAIN, SIGNAL = 0.81
ttgataaagatgggaacccgatttcgggaaacgccatgaggggcctgtcccgggccccgttctaaaccagggcatttccagctcaggccattccctcacccctatacaatgtctgtcccctgccacagccagtagtgccgcagtagatttatgctgcacaaaagctgtgagctttttgcctggggaacccctgcaaaaggtcccgacaggagttggtggacccttgccagcagggactataggattacttttaggaaggtctagcgatagtttaaaaggcgtacaaatacatacaggagtcattgattccgattacaatggagaaattcaaattgttatatctacttctgttccctggaaagcagagccaggagagcacatagcacagctcctgatggtgccgtatgtgggaatgggaaaaagtgaaattaaacgaacaggaggatttgcaagcacaaataaacaaggcaaagcaacttattaggtaaatcaaattactgataaacgccctacctgtgaaataactattcaaggaaagaaatttaaaggtttggtagatacaggagcggacatttcaatcat

SEQ ID NO: 11868 - DNA, 506 bp, Homo sapiens
  MAP TO AC011255.3; EXPRESSED IN ADULT LIVER, SIGNAL = 1.4; EXPRESSED IN PLACENTA, SIGNAL = 1.3; EXPRESSED IN FETAL LIVER, SIGNAL = 1.2; EXPRESSED IN BONE MARROW, SIGNAL = 1.2; EXPRESSED IN LUNG, SIGNAL = 1.5; EXPRESSED IN BRAIN, SIGNAL = 1.1
cgtcactgagtctgggagtgaggtgaaattcagaaagagtttcttaagggaaatcattagtaaataagtgaatgaagaagaggagtttgccagatagagaaaaagttgggagaggtagaaagagaaggtatgttgtttcaaataagaaaaacagtatatgcaaagtctttaagaagagcattacatgttgaaaagcttataagaagttagttatgaatggacaagagggtgtgaggcaggaaagaacagtagcaaaagtagaagctacacaaggccaggtaataaaggggttcatgatcatcctagggtatttaaacttgatcctaagggaacttactttatttagagtactgtcattactatgtttatgtttcagaaagatcactctgactgctacatggaaaatgtgctggggagaaacaagactgcaggaaataagagcagtgaacaagctcttgctgtaattcaagtcaggtatgatgatatgatggtgtctcagattgggg

SEQ ID NO: 11869 - DNA, 551 bp, Homo sapiens
  MAP TO AC018421.3; EXPRESSED IN ADULT LIVER, SIGNAL = 0.61; EXPRESSED IN BONE MARROW, SIGNAL = 0.54; EXPRESSED IN PLACENTA, SIGNAL = 0.48; EXPRESSED IN BRAIN, SIGNAL = 0.49; EXPRESSED IN FETAL LIVER, SIGNAL = 0.51
tgtgccattgttaggcactcacagccctgctctgggtctactctctaacgttgctccattagaaaatgccgtgtcctgcatacgagtgaactgcactttgctgtaactttggctgtcttgcaatcccactaatagccttttactgtagggagactatctacagcagcatctaaaagtgcccatccatccaatgcctcccagggaagaagcaaatagaggagctaagagaaggataaacgttttggtctctcactgtaattgcagttaagtaaaggaattgattgtctgcaggagtggtgcgctttctactttcaactacgtgtttccaccccctggtctagtaactgcagcaggcattggaaacgagtgcaaagcagggcatatgtatttccttgacatccgtgacgctaaagataaagaacatttcatcatcaatattgttaataaaatctagcatttaaacactgatttaaaaaagatcagaccagaaccaggtggtgtctacagatatttatcacaggtctattatatgcagtggagctgatgctaca

SEQ ID NO: 11870 - DNA, 518 bp, Homo sapiens
  MAP TO AC019263.4; EXPRESSED IN BRAIN, SIGNAL = 0.77; EXPRESSED IN LUNG, SIGNAL = 1.2; EXPRESSED IN PLACENTA, SIGNAL = 1.1; EXPRESSED IN ADULT LIVER, SIGNAL = 1.1; EXPRESSED IN FETAL LIVER, SIGNAL = 0.84; EXPRESSED IN BONE MARROW, SIGNAL = 0.87
aagcaggtgctgcaattaccacttcactgatctcagggtgagttaaattcctttgattggcatgcaggtggcctctttctgtattcactcccccaactctacccctttctgaatatagacactcaacacagaagctgatccccaaatgcagagcaatcatttacctgttaaatgcattgaaaaaagctgttctgccttgttaaaattctaaatataggctgtaatgttcaacaaatattaactgtgtagtataaacaaagtattatttaaggcacattcataagtaatatctttatctctcacaatagttcatgccaattcttccttacatcttcccaattatgaagatgttgactttctgttacataatggagaaaggaagaatatgtttgacactcgtgataaactggagtgtttcttggtgttctgtgatcattttactaataagtagacaaatacagtagccaaggtatgagacaggcacagtaactgaaaactcagagccttcaagattggga

SEQ ID NO: 11871 - DNA, 548 bp, Homo sapiens
  MAP TO AC022036.3; EXPRESSED IN PLACENTA, SIGNAL = 0.97; EXPRESSED IN FETAL LIVER, SIGNAL = 0.77; EXPRESSED IN ADULT LIVER, SIGNAL =   1; EXPRESSED IN BRAIN, SIGNAL = 0.78; EXPRESSED IN BONE MARROW, SIGNAL = 0.78; EXPRESSED IN LUNG, SIGNAL = 0.92
tcccactcccactactggtcccatccatagttagataacataaattccttgagaaagtctcaaaggtttgacaatttttattatattttcacttacctttttatactttttatttaaaatagttttaaaataggccaaggtgggaggattgcatgaaaccaggagtttgaggttacagtgagctgtgatgacactgttgtgctccagcctgagcaacagagcaagaccgtgtctcaaaaaaaaaaaaaaagttatagatttacagaagagttgcaatgatagcaaagaactcctatataccttacactcatcttcctctaaccataatcatggtatattcatcaatactgagaatttaatagtaatacaatcctattattaactaaactacttattccaccaagttttccactattgtcttacttttactccaagacacagtttataccacattgcatttagtaataatgtctccttagtgtccttcaaatctttggtagttgcctgatcctttctggtttgtcatgccctcggcactgttgaagaat

SEQ ID NO: 11872 - DNA, 574 bp, Homo sapiens
  MAP TO AC018528.3; EXPRESSED IN ADULT LIVER, SIGNAL = 1.2; EXPRESSED IN BONE MARROW, SIGNAL = 1.1; EXPRESSED IN LUNG, SIGNAL = 1.1; EXPRESSED IN BRAIN, SIGNAL = 0.75; EXPRESSED IN PLACENTA, SIGNAL = 1.1; EXPRESSED IN FETAL LIVER, SIGNAL = 0.84
tccctccttcctaaaccaccacagcattcagggtccacatccgtaactcatgcctgagcatggaggctgctgagacacacttagagctggaagtcaaaattcactctcctgactggctaggtgaccttgagccttgatttttccatttgtattataaggctttaaagtttttaaaataaactttaattgtattaggacatattctagaaaactagctacaaaactaactacccactcagtcatttggttaatgatatttactcaatgttctttttccatttatgctaacaaagattatctaatcactctgtttttctgcaaatgtctccgaattggcctgttttagatctgttcctgtgaagaaaatttgacgcttaacttgtaatttctcgtaattaagtatctgggaaaaaaaaacagtaaaataagaattattacttctacctcctctttataaatcataaagcattttacaagtatagattttcagaaagtcttctgatcttggcattagttttacatatataaattgtgtccttctaactaattatagtctcctggaatgcatgggtta

SEQ ID NO: 11873 - DNA, 507 bp, Homo sapiens
  MAP TO AC011686.3; EXPRESSED IN ADULT LIVER, SIGNAL = 0.76; EXPRESSED IN BRAIN, SIGNAL = 0.82; EXPRESSED IN PLACENTA, SIGNAL = 0.61; EXPRESSED IN FETAL LIVER, SIGNAL = 0.85; EXPRESSED IN BONE MARROW, SIGNAL = 0.87
ggaagcaaattcattctggcccttctccatgacaggtgaaaagcgaaatcccaaaggtgccgaagcagcctctggtgctccatcacccgcgcatgacgacaaccaagtctccctcaaaggatatgctagagccagaggcagagctggctgaagatctgcccactaccaaaagcacttctgtggagtcagagatgcccactgagaacctggaaggccattccccgtcttgccggaccttcgtgccactgcctcccatctgctccaactccactgtgcatagtgaagagaccctgtcccacctgagtgacacaactgtccgcctcagcccagagcgcccatcagatgaggactccaagagcacagagtccatcttcctgacccaggtacctgtatccagctgcccctgcccacttgttgctagctcccacaggttcctgtgcagcccttaggctcgattgctgtggacagctgggagcaacaagcacatggcaggtctggaaacaagaa

SEQ ID NO: 11874 - DNA, 523 bp, Homo sapiens
  MAP TO AL139819.2; EXPRESSED IN PLACENTA, SIGNAL = 0.74; EXPRESSED IN ADULT LIVER, SIGNAL = 0.77; EXPRESSED IN FETAL LIVER, SIGNAL = 0.98; EXPRESSED IN BRAIN, SIGNAL = 0.84; EXPRESSED IN BONE MARROW, SIGNAL = 1.1
ataaacatactggcccgtgggctccagcagcctccacgtagggctgttcatatttactgagcaggaatactgttgtagccattcaccattgatgcctagcagccagaagggagctgctggagagtttacacttcagacatgtaaaatggcagggacataggagagtcatgggagattcatccccctattgatggcttttcattctgcaattctgactaaaatttgttcatttttctttgaacccaggtcgtaaaggtatcttcactggaagctcggggctgcagattgtgtacctcagtgggacagaatccttaaatgagccagtaccaggttatagttttagtcccaaggatgtgtcttctctgagaatgatgctgtgtacaacctcccagtttaagggtgttgatatcttgctcacatccccatggcccaagtgtgtggggaactttgggaattcttctgtgagtagtgtttgtttagttggaatttctaaaagcaaattgcactggcttgagttgggact

SEQ ID NO: 11875 - DNA, 581 bp, Homo sapiens
  MAP TO AC015772.5; EXPRESSED IN ADULT LIVER, SIGNAL = 0.52; EXPRESSED IN PLACENTA, SIGNAL = 0.69; EXPRESSED IN FETAL LIVER, SIGNAL = 0.65; EXPRESSED IN BRAIN, SIGNAL = 0.93; EXPRESSED IN BONE MARROW, SIGNAL = 0.65
aaggtcacccagcacaaatcaaaataataataacagttaatttacatcatgttatacaagactgttttgtagcagaatgtcaagacaccagtctcttaatatgctgtgttccaacaggcacaaatcccaaagaattcaacccaaatggttccctattgtgcaaagtgatagacctgttcttactctaaggcaggcacacttctgagggctgtacattaaatactttattctcaaagcagtccgaaggtaggtgctattcttaacccattcttcagatgcaggaacaaagagagcttgaatatcctgccagagacacacagatagtagtggtgctgtgatttgaatacaggcaatgtaacattctatgaatgagctatattgactattaatatttttcttcagtctattttttagcaacaacctgagtatatgaaactatgagctgccagtgcctccctagaatttattcctttcaaatactttccatggcattactaggaaatatgcatgcaaaatatactcaactgatttgagaacattttacaaagactagtttgaagcaacaggtttctcgcctatga

SEQ ID NO: 11876 - DNA, 505 bp, Homo sapiens
  MAP TO AC016498.4; EXPRESSED IN BONE MARROW, SIGNAL = 0.5; EXPRESSED IN PLACENTA, SIGNAL = 0.79; EXPRESSED IN BRAIN, SIGNAL = 0.67
cagtccccttggtctctgtgacagtgggcggggccggccctcccaggatctgacggcgcaggtcctccccttctgtgtcctgcagatggacacccgctccgggagccagtgttccgtcaccccagaagccatactcaataatgaaaagctggtcttgccgccccgcatctccagagtgaacggctggtcgttacccctgcactacttccaggtggtgacctgggctgtcttcgtgggcctttcctcggccaccttcgggatcttcattcccttcctgcctcacgcgtggaaatacattgcctacgtggtatccttttcatcgtggcatggtctaagcgggaggggttcctggaggaacttgcgatggacctggctgtggggtctgggccatggctgcccggtggcaccagtcacctgccctgggccagactatgtcccctgagcctgcaggtgggcccagtggccactcatgctctgtgcagcccctgcttagggtcaggacagg

SEQ ID NO: 11877 - DNA, 542 bp, Homo sapiens
  MAP TO AC015662.4; EXPRESSED IN LUNG, SIGNAL = 0.89; EXPRESSED IN PLACENTA, SIGNAL =   1; EXPRESSED IN ADULT LIVER, SIGNAL = 1.2; EXPRESSED IN FETAL LIVER, SIGNAL = 0.89; EXPRESSED IN BRAIN, SIGNAL = 1.6; EXPRESSED IN BONE MARROW, SIGNAL = 0.81
atgggtaaaaaggtgacccctccccccaaaaatagatgtctacatctgaatccctggaacctgtgaatgttaccttatttggaaaaaggggtctttgtaaatgtaattaaggattttgagatgaggtgatcacccttaattatccaagtgaaccctaaatccaatgacaactttccttataagggtaaggaagagggagatgattagacagagagaagaaagaggaggcattgtgatcatggaaacagagatggcagtgatgcagccacatgccaagcacttccagaaaccaacagatgccaaaacagactaagaacattttatcctctagagtctccagagggaatgtagaaatgttgatagcttcgtttcaaacttctggcttccggaactgtgagagaataaatctccattgtcttaagccacttatttgtgatagtttgttatggaattcacaggaagttaatatataccgcaaccgccatttcccaaaaagaaagcagaagagaattaaaatatctgggatcacggttgaggttgaa

SEQ ID NO: 11878 - DNA, 599 bp, Homo sapiens
  MAP TO AC017086.3; EXPRESSED IN PLACENTA, SIGNAL = 0.51; EXPRESSED IN ADULT LIVER, SIGNAL = 0.85; EXPRESSED IN FETAL LIVER, SIGNAL = 0.65; EXPRESSED IN BRAIN, SIGNAL = 0.6; EXPRESSED IN BONE MARROW, SIGNAL = 0.53
caaggcactggtgtatggtgagggtcttcttactgcttccccacagggcagaaagtggaagggcaagagaaagcaaacccactcccacatgccctttttatagcagcattaatccatttatgagggtaaatccctcatgacccaaatacctctcaaaatgccccacttcccaacgttgttgcattggggagtcagtttacagaacatgacttttggaagtcatattcagaccacagtaggtgccataattaagtaccacaagaggggtagcttaaacaacaaaagtgtgttgtctcacagttctgaaggctggaagtccaagatcaaggtgttggcagcactgattccttctgagggctatgaggaagaatctgtgccattcctctccttagtttctgatgatttgctggtgctgtggactgaaaatttgtgtccctccaaaattcatatgttgaaacccaatcctcaatgtaatagtagtaagagctgggacccttaggggctaattaagtcatgagggcagtagcctcatgaatggaattagtgcccttataaaataagcccaagagagctgccatgcctcttccactatgtgggga

SEQ ID NO: 11879 - DNA, 572 bp, Homo sapiens
  MAP TO AC018537.3; EXPRESSED IN PLACENTA, SIGNAL = 0.51; EXPRESSED IN ADULT LIVER, SIGNAL = 0.51; EXPRESSED IN FETAL LIVER, SIGNAL = 0.46; EXPRESSED IN BRAIN, SIGNAL = 0.44
atgtttggatccactttggcacatagtaataactatatgatctttagcaatttattatttttctaatatatggaaaagaaaaatgatgaattaagttccctgaagctctttcaaaaagtctttttcttattcagcacaataaactttattatttctctaaacaggtctaaaattctaattgtaaaatgaaaacctatccaattatataatatttcctcatttccagatatttggtaccggggtcctagtgaaattctgcaaatacccaaaggatatggtcaataaaataaaaagccaggttctcctgaaaatgctggaccaattgactattatcttcccagttcattaaccatttctaagagaaatactagctattgtttggaacattagctaggctctagtgttcaacctcaagtccttgatttcaacgagaacttactttccaggttgaaagtaactttccaggtatcttcttgttttcctttcattcatttatttgcttattcattcatataacattgagatatattattcaatgagcaagctgttccccgcctgaagaatctgtggta

SEQ ID NO: 11880 - DNA, 555 bp, Homo sapiens
  MAP TO AC022860.3; EXPRESSED IN BONE MARROW, SIGNAL = 0.97; EXPRESSED IN ADULT LIVER, SIGNAL = 0.76; EXPRESSED IN LUNG, SIGNAL = 1.7; EXPRESSED IN PLACENTA, SIGNAL = 0.6; EXPRESSED IN FETAL LIVER, SIGNAL =   1; EXPRESSED IN BRAIN, SIGNAL = 1.1
caaatgagttcccactgcaagatatttacatcatggtaaaaaacaaattatgttcttcaatatgatctttggatttgtacaatttaaaaaataagtctgtacaacctctttaaatgtcagttaagtgcacagaataaagatattcattatcttcatgtctcctgcacatttaagttaagcctctttcatgtcaacctaggcaagtacctagtattcatactcacaaagctaaattatttatattataattaaattaagatcattggtatgatgaagatgtaacagaaacaaataattcaaaaaatgtttaaaattcattattcccaagtcagagcatttatcctccagtgttggaaggtcttacctatcaattaaagcaatgattatgtttttcacgtttacattctggtgtaactcagcacaggttcgaagaaagggattcaaagtctggaggtgaaattcatcagggaaaacctgaaaatcaaatgatcagtacaagtaaaagtatttcacataatattctgaactcacatacggtaaagttcacatttgtgg

SEQ ID NO: 11881 - DNA, 588 bp, Homo sapiens
  MAP TO AC013685.3; EXPRESSED IN BONE MARROW, SIGNAL = 0.63; EXPRESSED IN ADULT LIVER, SIGNAL = 0.69; EXPRESSED IN PLACENTA, SIGNAL = 0.69; EXPRESSED IN FETAL LIVER, SIGNAL = 0.53; EXPRESSED IN BRAIN, SIGNAL = 0.65
ctcatccccttcttcaatgcattatgaagctcaagacatagttttgaaacaaattaaagatactatctttatgtaaaggataaaatttgttatcctaagatatagtaagtgggtttagccaatgtgaatcttgtgtcttaggctcacccaaaagtcctataaatgaatccaacctaaccttagaatgcccataactacatgcacactgaatttctgtctgaccacctggacttcagcccaaactgtcatgctctccttagcttccaggttccacatctcagctcctgacattgctttaagttcttctgagtttggtgcccttgtctcagcccttcattcccaccatgctctcaagacttcagtattcagtctctcacaccagatctccaggtgagagtcacccacatagcaacttgacccaggttggtgaaaccaatcaaacatttgcttactcccatcaagattcctacagggaaagggttacattcagtaattctatttgccatctttgttgcaagcattctcttctttttctagaaaatgtctcctagaaactaaatcaaatgcaggagatggcttggcagttac

SEQ ID NO: 11882 - DNA, 593 bp, Homo sapiens
  MAP TO AL136171.3; EXPRESSED IN BONE MARROW, SIGNAL = 0.55; EXPRESSED IN LUNG, SIGNAL = 0.84; EXPRESSED IN PLACENTA, SIGNAL = 0.6; EXPRESSED IN ADULT LIVER, SIGNAL = 0.71; EXPRESSED IN FETAL LIVER, SIGNAL = 0.5; EXPRESSED IN BRAIN, SIGNAL = 0.54
acagaggagggacgatgatgactgggacaagatagggtgttgtttcttgagtgatgagactgttctatctcttggtagggctgttcgtaacacaggtgtcaaaattcaagaactgtaaacacttaagacctgtgcattccactgaatataaaccatacctcaattaaaaagaggaaaaattaagaaatttttaagcatgaacattgaacaataaataaatatataacattaatgagtgtcccataaattagttagtgttaattagaaaaccccactgtgttttctcagaatttatagtaaccataatcacaataatagctacaaactttctcacctttaaatgtcatcacaactttaggaaacaggttatatcttatattattattattattattattattattattattattattattttacattttaacatctctgaaacagggatgtgtcctacaatcaccatcagccaggaagtggtcaggatgcagtggttataactggattattttccctggcctggctgaccatctgcaaccccctggtgtttcaatgtacaaactattttaggaccatctgcgtactggctgttg

SEQ ID NO: 11883 - DNA, 548 bp, Homo sapiens
  MAP TO AP001432.1; EXPRESSED IN PLACENTA, SIGNAL = 0.72; EXPRESSED IN BRAIN, SIGNAL = 0.84; EXPRESSED IN BONE MARROW, SIGNAL = 0.88; EXPRESSED IN ADULT LIVER, SIGNAL = 0.88; EXPRESSED IN FETAL LIVER, SIGNAL = 0.8
tgcttgagacacatgggaactgaactgatacatccctctctcctccccaggtatctcatttaactgttttaacgaccccgatcttcaggatcaagaagcagacccagcacagtgaggctgcctggctaacagggttgacgtgtgaacccacggctccccctcaccgagccccgtgctcttctgggcagcgctgcctctgctcctgacagcccaccagcttcctcggagccttcctgctgcagccgctcagggagagcaggcctttcctccagccctgtggcctgcacagacctcctcagctgggcctccaaggaggagcaggagggtactaacatttggaacctgccttcaaggcacgtattcatgctttttaagcatttatagtttaacatcagtggctcggagaagacccatgacttaggaagtgaatctcttaagtactaatggattaaaataaagttgtagaaaacataggaagcccctaaatctgaacactgtgaatgcacctttctctgtcttcactcttttccctgcaaaacttaaagcgt

SEQ ID NO: 11884 - DNA, 585 bp, Homo sapiens
  MAP TO AC013490.3; EXPRESSED IN LUNG, SIGNAL = 1.4; EXPRESSED IN PLACENTA, SIGNAL = 1.1; EXPRESSED IN HELA, SIGNAL = 2.4; EXPRESSED IN FETAL LIVER, SIGNAL = 1.9; EXPRESSED IN BONE MARROW, SIGNAL = 1.6; EXPRESSED IN ADULT LIVER, SIGNAL = 1.4; EXPRESSED IN BRAIN, SIGNAL = 2.1
tggagcagtttgactgagaccttgttcaactaaaagaggccaaagtgaatttacttcttcttttcagaagaatatatagctaatagtatacacagacgtactttatcccattgtatgtggcaacatgtattgataagccaaaggagtaatctttctgattaaaaatgttttcctttcaatatagctctctctgtttaaattaattagaatattattttggaattttaccgtgtcttgtgtctacaacatttactattttcaaaaaaattctattttttatttcaggaatatacaattgatgttttctttcgacaaaaatggaaagatgaacgtttaaaatttaaaggtcctatgaatatccttcgactaaacaatttaatggctagcaaaatctggactccagataccttttttcacaatgggaaaaaatcagtagctcataatatgacaatgccaaataagttgcttcgaattcaggatgatgggactctgctgtataccatgaggtatgtttttaggtttgatgtgatgtatttatatactgagaaattttcatgtattaaacaaccagccaatctagctgtc

SEQ ID NO: 11885 - DNA, 501 bp, Homo sapiens
  MAP TO AC021701.3; EXPRESSED IN LUNG, SIGNAL = 0.86; EXPRESSED IN ADULT LIVER, SIGNAL = 0.97; EXPRESSED IN FETAL LIVER, SIGNAL = 0.91; EXPRESSED IN PLACENTA, SIGNAL = 0.9; EXPRESSED IN BRAIN, SIGNAL = 0.82; EXPRESSED IN BONE MARROW, SIGNAL = 0.91
atgatgtgttgggaaatgggattttctttggaaaaagtttcagttttttgacaaagaattgctaaaaaggaagttggattagattaagactatagcccactatgtttctctaaaataagttttttttaaacaaagttttaatttttttgtttttttaattcaccaaggcaagcgagtttttatcagagcctatgtcaacagcattatttctcctttctttggacatgcctatttctttggaatatccaaatattcatgaagctgttgtggcctatttggaacagctgaattctgaaaactacagtatttataaacgaactgcagaggccgtttattcaattgaatgcacctgtaacttcctgtctgatattgggaaagaggtaaaaagcttttttaatatctcttttaaatccctttgacatattttgaaaatttaatctatacttttcaaattgatggacatataattaaattgtcacaggtgggatacattattcctga

SEQ ID NO: 11886 - DNA, 555 bp, Homo sapiens
  MAP TO AC016201.5; EXPRESSED IN LUNG, SIGNAL = 0.92; EXPRESSED IN PLACENTA, SIGNAL = 0.98; EXPRESSED IN ADULT LIVER, SIGNAL =   1; EXPRESSED IN FETAL LIVER, SIGNAL = 1.1; EXPRESSED IN BRAIN, SIGNAL = 1.1; EXPRESSED IN BONE MARROW, SIGNAL = 1.2
gtttggcctgagcagaagacagatggatcttgaagaatgacagtggattatcataagcttaaccaagtggtgactccaattgcagctgctgtaccagatgtggtttcattcattgagcaaattaacacatctcctggtatctggtatgcagccattgacttggcaaatgtctttttctccattcctgtccataaggcccaccagaagcaatctgtcttctgctggcaaggccaggaatatacctttactgtcctacctcaggtgcatatcaactgtccagctttgtgtcataatcctattctgagagattttgatcacttttcccttccacaagatatcacactggtccattacattgatgacattatgctgattggttccagtgagcaagaagtagcaaacatactagacttattatgagacatttgcatgccagaggatggaaaataaattcaaggatcttctacctaagtaaaatttctaggggtccagtggcctgtcgagatattccttctaaggtgtagaatatgttgctgcatttggtccctcctacaa

SEQ ID NO: 11887 - DNA, 592 bp, Homo sapiens
  MAP TO AC008528.4; EXPRESSED IN ADULT LIVER, SIGNAL = 0.58; EXPRESSED IN BRAIN, SIGNAL = 0.7; EXPRESSED IN BONE MARROW, SIGNAL = 0.49; EXPRESSED IN PLACENTA, SIGNAL = 0.57; EXPRESSED IN FETAL LIVER, SIGNAL = 0.63
ttcacctgaggatgctttccatacattctttaaatccccaaatatagctgatatcttatattcacatactacttttgggcaagttactctctgactctgagcctgtatacctattaaatgcataaataacacccacttcacaatgttatgtagatcagctggatgatatcatatgaatgtgttgtacaccataaagtcttttaacttggaaaattatttaattacggaattatcttcagtgtaaataaatgatttttgacatatagaataatttctatgagtattcaatggaagagcttagagatatatttttgatattattaaagtgtttcttgttgtatgctaaccaatcatatcagctttttacattaaattcaaaagtttacacatacctgcctattgccaggtcaaaggccagtaactgcttgctacaaacaaatccgcagagtgtcaattctgtgatggttccctccaagctgccagggatgacatacactgctgatgaacaatgccagatcctttttgggccattggcttctttttgtcaggagatgcaggtaaagatccaggtggggattttgtgcgttcattc

SEQ ID NO: 11888 - DNA, 508 bp, Homo sapiens
  MAP TO AC019223.2; EXPRESSED IN ADULT LIVER, SIGNAL = 0.61; EXPRESSED IN BRAIN, SIGNAL = 0.5; EXPRESSED IN PLACENTA, SIGNAL = 0.57; EXPRESSED IN FETAL LIVER, SIGNAL = 0.6; EXPRESSED IN BONE MARROW, SIGNAL = 0.58
ttcacagagaatatgggggcttctttggacaaattgagtggatgcagggtctatctgcctgacagctactgtttgggccacatcatgactgctgcatcctgctcctctacagaggtttcttctacaatatagtgtgtctggccctgtcatttgttacaggtatagaaacaacaaccgagaacctgaaactgctgggataagtgcctgccactgaatcctgtcccctcacaggcacatctacaaggtgcacctgtgctctggcccaggtggtggtggtgaggaggtggtgtctgatttccaagaagacggaccataggaacttccaggataatgttgccttggacaccacagtctgtgtgaacagcaggaccgaagttgtgagagttgccatgatggtgagggctgatagcaggacagtcacattagaaaggcagcatcctggccttccacgataggctgagtgacttggcctctgtctccccattggacctgccatcttattgccagt

SEQ ID NO: 11889 - DNA, 531 bp, Homo sapiens
  MAP TO AC010802.4; EXPRESSED IN ADULT LIVER, SIGNAL = 0.86; EXPRESSED IN PLACENTA, SIGNAL = 1.4; EXPRESSED IN BRAIN, SIGNAL = 0.91; EXPRESSED IN BONE MARROW, SIGNAL = 0.98; EXPRESSED IN FETAL LIVER, SIGNAL = 0.73
aacgtggacttccactcaccaaggctgacctggctacggccagtgctgagcacccaatttgccagcagcagcacagaccaacactgagccattgatatggcaccattcttcggggtgatcagccagctacttggtggcaggttgattatattagacctcatccatcatagaaagggcagcagtttgtcctcaccagaataaacgcttactctggatatgggtttccatatcctgcacgcagtgcttctgccaagactaccattcatggactcacagaatgccttatccaccgtcatggtattccacacagcattgcctctgaccaaggcacttactttacagctaaagaagtgcagcagtgggctcatgctcatggaattcactggtcttaccatgttccccatcatcctgaagcagctgtattgataaaacagtggaatggccttttaaagtcacaattacaatgccaactaggtgacaatactttgcaggcctggggcaaagttctccagaaagccgtttatgctctgc

SEQ ID NO: 11890 - DNA, 593 bp, Homo sapiens
  MAP TO AL138934.2; EXPRESSED IN PLACENTA, SIGNAL = 0.55; EXPRESSED IN FETAL LIVER, SIGNAL = 0.51; EXPRESSED IN BONE MARROW, SIGNAL = 0.52; EXPRESSED IN BRAIN, SIGNAL = 0.45
aaaggggaatctcagccttggattcttaccatttagttccgctggtggagaccattctacatgaagttctgtagaactgattttctgcatcttaggtggacttagtctttggggaggggcctgggctgtggtcactgtaatgggcaagctgtgtaaacagcccccgctagtacacgcctgtacagaaaaatcgtacttggcaaatggaaccagattccagatggtagctgaggtttcatgaccttcgtaggaaacacatggctgaccaccagccaaaggggcacaggacaaaatatatttctctatgggaccagattgatttgagagtgttgtccaggtaagtgtcacagagtctgagccaataggaatgatataacttaaagtcaagtttccctctgggacccctggttttgtcttgtaagtgacagctacactccttgttgaaccatgcacattggtggtctcaatgtaataggaatatttggtatatggtaacaggtctgtgtctaagaagtattgaaatacctgaaatgaaaagaaaaaaaaaaacaaagttacatttcacaagttggtgaagaatcattgctaactgc

SEQ ID NO: 11891 - DNA, 597 bp, Homo sapiens
  MAP TO AL139117.3; EXPRESSED IN ADULT LIVER, SIGNAL = 0.7; EXPRESSED IN PLACENTA, SIGNAL = 0.59; EXPRESSED IN FETAL LIVER, SIGNAL = 0.68; EXPRESSED IN BONE MARROW, SIGNAL = 0.74; EXPRESSED IN BRAIN, SIGNAL = 0.69
ttgtcacaaatgaaacaatttccttcttctagaaggcggaatagtttttcgctgtgtttatactgagcgcttcattttctgtatccattcgcctgctgatggacgcttggccgggttccatgtcttggttatggtggctaaagctgtcatgaacatgggagggcgggcatctcttcaacgtactgattccatttcctttagatacacacccagcagtgaaattgttgaaacacagggtagctctgatcattaacttctgaaaaacatctatagtatttttgtggtcattgtactcatttacattaccactagcggagggcagcggttctattttttctacattctcgctaacacttgttattctactctttttcatagtaaccatcctaacagatgtgaggttatagcttcttaaagtttatatgtatgtaagtatatgcctatatgtatatatgcaaatgtatgtattcatacataaacatccatacgtacatatgtgcagatacgtatgtacatatatatgcatgtgtattgtatgtatatatgtatacacaggtatacacatatatgtgtagaaagtgaaattttgcagtgaga

SEQ ID NO: 11892 - DNA, 558 bp, Homo sapiens
  MAP TO AC018909.3; EXPRESSED IN PLACENTA, SIGNAL = 0.53; EXPRESSED IN FETAL LIVER, SIGNAL = 0.47; EXPRESSED IN BONE MARROW, SIGNAL = 0.52; EXPRESSED IN ADULT LIVER, SIGNAL = 0.68; EXPRESSED IN BRAIN, SIGNAL = 0.58
atgcaaaatctggccttgaggcatctcatttccaaacaaccttcatttaatggcagaaggagaacagtctccaaatccaattaactatactctgcccattttacttttattcaaaaataataaaactattcctaggatatttatagagtaatagaaagtttcccttgttaatattagataaaagttaaacttaacaccattttaccaccttcgatagccttattacattttatttttactttgaagctcaaatttttaatattgcctataagcaaatggtttgcccctggttttttgtcctttttaaaaaaaatcccccacacactacttacttgtttaagcttctttaggtcttcatcaagttctaagttgtccaaaataacagcaacaaacaaactcaggaggatctataaaatggtgaaataacaatgaaaaaacccacatgccataagtatcaaaatattatatgtataatatagctacctaaaatatattgagtatataattcattaaatgcaaaataaacatgcagtgatgaatcattgcataggcatttca

SEQ ID NO: 11893 - DNA, 593 bp, Homo sapiens
  MAP TO AC023114.3; EXPRESSED IN LUNG, SIGNAL = 0.89; EXPRESSED IN PLACENTA, SIGNAL = 0.99; EXPRESSED IN ADULT LIVER, SIGNAL =   1; EXPRESSED IN FETAL LIVER, SIGNAL = 0.78; EXPRESSED IN BRAIN, SIGNAL = 0.92; EXPRESSED IN BONE MARROW, SIGNAL = 0.8
tgatgggttacaaactgagccacattggttgaattttctatattgtgtttacttccttctcctcctgatgtatttttatcttaattttgtttagtttgagtctgtggagttctaggttggcagttctagatatagtttcttcttttatcaggtaaaaatgatgctacacatttaaccagacgtgactgggccattttgaggataaaagtttcacgtctagtcagccaatgttaaaacagtgacaatcagccaatgttaggcaaacattacactctaacattagaagattccacaaaatgactcaaaatatgaaaagcacggtcaagggtccaacacctaagattatccaatctcaaactgcagcttcagtgggagaaaggagccgtctcacagaaatgcccactgcagtcgaaatccacattgttaccgtcatctttcagagcggtgggaacagaacagcacccacactgtagaaaccacagggtgtttttgagcctagactactgggcgaaaaaaaaaaaaaaaaaaaaaactgaaatttccctggtattctgagcctgagagcaggcccaggtatctcttcgccctacccc

SEQ ID NO: 11894 - DNA, 600 bp, Homo sapiens
  MAP TO AC013751.3; EXPRESSED IN BONE MARROW, SIGNAL = 0.53; EXPRESSED IN PLACENTA, SIGNAL = 0.69; EXPRESSED IN ADULT LIVER, SIGNAL =  12; EXPRESSED IN BRAIN, SIGNAL = 0.6
aagctgtctaaagccaggggcaagcgggaggctgggcctgcagacatccctcagcaggtgtcccagtcagggacacactcgctgccctgcgctttgcatccctctcagggtgaaggtgacagtggacccagacccttccctggtctaccgacctgaagtggaccaagaggctgccaaagacaaggctggcttccagagctacgtgtcgggtcccctcctggaccacgtctttaccaccgacaagctcatgaacatgcaccacacagtggatttcgtcaggagcaagcacgcctggtttggggacttttcctacaagaaaatgaaggtcatggaggccgtggacctgctgcatgggctggtggacgaatcagactcaggtgtagacttctcccactccttccaagccttccagatggcggagggcatccgaaagctcacccaggcaaggactggttccagcttgttgggcttctatgacctagggaaggtcttggccctgttgggggagccccagtgggtgatcgttggagacacattccccgttggatgctgtccccagacctccgtggttttgtaagtccacttttcaggacaatcccg

SEQ ID NO: 11895 - DNA, 509 bp, Homo sapiens
  MAP TO AL133352.10; EXPRESSED IN PLACENTA, SIGNAL = 0.71; EXPRESSED IN FETAL LIVER, SIGNAL = 0.49; EXPRESSED IN ADULT LIVER, SIGNAL = 0.73; EXPRESSED IN BRAIN, SIGNAL = 0.59; EXPRESSED IN BONE MARROW, SIGNAL = 0.6
agcttggcagaattgattggtatttatgatccaactatatgctgcctataagaaactcacttcaagtataactatataagcagactgaaagaaaaagggtggaaaaagatatatcatacaaatgtgaatcaaaataggaatggctacattaatatcagataaggtctaccttagagcaaagaaaattatctcagatggagagggacgtgatgtaattataacagtgtcaatccatcaagaagacataacaatcctaaatgtctatgcaccaagcaacagagttgcaaaatatgtgaagcaaaacctgatagaactgaaggaagaaacagacaaatacatagttgaggacttcaacacaccctcaacaattgatagaactaaatagatagaaaaccaaaataactcaacaataccatcaactattagggtctcattgacatttataaagcactccattcaacaacagcaaaatacacattttttccaagtgcccataggacatatgccaa

SEQ ID NO: 11896 - DNA, 560 bp, Homo sapiens
  MAP TO AP001426.1; EXPRESSED IN FETAL LIVER, SIGNAL = 0.67; EXPRESSED IN PLACENTA, SIGNAL = 0.79; EXPRESSED IN ADULT LIVER, SIGNAL = 0.87; EXPRESSED IN BONE MARROW, SIGNAL = 0.97; EXPRESSED IN BRAIN, SIGNAL = 0.88
tgacttcctgccacactctgtcttcgttgagctgtgatctatttgtcagtctcccccatctgcatccccctgattgacagcactgagtgagcccagctgtcctgctgctcatgcccctcagcacccatgagcctagtgggtgcccagtaaatccttagtgagtaaatgaatgagtcaatttccacacaccaaatcccaaagggataaaaagacattgcctttctgccatttcttggaagaattttttgagacaaactaaagaaaggaagctacttgttattaaatttttaaaaatctgcctactattttcaggcaaatatgtcatgatgacatctatgaaatctctgaaattaaagagaagcctgacgtttcacaggaattaaatgaagttgctgcatcacaggtgctccctgccacagggctccgtgtggcagcagcaaacagaactcctcgctgcttaggtgtagtccttaggaatgaaaatctgaacgtagtacgttaaaaaaaaaaatcttcaaaagcaaacaaagccctaagtgtcgctgtgtattatcagggca

SEQ ID NO: 11897 - DNA, 563 bp, Homo sapiens
  MAP TO AL139245.2; EXPRESSED IN ADULT LIVER, SIGNAL = 0.84; EXPRESSED IN BONE MARROW, SIGNAL = 0.62; EXPRESSED IN PLACENTA, SIGNAL = 0.75; EXPRESSED IN BRAIN, SIGNAL = 0.62; EXPRESSED IN FETAL LIVER, SIGNAL = 0.54
aaagctgcgccaacaatatccacatcctgagcttcacagagtacctagaatggccacaaagaaataacctcctctattgtaggtccagtgatgccgatctgtcctctcatttccatcagcttattgtgttgtgacatctgctcaggtgaactttctaggcaccaatgaagctgaagttactgagtgatatccaaaattcactctaaatgctatgatcaataacaaatttaggtctgaaaattacttaaccaacccttgaatgaatgcaagtcaatgacaagaattttccctcaaatttaatacgttaaagaagggttccttgttggtttttatttgcatctcttagtttattcagcatcaactctgagtgcattccaggctgggctcctgtacagtcatgtccagaaaggtctcattctgtggctttcatctttccttactccactcacataaagatgagatggcaaacacatctgtgactgtcaggcctgttttggcctccagaggtccgtgctgctggtggtcagcagccctgtggagaggcaaagccagggagaaagtga

SEQ ID NO: 11898 - DNA, 528 bp, Homo sapiens
  MAP TO AC011055.6; EXPRESSED IN PLACENTA, SIGNAL = 1.6; EXPRESSED IN BRAIN, SIGNAL = 0.5; EXPRESSED IN LUNG, SIGNAL =   1; EXPRESSED IN ADULT LIVER, SIGNAL = 0.8; EXPRESSED IN BONE MARROW, SIGNAL = 0.48; EXPRESSED IN FETAL LIVER, SIGNAL = 1.4
cactgtggtttcctgcacactgtgcttcacgtgtgcaaagctaacactcactcaggtgcttttctgggcgtcttagggggaccgactttcccaggtgtgggtgatgctcatctttggctggctgctccccctcgaccctggttttggggttgattccacatagaccctctctactggactccatgatttccaacttcccatgtgtctcttggcaggatttaacacagctctggcttgtgtaccagatgaagccctaccaccatatccttcgctatcaaaacctccatctgtggtgtggtctttgttttcatgtgctggctcagaacagctcaggccgctgcagcagaagccattatccctcccacatcgtcgcacatatccccatcctttgtgcttcttcccagggccaaaggccagtgcacagtatcttcctagccagtgagacaaggcaaaggtgtaagaaggttcccatgaagcctcccttctcttgacttagaggacaaaggaagaaaccgtggaaatgcactt

SEQ ID NO: 11899 - DNA, 574 bp, Homo sapiens
  MAP TO AC015496.3; EXPRESSED IN BONE MARROW, SIGNAL = 0.51; EXPRESSED IN ADULT LIVER, SIGNAL = 0.57; EXPRESSED IN PLACENTA, SIGNAL = 0.55; EXPRESSED IN BRAIN, SIGNAL = 0.5; EXPRESSED IN FETAL LIVER, SIGNAL = 0.57
tgcacaaggtaaccactctccactcttcacatccaagatgtatgagtctgacatatctttccccagctcagaggtcttttgtgatgccagatgccgataaggaacttgtgcctggtgttcacaggcagcacaacgcaacatgccctccgctgaactggctgcttccaccttaatctcttcccacaaaattccctttttagtgatcgtgaaatacacctgccatgcaccctgcagagaaacttgggtcattgtcccagaattttcatgattccccacccctgaatgctgtaaataagcataagtaaacagctgtgtcaacacaacctaggtaagttttcaaaaataaaaatgacaagctctcctcctctgtgttttaaataagactctcctaagatgagtacagcagagagcatttcttaatggtctcctgaagttttgatgcaattggtctaggaccatgtctgggaaccactgctataggcatctggcttgtcatttttaattaaaaaattaatacaagcccctgagtatttttcatgtacataatcatattacctgcaaataaagggctgtt

SEQ ID NO: 11900 - DNA, 500 bp, Homo sapiens
  MAP TO AC010492.4; EXPRESSED IN LUNG, SIGNAL = 1.2; EXPRESSED IN PLACENTA, SIGNAL = 1.3; EXPRESSED IN ADULT LIVER, SIGNAL = 1.4; EXPRESSED IN FETAL LIVER, SIGNAL = 1.6; EXPRESSED IN BRAIN, SIGNAL = 1.4; EXPRESSED IN BONE MARROW, SIGNAL = 1.6
actatttaggggccaaaggctgtgcttttcctatattcaaaatctgcaaactcccgacccgtggaacctcctctgaatccgccgcgaaatcctcaaggggtggtcaaggtaccacttctgccaccacgccctctgccaccatggaaaccaagacctccctctgcctctgtatcccccatggccacggtttggacaaagtgggattccaaatgtttcagcatttaatcttcttccttcagcccaggttggcctccgttctctattgtcatcaccagaaatattatcaaaggaggatttagtttggtcataaaagcaattaggtccaagtgcatcttcttcatcagcatgtccttcactgttttgggtatcaactcctgagtctcctttatcttcaccatttacaggcttctcctctttctcaagtttatcttcttttaatttaagtttattatgaaactctctgcccatctcttccttgttgaattgggcatttgcacttt

SEQ ID NO: 11901 - DNA, 500 bp, Homo sapiens
  MAP TO AC022045.2; EXPRESSED IN LUNG, SIGNAL =   2; EXPRESSED IN BRAIN, SIGNAL = 1.6; EXPRESSED IN PLACENTA, SIGNAL = 1.5; EXPRESSED IN FETAL LIVER, SIGNAL = 1.7; EXPRESSED IN ADULT LIVER, SIGNAL = 1.4; EXPRESSED IN BONE MARROW, SIGNAL = 1.3
gcaattgtcacacacatccctgtgaagagaccaccaaacaggctttgtgtgaacaataaagctttttaatcacctgggtgcaggtagactgagtctgaaaaaggaatcagcaaagagagagagataggggtggggcagttttacaggattttgggtaggtagtggaaaattacagttaaagggggttgttctcttgcgggtaggggcgggggtcaaaaggtgctcagtggggagctccggagacttattgtccaggagaaggaatgtcacaaggtaatgtcatcagttaaggcaggaaccggccattttcacttcttttgtggttcttcagttgcctcaggccatccggatgtatacctgcgggcttgagctcagaagccttacagtaatgttatgccagagtcagactggaaagtaagtcacgacatgtagggttacataaaacccaactgatgagtttcactcgagtccgtgtgaagagaccaccaaacaggctttgt

SEQ ID NO: 11902 - DNA, 591 bp, Homo sapiens
  MAP TO AC019099.3; EXPRESSED IN ADULT LIVER, SIGNAL = 1.1; EXPRESSED IN FETAL LIVER, SIGNAL = 1.2; EXPRESSED IN BRAIN, SIGNAL = 1.2; EXPRESSED IN BONE MARROW, SIGNAL =   1; EXPRESSED IN LUNG, SIGNAL = 1.3; EXPRESSED IN PLACENTA, SIGNAL = 1.2
ttgtaaaacctgaccctcggcatcctgctataaaagtcaagctgaaatgaaaactattgtaactttctaaaaaaaataaaaaagaaagaaaagaaacaacagtttattaattctttgtatattgtaaggattatcccacagttacaattataaactataatttactaaatttaaagtaattattattttttgttcaacataaactcccaaccaaaaaaaatttctttcactattgattctaaaatatattgatcccaactgaaagagacttctctttagttggcctttcctggttcaaattcttatcagataagtatattttgatggtcactttaagtttccattcatcttagactcagtttttaggttttgcctgggttttaataaacattgatgttgttttcttcattaaagcctgaagtcactcttcatgtaaggaatgatttaaaaatcatcttttccagattaaagagaaggaagaagcccagtcagagtaccgaggagcagtgacccagggccatggcgcttacctgatgagtcaggatgctccagtatggcttggtgtgcatgctgcgtgcatacaggagagga

SEQ ID NO: 11903 - DNA, 569 bp, Homo sapiens
  MAP TO AC020719.3; EXPRESSED IN PLACENTA, SIGNAL = 0.91; EXPRESSED IN FETAL LIVER, SIGNAL = 0.82; EXPRESSED IN BRAIN, SIGNAL = 0.78; EXPRESSED IN LUNG, SIGNAL = 0.91; EXPRESSED IN ADULT LIVER, SIGNAL = 0.8; EXPRESSED IN BONE MARROW, SIGNAL = 0.78
cttcccaatgcccactctacttgattattaatcttagattttaagtgctgggttaggttaaaagtcttgaaatttagcgcactagatttatttagtataatagatctttgttaacccagcattcattgtgtgacttcctgaagatgccagattgtttaggaaagcaaaaatcaccataacattaagtgtttactagtaatctgacaacttataaaaattagtccccactccaggagtgctcctggctgggtccatccccacataaagccaaggctttgttcattaatttttccccagatagtctgctgttggaaatgttgaacagtatagtgctacatgctgcaaattgatataagtcttgcaaaagatgcaggctttcacggtgccagtgaaagtgacgttggtggatctgctggaattgcaggcaaagccattccatatcctgccctggaggtgtctaaacagacagctgcagagagggactgcctagggccccaggtgtgatcacggagagcctgtgccagcaaggtgatggctgaggaggtggtggggaggggaaactcagaatt

SEQ ID NO: 11904 - DNA, 504 bp, Homo sapiens
  MAP TO AC011207.3; EXPRESSED IN LUNG, SIGNAL = 1.2; EXPRESSED IN ADULT LIVER, SIGNAL = 1.3; EXPRESSED IN BRAIN, SIGNAL = 1.6; EXPRESSED IN BONE MARROW, SIGNAL = 1.3; EXPRESSED IN PLACENTA, SIGNAL = 1.7; EXPRESSED IN FETAL LIVER, SIGNAL = 2.1
ggctgcatgtcatctttgtgtgttacatcaggtatttaactgagagaacatatgtaaaatgtccagtccagtagcagacactttgtaaggggctagttagtattagttattgtaaacactcaatgatgaccctatatatcgatttttatttactctttgcagtgatctttttctgactttagaaatccagcatcccctaccttcctctaaaacctacatacattagtttccttttgttggattatggccatgcttcctatattaacttcatatttttcttctctttctaccagggcaaacactgtatacttgatgtatcaggaaatgctatcaagcggttacaagttgcccagctctatcccattgccatcttcataaaacccaggtctctggaacctcttatgtgagtagagggcattggaggccttcatccaactgactccctgttctgtattatactgaaaattactaacaggattttgctgggaatgcttacaaatggga

SEQ ID NO: 11905 - DNA, 540 bp, Homo sapiens
  MAP TO AL161445.2; EXPRESSED IN FETAL LIVER, SIGNAL = 0.65; EXPRESSED IN BRAIN, SIGNAL = 0.72; EXPRESSED IN BONE MARROW, SIGNAL = 0.74
acaacagcccagagagaagctacttgttctatttcagacaatacatgatcctagcaaggcaggtgctctcctgtgagcataaatggatgctggctggggtttgacaataactatgacaataaatgcttataaagcacttagtatgtgtcaagctcaatctacattatttaattctcccaacaatcctaatagggaaatgtcaccattattccatttttacagatgaggaacttgagacaaagataaacttgttcacagtaagagaaagggtgaatccaggatctgaacccagggagtctgactgcagaacatgtccccataaccacaagttatatccaggaagctctgatagaaggcagaaagttaaggtccatgaagagagttacctgctggattccagtaagctctttattcaactcttccagctggtcagctatcttctccacagacttctccaaatgtttcaacttctttagttcaacctcttcctgtggactgttctaaaatgtttaagaagaaaataaagccaatagtcaaaaa

SEQ ID NO: 11906 - DNA, 512 bp, Homo sapiens
  MAP TO AL161724.2; EXPRESSED IN ADULT LIVER, SIGNAL = 1.1; EXPRESSED IN LUNG, SIGNAL = 1.1; EXPRESSED IN BRAIN, SIGNAL = 0.95; EXPRESSED IN BONE MARROW, SIGNAL = 0.89; EXPRESSED IN PLACENTA, SIGNAL =   1; EXPRESSED IN FETAL LIVER, SIGNAL =   1
ttattttgggggcagaagagtgtaaagcacttctgtccaatggcaatataatctgagctgcatttgtaacttttttctagtagaaagataaatgttttgattagcttcaattttttagatagaccaaaagctgatataattaatgtatacaacttggtaagtttgaaaatgagtatacacccatgaaatcatcactgtaatttatgtcataaatccatggatcacctccaaaactttctcctgccttcttatttatgatgatgacgatgatgatgatgatgttgatgatgatgatgatgatgacactgaatatgagatctactctcttaggaaaggtttaactgtacaatacagtataattaaccataggcactacgttgtacagtagatctctaggatttatctcgtatgacagaaactttgtatcctttacctaatacctacctacttctttcagtccccagctcttggcaaccactagttcactctccacttctatgagtttggctgtt

SEQ ID NO: 11907 - DNA, 547 bp, Homo sapiens
  MAP TO AC008572.6; EXPRESSED IN PLACENTA, SIGNAL = 0.47; EXPRESSED IN FETAL LIVER, SIGNAL = 0.53; EXPRESSED IN BONE MARROW, SIGNAL = 0.51; EXPRESSED IN ADULT LIVER, SIGNAL = 0.67; EXPRESSED IN BRAIN, SIGNAL = 0.46
gcttgatttagccgttccacaatgtatacatatcacaacgttatgttctatgccataaacacataaatacacacattttttatttgtcaattaaaaaataatctcttgttagattggaaacatattgctatcagatattacctgtttgttttaccattgtatccctagtgtctgaaatattggatgcctaataagtaataaatgaataacagaatgaaaagtaatttgatttatgattttcattacgttttagaggaagctcgtgaaagtgactgggatggtatcattgcttgccatcaaggtaagctatcttgctcaacctggaattatcagaaatctacaataggcgcttactttctcaagccaaaagagttgaagaaagatgacataactgcaacagtaagtgagcttgtttataagagtatcttctctttaaaactttcctatggaaatcttgttatactcaaggtttctcatcataatattgactgaaaaaacgtagtttaacattttaaagcattgcataacccaaagccacaaaaatttg

SEQ ID NO: 11908 - DNA, 598 bp, Homo sapiens
  MAP TO AC026213.2; EXPRESSED IN LUNG, SIGNAL = 0.84; EXPRESSED IN ADULT LIVER, SIGNAL =   1; EXPRESSED IN FETAL LIVER, SIGNAL = 0.91; EXPRESSED IN BRAIN, SIGNAL = 0.87; EXPRESSED IN PLACENTA, SIGNAL = 0.82; EXPRESSED IN BONE MARROW, SIGNAL = 0.83
cactgtcatgccaacctttgaatggtgtctttgctttgaccattttttgcatactcacaaaccaatcaccacacactccctattctgaacccataaaaagtcccatgctcagccatattggggaactttcctgtcttcaggcagaagaacagcccccttgcattccctctgtttgctgagagctttcctttcacttagtaaattctactccattcactctttgatgtctgcatgcctaattcttcctggtcatgacacaagaacccagacctagctgagctaaggagcaaaaatcctgcatcactagtatctgatacactcctcaaggaagctgaaaaataatttatttaaataactttccaaatggaagtcatcaggagcatccaggagaactctgcctatggtattcctcagaaggttctctaccatggcttagatggcattgagggccttggaaccttcataaaagccttatcccaggttgcttggctaaatgacacttcagttaacctgctgcttcccctcagaactgtcagagattttttcaaacaaagacccaaaaggaggtaagtagacttcccctcctttttaatgcaca

SEQ ID NO: 11909 - DNA, 551 bp, Homo sapiens
  MAP TO AC016282.3; EXPRESSED IN ADULT LIVER, SIGNAL = 0.61; EXPRESSED IN BONE MARROW, SIGNAL = 0.46; EXPRESSED IN PLACENTA, SIGNAL = 0.48; EXPRESSED IN FETAL LIVER, SIGNAL = 0.57; EXPRESSED IN BRAIN, SIGNAL = 0.46
tgaggtgtgcaggcagatagtgggctgaatttcagcccttacttgttctacacaatggtaggaggtggccgaagtatctgaaatcaggtaggcattcattaaatatttgtttaataaatgaacttcagggggttggttgtgtccattttcatcagtggagcacgctctccctggtctggatgcagcaaagagactcagcagtgaaccggtggtatgctggtaaatgggtaacaactggatcttcagaagaaacaacaacagcaacaacaacaaccctgatttgtggtttttgtccatttgtagtgtttgtggtataaataatcaattgaatactactaacatgatgttaattgatcacaaaattcctgaaactttaacaattgtctcttaagagctggtacaagccagttacaaccaatcaaactctaccccagtgttgaaccctgggcacctcagattctcagtcagagggaatgacaaatgctaaaattccttgcagcagaggcaaagattgtttatatactgtctgttggcatcttatcggtctgagg

SEQ ID NO: 11910 - DNA, 581 bp, Homo sapiens
  MAP TO AL157396.2; EXPRESSED IN ADULT LIVER, SIGNAL = 0.95; EXPRESSED IN LUNG, SIGNAL = 1.3; EXPRESSED IN PLACENTA, SIGNAL = 0.99; EXPRESSED IN FETAL LIVER, SIGNAL = 0.66; EXPRESSED IN BRAIN, SIGNAL = 0.77; EXPRESSED IN BONE MARROW, SIGNAL = 0.75
gccagcacagcctcttattcttgggcaagctgcctagcctctccatgcctcagtttgctcatatgaaaaatgggggcaaattaaccaaactatgttacaataattaaatgaggtaattattctaatgcacctaccgcagggtctggcacattataaggatgtgttaaaggttggttattgttgttgtcgtcattgtcattgtcatcatcatcatgaattacattgtttttcctttgctgggaattgaaccagggagagaaagcagggctggttcattttctcccaccagcatgagccagaggaggcgcttcccttggggacataagcaataaactccaatcaatggttaattcaggttctgcttgagtttaaaggcaggtatagaaatgtataaattcagcatacttaactttggtaataaaaattaagaaaaactctattttttaagagcaaagtaccagcccacatctctaaactaacttttctcttttataagaccattttaactgtttctgctaggtaatgatcatttaatcaagggcataaaaagataaataaattgtgggtactgccttcaagga

SEQ ID NO: 11911 - DNA, 546 bp, Homo sapiens
  MAP TO AC018389.3; EXPRESSED IN BONE MARROW, SIGNAL = 1.9; EXPRESSED IN LUNG, SIGNAL = 1.1; EXPRESSED IN PLACENTA, SIGNAL = 1.1; EXPRESSED IN ADULT LIVER, SIGNAL = 0.95; EXPRESSED IN FETAL LIVER, SIGNAL = 1.1; EXPRESSED IN BRAIN, SIGNAL = 0.92
caccttctctggctgggtagaggctcacagaatgagcaactgaagtaattaaagttttcttaaaggaaatcatacctcagtatgggcttctggacataattcaaagcgataatgggccctcattcacatctgacataactcaataagtaaataaggcacttggaataaaatggaaactacattcggtgtggagacctcaatcttccggacagatggaaagaatgaatctaacactgaaaacaatcattgccaaactgtgctgggaaacccagttaaagggaattcaggtactcggcattgcactgctccgggtaagggtaacccccaaagtgggattaagtctcgtctctacaaaattatatttgggagaccctttgctgctaatccatctcgggttactgaggcaccccttaacagggagttaactattaaaaactgtgttactcacttgggacaaactcttaaccttttgcataaatttaacaggagcattgtgaactctgaagaactgtgccacacattccagcccggtgatcaagtgctatt

SEQ ID NO: 11912 - DNA, 504 bp, Homo sapiens
  MAP TO AL162171.1; EXPRESSED IN ADULT LIVER, SIGNAL = 1.1; EXPRESSED IN BRAIN, SIGNAL = 0.84; EXPRESSED IN LUNG, SIGNAL = 1.2; EXPRESSED IN PLACENTA, SIGNAL = 1.3; EXPRESSED IN FETAL LIVER, SIGNAL = 1.1; EXPRESSED IN BONE MARROW, SIGNAL = 1.1
acttgctccctccacatcagagctacagtcaacatacgtggaaagatacagatcaaaggatgggtacctagaacatatcatatattaagagtttacctttctcaacgtttctaaggaagccgattatttttacatcagtagttcttgactgtgattcagtatcttcttcttgatcttcaaactgtctgttgcattcatatgttgttgaatattcattcattttaacctccaaagatgaaatttttgcttcattcttggacactctaacatttagatcaaaaagatttgcttccactgtcaaaatagctgctttcattcctttaatttcattgatatcagctgatattttccttaaaaggtgggaaatattgtctagctcattcagtgaacaagaggagcttgttatggaacctaagtccactggctccggtggaagaaaaattggtagaggtggtgatggaaactttgaagacattctcataaaggtgacaggaacctcaaaga

SEQ ID NO: 11913 - DNA, 547 bp, Homo sapiens
  MAP TO AC021383.3; EXPRESSED IN ADULT LIVER, SIGNAL = 0.66; EXPRESSED IN FETAL LIVER, SIGNAL = 0.72; EXPRESSED IN BRAIN, SIGNAL = 0.67; EXPRESSED IN BONE MARROW, SIGNAL = 0.76; EXPRESSED IN PLACENTA, SIGNAL = 0.64
atggctatccatgaagcaggaaacagggcctcaccagacacagtctttgccagtgcattgatcttgaacttcccagcctccagaactatgataaatacatttctgttgtttataaactactcaggctatagtattttgttgcagcagtctgaatggactaagacaactagtacaccatgcaggatttgctcagtgctggcaatgcaaagaagattaagacatttataaaattttgaactaaatccaggtttatctctttcaaaatattatctgcatcataaactgagatagaggtgaattttaaccttttaacagggcactcacagtcttttaacatctggacctgtggcagcttctctcctgttgcccccttcactcctgatctctgactgtcatctgacctgtgtggcccaggactccctaagcatgcgttcccattgcaactcttgtgccagaatatcctcctttccctgtttgaaaatgatcaacttatatttttacatctctgctcaaatattacatactttgaggggaaaatgcctgattc

SEQ ID NO: 11914 - DNA, 572 bp, Homo sapiens
  MAP TO AC009334.3; EXPRESSED IN PLACENTA, SIGNAL = 0.58; EXPRESSED IN ADULT LIVER, SIGNAL = 0.65; EXPRESSED IN FETAL LIVER, SIGNAL = 0.6; EXPRESSED IN BRAIN, SIGNAL = 0.69; EXPRESSED IN BONE MARROW, SIGNAL = 0.77
tgccattctttaccatgctgcaatgaaaaccaaataagatgaactaagtattttatcaataaaaatgttattaattttaacaggatgtttgtatagagctagatatttatatagtcattttgctttcatatcaactgcaaataaatggattagctttatacttaagtaaatatttattatttattttttcatcatttagttttttaaaatggttattaatattcttagtctcttttattttaccttagaacttgtctgtggaaagtatattatttgaaatgagggaccatctttcccagtcaaaggtgattgaaacacaactagcaaagcctttatttgatgccctgcttcgagttgccctcgggaattattcagcagattttgaacataatgatgctatgactgagaaggtatgaataacaacatatagttgtgttctttgggtatgaccagcagaggcggaagtgtgggatgacactaggacgctgatgaatgtcattagagcatatggactaggacttggtcagatgagttcagtggatcttatctcctcgtgatggatatgtgatggg

SEQ ID NO: 11915 - DNA, 587 bp, Homo sapiens
  MAP TO AL118505.13; EXPRESSED IN ADULT LIVER, SIGNAL = 0.77; EXPRESSED IN FETAL LIVER, SIGNAL = 0.77; EXPRESSED IN BRAIN, SIGNAL = 0.74; EXPRESSED IN PLACENTA, SIGNAL = 0.56; EXPRESSED IN BONE MARROW, SIGNAL = 0.74
tctagagtcactccacgggcagatgtttgtttcttttatctgttcaggttttggctccattattcagctataccctggaggaggacctgttcgggcagcaacagcatgttttggatttcccaaatcttttctcagtggtctttatgaattccctctcaacaaagtggacagtcttctacatggaacattttctgccaagatgttatcttcagagccaaaagacagtgctttggttgaagaaagtaatggcacactggaggaaaaacaggcttctgaacaagagaatgaagacagcatggcagaggccccagagagcaaccacccagaagaccaggaaacaatggaaacaatttctcaagatccagaacataaggggcctaaagagagaggaagcaaaaaagattatgtaaggatgccaagagtccccaccacccccataatctcagtccctcagttaacttcagttaagtcatgagatttagtttggctttggtgtattagctcccaagatgataactatcaaaacagagaacgagtgtgtgtacatgtatacaaacgtgtgattcggtcttcgggatggagcttta

SEQ ID NO: 11916 - DNA, 570 bp, Homo sapiens
  MAP TO AC022843.3; EXPRESSED IN ADULT LIVER, SIGNAL = 1.1; EXPRESSED IN BONE MARROW, SIGNAL = 0.8; EXPRESSED IN PLACENTA, SIGNAL = 0.73; EXPRESSED IN FETAL LIVER, SIGNAL = 0.99; EXPRESSED IN BRAIN, SIGNAL =   1
cattccatgtgccaacattcccctgcagattaggagtgccctgttcctgttctcatggctttctcttccaaggctgcacatttgtcatggggaaaaggctaaacagagctggtgttggtttattcatcagtcacatcaatgttgttgctaccagcttaaatattcacagcctttccccacacagaaccatctgctggtgctctccaacaatattaacattaaaagggaagccttgacaagaagtccagtaagtggctactgatatcggttccacaacttaatgacgttgaggctggcacgagggcaattctcaaggcctttccttcatgatcactagatgactgctgcaactccagccatcatgttttctctgggttctatgggtcaggatttcagagaggcacaatgcagatggcttctctttgctccacaatgtctgaagactagctggacagatctaaagagctggaagtgacttgaatggctgaggtctaggaacatttagtggattctcatgcacatgtttggcacctgggctaggatatctcaaggacttgcttctccatgtgg

SEQ ID NO: 11917 - DNA, 600 bp, Homo sapiens
  MAP TO AL122007.7; EXPRESSED IN PLACENTA, SIGNAL = 0.58; EXPRESSED IN FETAL LIVER, SIGNAL = 0.54; EXPRESSED IN BRAIN, SIGNAL = 0.48; EXPRESSED IN BONE MARROW, SIGNAL = 0.54; EXPRESSED IN ADULT LIVER, SIGNAL = 0.7
tgggaccaaaaacctactggcgttctaaagcactccatgcgctgccataggacccagccaaaaccgtctgtggttacatgtacatcaagttcaaatgggcacccctgatcaattacttgtaaggcctgtgtttgctgaatggcccacttggcggccagaaggtctgttccagcttcattatcccaatcccaggtagcccctttttttgataacccatacaatggttttatcatttgagccaaatggggcacaaatggccgccaatactccaagaggcctacaaaagtctgcagctgcttcatcgtggtgggtcgggggtatgcctggattttctcaatgatggcctctggtatggcctttgtcttactcaaccaaataactcctaagaatttcgcagataatccaggccattggaccttggatttgttgatggcccaaccacatgctgccaaatgttgccacaagaggggcactgccacttttaaatctgcaagagaatcagaggttaacataatatcatcaatgtaatgaaacaggaggaccccttttggacatttccaggcagctaattccatggcaacaagaccacgacaaatggtg

SEQ ID NO: 11918 - DNA, 542 bp, Homo sapiens
  MAP TO AC011255.3; EXPRESSED IN PLACENTA, SIGNAL = 0.51; EXPRESSED IN ADULT LIVER, SIGNAL = 0.67; EXPRESSED IN FETAL LIVER, SIGNAL = 0.67; EXPRESSED IN BRAIN, SIGNAL = 0.62; EXPRESSED IN BONE MARROW, SIGNAL = 0.69
ccacctgatcctaaagcctgaaacttacatttgtcttatctgagttctttcctcaggaaaccactctcaggtcttccagatcatatcaaggaactgaaactcaccagatcactgcatccagacaatgagatgccaacctttcatttatcgtgattcctgattaccagctcctctattaccccacccttcatccctgttttctctgccatatagatgcctaattttagttggtcagaaagaagaatttgagactgatctcctattctctgctgcagcacttgaacaaagacttcttccattggaaaactcatcatcttagtgattgtctttctatgcagcaagtggcaggacccagactgaaccctggtgttttggtaaaagaagcaacacaactttgctgagagaaatgaaagaaaattccctctccccagtggagagatatagtgtattccttggctggaaaatttaacattgttaagattttaatttactcaaaatttatatataaattccatgcaaacccaatcaaaacccctgcaaat

SEQ ID NO: 11919 - DNA, 551 bp, Homo sapiens
  MAP TO AC022470.3; EXPRESSED IN PLACENTA, SIGNAL = 0.85; EXPRESSED IN ADULT LIVER, SIGNAL = 0.83; EXPRESSED IN BONE MARROW, SIGNAL = 0.92; EXPRESSED IN BRAIN, SIGNAL = 1.4; EXPRESSED IN FETAL LIVER, SIGNAL = 0.83
tacagttgccactcccttcccgtaattcctaagcccctggatcagaacaccatcctctggggatggcaggaccacgagagcattcagacttctcagactttctgattaacccttgcccagggtccactgaggtgaggtccttcagtcacccatctagaagggatgcccaggctctcaccgattgccactgacatgttggctgaatcggggagtgtaactttccccctgctcatcctcatcttcctcagggggaaagccatattggggctcgaagtatggattgtcatagattcgccggcgcactgacccctctccaatttctgcctgacgtctgtccacgttcgatttgccaatgctgggaggcacggaagggaggggcttggagacgcctactgctgccttatcatccatctccgtagagtcagcaggttcctaaaggccgcatgaaattaaaagtggttacctggtgcccaatggtaccttcctgtaatcccagtttggcagggctggaccaggcctgtcagatttctagcctaaggaatgtgtgggaa

SEQ ID NO: 11920 - DNA, 556 bp, Homo sapiens
  MAP TO AL160281.2; EXPRESSED IN BRAIN, SIGNAL = 0.82; EXPRESSED IN BONE MARROW, SIGNAL = 0.89; EXPRESSED IN PLACENTA, SIGNAL = 0.8; EXPRESSED IN FETAL LIVER, SIGNAL = 0.68
acccataacaggctcctcacaacttcacaggatggttgtccttacccactgagagcaggtggctgtagttctccaacattacatcctggtacaggcgtctttgagtagagtccagttgctgccactcctctctactgaagtccacagtcacatcctcaaatgacactgatacctgtaacaacacaatcttgttcaaggcaacatgatcagcactggaggatggagagaaaacagataggaagctctttttgatactttttcatcataatatacgatatggtatgcccattaaatacttagtttatatatatacacatatgtaatattgtgtagaatataaaaatctaatcataaatttctgctatttattatgtatgacatttactcttccatttattaaaaattataatttttagtaaggatttgaccttgatcctattttgttgctcatttttatgagaaatttgtgccctataacttgtagaaggaagcacatatatcccttccatcccaatttttaaaaatttcacatagctccctctcctgttgctttcat

SEQ ID NO: 11921 - DNA, 563 bp, Homo sapiens
  MAP TO AL161627.2; EXPRESSED IN PLACENTA, SIGNAL = 0.64; EXPRESSED IN FETAL LIVER, SIGNAL = 0.53; EXPRESSED IN BRAIN, SIGNAL = 0.73; EXPRESSED IN ADULT LIVER, SIGNAL = 0.69; EXPRESSED IN BONE MARROW, SIGNAL = 0.62
cctatacttgacatcccgcagatgagaccaaagccacattatgtcatgataaagaaagatgctgaaaccaatgaagcaatctattgtacaaaggagcctttcattaaggctcgtgttattgtcattcgttggctggtttctttctggctggagccaaaaccacatacaggacctcatattcctgggatggaaggtgaagtcttgccaaagaatattcagagagcagctgctagtttagtatccagagaagaaagcaaaaatgataatgctgataaagcagacagaactacagaacccgaacagtctcattccaatacaagcactctcacggagcgagaacctagctcatctagtctctgtagtattgatgaagaacatctcacagacattgaaatagttcgcagagttttttcttctaaaaggagtaatgtaaactttgtgacagagatatttcgtcaggcatttttattaccaatttgtgaagcagcagctatgagaaaagtggtaaaagtatatcaagaatggatccaacaagaggaaaaacctttgttcatgcaagagcc

SEQ ID NO: 11922 - DNA, 509 bp, Homo sapiens
  MAP TO AL121910.19; EXPRESSED IN PLACENTA, SIGNAL = 0.53; EXPRESSED IN ADULT LIVER, SIGNAL = 0.75; EXPRESSED IN BRAIN, SIGNAL = 0.51; EXPRESSED IN BONE MARROW, SIGNAL = 0.51; EXPRESSED IN FETAL LIVER, SIGNAL = 0.55
cttttcttcccacctcatgcatttttcttctcaagcattcacactttgcctcagctgaagagttatttgattaatttgccgtttggtttattttccttgtgacaccatcttgccctgcagtgtcgctgggcaccctggcctcacccctggctctgagcccatgggtttggattctatcgctggtctaggcagctgactccgctcacacttctgattctcccatcgatggtgccacctgctctgctctggaagcttctggttccttgtctgccagcagagacattcacacctgcaccacaggtgcacccacatgaagaggaggctgctcatccactctctgtgccccctactttccttgttaccaaaccctcagaatcatttcatcaccatccaaattaatgttaatagcacctatcatttcttggcattaacacattaccctaacagtacacgaaagacgttacatgtgctctctggggcaagcagagtcctaagatggaccccagtga

SEQ ID NO: 11923 - DNA, 567 bp, Homo sapiens
  MAP TO AC016471.4; EXPRESSED IN FETAL LIVER, SIGNAL = 0.51; EXPRESSED IN BRAIN, SIGNAL = 0.53; EXPRESSED IN ADULT LIVER, SIGNAL = 0.63; EXPRESSED IN BONE MARROW, SIGNAL = 0.52
aatgggactccaaactgtgccagatagtagtgggttcagggttgtatctcccactcaccctatctcaacttaatgtggaaatttaaataaatctcatgcaaaaatcctccaggcaaaagttgtcttaaatactcagctttcatctatgagttattacattcacttgggtttattttttaatttttattttagtttataacatttctgtgaagaataacatgcatacagaaaggagagaaaatgctaaatacatagctcaaagaattgttacaaaacgaaaaaacatataccagtatatccaatacctgcgtcaagaaataaatcaatattggcataagcagaacttgctctatgtcacttcccagaccacagcattcctcaaaaataatgactatcctagttcttaataccacgtgtttgatttgtctgcttatccgctttatgtacgtggagtcaatagttaatactcatttgtttctgcttttgtcattcaccatcatgttggtcttacttatttttgacttctatgaataggtttgtaaattgccaggacatggatgcagtttg

SEQ ID NO: 11924 - DNA, 502 bp, Homo sapiens
  MAP TO AC024575.1; EXPRESSED IN LUNG, SIGNAL = 1.1; EXPRESSED IN BONE MARROW, SIGNAL = 1.1; EXPRESSED IN PLACENTA, SIGNAL = 0.86; EXPRESSED IN ADULT LIVER, SIGNAL =   1; EXPRESSED IN FETAL LIVER, SIGNAL = 0.97; EXPRESSED IN BRAIN, SIGNAL = 1.6
aaccccttccactatcccacccctaggggtctactccttcggcctcttcaccacgaccatcttcgccaacgcggggcaggtggtgaccggcaatcccacgccacacttcctgtccgtgtgccgccccaactacacggccctgggctgcctgccaccttctccggatcggccaggtcccgaccgctttgtcactgaccagggtgcctgcgctggcagtcccagcctcgtggccgccgcgcgccgcgccttcccctgcaaggatgcggccctctgcgcctacgcggtcacctacacagcggtgagcttcgggagcttcggggtcggaaatgggtgtgcaggctggacagcgaccagcagctaggaagccgccagggttggagcctctgctcttccacgccccgggtgctgttggaagctctcgctccacgccccgacctgttggaagctctccctcctcctcccagatcctagccacgcccccagtcagaggctatcgctgtcc

SEQ ID NO: 11925 - DNA, 556 bp, Homo sapiens
  MAP TO AL139423.2; EXPRESSED IN PLACENTA, SIGNAL = 0.7; EXPRESSED IN ADULT LIVER, SIGNAL = 0.75; EXPRESSED IN FETAL LIVER, SIGNAL = 0.71; EXPRESSED IN BONE MARROW, SIGNAL = 0.57; EXPRESSED IN BRAIN, SIGNAL = 0.77
acattccttgggaaaaacccaagagctttctgctgctcccagtttctcctggtttgctaagtctgggagatacagaacactgccctttggccagagtcctgaatcccaatcaaggttaagcaggagtttgagcgggtgacttactgtatggctgagatatgaggtgagggggctggacaggaaccacctgtgtggctgggcccaaggacgaaggctcatcggcagcagtgcccgactgctggaaggccatatcaatctcttcatctgtcagccctggggagaagaggacatcattgcaggtgagtaccttttgtcagtgtccatagctgcaacagaatcttcactgagcaaagacctttacagccacagaatgcctcgcatcctagtaagttgcctccccgatttcagattctccggaacctctctcagttgcaatttaaccttaagcgacagaatattagcctcaacactgcttccaaatgtggctcattcaatttccttaatttatccttgagtttattgctgcttttgaagtcgctcggtactgcaattctcc

SEQ ID NO: 11926 - DNA, 579 bp, Homo sapiens
  MAP TO AC013657.3; EXPRESSED IN PLACENTA, SIGNAL = 1.1; EXPRESSED IN ADULT LIVER, SIGNAL = 1.3; EXPRESSED IN BRAIN, SIGNAL = 1.1; EXPRESSED IN BONE MARROW, SIGNAL = 1.2; EXPRESSED IN LUNG, SIGNAL = 1.1; EXPRESSED IN FETAL LIVER, SIGNAL = 1.3
ggcagctttcttccagacacacctagatttgggggatccaaatatcttcatgcaatagacaaaccacacatttcatactcccctcccagaatcgtgggttgacagagtgattacagagagaagggagcatgaggttgccacgtccctcctccctcacacccatgtgctcctcccgagatgcggtccaccccatctcatccgattctggtttagattatcacagggatgggagttccctcgaaaaggccatttgcagcctatttagatgtcacttaagaaacttcttcctaggattccaacggcatgtccctttgttccgtgtcgtcacgttgtccccgctggcgtggcggttcctcccttcctggctcttccctgccctccttgtgcagtaagcacgtgggcatcacttcaaagcaaaaggagcccttgtccatcactgttgaggtgaggaggaccatcaccaaagccccaggacagggtaactgtggaaggcaggggctcagcattagcaaggctgaccttagggacagcctgatggcaggtagctgcctctgggcgagcatgagctgccttaagagg

SEQ ID NO: 11927 - DNA, 577 bp, Homo sapiens
  MAP TO AC016498.4; EXPRESSED IN LUNG, SIGNAL = 1.2; EXPRESSED IN PLACENTA, SIGNAL = 1.1; EXPRESSED IN ADULT LIVER, SIGNAL = 1.3; EXPRESSED IN FETAL LIVER, SIGNAL = 1.2; EXPRESSED IN BRAIN, SIGNAL = 1.4; EXPRESSED IN BONE MARROW, SIGNAL = 1.3
aggcctttccctcttagcaccttcacgtctcacctggctgcgtggcgtttgcacctgagcacgcgggtagaactcggtctgtgtctgtgcagattatgccgacaagcccctggagaagcctctaaagctagtcctgaaggtcggaggaagtgaagtgactgaactctcaggatccggccacgactccagttactatgatgacaggtcagaccatgagcgagagaggcacaaagaaaagaaaaagaagaagaagaagaagtccgagaaggagaagcatctggacgatgaggaaagaaggaagcgaaaggtaaaggagcagcggcggtggcccggacgctgcccacgaggagcccgtggggagcctggtcccaggacccaggcagagtgcgcctgcgtggctggaggaggggagggggtgttccgttggtagcaaaacgcgaaccgctgaggcccgcagactcagttccaggatcctgggtgtgctgttcctcagcagaccctgccagggtctctgtgaggagggagcctggcatgaggaggatctcggagggggtttcccttagttctgtccctcccc

SEQ ID NO: 11928 - DNA, 572 bp, Homo sapiens
  MAP TO AL161724.2; EXPRESSED IN PLACENTA, SIGNAL = 0.62; EXPRESSED IN FETAL LIVER, SIGNAL = 0.55; EXPRESSED IN BRAIN, SIGNAL = 0.52; EXPRESSED IN BONE MARROW, SIGNAL = 0.47
tttgggcagtcacaagaaagaactgacaatcttgaaaatagaacaatagaaattactgagtatgagaaacagaagaaaaaaattttgaagagtgaagagtataagacacttgtgggattcgatcaagcccaccaacatatacattgtggaagtcccagaaggagaaaaatgagaaagggtagagagaacatgagaaatagtgcctgaaacttgaaaacaccaaatttgatgaaagacatgaatataaacatacaagaaacacaataaacttaagatgaatgcaaagagccccacactgacacacattataatcaaacttgagatagctggagacaaagaaggaatattgaaagcagcaagtgaaattatttatcacatacaagggattctcaatgaaattatcagcagatttgtcatcagaaactttggaagcccgaaggcaatgagccaatatagacacattgctaaaaataaataaataaataaataaaatatctgtcaactaagaattctacatctagcaaaaattgtccttcaaaaagcaaagcattcccagatcaacaaaagctgag

SEQ ID NO: 11929 - DNA, 530 bp, Homo sapiens
  MAP TO AC024259.5; EXPRESSED IN PLACENTA, SIGNAL = 0.66; EXPRESSED IN FETAL LIVER, SIGNAL = 0.66; EXPRESSED IN BONE MARROW, SIGNAL = 0.65; EXPRESSED IN ADULT LIVER, SIGNAL = 0.65; EXPRESSED IN BRAIN, SIGNAL = 0.62
gccaagctttcaatgaggtctctagaagaaacaacagacgttttggagacctctctgggtgtagctctctcctttttggtataatgcttgacaaattccaaagttcagcaccctcaaacttctatttctatttccccagcttctcaagagagctgttttccacttggccttcacacccttgttctgcagccagaaaatgctgtaggatgaaacctcagacatgtttccgttctctcaaaaatctaagacctgtgctaactattgtagaaagcctgaaaaatgtcatctttcatatctgttcagtgctatcattgtttacaacaataaggtaaacccagcacaattatcccgctgtatctagaagtgaagctaataataataattcaatattgatttatacaatgaaaatgtgataaatttctcttacagttaatagtgagatttggagtatgtcgtagaaaaattgtgtggttacctaccacgtttaaacttgctagacaatctgtcaatgaacagataatcaaattttg

SEQ ID NO: 11930 - DNA, 599 bp, Homo sapiens
  MAP TO AC018993.3; EXPRESSED IN ADULT LIVER, SIGNAL = 0.78; EXPRESSED IN BONE MARROW, SIGNAL = 0.51; EXPRESSED IN PLACENTA, SIGNAL = 0.56; EXPRESSED IN FETAL LIVER, SIGNAL = 0.54; EXPRESSED IN BRAIN, SIGNAL = 0.55
ggccatttacagctgaggactaggacttttttttaatcgttctgatacacaaataaatatgctctgacattattccacggatgagttttactttttttgtttacttgaatgagaataatggataagaaaaacattttcaataaggttaatttatcaatatatctacttccctattgtcttcagtccatagttctagtaatgagcgcaccacaaaattgataattccatcagattatcatggaaaacgagcattgttgtatgaacgtttttgtgactactgcaaaggtcaggaacaggtctgctttgaaaacttcagataaagatagtttttaaaaagttccttaacacacagtcctaggagtacgctattaatttttcaacttaaaaaactaaggtttccatatcttttttggtagcttcaagggaaaggaaaaaaaaaatgccttcacattcctaattattttgaaatatttttcattggttactacttcttaaaaattcattatccttttttttttttttacttttagattttatcaaaaccatatagctatttcctctctgattgacaaataaagccactatcggtttggcacaaa

SEQ ID NO: 11931 - DNA, 557 bp, Homo sapiens
  MAP TO AC007957.34; EXPRESSED IN LUNG, SIGNAL = 1.1; EXPRESSED IN PLACENTA, SIGNAL = 0.84; EXPRESSED IN ADULT LIVER, SIGNAL = 0.9; EXPRESSED IN FETAL LIVER, SIGNAL = 0.87; EXPRESSED IN BONE MARROW, SIGNAL = 0.92; EXPRESSED IN BRAIN, SIGNAL = 1.1
tagtgaccagggagacgaccacatccatgtagggcctggggagagacaggagggagcggtgggctgaggccagcataggtggtggccctgcctgtagtcctgtggactggctgatgccaacagcctcaggtgtgggctcctgccacccacctcgcctgccacatcttgcacatccccgaggcaactttcgatctgctgcactcggtcacccgtactgcccaggcaagggctgcccatacgcactctggacaggctgagtgtcctgccctgtcccccacataaggctgccggccatggcttctgcacctgggtgggatgcagacacgctgacctgcctttctctgcggggcagtggggatgaacccaggttggactgtggccttggccaagtgacctgtatatgaaactgggacaaagcccatctttggcacgtagcctgtggggtggcaggtgctcaggctttggtgacagggtggatgggatgcccagaaagggagagcccatggctgaaggcgtgggcaggattgtggggaaggtggttggaattagatgcccag

SEQ ID NO: 11932 - DNA, 520 bp, Homo sapiens
  MAP TO AC009943.4; EXPRESSED IN ADULT LIVER, SIGNAL = 0.75; EXPRESSED IN BRAIN, SIGNAL = 0.71; EXPRESSED IN BONE MARROW, SIGNAL = 0.76; EXPRESSED IN PLACENTA, SIGNAL = 0.63; EXPRESSED IN FETAL LIVER, SIGNAL = 0.77
tgtggtcatgaaaatggcacatttcgtattttaacggagagtgttccatgctgtgaagatgggctaacgtgctcaagaaaaattatagttgcttttcaggtacagtactattttctttattttttcctctcacattgtgagaagccaaataaaactgttattgtaaatctgtctgaatttacaggatcagaatattgtcttgcaagacggtaaagtaacagcagtcaaatctacagaaagtaagaaatgtgaactcaatgcaaatgcatactccatacatactgttggcctgtacttaattctgaaatttcaaaatggaataatcgtgatttgggacaaaaatacaagactgtctgttattctggatccaaactggaatgtatgtatatcgctaacaagtgaataatggggaagcaaaatcatttctgttactaaaattaaagacgggtattcatagacagagtgtaggagaatggcagggtctctgttagagtaacaagccctccacctttcttcaacc

SEQ ID NO: 11933 - DNA, 549 bp, Homo sapiens
  MAP TO AC016205.4; EXPRESSED IN ADULT LIVER, SIGNAL = 0.94; EXPRESSED IN FETAL LIVER, SIGNAL = 0.78; EXPRESSED IN BRAIN, SIGNAL = 0.82; EXPRESSED IN BONE MARROW, SIGNAL = 0.91; EXPRESSED IN LUNG, SIGNAL = 0.87; EXPRESSED IN PLACENTA, SIGNAL = 0.99
ctcagggagaaagcatccagtctttcactttgagtatgatgtaagtcctgtgttcttcatagatactctttaccagtttgaggatgtttccttccatttctagtttgttgtgtgtttttatcacaaaagggcattggttttgccaaatgcttttcctgcatataataagatcatatggttttatgatgctttttaatattctactgatttggtatattacattattcttttttatgttgatccaactgtgtattatgggagaaaaaaatctcacttagatgtggtgtataattctttttatttgttgctggcatcagtttgctagtattttgtgagaatttttgagcccatattcataaatgatacctggatgtcatttttgtttttgtgtgctatcttgtttggtttggtattaaactgacctcacagaaagaactgcaaagtgttccatcctcttgtaatttttgaaaaagtttgtgaagaattactattaattctttttaaatgttgtataaaattagtctgcgaaggcatctgggtctgaacttt

SEQ ID NO: 11934 - DNA, 557 bp, Homo sapiens
  MAP TO AC006038.2; EXPRESSED IN LUNG, SIGNAL = 1.2; EXPRESSED IN PLACENTA, SIGNAL = 0.93; EXPRESSED IN ADULT LIVER, SIGNAL = 0.53; EXPRESSED IN FETAL LIVER, SIGNAL = 1.4; EXPRESSED IN BRAIN, SIGNAL = 0.67; EXPRESSED IN BONE MARROW, SIGNAL = 0.95
tgaagccagggtgttaggacgagggcgaagggtcttgctggtcctccagaagggtggctttggcctgctccttgcttatctcgttgcatggctcttcataaagaggctcaccaaggtctccgctgccctcttcactctcctcctcgctgtggtcttcacttggctccacagtttgttccaggctgttctccagaagtgtgggagaactgcttattctactttcctcttcagctgtctcatttaagggctgagaaggaggcggtgtgggagtattagattggatgacactttcagtggaagagacgggggctttggttagagtagtatccgctacagtctcattctgaggcaaagataacttttccacaagtttccactgaatgatgctcatgtcttttccaccagttgatatcaggtgactgtcattgtgagtaaaactgacattggtgacatggctgctgtgggcactgtacttgtgactgggagcctatatgaaataaatcagacagacaggaaaattaaactcattcttgacatgcctgtttcagaaatggagg

SEQ ID NO: 11935 - DNA, 525 bp, Homo sapiens
  MAP TO AC022813.3; EXPRESSED IN LUNG, SIGNAL = 0.93; EXPRESSED IN ADULT LIVER, SIGNAL =   1; EXPRESSED IN BRAIN, SIGNAL = 1.1; EXPRESSED IN PLACENTA, SIGNAL = 1.2; EXPRESSED IN FETAL LIVER, SIGNAL = 0.99; EXPRESSED IN BONE MARROW, SIGNAL = 0.77
atggtgggtgctttatggacatcttatttaatcccaacagagttccatgtggtagctgtttgtatcaccattttacagatgaaggacttcagccacagaaaagtcaagcacttccccggggcctcacagcttgaagacaaagaactgggattcaaactcatgtttagacagttgcttgcatttgccaacttttaccagccaactttgctctctgtataattctagatgtttcgaattcaagtttatttatacataaatgcgttatttctaaagactagacacttgtgaaactgaattacaatttcctattgaatcccttcatggagtttcttaaatataaatccacctcaatcttatgtttcattgtacatatttaactatataaacagtgtacacatgttgattatgtctataaagtcactctacaggtttgattctatgacagatcaacatttatcattctggttagtggtgcccattatatactataaaggaattcacatttccgctgtcacacaccaatat

SEQ ID NO: 11936 - DNA, 523 bp, Homo sapiens
  MAP TO AL138956.3; EXPRESSED IN ADULT LIVER, SIGNAL = 0.88; EXPRESSED IN BONE MARROW, SIGNAL = 1.2; EXPRESSED IN LUNG, SIGNAL = 1.2; EXPRESSED IN BRAIN, SIGNAL = 1.1; EXPRESSED IN PLACENTA, SIGNAL = 1.1; EXPRESSED IN FETAL LIVER, SIGNAL = 1.1
tttcaaagatgatggggagcccctgaccccataaatctagactgtcagccaatggctgttatgtttctaagggtacatcaaaagtttttgcccatctgatcagataaaagaatcctcatgaagtggcttattcccctgcagtgcagaaggccccttggtaccagctcacagaaatcctgcaggaggctgtagcttcagcttctctagctctgtctgttgggcttactgcagctggctccaatgccagtactggagagacaccacgtgtggagtcttcctgctcaacccccctcttgcctgccattaggagatgagagtccacatcctcattgaaagagacaggcaagtcaaatctctcacacacagtcgagcgtgcacccactttaggcctctgtcaaagagtaaacgcagctgtcttttctccatggagaaagcagcctgcctgctctgctctcttactaatcaggatgttgcctgaggatgcttttcaccaggactggagagaaagcactgagaagctggg

SEQ ID NO: 11937 - DNA, 541 bp, Homo sapiens
  MAP TO AC007956.5; EXPRESSED IN PLACENTA, SIGNAL = 0.76; EXPRESSED IN FETAL LIVER, SIGNAL = 1.2; EXPRESSED IN LUNG, SIGNAL = 1.1; EXPRESSED IN BONE MARROW, SIGNAL = 1.2; EXPRESSED IN ADULT LIVER, SIGNAL = 1.3; EXPRESSED IN BRAIN, SIGNAL = 1.3
ttaggtcagatgggcagacctggaagagaagaaggatgcagataggaaaagggccataggttttgtggtcggacagactgattgggagaagatcacagatgaaagtggtcacctggctgaaaaagccctcaatcgaaccaaatatatatgagacttagtttttgaacggagtcattattcctctaaggtaagagtacacagtcatataaatagcctactgtgtggttgcttcaaagggtttgagataaagaagacagcatattttgctaaaaatgctctcttcttgtgttattttatagttctgaaagagtaagtatgtactagttgttaacatttacaatactattagaaaaggaagccattttctgcaagctggctcacttataaaaataaaaaccttgagaaaaacttgaattctatagatttgggaaggactgaaatgatgttatactaagggctactgaactttttgcctgttctttccaggtgtgacagccttttcttttctttccaggtggttcgctttgaggtggtctgaagc

SEQ ID NO: 11938 - DNA, 516 bp, Homo sapiens
  MAP TO AC009079.4; EXPRESSED IN BONE MARROW, SIGNAL = 1.2; EXPRESSED IN PLACENTA, SIGNAL = 0.99; EXPRESSED IN ADULT LIVER, SIGNAL = 1.1; EXPRESSED IN BRAIN, SIGNAL = 0.96; EXPRESSED IN LUNG, SIGNAL = 1.2; EXPRESSED IN FETAL LIVER, SIGNAL = 1.1
aggctgggaagaaaacttgccccatatggctattgagaggttagatgaattaatgtatccaaagtacttagtactgtgctgtccacatactaagtggccataaatacccacagtaggtgctgctcttatcatcagtaatattttacctcaattccagggtttctacatgtcattgattccacattttttggtaatattaactattttggggaaaaagaggcttgcaccaaaacactgatgtgcgagagacagaaaagctgtgactcagaaagatactcactgcctcttcccatccagttccaataataaactctttggctttttcatcttgttcaagcgtaatgtcactgacatcgagaagacaataaacatgatttttttcactttttccatctggacaagtataggttggttctgtttcttctgtgaactgaatttcattattttcagcattttctaagtcagtctcatttttctgacagagatccattactgtgatgcttgcttaaagttttt

SEQ ID NO: 11939 - DNA, 600 bp, Homo sapiens
  MAP TO AL139248.2; EXPRESSED IN PLACENTA, SIGNAL = 0.6; EXPRESSED IN FETAL LIVER, SIGNAL = 0.56; EXPRESSED IN BRAIN, SIGNAL = 0.79; EXPRESSED IN BONE MARROW, SIGNAL = 0.63; EXPRESSED IN ADULT LIVER, SIGNAL = 0.81
tgctatgtgttcaccaaacccacttccttttcctcccgggcacccagagagactgtatttcccagtttttgctgcagtttgacggggtccatatcaatggactgtggagagaagcgattgatgtaagtcacttctaggcggccctctaccactttccaaaagatcattcatgctgtttcttccctcctcagcctatgggatgcaaaggaactgatggaagattacaaggccctagggaaggtgaagccactagctcagcagttcttagcctagtttttggccatcagcccttctattagactagtgaagcctcagtcccaggatggctccccatgtacacttccctcctcgccccagctcacctacactggactatgacatgatcaaggaatctttttttttaagctactgagatttctgtgttgtttacatagcagtttgtaccctaaacaaacacttgagattttatacttcaggaaactattcagatttccttctcattagcaattgttccaaaaacacttactctgctaatttctgctagaaagaatcacagttcttctaacacagaaacatttctgtcccttgagttgggaaaca

SEQ ID NO: 11940 - DNA, 554 bp, Homo sapiens
  MAP TO AC018425.3; EXPRESSED IN ADULT LIVER, SIGNAL = 0.64; EXPRESSED IN FETAL LIVER, SIGNAL = 0.57; EXPRESSED IN BRAIN, SIGNAL = 0.59; EXPRESSED IN PLACENTA, SIGNAL = 0.61; EXPRESSED IN BONE MARROW, SIGNAL = 0.54
tgcttcatttgctctgttgggagaagagtttctcttccattcccccatacctttatcattaatagaataataatactgtatcattgcactgaccacttttcatggaaattatatgtacctcaaaagcagggagcatatcttgtttttatttctatatagcatttataactatgatttatactgaataaagttacaagtttttattttgtttgcagatcatgatacatggtgatggcttgcagagtcgtaaacaaaagaagacacatgggacttcaacaactttcatcattcgcggaaacaggaagaactttcctaggcccactaaaatcatccaaatttattatagatgaagaatgtcatgaaagtgtattaatcagttcaacagtaaggcttcttgaaagtttggatttaaccagtgcagtgggacaacttctcaatgaagcagttcaagcacaaaacaacacatatagaactggaatcagtactcttttgtttcttgttggtgcttggagcagtgcagttgaagaatgtcttcatcttggtgtccccatttc

SEQ ID NO: 11941 - DNA, 600 bp, Homo sapiens
  MAP TO AC013611.3; EXPRESSED IN LUNG, SIGNAL = 2.2; EXPRESSED IN PLACENTA, SIGNAL = 0.95; EXPRESSED IN BRAIN, SIGNAL = 0.95; EXPRESSED IN FETAL LIVER, SIGNAL = 2.4; EXPRESSED IN BONE MARROW, SIGNAL = 1.7
tttggtctctgcttttccagggcttccagggctggctggagaccatggtgagttcggagagaagggagacccagggattcctgggaatccaggaaaagtcggccccaagggccccatgggccctaaaggtggcccaggggcccctggagccccaggccccaaaggtgaatcgggagactacaaggccacccagaaaatcgccttctctgccacaagaaccatcaacgtccccctgcgccgggaccagaccatccgcttcgaccacgtgatcaccaacatgaacaacaattatgagccccgcagtggcaagttcacctgcaaggtgcccggtctctactacttcacctaccacgccagctctcgagggaacctgtgcgtgaacctcatgcgtggccgggagcgtgcacagaaggtggtcaccttctgtgactatgcctacaacaccttccaggtcaccaccggtggcatggtcctcaagctggagcagggggagaacgtcttcctgcaggccaccgacaagaactcactactgggcatggagggtgccaacagcatcttttccgggttcctgctctttccagatatggaggcctgacctgt

SEQ ID NO: 11942 - DNA, 556 bp, Homo sapiens
  MAP TO AC013291.4; EXPRESSED IN PLACENTA, SIGNAL = 0.56; EXPRESSED IN BONE MARROW, SIGNAL = 0.66; EXPRESSED IN ADULT LIVER, SIGNAL = 0.59; EXPRESSED IN FETAL LIVER, SIGNAL = 0.76; EXPRESSED IN BRAIN, SIGNAL = 0.62
tgaggcccaaataaccaatcttttcaagcttagtcactattctggagctgttgccaagtttcgttccatggaacatcggcttcctttcccttcacgaggaaccaagccaggggaggcctcacttgtgctggtgtgagaaaagggaagacacgagaatcaaagtggtctccaaaggatggtacgtcttaagatgcctgtggccatccaggagaagatgaagaacagagactttaaatgggcttccctcacctttgctttgatttccatttttaatatggagccaatgattgtcattaggtcgctgataatcaccaggacataccagccgttgatgaactcccactggtcggtgtcacacacaggccgcttgtacttctccaggaagaaatttagaaatctctatggcaaacatttaaagaagcgtttcttacaaaccacactgccctctggaagaagaaggcaagtgcaaaacagtgctctcacctgtaaaaggacatggcattgcctttccaatttgccagatccacctcgaaagtggaggttacggcacacactt

SEQ ID NO: 11943 - DNA, 560 bp, Homo sapiens
  MAP TO AL139340.3; EXPRESSED IN PLACENTA, SIGNAL = 0.82; EXPRESSED IN ADULT LIVER, SIGNAL = 0.69; EXPRESSED IN FETAL LIVER, SIGNAL = 0.65; EXPRESSED IN BRAIN, SIGNAL = 0.71; EXPRESSED IN BONE MARROW, SIGNAL = 0.67
ggttggggtaagcttcattgaggtgacctttaagtagtagttaaaggaaaactccaactctatgctcccttagggaacaaattccctcttggcattaatgtggctgagcagcctattgttcaaggcatccttctagatctcagcatttggatggtccaggtcattaccatccgttctcttatgtctaaacatgattttctctctccagcaggataataaaatcaccatcatgaagaagccgtctcatgagaaaacgcactatgtgaactcccaacactgctgaagagtcaccacctctagtttgtcagataagctcttcagatggccagttgtccccttcaggatcctgggatgggaccatgtacgtctagcaatataaaactggtactggcattaccagcaggtgcccttctgaaaaccactggaatgtctctggctcctaaaataagataattaggtagtagagtgccctgggatgtggatgcttacctttcagaactagacttgggttcattctcacctgactgcctcagccacctaggaaacatgacccaggtgac

SEQ ID NO: 11944 - DNA, 530 bp, Homo sapiens
  MAP TO AC022333.11; EXPRESSED IN PLACENTA, SIGNAL = 0.5; EXPRESSED IN ADULT LIVER, SIGNAL = 0.78; EXPRESSED IN FETAL LIVER, SIGNAL = 0.66; EXPRESSED IN BONE MARROW, SIGNAL = 0.51; EXPRESSED IN BRAIN, SIGNAL = 0.6
ggccactttctcccctaaagactcaggggtctctcaaaggagaagaggaaataagtctcatggtagggccaatgattgctcttgggtcttggaataatgttgacagagctttcaaggccagacaacgggctaggggtcaagactccatagcagatgcagcaagattgctgtgactgtgaagccctgagtggtaatgcaggtgcgtgtcatgagctgaaagcactggctatggccctggtggaagcagtagaagaggctgtaggtaagggtgatggccttgctcaggcaacctatgggtactgttgggttcttgcatgtctttgcaaaggaacttttccttgaaaccttctggattgctgcagtggggctaaacccctcaatgactgcaggctgcgacagttcaaagggtgcccccggagtcacagggctgggattcaccatgggcaactgtggagagaaaatctataatttgcttttcttgtcttattgcattctatgtattttcatttccactgtaatgctggataggg

SEQ ID NO: 11945 - DNA, 548 bp, Homo sapiens
  MAP TO AL158135.1; EXPRESSED IN PLACENTA, SIGNAL = 0.64; EXPRESSED IN ADULT LIVER, SIGNAL = 0.65; EXPRESSED IN BRAIN, SIGNAL = 0.55; EXPRESSED IN BONE MARROW, SIGNAL = 0.92; EXPRESSED IN FETAL LIVER, SIGNAL = 0.92
tggagcatactgcttcatcttgctataaaaatttaagtataaaacagcctcacgcaggtccttcaggagacatttcagaagaaggcaccgttatcataggagatgacagccccatgcatgttcttgttcctggagaccttccagggggacaagaggtggatgtggaagacagtgatattgatgatcctgaccctgtgtagaatctaatgtgtgtgtttttacctcagtttttaacaaaagaagtgtaaaaaaaaagttaaaaatgaaaaaagcttatagaataaaatataaggaatacctttttgtacaactgtataaatgtatttatattttaagccaaatggtattacaaaagagtttaaaaaataaaagtttataaagtgaaagagtacaataagctaagattaatttattttaaagaaaaaaatattttgaattaatttaatatagcctaaatgtacagtgtttataaagtctacactcatgtatagtaatgtccttggccttcatgttcacacatcactcagtcacccaaaccaacttcctgt

SEQ ID NO: 11946 - DNA, 536 bp, Homo sapiens
  MAP TO AC015999.3; EXPRESSED IN PLACENTA, SIGNAL = 0.93; EXPRESSED IN ADULT LIVER, SIGNAL = 1.2; EXPRESSED IN BRAIN, SIGNAL = 0.89; EXPRESSED IN BONE MARROW, SIGNAL = 1.3; EXPRESSED IN LUNG, SIGNAL = 1.2; EXPRESSED IN FETAL LIVER, SIGNAL = 0.97
aactggtaattcagccccagtaacttaactgtctcattttatctaaaggagaatttgtttgaaacaaatttgctagttgcaaattagctctgagaacaggcacagcttacgttaagtgaaaattttactttccctatttcaatacagcataagaacatacaagttacaattatctaagtacaatacattgtttctttctaatatatattttatttaatcagacatctatttacctctccttgaattgcagactcacagatgaatgcttctcacccggaaacaaacttgccagttgggtatcctcctcagtatccaccgacagcattccaaggtaaagcagttgctgaaagaagaaaaagtaaaattaattgagagacagagagagagagtgagagtgggagagagagagtaagagagagagagaattgtgcatttgtttttattttagtagttctttttttaaaattatattaatgaaattttggcagcctagttgttcttgattatttttatttggctatcattttgcacagaag

SEQ ID NO: 11947 - DNA, 506 bp, Homo sapiens
  MAP TO AC018578.3; EXPRESSED IN PLACENTA, SIGNAL = 0.81; EXPRESSED IN ADULT LIVER, SIGNAL = 0.98; EXPRESSED IN FETAL LIVER, SIGNAL = 0.72; EXPRESSED IN BRAIN, SIGNAL = 0.83; EXPRESSED IN BONE MARROW, SIGNAL = 0.76
tggtccagaaagccaaaaacatgatgcatcaacttcaagggttatgtgtagccttcctcactgggagataaaaggatcaaggcaggagtcacaaattcttttggcagaagtcacaaatctggcatgcagtgggaccttctgcaccagaaacataaagtcctttgctttgtccacagtccatgatggtggccatgttgctgtgtctgggaagatgagagatcatggtggcaatggcagcaatctggacattgtagaccccatcaaaagcttgattgcagcccgtctcatcagagcacagacccttactgtgggcacctataggagcgacccagatggtttgattagcagccatgatatgtttccacatttcatgaccccaaagcaggttgtcttcaatctgccagtctgtagttgtgtaaatggcagactgaatagctaagccattggccacagtccaagagttaggaaaaatatactatggttcatcaaagggagtattggctgga

SEQ ID NO: 11948 - DNA, 593 bp, Homo sapiens
  MAP TO AC016847.3; EXPRESSED IN BONE MARROW, SIGNAL = 0.71; EXPRESSED IN PLACENTA, SIGNAL =   1; EXPRESSED IN ADULT LIVER, SIGNAL = 1.1; EXPRESSED IN FETAL LIVER, SIGNAL = 0.97; EXPRESSED IN LUNG, SIGNAL =   1; EXPRESSED IN BRAIN, SIGNAL = 0.76
acgaagtggtgttccaggtgatctcttgtactctatgcatactcctcattactcatattgtggtagtagtagtccaatttccctttgatatttagaatcattgattcacatggtatagtaaccacttactggcttcttgattcactggcatgaggagtcgaagtggccgggtagctgtttcaacttccaatttaatagaactattgccatggacactagagttagcattgtaccattgggaactaagagctctggaccaacatagcccaatgtcttgggagtcagaagcacagattttgctagttgaatcatagatagtgagttgagaggaaccacttccatttccaccccttgatttccagaccatgagacatctggctatgagagaaacagtcatccttgctatattggttactgatttagatcatataaagcttccttgaaggatatcagttcattcttgtaaaatattggtacccaacttgtggcataactgagtcttcaaaaggccatccttttgatgggaagcatgggaagaccggtgacttccgtaagcatgagcccattttttatcagaagcgatgcagtatgga

SEQ ID NO: 11949 - DNA, 563 bp, Homo sapiens
  MAP TO AL138956.3; EXPRESSED IN PLACENTA, SIGNAL = 0.66; EXPRESSED IN ADULT LIVER, SIGNAL = 0.64; EXPRESSED IN FETAL LIVER, SIGNAL = 0.75; EXPRESSED IN BRAIN, SIGNAL = 0.72; EXPRESSED IN BONE MARROW, SIGNAL = 0.72
acaaagaaaatcaccccctgataattacaaaaagacaatatcatgtagttttaatatagttttatactcttgtgagtatacagacaccctactagcttgaaattcaattcaatgactattttgtttttgttgttgttttccttttttaccaccctatctgtgacgggcactgtgcacataagtcagacactcagaggccagtttttcccactgtccatattctgacccaaagtgctcacaattttctactttgtcctttggatgaagtgccagaaaaatgatgaaagacaagagaacactaaaaacaaaacaaaacaaaacaaaaaattaacatggaaaaaattggaggtatgaaaggcagtttaataaaaaaccaaagcctgtattttgataagatttaagtaagtaatgaagtttctctccacagagaaataaaaaactgaacaaaacctgagggagttctgttatatgcaaacttgctgaaactcacaatctgtatattgcttggaatggtttttgactattaaaaactccttccacagtgtgtgtttcctaaggctgcc

SEQ ID NO: 11950 - DNA, 596 bp, Homo sapiens
  MAP TO AC020991.3; EXPRESSED IN ADULT LIVER, SIGNAL = 0.78; EXPRESSED IN PLACENTA, SIGNAL = 0.66; EXPRESSED IN FETAL LIVER, SIGNAL = 0.66; EXPRESSED IN BRAIN, SIGNAL = 0.64; EXPRESSED IN BONE MARROW, SIGNAL = 0.59
ttcccagctcctccatttaggagacagacgtaggttaaaaagctttttttttttgtcgtcccaagtacatagtctctggagagagaatctagccagcccagcatgatcaggtttccattcccgattgactggcttatgttccaagaaaggctaatctggtagaagcacagctgcagaggactcacctggtatggggaagaagacacgttcaaaaaaggagatcacttatgaggcaggcagttaactgaaaaggtatacttgattgctcaaagagctaaatttagactatgcgagatagtttaaaattcaaaatgtctcttacatgctgtcagtggaataagcacatgggggaaaaagtggttatatctgactggtgtgttctagaaaagcgtcacagaagagatacaatttttatagacattgtggagaaagaggcagcccagatgggcagaaagattacaataaatgaagacatagaggtaagaatggggactctttcaggttgattggactacacaatttagaatgcagtggtagataaatctggggccagactatggagatttctgaaattcaggctgggagaaaagactcct

SEQ ID NO: 11951 - DNA, 507 bp, Homo sapiens
  MAP TO AC026273.2; EXPRESSED IN ADULT LIVER, SIGNAL = 0.56; EXPRESSED IN BRAIN, SIGNAL = 0.48; EXPRESSED IN BONE MARROW, SIGNAL = 0.43; EXPRESSED IN PLACENTA, SIGNAL = 0.51
gaggagggaaagggaaagtgaaaggtgcctcagaaggagccacctctgaggatgacgagagctcaagcccacatagaaacacaggaaaaatgcctctgttattccacatgagaggtgagggagctgcgggatgtgtacacctcccttgtcatcactgattggcagccgtcctaggggatgctaattccaggccgtgaggtctgcctcatttgcagcctgagctgcttccccaggttcagacagagcagtgaaggggagaaagggccatagagagtcagctgaagtataatgactagaatccccaaggcgcagtaacaatgactgctaaaattatgcacaaagaaaaagcgcatttgaatccagagatgtatctctctgaatctggatatatggatcctggcagcctgttcagtagccatttcccagaaatccagtcctctggaaaagcagcagcaggtttgtgcacaggctgcactaccttggtctggccactggtagtcatgcatg

SEQ ID NO: 11952 - DNA, 565 bp, Homo sapiens
  MAP TO AF241726.1; EXPRESSED IN PLACENTA, SIGNAL = 2.7; EXPRESSED IN FETAL LIVER, SIGNAL = 0.84; EXPRESSED IN ADULT LIVER, SIGNAL = 0.75; EXPRESSED IN BRAIN, SIGNAL =   1; EXPRESSED IN BONE MARROW, SIGNAL =   1; EXPRESSED IN LUNG, SIGNAL = 0.97
tatagtggaagctgggtggcttttcttcttggcggtgaaactgtgtctttgaagacattgcactttggcacctgtgccttgctaaggatttcatccctatcttgtctttgtcctgagattatatctcaggacctgccaattttgccagaaatgtcaagttaccatgcactgaaaaatctcagacagccaagaaatgtactatttttgctagcatcaagagcctaagtgataagagtgtccaggtggtggccactgctgcccctgggatatctcaggcctcctgcttgactgggaggcagcagccacgccagctgtttgggccccactcacaccagggcccccattgcattggagtctgccctactgtggaatttgggatgctgcccttgttgcattcgctctgctttgagtacttggtgcttcctaaaagagcacagcaagtgttctttgcaggtgatattgttcatgccctcaccttgtttagactctaaatggtacctgaaatggcataggttatcagtgtttattagctaaggcatggctcagccttgagtccctctcaaga

SEQ ID NO: 11953 - DNA, 526 bp, Homo sapiens
  MAP TO AL121723.35; EXPRESSED IN PLACENTA, SIGNAL = 0.76; EXPRESSED IN FETAL LIVER, SIGNAL = 0.75; EXPRESSED IN BONE MARROW, SIGNAL = 0.63; EXPRESSED IN ADULT LIVER, SIGNAL = 0.78; EXPRESSED IN BRAIN, SIGNAL = 0.57
atccccatgtgcactaatccccatgagaatttgggctctggggctgcacctcacacacacacatctcagaccctgaaatcatcactatagcaagctagtttgtactccaggccccgaagctatgttctctccagacaccagttcaactgccatagacagctagctccactgcaagcccagagcccctgtaaccctgcctatgctctccttcttgatcccctgactgcttcacaagtatcacactttagattgttactaatgaggcagttggggtgcctgtgcccttggtgccagtgtcattaccactccagatcccagagccatagtctctccaaacatacctgtgctgcaggcctcagcaacatggccactccatgggtgccactcatcaaacaccagtgccaccagcactacaagcaagccacaagacaggttcagtgtcaagagggattcatgcagccacaatttccctagcgggagaaaaagagatacagaagaccttagcagccaacaccatcaaagacct

SEQ ID NO: 11954 - DNA, 538 bp, Homo sapiens
  MAP TO AC026707.2; EXPRESSED IN PLACENTA, SIGNAL = 0.55; EXPRESSED IN FETAL LIVER, SIGNAL = 0.68; EXPRESSED IN BONE MARROW, SIGNAL = 0.56; EXPRESSED IN ADULT LIVER, SIGNAL = 0.67; EXPRESSED IN BRAIN, SIGNAL = 0.55
gaaagccaactcagctccacattgcccctgcttttgcactacagcagcagagttgagtagttatgaccaggctgtataatccacgaagccaaaggtatttactatctggctggtcacagaaaaattttgctgacctgtgccctaaatgacagttccttgtaggtcaaatggtggttctgtgcttcctttgcagaggcagcaggccccaggaggggacccagacaacagcgtgagagggaagggcatggactgcgccaccctcacatgcatggtgcagctggctcagatcctggtcggaggtggcctgggctttctggtcaacacagccgggaccgttgtcgtcgtggtgatcacagcgtctgcggtggcactgataggctgttgctttgtcgctctctttgttagatatgtggattaggtcaataaagagacaatgaccctaacctcagagacagtgaagcacatggcaggaagttaacattttctgcagctctgaatcttagggtctgcccattggacgcccactattgtgatttca

SEQ ID NO: 11955 - DNA, 553 bp, Homo sapiens
  MAP TO AC015599.3; EXPRESSED IN PLACENTA, SIGNAL = 0.8; EXPRESSED IN ADULT LIVER, SIGNAL = 0.9; EXPRESSED IN BRAIN, SIGNAL = 0.73; EXPRESSED IN BONE MARROW, SIGNAL = 0.82; EXPRESSED IN LUNG, SIGNAL = 0.89; EXPRESSED IN FETAL LIVER, SIGNAL = 0.77
tctgccttcttctccagagccctcttaccttgaaggagacatgctgttccatgtgccgcagcagctgtggcttctgggccgctgtgtagtcacacaccgtgcacttaaactgcttccctggaaagaagcggaggacaagatgagcgtcgccaggccaacagctcccactgtgaatgaagtgccaggcatggagccaggtacacaaaggtgttccttgccatgtgaggatcagaatctcagaagggaacagcgacgaggtgcacaggcacaatgcagcatgctcagtcttcaacaggtgggagtggagaggcactccccagggagggagaggcacagccagctccacctggggaggccccatgagcaatgacattcgatcaggctcctaaagaaagagtaagggtgtgtccagctgcccagagagaagggcatcaagggagaggggcacacacagatgagactgcaggggaatggaccacagggtgctcaggaaagcggagcagctgcatcttccttcctggagaggagcagctgcatcttccttcctggagtg

SEQ ID NO: 11956 - DNA, 567 bp, Homo sapiens
  MAP TO AL139115.2; EXPRESSED IN ADULT LIVER, SIGNAL = 0.88; EXPRESSED IN BRAIN, SIGNAL =   1; EXPRESSED IN PLACENTA, SIGNAL = 0.81; EXPRESSED IN FETAL LIVER, SIGNAL = 0.89; EXPRESSED IN BONE MARROW, SIGNAL = 0.82
ggccacatatcccacaactctactttctgaacctcaccggctagcttcccacaagctcctcctatggacaggacacatcttctacacctggcaacattcagacgtatcgtagggaccttagacaccagagactaacttctcatccctcacccttaaccactaaagggcccactccgatggaaggacaaggggaaagaacagaaccagggctttatttcacccttccaaacagtgaactaaagcagaacgaatgcaaagataggaaaggggaaggggaaggggaaggggaaggggaaggggaaggggaaggggaaggaaaggaaaggaaaggaaaggaaaggaaaggaaaggaaaggaacggaaaggaaaggaaagggaaggaaacgaaaggaaaagggagggaggaagggaaggaagaagcaaggaaggagcaggtataatttcattctgccatattacagtaagcatagttcttactctcaaaaactgcggcagaggattggcagtctttgagtcttggttttcatgccccaagcacataccctgccaacggagtgaccaaaaggt

SEQ ID NO: 11957 - DNA, 562 bp, Homo sapiens
  MAP TO AC025863.2; EXPRESSED IN LUNG, SIGNAL = 1.1; EXPRESSED IN PLACENTA, SIGNAL = 1.1; EXPRESSED IN FETAL LIVER, SIGNAL = 0.99; EXPRESSED IN BRAIN, SIGNAL = 0.91; EXPRESSED IN ADULT LIVER, SIGNAL = 1.2; EXPRESSED IN BONE MARROW, SIGNAL = 0.86
cttattctcctttggctgcggctcctccacccccttacttttgccctccgtccccctttccttctccactgcaaatcagctctcacacccaacccccttttcctgaaaaccaggcacacatccaaaggccttccaaagtcctttccttgcaggaggtggcaagggtcaaaggcataatctgagctcatgttcccttctccctagccatcctctcccatcttaaaaagataattggctccttttccaaggatctcacatctttccacaaggaatttctgtatgtcactcaatcttataaccttacctggcatgacatatatgtaatcctctcctccaccctcaccctggaggacaggggacacatctggatgaatgcccaggcccatgcaaacaacctctaccaacaagatgttgctcataacccaatagggatcctggctgtccccaaaactaaccccaattgggattatcaggcaacttctgcagagacagcaacaaggccatataatatcaagcctcctagctgtcataaataaagctgcccctgctcttttcctctcct

SEQ ID NO: 11958 - DNA, 581 bp, Homo sapiens
  MAP TO AL136172.12; EXPRESSED IN LUNG, SIGNAL = 1.2; EXPRESSED IN FETAL LIVER, SIGNAL = 1.2; EXPRESSED IN BRAIN, SIGNAL = 1.1; EXPRESSED IN PLACENTA, SIGNAL = 1.1; EXPRESSED IN ADULT LIVER, SIGNAL = 1.1; EXPRESSED IN BONE MARROW, SIGNAL = 1.1
cagcaccatgacttttgtggcgcttggcggggtagagggaagtgtggtcaggaagcctggggtctgagcggcgcgggacctaggccgctcctttcctgagcttcagtttcccgcctcaaaatgatgggtggattggctgagctacacccacctttcccgcccctcggcgcttggctgcgcagcgaccctcctaggtggggaaactcccaccaccccataggccgaggaaggggcggggcaggggtggggcctggcgagggtagggtccggccgccccacctgctgccgctcacctctaggctgtagttgcctcggatggcagtaaagtcgtccagggcttcggccgcgctcccctcgtccaggttcagctcctggcacagggcctgtagcgcctccccggctgcggcgaccaccgccgccccctcagcgtggggcttgtcctcgaacatcccttcaggccccgcgggctgcgcgccacggcccccgacttctttctccctcccaggcgcgctacccacaaccacctgcgccaaagcgcgcgaaaatctgcagctgcgggacgtgttgtcatccaccgtctg

SEQ ID NO: 11959 - DNA, 582 bp, Homo sapiens
  MAP TO AL121772.12; EXPRESSED IN BRAIN, SIGNAL = 0.55; EXPRESSED IN BONE MARROW, SIGNAL = 0.57; EXPRESSED IN PLACENTA, SIGNAL = 0.56; EXPRESSED IN ADULT LIVER, SIGNAL = 0.86; EXPRESSED IN FETAL LIVER, SIGNAL = 0.53
cagcacgtcaaaacatctggctaacatggagagctttgtgcttggcaagaggtggcggttggtcatgaagacatttaatggattctctgaagtggtggcaaggtggcaaggagagtccaacctgaagctgcagagcctgggattgcgctgcatggagaagaaagggtgtgcgtgattccacgctccttttcatcctggcctttccattcggtctgtgcaactgtgggcttgggcggatttctttgccattattggcctcagttttctcatctttaaaatgaggggaatcaagctggtgatgtttccgaagtctgttgccattctgaaatgttagagttaaaatgtttctatttcatattgaattgacattccatctctatccagagagaatttgaggatgcttatgctagatacagcacaaaaggttcacattagaaggcctcagagtgagggttggggtgggacagtgagggtcaggacacaaaacacagaccaggatcctggcagtgaaagcagcccatgcccagttatgagagtcacgggatcccttctataacatcctgaaaggacagttgcacggtt

SEQ ID NO: 11960 - DNA, 555 bp, Homo sapiens
  MAP TO AL133465.28; EXPRESSED IN PLACENTA, SIGNAL = 0.65; EXPRESSED IN ADULT LIVER, SIGNAL = 0.71; EXPRESSED IN FETAL LIVER, SIGNAL = 0.65; EXPRESSED IN BRAIN, SIGNAL = 0.58; EXPRESSED IN BONE MARROW, SIGNAL = 0.69
aggcattgttaccctgttggtcttttattaacatagattaaattgtaatattttctagataaattggcaaaatcagaaagatgcattgccccccagaatgctcgatgaggacgacttttgcaggacttctggtttttcgggagatgaggatcacagtagtggaagtttacacgttcactactctcattatcagtttaaaaaaaaagaagaagaagaaaaataggggaaaaatgtgtttataaggaggaaaatagatttctgcagctcgctggccagaaccactttctctgtctgtccacttaattgggaggactcggcacgcatttctcctcatccctgtattttgttcgcttggagaaggcttcgctgcagtttcaagactttgcgtgctcctctccatttgatttcaacagcaagagagccaccatgatgggtacccttcagatgtggaaagtgttcaagggagtttggtggctgcaaatagagctgggagtccatttaatccgattagcagttccgcaaaatgggcctcgacccattgtggacagaagcctt

SEQ ID NO: 11961 - DNA, 554 bp, Homo sapiens
  MAP TO AC015861.5; EXPRESSED IN LUNG, SIGNAL = 0.91; EXPRESSED IN BONE MARROW, SIGNAL = 0.79; EXPRESSED IN BRAIN, SIGNAL = 0.7; EXPRESSED IN PLACENTA, SIGNAL = 0.79; EXPRESSED IN ADULT LIVER, SIGNAL =   1; EXPRESSED IN FETAL LIVER, SIGNAL = 0.79
tcaatcctctgaaaccctgctactgctttatcaactaagtttatgtaataatcattttttagttataatttcaacaatgtttacagtgtcttcaccaggggtagatttattctcaagtaatcactttctttgcttatccataagaagcaacatttcatctattaaatctttatcataagactcagtagttccatcacatctttagtctcaacttctaattccagttttcttgctacttccaccacacctgaagttacttcctccactgaaatattagacctctcaaagtcatacacgagggttggaatcagcttcttccaaactcctgtttatgttgatatggcatctagaatggtaaactcttttttttaaggatatatttttccttttttaaaaaagttctactttagattcatggtgtagattttcattttttaaaaaaatccaacttttagtctagatttaatgggtagatgtgcaggtttgttacatgggtgtattgtgtgatgcagtttagggtaaaattgatcccatcacccaggtaatgggcatat

SEQ ID NO: 11962 - DNA, 598 bp, Homo sapiens
  MAP TO AC013317.4; EXPRESSED IN FETAL LIVER, SIGNAL = 0.53; EXPRESSED IN BRAIN, SIGNAL = 0.45; EXPRESSED IN BONE MARROW, SIGNAL = 0.42
agggaggtatcactggggagtcagaagtggtaggactaaaggtatatattgatggaaaagccaagaatgttttcctgttaaataggatatgggttatgagagaaggggaagtgttaaagacgattcccaagttaattttctgaataactggaagaatgaacttaccagtaactgagatagggaggcttcagatagaacagatttggggtcacggaaaaatcaggacttggttttgtacatgttgagaaatcgtccaaatggagaatgaagttggcagtttgacttaaatgtttggaactcaggtgagggctctgggctgcaatgagataattgttcattcaccattactaaggatcccttacctcttcccccttgtgcatgtcaatttctccacagcaataaacggtctcttactccatatgcccaaatttaacccatccatttttatttacctcattgtccacttcctccttccttccatcctttctttctctcttcatcacctccttcctgcaataaatgtatagtgatcatttactgaaggcatcagtataatctagaggttaagaacatgaactccaaatgcaaacaacttgga

SEQ ID NO: 11963 - DNA, 515 bp, Homo sapiens
  MAP TO AL136365.3; EXPRESSED IN BONE MARROW, SIGNAL = 0.85; EXPRESSED IN ADULT LIVER, SIGNAL = 0.92; EXPRESSED IN LUNG, SIGNAL = 1.1; EXPRESSED IN PLACENTA, SIGNAL =   1; EXPRESSED IN FETAL LIVER, SIGNAL = 0.84; EXPRESSED IN BRAIN, SIGNAL = 0.91
accagatgacccacaaatcctaaagtattaccaggtcctttatgaaacagtgcctgactcctgctgtaaactttcctttttcttttttttagacccccagtatgattttttaaatgaagataagtcaaaagggtctaacacttggaggtatgtccaaagtcttataaatggcaggcatagtctaaaatggtcatcctgtccttgcccctcagacagtccgcctttcccaggcccctgctggcttagccgatgaacagggcgtagaccctgccattgcagatctcatgattaccaggaaaggtggccatgtaagttaaataggacaatggcactttgaggagggagcagctaatttcacctgggaaagttgggggggagttatgcagagagtccagccttaccaggcagacagggaagacaagaaacctagtcagccaagcaggcaggtgcatgatgtattccagaaatggagacatgttatgtttggctgaacttgatggaaaggggtggtaggt

SEQ ID NO: 11964 - DNA, 599 bp, Homo sapiens
  MAP TO AC006319.3; EXPRESSED IN PLACENTA, SIGNAL = 0.63; EXPRESSED IN ADULT LIVER, SIGNAL = 0.83; EXPRESSED IN BONE MARROW, SIGNAL = 0.75; EXPRESSED IN FETAL LIVER, SIGNAL = 0.68; EXPRESSED IN BRAIN, SIGNAL = 0.76
agaccctgcgctcacttgctcacacaatccttgccactctgcatgtggctcacccttggcgtaggaccgaggttggtagcacaagctgagcgcagcctgtcgggcagagtgggtggaatgagcccagcaggaatgagaaaaactgaagcagaggcaacgctggccacagaggtttctggctgacgaagtgacaccctaaggatcctgtgaaaacatggggatatatacaagattttttttttaattatttaaaatatccttaaaagataattcactgtttaagcagaaatagtaacaatgttttgtagcctttttaacaaatacaaaagtaaaactcatgtcatcgacagtataaaggctataaaggcgtaaatgtaagtaaatagaagagtaaatataatattcttgtattattcatgaagtgatataacatcatgtgaaggtagaccactgtaaattaaagatatatatagtatgtatatatatatatatatataaatatattggagtattttccattcaaatgttaagtttgagactttcatgttgccatttgtttttcattagttgcatttttttccttaccctctttcttgcgg

SEQ ID NO: 11965 - DNA, 588 bp, Homo sapiens
  MAP TO AC015873.2; EXPRESSED IN PLACENTA, SIGNAL = 0.8; EXPRESSED IN FETAL LIVER, SIGNAL = 0.56; EXPRESSED IN BRAIN, SIGNAL = 0.63; EXPRESSED IN BONE MARROW, SIGNAL = 0.56
tggctctttttatcccatgcatggggattatacttagaataaaatgaacaacattgagatccctagggataaaggtcttaaaaatcctgaaaacatcttgcactctacttctaactaatctagacttctgcttgatttctggctaaaaggtagactaactcattgctatttcaaaccatctgaacaaaactaggaactctcacctaatgtataagatggaatagttgcaattattttaaacttcaattcaatattaactggccttttaacataaacacttactttgtcaaacagcgagaaatagtgtaatcttctgcatcttgtccacacgtcttgagtaaagacattaatattttgtttaagaaggatgttgacaatacccggtgagtcatagtgcacagcaagcataagggctgttctaaaataacaaggaaatcactccactcaagaactttaataaagacttttttaaacagctagtttgatacactttaccaatttaatatccacctgtcagtgtagacataataacattttgcatgtactagcttgggtctataagcatctagggtgctcaggtgttcatct

SEQ ID NO: 11966 - DNA, 591 bp, Homo sapiens
  MAP TO AC022860.3; EXPRESSED IN ADULT LIVER, SIGNAL = 0.61; EXPRESSED IN BRAIN, SIGNAL = 0.5; EXPRESSED IN PLACENTA, SIGNAL = 0.49; EXPRESSED IN BONE MARROW, SIGNAL = 0.5
tcaaaatgagagaattggcatcattaatttaaaaactatttagacacactgaaactgtaagtcgatacatttaagttaaattagatggcaagttctgtactacttaaataatttaagtggtgacagaataatctgtttttaataaaaataacttgttaactttctgtctcaccgttttcatcacgctgattatctttttatcagatctgagtagcacaaaaggactgacagtggcatacacattgcccacaagcctctggacacccaggacaacagggtcatatgcccatagcaaggttgaggtgaataagatgatgaaatcaacccagtagatgaccacaaagatactcactaggagcaggatggtctgagtggcacttttctctggggaaggtcttgggaagaggctggtgctgtgaaagtaccagaatttcatctggtgcctaaacaaaagaaccaccatgcatgtacttgaaagcagcattatccttataagcaaaacatctctgggtaatgacagagtaagaaacagtcttctgatgatagaaaagcgaacagtatttactgatatgcagaagattgctcagggtc

SEQ ID NO: 11967 - DNA, 543 bp, Homo sapiens
  MAP TO AL137141.7; EXPRESSED IN ADULT LIVER, SIGNAL = 0.66; EXPRESSED IN BRAIN, SIGNAL = 0.48; EXPRESSED IN BONE MARROW, SIGNAL = 5.4; EXPRESSED IN LUNG, SIGNAL = 1.8; EXPRESSED IN PLACENTA, SIGNAL = 0.61; EXPRESSED IN FETAL LIVER, SIGNAL = 1.5
ttctgattttggtgcaggtgcatataggcaataatgtgctgttattaagtgtctgcctgagataaacactaatgatttcagtgagattcccatttcttttcacattatgcaatctgctttgtgcatggagagccttgacccagccctgagacatccttttgcattgcaggagaaggatgacatccagagggcagaatgcatgctgcagcaggcggagaggctgggctgccggcagtttgtcacagccacagatgttgtccgagggaaccccaagttgaacttggcttttattgccaacctctttaacagataccctgccctgcacaaaccagagaaccaggacattgactggggggctcttgaaggtaactgtaaacgatttgcctaagatggggaaaggcactcacaattctaattcaatggcaattcaaactcacttcctaagcaaatataaactatttacatgtgcaaacaggccattaattctctggtatgcaacaaagagaataaatagattcatcaagtcaatttcagccaagcagg

SEQ ID NO: 11968 - DNA, 600 bp, Homo sapiens
  MAP TO AC015578.4; EXPRESSED IN PLACENTA, SIGNAL = 0.98; EXPRESSED IN FETAL LIVER, SIGNAL = 0.81; EXPRESSED IN BONE MARROW, SIGNAL = 0.9; EXPRESSED IN LUNG, SIGNAL = 0.92; EXPRESSED IN ADULT LIVER, SIGNAL = 0.95; EXPRESSED IN BRAIN, SIGNAL = 0.93
ttctcatgtctaatttctctggctaggaatttcagtacggtgttacacaaaagtggcaagagtaggtacttgccttgtatcagagtacagaggcaaagttttcggttattcctaatggattatgatgttagctataagcgttttatgaatggtctttactgtattgaggtaagttcctttggtaaccaattttgtttagaatttttatcatgcatatatgttgaactttgtcattgtcaaatgttttgtctacatttattttacgatagaaaaatgtaatccatttatgtttaaagtaattattaataggtaaggacttactagtgccattttgttgtattctgactgttttgtagtttaatctttgttttattctttctctcttgtcttctttttaatgtgattaattttttgtaatggtatgctttaattcctttatcttttttgtatgtggtacacgcttttgcctttgtatgttgtggctactatgaggcttacatagaatatcttttagttacgatattctattttaagttgataacaatctaacttttactgcatacaaaaccctacattttaacttcccctccaccaactttt

SEQ ID NO: 11969 - DNA, 590 bp, Homo sapiens
  MAP TO AL121890.13; EXPRESSED IN LUNG, SIGNAL = 0.95; EXPRESSED IN ADULT LIVER, SIGNAL = 0.97; EXPRESSED IN BRAIN, SIGNAL = 0.81; EXPRESSED IN BONE MARROW, SIGNAL = 0.9; EXPRESSED IN PLACENTA, SIGNAL = 0.97; EXPRESSED IN FETAL LIVER, SIGNAL = 0.97
cctttcaccacaatggttccactaattcaagtgtaagtgaaagcagtatttaattattgagagggtgaagacctaacaaatatttgcataaaagaatttttgtttaccctttgcaaataacctggcagattttgcttgttggttggttctttattttgcttttgagacaagatctcactgttgctcaggctggagtacagcggtgcgattaaggctcactatagccttgacctgttgcactcaagcgatcctctcacctcagcctcccaaatagcacagcaccactcctgattaactttttttttggttgctctgaaacaaatgtggcacaataaaagaaattggcttcccagaagatgtatagaatcttctgtttacttgttcatttttccttattttctaggagtgaacaatgccccatttccaggtgaatggcaatggagtagttgtccgagggtactcaatactcaagagtcagctgatcatgtccttagatgcaccagaaatgatggtaaagcttgggagtgcggatacctttgattctaattattagcgaatgcctcagctcagcatcactgggctatatgggg

SEQ ID NO: 11970 - DNA, 575 bp, Homo sapiens
  MAP TO AC016487.4; EXPRESSED IN PLACENTA, SIGNAL = 0.77; EXPRESSED IN ADULT LIVER, SIGNAL = 0.75; EXPRESSED IN BRAIN, SIGNAL = 0.87; EXPRESSED IN BONE MARROW, SIGNAL = 0.66; EXPRESSED IN FETAL LIVER, SIGNAL = 0.76
tcccctaacagaaaagcctgcaggcaagtaaggtggaccaattaaagcattccaagtcattcccaatggttgtttaagtcagatgttaattatcactagactcagtagggactgagcattctttctgtgtatcaggacctacctggtccttaatttggctttgtcaaaataacctttgtctgtgaggaaagtcttctttaacttgtcagactgattaagctctgctatacaacaatgttgaactaattttattttgaagccctttgatatccacactaaatttctgtccagaatacatctgccagttaaatagtttaaactgaatccccacagataatcttgagccatttggaatttttttattatgtagagccaatattattatgatattgacaatcataagacaatagaacaggaaataactttatggctatatttttgttaaaataataattagaaaaggtaaacaatgatgctatctttttatacatgacaaatatcatggctctagtttatttcttggagaagaacaattatataattgttgggtagtatctttgactgtcagccctgaa

SEQ ID NO: 11971 - DNA, 513 bp, Homo sapiens
  MAP TO AL160281.2; EXPRESSED IN LUNG, SIGNAL = 0.85; EXPRESSED IN ADULT LIVER, SIGNAL = 0.74; EXPRESSED IN BRAIN, SIGNAL = 0.63; EXPRESSED IN BONE MARROW, SIGNAL = 0.69; EXPRESSED IN PLACENTA, SIGNAL = 0.87; EXPRESSED IN FETAL LIVER, SIGNAL = 0.77
tggtccatcccttaaccaagaagtcaaacttagtataatattaccaacagagtgaagtgacacatgcctccagatatgacttaccgagagggacacatcacccatgtagttttcttttccaagtcgtttggcctgaatccgtttttgagaaaacagaaatgcagaaccatctgtaactgtaaccatctgtaacaattgacataagcccttcaaaaatattaacattgtgacagacaaaaaaggctgggaaactattatagattaagactaaagaagagattagagactaaggagatacgacaactaaatgcaatgcatgaaccctgtttggatacaggatttttttttttagttgtaaaaaaaaaattggagctaactagaaacatatggaatttggactgcataatatttttgtatcattgttaaatttcttaggtgtgatgagatttttttgggggggaggtgtcatggaactgttctgtatgctgatggtggcggtggttacacaaatct

SEQ ID NO: 11972 - DNA, 590 bp, Homo sapiens
  MAP TO AL138702.3; EXPRESSED IN PLACENTA, SIGNAL = 0.74; EXPRESSED IN ADULT LIVER, SIGNAL = 0.76; EXPRESSED IN FETAL LIVER, SIGNAL = 0.78; EXPRESSED IN BRAIN, SIGNAL = 0.76; EXPRESSED IN BONE MARROW, SIGNAL = 0.72
tccatgggaaaatacatgccacagaaggaagtgggactcctgccatccaagggactcaggggtctattttcggaggcaagagctaggaagctgtcacaagaaacaatctctagaatacatcacctatgtcaaagaagtgcacagtatcaaggtcttgcagaaccttccaaaaaatatctgaaaataaacacacacaagaatatttccgccttttccttcagcttttacctctttcaaatcttacagcaagaaacagagatgatagagtagattcaaactgcaggctccagcccccaggtcaggatggagatgaggggcagaaggtgccggttaaatgtgagtggtgttgtgatttagatactacttgatttgttaatatctgtaaatgagtcaattgtcaaaataagactggtcttagagtcaaatgtgcctggaaacctacagaatcttctacagatgttttcaaatgttgaggaagaaagacctggtatgacacatttaaaagcagtgttgggataaaaacaaactcacacctcatactccaaagtcaaaattatcatgtcactcttccgcttgaaatcttctcagtg

SEQ ID NO: 11973 - DNA, 588 bp, Homo sapiens
  MAP TO AC016282.3; EXPRESSED IN LUNG, SIGNAL = 0.96; EXPRESSED IN ADULT LIVER, SIGNAL =   1; EXPRESSED IN FETAL LIVER, SIGNAL = 0.85; EXPRESSED IN BRAIN, SIGNAL = 0.89; EXPRESSED IN PLACENTA, SIGNAL = 0.9; EXPRESSED IN BONE MARROW, SIGNAL = 0.91
taaacacagatgtgcctgccaggacattaactgcttagcaggttgacgtaactgacttccctatgttcaacaaagctttgtagtccctgagatgctactgcctgggtttaatgattgccatgttccccatccactctttggcgaaggagtttctgcagcatttgatgcagtgcttcagctcagtgttaattatgagatcagctcaatgcctgtgatttagaggctagactcagaaccctttcagtaattcagttcccgtaagtctgtgttattggctcctgaatgcacttgcttaagctaattaaaaaataagctgaagaaattcatttcttatgcaaaattaaatctggtgtacacgctgaatattgcaccttgtcatgttcatttctagctcaattctgccttttactgcacactttgcagcttgagaattaccatttaaagcaaatgtttggattttgaagaaacagatttggcccttttgaaaatgtttggctgtaaaacaactttgatataaagtatcaaaataaaaaaatattcttaatgtttcttttgtggcattatcagtcaaccgacatcatcatgagg

SEQ ID NO: 11974 - DNA, 600 bp, Homo sapiens
  MAP TO AC016057.3; EXPRESSED IN ADULT LIVER, SIGNAL = 0.72; EXPRESSED IN PLACENTA, SIGNAL = 0.59; EXPRESSED IN BRAIN, SIGNAL = 0.53; EXPRESSED IN BONE MARROW, SIGNAL = 0.52
ttattgcctttccctgcttcttatttcttcatagcatttatcaaccccatgacattatgctacacagttatttattacctaaattcctgactgtttgtaatcacactgagactgaatattggtctgctttcttcatcactggttcctagaacttgtaacagttgctggcatttggtagatccttggtatttgccaagtgcatgcatctttgcacgccctgagcctcttgatgtgcctggtgctccccaggcaccaagtgagtgttgaacgaatagattttgtagtagatccttcctgatctccccagtggaggaagattaaagaagttaaaaatgattatcattataaaatgtttcaaatgatcaacaaacagaaaatataagaaaaaactacttacaagtaaattcatgaggacaattgggacaaatattgtgaaggaaacaagttgtgcaaaggacagaactggatgtgccaattcatttctcagatatggttctaggaaggactctcgataattgatatctcctagcatcatgctgaaggtctggattatagaaagcaatggagagctgaagggatcctgaaagcagacggtgaggt

SEQ ID NO: 11975 - DNA, 551 bp, Homo sapiens
  MAP TO AL133417.9; EXPRESSED IN PLACENTA, SIGNAL = 1.2; EXPRESSED IN FETAL LIVER, SIGNAL = 1.1; EXPRESSED IN BONE MARROW, SIGNAL =   1; EXPRESSED IN LUNG, SIGNAL =   1; EXPRESSED IN ADULT LIVER, SIGNAL = 1.1; EXPRESSED IN BRAIN, SIGNAL = 0.88
tcatcagcacaaaccacaggtatagtgtaaaaaaaaaaaaaacaaaaacaaattttaactcactccgagacctcaaaagatttaacaagaattggataaaacctttgtgtctcagcactattacagcttcagctaaccacaaaaataaaaaagctgttcctatattagtgagttattttaatgagattcctggagataatgtaaaagttcttgaacttgatgtcctgccaggggcaacaagtggctattttactttctctactctgagtgcagcaccctggttgataagatgatcagcaggtcagctgataatattaacttcagagatggaaaatcctaccagtttaaagacttttttcaagaaattgatgactaacttcatcaaaacctgataagaattgattctaacagtacactcatatcaatgctataaatgaaacatctgatgattttccagtttttgaggaaagttgttcctgtaaaatatttttctctatatatggtgtgaataggtcactgcaataatttggtgatttggtcaaagggcaatg

SEQ ID NO: 11976 - DNA, 519 bp, Homo sapiens
  MAP TO AC022813.3; EXPRESSED IN PLACENTA, SIGNAL = 0.48; EXPRESSED IN BRAIN, SIGNAL = 0.48; EXPRESSED IN BONE MARROW, SIGNAL = 0.48
gtgattatgtgccctggttgcatcctttctattcagagaactgagcagaaatcaggcccctttaatctcgatgtcctgtccctgtgttggaaaaatttcctcgtacttttcttctatttcatctctttctgaaacttctctttctggaactcctagtttccaatgttgaagttaatgaattgattgtcaaaagtctttccttatctcactttttccattgcacagctcttcttttgcttgtgtgtttgtctattctctgcaggatgttctcaactttatcttctgtccattcaattgtatttcgaatttcttcatccacatatttaatttccaaaatcattttcatattctctgatttttcccataaaaataacatcctatttgtatttcataaatgcatatttattcttttttgtttacatatattaattataggttttaaggtagcctttcttcttcctatactgactctggctcttctgaatgcttcttttctgttgatgtgttctggccccttta

SEQ ID NO: 11977 - DNA, 562 bp, Homo sapiens
  MAP TO AL121931.9; EXPRESSED IN BRAIN, SIGNAL = 0.64; EXPRESSED IN BONE MARROW, SIGNAL = 0.56; EXPRESSED IN PLACENTA, SIGNAL = 0.54; EXPRESSED IN FETAL LIVER, SIGNAL = 0.85
gaaaagatgggcaaaacctgcaaaatgtgtaagttttttcagtatgattgtacaaatgttaacttctctattaattttccaatagttatgtgtcatgtctcttcacatgacaacttcactgctagcacaatccggattccagaaaaccagtgcactaaacaacattgggggatgctgggagaaggttgtaaggcagccctctgcaaaacctttgtaatttttctgtaagtctggaattatttcagtattagaagtttaaataaacccctaaaaaaagtagtaaaaatttcattagactgaaaagtataaaaaatagcatttacaaaataatttaaattgagtattttaggaagcttcttagagactctgacctacagggagctgagagctaaccagttaactatctgtaacacaagactcctcaccaaaattactttcaatttctgttgaagaccacacagaatcagcctaagaactaatggaattctacaataagcatgaacctggctcgcaacaacatattttcctttgtaatcaccatcctgtccttcgaaatctccga

SEQ ID NO: 11978 - DNA, 588 bp, Homo sapiens
  MAP TO AC015474.3; EXPRESSED IN PLACENTA, SIGNAL = 0.88; EXPRESSED IN ADULT LIVER, SIGNAL = 0.88; EXPRESSED IN BRAIN, SIGNAL = 0.69; EXPRESSED IN FETAL LIVER, SIGNAL = 0.81; EXPRESSED IN BONE MARROW, SIGNAL = 0.77
aaaacaagggcatatggtggcaaggagagagaaggagaaacaggatgctgaaatagcaatccttgggtcagaatttttcctattaacacactagcctgatgtccattcggacatctttatccactcagattcattctttcaaatgcattctgcaagtagctctcacatctgacttttctctttcccctctgttgctgtcttgggtcaggtgcccatcaccattcacttgggcttcgtcatagatgtctttgtcaaagaggcctccagtctcatctttttccagctcatcgtccatcctgtcagcagaaatcttattccccaaagactaccctaccccttgaagatgaacctttaatttctgagcatgagtaactacctttcacggcctggaccctgctaagatttaaaactgtaggtgaattacttctcacatttctgtattccagccacactgaaccactggccattctccatgcaggacattttctctctcatcaccgtgcttttcatatttgggaggtggagaagatgtccttccctttcttacctagtgaactcctatgcatcccgcaaagtccaactcacaaa

SEQ ID NO: 11979 - DNA, 541 bp, Homo sapiens
  MAP TO AC009699.6; EXPRESSED IN PLACENTA, SIGNAL = 0.76; EXPRESSED IN ADULT LIVER, SIGNAL = 0.85; EXPRESSED IN FETAL LIVER, SIGNAL = 0.69; EXPRESSED IN BRAIN, SIGNAL = 0.72; EXPRESSED IN BONE MARROW, SIGNAL = 0.7
gccctgtcttattggtttgctatcaagataaatgagataatatagagacattttacaatccttttgtaaaaattttttgtaatgtagacattgcagtattttgtaaactactacacattatataagtaccagggactaccaagagcaataattccttacgaaaaagcctgtgtaatgaatcagggtggtaaacataactttcaggctactctggcataaggtttcaatgtgccaaacaaaactaagagatgcagacttaccttcgaagtccttcaatgctttccattagtataaatttgaaatgccaagcacgccaagccatctgccaggctccatgatggatgaacccctccaggagctggatgatgttctgtgagcatgctcaaaggatgaagcaagctatcactctattctcagaggtcagcctggctgggaatctgaaagcctgtggtattagcatccacctaacttgtgaacttaccaatgtagcattggcagtaaacagccagccatatctggacccagggtttgtggtcactgt

SEQ ID NO: 11980 - DNA, 524 bp, Homo sapiens
  MAP TO AC021970.2; EXPRESSED IN LUNG, SIGNAL = 0.9; EXPRESSED IN PLACENTA, SIGNAL = 0.76; EXPRESSED IN ADULT LIVER, SIGNAL = 0.89; EXPRESSED IN BRAIN, SIGNAL = 0.81; EXPRESSED IN FETAL LIVER, SIGNAL = 0.65; EXPRESSED IN BONE MARROW, SIGNAL = 0.81
ttgaaagcatgccactcaagtaaaattaatggatgtaaatatgaactcttctggacaaattgcaaagacaaattgtgggctagtgaaaaatcttcaaagtatcttgcatgtttgctagaagataattggaatgacctagctacagggatgttttgtaattgttgctactgagtagtctctgagaagtccaataatatcctcttaaaacacaccagagagcgaagatgaacaccatctggcctgctttccaaaacagttggtcatcacagctgatgttaatttgaacattcatttcttctgaaatgaggtgggggctgtattcttgctctccaacaatgtccttaagttccagtctttgattcatgcatcagcctttctgttgctgccaatgtttattttgtttaaacatgaatttaatttagcatatttgtaataactaagtaatttatgccataaaaatattcagataacaaaggaaaatagaaagaaatgaataaatactatccataatcccaccactcagg

SEQ ID NO: 11981 - DNA, 557 bp, Homo sapiens
  MAP TO AC007923.2; EXPRESSED IN LUNG, SIGNAL = 1.1; EXPRESSED IN PLACENTA, SIGNAL = 0.7; EXPRESSED IN BRAIN, SIGNAL = 0.73; EXPRESSED IN FETAL LIVER, SIGNAL = 0.96; EXPRESSED IN ADULT LIVER, SIGNAL = 1.5; EXPRESSED IN BONE MARROW, SIGNAL = 1.5
acccagttatacccaacccctgtaccctgctctctcaaataccagaggaaggagaatgattcactgttctagacctcaaggatgtcttcttctgtattcccctgcactctgactcccagtttctctttgcctttgaggatcccacagaccacacatcccaacttatgtggacagtcttgccccaagggtttagggatagccctcatctgtttggtcaggccatggcccaagatctagaccacttctcaagtccaggcactctggttcttcagtatgtggatgatttacttttggctaccagtttggaagcctcatgtcagcaggctactctagatctcttgaactttctagctaatcaagggtacaaggcatctaggtcgaaggctcagctttacctacagcaggtcaaatatctaggcctaatcttatccagagggaccagggccctcagcaaggaatgaatacagcctatactggcttatccttgccctaagatgttaaaacagttatgggggatccttggaatcaccggcttttgctgactatggatccccaga

SEQ ID NO: 11982 - DNA, 517 bp, Homo sapiens
  MAP TO AC022216.3; EXPRESSED IN PLACENTA, SIGNAL = 1.1; EXPRESSED IN FETAL LIVER, SIGNAL = 0.84; EXPRESSED IN BRAIN, SIGNAL = 0.57; EXPRESSED IN ADULT LIVER, SIGNAL = 0.83; EXPRESSED IN BONE MARROW, SIGNAL = 0.68
ggcacagcttggatctgaacaaaggaaagtctgtcaaatttcaaataataataataataataatctacaattctaaaataaaaatttgataataaccactcctacaaatcactgaaaacatttttaaagtatttaacagacaaaaagataagtgggatatcatttgtaggctctaatatgattcatcataacttactcttctggtgacaatggggtcaatttctcttgggtctttgtgagcaaacatcatcaagtcagcattcagtgtgcggatcctctgaaatctcaggcgaatatagcgagcggaggtaaattctagcagttctggagaaggatcatcggcacttggtctcccattgattaaagagatgtgaatctacacaatatgaaaaataatttaacaattatgttttccaaaatttaaatattgattttgtttctttttcttggaaaaataaagttaacttcccattctcccaattagttacgcagattcaggtacatgcctatgcactgg

SEQ ID NO: 11983 - DNA, 556 bp, Homo sapiens
  MAP TO AC005481.3; EXPRESSED IN ADULT LIVER, SIGNAL = 0.63; EXPRESSED IN BRAIN, SIGNAL = 0.64; EXPRESSED IN FETAL LIVER, SIGNAL = 0.67; EXPRESSED IN BONE MARROW, SIGNAL = 0.62
tgggtttggaaaagttctgccttccgtgggaggttttaaagacaggtgttcttcctctgcctgcgttctgctaagccagagagggcaaagagaaccctaactttgaatttttaagaatgtcaatcttggggcttactggtaagtattcaatgaagaacaacgcctgagagatgctgacattctaaaacacacggtttagaggcctcccaggcaaatgtgactgtgctaggaagcaactctcctccatcctgctctgtgtggatttatggcatcgatggtgggcagctcctgtgttctgcacagagggatccccaggttgaaggatgacgtggaagcaatgacgtcgtggtcagggacgtctgcagggagcaaaatgaagcgagtttctttagttcacaatttctcagaggctctgctcggctggcatgctcgagaacatcctgggagggctgaggctactggccatgagctcttgtcttagaaaagctgtgaccaggttgagggacgctggggtttcctggaaccacctgatacctgctgtccgagatgtgtctca

SEQ ID NO: 11984 - DNA, 592 bp, Homo sapiens
  MAP TO AC010162.6; EXPRESSED IN LUNG, SIGNAL = 1.2; EXPRESSED IN ADULT LIVER, SIGNAL = 0.87; EXPRESSED IN BRAIN, SIGNAL =   1; EXPRESSED IN BONE MARROW, SIGNAL =   1; EXPRESSED IN PLACENTA, SIGNAL = 1.9; EXPRESSED IN FETAL LIVER, SIGNAL = 1.3
gcctttgctcttgagtgtccagtgtccatcctggggctccacaagtcacatttcagctctgtcaacctcagtgcttgagttgagggtcttcctgggtcatggggcccaggctttttggtgtcaggcacacagtttggaaatagttctcccccattctgtggttgttttttcaatttcttgatagtgtccttgaagcatgaaagttttaatttggagtcttacgtatttgcttatgccgttggtgtgacatctaagaaaccattgcttaatcgagggtcatgaagatatattcttatgttgtcctccaggaatgttagttttagctctgacattgaggtcttgatctgctttgagtaaagttctgcatatggtgtgaggtaggggtcccattcagccagttgtcccagtgtttgctttgtgctttgcagaagctgagctgtggagagctgggctgggtagagcaaaattagagcttcacgccagacttcttgcatttggaaactaacattctaaggaagaaagacgtggtttttttttttaagtgagaaagccaacatatattaacaggaaagcttttcaggtgtttggcaca

SEQ ID NO: 11985 - DNA, 587 bp, Homo sapiens
  MAP TO AL121988.10; EXPRESSED IN PLACENTA, SIGNAL = 0.74; EXPRESSED IN ADULT LIVER, SIGNAL = 0.7; EXPRESSED IN FETAL LIVER, SIGNAL = 0.8; EXPRESSED IN BONE MARROW, SIGNAL = 0.66; EXPRESSED IN BRAIN, SIGNAL = 0.6
tatcagcccttggataacggtaagataataaatgtggaaagttctcctgagaggtactgggtgattcccaggggacttggttaggaacatttcctggaggagaggaaatgcttttccccctccattagccaagtggaagggaagagcattctaggtagaggggcggcatgagtgtggctcgagggcctggagctgtggggttctgagactgtggccactgccctcggagtgctgagacgttgttggtggctgagcccaggagctgagactttgctgttgactcctgtacccttaggcaagttactcaaatccctgtgcctcaatttcttcctctacagaatgagaatagtgatagtatctactttgtggggttgatggcatacagtgtgatcaaagcacatagtgtaatagtggtacataaagtttttcaagtgagtggtggctaaaaacattgtgatactgtaacaaaaagggtctgtgggttgttcttagagggtggtaggggctggcgcagctgaggaaagggaaggtggcagggggctgttgaggcctggggctggtggcacagaagtccctgttcctccaca

SEQ ID NO: 11986 - DNA, 520 bp, Homo sapiens
  MAP TO AL161426.2; EXPRESSED IN PLACENTA, SIGNAL = 0.82; EXPRESSED IN BONE MARROW, SIGNAL = 0.76; EXPRESSED IN ADULT LIVER, SIGNAL = 0.76; EXPRESSED IN FETAL LIVER, SIGNAL = 0.87; EXPRESSED IN BRAIN, SIGNAL = 0.69
agccccataaacacttgctgttgtcccgtctctgttctcggatccatttaaacacttcttacctataaacagattccactctgtgtcgaggtcagcctgatttgccaagcagcccttcatgacgttgagacagtagttgttgcagggcctcacagtgggaagcccccgacagtatgggcagtacagcatcttcatgagggcacggatacaccctggggttgggctgacctgcagatttattgcaaagaaaaagaaaatcaaaaataagaaggataaagaggaggaaaaaaagacaaaatagcagtgataaaccacaagcagaatcttaaccctttgtaattactgatcttgaatccatccaattcctgttgaattcttctgcttggcatagtaataacttttttgcatgtccctgtcaacattttcatatcgatgtcattgtaattcagccctaaagcctagacactgtttcattgccatagaagatggaatgagataatgcatgtgaaagcagtttgca

SEQ ID NO: 11987 - DNA, 588 bp, Homo sapiens
  MAP TO AC018730.3; EXPRESSED IN PLACENTA, SIGNAL = 0.5; EXPRESSED IN BONE MARROW, SIGNAL = 0.52; EXPRESSED IN ADULT LIVER, SIGNAL = 0.54; EXPRESSED IN BRAIN, SIGNAL = 0.47
tgcagatcagtctgggtttgcttcagacagaagatcctggaatatgttcaagcattactcatctccagactttttcaacccaataaattttcatactacttgaattattactctcaagatgcgtgtttttatttcatttacctagattgaaaagaaaaacatgtagtgggctttactgggtgaatggccacgggattgcaaaccacttggatgtggggcaattgaaacgcagctttgttgggccttgttctccagcccgcagccagaggcaatgcttgtgaccgtgacaggccattcagacttgggcctgttggcttttttttttttaaagaatagattccctggctggcttcttgcagtaacacacacattccttggctggcattaaaggagtcttccttttgtatcccagggtaccatctgtgggtcttttccagcatatcttctggattcccatccagattctcaggggatcctctggaccccgttgggaccatggacatggttttctccctcatcaggcagtttggaaattctttctcaggtgaaaggcagaggcttgggcactgactaaggccctggggtaac

SEQ ID NO: 11988 - DNA, 553 bp, Homo sapiens
  MAP TO AL133377.4; EXPRESSED IN BONE MARROW, SIGNAL =   1; EXPRESSED IN PLACENTA, SIGNAL = 1.1; EXPRESSED IN ADULT LIVER, SIGNAL = 1.2; EXPRESSED IN FETAL LIVER, SIGNAL =   1; EXPRESSED IN LUNG, SIGNAL = 1.2; EXPRESSED IN BRAIN, SIGNAL = 0.92
ggagcatatcccacaggatgacagtctctcactgctagattaccatcattagcaacttgtcctgttacagaaatcatcttcctcctttcttctttcttcttcctcctcctcttcttcctcctctttcttctctttctcctcctcctccttcatcttcttcttcttcatcttcatcttattgttgagtaccagtagagtactgaacatagctgattctgctcccaccctgaaagcttgcattataagtcagacaggcaaaacatttggaagatgagaaacactcacgagtagggtacttaggcatcataggggtgggataatttacatgggaatatctgactttttgtctgtatgtgtgtttttgataaaaattcagaaaatttacttgaattagtgtctcattcatctttacccatttccccacctcacccctacactcagtgtttctccataaaggaaatctattttcagtctttttggcaaaggactcagggccagattaggttaacccctgggcaagtcatctatacttagagaccaaggtgttggggta

SEQ ID NO: 11989 - DNA, 544 bp, Homo sapiens
  MAP TO AC019194.2; EXPRESSED IN ADULT LIVER, SIGNAL = 0.55; EXPRESSED IN BRAIN, SIGNAL = 0.48; EXPRESSED IN BONE MARROW, SIGNAL = 0.49; EXPRESSED IN PLACENTA, SIGNAL = 0.64
catttcatccagttccctgcataaggaggcctcttgatgtcagggaccctgcccaaaacattaattactatgtcagcaatggctcagataccctgaaaacactcaccaggcatagggtcatagctggggatcttatcactgctgttccgaacagactgaaagacagcccagaggaattctttagtgggcagggtcctggccatcttggaagctgcttgcagaaggatctcaggaaactgtgtgaaagaagatgaaagaagaggaataataattaaaaccccttaaatacagattgaaattagagttgaaactgtcacactacttactgccttcattctttgttatagcaacttctcatataaatctattccctagtcccactaatgtggtctctataaagaatcctataaaatgatactcaacttcaataaaaatccaataaagtctaaaaaacataagtaaatcacttttcacccatcagattgtcaaaaataaaatgaagtgctaatacttaatgctgggcacattcatttttccgtgggac

SEQ ID NO: 11990 - DNA, 543 bp, Homo sapiens
  MAP TO AC021498.4; EXPRESSED IN LUNG, SIGNAL = 0.93; EXPRESSED IN ADULT LIVER, SIGNAL = 1.1; EXPRESSED IN FETAL LIVER, SIGNAL = 0.76; EXPRESSED IN BRAIN, SIGNAL = 0.89; EXPRESSED IN BONE MARROW, SIGNAL = 0.82; EXPRESSED IN PLACENTA, SIGNAL = 0.98
catttgtctcctggtgaccctgcagcctaaaatagaagccatcaaggtagcaccagtgattgtgactgccaagcacaagacaataaattcagatttggctgatgggaaatgcttaaaagcccccaatattcaaatagaaaaaaaaattaatgaaaaaaagggagttgtgatggaaattagagtaaacaataaaatatggaggctggaaaaacaagttaaaaaggagaagatgtaacttttaatccagctccaaagtcccagagcttggaagttgtccctcccagttttacaagataaagctgaacaactgaaaatcagtgacttttcttggacccaacagagaactgagaactcaaggcaaactgccactccaaaatatggaaaacaagtgcatccagagagtcacaactgcttccctaaagcagaagctgttgggaccataaactggtagaaacacttgaatggaaattctaatgcatttctgaaggctaaatatggattggtatgagagtgagaaacttatgagagctgttgtctcagggg

SEQ ID NO: 11991 - DNA, 588 bp, Homo sapiens
  MAP TO AC016109.3; EXPRESSED IN PLACENTA, SIGNAL = 0.6; EXPRESSED IN FETAL LIVER, SIGNAL = 0.65; EXPRESSED IN BRAIN, SIGNAL = 0.47; EXPRESSED IN BONE MARROW, SIGNAL = 0.53
aagcaatcctcccccaatagcatttcccttacctgatctttgtgcaaaggtggagtaatagtggtgagcttggcattgtctctccctgtgagatgcccagagtttggcacatctgtgatttctgtttcatgcagacctgtgtgctgggaaatcagcaagccaagctccagggaaataagcttttctgggaactgaagagccagattataacaaatgcttggatgctagcctgcccatttccacccagacatgggattaggaagaactttcctggagtgagattgactcagaaaattgtttccaatctgctcacatgactcactaattaaggctttcaaatccctctctatacgattgtggaaaaaaagacaaggctaaatagatacccatgtaggacaaaaacaaactaatttttaaaaacactttggtaaatcacctgccaagtatccaaatttgggctactctacttactaaaggatcctccaaggtaaaactatttgggagacgtacaacctcataaggcaatttattaatggagttataagattataagcaatgtaaagtgaacccccagaattccccactaat

SEQ ID NO: 11992 - DNA, 590 bp, Homo sapiens
  MAP TO AL139824.7; EXPRESSED IN LUNG, SIGNAL = 0.84; EXPRESSED IN PLACENTA, SIGNAL = 0.81; EXPRESSED IN ADULT LIVER, SIGNAL = 0.73; EXPRESSED IN BRAIN, SIGNAL = 0.57; EXPRESSED IN BONE MARROW, SIGNAL = 0.73; EXPRESSED IN FETAL LIVER, SIGNAL = 0.7
tgttaaccgttttccccttgcttaattcaagtgtcctcgtgaggcaattagctcagctagttgagcacttgtgcccgaggagagaggcatactctcaataacatcattcagaatgactactgcataccccaccttatggattctttgctccacaaagaaacttctgtccataaagagaatgcatcctgagttctctaagggggtttctttgaggtcctctctggtctcgtaagttggcactactatctgttcgtagtcatgttcaagctccccagctccctctgggaggaaagtggctgggtttagggagggacagattcttaactggactgctcacctgtgctgtgcaccttgacttctgctgtcttctgcctctggagccctcagatctagttttcctttctagggcctcaaactgaagcttgggggaaaaaaggtgcctcagaaggatgtatggactcattgaattagtcccaggtggctcttgccaaattgtagccagcagctggtggggcagcccctctgttgcttccctatcataagctgtgggaccatgtcctcctctaccaagggagagaaagggagtcctg

SEQ ID NO: 11993 - DNA, 532 bp, Homo sapiens
  MAP TO AL157997.2; EXPRESSED IN LUNG, SIGNAL =   1; EXPRESSED IN PLACENTA, SIGNAL = 0.75; EXPRESSED IN BRAIN, SIGNAL = 0.94; EXPRESSED IN FETAL LIVER, SIGNAL = 0.89; EXPRESSED IN ADULT LIVER, SIGNAL = 1.1; EXPRESSED IN BONE MARROW, SIGNAL = 1.2
gccatcccttctaaaatcccactgtaaatacaaacaatctattcttcctacagatggtcttggtatgggaagaaacaagatggcttagaagtagcactaaaattcctcagagatatggaaagaaaaatctctaagcaggaaacatgctaataccagagtagagagaattagggtaaaagcagctttttctataattagaatgactatgtccaggatttggggttggatttacagatgggaaggaaaggactttggcagaatgggccttgggtcttcctggtgaggctagaagtgtccatacacatggtgcagcttcctggtctcagccaacaaggacaccttgctttgcatcactccattctccacacaggcatttcctttaggaatcttgcagagaagcatggctgggacagcccagagaatagacatttctgtgttcctagccaaatggcatgataatactgccaaaattttaccccagtgttttatttctgacagtggtgtctttatgtgcttgtatgccttgtgctga

SEQ ID NO: 11994 - DNA, 554 bp, Homo sapiens
  MAP TO AL121713.24; EXPRESSED IN ADULT LIVER, SIGNAL = 0.99; EXPRESSED IN BONE MARROW, SIGNAL = 1.6; EXPRESSED IN BRAIN, SIGNAL = 1.6; EXPRESSED IN LUNG, SIGNAL = 1.2; EXPRESSED IN PLACENTA, SIGNAL = 0.78; EXPRESSED IN FETAL LIVER, SIGNAL = 1.6
tgcggagagtgaaaaggaaccatattaataattgttcctaaaaatgaaataattcacccaccaaacctatatcaaaaaaaatctgtcagaatcacaagttgaaattttataccttttcttccttgcgtctgtccttcttttcttcattattttccatggtctcttcttcatcttcaacaatcccatccccttggtatttgtcatgagtccatttaggactgctacctgattttttgaagttaaagcgccctctgccacgttgaaaagtaccacgacctcttcctcttttggcccaataatccacaccatcatctctgtcgtcatgctacagaaaggttaaaaacaattgtcaatgaaatgtttcttgtaaagatgatcatttctccaatcataaatcacagtattaatcttctgaagattgggtatatgagattggtaatattctaaaacacaataaaacaaaaccagtaaaactgaatttttcaacaaaaatacattccatcatcaagagaataactacatcttactacttagcaacccaagcactgaaggtt

SEQ ID NO: 11995 - DNA, 546 bp, Homo sapiens
  MAP TO AC021880.2; EXPRESSED IN FETAL LIVER, SIGNAL = 0.6; EXPRESSED IN BRAIN, SIGNAL = 0.5; EXPRESSED IN ADULT LIVER, SIGNAL = 0.6; EXPRESSED IN BONE MARROW, SIGNAL = 0.68
atgcacctgagcagtgattgctggtgcccactggaacatgagcaggaaaggtgatgggggtggtgatggatagatcaggcagccagcaccagaacctgcccatcaaccacagcaagaaagacccccaccaaggcatgagggaccctggagtgaggcaactggaagtgcacagaaacacctacctagagaggaatcatgccgaaaattttaatccaaatcaaccaaatctctagatcagtgctctccaatagaaatacaatgcaagccacatgtttaaaactaaatattctagtagccacattttaaaaaagtaaaacaggtgaaatcaatgttaataatatattttaacccaatatatcaaatatattatcacttcaacatataatcaatacaaaaaatgagtagtgagatactgtatattttttttcatactaagtcttcaaaatccagtgtgcgttttacacttagagcacatctcaatgaggacctcatttcaagtgctcagcgaccatgtgtggctggtggccgtggtattggacagcacag

SEQ ID NO: 11996 - DNA, 589 bp, Homo sapiens
  MAP TO AC009487.3; EXPRESSED IN PLACENTA, SIGNAL = 1.1; EXPRESSED IN ADULT LIVER, SIGNAL = 1.1; EXPRESSED IN FETAL LIVER, SIGNAL = 0.95; EXPRESSED IN BONE MARROW, SIGNAL = 0.93; EXPRESSED IN LUNG, SIGNAL = 1.1; EXPRESSED IN BRAIN, SIGNAL = 1.1
aaggacagcaaatgcaaaggccttggtgttggagtactccttaagttatattaatacaaatataggagcattctaattggagttcatttgaattaataaagttaaatccattaagtcgaaatgtttttttttttttgaagttttttttctctagacaatgaagggggtatcctcaaggcagaaaaagaattactttttcttttattttttagatgttgctaaatttgcataagaagagttggatggaaggtttgacacttcaggactacagtgaacattgtaaacacaatgaatcagtggtaaaagagatgttggaattagccaagaattacaataaggtaaaagttacttctgccatttcttctttataatctttggaatatgtatgattagatgccaagcattgtgtaagtaattaaaaatagagaatcctgttttgtaaataaaatagtaaatatttgctttgcagttcatctggtctgcaactactcacccttgcctttgtaatgcaaaggcagccatacacaatatgtaaaagaatgaatgtgtttgggatctattaaaacaagcagctagccagatttgtccc

SEQ ID NO: 11997 - DNA, 540 bp, Homo sapiens
  MAP TO AC009466.2; EXPRESSED IN PLACENTA, SIGNAL = 0.68; EXPRESSED IN BRAIN, SIGNAL = 0.61; EXPRESSED IN BONE MARROW, SIGNAL = 0.48; EXPRESSED IN FETAL LIVER, SIGNAL = 0.73
cagtggcagctcactctcaccccccactacttcctgagcattgtttagtacaattcactttgctctgctaagtgcacagggaagcttcagaaagaggtttcactggaggtaggtgtatcctaccctctgcttgttgcagcaggaacagagaacagaccatcaatgatttccttctggccaggtcccactgcctcaagcccatcacaaacctcaccactgggaatctagatgtcctcaaatgtcagcatacaggccttcgtgtgctctttctagcacaaatcatcccagccattgaaaagtaaggactgacaattaccatccgccaagactttgttttcccttcttctcttggctcgttcctttgcatccttctccacagatgccaagaaggcctctgacagcagggtaatttcagatattaaaaagaaaaatccaaatactataatcagttctttagctcaaattcgaagtgttactttagagccacacgtatgcatatgcacacaggcacacacacgcacacacaccattctgaggcaa

SEQ ID NO: 11998 - DNA, 592 bp, Homo sapiens
  MAP TO AL136528.9; EXPRESSED IN PLACENTA, SIGNAL = 0.68; EXPRESSED IN FETAL LIVER, SIGNAL = 0.65; EXPRESSED IN BONE MARROW, SIGNAL = 0.67; EXPRESSED IN ADULT LIVER, SIGNAL = 0.83; EXPRESSED IN BRAIN, SIGNAL = 0.68
agaccaaaccgcagaagatgctcggagcccaacatctacaaacctgccccgccacggcccccaggctcagaaactggtttttagtcagctccaatgattagctttttttttttttcttttgtttccatagaaatgcctcttcaaagcattatgggacaacacacccacccagtttctgtaccgtggagcttcttggggaagtttcagactaggaaacaatggggctcaggacacatcaccccaaagtatgactgtaggagaccagaatacgccacccctaaatatgactataggagaccagaatacgtcaccccaaaatatgactgtaggagaccagaatacgccaccccaaaatatgactgtaggagaccagaatacgccaccccaaaatatgactgtaggagaccagaatacgccacccctaaatatgactgtaggagactagaatacgtcaccccaaaatatgactgtaggagaccagaatacgtcaccccaaaatatgactgtaggagaccagaatacgtcaccccaaaatatgccatgttgacatgttgattactttgagctaaaagcaactgagaaccagccaaca

SEQ ID NO: 11999 - DNA, 575 bp, Homo sapiens
  MAP TO AC009311.2; EXPRESSED IN BONE MARROW, SIGNAL =   1; EXPRESSED IN LUNG, SIGNAL = 1.1; EXPRESSED IN ADULT LIVER, SIGNAL = 0.69; EXPRESSED IN BRAIN, SIGNAL = 0.99; EXPRESSED IN PLACENTA, SIGNAL = 0.8; EXPRESSED IN FETAL LIVER, SIGNAL = 0.85
agccataatcaaaaggcagctctcactactttaataagtatgttgtagtcagatcttgaggtgtttataaaatagactaactagttcttacaacttagccataatcaaaaggcactctcactgctttaataagtatgttgtagcagccagctaagaaaaatctttgttgaaaaatgatatggtgctttaggagagtagaactattccaaaatcaatattatagggacagttgagggaaaattaaagaagcatcaaacaaaatactggacgttcatttaacttcctgtatggggacccatacgtaccttcccacaaagccatggacatcatcgtaactgtcatatatttcaacataatcagccaagcaacctgggtcatcttcaaggtcaaaatctaaaaaactcaggtgaatacgctgaccatacttgagtctaatgtgccagtagcagatttggttatcttcgtactcatttgggaagcctggagatttaaaaatttgctttggatctgtaaagacgccaccacactcctttgctgaaatgagaagaaaaaaaacgtaaaaaccccaaagcatt

SEQ ID NO: 12000 - DNA, 584 bp, Homo sapiens
  MAP TO AC025539.2; EXPRESSED IN PLACENTA, SIGNAL = 0.69; EXPRESSED IN FETAL LIVER, SIGNAL = 0.48; EXPRESSED IN BRAIN, SIGNAL = 0.51; EXPRESSED IN BONE MARROW, SIGNAL = 0.52; EXPRESSED IN ADULT LIVER, SIGNAL = 0.64
tgacactgctttgaccatgccccctccccgttggtgctttgtaaaaattaaatacctgaaatatagaatcattcttgactcatagtaaacactatgtgtgattttgccaacatttttttttaccttctataggatatagttttcttccactagtggactgaaggaaacaaagaaaccagtcatcatcatcatcatcatcaacaataaaacaacaatgcaaagtatctttggtgatattttcacagcccatcttataatatgaaggcttcttatcatgtattcaatgcttaacatgtcaaatgcaatgcaatgtgctctacctatataacttacatattttaatctttgctacagcactcgattccgatatttatttccttgttttactgagatgaaaacatgggctcagaaagaaagagctacttttctaagatcacacagaatgtgaaaaaggatttatatcctggtcatttcactctagggtcagtgcttgtaatcactaagcttctctattttcataaagtaggcagaattaaaaagacataaagcaatgatgtttcttatcagcatagccattgattcca

SEQ ID NO: 12001 - DNA, 545 bp, Homo sapiens
  MAP TO AL136111.8; EXPRESSED IN ADULT LIVER, SIGNAL = 0.69; EXPRESSED IN BONE MARROW, SIGNAL = 0.69; EXPRESSED IN BRAIN, SIGNAL = 0.8; EXPRESSED IN PLACENTA, SIGNAL = 0.6; EXPRESSED IN FETAL LIVER, SIGNAL = 0.69
gagaggctgctatcagtgggagtggccccagataggtgggtggctttcaggctctgaagagcacatactttggcccttgacagcagcagtggccatggcagtgtgtgtggacactgtccttaggaaacttgctagtgtgcagtcacctagatgcttatggggttggggttgctcttagcagcctcaggcaggcaaatctcaggctctggagaccacatgctttggcttcctttgtcgtagggacagtctccccagggcactgtactgcctttttcccagggtgcaggactctgtgtgggctagagtgctggggacccttctgcactgtagggtccagccagaattgtgcctctgcagtcctccaggtgtatgtgggggaatgtctgtggggctctgaagatgtggagatgctggttctgctgggcctgaaggcaaactataatcaggtggggactagattctcaaaatgggacaggcatgtagctgcttaaatctcaagcggtgtgtgggaccaggtgtaagttccccatctggagcactaccat

SEQ ID NO: 12002 - DNA, 505 bp, Homo sapiens
  MAP TO AC024060.2; EXPRESSED IN PLACENTA, SIGNAL = 0.63; EXPRESSED IN FETAL LIVER, SIGNAL = 0.89; EXPRESSED IN BONE MARROW, SIGNAL = 0.55; EXPRESSED IN BRAIN, SIGNAL = 0.62
tgtgatttgctctttagtctgttgagcttacatttttattacatatcgatcatgacactatacctatatatgtttttatatagtacctaggtgctgatatggaagaatttcatggcaggactttgcacgatgacgacagctgtcaggtgattccagttcttccacaagtgatgatgatcctgattcccggacagacattacctcttcagctttttcaccctcaagaagtcagtatggtgcggaatttaattcagaaagatagaacctttgctgttcttgcatacaggtaaaatattagagtccatttgcttaatacattccctctcatgggtaattgcagtggtcagtgttgaagccaaagcaggctgttatttcgcatgtacaggagaggttgggtaagaatgtgaggttaggaatttggttaagtagaagtttgatagtgcaagttggagtatttttgttcatttcattaccatctaactcagctcttcaccttcatacacaa

SEQ ID NO: 12003 - DNA, 584 bp, Homo sapiens
  MAP TO AC011660.4; EXPRESSED IN FETAL LIVER, SIGNAL = 0.53; EXPRESSED IN BONE MARROW, SIGNAL = 0.48; EXPRESSED IN ADULT LIVER, SIGNAL = 0.58; EXPRESSED IN BRAIN, SIGNAL = 0.56
gctcatgacacacctggaactgtactgaggatttgcattcattgttttcaacaaagtcctatgagctttgatctgttaaattaaaccttataaaattagtgacattttacaattttttgacgtaaaagttgaaattataaaatatagacataagtcaagatatacatgtagaatcattttatcttagtttctattcttattcttttattacacaatcagaagattcattttttttttccagaatgctttttaaaatgccaggttactgtagcaagtaaagtaaaaactgtcaattttgagactcattttgattctggcagagatgttctctaatccagagggaaaagactcttgaaaaacttcaaacatcatctcaatcctcagaagtgttattataatattttattcagtcaaattaacagctggattggacatattttgaaatatatttggtacaagagggtaaaaaatgacaagcactattgtgtgaagtctaaacttattgagctgaacacgatcagagcaacttctggacaggttatcacaggtgactagaatactgtgctaatgtgggtggcatcaaa

SEQ ID NO: 12004 - DNA, 582 bp, Homo sapiens
  MAP TO AL121586.28; EXPRESSED IN PLACENTA, SIGNAL = 1.1; EXPRESSED IN FETAL LIVER, SIGNAL = 1.1; EXPRESSED IN LUNG, SIGNAL = 1.3; EXPRESSED IN BONE MARROW, SIGNAL = 1.1; EXPRESSED IN ADULT LIVER, SIGNAL = 1.1; EXPRESSED IN BRAIN, SIGNAL = 1.1
aggacctagttctggggaggctgtctcacctggctcaaggccccagacggaaggagcagagtctcccccaccactcagctcaggcctgctctcacaaacagaccccagggcctgctgcagggcagagtagaggctggccagctgggcctgggcctgggcctggttcccgggctgctgctctgcggccagcgcttctagctggctctctgtgctgcgcagtcgcagctgtagttgggctgccttggcttcctgggcccacaaggaggctcgcagctgctgctccgtgatatgagacgcctccagctcctccagcagctgtgcttcctgggccagaaagtcagcctccttttccttcacctcttgccttagtaattccatctgtcaaggaagaattttacataatataagcaggaagcggataccctctcctcaggccttcccaggccagaccccactcaatccttgtacaaactctgatcagggctgggaggatttcagctcagctctcaggcaggtagaggggctctgaaatgagtgttaccctagatctaacacctggctgcctgccgactactgaacaca

SEQ ID NO: 12005 - DNA, 585 bp, Homo sapiens
  MAP TO AL161627.2; EXPRESSED IN ADULT LIVER, SIGNAL = 0.64; EXPRESSED IN PLACENTA, SIGNAL = 0.57; EXPRESSED IN FETAL LIVER, SIGNAL = 0.75; EXPRESSED IN BRAIN, SIGNAL = 1.1; EXPRESSED IN BONE MARROW, SIGNAL = 0.83
tatggcccacctcctgtaagtggcttgtcagaacctacatctttcatgctttcattgtctcaccaagagaagccagaagagcctccgacatctaatgaatgcttagaagatataaccgtaaaagatggactttccagtttaaaagatttagagaaactgtaccaacttgggatacaataagagatgaagaagatgctcttgatgaactcttgcagtatttgggtgttactagtcctgaatgcttacagagaactggaatctcacttaatattcctgctccacaacctgtgtgcatttctgaaaaacaagaaagtgatgttattaatgctatccttaagcaacatacagaagaaaaagaatttgttgagaagcactttaatgacttaaacatgaaagctgtggaacaagatgaaccaatacctcaaaaacctcagtcagcattttattattgcagattgcttcttagtatattgggaatgaattcctgggacaaacggaggagctttcatctcctgaagaaaaatgaaaagctacttagagaacttaggaacttggattcaaggcagtgccgagagacacacaaga

SEQ ID NO: 12006 - DNA, 533 bp, Homo sapiens
  MAP TO AL121889.3; EXPRESSED IN LUNG, SIGNAL = 1.2; EXPRESSED IN PLACENTA, SIGNAL = 1.3; EXPRESSED IN ADULT LIVER, SIGNAL = 1.5; EXPRESSED IN FETAL LIVER, SIGNAL = 1.5; EXPRESSED IN BRAIN, SIGNAL = 1.2; EXPRESSED IN BONE MARROW, SIGNAL = 1.6
agtccagagtccagagagcgtgctgtaaggtggtgtcctataagcttatcatgtgctcttccctgtttcacctgtaggtgattgcagtggtcatggacgtgttcacagacatcgacatcttcagagacctgcaagaaatatgcaggaaacagggagttgctgtgtatatccttctggaccaggctctcctctctcaatttctggatatgtgcatggatctgaaagttcatcctgaacaggaaaaggtttgtggtacactatatccagtttcaccatagtcaacaaatatgaccaagcatccattatctacaagctggctggtggcggtatccctgtttacaaggaagggactgaggctgtgagcaaagtcatttgcctggtcttacagaaaacaaacagtacctgtgacctggcaattctcctaggtgtctacccaagagaaatgaaaatatgggcccccacaaaaatttatgtgtgagttttatagaagcattattcataaagccaaagagtggaaacaatccaatgccaat

SEQ ID NO: 12007 - DNA, 561 bp, Homo sapiens
  MAP TO AC018780.3; EXPRESSED IN BONE MARROW, SIGNAL = 1.4; EXPRESSED IN LUNG, SIGNAL = 1.2; EXPRESSED IN PLACENTA, SIGNAL = 0.9; EXPRESSED IN ADULT LIVER, SIGNAL =   1; EXPRESSED IN BRAIN, SIGNAL = 1.2; EXPRESSED IN FETAL LIVER, SIGNAL = 0.9
atctgtggccactctcttgctacaagggcagggttgcaacagagactgtaacacgcacaagcctacaaaatttactatctggccctttgtggcaaaggttagccaacccctgccctagatacacaggttcacaaaccagctgatgataataaaccctgccgattttattcatttttacctttttccttcccttcaaagataagaagctggggatggaaccctatggtgtcccatattcacttctcatttaaaaaacaccatgaagggactggagacaggtcaagggtctcaccttcacatctacacctttctctaggcggctctctggctctgacttcatcagccagtggctgcttagattcttcaaacagtttttagtggctgaagtcttctgagggttggagtcctccactttagctaatgcctcacctgagttctcagttttggtgcgttttcctgatagtcccttgtctgcaataggagaagcaaaaagaaaagatcatgcttgttaaaggcaatgtttcataatggaaaaagcttagctttggagtcagacctgga

SEQ ID NO: 12008 - DNA, 529 bp, Homo sapiens
  MAP TO AL139352.8; EXPRESSED IN ADULT LIVER, SIGNAL = 0.89; EXPRESSED IN PLACENTA, SIGNAL = 1.1; EXPRESSED IN FETAL LIVER, SIGNAL = 0.84; EXPRESSED IN BRAIN, SIGNAL = 1.2; EXPRESSED IN LUNG, SIGNAL = 0.96; EXPRESSED IN BONE MARROW, SIGNAL = 0.7
ttcccccttaattctcagccagtatttactgagtgtgaccctgggctgggccccaggctaggtgctggggacacacagtgaggaaaacctggcccctctgagataaacccacaggccaggggcagctgccttctgacattgggggtatggggctggccctcaccctgaccatggtggcaggtgcccacccacccttcaaagcaagaggagggagggagaagtgcctgtatgttcaagagttactttacaaggacaaatgggtccatcaccttggttgacgtcagcaaagaagcatcagccaaagccttgaggtgaccccaaaagactggggtgcaggttagggggttgagacaggctcagcatggagagaggagggtaaagctcctgcagaggccccagctcccaaagatgaagctaccgcttgatgatgctgtctccagggccagagatcttcctctcatcccgcactatctgcagtcctctctggtgtgtgtggggcgcagtcattagacccatcttccaggtgaga

SEQ ID NO: 12009 - DNA, 577 bp, Homo sapiens
  MAP TO AC018584.3; EXPRESSED IN BRAIN, SIGNAL = 0.48; EXPRESSED IN PLACENTA, SIGNAL = 0.81; EXPRESSED IN FETAL LIVER, SIGNAL =   1
caagcaaggggaataacctgatcagctgtttatgttagcagaacatctccagcagcagctgggatgatgaagcatcttctcttggcaaagaagaacaccaaaatcagagaggccagttaggaggctactgcaatatttcaggtaagagttaataaggactgaagtacagcaaggacaataggagtgaagaggagacagaattcagaatttttcagaggtggaataagtaagactatatgaccaattaaatataaagagcgaataagtatgagctgagaggagtgaaaaaaaacaaacaaaaattatataaagagtaaggaagagaacagggtactctggggatttcatcttcgataaatggtgttagtcatagagggtagaaaacttgagagaaaagaaattactctaaggaaggacatctggaattgaaagctattagtttgcaattttctcgaatatttctcagtagacagaatcataagaaaatggaaggttgaattattccaaaggggaaatatttctagattgagagcaacagaaaaactgaggcgtatgctggagtgtgtgtgaatgccac

SEQ ID NO: 12010 - DNA, 577 bp, Homo sapiens
  MAP TO AC018367.3; EXPRESSED IN ADULT LIVER, SIGNAL = 0.86; EXPRESSED IN BRAIN, SIGNAL = 0.64; EXPRESSED IN BONE MARROW, SIGNAL = 0.73; EXPRESSED IN PLACENTA, SIGNAL = 0.91; EXPRESSED IN FETAL LIVER, SIGNAL = 0.75
tgccctcaagactttgttccccaacataaaagtaacatttcaatagttttcttgttttgtaaattcctttaaaaacatcacagatttttttgaagaaaaattacagaatcagaagtagccaactgtcaaaccatccagattacaatgcactaagcacaaagccaaaagaccgggtaaatagcagctgtttatggcacaggttctgaatttcaaggaccatgtacatacttgacagccaagtggatgccaatctgtttcagttgtgcagcttaataaacaatcccagcacaaatttatttgctcaagacagtgtacattggtgatctgggctgtgttcagccaggtagatctgctggtcttacctgggattcttcatgtactggcagccatcaagaagcttgactggtatgagatgatccaagatggccttgctcacatgtgtgatgttggtgctggccatgggtggggcctctcaccccacatcatttcccatcctcaagactaggcttggcttctacacatagcaggaccagggcagcaaggcagtgagagcagaagctacaaggcttcatgaggc

SEQ ID NO: 12011 - DNA, 571 bp, Homo sapiens
  MAP TO AC025221.2; EXPRESSED IN PLACENTA, SIGNAL = 0.66; EXPRESSED IN ADULT LIVER, SIGNAL = 0.61; EXPRESSED IN FETAL LIVER, SIGNAL = 0.75; EXPRESSED IN BONE MARROW, SIGNAL = 0.45; EXPRESSED IN BRAIN, SIGNAL = 0.5
agctggagttgccacaaaagggcccaatgaatatattcaagaaatagaatttgaaaacttgtctccaggaagtgttattatattcaggtatgttaattgagctcaaactgttgactttacttatatttaaaatagtttgcatatcctgttaaatttgaataaattactcctaaaaattaaccactttttaattaacattttcagagttagtcttgatccacatgcacaagtcgctgttggaattcttcgaaatcatctgacacaattcagtcctcactttaaatctggcagcctagctgttgacaatgcagatcctatattaaaaattccttttgcttcgtaagtatgccttgtttggtagagatttgccaccttaataagtaagttaccactagactgaattaagcagttttaagggtcctctatatccttgctactcaaagtacggtccaaggaccagcagtgtcagcatcacctgttgttaacattttaccctattgttttataatttgtgtgtgtacctgcatgtgtattctctctatagatatagatacacacatgcctacatgca

SEQ ID NO: 12012 - DNA, 535 bp, Homo sapiens
  MAP TO AC011294.3; EXPRESSED IN ADULT LIVER, SIGNAL = 0.74; EXPRESSED IN PLACENTA, SIGNAL = 0.75; EXPRESSED IN FETAL LIVER, SIGNAL = 0.68; EXPRESSED IN BRAIN, SIGNAL = 0.58; EXPRESSED IN BONE MARROW, SIGNAL = 0.64
ggagatgcagatggagaacctgaagagaaccagagatgcacatattcaatgaggattttctataagtaaaggcaagatcccccaaatcccacactggatcctagattaaacaaaattatagctacatctagacacactagggtggaactttgcacctcaaaaaaaaaaaaaaagaaaagaaaagagaaaaagtccaaaattctgtagaagaaaagatgggttgctgacaataataatggcatttagaatggcatcagatttctcatcagcaaaagcaaatgccacatggtagccagtaatatccacgggcttttccgcagaagttccgtgaaccctcaacagtgccagtgacctaagaagagaattctagaaaggcaaaaacaaaaaataataattttatatttatgatgacagaaaaccttacttaataacctgttttgttttgagccatttgtatggcacgtgagataggcattaatgaaagcaggttattgcataaatttaaagtaagacagcccaaacaacaacttaacca

SEQ ID NO: 12013 - DNA, 572 bp, Homo sapiens
  MAP TO AL136962.6; EXPRESSED IN ADULT LIVER, SIGNAL = 1.2; EXPRESSED IN LUNG, SIGNAL = 1.5; EXPRESSED IN PLACENTA, SIGNAL = 1.2; EXPRESSED IN FETAL LIVER, SIGNAL = 1.1; EXPRESSED IN BONE MARROW, SIGNAL = 1.3; EXPRESSED IN BRAIN, SIGNAL = 1.1
cccaataccataacatgggcaactaaatttcaacattgagttttggaggggatattcaaagcatagcagatgatatttgtgatgatgacaataatgatgatggtctttgttctaaattaagtgtgttaacccaatattttcccctttattgttcattgcctcctaattacattcaaagctatgcatattcctctgtacagcaatttaaacaatgttccctaagaacaagtacactgccttgccattgttgacagctatcagagcacctcacacttcattagaaacatataaaaacatacttggctatgagaaaacacttttttaaatgaagctagaaacagctcttacagaaatcctaagataggcctatacagtattactgattgctcatggttatcttcttggcagaaatataggacaaatgagtattgactgtatgatttcccaatgttggtggcaatgcctgctcattctttgggagctgtgagtggggatcaccatggatgctagatggccactgcctgaaagcatgtagggccaggggcattttcagtgctggtagtggcagtcaa

SEQ ID NO: 12014 - DNA, 590 bp, Homo sapiens
  MAP TO AL138914.5; EXPRESSED IN BRAIN, SIGNAL = 1.3; EXPRESSED IN BONE MARROW, SIGNAL = 1.1; EXPRESSED IN LUNG, SIGNAL = 1.2; EXPRESSED IN PLACENTA, SIGNAL = 1.3; EXPRESSED IN ADULT LIVER, SIGNAL = 1.3; EXPRESSED IN FETAL LIVER, SIGNAL = 1.4
tgacaaaatccaacatgctttcatgataaaaacactcaactaactaagcgtagaagaaaattactgtaacataataaaggtcatatatgaaaaggacacaggtatcattatattcaatggttaaaaaccaaagcttttcctttaatatcaggagcaagacaagaatgcccactcttaccacttttattcaaaatggcattggaaggcctaccaagataaaatagtagaaaaatatataaataaaatcatccaagttggaaaggaagaagtaaaattatctcttttcacagatgagataaacttacacataaaaatccctaaagattctaccaaaaaaattgttagaactaataaaaacaaattcggtaaagttgaagaataccaaatgaactctcagaaatcagttgtgtttctatgtgctaacaacaaacaacctaaaaatgaagaacaatctcagttataatagcagctacacacacacacacacatacacacacacaagacttgtacactgacaacttcaaaaacattgctgaaagaagttaaagacatcagtaaatgaaaaaccatcctttgttcttgcattggaa

SEQ ID NO: 12015 - DNA, 554 bp, Homo sapiens
  MAP TO AC013396.4; EXPRESSED IN LUNG, SIGNAL = 1.2; EXPRESSED IN ADULT LIVER, SIGNAL =   1; EXPRESSED IN FETAL LIVER, SIGNAL = 1.1; EXPRESSED IN BRAIN, SIGNAL = 0.8; EXPRESSED IN BONE MARROW, SIGNAL = 1.2; EXPRESSED IN PLACENTA, SIGNAL = 1.1
tggctgcagtgaacaaagacttagatcacaacacccaaatcccttctaatagttggaaagccttcccaagaaggatgcggacaaacaagcccaaactgtgaagactacaacaaatacctaactcttcaatgcccagacactgaagaatatccacaaacttcaagaccatccatgaaaacatgacctcaccaaacaagctaaataagacaccagtgaccaatcccagagagatggagatatgtgtcctttcagacagagaattcaaaataagtgttttgaggaagcacaacagaattcaataatagaataaaattaagaaagatgctgaaataatttaaaagacccaagcagaaattctggagcgaaaaatgcaattgacatactgaaaaatacatcagagtctcttaatgaattgatcaagcacaagaaagaattagtcagcttgaagacaggctatttgaaatacacagtcagaggagacaagagaataaagaataaaaagcaatgaagcacacttaaaagatctagaaaatagcttcaaaggggcaaatcta

SEQ ID NO: 12016 - DNA, 555 bp, Homo sapiens
  MAP TO AL121905.10; EXPRESSED IN PLACENTA, SIGNAL = 0.67; EXPRESSED IN ADULT LIVER, SIGNAL = 0.99; EXPRESSED IN BRAIN, SIGNAL = 2.8; EXPRESSED IN BONE MARROW, SIGNAL = 1.2; EXPRESSED IN LUNG, SIGNAL =   1; EXPRESSED IN FETAL LIVER, SIGNAL = 1.2
tcaataccttggggacgaagcgtatcagcgtaagaggtggctgtactgagaggggtcaggctgctcgtgggcagtgctgcttctacacatgtggtactctgagctcctcacctctccaacctgtctctccaggagaagtgtgcccagtactggccatctgatggactggtgtcctatggagatattacagtggaactgaagaaggaggaggaatgtgagagctacaccgtccgagacctcctggtcaccaacaccagggtaagatgggtcgtgggtggactctgcccacaggaaaagcagggttacccctgcctccctgatccccttttttccaaaggagaataagagccggcagatccggcagttccacttccatggctggcctgaagtgggcatccccagtgacggaaagggcatgatcagcatcatcgccgccgtgcagaagcagcagcagcagtcagggaaccaccccatcaccgtgcactgcaggtatggctcacccttgccctcagcgggagagagaaagcgaggaggggcagataggggaagctgatg

SEQ ID NO: 12017 - DNA, 523 bp, Homo sapiens
  MAP TO AC025115.2; EXPRESSED IN PLACENTA, SIGNAL = 0.77; EXPRESSED IN FETAL LIVER, SIGNAL = 0.63; EXPRESSED IN BRAIN, SIGNAL = 0.56; EXPRESSED IN BONE MARROW, SIGNAL = 0.49; EXPRESSED IN ADULT LIVER, SIGNAL = 0.59
aaccatgaccttcaggttgcctttctgtgggtccaatgagatcaacgactttttctgtgatgttcccccactcttgtccctctcatgttcagatacctttataaaccaactggttcttcttggtttatgtggctccattattgtcagtacctttttgattgtcctggtctcatacatttacatcatctcaacaattctgaggatcccgaccatgcagggacgctagaaagccttctccacgtgcgcttcccacctaacaggagtgtgcttgttttttggtactgttttcttcatgtatgcacaacccagtgccatcttcttcatggagcaaagtaaaatagtgtccatattctacactatggtcatccccatgctgaatcccctgatatacagcctgaggaacaaagaggtcaagcaggctctgagacggagcatgcagaagctgtctttgtgatcaccgtctccatggatctcctcagtcatcctggacctcgccccaaagcgctgctacccatggaggtta

SEQ ID NO: 12018 - DNA, 549 bp, Homo sapiens
  MAP TO AL137225.7; EXPRESSED IN FETAL LIVER, SIGNAL = 0.51; EXPRESSED IN PLACENTA, SIGNAL = 0.68; EXPRESSED IN BONE MARROW, SIGNAL = 0.55; EXPRESSED IN ADULT LIVER, SIGNAL = 0.77; EXPRESSED IN BRAIN, SIGNAL = 0.6
tcaccaaaacaaggagggagggagaaaagctggttgtgtcacctggggcaggtcccatccccttttctgtcttgtaggggtggtctcctaccctttctccctctcagctgctcagattgtgagcaaagagaaggcagggagagcggacaccatggcagagatgcccatggtgccctcctgctctgtcctccagcttcatgggagggaacatggagatcatcgtggccctgaacatcacagccaccaaccggcttctgcgggatgaggagacaggcctccccgtgttcaagagtgagggctgtgaggtcatcctggtcaatgtgaagactaacctgcctagcaagtgaggggctctgtggctggggaggaaggccggtccatattgctataccccccagcatatcacttcctgagccatggaacccccttaaccatgccccttcatgtcctgtgcctaaattcctgcactggtgcacctgcccacctatcctcggtgcctgtgtccatctagcatgctccccaagatggtcaacaagttcctggacagca

SEQ ID NO: 12019 - DNA, 520 bp, Homo sapiens
  MAP TO AL136962.6; EXPRESSED IN BRAIN, SIGNAL = 0.51; EXPRESSED IN FETAL LIVER, SIGNAL = 0.47; EXPRESSED IN BONE MARROW, SIGNAL = 0.56
cctatgcaaaccttcttggcattcctgcatcaaggtgtgggcttgaggtggtggcagttgaggtttttgtcttgcttcctctccttttcaggtcccaccctgagagggttgtgctcggagttgtaccactccaggagctgtgcaggagcagtcatctgaatctgagaaaagccatgtctctggacagaggaaaaaggaaaaatagcctccgtagttcaaaggagcttaggggaaattttctctctctcttttttttcctttctcttttctctctccacattgacctgaggacagcctgagacaaccaaaactgggccaaggggaaaatctctgaaaggaacctaactttttggcagtaagatctgggaaaatggtcctctgggagctcaagcatatagaaaatccccagatagcagagagctgcagaggagtatctccaaactctgtgtatccaaaagatgtcccaggctccaccaagcttcaggtgcatggaccagacacccagatgcatagcaggagt

SEQ ID NO: 12020 - DNA, 552 bp, Homo sapiens
  MAP TO AL161743.2; EXPRESSED IN LUNG, SIGNAL = 1.2; EXPRESSED IN ADULT LIVER, SIGNAL = 1.5; EXPRESSED IN FETAL LIVER, SIGNAL = 1.1; EXPRESSED IN BRAIN, SIGNAL =   1; EXPRESSED IN PLACENTA, SIGNAL = 1.1; EXPRESSED IN BONE MARROW, SIGNAL = 1.1
gaaaattgctgtctgggagccttataacacagactgctggggtttgtgggagatcaaggattatgttccctgtggactagtttgaaaaggttgaaattcagccccttcataatgtcatgctcgtagctaagaaggcttgcctttttctcttcctttgtccattttagaattaactgtggatatcggtaaaagcagcctcaccactaatacatgtggggctggggccgtgatacagcccaaggcccctatactatatatctgcatattttcagagataaatcagtctagtaaatggctaaatatagcatgttctattgtcctaccttgatgctttaaaatgtattattcaggcatgatgaggccaacagatcaggagacagctgccattgaaaagagtttgttactcacagttcccaagggctgggacatgccatgctatgccaggccacatggcgatgcaccagcattggtgaggaggtagagagagtgagggggaagatgtgggcaagagtattgcggtttctgtgagaaggaatgggaaaggcaagacaa

SEQ ID NO: 12021 - DNA, 500 bp, Homo sapiens
  MAP TO AC016648.3; EXPRESSED IN PLACENTA, SIGNAL = 0.9; EXPRESSED IN FETAL LIVER, SIGNAL = 0.74; EXPRESSED IN ADULT LIVER, SIGNAL = 0.92; EXPRESSED IN BRAIN, SIGNAL = 0.78; EXPRESSED IN BONE MARROW, SIGNAL = 0.73
gaagtgccaccaatactttgctcaaaagtttgacaaatccactgttttttaatgaaagtttttagagctcccaactcaggaagtcttacttaggaagtaaatcaaaagttacacatttcaaacagaaaaaaatgagaaattttatggcagcctgttgtgaaccaacctagtttgcatcagtggagactggaattgggacagtctaagtctcaggtaagcgaggcaaaaattcatctggtgcaagagaaacaccaccaacagaaaatacttggttcccaggacactaaagcgaaagaaattcttcacctgcaaatgtacctgctggggcggcaggggcacttctgaggacagggcacagggccagatggctggtttcaccacttgccgatgccagggcaccattttgggtcccccatcttgctctcattgtctagtgttttatggcacctctttccactatggggagctttttatccatgtcacacatctgcaagggaaga

SEQ ID NO: 12022 - DNA, 591 bp, Homo sapiens
  MAP TO AL158150.2; EXPRESSED IN FETAL LIVER, SIGNAL = 0.58; EXPRESSED IN PLACENTA, SIGNAL = 0.69; EXPRESSED IN BONE MARROW, SIGNAL = 0.56; EXPRESSED IN ADULT LIVER, SIGNAL = 0.85; EXPRESSED IN BRAIN, SIGNAL = 0.61
tttccacagtcaccaccaagtaacatctcatattctttcttatcttcaggaaagccactagtgaaaacgtcacgaatgacagtgatcaacacggagaagcctgcagtcacagtcgatataggaagcaccatcaaaacagtgcagggagtgaatgtgacaatcaactgccaggttgcaggtgagaaattaatgttcatttgttcacacgttaatggagccctgtgctaggttggggatacaaagacaaattagacacaaattctactctcagggatatagtgctagtaggaaagccaaagcatgaacctcagtcgctctgaaagtagaaagtgctacagaaatttagaggaagaaagattaattctgactgggacagataggtaaaattgatctttttatgtgtatgtttttctttaatcttagccttccatacagatagaatgtgaacctgcaaagatgggggcaaggagttccaagtggacacaggagagtgataaattcatggaagtagaaaatcctctaggctgtagagagaactgggtgagctttggtctgggtggagcccagagtgcagaaatgcaggtgggaagt

SEQ ID NO: 12023 - DNA, 585 bp, Homo sapiens
  MAP TO AC024972.2; EXPRESSED IN PLACENTA, SIGNAL = 0.82; EXPRESSED IN FETAL LIVER, SIGNAL =   1; EXPRESSED IN BONE MARROW, SIGNAL = 0.77; EXPRESSED IN ADULT LIVER, SIGNAL = 0.65; EXPRESSED IN BRAIN, SIGNAL = 1.3
cctacataattctgtccacagttcctttacttagaaattgcttatttgttcatgttaatcctatgtttattacaaataacagcatacaggtttctcccccctccccccaccccgtcatgtacagctgaatcacgtagaatttgaagatcaagatgatgaagccagagttcagtatgatggttttcgacctgggatgtacatccgcgttgagattgaaaatgttccctgtgaatttgtgcagaactttgacccccattaccccattatcctgggtggcttgggcaacagcgagggaaatgttggacacgtgcaggtgggtccctttgctgcatatttggtgcctgaggctctgtggatttcccctccatcagtcatcttaccctctcatccccctcagatgcgtctgaagaaacatcgctggtataagaaaatcctcaagtcccaagatccaatcatattttctgtagggtggaggaggtttcagaccatcctgctctattatattgaagaccacaatggaagacaaaggcttctaaagtataccccacagcacatgcattgtggagcagccttttggggtaaaat

SEQ ID NO: 12024 - DNA, 598 bp, Homo sapiens
  MAP TO AL137022.6; EXPRESSED IN PLACENTA, SIGNAL = 0.56; EXPRESSED IN BRAIN, SIGNAL = 0.62; EXPRESSED IN BONE MARROW, SIGNAL = 0.6; EXPRESSED IN ADULT LIVER, SIGNAL = 0.67; EXPRESSED IN FETAL LIVER, SIGNAL = 0.52
tcaactttcccttgcaggtcactttggtgttgctgatgaaggcacattagcaaactgggcccaatcactgtacatttttgcagaggctattgttctaattaaaatctaatgccctgagccactaatgatgacaggacagttttcagatccaagaccactaaggctccaagaagagctagatattagaggaagtttcaggaagaaatatggtctgactacattaaggagccgagtcaaagtcagagtgcacaggttacaagtaatctagggttgggagtggagggatggacagtctggaggagaaaacaaaagttgtaacaacaacaacaacagtgacagctgtcagtgtttctgctctatgcaggcattactgaattatttccaatcctccctgaagcactgcaaggtaagcatcttcattctcattttattctctttatatagaatgtacagaaatgatactttgtaacccaaatctgatacagattttgattcataacccaaatctgattcatgaaagggaattctctgttgttcaaaaacaaaataataccaagttttttcatttgtacctgctccagttgtgctcccctttcag

SEQ ID NO: 12025 - DNA, 537 bp, Homo sapiens
  MAP TO AC018993.3; EXPRESSED IN BONE MARROW, SIGNAL = 0.55; EXPRESSED IN PLACENTA, SIGNAL = 0.54; EXPRESSED IN ADULT LIVER, SIGNAL = 0.59; EXPRESSED IN FETAL LIVER, SIGNAL = 0.56; EXPRESSED IN BRAIN, SIGNAL = 0.65
ggtttccctttgaattcatcctactttacatgttttgaatttcttggagttttatatttatgttttcattgaacttgggaaattttcaggtattatttttttcaaataatctctgtccctttctccttctcttctccctctgagacttccaaaatgtgtgtgttcatttgtttgatggtgttctataggttccttaggcactatttacttttctccaatcattttttactttctgttcctcagactcagtaatttcaataggtaaaaatcttgacctatcttcaagctcagtagttcttcctcctgtctgctcagttctgtattttattccctctagtaaatttttcatgttagttattttatttttcagctctagaacttgtttgcaatttttaagattttctacgtctttgttgctatttccattttgttcattcatagtttttttcttaatttcttcctttattcttagagcatttttaagacaattgttttaaagtctttgtctagtaagtttgccatctggtttttctctgg

SEQ ID NO: 12026 - DNA, 590 bp, Homo sapiens
  MAP TO AC016575.4; EXPRESSED IN PLACENTA, SIGNAL = 0.82; EXPRESSED IN ADULT LIVER, SIGNAL = 1.1; EXPRESSED IN FETAL LIVER, SIGNAL = 0.82; EXPRESSED IN BRAIN, SIGNAL = 0.84; EXPRESSED IN BONE MARROW, SIGNAL = 0.77; EXPRESSED IN LUNG, SIGNAL =   1
acctccttgggtgggtaaagcatgggaggtggggatgcagggaagaaccctgtgacatttaagacatctaagatattcaggaaaacggaggtcagaagatgttctgattaacggaggagaaaaatcgttctcttggatgtttggtttaggctgagttgtaggaaaagattgacttagttcccaggaagctttttttgtggttgtagattccagagttcacagaaaggatcagcttgctcacagactcaacaacagtcaactcaagtgccaagaaagtggggcaaggctggatgaagcccaggtgagtgacatgggagggggtgagacaaccagaaaccagaaccttcaataggaaatgatgagccatcatacccttgagtgggcaataagccctctgaggagaattccaaaaatgttccattatttgaacaagtacaatgcctactttgaggatgggtgcatatattgctatgcttgtttaaaataaatccaatgacttatgtcatctatttctctaataataaacaacaaaaggaaaaacagctgaaaacagcccagaaaaaaataccaggttttgagttgggcagaaa

SEQ ID NO: 12027 - DNA, 586 bp, Homo sapiens
  MAP TO AL121713.24; EXPRESSED IN BONE MARROW, SIGNAL = 1.1; EXPRESSED IN PLACENTA, SIGNAL = 0.53; EXPRESSED IN ADULT LIVER, SIGNAL = 0.56; EXPRESSED IN FETAL LIVER, SIGNAL = 1.5; EXPRESSED IN BRAIN, SIGNAL = 0.95
gggggactgtaatcaaagaggtctttgagcttttcagactttacctgctcaggtgactgagtttctttctttactgttattctttcagaatttttgtcttcttctttgtgcttatcttttgtagtgctaggcctttccactacatatccagtctctttaagtttataatttttttcttctctaaatccatcactttctctattgcctttcagtgaaactttggacttgtacttgagtccttcctcctcagtattccggtgagatgcagtagcaaaacttttaccctgatctgcgaggactgacttcctgaactgtctataatcctctgtctcctctgtgtcatccccttctgaatcattaaacttttgttttccagactctttatcactgaagtaatctagagcttcctgatcttcccattctccctctgccctccctttctctgatcctttctcttttgaagcctctttatccctggtattacccctatcaagcaggaatactctagactcttcatctgtgaacctgcgaataagcaaagaagaggatagtaactctggattgcattcactgtagatcgcttcca

SEQ ID NO: 12028 - DNA, 539 bp, Homo sapiens
  MAP TO AC026412.1; EXPRESSED IN PLACENTA, SIGNAL = 1.2; EXPRESSED IN FETAL LIVER, SIGNAL = 1.1; EXPRESSED IN BONE MARROW, SIGNAL = 1.1; EXPRESSED IN LUNG, SIGNAL = 1.2; EXPRESSED IN ADULT LIVER, SIGNAL = 1.2; EXPRESSED IN BRAIN, SIGNAL = 1.1
cctcagcttgtactggaggcgtgtggccccatgaagcccgtagtcaccgttcaccctgagagacgctggctttggggctcacacgcctgctgtggggcagccccaggagatggccaccctgtttctcctggagctggagctgcgtgtgttctcagaaactgtggtggctgttctcttttgtttgcatcttataaacctttacctgattacattttcctcttcaatttagctggtagaaaacttaaagtcagattggtggctcgccagtaatgagagtttagagtagaggtaaactttatgacatagtcttagactcttcactttctcctcagccaacatgattcacatttactttattttgctgtactgtgagtgtctttgtgttccctgaattctttctggaataaggcaggttgttagtaagcacaggtttctggtccatctcatagcctcaggcagtgggcggtgctgtccgtgctccctttctgggttacctgcggtagctctgaagttgcagggctgcgatttgaagcctgatt

SEQ ID NO: 12029 - DNA, 546 bp, Homo sapiens
  MAP TO AC019083.5; EXPRESSED IN PLACENTA, SIGNAL = 0.64; EXPRESSED IN ADULT LIVER, SIGNAL = 0.54; EXPRESSED IN FETAL LIVER, SIGNAL = 0.52; EXPRESSED IN BRAIN, SIGNAL = 0.54; EXPRESSED IN BONE MARROW, SIGNAL = 0.57
tgtgtgtgtgtgtggtgtagcacttaattctttagtaataacaatgaaagttagcgtaattggaaaatttgtttctccatcaatcatttagaatgtttggtggaaaagtgatttttctggactatgcagataactatctcatcaaggccttgacatgtgtggacatgacctcacccatggtggtttccaggatttggatgggaaccagtttccgcctatttcaccacctcaggagaaatgcgaggtattcttcccgggggcacccagtcagcgctgcatctacccgagagtccctgcccagccatgcaatcatttctgaaactaatgagatcagcagcttttcacgaaaccatgagtcatacctattggtgaggctttccaggcttgaggagtgccttgaagtgccggcttcaccagatgttctggcatcaccaatccttcccctaattctgagtgccacatctgacccactgccaacggtcacaaggtcgccagcggccaaaaatcaccttgggcttcaggtaaggacctgtaaaatcaaggcaa

SEQ ID NO: 12030 - DNA, 537 bp, Homo sapiens
  MAP TO AL118520.12; EXPRESSED IN BONE MARROW, SIGNAL = 1.2; EXPRESSED IN ADULT LIVER, SIGNAL =   1; EXPRESSED IN BRAIN, SIGNAL = 0.98; EXPRESSED IN LUNG, SIGNAL =   1; EXPRESSED IN PLACENTA, SIGNAL = 0.91; EXPRESSED IN FETAL LIVER, SIGNAL = 1.3
caaaacaaaaccacagcacaagtgttgcaaaatcttgcataaatcagggactgacctttgtactctcctttcagggccttaccttttatcgtagtcaaaatgaagaaagcaatgagggtgttgttgatggcacaggtagacttggcaacacaagacaaaatcgtgtaaggatttaagagatagctggggaagaacaaacatatttggcattagtaatcctgaccaaggagccctcgccattacagcaaggaagttccaagagatttattaaaagcttacgcaaaggaaggcagcttctcagaaatgagttcccccaaataaaagagaatagagtgggggttgaggctgataagtaaaaggtactgaacatggactgcctattctgttctatggagtatatggaaaactgttgtatttaatcatcacagagatcctgtaactcacaataacatcattccagttttgcagatgaggaaacatttgcaggtgacattcaagaagcagctgagtctcaatggtaaagcgacttgcccaaaa

SEQ ID NO: 12031 - DNA, 562 bp, Homo sapiens
  MAP TO AC026405.1; EXPRESSED IN PLACENTA, SIGNAL = 0.67; EXPRESSED IN ADULT LIVER, SIGNAL = 0.56; EXPRESSED IN FETAL LIVER, SIGNAL = 0.51; EXPRESSED IN BRAIN, SIGNAL = 0.45; EXPRESSED IN BONE MARROW, SIGNAL = 0.45
tgatgatggcaatggaactcataataatataaagaaatgcattagcaaacatggaagctcagaaaggctctatctttctcttgcactctgcagtaccagcttgaggacaagtcacataataagctcacaagaatactttttgattggtgatgaaatttcatcctgatgattctctttatcatagtgaataaagaatggtttatggcttctaataagattgcaaagttgaaaaatcactaagttcaattacatctctaggaaagaattgctctgagccttcccaaagccctgaacacagtccccagcaatccctgtgcacttacggctgaatttcctgcatatttccctgctctggctagtctcctgccatgggagccgatgcagaacagcaccacctctctttttaactcgcccacctttcctgaccacattcctctcggcctcctcacgtttgtaggtcaaaccctggaaaggccacatttatcagagacaattgactcaaaaggcataaagaccccccacagccactcactgctgtactagccccttagtcctcattcct

SEQ ID NO: 12032 - DNA, 535 bp, Homo sapiens
  MAP TO AC010905.3; EXPRESSED IN PLACENTA, SIGNAL = 1.1; EXPRESSED IN ADULT LIVER, SIGNAL = 1.4; EXPRESSED IN FETAL LIVER, SIGNAL = 1.1; EXPRESSED IN LUNG, SIGNAL = 1.3; EXPRESSED IN BRAIN, SIGNAL = 5.2; EXPRESSED IN BONE MARROW, SIGNAL = 1.2
tgtccctaggctacgcaaagcaggagggtcctgggctaggtccaggaaagcatttttaccttttagaccttcaggcttgtgatgggaggggctgccatgaaggtctctgaaatgctctggaaacattttttccattgtcttgctagttaacatttgactctctgttattaatgcaattttcttcagtgggattgaatttatccccagaaaatgtttttattttctgtcatattgagaggtgacaatgtgctagcagccctcactctcggcacctcctcggcctcggcgtccactctggctgcactcgaggagcccttcagcctgctgctgcatctggtggaggcctttgaggctggctgagtctggagccagctccctctgcttgccgtgaggtggggagggagaggcgtgggcaggagcggggctgtgtgccgcgctcgcagaccagtgtgggttccaggtgggcacgggcttggtgggccctgcactcaggaaggccggccggtgactgctgggcttgactgggggatgagct

SEQ ID NO: 12033 - DNA, 525 bp, Homo sapiens
  MAP TO AL158088.6; EXPRESSED IN PLACENTA, SIGNAL = 0.86; EXPRESSED IN ADULT LIVER, SIGNAL = 0.82; EXPRESSED IN FETAL LIVER, SIGNAL = 0.76; EXPRESSED IN BRAIN, SIGNAL = 0.76; EXPRESSED IN BONE MARROW, SIGNAL = 0.64
tggcatatccaagtgtgtttgtgtaggtctgtgtgtgtttgttagagagagagagagagaaagagaagaagaaggaggaggaggaggacgaggaggaggaggagagagattgtattattcaattacagcagacactgttagttttctgtgtaatacccacttttacttctttgttaacaatgaaatctcaattttatttgggatggaaatgtacccaggtgtgaaaaaacacatattttccagactcctttgcagctaggtgtcattgtgtgtcatggttctgggccatgcggtctaagtggaagttttctggagattttataaaaatttttgtctcttaatatgagcagttgccctgatttcttgtcctttcattcatcttcttgcttggaacttagcccatgagattgcagatggagactattacaatgaaaggcccatcctaaggatggcagacagaaataagagcaagtccagggcattaatgaatttgtagaactatgtcttcaaccgttatgggagaaa

SEQ ID NO: 12034 - DNA, 506 bp, Homo sapiens
  MAP TO AL157396.2; EXPRESSED IN PLACENTA, SIGNAL = 0.58; EXPRESSED IN ADULT LIVER, SIGNAL = 0.61; EXPRESSED IN BRAIN, SIGNAL = 0.5; EXPRESSED IN BONE MARROW, SIGNAL = 0.48
gtcaaatgtggaagggatggagttaaagcatagtttttttcatttttttgtttctattctttatgatccaagataagttatgatctctttaaaataactttttatatctatatttcttgtaagcctcatggtaaccacaatgcaaaaacctgtaatagattcactaaaaataaaaagcaacaaattaaaacatactaccagagaaaatctcttaaccacaaaggaagacagtaagaaaagaagcaaggagttacaaaacaatcagaaaataagcaacgaaatgacaatagtaagtccttgcttatcaataataacactgaatataaatggtctcaattctccaattaaaaggcatagaacagcagagtagatttttttttaaaaaagacctaaatatgtactgcctacaagaacccacttcacctataaagacatatatagacagaatgggaaggggtaaaaaaagatgctccatgcaactggaaaccaaaagaagaccaggagga

SEQ ID NO: 12035 - DNA, 572 bp, Homo sapiens
  MAP TO AL133372.2; EXPRESSED IN LUNG, SIGNAL = 0.83; EXPRESSED IN PLACENTA, SIGNAL = 0.66; EXPRESSED IN ADULT LIVER, SIGNAL = 0.7; EXPRESSED IN BRAIN, SIGNAL = 0.64; EXPRESSED IN BONE MARROW, SIGNAL = 0.6
tgaacaggtcccagttgatgacttccactatttgcataacttattattgccaaattattaattggtaatggtttagggagactgaaataaactggcaatatttaattttatttccagaaatgtagtgatgtataaacaagacaaatttctcagagccatagttctgaatgatggctgtgggatacaatcccccatgacctgcccccttatacttatggctgtaataaatgagaaaattcccacaaaggtgctgcatgggtaagcagcacctggccagggaaaataggactgtaaggtaccagtggtcagggagcgggaatggggaggcgggctgaagaacttccatcttatgtgctagtttcttgaaagttaaaatagaatattttctattcagtcattcatttatttcttaattcttagttgcctattatagatgaactaaattctgtagaaaatatatggagcacataatagggaaatgagtaacataggattgaattaatgagtacacaaaaacttacttaaaaacaccctaacccttacaatcacaagggctctggaaaatgctcttg

SEQ ID NO: 12036 - DNA, 593 bp, Homo sapiens
  MAP TO AC025516.2; EXPRESSED IN PLACENTA, SIGNAL =   1; EXPRESSED IN ADULT LIVER, SIGNAL = 1.1; EXPRESSED IN FETAL LIVER, SIGNAL = 0.82; EXPRESSED IN BRAIN, SIGNAL = 0.74; EXPRESSED IN LUNG, SIGNAL = 0.94; EXPRESSED IN BONE MARROW, SIGNAL = 0.87
gtcactagagggcagaagccattcatgtgagaaagtaaagaataattcaagcattttctataagaggttttggggatttttaaatgttttagaaaggtgtccaagtaacagaataggatacttgctataactctatctaaactaaacttcaatgaaatcttatttttggcttaaacctagatacaaaattacatctaaagagtttggaaaaaaaatttaattcgacatgaaaaaatttcattaagctaaacattttaggaaatataaaagtcatattaagtttacttacaattgacattagagtcagtatatagttttgcaaattcgatccatgagcagaaaccactttagcatcagctgtaaccataatttcaatgtatcttggatatgatataagacgttttttcctggaatgtcttctttcatctttcaatggtacattttttgatgtgtgtcctaaaactctttctttcattacattaagatcttcattcatgttgctgtaggtatgaaagggtaaactggtttcctttatttgactttctagggagaaaaaaagaatataatgcagagccattaaattggatgtgacg

SEQ ID NO: 12037 - DNA, 504 bp, Homo sapiens
  MAP TO AL133386.3; EXPRESSED IN PLACENTA, SIGNAL = 1.1; EXPRESSED IN ADULT LIVER, SIGNAL = 0.82; EXPRESSED IN BRAIN, SIGNAL = 0.73; EXPRESSED IN BONE MARROW, SIGNAL = 0.66; EXPRESSED IN LUNG, SIGNAL = 0.84; EXPRESSED IN FETAL LIVER, SIGNAL = 0.51
aaatctgctggtcttgtgggaagacagggacctcagtcaaaacaaccattcatggtggccttcttcaaggcgagtgaggtacttcttcgatccgtgagagcagccaacaaacgaaaaaatcaaaaccgcaataaatccagctctcatcaggactcctccagaatgtccagtgttggaggtaagaataaacccgagcagcagttatgcacagagagttatggggtcgtatgctgcaaatcaagtagccacaataaatttaccctctatgtataccttcggatggtacattaaatcttccagtgatgtttctagcatcccagaatgtttcatcagtgaatcactcagtaattcattttaaaatacatatgagttgccttcatatgttgaaagattcagttcaaattaaagtcaagatgacagtaataaaattatgaaatggctaatcaacacaatctagccagaactgagctacatgacttgctgagctaacttcctcagggcctt

SEQ ID NO: 12038 - DNA, 521 bp, Homo sapiens
  MAP TO AC018761.2; EXPRESSED IN BONE MARROW, SIGNAL = 2.2; EXPRESSED IN PLACENTA, SIGNAL = 0.66; EXPRESSED IN ADULT LIVER, SIGNAL = 0.67; EXPRESSED IN FETAL LIVER, SIGNAL = 0.56; EXPRESSED IN BRAIN, SIGNAL = 0.56
cacccccattacaccgtaaggatcccttccccagatgacgatcccccactccgcatgccaggctaggcagtcaccaacccctgtccttgctgttcccccaaaacctttcacctccccttcgcccttgctttaaccgacactgggaaccctgcctttatcccagtcctccaaagtccagcctcctctgagtggcaataactttctcagaaggtgaacacggtgcagtttaatgaagaggccacagttatcctgtccggtgagtctggggcctaagcacgggggcccagggtgctgccctccccctccaaacctgacctcaccatcatgctggcctcacaggctctattgattccagtatccgctgttgggattgccgctcacggaggcctgagccagtgcagacgctggatgaggccagagatggcgtgtccagtgtgaaggtgtcagaccacgagatcctggcagggtgagtggagccaggacctggtctcaccccaggtgctacggggaatcatagctgc

SEQ ID NO: 12039 - DNA, 521 bp, Homo sapiens
  MAP TO AC007957.34; EXPRESSED IN ADULT LIVER, SIGNAL = 0.74; EXPRESSED IN FETAL LIVER, SIGNAL = 0.61; EXPRESSED IN BRAIN, SIGNAL = 0.7; EXPRESSED IN BONE MARROW, SIGNAL = 0.56; EXPRESSED IN PLACENTA, SIGNAL = 0.78
ggctgcaaaaggaagcatagaggcggctgccaagtgaggccatccactcccaagaacatgcgggtggtggggaaagagggttggccaggatgccgaccgcagccaggggagagccgggcccggccatgaggggcgggacctttccatccagggcacagccagcgaggccccgggatgggagggcgccgctagggtgggacctttccatccagggcacagccagcgaggccccgggaggagagggcgccgctagggtgcccggtgacactcgcacgtcacagggccagggtaagacagacgaggcaaggcacctagacaagaagaagagctccgaagacaaaagcagttccctggacagtgacaaggacctggacacagccatcaaggacttgttaaggtccaagtgaaagctcaagaagaggtccagggagcccagggctgtgtgcaggaagaaggtcaggttcagcacctcccagacgcacttccaggagcagctgggcaggctcctgagagagtggaaa

SEQ ID NO: 12040 - DNA, 527 bp, Homo sapiens
  MAP TO AL138934.2; EXPRESSED IN BONE MARROW, SIGNAL = 1.2; EXPRESSED IN LUNG, SIGNAL = 1.1; EXPRESSED IN ADULT LIVER, SIGNAL = 1.3; EXPRESSED IN FETAL LIVER, SIGNAL = 0.94; EXPRESSED IN BRAIN, SIGNAL = 1.2; EXPRESSED IN PLACENTA, SIGNAL = 1.1
acagggaaggaagaaaaggggacatgattttttgctactaagaaaaataaaaatagatctctttaaatttatttaaaagttttaatcttcattataaggtggcattttggttgttaagcccacagattctcagtcagaccatgatggtttaaaagttagctccgctattttagctgagggcaagtcacattacttttgtaagtttcattttcttgattggcaaaatggggataataatagtacttaccttacaaggtttgaatgaagattcagtgtgaaaacagaagcatttacctcagtaccaggcacctactaaattcttaaaaatattaaagtttatgatttctcatttacctgaggatcaaaaagaaaataaagacgtcccttcttcaactgaagtgcaaaatactcttcctgattgccaggtgatgctgcaaagacaatcaaaccttcaggcacttttgttcgaaagctggccttaatgcctggtaagacaagtgtgatcagcaaatcagtgctggggtttt

SEQ ID NO: 12041 - DNA, 534 bp, Homo sapiens
  MAP TO AP001434.1; EXPRESSED IN BRAIN, SIGNAL = 0.47
aacagcaaatatccatggggtgccataatttataaaaattatgtgtttttacaagaattatttacttgtcacctcagaggaaactcaaaaggaatatgactattagccctcagcggaagctgaaatgtatcacctatcgtaaggtatctagtctatttcccatgatgtttactttttgtgtccgagaatgttgcatactctcattcaaagtctttcccagaaaggaccagttgataaagccactggctctttccagcatcacgcctgtactgatgccacagtggacagcctttgatgccacaggaccacagctcaatctcctgattgtgaggagaagagtgggggtgttctcactgccccagggcattactaaaacaggtttgatcagcaagacattaaacaacagagattaggcttaggaatctaatatgccactatgtgcttactgttgtccaaatattaggaaacacaatcccagatcagtgggttagatttgtgttcaaggggacaagttggaatgtgatgccctcactt

SEQ ID NO: 12042 - DNA, 594 bp, Homo sapiens
  MAP TO AC015592.4; EXPRESSED IN PLACENTA, SIGNAL = 0.83; EXPRESSED IN FETAL LIVER, SIGNAL = 0.94; EXPRESSED IN BONE MARROW, SIGNAL = 0.74; EXPRESSED IN ADULT LIVER, SIGNAL = 0.86; EXPRESSED IN BRAIN, SIGNAL = 0.8
ggtacaacctatcctcccccgtgctgttatatctctgttcctctccaccttatcacaacctcaatcagaactcatagttcatctacaatttcttagcttgaaggaacattagctgtcacctagtattctagggtatctaggaaccgtacttccttttcagtgtgaagataaggaaagcaagaccaaggctaactgcaccagctggtcatacccattctacaccacaccagcacctttctcctcagcatattatctctcctatactacacattacaactgaatgtaccaaattgagacttaaacaggatggttacataatttgttttataataaatactcataaggaatatatattcttatcatataagaacaaatttaaaatgattaataaaaacaaaatagtaaaacagcattttaaaaaccaattgtatctcttcttcaaatataaactcattcatccattcatctcattcatctattattcattaaacaaatatttattgagtagtttttatgtgtcaatcactgttctagatgttgaggggaagaaaataaataataaaatatttagcatgccgaatggtgttaagtggt

SEQ ID NO: 12043 - DNA, 579 bp, Homo sapiens
  MAP TO AP001429.1; EXPRESSED IN LUNG, SIGNAL = 0.95; EXPRESSED IN FETAL LIVER, SIGNAL = 1.7; EXPRESSED IN BONE MARROW, SIGNAL = 1.4; EXPRESSED IN PLACENTA, SIGNAL = 0.84; EXPRESSED IN ADULT LIVER, SIGNAL = 1.6; EXPRESSED IN BRAIN, SIGNAL = 3.2
aaccggttcttgaggatgtgaaaccaacttattgggctcaatcccatttggtcacaggatactgtacgtatcttcctttccagagatttgatatcacccagacaccgccagcatacataaacgtgttaccaggtttgccccagtacaccagcatatatacacccttggccagcctttctcctgaatatcagctaccaagatcagtaccagtggtgccgtcttttgtagccaatgacagagcagataaaaatgctgctgcctattttgagggtcatcatttgaatgctgagaatgttgctggtcaccagattgcctctgaaacacagatccttgagggctctttgggaatatctgtaaagtcacactgcagcacaggtgatgctcatacagtcctgagtgagtctaacagaaatgatgagcactgtggaaattctaacaacaaatgtgaagtaattccagaaagcaccagtgcagtaacaaacattccacacgtgcagatggttgccatacaggtaagagttaaatagaaaagtcttcttaatactgaagttaaattttccttttcatttttcattgccg

SEQ ID NO: 12044 - DNA, 553 bp, Homo sapiens
  MAP TO AC026707.2; EXPRESSED IN ADULT LIVER, SIGNAL = 0.73; EXPRESSED IN BRAIN, SIGNAL = 0.67; EXPRESSED IN BONE MARROW, SIGNAL = 0.64; EXPRESSED IN PLACENTA, SIGNAL = 0.69; EXPRESSED IN FETAL LIVER, SIGNAL = 0.81
cccagaagaacctcaacaggtgttaatggaggaaatgatgtgtaacagtgattgtgtgcacagacacgttcattacctggcccatgaaatctgtgaagaacagcatgttggacaggaaggccgtccatccaatgaggtggctgatgcaaaggtagcggtagtgaggaggcatgttcaccagtgctctcagcagtgactttaatgtcattgccctgcgagtctgaaataaaacatgaaacagaggtgtgatcttcactgcagaaactcagccagctaagggagccagaacacacagacatgttatgtatttgtcagtcagccatcacacaaagtgtcacttttcctggacatggaactaggtttccatggagtagactcacaggaggtattctgttaagcacgagtggctgcttggcagtttcaggcccagaatgaggctttggacacaagggcaaagggaatgagaatggtgctagcttcaggccaaggtataggagacattgagcatcctatgtctgaatgacagaactgttgcacaaggacaaagctcaca

SEQ ID NO: 12045 - DNA, 540 bp, Homo sapiens
  MAP TO AC021970.2; EXPRESSED IN PLACENTA, SIGNAL = 0.54; EXPRESSED IN FETAL LIVER, SIGNAL = 0.49; EXPRESSED IN BONE MARROW, SIGNAL = 0.45; EXPRESSED IN BRAIN, SIGNAL = 0.86
ttcagtccttttggaatggggtcagggcagtggtatttttttttctctgttccccaggtgcagctatggttgactcactgctgcctgaagcttttgcaatccatgctaatgggagatgtgttggaggggaaccttatgcaatgtgtagaaaaggaggcaaagacgttgaacccagacctggtcattctcagcaggagttcacaattgcaatttgtggatgctgtaagcatctctgtgatggtcaggagtatctacctgcaagataaaggaaaaagaattttactaatgttacatgattggctacttgatgcaggatcttacctggaggaacatcattcatttaaataaaaatgaaaacaatctgctgtgaatcactgtgttcaatcagtgcttctcaaacatgaatgtgcacaggaatcatcaggggatcttgtaacgatgcaggttttgatttggtggatctgggttggggcctgagatgctgcctttctaataagctcctggggaattgtctcgggatgacaatttgagtggcagggt

SEQ ID NO: 12046 - DNA, 509 bp, Homo sapiens
  MAP TO AC009549.3; EXPRESSED IN ADULT LIVER, SIGNAL = 0.83; EXPRESSED IN BRAIN, SIGNAL = 0.96; EXPRESSED IN LUNG, SIGNAL =   1; EXPRESSED IN PLACENTA, SIGNAL = 0.95; EXPRESSED IN FETAL LIVER, SIGNAL = 0.91; EXPRESSED IN BONE MARROW, SIGNAL = 0.92
gattccaagtaggggaaggcgggctgaaaatagtgtataagagattcatatcaggacatggaaaaggatgaagactggaggcctacctggagactgttggtaatcctggtactgctactgatgatggtaatgggaggctgatggtggtagttgtgatagtgatagtgatggtgatggttaacgtgtattgaatgcttaatatttgccagatactagtctaagaattttacaagcatgaacttgtttaatgctcacaacaatcttataggaaaggtactgtaattagccccatttttagttgaggaaatggaggcatagagaggcataagggtctgaaatagtggtggactttgaggctggagaataacaagcagatgtaagagccattgaaggaagaactagggcagaatctggtgaccatgtcgagaaagggataaaggaataggagagtctacaatgaattcaaggtaacctattgatcttttataggagccaacttcctggtggta

SEQ ID NO: 12047 - DNA, 508 bp, Homo sapiens
  MAP TO AC022313.2; EXPRESSED IN LUNG, SIGNAL = 1.1; EXPRESSED IN PLACENTA, SIGNAL = 1.1; EXPRESSED IN ADULT LIVER, SIGNAL = 1.4; EXPRESSED IN FETAL LIVER, SIGNAL = 0.97; EXPRESSED IN BRAIN, SIGNAL = 0.86; EXPRESSED IN BONE MARROW, SIGNAL = 0.87
ctgctcccattttctcatgcgtaagttggtgatagcaaaggtaatattggaggacattaagtgacgggcactggcagtgctgttggtgttcaagacccagatcattaaagctatttcaaaagaacttctttgaccacctgagacactggttgtcacttcaccaatttctattattgcaccaattacagtttgtttatctacgccttttattagactatcaactgtgtgaaggttcatagttcaagctccttgccctgccatatctcaacacagagcttgctatgagccctaggcattcaataaatgcatgtttaatgttaattatagtcacaagaagggcttgagagttagagagtcactgattaaataacaatttattttccatattaaaatataaaatcagatttccttacaatagttagttgtgatagaattacagatgggttagtaattcaagacatttccaaacaagactctcttgtagcctcccgctgaggtcttcttgaag

SEQ ID NO: 12048 - DNA, 507 bp, Homo sapiens
  MAP TO AC013317.4; EXPRESSED IN ADULT LIVER, SIGNAL = 0.74; EXPRESSED IN BRAIN, SIGNAL = 0.73; EXPRESSED IN BONE MARROW, SIGNAL = 0.61; EXPRESSED IN PLACENTA, SIGNAL = 0.66; EXPRESSED IN FETAL LIVER, SIGNAL = 0.9
catgttggtctggaaactgcaaattcaaataaaaactagccaccgtttttcatctaacagactagcaaacattaagaaatggataataccataatgagcagcctttactgagtatatactatgcgacaacattcttctacatagttatttttttctcatttaacttttgatctaacttttatctccattttatagaaaatatcagtaatttttctcacatagtaggtggcagatctaggcttcaaatcaggcagtctgaccccaaaactcattattttaactaccattttatactgcttctctgtaagaattctgtctgttgtaacggccattcctcctgcttccctacaggcactgaccaattcacaaactagtcataggagtaaggtagaaatttagaaatctattcttctattatggtggttactaaaattgttacattagtacttttctttgtcaccgaactgaacacaattatcctaaagctcacctgaagacaatcctccc

SEQ ID NO: 12049 - DNA, 508 bp, Homo sapiens
  MAP TO AC015638.4; EXPRESSED IN PLACENTA, SIGNAL = 0.63; EXPRESSED IN ADULT LIVER, SIGNAL = 0.65; EXPRESSED IN FETAL LIVER, SIGNAL = 0.55; EXPRESSED IN BRAIN, SIGNAL = 0.67; EXPRESSED IN BONE MARROW, SIGNAL = 0.56
gctcaacagcatttactgcgaacaaaactaattttaattcagggtaattattttcttattccacatcaaatagttaaatatcacatttttaagatctttattcttatatctttcctatgtgttgaatcaagactgttcttgccctgatcagataaaaatcaataatattgagatcaaagtcttcaaacatcacatgctaatttgaagttgtatgcaagcctaaagctagtgtgtaatacctttgttcttttcctcttaggcatttatgtccatgttccagatcctcacccaggaaggatgggtggacgtaatggaccaaactctaaatgctgtgggacatatgtgggcacccgtggttgccatctatttcattctctatcatctttttgccactctggtgagttcagcatttttttttcaattatatcttggaatttataatgggatgaacatcaacagatatttggcctattgtcaatttcaaaatgggagccaaaggactaatgca

SEQ ID NO: 12050 - DNA, 530 bp, Homo sapiens
  MAP TO AC021811.2; EXPRESSED IN PLACENTA, SIGNAL = 1.1; EXPRESSED IN ADULT LIVER, SIGNAL = 0.97; EXPRESSED IN FETAL LIVER, SIGNAL = 1.1; EXPRESSED IN BRAIN, SIGNAL = 0.95; EXPRESSED IN LUNG, SIGNAL = 1.2; EXPRESSED IN BONE MARROW, SIGNAL =   1
tcaagccattgtgtctggtgaaaatgttagtgcactgacaggatattagcagttggaggccagcacaaggacttctggaatgtggctgcctgcatttcttcattttgtagaagaatgtagctgttacctgcaatacctgggaagtctggaacacccatggtaaccagttcaatcggatccatgaagaaggcccccatcatgctggccaaggtgaagtcaaccagagtgcccagaattctacaggggatgatggagccaaagatacccaaacatgctagctcccaaattccctagccagtctcagcattgtttgtcatagctgtactatttaatattttcctcacatcaatgttttgctgaaatcaagtaacaggaaatgaaaatgataaatctctatggaacaaagtggaatcaaaaacatggaaaccaaagtatatgaaaaactccactagaacagaatggaaaatcagcagcatttgccatgaacagaaacttcctgctttagattctgagccagaggcctttagagg

SEQ ID NO: 12051 - DNA, 517 bp, Homo sapiens
  MAP TO AC009334.3; EXPRESSED IN ADULT LIVER, SIGNAL = 0.65; EXPRESSED IN BRAIN, SIGNAL = 0.51; EXPRESSED IN BONE MARROW, SIGNAL = 0.77; EXPRESSED IN PLACENTA, SIGNAL = 0.63; EXPRESSED IN FETAL LIVER, SIGNAL = 0.55
ccctttggttaggcagtttgttcagtctgcagactgtacagttacactcagtagccatgatgctaaaagcctgtatacacctgaccatttcgtttatttagagaagagttatcaggtttgggacctaaaagtgaatactgaactatctgtgctctgtactgagaaacaggagagaggtggatattcacagacagacctttcgttaatccctgtattgtcggccgcactgtcactttctctccagaccttagatggacagctcggcttcttactgctctgaacctctttgtaattcaaaggaattctaggttgcagctttctcttatacatctacttttccatcttcaagaaatatttttaaatctcttactagatgtgccccaatgcccactgcccccacatatttttgctgttacggatttcttccttcttataattctgtactttaatgctatgagttttcagtagtacacagaagcaagtgtatatatccatttccccatttttaactggaacc

SEQ ID NO: 12052 - DNA, 518 bp, Homo sapiens
  MAP TO AL118502.29; EXPRESSED IN ADULT LIVER, SIGNAL =   1; EXPRESSED IN BRAIN, SIGNAL =   1; EXPRESSED IN BONE MARROW, SIGNAL = 1.1; EXPRESSED IN LUNG, SIGNAL = 1.4; EXPRESSED IN PLACENTA, SIGNAL =   1; EXPRESSED IN FETAL LIVER, SIGNAL = 1.2
atcatagcatgggtcatcccattcctgggacctttcctaataatatgcctaggactaatgttcttaccctgcctaattaacctttttcaaagatttttaactgacaggatcatggccatttcacagacaactacccaaaaacatccacagacagcgttactgctacagttaatccaagaccagaaaactctgtcccctcatcagcaggaagtagccagaaagaacaccctgcctttcatcctttttataactataaggtctggattgacagagcaggagcattgccatcttggacaagcactgccattctaaagttccccttgatcaaaaaccacctaaatccaaagggcatcagcctaatggctaaggtcagcatgaccataaaccacaaatgacatctctgaccagaaacattccaaccataagttaaagccctccccgaccagagacgtgccagccccaagataacctcccctccaggtggagagatgtcagccccaagataccgtcccttccaa

SEQ ID NO: 12053 - DNA, 570 bp, Homo sapiens
  MAP TO AL158138.1; EXPRESSED IN ADULT LIVER, SIGNAL = 0.6; EXPRESSED IN BRAIN, SIGNAL = 0.67; EXPRESSED IN LUNG, SIGNAL = 1.1; EXPRESSED IN BONE MARROW, SIGNAL = 0.83; EXPRESSED IN PLACENTA, SIGNAL = 0.71; EXPRESSED IN FETAL LIVER, SIGNAL = 0.66
tttgctttcctcacatgatcctattttagttactgctccctctatatttagaaaaaaaatggcaagaacttaccttttatactgctattgaaaatggtaatacaaacttcttttgacttttcagttgtaacaccccacacatgtaagactccttctgctgaaacacagtactgagaattcagtgaggatactggaatcgctaactggcactgaatctcgtcacaatcatcttccttctgcgtgagtattttatactggatctagatgaaaaaagaaaacagtgaaaatgcacagcttcttttaatctgaaaaaaaaaaaaaatcaccatattagtcctggtcaaacaactgaagaaatatatatgattgacttgaacatgtctaaaaatagctttactatcaataagtcaatttgttacttcaacacagcacgatactatgcatctgttatattccttataaaaatggtaaatttaaaaactcaaattgcaggaatgtttattgttagttgttaaactaacaaatgttcatttgtcctattcatttgtccagaaatttagctggtgggaa

SEQ ID NO: 12054 - DNA, 509 bp, Homo sapiens
  MAP TO AC013451.7; EXPRESSED IN BONE MARROW, SIGNAL = 0.69; EXPRESSED IN FETAL LIVER, SIGNAL = 0.8; EXPRESSED IN LUNG, SIGNAL = 0.93; EXPRESSED IN PLACENTA, SIGNAL = 0.7; EXPRESSED IN ADULT LIVER, SIGNAL = 0.72; EXPRESSED IN BRAIN, SIGNAL = 0.59
gatttctacccctccttgccactggcatagaatcagcctcctcccagatccaggctggagttctggtctctcctccttcactccttcagctgcccactccccattctgcggcacggtgtttgggggtgtgaacccctggttcctcttccaccccctcaagactgtggggcctggccaagggcaagggcgggcttggcttaccttgacactcctgtgtcgcccctgaggtggccagagtgtagccagggtagcagaagcaggagtaggaccccacgcggttgatgcagcgcccttttcccttgcaggggtccctcagacactcgttgtcatctgaccagaagaaggcagggagggaggtcaggggggccagcggtgccgttctttgggcacctaccagcaacctgcccacactaggggctgggcaggggatggtgctgtgtggcaaggaaggggtgagggagtggaggaggctgaaaatctctaaggctggaagccataaagtcagccca

SEQ ID NO: 12055 - DNA, 528 bp, Homo sapiens
  MAP TO AL161747.1; EXPRESSED IN PLACENTA, SIGNAL = 0.88; EXPRESSED IN LUNG, SIGNAL = 0.96; EXPRESSED IN ADULT LIVER, SIGNAL = 0.91; EXPRESSED IN BRAIN, SIGNAL = 0.81; EXPRESSED IN BONE MARROW, SIGNAL = 0.92; EXPRESSED IN FETAL LIVER, SIGNAL =   1
taccaaccaagatgggaagggagaaagagtttatgtatcaaaaggggacatttactttctattctataaatttatattgtttgattttatttttactagaataaactattacttggatcgtttacaacacaaagatacagcatccagaatttgtaactgtaacagaatcaaaaacttctctctttgatttcacctttcccctactttatccccaccattagttccaccctcatcgcccctttcctttgcatcagcttttcttgttatacttggatattggtcagagactaaattattttgtactctcaccgtatcccagatttgcagtttgatttgttttccatcaatgttgaccatacgagctccaaactccacacctgtcggtaaagaccgagagaaagaatgtgattctcacgaacagcagccacgtggagtgggaggttcctgcctttcctcaatgtgttataaccatcctttgtctgaactcaatgccactaattccattattgctgcctatttgctccaatt

SEQ ID NO: 12056 - DNA, 500 bp, Homo sapiens
  MAP TO AL139001.3; EXPRESSED IN PLACENTA, SIGNAL = 0.75; EXPRESSED IN ADULT LIVER, SIGNAL = 0.79; EXPRESSED IN FETAL LIVER, SIGNAL = 0.78; EXPRESSED IN BRAIN, SIGNAL = 0.66; EXPRESSED IN BONE MARROW, SIGNAL = 0.7
tgcacctcataatgaattcttccatcaacaacagatcccatatagaaaggtggtcctagaagatcataatggtgctgaaaatttcctattgcctaatgacataatatcatagcacaatgcattacttacatgtttgtggtgatgttggtgtaaacatactgcactgccagtcatataaaggtatagcacatacaattatgtacactgcatatttgataatgataataaatgactatgctactcgttgatgtatttactgtactatagtttttactattattttgtgtatattattacttttatttttaaaaaattaactgtaaaacagcctccagcagggccttcaagagtgattcagaagaaggcattgttatcataggagatgacagctacatgtgtgttattgcccttgaacaacttccagtgagacaagatgtggaggtgaaggacagtgatattgatgatcctgaccctgtgcgggattaggctgatgtgtgcat

SEQ ID NO: 12057 - DNA, 574 bp, Homo sapiens
  MAP TO AC026705.2; EXPRESSED IN PLACENTA, SIGNAL = 0.72; EXPRESSED IN ADULT LIVER, SIGNAL = 0.81; EXPRESSED IN BRAIN, SIGNAL = 0.68; EXPRESSED IN FETAL LIVER, SIGNAL = 0.68; EXPRESSED IN BONE MARROW, SIGNAL = 0.6
tcgtaggaatgccatcttctcaaacactaataaatatgttgattaagttaattgcattttttgcattaattcttctatataacagataattatttcatatgttccagctggtatttctcttctatactcttctcaaatatttggcaagtataagttttctgtataaatttataacagtggttaacatttaccaatgttaatagttgtttaggtagcttctttttaatccctaagtccaatattaaatatttttcttttccaaacaatagatacagtttcagtttacgtgagttatgattttgattgtaactgcacattggagtctggtccagctttcctgttgaataggaaggaagatattttcctacaggaacaagaaatagtcctaaacacctcccagctctaaacactctctctagctccaataccttctctgagaatctgactgaatctcttttattctggaataaatgctctagatacagaagattataacaggtgtaactggaacaacactaataaaagttacacttgactataagaccattctcttccagtttccaggtctgatgca

SEQ ID NO: 12058 - DNA, 535 bp, Homo sapiens
  MAP TO AC019042.3; EXPRESSED IN BRAIN, SIGNAL = 0.49; EXPRESSED IN BONE MARROW, SIGNAL = 0.45; EXPRESSED IN PLACENTA, SIGNAL = 0.53
ctctgcaagaaggatggctcctaatctgaaaaaaggtacaagttcctgtccagggctcaccaatcaggaaactcattctgactccaagggtgaaggagcagggccagatggcaaggtgttaaaaaaaaaaaaaaaaaaaaatccctcttcctgcaaacttacacctggggcagaaaaactccactcttacactccagattgccaagtcaacccagacttcttttgcatttattaatcactttgcaacatttacctctttgaacacttgtttttcattgaaactcttctcccttgacccccaggataataatttctctgtagctacccaatctttatctgattttaaacctttggtgtctcctagaacctcctctttgcccatcttttctcattctacatacttttcagagtgatcttattcgcttaaagaataccagttaccatccgtatgctttcggtactaaatctccatttatctcaggtctctcttgagttctagaactatgaatcctaatgcatcccctgtcttgtgaat

SEQ ID NO: 12059 - DNA, 580 bp, Homo sapiens
  MAP TO AL118502.29; EXPRESSED IN BONE MARROW, SIGNAL = 0.53; EXPRESSED IN FETAL LIVER, SIGNAL = 0.62; EXPRESSED IN PLACENTA, SIGNAL = 0.56; EXPRESSED IN ADULT LIVER, SIGNAL = 0.69; EXPRESSED IN BRAIN, SIGNAL = 0.61
tgaagtgttcccccactaggattccctaggaccagatgagggcacacctgttaggcaggaacatggagaccaacgaggcaagagggttggccacaatgctgagggtggcagccaggtggtaggcaactggcccataggacaggcaggagtaggtctgcacagagggcagcatgccgttggtgagcgcgttgacgaaggccaccagggtatagatgaaggccaggtgcgccgggcagcagggggctgctttctcctctagatacccctggccctggctgctgtccaccgtgcctgcagggcccaagtcattctcttcccgcggccggatggagtggagggtgacctggtcattgaggaggtcttccacggaagcctcccagcacctgggttgacgctggaggacaaagaacgccacgaggcagcaggccatcatgatggataggaggaggaagaagaccaggggtgagaagtgggcgggaaggtagcggctctccaggtgggacaagggtgcttccattccggggagggcggacaccaaagctctgggaactccctgcaaaggacaagacagatccctggt

SEQ ID NO: 12060 - DNA, 583 bp, Homo sapiens
  MAP TO AL121908.7; EXPRESSED IN BONE MARROW, SIGNAL = 0.77; EXPRESSED IN LUNG, SIGNAL = 0.85; EXPRESSED IN FETAL LIVER, SIGNAL = 0.82; EXPRESSED IN PLACENTA, SIGNAL =   1; EXPRESSED IN ADULT LIVER, SIGNAL = 0.83; EXPRESSED IN BRAIN, SIGNAL = 0.81
tgatccaaggtgaccaggagaattttagaatgatctaggcaaggaaattgccgtgcttccaaagcaacctgctcctcaggctccctgtggggctgtctgccccagcttgccacacctctgcaggtttgtggctttgtttcctgtatggggtctgaaggtgagcagtacctttgtttcctgtatggggtctgttctgtgttcagaagcaggactcagggctgctggagctggagctggagcctctgagtcctcagggttctccacagctctcctgaccagctctgctagagcgatgtctctggcagatgccttttccctgttgccctgtggtctggcctttctgctgtaggttaaagaaatcacagtgtgggcaggtggcctagtctgtaagtgtgtcctctagtgacctttgttttacctctagccatgcttgctgtttgtcctttcttgggattacatagttggccaggccaaaacatcttagctcacatgaaatccaagttcacagctggtaaaaatgccacagattaaatgctccatagaaattcatgtctataatggatgcatttctcctgggaattca

SEQ ID NO: 12061 - DNA, 597 bp, Homo sapiens
  MAP TO AL137853.3; EXPRESSED IN BONE MARROW, SIGNAL = 0.53; EXPRESSED IN LUNG, SIGNAL = 1.8; EXPRESSED IN PLACENTA, SIGNAL = 0.5; EXPRESSED IN FETAL LIVER, SIGNAL = 0.5; EXPRESSED IN ADULT LIVER, SIGNAL = 0.85; EXPRESSED IN BRAIN, SIGNAL = 0.55
ttgcctttcagtcggtgagttttttaattgtttaatttgttgtatcatttgttattcatcattttgtgtttacttttcatttattttgtttctgttattcattttttccatctggatttccaggctctggaagaagacatagaaaaccatgcaacagatgtgcaccaggcagtcaaaattgggcagtccctctcctccctgacatctcctgcagaacagggtgtgctgtcagaaaagatagactcattgcaggcccgatacagtgaaattcaagaccgctgttgtcggaaggcagccctacttgaccaagctctgtctaatgctaggctgtttggggaggatgaggtggaggtgctcaactggctggctgaggttgaggacaagctcagttcagtgttcgtaaaggatttcaaacaggatgtcctgcacaggcagcatgctgaccacctggtattcatgtttccatttttattggttatgttattctgttattttgttattttgattcatgtttctcttcatttatttttttttcttcattacaaacacttcaactttattttatacacaagtgcatagttagtggacttgatgctg

SEQ ID NO: 12062 - DNA, 594 bp, Homo sapiens
  MAP TO AC024570.2; EXPRESSED IN PLACENTA, SIGNAL = 0.52; EXPRESSED IN FETAL LIVER, SIGNAL = 0.56; EXPRESSED IN ADULT LIVER, SIGNAL = 0.53; EXPRESSED IN BRAIN, SIGNAL = 0.49; EXPRESSED IN BONE MARROW, SIGNAL = 0.5
ggctcatgcatacatactgggtttttttttttttcacttaaatcatggatgtctgtgagaaaatattttgctattataacaagaatgaagacgcattgcttttaaacacatctattggattactttctcaagataatgccttatgtgggattacttgaaaaaagatattcatgatgtttggggttttattatttggttgttacgttgtctagattgactccataagcacagtagttttagatattgcaaagagtttcttttaaatatcaacacatggtcacttgtaccttttaatgtatcagaagctatggggtaggttttgggtcctaggatcatttcttttcagatgttcagtgtgaattcttccatatctttagattaagtctgacaaagctttgtgtgtttgttttagttgttggtgaaaaagagaaaatcagtggcactgttaatatccgcacaagagacaataaggtccacggggaacgcaccatttctgaaactatcgagcggctacagcagctcaaagagttccgcagcaaacaggcagaagaagaattttaatgaaaaaattacccagattggctccatggaaaa

SEQ ID NO: 12063 - DNA, 580 bp, Homo sapiens
  MAP TO AL121888.20; EXPRESSED IN BONE MARROW, SIGNAL = 0.57; EXPRESSED IN LUNG, SIGNAL = 0.89; EXPRESSED IN PLACENTA, SIGNAL = 0.78; EXPRESSED IN ADULT LIVER, SIGNAL = 0.77; EXPRESSED IN FETAL LIVER, SIGNAL = 0.6; EXPRESSED IN BRAIN, SIGNAL = 0.72
tccatatttttggctctgccctagcattaagatagccagtcacccagtctccccaggcctgtgctttctgctgtgtttggccaataagagcagagaggggcagtagcctcccaccctccttgctgggtcctgatgcagctgtggctgttgctatggtttgaatatttgccccatccaaaactcacattaaaattttatctccaatgtgacagacagtattgacaggtggggcctctaagaggtgattgggtcatgaaggctctgcccttgtgaatggattaatcccttcattgatcatgtgagtgtgactgatggttttataagaagaggtaaagagatcagagctagcacattagtttgttcagttctccatcccccatgtgatgccctgcatacctcaggactatgcagagagtccccaccagcaagaaggccctcaccagacacagcaccttgaccttggacttctcagtttccattattataagaaagaaattctttttctttataaattacccagtttcaggtattctgatataagtataaagcaaaaataaaatccaaagcttctccaaccaac

SEQ ID NO: 12064 - DNA, 584 bp, Homo sapiens
  MAP TO AL158046.1; EXPRESSED IN PLACENTA, SIGNAL = 0.68; EXPRESSED IN ADULT LIVER, SIGNAL = 0.75; EXPRESSED IN FETAL LIVER, SIGNAL = 0.74; EXPRESSED IN BRAIN, SIGNAL = 0.7; EXPRESSED IN BONE MARROW, SIGNAL = 0.76
ggattcccagaacccttttcagtactggatagttagtgtgattgaaaatgttggaggaagattacgccttcgctatgtgggattggaggacactgaatcctatgaccagtggttgttttacttggattacagacttcgaccagttggttggtgtcaagagaataaatacagaatggacccaccttcaggtaagggccaaagcttttgctgctgtaaagtattttagaaaaagatgtgatattttcctggatgtgtttctagaaaatgtatgagctttctggtatcttttatatctgagtatgtgaatattaagcactttaacttcacaatgctttccatagagactaaaacctaagacctcaatcaatagtgttctcaaaggagaaagcaatgttagaggccttagggaaattgatctagttccttgggaatcactggttcagaaaggaaagacacagtagattgagacttgaggatattctccacgtttttctttaggaattttgatagtcttgtaagtaggttccgaaatctctggccatctgtgtacccatctctcagtctgtccattcaccaatccatcc

SEQ ID NO: 12065 - DNA, 522 bp, Homo sapiens
  MAP TO AC010349.6; EXPRESSED IN ADULT LIVER, SIGNAL = 1.3; EXPRESSED IN BRAIN, SIGNAL = 1.1; EXPRESSED IN PLACENTA, SIGNAL = 1.4; EXPRESSED IN BONE MARROW, SIGNAL = 1.2; EXPRESSED IN LUNG, SIGNAL = 1.3; EXPRESSED IN FETAL LIVER, SIGNAL = 1.2
tcacctcatccccttaccactgtttctactgttgaaatagggtagttcatggaggggaaaatgaagatgctattttttgatggtgctatgaaagacttcttccagtattatggcattgattcttcttctgaacacttacagcacctctttcccttaccccattggcccaattcacattttgtggccaagcaagaacttaaaaaggaaaggtatgcacttttttcccatctccctcaccttaagtggcatctctcatctggcacaggatgggcagggtgatgctctaagtcatgcttagtatcttcctcccacttccacaatacatagaaaacacatctcattcttggttgtactcaggactagttgttagtccatggcaacctattttctatctttttatttctttcctaacagttaaagagagcaaagatgcctttttctatacttcttcacctttctttttctgctgctgatttaatgtctgggctgagagttgcttaggggaaggttgctgccttgtta

SEQ ID NO: 12066 - DNA, 524 bp, Homo sapiens
  MAP TO AC019078.3; EXPRESSED IN PLACENTA, SIGNAL = 0.93; EXPRESSED IN BONE MARROW, SIGNAL =   1; EXPRESSED IN FETAL LIVER, SIGNAL = 0.77; EXPRESSED IN BRAIN, SIGNAL = 1.2
tcctgcatgaaatgcttctgccgagactaccatccatggactcacataatgccttatccaccatcatggtattccacatagcattgcctctgaccaaggcactcactttagagctaaagaagtgcagcagtgggcttgtgctcatgaaacccactggtctcaccatgttccccatcaccctaaagcagctggactgatagaatggtaaaatggccttttgaagtcaaattacaatgccaactaggtgacaatactttgcagggctgggacaaagttctctagaaggctgtgtatgatctgaatcagcatccaatatatggtactgtttctcccatagccaggattcatggttccaggaatcaagggatggaaatggaagcgtcatttctcaccatcaccagaagacacaacaacgattctattaaactggaagttaagattgccacttggccactttgggctccccctacctctaagtcaacaggcaacaaaggaagaaaggaagttatagggttggctggggt

SEQ ID NO: 12067 - DNA, 600 bp, Homo sapiens
  MAP TO AL137225.7; EXPRESSED IN BONE MARROW, SIGNAL = 0.77; EXPRESSED IN LUNG, SIGNAL = 1.2; EXPRESSED IN PLACENTA, SIGNAL = 1.1; EXPRESSED IN FETAL LIVER, SIGNAL =   1; EXPRESSED IN ADULT LIVER, SIGNAL = 1.2; EXPRESSED IN BRAIN, SIGNAL = 0.97
aagtgtgtggggctctgaagaccttccctccggcaaccccagcttcagggagtgatcacccccatttggaggtgtatgggggctttctggggagaacccgtcccctccttaccccgtgatgccttgcacggtgctgaggatgccaccctcgccgagcacgcccaagacaccccatcctccaagaagtcctccatcaccaaggagaccacctccgccgagcaggccaccttggcctgcgaggatgccatcagctgccagcatgcctccagtgcccagcaaaccacctgggcccaccgccccagtggcaactccaggtgggatttctccaggctgcagctctcgccggtgaagcctgcccacaggtgctgccctgtatcgcccgaggcccctgtggcctccatatgcattctcggcactgcgatagccactgtttcggaggtccctgatgcttccctcggactcaaggatctcaccatatcggtatttgccccccagctgagcagtgttgtcgttggtctcaatgtgaccatactggtaaataccatcaagttttttgccgttggtatatactggggggggtcctcggacatggaagtcatt

SEQ ID NO: 12068 - DNA, 599 bp, Homo sapiens
  MAP TO AL139824.7; EXPRESSED IN BONE MARROW, SIGNAL = 0.69; EXPRESSED IN PLACENTA, SIGNAL = 0.68; EXPRESSED IN FETAL LIVER, SIGNAL = 0.76; EXPRESSED IN LUNG, SIGNAL = 0.86; EXPRESSED IN ADULT LIVER, SIGNAL = 0.79; EXPRESSED IN BRAIN, SIGNAL = 0.65
cagttggccactacaaccaactagtgtgtagttggttcacattaactcacttaaatcctcataacaactttatgaagattatatgttcataaagaacatatttcttagcagaggatttttgagtttcagatttatcaagcatttatgtatggtatgctaggcattttcacagctttatctcatcatgttgttgaaatgagtgtacattttttgttattaatataattaccttgtttctgtttaacagtattttagatgtgactaaaatagccatattctcatatccagtcattcaggtttacacatataaaatacaggacactaaaactactgactttaaatctgaatttattgagaagtaataaattgtaggaagtattcttcacattactaaaggaattattgcaggttggttagttttagaaagagttgaatctcctttacttatccattattttttggatttattaaatccaacacattttatacttaaaatgtgattgatttacaacatttcagtttaccacaacttttcaggagtgtatatgtttgttgtgtaagagcttgtattggcagagaagtgcaaacttccccaacct

SEQ ID NO: 12069 - DNA, 560 bp, Homo sapiens
  MAP TO AC022542.3; EXPRESSED IN BONE MARROW, SIGNAL = 0.81; EXPRESSED IN PLACENTA, SIGNAL =   1; EXPRESSED IN FETAL LIVER, SIGNAL = 0.8; EXPRESSED IN LUNG, SIGNAL =   1; EXPRESSED IN ADULT LIVER, SIGNAL =   1; EXPRESSED IN BRAIN, SIGNAL = 0.86
actcacctgtgatgtggctgccatattctccacctacagaggaggaagcagagatttggtgcctccccacggatgtactggtcatactgaattgcctcatcaaataaacaaagaaatacactgaatacaagatctgtaagagacctaagagttagaaggcagaaaatgctggctctaaatggatttaacctttggctatcactttccctgtgcctcagtgtcctccctaaaaacatagccttcaaattgctttggcaaaggcagagagctgatgatgaaagggcacacgggcagcagaccctggagggtgcagggaccacagtagtcggtcctggaccaccattcttcctggagaaaagagggtctgggcttattccctggcactgacatccttggcagtcctcagatggcatagaagcccagagtgctgtgctgaacccacagatttgtccaatctgggtcacttaacctgtgccctttgaggcactggaaggtagtgtggcccaggagctgcactcgtgacctctggagccaagtagtctgggttcatgtcctggact

SEQ ID NO: 12070 - DNA, 552 bp, Homo sapiens
  MAP TO AC008812.4; EXPRESSED IN LUNG, SIGNAL = 0.88; EXPRESSED IN FETAL LIVER, SIGNAL = 0.87; EXPRESSED IN BONE MARROW, SIGNAL = 1.1; EXPRESSED IN PLACENTA, SIGNAL = 1.3; EXPRESSED IN ADULT LIVER, SIGNAL = 0.8; EXPRESSED IN BRAIN, SIGNAL = 0.88
aacgcataacccatggtctccacaggcaggcactcttgatgtggaaaactggaacagagcgggagaaggattgaaacatgctcatcaaaaaggtcttaaagttgattcttctgctttctgtacttgcagtctaattcgtactgtacttatgccgttatctccttattattctgcgggacagcaggctgagtctaaaaatctgaaagaatctgttgtcccacccacagcttcaattgaaaataaaaaacaggagagggaggataaaaattggcctatactgcctcctccagttgcagaaacatctgtgccgcctccttcggtagcaggaatagagaccccaatacaaagaattttacgctctgctgccatagctggagagccctcaggaccttgtgcttttcctatttccgtaaggcccgattcaaataatccacagcagtttattcatgaacacaccccactagagtttaagttgttgaatgaattaaaaaccagtgtagttaatatcggggtacagagcccattcactttaggattgccagaatctgcatt

SEQ ID NO: 12071 - DNA, 573 bp, Homo sapiens
  MAP TO AC013642.3; EXPRESSED IN PLACENTA, SIGNAL = 0.5; EXPRESSED IN FETAL LIVER, SIGNAL = 0.52; EXPRESSED IN BONE MARROW, SIGNAL = 0.48; EXPRESSED IN BRAIN, SIGNAL = 0.51
ggagttggtggtaccattgtgaataaaacatgatccctgctctaaaattagaattccaaagtagagaaagatataaataaatcaggaagtatgaaaataatgtgattaatgctatgacagaggaagtgcatagtgctatgagagttgatcagagagtcagctaacctgttctcacacagtaagaaagtgaaccctgaaatgtgagagagaagaggccatgaatccagtgacaggtggggtaagtgtcctgggcaggaggagtagtatacgaaaatgtcttcaggcaagtaagaatggggtcatttcctgtaattacaagatgtttcttataacttaatgatctcatcttttttcaggttgtggtaaacgagttgttccattaaacgtcaacagaatagcatctggagtcattgcacccaaggcggcctggccttggcaagcttcccttcagtatgataacatccatcagtgtggggccaccttgattagtaacacatggcttgtcactgcagcacactgcttccagaagtaagttattgaccttaagttagaacccacttctgctaaaaagcc

SEQ ID NO: 12072 - DNA, 550 bp, Homo sapiens
  MAP TO AL161752.1; EXPRESSED IN ADULT LIVER, SIGNAL = 0.6; EXPRESSED IN PLACENTA, SIGNAL = 0.65; EXPRESSED IN BRAIN, SIGNAL = 0.6; EXPRESSED IN BONE MARROW, SIGNAL = 0.65; EXPRESSED IN FETAL LIVER, SIGNAL = 0.61
tttcttgtctttgccttccctttataagtaaatatagtttctagtggaaaagccaatgtcttttctgcagatctgtcatctactttaaattccttgagtcttagtcacacatctaaagttatgtgatgttctctttctccttattataattcattgtatctcttattctcttttcattcaattccttctgagacaagcattactttcctggttttagcctaagtgttcttctttatcttcttgcacgttttacatttcaatgtctggatagaaaaccttatttcttttgtaaaaatcttcagttcaatgaaatgaagatggtcatagataaagtactaaaaagtgtgcaaataaagaaaaatatatttagatggccttgagggcacatccctgtgtttagtttttaatttgatttcaactgagaatgtgatgagtccttgggaagtttggcttatgctttttgctctatgaactggtaatgaagagcaacttagaataaaatgaaattactgtagtaaaagctattgaagtttttaaagggcatcaagcc

SEQ ID NO: 12073 - DNA, 501 bp, Homo sapiens
  MAP TO AL161744.1; EXPRESSED IN BRAIN, SIGNAL = 0.55
atccccaaacctgacttgtggcagaacaaatgggggaggaggaagaaatgaatgacttaaatgatttgttttatatacttaaatgaatgatttgtttgatatactacatttagacaaacccagtgattcacacttgtattttctcatggtgattatgcaagttaattaaaaacccaatgatatataaataaatttgtacttaccagaaatactgctatagatattccaaccagaaagcctgctataacatctgaccaatgatttcgatattctgctactctgttgagtccagtaagaaatgccaaacacattaagcccaagcatagaactggcttagcaagtctggttcccttggctttgattgtgttggtgatgtacatctgaaacattcaataaaaaaaatgacttttcatgaaggtatttcctttattagcatagcatattatgtgtatgtacaaacatatatttatagacatatatacgcctgtatgattcaaatca

SEQ ID NO: 12074 - DNA, 516 bp, Homo sapiens
  MAP TO AC021880.2; EXPRESSED IN LUNG, SIGNAL = 3.5; EXPRESSED IN ADULT LIVER, SIGNAL = 0.84; EXPRESSED IN BONE MARROW, SIGNAL = 0.52; EXPRESSED IN BRAIN, SIGNAL = 0.47
accacgtggccactaaaaagcttccatcacggcgaagactaggtaaaacgtcatctccgctgatgacggtagaggagaaaatggaaagaaaccagcatgttcactgtgcctgtaatgacataaaagtatgtgtacagatgggccaagaccaagaggaataagtggaaaatcgatacaagcaatcctcagtagccaaatccatccagctcccgagttcagacagggaagggtgccaaatgatccagatccacgtgattgtggagttggggacgtcaagcggcaagagttcgccaagtgaggaatttatctgaaaatacatccaaacccattcagctggtgtatacttgggtagggtaggatttccatacttgggtgaattgtatgaagaggtttttttcgtcttcttttaaattatcttccatgttccactgatactgtttttgcaattaaataaaggaaaatcagaattctcgtgtccagggctttggagcccacagagggctttcccacacataa

SEQ ID NO: 12075 - DNA, 561 bp, Homo sapiens
  MAP TO AL139008.3; EXPRESSED IN ADULT LIVER, SIGNAL = 0.56; EXPRESSED IN BRAIN, SIGNAL = 0.49; EXPRESSED IN PLACENTA, SIGNAL = 0.58; EXPRESSED IN BONE MARROW, SIGNAL = 0.56
gcagtgaaataaatgaaagcccattacagataaacttacctgattttaaaaactaacctgtaaatggatttttctaatttttttattgcctgcattgccctttcatccagctcgattttatattcttgtactttaccaagttttaccatatctttttccatatgtgtcttaagatttaatactttttcttccaacatctttttatccttctcaagtttttcacatttctcttgtacttttcccatagataataactcctgatgaagaacttcattgtctttggccaaattgacacattttgaagatacagcttccttctcggccataagatcatcaaactgcattaataaaataatagagcttgataatgaagtaggctgagaataatctaatacaaaaccaatagcaaattttgaaatgcatccacttgcaataaaatgttatctataatgtagtagattcttcaaatgtgaacccttaaattactcagaattttaagaacaaagttaaagctaccatgagtcacaaaaatatgctttactgacatcatctttgccacag

SEQ ID NO: 12076 - DNA, 549 bp, Homo sapiens
  MAP TO AC010458.2; EXPRESSED IN PLACENTA, SIGNAL = 0.93; EXPRESSED IN FETAL LIVER, SIGNAL = 0.76; EXPRESSED IN BONE MARROW, SIGNAL = 0.7; EXPRESSED IN ADULT LIVER, SIGNAL = 1.1; EXPRESSED IN BRAIN, SIGNAL = 1.3
ctggccttcctgttcttcactcccttcagccacacgcttcatggccttgagttcaccttggctgtcctaacagggccaatcaccagtgaccagctagactgtgattttgatagcgtcattcagaagaaggcgtccaaggagctgaaggtggtgaaatttgtcctgcaggtccctcgggagatcctggagctggagcatgagtgtctgacaatcagaagcatcatgtccaatgtccagatggccagaatgaatgtgatagttcagaccaatgccttccactgctcctttatgactgcacttctagccagtagctctgcacaagttagctctgtagaagtaagaacttgggcttaaatcatgggctatctctccacagccaagtggagctctgagaatacaacaagtgctcaataaatgcttgctgattgactgatggattagctgtgtgtgtgtgtcttggtctgccaccacccctgctgcggcccttttcaccctctgtgtaccctttacttgttcctttcttcccttccccctttcctttccatcttc

SEQ ID NO: 12077 - DNA, 581 bp, Homo sapiens
  MAP TO AC008750.4; EXPRESSED IN ADULT LIVER, SIGNAL = 0.68; EXPRESSED IN BRAIN, SIGNAL = 0.85; EXPRESSED IN LUNG, SIGNAL = 0.85; EXPRESSED IN PLACENTA, SIGNAL = 0.92; EXPRESSED IN FETAL LIVER, SIGNAL = 0.87; EXPRESSED IN BONE MARROW, SIGNAL = 0.87
ggccacaaacattcatagggactttcagagtaaaacagaagacttcagagatattttgtaattatatctagatacagaagacttgagatattttgtaaatatatgctagacactcagagctgtatattcaccttcctctgattaaatttgcccttaatgtttcagaattcctaataaaggacatttaagaatatgatcccactttggtaaacattatgtatatgtgcatgagtgtatataacacatcaaaactgaaaagagaggatggcagattgcaggcattgttagccggcctctcccaccttggaaagatgaaacagtgtataaagatttatgttgtgaccttttcaccagggaccaacacaggaacttaacaggaaaactggaagaaaccacagacctttctaaagaaacggtgggcagcagcctacaccacgagccagacagaaaactgtgagtccccacagtgtgagaaggggagagactaactcagggatgtgcactcccactggggtgccacgcagtccaggccacaggagggggaagccctcaccctgcccagcactggagctgagttaggg

SEQ ID NO: 12078 - DNA, 582 bp, Homo sapiens
  MAP TO AC024972.2; EXPRESSED IN FETAL LIVER, SIGNAL = 0.93; EXPRESSED IN BRAIN, SIGNAL = 1.3; EXPRESSED IN LUNG, SIGNAL = 0.92; EXPRESSED IN PLACENTA, SIGNAL = 0.71; EXPRESSED IN ADULT LIVER, SIGNAL = 0.83; EXPRESSED IN BONE MARROW, SIGNAL = 0.85
gctccagccttagatctcccagtcttatgcggtgtgcccattcgcctggtgtctgcagccccctggccacacccagtaacagttctgtgatctatgagaatagtttccttagcgagctttcccttcaaatactttgcagccaggtagagaagtttggagtgaaggttttgttctttgtttctttgcagtatggatatgaatcttcttttgaaaatgttaaagtaaattacctcttttcagatattgtcttcatgcgaacttggtatcctgtttccatcccagccttctataacccagtaacatctttgttgaaaccagtgggtgagaaagacacctggtcaggaatgtggaccacgggccacctcgggctcgcccatggtgtcagactaaagacaaacaaggactctctgtataaggtactggtcgtgtgtgtgttagtggagatgaagcctgtgccctacagacagggagtcacgcagacacttttctataatttcttacgtactttgaatgttcaagtataaagtctaatgttaaatttgattgaacaattgtatatttgtgggatattttggaatggaa

SEQ ID NO: 12079 - DNA, 545 bp, Homo sapiens
  MAP TO AC008269.3; EXPRESSED IN PLACENTA, SIGNAL = 0.8; EXPRESSED IN FETAL LIVER, SIGNAL = 0.72; EXPRESSED IN BRAIN, SIGNAL = 0.7; EXPRESSED IN BONE MARROW, SIGNAL = 0.67
cctggtcaaaaagctttcattctatctaagtttggggtataaggcagtattctctccagttataaaatagaatgtcagcaggtggcctcagaaaagaattttcctaacatgctctatacttttatcaaggaaatttttcatgccactagatttttttaaagtcgtgatttagtttccagacacttaaacctttgtttccattcagtttgctttgaaaagcagcagattagctagagcacaagattgtctatgatcagctgagcggcaaggatcactgacacagcgagagggcagggaggacgagtcatttgtcttttcagcaggcacacacaaatgatcctttcctgccatatgttccagagaattcttttccttcccttcaggtacttgaccccctattggatagaggcattgatcaaagttgaagctgtagagtgatagaatagctttagttttcagtaaatcaaatcctaaaaaaagaattaaaagtacaattattgatattaaattcctactctcaagtctctggcttatgtgaacatgga

SEQ ID NO: 12080 - DNA, 583 bp, Homo sapiens
  MAP TO AC008688.4; EXPRESSED IN PLACENTA, SIGNAL = 0.66; EXPRESSED IN ADULT LIVER, SIGNAL = 0.72; EXPRESSED IN BRAIN, SIGNAL = 0.59; EXPRESSED IN BONE MARROW, SIGNAL = 0.57; EXPRESSED IN FETAL LIVER, SIGNAL = 0.64
aatgacagagttaacgggggtattctctagaactgcaacctcatagagcggctgtgcaaattctggtgcattgtcgtttatatctaagacctggatgtttatctgggctgtcccagaccgagggggagagccgccgtccagcgcggtgagcgttaagctgagttccggctgctcctcccgatcgagcgctttatccagtactagttccgggtacttccttccgtccctacgactgcgagtgagtacgtggaagtgggaattcggagtgatagtgtagttttggaggctgtttcttcccacatccaagtcctcagcatttcccaaaggaattactgttcctggcagagtgctttctaggattttcagatgcatttcattttcaaagaataccggagaatggtcatttacatctatgatacggagctcgtttgtaacgaattgcaaagggttttgcagtaatatctgaaaatgtagtatgcatggttctgtggggccgcatagctcctcccggtccaatttctcattcaggagcaaatcacctgtctgatgactgagctgaaaatgctgtttgttccctttggac

SEQ ID NO: 12081 - DNA, 527 bp, Homo sapiens
  MAP TO AL157911.2; EXPRESSED IN PLACENTA, SIGNAL =   1; EXPRESSED IN ADULT LIVER, SIGNAL = 0.67; EXPRESSED IN BRAIN, SIGNAL = 0.96; EXPRESSED IN FETAL LIVER, SIGNAL = 0.82; EXPRESSED IN BONE MARROW, SIGNAL = 0.99; EXPRESSED IN LUNG, SIGNAL = 0.97
gattcttggtttgggagcagaatcatagcatgggtcaccccattcctgggccctctcctaataatatgcctaggactaatgttcttaccctgcctaattaacctttttcaaagatttttagctgacagactcatgaccatttcacacacaactacccaaaaacatctacagtgttatttctgcagtcaatccaagacccaaaaactgtctgtccccttgtcagcaggaagtagccagaaagaacacactgcccctcgtcatttttataactacagggtctggattgacagagcaggagcatcaccctcttcgacttcgacgaggaccatcattttaagtttcaccttgatcaaaacccaccaaaatccaaagggcatcagccttatggttaaggtcagcatgaacataaatcacacaacatctctgaccagaaacattcgaaacccctcccggaccagagacatgccagccccgagataaccttccccctggctggagagatgtcagccccaagataacctcccttc

SEQ ID NO: 12082 - DNA, 546 bp, Homo sapiens
  MAP TO AC010290.4; EXPRESSED IN ADULT LIVER, SIGNAL =   1; EXPRESSED IN FETAL LIVER, SIGNAL = 0.8; EXPRESSED IN BRAIN, SIGNAL = 0.85; EXPRESSED IN BONE MARROW, SIGNAL = 0.75; EXPRESSED IN PLACENTA, SIGNAL = 0.9
ccggcactgatctctattcctggttattgcaaatttcaggacttgctacattttcccacaaaggagcaatttgatgaggctgaaccagccactctgaatgggctggatcaaccagaacagaccactatcccaatccctcagctgccacaggaaacccagtcttccctggaacatgaaccagaaactcacaccctgcacctgcagccgcagcatgaagagagcgtggtgcccacccagagcacgctgacagccgacgacatgcgcagagccaagcgcatccgagtaagtggggaaagccggcggctcctggcaccagccgctcatcttcctcccaccaccagctctctggtggttttctaacctattcaccttcctctctgaaatcttgcatctagcctgtcacatgctcgatccccttattttgaaagaaagtgttcactatttctcaatgtctctgtgtcccatggcaggctggcatggctggtcctagatttgaccaatttagtgacgacacagaggcctagaggttggcagctcctggactag

SEQ ID NO: 12083 - DNA, 515 bp, Homo sapiens
  MAP TO AC022758.3; EXPRESSED IN BONE MARROW, SIGNAL = 0.5; EXPRESSED IN PLACENTA, SIGNAL = 0.68; EXPRESSED IN ADULT LIVER, SIGNAL = 0.7; EXPRESSED IN FETAL LIVER, SIGNAL = 0.54; EXPRESSED IN BRAIN, SIGNAL = 0.7
cctcatgctccacttcttccatcttcaaagccaacaacagagggacagtgctcctcacattttgaatatacctgacttccccttctgccccatctctcctatttccagccaaagtaaattctctgcatttataggctcatgtgactatatttagctcacctggataatccaggaaaaatctccccattttaaagtccatgaccttaatcacatctgcaaagtctcttttgccatgtaatttaatgtattcacaggtctgagggttgagatgtagatatctcagtgggtggagggtgatcctgcccacatcagcatcaattccagttatactcatttttagacttctgatgctgatcatcctcagagcaagtggaagaaatagacattttatctgttacctggcaaaactttggaatctttctaggctagtgaaaagtagaagaatgagcaaatatgctgttatcgctcaccctataggagacccatacatctgagccccctaaacccaaaaatgt

SEQ ID NO: 12084 - DNA, 594 bp, Homo sapiens
  MAP TO AC026412.1; EXPRESSED IN FETAL LIVER, SIGNAL = 1.3; EXPRESSED IN BRAIN, SIGNAL =   1; EXPRESSED IN PLACENTA, SIGNAL = 0.52; EXPRESSED IN ADULT LIVER, SIGNAL = 0.69; EXPRESSED IN BONE MARROW, SIGNAL = 0.99
ttcatgaaacttaactgtggaggtattttgaaaataaaatttaagtacaacaacatttgcttatttttagagtcttttatgatatcaagagaaatgatcccggaaagaaaaaatcaagaaaaagaatctgatgcctcaactgtgaatgaagagacttctgaggaaaataatcaaatggaggaatctgatgtgtctcaagctgagaaagatttactacattccgaaggtaatgaaaacgaaggccctgaaagtagtggttcttctgactgccgtgaaacagaagaattagtaggatccaattccagtaaaactggagagattctttcagaatcatccatggaaaatgatgacgaagccacagaagtcaccgatgaaccaatggaacaagattatttagaaacatttagatgcagtattttacgtacagttctggttttaacgccgtataaaacttttatgtaaaaaagtggacctttagttttacaagaaaagcaggttgtaaaataaagtactttatggataattcctggaagagttgtacatgtaagaactgtgaatatcagctcctctgggtcctgcttaccttaccgctga

SEQ ID NO: 12085 - DNA, 504 bp, Homo sapiens
  MAP TO AL133226.16; EXPRESSED IN PLACENTA, SIGNAL = 0.69; EXPRESSED IN FETAL LIVER, SIGNAL = 0.57; EXPRESSED IN ADULT LIVER, SIGNAL = 0.59; EXPRESSED IN BRAIN, SIGNAL = 0.53; EXPRESSED IN BONE MARROW, SIGNAL = 0.59
catgtgagtgcaagtacccctttgatatactgattccttttcctttgaatagataccccatagtgggattgctggatcatatggtagttctatttttacttttttgaaaaatcttcgtactctttttcataccagttttactaatttacattcccaccaacagtgtataagagtttccttttcttcacattcttgtcaacatctgttgttgttgttatccggttaacaacagccattctaactgggatcagatgataactcactgtgattttgatttgcattacctcataataagtgatattgagcattttttcatttgtatatcttctttttagaaatgtctactcttgtcctttgcccattttttaacgtaattgttgtttcattgttgagtagtttgaattccttggatattgtggatattagtcctctgctggatgagtagttttcaaatattttacccctttcaagagattgtctcttccctctgtgatttgttttgct

SEQ ID NO: 12086 - DNA, 526 bp, Homo sapiens
  MAP TO AC007981.43; EXPRESSED IN FETAL LIVER, SIGNAL = 1.3; EXPRESSED IN PLACENTA, SIGNAL = 0.61; EXPRESSED IN ADULT LIVER, SIGNAL = 0.7; EXPRESSED IN BONE MARROW, SIGNAL = 0.63; EXPRESSED IN BRAIN, SIGNAL = 0.56
catcaccaatgaggatgctgtatatgacatcgctaatggcacccacaaggcatgctaacgaggatgctgtagacgacattgcttataaggacaccgtacaagacatcgctaacgaggacgctgtatatgacatcgctaatgaggacgttgtatatgacatcgctaatgaggatgctttacaagacatagctaatgaggttgctgtatatgacatcgctaatgaggacattgtatatgacatcgctaatgaggacgctctatacgacatcattaatgaggacgctgtatacaacatcgctaatgaggacgctgtatatggcatcgctaatgaggatgctgtatacgaattcgctaataaggacgctgtatatgacattgctaatgaggacactgtacaagacatctgtaaaaaagaagatgctgccaatgtaagacacttttctttgtcttgaacagaaatgttactttcctggcttctttccaatcagatgtagacatgaacatctgccagtgtgcattatcgatg

SEQ ID NO: 12087 - DNA, 534 bp, Homo sapiens
  MAP TO AC008919.4; EXPRESSED IN PLACENTA, SIGNAL = 0.91; EXPRESSED IN FETAL LIVER, SIGNAL = 0.75; EXPRESSED IN BONE MARROW, SIGNAL = 1.1; EXPRESSED IN LUNG, SIGNAL = 0.89; EXPRESSED IN ADULT LIVER, SIGNAL = 0.9; EXPRESSED IN BRAIN, SIGNAL = 0.78
tgagagggagaaacaatggcaaagcactggataaaacctgaagggtagtaactatcttatgtgtatatttcaaggtggtagatctactagtatccatgtgtaggtctgcgttggaatctcctagaaaagttgtgattttcgagccatatccttctgtggtagatcctaatgatcctcagatgttggccttcaaccccagggtaagttgttatcatggcacaccaatcacaaagttttctttaacaataacaacaatattgagattgtagtctcattaggtttcctctttctatctaaatctctatctcatcaagcatatccatgagtatttaatttcatcatatatttttggggattccgacttacataacctcattttgattttaaagatcatgggtaaagggacaagttttcctttcttttctgcattttcacttcaaccctcctttcctctttcccttcttcctccccagctatctgaaggttagtgaaagtttagttcatactgttaatggactggcctttcttaaggaa

SEQ ID NO: 12088 - DNA, 551 bp, Homo sapiens
  MAP TO AC007687.16; EXPRESSED IN PLACENTA, SIGNAL = 0.9; EXPRESSED IN LUNG, SIGNAL = 0.92; EXPRESSED IN FETAL LIVER, SIGNAL =   1; EXPRESSED IN BONE MARROW, SIGNAL = 0.94; EXPRESSED IN ADULT LIVER, SIGNAL = 0.98; EXPRESSED IN BRAIN, SIGNAL =   1
ttattcactgaggccttgggaaacttagctgtggggttttccacattggcactcatagagtcaacagaactcgcctcgtgaagaccttacttagcacagtctgtatccgtgtacaacaaaatagttcatgaaattcaaccatattttaaaacattcagcattaatagtcctctcattgagttaaggtattttaagcaaaattttccagtctgtaacgaagagacttcttgaaatacagtcaagggatttaacagtaaatcatttatgttctgactatttggattacaaatctaattttttttttctcttgtagctctgttctggaaggggtgaaggaattatatctggaagctgcccaccaaaatggagatatgatcgacccagacctgcagacaggtctaggggttctgttccacctgagtggagaatttaatagagcaatagatgcatttaacgctgccttaactgttcggccagaggtaagacagcacagcacagcaagaaaccacagcgttctctgtaacaaataagttttcacaggctacaccgtc

SEQ ID NO: 12089 - DNA, 532 bp, Homo sapiens
  MAP TO AC018529.4; EXPRESSED IN ADULT LIVER, SIGNAL = 0.76; EXPRESSED IN BRAIN, SIGNAL = 0.78; EXPRESSED IN LUNG, SIGNAL = 1.2; EXPRESSED IN PLACENTA, SIGNAL = 0.92; EXPRESSED IN BONE MARROW, SIGNAL = 0.93; EXPRESSED IN FETAL LIVER, SIGNAL = 0.84
tggggtctgtactctgggtctctgggtcaggctcaactggagtctgcactcccggtctccaggcctagcattaaggagtcagcggccaggctcttcttagaggctctgggagggaacccactccccagctcacccagttgccagtagaattcagctctgtagactgtagaatgggcccacttcccccatccttgctagtggtggcaggagtcactctcaggtcccaggggccactctctggacatgcacatggtcccctctgtcttcaaggcatccctggcgcttcaaatccttctcagcctagaatctctctgacttccacttctgccaccagtggagaaaaccctgcctaaaggctcctgtgattaggtctgagggccccaggtaatctttttttttttttttttttttttttttgccccattaggtaacaatcacaagagacacttcatcatagataggctccaccatactgcggatgaggggtgcagtggggagcgggactctgtcagggtgaggattagtgggagca

SEQ ID NO: 12090 - DNA, 593 bp, Homo sapiens
  MAP TO AL121914.16; EXPRESSED IN BONE MARROW, SIGNAL = 0.67; EXPRESSED IN ADULT LIVER, SIGNAL = 0.96; EXPRESSED IN BRAIN, SIGNAL = 0.91; EXPRESSED IN PLACENTA, SIGNAL = 0.9; EXPRESSED IN FETAL LIVER, SIGNAL =   2
tttccttttccctctcccagctgttgtatgaagatgggcatttgggggaaatgtcctttttggaaatcgtttaagaacatttcttccattgtacccagaatctaactgcttgtgtacccacaaggaacaaaaatgtgaacatacatcctccttcacctctgaaatttctacacaaatatttccaaattaacactctatttaagaataccttgtgagtggcctcagcaaccattgcaatggttactggatgcctttggagtggcctgtcaactgcttccatctgttattcacaaagagctcagtgcagcgccaggaacatgggtgcaggatgagtgctggctgctgctattgcaatgtccagtgctccctgcacgcccagcctgaccataacagcctgagcccagccaaaagtggggtggtcaggggcagcctctgcaaaggggtgactcgagctgagacccagaggaggaggatctggcggaagagagttctgggcagaaggaacagcaaagaaaaggtctgaggtggaagcaacctcagggcatttgagaaaagtaagaaaacaatgtgactggagggaaatgaatgagggt

SEQ ID NO: 12091 - DNA, 535 bp, Homo sapiens
  MAP TO AC015823.3; EXPRESSED IN PLACENTA, SIGNAL = 0.7; EXPRESSED IN BRAIN, SIGNAL = 0.69; EXPRESSED IN ADULT LIVER, SIGNAL = 0.63; EXPRESSED IN FETAL LIVER, SIGNAL = 0.63; EXPRESSED IN BONE MARROW, SIGNAL = 0.65
atttcctgggggtagctcaggaaacagggagtgtgacatggatccttctcaactaccaactttctaaaccactgaccttggactgcagggtcccttctgttccttcctcccttgaggagctataaaaactctgcatcaaaaacgtgggggggacaagcaaaaggcttgagttccacttctgagtctgccactgaccatgttcaggcaggttcttcacttttctgggtcttgctgtctcctctgaaaggaggaggataaataagagaaactaagacactccccttctaatttaaaaatctatgaagaattacagaatgttcccaaaacagaatcatacttggtcttcacaggaaaaagaaacctcatggaagatgttaattatttctctgtcccactaaagattttttttttcagaagccgcagatggcacaaatcagattaggttatcatgaaggagccaaggggacccttccactttgccctctgaagtttcactgaaaaatcaactgataaaaggcagattaattggggatga

SEQ ID NO: 12092 - DNA, 572 bp, Homo sapiens
  MAP TO AC010767.3; EXPRESSED IN LUNG, SIGNAL = 3.9; EXPRESSED IN PLACENTA, SIGNAL = 0.46; EXPRESSED IN BONE MARROW, SIGNAL = 0.52; EXPRESSED IN FETAL LIVER, SIGNAL = 0.57; EXPRESSED IN BRAIN, SIGNAL = 0.54
ttgaaggtctgtggatttgctgtaagtagtgaatactacccaatattagtaagagtttaagggaatggacaccttcatgtattgctggtaggtgacagatattttggcaatgaacaccaaaaccttaaacattggcatacttttggactttattctgtggattttatcctaagggacaggattagtatacatgaagatttagatatagagctattgactgaagcattttaggacctcaaaggtggaaattacatatatgtccaaaaatatataaccattcaataatataattgttaattaacatgatgctgtttatgagctgttcggggttcagcagcatagatccctctgagtctgtctctctttgtaaaatgagtaaaatactaacagttaatatttatatagtgctgattgtatgcagccacgattctaagtattttacatatattaactcatttactcactaaagtaagtattttacgtgtaagtatttataagtattttacatataagtattgtaagtattttacatatattaactcatttactcaccaaactgtgtgaggtatttg

SEQ ID NO: 12093 - DNA, 540 bp, Homo sapiens
  MAP TO AC026192.1; EXPRESSED IN ADULT LIVER, SIGNAL = 0.87; EXPRESSED IN BRAIN, SIGNAL = 0.71; EXPRESSED IN LUNG, SIGNAL = 1.7; EXPRESSED IN PLACENTA, SIGNAL = 0.92; EXPRESSED IN FETAL LIVER, SIGNAL =   1; EXPRESSED IN BONE MARROW, SIGNAL = 1.1
  unsure 268
cagaccaactcttcgttggcgttattatagtttttaatttctcttgacaaggttcccccttattgcccatgctggggggtggactgctccctggttggcccttgataagccactggtaagctgcatccttcagcgtgtctgcctgaaggatttctgccacaaggaaatgggagataatattgaaatgcaaagttataataaatatctaagtgtatgtaacatcatcttcctaaaggtggaggctaagagagtaatttagtgataaaanatcaaaagagaatattattttctccatttttaacattttaattatgagccaaatttttgtgaagtctttaaatatgtattataagcaccctgtggaagacaaatgctccctttgagtgtctaagcagcattctccagtgtaaaattgaatgggttggtgtagaattatctttaaggccctttcagatctaacaatctgtgatatctattatgtttcttgtgaatgaaagaacaaactgtctccccgcccttgcaccccacagttttcctctc

SEQ ID NO: 12094 - DNA, 550 bp, Homo sapiens
  MAP TO AC019275.3; EXPRESSED IN PLACENTA, SIGNAL = 0.7; EXPRESSED IN ADULT LIVER, SIGNAL = 0.82; EXPRESSED IN FETAL LIVER, SIGNAL = 0.85; EXPRESSED IN BRAIN, SIGNAL = 0.67; EXPRESSED IN BONE MARROW, SIGNAL = 0.72
tgatttttcaccctggacatctaggaatttttcttgaaaaaaaaatccatttccaaattcaggagtccagaaaataagaacccatattacctggcacattctgtcaatattttcttcagttggcattacaaagtatactgcaggaacatctggaataggatctcgatcagagtgtaaaagcctagaagacataaggaactaaaacttatttttttattcacttatttaaaacaatattcctcaaaatgggagttcactagctcaaggacagtaaccagtgctctaaaagctcttgttgcaattaatcagtgagttaacctagctttctcccatgtcagtgttgttattatttattagcattagtaagaccctaatttcttgttagtcttcatttgttctattctgctcacacttttagcactgcttatggtcagacattcttttctaccaacaccctccttgaatgagaactaaaacatattcagaatcaatcttattcccacttttcatagaaatgtggtggtcagaggggaagggtgaatgtgaggaa

SEQ ID NO: 12095 - DNA, 592 bp, Homo sapiens
  MAP TO AF240628.1; EXPRESSED IN PLACENTA, SIGNAL = 0.62; EXPRESSED IN FETAL LIVER, SIGNAL = 1.2; EXPRESSED IN BRAIN, SIGNAL = 0.73; EXPRESSED IN BONE MARROW, SIGNAL = 0.66
ccaggaagaaagtttgcagcagttccacacaccatcccacagcagggcccgctagagaccatcagcatcctgttcccttggctctatcagcttcctgaatgctactagcactctcaaagcctgctgatacttgcctccactggcgttgtactccaggacctccttgagctgggcaatagcatctcctgtctgtgggtgccccatctcatcctcagtcagcactctaaagatctgggagaagtgccgaatgaaatcctgcttttcttgggcataaatatctgatttctggtctccattctgagggaggagcaaagggctctgttcctggatgcgggttcctgctcttatcatcttttattaaataactttcagcacggtaaaatgcgatcctaattgatgattaactaccatttttacatttttttctttaaccccaaaatatgctgtaattgcaaatcaattcagtctttggggatgagttaagccacagacccatatggcacaaaccttgatgactcaatgacatttcactgtggatattaatattgtgctttagtgctacccactcttttgctggtaatgcttctgcctc

SEQ ID NO: 12096 - DNA, 574 bp, Homo sapiens
  MAP TO AL121935.12; EXPRESSED IN PLACENTA, SIGNAL = 0.75; EXPRESSED IN ADULT LIVER, SIGNAL = 0.89; EXPRESSED IN FETAL LIVER, SIGNAL = 0.81; EXPRESSED IN BONE MARROW, SIGNAL = 0.7; EXPRESSED IN BRAIN, SIGNAL = 0.68
tagctgccaggtctgtgatgagaaagcaggtgttcttggcctaacagagagtgcatgtctcgatctaatgccttctctccttccctctcacctgcttcctcctcctccctcttctccctctgtagacagagatgcctcttgcctggaagggctgccttggcatctaggagcaaagggaaactctctggggctgatttccatcccactcttgtctccagaagctgctagagatgtaaagtgaaaatgatagaagaaatgtcacagaaggaaaactcaattcccttgttgactcaaagtggcacattaagcaaactgtcacttttgattgaagatgtggggagcattttgttctcctttccatgggctgagctgggctgacagagaggattccttcatgtgctccaagtgaccacagcctgaactggcagccacatcccaggggaggaggttgacacacacaaagttggtggtcttggcccaactcagttccttggcaaactcagtttttttgtccttgtatgacttttggaagcaggtggctgctgggaaatgcagtccctaggtttcaccagca

SEQ ID NO: 12097 - DNA, 585 bp, Homo sapiens
  MAP TO AC009943.4; EXPRESSED IN PLACENTA, SIGNAL = 0.46; EXPRESSED IN ADULT LIVER, SIGNAL = 0.53; EXPRESSED IN BRAIN, SIGNAL = 0.48; EXPRESSED IN BONE MARROW, SIGNAL = 0.62; EXPRESSED IN FETAL LIVER, SIGNAL = 0.48
catgccaacaataattcccctttgcaatataaaaataactttcacatgcactaaactcatttgacattatgaatgtcatttgactattcagggttccacagctcctgaatagtaaagacaagttctagaacccaaatattttaactcccactcagggactctttccactgctttactcctaggtgatttctaaatttgttttcttatgacatgatacatgatttgtcatgaacacacatgatgatcttccaaaaagaaaaaaatcagtggcctattaaagaaccgtatggatattctctcaactttgaatgtaaattctataaaagattcagaaacacttttataagttactacagctgagctttgaaaataaggaacgaaaaacacaaacctgattcatttagaaagtgaactgcgtgaggaagctcattttcatctaactgcagctgattttctctcactagttgtaataatcgtttccggtcaattacgggaaattcaattggcacatttttacgctccgataaaatgattttttcaagttctacatagcagtctggaatcagctgtccaacaacaagctga

SEQ ID NO: 12098 - DNA, 572 bp, Homo sapiens
  MAP TO AC016549.4; EXPRESSED IN PLACENTA, SIGNAL = 0.61; EXPRESSED IN FETAL LIVER, SIGNAL = 0.61; EXPRESSED IN BONE MARROW, SIGNAL = 0.55; EXPRESSED IN ADULT LIVER, SIGNAL = 0.65; EXPRESSED IN BRAIN, SIGNAL = 0.72
ttggttcatcttctcatacgtgattttttttcccttaagacaaatatggtctctttagaaggccttaccaaagtagttgatccttctcagctaactcctgagtttgatggctgcctggaatacaaccacgaagaatggattgaaatcagagttgcttttgaagactacattagcaatgccacccacatgctgtctcggctggaggaacttcaggacatcctagctaagaaggagctgcctcaggatttagagggggctcggaatatgatcgaggaacattctcagctgaagaagaaggtgattaaggcccccatcgaggacctggatttggagggacagaagctgcttcagaggatacagagcagtgaaagctttcccaaaaagaactcaggctcaggcaatgcggacctgcagaacctcttgcccaaggtgtccaccatgctggaccggctgcactcgacacggcagcatctgcaccagatgtggcatgtgaggaagctgaagctggaccagtgcttccagctgaggctgtttgaacaggatgctgagaaggtaaagacgggggaggctaa

SEQ ID NO: 12099 - DNA, 591 bp, Homo sapiens
  MAP TO AC016202.4; EXPRESSED IN BONE MARROW, SIGNAL = 0.45; EXPRESSED IN PLACENTA, SIGNAL = 0.73; EXPRESSED IN BRAIN, SIGNAL = 0.47
tcaatgtgttgcatgatcccatttttggataatgtatgagtgtgtctgtcattagtaaaaatataggtaaatacaaactagaatgtttatagtagcttttgctgtgtgattgaataaagagttagctttattgctctgaatgtttgtagtaagcatgtattacttttataaatagggaaaaaagcattctaaaaacagagaagaaactttgacttgaaacaaaatgtaaaatggccacagaatctggatttgaatctatctatatacaagagagctcttttggctacttaaagtgtggttgatagaaactgactccctgatatacataccttatgggtaaagaggaagatcgataaaggtatattctcactggcatttgcattccacttcataggctctgtaatgctaagtacgatcaagatcaccattggtgctaacacctctaacaaactgtccttgactatcaacagcaatcactgatgtgcccttgtctgttagtgattcaaaccagttgacctcagtcttaagaacttttaaaataaccagaaaaagttatttttttcttcttcttcttctttagctgcagggcat

SEQ ID NO: 12100 - DNA, 533 bp, Homo sapiens
  MAP TO AC008688.4; EXPRESSED IN ADULT LIVER, SIGNAL = 0.66; EXPRESSED IN BONE MARROW, SIGNAL = 0.59; EXPRESSED IN BRAIN, SIGNAL = 1.3; EXPRESSED IN PLACENTA, SIGNAL = 0.59; EXPRESSED IN FETAL LIVER, SIGNAL = 0.54
agcagggaattgctacatgggagagatttgccattattacaaaaactggctaagtggcttgtttccatttgaggacctcactggtcactgttgtcagtcgtgctgttccctttctcttttttctcctgggtcttgttacccttcttctttttcttctttttcttggtctcctcctttttgccgaaggttatgaagtcacttttgtcaatttggctgttagtaggctcctgccggatggagatgattgcaggagatcctgggataatgaatttgtcgggcaactcaccgggaccggattgtttggggttgcctggtccgtatttaaaggtccagctgttgctgttgacacccgcaccgactggaggggacacttctcctgcctctggttctgaaagacaaaacattacaaatcattaacagggtcaacacatgctcttgatgccacactgctggtagagtacaggagtactgcataggcaggctgaacctccccagaaaaatcacgagttgtttgttcaagtctgagggcaagg

SEQ ID NO: 12101 - DNA, 546 bp, Homo sapiens
  MAP TO AL121944.10; EXPRESSED IN FETAL LIVER, SIGNAL = 0.6; EXPRESSED IN BONE MARROW, SIGNAL = 0.52; EXPRESSED IN ADULT LIVER, SIGNAL = 0.54; EXPRESSED IN BRAIN, SIGNAL = 0.59; EXPRESSED IN PLACENTA, SIGNAL = 0.61
tcccaccgtggaactttatccattatggaggtcttagatctcccatcccctgtgcacctggagtactgcttcatcagtgcctctctccaaatcttctagtatggtcactgcctcctctccactctctgggtaatgttcatgtacccaggcctgcaaatctcctggcaggatggtcaggaactgctctagcaccagcagttccagaatctgttccttggtatggatctctggcttcagccactgacagcagagctcccggaggcggctcagtgcctcgcgaggtccaggagaatcctggtagcagaactgcctaaaaagctgcctgcagagctcctgcttaaggagttcacttctctgtaagcaagtgtcctgcccatggataaattcttcctcttctatcttcactatcagaagtccttcatcctctggagagttctgggctgcagctttctttggttctgtagccatctgtggatagaatatattatcagaactgctttggaaagggtcttctttagtttcaagagtcctcctgagggatcaaaa

SEQ ID NO: 12102 - DNA, 566 bp, Homo sapiens
  MAP TO AC025221.2; EXPRESSED IN FETAL LIVER, SIGNAL = 0.86; EXPRESSED IN BRAIN, SIGNAL = 0.69; EXPRESSED IN PLACENTA, SIGNAL = 0.57; EXPRESSED IN ADULT LIVER, SIGNAL = 0.87; EXPRESSED IN BONE MARROW, SIGNAL = 0.53
gggaacagcatgaacaaaggtgaaaagatgggaatgagtgtttaatagactgagttagctgtaccagctggaaaagcaataagaatgctcaaagtgtgaccgtggagtgctgtgaatgtcagaaagagtacagatatcactgtataaaccatggtaaatcacagtacattattgataaaaggaatcttttaggaagattaaactgaggttgggccattgtggacaggattgatgggagcgatgagagatgaagttagattagttagaaagttactgctatagtctaaagatttagagcatagataattatagtgcataccttttctcaatttttatcttcaggcattgaactaagcactttacatttattatctcaattaatcctcagagcagcattatgaggagagtaatatcatattcattttactatgaggaaacaggttcagagacccccagatcacaaagttaggggtggagtttatcttcaaatcctgggtcatctgattccacagcaccacattgccctgcttagaataaataagtggggaaaacacctgcgtgtgagt

SEQ ID NO: 12103 - DNA, 533 bp, Homo sapiens
  MAP TO AC021774.3; EXPRESSED IN BRAIN, SIGNAL = 1.4; EXPRESSED IN LUNG, SIGNAL = 0.99; EXPRESSED IN PLACENTA, SIGNAL = 1.1; EXPRESSED IN ADULT LIVER, SIGNAL = 1.2; EXPRESSED IN FETAL LIVER, SIGNAL = 1.2; EXPRESSED IN BONE MARROW, SIGNAL = 1.1
atccactgccattctgatccatgttcctttgtgagtggctttatttttctctctgaaagccctttaaaaattattattaatcttctcttaatctctgatatactggaatttataataatatgtcttatgatgagtctgtttgcaatttattgagccatcctttccacctggatactcacgtaattttctttaaaaaaaaataatttcaacttttattttagattctgggggtacatgtgcaggtttgttacatgggtatactgcatgatgctgaggtttggggtatgatttatctggccatccaggtagtgaacacagtacctacacaatggttagtttttcaacccttgctctcctccctccctcccctcctagtaatccccagtgtctattgttgccatcttcatgtccgtgagtacctagtgtttagctcctacgtgtaagtgagaacatgtggtatttggttttctgttcctgcattaattaacttaggataacggcctccagttgcatccgtgttgctgtaaaggaca

SEQ ID NO: 12104 - DNA, 598 bp, Homo sapiens
  MAP TO AL096863.10; EXPRESSED IN PLACENTA, SIGNAL = 0.62; EXPRESSED IN BONE MARROW, SIGNAL = 0.68; EXPRESSED IN FETAL LIVER, SIGNAL = 0.65; EXPRESSED IN ADULT LIVER, SIGNAL = 0.56; EXPRESSED IN BRAIN, SIGNAL = 0.62
agcagaggctttggattcagacagacttgaacctgactttcagcaagttgttgtgtggttgaaaagtgtcacttatgatgtgctcagtgctgtggttggcatatagtagacaggtcagaggtagtaacaggtattgtaatgaaaatccaaattgccagcgtggaacgttatcttagagcctgccttttccaacaagttttgcaggagatattcacaggagtttggtgctgtgttatttctgttaacaagctggatcttggcagtgtatgtgagcttcagggccagggaaggggcactgtggagaggcatggacttcatagccccaggtgatgaatgcatcttcattccctcccctgtgtgctaccccaccaccaccaccaacaacaacaaagcccacagaattacagaggaatacatgttgatatctcatagcagatttggcccatctgttatctccaagaagggcattctgagaggacaaaacttgctcagtactctaaattgagaaagaaaaaacgaaaacaccacctagtttatttagacaaaattatcaactgaaacccagcaggctaacaatgcccatcccttgtgagaaaga

SEQ ID NO: 12105 - DNA, 572 bp, Homo sapiens
  MAP TO AC012662.5; EXPRESSED IN PLACENTA, SIGNAL = 0.55; EXPRESSED IN ADULT LIVER, SIGNAL = 0.62; EXPRESSED IN BRAIN, SIGNAL = 0.59; EXPRESSED IN BONE MARROW, SIGNAL = 0.58
gattccccagaaactcatgggcacattaaagtttgagaagtgcctataagatgaatctgatgagctagttctagtgttctgtcaaactactgtggatgacataaatcaagcaattaatagttaaggtgagggctaattacattgtatgcttttgaaatatattttcctttaggtgagcaaatgtaatatgggaaattatcatgagtagggagtgttcagcagggttctctgattctaaagcaagaagggaaacatacagggagggattcgtggtcttaccttatttggtaggtcacccacagatttccacaaggtaatacttacactatgtgctccttgaatggtgcggactaaattgagccctttccagacatagatgtcaccatttaaagcaccagagtaggtgatgtcttctttggcacatgcaaggcaaaggatggtctgaagatcccctgttttgccaaatatccctctttttgcagtcagggcatttccacacagtgtccaaaactacaatgtaagtgataaaatagatctccaagatagagtattcggatgtattgcattggtgt

SEQ ID NO: 12106 - DNA, 597 bp, Homo sapiens
  MAP TO AC013291.4; EXPRESSED IN ADULT LIVER, SIGNAL = 0.61; EXPRESSED IN BRAIN, SIGNAL =   1; EXPRESSED IN BONE MARROW, SIGNAL = 0.66; EXPRESSED IN FETAL LIVER, SIGNAL = 0.66
atagaaacccctccccacagatctgcatttattcagcatttatagaatctgtacagagaggccctcaggatctcttactatgacaaggttgtcttctaaacagaacttcaacctagcctctgctctccagagtcaatataattttagttttatgaacttgagtgtgggcttttcagaacaaaagtcaagtacagaacacatgaaaagagttttgtcttgtggtaagggaaaaaccaaatgaaataataagataggttacctgtgtggtgaccatgactatcttcaaaatctgcaaacccagtttccacggaatctggcgtctggctcggtatttttcacaagggctcatgaagtaaaacttcaggtcttcccttagacattcttctttcatctcagaatcacgatgtgccattgcatttctgccacagaagattaattttaaatatccaggaaagcctctccctcagttccttttgaagtaacttgctttccctaaacttgagttggtacatatggcatgtcatatactgaaaagcctctttatgaacacaaaataaaaaagcaactctagttatggcagggaggttctcccatttc

SEQ ID NO: 12107 - DNA, 570 bp, Homo sapiens
  MAP TO AL121673.27; EXPRESSED IN LUNG, SIGNAL = 0.98; EXPRESSED IN PLACENTA, SIGNAL = 1.1; EXPRESSED IN BONE MARROW, SIGNAL = 0.99; EXPRESSED IN ADULT LIVER, SIGNAL = 1.1; EXPRESSED IN FETAL LIVER, SIGNAL = 0.92; EXPRESSED IN BRAIN, SIGNAL = 0.99
agtaaaccagtgcctgaccgtccggttctccctgaatcaacactcaccgaaaggagctggtggaggggcccgtgggcgacaaacagccacaaaccagaccccggggtctccggagctgggggctctgggtggcccaggggtcgttaatgggcacggtttccagtccagtccaggccagctgtggtggggctcagacccgtccagacactgggagccagtcacccccagaataacgagctgggcctcgagttccaagtcatctttgagcagccgtgtgtcagcaccgctgtccctgaccaccccgtgccggtctgcctccgtctcctccttctcgctgtaccccaggtcgggagctaaagggcaattcagagcctgctgcctgcaggcaaaacgtctccccagcaccgcaagtctgcgcaatttgaggcccagaaaccccctggacgtagcttctgcttttcaaaaactgttcattcgtttagccccaggggacctcatccctgtatgtccacactgggcatcccaaggaagctgggggggaaccgcacctgcatccctccaactcagaaa

SEQ ID NO: 12108 - DNA, 551 bp, Homo sapiens
  MAP TO AL161940.3; EXPRESSED IN ADULT LIVER, SIGNAL = 0.69; EXPRESSED IN BONE MARROW, SIGNAL = 0.49; EXPRESSED IN BRAIN, SIGNAL = 0.53; EXPRESSED IN PLACENTA, SIGNAL = 0.58
tgcagactcattggttcagggtgcttttatatttgtactctgccttcgttttgggacagccgatgctgaggcccaatgtccagtgacaccagaacagggtgaaaagatgtgtgactaaaccagccggtcttaccttgggcgattctgcccctagggtcatttggaaatggctggagacagttttgattgccgcaagtgcagggcagctgctgccggcatctggcgaatgaaagccagggacgcaggttcatatcctacagcgcacaggacggcccccagaaagggtcgtctgagcccaaatgctgacagtgtcacagttgagaaactgttctaggcttagggaacctgtcatgcggtgggcttaggtgtcagctgtcagcttaggtggcttttggacacggtgctagcaaacctcacaccacgtgacacttctggaagggtggtagagacacttgctgcgggtttcatttggaatcctcttaccacagactttgtcctgcagcacaggacacattagttcacgcagatcatgaaaaacggtgccactcatt

SEQ ID NO: 12109 - DNA, 545 bp, Homo sapiens
  MAP TO AC016575.4; EXPRESSED IN ADULT LIVER, SIGNAL = 0.79; EXPRESSED IN BRAIN, SIGNAL = 0.63; EXPRESSED IN PLACENTA, SIGNAL = 0.77; EXPRESSED IN FETAL LIVER, SIGNAL = 0.61; EXPRESSED IN BONE MARROW, SIGNAL = 0.58
ttcttggcatgctgaaactgcttaataatcagacttcatctctgggtgtgatactagctgcagctacacacatcccagggcaattcttcttcccactctgactgcaagccaaatcgcattttgtagtcctttttgtagctaagatcaaagtcacagcattgactaatttgctgtcagtttagtctctacctcccacccagtggcttctccacttgattgaagttaacaaatctagttactgtttccattcatcctcaatttttatcgtattctttctatcttttagaaccacaatttttagatattaaggtaacatcagattcaatctggggatgccctgatggctttatctgacaacaacagtaagaagtcattgaagcaggggtgtgatatgaaaaatattacattttcaaaatactactctggcaactctggggaaaataagagtcagagtggcttcagagagaccagccagaggctcttgcagcacttcaggtgagagactgccttgtgattccagtggaggactgcatggacctctccat

SEQ ID NO: 12110 - DNA, 581 bp, Homo sapiens
  MAP TO AC013497.4; EXPRESSED IN BONE MARROW, SIGNAL = 0.79; EXPRESSED IN FETAL LIVER, SIGNAL = 0.91; EXPRESSED IN PLACENTA, SIGNAL = 0.46; EXPRESSED IN ADULT LIVER, SIGNAL = 0.87; EXPRESSED IN BRAIN, SIGNAL = 0.91
caaatgcttcttcctctgcctggaatgttctttctttctaccctgttttatctgattaactcctcttcatccttcagagacacttcctgtccttccctatctggatcagtccctagtcaccctacaattggaacttgatgattacttgtgaactacttgttaatttctgcctttcttgatgaactgtaaactgtttttcttcttcgctgctgtatctccaaagcctaaaacagtgtccagcacagagtagtcagtgagaaattctttattgaagaaatcaacaaagttaccctagaaagtgaaaacattcagagttaaatttagcaagaaatgattttgaaattcactttgccttaaggatcaatccactggttttaggaaataaatctaggattgtttcatttcataaaaaaatctatcatatgtattgatttatttgtaataataaattataagttgccctaaattaagattcacctcatatttgtaacttagctctaggaaatcatctgattgatagtggtatatgtgttgtcacattttcatttgctgtggagagcaggacagtttcaacacgggaa

SEQ ID NO: 12111 - DNA, 574 bp, Homo sapiens
  MAP TO AL161644.1; EXPRESSED IN BONE MARROW, SIGNAL = 0.46; EXPRESSED IN ADULT LIVER, SIGNAL = 0.55; EXPRESSED IN BRAIN, SIGNAL = 0.44
gcgagtagcaggctgaaatctggtttgcagcgaagttttctcacatagggcaggaatgcccagaagttcagactcagtagaaacgggttccctctttggccagctcctgcctgcctgcctgcagcaccacgtggctggaggtgatgacggtgaagctgtacaagggtcggttaccaaccaggtatccctctgccactggcaccgctctgcaggggcagggacagctgggcagagagcaggagcctccagtgcagccgtggggctggccacattcacaggggccactgtctcagctttgcactccgccaggtccacagtgagaagggaccgagcagctgtctggggctgcagcctggaggcggtggctgctgctccctcctgccacatcctcagaagggctttctaggtgcccactgtttaaacctggatctgctggcccccagagtctgcattcttagccaagcatcttgcaggaggcaggtgggaagggaatacacacagtgctgtatttcccttaggggatagctctcctagtctttaggactcacctaccagagtggatttgaggctgtcc

SEQ ID NO: 12112 - DNA, 517 bp, Homo sapiens
  MAP TO AL121888.20; EXPRESSED IN LUNG, SIGNAL = 1.1; EXPRESSED IN PLACENTA, SIGNAL = 1.1; EXPRESSED IN ADULT LIVER, SIGNAL = 0.97; EXPRESSED IN BRAIN, SIGNAL = 0.94; EXPRESSED IN BONE MARROW, SIGNAL = 0.87; EXPRESSED IN FETAL LIVER, SIGNAL = 0.74
tgcatttctcagcagctcacggttgctttcaccacacctcactgatgtgtgctatcttccaggcaataatgacaagagccaccatttacttattaggccaggtgcagattaagtactttgcctatatcaattcattacattctcaccaaactcctccaagggagacagtcttgttatcatttgcatttatgaggatgaagccaagcacagagagatcaagtaacttgtccaagtatccaaatccagacattgtagtgatgatgactccaacctcaggagtctggagcctgagctcccacatggaaccactaggctgtactgcctgggtggggtttcagaaatgctggtataagattccaggctggtaggagcttcttagggtgagacgagtaggggcaaatcagcagggccacctctctggtaaagtccttggggcactgcttccgggaaacacaatgtcagtggtgccactgggctgtccaatgtggtggccccagggttttgtccctgcaagtgt

SEQ ID NO: 12113 - DNA, 513 bp, Homo sapiens
  MAP TO AC010829.5; EXPRESSED IN PLACENTA, SIGNAL = 0.77; EXPRESSED IN ADULT LIVER, SIGNAL = 0.99; EXPRESSED IN FETAL LIVER, SIGNAL = 0.72; EXPRESSED IN BRAIN, SIGNAL = 0.84; EXPRESSED IN BONE MARROW, SIGNAL = 0.67
gggacacaagagctacctgctgcttcaggaaaagtgcttataaagtgtaccatgcaggttgtgtattacacacatctgaacaactcaaacctctagaaagcttccttactggaactagagagaaagccacacaggaagatgaaaggcaggtgcgcagctaagaactaagataccactgagaccgttaccttccacacagcactcattgttctatgagtatgagagaattcatgggcattccctctgcaggacaagtccttgttctggttttttttttttttttcatatatatttaatcctctacatccttagaatttccattccctgtgcccaccgtattttgaaatcttgtggagttgatacgttcctttttctgcaaatttctcttcaacatccagagagcatgccttttggcaggctcaactctgcccagtttcacatggaaacaggctcctgtgaagaatgaaaagaagtatctgatcttaattccctactatggaaagagactgccgg

SEQ ID NO: 12114 - DNA, 536 bp, Homo sapiens
  MAP TO AC011686.3; EXPRESSED IN ADULT LIVER, SIGNAL = 0.56; EXPRESSED IN BRAIN, SIGNAL = 0.45; EXPRESSED IN BONE MARROW, SIGNAL = 0.69; EXPRESSED IN LUNG, SIGNAL = 0.92; EXPRESSED IN FETAL LIVER, SIGNAL = 0.81
ccctaattctacccatctggctactaattcaaactttcttccttcacatctgtttgtggacttctccaatataactagtatgcctgggctcattctgcttcttctcttctggaatagtttatttcatgaccatgtgcagagggggtgatggggcaagcctcacaagccccggaggtctgtggctgaggtgtaccttggctttgttgcctggaactgctctgactctgctcttcgctctttcctgggctgtgtcactacagctctgactcctttccaccttggagtttagcttcctaaaaaagaataaataaaaaacgagtagtcaaaattagtccatatataggtaaggaaaaaggatgacaatatctttttgctttctaagccactcaccaggaaagaattcccttgggcagctacaatagaaaatgagttaatttattaacaaaatacattctgaatagaaattctgccaaaagacagtgctccagagaggatatttggttcaagattttgtttccaaactagaccctgccaaa

SEQ ID NO: 12115 - DNA, 508 bp, Homo sapiens
  MAP TO AC019141.3; EXPRESSED IN LUNG, SIGNAL = 0.86; EXPRESSED IN ADULT LIVER, SIGNAL = 0.66; EXPRESSED IN BRAIN, SIGNAL = 0.85; EXPRESSED IN BONE MARROW, SIGNAL = 0.83; EXPRESSED IN PLACENTA, SIGNAL = 1.1; EXPRESSED IN FETAL LIVER, SIGNAL = 0.85
cacagctagcctgaaggaggcagagatgttaaagtcaactttaagttgactttttttttctgaacaggtacacaaataactgctacatgaatgaaagtaattatacaatgagaattgtgactttttttctgaacaggtacacaaataactgctacatgaatgaaagtaattatactatgaaaattagacaattctcaattgaactctcaaagtaaatcagtggaaaccttaaacaaacctttataaacacttgcttataaaaagtcaaaggacacacaaattcagattccccaataagtagactttcctgaagcaaaagttagaaaaatggtctgtgaaggaaataaaataccaactaagaagctcttcatttccaattttctatttttagatcattcaatttgagcctattatctctgccatactgtttgttctcattaattttcatttgtgtttttaatattgtttatacatttgttatgccttctccagcatcttagattgccca

SEQ ID NO: 12116 - DNA, 509 bp, Homo sapiens
  MAP TO AC022853.4; EXPRESSED IN PLACENTA, SIGNAL = 1.2; EXPRESSED IN ADULT LIVER, SIGNAL = 0.64; EXPRESSED IN FETAL LIVER, SIGNAL = 1.5; EXPRESSED IN BRAIN, SIGNAL = 1.6; EXPRESSED IN BONE MARROW, SIGNAL = 1.3; EXPRESSED IN LUNG, SIGNAL = 0.84
ttggtgttccttccttcctggtatgaaagaggaagatgtcttgatatggcttgaatctgtgtccccgtgcaaatctcatgtttaattacaatccccaatgttggaggtagggcacagtgggaggtgattagatcacggaggctcaattctcactaatggatcagcaacatgccccttggtactgtcctcaccatagtcagtgatcttcctgagatctggtcatttaaaagtgtgtggcacctcctccctctctctctttctcttgctcctgttcttgccaggaagacagttgctcctgtcacaagtaaaatctccctgatgccttcccagaacctgatgccgccatgcttcctgtacagcctgcaaaccctgaaccaattaaacctcttttctttatcaattacccagtgtcaaatatttctttatagcaatgtgataatggactaatacataccctcacaaggaaaagttatgtcctgcttttaggcacacaggagaaggtggagagc

SEQ ID NO: 12117 - DNA, 586 bp, Homo sapiens
  MAP TO AC008103.27; EXPRESSED IN PLACENTA, SIGNAL = 1.5; EXPRESSED IN ADULT LIVER, SIGNAL = 0.66; EXPRESSED IN FETAL LIVER, SIGNAL = 1.5; EXPRESSED IN BRAIN, SIGNAL = 0.98; EXPRESSED IN BONE MARROW, SIGNAL =   1
catcgataatgcacactggcagatgttcatgtctacatctgattggaaagaagccaggaaagtaacatttctcttcaagacaaagaaaagtgtcttacattggcagcatcttcttttttacagatgtcttgtacagtgtcctcattagcaatgtcatatacagcgtccttattagcgaattcgtatacagcatcctcattagcgatgccatatacagcgtcctcattagcgatgttgtatacagcgtcctcattaatgatgtcgtatagagcgtcctcattagcgatgtcatatacaatgtcctcattagcgatgtcatatacagcaacctcattagctatgtcttgtaaagcatcctcattagcgatgtcatatacaacgtcctcattagcgatgtcgtatacagcgtcctcgttagcgatgtcttgtacggtgtccttataagcaatgtcgtctacagcgtcctcgttagcatgccttgtggatgccattagcgatgtcatatacagcatcctcattggtgatgtcttatatggtgtcctcattagcgatgttgtgtacagcgtcctcgttagcaatgccttgt

SEQ ID NO: 12118 - DNA, 506 bp, Homo sapiens
  MAP TO AL138702.3; EXPRESSED IN BONE MARROW, SIGNAL = 0.6; EXPRESSED IN PLACENTA, SIGNAL = 0.56; EXPRESSED IN ADULT LIVER, SIGNAL = 0.7; EXPRESSED IN BRAIN, SIGNAL = 0.56; EXPRESSED IN FETAL LIVER, SIGNAL = 0.55
tcacactccaggttcttccctacagtttccagccaatgagcagtgaggtgagaccacatggagaattctgaccagtgaaatgtgcgtataaatgccttgtgtttcctccctgatgaggggtaacacatcattgagagctgcggggtcatcttcctctctctcttcctgaaacagcaaccctggagatatggacttttcttctaacccactgacattttgtgatctatctgctagtgcagcaaaacataggttatccttcctggagccatactctgtgtccagctgaaggtagacagcttaaatttgtagctaaccagacctagcaagcacctgtgtttccctctagtatgtctgctggatctcagcaattagataaaactctaagaacagcaaccatgtctcacacccccctcataggacctaacatagtgttgaacaaagattcattcaatgtgaaataggtttgaagaaagcctccgtggttgaccgtttggaattctcatgct

SEQ ID NO: 12119 - DNA, 558 bp, Homo sapiens
  MAP TO AC015638.4; EXPRESSED IN BRAIN, SIGNAL = 0.48; EXPRESSED IN BONE MARROW, SIGNAL = 0.44; EXPRESSED IN PLACENTA, SIGNAL = 0.45; EXPRESSED IN FETAL LIVER, SIGNAL = 0.5
tgaaatgcctatgcaatgattcatcactgcatgtttattttgcatttaatgaattatatactcaatatattttaggtagctatattatacatataatattttgatacttatggcatgtgggttttttcattgttatttcaccattttatagatcctcctgagtttgtttgttgctgttattttggacaacttagaacttgatgaagacctaaagaagcttaaacaagtaagtagtgtgtgggggattttttttaaaaaggacaaaaaaccaggggcaaaccatttgcttataggcaatattaaaaatttgagcttcaaagtaaaaataaaatgtaataaggctatcgaaggtggtaaaatggtgttaagtttaacttttatctaatattaacaagggaaactttctattactctataaatatcctaggaatagttttattatttttgaataaaagtaaaatgggcagagtatagttaattggatttggagactgttctccttctgccattaaatgaaggttgtttggaaatgagatgcctcaaggccagattttgcat

SEQ ID NO: 12120 - DNA, 503 bp, Homo sapiens
  MAP TO AL117383.18; EXPRESSED IN LUNG, SIGNAL = 0.96; EXPRESSED IN PLACENTA, SIGNAL = 0.88; EXPRESSED IN FETAL LIVER, SIGNAL = 1.1; EXPRESSED IN BRAIN, SIGNAL = 0.82; EXPRESSED IN BONE MARROW, SIGNAL = 1.9; EXPRESSED IN ADULT LIVER, SIGNAL =   1
tacggcctacaaagaatgggccagaagatcacgagtgacctctccattgtagaacccaatcaaccagagagcacaggactattgggatgaggtggaccagggagcacaggaccattgagatgagacggggcagggagcacgggatcatggagacaagacggaccaaggagcacgggaccacggagacgagatggaccagggagcacagggccattgagatgagacagagcagggagcacaaggccactgagatgaaacggagcagggagcacaagaccatggagacaagatggaccagggaacacggagacgaggtggactaggtagcacctgaccatgaagacgagaaggaccaggaagcacgagaccatggagacgctagggggcagggactgcgggaccacggagaggaatccaggcagatggcaacgtgtgaatgttgttcaggcattcttttggtaggaatgaaaacacaaatgaagccatttaaaccctcccggtct

SEQ ID NO: 12121 - DNA, 546 bp, Homo sapiens
  MAP TO AC013657.3; EXPRESSED IN BONE MARROW, SIGNAL = 1.3; EXPRESSED IN LUNG, SIGNAL = 1.6; EXPRESSED IN PLACENTA, SIGNAL = 1.1; EXPRESSED IN ADULT LIVER, SIGNAL = 1.3; EXPRESSED IN FETAL LIVER, SIGNAL =   1; EXPRESSED IN BRAIN, SIGNAL =   1
gctagaatgctgggaagagctgtgcagaaatacctccaaagggtcagaaagtaatttaggatttttaattcaatggaatcaatctttcttgtgtatttttacttacttttttagacaataggccaatgattgtagggtttgttctagccttgaaaccaactctctgcagagcaattcctgtttccacaaagggtgcatcaggatgcatgggacccccggatcacaggccccacgtgtgaacgaagcaacacagaccatggataacagagacctctctagggtgagttctcttgagatgcagggcacgatcaacaggacgaacaagcctaaagatgacaaatgggtatactggcatgggctggacgaaaggaggcaatagggctaaaaacacagaaccaaacctgtcatttctctccacaacttccttttgatctcaaatatcatgtgttctcacttataagtgggagctaaacaatgggtacacttgggcatgaagatggaaatcatagacactgtggattccaaagtaggggagaatgggagagg

SEQ ID NO: 12122 - DNA, 545 bp, Homo sapiens
  MAP TO AC009699.6; EXPRESSED IN LUNG, SIGNAL = 1.1; EXPRESSED IN PLACENTA, SIGNAL = 0.96; EXPRESSED IN FETAL LIVER, SIGNAL = 0.83; EXPRESSED IN ADULT LIVER, SIGNAL = 1.3; EXPRESSED IN BRAIN, SIGNAL = 0.96; EXPRESSED IN BONE MARROW, SIGNAL = 0.94
aacggcaatggatagctcagttctatttaagataagcttggctgttctcttaagtgtcttgcagcagaaatactggcccattcaaaatagttgggctaacttttaaaacaacaactaagcgtcttccaagacagttataaaagactaaataaaacacagaggaaaagaaaaaagagggagctcaaaatgggagcttggctctgacaggtgaattttcacacagaactgcggcactgagaacaaaactagcctagaaccacttgtgctatgtcatgtggaggtcattcaaatgcacaggatacagaaactcttcaacggtctagtcatttcacactacgtcgaagcaaaccacaaaagcaggcccaggaaattagatttctccagggatggacccagacgactcagcctgaataaaatgatccaagtatgattctgatcctattcagatattcccccaggaatactccagaaggtctctacaaattcaagtcttttgcaataaactacagaggccagaaaagactacaaccactcttgcccaactc

SEQ ID NO: 12123 - DNA, 533 bp, Homo sapiens
  MAP TO AC018993.3; EXPRESSED IN BRAIN, SIGNAL = 0.47; EXPRESSED IN PLACENTA, SIGNAL = 0.62; EXPRESSED IN FETAL LIVER, SIGNAL = 0.6; EXPRESSED IN BONE MARROW, SIGNAL = 0.54
gatttgggcattgaatctgctgaataagggatagtgtttgtgaaatatcatttcgtgaagcaaaaactcattagtggtcatctactggagtacaaaagacatctacttaaaagtctgggctgacaatagttgaaaagcaagagacatactgggaggccatttctcttctgattagcagaattatttggtggactctgactatttctgataaatctttaagtactaaatatcatagcaagaaatatactgttgtgatcttgcattccatttatacacttcccctgccaaacatgtccactgttttaaaataaacatgaacaaaacctaatagagaaggtaaaaatgcactgagagattaatcagaaacatcattctaaggccaagtggaaaccatatgtaacttattcagtgtttggtaataccagtgtcagagctctgaaatgagtgtggatattccagaagggcaggatttggcagcagatgcgtgatgatgataatgatgatgatagccatccttcttgccatgtgtcaga

SEQ ID NO: 12124 - DNA, 565 bp, Homo sapiens
  MAP TO AC012571.3; EXPRESSED IN PLACENTA, SIGNAL = 0.68; EXPRESSED IN ADULT LIVER, SIGNAL = 0.79; EXPRESSED IN FETAL LIVER, SIGNAL = 0.53; EXPRESSED IN BRAIN, SIGNAL = 0.56; EXPRESSED IN BONE MARROW, SIGNAL = 0.56
caagcagccatagcagaaactacacatatgaaagaaagcatttgaaagaaaaaatgatgtaaaaatatgctttaataaatttggaaaataaagctctaaccagtttccaaaatagtccatataaagacaataaatataggtaccgtgtaatagtaatggtgctaaagtttttgaaattcaccacatctgtttcttatttgtttgtttttgccatatttataatgggacatctgatttcatctcttatttattttgattttgtattttatttcatatctctgttcaaatgaaggataggtttatattttttgctttgttgttttactgagatactcaccatctaatttaagtgctccccatccagtgacaaacactttactcttaggcaaggcttcaaaagtagcttctggaagacagactctgtgcacctcattggaaaatatgatgggggtgaagagcttcactacagcgatatcatcctcgtgtttatgggcagcatagttctcatgaataataattgactccccctttcttctcattagtgagggattcgggttattccaaa

SEQ ID NO: 12125 - DNA, 582 bp, Homo sapiens
  MAP TO AC015785.3; EXPRESSED IN PLACENTA, SIGNAL = 0.69; EXPRESSED IN ADULT LIVER, SIGNAL = 1.4; EXPRESSED IN BRAIN, SIGNAL = 1.2; EXPRESSED IN LUNG, SIGNAL = 1.1; EXPRESSED IN BONE MARROW, SIGNAL = 1.1; EXPRESSED IN FETAL LIVER, SIGNAL = 1.2
aggtttgctttgccttatgctggcacttagacattaattttataagctgaaacacagaatggaccttaaacattaacctaatgtaccaagaaataaaaatacgaatcaaagtggcagaaatagcataaatcatagatattatctttgtgtaatttttaaaaatggttacaacaaaattgcttcttttcattatacatttatgaaactgagctgatttcatgtgaccatactgattttaatgtctttttagtatttagaaaatgtgaaacaaccttcaacatgagctatagcttctaagtttatatcttcactcagcatggagaaaaagcaattttctttttttttctttttttctttttcttttttctttctttctttttttttttttgccaggctctgatgtggcacttggctctagacaagtggagaaggttctggctggtgatacaactcgaaaatctgagttgatagcgacaggggttaagtctccgcattgtgaggttctattgacttttcctgcaggcttgccctttatccttgtctgtattttagtttttaagaagccttcaaaaggtagggcac

SEQ ID NO: 12126 - DNA, 600 bp, Homo sapiens
  MAP TO AC012662.5; EXPRESSED IN PLACENTA, SIGNAL = 0.68; EXPRESSED IN ADULT LIVER, SIGNAL = 1.4; EXPRESSED IN FETAL LIVER, SIGNAL = 0.51; EXPRESSED IN BRAIN, SIGNAL = 0.67; EXPRESSED IN BONE MARROW, SIGNAL = 0.57
agcgttctaagcgaacttgggagataatttttttaggcacatttttattttagattgcagagacaagcgaggtagtagcaacagtttgttttgtttttctttccagctagggtaaagctctcaatcacataaatgataaacccaaacgacagtacctgcttgttgccagaatttgatgtgttttatcccaactgtaaccagtttgtcaacatggtgtgggttacactttaccacaaatatcttatctttatgtcctctgtaagagacaaataggaaataagattctagtttggatggaagcagtaacagttttattaaaagcatgcatttggtctaattttaagcacatctaacaggaccattaaattagaaaatggtttaaaatccacacgggcatctacattaaaataacgagctttggcttttctttgcatgtttgaaccctttcttcttatcctaatattgctgccaaagtttatttacttatactttaagcaaagtaatgaaatatttaaaacatattgtaatgtctccataagataaaattaatgccaccactgtggggttgcaagtaattgtggggatgtgcagaaggaaaga

SEQ ID NO: 12127 - DNA, 536 bp, Homo sapiens
  MAP TO AL139258.2; EXPRESSED IN BONE MARROW, SIGNAL = 0.71; EXPRESSED IN PLACENTA, SIGNAL = 0.73; EXPRESSED IN ADULT LIVER, SIGNAL = 0.87; EXPRESSED IN LUNG, SIGNAL = 0.89; EXPRESSED IN FETAL LIVER, SIGNAL = 0.77; EXPRESSED IN BRAIN, SIGNAL = 0.71
tgtcaggctttactccctggctgagagaggagtttggatgcagtagcaacccccctgaagtcccagcgtgagtgcagctgtggtagagtgatgaagggttgcagaaggccctgcctactcatcaaaccagtcctaaaagggagaaaagcaggcaggaaggaaccatgaggccttggaagcacaagaaagggaaaaccaacagctgggctcaggagaacccccgcagcctggccagccctgaggccttctctgccaataataaatctaggggtgccgcagtccacaaactctggcccttactttcttcctcagaggggaaaaggaaaggtgaggaagtgggtagctcttagaagactgttttggtttctaagtaaaaaagagttgtttttgatgtctgcccagagatagagccaggtcccagggggctggattttgtggttccagtaaaaggagccatgttgacatggaattcttggattggcctcatttcattaaaaacaagcagccaaaccaaatgggaaatggaattcagcaga

SEQ ID NO: 12128 - DNA, 549 bp, Homo sapiens
  MAP TO AL121917.12; EXPRESSED IN PLACENTA, SIGNAL = 0.7; EXPRESSED IN ADULT LIVER, SIGNAL = 0.73; EXPRESSED IN FETAL LIVER, SIGNAL = 0.7; EXPRESSED IN BONE MARROW, SIGNAL =   1; EXPRESSED IN BRAIN, SIGNAL = 0.66
ttctggtggagggctgtatcctcccaggcctggtctggcaccactgaaggctccgggctccatgagtgctgggccgaaggcctcaaggcctgcatggaccccactggggaatccaggctgctccagtgtaggccagaagcctcccaagctgggctgttcagcctcgaagggcattgcttcctcaggaggtgggctgtagcttccatgggctccagcttccctgaatgccgggttgaggacctgaaagttgggtctggagacctctgggggtccacaggcctcgccatcattctcgacggggatgggctcgttgtgaggcggttcggtctccatctcttcggctgggctaggcccagcaccgggggcagctgcccctggggcctccaaaggtggttgctcgggctgttccccgatttcaggggggatatcgcgttgtcctgacatattattgccgtagaggcagttgcgcacgcccataacacggtggcggcctctcaaaataagtttggggctccgtaagatggagcacccaaccgaactagggtgaaa

SEQ ID NO: 12129 - DNA, 545 bp, Homo sapiens
  MAP TO AC019194.2; EXPRESSED IN PLACENTA, SIGNAL = 0.48; EXPRESSED IN ADULT LIVER, SIGNAL =   1; EXPRESSED IN FETAL LIVER, SIGNAL = 0.78; EXPRESSED IN BRAIN, SIGNAL = 0.74; EXPRESSED IN BONE MARROW, SIGNAL = 1.1
cttggccatgtcattattgcaaacataaattataacagaagattttgaacttaatttagaagacaaagttaaagcctttattgtcatctcagttatttttaaagatgtctttagagggactttatgttaatacagttatttctgatttttctagagtccttggtataaatgaatggcagaatacggggttccagtatgatgtcatcagctgcctgaacttgctggaccgctgtgatcagcccctgactttgttaaaagatatcagaagtgtcttggagccaactagaggcagggtcatccttgcccttgtcctcccctttcatccctatgtggaaaacggtaagtgtggtcagtcaggctagctcttactgaggatagctgtttattggtatttgtgattttgtgctgtgtacaattaaatattgtctagtatgtcttataatagcctgcagtttaaagtaatccagttaatccatgtaaaacaccatcttggttaatgttcaccttaaggtggactttatagaggtctagcattccccttgcag

SEQ ID NO: 12130 - DNA, 551 bp, Homo sapiens
  MAP TO AC021498.4; EXPRESSED IN PLACENTA, SIGNAL = 0.54; EXPRESSED IN FETAL LIVER, SIGNAL = 0.48; EXPRESSED IN BRAIN, SIGNAL = 0.5; EXPRESSED IN BONE MARROW, SIGNAL = 0.44
tgatggtttctaaccccagggtgtttcctcatccatttaacttcctttgtcccgctcccccccaccccatacctttgaaaatggtcccttccttaaactctttttaatcacctcctcagtgtaccatctgcttcttgccaggaccccgaatgatatagcctcttctatttatttcatagtttctcaacactttcaggatatgctgatgagtcaacatcagagaggagatacaactgtttcctggatctcctagaaggcttgcaaagcaagcagttagaactgagggttaaaatggaacctgcagattatctgagggtttcaattatctttgttaccctcattctatcttgcatagagaattgagaattggctgtgtcaagactaagttgacacacatcaagaggctatagagcagtcatctgctcattaagagttttttactacgtcccactgatcttccacttctcgcaatgcttttgatgtgggtttaattctaagttctgacagagaaagggtctcacatctgcagtccccaatgcaatcttcacatg

SEQ ID NO: 12131 - DNA, 504 bp, Homo sapiens
  MAP TO AL133293.14; EXPRESSED IN PLACENTA, SIGNAL = 0.76; EXPRESSED IN ADULT LIVER, SIGNAL = 1.3; EXPRESSED IN FETAL LIVER, SIGNAL = 0.75; EXPRESSED IN BRAIN, SIGNAL = 0.8; EXPRESSED IN BONE MARROW, SIGNAL = 0.75
ccctgtaaggtggtgtgaggtggtatgtgtcaagcatttctctctcagtgtaaagggccctggaatctttctcttttctgcagtttctgtcctgtcctgggctccctgtaccctgtccaccttctgcaccttctcactgggaagcccattccctacccacagtgctgaccctcagagtccctccctgccattcgccttgatgaaggcacaaggccggcacctgctggcccctccaccgatgcctcaagcccactgcctgtcgttacagtcctcaaatgtgtttttctcctgttctcattagcgctgggcgtcaccacccaccggggctgcagccaggagcccggactcatctttgactcttccagtggcctgccgcccaccacccatctgtcccattttctgccgactgtcctccggggccctttcctgggccaccaccttcggtttttaccctccactttttactgaaacacctgttaccttcctaagtccccgtgtccgtta

SEQ ID NO: 12132 - DNA, 589 bp, Homo sapiens
  MAP TO AL121920.7; EXPRESSED IN PLACENTA, SIGNAL = 0.69; EXPRESSED IN FETAL LIVER, SIGNAL = 0.74; EXPRESSED IN ADULT LIVER, SIGNAL = 0.9; EXPRESSED IN BRAIN, SIGNAL = 0.73; EXPRESSED IN BONE MARROW, SIGNAL = 0.9
aagagatggtggctcattggctggtaggagccatgatggagggccagaaagacctgggaagtattttgaaggcggagctgacagaacttgctgatgagttggatgggctcaggagcagggtgaggaatcaagaggggatgatgtaaaactcccaggattgggcctcagcaaagtttaccaagtcagaaaaggctcaataaaccagctgtgtgcaagtaagaccatgcagggaggcctagggaaggaaatttccatgggagatgctcttggtgtcatttagatgggtcccaagttgttcaggcagggccctgtggctggtgcttccctggagctggcctgtcttggagctccaaagcctacgatggatgggttttatggtggctctgaagactgggacctccacttgcccctgacacaccaggacaggggatgggggaagctgcattctgggtggggctggcattgtctagctcacaataaaaattcctcaagttaaagtaatcagaggaggtaggacagggctgtgcccaagggtgaggctcattagagctttattgactgtcaacattgacaggaaccttggaggtca

SEQ ID NO: 12133 - DNA, 576 bp, Homo sapiens
  MAP TO AC013634.3; EXPRESSED IN PLACENTA, SIGNAL = 0.6; EXPRESSED IN ADULT LIVER, SIGNAL = 0.63; EXPRESSED IN FETAL LIVER, SIGNAL = 0.47; EXPRESSED IN BRAIN, SIGNAL = 0.51; EXPRESSED IN BONE MARROW, SIGNAL = 0.49
tcctagcccacattcctgagaaagaggcagtctgattggcgcagctcctcttcatgtgcagggcaaactcacaggttactgacccacctactaagtgtctgcctgtgagtcagtaggcacttcagggccaatcagcttcgaatagggatgagatctcttgcttttacttaggacagactgtgagcaaagcaagcactatgactggtttgtcttttccccagcacggccaatgcatgcttttctttcttcatagaatatttttcttccatctccctttctctgacagaaaaaaccatctcaaaggccatctcttccaggaggaggctatgccagagtcctccttcatggtgctacctccatcatcgcaccaaccatctggtaatgtcattgtgcagataggataatgttttaatattttaattgatgagattttctttaggattccctgatacctcaaagttcttctctttgaggagctagactttaggaacataggaaagcataagtgactcattcttggcttttgcattccaaaaaaccatttgggaaacataaacctggattttcgagctttca

SEQ ID NO: 12134 - DNA, 590 bp, Homo sapiens
  MAP TO AC015493.4; EXPRESSED IN PLACENTA, SIGNAL = 0.66; EXPRESSED IN ADULT LIVER, SIGNAL = 0.71; EXPRESSED IN FETAL LIVER, SIGNAL = 0.64; EXPRESSED IN BRAIN, SIGNAL = 0.9; EXPRESSED IN BONE MARROW, SIGNAL = 0.71
gggcccagaacctttcttaccttggcagctcttgggtacaccagagtctggtagataacaattgggcctggggtcttcacagagccatcgttgaatgagtaccagttgtggaagctgctgctgttctgtacagactggctgtctgctccagcactccagtaggtgtagaggccgtctgtgggtttggcgggggtggctgactgggctctcccacaggcctccagacccaccttggccttcttgtcagtgttgctgaaggacaacatggaggagcttcgctggtatatgtgctggttgccgaggctgtgggtgctgaaagtgaccttcctggcaatcattgtttctgagtgcacggggtagggggagggcagggagtcccctgaggagcgtaccttcttgggccctgtggggaagagctcatggatggcactggaaagctcaacaaagtccaagggcacgtagtttattgagtgcagccggagctgtgggtcaggcctgtaggtggtctggatgccgtcctcgatctggtccaccaggatcttggctgactgcaggaatgccacctggccagtctccttcagggcttcctt

SEQ ID NO: 12135 - DNA, 514 bp, Homo sapiens
  MAP TO AP000475.3; EXPRESSED IN BRAIN, SIGNAL = 0.47; EXPRESSED IN BONE MARROW, SIGNAL = 0.53; EXPRESSED IN FETAL LIVER, SIGNAL = 0.54
ttctcctttctgtgtgcgtgtctgtgtactagctagaacactatttgacacatagtaaacactgttagcttttgcaattactatgggaggagagaaaaagagatgagtctaggaagaccccaaggttttggtgtgagcaatataggaagagtgggattgttttttactgaaatggggacaactgaaaaagaagtaaattcaggagtgattgaaaatcaaagtgaagaatcaaacctgctaaatctgtgatgactcagagacataaaaatgaatgcttttcataggaatatctcaggtgacagattcagcctgaagcaaagaagtgaagttttcaacatttatatgatttttaaggctatggaaatgggtaggattaccaaaaaagtcattataagtacagcaaagataactcaaggctcagctctggacatgaaaactttagaagaagaatcagcaaaagtgcctgaaaggtgaaatgacagaaaaattattaagtcatgggttttggctacca

SEQ ID NO: 12136 - DNA, 586 bp, Homo sapiens
  MAP TO AC025812.4; EXPRESSED IN LUNG, SIGNAL = 0.87; EXPRESSED IN PLACENTA, SIGNAL = 0.66; EXPRESSED IN FETAL LIVER, SIGNAL = 0.66; EXPRESSED IN ADULT LIVER, SIGNAL = 0.92; EXPRESSED IN BRAIN, SIGNAL = 0.6; EXPRESSED IN BONE MARROW, SIGNAL = 0.66
gtgattgatgggatatgggcgatgagctcaaggaaagtgactcatgttttgtcttttcttcgactcatctgtcttcatctaacacacatgtttttgttcttaaatctagtaaaaaaacatcaaattaggccatgaagcagaaatcctatgtttgagctatgggcttggatttgttgtcattacctgagtagaaatttaggaagcttgtaattgtgtattctttcagaatcatcgcattttaacattctgtatcattttacagatgtcacaaaattggacttttaaaagaaaattattcaacatgctaatgctttaatatagccattacttgaactagtatttgtgtagctggtgaaactatcacacttctcctccttttgctcatttttatattctcggagctgggtagttggataaaatggaatctgtccatcataacagtagccatcctgagtatccagatgtcagggagtttctgccaggaagggaagacagctgtttggaatgggaagggagtagaggatactgcaaaacatgtcaagagttttatcaggggagtgagatgacagttggtagcaggaaaggg

SEQ ID NO: 12137 - DNA, 525 bp, Homo sapiens
  MAP TO AC022015.2; EXPRESSED IN PLACENTA, SIGNAL =   1; EXPRESSED IN FETAL LIVER, SIGNAL = 0.62; EXPRESSED IN BRAIN, SIGNAL = 0.62; EXPRESSED IN BONE MARROW, SIGNAL = 0.66
tcatcctacctgcagaaccctgtttatttcctttgttgtacttttcacagactctctctttctttcgttaattctgcatgggctcaccttctcccaggccccaccagaatatgagtttcaggaggacactggatttcccgaatatgggtttcctgaatatgagtttcaggaagacactgggtttcaggaatatgggtttcaggaggacactgggtttcaggaatatgagtttcaggaggacactgggtttcaggaatatgagtttcctgtccacactgtatccccagcaccctacacagggcctagtgcaaacagcatccctggtagatagcatgggatgaataaatgttatacaaatggtctgacccatatgaagaaagaattgcaatgaggatttattatagccccaatgtcaacttgcttttctaacttgagttaagttcccattgccagagtcctcattgcaggctgatcgggggttatttatcctggggaacttggctgtgatgactttgagaggcccag

SEQ ID NO: 12138 - DNA, 525 bp, Homo sapiens
  MAP TO AC010290.4; EXPRESSED IN PLACENTA, SIGNAL = 0.56; EXPRESSED IN FETAL LIVER, SIGNAL = 0.69; EXPRESSED IN ADULT LIVER, SIGNAL = 0.85; EXPRESSED IN BRAIN, SIGNAL = 0.61; EXPRESSED IN BONE MARROW, SIGNAL = 0.61
ttatccagagcactggggtcttctgggattactgtcttctcctgccatgggaagtggtgaagctggaagaaaggtggtctcagcagttggtttccatttcaatctgaaatgctgggattttcattggcacagacctccctgttgtccttcaatacatggcctaaatctgggccagagaatacctgtcgatatcattatatctcacccctgctttccctccacagcctcagtgggttgggccgcaacatcatcctcacaactatgccagcaggcactaagctcattgctggcaataagcctgttagtttcctcactgctcagcagttgcagcagcttcagcagcaaggtcaggccacacaggtaaggcccagggcaaattcttggccatatccggctcctctctgattccactgctgttcttaactggtgagcccgcttgcaatccattgacctgaccttctgtctttgcaaacaggtgcgcatccagactgtccctgcatcccatctccaacagggaacagcttc

SEQ ID NO: 12139 - DNA, 516 bp, Homo sapiens
  MAP TO AL139248.2; EXPRESSED IN PLACENTA, SIGNAL = 0.71; EXPRESSED IN ADULT LIVER, SIGNAL = 0.9; EXPRESSED IN BONE MARROW, SIGNAL = 0.66; EXPRESSED IN FETAL LIVER, SIGNAL = 0.67; EXPRESSED IN BRAIN, SIGNAL = 0.58
aggtttgctcccttgactcccagctgctcctgtccttttttgtctgttcaggccctggatccaatggaactgaagggtgaaggtcttgtcctttccctggaagaacagctcagtgctttgaccttgtcagaactccgtgactcagagccatcttccactgtttcccttaacggcaccttcttcaagatggagctttttgaaggcatgcgagagagcaccaaggtactttttgtctcctctgtagtagtcgagagacttcgattcctcacacattttcctgtgtgacagcacttcatttgtccaagtgggaacagccatttgccagcagagctagagccgttaaattctagctgatcagattctccctccagtcttaaagcttcatttatttcacagataacactaaagccttactacataggggactttgagagagtaatttgggacaaccccagcattgcactgaagtgggttttctgtcatgggtcactggggagcttgccaggtttgtgctag

SEQ ID NO: 12140 - DNA, 536 bp, Homo sapiens
  MAP TO AC013597.3; EXPRESSED IN ADULT LIVER, SIGNAL = 1.4; EXPRESSED IN HELA, SIGNAL = 2.2; EXPRESSED IN FETAL LIVER, SIGNAL = 1.2; EXPRESSED IN BRAIN, SIGNAL = 0.98; EXPRESSED IN BONE MARROW, SIGNAL =   1; EXPRESSED IN LUNG, SIGNAL = 1.2; EXPRESSED IN PLACENTA, SIGNAL = 1.2
ccctgctgagtttgttctccagaattaaaccttccaattgaacttgaggacatgaactccagttgctgacactgtgcttacattatatccgaaataagtaaatgcttctttttaaaaaagtatttcttggggacattgttcttagtgtttcttatcttagggaaattgttcttatttttgttttggaaggaaaaaattggcagtcaccttcctctaactgaatcaccatgcagaactaacaaaagagaaatcaccttttctcttttagtagagacagaagacaattgaaaatatagaggcaccttcactgcttagcaaacaggacagagggcatgtttttaggtaccatttaagggtgaaagcctacttctttgcagtccttctttactcttccctttggtctttaatgccttaccttggatgtttgcttctggagcgcctgtcttgaggtaaggcatcttactttgcctagtcagaggcactggctttgtgtccagggaatgcagaagtcctagtgggaagttcagagctgatcg

SEQ ID NO: 12141 - DNA, 549 bp, Homo sapiens
  MAP TO AL139117.3; EXPRESSED IN ADULT LIVER, SIGNAL = 0.65; EXPRESSED IN BRAIN, SIGNAL = 0.68; EXPRESSED IN BONE MARROW, SIGNAL = 1.8; EXPRESSED IN LUNG, SIGNAL = 0.84; EXPRESSED IN PLACENTA, SIGNAL = 0.76; EXPRESSED IN FETAL LIVER, SIGNAL = 1.1
tttaacacggtgcctccttctctcctaggagcctacagtaaacccaccctttcagccctgccgagtcctcttgtgacctcaggaaagagcgtgaccctgctgtgtcagtcacggagcccaatggacactttccttctgatcaaggagcgggcagcccatcccctactgcatctgagatcagagcacggagctcagcagcaccaggctgaattccccatgagtcctgtgacctcagtgcacggggggacctacaggtgcttcagctcacacggcttctcccactacctgctgtcacaccccagtgaccccctggagctcatagtctcaggtgaggctcctgaccctgtcctctctgagctcagtggctccgttcatgccctgctgccaggagagctctgggcagggatggagggagaggggctcagccagtgggggactcagccctcagaggggaggaggacaacaggggccctcccaggcatgcccatgctcttctccctcacctagggtccagaaggtgccaggtggacagagaaatggtccttggga

SEQ ID NO: 12142 - DNA, 571 bp, Homo sapiens
  MAP TO AL157773.3; EXPRESSED IN PLACENTA, SIGNAL = 0.76; EXPRESSED IN ADULT LIVER, SIGNAL = 0.97; EXPRESSED IN FETAL LIVER, SIGNAL = 0.6; EXPRESSED IN BONE MARROW, SIGNAL = 0.75; EXPRESSED IN LUNG, SIGNAL = 1.1; EXPRESSED IN BRAIN, SIGNAL = 0.81
gagctgtgttcccatgaagctttatttatggattctagggtgacctaaatgctagaattggcagagaaggacataaaaattgccattgtaaatgtttaaggactcaacagaaaagataaagatagtaaacaggtgggaaatctcagtatagaaataaaaattataaaaaataaccaaatggaaattctctaactgaaagttacattttctgaaataaaatatccattaaatggcttaacagtaaactagagattacataagaaaactcagtgatcttgaagacaaatcaaaagaaatcatctgctatgatctaaatgtttgtgtccctctaaaatttatgtgttgaaatctaatcctcaatgtgctggtattaagaagtgaggcctacagaaggttattaggccatgaaggctctgccttcatcagtgacatttgtgccttcataaaagaggcttgaagatgcagctggaaggcaatatctatgaagaatggggccctcgccagacaccaaatctgctggcgccttgatcttggacttcccagcttccagactgggagcaacaaatttcca

SEQ ID NO: 12143 - DNA, 556 bp, Homo sapiens
  MAP TO AL136146.5; EXPRESSED IN ADULT LIVER, SIGNAL = 0.87; EXPRESSED IN BRAIN, SIGNAL = 0.82; EXPRESSED IN PLACENTA, SIGNAL = 0.86; EXPRESSED IN FETAL LIVER, SIGNAL = 0.9; EXPRESSED IN BONE MARROW, SIGNAL = 0.75
gctgatggccagaaaagaacatttggattttacaaccagtctttgatggagaaagaaaaaaagtcagtgaacacccattttgtgcctgacattcaagtatgtttgttccctgtatttctccatttagtcctctcagaatctctggaggtggactggggcagattattagtccatttcacagatgaggaaactgaaggtcagagaggttgagtcatctaccagaagtctcacctataccaaaccacacacctttcagttgaggggcgctgaggtccctgctgttgctgtgccatctgacctgtcccctctctctgacagagagccagctgctccccgggaacaacttcaccaatgagtgcaacataccaggcaacttcatgtgcagcaatggacggtgcatcccgggcgcctggcagtgtgacgggctgcctgactgcttcgacaagagtgatgagaaggagtgccgtgagtggcctggccctttgctggggtggggtggcagccatcctggggcagaggggagcaggtcctgagcaggcttagaccctgcacactc

SEQ ID NO: 12144 - DNA, 562 bp, Homo sapiens
  MAP TO AC015908.4; EXPRESSED IN FETAL LIVER, SIGNAL = 2.3; EXPRESSED IN BONE MARROW, SIGNAL = 1.4; EXPRESSED IN PLACENTA, SIGNAL = 0.7; EXPRESSED IN ADULT LIVER, SIGNAL = 1.1; EXPRESSED IN BRAIN, SIGNAL = 1.1; EXPRESSED IN LUNG, SIGNAL = 0.94
gtttgagttctgaccggacgggaaattaagataagccaacacagcaattacaagaatgatgtcatgatcagaaaagaggcttatgtacataaaagtatgatggaggaactgaagagtataattgatgacagtgaaattaccaaagaggatgatgcgttatggcctcctcccaaccgagtgggccggcaggagcttgaaatcattattggagatgaacacatttcttttacaacatcaaaaattggttcccttattgatgtcagtcaatccaaggatccagaaggcttatgagtattttattatcctgtccaggaccctgaagtgtttggtcttcagtcttactggattacacttcaagattaaaccaatctaaactgaatattggtgtggacatggggggtgggagtagtttttaattaccattatcaagaacattttgtgtctatcagggcagtatatttttataaactataaatgattatctttaataaatatgtgataaaatttaaaaaaagcaaaacaaaacttctagagaataccttcaaaaccttggtgagggaaa

SEQ ID NO: 12145 - DNA, 594 bp, Homo sapiens
  MAP TO AC011023.3; EXPRESSED IN PLACENTA, SIGNAL = 3.6; EXPRESSED IN FETAL LIVER, SIGNAL = 1.4; EXPRESSED IN ADULT LIVER, SIGNAL =   1; EXPRESSED IN BRAIN, SIGNAL = 1.1; EXPRESSED IN BONE MARROW, SIGNAL = 1.1; EXPRESSED IN LUNG, SIGNAL = 0.98
tgcatcttctatgggggaagctggtctatgcaggtctttgcagttttacctgataaataacttgcctgctgtctgacactaggaaagctgtttaatctctccagagttcagttttctcaaccataaaatgaaacagaaatactaacccgatagggctattatgaagattaaatgaaggaatcaaccatgtgtttgatacatgttatgtgctcaatgaatgttaactatgttggcagaaagggggaggaggaggaggaggaggaagttggtgatggtgatgatgacgatgatgctgctgatgttattgcagtagacagggtagagggaaagttagtaattcagaatgagaattctatagtcttgatactcagactaatatctgttatttagaaaaaaatacacaactataatcaaaatattagggaaaaatccttaaacatacaaaaaaagcaatgtctaaatctgctgtctagtctgtatttttttttactgtgtgctaatggaaaccaataatttgaacaagaaagggaaagggtgaggtatcatttgagaaaaggaaacttagtttccaattctggtctgcacttttggtga

SEQ ID NO: 12146 - DNA, 576 bp, Homo sapiens
  MAP TO AC013764.3; EXPRESSED IN PLACENTA, SIGNAL = 0.75; EXPRESSED IN ADULT LIVER, SIGNAL = 0.56; EXPRESSED IN FETAL LIVER, SIGNAL = 0.61; EXPRESSED IN BRAIN, SIGNAL = 0.5; EXPRESSED IN BONE MARROW, SIGNAL = 0.45
aagcttgagcattttgtggggagagggagacagtgtgtgaacatgcctcacatgtgctggctgagcaggggatggcctccatcactttatttcctcttcctaatggattgcaatgcgaaaggccatccaccgaggtgatctctccccaatgattgagattctttttttcattgactgtgttctgctgcagtccagcccctcaggtttggccttccacatcattccccgacaacccacccccatgcccttctccaagaaggatgacctcaagtgtgaaataatctccagcatctgtttggggctttgattttgtgggtttattttacacatcctaattctgcaggaaactccctgcagatgtggagaagccctcagttactgaccccttgttaaaagaaacagccagaaaccagaaacatgaccaggaagataaacagctgttgaggtctcagctgctctccagagtggcatcatcttcggaaataagccttgcattcatcttcaccgaggaaattgggccttgaagttcatttagttagagatggtaaaagcatggcacacatacctcccaccctt

SEQ ID NO: 12147 - DNA, 537 bp, Homo sapiens
  MAP TO AC011938.3; EXPRESSED IN PLACENTA, SIGNAL = 0.74; EXPRESSED IN FETAL LIVER, SIGNAL = 0.64; EXPRESSED IN BONE MARROW, SIGNAL = 0.64; EXPRESSED IN ADULT LIVER, SIGNAL = 0.72; EXPRESSED IN BRAIN, SIGNAL = 0.55
agggggctctgaagtctaccggaaatgatgcattttttttctggctggaaagatttgatagattcaaagaattgacgatatcctgtcccctcaggaaggactgttcatactcaggtttctaaattgtggtcacttctgcagggcatttaatgtccaaatttgatgtttgtggcattcatgtaggtatcttggaagttttgcactgcatcttaactgaaagcccagaagccttaaatctgatagcggagggccacatcaagtcgatcatctccctgttggataagcacgggcggaatcacaaggtaggtgtggaaagaacggtgattgactttgcctggtgtttccctccccaatgttcatgaccattgtgttttactgagagcatgttgattagtctttcttgactttgataaaaatcttgggaaactggaaaaaagactttccccgcatacaagcactctccaagctgggcagccacactggacttcggatggtgccgtgggtttccaacagctccccagtcgctgctcattatca

SEQ ID NO: 12148 - DNA, 577 bp, Homo sapiens
  MAP TO AL161422.3; EXPRESSED IN BRAIN, SIGNAL = 0.54; EXPRESSED IN BONE MARROW, SIGNAL = 0.49; EXPRESSED IN PLACENTA, SIGNAL = 0.61; EXPRESSED IN ADULT LIVER, SIGNAL = 0.63
gccagctaaaaatgctctgctgaaactaggagagtgagctcctgcttcctcccttgctcccctcaactctacttccaacaggagtccgagggaagttaaatgtatcttcataacggcccaggagccctacgtgatgcacctatcgactcagtcaccagctgtggcctctgctgtgggtgtctctgcctcctcccctctttcagggccctgtcctagggtcaccttaataaaccttccctcagcaccttattgtaaataatagctctgccctgcagcatcggaatcttaactccctgagaactgggaagttggcctgtggttttcaccagggcagccccagtgtcctcatcagtgatacggatatcttagcattcaagatagctgtccctaaaggagaagacgaggagatcattcacaacctgggagagatgtgtttctgcagcacttcattaatatctagactagcattctgcacccaaaacagactccctgacatgtttcctgtgttaaacattccaataccaagaattttaaaaagcaatttttctcattttgaagaaaaccatgcctcctacga

SEQ ID NO: 12149 - DNA, 557 bp, Homo sapiens
  MAP TO AC021000.3; EXPRESSED IN FETAL LIVER, SIGNAL = 0.76; EXPRESSED IN BRAIN, SIGNAL = 0.95; EXPRESSED IN PLACENTA, SIGNAL = 0.86; EXPRESSED IN BONE MARROW, SIGNAL = 0.93
cagtggcttagagtgagggctctggagtccgttgcacttggatttgaacgccagttctgctattcataaatctgtgatccagggcaaattgtacccatcattggtaaattaggttaatcgtgcctacctcccagaattgtagggattcactgaaagagtaaatgcacacggtcagtgatcagtagaacacagctgcttttatcctcctcatttttgccatcaaaccatcattcctaagactgtgttttcccacttgaaggttgctggggagttccttgtactgtgtttgggcctgcagtgcctgcctaaaccatttctgatgaagctacacctttgggtaccatgctttgtcccacctgcccatctcaggcagagacggtctctgcctcccaggcattccagactgttcctggccttggctcctggtctccctctgagggctgtcatgctgcagccagtcccagcgagtgccaagctttagcccggacaccagagagtgagaactctggtgagaggctcgtggcaggaaggaggaggcttgtgggaagaggtggaaa

SEQ ID NO: 12150 - DNA, 600 bp, Homo sapiens
  MAP TO AL139008.3; EXPRESSED IN LUNG, SIGNAL = 0.97; EXPRESSED IN PLACENTA, SIGNAL = 0.95; EXPRESSED IN FETAL LIVER, SIGNAL = 0.82; EXPRESSED IN ADULT LIVER, SIGNAL = 0.94; EXPRESSED IN BRAIN, SIGNAL = 1.1; EXPRESSED IN BONE MARROW, SIGNAL = 0.97
cttcgcctactgaaaatggctcatggtatttttgacatgggaatgagttctcattaggcacctccctatcatgtatatggctccatgttttaaacgtagatatgcttaactttgtgagttaaatcactccaattatccaccaagcgctacaggcgggaaattcccagcgatggaaagcagctgaggctccatttggctccgcggctcccagggtcccggcgaactccgacgaccccgcctcaggcggtgcggggaaaccgggcctgggggccccctcccaccgagggctgagcccccgctacctgtcttttctgtcgcggacgtccaagtcccggaacctgcgcgtcaggcagtgctccacctctgcggcgtcgcccttgatggccgccctgtggatcttccgcagttcccagtcccgaatgtggtacccccgacccgcatactcttggtccatggagctcaggagcgcctggcccaggcgtctcccaaaactgaggagcttcctcatggtggcgacttctcagatgcccaccacccgctcctgagacgccgcggctcctcgtggcctttccacccccacccagctccaaattcgagatc

SEQ ID NO: 12151 - DNA, 592 bp, Homo sapiens
  MAP TO AC026206.1; EXPRESSED IN ADULT LIVER, SIGNAL =   1; EXPRESSED IN BONE MARROW, SIGNAL = 0.77; EXPRESSED IN LUNG, SIGNAL =   1; EXPRESSED IN PLACENTA, SIGNAL = 0.89; EXPRESSED IN FETAL LIVER, SIGNAL = 0.82; EXPRESSED IN BRAIN, SIGNAL = 0.88
ccataggctagcatttcataagctttaaaaaataattttttttctcaacagagagaactgtcattaccgtcccaccttccaaaatggatgttacagttggcgagagtatagtgctaccatgccaggtgtcccatgacccctccattgaagtggtatttgtatggtttttcaatggagatgtcatagacttaaaaaaaggagtggctcattttgaaaggattggaggagtaagttactgaaattgttaagtgcttaataaaatgaatcaagtcttttacatgaatcaccatttttcatagttactctctccatctttatttgcatggataatcactgactgtttttgaagctacatttgtttttgttttggtttattttgtttcgtgtcttccgtagaaatacttgttttctagatgtaattataataagggggataataaaagggtttagatacaagaaatgacaatgatactagtatatcttttaatttcagagttgttttatgtttcgtatttatccagctgtaacaataaagtaggacttgttatatgggcttacgtttttatccatttctccctttctgtctgcagga

SEQ ID NO: 12152 - DNA, 548 bp, Homo sapiens
  MAP TO AC026707.2; EXPRESSED IN BONE MARROW, SIGNAL = 0.83; EXPRESSED IN LUNG, SIGNAL = 1.1; EXPRESSED IN ADULT LIVER, SIGNAL = 1.4; EXPRESSED IN BRAIN, SIGNAL = 0.82; EXPRESSED IN PLACENTA, SIGNAL = 1.1; EXPRESSED IN FETAL LIVER, SIGNAL = 0.96
tgctaatgtgcatttctcggctataagtggaaaatttcatataaaattttctggtattatttgataacagaattttagtatttcaaaaatcatttgaaagacaaataatctttgaaacctatgttcagaactgttgatagacattgtcaatctaatggctgcatagcattcaaatgttggaattaccataatttatttgtttctctctccatagattgatgtttattcccaatcttgctgttatgtataatgtttaacaaactaatctgcataaaaacttgacttctttaagataaattgcctatttattgaccaataattctttccttagattgcattcatggcttctctggcaacccacttcagcaatcagaacagtgggattatcttcagcagtgttgagaccaacattggaaacttctttgatgtcatgactggtagatttggggccccagtatcaggtgagatggaaacataggatgaagattgagttaatcaatgtaataataaagacaattaaggaaggaaggaaagaagagagggaggga

SEQ ID NO: 12153 - DNA, 560 bp, Homo sapiens
  MAP TO AL050342.42; EXPRESSED IN PLACENTA, SIGNAL = 0.85; EXPRESSED IN FETAL LIVER, SIGNAL = 0.69; EXPRESSED IN BONE MARROW, SIGNAL = 0.74; EXPRESSED IN LUNG, SIGNAL = 0.83; EXPRESSED IN ADULT LIVER, SIGNAL = 0.8; EXPRESSED IN BRAIN, SIGNAL = 0.83
atctgccttggttggaagtggggggatcctggccatgtcagatggtaacaggggaaaccaggtgaggggtgtacagcgatctctgttatatttgcaaatcttctgtgattctaaacttatccaaaatacaaattttatttttttagaaaataacttggctcatgggaggaatggaaagaatgccactgtagctggaggaaggggcaggggcgagagagaagggaaggtgggagacatggctggaggaaggggcaggggcgtgggagaagggaaggtgggagacatggctggaggaaggggcaggggcgtgggagaagggaaggtgggagacatggctggaggaaggggcagggacatgggataagggaaggtggaagacatagctagagatgtagaaggaaaaagtgtgctgggccctgttggccaagatgatgattcttatctctctttttgccattttttattgataaactttattttttagagcagcttaaggttcacagcaaaactgagcagaaagtacagaaagttcccacctgcccctgtcccacacatgtaca

SEQ ID NO: 12154 - DNA, 544 bp, Homo sapiens
  MAP TO AC009943.4; EXPRESSED IN ADULT LIVER, SIGNAL = 0.63; EXPRESSED IN PLACENTA, SIGNAL = 0.6; EXPRESSED IN FETAL LIVER, SIGNAL = 0.68; EXPRESSED IN BRAIN, SIGNAL = 0.55; EXPRESSED IN BONE MARROW, SIGNAL = 0.78
ttggtgatctagttgggttccagtttaacagttttaggttttgcttgacagagctataacacttcagtctatatttgatttttcaagggaaatgagttaactcgataagtactgttttgttatctttaaactttctcaggtctttgacattttgaattcagctgaattagtctgtctgacgagacgcattttattacctaaaaacgtaattgttgaatgcatggttgctacacatcacaacagcaggaatgcaagcatttggctgggctgtgggcacaccgacagaggacagctctcatttcttgacttaaatactgaaggatacacttctgaggtaaatccaaatgctctttaaatctttcataatttaaagcatataccatttggaaagttacttaggaataaattaaataagagccaatgtaggattattattcaattagccttctgttagaacaagagtattcaagagcaaatgtgttttgctttagaatcacagcatatgtcttagctcagggtccctagaaacagagcctgagatggg

SEQ ID NO: 12155 - DNA, 541 bp, Homo sapiens
  MAP TO AC022863.3; EXPRESSED IN LUNG, SIGNAL = 0.99; EXPRESSED IN PLACENTA, SIGNAL =   1; EXPRESSED IN ADULT LIVER, SIGNAL = 0.95; EXPRESSED IN BRAIN, SIGNAL = 0.86; EXPRESSED IN FETAL LIVER, SIGNAL = 0.89; EXPRESSED IN BONE MARROW, SIGNAL = 0.87
tcggcattgtcacttcagagttctcttttctcatggtagcctggcaaccgaattgcgtctctttgatggagggcgttcctactagaaaacagctttatgaaaagtgtcagggtcatctttagaaacccaaagaaaacaaaacaaaaccccccaaaaaaagcctaccaccaagaaggcaaagaaaaaaaaatctgcacaactcaattattcagctgcacacaactgcgcctgtcaggtcttggtaaaaacactcacttgaatttaattaagtttgtccatgtagcctgtgaactgctcgccagacctgctggaaggggatgaaaagcctgacggcaggccccgtgaggccattgttgataaggaagggcacaacattctcaagttaggtaaattcccatccccttgcacacaaaatgcactggggtaatatccttttgaagggtgtgtcagaaagttgggttgcctgagagccaagacagaggagaacttttcccaccaataacatatccacttcttctggaggcagtgtgctgaatggtaa

SEQ ID NO: 12156 - DNA, 527 bp, Homo sapiens
  MAP TO AL122006.5; EXPRESSED IN PLACENTA, SIGNAL = 0.71; EXPRESSED IN FETAL LIVER, SIGNAL = 0.88; EXPRESSED IN BONE MARROW, SIGNAL = 0.64; EXPRESSED IN ADULT LIVER, SIGNAL = 1.3; EXPRESSED IN BRAIN, SIGNAL = 0.72
acatgtcttcctgccaatcccaatgcaaaccatcttttctacttttgtcttacctttgggcatctgctattatttatcacttactcatctgactatttgtctacttcaaaatgcatttcagagctagtgtatctcacactgatctataagtgaaatggcctaggctctacaggccagggatgcattatttaactggatattggccaaataaaacaaaatagtccacactctcctaaatatccagagtagaattgaaaggagactctgaggctttccagaacaaagaagcctgcaaaaattgcatgttggacgtatgcgaaaaccaaggcagctctttcaaactccaaaatacctacaaagagcttccccaaatatatttggagaaagaagacaggtaggatagctatgatgatgctcaggaataaaaacaaagtgacaaggcagctgtatgacattttatcttgatatttattgagaaagttgtttttagtaaaattttcactctcacgttattttctgaaacggcc

SEQ ID NO: 12157 - DNA, 533 bp, Homo sapiens
  MAP TO AL161668.1; EXPRESSED IN BONE MARROW, SIGNAL = 0.96; EXPRESSED IN ADULT LIVER, SIGNAL = 1.1; EXPRESSED IN LUNG, SIGNAL = 1.1; EXPRESSED IN PLACENTA, SIGNAL =   1; EXPRESSED IN FETAL LIVER, SIGNAL = 0.85; EXPRESSED IN BRAIN, SIGNAL =   1
ctccatcctgactgctcctcctaagagagatggcaccggccagagcaggattctgcccccttctgctgcttctgctgctggggctgtgggtggcagagatcccagtcagtgccaagcccaagggcatgacctcatcacagtggtttaaaattcagcacatgcagcccagccctcaagcatgcaactcagccatgaaaaacattaacaagcacacaaaacggtgcaaagacctcaacaccttcctgcacgagcctttctccagtgtggccgccacctgccagacccccaaaatagcctgcaagaatggcgataaaaactgccaccagagccacggggccgtgtccctgaccatgtgtaagctcacctcagggaagcatccgaactgcaggtacaaagagaagcgacagaacaagtcttacgtagtggcctgtaagcctccccagaaaaaggactctcagcaattccacctggttcctgtacacttggacagagtcctttaggtttccagactggcttgctctttggctgacctt

SEQ ID NO: 12158 - DNA, 560 bp, Homo sapiens
  MAP TO AC011778.3; EXPRESSED IN PLACENTA, SIGNAL = 0.58; EXPRESSED IN FETAL LIVER, SIGNAL = 0.64; EXPRESSED IN BONE MARROW, SIGNAL = 0.58; EXPRESSED IN ADULT LIVER, SIGNAL = 0.72; EXPRESSED IN BRAIN, SIGNAL = 0.52
gcattcaggaaatgctccacatgctataatttggtcttctgaaaattaggttccaatctttgtgcaattcatctttaaatattttggcaacaaacaaaatgtctttttcaaatccttttctttttctcctctgaaaatcatttatcggcctatataaaccagaaatactggcatgatttggtccaagcatactatttcagtgcttgtctctatggtggcatatttcaatgatgtcagtagatttccaggactttacattagtgttcacttcatccctgcagatgatccatcaattttattttctaatgacgtacctgcaatggcactctttcttacagtatatgtctctaagtacagaattccttgtagctcagtgctctcatcttatgttaccaaaaatgtaattttgaatgctttggctaacaaatgaaaattgaatttagtatggcaatctatttagagaaaactcattatgtatttctttttgcccctgtagcttaacaaactggaaaatttgaagtagcatcatgatcatcatcaccaaaagcaataacagcagc

SEQ ID NO: 12159 - DNA, 560 bp, Homo sapiens
  MAP TO AL121586.28; EXPRESSED IN BONE MARROW, SIGNAL = 1.2; EXPRESSED IN PLACENTA, SIGNAL = 0.81; EXPRESSED IN ADULT LIVER, SIGNAL = 0.82; EXPRESSED IN BRAIN, SIGNAL = 0.88; EXPRESSED IN FETAL LIVER, SIGNAL = 0.88
aatgcaatttgcctcattcccaggtgagttggggtcctccccagggttgcagatttacttcctcttcctgggaacacccgccgacctggggctcctgggtgcctaacagagccaggcttttcctttggcaaacctgtaggtgtgcggaggggccatgacccatgacacagtcttctgtctgtgtgctcctggctgtggctgctacctggaggcggcttgggtagtgctggggctggggtgtagcaggactggccctggggatgtcagactttgagtcagggactcatccagcctgcgggtctctgcctccaggacagtggcctcaggggcctgggccacggcaagaagtgagtgtgagaggctgtggtgcaggcctgctagctcacggctggtctgtgctgagcgggtgatgtagtcctgcttctgcttccgctccaaagtcagctgagcttgcagcaggaccacctggtgggcaggaaaaaaaaaaaaaagggagagcagctgagggccctgaagttgtcccagctcttcctgctctgtgttctctgaagctcgttggc

SEQ ID NO: 12160 - DNA, 562 bp, Homo sapiens
  MAP TO AP001432.1; EXPRESSED IN PLACENTA, SIGNAL = 0.67; EXPRESSED IN FETAL LIVER, SIGNAL = 0.89; EXPRESSED IN LUNG, SIGNAL = 1.5; EXPRESSED IN BRAIN, SIGNAL = 2.3; EXPRESSED IN ADULT LIVER, SIGNAL = 0.93; EXPRESSED IN BONE MARROW, SIGNAL = 0.68
ttattcatcggcctttgtccttgggcgtttcatccttcaagggaagccctaagtgatccatggtgtggtgtgttcctcacaggttcatcccgagttactccctgagtcttcaggcgacgatggccaagggcttgtgacttctgcaagcgacgtgactggaaaccacgcagcacttcacagggatcctagtgtgttctctgctggtgattccccaggggaggctccttctgcgctgttgccagggccaccccctggtcagcctgaagccactcagctgacagggccaaaacgggctggccaggcagctctgtcagaacgaagccctgtggctgatcggaagcagcctgttcctccaggacgtgctgcgcgttcaagccagtctccaaaaaagccgttcaatagtattattgagcacctgtcagtggtattcccatgttacaacaggtatgaacagaaaatgtctgtgactgtgtttaatactttatcgaactgaggtttcctgattagataaaatcatggctagttaggtgttaacatgaaaagggttgcataattgttttgc

SEQ ID NO: 12161 - DNA, 531 bp, Homo sapiens
  MAP TO AC013705.3; EXPRESSED IN PLACENTA, SIGNAL = 0.84; EXPRESSED IN ADULT LIVER, SIGNAL = 0.81; EXPRESSED IN BRAIN, SIGNAL = 0.63; EXPRESSED IN FETAL LIVER, SIGNAL = 0.73; EXPRESSED IN BONE MARROW, SIGNAL = 0.62
aaccatgcccattttagcagcagtatgtaaggtaaagaggtacagacatcagttgtatcatgaaatacaaaggtgacaaatctaacttaagtggtgtttacacataaaagatgctaaaaataagatacagaatccaatatcatacccatgcaaaaacaatctctgtggcaaaccttttagctttgaaatgcccttagaactcaagaacaaagacgacggtgatggtagtggtggcatcatacgaacaatagcaactaacatttatgggactgctctgtgtgccaggcagtgttcaaagtgccttacatgtagtcattcatgtcatgctcacaaaaaaaccccagtgaggtaagtgttattatccccgttttgcagatacaagaagtaaggcacagaaggttaaatggcagagctgggatgtgaacttaagctggcttcagagcctgtgctcttaaaaatacctacatcacatcttaccttatcatcttatggtatggtgttgtatcaaatcctcttttgctcttccccctc

SEQ ID NO: 12162 - DNA, 504 bp, Homo sapiens
  MAP TO AC020760.3; EXPRESSED IN PLACENTA, SIGNAL = 0.62; EXPRESSED IN ADULT LIVER, SIGNAL = 0.61; EXPRESSED IN FETAL LIVER, SIGNAL = 0.47; EXPRESSED IN BRAIN, SIGNAL = 0.79
cctgccactgagctccttactgagttttaatctggcatgtaccactcttcaaatctctctgtagttgagattcaaatccctgaatatggtcaaaccccttgaaagaacaacattcttatacagtggacaatgcacatcaatgggacagttttgtattcatcaacaacattcaagacggattccataaagtctgggttggcaaactctgggtaaaaaaatatttcaggttgcaggaaccttttgtaaccaacatctattatgaacttctcctggttgatcacattgatacctgtgtactgtttgatccacttccagggatccacatcatacttagcaaattccttgactatatcagggcaaatgtaacagtatttctccttaatggcttttgtggtctccagtgactgctcaagagggattcctacctccctctcccttagtagttgttgaatgaaatacacagtatcacctacaatcaggatgtgattgatgcagctcccaatt

SEQ ID NO: 12163 - DNA, 553 bp, Homo sapiens
  MAP TO AC016201.5; EXPRESSED IN FETAL LIVER, SIGNAL = 6.6; EXPRESSED IN BRAIN, SIGNAL = 1.3; EXPRESSED IN BONE MARROW, SIGNAL = 1.1; EXPRESSED IN PLACENTA, SIGNAL =   1
ttctgtggacaccactcagcctctttcctcagccaccccgtcatcacccaatggacccatgaacaaagtgaccatgatggcaggaatgtaggttatgcatgggatcagaaacatggacttccactcaccaaggctaacctggttatggccattggtgaatgctcagtttaccagcagcagagactaacactgagccctcaatatggcaccattcctcagggtaatcagccagcaacctggtggaaggttgattatattgtacctcttccataatgaaagggcaggagtttgtcctcactgaaatagacacttactgtggatatgggcttgcctatcctgcatccagtgcttttcccaagactaccatccatggactcgtggaatgcctcatccgctgacatggtattcctcacagcattgcctctgacaaaggcactcactatatggctaaagaagcgtggcagtaggctcatgcccatagacttcactagttttaccatattccccatcatcctgaagcagctggaatgatacaacagtggaatggcctttt

SEQ ID NO: 12164 - DNA, 591 bp, Homo sapiens
  MAP TO AL121910.19; EXPRESSED IN LUNG, SIGNAL = 1.2; EXPRESSED IN BONE MARROW, SIGNAL = 0.88; EXPRESSED IN PLACENTA, SIGNAL = 1.1; EXPRESSED IN ADULT LIVER, SIGNAL = 1.4; EXPRESSED IN FETAL LIVER, SIGNAL = 0.81; EXPRESSED IN BRAIN, SIGNAL = 0.93
caaggggagattctcagtggaattttcaaatatagaatgaaatgtatttgcatttaaagtcacattcttacatattagttgagtgactattcaagtccaggccctgaatcaagtacagattttacatttagacctgtgatatgttaggttaattttgtggaaggtggaatgtctgtgtctagattagttttgagcatgtgcaagttaatttgttccagcttcatttcctgaagagactctccttcctccattgtatggtcttgtcttctttatttgtttgggtttatttctggcctctattgtgttctattgatctatttgtctattctattttcaacaccacgctttctggatgatgactctagctgtagagcaagtcttgaagtcaagcaatgttgtcctctgactttgctcttcttcaacattgtgttggctgttctgggtcttttgcttctccacataaattttagattcagtttgttgatttctacaaaagagcttgccaagattttgattgggtttgaattgattctatggatcaaagtgggaagcatggacacctatacaatactgagtcttccaatccaggaa

SEQ ID NO: 12165 - DNA, 554 bp, Homo sapiens
  MAP TO AC025752.2; EXPRESSED IN LUNG, SIGNAL = 1.1; EXPRESSED IN PLACENTA, SIGNAL = 1.1; EXPRESSED IN FETAL LIVER, SIGNAL = 1.1; EXPRESSED IN BONE MARROW, SIGNAL = 0.89; EXPRESSED IN ADULT LIVER, SIGNAL = 1.5; EXPRESSED IN BRAIN, SIGNAL = 0.88
actttctgcattgacccagcagacatcctccctgacagcagccaacaattacattattaaatcatttgaacaactacaggtgggggttcaatactaaagtcacatgtaaatcagtgagctataagtggtatgaactatatgcatactttttgaacaaaaggaaactagaagaatgataaaataaataaaagcaattggaaaggaagaatcatgaactatacctgaaaaaaaagataagtctgggtcctttggacacagcaagtgttattggcaatgcattgtaaacagatttttaaattatagttagttttattaaagatagtagaaaagctaatatcatgttccttaaatgacagtgagacttacaccttccattaggccaaaagcacctccaccaaagatcagttgagcaacgcctccactcccagccactcccaggctctgatctgacactaggtaggaaagtccttggaaccctttacccatgactagctcatgacagaatgagcccttggacagagccttcattcactccaaagaggctgggaatggta

SEQ ID NO: 12166 - DNA, 591 bp, Homo sapiens
  MAP TO AC006457.3; EXPRESSED IN PLACENTA, SIGNAL = 0.61; EXPRESSED IN FETAL LIVER, SIGNAL = 0.55; EXPRESSED IN BONE MARROW, SIGNAL = 0.63; EXPRESSED IN ADULT LIVER, SIGNAL = 0.59; EXPRESSED IN BRAIN, SIGNAL = 0.63
acatgtccatgttgatgcccttaattttataatgtatcatccagaaaagtatcaaatctacagtggtattgtggatcttatgctatcctcttttctcagagttagagaatacttcagtgttaaaaattatcttattgaataattttagtcactcttgtaagtgagaaccacttctttttactctcttttttaacttgagtcaaataaaaatctctgcctatggccatgtggtaagtgcttgtgtgttcatgagtggttttgtttgtttgtttgttttccagggactgttgacattcagagacatagctatagaattctctctggaggaatggcaatgcctggattgtgctcagcggaatttatatagagatgtgatgttagagaactacagaaacttggtctccctgggtgaggataacttcaatacataattcctaatatattgcttttctcttttctaagatgtttttggtaatttctgctttgcatgaatgaattctagatctccaattttaagaaaatcttggggattcattgctgtagaacaaattcttcaagatgttttatcttgaccagaacttttgcctttcc

SEQ ID NO: 12167 - DNA, 506 bp, Homo sapiens
  MAP TO AC019042.3; EXPRESSED IN ADULT LIVER, SIGNAL = 0.63; EXPRESSED IN BRAIN, SIGNAL = 0.63; EXPRESSED IN FETAL LIVER, SIGNAL = 0.62; EXPRESSED IN PLACENTA, SIGNAL = 2.9; EXPRESSED IN BONE MARROW, SIGNAL = 0.61
gaaatcatcagcctttaccccatggaaaaataataatcattttacaattttgtacattctgcggaggttaataatcctctgaaatcttagactctcatatagaatctagtctagaatatggttcttaagaacaataccagtttttaaccattgttttatgtttatataaaattttaattgttctttaattcatacctatacagactggtgggctgggctgccagaagtaccgattttctacctgaatgcaggttattctttcctctccttgaagttcatatcctgggtcacattgaaaaacaacagtgtccccaggttctcttccatccccatttcgagtcccattcatggggacccctgggtcacgacacgcagtggcaacagaacctatcaaaagacagagacaaaattttagttttgataactaccaaaatcaatttcatatatccctgtgttttagaaaattaatttttaaaattttggggtcaatttttaaatgctataca

SEQ ID NO: 12168 - DNA, 504 bp, Homo sapiens
  MAP TO AC016057.3; EXPRESSED IN ADULT LIVER, SIGNAL = 0.65; EXPRESSED IN FETAL LIVER, SIGNAL = 0.73; EXPRESSED IN BRAIN, SIGNAL = 0.71; EXPRESSED IN BONE MARROW, SIGNAL = 0.61; EXPRESSED IN PLACENTA, SIGNAL = 0.66
ttggcttttccactgatatgcaaatcataatggtcaaagaatgaagaaaatcaaactaattaaggatgttatctttatcatagatgactgcatattaagtttctttgtaagttaaaaaactcagtctcactacaattaattatcattgtcataatcatcaccaccaccaccatcaccatgttgtaactaaatagtcaaatatgtcatctttattttaaaacatttttaaaattccagaatcagtttatataataacaaaaattataataaacaaaattagtttattttctgttgaacccaactcagttaatggcaatccacagatatacattacctgcataaattcaggtcgcagattttttaatccataaggttgctgtacagttaaatgcagaaaattacgtccaaaattatcttttatgtctacttgggcacctaaaaaaaaacactatgtaaatataaattctattcatttatttaaagcaatgtttacgtggattttca

SEQ ID NO: 12169 - DNA, 549 bp, Homo sapiens
  MAP TO AL139248.2; EXPRESSED IN PLACENTA, SIGNAL = 0.64; EXPRESSED IN FETAL LIVER, SIGNAL = 0.6; EXPRESSED IN BONE MARROW, SIGNAL = 0.81; EXPRESSED IN ADULT LIVER, SIGNAL = 0.62; EXPRESSED IN BRAIN, SIGNAL = 0.65
actccactccacctccaatgtgatctgattgaaacctgctcttcatgaagatccccattgtatccacgaaggggtcttccactgacaagggggcatctgaaagcagcccaatgcatgcctggccttgactttacgtacctgctggcttcctcaggtgcacgtggctgtctggtgactgctttctctgaagcacctgccaggaacctgtgcgtgttttcatgacctctgctaccacacatctgtaggcgccttcatcctctgggcccagagagaagatcttgagagagaaagccttggggcctaactttgaaacctggagctctccttgacttgctctctctttgtagtcattcttcaggcccaggactccaccagcatcaatgtgagcaatttcagtcccattgaagaaccaaatgccttgaagctgtgggtcacggccactgcttacaaccaggcaaaccagttctaagggtttcccttcagcaaacaagctgtcagctgtaatgttgacttgaaaatctttcactgggaaacaaaagcaaggcaggt

SEQ ID NO: 12170 - DNA, 600 bp, Homo sapiens
  MAP TO AC022882.3; EXPRESSED IN PLACENTA, SIGNAL = 0.63; EXPRESSED IN FETAL LIVER, SIGNAL = 0.59; EXPRESSED IN BONE MARROW, SIGNAL = 0.5; EXPRESSED IN BRAIN, SIGNAL = 0.48
ctgtgcatttgctgacaaggatttcatcttgcttttccaagaaacgaacatgaggatataattggataaacttaattttcacaggctgttgcatttagtacatataaacaatagctaaaatgtcagggttgccttcagatatggatctatacaagcttcaattaaacaattttactgaagtcaccatgtttatattaataagcttcacagaagaatttgatgtgcaagtcttcctatttttattatttttagcaatctatctattcactctaataggcaatttagggctggttgtaccgatcattggggatttctggcttcacagcccaatgtactattttcttggtgttttatcattcttggatgtctgctattctacagttgtcactccaaaaatgttggtcaatttcctggcaaaaaataaatctatttcatttcttggatgtgcaacacagatgtttcttgcttgtacttttggaaccacagaatgctttctcttggctgcaatggcttatgatcgctatgtagccatctacaaccctctcctgtattcagtgagcatgtcacccagagtctatgtgccactcatcactgcttcct

SEQ ID NO: 12171 - DNA, 592 bp, Homo sapiens
  MAP TO AC015737.4; EXPRESSED IN BONE MARROW, SIGNAL = 1.7; EXPRESSED IN PLACENTA, SIGNAL = 1.3; EXPRESSED IN ADULT LIVER, SIGNAL = 1.2; EXPRESSED IN FETAL LIVER, SIGNAL = 1.2; EXPRESSED IN BRAIN, SIGNAL = 1.3; EXPRESSED IN LUNG, SIGNAL = 0.95
ttggtctgcttgatggtgtcctacaggcaccttagattctgttcacttttcttcaatcatttttgttctttatactccttaatttcaattgtcttatattcaagttcactaattcttctgtctgcctaaatatgcctttgaattcctttagggagtatttcatttcagttattgcacttttcagctccagaaatttttggttgctttttaagtttcttatttctttatttatatttacattttgtaagtgtacatttacaaatgtatgaacaaatttatatttgttcctacactgttttcttgactttctccacagggtctttcagtttttaaggatgtcttaaactacatctttaagacagtagttctgtataatagtatttgtctagaagaccaccacatggcctttcttagagaaagttttgtgtccagaattgatgggttcttggtcttgctgacttcaagaatgaagccacggactctcgcagtgagtgttacagttcttaaagatggtgcatccggagtttgttccttctgatgttcagacatgtccagagtttcttccttctggtgggatcgtggtctcattgac

SEQ ID NO: 12172 - DNA, 540 bp, Homo sapiens
  MAP TO AP000431.3; EXPRESSED IN FETAL LIVER, SIGNAL = 0.52; EXPRESSED IN BONE MARROW, SIGNAL = 0.53; EXPRESSED IN ADULT LIVER, SIGNAL = 0.61; EXPRESSED IN BRAIN, SIGNAL = 0.61
acatggtgctggtctcttcccatctggagatgctggcacttctaggttttgtaattgtttttatggatatgtcatttttcttctttttttctttccctatcttattattatttttctacctctacctctttcctagaggatatgactgcacagaatgtcggatgggatcttttggctttgcttctatatctctatgcacttatgttggctggttttatattgggctgtatggttcaaactacagactaccagattgagccgatgggtaagagtcaactgtggccaatgcaaatgggtaaacatatagtcattgtttactgggagaaagtctcgttgctgcaggcaatgagctaatccatggaatgcacagtggtctgagttccctgcttatccctgtaaggtggggacccatatgggcaaggccagactggccatgcccacctacagatgggccccatcggatcacaatctctgcacaggagggatgggcaacttaggctgctggttcaggtgtacaagtgttctgaatgcctggagctc

SEQ ID NO: 12173 - DNA, 512 bp, Homo sapiens
  MAP TO AC010283.5; EXPRESSED IN ADULT LIVER, SIGNAL = 0.77; EXPRESSED IN BONE MARROW, SIGNAL = 0.77; EXPRESSED IN PLACENTA, SIGNAL = 0.82; EXPRESSED IN FETAL LIVER, SIGNAL = 0.66; EXPRESSED IN BRAIN, SIGNAL = 0.84; EXPRESSED IN LUNG, SIGNAL = 0.86
tgtggctgaagtgagactgccatgaggaagatgggagatgaagcgaggcaatcaacagagcatgaataatatacagccctgcaaatcatgcaacggaaatgcacatgccagggtggatatgaggaatagttctatggaatgggtgctaattttcccagttttacagatgaacaaagtaaaatgaagagaaattaaattacttgtcccaaggtcacaaaaatagtaagaatatgtttgtgctgtctgaattacactacaatcccaaatttctcaaagcctgctttgacattttactgacaataaccactgaatgcaaagcactcagtccaaactatgtatatggtatgtggtaatgtattgccttaatgcaaaactctttaatttcatatagcattctacattttcatatatattgtcttgttacatctctagtactattttactatatgacgttctgcggatgcacatcttgtcttcaggtatcttccaacggcacctggatcaatgctaca

SEQ ID NO: 12174 - DNA, 505 bp, Homo sapiens
  MAP TO AC022939.2; EXPRESSED IN LUNG, SIGNAL = 0.93; EXPRESSED IN PLACENTA, SIGNAL = 0.87; EXPRESSED IN ADULT LIVER, SIGNAL =   1; EXPRESSED IN FETAL LIVER, SIGNAL = 0.71; EXPRESSED IN BRAIN, SIGNAL = 0.83; EXPRESSED IN BONE MARROW, SIGNAL = 0.74
gctggggagtggagtacaagtacacagggcatgttatgaggccctgagttatctgcagcactgtggatggctcatcagggcttttatcagatgacagcgttgcttgtagaaggctgcagttgctgtaacaagacaagggctatgagtcacctcattctgtgcttaactttggaaaacatgtgatatggaaaactctactccttattcttcagagtccacatgtgttcccccaaacaatgtatcagtcccactgctgatgccgcttgtgacgttaatggagcgccaggctgtgacttttgaaggaaccgacatgtgggaaaaaaacgaccagagctgtgaaatcatgctgaaccatttggcaacagcgcgattcatggccgaggctgcagacagctaccggatgaatgctgagaggatcctggcaggtaagagatgggttttgtaagctgttctctaacactgtatcgtaattgaaatgaaggaatggaagagcatggctgacttc

SEQ ID NO: 12175 - DNA, 525 bp, Homo sapiens
  MAP TO AC021786.2; EXPRESSED IN PLACENTA, SIGNAL = 1.2; EXPRESSED IN ADULT LIVER, SIGNAL = 1.3; EXPRESSED IN FETAL LIVER, SIGNAL = 0.97; EXPRESSED IN BONE MARROW, SIGNAL = 0.98; EXPRESSED IN LUNG, SIGNAL = 1.3; EXPRESSED IN BRAIN, SIGNAL =   1
attttcctgccatcaaatgctcattgagtgacaatagagaaagcaccatcatcctgaagcatcagattgggagaaaagtccgctctcgagagcatcaactatgtagaaaggggaccagtgagtatgagtagcactgaatcattctttctgggaagaatattccctttctgttctctcgtaaccaacccaacctaaaactgaactgtacttggcagtgtgaaaaaaaggcacacataaacttgtgagatctgcccatcgtagcataagaatgactgaagctattgaggaaggaaaaagggcagcacctgacacccagaagctggcctggctctcataggcagaccctgcgattctcccattagacatgaaccatctcacagaaaaccagcctctgaccgggctactttgagaccatgattaaataagaccattcataattttgtgtgagcacagacaaaagcaagtcactttgccacccatgaagtaccaaacatcctatctcttggccaaaatgagtgctccttc

SEQ ID NO: 12176 - DNA, 579 bp, Homo sapiens
  MAP TO AC016623.2; EXPRESSED IN LUNG, SIGNAL = 1.1; EXPRESSED IN ADULT LIVER, SIGNAL = 0.92; EXPRESSED IN BRAIN, SIGNAL = 1.1; EXPRESSED IN PLACENTA, SIGNAL =   1; EXPRESSED IN FETAL LIVER, SIGNAL = 0.83; EXPRESSED IN BONE MARROW, SIGNAL = 0.81
aacacacaacagggaaaggccagttaggggagggggaagttgaggagatattggtcaaaggatacaaaatttcagttaggagaaattagtttaaaagatacatcatatgacatggtggccatagttaataaattgtatttttgaaaaatgtcaggagagtggacgtaaagtgttctcaccacaaaaatgataactgtgaggtaatacatatattaattatctagatttagtcatttcataattatatatactacaaataatcatattttgcatagggaatacatacaaggttttttgtcaattaaaaagaaaccagagcctgggaagatggcaggtctcatagaaatgccatctttcagttccagctgttaagtatacagatggatgggcatgaggacagctgcccagaatgtagtggtcctgagcatggaaaactaaacttcctgtgcctcaaagagatcaaggacatatctgagaagaaaacagtggatctaaagaggcttcatgacatgggggttggaagccttgtggaacacaggttttagtagtagatgctggggcacagtgatgaggacgatg

SEQ ID NO: 12177 - DNA, 586 bp, Homo sapiens
  MAP TO AC011207.3; EXPRESSED IN BONE MARROW, SIGNAL = 0.56; EXPRESSED IN PLACENTA, SIGNAL = 0.73; EXPRESSED IN ADULT LIVER, SIGNAL = 0.79; EXPRESSED IN FETAL LIVER, SIGNAL = 0.68; EXPRESSED IN BRAIN, SIGNAL =   1
tttgattgtaatgggaggggaaaaaaatctcaactaggtagtaaagtacctttcttatcttctattatcaccttctaacatctgatggtctccaagaaaagaagcagatctcagtttgggggaatctataggccacccctgtaacctccaagaagaagcaagaactaactttagtgtgttgccaaagcagtgagagtgtggactgtgatccagggaatcattccgggagttgatatcaagtgatgataggttctcagagcaagagcaaacatttgaaaccataaatcctaaatctgtgctgccagagattcctaacaatgtcctcttttgtcctttcctccagagccatgttcgactacgacaagagcaaggacagtgggctgccaagtcaaggacttagttttaaatatggagatattctccacgttatcaatgcctctgatgatgagtggtggcaagccaggagagtcatgctggagggagacagtgaggagatgggggtcatccccagcaaaaggaggtaagaatgccttttgtactagaatatttgcttgtcagctatccagcgagtggagatgagggaaga

SEQ ID NO: 12178 - DNA, 565 bp, Homo sapiens
  MAP TO AP001439.1; EXPRESSED IN BONE MARROW, SIGNAL = 0.85; EXPRESSED IN LUNG, SIGNAL = 0.84; EXPRESSED IN PLACENTA, SIGNAL = 0.9; EXPRESSED IN ADULT LIVER, SIGNAL = 0.95; EXPRESSED IN FETAL LIVER, SIGNAL = 0.88; EXPRESSED IN BRAIN, SIGNAL = 0.96
ctcaagcgatcttcccactcagcctcctgagtagctggaaccacaggtgcacaccaccactcccagctatatttgtagagatgaggtctccctatgttgcccaggctcatgacaaggaatactgcatgccaataatggatgccagctgagtgtcctctaattcaactggattctgacactgtacttggagattacacatcccacaggctgagggctcagtaccacaaaactcccccaacttcagatgtcaatcacaagccccaggttgtagcctgtgcttctgaccaactggctaccattccccagaccccttacttcgttttgattcattgctggagcaccttcagagaactaagagaaatacttgcttacattcacccatttattttaaaggatattacaaaggacacacagatgaacagccagatggaagagatgcacggggtgaggtgcggctgaagagaaaacgagattccatgccctttcctgacatccaaccctccaggaacctccatgtgttcagctatctggaagttcccagaacgcggtccttcagggttgttaa

SEQ ID NO: 12179 - DNA, 600 bp, Homo sapiens
  MAP TO AC021486.3; EXPRESSED IN PLACENTA, SIGNAL = 0.91; EXPRESSED IN BRAIN, SIGNAL = 0.93; EXPRESSED IN BONE MARROW, SIGNAL = 0.91; EXPRESSED IN ADULT LIVER, SIGNAL = 0.99; EXPRESSED IN FETAL LIVER, SIGNAL = 0.92
aaaaagacgcccctcaatgaatgtgtttaatagctgacatgtcttctttcttttttgtttaaactggcacatactcagtgtggcattgttcactttgaagtggttttccattgttctcttaccagcctttatcaaggcctactgacagatgacctatcaaatgcttcctcctttgtcttctaacctccttaccacccctaatttcttttactttctttctttctttctttgcttagggaaggcacaatctgctcaccctccagctcttccccctccaggggaagcagttggtaagcctggaccctcccaaagccaggggctgttatgcagagcgtgactggatcccaattattcaagaagaagcagtgcataaattagtagatcgtgtttctaaagctgtcatggataaattgttcttatttcctgaaactgtcataggaaaggagtgggattctaagatagctttgacacccctgttgctccttgaagacaaagaagccctaatgtctcctgcaaggtctgagcctggaacaggcttacaacaggccaaagtcaaaatgaagatttaggaaataaaatagaactcgtgtcatggttgga

SEQ ID NO: 12180 - DNA, 578 bp, Homo sapiens
  MAP TO AC022020.3; EXPRESSED IN PLACENTA, SIGNAL = 0.58; EXPRESSED IN BRAIN, SIGNAL = 0.51; EXPRESSED IN BONE MARROW, SIGNAL = 0.49
gtctctgtccgctttgcttcagtctctgttggggcctgggagtgagaaaccctgcccctttgtcagtgcatcatgatctgaactagagctcctactcttttttgatctccatcttgctccttgtgtctcgttctcacttgattggaacaaacaaggaggatgggtggagcccatagcagcctcaaaactcacttcagctcttgcattgcctctctccctgggacacccatcttgggaaggagctgctgtgtgtggtgcggctgggcagttggaagcccagcctctgcagactcctgactcccagctccatctgtctcaggggcttggcttttaccctgggcgagtggcttcattgtctcatacctcagtttcctcatctacaaaatggggacaataatagtccctgcctcttaatgagttaatgcatgtaaaatatttagaacagtgcctctgacatggttagtgcttgataagcatggttattattatttttgttattgtgtgtgtgagcccggtcaccatgtcatggaggaaatgggctggtatggagacagacgggtcagggggtgaagaacaaa

SEQ ID NO: 12181 - DNA, 516 bp, Homo sapiens
  MAP TO AC019078.3; EXPRESSED IN PLACENTA, SIGNAL = 0.79; EXPRESSED IN ADULT LIVER, SIGNAL = 0.75; EXPRESSED IN BRAIN, SIGNAL = 0.71; EXPRESSED IN BONE MARROW, SIGNAL = 0.74; EXPRESSED IN FETAL LIVER, SIGNAL = 0.86
gcagacaacaacgattccacatgtaattgtgataatggaatgtaaaaaaagacgaaatttgttttaaatgtcgaaaataattcttgagaaatctgttttgaaggtgactgtgtacaacagcatttttcttcttctcctcttagaaattatacaaacacaagaaggagaaagaaattaatgttaaacccttttccttgatactccatgaagtttatagctttcataagaatgtataaggagaccaaggctaagatggagcagaagctgcctgggaggaagagcggaggacatgaggagcgttttgaaaggatccagtggcagcaggtgtcagagagcatcagcaaaaatacacgttcttcagggaagtctttccctgatgtgccaacctgttggccataataaaaggttttacttgtggataatactgacaatatcctgcatgaaatatgactaaacagaaagcagctggcagttaagggaataatactgttgatgaggtgggatttattggagcaa

SEQ ID NO: 12182 - DNA, 557 bp, Homo sapiens
  MAP TO AL137026.10; EXPRESSED IN PLACENTA, SIGNAL = 1.1; EXPRESSED IN FETAL LIVER, SIGNAL = 0.88; EXPRESSED IN BONE MARROW, SIGNAL = 0.91; EXPRESSED IN ADULT LIVER, SIGNAL = 1.2; EXPRESSED IN BRAIN, SIGNAL = 0.8
aggtgctgtgagtcatgtggcgatcagctgtgctttctctatgatagaatgcaaatgatcccacacactcaaattcccagcatcatcatgaccatcatgactgatcagaccatggccacagggattttaactccagtgatgacgggcagtgaggtcagctacatctcaaatcaagaaagacagacaagtcggtaaaccagcttctgtgaatcagaaccattgaccacatctaattccagggagcagagccaaggctgcagcctgagggcatgtctgtcactaaggctggtgagatgctgagtcatttagtttccagcaattaggcatcttctgctcaagcaaaaagtagccagatgactatctggtgaggtaagctgtagtaataatatgaacaatcataattgatttgcattgtgatgcctacatctaaaagtacctccatttatttctttatgttgttgtgcatgtattcattcattcaatggacatctttttgagctcaaaagatgaggaaactactgtgctgggccttaatggcccttgccatcaagaaactc

SEQ ID NO: 12183 - DNA, 556 bp, Homo sapiens
  MAP TO AC018529.4; EXPRESSED IN PLACENTA, SIGNAL = 0.55; EXPRESSED IN BRAIN, SIGNAL = 0.49
ttttaaatgccctctggtgctcatgtaattacccactaggtcatgaaaagtcattattgtttttactcttcatttttataaataatggagcccttcccctatgtcctctgttcagctataatttgttagcctagttgtgattcctctgggctcttgaaactaataatgtttactttctttaaaaatagaaaatacatagatacatagcaaatgcttattcagttttcactctgtgccaggcacttctgaagaatctcacacagactctcatttcatcctcaggacaatgcctgggatatgggcagaacggtgaccatcaccatctaccgggaagacactgaggaacacacagccagcaagttgcagaggctgagcccaggaggcccggccctcacacgggcccctgagtgtcatgatatacggcatctctgcacaagcagcgacaaaaatcactttcacctgagtgtccatgtgtgactgtgagtccgaccttccaagaaagctgcccccatgccgggagggctcacggaactcctgttgtgaccaggctagctcc

SEQ ID NO: 12184 - DNA, 566 bp, Homo sapiens
  MAP TO AC005103.2; EXPRESSED IN PLACENTA, SIGNAL = 0.83; EXPRESSED IN ADULT LIVER, SIGNAL = 0.83; EXPRESSED IN FETAL LIVER, SIGNAL = 0.57; EXPRESSED IN BRAIN, SIGNAL = 0.61; EXPRESSED IN BONE MARROW, SIGNAL = 0.81
gctgggtggcctatacactgtaaaaataggtcaagaacagtaatctaaattgactgctgataaataattaaagctaatggaatttttctcaaacctgtgaactaaaatctttgagaaattgccaggacatacttactgtctgctgttgtatagaaagatattttttatttaatacttgagtttcaatgccatttaaaattacccttttctatcacaaggactggaaggaatatgtgttcatctataaaagtaaccaaaggaacgatgccgtgttgatggttatatggttcatcttcagatgagatgggaagtgacggtttcagtatcctggaacaaaagaaacatcatttttcactgaactggattttaagttgaggtctacagtccacatatcatataatatatattgtcttgtttttaaagactccatacctggtctgagctcttgtatacattgataagggaaacttaacagctatctaacgtgacatccaggaaaataaatactaagaacattttttctttcattagtaattactgttctctcattgctgctaccaggacct

SEQ ID NO: 12185 - DNA, 532 bp, Homo sapiens
  MAP TO AC013593.3; EXPRESSED IN PLACENTA, SIGNAL = 0.82; EXPRESSED IN LUNG, SIGNAL = 2.8; EXPRESSED IN FETAL LIVER, SIGNAL = 0.73; EXPRESSED IN BRAIN, SIGNAL = 0.75; EXPRESSED IN BONE MARROW, SIGNAL = 0.78; EXPRESSED IN ADULT LIVER, SIGNAL = 0.85
ttgcctttctgtcattgctgagcttttagcagaacctggtccaaactttgggcctcagaatgaggagaaggtgtctgtgccatgcttgagccctgacttggaagttgcccccacttctgaagtcagcttgaaaggctggagtgaaggagaaattccggtgggaaagctgaatggaagccatggatcccaggacatcatccccctgcccaagtttgaagtctccctccacagccccctgggaattaggcctgattctctgaaaggagggaggatgttttctttctcccccaccctcccgacctccacatacctcgagggcatgtccaaaaagccagtgggtgggaggccctgggaatttgtccatagccttagccaacgtctgcctccgcagcagcaggtggatgagcttgagaaagcctaagaccaagatcagcccagaagcccacaggcccaaggaggagaagctcagggagaggaagctgggcaccatggttgcagttccagccacctagccttcatctgacctgccttc

SEQ ID NO: 12186 - DNA, 544 bp, Homo sapiens
  MAP TO AC013317.4; EXPRESSED IN LUNG, SIGNAL = 0.99; EXPRESSED IN PLACENTA, SIGNAL = 1.1; EXPRESSED IN ADULT LIVER, SIGNAL = 0.82; EXPRESSED IN BONE MARROW, SIGNAL = 0.79; EXPRESSED IN BRAIN, SIGNAL =   1; EXPRESSED IN FETAL LIVER, SIGNAL = 1.1
gaagagtgccagtgggagaggtaaaaaagggggagctgactgagcagctctataactcacatgaaccactatgactcagtaacgaattatgtgaaaaagtgtaacacaaggaaaagaccaggataacccagtgatttccaggtgaatgattagctcatgtcttagtctagaggtaaaagcaacagtcttcttagaaaagatgatgattttgtttttgaccgtggtgtacatgaaggcactatgtgacatccaaggtcagatgttcgtgggttgtgggaataaggttctggaagacagggagaaatctgggctcaagcgagagattcagaacacgggcatgtaggtggtatttaaagccagatgaatataggacaataaggaaagggaataaaggattatgaaatctaaaatttaatatataaaaataaaatacaaatagagggcaagaagattgaaaatgagcggccaaagagagaaaagggatccgtgactcaaaagctcagagagttatataaagatagactgggccttgtgatggtatcac

SEQ ID NO: 12187 - DNA, 530 bp, Homo sapiens
  MAP TO AC015638.4; EXPRESSED IN PLACENTA, SIGNAL = 0.65; EXPRESSED IN FETAL LIVER, SIGNAL = 0.52; EXPRESSED IN ADULT LIVER, SIGNAL = 0.63; EXPRESSED IN BRAIN, SIGNAL = 0.48; EXPRESSED IN BONE MARROW, SIGNAL = 0.49
caggttttgcctgtgtgaagagtgtgggggtgtgtacatgtagacacaagcatgtctgagagcccatcacagtcaaagctgggctttagggaggtccatctaacacctcagagcaggttgatgtggagtaaaatgagactggaaacaggactgagcagaactgaaccaaactgaaataatcagctgaaatcaacttgacttctatgcttaccaggagggcaaagtgaagcaccacccatacaacgccaagcgacgtcaccaggagatcgtatcggtttcttctgctttgccagaagccagcaggcgacattgctatgatcttcatggtaacctggagaaaaagcaaagaagaaaataaacagagagagtgtttagtacatatttaaatgtattaacttgagatgcattatgtgtatgtatttttttcaaatgaagaaaattttaaattatttgatgtggacacagtatcttttccattgaaaatgagacaaacactttaatgccctttgaggtttccttttaggccacgt

SEQ ID NO: 12188 - DNA, 590 bp, Homo sapiens
  MAP TO AC007595.3; EXPRESSED IN FETAL LIVER, SIGNAL = 0.74; EXPRESSED IN BONE MARROW, SIGNAL = 0.76; EXPRESSED IN PLACENTA, SIGNAL = 0.64; EXPRESSED IN BRAIN, SIGNAL = 0.47
aactcacccttgtgcctttgcaggatctccgtacctgagacctgggccaagttcagtaacgacaacatcaaacactctcagaacatgcgggccaactccatccagctgcgggaggaggcggagcacctctttgagaccttgtcggatcagatgtggaggcagttcacagacaccaacctggccttcaacgcccgcatctctgaggtgacggatgtgaagaataagctgcagacgcagctggcgaaggtgagcagatcctcccaggacccctgccttctctgccaagccctcacccttctcccgtgaatctgagtgttatctgggccaagctggccctgcccctggtgccaaagcagtaccctctctcccaaggtctgtggtctttttcttcctaaaaggggccaagggctgagcttcctggggggatttaagcatccatagtccatcttgtcttgcttacaagcctggagcttggcctagctgtgcccaagaggctgtgacactcccaggaccccttattttccatctaagacccatgtggccgagcgcgagtgcagagaacggagcccggcacaccatagtctctgcca

SEQ ID NO: 12189 - DNA, 532 bp, Homo sapiens
  MAP TO AL121582.14; EXPRESSED IN BONE MARROW, SIGNAL = 0.85; EXPRESSED IN PLACENTA, SIGNAL = 1.1; EXPRESSED IN ADULT LIVER, SIGNAL = 1.1; EXPRESSED IN FETAL LIVER, SIGNAL = 0.77; EXPRESSED IN BRAIN, SIGNAL = 0.88
taagaaagccacggtgttcctatatatatgtatttatttcttttacactaggccagacctttataatttataaccaggatgatttctgtggcctttaaatgtccacagtgcttgataatttcttccttgttcatggtcctgttaggtaaaagttttacacttacaaaattagatacaaagcttattctcaagaagcatacagcctgataaccatattcagtatctccacaaggataaagaagtgatctaatggaaagagatcaagtaatgatcaaatacttcatatttagaagatcagagaaagcttcaaggagaaattgccttaaacatgtgttggaagttagtatagatgggctttggtccttttagtggactttacagtgctctgctcacctgagtccatttatagctgtggatggttcttggcatgcagatgttttcctaagtcaggcatcagcacctttttgcttttctgcctttgggctttctctggcactagaagagcttgcttggctatgctgcagtttccaca

SEQ ID NO: 12190 - DNA, 532 bp, Homo sapiens
  MAP TO AC016498.4; EXPRESSED IN LUNG, SIGNAL = 1.1; EXPRESSED IN BONE MARROW, SIGNAL = 0.78; EXPRESSED IN PLACENTA, SIGNAL =   1; EXPRESSED IN ADULT LIVER, SIGNAL = 0.9; EXPRESSED IN FETAL LIVER, SIGNAL = 0.93; EXPRESSED IN BRAIN, SIGNAL = 0.83
attctggcaggaggagtgtggccagacagcccctcctgcccaccggccacgtgcactctctgacccaggtgtggtacccaagcccgtccgatcacccctgcccccaactgctagtgactggtggtctctgtctctacacgccgttaagatcattggcccctccctcccctgcacagcgcctgccggcagccaaggctgtgcccttgtcccagactgtgccgcacaagcgggctgactttgggcagccagcattggcagggggcttctttgttgctgtggggcagatgcacactcctgaactgctcgcttctgtgtctgtgtagacgctggagtggagcaggtgcaggcctgtggtcaggaaggtgtggatgctgcgggggaagcaggtgaggactgcaggccacagctccctgtagctctgctccctcccacagggagcagccgacttggctggtccttcagggaaccttcttcctttttttctaaaccccagagtggttttcatgggggctctttgtctcatggtggctga

SEQ ID NO: 12191 - DNA, 540 bp, Homo sapiens
  MAP TO AC010492.4; EXPRESSED IN PLACENTA, SIGNAL = 0.54; EXPRESSED IN ADULT LIVER, SIGNAL = 0.52; EXPRESSED IN FETAL LIVER, SIGNAL = 0.85; EXPRESSED IN BRAIN, SIGNAL = 0.52; EXPRESSED IN BONE MARROW, SIGNAL = 1.4
tgagaggacactctggggtcccagccccaggctctgccctcaggaagggggtcggctctcaggggcgtctccctctcacagcccagccctggggatgatgtgggaggtgggagccccatttaacacggtgcctctttctctcctaggattctacaacaaacccaccctctcagccctgcccagccctgtggtggcctcaggggggaatatgaccctccgatgtggctcacagaagggatatcaccattttgttctgatgaaggaaggagaacaccagctcccccggaccctggactcacagcagctccacagtggggggttccaggccctgttccctgtgggccccgtgacccccagccacaggtggaggttcacatgctattactattatacaaacaccccccgggtgtggtcccaccccagtgaccccctggagattctgccctcaggtgagggagccacggccttgtctaacacactttcggggcagctgacaggttgtggggagtttggctggtgactgaatctggaaaggaccca

SEQ ID NO: 12192 - DNA, 542 bp, Homo sapiens
  MAP TO AC020693.3; EXPRESSED IN PLACENTA, SIGNAL = 0.48; EXPRESSED IN ADULT LIVER, SIGNAL = 0.54; EXPRESSED IN BRAIN, SIGNAL = 0.48; EXPRESSED IN BONE MARROW, SIGNAL = 0.48
ggtgattgtaccaggtgttgctattcgattcaaagtgaaccagtcagtttatggctttagataattttgaattgacattcaaaaatgaaaattggcctctgattattacctgaattgaggacaagcacagtcagaaattatgggattcatggtcagctaattccaaaatgaatcagagaaatttgataaggtaggagtgaaaaagactgtgagtacagttgctttgctttctgtaagttttccaatttctggttccatttatttgtaaaagcaaaatgtacttgctgtttgtgggttaaatttaaaaatctgtatcttaatcatctttttttcagtttgtatgatttaatttctattacttaaaaccaaagtgctttatctaagacatatgatttgatgtgaaggagtgaactaatatttaaagatctgtaaaccaagttcaatctgatgtaagatttgttgttggtcataaaaagggaagctataggaaaagaagagtgaaaactgaatcaaaactgagtagcaaagttagtgcatgcccg

SEQ ID NO: 12193 - DNA, 595 bp, Homo sapiens
  MAP TO AC008616.2; EXPRESSED IN PLACENTA, SIGNAL = 0.85; EXPRESSED IN ADULT LIVER, SIGNAL = 0.98; EXPRESSED IN FETAL LIVER, SIGNAL = 0.78; EXPRESSED IN BRAIN, SIGNAL = 1.1; EXPRESSED IN BONE MARROW, SIGNAL = 0.82; EXPRESSED IN LUNG, SIGNAL = 0.92
cgtttccaaggaagatgcaggttgtcttggaagaaagaatttaggactatcagtcattcacactctagtgagaattaacaaactacaaaagtgacaagtaattggactctactttgtaaactgaaacaggagacatgaccagatgaggaaatgcagggatggggcattcagatgtcagagtgtgggtctgagaagcacctgcaaacgccctggagatgtggtctttcttccactcccagggctgatcatactcatctgctggccgttcatcttcctggggcatccggctctgccgaggcttctgcccagaagggggtccatctgctgtctctgggtcctgttcctcataaggggtgtcatagagctgcacccctctgccgggaagttctaggaggccagggacactgttcagctcctgctcccatctgggaccctgtcaccttcccccaagccgtgcctactcaccactcatgacccattgggcatcgtagggctccatgtacccatcatccgggggtgcaggatgaggctgagcatcaaaggggtctaaatactcagtgtcggcttccagctgcggagagaaggaaggggagaa

SEQ ID NO: 12194 - DNA, 582 bp, Homo sapiens
  MAP TO AC021000.3; EXPRESSED IN ADULT LIVER, SIGNAL = 0.7; EXPRESSED IN FETAL LIVER, SIGNAL = 0.64; EXPRESSED IN PLACENTA, SIGNAL = 0.69; EXPRESSED IN BRAIN, SIGNAL = 0.91; EXPRESSED IN BONE MARROW, SIGNAL = 0.7
aagccgggtcacatacaaagaaatgagactcaggcaagtattacgttcacatccacaatactagatgctgaaaggaaatggagaagtgatttcaaagatctgagggaaaattattttccaggattgttaaaaaaaataccaagccaaacactcaatctggatgagtagataataaaaaatagagacatttacagaaactaagaagttacttctcaaactttcttaggatgttactggaggattttcttcagcaaaatgaggaggctaagagtgtggaagacatgggagccaaagaaaggtggatccagggtgaccgagagaagcaggagtaccaggatgccgctttgcagcaggcctggaagcagcagtccagacagaagaaagaaaacagaggctccaacagggaggcatttagcaaaaaatggtgtttcatagatttcgtatgatctctgggaaggtcaagctgcttaaaaatgtattaaagacaataggaagaaataagacaactagaaactccagaaaaatccaaaaagctctacaagaccagcgaaatcaatcctaagcaatgacttggttctgcag

SEQ ID NO: 12195 - DNA, 536 bp, Homo sapiens
  MAP TO AL161646.3; EXPRESSED IN ADULT LIVER, SIGNAL = 0.83; EXPRESSED IN BRAIN, SIGNAL = 0.66; EXPRESSED IN BONE MARROW, SIGNAL = 0.74; EXPRESSED IN PLACENTA, SIGNAL = 0.74; EXPRESSED IN FETAL LIVER, SIGNAL = 0.79
ttggccttttggtttgaaagaatcaggataactttttaaaagtcaggctgggcagaagattgttctttctgtctctctcacatgcatttaacataagtttcttcaagctgtggcagtgtgaggttaaaaacggatcatgccatcagtaatctcctgtttccctatctctcaacccctcctgctactgcagggctgcaatcgttgcccaaagcccatcaagtgttcttggacatacccagagagtatgccgtgtgagcttacaagcaagcctggtcggctgctgcaggtttctgccaggcactgctgccctggcctgccaccgggccatctgtgtatttctgcctctgctggatatcaccacatctgcagggcactgctgcttccccatacttcactgccatctcccacagaacaccaagaactccctccaacaatgccagccctcccactgaggcatcatgaatgcccacgaactttccaggtgccaggcatggtggtctgtggcaatgttgggagggaatggctgtctccagtgt

SEQ ID NO: 12196 - DNA, 500 bp, Homo sapiens
  MAP TO AC019159.3; EXPRESSED IN PLACENTA, SIGNAL = 0.79; EXPRESSED IN ADULT LIVER, SIGNAL = 0.76; EXPRESSED IN FETAL LIVER, SIGNAL = 0.56; EXPRESSED IN BRAIN, SIGNAL = 0.68; EXPRESSED IN BONE MARROW, SIGNAL = 0.57
accagacccctcttgttgtgtttctctcgagtgcacagtgactaactgtaactatagcccccttcttggcaaattttcctttgcctaatactccaggtctgagggtcccatctatcccactgtggtcatgcatgcagaggccttacccggcgtgttgagcaggcgggacctcctgcagtggtaggccacctcctgctcacagtgctcagagccgtcgatcacggcctccagctgttccatgctgcccccgtagtccaaggccatggcatagggcttctcagggttagcgccccgcactcgggtcagctctgtattgttgtgctgcactgatgtccagatcttgtcctctgcccagacaacacaacacaaagcaagagacgttagaagcaatgtcaaaaatggagcatgtgagcagtgtgatgggccactcagcgtgcaacattaatcaacactccggtaccgtatggagagtaggacagagaaattgtgtttccccatgg

SEQ ID NO: 12197 - DNA, 563 bp, Homo sapiens
  MAP TO AC006038.2; EXPRESSED IN LUNG, SIGNAL =   1; EXPRESSED IN ADULT LIVER, SIGNAL = 1.1; EXPRESSED IN BRAIN, SIGNAL = 0.84; EXPRESSED IN BONE MARROW, SIGNAL = 1.1; EXPRESSED IN PLACENTA, SIGNAL = 1.1; EXPRESSED IN FETAL LIVER, SIGNAL = 1.1
gatctactgaaatctgggggccagaattaaaaaatggaaactgtggacacttactctggtctggacttccatttatttcactgcgctcaccaaattcttcccagccaattgaaaacctcaaattcttagcaactttgcccataatagggttagtcatgtggcaaagtacaacacaggccatttcatgtgcccagcaatttacaagattggatttcctgtttcctgtttgtgcatatgtagagaggttgagccacaaatttttcaaagaccaaaataaaaacctctgaacctcttcttcctgtccccaacctgaacacaaatattaaggctaacaaaagggtatatttatacgcaaattctgctcagtgttggagattcgtgaacaatttaaaagtcactgttttaatagactatgctgttcctggcatttctgatactaagtaaatgtgcccaggaaagaaaaataagaaaaaaagaaaagagaaataaatgggaaaagtagttgataatatattgttgttgtaactctattttttaagaaccctcaacccactgccattctt

SEQ ID NO: 12198 - DNA, 500 bp, Homo sapiens
  MAP TO AC008156.3; EXPRESSED IN PLACENTA, SIGNAL = 0.96; EXPRESSED IN BONE MARROW, SIGNAL = 1.2; EXPRESSED IN LUNG, SIGNAL = 0.97; EXPRESSED IN ADULT LIVER, SIGNAL = 0.93; EXPRESSED IN BRAIN, SIGNAL = 0.98; EXPRESSED IN FETAL LIVER, SIGNAL = 0.94
cctttgcctttagcaagcacctcagtggtcgtgggtttttcctgatggagtgacccaaacattcattcttgaagggtctgggtgatttgtagtcctgcctggattgggctgttgtagtttcccattgaccttaatcacagggcacggtaatactaagagacatcctaatggagctcctgaattccatgtgtgctattccttacctcagttgtggagtagtagactgatttcattttgatagtctgggtcaaccacccagccaacaccatagctcccttcttagcctgttgacttaaacgtaggaggagaccaaagtatccagttcgcaatcttaacttccagtttaatggaatcattgttgtgtctcccagtggcagtgttcctccctctggaactaagacctctaggccagcagaatgtaatgttgcgggaacagaagcaaaaaaatttgctagtggatcactaggggtgatggtgagtggtgccactttcacttccat

SEQ ID NO: 12199 - DNA, 564 bp, Homo sapiens
  MAP TO AC021037.4; EXPRESSED IN FETAL LIVER, SIGNAL = 0.62; EXPRESSED IN BRAIN, SIGNAL = 0.49; EXPRESSED IN BONE MARROW, SIGNAL = 0.61
acgtttccagaacgtcttccttgatgcacctattttatatcttttcagtattagcttaagtcctgcagaagtctttgccattcttttttcatatttgtctttttccagtttttcttttgcatataaatgttctttgtgcaaagttataacatgtcttacaaggtgttctctcctggtggcaccatagctacaatattgacaagtgaagggaaaagtaccagaatgaatatgaaggtgcttctgaagctctcctttggtaaaacatacatgatgacatttaccacacttataatgaatttcattatgtctatgaatgtgctgaacaaatgtgccaacatcctgggtggagaacttacacttttcacattgaaaattaccattaacacaatgtgtggatgtgaaatgctttgtcaagttcagtaaagtatatacactctcattgttacaaatgtcacattttactaaagtgcttctatgggttcgtctgtgttgtttaaatacctgaaagtcatttgctgaaaagttgcacatttcacaaggatatgaaggtaattcgccatggtg

SEQ ID NO: 12200 - DNA, 514 bp, Homo sapiens
  MAP TO AC013772.3; EXPRESSED IN FETAL LIVER, SIGNAL = 0.58; EXPRESSED IN BRAIN, SIGNAL = 0.47; EXPRESSED IN BONE MARROW, SIGNAL = 0.57
tttcacaacaccctgtgaggtaggtactattttttactattcttattccattcttattttatattgatatctatgttttaggtagaatattaatgatatgtgaaggggaaagaattgtcaaatgtcacacagccactaagggttacatagggacttggaccttgtatggggaaagccggtggagaacgaagggtaagcatgatacgcagatgatctcaggcccaggctgtggttcaaataaggcagatcattcgagtggaattcctttggccaggaaggataaaagggcaggcggtcttagtacaggggctcagatgacatattttgacaacaacaacaacaacaacaacaacaaaaaggttcttgatgtggctttgaattccatatctctttgaaagaatctgaaataaacaatcaatgagactttctaagagctgctggaatccagaactgataatgagaccagtgagagccaccatcttttcctgtttcctccaccataaccattatgcca

SEQ ID NO: 12201 - DNA, 586 bp, Homo sapiens
  MAP TO AL139340.3; EXPRESSED IN LUNG, SIGNAL =   1; EXPRESSED IN BONE MARROW, SIGNAL = 1.1; EXPRESSED IN PLACENTA, SIGNAL = 1.6; EXPRESSED IN ADULT LIVER, SIGNAL = 1.3; EXPRESSED IN FETAL LIVER, SIGNAL =   1; EXPRESSED IN BRAIN, SIGNAL = 1.1
atctccacactgttttccccggtggttgtactagcttacattcccaccatcagtgtaaaagtgttcccttttcaccacattgcccccaacatctactttttttttatgatggccattcttgcaggagtaaggtggtattgcattatagtttagatttgcattttcctgatcattagtgatgttgagactctacctcttaatgaagaaatagcaaagaacttgtaatgttttactttacacctatcaaaaatcttgttattttgtattataataacctgtttacttgagcatctatacagttatactataatcactttgggggtaggattagtgctcagtcattgctctatcctaatccttaggagtcaatcaatatttgttcaacaaataagtaaatgaatgcaagagtggtgaatgagtaagtgagtgaaagaagagagtaagattatcttaaagaagcttaattgtgaagagttttttaaaaattgtattcatcaagatgaaatatatttgagcatgtttacatacagaaagtaaagacctaatagagagtgcagttgagattacgaaaagggaagagatggtg

SEQ ID NO: 12202 - DNA, 528 bp, Homo sapiens
  MAP TO AC011226.3; EXPRESSED IN PLACENTA, SIGNAL = 1.3; EXPRESSED IN ADULT LIVER, SIGNAL = 0.78; EXPRESSED IN FETAL LIVER, SIGNAL = 0.8; EXPRESSED IN BRAIN, SIGNAL = 0.8; EXPRESSED IN LUNG, SIGNAL =   1; EXPRESSED IN BONE MARROW, SIGNAL = 0.76
aaaccaacactgagcccttgatatggcaccgttcctcagggtgatcagccagctagctggtggcaggttgattacattggacctcttacatcacagaaagggcagagttttgtcctcactggaatagaaatttaccccaaatatgggtttgcctatacttcatgcaatgcttctgccaagaacaccatccatggactcacagaatgccttacctaccatcatggtattccacacagcattgcctctgaccaaagcactcactttgcagctgaagaagtgtagcagtgggctcatgctcatggaattcactgttattatgtttcccatcaccctgaagcagctggattgatagaacggtggaatggccttttgaagtcacaattacaatgccaactaggtgacaatactttgcaggcctgggacaaagttctccagaaggccatgtatgctctgaatcagcattcaatatatggtactgtttctcttgtagcccagattcacgggtctgggaatcaaggggtggaaatt

SEQ ID NO: 12203 - DNA, 516 bp, Homo sapiens
  MAP TO AL138956.3; EXPRESSED IN ADULT LIVER, SIGNAL = 0.78; EXPRESSED IN BRAIN, SIGNAL = 0.57; EXPRESSED IN BONE MARROW, SIGNAL = 1.9; EXPRESSED IN PLACENTA, SIGNAL = 0.6; EXPRESSED IN FETAL LIVER, SIGNAL = 0.95
atggtttggtaggatggtgcactggatcagtcacagtagcccaggaagtccttccaccattggatcctgccacataccatgtccccactcctacaggtaccttcataccttgccccttcccaggcccagcagcacttggaaaatggacccaaggaaccatatgttactccagccctggcagaactgctagagggtacgaaccctaaagccattctggtgaccttcccaaatatctgaagacaaataacctgaattggtttggacttgcctgagattttccaatgcctcaattgtatcataaaggccagcaatttcataactcatctactcactcactcacccatggggtttctagcgattccttctagtgacagagccaccaggtccttagagtggggatgtttcaatataaaggtttcatcaggagcttccctgattgtgcagcaagcactttgttttatgagaaaatgtttgactcttcttactggtggatatacagagggggacagaggaatt

SEQ ID NO: 12204 - DNA, 577 bp, Homo sapiens
  MAP TO AC007956.5; EXPRESSED IN PLACENTA, SIGNAL = 0.93; EXPRESSED IN ADULT LIVER, SIGNAL = 1.1; EXPRESSED IN FETAL LIVER, SIGNAL = 0.94; EXPRESSED IN BRAIN, SIGNAL = 1.2; EXPRESSED IN BONE MARROW, SIGNAL = 1.2; EXPRESSED IN LUNG, SIGNAL = 1.1
taaatttgggggaggaactgaaatttttctgtagcctgtgtttaagatcttgttaacttatttgtcttcctcagtctagctttgcctttttttacatatagacacatgaacacagacataaagataggtccttgtcaacaccaagttgcagagatacatgattgtcaatcaaaattctcaaaaattgtttctgttgtaggaacagcagcagtattggtatcgacagcacttgcttagtttgcaacagaggacaaaagttcatttgccaggacacaaaaagggtcctgtggtagcaaaggatacaccagagccggtaaaagaagaagttacagtacctgccaccagtcaagttccagaatctccttcttctgaggagcccccattgccacctccaaatgaggaagtgccacctcctctcccacctgaggaaccccaggtaaccatataattaattgtttgtgtttattaaattatttagcttttttctgattcatttagtatacttttatcataaatggatatatatttttgtttttttaggtacctataaagttgcatttgtgaaatcagatgtctg

SEQ ID NO: 12205 - DNA, 566 bp, Homo sapiens
  MAP TO AL133320.8; EXPRESSED IN PLACENTA, SIGNAL = 0.82; EXPRESSED IN ADULT LIVER, SIGNAL = 0.86; EXPRESSED IN FETAL LIVER, SIGNAL = 0.69; EXPRESSED IN BRAIN, SIGNAL = 0.68; EXPRESSED IN BONE MARROW, SIGNAL = 0.65
aggtaaggcactggatgtgggtatgctcgttggttttcctgcagaaaacattctttcaaattttccagtttgggcactcatttcatgaataacagctttatcaaggtaacccacaaattgttttgttaggctagaaaaattctgtgagaaattatagagtgtattccaagatctgttttctagtgtctgcttattagttttcttctttagtttatcatctacagttgtgtggcccgctttaaaagacatagggatctgtatatcttttctctgtactgtaggcatagttttttggggtttgaaaagagaaatagattgattgccaattatagatttgaggatttcacaatttctttctaaaatgaaatttgttcttttatgtgggtaaatgttttcattttccaaaggatgagaagaaaatctattttttgtcaaaagtaacattcgtacatattctgtgtcatggaaaattatgggatttgtgtccttttgttcctgtagattaaagaaaagaataattagtcataagttcattgagtcaagaaagctccatatattttaaaaca

SEQ ID NO: 12206 - DNA, 569 bp, Homo sapiens
  MAP TO AL157879.2; EXPRESSED IN BRAIN, SIGNAL = 0.76; EXPRESSED IN BONE MARROW, SIGNAL = 3.2; EXPRESSED IN FETAL LIVER, SIGNAL = 1.8
ttgtcctcacttgcaacaggggcttcgggtgggcctcccgtttctaaagcacccactatggatgcacagccggacaaactcaagtcccaagactgcctgggcctagtggccgccctagcatctgctacagaggtctcctctacagctcccatgtctgggaagaagcacagaccaccaggacccctgttctcctcctcagatccccttcctgccacctcttcccactcccaggactcagcccaggtcacctcgatgattcctgcccccttcacagctgcaagcagggatgccagcatgagaagaacaaggcctggcacctcggctcctgcagctgccgcagcagcccctcccccctccacattgaaccccacgtcggggtcactactcaatgcagtggatgaaggcccctcacatttcttggcctcagccacagctgcagcacgtgcccggaggtcacaagtgagatataaccagagatcccagacctcccggaccagatcctgcctcaaacgaaatgccagctccagctcccacagctctacggaaggcctccaggaactaaagcggag

SEQ ID NO: 12207 - DNA, 551 bp, Homo sapiens
  MAP TO AC011055.6; EXPRESSED IN PLACENTA, SIGNAL = 0.61; EXPRESSED IN ADULT LIVER, SIGNAL = 0.54; EXPRESSED IN FETAL LIVER, SIGNAL = 0.76; EXPRESSED IN BRAIN, SIGNAL = 0.67; EXPRESSED IN BONE MARROW, SIGNAL = 0.59
taaaagttggctgctttggggaaccctgtatagtactgacttagaaagatgtccattgagttcaaaaattacctttgttcttttccattcccatttgaatgattcccattgttttctggtgacagtgtgttgagaactgagcgaagcactttccctacaatatctattttattccttcgagatacatactcatatcaccattttgtgcatgaaaaccctaaggctcagagagctttgcccaggagctcttctcaaattacaaccctgccctaccaagcccagcacaaacacacacagttctgtgaccctcaccctggcctgttggttctcatcttcaaggcctgcatcacattctaacatactgtagaactcactcatttggtgtatttccttttttgttgttgtatgactgttcccactagggtagaggagggcagggaacttctctttattcatgaatttatctcagtaaatactggttgaatgcatatgactgaatgaatgaataaaaggtcatgctgagatttgagcccagatccctctgattccaa

SEQ ID NO: 12208 - DNA, 582 bp, Homo sapiens
  MAP TO AC010290.4; EXPRESSED IN ADULT LIVER, SIGNAL = 0.6; EXPRESSED IN FETAL LIVER, SIGNAL = 0.7; EXPRESSED IN BRAIN, SIGNAL = 0.55; EXPRESSED IN PLACENTA, SIGNAL = 0.55; EXPRESSED IN BONE MARROW, SIGNAL = 0.7
ttagtgtgctggcattctcgaatgctgcttatgctagcagtgaagttgtcacatggacagactcaggacttctggttagccaggatgttgcaggcagtggtattagctgtttttttgttgttgttgttgtcatcgttgttgttgttattcatttctgtttttttggttttttttcttcttcctggaagcagtgttattccatcatgagttgctgtaatggctgagtctgttggcctctagccaggaggtggcatttgcaagagagcaccagctgtggtattaacaatgggatttgagcttgccctaagttggccagtagaagtattttggtttctcaggtgataggtgggaccataaagtacctgagagtttatgtcttttgtgttcagctaccagagttggtagagaaatgccatttggtgggagcagggttggatgtgtctgagttcagactgtcctcgggcagggcttgtcacagccacttgggagattggggggtggttctcaggccagtggagttatgtttttgagtgggtcttggcttcctctgttgtgtcatatagttcaccagaaaagtgggga

SEQ ID NO: 12209 - DNA, 511 bp, Homo sapiens
  MAP TO AL137141.7; EXPRESSED IN LUNG, SIGNAL = 1.6; EXPRESSED IN PLACENTA, SIGNAL = 1.1; EXPRESSED IN BONE MARROW, SIGNAL = 5.7; EXPRESSED IN ADULT LIVER, SIGNAL = 0.86; EXPRESSED IN FETAL LIVER, SIGNAL =   2; EXPRESSED IN BRAIN, SIGNAL = 0.73
tgaaaccctccctgtgtctctgcataggacccgaagattagtacaagtctgcctgttctggacctcatcgatgccatccaaccaggttccattaactatgaccttctgaagacagaaaatctgaatgatgatgagaaactcaacaatgcaaagtacgtaaataaaaataaacctcagattgggagggaaggacccaactggcagctggatggttgtaaagtctaatgctcatgcctttatacaaacatttcattttcactatccgtgcttttccttctcatgactttctgcagtctcatcatcactgttttggatatgggacaatagtagtttaaaacttctagtgccagaatgggagcaagacaaaaaaaaaaaaacaacccaataatgagagtattcttgtaattgataagcaagcctatagtttcataaaaccaatttcctaaccaaatgctccattcatgaatattcatggataagaatgcacaggggtagggttccacagcagagc

SEQ ID NO: 12210 - DNA, 587 bp, Homo sapiens
  MAP TO AC016948.4; EXPRESSED IN PLACENTA, SIGNAL = 0.58; EXPRESSED IN BONE MARROW, SIGNAL = 0.47; EXPRESSED IN ADULT LIVER, SIGNAL = 0.57; EXPRESSED IN BRAIN, SIGNAL = 0.45
aatgggctcccttctcactcctgtttttaaagcaggagctccctttcagagttttcagttgctggtaatctgaattcagataatcatgtcagcttaaagaaatcacagaaagtaatccctctgtaagtatctcctactatgactattgaatactcactgatgccggtgtccttacagtactggaccaagtactgtcccatgacttttagtagatgattatactcttggacattgagaaattcctgtttattatgggatggttccatgacctccaagggtatattaacaattccaaccacgcctgcgccaagtctgagaaaatatatgcatatttaaattttgaaaatttggctaaagaaaaaaatcaaatatattctggtcatttgaaatcattttttttttcaaaaataaattcattctgttgatctggaccatgtcaaagtttaacaagttagctaattatgttatcataagtctgtggtgatcccaacatgtttggtcccataataaaaaaatcactttagcacaatgttacagagttaatacgactcgttttacaaatctatcgccttacgtggagagtgagg

SEQ ID NO: 12211 - DNA, 522 bp, Homo sapiens
  MAP TO AL121918.15; EXPRESSED IN PLACENTA, SIGNAL = 0.66; EXPRESSED IN FETAL LIVER, SIGNAL = 0.64; EXPRESSED IN BONE MARROW, SIGNAL = 0.59; EXPRESSED IN ADULT LIVER, SIGNAL = 0.69; EXPRESSED IN BRAIN, SIGNAL = 0.71
aattggcccctagaatcctgcaggggctcctagggtgcctccctcacgactctcggacaaggagagcttagggctcccccgggctcaggcgctcaggggttttggtgtggacccaacccatggtcaataatctgattctatgatacgctaattaaatggaagcaccaattcctacctgggccagaaataacaaggctcagcattttgcatcttcgtggtcatgaaaaaagggcaacgtcccacagtgatcgcagtttcctgtttcttcaccccttcactctcccgctccactgatgcatgtttaccttcctctcccatgatcatctcccatggtctctggggtggggcaatgtgaaacggagggctctggggggaatcaattgccagcccctgttttccagcctctgtgaaactcctcagcaccaccagcacataaacaaatgaacctcctttactattctcagatggacacgtgttacctgcaaggcagagaccctaccatgcgagcataccagcattgta

SEQ ID NO: 12212 - DNA, 594 bp, Homo sapiens
  MAP TO AC021401.4; EXPRESSED IN BRAIN, SIGNAL = 0.54
ttgaccccttgttctcttggtcacacccaatccatcagcagctcctctcaaccctctgccgcctgcctcatactactcctttgcctaccactcccatgccctcatcgatctgcagctggatactctaacacttggtctctctgtccttggcttcttcctggctaacctatcctacccattacctgttctataactttccaccttacgtgctccatcatttcctcttcctcctccatcaaacatcagttcccaaaagagcttgtggaattgcctccactcagggccactacgtagacactggccaaatgaccctttggtatcaatcagaaaaggcacccttccttccttcctcaattgagttaaaatgctgattttgttaaagaatgccatgttactgctagatgccaagctgtcactctagataaatgtatacgtatgatgtgactgaatgatgtccagcaggcgggtaccaaacatgaacagtcttacataagaatgatgtcttcatttccttggttcttttctagtatgcatctcaccatctacattatccaactgaaacaaaaatcaccaacgacctctcaactgccaaat

SEQ ID NO: 12213 - DNA, 538 bp, Homo sapiens
  MAP TO AC016282.3; EXPRESSED IN BONE MARROW, SIGNAL = 0.63; EXPRESSED IN PLACENTA, SIGNAL = 0.86; EXPRESSED IN ADULT LIVER, SIGNAL = 0.85; EXPRESSED IN FETAL LIVER, SIGNAL = 0.69; EXPRESSED IN BRAIN, SIGNAL = 0.84; EXPRESSED IN LUNG, SIGNAL = 0.87
tcttgctgagaaaagagcccagcccctcagcaccgcctgggcactgtagcttttgtttctagtggattgttttctctgatggcaacctcttgtcttgaactgacattctgccctgctcactgctcccagtgtcctctgttatatcaacatctgcagcagctgctgcttctttggctgaaaagtctcaatgtttgcctttaaaatgtcattccttcacctctctcagtactcagacttactcatcagtttgtttccagttgtcctcaaatgtgttcagaataaatgatgcacaaaggacagtttaaacatagcaaagcagctgtaggcaaggcatctccagctcaccgggctattctttcataataaaatgtgtcacattgtcattcgaatgtgtctctggcacagaagacactggctgtgtatcagctgtggcaataacaacatgtttagtggttgccaagccaagagggaaaaaagattaaatgaagaaggtgtagaaagatcagttaatgtgagttgccttcctttgctttttcct

SEQ ID NO: 12214 - DNA, 597 bp, Homo sapiens
  MAP TO AC026273.2; EXPRESSED IN PLACENTA, SIGNAL = 0.7; EXPRESSED IN ADULT LIVER, SIGNAL = 0.65; EXPRESSED IN BRAIN, SIGNAL = 0.65; EXPRESSED IN BONE MARROW, SIGNAL = 0.55; EXPRESSED IN FETAL LIVER, SIGNAL = 0.7
tgattcacctaatttccctggttttagtcctctatacaggttttatatagcaaaagaaccatttaaagacttgggttacaaatgtattttattttacctctggcatgccttgggctgagaaagcattatatggtggcacaatatttgtaacattctcatagccatctggtggtggttcgaggtatgacattttgaaaatctagcaagaattaaaatatgtcaagttagagagaaaaattccagattattattaagatataattcattttgccccaagtatatacttcagattaagcatcctggaactaggttctataattaaatagataaattacactgacaacaatgagaaagagccttatcattattattgtcttcctaataatagaaacttttataaatgcatgcaatctcaggtaaccaaaagtttccttataaagtgtaacagcagagcttcaaaggtggcactttggcaagcctctttttttgactatgccttttcagcttcctttgtgggctccttttctttcatctttatttaaataatatttccctatgttttatccccagcccattgcttgcctctgtactgcctcc

SEQ ID NO: 12215 - DNA, 600 bp, Homo sapiens
  MAP TO AP001505.1; EXPRESSED IN ADULT LIVER, SIGNAL = 0.55; EXPRESSED IN FETAL LIVER, SIGNAL = 0.55; EXPRESSED IN BRAIN, SIGNAL = 0.59; EXPRESSED IN BONE MARROW, SIGNAL = 0.45
ttgcttttatgcacgcagtctatcagagtagggatgaagcccatcattcctaattgtggaacacttttgtcaggagattttattgactttcctctcggtgccctttgagaaaattgtgtttttctattgtttgtcctgctggcaggtgaaaggtgttttcctcctgcgtgctgcacagcctgagtttctgaagtcccgagctcacggacgggaattcctgggccgggctgtattttgcctgctggggcctcgttttggagttgtcctctgcccatgagtgaactggcccgtaaccttctgttccaatttcatattctggggcagcagagggttcctcctggctggtatccggccctggctgaacagaggcctgccctgcagctcaggagtcgtgtctctgacgccttggggttgcaggttttcagcagtgtcactgaagttgcagccagtagggacggggacgtgcttgccggccacctccctgcccctgccctgcccttggcaggtggtcccccaaagcgggaccccaccctgcctgccctgctgctccccggcctggtgcgcatagaggtcaggacccctaacttctcccctccccac

SEQ ID NO: 12216 - DNA, 584 bp, Homo sapiens
  MAP TO AC019078.3; EXPRESSED IN ADULT LIVER, SIGNAL = 0.71; EXPRESSED IN FETAL LIVER, SIGNAL = 0.93; EXPRESSED IN BRAIN, SIGNAL = 0.66; EXPRESSED IN PLACENTA, SIGNAL = 0.71; EXPRESSED IN BONE MARROW, SIGNAL = 0.78
tagtcatgcctcgcaagatgtcagtttgccatatccccaatatcatgttggaaattcaagccctacctccacaactcctagcaggtacgaaaggactagggataacatgacttcatcagcacagataattcagagatctttctcttctccagaaaattttcagagacaagcagtgatgaacagtgctttgagacaaatgtcatatggtggaaaatttgcttcttcacctctggatcaatcaggattttcaccatcagttcaatcacacagtcatagttttaatcagtcttcaagctcccagtggcgccaaggtacaccatcatcacagcgtaaagtcagaatgaattctcatccctacctagcagatagacattatagccgggaacagcgttacactgatcatgggtctgaccatcattacagaggaaagagatgatttcttctatgaagataggaatcatgatggctggagccatgactatgataacagaagagacagtagcagagatggaaaatggcgctcatctcgacactaacacatgttaaaagcacattgtttttatagggtcattttaggccctttg

SEQ ID NO: 12217 - DNA, 517 bp, Homo sapiens
  MAP TO AC021970.2; EXPRESSED IN LUNG, SIGNAL = 0.84; EXPRESSED IN PLACENTA, SIGNAL = 0.77; EXPRESSED IN FETAL LIVER, SIGNAL = 0.69; EXPRESSED IN ADULT LIVER, SIGNAL = 0.79; EXPRESSED IN BRAIN, SIGNAL = 0.7; EXPRESSED IN BONE MARROW, SIGNAL = 0.68
gagctacggctggatctcacccagatgtctctgatgactgtggggctcacatcagtgaatgaggcagggtgggctggtcacagctatcctgcttagagggagcagaactctctaggtgaccacagttttatacccaccctgattgtctcaacaatgaagtcgctgtggcttttatggaagagcaatttctaggttgtctttcattttatgttgatatcatggtttttagagtacttggcagtgggggagacggtgatgacaggcaaagatgtgtcgtacaagaggaggaaacagccctgtggcttcagccagctgttgccatggtggaatgtgggcaagactggccaagctttctgactgtccaagaaaagccagtaatctgaaattcttttgtgtgaaatctcccaatttctaaatgttgctgaatcattcaaagatttaaaagacattaagaagaacatgacaatgaggaaaaaatgacaaacatcagcaaaccccagttcccagactgccaatt

SEQ ID NO: 12218 - DNA, 589 bp, Homo sapiens
  MAP TO AL132866.21; EXPRESSED IN ADULT LIVER, SIGNAL = 0.89; EXPRESSED IN FETAL LIVER, SIGNAL = 0.82; EXPRESSED IN BRAIN, SIGNAL = 0.79; EXPRESSED IN LUNG, SIGNAL = 0.92; EXPRESSED IN PLACENTA, SIGNAL = 0.96; EXPRESSED IN BONE MARROW, SIGNAL = 0.77
tccttccaccctcagtcatcaattaagcacagtttctggctgtttctccataaatgcagttctgacttactgtattctttctagtggctgcttaatattcagcattagaggggatccctgtaatttatccaagcgttaccctctggctggacatcaaggttgtttccagttctccattcttccagatgctgcagaaatcccatagtctctctactgcccatgagctctctggtctttttttgtttattggattagagccaccacaccccgcaccttaatgattttgttttctcccccaccagctccatggctacatggaaaacaagcctctgggacttcagatcttcattgggacagctgatgagcggatccttaagccgcacgccttctaccaggtgcaccgaatcacggggaaaactgtcaccaccaccagctatgagaagatagtgggcaacaccaaagtcctggagatacccttggagcccaaaaacaacatgagggcaacgtaagggctgggagctgagggcggcgggtcttcatggagaagcgagcagggggcaggtggcagggatttgggagaggggactct

SEQ ID NO: 12219 - DNA, 541 bp, Homo sapiens
  MAP TO AL161756.1; EXPRESSED IN LUNG, SIGNAL = 1.2; EXPRESSED IN PLACENTA, SIGNAL = 0.71; EXPRESSED IN FETAL LIVER, SIGNAL = 1.4; EXPRESSED IN BONE MARROW, SIGNAL = 1.3; EXPRESSED IN ADULT LIVER, SIGNAL = 1.1; EXPRESSED IN BRAIN, SIGNAL = 1.3
ttatttccttcctttcccccatcttatatgctgtcacaggacaaaacaattgaagagctcaggcaatctttagcaaatgttgaaaggatgaaagagaaggcaaatgttgaaacgatgaaagagaaggcagttgtgaaaacagaaaacttgaaaactacattagactctgcagagcaaaaggcaagatcagacaaagagaagacccagcagatgttagatgctgtcacttctgagcccccaacagcaaagagcgcacctgaagaagtatcaggacaagaacaagaggttttttcaaaatagtaaaattaaaattaatttagttgaagtgataaacacccacgcctacttagactgtaactaacttgacaaaagggaatattggcttatggaatcatgagttaaacaacctaacctccaggtgggcggagatacacctgggccccaggatcagcacctggaacctacaagccctttctcatggtcacttcttggcatctatgtgtcagctcatctgtctgactgctggttggttttctccatg

SEQ ID NO: 12220 - DNA, 552 bp, Homo sapiens
  MAP TO AL121914.16; EXPRESSED IN PLACENTA, SIGNAL = 0.53; EXPRESSED IN ADULT LIVER, SIGNAL = 0.51; EXPRESSED IN BRAIN, SIGNAL = 0.45; EXPRESSED IN FETAL LIVER, SIGNAL = 0.98; EXPRESSED IN BONE MARROW, SIGNAL = 0.9
ttaggggtgaggaattggaggggatagaaggtatcattcaggtattcttagccacatactaactatcctctggaggtactgattaaaataccttttcaccttccatctcttatcagtgacattcattattttgctatactagagaacaaactttgtgaaattctcaatatattcatcttttgctttcatgaatgccagaaagtttattttctcttccattctaggctacagctccagttggaggtccaaaacgtgttctcgtgactcagcaatttccttgtcagaatccattacctgtaaatagtggccaggctcagcgggtcttgtgtccttcaaattcttcccagcgcattcctttgcaagcacaaaagcttgtctccagtcacaagccggttcagaatcagaagcagaagcaattgcaggcaaccagtgtacctcatcctgtctccaggccactgaataacacccaaaagagcaagcagcccctgccatcggcacctggtaaactagcttttgagactcattggatagtccttctttgtcgtcgttgct

SEQ ID NO: 12221 - DNA, 581 bp, Homo sapiens
  MAP TO AL121901.10; EXPRESSED IN PLACENTA, SIGNAL = 0.75; EXPRESSED IN FETAL LIVER, SIGNAL = 0.69; EXPRESSED IN BONE MARROW, SIGNAL = 0.64; EXPRESSED IN ADULT LIVER, SIGNAL = 0.77; EXPRESSED IN BRAIN, SIGNAL = 0.66
gtccacacaggtggaggaacccaactgggcaacaggcaggaacttctagactttgttcactgtgcatcttacttcctgcaggcccatcattggccagattatcaacctgaaagcctccttggacctcctgaccgcagtcacaattgaaactgatccccagacacaccagcctgttgccgtcctgggagaatgcgccagtgacccaaccagcatctcactttccttgctggacaagtaagtcccattcatcttagtagagctgggctctcagggaacttgaggacccctaatttcagctctagtcctctacctaagaggaggcctagtggtgaaagtgttcaggctctggagtcatgttgaccttggtttacacatcagctctgccactaacttgtaactttatcaccaacttgacccaggcctgttttcacatctgtaaactgggggtgttcataataactactcataggcttctgagatgaccagatgagaaaatacaaatatttagcacgcagcctggaacatgctgcctctctgcctgctggttctctccattactgagactggagtgttgagctccc

SEQ ID NO: 12222 - DNA, 552 bp, Homo sapiens
  MAP TO AC007492.2; EXPRESSED IN ADULT LIVER, SIGNAL = 0.95; EXPRESSED IN BRAIN, SIGNAL = 0.87; EXPRESSED IN FETAL LIVER, SIGNAL = 1.2; EXPRESSED IN BONE MARROW, SIGNAL = 0.75
actccaaggctgtgttcaggagtccttgaaaatatgattcacagtaaagttttacagcattatcaggaatgtgacaagattgaggagttaggacctggtaatgtacagaaagaagtctcatcttcctttgaccaagttatcaataaggcaatttgagagataatcactcattttgctgctgtcctcatcacaaatcccttccatattatcaccgaggtacaattcattggcagggaacccaagtactgcagactttgtgactccatagcaaccatctatcagggagagggcatcctaggatttctcatgggtcttgtgcctcagctccaaggcgacatcatttccttgtggctctgtaactcactggcttacctcatcaatatctatatacttaacagtggggtttccaccatgaatgaaataaagaatgattcccaagttgttacagaaacttttgccagtatgttgagctaatctcttgtgtttgtccctaattttatgtctgtcaacagccgaaggcttgctggtggatcctttccttattgcccaatg

SEQ ID NO: 12223 - DNA, 506 bp, Homo sapiens
  MAP TO AL133414.3; EXPRESSED IN PLACENTA, SIGNAL = 0.8; EXPRESSED IN ADULT LIVER, SIGNAL = 0.67; EXPRESSED IN FETAL LIVER, SIGNAL = 0.62; EXPRESSED IN BRAIN, SIGNAL = 0.58; EXPRESSED IN BONE MARROW, SIGNAL = 0.57
agggagacgccatgtctatgtggggtgggtccttcctgtagccctgggcacccaggtgtggtaggagccttagaaagtggaaatgggagaatcttctgagcacagggagggaggggtggctccacatcctcctctctaaggcagtgcctccttctcccccaggtggtcaggacaaacccttcctgtctgcccggcccagcactgtggtgcctcgaggaggacacgtggctcttcagtgtcactatcgtcgtgggtttaacaatttcatgctgtacaaagaagacagaagccacgttcccatcttccacggcagaatattccaggagagcttcatcatgggccctgtgaccccagcacatgcagggacctacagatgtcggggttcacgcccacactccctcactgggtggtcgacacccagcaaccccctggtgatcatggtcacaggtcagaggctttctgtctgggcttctcactgtcccacctcctgaatcccagagcttctg

SEQ ID NO: 12224 - DNA, 515 bp, Homo sapiens
  MAP TO AC013642.3; EXPRESSED IN ADULT LIVER, SIGNAL = 0.53; EXPRESSED IN BRAIN, SIGNAL = 0.49; EXPRESSED IN PLACENTA, SIGNAL = 0.52; EXPRESSED IN BONE MARROW, SIGNAL = 0.49
cctcttggagaacagcttgcgtgaggtaacatgggacataactgcttttcaagcctcttcatgttttttcgtttttgccttttttaactaagtgctgtttactctaacaaaataaattttattttttaaatgtgaaagttgaaccttaaggctctttgtaatattaaaatccatgtctcaattaattattctgtgttgatagtctatacatgtactgtctagtaacaaaatatgtgattcatcaaaatatcttaaataatgagctttatgtttagctaattttctttcttttttcttatgtttttatttttagggtgattctgggggacctttagtcacaagggatctgaaagatacgtggtatctcattggaattgtaagctggggagataactgtggtcaaaaggacaagcctggagtctacacacaagtgacttattaccgaaactggattgcttcaaaaacaggcatctaattcacgataaaagttaaacaaagaaagctgtatgcaggtc

SEQ ID NO: 12225 - DNA, 568 bp, Homo sapiens
  MAP TO AC016623.2; EXPRESSED IN LUNG, SIGNAL = 1.2; EXPRESSED IN FETAL LIVER, SIGNAL = 1.1; EXPRESSED IN BRAIN, SIGNAL = 0.97; EXPRESSED IN PLACENTA, SIGNAL = 1.1; EXPRESSED IN ADULT LIVER, SIGNAL = 1.2; EXPRESSED IN BONE MARROW, SIGNAL = 0.99
cagtagggaattcgagatgaggatctattctcatctatgattctaacagttttatgagttgggtaagtactgttttataaactggagaataacaaattatggtatatgtgattttcagtaactttttaatttataaagtacctttagaactataagaggtagaataatcagacaatcatgttaatgaaagagaattgttacctgtttggaaaaagactctagaaataattgtccgacacaatgggcatggagtgcttgaaggattgtctttggccagagtccgtaagcagggctcacagaagatgtgatggcaagggtaacacatataagggttgaaataaacgtccagacacactgcacagatgtagctatccttttcttctgcatattcattgtcttcatctgtactcatctcattattcaaagtctgcaaaacataagaaaacttttttcttaatttagtatgagattggtttccttaagatagcctttatattttgttaaaatgaacaaaaatatttgagaagcatataaactgtggcatattcaaagtgccagaaatgctacc

SEQ ID NO: 12226 - DNA, 598 bp, Homo sapiens
  MAP TO AL110292.4; EXPRESSED IN FETAL LIVER, SIGNAL = 0.51; EXPRESSED IN BRAIN, SIGNAL = 0.64
ccactgtcagacacattgggtgaaagcatttattctgacagagtgtttctttattttgactcattcgttttattaaccatttatctcttggggaattgtttaaatatttaatccttcttaatatttattttgctgcaggccaaagacggctatgtttttaaaggaactacagtatcttatcgttctgatggtctggaagtttatattcacatccaagaattcttcctgcttctccgaaaactcatcctttgctttattactcttcatgggaataaggaaacagctgtgcagtataagttatgtgctctttcttttcttcttgacaactattatcaactcattcttaccgaaaaatgacttaataaacttctctcttctagcctcttttaaaagatctatgtagtttccaaaactcttaaacactgtaggaactttttcaaagcctatttcaaattggggtctgtatcagatgtaataatctttagaaaacctgatcaatattaattatttagacatgataccctcctcatttctaattagcaaatgttttatttttttctttgtatttgatatgagcactttatgcaccctttacccc

SEQ ID NO: 12227 - DNA, 501 bp, Homo sapiens
  MAP TO AL133227.7; EXPRESSED IN PLACENTA, SIGNAL = 0.75; EXPRESSED IN FETAL LIVER, SIGNAL = 0.83; EXPRESSED IN BONE MARROW, SIGNAL = 0.74; EXPRESSED IN ADULT LIVER, SIGNAL = 0.8; EXPRESSED IN BRAIN, SIGNAL = 0.68
ctatgcgcccaaagaaagtcaatgttactttgtgataattgaaataaaataaaacaatataaaataagacaagtgaccactttcagagggctcatagtctaggaggggagatacatacgaaaaaattgcatttatacaaaatcatgctcatttgcaagaacacatataaaacaaaggatctcttgtgatcttgctccattatcttgctccaggagctcccaggttaatgcagaagacagacagaaaaatccttactccagtatcatcagggctgtgcatacatatgaggcactctgggaccacagaggaaggaacaatttattctgtctaggggaaccccagaaagctgcccctgaaaacaatgatatgtaatttgagtcctcaatgctgtctacgaagagttcatggcataatatgatctccctaccagagaacaggcaacacttaatccaagggaatgaaattgaaatagtgggttttagttgccatgggagaagatgt

SEQ ID NO: 12228 - DNA, 551 bp, Homo sapiens
  MAP TO AC016212.3; EXPRESSED IN BONE MARROW, SIGNAL = 0.6; EXPRESSED IN PLACENTA, SIGNAL = 0.5; EXPRESSED IN ADULT LIVER, SIGNAL = 0.54; EXPRESSED IN FETAL LIVER, SIGNAL = 0.58; EXPRESSED IN BRAIN, SIGNAL = 0.47
tatctgtggccagaaaaccctcacgtggtgagtggtctagatgtgccatccagctatgttgcctcatgatgtggaaagggagaaggaaaccaccctttaacaccagggttccgctgtgtgctatttatgctaaaaagcagctgtcatgattttttccagccaggcctccctgttggacttgaaatccacatggaagagcctgatgtcacaaagcagcagaaacctgatagtaggggcagcaaaggaaggtgttatgagaagttccaccagaagagagagctctggtaaaccctgcatgggcaacaggccgagccacactaggacttcaggggtcctaggcacttttgccatggtaggccttcttcttcctaaagataaataaatacataattctattttatggctacactgatatacagacaaatgtgttcgtgttatatgtcacaatatttccttccacctgaaagctcgtttttttcttctcattttaaaagaaattaaaacacttttcatgggcgctgtaaaagtattgtggaatgtgagcactgcat

SEQ ID NO: 12229 - DNA, 532 bp, Homo sapiens
  MAP TO AL161747.1; EXPRESSED IN ADULT LIVER, SIGNAL = 0.51; EXPRESSED IN BRAIN, SIGNAL = 0.53; EXPRESSED IN LUNG, SIGNAL =  10; EXPRESSED IN FETAL LIVER, SIGNAL = 0.63; EXPRESSED IN BONE MARROW, SIGNAL = 0.63
ttgtccaacagtgcgacttctctgattatttttagttcttcttttgagtgcaaagaagtaaattcattaatttctgtacttttttaaaaagcttatttttttattttcatttttgaagactattttatgttttgtattttaaatgatacaatttgggtaggcagggaatttataagctgtcttaaatttaggggggaaaagtggttttttttatatttagtgtttaattagtccttctgcttctctcaggacttggaccactctataggaactcagtatagtgccaacccacctgttacaattgatgtaccaatgacagacatgacatctggcttgatggggcatagccagttgaccaccattgatcagtcagaactgagttcccagctgggtttgagcctagggggtggcaccatcctgccacctgcccagtcacctgaagatcgtctttcaaccaccccttcacctactagttcacttcacgaggatggtgttgaggatttccggagggtgaggcattccctgtcaaaat

SEQ ID NO: 12230 - DNA, 555 bp, Homo sapiens; identical to SEQ ID NO: 12016
  MAP TO AL160414.4; EXPRESSED IN PLACENTA, SIGNAL = 0.76; EXPRESSED IN ADULT LIVER, SIGNAL = 0.73; EXPRESSED IN FETAL LIVER, SIGNAL = 0.96; EXPRESSED IN LUNG, SIGNAL = 0.98; EXPRESSED IN BRAIN, SIGNAL = 1.7; EXPRESSED IN BONE MARROW, SIGNAL = 0.92

SEQ ID NO: 12231 - DNA, 536 bp, Homo sapiens
  MAP TO AC008269.3; EXPRESSED IN BONE MARROW, SIGNAL = 0.51; EXPRESSED IN ADULT LIVER, SIGNAL = 0.65; EXPRESSED IN FETAL LIVER, SIGNAL = 0.49; EXPRESSED IN BRAIN, SIGNAL = 0.59; EXPRESSED IN PLACENTA, SIGNAL = 0.66
gcctcccatttcatttcaagtgtcatcattatttatttcttggtagcaaatcttaattgccaggttccaaggacagagctgtggaacaacacaagaaaatccccatcatacaagttggaaccgatacgacttgataattgattggcttagtggtgaggaagatgcccagattcttggcttaggccagaagacaggagaaggagtggcattaatacttgaatatgcaagtaggaaggtaagcatgatagacaatgtaattaccaccatgttgagtctgctacattaagagtgaagtgtattcatgtatgaataacttaaatgtatgaaatattcaaactatgtcagtttaaacatgacatttgaaatatatagtttccaatggtttcttccttagtaataaatagtcaccatctgggcatcatcaataagatacagggacaccttcccaaacacccaagaaatgaaatttgagaaagagagcagtcactaaagcaaattaaaaggactgtgcagcagagactgctatatgcctccca

SEQ ID NO: 12232 - DNA, 542 bp, Homo sapiens
  MAP TO AL161744.1; EXPRESSED IN FETAL LIVER, SIGNAL = 0.53; EXPRESSED IN BRAIN, SIGNAL = 0.55; EXPRESSED IN BONE MARROW, SIGNAL = 0.49
tctggctgtgcattagcttgttagatcctgtctgcattagaactaggtgaaagcagtgtggcagccacagaggtaaatttctctaatctctatttcaagaaatactgtgtcattgtgctgtaaggagaccagtgagctgagtttccacctctagtgcactggatggtaaaaactccctgctgggctggcccctacaagcatggagaaagtgatagctctatctgaatgagggtgaatttcctgaattgtcttggcaaatgggtagaaggaattaaaaggctccaggaagtgggcattgctggaatgtacacatcatgtgagaactgaaggcccaccagatgatattagccttgaggggtggacacctcattcactgaggcatcagagtgtactggtgagagggacaccagcatcacccagaagttcagtgatacctttcctctgcaggtcagggctgatggtaggggaagctgtcacaaagctgggtgtcttaatatccatggggattacagcatccctgaagaaagagaagccaggtgctg

SEQ ID NO: 12233 - DNA, 572 bp, Homo sapiens
  MAP TO AC011815.2; EXPRESSED IN PLACENTA, SIGNAL = 0.57; EXPRESSED IN FETAL LIVER, SIGNAL = 0.49; EXPRESSED IN BONE MARROW, SIGNAL = 0.51; EXPRESSED IN ADULT LIVER, SIGNAL = 0.58; EXPRESSED IN BRAIN, SIGNAL = 0.93
aaaagcccacatccctatccattagtgaggagtgacaccccgcaccaaaataccatggaggccaggggtgctgcttttatattacagcagctttactcatggttgtcatgatgctcttggatcactgtgtttggtttactcttttacaaaggttaggaaagtatgccatgtattctaagaagatttccttccaaaacaaaatagttgggtgcctaaagcctgacgactgtgctttctagaatgatctgttctttgatcacatggggaagctaaggcgcccctgcatatgtatcagacaccggaagctgggagacgtttgcatggcgagttgtgcctaactaagcctggtgccctccacagccttgagacgccatgctggcagtggcaatgggctgggatgctgcagggccccattcccagtcaattatctcagctgaaacttctcccctgcccacaggagggccacacagaagagccggaagcagaggagcaagcccacgaacagcagcccccgcagcaggaagagtactgacccaccccggctgctcttgacacttccattgtgtgtggga

SEQ ID NO: 12234 - DNA, 594 bp, Homo sapiens
  MAP TO AL161732.1; EXPRESSED IN PLACENTA, SIGNAL = 1.4; EXPRESSED IN FETAL LIVER, SIGNAL = 0.64; EXPRESSED IN BONE MARROW, SIGNAL = 0.64; EXPRESSED IN ADULT LIVER, SIGNAL = 0.9; EXPRESSED IN BRAIN, SIGNAL = 0.76
tgctcctggggaaataattgaaggcccagtgcaaaagtcactgggcccacaattactaacgctactacttatgtgttgttttctttccagcaaactccagatgttgctaaggagaatgccccatcattacatctattgaccagagcagtgctctttgctgcccaacaacaggacgttctctggaagctcattctaatgagaaactgggttattgtggacttcttcaccaaggaacacagtcgaggtgctatagcccaggtagaacttgcagctacaaatgcatatattcagggttactgtgagatctttggagaagttttcctctctctcacagaagttggctttctgctttatatattggatgtttccaatctaatcaaacagaaatacatgtaaagtatttttcttcttcatgcccccaaattttaaacacatttttaatataacaggatcagagatttggatgggggccctaaactttctcggctccttgcagggagaactctacttaactcatccctggaagcaaactgcccaccctgttctcagaaatacctcaaggagacttgggaccgcctgtgcatcctgctatct

SEQ ID NO: 12235 - DNA, 594 bp, Homo sapiens
  MAP TO AC007940.2; EXPRESSED IN LUNG, SIGNAL = 0.89; EXPRESSED IN ADULT LIVER, SIGNAL = 0.98; EXPRESSED IN FETAL LIVER, SIGNAL = 0.77; EXPRESSED IN BRAIN, SIGNAL = 0.91; EXPRESSED IN BONE MARROW, SIGNAL = 0.88; EXPRESSED IN PLACENTA, SIGNAL = 0.94
atgagactgcttttccagccaatggctagctgtaaaatactggctgtattctttaccttctccattcctaagatttcatgtctctatattgggtctatttctatggatcctcttggctctgagatattctagttctaattcaaatttttattcatgtctggtgggaaatttatcatttattattagatcctgcatcagatcacaggcttaaaacataaggaaaagagaaaaaaaatcatacccatctaaatttatcttttactgaaagaaacatgcaagaagaaagaggtaaaatgatttcttgcagttttccctctaattatatgtagagtttcacttcttaatcctctctgaatctcagatccccagagacgtgaagatgcatggaataacacgtgaagagaggaaacttcgggcctgtggtcaaaatgtgttcaccacggcagacaactgcttgggtgacagctttggcctctggatgaattctccttggcgagcaatcgtcccacctgtaggtgccttcatgatcgtctgtgtgcagggcaccaagcaggccatctaaagccactaatctcaaagagagcttacccaggg

SEQ ID NO: 12236 - DNA, 527 bp, Homo sapiens
  MAP TO AC019263.4; EXPRESSED IN ADULT LIVER, SIGNAL = 0.85; EXPRESSED IN BRAIN, SIGNAL = 0.62; EXPRESSED IN BONE MARROW, SIGNAL = 0.64; EXPRESSED IN PLACENTA, SIGNAL = 0.77; EXPRESSED IN FETAL LIVER, SIGNAL = 0.85
tgtaccggacaaggagttctgtcccatcaactttaaaactcctgaagaattgttagaaaggaagtgatgcactatctgtgcaaggaaggaaaagagtaagtgtcctgtttatcttgtttaccctctgcttgaagtcttcatgtgtaagaggtacagcaaaacattctgattttctttcctgaaatttctgttggagtctcctatcctaggattttactcagtaagcacacaaatttagagaatagacgttctattaggctgtttgatgtatgtgaattagtttaattaagataataagaaaaccagttagggaaattgtacagttcaggattgtgtggcttcagctgcaactgaatgcaggtgtttgtgatgcagtcacatccctgccttttacaatatctcttagcttcatttttctctgtgtgtttcaacttttggtactcctgccacatgatggagcagggccaaagatccactatctttgaataatctgctatctttgaacatctatgccccttcccctaaaa

SEQ ID NO: 12237 - DNA, 517 bp, Homo sapiens
  MAP TO AC010349.6; EXPRESSED IN PLACENTA, SIGNAL = 0.48; EXPRESSED IN FETAL LIVER, SIGNAL = 0.53; EXPRESSED IN BRAIN, SIGNAL = 0.99; EXPRESSED IN BONE MARROW, SIGNAL = 0.43
tggtggatcttagtcctgggcctatatggcttgtgcctaccttcaatattatccaaagagtttccctcaccatgctctggccaggttgatctttcttgaaaaatgcctctagccctctttttccatctctttccctctttcccctcatggtcttggtacttccagttctcttagcatagaaatttttctgcatatttatgcatagctggtccctgcttttctgtcctttgctcacatagcatcttctcaaagggcatttctggacgacctgatctaaaatcgtctctttcctcaccatcactcatgaccacctattccttttattttcctttgtttcacttttcatagactgaaattgtctagtttgtttacttattgtctgccttccttctcagaatgtaagctctgtaaggggagagagtttatctgtcttctacctcactagtgtggccctattgtcacaactttgtcctgcacatagtgttcatctaacatttgtggcaaaacaaatctgcaa

SEQ ID NO: 12238 - DNA, 549 bp, Homo sapiens
  MAP TO AL132654.12; EXPRESSED IN BRAIN, SIGNAL = 0.86; EXPRESSED IN BONE MARROW, SIGNAL = 0.7; EXPRESSED IN LUNG, SIGNAL = 0.83; EXPRESSED IN PLACENTA, SIGNAL = 0.84; EXPRESSED IN ADULT LIVER, SIGNAL = 0.81; EXPRESSED IN FETAL LIVER, SIGNAL = 2.5
tgggttaaaagccacaggactactagtagttattgcaggttcagactgatcagaaaatggacctggaccaggcttgtcctcagctaaagtgtctgttttcacatcatggctactcggcttgtcttccgcagtcttttcagtcactgccgtaccacttttcgttgtgcttgatagagacgccggagcagtggaagtgcaggtggttgccatgggtggactgaggagtcccccaacaccaaacatctggggcacagcagccatgcctggcagcatcatgggcagcatgctcagggtacttttgacctcttcacctgttggcatcgtggcaaagccagctggaaaccccaccagcccggtgagggggatgcctggcatatttctcatgttctgaagtcctaccaggtccatcccagcaatcagtccattcatgaacagtggccccattccagagggagagtctgccacaatggaaggagccttcaggagttcgctccgaggccgcctccccctcctgcgggggcccgtatctcgaagaataggctcagccag

SEQ ID NO: 12239 - DNA, 542 bp, Homo sapiens
  MAP TO AC011790.4; EXPRESSED IN BONE MARROW, SIGNAL = 0.85; EXPRESSED IN LUNG, SIGNAL = 1.1; EXPRESSED IN PLACENTA, SIGNAL = 1.1; EXPRESSED IN ADULT LIVER, SIGNAL = 0.95; EXPRESSED IN FETAL LIVER, SIGNAL = 0.78; EXPRESSED IN BRAIN, SIGNAL = 0.93
caagtcgtcatgacaggtcctctttttctcctaaatcactttcatcttgaaggtctaagtgtgtttttcatttaagagaagaggatacaatgacaatttttctttctggaaaaaaaggatctgaataaataacatttttgtaaaaaccacagagatatctacaggtttcatagcaccttctcttaaacaagtccctgattattatgttttgggtcatcccacaaacaccatgtagcttggtgtttgtccctctctgccagttctgctgaagatctctgctaactgtgcatcttgtcttggagatgtcattgcccatgactggaatgccggtgtctatgaagacagtgatattggtgtattactcaagtgaattatcattttggttctgaattgagttgtattctactcagtgagacacaagaagaacctccttcttaattctgtgccacattttgcaaatacacacatgtacacaaacataaagaacatttatttttaaaatatctactttttacttttcttgggggttcaataccagctta

SEQ ID NO: 12240 - DNA, 524 bp, Homo sapiens
  MAP TO AC011930.3; EXPRESSED IN LUNG, SIGNAL = 0.85; EXPRESSED IN PLACENTA, SIGNAL = 0.86; EXPRESSED IN ADULT LIVER, SIGNAL = 1.1; EXPRESSED IN FETAL LIVER, SIGNAL = 0.75; EXPRESSED IN BRAIN, SIGNAL = 0.71; EXPRESSED IN BONE MARROW, SIGNAL = 0.63
tgtggcctctctgtctctctctctaaaatatcttactacaatgcactcatccttcttcgtcttgtgattcatcagtctgataaccaagattgctatactaagtgatgaatgggcacgtatcatatgcagcatgggtaagctagacatagcatgattcacgtcctgaggggagacagagcatatttcatcatactactcagaatggcatgcaatttaagacgttaagtattgtgtatttctggaattttccatttaatatttctggactacagtcaaccatgagtaactgaagctataaaaggcaaaactacagataagaggagactactgtatcttcataaactagggaaggtaaaatctctgctaagtcaaatgtgttcagtattttatggacaaaagacagctgaatatttcttagaaaatgctcaaagtctgaaaccacctcaaaatggacttagaaaaaaacacttacacatgacttaagatgtaagtatgaatactttcaacatgtatcccctatggga

SEQ ID NO: 12241 - DNA, 592 bp, Homo sapiens
  MAP TO AC022918.2; EXPRESSED IN PLACENTA, SIGNAL = 0.67; EXPRESSED IN FETAL LIVER, SIGNAL = 0.56; EXPRESSED IN ADULT LIVER, SIGNAL = 0.52; EXPRESSED IN BRAIN, SIGNAL = 0.49; EXPRESSED IN BONE MARROW, SIGNAL = 0.56
agtttcacaaattgggtggctgaaaacaatagacatgtattgctcatagtactggaggcaagaaatctgagctcaaggtggcagcagggccatgctccctctcaaacctataaagcaatcctttcttgcctcttcctagcttctgatggtttgctggcaacctttggtgttccttggccagcagctgcgtaactccaatctctaccttcatctccccatgtatgtgtcctataaggacatcagtcatgttgaattaggggtccacctactcctgaatgacatcttcttaatataactaattacatctgccatgaccctatttccaaatatgaggtgctagggattaggattttaaaatatctttttggtgggggaaacacaatttaacctataacaatatccttgaagtcaactctagaaaagagggtattatggagtgaaaaatagtgttacagtgttcaaatctcaaatcagtcctcaaagtcaagccaaaaaattatgtgttccatgaagagaaaaaaaacgttttcaggattttaaatggtctaggctcataatataggtgtatattggtcacatgtctgcttgccag

SEQ ID NO: 12242 - DNA, 562 bp, Homo sapiens
  MAP TO AC018530.4; EXPRESSED IN LUNG, SIGNAL = 1.2; EXPRESSED IN PLACENTA, SIGNAL = 1.2; EXPRESSED IN ADULT LIVER, SIGNAL =   1; EXPRESSED IN FETAL LIVER, SIGNAL = 1.6; EXPRESSED IN BRAIN, SIGNAL = 1.4; EXPRESSED IN BONE MARROW, SIGNAL = 1.6
catacgcctttctgctctccacattagaacaagtacaatctttaatttgctccagccattatttctcattactcatagagtcagaagcttagtcattgtccacattttgtaatccaaggccaaaacactgtattttgcatatatatatgtatatattttgcatatatatatataatttttttcctgagcttgcagctgaatcttctagtggctcccagggaccacggagcaataattcaaagtggcatggtagagagatccatggcagagggccagttctcccttccaatagttcaacccaaaaagaatgggaggagaaaaatagagcaccctggaggaaagaatgcttgaaaatccccttctcacttagtgagaatgaaaaagttctattcatgacttttaccaccaggtttaggcctctgctgaaaaacaacaaggaatttggaatatctgcttaaaatgagtgtaaatatttacccacatatgctgaaatattcttgtgacatttagtctgatgcatactgccaggagagaaggaagctcctgagccaaacacaggaat

SEQ ID NO: 12243 - DNA, 512 bp, Homo sapiens
  MAP TO AC018389.3; EXPRESSED IN LUNG, SIGNAL = 1.1; EXPRESSED IN PLACENTA, SIGNAL = 0.97; EXPRESSED IN FETAL LIVER, SIGNAL = 0.7; EXPRESSED IN BONE MARROW, SIGNAL = 0.8; EXPRESSED IN ADULT LIVER, SIGNAL = 0.86; EXPRESSED IN BRAIN, SIGNAL = 0.71
ccttctctgctttcccttcctgcccctctccctctttctcctcctcctcctatgtggggactgctacagcatacttgtgtgaatgacccaacagggtgggagaaactgatgatcaggagacagtggtgacggtctaggaacatggttcgtgaggagatgagagacatggaaagagttagtgtcaggaagggaggaaggcagaggatacaggcacacttactggtagattggtagatttggcaatgggaacgtggggaaatatttttctgtttgcttccgtattctcagttcgataagaagtgaggtcatcagctgaatgtgaggaagaaagagaagatatgagaagaaagaagttgagaaggacagtgatggacttgagaaatatggtaagattacctgaagatcagtttgattcataggccaggtagggtgggagtgtgggagtttgtgtggggcctacacatagaagaggatttgtgagatcatagggtgcgcatctaggcaaatccact

SEQ ID NO: 12244 - DNA, 541 bp, Homo sapiens
  MAP TO AC019222.3; EXPRESSED IN ADULT LIVER, SIGNAL = 1.3; EXPRESSED IN BRAIN, SIGNAL = 0.9; EXPRESSED IN LUNG, SIGNAL = 1.2; EXPRESSED IN PLACENTA, SIGNAL =   1; EXPRESSED IN FETAL LIVER, SIGNAL = 0.85; EXPRESSED IN BONE MARROW, SIGNAL = 0.88
agcctaatgcttcctttcccagcactgcttgcctgtagcatggaggacacaatgcaggtcactgcaatcaaccaatcaccaactgtagaagaaataatggagatgacattgatcagtggtcttctaactttgatttgtttgttcttaatggcagaatcctgttacaaaaagaaatctcactctgaatctgaacacattgaacagatacaagtgtggctgctctggctggagaccaggtggtcgtaggtcaaaagtcccatctgctcttgcccataatgtaatctccaaatgagttattcttccctgctgcacagataaacccaattcactgacacagcattattgcagtaaagaagtagtttaattaatgcaaggctggccaagaagaaggactggagttattactcaaatcagtctccctgagaatttggaggctagggttttaatagataatttgatgggcaaggggctagggaatgggtgctgctgattggttgggggatgaaatcatgtgggaaacggtccttgtgtgctgagtcca

SEQ ID NO: 12245 - DNA, 577 bp, Homo sapiens
  MAP TO AL121889.3; EXPRESSED IN PLACENTA, SIGNAL = 0.54; EXPRESSED IN FETAL LIVER, SIGNAL = 0.71; EXPRESSED IN BRAIN, SIGNAL = 0.5; EXPRESSED IN BONE MARROW, SIGNAL = 0.66
tcccacacattttgcttcagaatcatttcttggattctgttgtttagtatcccaaaaaggttgagtgttcttttagaacacatacacgcatgaactaagggtctcaaaagtaaatataagaaaagaacagatgagaagatggaccaaatgtagaagtaacatcacttgaggcttgagaactgtctggctagtgtaccatgtatactgtcactaaatggtgaccctaagccacgcatatgccaataattatatctgggaattgtaaactaaggctttttgtcctaaccatttgctcagcagatgagtattgctgaattgttcatttatatttctcccactccctgccaacagttaatgacagttcggactatcacaggaaatatctactatgcaaggtcaggaactaagattattgggaaggttcacgaaaagttcacgttgattgatggcatccgcgtggcaacaggctcctacaggtaagtctctaacccgtccaaggcttattaatctaaactcttcagaagaagcatgtcatgtaaaggtaaaagccttttcctctcaatgggagcctgtatgg

SEQ ID NO: 12246 - DNA, 524 bp, Homo sapiens
  MAP TO AC022268.3; EXPRESSED IN PLACENTA, SIGNAL = 0.73; EXPRESSED IN FETAL LIVER, SIGNAL = 0.63; EXPRESSED IN BONE MARROW, SIGNAL = 0.54; EXPRESSED IN ADULT LIVER, SIGNAL = 0.67; EXPRESSED IN BRAIN, SIGNAL = 0.65
taggcccaaagttgttacgctgctcaaatattagatttagcatgcaattcacaagactcatgttggacttgtgtcataatgatgtaacaaacacttacctttttcgtttccatttgcataatttggaggcttgtttttgtcaatgctgttaaagctctgacttctcctatttaaattagaggctccctggaccttgctgctgcttcctgcagcaggcaccctagagggccctggaagcctgaaatagtataagaaaaattacatcattattgtacattacaaaaaggtaagaagcaggaggtgctgaaagtcagaaatttacaacatatgatgttctaaaatctatttagcagaaaatggtgatagatgtgacaaataaatagctaagcacaatgttgcagatcttcagaaaaatcttgtttcccttttcaatgaacatgtccctccaaaattgtaataatatacaataattaaaataaatcttaactaaaaaagtcatactcaccccatccctgatgaataaa

SEQ ID NO: 12247 - DNA, 582 bp, Homo sapiens
  MAP TO AC013726.3; EXPRESSED IN LUNG, SIGNAL = 0.92; EXPRESSED IN PLACENTA, SIGNAL = 1.4; EXPRESSED IN ADULT LIVER, SIGNAL = 0.76; EXPRESSED IN FETAL LIVER, SIGNAL = 0.83; EXPRESSED IN BRAIN, SIGNAL = 0.59; EXPRESSED IN BONE MARROW, SIGNAL = 0.52
agtgggttgaactgtggaggaatctccaacccccctttaccctgctcccttaaagcatggaccagagatggaccagagcctatgcatctccatcctctccttggccgccatgagcctgttcagtatctgtgccatcagcagcaggcccggtgggtacctcagggcaggaagggaccccacaaaggaaaggccctggtatcacctctattatccctcctccacctgcagttcaccttcctccctgacactcagagtgctctcccctatgcctctcacgcccagtctcagtgaagcacgctctaagtaagcccatgtgactcacaatcaacccccttttctgggactctccatctccagggctgggctctgccatcgctgaccacggggtgttgatcctcccagccaaagctgagccagttggattctccttcccaataactgcccactgggaccaagagacgcagagctgggaacgtatggtgctgagctgcatgaagagccgccctggagagtgggtccctgacccctgaagcttctctgattcctgcttaccccaggtgtggcagctcaggtttgtccttc

SEQ ID NO: 12248 - DNA, 587 bp, Homo sapiens
  MAP TO AC020704.3; EXPRESSED IN ADULT LIVER, SIGNAL = 0.54; EXPRESSED IN BRAIN, SIGNAL = 0.48; EXPRESSED IN FETAL LIVER, SIGNAL = 0.49
ctccacgtgaccttttcgaggatcccatggtggttttatcttgattaaaatggttctgttcacaggaggggaagggctgtgccatcatcctccaaaagaaggtggaaaaggcaaaagatggaaagaagataccactttctcgtggaaaggcgggaggagaagagaaggagtgagcacaacagagaggcatgttggagaatgagggagagacagagagaaggaaataaagagaaaagccagaggctcaggaaatggcagggaaagtgatctaactaattgtatgaagagacattctgtccatttcttcttagtgcaaggcaagaaggaggcactatcaatcccagtttgcagatggggaaactgagtcccagtgtaaattaccgtgcccaagttcactgggatcatgtgtagccaaaccaagattcagtcttaagtttgctagacttcagactctgccctttccataagagaaggaacacctgtgtttcattttgatgaattctcaacaataccttttaaagtaaataatgaatgtccccctccctgacctagacaagagcctactttgcactttcaccctcaggttc

SEQ ID NO: 12249 - DNA, 538 bp, Homo sapiens
  MAP TO AC018731.3; EXPRESSED IN PLACENTA, SIGNAL = 1.1; EXPRESSED IN ADULT LIVER, SIGNAL =   1; EXPRESSED IN FETAL LIVER, SIGNAL =   1; EXPRESSED IN BRAIN, SIGNAL = 0.84; EXPRESSED IN LUNG, SIGNAL = 0.97; EXPRESSED IN BONE MARROW, SIGNAL = 0.74
tgccatttgcgcactataacttcaagttcagttctaaaagtagaattgctgagactaagaatatgtgcattttacatttttttgcactttacattttgataaaaatctttagaagtatttgcatccatctatgcttgcagcaactctgatgcttacattcaggctaacactttctggttttgcagatctagttgtgaaaaatggtatcttattatttcaatttacatttcttaggagtgggattgggtttcttcatatctgctagccatctacctttgttcttcatgcattcattgatttgattttgaagtttgtccagagattccctgtgtccccacaggcgccattcggggttcctgtgctaaggcatggacaaggtggtgagctctctgctggcagggacctggcgctctcatcctgtgtccttagcacccggcagaggtccaagagggctcctggtctgggctgggaaggtgaccaacacggcgttgggggttgaggtgggggttggggaactggggtaggttgtgcagaggaa

SEQ ID NO: 12250 - DNA, 554 bp, Homo sapiens
  MAP TO AC010789.7; EXPRESSED IN LUNG, SIGNAL = 1.8; EXPRESSED IN ADULT LIVER, SIGNAL = 1.6; EXPRESSED IN BRAIN, SIGNAL = 1.6; EXPRESSED IN BONE MARROW, SIGNAL = 2.4; EXPRESSED IN PLACENTA, SIGNAL = 1.1; EXPRESSED IN FETAL LIVER, SIGNAL = 1.8
gacttgtccaaagacactcaacctttcttctatcatatacatcttcatcaacagaatgaaacaacataccataataaaaccacttggttttgtttcctccttagtaaaacaaaatacgtttttaaaaaaataaataaaactgtttaagttgtgatgacaaaggaatgcatactttccactggctctagttaaccccagctctcctcccaaggtgaaagatcaagtacaggctacttactcatcactacatcttttctcactccattcatgtttgatttgtaccaggtggcaagggtgtggatagcaacgtagttggcttcaaattcacaatttggattagtgaggactccttttaaccgtgggatgagttctgtggatcttcctttgtacgggcccagaaacagtctcttctgatcataatcattagcatgaatgttatcccagattactggagctctcttaataatcttagaaacctcttcgatggactctactggaatttctttagaaacaactttgggacctagaaataacgacaaccgttcgttaaaaga

SEQ ID NO: 12251 - DNA, 561 bp, Homo sapiens
  MAP TO AC022939.2; EXPRESSED IN BONE MARROW, SIGNAL = 0.46; EXPRESSED IN ADULT LIVER, SIGNAL = 0.74; EXPRESSED IN BRAIN, SIGNAL = 0.58; EXPRESSED IN PLACENTA, SIGNAL = 0.55; EXPRESSED IN FETAL LIVER, SIGNAL = 0.55
aggatgctagtaacgtgggcaatttccttttaattccatgtacggaagaaaaatatctacatttgtaatacagttataacaaaagtatgcatactaaagaaatgggataataattttctgacaacatatattacttaaataaggatactacagtgagtgacttgatgtaaatacttttaaagaaccaatttttttacatacaatattattaagaaaatcataccatcaaaagggtagatagctttgcagtgtccaatagcaggcaagggatcatcatcctcaaattcatcatcaaactcattgtggtgaccatgctgctggggtggcccacggacttcctggtttgcatcatcagtgtaacttccctcaggactataaaacaaaaaattatctctgatcaagtatcataaacatgagaattctatatattatttataaattgatcacctcaggatcaattccaaaaattaaatattaatgacacagtttccacttaagccctgtttttttcaaatgtcaagtatacaaattacttctaatacaaaatgctgctttgctgaa

SEQ ID NO: 12252 - DNA, 529 bp, Homo sapiens
  MAP TO AL136438.8; EXPRESSED IN LUNG, SIGNAL = 1.3; EXPRESSED IN ADULT LIVER, SIGNAL = 1.2; EXPRESSED IN BRAIN, SIGNAL = 1.1; EXPRESSED IN BONE MARROW, SIGNAL = 1.1; EXPRESSED IN PLACENTA, SIGNAL = 1.1; EXPRESSED IN FETAL LIVER, SIGNAL = 1.1
tctttcccagagcagtccactaatgaatgaatcaatggctaacagagagtatgcatgttcctcaccgccttcacctcattcatcaatataggttttcataactaattagtgttcttgctaaggttaagaaaaacccagcaacaggtgaagtggatgaaactgatcaacttgttgaaagctctagaacaaatcactgtggtactctttcagtggtgctgctggacatctcaggacacatttgtctaaaattccttcaggcgtttcctgtcccacacatgccagaacctgatgatacatctaccattacaaatgaaacatgtggccggcaaatccacatgcagaagtgcagctctgctcccatactttagtgaccacccacaaagggaacaattctcacgatttcctcgctttccctttactggaccatccaccactctgatagaattctgctggaattctccatgctaacatctccccttgtattagtttcctggggcttctgtaaccaagcaccataaactggatggct

SEQ ID NO: 12253 - DNA, 562 bp, Homo sapiens
  MAP TO AL133544.5; EXPRESSED IN ADULT LIVER, SIGNAL = 0.57; EXPRESSED IN BRAIN, SIGNAL = 0.56; EXPRESSED IN PLACENTA, SIGNAL = 0.58; EXPRESSED IN BONE MARROW, SIGNAL = 0.46
aaaccctttatcttggttgcctatatgttattccactatcagccagcttctagtgttttagatatgtcaggtgctcatgtgattttctttcctatgtaaagaacctgttcctcctctatagaagcttgtgatatttttcctttacctaggaaatcaggaatttcactagagtacggctgagtgcctttgttatcattaatcttttcccgggacttgataaaccctttgacctgcagagtcttatcattcttctgctcagggaaattttattctattatttaattttatagctcatctttaccttcacaacttttatcttcatgataatcttttcaactaatcttctatgtgaacatcctttctactctagagattttaacatttgaagtcatatagtttagtttctttcgaaagatctacaaagactaagacaagaaggctagcaaaccctggagtatatatcagaatgaagttttcctgggatctcagtgccaatatgtcaaggcaaagggttggggtgggaggactttgttctactcggtgttgagcaaggatctgtgca

SEQ ID NO: 12254 - DNA, 501 bp, Homo sapiens
  MAP TO AC013726.3; EXPRESSED IN PLACENTA, SIGNAL = 0.64; EXPRESSED IN ADULT LIVER, SIGNAL = 0.84; EXPRESSED IN BRAIN, SIGNAL = 0.73; EXPRESSED IN FETAL LIVER, SIGNAL = 0.89; EXPRESSED IN BONE MARROW, SIGNAL = 0.83
aattccctggtaaacctcctgtagtaactgccaggtttatctctttcttttcaaagacctaggttctactctactaaggatggaaaccactaactgtggattgatagcccacctggagtctttttcattctctgcattaagccgattggcttcctgggctttctcagccatccatctggtgaccagctcctggttctcttccgtagttttcctcagttttccctccaaggcagtaaaagtgatctgcagggcatcatattcatccttcagggtctggttggctctttcaaggtcacaaagcttagtgcgcaggtctaggcactccgtctccaggtcagagatagtctgcaaacattctgcaattctggaagcatgacatcagaggacgaatagtacctcgccagagccctgtgccagagccagacggacctggctgagtgcttaacactttgtgtctgttacaacatcttttagccaggcccatccccatggtttacagga

SEQ ID NO: 12255 - DNA, 592 bp, Homo sapiens
  MAP TO AL132775.14; EXPRESSED IN PLACENTA, SIGNAL = 0.9; EXPRESSED IN LUNG, SIGNAL = 1.1; EXPRESSED IN ADULT LIVER, SIGNAL = 0.92; EXPRESSED IN BRAIN, SIGNAL = 0.98; EXPRESSED IN BONE MARROW, SIGNAL = 0.96; EXPRESSED IN FETAL LIVER, SIGNAL = 0.87
gggaagcaacttggactttgattaccaatggatatctgtcttaaaggcactgtatttttccatttttttaaattcacaaggaccttgggtcccttgaatttattctgtatatttatgtaaaccagcatatagccattgttgttggaggcctacattcttctgattttaaataacatgatatatgtcatacatacagttgattcttgaacaacataggtttgaactgtgcgggtctacttattcgtggattttttttccaataaaagtatagggtgtgtctgcctctcctgctttcccttccacctcttccacctcttctgcctctgccacccctaagacagcaagaccaatctcctctacctcctcctcctcagtctactcaatgtgaagacaacaaagatgaggaacttcatgactgtccactttcacttaatgaatagtaaatatatcttctctttcttacaatgttcttaatagcattttttctctagcttactttattgtaagaataaagtatataataatataacatacaaaatatgtgctaattgactatttatgttattggtaaggcttccagtcaacagtaggc

SEQ ID NO: 12256 - DNA, 598 bp, Homo sapiens
  MAP TO AL139395.2; EXPRESSED IN PLACENTA, SIGNAL = 0.53; EXPRESSED IN BRAIN, SIGNAL = 0.53; EXPRESSED IN FETAL LIVER, SIGNAL = 0.49
cagaattagtgtcccgagccatatagcgactacagtccttgatctcacccatagcatcatatgagatctcaatgaaggaactatcatcactgaaactccctgatgtctccagggaattagcaagatggccctgctttggattcttaagttgctctacttcagtcccactgcatggtttatttaaggcaggcttttctccattatcctttccatctttcttctctacacctttgtcttcctgtccttcctctttgcctttcttcttgtccaagtttttatcttcctccccccagatgatgctcacatcagggaccttgaattgggaaaaatcactgctctgcttcagggccccactcttagactctcgcttggggcaggtagtaaagacgctgggaaaaaagttgaattgggcatcttcctgcatcaaaagagtagtcttgtctcgaacattgtcctgaaaggattcatatcgaattttcagggagcagacatcactgcctagtgttgattcatcatcatcaaacatgtagttatccacatcttcttcagagaataggttgacagacagctcatttttggaacagaggtcaagcagttc

SEQ ID NO: 12257 - DNA, 542 bp, Homo sapiens
  MAP TO AC023296.2; EXPRESSED IN LUNG, SIGNAL = 1.1; EXPRESSED IN PLACENTA, SIGNAL = 0.96; EXPRESSED IN FETAL LIVER, SIGNAL = 0.94; EXPRESSED IN BRAIN, SIGNAL =   1; EXPRESSED IN BONE MARROW, SIGNAL = 0.89; EXPRESSED IN ADULT LIVER, SIGNAL =   1
caggaaaaagccatggagagctttgtgcttactctcagaaatgctttcacacctgaatggtgagagtttgcagaactctttatgcattacccttgattcatggagacaggctcttgatggtgttactgggcagcctagaacactctcagagcaaagggctcattcctggatgctgttcctacctcgacacgtgggcagagggctactccactggccgttgctccgacactgggctcgagacacgccctgcagcaaatagcccgtgttgcaggtgaaattcacgacatcattcaggttgaactcactgccattagtgaatccgtgggcagggtttccagggtgaccacatgtgatggctgtagagagacaggtcaacgtcattgttaaatattgaacaggtcatcactttcccttgggattattaataagaaacatgcaggcatgctaacggtatggactgaaggttttccactaaccaggcagcttacagatggtatttatattcagaagggaatattgggagctacaaccacaggctgaca

SEQ ID NO: 12258 - DNA, 512 bp, Homo sapiens
  MAP TO AL139117.3; EXPRESSED IN ADULT LIVER, SIGNAL = 0.57; EXPRESSED IN BRAIN, SIGNAL = 0.57; EXPRESSED IN PLACENTA, SIGNAL = 0.6; EXPRESSED IN FETAL LIVER, SIGNAL = 0.62; EXPRESSED IN BONE MARROW, SIGNAL = 0.67
tagtatataccggggcagcgccttcaaggatacctggtcttccctttaattcaaggggttctgggtctataaactggtgaaattctagtaattgattaagagactgtaactgtctattttatgattttaattagattcttgttctctttgccaagaaatgttctgcttatacaaatcaagtaagaatgaagtaagtttcctatctatttcacgtcttagaacgctgcggtcaactagacaacactaaagggctgcatgagacagtctattctgattactgccttgattctgctttccattatgatcaccacacccagttctatgataaccacacccaattcaacacaccagattctcacctttgtcgactgacttctgacacttgagtcctgccactctaggatccaactactccccttacatttaggtttctcggttcagtggcagcagttcccactggaagttctggcctctcctaatacaccctctgtcctttcccaccttgtctctgc

SEQ ID NO: 12259 - DNA, 536 bp, Homo sapiens
  MAP TO AC015750.4; EXPRESSED IN PLACENTA, SIGNAL = 0.93; EXPRESSED IN FETAL LIVER, SIGNAL = 1.5; EXPRESSED IN BONE MARROW, SIGNAL = 1.3; EXPRESSED IN BRAIN, SIGNAL = 0.71
aatgaatgcccttggacaacaaaatttgtgcctctgactctcatattctttatttgcaagataaagattcaatgactatctcaaaagagtggttgtgagaattatatgagataatgcaagtaaatcatgtggcatgcagaaggtatttaataacagcaattaacaccattattaatggacatgaagatattttgtatactctgtgaacattaggggacattctaattaattatttcttttgtctcacaggcatctttcaaacacttcacttgataatgtagacacaaccatagaaaggcctgatactctctttagagaaaatggaagtgaagagtatcccaggagcaagtaaaaactgcaaaaactcatagcatttattgactccatccaagctcctgtactaagagacttaaccaaactcaagcacactatgcagcaccttaaggctgtggccttagttgctacaggcccctttaaaatacctgtcaaaggaagctcaaagctactaggataatcgggtgtttattccaggcaaa

SEQ ID NO: 12260 - DNA, 593 bp, Homo sapiens
  MAP TO AC013497.4; EXPRESSED IN ADULT LIVER, SIGNAL =   1; EXPRESSED IN BRAIN, SIGNAL = 0.87; EXPRESSED IN PLACENTA, SIGNAL = 0.86; EXPRESSED IN FETAL LIVER, SIGNAL = 0.96; EXPRESSED IN LUNG, SIGNAL = 0.93; EXPRESSED IN BONE MARROW, SIGNAL = 0.83
gctcttacccactgctgctctgaacacataataaataaagtataactcactgttattaaagcacagggtgtgagggggaggactgaggagtgccgctgttgagagggcagaagtcagacagagcctgaggtcagtttgggatggtgttgaaaggaccctgtggacatccagactcctgaggcaattcgaccacacacctggcgttaaggacacgatctgagctggagaattgaagttactgttaggaacgtagttgaaatcactgatgagtgtggctttatgacaaggagtaaaggagcagataccattaatatgctgtggaaaatagggaggatgagaatgataataaaaacagctgcagcttattgaatccagagctcattctaagcactttatacgtaatgaataagtaaccagaagctttgtcacttatgtgtataaaatcctttatagtacaacctatggctaatattgatgccataaatttgttgtcctagcaatatagggcatctaacttctatttagaaaagatgatttatttatttttttatttctaaatcatgtgatgattagagcattttcagggagaaagg

SEQ ID NO: 12261 - DNA, 529 bp, Homo sapiens
  MAP TO AL137225.7; EXPRESSED IN ADULT LIVER, SIGNAL = 1.1; EXPRESSED IN PLACENTA, SIGNAL = 0.83; EXPRESSED IN FETAL LIVER, SIGNAL = 0.72; EXPRESSED IN BRAIN, SIGNAL = 0.7; EXPRESSED IN BONE MARROW, SIGNAL = 0.7
ccagcatgatgtgatggaagactgaagagttcttgtgcctgcttgtcttcacctcgaaggatgcagactttgagctggtggccacggcaaaggggatgttgtgtttccgaaggtggaggatgagtttctcagccccctggcatgagcgctgcagtggggaacacatcccttggcctgtcttggctttcttccaacagctcttccaccaggagctgcaggacatccacgaccacctgcgccacctccaacgccttcttacccatgaccagggacttcacatccccggtgtattccttttcatagcgatcacatatgtcttgaaacaccactgaacagagcctttcagtgtccagaagcaggccatccacgtcgaagaggaggtgggtggtgggccgcaggggtacagccataatgcctctgcttgggctgcattggggcaaccaggaggtgtgcacatacccaccagccccgcacacgcactgcaggttccagaaaaggacttctaagtggagcctgcaaatcagtgtca

SEQ ID NO: 12262 - DNA, 582 bp, Homo sapiens; identical to SEQ ID NO: 7620
  MAP TO AC024038.3; EXPRESSED IN ADULT LIVER, SIGNAL = 0.99; EXPRESSED IN FETAL LIVER, SIGNAL = 0.88; EXPRESSED IN BONE MARROW, SIGNAL = 0.92; EXPRESSED IN LUNG, SIGNAL = 0.91; EXPRESSED IN PLACENTA, SIGNAL = 0.89; EXPRESSED IN BRAIN, SIGNAL = 0.79

SEQ ID NO: 12263 - DNA, 565 bp, Homo sapiens
  MAP TO AL136365.3; EXPRESSED IN FETAL LIVER, SIGNAL = 0.55; EXPRESSED IN PLACENTA, SIGNAL = 0.6; EXPRESSED IN BONE MARROW, SIGNAL = 0.56; EXPRESSED IN ADULT LIVER, SIGNAL = 0.63; EXPRESSED IN BRAIN, SIGNAL = 0.65
catacctgccactggtttcctgtctgaccaggcacataaggtccggggaggccccgaaggctgttcttcacaggggatcccccgaggggatttcccacctccccagaagcagaatcagcagccaaggccatggagtactgcgggcagttgtatagattgttgtaataaggaaacagagacggctggtagaagctgctgtagtaggtggagtctgaaaccaggtcaggtgtgttctccacatgccctctgctggtgacagcaggaatatcctggatgaccatacgtccctctaaattggaagaaaaaagaaaaatacaacatggtattaatgttagtccacgaaactttacttctaaaccttcctacccaagacctgcggagcaaggtagctgaatatgcagaagacaaaaccatctgttgcttctcctatagccaaaataagggagagtttctaaggttcgcttcactctggtggcacaaccgaaagactcagctgattgtttttactgagagtatcaaaaccattttagaggtgattttaattacataaagcccaacagcacaa

SEQ ID NO: 12264 - DNA, 599 bp, Homo sapiens
  MAP TO AL136313.3; EXPRESSED IN LUNG, SIGNAL = 0.95; EXPRESSED IN BONE MARROW, SIGNAL = 0.84; EXPRESSED IN ADULT LIVER, SIGNAL = 0.94; EXPRESSED IN PLACENTA, SIGNAL = 0.91; EXPRESSED IN FETAL LIVER, SIGNAL = 0.82; EXPRESSED IN BRAIN, SIGNAL = 0.86
ccttttcagttgctcaaccctaaataaatttgctcaaccatagacatcagggcacactacgggaacattatgggcatggcatttggcaagcatttattcacagttcacaaatatggattgaaccccgactgtgtgttagatagtctcctggatttgtgggctgtgggtatgaataaggcagccaccctccctccttagggcacaaacagaattaacttattcttctccaggagaagtaagctcatgataagaaaccaaatttatgaattacttatttttttgctaggctccgtgcaaagacactttgcataccttaattcacttaatactcaggaaaaccctgtgagaaaaattttagagctgtggaaactctcagcctttgaggatttggataacctgcccaaggccactttgaatctaataaatgctccttggtccaatcgaagttgcttctcactattacacaccctacactcctataagatgctaatggaattgatcctgccatgctctaggtgaggggaagagctgaaatagcagagtttaaaaatctctacaccaaagtccatctctgctactgtttcccactgcttccttga

SEQ ID NO: 12265 - DNA, 555 bp, Homo sapiens
  MAP TO AC012571.3; EXPRESSED IN ADULT LIVER, SIGNAL = 0.79; EXPRESSED IN FETAL LIVER, SIGNAL = 0.57; EXPRESSED IN BONE MARROW, SIGNAL = 0.6; EXPRESSED IN LUNG, SIGNAL = 0.85; EXPRESSED IN PLACENTA, SIGNAL = 0.9; EXPRESSED IN BRAIN, SIGNAL = 0.63
cctcataaacttttggccttgactttaaacttaccttacatgcatctatttttccttccatgaatccagcacataacattcctggagttatcaggccatcatacacatcctttctgttacacacatcagtgcttatggtttccactctggcttgccgaagtgtattttgtataggtcctattgcacaaatggataaaaaaacaaataaacagtattcctcaaatacaattgtatctaagacatagaagacacataaattgtagcaaaagccaaagattattttattaacattagctatcatcttattttctgtcataaatgtctacatgcaaggaatcataaacatacatgttccagtattatatcacatttgtagatctttcaaggatattaggagccttaaaactacatgcaaaatactacatacgcatgcattttttcatgaggagagggtccatagtcctcattagattctcatacaggttcataacattgatcttgtccaactgccacattctccatgtaaggaaaccatggtccctggaagttcactga

SEQ ID NO: 12266 - DNA, 514 bp, Homo sapiens
  MAP TO AC024736.2; EXPRESSED IN FETAL LIVER, SIGNAL = 0.78; EXPRESSED IN PLACENTA, SIGNAL = 0.93; EXPRESSED IN BRAIN, SIGNAL = 0.83; EXPRESSED IN ADULT LIVER, SIGNAL =   1; EXPRESSED IN BONE MARROW, SIGNAL = 0.73
ttggaggaacagacagggacagatagggacagatagggtcctatagggactagagcgaggaaggtctgctggaacagaaaaaactaaaaccaactagatgaacgagaaagcccattacaactctgttggcagcaacataaggttagtgctctaaaaaggtactggtcagtgccctagaggtacaaagaatgggaagtttttaaaacagggaaacatgaggaagaatttggctatttcttttctcttttttgtttgtttggagttttggtatgtaccatctttttgttatttagaattttttgccccacctacagtgcctatcgaaaatggtgaacagaagagggagaatgaaaattggcttgtatcgtcttcttttgtggctacagaaaggctaactttagctttggctttcatggattgtaaacgtgcactggcacctgtgagatgtgcagaggacttgggaggctttctcagagcttgtcaagatgtgggaactgagcttcattgctctgca

SEQ ID NO: 12267 - DNA, 599 bp, Homo sapiens
  MAP TO AC022050.2; EXPRESSED IN LUNG, SIGNAL = 1.3; EXPRESSED IN PLACENTA, SIGNAL = 1.3; EXPRESSED IN BRAIN, SIGNAL =   1; EXPRESSED IN BONE MARROW, SIGNAL = 0.95; EXPRESSED IN ADULT LIVER, SIGNAL = 1.2; EXPRESSED IN FETAL LIVER, SIGNAL = 0.98
ggcaacttctgaggtccctacatgatggactggaaatcagaagtacaccttacaattttaaatagtcctcccatgactgattttatattttccacttagtttattatcctttcttatgttaggattgtcagagttaatttctcttttgatttgcttttgacttttattttagattcaggaggtgcatctgcaggttttttacctgggtatattactacgtcaagtagtttttgttgagatgagttctatttgtctgccaccctcttccttcaaatccctctctattttgattttccttttttttcagtttaaaatttcacatttttggataaataatttctttctggaagaactttttagaaggttatttgtggatagtaatcaaaatcatattataaattaaaaggaaatctctctggttcacattgaagtttatggtgatacagggattttaaattatgttggttttcttagtctttacttccttctagtcaactaaaattggcagctacaagtctttcaatgcggattctttctataccactgtgacacatgaacaggccacactttacaagtaagtgctggttgattcttcttcg

SEQ ID NO: 12268 - DNA, 585 bp, Homo sapiens
  MAP TO AC010769.3; EXPRESSED IN PLACENTA, SIGNAL = 0.48; EXPRESSED IN FETAL LIVER, SIGNAL = 1.8; EXPRESSED IN BRAIN, SIGNAL = 0.8; EXPRESSED IN BONE MARROW, SIGNAL = 1.5; EXPRESSED IN ADULT LIVER, SIGNAL = 0.81
ttggaaactacacagaccatatccttttatttaatgtgaaggcacaactttaacattaaaagcaaagcattttaattatttatgatgtaactgtcagtaccagctcataaaaatatatatttgcaaacatatcattgaagactttcagattgtcaattcaaaaatcaatttaaaaagtcaaagtctatttgtagaaaatcaatgacacattatagcagttccacataatattattgctggacaatctgttcaccagacatcacagggttttcttcgttttttgcataatacagatggtccatcatctgatagctgttacctttccagaactttttcatttccttacatttccaggcaacaactgaggcaataataagtgtgcaagttactaaatagaggagagcaggttgcccctttttcatcagcaccagaacaacaaatgtaagtatcatgccaatagcataggcaactgtagaggaaacatagtatatatacgaagaaccagtctaaacatcaactcttctacagtacgcaagcaacaggcctgtacaataatgtctccaaagcccaatattgaaacaggca

SEQ ID NO: 12269 - DNA, 501 bp, Homo sapiens
  MAP TO AL158849.5; EXPRESSED IN ADULT LIVER, SIGNAL = 0.87; EXPRESSED IN FETAL LIVER, SIGNAL = 1.3; EXPRESSED IN BRAIN, SIGNAL =   1; EXPRESSED IN BONE MARROW, SIGNAL = 0.95; EXPRESSED IN PLACENTA, SIGNAL =   1
tgctttgatccaaaaccatcacagaaacccagattgtctgccaaatgtgaaaaaggcacagtttcaaactattctacttgtatttttacccccactgtctcttgaaacaggtaaccatgaaggataacattaatacctttgtttctaggattatagaattatgtctccagttccctcatggaatcacagaccaagtaattcagaatgaaatgcctcatatagaagcccagcagcgggcagtagccatcaataggttgttgtctatggtaaggtgaatctaactattttgcataattactgatatgctgattatcactggtttttattatgtagttgtgatggttaatttcactgtcaccttgactaagatacaggattcctacatatctagttaaatattttattggagtgtctgtgtgggtgtttctgaaagaggttagcattttgtattggtgaacggagtaaagtagatatgggtcccagttgggtgagcatcatcca

SEQ ID NO: 12270 - DNA, 570 bp, Homo sapiens
  MAP TO AC018425.3; EXPRESSED IN ADULT LIVER, SIGNAL = 1.5; EXPRESSED IN FETAL LIVER, SIGNAL = 1.5; EXPRESSED IN BONE MARROW, SIGNAL = 1.1; EXPRESSED IN LUNG, SIGNAL = 1.4; EXPRESSED IN PLACENTA, SIGNAL = 1.2; EXPRESSED IN BRAIN, SIGNAL =   1
agcaaattgaaaatgcagggatccttgttcaaaaattatgaagaatttcaggatgacagcagagcacaaaccttctgagcataggtccttgtgcagctgtacaagtcacacacctgtgaagctggccctgattagtagtactgtttatgttcttctttttgcttgtcagtattgcattgcttgtacgtcttactttggtaataagaaaaatgataaactaagaaaagaaagggcatcaaatgtgatgagagttttggaatatatacgtataaatatagatatacataaacatacacatatagatataaagagatagataatttttttcctcattgcctaccctctttatttcttgcctaaataatttggtcctggggagtaggttagtggcccagcaccagatggtggagcccaggaggaatgagaacagcatccgcattgagtagggcaggcagtgctgtcatggcatgtgcacccacgcaagataaggaaagcatccaggcagggggcagccacctatgatgggatgctggaggctgaatgaggtgagcactgatggtgggaggagat

SEQ ID NO: 12271 - DNA, 565 bp, Homo sapiens
  MAP TO AL158206.3; EXPRESSED IN ADULT LIVER, SIGNAL = 0.53; EXPRESSED IN BRAIN, SIGNAL = 1.6
tgccttcttcaacgtgtctgactactcccttgtcttcccactcccctctgccctgcttcacttctgcacaggctcccactgccctggctcctgtacaccgtcattcacagattccagccagtggctgtcagcagcaatggccttttctgtgccatcgtccttctcttcatcatgctgctcttcgtcatcctctctatcgccctctgcaagtggcgaatgaacaaaatcctgggcttcatcatgtttggcctctactttgtgttcctggtggtgagcgttctcctagaagacagaattcttacatgccccgtctccatctagcaggaaaagccatatcttgcaccagcagcatgaatggtccctccacactctgggctctgggctccttgacctcttgagaagaggcagctggcacacagccctgggtgccaagtgtccctccttggtgaatttgaggagagatggattcacactgggcccattcacttcacaggctgcttccaccctgcctactgaaatgacttcatgtaaaagacaaagagaaccgtcaatacagggcttctcc

SEQ ID NO: 12272 - DNA, 554 bp, Homo sapiens
  MAP TO AC009924.4; EXPRESSED IN PLACENTA, SIGNAL = 0.82; EXPRESSED IN ADULT LIVER, SIGNAL = 0.8; EXPRESSED IN FETAL LIVER, SIGNAL = 0.75; EXPRESSED IN BRAIN, SIGNAL = 0.82; EXPRESSED IN BONE MARROW, SIGNAL = 0.77
ttagggatgctactggaggcagtattaacgaaaagtttaaaacagggaagtgaatctgaaatttgttcatacttgcttcagaagagggagctacagataccaatgttagcaacttgagggcacaaaataaatacagatattcacaggtacattatggcttgagtctgtggtctgtgtattcttggtgttatccagagaccagcaacaactgctacagggttggagttaagagctcaatgttaccattttttctttccattaaactgaatcttttatttaatatttaagtacttattcttctccaccttcctctctaaatcagctttatattcttctaggaagttctcactgttactttttgagttattccaagttttttccacactgtcaagcttggccttatcattccagtagaataaaacatctgctttaactttgaaacccaacactgacattgttgagtcgactcagggtgtaggatagaagtggcctcattatcagaggtccacagtagtatttacagaattaagtgtgggcttttgcaaactgtggtt

SEQ ID NO: 12273 - DNA, 520 bp, Homo sapiens
  MAP TO AL158135.1; EXPRESSED IN PLACENTA, SIGNAL = 1.1; EXPRESSED IN FETAL LIVER, SIGNAL = 1.1; EXPRESSED IN BONE MARROW, SIGNAL = 0.95; EXPRESSED IN LUNG, SIGNAL = 0.87; EXPRESSED IN ADULT LIVER, SIGNAL = 0.99; EXPRESSED IN BRAIN, SIGNAL =   1
gcaaaattgccttcctcatctttcccaatgaagatttcccatgggaaccaagtccgaattacagaaggaaagaggttacagtcaaaaaagaaaatacgacatgacatttcagttatgaaactaattaccttgagataaattttcttgtgaatacttcttattatctaagaattgacagaaagtctgctaaagattttactcaggaccacaggattttgaataacctggtgtggaagtacgggggaggggggaagggtgggaagttttctgattatattgtaagagtcctgtttattctgtgaaatgttttttttttctcatgtgtgtatatatgtgtgtgtgtataggagaggaaggaactgaaagtgaaatttaacagtaaaatttagcagttaacagatttcattacatgcttcatataaactaaatccgtcattatttttattaacataaaaaactataattttaaattacacagttcaataaaattcctatacctatctctttcttcccccaacca

SEQ ID NO: 12274 - DNA, 585 bp, Homo sapiens
  MAP TO AL158175.6; EXPRESSED IN ADULT LIVER, SIGNAL = 0.93; EXPRESSED IN BRAIN, SIGNAL = 0.75; EXPRESSED IN LUNG, SIGNAL = 0.85; EXPRESSED IN FETAL LIVER, SIGNAL = 0.78; EXPRESSED IN BONE MARROW, SIGNAL = 1.4; EXPRESSED IN PLACENTA, SIGNAL = 0.87
tcagggcctgttttaaatggtaggtggcatttctctgctgttaagcatgtgattttctctgcatcagaatcctgggcagtcactgtctgggtggcagtgggcaccctcttctgtcagtgcttcaagggtgacaagcatctcattgcaaaacagacatgattcttttcactttatgacatgttgatcaaacccctcagataaattgttggtgccccatcctgtatcccctcagcctacctgtgttcatcttcagccatgaggggcagattgctgtaaattgacaacttcccattcaagcccttgtctctgcctgagggcttccccatcacaggagcctgcttcactgtgaatgtacttacctagaaaggggagcacaggcaagacccccagcccagagaattgagtttggatgctcacacgggtaacctgcccttgacgcctccattatctttttccttgcctcctccattcacttccctactccctcatttgtgcttcctgggaccaccttccacataagctgcctgcacccaagcccttgtctctggatccactttgggaggatccacaccaagcagaactcaa

SEQ ID NO: 12275 - DNA, 573 bp, Homo sapiens
  MAP TO AC007458.13; EXPRESSED IN ADULT LIVER, SIGNAL = 1.4; EXPRESSED IN BRAIN, SIGNAL = 1.3; EXPRESSED IN LUNG, SIGNAL = 1.4; EXPRESSED IN PLACENTA, SIGNAL = 1.3; EXPRESSED IN FETAL LIVER, SIGNAL = 1.1; EXPRESSED IN BONE MARROW, SIGNAL = 1.5
tcccttcaagctggtttctgttccttttaacatgtttccatcatcctctgaatacttcttttttttctagcacttcatgtactttcactacccctgttctgggatcagccaattctccaaggagttctggttcattctagcaaagaatggtatttagaagtcaagatatgggtgatcagtgttctcattgttatcgagatgttactactcccaggccccctcaatggacagagttagggtgaactaatatttctatctattatttatttctatatctacctctatatattgaagagcataagttaatactgatacatctaattctatttcaatatcatagggtttattctaattttctccttttctgtactgtaccttccttcaatagtgaggaaaactggctcccattatctttaatataattacttaattaatttcccatctgcactaatatgtcttcccctatgcagatgccattcttacttcactctaacactcatgctgggccatcccaggacacagatgtcctcctcaccttgcctggactctgacaccctactccaggccattctt

SEQ ID NO: 12276 - DNA, 574 bp, Homo sapiens
  MAP TO AC009933.5; EXPRESSED IN BRAIN, SIGNAL = 0.67; EXPRESSED IN BONE MARROW, SIGNAL = 0.66; EXPRESSED IN ADULT LIVER, SIGNAL = 0.79; EXPRESSED IN PLACENTA, SIGNAL = 0.7; EXPRESSED IN FETAL LIVER, SIGNAL = 0.69
tccagtcctgtatttcctcctcttaggttttgttaaatgattggaataaaatttacgaaccaatttcagttagagtttttatggtgggaaatagcttattgtataactttttcagatgtcaaattgcatcttaatgtagccttcttacaaaggaaaccaatgtgcatttattgagaaataaagagggaggtatatggagtggaagagttttgttcccctgaaatcatactgctttgatcactgtttattgcctcaaatatgtaagtctgggtggcccagctgccttcttaccacaaggctaccgaaagtctgaggagaaacttccctttcttttgtctcctgcaggaatgccaaaacaaagtctcaaaaaaatagtaaatctaactggctaacacgaccaccacagatgccctacgggattctcctccttctcttccccctctgtctcctctccatcatcattatcatcttcatcatcatcatcatcatcactaccaccaccaccactatcatcatctctagcttccctctttgacttggctgctaaaaaaacccttggaatcaaagtaattcc

SEQ ID NO: 12277 - DNA, 531 bp, Homo sapiens
  MAP TO AC011686.3; EXPRESSED IN PLACENTA, SIGNAL = 0.92; EXPRESSED IN ADULT LIVER, SIGNAL = 0.73; EXPRESSED IN FETAL LIVER, SIGNAL = 0.93; EXPRESSED IN BRAIN, SIGNAL = 0.81; EXPRESSED IN BONE MARROW, SIGNAL = 0.82
ttctggggtgacttctctggagggttctcagacatccctgacacaggtggtcaggtggccagaggaacctacctctgagcaggtacagcgcaggcagtacatcaggccttgtggctccaagtaggggtgccagctctcgccgggggagtatctcttcccatggaaaaggcagaacatgtctgggcctggcaaaccgaccagtgccatgttagtcccaggaggctccagcccaaagaccctgtctcatttctccttctttctagctctaaaagagatgtcatctgggccactcaggcaaaagagaatctgctagacaactgggcatgctctcctaggcaaggggccagaaggtctgagtttgaatctcggctttaccacacacttactgtgcaacactgggcatgccactgtctctgagccttaacgcttatctcacagggcagttagggaatcaagcagtgaaatgctgtacagatttatatcatggtatcagcgttaattattatgattagacaaatgaggcccagagag

SEQ ID NO: 12278 - DNA, 545 bp, Homo sapiens
  MAP TO AC012241.4; EXPRESSED IN LUNG, SIGNAL = 1.1; EXPRESSED IN PLACENTA, SIGNAL = 0.77; EXPRESSED IN ADULT LIVER, SIGNAL =   1; EXPRESSED IN FETAL LIVER, SIGNAL = 0.65; EXPRESSED IN BRAIN, SIGNAL = 0.63; EXPRESSED IN BONE MARROW, SIGNAL = 0.71
ctaggccatctgattgtgggcatattacaccacttcctcacagggtgtgacacagagggagcaccgcaacatcttttactccacagaaatgaagaggaacatgtaggtcatgtgataaaaactgattggcgttttctggacagatcattaactgaaataaatgatttggatttccacaaaattctaccacacactttcttttttggatatcagttttcattaagtgaccattttagcccaggttgaggcctctcaaggaaactacagattaagtagcttactccagattgcagttaataagtatgatgctgagatccatcttggctctgcacatgaataacacccctgatgctaccccttcattttcaagcagagtgtcatcttaatgtgagcatcaatacacatgatcaaagacagaattaaacaatgaatgacacaatgctgattcagaaagtagggggagtctagcattgtaggaatatctgaagtcagaaggaacagaattgattttaaaggaaggcacagcagtccaccagagcacaaaa

SEQ ID NO: 12279 - DNA, 537 bp, Homo sapiens
  MAP TO AL157392.2; EXPRESSED IN PLACENTA, SIGNAL = 0.69; EXPRESSED IN ADULT LIVER, SIGNAL = 0.69; EXPRESSED IN FETAL LIVER, SIGNAL = 0.82; EXPRESSED IN BRAIN, SIGNAL = 0.51; EXPRESSED IN BONE MARROW, SIGNAL = 0.74
cttggtctggaaagcaaagccagctttggagcagcttgccctgcagtctccccagctgcagctctccccaccttcctgggtcccctctggggtcccagccatgctcagggggcgtccctccagctggcctctgcctacctgaagacagcaggctgccgctgctgccgctgatgatcttccccttgctacccatgttggccagcttcgaggtcttcagcgtccccgtctcggtcaggtcgatggcgatctcactcaggctgcgtgctgcatggattttggactggaatggaaagggaagcaggtcaaagaagtgacgctcaccttgcggaaaggacagtcatccctcgcccgcgcctgctcaccgtcttgacattccgcaaagggacttatctccctgactaatgtgcagcatttttgtttgcatcccttggcctcatcattaatcaccgaaactctctgcgaagagcagaggcagctcaagagctgcatcaattgaggatgttctaagcctccgattctgtaggctgcactgctttg

SEQ ID NO: 12280 - DNA, 556 bp, Homo sapiens
  MAP TO AC015525.3; EXPRESSED IN PLACENTA, SIGNAL = 0.65; EXPRESSED IN FETAL LIVER, SIGNAL = 0.52; EXPRESSED IN BRAIN, SIGNAL = 0.76; EXPRESSED IN BONE MARROW, SIGNAL = 0.49
aggttttgtcttgcctttgcagaaccccatgcagtttgaagaatcggactgtgactcttcagatggggagtgttctgatgccacagttaggaccaataaacactacagctctgctacctggtaatgaaggaatacacatcctgaagatctcgtgactatactggcatttcagatccaccccacccccagactcatcccactctctcccagcattttgtctgggaagagagactaccccatctttaccaccccctagaaatgagctgcaataacaggaacatgagacttcgcaaatctctggaaaataatatccaaatgaaattaagtctcactgaacatttcaatcaagaatggcagggatctattttattgaatattctagctactgtaacattgatatttatttttgtttgacattttaacactttgtactgcaaagagtgaactatatatgagatagagagacaataatttcttgcaaaaaaaaaaagagataaaagaaagaacagaaaaaaagaaataagtggaatttaagagcaacatccttgggaatttg

SEQ ID NO: 12281 - DNA, 579 bp, Homo sapiens
  MAP TO AL157396.2; EXPRESSED IN ADULT LIVER, SIGNAL = 0.73; EXPRESSED IN BRAIN, SIGNAL = 0.71; EXPRESSED IN PLACENTA, SIGNAL = 0.77; EXPRESSED IN FETAL LIVER, SIGNAL = 0.56; EXPRESSED IN BONE MARROW, SIGNAL = 0.59
agctggatctgtggtttgtgttctctataatcagccttgctttttgtgtatcattaattaccaaaaacttccttatcactatgttacagatagagaaatgaagaaacaaagagataaataattgaatcttattaagattaaggtagtaattgacagaattaggatttgaatcaggaagctaggtgatatgacactagagtccatgcttttgttagtttcatcttccccgtgttataggtattaaaataatgttaaggtattaattaagctatttaaggaaatgtaaaatatctcattaaagatcagtgagtcttcttaaagttaagacttacattctttaaagtatattccagttatgaaaatataaagaattagaaaataacctttgaaaaaagtgaactcttattttcttcttaatatatcaggacagttgaagatgacttactgctccaaaaaccatttcagaaagaaaaacatggaaaggtggcccataaacaagttgcagcagaattgctggataggtatggtatttcagtgtcaattctatttcttggtttaagttgcttcggattaggggat

SEQ ID NO: 12282 - DNA, 508 bp, Homo sapiens
  MAP TO AC009467.3; EXPRESSED IN PLACENTA, SIGNAL = 0.67; EXPRESSED IN ADULT LIVER, SIGNAL = 0.84; EXPRESSED IN FETAL LIVER, SIGNAL = 0.61; EXPRESSED IN BRAIN, SIGNAL = 0.66; EXPRESSED IN BONE MARROW, SIGNAL = 0.71
ttcaaattttctgcccttgctgtgaaatgacagttcttcatcatcagagggtctcaagaatttagctctcaaattgccaaaagaaaactcttgattttgccttgggttagattctcttctacacgtttctaaagacccaggtctcttatctttttcatcaccaataaatttttcattattgctattttttgcagtatctgttgtagcatatctatcccttgaactgttaccatattttactaagtctgattctctactttcttgacaattttgtgctttatctgaatatgtgggtttcctccaccgttcccgtctataatcttctttcgtggatgcagctttttcagcatcttctaattttgactgaaatatttccattgactacaaaggagaaaaattaaacaagatatctaaaattaggaacggctcagtgacttgcaccccacatgtcactgtatgactcactgccaagtggcacactgaaaagcccactaacggggtgaaagaa

SEQ ID NO: 12283 - DNA, 590 bp, Homo sapiens
  MAP TO AC019099.3; EXPRESSED IN ADULT LIVER, SIGNAL = 0.98; EXPRESSED IN BRAIN, SIGNAL = 0.6; EXPRESSED IN BONE MARROW, SIGNAL = 0.61; EXPRESSED IN LUNG, SIGNAL = 0.99; EXPRESSED IN PLACENTA, SIGNAL =   1; EXPRESSED IN FETAL LIVER, SIGNAL = 0.59
aacccacaacaacaacaaacctgctggaacaacagttgagttcacaaaagatataagatcaatgtgcaaaaaattagttatatttagaaacattaacaatgagtaggctcaaaatgaaattaaggaagtgattttatttacaatagcattaaaaaataagaccaatacaaaagaaatgtaagactacaaaacattattgaaagtgattaagacctaaataagtggatacacattcggtatttattgaatggaagacattactattaagatgacagcactccacaaattgatctacatattcaactcagttcctatcaaaatcctagcttctctttttgcagaaattgacttgctgatctaagattcatttgaaaatgcaagggactctgaataaccaaaacaatcttgaagaagaacaatgaagttgcagaatccacactatattatttcaaaacttactataaagctatagtggttaaaattgtgtaatactagaataaggatagatatgtagatgaatggaatagaattgagagtccagaaggaagtccatacatttaaggtcaattgattttccacaagggtaccaa

SEQ ID NO: 12284 - DNA, 520 bp, Homo sapiens
  MAP TO AC025324.2; EXPRESSED IN ADULT LIVER, SIGNAL = 1.3; EXPRESSED IN BRAIN, SIGNAL = 1.1; EXPRESSED IN LUNG, SIGNAL = 1.2; EXPRESSED IN PLACENTA, SIGNAL = 1.4; EXPRESSED IN FETAL LIVER, SIGNAL = 0.94; EXPRESSED IN BONE MARROW, SIGNAL = 1.2
tcaccctcatagctgcactgctcctcctgctcctagtgcttccttcccgctgggacagccgagcccatcccagtggtgatggtggtggcagcccatctggaacagccactgtggagatgccagctgagtgggggaggcatggccagggctgcatactctgtggagctggtgggggccgagagcaggtgggagcccctccccctactgagttggcagtgcaggagccccacactcctgggcacagctgcagccacccagctgtggctctagacctgggcatccctgcactctcaggagcctgggaagcccctgctcccacaggcttggaagtgcctgctcctgctccctggcctctccccactcctagcacctgcatgaagacaggtgatgagccagtgcagagcaaagttgtggccaagtctgagtgctgttgcaacccagccaggtgtgtgcctgtttagggcagtgctgacatgccagcccccttctgccttggcctcctctgaagactttgggtgcc

SEQ ID NO: 12285 - DNA, 590 bp, Homo sapiens
  MAP TO AC011280.3; EXPRESSED IN LUNG, SIGNAL = 0.84; EXPRESSED IN BONE MARROW, SIGNAL =   1; EXPRESSED IN ADULT LIVER, SIGNAL = 0.81; EXPRESSED IN BRAIN, SIGNAL =   1; EXPRESSED IN PLACENTA, SIGNAL = 1.1; EXPRESSED IN FETAL LIVER, SIGNAL = 1.1
tgaagaagaaacagaggggcaaaattaaaagaggtaataagagaaatggtgaaactgatttaacatttttagactacaggaagatatttaatctcacatacattaatgggtagtatctgtggaagtccaaatttaaaatattgtgcatgtactaaaacatacagtttaaaaaacttgatttatattcaggttttaaagccaaacctatcttaaagtgcatttatctttttttcagtgctataataaaaccatggtgctgatttatgatgaacgtggagatgtaccacctagatttctcttcaaggaaggacttgtttcctctgctgatggaattcctgtcaacagagacctttcaggtgccagtgacttggagaaggcctgagctgtagagcaacatcacctaaggtcacgccctacgtgagtcagcagaatccactgactgatggagattataaagacttagccattttgtctcaatgaggtgtacctacaatgggtcatatgagctccacagctccctgtggagtcagctcagactgttgttgacttacattgtacctcaacttctctctctgccaaatctagctccc

SEQ ID NO: 12286 - DNA, 589 bp, Homo sapiens
  MAP TO AL122007.7; EXPRESSED IN LUNG, SIGNAL =   1; EXPRESSED IN BONE MARROW, SIGNAL = 1.1; EXPRESSED IN PLACENTA, SIGNAL = 0.95; EXPRESSED IN ADULT LIVER, SIGNAL = 1.4; EXPRESSED IN FETAL LIVER, SIGNAL = 1.1; EXPRESSED IN BRAIN, SIGNAL = 1.2
agcccatgaatcaaggagtgaattcaactttcaagtcttattacttaccaaatacattttttgtaaggcaatagctgcaacagatagtaattcctctgatggatctggacaaagtcaattgaaagccttctgtgaaagactcaccattctacatgccattgagaacatttgtgattcatgggaggaggtcaacatatcaatattaataggagtttgggagtagattccaacccttatggatgactttgaggagttcaagacttccatggaaaaagtaactgcagatgtagttgaaatagcaagagaacttgaattagaagtgaagcctgaagatgtgactgaattgctgcaatctcgagagaaaactttaatgcataaggagctgctttttacggatgagcaaacaaagtagtttcttgagatggaatatattgaagatgctgtgaacattgctggaatgacaataaggacttagaagatttcacaaccttagttggtaaagcactggcagggtttgaggggactgattccaattttgaaagaagttctactctgagtaaaatgctaaaggacagcattgcatgctaga

SEQ ID NO: 12287 - DNA, 600 bp, Homo sapiens
  MAP TO AC021774.3; EXPRESSED IN ADULT LIVER, SIGNAL =   1; EXPRESSED IN BRAIN, SIGNAL = 0.75; EXPRESSED IN BONE MARROW, SIGNAL = 0.81; EXPRESSED IN LUNG, SIGNAL =   1; EXPRESSED IN PLACENTA, SIGNAL = 0.94; EXPRESSED IN FETAL LIVER, SIGNAL = 0.68
tctgaggatttgggttgaggccaaaagccagtaccagggctgaatagtggcaaaaattggggccaaaacctatagcaagtgcagaatgatgggaactcccaggtgtcctgtggttctttttgttcccaggaggctctgtagcaccatttgaacttcttgttctttagaatcatccccagcttttgcagtattctcagacacagcaggaaaaacagccacgcagcttgaacttagggtgcacactgtgatgctcacatagagctgggaacactcttggcatggtgcacacaccttttaatggatgcagccgtcatccaccaagtgccaatgacgacaggcaaccagctgtcatagcttacattgccagggccttgtagaaaaggtatgacacagaaaacatcagtatccaggaagtgattacgtccattttctgtgactctgggccagattatgcagtctctgtgttcttcatgccctttgttgattctccagattctggactgggggcctcgtggtcctgttggtaggtgatactgggggaagaaacaatggtcacattgtataagctatcagttactggcctggtcaaaactctcggag

SEQ ID NO: 12288 - DNA, 529 bp, Homo sapiens
  MAP TO AC013823.3; EXPRESSED IN FETAL LIVER, SIGNAL = 0.47; EXPRESSED IN PLACENTA, SIGNAL = 0.92; EXPRESSED IN ADULT LIVER, SIGNAL = 0.85; EXPRESSED IN BONE MARROW, SIGNAL = 0.51; EXPRESSED IN BRAIN, SIGNAL = 0.59
aggacaacacccaattcagggaatatgttcacagtatactccagtgactctttagactcaggtacagcaggacccgcatccttgctctcccaagttcttcctgtggaaactccaccaggttcttgaacctctttaaatacctttcctcatctgtaaaataaaaacactactagtacatacttcattcactttttataaagcttaaataaggcattgtttctaaagtaattagcatggtgtctaacagtgggaaaagtcaataagtgagtagaaattacttagtaattgttgccattagtggtgtagtaatgataggtaaatacaatgctttggacgataacccagatttctccctatatagctatttctttttatatgtcattcagctggatctttcaaagaatatattaaacattgtttcttacatatattctggaaataaattaaaaaaaactaatgcagaaaattcctcaatatcacaagatttttacagtctgtttttatttttccatctaccatctttggcaaa

SEQ ID NO: 12289 - DNA, 568 bp, Homo sapiens
  MAP TO AC007957.34; EXPRESSED IN ADULT LIVER, SIGNAL = 1.3; EXPRESSED IN BRAIN, SIGNAL = 2.9; EXPRESSED IN LUNG, SIGNAL = 1.4; EXPRESSED IN PLACENTA, SIGNAL = 1.1; EXPRESSED IN FETAL LIVER, SIGNAL = 1.5; EXPRESSED IN BONE MARROW, SIGNAL = 1.7
cacactgtacacaccaggggccctgtgctccccaggaagagggccctcacttgaagcggggcccgatggccgccacgtgccggttcatgctccccttggccctgccgatgttcagggacatggagcgctgcagcaggctggagaagatctccacttggtcagagctgcagtacttggcgatctcaaaccgctgcaccaggaactgagcgaaaagaggaagacgctgtggtggtggggctgagccgggctaaccctggggccggcagagacagctgaggaggggttctgggctgactggccgagcttgccgaaggccttgggctcggctacccccaccccaggaacagtcctggccccccaggtggagcaccccacagccttcgtgggggaacaggcacgtacgtcgatccagatgtagtggggggtcacttcggggggacagggtttgggttgacttgcttccgaggcagccagggggtctgcttcctttatctcagcagaaaacaggccaaatttctgctccactgtcatgtgccagcccctgtcatctcccgcatgaactacaggt

SEQ ID NO: 12290 - DNA, 598 bp, Homo sapiens
  MAP TO AC016057.3; EXPRESSED IN FETAL LIVER, SIGNAL = 0.54; EXPRESSED IN PLACENTA, SIGNAL = 0.7; EXPRESSED IN ADULT LIVER, SIGNAL = 0.63; EXPRESSED IN BONE MARROW, SIGNAL = 0.54; EXPRESSED IN BRAIN, SIGNAL = 0.52
tcagaagcatttttccaggggagggatgctatcagatttgcaaaaaagtagacttgaaaatcattctcaaggtagcacaggtgctggaagaataatgaaaattactgaccttcaaaaagtccttattctgtgcctggtattattccgggcatattacatatgttactgcttttcattttcacagcaaactaagaggtgaatactagcatgtcttcttttactaagctacatgcacactaagtagcaacactgagatccaaatcaaggtaatcaggcaggagagtccgtgcaattacccttgctatagtgcctccccaaaggcaggaggaattggagtccggaggtggatagcttagttaaaaaacaaaagcaacagtagaaggaagaaataataacctagggtagtgatgaagcaaaaagagagatacaaatgtaagagatatttagaaagtaaaattaattaggtttgataaccccttaaaaatcaggtagagggtgatgttcaatgtctgcctcagacaggtggaggtgctatttgcaagaataaagaacagaagcagcatcaggtggagagggagcttttggcaatgtttgggat

SEQ ID NO: 12291 - DNA, 520 bp, Homo sapiens
  MAP TO AL139805.2; EXPRESSED IN BONE MARROW, SIGNAL = 0.98; EXPRESSED IN LUNG, SIGNAL =   1; EXPRESSED IN PLACENTA, SIGNAL = 0.97; EXPRESSED IN ADULT LIVER, SIGNAL = 0.93; EXPRESSED IN FETAL LIVER, SIGNAL = 0.77; EXPRESSED IN BRAIN, SIGNAL = 1.2
tctgacctcctcctacaggctgtggtggatgcttgaggagatccatgaagcaatattccttgaggtgttaagagaaaaaaagcaactatagtgacatccctgagtcaagaatgactttgccttcatccttcatctggctaatcagtatgatcctttttattccagacgcttctccatattcctatcagaggtcagtgagaacaaactgaaacagatcaacctcagtaatgaatggacagttgagaaactgaaaaacattagcttgtggaaaatgtccaagacaagatagaactgcatctttttatgctcaacagtcttccagacaaatgtctttgagttcaccgaaatggaggtgctaagcctggagcagaccctggaggtgaagctgccgtctgccgtctcacagctggtcaacctcaaagatgtggaccattcatctctggtagtagaccatcctgcactggctttttggagcagaattttaaaatcctctgcctgaagcatcctgaaatgggaaaaa

SEQ ID NO: 12292 - DNA, 506 bp, Homo sapiens
  MAP TO AC016847.3; EXPRESSED IN PLACENTA, SIGNAL = 0.85; EXPRESSED IN ADULT LIVER, SIGNAL = 0.54; EXPRESSED IN FETAL LIVER, SIGNAL = 0.51; EXPRESSED IN BRAIN, SIGNAL = 0.65; EXPRESSED IN BONE MARROW, SIGNAL = 0.69
tatgcaaaaggaggtttgggagacaatcatgttcactccagttttatttatagaagactacggaaccacgaaagacgggaaatacaaagggaaattctctctatcttgggtttgcctcacagacccagaccattttcacctggaaaacaagcgtcctctgcacctctctttatgctggatctctacaatgccatgaccaatgaagaaaatcctgaagagtcggagtactcagtaagggcatccttggcagaagagaccagaggggcaagaaagggatacccagcctctcccaatgggtatcctcgtcgcatacagttatctcggacgactcctctgaccacccagagtcctcctctagccagcctccatgataccaactttctgaatgatgctgacatggtcatgagctttgtcaacttaggtatgttgttcatttgtttgttaatctatgttattacaaagtggaagttttccctaatggtaaaggagctgcttggtaggtggtc

SEQ ID NO: 12293 - DNA, 574 bp, Homo sapiens
  MAP TO AC025644.2; EXPRESSED IN ADULT LIVER, SIGNAL = 0.84; EXPRESSED IN BRAIN, SIGNAL = 0.59; EXPRESSED IN PLACENTA, SIGNAL = 0.76; EXPRESSED IN FETAL LIVER, SIGNAL = 0.57; EXPRESSED IN BONE MARROW, SIGNAL = 0.57
ggagtccttgctgcattctcccaagccaggtttagctgctctgttagatctgtctctatttaggggaaaaattgtgttttattctttctttagtctgcacaattgacctcttcttcttcctctttatcctcttctttttcttcccctcccctcttccttctctttctcctcctgttctcgtttcatcatcatcatcatcatcatcatcatcatcatcatcatcagctatgaatgggtttgtattcagagcactttgcaggttgggttcatgaacaaacgataaaaactttacccttcaggaatttgtactttgagaatggagctacagcataacacatacataagaaaaaacagtaagatatgccatatagtaagtgacaaacatttaagaaataactgttacaacaattcgaaaaagttattagtcctttaattctgactctctgactcaaggaaaattgcttggtcacctttttaaatgggcacagtgtgttaagatgagaggaaaggaaacatggagaaggaatctgcatttactcaactcctagtatgttccaggaattgtaataggcgc

SEQ ID NO: 12294 - DNA, 517 bp, Homo sapiens
  MAP TO AL121828.6; EXPRESSED IN PLACENTA, SIGNAL = 0.83; EXPRESSED IN ADULT LIVER, SIGNAL = 0.83; EXPRESSED IN FETAL LIVER, SIGNAL = 0.73; EXPRESSED IN BRAIN, SIGNAL = 0.81; EXPRESSED IN BONE MARROW, SIGNAL = 0.73; EXPRESSED IN LUNG, SIGNAL = 1.2
ccctccagagatctccttctctctgttagtgagagatgttacttgagcatcagcctggatacccaagtgagtaaaatgagcagagtccctctaacaactttcatggacttgcagcacagggaaaaaataaacatgtttattttacacttcagagatgtggaactgtttattactacggcatgacctggccccgtctgactgatacagagaaactggtacactcatgggaaaaacaaccaccaaacatggcatcggctaaagagctggcaccaggtgggagggagcaagaaattaggttgtcatataaactggagggatattgatctgttatccaaatgtgaaacatttggcaaaagttatccctgaaatagcttggaactcagaaatgtatttaatgaacttttagctcaaagagaagaatttggaaaatagaatgtaaaacaagtgtgttggttaacactggctttatttaacagagtgctgcaagaaagagatgggctcagaaaaggaccgactg

SEQ ID NO: 12295 - DNA, 564 bp, Homo sapiens
  MAP TO AP000404.2; EXPRESSED IN ADULT LIVER, SIGNAL = 0.85; EXPRESSED IN BONE MARROW, SIGNAL = 0.86; EXPRESSED IN BRAIN, SIGNAL = 1.1; EXPRESSED IN PLACENTA, SIGNAL = 0.98; EXPRESSED IN FETAL LIVER, SIGNAL = 0.9
taatgtggatgctgggtctggacattagcctctggactagagattgtctcttcttttttctgtgcctggttgtgactatgaggccacaatacactgttacgacataaagtggcacctgaatcttgtaacatagaaagtccaaagtctgtattttccctctgctccaaaattctttgtgtacagttagagatgccacctgcacttccatctatccattttgcagaatattttggtacttgggagtcaaactgtgggagtaatttttcttctggcttatgcctgaaattaaacagatgatgctgggggtttttagaacattcagaatctgaatccagatccttattttgtgcatactgcacaatccagtttatcttcttactcaaaatggttttaacttcttcataagtactttttgaaagcttagatcgaggacaaccctggtttgcaattaaatggtatttttcaaagcagtctttatggccccttaatgatttggtgtgcaagagatcagactttggtacccctatggaaaaaaaagagaaacaaaagacttgagaaattttg

SEQ ID NO: 12296 - DNA, 516 bp, Homo sapiens
  MAP TO AC013751.3; EXPRESSED IN BRAIN, SIGNAL = 0.47; EXPRESSED IN BONE MARROW, SIGNAL = 0.53; EXPRESSED IN PLACENTA, SIGNAL = 0.47; EXPRESSED IN FETAL LIVER, SIGNAL = 0.46
ccattttgccctttatcagcacttatagaaggcatgatagaggagctggaaactgcttaatgtggaattgaaacagtatttgtgtttttcatctgcctgtgatctatcttagatccccatcccaaggatagctggggtttgaaagtgtttcaatattgcttctctaggatgttaattcctactgtcccaagtagggactgcatagtacacattttcatttactttaattaaaagggcacttcatgataggttatatttattgcagccaatactttttaataaaactatattgatttttatatatttttattatatttaatttcaggtggagtgttatgattatgacaatgatgggtcacatgatctcattggaacatttcagaccaccatgacaaaactgaaagaagcctccagaagctcacctgtaagttacatccttgcatttgcatatactttatagtttggctatgtatttattactgtatttcatttttttcccatagcatcaaacggttt

SEQ ID NO: 12297 - DNA, 502 bp, Homo sapiens
  MAP TO AC025740.1; EXPRESSED IN FETAL LIVER, SIGNAL = 0.88; EXPRESSED IN PLACENTA, SIGNAL = 0.79; EXPRESSED IN ADULT LIVER, SIGNAL = 0.78; EXPRESSED IN BRAIN, SIGNAL = 0.67; EXPRESSED IN BONE MARROW, SIGNAL = 0.69
accagcccacaacaaagaactcactggcctgagtgtcagaagtgctaaggctgagaaaccctgggttaaactttgtgaccccttgcatggcaaggatacggaattttgagccctgagtattcacgcagcaggtatttaaagggtgcttactcttcgcccagctctgtgtaggtacttggggagtatacagaactggaagatgcttcatcccttccggggcttaaaactgagttgctccaagcctctggttctggacacattgtgcctgagcacccttagatgttgatgctaccatccctcttaggataaaataccactttggatttccaaagaaaatattttatcctcaacagagtagccactatttatttatttattcctacctcatgcatagagctacactgagtgtagctggtttattttcaaaaagaagttgaggaaatgccacacattagactcaaggaagaaagttagaatcagatgtgcaactgtaagccagcaa

SEQ ID NO: 12298 - DNA, 509 bp, Homo sapiens
  MAP TO AP001254.2; EXPRESSED IN HELA, SIGNAL = 6.8; EXPRESSED IN LUNG, SIGNAL = 3.5; EXPRESSED IN PLACENTA, SIGNAL = 4.2; EXPRESSED IN ADULT LIVER, SIGNAL = 2.2; EXPRESSED IN FETAL LIVER, SIGNAL = 7.7; EXPRESSED IN BRAIN, SIGNAL = 0.56; EXPRESSED IN BONE MARROW, SIGNAL = 0.77
aggtggcagtcttttggatggtttgcatagagttgctgctgtccagggcattaccaagattgaagtcctcaccatcttccagcagggggtggtaggtggcgatctcagcctccagcttgaccttatgttcagcagcgcctcctactcctgggcctggtgctgcccctctgcccaggtctgtggcaactcggactccaggtgcatcagggtccccttgggctgctccatttgcagggcatagcgggcctccacctccttcaggctgttctccaagctggccttcagatttctcatcgagtacaggtcgatctccaaggactgaactgtatgtctcatccccatgagtatcatctcagcagctccaacctcgatgaactgtgtggtgaccactgtggtactctcctcaatcagccgagactagtatttgtccagctcctctcggtttttccgagccagctcatcgtattgggcctggatgtctgccatgatcttggtgaggtcctgcaatt

SEQ ID NO: 12299 - DNA, 596 bp, Homo sapiens
  MAP TO AL121918.15; EXPRESSED IN BONE MARROW, SIGNAL = 0.68; EXPRESSED IN ADULT LIVER, SIGNAL = 0.76; EXPRESSED IN BRAIN, SIGNAL = 0.58; EXPRESSED IN PLACENTA, SIGNAL = 0.82; EXPRESSED IN FETAL LIVER, SIGNAL = 0.7
ttagactggcaacgggattcccagcagcagctgcagaagcctgagtcttaagaggtgatacccttcattgtctgcctcagcctggataaaagggaaagaaagaaaagcctccctgggaagttttgatgagcgcctgcattccacatggttttggaacagagagagttattgaggcagagaggacagagaagaacagcctaagaataaagaacagcctccagagggttccaaggacaaaacataattggttaaagacattgaaagatagggctaagttggaggaatgacaaaacgtagagacctgaaatgtaaggatgaccttgtcactttacattcatgagaatgacaataaaaataatattgaccacgataacaacatccaagggcttcccttggccggtaccattactcttatgttcacgtgcattgaagggtaggaccaacctaggaggtggcgactgtgggcatcttggttaacagatgaggcaactgaagctttaaaaaggtgaagcacttgctcgaagttaccagtagagtcaaagggaaagcatggattttaactcgggccttctggtgccaggacctcagggtaacaa

SEQ ID NO: 12300 - DNA, 534 bp, Homo sapiens
  MAP TO AC010767.3; EXPRESSED IN PLACENTA, SIGNAL = 0.82; EXPRESSED IN ADULT LIVER, SIGNAL = 0.92; EXPRESSED IN FETAL LIVER, SIGNAL = 0.95; EXPRESSED IN BRAIN, SIGNAL = 0.8; EXPRESSED IN BONE MARROW, SIGNAL = 0.71
ctcctgggtccctttagctccttgagcatatttaagatggctgagttaaatctttgtgtagtaaatccaatgtttatacttcctcaaagaaagtttctattaacttcttctgtgaatggactatattttcttatttcttttcatgcttcataattttccatggaaaattgaacattttcagtattagaatgtgttaactggaaatcagaatcttcccactcttcaggatttttgttttgtgctttatattgtttgtttttaaagcaattttctgaattaatgttgtaaagtttgtcttcttagtcatgtgtggtctctgaaatttgtgttcctttatgttttgttcaacgagtgtttcgccagagatttccttgaatgccaggaatagatattgcaactaagggagaaaaaaagggaaaaaataaggataaaactccctcctactctttgcagattggctctgtactgggcactcctttaattcttagtcctgtcattcacaattccaccttccccttcactgtctgcttgcac

SEQ ID NO: 12301 - DNA, 597 bp, Homo sapiens
  MAP TO AC022474.3; EXPRESSED IN BRAIN, SIGNAL = 0.45; EXPRESSED IN PLACENTA, SIGNAL = 0.49; EXPRESSED IN ADULT LIVER, SIGNAL = 0.61; EXPRESSED IN BONE MARROW, SIGNAL = 0.44
tttttcccctctgtttggtggttgctgtcttgttagtgagctattatgccaaatgaatgaacagttattctctatctgtaatgcttaaggtttatattttaggctcaacaatgtattttgaaggtctttgcctttctctttgctcgctttcagtttcatctgcttcgtagaaagattctctctaatctgggtactctcagtatactgtgtattttgctgatgagacactgctttaagaacattctggtacctggtgaaagagagtagcagctaacttaaatattataagaaaagttttttcattctaaagactgaaattttctctcttttcctacaacagttagggattttaaacaatcttattcctaccttatccaggttatagtagaattagaatttataaaaagggcatataaaataggactcatagatgaaaataatattgctatcataccatagacatcaaagtccttaatgattatttaattattttgtatcatagggaaatattaatattttaatcaaatgttaacaggaaaaaaagaaaaaggtcatactcagatatataaactcttcctcaccaactgaacaattgaa

SEQ ID NO: 12302 - DNA, 524 bp, Homo sapiens
  MAP TO AC011957.2; EXPRESSED IN PLACENTA, SIGNAL = 0.62; EXPRESSED IN BONE MARROW, SIGNAL = 0.63; EXPRESSED IN ADULT LIVER, SIGNAL = 0.7; EXPRESSED IN FETAL LIVER, SIGNAL = 0.5; EXPRESSED IN BRAIN, SIGNAL =   2
tgtcacacagaggagcttggctggatttatcctgtgggtgatggggaatcgcaggagactctccggctggggggttcatgatgcaggttccccctatgacctgggcccccagttgctgcgtgggaagctgtctctcacatcggctcccctctgctccttcccgctctgtagatcatcaaggaccagaaactgcttgtgatcgtggggggcatgctgctgatcgacctgtgtatcctgatctgctggcaggctgtggaccccctgcgaaggacagtggagaagtacagcatggaggtaagccctccatgccggcaggagggaagcctgcagatgcagcccctggcacatgaggacagtgaggctgcacagctcccagactgcccagtaccccactgggaacacttcatcagttccatttccttccatttgagacatgtaattccagggaggccaaatataaggtgttgtgaaagaagttgattttaatattaatacacgcagaatgaatgggaaatgttgggctt

SEQ ID NO: 12303 - DNA, 591 bp, Homo sapiens
  MAP TO AC019040.3; EXPRESSED IN BONE MARROW, SIGNAL = 0.81; EXPRESSED IN ADULT LIVER, SIGNAL =   1; EXPRESSED IN FETAL LIVER, SIGNAL = 0.88; EXPRESSED IN BRAIN, SIGNAL = 0.79; EXPRESSED IN LUNG, SIGNAL = 0.84; EXPRESSED IN PLACENTA, SIGNAL =   1
ccccactggaatataagccctaggaaaacagggattctgtcctagtcatcattgtatcagtactgatgcatggtaggcacctaatacctattggatgaatggatggatggatggatggctacgtatagaacctcaggtctagttttttgcttatctgtttgtttgctttgccaagagtaggacaaccctttgcatcagtctttactctcagtatcttatcacttaagtgaattttgtttaaacacagtaagacagtgcatatgctctccttgggaattaatgaaacagaaaatagcaaaagggagacacaggttctgccctcagacaaattactggatgggggtaataagaaggtggctgccatcagagaaaaaggcaagtaccctacctgagatgtaggtaacactaattatatctcaggtacaagaaggaggtaaagttgaaacgccaaaccagtgtttggatggaagccctacaagaactgctgaatatcagacccctaaagctatccaacaggaggtcacagttctatcttggttttacatgcttgtaaaggaatgtctagataaaagcagctttcacacaaaagca

SEQ ID NO: 12304 - DNA, 557 bp, Homo sapiens
  MAP TO AC015638.4; EXPRESSED IN FETAL LIVER, SIGNAL = 0.53; EXPRESSED IN PLACENTA, SIGNAL = 0.7; EXPRESSED IN ADULT LIVER, SIGNAL = 0.82; EXPRESSED IN BRAIN, SIGNAL = 0.51; EXPRESSED IN BONE MARROW, SIGNAL = 0.58
ccggtttttcatttttgagcagaaaaatgaacaaaccacctttcctcatgagggggaaatcaccagtatgttcagtgatgctgatctttactacatatctgctgtaaaatatgaaaagtggattgctagttttgatgttatctaggttatcatttgtgactaaaaagacctgtttgttactctggttcttctccactatggctttatggacacactgactgacattatagcatttgttcatagctttgtttgtagaatggggtgctgtgagtttgtacctcaacatacctaacccttgttgaaaagaaactaactaggtgatctatttttactgaatacagagttttctgtcttctgagggttttctttcccccctcaactttgtttgacacacagtatgccctgtagggcttcttgcctggtttcaagatctggctagcacagcacttatacaggtagtttgtaccaaattaacttgccctgtgcacacatgtccacttcagtccttcacccagtaccgcctttgcctctaggaatcttagccttccttcaaggcc

SEQ ID NO: 12305 - DNA, 593 bp, Homo sapiens
  MAP TO AC007613.3; EXPRESSED IN PLACENTA, SIGNAL = 0.68; EXPRESSED IN FETAL LIVER, SIGNAL = 0.6; EXPRESSED IN BRAIN, SIGNAL = 0.54; EXPRESSED IN BONE MARROW, SIGNAL = 0.61
caggcattttgtgaaagaaggataagttttcacacgtgactgtatctgtttggaattgctttactatactgtcaattttattatttttataattgccttcatattttcatctttgtatctctattattggggattaatggtattattatgtaagtacgatgaaagtgactgagtacatttccatctgtgttacagatttattaactccaaggcaagaagcagttcctgttgtctctttaccggcacccagtttttctcatgaagttggaagtgagctggcctcagttcctgttatgcccttaacttctattttgccactacaagtggaagagagcgctctgccatctgcagtgctggcaaatggaggaaagatgcccttcactatgccagaagcttttctagatgatggagatatggtccttggagatgaactagatgacctgcttgattctgcacctgaaactaatgaaactgttatggtaagtttcagtgttactcaagtttcttctgaagacagagttaactttttaaaaattgtaatataacttgatagactttttcagtattgcatataggctgaatttgggggtttt

SEQ ID NO: 12306 - DNA, 560 bp, Homo sapiens
  MAP TO AC013584.3; EXPRESSED IN BONE MARROW, SIGNAL = 0.49; EXPRESSED IN ADULT LIVER, SIGNAL = 0.6; EXPRESSED IN BRAIN, SIGNAL = 0.51; EXPRESSED IN PLACENTA, SIGNAL = 0.71; EXPRESSED IN FETAL LIVER, SIGNAL = 0.54
ctgctgctttgtgagcaatctataatacaccgtattgtgcaaactataggagatgatgacctaacaatacagaatgtagagagggcttttgacaacagaaaatcataagagagtatcatttaatggagagtgaaaaaaaatgatcctggattctttttccccctttatttgttgtatcactttgtaaaacctctctatgccttgctctcttcatcagaaaaatgagacctatggttttatttttacaaagtgctttaggatttaggagaacccagaatgtattatatgatgaaagccaccatggtgcatgtcacatgactatggcagaaaaggaaccaaaagcaaaacatgaatcagcaatgaacactcattttgtttgtttaaaaccccaggatgtgcaaatatatgtcagagctgaagttgaccctcttcctttacaatcacatattactctatcagattctggttttgaaacctgagtttggtagaaagaatatggatgcaggaaggagtaaaggacaggagtaagagggtttctctcaagcaaaccccaagtcact

SEQ ID NO: 12307 - DNA, 585 bp, Homo sapiens
  MAP TO AC020991.3; EXPRESSED IN PLACENTA, SIGNAL = 0.73; EXPRESSED IN ADULT LIVER, SIGNAL = 0.8; EXPRESSED IN FETAL LIVER, SIGNAL = 0.49; EXPRESSED IN BRAIN, SIGNAL = 0.46; EXPRESSED IN BONE MARROW, SIGNAL = 0.59
tttcaccaccacacttttgcagttttaaaaaacacacaaaaagtttcaactatgtccttgaatcacgtagcccaaattaatttttaaaaacttcaacccttaagtactaatctttctagtcttctgtatgactaaatggtaagtattcataaagtgcttctgctgtatacacacttcactgtcacggctgtccttaaggaaaagcacttgtgcaactgagaaacaagatgaaccagctgcttttctcacagaacactgtttttacttgaaagaatggcagacaaactaaagctattcagacattcagacttgggaatttgccagacattttctagaaaatgaagtgagcctgtccttcaagaaaaacaaatgataaaattagagctttcaagaaaaactagaattttggaaaatttgtatcagccactgggagcttgaaagctttccaatgcttaaacccgtttctatgggtctggtagtgatgttcatgaatgtggtttttctggtgttgtataatgtcaacacactggaatacctgcataactcactggaccagtaagtatttcccaaacaaccaatgaatga

SEQ ID NO: 12308 - DNA, 517 bp, Homo sapiens
  MAP TO AC011831.4; EXPRESSED IN ADULT LIVER, SIGNAL = 0.87; EXPRESSED IN BRAIN, SIGNAL = 0.66; EXPRESSED IN BONE MARROW, SIGNAL = 0.6; EXPRESSED IN PLACENTA, SIGNAL = 0.69; EXPRESSED IN FETAL LIVER, SIGNAL = 0.6
gtaggacagcggtgggtatcagtagaaaattcattaacattattcctgggttattctttggtgggagcagtctgatctgatttgctgacatgttaagtacagtttctgagaatgagtgaaaatcaggtagctatagatacattcaatgctgaattccaagacagcattgctttcattattatcttgattgaaaagatccttttgatggaagcaacagcccatctggagcagcagctgcaaagacatttgctgcagtggagaaggtgaggccggggctgcgcgctccgcagagccagtgggagctgggaacaggcaggaaccagggcccttccaagatggccggttggatgccccgcactgccaggcacagctacagtcacccagctgcagctgtggacccaggcatccctgcacccttggtggcccaagaagttcctccatcccccgcaggcttggaaatgccagctcctgctgcctgggctctcccaactcctggtgtctgctctggttttggagc

SEQ ID NO: 12309 - DNA, 579 bp, Homo sapiens
  MAP TO AL157792.2; EXPRESSED IN PLACENTA, SIGNAL = 0.64; EXPRESSED IN FETAL LIVER, SIGNAL = 0.62; EXPRESSED IN BRAIN, SIGNAL = 0.63; EXPRESSED IN BONE MARROW, SIGNAL = 0.58; EXPRESSED IN ADULT LIVER, SIGNAL = 0.76
tgttttatgctgcaagccacattttttctttcaatctttttttagctaacaacatattataaaaagcatttgatggtatcactaagaatatgttatgaaagctattcaacgcatatataaagcactgttattaatctttaacctgtttaagttccacttataattacccaccattattatttatacatgattttatctgtattttacagatacatgcaatatttgaggaggtaattttatatcaaccattatttgctttttgagagcctaacctaggaatctacgttgtaacattctttcagcaaacttacctctcacaatgatgttggtggacttttttgcagggtttcccacattattattggcaatgcagctgtaagtaccagcatcatctgaggtgatggcaggtatggtcaaagttcctccattcaaaacagtcttttcaggcagagtcccaaaggacctgacccaggtgagagaaggtgcaggctctcctcctgttgtaacacatactaatgttatggcctctccaggatttacaactataggatcatccaccaagagtttaattgacggtga

SEQ ID NO: 12310 - DNA, 585 bp, Homo sapiens
  MAP TO AC009943.4; EXPRESSED IN PLACENTA, SIGNAL = 0.63; EXPRESSED IN FETAL LIVER, SIGNAL = 0.63; EXPRESSED IN ADULT LIVER, SIGNAL = 0.84; EXPRESSED IN BONE MARROW, SIGNAL = 0.61; EXPRESSED IN BRAIN, SIGNAL = 0.58
tctggctcagttggtgtcagtggtcttcaacaaaaggctttggtgaaaatgaaatacagagcactggaaatcaagttccagtgatctggatattactattcaggtttttgcatcaaaataaagaatcataagatgtgttaaaatactcccttggtgacaatgatttttttctttctttctttctttcttttgttttcaacagatagcaccaacacaagatatggtgctggctttagtagcagtggtgcctctctggatgtgggatttggttgggggatatctgatgaaaagggattggaagtcagtaaagctgatgggagagaaactagaggcagtggatctgctgggggtgaaaccatagtctttggacctgatgcaggtagctcaggtattccaactaagactcaatcctcaaaattttagattgattcagttaattaattggttaagatgcttttattttaatgtcacttaacaacaagattaattaattaatgttaactttaatcacattttgattttccattagttggaactggttcttctggtttgaaacttggagcagggaaaggtgatgctgcattt

SEQ ID NO: 12311 - DNA, 561 bp, Homo sapiens
  MAP TO AC009334.3; EXPRESSED IN ADULT LIVER, SIGNAL = 0.93; EXPRESSED IN FETAL LIVER, SIGNAL = 0.7; EXPRESSED IN BRAIN, SIGNAL = 0.8; EXPRESSED IN BONE MARROW, SIGNAL = 1.1; EXPRESSED IN PLACENTA, SIGNAL = 0.81
aaagtgttgtttttccctttggtattattgtcaagtctttctttttactacatatgtcttgttcctttactctttcactctgcagacatattttggaatggatgtctctgcagttgaagatccagttcagagacgagcgctagaaaccatgataaaaacctacgggcagactccccgtcagctgttccacatggcccatgtgagcagacctggagccaagctcaatattgaaggagagcttccagctgctgtggggttgctagtgcagtttgctttcagggagacccgagaacaggtcaaagaaatcacctatccggtatgtcatttggatttcaatcgagtgcagcaaaacctgattagactcttgtgatgccaggcactctcccaggtgatgaatagcatggtcctggcctaaagctgtgtgccagtcagtgcaagacaggtgcagcagcgaaagcagaatcctgtgcgaggtaaatgctgtgttagcgatatgagagagtgctttggggagctcagaggaaaaaagaattcatcgtttcagacggtaacctccctcag

SEQ ID NO: 12312 - DNA, 550 bp, Homo sapiens
  MAP TO AL121901.10; EXPRESSED IN BONE MARROW, SIGNAL = 0.45; EXPRESSED IN ADULT LIVER, SIGNAL = 0.55; EXPRESSED IN BRAIN, SIGNAL = 0.45; EXPRESSED IN PLACENTA, SIGNAL = 0.52
tccctggtcaaggagtgttctaggttctgaggggcaggattatattgatggccacctgccctcccaggctctaccctttccagtttgagagaggtaggctcttgctcatcactcactggctgacagtgttgattgacatgacctcccctagcccctcctctcacctctactatgtccagctcagccaggttgtaattcatggccagaaagtccgggagtgggagccccacttgaagcacatctgagaaatacagtaagagtcatatcagcctgactgctgtgcagttgattaaggagtggcagcctggggtagggatagtgggaaatagtgcagtgattgattcatgatgcctgccagctgtacaaacaaagagctaataagcctgatttgcaatgtatttacatcccaggtcaagatgtggggttatgatatggggtcaaaagtcagagcccaaattgtgggagaggcatttgtcttcagacaggtgacattaagactatattcacttcaaagattcagcaattatcttccactcccttttagcttccc

SEQ ID NO: 12313 - DNA, 531 bp, Homo sapiens
  MAP TO AC013291.4; EXPRESSED IN PLACENTA, SIGNAL = 0.5; EXPRESSED IN ADULT LIVER, SIGNAL = 0.57; EXPRESSED IN BRAIN, SIGNAL = 0.46
ccccagacttctaatgacccttataattctaataaaaggttagaaagcttgtgtgagaaagtataactacttagagactaagactttcaacattcaatttttccactagttctatttatcaatttctaaaaataaggtcctttttctctatcctgaagaaattaacattccatcaacttttcttctaccattaggtactgaattttactgctactctacaagttataggacaatgctactacttatggctcttgataaacctaccttaattgtttcgtatgtatcagtgatcagtgcaatgaaaagacttaaaatcatatatataaagaggctgatgaatgagtagaggtaaattctactaaacagccagactaagtaacttttttgctgcatttttgcaaacgtggcaaacatatcatctccatttatcagagagaaaaggcactcagagaccatgttcagagaacgaaactggaaaaagaaaagagaaaagttcactttattccatgttccttcccattggagaccttt

SEQ ID NO: 12314 - DNA, 505 bp, Homo sapiens
  MAP TO AC013626.3; EXPRESSED IN PLACENTA, SIGNAL = 0.49; EXPRESSED IN ADULT LIVER, SIGNAL = 0.53; EXPRESSED IN FETAL LIVER, SIGNAL = 0.51; EXPRESSED IN BRAIN, SIGNAL = 0.56; EXPRESSED IN BONE MARROW, SIGNAL = 0.55
gtaggtgcagagaaaggccccttaaacagcatatattaaattattgatgaaggaggaaaaaggtgacttatattttgctctgcataattacactcaatcataataatatattcatgcattacttgcttaattgtaaaaatcgtatcaacctagtcttaaaatagtttgtttaaaaactcacttttgtgatgataacttcttgcttctgaccaagtctatggcatctgtcaaagcactgatcttcagcagcaggattccaggcctaacaagaacatggatgagttactttactactgccctgatctttcagtgttttgcatttgtcctttcatttcactagtattcattcatctttttctgactgaaagttttctgcctgaagtcagatactaacatcacaaatactctggggaaaaatccaccctcccaatcactatgatgataggcatcctccccctactactacttctaatacctaatacaggccccgacatatgtatcagca

SEQ ID NO: 12315 - DNA, 569 bp, Homo sapiens
  MAP TO AC025812.4; EXPRESSED IN LUNG, SIGNAL = 0.83; EXPRESSED IN PLACENTA, SIGNAL = 1.4; EXPRESSED IN BONE MARROW, SIGNAL = 0.77; EXPRESSED IN ADULT LIVER, SIGNAL =   1; EXPRESSED IN FETAL LIVER, SIGNAL = 1.2; EXPRESSED IN BRAIN, SIGNAL = 0.75
tatagcctcaaatgggccagcacttacttgtgagttactaatctaatctcaactatttcttttctttacaacattgtatttcaaaataactcaaacctacaattggttgcaagttagtacgatgaatacctgcaataccctacttcaactgttaaggttttatcatatctgctttctctcttttacacacacagacacacatataggcacacactcagcaatatcatcatcattttcccaattgcttcttagggcacaatggtttgggtattcaagaaaacaagaataaaagtcatggcatcctgcagaccaaagcaagacctaacccttgtgtgaggtataatcagtatcttgagtgaaatcatttccctggagtgaagagttcccagtgcaatgaacagtgagaactacaaccggaaaaacaggtagcaaagaccctaataactccatattttatctaataagaaatgaagtgctgaagatttgtgagtgggcttgtaaccaaataaaatgatttttcccaatataaattagagatactatatcaaacgcacagcagagacaagaag

SEQ ID NO: 12316 - DNA, 553 bp, Homo sapiens
  MAP TO AL121584.17; EXPRESSED IN LUNG, SIGNAL =   1; EXPRESSED IN PLACENTA, SIGNAL = 1.1; EXPRESSED IN FETAL LIVER, SIGNAL = 0.95; EXPRESSED IN ADULT LIVER, SIGNAL = 1.1; EXPRESSED IN BRAIN, SIGNAL = 0.83; EXPRESSED IN BONE MARROW, SIGNAL = 0.9
cagcccatctctccagtagctgccatttctcacacacctgtttgctttggagttaccttcacttttagatttatgccccaaaagtccactgtaatcctagttctgctataatgaaattttgaggatggcagagctacctttcaaatggattttgttatttaatcactgagattattttataacaggataatttcaagagtgagcatacccatttcctggaaactcggacctcagcatcacactcacagtgtgtctggaggacctggccaggcgccagtactttgggggtgctcaggaccctggcagctctcctagctttctctccctctgcagccctatagccacaaaccatcaattgcagtgaaaccaccttagcctttttgtaaggcacagcctgaggaatatcctccatgtgattaacctgatttaaggaggagacaggatgagagcagacactgccttctttgaagttcccctggaagaggccagacttttccactctgacattcagtgagcactgttgctactccaacgtgacgtttccaggatggtt

SEQ ID NO: 12317 - DNA, 537 bp, Homo sapiens
  MAP TO AL161722.2; EXPRESSED IN PLACENTA, SIGNAL = 0.59; EXPRESSED IN ADULT LIVER, SIGNAL = 0.73; EXPRESSED IN FETAL LIVER, SIGNAL = 0.47; EXPRESSED IN BRAIN, SIGNAL = 0.51; EXPRESSED IN BONE MARROW, SIGNAL = 0.59
tccttgactccccaaagatgaagaacttcctccaaaaatatgtgtctatcatattcaacacttcccagatctcttcctcaaaggcacagttgtccttcatcatgatcccacacaagataagaattgggagcctagtcttgggcatgcctttcttattactcagcatcccaccatagctgaggtccagtttgttgacaagagcatagcagtggttgatgaagtccactttctttatttcagtgtcaaagggtagctccatatgctcagaggctctcctgagcattccagagaagtggtttttgtatttcctgatgacattcttcagcctttctgccattcttatggccttgttcattttcatacttgagcagcaggactttgacaattccactttttcatctagaggaagtatgggcaagttctcagtatctggtggggactgcaaggtgcttggatttatttcccctcttcttggctgctggagacattatctgatttgctcaatgaggtgaaggaagaggagttggcaatctgagg

SEQ ID NO: 12318 - DNA, 597 bp, Homo sapiens
  MAP TO AC015999.3; EXPRESSED IN LUNG, SIGNAL = 1.5; EXPRESSED IN PLACENTA, SIGNAL = 0.68; EXPRESSED IN FETAL LIVER, SIGNAL = 1.3; EXPRESSED IN BRAIN, SIGNAL = 0.65; EXPRESSED IN ADULT LIVER, SIGNAL = 1.1; EXPRESSED IN BONE MARROW, SIGNAL = 1.5
gcaagaatttctgccctgtcattgaacctttcatcgaacctaggcattatgattattacatttacatatattattttgcctttgtagatagaaatccaagctcctcctggtgtaccaataggttatgttattcagacttggcacccatgtctaccaaagtttacaattcaaaatgagaaaagagaggatgtactaaaaataagtggtccatgtgttgtgtgcagctgttgtggagatgttgattttgaggtaagagatgtcataatgtttataagatttgctttcctaatataagaagaatgtaattttgcaggacattataaatgcattaaataagtgttgtgtgccaatgtctcaatagcaagatgattttctcatttatttaactttgggcagagtggtagttatcactctgattaaaggtcactgttggtcatgagaaatggaaaaaaaagaagcagacctatgtagtcaaataaaaataagcaaatcatccctcacttaaacgtggtggtttctatgtgatgacactgtatattatccattttaaacagaacgttaaccttgccatctaagtctgattgccaaagcatatgg

SEQ ID NO: 12319 - DNA, 559 bp, Homo sapiens
  MAP TO AL157377.1; EXPRESSED IN ADULT LIVER, SIGNAL =   3; EXPRESSED IN BRAIN, SIGNAL = 0.94; EXPRESSED IN BONE MARROW, SIGNAL = 1.1; EXPRESSED IN LUNG, SIGNAL = 1.1; EXPRESSED IN PLACENTA, SIGNAL = 1.1; EXPRESSED IN FETAL LIVER, SIGNAL = 2.2
tcctcttctcatgaatgggccccttgtatccactggaaacaatggaccgctgattggagcaagaggtggaggaataaggccagggccagttgcttcattttcagcagggagagatgaatcaggcacatttaaattaccaagatcatctttggcatcatttctactggattccatttctgaaggcattgacctatccattttatccaaagaagtcattttaaaacttctgggttctgctggtccagacagtctttcagaattagaataaaatctgtcttccctttgtggagggaagagttgaatcaggatatgattgccctggtggaggaaacatcatcctacggtcctgttccaccggagatgacagggacccagtgtcagaaggagccctgtgaggatcgattaacctgtcatagcttggttctcctctttcattggtaatctgatggtccaggggattccctgggctgcttgggcctcttcctcctccccctggaagcacaggtgagagtctgagtggatcctccaacaaagtttgaggagagggaaaagctctcgt

SEQ ID NO: 12320 - DNA, 564 bp, Homo sapiens
  MAP TO AC011023.3; EXPRESSED IN LUNG, SIGNAL = 1.3; EXPRESSED IN BRAIN, SIGNAL = 1.2; EXPRESSED IN PLACENTA, SIGNAL = 1.1; EXPRESSED IN ADULT LIVER, SIGNAL = 1.2; EXPRESSED IN FETAL LIVER, SIGNAL = 1.1; EXPRESSED IN BONE MARROW, SIGNAL = 0.9
gtttcactcttggcgctttctttactccattctcagcaactaaaatgatttttccagatattcaaacaattgcaataaaaatatgtcccaaaaatacaaggtgggcctccaatgcacaagaaagaccctttggcaacccgtgtcctctatcatgttttaaaagagcctcatttaatcgggccagcaaacatctccattagcaattaagaccaactactgtcaccaactataaagtcggaagagcaatataactgaccttcagaggagaaatatgagactgcaagacatatccatggacattttctatttgagagaggttcttttctgatacatgcacgagttctgggcctcttacttcgtgggttagtcgaggtaaggaatgatcatgtggagcgtcctcatcttgatatcgatacttctaggagaaaagaaaagaaaggacaagtatgtatatatcagtgtttgtaaaggatatagactgaacttcatattctaacttcatcaataggacacagtgtgcacctactgttgacttcaccaaatgggctttgctgcagactcttc

SEQ ID NO: 12321 - DNA, 531 bp, Homo sapiens
  MAP TO AC027341.1; EXPRESSED IN FETAL LIVER, SIGNAL = 0.87; EXPRESSED IN BONE MARROW, SIGNAL = 0.96; EXPRESSED IN PLACENTA, SIGNAL =   1; EXPRESSED IN ADULT LIVER, SIGNAL = 1.3; EXPRESSED IN BRAIN, SIGNAL = 0.86; EXPRESSED IN LUNG, SIGNAL = 0.94
ttccttgaggaaagcaaagtgtctttgaggagagagaagaatctccaccaacttctgatttgataggtctcctaagccttgtcttgattgatggcaagatgaaagcaatacctgtttaatataccagaagcatgcattcccaggtgcaaggggcccttcattctcatgtttccagaaaatgctttgattttatataatggctgagtattttatcccatgtcaatggattaaaaatttgaaatcatgataacaaatataattgagagttagtaaaaattaacctttggcatcattcatttccctatcatttctccctccacagtatgatggcaccatatctcatcttgcacctcaatgatcatctaacaagaatccttctgcagatcccatctaaaattacatttccaggcattccacataaccggaggaaaaaaaacatggatcctatggaaagtatgtaagtaagatagacttcagtttgaatctattctgacacctctgtaacattaaacagggtgttttggctctttt

SEQ ID NO: 12322 - DNA, 559 bp, Homo sapiens
  MAP TO AL162171.1; EXPRESSED IN PLACENTA, SIGNAL = 0.55; EXPRESSED IN BONE MARROW, SIGNAL = 0.55; EXPRESSED IN ADULT LIVER, SIGNAL = 0.52; EXPRESSED IN FETAL LIVER, SIGNAL = 0.59; EXPRESSED IN BRAIN, SIGNAL = 0.52
tttctacttgcaggtggtcgataaatttcaatagaagggcgagaagaaccatatgtaagtgtcactgtaggttttttctgagataagggattctcctgcacaaagttgaggtcttcgtcaatgagatcatctggttctggcttaatatcaatcacatcttcagagggtgctggctccctcaaaggtttcactgttgacattagtcgggttgcagctccatcatcgtaagtctgtctatttaaaagaacaacaaaatgtattacagccaaattagggcaattatcaccaaatctttaaagaatgtttacttgaaaaatttcaatgaaaaaactgaggatactccctttacatattccattcaaaactgctttgaaattgcactttctttcaactttgatttactaaatttgtgataaaagataatcatacttagatcttatccattattttattcaaaaaactactcacgatcacttcattgtttctaaaaattgctgagaacagcaaactgaaagatataaaaactaatataaatgtcacatacacagagccatctgcc

SEQ ID NO: 12323 - DNA, 597 bp, Homo sapiens
  MAP TO AC021468.2; EXPRESSED IN FETAL LIVER, SIGNAL = 0.5; EXPRESSED IN BRAIN, SIGNAL = 0.47; EXPRESSED IN BONE MARROW, SIGNAL = 0.46
aaatgaagtttgtggctaactggtttttaatttgtgtttctaaaatggatatatatatatatatatatattttttttttttttttttttttcctcccatagctttcccatggtttggcatggacattgggggaactctagtaaagctctcgtactttgaacctattgatatcacagcagaggaagagcaagaagaagttgagagtttaaaaagtattcggaaatatttgacttctaacgtggcatatggatccaccggcattcgggatgtacaccttgaactgaaagatttaacactttttggccgaagagggaacttgcactttatcaggtttccaacccaggacctgcctacttttatccaaatgggaagagataaaaacttctcaacattgcagacggtgctatgtgctacaggaggtggtgcttacaagtttgaaaaagattttcgcacagtaggtatcttttactcaaaactgaaaattgatacctgtttttaaatatgagagtaggtttccatctagcatgttccttaattctccctgcacatgcagtgggaaatatgtatccatggttgcctttcacttggggcgtttta

SEQ ID NO: 12324 - DNA, 503 bp, Homo sapiens
  MAP TO AC007009.2; EXPRESSED IN BRAIN, SIGNAL = 0.49; EXPRESSED IN BONE MARROW, SIGNAL = 0.52
gccacaggtttcaggaactcaccatgcaagcccagatgctgcagcaagataagcaagaaaccgggggacagggagtggcctcaaggacaccatgtcccctgcctacccccaggacacagtcagcccaatgccctccctcctggggcagagaatgcttctgaaagggcatccaaaaagagatgatttaaaacagtacagaggaagccaaattttgattgactcaacatttaaactgaaacaacagaggcttcttaaccttattcaactgacaagtgtagaagaccccatcatgctgctcatgaagaaactgctttagttccagaaaataaggggatgcatgtgtcaatgtggtctgagtcaaattataatcccttccacctggccctgacatgttctgactgtgtcacattgagacagttatgtaacctctctaagcgtcaaaatcctcatctgtgaaaaggagatcatagtgtcttcctcttggggagttttaacgagcccat

SEQ ID NO: 12325 - DNA, 562 bp, Homo sapiens
  MAP TO AC023134.3; EXPRESSED IN LUNG, SIGNAL = 1.3; EXPRESSED IN PLACENTA, SIGNAL = 1.3; EXPRESSED IN ADULT LIVER, SIGNAL = 1.5; EXPRESSED IN FETAL LIVER, SIGNAL =   1; EXPRESSED IN BRAIN, SIGNAL = 0.97; EXPRESSED IN BONE MARROW, SIGNAL = 1.1
tggtagctctttcaggttgtctcttatatacttttgacatgccagcatactggtataaaacacttattattacagtaatgtgctgcataatgatgtttcagtcagcaatagaccacatatgcgacagtgaccccataagattataatggagctgaaaattcctatcacctggtgatgttgtagccatcatgacgttgtagggcaatgcattactcacatgtttgcagtgatactggtgtaaacaaaccaacatatactatagcacatacaattatataaggtatataataataacaaacaactatgttagtggtttatgtatttactatttatactgtacttttaatcttattttagaatttattccttcaactcacacacaaaaaagttaactgtaaaagatcctcagatgggtccttcaggaggtattccagaaggcatggttatcatggaagatgacagctccatgtatgttattgcccctgaagaccttccagtgggcaaagatgtggaggtagaagatgatcttgaccctgtgtaggcttaggctattgtctgtgtc

SEQ ID NO: 12326 - DNA, 509 bp, Homo sapiens
  MAP TO AC013618.3; EXPRESSED IN BONE MARROW, SIGNAL = 0.51; EXPRESSED IN PLACENTA, SIGNAL = 0.73; EXPRESSED IN ADULT LIVER, SIGNAL = 0.74; EXPRESSED IN FETAL LIVER, SIGNAL = 0.54; EXPRESSED IN BRAIN, SIGNAL =  11
attcctgccatacgagatgcctggtcaccctttatcttccaacataattaaaacttcttgaggcccttaccatataccagacagatgtcagcaccatgcttcctgtacagaattcagaaccatgagctaattaatatcttttctttataaattacctggcttcgggtatttctttgtagcaagtcaagaacagcctgacatagaaaattgatactgaggagtgggacattgctataagatacctgaaaatgtggaagcaactttggacctgggtaatgggtacaggttagaagagtgtggcaggttcaggagatagaaagatgagggaaaatttaaaacttcttatagactggttaaataatcatgaccaaaatgctgatagtgatattcagagtgaaggcaaggttgatgaggtttaagatggaaatgaggaacttatgggaaactagagcaaaggtcatgtgtattatgctttagtaaagaattctgctgcattgtgttcatgcctt

SEQ ID NO: 12327 - DNA, 508 bp, Homo sapiens
  MAP TO AC016706.2; EXPRESSED IN LUNG, SIGNAL = 1.1; EXPRESSED IN ADULT LIVER, SIGNAL = 1.1; EXPRESSED IN BRAIN, SIGNAL = 0.58; EXPRESSED IN BONE MARROW, SIGNAL = 0.67; EXPRESSED IN PLACENTA, SIGNAL = 1.3; EXPRESSED IN FETAL LIVER, SIGNAL = 0.52
gggaatatgccaggaatgtctttaaatgtcaacacttgtagaagagcatcaaaacataaggtataaaaatactgaaacgaacatgatagagcattataatttcccctcttgccttctagctttgccccacatcctttaatttcctttttgctatctctctcccatgcctcaggaaccttgactagcttataaaccacaagcatgcaaaaatagtcctggaaaatgccattttgataattgttgtgaccctaagcaaaaggcacaaaaataggaacaaatactagtcatgaatttcactaatagtcaaaaattgctgctcaagtcaaaaccatgaaggcagctcctcgagtgtttcctgtcctatccaaaccctgactctgcttcaatcaggaagccacttcatcttcagatattctctctgttgtacatcagctgaatacctcctttacctctatgagccacttaaatttattttggaaattcaagatcagagagttcagggcaaagg

SEQ ID NO: 12328 - DNA, 509 bp, Homo sapiens
  MAP TO AC018501.5; EXPRESSED IN BONE MARROW, SIGNAL = 0.64; EXPRESSED IN PLACENTA, SIGNAL = 0.59; EXPRESSED IN ADULT LIVER, SIGNAL = 0.67; EXPRESSED IN FETAL LIVER, SIGNAL = 0.62; EXPRESSED IN BRAIN, SIGNAL = 0.6
tcagaagatcccaaacccacctggaacagctgtttcattgggcagcctatctacttccaagataaagtcatccttgaagaaaagatagcccactattgagaacaggtaaacgaggatcagagccagaactgctgtcaggatgatggaccgtccattgcgagtgacacttttaatgacattaagcaaagtctcttctctgtacactaaatcaaaaagctttgaaaacaaacaaaaagaattttaagaagccttgatgttagatgtacatcactatcccataatgcaaacttggtttatagagagtttgccctcttagacactcaaaagcactacatatgatcttaacactgaacatcttccctggcttcacagtgaaacggagatggtaaaaatgaggaaaaataaacacagaagaggaagcaggaaacaatagcaacttcaagtagtatccagagccatttagagggactggaaatagagaaaatacatgcttgtgccaatgagtttca

SEQ ID NO: 12329 - DNA, 562 bp, Homo sapiens
  MAP TO AC022268.3; EXPRESSED IN LUNG, SIGNAL = 1.2; EXPRESSED IN PLACENTA, SIGNAL = 0.96; EXPRESSED IN FETAL LIVER, SIGNAL = 1.1; EXPRESSED IN ADULT LIVER, SIGNAL = 1.1; EXPRESSED IN BRAIN, SIGNAL = 0.88; EXPRESSED IN BONE MARROW, SIGNAL = 0.95
atatgcccaattccaggaggctaatcctagagaagagtaaatgctctgtacctttgtggagatacttctgggtcagctcactcattaattcattatttgaataggtatttactgaccattaactttgtgcaagacactactccaaacattctagtatcaagaatcaaaaagaacaaggcaggtaacacttcttccctcatcaagcatacattgtttaaaggaaaaaacaacaacaacaaggacaacaaaaacaacaaataaattaataggagaactacagattaatgtacctatgatgaggaaattttaactgggcaatatgatgcatggtagatggacagaggggacttcaaataggaaaaaagtttgcttaaaaattgagcagagactttattggaatatattcctgagagaagtctatttctagtcaagttagcctcaagaatttacataatctttgcttctcagtcatctcagaaactatgcctccttgcatcaaagctccataaatatttatttactatgtagggtgacattgggaaggcaaggccctacatcctat

SEQ ID NO: 12330 - DNA, 535 bp, Homo sapiens
  MAP TO AC009597.4; EXPRESSED IN PLACENTA, SIGNAL = 1.1; EXPRESSED IN FETAL LIVER, SIGNAL = 1.1; EXPRESSED IN ADULT LIVER, SIGNAL = 1.1; EXPRESSED IN BRAIN, SIGNAL =   1; EXPRESSED IN BONE MARROW, SIGNAL =   1
caagggaggggatttctagctcagattgaagtgttgaaggggcacagctaacagggacaggtagaggtcctattttgtagcagagtatgattattccacttactcagggtgtattataaattaaaggaattcgaaaataattttcctaaaacatgtttattcactttgcatatttttctttcctattattttcccacttaaatttacacagactggtctacatgttccaacagtactccatggtgcagacatgcacacccttttagtacttctctttgcagcaaagcctcttaacctgtggcccctgggccctgagtggctcaaggatggttttcagcagctctagtcactccctggagttgtgtggaaaattttgtgggtagcacatatgtgcattcttctgcacagagtaactttcattagaagacctgaaatacattcctccaaaataaagaacacctatttatctgttcctttcatttaaacatctgaggacacacagatctcatttatgagccctgattcctgcaacata

SEQ ID NO: 12331 - DNA, 540 bp, Homo sapiens
  MAP TO AC018516.3; EXPRESSED IN PLACENTA, SIGNAL = 0.53; EXPRESSED IN BRAIN, SIGNAL = 0.45; EXPRESSED IN BONE MARROW, SIGNAL = 0.45
aaaacgctgtatttccacggcccttcacttagctgtgactactcactttgtcaagagccagaagccttgaatggtctctccagaagtctcagctacgtgacctttcaagtcttccatggcagtctcaatggcccccggctgtgtggaaaggagaaaatacctagtttagagcagacttagcccacttcgcgcttatgattagttagtatattccagcagctcctccggaaagctggtcacaaaggatatagtttatgcagttgcctgtatgcctaactgccttccagaaaacttactcttgaactctggtaagcttttctccttgggtagagaaaaagtgatctaggccccatcttctataatcttactcagatttaattatataaatgaagacagccactttcagaggaacagttttcccaaacaagcattataaagttcaaagcctttaggaatctgtacatttttaaattaaaccttttttctcttcctagagcacatgtcaataaaaaacaacatagccttcttccaatgctctga

SEQ ID NO: 12332 - DNA, 592 bp, Homo sapiens
  MAP TO AL133355.12; EXPRESSED IN PLACENTA, SIGNAL = 0.82; EXPRESSED IN ADULT LIVER, SIGNAL = 0.77; EXPRESSED IN BRAIN, SIGNAL = 0.68; EXPRESSED IN BONE MARROW, SIGNAL = 0.75; EXPRESSED IN FETAL LIVER, SIGNAL = 0.75
ttggaactggaagggttttgttgcatcttcatcttgagtgactgtccttaaaggcaagtcattgttgtcagtccgtgagatgaaaattcacagggctcacttttctgtcctttttcaagaaagtctactgtgtccacaagtgaagacctgttcagatttttattaagtgttgccacatacaaagttgataccattggatgactggcctccatcacaggtgacttgagtacttcattggtttgtgccattagcccagtcttctcaatgcctttcccccagacttcaacccaggaagaataccttttgttccactcttctccccatctgaaagtgtttttgctctttattaaaaccacgacagtggtatatgctaggatctccttggagacccaaagaatcctgggactttcagacatcaccagcagagcatcctgctgcttctcaaccaactggaaagacatttcagtggcagacagccggccctctgtgggtccaaacagctctgctttctgcctctgattgcctatgtgctgtgggccacaacagaccctgtggagtgtctgtctctaatacaaacaagtacctggcagcc

SEQ ID NO: 12333 - DNA, 526 bp, Homo sapiens
  MAP TO AC026707.2; EXPRESSED IN ADULT LIVER, SIGNAL = 1.9; EXPRESSED IN FETAL LIVER, SIGNAL = 1.3; EXPRESSED IN BRAIN, SIGNAL =   1; EXPRESSED IN BONE MARROW, SIGNAL = 0.89; EXPRESSED IN LUNG, SIGNAL = 0.91; EXPRESSED IN PLACENTA, SIGNAL = 0.93
tcaaattcacttgagccgtgggcctggaagttagagactagcttttaccttattactttcaatgattttatctgagttaagctgataaatctcttcgcggctgaatccaaattcttcaagtatctcctcagtgtgttctcctatgaaaggatcccttttgaaagaagggatggctggggtgtttaacagcagaggtgcagggcgggggctcacgtcctgctcctcactggtgataaacgagccccgttccttgttgtgatcatgatgaacaacctcctcaaaagtcagaaccggagtcacacaggcatctgtgccgtcaaagatttgacaccactctgccttcgtcttctttgcaaatacatctgcaaacttcttcttcatttctggccaatcatccatgctcatctgattgggaagttcatcagactttagtccaagtcctgaggaaaaatacaatttcctaaattattatgctttgaacagagcaattataatcaataaaaatgaatgctgagcccactgtact

SEQ ID NO: 12334 - DNA, 531 bp, Homo sapiens
  MAP TO AL121777.16; EXPRESSED IN PLACENTA, SIGNAL = 0.66; EXPRESSED IN ADULT LIVER, SIGNAL = 0.74; EXPRESSED IN FETAL LIVER, SIGNAL = 0.75; EXPRESSED IN BONE MARROW, SIGNAL = 0.71; EXPRESSED IN BRAIN, SIGNAL = 0.69
ttgtaaaacggggttggaagatccccacatcgctgagttattccacattcacaggagcgcgcacttaaaccaccactagcctgtacaaagtgctcggtaaatgtgagctttcaggagggtaggttggggagtggaggttaaagaggctgctctcctgggctgtgaccgctgttctttcaggaagggacaatttagggaagggagttgtcttttcaagggcacatgcagaaatatttaacccaagagccctcattagaatgtcacaccactgacctggaagactagcttggccccagagtcatcagaagtggagggttccaccagcccttctgcaaggccgtgaggtccctgccgtggcataaaggggacgatccttcctctgcaagcaatgctagcacaaaaccccagctctggcactggggagcaagtgagtgtgtatgaaaccaatcctcccagccacctgcttagctttttgcaaatgactaacaggttttgacatccttgccctgagcagtcaccttcgagcaaaca

SEQ ID NO: 12335 - DNA, 540 bp, Homo sapiens
  MAP TO AL136984.7; EXPRESSED IN BONE MARROW, SIGNAL = 0.73; EXPRESSED IN PLACENTA, SIGNAL = 1.2; EXPRESSED IN ADULT LIVER, SIGNAL = 0.71; EXPRESSED IN FETAL LIVER, SIGNAL = 0.75; EXPRESSED IN BRAIN, SIGNAL = 0.63
ccctgcttcaaaaatatgccagctaattattcaagaattgtcacttaatataaagtcagttattcaaataatcagctatatgtttacaatatcaactacaataagcaaacaaacattatttctaattcagtggtaaggaagggtaccgcttacctcactgatctagagctcctcaggcagttaaggccccacactaacaatcaaaaagttaatctaacattaaataaaacctgccactttattcctcacttgctgccccagctattggagttcctcactcacctgtgcgatctgtatgggctgagacagggggatctgcgtcatgggcgtggcagcagaggcggagatggtggctccagcagcactgtgctgctggctggcggagtgctgctgcactgcagcagccagcagctgtgcctgtgcctgtgcctgctggagtagtaactgttgctgggcaggcgtcaaagtaagctaaacaaaaccagaacacattatgggaaagtgttgaaggagaaagtctcctaatgcaagccaactgct

SEQ ID NO: 12336 - DNA, 548 bp, Homo sapiens
  MAP TO AC015474.3; EXPRESSED IN PLACENTA, SIGNAL = 0.68; EXPRESSED IN ADULT LIVER, SIGNAL = 0.96; EXPRESSED IN FETAL LIVER, SIGNAL = 0.76; EXPRESSED IN BRAIN, SIGNAL = 0.58; EXPRESSED IN BONE MARROW, SIGNAL = 0.73
aactcccttttcacagtgggatttcttttggtgggtagttggagtatagtaattggttggtcagagagaaaaggagagatttccaaggtcagtgctattctattcttaatgaagtaattgaaaatccaaacatctgtactttgtagtggacaagatttatgtcgaggactagtttgagaaatatgagaagtcacagcttgaaaacaaagtagtggaagaatgtttttccatctatcaactttgagttttttcctttcagtggaacttccccctgctgatgtttgcctggaaaatagctccagctttgtgctgtggcaatacagtagttattaagccagcagagcaaacaccactcagtgcactctacatgggagccctcatcaaggaggtaagagaaacggacttcgggagtgcttctgactccccttacagctggagcctactagagcatatctcatttaacatgatgcatcagctttcatcagccacgtttcctcctgttctgttttcttaggctggctttcctcccggggtcatcaatattttgc

SEQ ID NO: 12337 - DNA, 545 bp, Homo sapiens
  MAP TO AC011778.3; EXPRESSED IN BRAIN, SIGNAL = 0.59; EXPRESSED IN PLACENTA, SIGNAL = 0.74; EXPRESSED IN ADULT LIVER, SIGNAL = 0.78; EXPRESSED IN FETAL LIVER, SIGNAL = 0.64; EXPRESSED IN BONE MARROW, SIGNAL = 0.63
ttgaaatgtgcagttgcctctgggggaaagtaataatttccattcatttttggaatgtcatagatagtagtaacctctatcagattttcctttagagaggagtgtgcgtattttgtcataaagcaaggggtataccaggatcatgggctaagcagacaatgagactaagcaacagaatcctcaatgtcagaggaagaaaagcaataaatgtctcatgtccactttgtcagggccttaggagaagtccatgtgtgtcactgggatggaggctttgacttcatgggtaaagtcatctctggtgctggggaagaattcgtttccattgatgaaatcttgggttggggcaatgtcatccaggatgtgggactgaggattgttttcaagtttatgtccactcacattaatgtgggtcttacttttgtggctgtatggtattatagtgacacggagccatttgtgtcatttggaggcaatgttaggcctgggagcctggcttgcaaatatctttcaagtcaaagggattttgggttcacagctagcaaagg

SEQ ID NO: 12338 - DNA, 534 bp, Homo sapiens
  MAP TO AL118505.13; EXPRESSED IN PLACENTA, SIGNAL = 0.75; EXPRESSED IN ADULT LIVER, SIGNAL = 0.94; EXPRESSED IN FETAL LIVER, SIGNAL = 0.74; EXPRESSED IN BRAIN, SIGNAL = 0.69; EXPRESSED IN BONE MARROW, SIGNAL = 0.85
tgaaatatccatgtttttcccctgtagttctgtgaactatttctttttcttattgaattaaagtgattcaatacattaaaggtataaatatttgaagagacttactttaaattctcagaaactgttttggctttattgtaatgtcctccaactggatttgcagcagcaataatggaagttcttgcaggaaggctacaaaccacaccagccttagcaagactaatactttgctgctccatggcttccaacaaggcttgatgttgattccccatcttatcaaattcatcgattccacaaatacctacaatcgaagtagaataaagcagaaaaaacattttttctttggtcaagttccaaattttataggatagaaattgtttcacaataattatttccatttgtttcagcagttaaaattataaaatgtcatacaatggagaattactgtttgttctgcagcaagttaatacatttgtcttatttaactaagttttgtgtaatagttcttcctttagcatttttcatacgcacagc

SEQ ID NO: 12339 - DNA, 574 bp, Homo sapiens
  MAP TO AL136962.6; EXPRESSED IN PLACENTA, SIGNAL = 0.96; EXPRESSED IN ADULT LIVER, SIGNAL = 0.82; EXPRESSED IN FETAL LIVER, SIGNAL = 0.82; EXPRESSED IN BRAIN, SIGNAL = 0.81; EXPRESSED IN BONE MARROW, SIGNAL = 0.87; EXPRESSED IN LUNG, SIGNAL = 0.9
tcattttgggcatgcagtaggctcctaataaagtttttttttttaataaatgagcattaaggttttaaatgtatcattactcagcaaaaaaaaagcacattagacagcaaaaaataccctctgaatatttttaattttgtcaatctcactttaatctcctgccccttcttactgtaatctcagaatataacccatttgattatgtatttgctttggtcttttcttcttcaggttcaacgtggttagaacaaaagacacaccagatttgaaatctgaagatgtgaatttgagtcccaatattgacatttatgcaatctatggcattcaaaaagtcatttaaactttttcagttctcagcttcctcctcctcaaaatggagaggcttatgcctgcctttcccacttcacaaggcagttgttgagtcacttaagttagacaatgctatgaaagtttattatcagattcacagtaattcaaaatgtgtctctgaatttcatttctattcgaaggcatagaaatgatatcaccacatcaggacttctgctccaggggcaccagggtatgggcaaagtaa

SEQ ID NO: 12340 - DNA, 554 bp, Homo sapiens
  MAP TO AL132866.21; EXPRESSED IN PLACENTA, SIGNAL = 0.89; EXPRESSED IN FETAL LIVER, SIGNAL =   1; EXPRESSED IN ADULT LIVER, SIGNAL = 0.89; EXPRESSED IN BRAIN, SIGNAL = 0.95; EXPRESSED IN BONE MARROW, SIGNAL = 0.91
gctggtcctgctcttttgacctcaagagctcacctcccagcccgggacgccttctgcagggggaatccctgttgctcaacttcttttttccaaaactcatccccgttcccatctccatggacatttggccagcaagggctctgcggggcggggcggaacagttgaagttttccaaggaaggggaatcccagctgtttctcacattaaggaaaggtgacagtctcctgggctaatcttagccccgagtttggtcatcggcaccaccagctccaatgttctttttatagctgtcgactaaaatggaattggcagtttccactccagcaagatgacaaattggagagcagtggaaaaacagtaggagaggggcagcgtggtgtttcttaagttagaaaagcttggtgttttggaaaatggcatcttatttatagcagcaataataataatgattattatattatttgtattactatttttgattatttttgtgactttcaagagcctgtgtgatctggctctgacctcagcttttttgactctctccctgccacttg

SEQ ID NO: 12341 - DNA, 508 bp, Homo sapiens
  MAP TO AC016205.4; EXPRESSED IN BRAIN, SIGNAL = 0.71; EXPRESSED IN BONE MARROW, SIGNAL = 0.61; EXPRESSED IN PLACENTA, SIGNAL = 0.52; EXPRESSED IN FETAL LIVER, SIGNAL = 0.69
ttgcctgttggttctgtttctctagaaaactctgattgaaacaggtgggaagggagaaacaaagagagaatcttccatccactgccctgagagcaaacctaattatgtctttacatcccttgctaagactgacagatatgatataaattgtttctggtaagtgacaaggatcgatttctgaaacgtcatttctcacaggaattcctcctcttctgcacagcactctttgctgcaacaaatgtttactttgcttttcttttactgtcttaaactgccactcgtatttttcattatttaaatttttacatgtttatattctctctctctaaccatattgctgcatcacgtacaaaatctcaccctgcccccagcccagttctttcagacatgtttgctgatttgatttgagaacacttgatccagaatctgagctcttggaatgcatcctggagactctcccccaagccaggcccagggtggcactggcaggattggagagggtgtgaaa

SEQ ID NO: 12342 - DNA, 507 bp, Homo sapiens
  MAP TO AC015785.3; EXPRESSED IN PLACENTA, SIGNAL = 0.67; EXPRESSED IN ADULT LIVER, SIGNAL = 0.95; EXPRESSED IN FETAL LIVER, SIGNAL = 0.69; EXPRESSED IN BRAIN, SIGNAL = 0.73; EXPRESSED IN BONE MARROW, SIGNAL = 0.7
aaaacattttggatgcccaggttcccttgaatggggtttctggggatcggctgaatcagggcctaatttctcccggagctctgaagtcatcgtaagctggaacaatgacagcaatcccagccacctacagagaaaacctgataatactataaagtctgggattgatttttaggaagactcttggtgtttccaggggccacagcaaaaatatgactgtgttagtcatgcattcgtgggattagagctgcctcaggcagggactcagattatggatgaggccaacctcaaaaagaccctggccaattatttttatttctggagcaaggaacatttgaaaacttataatttattcaattatggaaccgggttgccctataacctgctttacatcacccagaatgatttctgagcttgacaagggtaactctttgtcaaaaacttcagtggtgagagaaaagagaattacattttatggtttgagtgtttccattcaaaggctgagaagca

SEQ ID NO: 12343 - DNA, 578 bp, Homo sapiens
  MAP TO AC015756.4; EXPRESSED IN PLACENTA, SIGNAL = 0.48; EXPRESSED IN BRAIN, SIGNAL = 0.46
cagtagccttggcttgaaggatgaagattaaaagggaaaagaggtaccactgcctttaaaagtctccataggaaagagactccagtcaagcactagcggtagaaatatgaagcaaccctgctgttcctctgcaggaaaagtttttaaataacttcttattagtaatattaatattaatgataatactgaatcttcatagcacatttattatatactgaacactatggtagcattttacgtactttgcttcatttaatttccacaatcgccctgagaagtaacattaaccctatttttaaaaacagaaaaatgatgcttagaaaggcaaacagaatatggtcttagctgcagttgattgaacatttattatgtgcttgccatagggctgggtatcccagcagttctcaaagtgcagttcgtggacctctctgagttcccagcacccttacaggagatctacaaggtcaaaacaatattcataaaaacaataaaacagcgtttgccttttccactgtatttacatttgcactgctgatgggaaaactgccagcaccatagcacaaatcaaggcagtgcac

SEQ ID NO: 12344 - DNA, 590 bp, Homo sapiens
  MAP TO AL050333.18; EXPRESSED IN ADULT LIVER, SIGNAL = 0.95; EXPRESSED IN FETAL LIVER, SIGNAL = 1.3; EXPRESSED IN BRAIN, SIGNAL = 1.1; EXPRESSED IN LUNG, SIGNAL = 0.86; EXPRESSED IN PLACENTA, SIGNAL = 0.9; EXPRESSED IN BONE MARROW, SIGNAL = 1.1
ggaggactgaatgaggtacaggaacagatataaaagagaaatcatacctactactcaaattactgaagtcgaatttctttgcaacagtttgcaacattcttacaggatcatcttccctaatattttttccttttttacaagatttaggtttgctcttctgcctctcactaactgtttgagcttgattacttttgtaaacttcaaatgcagacttctggttatcatcttcatggaaattcactttattcaaatgagaattcagagttccctgatattcttctgggtttttgtttaagtgtattcttggtttgaagccatgagttaaaaagtcacaagtatctgtgtatataaattgtaaaaggtattcaaacatgtcaggatgaaccttctctaccacaaagagatggcaccctgcagaatcttcatctttctggtaaatatctgtaaattctgaagtattaccatctgaaagaaacaatttctgaaaaaaatcagaatgcactgccaaaatatatttatgtgcagggaagagtctattgccaacttgaaatgtcacatcatgaatgctgtccatttcatctgcttccctc

SEQ ID NO: 12345 - DNA, 530 bp, Homo sapiens
  MAP TO AC016851.3; EXPRESSED IN LUNG, SIGNAL = 1.8; EXPRESSED IN PLACENTA, SIGNAL = 1.5; EXPRESSED IN ADULT LIVER, SIGNAL = 1.6; EXPRESSED IN BRAIN, SIGNAL = 1.2; EXPRESSED IN BONE MARROW, SIGNAL = 1.3; EXPRESSED IN FETAL LIVER, SIGNAL = 1.4
tccttcccaattttctgctctaatcatcactgtttaaatccaattgttttgtgtctggatatgtgacatgagatataaatacaacatttagatggttaacacgctcagccaccagcagcaatgcttgtacattcctgaattagttggtcatgaggagtcaaggtctgaacatatttaatacaagtcaggtagaattatctggactgtaccagttatgaagcattgacagagacttgctgacttgcatggacactagagcatggagagcatacacatcaaggggtcaagacgaggacactgagaacttcaagttggatccagggatgctggaagggaggtgagagagcactgaaaacaaacccggcctatttcaaaattttgcctacagctgtaacacatctctgtaaatacctccatcactgatgtgggcctgtcacacctgtcattttgacgcaacatcattggaatctacatctttgttatagtgtgaaacttggttgctactaactgcccattccgatgctttaaga

SEQ ID NO: 12346 - DNA, 543 bp, Homo sapiens
  MAP TO AL121905.10; EXPRESSED IN LUNG, SIGNAL = 0.99; EXPRESSED IN BRAIN, SIGNAL = 1.6; EXPRESSED IN BONE MARROW, SIGNAL = 1.1; EXPRESSED IN PLACENTA, SIGNAL = 0.87; EXPRESSED IN ADULT LIVER, SIGNAL = 0.93; EXPRESSED IN FETAL LIVER, SIGNAL = 1.1
tccccacctcacctcaatagccctggcatggcagtgggaggtgcacactcatactttcttctctgtttccatttcctggcatctgcagaaggactgaatgagctcttcctcttcagggtgttgccctgaatggctgacttaagccctccattgcacaacacagtaatgacttgttctgttgtcttgatttcagatgagacaccaattattgcggtgatggtggccctgtcctctctgctagtgatcgtgtttattatcatagttttgtacatgttaaggtgagcctactaacacttcacattctcttagattctgtttcaatatcccagtgtcccaatgaacccacacagtccagtagacagtaggatatacacaatgaataggatagagggggaatgacccatgatagtgctaaaattgaagttctacttagaaattatttaaaagctctacatagtcttccttaagtcctaagccctccctctttcttccatctgtccaagcccagtctcccaactccagtgcaagctaaagcccagaatg

SEQ ID NO: 12347 - DNA, 503 bp, Homo sapiens
  MAP TO AC021846.3; EXPRESSED IN PLACENTA, SIGNAL = 0.92; EXPRESSED IN ADULT LIVER, SIGNAL = 0.86; EXPRESSED IN BRAIN, SIGNAL = 0.6; EXPRESSED IN FETAL LIVER, SIGNAL = 0.61; EXPRESSED IN BONE MARROW, SIGNAL = 0.63
tgtgctggtgattgtaacccatgtcagtgataagacacattacattccacttccgatggactacagctctgctctctccttgtcttctcactgtgttaaggaacagagacaactttgttcctgcaatgagaatccacaggttataggatatagctcttatttataccccccaacgcaccattaagcaatgccaattgacttttctgacccaagatccaaaggatcttagaggacttctgacagaagatattcagcaaaagttggtgctctgtcatgctgacttgcagcataataaaaaaagataaaatcaaaagaggcaaatgtctcttaaaaatgtgaagaaccagttttgactgaggataaaattatataaaagtcctcttatgtgggtgaccatatttgtctatgacttgcttttgcttcatattttagttttgaatattttctttcattgcgtctcactaaggaaactattctttttgactccccacagttaaaccagc

SEQ ID NO: 12348 - DNA, 539 bp, Homo sapiens
  MAP TO AC019276.3; EXPRESSED IN BONE MARROW, SIGNAL = 0.55; EXPRESSED IN PLACENTA, SIGNAL = 0.57; EXPRESSED IN FETAL LIVER, SIGNAL = 0.52; EXPRESSED IN ADULT LIVER, SIGNAL = 0.88; EXPRESSED IN BRAIN, SIGNAL = 0.58
gcatgttgtgaatgaaacgctgcgcccagccatgcgaagtgcgattgtcatcgtcatgcaacgctatggtgctcagaaaaaaatcttcaaacaaaggacctggagcctagggcctggccctcccaacccctgggtctgagcggacttcctctctccacaccaggacagaaactggaccacactggaacatcagctctgggaagggccacttccggtctgtggccatgctggcaaggatgggaaggaagagcgctcccagggaggtggtgtttggcttcccaaaggtctgcagtcatgcggatggcagcagagatggtgagggctgactttccacttacagcagaacaaagaaggagttactggaaggcagaatccgcctctgattcatctccccgtggccctccctgcccagggcgagggtagaaagcccgactccaggcatgtgccagggtccccacccccagctcgggtggtggcagaacccactcccttccactacagaggaagggacatctctgcggacatgagtggtgttgtgg

SEQ ID NO: 12349 - DNA, 600 bp, Homo sapiens
  MAP TO AC019278.3; EXPRESSED IN PLACENTA, SIGNAL = 0.56; EXPRESSED IN FETAL LIVER, SIGNAL = 0.64; EXPRESSED IN BRAIN, SIGNAL = 0.63; EXPRESSED IN BONE MARROW, SIGNAL = 0.67; EXPRESSED IN ADULT LIVER, SIGNAL = 0.63
gttaaaatgcaaaacccaattctacatacacttttggaatcagaggggccatccgctggcttagaattggaccgttcaaacacagctcttagcgactccttctcatgtctcatcttgcgcttgagagcttccagctcagaggtgtcagctgtggtcccctttctggggggccggatgaatagggctttaaaagcctccagggctgtctctggcgactttggcttgacctcaccaccctgggtttgtggtactccagggccgctctggctctcttggtcagcattgcagcccatctcttctctcctgggcgactcagggtctgctcccttcggttcagttttgggcatgtcaatgttgagcagcagagagagctgctccaggagagtgggagtggccttcggatcagttgctttcttctcactcttcactgtctgcagccctgcctgcactaaggacttctgcacaggctgcgtcaatttgagcaaagctaagtccccatcctttggtttaatttccgtgatggtctctcctccctcagcggtagcccccttcttcagcacacgaagcccactgaaaaaagctggaagttggaatgacttc

SEQ ID NO: 12350 - DNA, 572 bp, Homo sapiens
  MAP TO AL133405.9; EXPRESSED IN LUNG, SIGNAL = 0.83; EXPRESSED IN ADULT LIVER, SIGNAL = 0.86; EXPRESSED IN BRAIN, SIGNAL = 1.2; EXPRESSED IN PLACENTA, SIGNAL = 0.75; EXPRESSED IN FETAL LIVER, SIGNAL = 1.7; EXPRESSED IN BONE MARROW, SIGNAL = 1.9
cataggctgcgctagagttgtaaaaaatattttttctttaataaaaaattaaccttagcttactgtaacttttttacttcatctttaaaattttttaaaactttttgactgttttgcaataacacttagcttaaaacacaaacacattttaaagctatccaaaaatagcttctttccttatatccttattctgtaacctttcttctatttttaaaatttttatatattttttactttttaaacttttttgctaaaaactcagacataaacacgcatatttgcctacctttacacaggtcaggatcatcaatattattgtcttccacctccacatcttgtcccactgggaggtcttcacgggcacaaacaggcatggagctgtcatctcctatgataacaatgccttcttctggaatccctcctgaaggacctgcctgaggctgttttatagttaattttttaaaaataagtagaaagagtacactctaaaataacagtaaaacttatagtataggaaatacataaactggtcacatagttgtttattataatcatcaagtattgcgcactgc

SEQ ID NO: 12351 - DNA, 591 bp, Homo sapiens
  MAP TO AC015670.4; EXPRESSED IN PLACENTA, SIGNAL = 0.76; EXPRESSED IN FETAL LIVER, SIGNAL = 0.63; EXPRESSED IN BRAIN, SIGNAL = 0.81; EXPRESSED IN BONE MARROW, SIGNAL = 0.76; EXPRESSED IN ADULT LIVER, SIGNAL = 0.84
tgattttgccagaccctagcacaaatagaaatcaaataatgtgtgtcaattgacctgttaaactgaatttcttccatggagacatattttatgtcttaattggctcaaaataaatgtattacctcgttgtctaggtaaggattctttgttaatgtctacttttccttatgccctattctatccaaacacatatgattcttgaccagtgcatttagcaaatatgggaattgaccattttcaattgttttggcattcatgaggatgttgataaaggtaggggttgggggcagagctgattctttaatgattttctgcaaatgaacataggctaagttacaacagaattaatgtgaaattaaatattacagtaaggctattatcaaaagaggtcatggtgatgaatggcgtatttaaatgagaccaccagaaggaattagagctgaagcctattaatcccagtcagtctgcaagactccatttttatgcagattaaactatatttcaggttgataaatcatcatgacatactctgtgacaagagccaaatttctttccctttctttatttctgtgtggttagggctacagcagg

SEQ ID NO: 12352 - DNA, 574 bp, Homo sapiens
  MAP TO AC022428.3; EXPRESSED IN BONE MARROW, SIGNAL = 0.89; EXPRESSED IN ADULT LIVER, SIGNAL = 0.98; EXPRESSED IN FETAL LIVER, SIGNAL = 0.86; EXPRESSED IN BRAIN, SIGNAL = 0.82; EXPRESSED IN LUNG, SIGNAL = 0.92; EXPRESSED IN PLACENTA, SIGNAL = 0.81
atgcactccccacatttttcttattaaatgtaattgccagtttttgtatatgtcattgtcctaatgctttcgagaaacttagacaaagagcaagaccacagataaatggatccttctgttcaggtctcattacctagaagagttttgactgcaatatatgagtactaaaagttgatggtttatgctaattttaagtgtaatatattttagaattttgtcacatgcattattaatatgatttcatattcatggccttaggaagattaatttaaacaataacaacaagaacaacaacaacaacaaaatacaacaaaaaatttcccccatgtgccaagagcaaattttgaggtccatttatccagataaagtgttttgttatctgaaccaagaacatgaactttatctttatagtgaccacagactcccatctctagtatcatgatttttaatttgaattaaagcatttttttttgctttgttaagatgaggcaggccttcttgctgacattttaaaaagcaactatttttctttcagtttacactatgaggcattggctccaactgtcagcattga

SEQ ID NO: 12353 - DNA, 514 bp, Homo sapiens
  MAP TO AC015496.3; EXPRESSED IN PLACENTA, SIGNAL = 0.5; EXPRESSED IN FETAL LIVER, SIGNAL = 0.47; EXPRESSED IN BRAIN, SIGNAL = 0.45
tgaggaatagaatggagcggcacaaatggaagtcaagaaaccagtcatgtgactagtgccaaaatttggaggacagatgtggactttttgaggtggtttccagaaaaaaggccatcattttgatgttagaagtaattcttgacaacatttcagcataagacaaacccttttatttttctcaagtgatacatctgactgtatctgtagacacagagaaagatcaagtggtgagggaaaattttcaggtaaaagagagacaacaggaaaaactaagagagtaagatcttaaagaagacagagatgccaactggaagggtcagcctttgaaagaggatgcttcctgctttgagaggctgggaaaggaagacagatatcgtctggccaaggaaagaacatgtgagtttgtggtacacccaggaacaaagtttcatgactttcgtgctgcaggacctctatccattttttacctggcatctctggcctgtgacaagggggaggcacctgtgttgtcaga

SEQ ID NO: 12354 - DNA, 596 bp, Homo sapiens
  MAP TO AL121713.24; EXPRESSED IN FETAL LIVER, SIGNAL = 0.54; EXPRESSED IN BRAIN, SIGNAL = 0.65; EXPRESSED IN BONE MARROW, SIGNAL = 2.2
aggtgaaggactatggggtgatctaggactattatcataagctgaaaggccaggccaaatatcaccggatgtggctgatgacttattaaattcatcgatagactcagatgggtcatgttcaaatgtatctttcggttcctcctgtgatttacttttcaacggactctcttcttggggttccccttcagcttttttggtttgtttttcctgagaccctcgtcttttagaaacaggagatttgctatatggggatgaagaacgagaagaggatgatcttggagacctagaagatctatatgaccggcgagatctgcttctggatctttgagaagaaacggatcttctttttggactcctggaacgtgaacgacctcgtctaggactcctagagtgccttctattccagacaggtctataaccacctcgatgatatctacctcctcctccttgataataccctctaccccttcctctgtacccataaggtcgtctcattcctctattatttctgtaatcgcgacgataatctctagaatacatacgatctctactacgagaccttgaatatgttctggaacgagacctagaactaaaaa

SEQ ID NO: 12355 - DNA, 591 bp, Homo sapiens
  MAP TO AL133258.13; EXPRESSED IN PLACENTA, SIGNAL = 0.61; EXPRESSED IN ADULT LIVER, SIGNAL = 0.68; EXPRESSED IN FETAL LIVER, SIGNAL = 0.97; EXPRESSED IN BRAIN, SIGNAL = 0.8; EXPRESSED IN BONE MARROW, SIGNAL = 0.92
ctacatcccctgtaggctcgccgcctattgcctctcgattgcggccgcggcaggaggaagtagccccccctctaccgcggaaagaagcacaagtccctccgggtgatgagcgctcagccccattcttggtttatgtccctttttctccttctgacctctgtaactggaaggctcataatcctcccttctctgaaaagccccaggtcttgatctcactgatggagtctgtgctccggacccatcggcccacctgggatgactgtcagcagctccttttgaccctttttacctctgaagagagggaacatatccgaagagaggccagaaagtatttcctcacatcagccaataggccagaggaggaagctagagactttcttgaggaggtctttccctctacccggcctaactggcacacgaattcctcgggtaggaagaaagctttggacgattttcaccggtatctccttgcaggtatcaaaggagctgctcagaaacccataaacttgtctaagatgactgaagtcgcacagggcctgatgagtcaccgggagcgtttttagaacgcctccaggaggcctatcggactta

SEQ ID NO: 12356 - DNA, 599 bp, Homo sapiens
  MAP TO AL109976.21; EXPRESSED IN LUNG, SIGNAL = 0.92; EXPRESSED IN ADULT LIVER, SIGNAL = 0.81; EXPRESSED IN BRAIN, SIGNAL = 0.9; EXPRESSED IN PLACENTA, SIGNAL = 0.94; EXPRESSED IN FETAL LIVER, SIGNAL = 0.88; EXPRESSED IN BONE MARROW, SIGNAL = 0.85
cttctgggaaaacgttcgactgcgccacgagcccaccgagctgtgcgactgaggcagaccccgggagggcttcccccgcgtccgctttaagtacgcggccggcccctgtctcctcctttcgaccggggacctccgcagggccacgcccgctggctgccccgcctcctgcatttatcccggtagctccggccgcaagtccttctcctcctcctccaggaagcgcgccccgactgactagacggacctccgtgcattccccgggctacgccctcgcccgctgagacggcgctctccgagctcggctgctttgggttttcgctgcgagcctcgccaacttatctgccagcctcttcacgtcctcggccttctatgaggtcaaggtcatggttcgccccctttttccttccccaaatggcccttgcgccctgtcccctttcctggaccggctgcgacccgcccggggacgcgccttttcggggcgcttagtctcctgcgagtagggcgtgtgcgcgtgtgggtgcgcgtgctgcgatgcgatccggcaaatgcagctgacgaacccctggcctgatccacggtggctcccagtagaaggctct

SEQ ID NO: 12357 - DNA, 599 bp, Homo sapiens
  MAP TO AC018731.3; EXPRESSED IN PLACENTA, SIGNAL = 0.54; EXPRESSED IN FETAL LIVER, SIGNAL = 0.53; EXPRESSED IN ADULT LIVER, SIGNAL = 0.6; EXPRESSED IN BRAIN, SIGNAL = 0.46; EXPRESSED IN BONE MARROW, SIGNAL = 0.52
ccagccagggagtttattttctaatagggatttttttttccatttaggcaaaagaaaacattcttgtgatttatctcagctagttggtacaattctagtatccattctgttatggagagggaagacttcctggatcttaagctttgtagaagtcttggttccagcagactccactttgcctccatctcttgcctttatacggaggttaaaacccaacctctgacaattaggattcatgtctgcatcagatatagagctccagatggtgatgccattcccctaaaaacttatacttgaggctttcagtctctccttatttctggttgttttaaaatattttttccagtatattaaagtttttgtagcagatgggtaatctcgttagctcaatttactattttctaatcccagaaatcctctctaggttttttccagatatgatacttgtattattttaagttttttaacaaaaataaatacataatttttaataaaacagaaaaatccaattcaaactaactaaatctacaaaggaagcttgcttcaagtaactgaaaagtccagaaataatgtgaactgatatagttcaagcgctgcct

SEQ ID NO: 12358 - DNA, 555 bp, Homo sapiens
  MAP TO AC022882.3; EXPRESSED IN PLACENTA, SIGNAL = 0.57; EXPRESSED IN FETAL LIVER, SIGNAL = 0.45; EXPRESSED IN BRAIN, SIGNAL = 0.47; EXPRESSED IN BONE MARROW, SIGNAL = 0.46
ccatcaggaaagaagtccagaggacaaacactactttcttgcaaatatagtaatgttattttttagccagatattctataatttttattagttattattggtgatttttatttcatagtaattttagaaactctaaaagcaactataatatactaaaagaatggccatgatttatttttaacagaaatataaaataaaataaaataaaatacatccaaggactttgcaaaaataacaaacatatgaattattagtaagatatatctcacattgttattaagttgaaatttaaaaacagttatgataaacaaggtacagaggccaaaatttgccaactaggtgatatatatttcaggaagaaaaaatcctgaaaataaaacacattgtaatgtttgtaaaggtacgtctatctccagaatacagtctgctcttctatgtaatggaacaagataattgccagaacagaggacatgaaatggttttatttaaaaaggctgctgcatgcgacaagttgaaatgtatgtctgacttatccccattttctagtcatttgga

SEQ ID NO: 12359 - DNA, 587 bp, Homo sapiens
  MAP TO AC011957.2; EXPRESSED IN BONE MARROW, SIGNAL = 1.2; EXPRESSED IN LUNG, SIGNAL =   1; EXPRESSED IN PLACENTA, SIGNAL = 1.3; EXPRESSED IN ADULT LIVER, SIGNAL = 1.7; EXPRESSED IN FETAL LIVER, SIGNAL = 1.4; EXPRESSED IN BRAIN, SIGNAL =   2
tggaataggagcacccagacacaaacccagatcccagtctaactggccactgtcttttgctccccacagacagcagggaggtgaaggtgggagagtacaacgctgtggccgacacactggagatcatcaatgacaccatcaggttccaaggtaaggcaggtgggcttctcagaggagggggcctgcccagttgctcccaagcctggacattgtctaagggttagggacaagctcagcatccttggcttcagggggtcaagggaacatcctcaacacatgcactcaatcgttgagcacagggctccaatcacttgtatgggctccagcacctggcatgggtcactagagtttgtatgaagtgcacactgaggtgtttaaaccattggatggccaggagtaattctttttaaatgtagccctgctaaatttaggtctatcttctcctctggcaaagggtttgactgggttggaaataaggcctgtctatctgctgctcttcctagaagattatttcttctcctctgctagagaactcctcttcagcttctataaccagctcaaatgacacctcttctgtgcgatcttcc

SEQ ID NO: 12360 - DNA, 578 bp, Homo sapiens
  MAP TO AC022904.3; EXPRESSED IN PLACENTA, SIGNAL = 0.65; EXPRESSED IN ADULT LIVER, SIGNAL = 0.64; EXPRESSED IN BRAIN, SIGNAL = 0.62; EXPRESSED IN BONE MARROW, SIGNAL = 0.6; EXPRESSED IN FETAL LIVER, SIGNAL = 0.59
gtcaatcccagagttttggccaatcacaggtggccaactgttcaaattgtgttcaaataaagcaaaggctgaactgtaaacaattcagctgtttctgcccatcacttctgatttctgtaagtcactttgctttctccgtccataaatccactcccaccaaaagatagtgctgcagtctgtctgagcatattctggttctgggagctgcccgtgaaacattcttcactcaattaaactttgtgaaatttaggcaaactatcccaaaatgtgaccattctacctcacctgcagtagagtcagcactgcccactatttcttccaagaagtgttggttcctttgttccctctatcctgccccctactcttagttatttcttattgtgcacttcagatctgcaatgatccaaatgtttgtgttcccccaagactcctatgttgaaatcctaaccatcaatgtcgtggtagtaggaggtaaggcctttaggaggtgattaggtcatgagggtgcagccctcatgaatgggattagtgccctcattaaagaggccccagggagctctctctttccaccaggcaag

SEQ ID NO: 12361 - DNA, 534 bp, Homo sapiens
  MAP TO AL132874.14; EXPRESSED IN ADULT LIVER, SIGNAL =   1; EXPRESSED IN PLACENTA, SIGNAL = 1.2; EXPRESSED IN FETAL LIVER, SIGNAL = 0.88; EXPRESSED IN BRAIN, SIGNAL = 0.99; EXPRESSED IN BONE MARROW, SIGNAL =   1; EXPRESSED IN LUNG, SIGNAL = 1.1
attgtcaaggctgaccttcgcagtgcactatcaaaaattgtaagcacttcactggggaacatgttgaaatattccccgatttccatgttggtctcaaacagagtcatggcattaaccacaactgggtaatgagcatcttcatccctttccttcaagattagaagaatatcattcttatggtattccgaaacatatgactcaaacacttgaccaaccagtgtaacttgatcgctattcatcttgaatctaggtaactaaagaaaaaaaaaaggatcatattatatatttgatactcaagatgtacacacaatttaacaaaaacgattggttataaatcacactggctttgggtcatactataatcacaaaataatatctgaattcaaatcttaatgaaatctgaattatctgttacagtcacagtacatgtacttcaaaaatgagtgaagtcaaatgtaagtcaaagaactatgttggtactgattatcaaaatccaaaatagttcaaagcatttcccatcttttccccaaattt

SEQ ID NO: 12362 - DNA, 570 bp, Homo sapiens
  MAP TO AL157997.2; EXPRESSED IN BONE MARROW, SIGNAL = 0.46; EXPRESSED IN PLACENTA, SIGNAL = 0.57; EXPRESSED IN FETAL LIVER, SIGNAL = 0.56; EXPRESSED IN BRAIN, SIGNAL = 0.51
tttgccttttcagtaactggcttaaaaaacaaaattttatcttctagaattcaacagtttcaccttcaaataatgctgcgaacaggatatcactctctccctaatgatgcttgctacctttacgaatctccactggattcagctggacatcagttttgccttgacatgctccccctctctaatgagttacttcctccagcaaaattcaatatcccaagtcccacagtctgggaaaatagtccacagggtctcctgacagaacaacaatcacaggtaagggcaactctatgccccagaccagtgggaaatagttggaagataagaccttcaccccaatgccaaagatctgtcattgttttctgtcatgagagaatgtggagtcctgaaaagataagtaagcaacaagagggaagaggtcccacgttggggagaacaattgttctgagagacagcttatcacagacaacctgctggcacaacatcctgttcccaaatacctcgttccacatgtgacatctccagcataaacttacataaaacttccctccagcccctacctctctgcagaca

SEQ ID NO: 12363 - DNA, 533 bp, Homo sapiens
  MAP TO AC008998.2; EXPRESSED IN LUNG, SIGNAL = 1.2; EXPRESSED IN PLACENTA, SIGNAL = 1.1; EXPRESSED IN FETAL LIVER, SIGNAL = 0.98; EXPRESSED IN BRAIN, SIGNAL =   1; EXPRESSED IN BONE MARROW, SIGNAL =   1; EXPRESSED IN ADULT LIVER, SIGNAL = 1.2
tgaccaatgcgaaagttcagcaactctaaatgctaacagactggaggcgtgactgaggctggaacggcaaaggggcccggtgccatcagccttggcgaggaaaacatcacccgtcatctgtgcaagtgactcacgtggagtataaacatttgtgcgctcctgaccccccgcttcacacgacagagagccacgaggacccgaggagggggagccagaggagagacctagcgcagccctcctgggacaggacggacttcaccaaggagaacgcgtgcttccaactcgaacttcagtcctggaagtttttcagatagaggatgactcaggctgatggcaacagagagggtgtcttgggggtcctctgtggggctcccctacgtgtctgtcatctcacagtcaccttgacactccttccaccccgctccgggaaaatgtcccgctctcagacgatctgggtgatcacatgcctctctgctctgcctccttaggcagactgcctcaaattctaacatcccgtggagagcagaactctc

SEQ ID NO: 12364 - DNA, 517 bp, Homo sapiens
  MAP TO AL133511.5; EXPRESSED IN PLACENTA, SIGNAL = 0.57; EXPRESSED IN FETAL LIVER, SIGNAL = 0.57; EXPRESSED IN BRAIN, SIGNAL = 0.56
aacatcgcaaactcaacgtgatacatcatatcaacaaaataaaaaaccacataattatttcaagtgatgctgaaaaagcatttgataaaggtcaacatcctttcatgataaaaatcctaaaaaactgggaatagaagaaacataccttaacataataaaagccatatatgacagactcacagctagtatcatattgaatgaggaaaaactgaaagcctttcctttaagatctggaaaaagacaagaatgtccactttcaccactgtcattcaacatagtactggaaatcctagctagagtaatcagacaagagaaagaaataaagtgcatccaaattggaaaggaagaagtcaaattattcttgtttgcagatgatatgacctcatatttggagaagcctaaagacgttaccaaaatactattataactgataaacaaatttagtaaagttgcaggatacaaaatcaaacatacaaaaatcagtagcatttccatacaccaacagcaaacagtcaaa

SEQ ID NO: 12365 - DNA, 536 bp, Homo sapiens
  MAP TO AC009428.4; EXPRESSED IN ADULT LIVER, SIGNAL = 0.84; EXPRESSED IN BRAIN, SIGNAL = 0.58; EXPRESSED IN PLACENTA, SIGNAL = 0.68; EXPRESSED IN FETAL LIVER, SIGNAL = 0.68; EXPRESSED IN BONE MARROW, SIGNAL = 0.58
aagatggcctgacgcttaacctttttttttcttttcgcagtttggaaactgtcagtagttaaccagaatgaaatctggcctcctttctactcccttttcccccttgagctttgttttttcttgctgccacattctagccaaggagaaaagacagacacgtcctcgaattatctgagtattattcatctcgatggttgctggaatggcttccaaggaccccctccatctcatggtcgtttctgtctgctttcctctcatctataatcccaaggaactcactcgaagcagcatgcgtggctggctggtgggatcctccttatacatcaccgtctgcctgtaccaacactgtcatcgcctcatgcttcataacaccgggacaccaggcaaaggagctcccaagctgaacctctgcctgccgcaaggtaaatacaagcaggaccgcatgctgcaatttcagggttatgatcgtcttaataaatgatgcactcaatgtgctataaatcatctccctccgaccaactctctcggcagcctat

SEQ ID NO: 12366 - DNA, 533 bp, Homo sapiens
  MAP TO AC022860.3; EXPRESSED IN ADULT LIVER, SIGNAL = 1.2; EXPRESSED IN FETAL LIVER, SIGNAL = 0.83; EXPRESSED IN BRAIN, SIGNAL = 0.91; EXPRESSED IN LUNG, SIGNAL = 0.88; EXPRESSED IN PLACENTA, SIGNAL = 0.77; EXPRESSED IN BONE MARROW, SIGNAL = 0.94
tttgggctttatggacttgctttttgatcaactgcagctctgcctcagcttcttttgttaattgccaagggctagtgatactaggatctcctctaagaacagaaaatagattactcatggcataggtaggaatgtctagagcaggtcatatccaattaatgtcgcctagtaatttttgaaagttacttaatgttttcaatcgatccctacatatagttactttctgtggcacaatggtagtgtcatttactaaggtccccaagtaggagtaaggaggagtagtctgaattttgtcaggagctataattaaaccagtgtcagaaattgaattttgcaagtgatcataacactggagtaatatttctcgagtgggggcagcacaagatatatcatccatataatgaataatgtaacactgtgaaaatgttttatgagtaggtttaattgcttgccctacataagtctggcaaattgttggaatgtttaacatgccttgtggcaacactttccagtgaaaatgcttagcaggctgc

SEQ ID NO: 12367 - DNA, 589 bp, Homo sapiens
  MAP TO AL139824.7; EXPRESSED IN ADULT LIVER, SIGNAL = 0.6; EXPRESSED IN BRAIN, SIGNAL = 0.49; EXPRESSED IN BONE MARROW, SIGNAL = 0.53; EXPRESSED IN PLACENTA, SIGNAL = 0.72; EXPRESSED IN FETAL LIVER, SIGNAL = 0.62
ccatccatttttctgttggctacaccagcatattttaattggagagttgaagttcgttcatctttcagtttctcatatgatgccctggcccgtttgctctgttaaacaacacagagtctggatataaatgtaacttaatatggagtaggttcttcttgaaacctacacaaggggttaagtcactgaaatacttgaattatagctcttaagtttctataataatagaggacactaaaatagacattgtggtggagatgaatgattttcctgtgtggtgttgccatctagtggacctgggagacagtgtgattacaaaagtggacatgaaaacggagcccgttttaccttattacgtggggcccaggctaccttcagtgttcacctgattattgacccagcctcccaactgaaattcctgccttcattctttcactccccaatttcaacctttatactgcagagtgattgttctaaaagtggatatggatcagttctgtgtttaaatccattcagtaactcacccctgtacatgtgataaaacgttataatctcttaacctggtttacaaagtcttccctgatctagccca

SEQ ID NO: 12368 - DNA, 568 bp, Homo sapiens
  MAP TO AC019342.4; EXPRESSED IN PLACENTA, SIGNAL = 0.78; EXPRESSED IN BONE MARROW, SIGNAL = 0.49; EXPRESSED IN ADULT LIVER, SIGNAL = 0.6; EXPRESSED IN FETAL LIVER, SIGNAL = 0.54; EXPRESSED IN BRAIN, SIGNAL = 0.57
gcagcaggatcactttaggcaatgtaatggagtaagtgaaccaacatggtcactaaactacattggagggtgaatgcacagacggatagattcttatggacaatataggcattcattgacattgagggtaagccttaaagaaaaatctcagccacctctgagaagcccaccgtggtatcccacacaaaatcttcattgcgtttcctttacctcactttgattataaccagtgttatatttttaaatatagaataatgcaattctagttctgatatcttaaaacatagaataatttttgatattattattttccccataattcacacaaaaataacaaatctcatcattttttttcagaacatctctgcaaagcaggacaagggtatgcaaacaactccaaattacaactgcctacatatgatcagacaacttgaccctgtgcacatgacatttgtccccaactccaaacccaaaacctcagacttcccaaggagagacctggtagccattggaatagactaaaggcagacatggaggaggaattaggggttagtgaaaacccaggggg

SEQ ID NO: 12369 - DNA, 575 bp, Homo sapiens
  MAP TO AC025324.2; EXPRESSED IN BONE MARROW, SIGNAL = 0.56; EXPRESSED IN PLACENTA, SIGNAL = 0.76; EXPRESSED IN FETAL LIVER, SIGNAL = 0.62; EXPRESSED IN ADULT LIVER, SIGNAL = 0.76; EXPRESSED IN BRAIN, SIGNAL = 0.59
gccattgctggttcaaagagatgctattgatttttgtgtctgacaacatttctggaatagaggttgtagtaatttgataattctgttatttttttctgggtaggcaattatgtcatctgcaaatagtgacctttctagctttcctgtctgtctcaccaacaccaaaactaaagcagttgtggccatctgctatgcctccctcatgggtggtactggagatgaaaacctccttgttccttcagtgcccaccacacacctggattagtcttgatgacgagcctgagaggcaggtgctatcaccttcccccagggtggagcgtggcttagagacacagtgtgacactagtgcacaatggctgtgcctaagtattcttctgatgtaagaaggttcctatcttgtcacacttctccaacccaaccccaccatctttagttcctcaccgtctctcccccgaggaagctgaggtgcctcagcctccctggctacactccagttcaccatattaccgctgggcggtcctctgagagtctcactcctttgctatgtcatagaatgcatgtagccatcagctcaa

SEQ ID NO: 12370 - DNA, 522 bp, Homo sapiens
  MAP TO AC022843.3; EXPRESSED IN PLACENTA, SIGNAL = 0.77; EXPRESSED IN ADULT LIVER, SIGNAL = 0.61; EXPRESSED IN BRAIN, SIGNAL = 0.54; EXPRESSED IN BONE MARROW, SIGNAL = 0.54; EXPRESSED IN FETAL LIVER, SIGNAL = 0.56
gttgagcttccttgcaatccacgttttacattctttatctgtcatttgtgagtttccattttgattatggaccattgctggagagttagtgagaccctttggtggtgtcactacattcggatttttcatggtgtcagaattcttgtgctagttccttatcatttggagatgctggcaattctaatttttatagttattttcatgtgggtaggattttttctttttctctataatactgttgttttgtttcttctttccctgtctctttaccctcttccctagagtgtgtgactgaagaaaatgatgggtaaggtcttttgtctttgaccctatagcactatgcacttctgttggtagatttttttactggggtatgcaatttgacctataagtcagtagatggcgcttatgggtaagagccggctatggccaataaggcagggtatatgcttgatccttgtttactggtaaaagctgtctgttgccccagggaatgggctgactcctggaaagcacagcagt

SEQ ID NO: 12371 - DNA, 527 bp, Homo sapiens
  MAP TO AC022308.7; EXPRESSED IN ADULT LIVER, SIGNAL = 0.83; EXPRESSED IN BRAIN, SIGNAL = 0.86; EXPRESSED IN PLACENTA, SIGNAL = 0.86; EXPRESSED IN FETAL LIVER, SIGNAL = 0.69; EXPRESSED IN BONE MARROW, SIGNAL = 0.78
tgagtgacttggggcttagggaggagagtgggagatcagggacagtctcttccagaaatgacttacaaggtgaagcctgaatgatgcgaaagaacttgccatggaacaatttgggggaagggtgctccaaaccaggggaaaggcattcaaagagcccacagtgggacaaagtgaggtggaaggaaagccagtttggctggagcaaaataatgaagggggagtgataggagttgaggtcacagagctaggttgggacccagtcctatagccatagtcctgtagctccagtaggggttcccagtaagcactcaatgggaccttgaaggaagatgtggggtctgagcttgtttgaggagaaaatagtggagaaggaagagcaatatatccaaagacacagaaatagtataactgtgaccacttcatggcaaagcgagcagccggatttgactggcctgaagggcagagagataaaacatagacatagattagggtaagagtaaggggaatcccaaactgacagcaatgtg

SEQ ID NO: 12372 - DNA, 553 bp, Homo sapiens
  MAP TO AC013314.4; EXPRESSED IN BONE MARROW, SIGNAL = 0.68; EXPRESSED IN PLACENTA, SIGNAL = 0.71; EXPRESSED IN ADULT LIVER, SIGNAL = 0.83; EXPRESSED IN FETAL LIVER, SIGNAL = 0.63; EXPRESSED IN BRAIN, SIGNAL = 0.69
cccctcaatttctctctcccttgtcacatttcattacaaggaagaagccaggtagcagccttgagtctttgtttggaaatttctttagccacataatcaacttcgttgtttagaaattctgttttccatataacttcactatgttctctaccagtacattacaaggatctcttttcttccagtttttaattacatgttcctcacttctttctgaactctcaccagcagcattcctatggtcagtaattccaacactacattcaaggccattgacacattcttcatcatgttcttcaaaattattctagccttaactactgtttagtactaaaaccacacctacattttaagtattttttttttacagcatcattctacttcctggtaccaaaatttgtattcattatctatttccgcttaacaaatttctacaaaatttgtggctgaaaacagtatagttgtattgcttcatagtttctgtagctcaagaatttgtgcctggcttaactggtcttctgctcagtctcatcaacctgaaattggggtgtcagct

SEQ ID NO: 12373 - DNA, 501 bp, Homo sapiens
  MAP TO AC026156.2; EXPRESSED IN PLACENTA, SIGNAL = 0.69; EXPRESSED IN FETAL LIVER, SIGNAL = 0.99; EXPRESSED IN BONE MARROW, SIGNAL = 1.1; EXPRESSED IN ADULT LIVER, SIGNAL = 0.85; EXPRESSED IN BRAIN, SIGNAL = 1.6
caacctctcatgtcgcattgatatttaccttttgcagagcgtcaacaaggatcttagaagcatctctgaattgttcagagtcttccccataacgcttcccaatttcatccaaacctgccagctccagtgaatataaatcaggagaatgatccttggctagatgcttatgacgagacagcttaggagaacaaacaaacaaaaaaaggtagcggataaagtaagatgaaagacgtcaaacacagccagttaaagttttatgcctaactaaactaggctaaactaaaccataccagtgtaccacaacatgcaaatagtctaaaatggtggcaaaagaaactggtttgaataagcgtttctgataaatccaacacgaatctcatgtttaggagcagtaccaagactccttggatatttaataaaagctttcaacaaaattcctcagttttaaaaactcaggtatgggccaacgtatgaaagaacagatggctggaccagtttgat

SEQ ID NO: 12374 - DNA, 568 bp, Homo sapiens
  MAP TO AC018909.3; EXPRESSED IN PLACENTA, SIGNAL = 0.5; EXPRESSED IN ADULT LIVER, SIGNAL = 0.62; EXPRESSED IN BONE MARROW, SIGNAL = 0.5; EXPRESSED IN BRAIN, SIGNAL = 0.64
ttctccagtttcctgggatgtcccattcccgaggagtcatcccagagagaagcgatgggaagcagccttcttgcttaggctactgcagttataaagtgactcttctgtgaatacattgcttaaaagagtcaaagttgtttatttatttatttattttaaatagaggtagaggtagtagaaagatgacaataaaatagaaagaaacccaacccacatatacttaaaagaagggttaaatcagatttaagatgatgaatcttttacaatatatgtgaaatatgcaattaaagaagtattttggtacctgattttaggaactgtaaaatctgaaggaagctttgagattttcaccatttgaggtctgtttggaaatttttcaaagattcgcaggcgtaaagggagcttttctttggtgtccgcatttgcttcactttgctttaactaaagaaaaattggaaagaagaagaaaagggggaacctataatactattatatacgttacacaaaattagttttagaatggaagcaataagtaattacatgaaatgccagtagatggcagcaaagg

SEQ ID NO: 12375 - DNA, 520 bp, Homo sapiens
  MAP TO AC007989.2; EXPRESSED IN LUNG, SIGNAL = 1.1; EXPRESSED IN PLACENTA, SIGNAL = 1.1; EXPRESSED IN ADULT LIVER, SIGNAL = 1.3; EXPRESSED IN FETAL LIVER, SIGNAL = 0.98; EXPRESSED IN BRAIN, SIGNAL = 1.2; EXPRESSED IN BONE MARROW, SIGNAL = 0.98
tcagggaaatagcaccatccatctcatgtcacatccctgctcttgtctttttgttgcttttcctttgaaataaatgtatatatgagtcagtaaaataagttttagaaaagcaacaatattcatttattcatcatattatggtagttgtaaatgccaaggacactgctaggtgtgtggggggaaccgcaataaaagaaatctgattcttatcctctgggtactcacaagcttggagggagacgagacataaagaacctggatagttactgcactcttaataagaaacaaatgtcttgtgagtggcacagaagtgccactagaggtggcagccatctctggcattgtcataagagggcgtctgtagcatgtggtgttgaaacaactaagctacaagaaagtgtagaaggctggtgattggaaggagagcattccagggaaagaggatagcaggagtgaagtaggagacatatgagtgtttggtagagtctgagaaaagccagcatttgtcaaggacccaggt

SEQ ID NO: 12376 - DNA, 505 bp, Homo sapiens
  MAP TO AC026192.1; EXPRESSED IN ADULT LIVER, SIGNAL = 0.6; EXPRESSED IN BRAIN, SIGNAL = 0.47; EXPRESSED IN BONE MARROW, SIGNAL = 0.56; EXPRESSED IN PLACENTA, SIGNAL = 0.5; EXPRESSED IN FETAL LIVER, SIGNAL = 0.48
actgtgcttggctttccatcagcaattttaattgccctttatcccgtatggtaatttttcacaggttataggtattaggatgtggacatatttggaggtcatgactctgcctaccacaccagcttttctaacttctttcttcccctcctgctgctccttctcaaaatagtgcatgggtacatgaaggtagaggagagagggcctcagactcaacggttgtttgttctctggatccttgctggtttctactactgcgatgggcttatttctggttgggctggatcccactgatgaaatctgtgacagatgaatttttgtttattataattactttacgctacataactaaccacctcaaaacttagtgggttaaacgatcattttgacaatgaaaacaattacatctcatgattttgtggattgactgggctctgctgggcaaattttctgttccacaagatggagtggatgtcactcatatggctgtattcagctgggagcttgc

SEQ ID NO: 12377 - DNA, 540 bp, Homo sapiens
  MAP TO AL133320.8; EXPRESSED IN BONE MARROW, SIGNAL = 0.81; EXPRESSED IN LUNG, SIGNAL =   1; EXPRESSED IN PLACENTA, SIGNAL = 0.81; EXPRESSED IN FETAL LIVER, SIGNAL = 0.75; EXPRESSED IN ADULT LIVER, SIGNAL = 0.99; EXPRESSED IN BRAIN, SIGNAL = 0.78
caaggaccaaatcagccatctcaacagaagccaggaatagagatgggattataccagcagaaacactgccagctgggactaagggaaacagagaaagtgggaaaaaatgaaagaaaactgttgaacttcttagattctacaggaccagatcatagagctactgtatgcagctgttcagctataactgtgcactatttttcaagacaagggaagaaggacctcaaaagcaattcaaagataatcagggatgccactcccacaacaggcccagagggcatgtgctcaggggacagggctgcctccacttctatttcaaagggtaagacccctgcccagtggagccatgggtgtgcaactcccgctaggcagagcttcagaggtgagacccctgcctgagtgggttctggaggcaggaccactagtctagtgaatctagagggcagagctttgaaccaaagaggattattctcaaaccttaggatctcatagagtttgcttgcatggttttagaattattcaggacctgtcatttctcccttc

SEQ ID NO: 12378 - DNA, 515 bp, Homo sapiens
  MAP TO AL133544.5; EXPRESSED IN FETAL LIVER, SIGNAL = 0.67; EXPRESSED IN PLACENTA, SIGNAL = 0.47; EXPRESSED IN ADULT LIVER, SIGNAL = 0.61; EXPRESSED IN BRAIN, SIGNAL = 0.68; EXPRESSED IN BONE MARROW, SIGNAL = 0.59
tcagagccctcccttatcactaggtgctgggctagcctttacagagatatcaagtcagaacagcatgatagattatcctaaattcaggttgtctgttgcaattaaggttttaggaataagtacctgaaaggaaccataaaagtataggaaggtctaattttaagtaattaacttacttcattaaatgaatatttattggcatggcaatgtaaaacaggatagaaatagttttaaagtttcaactgcataaaataaacttactgtgacagtttcaagcctctgttttactagctgcatcttcgttgaagaactttcagtgtggacaaattcatcaatctgaaaagagccttgatggggtagttttggacaggtacatagggcatcttgactttggtgtattccaggtaatggaaatgttccattgtagcgtttgaacatttcagcctcctgctgggcaactgaagaaatgaatccataattagttaaatcatcatagcaaaagcataatcaagccc

SEQ ID NO: 12379 - DNA, 518 bp, Homo sapiens
  MAP TO AL121918.15; EXPRESSED IN BONE MARROW, SIGNAL = 0.47; EXPRESSED IN PLACENTA, SIGNAL = 0.48; EXPRESSED IN FETAL LIVER, SIGNAL = 0.53; EXPRESSED IN BRAIN, SIGNAL = 0.48
tgatggggataaaggctctgaagaagattaaagacggtgatgggtaggtggtgaggaggggcaagaatggaaagttctttaggtagataggcaaaaggcctctctggggagctgacaaatgaaggaggtgccagaacaggaaggcctgcagagccactctgtatctgcacccatacccaggaaagcgggccccagaaggatgccctcagccctcctgaacctggaggaagagcagccaggcctgctgtgcttggtgagctcccagaacctgtctacccaggtgactgcccaactggggctgcaaccacttcctgccaattcttgcccttctccctttctccttaggaccctagtcaaagatgtgcaggaccacgtggtcagtcatgaaggagcttcgctaaccagcttccccatactttgagtcattgttgtccatttgagacaaataaccacgtggtttagccttttcccaggcagctttccattctaaagaggcacctgcacattagagcccatga

SEQ ID NO: 12380 - DNA, 586 bp, Homo sapiens
  MAP TO AC020610.6; EXPRESSED IN PLACENTA, SIGNAL = 0.75; EXPRESSED IN FETAL LIVER, SIGNAL = 0.74; EXPRESSED IN BONE MARROW, SIGNAL = 0.82; EXPRESSED IN LUNG, SIGNAL = 0.96; EXPRESSED IN ADULT LIVER, SIGNAL = 0.92; EXPRESSED IN BRAIN, SIGNAL = 0.85
gctgctttgtaggggaacagatttgtggcaagttgagataaaataaagaggaaggagaaaggggagaggagacggcggcaggggggcagggaacataaaaggaagaaagagggagtgagggcgagagaatggagggacgggagccaagatgttgcgggagagaagggtggtggggctcaggctggggaaggacggaggctggctttgtccaataatgatggtgacaatgatggtgataataataataatgatggtaataggctgcaagctcttggtgctgtcagtggaaaatgccccaatagcttaggctgagctggtactttctattcttgcccaaactcacgaatagcggtggctctggcctccggcctggggcctctggaagtgggtgggggtctgggccagggggttccaccccaggtaggagatccagcttccaactcccatcctcactcaaagctcaaagaaggtagaagggtgggaaagggcagggaaggggaaaggaccttccttcagctggggtcgttccctttaaagtttcccaagccccacactcagtgactttggccgacaccttactgaccat

SEQ ID NO: 12381 - DNA, 560 bp, Homo sapiens
  MAP TO AL133344.19; EXPRESSED IN PLACENTA, SIGNAL = 0.6; EXPRESSED IN BONE MARROW, SIGNAL = 2.2; EXPRESSED IN ADULT LIVER, SIGNAL = 0.55; EXPRESSED IN BRAIN, SIGNAL = 0.5; EXPRESSED IN FETAL LIVER, SIGNAL = 2.6
tctatggcttccaaattgccatggaaaacatacattctgaaatgtatagtctccttattgacacttacatcaaagatcccaaagaaagggaatttctcttcaatgccattgaacgatgccttgtgtcaagaagaaggcagattgggccttgcgctggattggggacaaagaggctacctatggtgaacgtgttgtagcctttgctgcagtagaaggcatcttcttttctggttcttttgcatcgatattctggctcaagaaacgaggaccgatgcctggcctcacgttttccaatgaacttattagcagagaagagggtttacactgtgattttgcttgcttgatgttcaaacacctggtacacaaaccatcggaggagaaagtgagagaaataattatcaatgctgttcagatagaacaagaattcctcaccgaggccttgcctgtgaagctcattgggatgaattgcactctaatgaagcaatacattgagtttgtggcagacagacttatgctggaactgggttttagcaaggttttcggagtagagagcccatttg

SEQ ID NO: 12382 - DNA, 593 bp, Homo sapiens
  MAP TO AL137853.3; EXPRESSED IN LUNG, SIGNAL =   1; EXPRESSED IN FETAL LIVER, SIGNAL = 0.56; EXPRESSED IN BRAIN, SIGNAL = 0.73; EXPRESSED IN BONE MARROW, SIGNAL = 0.46
tgattgtcctttgtttggggggatttttttttaccaggcccgtcaccaagaattgctgtcccagcagcaaaatttcattctggccacccagtcagctcaggccttcttggatcagcatggccacaatctcacacctgaggagcaacagatgctgcaacagaagctgggagagctaaaggaacaatactctacttccctggcccaatcagaggcagaactgaagcaggtgcagacacttcaggatgagttgcagaaatttctgcaggatcataaagagtttgaaagctggttggaacgatccgagaaagagctggagaacatgcataagggaggcagcagccccgagacccttccctccctgctaaagcggcaaggaagcttctcagaggatgtcatttcccacaaaggagacttgagatttgtgactatctcaggacagaaagtcttggacatggaaaacagttttaaggaaggcaaagaaccatcagaaattggaaacttagtaaaggacaagttgaaggatgcaacagaaagatacactgctctccactcaaaggtaagggggcagttcctggcatccttggtgaaacaat

SEQ ID NO: 12383 - DNA, 514 bp, Homo sapiens
  MAP TO AL137225.7; EXPRESSED IN PLACENTA, SIGNAL = 0.56; EXPRESSED IN FETAL LIVER, SIGNAL = 0.68; EXPRESSED IN BONE MARROW, SIGNAL = 0.59; EXPRESSED IN ADULT LIVER, SIGNAL = 0.69; EXPRESSED IN BRAIN, SIGNAL = 0.69
aatgccactcatctccaaggacagggtggaggggcagcattttgtaaactgtaaagggctgggcaaagggaggggctgccatcctcacctccggggtctgggattgtgggccacatcttcgagtagggcgcctgggtccccagggctccttgaggaccgtggcatcgatttccttctttaggattggggatggagatgggaactctgggagctggtgaggaggaaggggctgatgcctctgaatgtcccctgaaaagtgccaagtggaatctgccaggatcagtggagcagttggcattgtgacctcacagagcaggtgggtggaggggcaggggatggggctagtctccagcttggccctagaacctcccccagaggaagccattgtgacccactttcctttcttaagatggggaaattgaggcatcaagacaggaagggccatgctggggtctcagaagctggacaggggcgagagctgaagctccagtaacccaaccatgcttttccttgt

SEQ ID NO: 12384 - DNA, 565 bp, Homo sapiens
  MAP TO AL035668.15; EXPRESSED IN BONE MARROW, SIGNAL = 0.51; EXPRESSED IN ADULT LIVER, SIGNAL = 0.59; EXPRESSED IN FETAL LIVER, SIGNAL = 0.53; EXPRESSED IN BRAIN, SIGNAL = 0.46
gctcaacagggaaccaagagtcaggtttaatattgtttctgcaccacacttaataattgaggtcaatggtttatcaagtcctcactgagggccacagagaggacaggcttctaagtgcagagaggcagcagtaaaggctgaggctgcgggaaacataatcagagtttaaaacactaacacttacctgctggtatggttgagaggcattccaataacccttggcccctgacttttcactgtgccaaaatctaaactattacactaggtcttgaataacttttgaaaatgtgtgctttcccacctagttaaggcaaagttgcctcaaagacaaatatcacattagcacagatgctcttataagagcaattaccatcaatggtcactgcctggaagttggacctggaaatgacatgctggatggtcatagtcttgttagatgaggtgtgcgtgtgatgataagtgggaaacagcttgatttaagggacactttagtccatggccagcacagtaatgatcttgggaagcctgaagctatgtcttctgttgagcaataaggtacagggcg

SEQ ID NO: 12385 - DNA, 542 bp, Homo sapiens
  MAP TO AL121941.13; EXPRESSED IN LUNG, SIGNAL =   1; EXPRESSED IN PLACENTA, SIGNAL = 0.99; EXPRESSED IN ADULT LIVER, SIGNAL = 0.97; EXPRESSED IN FETAL LIVER, SIGNAL = 0.88; EXPRESSED IN BRAIN, SIGNAL =   1; EXPRESSED IN BONE MARROW, SIGNAL = 0.91
tctctctccacgctttcctctgtttccctgcagccggccctcctggccacctggcatagtgctcttgctgtactgtatgcagagaatggtcagcaaatgaggatgactgatttgtctcaattcacaaataaagcagcaactagagggtggcaggggtggatgaggtgggttttcacccatttggcgttgtcttatgggttgaaagagttccaggggccctgtgagaagacccctgccacttgttcagtagagaagttgcgtgtgctgggtatggagcccaaggtgggtgcctgtgtgacaaagcaggcctgaggtcaccctgggggtgtgagggatgcatgtgcccggtggaatgggcatggtctgcacatgccactgaagtcaaccagtacacagcatctgacccgtcccccatttttttccattggttctgagcagagaagcagttttacacccagtgaaaaggatgcaactgttctctttcctaagatgtgaacgtttggagaggattggtctttttcagaggcaaacgtgctgtttct

SEQ ID NO: 12386 - DNA, 512 bp, Homo sapiens
  MAP TO AC019058.3; EXPRESSED IN BONE MARROW, SIGNAL = 0.6; EXPRESSED IN PLACENTA, SIGNAL = 0.81; EXPRESSED IN ADULT LIVER, SIGNAL = 0.88; EXPRESSED IN BRAIN, SIGNAL = 0.65; EXPRESSED IN FETAL LIVER, SIGNAL = 0.71
attcatggaaagcccttgtgctttcacagaaacagcagcctctggtccctagtgggcagtgcttgttcgcatttttgataaaaaggagaaacctctggagaaccagggagtttggaataaagagtcttactaggtgcaggaaaaatgttctcttttcccaaaaaggaactacccccagaattgaggtagggggtgtccttaaaggaccacaattggaggctatgtcaaagtggataaacctctttaaggaccagcagaatactaattcctggagcttgctggggataaagaatggtaagtaaagatagtaagtaatcagtagttgatagagccagggctctgagaagtgcttattttgacagtgagccaagaggcaggggataggctggagatcatccagactggaggggtaaaagcaagtgtagatatcaagggacaccagtaaaggtgtctgcctcttggctgccaggaagacacagcaaaggccacaagcacacaaatggcaaacaagg

SEQ ID NO: 12387 - DNA, 563 bp, Homo sapiens
  MAP TO AL161743.2; EXPRESSED IN LUNG, SIGNAL = 0.99; EXPRESSED IN PLACENTA, SIGNAL =   1; EXPRESSED IN ADULT LIVER, SIGNAL = 0.97; EXPRESSED IN FETAL LIVER, SIGNAL = 0.95; EXPRESSED IN BRAIN, SIGNAL = 0.96; EXPRESSED IN BONE MARROW, SIGNAL = 0.97
tgttgtattgggctgctgagtctggaaaaatacataggattttggatgcctttgcagaccaagcagctaaggaccagcacatttcatggtgacttgatggtgtgcaaatttggtccctctgatgaatcttctagttgaaataatttatcactgtgaaattaagtcatcaagtataagatgaccagctgacttttagccaggtagacaagctatcgacttggtatgatgaaacatcactgagttcatttttatgcctttgtttcctctctgtctcagctgcaagtgtccactgcttgggaaagtgtgggaagctgacttggaagcttgtcgattgcttatccagagcctacagctccaggaagccaggggaagcctgtctgtagaagatgagaggcagatggatgacttagagggagctgctcctcctattccccccaggctccactccgaggataaaaggaagacccctttgaaggtattggaagaatggaagactcacctcatcccctctctgcactgtgctggaggtgaacagaaagaggtctgtccttttcacatggcct

SEQ ID NO: 12388 - DNA, 554 bp, Homo sapiens
  MAP TO AL161747.1; EXPRESSED IN BONE MARROW, SIGNAL = 0.98; EXPRESSED IN ADULT LIVER, SIGNAL = 0.74; EXPRESSED IN FETAL LIVER, SIGNAL = 1.1; EXPRESSED IN BRAIN, SIGNAL = 0.91
ttgggcagtagggaatcatccccagttgagaaccactgctgtaaacagttccttgccctaggggtaaatccctgtcaaacaaagctataattaagagcatattgtgagagtattttcacatgacccctaccttcttgctctgttgttccttagtggactgttggttcagaaggctctctatctccagatcaacatctgaggcagcatgtttccttgatttcttggctggctcctttgctggttccgatgctgaagagttcagaccagagactaacgaactggcaaaggcagctactgtagtcgagtcctgttctgcacgccgcttctgccctgtgacagtccctgctacctccccagggcccttcttttctgccacagcacccatcatggcagagagcttggaatggtcagcataggttacaagagtaggatgtgcatcatcttgtaggagacctcgctttacctcaatcaactcctgagctgcaaacttctgcaggaggctttctaccccatcttgagtggcaggagcatctggctagagaacgaggggaggt

SEQ ID NO: 12389 - DNA, 587 bp, Homo sapiens
  MAP TO AL136112.9; EXPRESSED IN LUNG, SIGNAL = 1.3; EXPRESSED IN ADULT LIVER, SIGNAL = 1.3; EXPRESSED IN BRAIN, SIGNAL = 1.3; EXPRESSED IN PLACENTA, SIGNAL = 0.83; EXPRESSED IN FETAL LIVER, SIGNAL = 1.4; EXPRESSED IN BONE MARROW, SIGNAL = 1.1
gcaaaaccttctctacccccggcccactgaccctacccttctgcccccgtctctccagatcggctggagttcgagtcctcagatcgggaattcacgcgcgggaaaagcgcaaaagagagcgaagcctgctgacgaacgggacaaacgaaaaccccacaaacttaccttactggcaagtcgccgccgctcgctgtccggccctgaactatacgggcaggcctccgagactgctagacgccagaggggcgggtccggacctgctcgagccggaaagaatcggcctccttagtgggcaggttcccgctgaagtgaagctaaccgagactgaggcttaaaaggggtcgacctggttaactagaaagggcgaccagtgaccctgacctggacgcgctcggattggtcgattccagtgcagtctcagatgagactcttctatgattggccagaaaagtcaagcgggaacccggaggttggcaggtggggggcgggaacaaaacaaagttgttaccctagcaacggagagacgccacgctctgcacagtctattttcggagcctagccagagacgggaaaactgaccaaggtga

SEQ ID NO: 12390 - DNA, 565 bp, Homo sapiens
  MAP TO AC017086.3; EXPRESSED IN ADULT LIVER, SIGNAL = 0.57; EXPRESSED IN PLACENTA, SIGNAL = 0.78; EXPRESSED IN FETAL LIVER, SIGNAL = 0.51; EXPRESSED IN BONE MARROW, SIGNAL = 0.49; EXPRESSED IN BRAIN, SIGNAL = 0.67
agaaggttatgacgccgttgaaaataatgtttttttaagaatgttaaattatatggggaaaaagtggcaataagtgaacagaccaacttgtaaaattgtatatacatgtgatctactatgatcacaaaggaaaaaaaaattattattgtttagaaatatatacaccaaaattgtaataactagttatttgtggatgatgtaattttcatttccttcttggtgcttttatcctttttctaattttaatacaatgactacatgctgtttcctaaatagaaaacagaataaatgttattaagataataaaaaaattcatagagatcattttcaaaaagagattgcagtagattcatatggttttattttattatttttctaaattctctataataatagtcactactttggtctgctcaggctgccacaaactgggtggcttaaacaatgagaatttatttcttgcagttctggagtctgggaagttgaagatcaaggtgccagcagattcagttcctggtgaggaatcattttctaacttgtagacagccatctccttgttgtgtcc

SEQ ID NO: 12391 - DNA, 600 bp, Homo sapiens
  MAP TO AC019083.5; EXPRESSED IN BONE MARROW, SIGNAL = 0.93; EXPRESSED IN PLACENTA, SIGNAL = 0.77; EXPRESSED IN ADULT LIVER, SIGNAL = 0.99; EXPRESSED IN BRAIN, SIGNAL = 0.75; EXPRESSED IN FETAL LIVER, SIGNAL = 1.1
gcacaccaggtaccctatgcttcaatcctgtcctttcatcttccttccatttctctgtcttgggacatggtaatttggaggtgagaccactctttcttgtccctgacaaagaatcctgtcatctgcagaatctctattcttccagctggctcctagcagggtagggagagacacagaaagagagagtcaccgttccacttcagatgctgcaagttgctgtagaggagctgccccgccgtccctgccgcccgggtgaactcctgcaaactcatgctgcagaggtgctcgccgttgatgtcgaactcttggaaagggatacaattggcatccagctggttggtgtccaggaggtgctggagccactcccacacctggtacttggtccagtactgaggatgaatttcatgccactggcctccaaaaaacccactggaaactgcaaaacaggaagcagcctcatgagtgacccctggctgttcctggccatagtatctgacacagggatgtactgttggctgccagatatctcagagacacaaccacagtccgtgtatgtgccagcatgggtgatggagcagaagtgcattttcatgtcctccc

SEQ ID NO: 12392 - DNA, 549 bp, Homo sapiens
  MAP TO AC008474.4; EXPRESSED IN PLACENTA, SIGNAL = 0.83; EXPRESSED IN FETAL LIVER, SIGNAL = 0.56; EXPRESSED IN BRAIN, SIGNAL = 0.58; EXPRESSED IN BONE MARROW, SIGNAL = 0.87
gtggtaagatgaccatggggacagtgctcggtggccaccacacgagctcaagagccagatcctgctgggggcaagaatcagaatgacaacctcggtatcacccagatgggagtggcagtggggcagggactggctccacccccagggagcatcaaggctctgtgctccgaggctgagtggcctaccgtgtgcacctcagaatctcagggctcgggggagcagtgtcctccagggtagccaccaaacccctgcagcgttcctaccaagcacaaggtcctagcccaaagcagacaccctgctccaccacccccaacacacagcccgaacctgaaagtggccctgctggcaggccaggtggagcgggacggcttggtctgcgttcctggcacctgcgttggccccgtgcttcagcaggagggggatgaggtccgcccggccgtgcagggcggcgacatgcagcggggaggagccgtcctggctggtcacgttcacaccaagcccactggcaggaaccttcgccagcctctgggaagcgcagaagatggaaac

SEQ ID NO: 12393 - DNA, 590 bp, Homo sapiens
  MAP TO AL121897.15; EXPRESSED IN LUNG, SIGNAL = 1.3; EXPRESSED IN PLACENTA, SIGNAL = 0.94; EXPRESSED IN ADULT LIVER, SIGNAL = 1.3; EXPRESSED IN BRAIN, SIGNAL = 1.3; EXPRESSED IN BONE MARROW, SIGNAL = 1.1; EXPRESSED IN FETAL LIVER, SIGNAL = 1.1
tttcagggagaatgggtgaggtaaggtgtgtttatgctgcagagcaaacgtctcatattagactctcttcaaagagaatgagagcaaggtgtgtctgcctcatcctagctggagactctgatcctagcttggggaacccagcatagacacagtctctagggcaagctgatgaattttgtcatgttgctcagaaacgtcgagaaagagaaatccagcaacagatggaaagtcgagatgaggagaccttggaacttaaagagacatacagctcattgcagcaagaggtggacatcaagaccaaaaaactcaaaaaggtatgaaaggaatgaggccagatggagttgccttgagacttggggaaagggagaactctaccctttggacagacaccctcctcacctgcctctcccctcattccagctcttctccaagcttcaggcagtgaaggctgagatccatgacctccaagaagaacacatcaaggagcgccaagagctagagcagactcagaatgagctcaccagggagctgaaactcaagtaagtgccaggccttccatagtgcccccaagccacttgctgagtcattga

SEQ ID NO: 12394 - DNA, 500 bp, Homo sapiens
  MAP TO AL121585.13; EXPRESSED IN ADULT LIVER, SIGNAL = 0.71; EXPRESSED IN FETAL LIVER, SIGNAL = 0.63; EXPRESSED IN BRAIN, SIGNAL = 0.46; EXPRESSED IN BONE MARROW, SIGNAL = 0.59; EXPRESSED IN PLACENTA, SIGNAL = 0.6
cttggaatggaccctactgctgatgtttcaaaaggacacagaggtgaactggtcacttctaattaagaagagccagtggggtgggggaagctgaaaaccaaaaatccacgtagacatacgtggcagtgtgaacgtctgtcctccccttccttctcctcacttcctctcctcctcctcactcaggctggtattctcctggtgtgcggatgtcagcttgccctgcagaagggctgccagttttttagatgtctttttgagaaacgagctgcccggatgggcactgttcacgtgcaggtacaggtcctcctgggtggggcccgtgtagccgcaatcctcgcagacgtagagcttgtcccgccgctgcttataggcatactgctgctgcaccccatggattttcttcaggtgggactccagagagcagcgctgggtgaaggctttattgcagacgttgcatttgtagggacgaatgcctgaaaggatgagggacagacacagca

SEQ ID NO: 12395 - DNA, 501 bp, Homo sapiens
  MAP TO U82670.2; EXPRESSED IN PLACENTA, SIGNAL = 0.54; EXPRESSED IN ADULT LIVER, SIGNAL = 0.59; EXPRESSED IN BRAIN, SIGNAL = 0.45; EXPRESSED IN FETAL LIVER, SIGNAL = 0.58; EXPRESSED IN BONE MARROW, SIGNAL = 0.52
gcgaagcactccagaataccctgagggggatgcactggagaggaggccgccctacttcctggggctgcttcagctcatccaggagatggaggcgtgggcggcctccccagtgaggagccagcatgttgtggcctggccagtggccacagtggaaagtgaagatccagttgccgcccaggcagctcctgcctgtggagatgctgctcaggcctcctcagcccaggaagacaccagccaggctgaccctggcgtggaagatgctgctgagactgctcctgccaccaaagaggccgccaggagcacccctgccattagggaaggtgaaaatgcccctgcaggcctcgaaggagccagagggtcttgtccaggcaggaggccaggaggctgaggagccccccgacccaagggggtcttatgttcatactggaggagttggaaaatgaggatggggccaggaaggttggtcagcccaaatcctccccaggcaaataggctcagagg

SEQ ID NO: 12396 - DNA, 572 bp, Homo sapiens
  MAP TO AC018395.4; EXPRESSED IN ADULT LIVER, SIGNAL = 0.63; EXPRESSED IN FETAL LIVER, SIGNAL = 0.5; EXPRESSED IN BRAIN, SIGNAL = 0.61; EXPRESSED IN BONE MARROW, SIGNAL = 0.62; EXPRESSED IN PLACENTA, SIGNAL = 0.57
gcatctacaggcatttctgctgatatgccatatatgtttctgagaaatcattgtacaaaattacatgctagaagtaatggtatatatggaaaaatcagagaaaggtccagtctgcttaaatgctatgaaatcctgtaattaaagcaccaaagaaacaatagcacactaattaaaaaaaaaaagttaaatgtttcctggcattttatctagcattatagtgagtagatcccttgcagtcttgaaaattgaaatcttatctcctttgaaataaaaatcctgaaacacattcactttttttaatacagggatacatctttataatttttttccttagcatttttagctttcccagacttcttaatatgaaagtatagtatttttgaaaccttaataccaatcactacttctataaaagtgaaacagttctttatgattttcaactttttaatcagttgtcctgatattgttaagcctttgacaactgtgataaactctataaaaaaaacaaacaagaaactttgttcctgatatctttaaaacattagtgtgctagaaaatttggaggcatgagc

SEQ ID NO: 12397 - DNA, 520 bp, Homo sapiens
  MAP TO AL157392.2; EXPRESSED IN ADULT LIVER, SIGNAL = 0.52; EXPRESSED IN BRAIN, SIGNAL = 0.52; EXPRESSED IN BONE MARROW, SIGNAL = 0.51; EXPRESSED IN PLACENTA, SIGNAL = 0.48; EXPRESSED IN FETAL LIVER, SIGNAL = 0.46
aacagggcatctctcattggttacctgagttgagtggtcagagatggcagagacaaagtagaagagctgcagaggtataacctttatgccttgcacaaagtcatgctcccagcaaagtcgatacgtactccagcaaagctgaagaacctgcactgcattcagaagaataacacagtgtggagagtaatttcaagagcccataggattataatggcaccaagattgattttttaaatcagaaacccatttctatcttcataaatttttatccccacgagctaattgttttctccttcatttatccattttctctcaaacccactccaattatgctttcacccctccccactctactaaacccactcttgccaaggtcaacgatgactccctgcaatgccaaatccaatggttaattctctgttctcatctaatatcacttgccagccacactttggagtgtgaagaagtgggacacttcattgaaacactttcttcactgggatgtcaggatgccacattg

SEQ ID NO: 12398 - DNA, 543 bp, Homo sapiens
  MAP TO AC024196.2; EXPRESSED IN PLACENTA, SIGNAL = 0.55; EXPRESSED IN FETAL LIVER, SIGNAL = 0.52; EXPRESSED IN BONE MARROW, SIGNAL = 0.53; EXPRESSED IN ADULT LIVER, SIGNAL = 0.68; EXPRESSED IN BRAIN, SIGNAL = 0.55
aaggtggcattgcctatcactgcctttctattatgaacctaggacatattggccactactttctactgagcaataaaaccactagactatttccatctcctgagaaaatgaagatttctgaaaatgtcaaactgatgtgcctctaacctaagaaaagacatagctacatgctgcttcatgatcttagcttattactttctggaactcttttacagcaaaagttaagaactgcccagacagggtcccttacttgttccggtaatcctccaccatgtcctgcatgttcttcagttccgaatccaaccgagattgatcactcttcagttggtccactctccttcggagattgttgatgaatgactcaaagtagggctctaaattatgggttctagtggaggtatctacctgctgcagcagctcccattttgtttgcagtacctggttctgctgctccaggaacctcacctaaaaacacaagacccctttactcctgatgcataaatggagtctcatagccatggagaactgtgcctcatttggaaa

SEQ ID NO: 12399 - DNA, 570 bp, Homo sapiens
  MAP TO AL137225.7; EXPRESSED IN ADULT LIVER, SIGNAL = 0.62; EXPRESSED IN PLACENTA, SIGNAL = 0.67; EXPRESSED IN FETAL LIVER, SIGNAL = 0.58; EXPRESSED IN BRAIN, SIGNAL = 0.51; EXPRESSED IN BONE MARROW, SIGNAL = 0.49
taggcaggggcactatcaaggaaggcatgtgctttcagaaagaaggcattcctcctgcttagaaatctaacctccctggtagagaaacctgggcagaagaggggactctgaaataagaagaaaggtattctggtggcatagtttgctggagctctggccccagtaagcctggtgatcactgcagcatggcactgtccccgcactgcaccctgcagggcactcagcccgctctgcacagtacctaccttgctcgcatgtggatcctagtgaagactggctggcagttctgcaagtcaagagagatttgacccagcttggtctgggagagcacaaaggtagccatgatgttcacgtccactgtggagccactgaggaagccaagcaacctgtgcacacagcaggagggctggctgagctgagcccagggacccaccagagggagggctcagcaagaatggcctgggatgtcacctgccagggtgcacccagagttccaggaaaggtccaggacaaatcgctggtctcttcttctccacctcagtgatgtaagcaacactctcctcccagagc

SEQ ID NO: 12400 - DNA, 580 bp, Homo sapiens
  MAP TO AC013497.4; EXPRESSED IN PLACENTA, SIGNAL = 0.61; EXPRESSED IN FETAL LIVER, SIGNAL = 0.6; EXPRESSED IN BRAIN, SIGNAL = 0.47; EXPRESSED IN BONE MARROW, SIGNAL = 0.46
gctgccaccctaaattatgcaatctctttactagtaaaatgacttttctgttgttttgtgatatccacagagtatgctcagccactggtaggaggaattgttggtacacttcatcaaagatctacctttaaaccagaagaaggaaaagaagcaggctatgcagacctagatccttacaactcaccagggcaggaagtttatcatgcctatgctgaaccactcccaattacggggcctgagtatgcaaccccaatcatcatggacatgtcagggcaccccacaacttcagttggtcagccctccacatccactttcaaggctacggggaaccaacctcccccactagtgggaacttacaatacacttctctccaggactgacagctgctcctcagcccaggcccagtatgataccccgaaagctgggaagccaggtctacctgccccagacgaattggtgtaccaggtgccacagagcacacaagaagtatcaggagcaggaagggatggggaatgtgatgtttttaaagaaatcctttgaagatgatgctgctttttacaaagcatcgttttaaagcaca

SEQ ID NO: 12401 - DNA, 565 bp, Homo sapiens
  MAP TO AC009597.4; EXPRESSED IN BRAIN, SIGNAL = 0.55; EXPRESSED IN PLACENTA, SIGNAL = 0.51; EXPRESSED IN FETAL LIVER, SIGNAL = 0.61; EXPRESSED IN BONE MARROW, SIGNAL = 0.53
ctgaaacggcacagtcaaaggcatgcatggtctgctccccaggctggctgtaggagtagtgagatgcagtcattgctgttgttgaaaattataagtattttgagatgtttgatctttttatttaaacaaaaaggttctcctgtaggtgggaggccaaatctatgcagcagatgtagctgggtaggggaagttgatagtgactgacgtggtgatggtggtttacagtttattttaggtgcatttacacacatgagttttctattttctttttgaagataaggaaaatagatttaaactgtttatttaaatatatggcttctaaaatgtaatgtataaaaatacatagaatattaatttttatttattcacttgttcagatgtttgaagttgagaaacatttatattctttctaggagtataaatctatatttttgtcaataggtaaggaattactgcaggaaaatagtgctgttctggagactaagcactgtgtgtctcttgggcagtctctgtatttctcagaaaagacagtatatcccctgtatgtgcttcagggaaaaagcag

SEQ ID NO: 12402 - DNA, 547 bp, Homo sapiens
  MAP TO AC022020.3; EXPRESSED IN PLACENTA, SIGNAL = 0.49; EXPRESSED IN BRAIN, SIGNAL = 0.47
tggaaggttcctggtgaaaggactgatgcacatccacatagccttgcattccaaggtgatccactggaccgtctagacttttatctctggaccctgggagttgcagacactgtatcagaacctccaaccttccccttggcctgccagaaagctgaaagtttccatgcctctgctttccagctctttctctgctacatcagagagcccctttctcatgtcctcaaagtgacaaatgtatgctgccaagcaaggctgagggaaagaaggaaatagaaatgcagtccccatcatgcattctttcccaaaatgcgactaatctggcatttaggttgtttgctcctttaatcagaatgccattaagaaatctctgccgggtttctgtacacagtttttctctaatgaagcatcaaatctctttcacaaacaatagctgtgtcacatccaagcaccctggccccagccggtgtggctgcagtctctgctaaatgtgctgcctctttcaggtctgttcctcccagaatagcccgccactgcggtactcaaatca

SEQ ID NO: 12403 - DNA, 521 bp, Homo sapiens
  MAP TO AL158150.2; EXPRESSED IN ADULT LIVER, SIGNAL = 0.67; EXPRESSED IN LUNG, SIGNAL = 0.85; EXPRESSED IN PLACENTA, SIGNAL = 0.91; EXPRESSED IN FETAL LIVER, SIGNAL = 0.87; EXPRESSED IN BRAIN, SIGNAL =   1; EXPRESSED IN BONE MARROW, SIGNAL = 0.74
gcatcactgtccacatctccctaccaagatttatgataaaacagagaaaccatgtcttctctccgaatataccgagaactaccctttctatcactcctacctgcccagagagtccttcaagccaaggcgggagtaccagaaagggcctataccaatggaaggcctgactacatcaaggtgagggcaaacagtattaatgtatgcaggtacatacaacactaatggagtaacatgcagtgctaatgtataatattaatgtaatgtgcagtgctaatgcattaatgtgcagtatcaacatatgatattaatgccttaatgtactatatctctgaaggaatatcctgcatttatgagccttctcagttttttccaaattctctgttaaagagaaaggattcttgcttgctgaagtaaagggtggggaaaggctggattaatctatataatataggattggaggttaagaaaaatatttaagggatggaaagagtgggggatgttgctgaaaagcaagttttggg

SEQ ID NO: 12404 - DNA, 577 bp, Homo sapiens
  MAP TO AC018528.3; EXPRESSED IN BONE MARROW, SIGNAL = 0.73; EXPRESSED IN FETAL LIVER, SIGNAL = 0.7; EXPRESSED IN BRAIN, SIGNAL = 0.67; EXPRESSED IN PLACENTA, SIGNAL = 0.77
atggcagctcccacattaaggacgagctcagtgtagctaaaaaaccaaaaccaaaaaaatctgtctgaaaatatctgaagcagtgtgggaaacaataaaaaagaaatatcaactctaaagaaattcactgcagaaggttatatgcctaagtaacatataaaaattgccccctgctttgttcatattcgaactctctctcacagtcctcctcctctgtacatcctatttctgaagtttgaaaggactctcttgggttttctatggtttttttaatagcaaaaaaaaatgtatatatatattttttaggcagtttcaagtaaagttagatctgcagcctcactcatcaaagacatcatttttcaccaaagagcaggcttctggatttgagctatcctttctctcctcacttgaggagttcaccattgctgctgactctctaaaggtgaggatgcaagttctggttacctacaagggaagtgggagctgaaactcagaggctttgtgtctgtgtagagtgagccacactgctctgcaaggcacccagggcacccctgctgccacccatgttctcgaaaat

SEQ ID NO: 12405 - DNA, 569 bp, Homo sapiens
  MAP TO AL136313.3; EXPRESSED IN PLACENTA, SIGNAL = 0.62; EXPRESSED IN FETAL LIVER, SIGNAL =   1; EXPRESSED IN BRAIN, SIGNAL = 0.81; EXPRESSED IN BONE MARROW, SIGNAL = 1.1; EXPRESSED IN ADULT LIVER, SIGNAL = 0.75
aggatcaaaggatccccaaggattgcctttccccgcatttccttctcggatggacttatttccgttctttttagttttgttcaccctaggatattatgctcaaaactaatttacatgctcagctaatcttaattaaaatgtaaaggcagatcagggcacgatcaaattaagttctgaatatacttggatagttgggcatcagtttaatggattaaacagttcttggaattgcttctctttcttgacagtaagtcttagttttgctgtcatttcttaatagtcccttttacttctactttcaagctgtgactgaacattctcttttaacttacagactcttttgctatctggaaacccatgtccacctctgacttccactcaaaattgctttcctcacagtctgactgcgagagttgtgaaaaattgggatgtgcttctgaggtgggctgtggaatgccatgtaagttgctacttttttttttctgaatgcagtgggtattcatgcgcagtagggatgttggcatatctctgatgtttccttctaaggctggtgaatctgggttgttgct

SEQ ID NO: 12406 - DNA, 579 bp, Homo sapiens
  MAP TO AC019276.3; EXPRESSED IN BRAIN, SIGNAL = 0.52; EXPRESSED IN PLACENTA, SIGNAL = 0.61; EXPRESSED IN FETAL LIVER, SIGNAL = 0.5; EXPRESSED IN BONE MARROW, SIGNAL = 0.57
tggcgacaggtacagatgacataattatcgatcagatgacttatctccctaatggagctgggatattcttagtaatataattaagtataggataattttacaatactgtaggctgtgccctgctcccagagtaagcactaaggaggcagacctctccctccaaggaaggactctctatcggttggaggaggccaaaggtaaaagaggcccaggtcatcgcgggacaggtgtcgtctaccctgaatctgagaaccaggcatgagcctaggtcttctaagcgttccagttggaccctccacgctggatgatgacaatgatggtggttttggcagtggtgcttgtgacgctgaaagtaacggtggttatggtgatgatggtgatgacagcagctgccatctgccaagcacgcacagtgtggccagatgtgctaggcgctctacaccctttggcctatgtgatcttcacaccaaccctgtgaggcaagttattcttctcatctccactttacaaatgaggacgctgcagctcagagtttacctggccagagcacagcgaagccgagagctgaaccctaacccc

SEQ ID NO: 12407 - DNA, 594 bp, Homo sapiens
  MAP TO AL121898.10; EXPRESSED IN PLACENTA, SIGNAL = 0.53; EXPRESSED IN FETAL LIVER, SIGNAL = 0.92; EXPRESSED IN BONE MARROW, SIGNAL = 0.83; EXPRESSED IN BRAIN, SIGNAL = 0.73
tttcttcctgatgccaatccacagattattctttccatggtgaaataaggttacttggacaatttattggaactgagaatctttagtgcactgtttatcggaactgaaaatatttggagaatgtagtttattggaaatgacatccctggaagctaaacaaatgaatgcataaactgatctagagaatgagacctagaagggttcacccttctccccagcaccctagtgtgacaatacaaaacactgatgtttcttaaacttgattgcacttcatcatctcctggagagcttgttaaaacatagatttctgggccccatccccagagcttctgatccagtaggtctggggtggggtctgacaacgtgcatttccagcaattcccaggtaatgctgatgctgatggtgacaaccaatgctgtatacccggtcttctggacctatgtcctactatagttctggaatggcatatctatgaatcaactaaaaagaaatctatttatttcactagctacaccatcagtattaataacaataagacaggtcaaaagagaaaatgtcatgattcttagaaacaaagacggacaaattgttcc

SEQ ID NO: 12408 - DNA, 539 bp, Homo sapiens
  MAP TO AC019184.2; EXPRESSED IN PLACENTA, SIGNAL = 0.65; EXPRESSED IN FETAL LIVER, SIGNAL = 0.68; EXPRESSED IN BONE MARROW, SIGNAL = 0.65; EXPRESSED IN ADULT LIVER, SIGNAL = 0.68; EXPRESSED IN BRAIN, SIGNAL = 0.58
tggcctccctaacaaaacacaaaagccagaagacttaaaggaaactacaaaatgaaaactatatatgacaccaaaagcacaggcagtaagaaaattaaaaaatcaaacttcatcaaaattaaaaacttttgtccatcagaagacattatcaacagaatgaatggaatccacacaaagaaataatgagcactgattaaagtcactacataggtaaataaaagataatatacactaaaaaaaaacagagtgaaaaagcaacctataggaagggagaaaatatttgcaaatcatatatctaacaagacattactactcataatattataaagaactcctacaactcaacaacaaaaaacctgattgaaaactggacaaagaacttggatagacatatctccaaagaaaatatacagatggccaaacagcacatgaaaagattactattactaatagcagcatatgaaaagattactattactaacagtaatagcagcacatgaaaagattactattactaagatatagacggccaaacagca

SEQ ID NO: 12409 - DNA, 539 bp, Homo sapiens
  MAP TO AC020906.3; EXPRESSED IN ADULT LIVER, SIGNAL = 0.62; EXPRESSED IN BRAIN, SIGNAL = 0.66; EXPRESSED IN BONE MARROW, SIGNAL = 0.55; EXPRESSED IN PLACENTA, SIGNAL = 0.64; EXPRESSED IN FETAL LIVER, SIGNAL = 0.65
gtgcctgtaacaccgtgatgctccctgggcctcctgaccgcgccctcgcctgggaggcggggcgggccgggttctctctgtgacgtcacaaaggccccgccatgcctctggctttgacccttctgctgctctcgggcttgggcgcccccggaggctggggctgcctgcagtgcgaccccttggtgctggaggccctgggtcacctgcgctccgccctcatccccagtcgcttccagttggagcagctgcaggcgcgcgccggggccgtgctgatgggcatggaggggcctttcttccgggactacgcgctgaacgtgtttgtggggaaagtgggtgcgtgttgggagaaattgggcagcggggctgggcgagggatgccggagaccacgcccccaagaggggtcggggccaggcctggagggggtgaggtcacttggctctctggggggctcactggagtgtcctctcccttctccccccagagacaaatcaactggaccttgtggcgtcctttgtcaagaaccaaacgcagcacttaa

SEQ ID NO: 12410 - DNA, 588 bp, Homo sapiens
  MAP TO AC024575.1; EXPRESSED IN ADULT LIVER, SIGNAL = 2.4; EXPRESSED IN PLACENTA, SIGNAL = 0.83; EXPRESSED IN FETAL LIVER, SIGNAL = 2.5; EXPRESSED IN BRAIN, SIGNAL =   2; EXPRESSED IN BONE MARROW, SIGNAL = 1.3; EXPRESSED IN LUNG, SIGNAL = 1.5
catcatgcttcatgaatggggaaactgaggctcttggctctacccttgcctgcccctccccctgcttctcatgggggaaaaaaaaaagacagcagccatttctgaagaagcatttattagcatgcagggcccatgctagaggctccttatttccagggcaaggccagcgagacagagcccattgctcaggacgcagcccagattgcaaagagaggacagcccatggtagcggaagaaattctggcggagagcactgtacttggggtccttctctcgcagctggcggtagggatcgggaccctggtggctgcctggtacctccccacccaggcctcgctccttctccacggtttgcagggcccacatggcagctgtggtgcggggttccagccagcgggcgttgacagtggccagcgtaaggctcaggaacagcaggtaaagctggcagggagagcagaggagaaggtgagccatgcctgggaggccagaggggccctagggagggtctttctgcatcctcaacagcacaggggtgggggtggggacagcactggatcaaaaaacctgcctccccctctttccttgaac

SEQ ID NO: 12411 - DNA, 525 bp, Homo sapiens
  MAP TO AC016614.3; EXPRESSED IN ADULT LIVER, SIGNAL = 1.1; EXPRESSED IN LUNG, SIGNAL =   1; EXPRESSED IN PLACENTA, SIGNAL = 0.89; EXPRESSED IN FETAL LIVER, SIGNAL = 1.4; EXPRESSED IN BRAIN, SIGNAL = 0.9; EXPRESSED IN BONE MARROW, SIGNAL = 0.77
caagccaatttggttcaaagttttaaaatgaagaaaaaaattgtataaattgaagttttaagcatagtttaatgaaatcagctagtctaaattcaatattttcactcagttcatcaaattatttgaaaagtaaacacgtgggctgtacagagaacagtgaatcctcccctaccctgagctatcactcctgcttgtggggcacagagaaggcattcagacctgtgcctgccaccaccctacccccagccaacaccacctccagtgtgactgtgcacacaggctccagcaagggcctcctgcccacctctgtaagctgcattgcctctgccactctggtgaacatctgcaaggaggcaggcacccccacacccactagcacttcactgcagctgtcccatctcagcacccctagctgagtggattccaaaacttgaagagtgagaagacaaagtttgggcctcatacaagtcccccagagttagtgcacacagtccagaagttgggagctgagtgttggacccctaa

SEQ ID NO: 12412 - DNA, 517 bp, Homo sapiens
  MAP TO AL049870.3; EXPRESSED IN PLACENTA, SIGNAL = 0.46; EXPRESSED IN FETAL LIVER, SIGNAL = 0.52; EXPRESSED IN BRAIN, SIGNAL = 0.54; EXPRESSED IN BONE MARROW, SIGNAL = 0.48
caaatgccggaagttcattcatacacacaaattgtttaaaactcagaaatcattgctaatgagacttttaaaaatccataaacatatgcaatttaattattaagttaaatacctgttcatgtgggcaggaccatacccaccaatggcatatatcattccatccaataccgctgcagcaaaacaacttcttgttgtcgtcattggtgccacaggttgccattttcttattttgggaatgtacttctctacagattgtaaataagattgtccatcataaccacctaaggcataaagttctcctgcaagtactactactccaagagtacttcggctttcattcattctctctagagaagtccaagtatttgtatcaggattccagcattccactgaattttcatgttttctgatagtgacgccaggacgcacattagttgcaataccacctataacatatactttttggtctaaaacgcatattccaaattcatagcgaggaatgtttaggggtgccaaa

SEQ ID NO: 12413 - DNA, 538 bp, Homo sapiens
  MAP TO AC018845.3; EXPRESSED IN PLACENTA, SIGNAL = 0.64; EXPRESSED IN ADULT LIVER, SIGNAL =   1; EXPRESSED IN FETAL LIVER, SIGNAL = 0.76; EXPRESSED IN BRAIN, SIGNAL = 0.71; EXPRESSED IN BONE MARROW, SIGNAL = 0.62
cagccttctctccatccaagtgggtggaccacggggcagggcagaggagccggcagcgtgaggatctggcaggcccagcagtggcagagggaagggaggcccacgtactcgcccatgtagcccttggaggtggagtggaaggaggcgagctccacgttgctggagtactcgggccccatctcgtacagcaccttcttgaaggagtggaatctgcaatctggagagtacacgttgtcctggtacacctgcgggggcacggcagggacggtcaccaaagggtcctcaaagaggctgctgcccagtgtggccaaggcaagggagggcacaggtgctgtgggccatgaggcccagccggcccagcctcctgtgccattccagggatgagccaagtgtgcctgaaggaactttctggaataagcaaggaggcaaggcctcaggctggatgctgagacagctcaggagctcacttgatttctctcacactcgtccccacccaatccccagacttcccttccaccccatctgaccagtgatggtg

SEQ ID NO: 12414 - DNA, 501 bp, Homo sapiens
  MAP TO AC021782.2; EXPRESSED IN BRAIN, SIGNAL = 0.55; EXPRESSED IN BONE MARROW, SIGNAL = 0.45
tccaaaatgcatgtagcttcctctgcctgtttcctcatctttaaaataagggtagatcattacagctccgcacaccccatgtttctcacagaaaaccaaacaagataaagaaggttaaaatgttctgtaattgtaaagtaatatgtaaatgcagcatataatttaataaagcaatcaattatttataatacctactataagcagaaacaatcataataacctaaatgattatatttttgttgtgattaggcacggaagaagatgtagtaaagtcaaagaaaacattcagaagtcaagcaatagtgaaccaaaatgcagagacagaacttatgctggaaggagacgatgatgcagtcagtctgctacaggagaaagaaattgacaaccttgcaggtaaattttaaaatatatttttcctatttgttgtaaataaacacaaagctactgaattcaaaatctgtctcctagtaaataaatgtgtgccaatggttgtaacaatgc

SEQ ID NO: 12415 - DNA, 573 bp, Homo sapiens
  MAP TO AC012571.3; EXPRESSED IN FETAL LIVER, SIGNAL = 0.56; EXPRESSED IN BRAIN, SIGNAL = 0.52; EXPRESSED IN ADULT LIVER, SIGNAL = 0.73; EXPRESSED IN BONE MARROW, SIGNAL = 0.54
ggagttggtggtaccattgtgaataaaacatgatccctgctctaaaattagaattccaaagtagagaaagatataaataaatcaggaagtatgaaaataatgtgattaatgctatgacagaggaagtgcatagtgctatgagagttgatcagagagtcagctaacctgttctcacacagtaagaaagtgaaccctgaaatgtgagagagaagaggccatgaatccagtgacaggtggggtaagtgtcctgggcaggaggagtagtatacgaaaatgtcttcgggcaagtaagaatggggtcatttcttgtaattacaagatgtttcttataacttaatgatctcatcttttttcaggttgtggtaaacgagttgttccattaaacgtcaacagaatagcatctggagtcattgcacccaaggcggcctggccttggcaagcttcccttcagtatgataacatccatcagtgtggggccaccttgattagtaacacatggcttgtcactgcagcacactgcttccagaagtaagttattgaccttaagttagaacccacttctgctaaaaagcc

SEQ ID NO: 12416 - DNA, 572 bp, Homo sapiens
  MAP TO AL109915.9; EXPRESSED IN PLACENTA, SIGNAL = 0.55; EXPRESSED IN BRAIN, SIGNAL =   2
gcctgtgttgctcctcctacattccccaaatattctctgggctagttctaatctggccgaaaagctaaataaacctaaaggtgacagagagctctggtaccacttttatacagacactggagagcaggaacctaaaggcaggagttctgaaggtagcaacatgaattctaatgttaaaaaacgtgaaaatcaaatgggcctgatgcattgcaatctctgctataaaattactaaaattaagtgaagagaaagttgatgaatttagtgaagataaatatacatgaataaacattgaaaaagtacttaaacactctgacatgctgttacataacggaaaaaattttaaagaccttaactcccaagtaattttagcaatcctgaaaaaatgaaagtagcagcgagactaactaacctccaaagagatccacttcagcagtgacagcagtaacagttgtagtagtggaggcagaagctgaggcagttgcaatttcagcagttgtagtaggaggggtaggttctggtgcaaatggatctgaaatctgtgcttcagagggaacagaggaaagtgcagc

SEQ ID NO: 12417 - DNA, 555 bp, Homo sapiens
  MAP TO AC008433.3; EXPRESSED IN ADULT LIVER, SIGNAL = 0.56; EXPRESSED IN BRAIN, SIGNAL = 0.54; EXPRESSED IN BONE MARROW, SIGNAL = 0.54; EXPRESSED IN PLACENTA, SIGNAL = 0.52; EXPRESSED IN FETAL LIVER, SIGNAL = 0.53
ggcacctaaagcatccactgcagaagtgattccaagtctatattcagacactagataaatactacaagaaatatcatgagtttggtgtctaactggatctactggaggtaaactcctgtcaaaaacatgtctcatataatctggcagtctgaacagtagaccacagtggccattttattgtttgctttcttctagggttcccatgatcaattaagtactactaaagagtcatgtggtttggattattcagtttaccagattgattttgctgtcattatggtaacgggccatcttagcttttaatagttggcactattaaactaactgttagctaaactgcttcttggcctttgccatcccctaggtattctctttccatcaaaattatggaggccatttaaatcacagtacttcctaccagcattcccatagtagagaaagcagccaccaccatgctttgcaaagatgccagtgatctcctcacctatatacagttacttatcaaggctttgatggagaaaacgttgcaaggtcagtcagtattgggcaggtggt

SEQ ID NO: 12418 - DNA, 530 bp, Homo sapiens
  MAP TO AP001256.2; EXPRESSED IN LUNG, SIGNAL = 0.93; EXPRESSED IN FETAL LIVER, SIGNAL = 0.8; EXPRESSED IN BONE MARROW, SIGNAL = 0.63; EXPRESSED IN PLACENTA, SIGNAL = 0.76; EXPRESSED IN ADULT LIVER, SIGNAL = 0.77; EXPRESSED IN BRAIN, SIGNAL = 0.83
aggaagatcaagagcatggcactggtatctggagatggtagaaggcatcacatagggagtgagcacctgagacagagcgagacgctgggggctgactggctttataatgacccctctcctgataactaacccaccctcacaacaatgacattgtatccattcatgatgtctctgccttggtgacccagccacttcttattcggccctacttcccaacattgttgcaatggggattaaatttccaacccctcaactttttggggacacattcaaaccataggatagaaactggtaatgcaggctatcatatatattttagaaatatactaaatatccaaagcaatgtttacttgcacctaaaaatataaacttccttatcttcaatgctcatgattatttatagctttgttttcccccttttcaataacaagcttctcagaagaatcccccgtacttgatgtctcaatgtccctgctatccacacagcatttagtacttcctgcattctaccctccctcttctagtgccaa

SEQ ID NO: 12419 - DNA, 561 bp, Homo sapiens
  MAP TO AC018501.5; EXPRESSED IN PLACENTA, SIGNAL = 0.54; EXPRESSED IN FETAL LIVER, SIGNAL = 0.5; EXPRESSED IN ADULT LIVER, SIGNAL = 0.59; EXPRESSED IN BRAIN, SIGNAL = 0.54; EXPRESSED IN BONE MARROW, SIGNAL = 0.55
caaaaatgtgtggtgcttgggtgatggacgccctagataccttgactggatcactaggcactatatacatgtaacacaatttcatatataccccatacatttgtacaaatgaaaaaaatataagacatgtcttctgctaattatagatttcacttctatatgttggaattctgcccggttaacataactcttatattttcggaggtgtgtttttgagtgaattgcatataaagacggcctgatcagatagaacactgtccatctacatttcagaaggtcccgataccttggtctactctggctacttctgtaggacagcatattcgtcgactaacgtggacagtgaaatatcgggggagaacctgcccccccatggtagctagagtgttctggaatgcaccagcgctgccgtttctggaggagcagtctgtgctgggctctgctttacctcgggaagggcagattggatagtaaggaatagctcgtgtgtaatcagtgtgcggaaaataaacactgtatgtgcatgatctcactcaatcctcatcacagcatggtaggtgg

SEQ ID NO: 12420 - DNA, 501 bp, Homo sapiens
  MAP TO AL121673.27; EXPRESSED IN PLACENTA, SIGNAL = 0.83; EXPRESSED IN ADULT LIVER, SIGNAL = 0.86; EXPRESSED IN FETAL LIVER, SIGNAL = 0.83; EXPRESSED IN BONE MARROW, SIGNAL = 0.85; EXPRESSED IN BRAIN, SIGNAL = 0.81
ttcccttttctgaatggaggggccatgtgaccacctgtttgctcagccgtggatgctgcttctgcacaggggccgtttgctctagaaagttcacaggaagcaggctgctgggctcagggagtgcagagtggtgggaggaagctgttcaagctgcccaaagctttccggttcttggcacaccccccgtcccccgcgcccccagcaggatggaggattcccagcctggggtcctagtcaggcctcaggtagccgactgtctgggccatcctctccagcctgacatccttgtctccccggcagctgtggagggtgcccctgtgcccacctggccagcaccacctgcccagctcagagaaggggctgtggctgccgcctgccacgtagggcagattgcttgcctggaagggctgttcttgacttcctccttccaaggaggccctggagtggctctgtgttctcagtcctgtgctggcctcaatgggggtgaggatcagtgcaact

SEQ ID NO: 12421 - DNA, 548 bp, Homo sapiens
  MAP TO AL132866.21; EXPRESSED IN ADULT LIVER, SIGNAL = 0.63; EXPRESSED IN BRAIN, SIGNAL = 0.6; EXPRESSED IN BONE MARROW, SIGNAL = 0.64; EXPRESSED IN PLACENTA, SIGNAL = 0.77; EXPRESSED IN FETAL LIVER, SIGNAL = 0.62
ataaccccacctcccacttctctggagtatggaagaggtcagagggatcacccccgtcttccccaacaacaagcctacccatgatagacagcagctgcaagggcctgccctcccttctccacttggcacggagcagttcccctctcctcctgctcagcctcattcccgcctgagcccagcctcctcggtgttgtcagcttcaactccactttccctgcaggggtagagctggcgcctgcttccctcttatgttagtttcctaggctgtcataatcaattactgcaaaccaggtggcttgaaacaacagaaatgtgttctctcactgttctggaggccagaagtctgaaatcaaggtgtcagcagggttggttcctgctggagactcaggggagaaaccgccggtgccatccccgccagcttttggtgcctgctggtctccctggccttccttggcttgtggctgcattgctccagtctctgcctctgtctgcacatggccttctctgggtctctgtgtgtatctttttctgttgcttacgaggatgca

SEQ ID NO: 12422 - DNA, 544 bp, Homo sapiens
  MAP TO AP001436.1; EXPRESSED IN ADULT LIVER, SIGNAL = 0.7; EXPRESSED IN PLACENTA, SIGNAL = 0.67; EXPRESSED IN FETAL LIVER, SIGNAL = 0.61; EXPRESSED IN BRAIN, SIGNAL = 0.7; EXPRESSED IN BONE MARROW, SIGNAL = 0.55
tcggatctgtcttgagggagttgcttcttagaaatttctgtactgagtcagattcttcataacttttctttcacgctaaaaggtaaaacatgagtgactttaaaaatctttctattcattcaaccttttgtcgctgagtacacatgtggctggtgaaatttgctagtgactcaaccagaaagagagcgggagagaggacgaagagaggagtagagggagcgacccaaatcacattttctagaaggtcatacctctgagtagtaaccttggttcagtgagaccactcacccatggagctcctgtgtaatttgaggtcagggtgtgtgatgctggtctcagttggttgctgaatgggatgaacaccagctgccctatttcttcattaaggggaaagaagtctgtcttgtgcatacactggggactggccttggcccatcacattactgtcctgttgcttctttcattccacaaatgttatttgttcaggtggtcaccaggtagacaatagaaggggaggggtggctcgcaaggatggtggattagt

SEQ ID NO: 12423 - DNA, 519 bp, Homo sapiens
  MAP TO AL121911.10; EXPRESSED IN ADULT LIVER, SIGNAL = 0.56; EXPRESSED IN BRAIN, SIGNAL = 0.53; EXPRESSED IN BONE MARROW, SIGNAL = 0.52
ttacttcccccattttgtgggcagactgtttatgtcccccaaaatgtatttgttgttattctgatccccaatgtgatggcaggaggagataagatcatggagagctaattaggttaagagtgtggagccctcatgaatgggaccagcacccttacaaaaagagacacaataacttgctctctctctctctctctctctttctgtttctctctctgtgtctctctgctttccaccatgtgcagttacaataagaagacggaaattcgcaaaccaaacactgaatctaccaataccttgatcttggactttgcagcctctaaaactgtgagaaatgaattgttgtttgaactacctagtctatgatgtttttgttatagcagcccaaactgactaagacaccccacctttgtacatggctaactcccctacccccttcaggtcttttatcaaatttacattatcagtggggtctacaaacaaaataccatttcagaattccccatattccaccttgcagct

SEQ ID NO: 12424 - DNA, 576 bp, Homo sapiens
  MAP TO AC008506.4; EXPRESSED IN ADULT LIVER, SIGNAL = 1.2; EXPRESSED IN FETAL LIVER, SIGNAL = 1.2; EXPRESSED IN BONE MARROW, SIGNAL = 0.94; EXPRESSED IN LUNG, SIGNAL = 1.2; EXPRESSED IN PLACENTA, SIGNAL = 1.1; EXPRESSED IN BRAIN, SIGNAL = 0.97
ccattaataacagcaggcggtagtattgtaatattatggcattaattttatatggtaataaagattcatgtcaacctcagttaaggatttaacctgttctcagagtgaacattaatgctgtagtgtgtgttttaggcatgtgaggctcagctcatcactggtttctgagctttgctgtctgacttgggtgttgaggaggggctgctgggaaacctcggtgccctcctcagccttgagcatgttcagggcaggatccttgaagccaggaaggtagctgagcagctgtgtgaagcagatgcttggtgagatggtaatggcctggaggaagatggggagggttgggagacaggactgtgggttcagtagggagggaccaggtgtccccagtgaggggcatgggctgcccttaccttgagggcagtgagaccagtttctcaatttcccagaaggttgcctcttcttcacttccccagcttcctgatgataagcccataatattttcatttgacaaatgagaaaccagagctcaaggaagttcagggacttgcccggcctgccgagtttctctttggcaaa

SEQ ID NO: 12425 - DNA, 529 bp, Homo sapiens
  MAP TO AP001425.1; EXPRESSED IN ADULT LIVER, SIGNAL = 0.67; EXPRESSED IN PLACENTA, SIGNAL = 0.65; EXPRESSED IN FETAL LIVER, SIGNAL = 0.62; EXPRESSED IN BRAIN, SIGNAL = 0.68; EXPRESSED IN BONE MARROW, SIGNAL = 0.59
aagtcaccatcacccaggacgctcttcagatggccttctgactgatagttgggcgggaggggctggggcaggcagtcttcattttctgctttcctctttagctgtactttcgagtcctcgtcactgtggtccctagagaaatctcccaactgcatggtgtccagcaggttttcagccatagattttaattggctcatggtatctttcatgacctgttttatttgtgcattcaaaggtttccagcttttctttctctccttcctttcctgtactgtctgcttccatcttgcaatttcttggtcgagcacttctggactttctgctaaatgagtgttttcattcaaactgttatttccttctgaagtttttctccatccttctttgatccttttaagatgtgtcctgaatcagtcacttgagaacatttaggagactcacttttccatgctttttccagaaagccgcctgtgtcctgcagggaagacctgctcagatttgtattaatgattgacaagcagggggattgtaa

SEQ ID NO: 12426 - DNA, 592 bp, Homo sapiens
  MAP TO AL138956.3; EXPRESSED IN PLACENTA, SIGNAL = 0.98; EXPRESSED IN BONE MARROW, SIGNAL = 0.92; EXPRESSED IN FETAL LIVER, SIGNAL = 0.85; EXPRESSED IN LUNG, SIGNAL = 0.84; EXPRESSED IN ADULT LIVER, SIGNAL = 0.75; EXPRESSED IN BRAIN, SIGNAL = 0.77
ggccagggagagtctagaggacatgtcatggctgtcatttttgtatctcttttgttagattcctgatatcatttatggtcacaggtcattttgctgaaaaggaggaacgtgggatcaagttctgtgacttcagagaagagttgcgtgtacaaaactttgggagaggatcaccacagagaggtgataagagcctacttgatctttttcttcttcttcttaaaagtgataatatgagcataaaactatttacagctttaaacagcttcagtactaaagcgtgcataacacattcctctcaactgaacaatacacaagcaggcattctggagattttattgcagcagattggtgtgattataagtaagaagattggcatagttagctctctggaaaaagacttaacccaggttaacactttaatacgaataattttttctctagttaaaaaaaaaggtttctgaatgcattttctttgcttaaactccactgcatcttactgtatccaatcctacatctttgtctttattcacatgtgtatattcaatcctatatctcaaatatgaaaattatctccatcccttcttgccctgtt

SEQ ID NO: 12427 - DNA, 595 bp, Homo sapiens
  MAP TO AC007956.5; EXPRESSED IN PLACENTA, SIGNAL = 0.84; EXPRESSED IN LUNG, SIGNAL = 1.2; EXPRESSED IN FETAL LIVER, SIGNAL = 1.1; EXPRESSED IN BRAIN, SIGNAL = 1.5; EXPRESSED IN BONE MARROW, SIGNAL = 1.4; EXPRESSED IN ADULT LIVER, SIGNAL = 1.3
ttgtccactaagctatttattctgttctctagcctccagggtcgtatagacctccccctcctatgggcaaaccaccaggttcaattgtaagaccctctgctccaccagcaagatcatctgttcctgtgaccaggccacctgtcccaataccaccacctccacctcctccacctctacctcctcctcctccagtgataaagccacaaacttcagctgtagaacaggaacgatgggatgaagattctttctatgggctctgggatacaaatgatgaacaaggactgaattcagaatttaagtcagaaactgcagcaattccatctgctccagtattaccacccccacctgttcactcttccattccccctcctggcccagtgcctatgggtatgccaccaatgtccaagccaccaccagtacaacagactgttgattatggccatggccgaggtgagtaatgatagtgcacttgtatttgggattctacaggaattgttagcttcagctttagctttctctagcttcactcttacagtactttatctctgattttgtttaccagatatatccactaataaagttgaacagatacctt

SEQ ID NO: 12428 - DNA, 554 bp, Homo sapiens
  MAP TO AC013662.3; EXPRESSED IN PLACENTA, SIGNAL =   1; EXPRESSED IN ADULT LIVER, SIGNAL = 0.84; EXPRESSED IN FETAL LIVER, SIGNAL = 1.3; EXPRESSED IN BRAIN, SIGNAL = 0.95; EXPRESSED IN BONE MARROW, SIGNAL = 0.76
tgtcatgtctgctctccaggttggtatctgatgaaatctcccagttttactttaattggcattggcaacatgcggtccctgataaaaagcatattttctttcgagattacaatcatcagttgggctcatttttcttggcccctccatcgagctgaacttctttggaaaaagaaacagcagcttgtgggttactaaatgccagagagctgaacttaaaaaaaaagagagaggaaaaaaaatcacaaaggaaaacaacttaaaaatacatttagaaagcctgcgtgcatgcatgcgtgtgtgtatgtgtgtgtgcatgagaacatagacttgcattaatcactcagttcacatatgatatatatgcagaactagtgtgtgtatgcaaaactcttaaagggcatgatttttatccatagcctatttattccaaacatagctaaatgaggaggccaaatatagaaagtgatgctccaggggccctacagcctatatagaatttaaactcaaatgatttgcaaaatcactactaagacagcttgctcatactgtcagcg

SEQ ID NO: 12429 - DNA, 501 bp, Homo sapiens
  MAP TO AC025226.2; EXPRESSED IN BRAIN, SIGNAL = 0.85; EXPRESSED IN PLACENTA, SIGNAL = 0.48
tggaatggaatggactcaaagggaatggattggaatgatatggacttgaatggaatggactcgaaaggaatggaatcgaatgaaatggaattgaatggaatggaattgaatggaagggatttgaaacgaaaggaatggaattgaatggaatggaaactaatggaatggaatggaatgcaatggaatggaatcgaatggaatgtaatcgaatggaatggaatcgaatggagtgtaatagtacagtctcgaatggaatggaattgaatggaatggaatcgaatggaatggaatcgaatggaatggaaaggaatggaatggaaccgaatggaatggactggaatggaatggaatcgaatggaatggactcaaagggaatggaatggaatggaatggacacgaatggaatggattcgaattgaatggatgcaaatggaatggattcaattggatggactcgaatggaatgcaatcgaatggaatgcaatcaaacgggatggaatc

SEQ ID NO: 12430 - DNA, 573 bp, Homo sapiens
  MAP TO AF241730.1; EXPRESSED IN BRAIN, SIGNAL = 0.56; EXPRESSED IN BONE MARROW, SIGNAL = 0.51; EXPRESSED IN PLACENTA, SIGNAL = 0.51; EXPRESSED IN ADULT LIVER, SIGNAL = 0.6; EXPRESSED IN FETAL LIVER, SIGNAL = 0.88
cagccaaaacttgaaacaacctgaatttttatcaacatgagaaatggtttaaaaaaattctgctatgttcttacagtggaatactacatagcaataaaaaagaaagaactgatgcacaaaacaacatggatgaatctcaaaacttatggtgaagaaaagaagccagatgcaaaggagcacattgaaggggtactaactgtgaacaagcagaaggaaaatttggaagatgatgaggaaatttgccttgttttgattgtggtggtgtttgtatgggtatttacatttgctaaaactcatgtacacttaaatttttttttctatctcacaaagtcgattttcaaattaaaaagaagcataatttaaagttatcaagattgatgcttttgcaagatgtgccatgcttattcctggggtacgtgtccatctgacatttcactgtcttcccttgtttcagaagcataggcctggtgcttatctgttttttctcaagcaacagaaccagtggccaaggtcagtctaggacccctgccactttgcttccagccttgtttatggatttctcagcgtcgtcat

SEQ ID NO: 12431 - DNA, 543 bp, Homo sapiens
  MAP TO AC021486.3; EXPRESSED IN FETAL LIVER, SIGNAL = 0.58; EXPRESSED IN BRAIN, SIGNAL = 0.49; EXPRESSED IN PLACENTA, SIGNAL = 0.58; EXPRESSED IN ADULT LIVER, SIGNAL = 0.59; EXPRESSED IN BONE MARROW, SIGNAL = 0.51
cttttcttcacccagccttgctaatttaaagaatcttaactggggggaaaatgctaatcttattttgggcctacccattttcccaatctcagtttgatgtcttcctcggaatcggaaggcttccctggagcttggtgtgctgggcttgtctgtgctgtggctttcagtctcaggccaggttttacaaattttgtcgcattggtctggaaaagaggtagggtggttgacttgttttttaactcaatgcaaattaatttatgctttgaaatttgctgatcttctcacctcaattgggaaaatgtctgactatattgattggccaaatgaaggactcaaggactcaaggaggtcgagttcattttagaggcttcttaaattgtcctaaattatcccactttggaaagcgcagtcttgtgacagtggcattaaggtaaagaaaaacagcctctgctccagctctgattaggccctgtctccttccagagtctttctctccaatccaaagccttcgcatgtacaatttcccctggaaaaatctccttc

SEQ ID NO: 12432 - DNA, 513 bp, Homo sapiens
  MAP TO AL139824.7; EXPRESSED IN PLACENTA, SIGNAL = 0.51; EXPRESSED IN FETAL LIVER, SIGNAL = 0.54; EXPRESSED IN BRAIN, SIGNAL = 0.46; EXPRESSED IN BONE MARROW, SIGNAL = 0.55
ttggccagcagtcatgttagaacacaacgattagattttattataaatatgaacttttcatgaggggcagatgctgctgatgcctgtgtccctgcacccagcttacctctgatttcaacagccgtttgctggacagctcccccagttccgtgggagctcagattcaacttacactgccagggtgccactttaagggtgacgaacacattctgccccagagtcttccctggtgtgtgtgtgtgtggcattcctcatctgacaaagttcaacctggaaatgaggggggagtaaatgaccccaggggcaacgctcaactaatgagggccagaggcaatagatacattcttcagctcccccatcctgcaggtggacaatggcagatgctgtgtatgcttcccagatatcccctgaacctccatcacctactgcaactgcttgataatgtgtcttataattggcttttgctccgtatccatctcattctctctaagccctcagacctgtttcccagga

SEQ ID NO: 12433 - DNA, 533 bp, Homo sapiens
  MAP TO AP001415.1; EXPRESSED IN ADULT LIVER, SIGNAL = 0.62; EXPRESSED IN BRAIN, SIGNAL = 0.74; EXPRESSED IN PLACENTA, SIGNAL = 0.71; EXPRESSED IN FETAL LIVER, SIGNAL = 0.82; EXPRESSED IN BONE MARROW, SIGNAL = 0.77
caatggtgtgttccttgcagacctgtttcatgcagctccacagccaacaccccacttcacacggcatgctgaggatgcagcatcacctggccagggttacatctgcttggaggctgttcaggtgctgagaactctggcagtgtcagggaagcccacgacaacctcatagctgtgagccacagctcacacaaaaattgtagtaacatattcttcacatgttcctgccttttctcaaaggttcctcatggtttgggttatttattttctcaatgcttttatttttaaatagttatagatctgcaggaatttgcaaagacagtacagagagatcctgtgtatccttcaccaggtttccctgatgattacatcttacctacctacagcactatatcaaaattagaatatttataatggtgcaatgtatgcatatagttccatgccatacagaattgtcccatcaacataaagacctctcttatactatccctttctagtcatttcctccaatactctctccactatccctcacccct

SEQ ID NO: 12434 - DNA, 599 bp, Homo sapiens
  MAP TO AC016948.4; EXPRESSED IN PLACENTA, SIGNAL = 1.4; EXPRESSED IN BRAIN, SIGNAL = 0.6; EXPRESSED IN ADULT LIVER, SIGNAL = 0.89; EXPRESSED IN FETAL LIVER, SIGNAL = 0.58; EXPRESSED IN BONE MARROW, SIGNAL = 0.59
tgtcttcaggctttgcagtcgtggataccaccacagtttttcagcatctcagggagactgcagtggtgatctagttctttcaaagtgtctgtggattctctcgactttcctggtatgtacctgtggtagttcttggagcaaaagtccatgatgtcagtctccacacactgctccatccatctgagcaggagctgcaagctagtcctgcccctctccaccatcctaatccagattgtcttcttattgttgagttttaggagttctttttgtattctggataacagcccttcatcagctatgttttttgcagatattttctcccagttggtggcttgtcttttcattctctgacaatgtcttttgcagagcagaagtttttaattttgataaactccagcttattatttttcatgagttatgcctttagcattgtatcgaaaacatcattaccaaacccaatgtcatctagattttctcctaagttatcttttaggagttttatagttttgcattttatatttaggtctctgattcattttgagtaaatttttgtgaaaggtgtaaggtctttgtctagatgcttttctttgcacgtggat

SEQ ID NO: 12435 - DNA, 573 bp, Homo sapiens
  MAP TO AC013332.4; EXPRESSED IN PLACENTA, SIGNAL = 0.69; EXPRESSED IN ADULT LIVER, SIGNAL = 0.73; EXPRESSED IN FETAL LIVER, SIGNAL = 0.68; EXPRESSED IN BONE MARROW, SIGNAL = 0.62; EXPRESSED IN BRAIN, SIGNAL = 0.68
acatgtgaagtcccagaggcataaaaatccatgagtggaaactgatagaagattggcaggactgttttctaagaaagcaaggagaccagggctgatgtacaaagtgtttttctgtaccccagggaccttacctgattcctgatcctcgtgctggccatgggagtcaagtatttatgttctaaataccaggcccgctcctgaaacaccagcttggttccatacaacagacaaaactaaggggtgggggaaaacaaaagaaatggacaaatagcaatatattagaaaacacaaaatctaaggaggcgaaagagaaataacataatattacatttcataaaatcgtaaaagttaatactttcctaatgtaaaatggccatgttttggatgtgcagtataggttttattttttaaaagaattctatgaaaaatttaaagcatatacaaaagtagaacaaatagcataacgaactcccatatatccttccccaaaactcaagaaattttaactcacaaccaaccttatttcatatgtaacctacctggttctcctctagcccacgttatttaggagca

SEQ ID NO: 12436 - DNA, 568 bp, Homo sapiens
  MAP TO AC021880.2; EXPRESSED IN BONE MARROW, SIGNAL = 0.89; EXPRESSED IN ADULT LIVER, SIGNAL = 0.85; EXPRESSED IN BRAIN, SIGNAL = 0.98; EXPRESSED IN LUNG, SIGNAL = 0.92; EXPRESSED IN PLACENTA, SIGNAL = 0.84; EXPRESSED IN FETAL LIVER, SIGNAL = 0.81
tttaccccttgccttcagtggagatctgtatttgaattatctttttcaagtactaccaatctttgtaggtttattgtctctggacagcgcagtaagagggaactagagaaatctgctttctgcagatggaattctgcctcatattaccaagcccttaatatcaaggtcctctagtcctccgaaatctattttctctctgtcttctgaggaaagccaatttgaaaccatttttcagggaagacagcaaggagacttatgctgacggcgatggagaggctcaggcagtcagccatggaaagactcaggcagtcagccatggagagactcaggcagtcagcgatggagagactcaggcagtcagcgatggaagaggctcaggcagtgactggggtgtggctgctaagggacggatctaacatcacaagccacggtctaggagctgacacccacaccgtgtaaatgacagaaacgacaacgtttcattcttaaatcaaatcaagctgtattgataatgatgatttagcaggaaccactctaaaaatcagaaacaattagaatgccttcccca

SEQ ID NO: 12437 - DNA, 554 bp, Homo sapiens
  MAP TO AC011666.18; EXPRESSED IN BONE MARROW, SIGNAL = 0.43; EXPRESSED IN BRAIN, SIGNAL = 0.56
ctaatgcggtagtgatggggcaggtgcgctgagtgacgtccccaaggccttcccacagatgtctccaccacggtctctcgcaaggcatggggggcagaagctgttggctgcagtattcagctgaccacgccagtgaatgtccttgttatacaccatgtccctggactggagtgtcacgaccggacagtctgcagccagagactgcgggaactgcaggcccatcatgtccacaacaacagtgggtgtgatgtggcctacaagtaagagctgggtctgggtcccacggcacatggtcagtgttgcttccctgggatgcttctcctgtcccttctcatcccttttcctcattttctgggttgtggtcctatatgttttataatgaataaaatatttaaaacccccatgaaactcccaatcctttggatttttctgtgaggtgcctgtctctgagagctcccaggaggaagcaaggaaggttaagtaataactgtattctctaccctcccccaaccctggcttgcacagcacactacacattgcaaacgacttcctca

SEQ ID NO: 12438 - DNA, 557 bp, Homo sapiens
  MAP TO AC021468.2; EXPRESSED IN PLACENTA, SIGNAL = 0.64; EXPRESSED IN ADULT LIVER, SIGNAL = 0.63; EXPRESSED IN FETAL LIVER, SIGNAL = 0.87; EXPRESSED IN BRAIN, SIGNAL =   1; EXPRESSED IN BONE MARROW, SIGNAL = 0.59
acttggcaccaaccaaagacctgaaaaagtattttagtcactcacattcagccctgcctcagaccccaagcatcatcatcatcatcatcatcatcatcatcatcatcgctattatttatggagctgccattacatgctaggtgtcttacatatataaccattaactaattccccatagggtagttcatattatttccatttcataagtggtaaaaacaaggctcagagagaactagtcatttcctcaaggaacacagcagccaacttagaatgtgcactcccatctgtgtgcccctagaacgcatgttttgagaggggctagccaagtggtcctgcatagaggctcccagcactaactttgggctggatgcctgggttcagctgcttgctccccatttcacttactgctgtgcgatcttggccatattacctcactttctaagtctgtctttcctgtctgtaaaaatagtgtaataacaatcacaccaatctcatagggttgttgtgaacatgatatgcgatcatgaatataaaacacttagcatgaggcctggaac

SEQ ID NO: 12439 - DNA, 510 bp, Homo sapiens
  MAP TO AL136172.12; EXPRESSED IN LUNG, SIGNAL = 1.3; EXPRESSED IN FETAL LIVER, SIGNAL = 1.9; EXPRESSED IN ADULT LIVER, SIGNAL = 0.92; EXPRESSED IN BRAIN, SIGNAL = 1.1; EXPRESSED IN PLACENTA, SIGNAL = 1.5; EXPRESSED IN HELA, SIGNAL = 3.6; EXPRESSED IN BONE MARROW, SIGNAL = 2.5
ttgcgttttctccatctacgaatttggatcattgaccaaaagacctcccatgtgaacacccgaaacagataagggtgactttcctctacagcagtggccctcccaccttcccagcagaggaagagaaacagctgcatttcgcatttctttcaggatcaggtcatccagctgatgaacgcgatcttcagcaagaagaactttgagtccctctccgaagccttcagcgtggcctctgcagctgctgtgctctcgcataatcgctaccacgtgccagttgtggttgtgcctgagggctctgcttccgacactcatgaacaggctatcttgcgggtaagacatccatgcccaaagtgtgcccctctgattatcattcctagtggaaggctttcagaaatctggactatggtcacagccaattacagcccctacaaggacatacccattaaatggagggcaaggctcatttccctgagccttgaaatggagacatgaccactcggtgaactagcc

SEQ ID NO: 12440 - DNA, 502 bp, Homo sapiens
  MAP TO AL121772.12; EXPRESSED IN BRAIN, SIGNAL = 1.2; EXPRESSED IN BONE MARROW, SIGNAL = 0.8; EXPRESSED IN ADULT LIVER, SIGNAL = 0.94; EXPRESSED IN LUNG, SIGNAL =   1; EXPRESSED IN PLACENTA, SIGNAL = 0.76; EXPRESSED IN FETAL LIVER, SIGNAL = 0.9
tggatcctagcaccctaacgtgcttttcctgcctctccccccttcccaccagcagccgcagcacggtccttggcaaacaaggatgagaaaaatatccaaccacgggagcctgcgggtggcgaaggtggcataccccctggggctgtgtgtgggcgtgttcatctatgttgcctacatcaagtggcaccgggccaccgccacccaggccttcttcagcatcaccagggcagccccgggggcccggtggggtcagcaggcccacagccccctggggacagctgcagacgggcacgaggtcttctacgggatcatgtttgatgcaggaagcactggcacccgagtacacgtcttccagttcacccggccccccagaggtacccgcctctcatggcagggctctcgggatctcctcccctgtgctacagtgttggccgggtcccctgccacagactcacctgggagcttgtctaaatgcagtttcccagagatgctgacgctggta

SEQ ID NO: 12441 - DNA, 568 bp, Homo sapiens
  MAP TO AL161450.2; EXPRESSED IN LUNG, SIGNAL = 0.89; EXPRESSED IN PLACENTA, SIGNAL = 0.88; EXPRESSED IN FETAL LIVER, SIGNAL = 0.8; EXPRESSED IN BONE MARROW, SIGNAL = 1.3; EXPRESSED IN ADULT LIVER, SIGNAL = 0.77; EXPRESSED IN BRAIN, SIGNAL = 0.63
gctttcatgttgctctcaggatctagctttaatattaccttatgtcatgagatagcccatgacaggattttttaaccaccttatatgtaattataaagaatagtcagcaaacatttatgggcatcaatttgttttgatacctagcccaaggcagattcaccataaattgtactccagtaacactttcattttctatgcatgtgaaaacacacacgccagccatacaagcattaaaaaaaataaaaatatatattatgcatgtacctagtattagcatagcataattaaaacaatccatgcataaaaggaaaatgctgttttttaatacttaccacaagctttagaagcagcaatacagatttcttctgcaacatactccccagatggaaaggtcagataatctgcctcagatttcccaagggaatggtaaagatacacctgaagaactggatctatttgcttcatagaattggcatttccagaaatatcaccattctgatatatagaagaggtggatgttccctccatttctgtcatcgtaaggcaggccattcccatgcagagtctt

SEQ ID NO: 12442 - DNA, 507 bp, Homo sapiens
  MAP TO AL161662.1; EXPRESSED IN LUNG, SIGNAL = 0.9; EXPRESSED IN PLACENTA, SIGNAL = 0.97; EXPRESSED IN ADULT LIVER, SIGNAL = 0.8; EXPRESSED IN FETAL LIVER, SIGNAL = 1.1; EXPRESSED IN BRAIN, SIGNAL = 1.2; EXPRESSED IN BONE MARROW, SIGNAL = 1.1
cgtgacacttgaattggtgccatgccttagcatgagggcccgcctgtttttggtgtccatttaaggtggtaatgatacgagtttttaagttaaaatggcacttaaggtgtcttttttttttttatctttttcatccaaaataggtaaaaccttgttagccaaagcagtagcaaaccaaacctcagccactttcttgagagtggttggctctgaacttattcagaagtacctaggtgatgggcccaaactcgtacgggaattgttccgagttgctgaagaacatgcaccgtccatcgtgtttattgatgaaattgacgccattgggacaaaaaggtagactttctcatacttattttgccttgtttagtagggaacaccgcatagctcttctcttgagaatgagcaatctcagggggctctccctatggccacagttcttgctgtgcgtggccttccatgcatgctttaggctctgctctcccaggagccagctaacaactgcccagt

SEQ ID NO: 12443 - DNA, 600 bp, Homo sapiens
  MAP TO AC021356.5; EXPRESSED IN ADULT LIVER, SIGNAL = 0.62; EXPRESSED IN BRAIN, SIGNAL = 0.65; EXPRESSED IN PLACENTA, SIGNAL = 0.61; EXPRESSED IN FETAL LIVER, SIGNAL = 0.48; EXPRESSED IN BONE MARROW, SIGNAL = 0.45
gaaagtggggagaaaggaggaaaaattactcagggttctaagttcagccaccaagacgtcttactacaggtcatgggaagaagttaactcataaaaaaaatcagagaaaaggaagatttgaactcatcttccagcttttacagagcatattgaagccaaagatctggaagtatgtggaaaagatttatgtagtataaagaattacatgaattatattattagaaaaatgtaaaggggctctctattggaattattatagctgcttagctagtcagttttctcagctattaaccctccaaaatgaatgtgaatattttactctccttagagctctatcgcatctatgtatagtatcatcactgaaaaactcagtggagctgagacttactcttttttgagaatctcagactttgacatcaggaggatggatcctatttttggaggtcataaaaatctgagtgaaatcaccaaagtaatttggcttaacttatctgcataagctacttcctaaaaatgtgattctctatctttctttatatctttacattaaatatatttaaaacaagttgtttttgtttccctagcaagcatacctcatgc

SEQ ID NO: 12444 - DNA, 599 bp, Homo sapiens
  MAP TO AL121828.6; EXPRESSED IN LUNG, SIGNAL = 0.87; EXPRESSED IN PLACENTA, SIGNAL = 0.78; EXPRESSED IN ADULT LIVER, SIGNAL = 0.78; EXPRESSED IN FETAL LIVER, SIGNAL = 0.76; EXPRESSED IN BRAIN, SIGNAL = 0.7; EXPRESSED IN BONE MARROW, SIGNAL = 0.72
aaagctgctcaaggtggttcttttaatttagtcttttgcaaaagccaagagagtcagaagctgagctaatgctgtctccatcattcatgatgaaaattgtccccgcaagcactttcccctgttccccccaccaaaaagaaaagaaactcattgcaaagatttcacttaccttaccttcaatgtaaagattttcctcctctaaattctccatgagcatggttcctaatccgaggataggatttccccaatggctgagatggtggaaatcaaaacattcgaaaatataaggaaccagatataggtcccactcactgtttagttttctttgcctttcatgcccacagaatacagcattgcccatctgagaaagtcattagtgagagaagagcttttataagctcttccttgaaaatggggcatgcttgctgtttttggaaaatatcagcctggaagagataaagttccgtagagggcaaagctatcaaagccaaaatcacacgattctttgatttcagaggcccttgcttagaatttggcactgccccacctccatttccccctctattcccatggatcaaccaaagccataacacagccct

SEQ ID NO: 12445 - DNA, 572 bp, Homo sapiens
  MAP TO AC027279.1; EXPRESSED IN BONE MARROW, SIGNAL = 0.65; EXPRESSED IN ADULT LIVER, SIGNAL = 0.8; EXPRESSED IN BRAIN, SIGNAL = 0.76; EXPRESSED IN PLACENTA, SIGNAL = 0.75; EXPRESSED IN FETAL LIVER, SIGNAL = 0.63
ggtggggaatgggaagtaacttctttctgattttcagtatctagggcctcaaatgggatgacttccaatggatggaggttggccatttcccgctccacaaggcctctccacatggctagctgggcttccttcaacatggcagtctcagggtagtcaggcattttacacggccactcagccacattccattggtcaagcaaacgaataagtgcagcctagatacaagggaagatgaattcaactctatctctcaatgagatgagtagaaaagaattgatattcatctttatcacaatgtgaactcagcaaaatgtaatgttaattagaaaggctggctaattaagcaatataaaccaaaataacagaaaacagcaagtgtcctggtaatcactgttactgtttgctttattcaattaaaaggtgcatatctgaggaggaatgtttttttcttctacctgttttgtctcatatggattatttagttttatattcactggctattattgaacatttataccattttaggtctctgacgaaatatataaactccatgggaaagccattttcaggtt

SEQ ID NO: 12446 - DNA, 521 bp, Homo sapiens
  MAP TO AL158176.5; EXPRESSED IN PLACENTA, SIGNAL = 0.58; EXPRESSED IN ADULT LIVER, SIGNAL = 0.71; EXPRESSED IN FETAL LIVER, SIGNAL = 0.97; EXPRESSED IN BRAIN, SIGNAL = 0.71; EXPRESSED IN BONE MARROW, SIGNAL = 0.55
ttcatgcatgttccttggtctcatctgtgcttctctgcctattttctctgatataaaaactagcaacagggaacaattaatataaagcttttgactagccattcactatatcccgggtttttaatcaaagggcagtgtaattttcacagtattgaacaaaactttcatctgaaggagacagaggtggaatgccaggctgaactcttcagagagactggctcctttggcaacacttacctcatccagcagctgttcaatcacagagactcttccttcccccgtgggtccgacttccttcagcaggagtctgttttcaggctgcaggattacagaatgtggtcatttcccccacttcaaaatattcactcaaggcaaacactttctttccaacattgaattctaagtcacaaggacaggtgactatgagtgtgtgcatgtgtgagtgtgtgagtggtctttaatagcccacagcacaaatatccacatctaatatcaatcttgctgctccaaaaccttgcttc

SEQ ID NO: 12447 - DNA, 512 bp, Homo sapiens
  MAP TO AC027350.1; EXPRESSED IN PLACENTA, SIGNAL = 0.87; EXPRESSED IN ADULT LIVER, SIGNAL = 0.96; EXPRESSED IN FETAL LIVER, SIGNAL = 0.85; EXPRESSED IN BRAIN, SIGNAL = 0.81; EXPRESSED IN BONE MARROW, SIGNAL = 0.83; EXPRESSED IN LUNG, SIGNAL =   1
taaatacccatggtggggacatgtcaagccaaggctatcactgttctgatcaccatcatcactatcatcctgggcatcatttccagctctatcacctgcaggaaaatgtaggaacctcataatgttggcaacatctacactctctcttactcttgaagtatatatttgcattttaactttagagcaagcaatacctggattggaaggtcgctttgagggcccagaatgaaacataaaactagatacttacaaatttataacttaatgtcagtaatttgcataaccaaaggatcattgctttgctaaataattaccttaaataatgagcttccctaacatacttgagttcatttacaggtcattaactacttgacatacaagaaagagagctactttaagctatagtactaatattcattactagtaataataaatcagtgatggaattaagcacatctgtaactataagtcaatgggaaaatacagtttcttccaagggaattgcattcttc

SEQ ID NO: 12448 - DNA, 590 bp, Homo sapiens
  MAP TO AC027305.1; EXPRESSED IN LUNG, SIGNAL = 1.5; EXPRESSED IN ADULT LIVER, SIGNAL = 1.1; EXPRESSED IN BRAIN, SIGNAL = 0.84; EXPRESSED IN PLACENTA, SIGNAL = 1.4; EXPRESSED IN FETAL LIVER, SIGNAL = 0.99; EXPRESSED IN BONE MARROW, SIGNAL = 0.9
aggccataccaccatgctacctcctacagagcccatgtttgctcacaatgggaggggcctcccagccgaagaggagctcactccaggctgcagggaaaacaaagcctaaccttctgagataggcacctcctttcctgtaggggactgcaaggaagtctccagccccagatgcctgcaggtgttcccagacgggactgctctcagaccaaggtgaactcagggccccatctgaggggcagagtcacctccaggaggccagagacaggatcatgggtgtatcccatggtggtcctccctctgcctcacacccccagactgctgtccctgcctgccaaggccacctctgacagccatcaacccaaacacctcttcgcaggggttcctggtgtgagatttagggatgtcactgccaggaaatcaaaaactcctggatgtcattcacagggaatgagcaccttctatgccccgggctccaagccaaaagccagtgacacacagaaggacaaactggtccaagtccctgccttcaaagagcttgtggcctaatgtggtctggagacccctgctgttcctaccagtcacatgccctt

SEQ ID NO: 12449 - DNA, 514 bp, Homo sapiens
  MAP TO AC022997.3; EXPRESSED IN LUNG, SIGNAL = 1.4; EXPRESSED IN BONE MARROW, SIGNAL = 1.1; EXPRESSED IN PLACENTA, SIGNAL = 1.2; EXPRESSED IN ADULT LIVER, SIGNAL = 1.3; EXPRESSED IN FETAL LIVER, SIGNAL = 1.2; EXPRESSED IN BRAIN, SIGNAL = 1.1
tgtggtaggattccagagggacactttttgttgtaatatgtttaggttactctactttcttgcttagaacatctgaaggtaggtcgttcgaagtggccacagctctttggtggcttctagaaaattatcttctttttccagggtgactagagctccatcatgccttcacatgacaacatccaaagcagaaaaaagaaggccggggcttgctgcttaatctttctctagataataaaggacaaattttccccgaagttccccgcgtcactggccaaagtggtctaacgcttaccctgaaaccagtcattggcaaaggagaagaggggcccatgattgttttgcccaagctattttccggagctgtaggaggggctcacctacctgagcatccatgctccatgtctgaacacaatcagaattctgttagcaaggaggaaagtgagactgcctgttgggctgttaggtaggcaacaaactgtgtctcccagaggtggggacaggtgatgcaaggtct

SEQ ID NO: 12450 - DNA, 522 bp, Homo sapiens
  MAP TO AL121883.13; EXPRESSED IN LUNG, SIGNAL = 1.5; EXPRESSED IN PLACENTA, SIGNAL = 1.3; EXPRESSED IN FETAL LIVER, SIGNAL = 1.7; EXPRESSED IN BONE MARROW, SIGNAL = 1.3; EXPRESSED IN ADULT LIVER, SIGNAL = 1.6; EXPRESSED IN BRAIN, SIGNAL = 1.8
cacaatcacttctcgcttgaactcatctgtgcagcttgctggactgagattgcttacaaatatgactgttactaatgagtatcagcacatgcttgctaattccatttctgacttttttcgtttattttcagcgggaaatgaagaaaccaaacttcaggttctgaaactccttttgaatttggctgaaaatccagccatgactagggaactgctcagggcccaagtaccatcttcactgggctccctctttaataagaaggagaacaaagaagttattcttaaacttctggtcatatttgagaacataaatgataatttcaaatgggaagaaaatgaacctactcagaatcaattcggtgaaggttcactttttttctttttaaaagaatttcaagtgtgtgctgataaggttctgggaatagaaagtcaccatgattttttggtgaaagtaaaagttggaaaattcatggccaaacttgctgaacatatgttcccaaagagccaggaataacaccttgattt

SEQ ID NO: 12451 - DNA, 507 bp, Homo sapiens
  MAP TO AL133227.7; EXPRESSED IN ADULT LIVER, SIGNAL =   1; EXPRESSED IN PLACENTA, SIGNAL = 1.2; EXPRESSED IN HELA, SIGNAL = 2.2; EXPRESSED IN FETAL LIVER, SIGNAL = 1.2; EXPRESSED IN BONE MARROW, SIGNAL = 1.2; EXPRESSED IN LUNG, SIGNAL = 0.93; EXPRESSED IN BRAIN, SIGNAL = 1.4
ctggtaccaccctggtatgggaagactgggaaaatcttcattttaacctaaggggcagagagagttacagaggattttgggcaggagcatgacatgatcaagtctgaatgatgggagaaattctggcaggagtgtggaagaggtgatgaatgaagaagccaaccaacagcttggaatataagcaaaggagagtaggattggaagacttaaaataagaggagaaaagaggacagacaagtgaagggagggaggtgtagggttttttactcacacctggaggtgtgagatgagctgtcccacggtgatttcctcggctatcttctggtacagactctggctgttcaagaccatgctctccaggatggccagggacctctgaaggattgacacgtccaccatgggctggctcacataccctgcaatctagacccagagatggcacatcaattgagaagctcagggcccaagaaagatagaagcttagcatctgatgctagcccttgaagc

SEQ ID NO: 12452 - DNA, 500 bp, Homo sapiens
  MAP TO AC016326.4; EXPRESSED IN BONE MARROW, SIGNAL = 0.61; EXPRESSED IN PLACENTA, SIGNAL = 0.71; EXPRESSED IN ADULT LIVER, SIGNAL = 0.71; EXPRESSED IN BRAIN, SIGNAL = 0.86; EXPRESSED IN FETAL LIVER, SIGNAL = 0.8
tcccaaacaaattaaaacacagacagaaaaataaagacttacatcatttgtgttaacatgccaagccatatcaccataagataccagttgtccattaacataacaccgaatttcactgttcctccatcgattgtaaatgtggacaatgctgatcatgtaccacttaaataaaaaaattaaatatatcaatatgtaatgtttggttgttacagtctaaaatgcaattgtaacattcataaaaccctacaagaatatgctgacaggactattaaggatcatctaataccacttgatcaagttccccctctcatttctcatttcacagatggtagaagtggcacataaagaatactcctggagaagacaagaactacaaccccttgacctccagcgtgacgttccttccactataccaagattcgaaattgtagaaatacaatttatttgtgttcattcatttaaaatttacattgtgccaagcactgcagatacccaaggct

SEQ ID NO: 12453 - DNA, 548 bp, Homo sapiens
  MAP TO AC009466.2; EXPRESSED IN ADULT LIVER, SIGNAL = 0.57; EXPRESSED IN PLACENTA, SIGNAL = 0.68; EXPRESSED IN FETAL LIVER, SIGNAL = 1.4; EXPRESSED IN BONE MARROW, SIGNAL = 0.62; EXPRESSED IN BRAIN, SIGNAL = 0.61
ggttcagcaaggagttgaggaggttcatatgcattcagtgaatgtttgctgatgagtaagtgaacaagttctgctgcagagttactggggaagctcggtgtccgctgacatctccctgcacccctcatgtcctgttgccagcctcctattttgggattaaaaggagctgttgcttgttctcttctttccctgcagagttgagcgttatgatgaagctgctcagctcggaggatgaggttctggtgggcaacgctgccctctgccttggtaactgcatggaggtgcccaacgttgcgtcttccctgctaaagacggaccttttgcaggtcttgttaaagcttgcaggcagtgacacacagaagacggccgtgcaggtgaacgcaggcattgctctggggaagctgtgcacagctgagcccaggtatgctgtggacacggagccaggctgacctattgcagaaagagcagctgagctgaggtgctgagttttggctgggactgcatgccacacagaacagtgtgggaagccctcatgctttctgtgcaga

SEQ ID NO: 12454 - DNA, 556 bp, Homo sapiens
  MAP TO AL121908.7; EXPRESSED IN BONE MARROW, SIGNAL =   1; EXPRESSED IN LUNG, SIGNAL = 1.2; EXPRESSED IN PLACENTA, SIGNAL = 1.1; EXPRESSED IN ADULT LIVER, SIGNAL = 1.1; EXPRESSED IN FETAL LIVER, SIGNAL = 0.92; EXPRESSED IN BRAIN, SIGNAL = 1.1
gctctttgccaatcttgacctttcagggagatttgagagaaagactccagaagcccgcggggagagcaggggttctggggaagataaagcccttcatccaggatccctctgtgaccataaggtgagttgctttgccccacatctctggtgaggcagagggcagggactctgcttagggagcaggcttcttaaaggcaaagggtttgcaaattctagcagcagcagggccctaagagaatggctttttttttttgttcttgaatcggatgactgcatttggagtctggggtgaggggtgggggctgcccctcttggagccacagatgggtcatttttatgtatcaagggagtcagaccaggatcagccctgggtttctggcacagagtccagaaagagtcacgaaggtcttttgtttgcatgtgaatggtattttaacctattacttctgggctaaaaataaaaattcccctcagatgcctttttgtctgtagattgtaagatcgtttccaggaaataatagattgtcattgatgtgcgttttgactgcatggtgtc

SEQ ID NO: 12455 - DNA, 553 bp, Homo sapiens
  MAP TO AC019342.4; EXPRESSED IN PLACENTA, SIGNAL = 0.53; EXPRESSED IN FETAL LIVER, SIGNAL = 0.46; EXPRESSED IN BRAIN, SIGNAL = 0.48; EXPRESSED IN BONE MARROW, SIGNAL = 0.43
tatgactgtgggagcgattgcctcactcttgagaaactcgggaatatccctcagtgcttcatataccttgtcacaatatttttaacagcaattcttcttgtgtttctctgtgagaacctctcgccagcatctcccctgatgacactgtgaggggctagagggctctggcagccagcattgccattcttgcagcagcagcagcagcaatagctatttcccagggctacgtccacacccagcctctctgctgtcttaaacttgccacccatggtctcctcctgaatgtaaagccttgtggttggagtttggggctttctttgcataggaagggaaaagaaatgcatcatcctgaaataaaatatgaggttcagaggagcaagagcaaatgcacatccttatatggaggttactagcagccattatattaacagcaagcatttgtttacaaagtactttcatatgtaatcaatttctacctggtacaacagtctggggatggggacattataatttggtgcgtgatcttcaagattcagaccttattggtcacccg

SEQ ID NO: 12456 - DNA, 573 bp, Homo sapiens
  MAP TO AC008643.2; EXPRESSED IN LUNG, SIGNAL = 1.3; EXPRESSED IN ADULT LIVER, SIGNAL = 1.3; EXPRESSED IN BRAIN, SIGNAL = 0.95; EXPRESSED IN BONE MARROW, SIGNAL = 0.95; EXPRESSED IN PLACENTA, SIGNAL = 1.1; EXPRESSED IN FETAL LIVER, SIGNAL = 0.97
tggtgtgactcctgtcttgcagtccccacggagccctgtccctttgagaccttccatttgtctcctggatgctcgcctgttaagtggggcagaggaggccgtcgtaaataagacaaaagatcaggcttccattctggaagaaaagaataaaaggagctcactgagtccagacctaatggcagtaagggcagtggacgctcacaaaagcgctgggggacgggcccagagttggggagaaaacagggatcccagctgcgcacgcgcgctctggttttcgacgggcgcagagccggacgaggtgggaaacctaacgtcaaagtctacgtaggaagtcgtagggaaggcagcgaggaagacgctggctctcgggtcacgtgatgcgccgggagcgtcatcgcctcctccctccccaagatggcgtccttgctgcagtcggaccgggttctctatctagtccagggagaaaagaaggttcgggccccgctctcgcaactctacttctgccgctattgtagcgaactgcggtcgctggaatgtgtgtctcacgaggtaacagagtcgccctatagcgag

SEQ ID NO: 12457 - DNA, 542 bp, Homo sapiens
  MAP TO AC012433.5; EXPRESSED IN FETAL LIVER, SIGNAL = 0.83; EXPRESSED IN PLACENTA, SIGNAL = 0.66; EXPRESSED IN ADULT LIVER, SIGNAL = 0.72; EXPRESSED IN BRAIN, SIGNAL = 0.79; EXPRESSED IN BONE MARROW, SIGNAL = 0.73
cacagctgctcttcttggtgggccctgcctggtatgcctgcctggtacagctgcctgggaagctttggctgcctgggatctagagaacttgctgtgttcagaaagtgacacctgagagcacccagcagcaagcttaaagagtgttgggtcagctctaagctttgtcaaaacacaggacccaaccaagagagcctatcttgtccctcagcctgtggcactgaattccactctaattcactctctggggtacctggaagatgaggactatctggaaatgaaagacatccttgatgactggcacttgctccaggacactggtggggagaagctgaggcccaggacctgaaaactcagccagctttgtgctttcccgagctttctcagggcacagggggaggcatgggagagagaacaagtcaaggaggaaccaaagctggtcctggaaaatgcagggtctgcatcagggatggatggcctccatcaccccaggagaccgagccttggtgaccagaatcttgggatgctaagagatggcaaaagcg

SEQ ID NO: 12458 - DNA, 600 bp, Homo sapiens
  MAP TO AC011815.2; EXPRESSED IN PLACENTA, SIGNAL = 0.47; EXPRESSED IN ADULT LIVER, SIGNAL = 0.58; EXPRESSED IN FETAL LIVER, SIGNAL = 0.52; EXPRESSED IN BRAIN, SIGNAL = 0.99
tgatgaggctgaaagagcttgattctaactacagactctataatgtgtcagaaagttcctccagaagagagaccttatagatgtgatgtatgtgggcacagcttcaagcagcattcctctctaacacaacatcagagaatccatactggagaaaagccctataaatgtaaccagtgtgggaaggcctttagtttgaggtcctatcttattattcatcagagaattcatagtggtgagaaagcatatgaatgtagtgaatgtgggaaagctttcaatcagagctcagccctcattagacatcggaaaatccatactggtgagaaagcttgtaaatgtaatgagtgtggcaaagcattcagtcaaagttcatatctcattatacatcaaagaattcacactggtgagaaaccttatgagtgtaatgaatgtgggaaaacctttagccagagctcaaaactcattagacatcagcgaattcacacaggagagagaccctatgaatgtaatgaatgtggaaaagctttcaggcagagctcagagctgattactcatcagagaatacatagtggagagaaaccctatgaatgtagtgaatgtgga

SEQ ID NO: 12459 - DNA, 575 bp, Homo sapiens
  MAP TO AC013389.3; EXPRESSED IN PLACENTA, SIGNAL =   1; EXPRESSED IN ADULT LIVER, SIGNAL = 0.68; EXPRESSED IN FETAL LIVER, SIGNAL = 0.68; EXPRESSED IN BONE MARROW, SIGNAL = 0.92; EXPRESSED IN BRAIN, SIGNAL = 0.7
ttttccctgtagttgcacccagctttttgcagatgcctcagctattagaagtattcctttcatttatgatcaaaatataaaatccttaatgtaaaatattaagatatagcattatgaaaatatgcatataggaaatactttaaatcctatgcatttacttctttgagttgaatggtgtcatggctaagacaacttgaatgagatttgacctgagttttctctgaggttttcctgcagctctgcctcagtgaacagattgcagatcactctgtaatagacaccttcgtccaaaactccctgcctgtgttcggcctgccagaattgctaataagtttaaatatagtaggtaaccacttttctgtctatttatgtcactttcatttcatcataatttagtatacacattttaaaaatgttatatagtccttatattttaatttgaggtactattgctttcgttctcatattttttttatcactgcacactaatgttgttaaacgtcttcatgttccttaagcatccatttttcaaaactttaaatgaattttaaagtgccagggcagacaaaatgaac

SEQ ID NO: 12460 - DNA, 538 bp, Homo sapiens
  MAP TO AL161627.2; EXPRESSED IN ADULT LIVER, SIGNAL = 0.71; EXPRESSED IN PLACENTA, SIGNAL = 0.97; EXPRESSED IN FETAL LIVER, SIGNAL = 1.2; EXPRESSED IN BONE MARROW, SIGNAL =   1; EXPRESSED IN BRAIN, SIGNAL = 2.9
agccgtcctccctgacttaccctagattaacctcatttatgagtcagtgctatggggttaattctaaattactcagttgcatatagtgtgaattaaatatagagaatgttttacaaaatatttttattggtatttttatccctaaaataggaaacggcatttgaagtacttaccatcagcactttatccatatagaattctctgccagggctcccatcattgtattttgtatcaatggcaaaacacaagaataatacatccactaccatttcataaatagacaggaagcaatgagcgactaggaaagcaaagaggcagacgatgatcagaggcagcacccatactgtgtagtcctgctggtagttgagcagcataatcccagctaaacctgtgctgcagactatcagcacctgaagcagagagaacaaagatcatatttaatatcctactgaagaaagccactcttttttcaccatttgcagacttaaaattctactatttataaatgatggttgcatgaggccattccatctcaaat

SEQ ID NO: 12461 - DNA, 582 bp, Homo sapiens
  MAP TO AL161732.1; EXPRESSED IN LUNG, SIGNAL = 1.8; EXPRESSED IN PLACENTA, SIGNAL = 0.87; EXPRESSED IN BONE MARROW, SIGNAL = 0.61; EXPRESSED IN FETAL LIVER, SIGNAL = 0.92; EXPRESSED IN BRAIN, SIGNAL = 0.49
tagtggtggaagcgatgatgaagatcttggctagcagagcacatggtctgtttttaccatttctagtttaagtaggctgcactataagtggctgaggatgtagttggctgctgctcacttagtctggcacagatcacagaatctcccttttcaaagttgagacacttgactttgtgctgaaaatgtctttttagctgtttaattttcattctcttccctttacttcttgattattttttcaaggtctatgtacagacatggagcactcagaatctttctatgaccattacacgagatgagtatccgtccaaccctatggtgctccgaggtattaatcagaaggctgcctttccacagtaccagcctgtcgtcatgctggagaagggttataccatccactggaatgggccggcaccacggactacatttctatacctcgtcaacttcaacaagtatgtttctgttactgttatttcaaatagttgagcaagtagtaatttagtggagaaaaagaataacttatgtctcctttgcagcaagcaaagaaagccaattttacatactttgcttctcttgtgggga

SEQ ID NO: 12462 - DNA, 570 bp, Homo sapiens
  MAP TO AC009311.2; EXPRESSED IN PLACENTA, SIGNAL = 0.62; EXPRESSED IN ADULT LIVER, SIGNAL = 0.58; EXPRESSED IN FETAL LIVER, SIGNAL = 0.56; EXPRESSED IN BRAIN, SIGNAL = 0.57; EXPRESSED IN BONE MARROW, SIGNAL = 0.56
tcccaaaaaccctctccttcagctaaatttatgaaaactattcttcaatttgcacaacatccaaatgcataccttacgataacatttaatgcttcaaaatcaacaacagcagaatgcgtctctcctttgttaaacagtatttctaatgaatcaattatactggatacctaaaaaacgaaccaaataaatacaaatgaaataagcctgaactgtttttattggcattatagttttttcttttaattggcatatagttaagatggcatacccaaaaactatactcaccattttgccaaccacttcagagggaaatgtctgcttagatatcacccaaagtgctctagtacgtacatttttgtctgaattcttaatggtatcattcaattttgaaagcaattctagagcatttgcctctgaaaaacaagcagttttaattttgtatagaataggtgatactctttaaagtctcaaatataaaactagagaaaacaatatactcatcaatcataaaattaaatgtatatccagagaacagatcagagaaccaatgctgataccaaacttctccca

SEQ ID NO: 12463 - DNA, 514 bp, Homo sapiens
  MAP TO AC015570.5; EXPRESSED IN LUNG, SIGNAL = 1.1; EXPRESSED IN ADULT LIVER, SIGNAL = 1.2; EXPRESSED IN BRAIN, SIGNAL = 0.99; EXPRESSED IN FETAL LIVER, SIGNAL = 0.96; EXPRESSED IN PLACENTA, SIGNAL = 0.96; EXPRESSED IN BONE MARROW, SIGNAL = 0.99
tttgggaatatcatggggtcattgattttcagtttgcttttacagcaagattcctcatgctcacaaagagggaattgagttctgcgccctttggtaatttgattttttttgcgtttggatttgagggcaggggaatacatgggaatgtacttagtttcaatcaatatctactgcttattcaacatgataaggtaagggttggtcacaattaagctgtaggatgctagaatcttcccaaattctgatatatgagcgactggaggaaaaatgagtaaaggtataattaaccccacatcttagagtttcttggtggagatcaaatgggaactaagaaaacatctgtggtatcattgactttgctttctccaacgcctgcattctctatacctacatatatgcagtcacagctttctgggcaatgtgtagcatacacatcattccagatagcagacaacctcagcaaagaaatatagctgcagagaataaattttgaacactcctgcagctgaaaaga

SEQ ID NO: 12464 - DNA, 537 bp, Homo sapiens
  MAP TO AC018909.3; EXPRESSED IN BONE MARROW, SIGNAL = 0.7; EXPRESSED IN LUNG, SIGNAL = 0.9; EXPRESSED IN ADULT LIVER, SIGNAL = 1.1; EXPRESSED IN BRAIN, SIGNAL = 0.75; EXPRESSED IN PLACENTA, SIGNAL = 0.77; EXPRESSED IN FETAL LIVER, SIGNAL = 0.61
gcttaccgctgcaaaatctcagcttacaactaggaggtaaaatactgacctgctgtttttccgttcattgtaaccaaactgccttttgcccgtttcagattgctgagtatgtgtttgtgatattcatgagcattgagcttaatctgaagattatggcagatggcttatttttcactccaactgctgtcatcagggacttcggtggagtaatggacatatttatatatcttgtaagtctttgcttattgcctaaatgaaaaatgtaatggttttgtaaaatctcctgcatttcttggtataagcgcaagaggtatgagttacagaggcttagattccctaaccgaattcttaaatggactctagagtagttcattatatgcaaataagggccatgcatgtaaaatctaaattaagagcatcataaatatctatggatagttatattgttcaaatacactaatcacaattttatgtatgaatgagacatacattaataaggtctaacatggcaaatctagtttgcatcccacaaacctt

SEQ ID NO: 12465 - DNA, 511 bp, Homo sapiens
  MAP TO AL031726.11; EXPRESSED IN FETAL LIVER, SIGNAL = 1.3; EXPRESSED IN BRAIN, SIGNAL =   5; EXPRESSED IN BONE MARROW, SIGNAL = 0.48; EXPRESSED IN ADULT LIVER, SIGNAL = 3.3
tcaaaacgtccctgaaaacggtctttctcactgtacccaatgttctcaccgtacgccttacactctatgcgaatttcagtgtccatggtaagattggtgaactgtacggccagcaggggctgcaggtatttgggctgcaggagtttgccatagtacggataatactgcagaggaaaaccaggggagttgcccagtccaaaatactccacatttccaactttatccttatcttcatctcgctgaaatccagaatgaaatgaaattttaatggctcacatcatgcatcactatgtgtactcaaaaacaagactcaatctacacagtagtttgcaaactactgagagaggaaagaacatctactcagtctattccattgcagccttgagaaatggtcataagaagagactattctcaatgtgcaaatggatggggaagctgagtcaaatgccaaataagcattcttcaagcctcctagaaacaaggccaacattgaaaggcagaaacaccttgc

SEQ ID NO: 12466 - DNA, 516 bp, Homo sapiens
  MAP TO AC019284.4; EXPRESSED IN PLACENTA, SIGNAL = 0.63; EXPRESSED IN ADULT LIVER, SIGNAL = 0.73; EXPRESSED IN FETAL LIVER, SIGNAL = 0.67; EXPRESSED IN BRAIN, SIGNAL = 0.6; EXPRESSED IN BONE MARROW, SIGNAL = 0.62
ggctgttcagaggaaaggtgaccagaatggaaacttctggaaactaagaatttttatcactagcatttattgcgtactttcttaaatttttgtagtgcatagagtaaacactctgtataatatacacaatcttgtgaattagtattatcttccctcttcaaagatgagttaacagatgtagagtggttagataactagtccataactagttaaaagcagatccaggattcaaaccaggattgttctgctttaaccataaaactgaatgttctctatgaggtattcctcctccttctgctcttccttttcccctccacttcccaattccttgtcctcctttcccatcttagctaatttgaggaaagcaattctcaagatttgttcaaaacacatgctgaaatgcagctttgggtacaagatgtttattagtgatcaacacctgtgaaaggaaaagagaggaagcagcattgagcagagggagaagtcaaatcgtacacagaccaaacaaacccttgg

SEQ ID NO: 12467 - DNA, 565 bp, Homo sapiens
  MAP TO AC019222.3; EXPRESSED IN LUNG, SIGNAL = 1.2; EXPRESSED IN ADULT LIVER, SIGNAL = 1.6; EXPRESSED IN FETAL LIVER, SIGNAL = 1.1; EXPRESSED IN BRAIN, SIGNAL =   1; EXPRESSED IN PLACENTA, SIGNAL = 1.3; EXPRESSED IN BONE MARROW, SIGNAL =   1
cagctccccttctataccccagtggccacagcttcaggcttgacaccgagtgagtcacagttagaatgcacattagactcacctggaaagctaaaaactgctcgtgcccaggccccactccagacatgttattcagttggcctagatagagttgttcctgtgttgatattcttaaaagctctccaggagactttaatgtaccatcagggttgaggaccacagtcttacgttgttcaaatcctaggcccatacctgtaattgcctctcttatacattgaagctgctgatttattatatgccaggcactgttctaaatgctttattataaatgtatccaaccctcataagaagtgggtgttcttcccacccccatttttcagatgaaaaaactaaggcataaagagaggctaaataatttgcctaagatttcacagggtcagagccaggctttgaactgaggaagactcactccagcacccactctcttaaccattaaccaatactgcctctctgcattcattcaacacacaaaggctttcaggtaccacaagaatgccctctggat

SEQ ID NO: 12468 - DNA, 596 bp, Homo sapiens
  MAP TO AL135844.8; EXPRESSED IN ADULT LIVER, SIGNAL = 0.53; EXPRESSED IN BONE MARROW, SIGNAL = 0.89; EXPRESSED IN PLACENTA, SIGNAL = 0.47; EXPRESSED IN FETAL LIVER, SIGNAL = 0.8; EXPRESSED IN BRAIN, SIGNAL = 0.78
gcagagtccatttttccgagtctctgcgctcacctggctcctgggattgtggagggagttttgcagctttcagagtctgtgttttgggctcatggcccagccgaatggccatgctacaagtctgttcagagcaggttcgaggggcagaaacgtgtttcctcacaagctgtgactcaatcctgtctccggtggctgtgtcagcctccattgtgttccctcctccaggggcttctgaggagaatggcctgcctcacacgtcagccagaacccagctgccccagtcaatgaagattatgcatgagatcatgtacaaactggaagtgctctatgtcctctgcgtgctgctgatggggcgtcagcgaaaccaggtgggcccctctccagcgtctcaggacacggggagcaggtgctgcccgggtgctcatggtatgccaggtgctccactgggccttctgttagaatggctctcgctttagcctggcaaagcataggggtatttctccttctgttctacctataaggaaaccaggctgattccagaaccgggagtcttttcactgtgccttgctgtatggagcgtttctaggcagtcttgg

SEQ ID NO: 12469 - DNA, 582 bp, Homo sapiens
  MAP TO AC006460.3; EXPRESSED IN PLACENTA, SIGNAL = 0.79; EXPRESSED IN ADULT LIVER, SIGNAL = 0.76; EXPRESSED IN BRAIN, SIGNAL = 0.74; EXPRESSED IN FETAL LIVER, SIGNAL = 0.69; EXPRESSED IN BONE MARROW, SIGNAL = 0.66
tggaaggatttctcaatgggatgggaaggttttgagtctaagattctaaggttgggggactggaagaatggtggcactattaattaaaattgagttgtaagaaagacagtgttgggtaagaggtgaggcggggagtgacttaggtcaggttttctgagatgatggagatttgcatgcaggcagtttgttggggagttagatgattctgtaggaggactcagaggactcagcatatagttgtactcacagctataatttattatagcaaaagggttttgagagaaacagcaaagaaatcaagaggaaatcaagcacaagcttccaagagttctttcccactggggtcacccaggacatgtgtgacaacatgtatgaaatgctgtctatcggggaagctcagccgagactctatgcccagggtttttattcagggctgcccctgtaagtatccttggcctagcatgtaacaaaattccagactcatataagaaaagcaggtgtttgccataaaccactttgttttaacaaacagtttaggcacagtgagctgcttttatcaattctgggaatggtatgaacgct

SEQ ID NO: 12470 - DNA, 548 bp, Homo sapiens
  MAP TO AL137786.2; EXPRESSED IN PLACENTA, SIGNAL = 1.1; EXPRESSED IN ADULT LIVER, SIGNAL =   1; EXPRESSED IN BRAIN, SIGNAL = 1.2; EXPRESSED IN BONE MARROW, SIGNAL = 1.1; EXPRESSED IN LUNG, SIGNAL = 1.2; EXPRESSED IN FETAL LIVER, SIGNAL = 1.1
aatgaccaacactgctgctgctcccaccaccatgaccaccattactgccactgccagcaccactattatcaaaacaacactaccactatcactaataccaccgtcactagtactgctgttgctgctactgttagcactgcgctgatgctaccactgctaccacaatcgctgctactaccattacgattgctactgctgccagtactgctgctatcaatacagctgctgctgctactgccaccactgctactactgctagtgccaccggcattgccaccactgctgagaccgcttccactgctcgctgctgctaccaccactcctgctactactgttattattacctctactgtgatcactgctgctattgccaattgaggaagaacgaagaacaggtataaaatcacactgtacaatagtaagtgtacaaattgtacacttttgtgtactctttgaagaaactgtacaaagagtaaacccaagcaaaaatactatttctagctattaagcaaagaaattcactttaaagcacccttgaaataccaggt

SEQ ID NO: 12471 - DNA, 578 bp, Homo sapiens
  MAP TO AC016790.3; EXPRESSED IN BRAIN, SIGNAL = 0.56
gtttggggcatgggataagtaaatttttcaaagagacagtattcatgcattggtaagatattgtttttctcagacgtgtgactttatcccaaaaatatgctattttaaaagacatttcttaaaatatgtatgtgtatgtttgttgatacttgcttattatatagctcatactgtttattaaaatatatctattacaggagttattagaacggccttacataacatggacagagaagccagagaacattactccgtagtcattcaagccaaagacatggctgggcaagttggagggctttcaggatctacaacagtcaacatcaccttaaccgatgtcaatgacaacccaccacgctttcctcaaagtacgtatttgttttccatgatttgaatttatcattatctctttatgtaaagtaaaatgaaatacttgaacagtgttatgttactgttttcttaagtggaattgttctgtttttgtactatatgatcacccttcttcatgtaagactcatgaaatcactccagctattgtcttctgaacctaggaaataattgggaatgtgttcggagttgga

SEQ ID NO: 12472 - DNA, 507 bp, Homo sapiens
  MAP TO AL162390.2; EXPRESSED IN PLACENTA, SIGNAL = 0.57; EXPRESSED IN FETAL LIVER, SIGNAL = 0.79; EXPRESSED IN ADULT LIVER, SIGNAL = 0.75; EXPRESSED IN BONE MARROW, SIGNAL = 0.77; EXPRESSED IN BRAIN, SIGNAL = 0.62; EXPRESSED IN LUNG, SIGNAL = 0.92
cacaggacaccttttagtgaggaaaacacctatgttagattgtttgcatgttaaaaactatattactacagaagtcttataaaccaagaggaaaacagtctcaagtactaacctacttttgttttattagattgaggaacttcagcaggctttaatagtaaagcaaaatgaagagcttgaccgacagaggagaataggtaatacccgcaaaatgatagaggatttgcaaaatgaactaaagaccacggaaaactgcgagaatcttcagccccagattgatgccattacaaatgatctgagacggattcaggatgaaaaggcattatgtgaaggcgaaataattgataagcgaagagagagggaaactctagagaaggagaaaaagagtaagtttcataaagttagaatgaaatgtttataaaatgtagatacatctctgttgatgaactttcttctgcttctataattatttctataaaatgttcaagttgccttcttgaggaagct

SEQ ID NO: 12473 - DNA, 549 bp, Homo sapiens
  MAP TO AC019221.3; EXPRESSED IN BONE MARROW, SIGNAL = 0.91; EXPRESSED IN PLACENTA, SIGNAL = 0.83; EXPRESSED IN ADULT LIVER, SIGNAL = 1.1; EXPRESSED IN BRAIN, SIGNAL = 0.9; EXPRESSED IN LUNG, SIGNAL = 0.9; EXPRESSED IN FETAL LIVER, SIGNAL = 0.87
gggtgagtcgctctgctaagcaagggcagccgctgcacgtcagcccgcaggccaagggtccagcttatcctgggtgctctgtgatcagaaggtccttggatcccgaggactgcagctgctgccgtccacagcgcctcagcctctcttcctgtgtggaagcggggcaggcagggctgtggcagacaggcctggcatagcccaggttccaggtgtcctgggcagcctgaccggtttcctgagtagcctcaatgaaaacacctgagaaaaagaaaatgtaaactaaggaagggttttcccacttaatccaacccagatttctattcaacttaaaggatttaattggcatttgtgagaaataatagtacctgtgtcactgagttgattgatttgggacatagacggttgactttcccagacagcagcttagcggaaagcagcatcccgaagacggtgtcgcatgtcctgagcctgcttgtcacctgggcctcacggtttctcgtcagccccgtcactgatgggaagcagcactgaagtgtgagggcagaaagg

SEQ ID NO: 12474 - DNA, 503 bp, Homo sapiens
  MAP TO AL139824.7; EXPRESSED IN BONE MARROW, SIGNAL = 0.46; EXPRESSED IN PLACENTA, SIGNAL = 0.56; EXPRESSED IN BRAIN, SIGNAL = 0.45
agaccgggagggtttaaatggcttcatttgtgttttcattcctaccaaaagaatgcctgaacaacattcacacgttgccatctgcctggattcctctccgtggtcccgcagtccctgccccctagcgtctccatggtctcgtgcttcctggtccttctcgtcttcatggtcaggtgctacctagtccacctcgtctccgtgttccctggtccatcttgtctccatggtcttgtgctccctgctccgtttcatctcagtggccttgtgctccctgctctgtctcatctcaatggccctgtgctccctggtccatctcgtctccgtggtcccgtgctccttggtccgtcttgtctccatgatcccgtgctccctgccccgtctcatctcaatggtcctgtgctccctggtccacctcatcccaatagtcctgtgctctctggttgattgggttctacaatggagaggtcactcgtgatcttctggcccattctttgtaggccgta

SEQ ID NO: 12475 - DNA, 550 bp, Homo sapiens
  MAP TO AC013332.4; EXPRESSED IN PLACENTA, SIGNAL = 0.85; EXPRESSED IN FETAL LIVER, SIGNAL = 0.75; EXPRESSED IN BONE MARROW, SIGNAL = 0.68; EXPRESSED IN ADULT LIVER, SIGNAL = 0.75; EXPRESSED IN BRAIN, SIGNAL = 0.78
agaaatcttggaggcattcgcaaaaccagggttaatcagaagttaacacagcagattagcatacaagatggagttgtttggcctccacactccagctcccaatctggctcttacagtctcatgtgccttgctcttctgccatggtccctgaaccttcagtgggtgtgcttcattttgtatagctttaccagtagtgccttggcaatggaaaataaatcgggcacagtggaattccaaatgagggagattctcaggctttgttgaatcatttgtagtcctcagaataccatgattctggttttctgggaagaagtaaaacgagataaatactgttaatatgcacacaaagattataatgaaaaagaacatgaagaaaattagaactcggttcttctttagagacttgtagctaggaagtaattcaggatgcagtttgagttgtaggcaaataataaaaactcaaaaataatggttagggctagaatctgttaacaggtattgtagttttctttggagcacatttttttctccagtttccccattcctacca

SEQ ID NO: 12476 - DNA, 544 bp, Homo sapiens
  MAP TO AC022268.3; EXPRESSED IN PLACENTA, SIGNAL = 1.4; EXPRESSED IN ADULT LIVER, SIGNAL = 1.2; EXPRESSED IN BRAIN, SIGNAL =   1; EXPRESSED IN BONE MARROW, SIGNAL =   1; EXPRESSED IN LUNG, SIGNAL =   1; EXPRESSED IN FETAL LIVER, SIGNAL = 0.91
tttcacaattgtccctgctggatcaggatacagtttcaaggcatctcagagtgtatgagttgctccagctaacgaaatacacacatgggagacatatggtttaatgaagcattcatttctgacagttcaattcaaatgattcaataaaggttagcaagtttatgtatataaagatacagttctagttatttaaaagtatggccaaactgcctttttcaaacatcctcatataaacattttaattaaatcaggggagagctacatgaatctcagagacacatggaccagttcagtaaggcgcttaacttaagttgtgctttaccaaagagatgggagcagagactttcatgctttctttcagaaggaagggcttaccaataatctggatgatttctgccaggagtactccatctgcaatgtcttgttgcaagtccttgatcagccgcttgtggcctgattttgctaggtagtggttggcccagtcagtgtaaatctgttgaacagagagaaggaaaaagtgagatggggtgagggaaaagagaga

SEQ ID NO: 12477 - DNA, 503 bp, Homo sapiens
  MAP TO AC022313.2; EXPRESSED IN LUNG, SIGNAL = 1.9; EXPRESSED IN ADULT LIVER, SIGNAL = 1.3; EXPRESSED IN FETAL LIVER, SIGNAL = 1.4; EXPRESSED IN BRAIN, SIGNAL = 1.1; EXPRESSED IN PLACENTA, SIGNAL = 1.2; EXPRESSED IN BONE MARROW, SIGNAL = 1.4
cgaaattctcaccttgtttttgaagcgtcatcctgcatctcaggtgtgtatcatacattactttgtttgactaggtctcaattggaacatgtaattgattttgtttctctatgcaagatgttgctcttaacaaacaatgctgcaaagaattgtcttctactttaaaaacttcttacagatgtggatatctatagggtaccttttaaaaatataattgttcagggtaaaggtatagatacttagaagtatgatttgtcttccagagtgattttcactatttacaaccacatcaacaataagaatgttttgcacactctcattagcgctaataccaagcattttaatattggcaacatgaagataaaaactatatcttgtgatttttctcaggactgagggtaaacattttcttttacatatttaaaagccacttgtcttttttgtgtactatctgtttatgttctttgctcatttttaaatgggtgctgatcttcctcttattt

SEQ ID NO: 12478 - DNA, 506 bp, Homo sapiens
  MAP TO AC009334.3; EXPRESSED IN BONE MARROW, SIGNAL = 1.2; EXPRESSED IN LUNG, SIGNAL = 1.1; EXPRESSED IN ADULT LIVER, SIGNAL =   1; EXPRESSED IN BRAIN, SIGNAL = 0.84; EXPRESSED IN PLACENTA, SIGNAL = 0.99; EXPRESSED IN FETAL LIVER, SIGNAL = 0.84
gtgtgagcagagacggaacctgcatcatatgggatttaaacaggtacagaagaaggtctccaaatcaaacatagcatttttaatatatccatttttactatatgaaatagataaaccaaaataatgtctttacgttataatcattttaaccatgaaacacatgcttaaaggtagtaagattacctattatattttattgaagtcatacaatcagataggaaaacatgtatgccttatgtacaataggtacatagactgagaagaagaattacaaaataagagaatgtaattatatttaatgatcatatacaaattcatgtcttttttctttcaggttatgctatgtacaaagtctggcgggacacaaaagccctgtcacagctgtctctgccagtgaaacctcaggtgatattgctactgtgtgtgattcaggtgagcttgctccaacccaaagcacagggctggctggtgctctaacagcgcattcggccagtggttactcctag

SEQ ID NO: 12479 - DNA, 528 bp, Homo sapiens
  MAP TO AC019184.2; EXPRESSED IN PLACENTA, SIGNAL = 0.9; EXPRESSED IN FETAL LIVER, SIGNAL = 0.91; EXPRESSED IN LUNG, SIGNAL =   1; EXPRESSED IN ADULT LIVER, SIGNAL = 1.1; EXPRESSED IN BRAIN, SIGNAL = 0.82; EXPRESSED IN BONE MARROW, SIGNAL = 0.87
agtgtaggtgggcatcatccaatcagttgagggcccaaacagagggaaaagacaaaggatgggtgaatttgctctctctctacctgagctggggcatccgtcctcttgccctcaaacaggactcccagttcttggaccttcggactcagaccaggacttacagacttgcactgctggccacctggttcttggtccctagggcctggactggaactatatgaccagcttttctgggcctccagcttgcagacaatcgattgtgccttctctgcctgcataactgcctgagccaagtcttcataataaatctctctctgtatatccatctatatatactctactggttctatttctctgtagaaccctaatagaaattttatatctacatgtataaaaataggaaattactagtgaatgctcttagcattatacattttctaggcagacaatattaatttcataaaattattcagattatgttcaatttattgggacaaaatttcactttgaaatcttgggaaagaggca

SEQ ID NO: 12480 - DNA, 585 bp, Homo sapiens
  MAP TO AC026273.2; EXPRESSED IN PLACENTA, SIGNAL = 0.62; EXPRESSED IN ADULT LIVER, SIGNAL = 0.63; EXPRESSED IN FETAL LIVER, SIGNAL = 0.92; EXPRESSED IN BONE MARROW, SIGNAL = 0.82; EXPRESSED IN BRAIN, SIGNAL = 1.3
cctacataattctgtccacagttcctttacttagaaattgcttatttgttcatgttaatcctatgtttattacaaataacagcatacaggtttctcccccctccccccaccccgtcatgtacagctgaatcacgtagaatttgaagatcaagatgatgaagccagagttcagtatgatggttttcgacctgggatgtacgtccgcgttgagattgaaaatgttccctgtgaatttgtgcagaactttgacccccattaccccattatcctgggtggcttgggcaacagcgagggaaatgttggacacgtgcaggtgggtccctttgctgcatatttggtgcctgaggctctgtggatttcccctccatcagtcatcttaccctctcatccccctcagatgcgtctgaagaaacatcgctggtataagaaaatcctcaagtcccaagatccaatcatattttctgtagggtggaggaggtttcagaccatcctgctctattatattgaagaccacaatggaagacaaaggcttctaaagtataccccacagcacatgcattgtggagcagccttttggggtaaaat

SEQ ID NO: 12481 - DNA, 534 bp, Homo sapiens
  MAP TO AC016212.3; EXPRESSED IN PLACENTA, SIGNAL = 1.1; EXPRESSED IN ADULT LIVER, SIGNAL = 1.1; EXPRESSED IN BRAIN, SIGNAL = 0.81; EXPRESSED IN BONE MARROW, SIGNAL = 0.95; EXPRESSED IN LUNG, SIGNAL = 0.94; EXPRESSED IN FETAL LIVER, SIGNAL = 0.98
acagcctgggaaatgttcagagaacttgctgcactcaaaaagtacttgtgaaagtcattgttcatttggtatctctgggtctcaggatgatttttctaactcatatgggatcagggccacctctagacttacagggccctggaaatttctttttctttttctttttctttttttttgcaggaccccaatctatataaactactggattaaagcacataaaattcaaggacccatgtgaggtatagtcatttattaatgaagatttaggataatggatgaagaagtgatacttacatatttgtttattgtccagtcagtgcatgtaaagattcttcatggtgtccaggcaccattgcttcctattcaggttcagaaaccacttctctgtgttctttgttgtcaaatacaccatttctggctaacttcaaatctcccaccatgggaaaaaggtgagaagtatgttataatactcacagagcctgtgagagtattataatacccatacagctctttggagcctgtttgtatgggagc

SEQ ID NO: 12482 - DNA, 537 bp, Homo sapiens
  MAP TO AL133344.19; EXPRESSED IN ADULT LIVER, SIGNAL = 0.78; EXPRESSED IN FETAL LIVER, SIGNAL = 1.6; EXPRESSED IN BRAIN, SIGNAL = 0.61; EXPRESSED IN PLACENTA, SIGNAL = 0.69; EXPRESSED IN BONE MARROW, SIGNAL = 0.65
gtcctttgcccagttttctgttgcgggaaagtattcagggttgttagtgaatgtgctgtatcttcttacttgttagccacatgataaaacagttgtattttctttcatgccatagggacttctatccggcgtcatcggattactcttccgcctcctgatgaggatcagttttatactgtgtatcattttaatgtcggcacagaggttgtcttctatggccggacattcaagatttatgactgtgatgcattcacaagaaactttttgaggaaaataggggtcaaagtgaatcccccagtgcaatgtccagaagatccttacatgaagattcggagagaggtaaggaattgacgtttgttgagttcttgtcttcaaaataaaaatccctttggaaagtcagtaaagggtgtttgtactcctgatgcagatgtgaaagagcttttagagccatagttattccagttttgttcttctttgggctagagggaaggctgagtgttagccacagagcaagaatgacttcctcactgcctcacc

SEQ ID NO: 12483 - DNA, 585 bp, Homo sapiens
  MAP TO AL133319.21; EXPRESSED IN ADULT LIVER, SIGNAL = 0.67; EXPRESSED IN PLACENTA, SIGNAL = 0.65; EXPRESSED IN FETAL LIVER, SIGNAL = 1.1; EXPRESSED IN BRAIN, SIGNAL = 0.8; EXPRESSED IN BONE MARROW, SIGNAL = 0.74
gggtttcattccaaccagtgtaatgagactccggcattttcactgcactttgagcccacactgaggtggtctttaaaaaaaaaaataaagaatgcaatattttttttctccaacataaatcttggagttgggtaattttcatttttggtgggacaggataggaaaatgctggtaaagggattggtaaggtttgtggaacagggaagaaggaaattagtttttttcttgagtttttcatgttggttgatagcagacttcaagatgaagaaattagtggcaagaagggaagaagctgatagtgagactgaaggtagaaaaaaatcaatagaagatgtccaaaaaatgagctctgaagaaaaatccttcatcaccttgttgcatttttcaaaaaatgttttggattcagaagtccaggagagatgcaagtactaagttacatgaccagaaatttagatattattatttataaaggaaagtaaaacttctttattaccactgcaaatttgctaattatcttttcctacaatagttgaaaatggagtcagatattcaattaggggcttaagtgattgagcctggggacta

SEQ ID NO: 12484 - DNA, 549 bp, Homo sapiens
  MAP TO AL109964.20; EXPRESSED IN ADULT LIVER, SIGNAL = 1.3; EXPRESSED IN LUNG, SIGNAL = 1.1; EXPRESSED IN PLACENTA, SIGNAL = 1.2; EXPRESSED IN FETAL LIVER, SIGNAL = 1.1; EXPRESSED IN BONE MARROW, SIGNAL =   1; EXPRESSED IN BRAIN, SIGNAL = 1.2
attggagacccatagacccctccctcggccccatggctacctcccccagcccatgagtgtgaggccaggaacactggccaaatggacaggcccagctggcaacatgccagggcccatggttatcacttaagctcattaagcagccgtgacaggacgtggcctgggccagctgtctttcctccccaccccactccagccctcctgggaataggacctgatgacaggcactggctttcagcagctgcaagcagaagtctctctgtcatgggggaagatccaaagatacacggaccgaacttccccaggctggcctctgggccccacctgctgcctgacctcctccgggctgggcacgtggacccgtgtggtgagtgagcacaggacgtggacgctggagccaggctgcctgggctcaaatcccagccctgctgctccccagctgtgtgagttgcttcactccctgagcctcagtctcctcatctgtgatatggggggacccctcgctttggagacctgccacaagctgatgcacgcaaagagcttgatcaa

SEQ ID NO: 12485 - DNA, 581 bp, Homo sapiens
  MAP TO AL121747.19; EXPRESSED IN BONE MARROW, SIGNAL = 0.83; EXPRESSED IN ADULT LIVER, SIGNAL = 0.91; EXPRESSED IN BRAIN, SIGNAL = 0.78; EXPRESSED IN PLACENTA, SIGNAL = 0.68; EXPRESSED IN FETAL LIVER, SIGNAL = 0.97
ttgatgctgataatttgaccgtttataagtcattttgtttgtgtccacagaaatcaagatgactaccagctggttcgaaaattaggccgaggtaaatacagtgaagtatttgaagccatcaacatcacaaataatgaaaaagttgttgttaaaattctcaaggtgagtacaagagataatttcagaggtatttggaatatagatttttaaaagtagttttgaagacttttttaaaacagcatttaaaaggtttttggtgccaaagcaaataaataaaattttattgtatcctatgaactcaatagaacaagttctgcttatttgacagatcgggaaactgaagcaagagaagtgatttgagttgactcatatagctaggttgtggcagagtaagggagcaaaggtacagtctcttctctcccagttattgcctaatacttatttcctttacttttcattatataatgaggcttttgttttcaataaataaatcattgcctctactttgtaaagatgaggagtcacaggactcgagggggacagacagatgatattagtgcagctagtcgggtgtaattgcc

SEQ ID NO: 12486 - DNA, 554 bp, Homo sapiens
  MAP TO AC006457.3; EXPRESSED IN PLACENTA, SIGNAL = 0.76; EXPRESSED IN FETAL LIVER, SIGNAL = 0.51; EXPRESSED IN BRAIN, SIGNAL = 0.56; EXPRESSED IN BONE MARROW, SIGNAL = 0.61; EXPRESSED IN ADULT LIVER, SIGNAL = 0.9
actgcacagggttgaccttcaaaccataggtggaatgaacagaagcttgtgcgtggcccacatgagaaaagatggcacatcctgtggtcttccacgaagtgtctctagcagtcatggtggcagcattccagcaaagggtagctaagggctgcaggatagaaaattccgaaagcaatgatttcttccagttgtgcagtggaagccttctcctgcaagaaagaaaccaaagcaaagatcagactacaagcagcaaggtcagagtccatggggagaaagtttacaggcaccttcccacagaaagccaaacatcaggagccagaagagaaagcttcctaaagaagccagagaagtcaagactagccccacctggctggaatttccagagacaaacgttaaaccacagcctgaaaatgcagttgcatgtttcaacccggtcttatcctctaggtgaggctagaccctgcctgcctggtctcatgcttattactctgtgcaatgtaggtggacaagaagtacccctggaaggacctgggaggggaaaataatgccacctt

SEQ ID NO: 12487 - DNA, 511 bp, Homo sapiens
  MAP TO AC021468.2; EXPRESSED IN LUNG, SIGNAL = 1.5; EXPRESSED IN PLACENTA, SIGNAL = 1.1; EXPRESSED IN FETAL LIVER, SIGNAL = 1.1; EXPRESSED IN BONE MARROW, SIGNAL = 0.96; EXPRESSED IN ADULT LIVER, SIGNAL = 1.3; EXPRESSED IN BRAIN, SIGNAL = 0.97
ttgtcaagaccatatgggggcctctctgactggcagctcccgctagttcagagaacagtgttactggcaaatgctgctttggagtggtgacctgtgcgatggactcatccaggctgtcccttggagaagggagggtacgcagggcatggtgcccctctctagggccagggctgaaggaggagcctgaggcatgaacacgggggggcagggcctccagcataccttgtagctgtaggggcaggcacagcggtacagctccacagggtcctgggtgcatgtcccgttattcttgcacgggctggagaggcaggcattgcatttggccacaatgttgatgtccactggccctgggcagcaaaaccagagtactgatggcaggtcctgagtgcgctcactgccatacctcccttcccctctgctctgggccctccctcagccagcgccagccccttcccaactccatgcccagatggcagctggctctcctcagccagcacatccagtccagcta

SEQ ID NO: 12488 - DNA, 599 bp, Homo sapiens
  MAP TO AC016206.3; EXPRESSED IN ADULT LIVER, SIGNAL = 0.7; EXPRESSED IN FETAL LIVER, SIGNAL = 0.58; EXPRESSED IN BRAIN, SIGNAL = 0.51; EXPRESSED IN PLACENTA, SIGNAL = 0.65; EXPRESSED IN BONE MARROW, SIGNAL = 0.45
tgaggacacagtgacaaggcgccacctatgaacaaggaagtgggccttcaccagacactgaatctgtcaatgccttgatcttggacttccaagtctcctcaactgtgaaaaatgaatttctattgtttataagccacctagtctatggtattcttcttatagaagcccaacagaataagacactccattcagaaacagtcgcttctaatgaaaaaaaagattatgagcgcctcctattggcaggcatttattgtgcattacggcagtgatttttcagctgaagaaacacgagccttgggcttcgaaatctccaggtatataatctcacttttagaatcatagagactatctcatttctaagatttttttctggtgttatgaagatgaaggaaatctctgagattccttcacctagaatttaataacagtacattccttttctccgtttcttcttactctcatttctccaatccatatacctcattcttggagactacttcctgatggttgttgatttgaataaatcactgaggacactacgctcccatgaagaaaatttggttaagccagtttagtccacaatttctccagtgtggcaa

SEQ ID NO: 12489 - DNA, 523 bp, Homo sapiens
  MAP TO AC025115.2; EXPRESSED IN BRAIN, SIGNAL = 0.46; EXPRESSED IN BONE MARROW, SIGNAL = 0.48; EXPRESSED IN PLACENTA, SIGNAL = 0.46; EXPRESSED IN ADULT LIVER, SIGNAL = 0.6
ggggttctttatgcttcatggatctgtatgttcattgtcctctctagatctcgtaagttttctgtcattatttctttaaatattattttctgtcattatttctttaaacattatttccgtttttctaactcttctgcagtttccataatgtgtgcattagttttcttgatagtgtcccagaatttccatggtttattctttttgcttttcattccaatgattgggtaatctcaagtgaactgtctttgaactcattgattctttcttctgcttgattgagtttgatgctgaagttcttgatggaatttttcagttcagacattatgttctttatctccaacattttttttatgatttccatctcgttgtcaaatttctcatcttttattgttttcctgatattgtttagttgtttatttgtatttttctgtcactcactgagctactttaaaaagattacttttaattattagttagaaagtttgtatatcctatttctttagggttggttaccggtcctttt

SEQ ID NO: 12490 - DNA, 587 bp, Homo sapiens
  MAP TO AC025129.2; EXPRESSED IN PLACENTA, SIGNAL = 0.51; EXPRESSED IN ADULT LIVER, SIGNAL = 0.56; EXPRESSED IN BRAIN, SIGNAL = 0.5; EXPRESSED IN BONE MARROW, SIGNAL = 0.47
tgctcagggtggaggtaaactgtatcctgtgtctcttaagaatttgtttctcttttgtatagaagacagagaacagaataaagagtgtgtgattttttttggtaaactgtttgtgctttctctgtaataaagtatgttacttttctagcacagggtagctttggcatagtaaacaacataggtaatgatgttatcttttccaaggaagccgccataagcatgcttcacattttctcccacatgatggaaaaagaaagaaagattttcgctcctcattttagcatttcattccattgcaaagggctttgggcttggaatgacacacattccataatctctatagtcattctgaattccaaacatgcttctgcatctccatgtcttctgagcttcgtggctcttatctctgaagtgcactgctggtctatcggcaagaattcaagaaaagcagacctcagccttctatgcatcttttaatttggccaaaattaagtgagaatagcaaatcgtgcactttttagtccaaatggagacttcattgtgagctacaaagccagtttgattttgcagaatcccattaaatgccg

SEQ ID NO: 12491 - DNA, 598 bp, Homo sapiens
  MAP TO AL138811.1; EXPRESSED IN PLACENTA, SIGNAL = 1.1; EXPRESSED IN ADULT LIVER, SIGNAL = 0.9; EXPRESSED IN FETAL LIVER, SIGNAL = 0.85; EXPRESSED IN BRAIN, SIGNAL = 0.64; EXPRESSED IN BONE MARROW, SIGNAL = 0.66; EXPRESSED IN LUNG, SIGNAL = 0.93
gcctgagtttgaacacctccaatcagtatcagctttaaacaacactttttcaagatggaagaattaataaattattccaatggttacagaaaggttatctgaattaagaaaaatgccctaggtctggtcatcagaaggttactggtgactccaagaacattctcagcaaaacagtgaaggcagaaaccagaatccaaaaagactaggaataagtcatgaagaggggaggcagaatgtaattttcccaaaaatatttactgtaaatatcaacatacaaattagaaaatatcaatataattttaaggttaccatctataattatttcctctataaatgagccttcttttttttcttctttttctctgtattcagtatctgaacaaaaattctccatattttcttcccttatttcttgctcagtattatatttctgtataatggtgttttctgatttttcagttgacatttcactgttttcattatttacttctggaacattctagtgtaaaatggaagagattcttttaaaaacattgcctacaagtataaaacatttgagcaaatgtgataaatgtggaatctgtgtttcagttcaacc

SEQ ID NO: 12492 - DNA, 575 bp, Homo sapiens
  MAP TO AC012480.3; EXPRESSED IN ADULT LIVER, SIGNAL = 0.71; EXPRESSED IN PLACENTA, SIGNAL = 0.67; EXPRESSED IN BRAIN, SIGNAL = 0.72; EXPRESSED IN BONE MARROW, SIGNAL = 0.78; EXPRESSED IN FETAL LIVER, SIGNAL = 0.7
agggagtggtggtgtgaaacagcctcattgaggttttccatcaatacctgtaaggaaaatggaggactggcacattgggatgtaataaacgtttaaagctgaataactggcccctgtatctatacggaacattatttcttgttcagccgcaatcaaatttacccaaggcttgttcacagagatggaaaagataggggcctggacggcctcaaggccccatcagtcatctagaggacgactttcagaggcttgatcataatccaggaataaagttagaggtgcttgtccttgccctttctctttcccttgccctttcctgtcctgcaggatccccttgttgggaggttggcgaggttgtggctgtgacagcccggaaggaagaggtggccttcctcatgagaagagagaggacacttgctcttccaaggaccctcttgtttgcaatgaggacagggtcctggaagtggcttgtaacctggcggtttggaacattctctactccagtgtcctggatttctgcagcaatgacaggcccccattctgttagtagtgtagggatgagccttggggttatt

SEQ ID NO: 12493 - DNA, 599 bp, Homo sapiens
  MAP TO AC007923.2; EXPRESSED IN LUNG, SIGNAL = 0.83; EXPRESSED IN PLACENTA, SIGNAL = 0.76; EXPRESSED IN ADULT LIVER, SIGNAL = 1.1; EXPRESSED IN FETAL LIVER, SIGNAL = 0.9; EXPRESSED IN BONE MARROW, SIGNAL = 1.1; EXPRESSED IN BRAIN, SIGNAL = 0.6
cttcctacctgtgccatgagtaatctattttctatccttagtggagatcctaatctcgctagcccttggcaattaacaaaagaagctgaggcagagctgcagctaatcaaaaagcaagtctataaagctcaaataaatagaatagatccagagaagactctagatttgctatttttttcaactcagcattcacctactggtgttattgttcaagagcaagatcttgtagagtggctttttcttctacgtactaattcttggactttgattctttatttggatcaaatcactactataataggaaatgggggaactcggattgttaaattacatggatatgatcctggaaaaattattgtccctctcacgaaggcacaaatacagcaagcttttataaatagtcttacttggcaaacacatttagctgactttgtgggtattctcaataatcattttcctaaaacaaaatttttatttcaatttttgaaattaactaattggattctccctaaaataactaaatttaaacaaattgaaggtgctgagaatatttttacagatgggtctagtaatggtaaagcttcttattctgggtcaaa

SEQ ID NO: 12494 - DNA, 506 bp, Homo sapiens
  MAP TO AC016205.4; EXPRESSED IN PLACENTA, SIGNAL = 1.3; EXPRESSED IN ADULT LIVER, SIGNAL = 1.6; EXPRESSED IN HELA, SIGNAL = 2.4; EXPRESSED IN BRAIN, SIGNAL = 1.6; EXPRESSED IN BONE MARROW, SIGNAL = 1.7; EXPRESSED IN LUNG, SIGNAL = 1.4; EXPRESSED IN FETAL LIVER, SIGNAL =   2
agcacaagaaatgggaccagcgggaatgtcaaatggaacattaaaacatttaaaaatcactacattagctgagcaaggcttaaataatatttgcatggcaaagagtctaaataaagaagcaagaataatgaagtaatagaaaaagaaaatggctataaaatgatcctttgaaaaagtaatatgttggaacagaattgcaccaatctttccaatctgtaaaaggtggagtcaatatgccttttacacacagtctttcctaacatttaaaatatgtatgtgcataaatatttcttataagactaaggaggcaacaggtctcacctcattaagaaccatgtttgctgtgctgctgatttcaccattcaaatagtggttactgcttgcagggatattttccatgatagaaatcttaaatggatggggagggaaaaagaaaaaaaaaaaaaacaagagaagaagattgctaattaaaagggaaagaaacaacaaggcgggatacatcagtc

SEQ ID NO: 12495 - DNA, 535 bp, Homo sapiens
  MAP TO AL133316.2; EXPRESSED IN ADULT LIVER, SIGNAL =   1; EXPRESSED IN BRAIN, SIGNAL = 0.92; EXPRESSED IN BONE MARROW, SIGNAL = 0.97; EXPRESSED IN LUNG, SIGNAL =   1; EXPRESSED IN PLACENTA, SIGNAL = 1.1; EXPRESSED IN FETAL LIVER, SIGNAL = 1.1
tgttaactcccacgtttcccctggcctccagacccataatcagccacttatttggcatcttcacttggatgactgataggcattttaagcttaaaatggataaaatagaaattcttccatcttcatctttcaccccttttccaccatctacttcaatgaacacagccctatttttatcttcgtaggtattttttactttttaattttaatgtttaatttacaacattaaattgaaaacattagttttcatttcaaatattcaaatatgttgaatacattttttgctaatcaaaattaagaactctgaacatatgtcttactatatgtgccctgaaagagctgggctaaaaagaggtgatttaaaataataatgatttcaaagagctttttgttaacttgacacatggatgatgaaggcttataagcctttcatcagtataacctcaatttagtaaaatctggtttagtaagcattaagaagacaataccccaaattattttcatttttaaataatgggctttcctgcaatagttt

SEQ ID NO: 12496 - DNA, 570 bp, Homo sapiens
  MAP TO AC022174.2; EXPRESSED IN LUNG, SIGNAL = 1.3; EXPRESSED IN PLACENTA, SIGNAL = 0.96; EXPRESSED IN ADULT LIVER, SIGNAL = 0.89; EXPRESSED IN FETAL LIVER, SIGNAL = 0.77; EXPRESSED IN BRAIN, SIGNAL = 0.76; EXPRESSED IN BONE MARROW, SIGNAL = 0.76
ttcaggatgcagtgagttgcctagaggacttgagcatttgtgtaatagcatctacagtctgctatatttttagtcaatgtaattttgaaacaagacctgctttaacacattatagagaaaggaactgaagatacagggagatgaggatgttcaagggcatcatactctctgggatctgactaactactctttcaccacaactcatgagaggacacgttcttcactaagttcaggggatggcttagcaaggtggatattaatctttgaaatgttctatggcgactatgttttcctggaccagagatcctgctttaatattgaattatcaggtctcagtgtgaatgaagaaatcatagagctataccaatcaggtggtaacaattcaccttcagagacaaggtgagtgaaatgatcacagcacaacagagcagcatttcccaaacttggctgcacattttacttaccttctgtatgttttaaaagtacagattcctgtctcctgctttcaggggttttgactgaattggtctggggtgaggcccaggcaacagtgcttttccaaactccctg

SEQ ID NO: 12497 - DNA, 585 bp, Homo sapiens
  MAP TO AC016576.4; EXPRESSED IN ADULT LIVER, SIGNAL =   1; EXPRESSED IN BRAIN, SIGNAL = 0.87; EXPRESSED IN LUNG, SIGNAL = 0.99; EXPRESSED IN PLACENTA, SIGNAL = 0.99; EXPRESSED IN FETAL LIVER, SIGNAL = 0.87; EXPRESSED IN BONE MARROW, SIGNAL = 0.79
ctagcagaccgtcttggtccagtgatgtctaccatcatatttcaatggcctttcatgttggtgtcccttcacagatgtcgaaagcttccccgggccttgaaggactggcaggcttttttggacctgaagaagatcattgatgatttcagcgagtgttgcccgctgctggaatacatggccagtaaagccatgatggagcggcactgggaaaggataaccaccctcaccgggcacagtctggatgtggggaatgaaagctttaagttaagaaatatcatggaggcacctcttctgaaatataaagaggaaatagaggtagagtatgatgtgatggaagattgcaaggtctcatgggatttatttgataacatttctatattatggaatattggatcagtaaactacactcagacaattgaaactcttctcctggcattcagccactagttccttcaacaaatgcttatttggcctaagatgggacagattctgcatcaggatataacaatgcagtcctgcatttacagattattaaataattttacaaataaaggcacagttataagctgtggcaaataccattga

SEQ ID NO: 12498 - DNA, 553 bp, Homo sapiens
  MAP TO AL161661.1; EXPRESSED IN LUNG, SIGNAL = 0.85; EXPRESSED IN PLACENTA, SIGNAL = 0.69; EXPRESSED IN FETAL LIVER, SIGNAL = 0.63; EXPRESSED IN BRAIN, SIGNAL =   1; EXPRESSED IN BONE MARROW, SIGNAL = 0.7; EXPRESSED IN ADULT LIVER, SIGNAL = 0.81
tagtggtgtgagttggctgggttcttctcctcttaggttatgcaagtcgtccgagagcaaatcactcgagctttgccctccaaacccaactctttggatcagttcaagagcaaattgcgtagcctgagttactctgagattctacgactgcgccagtctgagaggatgagtcaggatgacttccagtccccgccaattgtgtaagttccatctcaggggaggctggcgggggaggtggctgccagctctgctttccttccagagctccactgtccccatgaccttccgctcactccagtgtgtgtccaccccagggagctgagggagaagatccagcccgagatccttgagctgatcaagcagcagcgcctgaaccggctctgtgagggcagcagcttccgaaagattgggaaccgccgaaggcaaggtgagaggagacggggcaatccttggtgccgggaagagcctgcctggatggccccttttgtgcccaggcctttcccagtactgtcgttgctcacctgtttggcttcccttgtgttccagaacggtt

SEQ ID NO: 12499 - DNA, 500 bp, Homo sapiens
  MAP TO AC018731.3; EXPRESSED IN ADULT LIVER, SIGNAL = 0.66; EXPRESSED IN BRAIN, SIGNAL = 0.52; EXPRESSED IN FETAL LIVER, SIGNAL = 0.57; EXPRESSED IN BONE MARROW, SIGNAL = 0.56
actactttaaaatttaccaattccgtggatcattttaataaaatgtaatttttaaattttattgaagaagtatttctaaaattacaaaaatttgacttggaaataccttttttttctttgaatattacatatgcaactcccttggttcttgtcggatatatcacatcttcaacatctccgccctcattcttaatgtcttggaagtggctcttcactaatacggccaataattgatcactaaaaaggtcaactggaagaccagcaactacaaccgttctttcaggagctttggattccttgacattcaaaactgatgcctgtaagagaaacagcaggttattctttaaaaacacaagactctatataataaagatgacatcacacttcagtggagagaatatcttattctataaaagtgccggtgcagctggttagatactttttaaaaggggtgtaggggagtaaatccttgcctcacaccatataccaacataaactct

SEQ ID NO: 12500 - DNA, 596 bp, Homo sapiens
  MAP TO AC019275.3; EXPRESSED IN PLACENTA, SIGNAL = 0.72; EXPRESSED IN FETAL LIVER, SIGNAL = 0.69; EXPRESSED IN BONE MARROW, SIGNAL = 0.67; EXPRESSED IN ADULT LIVER, SIGNAL = 0.77; EXPRESSED IN BRAIN, SIGNAL = 0.6
actcccccttcccactttcctgtgattctatcagtagtttattaacaaagtgaacagtatatttagagcacaggtattaaatatcaattctaaccagctatctatctctttttctatacatgtgatatttggtatatacaacaataaataaaataattaccttgagaatttagagacaagttctttgacaaggacccttcaaacaatgatgagttctcaagatgttgcattaagagactcagaaattcttgctttgatccaggatgctcacttccaaaattatcattttcaataacatatgctacttcaattgcatatgaaggattaaagtttcgatttctgaatgcatctaaggcactattccagatattggctttgttgatatacaatcttttagttttttttttaatttggaatcctaactctattaatagtgttgatacatttcttctaaatttgctgccttgcctataaaacatgaatttaaatatagagataagtactttaaagtactttatgtgaaacagcagttatatagccaataaaacaagacgaggggaaaaaaagattaataggatattcttccccaattccca

SEQ ID NO: 12501 - DNA, 515 bp, Homo sapiens
  MAP TO AC018395.4; EXPRESSED IN ADULT LIVER, SIGNAL = 1.1; EXPRESSED IN FETAL LIVER, SIGNAL = 1.1; EXPRESSED IN BRAIN, SIGNAL = 1.2; EXPRESSED IN LUNG, SIGNAL = 1.1; EXPRESSED IN PLACENTA, SIGNAL = 1.2; EXPRESSED IN BONE MARROW, SIGNAL = 1.2
tgtgagagggtcacagaagcatgagacattatctttacactatagaatcagaaaatatagttgaaataagaataataacatctgatgtggtactttatataatacctcaagtccatgaagcacattatgaatgatacaattcagaggaagtaaagttcattgatgggcagaataaaaatggggagcttcacgaaggagatggagtttgaggtgaactcaaaggattcacagggtatatgcttgagaaaagcctgtaaagatgttacagaaatgacagtatggtctgtttttgagacaatcagagttacctgactgaaaaagagatttcagtttgagacatagggttttaaagaataatagtaataattttctagcatttatttcatcttaacaatgttttaggtactgtgttaaatgttttgttgcttgtttaaaggaaaaatgtagatagacactgtaaaaaaaaagaattctaaagagaatcagaataatatagatttggtgcaggcaagaaa

SEQ ID NO: 12502 - DNA, 539 bp, Homo sapiens
  MAP TO AC013799.3; EXPRESSED IN PLACENTA, SIGNAL =   1; EXPRESSED IN BONE MARROW, SIGNAL =   1; EXPRESSED IN LUNG, SIGNAL =   1; EXPRESSED IN ADULT LIVER, SIGNAL = 1.2; EXPRESSED IN FETAL LIVER, SIGNAL = 0.7; EXPRESSED IN BRAIN, SIGNAL = 0.96
aacgaagcaactgggatttgaatttcagtgtctacaaaatgtgagttcttttctctatgcctcagtgtcttccttatattgagtcacctgtgccaacacttaagtggtaaggactgacagaaaatcaatggcaacaaatacgtctgctgtacttcagctttcagttgcaaatgaaggggcagctgtcaagtaaaaatatagaagagttgcaaagtgagaatttgaaactacaatatacaaactctatcaacgtgttaatcatgcttgttattaactctagggtcagccactgacaaatatattgaggaaacctcttctacaaatcaagtaatgagacttctttttactccctcccctcttttttcccttctctttctgcttctcctcttcccccttttcctctttctcctcctcctctttttcatcttcctcctcctcctcatattgatgtttgttattaagagaatatttaatgctataaatggataaaagtaagatttgaaaaggtttgagttgcagaaaacaaaaaccaatctggg

SEQ ID NO: 12503 - DNA, 569 bp, Homo sapiens
  MAP TO AL121946.11; EXPRESSED IN FETAL LIVER, SIGNAL = 0.8; EXPRESSED IN PLACENTA, SIGNAL = 0.82; EXPRESSED IN ADULT LIVER, SIGNAL = 1.1; EXPRESSED IN BRAIN, SIGNAL = 0.76; EXPRESSED IN BONE MARROW, SIGNAL = 0.64
ggcaccataataggagcaggacagggagctgcagaagctgtactgggagaacctccaggatgtcttttaggagatttaagcaacagtttctactgatgcaatcttataactgaaagagataatgattcacaaagtatttgccactatttataatactgacttgaatatgggccttatttatcatctgttctgtctattcaaataattaccttgtccttgggaacagtctgaacaggttctaatggccacacagttgatgagatcaaaattaacaaaggttgtgttagacaccatcagttcccatcttttaggagttttaatcccagatgacatacacagacttccctgtgatttaaaagaaaaaaagatgaaagcaaaataagaaaactggacacatgaaatacaattcataatgcatgaataaaaacaaagataaaaaagcgagctattgactaagagaaaatatttgccaatcacacatatgacaaaggacctatatccagaatatagaaagaactcttaggtttcaacagcaagaaaatagacaacgcaattcaaaaatcaggaaa

SEQ ID NO: 12504 - DNA, 518 bp, Homo sapiens
  MAP TO AC010458.2; EXPRESSED IN BRAIN, SIGNAL = 0.56
ctttctcccatcgtgctctcattttcctgcctgtgaaatggaaggattgtcccagatgattttgagtcctccttcgaacttgatcgttctgcagttgtatttatttaatggaaattttccgtttcctctgtgtgtcgccctctccatgaggcaggtgttcctgtgaaggacctccttgcacacatctttccccagtcttcatcgtccacacttaaaatgcccaactcactctcttcctctgtcctccagggcaatatcttctctctacaccaatgatggtgacatggaagctctcgaggctgacctgaaacatcgatttacccgacaggagtgggacttggctaagagcctacagaaaaccatccaagcagcgaggtctgagaattactctctgaccgacttctgggcctacatggttatctctaagcaaaccagagaagtaagtcattcccagctggggacctggggtgggggtaggagcaaggggtctcagggtgtggggttaccaaagatgctga

SEQ ID NO: 12505 - DNA, 570 bp, Homo sapiens
  MAP TO AL139421.2; EXPRESSED IN BRAIN, SIGNAL = 0.5; EXPRESSED IN PLACENTA, SIGNAL = 0.46; EXPRESSED IN FETAL LIVER, SIGNAL = 0.6; EXPRESSED IN BONE MARROW, SIGNAL = 0.63
aaaggatttagttggaaggtggaaatttacgtattaagcaaaatcagaataagaaataggttatctatatatttcattctgaaacctacaaataccttatgcttttcaggttatgaaagagcaagaacagtacattgccactcagtacaaggaggccatagatttggggcaagaattgaggctgacccgggagcaggtgcagaactctcatacagaattggcagaggctcgtcatcagcaagtccaagcacagagagaaatagaaaggctctctagtgaactggaggatatgaagcaactctctaaagagaaagtaatccctattttaaataatcttatgtatctgaaatcttacaaatattagcattttttttgaactgtagaatatagttctttcaaaaatgaactgtattgcacaacagtgtgaatgtacttaatcccaccgaattatacacttaaaaatggttaaaatggtcaattttgtgtgtattttaccacaattttagaaaataatgaactgtgttatatatagataactttgtaatataaccaggaagtccttcagaactg

SEQ ID NO: 12506 - DNA, 563 bp, Homo sapiens
  MAP TO AC011599.8; EXPRESSED IN ADULT LIVER, SIGNAL = 0.89; EXPRESSED IN BRAIN, SIGNAL = 1.1; EXPRESSED IN BONE MARROW, SIGNAL =   1; EXPRESSED IN LUNG, SIGNAL = 1.1; EXPRESSED IN PLACENTA, SIGNAL = 0.96; EXPRESSED IN FETAL LIVER, SIGNAL = 0.85
aggtccttcatacacgccagccagagccagctggggcaagaggctcctgagagcagctacaggtggagctggaactggggcagagccctcagccttagcccacatgcaccccaactcaagtctatgggagagatctgccaccatgcctggtgggggcacacatggtgggcagagctgccctgcgcttgcatgtgtggcctgaggggctgtgctctcctacctgcttgtcctgcaggtccgaggagagctcatagctctcggagagtgagcgtgagcgcttgatggcctcctcctcagcctgcttgcgcaggatggaggtcgagtgctgcagcttgggcctccgcgtgcgctgctgttgccccggcggccccgagtacagcccataggctcccactgacgtgtgctcgtagtgatccgggctcaggctggaaccgggcaccaaggggccctgggggtaggctgaggggctgtccagggatgtgccagtctcactgctgggggcctcgccctcgacgctgcagaggagagagaggtgagaagcttctggtaagcgggaaatctga

SEQ ID NO: 12507 - DNA, 506 bp, Homo sapiens
  MAP TO AL157396.2; EXPRESSED IN PLACENTA, SIGNAL = 0.83; EXPRESSED IN BONE MARROW, SIGNAL = 0.65; EXPRESSED IN FETAL LIVER, SIGNAL = 1.3; EXPRESSED IN BRAIN, SIGNAL = 0.62
tgtggtaagtgacagctcggtaccctttcctcacagtgtacatccatctggtaagaacctaaaagaagatgacaccattcagactttggaatagaattctaaaggttagaaggtctgtggcaatcttatctaaaaagatgtgttggtcttgtagataggggttaagctgatgtatttagaaagttaataataatttaaaattcaaactgagtccatcttttgaaccacagaaaacatcagtgaagcagagccacagaatcacacagtattttaaattaaataccctctgacctctacaggtactttgaatttctccaccacatttatttcaaaaaacagtcgtattccacatttaatcaatccgtgctctgtaagggggaagtcactgaagcggaattcgtacagttctgctgagcgtgggtctggcaagtcctctttctgttgaaataaggatgggttgtttcagattacattcatctgttttccctttccactcccatagccaa

SEQ ID NO: 12508 - DNA, 554 bp, Homo sapiens
  MAP TO AC009507.3; EXPRESSED IN LUNG, SIGNAL = 1.2; EXPRESSED IN ADULT LIVER, SIGNAL = 1.2; EXPRESSED IN BRAIN, SIGNAL = 0.94; EXPRESSED IN BONE MARROW, SIGNAL = 0.92; EXPRESSED IN PLACENTA, SIGNAL =   1; EXPRESSED IN FETAL LIVER, SIGNAL = 1.6
gtcaattctcccaaaccctgctgctgatttatcaattacatttatgtactattctgaatcatgtgttgtcattttaacaatgttcacaacgtattcaccagtagattccatctcaagaaatcactttctttgctcatccatgaggagcaactgctcattgattaaagttcaatcataagtttgcaaaacttcagtcacatctacaggctccacttctaattctagttatcttactatttccaccacatcttcagttacttcctccactgaaattttgaaaccctcaaagtcatccatgagtgttggaatcaatttcttccaacctactgttaatgttgatattttgatctcctcccatgattcacaaatgttcttcatggcatatagaatggtgaatactttttagaatgttttcaatttaccttgctaagattcatcagatgaatcactatataaagcagctacagcctttcaaaatgtatttcttaaataataagactcaaaagtcaaaatgactccttgatccatgggctacaaaatgcgtggtgtttagc

SEQ ID NO: 12509 - DNA, 551 bp, Homo sapiens
  MAP TO AC013800.3; EXPRESSED IN PLACENTA, SIGNAL = 0.56; EXPRESSED IN FETAL LIVER, SIGNAL = 0.49; EXPRESSED IN ADULT LIVER, SIGNAL = 0.52; EXPRESSED IN BRAIN, SIGNAL = 0.58; EXPRESSED IN BONE MARROW, SIGNAL = 0.57
acccgcgttacaattttgagggcatgacttggctgtggtcccacttgctaaatgtgcgacaaaggcaagccacccgcctgactgcactgctgcatgggtgtaatgaggtgtgaaagtgaggaagtggagaaggggtgcaggtgaaccatgatgcctgttaacaagaggattcagtccaagttgatggcccccaggccctggagcatggggtctaactggaatgagaccaggactagagcttggtattatgggagacccaagggttccctgcagaggaagagccctcctaccgacacaggtgggcagaggccggtcccaggtccggcgctctccactcagacacagcagctcctcactaccccgcaggctgtatccagggtcacagctgaaggacacggagctccctgcaaaatgaccttcatcatgaaccttgtagccaaacttgggggttcctgggtcctcacatttgatgagttcaaagcctggtgaggagagaagaggtagagtgagtaagacctattgtggcagaaaccatgcttcctctcttccct

SEQ ID NO: 12510 - DNA, 592 bp, Homo sapiens
  MAP TO AC025516.2; EXPRESSED IN LUNG, SIGNAL = 1.3; EXPRESSED IN PLACENTA, SIGNAL =   1; EXPRESSED IN FETAL LIVER, SIGNAL =   1; EXPRESSED IN ADULT LIVER, SIGNAL = 1.1; EXPRESSED IN BRAIN, SIGNAL = 0.97; EXPRESSED IN BONE MARROW, SIGNAL = 0.96
agtcatgcaggagggaagagtaaaggattgtatgggaagggttatttctataatcatacctagtgataagaacagcagtgtcatggtgggaagggtgaacatcatcaaggtcattctgagtttgttgccatgaacaaaagttctttaatgtggtagcaccatcaaaattaatgactggtccttcctatgcaaaataagcaatgcaatactatgtcaaaatattaacgtcctcttttccttccaagtttatcagcatctgcacaatttatcaaatagcattctcacaggtgaatgaaggagtgacagcatctcttcttcatatattaactataacgtattttagcaatatctaaaacattatgatcaaaactgaatctaattagatcttcttaatacaaccatccaatatttaggaaaaaaacttttaaaaacgactatattctaaatcctctgacattaggattataaaaatgaatactaaggttttcaatattttatttttgaattgtttattcacttttgttacttcctttactcagttaaacactgttgtcattctattttatttccatcacaacaaataagggtaatc

SEQ ID NO: 12511 - DNA, 554 bp, Homo sapiens
  MAP TO AC019221.3; EXPRESSED IN PLACENTA, SIGNAL = 0.64; EXPRESSED IN ADULT LIVER, SIGNAL = 0.94; EXPRESSED IN FETAL LIVER, SIGNAL = 0.64; EXPRESSED IN BONE MARROW, SIGNAL = 0.78; EXPRESSED IN BRAIN, SIGNAL = 0.69
gaggcacaaagaaggtctcggcaatccaccgcgtgttttccaggttatctgctccattcagcttctccacaacctgacgaacccggctgaggggcctgctcacagtcccacagcaaatgagctgatgtggccaggacaccaggcaggggggctccaggcggagccctggacctccatcccgcagcctctcctcatctgggtggtgcctcacaccagggccagtgggccggaggcagggaagcaactggcactcaccacgagctctcccaagctcactcagtacaagcggtgtctggcacatttcatttccgttttggcagggtgactggcttggaggatcagcacaaggacgataccaacatctcattaagtcatctgactagttgtccctcccactctgaccaggtttcccaagagttcaaaatagaaggtggagaaataagatctggaggataatgacaaaggcagttcactgattgacatcaggctgaatcacagcacccaaatggctatgtcctgtccaaccatttctaaccatgaatttggacatgcag

SEQ ID NO: 12512 - DNA, 567 bp, Homo sapiens
  MAP TO AL133344.19; EXPRESSED IN BONE MARROW, SIGNAL = 0.89; EXPRESSED IN PLACENTA, SIGNAL = 0.84; EXPRESSED IN ADULT LIVER, SIGNAL = 0.93; EXPRESSED IN FETAL LIVER, SIGNAL = 0.76; EXPRESSED IN BRAIN, SIGNAL = 0.81
cctgctgctcccaaattaagaagagaaattaagttaaaaaaatcacatgacctctgtacagttggtaaaagttttgtaaaatggaatttggatcttttaaatagaaggagatgtaaaatactgtattcttagatatcagtttataaatgtttttccatttttattacagagacatattgatgtctttgactgttggaaaccttgcagagcaagaatttgtaaccattgcacgtcactaccgtgtgcctgagggcacatgttcagatatggatttcttaatcgcactggcccacgaaaagttcaagaaaaatatgtttgagaatttcgacactttcatttattcctgtgtgtatgaagatcgagaaaagtaagcttttgttttattgattctaatcatttacatttctgtgaacctgagtaatgaaggaatttctattttatcaaaaagtgcaaaaagaaaatagacatgtgtcatcatactcatactctactatttagcacaaacaccttaaatcattttcggagaagtatttaggtacagatatttcccagtgatggagagcttgt

SEQ ID NO: 12513 - DNA, 595 bp, Homo sapiens
  MAP TO AC011841.3; EXPRESSED IN LUNG, SIGNAL = 1.3; EXPRESSED IN ADULT LIVER, SIGNAL = 1.2; EXPRESSED IN FETAL LIVER, SIGNAL = 1.6; EXPRESSED IN BRAIN, SIGNAL = 1.3; EXPRESSED IN PLACENTA, SIGNAL =   1; EXPRESSED IN BONE MARROW, SIGNAL = 1.2
gaggactgctttgccttttgatctgagagttgcaaatttccctaaagaatggcccttgtggataagcgctaagtcaagagacagtgattggacagaatttgtgaggaattcgcccccagatcatgaaagtcaccctgaaccccgcctcgtggtggctctgctggatggacgggactgcactgtggacatgcccatcctgaaggacctggccacctggccttctgtgaggctcagtccatgcaggagatccacgagaaagttctaaacgaagtcgtgggcgccatgatgtaccacaccttctccctcaccagggaagacctggaaaatttcaaggccctgagagtgatcgtgcaggtgggcagtggctacgacaacgtggccatcaaggctgctggcgagctcgaaattgctgtgtgcagcatcccgtccgcagccgtggaagagacagccgactccaccaccggccacatcctcaatctgtactgggggaacaggtcgctgtaccaggcactgagggaaggcacgcgagttcagagcgtggagcagattggcgaggtggcctcagtaaaggctcgcattcgtggggagatattgg

SEQ ID NO: 12514 - DNA, 516 bp, Homo sapiens
  MAP TO AL162390.2; EXPRESSED IN PLACENTA, SIGNAL = 0.73; EXPRESSED IN BONE MARROW, SIGNAL = 0.8; EXPRESSED IN ADULT LIVER, SIGNAL = 0.94; EXPRESSED IN FETAL LIVER, SIGNAL = 0.8; EXPRESSED IN BRAIN, SIGNAL = 2.8
gcgcagtttctcactgtcactgtggacctagagcagagaagacacttagaagaacagctaaaggttggttaatttgatctgaatgttagaaaagaatattaactggatttctaatagtttcactggaacagttttttaaatatgttaacaatttttaaatattttataggaaattcatagaaaattgcaagcagtggattcagggttgattgccttacgtgaaacaagcaaacatctggagcacaaagacaatgaacttagacaaaagaagaaggagcttcttgagagaaaaaccaagaaaagacaactggaacaaaaaatcagttccaaactaggaaggtatcttttagcctattcaggggggagagcacaaattactgtatgggagaatattaattatacactgtaataacaacagcatttccacaagcacgctttgtagtaatttctctttaatctttaatcttactgcataaaacacaattttattccatagggcaaaaggagatgaatctt

SEQ ID NO: 12515 - DNA, 533 bp, Homo sapiens
  MAP TO AC011941.4; EXPRESSED IN PLACENTA, SIGNAL = 0.99; EXPRESSED IN ADULT LIVER, SIGNAL = 1.1; EXPRESSED IN BRAIN, SIGNAL =   1; EXPRESSED IN BONE MARROW, SIGNAL =   1; EXPRESSED IN LUNG, SIGNAL =   1; EXPRESSED IN FETAL LIVER, SIGNAL = 0.96
ttcaacatatcctccagggggcagtagatgcaatagtaaatgtatttatgttatgcaaatgcaaatgacatgtggagaagtaatgagatgggaaggcagcattctgacaccatggtggtcatgctggagtcattgtcgctggacagcgtcctggtaaatgtgtcttcctagggatgtgagtctagatcaagcagtttggctggaatgcacttggaatcttaaaagctcttttgagtgagaaatcatcaaggtaagatttgcagaaccagtatatatatatatatgtgtgtgtgtgtatatatatatatgtgtgtgtgtatatctatacacacatatatatgtgtgtgtatatatatatatatacatatatattttttcatttttcaagaattcccggttcatttcactctatacaagggaatagacaagtaaagtcatatttatatatactcattgcaactgtagaatgggcacaaatcctatacaatgctaaactgtgctgaggatatctaggctgcatgtcctaagagaaa

SEQ ID NO: 12516 - DNA, 542 bp, Homo sapiens
  MAP TO AC009079.4; EXPRESSED IN PLACENTA, SIGNAL = 0.54; EXPRESSED IN FETAL LIVER, SIGNAL = 0.77; EXPRESSED IN BONE MARROW, SIGNAL = 0.65; EXPRESSED IN ADULT LIVER, SIGNAL = 0.74; EXPRESSED IN BRAIN, SIGNAL = 0.48
tttgttgtgctgtttttgttttgtaaaagtgccaaagagatggatgagactgttgctgagttcatcaagaggaccatcttgaaaatccccatgaatgaactgacaacaatcctgaaggcctgggattttttgtctgaaaatcaactgcagactgtaaatttccgacagagaaaggaatctgtagttcagcacttgatccatctgtgtgaggtaacagtgttaaaaatgatgagccttgaacagagtgctacccccttgggtttttctttcttctattccttactccaaaagagatgtaaggtagctgctaaactactagtgaagtgatgagggctatatacaactgcagtggaaaaaaacctaatttttaattgaccttttcatcttaaaagaatgcttaaaaatcaataagatggaaaaagtaaatatagtagaaaaaacagtacaaattaaaataacgagcagtatttttcgcagtatttttttaaacctatcaaattatcaaggatgaaaagacaacaacacccagatgtattggcaaa

SEQ ID NO: 12517 - DNA, 581 bp, Homo sapiens
  MAP TO AL158111.2; EXPRESSED IN PLACENTA, SIGNAL = 1.1; EXPRESSED IN ADULT LIVER, SIGNAL = 1.2; EXPRESSED IN FETAL LIVER, SIGNAL = 0.85; EXPRESSED IN LUNG, SIGNAL = 0.97; EXPRESSED IN BRAIN, SIGNAL = 0.99; EXPRESSED IN BONE MARROW, SIGNAL = 0.85
taccactgtgagcatggcagtacaagtatctcttgaagaccctcctttgaatttttttagatatttacctagaagtgaaattgctggatcaaatgttaactgtatttttaattttttgaagaactcttatactgttttctatagtgctatactattaatattttacattcttagcaatagtgcacaagagttccaatttcttcatatctttaccaacactggttattttgttgttgttttcttttttggtagtagctatcttcatgggttggaagtggtagctcatagctttgatttgtgttttcctattagtgatattgaccatctttccatgtgctttttggacatttgtgtattttctttagagaaatgtctattccaagttttttgcctgttgtttaatatggttgttttttgttgttgagatttaggagttctccatacattctagagagtcatcatgtatcaaccatataatttgcaaatattttcttttattctgtgggtggcctttttactctgttttggtagtgtgttctgataggcaaaatttttaattttcacgaagttcagcttgtcca

SEQ ID NO: 12518 - DNA, 509 bp, Homo sapiens
  MAP TO AC011599.8; EXPRESSED IN BONE MARROW, SIGNAL = 1.1; EXPRESSED IN PLACENTA, SIGNAL = 0.91; EXPRESSED IN ADULT LIVER, SIGNAL = 1.1; EXPRESSED IN FETAL LIVER, SIGNAL = 0.98; EXPRESSED IN BRAIN, SIGNAL = 0.94; EXPRESSED IN LUNG, SIGNAL = 0.91
ctgtattccaactgccagggctggttctatgtccttccctgcagcagcccctgtgccgacagtggagcctggtgcacagaaggtcttcgacagctgaatacgccaaaggttggtaaactatggcctgagagccaagtccagcctgctgcctgtttttttaaaataaaggtttattggaacagagccacgctcatccacttatgtattgtcaatggcttcttccatgctatgatgatgaagttaaacagttacaacagacacatgacctgcaaaacatacaatattaatgcgcacatgcagcccttctctgaaataaatgaagctctcctgaggcagtcttacattggctccaactaccctggcaaaccccctgcgtgttcagccagacaccccatgcaagagcagaatccaaacatgggggaagacagtgactgaaatgatagggctgggccagatgatcctcagatgagatggccacaagatgggatgcactgttgggaacgaatcct

SEQ ID NO: 12519 - DNA, 566 bp, Homo sapiens
  MAP TO AL135938.5; EXPRESSED IN ADULT LIVER, SIGNAL = 0.91; EXPRESSED IN BONE MARROW, SIGNAL =   1; EXPRESSED IN PLACENTA, SIGNAL = 0.84; EXPRESSED IN FETAL LIVER, SIGNAL = 1.3; EXPRESSED IN BRAIN, SIGNAL = 0.96
acacatgaggctcttccgtctactcagtattcttggttagagtatggttatttttcttggactagtattaggaagttgcttaacaaattttaacacaaagcaaacatttatgtacttgctgtatacatgaattgtttttcttctttataggttccctggcttcaaggaagtacgtctggtaccagggaggcatgacattgcttttgttgaatttgaaaatgatgggcaggctggagctgccagggatgctttacagggatttaagatcacaccgtcccatgctatgaagatcacctatgccaagaaataacatttgggatagtcgtctttaaaagacttggtgttatttacagtgtttgttttgataacatttggctgggtcattttaatagttagagatgaggaggagtaaaagtgaaatttttgtgaaggacttaaattatccagtgtttctttagccttggtgaactatgaaatacgaaggccttaattttgtacaataaacttttatttgtattctgtgtatataatgctttcttgattgacccatcgccctatcatcaaat

SEQ ID NO: 12520 - DNA, 548 bp, Homo sapiens
  MAP TO AL080312.14; EXPRESSED IN ADULT LIVER, SIGNAL = 0.55; EXPRESSED IN BRAIN, SIGNAL = 0.45; EXPRESSED IN PLACENTA, SIGNAL = 0.53; EXPRESSED IN FETAL LIVER, SIGNAL = 0.54; EXPRESSED IN BONE MARROW, SIGNAL = 0.57
caattgcactcatcattggctttcgtatttcagggagacactccatcacagtcactactctcacctcagctgggaacattggggaggatggaatcctgagctgcacttttgaacttgacatcaaactttctgatatcatgatacaatggctgaaggaaggggttataggcttggtccatgagttcaaagaaggcaaagatgagctgtcagagcaggatgaaatgttcagaggcctgacagcagtgcttgctgatcaagtgatagttggcaatgcctctctgcagctgaaaaacatacaactcacagatgctggcacctacaaatgttatatcatcacttctaaaggcaaggggaatgctaaccttgagtataaaactggagccttcagcataccagaggtgaaagtagactataatgccaactcagagaccttgcgatgtgaggctcccttatgggtctctcagcccacagtggtctgaagatccctagttgaccagggagccaaattctcagaagtctccaataccacctttgggctgaactctgag

SEQ ID NO: 12521 - DNA, 593 bp, Homo sapiens
  MAP TO AC022216.3; EXPRESSED IN PLACENTA, SIGNAL = 0.76; EXPRESSED IN ADULT LIVER, SIGNAL = 0.65; EXPRESSED IN FETAL LIVER, SIGNAL = 0.64; EXPRESSED IN BRAIN, SIGNAL = 0.69; EXPRESSED IN BONE MARROW, SIGNAL = 0.71
aggcagtgggtagtgtaggcagtgaagttagaaaggtaaacacatttacgttaaagaaagaaaatttcagttgctattaaatagtttaagtaataatttttcaaaccaactcagaatgaaggtattgcctatatttaatgtccccttttaataatgaaagagcctaggcaacatcaaatagtaactaaagcgttggtggataatatgtattatgtatacagatgatacagagtttttctcaacttgcatacgaacatactagtaatggaaaatataattcatatcacaatgtagtgttttctctcttaaatcatgcacccttggagttgaaaccttaattgcattattgtttcatagagtaatcatggacactaaaaagactatgtctacctattctaagaaattccagtctacacaatattacaaatacaacctcaaaggctttgagcaaaaatacacaacagcatttgaagaaaattccattacttcttcctgtaactttatgtagaagttcactatcagaaactgttcatacaaaagaacaacgatgaaagcaacaaagaaggctgctggggcagcaaacagaaccaaat

SEQ ID NO: 12522 - DNA, 588 bp, Homo sapiens
  MAP TO AC026442.1; EXPRESSED IN PLACENTA, SIGNAL = 0.5; EXPRESSED IN ADULT LIVER, SIGNAL = 0.61; EXPRESSED IN BRAIN, SIGNAL = 0.52; EXPRESSED IN BONE MARROW, SIGNAL = 0.42
atgggggaaaacgaggatagtgctccgaatatctcagggcgtgtacactcatcctgtgatattgtttctaatatccaggtgaggagaggatgatattactgtcaatatttcagagagtgtacaactcacctgtgataccattcctaatatccaggggaagagagggcgacattactttcaatattgcaaggtgtgtaaaccctaactctgatattgttttttgtatccagggagggagaggatgatattactcccaatatcgtagggtgtgtacactccccgtgtgatattgttcctaatatccagaagtggagaggttgatgttagtctcagtatcgcagtgggtgtatacccatcctgtgatattgttcctaatacccggggtggagaggatgatgttattcccaatatcgcaggaagtgtacatttcccctgtgatattgttcctaatatccagtgaagagaggataatattactcccaaaatcgcagggggtgtacaccccctctgtgatattgttactaatatcaaaagggcaaaagtatgatattactcccaatatcacagggaatgaacacctcccctgtg

SEQ ID NO: 12523 - DNA, 573 bp, Homo sapiens
  MAP TO AL136300.5; EXPRESSED IN PLACENTA, SIGNAL = 0.58; EXPRESSED IN FETAL LIVER, SIGNAL = 0.61; EXPRESSED IN BONE MARROW, SIGNAL = 0.52; EXPRESSED IN BRAIN, SIGNAL = 0.57
aagcgaagtaaaggagcgactttctagcctttaaattaaaaagaaaaatgaactctcaagtccttttaaagactaattttattttaaaagcagcattcattgctttattaaaaacatgcattagtttaccatttccgtattctaatttaagaaaccttcatgggcattgctaaaatattcctctgtgtttgaagtgggagtagaggctaaaataaatggaaagaattttttaaaaatatttttgctatttttatttctcagttttaattttttcctctctaatgatctcagctatgggcaatattgatgattttgatacttgcaagtgcccagaattcgctgcttatcgtgctgggaatatgacgtcaggactcatggtaattacatctttgctctgaatgagtgtcatggtcatgcaacactcccaaattctcatacgtttatcaattttcatggaggaaacaagcaaagactcttaattctagcaaatggtgtcttagtttcttaaaaaaggaatgaggtaaaatgccagaacctatggactaatatgtttggcaaaaattcctcacaagc

SEQ ID NO: 12524 - DNA, 546 bp, Homo sapiens
  MAP TO AC022939.2; EXPRESSED IN ADULT LIVER, SIGNAL = 0.69; EXPRESSED IN FETAL LIVER, SIGNAL = 0.58; EXPRESSED IN BRAIN, SIGNAL = 0.49; EXPRESSED IN BONE MARROW, SIGNAL = 0.46; EXPRESSED IN PLACENTA, SIGNAL = 0.54
ttgcattcaatacccacattgttttagttggtacacttaaactgattagcatataggaattttatgacttttacctttggcttctttccaaagagccacaatttgcccttggcctttcctactgtggttttggcatccatcttcccactctcctgtttggatgcactgatagtcccatcagaaatggttctatatatatgttgactgtaatcttcaaatggaaagtctcctggaggttcaaaaccagatttgaaggagtctaccaccatttgagagtcctatacaaaagaaactaggttttaaaactgtttcacttgctcataattctacatcagctttcataactttttcagtacaaaaaaacaacaaatataagtttaaataaataattccacaataatcattaaggtaaataatttattcccatgaatgtgtaacaaactcaaagtattttaatcccaaaagaaaaatatacttgcaaattacaacttaattaatttataatattcataaaatgtttttacttggtagctttaaccacctgaa

SEQ ID NO: 12525 - DNA, 556 bp, Homo sapiens
  MAP TO AC016790.3; EXPRESSED IN PLACENTA, SIGNAL = 0.91; EXPRESSED IN ADULT LIVER, SIGNAL = 1.7; EXPRESSED IN FETAL LIVER, SIGNAL = 1.9; EXPRESSED IN BONE MARROW, SIGNAL = 1.9; EXPRESSED IN LUNG, SIGNAL = 1.5; EXPRESSED IN BRAIN, SIGNAL = 1.7
acagttccttcctcctgtgggtgagatgggcctctatcatctgtaggactgaacatccaagagctatcattagtgtatacctccactggggggtccagccaagttacaggccgtagaagtggtggaaaaggtaaatatgcccaataagtataattgttctctgtgtcagcccttgttaaaggaatactctaggcaatggtgatcaccactatcatagctatcattaagttactcattgtgactggttgtcctgctttcctcaggttttcttccaccatctgcgacagcttcttgatctgtccccaggtaggtggctgtgttcaacgggtgttgctcgtgacagttggggtcctcctcagcatgaacttgagcaatgctgccaatgatgggtctttgggatcctcccaaaacctcttcctgggtagctggctcatagtacggctttagatgtctcgatggtgcccaaattggctgttgattcagtcctggagaaacacaagcatagtctctaccccaagttattattttacctatttcccaaccttttgttatcgga

SEQ ID NO: 12526 - DNA, 544 bp, Homo sapiens
  MAP TO AC023296.2; EXPRESSED IN PLACENTA, SIGNAL = 0.74; EXPRESSED IN ADULT LIVER, SIGNAL = 0.84; EXPRESSED IN FETAL LIVER, SIGNAL = 0.73; EXPRESSED IN BONE MARROW, SIGNAL = 0.71; EXPRESSED IN LUNG, SIGNAL = 0.91; EXPRESSED IN BRAIN, SIGNAL = 0.74
ggactcaggccacagaaaacttacagaaggagagacttttccaagaatctaacactgattccaatttttgtcaaaccacttttttcacctgatattctccacagacaattttcgtgtttctaaaaatatacgtaataacttgtataatgatgataaagctctgtattacaattgaataagacaggaaaactatttcaagttatttgctgtgtgtatcatttaggaatcttctaatttcaagtaatagaaaattaccacccacaataagctagcaagacatggaacctcaccatctcatagacaggagtggtcctggatccagaactccagaactgagaccaccatcagctcccctgcctctgggctgatcattcttaccctgactccctcccactgtggtgagcaggtggctgttgagtctcctagagatatccctcgagctgcctgtggagagaaaagagaatattttgttttcaaactttacagaaaaggtctagaattccccctgtattcattttggtcaccaatccatccctgaagcaat

SEQ ID NO: 12527 - DNA, 572 bp, Homo sapiens
  MAP TO AC013396.4; EXPRESSED IN ADULT LIVER, SIGNAL = 1.1; EXPRESSED IN BRAIN, SIGNAL = 1.2; EXPRESSED IN LUNG, SIGNAL = 0.83; EXPRESSED IN FETAL LIVER, SIGNAL = 0.9; EXPRESSED IN PLACENTA, SIGNAL = 0.96; EXPRESSED IN BONE MARROW, SIGNAL = 0.78
ggcagcacacaaaaacaatgttaaaaaataaaccaaataaaaggctgtacacaagaacttatgtttattgcaaacaaacaaacaaaaaaaaaaggaaagagaggaaaagagaaaatggtcagaagcacaacatataaggttaagaatttaaaagcatcttacattctgccctaatggcagcataattaatagcaacaaacggccgtcttgctgcctgccgcagccggagggtatttttgcagacctgacgagcaaattttgtgaaatatgtagtatgaaggaagaaagcttggcgggtcttcactgcagactttggactcccagtgtttcggactggcattccctgcatggcctggcgggacacgtgacttctaacacgagggtcctgcaaaatcagaaaacaacaaacactcaaggaagtgaacttgcccaaacacgttactgtttgcatcatgctcaaaagaaaagtgcaacttttaaatctttcatgaagcatctataacgtcacttggtgcactacctctaaaagagagaattaaagtgtgcacttttgggaaagaggtggggagtag

SEQ ID NO: 12528 - DNA, 537 bp, Homo sapiens
  MAP TO AC025115.2; EXPRESSED IN ADULT LIVER, SIGNAL = 0.59; EXPRESSED IN BRAIN, SIGNAL = 0.45; EXPRESSED IN PLACENTA, SIGNAL = 0.64; EXPRESSED IN BONE MARROW, SIGNAL = 0.46
agctgcaggagaggattgagatcacagaagaaatgatggatgatattggaggcacagaaggacagctgtgctattaggacagtatgcaggagggcgtggaggtaagtaacaagccacagtccagccactagctggacacaaaggcacaggttcattctggcggtgtaatgtaaggggtggcaaatcgccacatatctatcatacgccatcacacacagaaggaggctgtccatattcacaaaagaaacgaagaagaagagctgggtgaggcagcctgcaaaagagatagtcttggtgccagtcaagatattcactaccatttgggggactgtagtcgacgtaaagcagatgtcaacaaaggccaagttactaaggaagaagtacataggggaatggaggtgagagtcaaagccaatcgtcgcaatgatgagcatgttccccaaggtggtggctaaatacatacagagaaagagcacagacaggaggtgctgctgctctgctgagctaggaagtcccagaaggacgaattccctgaca

SEQ ID NO: 12529 - DNA, 592 bp, Homo sapiens
  MAP TO AL121673.27; EXPRESSED IN BONE MARROW, SIGNAL = 0.54; EXPRESSED IN ADULT LIVER, SIGNAL = 0.66; EXPRESSED IN BRAIN, SIGNAL = 0.56; EXPRESSED IN PLACENTA, SIGNAL = 0.55; EXPRESSED IN FETAL LIVER, SIGNAL = 0.6
acatccccaactccaaacagaaaccctgtctccatgaataacaactacccattcctctccacccccagcctctcttaacctagaatgtactttctgtctgtgaattaggctcttctagatatctgatgcaagtagaatcatacaacatttgtccttttgtttctggcttatgtcactcagcacaatgcttccgaggtcgctcagcagggggcttccgaggtcgctcagcacggggcttccggggtcgctcagcacggggcttccggggtcgctcagcacggggcttccggggtcgctcagcacggcacttccgaggtcgctcagcacggggcttccgaggtcactcagcatagtgcttccgaggtcgctcagcacagcgcttccaaagttatttacctggtagcgagtgtcagacttccttcatttttctggctgaatcctattcccatgggtggatggaccgcattttgtcctccattcatctgctgggggcaactgtgctgtttccacctttcagccattgtgagtaacgctggtatgggagcctaagtgtctgtttgggtgtttgtcttcattcttccggacctaccct

SEQ ID NO: 12530 - DNA, 576 bp, Homo sapiens
  MAP TO AL118525.17; EXPRESSED IN PLACENTA, SIGNAL = 0.46; EXPRESSED IN ADULT LIVER, SIGNAL = 0.61; EXPRESSED IN FETAL LIVER, SIGNAL = 0.82; EXPRESSED IN BRAIN, SIGNAL = 0.56; EXPRESSED IN BONE MARROW, SIGNAL = 0.61
acaggcagaagaatgggatgggaagatggatgttgaacggatggaaatggaatggatagatggaggtcagctgcatggatatacaagtattggatagatattgagtgactgcataactccacgctgggaagagcaagagggagactgaagggatgatgttaggtcagcattgagagtgcagctggacaggcagctggatagaaagttggctcgaccactcagatggatgttggatggtggggtgggggggttggcatagggacatatgttgaaggaatcaacagaaaccagatatgaggcccagctgctcatccccatccctcccgaggcacaagaggcacttacagtaaagatgtcaccgtgcttctccttcatcctcgtgaggaagctggcagcatcttttccaaagtccaaggcataccccaaccaggggatgctgcccaggtccaggggaggctcaccaggtcgcctacagaagccatggcacttgtcaccatttgataaggcaaggaagggcataaagagtgtaggttgcagagtgtgattttgaatggagcagtcggggaggtaatctga

SEQ ID NO: 12531 - DNA, 558 bp, Homo sapiens
  MAP TO AC013357.9; EXPRESSED IN LUNG, SIGNAL =   1; EXPRESSED IN PLACENTA, SIGNAL = 0.99; EXPRESSED IN FETAL LIVER, SIGNAL = 0.8; EXPRESSED IN BRAIN, SIGNAL = 0.83; EXPRESSED IN BONE MARROW, SIGNAL = 0.82; EXPRESSED IN ADULT LIVER, SIGNAL = 0.89
aatctcctcttagggcaggggacaaaaataaatatttttttcctctaataaattcaaaattagaaatgagaaaaagtgagatgaagaaaaacatcagtctttgtacatctccaaaaatgatgctttcataccagataagtagatgaatgttaattttacacttgtaacttacctaggtttctcttgagtgattaaaatttttactttatttagagctttcttggcacctgtggctgtggccagcttgttatgagctgggctagagtgtgggctggatatgtaaacttttttcccagggcctgagggaggcttggatggggagaagtctgagatgaaaacaataccctcgctggtaagcactatattgagaaaagcaaaactctgattaaagtttaatgaagtttagcatacagttttattccaatacaattttgagagcaatatagtgataattttaataatatataactggcaatgttatgcattcataacataatgggaatgttctctaagttgaagagaaacaggtggtccattacaattcatcagaggcctcca

SEQ ID NO: 12532 - DNA, 540 bp, Homo sapiens
  MAP TO AC021115.3; EXPRESSED IN ADULT LIVER, SIGNAL = 0.53; EXPRESSED IN BRAIN, SIGNAL = 0.51; EXPRESSED IN PLACENTA, SIGNAL = 0.56; EXPRESSED IN FETAL LIVER, SIGNAL = 0.53; EXPRESSED IN BONE MARROW, SIGNAL = 0.52
tcgtttacccctgtgtttccctacccaactttaacaggccacaagctccctgaggacggggattctatctgctttcctcccaaatgaatccatccaaactagttcctggcatagacaggggatgctcgatgactaattgttgaatgagggtatattgaagggagctggtgacaaacagtttcaggtcccaggtggtggatgccatgctcagaataccacctccacagagattctagatgcccatttccattgctttgcttggtgcacacaggcctctgtagagaccccagtgtgaagggaggttgagccactgaggctaaaagcaaccacgttatcttctttcccagtgagggcaagactgaggattatgattgtgccaagcacgagatattcaaagatgagtacgatcagcgccctggcaagtctttccccaccatctaaaccaatgtcaggcacaaagcagcctctcaataaatattaaatgaataaagcaattcagcatatccaaagactaggaactgttccatttgcaagcagctt

SEQ ID NO: 12533 - DNA, 585 bp, Homo sapiens
  MAP TO AC009476.3; EXPRESSED IN BONE MARROW, SIGNAL = 0.51; EXPRESSED IN PLACENTA, SIGNAL = 0.58; EXPRESSED IN FETAL LIVER, SIGNAL = 0.47; EXPRESSED IN BRAIN, SIGNAL = 0.49
atttcgctgtgatagcccctggatagtctcacaaatacacagcactcaccaactgccagggccaagtgcattcatcaaatgacaatttatcattttcttcatagatccaagaagggtcaggggtcactgtccacaggccagtttccacactttgtaagacttgtggagatttaaaaacaacaacaacaacagcaaccttatgaggcagtaggtggtccaaagtttggctggaaatgggcaaaaatgttaaaagaaaaaaagaaaaacttttgtcatatttaatataaataattaatctcttttcattctactacaggcttttctggaggattccaagagctttctccaatgtctcccctttctactttggttaatccttcacattgccatctaagttatggttttaaaatgcaaatatgatcacatcctgtccctacttaaaatctctccgtgattcagatcatttcttcttgacagactaaatggtctttaatcatctaacctcaatctgtgttttcagtaaaatttttctgatctgccttcttctggacactatgaaatcacctcgtgcttctctcttctcca

SEQ ID NO: 12534 - DNA, 551 bp, Homo sapiens
  MAP TO AL136089.8; EXPRESSED IN PLACENTA, SIGNAL = 1.1; EXPRESSED IN FETAL LIVER, SIGNAL = 0.54; EXPRESSED IN BRAIN, SIGNAL = 7.9; EXPRESSED IN ADULT LIVER, SIGNAL = 0.79; EXPRESSED IN BONE MARROW, SIGNAL = 0.79
tgctacttggggagaacacccccaaactggggtgtgtgggaggagggcagagactgaggaactgaggaacaccataggggttggatgtcagccccaggagagagaaacttcttcccagcctgagggaagagagtggtgtgaagctgggggcctgtatgtcctaggcaggaagaaagtggggccaacagatacaggcaggcagcatgaccatggcctaggagttagcccagggttggggggctgccctggcctcagcgcctctccctgagagggttcctatctttggccccccgcccgcagctgaaggagcagagggaacgtgagcggtggcagcggcagcggaaggtcctggctgcaggcagctcgctggaggagggaggagagttcgatgacctggtgtcggccctgcgctctggggaggtcttcgacaaggacttatgcaagctcaagcgcagccgcaagcgatcagggagccaggccctggaagttacccgggagcgggcaataaaccggctaaattattgacctggggaactagccacacaggaggc

SEQ ID NO: 12535 - DNA, 537 bp, Homo sapiens
  MAP TO U82670.2; EXPRESSED IN LUNG, SIGNAL = 0.91; EXPRESSED IN PLACENTA, SIGNAL = 0.88; EXPRESSED IN ADULT LIVER, SIGNAL = 1.2; EXPRESSED IN FETAL LIVER, SIGNAL =   1; EXPRESSED IN BRAIN, SIGNAL = 0.93; EXPRESSED IN BONE MARROW, SIGNAL = 0.92
gaaccctcttaaaccctgccactgctgtatcaactaagtttatgcaatactctaaatcccgtactgtcatttcaactactactacgttcacagcatcttctccaggaatggattccattccatttcaagaaatcactttctttgttcttccgtaagaagcaactccttgtcccttccagtttgatcatgagattgcagtgattcagtttcttcttcaggctccactactctttctggttctcttgctatttccatcacatctgcaggtacttcccccactgacattgtgaacccctcaaagtgatttgtgagggttggaatcaacttcatcctttaatgttgatattttgacttcctcccatgaatcacgaatgttcttagtggcatgcagaaaggggaatcatttccagaaggttttcaatttccttttttcagatccttcagaggaatcactatctatagcagctacagccttatggaatctgtttgctaaacaggaagacttgaaagttaaaatcatttcttgatccatgggct

SEQ ID NO: 12536 - DNA, 572 bp, Homo sapiens
  MAP TO AC008597.3; EXPRESSED IN ADULT LIVER, SIGNAL = 1.2; EXPRESSED IN BRAIN, SIGNAL = 0.96; EXPRESSED IN BONE MARROW, SIGNAL = 0.83; EXPRESSED IN LUNG, SIGNAL = 1.1; EXPRESSED IN PLACENTA, SIGNAL = 0.81; EXPRESSED IN FETAL LIVER, SIGNAL = 1.2
gggagagaggcaaagtgatgaggactgaaaaattagaactgttcgatttaatatttcttgctaaaattttaacttacatgttaccaggttattttatggttgtaaagcataagtctaagatcatttggttctggccagagaatctttttaaaacagttaaatcttgtagttgaattttgagagattacttatatattaatattattttagttacataaatcatgatcgtaagaagctaatgacagtacacatagttgcttttgataggtgcagtagtaccaaaacagagttagagttgcaatgttatcaaattatggaaaagatgatattgagagattgattttctttttaggattattatgacttcatcagcttcaggaatatatggcaactttggccaggccaattatagtgctgcaaagttgggtcttctgggccttgcaaattctcttgcaattgaaggcaggaaaagcaacattcattgtaacaccattgctcctaatgcgggatcacggatgactcagacagttatgcctgaaggtaagtaagcaagcttatatttttcagtgctg

SEQ ID NO: 12537 - DNA, 576 bp, Homo sapiens
  MAP TO AL133458.11; EXPRESSED IN FETAL LIVER, SIGNAL = 0.72; EXPRESSED IN BONE MARROW, SIGNAL = 1.3; EXPRESSED IN BRAIN, SIGNAL = 0.68
gcttgttccaggagttctgcggcaaagacctacagacttccagagtttccgtctttctaaggaaacgacttattaatgcactatcctttatcaggaatcatggctgagaacggcacatgctggttggagtcctcgttttccctatggccgactctgatgatgagatggtgcccagatgggcatcccaatactctgcacccactctgtgtgatcgtgatgtagaatgatctggaaaggcttggtaggctcagaacattcctcaggaatgatcccagtagccgaatagtgcacatgcagaagctgctggagggcagtgaggtctacacccactcccctggatccagctgtcaggcttgggcgacagcagagatccccactgggaagtgcagccgggggaagggcgcacccacctgttgaggtccagctccctgtagagttccaggcttctgccaaagtacttcttctgggagttgagcgcatccacctgggcggcgcaggtcccatgcttttcccactcatgcttcctgtgaggattaggaaaaatctccacttaaaagtagtgaaacaggctgcgtg

SEQ ID NO: 12538 - DNA, 520 bp, Homo sapiens
  MAP TO AL158051.1; EXPRESSED IN ADULT LIVER, SIGNAL = 0.66; EXPRESSED IN BONE MARROW, SIGNAL = 0.73; EXPRESSED IN PLACENTA, SIGNAL = 0.78; EXPRESSED IN FETAL LIVER, SIGNAL = 0.86; EXPRESSED IN BRAIN, SIGNAL = 0.58
tcataacatcctagtgcaaggcagtatgtgtttatagggatgctggtggaaacaaacatacggtattgcctttcatataaagtagagcacatacaattatgtacggtacataatatttcataatgataataaatggctatgctactggcttatgtatttactatattgtactgtttatcattatttcagagtgtacttttactatttaaaaaaaagttaactataaagtagcctcgggaagtcatttgtggagatacccagaagaggatattgtataggagatgccagctgtaagcgtgttattgtccttaaagaccttctagtgagacaagctgtggaggtggaaggcagtaatactgacgatcccgaccctgggtaggcttagggtaatgtttgtgtttttatcttagtttttaacaacaacaacaaaaatttaaaaataaataaataaatatagaaaagcttatagaatagagatataaagaaagaaaatatttctgggcagctatgtgtctgtgtt

SEQ ID NO: 12539 - DNA, 591 bp, Homo sapiens
  MAP TO AL161940.3; EXPRESSED IN PLACENTA, SIGNAL = 0.47; EXPRESSED IN FETAL LIVER, SIGNAL = 0.5; EXPRESSED IN BONE MARROW, SIGNAL = 0.53; EXPRESSED IN ADULT LIVER, SIGNAL = 0.54; EXPRESSED IN BRAIN, SIGNAL = 0.52
aagtggggagaatggtgttgggattaaaaggagcaaaagagatggtgttctctcaacttttctctgccttgcacttgagcgtggaaccagtgaggcaatcgtctcctggctggaggtggggagtcaccgcaacagttaagaccagaagcgccacctcttcctcctttttttcttgtcctaaagtagtgatctcattggccacttgtctctcatggctaagctacaaaatggaagaggcttgttggatccaaaacggattttgcaggagtaaaggataaatcttaattttgttaagatgctgatatttctggtacgaattgttctcataaaggtggtgtatcttttagaaaatttacttgagcaaaggagaacttatggaagaaatgagaggaaaggcaaaatagtaataataataccaaacctgtgtctgaaagcacaggaggcagagcagcagccagaccttgagtgtcaggaggcactggagagtctcatcagagtggagctgttgggatgaatcagccatggtgtttgttcttagtcctgcaccccttgacccaaaagtccatgtcctggaagaagcatctgtttggc

SEQ ID NO: 12540 - DNA, 540 bp, Homo sapiens
  MAP TO AL160060.3; EXPRESSED IN BONE MARROW, SIGNAL = 0.99; EXPRESSED IN LUNG, SIGNAL = 1.2; EXPRESSED IN PLACENTA, SIGNAL = 1.2; EXPRESSED IN FETAL LIVER, SIGNAL = 0.89; EXPRESSED IN ADULT LIVER, SIGNAL =   1; EXPRESSED IN BRAIN, SIGNAL = 0.81
tggggtaggaagaatcatgccccctctctcctcctcttcgaaaaatgtccacatcccaatccctggaagctgtgaatatgttcagttatatggcagttgggaattaaggttgcgagtcagctgtccttgagatggggagattatcctggactatccaggtgggacttttgtaatcgcaaaggtcctcggaagtgaagaaggaagtcaggagagtcagtgtcagagtgatgccgtgggacacagtcttcagggctgttgctgccttgaagatgcaggaaggggccgtgagccaaggaatgcaggtggcctttaaaagctggaaaaggcaaaaaaatggattctccttgagagcctccagcagaaatgaggccctgccaacaccttgacttgtagcccagtgagacccaaacatctaacatctaaaactataaataagaatttgtgttgttttaagtcaccacgtacatagtcatttgttacagcaagctatagcaaacaatccaaatggagacctgtctctggtttggaaatgcgagacat

SEQ ID NO: 12541 - DNA, 536 bp, Homo sapiens
  MAP TO AC021846.3; EXPRESSED IN PLACENTA, SIGNAL = 0.54; EXPRESSED IN ADULT LIVER, SIGNAL = 0.51; EXPRESSED IN BRAIN, SIGNAL = 0.46; EXPRESSED IN BONE MARROW, SIGNAL = 0.43
tttgaggtgaaagatatgccagttacactgatttgatctttacaaattatatgaatgtattaaattatcacttgtagcttgaaaatatgtgattatatatcaataaaaagtcaccatttcatattaaaaacctcttctttataaatgggtatgaattcttaattgatttgagttcaaagtagacaaacaaaagagattaacactcttctgttaatattttgttgtcctttactcaataaaaacaagatctctataaaccatcaatccatttatagaaatcaccaaaaggtcagaccatcaaatcagaaggagcagcaccagaaatcaagtgcatactcaaatataatcaaaatcaatctttatcatgctaccaatggacagtaacccagaacacaggacaagaaatcacgcacaccattggttaccagatcaccagtcaggaacagtgcacaaagctcactgaggggcccaattatggggatggaattaacagggatctgaaggtgaggttcaatcccttctgagtcacagcacca

SEQ ID NO: 12542 - DNA, 525 bp, Homo sapiens
  MAP TO AL161445.2; EXPRESSED IN BRAIN, SIGNAL = 0.47
gcatgtttttcacatggcacaagatgggtgaacaaaaagccccaatatctcataaagcctgtggttggaatggtcacttccacccacattctatgagccaaaacaagttgattggccaacccaacattatcatattctgcctctagtgggagaaacttcaaagtcacatgacaaagggactggatatagggagtggtgaagaattgggaataatgcaaccctccatgaatttttctttttctggagctagaatggtggctgggaattgtactccagaacagctcacaatttgtaataaatctggtctcttttcctccagtttcctgttcttcccaacctgcgctatggacttcatcagatttcagcatcagagagaatatggaaggacatcgaccctaacttcatccagtgaggatttccacacaccatacactctctgagagttctcttggctttgtgtgcacacctccagtgacagggagctcgctatgtcatgaggcagcctgctcccttgtggctatcact

SEQ ID NO: 12543 - DNA, 514 bp, Homo sapiens
  MAP TO AL133354.8; EXPRESSED IN BONE MARROW, SIGNAL = 0.55; EXPRESSED IN PLACENTA, SIGNAL = 0.68; EXPRESSED IN ADULT LIVER, SIGNAL = 0.52; EXPRESSED IN FETAL LIVER, SIGNAL = 0.54; EXPRESSED IN BRAIN, SIGNAL = 0.49
tccctctggtcttcttacgcaaaccctctctcagagttcttccttcctgcccagctctttttaagacgcatctttgggagagattgaaccttactctggtggtggcaagtgaggctcgtgctcaggatcacggggaggcctctgggtcctccctgggccccgctgcagatggcctgctctggaccctcccttgaaagcagaatgctggacgggctggtcccattcctgagtactgggctggcatctactgctgacgcctgcagcgtgtgcagttcaaggtctgggtgctccaggctccttcggatctctgcactctgatcttcactcggccttcgctgatgcaccctctgggtctccattatgtcctcctgccagcccctgatttagccagggtctacctgcccctcttcatcctggggcttagagcagatgatttgtttgttctgtgtcgcatcccctcagcccatttctcatcccagcagggcagtggtggacagctccacgaacaggaact

SEQ ID NO: 12544 - DNA, 501 bp, Homo sapiens
  MAP TO AL158049.2; EXPRESSED IN BONE MARROW, SIGNAL = 0.65; EXPRESSED IN LUNG, SIGNAL = 1.4; EXPRESSED IN PLACENTA, SIGNAL = 0.64; EXPRESSED IN ADULT LIVER, SIGNAL = 0.8; EXPRESSED IN FETAL LIVER, SIGNAL = 0.54; EXPRESSED IN BRAIN, SIGNAL = 0.63
ctctccgtgctgtagctgtgctgtgcccaacccttctgtgccccgcagaacttcctgcgctgtcagaacaacaaaaccaactacaacttggtatgcgagacgctgcagttcctggacatcatgtgcggcagcaccacgggcggcctggggctgctggggctctacatcaatgaggacaacgtgggcctcgtcatccagaccttggagaccctcactgagtactgccagggcccctgccatgagaaccaggtgagctgtcctggtggcataagtggcagccagggtggcagtgtggacatgtgggtagatggagccagctggggcagggagagaggctgaggtctctggagctgccactattctgagagggcctgggccctgtgtcccccactgcctcctgccagacttgcattgtgactcacgagtccaatggcatagacatcatcaccgcactgatcctcaatgacatcagccccctgtgcaagtaccgcatggatctgg

SEQ ID NO: 12545 - DNA, 503 bp, Homo sapiens
  MAP TO AL157392.2; EXPRESSED IN LUNG, SIGNAL = 0.94; EXPRESSED IN ADULT LIVER, SIGNAL = 1.3; EXPRESSED IN BRAIN, SIGNAL = 0.82; EXPRESSED IN BONE MARROW, SIGNAL = 1.1; EXPRESSED IN PLACENTA, SIGNAL = 1.2; EXPRESSED IN FETAL LIVER, SIGNAL =   1
ctgagttctgggaatgtcacctaacctaattctcagcgttctcatctctaaaaaggggttaatactatttgcccccaccgtactcagggtagttttgatgttcagatgataccatcggttccttaccccagataacatcttcatctttatttccgtaaaactgtgcttgttgtgtggtagataagtctggaaatgtttattgaattaaggaatgaacttttagaaaaaccttattctgaaagttttaaacataatacaaaaatagataaaattttatgatgagcccctgtatatccttcccctgaaacatgcagctctagaaaatgacatgttcctttaaaaccaaaatatgatcacacccaacaaaattaaaattagtttgttaattttatcagatactcttctcacattcgtatattttccaactgaattaaaatatgtacatacatttgcttttacagttggtttttcaagtcaggtcaacacgaagttcaatccttgca

SEQ ID NO: 12546 - DNA, 594 bp, Homo sapiens
  MAP TO AC009476.3; EXPRESSED IN PLACENTA, SIGNAL = 0.76; EXPRESSED IN ADULT LIVER, SIGNAL = 0.81; EXPRESSED IN BRAIN, SIGNAL = 0.69; EXPRESSED IN BONE MARROW, SIGNAL = 0.66; EXPRESSED IN FETAL LIVER, SIGNAL = 0.74
tgacctcatacacacctcgccatagaataccaagaattacaagtataattacttgtggaaggccatgggtgtgcagcatgaacctcagaaacacaagaagaatcagatcataaatcaacttgagtgagataagaaatctgagaagagatccaggagaacaacttttcctctttattcatgcatttaacaaatacttcttcagctactatattgtgccaagaaaatgagctaaactatggagatctgtaaacctcatgaagcaatcatgccaaagaccagctgcttcgttaacctgtagtggatcttttaatcccagcgtttcctaatgtgtaatttctaatttgtaatcaacttcccattggaacttgaatttttaaataaatcttgctagacctcaatgacttctataataaaatagaaacaataaacctaaatttcctggaggccatagtttagaccacctaaatgctcccaataaacacagcactgcattgagtcactatgttactgaggacaagtttacagtgtattggtcctgacatctaattcctcctttccttggccctcattagtcccagtcaacccatcgtcttt

SEQ ID NO: 12547 - DNA, 560 bp, Homo sapiens; identical to SEQ ID NO: 8831
  MAP TO AC011599.8; EXPRESSED IN BONE MARROW, SIGNAL = 1.7; EXPRESSED IN PLACENTA, SIGNAL = 1.6; EXPRESSED IN ADULT LIVER, SIGNAL = 1.6; EXPRESSED IN FETAL LIVER, SIGNAL = 1.7; EXPRESSED IN BRAIN, SIGNAL = 1.9; EXPRESSED IN LUNG, SIGNAL = 1.6

SEQ ID NO: 12548 - DNA, 532 bp, Homo sapiens
  MAP TO AL157396.2; EXPRESSED IN PLACENTA, SIGNAL = 0.56; EXPRESSED IN ADULT LIVER, SIGNAL = 0.62; EXPRESSED IN FETAL LIVER, SIGNAL = 0.68; EXPRESSED IN BRAIN, SIGNAL = 0.74; EXPRESSED IN BONE MARROW, SIGNAL = 0.57
tggcctttttgctgagattctttggtaacccttggcttatttatatatgttttaaaagaatttattgtacctgtgagagtgaattaaatttctagagagtcataaaagttgaagctgagttaaataaaaagttaattgtattggcgaataattcaaaatgtgctttaagtataataggtttttaaaaatcatcttttttaaatgaacaggaaactctgatgaggaagaaagtgcttcagaatctgaactttggaagggtccactaccagagacagatgaaaaatcacagtaagtgctgatattaatagagaatatgtaccttttcaatcagtttaggaagctataaccacagctttattaatggaaaaatacaacatcatggtgatctatttaatgccaaggactgcctagcctggtaagattagagcttattcccagccattgtcataagcagccaacacatccagcttcctcctggtaaataaatctttcatcagttcactttaacagatgaacctctggtccttgcttg

SEQ ID NO: 12549 - DNA, 522 bp, Homo sapiens
  MAP TO AC016790.3; EXPRESSED IN ADULT LIVER, SIGNAL = 0.87; EXPRESSED IN PLACENTA, SIGNAL = 0.58; EXPRESSED IN FETAL LIVER, SIGNAL = 1.1; EXPRESSED IN BRAIN, SIGNAL = 7.7; EXPRESSED IN BONE MARROW, SIGNAL = 0.99; EXPRESSED IN LUNG, SIGNAL = 0.96
cgatgacagggaaagaaagcaagtaatatgttttatacataaatttaattaaatttactaggacacaaccagtactgatctccatagctatttcagcatacccattttctgtgttcaaattaatcatatgctaaatgccatcacacactaaaatttgttttcctgaatgcacaggtacctctgttctacaggtgacagctactgatgcagatgaccctacctatggaaacagcgctcgggtggtttacagcattctccaaggacaaccctacttctccgtcgaccctaaaacaggttagtgcatttacacataactcgcatgcaagcgtttgctacagtaagttgcaaagcaatggtttttatttccatatgctcttttccattagatgatgtgattttaacatattttaaacatatcctcactttttctaaaacaatgtaatgaaataattgaaaataaattaatgtacatatattatgctttccctattatgttgataacccattatttatacccgtgca

SEQ ID NO: 12550 - DNA, 589 bp, Homo sapiens
  MAP TO AL132874.14; EXPRESSED IN PLACENTA, SIGNAL = 0.65; EXPRESSED IN FETAL LIVER, SIGNAL = 0.88; EXPRESSED IN BRAIN, SIGNAL = 0.83; EXPRESSED IN LUNG, SIGNAL = 0.87; EXPRESSED IN ADULT LIVER, SIGNAL = 0.9; EXPRESSED IN BONE MARROW, SIGNAL = 0.94
tttcatgaaccaccatgcagtgtagccagaatttcttccttttacaagtgtagtcatgctttcaagtatcaagggtccttacatatattgtggcaaaacatgaactgtcttttccagcttattataagtcagtcagaaatgagcattttccttcccagtatgatttccaagtttttcttgttgcatcctcaactgatggttctaggtaactgaaactccagtcttgcctgccactaacagccttttgtgtgtgtgtgtttcttttctttttaatttattctaggctgatgcacctaatccaggactcattccagatgcagatgcagtaggcgtaactgttgtgctaattacttgtacctatcgaggacaagaatttattagagttggctattatgtaaataatgaatatactgagacagaattaagggaaaatcaccagtaaaaccagacttttctaaggtaatgttcttactattcctttttaactacttttactatgcaatttttaaagcagttgctattgcaatttcatagtatactattaaaatggctttgagataaataaatatgaggtccttatgccaactgg

SEQ ID NO: 12551 - DNA, 566 bp, Homo sapiens
  MAP TO AC022204.3; EXPRESSED IN PLACENTA, SIGNAL = 1.3; EXPRESSED IN ADULT LIVER, SIGNAL = 1.2; EXPRESSED IN FETAL LIVER, SIGNAL = 1.1; EXPRESSED IN BRAIN, SIGNAL = 1.1; EXPRESSED IN BONE MARROW, SIGNAL = 1.2; EXPRESSED IN LUNG, SIGNAL = 1.1
cagctccaccatccaataccaatctcatagttaagtatttttgaccacactattgcaaacttaacccagagtttctattccctttgccaccataaagtcaccctctgttggtatggatatgtgtgatggttaatattaggtgtcaacttgattggaccgagagatgcctagatgactggtaaagtattgtttctggatgtgtctgtgacaatgttgacagaggagattgatattttcatcagtgaattgggagaggaagacccatcctcaatgagggtgggcaccatccaatctgcagccagcatggctaaaacaaagcaggcagaagaaggggaataagcaccttgttgaattctttcttgctctccctcttcccctgccagaggcttgcttctcccttcctgccattggacatcagactccagattctttggctgtttggctctgggacttgcaccagcagcctcccagggggtctttggcctttggcctcagactgagggctgcactcttggcttccttggttttgaggcttttggacttggactgagccaagctgctagctt

SEQ ID NO: 12552 - DNA, 561 bp, Homo sapiens
  MAP TO AC022758.3; EXPRESSED IN ADULT LIVER, SIGNAL = 0.95; EXPRESSED IN BRAIN, SIGNAL = 0.81; EXPRESSED IN LUNG, SIGNAL = 0.92; EXPRESSED IN PLACENTA, SIGNAL = 1.1; EXPRESSED IN FETAL LIVER, SIGNAL = 0.71; EXPRESSED IN BONE MARROW, SIGNAL = 0.78
aattttcaggacccaactgctaaatatgatcaatgtaaagggattctaagatcattgtaacatcatgcacatgagtacagtgacattatgtataccaacttcaaaattttgttcatagaaaaggcttgagtgatctgctcatataattatactcacaggaaaataaattccttttaaagtgtcatgaataaaagaaaatgttctttgaggaatgtttcactcttaaaattgtagctaaagaaaagaaatcagaggtgattgtctgtgactatgattttaaatacatcaagtatttttgctggcaaatttcgtaagttgagggttataatgggtacgacggcaaaatgtagatccctaatgcactctcgaaatgttcagaatgattcatttcagtactttagtttactctttatacctgaagaattcatgtaagtttaaagtttttttgtcttgaatatgttttctctgtatttttattgatttagattacttatattttcatcattttttgattgttcaaaagccatttcttttctaaaagcaaaccttgaaagcttcaga

SEQ ID NO: 12553 - DNA, 591 bp, Homo sapiens
  MAP TO AC013771.3; EXPRESSED IN PLACENTA, SIGNAL = 0.81; EXPRESSED IN ADULT LIVER, SIGNAL = 0.77; EXPRESSED IN BRAIN, SIGNAL = 0.62; EXPRESSED IN FETAL LIVER, SIGNAL = 0.6; EXPRESSED IN BONE MARROW, SIGNAL = 0.82
ttgtttctcctatgccctggggctaacttagagagctaatttacggagaggatctaggagcaacatagtgttctcccttgtccaaaacagtagacactgtcaggaaaagacaccagcaaaaactgtgggcattttcccaaactcaggaccaagagcaggatgccatttttaatctgggcacatacaaagtcagtaattctttagtgacccagcagtgtggctgcacaggcattttagtcctgggccagagcttgggtcacctgctctaaagtagggtaaggacctccagtcagaattatgaaaaggcactggaattatgctgtccctcatcacaggcctagggtgggagaagagctactacagctgtggtttctccagggtaacaagacctgcagccagggccagctcggtgaactggaactcatctgggtatcattgctgggtgttccaactgactcccttgagatcgtggtgcagcagggccctctctactccatgctcaggaagatctccatgcattttcagcagctgctcacctgggtcaacagcctgaaccaccccgtcctttctggacacagatcatggtgcagg

SEQ ID NO: 12554 - DNA, 596 bp, Homo sapiens
  MAP TO AC013626.3; EXPRESSED IN ADULT LIVER, SIGNAL = 1.1; EXPRESSED IN BONE MARROW, SIGNAL = 1.2; EXPRESSED IN BRAIN, SIGNAL = 1.1; EXPRESSED IN LUNG, SIGNAL = 1.2; EXPRESSED IN PLACENTA, SIGNAL = 1.3; EXPRESSED IN FETAL LIVER, SIGNAL = 1.2
aatacttcctggcagcacaagaatttaaagattaagtcctgaatttatcagaaaatgactgactcagtgcctagcatattaataagtgttcaataaacatttgttaaaataaatgagtgaaagaatttattgaagagatttgtagttacttaactttgttttatttttataataatagtgtttgttacttgtctcttttcttcccccctttagagcctctggatttgtgtttactcgtttggatggttccatggcccaaaagaaaagagttgaatcaattcagtgttttcaaaacactgaagcaggatctccaactataatgcttctgtccttaaaagcaggtggagttggtttgaatctgtctgcagcttctcgagtgtttttaatggatccagtaagtagttctgtaaattttttcagaatcttagtacttctttcaaaaaaataagacaaaaaactatttggtaaataccttcatagttataattaactgtgaaaattcttaggcaaactttagaaataaataacaaaaacttagtaaatgtggattaagagctttctcttaagcactttactgaaatcctcacaacatcctt

SEQ ID NO: 12555 - DNA, 532 bp, Homo sapiens
  MAP TO AC023134.3; EXPRESSED IN ADULT LIVER, SIGNAL = 0.71; EXPRESSED IN BRAIN, SIGNAL = 0.6; EXPRESSED IN PLACENTA, SIGNAL = 0.61; EXPRESSED IN FETAL LIVER, SIGNAL = 0.61; EXPRESSED IN BONE MARROW, SIGNAL = 0.64
tgttgggtcacattctcatctcattttatttcagctgctgtaagtaaagatgattccattatttcaagtcttgatgtcactgatattgcaccaagtagaaaaaggagacagcgaatgcaaagaaatcttgggacagaacctaaaatggctcctcaggagaatcagcttcaagaaaaggaaaagtaagtcattttattctttgccaagaagtgagatgacatttttgaaaatctagcatatgatcttaaaaattatgttttcattttgaacgtttttaaagttatttttaagaaaatgtcattttggaattgtaaaatgtttgaatcaatgtattgtttcagtatttggttaatttctattaatatttaaagctgaaatgctgagaacgtaagcaaaaatttttttctcatggtttttatagattaattagaaatggcatgtaggatacaaaaaatattggaatccaactagtgttcagtaaagtgtttcaatctaatttactgcttgaaagagacccgtatggcattcaaat

SEQ ID NO: 12556 - DNA, 566 bp, Homo sapiens
  MAP TO AC013591.3; EXPRESSED IN ADULT LIVER, SIGNAL = 0.69; EXPRESSED IN BONE MARROW, SIGNAL = 0.62; EXPRESSED IN PLACENTA, SIGNAL = 0.58; EXPRESSED IN FETAL LIVER, SIGNAL = 0.6; EXPRESSED IN BRAIN, SIGNAL = 0.68
agcagaggcagctcagtttccagctgtagaccctggattgccaggaggctgggggctgctccacgtgtatttattctgggtcccaggctgagggcacaacaactcttcccacagcaaagaggaggaagacaaggtggaaacccaggaggccttggggcctgatgtcagaacaggctcgtggtcacctccacccatgcaatgtccaaaggaagttgcacagtcagtcgcagggtcaaaggatgtggaccaacacacagaggagtgaagaactggggcccactcatccttacagtttcttatttcctttatcagcaaaagattctcaattcccaattatcccatctataaaatgggtgcacagtaatccccacccctactctctcatggaagtaatgcaaggatgtaatagataatgttcttgatagtgatttctaaaccgtaggggctgatatgtacattagccaacatgcctgtgacccctatacgtgagtccaagaggtgaaggagggtggtagatcagatgacctctctgttctgtcaggctctccaagtctgtgttgtgtggc

SEQ ID NO: 12557 - DNA, 581 bp, Homo sapiens
  MAP TO AC019233.3; EXPRESSED IN PLACENTA, SIGNAL = 1.1; EXPRESSED IN FETAL LIVER, SIGNAL = 1.1; EXPRESSED IN BRAIN, SIGNAL = 1.1; EXPRESSED IN LUNG, SIGNAL = 1.1; EXPRESSED IN ADULT LIVER, SIGNAL = 1.5; EXPRESSED IN BONE MARROW, SIGNAL = 1.2
tgtttgtgctggaaaggttgacatggaaagagctttattcaatatttgtttttattattatcttcataccgtcttactaaatagattacttatgaatatggtaatgaataatttggactcatagtttgctttgttaaacaaagcatcagcatctgcctcaggggaatctcttacttgagtcttagcttaaaacattcctgccacttggtgttagacactaagttacctccaagcccctgaaatgaaacctcatccaaagctttgtcattttcttgagagacaaagacgcagccttctgagaaatcaactgtaaacagttgatcaaattattgctaccttgtaatactacatcatgattcatgatcttagggcttatgttttgaagataacatctgaactgatgtgtcagcccaaattcataaaatccagaagaaaaaacataatgtgtaccatctacttcctaggaaaaaataaataactaaaaatagaaataagtacagcctctgtcactctaaaaatgcacatgaaagcccaaatgcagatcccacagcatatgcatgggagccatttgggaccatatg

SEQ ID NO: 12558 - DNA, 556 bp, Homo sapiens
  MAP TO AL121914.16; EXPRESSED IN BONE MARROW, SIGNAL = 0.86; EXPRESSED IN FETAL LIVER, SIGNAL = 0.98; EXPRESSED IN PLACENTA, SIGNAL = 0.49; EXPRESSED IN ADULT LIVER, SIGNAL = 0.72; EXPRESSED IN BRAIN, SIGNAL = 0.88
gggtaacatctgccttgctcaatgcatagatattgtgttgctctattgtgaggtcttaaaagagagttctggaaagtgtaaacactacagaaatgttaagtaacatcaacgtctcacatacccgtgtatctgaccagtgttcgtcccgttgatatttcccaaagtttagctacagagtcttttccacttgagagaatgtatttagaatttttggaaaaaatggcagaacaaacttcagcaccgtcatgtgctttctcaaaagttgtgatgcatcgatttgaaacaccatcccataatttgatgcagccgtccttgcttccagttacgtacatattggcactagaattgtaattaacggaacatatagcatcggtgtgttgatcttgaggattgcaagagacaaaacattgaaaggtgttgatatcataaaggcgaagagtaggatgctgagttccgacaagtataaagtctccagaaggatgaaaagagatggaacgtaacatttcagcttcctgttgggacagagacattaatacaagtgaccaactggtgaaca

SEQ ID NO: 12559 - DNA, 575 bp, Homo sapiens
  MAP TO AC018389.3; EXPRESSED IN PLACENTA, SIGNAL = 1.2; EXPRESSED IN FETAL LIVER, SIGNAL = 0.99; EXPRESSED IN BONE MARROW, SIGNAL = 0.98; EXPRESSED IN LUNG, SIGNAL = 1.1; EXPRESSED IN ADULT LIVER, SIGNAL = 1.3; EXPRESSED IN BRAIN, SIGNAL = 0.81
catccatcacacctgcattcaaggcagaaagagaaaggtctggctgaagctgtacttgtctccctttatgaggaaagtcatggctttcccagaagtcccccagcagacttttctttatatctcaatggcaagtactcagcaccgtgcacatctcaaatggtaattgaggatttaaggtgaaaattgaatatagttaaaattgcccttgaatagttccttaggattttgccatgttggagagcagcctgctggaagcctacacttcttttagaagcccacactgtcatttctaccacaacattggaacagatctttatttcagcaggtgaaatagctggtattaggtgttgtagcatttaaacagtaggatttttaaacaaagggattacactcaatgcagcaagatacttttactctgagagaaatatggaacccccaccccaagctcattaaataaactggcagatagaaatgatctcactatttagattgttgtccacatgttatgaagcacatggtgtagaggagtggttaagagtctgtccactggaaacagactgaaagcctgctccatc

SEQ ID NO: 12560 - DNA, 548 bp, Homo sapiens
  MAP TO AC016576.4; EXPRESSED IN PLACENTA, SIGNAL = 0.61; EXPRESSED IN FETAL LIVER, SIGNAL = 0.5; EXPRESSED IN ADULT LIVER, SIGNAL = 0.67; EXPRESSED IN BRAIN, SIGNAL = 0.55; EXPRESSED IN BONE MARROW, SIGNAL = 0.55
ccttgagaactatggggctgacattgatatgatttcaaagctgtatacaaagcagaaatacgatcctcctctggctcgaaaccagcctcccatcgctggaaagattttgtgggcccgccagctcttccataggattcagcagcccatgcagcttttccagcagcacccagctgtgctaagcacggcagaagccaaacctataattcgcagttacaacaggatggccaaggtcctcctggagtttgaggtcctcttccacagggcgtggcttcggcaagtgagtccctaaatttatactcttcccattgttggaatcatgggaacccctcttctagcatttgacagtgttatttctttagaaagctggatttgtaggtgttttgtaaggcagatgggttgaatctaagcgttcagagtgtaatatgtccacaaagaaaaataattattagatttgaaaagaaaccacaagccaggtaacagaaccccatttttatttaatttacgaactccaaagtgagaagatcttgtttattggttcctatgcccaa

SEQ ID NO: 12561 - DNA, 511 bp, Homo sapiens
  MAP TO AP001439.1; EXPRESSED IN FETAL LIVER, SIGNAL = 0.61; EXPRESSED IN BRAIN, SIGNAL = 0.58; EXPRESSED IN PLACENTA, SIGNAL = 0.66; EXPRESSED IN BONE MARROW, SIGNAL = 0.66
cgcaaggagaggaaattgacaatttctctccccagggtagccagcctccaagaaggcccccaatagtccctgcctcctgctattcatggaccctgggaaactccacaatgtatcagggtctgtctgtgcaacaaatggagtacagcagaagtgatgatggtgtaacttccgagcatgtatatattagacttaaagatgctgcaactcttttaaaaacaaaccctttgctaccagaaaggtcactgaagggcatgatgatgtgtaacatccaaaacaaggtcatgaagggcatcacaattcttcattgctctctgggatcactcactgtgagggaggtcatcagctgccatgttctgagacatttggtgctaaaaccaggaaagtttttggcaaaatacactggatcaccctacctgacaaaccaagtaaatgcttcatttttttttcctcttttgacttaacttcctttgatttcttctatttttcactttgtcatcctccctgcttcttg

SEQ ID NO: 12562 - DNA, 568 bp, Homo sapiens
  MAP TO AC013497.4; EXPRESSED IN LUNG, SIGNAL = 1.1; EXPRESSED IN FETAL LIVER, SIGNAL = 1.1; EXPRESSED IN BRAIN, SIGNAL = 0.96; EXPRESSED IN ADULT LIVER, SIGNAL = 1.2; EXPRESSED IN PLACENTA, SIGNAL = 1.1; EXPRESSED IN BONE MARROW, SIGNAL = 0.93
gatgcatttgctaattgccctgatctgatcactatacatcatatgtatcagaacatcactgtgaaccccatgagtatgtacaattatttgtccattaaaaaaaataaaatagaaagtatgggtggtataaaatatttgatgtcgtgcatatttttaaatcttcacaaaaaaatcattatagaggaagtaaaatatgtgagaataatttatcattcttttcactttttttaaaggtgatggatgtggacacactgtactaggccctgagagtggaacccttacatccataaactacccacagacctatcccaacagcactgtttgtgaatgggagatccgtgtaaagatgggagagagagttcgcatcaaatttggtgactttgacattgaagattctgattcttgtcactttaattacttgagaatttataatggaattggagtcagcagaactgaaataggtaggacttttttttgtaaatgtacatgtaaatacatcattgtctcaatgatgtatttttttgatattaacattaaataaccatgcagtgtaaggtgctatgtggga

SEQ ID NO: 12563 - DNA, 595 bp, Homo sapiens
  MAP TO AC010876.2; EXPRESSED IN PLACENTA, SIGNAL = 0.58; EXPRESSED IN FETAL LIVER, SIGNAL = 0.53; EXPRESSED IN BONE MARROW, SIGNAL = 0.53; EXPRESSED IN BRAIN, SIGNAL = 0.5
tcaagcacatttggaaaggggcaaacgcacaaggaagcctgctttgcaaaatctgcctaaaaggctagctccatctgaacagacacctacccggtttctgtcttcaattgtcaacagttcctcctccatgcacttatccaagacgtctctaactagaagcttgtccaccagagtgggctgaaggaggttcagcagttggagatattcatcatgagcgttctcaaacgatggagagggcaagtccgtgagctcagggttcatgtagcgggcggccagagggctgccggttctccggagggcctccacgaattcccgagtccaaccaaggtgccagactcccttctccaaggtgctcagcagcagttcaactgcctgcatgttcccggaggtggcgactgtcctctgaatctgctccttcacctctgcaggcagaaaggtcaggtagtccagcacaggctccacctggatgtacattttcaccctggccctgaagcacgagatgagatagcggaaattctcgtctgtggaatacccattcgacatctttctttctcagagaagggagagggttctcccaagcagatggtgctgttgt

SEQ ID NO: 12564 - DNA, 577 bp, Homo sapiens
  MAP TO AC010492.4; EXPRESSED IN PLACENTA, SIGNAL = 0.77; EXPRESSED IN ADULT LIVER, SIGNAL = 0.79; EXPRESSED IN FETAL LIVER, SIGNAL = 1.5; EXPRESSED IN BONE MARROW, SIGNAL = 3.7; EXPRESSED IN BRAIN, SIGNAL = 0.81; EXPRESSED IN LUNG, SIGNAL =   1
ggtctcagctcagagcaaggtggggcagcccctcacccatccttcttctctccaggactgatccctgacatacccgccctctcggtgcagccgggccccaaggtggcctcaggagagaacgtgaccctgctgtgtcagtcatggcatcagatagacactttctttttgaccaaggagggggcagcccatcccccgctgtgtctaaagtcaaagtaccagtcttatagacaccaggctgaattctccatgagtcctgtgacctcagcccagggtggaacctaccgatgctacagcgcaatcaggtcctacccctacctgctgtccagccctagttacccccaggagctcgtggtctcaggtgagggccctgaccctgtcctgtccaagctcaaaggctcagctcaggccctgcccccaggagagctctgggctgggatggagtcgcggtgcgggggggagggtttgaggggggctcagccagagggagactcacccctcagaggggaggaggacaacgggggctccccaggcatgcccacacttggccccatctcctgggatgcaaatggtgaaaggt

SEQ ID NO: 12565 - DNA, 530 bp, Homo sapiens
  MAP TO AC022045.2; EXPRESSED IN ADULT LIVER, SIGNAL = 0.88; EXPRESSED IN LUNG, SIGNAL = 1.1; EXPRESSED IN BRAIN, SIGNAL = 0.95; EXPRESSED IN BONE MARROW, SIGNAL =   1; EXPRESSED IN PLACENTA, SIGNAL = 0.99; EXPRESSED IN FETAL LIVER, SIGNAL = 0.88
agagggcttcctagaggtggcatttctggaatggggccccagggatggcagttcctgacctcaaaggtgaaagggtaagcgtgctcgcccagcttcttgatgaggcgttcctgcagccgcgtcaggggcttcttgtcctcgggggccggtgggaacgactgtacgttggccacaaacaggtccttgcgaaaggtcaggcccaggacatccaggtcctcccggccatagcggaaggcgcaggtcagcgtcacatagactgtggggagcgaggagcactgaggaggggcctgggagagcagcaagcgagccccccagagtgccggcagcagccctgggacgggccccactggaggccccaagcctgtcccaagctctgtggggatggctgcactgtctccaccaggagggctggtagtgagtacaggaaggatgccatggcctggcccctgggaggaggagggggctgcctgctgagccagctctgtccttccccctcccacctctccccagggcatatgtggaggggtatg

SEQ ID NO: 12566 - DNA, 535 bp, Homo sapiens
  MAP TO AC024972.2; EXPRESSED IN ADULT LIVER, SIGNAL = 0.87; EXPRESSED IN BRAIN, SIGNAL = 1.1; EXPRESSED IN BONE MARROW, SIGNAL = 0.82; EXPRESSED IN LUNG, SIGNAL =   1; EXPRESSED IN PLACENTA, SIGNAL = 0.94; EXPRESSED IN FETAL LIVER, SIGNAL = 0.96
cctccatcacagttcccaacacgcacccgccccacaaatcctgcccaaggtgagggctggtcccgggtcctctggctgccgcatcagcgagtgcaggagggaggagaagcctccaagggggtgatgtgggctcaaggatgcaactcggccaggagtgaactggggcccagagggaggtgtccattccggtgctggagcccagccctggtccccgacccccttacctccacggtccgtatctcctgctgggtgaggtccttggacacagcgcacttggtgcgcagcccgcgcaggctgccaacggagatgccgatgagcttctggagctgcccgcactgctgcagtgtccggctggccgcggcccctgcacctccctccgcgatagccgcgtcacccccgccaccgccctccttcttctctcccaacgcggccgagcgcagcgctgctctatgcaggctgcagcggcccaggagcagagcccggggcgccagcgtctaggcaaggaacgcccgaaccaggagagctggacaaggag

SEQ ID NO: 12567 - DNA, 591 bp, Homo sapiens
  MAP TO AC019141.3; EXPRESSED IN BRAIN, SIGNAL = 0.68; EXPRESSED IN LUNG, SIGNAL = 0.85; EXPRESSED IN PLACENTA, SIGNAL = 0.62; EXPRESSED IN ADULT LIVER, SIGNAL = 0.69; EXPRESSED IN BONE MARROW, SIGNAL = 0.76; EXPRESSED IN FETAL LIVER, SIGNAL = 0.65
tcaggctttgaatcctggtcttaccaaactctgtcttgtttctgaattctcttggttttctcctacattattctataactatagaatagttattctatagcatctattaacagttacctgttggaatctgactaatgtctttaatagtggaagtagcagttagggagaatagttgggagtaggcagaagcagcaattctataagcagaaatctaaaggtaagagggagtattagaaatagagtgagagaaaacaaaacagcaccaagaaaacatgacaatagaaagtgggatgtggttacagtgagtggggttaaccattaaacatatcttttgtggggatggataaaatactgtcaagtagatggatacctggtaccttcttgactgtaaatacagtttatttggaaagtgttatgctctaggaagaaaagctcttgtatttagaacacttacactaacaaggcaagggcttaaaaacagcattcaaagtaagaaaatcagcagtgcttgagatgtttaagttagtgctgtcacacatacaactgtagtcttatgcgaagactggaaaatcaagagtaggggccacagtc

SEQ ID NO: 12568 - DNA, 575 bp, Homo sapiens
  MAP TO AC011218.4; EXPRESSED IN PLACENTA, SIGNAL = 0.48; EXPRESSED IN BRAIN, SIGNAL = 0.6; EXPRESSED IN BONE MARROW, SIGNAL = 0.47
ttccattcctttggaaaacgtttgagactagttaagagtttggcctaagtgaatgaatgtcctaaaatctacacttgtggcaggatcttcccttccagaggcaaaccttcactgtgtggagctcccagggtaaaaagaccattgtcgagtgcatgtatataggttccctcatccatttcaaaggctatggttcctggaatttcaccaaagtttgttaatgtccaccagattcctaaaaaataaaattgatatttcaacttcatattttagttttgacagagagttctttgttattataacttagtttaaaaaactttttattttgcagtcataagaaataatacgaagatctcacataccctttactcactttgtctcaatgatgacatcttgcataagtatcatacattgttagaatcaggaaactgacattgatataatccatgaagcttattcagatttcaccagttttacatgtacttgtttgcatgtatgtgcacagattcatgtgactaccagcacagtcaggattaggtttttaaaatacaaaataagcaacatacagccaggcatga

SEQ ID NO: 12569 - DNA, 516 bp, Homo sapiens
  MAP TO AL160413.5; EXPRESSED IN PLACENTA, SIGNAL = 0.64; EXPRESSED IN ADULT LIVER, SIGNAL = 0.76; EXPRESSED IN FETAL LIVER, SIGNAL = 0.6; EXPRESSED IN BONE MARROW, SIGNAL = 0.71; EXPRESSED IN BRAIN, SIGNAL = 0.75
aacaacaaaacccttgcagcaatgagcgcatctagtgcccagaatttggtctctaattccattctctaataaaaggacccggggcttaatgaaaaaaatggttgattctaggactggaacagaaaatgagcctggagagcctcgtggtgctataaagaaaaatagataaacaaacaataaaaaaccctcactgatgggataagtcaaagagacgtaggagtcacctgaacaagctctcaatggccaaaactaaaaaatttaagcatcaaaataaagtcgtcctgaacgagctctcaatggccaaaactaaaaaaattaagcatcaaaataaagttgtactggatcccaacctaaagtataaaaccaatatgcatgatatatactggcacaaataaatgatcaaaaaaatgcataggggagaataagcaaatcttctatgcagaagaattctaaataatttgtttgtccttaagaaggtaaaacttaattccccatgctttaagtgtgggctgaaca

SEQ ID NO: 12570 - DNA, 600 bp, Homo sapiens
  MAP TO AC022542.3; EXPRESSED IN LUNG, SIGNAL =   1; EXPRESSED IN ADULT LIVER, SIGNAL =   1; EXPRESSED IN FETAL LIVER, SIGNAL = 0.92; EXPRESSED IN BRAIN, SIGNAL =   1; EXPRESSED IN BONE MARROW, SIGNAL = 0.93; EXPRESSED IN PLACENTA, SIGNAL = 1.1
tccagctgtcaagtcaatgctcaaagcatgatgctatgtagccataggagagccctatatgcaggtagaggaaagatttctttataaaccaaaagatgggtgtagactcagtgagtctgtataacggggtaaagggagttgtgagaaagggaaccgagaattttgaaaggaatagagggctgaactgaagctgaactggggaagcccctgactgtggtaaataaacagaaaataaaaacaatagtagtcacttagctgctttaaatcccctttttagcaatagattgtaaatgataatcactgtgagttttttttaagggaatactagagattctggtccaactgtggttcgagtggctgcaaggaaagcattttcaaccagcagcggaggctgcagtcattcacgagcatcaggaaatcaggggagcctcggagaggctgtgggtgatggatgggaacaagttgaaagaatagtatgcagaagcctggggtcagggtggggcagtaaaagctgagctcaggagccaggaaattgttcagaagctagaaatcaaaagtcatcagatggtaaaagccaacacagcagagatgatgccaaaa

SEQ ID NO: 12571 - DNA, 519 bp, Homo sapiens
  MAP TO AC013612.3; EXPRESSED IN PLACENTA, SIGNAL = 0.52; EXPRESSED IN ADULT LIVER, SIGNAL = 0.67; EXPRESSED IN FETAL LIVER, SIGNAL = 0.72; EXPRESSED IN BRAIN, SIGNAL = 0.93; EXPRESSED IN BONE MARROW, SIGNAL = 0.7
ttctcctggtgaaatggtcctgctgttcttcctcacctgcacccaatcagccagcatcacctgcactcaatcatgcagcatcacctgcacccagtcatccagcatcacctgcacacaatcagcatcacctgcatccaatcagccagcatcacctgcacccaagcaatcagcatcacctgcacccagtcagccagcatcacctgcacccaatcagccagcatcacccacacccaatcagccagcatcatctgcacccaatcagccagcatcacctgcacccaatcaatcagcatcacttgcacccaatcagccagcatcatctgcacccaatcagccagcatcacccgcacccaatcagccagcatcacctgcacccaatcagcatcacctgcatccaatcagcatcacctgcacccaatcagcatcacctgcatccagtcagccagcatcacctgcacccaatcaaccagcatcacctgcacccaatcagcatcacctgcatccaatcagcatcacctg

SEQ ID NO: 12572 - DNA, 558 bp, Homo sapiens
  MAP TO AP001432.1; EXPRESSED IN PLACENTA, SIGNAL = 0.59; EXPRESSED IN BRAIN, SIGNAL = 1.3; EXPRESSED IN BONE MARROW, SIGNAL = 0.57; EXPRESSED IN FETAL LIVER, SIGNAL = 0.71
gctggttttgctaagcagtgtttaggggtttttaattcctgaatgattgtgacatttcccttgtaaattttcatctgctttttactctcctttgtttattttaagaaacagtaaagaacaagatcataagtaggcattttaaatgatttttaatagattgttttgtaattcacttttagggggaaatttcacggattgaaaaggagcaccaagtattacaagaccaacttcaagaagtgtatgaaaattatgagcagataaaacttaagggcttagaagagaccagggacctggaagagaagttgaaaaggcacttagaagaaaacaaggtaatcctgtctgaaacctgtctttaattgcatgtagcatagttaggagaatgtgagtgtagctgtgcttgtgcggcctcagctgaacttctgcattggtggctaaacaaaagattctttctcagaatcgcctgcttcagatttcttcatgacatattaaagtggctgttgccatgctttagaacttctgcaaactgccttatgagaaaggggctgtaagtctgggttt

SEQ ID NO: 12573 - DNA, 559 bp, Homo sapiens
  MAP TO AF241729.1; EXPRESSED IN PLACENTA, SIGNAL = 0.64; EXPRESSED IN FETAL LIVER, SIGNAL = 0.94; EXPRESSED IN BRAIN, SIGNAL = 0.74; EXPRESSED IN BONE MARROW, SIGNAL = 0.87
aatgagggctctgctctttgattaattaaagctaaactgaagttttaatcttgctcctgatgtttatgcttgtttctttttcctctgtaaccataaacactcagggtggtctcttggtgatttagcatgacaagacctagttgttctgctgggcctgggtatgaaatctgtccatgttcagagtttctaatatttttcattctattttcattttcattgcagggaaggacattgataatgctttctagccatgtgtgaagttttgctgcaaagaggtaaaaaggacttacaattacagtatatttcaataatatattttctgaggcataaacttttgtgggacagaaatatgtactaaatttatttattttaataaactagcagaattaaaggattgcaggaattaaaacaaataaaacccaagcgatcatgtcctagaatttggcatgtccataaataacttttaaaaagaaggcaaaatatacatattacaatatatctcatagaaaagactttagggatatccaacattctccaaccactggtcatctctgcctga

SEQ ID NO: 12574 - DNA, 566 bp, Homo sapiens
  MAP TO AP001413.1; EXPRESSED IN LUNG, SIGNAL = 0.91; EXPRESSED IN ADULT LIVER, SIGNAL = 0.85; EXPRESSED IN BONE MARROW, SIGNAL = 0.95; EXPRESSED IN PLACENTA, SIGNAL = 0.78; EXPRESSED IN FETAL LIVER, SIGNAL =   1; EXPRESSED IN BRAIN, SIGNAL = 0.83
aggtcaacttggtcggtagtgttgatcagatcttgtatatctttattgattttctctccacttgttctatcaaatattgagagacggatattgaaatctcttaatataattgtgtctatcgttgtagttttatcattttttttggtctgtgtgttttaaagctctgttaataggttcatagatgttcaggatttagtatgttctcttggtgatttgacacttttatcattggaaaataactttcatctcgtgatattcttcagactgcagcatactttctttgataatatagccattctgtcttaattttgatagcatgatatatcttttcccagatgtttacttttaatctattaatgtctttgtattagaaatttatttcttacagacacatatagttgacttgcttttcttgttgttcctggtctgaaatctctgcttctcatttgaggtatttagatcatttgtgtttaatgtgattattggtatgttttggtttaaatctgtcatcctgctatttatttcctatttgtgttgtctgtttttcccctttcctctttttctcc

SEQ ID NO: 12575 - DNA, 515 bp, Homo sapiens
  MAP TO AL157392.2; EXPRESSED IN FETAL LIVER, SIGNAL = 0.66; EXPRESSED IN ADULT LIVER, SIGNAL = 0.69; EXPRESSED IN BRAIN, SIGNAL = 0.66; EXPRESSED IN PLACENTA, SIGNAL = 0.67; EXPRESSED IN BONE MARROW, SIGNAL = 0.62
ctcagaaggtccttggcttgatttcctgctctgctgttgatatcttgaaattcctaacaggtttttttttctttctttatatctttattctttttttttgtcttgttgctatacgctttttaaaaaattaatttccataggtttttggggaacaggcggtatttggttaattagttccttagtggtgatttatgagattttggtgtgcccatcccctgagcagtgtacactgaacccacctaatgggtttgatcaaggggccctgcatttccattttgcactgggccctgctcattgtggacttgatcctggccttaggtcctggcatgtactggtgctggcaggctctgtggggtaaggtgcctgccagcctaatgggcaggcctgggaggtggaaccctcaagccctccaagagaaggaaagaaagcagaaccaggtgtgagcacgcttgagaaaacccctgtgcctttcatgggaagcccccctccccacccgatgaagaaccccagagcag

SEQ ID NO: 12576 - DNA, 509 bp, Homo sapiens
  MAP TO AC010397.3; EXPRESSED IN PLACENTA, SIGNAL = 0.56; EXPRESSED IN FETAL LIVER, SIGNAL = 0.74; EXPRESSED IN BONE MARROW, SIGNAL = 0.72; EXPRESSED IN ADULT LIVER, SIGNAL = 0.62; EXPRESSED IN BRAIN, SIGNAL = 0.52
ggatgtttccctttttcttcaggagagaagtatatagtattcttcaagctgaaggtattttacttcctcgttatgctattttgaaccgtgacccaaataatcccaaaggtaagagtaagagattttaggtaagcttcctttgccacttgacatacttttgggccacattcttacaataattaactggaaggaatttaaagaattcatagtattctattccattttaaaaaataatctaaacagacaaacatattcaattaaaaggtgacactgagttaaaaggctacctaataatttaggaattatttatccttctcttcttggcctactttgacatatctctaagaatcatgagttagaattttgaaattacatacaagtaaatgtgtattgattaaaggtgaacaagtgatttatctatgactattgaattaagtattagaaacttcatgctacaatgccaaaaactaaatactggccaagaatttggaaatacagttggccctgga

SEQ ID NO: 12577 - DNA, 554 bp, Homo sapiens
  MAP TO AC018529.4; EXPRESSED IN BRAIN, SIGNAL = 0.6; EXPRESSED IN BONE MARROW, SIGNAL = 0.65; EXPRESSED IN PLACENTA, SIGNAL = 0.47; EXPRESSED IN ADULT LIVER, SIGNAL = 0.58; EXPRESSED IN FETAL LIVER, SIGNAL = 0.5
aactttggaaatggctttgctacagaagatggaaattacagaacagtgtggaattttgtcacagtccatttatttcaatactctgagcactcctggctaacaatctaacctcaagggttttcagaatttgcagcagaagtcggtgttggcagtgcaggtgccttccttaggacattgtcggagacacatgcaaatgtctctgctggcagccaggctccagagaccctgacctggtgcaggcaggtgccgctgcagcgggtcagttcagagatgcatgcaaatgtctctgctggcagccaggctccagagaccctgacctggtgcaggcaggtgctgctgcagcgggtcagtccagagacgcatgcaaatgtctctgctggcagccaggctccagagaccctgacctggtgcagccaggtgctgctgcagcgggtcaattcggagatgcatgcaagtgtctttactggcagccgggctccagagaccctgacctgatgccggcaggtgctgccggcagcaggtcagttggtttaacacccagttgtgcattaacg

SEQ ID NO: 12578 - DNA, 574 bp, Homo sapiens
  MAP TO AC015493.4; EXPRESSED IN PLACENTA, SIGNAL = 0.57; EXPRESSED IN FETAL LIVER, SIGNAL = 0.59; EXPRESSED IN BONE MARROW, SIGNAL = 0.49; EXPRESSED IN ADULT LIVER, SIGNAL = 0.63; EXPRESSED IN BRAIN, SIGNAL = 0.51
agcaacccagcaccattaactaggacccagaaattcccttctgaacaacccccagggaagttttctcaaatgcacatggtaaatgggcatgtttgttatagcagcatttgcagtacaaggagttgaggaaatggaggatgaatgatgaggtggaaggtatgcagatcaacatgcagccttggaagccatgtgtcaaagatggcagagccaggagatggaaccagttggaaaagcactatgtgccaatcaggaacacttgctttggactttataggagcaagttcatgtaaagaaattaaaaaagaattaaaacatgtcataggacaaaactaagagatgtaacatttcatcatctagtaaccattgtatacacttggatttgtgtgtttaggtttctgcatttccttaatcagatctgttacatctgcctgcttacctcaggaattaaccaaaagagtactcctcattttatttcttaaataatcaaacgtcgttttaaaaaataataagaaatacccaggtgagaaatattcaaatgtggctctctttataggggtggaagctaaaatgaggc

SEQ ID NO: 12579 - DNA, 517 bp, Homo sapiens
  MAP TO AC019159.3; EXPRESSED IN PLACENTA, SIGNAL = 0.99; EXPRESSED IN FETAL LIVER, SIGNAL = 1.1; EXPRESSED IN BONE MARROW, SIGNAL = 0.89; EXPRESSED IN LUNG, SIGNAL = 1.1; EXPRESSED IN ADULT LIVER, SIGNAL = 0.98; EXPRESSED IN BRAIN, SIGNAL = 0.88
atgacttctcaccaggggtcgtgggaacagttttatgcaaatgatggcatttgagcagaggctcagagacttggtgttgaggaggacttcgacaaagtgtgccgtggagaaagaatttgtgcaggtaaagatcacaaagaaaaggagatctgattttcaccgcagtcgtctttaggaaatgactgtttgggataatgagatttctgtacatactaaacatgctttatttcattgcttgcagttaagcgctgggggcttaaaaaataaatctagagaacgaggccaccaaagttataaggccaagagattaccagtgattgcagcacatgtctcactatatgaacaaaacacacaccatcaaaatgctgatttagaaaagaagactctgccaacaaaagaaagtgttttatatgctctttctttctaaatagaataccgtttctgagaaaacatttagtcagaaagaaaaacaacttcatccatctttgaaaataatggcaggcactcatcaaagtca

SEQ ID NO: 12580 - DNA, 589 bp, Homo sapiens
  MAP TO AL121944.10; EXPRESSED IN LUNG, SIGNAL = 1.2; EXPRESSED IN FETAL LIVER, SIGNAL =   1; EXPRESSED IN PLACENTA, SIGNAL = 1.2; EXPRESSED IN ADULT LIVER, SIGNAL = 1.2; EXPRESSED IN BRAIN, SIGNAL = 0.96; EXPRESSED IN BONE MARROW, SIGNAL = 1.4
aacaaggagaccacggtgaggtgggacccgcacatattgaaggccttccttcttcctgcggctgacttgattctcagcactgctagggcaatgtagctataagagatgaggataagacacaaaggcatcaggacaattactaccgataaggtgaaaacagtgctctccatagccactgtgtccacacaggtgatttttattagagctggcatctcacacaggaaatgtttcaacttacatcttccacatcgtggcagcttcatagtcacaggagacataactagagaactgaggagtccaacacccccgggccacagacaccaacttccagcacagctgagggtgcataatgacagaatagtgaaggggcttgcagattgcaatgaagcggtcataggccacggctgccaagagaatacactcttgccacccaggcccaggaacatgaagagctggatggcacagcccgtgtggctgatagtcttgcctgggctgcctagattgaaaagcagctgggggatagaactggtggtgaagcagagatctaggaaagacaagttagtgaggaagaagtacatgggcatgtgga

SEQ ID NO: 12581 - DNA, 588 bp, Homo sapiens
  MAP TO AC015805.3; EXPRESSED IN ADULT LIVER, SIGNAL = 0.63; EXPRESSED IN BRAIN, SIGNAL = 0.66; EXPRESSED IN PLACENTA, SIGNAL = 0.57; EXPRESSED IN FETAL LIVER, SIGNAL = 0.59; EXPRESSED IN BONE MARROW, SIGNAL = 0.72
tttgctgttggactttgctggggtcattacttgcctacatgtttgtaatggttccaccaaattctgtgactggcaaacctccacacaatgtcttggatagtttcttttgcctcctgcatggttgcagttccttcttcctacacactgttattcttctgagactgaatgcattatcctgttgcttttgcattttagacttccaggtcctaccgcgagggtatccgctgcaggcagcgaggccaaaacacgcggagggtcaactactgctaacaaccgacgcagccagagctttaacaactatgataaatccaaaccagtcacctccccacccccaccgccaagcagccacgagaaaggtgagtcaccttcttgaggagcctttttggtattttccttcagagcacatctacctagttccttcgggtgaattgggttgggtcatggggaggggttgcatctgtgttgagaatgagttacaaggacatatttggtaggcaggaactttagtagccagaggtattaataaagtgggggaaaatattgttatagtcactagcaaaaataatttgctatctttgtttgggtggg

SEQ ID NO: 12582 - DNA, 600 bp, Homo sapiens
  MAP TO AC015474.3; EXPRESSED IN LUNG, SIGNAL = 1.2; EXPRESSED IN FETAL LIVER, SIGNAL = 0.78; EXPRESSED IN BRAIN, SIGNAL = 0.49; EXPRESSED IN ADULT LIVER, SIGNAL = 0.62; EXPRESSED IN PLACENTA, SIGNAL = 0.76; EXPRESSED IN BONE MARROW, SIGNAL = 0.63
tgggtatgcaccaaacacagagctgtaaaatgacggagctgaaaggagaagttgtcaaattcaccattactgttgaatacttcattcctctctcagcaattaatagaacaactaggcagaaaattagcaagaacatagaaaaactcaacatgattgctgacagaagctaatcaacatttatagaacactctacttaattgaagtggaatacacatttttaagcgcccattgaacctataccgtgatagatcatatcttaggcaataagacaaacctcaaaaaatgtaaaagaaaaaaaatcatacagtgtatattctctgaccacaatgacactgaagtagaaatcagtaacaaaaagataatttaaaaatctccaaatccctggatgttaataacacactgctaaataatccatgggtcaaagaagaagtctaaagggaaataaaaatacattgaactaaattaaaataaaaatgcaacatattaaatttgtgggacatagctaaagcaatgcttagagagaaatttatagcactaaataaatttgaaaaagtctcaataatctaaaccttgatcttaacaacctgaaaaagggcaaaa

SEQ ID NO: 12583 - DNA, 579 bp, Homo sapiens
  MAP TO AC009874.5; EXPRESSED IN PLACENTA, SIGNAL = 0.64; EXPRESSED IN ADULT LIVER, SIGNAL = 0.57; EXPRESSED IN FETAL LIVER, SIGNAL = 0.74; EXPRESSED IN BRAIN, SIGNAL = 0.84; EXPRESSED IN BONE MARROW, SIGNAL = 0.7
aaaagggaaaagccagaagcatttggccctatcatttttatctctaaaaaactgctggttcctgctctgaaacagttcctccacgtgaaataaataagcagctaggttttctttttatcagcttcagctcatttggtccaggtgtgagggtattaagggataagtctaaatacaatttttgttttcttcctgaacagaaaatggacaaaaataaagatggggttgttaccatagatgagttcattgaaagctgccaaaaagtaagtaatgaaagtgtaataactatcaattcagctatcataacagctaaactgagtattagcagctagctaccatgaactgggcgaaatatagagatcatatgcctaagtttaccacttctacaacatgcagcataagcctaccactctgaaaacaagcaccaattacataatcaacatttagagtgcccactgagtcaggctatggaggaaaccctggggatacaaaagttgtacatgtactgtgttgattcccaaattccttagagagtattcatggaggataaaacatacatgagatttgaattgctctttgcca

SEQ ID NO: 12584 - DNA, 536 bp, Homo sapiens
  MAP TO AC016706.2; EXPRESSED IN ADULT LIVER, SIGNAL = 1.2; EXPRESSED IN LUNG, SIGNAL = 1.1; EXPRESSED IN BRAIN, SIGNAL = 0.83; EXPRESSED IN BONE MARROW, SIGNAL = 0.95; EXPRESSED IN PLACENTA, SIGNAL =   1; EXPRESSED IN FETAL LIVER, SIGNAL = 0.9
ttacagccaagacatgctgcctgtgtagcacctggacaataactgaattccccaggtgcctgtgtcacaaaccctgagaactggtgttttacaccactcagcactgcatgctttatctggctatgaattacccatcacatttctacaataacacacatggctcccacttcattgacttcctgcagcttggcaaaagtgatccctgaaagcctgcttacctcttcaacttttgataaaactagaatacatccttctgagctggcatgattacttactttttgtttcttcacagcaggtttcataacatatcttgtaacaccccagttcattatgtattttgcttggaaattaattgcatcttagcagcaggtccatccttcaccattgattatttctctccctctacttttttgggatttttgttccagtcatatttgtctttaactaatatttttatttttaaaaaatttctgttatgtaaacacaacttgacaatcagaaatgcacacttacattctcagcttgacagtatgccg

SEQ ID NO: 12585 - DNA, 574 bp, Homo sapiens
  MAP TO AC013597.3; EXPRESSED IN ADULT LIVER, SIGNAL = 0.64; EXPRESSED IN BRAIN, SIGNAL = 0.73; EXPRESSED IN BONE MARROW, SIGNAL = 0.64; EXPRESSED IN PLACENTA, SIGNAL = 0.61; EXPRESSED IN FETAL LIVER, SIGNAL = 0.63
acaattgcaaaaatccctgccttcatcatgctttcattctagtggttgaaaacagacaatttgaaaagtaaagcacttaatatatgtgctgtaatgaaaaataaaatgggagtaaaggataggaagtactgaagtagcagagacatatttttccataggatggtcagggtggtcaacttatcaagtgacatttgaacaaatgcttgaaagagataaaggaggcaaatggatattcgggagaatacccatccaggcagaggaaatgccagtacacacgggctcttatatgacaacgtgccttggaaattttcagacagcagagaaccctagtgaattgaacagaggaagcaagaaggtgaggagagggttaactgtagacgagccttttagattattctgactggcttttaccctaagtgagatgaggagtcattgtaaggaattttattaaacattagatatgaactggtactttcagataatggaactggtatttaattaagattagaaactttatctgcattacacagttggtaagtttcatatagaatccctacctctgtaccagatgcaa

SEQ ID NO: 12586 - DNA, 600 bp, Homo sapiens
  MAP TO AC015785.3; EXPRESSED IN LUNG, SIGNAL =   1; EXPRESSED IN PLACENTA, SIGNAL = 0.89; EXPRESSED IN BONE MARROW, SIGNAL = 0.91; EXPRESSED IN FETAL LIVER, SIGNAL = 0.97; EXPRESSED IN BRAIN, SIGNAL = 0.98; EXPRESSED IN ADULT LIVER, SIGNAL = 1.1
ctgggaataatgaaccgctgcaccccattgaaatgtaattacacagccctcttgttcttaaacctataaggtgaaagaaagatgaatagtgaaagtaaaaaccgctgacccttcaaactttaatttacgttatgcatttgctcgcccttctgataggttttagaaaggtcataatttagggtattttgccattgataaatgatctgtatgtttgcgttcacacgcaccgattgatttgttatagccaaaatattgtttctataacaacccaagggcccttaactagacaaacagcaaaccagaatccaaggggaggcaaagggaaatctaggcctgcccagaaggggctggcctttgcccagggactccaggatgatggagtggagcgtgtgggtgaggatgcaggggcaaaactgtgggagggagaggtggtggtggagcaggtggagcagcggcttcggttcttggcaggcctgcagtcgtggtctctccagcccagcgtgggtggcttccactgcagctgaagcaagtcttgtcaagactttcaagttgagctccctttggtgcagagtgggccagtggggttgttagggcaatttt

SEQ ID NO: 12587 - DNA, 556 bp, Homo sapiens
  MAP TO AL158206.3; EXPRESSED IN BRAIN, SIGNAL = 0.69; EXPRESSED IN PLACENTA, SIGNAL = 0.75; EXPRESSED IN ADULT LIVER, SIGNAL = 0.58; EXPRESSED IN BONE MARROW, SIGNAL = 0.64; EXPRESSED IN FETAL LIVER, SIGNAL = 0.68
aggcctaatgcacacaggagtaatctctaagaaaaactgttgggtagagttagatcttatgaagcgctggaactgcacagcggcttccccagcacaccccctttctcccctggaggctgcatccactgtgctgagtggccacgccgtttaatgctgtgcccatcagcagagggacccagctaccactcgatttagtaatgcatttcctttccttaccacagtagcccaacacatttgaggaaaaagaatcatgaaaattttgtcttttccactcccccgaacccccgcctttgaaatcaccaccacagctgctaacagaagcgtctttatgtagaatgtgttttgcccttttggagaagacaaagaattattaaaagagcagacagctgcttgtactggcaagagaatgagaagagcttgtcagcactcactcttctacccttcctcagctgaatcaccaccgtcttcctctttacctcattttgctctctctttgcctggtccaggagcatagaggccatcaccctacccttttgcctccaactctgggaaaaca

SEQ ID NO: 12588 - DNA, 574 bp, Homo sapiens
  MAP TO AL133352.10; EXPRESSED IN BONE MARROW, SIGNAL = 0.85; EXPRESSED IN PLACENTA, SIGNAL = 0.67; EXPRESSED IN ADULT LIVER, SIGNAL = 0.57; EXPRESSED IN FETAL LIVER, SIGNAL = 0.93; EXPRESSED IN BRAIN, SIGNAL = 0.72
gggaagatggagagaaaggcgaggagatacggaacttaggggttcgtgctgattaacaggagaaattattctgaagttgagaagtagttgggatcatggaggccaacccaccggctccttggcattacttcatttggtgtttttcacctgttgttttcatttaggagcctgtggtgctgaccgacacaaatcttgtgtatcctgccctgaaatgggaccttgaatacctgcaagagaatattggcaatggagacttctctgtgtacagtgccagcacccacaagttcttgtactatgatgagaagaagatggccaatttccagaactttaagccgaggtccaacagggaagaaatgaaatttcatgagttcgttgagaaactgcaggatatacagcagcgaggaggggaagagaggtaaattccgaaagcttaattttctgttggatttaggacactcatttttctttcctatacttgtttgaaggtgtggcagaattgggtcaattagagattggcctctcccatctctggattccagttgaaggagtagtctggtcttccagcctttaaggg

SEQ ID NO: 12589 - DNA, 534 bp, Homo sapiens
  MAP TO AC008164.3; EXPRESSED IN PLACENTA, SIGNAL = 0.58; EXPRESSED IN FETAL LIVER, SIGNAL = 0.72; EXPRESSED IN BRAIN, SIGNAL = 0.52; EXPRESSED IN BONE MARROW, SIGNAL = 0.48
caggaggagactggttgaggcagggtctgtgtcccaatgtcattcctcctgcacaggctatggtcttcccaatatgccacaattacattgtacctaaattgacagggtttcagactcttgctttcccaagttgaataatgcgttaaacatatattaatgcaatacatttatggttaaaaaatgcctccagctctgtatgttgaaagcttttgtctccatttccctagggataaatcattattgaaatcaaaaagaagagcttggctcagcagcaaaaaagaaaaataaaaaaacatgccttgtggtttgtccccaacattgcaatctattcctaggttaaggattttgtaacttctttctgtctctcttaggtttctttcctctccttccctcattccccacttacctccccccaacacaaggatgtttaagttctgcacatagtgctcccatctgctcacgtcttctcctatcgccatggttactggcccagagtggtctctgtggagacagaggcagaacagtaaccaggga

SEQ ID NO: 12590 - DNA, 546 bp, Homo sapiens
  MAP TO AC010503.3; EXPRESSED IN ADULT LIVER, SIGNAL = 0.69; EXPRESSED IN FETAL LIVER, SIGNAL = 0.6; EXPRESSED IN BRAIN, SIGNAL = 1.2; EXPRESSED IN BONE MARROW, SIGNAL = 0.51
tctcgtggccaaagagtagggatcctgtggttggatcatcagtctccagtggctgaggtgtggggggtgagggattggggggacgggctccgggtccctcacctggacgtgacccccaaggcctgcttcatgttctcgtagaccacataggagatgctcacagctggaataaccttcatgaagttgggggcgatcccccggtagaggccccgcatgccctcctgggacaggatgtgacgtagcagacccagcatggacagctgggggccaccctcgatggaggctgggagggggcggggggggcaccaggtaaggccaacgttcccctttcacttccccctcctacccccagggttgggccaggtggtgtcattgcagcaggagggaaggaggttagactaacagtgggacctaccactcagagtcgagacttgtattgaccttggaactggctgctcaccttttcgccccaagtttggggacaattagaaatggagcaggtatgggtgtgcaaggtgagaaaggacagaaatgtcctcctcctgg

SEQ ID NO: 12591 - DNA, 577 bp, Homo sapiens
  MAP TO AC008958.3; EXPRESSED IN PLACENTA, SIGNAL = 1.1; EXPRESSED IN ADULT LIVER, SIGNAL = 1.1; EXPRESSED IN FETAL LIVER, SIGNAL = 1.1; EXPRESSED IN BRAIN, SIGNAL = 0.94; EXPRESSED IN BONE MARROW, SIGNAL = 0.93; EXPRESSED IN LUNG, SIGNAL = 1.1
attttagtgcccaagggtccagaagaaagcgtatccatcccactaatcaggccttccctaagagcaaagatggaggtccactttctcagatggccatgagccacaggaagggcaggggacgggaccaaaaaagatcctcttgggctgcctgacttccctgactgtacacatcagctcagcccgaattggggcaaggatctcccaattggcatgacccctgttgtcaagactctccagatgggaaggatacaattccaggcctaacttgctcagcccgcctgtgtgacacagcaggtctttcagagcattcatggaggtctcgtttccatgaaagtagaaggtggtgagctgggagcagtggctcagggcaggcaggaggagcctgagttgggagtcctggatctgacagtcctttaacgtgagggtctcgagagtagcagcaactttctctagcagagctccaaggggctcaagattggtggtccacattaggatatgaatcagatgcagctcctttagctgactgaggcttggttactaagacagacactccatgtcccgatcagctaggtaagca

SEQ ID NO: 12592 - DNA, 524 bp, Homo sapiens
  MAP TO AL133377.4; EXPRESSED IN PLACENTA, SIGNAL = 0.77; EXPRESSED IN BRAIN, SIGNAL = 0.83; EXPRESSED IN BONE MARROW, SIGNAL = 0.61; EXPRESSED IN FETAL LIVER, SIGNAL = 0.66
gtctcttcctgctttgctggcagcttcttctaggtctcctctgcaggttcctccgtccctctggatggcatccccaggcacagcctccatccgtctcttctacatttacactcccttctttggtgtccttggcccagcttgtggctttaaatactagctctatgcaggtgactcgaaactgtgtatctcatttgtacaccgacatccacagcagcctcattcacagtaactacaacatggaagcaaccccagtgcccactgacaaaggggtgggcaagcacgtgtgtttcatcatacggtgcagtagcatccaccttaagaaggacacagacatatctaccatgtggatgagcccggaggacatcgtgctgggtgaaatcggccagacacaaacagacgagtactgtatgattccacttccagttctggagatggacggtggcaatggttgcaccacattatgaatagattgaataatactaaactgtacacttaaagatggttcagaagggaaactgcgtgtt

SEQ ID NO: 12593 - DNA, 521 bp, Homo sapiens
  MAP TO AC021237.3; EXPRESSED IN FETAL LIVER, SIGNAL = 0.82; EXPRESSED IN PLACENTA, SIGNAL = 0.97; EXPRESSED IN BONE MARROW, SIGNAL = 0.82; EXPRESSED IN LUNG, SIGNAL = 0.97; EXPRESSED IN ADULT LIVER, SIGNAL = 0.95; EXPRESSED IN BRAIN, SIGNAL = 0.8
ggatttggttcattattttcccatagattttacttctaggactttttcacatatgctatatatatttgacattatagtaactcctaagctgaaaatgatatcatcttttgttggcattatttttcagaatggttgttgtcttgagaatgctgaagaacagatccatgttacgtatcattgacatgacatgtacctgataggaaaatatatatatatatatatacatatctcacatctggaaccacaccacaagtaaaactttccattctttagttggttgccaggagctcttctgtgtgttccaaactcaatgtgaacaccaaagataagcaaagttgacaaaagggaagagtgggtttacacgtaacttgctttgcagtgttttcatgtcttttcacagtcccattttagtaataactgcctttctagattcaaaattgcaaagtcaatgcaaatgtctctcacatgtgaaattggtatttatattgtactttagtttatgccggatgagttatttggtt

SEQ ID NO: 12594 - DNA, 570 bp, Homo sapiens
  MAP TO AL118520.12; EXPRESSED IN FETAL LIVER, SIGNAL = 0.67; EXPRESSED IN BRAIN, SIGNAL = 1.1; EXPRESSED IN BONE MARROW, SIGNAL = 0.66; EXPRESSED IN PLACENTA, SIGNAL = 0.66; EXPRESSED IN ADULT LIVER, SIGNAL = 0.65
tcaacatgagcgagttggtcaagatcatccggtgcgtgggcagccgccgccaggaggtggctagggtcgggaggggagccgggttcccgccgagaaggggtgggagtggggtcaggggtgatgggaccgggcggtgggcccctgttctggggtggctggaaaggtcaaggtcggggctgcagtcggtgttgggtcagaggtgacagctggggtgagaatgggtgtgaaaggctgggaatcattctgggggtcagggctatgtccgtcccgcagccaagcccctcacagctgcatactctcccgccggctgcaggcgccgcctgcagctgaaccccacgcaggccttcttcctgctggtgaaccagcacagcatggtgagtgtgtccacgcccatcgcggacatctacgagcaggagaaagacgaggacggcttcctctatatggtctacgcctcccaggaaaccttcggcttctgagccagcagtaggggggctcggcctgggagtcgggcggccccggtcaggccctgcccagagagctcctggttcctgaactgagctgcctctaccg

SEQ ID NO: 12595 - DNA, 594 bp, Homo sapiens
  MAP TO AC020919.3; EXPRESSED IN LUNG, SIGNAL = 1.2; EXPRESSED IN PLACENTA, SIGNAL = 1.1; EXPRESSED IN FETAL LIVER, SIGNAL = 1.2; EXPRESSED IN ADULT LIVER, SIGNAL = 1.3; EXPRESSED IN BRAIN, SIGNAL = 0.92; EXPRESSED IN BONE MARROW, SIGNAL = 0.91
aaaatgtgtgctacagcccctactcgggcttttcagctgctatgaaagttatactgcatttggttaagtgtggaggctggcaccagggaggatccatgatggtgattatcatgcaaatcagcctcctgcaagtcaagctcctccgaggaggccttccagctctgcttcccccagggccgctccattgtccccagcacaaagctaaccatcttggctgccgacactggatgccgctgagattggttctcctgacagagattagtgggcagcaatgaatctttcacttggggtagaaatatgattttatttaagaaaataaccatacataattgggcttctgtcactttaaattttaatggtgaaagtaatatggaggcttctggaaccttaaattacggctttcagaagcttcacactgaatctttcaattattctctgtaagtactttctcaaagcatgtgccaccatgacattgatatcacaattcaaatctaaattcaaaactgactgcaaggctatgagctatgtgctggcgtgcatgctgcctcattttatctttgaacatctgacgaggcgaatcaagaggcactctcc

SEQ ID NO: 12596 - DNA, 590 bp, Homo sapiens
  MAP TO AL050342.42; EXPRESSED IN PLACENTA, SIGNAL = 0.92; EXPRESSED IN FETAL LIVER, SIGNAL = 0.96; EXPRESSED IN BONE MARROW, SIGNAL = 0.99; EXPRESSED IN LUNG, SIGNAL = 0.97; EXPRESSED IN ADULT LIVER, SIGNAL = 1.1; EXPRESSED IN BRAIN, SIGNAL = 0.96
ttacaggagggcatgaggacagatagcccctaggcaaaggggttagagttcttaaggccttgttatttccttaacatacctacagaacatacaggagctatgtctgcccccagaccggttggtgcaaatgtagctgaaggaatcattgaatttgacctaaacctctgttcttctaggaactttgttccagatgattctctgaggacaatttacctcctctatgctctgtctcctcttatcagttgtggtgacttagatggctcccgttaccttgacaaccctacccttccccttctctaccaaatgaagaagacagggcctgctttgcagggccatggtgaatattcaagccagcttaggctcagggccaccacaccgtgccatcccacaaatagcagctattacagtggtcgtgagcatgatgtcacaatcccggctcttttcacaagcctgcaaccccttccctgcaaaccagaaatccaaaaagctctgataaatgaaagatttattttattttgttctattttttgtaattcattggatgagaaaactgaacctgacctgaactgacttgaaatgacttggtggca

SEQ ID NO: 12597 - DNA, 558 bp, Homo sapiens
  MAP TO AC026430.1; EXPRESSED IN PLACENTA, SIGNAL = 0.58; EXPRESSED IN FETAL LIVER, SIGNAL = 0.51; EXPRESSED IN BRAIN, SIGNAL = 0.51; EXPRESSED IN ADULT LIVER, SIGNAL = 0.55; EXPRESSED IN BONE MARROW, SIGNAL = 0.58
agctgttttcacgtgcattgcaggttttgcagttccttaccagaattacaattaattctgttttgcaagattgccataaagatatttttatacacctatttcaaaatatatttctaagaggagtgagcttctgtttgattagattttgttgggaaacaaatccaccatacatttttacattgctgaggatgagaagagtcttcttcaggctaccttctggttctatttattccaagtcttgctgctcccttgctgttcccacacattcggtgcgaggggctgcagggagtgtttcagttcacagttcttcttctgggccaggacctgcatgtcactatgcaaagtgagttggcgcaagaagtatagacatatttttggaagcccttgactcactgggaaggctagcagtaaattcataatactcaaagtgactgtgaatcctgtaaatatattccactaaattcaaactaagtgtgcccccagtcaccctcttctttattggatttcagtaatacgtatggacatggcaacagcagcaggcaagaggggaaacatgta

SEQ ID NO: 12598 - DNA, 527 bp, Homo sapiens
  MAP TO AC017073.3; EXPRESSED IN PLACENTA, SIGNAL = 0.58; EXPRESSED IN FETAL LIVER, SIGNAL = 0.54; EXPRESSED IN BONE MARROW, SIGNAL = 0.54; EXPRESSED IN ADULT LIVER, SIGNAL = 0.7; EXPRESSED IN BRAIN, SIGNAL = 0.57
gctttccaagcagagcaaacaggaagcacaagggccctagggagcaagaacagcagggtgtttggaagccaggttcaggttatgccctgctgaatttgcgggggtaccgctctcacagagatgacaataatgctctctagaacgatgctgtgcacagcctgttcatccatcttccacagtcctgcaaaagaacaagcaggaaagaaagcaaggagatgcagtggagatccaggaggatcttctacaaaatccaaagggttcaggattttatcctggaggcaatgagaaaccatcaaagaattttaaatggggaggagagagaaacaaaaatgagaaattactattattagtggaaataaaggtgccattgtgcatggtggggatgtggagaggggtgttagatctcttcgagcgctttcgttttgacccccattgaaatatctgatttaccaattatcacgtggaagccttaaggggcctggtcctgaggcgaaatgagaacaggtccactttcttcctgagcccag

SEQ ID NO: 12599 - DNA, 564 bp, Homo sapiens
  MAP TO AC024575.1; EXPRESSED IN ADULT LIVER, SIGNAL = 0.73; EXPRESSED IN BRAIN, SIGNAL = 0.66; EXPRESSED IN BONE MARROW, SIGNAL = 0.66; EXPRESSED IN PLACENTA, SIGNAL = 0.69; EXPRESSED IN FETAL LIVER, SIGNAL = 0.81
tgatgagtgctggaaaaacgggcgaatataagaatatttaacagctctgaactggttcatcctggaaccaaggaaagtatgcaaggaggcagggttacttttaaggagtctggcttcctgtgctgaatccggccctttccttctgtttctccttctagaagatccgcttccagtacccaccctcaacccgagagcttttccggctcctgtgctctgcccatgaggccccggggccagccccctcccttctgctgctcgacggcctagaagagtacctagcggaagacccagagccccaggaagccgcctacctcattgccttacttctagacacagctgcccacttcagccaccggcttgggcctggccgggattgtgggctcatggtggccctccagacccaggaggaagcaggtagtggggacgtcctgcacctggcactgctccagcggtattttcctgcccagtgctggctgcagccagatgcaccaggtccaggagagcacggcctccgagcctgcctggagccaggcgggctgggccccagaacagagtggtgggtga

SEQ ID NO: 12600 - DNA, 507 bp, Homo sapiens
  MAP TO AC007957.34; EXPRESSED IN PLACENTA, SIGNAL = 0.85; EXPRESSED IN ADULT LIVER, SIGNAL = 0.63; EXPRESSED IN FETAL LIVER, SIGNAL = 0.9; EXPRESSED IN BRAIN, SIGNAL = 0.64; EXPRESSED IN BONE MARROW, SIGNAL = 0.91
agaatcatccgtgggaagtgcaagcaggaccccagcatggccacagcacagcaagcgaggggaagagagaggatggaagtcaggtgggaagggggcttgcaggtcacagaaacaagcccaccttcgagtctgtaggggggctctgattcccccctggcttgcgccaaccgcatgtggagaaggggaagatgcctggggttggggagcaggaggccaggccagggggcagcagctgggatgctgggacttgtcagatcctggataaacctcaaaggtgaaggtgatgggatgtgctgagagtcatcagtgggatgtgcataagagggagtcaaagatgtctgagcagagagaaggacctcgctggcatctacagtgaagggagggacctcgctggcatctatagtgaagggaagggtcacgctggcatctacagtaaagggagggacctagctggcatctacagtgacgggagggacctcgctcacatctacagtaaagggaggggcc

SEQ ID NO: 12601 - DNA, 560 bp, Homo sapiens
  MAP TO AL117334.29; EXPRESSED IN BONE MARROW, SIGNAL = 1.1; EXPRESSED IN LUNG, SIGNAL = 0.95; EXPRESSED IN PLACENTA, SIGNAL = 0.84; EXPRESSED IN ADULT LIVER, SIGNAL = 0.98; EXPRESSED IN FETAL LIVER, SIGNAL = 1.7; EXPRESSED IN BRAIN, SIGNAL = 7.6
agcactggtatggctcttgggtccaccactccattagaactattaactccattcatattaattttttgttacaaatattacaaaggggggtgcttctgagtatttaggtccatattctattttaaggctgtatattcggttttcataaattgttcctggaggcccaattatcatccctgtccatcttgtaagtgtcatgtcttcgtaatcttctagaccccagctaactgtgtcatctcctactcctttctggctttcttcgagttcttccaacagttggaaattgcaagggacttttactactgagcctgtggtggctgccatcttgcactgctgtcgcttgaagcggtttattaataattattgtttacaatgttaaaaccatgtaaatattatttactgcaggctaagtacattttacattccaatttgctttcttattattattcttagaagtactaacagcttcatttttttcacctgtataattttttttttacaaatcaattctgttttttttctaccagccccatccaatttgcctactccagggtgtctca

SEQ ID NO: 12602 - DNA, 502 bp, Homo sapiens
  MAP TO AP000432.4; EXPRESSED IN LUNG, SIGNAL = 1.1; EXPRESSED IN ADULT LIVER, SIGNAL = 0.98; EXPRESSED IN BRAIN, SIGNAL = 0.77; EXPRESSED IN PLACENTA, SIGNAL = 1.3; EXPRESSED IN FETAL LIVER, SIGNAL = 1.3; EXPRESSED IN BONE MARROW, SIGNAL = 0.76
tggccataaagatacacaggcaggccgtacatgacagaatgtcataaaattagttccagcatggtcatcagttcagcctctaaacttgagaactcaccgacagcacacctcacatgggtccacccagagagtgagctcctttggcaagcccaggtcactatacaagatgcagctgttttcacaggctttcaggacatcaggatcaactctctgaaatttattgacacgaatacatctacaacaaagtggagttacgttaatggatttaaatgaatttaatcataaacgccgtaatatctattcatacttgccaaggtgagtaataaaatagtaataaaaaaataccctggtagagaacctaggagcatatctatcctaaacagataataaatgtgaactacaggcacagaggcagcctgaaaaaaagatggcacctatgtgagcccaaggaaatcactagtactgggtctacctcagtctacccagagacttgaccacccat

SEQ ID NO: 12603 - DNA, 591 bp, Homo sapiens
  MAP TO AL137022.6; EXPRESSED IN ADULT LIVER, SIGNAL = 0.63; EXPRESSED IN BRAIN, SIGNAL = 0.5; EXPRESSED IN BONE MARROW, SIGNAL = 0.47; EXPRESSED IN PLACENTA, SIGNAL = 0.6; EXPRESSED IN FETAL LIVER, SIGNAL = 0.55
tcatgagcccattccttttctccagcatttgaatgtgggcttgctgctattatcttttggcatagtccttgaaaatttgcacatcggtttaacagaccagcatttagaatgtatgcacatgcaccctggaacttatggaaaagaaaaaggatgcttagagctcttgattacttccattaatgatgagtttgacaacctgcatctgcaaaatcctcagatactttaccattgaacgttcacattgccagcattccctcatgcttggatatttaggggaactgaaatcgactcctggtggtagattggtggtcttcctttgacagaccctcttcagcttcttatggtgttttatttgctatttaatgttctaaataaagaagattttaatttaaattattggcatgaattttatcatttcatcatatatctttatattgagcaataccagtttgaaatgcatatataagagcatttagtttgaatatacccatgtatttcattcttaccagaacagtgaaaacactctactcattcagctgttgtatttcatatcttaatatactacactcacattctgccatcactctctcc

SEQ ID NO: 12604 - DNA, 582 bp, Homo sapiens
  MAP TO AC010229.4; EXPRESSED IN PLACENTA, SIGNAL = 0.57; EXPRESSED IN ADULT LIVER, SIGNAL = 0.57; EXPRESSED IN FETAL LIVER, SIGNAL = 0.45; EXPRESSED IN BRAIN, SIGNAL = 0.49; EXPRESSED IN BONE MARROW, SIGNAL = 0.5
gacaaaagccgaaaggacagaaggagaggagggaaaaacattttcccacagaagaggaaacaacttggtcaagtgtaaatctgctaatgcttcatacccataagcttaaaacaagtcaaaaacctctgattagatctccctagtccttagctggaccagatgacaggatttgaaagatgtgtgatgtacctggatattacgaggattggggacaacactttgtacttcctcagagttggcttcatgtgtgagctccagtcttgcacagaaactgcttcaaatctgcaacaaaagttcacatttgctgagagtgaaaatattctgtcaaggtgaagggataagcctcagaactcagggagtttgctttggaatttgccaattttatccttggatcataccaaagaagaaaaaataaatgtgggtgaagaagagggaaattcttccttgctaagaagacagaaatagcttgagctaattatattaacctaaaaaagtaggagaaaattaacgagaaataagaatcttaactctggaaatagcctctcttctgtgctattgaaatcctgtaccctttggtggaac

SEQ ID NO: 12605 - DNA, 562 bp, Homo sapiens
  MAP TO AC006054.2; EXPRESSED IN BONE MARROW, SIGNAL = 0.96; EXPRESSED IN PLACENTA, SIGNAL =   1; EXPRESSED IN ADULT LIVER, SIGNAL = 1.2; EXPRESSED IN BRAIN, SIGNAL = 0.96; EXPRESSED IN LUNG, SIGNAL = 1.1; EXPRESSED IN FETAL LIVER, SIGNAL = 1.1
accaaactgctgcagaacacacattctttcatcagaacatagaacaatcttgagccaaaaaaaagtctcaacaaattttaaaacatagaaataatatgaagtatcttttctgactataatagaattaaattagaaattgataaaaagaagaatctcagaaactatgcaaacatacagaacttaaagaacaagctccaaagcaatgaaaggatcaatgaagaaactaaaaaggaaaattaaaaatttcttgaacaaacaaaaatggaaatgcaacataccggaatcaattaaatacattaaaagcagtactaagagaaatatttatagcaataatacctaaatcaaaaaagaaggaaaacttcaaataaatgacctaacaaagcacctcaaggaactagaaatccaagaacagaacaatcccaaaattagtagaaggaaagaaataataaagattggagaagaaataaatgaaattgagacaaaaaaaaaaaaaaacacagaagactgacaaaatgaaaatttggttttttgaacagataaacgaaattgccaaacctttagc

SEQ ID NO: 12606 - DNA, 527 bp, Homo sapiens
  MAP TO AL138796.2; EXPRESSED IN ADULT LIVER, SIGNAL = 0.55; EXPRESSED IN FETAL LIVER, SIGNAL = 0.56; EXPRESSED IN BRAIN, SIGNAL = 0.55; EXPRESSED IN BONE MARROW, SIGNAL = 1.3
tttgcctacctgtaccccagatagacttttctgtcttagaactacctgtccctctttgaacagtgtcttcctggtactacacatgaagatgtcccgctctcccctgctcaaggagagagtgcctgacctgagctgggcccatcagatccagtacttacctggaataggaaaacgatggggagggtgaccaaagattgcaaaaatctttgaagcttatctacttgagagagagtccctgaagatactggcctctcattcctgctatgtatatccaatgtgactgaactctgaataaaatatacaagttataacaatgtagcaattgacccagcaaatgaggacacaaacgtgttggagggtaaggtggtgagaggcgtgtttgggggtggtggtgatgagcaagtatgtgaaggagaggtagtgcctaaacttgaaaatcaaaaagtaataatatctatttagacataaggagataaataacgaaataattgcttctatgtgatgaaactctgggagtacacaagggg

SEQ ID NO: 12607 - DNA, 586 bp, Homo sapiens
  MAP TO AL161722.2; EXPRESSED IN PLACENTA, SIGNAL = 0.87; EXPRESSED IN ADULT LIVER, SIGNAL = 0.57; EXPRESSED IN FETAL LIVER, SIGNAL = 0.49; EXPRESSED IN BRAIN, SIGNAL = 0.51; EXPRESSED IN BONE MARROW, SIGNAL = 0.54
tgtttgccttccaaacttccttcttcttcactaaggttcctgctttttgtggtctccattccctttaccaaacactggtttgaccacaagtatggaacgtgataggtcaatgggatctatgaagagccatggggctattgggaaaggtttgccacctgaaaaaaaagataagcacaagaagaaaaaccattcatcctgctccatgaatggcagtatgcttttctccctcccctaacatgttttgctgctgaaacctgatttactatcataacctcccaaaaggcccatgctctgagcccccattctttgtgtagcctcaagatggtataaaagtgtcaaccatctggttgaattcttatgctttgtatgactcccagggacattgtaaaagaaaataaacctcagaaccccaaaattactaagccaaagggaaaagtcaagttgaggactgcttcaggcaaaactgcctcccattttatttctgaatatgatagctaagaagataaaaaaaagtgtaaaccaaaaataaaatttgaaggccccctggatccatctgaatggactctctcctcagtcagagcaccct

SEQ ID NO: 12608 - DNA, 528 bp, Homo sapiens
  MAP TO AC009699.6; EXPRESSED IN BONE MARROW, SIGNAL = 0.43; EXPRESSED IN BRAIN, SIGNAL = 0.5
gtgcttggcttgctgaatagaaaaggaagcattgtcagttacagtattacattatccataagataaaatcttaccaattacacagaagaactgtcttggtattaagagcagatggaaccaccttctggggattctcatgaaaaatacaatgagaaagtcaattagcagcatcaccaacaatttacattgtatcccattttgtgaggctgctttcatgtcaattcctgggataaatgaatggaattacaccaaagtacaaataaaagccagttttgggagaatcacaagcaagttagtgtcttctttcatgcttttcctgcattgctgtatgcctcgatcacacatttacctcactcaatcacctcccctaaccatcaacccagtgccttgcacattgcacataatccattaaaattctatgagtgggtgaataaatgaatgaatgaggcacttgatacccaaaagacagtaaaaaagaaatggcataaaaagaaaaatatcaaaaggaccatgtgtctgctttgcaat

SEQ ID NO: 12609 - DNA, 597 bp, Homo sapiens; identical to SEQ ID NO: 12214
  MAP TO AC024972.2; EXPRESSED IN PLACENTA, SIGNAL = 0.68; EXPRESSED IN FETAL LIVER, SIGNAL = 0.52; EXPRESSED IN BONE MARROW, SIGNAL = 0.52; EXPRESSED IN ADULT LIVER, SIGNAL = 0.6; EXPRESSED IN BRAIN, SIGNAL = 0.66

SEQ ID NO: 12610 - DNA, 565 bp, Homo sapiens
  MAP TO AC005481.3; EXPRESSED IN PLACENTA, SIGNAL = 0.47; EXPRESSED IN BONE MARROW, SIGNAL = 0.59; EXPRESSED IN BRAIN, SIGNAL = 0.45
tgggacactgatctctggtgtgtgcaatgagtacacagcctgacttgcacactcggcccgtgggacactgatctcaggtgggtgcaacgagtacacagcctggcttgcacgctcagcctgtgggacactgatctctggtgggtgcaatgagtacacagcctggcttgcacgctcagcctgtgggacactgatctctggtgtgtgcaatgagtacacagcctggcttgcacgctcagcctgtgggacactgatctctggtgtgtgcaatgagtacacagcctggcttgcacactcggcccgtgggacactgatctcaggtgggtgcaacgagtacacagcctggcttgcacactcggcccgtgggacactgatctcaggtgggtgcaacgagtacacagcctgacttgcacactcggcccgtgggacactgatcttacacgggtgtgggcatccccctgccagtgcccgcatctacatttgggcacagagaagccacacagcctcacgggagctgggggcctctggcagggcctccttccaggacacaataccaaggaggccagac

SEQ ID NO: 12611 - DNA, 577 bp, Homo sapiens
  MAP TO AL139824.7; EXPRESSED IN BONE MARROW, SIGNAL = 0.51; EXPRESSED IN ADULT LIVER, SIGNAL = 0.61; EXPRESSED IN PLACENTA, SIGNAL = 0.54; EXPRESSED IN FETAL LIVER, SIGNAL = 0.56; EXPRESSED IN BRAIN, SIGNAL = 0.5
tcaggagccagaaaaacctggttccattctcagctttccacacgaattgttggctcttggacttgcttcttagttcttcggacaatagttaattttctctaaaatgaaagtaattctcattcttagagtgtaggtttgctaagaggaattaaatgaggtaatacatataacaaccttatcacagtgccaggcccaatatgtactcagaaattgttatgttttatttttattgttattaccagtacatcaattaccacaactactaccactacatccacatctttgggttactgggagaatagagtgggattttatgtacacctggcacttagtaggtgcttgatagttggtagttatcaaattcaacacaaatgttttataaaaggtagctcatcaaacttattggcaacattgtctgttttacaatgttgagtaccggaccttcatacacagatttgtagtatttcttctttgacccactgttatcattgtcacaatagtcactgttcttggagcactttatgtgtgttgagtactctatggtattacctcatttcgttctgacaccaatggcaaa

SEQ ID NO: 12612 - DNA, 542 bp, Homo sapiens
  MAP TO AL109930.5; EXPRESSED IN PLACENTA, SIGNAL = 0.66; EXPRESSED IN FETAL LIVER, SIGNAL = 0.6; EXPRESSED IN BONE MARROW, SIGNAL = 0.59; EXPRESSED IN ADULT LIVER, SIGNAL = 0.7; EXPRESSED IN BRAIN, SIGNAL = 0.57
tgttggctcattctctgtgccagtccagatttttctgtttacctgccattccgcttgatatgagtgaggagcgatgatgccaggttgcagccatttcttcaatttgtcaacatcggggttcagaaggacagccgagagtacatgggggtgtcctagcactcggttttgcccgatgttagcaaagcgttgaggaaaattttgtgggaattgctgggagtgagggagaaagccatgaaattctctatgataatccagaaacggattgagacccattttggccttataaatctggatttcatcgaaccttgttagtgaataatttttattctctagtgaatgcaaaagaaaaggagatggaacacttttggtcttatctcatcatcctgtggcaaacatgatccttgaaaataaatattctgttgcctaacctgctaagtaattgtctttctaaccgtgtgtgggtgctgggttcccgggagaatgggtattaacagtgtttctcgaaccctcttcacacttcctcaggattaggccacaggaaa

SEQ ID NO: 12613 - DNA, 573 bp, Homo sapiens
  MAP TO AL121935.12; EXPRESSED IN ADULT LIVER, SIGNAL = 0.75; EXPRESSED IN PLACENTA, SIGNAL = 0.66; EXPRESSED IN FETAL LIVER, SIGNAL = 0.72; EXPRESSED IN BRAIN, SIGNAL = 0.6; EXPRESSED IN BONE MARROW, SIGNAL = 0.8
atctaggtgggcccatatcccaggatttagtccataatttgggtctcttctatttcattgttgtgttcctgaggccaggatgcttcctcaattacttggaaacctttttcccctgtacattttctgatcttgtttctgaactgccttgtgagaagtctgtattgtaccccatgtggcctattgccagccttacttatatgggtaagcccttagctctttgttcccctgcctttctgctttgccttgtgcatgcagtgagttcccaacagccttaacattctcaacatcttcatcatccagatgctatgttgcatgtggtggttgaggttgtacacagcaagactccagatggagccatccgcatggtaggtgagtggcatctcccaaggtatgcaaagccatcatgggagccctgcctgtcctgcagacgtgaactgggcatgcgatgcaggagggcctagggtaccgctgctcccggagctctggagcactgatcaggagtgtcgcatgtgtccggttgctttcgaatgcaggaggcgacaagtactagtggctcactcagagacccttggc

SEQ ID NO: 12614 - DNA, 550 bp, Homo sapiens
  MAP TO AC020760.3; EXPRESSED IN BONE MARROW, SIGNAL = 0.54; EXPRESSED IN PLACENTA, SIGNAL = 0.64; EXPRESSED IN BRAIN, SIGNAL = 1.4; EXPRESSED IN FETAL LIVER, SIGNAL = 0.65
gaatggaatggacccaaatgtaatggattcaaatggtatggactcaaacacaatggactcaaatggaatggtctcgaatttaatttatttgtatagaatgaaatcaaaaggaatgcaatagtatggaatggaatcaagtggaatggaatcgaatggaatgtaatcaaatggaatggaatggaatgcaatggaatggaatagaatggaatgcaatggaatggaacgtactggaatcgagtggaaaggaatcgaatggaatggaatcgaatggaatgtactcgaatggaatgtactcgaatggagtggactggcataaaatggaatcaatcggattggaatggaacaaaactggaatggaatggaagggaatgcaatggactcggatggaatggagtcgaaagaaatggaaccgaatgtaatggaattgaatgggatcgaaaagattagaatggaatggaatatattggaaagatattcaatggaatggaaaggaatggaatggaatgcaatggaatggactggaatggattggagtagcacggattggact

SEQ ID NO: 12615 - DNA, 587 bp, Homo sapiens
  MAP TO AC009943.4; EXPRESSED IN BONE MARROW, SIGNAL = 0.58; EXPRESSED IN LUNG, SIGNAL = 0.83; EXPRESSED IN BRAIN, SIGNAL = 0.55; EXPRESSED IN PLACENTA, SIGNAL = 0.63; EXPRESSED IN ADULT LIVER, SIGNAL = 0.65; EXPRESSED IN FETAL LIVER, SIGNAL = 0.56
acaaggaagcaaagtgtgccttaaaaatgcttttaaaatgtctatattttagatatttattaattaatccaatagcattaaacatgacataaaaatttgggttcatatattacattaaaattaatactgtaaattaatattaacaaagtgttttaaatattagtctgttccagttgacaaatacgtattcaacagtgatggaacagtcacaaatgacaagattagaaatcaaggttattactattcaggtaagtttaatgacaacattttaaaataagtgtaagatgcagtcatttattcaatttctaaagctattacgtttctgacttttaacagatatcaaaatgttaaagtattttaagaaagtaaaaactgttgaacatgttattaatgttcataattattttaacagataaaatacagatattcaatgcatcttcctcataccttcaagtagaaacatactttcatgtgaaactacaaatacaaattgttcctgtgatgcaattgtatgtttctatgccacccaaccaattcacagacactgtgggtaagtcctctggatacagttttattcccaaggctga

SEQ ID NO: 12616 - DNA, 582 bp, Homo sapiens
  MAP TO AC013726.3; EXPRESSED IN ADULT LIVER, SIGNAL = 0.62; EXPRESSED IN BRAIN, SIGNAL = 0.62; EXPRESSED IN PLACENTA, SIGNAL = 0.59; EXPRESSED IN FETAL LIVER, SIGNAL = 0.59; EXPRESSED IN BONE MARROW, SIGNAL = 0.7
cacgcagcacgttaagagagcagggctgggcctctggtcttcatgcaaccagcacatcttcagttacctgaatgtctgcttgatagcatttgttcggagatcaataacttttagcaagtcatcacgggagcagctcaggagctcagtcctttctgggtttaagtccagggcagtaatctttcccaacagctccatctctcgaactatgctctctgatctaagagggagaacagatctgagaaatgtaacgtaggccagaactacttcacatcatgccgtggaggaaaaaaaaggcactgcaattcaactagcatgcaacgctctgccagcgcagtcaatgtgttcccagtcttctaataacctgtgactgcttttcttactttcccatcaacagaccctaagacagtcattcccagactagaactctgaagttggtaagaatttcctcatccatttttggaatgacaacaatcgcccatcggtttctgatcagcatgagctaactagggctactacccaattcgtattattttcagtgatgtgatttcaacttttggataaagttggcaaagaaacctgcat

SEQ ID NO: 12617 - DNA, 566 bp, Homo sapiens
  MAP TO AC010292.4; EXPRESSED IN BONE MARROW, SIGNAL = 0.97; EXPRESSED IN FETAL LIVER, SIGNAL = 0.99; EXPRESSED IN PLACENTA, SIGNAL = 0.71; EXPRESSED IN ADULT LIVER, SIGNAL = 0.98; EXPRESSED IN BRAIN, SIGNAL = 0.89
cctcccaccctttctctctctctctccctcacctgctctgagagaagtcagctgccatatcatgaactgccctacagtgagatccatgtggcagggaactgatgcctctggccaacagccatcgaggacctgaagcctgccaatggccacatgaatgagtctgaaagaccactgttgagcctgagatgactgcatccctggctgacaccttatttgtagccttgtgaaagtccctagactggaggactcacatctggatttctgactgatagaaactatgagaaaataaatgtttgttgttttaacccactacattttggggtaatttgttgtgcagccacaaataactaataagaggacccaactcaaaaatcattaatctattaaacatttcttaatactttcttctcccctagtccatctatacctctcccattgcacatgggatgaattcatactacttaatacagcccccaaggccctacatgatgatccaattcagctcaccttcccaaacttctcttgcaccactgcccatggcacctggggcaatgaatctcctttca

SEQ ID NO: 12618 - DNA, 575 bp, Homo sapiens
  MAP TO AL109752.13; EXPRESSED IN PLACENTA, SIGNAL = 0.54; EXPRESSED IN FETAL LIVER, SIGNAL = 0.68; EXPRESSED IN BRAIN, SIGNAL = 0.52; EXPRESSED IN BONE MARROW, SIGNAL = 0.55
ggagagccaagaaacgagtgtctcacctggcattggtgcaatcggtgaacaaagtttcgaagtctttcctggtgatgagtttgcagcggtttaccccgggctggatggcccccagcccgcggaggatccggacctgctcaacagtacacaccacgggggatatatccagtctcttcagcttggtgtacacagtgtgcaagcctcccaccaggtgcttgagaaaaagatcaaagacttgcggcaggcagatcagttcctggccgtccatcaggaacgaagccaccttcatcccgtgcatgtcgaccatgcggcactcgttggtgttggtgttgcccctgccgccgcctccggcactgttgctgtggttattaaccacgaaactattgatcatattaggagtaagacgagggggctctctgggagtcgagtacaggggttcggcccggaataagccccccgggacgccggcgccgctggaagttgcagagatcactggagatgcggagacagccatggtcactctgtctctatcgtgggtcctccggccctcgctttctcgccctgactcctctaga

SEQ ID NO: 12619 - DNA, 568 bp, Homo sapiens
  MAP TO AP000431.3; EXPRESSED IN PLACENTA, SIGNAL = 0.61; EXPRESSED IN ADULT LIVER, SIGNAL = 0.53; EXPRESSED IN BRAIN, SIGNAL = 0.57; EXPRESSED IN BONE MARROW, SIGNAL = 0.52; EXPRESSED IN FETAL LIVER, SIGNAL = 0.63
ggtgatggctaaaaggcttgttggatgaggcaattttcagtggtccttgagcatcccagcagtaactgtgcagtaactgtgttacactgcaaggtttgtctgtctcctgaaactgaccagtctctgcatttagtcacataggtgatgaagtattcaaagcgaccgaagtataaataccttataattgctcctcccttcgtactggcttgcttgttgcttgtgaaaatatttgttgcttgctatgatgcttggtccttgcgtaaaaagtgctaggccttggaactgcatttctcacctgcagcacagcccactgtatgcctaatatccatctgggctggtggtatctccttggagacatggaggtaaggtctttgcttatgctcctgatgtacacagttctttgaataataaactatctggccctggtccattgagtttcattgtccactttccacggaataaccatgcttttatagcaagccaacctgctttcatgcctagttacatgttttgtagttttgttgtgctttggtatcttccagaagattggggtccttccttgacaact

SEQ ID NO: 12620 - DNA, 584 bp, Homo sapiens
  MAP TO AC007164.3; EXPRESSED IN PLACENTA, SIGNAL =   1; EXPRESSED IN ADULT LIVER, SIGNAL = 0.59; EXPRESSED IN FETAL LIVER, SIGNAL = 0.93; EXPRESSED IN BRAIN, SIGNAL = 0.82; EXPRESSED IN BONE MARROW, SIGNAL = 0.89
ctctgcctttttcccctttccctttcttctttttgttctttttttcctttcttctatccttgcaaaatatgggctaaacttaagcatgtgtcaggtactgtgcaaagtgctggatctagagtggtgcaatgaagacatatcattgccttctctgcagatcacattttgatgggcgagtcatagcgtgtaagcaagaaaacaaatctgttacattaatgactatgtattgtgaaatgatgaagaaacaaaggcagcagtgtgatagaaagaaaatgagttgggagtgggggctacttttaggcaagatggtcacaatacacttctctgaggaagtggcattcctgaaagttgaaggaagcggagagcctgtcaagggaggaggcaggtgaggtgcgtaaatatattacagtcagtctggcataagttgtttcagatccctattgtcttgcaggttgaagtacttgaattgagtctggagtacaattcctccagggagctaagagattttcagggttgtgatcatcggtgtaaccctgatcatcagtcttaccctagcaaagggctgggactgtgcttcatggttc

SEQ ID NO: 12621 - DNA, 537 bp, Homo sapiens
  MAP TO AL137225.7; EXPRESSED IN BONE MARROW, SIGNAL = 0.69; EXPRESSED IN ADULT LIVER, SIGNAL = 6.7; EXPRESSED IN FETAL LIVER, SIGNAL = 0.66; EXPRESSED IN BRAIN, SIGNAL = 0.75; EXPRESSED IN PLACENTA, SIGNAL = 1.3
aagcatttccaggtgtcaggcattgagcctgaattttgccggcatgatcacagttatttctcatagtaaccccatgtgcaaggcttggagagggcagctccttgcccagttctcacagtgggtcattggctttgcctgtggtttgttggactcaagcaacatgagaccccggtgctctgtgtttagaggttggctgataaccccctgggtacctcctatgctaagggccctgtccatctggcctggtgcctgcccacaggtgttccagcagtaccccgagtcctgcccacttatcatcaggatccaggtgctgaacccaccatctgtgatgctgcagaaggacaaagcgctggtgaaggtgttggccactgccgaggtcatggtctcccagcccaaagacctggagactaccatctgcctcattgacgtggtgagtgtctggaggtactggtggcctccagctgggcctcaagacagagccacatggtctcctggagcccaaagaccccttcaaatcccctcaatctccaccatcat

SEQ ID NO: 12622 - DNA, 559 bp, Homo sapiens
  MAP TO AC025119.2; EXPRESSED IN LUNG, SIGNAL = 1.4; EXPRESSED IN PLACENTA, SIGNAL = 1.4; EXPRESSED IN ADULT LIVER, SIGNAL = 1.2; EXPRESSED IN FETAL LIVER, SIGNAL = 6.1; EXPRESSED IN BRAIN, SIGNAL =   1; EXPRESSED IN BONE MARROW, SIGNAL = 1.2
gactgagaggggaaagggtcaagattctctcaggaggtgctacttaaggagagacgagaataaaatgagggtgtgaaccatgaggatattttggggagaaggcagaggaaacagcaagtgcaaagttcccaaggcaggcacacacttgatctgctctaagaacagcaaaaggatggatggagcagggtgagcagaaggtgtggaaagctagatcacctgaggccatgataaggacttcagcattaattctgaggaaggtggagagccccagagggcactagcaaagaagtgacatgttttcttatttaccactccagggacttttaatgttgaatgccttacaactgatcattacacaggcggcatgaagcaaaaatatactgtgaaccaatgcaggcggcagtctgaggattccaccttctacctgggagagaggacatactatatcgcagcagtggaggtggaatgggattattccccacaaagggagtgggaaaaggagctgcatcatttacaagagcagaagtaattctccagactctgattcccaatttcagca

SEQ ID NO: 12623 - DNA, 507 bp, Homo sapiens
  MAP TO AC007687.16; EXPRESSED IN BONE MARROW, SIGNAL = 0.57; EXPRESSED IN ADULT LIVER, SIGNAL = 0.73; EXPRESSED IN BRAIN, SIGNAL = 0.79; EXPRESSED IN PLACENTA, SIGNAL = 0.74; EXPRESSED IN FETAL LIVER, SIGNAL = 0.6
acgcctccataaaacctgtgatgcatttgattcttctcaaaggaaaagtcacatgggaactaacaaagagatgaaaagagatgtgcaaagcagacatcacctgggctgggtctactcctgacacacttcagtgactaaaccattctctctgatttgagggttttcccatatgaagacacacagtaccaatttcccgctttggaattgttacccttgttggttgccgcctccatggccacaggtaactgcatcaggtaatccaccctctccgtgtagcggactttccgggtctgacagcactgaatgcgttcttccaccaaaaaacgaaaaacatcgcttgggttttctgagccgatgcggttcctctgaaggatggattgtatcaggttagtaaatgtatgaatattgagccactaagacttagtagaaaatgaactctaaacccggtgtaaacacttggctttattaaacatttcctctggccatgcccattcaccaaagcacttt

SEQ ID NO: 12624 - DNA, 568 bp, Homo sapiens
  MAP TO AL133412.4; EXPRESSED IN PLACENTA, SIGNAL = 0.98; EXPRESSED IN ADULT LIVER, SIGNAL = 0.89; EXPRESSED IN BRAIN, SIGNAL = 0.99; EXPRESSED IN BONE MARROW, SIGNAL = 1.3; EXPRESSED IN LUNG, SIGNAL = 0.91; EXPRESSED IN FETAL LIVER, SIGNAL = 1.5
ttttcatactgctctgggggatgcttggttaagatgacatggacatattgctatcttcagcaagatatttatatttctggacaattgcctgcctttggattcttctctgttctattagggcttcttcatcttcttcctccacatcaaaatcttcaagcttatcatcagacaaagattcctgctcaattttcattccttcagaaacacttcctttaaatttatcttcctttactttgcttctgctccttcatctacgaccaccccatgatcgaggccaccttctcaagcatgatctgctcctccaacctctgtcccttttctgaggagacctgcttcttcttggagacctgatttttgtgctatgcctgagtggggaataagacctccttttaatgggagatctactacttcttcgggttggagaccacctattaatggggctggcatcttttaatctttcacatctattgaggatatcatcttgaggttgtgttcttgaagaagaaggtcgtcttctctctggctctcttcgttttccttctaaggatcggctcagctcttctaccag

SEQ ID NO: 12625 - DNA, 521 bp, Homo sapiens
  MAP TO AP001427.1; EXPRESSED IN ADULT LIVER, SIGNAL = 0.77; EXPRESSED IN BRAIN, SIGNAL = 0.75; EXPRESSED IN PLACENTA, SIGNAL = 0.55; EXPRESSED IN FETAL LIVER, SIGNAL = 0.71; EXPRESSED IN BONE MARROW, SIGNAL = 0.61
ttaaaagaatgcccacaggcagcacagcgctatggaaatttgagggatgtattcaaagagaacaagtcaatgcccatcagaagagctcccttccagtttcagaaggtggctggaatagacaagaagagatccctatgtgctccctcgaggtggccgcctgtgtccatgaaatgaatggatatgggggcactcaatgcagcagtgcaaagacgggctgaatctagacatgttcctttggcaccctctcaggagcataatgccaggaagaactgctttgcttgtcaacaagggagacagagactgccactggctatggggcagattcactggtgggagggccctgcgcacagctggcgagcgggactgatgctggctgccttgggggactaaaaatgggtcttgcctggaataaacacggactctggactgggctttgtttacctgggggaaaatgaaaacgctcagagtgccaaaaaaaaaaaaatctcaacagaaggtattgcatggatttagaaggccaa

SEQ ID NO: 12626 - DNA, 547 bp, Homo sapiens
  MAP TO AC010829.5; EXPRESSED IN ADULT LIVER, SIGNAL = 0.84; EXPRESSED IN BONE MARROW, SIGNAL = 0.58; EXPRESSED IN PLACENTA, SIGNAL = 0.75; EXPRESSED IN FETAL LIVER, SIGNAL = 0.61; EXPRESSED IN BRAIN, SIGNAL = 0.67
aaaagtgtttgatggcaggggactgtcaagaaggaacaaacttgaaagacaaaagggtgtggtcacagagtgtggtatctgaatattttattcttcagctggaacagccctgggtagtgacaaagtataggatgaccattggagaggtgctaagtgagcaggaggatgtcattggagatgtggggctcaaggaactgaaaggccaggccctggctggtgtcatgtcctggccacatgttaggaagccaggtcaaggaagcaggaatgaagacccagtgatgacagggaagggaaggaatatttgtcaaggcataattcaggtgttcctgagtcccctggccatactgctatttattgccatccaaatccctgtgtattatctaataatgagatctctggccctctggaatcagaatgcattgccttaacttctgtctcctgggatctaaaattccatcactggcctgaatgatcagtgttccaggtgccctaaaggagagggctcagagaatttgctgtatatctctctttccttcgtcatgccatt

SEQ ID NO: 12627 - DNA, 535 bp, Homo sapiens
  MAP TO AL133174.9; EXPRESSED IN PLACENTA, SIGNAL = 0.55; EXPRESSED IN BONE MARROW, SIGNAL = 1.1; EXPRESSED IN ADULT LIVER, SIGNAL = 0.69; EXPRESSED IN FETAL LIVER, SIGNAL = 1.2; EXPRESSED IN BRAIN, SIGNAL = 0.83
taatgccgcactctatgcacaaaagtacgatgaagaattccagcgatacctgcctcgttttgttacagccatctggaatttactagttacaacgggtcaagaggttaaatatgatttggtaagatgatggtggagacaaataattaaaagacattctctccctatctcctccaagaaataagctgttgagttttgcttttaaaaatattcttgtttttgtgttttgttccagttggtaagtaatgcaattcaatttctggcttcagtttgtgagagacctcattataagaatctatttgaggaccagaacacgctgacaagtatctgtgaaaaggttattgtgcctaacatggaatttagaggtaattatggcaaaagtatattagtataaatctactaagtctgtgtttgttttttgtaacatattcagtctaattcatttattactggataaaacttgtatgtcatttatttcttattttctaaaccaagacagaaaatgtagtatctgtaatgagttttgttgtgccctgtg

SEQ ID NO: 12628 - DNA, 531 bp, Homo sapiens
  MAP TO AL121673.27; EXPRESSED IN ADULT LIVER, SIGNAL = 0.68; EXPRESSED IN PLACENTA, SIGNAL = 0.75; EXPRESSED IN FETAL LIVER, SIGNAL = 1.1; EXPRESSED IN BRAIN, SIGNAL = 0.68; EXPRESSED IN BONE MARROW, SIGNAL = 0.76
aaagctgtccccattcacagtccatgtcccccagccctgagggaggtctctgagtgatgaactcgaagcagcagggccgtggggcctccccagggcctgaccatctcctgtcccacaggcccgagtgccaggcatggacggggacgctgctgctgggcacatgccttctgtactgcgcccgctccagcatgcccatctgcaccgtctccatgagccaggacttcggctggaacaagaaggaggccggcatcgtgctcagcagcttcttctggggctactgcctgacacaggttgtgggcggccacctcggggatcggtaactgcccatcttccccatctcctggctggtgggggccgccccactggggcctccaggggcgagtgggctggctgtgctgctgcacgcagaggatgcgactcctggggaaggagcttggtggacacagaggatgcgactcctggggaaggagcttcgtggacacagaggatgcgactcctggggaaggagcttggtggataaatctgggcaga

SEQ ID NO: 12629 - DNA, 549 bp, Homo sapiens; identical to SEQ ID NO: 8949
  MAP TO AF241728.1; EXPRESSED IN LUNG, SIGNAL = 1.1; EXPRESSED IN PLACENTA, SIGNAL = 0.95; EXPRESSED IN ADULT LIVER, SIGNAL = 1.1; EXPRESSED IN BRAIN, SIGNAL = 0.94; EXPRESSED IN FETAL LIVER, SIGNAL = 1.1; EXPRESSED IN BONE MARROW, SIGNAL = 0.95

SEQ ID NO: 12630 - DNA, 538 bp, Homo sapiens
  MAP TO AL161415.1; EXPRESSED IN PLACENTA, SIGNAL = 0.51; EXPRESSED IN FETAL LIVER, SIGNAL = 0.57; EXPRESSED IN BONE MARROW, SIGNAL = 0.63; EXPRESSED IN ADULT LIVER, SIGNAL = 0.67; EXPRESSED IN BRAIN, SIGNAL = 0.49
gaccgggtttcaatgtatggttcttgtttaagtctgaagcgtgatccctttatgtctctaaaccggggagctgtcacctataaccagacatcaaaatgattacgttaacagtaatgacaataactaaaatatattatgtatttgatatgtaccagtcactgtgccaagtactgcaccatgctttatctcatttaatcctcataaacatacagtttatattattatgctcattttatatgaggaagctgagtttcacagagtaagtagtttaaattgggtcacacagcaaataatgctagaaaaacatgacctgaatccagctggatgcaactccagatctcaaccacacttaccatactatctctttctacctgcttttaaacattttttttctgattggatttttaagataagtgatttgtttaaacccctagtcattaatcccgattaacttcttcacaatcttagtttccacagtgtgggggtgtatcaaatggcttatttaacagctagagctaccctcggtcttttgtcagtt

SEQ ID NO: 12631 - DNA, 538 bp, Homo sapiens
  MAP TO AL161670.1; EXPRESSED IN PLACENTA, SIGNAL = 1.5; EXPRESSED IN FETAL LIVER, SIGNAL = 0.76; EXPRESSED IN BONE MARROW, SIGNAL = 0.61; EXPRESSED IN ADULT LIVER, SIGNAL = 1.1; EXPRESSED IN BRAIN, SIGNAL =   1
ctaaacaacgatacttttatcttttcctaggatattattgctggattcctatataccattttaatcttagctgtcttctatccatttgtggacctgattgacaacttcaaccaaactcacaaatatgctccattcatcatcatcgggcttcatttagctttggggatcttttctttcactcttgacacctggagcacatcccgaggagacacagccgagatactaggaagtggtgctggaattgcatgtggatctcatgttacttataacatgggtctagtattagatccttctctagatacattacctttagctgggccccccattactgtgactctgtttggaaaagccatattgcggatcctcatagggatggtatttgtactaataatcagagatgtaatgaaaaagatcaccattcctttagcctgcaaaatcttcaatataccgtgtgatgatattcgaaaagcaagacagcacatggaagttgaacttccttatcggtatattacctatggaatggttggtttctccatca

SEQ ID NO: 12632 - DNA, 554 bp, Homo sapiens
  MAP TO AL121586.28; EXPRESSED IN ADULT LIVER, SIGNAL = 0.66; EXPRESSED IN FETAL LIVER, SIGNAL = 1.1; EXPRESSED IN BRAIN, SIGNAL = 0.52; EXPRESSED IN BONE MARROW, SIGNAL = 0.66
atggtgtccattttggcttctcacctcacttagtttcttttgaatttcttccttctcttcttggatgtccctgagatctgcctgcagctcagccccagcctcctcagctttctgcagctgagcctccaggtgagtgttcttttcccacagggcttccctcctcttctctgcctccgccaggtcgacctgcaaagcatttctcgcctgctctgcggcctccattctgctgcacacagactggttctcctcctctaactactggccaaaaagggaagggagtacaagcatcaaagacaaatggttagtttaggaatcaaatgctaagactgaaatccaagtgagatatgaatctattctccaaagatgaacaaaggagtgtttataagatgggggaaaatccattcatttgatctagtgcctatattccaggtactagatgggctggatgctggggacggagatatgcaaggcaaagtcctgctctcaaataattcagaataatggaatagagaacactcaaggaaacagagattgcaaggaggttccctcgctat

SEQ ID NO: 12633 - DNA, 574 bp, Homo sapiens
  MAP TO AC016498.4; EXPRESSED IN PLACENTA, SIGNAL = 0.5; EXPRESSED IN FETAL LIVER, SIGNAL = 0.65; EXPRESSED IN BRAIN, SIGNAL = 0.62; EXPRESSED IN ADULT LIVER, SIGNAL = 0.74; EXPRESSED IN BONE MARROW, SIGNAL = 0.63
tgcttccacagaacagaagcaggaaatatttcacaaataattctgtgaggctcgcatacctccatgtccaacaactagacaaattacaagaaaaaatattatagctcaatcactctcgtggacatgaatgcaaaaatcctcaacaaaatattagcaaactgaagtcagatttacataaaaggcataatatataataaccaagacatatttttctagaaattcaaggttggcaatttaatatattaatagactagaggggaaaaatcatatagtcatttcaactgatgatttttaaaaagcatttaatacaaggcaacaccactcatgaaaaatatgttaagcaaactagaaatagaacgttactgccttaatttgataaaaagcacctacaaagccctgcagcaggtgcgatgggaagacacagagcgctttccctgagatgggtcggctatcacctagtccacccagcagggtgctggggtcatggccagtgctgacaggtaagaaaaagagaaaaagaagtagcacaaaataaaactagcacttgttgaaaacacaaccgtgccagtagaaa

SEQ ID NO: 12634 - DNA, 530 bp, Homo sapiens
  MAP TO AC012662.5; EXPRESSED IN BRAIN, SIGNAL = 0.45; EXPRESSED IN FETAL LIVER, SIGNAL = 0.45
  unsure 286
agaaaacattccttgccctgaggtgggggtgctttccggcaaaaaccagaaaacctgctgtacaaattctaaaagagccatgacacttgtcctgtatttccttcacctggttcaaaattttgctttccagaaacatccaaggcctccacatgacttacatggcattctgtagaacaatcgttctcctgcaccgtcattagtttgtaagtatttactatccaaggaccagtcaatatgcgtgatgaaactaagggacttgctgcattctccaattttcttatacctntgggcaacagcatagacatctactgggccatcattggatcccactgcaaggtaagaaccatctggagaaaatttcatttcatgaatgacttcttttcgatctttgatgtgaactacttctgtcatatctctgtaagaataaaaagcaaaacgataagcagcaattctacaaatagaaaatccaagttttaaaatatatgtgtcagaaaaagaagtgtgttgaaagagaaccaaacctgcaggaa

SEQ ID NO: 12635 - DNA, 502 bp, Homo sapiens
  MAP TO AL158049.2; EXPRESSED IN BRAIN, SIGNAL = 0.48; EXPRESSED IN PLACENTA, SIGNAL = 0.51
aatatggtcatcctgagcggctctgccaccctccaggctgccttccccaacatgaaaaggtgagtgtcatcattcttctgtgttagcagcttcagtgagcgctgctgctgaggataaaatccgtattctcctccgccttttctaacacaggaaaattgctcagctactcagggcagcttttttttttttttaagccaacaaattttaatcgtgccatgcatccagttatccagcttgaggtggagctgcccgaggggcttctgctggatgcagtgctgatggaattagtaatttgggtggattagagaggaaaagaacaaaactctagagacgttttaatatcaagagctataacctgaacagagacccccacaaacaccgagagtgggaagtggggaagtgatgctgctctgccagcaggggacaggtctctcaaggctgcctggctgttggctgacacgcccctccccctgggctgagccgccagatacagcctttcagc

SEQ ID NO: 12636 - DNA, 518 bp, Homo sapiens
  MAP TO AL138934.2; EXPRESSED IN PLACENTA, SIGNAL = 0.61; EXPRESSED IN FETAL LIVER, SIGNAL = 0.61; EXPRESSED IN ADULT LIVER, SIGNAL = 0.61; EXPRESSED IN BRAIN, SIGNAL = 0.55; EXPRESSED IN BONE MARROW, SIGNAL = 0.51
actgagtttcacactgggggaatgacttgtgcaaagtcgcacaccagcatgttggggagccagatttgaaacctggggagtctgactccagaacctgcaccatttactacagccattgccactttctgaactagactgccaacatcaatacctccattgtccttgaaatagaattcaatcagcatgatgctgttaatccatccatagcattgatcactgttgtttttaaagcactttcaagattaaaagtgctttttattgtactgtatatgtttattatgactgtcatcttaaacctattgcaataagccctaatgatatgtataggtaaaagtgtcaaaatattcattaacctcaaaatttaataagcctaaggagatcatgtatctaagagatgtgcaaccacctagttttcagcaacacaatgtgatagctatggtggggcagaaaacaatttctgatataacactctagctataacaactggtgtacaagtaactttgccagcaactgaggac

SEQ ID NO: 12637 - DNA, 565 bp, Homo sapiens
  MAP TO AC025746.2; EXPRESSED IN PLACENTA, SIGNAL = 0.7; EXPRESSED IN BONE MARROW, SIGNAL = 0.48; EXPRESSED IN ADULT LIVER, SIGNAL = 0.67; EXPRESSED IN BRAIN, SIGNAL = 0.56
tttcttgccccctgtacatccttccaaaatataacatagaataaatatactatttttactttgtctatttgcttcattttcaccaggtcttataggaaataaaaataattattttgtataacataatttatggcatcctaatatgtgtcagggcctcttctctctgccgagaatagaatgcataaatggagaacaatgttgaaaacgtatttgtttaggaagccacgcttcccttttgattgtcctagtctagtcactttttcttcagggacagggagcttcaggctccaaaacccagtttgaccaaatggcaaacaaagacttcccactgccttttaatactttcatttgctggcacaaaagtcaactatttcccctgcaagacccagaccttctgggaggacttcctggtctctgatcccatttccaatacaatgggctagttggtcttgttagtatgcgacacagaggatgcatttgcttaaaatgcctcttttccctaaaagtgttatgttagcaaatttcaaacctacctagagaaaagtcacaagaacagcccaatgaa

SEQ ID NO: 12638 - DNA, 560 bp, Homo sapiens
  MAP TO AL138796.2; EXPRESSED IN LUNG, SIGNAL = 1.4; EXPRESSED IN PLACENTA, SIGNAL = 1.1; EXPRESSED IN FETAL LIVER, SIGNAL = 1.6; EXPRESSED IN BRAIN, SIGNAL = 1.5; EXPRESSED IN BONE MARROW, SIGNAL = 2.3; EXPRESSED IN ADULT LIVER, SIGNAL = 1.2
tccaaagaccaccttccatcaagggaggagggacacttgcaataatgtgacctccaaccccatgggtttcccatctccgttcttacccaagaagtccttgtcatgtcatggccacataagcttagtggaaaaaaacaccattgatacaactgtcattgtgaaagtatggaggtctggagcctctcataagcctggggttttgggtcaacagggcctatggccaccttacctgggctgagcttttggacaaggtgctgtgccagtctacacccctcagccagctgttcttggaggtcctgcccctgggacttgtccggctcatccggagtgaggagggcctggagatgctcattcaatgagcgggaggcatctctcccttcccgcaacttctcccttaactgggtcagctctcgttcctgagcgtgaaccaggactttatattgcctaaggtgagatggtagagaaaaattaagagtggaaagggttgagtgatccgctcaaatattgcaacagagatttctgaaacagtgtcctcaaggagacctcgaagcagaaggtca

SEQ ID NO: 12639 - DNA, 548 bp, Homo sapiens
  MAP TO AC006457.3; EXPRESSED IN PLACENTA, SIGNAL = 0.54; EXPRESSED IN BRAIN, SIGNAL = 0.48; EXPRESSED IN BONE MARROW, SIGNAL = 0.46
tctgactgtgctggcttcagtgctgatctactaccagtaccaccgggtgaacccggtgacccgggagatcgtcatccgagacccacccctacaccctccagcctctgcgccggctcatcgacgcctatgctttccgaatctatggcccctgggcgaggaaggggcagcagcagaactgggcagcccttttcaagaacacacccaaggccgtgctcctctccctggccgaggaggactactgaggggctggccagtcagggagggctggggggcaggtggggaggggaagccacggaaatacaagtcaaaggggtaagatgcatgcaggcctctgcagaaggagcgcttggccctggccaggaacccctggagctgaggccacgatcgcttctgtgcacaagggaagcaggttttcctaccacacagcaatacctacaggctggggcaggccctgggttggcagagatcacacgtggcctgagaaccaggaaccccctgctcctccacttcctagatgagccgccatctccgtttctctttaggggagg

SEQ ID NO: 12640 - DNA, 506 bp, Homo sapiens
  MAP TO AP001436.1; EXPRESSED IN PLACENTA, SIGNAL = 0.68; EXPRESSED IN ADULT LIVER, SIGNAL = 0.67; EXPRESSED IN FETAL LIVER, SIGNAL = 0.87; EXPRESSED IN BRAIN, SIGNAL = 0.72; EXPRESSED IN BONE MARROW, SIGNAL = 0.85
cgggatctctgcttttgaacagaagttcaattttatcttcctcccaaaggtcaggaaacctcatctcccccttattttctcatccagggagaatgcaaatgcaaatacacatgcaaatgatctcatctcctcatggactgtggccacttctgcctgtccaggagaaatggatgctggctgccctgcttctccaggcgggggctgcccttgctgcatcctggcagtgatgatgcggtgcccactcgaagagcggttctggctgggagtgcgggaggggggctcatggtcttcctgctgttcccctcctcatcgaaaatgttttcttatgtatatgattccattccatattgtattgtaatttgtttttatgtgaggaaagaattaaaaatagttttgacttttgttgttgttgtttgagacaggatctcgctctgttgcccaggctagagtgcagtggcaccatcatagctcactgcagcctttcgacctcctggactcagctgatc

SEQ ID NO: 12641 - DNA, 566 bp, Homo sapiens
  MAP TO AL135938.5; EXPRESSED IN ADULT LIVER, SIGNAL = 0.64; EXPRESSED IN PLACENTA, SIGNAL = 0.79; EXPRESSED IN FETAL LIVER, SIGNAL = 0.89; EXPRESSED IN BRAIN, SIGNAL = 0.81; EXPRESSED IN BONE MARROW, SIGNAL = 0.81
gaaagttcagccacctctggggcaacagtgatctagagggctcaaggcacttgaatgggggacactctaaggtcaaacttagacctggtgccacctttcccagaagcggggaggccagaccattaacgcagccctattgggctccatatcctgctctagcccacctttcatgaacagagtgagctccaggagggaaacagagaggaaaacagctccatcatgagcacccttgaaaaccagcacttggataatcacatcagcagctgatcgcagactgtttttaatcattgactttccattgagcgtctgtcgttatacggtcctgggttttggctgagattatctctgaagaaaaaagatgaaaagaagcaaatccatattggactacggaatttcttccatttaccataaataagcaataataacaacaatgataaagaatattaaatagcaaagaaaaaagtccttgtcattttatggattcacaatagaactactacatttactataagatattatattgattaactcagtgatatgatactagaaatcagtcttgcagggga

SEQ ID NO: 12642 - DNA, 588 bp, Homo sapiens
  MAP TO AP001424.1; EXPRESSED IN PLACENTA, SIGNAL = 0.59; EXPRESSED IN ADULT LIVER, SIGNAL = 0.64; EXPRESSED IN FETAL LIVER, SIGNAL = 0.75; EXPRESSED IN BRAIN, SIGNAL = 0.69; EXPRESSED IN BONE MARROW, SIGNAL = 0.73
aacatgcccaatctcctctgataggcacccattcctcgtggatggggaaggtgggggtgctgccagggctgtgcccaagtgcctggttccattttttcccccaacaccagacagcagccaatatcccaggacagctctggggctcctacaagctgggagctgttcctgaaaacccactcagctctctgctcctgaagcctctgaatgggtacgggctattgttttatgcgggaaattatctgtcaaaagaaacgccttctgtgttcctactcagcattgagaggcatatttttgttgagaggatgctttatattggggtctatggctttgttggagcctgctcacatagacaagtgagtgggaacttctcatagacctctaatctctatggattcgattttgattgtcttttgtgaggatgtaaaacccactattggtctcaggttcactgaggaaaagaacctatggctctgtcaagaagccatagacttaaatcacttttaataaatatttagattgggtcttatatgacagctcagaatgtttcagtggaattgacaccaaaacgggggactcgagagtgatgtc

SEQ ID NO: 12643 - DNA, 529 bp, Homo sapiens
  MAP TO AC013698.3; EXPRESSED IN ADULT LIVER, SIGNAL =   2; EXPRESSED IN BRAIN, SIGNAL = 0.54; EXPRESSED IN PLACENTA, SIGNAL = 0.58; EXPRESSED IN FETAL LIVER, SIGNAL = 0.82; EXPRESSED IN BONE MARROW, SIGNAL = 0.54
ctcaggaggcagtaagctccctatcaccagggatgctcaagaataactgcacaggggaagcactgaaacctcaagaattgatggggcttacttagatgcatatcccagagaattatgtgattctatgggagaaaataccagaaatgtcctattatgatatactttgaaaagaatccatataattgcaataagaaaattacaaacctttagctgtggataaatctgccgaatcatattaagagtcagtgcattgaggaactttggtctgtttagtgttatgactcccgtgcaaccttttttttccaatagcacctcttctgctgcatctgtgtgcttggacattctctgtataaacaaagaataactttatgacaaaatttcttaagtttttatcacaagccaacatcaaaacatacatatcaaatgcaaatcttgcatattaatggtaactaaaggaaagaataactaggtacaccttataagtttctgaagttatttagattatgtagacgaacaattccaaagcaaa

SEQ ID NO: 12644 - DNA, 513 bp, Homo sapiens
  MAP TO AC021287.4; EXPRESSED IN PLACENTA, SIGNAL =   1; EXPRESSED IN FETAL LIVER, SIGNAL = 1.7; EXPRESSED IN BONE MARROW, SIGNAL = 1.4; EXPRESSED IN LUNG, SIGNAL = 1.2; EXPRESSED IN ADULT LIVER, SIGNAL = 1.3; EXPRESSED IN BRAIN, SIGNAL = 1.1
gtcctggaatcatccctgtggatactgaaggatgactatctatagaaggaagcatcatcatcaccaccatcatcatcaccaccatcaccattcccatcaagctgttttcttcattgtagcagctatgatttctataccacttatgatgtgtcatggactgttcttggtgtttcttgtacattgactctttcgttttcacaacactccagataaacactgttatcatctacattgtataggtaaggaaacagaagacaaacaaaacaaagtaattttccttgccttcggttacacagctcatgagcgatgttgccacaactcaaacccagacagtctggcattacagtatctgccctttacatgagggtctttaaatgagggtctaaacttcatattaatattaatggggaattaatatttctccattaaatttaaaactccttgaaggccgacatgtctcttattcctactggcgtgcctgttaccttatgcacactgggtgcgaagtttgta

SEQ ID NO: 12645 - DNA, 569 bp, Homo sapiens
  MAP TO AC013777.3; EXPRESSED IN PLACENTA, SIGNAL = 0.84; EXPRESSED IN ADULT LIVER, SIGNAL = 0.8; EXPRESSED IN FETAL LIVER, SIGNAL = 0.72; EXPRESSED IN BRAIN, SIGNAL = 0.83; EXPRESSED IN BONE MARROW, SIGNAL = 0.68
ttcacagccagcatcttcacaccattcaaaagacatacagtcaatcataaccccaaacaggaaggagagggttagttttcacttaagtaaagtttagtgaaaagccaacagatcagtgtgattatggctagatcaatgatgcatagttctgaaaggttttacacaagcagcagtcttaggatgtagctctaaggagcaggtaggtcaggaaaaacataaacgcaatgccccgagtatgtacctcccattgggtccataaagaatctggccagattgtctgaagggaagccattcttgccacaggggcagagttgaagtgtttccctttccgctgactgcatttcagccttgagtatgtcagccaaggttttctgctggtcaaagtcacaaaaagtctggtcgatatcttttatgaggaatgacaaatgtaaaaagataaactctactgtgtcagataaactatataggtttttactagatcccaagcaaggatttaacaatgtgtagtcaatttcaaagtcttctgctaattcaaggaaacaaaagtgtctccccaaaaaggttccttc

SEQ ID NO: 12646 - DNA, 522 bp, Homo sapiens
  MAP TO AL139186.3; EXPRESSED IN ADULT LIVER, SIGNAL = 0.71; EXPRESSED IN BRAIN, SIGNAL = 0.54; EXPRESSED IN PLACENTA, SIGNAL = 0.6; EXPRESSED IN FETAL LIVER, SIGNAL = 0.57; EXPRESSED IN BONE MARROW, SIGNAL = 0.56
ttcctcaaagtccctcaagccattatcacaggaaggatcaataataagagactggcattgacagtgaaagagggaaggatcaataataagaaactggcattgacagtgaaagataacaacaaagataaaggcattgcttcaaaagaccagtcagtggctatacacacagacgtacacacgttcctgcacagagaaaggagttacaacactatcaccagaaagattatgacatgtaagggatttggaggtctaacatcaaaacctaaagatagctgtattagatccatagtgatgccttcataaaacaataaaaggcaactcaagatgaacaaaatacggtgaaaactggctaatcactatcaagttccattctcattctgaacataaacttataactaaagtctaggaaaaggtacttaatattcctacagaaaagaaagagatgaaatttagtcactaacatatacaaacaagatcaagatccccgcttatgttttcctatcaaaggacaggcagaggttc

SEQ ID NO: 12647 - DNA, 591 bp, Homo sapiens
  MAP TO AC022664.2; EXPRESSED IN PLACENTA, SIGNAL =   1; EXPRESSED IN ADULT LIVER, SIGNAL = 0.96; EXPRESSED IN FETAL LIVER, SIGNAL = 0.95; EXPRESSED IN BRAIN, SIGNAL = 0.91; EXPRESSED IN BONE MARROW, SIGNAL = 0.81; EXPRESSED IN LUNG, SIGNAL = 0.9
gtgtcttcacatggctttgggtttgctttctttcagaaggtgactcttggaatcaaacaagcaagtgcaggttttcttaacagaggtgatgcagcatctcgtatttttgatagcaccctaacagctaacgagaaatgtaatttactgggtgctttctatattccaggaatagacctagtactttacatataatatattacttgccctttaaaataattttatgaagcatgtgtggttatttttattcctattttgcatatctggaaacaggttaacaaaggaaagaaaatttcatcgaggccatgtagctaagttaagtagagggccaggtccaaagattcaggtactgttggcttgtgacacttctcggtctctgctcaatggtttttcttgctaacagtattttgaaattacctcaaaagccttgtgttcactcccagaggataagtcctgattggctcagcaattttcgcaatccttttaaaatccttgccattgatgatgggctcagccatgattcctgtttacagaggaagtttgttctagtgcttctgggaaacatttccttttggtaaggcagtgcaagggaaa

SEQ ID NO: 12648 - DNA, 523 bp, Homo sapiens
  MAP TO AC013764.3; EXPRESSED IN FETAL LIVER, SIGNAL = 0.46; EXPRESSED IN BRAIN, SIGNAL = 0.47
caattctgatgccaggagactcttctctaagcagattttgtcaggttttgttggtgcagggaaagtgggaaaacacaagggttgccacaagctgggagcaagaggaagtgggcacaaacttctgtttctctccttctttgtcctcatctgtttcctgaatgtcctccctgcctccaaaaggaacatttcacctagcatcctgtccacacactaaagcagtggttcctactgtggtcctgggactggcagcaccagcatcacctgcgtacttgctgaaaatgcaaattcttgggcctcaccccagacatcctggatcagaaactctggggatgaggtctaggacatggtcaagtttgggaatcattgctctaaggaaaatcaatcagtgagccgacttggaagcagctgactcttattttgaatcaaagatattcagatcccacgcctgaatttaaaagataatacaaccccaaatataggcactctaaatttaggatattacccggtatttggagccctgata

SEQ ID NO: 12649 - DNA, 580 bp, Homo sapiens
  MAP TO AC022036.3; EXPRESSED IN ADULT LIVER, SIGNAL = 0.56; EXPRESSED IN BRAIN, SIGNAL = 0.45; EXPRESSED IN BONE MARROW, SIGNAL = 0.53; EXPRESSED IN PLACENTA, SIGNAL = 0.6; EXPRESSED IN FETAL LIVER, SIGNAL = 0.49
ccaatctccatccattgacctgttcgaaagccacttccacatttttttcccacactttttccccactctccatgccaatttctgtctaagtctgttcaggttgctatagtaaaaatactacaaacagggtggcttataaactacaaacatttatttcccatagttctggtggctgggaagcctaagatcaaggcaccggcagatttagtggctgatgagagcatgtacctcatagagagcacttttgagctgcatccttacatggtggagggggcaaacaagctctcttgggcttaatttataaggacactaatctcattaatgggagctatgccctcatgttctagccatgtcccaacttgttaatatcaacacactgggaattagttttcaacatatgaatttggtggtgggggggtgcataattattcagaccatcatgattttcttaataaaatattggtacattaaatccagtctcagtatttgattctcagagaactcagactaagacaagaggtaatctggaacaccctcaaaaaactactctcagttaccctctgggaaatcattgctgaca

SEQ ID NO: 12650 - DNA, 598 bp, Homo sapiens
  MAP TO AL136171.3; EXPRESSED IN PLACENTA, SIGNAL = 0.69; EXPRESSED IN FETAL LIVER, SIGNAL = 0.61; EXPRESSED IN BONE MARROW, SIGNAL = 0.53; EXPRESSED IN ADULT LIVER, SIGNAL = 0.65; EXPRESSED IN BRAIN, SIGNAL = 0.6
ttgaggattcgccaagtttctatgactagattttcaaactgaggacattaatttgtctcatgttaccatccttccctctatagaaagggtctgatcacacccaataatcctcattcagtatttacagatacacaatgctacatacacatctgctagaatcatatggcacacagagtacatttagtctctaaactcttcaagaaacaggaactagaaatcccaaatacggtactcacttaaacaccttgtgctatattatgtgcatattagtgaaacttcccagaaaagctttcagatgtctgagaatgacataataacagtggaatgttcatcgaggacaaaacacgatgtgctggtagctgtcattattttagttggatagcttcaacgtctcctacactgccagttacctgatatggcatgcattttggcttcaagcaaggctggtagttgggtttcaatatcgttaactttcttcctcagggtgctgcagaatttctcactcatacacacctagggggagagaaatgaccaggaatcatcatttattcagctaaaaatcagaaggcagtggaacagccaggtcagagatttctgg

SEQ ID NO: 12651 - DNA, 515 bp, Homo sapiens
  MAP TO AC013818.3; EXPRESSED IN ADULT LIVER, SIGNAL =   1; EXPRESSED IN BRAIN, SIGNAL = 0.8; EXPRESSED IN PLACENTA, SIGNAL = 0.84; EXPRESSED IN FETAL LIVER, SIGNAL = 0.83; EXPRESSED IN BONE MARROW, SIGNAL = 0.62
tggtctttctcctggtttggtgactctcaccttgaccccaaggttcccctgagcttcctacaaattgatgctgagctgcctccatcaaggctgtacagttcttgaatttggaagtgtttcccttcctaccatttttcatacatgtagtatgaaaataatatatgtattagtctgttctcccactgctagaaatacttgagactggggaatttataaagaaaagaggttcaattggcttatggttctgcaggctttataagaagcatagcagcttctgcttctggagaggtcccaggaagcttctaaccttggtagaaggcaaagctggtagtgagatgtcttcacatggtgggagcagtagcaaggatgtgggaggggctacacatgttcgaacaaccagatttgcagagaattcactcactattgcaaggacagtgccaagaaggttagtgttaagccattcatgagaattgtgatctcattatccaatcacctcctaccaggcttcatctcca

SEQ ID NO: 12652 - DNA, 577 bp, Homo sapiens
  MAP TO AC009695.4; EXPRESSED IN ADULT LIVER, SIGNAL = 0.66; EXPRESSED IN BRAIN, SIGNAL = 0.58; EXPRESSED IN PLACENTA, SIGNAL = 0.65; EXPRESSED IN FETAL LIVER, SIGNAL = 0.59; EXPRESSED IN BONE MARROW, SIGNAL = 0.5
ttgaaatgattctgattgcccaacatattaaataaagacttctcatcaaggttcctcatcatgaaattttagaaaaacagggctaaagataatatcttaaattcttgcagaaaagaaaaacataacatcaaaagatgtgaattaagaatgacaactgacttttcaataaccacaggagaagtcagaagacaaaattctgagggaaatgtattttccatctagaattgattttccaactaaaccacaaattcagtataaggatagactaaagacatttttagacctctaaggtatattcagcatttcaggaagcccctagatatgtggcagaagatgtggagaagaaatccaaaaaagaggaaaacatggatcccaggaagcagggctccagacaggagaatggaaaagctaagtcctcagatgatagaaaaggagagtcccagatggtggctttgcagcgggcccagagagcagttccagatggaactggttctatggaacatcatagaaccatagcaattggaggtctagtgtgattttccagtctcctgtggatgcaccgcattgtcatgagtct

SEQ ID NO: 12653 - DNA, 509 bp, Homo sapiens
  MAP TO AC021786.2; EXPRESSED IN LUNG, SIGNAL =   1; EXPRESSED IN ADULT LIVER, SIGNAL = 1.2; EXPRESSED IN FETAL LIVER, SIGNAL = 1.1; EXPRESSED IN BRAIN, SIGNAL = 0.96; EXPRESSED IN BONE MARROW, SIGNAL =   1; EXPRESSED IN PLACENTA, SIGNAL = 1.2
tggcatacaatgtccttcccaatctaacctcagcctacctttttcacatcatctccactgctctctcagggaacagaacttgctggaatgaagagaaccaaggtcaggggctacatttctactgtcttcccctttatcatcaactgcatttgttgcctgagagagtaggtgagatactggaccactctggagacgtgcatggacatgagttcaaggtgaatctgcttctgtccttttgctataatccctgatctcacaggtaaagttggggaggaggccactggagcccaagaggatctgtttggctgaaaaaaataaatgacccctgaccagaggctacttttccagggttggccccttctctatgaaagcacttatagatctcctatagataatatgagctagtatacctctagcttttggttaatcatggtaattcccaaaacaagccaaggatttcacaccttggggccattttgtgtgttttttgaagccaaccccatcagtaa

SEQ ID NO: 12654 - DNA, 536 bp, Homo sapiens
  MAP TO AL162261.1; EXPRESSED IN ADULT LIVER, SIGNAL = 0.89; EXPRESSED IN BRAIN, SIGNAL = 0.73; EXPRESSED IN BONE MARROW, SIGNAL = 0.53; EXPRESSED IN PLACENTA, SIGNAL = 0.79; EXPRESSED IN FETAL LIVER, SIGNAL = 0.54
aaaacagcagtccccttgtgtactcccagagtttcatcacatagaagcaattatttcgttatttatctccttatgtctaaatagatattactactttttgattttcaagtttaggcactacctctccttcacatacttgctcatcaccaccacccccaaacacgcctctcaccaccttaccctccaacacgtttgtgtcctcgtttgctgggtcaattgctacattgttataacttgtatattttattcagagttcagtcacattggacatacatagcaggaatgagaggccagtatcttcagggactctctctcaagtggataagcttcagagatttttgtaatctttggtcactctccccatctttttcctattccaggtaagtactggatctgatgggcccagctcaggtcaggcactctctccttgagcagtggagagcgggacatcttcatgtgtagtaccaggaagacactgtccaaagagggacaggtagttctaagacagaaaagtctgtctggggtacaggtaggca

SEQ ID NO: 12655 - DNA, 521 bp, Homo sapiens
  MAP TO AC018529.4; EXPRESSED IN ADULT LIVER, SIGNAL = 0.7; EXPRESSED IN BRAIN, SIGNAL = 0.53; EXPRESSED IN BONE MARROW, SIGNAL = 0.95; EXPRESSED IN PLACENTA, SIGNAL = 0.51; EXPRESSED IN FETAL LIVER, SIGNAL = 0.68
aaacgtcgggtttgagtttggtcagtggtggtcctagctgtgtgcgctgattaaaggtagccacgaaacgctggggaaaaaagaaaaaaaaaaaacaagagaccaaactttcttgtgatgtttctatttctgcctgaatttgtaaatgttaattgtaagttattttgtttgacttttaatcctcctccaagttctttaaaaatatgacatgcttaagatgagcagctgcctctgtgccttttctgtcgcctgggagtgtttatcgactgcttgcacgttgccagactctcttttgagagcggtttgtcacctcggataacagtcgggacggccctaggatgccctcactggatgtcaccatcctattcatatcttcattttttactgttgaggaaacaaggcccagagaggttaagttactctaagggcacacaagaagaggcgggattccatccggggagtctgcaccagcgcctgactgctgctctgcaccgccgtggtgagaaggatgccttgcaaag

SEQ ID NO: 12656 - DNA, 546 bp, Homo sapiens
  MAP TO AC011260.4; EXPRESSED IN PLACENTA, SIGNAL = 0.63; EXPRESSED IN ADULT LIVER, SIGNAL = 0.7; EXPRESSED IN BRAIN, SIGNAL = 0.59; EXPRESSED IN BONE MARROW, SIGNAL = 0.53; EXPRESSED IN FETAL LIVER, SIGNAL = 0.6
tcctagcacaacccctcttgcttccaggaaggcccaataattctgtttctccaacagaatgttaaggacgtgatatattttgacttccagaccgtggaatttgagaagtgcatgggagttctgcatactctcttttctcagccacctacagcaaagaactccaaggtagaagatgtaaaccatgagagggtaggagcatgggtccctgaattactgtgtaaaagagatcagcctactgttcaggaacaactacactgaactatcacattagtgaggaaagaacatttgttacataagacagtaacattctagggtttgtttgttacatcggctagcatttccctaagacaggtaatcagatgaactatgtagtgaacttcttatctctttgcccctaccttcctctaacacaatatttctcaatctgtgtgttggggagaggcaaaagagttgggataagagaatggggaagctttaaaagacagaaaagcagaggaatagaatggatatatcaaattgtcttagcccattcacagacacatccca

SEQ ID NO: 12657 - DNA, 502 bp, Homo sapiens
  MAP TO AL136315.3; EXPRESSED IN PLACENTA, SIGNAL = 0.94; EXPRESSED IN ADULT LIVER, SIGNAL = 0.98; EXPRESSED IN BRAIN, SIGNAL = 0.94; EXPRESSED IN LUNG, SIGNAL = 0.86; EXPRESSED IN BONE MARROW, SIGNAL = 0.95; EXPRESSED IN FETAL LIVER, SIGNAL = 1.2
gaaaacaaatatcccatattctcacttataagtgggagctgaatgacgagaacacatgaacacgtagagagcaacaacagacactggggccttcttgagggtagaggctgggaggaggagaggatcagaaaacataattaatgggtactaggcttaatacctggatgatgaaataatctatacaacaaaccctcatgacaaactttacctatataacaaatctacacatgtacccctgaacttataaaaaaaggtaaattaaaaaccaagttcttagaatggtaaccaccataggacatggtgcaataaatattaactattaccatttcttgtgatctcagacttaggaaaactttctgcatctcaatattatgagaatttagtcactttaaaagttactcttgtagatagcgtgaggaatgagtaaaactgtattattttcccagtgaatagagttgttccaatatcatttacagtgtatcccgtcctttccacacaaatt

SEQ ID NO: 12658 - DNA, 513 bp, Homo sapiens
  MAP TO AC012571.3; EXPRESSED IN PLACENTA, SIGNAL = 0.48; EXPRESSED IN ADULT LIVER, SIGNAL = 0.7; EXPRESSED IN BRAIN, SIGNAL = 0.46; EXPRESSED IN BONE MARROW, SIGNAL = 0.43; EXPRESSED IN FETAL LIVER, SIGNAL = 0.52
agtctcctgttctgcccaaggccacacatactggaaagaccattacttttattaaaagcttaagagggattctttaagatagatagctcgtttgatctcaagacattcttgtgctaagaaaattaggttgaaactgctcaccatcatctacaatggatccaaatcctgtgacgaacacacttgttttaggtggcaactttatagatgagtctgggaggcaaactctctggactatatttgaaaactcaactccagtagagagctgaaccaaagcaatgtcattttcatttgtttctctatggtaattctcatgaagaataattttcctcacatttcgtttcactgcgggtggtgttatagttgcaccaaaagtagcaatccattgagttgggtctttatttctgcaaaaaattaaaaagtaatacttgtgatgcttgacttaattctgtaaaaaagactgagactgtatttcttcccaactgtcagtattatgctcctgaaacattcttttgg

SEQ ID NO: 12659 - DNA, 511 bp, Homo sapiens
  MAP TO AL161788.2; EXPRESSED IN LUNG, SIGNAL = 1.3; EXPRESSED IN PLACENTA, SIGNAL = 1.6; EXPRESSED IN FETAL LIVER, SIGNAL = 1.1; EXPRESSED IN ADULT LIVER, SIGNAL = 1.3; EXPRESSED IN BRAIN, SIGNAL = 1.4; EXPRESSED IN BONE MARROW, SIGNAL = 1.1
tgcaggaattgaacttgcagtttctggtctagaacaacaggaactctcttgctctcaacaagtgcttgtttatataaaagtgcaataaacctacagaaagtgaaaccatgcaacttaagggagatgggggaagagagagggagatacagggctctagtggtatcatttgagcccccggttcaaatcctgttgtactggttacatgctctatcttgtaaccaagactcctggctgatacagggctccccaaatgctactgtgccagtgttgctttctttatctaacttatgtgtcattctctgaaataaaagacaaatttcaaatggtagtattcgatttaaatttatattttctaaagagaaaagaaatcattcatttagttttttcttaatttatataacaaggacaatttattgtgtactccattttttgaagtgcagcatttcagtaaagactaggtattgcatagaaaaaaaaataacaggatttgcagaccatagtttccccctaa

SEQ ID NO: 12660 - DNA, 591 bp, Homo sapiens
  MAP TO AC022050.2; EXPRESSED IN PLACENTA, SIGNAL = 0.56; EXPRESSED IN ADULT LIVER, SIGNAL = 0.77; EXPRESSED IN FETAL LIVER, SIGNAL = 0.67; EXPRESSED IN BRAIN, SIGNAL = 0.54; EXPRESSED IN BONE MARROW, SIGNAL = 0.62
tcctcagaagccattcaagcttcatgtccatgagaaaaaaaaagatatatagggcagtgagtactgtttcaaatgctagaggataccccaaaacctatagcctatttttctagaaagctgcatcaatccaccaaaggatgtccccctgcctgtgggctgtggctaccacctgtgggattctatgagaggcagaggaatttaccctgagacaatccatcactgtgtttgttcctcatcagttgctaaccttcctggaacagaaagggaggctattggcttacttcagcatgaatggacaactactacgccaggccatccttctggatgacccaaatataactttgcaaacaaccatggagctaaacccagccaccttgctcctggccactgatcctgaccatgaactagaacacaattgtctggaaattcttgatcatttaattctaggaagccagatctgtctgaccaaagctctagactgggagctttacaccaacagaagacacttcatgagaaatggatgatgccaagaagggtacgttatggtgactgcagataggataatggagacccatgttcttccctactggc

SEQ ID NO: 12661 - DNA, 596 bp, Homo sapiens
  MAP TO AC015805.3; EXPRESSED IN PLACENTA, SIGNAL = 0.63; EXPRESSED IN FETAL LIVER, SIGNAL = 0.84; EXPRESSED IN LUNG, SIGNAL = 0.87; EXPRESSED IN ADULT LIVER, SIGNAL = 0.72; EXPRESSED IN BRAIN, SIGNAL = 0.78; EXPRESSED IN BONE MARROW, SIGNAL = 0.71
atgaaagatcgtgtggggagtagaccaaacttaggaagagtgtagaatggagatcacagattcagatgcctaattggcctctaaatggtcatctagatgggtggctcagggtgagtgggcctgtggcagagggagccacgcctctttagagggtgcagccaccacttggcaccagcaggtggcgatctgcaataacaaagacagtcctttccaagctttattgtttttactggacgaaggcagaaatgcagatatttattgtgaaatatcccgatttttaaatgttgaactaattttaaaactttaaaatattatgcagaccagtaggaataagttgggctggtttccacaccgggctgccatttgtaacctctaggtgtgaggtacctgtttcaaagtactcataaggcctcagcagagatgatgagggcttggaccctggctggaggtgaaaggagcacagggagtatgaaatcctttaaaggtaaagataacagaattgagaacgatggcctcagtaggaagaacaaaggagggaagaacagttggatgacttgaggtttatcagtacatcccccgtggtccattctcattct

SEQ ID NO: 12662 - DNA, 522 bp, Homo sapiens
  MAP TO AL139245.2; EXPRESSED IN ADULT LIVER, SIGNAL = 0.95; EXPRESSED IN BRAIN, SIGNAL = 0.71; EXPRESSED IN BONE MARROW, SIGNAL = 0.82; EXPRESSED IN PLACENTA, SIGNAL = 1.6; EXPRESSED IN FETAL LIVER, SIGNAL = 0.87
tttttcattcagttcaaaacgcttttttaattgccttaagacttcctctgacatatggtttatttagatatgtgttgtttcatctccatacatttgaagattttccacttatatttctattattgatttctggcttaattccattatagttcatgaccatgctttctatggtttctagtcttttaaggttgttaagtttgctttatggcccagaacatagtatcatttggagaatgtttcatgtgcactttagaaagaagtgttgtcatgtaaagtatactataaatatcaactgggtcaagttggttgataatgttgctccagtcatctatatttttgatgattttctttccatttgttctatcatttactgaaaaaggagcactgaagttttcaactgtaattgtgaaactatctatttcactttttgattctatcagcttttgcatcatgtattttgaaactctgttgttaggtacgtacatgtttagcattgttatgtcttcttggaaaatcaagccc

SEQ ID NO: 12663 - DNA, 556 bp, Homo sapiens
  MAP TO AC018516.3; EXPRESSED IN FETAL LIVER, SIGNAL = 0.55; EXPRESSED IN BRAIN, SIGNAL = 0.67; EXPRESSED IN BONE MARROW, SIGNAL = 0.55; EXPRESSED IN ADULT LIVER, SIGNAL = 0.53
gctcgaggacacacttctccttaatactatctgtggaatcaaacatagatctttaaattctctaaagttcagatccttcatctttaaatagggataaggatagctacttcatgattattatgacgattacatgagacaaatgtgagtacactcagtaaatatgtgatacacagaaggattttaagatgtcttggggtgaatttttatatagtatttaagagaaccaataaatttacccgtgtagcaaagtacttccgtgagatataaggctgatgataaggattggggtaaagagttgattcggtcacacttgactgccttgaaatctgtcttggcatcgggtcctcttcctccatcgataggtggtcagtctcagagggttggtcatctccctcttgcttcagagacacagcctggaatccttcaaaactcccaattgttgacatttcttcagcctaaaccaagggcagaaaaatctcattgaaaaaatgttacctctgtacctgtgtcctagctatggcaaaacagaatatgatgagcaaacggaattcctgaa

SEQ ID NO: 12664 - DNA, 537 bp, Homo sapiens
  MAP TO AL122058.19; EXPRESSED IN LUNG, SIGNAL = 1.1; EXPRESSED IN FETAL LIVER, SIGNAL = 1.3; EXPRESSED IN BONE MARROW, SIGNAL = 0.81; EXPRESSED IN ADULT LIVER, SIGNAL = 1.1; EXPRESSED IN PLACENTA, SIGNAL = 1.2; EXPRESSED IN BRAIN, SIGNAL = 0.77
ctgctgagaccctcctgaagtccaggagcacaggctgcattaggactggcagtggccgggggactcaccatccagcgtctccaccgagagctgcaggcccaggttgtgccgcggattgaccacccagtggttgctggtggctgtgatgtcaaacaccagccagccctcctccgaggcccagagggtacggctgtcgagcaggaagagatccgattccctgcgagagaggaggagagacacgggcttcgcgttagccaggtcacagctccactaccccaacagatgggaagcagagcctcatggggtgggaggggagggaaagagtccactggtccccgacaagtgggaacatcagaccaagatccaggcacaaagacccctcagtagctgtggtgaggaaagagagtgcagaagagctacaaagagatacacgcagggaaaaggcagctgttacaaggcaatctcaccccataaattgttaagggcatcccagcgggacagagtataggaagacagggattatgcagcctccgtgtt

SEQ ID NO: 12665 - DNA, 511 bp, Homo sapiens
  MAP TO AC015897.3; EXPRESSED IN ADULT LIVER, SIGNAL = 0.94; EXPRESSED IN PLACENTA, SIGNAL = 0.82; EXPRESSED IN BRAIN, SIGNAL = 1.1; EXPRESSED IN BONE MARROW, SIGNAL = 0.94; EXPRESSED IN LUNG, SIGNAL = 1.1; EXPRESSED IN FETAL LIVER, SIGNAL = 0.84
tttgaggttccattgtgctgtctacaagggttaacaaacacttcctgctaatatttttcataggtgcattattgcaatgggccttgacaaaaaaccgtctttgccgaaatctaggaaagaaaagagcactgagaaaggagaggaactgaagaaggctgaggggaaagtgaggaaagagagagagtatgtgataccaaaaagaaatgagatcaaggagaacaaaacctctgtttcagccaaattttcagctcaagaaataaaaacagggctcaaagaagtggtaactgctgtggaggaaatgacaagtaaaggaaaaccaggacaagaagtcttggaagacgaccaggaaaatactttaaaatatggtaatcaacaacacaagtttcttttgttgtagctgtggctgtttcgtttgtctttgaaatgtgatgatcaaaattttcaaaaatacccattaaatgttacccagctgtgttacatgtggtgtgcccctgacctccttcctttgctg

SEQ ID NO: 12666 - DNA, 587 bp, Homo sapiens
  MAP TO AL121586.28; EXPRESSED IN PLACENTA, SIGNAL = 0.52; EXPRESSED IN ADULT LIVER, SIGNAL = 0.68; EXPRESSED IN FETAL LIVER, SIGNAL = 0.72; EXPRESSED IN BRAIN, SIGNAL = 0.69; EXPRESSED IN BONE MARROW, SIGNAL = 0.76
ttccttgggcacatcttctccccctccatggtaggaatgttcctggcacctccccctgcctgtccctaaccctctaaaggagtcagctctctctcagcgaacccttcctgggaccccaggccatctcaccggtcctgaagttcagccttctccagatccccttgactcttcagctgtattaactcctggctcctttcatgggcttccttctccagctcctgggtcttggctagtagcagcagcagctgggccggctcccgcccatccattcttccagatccgttgggttcccgagactgtgctcccacagtcaagcgcagacaacaggtcaacagagaccctgaaagcctcacatgctcagcttttagctccatcagatctctgagtacaagcaaggaaaacagcagactccactaggaaccagggaaggagtgtggtgatcaggcccagtgaagcctgaggagcagggctgggaaaaatcatctgcttccaatactaccaactcccccacccaccccacccccacagctgatcccgcttctatagcagcccactgttattagtccagaattggtaggggcaaacct

SEQ ID NO: 12667 - DNA, 507 bp, Homo sapiens
  MAP TO AC015873.2; EXPRESSED IN PLACENTA, SIGNAL = 0.51; EXPRESSED IN FETAL LIVER, SIGNAL = 0.48; EXPRESSED IN BRAIN, SIGNAL = 0.59; EXPRESSED IN BONE MARROW, SIGNAL = 0.56
cagttcactcccaccctctctgctccacacccactgcctgccaccaaggccaggagtttgtgcaggagtttgtgcaggccatgggctgttgtctaagtgtctgggctgcaggctaagactgctgggctgagtgcctgtctctccgtgcccctagccagcccccagcctgccccagcatgcaggaagccattcagggaatgctgtccatggccaacctgcaggcctccgactcctacctgcagaccacatggtgcactggccaggccaagaggagctcgctggcatcccatggtgcccagaagaatgggggtggcagcggcaagagtgcaggcaagcaactgctgaagagggctgccaagaacagcgcggacctgggccactacgaggaagagcacaagacaccagatctgggagtccctagtctccagaactgtgataagtaaatgtttgttgtttaagccacccagcttatggtatgtatgttgtagcaggccaaatggactagaa

SEQ ID NO: 12668 - DNA, 599 bp, Homo sapiens
  MAP TO AL157773.3; EXPRESSED IN ADULT LIVER, SIGNAL = 0.57; EXPRESSED IN PLACENTA, SIGNAL = 0.53; EXPRESSED IN BRAIN, SIGNAL = 0.57; EXPRESSED IN FETAL LIVER, SIGNAL = 1.3; EXPRESSED IN BONE MARROW, SIGNAL = 0.93
gagcaggagccaaagaattgatactaatgcaaaatctttaatcacaaagttcccttgtagtgtcttgacaccacagatacattttctgttgagttgtcttagagaactaatttgaggtatgatttcattccacttacttgtatgtaatcaaattcttcttttacacgatgactcttaggtgaccattttatgacgtttggttgtctgttttagtaccttaacaagaaaatatccgacataggagaggagaaaaggttgtcatcaatgtaccaagtaagttctactaaaaggtggtggggtgggagagaaacatgttgtattgttgtttaatcctggattctaaacccatttttatttttgtatttttataatacagtatttaaggacaagaatacaccatctccatttatagaaacatttactgaggatgatgaagcttcaagggcttctaagccggatcatatttacatggatgccatgggatttggaatgggcaattgctgtctccaggtatagtttcaaatatacagagaggcaaagtgttccatccatttctgttttttaacttctttatatatgcatgtttcctgttccaaaaa

SEQ ID NO: 12669 - DNA, 567 bp, Homo sapiens
  MAP TO AC015496.3; EXPRESSED IN PLACENTA, SIGNAL = 0.98; EXPRESSED IN ADULT LIVER, SIGNAL = 0.87; EXPRESSED IN FETAL LIVER, SIGNAL = 1.3; EXPRESSED IN BRAIN, SIGNAL = 0.92; EXPRESSED IN BONE MARROW, SIGNAL = 0.77; EXPRESSED IN LUNG, SIGNAL = 0.97
gccacagggctagaagtcagaaaccgtaagctcccaccatagtccgcctagccaaattctcatttaaaattaaatactggttgaataataccaagggtgtgaaagcagacaagactaaaaattgtcaaactgagccaactgtagagtagtaaaaataaagatatttctcagaacctatcctgtagtcagagtcactcaggacctttgtatagtttttgttgttgttgttggtagtggatttttttgatttgttgtagctttgctgttttgttttattttttcctgtggaggaagaaaagattatgttacatctggcaaagggtcagccctacttctgagagtaccaggaagaaaataagtagagatgcctgtgaaggggttccatgttgctgcctctggtatgaggcacaaagttcattgttcccgcgttccctctcattatgttttcaaacaaccctctcttcatcgaaacccaggcctttccattcatacatgtgccacttattatataatactttgtgattcttttatcatgattagggggcgtgtgtctgcatgagcatgctt

SEQ ID NO: 12670 - DNA, 512 bp, Homo sapiens
  MAP TO AL161422.3; EXPRESSED IN FETAL LIVER, SIGNAL = 1.1; EXPRESSED IN BRAIN, SIGNAL = 0.54; EXPRESSED IN BONE MARROW, SIGNAL = 0.52; EXPRESSED IN PLACENTA, SIGNAL = 0.63; EXPRESSED IN ADULT LIVER, SIGNAL = 0.82
ttcttttgaacgtgtgtgcagaaacgcaggcccagccggggagatggtgccgactttcttcggatccctcacgcagtccatctgtggcgagttttcagatgcctggcctctgatgcagaatcccatgggtggtgacaacatctctttttgtgactcttatcctgaactcactggagaagacattcattctctcaatccagaacttgaaagctcaacgtctttggattcaaatagcagtcaagatttggttggtggggctgttccagtccagtctcattctgaaaactttacagcagctactgatttatctagatataacaacacactggtagaatcagcatcaactcaggatgcactaactatgagaagccagctagatcaggagagtggtgctgtcatccacccagccactcagacgtccctccaggtaaggcagcgactgggttccctgtgaacacagcactgacttacagtagatcagaactctgttcccagcataagatttgggggaa

SEQ ID NO: 12671 - DNA, 506 bp, Homo sapiens
  MAP TO AC022860.3; EXPRESSED IN LUNG, SIGNAL = 0.89; EXPRESSED IN FETAL LIVER, SIGNAL = 0.91; EXPRESSED IN BONE MARROW, SIGNAL = 0.86; EXPRESSED IN PLACENTA, SIGNAL = 0.79; EXPRESSED IN ADULT LIVER, SIGNAL = 1.1; EXPRESSED IN BRAIN, SIGNAL = 0.9
tgtggcctatggaaaactccactaagtgacttcacatccttacctccagtttctgggctttatctttgtgaagaaagctaaatagaaaatacaggtcatggtcatttgccaaggcacacaggtcaaagtaatattttgcataaacactggcagacacatgaatattaaactcaagtagctccaagaaacacttctccatcttgctcctgggggaggagaaacacaataaaaccaacataggacaattctagtcaagtgggttatctttaaaaatatcattctgagctactaggatgctctaaattctattttgaaacacataaaggctgcatgatcaggtccctacactaatgtccaaataagacacagctgcttggggctcttctgcatcccagcaccccaagtttgggataagggaaaggtggaagcctcttctgcactcctgctgctgaatcggggctcattcttcagagttcccttagggcagctgcacaactcaaactcca

SEQ ID NO: 12672 - DNA, 514 bp, Homo sapiens
  MAP TO AC022843.3; EXPRESSED IN PLACENTA, SIGNAL = 0.61; EXPRESSED IN FETAL LIVER, SIGNAL = 0.7; EXPRESSED IN ADULT LIVER, SIGNAL = 0.79; EXPRESSED IN BRAIN, SIGNAL = 0.86; EXPRESSED IN BONE MARROW, SIGNAL = 0.68
acgtgtcttccaaccctgagcagttgttctttaacatcacggcatttggaaaagattttcatctgcgactaaagcccaacactcaactagtagctcctggggctgttgtggagtggcatgagacatctctggtgcctgggaatataaccgatcccattaacaaccatcaaccaggaagtgctacgtatagaatccggaaaacagagcctttgcagactaactgtgcttatgttggtgacatcgtggacattccaggaacctctgttgccatcagcaactgtgatggtctggtaagactccttctgttttgtgcgtatgtttgcaggtgctgggagtgcagccatggcttctgcatagtttggaaggtggaggtggaaaggaggcttcattgttatgttacattttaagttcagaaaaagacactagaaagcattttgctgtcaaagatatgcattttggcttaatttgtgacaattttgtttcttggaataatgcgaagacgacattattccaa

SEQ ID NO: 12673 - DNA, 597 bp, Homo sapiens
  MAP TO AC013591.3; EXPRESSED IN PLACENTA, SIGNAL = 1.2; EXPRESSED IN ADULT LIVER, SIGNAL = 1.2; EXPRESSED IN FETAL LIVER, SIGNAL =   1; EXPRESSED IN BRAIN, SIGNAL = 1.4; EXPRESSED IN BONE MARROW, SIGNAL =   1; EXPRESSED IN LUNG, SIGNAL = 1.1
gaaacgcacagaggaggaaggaggcatgtaaacatggggccaaaccaaggccctcttaccttgtggagatacggcatgtatgttttatccttattgaatgagccatactcattctccacttgcaccgcgatgacagggcctgcctggcggtactgagaaacaagcataggagggttaaagagtgaggctatttggggcaaaagcctggagtctctgagcttgctgccgaaggctgcacagctggtgcggcaggctctgatccacggcccctgtggtctgcacgctctgctccagcgctggagttagagtctgctgggtcacttggctgctgtgggagccgccttccctagtgcgttacagtacgtaactgccaggtttccctctgcttctcacactggctacttaaatttgagccctcaaacctacaaatgcacctgcttccacgccaatcccatccatattcccacctccctcctgccttaggcttatgccaccacttgcgtgtgggtcccacggccttccgctgcctgatcaggaacgtggctctgggcacagcccctctcccctccgtgcctttgaccttcctttgcaacaagc

SEQ ID NO: 12674 - DNA, 559 bp, Homo sapiens
  MAP TO AC018993.3; EXPRESSED IN ADULT LIVER, SIGNAL = 1.1; EXPRESSED IN PLACENTA, SIGNAL =   1; EXPRESSED IN FETAL LIVER, SIGNAL =   1; EXPRESSED IN BRAIN, SIGNAL = 1.8; EXPRESSED IN LUNG, SIGNAL = 1.2; EXPRESSED IN BONE MARROW, SIGNAL =   1
atgcatttcatggacacctcatttataagcaatgaattatgagtcaaatgcctctcttatagtttattgctctcattattcaccccataaaagatctgttttatcatccattgtagatatagagttcacaatcaacatttttgcatgtatgtaatattatttttacagggcgtcagctcacaatcttcaatagccaagcaaccataataattggcgggaaagagcagggccagcccttccagggccagctctctgggctgtactacaatggcttgaaagttctgaatatggcagccgaaaacgatgccaacatcgccatagtgggaaatgtgagactggttggtgaagtgccttcctctatgacaactgagtcaacagccactgccatgcaatcagagatgtccacatcaattatggagactaccacgaccctggctactagcacagccagaagaggaaagcccccgacaaaagaacccattagccaggtgagcctgtggattttattccttcattttcatcctatattatttatgatagtgggcttttctgcatatgc

SEQ ID NO: 12675 - DNA, 597 bp, Homo sapiens
  MAP TO AC009079.4; EXPRESSED IN PLACENTA, SIGNAL = 0.64; EXPRESSED IN FETAL LIVER, SIGNAL = 0.64; EXPRESSED IN BRAIN, SIGNAL = 0.8; EXPRESSED IN BONE MARROW, SIGNAL = 0.56; EXPRESSED IN ADULT LIVER, SIGNAL = 0.64
tgggttgaacatgacctctgctatagatgggggaaatggcatttgtaagtgaggatagagtgtcatggtcgaagaaagttgtattttaaggttttctttttgctctgtcattgttttcagggacccacctagtaagaaaaggaaaatggaaaactgtgcacaaaaccagaagttatccaacaagaccattgaatcattgaacaaccaaccaatccctagaccagacactcaagaactagaagcttcagaaataaagctagaaccatcttttgaagactcttgtggctctaacactgacaagcagactcttacaacaccaccgagatatcctcagaagttgcttttaccaaagcccaaagtggctttggttaaactacccgtgatgcagttttctgtcatgcctgtctttgtgcctacagccgactcctcagcccagcctgtggtgttaggtgttgatcagggctctgccacaggggctgtgcacttaatgcccttgtcagtaggaaccctgatcctcggcctagattcagaggcttgctctcttaaggagagcctacctcttttcaaaattgctaatcctattgctggtgagccaat

SEQ ID NO: 12676 - DNA, 575 bp, Homo sapiens
  MAP TO AL121884.5; EXPRESSED IN PLACENTA, SIGNAL = 0.83; EXPRESSED IN ADULT LIVER, SIGNAL = 0.62; EXPRESSED IN FETAL LIVER, SIGNAL = 0.85; EXPRESSED IN BRAIN, SIGNAL = 0.77; EXPRESSED IN BONE MARROW, SIGNAL = 0.85
aggtctaagggtttcctgcctattgacgtaattataatacccatataaatcaaagaatgtaggttttatgtctgtgaatataacaaccagcactagccctattggtgaattgtacatagttctggttacatttcagatataaataataaccagcacacttcactttaatgagaggttaggtagtaattatagtaaaatatctaagatcggaaaacagattttaattttactttaatccaacatatttcctttagaagttggtatgcctaaatttccactacatgtttgtactctcattagagaaaaattaaattttttacaaaattatatgatgaaccatattctcatccttacttccttttcagattagatacacaacactctgaagacatgaatgccaccagatctgaagagcagttccatgttataaaccacgcagagcaaactcttcgtaaaatggagaactacttgaaagagaaacaactatgtgatgtgctactgattgcaggacacctccgcatcccagcccataggtaagtatttttatgtatacagaatggttttgagtagggcaa

SEQ ID NO: 12677 - DNA, 586 bp, Homo sapiens
  MAP TO AC021486.3; EXPRESSED IN LUNG, SIGNAL = 0.93; EXPRESSED IN BRAIN, SIGNAL = 1.2; EXPRESSED IN BONE MARROW, SIGNAL = 0.69; EXPRESSED IN PLACENTA, SIGNAL = 0.81; EXPRESSED IN ADULT LIVER, SIGNAL = 0.83; EXPRESSED IN FETAL LIVER, SIGNAL = 0.81
gcccccaaactaggaaaatcctttcgaagctcagacttgatatgctataagggcttagccagtcatgtagagttctgttggaacagaggtaggctggcctaaaagggattctggtgagctatgtgaaaatgccctattacgtgtagccacaatgatatgtggccagttggctgaataacctaacaggagtaagtgttaagtgtgccctgaccatcaagaaggatggaaatgaggagatcagcatgcactgccatcatattctgaaggaagtgaaagagagtgccagaggaagcctcagaagtagaattcctaagatttgaggaatagctcggttgtataacattgacagtgtggacatcaaagaccctctgagtgtaggtcacagtagactgtcctgtacccctttacattgaagcagaattgtcttcaatattgatgttgatacaggaacatccagttagcccttgaggagaaggcttggattttgtttactcccatataagaatctttctaatataatacagtgcttcctactttttagtagtgaccaagtgcatatcttatctcttcccaggagtagaagggg

SEQ ID NO: 12678 - DNA, 525 bp, Homo sapiens
  MAP TO AC025749.2; EXPRESSED IN BRAIN, SIGNAL = 0.6
gagcacactcctaacctgcccacagtctgctcatcacctcgcttggccacatcaagctcacggacttcggcctgtccaagatcggcctcatgagcatggccaccaacctctatgagggccacatcgagaaggacgcccgagagttcatcgacaagcaggtgggcgggcaggtgggtgggcagccccgggatgcctcctcctctctcctgggacctctcttgggctgggggctggcctcagtttccccgttctccctggcccaggtgtgtgggacgccggagtacatagcccccgaggtgatcttccgccagggctatgggaagccagtggactggtgggccatgggcgtcgtcctctatgagtttctggtgggctgcgtgcctttctttggagatacccccgaggaactcttcggtcaggtggtcagcggtgcgtttcctccacgggcccgggtttgagctgcagccccaccagagctctgggcagcggtcctccacccgcatgtcagggagagaagcaggaaga

SEQ ID NO: 12679 - DNA, 582 bp, Homo sapiens
  MAP TO AC012611.4; EXPRESSED IN BONE MARROW, SIGNAL = 0.46; EXPRESSED IN PLACENTA, SIGNAL = 0.54; EXPRESSED IN BRAIN, SIGNAL = 0.46; EXPRESSED IN FETAL LIVER, SIGNAL = 0.48
tttccttcatggactctgggcctcctgttagacttagaaggttctccccactccaagactgtaaaaatgtggacagtgtatttatttagagcattagatgaccaaattcaaagaggccacagtaacataattgatacgatgccaaagaaaatagcccgaagccctgccgaggaatctgcctagccctccttttcccctccactgtacttttccggcctgtgattatttgttatgcctctaggcagccctgactttccattaagtcctcctccctcctcttttattcctgtgcagagagctgtttgcttttcagtttttgctttttgttttcacagactgtgatggccaataagtgggacccctttgacctgtacttctcccttcctaggaccaaatgcagcattactgactatatgtacaccttcctgttctcccgtctctcctttcatcctcccccttcctggagtgagcaagcaagggagccaaaagcagactttgacacatctgccctggcttggctctattccaatgggaaagtttgatgttgcaagcttttgaaagtcgctcacatttccctgactt

SEQ ID NO: 12680 - DNA, 556 bp, Homo sapiens
  MAP TO AC021976.3; EXPRESSED IN PLACENTA, SIGNAL = 1.2; EXPRESSED IN FETAL LIVER, SIGNAL = 1.1; EXPRESSED IN ADULT LIVER, SIGNAL = 1.2; EXPRESSED IN BONE MARROW, SIGNAL = 0.96; EXPRESSED IN LUNG, SIGNAL = 1.3; EXPRESSED IN BRAIN, SIGNAL = 0.97
acagaggatctggcaacctggatttgggagttgatgaggtctcgtattattgacatataattccataaagtgaagactcagaatgaggtcatctctttgccccctctggttccagcctccatgaggcagcagcatgaagaatggtttaaaggccagggctgcagaagcggaaattgtttaaatttcatttctaaccctcctttgcaatgtgaccttaaccaagtcactttatctctctgagcctcagggttcttatctgaaaattgcctgagtagggttgtcacagagattaagtgagcaatacacagaaagcccccagcctctgagccctgcatgagtaagcacactggaacagtgccaatcatttccatagctaggatattattttccagaagcttcccaatgatcacaggctacagaaagaggtgatgcacacagattggggcagtgagttgagggctggcagctgtttctggcaggttgtttggaaggggatgaggagtgactagaaatgaaggatgacgtaatgtcctttccagggtcaaagcattgaagg

SEQ ID NO: 12681 - DNA, 599 bp, Homo sapiens
  MAP TO AL161756.1; EXPRESSED IN BRAIN, SIGNAL = 0.52; EXPRESSED IN PLACENTA, SIGNAL = 0.55; EXPRESSED IN BONE MARROW, SIGNAL = 0.46
ttgtccccacaatgtcactctaaacgtaactgttaactatcaggaagtatttccttctttttctatagagaacagaagatcttcagcaggaaattcagatgcttactcagcaaatggaacagctgtatcatctttatgaacagctgtttgtgaatcattccaacttgaagaaaagtatagggaacaacaaaagatccttgaaatacctggaaggaaaaattgcttttaatgatgttttaaaagattagactatgaaaaaagactttcctgaattatagatgttattttgggcaatgaaattaactatttattattctaatattaataactttaactttatttggtgtagaaagctgataaaaactatttatatttcacttaacattggaaaagtgagggggaaaaatccttagagttatgcttctaattttatcaaaaaacatgccctttcccatatcttcagttttttcactgtgtacatatttgacagataaaaccatcaatataatatggaaagtttagtgtcttttataatctcttcttgtaagttacataacatcacttctgccatattctatcagtcaaacagaccaacctga

SEQ ID NO: 12682 - DNA, 505 bp, Homo sapiens
  MAP TO AC008164.3; EXPRESSED IN BRAIN, SIGNAL = 0.59; EXPRESSED IN BONE MARROW, SIGNAL = 0.55; EXPRESSED IN PLACENTA, SIGNAL = 0.56; EXPRESSED IN ADULT LIVER, SIGNAL = 0.61; EXPRESSED IN FETAL LIVER, SIGNAL = 0.62
tggggaagacttttcacaccaggcccctggtgtggcctctggaatgtgggagaaatctgtccagtcacagaactattcagggaggggcatcatgtcccgtggcctggtttatcacatctcacagagtctgcattcaggggggtcggagagcttgccacagcttgaccgatgacccctccatggagaatggagcctctgttccagaacaagcctcagcctcagcatctgtcctctgaaccccttgctgccaaagctgtctccactgacccctacagtggggcccctccctggcaaggagtccaagagttcccagatggatgccagggacctcagccctgctgaacctggagtcattctcccactgggtgtagtctttgttctcataagtgttgggtaggttcccagcgtcatgagtttggggtccaaagataccctgagcacagaagcaaagcagagtcagggctctgatgctcttctcacccccggagctgtacctggaaggcag

SEQ ID NO: 12683 - DNA, 558 bp, Homo sapiens
  MAP TO AC010503.3; EXPRESSED IN LUNG, SIGNAL = 0.85; EXPRESSED IN PLACENTA, SIGNAL = 0.86; EXPRESSED IN FETAL LIVER, SIGNAL = 0.86; EXPRESSED IN ADULT LIVER, SIGNAL = 0.93; EXPRESSED IN BRAIN, SIGNAL =   1; EXPRESSED IN BONE MARROW, SIGNAL = 1.1
cgcagtagggttagagccaggaatcagcccccttgtcccgccccccggggcggagccaggccctgctcccaccccggcccggcggaccccgcctcacggtgctgagtttgctggcggtgagcaggactcttctctcggccaggagcgccgcgaacagccccacgatgttctcgtcagtcacggccaccaccagctccgttaggttcctctgaggatcagagagtcgctctgggcgtggacgggcccctggatcttgcatccccggtccgggtttcgggacctgttctcacccccagagacccctccccactcacgttctcagggatggatggcaggcggccggagtccggggccacgaagcaggaaagctggtgggggtattggcagggggatcaatcagtcaggaggctggcctcacctggacccccgaccttccagggtccccgagccccgctcaccggcttgctattcccccgggtagggggggggataccctgcccgctggagaccgtcactccgctgccctggggaagaggcacgactctgtggtcatgatgg

SEQ ID NO: 12684 - DNA, 542 bp, Homo sapiens
  MAP TO AC021811.2; EXPRESSED IN ADULT LIVER, SIGNAL = 0.54; EXPRESSED IN BRAIN, SIGNAL = 0.51; EXPRESSED IN PLACENTA, SIGNAL = 0.54; EXPRESSED IN FETAL LIVER, SIGNAL = 0.56; EXPRESSED IN BONE MARROW, SIGNAL = 0.47
taagaagcattccggtttggggatgatgaactgctggcagctgctttcagctattagcaggttctgccactctctcagacaccagggcttcagctgtctagtaaaagttaaacagctgttccccacatagacaagactatgaaagacccattgacttaaagatgttgtttagcagagctgaaattacaggaagaatgatgtaactctaaccctactcaccctctttgcacagttctactaaaattatcaatgtcatttttgctacagcttgtttcactttctcatccgaggtttccatatcagcattcccactacctcgccttgtctgtgtagtaagatagctgccaaagtatcctttggttttaatgaacactgagtaggaaggcaggccatggcagagctcagcatctatgaagggtcatcaatgaaatgcagaatccaagatttagacattttccaaaaaactagtggtcacaagtaaaatcttacatttcctccttcatctttatttgatatttaatgggcgatgctgtctttttctc

SEQ ID NO: 12685 - DNA, 583 bp, Homo sapiens
  MAP TO AL161940.3; EXPRESSED IN BONE MARROW, SIGNAL = 0.92; EXPRESSED IN ADULT LIVER, SIGNAL = 0.82; EXPRESSED IN BRAIN, SIGNAL =   1; EXPRESSED IN PLACENTA, SIGNAL = 0.86; EXPRESSED IN FETAL LIVER, SIGNAL = 0.72
taggtgatcccagtgtgcagccagggttgagacctgcagtaaaaaaattatttctttatggtttgaccatgcattgcatgtgtggtgatagacagtagtcaaggtctatagatgccacatgcttgtgttctgaaactcttagtggttgaagaagaccagaaaagattgcacataagctaataaaatccaaacgtctatctcaaagtccctatcttagtatttattcatttatccattcaaataatatttgactaactgatacatatacataatatatatgtaaggtatatgtatgtatgcatgtgtcaatcattatttactgaccctgcaataaatcccagggattcaccaaggagcagcaattggagttttcaataactggaatcatgaaaactccaagaggtcctgaattatcacctattttgttgtgtaaagtggtgtatgaagtgttctgtactgtttatatgttactcaagaacaaatccttttttaaaaatgtaagtcatcatctcttaaaaatttattttaaatattttttcaggacctcttggagttttcaataacaggaactgtgaagcccaat

SEQ ID NO: 12686 - DNA, 575 bp, Homo sapiens
  MAP TO AC025324.2; EXPRESSED IN ADULT LIVER, SIGNAL = 0.68; EXPRESSED IN BRAIN, SIGNAL = 0.88; EXPRESSED IN LUNG, SIGNAL = 0.92; EXPRESSED IN PLACENTA, SIGNAL = 0.66; EXPRESSED IN BONE MARROW, SIGNAL = 0.57; EXPRESSED IN FETAL LIVER, SIGNAL = 0.6
caccccctgacattatttggtattaaaatgggtttgctcctctgtggtccaaccacaaccctagatctcattgcacttaaaaaaacttctttggctgtgattgttacgtatatctcaattagtataattgctatttactctgaaaaatgtcctgtaatattcactatggtataagtttttttttatgaggatttgacacattttcatagaatttaacgcattttttttcctggcatatacttgcttgttatgaaatttccttggttttattaaggatggcatttctcttgttaacaaattattatccctttgtttttcttctttcaggttttgatggaggggagaagtattgtcccaaagctcatacttttatttttgcttatatcatcttcaataaacttccttcaacacccatttttaaccctccacagaaataagtccagcgaagttcatgtactcaggctactctattctctttactgctttgtgagagagatctcaaaactgcaaaggtgatcataacacttacgtgtttaaaatattaatacattgcctgccacagaaaagatgcacag

SEQ ID NO: 12687 - DNA, 573 bp, Homo sapiens
  MAP TO AC010477.4; EXPRESSED IN BONE MARROW, SIGNAL = 1.1; EXPRESSED IN LUNG, SIGNAL = 1.1; EXPRESSED IN PLACENTA, SIGNAL = 1.3; EXPRESSED IN ADULT LIVER, SIGNAL = 1.1; EXPRESSED IN BRAIN, SIGNAL = 1.2; EXPRESSED IN FETAL LIVER, SIGNAL = 1.1
agtgaatgattgtgccctcccaaaattcatatgctgaatctctaatcccaacgtgatagcatttggaggtggggcctgtaggaggtaattaggttacaagggtagaaccctgatgaatgacattagtgcccttaaaagaagaggccagagagttagcttgctctctttccctcacagccatgcaagaatacaatgagaagacagcaatctgcaactcagaagagggccctcaccagaacctgtctgtgctggaaccccaatctcagaattccagcctctagaactgtaagaaacaaatttctgttgttaataagtcacctggtcatggtactttgttatggcagcttgaactgtctaagacaagcataaactgtacagaagtcccccttatccatagttttactgttcagtttcagcaacccatggttgtatttcaaaaatagtaaataaacatttccagaaatagacaattcctaagttttaaattttgagttctttccaagtagcgtgataaaatctcacaccatcttgggaggtccagcaactccacactgtagacacttcctgccctgg

SEQ ID NO: 12688 - DNA, 600 bp, Homo sapiens
  MAP TO AL157773.3; EXPRESSED IN LUNG, SIGNAL =   1; EXPRESSED IN PLACENTA, SIGNAL = 0.99; EXPRESSED IN FETAL LIVER, SIGNAL = 1.2; EXPRESSED IN ADULT LIVER, SIGNAL = 1.1; EXPRESSED IN BRAIN, SIGNAL = 0.97; EXPRESSED IN BONE MARROW, SIGNAL =   1
tttgatattctcaaccagggctatactactactgctctggtcttcatgtaattgttcataaattgttgaacatgctttctaagtagaaataaactttaaaggataattattttgataggtttatcttacgttatagatttatttatttatttgcttttaaccttagtatttattttccctagcttaataagaatgaaagtgatctgcttttaaaagataaaagtatatttaaatcataccagaaaaaaagggtatttaaattgccttcagattttaaaaaacataattttccttaataatactttttagggctcactaactttttttctgtatcttatgttgaggtttttatataattatcatatataaaaatatattccactcattttatatagcatattcatttatatatatttttaatctttagccattgaagaacaataactataggatcagtaaatcccgatatgactcaatagacagctatttatctaagtgtggtgagaaatataatgacatcgacttgacgatagataaagagatctacgaacagctgttgcaggaaggtgggtttctactccatctttctgggtttgaatg

SEQ ID NO: 12689 - DNA, 575 bp, Homo sapiens
  MAP TO AL138682.5; EXPRESSED IN BRAIN, SIGNAL = 0.62
tttgtcagaaagcaaatgccttattttaataaagaactttcttcttaataatccaggaactaaaatgccttttacctatgacatcagtatatttttagcattgtcaacaaagacaatattaaagaatcagtttagaggaaataaatttctcaatttctcagctgaacaaggtaagtaaatgttttgtaaaactcaataggaaagattaagatgacttgtcaacagtatatattatcatgttgtagttggtattctttcatgatccaaaaaatacagccaagtttggcacccactgggaagaacttcaaactttgtattgctacaatagcaaagcagatttattagaccccagtatctaaattaggaataagaatgtcctagttggttcatagcttagatttataaaagtaccttagtctacctagggtaagagatatttttagttgttcctttttctgtcaagacaaaatgttcagttctcctgtttagatcttcagcaatttcaacgtcaggcaaacaaggcaaggaaaagtgtcatcaatcaaatcttagaaccccgtgaagtgtcttggatt

SEQ ID NO: 12690 - DNA, 531 bp, Homo sapiens
  MAP TO AC019214.2; EXPRESSED IN PLACENTA, SIGNAL = 0.69; EXPRESSED IN BRAIN, SIGNAL = 0.68; EXPRESSED IN BONE MARROW, SIGNAL = 0.86; EXPRESSED IN ADULT LIVER, SIGNAL = 0.64; EXPRESSED IN FETAL LIVER, SIGNAL = 0.69
cctctcctactccaggggactgcccctacaaccccaccagggccaggcatggctacaacttaggtgctaccagcagctgctgagggacagtaagccacagggtgtcagagagccctaatcagaatccctgtgcccaaggcctaccccaccaggcctggagtcccgcaagagctcagcagggagaagcccaggcccacctgataccttgtgcctgttaccttgcacccacagagctgacctccgggccaaggccgtggagctggaacatgagacattccggaacgccaaggtggccaacctctacaaggccagcgtgctgaagaaggtgggcctggtgcaggcggacccagggtcgttgcaggggcccctccatactctgacgcagaagctgtctgccagctctctgggctcaggcagcccagaactcaccctccccagcccaccccagagacagtttatgggggtagagctccattctccactggctggacatgtttctagccaaccctgtgaggatgggaggcctaaaac

SEQ ID NO: 12691 - DNA, 594 bp, Homo sapiens
  MAP TO AC019295.3; EXPRESSED IN BRAIN, SIGNAL = 0.6; EXPRESSED IN BONE MARROW, SIGNAL = 0.43; EXPRESSED IN PLACENTA, SIGNAL = 0.67; EXPRESSED IN ADULT LIVER, SIGNAL = 0.55; EXPRESSED IN FETAL LIVER, SIGNAL = 0.66
atgctcgtttcccattcatcatattttaaatgattctataaataatgttatgttaaaaaacagttttctcttcatagtagagtactaaatgagggtcctatataaaagatcctacagagtgaaatattgggaaataaccaaataattgatatagtcattttaattgctaccttgttatctgtgacctagtttgcttagccgtttttatggagcctgattctctgatatactggagaatgttagattcagaatggatgtaagaatattttgatttctctttcagttctattcggttgatagtatttctgtaaaaacaaatcaggctagtaaaactcatttttagtatttttctaaacagcaagtttatattaaattagatttaataaagaagaagaacttttttctataattatgattccctacagagtatatatatcaaggcaaacaagagggaaagtaatcttatattttcttggaacactattgcacccaatcaaataaaatgaacttgaagcctactcttttttttttttttttttttaacaaactaaaagcaagtgtgagaacttgtggagccagcatcaggttccttag

SEQ ID NO: 12692 - DNA, 528 bp, Homo sapiens
  MAP TO AL160413.5; EXPRESSED IN PLACENTA, SIGNAL = 0.78; EXPRESSED IN FETAL LIVER, SIGNAL = 0.6; EXPRESSED IN ADULT LIVER, SIGNAL = 0.77; EXPRESSED IN BRAIN, SIGNAL = 0.75; EXPRESSED IN BONE MARROW, SIGNAL = 0.7
agtgactttgccccacattctcataaatttgttttatttgctaacaatgctccggggagagatactctgaaactttccaacatgaaaactcacaaatttggcatgattttataattctaggagtccattaaaaataaaataaaagcaggattgtaacttaccagggtgcctttgtgttttggtgaagcttggaaattattcataatatatattttggaatttaagtcccctattcttccaaaagcaaattttttggtggtgttattaaacatcagataataccctgacaaattgttgatgaatgctgcctgcagacccagctgtgtgaacagcattgctagtgggaaaatgagaatgttttctgatgccttatggaacccaagcagcaaaactaatatttctgtgttcatttcttcctattttcttctgttgtgcatgatattggaggcacagcagcaggaatttgacaggaagggaatatttaaaacacagacaaaatgtctctgtcctctctggcatgtcgtttca

SEQ ID NO: 12693 - DNA, 541 bp, Homo sapiens
  MAP TO AC010397.3; EXPRESSED IN BONE MARROW, SIGNAL = 0.62; EXPRESSED IN ADULT LIVER, SIGNAL = 0.73; EXPRESSED IN BRAIN, SIGNAL = 0.52; EXPRESSED IN PLACENTA, SIGNAL = 0.52; EXPRESSED IN FETAL LIVER, SIGNAL = 0.89
ttccaccacaaaatccttccaattatacttaatagtttgaaaatcatacatttgcagttgcaaaaaatgcaaactcggagttatccaacgttcaaaaaaggcttgataaaatatttgtctctcactagactaatttaggagtgtatttttttagagtactttgtcattatatcctttttctaatgtcatgtattttttgctcaggaatatggtataactaaagctgaaaaactggagattgccaaaggctactgtactcctctggttagaaaaattcgctcagaccttcagaggacacaagatgatgacactgtaaataaacttcatcctgtgtaagaaactgtactggttatttaaatctctaggcatctatttttgcatacttcaaatttaaattatactttgatggtcctatgaagtcagaagtgtgtcattggcatactgtgaaaatagtattacctaggtatttctattaagttccaaccaaagttatttttggctccactttagagaaaactaaggtgagtggggaaaagggaat

SEQ ID NO: 12694 - DNA, 517 bp, Homo sapiens
  MAP TO AC022204.3; EXPRESSED IN PLACENTA, SIGNAL = 0.69; EXPRESSED IN BONE MARROW, SIGNAL = 0.71; EXPRESSED IN FETAL LIVER, SIGNAL = 0.57; EXPRESSED IN BRAIN, SIGNAL = 0.59
agttctggaggccaagtctgaagtcaagatgttagcaagggcgtgctccttctgaaggttctcggggagaatcctgccttgcttcttccagcttctgatggtgtcagaagttgcttggtttgtgacagaataataccagtctctaccctcttcacatggctttctctcttgtatctctgtgtgtcttctctttttccgtttcttacaggcatacgcatcataggtttcagggaccatcccaatgcaggatggtctattcaaaagatccttactataattatatctgaaaataaactaattccaaataaggttaccttttggggttctaagtagatctcagaatggccattattcaaccttctgcaagtgatattgtgtagcaattaaatgacaagaaataatcctgaaatatgtgaggaacatctgttatttcccaggaaggaaactctagatgagacagacattcatggaagttcaaggtaaagtaataccatagtggtaagaggtttggtgctgc

SEQ ID NO: 12695 - DNA, 591 bp, Homo sapiens
  MAP TO AC019221.3; EXPRESSED IN PLACENTA, SIGNAL = 0.6; EXPRESSED IN ADULT LIVER, SIGNAL = 0.65; EXPRESSED IN FETAL LIVER, SIGNAL = 0.54; EXPRESSED IN BRAIN, SIGNAL = 0.53; EXPRESSED IN BONE MARROW, SIGNAL = 0.65
tttggggctagcaatctttgaggatccttgcctaggttcattaatttattaggagttgaaaaaatgtaaaattctaaaatgccttcatttattagttggaatatgtttataaataaaacttatcattatctgcttagctaccctgggatatagtttgcaagggaaaaacaggaaaaaaaatgctttattttttacctttatgattgcctagcatccattataggtaactgcacatttttgtataggatcattatgaactcacagatttacagattttatgtacttgtttcaattaatttttattatttttctcagtcaagttcaaattgtctcatctttgactagtgggctcctcaatctctttgatgattccaatggtcttggatagcggcttcactgctttctgtgatggtaagatgtttcaggctcatcttatttcctgacctagatatataaccagccattattctaagatgccctggttcctgtttgtagaaaatggtatttggcagccataatctgggtgccaggggtactctgctgctaccaggttggtcactctttccaacctgtatcaggggacagagctgg

SEQ ID NO: 12696 - DNA, 501 bp, Homo sapiens
  MAP TO AL139187.4; EXPRESSED IN BONE MARROW, SIGNAL = 0.71; EXPRESSED IN PLACENTA, SIGNAL = 1.2; EXPRESSED IN ADULT LIVER, SIGNAL = 0.74; EXPRESSED IN BRAIN, SIGNAL = 0.79; EXPRESSED IN FETAL LIVER, SIGNAL = 0.59
tagctgcgtgtaccttggtgatgtcccgtgtttcccgctaccaagtccactttgtgactggcttctctgatggtctctctggtaaaggcgactccgatggaacagtttccagctgtcgcaccagccccggccggccccagcatcgccccacatcagcagccagacggccagccagctgagcctgctccagcgcttctcactgctccgcctcacggccatcatggagaagcactccatgtccaacaagcacggctggacatggtgcgtagcacattcacctaggaggggatccttggctctagagctaagtgtgtgattgcagaagcttccatgtttactttgtgatatctgaaaaacccattcattgccttcactgatgatctcctggacataaggcatgagctctgccgtagcctcgatgcaatggaccctacaggaaacattgctctatttgtagttctcagttggtttccagggaaggcagtcaggctccaagaaagg

SEQ ID NO: 12697 - DNA, 532 bp, Homo sapiens
  MAP TO AC021880.2; EXPRESSED IN ADULT LIVER, SIGNAL = 0.61; EXPRESSED IN BRAIN, SIGNAL = 0.5; EXPRESSED IN BONE MARROW, SIGNAL = 0.78; EXPRESSED IN PLACENTA, SIGNAL = 0.53; EXPRESSED IN FETAL LIVER, SIGNAL = 0.51
gctcagtcctgaaatccgtcccagacatggaaattacagagcggcccctgctgacaccccctgccctttctgtgtcattccctcatgaggaatgcaattatatgccccccacggcaaacacgaaggaagacacgtcagtgacagccgcagcctgttcacgtcgtcctgcagagacagaggccgacataagcacttgcaggcggtggccaccagtgcagcaggagctgaaggcactgacctcagaggaggccgggcaggaggcaggggccgcaggcaggctggtggtgtggctgaaggtgctatattcactcccattttatagatcaggatgctgagggtatgcagaggagatgggatctatgtaagcttggcccactggatgcaaggcgaacaggctctcctcgcaccttcagggcaagcagttaaacagaccagcccctcacacactcactgggcagctgcggtgtggccaagccccgaaaggaacaggacaaagtactgggcgcaggctgcagatcaccacagatgccac

SEQ ID NO: 12698 - DNA, 567 bp, Homo sapiens
  MAP TO AC011824.4; EXPRESSED IN BONE MARROW, SIGNAL = 0.84; EXPRESSED IN PLACENTA, SIGNAL = 0.87; EXPRESSED IN ADULT LIVER, SIGNAL = 0.82; EXPRESSED IN FETAL LIVER, SIGNAL = 1.2; EXPRESSED IN BRAIN, SIGNAL = 0.75
atgtcaagccaagcacacaggcatggatgttatacctgtgccttccggactccaggataaagctggaatttgacctttggccatgacatatatgcatacatatatccataaattctagtgttggccttcatgagtggggaagtggaaagaattcttaccagtaatgagtgggcctaacattctcatttctgaaatgagaatctcccttttcgtcataacgatgctcccttttctctgtaacactgcattcattaccctatggcccaggaaacagaaaggcttgacctctgaaaatttagactgcccagaagtatgccacctactactgcatacaaaaaaacaggatgcacaccagggaggcgatgtggtattttggaaggtctatgggctttggaattagataaatgtgggtatgaattgaagttctgctgggtgttaggtgggtgacttcagtcagatactgtaacttatctaagcttcagtttttcacttctaagataagaataatagatcctaacgtatggagttattataaagataacatgagctaactcatggaaagcccca

SEQ ID NO: 12699 - DNA, 560 bp, Homo sapiens
  MAP TO AC023296.2; EXPRESSED IN PLACENTA, SIGNAL = 0.64; EXPRESSED IN BRAIN, SIGNAL = 0.61; EXPRESSED IN BONE MARROW, SIGNAL = 0.55; EXPRESSED IN ADULT LIVER, SIGNAL = 0.64; EXPRESSED IN FETAL LIVER, SIGNAL = 0.55
agccttttcctctacctcgctatgagttagtttttccatctgtaaaactgagattaaagtattataaaaataaagtgacttaatagttgcaaattgctgttcaagaattcctagcccctagaagggctacataaatgcttgcaaaattaaacaaagcataattcaataaagacttctatacacatctgtaaaatccaaagagtcaccaaacaaacctttgcagacaggtttgctcggattccacctgccgtctttggtacagcgaatagtggcggatgtgactgcttccatgacatagcctgggttacactgatagctcacagtcttgttgaaggtgaagtcggtcccaaactggatgccatttgctagtgtgcctggatccccacaacttataactaataaacagggaacaggaaagaatcagagaaattcatttaccatgaaatgaattagtcaccatttctattcaagatactctctctgagttgctattcacagtggttaagcagtgaattaatacagcaatactaccctctgtgtgatgatttcactgacccgct

SEQ ID NO: 12700 - DNA, 597 bp, Homo sapiens
  MAP TO AC010338.3; EXPRESSED IN PLACENTA, SIGNAL = 0.63; EXPRESSED IN FETAL LIVER, SIGNAL = 0.55; EXPRESSED IN ADULT LIVER, SIGNAL = 0.64; EXPRESSED IN BRAIN, SIGNAL = 0.76; EXPRESSED IN BONE MARROW, SIGNAL = 0.67
ccatttctgagctctctggctttatggagactttcactgactcccagtaacatatcagtttggataattctgttttaggaacagctgctgccctaccacatcctgcaaaacttcccccaagacaattaccaggcaaaaatcatcctcattttccaaaccaaaaatcaaggcatgtggttgaccagggagtctttctaatttgttaattcatttgtctgaaaaatgttacaattcaatacaagttacatcacatgtaaccataccttaatacctatagaaaagaataaaagtacataaaatcataaatgtctatgtttattacttctgatgcctggaaatatagaaattctttcaggtttttcttccttgtccagattaaacaatcccaatttcttaaatattgccttcacatgtcagtctttaatcctttttaatgccctgctacatgcattactgtattggatcttccctggaacattttatggtagggtctttctttatcctatttttacagatcagtaaactgaggattatggagcatatataactgacccactgtcaccatgtagctgtaaagtgtcagaacttgaaccccaa

SEQ ID NO: 12701 - DNA, 572 bp, Homo sapiens
  MAP TO AC024196.2; EXPRESSED IN BRAIN, SIGNAL = 0.45
gtgccccatcagtgtgttctctaccccttggagactgcttttctccagctctgtcaactcaacctttcccaccatgagtcggcaactgaacatcaagtccagtggtgacaagggcaacttcagtgtgcattcggcagtggtgccaaggaaggctgtgggtagcctggcttcttactgtgcagctggcagaggggctggcgctggctttggcagtcggagcctctatagccttggagggaatcggcgtatttctttcaatgtggctggtggcggcgttcgggctggaggttacggcttcaggcctggctctgggtatggagggggccgggccagtggctttgctggcagtatgtttggcagtgtggccctggggcctgcatgtttgtctgtgtgcccacctgggggcatccaccaggtcactgtcaacaagagcctcttggcccccctcaacgtggagctggaccctgagatccagaaggtgcgcgcccaggagcgggaacagatcaaggtgctgaacgacaagttcgcctccttcattgacaaggtgggtctcataggaggaggatgaggcc

SEQ ID NO: 12702 - DNA, 571 bp, Homo sapiens
  MAP TO AL109943.18; EXPRESSED IN PLACENTA, SIGNAL = 0.7; EXPRESSED IN ADULT LIVER, SIGNAL = 0.57; EXPRESSED IN FETAL LIVER, SIGNAL = 0.55; EXPRESSED IN BRAIN, SIGNAL = 0.57; EXPRESSED IN BONE MARROW, SIGNAL = 0.56
ggcatctacaggaggctcaggggatgctggcagctgggtcacctttccagaatgaattgcaacttcccccttgggctctatcaacacttctttcgggagctctggctttctgtgggcccagatggatactgaaggatctttgacaaataatagtagaactgccaaagccaccaatagccaagccaattggaaaatcatggtggcctttatgtcacttgcatatttattaagcacctactggaaggcttaaaaaataagactgttgtttaaaaaagtgaaaaaatgctgttttgaaaataaagttgtatcatcataattccttttgaggttaatggtttgggttttgtggatcaaacatttttctttggttgcttatgcaaatcggactaaactttttctctgcacttggacaggtcctatctggcaatttacagataggctgacccatctgcaaagcaagttggttattgcatatgggtgataatgcaagtgagtaggagtggggttttggatggtcagggattggaaacatatgggttttatttaatgacgtttccaagtcagggtccaa

SEQ ID NO: 12703 - DNA, 578 bp, Homo sapiens
  MAP TO AC023114.3; EXPRESSED IN ADULT LIVER, SIGNAL = 1.3; EXPRESSED IN FETAL LIVER, SIGNAL = 1.2; EXPRESSED IN BONE MARROW, SIGNAL =   1; EXPRESSED IN LUNG, SIGNAL = 1.1; EXPRESSED IN PLACENTA, SIGNAL = 1.2; EXPRESSED IN BRAIN, SIGNAL = 1.8
ggctctgtcacttcgtaggcatgtacccttggctacaaattttttagttccaaatttcctaatatgccaaatggggctgaaacaccgtacgcacatggctctccttccagaactcctgccttcagacccaatatttatttaagagtaatgaagagtgagaataagtcaactcattccaccaacctgtgacttttatccaacattctattaccaagtgtaaaaagtgcgtgtacgacaaagtcctctgactttggaaagcttactaattgactgtactcccctttcaaaacagtccatttatgtagcacttttttcagtctcaaagttctttcccttaagcgatctcataaaccctaacaagtttgtcatagaaataattttcctgctacttacttacaaatcttccagccatgagatagccaatatcctcccgctctccctcccccaccccattggcatctgctacacacaaactcttacccagacacccattcacctgacttacatcgagcccatcttttttcttctgtgtctctagctgaactgccgtgagagacactgacggtgttgaggttgaa

SEQ ID NO: 12704 - DNA, 508 bp, Homo sapiens
  MAP TO AL133293.14; EXPRESSED IN ADULT LIVER, SIGNAL = 0.57; EXPRESSED IN BRAIN, SIGNAL = 0.62; EXPRESSED IN BONE MARROW, SIGNAL = 0.63; EXPRESSED IN LUNG, SIGNAL = 0.97; EXPRESSED IN PLACENTA, SIGNAL = 0.5; EXPRESSED IN FETAL LIVER, SIGNAL = 0.5
cacccatctgtcccattttctgccgactgtcctccggggccctttcctgggccaccaccttcggtttttaccctccactttttactgaaacacctgttaccttcctaagtccccgtgtccgttaacgaagctggtgacgacatgttcctcatggagtatctcgaggattaggcaaataccgaaaagctgttgcggcagggccaggtttgcaatccgtagctgtaattaaagattaaacgggtagctgtgactaaagattttctgaatgaatgaatgagtgaacgaccccatgggtatgccattttcttttccttatattcctctcagattccccgtcccccacactccttgtctctagggcacaatttttactatttttgaatgatggctgccctttggaaatgccctgggtctcctgagccagcctgcaagcctctctggtcttagaaaaagatccttcccgtgactccatctctcttccagctacagctccattcctttcctttcc

SEQ ID NO: 12705 - DNA, 526 bp, Homo sapiens
  MAP TO AC026236.4; EXPRESSED IN PLACENTA, SIGNAL = 0.48; EXPRESSED IN ADULT LIVER, SIGNAL = 0.51; EXPRESSED IN FETAL LIVER, SIGNAL = 0.47; EXPRESSED IN BRAIN, SIGNAL = 0.44; EXPRESSED IN BONE MARROW, SIGNAL = 0.47
tcaccctggaattgaaggacagagtatatgaaagtatgtccccacctccaaattcagactgtgctgtgggctttatgtgcatcatttctaacctgtcctcagccctgcaaagtggattgtcctggtgattgattgttgtataacaaaaccctaaaataaaaatattggcttaaaaattcccatcgtttattttgcatatgaatctggaggttgactgggctcagctgggcagtttctgctcagggccctcatgtgggtgcagttggatggtgactgagatagggtcatctcaatggtgtattcactcatgtgtctagatgttgtgctgggaagtctccacaactggggctggaagagcgggagcttcttgtccatctttcatcctctgtgttttctttttacatggggtctccacctgagagcctcagagtcctgggtttcttacaccatggctaaaggccccagagtgcaaagttgcatggccttttctaacttggccttgggtgccatgcagcatcacttcatc

SEQ ID NO: 12706 - DNA, 588 bp, Homo sapiens
  MAP TO AC008474.4; EXPRESSED IN FETAL LIVER, SIGNAL = 0.8; EXPRESSED IN PLACENTA, SIGNAL = 0.61; EXPRESSED IN ADULT LIVER, SIGNAL = 0.68; EXPRESSED IN BONE MARROW, SIGNAL = 0.72; EXPRESSED IN BRAIN, SIGNAL = 0.7
tttggttgcaagtaactgcgctgctcctcagaactaaccacatcaaaccagcgtgtcacctctgccaccgagagggcctgcttccgggagaagacagcacccctgcctctgaggacaccaagccgctgtggcgcaaacccttacctgaactccggtttcacaccaatatctttctgctgaagatcttgaaggcttcttgtgattttgttaaaggccgcatcctaacaacagattttaacgaaccttcaaatttctcaaaaagcacagaagaaggcttccatcttgggtgataataactgagaacctacctcacttgcctccatggtccccacgtatttaaagatcaggttgtaaatttcatgatggacgtatatctgtggaatcaacagaccccattcagggtgtgagcgggcaacagggtgtgcctcccagccactccgccccaccctcacctccactgcctgcttcatcaggttcatctgggcctcctgcttggcgagcattttctagagggcaagaaaagcacagtgaaagggcttggatttgcatgggggtgcaccacaattctccctctcagaagtcctgctg

SEQ ID NO: 12707 - DNA, 526 bp, Homo sapiens
  MAP TO AC010290.4; EXPRESSED IN PLACENTA, SIGNAL = 0.52; EXPRESSED IN BONE MARROW, SIGNAL = 0.62; EXPRESSED IN ADULT LIVER, SIGNAL = 0.53; EXPRESSED IN BRAIN, SIGNAL = 0.65; EXPRESSED IN FETAL LIVER, SIGNAL = 0.51
accacgcccttattactccccaaaagagttatctgcattggccatttgaggcaaaggggaatttaagtcggttgcctaacatttagcagtaaatcaatgacaaggtccttgcatcctcccctagtcaccacctcggtgtagacaaaggtgtatccatccccattctcctgtcattggggatcttttagaaacccaggtgtgcttgttgatcacttaccttcctgatactgattttgttctttgtctcctgtttatgccaggtgcactttgttccggacacaggaacagtggctcagattgtctataccgatgaccaggttcgccccccacagcaggtggtgtacacggcagatggtgcctcctacacatcagtggatggtccagagcacacgctggtgtacatccacccggtggaagctgcacaggcatgtgaagggttatctgttgataatttgtcaattaactaattaaccaattacttgtgtttactttctgtcagtcattgtgctaggtactggtgatgcag

SEQ ID NO: 12708 - DNA, 525 bp, Homo sapiens
  MAP TO AC025119.2; EXPRESSED IN BONE MARROW, SIGNAL = 0.69; EXPRESSED IN PLACENTA, SIGNAL = 0.86; EXPRESSED IN ADULT LIVER, SIGNAL = 0.81; EXPRESSED IN FETAL LIVER, SIGNAL = 0.87; EXPRESSED IN BRAIN, SIGNAL = 0.73
cccttctctcccaagtctccaaattcatacttaccatgatgcctgagaaacagattccttcaaaataccacacgtagttggtgagtttattgctggatgcataggaagtttgcccattcgggaaatacaataatatgttcacgattatactccaaagtgcaagcggaatcagcaaacaacttaggcagcctccacacttccgagaccccattttgccctgcttagaacctgcgggagatttcaagagtatacagtcacagaaagtctatttttcttcttcctacctgaccttttttttctctctctctctcttttttttttttttttttgagattacctaccacttccagggtcagagcccttcacttcatattcatgaggagacggggaattggaatatacccgcagccgacaatctcagtgtgaaatactggtttactgtttggagaacaatagacaatgatcaacaactgaagagctgagctggtcttcatcctgtgccaaaggaatgcggtgtttttcact

SEQ ID NO: 12709 - DNA, 531 bp, Homo sapiens
  MAP TO AC011652.4; EXPRESSED IN PLACENTA, SIGNAL = 0.69; EXPRESSED IN ADULT LIVER, SIGNAL = 0.67; EXPRESSED IN BRAIN, SIGNAL = 0.46; EXPRESSED IN BONE MARROW, SIGNAL = 0.97
ggtaccaggagtagaggggcactcctgtaaagatacctgaaaatgtggaagcgactttggaactgggtaacaggcagaggttggaacagtttggagggctcagaagaagacaggaaaatgtggaaaagtttggaacttcctagagacttgttgaatggctttgaccaaaatgctgatagtgatatggacaatgaagtccaggctgagatggtctcagttcccaacaagttcctcatctcatctcacctcatcttagcccaggctcagatggagatgagaaacttgttggggactggaataaaggtgacacttgtgatgctttagaaaagagactggtggcattttgaccttgccctagagatctgtggaactttgaacttgagatagatgatttaggatatctggaggaagaaatttctaagtgggaaagcattcaagaggaagcagagcttaaaagtttggaaaatttgccacctgataatgtgatagaaaagaaaaccagattttctggggagaaattcaagccagctg

SEQ ID NO: 12710 - DNA, 574 bp, Homo sapiens
  MAP TO AC022939.2; EXPRESSED IN ADULT LIVER, SIGNAL = 0.73; EXPRESSED IN BRAIN, SIGNAL = 0.7; EXPRESSED IN BONE MARROW, SIGNAL = 0.66; EXPRESSED IN PLACENTA, SIGNAL = 0.67; EXPRESSED IN FETAL LIVER, SIGNAL = 0.51
ctaggcaggttctcctctgctgaacacagggtgtttccaaaaacggagccaaaacagcagaagaaggaggaggaggagaaaggggagctaagtccagacaaggaggttctgacaaaagagaaagaggaactgaagggcgaggagaaattttggcagtctttttccgttcagaaattattttagacaattttttgtttttctcttgcaaagaaatgactttatcagagccttttttagaagcttctaagtaccattgaaaatagctctccctttggcctgaagtacaaaaataaataaataaataagaaaaaaaacacaggaaatagctttcccagtgattgtgtttttattttagagccggctttttctaactgagtgtgtcattatcttctatttatagatgaggaaactgaggcactgaaaaggtaaacaatcactcacccttactgagcacctattatacactaggcactgtccaaaacactttacaaaagagggagataagcctagagatggagaagaagcaaactagaaaaaattagagaaagacagcatgatggaacacattgcgagg

SEQ ID NO: 12711 - DNA, 588 bp, Homo sapiens
  MAP TO AC021115.3; EXPRESSED IN LUNG, SIGNAL = 0.97; EXPRESSED IN ADULT LIVER, SIGNAL = 0.85; EXPRESSED IN FETAL LIVER, SIGNAL = 0.69; EXPRESSED IN BRAIN, SIGNAL = 0.85; EXPRESSED IN PLACENTA, SIGNAL = 0.92; EXPRESSED IN BONE MARROW, SIGNAL = 0.68
ttgggaaggcatcacttaggaggctggcagaccatgagaaagtctcacctggaagcggtggaagtcctgcggcttgaagtcattgggggagcagccgcaccagtccacgatgtgcttgtactggcacttgcagcccagcttgcgattccagttggtgatgcgcaggttgttgtccaccatggtgtcgcagtgggggctgttctccaggaccgtatggaagaaggactgcaggggagagagggacccagcctgagacctctcccagcctcccacagatgaactggggtgggaaatggtgaacccttgctctgagttcatgtaagaactggttgtttaaaagaatgtggcatctcatcagaagctgggcggcttcctgtacagcttgcagaactgcaagccaaataaacctcttttctttataaattaccaagcctcagattttccttcatagcaatgcaaaaatgtataacacaactacctgactgtcaagggactcttatgttctctgcatgcatttgaggtcagctgcccatgtggtccaactcagagcgcaggcggatgctctgtccaacagacaaatcaaaggga

SEQ ID NO: 12712 - DNA, 560 bp, Homo sapiens
  MAP TO AC012480.3; EXPRESSED IN LUNG, SIGNAL =   1; EXPRESSED IN PLACENTA, SIGNAL = 0.94; EXPRESSED IN FETAL LIVER, SIGNAL = 0.71; EXPRESSED IN ADULT LIVER, SIGNAL = 0.9; EXPRESSED IN BRAIN, SIGNAL = 0.67; EXPRESSED IN BONE MARROW, SIGNAL = 0.71
ccaaaccctggagaaatcaggtagagagaaagaaatatgctccaaattttgttcacagtagtgtactttcttcaattgctacaagctgtaaatagctcacattagttttcttaattctgaaaatcaaaacaaaggattagcaacattttttgtgggtttttaaattttattttattttactttaagttttttgttattttattttattttactttaatacatgtgcaggatgtgcaggttggctacataggtaaacatgtgctatgctggttgatcggcaatgttgtaagcaaaaaagtcaaaaatgattacttcagtcttctcttagttcaggccatgcatgttctgcttgatattcatgaacattcaagctctccatgagactcctgaaagtttttcttctaatgtcacaatctccaaagttatcagaaccttgcattcaagaacacctgttagagtttcatagctgattataaaactaccttctaaagaggaccaaaaccaaacaacaaatgtccatagctgacaaaaagtgttagggcagccacagtcaaagacaa

SEQ ID NO: 12713 - DNA, 510 bp, Homo sapiens
  MAP TO AC015649.5; EXPRESSED IN PLACENTA, SIGNAL = 0.79; EXPRESSED IN FETAL LIVER, SIGNAL = 1.4; EXPRESSED IN ADULT LIVER, SIGNAL = 0.78; EXPRESSED IN BRAIN, SIGNAL = 0.67; EXPRESSED IN BONE MARROW, SIGNAL = 1.1
tggaaacagcaaggttagggccttccacaggcagaagccctgggggagttttgaggccactgagaaaaggttaatagaggcagtttcaaagctctcaggaaatggcatcaggcaagagctactcttcagagacaacaggcctgcctccatcccacttacctggttacaggtgttaatatctaccccattccgcaggtgatccaaagctttgtccaagttacctgatcttgctgctctcagaaagctggtagcagcatcggcctgtgaggaaaaacaacaggcggtgagtgtcctgggtgtattaatgacttctccaccccgttcaagtcccaggcccccgcagcagcccctgcatcctctgatgtggcaccctggtgcccacagtgacaccaggtgtgcacaggagcctgagagcccctggttggactgccttcacacccaggcctcccttcctttggttttttgttttttgttttgttttgttaagagagagtgttgctctgccactca

SEQ ID NO: 12714 - DNA, 569 bp, Homo sapiens
  MAP TO AL109930.5; EXPRESSED IN BONE MARROW, SIGNAL = 1.5; EXPRESSED IN PLACENTA, SIGNAL =   1; EXPRESSED IN ADULT LIVER, SIGNAL = 1.4; EXPRESSED IN BRAIN, SIGNAL = 1.6; EXPRESSED IN LUNG, SIGNAL = 1.3; EXPRESSED IN FETAL LIVER, SIGNAL = 1.2
gttgtagagccctcagtgcctgctagatgtcattttatttttctttttacctttatcactttgagggctttttcaagtctatggtctttcaggctcaattaattgtaactaagcctctgagacaaagtgcttgttgaatgtcttccactgttccgacacagaaacgcagcataagtcgaagttgcaatggacagcatacgtcgaaacttcctctgtgccagactccttgtggggactctcttctcatcgcctcctttagtcctcaccactgccctatgaggaagaatgtgctttttaacttcattttacagatgagaaaactgaggcccataaggcgaagttactctctcaagccagtaagcagtaggaattgggatttgcactcagcacccatttgatcccggagtccgctttcttgattgtactctctactgcctcaccttcaatggcttcctctaatggaaaagcctgccctcaccctaatgaatactctcagctgggcacagttaagggatgacctctgtgcatctaatgagttcatctcaatccctccccagggtacagatgtg

SEQ ID NO: 12715 - DNA, 503 bp, Homo sapiens
  MAP TO AC008739.5; EXPRESSED IN PLACENTA, SIGNAL = 0.56; EXPRESSED IN ADULT LIVER, SIGNAL = 0.58; EXPRESSED IN FETAL LIVER, SIGNAL = 0.78; EXPRESSED IN BONE MARROW, SIGNAL = 0.69; EXPRESSED IN BRAIN, SIGNAL = 0.77
tttgtgtgaccatcagtttggaaatttaaatgttccttaatacggtctctatgttatcagaggaaacctgctgttttgtgcatgcttgtaaggagtataaatggccaattaccttttgaaagataattttaaaatatgtatcaagcgtggaaagacacatgatcttacataaaggattctacctcctggaaggcatctcataaaacacttgaacatctgtgcagaaatccccatacctagcatgttcttggtgggcatgtacataatagcaaagagaaaaagaaaacagaagcagaagaatccaaaaaagcagcagcagcaggagaaggagaagaggaggaggaggaggaggaggagaaaaaggaggaggaggaggagaaggaggaggaggaggagaaaaaggaggaggagaaggagaagaagaaggagaagaagaagaagaagaggaagaagaagaagaggaagaagagtaaaaaggaaggtacacatacatgaaaaatatt

SEQ ID NO: 12716 - DNA, 559 bp, Homo sapiens
  MAP TO AC019184.2; EXPRESSED IN PLACENTA, SIGNAL = 0.56; EXPRESSED IN ADULT LIVER, SIGNAL = 0.77; EXPRESSED IN BRAIN, SIGNAL = 0.7; EXPRESSED IN BONE MARROW, SIGNAL = 0.69; EXPRESSED IN FETAL LIVER, SIGNAL = 0.74
ggcctggtggattaatgatgaacaggacatggcctttgcccatcaggagtcccagttattgtgacatacaggtaaatacacaaataattccaacagaatgagataaaggctaacagagggatataaaaagtatttctggagcatgaagtaaggcatagctaactgcaaaactaaatgaaaacagatgctaagggatgtccagtgtacactgcttgatgatgaagatgagggaagaggaaggaagaagaatggtaaaggaaagaagaggaggaagaaaaaaaagaaaggaggaggagaaggaaaaaagaagaaagaggaagaagagaagaaaaataaaaaggagaagaccattagcaaaatggaaaacaataataataatgcacctttgggtagaaatgttcccattcttaataaaataattatctccaagcatccaacgttagtcctggaaaaaagcaactcctggttatgggatggggggattggggagtaatgttactggctacgaagatggactgtattatccttgaattttaccacccctgtggtggttttaaaa

SEQ ID NO: 12717 - DNA, 576 bp, Homo sapiens
  MAP TO AC007325.51; EXPRESSED IN LUNG, SIGNAL = 1.1; EXPRESSED IN FETAL LIVER, SIGNAL = 1.1; EXPRESSED IN BRAIN, SIGNAL =   1; EXPRESSED IN PLACENTA, SIGNAL = 0.99; EXPRESSED IN BONE MARROW, SIGNAL = 0.97; EXPRESSED IN ADULT LIVER, SIGNAL = 2.6
tcagtgatggaaagacgtggcatggggggcgagcagagatgcaggaggggtggggcgtggggagagagaggcagtgtcatgggtcctaccacacggctgtggtgcgaccactcacctttgaggatgttgaggatgagggccagcacgggcccgctgagccgcgcactgggcatgtacagcaccgcgtctcccaggctgatgttcagcgggtgctcgatcagctcagcacagtagttgttcaggtcctcagctgtcacaatgccccctgcaatgggacagcagctcgaatgggcgctgggatggggctgcaccactgcgtggaggatggagctgcaccagtggtgttgggggcaggcatggctgcaccatggtggtggggaaaagcccgtacctaccagggaggacagagtgcactactggaggggtgggactgtgccctgggagggggccacaggcaacctcacctccttgggaacctcaccagctccggcactcctgtctccctgacactgctcaccacccgacagctgggctggggccacctgccctctgcctgcttggcttactggcttcctg

SEQ ID NO: 12718 - DNA, 504 bp, Homo sapiens
  MAP TO AL157392.2; EXPRESSED IN LUNG, SIGNAL = 0.85; EXPRESSED IN PLACENTA, SIGNAL = 0.71; EXPRESSED IN FETAL LIVER, SIGNAL = 2.8; EXPRESSED IN BRAIN, SIGNAL = 2.3; EXPRESSED IN BONE MARROW, SIGNAL = 0.76; EXPRESSED IN ADULT LIVER, SIGNAL = 0.92; EXPRESSED IN HELA, SIGNAL = 3.1
cggctctccaaactgcttacctgaatatatttccgctgagtttcgtcatttaaaacatgtgcaacatgcttggaaaaaatcttttctctgccagttctggcatggataccaaccatagtgacaccgatgggccaaggcgcatttccaatggccatctgaagataagcatcatttgcctgaaaggaaagtgtaagaagaaatcagaaaggcgaaaatgttgtactggctcaaattcttactgaaagtatttcacagccctttatgatgtaattttcgtccaccttttgggcacatggaaaatattaccatgactgttattcaaacaaaacagattaaaatacagggtaacagactgccctgcccaggaccaccaatgtccatggaaaaaacagaaaccaaagctaggttgtgagtaaaaaaaaggcaaacattcctttgcagcctttgtatgctggaaattaatatgttgcagatctggaattaccaggtaggcacttcaatgca

SEQ ID NO: 12719 - DNA, 564 bp, Homo sapiens
  MAP TO AC010458.2; EXPRESSED IN BRAIN, SIGNAL = 0.53; EXPRESSED IN BONE MARROW, SIGNAL = 0.62; EXPRESSED IN PLACENTA, SIGNAL = 0.6; EXPRESSED IN ADULT LIVER, SIGNAL = 0.54; EXPRESSED IN FETAL LIVER, SIGNAL = 0.58
agtgcctgccacataggaagggctcaaaaaataatgttgggggcttttacaacgagatgccttactggggattttttttttctttgcagagtttgtgaagatgatgtctcgctgaggaggtcctggaagctccagaccctctccacctggtcaacatggagcaagcgcttgtggagaaccaaagcccaaaagccccagatcgccttaaagcagagagggagggcaggcgggagggagggcattggcatgcggcgctgtgcatggggtgagacccagagcggtatctttgccaggatgggggcgtctgcagaactagattaagaaggaagagtctgtggatggaaataggaagcgtgggagggtccagttgccacccccaaaaattccaatgattcttgacatcttttcacttcacgtagtcctaagtccctgtgacctgccagagtctcttccccagcttccccttgggtgaaaatagtctcttctcctgttgggtatcaaaaggttcagaacgtagtctctactcttcccctgcctgcatcaactgttgcaaatcccgtttct

SEQ ID NO: 12720 - DNA, 520 bp, Homo sapiens
  MAP TO AC019223.2; EXPRESSED IN FETAL LIVER, SIGNAL = 0.8; EXPRESSED IN BRAIN, SIGNAL = 0.56; EXPRESSED IN PLACENTA, SIGNAL = 0.73; EXPRESSED IN BONE MARROW, SIGNAL = 0.74
ggaatgtattccccattcccacattccagatggcatcacctcagcccaggagctcacttctgtaagtgacaccacctcagatgacatcatcccagagcaagacttcatctttggaaattactttgcaccctgtgctggagatgtatttaccccagacattaaaacctctattccagtaatgtccatggactgcttctcctaaggtgctaaaaaattgtacacagaacatttattgctcttctttttttgatattagggattctatttgttttctgagctcacagactgtttagcacatgatgttggtaaactccttgctctctaccaaaacatgcactcctacacacccatgcacagagggaaatctgggtgaggttactactatctgttccattctaaaaagtcagtagatatgattgccttccccaggaggcaaccacctcatataagtaagtcccccggagaaaaaactcccagtacttcccacttctagctttctaccaaggcctccatatgatgt

SEQ ID NO: 12721 - DNA, 544 bp, Homo sapiens
  MAP TO AL136308.4; EXPRESSED IN PLACENTA, SIGNAL =   1; EXPRESSED IN ADULT LIVER, SIGNAL = 0.56; EXPRESSED IN FETAL LIVER, SIGNAL = 0.84; EXPRESSED IN BONE MARROW, SIGNAL = 0.95; EXPRESSED IN BRAIN, SIGNAL = 1.1
actgagggtggttcatggaggctttgagagatagggtcagaagaatcagccactcattatctggggaccatgattcttgaacactttagatagcatggtgttaagcaatcagcctgcctggaatggaattaatatttctgctctgctacctaccaaatgtgtaacattttcaagtttattggaattttatatgcttcagtttagtaacgtaaaaaataaaaatagtggtgaaacctatcccatgaagttactgtaatgtttaaatgagttaatagatgtaaactaaaaatattatctggaaaataacaaccactccataattgttagatactatgacatcaccaccaccaccaccaccaccaccatcatcatcatcatcatcattttaatcttatggttaatgtatctttatgatcaacatttctctgttttctgcaactttatctttgagatgtccattttgctcagaccacttaaccatttcattttgtcttagtcattattttcccttttaatttttccatgtttttcctttctttcgccc

SEQ ID NO: 12722 - DNA, 539 bp, Homo sapiens
  MAP TO AC012428.4; EXPRESSED IN LUNG, SIGNAL =   1; EXPRESSED IN PLACENTA, SIGNAL = 1.4; EXPRESSED IN ADULT LIVER, SIGNAL = 0.67; EXPRESSED IN FETAL LIVER, SIGNAL = 1.3; EXPRESSED IN BRAIN, SIGNAL = 0.58; EXPRESSED IN BONE MARROW, SIGNAL = 1.6
actttgtggacctcaccctgaattcttgctcaagatccaagagccctctcttggggtctgaactgggacccctttctggtaacacttagattaggtgatcagaaaagatctttctgatgaggtatgtgatgagagacatgaagaaattgaggaaatgtgtcatttggatgtctggggctaaaggcatccaaggcagaaggaacatgagtgcagaggacttgaggtgggggtgaccttgacacattcaaaaaggagaacatatggtgtgtctggagagaaggaggaatagcatgtaagaaataaacttggagatgtggttgggatcagatttcataagacccagcaggccatcgtgaagacactgggtttaagtctgagtagaacagaaagacatgaaaggatttgagcagaggcatgacttgtaactggctcattaaatagtgcctacactgggatgagagtagccaaactggaagctgttgaacattgaatgtctgcatggaggctgacagtaacactgtgtgctgtgccctatgcta

SEQ ID NO: 12723 - DNA, 556 bp, Homo sapiens
  MAP TO AC025221.2; EXPRESSED IN PLACENTA, SIGNAL = 0.52; EXPRESSED IN FETAL LIVER, SIGNAL = 0.58; EXPRESSED IN BONE MARROW, SIGNAL = 0.64; EXPRESSED IN ADULT LIVER, SIGNAL = 0.77; EXPRESSED IN BRAIN, SIGNAL = 0.6
tgcactgccatggttcatacagtaacatttacaagttaggtgacttcaaattacagaacaaattaactttttttctcacaaacaaaacacctgacttacccttgaaggaaataatactgaaatgaaccagattgttgcagattaagtttacagtatttatcagaatcatcttctctttctgttggattttcccaatccagagaacggaatttttctctattaaatgtttctccaggaaatgggtaatttgtatacacggtaactgcttttccctgtaaagttgggcctaatcggaactgtagctcataccctaaataaaaagcacatgttaataaactcatcgtaggacttaaattaccacattgaaaaacagatgttttatttaaagtattaaaaaaccttgatttttcaattatgtttaaaataactccgcaaacctaatgctgttttggcactactttgtattccaatttagctgaatttcacattttagcaagtatagtaaacatcatagagctgtctgctctgtaatgtctctttctccttcccctggaaa

SEQ ID NO: 12724 - DNA, 572 bp, Homo sapiens
  MAP TO AL139187.4; EXPRESSED IN PLACENTA, SIGNAL =   1; EXPRESSED IN ADULT LIVER, SIGNAL = 0.8; EXPRESSED IN FETAL LIVER, SIGNAL = 0.69; EXPRESSED IN LUNG, SIGNAL = 0.86; EXPRESSED IN BRAIN, SIGNAL = 0.79; EXPRESSED IN BONE MARROW, SIGNAL = 0.67
atggtttttgaacacccagcaaggtatgatagcaaaactaaaagcccaaacaaaaaatgttggacccatatcccagacaacctcttcagcttctgacgttgtctttcccaaggtgggcgacgggaacccgctgaagctgtggaaggcttctgtggaggtggaagcacccccctcagtggtcctgaaccgcgtgctgagagagcgccacctgtgggacgaggactttgtgcagtggaaggttgtggaaactctagacaggcaaacagagatctaccagtatgtgctgaacagcatggctccccatccttccagagactttgtggttctcaggtgagcctgactctagggtttatgatgttctgttccaaaggcaggacgcgaactgtagatgtgagcacttctcctggtgtctcccaccaaagtccagcctccacggggaacactaagccggctcttgtttccctcagtgacatctgagttttctgtgtcgatgcccgacttcctgtgtcttttcacccagcctacagctctgcctgggctctctgattgcccctctccttgtggagcacaca

SEQ ID NO: 12725 - DNA, 549 bp, Homo sapiens
  MAP TO AL109614.27; EXPRESSED IN PLACENTA, SIGNAL = 0.66; EXPRESSED IN ADULT LIVER, SIGNAL = 0.65; EXPRESSED IN BRAIN, SIGNAL = 0.63; EXPRESSED IN BONE MARROW, SIGNAL = 0.64; EXPRESSED IN FETAL LIVER, SIGNAL = 0.53
cgtgactgccaatgtttcacacctctcaggttcatgaccacaaagagatcgaggtaggagcgcaggaacttggttaagcatcagggctacttgcttactcattgttttgtctaatttctctgtcttcagtgtcctcacataggaaatggggataacaacagcaccagcttaatgctgtgagggtcaaaggagatgatgtccatcaagtacttacctcggggatggacactaagtgctccatacatgttatgagctctctctgttcccaagtccagaaatctagacaaaagcttccattggcccagttgagttggggttcacctctggcaaatcaatgatggccattaaagtgggttgtgcaataaatgagaaggtgaatttcaaagcaaataggttggggtgcagaatgatttccaagaaggattggcgcagttctagaaaaagaacagaggtcatccctctggctgccagcagaaaagggtttgatcaggccccaacagcctggaggtagggaagtacctaagaggcaccacagttgtccaggtgaga

SEQ ID NO: 12726 - DNA, 551 bp, Homo sapiens
  MAP TO AC026412.1; EXPRESSED IN LUNG, SIGNAL = 0.93; EXPRESSED IN ADULT LIVER, SIGNAL = 0.76; EXPRESSED IN BRAIN, SIGNAL = 0.75; EXPRESSED IN BONE MARROW, SIGNAL = 0.75; EXPRESSED IN PLACENTA, SIGNAL = 0.81; EXPRESSED IN FETAL LIVER, SIGNAL = 0.62
ccagctacaagcattagccctcaaaatacctttgttttccaaaattatgtgccaccgtttcttttactacaaacatttcttcctggtaaagaggagaaaataacttcagaaggtactaggcgctctgggctgagctgaccagccccaagatgggagcaggggtgtccaggaaggcaacaggcccctgggcccctgtgtgcagactgcacatcacctgtacccctggggagtggcagctggccacatgtgtggagaggccaggctcagccccgccgtcccacggcacccagaaagccaggttgcagaggctggctcccaggagcacggccctccctgggccctcggagttagtacactgtctccagaaacaccagccccctgtcccgtagcagagcggtctcttgcgggtctcaggccttccagcctgactgtccacctttgcagccagctcccctcccttgccgtctgctaggatgacctcccacattgcaagtggaccacgtgggagcccttggccatttgagaggtggtgctcagtaagagggcacgtc

SEQ ID NO: 12727 - DNA, 500 bp, Homo sapiens
  MAP TO AC010721.2; EXPRESSED IN PLACENTA, SIGNAL = 0.82; EXPRESSED IN ADULT LIVER, SIGNAL = 0.66; EXPRESSED IN FETAL LIVER, SIGNAL = 0.61; EXPRESSED IN BRAIN, SIGNAL = 0.63; EXPRESSED IN BONE MARROW, SIGNAL = 0.59
ttcactttactctgtggactcaccctgaattcttccttgtgtgagatccaagaaccctctcttggggtctggatcgggacccctttctgataacacaaccgtgaagttatttgttaactgagaagaaacaagcaaatggggagagttgaagaatcaagggaatgaaggaaaaattaccatggtggtcttatgggaaaaaaaatggggtgggacagatcagaggtgaaaggattagcctgagaatgagaaagaacactttcagataaaatttggaggtaaacaacaatgtgcatggtgctataaatgcagatttggtgttaggtggagagctaaaagttttgtggatagagcttttaacttttattaaaattattctactcagactattcatttctacattctattatggaatataagggaaaatgtaaataagggctcttgcaaatgtttcagggatttcccagatattttattccaaatttcttaagattgaaatgcat

SEQ ID NO: 12728 - DNA, 550 bp, Homo sapiens; identical to SEQ ID NO: 12312
  MAP TO AL137225.7; EXPRESSED IN PLACENTA, SIGNAL = 0.81; EXPRESSED IN ADULT LIVER, SIGNAL = 0.94; EXPRESSED IN FETAL LIVER, SIGNAL = 0.76; EXPRESSED IN BONE MARROW, SIGNAL = 0.69; EXPRESSED IN BRAIN, SIGNAL = 0.59

SEQ ID NO: 12729 - DNA, 585 bp, Homo sapiens
  MAP TO AC010363.3; EXPRESSED IN PLACENTA, SIGNAL = 0.71; EXPRESSED IN FETAL LIVER, SIGNAL = 0.69; EXPRESSED IN ADULT LIVER, SIGNAL = 0.76; EXPRESSED IN BONE MARROW, SIGNAL = 0.84; EXPRESSED IN LUNG, SIGNAL = 0.87; EXPRESSED IN BRAIN, SIGNAL = 0.77
agaggcagggaaggattctcccctagagcttccagaaggagcacggccctgtcaacaccttgatttcagacttcggacctgtgaagaggatactgtgagaggataaatttcagttgttttaagacaacaagtttgtgctaatttctgacggcagccccaggaaatgaacatggggtaataacagtatgtacctcatcagattatgagaactgaatgagctgtatgtggcaagtgtctagaacagtgcctgccaaatagtgaacattcaaataattttaatttttacccatgtactaggcattgtactggatcctgaagagtacaggggaagaggcagtcttcagagatcctcaagataaagacggagcctgggaagctgagcaggtgagggatcagaaggcgggaagtgtgctcaggggccgtgtgcatctcccaggtgccaaaaatagtggactgcagctccacagctgccaccaataaagaaatcaataagcctgacatctgcttaggtttttaaagatgagcagtaagtccagagaggagttaatgcaattctttccagtaccttcctctccttgtgccatc

SEQ ID NO: 12730 - DNA, 557 bp, Homo sapiens
  MAP TO AL137225.7; EXPRESSED IN ADULT LIVER, SIGNAL = 0.81; EXPRESSED IN PLACENTA, SIGNAL = 0.83; EXPRESSED IN FETAL LIVER, SIGNAL =   1; EXPRESSED IN BRAIN, SIGNAL = 0.76; EXPRESSED IN BONE MARROW, SIGNAL = 0.78
attctctctggccacattgcctctcatctccaaccagtacatagaactggacatcaacgtgagtaaccagaggggcctctcctcctgctgggggtggctagataggggatgccggatcaaggcaggtgggtgagcaccttaagaccctcctcggccctgtttcctgcccctgcagcctatcgtgaagagtgtagctggtgatatcattgacttccccaagtcccgtgccccagccaaggtgccccccaagaaggaccacacatcccaggtgatggtgccactgtacctcttcaacaccacgtttggactcctgcagaccaacggcgccctcgacatggacatcacccctgagctggtgagtgtggtgcccgggggatggggatgggggctccttgccctgctgtgccttggcattactagtgttgacctaggccctgatcagccttgctgagccctcctctctataataaaagggagttgaacaagtttagagtgtgtacactgctgttctccactcctatacttaggggagacattgctaatcgatcgtggtcctc

SEQ ID NO: 12731 - DNA, 569 bp, Homo sapiens
  MAP TO AC015529.3; EXPRESSED IN BONE MARROW, SIGNAL = 0.61; EXPRESSED IN FETAL LIVER, SIGNAL = 0.91; EXPRESSED IN PLACENTA, SIGNAL = 0.66; EXPRESSED IN BRAIN, SIGNAL = 0.46
tcactattgcttcctttggttgttcatatgtcattgtctgtctgagtgatgctccctgctcaagcaagggttgaaggatctccatatcataagtcaaatcatttagttgctcactcattttgtccatcttattgtccattggaaagagaacttcagccaatgtttgatttaacacatgtaaattctcttctgtgtccttaagttgaaatttaaaatcatttctgcatttggataacatgtcttcacattcacctctgagagactctttctccatctccaaagagacggtgagattgttaatcttgctttcttgaatgtgcaaatcttcaaacatttgcagcatcatcaaactctgcttctttatattttcatgtaaagtagacatgtactcagtgacattattgctaactgactcagcagctggagcattcttctggtctgatacctgttcagttgataaaagctgctcatgtacttccttcaatttagaaagagttttattgagggattcataatacagaatgcttcttgagtgttcctgttctagagcaccttctaaatgagtctgc

SEQ ID NO: 12732 - DNA, 540 bp, Homo sapiens
  MAP TO AC010492.4; EXPRESSED IN FETAL LIVER, SIGNAL = 0.74; EXPRESSED IN PLACENTA, SIGNAL = 0.52; EXPRESSED IN BRAIN, SIGNAL = 0.51; EXPRESSED IN BONE MARROW, SIGNAL = 1.7; EXPRESSED IN LUNG, SIGNAL = 0.97
tgagaggacactctggggtcccagccccaggctctgccctcaggaagggggtcggctctcaggggcgtctccctctcacagcccagccctggggatgatgtgggaggtgggagccccatttaacacggtgcctctttctctcctaggagcctacagcaaacccaccctctcagccctgcccagccctgtggtggcctcaggggggaatatgaccctccgatgtggctcacagaagggatatcaccattttgttctgatgaaggaaggagaacaccagctcccccggaccctggactcacagcagctccacagtcgggggttccaggccctgttccctgtgggccccgtgacccccagccacaggtggaggttcacatgctattactattatacaaacaccccctgggtgtggtcccaccccagtgaccccctggagattctgccctcaggtgagggagccacggccttgtctaacacactttcggggcagctgacaggttgtggggagtttggctggtgactgaatctggaaaggaccca

SEQ ID NO: 12733 - DNA, 585 bp, Homo sapiens
  MAP TO AC008431.2; EXPRESSED IN ADULT LIVER, SIGNAL = 0.69; EXPRESSED IN BRAIN, SIGNAL = 0.62; EXPRESSED IN BONE MARROW, SIGNAL = 0.59; EXPRESSED IN PLACENTA, SIGNAL = 0.6; EXPRESSED IN FETAL LIVER, SIGNAL = 0.55
atttgacctattgggggaccccaaatacacatgttttgaaaaagtgctttaggaaattatcatatgtatttgacacatgaccaccctgccacctcctactggacaatcactgatgttatctaactctttccttttatacatggcccacagaacaaaggtgattgatttgcctaaggctgcacagctagttaatagtagagccaggaagagacttgagaacattttgattcccaaatgagcgcttcttctgacattaccaatgcttcccctttaactcttgttcttctggaaatgatcatcatcatcatcatcattatcatcatcatcatcttcaccagacattctactggccacattacataaaattatctctcgtatttgcaacagttctataaggcaagtattatctccatttctcactccctgtccacattgccaacctttgcatactatgcatcctgagactcaggatctgccatcaccaagttcccctatatcttttgtcccttttcataaggtctctttatatcttgccttaatggaaatttggctgtccccttcatctgcagcctctcaaatggagac

SEQ ID NO: 12734 - DNA, 541 bp, Homo sapiens
  MAP TO AL133316.2; EXPRESSED IN PLACENTA, SIGNAL = 0.57; EXPRESSED IN ADULT LIVER, SIGNAL = 0.51; EXPRESSED IN FETAL LIVER, SIGNAL = 0.52; EXPRESSED IN BRAIN, SIGNAL = 0.87; EXPRESSED IN BONE MARROW, SIGNAL = 0.44
ggaggtgctactgtgaaggctgtaatggagcagtcaggggcttgggtgcagctttcccagaaacctgatgggatcaacttgcaagagagggttgtcactgtgagtggagaacctgaacaaaaccgaaaagctgttgaacttatcatccagaagatacaagaggatccacaaagtggcagctgtctcaatatcagttatgccaatgtgacaggtccagtggcaaattccaatccaaccggatctccttatgcaaacactgctgaagtgttaccaactgctgcagcagctgcagggctattaggacatgctaaccttgctggcgttgcagcctttccagcagttttatctggcttcacaggcaatgacctggtggccatcacctctgcacttaatacattagccagctatggatataatctcaacactttaggtttaggtctcagtcaagcagcagcaacaggggctttggctgcagcagctgccagtgccaacccagcagcagcagcagccaatttattggccacctatgccagtgaagcct

SEQ ID NO: 12735 - DNA, 567 bp, Homo sapiens
  MAP TO AL133284.7; EXPRESSED IN PLACENTA, SIGNAL = 1.1; EXPRESSED IN ADULT LIVER, SIGNAL = 1.2; EXPRESSED IN FETAL LIVER, SIGNAL = 1.2; EXPRESSED IN BRAIN, SIGNAL = 1.2; EXPRESSED IN BONE MARROW, SIGNAL = 1.2; EXPRESSED IN LUNG, SIGNAL = 1.1
ttcttggtttgatgggaagctctttgttttggctaaaatactatgggcttgggtggtagaacatcctgagtttgaattccagctactgcttaccagatttgtaattaggtcaaataactcaatatccctgagccccagttttcttgcatgtataatagggatattaatccccattcacaaggttgtcatgagagatatgtgaaacaccaggtcgtatgcctagtcagtgcctgacatattagtaactgcttcttaggggactgatcagtcctccttcctcttttcattgtccacagctgcatctggccactgctccacaccggcctcctggatataggatgaattccctgtaaaagggagagttcaaagtgaggccaaatggcacccaaatgcaaatagaggggtggggcgctcaataaccttttgggttcattgaaacttataattctgctactttgtaaaatgcttcccaggttgggaaggtcagtgttgggacaaagggccactcatgagcttcctcctccctcttcctctccccatcaccagtgccctgagcttttctccttt

SEQ ID NO: 12736 - DNA, 544 bp, Homo sapiens
  MAP TO AL139186.3; EXPRESSED IN ADULT LIVER, SIGNAL = 0.8; EXPRESSED IN BRAIN, SIGNAL = 0.61; EXPRESSED IN PLACENTA, SIGNAL = 0.8; EXPRESSED IN FETAL LIVER, SIGNAL = 0.67; EXPRESSED IN BONE MARROW, SIGNAL = 0.64
accactttccccatttttcctactcctgcttacctggtttccagcatctctttgatccagtttccctgagttgttagctacttctgccaagcccaaagagctataggcctctgtgagcccatcctgtccctcataggctgggcaatgattcattcccatcggtttcaacataccttggggtacttacttctttccttgggaagacttgtttctccttcatctatttctgatgagcctgtgataactgaatttggcctaatctttcaaatctgtgtatataattcatgtgggacaatgaataagaaaaaatatcacattttcttcttataagattttaaaaaatcattgatacacacttttggccattatatttgacaaaattgctaaagatatatttaaccaaaaacactcttatagcatatgaaatagtatatttgatttatgtattaacatcattagcactttcaattgatcatgaggtcctgtatgaaatggctatgtattacataaacttgtgtttttagggtctagcataaggcctgga

SEQ ID NO: 12737 - DNA, 502 bp, Homo sapiens
  MAP TO AL161646.3; EXPRESSED IN ADULT LIVER, SIGNAL = 0.51; EXPRESSED IN FETAL LIVER, SIGNAL = 0.5; EXPRESSED IN PLACENTA, SIGNAL = 0.56; EXPRESSED IN BRAIN, SIGNAL = 0.62; EXPRESSED IN BONE MARROW, SIGNAL = 0.65
ttcttttgcaatacccctgcttttttcattctaagcatttattgcaatgtataaaatgtatatgtcttttcttgttctttcactggcttttgccccactagcctgtaagtttgtgaggacaaagactatgtccttgttcactgctatattctcagcacattgggctatacctaagacagttaagacattcagtaactatttgttaaattaataaccagactttttttcttgctctccctgtttttaagtccaagattcatttactggacacatatttgagaaactttccacacacatcaaactcagagagaagggagaaataatgaaactgcaagaaaccaatcatcaaattttcaaagtttgggcttgatacgtattcacaaataaccaagggacagccacagaatggtagattaataataaatcactttcactgtgattaatgttgctattttaccaaacattgtcatttagtctcttttgacgggacaccaccaaatag

SEQ ID NO: 12738 - DNA, 514 bp, Homo sapiens
  MAP TO AL161747.1; EXPRESSED IN PLACENTA, SIGNAL = 0.91; EXPRESSED IN FETAL LIVER, SIGNAL = 0.83; EXPRESSED IN BONE MARROW, SIGNAL = 0.82; EXPRESSED IN ADULT LIVER, SIGNAL = 0.99; EXPRESSED IN BRAIN, SIGNAL = 0.54
tcttgccctttgttttggaggtaccagatgtttgctctgccctcaaatgtaccatcccaatagcaaggagtactcacttgagcttactcttgcacgtcccatcacagtagcaaggagtactcacttgagcttgctcttgccctttgttttggaggcaccagatgttttactcttctttggcttctcctctttcagcctctccccagcactcttcttcctgcgtttcttctcgccttcctcctctggccgaacgctgggcaactcgtcctcatttaagactcgaggtatgttctgctcaccgcgggcacgggctctcgcaatggcctctgctacaatccgatttgctttctcttgcttcttctggtgttccaatctgcggttttcctccattcctgtctttccccccgaatgaggagcagagcttgctggtgatgacaaagctgccacttcactggcactcagaactttaactacagagagcccagaagaggccccttgggaagagccagcctat

SEQ ID NO: 12739 - DNA, 502 bp, Homo sapiens
  MAP TO AC019042.3; EXPRESSED IN PLACENTA, SIGNAL = 0.65; EXPRESSED IN FETAL LIVER, SIGNAL = 0.57; EXPRESSED IN BONE MARROW, SIGNAL = 0.48; EXPRESSED IN ADULT LIVER, SIGNAL = 0.65; EXPRESSED IN BRAIN, SIGNAL = 0.53
cacgggaaagaatgtatgcctgaagtttctacaatttgcaaaggtgatgtaatattgtatttaataatattctaaaaaaacaaattatatgtctcaagaaaaatatattaagaatatatgctgtttatgtaattcatttttaacacatagcaaaaaagaactatctagtaaaaggcataatgcacatttgttctattttttctttaaagttgaatccttgtttaaaataatcagagaaatatggttctcccacagcttgcagtttcttgcttttgatacggaagcatcacatgatatactccgagtctgggacggtccaccagaaaatgatatgcttttaaaggaaattagtggatctcttattcctgaaggaattcatagcaccctcaatatagtaaccatccagtttgacacggatttttatattagcaaatctggatttgcaattcagttttcaagtaagttttttcaaaaaatttcttcaatgcaaaataggaaggtg

SEQ ID NO: 12740 - DNA, 561 bp, Homo sapiens; identical to SEQ ID NO: 8613
  MAP TO AL139296.2; EXPRESSED IN PLACENTA, SIGNAL = 0.54; EXPRESSED IN ADULT LIVER, SIGNAL = 0.74; EXPRESSED IN BONE MARROW, SIGNAL = 0.55; EXPRESSED IN BRAIN, SIGNAL = 0.97

SEQ ID NO: 12741 - DNA, 561 bp, Homo sapiens
  MAP TO AC024972.2; EXPRESSED IN PLACENTA, SIGNAL = 0.51; EXPRESSED IN BRAIN, SIGNAL = 0.7
gcaagtggatatttggacagctttgaggccatcgctggaaacgggtatatcctcacataaaaactagacagaagcattctcagaaacttcttactgatgcttgcattcaactcacagagttgtacattccttttcatagagcagttctgaaacactctttttgaaggatctgtatgtgcaaatttggagagcttccaggcctatggtgaaaaaggaaatagcttcacataaaaactggacagaagtattctcagaaacttctttgtgatggatgtactcaactcatgaagttgaacttttcttttaatacagtagttttgaaacactctttttgtagaatctcaaagtggatatttggattgctttgattctttcgttggaaatgggaatatcttcacataaaaactagacagaagcattttcagaaacttctttgttatgtttgcattcaactgacagagttgaacattccctttcatatagcagttttgaaacactctttttgtaggatctggaagaggacatttggagtgctttgaggcctgtggtggaaaaggaaac

SEQ ID NO: 12742 - DNA, 554 bp, Homo sapiens
  MAP TO AC013764.3; EXPRESSED IN LUNG, SIGNAL = 0.92; EXPRESSED IN PLACENTA, SIGNAL = 0.93; EXPRESSED IN FETAL LIVER, SIGNAL = 0.81; EXPRESSED IN BONE MARROW, SIGNAL = 0.7; EXPRESSED IN ADULT LIVER, SIGNAL = 0.92; EXPRESSED IN BRAIN, SIGNAL = 0.63
attcacagaaccaaaacggcctcacttgctcaggatgaaaatatctaatcctacgcagccgaccccaggggaaatttctcccataggttctcattaagatgctgttatggaatgtaatgagcaacatctttaaggaaaactttgtgccaaggcagcaagcagttgcacaggtctgcttcttgcagcagcctccaagccttggggcttgagcaaaccacctcccatccttggggaccagaattgttggatttgggcacgcagctctgctacatcgtgccagatttgaaagcaagcagtgagatagtttgttatgattttttaagctgcagaaccctgtattcaagtgaagatttacttgggtgtgggaatcacagaaggagaagcaggttcagcatggtgaagagggtgaataaagtgacggtgtgagggatgctgatgcagggcaggagacgggaggaagatctgggctgcactggtggtgaagactggagaatggtcagcatgaaggtggaggctgaaacaatgggagaagagctgacccagctaaggaggtg

SEQ ID NO: 12743 - DNA, 571 bp, Homo sapiens
  MAP TO AC010458.2; EXPRESSED IN BRAIN, SIGNAL = 0.68; EXPRESSED IN FETAL LIVER, SIGNAL = 0.65; EXPRESSED IN PLACENTA, SIGNAL = 1.2; EXPRESSED IN ADULT LIVER, SIGNAL = 0.6; EXPRESSED IN BONE MARROW, SIGNAL = 1.1
aaactccatcatctcgtggctatcatcattgtcattgctgatataatctatttctgcttctattcagtttgacacgaatggagatggggagatcaccctggtggagctacagcaggccatgcagagactcctgggggagcggctcaccccccgggagatctctgaggttgtccgggaggctgatgttaatggagacggcacagttgactttgaaggtgacattgacggggcgtggtggggagcgggggcagccaccgcaggaatccacttccaactcactgtcagattttccaagttggccactccttctcactcctctccaagtttgagaatggaagcgggtggcaggttttggaagcatttgttctgtccctttcttcccaggctattcatttcaaagagctgggtgtcgctcacttctggtggctccgaggaacacctcagccaaggccctttccttcccatgctcaggacgcccttccgccttgcccattccttgttagtttgcagggcaccttttatcctaggaagaacttgtcccatcagaaagagactggactggctagcagct

SEQ ID NO: 12744 - DNA, 550 bp, Homo sapiens
  MAP TO AC019221.3; EXPRESSED IN LUNG, SIGNAL = 1.1; EXPRESSED IN BRAIN, SIGNAL = 0.85; EXPRESSED IN BONE MARROW, SIGNAL = 1.1; EXPRESSED IN PLACENTA, SIGNAL = 0.9; EXPRESSED IN ADULT LIVER, SIGNAL = 0.89; EXPRESSED IN FETAL LIVER, SIGNAL = 0.86
ttcttcatgtctgccagtgcgtccaggacacaccctgggcctcttgacacccccacccacacaggcacacattgccccttagaggacaggattggtgcaaccccccatgcccccggcagcgtgctgggcctgtgcataggtcaaggtctgttgagagtgtgagaaatattttctgttagagacacgaatatgtttcagccgcaacaggctgcgtttcagccggaagagtgaaagggcaccttgaaaacgcaagtttatgaatatgtttctgtactttcagaccatcatcaaagaggggatgctgaccaaacagaacaattcattccagcgatcaaaaaggagatactttaagcttcgagggcgaacgctttactatgccaaaacggcaaaggtgaggccccatgcaggaaagcacacgcgaggacatcacaggagccgtcccaggggaggaactgggggtgctgagtccttgtgtgggaaaagcttcaattctcagatctgttattgccagtgagttttgtaacactccacgccgtcaggttttacttgt

SEQ ID NO: 12745 - DNA, 514 bp, Homo sapiens
  MAP TO AL139187.4; EXPRESSED IN FETAL LIVER, SIGNAL = 0.85; EXPRESSED IN PLACENTA, SIGNAL =   1; EXPRESSED IN ADULT LIVER, SIGNAL =   1; EXPRESSED IN BONE MARROW, SIGNAL = 1.1; EXPRESSED IN LUNG, SIGNAL = 0.94; EXPRESSED IN BRAIN, SIGNAL =   1
caaaggggcagaaaactcagcttatgaccagaaaagcgggtaccagtcagtagttctccatctcgaggggtagatgttctgcatctgtttgatgaaatcattacttcactgggggctggaaccaagaggttcaagagggtctattcagacacagccagtctggcatatttttctatttgtacgtatgctataagccacatatgtacacagatatgatcatacatatctttggctcatccacagtgcctgggacagtgagggcctggtgcatttgatgcaggatttttcttggccccttcaacagactcatagaaggggcaccccacctattcggtctgccatgctcaaccccttgcaggagggagcacgtgagcaagcaagtgcaagatccgggctggctgctccggctgctgacacaggagcaacttctgtgcagggcctgcatccagaccaggtgtgtcaccttgaggggaatgcagcaacacccaggtaaggatgactgcaaccctaagcc

SEQ ID NO: 12746 - DNA, 502 bp, Homo sapiens
  MAP TO AC026428.1; EXPRESSED IN BONE MARROW, SIGNAL = 0.46; EXPRESSED IN BRAIN, SIGNAL = 0.46; EXPRESSED IN PLACENTA, SIGNAL = 0.49; EXPRESSED IN FETAL LIVER, SIGNAL = 0.46
gttgaataggccgcaaagtccaagggatccctctgtgcactgcacaactgagaatgtaaaaagaatagaaataaaattaatgttcaaatagtttatttcaatacaataaacaactcatagaaaattccatttaaatatttagaaaggaataaaaaagctatatataagcctgatcattgagcaaatatggagtttgcaatttttcctttacttcctggaaggaacagggaaaacaattattgcctgacttaaaagagattttgaatggtggttttgcttcttcttcttcttcttcttcttcttcttgttcttcttcttcttcttcttcttcctcctcttcttcgtcttcttcgtcttcatctttatcttcttcttttctgatggaaaatgtatccagttgtagaaaacataatataaaataaataatttacctttcacctattgcatatatttcccatgttagaaatttaattattccaaatgacaaatgctgaaatgagca

SEQ ID NO: 12747 - DNA, 567 bp, Homo sapiens
  MAP TO AL133344.19; EXPRESSED IN ADULT LIVER, SIGNAL = 0.76; EXPRESSED IN BONE MARROW, SIGNAL = 0.58; EXPRESSED IN BRAIN, SIGNAL = 0.53; EXPRESSED IN PLACENTA, SIGNAL = 0.71; EXPRESSED IN FETAL LIVER, SIGNAL = 0.48
tgattatgcaaaccctgcaactattattgacattttctccatttgcaggttgtagaacacgtagagcccttacgtccctacgaatccctcgacaccctgaaacagttcctccagtatcatggcaagattttgtgtttcttctgcctgtgggatgactcagtctcaatgtttggagaccgtagagaactcatcctgcattacttcttgtgtgatgatactattgaaatcaaagaattgcttccacacagctcaggccgagatgctctaaaaatgttcctccggaggagtaagctacccaaggtgagcagtggatataaccactttgaatttgcttgtgggtcaagagactagtcactgtttggaatgttgtgtgttatgactatatgatgatagtaaccatgcactagtgcaggtatttagaaacctttcattttgtgccctctattaatacacatctgtgaaagtaatacagagaatatgatcaattagagttggaacattgaagttaaggcaagtaaaggaaaaaagtcaaatgtaagaaaaagcacctattcatcattgagttca

SEQ ID NO: 12748 - DNA, 584 bp, Homo sapiens
  MAP TO AL157911.2; EXPRESSED IN LUNG, SIGNAL = 0.88; EXPRESSED IN PLACENTA, SIGNAL = 0.88; EXPRESSED IN ADULT LIVER, SIGNAL = 0.98; EXPRESSED IN FETAL LIVER, SIGNAL = 0.94; EXPRESSED IN BRAIN, SIGNAL = 0.81; EXPRESSED IN BONE MARROW, SIGNAL = 0.8
aaaggcttaaagcaatgatggttagtattacagaatctttaaagccatttgaacctagctatctaattacaataaaatgaccagccacttattttttaaattaaacctttagtgttatctgaatcttttcttgaatttgcttatttttctaggtatttccaagatgactaaattaactcgcctcagcataaataataatcttctcactggttgggaagagcatacctttgataacatgcttcatcttcactcgctttctcttgagaacaacagaatcacttcattgagtggtttacaaaaatcttttactcttgttgagttatacataagcaataactatattgctgtcaatcaggagatgcacaatttaaaggtaatcatctgggtagtaatttttttgttttttaacatgtattgtttctttatattatgaaagtaatgcatgtttattgcacagaatttggaaaatataaagaaaataaaaataagaataacaagtttattaaaatgtatttgcattcaatgttgtatacatacaaaaatatatctgtgtatacataatgtccccatttgctatccttctg

SEQ ID NO: 12749 - DNA, 510 bp, Homo sapiens
  MAP TO AC012629.4; EXPRESSED IN PLACENTA, SIGNAL = 0.68; EXPRESSED IN ADULT LIVER, SIGNAL = 0.89; EXPRESSED IN BRAIN, SIGNAL = 0.79; EXPRESSED IN FETAL LIVER, SIGNAL = 0.83; EXPRESSED IN BONE MARROW, SIGNAL = 0.83
ttgtgcctcaatgctcaatcagaaataataaaattctcttacagtgactatcttaatgttcttttgtgtcttctctttgttgctgtctggcccatatctcctgtacattccccgcaatccccttgttttccttcgtgcactaaccttcgcctctctgcctgtcttcttgcttccagggctgggtcttcttgatctctttattcccggggtggcacaaaatactcaataagcactccagagtttccccagggcctcttctcacccctcactgcccccatagcaaaccgggcccacaccttcctcaactctgagctctctgtactgtgcgcagggatgcaggtggtcctcttggccggttcaggcagcagactggtggaaacactaatgaagtttgttgagtgtcacaatgtgctgacacacttctaagcgcttggcacgtttaactcatgaaatcaccagtcatcttaacattgagataccgaggacagtgccgtttaaaaacctgaccca

SEQ ID NO: 12750 - DNA, 524 bp, Homo sapiens
  MAP TO AL121935.12; EXPRESSED IN LUNG, SIGNAL =   1; EXPRESSED IN ADULT LIVER, SIGNAL = 1.1; EXPRESSED IN BRAIN, SIGNAL = 0.99; EXPRESSED IN BONE MARROW, SIGNAL = 0.96; EXPRESSED IN PLACENTA, SIGNAL =   1; EXPRESSED IN FETAL LIVER, SIGNAL = 0.96
gaagcctgtgatgctccttcaccacagcccctgtcccttcataggtcccataagccagtggtgcagggatccggcctttctctcctgtgtctgcctcctgcagaaccatgagcagcttcagggccgaggcagtgcctttccatccgtgaatctcctgatccatcagaatactcgagagagagtgatgcccaagaaatactgactgagtgtattcatgaaagaattaatgttcttacaggatcacttgttgttgaactgacctgacatgtgtatagtgatctcatgaacaagagggaagctgtgcatccattcacttcaattggatttagcaatcgcagtaggataatgatatttccacaatgtatatgctctgtccctttaaatttaactttttgctttttagacagaagctcatcagtcttagggagttctgaaggcggatttctcagccgcgttcaagctgaagagttcgccagttcttccccagacagtgcagagcggcaggtaggtggctgagtggcttc

SEQ ID NO: 12751 - DNA, 532 bp, Homo sapiens
  MAP TO AL160281.2; EXPRESSED IN LUNG, SIGNAL = 0.95; EXPRESSED IN ADULT LIVER, SIGNAL = 0.84; EXPRESSED IN BONE MARROW, SIGNAL = 1.8; EXPRESSED IN BRAIN, SIGNAL = 0.77; EXPRESSED IN PLACENTA, SIGNAL = 0.95; EXPRESSED IN FETAL LIVER, SIGNAL = 1.4
caagttgtcctcggagaaggaaggagaaggtgaagaagcagagtctgactgtgatggtggtggatagctacttgcatccacgttttcaacacagccaatgctgccattctggtacaccaaggtgggtggatacccaaaaggccccagcttttctttggactccacaaattcttgccccatcttaattttctcccactcttccttacgtgtcttgattttacgtgggtttacattccctcgatttggattatctttcttttctttcctgtgctttctcttctctttcatgatatccttggtgtcctgcagcatcttcttcttccaaagatcaaagaagtatgaagggtctgtgtagaatttgagtgcctctgttccatcgtccctgtaaggggtaagattgttgagagggggaggagtatcacaggtattgtatgtttctaagacaggcactgggagagagtttctgtcaaaaagcttctggtcttgaatggtggagcttctgaaggcttttcgggtgttgattccttgcagt

SEQ ID NO: 12752 - DNA, 519 bp, Homo sapiens
  MAP TO AL139195.2; EXPRESSED IN ADULT LIVER, SIGNAL = 0.63; EXPRESSED IN FETAL LIVER, SIGNAL = 0.55; EXPRESSED IN BRAIN, SIGNAL = 0.75; EXPRESSED IN PLACENTA, SIGNAL = 0.56; EXPRESSED IN BONE MARROW, SIGNAL = 0.71
tatgctcctgggcctatttgcaagtttgatgtttttgtgtacacataccttgaagtctttggcacacttcctatattcggctacatcacaaatggccaacatgccacccatacaactgtaggaatattgttgaagatgctcatagataagtcgatgaaaacgtactccaagttccatcaaaactgtatccacattcttcccatccatggaatttttaatcttctccacttgttttcttacgtaagcacagacttttacacaggcctataaaagtttttctacactcattacacaggaatgtataccagcttagctaaagaggaaatacagtttctcattaatctttaagtataaaagaaaaaaatctagggcacagtaggatacaccaatgaaaatgttaacaaagtattaacaaactgaatgattttactcacattagtatattgaatcaaaacattgttttcatcttctggcttaaaatctgttttcttctgttctgcagccaaaatatgcttcatc

SEQ ID NO: 12753 - DNA, 548 bp, Homo sapiens
  MAP TO AC010290.4; EXPRESSED IN BONE MARROW, SIGNAL = 0.45; EXPRESSED IN BRAIN, SIGNAL = 0.48
tctgtgattgcagagatcatcctctctttctctgtaaaagtgtgatccagttgcactcttaatttcatcactaaatgatcacatttgtgtatgtctttcagaatgcagctcttcagcatctgtttattcggaagtccttccggccttttaaatgcttgcagtgtgggaaggccttccgggaaaaggacaaactggaccagcacttacgcttccatgggcgggaggggaactgcccactgacctgtgatctctgtaacaagggcttcatcagcagcacatccttggagagccacatgaagctccactcagaccagaagacttactcttgcattttttgcccagaatcctttgaccgccttgatttgttgaaagatcatgtggccattcatatcaatgatggctacttcacctgcccaacttgtaagaaacggttcccagattttatccaggtgagtgtctactactgagattcctgtctgcttccttcttttggtaaaagaaacttcgatttttggaaaaccgagactgcctagcacctgcatttccat

SEQ ID NO: 12754 - DNA, 556 bp, Homo sapiens
  MAP TO AL121897.15; EXPRESSED IN LUNG, SIGNAL = 0.87; EXPRESSED IN ADULT LIVER, SIGNAL = 0.85; EXPRESSED IN BRAIN, SIGNAL = 0.8; EXPRESSED IN PLACENTA, SIGNAL = 0.86; EXPRESSED IN FETAL LIVER, SIGNAL = 1.3; EXPRESSED IN BONE MARROW, SIGNAL =   1
cagtctttgcatcttcacgcgggtccgccccaaacctagaagaacgcccctgaccacttcttcttctatctactgttactccttcctctgactctggtgaccccatcccggaagcctttcggaaagcgcttaccccttttccaccccatcgagttggggttatttctccttttctgggctctctcccattgctggggaggaaggcggatacgaagggcctgcatgaccgcagctgtcatcacagtgtgcctggcttaccttgttgctctctcccctttcgcctttctcctttctccctgttgcagtcatggacttcactcataatacatatacatatacatatacatatacatatacacatacacatacacatacacatacacatacacatacacatacatatacatgtttttaaatctggcagccacccgctccccgccctcagcccggaataggttcagagaggtgcccgggttcacttgcggagcgtgtggcctctgcgcctaacgcgcgccccttcactacacgaatgggtgcgggcaagggtataggattt

SEQ ID NO: 12755 - DNA, 515 bp, Homo sapiens
  MAP TO AC026405.1; EXPRESSED IN LUNG, SIGNAL = 0.87; EXPRESSED IN BRAIN, SIGNAL = 0.74; EXPRESSED IN PLACENTA, SIGNAL = 0.79; EXPRESSED IN ADULT LIVER, SIGNAL = 0.89; EXPRESSED IN FETAL LIVER, SIGNAL = 0.76; EXPRESSED IN BONE MARROW, SIGNAL = 0.79
caccttgcatggctgtgtagagcctggaaacaaggcctatacaaacagaatgagccattgcatctgacttctgagtcctttcacaaatattgcagagggaaaccctgaaagggtgtccctcatcatcatccaacatgttttacaagaaaacatcagcatcatcattatcatcaccatcatcacttgttaccataagccaggcactgtgctaggcactgtaggtacaaggggaagtaaaagcagagttgttgccctctcagaattcccagtctagtggggagagatttcagttttaaaaatcacaggtacaagtgaatcattgcactaacaaattccaaaaacattactttcattagcttttttgattcccataaccctaaaaggtaggcagtattgctctcaacttatggaaaaataaattgggattcagacaggtaaagaagccagccaaaggttacataagactgggatttggcctaggtctaagttcaaagtcttaccccgctgcattttta

SEQ ID NO: 12756 - DNA, 584 bp, Homo sapiens
  MAP TO AC021288.3; EXPRESSED IN PLACENTA, SIGNAL =   1; EXPRESSED IN ADULT LIVER, SIGNAL = 1.2; EXPRESSED IN FETAL LIVER, SIGNAL = 0.82; EXPRESSED IN BRAIN, SIGNAL = 0.89; EXPRESSED IN BONE MARROW, SIGNAL = 0.97; EXPRESSED IN LUNG, SIGNAL = 0.98
atttggttttcagcattgccacctctctcccactacttaattgtcttagccttaatttctacagctgtgacatggactaacgatcttatttcactaacctttttctctttcccttgctatcttatgctcttcttttcagttcttaatggtagggttttcttttgttgtaaaggtctagacagaagaccttgataaactagactatgccaagagcgaggagtcatggattatggattcatctttgggactggaaattacttgaccttaaatgcactttctctatggcatccaaagtcatcttttaaaaatgcaaatcaaatcacattatgcctttgtttaaaaactatcaatagtttctcactgtactatatttagcataaaatccaatctcattaccacatttaacaataattttgggcttattccttgctttttcttcttctttattatttttatcctcttctataacttcagtctcctcctcctcttctgccttcaggaggagaaatctatagctccaaatatgtgctcagtcccttcttgcatttgcaacagtgaggggaacacatcccccttgaatcatc

SEQ ID NO: 12757 - DNA, 517 bp, Homo sapiens
  MAP TO AL158175.6; EXPRESSED IN PLACENTA, SIGNAL =   1; EXPRESSED IN ADULT LIVER, SIGNAL = 1.1; EXPRESSED IN FETAL LIVER, SIGNAL = 1.1; EXPRESSED IN BONE MARROW, SIGNAL = 0.99; EXPRESSED IN LUNG, SIGNAL = 1.1; EXPRESSED IN BRAIN, SIGNAL = 0.93
ctactcctgccgaagtccagcaggagtggctcatgctctctgaccccatcctgaccacaaggaagtctggagtgttcccaagatagtggcttttcccagtcctcacctgcccgtgaagccatctccccttcaggccgtagtacattgaccttcttcaccttcaatagcacaaacattccatttctgcttgagccaacccagctttattctccaagggcccatgagcctgctgagatagctaaaagttgttaacctcttgttgcttgcagagactgagccttaggtatagactgtggtgggtgggaataattccattctaagtggtcttcaaggaacaaaacaaacccaagtgaaggacttctggattcagctgcaacatgcaaagagcttggaaatcaccactcccacccttataacaagagaaggctgaacacaccgaaaatcaacagtgcttctttgacccattaaagaattgaggtcacagggcaaaccctccaccctgaaatgtgaagaggga

SEQ ID NO: 12758 - DNA, 530 bp, Homo sapiens
  MAP TO AC025746.2; EXPRESSED IN PLACENTA, SIGNAL = 0.68; EXPRESSED IN ADULT LIVER, SIGNAL = 0.63; EXPRESSED IN BRAIN, SIGNAL = 0.51; EXPRESSED IN BONE MARROW, SIGNAL = 0.72; EXPRESSED IN FETAL LIVER, SIGNAL = 0.82
tcccttctagccctagtttgcaaagcaatatatcaaaaattactcttaaatgttgtctaattattttctcatacttactgaaaatatgttatttaaacaaatattctatgaataaagttaatgatattgattatatttagtttgttaaaccaaaacttacatacagtagtgtttaaaacttttgagaggagttacaaataagcaaggaggaaggagaggctagaaggaacctgaggaactgaaatgaagtcagaattatcactataaactcatgtttaccttaatctgttaaaagacagatgaaattaaaacaaattgtagacatatattgcttggtttacatacctacatttctagctctgttgctgtgtgggcctagaagaaatgacactctggtaacaatgagaattcctaaagccaagataattgtttctattaccattcttcaattaaagcaaggagagatggctgacgctagcactgtggtagagaaaataccaaatgttcctggggcatcttgtagtgcatga

SEQ ID NO: 12759 - DNA, 597 bp, Homo sapiens
  MAP TO U82670.2; EXPRESSED IN PLACENTA, SIGNAL = 0.54; EXPRESSED IN FETAL LIVER, SIGNAL = 0.5; EXPRESSED IN BRAIN, SIGNAL = 0.47
gcactttgtgcagtgaaaggtcccgggtgcgcagggccattgcccctactccatgcgcactgtgcgggaaggggtcacaggtgggcatgggcgttgcccctactccaggtgcactgcgcagggacaggtcacaggcaggcagggccattgcacctactccatccgcactgttcagggttgggtcacgggtgggcacaggcattgcccttcctgcaggtgccctgcaccgtgacaggtcaccggtgcgcagggccgttgctcccactccaggcaccctgcactgtgacgggtcacgaaaatgcacggccactggttctactccaggagccctgcccggcgacaggtcaggggtgagcaaggccactgcccctgctccaggcgccttgtgcagtgaaaggtcccgcgcacgcaggagcattgcccctactccatgtttactgtgcggggacaggtcatgggtgggtatgggcattgcacctactccaggcgccctgcttggtggcaaatcaaggaaatgcagggccattgctattactcccggcgccctgcgtggtggcaggtcacagaaacgcagggtcgttgctcctactccagagg

SEQ ID NO: 12760 - DNA, 583 bp, Homo sapiens
  MAP TO AC019040.3; EXPRESSED IN LUNG, SIGNAL = 0.85; EXPRESSED IN PLACENTA, SIGNAL = 0.94; EXPRESSED IN ADULT LIVER, SIGNAL = 0.77; EXPRESSED IN BRAIN, SIGNAL = 0.75; EXPRESSED IN FETAL LIVER, SIGNAL = 0.87; EXPRESSED IN BONE MARROW, SIGNAL = 0.93
tgccaggcaaaagagacttcaacacttttctctttacaaatgatcattcctcctccctcgttacctttcagtttaacatcattcggtctatttctttatgggagattcacccacgctctcattgatttacatagcagacaatctctgcactatttctgctttctagctcccacgtatggggagggtggtgtttctggggccaccaaagacttgagtgaggtaaatgaaaatcaaagaagggaatctttatgcctcttactttctgaactcccagttggcttttgtgttctgacaagcggccgtggaacacaatacttaaaatcataactgccttaagaaatccgagcatgttattgcaaagtctgtgggaaaattctgggacgatgattccaaagattagattcactgagattaggaaaaggacaagctaattcagaatcaaagttgtagctgaacctttgttgaagatcttagcagtaagccaccttatgaaaaatgtctgccacaccagttccctggctcagtaatctctgtctttaacatttcccaatcctatcatgcctgaattttggcagtttcgcat

SEQ ID NO: 12761 - DNA, 535 bp, Homo sapiens
  MAP TO AL161646.3; EXPRESSED IN BRAIN, SIGNAL = 0.64; EXPRESSED IN PLACENTA, SIGNAL = 0.82; EXPRESSED IN ADULT LIVER, SIGNAL = 0.72; EXPRESSED IN FETAL LIVER, SIGNAL = 0.65; EXPRESSED IN BONE MARROW, SIGNAL = 0.65
atgttcttttaccctccccgacttatgatatagttatcttgagtatttcctgtgcatacgtttagaaccacatcagatagtgttacaatttttgtttcaaccatcaaagataatagagaaaactaaagaagttaaaaaaaattttattttatttacccatatttttgtttactggtggttcttccttctttcttgatgttacaaagtttcttcttttatcatttcctttatttttatagtatttcctgtagccattcatttagagtaagtctgctgaaaaatcctgttagtttctcttcatctgaaaatgcctccatgtcctcttcattctgttcattctgtttttaattgaatattgacaaatgataattgtatatatttatgaagtacaaagtgatgctatgatgtatgtatacaatatggaatgattgagttaagcaaattaatatattcatcacctcaaatacttactatttattcctcctaactgaaccattgtatgttttaaccaatatcttcccatattcccaaaccc

SEQ ID NO: 12762 - DNA, 570 bp, Homo sapiens
  MAP TO AC011930.3; EXPRESSED IN PLACENTA, SIGNAL = 0.71; EXPRESSED IN FETAL LIVER, SIGNAL = 0.88; EXPRESSED IN BONE MARROW, SIGNAL = 0.73; EXPRESSED IN ADULT LIVER, SIGNAL = 0.85; EXPRESSED IN BRAIN, SIGNAL = 0.67
aaggagccacacaggaattggactatttatttaagagccaaattccatttattagttaagagcatttattttattaatttctgatatattggttctaaatgtatttcataatggtctacaacttatttcattaaaattttgttctttagacatttactttcaaaatatctgtctggaccaacttgtcatttttctttttgaaggtagaatgtcttcactaaaaggataccttgagccacaaactggtcatgggaggcttcaggtagaagtgttgttgactgcacaagtggctgaaattcagtactccccaatgaaggtgccacttatgaatcagtaaattattttacttattaatgttacagtacggaaaatgaaacacaggcaacatacacacaagatatccttaaacaaggaggtttaagacaaaattatactagttaggataactagaaaagattccatatcttgggagttacagcagtttttttaaatggcatttccacttcttaaaggaattgttatcatttacataaatcagtaactcaaaggagcagtattgacttcaggccc

SEQ ID NO: 12763 - DNA, 538 bp, Homo sapiens
  MAP TO AL161634.1; EXPRESSED IN FETAL LIVER, SIGNAL = 0.5; EXPRESSED IN BONE MARROW, SIGNAL = 0.56; EXPRESSED IN ADULT LIVER, SIGNAL = 0.51; EXPRESSED IN BRAIN, SIGNAL = 0.49
tgttcagtgtgtctttcaggctttaacttcttataagaggtgtccaaatgatggacaatatgtaacgtgtaacacctatttgaacaaaatacatttaaataactggtttcacttagatgaattttaaagcctttgaatatattgtatactttctatatatatataaaatgctcatctatagacagagtcatgtatctcttagatttcttgaaactcttgaaatctaaaaatcatttataaatcttaggactattagcttggccttgagccaaataagatatttgttccaaggtaaagagaaaatgcttttctctgcctttcacttagtttaaattttcaattaggtttcaatatatttttagtctgccttccattaacacaagtcaaaagaaacacatttgcacttctcacaattctcttctcgagtatctttgggaaggtgataaacagttcacaaaattgcacaggattaacccaggtatacagatgcagcttgcaagagatgtcagcaaggtaggccctacaagcaatggaccag

SEQ ID NO: 12764 - DNA, 564 bp, Homo sapiens
  MAP TO AC018730.3; EXPRESSED IN BONE MARROW, SIGNAL = 0.98; EXPRESSED IN ADULT LIVER, SIGNAL = 1.2; EXPRESSED IN LUNG, SIGNAL =   1; EXPRESSED IN PLACENTA, SIGNAL = 1.1; EXPRESSED IN BRAIN, SIGNAL = 0.94; EXPRESSED IN FETAL LIVER, SIGNAL = 0.82
acggaggggagattgtaaccaaaggaaaagaatctcgcagaaggggatctggaagagggcagttgatcctgggcagatcccctgcgccgggccctctccgctgggggcgagcccggagggaaccgaggggcccgggagggggagctgctgaaggcgcgcaggctgacaaagctataacaaaggctccctacaaaactagtactaaggatctttaaaggatcacacaccttgcaggcgtgtccccagctcccgggacgcagagcccgctgactgttcccccgggctccgcagacgtgcccgggttgtcagaggtgtggggctggaagtccagcgtctcggcctctgcccctgcgctcccacaggcctgagcgggtaggggtaggtgcccgcgcctgggcccgcgggctttggtcatggctgttccccgggaggctcagttaggcagcagcttgctgggcaacaggccgcgccttggttaatccgggaaggtcgcgggctgcaatctggcctgacgaggcaggcctgaagtctccccgctggcgatcagaagagcgttcgagaagc

SEQ ID NO: 12765 - DNA, 525 bp, Homo sapiens
  MAP TO AL157392.2; EXPRESSED IN BONE MARROW, SIGNAL =   1; EXPRESSED IN PLACENTA, SIGNAL = 0.96; EXPRESSED IN ADULT LIVER, SIGNAL = 0.83; EXPRESSED IN FETAL LIVER, SIGNAL = 0.74; EXPRESSED IN BRAIN, SIGNAL = 0.88
tttactgggtatctgtttcactttgtaggtcatcagaagattgagagaaagaggagaaccaatcagactatttggagagactgattatgatgcttttcaacgtttaaggaaaatagagatcctcacaccagaagttaacaaggtaagaggacagaacaaagctagaaaaataccactgtactgcattcactagaatagagtttgactaattgcattattgtaggcaacaatggaaaagtaaagtgagcagattattgctgctgaatggaagttttcattaattttttgaaaagctcatatcttaagtataacatttaatgcattttgacaaatacatacaagcatataaccattgcccttataaagaaatagaacattttcgtcaccaaagaaatttccctgagagcatcaggaagaatagcgaatggatgctgggctcaatagctgggtgatgggatgatctgtgaagtaaaccaccacgacacacgtttccctatgtaacaaacctgtcatcctgcagctgta

SEQ ID NO: 12766 - DNA, 523 bp, Homo sapiens
  MAP TO AC010458.2; EXPRESSED IN LUNG, SIGNAL = 1.1; EXPRESSED IN PLACENTA, SIGNAL =   1; EXPRESSED IN FETAL LIVER, SIGNAL = 0.9; EXPRESSED IN BRAIN, SIGNAL = 1.2; EXPRESSED IN BONE MARROW, SIGNAL = 0.79; EXPRESSED IN ADULT LIVER, SIGNAL = 1.2
ggtgcctaatgacagaagggtgacatcactaaggaagcctggaaagtcccagccctccacgtgatcccacggatgaaaatagctccgggtgagctctggaacagctgaaaaagctggagcaaccaagcagggcctacaagccgaggagggctgtttaaaggcgcaggggccattttaccctccaggttggccctgctcaggaccaggaggaaacacctccagcccgcgacctcctcccacagggggaaaaggaaagcaggaggaccacagaagctttggcaccgaggatccccgcagtcttcacccgcggagattccggctgaaggagctgtccagcgactacaccgctaagcgcagggagcccaagcctccgcaccggattccggagcccaagcctccgcaccggattccggagcacaagctccaccgcgcatgcgcacacgccccagacccaggctcaggcaagccgtgggggcagggagggctgtttcatcccgctggggcggccataaccaagtaccag

SEQ ID NO: 12767 - DNA, 595 bp, Homo sapiens
  MAP TO AL139421.2; EXPRESSED IN BRAIN, SIGNAL = 0.77; EXPRESSED IN LUNG, SIGNAL = 0.9; EXPRESSED IN PLACENTA, SIGNAL = 0.94; EXPRESSED IN ADULT LIVER, SIGNAL = 0.79; EXPRESSED IN FETAL LIVER, SIGNAL = 0.72; EXPRESSED IN BONE MARROW, SIGNAL = 0.77
cagtttaaggaaacagggcaacttaaaaaaaatttttacaatgatttctattaaaaaatggaatttaaaaggtggagaaggattcttacatttctggtacaaaggaatagtcttagctacctagaaaaatgagtgattcagaacttttctcctctttgttacgtatttaatttagagagcacattacttattctttgatttccttaatgaatgtctcattctctgtcccttttagtactctttagatcagaaactaaactttgtttatgactaaatctttcaactatttaagtaggtttttattcttgaagtcctattcagaacaattttccttttatgtttattagcagaaagcgtaaaagatcaaaatcaacatactatgaacaagcaatatgaaaaagagaggcaaagacttgttactggaatagaagaactacgtactaagctgatacaaatagaagctgaaaattctgatttgaaggttaacatggctcacagaactagtcagtttcagctgattcaagaggagctgctagagaaagcttcaaactccagcaaactggaaagtgaagtaagcttggaattagcttggtat

SEQ ID NO: 12768 - DNA, 564 bp, Homo sapiens
  MAP TO AF241726.1; EXPRESSED IN PLACENTA, SIGNAL = 0.68; EXPRESSED IN FETAL LIVER, SIGNAL = 0.77; EXPRESSED IN BRAIN, SIGNAL = 0.56; EXPRESSED IN BONE MARROW, SIGNAL = 0.6
tgggaggtagaacatctggcttatgtaatgaatacatgtttaatattaccttttaaacctgtaatgttggtaggttttcatgtagtaaaaattctatttattagtatttcttgttattatttctgatcttatattaaataaggcattattaagcataattatcttagattatctttttcttggtttgccacagtgtattgtctagcatggcagatgcagtattggctcgagtgtataaacaatcagatttggacaccctggctaaagaagcatccatcccaattatcaatgggctgtcagatttgtaccatcctatccagatcctggctgattacctcacgctccaggttggtttatttatttgtcttacaaaagagcaaaatcaaataattcctgacttgctttaagtgaaacagtttacttaaatcatggtattggtgttttattttcaaataccagcttgacaaagaattacagcttgtgtgtgcattttctggggaaaacaggacattgttaaaaacagactctaagatcgctctgcactcaaccctattcccaaaccct

SEQ ID NO: 12769 - DNA, 530 bp, Homo sapiens
  MAP TO AC007325.51; EXPRESSED IN BONE MARROW, SIGNAL = 3.6; EXPRESSED IN PLACENTA, SIGNAL = 1.5; EXPRESSED IN ADULT LIVER, SIGNAL = 1.5; EXPRESSED IN FETAL LIVER, SIGNAL =   2; EXPRESSED IN LUNG, SIGNAL = 1.3; EXPRESSED IN BRAIN, SIGNAL = 1.6
aacatggactctctgtggggcccaggagccgggagtcacccctttggggtccacaacacccggctgtccccagacttgtgtccagggaagatagtgttgagggccctcaaggagagcggggcagggatgcctgagcaggacaaggaccctagagtccaagagaatcctggtgatcagagaagggtccccgaggtcaccggggatgcaccgtctgcatttcggcccctgcgggacaatggaggcctctctccctttgtgcccgggcccgggcctctgcagacagacctccatgcccagaggtcagaaatcagatataaccagacatcccagacctcctggacgagctcctgcaccaaccgaaatgccatctccagctcctacagctccacgggaggcttgccggggctaaagcggaggagggggccagcctcatcccactgccagctgaccctcagttcctcaaagacagtgagtgaggacaggcctcaggctgtctcttcaggtcacacccagtgtgaaaaggcagcaga

SEQ ID NO: 12770 - DNA, 570 bp, Homo sapiens
  MAP TO AL050342.42; EXPRESSED IN ADULT LIVER, SIGNAL = 0.69; EXPRESSED IN BRAIN, SIGNAL = 0.56; EXPRESSED IN PLACENTA, SIGNAL = 0.63; EXPRESSED IN FETAL LIVER, SIGNAL = 0.55; EXPRESSED IN BONE MARROW, SIGNAL = 0.57
ctcaggggacagtctgcttccttgccttttgcagcttctagagcccacccacataccttggcttgtggcctctttcagcaatggcatcgctctggcctctgctgccatcatcacatcccctcccgctccgaccctcctgtctccctccaataaggacatttgtgattatattagatccttgtgggtagtccaggataatcttccccatctcaaaatccttaatcacacctgcaaagccccttctgccactaaggaaacattgacaggttccagggatttgaacgtgggcatttttgaggcaggaggatgcattacataccacagctgtggttatcactgtgacaatcactcaccatgtccaagtttgcttcctctgttggacagtgaccttgttgcaacacggactgccttcttctttctttctgtgtctctagttccctcttcagggcctggcatacagcaggggctcaggaatgtggcctgagttcctgaagggcaagagccccgttttactcatccctgtacccccaccatccagggctgatcctggccctgaacatttgttggacc

SEQ ID NO: 12771 - DNA, 521 bp, Homo sapiens
  MAP TO AL161668.1; EXPRESSED IN ADULT LIVER, SIGNAL = 1.3; EXPRESSED IN BRAIN, SIGNAL = 1.2; EXPRESSED IN BONE MARROW, SIGNAL = 1.1; EXPRESSED IN LUNG, SIGNAL = 1.2; EXPRESSED IN PLACENTA, SIGNAL = 1.1; EXPRESSED IN FETAL LIVER, SIGNAL = 0.93
ctccaaagccaaggtctcagagcgggagtgttgagcgccctgccaggtttgtgcactctggcccagccccactcctgttctgggctcatcagccagcatttcctgagtgctcactttttgcccacattgtacaatcggggctttggagaacacagccaaccccagaccagtgcagctcccaaggagccatgattgggtgatctctagggatctgtagcctggtcctatctctacaggagcctgagccagtggaggactgtgtgcagagcactctcgccgccctgtatccaccctttgaggcaacagcccccaccctgttgggccaggtgttccaggtggtggagaggacttatcgggaggacgcactgaggtacacgctggacttcctggtaccagccaagcacctgcttgccaaggtccagcaggaagcctgtgtgagtggccgtgcatcactattctgccttccccaagatccactgccacactctacagactagccaggctgactaatgcccccacta

SEQ ID NO: 12772 - DNA, 522 bp, Homo sapiens
  MAP TO AL161788.2; EXPRESSED IN LUNG, SIGNAL = 2.3; EXPRESSED IN PLACENTA, SIGNAL = 2.7; EXPRESSED IN FETAL LIVER, SIGNAL = 2.5; EXPRESSED IN ADULT LIVER, SIGNAL =   2; EXPRESSED IN HELA, SIGNAL = 2.4; EXPRESSED IN BRAIN, SIGNAL = 2.8; EXPRESSED IN BONE MARROW, SIGNAL = 2.3
tatggaggcaagggaaacaggcccttgaaaagaaggtaatgtggagtgggtagcctctgtattgattaagaaggggacggacttaccctccactgtgagagttactgaagatcggcatccatgatggtgtagggggcttccgaggcgatcggcagcatcagtcttcagccactaagcagagaagatgtgggaaggagtcagtcagagagccttgggccacatttccaggcgttctgggagtggctgccaggtgagttgaacagtccaattttcagtggggtcctgcagagatgggacatggcttaggaggaatcccaggctgcaggcattccttggcccagtggccagatttctggcacttacagcaagctcctgggggaggtgggcctggaagaatccctggccactgcagtttaggcatttggaagttcttgtgtgctggagatgtggctggggtttgtctcacggtggaggcaaggaattgcaactcagaaatacattgctacttggccgcctgtactc

SEQ ID NO: 12773 - DNA, 593 bp, Homo sapiens
  MAP TO AC022470.3; EXPRESSED IN PLACENTA, SIGNAL = 0.57; EXPRESSED IN FETAL LIVER, SIGNAL = 0.71; EXPRESSED IN BONE MARROW, SIGNAL = 0.71; EXPRESSED IN BRAIN, SIGNAL = 1.5
taggcatcagcagcaaactgtacctttgtacgcctcgagggatgcccagtttcttgcccagaaggcgctcactacagcagtccaccaggcgcttgagagtatacaaacactctcggaaggtggagaagaaagggtagtggctgagcacgcacagggacgtgagagtactgttgcgggagcggctccccgccttggcccggcgtttgccccgaggagactggttcacatcaggggtagagtcagcactgagaggctgcagggatgagccactctctgagctctcagtgccaccctcttctgaggcacaggtggcatgggttccttccttcccacgggaccctgccccaccttcccccttctccttagagattcgcttttggaaggagcggtagaagttaacacagatgccatatcgcgtgactccagtgtccttgtcagtgagggtgaagacaaaagaggtatcatcccgaaggctcatgcgccgctgccgcacgctcaggcagccctcgggctggcagaagaacactacatctgggggcaggggaaactcagtgtgatcctccaaggggtatcgccgtagcaattcaggagtc

SEQ ID NO: 12774 - DNA, 531 bp, Homo sapiens
  MAP TO AL122008.9; EXPRESSED IN LUNG, SIGNAL = 0.93; EXPRESSED IN PLACENTA, SIGNAL = 0.86; EXPRESSED IN FETAL LIVER, SIGNAL = 0.66; EXPRESSED IN BONE MARROW, SIGNAL = 0.76; EXPRESSED IN ADULT LIVER, SIGNAL = 0.87; EXPRESSED IN BRAIN, SIGNAL =   1
tgaggagaatcctgtggtccagggaagaccacaacactgccagacagaggagggtgcccccaggccctgcccactctccagggacatgcccccaaccctgcagctgagaaacctccatgctctgtctcccacagtgattgatcactacaccagtcagatcgtcttcaatggggtccgggtcatcgccatcatcatcatcggcctgggttttctcctcctgctcctgccagaggagtgggatgtctggttgatcaagctgctcacccgactcaaagtgaggaagaaggaggagcctgcagagggcgctgccgacctgagctcaggacctcagagcaagaacagaagagcccgcccttccttcgcccgctaacaccactcctctagaactcggtggtaatgactgggaggtctattcctgccgggaggaacctcagttgggtaaggtgtacatacctgtacagttttggtcatctgcggtaagttctatggtatttattggcatgtccaatttgcttgcacttttccacatca

SEQ ID NO: 12775 - DNA, 563 bp, Homo sapiens
  MAP TO AF240628.1; EXPRESSED IN PLACENTA, SIGNAL = 0.65; EXPRESSED IN FETAL LIVER, SIGNAL = 0.59; EXPRESSED IN ADULT LIVER, SIGNAL = 0.85; EXPRESSED IN BRAIN, SIGNAL = 0.75; EXPRESSED IN BONE MARROW, SIGNAL = 0.67
acagacagcatcaggtccagacgagtttactggtaaattctaccaaacatgtaaggaggaaattatatcagttccctacagttactttcagaatatatgagcagagggaatactccctaaattaattttggggtaatcagaattaccctgatactaaaactagacaaagattacacctaaactacagatggttatctctcatgaacatagatacaaaaattctcaacaaatcattagcaaattgaatccaataatgtgtaaaaagaattatgcactatcaacaagtgggatttatttcaagtatacaagatttattcaacattcggaaatcaattaatataatctatcacatcatcaggataaacaatacaaattatagattatttcaatggatgccaaaaatgtttttaacaaaatacaactgattaaaattctcagcaaactaaaaatagagaaaaattttctcagtttgataaagaacatctacaaaaatcttaccattaatgtcatttttattggcaaggaactagaagctttcctgtgaaggtcaggagcaagacaaa

SEQ ID NO: 12776 - DNA, 556 bp, Homo sapiens
  MAP TO AC016498.4; EXPRESSED IN ADULT LIVER, SIGNAL = 0.93; EXPRESSED IN BRAIN, SIGNAL = 0.61; EXPRESSED IN BONE MARROW, SIGNAL = 0.67; EXPRESSED IN PLACENTA, SIGNAL = 0.77; EXPRESSED IN FETAL LIVER, SIGNAL = 0.72
aacagactgcccttgtggtcagcaccctgcagtctctgtgggttctctcagggtcagcgtggccaggaagcgtctgccaagccctgcgcggcaccagccagatccccaatccgagtctcagacggcaatgtagagtccacattttcctaataaccttagctcacattgatggcaattgaccctttggaacctgctttttatggggcatttatgcaaaaccacaaagaccagaggctgcacatgtgcaggtcctgggagggaccttagcaaagtgttcccacagttacatcctggtgatgagcaaaaaagagaaattttaaccagagtcagacaagaccgcactctccttccactccgattcctccctggtccacatcccctgtggcaggagaagtcagagtcagaggaggcaggaggagcatggagagtgatcatgggaacacaaggagcacggggagcatggggagcacgaggagtatgtggagcacagagagcatggagaatataaggagcactggaagcacaggacacatgaggagtacggggagcacaaaga

SEQ ID NO: 12777 - DNA, 551 bp, Homo sapiens
  MAP TO AC022997.3; EXPRESSED IN PLACENTA, SIGNAL = 0.98; EXPRESSED IN FETAL LIVER, SIGNAL =   1; EXPRESSED IN BONE MARROW, SIGNAL = 0.93; EXPRESSED IN LUNG, SIGNAL =   1; EXPRESSED IN ADULT LIVER, SIGNAL = 1.4; EXPRESSED IN BRAIN, SIGNAL = 0.66
taccacaagagccctggaacttacaggctgagaaatcatccttttgcttctcccttccttgctaggaaaatgctctgcagcccgcagaatcagcagcaggcagaagcacaatcaccctctggttatgggaactgaaagcattcatggactgtcttatctaaatggtttgacaagttctctattcacctggccaattgcatcaggccctctccttttccttccactgctgaaacttggcaggtgcaagtgtcagtattgccctgcggctggaatgtgccctggacaagaactcccagcccatcactgcagcctggagagaaccaagggccttgtttgctgccccagggagtgctgcagggcattacttctaatagcaaaggaaatttcatattcatttgtggatacttctgggcaaagctgcactcagcttgtattggctttgtccggaggctggtgagcaagaccagggagtctaatggatctggaacatgaggacaggctaagtgatccctcattctaccactgtcacttgtgacttgcctcccaacagt

SEQ ID NO: 12778 - DNA, 593 bp, Homo sapiens
  MAP TO AC007981.43; EXPRESSED IN PLACENTA, SIGNAL = 0.55; EXPRESSED IN BONE MARROW, SIGNAL = 0.51; EXPRESSED IN ADULT LIVER, SIGNAL = 0.58; EXPRESSED IN BRAIN, SIGNAL = 0.54
ggaaagtaacatttctgttcaagacaaagaaaagtgtcttacattggcagcatcttcttttttacagatgtcttgtacagtgtcctcattagcaatgtcatatacagcgtgcttattagcgaattcgtatacagcatcctcattagcgatgccatatacagcgtcctcattagcgatgttgtatacagcgtcctcattagtgatgtcgtatagagcgtcctcattagcgatgtcatatacaatgtcctcattagcgatgtcatatacagcaacctcattcgctatgtcttgtaaagcatcctcattagcgatgtcatatacaacgtcctcattagcgatgtcgtatacagcgtcctcgctagtgatgtcttgtacggtgtccttataagcaatgtcgtctacagcgtcctcgttagcatgccttgtgggtgtcattagcgatgtcatatacagcatcctcattggtgatgtcttatatggtgtcctcattagcgatgttgtgtacagcgtcctcgttagcaatgccttgtacagtgtcctcgttagcaatgtcatatacagtgtcctcattagcgatggcttgtacactgtcc

SEQ ID NO: 12779 - DNA, 557 bp, Homo sapiens
  MAP TO AL133279.2; EXPRESSED IN PLACENTA, SIGNAL = 0.68; EXPRESSED IN FETAL LIVER, SIGNAL = 0.65; EXPRESSED IN ADULT LIVER, SIGNAL = 0.85; EXPRESSED IN BRAIN, SIGNAL = 0.72; EXPRESSED IN BONE MARROW, SIGNAL = 0.61
attatttttcccgccagagccccagtgcctggcctgcccagggtgcttacctgccacaaaatcaccaaagcccaccgtggtcagagtgaccaccacaaagtaaatggactccaaggccgtccagccctcgatgtacttaaagatgacagcagggatcgtcacaaacacaatgcagccggccaagatgaacaggatggttgagatgacccggatcttggtctgactcacttgctttttctaggaagagcaaaggagaaagataggcaagtcagcggcatcaccctggattcaggatatagatgcacagaaaacggtactgtgtcagtgacttttaacctttctctggtcattggctgcttggaggaaatttgatgaacgctgtgaactctttcctagaaaagtgcattcagaatttttcaagtggtctaggaggttctcaggctccctgaagcctgttcgtggacaccaggtcaaacaaacaaaaaaatcctgcttagccaatgctttgaatgtttcttgcatggttccatgactgcagcccaaatgctgattctgac

SEQ ID NO: 12780 - DNA, 512 bp, Homo sapiens
  MAP TO AC016080.3; EXPRESSED IN LUNG, SIGNAL = 0.88; EXPRESSED IN ADULT LIVER, SIGNAL = 0.68; EXPRESSED IN BRAIN, SIGNAL = 0.59; EXPRESSED IN PLACENTA, SIGNAL = 0.76; EXPRESSED IN FETAL LIVER, SIGNAL = 0.75; EXPRESSED IN BONE MARROW, SIGNAL = 0.86
aattatgggcaagaagctggctaagataactgcaagtaaaagataaatcttataaaaagaaaggatgatttggagggtgcaatccagaacccagaagttataggcagtagttgcaggatattatttcctaatcaagcagtagaataacatgacaatgtggtttcagaattggtatggctcattgaccatttcatgacttctttactcctttatttgaggagaactgtgtattacagtttccctatacctctctcctcactgaatactgtatgtgttgggtggggtggggagaaataatgtctctttaatccacaggttttaagtttaagaaaaactacactcaagcagattcctccaacataaattcaatgtatatggcaatgctgacttccattttgagcatgaaaaagtaaggggatgagacttttaagtgtcttgggagccaattatatattttctgtgatatagcaaggcaactattctgcgaccagacggtgtatggtggcagaata

SEQ ID NO: 12781 - DNA, 516 bp, Homo sapiens
  MAP TO AL157837.4; EXPRESSED IN PLACENTA, SIGNAL = 0.63; EXPRESSED IN ADULT LIVER, SIGNAL = 0.67; EXPRESSED IN FETAL LIVER, SIGNAL = 0.51; EXPRESSED IN BONE MARROW, SIGNAL = 0.57; EXPRESSED IN BRAIN, SIGNAL = 0.52
tgaaacctctttttattcctggtgagatcattgtaatatcaacatgatacatatttttctatcttttaaaatttccacttatctgtttttatatttaaattgcatatttttcagtagtaagtagttagagcttgtctttattctgacagtctctgactttgaactgaaatatctagggcagtttttcacaaggtggtgccaaagctgaagaaggcagctcctgcccctcccaaagctcaggccgaagcgaagcctttgaaagccgaaaaggcagtactcaaagatatccacagccacacagaaaaagatatgcacatcacctaccttccagtggcccaagacactatggcttgggaggaaccctaaatatccttggaagagtgcccccaggagaaacaagcttgaccactatgccattaccaagtccccctgaccactgaattagctatgaagaagaaagaagacaacacacttgtgttcattatgaatgataaagccaacaagcaccagatcaaa

SEQ ID NO: 12782 - DNA, 600 bp, Homo sapiens
  MAP TO AC025119.2; EXPRESSED IN BRAIN, SIGNAL = 0.45; EXPRESSED IN BONE MARROW, SIGNAL = 0.54; EXPRESSED IN ADULT LIVER, SIGNAL = 0.56; EXPRESSED IN PLACENTA, SIGNAL = 0.52; EXPRESSED IN FETAL LIVER, SIGNAL = 2.3
tttgcatttgcatgtcaacccagtatactctgattgaaacgctgaaaaacataaactcaactaaataaacttgaacaaagggaaatgactgaatacgatcatagaagttagaattataagatattatgtatgagaaagttcttttaatcgtacattgcatgctcatgctctcctcaaaacggggatcactagtattaatcttgccagattcagtaaatgcacgaatattttcatcactataccagcttctgctttcatcagttgtagaaaacatcagaaaagaagacctgtcaatatctttttcagtgtctccattcagtgtccctgaaacaaaaaacacatttcttacttttcatgtagacattaattagaaccattgttacagatacaactacttttacgatctacagttttgttaattgttagggcacgtgaaaaaggtaaatgtttgcgatgtgggatgtcggtttttgtaaagtttacaacaaacttaaaaaagcatattacctatatgaagccatatttaaagaatccatactcatctttacatcaaatcagtaactttctgcagtgtctgcatctgatgaccattatcgcgtg

SEQ ID NO: 12783 - DNA, 531 bp, Homo sapiens
  MAP TO AL133355.12; EXPRESSED IN PLACENTA, SIGNAL = 0.68; EXPRESSED IN FETAL LIVER, SIGNAL = 0.45; EXPRESSED IN BONE MARROW, SIGNAL = 0.52; EXPRESSED IN BRAIN, SIGNAL = 0.54
gggagcttggtgagattcagccaagcctttgctcatgctgaaaggggcctccctctccacttggggcacttgctctagaaacgtgatttctggcttcagtgaaggccaaggaggaagtatagggagcagaaggctctgaggcctggctgcatgaactatagagtggtgcaggtgtgctgtgaggacctgcttcagggaaaagttgttgtgacccagaggagggtagagctgcacgggagactggaaaatcagcgaagacttggtgaggggttgggggggcggccaaaagaccaggacgtccttgagttcacccccctgggcctccaggagaagagactgtagaaaattctagctgggtaaagaactttatgtctagttttcataccctgtgagcatctgtcaacctgtttgtttacatggtctgatttctccaccgtgtggagattccatatccaggtgtgtgaggatggggcaatgcagatccatcgttgtctgctaagcgatttcacttcgaataagggaatggcagag

SEQ ID NO: 12784 - DNA, 551 bp, Homo sapiens
  MAP TO AC019184.2; EXPRESSED IN PLACENTA, SIGNAL = 0.72; EXPRESSED IN FETAL LIVER, SIGNAL = 0.51; EXPRESSED IN BRAIN, SIGNAL = 0.5; EXPRESSED IN ADULT LIVER, SIGNAL = 0.64; EXPRESSED IN BONE MARROW, SIGNAL = 0.66
tggatttcatttctgtcgcctcaaaaaatactaaattgctcaaggcaggactgaatttaatgctctttcaaaatctcctatggtatccaacacggtgctgggaacatagtaggtattttatcaatatttaaagaattgagttgtatgtatcaagtacacgtgtagaaaagtttagaataaatcactcacctacgcaacatatcttcttacttttccttcaggccgtaacacttatctccttcaaagacctcttccaaatggaatttttccagcatacccttcttgtgttctgccttagacccttaaaagactactataaataaaattgtacaagacatttaaaagcctttgcactttttctttatttgtttcattattatgcccaattctgtgccattagactttaagcccactaggcagcttcagtagtattttaaagcttttgccatacatatgaggtgagaacggatgaactcccttcgcagagctgcacaacataacattttcatgttacaattcagtatcattgcagcaagataagcacaccccat

SEQ ID NO: 12785 - DNA, 559 bp, Homo sapiens
  MAP TO AL138796.2; EXPRESSED IN BONE MARROW, SIGNAL = 1.1; EXPRESSED IN LUNG, SIGNAL = 0.93; EXPRESSED IN ADULT LIVER, SIGNAL = 1.2; EXPRESSED IN BRAIN, SIGNAL = 1.1; EXPRESSED IN PLACENTA, SIGNAL = 0.96; EXPRESSED IN FETAL LIVER, SIGNAL =   1
ttcttcagtgcaaatgctggtcgaccacctgctagaagggccgcaggagatacttctggccacctttcgaggtaccttacaaatggcttcatagtcagaatcagcaacccgcaaagcggcacaaccacggcatctcctgggtcggtttccagggccttctgaaccatggcagctgtgtggctcctggatctgatcctcattctccacccagcactcaaaccctgaataggcgaagtcctcctggagcagtgcagagtatctcgcatcgggtaagacggacatgtcaaccgtcccattccccgccttgatctccgcgccagagtcatcgttattcttccgatacatactggcaatgcagaacttgaggcgatccttctccagtagcagcttttgcaagcgctcaatagaaagcgcttcaatccgggcaataactgtgtcgaatcgatagattcgatcaagcatgaaagcacacttgctgcaagcgaactcggctttgccatcgcgggggacatccttgcccaagacgtgcgaaagcagaacctggagattgagcttggac

SEQ ID NO: 12786 - DNA, 580 bp, Homo sapiens
  MAP TO AC022882.3; EXPRESSED IN LUNG, SIGNAL = 0.87; EXPRESSED IN PLACENTA, SIGNAL = 0.64; EXPRESSED IN ADULT LIVER, SIGNAL = 0.76; EXPRESSED IN FETAL LIVER, SIGNAL = 0.81; EXPRESSED IN BRAIN, SIGNAL = 0.68; EXPRESSED IN BONE MARROW, SIGNAL = 0.66
gcaaaaattcatgcccataacctaatttataggaatcatattgtacaaaatttaaacaaaaatattacataagttattccatgtccttcgtagggcatattttacatctttgtttcgtaaactatagatcaagggattcaacatggggataaccagggtgtaaaatatggaagccactttatcagtgtcaaaggaatgactggacttgggctgcacgtacatgaaaagcaaagtcccatagaacactatgaccactgtcaggtgggctccacaggtagaaaaagccttttgtctgccagcagaattcatcctgagaatggctacaaggatgagcaggtaagataaaagaactatcagaagagatgaaatcaaatcaatagctgcaaagatcagaattatcaattcaatttcatgtgtatttgaacaaagcaaaggtaacaaagggagactgtcacagtagaaatgactaatgacgttgtagccacagaaggataaagtaaaaatctttatggtgactagaagagaaatgaatgtgcaatagaggtaagggattgctaccagcacctgacatacccttcgt

SEQ ID NO: 12787 - DNA, 600 bp, Homo sapiens
  MAP TO AC016575.4; EXPRESSED IN PLACENTA, SIGNAL = 0.77; EXPRESSED IN ADULT LIVER, SIGNAL = 0.64; EXPRESSED IN FETAL LIVER, SIGNAL = 0.5; EXPRESSED IN BRAIN, SIGNAL = 0.5; EXPRESSED IN BONE MARROW, SIGNAL = 0.68
catatttatggggtgcagtgtgatatttcaatacatgtatacaatgtgtaatgatcaaatcagggtaattagcataaccatcaccttaaacatttattatttctttctgttgagaacattcaaaatctgttcttcttgctatttgaaaatgtacaataaatagctatttgaaaatgtacaataaattgttgtttattatagtcatcccgtaatactataggatactagaacttattcctcctggaggatcatttttatttcatcacttggtctatcagctggttgattgactggcattctcagccactgatagccacccaggagaacagaacaaaggtgctcttcaaacctcactgttggccatgtgattcgtgtcattgtgttagaggttgctgtcaccttcatgagatagaatctgatgaatcaatagttcattatagttctgacactaaaactaataatagtaattataagaataacaaatatttactaagtatacattaattgccaggtacgatactcagcatattctaggtatgatctcatttaactctttctcaaatccgatcatgtaagaattgttatccccattttgcaagc

SEQ ID NO: 12788 - DNA, 556 bp, Homo sapiens
  MAP TO AC021774.3; EXPRESSED IN PLACENTA, SIGNAL = 0.64; EXPRESSED IN FETAL LIVER, SIGNAL = 0.68; EXPRESSED IN BRAIN, SIGNAL = 0.74; EXPRESSED IN BONE MARROW, SIGNAL = 0.66; EXPRESSED IN ADULT LIVER, SIGNAL = 0.6
ggagatgaggagcaagcatcaaaattggcagttttgtgctttcatgcaatcaatattgtttatgaattgctccaacatggctgcatccatttaaagtgggggaagaaagacactacaaatacacacacttgagaatttcaggaaattacccaaatgctcaaatccttgctgggggcaatggttttcaataggagtttacatgataaatccatgcactgaatacatttaaaaaataataatctggcagtgcatggaacaatagcacacccatatcgcctgtttattttgaaacagtcctttgtcagaatgtgtctgaaattaggccatcaaaaaggaaacaagacaaagaaggcccagaatgactgaagcaggcaaggccgcttatccagtagaccctgacaatgccacgcatgctgcggaaactgctcagacaagagcttacaaagaagcagacaaagccagcatggaaacgggtgataagcagagatctgcggccatcaagagggagagaagaggaggcagctgcaaagactgaggccagaaaaccaatggagag

SEQ ID NO: 12789 - DNA, 500 bp, Homo sapiens
  MAP TO AL136365.3; EXPRESSED IN BONE MARROW, SIGNAL = 1.2; EXPRESSED IN LUNG, SIGNAL =   1; EXPRESSED IN PLACENTA, SIGNAL = 0.96; EXPRESSED IN ADULT LIVER, SIGNAL = 1.2; EXPRESSED IN FETAL LIVER, SIGNAL =   1; EXPRESSED IN BRAIN, SIGNAL = 0.93
aagattaacttgttgttgttgttattgtttttaatacagggttatgacaagtcccaagaagagaggaaggaaggccaagacagccaagaaggaagttccttttgtgtccacagagaggatgcatacctaaatttcactcaagaaattaaggcatcaagatttgaagaaaggggtactgctttgttccaaattcctttcaggcatcatggccctttttctaactaggagcagggagtttatggcagttgccatcattaacaagaatatctaacatagcatgcacagacatgtatttaaggcttgtgtgtgcctcatacacatttgctgtatatattaagattgtgtaaaataaacttatatacaagttcagaaacaaataaagggctgaaaatgacaatgaaggggaaacaaagcaagaactagatctagatacaaaaagggacccaatctatatctcaactgtataaatattagatgaaggcgctatgatttttctgaga

SEQ ID NO: 12790 - DNA, 568 bp, Homo sapiens
  MAP TO AC011260.4; EXPRESSED IN PLACENTA, SIGNAL = 0.96; EXPRESSED IN ADULT LIVER, SIGNAL = 1.1; EXPRESSED IN BRAIN, SIGNAL = 0.81; EXPRESSED IN BONE MARROW, SIGNAL = 0.94; EXPRESSED IN LUNG, SIGNAL =   1; EXPRESSED IN FETAL LIVER, SIGNAL = 0.99
ggggtcagttcagtgagaggatataacaaatgtaaatatatatgcacacaacactggagcacccaaatatgtaaagcaaacatcaatggatctaaagggaaaatagaccgcaatacaataatagtaggggacctcaccaccctactctcagtaattgacagatcatccagacagaaaatcaacaaacacattgaagttaaactatacattagactagatagacctaagtgatatttacaacctttcactcatctgctgcagaacacacattcttctcatcagcccgtggacattctccactataggacacaaaacaagtctcaacaaattcagaaagatcaaaatcatatcgagcatcttttttgggcacagtgaaataaaactagaaatcaataacaggaactttgaaaattacaaaaacacatggaaattaaacaatatgctcctgaataatcaatgggtcaatgaagaaattaagaagaaaattctaaaatgtcttgaaacaaatggaaatggaaatggaacatatgaaaatacacggaatacaacaaaatcagtaccaacgggg

SEQ ID NO: 12791 - DNA, 574 bp, Homo sapiens
  MAP TO AC018560.3; EXPRESSED IN ADULT LIVER, SIGNAL = 0.52; EXPRESSED IN PLACENTA, SIGNAL = 0.56; EXPRESSED IN FETAL LIVER, SIGNAL = 0.54; EXPRESSED IN BRAIN, SIGNAL = 0.57; EXPRESSED IN BONE MARROW, SIGNAL = 0.52
atgggcctacataatgctgcattctttcttacaataaacaatttaaagttaattgatcttttaaaaaatctaatttaggcacaatctcttggaattactaggagatataataaatagaaatacaaataagaatttgtctttttgaatttgtggttttttttgtagacttacaatctaatttcttttttctttttttagaaagatgaggtctctctatgttgcccaggatggtttcaaccttctgggctcaagcaacgctcccaaacagctgaaactaaaggttctaatttctttttgacggcaatattgccttctgtacttacctctcctccatttcaatcctcaccatcagctctacttttagaaatgcaaacagctttacagcaactaatataaagctaggtactcagtggacactccataatatttgttgatgattataaatttgtcttgaccagattgctcagataattgctttaaatctcctgtggcagtcaagttacactgtgtgaaatttggcatgtcaattagaaacatcctcagatttgcatataggcagatgatgctttcatca

SEQ ID NO: 12792 - DNA, 524 bp, Homo sapiens
  MAP TO AP001433.1; EXPRESSED IN BONE MARROW, SIGNAL = 1.1; EXPRESSED IN LUNG, SIGNAL = 1.1; EXPRESSED IN PLACENTA, SIGNAL =   1; EXPRESSED IN ADULT LIVER, SIGNAL = 1.4; EXPRESSED IN FETAL LIVER, SIGNAL = 2.1; EXPRESSED IN BRAIN, SIGNAL = 1.1
tcctgttggaggtagcaaggacattggtgctgatgctggcggcagttgtggtggtgctgggctgggtgtgggttgatggtctcaagtgtgggatggggaaggggtgtgggatggtgggggtggagacacgcatcacatgactctcagatgattcttggcaataagaagacaaagattttcatgttgggagcttaaacactgaagaatttgcaggtatctttttaaagcattcttgtgattcttctttaaatcaatggttctcaaccctggctgcctgctacaaccatgtgggagcttttgaaacataccagtgcagagactgttccccattgtaattctgatttaatcagtctagggttttagagtgaggagctcttcaggagatgcaaatgtgcagacagggcgttgaatcatttcaggtcaaatggggcatcccaatacagcagtaagagtgagagggagccctgggcacagccatttcttctgcaggaacagcactgatgtggtcctggctgatcgtaaag

SEQ ID NO: 12793 - DNA, 501 bp, Homo sapiens
  MAP TO AC012207.5; EXPRESSED IN PLACENTA, SIGNAL = 0.7; EXPRESSED IN FETAL LIVER, SIGNAL = 0.63; EXPRESSED IN BONE MARROW, SIGNAL = 0.61; EXPRESSED IN ADULT LIVER, SIGNAL = 0.66; EXPRESSED IN BRAIN, SIGNAL = 0.63
tccacacacttttcaatgcagtctttcatttttaattgatacataatatttgtatgtatttactgggtacatgtgatattttgttacatgcatagaatgtgtaatgatcaagtcagtttatttagggtatccatcacctggagtatgtatcatatctatgtattagaaacatttcaagccctcctttccagctattttgaaatataacatacattgtttttagctatagccattctattctgctactaaacaatagaatttattcgttctgcctaactatgtttgtacccattaaccagcctctttcagctcccacccccaaccaacccacacacccttcttggtctctgatatctacattgtactctcctaccttcatgagatcaactttgaaagctcccactatgaatgagtatatgcgatatttgtcttttggtgtgtggtttatttcacttaaaataaagacctctagctccatccacgttgctgcaaatgacataa

SEQ ID NO: 12794 - DNA, 513 bp, Homo sapiens
  MAP TO AC018684.2; EXPRESSED IN ADULT LIVER, SIGNAL = 0.6; EXPRESSED IN BRAIN, SIGNAL = 0.49; EXPRESSED IN BONE MARROW, SIGNAL = 0.57; EXPRESSED IN PLACENTA, SIGNAL = 0.6; EXPRESSED IN FETAL LIVER, SIGNAL = 0.48
ggtccagtcgtgaccaaatccctgagttttgtttggcaatgtttttatctctcctttatttttgaagaatgtttttgcagaggttagtattcttgattggaaaggtttttttccagcattttgaatatatcaccgcactttcttttggcccccaggaaaaaaaaaaaatctgttaatagtcatgggagttttcttacatgtgacaagctgcctttatcttgctgctttcaaaattctctgtctttgactttgacaattttaatataatgtctgttgatgtgtatttctttggatacatcttatttgagactatttgagtttcctggatttgagtgttcattttgtttcacagatatgggaagttttcagctgtctgggggtttttcatatatgctttctggttctccttctccccgctctctctctcctctctcctccccctggaaaatctcttgatgtgaatataggtctgcttgatggtatcaaataagttccttcagctttcttcatgcc

SEQ ID NO: 12795 - DNA, 596 bp, Homo sapiens
  MAP TO AC021732.3; EXPRESSED IN PLACENTA, SIGNAL = 0.57; EXPRESSED IN BRAIN, SIGNAL = 0.48; EXPRESSED IN BONE MARROW, SIGNAL = 0.64
tttagagagcatggcttggctgccataatactcaaaatcagatagctaatggtaatatggtggtggtgagagatcttttatagaaaaaatctttgcccacagctagctggaattatagaaaaaaatgatcaactctcaaggaaaatctgaaagtataaccacagcagactaaacaaatttaggtaatctgtatagtattgggaagcaatacagtaggaaacagaacaaagacctatattatctatcactgatgatgatgatgatgatgatgatgatgttgatggatatatattggtgttcgcaaagtatttcttgcattaataaccctgctagtttaggcttcacttttaactgaatttcagtcatttatttaaagtagaatgtggaagactgtaattcttcacctctccccgaatccacatcctttgctgtgtgactttgcagtttctctaattagagtgtatttctccaccccattgtgttgaattcagctaaccaattgtttggctaatgcaatattggaggaaaggatactgtgtgagttatgagccttaacaaacattgtgtgtttcttttgccatttttggattttgtcg

SEQ ID NO: 12796 - DNA, 509 bp, Homo sapiens
  MAP TO AC015493.4; EXPRESSED IN PLACENTA, SIGNAL = 0.63; EXPRESSED IN ADULT LIVER, SIGNAL = 0.52; EXPRESSED IN FETAL LIVER, SIGNAL = 0.78; EXPRESSED IN BRAIN, SIGNAL = 0.67; EXPRESSED IN BONE MARROW, SIGNAL = 0.57
tggaagatctttccccactggcagcaagaggggaggatggcatctggcagatcctgatttacattattccagctccctgacctaaaagataaaacctacccctcctcatttaataaaatcagaaggaaaatgcaaccagagaataaaaaaaagaaaatcacaaggaaaggctttggttcacctcatttggatcatatggcccatcttgttttccaagggaaagcagctctctgattggctgatcctgggtcacatgcccattcttatgtctggaaagaataagaattgtgatcattggtccctcaggagtcacatggcaatgctgaaggaggaaaagcttttctcagaccactatttctattgcatgtgatagaggcaggagataactcctgtaaaggtgacaggcaaagaatgggatgcttcctggctacattttgtgtgtgtgtgtgtatgtgtatgtgtgttgggggtgggttagaatgttggttggtgatgagggagctggagag

SEQ ID NO: 12797 - DNA, 501 bp, Homo sapiens
  MAP TO AC015474.3; EXPRESSED IN LUNG, SIGNAL = 0.95; EXPRESSED IN ADULT LIVER, SIGNAL = 0.78; EXPRESSED IN FETAL LIVER, SIGNAL = 0.67; EXPRESSED IN BRAIN, SIGNAL = 0.58; EXPRESSED IN BONE MARROW, SIGNAL = 0.74; EXPRESSED IN PLACENTA, SIGNAL = 0.76
gccagtgtctccatcattttgaaacatttttctaaatgttcagctggtacttctgattaggcaatatcatcagagcagtacatttattggaatcgtcgatatattaggattaaccatacaaaattgccagttttttgtaggtcaaaaattggtaagtaacagcagttttatatgatctgactgggtgtagttaaactttgaaaaaaaccctaaaatgaaagattctcaagaacatacttatttccattttcatagaaggttatatttggagtcattaagtcttgtctcccacagattgataagaaacagtacaacaagatcttggaactcatccagagtggtgtggctgagggcgccaagctggaatgtggaggcaaaggactgggccgaaaggggtttttcattgagcccacagtgttttccaacgtcactgatgatatgcggattgccaaggaggaggtatcaaatatgctgttcttacaaaagccacatctttcttgg

SEQ ID NO: 12798 - DNA, 519 bp, Homo sapiens
  MAP TO AP001426.1; EXPRESSED IN BONE MARROW, SIGNAL = 0.73; EXPRESSED IN ADULT LIVER, SIGNAL = 0.52; EXPRESSED IN BRAIN, SIGNAL = 0.45; EXPRESSED IN FETAL LIVER, SIGNAL = 0.55
tcacataccaagcatgtggctccctcggatccccagtgggaactgggcgagggcaggaggatgctgtcgacacacctggttgaaccctctgaagctcaggtcataagaaccatagccacagccatctatccttggaggaagggggagcttactctctctgaggtagtggagatgtgagagaaggatgtcggcgttgtagctgggggtgagcctctggaagtcgtccttggtcatcttgcacagttccttcccatcgatgttctggaataacaagatgttgacgtctggaaggccatattctttcaccgcccactccagccactgccgcacatggtctgtactccatagcgtaggatctgaaaggggtgggaacacattcagtcaattcctgaagccagggatcttcatcttggggtagatccccatccacgtgggatttctgaccagctgccttccacaagcacagcctccagccagcctccctggctacccaggagaacattttgggggaaagacaaa

SEQ ID NO: 12799 - DNA, 539 bp, Homo sapiens
  MAP TO AC008958.3; EXPRESSED IN BRAIN, SIGNAL = 0.48; EXPRESSED IN BONE MARROW, SIGNAL = 0.52; EXPRESSED IN PLACENTA, SIGNAL = 0.49; EXPRESSED IN FETAL LIVER, SIGNAL = 0.64
tgcttggaatgctgtgagagaagggggtctcattcccactaagtgtgagtacacttatgtccttgattgcagctggcagccatcctatgagaatgagcagaatctgatttacgataaaacagacactttgaatggcagaataaaggaaggaaaccaaatatttaaagacaccatagagcccatagatcaactaattgtaaagcctgaccattccagttatgagtcagtaagtcccctctatgatgaaatcagttagaatggggttttatattatttgcctcatataggatcctactgataaaggaatgaaaactgataaaggaataagtatagggagaaaccaacagtatggaggtcagagtacaagaaatggcagatgagtagagggtctcacatacttggtgttggtgcaaaataataaagatgttcagttcaggatttatacagttggctgaaaatttccaaaataattatttctgccaacagaggccactaagaaagagtcagtcatggccatgacgggctgtacttcaaggaag

SEQ ID NO: 12800 - DNA, 503 bp, Homo sapiens
  MAP TO AL133377.4; EXPRESSED IN BONE MARROW, SIGNAL = 1.3; EXPRESSED IN PLACENTA, SIGNAL = 0.63; EXPRESSED IN ADULT LIVER, SIGNAL = 0.72; EXPRESSED IN FETAL LIVER, SIGNAL = 0.78; EXPRESSED IN BRAIN, SIGNAL = 1.2
actggcttctgggttttctgataattcactgtactagtacaacatcatggcaatttgtatttccaggattttcattgtcttggttatcatttccaccttcttcgttattctcaggagatacactctcctttttttctgtgggagtagtaactgttttctcaggttgagaattcatgttctcagcattactgtccttctctgtatttcttggcttggcagcttcattgctgggctctgggctgggcctgtctgtctcttccacaggctcttttggtgccacttttttgtcttcagctgttttgctatttaaatgaacagctgaggaggaatttttggagtccttggcttttttgtgcatagaagtttgactgttatgactggaggcgagaggggaagacattttctgggctttgcttccctccgactgttcttttcgaggcggtccccagataaagttctctgaaggcgtgtagtgtttctgggcgaaccgcaggagctttctc

SEQ ID NO: 12801 - DNA, 523 bp, Homo sapiens
  MAP TO AC021498.4; EXPRESSED IN ADULT LIVER, SIGNAL = 0.75; EXPRESSED IN BRAIN, SIGNAL = 0.67; EXPRESSED IN BONE MARROW, SIGNAL = 0.63; EXPRESSED IN PLACENTA, SIGNAL = 0.68; EXPRESSED IN FETAL LIVER, SIGNAL = 0.67
aagacaagcaatgaggccagggttggccaggagcccatcacagttgtccaggcaagagttgatggtgactcagactaagcctggggcagtgaagatgacggatggtgaaaggcaggaagtatttagtaaaaggatagaacttgctgcaaaattagacatggtaggtgcagaaaaagaaaaatcaaaaattcccaggtgactcctattgacaggaggcatacattcattagatgttctgctcacatatggtctatcataatctgtaactagtttctaatactttacatgttgatattagtagccaccatctactatgtatcagatgctttacataaactatctcaattaattctcatttagcaaccttatgagacaaatatgtgctattattagccccattttataaataaggaaatcaaattagagattatgtggcttattcaaattcacacagctaataagtggttgaagtagaaaagaatcaaagcaaggcctatgtgccactaagccacgcccttaatca

SEQ ID NO: 12802 - DNA, 505 bp, Homo sapiens
  MAP TO AP001537.1; EXPRESSED IN LUNG, SIGNAL = 0.96; EXPRESSED IN ADULT LIVER, SIGNAL = 1.3; EXPRESSED IN FETAL LIVER, SIGNAL = 0.9; EXPRESSED IN BRAIN, SIGNAL = 1.1; EXPRESSED IN BONE MARROW, SIGNAL = 0.98; EXPRESSED IN PLACENTA, SIGNAL = 1.2
tagttgtggcaggtggtgacgtgctgttgcaaaaatgcatcgtttgtgcttcaataggaaaatgatgagattgagtttggggataatagatatttttttcaaaatgacccatacattttttaaaacattctgcaagggcagacatatggtcactgggtccatgacttttagagagtctatgaaactcgggtcaatgactcagggaacagacattccagaaggtaagtgaaatggcaagttaaaaagaaaattcaagtgcgacactagttactgagtggcctgtggaaataatttcacagttggatgggtggtccctccaattattaaaaatgctaaccagaaaattttctagcatgattaaataagattctgttgtaaatgtttttctcatatagaaggtctgccatcatatatgggcaactatgggggcacttattaattactttttcaatgaaagttagttgagacagaaactgtgtgttctagcttccagcaacacagattg

SEQ ID NO: 12803 - DNA, 592 bp, Homo sapiens
  MAP TO AL132793.24; EXPRESSED IN ADULT LIVER, SIGNAL =   1; EXPRESSED IN BRAIN, SIGNAL =   1; EXPRESSED IN LUNG, SIGNAL = 0.95; EXPRESSED IN PLACENTA, SIGNAL = 0.96; EXPRESSED IN FETAL LIVER, SIGNAL =   1; EXPRESSED IN BONE MARROW, SIGNAL = 0.89
aaattgtccaccagcattcacattattttattttattttgttattgattatattaacactttcaaatagtattcaacatatctacagatttttagctactactgcatttttctaatctgtatttgtatctgtatttgcagtattctatctgttaatctaggtgatgatctccaagattaaagactgtagtcctttagtcattcagaatgccttttggttagtcagaagacaactaatcataaatatatctgagcttcctcaatggtttcttaccactcaaaactctcacaacccagtgaaacataatgtttcacttaaatccagtgggaaacctaagggaattaccattaagagaaaaatgaggattacaggagtaactgtgttggagtttgctaattgataaggtcaggaaggcaatcactgctaaagtgcacaatgtcaaaataatatttttaaaatattgtcaggcatattactcagtgttctctagagggaaagaactaataggatagatgtatatataaaggggaatttactaaggtgtattaactcacacaatcacaaggtgaggtcccacaatagaccatctgca

SEQ ID NO: 12804 - DNA, 565 bp, Homo sapiens
  MAP TO AC013332.4; EXPRESSED IN PLACENTA, SIGNAL = 0.49; EXPRESSED IN BRAIN, SIGNAL = 0.52; EXPRESSED IN BONE MARROW, SIGNAL = 0.53
aggtaccatgcatctgggagggaacttcctagtgccctttccccagctgtggtgacatcaaagtgcagcaggcacaagctatgcaaatatccatgttgccttggtgatgaatagaaagtggatttggtgttgggcagtattgtagcaatctcctctgacacctgaaaacagcatgcatatggaaccagtgctgaaataccagctcagctgccgtttgactgtggttgttggtctgaaagtggagagagaccagatcttcctgaagagctccacatcatgctcaactgtgtgctgggcctttttctctctgacttctgtgtcacttagttgccagttaaaatgctgtttagactgctgggttatgaacgagtcgtggagtggtagttctaacagaatcaggggggtgactcctagttccatgtcccaccctgccacctcagtgtccctaaagatgccgtgacagcccctgggtattctcaggctcctggatgtccatcccaggccctctcttctgcagcctgtggggatcagacaccaaccagagagactgcttcctcagttgcct

SEQ ID NO: 12805 - DNA, 596 bp, Homo sapiens
  MAP TO AF241727.1; EXPRESSED IN BONE MARROW, SIGNAL = 0.65; EXPRESSED IN PLACENTA, SIGNAL = 0.57; EXPRESSED IN ADULT LIVER, SIGNAL = 0.66; EXPRESSED IN BRAIN, SIGNAL = 0.55; EXPRESSED IN FETAL LIVER, SIGNAL = 0.65
tccattccttagggggaatctattttttttcacagttattctgagaagttagggaaaagtcttggtttgtcaaagacaaacctctgtcaaagagagaccataatccaacatgtaaaacaaaacccagaattcattacttaccaaagtaagagacagctgtgttaagcatagtctgtgagtgaagcagattactgatctttttgggaaacatagtggtgttttggttacagaggcatgagtggttgaacttgaccttagaagcatggctatttgagtgagactgttgttgattgagaagcatgttcactgcagtgtgtctgctgctgatttgctgaccttgaatcgtgtgaagctcattgtaattggcttccagaagtgtgttcctgaagcaagttgagttgtcattgatgattagtctgaggtgaattgccctcaatcaaacaggtttaaaagttggtgctggtggttactagttaccatggctattgaataatcaatctttttctcaccagtaatacagagacttttattcttacctcagactgctattcttcttagtgaaatgaagttgcttctgcacctcaattcccattcat

SEQ ID NO: 12806 - DNA, 531 bp, Homo sapiens
  MAP TO AL161777.1; EXPRESSED IN PLACENTA, SIGNAL = 0.65; EXPRESSED IN BONE MARROW, SIGNAL = 0.43; EXPRESSED IN ADULT LIVER, SIGNAL = 0.54; EXPRESSED IN BRAIN, SIGNAL = 0.44
ttcaaaaagttgtgtcccccctaagcacagtcattggctgtctgtaaatcaatgaaatatatctggagtttctggccaagtagcaaataccatttcacatttccaatggagaaatttccacatatcctgtgtgaagttttctcatgtaagtcaccacaatcaaaaaggaggcttaacttcgctgaagcttgacaaaggaagactataatttaatgggaatgcacccagcaacatggccgtgcttagcatgggatgtcagcacaaacaggaagaaatattccattatgtagagaactctttcagagtggtagacagggaagggaagaatgtcaactgtctgagccaaagtcccagagaaagcattttggaaattttggagaatatagttaatcattataataatgatgattactattatgattcttacagtgtcatatacaaccatgggttcacagggcaatagccctgttagctggattagacaaaaataaagtttaatcctaatgtcgtggctgttgagatgggccttta

SEQ ID NO: 12807 - DNA, 524 bp, Homo sapiens
  MAP TO AC021003.4; EXPRESSED IN BRAIN, SIGNAL = 0.58; EXPRESSED IN PLACENTA, SIGNAL = 0.58; EXPRESSED IN FETAL LIVER, SIGNAL = 0.5; EXPRESSED IN BONE MARROW, SIGNAL = 0.46
ttgtggcagaaacagtgaggaagacaggaaaggggcaaagtccttgtcttcattcatcttatcatagtggctgggttggaggtaaggcctggctttccatcccttctttggggcttacagtcttccagcgtggggcatacaggaaaactctgagatgtggctggctcctggtatgttaaaagaggaggtaagggtatttagatactaatcgttttctgtttcaatagatcctagctttcaagtctattaatctccatgagggcacaaaaatcctattataggaaatatcaactctcctttttgcctcttcttctccctgtcctcctcctcctttttcctcttcttgcacttcttcctcctcttcgtccttctccttctttaatagcaaggctattacttctgccctacacccaagcagatggctgacctggtctaacttagagagaaagtcatttacagacgaatgcaacagaagcacagcgtgacatttctaagtgcatctcccatcacagaagcacgcattt

SEQ ID NO: 12808 - DNA, 600 bp, Homo sapiens
  MAP TO AC011957.2; EXPRESSED IN ADULT LIVER, SIGNAL = 0.71; EXPRESSED IN PLACENTA, SIGNAL = 0.74; EXPRESSED IN FETAL LIVER, SIGNAL = 0.63; EXPRESSED IN BRAIN, SIGNAL = 2.9; EXPRESSED IN BONE MARROW, SIGNAL = 0.64
ccaaagcaagtccaaggaactttctggtaagcgcccagctacccttcactaacactcctccctctccttctcttcagcatccagcgtcggctgtccctccagctccccatcctccaccacgcctacctcccatccatcggaggcgtggacgccagctgtgtcagcccctgcgtcagccccaccgccagcccccgccacagacatgtgccaccctccttccgagtcatggtctcgggcctgtaagggtgggaggcctgggcccggggcctcccccgtgacagaaccacactgggcagaggggtctgctgcagaaacactgtcggctctggctgcggagaagctgggcaccatggctggcctctcaggaccactcggatggcactcaggtggacaggacggggcagggggagacttggcacctgacctcgagccttatttgtgaagtccttatttcttcacaaagaagaggaacggaaatgggacgtcttccttaacatctgcaaacaaggaggcgctgggatatcaaacttgcaaaaaaaaaaaaaaaaaaaaaaaaacaaaaaaactagacaaggagagaggcactagaactccagctgg

SEQ ID NO: 12809 - DNA, 576 bp, Homo sapiens
  MAP TO AC018511.3; EXPRESSED IN PLACENTA, SIGNAL = 0.49; EXPRESSED IN BONE MARROW, SIGNAL = 0.62; EXPRESSED IN FETAL LIVER, SIGNAL = 0.54; EXPRESSED IN BRAIN, SIGNAL = 0.71
accatttttaccctccccacttaggctgagcggctaatggaacaagctagctgctgggagaaggaggaacaagaaatcctgtcaactagagctaacagtaggcaatcacctgcaaaagtacaatcgaaaaataaatatttgcattccccggagagccggccagtcacaggggagcgagggcagctgctggagctgtctaaagagagcagtgaagaagaagaggaggaggaggacgaggaggaggaagaagaggaggaagaagaggaagaggatgaagaggaggaagaagaggaagaagaagaagaagaagaagaaaatattcaaagctctcccccaagattgacgaaaccacagtcagttgccataaagagaaaggtaggtgtctgtttagattttctgtgagtcgcgttcaatcaaatcttatttgtcattgcagacattctgtctattagtatttgtttcactctctgttctttagtcgtagtttatgtgtacccagtcccgctgatcatatatcataatcgtttatctcacagtcatgattatgtttacttttcaggtttgttagtgcggtga

SEQ ID NO: 12810 - DNA, 565 bp, Homo sapiens
  MAP TO AL122058.19; EXPRESSED IN PLACENTA, SIGNAL = 0.7; EXPRESSED IN FETAL LIVER, SIGNAL = 0.64; EXPRESSED IN BRAIN, SIGNAL = 0.52; EXPRESSED IN ADULT LIVER, SIGNAL = 0.71; EXPRESSED IN BONE MARROW, SIGNAL = 0.6
aaaggtcaagttgtgtgcccagggttatgccactaggacagtccaggcaggactggaaaccaaccaggctacctgcaagcccaagcttgcaactgtacacaaagacagttcttctggacactgccttttcagagcctttcaccagtcaacctcgttggaatgtaacccactaagccacgggcaggagccgagccactcatgtcccctttgatgaggcacacatctccggttggctccagcccccagctctccgtactaacactgcagacagccaccgctatttatcttcctgtctgacctggacaactctaggtttgtgaggtctgctagatcacccttctgctgcatgccataatatgttagacattcgtcaggcacatcaatgtgaacaaggctcagagaagacacacgggaaacagacctgtaatgttagcaagtattgggagattaacagacccggagaagcctacacagggaagaagaaccagggtcagaaacagacaggaaccgaggcaggtgcgagggcacagcgcaattttctcaggcacaagcacagaaggaacga

SEQ ID NO: 12811 - DNA, 589 bp, Homo sapiens
  MAP TO AC021000.3; EXPRESSED IN ADULT LIVER, SIGNAL = 0.54; EXPRESSED IN FETAL LIVER, SIGNAL = 0.58; EXPRESSED IN BRAIN, SIGNAL = 0.65; EXPRESSED IN BONE MARROW, SIGNAL = 0.52; EXPRESSED IN PLACENTA, SIGNAL = 0.54
gaaaaggaaaagtacatatgggatgtactagcagttgctgctataggttcttttaacttttgttatttaaaatatctttttcagattaaaaatatcttgttgattggtattcatagagatacctatcctatttctattcttaaaacataatttacatgcagaaaaacttacccttcttagtacatttctgtgagttttgagaaacacatggtcattgtttagcttgaggaacacatcagacagagtgagaaacagactattatgaagtctggtcagagaagtaggcaagacctcactattagggggcattataggtgatgttagagaggctggttttagtctaaatgcagtaggaagccactggagagttttaagcaggggagtgatgtgatgtaattgatgttggaaaactcattttgagttttctctggagaatagattgtagaggacgcagggaagaaaagagttcaagcatgaggctcttgaatattccaggcaagagttcacagtcattgaacaagggtggtggcactggagatgccatatactcacagatgcagtgagtatatggcagtcaacaggatttgct

SEQ ID NO: 12812 - DNA, 562 bp, Homo sapiens
  MAP TO AC025324.2; EXPRESSED IN PLACENTA, SIGNAL = 0.88; EXPRESSED IN ADULT LIVER, SIGNAL = 0.89; EXPRESSED IN FETAL LIVER, SIGNAL = 0.73; EXPRESSED IN BONE MARROW, SIGNAL = 0.76; EXPRESSED IN BRAIN, SIGNAL = 0.51
ggtgcttcgactctggtctcgctgcaagacactcaccctgtgcatcttcccactctcctgccaacctcatccctggcctctgctggccccaccctgagactttaatcctgtaacttctttctaggaacacactctggaagtgggcacagaacttgcaggctgtaaaccttcttcaccatgtttgacactgaccctgactaaagaacttgaaaggaggcctagcgtgtcctcatggttgactgtgaagggaattcctcgtacacctgtgggcaagtgggggcaggtggggacaggctggaccccacccagctgcaggtgcagtacgaggacaaggtgactgcagacctgtgggaggggccaccggtgcagctttgggagcacatgcctgtcagtccagtgtttcagacacaaaaatgatgcccaggctcctgcaggaagctgcatgtgggatctttgccttgcatttcgtgatgtagagttcatcacaggagtgggaaggggcatccttgctgtggccaacccctggccccagccctcgcattccattccctggatgatgagt

SEQ ID NO: 12813 - DNA, 572 bp, Homo sapiens
  MAP TO AC015873.2; EXPRESSED IN PLACENTA, SIGNAL = 0.69; EXPRESSED IN ADULT LIVER, SIGNAL = 0.76; EXPRESSED IN BRAIN, SIGNAL = 0.59; EXPRESSED IN FETAL LIVER, SIGNAL = 0.71; EXPRESSED IN BONE MARROW, SIGNAL = 0.61
aacctgacaccgatccaaagggccaaaatgaaaagtatattaaatatatgactttaaaaactacacaaaaggacagggaaatgtctgatttcttgcattattgtctttcagatggtcctaccctgatgtatttcttgggttccttctaaatggaagtggaaagtaaggttattcttcatccattcagcttgtgaaaatgtgtgttataatgctgttaaatcaatggcataacattgtctaccctttagaaaactctttgtatcatgtatcttttataaaatttaagtgtattgcttttaagatagcaaaagcagaaatagtcctcaactgtttttccgagtgttgccacttctacagcatctacactcatctgattcacttgggttgtagatttcatttttatgcatctctgcaaccttttctcttcttcaacacctgtaaaaaaaataataaaaacgtgcatatctattatcttaatatttatttggcttctagtaaaaatagtttttcctgtatcccaatatttgtgatttgttatacaaacaaaagtaggtcaagtgaggtggctgaca

SEQ ID NO: 12814 - DNA, 575 bp, Homo sapiens
  MAP TO AC021383.3; EXPRESSED IN BRAIN, SIGNAL =  44
tcctcaaatcctctgatggcagtttgaacactctgtatttgggtaagtcttctgtgtgttctgtataatttaactcttttagaagtcatcaaatctatgcttaactaaattatcattacatttatttatccaatcacttgttttttgcaatcacttgttttttgctctaataagacccttgaatttcaagaccttatctgatttctcatttaaatagtaatatgctttacaaatgttattgttaatgtaggtaacaataacaatgttagcatagatatgaatactctttttgactccctttcttctcatatgcccccatctctaaactattttccatttgtgtctgtttccatatataaaacacaacttcttttcctagaaattctgagttttaaaactagtaatataaactggggtgtgctaggtcactacatccaagtcatctgttttggatcggctaatattatttcttgcagatgacaggaaatgcaattcaaactggattaaacaacagtacaaaaacatttttattgccttatgtaactgaaacatccagctgtacgttttcaggtgca

SEQ ID NO: 12815 - DNA, 555 bp, Homo sapiens
  MAP TO AC018780.3; EXPRESSED IN PLACENTA, SIGNAL = 0.6; EXPRESSED IN BONE MARROW, SIGNAL = 0.99; EXPRESSED IN ADULT LIVER, SIGNAL = 1.3; EXPRESSED IN FETAL LIVER, SIGNAL = 0.89; EXPRESSED IN BRAIN, SIGNAL = 1.3
ttcctaatgccagaagggtgaccagtgaagattcaccgtcaaaccatgaaagtcctttcttggatccactttatcttgattagtctgcattttactagttcactggatccctcctctaggggcctggggactttcactgatgctcttcctgattctagagcaaaggtgtgggaaggggaaatggaggaatgccctcctgtctgtgtcgttctctgtgccacagctacagatgcagaaggtttctctggatagcacacctctgaatgtaaatcatgataaaatggatatttggaaacttactcctaagctgtgatttagggtgtatttctacttctggactgcctcaatatcaagggctgagacttttgaattttgaatattcgttgggtttcatgttaagaagcctgtggtctaggagtgctattcagtgtttcttttcctgataaacactttgaatattttttttgtgtttttgtttccttttctgaagctgttcctccttttaaatatttttaatcacattgataaaatctatccttcaccacctctggttct

SEQ ID NO: 12816 - DNA, 520 bp, Homo sapiens
  MAP TO AC022904.3; EXPRESSED IN PLACENTA, SIGNAL = 0.61; EXPRESSED IN ADULT LIVER, SIGNAL = 0.62; EXPRESSED IN FETAL LIVER, SIGNAL = 0.76; EXPRESSED IN BRAIN, SIGNAL = 0.61; EXPRESSED IN BONE MARROW, SIGNAL = 0.73
tgcaacactggaagttgctctgggtcaggcagtgagtgagtggtgagtgaatgtgaaggctaggacagtaccgcacactagtgcagaccttataaacactgtacacttaggcaacactaaatttataagaagatttttttctttcttcaataataaattaaacttagcttactgtaaattttttactttataaatttttcaacttttaaaaactttttgacttttgtaataacgcttagcataaaacacaaacacattgtatagctgtccaaaagtattttgatatccttattctataagcttttttccatttttaaatctttttttacttttaaaacttttttgttaaaactaaaacacattagtctaggcctacataggggcaggatcatcagtatcactgtcttccccttccacatcaggtctcactggaaggtcttcagggacaataacactcatggagctgtcatctcctaggacaacaatgccttcttctgagggacacctgcctaaggctgtt

SEQ ID NO: 12817 - DNA, 589 bp, Homo sapiens
  MAP TO AC009155.3; EXPRESSED IN ADULT LIVER, SIGNAL = 0.68; EXPRESSED IN BRAIN, SIGNAL = 0.89; EXPRESSED IN PLACENTA, SIGNAL = 0.71; EXPRESSED IN FETAL LIVER, SIGNAL = 0.62; EXPRESSED IN BONE MARROW, SIGNAL = 0.56
cactggtgtccatgaggttgcccctcatctcagccgtgccaggcaggtagccccggactgaacagaaggaaaaaaccgcaagtataaccaggtatacttttaggtcatcaattacctgctcttaaaaacaaaaacctaagttctccccaactttggtgaatttattagaactacaggatctcggtacaaatacttcaggtgaaatttcctgatattttgacccaatcaaatggaaaacgtgactttttaaggatttttctcatcccaatttactttccccatccactgagcagcagattaactgtatgtggccatccatccggtaatctccctctaccacaccggcaattgcagaagaaaaattgtccttaaagatgacctccccagttcggtcacttcgagcatcaacctacaaataaaacacaaatttaaaagttgcttatgctacatgtttaaaaaccacaaaatttaaaaataaaaatcagctttaaaggtcatttagtctagcagttttcaagagtattctatgaagccctacaacttctcaggagatacctatgactgctggggccaagagggaccctaaaga

SEQ ID NO: 12818 - DNA, 590 bp, Homo sapiens
  MAP TO AF240628.1; EXPRESSED IN BRAIN, SIGNAL = 0.86; EXPRESSED IN LUNG, SIGNAL = 5.5; EXPRESSED IN PLACENTA, SIGNAL = 6.6; EXPRESSED IN ADULT LIVER, SIGNAL = 3.3; EXPRESSED IN HELA, SIGNAL = 9.7; EXPRESSED IN FETAL LIVER, SIGNAL = 8.2; EXPRESSED IN BONE MARROW, SIGNAL = 1.2
cttcaagaccatcgaggacctgagtgctcatatcttcgcaaatactgtggatagttcctgcatcgttctgcagatcgacaatgcccgtattgctgctaatgactttagagtcacgtatgagtcagagctggccatgcaccagtctgtggagagcaacatccatgggctccacaagatcgctgatgacaccaatgtcactcaactgcagctggagacagagatggaagctctcaaggaggagctgctcttcatgaagaagaaccacgaagtggaagtaaaaggcctacaagcccagattgccagctctgggttgaccgtggaagtagatgccctcaaattgcaggacctcaccaagatcatggcagacatccaggcccaatacgatgagctggctcggaaaaaccgagaggagctggacaaatactagtctcggctgattgaggagagtaccacagtggtcaccacacagttcatcgaggttggagctgctgagatgatactcatggggatgagacatacagttcagtccttggagatcgacctgtactcgatgagaaatctgaaggccagcttggagaacagcctgaagg

SEQ ID NO: 12819 - DNA, 544 bp, Homo sapiens
  MAP TO AC022860.3; EXPRESSED IN LUNG, SIGNAL = 0.87; EXPRESSED IN PLACENTA, SIGNAL = 0.84; EXPRESSED IN ADULT LIVER, SIGNAL = 0.95; EXPRESSED IN BRAIN, SIGNAL = 1.2; EXPRESSED IN BONE MARROW, SIGNAL = 0.81; EXPRESSED IN FETAL LIVER, SIGNAL = 1.2
ccttgttcccgcataatctccctaaccccgaagaattatctgttcttgggtttggggaggtctggtagtggatgaacttcactttgatggtctccatgggacgtacgaccaccatggcctcggccatgccggtgtctagacctcacagcagcccgcgcctgctgttcagcagtccctgggcattccacatctgggtgcagaggaactccaacttcccgaacctgactctgcctcggggatggagccgcagagcaggaagctgaggccgcggttcaggcccaggacgccgtggctgtgactgtgccccacaggcccccatgccgggtgcccggcgggggcgagcgctcgttggtcctcacgtgctcggtgggaaacggaatacaggtgtggatgctgccgtccaggccacctgccgtgatcgccttccccgggagagtcccctcggccttccagaacgctgcgctgccatggtgggcgggaggggtgacgcccggcatcgccttggtctgagcctcctgaactccccgctctgaccttaatttgg

SEQ ID NO: 12820 - DNA, 528 bp, Homo sapiens
  MAP TO AC016282.3; EXPRESSED IN PLACENTA, SIGNAL = 1.1; EXPRESSED IN FETAL LIVER, SIGNAL = 1.1; EXPRESSED IN LUNG, SIGNAL = 1.1; EXPRESSED IN ADULT LIVER, SIGNAL = 0.89; EXPRESSED IN BRAIN, SIGNAL = 0.96; EXPRESSED IN BONE MARROW, SIGNAL =   1
tctccagtgaggaaagcagccctgcccagcaagacctgtgttggacttttgatacacagaactacaagattataagttggtcttgtttcaagcctctgaagttgtggtcatttattacagcggcaacagaaaacaaatacaccctttctagggaccattttgcactgtcatcacatcagcaattgacgagattgttcccccacatcttcacaaacagaatgtgttgctagtctttgagatttttgccaatctgatgattggtgagaaagagtatctcagtgcaactataatttgcactattctttttatgaatgagattgaacatcttaacatttatatttatttgtattaaaggaatgtttgttcatgtttgttgcccatatttctattggattgttgatattttttaaatcaagttctaagagtttattcatgtgatgaagaccttatatatgatagcagttgcaactatttttcctaaatcatttactttctatgtgaatttaagggtgggtgttgacctattcg

SEQ ID NO: 12821 - DNA, 552 bp, Homo sapiens
  MAP TO AC022843.3; EXPRESSED IN ADULT LIVER, SIGNAL = 0.86; EXPRESSED IN PLACENTA, SIGNAL = 0.84; EXPRESSED IN FETAL LIVER, SIGNAL = 0.84; EXPRESSED IN BRAIN, SIGNAL = 1.3; EXPRESSED IN BONE MARROW, SIGNAL = 0.73
aaatgaatggcagttctgaggaactaaactgccaaatcaagaaatgtagctagccaattactgtgacaactagcaaaatagggcagaatattacatgggccttactgatgaaatcttgcagggtcagaaatggcttgcttatgatcaaaactcctactgatgacttgctgtcagagaaatgtatggagaccatggttctcaaacacatttcattccatgtaaggcttagcttatggattttattcctcttcctaaataactcattaagaaagacctcatatgtttcctaaaataaaatcttgaattaatccagaaaaggcactattttatatagtgctttggttttcatttataaatcaatatatcttcctaaacctaatttttttcaattttaaattttaaaataatggaatacattacaaaaatatgttcttaatttacagttggaaggtatttgatctatgagaagacttggctctccatcttgctaccaagaagttaaaggaagaatttgaaagttctgaatctgaatcacttgttcccctaggcaag

SEQ ID NO: 12822 - DNA, 598 bp, Homo sapiens
  MAP TO AC018993.3; EXPRESSED IN PLACENTA, SIGNAL = 0.81; EXPRESSED IN ADULT LIVER, SIGNAL = 0.66; EXPRESSED IN FETAL LIVER, SIGNAL = 0.81; EXPRESSED IN BRAIN, SIGNAL = 0.94; EXPRESSED IN BONE MARROW, SIGNAL = 0.72
tgttgctaccagatgaattgcttcatataaaagcacttaccacaaagacctataatggaggttaagtgctatactaattactaatttcaatccttattacctatattttgcagtacaggcactttaaaggaaccatatatagtctgctggttcccgcttctctgagtataagacttggtggtaaaagctctaatttagctgttcttctaataaaaataaccccaaaaattaataaaaagagccataccacaaactgacataaaatacatatactagactttgctactgaactcgtatttacaatcaccgtgtcacaaaaactttaatcaaggtgacacactcttcaaaatttgtattcagccattatggcaccgttgcagatgaagttccaagagaaaaaggtatttgaaattttcatggcttatttcctacctcagcatcacactgaaatgaacacagagcagatgattaataaaacatctgatgacaatggtgactcccctgagttctttatatattgatcattaactttttatatgtatatattgaaattcttcatatgtgctttattttcttgagggccgactctgtgttttac

SEQ ID NO: 12823 - DNA, 585 bp, Homo sapiens
  MAP TO AC013785.4; EXPRESSED IN PLACENTA, SIGNAL = 0.74; EXPRESSED IN ADULT LIVER, SIGNAL = 0.61; EXPRESSED IN FETAL LIVER, SIGNAL = 0.77; EXPRESSED IN BRAIN, SIGNAL = 0.7; EXPRESSED IN BONE MARROW, SIGNAL = 0.68
tccaaatcaggatttccacccaggtcttcctgctactaaagggagcatctaacatttgcccagagtcagaagacctggtttctgcttctgagttgtcagctgactccatctggagagcagatgacacctcttcagctctgctctgggtttctccatctaccaaaaacaagaaccagaggtgttcttcagtttatatttaaatacttttattgctgcaagcacttccttctcttgactctgaggaaagtcacactacaagtactttcctcctctatcatcattcctctccagccaccccccacataccaacggtttcctctcatgtgtccttgagataaattcaattgtgataactagtcagaacatgggtcatgaacccagcggataggaatcttactgctaaacacgtttgttttcaatttcatggttttcttcctcctttcccagttgacaggaaggcaatcattcattcattcagcaagcaagcaagcatccacaatgagcctggatgccacatggaccacgatcaccaaggagatcgataaatcccagtaagttcagttgccctccactccacagaccagt

SEQ ID NO: 12824 - DNA, 591 bp, Homo sapiens
  MAP TO AC021468.2; EXPRESSED IN LUNG, SIGNAL =   1; EXPRESSED IN PLACENTA, SIGNAL = 0.84; EXPRESSED IN ADULT LIVER, SIGNAL = 0.75; EXPRESSED IN FETAL LIVER, SIGNAL = 0.92; EXPRESSED IN BRAIN, SIGNAL = 1.1; EXPRESSED IN BONE MARROW, SIGNAL = 0.75
ttatgctgatccctccaagcaggtctggctgctcagatgtgtaagctcagcctcttgacctcttaagcagttacacttacacagatcctatctgcggtctgactgcaactcctccagcctccagtagtgcctatttctcaggtggggtagggactgaggccattctgggagctcgagcacacagccagggctcctgggacactgacctgtggccgaggcaggggtcccgggcctcctgatcgcagagtgggccggtccagcctgggcggcactcgcacaccacgctgtccttctccacggagcggcacaggccgtgcttgcacacggtgcaggacttgcagcctggtgacacccccagggactgtggtgggagggccttgaagtcctgcagctcgttgttgatgcgcacctcatggatgcatccgtggaagccgcctagaggccggtccgtgccctggcgcaaggcggagaggccggtggaggtggggatgcctgtgggaggggagccaggacagtggcctgaagaccctcccctgccaccctgctgtcctcagagcgaaaaagcacttttcacacattcatggccagaac

SEQ ID NO: 12825 - DNA, 529 bp, Homo sapiens
  MAP TO AC021782.2; EXPRESSED IN ADULT LIVER, SIGNAL = 0.55; EXPRESSED IN BRAIN, SIGNAL = 0.59; EXPRESSED IN PLACENTA, SIGNAL = 0.5; EXPRESSED IN FETAL LIVER, SIGNAL = 0.48
atgggtcttggtcatcaaagtttgaaagacaccgagaaagaaattgattttattcttgtgttaggatatatgaaaggactgttagttaataactaactatgtgaagtccatttagctcttaaaaataagttgaaggctacaaaaatatatctaatctgagaaatattgggttgattaacagtaacctaaatgatgctgaaggataaagcagaacaaaatatttctgactcaagacatggagaacattaaatactagcgaaaaaaaaagaaggaattctcaaacacaaggagtcacctcacatccagaagtatttttgtggaagaagcattggtactaaccatattctattgcagctttcagcaatgcttcagcatgagtggagccaaatgcattgcgaacaaatcgtctccttcgacgaagatcatcttcccagtaatccaaacgccagaaatcatgcaattggctaagagtagagggaaaaaaagtaatccctattaataacaatgcatagctggaaatacatttttc

SEQ ID NO: 12826 - DNA, 556 bp, Homo sapiens
  MAP TO AC022050.2; EXPRESSED IN LUNG, SIGNAL = 1.4; EXPRESSED IN PLACENTA, SIGNAL = 1.2; EXPRESSED IN ADULT LIVER, SIGNAL = 1.4; EXPRESSED IN FETAL LIVER, SIGNAL = 1.2; EXPRESSED IN BRAIN, SIGNAL = 1.2; EXPRESSED IN BONE MARROW, SIGNAL = 1.1
ctccatggggattcttcatcatcagtagacacaaaaggaaaatgttcaagcttgattcacggaggggtggtttagtattttggagcaaatctgaaaatgaactgctgccttgctataactccattcaaggctggctttaaataacatgaagaggaaattctctcacttaggtagtgcattatacatgatattcaagtctgtatacagagaaaaagattgtgaggtaagaatgtacaagaactcctgattagtgataagtggctcacctgatttttctgggatcatgaaggagcaatattgaaagactggcataaagatttggagaaaaactggggctcgaaccataagctgacacaaagtttgcaggtctttgtggttcacattaacatcgataagggagaagacagcctctactgcagagaaggcattcaacacatgtagaacaagatagcttgtcttgtatacttcagccacatctatatttgattatctcatacttgcataatgtatacatgaatggagtagcactggtgttaggaggggtgttttgtatgga

SEQ ID NO: 12827 - DNA, 600 bp, Homo sapiens
  MAP TO AC015805.3; EXPRESSED IN PLACENTA, SIGNAL = 1.1; EXPRESSED IN ADULT LIVER, SIGNAL = 0.9; EXPRESSED IN FETAL LIVER, SIGNAL = 1.3; EXPRESSED IN BRAIN, SIGNAL = 1.2; EXPRESSED IN BONE MARROW, SIGNAL = 0.92; EXPRESSED IN LUNG, SIGNAL =   1
tcccctgcctgtagaacaagcacggtcttgctcgagacgcttgctttttcattggtgtccttactgagaatttcctcttggcacctaccagacatccagttgcacttgcctcctgtatccactccaatcctaatggcgagaataagctaatttctttgtggtataggcctgattttaattgcctgtgataccaatgaagtgttcaggaagcctgtcatatcctaaagaaatcaaactcacgtgccgactgaaacagcccattgaacaggaagaagagctccccatctgacaagagtctctttattgtcttgcagagatcaggaatggaaacctcaaggccattctaggcctcttcttcagcctctcccgatacaagcagcagcagcagcagccccagaagcagcacctctcctcacctctgccgcccgccgtatcccaggtggccggggccccctcccagtgccaggctggcacccctcagcagcaggtgccagtcactccccaagccccgtgccagcctcaccagccagcgccacatcagcagtcaaaagcacaagctgaaatgcagtccaggtgggggctccttgccaactgatggtt

SEQ ID NO: 12828 - DNA, 520 bp, Homo sapiens
  MAP TO AC009155.3; EXPRESSED IN ADULT LIVER, SIGNAL = 0.65; EXPRESSED IN FETAL LIVER, SIGNAL = 0.62; EXPRESSED IN BRAIN, SIGNAL = 0.98
accctggcaatgacactctcattcttccatatttgctgatcctcccggtcagtctcaacatttcagcctccattacctggtcacattaggacctacacctaccttggcattttcctcatagttacggagttccagcaacagattctgcttcttctgactcagctctcggatcaggtcctgctctgcactggtgtccatgaggttgcccctcatctcagccgtgccaggcaggtagccccggactgaacagaaggaaaaaaccgcaagtataaccaggtatacttttaggtcatcaattacctgctcttaaaaacaaaaacctaagttctccccaactttggtgaatttattagaactacaggatctcggtacaaatacttcaggtgaaatttcctgatattttgacccaatcaaatggaaaacgtgactttttaaggatttttctcatcccaatttactttccccatccactgagcagcagattaactgtatgtggccatccatccggtaatctccctct

SEQ ID NO: 12829 - DNA, 577 bp, Homo sapiens
  MAP TO AC013644.3; EXPRESSED IN PLACENTA, SIGNAL = 0.89; EXPRESSED IN ADULT LIVER, SIGNAL = 1.1; EXPRESSED IN FETAL LIVER, SIGNAL = 1.2; EXPRESSED IN BRAIN, SIGNAL = 1.3; EXPRESSED IN LUNG, SIGNAL =   1; EXPRESSED IN BONE MARROW, SIGNAL = 1.1
agacggtcactcaaattcgcacttcaattttcctgtgtggaaatggcaaagagtgacaggtccattatcaatctactaaaaaactgacctggtgatcatgggagtctttcatgatgaatttgattctatagtctcttagaattaagatgaatttgtttttgtaaaatcccagaatataattaataaaaatggtaagtgtcttctcattccccttcataagtatgatgccaggaaacgacatttgcaatctcatgctggggaaagacactgtcatgggagagggagaacactgggcaggaacagaatggggaggaggagggagggcaatggtgctagtaaaattcccctgcatgggaataatgtacttggcacagcctggcgttctcataataaaaagaataactatcattctcctttccccatgaggcaaaacagatgctgtctctatgacgaagtgctcactcttcagtggaacagccatttccacagccaaatgtctcaacagcaaactggaattcctaagccaggttccccattctgtgcggcacacccctgaagcaggtggagactgtgttca

SEQ ID NO: 12830 - DNA, 541 bp, Homo sapiens
  MAP TO AC012532.3; EXPRESSED IN ADULT LIVER, SIGNAL = 0.62; EXPRESSED IN BRAIN, SIGNAL = 0.63; EXPRESSED IN BONE MARROW, SIGNAL = 0.61; EXPRESSED IN PLACENTA, SIGNAL = 0.56; EXPRESSED IN FETAL LIVER, SIGNAL = 0.56
tggactcagtttgaatccttcctaacataatcaatgaatagtgtttttgatatttttaagtgtcacatatataatatactatattttacaatttttcttaacatttatttataaaaataaaaatatatcagttcattctcattttaactgaaatatatgatgtatgtaattacttcaagtccaagaattgacaactgtttccatgaaaccactttactgtatggtttggttacagttagccaacagatgtatgtgagtgagaagaaatcactcctctcagtatattgtagtagtcagacatgatgacagacaaatatggaagtgcccagaagtattcaacatccagcttttttcttcccaattactattcccaccaaccaatagcatttttgagtcaaccctcaagcatttcactgcaattttcatagtgatgacagctgccacatatctccctatgagctctctgttgattttggcagtcagactgaaaataaacaaaccaacaaaagtctggaattttcctgtaagttccaaccaacca

SEQ ID NO: 12831 - DNA, 570 bp, Homo sapiens
  MAP TO AC011778.3; EXPRESSED IN BONE MARROW, SIGNAL = 2.1; EXPRESSED IN LUNG, SIGNAL =   1; EXPRESSED IN ADULT LIVER, SIGNAL = 1.4; EXPRESSED IN BRAIN, SIGNAL = 1.2; EXPRESSED IN PLACENTA, SIGNAL = 0.93; EXPRESSED IN FETAL LIVER, SIGNAL = 1.2
tttgtcctagaccctgtgggacatctatttacctatcaggatcatctgaaaacttccccaggtctactttaatctgctttaaatcagagaagcagaagggttcatgtacctgggttgggccaaatccccatcccccaacagcttgaaggggacataaccaatagcctgggggtttttgccatcccttggaggtttctttgcttgtttccttctgggtgggggacattagtgcaggcttatcattaataggaaggggagctataggaaggctaggatatggaggtaagctgagagatcctcctatggaatgtaaattgcaagctttgcatagttatgaattcttcttcaatgaaaagaaagcttggacataatgtatttcactccatttgccttctctcttacagaaaaggtcaagctgcaggatagtactgtaatttatacttccctcaggtggtggtttttcccatcagagagagaatattggggctaggccgtagtgcagaaaaaaatgagctgcctctttttcagggtttgcgggtcaaattggtcccaacggcttaggatgcattt

SEQ ID NO: 12832 - DNA, 500 bp, Homo sapiens
  MAP TO AC013332.4; EXPRESSED IN FETAL LIVER, SIGNAL = 0.53; EXPRESSED IN BRAIN, SIGNAL = 0.51; EXPRESSED IN BONE MARROW, SIGNAL = 0.48
tttctgcaaagtttcccacctgaagtcccttcttcaggcaggggtctgcattgcacagccagttagttttctgtccctggttttcttttgatcaggccagtgaaaaacttactctacacattgagtttaaaaaaaaaaagcaattaaaaagtgcccttgattctatttggacacatgtgcacagtgttttattcttctctgcctcccatgcaatggtgggggatagtcggtgcatgattaggaggttaaaccatattaactgggatttcctggtgttgtcctttacagtggaatgggtagagcttcagcatctccttccagaacttccagaagtgtctggccagctcttgtcctccccctgccaagatgttctgctgcaggctgttccctgagagttgcatgcatctgccacaccctttcagttgtaattgtgacaccagtgcagagagatatcaattcagggagcaaagcagacattatcctttccctcgattgtcatg

SEQ ID NO: 12833 - DNA, 508 bp, Homo sapiens
  MAP TO AC008616.2; EXPRESSED IN PLACENTA, SIGNAL = 0.47; EXPRESSED IN BONE MARROW, SIGNAL = 0.5; EXPRESSED IN ADULT LIVER, SIGNAL = 0.53; EXPRESSED IN FETAL LIVER, SIGNAL = 0.55; EXPRESSED IN BRAIN, SIGNAL = 0.47
ctgagccccaggaagatatgaatgagaacacgaagttctcaggtagaggaaatttggacacagggtggggcagcctgcctcttgaaggagggagctccccgttgctggaggcaagcaagcagtgatcttgcaggatgccgcagggacagcctgccagtgggagccagcgtcccaagacagctcacatccctacatgctgccccgcaggtgtaagacgtgcggagaatacatctacaaggggaagaaattcaatgctcggaaggagacggtgcagaacgaggtctacctgggcctgcccatcttccgcttttacatcaagtgcacgcgctgcctggcagagatcaccttcaaggtaggtgagacggccggccaggccggtccctctcccccagcacacctcagatcagggcgggccctggggttccttaactccaatcctctccatccagggaatctcatttcagtttatccccaagaaacagacaacagtttgggggagatgttcatg

SEQ ID NO: 12834 - DNA, 591 bp, Homo sapiens
  MAP TO AC007458.13; EXPRESSED IN PLACENTA, SIGNAL = 0.54; EXPRESSED IN ADULT LIVER, SIGNAL = 0.58; EXPRESSED IN BRAIN, SIGNAL = 0.56; EXPRESSED IN BONE MARROW, SIGNAL = 0.6; EXPRESSED IN FETAL LIVER, SIGNAL = 0.66
aggcaggcacttggtgtaactttaaggaaatacatagtaatttctgtctgacttttttaatttctctaaaaatatttctatacagtactaacccttcttccaccatttgctttagtttcagtcctcgtatcatagaaaagttcatgtcataaaagaagttaaaaccactcttgaataattggaacccttatgccaattgtctaatgtcaatttgttttctgggattgcttcttctatgtcttcttcctcatcgtctggcactggttcagaaacactcatctccatcaagtcgtcttctgctaattcctgtggtgcagtgtctactagctcttgaatttctccaagatccatatcttgatatcttcaacctgctcctgcccccaccatctttttgccatagacacaatctattttgtgatttctttgattagttctgttgtaaattctatgaagttatgtacgacatctgaacacacttttctccagcaggaatttattgtttcaggcttgatgactttcatgtttttttctataacaatgatagcatcttcaatagtgtaatctaaactttgatgatgttccctccattgg

SEQ ID NO: 12835 - DNA, 596 bp, Homo sapiens
  MAP TO AC008506.4; EXPRESSED IN ADULT LIVER, SIGNAL = 0.61; EXPRESSED IN BRAIN, SIGNAL = 0.47; EXPRESSED IN FETAL LIVER, SIGNAL = 0.55; EXPRESSED IN BONE MARROW, SIGNAL = 0.51
accatgttgaggcagtttgcttctattcctagatgataaggtttttattatgcatcatgttaaattttgtcaaatattttctacatctgttaagattatcaaattattgcccttgaaattgtttgatcagtcaatatagtgacttacattaatgaatttcagatgtcaaatcaaacctgctatcttggaataagctatgttttgttgtaacatatcatttattttatatattgctgattataatttgctaatatttttaaaggattcgtgtcactatatccatgacaacagttgtctgtaatgtttttgttggtttatttttcttaataatacctttggtggtttttattatcaggataatacttacctcataaaatgagctggaaactgtgttctccttttttactttctggaagattttataaataatagatattcctttttcctttaacattaggtagaattcaccatggaagctgtctgggtcaatggcttgctatattagatggatttttgtttgattgtttaactataaattgaatttcattagtaaatgcagatatatttaagttatctgttttggggtgaattttgct

SEQ ID NO: 12836 - DNA, 596 bp, Homo sapiens
  MAP TO AC007956.5; EXPRESSED IN LUNG, SIGNAL = 1.1; EXPRESSED IN PLACENTA, SIGNAL = 0.6; EXPRESSED IN ADULT LIVER, SIGNAL = 0.87; EXPRESSED IN BRAIN, SIGNAL = 1.2; EXPRESSED IN BONE MARROW, SIGNAL = 1.2; EXPRESSED IN FETAL LIVER, SIGNAL = 1.3
ctacgcccagatccactacctgaaagatcaacttttgagacaggtaggattcccagagaggtcagtatttttaaacattttagggcctaattatcacatgattttccttttggtgagattatctgagcctccatttaatacagctaaaagattcttagttgaatttatggcaaaaatttataccagctctgaagttagatttatagttttctgcttttatttctataaaagggatatagttattttgtactaattgtttttgtagagcatgcaggccaacgtgatcgttatgatagagaaagagatcgtgagccttattttgatcgtcaaagtaatgtcatagcagatcatcgagattttaaaagggatcgtgagacacatagagatcgagaccgggatcgtggtgttattgactatgaccgggatcgatttgacagagaacgccgaccccgagatgataggtatgctataaaacaatctttgctaggtgtacaaattactgtatacttaacagtaaaagtttaagagaaatttaataagtaacatattcttctcatgcatgtgtatatgtaatttggagggggaagaacaattct

SEQ ID NO: 12837 - DNA, 552 bp, Homo sapiens
  MAP TO AC011815.2; EXPRESSED IN PLACENTA, SIGNAL = 0.94; EXPRESSED IN ADULT LIVER, SIGNAL = 1.1; EXPRESSED IN BRAIN, SIGNAL = 0.97; EXPRESSED IN BONE MARROW, SIGNAL = 0.75; EXPRESSED IN LUNG, SIGNAL = 1.1; EXPRESSED IN FETAL LIVER, SIGNAL = 0.79
ctcaaactgaaggctttgccacattctttacatgcataaggtctctctccagtatgaattctctgatgtctaatcagctttgagctctggcaaaaggccttcccacagtcaaagcactcatagagcttttccctatgtcaacgctctgttgtgtaatatcatttgaattcatactgaaacttccttcactctcatgagattcaaggacactgtgttctgtggggattcttctgttgaaggttgccagactgaaatgtctgtcctgggaaggaagctgactgattttgttccctgcagcatttcccttttgcttcttagagttgtccagacctcccaaagcttcttcagctatccgttgggaatgtgtttctccaggaagttttcccggcgatatcatagctgctgaggctacacattcaacaatttcttgctttgccatcaacactttgccagccaccatcctgccatctaaaaatgtgaatagaaagtgtaagtatcatttacttcccatgacagaagaaactgttgtagcaggaacacaaactcaatgaa

SEQ ID NO: 12838 - DNA, 527 bp, Homo sapiens
  MAP TO AC016948.4; EXPRESSED IN FETAL LIVER, SIGNAL = 0.5; EXPRESSED IN BONE MARROW, SIGNAL = 0.46; EXPRESSED IN BRAIN, SIGNAL = 0.49
agggtgggagaggctagttcccaattattttcatgccgtcagtactaaaagtatttaatgactcacttacctacaagctgtgagttgcctgaagacctctccattcagtgggatgtacacattttacttaaggctattttacaggaaaaaaaaaaaaaagggaagagtgcagaaccacagcattttcaaatgaaatgaaaaatgaaagatcttaccttgttcgtgtcaaaggtattataaacttgatcaatatgtttattggccttctgattcagaccttgcagacccaaaagtgtcttaaattcatgtagtgtttgcaggccggatggatattccatcataaatgttctgtaccacacatgggtctcttgtgtaggaactgctttctgatcaccagctatagatttgccattccccatcttgactcacagtctacagcttttcctcaggttgttttcacttaagtttttgctggatttagtcccttactcctcactaaaactgaaggctaacatatgccctcagaa

SEQ ID NO: 12839 - DNA, 537 bp, Homo sapiens
  MAP TO AL161732.1; EXPRESSED IN PLACENTA, SIGNAL =   1; EXPRESSED IN FETAL LIVER, SIGNAL = 0.94; EXPRESSED IN ADULT LIVER, SIGNAL = 0.94; EXPRESSED IN BRAIN, SIGNAL = 0.88; EXPRESSED IN BONE MARROW, SIGNAL = 0.87; EXPRESSED IN LUNG, SIGNAL = 1.2
tggtggacaaattgtgaaggaggttatgtggctttttaaatttcagtagctgtcttttttaggagtagaatgggaggaagctttgccctaagcagttcccagcttgacttttccctttggcttatcccaagatttattttcctttcacatatgtatatatttataaatgttataagtacaacagaaggcaagaatggagcaaacataagagtgaggaggaggaggacgatgaggagaagaatggtaagtgcaaattaaaatggtagtactaaatccacacactggaaggtggtttttgcaacacataaaactgaaaaagcaattgtatgcagaatacatcaagaattcctacaaacctttaaagaaatacaagaccttgaaaaaatttgcaaaggatgtgatcaaacaattcacagaagacgaaacatacatggccacatagcatatccaaaatccaaaagcaaagcatagtctccccagtaactagggaaatacagattaaaggcacggatttatacccagcagattggtgaaaac

SEQ ID NO: 12840 - DNA, 562 bp, Homo sapiens
  MAP TO AL162471.1; EXPRESSED IN PLACENTA, SIGNAL = 0.54; EXPRESSED IN FETAL LIVER, SIGNAL = 0.47; EXPRESSED IN BRAIN, SIGNAL = 0.51; EXPRESSED IN BONE MARROW, SIGNAL = 0.43
tttacaacccagatcctgcctgattccaaagttccttctgttaggctgaatctcttcagctctgtgcttctctgagggtgaaactagctttttatgctgccaccaccatggctaccattatccacttaaaaatttgagttcagtgagcattccattattcttctcacttcataatccatttttccaagattatgtacagaactttgtgaattggctgtgtacacaagcacttatttttatgactgataccaattatgcatatataatatttttttttggacatgatccacttagaatgtgtatttatttatgttgtagcaatttatattgacacagcctaaaatgccatttctttagatcttggtggacaatggtgaagagaccttgcaagacataaacaatctaacagacaagctgcgtgaaagagatgaaaaaatgcagcatgtcagtacatggctacgagggagtcttgaagggctgcgtttgcttgtggaacaggaatcaccaatggaccttcttagtaagcaacagcttagagctttggtaacatgggacttcctgc

SEQ ID NO: 12841 - DNA, 524 bp, Homo sapiens
  MAP TO AC009410.3; EXPRESSED IN LUNG, SIGNAL =   1; EXPRESSED IN PLACENTA, SIGNAL =   1; EXPRESSED IN ADULT LIVER, SIGNAL = 1.1; EXPRESSED IN BRAIN, SIGNAL =   1; EXPRESSED IN FETAL LIVER, SIGNAL = 0.89; EXPRESSED IN BONE MARROW, SIGNAL = 0.99
atttcccatgctctcgtccaattatactcatattacctcaaactttaggtatttttataataatgggttgaaagttacctttccctatactttccaaattacccattcttttaaggcattttggtgctttctagtgagaagtgtgaactcattcttctgtgggtgacagcactttttcctctttggaaactttttaaaattttcattcatgaagctgtgaaaattcatcatattttggtgtgcgtcatgatctttgttgttcatccttttcagcattcctttcaatttgaccatttgagattactttcagctgttgaaaattctcttgtattatttctttaataacttcttcccatccatttttctctatgcgttagcaaacctgtacataaaacttagttaaaaagtttgattattttcttaggataatccctggaagtgaaaatagttgggtaaaggtaatgcctatttcatgacattttataggtaatatttaattattctcttgaatggctggaccaatt

SEQ ID NO: 12842 - DNA, 582 bp, Homo sapiens
  MAP TO AC011790.4; EXPRESSED IN LUNG, SIGNAL = 1.4; EXPRESSED IN PLACENTA, SIGNAL = 1.4; EXPRESSED IN ADULT LIVER, SIGNAL =   1; EXPRESSED IN BRAIN, SIGNAL = 0.84; EXPRESSED IN FETAL LIVER, SIGNAL = 0.62; EXPRESSED IN BONE MARROW, SIGNAL = 0.73
cagtttggagggctcagaagaagacaggaaaatgtgggaaagtttggaacttcctagagacttgttgaatggctttgacacaaatgctgatagtggtatgaacaataaattccaggttgaggtagtgtcagacgaagatgaggaactttttgggaaatggaataaagatgattcttgctatgctttagcaataagactgggggcattttgcccctgccctagagatctgtggaactttgaacttgagagagataattcagggtatctgacagaagaaatttctaagcagcaaagagttcaagaggaagcagagcataaacatttggaaaattcacagcctgacaatgtagtagaaaagaaaaatcctttttctggggagaaattcaagtctgctgcagaaatttgcgtaagtaacaaggagctgaatgttaatcaccaagacaatggggaaaatttccccaggtcaggccagagaccttcatggcagcccctcccatcacagaccctgaggcctatgagggaaaaattgtttcatgggccaggcccagaaccccaatgctctgtgcagcctaaggacatggt

SEQ ID NO: 12843 - DNA, 541 bp, Homo sapiens
  MAP TO AC008166.2; EXPRESSED IN LUNG, SIGNAL = 1.1; EXPRESSED IN PLACENTA, SIGNAL = 0.88; EXPRESSED IN ADULT LIVER, SIGNAL = 1.1; EXPRESSED IN BRAIN, SIGNAL = 0.94; EXPRESSED IN BONE MARROW, SIGNAL = 0.91; EXPRESSED IN FETAL LIVER, SIGNAL =   1
cctttctctctcttcctcttgcttctttttcttcctattctttttctccttttctttctcctcctcctatcccttttcctcaccttctcttctcctcccactttcctttctccttcctctccctgttcccctccttcttccccccatccttcttctccttctaaggcaatggatactaaagcaagtttaaatgcctagagaaataatctggtggaataaaaggaggttgccagtgaaggtaatataatcccttaatacaatgtttttttttttcagacttgtgcattttttttcactttgatacacacattttattaatctcaatggtagaaatagaataggatcgatctcaaagtgttatctggccttaaaatatacagaaaatgtaacattcatttgggatgtggaaatcaaaggactgagttagtgtttgaagatcacttttagaatttgacttaaaaaggaagagtggctatatttgccttaaagatgaagtatgaacttaggaaaaaaggaagtcaggtttttgttcatttgtcca

SEQ ID NO: 12844 - DNA, 535 bp, Homo sapiens
  MAP TO AC011218.4; EXPRESSED IN ADULT LIVER, SIGNAL = 0.6; EXPRESSED IN BRAIN, SIGNAL = 0.65; EXPRESSED IN BONE MARROW, SIGNAL = 0.66; EXPRESSED IN PLACENTA, SIGNAL = 0.81; EXPRESSED IN FETAL LIVER, SIGNAL = 0.63
caaccaccagttgacacaggcaagaaaacaatgacgtataactgtacaagatactgggaatggtgatacaactgcaaacaactaaattctgccaacaaccttaataaatctggaaatgtactcttaccagagcttcccaataagatccctgttgattgtcaccttcgtttggaccttgccggatgttgaacaggggagctggttgagcccactgcaacttcagacctacagaagtgtgagataataatttatgttgctgaagccattaatttactttaaattgtcatggtgccaatataaaacaaatactttattttataatgagactggataacgaagggcttgtgttgattttcaaggagattgaaaaatatatctcataaatctagtgaaaacatgaaagttctggggaggatgaaattgataatatcttttctatttgtatgagtccggttttgcactgctgtcaagaactacgtgagactgggtagtttataacgaaaagaggtttaattgactcacagttctgcatggc

SEQ ID NO: 12845 - DNA, 598 bp, Homo sapiens
  MAP TO AC008688.4; EXPRESSED IN BRAIN, SIGNAL = 0.48
tgaggatcttcgtagtgcccttcaaatcacaaacacttagaaggtattatcctggaggcaaggttgtgaccctgggcaagaaaagaccaaagaagctaatttatatatctaaatccccagattcagagagaacataccaaaaagctaaaaaaattagctttagtgagtttccctctaaagaaatttcccaaaggcaaatatttagaatccatttatacttgttgcaacagaaggaaattgatgtgacactgaccgctgaataaacatagccctgctgattgcagactgcaggaacagcagttggattgacatcttgatgacacacggagcccacaggggatgctggactctggggaggctctttcatgggtcccatggcctaatcattgtcagcagtataaggggtgatttaatctccagtcagagctgctgtaagtatggagagggcctaagctttggagatatccagcttgtttagaatatcaaggagggagctagagtgaaactggttgttatacaaaatgttcccaaaaaacaaacacatccttagatacatatggatccataaaattgaccctgaaccatcccaccctcctat

SEQ ID NO: 12846 - DNA, 587 bp, Homo sapiens
  MAP TO AC013634.3; EXPRESSED IN PLACENTA, SIGNAL = 0.49; EXPRESSED IN FETAL LIVER, SIGNAL = 0.5; EXPRESSED IN ADULT LIVER, SIGNAL = 0.58; EXPRESSED IN BONE MARROW, SIGNAL = 0.45; EXPRESSED IN BRAIN, SIGNAL = 0.54
aaaatcccctctgctcttccaattccaaagtgaacactcccagattctgatgtgtctgacagagagaagcagagagaacttatctacatcagcagccaacaaaagaccctctggtatacttggcagaaggagggtggtctcgccttggcagcagagggtataaaaggaggggctaagcatagttaaaagaaatcctggcagagatgatgactatctcctgcaggatctccaggcccataggttgtgcagcagccttgccctggaaccctggggacttcctggcagatctgatggggcctctgtctggaggacggggtgcacaggtagccatccagctccctcccctctctgctctcctccttcctccccttgtcctttctatatccctttctcttcatcttcacctgcctctccctcccactcccagcctccaggtcccagttcttcctctccttcccttctagttccctttctctccagcacttatctgcatgctgctggaggtaaaacagaaaggtcagacaatggtcccacccctagggagtcagtgagaaaagaagcagtgcccgagccaagcaaaggaatag

SEQ ID NO: 12847 - DNA, 584 bp, Homo sapiens
  MAP TO AL121747.19; EXPRESSED IN LUNG, SIGNAL = 0.87; EXPRESSED IN PLACENTA, SIGNAL =   1; EXPRESSED IN ADULT LIVER, SIGNAL = 0.75; EXPRESSED IN FETAL LIVER, SIGNAL =   1; EXPRESSED IN BRAIN, SIGNAL = 0.87; EXPRESSED IN BONE MARROW, SIGNAL = 0.84
cacatgtggttggctactggtcaccagggtggacatctctgccctagacaggcctgggttagaatccaaccatggttgccacttgcttaatcgtgtactttggacaaactccttaaattgtccaagcctagatttctttacctgtctcttaaattgattaggacttgccactttaacttgaatttgtgagggtcagacttgaagtatatgtaaaaatccagctaagaggaagtcttcagtaaagaattattgtgttccttttgcagtgagtgctatgagaaactggtaagattgccatggttggtgtctttggctcactgacagctcttttctttcagggatttcttcagtgccaaccccttcaccccttggacctctggcaggctcaccagtgattgctgctgccaacccccttgggatgcctgttccagctgccgctggcgctcagcagtaacggccctatctgtctcctgatgcctgagcagaggtgggggagtccaccctctccttgatgcagcttgcgcctggcggggaggggtgaaacacttcagaagcaccgtgtctgaaccgttgcttgtggattt

SEQ ID NO: 12848 - DNA, 549 bp, Homo sapiens
  MAP TO AC019126.3; EXPRESSED IN PLACENTA, SIGNAL =   1; EXPRESSED IN FETAL LIVER, SIGNAL = 0.81; EXPRESSED IN BRAIN, SIGNAL = 0.81; EXPRESSED IN BONE MARROW, SIGNAL = 0.77; EXPRESSED IN ADULT LIVER, SIGNAL = 0.97
gggcaggcagaaactacaacagatttgttcaatgaaatggatccacatgtaacaagttgacttactttgaaagatagctttaaatatctgatactcatcaacagggttatcttcatcatcaatgattgtggaatagccttccagagcagtctcttcagcatcatcttcttcccaatcttcatcatctccatcttcaccagcctgcttagccagaatctccaaatattcttgcccatcttcatcaatatcatcttcatcactccccagttcctctgccaagtcataatataagtacttttataacaatgacatattttgttactcaacaaattgacaatcatctcaatcactgtcagtaaattacaagtcacaagtgacaagagagagctccaggaattggtgtttaaatacatgttcaataatgaatagaaatgaaaatttccataggagtccaagaaaaccaaccttgatttaatgtgttcttaatactagacatctgaaaaagaactgcgcagtatgaacacactaccgttacacccaccaaacctt

SEQ ID NO: 12849 - DNA, 525 bp, Homo sapiens
  MAP TO AL136968.3; EXPRESSED IN LUNG, SIGNAL = 1.2; EXPRESSED IN ADULT LIVER, SIGNAL = 1.1; EXPRESSED IN BRAIN, SIGNAL = 0.99; EXPRESSED IN BONE MARROW, SIGNAL = 0.89; EXPRESSED IN PLACENTA, SIGNAL = 1.1; EXPRESSED IN FETAL LIVER, SIGNAL = 0.8
tcgtctagaacccatcaccccacctgtcctgaattcaagggcatgcagaactgtaatccaaagttagaagagaactgaacattggcaaattaagtcatgtctacgatgttgagaatcagtcatgagcaaagccctgatccaatgctgggcatcagtcatgagcaaagccctgatccaatgctgggcatcagtcatgagcaaagccttgatcaggagaagaaagtagctaagaggaggcccctgcttaataggcaggcatccagcccagtgaccaagacagacacacctgcagaaaaagctgctgcaagcaagtgggttaggagggtgagggtctatactccccttagccataaactccataaccagtccgaagaatgacaataaggataagtacacaacacatgacaaggatatcaggcaagaatcccaattctttgcacattcgatgggcagtgaaaatctggatgacttgtgattgggcacccacacctccagactatttctagattgagggatattgggcct

SEQ ID NO: 12850 - DNA, 570 bp, Homo sapiens
  MAP TO AL161668.1; EXPRESSED IN PLACENTA, SIGNAL = 0.64; EXPRESSED IN FETAL LIVER, SIGNAL = 0.53; EXPRESSED IN BONE MARROW, SIGNAL = 0.61; EXPRESSED IN ADULT LIVER, SIGNAL = 0.58; EXPRESSED IN BRAIN, SIGNAL = 0.68
caagactcccccatgatgacctattcatccacctacctcctcactctgttccactgtctcccttaagagagatggcaccggccagagcaggatgctgccccctgctgctgctgcttctggggctgtgggtggcagaggtcctagtcagagccaagcccaaggacatgacatcatctcagtggtttaaaactcagcatgtgcagcccagccctcaagcatgcaactcagccatgagcatcatcaataagtacacagaacggtgcaaagacctcaacaccttcctgcacgagcccttctccagtgtggccatcacctgccagacccccaacatagcctgcaagaatagctgtaaaaactgccaccagagccacgggcccatgtccctgaccatgggtgagctcacctcagggaagtacccaaactgcaggtacaaagagaagcacctgaacacaccttacatagtggcctgtgaccctccacaacagggtgacccagggtacccacttgttcctgtgcacttggataaagttgtctaagccctggtgcccacgttccacctcacactctgca

SEQ ID NO: 12851 - DNA, 577 bp, Homo sapiens
  MAP TO AL117383.18; EXPRESSED IN BONE MARROW, SIGNAL = 0.68; EXPRESSED IN ADULT LIVER, SIGNAL = 0.71; EXPRESSED IN FETAL LIVER, SIGNAL = 0.57; EXPRESSED IN BRAIN, SIGNAL = 0.69; EXPRESSED IN PLACENTA, SIGNAL = 0.75
tttgccattggtgtcagaacgaaatgaggtaataccatagagtactcaacacacataaagtgctccaagaacagtgactattgtgacaatgataacagtgggtcaaagaagaaatactacaaatctgtgtatgaaggtccggtactcaacattgtaaaacagacaatgttgccaataagtttgatgagctaccttttataaaacatttgtgttgaatttgataactaccaactatcaagcacctactaagtgccaggtgtacataaaatcccactctattctcccagtaacccaaagatgtggatgtagtggtagtagttgtggtaattgatgtactggtaataacaataaaaataaaacataacaatttctgagtacatattgggcctggcactgtgataaggttgttatatgtattacctcatttaattcctcttagcaaacctacactctaagaatgagaattactttcattttagagaaaattaactattgtccgaagaactaagaagcaagtccaagagccaacaattcgtgtggaaagctgagaatggaaccaggtttttctggctcctga

SEQ ID NO: 12852 - DNA, 560 bp, Homo sapiens
  MAP TO AF240628.1; EXPRESSED IN ADULT LIVER, SIGNAL = 0.59; EXPRESSED IN BRAIN, SIGNAL = 0.52; EXPRESSED IN BONE MARROW, SIGNAL = 0.53; EXPRESSED IN PLACENTA, SIGNAL = 0.63; EXPRESSED IN FETAL LIVER, SIGNAL = 0.49
ttggaaggccatttttcttgatgaaccacaatgattcataatcctgcttcactggtaaataacaggattaaattatatggttggaaattatagacataccttggagatattgccagtttggttctagatcaacgtaataaagcaaatatcgcgataaagcaagtcacacaatttttttggttttccagtgcatataaaagctatatttacactatactgtactctattaagggtgtaatagcattgtgtctaaaaaaatgtacaatccttaattgttaaaaatgctaacaattatctgagccttcagccagtcacagtctgtatgcttatggaggatgatgcctcgatgttgatggcagctgaatggtcaggatggttgttggtgaagtttagggtggctgagacggtgtctgagaataagacaatgaagtttggaacatcgattgttcccttcatgcaagatttctctgtagcatgccacaatatttgatagcattttactcacaatagaatctcttttaaaatcagagtccgtcctctcaaaacctgccactgcaata

SEQ ID NO: 12853 - DNA, 562 bp, Homo sapiens
  MAP TO AC022555.2; EXPRESSED IN ADULT LIVER, SIGNAL = 1.3; EXPRESSED IN BRAIN, SIGNAL = 1.1; EXPRESSED IN LUNG, SIGNAL = 1.2; EXPRESSED IN PLACENTA, SIGNAL = 1.2; EXPRESSED IN FETAL LIVER, SIGNAL = 0.84; EXPRESSED IN BONE MARROW, SIGNAL = 0.68
agggtcctgggttgtttttctcatcactgtatgcccagggcctggaatagtgttggatttttttctttaataccaatagctggttttaatttttttaaaggaaatactacaatttaaaaaaaagagttccaaaaaaattaacaaaatttccagcaatgattgcttctgaaatgtaaagatttgaaacataatctatacaaaactaaaaaccaaaaggattaattcttactttttcctttttaaaaaaatccagacaatttgtcacaagaaagttcagcaagttacagcagctgcagcctcagtcacccttggaatcactgtccctcttcatgaggacagagcaccacactaaggacagcaacacatcttcagttggtttcttagggttttcctccaagtctgtgttaatttctccagattgagacagtttccactccaactcatctcttgtcaggttcatgccgccaaacaccagaggacggataaactgaggcttgatatctccttccaggtaaacaaatttcgtgggcagattcctatcaggataattgggtgtgcaggt

SEQ ID NO: 12854 - DNA, 557 bp, Homo sapiens
  MAP TO AL109930.5; EXPRESSED IN PLACENTA, SIGNAL = 0.51; EXPRESSED IN BRAIN, SIGNAL = 0.5; EXPRESSED IN ADULT LIVER, SIGNAL = 0.51; EXPRESSED IN FETAL LIVER, SIGNAL = 0.49; EXPRESSED IN BONE MARROW, SIGNAL = 0.47
ttcaggatttttgcctctgggcaatattttcctgccactatttgcatcagttcttttcattgcctcaattcacacttttacttaaatgaacactttgtaaaaccacatcctagatgaaaatcagtcatatttgtcattaaaaagggagcactataacaatgaaaatgcaataacaagaaaactgtagcatcaaaatcctttctagaagtgttgctggtagaaggctcagagcccacggccagctctttctttgcagaaaggggagataacaagtgttagggggtgttaaaaacacatcagcacaaagctcaccctttgactcaacagaaaaaataaaaaagaattaaaaaaggaattgtcctactcaactacctgtcttcctccagcattccctcccactttgggagagactgaagtagaaggggtttggggcctgtggtcgggggacatgtctgtaacaagctgtgtgtgcttaagcaagaccttgtgcctcctctgagtgatgaagacatcgttccagtttagggtcatcatcatcaagaagcaattagctggcc

SEQ ID NO: 12855 - DNA, 555 bp, Homo sapiens
  MAP TO AC018530.4; EXPRESSED IN PLACENTA, SIGNAL = 0.63; EXPRESSED IN FETAL LIVER, SIGNAL = 0.6; EXPRESSED IN ADULT LIVER, SIGNAL = 0.78; EXPRESSED IN BRAIN, SIGNAL = 0.55; EXPRESSED IN BONE MARROW, SIGNAL = 0.55
accctgggaagtgaggaatcttatttccagagttgccacattagattatgaaaaattccagttttcaacacgaagctgtgaaacacactaagaaacaggaaggtatggcccaaacacataattataaactaaataatatcgtacatggattaaaagggtttcctatgttaaagaaatataataaaaacacaaagattcttcattgggagtatattcaggtaacttattataattattagatagtttaaattctgctgtaccaaagtttattaattaattttttaaaaatacatagtccacgaggtttagaaatgcaagacgtgtacactgaaactacaagacattgctgaaggaaattaaagaagacctaaataaattgaaatttaaccacatttatagattgaaaaatttaatattgttaagatagcagtacttcccaaattgaactataaattcaatgcagtccctatcaaaatcctagtgccactttctgcagaaattgacaaactgattttaaaacttataggaaaatgtaagggaccaagaaggaccaaa

SEQ ID NO: 12856 - DNA, 596 bp, Homo sapiens
  MAP TO AC021976.3; EXPRESSED IN LUNG, SIGNAL = 1.8; EXPRESSED IN PLACENTA, SIGNAL = 1.8; EXPRESSED IN ADULT LIVER, SIGNAL = 1.3; EXPRESSED IN FETAL LIVER, SIGNAL = 1.6; EXPRESSED IN BRAIN, SIGNAL = 1.9; EXPRESSED IN BONE MARROW, SIGNAL = 1.6
tgtggttaaattgcattgcctttattttatgtttaggcttatttttaaattaacatttaacagaaacatttgaaatagaatttgcatgtctgccttaattaacttaaagactgattttaatctgactatgacactgagcatattctttaaattactcataatttataatgcttaatataatcttaattaaatttagcagttttagtataagatgtgccattttgtcctctgtatgtctgaatgaagctataacatttgcctttttattgcaggttttcctttggaatatggataaatacaccatgatacggaaactagaaggacatcaccatgatgtggtagcttgtgacttttctcctgatggagcattactggctactgcatcttatgatactcgagtatatatctgggatccacataatggagacattctgatggaatttgggtgggtacagcatgaattattttagtctataattcatctccacctatcaagttatgtgaataattacaatcaccaatatatgcaacctaaaattacagtctattctaatttaaaatgttggtattatttaagcccttgactaatggaaagc

SEQ ID NO: 12857 - DNA, 595 bp, Homo sapiens
  MAP TO AC008688.4; EXPRESSED IN LUNG, SIGNAL = 0.95; EXPRESSED IN BRAIN, SIGNAL = 0.8; EXPRESSED IN BONE MARROW, SIGNAL = 0.69; EXPRESSED IN ADULT LIVER, SIGNAL = 0.8; EXPRESSED IN PLACENTA, SIGNAL = 0.86; EXPRESSED IN FETAL LIVER, SIGNAL = 0.8
gcctccatttttatctccccagtggcatgagggaaagggaagttgggcataaaacgcttaagaaagcgaaactcactattaccagtgccagtggctgaacacatttcatatggacaaggccgagataaggatccattgccttgtccttgtaccaggttgttagagaaattacagtcatcatagaaatgctcttgaattgtgaacttttctctatatttaatcttttggtagacatgtataatgaagatcactatgacagagaggagaaagagaaaggaaaggatgaccagagaaatgaccaaatatttagtggatggatttacctttctagaatgcttggttggatcctggaactgcaggtagggctctgaaaagccatctaccagcaggatgttgagtgagacagtagtggaaagagctggttggccgtgatcctgaacaagaatgatcaatttctgcatcatggggtctctctcagatatctgccttaatgtatggatttctccattttgtctttgaacagaaaataacccaaggtcagtggccttaagtagatgatatgaaagccaagaattctgacctgagtcaccatcca

SEQ ID NO: 12858 - DNA, 515 bp, Homo sapiens
  MAP TO AC013698.3; EXPRESSED IN PLACENTA, SIGNAL = 0.73; EXPRESSED IN ADULT LIVER, SIGNAL = 0.98; EXPRESSED IN FETAL LIVER, SIGNAL = 0.92; EXPRESSED IN BRAIN, SIGNAL =   1; EXPRESSED IN LUNG, SIGNAL = 0.9; EXPRESSED IN BONE MARROW, SIGNAL = 0.75
accaggttgactgccaaatgggttgttagtagtgccagaggcaccctgacatcactctctgaactgctttctctttcacattcttgtatttttccagctgacggcccagagggtgggtgccaattccaccagcagctgcaactgaaaagcaaggttcagaaatgtcagatatcctccgggagctgctctgtgtctctgagaaggctgctaacattgcccgggcgtgcagacagcaggaagccctcttccagctgctgatcgaagaaaagaaagagggagaaaagaacaagaagtttgcagttgacttcaagacgctggctgatgtactggtacaggaagttataaaacagaatatggagaacaaggtaagaaaggtcatagccaaggtaactgcaaaatagttgcatctgtggctttctccatcatagaatagcatgccttttgctcctcacccctatcagtatactagcaccttgatttcaagtaaacatcttggattttcttcctccttgtca

SEQ ID NO: 12859 - DNA, 549 bp, Homo sapiens
  MAP TO AC022045.2; EXPRESSED IN ADULT LIVER, SIGNAL = 0.96; EXPRESSED IN FETAL LIVER, SIGNAL = 1.2; EXPRESSED IN BONE MARROW, SIGNAL = 0.79; EXPRESSED IN LUNG, SIGNAL = 1.3; EXPRESSED IN PLACENTA, SIGNAL =   1; EXPRESSED IN BRAIN, SIGNAL = 0.97
acccttgaggtttgttgtggggctcaaattatttttatacacagcacttagaacagtaccttcccccggggtaagcgctatttaagtcttagctattgttataatattttttcattgtcgtctctcagaggatatgccacaggacttcaaggcttccctgtgcctgcccacaacctcggccccagcctcggccccctccaatggcaactgctcaagctacacagaaacccagcatctgagtgtggtggggatcatgttcgtggcacagaccctgctgggcgtgggcggggtgcccattcagccctttggcatctcctacatcgatgactttgcccacaacagcaactcgcccctctacctcggtgaggaccagtgccatcccttggcctctgagggtcaggccaggctcaactaggaggaagagagacccagggttggggctggagatggaatccctgccccctgccccatctggccagtaaaggtccagggaagccctggagagttccccatccctgaccaggggagacagagtgttcttgcccatca

SEQ ID NO: 12860 - DNA, 506 bp, Homo sapiens
  MAP TO AL139117.3; EXPRESSED IN FETAL LIVER, SIGNAL = 0.57; EXPRESSED IN BONE MARROW, SIGNAL = 0.76; EXPRESSED IN PLACENTA, SIGNAL = 0.72; EXPRESSED IN ADULT LIVER, SIGNAL = 0.72; EXPRESSED IN BRAIN, SIGNAL = 0.74
gacctgcaacaggggttatgggcacaaaagaacacggagacacagagaggaaggagagagatagacaccatggaggggaagcctcacttatttcaggtcccatgaatgggatgagaaagggagacgccttctgaactcacaacctctcttcttaggagtccacagaaaaccttccctcctggcccacccaggtcccctggtgaaatcgggagagacggtcatcctgcaatgttggtcagatgtcaggtttgagcgcttccttctgcacagagaggggatcactgaggaccccttgcgcctcattggacagctccacgatgcgggttcccaggtcaactattccatgggtcccatgacacctgcccttgcagggacctacagatgctttggttctgtcactcacttaccctatgagttgtcggctcccagtgaccctctggacatcgtggtcgtaggtgagagaatacagacctgcctctcacccttgctgggagatggagtgaatg

SEQ ID NO: 12861 - DNA, 521 bp, Homo sapiens
  MAP TO AC016648.3; EXPRESSED IN ADULT LIVER, SIGNAL = 0.73; EXPRESSED IN BRAIN, SIGNAL = 0.56; EXPRESSED IN BONE MARROW, SIGNAL = 0.57; EXPRESSED IN PLACENTA, SIGNAL = 0.81; EXPRESSED IN FETAL LIVER, SIGNAL = 0.51
aggtgcttcccttcttgtccccactttgcactgacacgtgtatgctcagccattcttgcttgtgctcctcccctgactactccaaacacatccaagcatcttcctccattaccaccaggattcttcacttctcctctggtaccaaagccccaaggggaggatgggcaaaggagagtggtttaaattggaaagaaaaagagctttcaatccaatttcatcccctttcccaccttatcctgaccttagacgtgttggaagggatggcattttcctatattacaaaagtaagttgcagtccactaatattatagtctccttggctccatctctaacctggcaagcatggaaaaaatggaagtttacatattgaaaaaaaaaaaacaacttctagattagctcatgttttgtttggaaaacatatgactctgcctggagatagtagagtaatgcagttcctttatggtgtggggggatattgtgacatttcctaagcatagtagcctcgtggtttcttggatggt

SEQ ID NO: 12862 - DNA, 593 bp, Homo sapiens
  MAP TO AC005297.1; EXPRESSED IN PLACENTA, SIGNAL =   1; EXPRESSED IN FETAL LIVER, SIGNAL = 0.9; EXPRESSED IN LUNG, SIGNAL = 1.2; EXPRESSED IN ADULT LIVER, SIGNAL = 0.93; EXPRESSED IN BRAIN, SIGNAL = 0.79; EXPRESSED IN BONE MARROW, SIGNAL = 0.82
ttggccaaatattccaggactttcatcttgctggtttcagtataggctcttggaccccaaaggaattgatagtgtgcaggataactgcagggcacctggtggtactccaggtacgttagcctcacgaaatcctgagtgatgagcttcctgggctctccatagatgtagtacttcttcccatcatatatttgcatcatatccagaaatttccaggtatcttccttgttggcacagttgcctttcaggaagatcacaaccaggaaagtcatgaggagaccagtcttgggtaacactttgccaacatgaatcctcccattgttggggagtttcagcttgctgacaaggtcatataagtgacaagttgggttgacttccttcaagtcaactgcaaagacaacctcaatgtgctcagaagctcttctgtgaatctcagcaaactggttttggtatcttgggttgacaatcttcagcatatcttccttcaaaatacgctgtttcattttgaacttgtagagcaggaactgctccaacaaacccaccttaatatttatgaaattgctgcatgaactctcagtggagggtgagacctctga

SEQ ID NO: 12863 - DNA, 597 bp, Homo sapiens
  MAP TO AC007321.2; EXPRESSED IN LUNG, SIGNAL = 1.1; EXPRESSED IN BONE MARROW, SIGNAL = 0.82; EXPRESSED IN PLACENTA, SIGNAL = 1.2; EXPRESSED IN ADULT LIVER, SIGNAL = 0.9; EXPRESSED IN FETAL LIVER, SIGNAL = 0.75; EXPRESSED IN BRAIN, SIGNAL = 0.91
gctttcctttgttttgaggctcatgtgtatgaggtgatcaacaggtgtttgttagccatttcaaaatcttaatgaaataaattattgtactttgacttttatactatttaacattctgggttatcttgtgtaccccaaaagattataagctccttgaaggcagaaacagtgtcatgatttcttgttagtacacagctcctactacaatgttagacatgtgtagatactaaatgaaggaatgaattacttaatgtaaaatatttcaggtagagaagactatttataaatgctattgactaacgttttttattttttggttgtgtagctataaattttcagccaccatcaacagaatattcactaattagtacaagatttactcctactcccgctactatcaaaaagttactgagcacaactaacaacatctcccgctcatcactgaaattaattacagcccaaatggataattcagtaaagcctatttcccatcagatatcagatattgaacatgtggatcgtagtctcagtacaaatctcagtctgggtgagttggaagtttctgtgaagaacagtagctctttaagcaggaaccca

SEQ ID NO: 12864 - DNA, 598 bp, Homo sapiens
  MAP TO AL161445.2; EXPRESSED IN BONE MARROW, SIGNAL = 0.43; EXPRESSED IN PLACENTA, SIGNAL = 0.47; EXPRESSED IN BRAIN, SIGNAL = 0.48
tggggtacaggtttctcagggcaagccatgctctctgtgtcagtcttagaagggataaagggatagagagaggaagaaaagaaagtttctttcctacatctgagccaaagaaggtacagagctcagtgggcagtgaggagattcttgctctgataattcatcacatgacttcaaaaaagcactttaaatgacacattttttctagatatgtgtcttaggcctcctaagaggagtttatttagagacccagtttgagtcacaataaagagttaaaaaaaacacccagggtccctctgggatctttttaaaaatgaacagagaaaagaaaattatacacagaccactctcttccctttaaacaatctctgcctgaaaatgaatgctcacctggctttgcattcctcacctgcggatgaacgctcatctgcctttgcattccccactggaggatgaacgctcacctggctttgcatgctttaagactcccatacacttgtttccagtctcatcaaagctcttagctacccaagcccagttctatgtcaaaggagcttgaattcagatgagaatttccaaagggcttgaagatgggaacaga

SEQ ID NO: 12865 - DNA, 515 bp, Homo sapiens
  MAP TO AC016498.4; EXPRESSED IN LUNG, SIGNAL = 0.95; EXPRESSED IN PLACENTA, SIGNAL = 0.81; EXPRESSED IN ADULT LIVER, SIGNAL = 1.2; EXPRESSED IN BONE MARROW, SIGNAL = 1.1; EXPRESSED IN BRAIN, SIGNAL = 1.6; EXPRESSED IN HELA, SIGNAL = 2.9; EXPRESSED IN FETAL LIVER, SIGNAL = 1.2
aggtaaacacagccggtcactgacgtcccctacactgactggtacctcaaataatgaacaatgatgactgtattgtgccaaaagaacaaaaatattgagtcagtggccctagtttcaactatcagctcaacctgtcacatacaaaactagttttcaatttaagaagggagttaatgcatatgttgaaatcctccgtactggaacgagcttattttaagctatcttaattaattaagaacatataagaaatccatttgtatcaagaggaaaaaaaaaataaaggtaccttcatcagttcttccaaacaagagaggtagattttgaagatggctgctgcagagggtggcccaatgtactgcttgatgtcagccctgtccacgaaggccacgtcgatcttctcggtgatgttagaagtggtcagaatcacaacattggaatgcctgttgtggccgagaagcaagcaccacagtcatcacggctgtcggtgacccaattctatcctgccctatctggca

SEQ ID NO: 12866 - DNA, 503 bp, Homo sapiens
  MAP TO AC016549.4; EXPRESSED IN PLACENTA, SIGNAL = 0.61; EXPRESSED IN ADULT LIVER, SIGNAL = 0.53; EXPRESSED IN BRAIN, SIGNAL = 0.55
atgctcctgggagagatgtgatcactgttagaagcctgtgtttcagcaggtggcatctgggcttcttagaagggagcctcctatttgctctcccctaaggagccctcttttcctgcccactttccagaacgtgtatgtaaatataaaccgcatcatgtcggtggccaatcgtctggtggagtctggccactatgcctcgcagcagatcaggcagatcgcgagtcagctggagcaggagtggaaggcgtttgcggcagccctggatgagcgggagcaccttgctggacatgtcctccattttccaccagaaggccgaaaaggtcagtgccttgaacccccagcccacgaggtggtaaccagaatagttcttcctccatgaatattggtgtgtgtgcaaacactcttgtgtagcacatactgtgagctccgcatgtgagctctgaagtcacttggccctgagtttaaattccagctcttttagtccttgctgcgtaaccttaggc

SEQ ID NO: 12867 - DNA, 518 bp, Homo sapiens
  MAP TO AC013698.3; EXPRESSED IN ADULT LIVER, SIGNAL = 0.67; EXPRESSED IN BRAIN, SIGNAL = 0.58; EXPRESSED IN BONE MARROW, SIGNAL = 0.55; EXPRESSED IN PLACENTA, SIGNAL = 0.62
aagcatgtgttttcttgattctgaaaagtctgaatgtattatggctctggatttctaagtctggaaatgtattaatttttaaggattctaagcagtggttttagttaattttacatagaattggatagaactatgggactgtatttaacaagtacatatgcatcagattagtttaactttatgataacttgcttctcctaaattgttactaaaaataattatacctaaagtcatccagaatgccataatttcatgagatgacacagcaggtaaattggtttctccaactcctaccttctaccagattgttctgtacagaacaatcatgcttccaaagacagccaccactagcaagaccaggaagaaagaaattcttatcacccctaatcaagcagataaattgtgtatgctccaaagcattcttattgaggaggaaaactgaggagttgtagaatatgctacagttactattagaaaaagtaaaagccagtcacctgagactctttaccctttgcccc

SEQ ID NO: 12868 - DNA, 567 bp, Homo sapiens
  MAP TO AC011255.3; EXPRESSED IN PLACENTA, SIGNAL = 0.82; EXPRESSED IN ADULT LIVER, SIGNAL = 0.83; EXPRESSED IN FETAL LIVER, SIGNAL = 0.62; EXPRESSED IN BRAIN, SIGNAL = 0.71; EXPRESSED IN BONE MARROW, SIGNAL = 0.72
caggagatgctggaggaaagagaactctgtaaactgctgccaaaggatgagtgggccttatgactaagcaatagagtaatggaaaaccaatgaaatgagagactcacaacgtggtttgttaacattcatgtgggcagggtatactgccgctgccctttgctgagatgatcctctttttctagcctctgcaaagttgttgtacctgtagaacttgcatctctgaggctgcagtgagaagagtgtgatgaatgaattatctgcccatttgtctatacttcctccaataagcattcagatacatatgaggattttcggtggcatgatccgacttttgcttcagataacatttggtgatggaaggagttgaaggatgatggcagggacatttctagctcagaaacttgtaggatgatgatatctttgacctacttagggagtccaaggagagaagcatgattagacttttgtcaactctgaaatatgttgcaattgggaaaattacttaacctgtctatgtccgaatgttccttctcatcagtaaaacttcctatccagcgttgcagtcaa

SEQ ID NO: 12869 - DNA, 583 bp, Homo sapiens
  MAP TO AC018386.3; EXPRESSED IN ADULT LIVER, SIGNAL =   1; EXPRESSED IN FETAL LIVER, SIGNAL = 0.73; EXPRESSED IN BRAIN, SIGNAL = 0.86; EXPRESSED IN BONE MARROW, SIGNAL = 0.82; EXPRESSED IN LUNG, SIGNAL = 0.97; EXPRESSED IN PLACENTA, SIGNAL = 1.1
aatttttccgcccctatcacaaaacagtttatgtcataaaataagtcaaaatgggtctagaataaccgaaatccccctgccaaattgtctactgtcagtttgttttctggcattacttcttctacatcttcttcctcatcacctggtactggtttggaaccacttacctccatcaaatctccttccattaattcctcctgtgtgctgtctattaactccaagattctccaagattcatatcttgaacccccctccaacacatcatttttgccatatccgctatctctttcatgatttgtttgattgtctctgttgtaagtccttaaggtcatgcacaacatctggacacagtttttccagtaggaatttattgttttaggcttgatggctttcacagctttttctgtagcaacagtggcatcttcaatggtgtaattcttccagactttcatgatgttctactggggttctcttccatagcactgacaatcctttccataaattaccatgcataatgagctttaaagattcttatgactcccttgtctagaggatgaattagagatgttatgtttgggggcag

SEQ ID NO: 12870 - DNA, 527 bp, Homo sapiens
  MAP TO AC011023.3; EXPRESSED IN BONE MARROW, SIGNAL = 0.45; EXPRESSED IN BRAIN, SIGNAL = 0.45
cgaccctgaatgatgtttccagctgtttctgagagcaatttcataacctcagttttattcttctctctcacgttttttcaaacgaactaaagagaaagcctattgttaattttccaaagttatatttataattaaattcgtgcaaaattgattaaatacaacaaatctcataaataccaatttttacattgcatgtaaactattatcttctaaaaatgaagcaatacatagaatacatctatattttaatatttgtcttattttttctaattttttaactgttgctgattattatagaaaatctgaacacatacaacataaaaataaaattcatctgcaagcctgttatctacgtaaatgatagtaaattggtatattgctttctgtatacaggtacagatatagacgcagatgtagatataaatgtagagactggcatagctactaattataattttcctaatctattagtgtaagaaattgtacaccatctaatgtgcttcagagctatgatttcctgtggctga

SEQ ID NO: 12871 - DNA, 572 bp, Homo sapiens
  MAP TO AC019159.3; EXPRESSED IN ADULT LIVER, SIGNAL = 0.64; EXPRESSED IN BRAIN, SIGNAL = 0.5; EXPRESSED IN BONE MARROW, SIGNAL = 0.44; EXPRESSED IN PLACENTA, SIGNAL = 0.62
ccccaggcagagtagaaatgacaaagacagagagaatgaaaggaacatgagaacagcatcaccagcttcccattctgtcagagctgtccccttcagacatacttggccaagagttccagtaaattctgatcaagaagaagttgtaaggaatgtctccttgtgtatctgtgttctgactggtgagttctgaatatccctgtggtaaagccacctcctcagggagaggatcatttcatgtaaatgcaaaataataatccctataatgactttgagttttatttctgatacaattttgcaattgctcaaataatgagactttacagacaatttagtgatagtatatttataaggcttgacagataactgatgtaatagaaacctcagggtatgttttgttttccacaagataaaaaaaaaagtatttcatagctatgttttgttttccagaactcatggatgataggctgttcatattagatatttttccctaaaagttggataggatggtggcatcattaaataaaaagaaagaaaaaaaaaacctgctttaatgctacgccaggcaaaatatc

SEQ ID NO: 12872 - DNA, 589 bp, Homo sapiens
  MAP TO AC011111.3; EXPRESSED IN LUNG, SIGNAL = 0.84; EXPRESSED IN ADULT LIVER, SIGNAL = 0.99; EXPRESSED IN BONE MARROW, SIGNAL = 0.88; EXPRESSED IN BRAIN, SIGNAL =   1; EXPRESSED IN PLACENTA, SIGNAL = 0.76; EXPRESSED IN FETAL LIVER, SIGNAL = 0.88
gctagtcagcatgcgagatgtcgggctggaagagactctctcatcatttataatcaccacttcttcatttcataatattcactacacagaggttccacctgggtttctgaggatacatggctttatgaggttcctgtgcttactatgggagtaccaggttgaaacgtggaagttccaggctttttcaccaccaatgtctggaaagaactccagagtttgaatctttatgtgagtggccaatgtccaccctatataaatatattcttttttatttttaagaggtagtgcttctcctgatatataatcaaattaggctccatttagaaacacttaaaaacaataaaaagacaataagttctgtatggatttgggtttttgaagttacctgatcttcccgggaagttcccttctttgactgttgcttcctcaaagcttcatacttttgcttttctcttctgtattcggcaacagcaccatctggaggggcttcttcctctaaagaatagtagaatatttttagaataagcagtaaaatagctctgtggattcatagcaatgtttatgctcctgttgctgaagaggaggttgg

SEQ ID NO: 12873 - DNA, 600 bp, Homo sapiens
  MAP TO AC018583.3; EXPRESSED IN FETAL LIVER, SIGNAL = 0.53; EXPRESSED IN BONE MARROW, SIGNAL = 0.6; EXPRESSED IN PLACENTA, SIGNAL = 0.65; EXPRESSED IN ADULT LIVER, SIGNAL = 0.81; EXPRESSED IN BRAIN, SIGNAL = 0.63
caggcattcagtttgggttcaatttgatataacattttggattggtttaaataaaagtctagcaaattactgattcttaaatttgctacatgtgttaaaaggattttgttgagactgctatttataggtattgagtcgggatcaacagtggaaggcagtcaggctattaaagttgtgaatgacatcatcatcatcatcttcatcttcatcaacatcacttatcatcattcttcttatttgcttaatgtttctgccttatttgatcttttttgaatatgtgatcttattcttgagcagtactgcagttagaggaagagatgataaagagaaaggctatttggactggtttacctactcagttttgctggcatcaaaacagctggtaacttggctgatgaggttctgagggactgcttcacactagccaaaagtattaatctgattataaactcaagtgccaattttaattttaatctaaaatgagaattatagcagtgaactaaatcagaatacttattgtggttgatcattactactgtctctggaggaaaatacactctagaagccaaattattatcagaattttgcttgctagcatgg

SEQ ID NO: 12874 - DNA, 510 bp, Homo sapiens
  MAP TO AC022038.2; EXPRESSED IN LUNG, SIGNAL = 1.5; EXPRESSED IN ADULT LIVER, SIGNAL = 1.2; EXPRESSED IN BRAIN, SIGNAL = 0.97; EXPRESSED IN PLACENTA, SIGNAL = 1.3; EXPRESSED IN FETAL LIVER, SIGNAL = 0.78; EXPRESSED IN BONE MARROW, SIGNAL =   1
gctgaatttcaaaccccaagtttcctatctgtaaagtaagagcagaacaacataatataaatatctataaagataaaataatacacataaaacattttgaactttaagatgttatagatatttatttcattgatattacaagtatctgaattagtttcagaacctttttttctgtcatttttttccacactctaataatgcttctttgcaatgcctatgttttcttcctcttgtttttctcaaccactttgcttcctggtttttttttttttgccttacttttaccatttgaagctatgaggtttccctatgaatattgtactgcctatgtgctcgttgccttcttcattgtcagggtcatcgttagcgtccttaaggatggttttaaattttcttttatggacattggtatatttgaactttccattttttctgtaagatatcattatatactatatatttgaacttcttttgtgtatgtgcatcacatccaactatggtgtgtgggtg

SEQ ID NO: 12875 - DNA, 562 bp, Homo sapiens
  MAP TO AC008474.4; EXPRESSED IN PLACENTA, SIGNAL = 0.58; EXPRESSED IN FETAL LIVER, SIGNAL = 0.54; EXPRESSED IN BONE MARROW, SIGNAL = 0.64; EXPRESSED IN ADULT LIVER, SIGNAL = 0.56; EXPRESSED IN BRAIN, SIGNAL = 0.7
ttacccagcggatactgaccagaagttcctttgcatgggaagcttgtttaccagcggatactgaccagaagttcctttgcatgggaagcttgtttaccagcggatactgaccagaagttcctttgcatgggaagcttgtttacccagcagagtgtgaccagaaggttttttgcatgggaagcctatttacccagcggacaatgaccagaaggtcctttgcatgggaagcttgtttcctgaggcctcccaaccagtggacgtcctggtggctgttgtctgagctctgtccagcttatgcctgcctgaccattgctctggcactgggagtccaacctcatgttcccagcatcccggggaaacgcagcctggggaagcccccggttcttcagctggaaggtgcaaattccatccaccaccagggtagggagcagaccctaggcaaggagggcacaatatgtgggagggcaggtcacacagaccggaatgaagagtcaggcagagagaggagagagagagatgcggctcacggtgtatacataagggaatggagcatgggtcactt

SEQ ID NO: 12876 - DNA, 550 bp, Homo sapiens
  MAP TO AL161634.1; EXPRESSED IN PLACENTA, SIGNAL = 0.53; EXPRESSED IN BRAIN, SIGNAL = 0.47; EXPRESSED IN BONE MARROW, SIGNAL = 0.46
aaggcctgaaggttggtttcctgagaaagaaactttaataaaacaaaggaactttctcaagtttcaagactgggagaattcatttctatgtgtattcaacagaagctataaagctaagttctgtgggacaattaggtcagtttcaattcacccctacctttctatttttcaactcctcaatcatgaggaatccacctggcaatcttttagctgcttcatgctgaggaggggtgttgtgggcagctccatgccatggctgtccacgtggctacccaggaaacaaaggttaatctactactatagtttccttttgaaacacaatctttctctctccagtatcctactgccaccaaagacaaatcacaagaccagcccacctgccaaataagctttagtcccatatacttggcctgattacctatacaatctgcaacaagaaacattgtccatataggttctcctaaattgtctttgctggaacctctcacaaggccatttcagttaaagccttaggaagaaaaccagtttccccaactgcatcccataggtt

SEQ ID NO: 12877 - DNA, 595 bp, Homo sapiens
  MAP TO AC018578.3; EXPRESSED IN LUNG, SIGNAL = 0.93; EXPRESSED IN ADULT LIVER, SIGNAL = 1.2; EXPRESSED IN FETAL LIVER, SIGNAL = 0.83; EXPRESSED IN BRAIN, SIGNAL = 0.85; EXPRESSED IN PLACENTA, SIGNAL = 0.95; EXPRESSED IN BONE MARROW, SIGNAL = 0.86
ctactggaggttggctggaccaatgggcccccctgctggtcccccaacattaaaagaccccaaacaaatctgctctttttactccattttggaggtatttgaaaagctggaagggaaagatgacaatgagaaacttgatttcgaatcacctggagagatggtctgccacattaataaagatgaaaattgacagaggggccaggatcctctggctcaatccccatctgagaacccaagggcaaatgtacatgtatgggtaaaatgacctgtggggtcaagggagaaaagaattttctagggcttcttgacatgggatcccaatgctctaggattccaaaacctgttggtgaagtcgtaatggaatctacagtcaaatgagaggatatggggatgcagtgtttgatgggattaaggtgaagattggattaaaatggaaatgtttgaatggatattatgtaaagtggttacatttcttgtccccggacatcccttccagaggaggaaagtttgagtaagaataaaccacaaatggagagaacaagaactagcagttggggataaaggaatgaataaatgggttattgcaacgaggaaa

SEQ ID NO: 12878 - DNA, 527 bp, Homo sapiens
  MAP TO AC013597.3; EXPRESSED IN PLACENTA, SIGNAL = 0.84; EXPRESSED IN ADULT LIVER, SIGNAL = 1.1; EXPRESSED IN FETAL LIVER, SIGNAL = 0.75; EXPRESSED IN BRAIN, SIGNAL = 0.85; EXPRESSED IN LUNG, SIGNAL = 0.83; EXPRESSED IN BONE MARROW, SIGNAL = 0.76
tggctttggagagatccttgatttattcatttggctcttaaatataccctgaccgaatccattaggaaatccttgtgttcataccttcaaaatatattcagaagctgaccatttctcctcctctccaccagtgaaactctggcacaagccagcatcagctttcaccaggaatgctacatctcctggttgttctccttgcttcagtttctgctgccttctatcctcaacactaaaggcagagacatccttttaaactgttgggtcacagatcatggccttctactgcaaaaagccagcatgcgatagatgcatgtctcactcgggtaaaagccacaggaactggggttacatattgatcaagatacacgtttcctattctcttgaaacgttagggtttctagtagcttttgaagtataatagttttaaggtataatcctaattaactgtacttctcagctctcctcctccgtccctttccactagaatccatgtcccaaatctcctacctatgggtccaggtggaaga

SEQ ID NO: 12879 - DNA, 591 bp, Homo sapiens
  MAP TO AL158849.5; EXPRESSED IN ADULT LIVER, SIGNAL = 0.67; EXPRESSED IN FETAL LIVER, SIGNAL = 0.54; EXPRESSED IN BRAIN, SIGNAL = 0.62; EXPRESSED IN BONE MARROW, SIGNAL = 0.61
tgcccaaggcaatctatctctcatacgcacacaaacaacatgatagcaaacttttagtatgtgtatttttgtgccccgaataataaaatgccctggagactagtcacacttttgggaaggtaaaatgaagagtgataactgaatattgctgtaattgttcacttcgtagatgttcttcagcttctgtgagaagaatgtggattatgaaacgtttaaagccctcaatgatgcatgtcttgtgtatgacagtcgacttgtgattgataccaacttccacaccaacgacatagccatcagagctgctggctccctcaccaaattctccaatagatactactcaaatgagtggactcacagcaacttcagttccaaagaaattggctttcagctggcagcagctatgctacatctctttgatccaacccttgagcctgtgaccgagccaccagctaatcttgaccggctcatccccatgtacaagggagccaagattcaaggtatacgagtaggcttccttctccttgatgaagccacagattaggtatggctcagcagtcaggccagtcctccaggtttctcttaggcttgggg

SEQ ID NO: 12880 - DNA, 557 bp, Homo sapiens
  MAP TO AC025644.2; EXPRESSED IN BONE MARROW, SIGNAL = 0.67; EXPRESSED IN ADULT LIVER, SIGNAL = 0.84; EXPRESSED IN FETAL LIVER, SIGNAL = 0.64; EXPRESSED IN BRAIN, SIGNAL = 0.78; EXPRESSED IN LUNG, SIGNAL = 0.86; EXPRESSED IN PLACENTA, SIGNAL = 0.67
catggatgacctcactgtgcaatttcctcagcagcatctctaacatctttctactggttaatcggccataatatccagatatacttcgatggtacctgtgtggactgtttttactatctctacacaggcttcccagaagagatcactcacaacaacctagccgatttctgccaacatgattacttcatcctcggtgcatcccttatttactggtattaatctgagagcggcttcctgcaccttctgagaataaaacagataacaagaaaagtacttattgaaaatatcaaggtttttgaagttacctgtcacaaatatgtaatgcctcttcgttcctctgtatgtctgtagcgggaagaatggggtattttaggaaatattttctctatcctaacctatctcaccttcattatggccacagtgtcctagctcctgcttccttgacttttgcccattaccaaccctgcaatatgaacatataatctctggcacattctaattggattttgtcactcccactgcttcagctgttttagtgcgttccatgctttcacttt

SEQ ID NO: 12881 - DNA, 598 bp, Homo sapiens
  MAP TO AL161777.1; EXPRESSED IN PLACENTA, SIGNAL = 0.64; EXPRESSED IN ADULT LIVER, SIGNAL = 0.87; EXPRESSED IN FETAL LIVER, SIGNAL = 0.71; EXPRESSED IN BRAIN, SIGNAL = 1.1; EXPRESSED IN BONE MARROW, SIGNAL = 0.77
ccctcaccttcacttcaagcagagaagttatgattcatctgacttctacataagacttaagattttttaaaaaaaacaaagatgtgcagcgaaagtataaaacctactcatttgaaacaaaaaaaatgtacaaactgggagacacacacacacgaaacaatactacattacccgatacaaattgtcttactttccaacagtgtttaaaactgtatgacgggtatctgtcagagccttctccactttcaacacgccttttgcaaaaaacaatggctttttcatacaagaaaaggtgtcgctgcattggtttgaatctagccaaatccttcatttttgtagcacctttcttgtgccctatccaaacgctgaatccaccttgcattatcatcttgcccagttcatttaagtttccctagaatggaaaatcaaaacccattagtagaaagcaaagctacattcagctctctgacaccaacatgttagggttcagcttaagctactcaaaccctgaagaataatttatgtttttttaaaaacttaactttgtatgttaaaacatggcatgcaccacataagtacaaaattactgtgggggtgg

SEQ ID NO: 12882 - DNA, 502 bp, Homo sapiens
  MAP TO AL135940.11; EXPRESSED IN LUNG, SIGNAL =   1; EXPRESSED IN ADULT LIVER, SIGNAL = 0.92; EXPRESSED IN BRAIN, SIGNAL = 0.87; EXPRESSED IN BONE MARROW, SIGNAL = 0.87; EXPRESSED IN PLACENTA, SIGNAL = 0.94; EXPRESSED IN FETAL LIVER, SIGNAL = 0.74
tgatttgttcaaaggaccagcttttggtttgttagttttttctattattttcctgttttcaattacattgatttctgctctattttttccttctgcttgctttaggtctgaattcctcttcttttcttgtttcctatggttgaatattaagttattcattttagatattttttattttctaccatatgtagttaatgctatcaaatttcctctaagcattgcttcaggtacatcccacacattttaataagttgtatttttattttaatttaaagtatttttaaatgtttcttgtgacatcttgactcatgtgttatatagatttgtgttgtttagtctccaactatttggtgattttccaagtatgtttctattattgatttctaatttaattctattgtggtctgagaacatgctttgcatgttttctactcttttaaattttgaaatgtgttttatggcttagaatgttggctatgtctgagaatgttccatgtgagct

SEQ ID NO: 12883 - DNA, 564 bp, Homo sapiens
  MAP TO AC015908.4; EXPRESSED IN BONE MARROW, SIGNAL = 0.95; EXPRESSED IN PLACENTA, SIGNAL =   1; EXPRESSED IN ADULT LIVER, SIGNAL = 1.2; EXPRESSED IN FETAL LIVER, SIGNAL = 0.94; EXPRESSED IN BRAIN, SIGNAL = 1.1; EXPRESSED IN LUNG, SIGNAL = 1.1
ccacatggattgtaggtcccagcgatgagcagcccaattaacagtgatgtcagactgtttgggtccagatcattcctgagccatgaaacagttaagaaatatcctgccccactggctgccgtgctcataaaggtagacccacgtgtacttccctgtggctccaagaagcgccagctcgctcatttgctcacacccagcaggcagagaaggcagcagcaggcaggaccgccaccctcccatgcaaatcacccccgggagtgcagctgggctcctcccgctcctcctgggcaatgctcctggggagtctgtggggaagatgccatccagggcgctgtgcgctcttcctcatcctcgccctcctgctggacgcggtcggcctggtccttttgctgctggggatcttggcccccctgagttcctgggacttcttcatctacacaggtgccctgatcctggctctcagcctactgctctggatcatctggtattccctcaacattgaggtgtctcctgaaaaactggacctgtaatttggccatgggaagaggagaagagacgcaggtg

SEQ ID NO: 12884 - DNA, 514 bp, Homo sapiens
  MAP TO AC009635.4; EXPRESSED IN PLACENTA, SIGNAL = 0.45; EXPRESSED IN BRAIN, SIGNAL = 0.49; EXPRESSED IN BONE MARROW, SIGNAL = 0.47
tcattgaatgggcatttgtgcagagcccagactctggagacagaagaatgctctggtgcaaatcacatcccaccactttattttgtgcaccccagggatatggcttaatctcttctaagctgtgaaatagggataataatagtatctcttgatatttcctattgagatgatttaatgtgtcagttcccatgcatcttttagaatagtaaacattcaataaatattaactattaattattgactagctatatcaatgaggatttcaacaagaaacagatgacactcacacattagcataattcaaggagagtttattttcatctgaattaatcacaaaggtgtgtgcagggtacacggaattcctcaacgtatggttgaggaaccgagggctaacagtaggtgggctgttattgcccgtagtcttgagggatgacagatgggagaaattactgaaatacagaatagttacatagaaaaggaatccggagagaagtgactttccgtgaagggacac

SEQ ID NO: 12885 - DNA, 575 bp, Homo sapiens
  MAP TO AC022664.2; EXPRESSED IN ADULT LIVER, SIGNAL = 1.2; EXPRESSED IN BRAIN, SIGNAL = 0.97; EXPRESSED IN LUNG, SIGNAL = 0.9; EXPRESSED IN PLACENTA, SIGNAL = 1.1; EXPRESSED IN FETAL LIVER, SIGNAL = 2.1; EXPRESSED IN BONE MARROW, SIGNAL = 0.95
cgactacttttgcaccaagctaatattataaatgctcttcatctactctctaaaaacacatatttttattcttgaccctatttgataaataatcattaaacaatctagttagaaaagattcattgtttgtgatttttgcattattcaaggctgattgtaaaacttttcctctttttgaacaaaatatatttgtcatgctaaatggcaaatattggctcaagacactattcggagctgcagtttataatgatgtacatcaggatgtaatagaagtcatgatagcagttatgaaacttaagaaaataagttttggaatgaaataaacttagaatcaagtcctgatttaactgtgtaaaaaataactttgggcaaattatttagaatctataaaagaagattcctattctttatccacttaatagggataataataaccctcatatttttgtaaggattggaagatcctaaattaggcaaataacataatggttgcatgcacatagtaataaagcacagatatagtaatgctggttattattgttttattaggcaatgtttgaattccctaacctgcc

SEQ ID NO: 12886 - DNA, 535 bp, Homo sapiens
  MAP TO AC013764.3; EXPRESSED IN LUNG, SIGNAL = 0.94; EXPRESSED IN PLACENTA, SIGNAL =   1; EXPRESSED IN ADULT LIVER, SIGNAL = 0.89; EXPRESSED IN BRAIN, SIGNAL = 0.68; EXPRESSED IN BONE MARROW, SIGNAL = 0.82; EXPRESSED IN FETAL LIVER, SIGNAL = 0.87
atttgccccagactcaacagggctcaggcccagtccagtgtagctagaaaggggctggatggggcatgaggggaggactgtgtgactaaggggtgatgtgaatagagttcctccaggtttcatcagaagactttgagattagcattgcctcctagaaagacagccctggctccaattcagaaatcggatgagagaaaagccagctggaagcagggagggtcattaccaagccactgccacaatctgggcaaaaggtgatggaggcttctaccaagggatggaaagaagaggagcatttgagggagatccagaaggtggagcaaaccctagagggatgaggaagaatgaagactcaaggaaggctcctgagggttctgccctggcaccagcagataaaggacatgatgtcttggagcatgtcctctctggatcgggcctggagctgggggatgctggggctcaggtgggtggtcttcagcataaccatgtctgaccctttttctctgttacagcttctcctggggcctctattttc

SEQ ID NO: 12887 - DNA, 600 bp, Homo sapiens
  MAP TO AC011938.3; EXPRESSED IN ADULT LIVER, SIGNAL = 0.67; EXPRESSED IN BONE MARROW, SIGNAL = 0.53; EXPRESSED IN BRAIN, SIGNAL = 0.62; EXPRESSED IN PLACENTA, SIGNAL = 0.59; EXPRESSED IN FETAL LIVER, SIGNAL = 0.51
atgaaggcagcaatgatgtggataatcccaagacagcacatcaccaaaagtcatttagatcaggctttagagtacattaaatacatcacctcttcctcacagatttgctgtgtatttgttttttcccccattgaacatggggtcaaagtatccaaattaggctgaagttttggagaaactgtgtacaatccatcacaaaataactcttctgaatagtaagaagtaaatcacaatcatgtccacctggttctcagaatcacttctattgcctagttgcttccaactcagggtaaaacaattgtagacagatattctgactctcacctttctttttagaggtcccaggcgggaagttttggcgtcttgtgctttgtaggtcacccacagaccactggctatatgctgcacaaagcagacagaatctccatacttgatttctggaactcccatgccttctatgtctcgcttgtgactggagtctaatttctccttgagttcctaattcatacacaaaaagaaacaaacataggcatagctgattaaattagaagctcaatatacaaaacgaatcacctatgaagaacctgtaagccaggcaac

SEQ ID NO: 12888 - DNA, 573 bp, Homo sapiens
  MAP TO AC011159.3; EXPRESSED IN FETAL LIVER, SIGNAL = 0.52; EXPRESSED IN BONE MARROW, SIGNAL = 0.48; EXPRESSED IN ADULT LIVER, SIGNAL = 0.64; EXPRESSED IN BRAIN, SIGNAL = 0.5
gcagtgctgagtggttgaagatttatggacaggaaaaggaaagtgacatacaaaaaatggaagtgagaaacagaaacagctggattggttacagtttgccatttgccttatttgaacttgctttgaacagttggccacctttgattgtctgaaactcagtgattgctacaagagtaacagcctgtttacacaaccatttaggctacggttcactatgtatagagaaacctttagaattagctcaaaatatgtaaggaggcagctttagactaaatttaatttaacactgtgctttaagtagcagctggtttcttttcacatgggccttaacctgttcattttccagtcctttccacttacctgaatacttacacctgcccttcctggaaaattgtcttggcccttgtaggtgtttgactttgggatgccctgctcagtctgtgagttctgaatgccaatcaattccttgcaaatcccatcttttactaatgtggaaatctgacctctactcaaacctatgtgaaaggtcataaggctcaggaaataagacacgtagatatggctctgcctgca

SEQ ID NO: 12889 - DNA, 523 bp, Homo sapiens
  MAP TO AC019253.3; EXPRESSED IN BONE MARROW, SIGNAL = 0.55; EXPRESSED IN ADULT LIVER, SIGNAL = 0.56; EXPRESSED IN BRAIN, SIGNAL = 0.51; EXPRESSED IN FETAL LIVER, SIGNAL = 0.61; EXPRESSED IN PLACENTA, SIGNAL = 0.62
gagaattggtggcaaaggtcagttgttttagagccccccaaatcaggcatgttttaaaaaggtatggcagaactgaaaaagagaaaatattaatataaaaggttgtattaaagaaccaggagtgagactggtggttatcagtccagtggattccaagaggtcagtggaggaaaatattttcattacacagcactgctcttgctttcaagctggaatattgatgcatttggtaaagttcacattcttatgtaggggtttgtatgacccaagcatttcactagactttctttccaggatgtattttggatcatccatcatcttctgttgtggtgagtcttttcaaggcttacatcaagtttccagaattcagctcacaagccttcttcagatcccaagtaaaagggccaaacacaaagctgcttagagccaagttagagatctggcagttggattttaggtgtctgatgatgagctagaaaggagagagaaaaatggaaaagttagtttggagacatgttgccag

SEQ ID NO: 12890 - DNA, 514 bp, Homo sapiens
  MAP TO AC011255.3; EXPRESSED IN PLACENTA, SIGNAL = 0.47; EXPRESSED IN BONE MARROW, SIGNAL = 0.53; EXPRESSED IN BRAIN, SIGNAL = 0.46
gtggatggctttgctttttcaaattcttatgagcaggacaactttggatgatgctcccatagctttgatttcttttcttgacagcgaaaaaagtcataaatgtcacattagaaagctatatttagaattttttatgtaaaagctcagttgtttaccagtaagattactgtgttttactggaaaaatctggaggaaatcctgcatgatttcatttcttcaaatggatcttaaatacaagctagatgctaagcacaagttgctcatgagaagtgtgtgataatggatatgatccctattcttggagaagatgaatatgaaccaaaagtcacacacacacagagtattgaggaagaaaagttgcatcctgctgacttctggcttctctgtgaagtgggttccagtccatcttctgaggggattggggaaacagaagtttgttaaagtgagaaacatttgaagtagttttgttaagaatgagaaataatgacataagacccaacaaacagggagattt

SEQ ID NO: 12891 - DNA, 508 bp, Homo sapiens
  MAP TO AC019194.2; EXPRESSED IN BONE MARROW, SIGNAL = 0.45; EXPRESSED IN BRAIN, SIGNAL = 0.46; EXPRESSED IN PLACENTA, SIGNAL = 0.5
tgcctcctatactaatcccacagaaataaatttcttttatcaaattaaccttaaaacagaccattcattctcacaagacagatagtcagaaatacaggatcgatctgtgtttcatggtaatacctggctccttccaagttccttatccttcaggactgtagagttgaatccaggttgcctccttaaatcaaagagagacacttccttaaagaaagccccttgtatctccacgatgcctggggcagtgtcttccgcttggaccatctgccagaagcgagaagcaacaaaacaacattgtaaaaaatgcattgagctttgaggaagggccaggcactacatcacaggcaataaaatccatcagacccgctcagcaaccctaggaagtggagagtagcatcatccccatttcacaggtgaggaaacagagacttaaagtgtgatgagttgaaagtcagtaagtgacattcaagcccaagtctgtctgattccaaaacccgtgctccttatt

SEQ ID NO: 12892 - DNA, 564 bp, Homo sapiens
  MAP TO AC009699.6; EXPRESSED IN LUNG, SIGNAL = 0.89; EXPRESSED IN ADULT LIVER, SIGNAL = 0.71; EXPRESSED IN FETAL LIVER, SIGNAL = 0.74; EXPRESSED IN BRAIN, SIGNAL = 0.81; EXPRESSED IN PLACENTA, SIGNAL = 1.1; EXPRESSED IN BONE MARROW, SIGNAL = 0.97
ccagccttgactttctggagcttgcacgtacctctttcctcactcttgcctctgtccttgttgccatggccctttcctaagtcatcacactctcttgaacacaaccatagccttctaggttgacccttgcttccaatcttgctgctctccagatttttccttcttgtcctttctgccttcactgcttcaaggacaatgatttaaacatgcaaacctagctggaatctctttttcagggttcccaatgcatgtagggtcaacatccatcaaaatcatgtaaatgacttttagagtgctctagaatctgcctctgtccacttacccagacttctgaatgctattctacatttgtctcactctaactaaactggttatctttctggtttttttttatttgtatgaatttaaggggcacaactgcaattttgttacatgaatatattgcatagtggtgaagtcttggcttttactgtatcccatcacctgaataatgtacactgtagctattaagcaatttatcataaactttcaactcttaaacctgccctactctcccccaactct

SEQ ID NO: 12893 - DNA, 593 bp, Homo sapiens
  MAP TO AC018378.3; EXPRESSED IN PLACENTA, SIGNAL = 1.2; EXPRESSED IN ADULT LIVER, SIGNAL = 1.5; EXPRESSED IN FETAL LIVER, SIGNAL = 0.98; EXPRESSED IN BRAIN, SIGNAL = 1.2; EXPRESSED IN BONE MARROW, SIGNAL = 1.2; EXPRESSED IN LUNG, SIGNAL = 1.2
tgcatcccagattatcctcagagtttcagttaattgtgtgcattacttttgtatcttacttaatatgtcatgtgtggtccacccaacaaccccttactttaagccttttagggaaactcagaaaagttcctccccctcacgtgtaatggctgatgtccaggtgcgctctcagggtgctgctctgatccctcactgtttttccctaccactctcatctctgtctttccctctctctaacggtctcccctgggtttttcttcattgttttcaagcttctttaacatgtgtgaagatctctggcttacacacaagtatgggaatttgcatgtgccaaaagctgactctatcaatacatttgttgatgagaatttaaagaggaaaaaggtaagaactccacaggggtagtgctaattgattttctttataaacacataagtaattatacaagtgaccatctgctttgtcggcatgaagttaatgaatacacaaaaggaatcaaatttagagcttacttaaatcttaaatccaactgcctagatagttgcttagatccatcataaggcaaaataaaaagtgccctagtctgcaggaaa

SEQ ID NO: 12894 - DNA, 519 bp, Homo sapiens
  MAP TO AC015670.4; EXPRESSED IN BRAIN, SIGNAL = 0.45; EXPRESSED IN BONE MARROW, SIGNAL = 0.44; EXPRESSED IN PLACENTA, SIGNAL = 0.56; EXPRESSED IN FETAL LIVER, SIGNAL = 0.49
ttttcccctaacacgctgtcaaacatgtcaaacacagagcagctttttgatgtggacactggctcattaggccccagctgagatcattaaattctgtttctttaaggccaatgggaagggcagatttatgtttcctttgatagagctggtcttaaatttcctccctattgtgagatggatagttggtgatgaatcagtgagatttcagacttcactgggggcagactggctgttcataggattgaggtttctgggctagaacagtaaacaggcagtcactgagtgaacacacacatttctgatgttgcctcctgccatggtccagtcttagtggcattacctgtcacctttaagacagggtttctcaaccttggaggtatcaatgttttggaccaggaaatccttgtcatgagaactgttctgtgcattgcaggatattagcagcatgcctgacttctacccattagatgccagtaacacactctccaagttgtgccaaccaaaagtgtccccagacat

SEQ ID NO: 12895 - DNA, 502 bp, Homo sapiens
  MAP TO AL121935.12; EXPRESSED IN PLACENTA, SIGNAL = 0.49; EXPRESSED IN ADULT LIVER, SIGNAL = 0.51; EXPRESSED IN FETAL LIVER, SIGNAL = 0.57; EXPRESSED IN BONE MARROW, SIGNAL = 0.6; EXPRESSED IN BRAIN, SIGNAL = 0.55
atgccctgtcgattcctttcttatacacagaaagataatatgtaatgtagaagtaatatttgttgtggatatgattcgaaattttaaattagatgcctgagaattttatttaattgacaggttatctttccaattggaagtctgtatttttttttataatttattatacagtttttgagaaagagcatgatgtagtagatgaaattgtaaaaatctgggtttgtttctttcttgctattgtgaccaaagtcactgctttgaacctttgtctcctcatctgttacattgacttgactgctgctgcccttgctacattattttaagggtcaagcaagacaatatgtatgaaattaattatagttaatattatattttacttaaaggattaaaagaaatatctgaatgtttaaagaatagtaatctctttaaatgtttattttcagagttcttatttttttttccccttctgaaattagtaccagccatcgctcagagaaaagtg

SEQ ID NO: 12896 - DNA, 506 bp, Homo sapiens
  MAP TO AL135923.11; EXPRESSED IN LUNG, SIGNAL = 1.1; EXPRESSED IN PLACENTA, SIGNAL = 0.99; EXPRESSED IN ADULT LIVER, SIGNAL =   1; EXPRESSED IN BRAIN, SIGNAL = 0.89; EXPRESSED IN FETAL LIVER, SIGNAL = 0.95; EXPRESSED IN BONE MARROW, SIGNAL = 0.89
cttcttgcacccgatttctcattttgcctcgccctcatcctcatcctttgtgtatgccaggctgtgttaaccctttgagaacccccgtggcttgctcttttctttcttccttacggttgtcatccggtttgtagcctgacttcttcggcctgtcacgtacccctttccttttcctggaagtggttttgttgtaggacagccacaggtggacggctggaccttaccaagctttgaagggcgaggaccgggcgaaggcaaaacctgggaaggctctggctgccgccagaggaccgggcggagcaaccacagtcactgtggttatcatgtccagcctcctgggacctccacttagcttggctgtcaccctgacccccgcccgcacctccccagctgctgatctcggggaggcagccctccctgaggtgctgagggcaggaccctggcgagcagaagtgaagggtttaagagccatctccctactagaatggtgccctgatgtttaatgg

SEQ ID NO: 12897 - DNA, 574 bp, Homo sapiens
  MAP TO AC018787.3; EXPRESSED IN ADULT LIVER, SIGNAL = 1.1; EXPRESSED IN BRAIN, SIGNAL = 0.86; EXPRESSED IN LUNG, SIGNAL =   1; EXPRESSED IN PLACENTA, SIGNAL = 0.75; EXPRESSED IN FETAL LIVER, SIGNAL = 0.73; EXPRESSED IN BONE MARROW, SIGNAL = 0.87
cgtgtttccttagctctggggttgagttaaacaatgttgtatgttcattttagccacttcagtgcctacaaattatgattgagtgtctgtcttcaagctggcctgggtccatattaataatgggaaaattcttctcaaccttctccaaaccacaggtctcaaaattaggctgcaggtctttttaggaacaaatccatctcaatgacatttatatgcatgtttatgtgtgtgggtgtttgtgggtatgattacatatattctcaaaaagtataaaatagctttggcaataaccttacatttgctacatctacttcaattaaaattagggaatagtgtgtcccaggaaaaagaagcaaactcaccttcactgccagtttaacatttagatcatcttccaagtcaccttctgacatcacagtgctcaaaaggctttcttttctgctgcatgaattgttttccttccagcctctctcagcttggttactgacacttccttctagttgctttaactccacttcgtattgcaacctgtagcgcagaagagcatccagatgccccttcatttcccctactc

SEQ ID NO: 12898 - DNA, 586 bp, Homo sapiens
  MAP TO AC013490.3; EXPRESSED IN ADULT LIVER, SIGNAL = 0.64; EXPRESSED IN BRAIN, SIGNAL = 0.65; EXPRESSED IN BONE MARROW, SIGNAL = 1.5; EXPRESSED IN PLACENTA, SIGNAL = 9.4; EXPRESSED IN FETAL LIVER, SIGNAL = 0.57
aagggtggaacagcattttgaagactcagttacaatgtcacccaggtggcaataccttgaaagagtgagacaaggttctactgaagactgtagatgctctgaatcagtgttcactacatgctactctttttccaatagccaggattcatgtgtccaggaatcaagggctaaaaatgaagtggcgcttttcaccattacctctactgacccactagcaaaactttggcttcttcttcccacaggtttatgctctcctggcctaaggtctagatccagagggagaaatatttccatcaggaaacacaacaatgattccattgaaatggatattaagactgccatctgatcattttagcctcctcatgcctatgagtcaattggccaagaagggaattaaggtgttggctgtactgattgatctgaacgttcaaggggaaattggacttctactccacaatgaacgtaagaaaaagtatgtctggaatacaggagatcttttctgggtgtgttttagcattactatgccatataattaaagtcaatataaaacaacacagtccaggcaggcctatgaatgtcccaaacc

SEQ ID NO: 12899 - DNA, 580 bp, Homo sapiens
  MAP TO AC013626.3; EXPRESSED IN FETAL LIVER, SIGNAL = 0.6; EXPRESSED IN PLACENTA, SIGNAL = 0.6; EXPRESSED IN ADULT LIVER, SIGNAL = 0.67; EXPRESSED IN BRAIN, SIGNAL = 0.63; EXPRESSED IN BONE MARROW, SIGNAL = 0.6
gtccttccaggatgaagctgatctacgttttcttggactgtccacaaacatccttaacaggtgctaactctatttttaaatactctagcaatatttgtatggggagcaggggccagccactattcggaagtgggctggtgaggattttgatagtgttttggcttttttgtgttggctgggtggtgacacagtttcttcagatatctttaaatatatcatagtctaccaaataaagattagttgaggtgtgtgggttggggagaaagtggttaagaaaacttttctgccagcatacaaactaccctggcttcatactttgctctaaatttctgtgtaatcccagggttttagaggtaaacctgtacggatctcctatcttacacaagagggatgagcactcacatttactgaggccacatgagggcttggcgcagttgggagcttttcatttactctctcagttggctgatgaggaaactgctggtacttttgtcctagcacacaaagaatataaccatcctgaaggaaagagagttttgattaaagaggggagggtgagagaaggagtaacactggggca

SEQ ID NO: 12900 - DNA, 588 bp, Homo sapiens
  MAP TO AC008688.4; EXPRESSED IN BONE MARROW, SIGNAL = 0.62; EXPRESSED IN BRAIN, SIGNAL = 0.77; EXPRESSED IN PLACENTA, SIGNAL = 0.92; EXPRESSED IN ADULT LIVER, SIGNAL = 0.7; EXPRESSED IN FETAL LIVER, SIGNAL = 0.69
tggcaaataaaggtggcttccacttgtccttaataacagcaccagcttatgcctggttgtggttgtcttttagaagcctagatgtgcttcacatactctgtacttccaggctgtgggcccacatgctaacatccagggctctgaggcctcgaatcaccaataaaatagtcatgagttctagcccaagtcatcactgggttaccactttttttctacctggacagctcagtacacaatatagaattgctttataataaattttctttgttatctagctattatagctgtgtgtcatccaggatctgcacatcttgatgctcaactccagaaagctccagacacatttagaactcaaactcttcaagaatctcaaaaaccagggacatcaaagcacacaggttccattgtccatgcagatggataccaagagagggctgaggaatacgtctttgggcagctgtgggaaagtgacttaggtattagtccctagatagtctctgtttttggcagtgatactatcatcattctgagtaggactttctttttattgtgaattaataaggtacatgaggtttgggtcagggaatt

SEQ ID NO: 12901 - DNA, 550 bp, Homo sapiens
  MAP TO AC019253.3; EXPRESSED IN PLACENTA, SIGNAL = 0.67; EXPRESSED IN FETAL LIVER, SIGNAL = 0.53; EXPRESSED IN BONE MARROW, SIGNAL = 0.64; EXPRESSED IN ADULT LIVER, SIGNAL = 0.8; EXPRESSED IN BRAIN, SIGNAL = 0.68
tggcactaagccactgactggtttacatttattatctgatttaattcttataataaatctatgagttagaagtggttatcagcattttacaagtgaagaaacttcagaaaaaaaacaggctaaataacttaaaccaaggtcacctacctagtaagcgagaagccaggatgctggcccagttccaggggatgccaaggcctgagcagggtatccacacagtagtatctgccttccaaaggcatcattaatataatcaatacctgatcatccaagatgcacagtctcacctgtctctgggctgacttctactgtccaggaatgaattggcataaaactctggctaatgaggacagtctcctagaaatggcacttccagatgtccacagtataggtccagaatctgagctatgtatttagaattttccagggagtcaccagtgacctactaactgtagtcatgtgagtaaccaggcttgtgtggctttggtggggaggggagcaaacagaatctggcatgggagaatttctttctccgctgacaaatgacaaa

SEQ ID NO: 12902 - DNA, 547 bp, Homo sapiens
  MAP TO AC024193.2; EXPRESSED IN BONE MARROW, SIGNAL = 0.79; EXPRESSED IN ADULT LIVER, SIGNAL = 0.79; EXPRESSED IN BRAIN, SIGNAL = 0.75; EXPRESSED IN FETAL LIVER, SIGNAL = 0.75; EXPRESSED IN PLACENTA, SIGNAL = 0.75
cccttcccttctctggactcaagttcctcatcattagagcaggaagggaggaccagaagatgcctaagatccagcagaacctttggagaggctccatgactccaagctgggtctgttgtttgccagggctccctttagcctctgggatccccaagtctatcagggctgctctgacaaggcctccaaccagaaggttccactcgcctctctgaaggaaatggacattggagtccctgggccacaccagggccacagcagagccatggacaaggaggtattggctcagatgctggtgaggaggtgactcacccatgccctgctccgcttcgcatgccaccatcagcctgggggatgtgcctggtcatggcagcacccattcaaacataaaggcttctcctctcttgcctcccacctgaagaacattccccagtgacccacatccaagtcagtgccttcagtgctgagggttgagggagagaagtcagatatatcacttgtgatccaagaaagaaattgggagaagtttggaactggtaggcctgatgga

SEQ ID NO: 12903 - DNA, 600 bp, Homo sapiens
  MAP TO AL158849.5; EXPRESSED IN FETAL LIVER, SIGNAL = 0.46; EXPRESSED IN PLACENTA, SIGNAL = 0.5; EXPRESSED IN ADULT LIVER, SIGNAL = 0.55; EXPRESSED IN BONE MARROW, SIGNAL = 0.52; EXPRESSED IN BRAIN, SIGNAL = 0.6
gactcaggggaatggaagaacgctctagacatggtaagaaggaaacataaaaatgcctggtgaccagtccccattttctttatgacataggagatgtgctcacccgagtatgaggaagggggatagtaaggataacaagaggggttacagtagagaacttgaaggttggagaaaggcccagaacagcaacaatgaagaatgtaaaaagatttcaacttgggctaaagaaaaagagtggaaacctgttttttaatgtattaaaattcaaaaaatgcctctatcccccaaaaaatctttgtactatatcattataggttaggttttttaaaaaactactttgttgttttggggaaattttaaattgtacaacagcataatttaggataatgcaatgtggtagtttggtaatttataaatcatctgatccatgttgttcgataattcaaatgattcaaaaccaaatggacagtctttgtagtgaaagatgtagctggataattattaagccttctacttacatagagatgtaaaaaaggcctatatataactattattggtgtaacataaaccacatatctatcatatagcacccaaagctgg

SEQ ID NO: 12904 - DNA, 544 bp, Homo sapiens
  MAP TO AC018780.3; EXPRESSED IN PLACENTA, SIGNAL = 0.65; EXPRESSED IN BONE MARROW, SIGNAL = 0.67; EXPRESSED IN ADULT LIVER, SIGNAL = 0.77; EXPRESSED IN FETAL LIVER, SIGNAL = 0.57; EXPRESSED IN BRAIN, SIGNAL = 0.71
tggctttgcactatttgcagcccgggacctgctctagggcccacatttccaggagagaagccaggaaattcctctgtcagtcccaccactgtcctagccagagcttgtgctttatttctgtccatcttttcttgggatatctttaacgatattaaagtgtcgggtgagtgaagtggacttagcacttaaaagcaataaatttcctctatagaaaaagcaagagactttgaagctttggatcacttagaaaaggcgcctccgagatgtcttaccgaggctcctgcaccaggtgctggtctaagcccctcagtcttgtctggttctctgctccctgtgctgcagtacttgcaattcacactggctgatatggcaacaaggctggtggccgcgcggctgatggtccgcaatgcagcagtggctctgcaggaggagaggaaggatgcagtggccttgtgctccatggccaagctctttgctacagatgaatgctttgccgtaagtgattcctctggctctcctgggatggacagggaacagctgctag

SEQ ID NO: 12905 - DNA, 510 bp, Homo sapiens
  MAP TO AC011280.3; EXPRESSED IN PLACENTA, SIGNAL = 0.54; EXPRESSED IN ADULT LIVER, SIGNAL = 0.63; EXPRESSED IN BRAIN, SIGNAL = 0.48; EXPRESSED IN BONE MARROW, SIGNAL = 0.5
gccacgtggaaacaggttagtactgtcatgctgaacccagcacttactttcatcagtaactgctagctcatttcaattaacttctctgacactaatttgaaggtaccaccattacagatctgagaggcacacaaaaattacttgaaagagagcagatgtgtttttaaaaaggggagctgttatgctgaacagcaatcagaaacataagagacgtcttttttctctacatctaattgaatcagagctgagaacagcgtctatgattgatgataataatatcaatgatggtgatgtaaaagttattaaatacccaaaaaattatacgagtcgtgcggtacatgttgcattgaaagacaatgtctttcccatcagggatttttacctctaaaaatagatgagacagattatgacatatccataaaacattcatcaaaaatatactcaaatatcctttttttcaagattgtatggttagaaataagataaggaaaaataaaaggacaaagggga

SEQ ID NO: 12906 - DNA, 572 bp, Homo sapiens
  MAP TO AC015772.5; EXPRESSED IN PLACENTA, SIGNAL = 1.5; EXPRESSED IN ADULT LIVER, SIGNAL = 0.97; EXPRESSED IN FETAL LIVER, SIGNAL = 0.8; EXPRESSED IN BRAIN, SIGNAL = 1.1; EXPRESSED IN BONE MARROW, SIGNAL = 0.93
agagctgggaaaaaggaaggataattatatggggacaaggatttgcttgtgtctttccaggtgatgatcagatgtttgtgtgggtgcccaccaaacatctgaagatctatcatgagccacggcatctagtgggcccacctgtacagtgcaaattgaaggtttgaaaatcctcaatttgctttctctgtgccttctgttagaaggggcctgtttctcatcagtggcctcccggtcacagccacaaacgtttttgcttctgtttcagtagatttactaacgtgggggtgagggtatgcttgtgtttctgcaggagatgaactaaccgtgtggatgccctcaagatgtgtatgaccatggaatggcagactggagggacccatggatcccaaccatggaccgggttcccccagtacgaggcatgagccagttgaatctgaatgcaaagatggaatgaagaccgaccagagtcacgatgcttaatggaccagtgctttccgactcagctcctctctaccctgaatacaagagaccctaataggcaggaatatcactgcccctattcagcatgaaga

SEQ ID NO: 12907 - DNA, 560 bp, Homo sapiens
  MAP TO AL121901.10; EXPRESSED IN PLACENTA, SIGNAL = 0.6; EXPRESSED IN ADULT LIVER, SIGNAL = 0.71; EXPRESSED IN BRAIN, SIGNAL = 0.45; EXPRESSED IN BONE MARROW, SIGNAL = 0.45
ctgataccacagggattgggatgtttgaagtggagtgccttcacggtcccctggttctctggagaaaaatgcagtgcaacagccaagaagccatatccaggaggctcctggagttgcgggggtggaccctgcagcaagaagagggccctcagctcctgggtgtctccccatgccccagccaaagccacccagagctcagtccacactgggcctccctagtgtcacttgggtgcatggctgatgacacatatgaccatgtttgttttctcaaccttttcgtcaggaccgcctttgtgaacaacctgagggccctgcaggctgcggggagagtcacgtggagcctgagggtggcacaaggaaggcagagaagaagcaagtggagctggccttcagggttcctgagtctccacaggcccagggcacctgttcttggtccagcaataaatgctcagatggatggcgaggacttgggtcaccacaggatccactatgggaggctcctgggaaatatcaccatcacgacattcattctttcaggcagtaagcatagccaggtccca

SEQ ID NO: 12908 - DNA, 589 bp, Homo sapiens
  MAP TO AC018390.3; EXPRESSED IN BONE MARROW, SIGNAL =   1; EXPRESSED IN ADULT LIVER, SIGNAL = 1.2; EXPRESSED IN FETAL LIVER, SIGNAL = 0.87; EXPRESSED IN BRAIN, SIGNAL = 0.95; EXPRESSED IN LUNG, SIGNAL = 0.98; EXPRESSED IN PLACENTA, SIGNAL = 1.1
tcaacagaatcaccagatcccaaaaggattcttcttagctcccatttcatagctgtaggtcaattccttttcattgtaattgaaatcaattaccatgctcagtacagtgactgacatctttctcaggcttctgttatttctttttatttttaagggttcaaatgaaggagatatttcactaaaattattattattttctctagaagaaactttcttccattgggtactgggatttccaaacctatcaattccaagttcatagggataggaactctgttgataaaatccagacggatcagcctccaggtcagaaagtagagtagggaaaaaatgcagaattgatctaaatataaaactaaaagtatctggttaaagtcatgttatacatattgttttataatctgttttttatacttatatatttgtcaataactattcatcaaaggcgatatttcaattgctaaaaggtattccatgacatgaatatgccacaatgtattcaattagtaaatatttaatctctttatttcctgttagttttctgctgttgaaaaatttgtgtggaaatctgcacaacgaattatttgca

SEQ ID NO: 12909 - DNA, 518 bp, Homo sapiens
  MAP TO AC016326.4; EXPRESSED IN BRAIN, SIGNAL = 0.47
tgaccatgggtaagtgacaccttagaaagtgagagtagaaataaagggggtactacttagaaaacttaagagaaatgatacttattgcttgaatagatatagatgtaaattttttatttagatttttttattcaaaatttcttaattacacttccgatacccagttaattccatgtctacacttaaatctaagacgtttgtgaattagcaaatagtataatctctacacagtcaatggaaagtgaaattacagaaaaaaaaattagtgattaacagctgtccaactgtgaagctacacaataaaaccatcaacacatatcacttaccttttcaagtaagtagccaatgactaaaaagccttttccacccagcatctgttcttgcatggctactgaacttttaagtagttcaaccaggaatgccaacagagtagcactgcatgtaaagtacagacatcattatgtaatcatcacatgtttattataaacagtgtcccacttcagtattttattatgcca

SEQ ID NO: 12910 - DNA, 523 bp, Homo sapiens
  MAP TO AL133226.16; EXPRESSED IN PLACENTA, SIGNAL = 0.46; EXPRESSED IN ADULT LIVER, SIGNAL = 0.76; EXPRESSED IN FETAL LIVER, SIGNAL = 0.5; EXPRESSED IN BRAIN, SIGNAL = 0.65; EXPRESSED IN BONE MARROW, SIGNAL = 0.56
gggtgaaagggaagaaaaggaggaaacagggactctcacaaggccagagtccctgctagaacacttcctgactgcagcttgaatcccaggttccacccaggaaaaggagggcccaggatcctccttgctccaaagggtgagaacttcctgaggctccacctcagtgggcaggctggttggagcttctccagggatgccctccctgctggctgtctcagtagtttcacacaattagcgaaaggaaactgttgaaatagctccataagataggggctagtaagactctgaaaaaccacggtgtggaccaagctgactaagactgactgaacccaacatggtgctgggtttctcctaggaccttattatgcactaattaacatattaaatcacatacttactagtgccatgacagttccaggaataccaatatttggtgtaaacatgcgtggcaccacagttctgggaaatcttccccttttccagaaatcttaatgagtattacaccccttggttaaagaaaccc

SEQ ID NO: 12911 - DNA, 538 bp, Homo sapiens
  MAP TO AL137228.2; EXPRESSED IN LUNG, SIGNAL = 1.4; EXPRESSED IN ADULT LIVER, SIGNAL = 1.4; EXPRESSED IN FETAL LIVER, SIGNAL = 1.5; EXPRESSED IN PLACENTA, SIGNAL =   1; EXPRESSED IN BRAIN, SIGNAL = 2.4; EXPRESSED IN BONE MARROW, SIGNAL = 1.7
attattgatggcagttccgccaggcctaatcgccactcagcagcaaaggcaggctatgctacagtatcttccacatctgtcattgaggtaaccgctctgcccccctccactacctctcagcaagccaaactagttgccttaactcaagccctcactcttgcaaaaggactatgtatcaatatttatagtgactctaaatatgcctttcatattctgcaccaccatgctgttatacaggctgaaagaggtttcctcactacgcaagggtcctccatcattaatgcctctttaataaaagctctgctcaaggctactttacttccaaaggaagctggagtcattcactgcaaaggccatcaaaaggcgtcagatcacattgctataggcatcgaatacggtcataaggcggctagccaaacaggtagctttgccccctatgtacgtgccagccagtttatatcgttcacttcagtcacttccacctacccccccgcccccccgctgaaacttatacctatcgatctcttcccacacaagg

SEQ ID NO: 12912 - DNA, 554 bp, Homo sapiens
  MAP TO AC018537.3; EXPRESSED IN ADULT LIVER, SIGNAL = 0.55; EXPRESSED IN FETAL LIVER, SIGNAL = 0.5; EXPRESSED IN BRAIN, SIGNAL = 0.45; EXPRESSED IN BONE MARROW, SIGNAL = 0.43
ttgtttgatgacccatgctcatcagtttccaaccatgatgtaattctcatagtactgccacagaagcaaaccctcctgattctgacagaagctctgtctggcttccaaatgtggttgcatcactgcttcaatgtgccagctgccatgttgcaccatgtggtatccctggctgtctgaatcagatttggacttgctgtgccttttgaatacagtgacatagcctgcccatggagcctgatgagatctctccaaatctaaccctaaccttcccagtctaaccaaactcaatttgccatattcataacatctcttgactctttcaacacaaatcacccttttattgttttcatgtgggtagatactgggtttattatgtattattatgtatgtattatagtattaagtgggttacatataattgaataattttctagctaattattttttattttcttttctctttttaaatgggcaaaactaggaaaaattaaagcagaataatgaaagataccacagctctcattaaattttaatgtgctgttttcttgcagcaa

SEQ ID NO: 12913 - DNA, 578 bp, Homo sapiens
  MAP TO AC011207.3; EXPRESSED IN BRAIN, SIGNAL = 1.2; EXPRESSED IN BONE MARROW, SIGNAL = 0.58; EXPRESSED IN PLACENTA, SIGNAL = 0.65; EXPRESSED IN ADULT LIVER, SIGNAL = 0.69; EXPRESSED IN FETAL LIVER, SIGNAL = 0.55
tgcaatcagtatcaggcaggttaggagataatacaggaatattttcttttcacactgatggtaagtaaatgtccaagggtttggtccacatatgccatttaagatttattagaaatgaaaatgtttcttctcattatttttattgcaacctatgctgagcattttatcctgaatcataactttgccaaagaataacttgataaaagcaggcacctttaactaatttaatctaataacatttcaaacatttattccaaatgcttaaacacaaggtctttcagtagtgtactgatgaaagtgggttaagtgggacacatgttctgttgctacatggtgttgcctttgttttctcaagttgaattgctcacaaagtgcagatagagaaatactcctttgcctacctgacgtagagggagcgtttctgattggttcgcagggatccggacccggagctcatgctgtggttcatcatctgctctcgtaggtcatggattttggcctcaaatcgagcgtaatctgggaatgaaaacaaaggtagcaaattttgctctgtgccctcaagagttggaaatgctgca

SEQ ID NO: 12914 - DNA, 501 bp, Homo sapiens
  MAP TO AL162261.1; EXPRESSED IN HELA, SIGNAL = 2.2; EXPRESSED IN LUNG, SIGNAL = 1.2; EXPRESSED IN FETAL LIVER, SIGNAL = 1.2; EXPRESSED IN BONE MARROW, SIGNAL = 1.2; EXPRESSED IN PLACENTA, SIGNAL = 1.3; EXPRESSED IN ADULT LIVER, SIGNAL = 1.6; EXPRESSED IN BRAIN, SIGNAL = 1.1
agtgcaatgcttgtcagcaggctttgtggtcgtgtagtggttaatacttgtagttgtggttgccacaacctgggttctaatctgagtcacagtagtgttttctaacctgcaactgtggctaatagacctgtcgtttgctttgcctttaatcctagcagcctccagagagcagagtaaacctctggccccgaagggcgccagcttctggagtttagcccacagcgcagaaactagggggcggcctggccgataggaaaacttggacatgctctttgtctcacaattgagcaggaaaaattcccgtaggtgaagatgccgcctctcaagggccctttgtctgtagcttccactgatgaaataatgcggttatagtcttttctggtagagaaaacggctgtatcagtggaattttttaaaaacacaaaacgagaacgagtttttaatgagctgacaataaaatctaaactagttgtcatggtctgcacaggcttacctccattc

SEQ ID NO: 12915 - DNA, 577 bp, Homo sapiens
  MAP TO AC025740.1; EXPRESSED IN PLACENTA, SIGNAL = 0.78; EXPRESSED IN FETAL LIVER, SIGNAL = 0.78; EXPRESSED IN BRAIN, SIGNAL = 0.77; EXPRESSED IN BONE MARROW, SIGNAL = 0.74; EXPRESSED IN LUNG, SIGNAL = 1.2; EXPRESSED IN ADULT LIVER, SIGNAL = 1.1
gctcaggctttgcttgtaccaggagagggcagattctggtagtgtaagccttttatagtatttctgtcctcttactgtagtttctgtgaaaaactggtgaaattgtaagaaaggatactggatacttaaccttctcacttatggtttctttgcaggaggagagggcagtgagagataggaatctcctccaggttcatgaccataatcagcccatcccgtggaaagtgcagtttaacttgggcaatagcagtcgtccgagcaatcagtgccgcaactccattcaagggaagcacctcatcacggatgaactcggtgaggctggcttcccttcctctccaggcggtcaggagcgtaggctggttgggccattcatagggtttttgtttgaatagggattcctctgcaacacattttctctcctcgctcatctccaacattccccaggtttttgtcttctataccctactcatcattcaaggttcccttcaacatcagagaagcttgttttgataactctaactcttaaaagttctttctgcctacaacttacaacatgagcactgtgtcacgcatcagt

SEQ ID NO: 12916 - DNA, 559 bp, Homo sapiens
  MAP TO AC012433.5; EXPRESSED IN LUNG, SIGNAL = 0.83; EXPRESSED IN PLACENTA, SIGNAL = 0.8; EXPRESSED IN BONE MARROW, SIGNAL = 0.54; EXPRESSED IN ADULT LIVER, SIGNAL = 0.62; EXPRESSED IN BRAIN, SIGNAL = 0.62
cacattggaggacagggaacatcctcaggggtcagctttggatgaatgtgtatagtagcaaattagcgacattcatatcaaagatcatagaaatgcaattgatgaaaactctaagccagtggttcacagcccaaactgcacattagaaccacagggctagctttttaaaatgccagtccagctggcccgtggaccacatccatgaccaattaaatcagaacctctggggctgacacccaagcatctttattatttttaaagcatcctaagtgatcctgtagattgagaacctaaaaacaccaggcagaaacttagcgtaatttagcattataacacaatttcttttttacataggaaaatgacctttccaacacagaatcaaatgatggacaagaaacatttatacaggaaccaaacaaagccatttccttcagttatgcaaggctgtgggtatcatcagctccttgaataggagagtccggagttaacgctactgatatttgtagtttgtaatcaatattcacagtttatgttgactagcattttgtgtgcaggtcag

SEQ ID NO: 12917 - DNA, 570 bp, Homo sapiens
  MAP TO AC011159.3; EXPRESSED IN PLACENTA, SIGNAL = 1.6; EXPRESSED IN ADULT LIVER, SIGNAL = 1.3; EXPRESSED IN FETAL LIVER, SIGNAL = 0.77; EXPRESSED IN BONE MARROW, SIGNAL = 0.97; EXPRESSED IN LUNG, SIGNAL = 1.5; EXPRESSED IN BRAIN, SIGNAL = 1.6
tgcagaaataagggactgggggttctttccccctagaaaagtgggacttgccactaagggtgaaagagaaggggttgaggggtacttgcccctgccccaggaaagcaggacttgccgctaagggtgaaggagaaaagggttgaggggtacttgcccctgccccaggaaagcagagaaggggtagagaaaaggagagaaggggttggggtacttgccccttccccagaaaagcgggacttgctgctgagggtgaaggaccaaggtaggcatcactgcatggtctgacacctttgaaacatgggtgaataatcagagaggtgtccctgcaatgattaaacaccaagggaaggctgccttcccagtctgtgaccagcgccggagttttgggtccacggataaaatgtgtctcctttgtctctcccagaaaatgaaaggaattgaaattaagagaagggagagattgaagagtggaaaggagaaagtggttgagggacagtgagaggttggagaagagagtaagaagaggctgcttacctgatttaaaattggtgagatgttcattgggctggt

SEQ ID NO: 12918 - DNA, 564 bp, Homo sapiens
  MAP TO AC010910.6; EXPRESSED IN PLACENTA, SIGNAL = 0.7; EXPRESSED IN FETAL LIVER, SIGNAL = 0.69; EXPRESSED IN BRAIN, SIGNAL = 0.59; EXPRESSED IN BONE MARROW, SIGNAL = 0.65; EXPRESSED IN ADULT LIVER, SIGNAL = 0.81
tggatgaatctcaaagtcgctatgtagattgaaagatgccatatacaaaaagtccacattgtacaattctacttacaaaattttttaaaatgccaactaatctacagtgaaagaaaactaatcagtggttgcttgtccataatgttcactgctgatggtccagtgcctcccaaaagccttacacataacaggaatgacaatgatgatgatgatgatgatgatgatagtaactatttgatatgtatttattgaatatataatgtattaagagactattaataatgaccctaactcctaaagtggtattatggtggaggccctttataaatctcaacaccagagaccaataattaaggggtatgtagtggggagtaggcaagtgatatgagagcattggtttaaaaaaaatgtattgagaaatgtggaagcaattaatcagtcgtgtgtggatgggatgaagacagtcttatgtaactggggacttcgactaattcttcagtgagttactggatttaagaaaataatacctaaggggatagggcctgaggcccattcatgtaggtg

SEQ ID NO: 12919 - DNA, 577 bp, Homo sapiens
  MAP TO AC025826.1; EXPRESSED IN PLACENTA, SIGNAL = 0.71; EXPRESSED IN FETAL LIVER, SIGNAL = 0.62; EXPRESSED IN BONE MARROW, SIGNAL = 0.53; EXPRESSED IN BRAIN, SIGNAL = 0.49
aggcagaggaacaacaatgcatagaaatttaactatgtggaggcatttaaatgagctcgtattaatattttacatatttttgactaaactacagttttatatatatatatacacacacacacacacacacacaaacacacacaaagatttttttctctgactcctgaaacttgtcctaagcacatctgtgcacttcacttaaaaattccgttttaacaagaactctactgtcggttcagcaagaacaccccactcagtatctgatcaccttgaatatctgatcaggtttcttattctctacaatctctcaagtgatatctgcacacactggcctgtcttcagcaagaatcctgttgaaaatccatttagccagaatcccctttatttctgatgattcctcttagtaattttccatccactgatcctcaccctgctctttggatgtgaattcccacttgcccatgctgtgtttggagttaagcacactctctctcgcccactgcaaaatcccattagagtggttcttatatctgctgaggtggtcctgactacattttgccttaccatgctttagcca

SEQ ID NO: 12920 - DNA, 558 bp, Homo sapiens
  MAP TO AL162171.1; EXPRESSED IN PLACENTA, SIGNAL = 0.58; EXPRESSED IN ADULT LIVER, SIGNAL = 0.7; EXPRESSED IN BRAIN, SIGNAL = 0.72; EXPRESSED IN BONE MARROW, SIGNAL = 0.46
tgcatgagctaatgactgccttgctactagattagctcaaagcaaaaagttctctgaaagcaggtcaatagggtcatttttatattatgaagaagaaaagcagctgttgtattacattcactgtattggtcctgcttgtgtttcagggcaagatccttgttgggacaaggaatgctgaaataatcgaagttggagagaaaaatgcagcttgtaatattttagttaacggtcatgtggatgggccaatctggggactagcaacacatccttccagggattttttcctttctgctgcagaagatgggacagttagactttgggatattgctgataaagtaagtacagataatttttttaaaagaggttacaacttctaaaaagaaaagttggaagttctaaattgctagtacttaaagaactgccagaattctgttgagcattttgaggggaaactggtataatttagaagtacttcacttaatgtttcctatgactctttttttttttttttttaaatgcagaagatgttaaacaaagtgaatttgggacatgctgctc

SEQ ID NO: 12921 - DNA, 510 bp, Homo sapiens
  MAP TO AC009415.2; EXPRESSED IN BONE MARROW, SIGNAL = 0.5; EXPRESSED IN PLACENTA, SIGNAL = 0.62; EXPRESSED IN ADULT LIVER, SIGNAL = 0.68; EXPRESSED IN FETAL LIVER, SIGNAL = 0.51; EXPRESSED IN BRAIN, SIGNAL = 0.45
acacaaaaagcagccaactgaacacgagaagtccatatctatggctcacaaaaaggatttggattagaataatagaaaaaggtggagagtgggaattattttttaaggcaaattccattaaattttatactagaagtaaaagtttaatatgtgaaaaataataagagttatgaacaagtacttaacaggaaagtaattctttcatcagctttaaaataaataagcactttcttttcctcaatctctttatcctcattgttcagaaaccctttcttgtcataatcatcctttaaattacagaaaataaaaatcaatcatcgtttcttcttactttcttataaaaataccactatatagctgttttttttttacaattacccataaaatgatgaaaggagaatttttaaactacaaattgttacaaagtttagagacaataacaaatacccattaaaggttgttatactttagatcaagttaaattatcaatccaaattagcccaaaccatg

SEQ ID NO: 12922 - DNA, 595 bp, Homo sapiens
  MAP TO AC021804.3; EXPRESSED IN LUNG, SIGNAL = 0.89; EXPRESSED IN PLACENTA, SIGNAL = 0.99; EXPRESSED IN ADULT LIVER, SIGNAL = 0.9; EXPRESSED IN BRAIN, SIGNAL = 0.92; EXPRESSED IN BONE MARROW, SIGNAL = 0.88; EXPRESSED IN FETAL LIVER, SIGNAL = 0.75
atgaggtcaagtgggcagtccagttggggagccatctgcttctctttcttcagtgaggagaataagagaacatctccctccagggttgtcaacctggcacttcccatctgagcagtgaatctgcagaagagaccatcacttgctctttctctgccattactcatgaagttacaatggactcacaagagggacagtcgggttcagagaaatccagtaactgttgttcctgggaatctggatcaccatcttttttacgttctccaaatttataatctatcaggtccagctctttctgttggaggtaggccatttgctcttcatatttctgctcctctcctagtctctggaggttcctcagggtttttggcaggctgtgccgtccatgccagccatactgattcttagccacccggctgaccagatgcagcgactccagcacatttacaatgtcatagatgcgtctcctttccacacctgtttgaaaaacagaggctgatggacatcatgcagacaaacatttttgaagagaagttccttgagggcctggactatatctgtgaactactttgtctgatccccaatataatgcccactg

SEQ ID NO: 12923 - DNA, 599 bp, Homo sapiens
  MAP TO AC023134.3; EXPRESSED IN PLACENTA, SIGNAL = 0.69; EXPRESSED IN ADULT LIVER, SIGNAL = 1.1; EXPRESSED IN FETAL LIVER, SIGNAL = 0.75; EXPRESSED IN BRAIN, SIGNAL = 0.81; EXPRESSED IN BONE MARROW, SIGNAL = 0.68
cctttcaggatttaagcccctctttcacaatgctttgtgttatttaacattcattgaatggtaccagtgtattgaaccccactcccctcaaacctccacatggactggatccagatctggtacctttgtacaaaatgctgaagccttaagaaagaaatgtgaacactgcttctaacagcatagttgcacctacagactccagaaagaggtgcaaagagaagcgaattaatgacgacagtgacagcaattactttcaaggtatacaggagcagcattctgcaggaaataaagatgtcaaagcagggttgggaatgttcaaaaaaggaagtcaattccacaagaggcttaaaaacattctctccaaatcacttctaaagaaaatgataaaaccacttctgcttatatcaaagcccaagggccaagtactagaaagagtctctcttggttgtgggcaggttaggcgtcactctgccagtagtctctcaacttccaaagactgtttgcaacatttcatttatggatgctcctttgtatgaagtggagtttgacagtttcccaggcaggctgggaatagcatcggcggattacacagtcagcaa

SEQ ID NO: 12924 - DNA, 504 bp, Homo sapiens
  MAP TO AC020719.3; EXPRESSED IN LUNG, SIGNAL = 1.3; EXPRESSED IN PLACENTA, SIGNAL = 1.2; EXPRESSED IN ADULT LIVER, SIGNAL = 1.2; EXPRESSED IN FETAL LIVER, SIGNAL = 0.86; EXPRESSED IN BRAIN, SIGNAL = 0.89; EXPRESSED IN BONE MARROW, SIGNAL = 0.91
ttacaggagccaaaacctggaagtaaaccaagtatccatcaacagaagagaagatgaatacactatggcatatttatgcagtggaatattatacagaagatggatgaactgtagtaacacagaaatgtggatcaatcttggaaatatatttaaaaagtaaatcccaagcaattacataccttattatgctcaaaaataaacttttaagattctaaataaatgcaataaaactatgtaaaatcagaaaaaggaattgatgaacaaggaattttaggtgatggtcatctcatgtcagagatgcagggtgatgacaagatggagtggatcctggaacctggggttcagatgaagatcattgcaggtttccaggttgtgtttcatgaagtggatttatagatgattactacactgtaaaaaaataaaaatagccatgaatagatcaatgttaggaggattttatgaatcacatttatgattagtgtaggtgtttgcactcaggcttga

SEQ ID NO: 12925 - DNA, 591 bp, Homo sapiens
  MAP TO AC022050.2; EXPRESSED IN PLACENTA, SIGNAL = 0.88; EXPRESSED IN FETAL LIVER, SIGNAL = 0.77; EXPRESSED IN BONE MARROW, SIGNAL = 0.89; EXPRESSED IN ADULT LIVER, SIGNAL = 1.1; EXPRESSED IN BRAIN, SIGNAL = 0.79; EXPRESSED IN LUNG, SIGNAL = 1.1
tttgatttctaacaacatgggctagatattttactttctctagatctacttcaaatatttctaagctatcttcagtggaatactcattcttgtatttcacaaaagaaggatcaatatccaaataaattttgtatatcatatctccctattgaaaattagaatgtaatattagctttagagattttaagaaatcctaaaaaaacacacacacacataaaagactttgcttatataaataatatagttattttaccatggactttattttatccttaacattcatatgaatttttgttcagaagcaacatagaaacacttcaggaaatatcaaaaacaatgtgtgataaaatctaactcaagagtgctgagctgttagattatttatctaatgtctgagtttagctttagaaatgtactagtttagagaattcatggtcaaattatcttttttgagatagggtctcattctgtcagcctggctggagtcccatggtgcaatcatagctaactgtaccctcgaactcctgggctcaagcctcccaaatcatggggatgacaggcatgagcctctgcacccagcggaaatatcta

SEQ ID NO: 12926 - DNA, 576 bp, Homo sapiens
  MAP TO AC021385.3; EXPRESSED IN PLACENTA, SIGNAL = 0.65; EXPRESSED IN FETAL LIVER, SIGNAL = 0.48; EXPRESSED IN BONE MARROW, SIGNAL = 0.74; EXPRESSED IN ADULT LIVER, SIGNAL = 0.8; EXPRESSED IN BRAIN, SIGNAL = 0.62
gagttgtcagggcttcaaccttgacctttcctttttgcctttctgacctttttgctgcttttgatatgggtcatgtgattctgcttgtttctttctagactgtatatatttaaacttcatctcttgctttttttaaatttcagaatccctttaaattctttcttctcatctgtcatcctgtgaccatttccagggctccattctgcaatgcctattcttcagctaacaagcacagcatatttcacagacgctgccagctgcacagcttctatttctcttccgtatccagctccatgcaggtgactgagatcttcctctgctcatctctcatggagaccacattctttattgttgagtagcatattccttttgatttcttctcaggtagcagatttaagagcatattcaaactttccttattttcttctgtcaaattccttttcagcattttgaaacttttctcttttcaaaatctcttgcaaattacaagcaagagttcttcaaggttttacctaagagaacaaacttcatagactgacaggcctgattctgaactctgtgccatcactttggatg

SEQ ID NO: 12927 - DNA, 541 bp, Homo sapiens
  MAP TO AC021288.3; EXPRESSED IN PLACENTA, SIGNAL = 0.8; EXPRESSED IN ADULT LIVER, SIGNAL = 0.85; EXPRESSED IN FETAL LIVER, SIGNAL = 0.72; EXPRESSED IN BONE MARROW, SIGNAL = 0.78; EXPRESSED IN BRAIN, SIGNAL = 0.69
ccacaacagcacatccaaagatattttaacaattgtttcctgaaaagtttgtgatttatttagtacatactggaatccataaaatttaaaattctttcacagtataataattcattttttttttggtctcttatatcctcttctgccctcagcctccagatgttttaaaacatatgaaatgggatcgcagccacttttttggtgaggtctgtgaccaggatgacactaatgacatctaccgacactaatgacaatatcactaatggtaatactgagaatactttcatttgtttactgtatgccaagccttgtgctaagtaattttatgtatattattgtattcatttttcccagtaaccttatgataatcctacagtcactgcccttgtccaggagaagaaacagagattcagaagagtaaaagattctgcccaaggtcacacagttaggacatagggataaagcctgtatttggacataggctgtttgacttcagagctcagtatcactctactgtattccctccatttgcagagtgtga

SEQ ID NO: 12928 - DNA, 531 bp, Homo sapiens
  MAP TO AC023032.2; EXPRESSED IN ADULT LIVER, SIGNAL =   1; EXPRESSED IN BRAIN, SIGNAL =   1; EXPRESSED IN LUNG, SIGNAL = 0.94; EXPRESSED IN PLACENTA, SIGNAL = 1.1; EXPRESSED IN FETAL LIVER, SIGNAL = 0.83; EXPRESSED IN BONE MARROW, SIGNAL = 0.91
tgttgctatttcatctgtgatttgataatttgaaacttttttatttcttgtttaactaaagaatctctattttgatgcagaaccaacttttgattttattgatttttgtatatatttttttactgttctctattctatttatttctcctttaatcttcattttctgtcttcacattgctttggatttcgttttatcttacttttcctgtgtcttaaagttgacgtttatgttactgattttaaacttttctcatttaagtatggatatttacaggtataaatgtctctctaagttgtgtttttgctgtattttataatttttctgtgtttctttttgtttcaaatcactttaaagtatttttaatttctctcataatttcctctcttactcatgggtaatttagagatgaattgttccattacaatattttgtcaatttcttaaacttttaaaaaaaattttatagattcacgaggtacatatgcaggtttgttacatggatatcttgtatgggcttcttgtgtacccatc

SEQ ID NO: 12929 - DNA, 507 bp, Homo sapiens
  MAP TO AC016706.2; EXPRESSED IN PLACENTA, SIGNAL = 0.79; EXPRESSED IN ADULT LIVER, SIGNAL = 0.95; EXPRESSED IN FETAL LIVER, SIGNAL = 0.77; EXPRESSED IN BRAIN, SIGNAL = 0.85; EXPRESSED IN BONE MARROW, SIGNAL = 0.81; EXPRESSED IN LUNG, SIGNAL = 0.92
gcaggcactagggtaagcaccaatgaaacataggactggagtgctgctgagtcctcccaagcacaagtgccaaaagaaatattaaggatgattgcagctgagtacaaaacaggcactgggccaaacactgctaaaacgcaaaacatgttggacaagcctgaccctaataaaaaggtaggcagaacgtgacatagggctccagcacaggcctcttttaccttaagtaagcaattatgcatctggctctgaagttgcccatgataattatagaagcagaaacttgataaaggcatttgggaataggaataagaaactgaatttttaagctcccaagaggtgattataaacatatctccttgtcatgtactttagcagaagataaagtaataatagcttgaaaaatgaaggctgattgtgaagctaggatccatccactcagtagatgtattcttcccaatgaagtgtaatagttccaataaattcatttgggttgacttggggaatttt

SEQ ID NO: 12930 - DNA, 552 bp, Homo sapiens
  MAP TO AC009486.3; EXPRESSED IN LUNG, SIGNAL = 1.2; EXPRESSED IN PLACENTA, SIGNAL = 0.8; EXPRESSED IN ADULT LIVER, SIGNAL = 0.95; EXPRESSED IN FETAL LIVER, SIGNAL =   1; EXPRESSED IN BRAIN, SIGNAL = 0.97; EXPRESSED IN BONE MARROW, SIGNAL = 0.62
tgtcctttgagcaccagatgacacctttagaatagtagctatttgttttcccaaacacttgaaaattgcaatattcacttccttttgccctcctaagattccttcccctcatctggaccacagacggcaaaaaaacgtccattcaagacttttctaggaagctgttgttaggagcagtccatcacagtacccaggtctggacaggatgagacctacctctcttcgtccttaaagatgaatttccgcagcttgaggtcccgcagcaccagccccccgtcatggcagtgggccactgccgaggcaatctggtagaacagtctggctgcctcctcctctctcagcttcttgcaggtgcggacgaaggaatgcatgtccccatagcttcgctcaaagaacacataggctttggtctcacccaggataatttcagtgatttggttgatgttactatgagcagacaggcaaaagcacggtgccagggattcctggtagcagctgatatcaaacacctacgacaggattaacagtaagaccaaagtcagaggtgcctct

SEQ ID NO: 12931 - DNA, 550 bp, Homo sapiens
  MAP TO AC013611.3; EXPRESSED IN ADULT LIVER, SIGNAL = 0.58; EXPRESSED IN FETAL LIVER, SIGNAL = 0.52; EXPRESSED IN BRAIN, SIGNAL = 0.49; EXPRESSED IN BONE MARROW, SIGNAL = 0.47; EXPRESSED IN PLACENTA, SIGNAL = 0.5
ttgcttttcttttatgcccctggcctttggctagaatacttttgccccactgtcctctttgagaaccattcaccttttgagaaccagctcaaatgttccacctctccctgcaaagtcactccctcctctgtgctgtccgggaattctgtagagccctccaccattgtagggcactggcactgccactgtgtaagggtctgttggtggcatcttccctttactgggagcatctggagggcatggatgtggctgtgacttccctagtacacatggcacatgctcagaccatgggggtagaggctgggagggagctggaccagctgaccttttgacttctaggaggctgggctcctcatatgcgtagatccaaccagtatgctcaggccagaaagcttgaccttaaatgctggttctgctatgtccttgtcatgcctgaccaagtcaccaagccgttctgagcgccttggcagctccatctataaaatggggatatttcagaatgatggtgtgtagagccagagtctagcaagcgccctaacatacagcaggt

SEQ ID NO: 12932 - DNA, 538 bp, Homo sapiens
  MAP TO AC025539.2; EXPRESSED IN PLACENTA, SIGNAL = 0.63; EXPRESSED IN ADULT LIVER, SIGNAL = 0.6; EXPRESSED IN BRAIN, SIGNAL = 0.5
gtaagggccattgggaaaactcatttacaggaagctttacactttcaaaaatttccattgtatgcaatatctcaacagattctaacaagttcttacaggggtgttcatattattatctccatttgcagaagaaaaaacaaaggttccctgactcacctaaggtcaaacactctttatgtgaatcatattccagatctccagccttgtcctctttgccctggaccagcacatcccctaggtttccactccaccgtgatgtagttttcttttgaaacttctcatacactatctctgagaacatctatagcagttctttctttttcctgaaagattaataggaaaaatgtgccttcttgaagttattattgatgcaatttccataaccaggatcacaggttggtgctgtgctattttttactgaagatgtgcagttgtcttttcttcttctgcaaaattaaatggagcaaaagaaaagccgatgttctgggactcaaaagaactcactctctaaaccctgggagtccattgtccgacctgt

SEQ ID NO: 12933 - DNA, 533 bp, Homo sapiens
  MAP TO AC016851.3; EXPRESSED IN PLACENTA, SIGNAL = 0.54; EXPRESSED IN FETAL LIVER, SIGNAL = 0.59; EXPRESSED IN BONE MARROW, SIGNAL = 0.59; EXPRESSED IN ADULT LIVER, SIGNAL = 0.56; EXPRESSED IN BRAIN, SIGNAL = 0.59
tggctatgactcacctgtgcttcatgatctagttttctttcttgccatgttatatgtgtcactttttctctctcctgtctgaagccattggggcataataattattttctgctgtttatgttcagttaacaatgacagcaggaccataaatatccacttaagtatcaatgcagctgttttctcttgatgttgagaatcctgaaacagaatagtaaattgtctttcacaggtggcgaatacatcaacaccaatagtgttgatacatcaacactcaatgtgctaaatatttgttttcactccccttttattttattgaatattttattttattcatatatattttttacattgtgcccatcagaacttacctggaggacaaccttgagaacagtaaacacattccaccatttagaatcacccttctctccaatgctgacagaatgaacatgaatcaaatttgtaagattctattttttccttctggttagttacttctcaggaggctccttacatcttcttgcctgagcaagctt

SEQ ID NO: 12934 - DNA, 599 bp, Homo sapiens
  MAP TO AL161445.2; EXPRESSED IN BONE MARROW, SIGNAL = 0.6; EXPRESSED IN PLACENTA, SIGNAL = 0.63; EXPRESSED IN FETAL LIVER, SIGNAL = 0.54; EXPRESSED IN BRAIN, SIGNAL = 0.51
ccaccaccctggtaatgttcacatgtcctcaaatcaacccagagccagggccctgctggtcagggggaggctatgtaaataatcccatgagtgtgccatcctcaggccctggggtctcctaggcaagaccagggcctctgtgggctctctcggaaatgctgaggttgctggaagccagcccgtcatacagggtctgagagtttaacttcttttaaattaaaccacagttgagctcatgctgtgtgtgtataaacttttgtatcctgctttttccttaaattctttatcatcagcatcttcccatgttatttcatagtcttcatcatcatcactttccataccttcatagtagttgatcgtagaattccatcataattaacttgtcttttctctcttagaagtcccttaggtaatgtccaattttccgtgagtgtaagtaataccataatgaacatcttggagtctgaagtttattctgtgttggtttgttccacatttaggatcattttcccaggctagattttcagatgtgggattatgggttcagatatggtttacacatttttatagttcttaatacagatggccaaattgctttc

SEQ ID NO: 12935 - DNA, 535 bp, Homo sapiens
  MAP TO AC025863.2; EXPRESSED IN ADULT LIVER, SIGNAL = 1.1; EXPRESSED IN FETAL LIVER, SIGNAL = 0.99; EXPRESSED IN BRAIN, SIGNAL = 0.87; EXPRESSED IN BONE MARROW, SIGNAL = 0.86; EXPRESSED IN LUNG, SIGNAL =   1; EXPRESSED IN PLACENTA, SIGNAL = 0.89
gcccttttacttccaatccccgcccacagcctgcaagaccctccacttccctttccccttccgctcttggcttacttgtcacggatgatggtctgtagctcccgtatctgatcattcataggcagcagcttaagctgcgccccgatctgccgggagagttcgcagtcctctaggaaggagttgccagctggtgcgtcatagctgctactgtcaccactaccactgttgccctttgagttgaggctggagccgccgcaggccccagagtccagctcggccggcaggctagaatgggcgtaccccgtgaggagaatcaccttggccctggaggctctgtttccccctgcgtggtccaggatcagatcgccaggtcgcagctgctcgggacttggggttgaggcagagtttacttgctggttgtgacagggcatggagtccggacactgtaactccgtggccatacaccgggccccgggctatccccgctgctactgaacactaaagataaagaggaacgggtagaaaggacagatgc

SEQ ID NO: 12936 - DNA, 587 bp, Homo sapiens
  MAP TO AL121723.35; EXPRESSED IN ADULT LIVER, SIGNAL = 0.67; EXPRESSED IN BRAIN, SIGNAL = 0.83; EXPRESSED IN PLACENTA, SIGNAL = 1.1
actgcttttgccccagttacctacccaacaaattttatttttgatttagaaaataattaaaatagataggtgaactccaaaatttaacaatcagaaagtgacttatttgatatagtgatatcagcaagatggtggaatagggagtcttagctctcattctctcacacaaacagagatctgacaatgatataggtaacaaaatatctttatgagaagtccagaatctcattgaggattttcagaacatcagcaagatggccgaccaggagctgctagctaaagcagagcacaggagaacagcaaagaagcagcagaaatcccatagaccacagcaacccaggatgaccacaaacaaaaggtaaggaaacaccttgcctccaccacacccttccccaagttgagacccagctctgagctgtgatggaaaagttaagcaaggggaccccagcaacactcatcactattacaaacacttctgcagtcctcaaaggctctgagtcccgttgagggaagtccctagactccatatgctgagctacccccagagaaggagcccacactgtgctccaccgaactcactcctggtt

SEQ ID NO: 12937 - DNA, 569 bp, Homo sapiens
  MAP TO AL133465.28; EXPRESSED IN LUNG, SIGNAL = 0.89; EXPRESSED IN ADULT LIVER, SIGNAL = 0.78; EXPRESSED IN FETAL LIVER, SIGNAL = 0.71; EXPRESSED IN BRAIN, SIGNAL = 0.71; EXPRESSED IN PLACENTA, SIGNAL = 0.76; EXPRESSED IN BONE MARROW, SIGNAL = 0.63
tggggaacattccacttaccttttcttccatgtagatattatcttgaataatacttgttttagttacagaaactcaccttttgatatgatgtgatcactggtaatgtcagtctgaatgtggacaggacatgtcggacagcaaggctgcctggcctccctccctagcgctaggacagtgtcctcagaaacagagcgccagggcctagctgagcattcacccacgtaagtgtctaccatcagttgtcctcctttgccagaccctggtccccacctgatgaaatccgtcttacctttcccagcccccactgaactgccacctcctccctgaagcctgccctttccttacccaaatgtgactgacctcccacttctcaaccacccttgcagctgatttctacctctccagcagcccctaccacatcttgcctagtgatctgtcgacttgtatctgcagatccaggctccgcagttgctaacgctgtacttctctcagcctcattttccacatttctaaaataaaatgggaatataaagactgcctacttcaggggctttctgtggcaatcaat

SEQ ID NO: 12938 - DNA, 591 bp, Homo sapiens
  MAP TO AL133417.9; EXPRESSED IN LUNG, SIGNAL = 0.88; EXPRESSED IN PLACENTA, SIGNAL = 0.81; EXPRESSED IN ADULT LIVER, SIGNAL = 0.75; EXPRESSED IN BRAIN, SIGNAL = 0.8; EXPRESSED IN BONE MARROW, SIGNAL = 0.8; EXPRESSED IN FETAL LIVER, SIGNAL = 0.75
tctgggatcattgggaagagacctgggtccgtggctggcttgggggacggataggaaggaggtggtgggtaggccagagaggaagaggtggaggtggtggctgctgacaggaacgcagaagggtcctggtagaggtctcctgcacagccagaataaggaggaggaggcggtggcggagagtacaggtggtccaggtcaggctgggtctgggacatggtgcacacacccaggggtcctgtggccagtgggttgggggaggcagaggtgacgctggatgaggctgtggttgaagctggggaagtgaccccttgcaagatgcctgcactcacaatattgattatgccttctgggtagcagctggcaccagggtactgagggtcaatggagaacttgcccatgtaagtgaaggtctggtttctaggtgcagagacgggagcaaagctgctgggatatgggagatccaacgacctcttctctccagtcatgtcaatgttgatcatgccatctggggaggggaaaggcagaatggaggtggaacaatgaaaatacagccaggactcccttctcacccccgctcacataggtccattt

SEQ ID NO: 12939 - DNA, 549 bp, Homo sapiens
  MAP TO AC009430.2; EXPRESSED IN FETAL LIVER, SIGNAL = 0.67; EXPRESSED IN PLACENTA, SIGNAL = 0.5; EXPRESSED IN BONE MARROW, SIGNAL = 0.68; EXPRESSED IN BRAIN, SIGNAL = 0.51
cgtgtttgtggtgacattggtgtaaacaaatcagtcgtacagaaatacaacacatgcaattatatacagcacataatacttgataataaacgactatgttactggtttatacatttactatactataccatttatcattatttctacttattaaaaaaaagagttaactgtaaaacagactcaggcgggcccttcaggaggtattccagaagaaggtgttattatcacaggagatgacagctccatgcatgttattgcccctgaggaccttccagtgggacaagatgtcggggtgaaagacagtgatcctgatgatcctgaccctgtgaaaacctaggataatgtgtgtgcctatgtctcagttttaaaaaaatgtaaaaaattaaaaataaaaaagctcatagaataagaatataaagaaagaacatacagtagtttgatttttaattttttgaggaatttttatactgttctccatcttggttgtacaaaaaaaaattgaactcatagagagtaggatgatgtttatcaaaggctgggaaggtagtg

SEQ ID NO: 12940 - DNA, 600 bp, Homo sapiens
  MAP TO AC007458.13; EXPRESSED IN PLACENTA, SIGNAL = 0.65; EXPRESSED IN BONE MARROW, SIGNAL = 0.55; EXPRESSED IN ADULT LIVER, SIGNAL = 0.62; EXPRESSED IN BRAIN, SIGNAL = 0.55
caccctttggtgtgagacagattcttacatgctgacttctaaacaggtttctaggatcaaatgcacagtatttgttgtgtatacttacacagtggctcaatttctgcctaaggctatgaaagtcctccacaaagcgtattttcttgcagccttgcaattgcagttgaccaaaaacgtcttccatgaagaaggacagaagctgttcttgaaattgacagtttttctaaaaataagatacaagaaattgcatatggtaaattatgaatcgttttttaatgtcccccgatcattacttaattactctctgaaaaaaatttaaatgcagggggaaataaacatcaaataagtggaaatgtaaaaaagaagaagactttctgacttaccataaactgcttttttgttttcttttttaataatcgtatattttttatgcggtcttcctacaataatacaaagagaaataagttgtatccaagattgtaaatgtccttgaggtcatgattttaagcagagcctaatacttactggaatcgttgctttgagccatgctgctttgatatagagagcgtcaacagcttgggacaatgttccccttgggta

SEQ ID NO: 12941 - DNA, 537 bp, Homo sapiens
  MAP TO AL162171.1; EXPRESSED IN PLACENTA, SIGNAL = 0.81; EXPRESSED IN ADULT LIVER, SIGNAL = 0.91; EXPRESSED IN BRAIN, SIGNAL = 0.85; EXPRESSED IN BONE MARROW, SIGNAL = 0.72; EXPRESSED IN FETAL LIVER, SIGNAL = 0.71
cattggcctctcttctaagcctttgttttttgaactatgtattttacatatttgtttgatgctgttgattagcttggttcttgtaataacctagataattttgttgtatcttgtcaggtgccaaaattgccagcagagctggtcacaatcaacgtatttttgtggcagaattccgaccagattcagatacccagtttgtctcagtgggagtaaaacatgtgaagttctggaccctggcaggaagagctcttcttagcaaaaaagggctactgagcacactggaagatgcccggatgcagaccatgctcgctattgcatttggtgcagtatgtctcttaaaatgcacatagtgtgactttgactactttacattctcttgccttagatcatcagccacatgaatgttgttgagatgatactgtgatctgctaatcattacatgccctggtcaagcatatatttcatctttcaaaaatctagttctttcagaaattagggagtgaaaagaatgttaatgagagggggaaaaggattttt

SEQ ID NO: 12942 - DNA, 559 bp, Homo sapiens
  MAP TO AC009487.3; EXPRESSED IN PLACENTA, SIGNAL = 0.48; EXPRESSED IN ADULT LIVER, SIGNAL = 0.66; EXPRESSED IN FETAL LIVER, SIGNAL = 0.79; EXPRESSED IN BRAIN, SIGNAL = 0.68; EXPRESSED IN BONE MARROW, SIGNAL = 0.98
tcaacactttcctgattttctacagatcttttaattgttctaggagtcctttttgtaacagatgaaaccttaacttcttttttagtagtttcttcaactgctggttccaacagctgagatgattttaatctttttgattccctacctgtagtgatctgtaattcttgttccacagaactggtgttttctagtatgtcctgattaacttctttctttctccttcctctcctaggcgtaacagaattttgaggtatttgctggttctgagatagtcctctgacatcagaatagatgttttcagaagcttcagaaatttcttttgccttcctagttttcttcttgactgactgccctggcatcttaggagtagcaacatctgctgatgcttcctgttgtgctgatttgacattcacgttttggatacgttgacctctcgtacgagttttggaggaaaccacgtcatcaacctggctgacattcatagtcattgtgcttgtttcctgagcagtcttaaatgcagatttgactaatttagtgggacacattatgttttggctca

SEQ ID NO: 12943 - DNA, 568 bp, Homo sapiens
  MAP TO AC025539.2; EXPRESSED IN LUNG, SIGNAL = 0.91; EXPRESSED IN BONE MARROW, SIGNAL = 0.85; EXPRESSED IN ADULT LIVER, SIGNAL = 0.92; EXPRESSED IN BRAIN, SIGNAL = 0.8; EXPRESSED IN PLACENTA, SIGNAL = 0.82; EXPRESSED IN FETAL LIVER, SIGNAL = 0.76
tgaatgtttttgtcctccccaaattcataggttgagaccctaaccctcagtgtgatggtatttggaggtgggggctttagatgatcggatttccataaggttgtaagggtggggctccattctgacaagattggtgtccttataagaagaggaagataaaacagagctcactctgtctctctctctcattctctccaccatgtgaaggcacaggcaaaatgtggccctctgcgagcaaggaatggggtttcatgaagaaccacttctgctgacaccttgatcttgaacttccagcctccagagctgtgagaaataaatatctattgtttaaaccatccattgcaaggtatttgatgatagcagccctagctgactagtacatggtcctcagaataattagtaaagcaaaactgtttggctgggacttcctccactgtgtgtatttccaggggcagcactcagatgcttccaggtttaggcaagtgacatctatgtatgaagccagctggctgatgggagacggtggcaatcagctgtgtgtgtagtttggctaaagaagcaggtgctg

SEQ ID NO: 12944 - DNA, 565 bp, Homo sapiens
  MAP TO AC007989.2; EXPRESSED IN LUNG, SIGNAL = 1.9; EXPRESSED IN PLACENTA, SIGNAL = 1.1; EXPRESSED IN FETAL LIVER, SIGNAL = 0.69; EXPRESSED IN BRAIN, SIGNAL = 0.57; EXPRESSED IN ADULT LIVER, SIGNAL = 1.1; EXPRESSED IN BONE MARROW, SIGNAL = 1.1
aagcaatgcaagaaaccctggctagagttagccttgatcttctctgaaatgaaaataaaattcagccccttccccaacagctcattgttggagcccccataccctcacctctttcatgtcctggggttgacttcctgcttgtccccacctctctccaggaagggtcccttttaccccaactctagaaattctagcctcagaagaggccaatgtgctatcctcattgggctcctagaggaagaccaaattaaacactgctattctcttctcttctgcttaacacggaaaaagtcaacttaggtcattccctgacagagagatacaaagataaggcattgtccctgtcaccaagatataagcaacagcacaggatactgtgtggtgaaagacaaaataagcagtagagataagatttctgaggactggagggaggatatgaggagtgagggatgagccacgggaggccactgtcaccagccacagtggcctggaccaggcagaagagtcttatggttgagtatgtgccataacagctgtagggaggacattctgggtaggagggtga

SEQ ID NO: 12945 - DNA, 600 bp, Homo sapiens
  MAP TO AL121883.13; EXPRESSED IN ADULT LIVER, SIGNAL = 0.91; EXPRESSED IN LUNG, SIGNAL = 0.89; EXPRESSED IN PLACENTA, SIGNAL = 0.88; EXPRESSED IN FETAL LIVER, SIGNAL = 0.67; EXPRESSED IN BRAIN, SIGNAL = 0.61; EXPRESSED IN BONE MARROW, SIGNAL = 0.69
tctccccctctcttattcccatttttatagcattattattattttaatttaatcatgcagtccacagatatttcttgagcaccattgtgtgccattgaaatttggtagtgagcagggcagaggtagcctttattaagcttgttttcctgtgaaagaagcaggcaataaaaataaaacacataaagtagctaaacttaactttaactaatatacacataactttattttatttcataaacttccactagtatttctttactttgcactttgtaaaatgaggatatccattccactattctttcttctgccttttatcatcttctatatcccacattctgtcagctacactgaatcacatgtctacttaaaatctcatccccacaggtgatatgtgaatcattttctaaaactatgcaagatgggttcaagcgctaggacactacttggctcagcaatgggcagcatttatgtagtcataataaactaaacacacttcatggttttcaatgtctagagttgaaagcagaaagctttaatgggagaaagacctggctgttacagaacagaatataaaagtaaactggaacttagctgcatgca

SEQ ID NO: 12946 - DNA, 592 bp, Homo sapiens
  MAP TO AL158049.2; EXPRESSED IN PLACENTA, SIGNAL = 0.67; EXPRESSED IN FETAL LIVER, SIGNAL = 0.56; EXPRESSED IN BRAIN, SIGNAL = 0.54; EXPRESSED IN BONE MARROW, SIGNAL = 0.5; EXPRESSED IN ADULT LIVER, SIGNAL = 0.64
tgagaccccaaaagaacctggtgtctgctgggcagggccggggcacgaacctgtaggaagatgtcacccccattgccgcagccatggtcatcttgccaagggtcagtgtgagagcaagcccagaccagcccaccaaatgcagactcccggggccctgccaggctctgagtgaggacctcaggtctggaggagaggggagcagtaggatcagacccctcttcactgaagacccactaacaccacatgcagatatgaccccattatccccttccctccttttccctccctgtcagaagataaggagggagggggcaggtggctcactcctcactctttgctgtccctggagggcttccaggaggcagagtcaatccagctgcaaggtctggaggaggaggaggagtgagttcatgttggggccacagggcctggtggggaaataagaaccagccagagagggacaagcagatggtgggtgtgggatggcagtgccgtccacagcacagctggcaaggcctgggccctggattccaattccaagttcagtggcttcctgacttcatggctgggtggccttagacgacacgctttc

SEQ ID NO: 12947 - DNA, 560 bp, Homo sapiens
  MAP TO AL121777.16; EXPRESSED IN PLACENTA, SIGNAL = 0.52; EXPRESSED IN FETAL LIVER, SIGNAL = 0.56; EXPRESSED IN BONE MARROW, SIGNAL = 0.51; EXPRESSED IN BRAIN, SIGNAL = 0.52
agaggtcagatcacatcgggcccgtaggccaaggcggaggaagaaacaggcaacataggactcaaggaccacacctgctcccaggcaaagggagtttgctgtgggtgcccctctctgtctgtgtgtccagtgtgtggatattctttataccttgcccatattgtacaaatacttttttctattcaatatttagaagacattgcattaaatagcaagatggcagatgaacatcaggaaggaacattagggacatccacagtgttccatccaggaaccttcaccgtggaaacccttgtgctcatgggcgtggtctcaacacacagtcagctgttggggatcagaggccgcactcaccggagcagtgaggcagaactaactgggagagggtccttctgtgacacctactgcatcaccgggctgtgtgaagtgactcagctgccagaactcacacaatatcattctacaccaaaacctcatgggaaaaatggtaagttctcagtttctccattaatagcaactctcagattaatcgctgtcctccatcgcttctccatgaaaca

SEQ ID NO: 12948 - DNA, 580 bp, Homo sapiens
  MAP TO AC008521.5; EXPRESSED IN ADULT LIVER, SIGNAL = 0.64; EXPRESSED IN PLACENTA, SIGNAL = 0.91; EXPRESSED IN FETAL LIVER, SIGNAL = 0.78; EXPRESSED IN BRAIN, SIGNAL = 0.67; EXPRESSED IN BONE MARROW, SIGNAL = 0.68
catgccagcaccacagatacccaggtctgttcagcttcataaaatggagttggtgttagcatcctttgtgccagaaagtgatttagtcatttataacagcaccaatgaaagtttgctaattgttctgtgtggcattaatcactgcgttttcaattagtattttgtgggtttactttgcatccttcagtgactcaccttaattccactttaaacggaaatagggtgaagatgatgactacttgcctgataatgtgacctttgcacccaaagatgtcacacctgtggatttcacacctaaagataatgtgcatggtctagcttacaagggcctggatccccaccaggcactgtttggaacttcgggagaacattttaatcttttcagtggtggttctgagagagctggcgatcttggagaaattggactgaataaaggaagaaaattgggaatttcaggccaggtaaaattattttctattttataaagggggagtcattgataaatgagtctactttctttctttcttctttttagaggttctttattttctttttttttccccctaatcctcaagtggaa

SEQ ID NO: 12949 - DNA, 556 bp, Homo sapiens
  MAP TO AC011440.5; EXPRESSED IN ADULT LIVER, SIGNAL = 0.6; EXPRESSED IN BRAIN, SIGNAL =   1; EXPRESSED IN PLACENTA, SIGNAL = 0.55; EXPRESSED IN FETAL LIVER, SIGNAL = 0.57; EXPRESSED IN BONE MARROW, SIGNAL = 0.56
gggtgctgtgataaatgatggtaacttttctgtttgtacctcatttacaattttcacaggtacaatggtgggagaccatacccgtttggagttccacaacattgaaacgggaatcatgactgagaaacgctacatctccgttgtcccctccagctttattggccatctgcagagcctcatgtttaatggccttctctacattgacttgtgcaaaaatggtgacattgattattgtgagctgaaggctcgttttggactgaggaacatcatcgctgaccctgtcacctttaagaccaagagcagctacctgagccttgccactcttcaggcttacacctccatgcacctcttcttccagttcaagaccacctcaccagatggcttcattctcttcaatagtggtgatggcaatgacttcattgcagtcgagcttgtcaaggggtaagtagaagggatcacgacttatgttggacacctttaatctactgaagctctacgtaaaatatggacataaaaataacttgtctattctactccctaccctccattcctgaca

SEQ ID NO: 12950 - DNA, 515 bp, Homo sapiens
  MAP TO AL122006.5; EXPRESSED IN ADULT LIVER, SIGNAL = 0.68; EXPRESSED IN BRAIN, SIGNAL = 0.63; EXPRESSED IN BONE MARROW, SIGNAL = 0.6; EXPRESSED IN PLACENTA, SIGNAL = 0.61; EXPRESSED IN FETAL LIVER, SIGNAL = 0.62
gttgggtttccatcatttgcaatccaaacaggtcaggctaagaaatctgttatttcagatattcttagaaaggctaataatgaggaaatgtgccatccagcaatattccacgagattaattttctaggaagaattcatggaagattattataaggatgcggctttcatattatgggaaaagagggcagttgttctaaaagttctgcctcatcaaattatttaaacactcagatgttccatcccatatgcttagcagacaatctgaggtaggtaagggaaaactaagcacatagatttttagtgtgagtttttaactgttggtgactggtgctatattttatagatatagttgattgctgaacagagactgctgttaccattgttgcttctattatggctctagcagctagacatgttgttgcttttgccaaagaatacagcaacaaaattaaacaaaacaaagagcttctcctttcttttgcagatggcagtgtgggtggtcgtaaggacccata

SEQ ID NO: 12951 - DNA, 513 bp, Homo sapiens
  MAP TO AL109976.21; EXPRESSED IN PLACENTA, SIGNAL = 0.76; EXPRESSED IN FETAL LIVER, SIGNAL = 0.72; EXPRESSED IN BRAIN, SIGNAL = 0.81; EXPRESSED IN ADULT LIVER, SIGNAL = 0.7; EXPRESSED IN BONE MARROW, SIGNAL = 0.67
aaggtcatcaccctgattcgactgtttccaggagacttccaatgctcacccttgtaacaccaccagcagtctggtcttcttgcggatgtaggctgactggcgcgcagagcggttctgctgggcctctagggcactggaaaggtatctctggaagtgtgcagcatgaaaacattcagagctgtccatgatttggcgatacaccatccatctggaaaggtaaaaggtaacctctgcatgggggccacctgatggcctagctccataggttcagccatggattcaaatgtgaccatgagtcctaaagccattctgcccagtgaatccattcaggagaaagccatcttggcctcacagaaaaaaggcagagggcactggatgggttggaagcccagtatcctgaaaccactgtcactggggcttttgataggaaaccccttgccatagggaaaatggtcaggtaagcacttgaccaacagacatcagaggtaagaaagactccttctgaccaggcag

SEQ ID NO: 12952 - DNA, 578 bp, Homo sapiens
  MAP TO AC013698.3; EXPRESSED IN ADULT LIVER, SIGNAL = 0.64; EXPRESSED IN BRAIN, SIGNAL = 0.45; EXPRESSED IN BONE MARROW, SIGNAL = 0.5; EXPRESSED IN PLACENTA, SIGNAL = 0.67; EXPRESSED IN FETAL LIVER, SIGNAL = 0.54
gggaaaattcatcagccaacatttattgaacacctctgagttatgcagtacgagtcctaagacagcaaatgcatttaaatctcttgttagagcataaacaagtaaaccaatgcatagagtgttggaaagctgggatagagatttggcccatctccattcccccatggcccaggtgcctaagatggaggaggagtcagaaatgtctcctgaaggagccaacagttgaaatgattctccttttgcacatacatttttaaaaaacaaacctttttagtgaattagaaatatacacataaacattaggaatctcagcagttagctaataaattgatacaaagtcaacccactcgtgtaaccatcactcatatccagaacattaccagagctgccatcagtaaccccaccttcttctccaaggacaccaccattgtgacttccaacgttgctataggttggttttgcctgtttttgaactttaaattgattaaatggcacagcatatatcttttgtgcctgacctctttcacttgacagcatgtttttgtgagatgcatccatgttgttgcctattgtcgcaa

SEQ ID NO: 12953 - DNA, 595 bp, Homo sapiens
  MAP TO AC026156.2; EXPRESSED IN PLACENTA, SIGNAL = 0.45; EXPRESSED IN ADULT LIVER, SIGNAL = 0.68; EXPRESSED IN BONE MARROW, SIGNAL = 0.59; EXPRESSED IN FETAL LIVER, SIGNAL = 0.68; EXPRESSED IN BRAIN, SIGNAL = 0.59
tgttgaaggtgctctggttgtcctcctcccaccttcatcagccccgctctgccccttgacttctattcctttcctctcactcctctgaatcatcttggaaatccagcctttggtgcagtcctctggctgagcacagggtacatggcgctcactcagccccaggcgatgctccgcatggtggagactggtcttccagctaacaccgccattttgggagcacttatggctgacgggcaggagtctgaaggggttggaaagctgaggtttgatatgaaccttctgccaaggcagctgccggaataagggctggggaatatccagatggggaggtgagcatggcaggccccaagctccagaccgcttccagcagccgctgcagcagtgagtaccggagtgatcagcagggcaggtgtcaggggctggatgtggcctggctgttggagggatgtaccactgggggtgggagagggcgggccacagcaggagcaggtccccaggcctgatgggggcaattcagagtcaggattctgaaggcacgaggggatccaggtggccctcctgtccctttggaactagccagggaattaagcacaaa

SEQ ID NO: 12954 - DNA, 584 bp, Homo sapiens
  MAP TO AC009079.4; EXPRESSED IN ADULT LIVER, SIGNAL = 1.1; EXPRESSED IN LUNG, SIGNAL = 1.2; EXPRESSED IN PLACENTA, SIGNAL = 0.94; EXPRESSED IN BRAIN, SIGNAL = 1.3; EXPRESSED IN BONE MARROW, SIGNAL = 1.3; EXPRESSED IN FETAL LIVER, SIGNAL = 1.4
aggatggctgcatctcaaacggtgcttattcccaggggttctaccgcgaccgctcagaggatcctgtgggtagagacaggaatgataactctgctcactgtgagagacggcaagacaggtcttgggaaaactttggtctccagcatttggggcctgttttcctgcttggcctttgggagaacatgctttcgggtgatcacaggagatcttggctccttggctttgaatttggatttgtagctttgcactccccgtttctgcagaagctgcaaggcagcaaggtagcgaacgttgctggggtctggagggcacgccaggtttttctcagacaggagggaccaatgcaggcagcgctgctccggatcggtcagcagggatatctgggccgctggggaaggggaggatggcgtgtcgttgaccatagggtgtttggccagctcactggctcttttttcacctttcccatctgctgttttcaagccatatgcataagccacacacccatccttttccacatccagcaccttctcttctgactgcaagaaagagttcttactcttcttacccagaacatccaaagcatt

SEQ ID NO: 12955 - DNA, 565 bp, Homo sapiens
  MAP TO AL136984.7; EXPRESSED IN PLACENTA, SIGNAL = 0.64; EXPRESSED IN ADULT LIVER, SIGNAL = 0.72; EXPRESSED IN BRAIN, SIGNAL = 0.67; EXPRESSED IN BONE MARROW, SIGNAL = 0.78; EXPRESSED IN FETAL LIVER, SIGNAL = 0.81
gatcacaaaacagcccacttcaaagagattactgctttaaagacatttttttccccatctaagtcagtgatgtaaagtctcccctgtgagtaattccagggatgacctccacctcagacgtgaatgagatgagaaagcgccttacccagccgcaaactgtgagggtgccatcaggcttgggtttagtcctgcagcagctgccatggcagcaagactggcatttgctggcaactgtgcagctccttgaagggcagcagctgctgctgtttgcaaacctgatgctgtcaccatcacctggctggtcccaagaggggaggacaaaggagtggaggtggtctgtgttgtgctggtctcactggcactggatgcctcggaggtggaggctgaggcagaaggggagggactcagagagggggacgtgactgctgaggaagctggaggcgctgtggaaatcacggttgctgtgttgttggaggtggtgtctgaagtgcctgaaaagacaaacagattagaagatgaccttttgtaaatggttttggaagaatggtggctttactcagccaaa

SEQ ID NO: 12956 - DNA, 569 bp, Homo sapiens
  MAP TO AC015452.4; EXPRESSED IN LUNG, SIGNAL = 1.1; EXPRESSED IN ADULT LIVER, SIGNAL = 1.3; EXPRESSED IN BONE MARROW, SIGNAL = 1.5; EXPRESSED IN FETAL LIVER, SIGNAL = 1.4; EXPRESSED IN BRAIN, SIGNAL = 1.4
aaaagcagaaagggggagacagaatatggaaccccacagatgcaactgaacctagcgttattaactttaaatttttagagcctgcccaaaggccagatgttatcagcagctgaacagcatctacagaaaccagttgcaaagacagaagcagaacaactgatttggcagagagatccaataacaaaaaattgggaaataagtaaaataataacttggggtagaggttatgcttgtatttctccaggccaaaatcaacagccaatttggataccatcaagacatctgaaaccttttcatgagccagatgctgaggaagagattccgggaggatcccgaggaacccccggttgcagtaatgttgagactgaagctgaggaggaccccaactgtcacaagcaacacccgtccaacacagccacccacctggggacagatcaagaagctgtcacagatggcagaagaaaatctgaggaaagcaggacaaccagtcacaacaagtaatttaatgatagctatgatagcagttatcaccactgccatgagtattccttcaacaagggctgaaacag

SEQ ID NO: 12957 - DNA, 583 bp, Homo sapiens
  MAP TO AC021115.3; EXPRESSED IN LUNG, SIGNAL = 1.2; EXPRESSED IN FETAL LIVER, SIGNAL = 0.67; EXPRESSED IN BONE MARROW, SIGNAL = 0.71; EXPRESSED IN PLACENTA, SIGNAL = 0.8; EXPRESSED IN ADULT LIVER, SIGNAL = 0.93; EXPRESSED IN BRAIN, SIGNAL = 0.74
tggacccagaatctctttgccaaaaattcagcatctgctttgccacaaaggctagaacaagcccctatctttcttgggaaaattttcccagatactcacctcagcaggaagcagggtgtaggagtagaactgtttcatcttggtcaccagatcgtctgtggagaaggtcacatattctacaaacctccggttcagcaggaaccagtccgaaccgccatccacggcaatgccctctgggatccgccgatctcccaggcgccacatgtgagcgtcgcactccaggaagagccgatccaggccctgcttccgaatgaacctgggagggagaaagctgcccttagcccagaggtgtcctgaaagacagaactccagccagagtccaaataaaacaacacaatcatagcgatgatggcaattattgagtgcctgctgtgtgccaggtactgctccagggctctgcgtggagtttatcacttgatccccacaagtgaggcatgtcaccgtatttacccctatgacgcaggtactatttgacccccaactttcatatgagggcactgaggcttagagagcccaggggact

SEQ ID NO: 12958 - DNA, 559 bp, Homo sapiens
  MAP TO AC021973.2; EXPRESSED IN PLACENTA, SIGNAL = 1.3; EXPRESSED IN ADULT LIVER, SIGNAL = 1.1; EXPRESSED IN BRAIN, SIGNAL = 0.85; EXPRESSED IN LUNG, SIGNAL = 1.1; EXPRESSED IN FETAL LIVER, SIGNAL = 0.87; EXPRESSED IN BONE MARROW, SIGNAL = 0.81
cttgctttcactctcccacctcctaattcagaaactgaagttctcatccatcgtcatcttgaatgtatttaagaggttcctccagaagatctctagcaggtggggccttcggggtgagctctcctctagcaagataatgggagagaaaatggataaataaaatatagaaatacatgatcctaagaatgggtgacccttgcaggggatgctgttgaaggagaggaaggccaacaaccctttatgaccacctcactcatagctaacctggacgaggagcctgggaaagggccctagaccggacacgtccgagtttcaacttgggcagtcatttagtggctgggtgagtggaggtcaaggggaaaacgtacttggtggaaggaacaaaaagcaaaggtgtaagtggacagtacccctgcattgggggaatgaggtcagcagtgagaggggatgaggctggcgaggggtcggggcagatcagggcacgtcatcatagaagtctggactttacactggttaaaacaaggagaagcctgagaaacgattcacaggccagaactgc

SEQ ID NO: 12959 - DNA, 594 bp, Homo sapiens
  MAP TO AC023340.2; EXPRESSED IN PLACENTA, SIGNAL = 0.72; EXPRESSED IN FETAL LIVER, SIGNAL = 0.78; EXPRESSED IN ADULT LIVER, SIGNAL = 0.74; EXPRESSED IN BRAIN, SIGNAL = 0.53; EXPRESSED IN BONE MARROW, SIGNAL = 0.62; EXPRESSED IN LUNG, SIGNAL = 1.1
ttagaggatgcgtgttgcacttaaggtcacggcagctagaaaaattaaaagcaattcaaggtgcggctgggactcactggctctcgccgcaggtgaattcctgcctggctcacctagtgcttgatgcctctgaccctggggctggctcaggggagtggtgggtcagaagtgcctaacctccctttctgcctgtttctcctcccaactcctccactggcccgagcagctgggcgtggcctgcctgctggcatcggatctgggtcatggtggaccccaccggcttccgggagatcgtggctgccaatcctctgctcctcacgggcgcctacatcctcctggccatggggggcctgctctttctgctcggcttcctgggctgctgcggggccgtccgtgagaacaagtgtctgctgctatttgtgagtaccccagcccccaccccatccatgggtgctctgaggggtgtcagggattggctgcagactcccaggccctgctggcttccattcagaccagtgcttcccaaactggggcgggctgtcaaagcagaagggatcatggagatgagcacgtccgaccccactcatttggtag

SEQ ID NO: 12960 - DNA, 512 bp, Homo sapiens
  MAP TO AC019159.3; EXPRESSED IN PLACENTA, SIGNAL = 0.6; EXPRESSED IN ADULT LIVER, SIGNAL = 0.63; EXPRESSED IN BRAIN, SIGNAL = 0.48; EXPRESSED IN BONE MARROW, SIGNAL = 0.47
gcctaacagctatgcaagggagcagaatgagtttggtagcctcctcaaatgccccagctacagagaatgtttactatttgacctttctcaaatctcactaagaagctccatttccagagtctcactcagatatcagtccatgggagcagccctattcccatagcatttgttgaaatctttcagtgacaattgtttaatatcacatctgcctgaggcagtgatgccaattgggaataagaagttgactaaaactgttaaaggaaaaattggggaatggtatgacaataagggttttgataagcttcagcatatttctggtaaacctgaagggctatgcacatgtgcagggctgtgcacatgctcagaaaataaccaaaaaaaccttagtttcttacatcccactaatcttaaggacttgcagaagcaggatgtgaaagctaaggaggagttgtaaactgcttgcatttaagtaatgttacaacacaagtcagagacactcagcaaagcctgaa

SEQ ID NO: 12961 - DNA, 525 bp, Homo sapiens
  MAP TO AC025221.2; EXPRESSED IN ADULT LIVER, SIGNAL = 0.84; EXPRESSED IN PLACENTA, SIGNAL = 0.95; EXPRESSED IN FETAL LIVER, SIGNAL = 0.77; EXPRESSED IN BRAIN, SIGNAL = 0.68; EXPRESSED IN LUNG, SIGNAL =   1; EXPRESSED IN BONE MARROW, SIGNAL = 0.63
aaaaaccgcacaggatgatgaagaaataaaatgagagaagtctgctgaaatatatgcacaagctattctaaatgtcatttattgaatgatatatagaatttcataacaatgagtggcattgtctgaaagtgtctcccgtagctcactcttggttacctgaaccaatggactacctagaaccaggaattattcttcaactggttgaagaagctgtgcttaaactcaacttccaagaaaactgatggtgttatttcaccctcttgcaagagctacaacttcccatggtccccactgttcttgggtgctggacagctagctttcagtcacctcctccaactagctaactgccaacccagactgccaaacattcaagttgtctgattatctcttctgataaagttacttgctctgtgagaaaggagagcagcagtggggtggcgccccttccctggaatactagactgagtctccatcagatgatcctggcccctgcatactgcttcatgggaacagtgggagaatcaa

SEQ ID NO: 12962 - DNA, 574 bp, Homo sapiens
  MAP TO AC010290.4; EXPRESSED IN PLACENTA, SIGNAL = 0.5; EXPRESSED IN FETAL LIVER, SIGNAL = 0.53; EXPRESSED IN BRAIN, SIGNAL = 0.46; EXPRESSED IN BONE MARROW, SIGNAL = 0.6
tttttgccttgctttttcagaccaagatggtccagcacattcgaaagaagcatccagagttcgcccagctctccaacaccatacacacaccactgacgacagctgtgatcagtgccaccccagcggttttgactacagacagcgccactggagagactgtggtgacgacggacctgctcacccaagcaatgacagaactgtcccagaccttaacgacagactaccgaacgccacaaggggattaccagagaattcagtacatccctgtgtcgcagtcggcgtctggcctccagcagcctcagcacatacagctgcaagtggttcaagtggcctcggtactgcgtgccttggtttccctttgccttatgaatgccgtgttgccactagcacctcattctcagagctggggctgggatctatgtaatgtccttctgcgtggaagttctgagccttgggcattttacaactgccccttcccctttcaggctgatgaggcctctggccttagcaatgtaagagatttctgtctatagtagtcaggaaattttaggttccagcatatacaagcctcctg

SEQ ID NO: 12963 - DNA, 576 bp, Homo sapiens
  MAP TO AC013627.3; EXPRESSED IN BONE MARROW, SIGNAL = 0.74; EXPRESSED IN ADULT LIVER, SIGNAL = 0.92; EXPRESSED IN BRAIN, SIGNAL = 0.56; EXPRESSED IN PLACENTA, SIGNAL = 0.71; EXPRESSED IN FETAL LIVER, SIGNAL = 0.71
ccccatgcatattcacactcaagttacttgaaagttcaaataacacatgcttgaatttacttctggtcacacactgttttctggtatatatctacttcttcatataaagtccaattctaacaagatctaactgcattttccaattcaaaagatttctacaaactcacctcatacacagcaagatctatgcctgcataaggtatgatacctaataaattgggaacatagcctttgtaaaaagctcccaagccttcatgtttcaaaatcttcttggcacaatcatatattccagagtactgcccagttttgcctacagccagcctggttttcataacctggatataaaaaaaaacaaaatatgattgttcatattaactctatcatcatgggattcaaatgaagtaattttacatggaacaaatacctagcacatattgtcactcaaaagactgtacaatttgttgatacattctctttcatgtattacctctattggggggctaagaccaaagccagagagacccgtttactgcaaggaggatctgatgaaggaagtgaccaaggaaatggaagcaa

SEQ ID NO: 12964 - DNA, 544 bp, Homo sapiens
  MAP TO AL137225.7; EXPRESSED IN PLACENTA, SIGNAL = 0.9; EXPRESSED IN ADULT LIVER, SIGNAL = 0.6; EXPRESSED IN FETAL LIVER, SIGNAL = 0.82; EXPRESSED IN BONE MARROW, SIGNAL = 0.71; EXPRESSED IN BRAIN, SIGNAL = 0.79
tgaccatgaagcaggaactgcgaaaggttccactgcatcataaactggaggagagtggggaccatgcatcaaagagccactcagactcagtgggtttaaccaaaaatggctgcctggaggcagattcagggcctcactccagccttcagtccccttctttccatcttctccctccctgtgacccctttcttctcttctcccccagacgctggttggggaggctggaggaggactcatcgactacccattggggtggccagctgtgtctcccaagccgatgccagagctgcctcccatgggtgacaacaccaagtcccagctggccatgtctgccaacttcctgggctcagtgctgactctactgcagaagcagcatgctctagacctggatatcaccaatggcatggtgagtcacagccccaccagggggaggtggctgggcagcagacagctgccagtgacccttctcagtctccacagacttggggaatttgctgtgaagtgagaactgcagatggtccaccccttgactcacctccagctc

SEQ ID NO: 12965 - DNA, 539 bp, Homo sapiens
  MAP TO AC018535.3; EXPRESSED IN BONE MARROW, SIGNAL = 0.62; EXPRESSED IN ADULT LIVER, SIGNAL = 0.65; EXPRESSED IN BRAIN, SIGNAL = 0.66; EXPRESSED IN PLACENTA, SIGNAL = 0.66; EXPRESSED IN FETAL LIVER, SIGNAL = 0.65
tcagggagccataagattcagttctgcagataaaaatcccaacaaaatctgaagatgtattttctaatttgtttcagaatgatagaaaccactagctagattcacagaatctcttgaaggtaagattcacttgcctatatgatgtcacacatgatccagatcagataaaatacttcacatttcactcatcaaattcctcattgctttttcttcctaaaaagttatttatcaagaatcgtttggcacaggaccataagtgaaacaaaaagaattaatttgtttgtattatgacattatttattgtgattacttgcttacatgatgcctatacttgcccagaaatgatttaattttttttccaattttatgttgattttagttaaccatgaatccttttgaagggtttattatgacttaccattgtcttcaacagagaaatagaagatgtcctttgatgcgttgctgccctcattcaagacataggatatcttcatctcatcaatgtcagctaaaaaaaaagcaaccatcacacaaagtca

SEQ ID NO: 12966 - DNA, 542 bp, Homo sapiens
  MAP TO AC008750.4; EXPRESSED IN PLACENTA, SIGNAL = 0.54; EXPRESSED IN FETAL LIVER, SIGNAL = 0.52; EXPRESSED IN BRAIN, SIGNAL = 0.46; EXPRESSED IN BONE MARROW, SIGNAL = 0.54
aaagaagggggtggacattcctcaaaggcccagttaaacacacagatgaccgtcaccggctgcccgggctccagggtctcggggatgtagacatcaggcttctgagtcagggctgggacagagaccgtggtgggagattcttgtgctgcaggggtccctgagagccctctctgctcagcccataggctgtccccagggtccctccccagtgtgagaggcaggggttcccaccccattccatacctgttacttttagaaagaacccatcgttcatgaaattatatctcacatagcttcctctctccacccgaaagaagtactgtgactcatcctgcatctgcgcgtctctgatcaccaaggagcagttccccttggcgggatccccagtgagctggaatcggccccgggtgctcatttccacctctcgactctggtggtttgtggccacaggagcacccttggttgtctcagtcactgctttgaaccagtagccataagctggggtagaccctgtccagtcctgtcgggggtaggagaaagag

SEQ ID NO: 12967 - DNA, 541 bp, Homo sapiens
  MAP TO AC021641.4; EXPRESSED IN BONE MARROW, SIGNAL = 0.53; EXPRESSED IN ADULT LIVER, SIGNAL = 0.58; EXPRESSED IN BRAIN, SIGNAL = 0.48; EXPRESSED IN PLACENTA, SIGNAL = 0.54; EXPRESSED IN FETAL LIVER, SIGNAL = 0.54
aatgcagggatgactaacgggtttcagggccgaaaacagactggagggtgccccacacagcgctgccggatgaggtgcaagttagtttctgtgtctggctgacaagtcggacatggcctgcggctgcctccacaagcaagaaaacctttacagctaattttcgtggaccgagaactggaaaaccccaagcttcaccacggaatgaacagacgtcggctgcaacatactctgtggtaaaagtgttaacatcacggcatcctccctggttttgcaccattaggttaaaatggagaacttgctaaggtgttcaaagggctaaagacccttggtgtggtaacatgtaaaaagcgcagttttcagatttgggaagacttgactgccccattgacagcagccaggtggcctccagcaaatctcgttctataatagatcaccgggtttcttcacagggaaggaaggtgcattaaaaaaattaaagggaggtgttagatatgtgttcttctttctgtgttagtccctggccaagaaaacatgccgaatt

SEQ ID NO: 12968 - DNA, 507 bp, Homo sapiens
  MAP TO AC025746.2; EXPRESSED IN PLACENTA, SIGNAL = 0.56; EXPRESSED IN ADULT LIVER, SIGNAL = 0.66; EXPRESSED IN BRAIN, SIGNAL = 0.62; EXPRESSED IN FETAL LIVER, SIGNAL = 0.53; EXPRESSED IN BONE MARROW, SIGNAL = 0.54
tggcatgttgcttctcaaactttctgtcttccacaaagcctttattaactcggttttcttttttatatcttttcattcctagaattgaacacacccaattattatttctctttattcttttaatgtaatctaattcttaatttaatggatatttcaatgtaataatacaatatttcacctccacatgcaattgacaaagttcttatgaaagaatcaacattcaaccaatattccatgagttcaagagacattgattgacatccttctaaacagctcaacggcaccgctctgagcagtgagcttactgtggtgaatgaacaggaggaaatacctgcattaatgatgctaaagggagttagagagggtaaacaaataaaaaccactatcagaacatatgtggtgaggaatgctgaacacaggaaggaagaagcaggtgaggagacccattctatcaggtgtggaaggaggctgattttcacagaggcctgaagagacgagtgagggtgc

SEQ ID NO: 12969 - DNA, 550 bp, Homo sapiens
  MAP TO AC008103.27; EXPRESSED IN ADULT LIVER, SIGNAL = 1.4; EXPRESSED IN FETAL LIVER, SIGNAL = 1.2; EXPRESSED IN BRAIN, SIGNAL = 1.1; EXPRESSED IN BONE MARROW, SIGNAL = 1.3; EXPRESSED IN LUNG, SIGNAL = 1.1; EXPRESSED IN PLACENTA, SIGNAL = 0.77
ctagggtgaaggtacgctcgagcgtggtcattgaggacaagtcgacgagagatcccgagtacgtctacagtcagccttacggtaagcttgtgcgctcggaagaagctagggtgataatggggcaaactaaaagtaaaattaaaagtaaatatgcctcttatctcagctttattaaaattcttttaaaaagagggggagttaaagtatctacaaaaaatctaatcaagctatttcaaataatagaacaattttgcccatggtttccagaacaaggaactttagatctaaaagattggaaaagaattggtaaggaactaaaacaagcaggtaggaagggtaatatcattccacttacagtatggaatgattgggccattattaaagcagctttagaaccatttcaaacagaagaagatagcgtttcagtttctgatgcccctggaagctgtttaatagattgtaatgaaaagacaaggaaaaaatcccagaaagaaacggaaagtttacattgcgaatatgtagcagagccggtaatggctcagtcaacgca

SEQ ID NO: 12970 - DNA, 594 bp, Homo sapiens
  MAP TO AC016487.4; EXPRESSED IN PLACENTA, SIGNAL = 0.91; EXPRESSED IN BONE MARROW, SIGNAL =   1; EXPRESSED IN LUNG, SIGNAL = 0.98; EXPRESSED IN ADULT LIVER, SIGNAL = 0.88; EXPRESSED IN FETAL LIVER, SIGNAL = 0.91; EXPRESSED IN BRAIN, SIGNAL = 1.1
agttacccacggtcaaccacagtctgaaaatattaaattgacaattacaggaatgaagaatttgtatgttttcaattgtgtgccattctgagtagtgagatgaaatcttacaccgtcgtgttccatcccacctgggatgtaaatcacccctttgtctaccgtatcctcacagtatatgttctctgtccatcagtcattaacatcctctactccggacattcaaccattgtcaacatcatggatcaaagatccagggtctcctgaggcagatgatcctccttctgacatattgtcagaggtgaatagtagcctaatgttatctcacaatgcctacataattcacctcactttatctcatcatgtaggcattttatcatctcacattattataaaataagaatgattatagcataataaggtattttgagaaagatcacatccacataacttttattatagtgtattattataattgttctactttactagtgttgttaatctcttattgtgtctaatttataaattaaactttatcatacgtatgtgtatttagaaaaaacacataatatatttagggtttgggactatctgcag

SEQ ID NO: 12971 - DNA, 502 bp, Homo sapiens
  MAP TO AL161445.2; EXPRESSED IN PLACENTA, SIGNAL = 1.1; EXPRESSED IN ADULT LIVER, SIGNAL = 0.86; EXPRESSED IN FETAL LIVER, SIGNAL = 1.3; EXPRESSED IN BRAIN, SIGNAL = 0.74; EXPRESSED IN BONE MARROW, SIGNAL = 1.2; EXPRESSED IN LUNG, SIGNAL = 1.4
acactccagcatttcccttggctatagagttgacagcaataggcaagcacactgtttggcgtttacctcatctgcactggtggtggctggggggctggttcctcgctgtaagtgccaggtgtctgtgaaatcactccccttcccctgccctcattacacacacatctgatacacatctgcatgcacacacaccctctctcattccaccttcccaggcctcacctggttgataacatagatgccatagtccagctgctggcgctgcaggactgggtgcaaataatatagccagtacttgaggtgctcctgccggttgcggaatggaatgatgatggccaccttgtgaggagagacgcagtccctgggggcatagcggccgcccatcttcacatttgggttctgctttgccacgagctccaggtccacaggcatgttaaactcaatcagcatggggcccactagagaggtggagggagggagaagttagcaggccacaggactc

SEQ ID NO: 12972 - DNA, 600 bp, Homo sapiens
  MAP TO AC013818.3; EXPRESSED IN BONE MARROW, SIGNAL = 0.6; EXPRESSED IN ADULT LIVER, SIGNAL = 0.92; EXPRESSED IN BRAIN, SIGNAL = 0.62; EXPRESSED IN LUNG, SIGNAL = 0.91; EXPRESSED IN PLACENTA, SIGNAL = 0.85; EXPRESSED IN FETAL LIVER, SIGNAL = 0.61
agcgcttcctcaaatgacacctttccccgccccccacatttatccaaggaagggctaatttcacttcttatcttcccccaaaactttacatattcaaaattttaaattaatctcacccacacaccacatgcccaaagtaatgactatatctgttatgccatcagagttctataagattatgagctgctcgaagataaaacctctaccttgctggatttttaattctcatatttagcatagagttcaatgtattctaaatagatgttggtggaaatgattttcactgaattaattggccttgtcccatcatgatgttgttctggctttgttttaggaacatggaataccaatcaacatgggctatgctgtggccccacatcactcaggggtctacccggttcacattcagctgtatgcagcttggaagaaggtctggggtattcaagtcaccagcactgaagaatatccacatctgaaacctgcccggtacagaaagggcttcattcacaatagcatcatggtgagcacagagagccatgtatattgaaggatgttaatatttacatgtggaatgaagacagagggccatttcctctaagg

SEQ ID NO: 12973 - DNA, 526 bp, Homo sapiens
  MAP TO AC007325.51; EXPRESSED IN PLACENTA, SIGNAL = 0.65; EXPRESSED IN ADULT LIVER, SIGNAL = 0.71; EXPRESSED IN BRAIN, SIGNAL = 0.68; EXPRESSED IN BONE MARROW, SIGNAL = 0.67; EXPRESSED IN FETAL LIVER, SIGNAL = 0.74
catcgataatgcacactggcagatgttcatgtctacatctgattggaaagaagccaggaaagtaacatttctgttcaagacaaagaaaagtgtcttacattggcagcatcttcttttttacagatgtcttgtacagtgtcctcattagcaatgtcatatacagcatccttattagcgaattcgtatacagcatcctcattagcgatgccatatacagcgtcctcattagcgatgttgtatacagcgtcctcattagtgatgtcgtatagagcgtcctcattagtgatgtcatatacaatgtcctcattagcgatgtcatatacagcaacctcattcgctatgtcttgtaaagcatcctcattagcgatgtcatatacaacgtcctcattagcgatgtcgtatacagcgtcctcgttagtgatgtcttctacggtgtccttataagcaatgtcgtctacagcgtccttgttagcatgccttgtgggtgtcattagcgatgtcatatacagcatcctcattggtgatg

SEQ ID NO: 12974 - DNA, 512 bp, Homo sapiens
  MAP TO AC018896.2; EXPRESSED IN PLACENTA, SIGNAL = 0.6; EXPRESSED IN ADULT LIVER, SIGNAL = 0.57; EXPRESSED IN FETAL LIVER, SIGNAL = 0.52; EXPRESSED IN BRAIN, SIGNAL = 0.53; EXPRESSED IN BONE MARROW, SIGNAL = 0.49
agacaggggcattgtgagactgtgtccttttggcccataacccaagcagggcccagggagatctgaggctatgccagaggggcagggaggggcttccagtgtccactcccccaagaccattgtccagcaacacctggagtggctgagcagtgtgcccggcttcttgctgttgccccgagagcagcactggcccacagcagccaggaagggcagcagggtggtggcgggcagctcatgcccaggctccaggtatggaaactgcagtctctgcacctccctttccttcctactctccccctcgggcaaagacatgatcggcattggtgctggagagggcagagggagcccacacaggactcttctcccacacaccaccccatgccctgtggccccaacacctacatgtgtgaccctgaagagggcacagagccagcccactgtgctgctctcggccacccagtgcactgtcaccatgtctgtgactatgggctgcatctccattggccagaatt

SEQ ID NO: 12975 - DNA, 526 bp, Homo sapiens
  MAP TO AC013751.3; EXPRESSED IN PLACENTA, SIGNAL = 0.65; EXPRESSED IN BONE MARROW, SIGNAL = 0.64; EXPRESSED IN ADULT LIVER, SIGNAL = 0.72; EXPRESSED IN BRAIN, SIGNAL = 0.6; EXPRESSED IN FETAL LIVER, SIGNAL = 0.65
ttggcctgaaggtgtctaccagttaattcttcctgcataaagtcctactttgtttagcagaagtcccaggggaggtgttcttgagaagactattctaaaaaacaagcagcatctttgtagctcatgttgccaaatatagctgggtcaagagtgttgtacattcttctatctatgtgaatttttttttcatagacaaactctccaagaaaaattcctctggagatctgaccacaaaccctgaccctcaaaatgcagcagaaccaactggaacagtgccagagcagaaggaaatggaccccgggaaagaaggtccaaacaggtgagcatttaataaaacacacaacatattttagagatattgctcagcctgccctaaagagctcaaatatccactctcccctttagctgaatataagggcagaaaaaattcaatagtcacataacacaaaaaaactgtgtcagaactaaaaggttggttctgtccagttcatcgtacctcactggcccagcatggccactaaccaat

SEQ ID NO: 12976 - DNA, 552 bp, Homo sapiens
  MAP TO AC015785.3; EXPRESSED IN FETAL LIVER, SIGNAL = 0.54; EXPRESSED IN PLACENTA, SIGNAL = 0.98; EXPRESSED IN ADULT LIVER, SIGNAL = 0.54; EXPRESSED IN BRAIN, SIGNAL = 0.63; EXPRESSED IN BONE MARROW, SIGNAL = 0.56
ttactggagggtgctcttggagttacccctgagcagggagggcaggaaacaggaatgggtggaaggagaagttgaggccatgcggtcgcttcagctgttctacagagagctcaggggcccggatgatcctgcagaattgttccccctttgacagccactggatgcaggctgactcctggaagggagtgtcacttctggcaaggcagctctctttggcataggacaattcctggagagatattttgttaagagctttcagcaaacaacacttccagcaattctaggaataaatgccttggtcgtaaagcggggctcagagtggggcaccccgtacccaccacaccaagtttccagatctcactttctgcatttccagccacaaagaacaatattcattcagctgtggctagaatatcactcccaaagaaagggcagaagggagcaacattcattgtggaaaaccatgaaaggaccataattccaaggcatttttcataaaggaagctaaaagtagaagaggaaaaacccattccgttgttgtcaaggaagcaa

SEQ ID NO: 12977 - DNA, 539 bp, Homo sapiens
  MAP TO AC010634.2; EXPRESSED IN LUNG, SIGNAL = 0.95; EXPRESSED IN PLACENTA, SIGNAL = 1.1; EXPRESSED IN ADULT LIVER, SIGNAL = 0.59; EXPRESSED IN FETAL LIVER, SIGNAL = 0.56; EXPRESSED IN BRAIN, SIGNAL = 0.61
agcaaggacctccaactgtggtttagtaactgaagaacatcgttagttatctcaagaaaaactataaatatgatgtactttaacatcatacattgatcgaaatcaagactctgactctaatttgaatgtttggctgttcacagcttaagttctatccttctttctccccatttttcctcttatctgtcaaagccaatgaaaagtttccgtgctccttcctttagcaaaagtgggaagttcaaaccagcaatctcaaaccagaagcaggagccgtcgaactaccccaacgctaaccacaggtaaagctgtgccagtgggcccatttggctctctcaagccatatttggaactgcctggcagtctgtcctgattcccccagaaagcttcattatttgggtaatgacatttttttatatcctctttgtgtgtgtgtgtgtgtgtgtgtgtgtgtgtctgtgtgtatgtgtgtgtctgtgtgtgtaatcattttctcaaaatttgaatattttgggttgagggcttcatcctgccttcctgaa

SEQ ID NO: 12978 - DNA, 535 bp, Homo sapiens
  MAP TO AC013552.3; EXPRESSED IN PLACENTA, SIGNAL = 0.52; EXPRESSED IN ADULT LIVER, SIGNAL = 0.55; EXPRESSED IN FETAL LIVER, SIGNAL = 0.49; EXPRESSED IN BONE MARROW, SIGNAL = 0.47; EXPRESSED IN BRAIN, SIGNAL = 0.49
tgggagtctacccagtgaggctccaaccacgggcttgcacaactacaatatgtgaagaaaaacatgaagtcacatgtgctgaagaacatacaatatatctccaaacatttgcactgccaagaaaagaaactcgtggggttgtttggcaaatataaaaatgagatgtgaaaacttcagaattattatctgtgtaaatccatttccatatttcaaaagtttaaaagacagaatcattacatgttcctaattaatctttatagtaatcattctttgcacaccttctgtacaaaagtcacacccgaagccaacagcatggcacaccatgttatggcatttattatgagctcacaaaatgaaaactttcttcagatgttttcctaggtgtccaaattgtacaagaaaattaataggaagtggaatttcaccaacttcttcaaccctggctgaagaacaaggttccgttgtcaaaactcattcacaccaaggtggtgctcgatgctcaaaagaggtgagaggaatgtttcctcagccaagc

SEQ ID NO: 12979 - DNA, 544 bp, Homo sapiens
  MAP TO AL132981.5; EXPRESSED IN PLACENTA, SIGNAL = 0.52; EXPRESSED IN ADULT LIVER, SIGNAL = 0.54; EXPRESSED IN FETAL LIVER, SIGNAL = 0.5; EXPRESSED IN BRAIN, SIGNAL = 0.48; EXPRESSED IN BONE MARROW, SIGNAL = 0.45
ttgggctttcacaaataggctattatgaaaattcttgtacaagtcctttttttagtcctagaggttctcacctttttaaagatggcttgacactttcatttcacattgggaggtctgttggagcatccttatgcactgtctcagcagcacgaccctctttcaggttctcagcaacatgcccctcttgtaggttctcaatcttggcatctttgcattgtgtctttagcaatggataaaatgtatacctgataaagttattaaataagttaatgagtcaggtagaaaccacaacctatcctcaggccacactacttctgactaaagctgtctgaatgaggagctggtacctgataatctctcttaggtcattttttacatgtactctatttaaacattggctatcctcaagcctgccaaacttaagactcctctttcataaaatttcaactacctaaatgcgagtccattcttcagaagtgtacatcatttttaaccgttactccttaacacttgaacccagagcccattgtctggccatcctctt

SEQ ID NO: 12980 - DNA, 513 bp, Homo sapiens
  MAP TO AC019295.3; EXPRESSED IN FETAL LIVER, SIGNAL = 0.57; EXPRESSED IN BONE MARROW, SIGNAL = 0.68; EXPRESSED IN BRAIN, SIGNAL = 1.7
atgcaggaatttgggaactgagctgtgcaagtgctgaagaaggagatttgtttggaggaaacaggaaagagaaagaaaaggaaggaaaaaatacataatttcagggacgagagagagaagaaaaacggggactatggggagaaaaaagattcagattacgaggattatggatgaacgtaacagacaggtgagtggagtaaactttttttgtatcattatttattaattatattttctccacatatgttaagggtacagaaaatatcttgaatctgtaaatatctattaagagaagtttgggttaattaaatgtgaccagttaaagtgctgatagtctcttatatataaaggagaaaaaaatcactttatctgtcagaaacatagtttacacatttgtcattattcactttttacttcaacacaaatttgaaatgggaagtgtagttgtgtgacatgaatagcttgataattaagagttaatcagcataacattgctacattgcacgcatcatc

SEQ ID NO: 12981 - DNA, 534 bp, Homo sapiens
  MAP TO AC018528.3; EXPRESSED IN ADULT LIVER, SIGNAL = 1.2; EXPRESSED IN BRAIN, SIGNAL = 1.5; EXPRESSED IN LUNG, SIGNAL = 0.94; EXPRESSED IN PLACENTA, SIGNAL = 1.1; EXPRESSED IN FETAL LIVER, SIGNAL = 0.81; EXPRESSED IN BONE MARROW, SIGNAL = 0.94
ggccgatatggtttcaagaggttggcccctgactgtgcaacaaattattatctggggctttgatgtatcagtaaagctggtgtgcaggaaactccagttgaggtgggttttatatattaatagggttggcttaactttttgtaggaattcatttgtttcatgtcatttccttttctatgctaaggttttatggctgaccaagaaagtaagaacctaggtatggttgacagtgtgaatggaccatcagcctccaccatctcctgctcaccatggttgagcaggtcatttctaaataccttctggtggatggccatataatctggggctcagaactgctttacctggcacctagtgaggaggaggaggcaaactcaaaatacctgctctgctggggctgatgcagatgttgtgttttactagggaagctgttaattttatgatagcaaatctggactgtttatagacaaactcgtacaggagtttgcaacaatttcacagctcagtttgatgttttggcagatgttatgggagcat

SEQ ID NO: 12982 - DNA, 593 bp, Homo sapiens
  MAP TO AC021846.3; EXPRESSED IN LUNG, SIGNAL = 1.5; EXPRESSED IN PLACENTA, SIGNAL =   1; EXPRESSED IN ADULT LIVER, SIGNAL = 1.5; EXPRESSED IN FETAL LIVER, SIGNAL = 1.3; EXPRESSED IN BRAIN, SIGNAL = 1.2; EXPRESSED IN BONE MARROW, SIGNAL = 1.4
cactcgaagggcttctcatctgaatgggagagcttgtgccgactgagatggtacacatctcggaaggccttcccacacatttcacaagcctggttcttcttgacaggcttgctgggtttcttgacagattgagtcaccggcagagctgtggtgctggcactgctactggggttggtgcccgaggaagatgtagtgactgttgacaagatgcctgcaatggtcgagaccacgaagtcggctgctgtccccagccatggtagaggttacgggaaaacaccgtgggggggtttttctttggctggaacacccaccttaatccttgtgtggcaggattcatggcccctcaggtgatagtttcccctgaaagctttactgcagtaagtgcaccaaccaaaacgaagttttgggtttttatttttttaatcccaatggcatcctttaatgtttctggtgaaccctgaggtttctgagttatcggtattggaagcaatggtttctgatcagggggctccacggcagagctcaggaggagcagcaagctgttctgtgctgcctgctgttggtgatgggaagctacctgggctgccatttta

SEQ ID NO: 12983 - DNA, 578 bp, Homo sapiens
  MAP TO AL161670.1; EXPRESSED IN PLACENTA, SIGNAL = 1.1; EXPRESSED IN ADULT LIVER, SIGNAL =   1; EXPRESSED IN BRAIN, SIGNAL = 1.7; EXPRESSED IN LUNG, SIGNAL = 0.95; EXPRESSED IN FETAL LIVER, SIGNAL = 1.3; EXPRESSED IN BONE MARROW, SIGNAL = 1.1
agaggtttggcaatgtcctgaacactttcactgtagtagatgctgatggaattcatgacgtgctatcccaaaatacaacaccttggcatttgagaagatagcagaaggaggaggctcattctcacctttccccttttttctccagaagcaggtcataaagccgaaaaggacatttctgcctttctctgaagcaggtcataagtccctcattagagaagtattctccctatacctgaagaaaaggaacatccttatctatgaagacacaggaactcagagaagaatctgaacaaacaggccttgcaaaatgccctccagcttcctgccattagatcatacctcctttttccggccatacttctccataactatccacttcttcatcagatctagcataaaaacatttctgtttaactgttgcttcggttcttcatttccttatgaaggctccgcatcacgtaaaacttacgttaaataaatgtgtatgcttttctcttgttaatctattttttgttacggggtctcagtcatgaaccttaggtaggaaggaaaatagttctttcaccctgcagtaccgt

SEQ ID NO: 12984 - DNA, 577 bp, Homo sapiens
  MAP TO AC011778.3; EXPRESSED IN PLACENTA, SIGNAL = 1.4; EXPRESSED IN ADULT LIVER, SIGNAL = 2.7; EXPRESSED IN FETAL LIVER, SIGNAL = 1.2; EXPRESSED IN BONE MARROW, SIGNAL = 1.3; EXPRESSED IN HELA, SIGNAL = 2.6; EXPRESSED IN BRAIN, SIGNAL = 1.2; EXPRESSED IN LUNG, SIGNAL = 1.7
atgggtatactgcacccaggtagtgagcataacacctgataggtagcttttcctcccatgccgcctccctacttctccccctagtagtctgcagtgtcaattgttcccatgtgtatgttcctgtggccttaatgtttagctcccactaacaatgtgagaacattgattttctgttcctgcattaattcacttaggattatggcttgcaggtccatccatgttgctgcaaagggcatgatttctttcctttttattgctatgcaatattccatagtgtgtatgtatattttttaatccagtccactattgatgggcacctagtttgagtttgttgtctttgctattgtgaatagtgccatgatgaagatcttttgggtttaatgacctatatacccagagatggtattgctgggtcagagtgttcccttttctccacagccttgtcagtttatgttgttttttgactttctgataatagccattctgactggtgtgagttgatatttatttaattgtgattttgattcgtatttctctgatgatcatgagcattttttcctatttgttggccactcgt

SEQ ID NO: 12985 - DNA, 575 bp, Homo sapiens
  MAP TO AC013705.3; EXPRESSED IN PLACENTA, SIGNAL = 1.1; EXPRESSED IN ADULT LIVER, SIGNAL = 1.1; EXPRESSED IN FETAL LIVER, SIGNAL = 0.74; EXPRESSED IN BRAIN, SIGNAL = 0.84; EXPRESSED IN BONE MARROW, SIGNAL = 0.86; EXPRESSED IN LUNG, SIGNAL = 0.96
ctgttcttgttcctcctggcccagcagccaccttccacacctgcactgggacctcccactgtgcctctcctcccttccatggacttaagtgaagaggtggtcaaattatgcttgactgctgtgatttatacatgtgaaagggttttttaaatgatccatgtggatctgcttttctctggctgtatgggacaagacctcgatctagtagtgaggcaggaggcaagaccccacacagccacaggtgctgcccctcctcccaacatcagcatcggtcctcagccatgaagtgctgtagtttagtggcagcagccatcagatgcgcagccccaggggatggggggactgtatccggagcatacgctgtggtggtctgcctgccgccaactacaatggccacagcaggaacaagtcaaaatcctaagatatgtggctttttcttgaccccagaggaagctaggaaagtgaagaggcaggaggaagtgcaggaggtgagtccctgcccatcttcaggcccagcctctgctgccgccatccccttcctctccagctcccaggctttcaccacacacatcgct

SEQ ID NO: 12986 - DNA, 570 bp, Homo sapiens
  MAP TO AC009467.3; EXPRESSED IN PLACENTA, SIGNAL = 0.47; EXPRESSED IN FETAL LIVER, SIGNAL = 0.82; EXPRESSED IN ADULT LIVER, SIGNAL =   1; EXPRESSED IN BONE MARROW, SIGNAL = 0.68; EXPRESSED IN BRAIN, SIGNAL = 0.63
cagtacctgggtccctgatggcacctctggacccaccctcaggcctgggggaacttgccaccctgaagggaaagacgcaggcctggctggcttcatcacctgctgattgcagagccccagggccttgagtgaacaccagctgtagccaggtaattgttacagcaggccttgggcaagatccagtgctgtgcttagcaataattcccaaatcatatccctatcctcttagcctttctccgaaattcaagatcaacatttccaatattttctggacatctctaagtagatgtatcccagatattttcatatcataactagtaatatattttttacgttttcttgtattttaacttcccataagttacacattcaaataaaatgttctcaaatagctgctttgattaattttagtacatacttactgatgagctatcagatgactcattgtttttttcatatttctgtttcttgctcttttttttcttttctttctttgctttttttgaatgcttgtcttttttcttctttttcttcacagagtgttcctacaatcattttgaacaggcaaga

SEQ ID NO: 12987 - DNA, 562 bp, Homo sapiens
  MAP TO AC009486.3; EXPRESSED IN FETAL LIVER, SIGNAL = 0.93; EXPRESSED IN BONE MARROW, SIGNAL = 5.2; EXPRESSED IN PLACENTA, SIGNAL = 0.59; EXPRESSED IN ADULT LIVER, SIGNAL = 0.9; EXPRESSED IN BRAIN, SIGNAL = 0.93; EXPRESSED IN LUNG, SIGNAL = 0.96
tggaacctgctaagtctccgtggggcatgagctcagttaaagaaagggtccaagttctcttccatgttgacgtccggcaccagctggtcagacacttccttagcaccatatgctgaattcgagacgctaaaatctgtagaaaaccaaggatggtccagaatttcctgcgaggtcagccgctctgagggctcccgacgcagaatgcttcggatgaggcacttggccttgggcgacagagtctctggaatgttgaactggccacgccggatcttgctgaagagggagctgggttcaatgtcatggaaagggtaccgccccaccaacatggtgtacagcatcacccccaggctccacacgtcggctgctttgcccgagtagctgccactggtgttcaagatctctgggcttacgtaagccgggcagccatgcttgtcggagagggaatcatcatctccccgcagaatgtaggcgtcttccaggctttccagcttgacccgagtcctgcaagaaaggaggaaaacataagctcctgagggtgctcagagacacgttaccaccagca

SEQ ID NO: 12988 - DNA, 547 bp, Homo sapiens
  MAP TO AC018425.3; EXPRESSED IN ADULT LIVER, SIGNAL = 0.65; EXPRESSED IN FETAL LIVER, SIGNAL = 0.5; EXPRESSED IN BRAIN, SIGNAL = 0.49; EXPRESSED IN PLACENTA, SIGNAL = 0.56; EXPRESSED IN BONE MARROW, SIGNAL = 0.47
tacttggctgctttgtgctgctctaacagaataccaaagactaagtaatttataaagaacagaaatttattctttcacagctatggaggctgagaagtccaagatcaaggtgttggcatctgatgagggctttcttgctgtgtcctcacatgaaggaaggcagaagggccaaaaaagggacaaactctttgtcctcatatggcagaagagaagagagaacccactcctgaaagccctttttatagcagtattaatccattcatgagggctttgccctcatgacccaaacacctcccattagagcctacctcccaacctcattgcattggagaatacagttccaatacatgaattttagggggcacatttagaccatagcaccccacatctattttcccttattaacatcttacattagtatagtatacttgtcacaattaatgaaccagtattgatacataattttaactaaagtccatactttattctgattttcttagttatcacttaatgttccttttctgttccacaatcctatccagggcac

SEQ ID NO: 12989 - DNA, 502 bp, Homo sapiens
  MAP TO AC022918.2; EXPRESSED IN LUNG, SIGNAL = 0.86; EXPRESSED IN ADULT LIVER, SIGNAL = 0.86; EXPRESSED IN BRAIN, SIGNAL = 0.73; EXPRESSED IN BONE MARROW, SIGNAL = 0.73; EXPRESSED IN PLACENTA, SIGNAL = 0.82; EXPRESSED IN FETAL LIVER, SIGNAL = 0.67
gaaaatgaaaaccattgaccgagatcttacatagactctcaccatcacatccactgaccccagcagcaccagtaccaacctggtttgctttcacatttcttattataggtgcattgtccacactcctacccaagaccagtcctttacttgtgtaggcgataacaatccttttcatctaggtgaaactatctttactacactttccttgttctagttcctgacattttatttgctcctatattcagtaaagctatttgaaatgttttatattctctgtgatcagtgaggtgtgtactccaccaccccctccccaagctgtgactttcatattactgaactcaaagtcaacccttagtcctcttatttatcccgtggtagcatttgctgcagcagacatctctcttcctggaaatatttttttctctttctttcttctctttcttcttacctccctccagctcctcctcctcctcccctcctcctccttttcctacctcattga

SEQ ID NO: 12990 - DNA, 578 bp, Homo sapiens
  MAP TO AC019278.3; EXPRESSED IN BONE MARROW, SIGNAL = 0.65; EXPRESSED IN PLACENTA, SIGNAL = 0.64; EXPRESSED IN ADULT LIVER, SIGNAL = 1.3; EXPRESSED IN FETAL LIVER, SIGNAL = 0.71; EXPRESSED IN BRAIN, SIGNAL = 0.56
gggatgggtttctgagagtggaagtagaagtcagggtatcattggcatgccacaagcctcatcgctgctctctgccctcatgggattttctttttaaaagctttttggcatcctgtatcaaatttagagaaaaattgaaacagcgagaggtgttaggtgacagaatcacagcttgttaaattttcctaagttaaatggaacaagattaaactcaagaggataatggaaaaatcctgcattgagattaaactatccacttacaggtaaaggacatcagggacctcagtttctgttttagctgacagcatattgattttgagccagttgggtaatgtatagctgttgagaacaaaaagtcaggctacattagaaatagatattcatatcaagggagaaaatgtgcttctgtactttatagagtctgatgaatctggagttgttggtatagttataggtacatatttgaagggcattattgacagattagattacgtgttggtgaccagaatggaaacatatctgaaaattatttcatggggaaaagagttatactaaacagcgtagcccatgtatcacaa

SEQ ID NO: 12991 - DNA, 584 bp, Homo sapiens
  MAP TO AC015737.4; EXPRESSED IN PLACENTA, SIGNAL = 0.85; EXPRESSED IN ADULT LIVER, SIGNAL = 1.5; EXPRESSED IN FETAL LIVER, SIGNAL = 0.71; EXPRESSED IN BRAIN, SIGNAL = 0.68; EXPRESSED IN BONE MARROW, SIGNAL = 0.65
cttcccctttgtcttctcccatgattataagtttctcaatgcctccctagccaagcagaactgtgagtcaattaaacctcatttgtttataaattattcagtctcaggtagtatctttatagcactgtgacaattgactaatacagccctaaaacagggggatataactccccacctcttatatgtatgtagtgataccttcaaaaaattacaatatggaaagggggaaaataaaagcacctttacaatggagaaacacaaccaataccacaggtaattaaggtcaatatcatcagtcataaatccttttgatggtgtgtactcttgaaatgatgtgctaataatggcactatctctgtgatcatctttctaaagactcttaacctctgtcaaatcatgagaaaaacatcagataattccaacagagagacatcctgcaatatatctggcaagaattcctcaagactgtgcacatcatctaaaacaaggaaagtctgaaagactgtcacagtcaagataagccttaaagagatgacgactaaatggaatgtgtcatcctggatgggaccttgcaacaggttgag

SEQ ID NO: 12992 - DNA, 509 bp, Homo sapiens
  MAP TO AC013691.3; EXPRESSED IN PLACENTA, SIGNAL = 0.79; EXPRESSED IN FETAL LIVER, SIGNAL = 0.65; EXPRESSED IN ADULT LIVER, SIGNAL = 1.3; EXPRESSED IN BRAIN, SIGNAL = 0.7; EXPRESSED IN BONE MARROW, SIGNAL = 0.69
caagcctctttcccccttactctgtcccttgccaccagcagattaagctactacacctctttggttcttcctttaacctcgggcaggcagttaggctgcttcccccattatacagatgaagaaacagaggctcagagaggaatagggccttaccccaaactagtaaaatgcagggcaggaatgggacccaggcctggtgtactccaattactatattcatatgcgttgcctccagcaggactggcagagtagctggtggagaggcagggtgcaggaggggcttttcccactgacacatgctgtggcatgagccagtgtccctcctcagatctcagttccctctgtacaattacagtggtggctgctacagatgccaggtgctacatacgtgttgtcacatctaatggtcacaccacccactgctgttggattcaaagcctgtgttcacgtccactgtagctcctgggatggtggtgctcagtggtgccagcatgagaaggagagggttg

SEQ ID NO: 12993 - DNA, 506 bp, Homo sapiens
  MAP TO AC016057.3; EXPRESSED IN PLACENTA, SIGNAL = 0.47; EXPRESSED IN FETAL LIVER, SIGNAL = 0.92; EXPRESSED IN ADULT LIVER, SIGNAL = 0.64; EXPRESSED IN BONE MARROW, SIGNAL = 0.47; EXPRESSED IN BRAIN, SIGNAL = 0.51
ttgatggtatgggaatttgccatattttattttggtacattctcttggatagttcagttttgtcttcaatttactgatgcataacagattttaaggagtaaatgacaatgctgcaattcttcatttacttttcttgataatctctcttttattcagtaggaggatggcaattagttttccacaaaggctatgtaattctcttatgactactactgttaactatagtagtcatcctttttctgagatttcactttctgcagtttcaattactgtggtcaactgcagcccaagcataggtgagtacaatgaataagatattttaagaaagagcacattcacataaattttcttatactatgtgttgataattgttcctttttttatttttgttgttaatttcttgctgtgtctaattgacaaattaaattttatcatatgtacatatttataaggaaaagatagtatatatagggttcagtactatctgagtttcaggcatccactgg

SEQ ID NO: 12994 - DNA, 566 bp, Homo sapiens
  MAP TO AL138956.3; EXPRESSED IN BONE MARROW, SIGNAL = 0.52; EXPRESSED IN PLACENTA, SIGNAL = 0.65; EXPRESSED IN BRAIN, SIGNAL = 0.5
ccatctcaagccttccagacaaacccacttaccagctgaagaccactgggagaccctgcagagccatgtggagcagaagaatcacgcactgagccctgctcacatctctgacccagaaatcatgaaatacaacaaaagattttaagatactaagtttttgaatttgttatcgaacgatagacaaccatataactccctcctctccagggctatttagtgggcctcctagagctctacatatttctcacccctgaaacattttccaattgctgtgggacattaacaaatatttacatactctgtcaacgcgaaaaaaaaaattatataaagtaaaattttaagattctcttttattccctattttcatccctttctccatctcaaagttaatcactgctcctattaatgaatatttagattatttctagttttttattaaataaaacagtgctgcagttaacagccttgcacatattctctgtaaatttcagattcatagaagtcaaattactgaggcataagttattaaaattataatacatgacaccaaattgctctccctcaaa

SEQ ID NO: 12995 - DNA, 579 bp, Homo sapiens
  MAP TO AC011292.2; EXPRESSED IN LUNG, SIGNAL = 1.4; EXPRESSED IN PLACENTA, SIGNAL = 1.3; EXPRESSED IN ADULT LIVER, SIGNAL = 1.1; EXPRESSED IN BRAIN, SIGNAL = 1.3; EXPRESSED IN FETAL LIVER, SIGNAL = 0.86; EXPRESSED IN BONE MARROW, SIGNAL = 1.1
ctgaaaagcacaaccaagggaatagaaatcatcagaatcctgtcactaatatttctgttagaatcacattaattttcaaataattgacacctttattacattttcagtcactaagatccacacataattcacttttctttttttttttaagtttcctttaaatgttgtaattttcttgttttaacttcctcacaacttttgttaagtttattgctggttagcttttgtttttggttcttgttatgaccaggatcttttttgagatatgtaaatctttagcttttggatatattacactcttctgaactctccaaaactcatgctgtttacccgttcttaactttatcccttgactctctacttctgaaccctgaatatctactgctttctcagtacctagagggaacccatatatcaaaataaaacctttgatattttattatttcttgtgtttcaaccagagcaaatgattaacattgtgtttgaagttgctgatgctattctgaaaaattctgatccaagacttgtcttgctactttactcaattattgatattaaaggcacagttcatgacacatg

SEQ ID NO: 12996 - DNA, 580 bp, Homo sapiens
  MAP TO AL157405.2; EXPRESSED IN BONE MARROW, SIGNAL = 0.47; EXPRESSED IN PLACENTA, SIGNAL = 0.5; EXPRESSED IN BRAIN, SIGNAL = 0.47
caccaccaaagtgtccacagccctgcccacctcagcagtgccagcagaaatatcctctggtgacaccttccccaccctgccagccaaagtgtccacccaagagcaagtaacagcttcggaattcatcaggaccacgaaaggatagggataattggctcacctcgttccacagctccacctgcatcttctcatcaaagccatccagggatacacagggagcttctttccccttagcctgtgatctgcccatgatgatccccgacagcaaaatgtttcctttctgaggctgccatgctgccactgtccaggtggagactgagcaaaggaagtcctcagctgtaccggcctttcagagcttctctttgggtgccatcaaagaattattttgatgtcttctgtctctgtctgtcacctggcatgagcttctactatctgtgcaattgtcacttttctttcactccctgaataaagtagctatgcctatatttttgtgaatggatatttcatttctgtttaaacctactttattaacaatatcatatgatcatttggatttatttctatctttcgttggtcccca

SEQ ID NO: 12997 - DNA, 565 bp, Homo sapiens
  MAP TO AC018535.3; EXPRESSED IN BONE MARROW, SIGNAL = 0.65; EXPRESSED IN PLACENTA, SIGNAL = 0.84; EXPRESSED IN ADULT LIVER, SIGNAL = 0.65; EXPRESSED IN FETAL LIVER, SIGNAL = 0.64; EXPRESSED IN BRAIN, SIGNAL = 0.71
aggaagtccacttggtggtgcccgtcctccatccggaagatgatattgtcactgtaggtgttgctgccatcatgctgatacaccactcgccctgctgccaggtccgctggtgtgaaatacttgcacccagcaggtgccccaaacaccaccagctgcccatgtctcaagcccctgactgcagccattttcacctcttccaggttatctttatcactgataggaatgctgtgggtgctggacaagggccttgactgaccttcaaaaagcacaagtcccctgttatggctagccactgggaccagagtattcatggatttcactgtcaccatgaaggcaaaggggtctgaggcggcgccgtctccgtccaccacctccagctccagctgaaagaggcgctccccatgggagttctctgcagggggctgataggcaatcttcagctccctcagctcctgctgggtgaagaaggagactggaagccctagagggtcgtcggtgctgaccacgtagccctgttgccccgggtgccctggtgggtgagtgggggcgttcagaatgttgaaca

SEQ ID NO: 12998 - DNA, 584 bp, Homo sapiens
  MAP TO AC021782.2; EXPRESSED IN PLACENTA, SIGNAL = 0.72; EXPRESSED IN ADULT LIVER, SIGNAL = 1.2; EXPRESSED IN FETAL LIVER, SIGNAL = 0.56; EXPRESSED IN BRAIN, SIGNAL = 0.49; EXPRESSED IN BONE MARROW, SIGNAL = 0.5
gcatatgtaggtgctccacaagtgatagtcacttaattattttagatggtgatacctatctagcagcaattaatataaaagaaatactggaactttggttgactccagtcaacaccatgacatgactactaaaatgatccttacaatcctagaatgaattatgatgatggaaaagggatagagcaattccattgcaacacgttcaatcaggccatttctgagtatttcattgtacggggtgcattcaaaattaaagaatacccagaagaggcttatctacatggtagccatggagatggtgacaagttaaattctggatatattttgaagtagagataatgtgacttgctaagagactgtatatgttgggtgtgagagaaagagagaagtcaaattaactccaaggttttggctcgaacaactggattgaaagagctgaaaggaactgtgataagaaagactgtaggtacagcaatattttgggaattgggaagggcagtggaaaagaaaataggagttcaaaactagacaaagtaagtttggtttatctattggactctcaagcagaaatgccaggtaggcat

SEQ ID NO: 12999 - DNA, 538 bp, Homo sapiens
  MAP TO AC011778.3; EXPRESSED IN PLACENTA, SIGNAL = 0.52; EXPRESSED IN BRAIN, SIGNAL = 0.47; EXPRESSED IN BONE MARROW, SIGNAL = 0.78; EXPRESSED IN FETAL LIVER, SIGNAL = 0.49
agctcttgcactggttcctgagaatcaatatcaatttaatatttaaaagaaaccacacaaccctaagattaaatagtaaagaaacatgtaaataattccataagtaattataataatcatggttttatttggaaaatacaaaataatagcatcatatattttaatagaaaaacgtccaatgggcatctttttctttgttattatgcttatattgattaaagtgttaatattgattaaagtggcccaggaaataggagcagttaataaagataagtggcatgtaacttcactagtaagccacagaatatttgggaagaggacttaaaaattagtttagtcagaatataatattaaattatgtagaatttagcaaaaagtttatttagtttcttacataaaccaggtatgatgctaccatttaggctgaccaaacccatccccaccccccaaaaaaacccaccaccaccaccaccaccaacaacaacagacatgtaaaccttgctttcagagaacacatggaaaagcaggaacccagatg

SEQ ID NO: 13000 - DNA, 558 bp, Homo sapiens
  MAP TO AL138914.5; EXPRESSED IN ADULT LIVER, SIGNAL = 1.2; EXPRESSED IN FETAL LIVER, SIGNAL = 0.94; EXPRESSED IN BRAIN, SIGNAL = 1.3; EXPRESSED IN BONE MARROW, SIGNAL = 1.1; EXPRESSED IN LUNG, SIGNAL = 1.1; EXPRESSED IN PLACENTA, SIGNAL = 1.2
tcctggaagacataccccacggaatggctccccaggccctggcagcaaagcatctcataaaaaagtgccttggctgggacacttgggagggcctgctgactctagatgatattgggaaacattattttcctattggcactgcttctgctattgaaaataaaaacaagttcttaagcccttggaacatttattcactgccctctactttttaaattggtttaaattggcctggataacctgtttcctatccagcattcccagctcagaagagtctgtaaatatatcttcaaagagggtcttcgacaatccttgatcaaagaccttgcggttctaagcacagagttggccttcctcctcctctcccgtttccaccctctcctgcaagcagccgagtgtcctcacagtgcggccatagaagctgggtgggaggaggaggcctcatgctgggaaggcccttcccttctcctcctcaatgtcctgctccaggtgagtgcccagcaggcgctgtcaggctgtgacctccaggaggaattaaagggaaaggtggaagaacaggca

SEQ ID NO: 13001 - DNA, 509 bp, Homo sapiens
  MAP TO AC012405.4; EXPRESSED IN PLACENTA, SIGNAL = 0.76; EXPRESSED IN ADULT LIVER, SIGNAL = 1.7; EXPRESSED IN FETAL LIVER, SIGNAL = 0.63; EXPRESSED IN BRAIN, SIGNAL = 0.5; EXPRESSED IN BONE MARROW, SIGNAL = 0.59
caaggccagtatcactctgctaccaaagctatacaaagacgttacaagaaaagaaaactataggccaatatctctcatgaaaatagatgcaaaaattctaaacaaaatactagcaaacctgttcaaaagtacattaaaatgaccccataaatacacaaaattattatgtgtcataatttttttaaaaggcaagaaattttaaaaagaatcattcatgacgatcatgtgaaatttaccctgggaagcaagtttggttcgacatatacaaatcatatgtgattcaccatattaacagaatgaaggtcaaaaaccatatgataatctcaataaatgcagaactatttgataaaattaatatcctttcatgaaaaaattcaacaaattcagtatagaaataatgtttcacaatggaataaaagccatatatgacaagcctatagctaacatcatactcaacagtgaagagttgaaggctttttcctgtaagatcaggaagaagacagggatgc

SEQ ID NO: 13002 - DNA, 574 bp, Homo sapiens
  MAP TO AC015638.4; EXPRESSED IN PLACENTA, SIGNAL = 0.62; EXPRESSED IN FETAL LIVER, SIGNAL = 0.62; EXPRESSED IN ADULT LIVER, SIGNAL = 0.71; EXPRESSED IN BONE MARROW, SIGNAL = 0.64; EXPRESSED IN BRAIN, SIGNAL = 1.2
atggactgggaagtcaatgcatacctctctaagcccacctttgcatcagcctaccttaattgaacattgaaattagttcaggatccttacttggaaattcctaagaggtcacccgtcatgcaggtcttaggagaggggagaagaaaataagatttgtgtggcggtggggcaggcaggatgctgggcttattttactgaacaaacaatcgcatttccatagaaacagcagcagtcgtgcagtatcatccacagcctgagagagagtcagcagcaagagctgagccggtttctgaacccgcccagcatcgagaccacccagcccagtgaggacacgaatgccaacagtcaggacaacagcatgcaacctgaggtatgggcacgaggcgtcctctgtcccaggacactctgtgggcttctttcttttaataaaaataaataaaatgggtgctggtcagatcattcaaacaaggtgacaatatttctaataggaatattttcattaaaaaaaaaaaggcaacggaaatccattgatccagattatgtctatgtctttgccatcttggatgcagttgag

SEQ ID NO: 13003 - DNA, 596 bp, Homo sapiens
  MAP TO AC009467.3; EXPRESSED IN ADULT LIVER, SIGNAL = 0.92; EXPRESSED IN PLACENTA, SIGNAL = 0.79; EXPRESSED IN BRAIN, SIGNAL = 0.78; EXPRESSED IN BONE MARROW, SIGNAL = 0.91; EXPRESSED IN LUNG, SIGNAL = 0.88; EXPRESSED IN FETAL LIVER, SIGNAL = 0.82
tttagctgtggtgatgatgatgatagattgactctagaagatcaaacaaatattaatcatgttttttcttttcttttaaatgtattagttttatcatagaacttacagatacagatttaggataccacagtgcagtaaaatcttaatcactaccttctactctctattactgttattttggtttttcagtttatgggaaaaacagatggagactattacaccctggatgacatgtttgtctccaaagcagctgagagagaacgtcttggtgaagaggaagagaaccaaaggaaaaaagctattgctgagcatcggagtcttgctgcacaaatggaaaaatgtctgtattgttttgacagctctcaatttcccaagcatcttattgttgcaataggtgttaaggtaagaagtatttattatcctttgcttacattctcatagaactttttttgtttcttcatagaataacttgaataagtttattattttgtctgttttacttgtttattgggtctttcccctaataatttttaagctccgtgaagacagagataacttttgttctctcattgtatacaaagcatctagccctggtt

SEQ ID NO: 13004 - DNA, 527 bp, Homo sapiens
  MAP TO AC026273.2; EXPRESSED IN BONE MARROW, SIGNAL = 0.56; EXPRESSED IN ADULT LIVER, SIGNAL = 0.6; EXPRESSED IN FETAL LIVER, SIGNAL = 0.49; EXPRESSED IN BRAIN, SIGNAL = 0.75; EXPRESSED IN PLACENTA, SIGNAL =   1
aatgccttttcatgggactggattagttaccaggagtggattgttatcagagtgagttcagcttcctagactctcgtgtttcctctcttgccatgtgagccccttgcatacacctgtttcgccttccactttccccatgagatgaagcagcataagaccctcgccagttgtgctgcccgatctcggacttttcagacacaagcagggtgagccaaataaaccttttttataaaataagttaccccgagtctcaagtattgtgttacagccacactaaatggcctaagacagtgtaacagcggctcgggggtggtgggccactaggtgggtgtgatatagagcaacaaagcctgaggatggaagaagggtgcggtggctgctcaccctgggtgggacatgctcccgaagtggtccaggtccaggagggcacgttgcagcagcagctggtccatgggggtggggcacaatgtcagttccttctctgaggggagtgctggggctactgggcccctcttgcttccttatcc

SEQ ID NO: 13005 - DNA, 504 bp, Homo sapiens
  MAP TO AC018560.3; EXPRESSED IN PLACENTA, SIGNAL = 0.5; EXPRESSED IN BONE MARROW, SIGNAL = 0.44; EXPRESSED IN FETAL LIVER, SIGNAL = 0.47; EXPRESSED IN BRAIN, SIGNAL = 0.6
acatttggatggctactgccccatttagctagctgcagacaattggctcatttagaaaacatttcaccatccaggcaaaaatatgtaatgaaagaacaaaaaaggccttgaagatatttctttctagaaaatcttggaaaaaatgatactgataattttcttatagtaaaagatatttactaataaattaatttcatgcatgccagataacctgatgtgcgtgaaagaacaaaggatgtgtagtcatagtacttgtgttaaggtcctggctcaacaagtttctagtgtgtgtgaaggtaagccaatcacttaatattttgcctcagtttcctcattggtagataagcataatagcatgttccttccttacagagttgttgaaaagagtaaagaaaatcagacttgtaacacaatccttaaaactgtgacctatcatgcattttagagcatcaagaggttcctgatatctcatgcaaaattgcaggtttttgtgcattttcccgt

SEQ ID NO: 13006 - DNA, 509 bp, Homo sapiens
  MAP TO AC010162.6; EXPRESSED IN BRAIN, SIGNAL = 0.55; EXPRESSED IN FETAL LIVER, SIGNAL = 0.53; EXPRESSED IN BONE MARROW, SIGNAL = 0.48
gcagcagaggcattatctccataaggtgtgtgtggtccaggaaaacacttccccgagcagatcctgccagatttggttcattccatgatgtcgactctgcttggagcaccacactaactttagggtcattacagatctgatgccttggtcttctgctgtttgattttttttttcattcatcttcatcatcctcatcttcctctccatcagacagggatgtacacggccggatctgtcggtagcggtcaagccatttttctaccatctgagtgaccagggggtgatttcgccgccgagaactcttctgcatggcaaccagaactcccccctccgtcacacagcagtccagccactccctgagcagtttttcttgctgttcctcattacctagcttttggaggaatatgaagacaaagggaaaatcatacaacagatcagagacttggtaggaatgtgacatggaaacctacagctggtatgctaactcatgaaaaggccaaagcaatcaa

SEQ ID NO: 13007 - DNA, 579 bp, Homo sapiens
  MAP TO AC007923.2; EXPRESSED IN ADULT LIVER, SIGNAL = 1.9; EXPRESSED IN BRAIN, SIGNAL = 1.4; EXPRESSED IN LUNG, SIGNAL = 1.3; EXPRESSED IN PLACENTA, SIGNAL = 1.1; EXPRESSED IN FETAL LIVER, SIGNAL = 1.8; EXPRESSED IN BONE MARROW, SIGNAL = 2.1
tgaatccctccctgaaacagcagttgcaaaagcaaaaagggggaaatagggattacaggacaccccatatacaattgaatctagcattattgactttaaattttttgagcctgcctaaaggccagatgctatcagcagctgaacagcatctacagaaaccagctgcaaagacagaagcagaacttctggtttggtggagagatccaataacaaaacgggtaaaataataacttggtgtagaggttatgcttgtgtttctccaggcaagaatcaacaatcaatttggataccatcaagacacctgaaaccttatcatgagccaaatgctgaggaagagattccgggggggatcccccagttgcagtcatgtcaagactgatgctgaggaggaccccaactgtcacgagcaacacctgtcaaacacagccacctacctggggacaaatcaagaagctgtcacagacggtggaagaaaacctgaggaaagcaggacaaccagtcacaataagtaatttaatgatagctatgatagcagtgatcaccattgccatgagtattccttcaacaagggctgacaca

SEQ ID NO: 13008 - DNA, 501 bp, Homo sapiens
  MAP TO AC013691.3; EXPRESSED IN LUNG, SIGNAL = 1.2; EXPRESSED IN ADULT LIVER, SIGNAL = 1.1; EXPRESSED IN BRAIN, SIGNAL = 0.95; EXPRESSED IN PLACENTA, SIGNAL = 1.1; EXPRESSED IN FETAL LIVER, SIGNAL = 0.95; EXPRESSED IN BONE MARROW, SIGNAL = 0.98
tgctggagtggtgaacagagagtgtccttgggtcacacagatcattaaccagctgtgtgaccttgagcagagctcttaacctgcttgaacttcggtttctgtatctgtaaaacagtgataataatagtacctacttttgaaggttattaatagtgaggataaaataaggattaaagggaagtgtgtctaaaacacttggcgcagagcctggtatgtagtcagcactcagaaagtgtggccttgatgacaacaatgatgatggtgaagatgggaatgagtggggaaaggatggcgacaaccgttgcgttgaacagtatgagacgctgctcagccttctccgacatactgggtacttccatgcttccaggcttcacacttgccatttcttctcccttgccatcccccaagacttcttccagcacaaatgcatcctaagtaatggagtaaccaggccctgtggatctgagcctggaggagcccgggggcagattagaacccaat

SEQ ID NO: 13009 - DNA, 595 bp, Homo sapiens
  MAP TO AC021782.2; EXPRESSED IN BONE MARROW, SIGNAL = 0.95; EXPRESSED IN LUNG, SIGNAL = 0.97; EXPRESSED IN ADULT LIVER, SIGNAL =   1; EXPRESSED IN BRAIN, SIGNAL = 0.94; EXPRESSED IN PLACENTA, SIGNAL =   1; EXPRESSED IN FETAL LIVER, SIGNAL = 0.81
tacctcactttccacctccgatttactcttcaatcctattgtgatctgcttctgtctctacaattccattgatacggatgtggaaagacaaagaactttttatgttatttgaactctatgtggtagctgaactgttgtccactaactttttattacaactctcttgtgtttggcatttaagatagtcatatctgttagttttccgccttacttttctgaacattccttctcatttattcctattggatcatattcctcacagaggaatattagtgagaagctatgttccctagcataattccttgtactttttctcattctatattgcctcagataaccagtagtacacatacaggataatgggcaccaaaaataaattaagagatgatggtggcttgcaaggatggaagctgtaaagttggtgagagatgggcagagtctggaggatttgttgacactctggatattgggtacacaagcaagcgaggagtcaaagatgacagccatgttgttggcctaagaaaccggaaaaaaggcactgcagtttactgaggtacagatgactgatggagaagcaggtgctcaattgggaatc

SEQ ID NO: 13010 - DNA, 591 bp, Homo sapiens
  MAP TO AC016212.3; EXPRESSED IN ADULT LIVER, SIGNAL = 0.57; EXPRESSED IN BRAIN, SIGNAL = 0.54; EXPRESSED IN BONE MARROW, SIGNAL = 0.56; EXPRESSED IN PLACENTA, SIGNAL = 0.64
ttcatgaaacctagggctgggaatgaaacataatcctctggatggagtcactgaagcccctacaccaaagtgtgggggggacaatgacactatctgttcatacggattaagactgtttgctttttttggtatccatactgccctggtggcttctattgaatttgtggtcaagtaagaattatttgctgttgtttatttttaaatttgttttaatgtgaaccattataagccagcttcctccatcctatatacacatatacatatatgagtgtgtatatgtatctatacatatatgtgtttacatatgtgtatgtgtatatatatgcgtatatatacaatttataatggtggtggttgaattctacgtcaatttttcaaattttcttttagtattataacatagatttgataaacatacttgccatctctaccccaaagtcataatacagatgtttcaatgagagccttgctgcacacagaaggtggcctctacccacaagtttgctatgactgttaaaccacccaactattctaaatcctcctggctgttactagcacctggtggcattttcccatcttgtctgcaaggat

SEQ ID NO: 13011 - DNA, 516 bp, Homo sapiens
  MAP TO AC022317.4; EXPRESSED IN PLACENTA, SIGNAL = 0.69; EXPRESSED IN ADULT LIVER, SIGNAL = 0.76; EXPRESSED IN FETAL LIVER, SIGNAL = 0.67; EXPRESSED IN BONE MARROW, SIGNAL = 0.81; EXPRESSED IN BRAIN, SIGNAL = 0.76
acagcacctgaaaatacgggaaaattagaaagttttcaggaatgcccagggagaaatgcaggctcagaaaagatctgaaaaaaaaaaaaaaaaaaaacaacccttaagtttacacatcagcctaatccttggcatagagatagcctacagcattccaaacaaaacaaaccaaatcaaaataaaagcagcatatccaggtgaaggagtgaaatatgagttccaaatttgccatattattggattaaaatatacagttttcaacacaaaaatcacaaggcatacgaagaaacagtaaagtatgttccattcagtggaaggtaataaaccaacagaaattgtccttgagaaagtcctgatagtagatctactagaaaatgactttaaaacaactgtcttcaagatgctcaaagaactgaaggaaggcacaggggaagtaagaaatatatatgtatgaacaaaatgaaaatataaatagagtattttaaaaataactaaaaggaaggtctggaacaggga

SEQ ID NO: 13012 - DNA, 577 bp, Homo sapiens
  MAP TO AC009466.2; EXPRESSED IN PLACENTA, SIGNAL = 0.82; EXPRESSED IN ADULT LIVER, SIGNAL = 0.73; EXPRESSED IN FETAL LIVER, SIGNAL = 0.59; EXPRESSED IN BRAIN, SIGNAL = 0.82; EXPRESSED IN BONE MARROW, SIGNAL = 0.65
agccagttgctcaggagaagtgaaaccatccatggtaccaagttcggacaggagtctgtcccagaggtcctcatgacagagcactcttgtcaaaggctctttctgttattgatccttcaagtcacacaacagagataggaggggagacaggcatgcctgaacttgtcaagtgatgacatgagatgtcccaggaagatcctgccagcagaggcttacctggtcaggtcaaggtggttgatgatcaggctccgtccgctctcagtctgggcgagatgcagcagcagggcaaagctctgctgccggatggccaggaccttggaggacaagagggcggccaacagcctggccctgtcatggtgtatcactagcacacgctggttttcctctgcaaaacacagaggttgtgtgtcttgtgcatgccatcatggcaattaaactagctctgtcaccctctatcctaatgggaaactcaactggtgcccactcatttgaaggcagaataatgaagtgtaagagtgtggattctagaaccagactgctgggtccgaatgcccaggggagcgaccttaccaatgaa

SEQ ID NO: 13013 - DNA, 586 bp, Homo sapiens
  MAP TO AL138914.5; EXPRESSED IN ADULT LIVER, SIGNAL = 0.84; EXPRESSED IN BONE MARROW, SIGNAL = 0.93; EXPRESSED IN BRAIN, SIGNAL = 0.97; EXPRESSED IN PLACENTA, SIGNAL = 0.72; EXPRESSED IN FETAL LIVER, SIGNAL = 0.67
  unsure 471
ttgatggtgctttgtcttgctgggtgaaatgaaaagcaatattctcaggctcaggaagaatttgggatagaggctcatgttactgcttgttattgctggtagtgttttttgtggttttggttttgagattttgagagttgccatcaaagatgaggagaggatgaggacacctaaagacctctgaagtcttcgtgatctcctcaataccacggtcaggatgaagtgcggaggatggatttagagagaatgccgttccctcctcatctgccccacacccagcatcaatatgcttgcacacaagctctagacgaagtcttctgctaaaggaagggaggataagaaggaactaggcaccaatttccatggtctcatcttaaatctgctggaagttaaaattagtggcttcggtgctatgagaacatcagattcctcaggcctttgtattaagtgatacttgacaacttctattgngcactgtcattaaaacaacaactcctgaatccctcatattatctgtactgcaaataaaacggatcaagtgttttgaagctataactaatcttcaccagtcttcacaggtgccaga

SEQ ID NO: 13014 - DNA, 526 bp, Homo sapiens
  MAP TO AC013657.3; EXPRESSED IN BONE MARROW, SIGNAL = 0.44; EXPRESSED IN PLACENTA, SIGNAL = 0.6; EXPRESSED IN ADULT LIVER, SIGNAL = 0.54; EXPRESSED IN BRAIN, SIGNAL = 0.47
cagcccctgttctcaaagagctcactgcgtgaaaagcttgacatagggaggcaacacatgagccataagtcacttaagtcacgcttgagcatatctctgcaaatctgtggaagagatggatcaactaagccctcagtccagtagtgcagatgtggagagggcagccatgctctggtagagttcctgagtgcttcctgttttggaatgcggtggcgtctggcctcctcactgtttgttcagcatgcattaccatgcattaccatgggtgattagtaatttaaaatttttatctcctgtagctctcacacttgacggtggaatcatcaaatgctttagcgatgccatcggccaaaatggggaaatcgaggcaatcagagacgtacgtgacttgttcaacatctccaggctccccattcatccagcggcttgagaagccagcctttggctagcaggaagaatagacaggccctggcaccacatcagtggccccgacacctcagggaagtccattcagtgaggccttcat

SEQ ID NO: 13015 - DNA, 596 bp, Homo sapiens
  MAP TO AC021385.3; EXPRESSED IN ADULT LIVER, SIGNAL = 0.54; EXPRESSED IN PLACENTA, SIGNAL = 0.6; EXPRESSED IN BONE MARROW, SIGNAL = 0.51; EXPRESSED IN BRAIN, SIGNAL = 0.58
tgcctcttggaaatccagtcttattccacaaaagagaagtatgtaaacatagctgtttattaattctctctctttttctctttttgtcttcctcctccctccctctctctgtctccctctgtacctctgtgtttctctctgtcagttctgtaaggatcagttcaactctcttaaaatacccctgctgtcctcatgtggacatctgctgagaagcatgatgtcttcgaaattgatggccaagtggttaaagaggaattggtggaattatcacctggctcccaccagtgggctcctggtgagttgcctccatctctggctgctgccaggactttgacctacagtcacagctttaccaggtctttggtttaatttgatagactcagctcatttcctggtgctggtagcatatgagtagttcttccttattttcttgtctcagtaccaaggtctgtagtcaaaggagaaagtaaaagcaatttcttcattaaagtgcatgaagcttctccatgtagagagttgatagctctctttggaatggaaagagctgccacctgttggattgtttctagatgggatcaggatggtccttgtctggt

SEQ ID NO: 13016 - DNA, 502 bp, Homo sapiens
  MAP TO AC018425.3; EXPRESSED IN LUNG, SIGNAL = 0.88; EXPRESSED IN PLACENTA, SIGNAL = 0.93; EXPRESSED IN ADULT LIVER, SIGNAL = 0.93; EXPRESSED IN BRAIN, SIGNAL = 0.92; EXPRESSED IN FETAL LIVER, SIGNAL = 0.75; EXPRESSED IN BONE MARROW, SIGNAL = 0.9
atcgttttgctaatgcagggcaggcatatgcactgaagagactttatattaagctttcagaagactacttttaaagaaagccttaaagattgccacaaataatatggtttttaaaatgatttagaattagaaataatttcagaaccttcttttacatcgatggttccagacccatcaatatcaaataaattaaaggcgtctttaatttcttgcttttgggattcattcagttcaatttttgctgctcttttcttccattggtctgaacttgtatggtagttagatgcctgtaatacacacacatatgggtgaaagataaattatataactggaatagttagcagaaccagaataattgatgataaactatattaaagtacctatttcctactataaaatgaatctcaacaggagtaaggaaggagtgcagttgctgccaggggcagccttccttgctctggcggaaaaacttcggccccggccccagcagaaggttacagct

SEQ ID NO: 13017 - DNA, 553 bp, Homo sapiens
  MAP TO AC016105.3; EXPRESSED IN LUNG, SIGNAL =   1; EXPRESSED IN BRAIN, SIGNAL = 0.95; EXPRESSED IN PLACENTA, SIGNAL = 0.96; EXPRESSED IN ADULT LIVER, SIGNAL = 0.89; EXPRESSED IN FETAL LIVER, SIGNAL = 0.78; EXPRESSED IN BONE MARROW, SIGNAL = 0.78
gccagacacctgggaagtaggcagtttataagtgaagactgcaattttaaaacattctgttatttgaattccctcatgtgggatgactactggttgcttcactggaggtagagatcaagttgtttttagcatcaaggcttcctctactttcaagtgattatcagcttaacagtggcccttgaggtaggcatcatctttcccaaaaataaaataaaagttaaaatatgtttcagataaacattttaatagattgcaattattcagtaacatagaagattacaaatttcaggaacatgaaagattttctcactgaaattgccatcagtgaaatatttggacctatagatattcctagaaattgtatgcctggcttacccataatcacttctggggtaccttggaagcatttcatagtcttatcaacaatcctatctactacatcaactgtgccatctctactgaactcctctgcaagctcagcttccactgatgtaatgatcagtgtgattgagctgctctgcctagcatggtgggcagcccagctaacacctag

SEQ ID NO: 13018 - DNA, 541 bp, Homo sapiens
  MAP TO AL137141.7; EXPRESSED IN PLACENTA, SIGNAL = 0.88; EXPRESSED IN ADULT LIVER, SIGNAL = 0.73; EXPRESSED IN FETAL LIVER, SIGNAL = 0.89; EXPRESSED IN BONE MARROW, SIGNAL = 3.1; EXPRESSED IN LUNG, SIGNAL = 1.3; EXPRESSED IN BRAIN, SIGNAL = 0.67
taatgctggtgcccctattcagtagcaacagtcatcttgtgagattctgactcttccctgggatcatgccttaatgtctgaatgatagcctctctcgtcccttcaccttccatctagtcttccctcacctctctaaaagctgttgcctgaatcgtcctgaagcttcagtatattgtgtacattacagatactgatggcaatggatacatcagcttcaatgagttgaatgacttgttcaaggctgcttgcttgcctttgcctgggtatagagtacgagaaattacagaaaacctgatggctacaggtgatctggaccaagatggaaggatcagctttgatgagtttatcaaggtgagtaccatgcagaatacaaggagacacatttgaaacttggaacttgaattctgttttaaaaaatatccagaaagacattccttacctccttgcttcgacattacatattctttcctttgtgattttcttgatcactgcttgagtttctaaagatacattatatttttgcagattttccatggcctaa

SEQ ID NO: 13019 - DNA, 593 bp, Homo sapiens
  MAP TO AC011229.2; EXPRESSED IN ADULT LIVER, SIGNAL = 0.84; EXPRESSED IN BONE MARROW, SIGNAL = 0.79; EXPRESSED IN BRAIN, SIGNAL = 1.3; EXPRESSED IN PLACENTA, SIGNAL = 1.4; EXPRESSED IN FETAL LIVER, SIGNAL = 0.7
ccacaaccaacctgaaaaccttaatgaatttcaaaatcataaccttctgcaagtcaatatcttgcctccctcttgtttctgcaactttttttttttagtcatagaccatgtgttagcatcctgagctcatattacttcatagatgactccagataacaaatgccaacaactgttcactctgattccatccccttgatgagcttctaatctctattctggctctactctcattctagctcatcagaataaagttactactaaatcttttacttctgtagatgatttgctcattttggaagagcaaaatgataataaaaacagagtccaagattttgccttcacacatcccagtaagttttcttttttataaaagaattttatagctttgcctcgctatttcttttgaaaatgatagtgtgaatttgtcaaaatcataatgtgaatttgtgctcaaagcattgattgtcagttgctcagccttttgaatgaattatgcctttagtaccatatacagatcctactgatgttcattataaagtgtctgtttttctaattttcattttgtattcacaaggacagtctcaaggcctcag

SEQ ID NO: 13020 - DNA, 528 bp, Homo sapiens
  MAP TO AC018909.3; EXPRESSED IN BONE MARROW, SIGNAL = 0.87; EXPRESSED IN PLACENTA, SIGNAL = 0.83; EXPRESSED IN ADULT LIVER, SIGNAL = 1.1; EXPRESSED IN BRAIN, SIGNAL = 0.96; EXPRESSED IN LUNG, SIGNAL = 0.89; EXPRESSED IN FETAL LIVER, SIGNAL = 0.84
ctctgttgcaccttgctcaggggtttgcactataactttctaattacgtgtgcttttcccctactagcatgatgcatttttaattaagggcacaactctctgtggccctgtggcctcaaattgtgcacacaatacaatgataatccaatggtgatgagatgagaacaagaaggcaacactaacggagtcccatcaacaggcagaagaggatcatttgtaatatttctcttcattctattattgttttcttagagcctttacaatatggaatcatctatattatccagcacaagcaagtctgccgatttcagatgagttatattactggcaaagatgaaagaggagtaatgacaagttacatcagattttctattagaaacaaaatcacaaaaagcatttggctcttgataaagtgtgtgttcccagcttttttaagatcaaaaaagataataaagtataaacttgatacaacgtattcatggcagaaagctacacagatgtacatattctttcgaacaaggcaacaca

SEQ ID NO: 13021 - DNA, 542 bp, Homo sapiens
  MAP TO AL139352.8; EXPRESSED IN FETAL LIVER, SIGNAL = 1.3; EXPRESSED IN PLACENTA, SIGNAL = 1.3; EXPRESSED IN BONE MARROW, SIGNAL = 1.4; EXPRESSED IN LUNG, SIGNAL = 1.3; EXPRESSED IN ADULT LIVER, SIGNAL = 1.1; EXPRESSED IN BRAIN, SIGNAL = 1.3
acacagccaaacacttgtgcccaaggtaagaacataacggcaaagggaggatgggaaccacgtctcttgtgacagagttaaacccatctttctgaggccatggaccagactgggggcaagaacaaggtcttgcttgggtcagggattcccagcagttcgcccttccagtctcagagctgagcctcccagccacaccctcagcatggccccttccaggcccatcactcactcagcctggttccaggggattggctccactttggagttggccagcaggtgcggactgtaccgcacctccacatacaccacgccctctttggccttcatctctacaaactcataggcgatccttttgatagcctcccggcagcccctgggaagggaagaaaggggttgggaacaaccttccccaagtcccttgggagctccaggagcaaatgacatccccaacccttggcagattaaacccacttcatcccccagacccaagctctgggcatccactggataagatcccagacactgggcaagtcctatcagct

SEQ ID NO: 13022 - DNA, 542 bp, Homo sapiens
  MAP TO AC013800.3; EXPRESSED IN BONE MARROW, SIGNAL = 0.66; EXPRESSED IN PLACENTA, SIGNAL = 0.97; EXPRESSED IN ADULT LIVER, SIGNAL = 0.84; EXPRESSED IN FETAL LIVER, SIGNAL = 0.58; EXPRESSED IN BRAIN, SIGNAL = 0.73
tgctttatgccctttcttggtcatgctgggagctccatgactgggcactgcagccctgcaatgccctgggaactgccccatccacacctcctcctccctccatgggagcaccttcgatcatcctcagaggcagacactcagatggagggccagctggtgacagagggaggactcactggtaaaagtgatgttgaagcccctcttccctgtggagtggtcagtctggaactcgagacgggccacgtggccactgcttgtgatggaggagggaagctggtttcctgagaaggtgcccaggacgggcgcctcggcggtggccccatccttgatgaccaggaaatcaaactgaggctccacgtcaatgtcgttgaaggccaggtggatgcggctctcaggcctggccaggatgagccagacacagtggaggtggttgccatagtcctctgggtagttgggagacaggacaaccccagacgggctggtgaagttgaagaagcaggagactgcaagagaagagcagtggaggtcagtaagcatcccca

SEQ ID NO: 13023 - DNA, 580 bp, Homo sapiens
  MAP TO AC015805.3; EXPRESSED IN BONE MARROW, SIGNAL = 0.73; EXPRESSED IN PLACENTA, SIGNAL = 0.72; EXPRESSED IN ADULT LIVER, SIGNAL = 0.71; EXPRESSED IN BRAIN, SIGNAL = 0.64; EXPRESSED IN FETAL LIVER, SIGNAL = 0.65
gcacatcaggtggtacatgggggctggctgttttatcctattttatatatgaggattatttcataattctaaataattaaagaacatataaactgtgaaggatactaggtacctttgagtctaatcaggttggttttgtttctagcacattggaaaccacgtttgacaccaatgtcaccacggagatgagtggccgtagcatactcagcttgacagggaggcccacacctctgtcctggagactgggccagtccagccctcggctccaagcaggagacgccccctcaatgggcaatgggtatccccctcgagccaacgccagcaggttcatcaacactgagtcaggtcgctatgtgtactccgcccctctgagaaggcagctggcctcccggggcagtagtgtctgccatgtggacgtctcagacaaggcaggagatgagatggacctggaaggcatcagcatggatgcccccggctacatgagcgacggggatgttctgagcaagaacatccggaccgatgacattacaagcgggtaagtacccggggccgccctttctcccagagagaaagagggctt

SEQ ID NO: 13024 - DNA, 519 bp, Homo sapiens
  MAP TO AL160492.1; EXPRESSED IN ADULT LIVER, SIGNAL = 0.55; EXPRESSED IN PLACENTA, SIGNAL = 0.56; EXPRESSED IN FETAL LIVER, SIGNAL = 0.49; EXPRESSED IN BONE MARROW, SIGNAL = 0.54; EXPRESSED IN BRAIN, SIGNAL = 0.84
tctggggatcaggaacaaaggctaagggggaggaggggagcaaatgcaagcaaagcaacagggctgatgcctaggagccaggagcggctgcagggcccgtgggcgctcagaggccaggcaggaaagtgggtgagtgaggggctcaccagagacagacacgggcttggtggtggagactgcgccccacgcgtcagaagctcttttcccagcactggaggcaggctgctgtgaagctgcccaggggtccgagttcttggggacagattgtgcggtggctccagtgggcaccccccatgggtcaatggaggcagctggcttggtacctgttggaaggcagggtcagggctcagaaatgccttcagagggtctgggcagctggggtgagaagggaaaaggatactgccagccacaccagggtctatgccctgtgccaggtgagacagccatcgaaagggtactgtcccacgccagcaaagagggacacagctggggcccagggccaacaaccctggtaaggaa

SEQ ID NO: 13025 - DNA, 579 bp, Homo sapiens
  MAP TO AC015999.3; EXPRESSED IN BONE MARROW, SIGNAL = 0.71; EXPRESSED IN PLACENTA, SIGNAL = 0.64; EXPRESSED IN ADULT LIVER, SIGNAL = 0.63; EXPRESSED IN FETAL LIVER, SIGNAL = 0.54; EXPRESSED IN BRAIN, SIGNAL = 0.69
aatgaagccatgaaacctgcaaaactactttgccacatggagaccaagcactctgcattaaaagacaagcctttggagttttttgttttgttttgtttaaaaaaaaaacagaaaccatgaaaccatgaacacaaagaacacatagaagcaattattgaaggccaccatgtcatcaaatgtgtctgcactgagagcatcattcatagtggctaactgcattgctaaagctaagaagccctttactattggtgaagaattgatcctgcctgctgctaaggacatttgttgggaacttttaggagaggctgcagttcaaaaaatagcacatattcctcttctggctagcaccataactagatgaattgatgaaatagcagagaatatcgaggtacaattgttagagaggattaatgagtcaccattaatcctctctagcaattggtatgcaatccaggttgatgagtctactgatattgacaacaaagcaacaatgcttttttgtgtgtgatatatttttcaggaagatgtgcacaaggatatattatgtgaatttttgttgccaatcaaaaccacagctga

SEQ ID NO: 13026 - DNA, 589 bp, Homo sapiens
  MAP TO AC019250.3; EXPRESSED IN LUNG, SIGNAL =   1; EXPRESSED IN PLACENTA, SIGNAL = 1.1; EXPRESSED IN ADULT LIVER, SIGNAL = 0.73; EXPRESSED IN BRAIN, SIGNAL = 2.4; EXPRESSED IN FETAL LIVER, SIGNAL = 0.77; EXPRESSED IN BONE MARROW, SIGNAL = 1.1
gtctctgctgaggtccttggagagttactggagagggctctgtgtcagattaccttgaggaggctctgatttagccttttgtaaaatgcaaagagttgaggtcttctccacgcaagagctcgctgatgtcaatgaggtattgaggatggggccatctcctatttctgtggccagtactgagttttgttatccttcctttaggtaaggagtgccaatggacggatgcctgcctgtctcatccctgtgcaaatggaagtacctgtaccactgtggccaaccagttctcctgcaaatgcctcacaggcttcacagggcagaaatgtgagactgatgtcaatgagtgtgacattccaggacactgccagcatggtggcacctgcctcaacctgcctggttcctaccagtgccagtgccctcagggcttcacaggccagtactgtgacagcctgtatgtgccctgtgcaccctcaccttgtgtcaatggaggcacctgtcggcagactggtgacttcacttttgagtgcaactgccttccaggtaaggagctccctagtgtcccaggattaggggacaaacccctagcacagga

SEQ ID NO: 13027 - DNA, 585 bp, Homo sapiens
  MAP TO AC009549.3; EXPRESSED IN PLACENTA, SIGNAL = 0.63; EXPRESSED IN FETAL LIVER, SIGNAL = 0.77; EXPRESSED IN ADULT LIVER, SIGNAL = 0.73; EXPRESSED IN BRAIN, SIGNAL = 0.61; EXPRESSED IN BONE MARROW, SIGNAL = 0.6
aatcttcctccctggagagctttttaaatagactctcatttttctggggttattttgagcaaacttccatctggagatggagaatgagacaaaccaggaacttagatgacctcaggagttcctccctgatcctggctgaaggattcttgtcagacctgcagttccactgctggattctctctgtctcctaaatcatccgctttgacttcttcctctccacctgggctctctggatgtgccaaggcgctgtacatggagtcaacagctttgattaagcagctttgatctctgttgagcatctcggaataagatctttgctctcagcatctgtgccaattctcgaaatagtttagctcagccaagcaggaggggggctggattgcaaagtgtattatatgagaaatttaaaaagaaaaggcagctgcaaacagtcaggggtgtgtgtgtgtgttaatgtgggcacccatggctcctgggaaatgattaccatgctatcagcatgcaccaaccctgtattcacagtggctgcctgctgcgagaaagtgggcagcttgcagcagtcaaacccttgcatcaggtggtagt

SEQ ID NO: 13028 - DNA, 600 bp, Homo sapiens
  MAP TO AC021880.2; EXPRESSED IN BRAIN, SIGNAL = 0.49
ctggtctgaaaaaccaactgctttcatgatataggggaacatgttttacaggtatcttttagattgctgcatcgtaagtctttcatgatgaagaagaaaaataaaacaactaaaatttgaattaaaaagaaataaaaaggcaaatttgaccatgttataaatgacaggtacctttcttatttctgtatcatgtgctatccatcgaattactgcttcaaagacatatctttcattgccaacgtttaacttctcaagagaaatcacttctttaagcttttgaggactcagctctaagaattcttccgtgctgctgacgtctcggaaatgagtctccaggtattctgtggcaaggtaatgaacgtgatggaggcagtaatgtagtgcaaagtcacggataccaatacagttctcagcagcaatgcagccttccaaaaactcacagcacagggttttaaggtccgtcagtagcagcaggtcagctgcctgaacaacatcttggattgtatcttcatttagcctgatctaaaaaagtagcataattatcttatatttgaatgtgtacatttaaaacccaaaccactaacctattaattggggcca

SEQ ID NO: 13029 - DNA, 506 bp, Homo sapiens
  MAP TO AC025226.2; EXPRESSED IN PLACENTA, SIGNAL = 0.47; EXPRESSED IN BRAIN, SIGNAL = 0.63
gtcacagtgctcccataggcagagcctagacaagacttacataaccctggtgatccgtgtagaatgatgtcacaacgccctctgtaggcagagactggaaaagttacttcacctgggtgatcagtgcagagatatgtcacaatgccgtttgtaggcagagcatagagaagagttgcatcacctgggtgatcagtgcagagatatgtcacaatgtcccctgtaggcaaagcctaggcaagagttacatcacttttgtcatcagttcagagatatgtcaaaacgcccctgtaggcagagcctagacaagagttacatcacctagttgatcagtgcagagatatttcacaataccccctgtaggcagagggtagacgagttacatcacccaggtgatcagtgcagagatattttacaatacctcctgtcagcagatcctagacaagagttgcatcaactgggtgatcagtgcagacatacttcacaatgccccctgtaggaagagggta

SEQ ID NO: 13030 - DNA, 588 bp, Homo sapiens
  MAP TO AC012241.4; EXPRESSED IN BONE MARROW, SIGNAL = 1.1; EXPRESSED IN LUNG, SIGNAL = 1.3; EXPRESSED IN PLACENTA, SIGNAL = 1.1; EXPRESSED IN ADULT LIVER, SIGNAL = 1.1; EXPRESSED IN BRAIN, SIGNAL = 1.1; EXPRESSED IN FETAL LIVER, SIGNAL = 0.9
accactctgggagacactggctcaactgcctctgtccctaatgcaaatttaccagctgaaatccttcagagatacattcgctgataaacaggctacaataggtgtagaaagatgtgggtaatgactgactagattgcaacctgtctgaatcatagaaattgaaagaaaataagctttgccaagacacagaagccaagatttcaagcactttgggacatgcagttccactgctgggatgtttattcagaggtggctgtaagtttcacttcactctttcaagtatgtgctcgggggctgcacaccaaccgagggagtgaaaagaaaaatcagatcaatcttgcatgaagcacttggtgaggagtggaggccagacgagctgggcagaaagaatgaagtacaggaagagtcaccgggacaggagccttctaggaagaagaggctgcagaaacgcaggggtgaggcgccgctccggcagggcaccaatgatccaagtaggagatcatgctgagtttcttctccttctcattgtgagaaagcaaacacacagtttcttctagacctggaacaccaaccgtgacttgcaaacac

SEQ ID NO: 13031 - DNA, 535 bp, Homo sapiens
  MAP TO AC009467.3; EXPRESSED IN BONE MARROW, SIGNAL = 0.49; EXPRESSED IN PLACENTA, SIGNAL = 0.54; EXPRESSED IN BRAIN, SIGNAL = 0.48
ccagatcaattccaaaatgcatgtttctaataagtcttacaaaggatttaatttaataaaatgaatcaagattagagagaaccagatctctccaaaaagcagatcactgttacactgaataatcagcttctcaaaattcagaggtatcctaggaatatatcttaccttagatgccattctcataaagagcttgttttgattttctgctgttcccatcttttcatttttgactaaatcatttaggcttagattatcatcatcatgaaagtatctgaccctttctctttcctcatgggttgaaacctatgacaaaatgaacattattaagttaatgaaaacatgagtctctgaagtatttcttgatggattacataaatatctgatgttaaatgtaaaaatcccactatgtaatcacaacctttccttccagtttatccctagtctgccagtttccatgtgaaaaaacttccattagaattacactccctacttctacctctttactctcctcttccccagggatggaagcatgata

SEQ ID NO: 13032 - DNA, 585 bp, Homo sapiens
  MAP TO AC021774.3; EXPRESSED IN PLACENTA, SIGNAL = 0.6; EXPRESSED IN FETAL LIVER, SIGNAL = 0.56; EXPRESSED IN BRAIN, SIGNAL = 0.84; EXPRESSED IN BONE MARROW, SIGNAL = 0.85
agcaagattgctgatacaaagtcaatatacaaaaaccatctacttagaaataattccatatataaacacaaaacaataagaaaataatatgtgaaaagcaataacatttacaattgcatctaataaaaacaccaaatacctagtaatatattttacaaaagacattgaagacttctattcagaaaactgcgaaacttaattgagatgaattgaagaaacctaaacagatagagagatatataatgtttgtgagttgaaagagcctatattgcaaagctatcaattttctccaaattaaagtatgtattcaattcccaaaaaatcccagccaggctttggtggtggtggtagtggtggtagtggtggcggtggcagtggtggtggcagtggaggtggtggtaaggatgtctttaattgacaaaatagtcctaaactgtacatggacttttaaagatccaagaacagcaaagatagtctccaaaaaactaatctggaaaacttgtaacaccagatatcaagatttattgtaaagctacagtcacagcacaaagatatgtaaatagaccaagggatcaaaatagagcc

SEQ ID NO: 13033 - DNA, 561 bp, Homo sapiens
  MAP TO AL138807.7; EXPRESSED IN PLACENTA, SIGNAL = 0.65; EXPRESSED IN FETAL LIVER, SIGNAL = 0.59; EXPRESSED IN BONE MARROW, SIGNAL = 0.51; EXPRESSED IN ADULT LIVER, SIGNAL = 0.64; EXPRESSED IN BRAIN, SIGNAL = 0.83
gatttgggatgctcaacctgtgatataatccatgaggacaggggatttgtctttctcatttacctctgtgttcccagagtctagacttgtgccatatacaataaacatacaataaatccttgttgagataatgcaagacccaacagctaaatgaataaatgaacggcacaggctttgctatagtttgatccaggcggtatatgaaatggagcttcaacgttaaagtctcagagactcccaatgtattggcctaagggcatcctttcccttacaaggccaccatcccattccagatgcctaagtgagagaaacaaagaactttctgtttccaaacctctaaggttactgaacaaacaatgccgattaacttaccaggggaacccagtaggtatagagtgcaccaagtctcatttcgggaacaaactgagagcaggcaagaagtaagaaatagaggttgaaaaagtatttgaactggttgaacagcacctggaatggagggagacaacagagaaagacattcagggcttgtctgatgagatctggaacatttggtgggaaatg

SEQ ID NO: 13034 - DNA, 534 bp, Homo sapiens
  MAP TO AC016471.4; EXPRESSED IN BRAIN, SIGNAL = 0.58
ctgcacttttcctacctttggattctctatatattgggggagcagaaggagcagaagtatactggtgattactggtgtccatgtgtgaagaagggtacagagaagcaggctgagtggatagaaaagtgactggttgagaaactgaaacaacaggagggtgaggggctgaagtggacggggaagttctacgtataaggttcctttttcaggaaaccaaggacagtatttttccactgccctgaatagtgtgaccatattttccataggcactcaaacactgccctgttttaacaggagtttaatatattagagataagcatgatgtatagactccgcatgacccatagttaacccggaccatacactgactactcacctgtcatcagggagttgaacaagtgtttctgtggaccgaaccagtgacgtttctccacacctaccaaagggaatcgggttcccacatacacttgggaaaaaagaaagaccatgtgggtgccagatattgggggaaccagcccccattatttcaatgtg

SEQ ID NO: 13035 - DNA, 513 bp, Homo sapiens
  MAP TO AC011229.2; EXPRESSED IN PLACENTA, SIGNAL = 0.7; EXPRESSED IN BRAIN, SIGNAL = 0.76; EXPRESSED IN BONE MARROW, SIGNAL = 0.74; EXPRESSED IN LUNG, SIGNAL = 0.84; EXPRESSED IN ADULT LIVER, SIGNAL = 0.62; EXPRESSED IN FETAL LIVER, SIGNAL = 0.59
tgctagaaccataccggtcacataaacaattgcttattgatttcagaaatgtccttattctgttcttactccctccaagacaaaaatccgaagtacttccatgataattaaccaggctatgggcgtttttcctgcctccaacacctagggtttattaatgacaagttctataaaatcccaatcaatcacacttactctgatatcctcagagaccaaaacttcaactgagtaattgatcattaaaccgtgaaagagggatgtgcctactttgtcaggagccaccatgttttttcttcataactgtgtttgataaaatatgttttgtcttcttacagtgtgtgttccacagttagcttctaatgactagtaattatcagtatgcccccacaacctgctatttatggtttgtgaggattgggggagggtagtttctgtttttcactgccttatgccctatccagactgttattcttctaaggtcttctgtgtaggggcatggagaggatcatggtt

SEQ ID NO: 13036 - DNA, 521 bp, Homo sapiens
  MAP TO AC013691.3; EXPRESSED IN ADULT LIVER, SIGNAL =   1; EXPRESSED IN BONE MARROW, SIGNAL = 0.97; EXPRESSED IN PLACENTA, SIGNAL = 0.88; EXPRESSED IN FETAL LIVER, SIGNAL = 0.88; EXPRESSED IN LUNG, SIGNAL = 0.91; EXPRESSED IN BRAIN, SIGNAL = 2.8
ctcagatgtggcactgcttcttgggtgcagaggcatagaaaccttatattttctttctaatcagggttaactcagagcttagacctaagaaaacccaaaaggccttgtattccagcccctccattcaccacataatgctgactcgccagagcattccaaacaaagctggccccttcacacgcccttcctttcctagaagtctttctccctctttgcacgtatctttagaaagctcttcctggaatctgtcatgcactgagagggggaggtgctttttcatgtctatgcctttgctttgtaagtctgctatgcccttccccatcttgtgcatcagggcaaactcttattacttcttcaaatcccagccccaggtcacttcctccatgaagccttccttgtgttccgcagactgagttgattccatttctcccttccccatcccacatcactaccaccacgggtactcctgagggtaataccctggctgactcatctctccatctctactgcctggttcaggg

SEQ ID NO: 13037 - DNA, 543 bp, Homo sapiens
  MAP TO AC018780.3; EXPRESSED IN ADULT LIVER, SIGNAL = 0.63; EXPRESSED IN PLACENTA, SIGNAL = 0.54; EXPRESSED IN FETAL LIVER, SIGNAL = 0.73; EXPRESSED IN BRAIN, SIGNAL = 0.59; EXPRESSED IN BONE MARROW, SIGNAL = 0.66
ctgtcagcagtggtgttcatcactattacctgatatttatttctggaagtagaagatctgctttttaaaatatataacattatatatcacataacaggaacaatagcagccttaccattaaagggttggttctatttatgcttttctctttcattcctagacagcaaggtagaagttctataacatatcccactctaaactcacctccatttgagtgccataaagtatctcaatcttgctctcactctccaagtgccttaggttttaccttgctaatgtgaaccaatttccaaatctcaagccaccattcctttcagaactggaattatggattcgtgttcatcaatggacgtaaccttgggcgatattggaatattgggcctcagaaaacactgtaccttcctggagtttggcttcatccagaagacaatgaggtatgtcactccagtctctgccttgagatctcataaactttcagatcaaaatgtgagttgcagtgtctttttcaacctgtactaaataggcttcacctttcccactgtc

SEQ ID NO: 13038 - DNA, 575 bp, Homo sapiens
  MAP TO AC009416.2; EXPRESSED IN BONE MARROW, SIGNAL = 0.57; EXPRESSED IN LUNG, SIGNAL = 0.85; EXPRESSED IN PLACENTA, SIGNAL = 0.93; EXPRESSED IN ADULT LIVER, SIGNAL = 0.73; EXPRESSED IN FETAL LIVER, SIGNAL = 0.63; EXPRESSED IN BRAIN, SIGNAL = 0.49
tcaaatggcagtgcagaaacaatctagcttcatttccccccacagaaaaccaaaaccaaatatacagtgccaagattttcaccagcaacaacccagaagtcaaatatgaggatgagatgcatcctggggccacagagaggtgaaaaaactccaagtcaacagtgaaagagttggacttccaaatccttgaggcctctccccctcatggtgccctgcaacaagtgtgtggaaaatctttccccaactcacaatttctacactggaaaaatgtgagattgaggtggtaaatcagctttcccaccagcttggattccctggcaggagttctgtacttgcctctacccactggaagcatcatactgcctgcaaagacaaaggtgggaggcaggactaccatactcattcctggaaactgtactgtaacttggctaaagaagatgccaaatcagagtggctgttcagcagcatcacattgtagaaggtacaattcagaggtcttttgaacatgaacccctacccagccttcccacactggttggataatccctttgggatctccacatttgaaacaggca

SEQ ID NO: 13039 - DNA, 548 bp, Homo sapiens
  MAP TO AC027331.1; EXPRESSED IN LUNG, SIGNAL = 1.1; EXPRESSED IN ADULT LIVER, SIGNAL = 1.3; EXPRESSED IN FETAL LIVER, SIGNAL = 1.1; EXPRESSED IN BRAIN, SIGNAL = 1.2; EXPRESSED IN PLACENTA, SIGNAL = 1.1; EXPRESSED IN BONE MARROW, SIGNAL = 1.1
tgaggcaccttgtcagtgagttgcccaaggtcacatgcagagattaccagagacttcaaacccaagagtggctctggagcctgtatggaggctctgcagtttcactttctatagcacagggaggagattatggatgggaaagcggccagtctgatacatcaggttaggacagtcattgttgctttataagacacatcacagtttctaacttccctatctatttacttatttagacagtggagccagagttccataagtaccagttttctggtttagtggccctgggaggtagcacagatccaataccccttaagcctctggtgagtcataaggtgactgagtgaatgtcagacagccaggtggtaaggggtccccagagaaactcgaaccagcctgcacactgggaggaatgcacactggggtggagccacagaagttcatgcaatttgcagcagggagttgcctggaaccttctcttcctgtgtgggacctgggattcaaactgcgaggcgggaagctctagaggaactctggccttgtggagagtc

SEQ ID NO: 13040 - DNA, 512 bp, Homo sapiens
  MAP TO AL078591.18; EXPRESSED IN LUNG, SIGNAL = 1.2; EXPRESSED IN PLACENTA, SIGNAL = 1.1; EXPRESSED IN ADULT LIVER, SIGNAL = 1.1; EXPRESSED IN BRAIN, SIGNAL = 0.91; EXPRESSED IN BONE MARROW, SIGNAL = 1.1; EXPRESSED IN FETAL LIVER, SIGNAL = 0.79
ggtctgtaggcgacttttgccttatgtggtatcttttgggcatcattattcagactatcagtattttgggctttgaaccaatttgtttcatggatgctaacttggaagtagaaactggagctgttgtcaccatagtttatggaagcagtaccgtttttccttagagtgacaaaagggagtgtctggaatctccaatttgttcaacttctttaccctctagcttaggagaaagaacatcctcagggcatctgtgggttcataattcaggagtcaaggctgtttgatgatttctgtgagagaatctgatcattccctgtggtctccagtccatcttgagggacctgtgtctcttagttttggatgtgtccatttcctcttttaggttctgaagcactcatgaattctgactatgtgcaaggtgtagttagctattgttttaggatcactgtggatggtgcaggaacgtctcccacatttttccagatatccatgcctggactctcctttgtgga

SEQ ID NO: 13041 - DNA, 600 bp, Homo sapiens
  MAP TO AC022268.3; EXPRESSED IN BONE MARROW, SIGNAL = 0.42; EXPRESSED IN ADULT LIVER, SIGNAL = 0.55; EXPRESSED IN PLACENTA, SIGNAL = 0.52; EXPRESSED IN BRAIN, SIGNAL = 0.5
tggcagctagtgagggttggttaaagtaatcaaatctcgataatttggttctttctattaatcaagtttctctctcatgttgttattatgggtagcttattgttgttttttaaactcgaaacttttacataaaattccagatttctggcttattttgcaaatctaaattattacattttgcaaatctaaattattaaaatgtttatattaacatgaaatatcactttgaccaagatttaaagactataataacagatgtacattttctctaacctttatcttgggttataaactttatttgtaatcttattttggggatagaaatctctctaggttatgttcataattgtcatgctggggtggggggtggtgacaacaacactatcttgttagtcaattggcaaaagatctgggcaagtgctgggcaaagttccaacatcaacaaaccaaagtccatctgctgtagtttctggaagtcaggaggtaaggaggaagctgaagttctggaattcagtagatcaaactatgcatttgaaagaggaaaccaggtaagggtcaaggagtaaattagaggaaggtaacctcactgaaaggcaaaaa

SEQ ID NO: 13042 - DNA, 552 bp, Homo sapiens
  MAP TO AC010397.3; EXPRESSED IN BRAIN, SIGNAL = 0.5; EXPRESSED IN FETAL LIVER, SIGNAL = 0.53; EXPRESSED IN BONE MARROW, SIGNAL = 0.53
ttaaacgctttgtcttatgtggttttttaattgtcattttactgtttaatttctccatagagtatatgtatttttgaactcagagactctgccttttccctcatagtacacagcataatactaagctgttagaagagttcaattaatgttaattcatctgagtaaacaaacttgtatatgtatttcaagtacctctaccagtggtagttgaatctgttcatcagaagagatttcttaaatctgaatagtaaaagtgttttatattctttgctcacagaatgaaggcaggagaccttttaaaattgataatgatgatgaaccacatacttctaaaagagatgaagttgatcgagctgtgatattgtttaaaccaatggtatcagagccaattcatatacacaggaagtctccacttccaagatctaggaagacggctacaaatgatgtaagtatatgtatcagaacacatttttcatacagtaaactaactatattttaataaaacagaaaagaaaatacagctttaattgtggagcttgggaaaccaacaaa

SEQ ID NO: 13043 - DNA, 581 bp, Homo sapiens
  MAP TO AC024252.3; EXPRESSED IN PLACENTA, SIGNAL = 0.9; EXPRESSED IN FETAL LIVER, SIGNAL = 0.47; EXPRESSED IN BONE MARROW, SIGNAL = 0.53; EXPRESSED IN ADULT LIVER, SIGNAL = 0.62; EXPRESSED IN BRAIN, SIGNAL = 0.57
tcccactcacagctgacatccttcttgacatttgcattttatttagaatacacatccaaatatgttttatgttgcctctaacattcaaaagagcctctaacagtcttcctttccctatcccttccttccatttgaaagatgttttctccacatcactttctactgcattcttagactccctgaaggtaggaaacccacatttttgtcattggctcgatgtgtctttcctgaagtctatggtagctgctatttttctctagagcatatcaaccggatgctgtccatgtattccataagttatgtccgtttggctagtgacatggccagggttcctgagtacaaaattgtgacacagacaaaaatagttatacttctacagctaaatagtgaagacactctgcctggaaaaagtaagaaatttcaggtatttaccatttatttaagatacagaaaaataatttgcctaaatgtatagcaggaaaaggagataagtgtattcactaaagcaaggagactacatctggattttaaatgtgtgccctcagataggactccagtacacagtggctggattctgagtg

SEQ ID NO: 13044 - DNA, 567 bp, Homo sapiens
  MAP TO AC010162.6; EXPRESSED IN BONE MARROW, SIGNAL = 0.82; EXPRESSED IN PLACENTA, SIGNAL = 0.76; EXPRESSED IN FETAL LIVER, SIGNAL = 0.73; EXPRESSED IN BRAIN, SIGNAL = 0.73
catttagcatcatgggaaggagaaaataatctgtagcctcagtttgtattcttaacctcagatgttggcagcctgtgtcactgatgataaggcagatgagacaggagaatatgtgattcactactgctacctgtcaaccgtcttgaatgaaaaataagctggtccacagaatttttgtataccaaggataacacatgtaattatgtagtacataggtgaatgctgatgcatttggaaaataggtgtgtgtgtttctcttgtattggatgagtaggaggtatggtattttatgggtacacagtctcttggcactaaaccatcttgacttacctactacatctatgtggaaacctgtcctctttctccagttcaataaaatatttttccccttgaaattcatttttagaaagtatataaaaagtattttttttcaagtgtcagaaaccttttagcatcattgaagttaaaatgactgtccataaacttttcagaaatagtaggcattttaggctactagatttgtaaaaggtattttcatagaattataccagtgatttcaccacctga

SEQ ID NO: 13045 - DNA, 561 bp, Homo sapiens
  MAP TO AL132874.14; EXPRESSED IN PLACENTA, SIGNAL = 0.51; EXPRESSED IN ADULT LIVER, SIGNAL = 0.61; EXPRESSED IN BRAIN, SIGNAL = 0.53; EXPRESSED IN BONE MARROW, SIGNAL = 0.53
ttgagaggaggaagttagagaataacatttctaacttcaaatattcttaaaaaacaaatgtgttttgtgttcttagctcatgctggcctgatgtttcgtgatatggtaactctggaagacgctattacggtggtgtcagtcatggagtcgtcaatgcaggtaaggatattttgtgtactaatttttatcctaattacaaactttcttttttttaaaaaaggacactttattaacatatcaaaagttattaaaatgctcatattctagacttagtaattcctggaaatatatccaaaggtaaccgattaaatgaagaggaaacagtgtcctggagatatttgctgcatgggtggcattgcttttgcctattgatgtaaagtagtgcgcttcgatcgtttttttcctcaacacacgtgagagatgttcatagcccaccagtgacagtatagcttcctagagcaatgattgccaccaagaactgggggagtgaactatagaaagttgaaaaagcctcccaagtgattttcatacccagtataggggtgtaaacggcggtcttag

SEQ ID NO: 13046 - DNA, 514 bp, Homo sapiens
  MAP TO AL135998.2; EXPRESSED IN LUNG, SIGNAL = 0.84; EXPRESSED IN PLACENTA, SIGNAL =   1; EXPRESSED IN ADULT LIVER, SIGNAL = 0.99; EXPRESSED IN FETAL LIVER, SIGNAL = 0.98; EXPRESSED IN BONE MARROW, SIGNAL = 1.2; EXPRESSED IN BRAIN, SIGNAL = 0.92
tgtgaaatccagtctgtgccactggccattgggctgactgggcagcggttgctgggagtgcctatcattgtacaggcttcacaggtgagcaggctgagaaacagacataagattttaaggggagagggaatgtgggacatgacccatcatttcctccttccccaggcagagaaaaaccgactggcagccatggccaacaacctgcaaaagggcaatggtggaccaatgcgcctctatgtgggttccctgcacttcaatatcactgaagacatgctccggggcatctttgagccctttggtaaagtgagtagaagtgagagaaacctctgaagggaattggaagaagtggggagggtgagtgtttgagtgtacttctctgttgtgcctggccgtgattaacttgctgcatacgtcatagtgggcatatgagtctatgctgtgaaagtttggctccatctctgttcatgtgcttggtggacaaataagttagacacaaatcaaataataggccagg

SEQ ID NO: 13047 - DNA, 592 bp, Homo sapiens
  MAP TO AL121988.10; EXPRESSED IN ADULT LIVER, SIGNAL = 0.82; EXPRESSED IN BONE MARROW, SIGNAL = 0.67; EXPRESSED IN LUNG, SIGNAL = 1.1; EXPRESSED IN PLACENTA, SIGNAL = 0.67; EXPRESSED IN FETAL LIVER, SIGNAL = 0.83; EXPRESSED IN BRAIN, SIGNAL = 0.64
cggggaggtagaagaagacctggtccgtgtaagggtctgaggaggtgccctgggtcgggggtgcgtcttggccttgccgtgccctcatcccccggctgaggcagcgacacagcaggtgcaccaactccagcaggttaagcaccagggagatgagtccaaccaccaacatgaagatgatgaagatggtcttctccgtggggcgagagacaaagcagtccacgaggtaggggcagggtgctcgctggcacacaaacacgggctccatggtccagccgtacaggcgccactggccatagaggaagcctgcctctagcacactcttgcagagcacactggcgacataggtgcccatcagtgctccgcggatgcgcaggcgaccatcttctgccaccgagatcttggccatctgacgctctacggccgccagcgcccgctccacctgtgggtccttggccggcagtgcccgcagctccccctccttctgccgcagccgctcttctcgccgagacaggtaaatgacatggcccaggtagaccagggtgggtgtgctgacgaagaggaactgcagcacccagtagcggatgtgggagat

SEQ ID NO: 13048 - DNA, 520 bp, Homo sapiens
  MAP TO AC021769.3; EXPRESSED IN ADULT LIVER, SIGNAL = 0.76; EXPRESSED IN BONE MARROW, SIGNAL = 0.78; EXPRESSED IN LUNG, SIGNAL = 0.88; EXPRESSED IN PLACENTA, SIGNAL = 1.2; EXPRESSED IN FETAL LIVER, SIGNAL = 0.66; EXPRESSED IN BRAIN, SIGNAL =   1
ggctgacacagggaagagtcaccaaaagcacctccctataaaacatgcccaccagtgccatgagagtttaccactgccatgggaacaccaggaagctaccctcctccctcccttcacttgggcacaacccagaagttaccacacttcatctagaaatttctaaataacccatgccttaattttcatgtaattaacagcaggtagaagtatgaccgcagaacttgccttgagctgctactctttacacactgcctatagggtagccctgctctgcaggagcagtcacagagctataacactgctgcctcaataaagctgttttcttctactaccagcttgctcctgaattatttcgtgagcaaagccaagaaccttcccaggctaagccccaatgtggagattcgcctgccctgtaccattaatacccctgtgtctgatgtgaggctgacttggtaggtagagtaaggctggagagcacacacagaactgtcctaggttgggttctcccagaagctgatgc

SEQ ID NO: 13049 - DNA, 549 bp, Homo sapiens
  MAP TO AC013799.3; EXPRESSED IN PLACENTA, SIGNAL = 1.6; EXPRESSED IN ADULT LIVER, SIGNAL = 1.5; EXPRESSED IN FETAL LIVER, SIGNAL = 1.5; EXPRESSED IN BONE MARROW, SIGNAL = 1.6; EXPRESSED IN LUNG, SIGNAL = 1.5; EXPRESSED IN BRAIN, SIGNAL = 1.5
caagaaagctggagggattgaacatttaattgattctgcagttctataacccttatattcagacccagacaatgatccacaaccattaaaactggctaatacctttccttcctatcctaaattgagcattaaaagttttcactttgtctattactctatatagcctctaattttgtcagaagcatcagaccaaagcacaatttctccttcatcaccactgtcaccatactaagttgccaaaggtactctaactcctacaacttctccatttactttactttccatactgctatcactgtacattttataagcatgatgttctaagtcatatattaccagggtcccatttgctctgaccggaagggtatctatgcatttttgaaatatatgaacaatccaattccatatttaaattataaaaatatatttcttgggtctactcctggtatcaatgtatcagaactctggcaagaaaatacgtgcaagctcaaaaggggtgattaaatctagtttaataaaaggacaattacgagaatgttggcaaagtga

SEQ ID NO: 13050 - DNA, 596 bp, Homo sapiens
  MAP TO AC021361.4; EXPRESSED IN BONE MARROW, SIGNAL = 0.6; EXPRESSED IN PLACENTA, SIGNAL = 0.74; EXPRESSED IN ADULT LIVER, SIGNAL = 0.57; EXPRESSED IN FETAL LIVER, SIGNAL = 0.65; EXPRESSED IN BRAIN, SIGNAL = 0.62
gttttggtggaaagactggcattgctgtatgtttttataatttttttttatgccaggcttaatagaagatacctggactcttaaatttgcttttacattcaatctgatacatgttgttttatctgaagtatacaaagaaaataggtcctcatatagacaagtattttaggaggagaggaccttatggaatccctgaaagaagaccccagggccttcaaagcacactttagaaatgttgattaacccacagtgggcaataagtatttactgaatttggagaagaatgaaataaaccctgacataggaggaagaagagtcacagagacgtgattgtaaaatttagttaatgctaacataaaagcagctctccttcttcttctcttcctccttttcctcctagtcctcttccttctcctcctcctcctcctcctcctcctcttcttcttcttcctcctcctcctccttcttctttctgtaggttgttctttatggtacagtttatcatctgggaggaaattaatgtctctatttttccccctttatctaatcatttgatggttttattacacttacatgggcaaagatactggtgaaca

SEQ ID NO: 13051 - DNA, 558 bp, Homo sapiens
  MAP TO AC016549.4; EXPRESSED IN PLACENTA, SIGNAL = 0.48; EXPRESSED IN BONE MARROW, SIGNAL = 0.43; EXPRESSED IN BRAIN, SIGNAL = 0.46
cccagatagccttcaagcagagttttttttagtctgctgtaagttaaaaaatgagtgtatatataataccactttgtgaggaaggaaatagaatgtctcaggttcaagaaatttggaagctcttatgaaaaatcatattttcatacggagagtgcagtgatcacacaacctcggagcactcagctcactccggggcagggtggcaggaacccacctggaggacttcccagctgtacctgaaggcaccatggctcacactggctgacctgtcctctcttcctctgttccccccagctctctggtggctgtgagctgacagtggtgatccatgacttcaccgcttgcaacagcaacgagctgaccatccgacggggccagaccgtggaagttctggagcggccgcatgacaagcctgactggtgtctggtgcggacaactgaccgctccccagcggcagaaggcctggtcccctgtggttcactgtgcatcgcccactccagaagtagcatggaaatggagggcatcttcaaccacaaaggtaggaatcagtggggcatg

SEQ ID NO: 13052 - DNA, 593 bp, Homo sapiens
  MAP TO AC018421.3; EXPRESSED IN PLACENTA, SIGNAL = 0.74; EXPRESSED IN ADULT LIVER, SIGNAL = 0.98; EXPRESSED IN FETAL LIVER, SIGNAL = 1.7; EXPRESSED IN BRAIN, SIGNAL = 1.7; EXPRESSED IN LUNG, SIGNAL =   1; EXPRESSED IN BONE MARROW, SIGNAL = 2.2
aaacgactgtgtgatgggttcatgtattgactatactacactcttaattgttattttagggtgtacttcttctacttattaaaaaaagttaactgtgaacagcctcaggcagacccttcaggaggtatctagaagaaggcattgtgatcataggagatgacagctccatgtgtggcattgcccctgaagaccttccagtgggacaagatgcgggagagcttgaagacagtgatgcggatgatcctgaccctgagtaggcctaggctaaagcgtgtgtctgtgtcttagtttttaacaaaaaaagttgaaaaagtaaaaaataaaataaaatgttttaaaaatagaaaaaggcttatagaaagatataaagaaaaaatattatgtataactgtacaatgtgtttgtgttttacatcttattaccaaagaatgaaaaagttaaaataaattgaaaagttaaaagtaaaaaagttacagtaatctaaggttaatttattattgagaaagtaattttttaaataaatttagtgcaacctaaatagtgtacagtatttattaagtctacagtagtgtacactaacgtccaaggcattc

SEQ ID NO: 13053 - DNA, 557 bp, Homo sapiens
  MAP TO AC027279.1; EXPRESSED IN ADULT LIVER, SIGNAL = 0.71; EXPRESSED IN BRAIN, SIGNAL = 1.1; EXPRESSED IN PLACENTA, SIGNAL =   1; EXPRESSED IN FETAL LIVER, SIGNAL = 0.56; EXPRESSED IN BONE MARROW, SIGNAL = 0.53
taaggtcccagccacctatggttctttggacctgtgattttcgctgaccccgaatgactggaggaactgctgcctgcatccccaacccagccctccttgtcagtcacgtagaaagcagttattgtttccaagttccctgcccttgttaaatgtcagctttgagtgaaaatgttcctaattttactcagagtgcaaagaacatccaggtcaggtacctgacctgcttgattcatgtcttggaaacactcctttgtctttcagagaaagtaaagagtgatggagacagagagagaaagtgtgacctactttttattatcagcaccatttcatctgcaaaacacgacttttctcttcttattacgctgagcatgaaaataaaatgttttccaaaagacctggctttggctgttgtgaggaaggccagggacttgttcaaaactctgatgagctcgatgagcaaatgattccaatttttaaaaactgtaattgactttcaaactgctctcactgtccacacataatatgtggtacttttctgcaaataccagcagcaaggt

SEQ ID NO: 13054 - DNA, 568 bp, Homo sapiens
  MAP TO AC010971.3; EXPRESSED IN LUNG, SIGNAL =   1; EXPRESSED IN PLACENTA, SIGNAL = 0.87; EXPRESSED IN ADULT LIVER, SIGNAL = 0.97; EXPRESSED IN FETAL LIVER, SIGNAL = 1.2; EXPRESSED IN BRAIN, SIGNAL =   1; EXPRESSED IN BONE MARROW, SIGNAL =   1
ctttcaagggtgtggctttcccgttccacctccgcaggcctttatgcaggtcctgactgatatgtgctcacacttgtgtctgtgaatggctctggtaagaattagatggtgactgagtggaaacagacccgagacttctctaggctaaaggaagcagactatgtatccatcttgtttgtaactgcagaattgcctatacatctagtgttgtctagtgttgtcatggctgcagtctttgcagttttcagtgcatctcatccatttgctgagcatacttctctgatgtaatggtttcgctggggttcagaaagctgtagtggatcagactggcagcaggccaccaaacagtgaccatgacctttttttggtgcaagtttagctttgggacttcttctaggtccatctactgagctggtaattgttggttgtcgtgcaaaatccactttttgtcccacgaaataatctgagaaatagttcgttgtttatgtgtacaataagaaaagacgacacttgaaaatgatgtttttctttaatttttctcagctcatgaggcacccaacttatcgag

SEQ ID NO: 13055 - DNA, 547 bp, Homo sapiens
  MAP TO AC010721.2; EXPRESSED IN LUNG, SIGNAL = 0.98; EXPRESSED IN ADULT LIVER, SIGNAL = 0.95; EXPRESSED IN BRAIN, SIGNAL = 0.84; EXPRESSED IN PLACENTA, SIGNAL = 0.94; EXPRESSED IN FETAL LIVER, SIGNAL = 0.94; EXPRESSED IN BONE MARROW, SIGNAL = 0.8
ggagtgagaagacaggccacagtggtgctaccgacctgatttaggttagaaaacagtaaagggaaatatgacacaaaaagactgtttcagaggctaaagaacaacaaaatacatttactaccttacttttcatccaaaatagaagacaatgaattttcctttacatagtatattgttgtggaataggaataagaacatgcttggcagatgtctgagtgatggctatcagccatgggaactattggaaaagaataaaagaacaaacgcttcagaaggcaaagttaaagccttatatttcaagaatcatagaaccatagtcctggctaaagggcggttgagtacagtggtgtgacctgtgctattcacaattcaaaggagtacagttaacctatgtttgcagctacctgtccaagttggattttagatattttttcactttaattatcaagatataataatctcttattacttgagctaagaacattctcttcttgaacaaaattggaatgctttagtaagggaagaaggatagtagctgttggggagg

SEQ ID NO: 13056 - DNA, 572 bp, Homo sapiens
  MAP TO AC015599.3; EXPRESSED IN PLACENTA, SIGNAL = 0.79; EXPRESSED IN FETAL LIVER, SIGNAL = 0.61; EXPRESSED IN BONE MARROW, SIGNAL = 0.68; EXPRESSED IN ADULT LIVER, SIGNAL = 0.7; EXPRESSED IN BRAIN, SIGNAL = 0.61
tttgctggttttctgggttcccacagcaccttgtacataactttttgtagcacttaacatatttgctgttacttttgatgtctatttggttctccccagacttgtaaccctggcagaccagaggcctgccttcatcctgaaatcctctgcccctgtcatggtgcctgacacagaagtgcctggtattcagaaaaaaaaaatgtgttgaaaaataagtaaacatttcatatgctttgcatcaaaaaaccaaatgaatagttagcactttatttgtacttatgttttttcttaaaattctgaatgtcaaattgtggtatcatgtattctatatggcattctcaggaaaagtttctcaatgataatgaaatcggtgattgagatctcccttgcctctcactagttttatgaaaatacttttagttatgcaaattttaggctgacaacaggcaatagatttctccagcttcatggtgcacatttttgaagattcaattgcatttagagatacatcaaacataaactttaaatagtgtcttttcaagatgatggcgtggatggtttcccttgtgaaa

SEQ ID NO: 13057 - DNA, 511 bp, Homo sapiens
  MAP TO AC015570.5; EXPRESSED IN ADULT LIVER, SIGNAL = 0.95; EXPRESSED IN BRAIN, SIGNAL = 0.89; EXPRESSED IN LUNG, SIGNAL = 0.84; EXPRESSED IN PLACENTA, SIGNAL = 1.1; EXPRESSED IN FETAL LIVER, SIGNAL =   1; EXPRESSED IN BONE MARROW, SIGNAL = 0.87
gcaaccacaaaattgatactcctggtacttccatgttcatttgtgatcatgcacagagcaacaaaaactttgacttgcttaatgtgtacatccccagctgagggtcaaacaaggcaactctctgccttcttgtttcagctctcctactacaaacgactgtagttttcatcatatatttagtgccatgatgtacctatttttgtgttatttgttgctgtcttcaccaattaaaaatggtccccaatcatagtgctgaagtgctatctagtattcctaagcacaagacggctgtgatattccttatgcagaaaaatgtgttagataagctttattccaatgtgagttatactgctatttgctgtgaattcaatgttaattaatccatattctatattaaataagatgtctttaaacagaaatgtttataagacaaggttatgtatttattggttagtaaaagtgttataaccagagactcataggaacctaaccctggattttccctaggagc

SEQ ID NO: 13058 - DNA, 598 bp, Homo sapiens
  MAP TO AL096800.20; EXPRESSED IN PLACENTA, SIGNAL = 0.72; EXPRESSED IN BRAIN, SIGNAL = 0.53; EXPRESSED IN FETAL LIVER, SIGNAL = 0.53; EXPRESSED IN BONE MARROW, SIGNAL = 0.65
tagcctctggctgtcaatccacaatatagatcatgcacaacgagagcccttaagcagcgacactcttcaagtgtcaatcgacactcaaagactggctccccaaaaggctctgtattccacagccatggaattcatccagggagaggctcggctgggcgacaccatggaggccgatgaccatatgggtggcatccctgctcagaatagtaaaggggaaaggcttctgctttatattggcatcattgacattctacagtcttacacgtttcttaagaagttggagcactcttggaaagccgtggtacatgatggggacgctgtctcagtgcatcgcccaggcttctacgctgaacggttccagcacttcatgtgcaacgcagtatttaagaagatccccttgaagccttctccttccaaaaagtttcggtctggcttatctttctctctgcatacgggctccagtggcaactcctgcattacttaccagccattggtctctgaggaacacaagtcacaagtgataaaggtgcaagtggagccaggtgttcaccttggtcgttctgatgttttacctcagacctcagaatccacctttgga

SEQ ID NO: 13059 - DNA, 512 bp, Homo sapiens
  MAP TO AC010503.3; EXPRESSED IN LUNG, SIGNAL = 0.91; EXPRESSED IN PLACENTA, SIGNAL = 0.62; EXPRESSED IN FETAL LIVER, SIGNAL = 0.69; EXPRESSED IN ADULT LIVER, SIGNAL = 0.68; EXPRESSED IN BRAIN, SIGNAL = 1.2; EXPRESSED IN BONE MARROW, SIGNAL = 0.58
tgggagagtccaatacctggaagggttccccaggattcccagggccaaggtgctcctcacctcataactgcctttctctaactatagcaggtcaactgagccagccccagggaaggggaaggggtgtcctgtgggtaaatcccagaggggagcagggaaagaggaacgcgctgcccacagacctcgtagacggccaggtcgatgcccgcataggggatgatgcccagcacgttggggaggtagccgcggtagaaggcacggggcccctccctctccaggatacgcctggcgcagtccagcagccccttatactggcccgtccggcgcaaggtcagccgcgtcttcagcacctggggagaacctggttatccctggaaaagctgtcccaccaaatcgctacatccaggaatgaagacacctagaaatagctactcctgaaaacagatgccctgagaacaaccgaattttaaaaaccacctactctagaatcttctgctatccccaaatcccta

SEQ ID NO: 13060 - DNA, 521 bp, Homo sapiens
  MAP TO AC021239.3; EXPRESSED IN PLACENTA, SIGNAL =   1; EXPRESSED IN LUNG, SIGNAL =   1; EXPRESSED IN FETAL LIVER, SIGNAL = 1.5; EXPRESSED IN ADULT LIVER, SIGNAL = 0.93; EXPRESSED IN BRAIN, SIGNAL = 1.2; EXPRESSED IN BONE MARROW, SIGNAL = 1.2
ttcttcactggcccattttctctgtcctttgttgtctcattttcctctgcctgactcttacatgttaatgcttcacagggctctgttctgctagcctcactgtcttcacctgtattgcaaatgctcaagtagaaagacaagtcccttagggaagcagagaaaaagctcttggtggaagaggataggccatggagtttatctttttgtgtgtgtgtgtgtgtgtgtgttacacaagaatcaataatactgcttttcacctcttactagtgatcgggtgaagctacttacttctatgcttcaaataactcaaatgctgactcctaaacctcctgaagttcctcagactttttatctgagcttcagaattgtacatctaaatattaagtgcatggtcacatttaaatgtctcaaaaataccaaatactgaacatatcccaagacaaacataattcagccctattctgtcttactgtatactgtatctctttgaatggtgtgataccatctctgaccgaatgctc

SEQ ID NO: 13061 - DNA, 507 bp, Homo sapiens
  MAP TO AC013657.3; EXPRESSED IN PLACENTA, SIGNAL = 0.65; EXPRESSED IN FETAL LIVER, SIGNAL = 0.45; EXPRESSED IN ADULT LIVER, SIGNAL = 0.84; EXPRESSED IN BRAIN, SIGNAL = 0.53; EXPRESSED IN BONE MARROW, SIGNAL = 0.49
aagcggggatattgtcttcccaagaacttacttatcagtataccactgcacagtagacactcaataaacgtagctatcgttactaaacttgggtaaaacctaccttcattcaaaatgtagaaatagaatacaacccttatgcagaacataaaaatcactgcttgttttacaagaaaagtagtatcacatctgcccaaaattgatcacacagaaagatgaatgtgtggcctcttttgatacatgttgcttgtcatttagatctattgcttttgcttattgaacttgggagcatattttctgttgcttcgagtaactccagtaattgtctggcttataataatgcactggctaaaacctaaactgacaggaagaaagaaaggtgaaacacttgtcaatcaacaaacattcaacatggtgctcgattccacaatgaacacaagaaatatacaaatgattcttgacttcatgaagctcatcgtctgcatgggtaggcaagggaaaaggcac

SEQ ID NO: 13062 - DNA, 547 bp, Homo sapiens
  MAP TO AC015805.3; EXPRESSED IN PLACENTA, SIGNAL = 0.51; EXPRESSED IN BONE MARROW, SIGNAL = 0.56; EXPRESSED IN FETAL LIVER, SIGNAL = 0.73; EXPRESSED IN BRAIN, SIGNAL = 0.57
gggattgttgcaagtgtgtgtgggggaagtgacagagtgcaagtgagattgaggtgtacatgacgtttcgcattttcttgacttttggctttgactgctttgtcatcagactccattctgatttaggtaaaggtgagtttctacatagtttttatagtggttttatgatgagtttgcttcctgcttcgtcctggccctaatcccacctcacctgcatctcatttatgtgtcttgtgctttgtgttgttgttgttgttgttgttgttaaaattactaatgtgggtttggttttcccttgagttataaagacttgagcatgaatccatattgggcagaggagacaaaacagcaaggcagctatgtctcgtctttgtttctggatgctcttaggtgccatggagaccgcctcagttccctgaaaataaaaaacaggcttgctcacaagctagttctcttaattcagacttcaacctgtctgctgcctcctatgaggacccatcctatggtatgggaaaagccagttatatcacgttgcatcattgcttct

SEQ ID NO: 13063 - DNA, 571 bp, Homo sapiens
  MAP TO AC015999.3; EXPRESSED IN BONE MARROW, SIGNAL = 0.9; EXPRESSED IN PLACENTA, SIGNAL =   1; EXPRESSED IN ADULT LIVER, SIGNAL = 1.4; EXPRESSED IN BRAIN, SIGNAL = 0.9; EXPRESSED IN LUNG, SIGNAL = 1.2; EXPRESSED IN FETAL LIVER, SIGNAL = 0.87
aaattgttccttcagccaccaaagttatatgatggtttctgaacagcgtttacttttgtgacagtttcatctcactctgttgtccaaactgataaagtccagaagtctagaaacagcaagggactcccttcctctgttatatgtaagctgacaagaggcagacaaacacgttctgaagttttgtgcatgctgcgttttctctccttgctgcaacaagaaaagcctttgttttccaacctggcaacctttgaagaagtgactcagacatcttcatggcctctaaaggtaagagtaaatataaccaactaataactttttcttatattaagactaaaaatatacaattgtggatgtgttacaaccagttagattggtactttaaaagctgtcatttgtcacttttgaacattgtgattttaaaatcttaactcccaggagcatgttgagttacatgtaaaaacactttatctgacagactgtaaaagttcagatgtaaacgatgttttagttatcatgaatacaaacatagtgaattaataagaaaagctgcatagcaaagtttagaatggga

SEQ ID NO: 13064 - DNA, 555 bp, Homo sapiens
  MAP TO AC012241.4; EXPRESSED IN PLACENTA, SIGNAL = 0.81; EXPRESSED IN FETAL LIVER, SIGNAL = 0.59; EXPRESSED IN ADULT LIVER, SIGNAL = 0.61; EXPRESSED IN BRAIN, SIGNAL = 0.48; EXPRESSED IN BONE MARROW, SIGNAL = 0.53
agaattcaacccagtcgtggtttcctaggcaacaagcacagatagaaccactggggggaaaaaaaatgaaaacaagaaaaagcatcgcagcatttccagtaggcttaagaaatgcattttaattgtcaaaatgtcacagacaacaatattgaaaatcatttccttggaaatgattcaaagcagaatgccattttcattacagcaaacgaggtgtggaaaaagagaaaaattagattcccttcctttgctctgaattaagtagggatggtgatcaatcttatttgattttacaaaatgtatctacattagtacggatttctaatatgcctcgttagttttctctgcaaacattaccatacattgaatcaacataaaaagaagagtcatccaggatgacgggctagcacaggacgaagcatgtggctgaagatcatctgctgcaaagacaggctcgcacctgctcaggtcttaattcacagggtaaaccacacacttcaaaacaccgattcaaacagaacaaggctgtccacattcacgcatggctctagtttcctc

SEQ ID NO: 13065 - DNA, 548 bp, Homo sapiens
  MAP TO AC021774.3; EXPRESSED IN BONE MARROW, SIGNAL = 1.3; EXPRESSED IN LUNG, SIGNAL = 1.2; EXPRESSED IN PLACENTA, SIGNAL = 1.4; EXPRESSED IN ADULT LIVER, SIGNAL = 1.2; EXPRESSED IN BRAIN, SIGNAL =   1; EXPRESSED IN FETAL LIVER, SIGNAL = 0.99
ggctgggttaagagttgcacaagtgcgcagtcgcagcactggctcttcaagtaatagagcctgatatttaagtaaacggttgtctgacagccacaagtctcctttagcagtgagtatgccgttcacatcatgagatgtccacacagaaagatctcttccctgtattattttaactgcttcagatactaagactgctactgctaccattacccataaacaatgaggccaaccctttgccactacatcaatttccttactcaggtataccacgggttgcaagctcatccctcagacctgcgtaaggactcctagagctattcctgtttcttctgtgacatataaagaaaagtcttgccccgttggcaagcttacaactggggtttgggttagggccttctttagggcctggaaagccacttctgtttcaggtgtccatcttactatatgggtattggctttctgagtttccttaattaatgtacataatggcctggctatttcactgtatctgggaatccatattcggcagaaggctgttatgccaagga

SEQ ID NO: 13066 - DNA, 525 bp, Homo sapiens
  MAP TO AC015756.4; EXPRESSED IN ADULT LIVER, SIGNAL = 1.1; EXPRESSED IN BRAIN, SIGNAL = 0.46
ggtcccagcgtcaataagtcaaaccgcagactctgacagctgagtgaatagcagaggccagagtccacttgaagtgttcacactctcagaggccaagtttagatcttatctgcctgagattccttttaacactgatttgtcatagcaggtagctgacagcatctactcctgaagaccggaaacatggcttgtaccatccaaaaggcagaagcacttgacggggctcatttgatgcagatcctctggtatgatgaggaagagtctctctacccagctgtatggttgagagacaactgtccgtgctctgattgctacctggattccgcaaaagcacggaaacttctagtggaagctcttgatgtgaacattggaattaaaggcttgatatttgacagaaaaaaggtaattatctctaaattatgtctcccttctttctcaagttcaataatggggctagtcaacaataatttagataactcttttttatttggtcacgcatatataaccgcatatgaacccacgttt

SEQ ID NO: 13067 - DNA, 580 bp, Homo sapiens
  MAP TO AC019278.3; EXPRESSED IN BONE MARROW, SIGNAL = 0.48; EXPRESSED IN ADULT LIVER, SIGNAL = 0.57; EXPRESSED IN BRAIN, SIGNAL = 0.51; EXPRESSED IN PLACENTA, SIGNAL = 0.53
tctgaggtgtggcagttttgtgggaccgaatccttaacttgtgggatgtggctacagttccaagtagatcgtgtcaattgaattgtgggacatctagttggtgtctacaggcaattggggaattgcttgttatgaaaaacacgtacacttgggtctcagaatgtcagaagtgttgtgaaggtaaaggaggttttgtttgtttgtttgttttcatttagtttgttaaatagatgcccccagagtcttcctagtgcttgtcctacaccaaccccacctcctgccattccccaaggaacccctgagtcttctcatagtttagtaactaaaagatgaatgcccagctaaatgaggggacttagtaacagctgtagccttaacaccagtgtccatcctgactcacggatgccaactcccaccaattatttcaagtatgagatgttttacctttcatcacgtactaatgagagtcagtgtagccacagaaaaaggcttaagaaagttaacatcctgattgtgacgctgcaagtcaggtttaaaactggaagcacggcagtgctggtccaatgtctcaggctgatca

SEQ ID NO: 13068 - DNA, 516 bp, Homo sapiens
  MAP TO AC015662.4; EXPRESSED IN BONE MARROW, SIGNAL = 1.9; EXPRESSED IN PLACENTA, SIGNAL = 0.64; EXPRESSED IN ADULT LIVER, SIGNAL = 0.7; EXPRESSED IN BRAIN, SIGNAL = 1.5; EXPRESSED IN LUNG, SIGNAL =   1; EXPRESSED IN FETAL LIVER, SIGNAL = 1.5
gaccagtggaccaaaagctcttcaatatacttgtgaggcattattaacaatacaataataaagagtgaaaatcatataacttctgtgaaaccacaatctttgttctgtctgaattcatttctgccagctcacaaacatttgacttttgttgaatttggaaaatacggtttcttgtcctttggtcctagattaagaagaaacaacaagatgtgcttggtttcctagaagccaacaaaataggatttgaagaaaaagatattgcagccaatgaagagaatcggaagtggatgagagaaaatgtacctgaaaatagtcgaccagccacaggttaccccctgccacctcagattttcaatgaaagccagtatcgcggggtaagaaaacaatttaaattcttgtttattgtaatagattgccccaaatctatccattattttcacctctgcctccaagcctgcatatatatagtcatatctcttgcatatagtcatttgtcctttccatccactcaaaggc

SEQ ID NO: 13069 - DNA, 557 bp, Homo sapiens
  MAP TO AC008998.2; EXPRESSED IN PLACENTA, SIGNAL = 1.1; EXPRESSED IN BONE MARROW, SIGNAL = 1.1; EXPRESSED IN ADULT LIVER, SIGNAL = 1.1; EXPRESSED IN BRAIN, SIGNAL = 2.7; EXPRESSED IN LUNG, SIGNAL = 1.2; EXPRESSED IN FETAL LIVER, SIGNAL =   1
tgggaagtagaccacggaaccctgagaagtggaccatggaaccctgggaggtggaccatggaaccctgggaaatagaccatggagacctgggggatgagccatggaacccaggacttgagagatggagatcccgatcctagaaggtctgtttgccaggccgactccttgtggcagtggggccacccatggaaggaacactggtctaggttgcaccttacccacgtgcacctccagggcttcagggtgggagcctcgccaggtcacctccacgcgctgcagacggcccccctggaagccgaggctctccactatgggctgagtctgggccaggaacaagacagcacagagaggcttgtgagaacagcacccctgggcccaggcaggccctctgtgactgccatgtcccacgcccagctgatacccagttcccctgggtatcaggggtgggcttgatgtcagggatgttgttttctgctttcatgggctcctccatttgccttaaccccatcctttagctccagaagtaggaacatgatccagaccaagccagtgaatt

SEQ ID NO: 13070 - DNA, 509 bp, Homo sapiens
  MAP TO AL133227.7; EXPRESSED IN LUNG, SIGNAL = 0.89; EXPRESSED IN FETAL LIVER, SIGNAL = 0.86; EXPRESSED IN PLACENTA, SIGNAL = 0.89; EXPRESSED IN ADULT LIVER, SIGNAL = 0.84; EXPRESSED IN BRAIN, SIGNAL = 0.96; EXPRESSED IN BONE MARROW, SIGNAL = 0.89
cgaagtccttggaacgagaccttagtcatactcactgggacaagagcttggttccactttccacgagccttgtcagcacaatgatgccatccatgttgatgaactcagtagcgaaagtcacgtcggcagagagcttggccagctccttcatggcatccagccgggtctccatgttggatgactgggtcctctccatcagctggcgtgcagcccgggactaggaggccagggacaagatatgtgccatctgctccttggagcaggttactactctgtggatagctcacagaggcccttctgtggacatccaaacctgaggcagaactagttttttcacacagcttaggagttgctaaataaatgtttgtggaatcaatcagggagttattagtatgccaaaaccaatctgtagttatctgcatcttttctgtaccgctttggcctatggatttaaaaaattcctaccaagggaatactggaggcatctgggaggcccactaacgatggta

SEQ ID NO: 13071 - DNA, 546 bp, Homo sapiens
  MAP TO AC026273.2; EXPRESSED IN BRAIN, SIGNAL = 0.6
taccctttttcaccacaggcctcaaagcaatccaaaagtccacttccagattccaaaaaatgagtgtttcaaacctgctctgtgaaaaggaacgtttaactctgtgacttgaatgctaacacccaaaagatgtttctgagaatgcttctgtctaggttttatatgaagatattcccgtttccaaggaactcgtcaaagctttccaaatatccacatgcagattctacaaaaagagtgtttcaaaactgctctatgaaaagaaaggttcagctctgttagctgagcacacacatcacaaactagtttatgagaatgcttctgccaagtttttattcgaggatattccctttctcaccattggcctgaatgcgatccaaatgttcacttccagattccacaaaaagagtgtttcaaacctgctccatgaaacggaatgttcaactctgtgacttgaatgcaaacatcccaaagatgtttctgagaatgcttctgtctagattttatatgaagatatacccgtttccaacgaagtcctcaaagctgtcc

SEQ ID NO: 13072 - DNA, 513 bp, Homo sapiens
  MAP TO AC022050.2; EXPRESSED IN ADULT LIVER, SIGNAL = 0.74; EXPRESSED IN BONE MARROW, SIGNAL = 0.68; EXPRESSED IN BRAIN, SIGNAL = 0.62; EXPRESSED IN PLACENTA, SIGNAL = 0.73; EXPRESSED IN FETAL LIVER, SIGNAL = 0.54
gatctcacgctgttccttcctgtttgtccagtgacattaggaacaacaagcacaactgattataagcattattttgaggaaatgttcaaagatatcatgaacattgtcacccagaccctcatagacatgatcactcagaaccttgcctcttatatgtgtctgattagcagtatccagtggtggtattttgcatatctgtattgctgcattataccatggactgtcagtgcactctttactactagaaatagattaatgttttttaaatctaattgaattggagaaccaattgcagaaactccacagccaatttacaaatcaatacttaaaattcagttcctctagaaccactcccagtatcaaaatttgtattagttggggttctcagtaaaaggtagcaaaaatgatgcatatatgtatagagagacatttattttaaggaattgtctcatgtgattatggaggctggcaagtccaaaatatgcaaagtggtccagggaaaagcagttcttg

SEQ ID NO: 13073 - DNA, 521 bp, Homo sapiens
  MAP TO AC018420.3; EXPRESSED IN ADULT LIVER, SIGNAL = 0.58; EXPRESSED IN BRAIN, SIGNAL = 0.48; EXPRESSED IN BONE MARROW, SIGNAL = 0.51; EXPRESSED IN PLACENTA, SIGNAL = 0.47
gaaatctttgcctaacccaggttaaaatactctataagtttcagaattttaggatataaatctgcactagttaggggttctccaaagaaacagaaccaattatagatattatttgtatatatacatataattgtacctatacatatacaataatcttgtatacatataattgatatgcaattctatgtatatatacatatatgtatacatatacctacacacatatacatatacaattatatatatacacacacacctatatatctatatgtatatatagagagagaaagagcgagagagaaccaggaagccagtggtgtgattcaacttgagtttgaaggtttggtggttggggatggtggggagggtgatggtgtaagtcctggtcctagttcaaaggctcaagaatgagaagccccatgtttgaaagcagaaaaagatgaatgctcaactcaaagagaagagagtaaatgtacctttcctctgtctttttgttctattcaagtccacaacagattggc

SEQ ID NO: 13074 - DNA, 501 bp, Homo sapiens
  MAP TO AC015999.3; EXPRESSED IN PLACENTA, SIGNAL = 0.72; EXPRESSED IN FETAL LIVER, SIGNAL = 0.81; EXPRESSED IN BRAIN, SIGNAL = 0.56; EXPRESSED IN ADULT LIVER, SIGNAL = 0.71; EXPRESSED IN BONE MARROW, SIGNAL = 1.2
agggtaaggctattcaccgcatactatcatccaaatagaagtggatgtgcaaccacagatatttcattgaaaaatctcagaaagagaaaagcgtattaaacatcacagatacagatgtctacgctgaaatgtcaacttatagatagatggcataaccctaaaaaggttgacaattccatttttggtgcagttacaaatcatttcacttgtttgtatttcaggacctccaggatatagtggctaccctgggccccaggtcagctacccacccccaccagccggccattcaggtcctggcccagctggctttcctgtcccaaatcagccagtgtataatcagccagtatataatcagccagttggagctgcaggggtaccatggatgccagcgccacagcctccattaaactgtccacctggattagaatatttaagtcaggtaatttcaaagacacaaaatactcataaaaaacagaactgtgcttccagcttgcttaacca

SEQ ID NO: 13075 - DNA, 544 bp, Homo sapiens
  MAP TO AC011778.3; EXPRESSED IN ADULT LIVER, SIGNAL = 0.89; EXPRESSED IN LUNG, SIGNAL = 0.84; EXPRESSED IN BRAIN, SIGNAL = 0.87; EXPRESSED IN BONE MARROW, SIGNAL =   1; EXPRESSED IN PLACENTA, SIGNAL = 0.82; EXPRESSED IN FETAL LIVER, SIGNAL = 0.92
ggcatgggacaaagaaaaagtgaaatgcatgtgactcatataaagtaactgacttcaaaagaaatatattttttaaaaacaatgtccttacggaaaatacattgctatcttgatttggtccacagggtgcctgttggtgatctctagtctgtagtaatgtataatccagagaacagaagtagaatgaaattgaagaaaaccattgtttcacaagtaagagtttcttaatcatctcttcgtgagagatgttttattaaatggtggaagcagaaactgaagcgtaagatttaaggagaaagtgagtgatcaggaagcaaaaaccttgtctgattttatagtaatgtaaaacttgaaaaaactctgtcatgtagtcgtgaaaacagccatgagaaggttatggctggtcacagacaacaggggaatgatgaggctaaatactgtgtccccattggagacaacaaagagcttcatgaggctaatgcaacagtcagagctgggagtgggaatcagcagcagtagccaaggagcagaagtccagccaaac

SEQ ID NO: 13076 - DNA, 513 bp, Homo sapiens
  MAP TO AC012588.5; EXPRESSED IN ADULT LIVER, SIGNAL = 0.88; EXPRESSED IN BRAIN, SIGNAL = 1.2; EXPRESSED IN PLACENTA, SIGNAL = 0.8; EXPRESSED IN FETAL LIVER, SIGNAL = 0.73; EXPRESSED IN BONE MARROW, SIGNAL = 0.8
gacctggctggaaaacagtccgcgcctcctggaaaaagaacggggtggggggcgcgtaatggtgaattcgcgttaaaagtgaggtcgagccccaaaacatccaggaagaggaaagcagacctgggtgcaggaatcccttacctgcacgcgcgctccgcacagccgccccgccaccgcaacttgcgaactgtcgcgggtagacagtctgcctttgtgctttcgaacacttgcactgtcgtggaaatgattttctggtatcaaaacgttttcagtgactgtgcttcggggttcggctgggcggaagccaactaagttagcaaagtcgcaaatggggccgttggctttgtacgtggagaatggcacaccagaactgtccaggatcccagtggcactggcttcttcgctaaaaggtgcaccgcagtaggcaggagtaatttggtacaaatgtattaccttttagataatagaactggctgctttcaagcaaatccttgactatgcggtatgtgtgcg

SEQ ID NO: 13077 - DNA, 519 bp, Homo sapiens
  MAP TO AL136308.4; EXPRESSED IN BONE MARROW, SIGNAL = 0.95; EXPRESSED IN LUNG, SIGNAL =   1; EXPRESSED IN ADULT LIVER, SIGNAL = 0.97; EXPRESSED IN FETAL LIVER, SIGNAL = 0.93; EXPRESSED IN BRAIN, SIGNAL = 0.77; EXPRESSED IN PLACENTA, SIGNAL = 0.82
tgatagggaaggtcgagcactttaattggcaattctgccaaatgatatacaatgggaaaagtgaaacagaattgagatagaaggaaaggttgctgggcaggaaaatcacaaagtttcaccacctatcatcaggtaatattgaggatttatctcaggggaggtttcaactgacatgtatgatgccgtacagttgagaaatcctcttttagagacttgagttcattcttaagacataggaagacttttatattatcattttaaccaattgtttaaaatttctactcaacttactttcacaaaatcctcaggtaaaagtaaagaggcatatgatgaacaactgctctttgcaggtaaacaagttcatctacttttaactcctccacatcttgtttctgtttggatttgtagaagtagtaactgaggaaacacacaaaaatattaaaacaatgtttgagatccatatttctcaatctggcatttaatattcttcacaactaaacccaatcctatttttccagc

SEQ ID NO: 13078 - DNA, 515 bp, Homo sapiens
  MAP TO AC013800.3; EXPRESSED IN ADULT LIVER, SIGNAL = 1.1; EXPRESSED IN BONE MARROW, SIGNAL = 0.92; EXPRESSED IN LUNG, SIGNAL = 0.92; EXPRESSED IN PLACENTA, SIGNAL =   1; EXPRESSED IN FETAL LIVER, SIGNAL = 0.75; EXPRESSED IN BRAIN, SIGNAL = 0.9
ttacaacctgcaaggttcccagggacggggcccctggattagctaggaaacgggcccctgcctctcagtgaagaccctggcgtggcctcctccctgctcacttacacacgcagcctggcttcttagccgaccattggttattcttttggcatgtgattgccttctgtcccaccagctcaaaggcgggctggcactcaaacttgagtgtgtcaccgtggcgaaaccgggagccttccctccggccatatgcaggtatgccagggtcaccgcaactgccctgctcgatctctgaaagacaggaagatgagaaaacagagacaaaaggtgactttatacctcttttggagctgaaggtccacatgacaagctctactgctcttctgccataagtcagtgctcagagtgacacaggtaggattcaacgttcttataaggaatgaggtttgtgagaaatcctgcaatgtcctgtttcatcgcagcatcctaggatgaatgggcttccagctatcaagtgc

SEQ ID NO: 13079 - DNA, 540 bp, Homo sapiens
  MAP TO AC015737.4; EXPRESSED IN ADULT LIVER, SIGNAL = 0.59; EXPRESSED IN BONE MARROW, SIGNAL = 0.67; EXPRESSED IN BRAIN, SIGNAL = 0.6; EXPRESSED IN PLACENTA, SIGNAL = 0.57; EXPRESSED IN FETAL LIVER, SIGNAL = 0.72
tcttgaatgggtagggatgcagaaaatttaaaataaacaaaagcataaacaaatgtctggacttcctggactttaaaccaaaaaaagtaaaggaaatatatgtagtcgaataacttcaatccagaaatatgaacaatataaaatatatattaaagatctatagagatgcagtcatataaaggattacaataaattacatttgcagtatttcttcattaggaatctcctatgcagcaatgcatgcacaatggcgacacgtcctttgaagatctgcatatgcttacacagcctgatattctcacagggcaagccatcagtaaggtgtgagtctgtgtgtttgtggagagttagggggatgtgggaatcttactcaggctgtactctgcctattatgctccccatacttcatcataatccctctggttaactgcatcgagaagtccatgtgcatcgtttacattcttccaaaaatgaaattaggcaactggttaaggaagaagagagaggaaggttaatttatctcttccttggatggccttt

SEQ ID NO: 13080 - DNA, 532 bp, Homo sapiens
  MAP TO AC021049.12; EXPRESSED IN ADULT LIVER, SIGNAL = 0.7; EXPRESSED IN BRAIN, SIGNAL = 0.75; EXPRESSED IN PLACENTA, SIGNAL = 0.82; EXPRESSED IN FETAL LIVER, SIGNAL = 0.55; EXPRESSED IN BONE MARROW, SIGNAL = 0.64
atttcctggggtccttcttgagttgtcctaagaactaatggggattattataaaggttctacaaacttgacattgatgctggtttatagagaagcatcagaagacaactccccattggccaaagagaaaactgctgaaggaacctccttgccaatttgtttcagggtctgctttccgggatccccagggcggggaaaaactggttgacatcatctctctgttctaggcattgcccctgttcctccacctagggacctaagctgggaagcaggacatggaggaaatgtggctttgccacttaaggagacatccgtggaaaactttctgggagctaccacacctgccctggctaagctgcaggtgccgcgggagcaactctctgaagttctggagcagatttgcagtggtagctgtgggcccatctttcgagccaatatgaacactggggacccttctaagcccaagagtgttattctcaaggctttaaaaggtaaaacaagaagtgtttgactcccccttcccctaacagtaa

SEQ ID NO: 13081 - DNA, 583 bp, Homo sapiens
  MAP TO AL121828.6; EXPRESSED IN ADULT LIVER, SIGNAL = 0.87; EXPRESSED IN PLACENTA, SIGNAL = 0.73; EXPRESSED IN FETAL LIVER, SIGNAL = 0.9; EXPRESSED IN BRAIN, SIGNAL = 0.7; EXPRESSED IN BONE MARROW, SIGNAL = 0.9
tgggactggagggtaatgagctctctgtttgctgcaatgggatggagaaaatacatgatttattcagcaatggtgaatgcacagtactttttcctcatctttaacactgatgtacatggaacagtcctcttcgagccatagcatacccctgaccccatcactgagctcttcctctacctctcacctccatcctatgcccatcccatcctcaccgagcctccaatcaccccccactgccccttttttcctcggttcttccccagccctcatatgcaccctgcacatttgggagaactgcaagcatagctcctgccttttgaaaactgaaataaaggaaaatgattaaataatatttattctacatttttgataaaaaaattttttcaggtaaccaaatagttggggataagaaatacccctttagagaagttttacagattataaatgaaggcaggatgagaaaatatcaccacttttgtgaaccctaatgaattaatccatctaaacaatgatcaggaatggctgccaaaaccaccaaaaagagaaaaggagatataagaaggcattccctgcttcctaacca

SEQ ID NO: 13082 - DNA, 514 bp, Homo sapiens
  MAP TO AC022423.2; EXPRESSED IN ADULT LIVER, SIGNAL = 0.85; EXPRESSED IN BRAIN, SIGNAL = 1.1; EXPRESSED IN PLACENTA, SIGNAL = 1.1; EXPRESSED IN FETAL LIVER, SIGNAL = 0.73; EXPRESSED IN BONE MARROW, SIGNAL = 0.74
cccttttcctttcctcatcccaggtccacagggtgttttctcagggggcggcttctcaggaagggactatgaaccgaggggatttccttctgtcagtcaacggcgcctcactggctggcttagcccacgggaatgtcctgaaggttctgcaccaggcacagctgcacaaagatgccctcgtggtcatcaagaaagggatggatcagcccaggccctctgcccggcaggagcctcccacagccaatgggaagggtttgctgtccagaaagaccatccccctggagcctggcattggtaagatgatcatttcaacaaccagcaggctgtgagctactgcagaaagaggagattctggttgaacatgaaggaaaataacagctaactaacttctagatctgaaaaattaaatgtagcgaagtctagtgtgtttggatgctgcttacaaaagcagtgttacaaataaattagaaaaaaattagaaaattagaaaaatccccccagtagttcaagctgt

SEQ ID NO: 13083 - DNA, 500 bp, Homo sapiens
  MAP TO AC008616.2; EXPRESSED IN BONE MARROW, SIGNAL = 1.1; EXPRESSED IN ADULT LIVER, SIGNAL = 1.2; EXPRESSED IN LUNG, SIGNAL = 1.1; EXPRESSED IN PLACENTA, SIGNAL = 1.2; EXPRESSED IN FETAL LIVER, SIGNAL =   1; EXPRESSED IN BRAIN, SIGNAL = 1.1
agactgcgggctcactaggggagtgagtcacacagcctcacatgcgcacagtcagaaaggtcgcctctacctcttctgtcctccagccctgcaagaagcctcaagcctgagcgtgcagcaggggcccaacttgctgcaggtgaggcagggcagtcaggcgaccctggtctgccaggtggaccaggccacagcctgggaacggctccgtgttaagtggacaaaggatggggccatcctgtgtcaaccgtacatcaccaacggcagcctcagcctgggggtctgcgggccccagggacggctctcctggcaggcacccagccatctcaccctgcagctggaccctgtgagcctcaaccacagcggggcgtacgtgtgctgggcggccgtagagattcctgagttggaggaggctgagggcaacataacaaggctctttgtggacccaggtacgggagccagcggggagagggaggggcagtggggaggatcctagaatctta

SEQ ID NO: 13084 - DNA, 528 bp, Homo sapiens
  MAP TO AL078591.18; EXPRESSED IN ADULT LIVER, SIGNAL = 1.1; EXPRESSED IN LUNG, SIGNAL = 1.4; EXPRESSED IN BRAIN, SIGNAL = 1.2; EXPRESSED IN PLACENTA, SIGNAL = 1.3; EXPRESSED IN FETAL LIVER, SIGNAL = 0.85; EXPRESSED IN BONE MARROW, SIGNAL = 1.6
cctctcccagcttttctgtgcatacagtgttaaattttgcagaaagtataacttcactcagaatgttttcttagagttgatttcaagtttaaaagaatattttcaagtgatttcaggtttaaagtgttcattgtatttgatagaatatgtactacaaataataaagaaaattactctctgatttctaaatcacttaggtgatgccacatattttcatggttttaaaaccaaatattgttgggtttccacttctacaattctctaaattcaggagggttctaacaactgaatatgatccttagtaaagagtatcttttgtattttgcttcagcttccttcaggcaaaagaagaactgaagctactaaaacttcctgggttcatgtacagtgaagttcctctgctggcatcctcagtaccttattttagtgtagaagaagaggatggttctgaagatggagtacatctgattgtctgtgtgcacggtttagatggtatgtgacatctatggatgtaacccagagcaactc

SEQ ID NO: 13085 - DNA, 580 bp, Homo sapiens
  MAP TO AC007956.5; EXPRESSED IN BONE MARROW, SIGNAL = 0.67; EXPRESSED IN PLACENTA, SIGNAL = 0.53; EXPRESSED IN ADULT LIVER, SIGNAL = 0.59; EXPRESSED IN FETAL LIVER, SIGNAL = 0.51; EXPRESSED IN BRAIN, SIGNAL = 0.54
attcccttacatgcactcggaaggccatgctgtggcccacctcataggggtccttccaatcccaggagactttgcaagaccggggatccaggtaatttccccgcacgtagtcataaatagtccggtcccctcggcgctcgcggtcctcattctggaggaagctgactacacgtgcggcaagctcaaagaggaacttaattgtgaagaagaatgcaaccacagacactgtgattccacctatgcaaaagagagaacacacaaaccgcctgccagttacacattacagcttttcattatgcaacaggccagccatttctcaaaaattaaaggaggtcaggatgagactgtaagactgccaaagaaacactgcactgggcactacctctgtagataagaaaggaacttctacaccaggggtcagtaactacagtcctcaggccaaagcccacccactgcctattttggtaaataaagttccattgggatacagccacacccatcatttataaattgtctatggctacttttgcactacactggcagagttgagtcattgaaatgagccttcggaaccaaaaat

SEQ ID NO: 13086 - DNA, 505 bp, Homo sapiens
  MAP TO AL121827.9; EXPRESSED IN BRAIN, SIGNAL = 0.61; EXPRESSED IN PLACENTA, SIGNAL = 0.68; EXPRESSED IN ADULT LIVER, SIGNAL = 0.58; EXPRESSED IN FETAL LIVER, SIGNAL = 0.51; EXPRESSED IN BONE MARROW, SIGNAL = 0.51
tgatgtggctgctctttgtcgcctccctcagggctggagcagcttcaccactggagccagccggtttgcctcggcagccaaggagggcgtaagtcactgcccctgccatgccaccgtccccaccaggccctcgggacactggctgctgctggcctggggttctgggagctgcagaagggatgtgggacacagagggtttctgggtgctgtaaccatgggctgtgccaacgcagtaccagccagggtggtcctgagaccttggaggttctgcaggaacacagcagcccaggctgtcaggagctgctcctgtgtcagaccagctgctggcaaaggggtcccgccctgatgaaagtgagggagatgtgagccccattgattcctagactccaccctatccaagcagggcaggtctccggcaccctgtgccctggagcttcttctggggctcaagtcgtgttttgagagcgatttctctctttcgcctgctcctcagcctgaaatgagg

SEQ ID NO: 13087 - DNA, 535 bp, Homo sapiens
  MAP TO AC018672.2; EXPRESSED IN FETAL LIVER, SIGNAL = 0.91; EXPRESSED IN PLACENTA, SIGNAL = 1.1; EXPRESSED IN BONE MARROW, SIGNAL = 0.91; EXPRESSED IN ADULT LIVER, SIGNAL = 1.2; EXPRESSED IN BRAIN, SIGNAL = 0.9
ctgcaacatttgcatctatggaagtctaccctcctcaaatttcaattacttttctcacttttaatgagctaagttactgtcattcttcagttggattactccaaaagactcataatatgtttgtgtctaatctcatccacctcattcacttgcatatgtcgataatggtcctcaacacagataccaaacataagttagatcttgtcattcttgtgctcaaaattctgcagtaacctcatatttcagtcagagtaaaagccaaagtccttgcaatatatatcaaggccttacatggtctagtatactttctctgtagccgcccccagttcttgaacacactaggtttacttagacctttgagccttttttctgtttttttttttttttttttttttttctacctggaatgctccaggtagatatttgcatggctaactcttcctcaaaacttggttcaaatctgaccttcagtgatgtctgtcttggccaagcttttgaatgttaaaagttactatcccaccatctctggtgtacc

SEQ ID NO: 13088 - DNA, 598 bp, Homo sapiens
  MAP TO AC016948.4; EXPRESSED IN BONE MARROW, SIGNAL = 1.2; EXPRESSED IN ADULT LIVER, SIGNAL = 1.1; EXPRESSED IN LUNG, SIGNAL = 1.3; EXPRESSED IN PLACENTA, SIGNAL = 1.2; EXPRESSED IN BRAIN, SIGNAL = 1.1; EXPRESSED IN FETAL LIVER, SIGNAL = 0.93
gattcagcaatagccttgggaggtaatgagatgcgttaaagccccttccccaaatcgcccactggtcctgatggcagcatcctgcccaagtgctctgctgtcgtaagagtatctgctttccagccttacagatatgctgttctaataacttgtgggttagtaaatacataataatgtaggatgatttgtaaatgaacaataaacaggctatggatgagcacattccttgttaaaattacaaaaaaatactaataaccctcaaagcatatggtttggaaggtttgaggccatttttccttttcttacttttgtttttgtggttatgtactggggaactgagtcagccaaactgctgaaaaaataagatattattttgttcacttcggtatcaaggcttgatacagacaagaagttcagctcccactgggcatagctttgattcagggcatggaggggaaggaacacgcagtagtgtcgtaagacgctgaggtcagttcttcgagcccactctaggtcacagagttttctattattgattaggggtagggaggggaggagttccactgagctaccaaaaagaggagggacaaagtccaca

SEQ ID NO: 13089 - DNA, 515 bp, Homo sapiens
  MAP TO AC009316.3; EXPRESSED IN PLACENTA, SIGNAL = 0.78; EXPRESSED IN ADULT LIVER, SIGNAL = 0.97; EXPRESSED IN FETAL LIVER, SIGNAL = 0.71; EXPRESSED IN BONE MARROW, SIGNAL = 0.82; EXPRESSED IN LUNG, SIGNAL = 0.93; EXPRESSED IN BRAIN, SIGNAL = 1.9
acagcacttaattggtggggccaggattcaaacccagagaatctgattctggagcccagaatcaccatcaagctataatgcagacaatctatacatttgagggatacaacagaatatttccataaaagcttgtgaaattctgtccattgaatatttgtgggaaccagtctataaactaccacctttctacaatggttaaacatagaatttggggattagtgaggtaaagtgtctcctgtgaacatattaaatgcaatatcgcatctttaggaaatattattttgagaaagttaaacatttgaaaattcattttataaacatatgacgttcattttatctgtaggctaaattaccatcagtgggctgaattcattttcatgataaatgataataacccctttgaaagtcatcactttaatgcttccaaacatctatttgttatggttagtattcagattagccagttgaacacagaagaatcctgataaatgtaaggataagggaacaaacagctg

SEQ ID NO: 13090 - DNA, 507 bp, Homo sapiens
  MAP TO AC009507.3; EXPRESSED IN BRAIN, SIGNAL = 0.5; EXPRESSED IN ADULT LIVER, SIGNAL = 0.59; EXPRESSED IN BONE MARROW, SIGNAL = 0.48
tctacctgcagaacccaacctagcctccctctgagtttacacagtgtttcatccactgacacaggatttctcatgctttgcagtggccatacggcaaggcggtccactggagctatcacttactacaccacctgcaagctgctgtcccagtggagcaaaggaaaggcctgataaagcaacagctggggcacctgcttgcaaatgatgccctggaaagatgaagaatctttccccagaatgttgtatcacactaaatcaatgacttttaatggtgctattttcccaatgggtacaccacatgggtccaggaacaaaagggttgaaacacaagtggcccagcttaccctcactgtcaataagccatttgaaaaatccacagtttcttttctcttaattttgtactctacaggtttagagatcctagctcccagatgggaatgcttccaccacaggacacagcaagagtgcctttgaactttaatctctagaaatgctgcccattcattt

SEQ ID NO: 13091 - DNA, 564 bp, Homo sapiens
  MAP TO AC023296.2; EXPRESSED IN PLACENTA, SIGNAL = 0.51; EXPRESSED IN ADULT LIVER, SIGNAL = 0.66; EXPRESSED IN FETAL LIVER, SIGNAL = 0.54; EXPRESSED IN BRAIN, SIGNAL = 0.45
  unsure 192
tgcatccatgttactttcgcaaatttcctataatactgttcatttggaatatagttaagggtcgatggaaaaatgtaggcagtatggctgtctccttgaaaatccacatgtaaatttctaccataaggaaagctaccttagcaaaacaaaaacttcataaacgggaccttttcttttcagtaaagaaattangggaggaagtgtcatctgaaaattggtttttctcacaaattacataagtaccagaatatttaggtgtttttctttaatacatgatgtcagtatgggtgtctgtctgggagattttccaatacaaagtggtttaactggaaggatgtactcaattgttttatcttttttctgaagctatatcgtgtggacacccaggggtccctgccaacgccgtcctcactggagagctgtttacctatggcgccgtcgtgcactactcctgcagagggagcgagagcctcataggcaacgacacgagagtgtgccaggaagacagtcactggagcggggcactgccccactgcacaggtgaggggcttacgagtgaactga

SEQ ID NO: 13092 - DNA, 559 bp, Homo sapiens
  MAP TO AC011941.4; EXPRESSED IN PLACENTA, SIGNAL = 0.82; EXPRESSED IN BONE MARROW, SIGNAL = 0.63; EXPRESSED IN ADULT LIVER, SIGNAL = 0.65; EXPRESSED IN FETAL LIVER, SIGNAL = 0.6; EXPRESSED IN BRAIN, SIGNAL = 0.67
tgcgggaactatggagagagaaggggagaggaataaatcataatcttctctcaaggaaacacagtctaatgagagcagaaaagtaaacagtaaaagtaaagcctcataaaatgtgacaaatagtacccagttgacacttgtcctgacaactatgtggatccttacacaaggtgctgcgggagaagtgaggaaagtcacctccgctggactgggagttcacaacgacttaaagaggaggagacgtctgttagcaatgtctttaatgatgaagaaaagtttgatggataagtaagaaggaataaatgggaaagaagaaggaagaagggcattccaaaaccaaagcaacaaacacacacacacatgaatgcaggcatggaagagcagggtgtcttccaggtcctgtgagaagttcagaatggctggaaagatagggtcttgggcagtgagtgagaaggaatgagcctttaggggtggatggacaccgcttgtatgtccttgtatgtctccctgaggagtttgtacttgatactgtcagtgaagggagccagtgaaacatgtt

SEQ ID NO: 13093 - DNA, 599 bp, Homo sapiens
  MAP TO AL158111.2; EXPRESSED IN FETAL LIVER, SIGNAL = 0.69; EXPRESSED IN PLACENTA, SIGNAL = 0.76; EXPRESSED IN ADULT LIVER, SIGNAL = 0.86; EXPRESSED IN BONE MARROW, SIGNAL = 0.8; EXPRESSED IN BRAIN, SIGNAL = 0.87
tccaatttcggaagaagctctactgtgggcaaaatgttatcaaacgtttttatcaaaaatgttatcaaacattgcatgctacagagaaatattttatgaaaggaagactcaattgatgtcattgttttattttaagaaattgccacagtcactccaaccttcggcaaccaccttcctgatcaatcagcacccatcaatattgaggcaagacctttcaccagaaaaagaaaccatgacttatggaagtctatggtaattgttagaatttttagcaataaagtaatttaaaattaaagtatgtaccttttttagacataatgccattgtacacagtatagtataaacataacttttgtatgcactgggaaaccaaaatttgtatgactcactttattgtgatagtagttttattgtatcagtctgtgatctgaacctgtaatatctccaagctatgcctgtattctgaatttgactacttacttacctttaccaatgagttttatactttcatatattttcatgctcctgattaatttcctttttttcaacctgaggaaatccctgtggcaattcttgtaaggcaggtcaagtggtgatct

SEQ ID NO: 13094 - DNA, 500 bp, Homo sapiens
  MAP TO AC011226.3; EXPRESSED IN PLACENTA, SIGNAL = 1.1; EXPRESSED IN ADULT LIVER, SIGNAL = 0.96; EXPRESSED IN FETAL LIVER, SIGNAL = 0.79; EXPRESSED IN BONE MARROW, SIGNAL = 0.85; EXPRESSED IN LUNG, SIGNAL = 1.1; EXPRESSED IN BRAIN, SIGNAL = 1.1
gctgctatgatttgaatgtttttgtcctctctaaagttcatgttgaaattcagtccccagtgaaacagtattagaaagtgtgaactttaggaggggattgagcattgagggcttcaccctcatgaattattatatgcccttataaaaacaccttgatggaaatttcgtccttttttgccctcctcccttctgccacattaagggcacagtatttttctccttcaggaaagacagcattcaaggaaccaccttgtacgcagacactgaaacctcgcgagacaacaaaactgctgacaccttgatcttggacttcccagcctccagaactatgtgagacatagaactatgtgagacataaatttatgtaaatttgtaaattagccagtctctggtattgtcttaaagcagcaaaaccagactaagacttataccctttccctataattaaaatttcctgtatatatatcctctttattcatgcctacatgcctccagaaact

SEQ ID NO: 13095 - DNA, 533 bp, Homo sapiens
  MAP TO AC022562.3; EXPRESSED IN PLACENTA, SIGNAL =   1; EXPRESSED IN FETAL LIVER, SIGNAL = 0.67; EXPRESSED IN LUNG, SIGNAL =   1; EXPRESSED IN ADULT LIVER, SIGNAL = 0.77; EXPRESSED IN BRAIN, SIGNAL =   1; EXPRESSED IN BONE MARROW, SIGNAL = 0.74
gctctcgactgaactcccacacttgggcccctgggaaaccacccagctgagaaccttgtggacctctgaaagaactctcaacgaaacatagccctatttggccaagtggtaaggagatgaatataagacgtttatcttacttatctagaatcttcttccttttggctgaggtgataatttctagctgaaggcttggctgatttatgaatagaactgccaggctaaagtaagaattccacacctagacagacagagaaagagaaaatgtgacagtctaagaacttaatcttgtagggagcgttactaaatacatgcatgtagcatagaacccattttacaatcttaagatcctcattttttttcccttttaaatatctttgcaaacaagaatttttctttttttcccccttaactccttctgaagccaattgtgttgattctggactagaaagcatactcatggagtttggctaccaacacttccaacaggggtatcccaggtcatattctaatcatcatcaggcttggaagct

SEQ ID NO: 13096 - DNA, 537 bp, Homo sapiens
  MAP TO AC010474.2; EXPRESSED IN ADULT LIVER, SIGNAL = 0.91; EXPRESSED IN BONE MARROW, SIGNAL = 0.8; EXPRESSED IN PLACENTA, SIGNAL = 0.83; EXPRESSED IN FETAL LIVER, SIGNAL = 0.78; EXPRESSED IN BRAIN, SIGNAL = 0.79
gcccttgtgataaggcagaggggccattgagctgattaacactcaagccatctgcagacagcaaagctgaaagagttttgtaacactggggttgcaggctccccctcctagacaccactgcgaggccgagaacacaaagcactcaccccagtctctgcacctgtccgtctgcatgcgccccctaggggtttgagctgcagggtgaccaaacagaggagccacacctgttgcacgtcctgtgaggggaatcaggagactctcccgtttcaattacatgagattaaatatctgataaaataacctttttatgactattttttgaaacattgttgttctttccttaaataatctgtttcccagatttaaagaaacattctttttaagcaatctatagtttgcagcaatataataaagtataattttgtgaacaaaagtgcaaacatttatttttccttcctaattgatccctccaaaattcagaaatgattaatgagtattcttatttttatgttaatatggttcttggcataggttcga

SEQ ID NO: 13097 - DNA, 597 bp, Homo sapiens
  MAP TO AC022995.2; EXPRESSED IN PLACENTA, SIGNAL = 0.58; EXPRESSED IN ADULT LIVER, SIGNAL = 0.55; EXPRESSED IN BRAIN, SIGNAL = 0.46
ccaaatttttgaatgccataccttttcttataatgatagatcaaaaagttagaaatatagaaatatatacgggacctataaatcaaaaaaaaactttcaagaaataattttaaataattatcagaattctgtggagaaataacatatattttatatatttaaagaaaaagcaagcaataaaagtttacctcttttgctatgcacttgtaatcattgaatgtcattctacaacatcgatacttctttaaggagactttgtgatgagaataggttttggtgcataaggataaatcctagggttaaggaatgtgtcagatggttataatttgtccaaagatatgaacacaacaggagacatgaacatggagaaatgtttcagaaagaagtgctggaaaaaataaggcaagttccatctgtttctaatggtcactgtgggctgaacaaatacgtcagattaactctaaaaaccctgagctattgacattatgaagaaagttggatctgaattaagaaaatatattctgaaatgttttttttttaaattaaatggtgactctgcacaggctttactcctgtgcagtttgtggtttgggtcct

SEQ ID NO: 13098 - DNA, 584 bp, Homo sapiens
  MAP TO AC008269.3; EXPRESSED IN ADULT LIVER, SIGNAL = 1.1; EXPRESSED IN LUNG, SIGNAL =   1; EXPRESSED IN PLACENTA, SIGNAL = 1.1; EXPRESSED IN FETAL LIVER, SIGNAL = 1.1; EXPRESSED IN BRAIN, SIGNAL =   1; EXPRESSED IN BONE MARROW, SIGNAL =   1
aaaggcttaaaagggacaaaggatataactattcacaatgcggctttgcatttttatcagtgcctctgctcctgcctgctacaacctaattcccatattgacgagtggcgaagtgtttgggatgcatacagaaattagcataactctatttgacaacaagcaggcggaagaacatctcaaaagccttgtggtggagacccaagacctggcatctcccgtcctgcgcagtgtctccatctgcacgaaggtggaggaggccttccgccaggcccacgtcattgtggtgctggatgacagcaccaacaaggaggtgttcactctggaggactgcctccgaagcagggtgcctctctgcaggctctatgggtacctgatagagaaaaatgctcatgagtctgtcagagtcatcgtgggagggagaacctttgtaaacctgaagacagttttactcatgagatatgccccacgcattgcacacaacattattgctgtggcgctgggggtggaaggtgaagcgaaagccatactggccagaaaactgaagacagctccttcatgtgagtgaatgtctctttatgtttttg

SEQ ID NO: 13099 - DNA, 515 bp, Homo sapiens
  MAP TO AL109809.18; EXPRESSED IN ADULT LIVER, SIGNAL = 0.53; EXPRESSED IN BONE MARROW, SIGNAL = 0.57; EXPRESSED IN BRAIN, SIGNAL = 0.77
atgggaggggtctatccttgcaggccagagtgtccagccttacaagttgcaaggcccccttcagcgatctgagcctggcacaaggatccgattgacctatgcatcctctgggttctcgacacaccaggttactgtgacctggcttaaaaacaaacacgagctcccaaacccccagaccagcgtccagtacagtggacacacctacaatgtgaccagcagtgtgcttgtcccgctgatggatgatgatgtgttctcccacgtcgtttgccatgtggagcacaagttgacgtggtttttccagaaaaccactggcctggaccagtacctccagggtaagatctctctctctgctcagctgaggtagtgcagagttggggtggggacttctctgagcctcagtttcctcaatgaaaaatgaagaagaaccttcaatgataagcaagcacatcccttgtttgattgaggcaagaatttagtgaaataatacctgtaaagcacgtaagacagtgccttgc

SEQ ID NO: 13100 - DNA, 509 bp, Homo sapiens
  MAP TO AC008773.3; EXPRESSED IN LUNG, SIGNAL = 1.1; EXPRESSED IN PLACENTA, SIGNAL = 0.95; EXPRESSED IN FETAL LIVER, SIGNAL = 0.92; EXPRESSED IN BRAIN, SIGNAL = 0.97; EXPRESSED IN ADULT LIVER, SIGNAL = 1.3; EXPRESSED IN BONE MARROW, SIGNAL = 0.97
agtctacccaccatcatcggtaatcttggtttaaagttcagtatttcaaactcctccgttaacactgaacatggaaagcacatgctaatttctattgtcttatacagtgatagatgcaatgaaaattacaactcacctacaaatagggatattgcaccacagagcggagaaatcaccaactgtgagacttcatctactgaaagtttctcggcagtaaagtttataacatctttagatttctcttcaacttcatccatatctttcctagaaataatacattaacaaaccttaacagaagtcctaggggtaaaacactcaacaacttataggctctttcaatttatatttttttctacattatgtcgatgtaaaaggaagaggctgtggcacaaaatatagtttacatgagtcaaatcaaggacagtggcccaggatgcttctaagataccttggggagttcctttggggagcactccctcggcctttgttgcaagcaggtttgtaaaggc

SEQ ID NO: 13101 - DNA, 514 bp, Homo sapiens
  MAP TO AC021049.12; EXPRESSED IN BRAIN, SIGNAL = 0.53
gcccattgtcttcaggtttgccatggaaagtcaaatgatttccacttcattatgcaagtacgctatcatcttcaggtcttttgtatgtaaaatgtttctgttccagttgtagaccttgatgattgtgcagtatgaaatcgtattgtaattttcttgcatttagatgtcaacctcagaaacaggaacaatcgtcttttgaacttccagtaggcccacagttgttggttgttcctcaaaacaggttgtggctcctgttgaataagatgatccattaaaaactgaacaaggttgaggagaaatagtgcttacgttgaaaaatctttaagtctttgtccccgttctctaacttccttacgttttcgtttatttagctctatccccactatctactagaatttctcatatttaaaccaagatgggagactaggtcattaggaaaatattaccgtctacaattttcttatactttgatctgtcttttatttgattgtaagttgctgatggacagtgatca

SEQ ID NO: 13102 - DNA, 529 bp, Homo sapiens
  MAP TO AC021401.4; EXPRESSED IN PLACENTA, SIGNAL = 0.65; EXPRESSED IN FETAL LIVER, SIGNAL = 0.82; EXPRESSED IN BRAIN, SIGNAL = 0.64; EXPRESSED IN BONE MARROW, SIGNAL = 0.66
gcagcaaggatagaagtggccaggctaatacatcattcaggcaagagatgatggcggcttttaccaaagcaatagcagggcagatggtgggaagaataggctctgaatatattctgaagatggagccagcaggggtttattgatggactagattagggatatgagaagagaggagtcaagtatgtctccagaatttttgccctgagaaactggatgatgaagttcccatttactgaaatggagaggactagaggaagtatggtgttggggtgtatgtggggagaggggaaggaatatctggagctagttatgattgaagtgcctagtagacatctagatgggtacgccgagcaagttggaggagttggagatgtaggtataaagtttggagtcatcaaggtgaagatggtatttaaaatcatgagactgggtgataccacacagggagtagtgaagaaagaagaaaaagtctgatgagccattggagcatgcctgttctcgagggcagagagatggggagaacctgtga

SEQ ID NO: 13103 - DNA, 594 bp, Homo sapiens
  MAP TO AC009298.2; EXPRESSED IN PLACENTA, SIGNAL = 0.96; EXPRESSED IN ADULT LIVER, SIGNAL = 0.81; EXPRESSED IN FETAL LIVER, SIGNAL = 1.1; EXPRESSED IN LUNG, SIGNAL = 0.93; EXPRESSED IN BRAIN, SIGNAL = 1.1; EXPRESSED IN BONE MARROW, SIGNAL = 0.92
tagctccattttcctggcactagacttggccaaggttgaaactcttgtacctttctccatctttagagggtggtgatggtggatcattggaatagatggtgggtcctcaggtcctccatggtataggcatgggtattccagattcttcagagtagagcatccataggacaaacttattgagtttcctgtaacatcaccttgagcaactaactgaagtcatctgctgggtgaagatggaaaggaacaaggggcatggagagaacaacccattttctgccatactataataaggcagtataggtcgtatgtctttctagtatctgccacatagtagatgctctagacatactggctatgtccagtcttcatggtattagatagtgatcaagggactttccttacctccacttccttcacctctttaagcttgtgctttgaacattcacaccatccagagttgcgagcaggtctccaaatctggttaggacagcaaggaggatggataaaaattccatcatttgggtcagcaccaaccctgggtaaaggtccttgatccatggatgggatccacatccatcagcctccaagtggagt

SEQ ID NO: 13104 - DNA, 594 bp, Homo sapiens
  MAP TO AL136968.3; EXPRESSED IN PLACENTA, SIGNAL = 0.5; EXPRESSED IN ADULT LIVER, SIGNAL = 0.76; EXPRESSED IN FETAL LIVER, SIGNAL = 0.68; EXPRESSED IN BRAIN, SIGNAL = 0.82; EXPRESSED IN BONE MARROW, SIGNAL = 0.7
ttagaatcacgtcgggaacctgggacaggcttagaagcccaggtcccacctcccacctgctgaatccaaatctccagagcgtggcctgggaaatcaaatttgtcagcttccttcccaggggactttgatacatccaccccagtggaaaccagcagcctcctttagtcaagcgaatgtttccctgactgtcaccttctccccctgtataagatgcagattgttagcggtaaatggtacctggattccaacctcagttctccactgcagttggggagatctggccagggcaagccacactgctccttcaggcacagccttgttcatcccgcactcacctgtgttctcttcctctctgtaggacgcacaagaccagccactgctaccgcatcacgtaccgccacatggaacggactctgtcccagagagaggtcaggcacatccaccaggccttgcaggaggctgcagtccagctgttgggtgtggagggcaggttctgatgtcaccacttcactcaggctgcagccctcttggggctccaggatttgctgaaagagaaaaagatatggtttgtgaactggggcatcaatcatcttt

SEQ ID NO: 13105 - DNA, 513 bp, Homo sapiens
  MAP TO AL158150.2; EXPRESSED IN PLACENTA, SIGNAL = 0.93; EXPRESSED IN ADULT LIVER, SIGNAL = 0.78; EXPRESSED IN FETAL LIVER, SIGNAL = 0.64; EXPRESSED IN BRAIN, SIGNAL = 0.75; EXPRESSED IN BONE MARROW, SIGNAL = 0.64
aaaaatgccacagacaaggccacattgtgtgtacaatttctagagccacacagacagtaaaccagtgcaccagcaatgtgttccttatggctttactaaggcttacttcttttcctctccttctaggctgccccatcaaaggtcaccctgtccctaatatcacctggtttcatggtggtcagccaattgtcactgccacaggactgacgcatcacatcttggcagctggacagatccttcaagttgcaaaccttagcggtgggtctcaaggggaattcagctgccttgctcagaatgaggcaggggtgctcatgcagaaggcatctttagtgatccaaggtaagaaaccctgcagactttgcatactggacttgaacaagaaagcccacttgggaatctaactatctagcagaacaaagagatttctgatctccagtggtactcaaggcatgaaaaccaaagccatgccatgtttccatacagtgagaccctacttctgtcaacatggccctt

SEQ ID NO: 13106 - DNA, 542 bp, Homo sapiens
  MAP TO AL136124.3; EXPRESSED IN BONE MARROW, SIGNAL = 0.54; EXPRESSED IN PLACENTA, SIGNAL = 0.59; EXPRESSED IN ADULT LIVER, SIGNAL = 0.6; EXPRESSED IN FETAL LIVER, SIGNAL = 0.52; EXPRESSED IN BRAIN, SIGNAL = 0.65
ttgggcaatcatgaactcacggtgacaacaacagaaatggatttttaagccttaaccttccctgtacctgctgcactccaaggggtgagcataactgctctgctcctctgcgtggggcttctgcagcgtctgattgagctgaagagaggaaaggaagctttccaggggcccagcatggagagagtccagctgcagctcaggcttctggtctatggcctcacacaccatggccaaggcagccatgctcactactctctgaatctgacttccaactgttggctcctgaaaaggaaatgtgacaatgttttatttaatatgcacaagtcttaatcagtaatgacctcagttgccagtctatggaaagctcaagctctccttttccctcttcctgcctgctcctgaatatcaggagaaataaaaggaaatccagtacacatcattcacttccactacttctctacagattggcagtgaacaattttaaagtagcaataagaactcagcaatttagattaagacaacaatgggatcttttcatctgg

SEQ ID NO: 13107 - DNA, 549 bp, Homo sapiens
  MAP TO AC024972.2; EXPRESSED IN PLACENTA, SIGNAL = 0.62; EXPRESSED IN FETAL LIVER, SIGNAL = 0.48; EXPRESSED IN BRAIN, SIGNAL = 0.68
gcaagtggatatttggacagctttgaagccttcgctggaaacgcgagtagcttcacataaaaactagatagaagcattctcagaaatttctttgtgatgtttccattcaactcacagagttgaacattccttttcatagagcagttttgaaacacaccgtttgtagaatctgcaactggatatttggagctctttgaggcctatggtgaaaaaggaaatatcttcacataaaaacaagagagaagcattctcagaaacttctttgtgatgagtgtactcaactcccagagttgaaccattcatttgatagagcagttttgaaacactatttttgtagaatttgcaagtggatataagacagctttgaggctttcattggaaacgggaatatcttcacatgaaaaatagacagaagcattctcagaatcttctttgtgatgtgtgcattcaacccatagtgttgaaactttattttgatatagcagattggaaacactctttttgtagaatttgcaagtggatatttgaagagctttgaggccttcactg

SEQ ID NO: 13108 - DNA, 597 bp, Homo sapiens
  MAP TO AC007321.2; EXPRESSED IN ADULT LIVER, SIGNAL = 0.9; EXPRESSED IN BRAIN, SIGNAL = 0.98; EXPRESSED IN BONE MARROW, SIGNAL = 0.89; EXPRESSED IN LUNG, SIGNAL = 0.97; EXPRESSED IN PLACENTA, SIGNAL = 0.92; EXPRESSED IN FETAL LIVER, SIGNAL = 0.85
tgtttttatggcaaagcaagctacaaattaacaaattaaagtaaatttagggtgaactaatagaaacattcaataaaaatagcatatgaaaataactatggaactatagaaaagctctatttgtaaggcaggaataagtaagttcaaatctcacttttcagaagaaggccaaggtcctatattttcttccagttaacaaaacgttttattaatcaaagcatgctgttgatttgtaagtgtttccagtgtgaattaatatagtcagtcccacagaactaagttttgtagtaaaagagagcttaatgtattataaattactcttacaacaagattttattgtgacagtgctttataaatataaactgactttttaaaaattaagaactgacataataacataatctgtttctgcagaacattgtaacccaccttgtcaacatggtggcacatgcttggctgggaatctctgcacttgtccttatggttttgtaggaccaaggtgtgaaacaagtaagcaaagctctcctgatgtctgatataatgaaactgcttctttgaatagttgatggccttaatgctacgtgaaatgaacccaaa

SEQ ID NO: 13109 - DNA, 538 bp, Homo sapiens
  MAP TO AC023602.5; EXPRESSED IN LUNG, SIGNAL = 1.3; EXPRESSED IN PLACENTA, SIGNAL = 0.97; EXPRESSED IN ADULT LIVER, SIGNAL = 1.2; EXPRESSED IN BRAIN, SIGNAL = 1.4; EXPRESSED IN FETAL LIVER, SIGNAL = 1.6; EXPRESSED IN BONE MARROW, SIGNAL = 1.5
ggaagagattatttgggtgccatcaatttggggtgcagactggaagcagaattcaaagagtaattggattgggacctcaaagattaatagcatttgaatattatttctaatacattaaatagcataattatatattgaattacttacagtaaatatcaaatactgcctgttcagaatgaattgttttctggccagatggtccataatatgtcaccgagcaggtgaatggcatttgtatgtcagccttggttgtcttgtactccagggtggaagtcatggtatagagctgagtcactgggtccatttcctttttaaaaattatgaccaccgctgaagaaaataaagaacactgatgatagggtctttcatctgacaatcacaatccttaacgaaacagcaccacacctttgagaagtgttttttttccttctaactgtattcagcaggagagaaaattgacatgtagtgaggttagatgtcgtttcaaaaccgtgaatcagagacacagaaatagaatcctggaatcccttttcccact

SEQ ID NO: 13110 - DNA, 591 bp, Homo sapiens
  MAP TO AL161668.1; EXPRESSED IN PLACENTA, SIGNAL = 0.76; EXPRESSED IN FETAL LIVER, SIGNAL = 0.72; EXPRESSED IN BONE MARROW, SIGNAL = 0.74; EXPRESSED IN BRAIN, SIGNAL = 0.48
aagacacgcagggataatggtcttttaacatacctggcaattttaaagttttacgctgacattgagaacatctcactggtatttaaaacttgagctctttaaatgtataatttgtttaatcaaattgcaccttcttttttacactttgcaagtatgtcatagtaaatacattatatttaattaagcaacttgccctagtttctgtattggggattttaacatcattggttggatcttttgttttgtcatcttgctatttttcagaatcttgaaatagcacgtttccatgatgtctgttctcttcagtgcctgtggaagcatacaaaaaatatgatgtctattccccatttctggtcttcctgactctgaattaacagttgtatcttcagtgttgacttcttggacttgttccttggttgcacaagcctcctcaatattttctccaaaactgacattttcttaactctttattggtagaatatctacaactgtgtgtcacatctcttcaataggttgagcccctgccagaatggccttctcatagattgcgagaatactttcaataggacttggggttggttcagtatgtgc

SEQ ID NO: 13111 - DNA, 598 bp, Homo sapiens
  MAP TO AC007981.43; EXPRESSED IN LUNG, SIGNAL = 0.94; EXPRESSED IN PLACENTA, SIGNAL = 1.2; EXPRESSED IN ADULT LIVER, SIGNAL = 0.97; EXPRESSED IN FETAL LIVER, SIGNAL = 0.71; EXPRESSED IN BRAIN, SIGNAL = 0.7; EXPRESSED IN BONE MARROW, SIGNAL = 0.87
ttgaaagggccagtaagctgtttatattattatcatgtcacacaaataacaaaccctttggagattgctgcctactttgcattttggtctgagaagtaagtgagcatgttgcgtgtgtttctctccctcgtaggtgtggtgtcagcacagcggcaggtcaccgttcaggaaggacccttgtaccgcacggagggctcccacatcactatctggtgcaatgtgagtggctaccagggaccttctgaacagaatttccagtggtccatttacctgccttcgtcgccagagcgagaggtgcagatcgtcagcaccatggactcttccttcccctatgccatctacacccagcgcgtccgcggagggaagatcttcatagaaagagtccaggggaacccaaccctattgcacatcacagatcttcaggcccgggatgccggggaatatgaatgccacacacccagcaccgagaagcaatactttgggagttaacagtgcaaagatgaacctagtgggtaaggagaagctgtcttcacgttgccagcgtctggcctgactcagttctttagtagtgtaattttgctttatgccatgcatttga

SEQ ID NO: 13112 - DNA, 534 bp, Homo sapiens
  MAP TO AC015529.3; EXPRESSED IN BONE MARROW, SIGNAL = 4.2; EXPRESSED IN FETAL LIVER, SIGNAL = 3.8; EXPRESSED IN BRAIN, SIGNAL = 2.3
tagccgttccccacagtaagtatcttgctcctgcctccaggcctcacatgaaaatgaaccgtaatctcaccagcttataaatgtaacacaaaacgtacacagccataccttgcccaactggtcctttttgacaaagccagtggctgctgcaatgctccctgctccctccactgtcttctgggctactgctgtcacacccgtcaccactgctcctccaacatttgtcacttgctctttggtcttctcagccactggtacaaataaagagcaacaacagattaaagggtggtagaataacagtgacttaaaatcattccacttccactagccatcggcttccatacacctgtatctacacatgccatagataactgagtggtcagaagaaacaaaagccaccaagatgtccaagtgagtgtggttcaaccaaacattgaatcttggctaagatattttggctaaagtcatgcagtattaaaaagtgcttcaagtttaacgatcaggaatgtaaagccatgagtgatttggatttgg

SEQ ID NO: 13113 - DNA, 520 bp, Homo sapiens
  MAP TO AC008103.27; EXPRESSED IN PLACENTA, SIGNAL = 0.57; EXPRESSED IN ADULT LIVER, SIGNAL = 0.64; EXPRESSED IN BRAIN, SIGNAL = 0.66; EXPRESSED IN FETAL LIVER, SIGNAL = 0.6; EXPRESSED IN BONE MARROW, SIGNAL = 0.56
gtcctcttccagcaggtcaggtgcccgtaacattacaacctcaaaagcaggttaaagaaaataagacccaaccgccagtagcctatcaatactggcctccggctgaacttcagtatcggccacccccagaaagtcagtatggatatccaggaatgcccccagcaccacagggcagggcgccataccctcagccgcccactaggagacttaatcctacggcaccacctagtagacagggtagtgaattacatgaaattattgataaatcaagaaaggaaggagatactgaggcatggcaattcccagtaacgttagaaccgatgccacctggagaaggagcccaagagggagagcctcccacagttgaggccagatacaagtctttttcgataaaaatgctaaaagatatgaaagagggagtaaaacagtatggacccaactccccttatatgaggacattattagattccattgcttatggacatagactcattccttatgattgggagattctggcaaa

SEQ ID NO: 13114 - DNA, 516 bp, Homo sapiens
  MAP TO AC008521.5; EXPRESSED IN ADULT LIVER, SIGNAL = 0.9; EXPRESSED IN BRAIN, SIGNAL = 0.71; EXPRESSED IN PLACENTA, SIGNAL = 0.77; EXPRESSED IN FETAL LIVER, SIGNAL = 0.66; EXPRESSED IN BONE MARROW, SIGNAL = 0.73
tgttgactcggaaacaccacaaaaatagaagctatgtgagtgatcactgtttagttgggtggtgtgtggctatggatacccatgtacatgagcataaacataaatatgtgtgtctgggagtgtattctagaatgtctcctcccttttacccttgcctctgtatccctgactcttatttcactgtcaatacagaccgtcaacaaagatgtggacgcacaggctgaaggagaagggagccgcccatccatggacttattcagggccatctttgccagttcctcagatgaaaagtcctcatcctccgaggatgagcaaggtgacagtgaagatgatcaggcaggctctggggaggccaacttccaaagctcccaagacactgacttgggggaaacatcatctgtggctcacggtatgtcagtatttcagactcggggatctaaaggagaagacaatgactctaggacagctgcttctctgtttactctataatcttaaacccgaatgattagcaatcaa

SEQ ID NO: 13115 - DNA, 505 bp, Homo sapiens
  MAP TO AC022268.3; EXPRESSED IN PLACENTA, SIGNAL = 0.47; EXPRESSED IN ADULT LIVER, SIGNAL = 0.53; EXPRESSED IN FETAL LIVER, SIGNAL = 0.46; EXPRESSED IN BRAIN, SIGNAL = 0.49
atgtataccacgcctctccgtcgagctgctgtctctaggctgggaaacatgtcacagattgacatgagtgagaaagcaagcagtgacctggacatgtcttctgaggtcgatgtgggtggatatatgagtgatggtgatatccttgggaaaagtctcaggactgatgacatcaacagtgggtaagtaaccctgttctccgtcagcattgtgtgaagaggggaggtggtctactataatgcattcactataaacaaatgtgtaagtttgcccagaaagtcatgagaacatatgagatatctgaggttattcagagtgttgaagggcccttcctctgctcattcatggagagtaaagaatccaagatttctataaattcattataagccgctaagtttttctgttgttgagagaaacacatgtggcttctgtttttcagagtgattttcacatgcttcttaagtaacagattttgtagttaaggacgtgggaaggagacaggaggagt

SEQ ID NO: 13116 - DNA, 578 bp, Homo sapiens
  MAP TO AC018501.5; EXPRESSED IN PLACENTA, SIGNAL = 0.83; EXPRESSED IN FETAL LIVER, SIGNAL = 0.85; EXPRESSED IN BONE MARROW, SIGNAL = 0.64; EXPRESSED IN ADULT LIVER, SIGNAL = 0.86; EXPRESSED IN BRAIN, SIGNAL = 0.94
  unsure 190
cacggcagagggtagaagagtcaagacgaagcagcagccggtgccccctcccgcataactgggcaggcaccccgcccatcacaccctcgcagtatccacatgcctctgccacgctgggccttcacgcccttgctggagctggccagcgacactcaccacagataaagcacgtggtcttcaagatctcttncttcttctgcttctcactcctcaggtcagcataagtggcaatgataaccccaaaaatcaggttaagaacaatgatgatgaccatgaagaagaacaagaggtcataaataactctagcagcaaacaggggttcctggaaaagtatgtaggtgtctggatcagtctgggtcccttgcgaccctttggtctgcggagcctggggcacagctcaagtgagacctcatctacttgggtagaaattaaattgggcattcaacttttaaactgaaaactgcatctcttttcatgtcccctgtctcaattgcgacttctccaagtgtggtgtgacacagccaggagggatattcactgtgcgttcaggtggatcaggcctaaccctgatggaaaca

SEQ ID NO: 13117 - DNA, 524 bp, Homo sapiens
  MAP TO AL133544.5; EXPRESSED IN PLACENTA, SIGNAL = 0.77; EXPRESSED IN FETAL LIVER, SIGNAL = 0.66; EXPRESSED IN ADULT LIVER, SIGNAL = 0.76; EXPRESSED IN BRAIN, SIGNAL = 0.86; EXPRESSED IN BONE MARROW, SIGNAL = 0.7
tctcctttgccatttcttcagttacatggcactgatatgcttgcatcaattcttcatcctcttctaaatcagtctcttctcttccctcatttgccttctcacttttctgatgatcaacgcctggctgtggctttgtatgtgttttctggtgtgtagaatcaaccttattctcaggagtttccggtttcaggtcttgtgtagtcaactggggcaccgtctttatcacctttttatttggctttccttgtttgtcttcctctacactagcatcaccattaggattttcagttgctaactgtgtgttcctcaatttgtttttagtgactctcgtgctcttcttcaggttgttagtgttagcagcacttacatcatcacttgtagtttctttaatatggggaagattgcttctaatagtgtcgggctaggaaaagaagacatgataacaaagtttcagttacacatagattagttatataaagaaaaacctaataattaatatttgacaatgtggaattattgggagg

SEQ ID NO: 13118 - DNA, 508 bp, Homo sapiens
  MAP TO AC018731.3; EXPRESSED IN BONE MARROW, SIGNAL = 0.8; EXPRESSED IN PLACENTA, SIGNAL =   1; EXPRESSED IN ADULT LIVER, SIGNAL = 1.1; EXPRESSED IN FETAL LIVER, SIGNAL = 0.84; EXPRESSED IN BRAIN, SIGNAL = 0.79
tcttggccatggtaatgttgtagtgcaacaattggtcacatgctcgtgccataaacaagctggtgtaaacaaacctactgtgctgctagttgtataaacatagagcacatataatcatgtacatacagaatacttgataatgacaataaatgactatgtcactgatgtatgtattaactacactatactttttatgttaattttagagtgtcctagttataaaaaaaaattaactgtaaacagcctcagttccatgcgtgttattgacccgaagaccttccagtgggacaagatgtgtcagtggaagacagtgatattgatgatcctgaccctgggtaggcttaggctaacatgtgtgcttatgtctttgtttttaataagaaagtttaaaaagtaaaaaaagaattgaaaatgttaaaaatagaaaaaagctcataggatgaggatataaaaaagaaaatatttttgtacagttgtataaagtgtgttttgagctgtgttattacaa

SEQ ID NO: 13119 - DNA, 526 bp, Homo sapiens
  MAP TO AC022313.2; EXPRESSED IN BONE MARROW, SIGNAL = 0.75; EXPRESSED IN PLACENTA, SIGNAL = 0.75; EXPRESSED IN ADULT LIVER, SIGNAL = 0.92; EXPRESSED IN FETAL LIVER, SIGNAL = 0.85; EXPRESSED IN BRAIN, SIGNAL = 0.63; EXPRESSED IN LUNG, SIGNAL = 0.84
atgccttttccatgttcaggttttaaaatcttccacctgccaccctcaatattccattaccatcaacttctgcatttcatttatcctgcagattagatttgcaaataagaattgcggattctctcttcattttaaaccaggcttttcaagtactgcattatgttccattgagccaggtttcaagatgtggaaataaaactcaatgagagatagtcataaacactgtctttaacctctagaattatagtgatatgtggcattacaggaattggcaacatgacagaaagtcgtaagatggattatgaggtaaaacatctgatggaaggaaagagtgtaatggtgggttatatgaatgtagtaaatggtactccagaagagatatgtgggaactctgaggtttaatgcagacaggtgcccttagctgggtcaactgggaaatgaaatcctcaaatgaccagaagcctctttctagcaacaccatagtcttaatgcgtgaccttaggcaagtcacttacctgcacggtcc

SEQ ID NO: 13120 - DNA, 532 bp, Homo sapiens
  MAP TO AC022204.3; EXPRESSED IN PLACENTA, SIGNAL = 0.87; EXPRESSED IN BONE MARROW, SIGNAL = 0.67; EXPRESSED IN ADULT LIVER, SIGNAL = 0.65; EXPRESSED IN FETAL LIVER, SIGNAL = 0.64; EXPRESSED IN BRAIN, SIGNAL = 0.77
gtgcccagctcttaaactgccatttataaaattattgttaactttggtcttggaaatgcaatagactttcaaaataatattatctcatggattgttcttgatttatataatattaatgtctgtttattgtcttttgttgcaggatttatttatacatgtggtggaactttaaaaggacttaatggcactatagaaagccctggttttccatatggatatccaaatggtgcaaactgcacatgggtaataatagcagaagaacgaaatagaatacaaattgtttttcagtcatttgctctagaagaagaatacgactacttatcattatatgatggacatcctcatcctacaaactttaggacaaggttagtgtgttttgaatggaagactggagagaaaatatttcctgggtaaaagtagtttattttacaaaagatgcttaacatttgtgatgcaattataataaagttgtattcaccatctaattattatttatttgaaaatatatcatcccatgaacaaattagcttgg

SEQ ID NO: 13121 - DNA, 594 bp, Homo sapiens
  MAP TO AL133283.9; EXPRESSED IN PLACENTA, SIGNAL = 0.89; EXPRESSED IN ADULT LIVER, SIGNAL = 0.77; EXPRESSED IN FETAL LIVER, SIGNAL = 0.81; EXPRESSED IN BRAIN, SIGNAL = 0.76; EXPRESSED IN BONE MARROW, SIGNAL = 0.58; EXPRESSED IN LUNG, SIGNAL = 0.83
tatagcatttttggggcagctgaagtggaagtattttagccagataaagaaagcgaagttagaattatagaatcagtgacccaaaagtgatcttaaaaagatcattccctttgcttttttgcctcatacctgtttggaggaagtgaggtgtaatggttaaggatgcaagcccagggccaggctgcctgttctgggttccccatctgctactcatgagctgtgtggctttgggcaaccagtatatcctctctctcctgcttttttctcatctgcgatgcaggcacaatgagtacgattatgcttatgtcacacatagtatgggctgtggagattaaaggcaataatgtctgtgaagatcttactatgtgtaaggcacgtagtaacatgttagctatttgtttagctgttattattaactttaagcaggaataattatgaatcctcccagatttgtaacctgtctctaaattgctccataagcatcattttgaggtaaaggcataatgaaaaaaatacacattttaatcctgcaaatgtttcttttccatccagtggaggagcataaatcaccagcgattatttgccttgggctga

SEQ ID NO: 13122 - DNA, 505 bp, Homo sapiens
  MAP TO AC019083.5; EXPRESSED IN PLACENTA, SIGNAL = 0.48; EXPRESSED IN BRAIN, SIGNAL = 0.45
ctcagaagcttccggttttgccccaaaccagtgggaaccaatcagaaagcctgaagcggcagatgtctgcactaatccatacagggaggacctgagggaagcaactaagtttttgttcttatcacaaatgtttaaaaaatcaacaacatgaacgggcaagtgtgccaccacacagtgcttgacatctggatgatcttgcatcatctgagctgccttttctttctttctgacacattgctttacgtgcctgatcaccattcttttgttgacattgctgtttggatcagccagctgatgacacagccagatagaaactggctgaggcaggggtaggggtaggggattctctgatcaagctgatcattcaaagggttgcagagagggccactggcctattaaaaaaaaaagtcctacactccccacatctttagtgtttttcttttatgcttcccaacagtttgggatcccaacctgcatgttcatgtctcagtaggcatttgccatg

SEQ ID NO: 13123 - DNA, 530 bp, Homo sapiens
  MAP TO AC021003.4; EXPRESSED IN BRAIN, SIGNAL = 0.54
ttgtgctgatggaagcagagattgaggcaatgcagctgcaaatcagaaaatgctaaggattgatgggcatagctcttccatcccttttcaaaaaagtctttatggttggtcagcttctttatattatacagattctaaattatatttgcatctgtgctatatgaaactctgttgctaggttgtacatattacgctggatccatagtagtgcataaccttaatcacatctgccaaatcccttttaccatgtcaggtaatgtattcacaggttctggggattacggcatggacgtctttggagaccattattctgccaactgcatctgtggaagaaagaacaagaaaaggaaggatcctactcagaacctcacagggagcgcggccctgctgaaaccttgatttctgatttttagactccagaactgtgaaaacgtttttaaataattgccgttgttttcagccacccattttgtggtactttgttatggcagccctagaaaactaactcctggaccctgcattgtgaaatt

SEQ ID NO: 13124 - DNA, 548 bp, Homo sapiens
  MAP TO AC013698.3; EXPRESSED IN BONE MARROW, SIGNAL = 0.97; EXPRESSED IN ADULT LIVER, SIGNAL = 0.88; EXPRESSED IN BRAIN, SIGNAL = 2.5; EXPRESSED IN LUNG, SIGNAL = 1.2; EXPRESSED IN PLACENTA, SIGNAL = 0.63; EXPRESSED IN FETAL LIVER, SIGNAL = 1.8
aggctcaggaatgtctccagccgcttcctggatctgtatgcaatgagtcctcccttgttggcccaccgatccaccccagcagcaccctcattttccacgtggtacaccaactgtggcaaatcaagccctgtttctggatttctttctaagcattctttcaagtctactattcccccacccatggccctcagtatggcatgagcagcacaagagtcccatttgaatgtggtatcttctgaaaagatgtaaatgtcaacgaggccttggacaacacataggctcttataaccagccccagctgccccaaatatgcgatctccacacacacgtgacaatgcagctttgatagtctccttttcacttgtactaattacggctgaaaaactgggggagaatgctgcctcagagccggtgtttccagtgtgtgtttcactgccgtttcttctagagatggtgagctgtagtgaatgcatgttggtccccatgtaagaaaggccccaatagcactgtcctttccacctgtagaagaaaaatttcaattggtgatg

SEQ ID NO: 13125 - DNA, 506 bp, Homo sapiens
  MAP TO AC021037.4; EXPRESSED IN PLACENTA, SIGNAL = 0.7; EXPRESSED IN FETAL LIVER, SIGNAL = 0.53; EXPRESSED IN BONE MARROW, SIGNAL = 0.55; EXPRESSED IN BRAIN, SIGNAL = 0.5
aatgatggcaggagacaagcacttgcatttttctcatgcaacattgtctgctctcttgctggcctggccaagtcagtgtcctggccaagcagaagggccccacccttcaacagctctgaagattctgctcctaaacatctggtcaaaccagaaattcataggcagtgatgaatgtgaataatcaaggttacctggaaaaagacagaacatccatttgtgcaaagaagaggcacaggagggaagaaatccatccacggtttccacctctaccactgccgctgttccttctccccctcctcctctgtctcctcctcctccgcttcttcttcctcctcctcctccgcttcttcctcctcctcctcctcctcttcctccacctccttctcctcttctgtcttctcctctttccccactgtcttcagccagatcttgggtctgcaacaggagaggtaactgagagctctttactttgtcctgctgtgtattctgacccaggagaagactgg

SEQ ID NO: 13126 - DNA, 524 bp, Homo sapiens
  MAP TO AC013332.4; EXPRESSED IN PLACENTA, SIGNAL = 0.48; EXPRESSED IN BRAIN, SIGNAL = 0.47; EXPRESSED IN BONE MARROW, SIGNAL = 0.46
tttgggattcttctgcaaggaagatgtgtctttcccccatttatttatttgcttaatcatttattcatatcattatggacttgggcttaattactatatacttggagttataacccaatattacattatttttgttgctcaaattgttccagccttggtcactgggaaggagctctctcagttggctccttcctgtgtccctggaacatactgccatcatcacaagcttttgtttgtttgtttttcaaggactttcttactttctgacaccagaacatgctccaggctcatcttgtgcattcactggccagccctaaaatcagctatttctccaaggaccctggttccttttattggaggacggtgctagaaatcaagaactgggtgctggatgtggttgttgttctgatggtgatttttatccagataaaataaatgaaaatgtttgcagtcagagagataggagtttttgctagctgtgttactttgagtgagttacttggccactttgggcctcagttttc

SEQ ID NO: 13127 - DNA, 591 bp, Homo sapiens
  MAP TO AC018530.4; EXPRESSED IN ADULT LIVER, SIGNAL = 0.64; EXPRESSED IN BRAIN, SIGNAL = 0.62; EXPRESSED IN PLACENTA, SIGNAL = 0.67; EXPRESSED IN FETAL LIVER, SIGNAL = 0.52; EXPRESSED IN BONE MARROW, SIGNAL = 0.63
tgtttgctttgttttgttttgctcttttgaaagggtaatttgttacttagtaagccctttatttttatttgggaaattaaatagttgtaactaacccaatggaattgtgttttgtaaatgttggcctcttataaatcaattttacttccttctctctagtggtgtggtagctcatcctagcaagacagtcagttggcaattgttttctgaactcctgcagggttctcagcagcccattaagtgatggatggctagaaagctgatgactgagaatttgaggaggtgtgtctacagttagtctagtcaccattttattgaagctggcagaataattattgcgtttcttgaactctagaaattattttatgaaagcagaatatttataagctaattaattcttataatcaaactaaatcatattaaccaaattttactccttgtttattataatgagtagattagccgtatttttgtgaagacttactatgcactggatacatttaattaatgtagatatcatttaactcttttttaaggttgtcgggggtgagttggccaaattcagcctggtccagggaaagtcggaatttt

SEQ ID NO: 13128 - DNA, 543 bp, Homo sapiens
  MAP TO AC026206.1; EXPRESSED IN BRAIN, SIGNAL = 0.51
ttgatcacattctgcccaagtcaattccagaagaactgcagaatggggagggatttggatatatcatcatgttccggccagtgggctcgacaacctggtccaaggagaaagtgtcatctgtggaatcatcaaggtttgtctacagaaatgaaagcatcatcccactgtctccctttgaagtcaaagtgggtgtgtataataatgaaggagaaggatccctgagtactgtgaccattgtctactctggggaagatggtaagttgtcctcaactctggttttctttgagactctatgcatagtttgtgttcccttgttccattttcaatgaaccactctgctaaagatggttatgtctttctctggatggtagaacctcaactggccccaaggggaacttctctccagagtttttctgcttctgaaatggaggtttcatggaatgctattgcctggaatagaaacactggaagagtgctgggctatgaggtaatccacattaatttcacttttgcttatgaatgtgccaatggacttcgcaatag

SEQ ID NO: 13129 - DNA, 527 bp, Homo sapiens
  MAP TO AC007981.43; EXPRESSED IN ADULT LIVER, SIGNAL = 0.77; EXPRESSED IN BONE MARROW, SIGNAL = 0.82; EXPRESSED IN LUNG, SIGNAL = 0.87; EXPRESSED IN PLACENTA, SIGNAL = 0.74; EXPRESSED IN FETAL LIVER, SIGNAL =   1; EXPRESSED IN BRAIN, SIGNAL = 0.92
caggtgctctttcctcttggagctggaccctctggggcgggtccccgtcggcctccttgcgtgttttctgcacctggtacagctggatggcctcctcaatgccgtcgtcgctgctggagtcggacgcctcgggcgcctgtacggcgctcgtgactcgctttcccctccttgcggtgctggcgttccttttaatcccacttttattctgtactgcttctgaagggcggtgggggttgctggctttgtgctgccctccttctcctgcgtggtcgtgaccttggacctgaggcttctgggctgcacgtttgtctttgctaaccgggggaggtctgcagaaggcgaactccttctggacgcccatcaggccctgccggtgcaccacctttgtagccggctcttggtgggatttcgagagtgacttcgccgaattttcatgtgtgtctggtttcttctccactgacccatcacatttttgggtctcatgctgtcttttctcattcagaaactgttcgatttctgccctgatg

SEQ ID NO: 13130 - DNA, 553 bp, Homo sapiens
  MAP TO AC021366.3; EXPRESSED IN BRAIN, SIGNAL = 0.53; EXPRESSED IN FETAL LIVER, SIGNAL = 0.53; EXPRESSED IN BONE MARROW, SIGNAL = 0.52
tgaacacatcagccttccacttagttcactggaagttttctctctattccagtggcacaatctccaaagttatcagaaacctgcattcaagaatccttttcatgaaatcctccaaagaagcaagccctggaccatagctgattacaagtcactttttgagaaggatcaaagcaaaacaaggattgtagatgacaaaaggcttaagtcagccatagataaagacacagttgaccaggacggttggttatttctatggcatacaaaaatttaacataataatcgtaattatgacagacaacatatattaagacatatcagaattttaggcatctcatataatactggaatgcatattaacaacacgtctatataaataagccgaaaggaagctaaataccacctcagatttcacaatgctttctgcataattctaacataacaaaagcctagtaagcctaatatgtctttcttggacttgagggaacctaatatccaaagagttagtttgaggtcaaaaagcctgaatttagactctgaaattttgctgttggaa

SEQ ID NO: 13131 - DNA, 598 bp, Homo sapiens
  MAP TO AL162311.1; EXPRESSED IN ADULT LIVER, SIGNAL = 0.58; EXPRESSED IN BRAIN, SIGNAL = 0.45
agacggcaatgtgtgtatggcatgtaaaaatgctatgtatcaaaatcaatgataaaaagaaaatcttaaaggtagccagagaagaaaaaaacatgtatgaatttcctatcactgccatagagattatctcaaacatagaagcttaaaacacaaatttattatcttacaattctctaagtcagaagaaggacctgggtctcactgtgctaaaatcaaggtgtgagcagtgattcaaaggaatcaaggcttcattctttcctggacactctaggaaagaaagtgtttccctgctctttccaatttctagaagccacctggattccttcctccatcttcaaaaccaacagtaaggcatctctctgattctgcttccatagtcacatcttttttcctgactctcttttgtctgtctcttccattaaggactcttgtaattacactggacccagccagacaatccaggataatctccctattttaaggtaatgtaattagcaaccttaattctatcttcagtcttagttactttttgccgtgtaacccaaccttttcacaggttccaggaattaggatgtgcgcatctttggcaggccattat

SEQ ID NO: 13132 - DNA, 562 bp, Homo sapiens
  MAP TO AC009493.3; EXPRESSED IN BRAIN, SIGNAL = 0.45
gaaggtggttttgttggacagtcaggtaattgtctgataaagtgacctatgtctgtgactatagaacagcctatttaaaagaatttattggacatattgggttgatctgtactccctaaaacaataaaaagattattttaaaaacttctttgtgtgtttcctcttctttttatttttattttttggtatttgtatagaaaaaaaaagtacatgtcctaaaatcttctatctcttgtgtagtatttctcaactgcggcaatgaaaataaaacttgcaaccgtgtggcgcaggctttagaatctgctacaatagatgccatttctgtcacttctgtaggtaccactgcagtaaatgaaatagtaataatactaaccacgtagagttgttatttggattaacgagataatttaggcattcaattaatactaattttatttttcttatttgcattgatgtttgacaatattctgagagatatgtttgcaaataaaatatctacttcaaaaagtggataagattgttggctacaagctgcaaaggatccttttgctggtattttggc

SEQ ID NO: 13133 - DNA, 596 bp, Homo sapiens
  MAP TO AC011155.4; EXPRESSED IN PLACENTA, SIGNAL = 0.6; EXPRESSED IN FETAL LIVER, SIGNAL = 2.1; EXPRESSED IN BRAIN, SIGNAL = 0.44
tcggaagaaaaaccaacagcatctccagctctcgcgcggaattgtctcttcaactttacccaaccgacgacaaggaaccagcctcaaccttttaatgcacagcccggccacaggattgccttccatctcctcttggtccctcctggatgtggtttattgatgacttgcgagcccctcagagagctgtcttccctcctctggctccctccgtttccttgagttagttttctaaggttttaccggggctcgggatctcttggaccgaatggaactttttgctgcctgcttttgctgctgattctgtcagtggacaaggaaaaaggcttcgaaggcagcagaggcgcaggggaggtggagaaagaggtggaggaagaggacgaggaggaggaggaagccgaaggggctcggcgcgtgtgtgtgcatgtgtgcatgcgtgtgtgagtgcatgtgtgtgagtgctgccgctgcccgcgacccctggccccgaaggtgttggctgaaatatggagaatagtcttagatgtgtttgggtacccaagctggcttttgtactcttcggagcttccttgttcagcgcgcatcttcaagtaaccggt

SEQ ID NO: 13134 - DNA, 586 bp, Homo sapiens
  MAP TO AL121884.5; EXPRESSED IN ADULT LIVER, SIGNAL = 0.83; EXPRESSED IN BONE MARROW, SIGNAL =   2; EXPRESSED IN PLACENTA, SIGNAL = 0.78; EXPRESSED IN FETAL LIVER, SIGNAL =   2; EXPRESSED IN LUNG, SIGNAL =   1; EXPRESSED IN BRAIN, SIGNAL = 1.1
attcccagtggaagcatttggcctctcagctccagaaggctccctgttacccatgtcacaggtagcaggagcacctattttttataagtgaatacatctgtgtctcttgcattttctgaagtttaagaacatgaaattctttgatatgcttattccattaagaaatttctaaagtgcaaagttttagtagatgacctttcttttctaggaacacttcattgaggtaataaaaaaccaagaattcctcctgcttccagctaatgaaatttcaaaacttctgtgcagtgatgacattaatgtgcctgatgaagagaccatttttcatgctctaatgcagtgggtggggcatgatgtgcagaataggcaaggagaactggggatgctgctttcttacatcagactgccattactcccaccacaggtatggaaaattacctaggtaatttaaaatatagttctgaactaccactaggcactaatccatttcttatttgcctaattttattttttcagaagattcctggtaatttgagtgtacaagattcgtttcacagaagaacatattcagccatcaattagaggcatt

SEQ ID NO: 13135 - DNA, 569 bp, Homo sapiens
  MAP TO AL078591.18; EXPRESSED IN LUNG, SIGNAL = 1.1; EXPRESSED IN PLACENTA, SIGNAL = 1.2; EXPRESSED IN FETAL LIVER, SIGNAL = 1.1; EXPRESSED IN BRAIN, SIGNAL =   1; EXPRESSED IN ADULT LIVER, SIGNAL = 1.1; EXPRESSED IN BONE MARROW, SIGNAL =   1
aacttgcaaaacccttgctgttctattcctgtaagattttcctttgtaaatatttaacttacattcaaatagactcgtatgacaataataatgtaatacttcttcctccagctttcctcgccctgtgaagacaacttggttaaatagaaatgcaccagcacaaaacaaagattccgtgattcctactcttgaaagtgtggtctttggtattaactacacaaaacagttatcaccagatgtaagaactgaatatgtttataaatcttctccttattttaaaagaagtgtttttaacaattttatctgtgaatgttatatttcttttttaaattatttcagctcagcaacttatagatctaattaaatatgatcttaaaaattgtttggttctaattgtctattatgaaaactaacatgatacttcaaaatgttaccagatttagtggatagacatctgtgacagcctgtgccctttaacttgttactgtcaccccttggtccaacaactggtagaatcattccaaaggagcctttaaagaacaattgacagagctgagacccagcgtaga

SEQ ID NO: 13136 - DNA, 592 bp, Homo sapiens
  MAP TO AC008270.3; EXPRESSED IN BONE MARROW, SIGNAL = 0.45; EXPRESSED IN PLACENTA, SIGNAL = 0.45; EXPRESSED IN BRAIN, SIGNAL = 0.52
tcctcctcacccatggtaaccctgattctctcttacctattacagtcattctgccatttcttgaacctcatatatacaaaattatacagtatgtatttttgtgtacccgtcttctttttcttgtctttatatctgttataaatatcacatcttatttatccatgctattgagtgtaacagtagttcattatttatttctaagtagcgtgctattgtttaggtccaccacaaattacttatataagcatgctaatggtaaggggcggtgcaaacctctcattcccactacacaggttattcaagcatgtcctccagtctcttttgccacctctgatctccaaaggacaaaaaacagtggtgagaccaaaagcagaagattcccaacttttatgcagtagaatatattacctcttttttcttcacattttttcttcacatttcaatgacttttttcttcacatccaatgatgaataaattaaaccaatgacctcagatatcaaaacctacagagaaccactcttttccacccttaacgtaatagcaggattcaacaacagatatacatacatcacctctgacagctgtggacaa

SEQ ID NO: 13137 - DNA, 598 bp, Homo sapiens
  MAP TO AC019126.3; EXPRESSED IN ADULT LIVER, SIGNAL = 0.76; EXPRESSED IN BRAIN, SIGNAL = 0.59; EXPRESSED IN BONE MARROW, SIGNAL = 0.66; EXPRESSED IN PLACENTA, SIGNAL = 0.62; EXPRESSED IN FETAL LIVER, SIGNAL = 0.68
gaggatactcatgtgtgccttgaagattattgacctcataatacatgttcagaaaatactggataatctttactcaaggttttattcaagatgcttcctttttatggttttgttctagatatttttctttttctaaattggttaagaagtatttgattatatttgtgtaaataaatgcatagtttaaatatatatacaattgtggaaataaattcttacagaattagtttgtattcctactcaaaggtataaaaaaccagaggagcggagtccattggtagcagcaatgcagcattttctgccagttctaaaggatcgttttatccagcttctttctgaccagtctgatcagtctgtcctcatccagaaacagatattcaagatcttctatgctcttgttcaggtaatatctgtgaagcagtttttatgcataaaaagttagtctgtcatttaccgtgttaaaaattaacaaagaatttcagcatttgaataatagttaacttgaaaatctacattaagtggatgattttctagcaaaatagaaattgcaaaaattataagtctaaacaagcatacttcctccccaaatacataaccc

SEQ ID NO: 13138 - DNA, 501 bp, Homo sapiens
  MAP TO AL158012.2; EXPRESSED IN BRAIN, SIGNAL = 0.44; EXPRESSED IN PLACENTA, SIGNAL = 0.54; EXPRESSED IN FETAL LIVER, SIGNAL = 0.79; EXPRESSED IN BONE MARROW, SIGNAL = 0.43
cagcccctaaactgcttttgctttgtacacagcggtgaccaagtaacccttctgtcccaggaggttgtaatatttagaataaactgctgctacagaaaaatgaaacagccaaataaatagggccccatctggccttttaccaggctccactgctgcccttggcattgtccctgtaacctgcagaccataaagcaaacacttcaccagcccactatcaagcaggcacttcctcacaccaggcgctgggttggaaactggaaagctcctgccattcttacggtgtccagatgcgtccgctggtgtttggcgcggtcactggagttactgaaggccttctgacaacccggatgctggcacaaatacggcttctcgcctgtgtggctccgcaagtggatcttgagattttcaagccttgaaaaggccttctcgcaaccttcaaactgcaaaaagaaaacaatttttggtggttgagaaggaccttgaatgtttgagtctggggga

SEQ ID NO: 13139 - DNA, 592 bp, Homo sapiens
  MAP TO AC009503.3; EXPRESSED IN PLACENTA, SIGNAL = 0.91; EXPRESSED IN FETAL LIVER, SIGNAL = 0.86; EXPRESSED IN BRAIN, SIGNAL = 0.72; EXPRESSED IN LUNG, SIGNAL = 1.1; EXPRESSED IN ADULT LIVER, SIGNAL = 1.1; EXPRESSED IN BONE MARROW, SIGNAL = 0.75
gggctgtttctatgaggctgacatctatagggaccagttaaggccagcttcggtcaaacattatgaaaaggggtttggctattattcagatagcactggatctgtgttagatcttttgttcttagtgaatttttccttatgcaacaaatgtataaacagtggattctactttaaaaaaaattgtcctctttcctcctagggagaaattccttcgattttatagttgttgaacttagaacttctggacacattaaaatcaattccacacactaagatgcattttaagagttattaagtagaatttttgatcatgtttcttttctacagatacattagtgttaaagggaaacatcatttctggctttgagtgggtgtcctactttgtttctggtgattcgctgggagataggccaccaagaagcattactttgtcctctcagctagatggtaaagatcagccaggtgtggaaagatccattcatctattcaggaaacaggtactgagcggttgctacttgccaggtgtgttctggagcctggaattacagtaggcaacaagccagacagaagtccttgcccatgaatttctggt

SEQ ID NO: 13140 - DNA, 530 bp, Homo sapiens
  MAP TO AC013593.3; EXPRESSED IN LUNG, SIGNAL = 0.87; EXPRESSED IN ADULT LIVER, SIGNAL = 0.89; EXPRESSED IN BONE MARROW, SIGNAL = 1.2; EXPRESSED IN PLACENTA, SIGNAL = 0.68; EXPRESSED IN FETAL LIVER, SIGNAL = 1.1; EXPRESSED IN BRAIN, SIGNAL =   1
cctcatgggaagagccatagcgggaattcttacacccagtgccactggagatgaggcccgaacctgcaagatattctcgctccattttcttttaacagtcaattcctaggttgccatagttttcactggtaaaaccattcccattgtaaattctgtcttgagtgtcttcaggtaatctccaaggacctcctccctgaccttagcagtgcctgcagttttcataagatcattcagtatatccccatctcctttctttttactcacattcacctcggtgtcatctacttcattttcttcagaaagattgggtatttcaatcaatcccttatgcttcacgtcagattctttaatgatacctttccagcccagtttgatgtttcactcacacaagaaaatcacctttcctttgtggatgctgcaagaagccttaccttccacctgctttagctcgctgatctctcagtggccagcctcatcctccacaacaatgaccaccaggagctcctggagcttctctttggaccagctgg

SEQ ID NO: 13141 - DNA, 593 bp, Homo sapiens
  MAP TO AC013591.3; EXPRESSED IN BRAIN, SIGNAL = 0.7; EXPRESSED IN PLACENTA, SIGNAL = 0.72; EXPRESSED IN FETAL LIVER, SIGNAL = 0.57; EXPRESSED IN BONE MARROW, SIGNAL = 0.63; EXPRESSED IN ADULT LIVER, SIGNAL = 0.83
ccctctccacctacagcttgtgggtaaggagccacgggtctcccaggttttcctcagtgactgcccccagacttcctcgaagcagcgggggctagccatcacccagctcccaaaaacaacgaacctggatcagggggacagcaatcttcgttgtcttgtagtccaagaatcctatggatactgtgttcacaaacacctgccaaagggaacaggcaggaacatccatgaccaacaggaggagggtaagcgggacctcctccaggccaagaagggcagcacgcgtgcctgtaggcagacgaggggccagtgggcagagcagacatgaatgccccctgaaggctcacagagctgactcagaagggccattgtcacacactggtaagagctgattctgaggggagggcatgagacgcctattgcagagctgctcaccagaaggtcacaggaatttagaagagaagctcctacctgcccccgatcatgcacgtggccactgaggatgccagacgaggtgatgctggtctcatagagaatgtacccgaaggactgtccatttcccccattgactggcaggttctccatgttgatgggct

SEQ ID NO: 13142 - DNA, 506 bp, Homo sapiens
  MAP TO AL049870.3; EXPRESSED IN BRAIN, SIGNAL = 0.57; EXPRESSED IN PLACENTA, SIGNAL = 0.51; EXPRESSED IN FETAL LIVER, SIGNAL = 0.68; EXPRESSED IN ADULT LIVER, SIGNAL = 0.54; EXPRESSED IN BONE MARROW, SIGNAL = 0.55
tcataccatacaaaaatatacatgccaattgggatgaaaacctgaatgggaaaagcaaaaagcaaaaaagcttttaactgttaaactgtgtatacataaataatatattatcttttgttttattacagtgtatgctagcctcaattttggcagtaagacacagcaaacatttggtagtcaaacagagtgtacttcctcaaatggtcaaaatccaagtccaggagcttacatccttccatcctatcctgtctcatcacctcgaactagtccaaagcatacatctcctcttattatatctccaaagaagtctcaagataattctgttaatttctcaaattcctggcctcttaaaagcttcgaaggactatcaaagccaagtccacagaagaagcttgtcagccaaaaatcgtctgatcctacgggtagaaatcatggtaaaagtcaatactttgttcaaatttatttgtgtttgaattagtactttgaagttaatgcatagggctgtt

SEQ ID NO: 13143 - DNA, 564 bp, Homo sapiens
  MAP TO AC007744.2; EXPRESSED IN BONE MARROW, SIGNAL = 0.67; EXPRESSED IN ADULT LIVER, SIGNAL = 0.66; EXPRESSED IN BRAIN, SIGNAL = 0.65; EXPRESSED IN PLACENTA, SIGNAL = 0.65; EXPRESSED IN FETAL LIVER, SIGNAL = 0.73
cacaccctcgcacacaatacaagattttaaacaaatcttaggattatccacaccaaccctctaactttacgtaggaggaaactgtgattcaacttcacacatatttgaagaaactgacactaagtctctggaattctagtctgagccacttttccatatctaccccctcaggaagattcaacagcagcaggaaataaacaacatggtagaatagcattcctccaacctgtgcccatgacattaccaactgagccacactcgtgtgctcatgctgagagtcaggaaacagtttgtaggtacatggccttctcaggatagtctcagttctatgttctccataatctgcatccaaaacaaacaaacaaacacacaaacaaaaaagagtctcttttccagaatggctgcctaaaccatgataaatgaagccactgaagccataaggattcaggttccactttgtcagacttttccaaactgtggttctagactctcagatcagaattacccagggtgcttattcaaagtacatgtttgtgtgccatgagccagatccaaatttctgga

SEQ ID NO: 13144 - DNA, 527 bp, Homo sapiens
  MAP TO AC021308.3; EXPRESSED IN LUNG, SIGNAL =   1; EXPRESSED IN PLACENTA, SIGNAL = 0.99; EXPRESSED IN BRAIN, SIGNAL = 0.82; EXPRESSED IN FETAL LIVER, SIGNAL = 0.65; EXPRESSED IN ADULT LIVER, SIGNAL =   1; EXPRESSED IN BONE MARROW, SIGNAL = 0.85
gccgtgataatgaaattgccgatacgctgctcagagctgcttgggtaaccattcttttattatcaggaaggcaaacacggtttataagatcaaagtggacacctcctgcaagttacatttattacaagaggctaaagtgtccacattcctaggaatcaataagacttaaggcagaaagatagtaatatgcaatagatgaatgcaaattttgacagttcaacaaccacctacgtaggggacagaaacaagaggtaacctagttctgaaagttaccaattctgccagctctgtggttaagcaaggtgcttgatattgtaatagccatagtcagagtcagcctgacaaaaatgttgactgtcagtgcaggcactgagaatacttttataactgtctccactgcagattcctctgacggcattttgatcctactgtttcaggaagcaggacccctactctgctatcacagtgcaaataaagtaaaggtcattataaccagtcactatcacggtatttggaaagccagcctg

SEQ ID NO: 13145 - DNA, 565 bp, Homo sapiens
  MAP TO AC022918.2; EXPRESSED IN ADULT LIVER, SIGNAL = 0.98; EXPRESSED IN BONE MARROW, SIGNAL = 0.67; EXPRESSED IN LUNG, SIGNAL = 0.87; EXPRESSED IN PLACENTA, SIGNAL = 0.97; EXPRESSED IN FETAL LIVER, SIGNAL = 0.72; EXPRESSED IN BRAIN, SIGNAL = 0.71
tcaaccctacacgctgtctgcattaatgcatagtacaaaaacaccttattcttcaatgctgctgcatccaaattctccttacatgtgttttgcctcagaaaagaagacaactgggtccgatacagtaaaaggtgtgtcagtcataatttggttagaactctcagtttctataaatatataagcaagaactttataaaatattatacttgctaacaatatagcatgaatgcttctcatagcaatactccaattttgaagtttgatgatgcaggaatatcccactgaactcagtaaactggtacattatgttggagtagcatatattattaacattgataacaagatgcaggaaagaatcaattacaatgtcttctgaaggaagttatcgacagtctgaatccaaatgcctatagatccaatttcacttatgccaaaaagtaacaacaaacaataagatgattgataagatatttacacttaccttagtaatggttttgcaacaaactaaatttatcatctgaagtgatttgataccatatatccaagacccacattggaggaacag

SEQ ID NO: 13146 - DNA, 590 bp, Homo sapiens
  MAP TO AC013634.3; EXPRESSED IN ADULT LIVER, SIGNAL = 0.93; EXPRESSED IN BONE MARROW, SIGNAL = 0.66; EXPRESSED IN LUNG, SIGNAL = 0.91; EXPRESSED IN PLACENTA, SIGNAL = 0.82; EXPRESSED IN FETAL LIVER, SIGNAL = 0.71; EXPRESSED IN BRAIN, SIGNAL = 0.72
ccctgtgcctctctcttcacatcgtcttccctctgtccttgtctgtctctgtattcacatttcccccttttgatcaggacaccagtcgtattggattagggccctgataatgacctcattttaatttgattatctctataatgaacctatttccaaatgaggtcacattatgaagttttggggattaggacttcaatgtgtctttattgaaggacacaattcaacccataaaggaaccaacttacctttctttcctcacattcaagatgatacccagtacagaagggccacctgcttaaatgtgtctgctgtgaaaacctcagccactgaagtaaatgttggtctctctgtgaagttgatgtatctgaaaatcgcagcattgtatggaacggacagcaagtaagtgaggagcagcgctaacatggatggcctcagagggcccctgtctgggttcctcatatctgatgtgaggacactgactcccagaacagggaagggctataattcactagatatttgtcagacaaataagtcagtccatttacagtgattattgttgatgttaggaaccctggtttggagtcaggaaa

SEQ ID NO: 13147 - DNA, 548 bp, Homo sapiens
  MAP TO AC011272.3; EXPRESSED IN ADULT LIVER, SIGNAL = 1.4; EXPRESSED IN BONE MARROW, SIGNAL = 1.1; EXPRESSED IN LUNG, SIGNAL = 0.96; EXPRESSED IN PLACENTA, SIGNAL = 1.1; EXPRESSED IN FETAL LIVER, SIGNAL = 1.3; EXPRESSED IN BRAIN, SIGNAL = 0.87
gctattctccccaggctaccgcttacatgaaacactgtcgcttcaccccttctttctttgtgctttgtatgatttgtttactaccatgtctgtctctcccattaaccagtaagcattttgaagaacaggatgtcatattcccttttacataccctgatagactggtgttcttacagataacagacactcacttgttaaaattaaccatcattctgcatataaaagtagtgcaggcatacaaaatcattaatgtcttatttttcacactgttcacagggaaagaagagggtcattgtgtcacatggaccatttcctccccgattcctctgacctcaccgttgctgtttctgagcacgctattgcagatgactactttggtaagcgctagaaaagatggcatcatgacctacgtgctatgctgaagaagacaggagtaagggtagagctaccagaggtaactcctaggggtcttgaagatctaagtgacagtgaaggaagtgcattgttcattggagaaaagttagtcaaggttatttcggacgcttcaa

SEQ ID NO: 13148 - DNA, 563 bp, Homo sapiens
  MAP TO AC016202.4; EXPRESSED IN BRAIN, SIGNAL = 0.45
acctggaggttgaccaagtgatccacttatgggcagggagatattagaagtctgtcagagggtttctgagcaaatctttctttctgcttgaaaataaataaataagttattcccctttctcacagatggctttctgcctttggaattgatacgtgatatttgactctatcatggccatgttagaaccaagtggcaacaagatgaataaaggtgacagagtagaagggaaaacatcattccttgctgacatcattaacttgccattaaaccaattctgaaactgagtattggcagagttcctgttaagtaaacaagaaatgtctttatgcttaagaaaaaaaatgatttatttgtattttttaataaaagcaacactgaacttaaaagcttgcataagaaatatgtttaacatccctaatatctatcttattattataataatatattataactgggtatatagagtaaatgtcagtgtaacttagattaaatatttatatccatcttcctaatataagattttaaagtcataatgatcacaatctgattgttgattggcctga

SEQ ID NO: 13149 - DNA, 504 bp, Homo sapiens
  MAP TO AC018578.3; EXPRESSED IN BRAIN, SIGNAL = 0.46
catcaactcttccctgggtctccagcctgccagcccaccctgaagattttggacttgccagccttcataatcacatgagccaattccttaaaatgaatctctttatatgtaaatagagagagaaagagagagagaggtgtatatatatacatgcacattgtcttggtgctgcttctctgcagaacctgactctatggaatcctggctctggcccttctcctctctgaggcccatgtttgccatctgtaaagggaggaagtagaactgtatagcttctaaggccccttagaaattaaaaattgcaggatgcaaacacctgctagttttgacatgtacgatttttacaaagagtaataaaagcaaattccggagaagtactagataaaaatgtggaaacactcctcattccctgacttttgcttaacatttagagcagtttggtcagtctctgctatggtaaaatacacatgtctcggcattgtccccaaacacaaaatgtggctg

SEQ ID NO: 13150 - DNA, 597 bp, Homo sapiens
  MAP TO AC019284.4; EXPRESSED IN BRAIN, SIGNAL = 0.54
acgaacccccatgacataagtttatctgtgtaacaaaccttcacatgtaccccttatttaaaagttagaaaacatacattcaagagaaaaaaaagaggattatctcattaaatagaaaacaaagaaaagtagtaaacacactcagtaaacagcctatgttacatgataagctgaacaactcgccttgtttatcctcttccagttcactctcagagcatccatcattctcatctttcacattgtcatgggcatctggtgccttctgtgatgaggtttcactctctttttcagggtctaaattatcttttttatcatccaaaggtgactgcggtattccattcatttgaacatcagcctgtccttcttcattagatttttcaccttgtttctcctcatctacttcaaagtcttcttcatactctgaaataggaaaatctccactataagaatgaaaatagaaccccttatacttaacctatttctctctaatgagaactttgactccattatcctctcttctctgagcctttctttgcttcttctttttcgttcaattagtgaacatggaaaactaacagcaaatgatcaaagattcca

SEQ ID NO: 13151 - DNA, 541 bp, Homo sapiens
  MAP TO AC016517.4; EXPRESSED IN BRAIN, SIGNAL = 1.1
aggcaactgtgggaatcttgaaattctttctaaaaaaattaaataacaaagaggaagaggactccattgcttggtttcagttctcttctaatttttcatagcttatgttttacttacaggcgtttgttacagcaaaactgttggctgtctcaatgttgtccacatgaggtaccaaattaaaaggagcttccgacgcattggggctggtgttatgaagaaaaattgctaatcgaaaagcagtgtattcctgatctgtgtttcggatgaagagaccacctattaaaaacagcaggaaaagcacattcactgtttcctcttgtcaacattatacccaccccaagcacagtcaaatctactgccattcacaagcacatacaattaaagagctatacctgccacatctagggagactgccctttgtccctaaggtgcatgcttagtatttagtctttagagcagctcagctttttcttgtcctaatgtgtcttgctcacaatgacctctgagaccatttagtgaatgttcctttctctcccttgcc

SEQ ID NO: 13152 - DNA, 516 bp, Homo sapiens
  MAP TO AC021041.3; EXPRESSED IN BONE MARROW, SIGNAL = 0.71; EXPRESSED IN PLACENTA, SIGNAL = 0.65; EXPRESSED IN FETAL LIVER, SIGNAL = 0.52; EXPRESSED IN BRAIN, SIGNAL = 0.57
acatggctgacctttcttggcattattctccttccatgagtggcagtcagggagcatagaactttagtacattattttcagaggattaccactgaaaagactgcacacttagtaagatgctgttaataagttaacaagaggctgtgtgcgttccagagtggttttgcaggccgtcagtagtagaacacgagtgcttctttcccgcagaaatacgtccctattccttaagttcaaggaggggtctttaaaaccagctttactcataacataccttcagtttcggatgatcgagcaaggcttgggactcggcggaagggagcttgtgatgcaggctagaaaagaggagtctcttcccctcattatcccaagcaagtcttcccagggaaaatttgaaatagctgagacttgtgtgtgtcatccttcccggatcctttccctgctccacgttgttctcatgcttgccaagggccctgaaaatacagtgtggtgagaaatgctgctctgtgcccaaatgta

SEQ ID NO: 13153 - DNA, 567 bp, Homo sapiens
  MAP TO AL161739.1; EXPRESSED IN BRAIN, SIGNAL = 0.54; EXPRESSED IN PLACENTA, SIGNAL = 0.65; EXPRESSED IN FETAL LIVER, SIGNAL = 0.64; EXPRESSED IN BONE MARROW, SIGNAL = 0.52
tcagtccactgcgacttttgccctgtcttcccagttctcccgggcctatttccttatctctaaatatgaacaatgaactagtaactttggctttgaaattgttggatattacaaatctttctcctttctcaacagattcttttcaggctaaacccttcacagaaatctgaataattagttttttccagagctacagaatacaataatatcaatttccacatatgctaaaaaacatcattaccttcttcccttggaaggcttataatccaagcaataggtatctacagctttgcgtttagtggtggaagcctcaggccactgataaacagaaagaaaatgtcaagaggaatttgtttccaatgtcttatacaaataaccttggtttttattctagaaaaagtcacataatatgccaaaagttcttggcacattaggtagtttggtactttaaaatacaaacttgtttgtctttattcaagaattagcaaaaacatctaagttccatggagtaatattttacttcagtgactcgcatgagaacaatacacatacaagggactagggcca

SEQ ID NO: 13154 - DNA, 544 bp, Homo sapiens
  MAP TO AL137853.3; EXPRESSED IN PLACENTA, SIGNAL = 0.7; EXPRESSED IN FETAL LIVER, SIGNAL = 0.7; EXPRESSED IN BRAIN, SIGNAL = 0.62; EXPRESSED IN BONE MARROW, SIGNAL = 0.71
tggccctagaatcattagtgccagttatgaaaatacaggaaattagcctctctgattctgttggttttcttcatgaactgagaaatggaagtatcatggttttttgttttttgtttcctttttccatttaccttaggatttgaaacagcccatggctgaaaggaaagctcagctggatgctcttgcttttgatattcagttctttatctcagaacatgcccaggacttgtcccctcagcagaatcgacagatgctgaggcttctgaatgaactgcagaggtccttccaggacattttggaacagactgcagctcaggtggatgccttgcagggccatcttcaacaaatggagcaggaagccctggtgaaggtcagactgaaccagcagctgggctcagtttgtctttggggatgtcctctgtcattgggttttctggccagactctgtgtatcatgattgcaggagcctgggtttaccaattttgaaatttcatgtcatgcaggccagtatggttctagtccaggaggcacttgttctggctgt

SEQ ID NO: 13155 - DNA, 542 bp, Homo sapiens
  MAP TO AL121575.24; EXPRESSED IN FETAL LIVER, SIGNAL = 0.6; EXPRESSED IN BONE MARROW, SIGNAL = 0.49; EXPRESSED IN BRAIN, SIGNAL = 0.47
aaatttccggctctttagggaagtgacagcaatgcttgatatagtataaattcattaaatccttcaaagcaatatagagcagattggcataacatatattagtcatacatcttgatctaagagaataagcttagaaatgtatttattcttaccaggcagagaattaatctgtccagtgtaacaatgttatacttccataccatgtcattaagaatttcaatgcatttattgagttgctgaccccctgctgatgtagaaaactcatataccaggaaatctgcaaatgtcctcacatgggctaccaaggccctggctccaattctctctaatactctggaaggcagagagtaaaacataaactccattgttgtatggatacaacaatttgccaaatggaatgcaaattaggtttttgacttacctatagccaatctgattaatatgatctgtttccaagagcattttccagagaagacaaagaaagagaggaggggagccctgcatagagaagtgggtaataatgtcgttttcgttgctcattg

SEQ ID NO: 13156 - DNA, 533 bp, Homo sapiens
  MAP TO AC021401.4; EXPRESSED IN BONE MARROW, SIGNAL = 0.42; EXPRESSED IN BRAIN, SIGNAL = 0.45
ggcataaacagccaagaagcagttataggtattccctgctcattttgcattcatcacacattcattgaatgttttgtacttatctcaaatagtagaggataccaatggtgtaagtttaagaattacatggttcttgtcctccagaaaccatggagtccagcaggaaggaaatgacatactggtatttggcaggcagagatggaagtttggtttgaagaaaaccttttgtgctgatgttacagctgctgcagtcactagccacattcattgtgcaaaggctggaggattccacagtcagcatggaagggaccaattagtcatgcgtgggtttcatccttgcctctataagaagtaacatctcaatagtcatggtggtgttttgaatttaaataatcacacattatttcttggtatgtttttcagatcgccaaatattgtggttttgtgtcacatgtgcattatttgttaaaacaggattatggtgtgaatgatggagctgtttttttggggtggcggtggagggtgttatgttt

SEQ ID NO: 13157 - DNA, 567 bp, Homo sapiens
  MAP TO AC022562.3; EXPRESSED IN BRAIN, SIGNAL = 0.48
tgatggagcagttgtgaagctcagcttcatctgagacatgtctcaccagttccctcctctccacttcaaaccaccgagagatgccaggcaagctgtgggtcagggtcagtgtggtacgttcaatccacaggctctgtagggagggaacaggcaggtatgggcagttaggcaagttttgccacaccctgcctacctgagggataaaacagtggtgagttcccaaggaagttgagcttgcccctggacttgctgtgtgtactgcccgttttcctagatttgttcaccttgaattcattctccttgtccttggggcctttgtgaaaaggcctgtcataccggaacttcctcacattgttgacgcgatagaagctcttgactcgatctggtaccctatccatctgcagaacatccacataatctggaatgggcgtcactgcatagatctgcaagtctgggcaggaagtgaaggagaaacacagacttgccagagctgggcctgagaggctgacccctgtcatctcctcaaaggggagaagtgcaccatagtccctgctccttactgacagc

SEQ ID NO: 13158 - DNA, 595 bp, Homo sapiens
  MAP TO AC021000.3; EXPRESSED IN PLACENTA, SIGNAL = 0.53; EXPRESSED IN BRAIN, SIGNAL = 0.46
ctctggtccgagattgaagcgcgtgccagggagaggccaggcagcaggaacagtcacttccaagcctgcaagtgcaagagtgcagggaggcctgggtctgcagccttggtttgggtggctgcacctacgcagggtggggggtggggtttctgtgtgctcctggctcccaagagaataggggtgcctgggctgcagctgtgactggggtggctgcagttgcacctggaaagctccccctcaccaggcacgtgacctggcctggccctatctcagcggccccagggcagaagctgctggggggagggtgctgtctgcctcctcctgcgccctccctgtagtggccagtgtgatggcagatggctcactgctgccatcagtattggtacatctggacattctgctgtcgcagaagtttgtccttgctgtcatgactaagctgcttccttagccataaacatcttatgaccatgggttgtgactggtgaggaatgtgccttgctagttttaagatggagttgattttcaaatgatggcaccctggctctcatgtgctccttttcccctaacacttctgtccaccaaagttgaggaggaa

SEQ ID NO: 13159 - DNA, 512 bp, Homo sapiens
  MAP TO AC018421.3; EXPRESSED IN PLACENTA, SIGNAL = 0.56; EXPRESSED IN BRAIN, SIGNAL = 0.73
gaaatggcaaggtcagcttcatcctggctactttcagcccgtcttcccaggaactttatccaggacacagcggagcttacatgcaaattcgtctcctccaggactgacaagtgtgacaggactttttgtaggacatgctaaatctaggaatcatcaaagggtaagttcttaaaggaaattctgggctggtgaggtgatccattctgtcctcttttttcctcttttctctgccttctctctctcctcttttccttctgcagagacacttgatgtaagggccaggaatgccttctgcctaagttctgcagagacatttgataagacgtagggcaggaataccttctgcctgacttgtgcctttagctctggaggaatatggagagctggggaagaggagggtgaaccgggtcactgtagagaagaggaaaatgccagcggctcatgaccagctctgcaaggtgagagttcagttcactagactagtcaaatagggtggggattggagacagaaa

SEQ ID NO: 13160 - DNA, 558 bp, Homo sapiens
  MAP TO AC009155.3; EXPRESSED IN FETAL LIVER, SIGNAL = 0.46; EXPRESSED IN BRAIN, SIGNAL = 0.75
tgaagtccggagacaaaagccaaacactaggccgactgactgaaacataagtgactggtgccagctctggagtgtgaaaggtatgctactttcagccccaatatgaattattggatgctaccaccatcttcaatgagttccaccaaaaacattacagatcaaagtgcagtgttatgaaaagagacttaccccgcagacgacctgctctttgaattgcttgatttactgctttgaggtttcccaacagctctgtgtgattgttacagcgaattttatatccatttagcaagtctctattaaggtcatagagttccatataacgactcttcattgttttcctgtgcaaatcagtagaaatttgacatcatttcatgttgatatggcaagcttaagaaaaacttgcaaatttcttagacatacaaagaaaagacaccatttttaagctatattttcattaaaatcgagtaactgctagtttgctttgaaaatacggataagttccataaaaatattcttttccttccaaataaacagaagacaagtggccttccttggtta

SEQ ID NO: 13161 - DNA, 584 bp, Homo sapiens
  MAP TO AC008164.3; EXPRESSED IN BRAIN, SIGNAL = 0.45; EXPRESSED IN BONE MARROW, SIGNAL = 0.43
ttcccagaaaatagcatggcacactcaacaactcgtgggtgtttttgcatcctcgaaagttcagctgacaaccttcattgtcttctgctgtcttggaaattgaaaggtcaccttaaagtagaggcagctttccctgtgtcacccaatgagttagaagaactcttgactcccagctcttgccacacagtggtgctaagatcatgggtatttgactaggtttctgttgggtattgggccagggaattttgactccattttctctggttacatcaaatcccgatattcagtgatccactatctgggtttttgtcactcgtggctcccttccttcccttgctgccagcaactctatgtcctccattctgaacaaacatcacatatgtgtgcacaggagagtgcttgcacacacacacacacacattgtcatcatcatcattgtcatcatctccacacctcccacccctttgaccctgttactttcctcctcaaatatcaaggaaagcacccaacaggtgagaagggcttctcagtgtaccttttctgcagttaattgcctcctatcctctctctgacattcaatgcgc

SEQ ID NO: 13162 - DNA, 580 bp, Homo sapiens
  MAP TO AC007557.3; EXPRESSED IN PLACENTA, SIGNAL = 0.47; EXPRESSED IN BRAIN, SIGNAL = 0.45
gacctcaaaactgagggcagcccttgagctgcacgaaaaggaccaccttatttcacaaatgtgaccaaagtgcagcaaaggtgagtgacagcacagtagagccccgcccacctgctgagccatgccccttccctgtcacaatggccaaggccttaaatacccagactcctggcccccgggccttgcaaagcccctcattttggcagaacttaccatgtcgaccagccgcaaattaaagagtcatggcatgaggaggagcaagagccgatctcctcacaagggagtcaagagaggtggcagcaaaagaaaataccgtaagggcaacctgaaaagtaggaaacggggcgatgacggtgagtgagggatggggaggagattgccaaacttaggcacacattgctgccaggccctccctcttggaggcagctctcacaggaccctgaaatcttggcctgagattatttccaataactaaatgcagatttgagcaacaagagtcttgatgggaatgttctaattcgtgtctctgttgcaaacctgtcctttcccacagccaatcgcaattaccgctcccacttgt

SEQ ID NO: 13163 - DNA, 598 bp, Homo sapiens
  MAP TO AP001441.1; EXPRESSED IN ADULT LIVER, SIGNAL = 2.2; EXPRESSED IN BONE MARROW, SIGNAL = 1.2; EXPRESSED IN PLACENTA, SIGNAL = 0.54; EXPRESSED IN FETAL LIVER, SIGNAL = 1.1; EXPRESSED IN BRAIN, SIGNAL =   1
gcaaatttggatggcaaaagaagggcatgtctagaacaaaattaaaaaggcctattaggaaatccttgtggaaatcatgtacctgtcaaggcaggcatggttgacagcatttgaatatctaatagtaaaagcctatcgtataccacctagcaggactagaggaatagatgtccttgatcagatcacaaaaccaatacaggagaaagacctagatgtggcagggggtttcaacctttctggggcaactaccacaggtctattcgagaagtaccatagtaatagaattaaaagctgctatgctgacattataatgtacccagaaggaaaaaaaaaagcgagagggagaaagcagaagggaattattaccacagagctgattctggccaacaaggagaagctcatcattgggaaaagtgataggaacccgggatttgtagccacaggaagccttggactcgtagtgagagcacagcattatgtaggaaatcagattccaaacacgtgagacaagcgaacactatgattccatgatctacgacaatagaaaggaagactcctccataaacctgaaaggctttcaaagtctaacaggaccgcc

SEQ ID NO: 13164 - DNA, 529 bp, Homo sapiens
  MAP TO AC011284.3; EXPRESSED IN PLACENTA, SIGNAL = 0.55; EXPRESSED IN BRAIN, SIGNAL = 0.48
caagttcatggattcggtcctctgtgtcatctctattctactattgagcccatctaatgagtattttattttggttattctatttttcagttctctgctttccattggctcttttatttctgtgctaagattttctatttttttttttcatttatttcaagagaattcaaaattacttaccgaagcacttttatgactagctgctttaaaatattttccagattattccaacatcacattcatctctgatttagcatctgataattggcttttctcattcaagttgtgattctgctggttctaagtatgataaatggtcttcaggtatatcccacatattttgggtatgatataataagacctttgcatcctatgcatctctttttagtgggcttacccattgtggatgtggagcataaaggccggctgggtatgtgtgttcagctttatgctgggcttctccaacactatcatggcaaaagggaagcactgactcctctccccttgctgcttctcagtgaggggtgag

SEQ ID NO: 13165 - DNA, 525 bp, Homo sapiens
  MAP TO AL133412.4; EXPRESSED IN BONE MARROW, SIGNAL = 0.48; EXPRESSED IN BRAIN, SIGNAL = 0.45
aaacatgggtcttgaatgggaaactttgaacaaagacttagaattttgcaatgcgtacctacaatcttctcaataattctgttttctatacttctctttctagtggcaaagcatctaaacaaaaccaagttgtcttggaacaaagatggcattctccatggagtcagatatcaggatgggaatctggtgatccaattccctggtttgtacttcatcatttgccaactgcagtttcttgtacaatgcccaaataattctgtcgatctgaagttggagcttctcatcaacaagcatatcaaaaaacaggccctggtgacagtgtgtgagtctggaatgcaaacgaaacacgtataccagaatctctctcaattcttgctggattacctgcaggtcaacaccaccatatcagtcaatgtggatacattccagtacatagatacaagcacctttcctcttgagaatgtgttgtccatcttcttatacagtaattcagactgaacagtttctcttggccttcaggaagaa

SEQ ID NO: 13166 - DNA, 559 bp, Homo sapiens
  MAP TO AL117341.26; EXPRESSED IN BRAIN, SIGNAL = 0.45; EXPRESSED IN PLACENTA, SIGNAL = 0.47; EXPRESSED IN BONE MARROW, SIGNAL = 0.49
cccaaactgtcttggagaccaagtgttgactttgtgcagagcaatgaacatgtcaaggcaaacttagaatttccattacaatatgctcagctggaaaaaaaaatgagtatgtggcaaggctggcaacttgacttacaaatgactataaaatatgtggctgcttttctaatcacttggaattatggaaaggaaagaggacagcagagacataaggcagggcactttaacacatccacacaggaggcccaagagctggccctcaatcaagttatttcaaaaagccaaggtgagtagatatacacattacatagttaacattacatatatcaagttgtaaaaaattagtaatcattagaacaagagcgtaggctaagaaacaaatatgtggtagaggtaaaaaaatcatactgattgtcaggaaaagaagtttctgtaggaactggggcctgcaggccaagggaaccctgaaacaaagtgtggctgatgttccacttatagaggagacaggaggaataatggggttttgaggtcaaaataatcagattgggagcagttgctt

SEQ ID NO: 13167 - DNA, 563 bp, Homo sapiens
  MAP TO AC011207.3; EXPRESSED IN PLACENTA, SIGNAL = 0.5; EXPRESSED IN BONE MARROW, SIGNAL = 1.4; EXPRESSED IN BRAIN, SIGNAL = 0.46
tcctttgttttgcatattggcaagaacatgatctgaacataaaagtctcacagcacagtggaccttattttaaccctaaaattagctcaaacaatataactgaatcaaataaaatatgcacaaaaacaacaagatttaagattaagatttaactatgactatgactgtcatcacatcaaatcatcaaagttggcttcaatgatctgatgtaaggggaggatgtccattcttccctcccttaaagttgacataataaaaaataattttcctcccataacactggcttcttctcctgtgtttcctttcctagttaatgacatagccgtgtatccaaccacccaagccagaaacctcaggctcatcattgacttctccctttccttcaaatctaacattgctatcactattgaatataatttagaatgttgccttgctcctcttcatttattcccattgcctgtgctttaatccaggtccttctttatccttgcctatgttattataataatccccaactggtttaccaacctctggtctcagccgcctatgatccatccttccca

SEQ ID NO: 13168 - DNA, 583 bp, Homo sapiens
  MAP TO AL109809.18; EXPRESSED IN FETAL LIVER, SIGNAL = 0.65; EXPRESSED IN BRAIN, SIGNAL = 1.5; EXPRESSED IN BONE MARROW, SIGNAL = 0.9
aacagcctccatcctcattgagaacatggaaggcacctacgactggacaagctggctcctggtgaacatatctgcccacagggatgatgtgctcacctaccagatggcgcatgatgggcagctggtggtcagcaaaagccttgccctagaggtctcagcccaccaggagcagagctcagaggccacccttggtgaggttactcccgattttaaaattttgtctctttccttaatgttaatagtaatagtcatgcttgttataaaataacctagaaatctataaacatagagtagatttttaaagtcagctgtctaccccaaatcccacactccaagagtcaccattactaagattttgatgcacaacttggtagatcttttgacacaaatatatattaaaggaggaagagagatgcagggagatcatctgctcatggagtcctgtgttttgccttctgtctcagatgtttacttatgttctccattccttgtcagatcagccctcctgctgttctttctctgactcatttttgttctgtcctaaacttttccatcccatctgcgacctcatcccagcagactc

SEQ ID NO: 13169 - DNA, 553 bp, Homo sapiens
  MAP TO AL137853.3; EXPRESSED IN LUNG, SIGNAL = 0.87; EXPRESSED IN BRAIN, SIGNAL = 0.61; EXPRESSED IN PLACENTA, SIGNAL = 0.47
cagtcaaagctggaagaggccctcaacttggcaacagaattccagaattccctacaagaatttatcaactggctcactctagcagagcagagtttaaacatcgcttctccaccaagcctgattctaaatactgtcctttcccagatagaagagcacaaggtaagtatgatattatgatgctgcattctttttgaaagcactaattgaaagaaatgcccctttatcttatcttaagctaaaaaagagcactattgttccctcaggtttttgctaatgaagtaaatgctcatcgagaccagatcattgagctggatcaaactgggaatcaattaaagttccttagccaaaagcaggatgttgttctgatcaagaatttgttggtgagcgtgcagtctcgatgggagaaggttgtccagcgatctattgaaagagggcgatcactagatgatgccaggaagcgggcaaaacaagtaagttggggaagaaagatactaattcactgaagagtcttgggctgcatgtattgagtctctgggatgattctcaaacgtgc

SEQ ID NO: 13170 - DNA, 585 bp, Homo sapiens
  MAP TO AL162471.1; EXPRESSED IN BRAIN, SIGNAL = 0.55
caaggtaataaagccgctggcagacccagaactcaaacccacacctgtttttgtctccaaacgccataaaatctataataatcctcagagatttaaaaaaaaaaatgatcttaagtcgaaataaacacttacagtgggtagacggcttcatgagtacagtgtactgtggtaacgtaatctggacttgggttgtaaagcatcgtgtaccagtcagaaagcatcaatactcgacatgaacgaatataaagaacaccaactggatcactcacaagtaaggtgataatagctgccatgctgcattcaaataatgcagtgatgtgttggaaaagtgcgctggaactagagaaggaaaagaggcatgattactagaaaaattgcaatatttaaatggctttaataaaacatgtacatgtgtcaagatacagatttctaatctataagaaaagtcaaaaactactcgagtataacctttttttctcaaaagggataaataacactgtagcagtattatctaaatgtgtaacagaaaagcagaaattatatctaccctgcatctttagtatcttgccaaattgttgctaaaaa

SEQ ID NO: 13171 - DNA, 537 bp, Homo sapiens
  MAP TO AL161627.2; EXPRESSED IN PLACENTA, SIGNAL = 0.61; EXPRESSED IN BRAIN, SIGNAL = 0.52
tttatgggctttccttttgcttaatctgatctacttttgaacagtttaaaagcataatgaaaaagcagtttgaatgatataaatgtgatatcaatatttgattagtgttgtaataaatgaggaatgaatgagtcttttttttttttcttctttgcagtccccaaagctccagagatagatccagtagagtgtttggtggcagataactctgtaacagtggcttggagaatgccagaagaagataataagattgaccattttatactggaacataggaagactaattttgatggacttccacgtgtaaaggatgagcgatgctgggagataattgataatattaagggtactgaatatacactatcaggtaacatgactgcattttaggactctcattctcagaagataaatgtattgttgaaaaatattttgagttactttaaagaataaagttttaaagtttctttagtcacactgagtttttagatactcagtatggaagtgattttctcttgaaacatcaaggaaacccttttt

SEQ ID NO: 13172 - DNA, 583 bp, Homo sapiens
  MAP TO AL139819.2; EXPRESSED IN HELA, SIGNAL = 5.2; EXPRESSED IN FETAL LIVER, SIGNAL =   4; EXPRESSED IN BRAIN, SIGNAL = 4.2; EXPRESSED IN PLACENTA, SIGNAL = 0.73; EXPRESSED IN BONE MARROW, SIGNAL = 0.79
taccccaaagccaggtgtagaacttgcaggtaggaatcaaagtgatcccatacagggctcccaagtgtagcagagacataaggatgatgtttctccagacatattcaaccttggggcttgggccttccttatccttgtaggtggggtcatatatatcatcttttatatcagggcgaatgtcgtcttccaagtagaggggcatcgtctccaacttatctcctccattctgcaggaccctggagggaggcgctgtaatggtggtggtggtggtataggagctagagatctggaagggggaggaagaggagagtcaggagaagagacacgtggaggcagctggggccactccgctctctaatcacgctgggggaagggtggacagtacggacccttccgcagcgccgtagttcactgagggtagggtgtatccgagacgcaacggagaaaagttccctgaaactgtacagatacattaggggcggagggcgagggggacgaggggcgcgaaacctatcgggaggcggcagtaggaaggagaagtaaagcactcacatccccacgaagacaaaggaaaacccgcata

SEQ ID NO: 13173 - DNA, 557 bp, Homo sapiens
  MAP TO AL137225.7; EXPRESSED IN PLACENTA, SIGNAL = 2.8; EXPRESSED IN FETAL LIVER, SIGNAL = 0.76; EXPRESSED IN BRAIN, SIGNAL = 0.85; EXPRESSED IN BONE MARROW, SIGNAL = 0.59
gaggaccacgatcgattagcaatgtctcccctaagtacaggagtggagaacagcagtgtacacactctaaacttgttcaactcccttttattatagagaggagggctcagcaaggctgatcagggcctaggtcaacactagtaatgccaaggcacagcagggcaaggagcccccatccccatcccccgggcaccacactcaccagctcaggggtgatgtccatgtcgagggcgccgttggtctgcaggagtccaaacatggtgttgaagaggtacagtggcaccatcacctgggatgtgtggtccttcttggggggcaccttggctggggcacgggacttggggaagtcaatgatatcaccagctacactcttcacgataggctgcaggggcaggaaacagggccgaggagggtcttaaggtgctcacccacctgccttgatccggcatcccctatctagccacccccagcaggaggagaggcccctctggttactcacgttgatgtccagttctatgtactggttggagatgagaggcaatgtggccagagagaat

SEQ ID NO: 13174 - DNA, 595 bp, Homo sapiens
  MAP TO AP001422.1; EXPRESSED IN ADULT LIVER, SIGNAL = 0.58; EXPRESSED IN BRAIN, SIGNAL =   1
gcttggtgattcaggtagccaatatgaggaagagcctcttgattcagtgccagctctctggcaagctcctgcagacccacgtcaccaaggagggggagcggattctcctcaaccaagccactgtcaaattccacgtggactcctcctctgagagccccttcctcattctgcccatgacattctaccatgtgctggatgagacgagccccctgagagacctcacaccccaaaacctaaaggagaaggagtttgagcttgtggtcctcctcaatgccactgtggaatccaccagcgctgtctgccagagccgaacatcttatatcccagaggaaatctactggggttttgagtttgtgcctgtggtatctctctccaaaaatggaaaatatgtggctgatttcagtcagtttgaacagattcggaaaagcccagattgcacattttactgtgcagattctgagaaacagcaactcgaggagaagtacaggcaggaggatcagagggaaagagaactgaggacacttttattacaacagagcaatgtctgatcacaggggcgccatccaggtttaaccctgcaagctgtttccacatc

SEQ ID NO: 13175 - DNA, 584 bp, Homo sapiens
  MAP TO AC012433.5; EXPRESSED IN PLACENTA, SIGNAL = 0.48; EXPRESSED IN BRAIN, SIGNAL = 0.48
tccagatgtgaggctctgtgagatcaagccagtcctcacaccagaatgacctgcatccttcgccttctcaagggaggccagtgctgtttacttcacaccttccgacggtttgggaagagaatccaatgttgtaaagcctgccatcttcttgaatggcaccagatactgacactcggtacacgcagctctctggagcatgctgttttctcggtggcactgatctgctgccttcacagagagttctgatacaatcatggcatgcagaaaagagcaaaatatcaaggggccagagcaccacggttctcagacacacaatgggagagccaggtaaggacatagaaatcagccagccccctagaaaggccccctagaagtaactcacctgaggtgatggtagagactggatttgctttcaggagtaaaccaaggaacagcaaaacaaaaataagcctcgttaggagtcgtgttactctttggtttttaacttcaaattaatttctcttctgaaccttctgcagaccaagctgccaaatgtaactccagttttccacacttctgcctatagccttgcaccgtagtgaact

SEQ ID NO: 13176 - DNA, 579 bp, Homo sapiens
  MAP TO AC019342.4; EXPRESSED IN BRAIN, SIGNAL = 0.45; EXPRESSED IN PLACENTA, SIGNAL = 0.55
cagtggtggtcttgcagttggacctgggattgaacacgtgtggtctgtcttctgcctatgttcttaacacctagaccagattgagtcctatgttagagaagtccaagaagctacgggagccagagcaaaagcaaaagcctttcaacagcatgtacaatgccccaaggcacaagagcaaagtctatgtgaggaaattcactaccactacagtggcagagggggtcaagtgcaaggaggagaaaggccagatactggacaggcagctcttctctgctcctcctcctgggtttggggatcctcaagccccaggtagagataaatcttttctggtcaggcacagtgagttgggcccagacccatcctaactaattgcctagaagtgctgttttctttttacctcctgccttctggtcccaagaccactcttagcttagcagttttcctcttttttttttttattttttattaaccagacctgacaggcacaaggatggagccactacttgtttccataatcgtttgacgagcacataatgagaatcgcttatcagataaatatgctgcaattagcttggaacc

SEQ ID NO: 13177 - DNA, 510 bp, Homo sapiens
  MAP TO AC013685.3; EXPRESSED IN PLACENTA, SIGNAL = 0.49; EXPRESSED IN BRAIN, SIGNAL = 0.45
aaaatggcagttccttccagctggtcctcagatgggcacatctattagtaagtttcatttctgtatttggatctttattcatccttattatgaattccccaatactgaggtttctaggaacctacctgccattggctgaagggttgcttctgaattctttcccagaggcagtgacaaaaatcaaacatccgatgtgttctttacctttcagtaagctcagcctccctgcttgtgtcacatctctaaacatacgtacatgcgtgatgaaactgtctattgaaagcaatattacattaacattatcaatactgaattagagaaaatatctatcaatgtcaccaattccacctgtctcttgatgtatgactttttacctgacaggctaaataacaatagaaagttctttttaaaaaatagaagagttgctatgcagggacttttttggaattaagtgccccagagaacctagaaatgtgctttaaaactttttgtttcacctggcagatccaa

SEQ ID NO: 13178 - DNA, 532 bp, Homo sapiens
  MAP TO AC019284.4; EXPRESSED IN BRAIN, SIGNAL = 0.57
tgatggcagctcaactcaacggccatacttaccaccttcctccaacccagggagacctgcctttttgtccttcacctgagcagtgctttcttcccaaagcttactcttatccttttccttttcttctgcagaaacatgtttcccggacttctcagataaaccctctgcaatctcttgggttcctttctccgttccttctttaagaacattctcaaagctttcgtctattggcatcggcttggtctccacatctgcttttgttatttcttggtcttcaatttcaatttctaaggattcctcaattggaaggtgagactttcttggcttatcattttcactcagttcctgagaagatgaccttctggcactttcatctgtgctgctgtcagtgtgggcttccctgtcccccactgcagattcatcctcactgtcactagaataagggtgacttctggatgaggttgatgaagcagttttcatatctacaaaaaataaaagtgatgacattgttgttgttctgtaaagcaattgg

SEQ ID NO: 13179 - DNA, 593 bp, Homo sapiens
  MAP TO AC015897.3; EXPRESSED IN BRAIN, SIGNAL = 0.46
tggaggacatctcctttgtctagaatactctataattgtggcatttagttatgtagaggacttcaacaccatatgttttaacaaatactttgggtcataagggtatgtataatggaaggacataattaaagtttaatctgttcagtaaaaaggcaccattaattactctaggcaatttattgggttattaattggttctggaaacatgtcaagatactaatttaaatggaattttttcccctaattgtctagacagcccctcgaccatatactgctccaggaaatatgcagcctccaattcgattacagcctcttcccagtaatcctgcagtagaaactgttccaaaggtaacttcaaggtccagatcaaaaacctcattgctggaaaatgaagctctgtttcccattggggtaaatgttatttttatcaataaatatattttaatttttgagtagattattataggttattacagtggtcaaggtattatattcgattaaaatctacacagtgaaaattatattgtatatgtatgaaacacttactacatacttgtgattaattatgtcttactcaaatgggaaggcctgta

SEQ ID NO: 13180 - DNA, 508 bp, Homo sapiens
  MAP TO AL160492.1; EXPRESSED IN BRAIN, SIGNAL = 0.49
tttccttggcaatgacttcctagaaaatctttcctaaatgtaactttgcatgggatccctccctgactgggagggacactgggtgacaagaatacacacttacggcagcatgaaatgccatctcagcaagcatatctgaaatgttttgaagacgggctgtgtctgccatcttcttcccagtgagccacactccaccctgagcatgggcagtcaatgcactgcagacctgcctggggcactgacctgctcagccacttctctgctcatggcaagtgccagctgcagctgaagctcctcttctccactagtctggggccgggcttgctccagctcggaggacactcgcggggaggtggctgttggggaagaccaagtcatcatatgcaaaagacaaggctgatacagctcctgcacagcagtttcctgggcagaccacattccattcccatctcaaacccgcaaggtccagcagtagcccaacaatgcaggcagaggaaaggaaaggctt

SEQ ID NO: 13181 - DNA, 510 bp, Homo sapiens
  MAP TO AC015600.4; EXPRESSED IN BRAIN, SIGNAL = 0.49
tgaaatcctaccccagcaacaatctgacaagaatattggcatcacagatgagttgagacgttattttctagatcagggcttctcagactttaatgcacacaagaaacacctgaggatcttgtgacactgcagcttcttgttcagtaggtccgcagcaagcctgacatcatgcatatctaacaagcactcaggcgaggctgacgctgcggctccacagtctacactcagaagcaatcattctgttctcagcagaactcactaagaacaagaaggaaagcgcgtgctctccatattacagcagccaccaaaccactcaaattacagtcacaggttgccaatatgaatcttaagtagcatggtatccttttccaaactgctactatgaaattggtatttttacttactgaggcaatttgttgctgcctcacagatagtgtcttccaaagagcattcagtataagtctcgtcaagcttgggaaatatattcctcctggtgagacacacgcatgt

SEQ ID NO: 13182 - DNA, 500 bp, Homo sapiens
  MAP TO AC021876.2; EXPRESSED IN FETAL LIVER, SIGNAL = 1.6; EXPRESSED IN PLACENTA, SIGNAL = 1.5; EXPRESSED IN BRAIN, SIGNAL = 1.5
agttgagaaaatgggagggcaaatattttcttctctcttgcagctttacagtttcggatttacgtcttttggggcttactcatttcccatcatgttttaccacccacttttacatattaccaggctccacagtttgtttttaattgccgtctgtggctgaattattagctgtcttcctccaattttcattctttttctttcccttctttttcattctgcagattgcaggaattgacgctgtataatccagaacgcactattacagttaaaggcaatgttgagacatgtgccaaagctgaggaggagatcatgaagaaaatcagggagtcttatgaaaatgatattgcttctatgaatgttagttttgttatgaagggcatgtctttattttaacaaatagttaaaacaatgtttttaactgcattaatattgaattcttttgtggcattatcactagaagtagttctagttgatttttagcacctcagcaagtaccctgg

SEQ ID NO: 13183 - DNA, 581 bp, Homo sapiens
  MAP TO AC018801.2; EXPRESSED IN BRAIN, SIGNAL = 1.3; EXPRESSED IN PLACENTA, SIGNAL = 1.6; EXPRESSED IN FETAL LIVER, SIGNAL = 2.8; EXPRESSED IN HELA, SIGNAL = 2.4
aagttgagtcatggttcgcccatttcctgtcttctccccgccgtttcttactgtcccatcttgttgattgtttaatactaggagggtgtgatggttaatactgagtgtcagtcaacttgattggattgaaggatacaaagtattgatcctgggtctgtgagggtgttgccaaaagagattaacatttgagttggtgggctggggaaagcagatccacccttaatctggtgggcacaatctaatcagcttccaacgaatataaagcaggcagaaaaacacaaaaaggagagactggcctagcatcccagcccacatttttctcccgtgctgaatgcttcctgacctctatattggactccaagttcttcagttttgagactcggactgcctctccttgctcctcaagcttgcagacagcctattgtgggaccttgtgatagtgtaagttaatacttaataaactcatatatatattaataaactcatatatatattaataaactcatatatatatatatcctatatatcctattctgtccctctagagaaccttgactaatacagagggtgacctttccatt

SEQ ID NO: 13184 - DNA, 536 bp, Homo sapiens
  MAP TO AC020752.3; EXPRESSED IN BRAIN, SIGNAL = 1.6; EXPRESSED IN ADULT LIVER, SIGNAL = 1.8
ccctgagctcaaaactccactctatttcttgtaaatgacattgactttggatgttttaatttactcctctggatttcatttttcttaactgaaaaatcaggataatgatactcctcagaattgtgcagattaaatgagataatcaatgcaagcagccaacagcacccaataggatgttgtaagtgcttaataaacttcttaagcatctccatgcgcccaatactcaacttagtatatttacagtttttcttctgggtctcttggtccatttctgtccacgtcttctttatttctaattatttctagagacagctgcactttgttattaaactattcttttacaagctactctgctgttctgattttgttatataaagcttcctgagtgctttatatattttaatgtttttttctcattataaaagttatattacttattatgatgctttggtaaaagtatatggaagtatagaaaataacaaataatattgctttaaataatattactttcctgtccttacccccattcatcctca

SEQ ID NO: 13185 - DNA, 522 bp, Homo sapiens
  MAP TO AC008392.3; EXPRESSED IN PLACENTA, SIGNAL = 1.8; EXPRESSED IN FETAL LIVER, SIGNAL = 1.8; EXPRESSED IN HELA, SIGNAL = 1.7; EXPRESSED IN ADULT LIVER, SIGNAL = 1.9; EXPRESSED IN BRAIN, SIGNAL = 1.6
tggaagccactggtagacagtccttagtttcacacaatgattttcagacaactgcccattcgccaattccaaccacctcggcccactgcccaaatccaacgtttctggtctccgggcggcgctgccttagcaggatccgccgccaggtggcgcgctccccccgcccggagtgggttttgttccatcccggacttagatcttccaagacggcgatttccttctggtcgggtctcttcccgaggatccgctttactcgtactagaaactctgacctcgaatgcagttccagaagcagaaccctgtagggggtttcaggcggccaagaagggaagtggttctcctaagaccgtcccggcttcagtccacggcgctcactaaatgcctcccacgccagacgaggtcccccgtccccggagctcgcgtcccagaggtgaggacacacacgaaccctcctgcccgaattcgcgaccccgtcagtgcagggaggctctggcctggggctgaagagccgagtctctggtg

SEQ ID NO: 13186 - DNA, 516 bp, Homo sapiens
  MAP TO AL121694.3; EXPRESSED IN BRAIN, SIGNAL = 1.6; EXPRESSED IN HELA, SIGNAL = 1.7; EXPRESSED IN ADULT LIVER, SIGNAL = 1.4; EXPRESSED IN FETAL LIVER, SIGNAL = 1.6; EXPRESSED IN BONE MARROW, SIGNAL = 1.7
tgtctcaaggtctggggttcttatcttgaagtccacagacccccttcctagagtccatgaataaatgtggggttgataggtttttctaaggaagaatatctatcctctgctggatacttcagaaattaatttagaatctggctccaaatgtgacctaggcagtataataccctcgtgccctactgtttgaactcagagataatttggggttttctgtttgagcaggaagatgtaaaacaagaattacaacaattacgagatcaagaaagcaaaaaaaacaaagatcattttgaaactctaaagaacttagaaaatggattctatataaatgaccaaaaagcagatcttctgctcctggaaaataaaaaattaaaagaagtaagtttaagagcaccatccttttcatgatggctttgattaattgactagacctgtaatagttataagagaaaagaagagaatagctcttgaaaaatgtttaatggagcataaagtacacacagaaaagtgcccaga

SEQ ID NO: 13187 - DNA, 583 bp, Homo sapiens
  MAP TO AL158801.1; EXPRESSED IN BRAIN, SIGNAL = 1.5; EXPRESSED IN BONE MARROW, SIGNAL = 2.1; EXPRESSED IN LUNG, SIGNAL = 3.3
tctgttgctgtttttcacggcagtttgcgaacccggctctaactctgcactgtctatgtggaaactcactcctgctggcaatggggggcagtcctgagaagcaccgtcccaggcctggtcctccttaggagaacaacgatcagctcttgaagggccacaatccacagatacagaccccacaggattcacctgagtgtcaggtgcctccaagacgcctttctttgttttgccttcatcagcctgagtgctatttgcaagcaatactctgcccacatttcgacggaagctgttattccttgagaggctcccaggctcacgctggccctgccgcttcaggcactcagactccaacttggctaccatgtcaaggacacggactggttcgctctgtggttcaccaacctcaagatttcccctttctgtgggttcttcacaagctcctggggcagaataggactcagacactgcaggcacacctctggattggccagaaaacctcacaattgcaggtgagtttgtgcagttttttgaacagctagctagcagagcactggctctttgctccaagaaggcaaccatctgt

SEQ ID NO: 13188 - DNA, 520 bp, Homo sapiens
  MAP TO AC004554.1; EXPRESSED IN ADULT LIVER, SIGNAL = 1.6; EXPRESSED IN FETAL LIVER, SIGNAL = 1.6; EXPRESSED IN BRAIN, SIGNAL = 1.3
gaatttggccatcttcaagctccagatgctataatttatgttgcctcccaaacctaaatgttactacaaccacactgttaccagatggatgccactctcatcagaaactcaactttgctgccactgctgcctgtaaaagctaaaaacttctgcttctagccacccttgctagaaaatagatgccttcattatgttcttacctagagaaatctaggaagaattttcttacaaaaattaaatctacctgatttttaaaaaatgggcaaaggtcttgaacagacccttcaccaaagaggatataaggatggccaataagtacatgaaaatatggtcagcatcatcaactgttagggaaattccaagcagaaccatgacaagataccactcattaaagataccacctattaaagtgaaaaaaatagaaactactaataataccaagtgctggtaaggatgcagagcaactgaaactctcatatattgttgatgggaatgaaaatggtacaaccaccctggaaaa

SEQ ID NO: 13189 - DNA, 551 bp, Homo sapiens
  MAP TO AC005323.1; EXPRESSED IN PLACENTA, SIGNAL = 2.2; EXPRESSED IN BRAIN, SIGNAL = 4.6; EXPRESSED IN ADULT LIVER, SIGNAL = 1.9; EXPRESSED IN FETAL LIVER, SIGNAL = 1.7; EXPRESSED IN HELA, SIGNAL =   2; EXPRESSED IN LUNG, SIGNAL = 1.2e+02
aacaaggctgtgttccaaggctgaagagtatttttagatcttgaggaagaattttttttttttgaaggaaaggatggtaatgtcatccaaagtactagtcctgtgcagaagctgctacttggcatgtctcaagaagcacttcaaaaggaatgcggccaaaggccaagcttcaggaagccaaatgctggagacccagttgttcttctggtctatttggaaaacatgatggcagacattttcatggattttctcatcgtttgccccttttataaaccttcatgaacacaggcatttgctttgttttgattgccctgtggaagactctagcttaatgttctaaattatttcttctttgagcaataagaacaaaaatgatcattggaaacccccaagatatatcatatccttgtaggaaaatattagctggccaatcttgaacagtcttcaaagtaaaaattatgggaagaatggatgaaacaaagatcagatgctggcgtgtgtacatgtgggtgcactgtgtgtttatgtgtgcccagcattcatgcatgtac

SEQ ID NO: 13190 - DNA, 594 bp, Homo sapiens
  MAP TO AC002477.1; EXPRESSED IN BRAIN, SIGNAL = 1.7; EXPRESSED IN PLACENTA, SIGNAL = 2.1; EXPRESSED IN HELA, SIGNAL = 2.2; EXPRESSED IN BONE MARROW, SIGNAL = 2.1; EXPRESSED IN LUNG, SIGNAL = 2.3; EXPRESSED IN ADULT LIVER, SIGNAL = 1.9; EXPRESSED IN FETAL LIVER, SIGNAL = 1.9
atgcgaatagtcagaagcggaatgaatgatagatcggactccaaaggcacgtaggctcgtacaagagaaagtgcggccgtctcactcacttctgccgcaggctctcctccctctccttgtcgaggaggctaggccaaggcttgtcgctcccgtaggggcgcgagtagctgccgtaatagactgacgaggaggcagaagcgaaggggatgccccggggcgcagagggccgctctctagaacgcgaccgcgagcgtgagcggtaggactggtttcgggagccttggctgaggccacccagctgatgggtgagtccattccggtccccggaccgagagcaagagtgcgagcgagagcggcggccccgcggggagcgggcagatttgctgggcttcggactcttcgacgaactgcgacgtcttccccccgagcccgaggcctccctatccgggctgcgtgagccggacaccggagccatggctactggggggccccagcagccgtgggacaagggggcgctctcgcgagcctaggaagatgtctgttgccttggttcccgggacctgccgctgcggaacagcccaaatctgaggaaac

SEQ ID NO: 13191 - DNA, 509 bp, Homo sapiens
  MAP TO AC008567.3; EXPRESSED IN BRAIN, SIGNAL = 2.1; EXPRESSED IN ADULT LIVER, SIGNAL = 1.6; EXPRESSED IN PLACENTA, SIGNAL = 2.2
ggtgctaagcccctcactgcccagggctggtggtgccagccgactgctccaagtgcagggcccacctggaacttgcgctggcccgtgagcgccgagcacagccccggttcccacccatgcctctccctcctcacctccctgcaagcagagggagccggctccagccttggccagcccagagaggggctcccacagtgcagtggtgggtggaagttctcctcaagtgtggccaggtggacaccaaggctgaggaggtgctgagagtgagtgagggccgccagcatgttgtcacctctcacagcaagggcagcagccgttagaagttgtaatggggattgatagggcaactgggtagagggagaggttcagtattcatggtgtattagaaaactcatagtgtctacaagcaacctttcattgctattcatggggttgtgtataagtaaacaagaaggggggctgggaggagaggctgaagaacaaggggaaggtagccaaggatggagtga

SEQ ID NO: 13192 - DNA, 560 bp, Homo sapiens
  MAP TO AP001251.1; EXPRESSED IN BRAIN, SIGNAL = 1.5; EXPRESSED IN ADULT LIVER, SIGNAL = 3.3; EXPRESSED IN BONE MARROW, SIGNAL = 3.6; EXPRESSED IN FETAL LIVER, SIGNAL = 2.8; EXPRESSED IN HELA, SIGNAL = 3.1; EXPRESSED IN LUNG, SIGNAL = 5.1; EXPRESSED IN PLACENTA, SIGNAL =   2
taatgcagtggcaggttttgagaggacggactctgattttaaaagagattctattgtgagtaaaatgctatcaaatattgtggcatgctacagagaaatcttgcatgaagggaacaatcgatgttccaaacttcattgtcttattctcagacactgtctcagccaccctaaacttcaccaacaaccatcctgaccattcagctgccatcaacatcgaggcatcatcctccataagcatacagattgtgactggctgaaggctcagataattgttagcatttttaacaattaaggattgtacatttttttagtcacaatgctattacacccttaatagagtacagtatagtgtaaatatagcttttatatgcactggaaaaccaaaaaaattgtgtgacttgctttatcgcgatatttgctttattacgttgatctagaaccaaactggcaatatctccaaggtatgtctataatttccaaccatataatttaatcctgttatttaccagtgaagcaggattatgaatcattgtggttcatcaagaaaaatggccttccaa

SEQ ID NO: 13193 - DNA, 563 bp, Homo sapiens
  MAP TO AC018506.3; EXPRESSED IN BRAIN, SIGNAL = 1.5; EXPRESSED IN PLACENTA, SIGNAL = 1.5; EXPRESSED IN BONE MARROW, SIGNAL = 2.1; EXPRESSED IN LUNG, SIGNAL = 4.5
tcactaagacagcccttgccagactggacttataaaggatgcatttgtgacttacctttttggttttggggtatttagatgcagcacggttgacatgggatccagtaattgacaccacagttgggtcagaccctgttaatggcctgttttctcctgaactgtctagacttccagcttcagtaggagttactaaactgttacttcctccctcttccaaggcagcttgtgacaattctgcctgctgtgcattggcctgcttctgacgctttagtctttgggctgaactggtcctgtaccgagaaattcgactcttcggccggggcctagaaggctttgctggaggtggcttggggactagtttttctgcagcaatatcctgtagcaatagtagggtcagatgcttaccagaaatgttttatcagcaaacagtctaatttcctattcactttaagcattcagaatgtctactgatgaaaaatataaggattagaaacactaatttaaaatctaatttttaaatacaaaaatgtatacacttaaatgagctaaagaggctagcgaca

SEQ ID NO: 13194 - DNA, 545 bp, Homo sapiens
  MAP TO AC012614.3; EXPRESSED IN BRAIN, SIGNAL = 1.7; EXPRESSED IN PLACENTA, SIGNAL = 1.7; EXPRESSED IN BONE MARROW, SIGNAL =  50; EXPRESSED IN ADULT LIVER, SIGNAL = 1.7; EXPRESSED IN FETAL LIVER, SIGNAL = 1.7; EXPRESSED IN HELA, SIGNAL = 1.8
ggcaggccagagttactgagactggggcagaggtcaaggggtgggcttttgaaaacaggcccctgcagctattctgcactggccgcagggtcaggagctgcatccggtcttaattctgctcctgctatgtggcctcagagaggtcacttatcctcccagaaccttagtttgtgcatctgtaaactgacccctattatacaggactattataaggatggagagatagccgccaaaaagaaaaaaaaagcacagggagttgatgatgctacggaccaggtgggaagcccttaaggccttaccagggtggaaagagacaaggggctagaatgacacacgcatgagccagcgccatttggccctgcgacagaggagcgcacaatccctattgctgaaatgggaatgtgatcagctggttctaaaaggggttccatgaatgttttcaaagatggatggagatgactgggtaggcctggaagctcctccagctcagccctcgtggttgagtgtgcattgaagttttgacatgcagaggacatcctggagag

SEQ ID NO: 13195 - DNA, 524 bp, Homo sapiens
  MAP TO AL109758.1; EXPRESSED IN BRAIN, SIGNAL = 1.4; EXPRESSED IN ADULT LIVER, SIGNAL = 1.7; EXPRESSED IN HELA, SIGNAL =   2; EXPRESSED IN FETAL LIVER, SIGNAL = 1.7
gtagcagcaggagaaggtgcatttctcacatgaagaatgcgatttccaatatccccaactcctgcatcaaatacaaaatcttctaccagatttccatctctatccagggcctgggctcttactccagctgggcccctgcaaaagtaaaagatgggagtcagctgactcaaagacataggatactttacaagtcagcgtttccaaaaagtcttaaagcaataaagtattcttctaaatgcacaattatatggaaacccaatgagtttatgtttaaccaaaggctgtcagttgtagcctgtcaaacctatattgttagcttagagcctaaaacctattacgtaacaatagtgtaacaaacgcttatcaaagaaatacataaaaacaagtaagttatttatcaatgtctgctctttccaaaggtagtaggtaaatccacacttaattagaacaggtatatttttatttaaatttatagaatgaatttattataaaaatcaatcaatggcaacaataagcctcatctg

SEQ ID NO: 13196 - DNA, 515 bp, Homo sapiens
  MAP TO AC004414.1; EXPRESSED IN BRAIN, SIGNAL = 1.3; EXPRESSED IN PLACENTA, SIGNAL = 1.5; EXPRESSED IN BONE MARROW, SIGNAL = 1.7; EXPRESSED IN ADULT LIVER, SIGNAL = 1.6; EXPRESSED IN FETAL LIVER, SIGNAL = 1.7
gttcttctcttggtgcctgcattgccctgcaggaagcctggtggtggtgcctggtgtggtctgccagctctcagctgggtgggaaagtggtgctgaatggccccacctctgctctgggttttgccccacaggtcgctgcaggcctgcccctgggctgtgctgagtcatctccgcaggcaggacctccccaggcaggcacaaggcactgggaggtgccgccccttgggcccaggccagtggagttttaattgctgctcctctattgttggctctggttccgcttctggaaggtttccagcctttgctcctgggctttggtctcttcagggagcctccagctgcctctttgtcatcagtgaagccactgagacctcctcttggccctccccctcctcctcctcctcctcctcctcctcatctttgctggataatgaggacttcagatcttgtttctgaagagagaggctgagctgacttctgaagggtggaaggcaccaaacagggagaggtttcca

SEQ ID NO: 13197 - DNA, 551 bp, Homo sapiens
  MAP TO AL135798.5; EXPRESSED IN BRAIN, SIGNAL = 1.6; EXPRESSED IN PLACENTA, SIGNAL = 1.7; EXPRESSED IN LUNG, SIGNAL = 1.6; EXPRESSED IN ADULT LIVER, SIGNAL = 1.8
tccgtgtaagcagcaaacagaccccaggtcccttccttcaccccactaggaaacaaaaacttatgcttaagaaattgacaaagagactccaaactcagagataacaggccaaggaagggtgaatgtgccagttatctgtttatactggagctggatcctgtgaggatttttcccttgctgattggttcaatgttgggctttgttaatagaatgtgtttgatatagtacaaaggtttgaaaatggggaccgagtgaaaaagtttatatttaaaggtgacatccagtctccttcctttctcaattcgcagaacattcgcttccagaattatatctcccaggcagaaggattcctctatggagaaaccaagagaaaagacctgacactttgaggctccccagcaaaatggccaggctcctaccttatagcactgcagtgaagcccattggatagcaagctccacctgtgcacacaatcagctctttagttccttgttgataaatgtaaatggataactaagaatcacaagggatctgaggaaagtgttcgccat

SEQ ID NO: 13198 - DNA, 600 bp, Homo sapiens
  MAP TO AC008132.34; EXPRESSED IN FETAL LIVER, SIGNAL = 1.6; EXPRESSED IN BRAIN, SIGNAL = 1.5; EXPRESSED IN PLACENTA, SIGNAL = 1.4; EXPRESSED IN ADULT LIVER, SIGNAL = 1.6; EXPRESSED IN LUNG, SIGNAL = 1.7
gggtgaaggtattgctcaggtccacttgcccagttttcagggcccatgtcccatgccctgccccgctcacctcccaatctccaagcactgcttggcatccgcggccacggcagccctggtgtacacatggttgtcaggttccttggaggccgagggcagccagagacagaggccgacaatgaccagcaccaggaccacggccagcaggcccagcaccactaacttcttcttcatggctctgctgcacccacggggtaaggagcagggtcaggcccagcctcagacatgccctggcccctccccaacagggcacagtctaaagtcaggcctcagaaacacaaggcctgtgtctccttcccgcttcccagaatacgtgcaggctgtccggcccccagacctttgcgcaggccatgccctctgccagaagctctgggcctcatctctgccctcccaaatcctccctgcttatcttcagagcccatcctggtaagaaccccatctccagcagcggcccttcctgggagcccccagatttccacacccctctttctgcagggcctggcctacctcctcacagtggctgagcctccactgcttagg

SEQ ID NO: 13199 - DNA, 542 bp, Homo sapiens; identical to SEQ ID NO: 8487
  MAP TO AC006946.20; EXPRESSED IN LUNG, SIGNAL = 2.3; EXPRESSED IN BRAIN, SIGNAL = 1.4

SEQ ID NO: 13200 - DNA, 529 bp, Homo sapiens
  MAP TO AL133375.3; EXPRESSED IN BRAIN, SIGNAL = 1.4; EXPRESSED IN ADULT LIVER, SIGNAL = 1.7
tgtttaactcgacagtgtttgctatactaggtttttttttcaaatctgattaggtttgtatttggggtcaggaaagaaaacccctcatagtttggttaaaaactatagacatcctcaatatagaaggaaaattttggggtgattttctggaccttcccagttctcagtttgacaaactggtaagactcttcatccacatttttccctctggtgtgtctggctgcagcactagagacccccatcatccagggtcaggatgggtcccctgagctactgattcgatccctggttgggggcccatctgcagaactactcctggacttggagcgtgtgctgtgccgtgagggcagccccggaggtgccgtgaggcccctcctcaagcgcctccagcaggagacccagcctttcctcctgttgctgcggactctggatgctccggggcccaacaagactctgctgctgtctgtgctgaggtgaggggcctgttgaggcaccatgcattgggacgagggaaactggcagacttcag

SEQ ID NO: 13201 - DNA, 577 bp, Homo sapiens
  MAP TO AC020912.3; EXPRESSED IN PLACENTA, SIGNAL = 1.7; EXPRESSED IN BRAIN, SIGNAL = 1.4; EXPRESSED IN ADULT LIVER, SIGNAL = 1.4; EXPRESSED IN FETAL LIVER, SIGNAL = 1.7
tgtgcctggctaactttctgactcttgtaataacacttagcttaagacacaaacacattgtacagctatacaaaaatattttctttctttatatccttaccctgtaagcttttttctatttttaactttttttaattttttattctttactttttaaacttttttgttaaaaacaaagatacaaacacacacattagcctaggcctacacagggtcaggatcatcagtatcactctcttccacctccgcatcctaccccactggaagatcttcaggggcaataacatgcatagagctgtcacctcttgcaatacctgtggtagcaatgtcttcttctggaatccttccggaaggacctgcctgaggttgttttacagttaacttttttttataagtagaaggagtacatcctaaaataacgatgacaattattgtatggtaaatctgaaaaccagtaacacagtcattcattatcattgtattatgtcctgcatataattatatgtgctacactttaacacgactggcagtgcagtaggtatattcacaccagcatggccacaaacacaagtgatgc

SEQ ID NO: 13202 - DNA, 532 bp, Homo sapiens
  MAP TO AC018552.2; EXPRESSED IN BRAIN, SIGNAL = 1.8; EXPRESSED IN PLACENTA, SIGNAL = 2.4; EXPRESSED IN LUNG, SIGNAL = 1.8
tgtgacccagtgatttctgcctcacttttgtactatctatattattacttacttaacattttcctttaaacaatctgacttgttaactcaaatgtatttttaaaattacatcaacactgtaaatagaaaacaagcgcacttgctgtaaacagtggataatcctgaaaacaaacatgacaaccacagcccaggaaatgctgcccgtgctggccacacgctgagccctcctgcctttgcccgcaggtgctggatccgggactccctggtcagctacatcaccaacctgggcctcttcagcctggtgtttctgttcaacatggccatgctagccaccatggtggtgcagatcctgcggctgcgcccccacacccaaaagtggtcacatgtgctgacactgctgggcctcagcctggtccttggcctgccctgggccttgatcttcttctcctttgcttctggcaccttccagcttgtcgtcctctaccttttcagcatcatcacctccttccaaggtaaggagaagacccgtccc

SEQ ID NO: 13203 - DNA, 600 bp, Homo sapiens
  MAP TO AC018836.2; EXPRESSED IN BRAIN, SIGNAL =   2; EXPRESSED IN FETAL LIVER, SIGNAL = 1.6; EXPRESSED IN ADULT LIVER, SIGNAL = 2.3; EXPRESSED IN BONE MARROW, SIGNAL = 1.7; EXPRESSED IN LUNG, SIGNAL = 2.5; EXPRESSED IN PLACENTA, SIGNAL = 1.8
ccacttttgctgagctttccaggaagctcagtggaccatcaaatgctcagtggcccttgatgtcgcctcctccctcttacctctttggaacctcttccaggccttcctttccatttcacacactcggcagcctttacatcagctgttgcctcttcctgggacagccagctctaatgcctccttagagaggtcttcccaaccagccttacccaatgctattgcctcccgtagctgccctatttctttccccaatgtttagaatccctagagtttgcattactttctggaagtcaactgcctctgcattgctaacttgctcctgtccagctcctgtgccacagtggagctcaagagcaggggcctcgccttggtcatgggcacccaacacagtgtctggtgcatagtgggcgttcagataatatgcatggaatgaaaatgaatagctgcagtcctattaggcccacagtaagcatataattctcttcaaaggcctctattaagtcccaacctttctcctttctgtttaaatggctctgttgcagacatctcttactataaaccgtggtccactttggatctgggcatcacggataaaggaac

SEQ ID NO: 13204 - DNA, 534 bp, Homo sapiens
  MAP TO AC007347.3; EXPRESSED IN BRAIN, SIGNAL = 1.3; EXPRESSED IN PLACENTA, SIGNAL = 1.5; EXPRESSED IN ADULT LIVER, SIGNAL = 1.5; EXPRESSED IN FETAL LIVER, SIGNAL = 1.5; EXPRESSED IN HELA, SIGNAL = 1.8
acattttcaatcagcctcgcccgcaaattgtactaagcagctgaataatgcagggtagaaatttcaaatataaatattatttcctatttaggaaatttggaaaagaaagcaggaaaaaaataactcaccccctggtcccccaccatgacactacctctgtgaacattttggtagatattctttgggctctgacacgtacacacatgttgacttttatcatcatcatcatcatcatcattattctagtactctctttttcactttgctaaagtttgaatcatcttttgtaatggatgcgtaatactctaccaaatatagagtatgtatttgtccatgttttgaattatttccctaggagagcttacccaaggtaaaatacttggtcaaaatttataagcctcttcatagctcttggtacatactgacaaactctctccaaaaggatggtaccaatttttaaaatctcaccagtaatatatgcagatactggtttgatgttattgagatttaaattcagttgtgttggcatggtta

SEQ ID NO: 13205 - DNA, 546 bp, Homo sapiens
  MAP TO AC013528.3; EXPRESSED IN PLACENTA, SIGNAL = 1.9; EXPRESSED IN BRAIN, SIGNAL = 1.4
ttgggaaaaacttctctgctgaggcagtagaaatttgaaaagacaatttaaagccacacttctatatattcagaaatgaccattgaattttacttgtttccaaacagtatactgtggtcacatacgataaattatcatttcagaaaatactataaaatagtttattttcatcactgtttcttatagcaatatctaaattcataatgtagagaatctgtgtcagtctgtttcacactttatacatgttatatctagacatttaagaaaaatataagttgtttaatgttgcaaaatgattctcagtttttacaagcaactattgcaaataccatgctaattagtgaatacctccagaaccacgaatttaaacacaaagaaaacaagaaaatagatgctcagcactgtggatacttcattatgaaagactctattgcacccatgctatctgagaggaaggatttgacaggtaattaattggtcttatatctaagcattcccactgcttcaatccctggttccccccccacccactccaaagcattgtct

SEQ ID NO: 13206 - DNA, 549 bp, Homo sapiens
  MAP TO AL157885.2; EXPRESSED IN BRAIN, SIGNAL = 1.3; EXPRESSED IN FETAL LIVER, SIGNAL = 1.7; EXPRESSED IN ADULT LIVER, SIGNAL = 1.4; EXPRESSED IN LUNG, SIGNAL = 1.7
tggcagacaaatccctatcccaggaagctggtataaccttacaattcagtatatggaaatctagcatagatttcaaaacaaggtgaaatgaactgtatttgatgaagtctcccaattcttctctttgagatcaacaggtgagataataaacgtcttcagggcgtctagatgacttaaatttggattaattcgacacaaacaggcttaaccctacctggtaaccagttcaaatatcggaaaggactgcggtcactccactgccaaccgctgttgaagctcagactgttaagtccaatccagagtcctgaggtcaaggaactggttaatcctatatttttaaagaaagcaaaacaaacaaacaagaacttggcattcagaaaacagttgaaattaaattcagaactaagtgcttgaatcaaaatgtcactgagggaagtaacaataatcatgcctaccatgtctcctttgattctcctgacaacctaaggcaagtaaaattattaccttcactgataggtggggaaacggaggcagaggcagcataggtaa

SEQ ID NO: 13207 - DNA, 538 bp, Homo sapiens
  MAP TO AL136324.2; EXPRESSED IN ADULT LIVER, SIGNAL = 1.7; EXPRESSED IN BRAIN, SIGNAL = 1.7; EXPRESSED IN PLACENTA, SIGNAL = 1.4
ttctgggtagtgggatttggaagattttttttaaaaacttaatatgtagtttgttgtaattttttacaatgaaattttatagctaaagaaaatattatatttttttcaaatagcttggggaatataatacatgaaatttaatatccctcaataaaggagaagacgtctgtgaaaataaaaggaggtctcacctttccaacagagttcccaaaacatgagagtgcctctcttcaccctcataccaccagctttctgctgccctaattgccttgttttcacccttgcgttctgtttctccttcactcatgtgacttttatttttccttctattttctggtccacagccacggtcataaatgcaagaagcaaaataaaggaatatgtaataacaataacaaccaatattgatgccactgctgctacaacaatgttcttgctgtgtatttagtacttactaattcacctttgtgatcagaggttccttcagtattactaagccattacctccctgacctgctccaaagcaaagccagaaaaa

SEQ ID NO: 13208 - DNA, 577 bp, Homo sapiens
  MAP TO AC011836.3; EXPRESSED IN BRAIN, SIGNAL =  12
cacacacatgcttttcagatgaatcacttacctcagagcattattttcaaatacattcatccatatatgaaagtggcactgtatttacaaatcttttaaaatttcaagtttcttgtatatacataccagcaccgtctgttttaattctgttagatggtatactgggctctcctctacccagtgtattggttgctaccacgcggaattcatactccatccatgggattaagtccactgctcttgctgcctccatatttccttcaataattgggggatctgaataaaataaatagtaaatagagaatacaggttgattaacttatcacttttataacttccctttttattttactatttcagggagaatggtatatattacactgagttgaagtaaaaactacaactaggaatgacaaaatgttaaattcaagggagtaagagaagaggtttaataaataataaacttacaaagagtgatatgcatatgaatcacctatgtaagtaagtttgaggcagggagtctgcaattctgcatgtctaacaagcctccaggcttggtgctagtccatgagctgca

SEQ ID NO: 13209 - DNA, 574 bp, Homo sapiens
  MAP TO AC013533.3; EXPRESSED IN BRAIN, SIGNAL = 1.4; EXPRESSED IN BONE MARROW, SIGNAL = 1.5; EXPRESSED IN LUNG, SIGNAL = 2.2
cagcgtatttttggaggtggaatgtagttattttaataaccatgtcctaattatttatagcttcctgcctgacacagctcacttcaagaagtgcacaatgtcagaacgtggaattaagtgggcttgtgaatattgtacgtatgaaaactggccatctgcaatcaagtgtactatgtgtcgtgcccaaagacctagtggaacaattattacagaagatccatttaaaagtggttcaagtgatgttggtagagattgggatccttccagcaccgaaggaggaagtagtcctttgatatgtccagactctagtgcaagaccaagggtgaaatcttcgtatagcatggaaaatgcaaataagtggtcatgccacatgtgtacatatttgaactggccaagagcaatcagatgtacccagtgcttatcccaacgtaggaccaggagtcctacagaatctcctcagtcctcaggatctggctcaagaccagttgctttttctgttgatccttgtgaggaatacaatgatagaaataaactgaacactaggacacagcactggacttgctctgtttgcaca

SEQ ID NO: 13210 - DNA, 506 bp, Homo sapiens
  MAP TO AC023490.4; EXPRESSED IN ADULT LIVER, SIGNAL = 1.5; EXPRESSED IN LUNG, SIGNAL = 2.6; EXPRESSED IN BRAIN, SIGNAL = 2.3; EXPRESSED IN PLACENTA, SIGNAL = 2.3; EXPRESSED IN BONE MARROW, SIGNAL = 1.8; EXPRESSED IN FETAL LIVER, SIGNAL = 2.2
aggtgaccaaaggacaggtgtaggtcagcaggtggctgctagcacctacctcactctctggaaccggattcccttcatcctaaaggggatctcagaacgttccacacaccccctccgcctccaccctggtcctcacccaggctcaccgcacagccaggtagcctggacacacatctccatgaaccacttgaagggtgtggcctccatcttgccccccatgatcatcaccatctcatccgtcagcttgatgtcgggttcccagccgagattgccgcccggcgagctttcaaacatgaagccaaagtctgcaaaaccccaaagagctgcctgtgactgggtaggagccagggcgggcaaggacgagtggtctgttttgaggagtggaaaaggactctgcaacaggagcaccccctccacccccaaaaggcaggttgtgttttcttggagacagtgatggggtgggtggtggggcagcaggcagagaaagagaagggaggaagtggagg

SEQ ID NO: 13211 - DNA, 532 bp, Homo sapiens
  MAP TO AC011478.2; EXPRESSED IN BRAIN, SIGNAL = 3.8; EXPRESSED IN HELA, SIGNAL = 1.7; EXPRESSED IN ADULT LIVER, SIGNAL = 3.4; EXPRESSED IN BONE MARROW, SIGNAL = 7.8; EXPRESSED IN FETAL LIVER, SIGNAL =   2; EXPRESSED IN LUNG, SIGNAL = 4.4; EXPRESSED IN PLACENTA, SIGNAL = 2.7
ctccgaacaccctgagagacagcaaaattgggtgtttgtcagttggtgccctctaccccacgcagcccccctgcaagcttctttcaggttttagggaaagtggagccttgtccttctgcgaggatcgggcgccctcttgcggccatctcgggattcccgaagttcaggtccccgcagcaggagagtgggattctccggggctgaggacagggaggccaagggacccctccgcctgcctgcggaagtggcctggcagtcccctactctccaggagcctgtcccttctttcttcatcaggctggacaccgaggctgagtccccggggaagctgaccacggccaggcaccgcctaaagggagtgtgtgagggatgggggccgcccctcccgcaggcacaggactcagccatcacaaatgccagtggtccttggaacacgtctgcccggctgagcctgccagatgcccagtttagggaagcgcgtgaggaacagaaatggaggagacccgaccagacaagaggcagtctacccagc

SEQ ID NO: 13212 - DNA, 589 bp, Homo sapiens
  MAP TO AC009425.2; EXPRESSED IN BRAIN, SIGNAL = 1.3
gctatgcaagcccctacatcctgaaaggcaagatagaatccctttttggacaaaggtccaatctctctcacctcagtgttaagcttcatctttctttcaccaaggtcaccttgggtaaaactttcatctgcagcaatggtgtctatttttacatagaggttttctcttatattcctgccagtgtcatagtctgtttcataatagtacaaattaaatgtttccttgcaagttcccagtactccaggaagactgttacaatccctcagggtgaatttcaattctacaaaaatcctttgtgcattgcctttggaaatccagttagtccgcagccagttgttttggttgggctccatgacttggcacacctggtatgttcgtatcggggtatagttctcatccaaaccactaatttcttcccactgtaaaatttgaaaaaaggtcatcagtcattcagcaaaaaataacattttgcttttgaaagtgcaagtacttcacaaatacagatcttcgaaaaagttaggttgattcctatgctggcaaaactataaaccagagaatgtaagattccaggttctgcttcatcctggtg

SEQ ID NO: 13213 - DNA, 545 bp, Homo sapiens
  MAP TO AL158801.1; EXPRESSED IN BRAIN, SIGNAL = 1.3; EXPRESSED IN ADULT LIVER, SIGNAL = 1.5
aaaggaagggaaactgggtggagtatagatctaacaggattggccatgaatggatgattgttgaggctgggtgatgggcacatgacggtacaacataattttctcttgacctaagaattgaaattttcaataattaaaagtttttttcaaaaggtatttgcgtgatgcttttcccatgaattacatcatttaatcataactactgtcttgtgaggtaactagaatgactgtgtgcagactaataatctaaggctcagagagattaagttgcatgactaggatcacacagccagttagaggctggattcaaatccagctctccacctcaaaatctcaatcttctatcagccctcacttcgtatgatgaacagtaaagttattatggattgctttatggagaataagatgagaagaatcagaggaatggatttaacacctttgctctcatgtagaatgatgaatttgtggcatctgcttctctaattaggaagagattaataccaacccccagctgctatgagttatcatcaagcatggagaaagca

SEQ ID NO: 13214 - DNA, 560 bp, Homo sapiens
  MAP TO AC008494.5; EXPRESSED IN BRAIN, SIGNAL = 1.9
tagaagttagggagcacggcttactcattttggtatactaatgctatacacaggtccaatatacaaatactcaatttttgcttaactgaatttggaagtaatacctccatgtgtagcatttaaaaattatttaggaaatagatttactcactctttcttgaaatctggaaatttcatcagcagcatttttccttttttctgccttttctgccttttcccttatctccttttcaagcctcaaaaattcttcctgttctttcttctgctgggtataactttctagtagtaattttaacttaaactggcgctggcgttctttctgatgttttttctctttctcttcttcttcttttaactgggaagcacatttcattgacatttctatacttttctgtttcttccaagcttcaactgccaatttctgtttctttctttgttcctctttttgcttttgattatcctcttgtttattatgaaaaagcacaggtgtgttgtctgccttttcctttaacttgaaaatttcctcccttttttgctgctttttagttttccaaatctga

SEQ ID NO: 13215 - DNA, 592 bp, Homo sapiens
  MAP TO AC011510.3; EXPRESSED IN BRAIN, SIGNAL =   2; EXPRESSED IN ADULT LIVER, SIGNAL = 1.8; EXPRESSED IN BONE MARROW, SIGNAL =   2; EXPRESSED IN FETAL LIVER, SIGNAL = 2.2; EXPRESSED IN HELA, SIGNAL = 1.7; EXPRESSED IN LUNG, SIGNAL = 4.4; EXPRESSED IN PLACENTA, SIGNAL = 2.4
cactggaggacagggaagaggggaagctggcacccccacctcttcctgaccccctcccctgttcccaggaagtgggtgcagggtgccaagggcacacacgtgggcaactcgtgcaggcctcccatgagaggaagcacaggggagagaagggctgggagagaggccagcgggcagtgctgctgaggggtcagagattggatgggaaggagattgaggccatgaggggtaaaggagtgaaaggggacaatgggggtggcactgatataagcaaggtccggtggggcagtggtgacgtgtccctccccaacccttcttacctccctccggcgtctccacaggaagccagtgggtccaggatgaggggccctggctgctggtgcatgccacgcggatgtgataaggggtgtgaggatggaggctgcctagccgaagctgatgggggggcacggatgcttgcgaggtgaggggctcctctggggggtctggttctcccgcctggatgcccatcccatcgtttgacagcacagcctgaggagaggcaagggtgtgaggacgggacagccaagcaatcacacgagatggtcacacagct

SEQ ID NO: 13216 - DNA, 597 bp, Homo sapiens
  MAP TO AC011609.9; EXPRESSED IN BRAIN, SIGNAL = 2.7; EXPRESSED IN LUNG, SIGNAL = 2.4; EXPRESSED IN PLACENTA, SIGNAL = 1.4
tttcgtggactaaggatggcaaccctttttatttcactgaccatcggataattccatcgaacaattcaggaacattcaggatcccaaacgaggggcacatatctcactttcaagggaaataccgctgctttgcttcaaataaactgggaatcgctatgtcagaagaaatagaatttatagttccaagtaagtactataacgggaatttcattttacaagtgttttagtgaagtgttaaataggagttagattgggttccaatgaaataaagcagttattaactaaatcaacttatatgtgtcttgtattttatttataaggaaaaatttcctccaggtcttgatacttaaaatcggatgaccttagaaaacaacataatttgactctgtttcagtaaccttatatctaacatggaaaaatataatatctgctttgccttataagatgagaattaaacatattattagttaaacttggctaaattctatgcagtaatagataaccccaaaacctctatgtaaacataaagttattccccgataaagcaatttactgtgggcctggcaactctttcatgcagccttcttgctgatcaca

SEQ ID NO: 13217 - DNA, 571 bp, Homo sapiens
  MAP TO AC011469.3; EXPRESSED IN BRAIN, SIGNAL = 1.6; EXPRESSED IN PLACENTA, SIGNAL = 1.3; EXPRESSED IN LUNG, SIGNAL = 1.7
tgtagagggaggcactgtcctctgtcctcttagccatggcatccccccggcccatcttcctctcccagggacagacgccccagctgtggtcaactgtcttcacatcctggcccgctccctggatgccaggtagggccataggcagtggcgcccactcccaccatcatcgggcccccaccccaacccctggtctcctagactctccgattccagagctgatgttcccccgctgcccttctaggacagtgatgaagtcaggccctgagatcgtgaaggctggcctccgctccttcttcgagagtgcctcggaggacatcgagaagatggtggagaacctgcggctgggcaaggtgtcgcaggcgcgcacccaggtgaaaggcgtgggccagaacctcacctacaccactgtggcactgctgccggtcctcaccaccctcttccagcacatcgcccagcaccagttcggagatgacgtcatccgtaagggcgcctgacccaagggcaggttgcggggagtcagtgtggccaacaccacccatccgggtgcctgtgagagtccctgggtgtttga

SEQ ID NO: 13218 - DNA, 583 bp, Homo sapiens
  MAP TO AL157882.1; EXPRESSED IN BRAIN, SIGNAL = 1.7
ttctgcagtaaaacctggggctgtttgagaaggaatattctgcaatgtaattcggtccaaggcctttacaatatcattgtttaaaccatggactgatgaaatagttctattttgatcacctggctgctgttgtaatgttctatcattatctttaatatcttcttttgctagatccataaaggtagacttcttttcaccttcatctcctttagaagatatgttctccttcattacaacttttcttaaattgccagaattcccagatgtttcctcgcctgccgtaggaacaacaataggaccacgtacttttccctcaaatacaaaaggctttggttctttggagattaaatcatagtcctttgaaaataaaaacatgtttaatcttttaactgtaaatattaaaacatattaacaaaactaatacattcatgttatatattgcttcagaaatttttggaaattttaaagatggataaaaccggatatgttttcatttcactaaaaagacaaaatttttaaccacaacaaaattcataacaactactttactttgcctacatgtcacagaaatgtgggaaatctt

SEQ ID NO: 13219 - DNA, 592 bp, Homo sapiens
  MAP TO AL138849.5; EXPRESSED IN BRAIN, SIGNAL = 1.8; EXPRESSED IN PLACENTA, SIGNAL = 2.1; EXPRESSED IN BONE MARROW, SIGNAL = 2.2; EXPRESSED IN LUNG, SIGNAL = 3.2; EXPRESSED IN ADULT LIVER, SIGNAL = 2.5; EXPRESSED IN HELA, SIGNAL = 1.7; EXPRESSED IN FETAL LIVER, SIGNAL = 1.9
agaggcttgctcaaggtcagtcaatctacaattaaaatagcttcaatcgaagaatatcacaaattctacagatagaaaagccaaaaaacaaaaacaaaaaggcttactttgccatgtttttccttcatggcattactttggttgtctgtttctgtcttcttggtatcatcttttggttggtctgccttagctttgttttcctcagcaattgagtttttctcagttgcactacttgaattacattcccacttcacaaacttctcttctactatgcccttcagctgaaagtcatccattctttttgggtcaaagccttcaatctatataaaaaggcattccaaattggtagtggaaaaattatttaaaaaaaaaaaaaaagatggacaaacagacaaaccagaattccagcttaaaatgtttgagcagagttctctgcaagagcaaactatatatatatatgcatatatatgtcacaaattcatgcttacccaacttccaagtaagcaaggaagaagagggggttttctctgttgtagaaaaaacatcaccattaaagcaaaacagtaagaagggattccaccatcagtttggg

SEQ ID NO: 13220 - DNA, 558 bp, Homo sapiens
  MAP TO AL138828.4; EXPRESSED IN BRAIN, SIGNAL = 1.5; EXPRESSED IN ADULT LIVER, SIGNAL = 1.9; EXPRESSED IN FETAL LIVER, SIGNAL =   2; EXPRESSED IN HELA, SIGNAL = 1.9; EXPRESSED IN LUNG, SIGNAL = 5.1
agatgcggagagtgaaaaggacccatattaataattgttcctaaaaaatgaaataattcacccaccaaacctatatcaaaaaaaatctgtcagaatcacaagttgaaattttataccttttcttccttgcgtctgtccttcttttcttcattattttccatggtctcttcttcatcttcaacaatcccatccccttggtatttgtcatgagtccatttaggactgctacctgattttttgaagttaaagcgccctctgccacgttgaaaagtaccacgacctcttcctcttttggcccaataatccacaccatcatctctgtcgtcatgctacagaaaggttaaaaacaattgtcaatgaaatgtttcttgtaaagatgatcatttctccaatcataaatcacagtattaatcttctgaagattgggtatatgagattggtaatattctaaaacacaataaaacaaaaccagtaaaactgaatttttcaacaaaaatacattccatcatcaagagaataactacatcttactacttagcaacccaagcactgaaggtt

SEQ ID NO: 13221 - DNA, 596 bp, Homo sapiens
  MAP TO AL121716.16; EXPRESSED IN BRAIN, SIGNAL = 1.4
ccacagcaaccaggttcttacctgccattttttcactatgccatttctgagcactaaagatagatgacagcaaacaatgaagaatcactttctgaactttgcacttagataacatatcagaaataaaactagggaaacccttcgctgagctttctattacttttgccagctcagtgaagagtagtgtcagaatttctatgctcatcatttgcatgtttcgattgcctattaaatcttgtgcagtaaccttgacatgagttgggtaatggctacgcatgtaatataagcagagagaaataagaatttctatgtacatagaactccggaagttatgatttgagtccactggaatgtgactataaaaatctttgcccataacagaaatccggtgtctggccaatagattctgaaggagagacaactgaggagtatatgcattatttacactagtagttgaaatggcatttacaaaagctatagggttagttttcaagatggctttgatggcagagaaagcatacaaagtcctggatgaatcatacaactggagatacaggagcacatgttgatagagaggatgaatgttgaaattggga

SEQ ID NO: 13222 - DNA, 515 bp, Homo sapiens
  MAP TO AC004460.1; EXPRESSED IN ADULT LIVER, SIGNAL = 1.5; EXPRESSED IN BRAIN, SIGNAL = 1.6; EXPRESSED IN HELA, SIGNAL = 1.6
atctatcccatcatgccagctgctggtaagggaggggcttatggcaatcaaagttagatgactggctgtggattgtttctggagtaacatggacatgtgcacatttccatgtagtgcctgacggcctgccttctgctgtgttgcggtgaatgctcccacaggccccgttgaggcgtggaacagaacacagagaactgtcccagccgtccaactatcaggctcacactcctcctcacctggtgtggaaggagttgttgctggtgtcattcttaggcttttggtttacagtggaagtgtgagtgtgaagagcaaggctcaccgactcgcagtggcatgcgtgggcacaccagctgttgccttctggtgggtggggctgggtggagccacccttgtttgttggcttcttatgggttggtccctagcttgtgaaacacaggggtgtttacagtgctcattcacaggccctaaagaactcctctctgactgctgcgtcctctcttgtccatccacggact

SEQ ID NO: 13223 - DNA, 518 bp, Homo sapiens
  MAP TO AL158017.2; EXPRESSED IN BRAIN, SIGNAL = 1.3; EXPRESSED IN LUNG, SIGNAL = 2.3; EXPRESSED IN PLACENTA, SIGNAL = 1.5
ctgtcgaccttagagccagctgttcctacatcatcacgggtgagtggaatggggtggggttggttataggcctcaaacatagggtcctacagctagtgtcatcgccagcaggccctcagtgagaccctcaggtaggaggcccgatgcctgtcctctgagggcgtcgcctccaccacaccccaccccaggtacaaggaaacgggcagcagcacgtggagaaggccctgaagctctttgcccagctcatcaacaacaaggtgttcctgctgaccttcatccgcaccctggagctgcagcgcagtttctccatgcgcgaccggggcaacgtggcttcgctcatcatgaccggcctgcagggccgcctggaatatgccactgatgtcctcaagcagctgctctctgacctcatcgataagaacctggagaacaagaaccaccccaagctgctactccggaggtctggcccgcagcagtgggtggagagggtggcaggagtctgaacctggacagagcacctc

SEQ ID NO: 13224 - DNA, 528 bp, Homo sapiens
  MAP TO AC008417.3; EXPRESSED IN BRAIN, SIGNAL = 2.1
ctctgaggtactgggggttgggacttcaacacgtgtattttaaagagaaacattcagcctataccactttccttccatggccacgtgattggtatgaccagtccctgcaacaatcactttgccccttttcccccaaatcctaaccattgctaacccacaccatctgtttggattcatctctcagtgactcagtggttttgtcctcatatagctttaccatcctagaacatatcccacatccgaagtgaccactttagagttgtcatctcatactcaagatcattatctccttctctctggttcaaatatatattattacagcacctaaaatacttactaattcctgctcatcaggtccaatcagcataatgttgtcaatgtagtggaccagtgtgatatttgatggtatgtcaagacaatcaatatctctgtggactatattaaggtgaattgacatacccccaagacaatactgtgaaggtatcctgttggccctaacatgagaaagccaactgcttctggtggttt

SEQ ID NO: 13225 - DNA, 532 bp, Homo sapiens
  MAP TO AF223391.1; EXPRESSED IN BRAIN, SIGNAL = 1.7
caccgtcctcctcttctgagcatggaacagagcctgccatggtagatctaggggatttgaatttgtgctaataaccatgactttcttgcagagggcgtgcatcgacttcgccatcagcgccaaacctctcacccgctacatgccgcagaacagacacaccttccagtaccgcgtgtggcactttgtggtgtctccgtcctttgagtacaccattatggccatgatcgccttgaatactgttgtgctgatgatgaaggtgagaggagagaggcacaagagccgactgagccccagcgatggttccctcccagggcaagtgggaagacaccccaacatcccagcccatcactgctttacctacttttccatcattgaatccttttgtgatcttattttgttcaataacccaacctctggggctttgggggtccactgagcaaaatgcagtgcagactatagtagccatccaggggctcccaagacctgagatggcaatgggaggcagcttcagacaagggtggaaaaatcagga

SEQ ID NO: 13226 - DNA, 565 bp, Homo sapiens
  MAP TO AC008850.4; EXPRESSED IN ADULT LIVER, SIGNAL = 1.5; EXPRESSED IN BRAIN, SIGNAL = 1.4
ctgttctccttccttgcctcaaaaaaaattagaaaatgtgaaagactatattctcaatctcagtgaatgacattccttcttttcagttatacaagttggaatgtaaagggaattgacatagacttttctctgtctcctaccctgcaggtccatctagcccgaggtagtatcagttcttgtgcatctacctttttgacgtgacttgtaatcataccctcctctttattctcactgctactgacatagttaagaactttatcttgactgttattgccattatagtgacagtctaactcactgcttctcacattatctgagctgaagaaccagggtttattgtttctgtttttttaatttttaatctgttgcagaaattttgtagcatataaaaaaattaattagaaaaatgaaatgaaaaaagacatacaaaaatagctcagttttatacattattaaattcaatacacataaaaattactctgtcaaattgtcataaaagtttttgggtactaatagtctatgtatatcctgtcccagatgggtcacacttttgcacattggcact

SEQ ID NO: 13227 - DNA, 534 bp, Homo sapiens
  MAP TO AC010368.2; EXPRESSED IN BRAIN, SIGNAL = 1.5; EXPRESSED IN LUNG, SIGNAL = 1.7; EXPRESSED IN ADULT LIVER, SIGNAL = 1.8; EXPRESSED IN HELA, SIGNAL = 1.9; EXPRESSED IN FETAL LIVER, SIGNAL = 2.2
ccagtcacatggtacatgccacactacatgtgccatgagaataacaaaatcttgcattgtcaagaaaggaaaagtaagggtgtcaagattttgtactcaggaaatagcagggagtatgtcagccacaatctgtcatagatatttttaaaccaagataagcaaatcaagagttcagagtcactaacataattgttttccatgcattcttttggaataaaaatctccagattttaaggatactcacgggtggcaatggccaacactgacagtaacaatcccggaaaagaaatccaggtatctgcttccttcagcatcaaagagccactccatgtgcccctggtggagcagcaggggtttctggaaatatgccgtcaccacaggagaaagatgttccttgtggatttccaggacacggttgtagccaagggactgtagataaacaagatttaaacccacacacttcttacaagatcaatagcagtcaatctatgagtaacagagcccaggctctctagtggacagagaagagggctg

SEQ ID NO: 13228 - DNA, 565 bp, Homo sapiens
  MAP TO AL158017.2; EXPRESSED IN BRAIN, SIGNAL = 1.3; EXPRESSED IN LUNG, SIGNAL = 2.5
agaggagggtgcattgtgagcagccctttctggtttcatctgtgaccacctgctctctttgcagtccatctctacaagtgtgcagcccagcgggagagctgcggcctctgcctcaaggccgaccggaagtttgagtgtggctggtgcagcggcgagcgcaggtgcaccctccaccagcactgtaccagcccttccagcccctggctcgactggtccagccacaatgtcaagtgctccaaccctcaaatcaccgaggtaagtcctgcaagtctctagagcaggaaggggtggccaagagctgaccccaagacagtgggagaggagtgcaaattgagactctgtggacaaattattggcgtacagtgagtttaatgtgggggggtgtaggaaacctctcgcgtgtgtcttaacggcccctgtctaggtataagaggtaagtgtatggaagcgcatcctcatgcctgcgcatgaatgtacaagcgcattggtgtgcacgtgcacacgacaagggaggcagagccaacccagtctccctgccaggctggctgagccaagtgaggaggag

SEQ ID NO: 13229 - DNA, 598 bp, Homo sapiens
  MAP TO AH009158.1; EXPRESSED IN BRAIN, SIGNAL = 4.4
catgccaagcccaatctaacatgccatgtctctcctgctatacagggcacaggttccctaagtgagagctccatcccctctgtctctgacaccagcaccccaagaagaagtcgtcggcagctcccacccgtcccgccaaagccccggcccctcctttcctacagctccctgattcgacacgcgggcagcatctctccacctgctgatggaagcgaggagggctccccgctgacctcccaagctctggagagcaacaatgcttgcctgaccgagtcttccaactctccgcacccccagcagagccaacatgcctccccacagcgctacatctccgagccctacttggccctgcacgaagactcccacgcctcagactgtggtgaggaggagacgctcactttcgaagcagccgtggctactagcctgggccgttccaacaccatcggctcagccccacccctgcggcatagctggcagatgcccaacgggcactatcggcggcggaggcgcggggggcctgggccaggcatgatgtgtggggctgtcaacaacctgctaagtgacacggaagaagatgacaaatgctagaggctgctcc

SEQ ID NO: 13230 - DNA, 553 bp, Homo sapiens
  MAP TO AC013568.3; EXPRESSED IN BRAIN, SIGNAL = 1.4; EXPRESSED IN BONE MARROW, SIGNAL = 2.5; EXPRESSED IN ADULT LIVER, SIGNAL = 1.6
ttgcagaaatggctccctacctgaatctgaagcgagagcccagcctgataaagtcggatctattggatttgctgtttcctggcgtccgcagtcggaagaatgcgtggtgctcaactgcacacttccaaaggtgtttgcaggtcctggcactgtctaaccggaacacaaacgtgtgctcttgctcacgtcccttaaagaggaagcacaagggcctcgagtgggcgtttgcaaccccaacacaggattttcacagcaagggggaagaaatgggagccaggcctacctgatcatcatcctcgaccaccacgagtgtcaatttgctctttttaaaatccattttggtaattttaggcctagtcagacagaaagcattttaaaagcacaatctgcagtaaaactatctacacatcaaatagcagtttcctttctacttttaaagcttagactaaaaaaaaaataaaaacattcatccaagtgtgattatccagaagtttcagcgcaactgccacagacccacaacagcagcaccgtgtgctctgaggatgaatctggg

SEQ ID NO: 13231 - DNA, 525 bp, Homo sapiens
  MAP TO AL138923.2; EXPRESSED IN BRAIN, SIGNAL = 1.4
aaagaggatggccacacaactaatctctcctttgtcttttcccaggcacatccactgtagtatgcaagcctatagtcattgaaactcagctctatgttattgtggcccagctgtttggtggctctcacatctataagcgagacagttttgcaaataaattcataaaaatccaggatattgaaattctcaaaatccgaaaacccaatgacattgaaacattcaagattgaaaacaactggtactttgttgttgctgacagttcaaaagctggttttactaccatttacaaatggaacggaaacggattctactcccatcaatccttacacgcgtggtacagggacactgatgtggaatatctagaaatagtcagaacacctcagacactcagaacgcctcatttaattctgtctagtagttcccagcgtcctgtaatttatcagtggaacaaagcaacacaattattcactaaccaaactgacattcctaacatggaggatgtgtacgcagtgaagcacttctcag

SEQ ID NO: 13232 - DNA, 561 bp, Homo sapiens
  MAP TO AL109938.8; EXPRESSED IN BRAIN, SIGNAL = 1.4; EXPRESSED IN ADULT LIVER, SIGNAL = 1.4; EXPRESSED IN HELA, SIGNAL = 1.6
ggtggtcttggctagctctctctcacactgtctctctttctctctttctctctctctctctcatactctctcttccttggattatttgctctgggggaagccagctgccatgtttcaagctggcctgtggagaagcccactggagaggaacagagggaggcctctggccaacagcttctgaggaactgaggtctgtcaacaactacatgagtgagtttggaagtggattcttcagccccagttgagatatgagatgatcgcagccctatttgacaaaaatctcacaagagaccacccagctacatacatacataaaacgagttggaaccaaaggtggcaatctaagacagacacaattttaatggatgaaattaaattaccagtagaaaataagttatttccatgtcagttggtcagaagaggccattttcatggcaacatactgaaaaattataataatgaagataagtttaaatagaagaaaggacagagtgaacaattttaccagtctataaatgggttaagtgagatgcctgcattaccctgcccaaaatcaataga

SEQ ID NO: 13233 - DNA, 508 bp, Homo sapiens
  MAP TO AC018505.3; EXPRESSED IN BRAIN, SIGNAL =   2; EXPRESSED IN BONE MARROW, SIGNAL = 1.5; EXPRESSED IN LUNG, SIGNAL = 2.2
cttgtggatgaatgcagagcttggggggaattagaggaagagcattcagaatcctgatgtgaacagccagaatcctagcagtcgcaatcataacctctttcaacttcagtttcctcatcttcacaattaaaataatcggtacagtcttctccacccccaccacctcacaatggctgaaaggagcccgacacagtgcctggaacgtaggaggagccagtacgatcacccccaaagcaacattcagggacacctggccctgtctagggatggtggggatgcagtctttggtccatcctcgggccctgaagctgggggacaccattcttccctgatgcagcagccccagccagcccgggccccacctgaacgcctctatgagccgctccactttctgagcctccccttggacacggatgtgcgcctggaatttcctgagggcctcatccagctccatggtagagaagtccatctcgtccacgacgcagctggaatagagacagacagcccc

SEQ ID NO: 13234 - DNA, 577 bp, Homo sapiens
  MAP TO AC000134.14; EXPRESSED IN BRAIN, SIGNAL = 1.7; EXPRESSED IN PLACENTA, SIGNAL = 1.5; EXPRESSED IN ADULT LIVER, SIGNAL = 1.6; EXPRESSED IN BONE MARROW, SIGNAL = 1.5; EXPRESSED IN FETAL LIVER, SIGNAL = 1.6; EXPRESSED IN LUNG, SIGNAL = 4.9
caccaggactgagcctaacccaaacagaggagctcggtgacaaggacaaccaatgctgccccttcccacccctgcaggcctcctcctctcgctcccctcaacagggaaggaaaccagcccctgtcagaggccatgcggggcaggcagcgggcagagagggcagggggtgacgggaaggaagacagtgtgaaacacagtgttagtcagagcagcggagcagttgggggaactggacgctatccctggtcaggggaaaagaccattcatgccatgcaaaatgtgggggacatggaaccaggaaccctcaaggctgagaagtgagggaggggatggcacctttcccagagcagccagcatggggcagcccccaaactgctatgaactgatgatttgcatgaggtctggactgatctcaggcagctccgcatctcccaaggccatgccctccacccctgggaacccaccccactggctgccactggaggtctcacccccagacccctcctcaaacttgagcggccctgtccagggagctgacagtgagcagagcatagcatgtcatgggatggtgttttcc

SEQ ID NO: 13235 - DNA, 583 bp, Homo sapiens
  MAP TO AL121716.16; EXPRESSED IN BRAIN, SIGNAL = 2.4; EXPRESSED IN BONE MARROW, SIGNAL = 1.7; EXPRESSED IN ADULT LIVER, SIGNAL = 1.8; EXPRESSED IN PLACENTA, SIGNAL = 2.2
ccctctgcagacacagacagaaactgagaactttcattactcagcaaagcattctgactctgttgaatggagtcatcttcaattttaatcgtctcttcatctggatctatatcactgcactttgggggcatagcttcaatttctaattgagatgtaactgatgcagattccacttcgaggccacttacaactttacatatcaggtcaaatactacctgttgaacatcatcatctggggagctttccttgggcatttgagaatcctcttgggcattcacggtttcaggatcaacttcgtaactcaagttgtccccagcagaggactgtgaacatcccgagtcagaactctgaagtatttctatctgttggtctggaagatcaaaatcagacacaaccattggaattgtctcactgctggtacttaggagggaaagtctgtcacttaatggattcacagtgagactaaagttctctatttcatccatggtaagtggcttttcaccatttccttttgatgtgatgagttgtacttggctcactgatatatgagaaaaacagtaaaagaagaaaaatacaaaatgca

SEQ ID NO: 13236 - DNA, 581 bp, Homo sapiens
  MAP TO AL158017.2; EXPRESSED IN BRAIN, SIGNAL = 1.7; EXPRESSED IN PLACENTA, SIGNAL = 1.5; EXPRESSED IN LUNG, SIGNAL = 3.7
caaaagcagagagagggtgggagagcggctgtgggcccctgggctctgtgccaggcactccgtgtgtgaatgctgcgctctggatctcttaggtgtgtaaagttgtgaacacaaccaccctcacctgcctggcaccctctctgaccacggactaccgccctggcctggacactgtggaacgcccagatgagtttggatttgtctttaacaatgtccaatccttgctaatttacaacgacaccaagtttatctactaccccaacccgacctttgaactgcttagccctactggagtcttggatcaaaagccaggatcgcccatcattctgaaggtaggagtgcccgccagagggcagtgccaccaggggcagcaatgccagagggcgcccctcgctcctggcctgactttctttctttctggctctcctttctatgcaattgaacttgcaaagctgtctccttcctacagaaggagctcatgggtagatatcgacccatcaggcgatatagcttgcacccaggcttcttaagaaatactttagaatatttctgttagttcttgtgagctttgggaaccagag

SEQ ID NO: 13237 - DNA, 598 bp, Homo sapiens
  MAP TO AL138498.2; EXPRESSED IN BRAIN, SIGNAL = 1.5
ggggcagcgttacactacagccttgtatttgagccccgttagtttgggaataaacattgctaaccttggtgaccttgtgttgcccattattgttgcaaaccttataccggatcatcagaataatgatgaataccagcacagatgctacaatgattccaccaataataataatcatggtgcctcccaaaaactgagactgcatgaaatggcaacgcacataatcctgttccgtagtaaactggatgcaacccacgactcttgtggcagtgagggaagtgatgccatcatcatatatggccaagacacacaagtcatacatagttccagcagccagattattgaccagaaaagttttgctcgtaggaggtatcattctgagggacaatggaatttgtgttaatattaataacaaaacaaaacacatacacagaaagtcattatgactttagttcagtgtcatttcagtatcattaagtacatttataacatatgaattattgaaaaatgatctaatctcatatttactgagttaaaatggctaaaagtccttgtcagcatctgcactatattaatcgtgcctaccccaagccttcacaag

SEQ ID NO: 13238 - DNA, 512 bp, Homo sapiens
  MAP TO AC018388.4; EXPRESSED IN ADULT LIVER, SIGNAL = 1.5; EXPRESSED IN BONE MARROW, SIGNAL = 1.8; EXPRESSED IN BRAIN, SIGNAL = 1.6; EXPRESSED IN PLACENTA, SIGNAL =   2
agaaaaggagatgggcttggaaatagtccaaaggggatgcaacagaagtaggtttttttccaatcctaggattaggattccataaatataaacaaagaaaaatgaaagaacaactaacacacacctctcttctcacgatgtatttcatccagaagctgctcctgcctttctatctgttgaaagagacactgcaactcagattccttgttttcagtcaaattcctgagttgttgtctgcagagcatcagctggtgtcgcagatttttctctctgttttctctctctttcagttcctcacagagccactgaagtttagtctaaaaaataacatttatatctaatggttaaagaaactcagaaaagagcagcatttcaaaacatgaagaaaaaaataagtaacataatttgaacaaatatagataattaccaaatttttgcaaaattttaaaatatccatgtttaatttgcataatggtctacagcaagtaaaagctggttcagaaattaagcca

SEQ ID NO: 13239 - DNA, 577 bp, Homo sapiens
  MAP TO AL034423.18; EXPRESSED IN BRAIN, SIGNAL = 1.5; EXPRESSED IN PLACENTA, SIGNAL = 1.7; EXPRESSED IN LUNG, SIGNAL = 1.8
tttacctctcgcctctgctccctgcaggcaagcgcctccaggagtggtgctctgtgatcctgtgcttcagcctcatcgcccacaacctggtccatctcctgctgctggcccgctgggaggacacacccctcgtcatactcggtgttggtgagtgcccgaggcactgctgcctgcctcaacttccctaggggccagggacccaccgggtaactggcgcgtgtgtgtgtccacatgcatggatgtgtgtgcttgagtccagtatgtgccttgagtaccccacctccctattgcagtcagcagcacctccctgcagcctgtcacttgggcccaaaacctaaacatgatcctcagttcctctcttcctcttgcattgcacatccaaaccatcagcaaatgctgttaactctactttcaaactgcatgaggagtacagccatggctctgtaccttcatggtccccacgcttgtccagccaccatcctctcccgcctgggctgtttcaggagccttcttcctggtctccctgccttcacctttgccctgcaccgtccagtctccacatggctagctggatcct

SEQ ID NO: 13240 - DNA, 521 bp, Homo sapiens
  MAP TO AC007686.5; EXPRESSED IN BRAIN, SIGNAL = 2.1; EXPRESSED IN BONE MARROW, SIGNAL =  39; EXPRESSED IN LUNG, SIGNAL = 3.3
tctcccctttcaccactgtccgctaattatagctcacctttatgggctgcagagcacctctgccgcagcccagatatcttttcagagcagcggcagagcaaacataggcgctttcagaataccctagtagtcctacataaatctggtttgctggagatcactttgaaaaccaaggagttgattcgtcagaatcaggcaactcaggtagaactagaccagctaaaggagcaaacccagctgtttatagaagccaccaagagcagggcccctcaggcttgggccaagctgcaggcatctttaacacctgggtccagtaatacaggcagtgacctagaagcattctctgatcacccagccatatagcacagaggcatattttcctgttacttgagtggttcttttagctcatttgctgttacctactcctgtttcccaaagcttatgtaagagcttttccttctaaacttaaactgtgttgtggttcacttaggaagccacgtgccaatacctggctgctgtct

SEQ ID NO: 13241 - DNA, 523 bp, Homo sapiens
  MAP TO AC010931.5; EXPRESSED IN BRAIN, SIGNAL = 2.9; EXPRESSED IN PLACENTA, SIGNAL =   2; EXPRESSED IN ADULT LIVER, SIGNAL = 1.9; EXPRESSED IN HELA, SIGNAL = 2.1; EXPRESSED IN LUNG, SIGNAL = 3.3
ggaggagatgaaggtagggcgtgcaacatctctgcggggttgggggtgggcatgggcgctggtgcaggctccagggtgggagctgagcacccctcccttcaggtgaagctgctggagctgcaagagttggtgttgccccttgtgggcaaccatgaggggcatggcaaattcctcatcgctgcccagaaccctgctgatgagcccactccaggggccccagccccccaggaacttggggctgccggtgagcaggatggtgagtagagctctcaggcggggtgggcaggcaggggcaggggaggctcgcactgtgctcagacccccgcctccctctctccgaagttttttatgaagtgagcctggacaacaacgtggagcctgcaccaggagcggccagggagggttctccccatgacaaccccactgtacagcagatcgtgcagctgtctcctgtcatgcaggacacctaggagcacccaggcttgcccagcaaaccctgcgtgccattcttctaccaggcagc

SEQ ID NO: 13242 - DNA, 520 bp, Homo sapiens
  MAP TO AC017079.2; EXPRESSED IN BRAIN, SIGNAL = 1.3
tgtgcataacaaatggctccatacttaaaacacacaaaaactcaaatcatgcaccacatgaaagctaggcaaggttaaaagtaataaagggaaacttccaaattaaaaaaaaaaattccctgagactcaggactaaaatgacaaatcgtgatcatgaaccggacacgtaagctgcagtgggtgagcttccgtggcagacaaaatggggcagcctcatgagaggctcagagccttaccccaacagagaactccgcaatgtcagctcctgcagccagggcctctgcagccccctccttggccattttggtgatgaagttcttagcagcgttggaagtctgagtttggagagctgcccagattgctctggagatctgagtgttctcatagcttatctctttggcaggattattgatcatgcttattctaacattgttactggatttctgttcacaaaatgggaaacgggagtcatattgtagatatttttgaacttaaaaagcagcattaacatcagtcatgt

SEQ ID NO: 13243 - DNA, 527 bp, Homo sapiens
  MAP TO AC010636.3; EXPRESSED IN BRAIN, SIGNAL =   2; EXPRESSED IN BONE MARROW, SIGNAL =   3; EXPRESSED IN LUNG, SIGNAL = 2.4; EXPRESSED IN FETAL LIVER, SIGNAL = 1.9
tgaaaaggctgcagcttaggctgtcactctttcttcactcagctcagcgtctgatcacatctactgtcactcagggcctcagggggcggggccttaagcattatccaatcagggatggtgggctggaaaccatccaatcaggaacgcagctggagcgaagaggacggtttccgggtttggtgcggcctttgtctctcgctgcagtcagagctccaggtctggttcttctcctaaaggcccaggctgtgtggccccgtgtcctgcaggtattgggagatccacagctaagacaccgggacctcctggaagccaaaaatggtgagagtgagggtccgacatcccgagagaggagagggactggttggaaccggtgaaaagtggctgtggcgggactcaggcctccccgcagtcagctccacagtctgctcccccagttctccttgctcagctcggcctcagtcctgttcagccataaaatggcagctgcgctgacagccggcacccgggcgtcttgtctcttcactgcg

SEQ ID NO: 13244 - DNA, 576 bp, Homo sapiens
  MAP TO AC005137.1; EXPRESSED IN PLACENTA, SIGNAL = 1.4; EXPRESSED IN BRAIN, SIGNAL = 2.8; EXPRESSED IN ADULT LIVER, SIGNAL = 1.5; EXPRESSED IN LUNG, SIGNAL =   2; EXPRESSED IN BONE MARROW, SIGNAL = 1.6
ccgccttctgaacctcttcttttgtctccgcaggtgtggagccagcagtttgggttcccacagaggcccttggcaatgagaccctccctcccagtcaagggttgcccactcccagtgatgaggagccacagctgtcacaggaaagccccaggacccccacccacaggccagccctcaccccagctgccccactcaccacagccctgaacccaccagtgacagccactgaggagccagtggtgtctccaggccccacccagaccaccctgcagcagccactggagctcactgcatctcaactccccgccggccccacggagtccccagccagcaagggagtgactgccagcctcctggccatcccccatacaccagagtcctcatccctccctgttgcactgcagacacccacacctggcatggtgtcaggtgccatggagacaacaagggtgactgtgatctttgcaggaagccctaacatcacagtctcctcccggtcgccccctgcccctcgcttcccgctcatgaccaaggctgtgacagtccgaggccatggctccttgcctgttaggacga

SEQ ID NO: 13245 - DNA, 516 bp, Homo sapiens
  MAP TO AC018711.2; EXPRESSED IN BRAIN, SIGNAL = 1.3; EXPRESSED IN LUNG, SIGNAL = 1.8
gggctatctgagcagcagtcactggaactgtggggctcctggccaggatactaaagctcagagcatgttggtggaacagagtgaaaagctgagacacttgagcacattttctcaccaggtgttacagactcgcctggtggatgcagccaaggccctgaacctggtgcactgccactgccttgacatctttattaaccaggcatttgacatgcagcgggacctgcagatcactcccaaacgtctggaatatactcgaaaaaaggagaatgagttgtatgaatcattgatgaatattgccaaccgaaagcaggaggaaatgaaggatatgattgttgagacacttaataccatgaaggaggaacttctggatgatgctactaacatggagtttaaaggtaggtcccagagagcttgttggggtgctggcacgggaggagtctctaaccattttctagccggaaattaagaacgttaattcctaaggttaaaggaatctcagggtaacttcatccaccc

SEQ ID NO: 13246 - DNA, 504 bp, Homo sapiens
  MAP TO AL049555.6; EXPRESSED IN BRAIN, SIGNAL = 4.6; EXPRESSED IN PLACENTA, SIGNAL = 1.4; EXPRESSED IN FETAL LIVER, SIGNAL = 1.9; EXPRESSED IN HELA, SIGNAL = 1.9
taccctgagacgctgaactgaacaaccttgtttctcagtcatatttagaaaatgattaaaattggactcatcaagcagaatgtaaacagatactcctcgagttgatgcctcaacgatttctttgaaaatgtccacatctgtaaatatatccatcactaaagcaatgacctgttaaatataagaatatgaaacaattttagatccttgatagagaaagatttaagaaattgcttactttcagtaaaggtcagataaaattttaaaaattaaatacatatatgtatgtatatacaaatattcatttcattttctaaaacagaagataaaaccatattaaaataagcaaataactatatgcagatttgtacactaagtcattttcatattagctttaatttaaaggaaatctgcatttcagtaggattttgaaaaatgggcaaatccaaatcatggatttcaagactgcctgtaaggtagacaaacaggacaaggtggaaaccagtg

SEQ ID NO: 13247 - DNA, 572 bp, Homo sapiens
  MAP TO AC018507.2; EXPRESSED IN FETAL LIVER, SIGNAL = 1.6; EXPRESSED IN PLACENTA, SIGNAL = 2.1; EXPRESSED IN BRAIN, SIGNAL = 2.2; EXPRESSED IN LUNG, SIGNAL =   2; EXPRESSED IN ADULT LIVER, SIGNAL = 1.5
aaccgatggactgtctccactgcacctgtatagaacctggataccccgcacagagggaatcttacgtgcatacctatatttcatgccagtctgctttgcggtggactctttgagagaaatgtgatgctgaggcgtgaacgtccccaggctgcgcgcgatgatagcgaccgtgcggaatttggcccgggctgcgttcaccacattgggggcggtggagctctgcttgctcagaagtcggtcctcaccattccgactcttcaaattgtgctctgtgcaggctatggagacttgcattgcttccccaggcagcgcacggtccctctcagaaccccagaacacaggcagtcacgagaggttgagcagttgcggggatttctgcttttcttttaagccctccttgctcccccttcctggggatgccgtcagaggagtcctggcggctgactttcgagccaagcccacaaagtggcacaaggggctgcgatgcaggaaagagtccccggggacccagagaagtaaacagacggccccgaagttgtcacagcagctggagggagaatcaggtttgcaaa

SEQ ID NO: 13248 - DNA, 517 bp, Homo sapiens
  MAP TO AC008481.4; EXPRESSED IN BRAIN, SIGNAL = 1.3; EXPRESSED IN BONE MARROW, SIGNAL = 2.8; EXPRESSED IN FETAL LIVER, SIGNAL = 2.8; EXPRESSED IN LUNG, SIGNAL = 3.1
cacacaaagatgggcttggcgcttgtctaaggctttggcagcttcacagattccacgtgctaggccatcgtggatgagggcggtcttcagcacctcttgtaaagcagtattaacatccattacacctccagcagcaatgcctccctcggccatggcagtgggttatgggtgaagctgaatcttgaacatacccaagcctccgcctccgcgcaactcggcagtggcagggaaagggtgattaacatattttttaatgttatatatatatataatactataatcttacaataagctgaagaaaagaaaatgttattaagaaaatcaggaaaacacattgaatttactattcattaggtggaagtggatcatcataaaggtcttcattctcatcgtcttcacattgagtaagctgaggaggaggaggaagaggaggggttggtcctgctgtcttaggggtggcagaggcagaagaggtggtggaggaggtagatggagaggcaggcacattcagctgtaa

SEQ ID NO: 13249 - DNA, 546 bp, Homo sapiens
  MAP TO AC007500.2; EXPRESSED IN BONE MARROW, SIGNAL = 1.5; EXPRESSED IN PLACENTA, SIGNAL = 1.6; EXPRESSED IN BRAIN, SIGNAL = 1.6; EXPRESSED IN ADULT LIVER, SIGNAL = 1.5; EXPRESSED IN FETAL LIVER, SIGNAL = 1.5; EXPRESSED IN LUNG, SIGNAL =   2
aacagatctggaggctctgcaggatgcaagctcatttaaactcttttatgcataacctaaaggtttctccttatgaccaaaatttgacttcaccaagacaaagtgaactagactgtggggtttcttcatttatatgtagtttgtctcattgttctatcattatcataaactggggaacttgtttgaaggaaactgtgagtaatgtaagaatggcttagatttatataatatgaactttcttggtcaaatccaactgtgatcttgggatcttgagttcccttattgtgggtgtcagaatataaacattagacatttcccactttcttatgtctagttttaaccccaagattttggtggtctgtactgttttccctccatttactaactcaactgattttatttctattagtcttcatactgttctttactctgatacaatagattctccatggatcaatactgtcaacccaacacttttcatcaaagacagtaaaagttttcttaacaaatccacagatgatacagagctgtaaggcagagctttcc

SEQ ID NO: 13250 - DNA, 587 bp, Homo sapiens
  MAP TO AC009330.5; EXPRESSED IN PLACENTA, SIGNAL = 1.8; EXPRESSED IN BRAIN, SIGNAL = 1.6; EXPRESSED IN ADULT LIVER, SIGNAL =   2; EXPRESSED IN FETAL LIVER, SIGNAL = 2.1; EXPRESSED IN HELA, SIGNAL =   2; EXPRESSED IN LUNG, SIGNAL = 2.2
caagagaccggagctacaccctgtgaaaacttgcttgtggactttaccgaactgccccgagcacggggttatcagtacatgctagtgtttgtttgcactttctcagggtgggtcgaggcattccctaccaggatagagaaagcccaagaagtaaccagactgttgctaaaagacattattcctaggtttggactgcctctaactttaggatcagataatggcccagcattcatggctgaagtagttcagcagctgtcgcagctgctaaagataaagtggaaactgcacatagtctaccacccacagagctcaggaaaggtacaatggatgaaccagacactaaaacatctgctgaagttttgtcaagaacctcatcttaggtgggatcaggtcttgcccatggcctttctccaagtcaggtgtacccttaccaaattgactgggctttcaccctgtgaaattgtgttcggccgaccacccccgattataaatcaggtaaaaggtgatctgtgggaactaggggaactaactttaaaaaggcaaatgcaagctttaggattagctatgcaaaagattcatggctgggt

SEQ ID NO: 13251 - DNA, 514 bp, Homo sapiens
  MAP TO AL135905.2; EXPRESSED IN BRAIN, SIGNAL = 1.7; EXPRESSED IN PLACENTA, SIGNAL = 1.6; EXPRESSED IN ADULT LIVER, SIGNAL = 2.3; EXPRESSED IN FETAL LIVER, SIGNAL = 5.1; EXPRESSED IN HELA, SIGNAL = 7.1; EXPRESSED IN BONE MARROW, SIGNAL = 1.5; EXPRESSED IN LUNG, SIGNAL = 2.3
aaaggtgaaaagctaagcaaggatttgaagttgtgaaacatttttgtaaagattgagcatttagtcacatttggtagacaacagggtttaataagatttgattaaacattaaaatgagaatgcttttgaaaacatttccatgttagaaatttagaattattactacagtgtttatattaatgatctaaaatgtttaaatattcttctgacttaggattggccttttgatgatggtgcaccaccatccaaccagattgttgatgactggttaagtcttgtgaaaattaagtttcgtgaagaacctggttgttgtattgctgttcattgcgttgcaggccttgggaggtaaatgaatttatcaatttgattctaggtaaaaatctattgataatgaaaatacagaaacttgaaaaattcttataattttttaatataaagtcaacatttgtcataggtattacttaaataggaagggtggtagataatacttctgagttggggaatgtttggagaa

SEQ ID NO: 13252 - DNA, 566 bp, Homo sapiens
  MAP TO AL138688.11; EXPRESSED IN ADULT LIVER, SIGNAL = 1.5; EXPRESSED IN BRAIN, SIGNAL = 1.5; EXPRESSED IN PLACENTA, SIGNAL = 3.2
tacaatgctttcctcacccccacataagttgaaacaaaatgatatgccctggaaagtactgtaacaatacttataaataaccaatgttaacacttattcgcaaggtataatttagtgtagctcactgttgatgttggttgtctctgttttcccctcgtcttcactcatcatatccgtcattgtaagcaactctgtatcaagagcatctgaagaaaccttgctttttagctcctcaattgctgcaggaatcttctcactgctgtccaatggagcaggcagaaaaacaggaactggcacctaattaaccaaatcattttgagttaggtttactaaacattaaaaggtatttttccaaattaaaaattactctgacacatgatctactttgtaatatcacactggataaaagctttgaaaagaacacatacaaaactaagatgttaactgtgataagaaagcctagaatacaagcatctactttttggaattcaaattaaagaaaaagaatttttgaagtatttctgtcccccaggggactataatagccaagccctgacacagtgttc

SEQ ID NO: 13253 - DNA, 571 bp, Homo sapiens
  MAP TO AC018505.3; EXPRESSED IN BRAIN, SIGNAL = 1.6; EXPRESSED IN ADULT LIVER, SIGNAL = 1.8; EXPRESSED IN FETAL LIVER, SIGNAL = 1.7; EXPRESSED IN HELA, SIGNAL = 1.8
cttcctgcctgacctgagaggggctgtggatttatcagggcactgccctgtacccagagcaaggcctttgtctgccaggggcccagaggtgagtgcccagagaaaggccagccagggaagacgcagggaggggaggggcggggagctggttaaagggtctcatccaccctccagaactactgtatccccacacgcatctcacaggcggggaaacaggggctcagggaggctgcctgttatacaaacagccaatgcctcagcagcacctactgcagctgggggaagcttacaggcattgtctcatggaagcttcagaacgtctctaagagtcacgtccacggtaggaaggggctgagcccagttttgaactcaggtcagcctgatttctgagcctgtgtgcttcccacttcatcacgttatcgccctaagcccccacgctgagactcagaggacaaggagggggtgccacagccatgcaccctgctggatgccaagccaacagaacccagtgatgacctgccaagaagcccgcccagctggcatggctcccccccaactctacaggcgatgt

SEQ ID NO: 13254 - DNA, 572 bp, Homo sapiens
  MAP TO AC007221.2; EXPRESSED IN FETAL LIVER, SIGNAL = 1.8; EXPRESSED IN ADULT LIVER, SIGNAL = 1.7; EXPRESSED IN BONE MARROW, SIGNAL = 1.5; EXPRESSED IN BRAIN, SIGNAL = 1.5
ctggaaatttgggtcattggttggttggggtaaggagtatgaaatcatcaggacttggaaaccgcatttcttgatgagtcagtttctcatggaggccttcagaccagatgatgtcaatagtttcactgatatgtaggacctaaaagaatatctcaattgaaaaactgaatattttataatgttcaagttattatctctagagcagttaaggggaactataatcttataagagggtgcgcatgattctaaaacaatagacaccaaacagctatgagcgagcaagctgacctaatgatgaatgctgcgtgtactgcaaacttggtttgtttttgtttttctccctttcttctttactgatagacttttatgcagtatatagggacaatttcaacattaactatcatcttttgaatattagtggtgagccaggatgccactataggatccacgcattctacatttacttctcagagtcaccctgaattatttatctcaggttacagaagaggagcctaaagctagcttcaagatgtatctggcacatggctggtacttgcttaaggtcacggagc

SEQ ID NO: 13255 - DNA, 508 bp, Homo sapiens
  MAP TO AC009263.6; EXPRESSED IN PLACENTA, SIGNAL = 1.5; EXPRESSED IN BRAIN, SIGNAL = 1.3
ggagagccagaaccagattgtaagcctagactcattcatttgttcatccattcattcaccaaacattttactggacacctaccatgcgcacagcactgttctgttagctggagataaacagcagtgaataaaagaaagtctctgctttcacggtgtttccattttgttagacgagaaaacagacaagcacacttatcagggcttcccaacaggtatgccggggagtgccccagctccatgggactgggaaggagggcaagttggcagcagaggctggagcgactgcacccctgagatggattccacccactatgattaggctcatccattactttgacacaaagcaccatgcagatatcatcattttccatgactgccatgacagcagggctcggggatactaaagaaatcatttgccagtggtgataagggctatgaagttgtgctgaccgcaaaatccctgctcctcctaccaactgccttttccagtggttgagcaatctgcaga

SEQ ID NO: 13256 - DNA, 554 bp, Homo sapiens
  MAP TO AC008015.5; EXPRESSED IN PLACENTA, SIGNAL = 1.7; EXPRESSED IN FETAL LIVER, SIGNAL = 1.6; EXPRESSED IN ADULT LIVER, SIGNAL = 1.8; EXPRESSED IN BONE MARROW, SIGNAL = 1.7; EXPRESSED IN HELA, SIGNAL = 2.1; EXPRESSED IN LUNG, SIGNAL = 2.4; EXPRESSED IN BRAIN, SIGNAL = 1.8
ttccctcatttctcagtgggcatgtggttcattcatgattttactctcttgtgaaggcattcctgcaggtctcagtttgggaagttctgacacacaaaaactgatcccggttttgtgagaaagagttgcctgaaagccctcaaggtgctcagcctgacctttttttgtttgcattcacaggatggggagatcgacctgaaactcctcaccaaagtgctcgcgccggagcacgaagtccgggaggtacagtggtggcagcaattccccggtctctcagctctggcattcccataaccagccgactcccgggctggcctgtgcctccctgaggcctggatgggagggagaagtcagctacagttgagggaaaaggcctttctttgtcttacccagcgaaacccttcttggcaggatgatgtcggctgggactgggaccatctgttcactgaggtgtcctcagaggtcctcactgagtgggacccactgcagacggagaaggaggaccctgcggggcaggccaggcacacctgagcccgtcacccatgctctagaca

SEQ ID NO: 13257 - DNA, 512 bp, Homo sapiens
  MAP TO AC004662.1; EXPRESSED IN ADULT LIVER, SIGNAL = 1.4; EXPRESSED IN BRAIN, SIGNAL = 1.6; EXPRESSED IN PLACENTA, SIGNAL = 1.5
catgtgcttaggtaaggggtgtatagtacatttggcagaaatgcttaaggattgaatatgaaaactggagtcaagtcctagactgtgatctacctaatttgaagggtcaaattgtacattaaccaaccaaaaaacaatcatgtaattaaaacacttacttcttcaagtgctttaatgcttttaacattaaatttgcttagttggcactcagaacaagatataaaaaatataaaggcaatatgcctttttatcaacactgcacttttacctgtatcatacattcaaactggtacatacaaaggcccaattctgccatacttggtttaaaaagttcacgaagtctataatcttgcattaatttaacaaatacacagaaagcttcttcttctggcatctacattggaagaaaaaaaaacaacataggttaatgttctctgatacacaaataaaccaatgatatttaaactaagtacacagccaaccacaaacattgtttgagtggctgtgtgctg

SEQ ID NO: 13258 - DNA, 555 bp, Homo sapiens
  MAP TO AC007955.4; EXPRESSED IN BRAIN, SIGNAL = 1.3; EXPRESSED IN PLACENTA, SIGNAL = 1.6
catgcccacctgaggataagaacattcttttcttccaggtacagggaggactctgctggaatgagtggctcatagctgggttttatggcctcttctggggtgtagggatgagaagaattctttctagtttcgatggcctgcttctgctgtgtcctgaaatgccaaggtgccatattttgggggagcatgtcctaaaccccatcactaccatcactagcctgggagaagtcgggggactgagcagaaagcccagaagaccatggagactgtggtctccgcagtgctaccttcccagcttccactggtgactctggggttccccctgccgtaaaggagaggtgctttgctgctcccaagtcctgtcccttctctgatgctcccgtccattttttccaccactgtatctccggcgggcccctccccacccccatcttttctctcccacattttctgctctctctctttgtttctccatcccccttctctcttaaaaaaaaattcaatcccaagagcgattagatttgcaaatgagcgggcaggaaactgggaacaaag

SEQ ID NO: 13259 - DNA, 599 bp, Homo sapiens
  MAP TO AL132987.2; EXPRESSED IN PLACENTA, SIGNAL = 1.8; EXPRESSED IN BRAIN, SIGNAL = 1.6; EXPRESSED IN ADULT LIVER, SIGNAL = 1.6; EXPRESSED IN LUNG, SIGNAL =   4; EXPRESSED IN BONE MARROW, SIGNAL = 4.8
ctctgcctgatgggagtcactgtgattgaaaccctgaaaaacgtaaaaacagctgatggtccatcactcatccctactggcattgcttacctaaactgatcaattgaactagcagctttgcgaacttttccgtacattcctgccagattagtttctgtgtcattaaaaagaacaggaacatttcgcagacgagtgcctgtttaaataagaaaataaattagtgtactgacataaaaattaactaagacaattataattggaaatacactgtattacatgtggaaggaattttcaagggcaactttctaagcatcaccccaaagtagatgaaactataaagaaaggacaggtaaatttgatgacataaatatttaaacatccatatccacaacaagaaaaaagttttaaataagaaaatgattttagcaaaaattaagaaatttacaaatactaagcgttgacaagagtcaatattaatgggccctttgttcctatgtgaggaggagtgaggccgggtggtctttctatgaagcagaggactcccaaatgtgtactccagcccagaggcttcatcccctgccagactcatccaactgcct

SEQ ID NO: 13260 - DNA, 537 bp, Homo sapiens
  MAP TO AC007514.5; EXPRESSED IN PLACENTA, SIGNAL = 2.2; EXPRESSED IN ADULT LIVER, SIGNAL = 1.5; EXPRESSED IN FETAL LIVER, SIGNAL = 1.7; EXPRESSED IN HELA, SIGNAL = 1.7; EXPRESSED IN BRAIN, SIGNAL = 1.3
tttacagcagggaatggagctagaggaaaaagatactagtggaatcacaaatataaaaacgactctgtgtcttcaatgaaaagaaggcattatttagctccagatggacactgacatatgacatcagatgaataagcccatattccttaatttcattttctctatagaaaaacaacaacagcaacaacaacaacaacaactactactactactactattgctacttttccttctatcaggaatactaggtggtctcactacgtaggaaacataatagtttcttttcttttaaacatttttattgcgcagttttcagttaaatgcatgaattccattcaatttgcaattgaaattgcaaatttcaatttttcctactattttgagaaagaaaagaggaattaatgccccaataaattgataattaaccataattgatattcatatatttatcaacaattgtttattgagcaccaaatacgacaaaggaattttgatcagtgtaaacttgtggttctcaactgtggctagcttgtccca

SEQ ID NO: 13261 - DNA, 539 bp, Homo sapiens
  MAP TO AC007608.2; EXPRESSED IN BRAIN, SIGNAL = 1.3; EXPRESSED IN PLACENTA, SIGNAL = 1.7; EXPRESSED IN ADULT LIVER, SIGNAL = 1.5
ttttgaaatcccctgagcactcccaatccagacccgccctatttcaaacgttcagtggctgcatcacgacagaggctgccatggtaggcagtgcccgcccggctccaaccactctgctaaagcaatgttctgcatcttccccaaaactcctgaaaatccacctatgcgggacttcctccatccaaggaaccccatcactcctaaccagagggttccacttaataagttcttggacctcctacagacaagacaccatgctaaaaagctcacaagatacaacaaggagtaagaactggcctctaccctcaagcagcctacaatctaagtgggaggagaggagtgaaataattaccaaccctactgcacaccaggctctggggcttctcacccattctcttaatcttcatactcatcctgggatatgggttctattattaccatcccattttattggtaaggaaattgaggcttgacagaccatggattttgcccagggtctacttatttgacttggccaacccagggcagaacaaagatgt

SEQ ID NO: 13262 - DNA, 577 bp, Homo sapiens
  MAP TO AC000134.14; EXPRESSED IN BRAIN, SIGNAL = 2.7; EXPRESSED IN BONE MARROW, SIGNAL = 2.8
gctaatccctggccttcttctcactcctcctacctggcgcaggtttcgggtgacccggacgtcgtgccaggcgttgtcgttgaacttgccattgacgggttccacaagggcctcgaaggcacctgagcctaggttgatgaccagccagacagccccagacttgagggacaggttgacgtagtcggccgacttgcctgtatgcagcatcaggccgttgcgttgcagggtgcggaaggccagtgtgatctcatcagtgctgctctggatggggttgtgtgacaggtcgtagcagaagaactcattgcctttgaaggtcgccacaaactcctccttgcctggatgccgtggtgtggggaaacgggagaaggctgaatggggcagggtacaccagtgcttccctctcccctccagcaacgcaggcactggtcctgggcaccaggagcccagaggtcccaacctgtagctttaggcccctttccctccctcggcctgtcaaccatcctctcaggaccctgccgtctctgctgtcaaaagtcaatgtcccctgtgtccatttccaaaccaggaggctgctaag

SEQ ID NO: 13263 - DNA, 579 bp, Homo sapiens
  MAP TO AC011377.3; EXPRESSED IN PLACENTA, SIGNAL = 1.5; EXPRESSED IN BRAIN, SIGNAL = 1.4; EXPRESSED IN FETAL LIVER, SIGNAL = 1.8; EXPRESSED IN BONE MARROW, SIGNAL = 1.5; EXPRESSED IN HELA, SIGNAL = 1.7; EXPRESSED IN LUNG, SIGNAL = 2.5
aacaggtttgtcttgtggctctaataaatctttggtctgtgtccataggttcttgatagtccacaatgggtgaaccacagcaagtgagtgcacttccaccacctccaatgcaatatatcaaggaatatacggatgaaaatattcaagaaggcttagctcccaagcctccccctccaataaaagacagttacatgatgtttggcaatcagttccaatgtgatgatcttatcatccgccctttggaaagtcagggcatcgaacggcttcatcctatgcagtttgatcacaagaaagaactgagaaaacttaatatgtctatccttattaatttcttggaccttttagatattttaataaggagccctgggagtataaaacgagaagagaaactagaagatcttaagctgctttttgtacacgtgcatcatcttataaatgaataccgaccccaccaagcaagagagaccttgagagtcatgatggaggtccagaaacgtcaacggcttgaaacagctgagagatttcaaaagcacctggaacgagtaattgaaatgattcagaattgcttggcttctttgc

SEQ ID NO: 13264 - DNA, 599 bp, Homo sapiens
  MAP TO AL034380.25; EXPRESSED IN BRAIN, SIGNAL = 1.3; EXPRESSED IN BONE MARROW, SIGNAL = 1.7
tctcctcatcctccagatcccaaaaaaacttacttgtatgtcacacttggacttaaatctacagacaacacgtagccaggttttaaagcattaacataacttggccaggttttttttttctttttttttttttttaagatgatcactctggtgattatgctgaggacagacttggaaggaaaagaggaagaaaagaaacagaacagtcagaagtttgtggcaagacaccaggtgagagataacagggacccgaaaaaacaaaaggcagtggagaaagagaggggaaaccagattcaaaagcaaaaaccatttctgtggtagactaagatttggtgaccaactaagtttggccccactaaaggaagggatccagtgatgagcaccatagagcagaggagctcccagggtggtactggcagggcaagggctccgttacccaggaataaactgcactgaggccacagctacaggaagtctagtttctttcaagtctcttttctttctaccattcttaacccacagtgtgccttccaaataatcaagagtcaaactacagtgtaaatcaccactattattctagttaccgctgtggcttccta

SEQ ID NO: 13265 - DNA, 559 bp, Homo sapiens
  MAP TO AC008752.3; EXPRESSED IN BRAIN, SIGNAL = 2.7; EXPRESSED IN PLACENTA, SIGNAL = 1.4; EXPRESSED IN BONE MARROW, SIGNAL =   2; EXPRESSED IN FETAL LIVER, SIGNAL = 1.6; EXPRESSED IN LUNG, SIGNAL = 3.4
tctaggggaggtgacacgagtcccctcccaaaggtcacagagttcacagaggcacagctactacctgaacccatgtctgccagcccccaggctgggtcctctgcccctacctggctcaccctcaaatgccagatggaaaagaaagagaatggctgctgtgaaggtcagggtcaggtcatgcactggcgtttttgtgttggccaacaccacgcctggcagctgagcaagctggggtgaagggtctgatgtgacttctacaaaggctcacctgggagaagaccccctcccaagcccctgccctcgccctgctcaccgttgatcagctccagggcctcctccttggtccgggtgatcttctcctgccgccaggacgagggccgccgtgactggctgtgcttcaccagcaggtgcgagcagcggaccctggcaggctccccctgcccgtttttgccaccactgctgctgttgccgctgggccgctcccactggctggcgttagtgatgtggttgaagtagtacactcggcctggaggggagggcaggcaggaattcagctagg

SEQ ID NO: 13266 - DNA, 557 bp, Homo sapiens
  MAP TO AC008430.3; EXPRESSED IN BRAIN, SIGNAL = 1.7; EXPRESSED IN HELA, SIGNAL = 1.9; EXPRESSED IN LUNG, SIGNAL = 2.1
cccatcccatctgttacctgaatccacggccatctgtcattttctgcagctgtccacgcatttataagccccttcttattaagacgtgcatagtagggataccatttttggagtccaaaaagagctcggtgagtagaggaagctgtgatttgctggtttgatataattccaccttcaattcccagtgggcctgagcattctggaaacaaaaacaggaaaaaatatgaatgtattagaaacaatgcatatacaacatgtgtctgttcgatttgataggatttttttaaatgatttgaatttgcaccaccatgctatttactcttcatcccctttacagatctgttatcgatctctaaattaaggaaataattcttgcttctcatgaccctctcttccttctttgctttgaaagtagtcacttaatagacacttcccttctgcattatgattctggttctgtactgatagcttctggttgttgatcacgtcaacaaaagcataatgctcttaaaaggcttatctcatattttatattcccggagattagcatgcctcac

SEQ ID NO: 13267 - DNA, 597 bp, Homo sapiens
  MAP TO AC011462.3; EXPRESSED IN BRAIN, SIGNAL = 1.8; EXPRESSED IN ADULT LIVER, SIGNAL = 1.5; EXPRESSED IN LUNG, SIGNAL =   2
tgaagagtttgggcctatggtaatgagaatagtaatagctaccagttattgacttgccagccacttgattgagtcatttaacctcacaacagtcctatgggataggtgttaactgttttcatcccagtttttcagatggggaaactgagacacagaagttgtagtcagttatccaaagtgtcgcagtgagaaagtgctggagttggggctcagaccctgtgagtcaggccccagagttcactggggccacatgctcaaccaccatgccgcctgcctgccgccggggctgagccagcggaaacctgggtgctgcttctgatgcaggtggtctcctctgctctcttccccagcacccccccaggcagcagcagcagttttcatctctggatgacaagccccagttcccaggggcctcggcggagtttatagataagttggaattcatccagcccaacgtcatctctggaatccccatctaccgcgtcatggaccggcaaggccagatcatcaaccccagcgaggacccccacgtgagaggcggcctcccccacttcccgtgccccccacgcccaggccccttgcctgtctcctctctgg
